United States Patent Application Publication US 2009/0311680 A1 - sequence listing, part 4

SEQ ID NO: 13623 - DNA, 25 bp, Saccharomyces pastorianus
tgccagccagacgaatgccttgaca

SEQ ID NO: 13624 - DNA, 25 bp, Saccharomyces pastorianus
cttgacactctccataacattactt

SEQ ID NO: 13625 - DNA, 25 bp, Saccharomyces pastorianus
gctttcttatactcactcggatcaa

SEQ ID NO: 13626 - DNA, 25 bp, Saccharomyces pastorianus
ttatagtcacttcttggcactaccc

SEQ ID NO: 13627 - DNA, 25 bp, Saccharomyces pastorianus
aatgggtaccacatgttgcagatga

SEQ ID NO: 13628 - DNA, 25 bp, Saccharomyces pastorianus
gtttacattcattaccgactaccgt

SEQ ID NO: 13629 - DNA, 25 bp, Saccharomyces pastorianus
tgccgcctggatcttttttgttgtg

SEQ ID NO: 13630 - DNA, 25 bp, Saccharomyces pastorianus
gaacgactccgaaacgcagtactat

SEQ ID NO: 13631 - DNA, 25 bp, Saccharomyces pastorianus
accatttgtggtgttattgccgcct

SEQ ID NO: 13632 - DNA, 25 bp, Saccharomyces pastorianus
aacaacgctcgtttggtgtggatcg

SEQ ID NO: 13633 - DNA, 25 bp, Saccharomyces pastorianus
taaacccatccgtcatcttgctaat

SEQ ID NO: 13634 - DNA, 25 bp, Saccharomyces pastorianus
tgtacaggctgttcactcacatgca

SEQ ID NO: 13635 - DNA, 25 bp, Saccharomyces pastorianus
aagataggcctttcgtttattactg

SEQ ID NO: 13636 - DNA, 25 bp, Saccharomyces pastorianus
aaatttatgcttccggatcgtcacg

SEQ ID NO: 13637 - DNA, 25 bp, Saccharomyces pastorianus
tcttttgctacaacttcctctgtta

SEQ ID NO: 13638 - DNA, 25 bp, Saccharomyces pastorianus
gaatctgaaagtcctaatacggttt

SEQ ID NO: 13639 - DNA, 25 bp, Saccharomyces pastorianus
aatgtggcgccaccttctatcaatt

SEQ ID NO: 13640 - DNA, 25 bp, Saccharomyces pastorianus
attacagccgctaatgtagggccct

SEQ ID NO: 13641 - DNA, 25 bp, Saccharomyces pastorianus
agatcatcgttttggccattgttgg

SEQ ID NO: 13642 - DNA, 25 bp, Saccharomyces pastorianus
aaatggtgagagttgcagcccctcc

SEQ ID NO: 13643 - DNA, 25 bp, Saccharomyces pastorianus
gaggataccgcgtcattggtctata

SEQ ID NO: 13644 - DNA, 25 bp, Saccharomyces pastorianus
atcaagaagaacgtcgcccctaaga

SEQ ID NO: 13645 - DNA, 25 bp, Saccharomyces pastorianus
attccgtttttattagctgctagat

SEQ ID NO: 13646 - DNA, 25 bp, Saccharomyces pastorianus
ctatctgccgctacatctattattg

SEQ ID NO: 13647 - DNA, 25 bp, Saccharomyces pastorianus
agtttttatccgtccagatcatcgt

SEQ ID NO: 13648 - DNA, 25 bp, Saccharomyces pastorianus
ctatttgaaattgccagcccaccta

SEQ ID NO: 13649 - DNA, 25 bp, Saccharomyces pastorianus
cgtcgacttcaacactttggctcaa

SEQ ID NO: 13650 - DNA, 25 bp, Saccharomyces pastorianus
atgaatctatgttgactttcgaaac

SEQ ID NO: 13651 - DNA, 25 bp, Saccharomyces pastorianus
atcactggtgatctactgatcgacg

SEQ ID NO: 13652 - DNA, 25 bp, Saccharomyces pastorianus
actttggctcaaaactttactcaat

SEQ ID NO: 13653 - DNA, 25 bp, Saccharomyces pastorianus
gacggaaactcttactatgtgttca

SEQ ID NO: 13654 - DNA, 25 bp, Saccharomyces pastorianus
gaaaaattggtttctctgccattcc

SEQ ID NO: 13655 - DNA, 25 bp, Saccharomyces pastorianus
atcaccactttagatgctcaaccgg

SEQ ID NO: 13656 - DNA, 25 bp, Saccharomyces pastorianus
aacaagtcaattacaaggtgccaaa

SEQ ID NO: 13657 - DNA, 25 bp, Saccharomyces pastorianus
aaaagttcaacatcgcatcaccact

SEQ ID NO: 13658 - DNA, 25 bp, Saccharomyces pastorianus
ggtttctctgccattccaaaaagtt

SEQ ID NO: 13659 - DNA, 25 bp, Saccharomyces pastorianus
tctcccaacggtgatgtcttggtta

SEQ ID NO: 13660 - DNA, 25 bp, Saccharomyces pastorianus
tactctgccgttgactttgctggtg

SEQ ID NO: 13661 - DNA, 25 bp, Saccharomyces pastorianus
aagcaatccgccagcgtatctagct

SEQ ID NO: 13662 - DNA, 25 bp, Saccharomyces pastorianus
ggaaccagctttgaagtccatgatg

SEQ ID NO: 13663 - DNA, 25 bp, Saccharomyces pastorianus
tgcttctggttctgccaaggcttct

SEQ ID NO: 13664 - DNA, 25 bp, Saccharomyces pastorianus
aagccaccaagaccgtttctcaaca

SEQ ID NO: 13665 - DNA, 25 bp, Saccharomyces pastorianus
gaagctaagagttcctccgctgctg

SEQ ID NO: 13666 - DNA, 25 bp, Saccharomyces pastorianus
aaggcttctgccactgcttctggtt

SEQ ID NO: 13667 - DNA, 25 bp, Saccharomyces pastorianus
tgatgggtgaagcatccacttcctc

SEQ ID NO: 13668 - DNA, 25 bp, Saccharomyces pastorianus
gctccaacttccaccgaagctaaga

SEQ ID NO: 13669 - DNA, 25 bp, Saccharomyces pastorianus
acattggtgtggctttggcttccgc

SEQ ID NO: 13670 - DNA, 25 bp, Saccharomyces pastorianus
ccacttcttccactgaagctaagtc

SEQ ID NO: 13671 - DNA, 25 bp, Saccharomyces pastorianus
aaggcgtcatcgtcaaggttgtaga

SEQ ID NO: 13672 - DNA, 25 bp, Saccharomyces pastorianus
gtagaattaccttacggtgctcatg

SEQ ID NO: 13673 - DNA, 25 bp, Saccharomyces pastorianus
cggtgctcatggttattcagggttt

SEQ ID NO: 13674 - DNA, 25 bp, Saccharomyces pastorianus
gtgacactgtccaattcgccgaata

SEQ ID NO: 13675 - DNA, 25 bp, Saccharomyces pastorianus
gtttcgtcagacaggaattggccaa

SEQ ID NO: 13676 - DNA, 25 bp, Saccharomyces pastorianus
ttatgaactatctccacaagccgtg

SEQ ID NO: 13677 - DNA, 25 bp, Saccharomyces pastorianus
ggcctaactctactaaaactttgcg

SEQ ID NO: 13678 - DNA, 25 bp, Saccharomyces pastorianus
gaccagagctgtaccaaatagacta

SEQ ID NO: 13679 - DNA, 25 bp, Saccharomyces pastorianus
acaagccgtgtctagtttcgtcaga

SEQ ID NO: 13680 - DNA, 25 bp, Saccharomyces pastorianus
ctagatcgccattatagacctgata

SEQ ID NO: 13681 - DNA, 25 bp, Saccharomyces pastorianus
aactatcgccacacgcattgatgag

SEQ ID NO: 13682 - DNA, 25 bp, Saccharomyces pastorianus
cggccactgggaattcactattgca

SEQ ID NO: 13683 - DNA, 25 bp, Saccharomyces pastorianus
gtttcaagatgcttacggccagact

SEQ ID NO: 13684 - DNA, 25 bp, Saccharomyces pastorianus
aatcgccgagttactaccgaaggat

SEQ ID NO: 13685 - DNA, 25 bp, Saccharomyces pastorianus
ataacaccatccaaaatcgccgagt

SEQ ID NO: 13686 - DNA, 25 bp, Saccharomyces pastorianus
gaagattctctgtccaagctgttaa

SEQ ID NO: 13687 - DNA, 25 bp, Saccharomyces pastorianus
aagatgcactaaaccgtcacctagg

SEQ ID NO: 13688 - DNA, 25 bp, Saccharomyces pastorianus
gtgtgcctgttattccatccaagga

SEQ ID NO: 13689 - DNA, 25 bp, Saccharomyces pastorianus
gggttctccagaagtccaggtgtcc

SEQ ID NO: 13690 - DNA, 25 bp, Saccharomyces pastorianus
atgtgggctacgacgcatggcaaga

SEQ ID NO: 13691 - DNA, 25 bp, Saccharomyces pastorianus
taaatgtctcccaagattccatgtg

SEQ ID NO: 13692 - DNA, 25 bp, Saccharomyces pastorianus
caggtgtccccgatgttattgtaga

SEQ ID NO: 13693 - DNA, 25 bp, Saccharomyces pastorianus
gcatcaacgggctacaaggctttga

SEQ ID NO: 13694 - DNA, 25 bp, Saccharomyces pastorianus
gattggtattgtgggcatcgacgtt

SEQ ID NO: 13695 - DNA, 25 bp, Saccharomyces pastorianus
ccgtgggccacaagtcttcgaaaga

SEQ ID NO: 13696 - DNA, 25 bp, Saccharomyces pastorianus
ggttcgatcgacattagctgcaaaa

SEQ ID NO: 13697 - DNA, 25 bp, Saccharomyces pastorianus
cttatcatcatgtccctatatcact

SEQ ID NO: 13698 - DNA, 25 bp, Saccharomyces pastorianus
gatgatgttgtaactccgactttga

SEQ ID NO: 13699 - DNA, 25 bp, Saccharomyces pastorianus
aggtgaattacagctccgtgggcca

SEQ ID NO: 13700 - DNA, 25 bp, Saccharomyces pastorianus
gcgtgccaaggcctcaaaatttttc

SEQ ID NO: 13701 - DNA, 25 bp, Saccharomyces pastorianus
gacgagaccgcaaaggccattgatc

SEQ ID NO: 13702 - DNA, 25 bp, Saccharomyces pastorianus
aagggccgtataaatgtcattgatc

SEQ ID NO: 13703 - DNA, 25 bp, Saccharomyces pastorianus
gacgttgatgcggttcgatcgacat

SEQ ID NO: 13704 - DNA, 25 bp, Saccharomyces pastorianus
gagcatattgtatgccacggcggaa

SEQ ID NO: 13705 - DNA, 25 bp, Saccharomyces pastorianus
ggaggcccaccaataagacactctt

SEQ ID NO: 13706 - DNA, 25 bp, Saccharomyces pastorianus
cgcgatattgagatcctggtccata

SEQ ID NO: 13707 - DNA, 25 bp, Saccharomyces pastorianus
gctacccaaggtcagttaaatgcga

SEQ ID NO: 13708 - DNA, 25 bp, Saccharomyces pastorianus
atgccacggcggaaggatttgaaat

SEQ ID NO: 13709 - DNA, 25 bp, Saccharomyces pastorianus
tgcgatgcaagctgaattatccaat

SEQ ID NO: 13710 - DNA, 25 bp, Saccharomyces pastorianus
aagcaactctataccaggaggccca

SEQ ID NO: 13711 - DNA, 25 bp, Saccharomyces pastorianus
atgatgagactatcacgggccgtgg

SEQ ID NO: 13712 - DNA, 25 bp, Saccharomyces pastorianus
ccatccaaccctatcagtacaagaa

SEQ ID NO: 13713 - DNA, 25 bp, Saccharomyces pastorianus
gaatggcggtgctttattacggttt

SEQ ID NO: 13714 - DNA, 25 bp, Saccharomyces pastorianus
taggaaaaccagtgctacccaaggt

SEQ ID NO: 13715 - DNA, 25 bp, Saccharomyces pastorianus
gaagccggccatgctgtttgtggtt

SEQ ID NO: 13716 - DNA, 25 bp, Saccharomyces pastorianus
agaacctggacaaagtcgaccttgt

SEQ ID NO: 13717 - DNA, 25 bp, Saccharomyces pastorianus
gaccttgtcgccaaagagctgctgc

SEQ ID NO: 13718 - DNA, 25 bp, Saccharomyces pastorianus
aaggtgctctgggttacgctcaata

SEQ ID NO: 13719 - DNA, 25 bp, Saccharomyces pastorianus
aggcatgtcgtccaagatcggctat

SEQ ID NO: 13720 - DNA, 25 bp, Saccharomyces pastorianus
gttacgctcaatacttgccggcaga

SEQ ID NO: 13721 - DNA, 25 bp, Saccharomyces pastorianus
ccttggtggtcgtgtctctgaagaa

SEQ ID NO: 13722 - DNA, 25 bp, Saccharomyces pastorianus
gatcggctatctatcattcgaccaa

SEQ ID NO: 13723 - DNA, 25 bp, Saccharomyces pastorianus
caggatgatcatggcccttggtggt

SEQ ID NO: 13724 - DNA, 25 bp, Saccharomyces pastorianus
gaaatacgctgatccacttttgaaa

SEQ ID NO: 13725 - DNA, 25 bp, Saccharomyces pastorianus
aatggtcacgtctttaggcatgtcg

SEQ ID NO: 13726 - DNA, 25 bp, Saccharomyces pastorianus
ggccagcatcagaacctcgttgacg

SEQ ID NO: 13727 - DNA, 25 bp, Saccharomyces pastorianus
ttccagcaagacgtggcccaggtgc

SEQ ID NO: 13728 - DNA, 25 bp, Saccharomyces pastorianus
gcgagctgtctagacggcagttgac

SEQ ID NO: 13729 - DNA, 25 bp, Saccharomyces pastorianus
gcaactgcagcgtttccaagaggaa

SEQ ID NO: 13730 - DNA, 25 bp, Saccharomyces pastorianus
gagaccacgtgctcggcgcatgtca

SEQ ID NO: 13731 - DNA, 25 bp, Saccharomyces pastorianus
gcaccgaatggatgcgttccagcaa

SEQ ID NO: 13732 - DNA, 25 bp, Saccharomyces pastorianus
gaacgcttgagcacgtgctgaccgt

SEQ ID NO: 13733 - DNA, 25 bp, Saccharomyces pastorianus
taccacgagcgcaagggcgagctgt

SEQ ID NO: 13734 - DNA, 25 bp, Saccharomyces pastorianus
tgcagcagcagattcgcgcggccga

SEQ ID NO: 13735 - DNA, 25 bp, Saccharomyces pastorianus
ggcagttgacactggcggctcagtc

SEQ ID NO: 13736 - DNA, 25 bp, Saccharomyces pastorianus
gaggaaatgcgccacttgcacggcc

SEQ ID NO: 13737 - DNA, 25 bp, Saccharomyces pastorianus
gaagcaagcgaagcaaactcctact

SEQ ID NO: 13738 - DNA, 25 bp, Saccharomyces pastorianus
attgaagttgtacacggacgaggcc

SEQ ID NO: 13739 - DNA, 25 bp, Saccharomyces pastorianus
tgtacacggacgaggccaacgggtt

SEQ ID NO: 13740 - DNA, 25 bp, Saccharomyces pastorianus
tacttccgccagacaggctggtcac

SEQ ID NO: 13741 - DNA, 25 bp, Saccharomyces pastorianus
tcgtcgagctcggtattgaagttgt

SEQ ID NO: 13742 - DNA, 25 bp, Saccharomyces pastorianus
gtgttgtttctatccgccgggttca

SEQ ID NO: 13743 - DNA, 25 bp, Saccharomyces pastorianus
gactcgcttgtcgtgttgtttctat

SEQ ID NO: 13744 - DNA, 25 bp, Saccharomyces pastorianus
aggcgcaatctgtcaaggagaagca

SEQ ID NO: 13745 - DNA, 25 bp, Saccharomyces pastorianus
gggttcattttctccgtcataggcc

SEQ ID NO: 13746 - DNA, 25 bp, Saccharomyces pastorianus
aacgggttcagggtcgactcgcttg

SEQ ID NO: 13747 - DNA, 25 bp, Saccharomyces pastorianus
gaagcaaactcctacttccgccaga

SEQ ID NO: 13748 - DNA, 25 bp, Saccharomyces pastorianus
ggtgcggacatcaataaggctgcca

SEQ ID NO: 13749 - DNA, 25 bp, Saccharomyces pastorianus
tttgcggccatcaaggaaaccatct

SEQ ID NO: 13750 - DNA, 25 bp, Saccharomyces pastorianus
accgtcatcgatgtgggctcggaca

SEQ ID NO: 13751 - DNA, 25 bp, Saccharomyces pastorianus
tggtgctcttcgacaacatcgtcaa

SEQ ID NO: 13752 - DNA, 25 bp, Saccharomyces pastorianus
tctacttgatggattctacccctta

SEQ ID NO: 13753 - DNA, 25 bp, Saccharomyces pastorianus
gagattcgtccagttgaacaggtcg

SEQ ID NO: 13754 - DNA, 25 bp, Saccharomyces pastorianus
tacttcccggactacacaggtggtg

SEQ ID NO: 13755 - DNA, 25 bp, Saccharomyces pastorianus
atctgtggtgctcttcctaaacaaa

SEQ ID NO: 13756 - DNA, 25 bp, Saccharomyces pastorianus
gctacagacacctccaacattaaat

SEQ ID NO: 13757 - DNA, 25 bp, Saccharomyces pastorianus
acgtcactttggtcatcttctgcgt

SEQ ID NO: 13758 - DNA, 25 bp, Saccharomyces pastorianus
atcgtcaacagcagatggttcgccc

SEQ ID NO: 13759 - DNA, 25 bp, Saccharomyces pastorianus
aagagctatcagagacggtgtcatt

SEQ ID NO: 13760 - DNA, 25 bp, Saccharomyces pastorianus
gatccccaacaagtatttgatgaga

SEQ ID NO: 13761 - DNA, 25 bp, Saccharomyces pastorianus
tatgcaaaaatctcttctgccttac

SEQ ID NO: 13762 - DNA, 25 bp, Saccharomyces pastorianus
gatgatatgcttgatggcgatctat

SEQ ID NO: 13763 - DNA, 25 bp, Saccharomyces pastorianus
gacgggttcatcgagaccacagaat

SEQ ID NO: 13764 - DNA, 25 bp, Saccharomyces pastorianus
acttaccaactttgtgtcagattaa

SEQ ID NO: 13765 - DNA, 25 bp, Saccharomyces pastorianus
tatcatttaaccaagaccgtcaaac

SEQ ID NO: 13766 - DNA, 25 bp, Saccharomyces pastorianus
tttacgacagtgaagatccccaaca

SEQ ID NO: 13767 - DNA, 25 bp, Saccharomyces pastorianus
ggcgatctattggatgacatgtcag

SEQ ID NO: 13768 - DNA, 25 bp, Saccharomyces pastorianus
gaattatcatttttccaccaatcga

SEQ ID NO: 13769 - DNA, 25 bp, Saccharomyces pastorianus
gaatacatggtttcaagagctatca

SEQ ID NO: 13770 - DNA, 25 bp, Saccharomyces pastorianus
ttgacccttgatgatgactccatag

SEQ ID NO: 13771 - DNA, 25 bp, Saccharomyces pastorianus
aagatacctctgaagccaacgcggt

SEQ ID NO: 13772 - DNA, 25 bp, Saccharomyces pastorianus
gaaatccgtgcctttgacaaactgt

SEQ ID NO: 13773 - DNA, 25 bp, Saccharomyces pastorianus
attatgtgctggatattctccccgg

SEQ ID NO: 13774 - DNA, 25 bp, Saccharomyces pastorianus
taactgtacccaagcgtgaactcga

SEQ ID NO: 13775 - DNA, 25 bp, Saccharomyces pastorianus
caagagccccagattaagcctaata

SEQ ID NO: 13776 - DNA, 25 bp, Saccharomyces pastorianus
agggccgatttgatgcttgttatgc

SEQ ID NO: 13777 - DNA, 25 bp, Saccharomyces pastorianus
atgtgctattaattcgtcccatcct

SEQ ID NO: 13778 - DNA, 25 bp, Saccharomyces pastorianus
aacgcggtcacctttgacacgacat

SEQ ID NO: 13779 - DNA, 25 bp, Saccharomyces pastorianus
gaactcgagataaacctaccgccat

SEQ ID NO: 13780 - DNA, 25 bp, Saccharomyces pastorianus
gacacgacattctctgacttcaaag

SEQ ID NO: 13781 - DNA, 25 bp, Saccharomyces pastorianus
ccaaatacgggtacggctgtgctgt

SEQ ID NO: 13782 - DNA, 25 bp, Saccharomyces pastorianus
gtgctgtggtatcttattctgccga

SEQ ID NO: 13783 - DNA, 25 bp, Saccharomyces pastorianus
cttggctgccggttggacaattgac

SEQ ID NO: 13784 - DNA, 25 bp, Saccharomyces pastorianus
cgcagctactgcattggttggttca

SEQ ID NO: 13785 - DNA, 25 bp, Saccharomyces pastorianus
gccactgtggttcttcttggtacaa

SEQ ID NO: 13786 - DNA, 25 bp, Saccharomyces pastorianus
tattctgccgatgtttccaacgagc

SEQ ID NO: 13787 - DNA, 25 bp, Saccharomyces pastorianus
gttgagaagagtggtgcgcacccat

SEQ ID NO: 13788 - DNA, 25 bp, Saccharomyces pastorianus
caaccattgcaggattgtgtgtcat

SEQ ID NO: 13789 - DNA, 25 bp, Saccharomyces pastorianus
aaaactgcttatttccttggctgcc

SEQ ID NO: 13790 - DNA, 25 bp, Saccharomyces pastorianus
gtaatgactaacacacctgccaaat

SEQ ID NO: 13791 - DNA, 25 bp, Saccharomyces pastorianus
aggccctgcctttgttttgttgatg

SEQ ID NO: 13792 - DNA, 25 bp, Saccharomyces pastorianus
cgcggtacttcccataacaaaactg

SEQ ID NO: 13793 - DNA, 25 bp, Saccharomyces pastorianus
attggaggatgtctcgcggtacttc

SEQ ID NO: 13794 - DNA, 25 bp, Saccharomyces pastorianus
ttccgctacgtctttgagttccaag

SEQ ID NO: 13795 - DNA, 25 bp, Saccharomyces pastorianus
acaatggctacacggtttctggacc

SEQ ID NO: 13796 - DNA, 25 bp, Saccharomyces pastorianus
gaatgatcattcaagctcagcagta

SEQ ID NO: 13797 - DNA, 25 bp, Saccharomyces pastorianus
tggacaatgcaatcaacaacccctc

SEQ ID NO: 13798 - DNA, 25 bp, Saccharomyces pastorianus
tcgccaaacatcttcatcatcacaa

SEQ ID NO: 13799 - DNA, 25 bp, Saccharomyces pastorianus
attcaaccacgagagttggccagta

SEQ ID NO: 13800 - DNA, 25 bp, Saccharomyces pastorianus
cgcaattcagacagggcgacagatt

SEQ ID NO: 13801 - DNA, 25 bp, Saccharomyces pastorianus
agcagtatccgtcccaacagaaaag

SEQ ID NO: 13802 - DNA, 25 bp, Saccharomyces pastorianus
gatagcatatcatcgtcttcttccg

SEQ ID NO: 13803 - DNA, 25 bp, Saccharomyces pastorianus
aacggtgtcttcaaactaggcgatg

SEQ ID NO: 13804 - DNA, 25 bp, Saccharomyces pastorianus
tattacgtcgtctactaggtgttaa

SEQ ID NO: 13805 - DNA, 25 bp, Saccharomyces pastorianus
tagagccgatcgtcttgttggccaa

SEQ ID NO: 13806 - DNA, 25 bp, Saccharomyces pastorianus
ggtcaatatcggttctaccgctaca

SEQ ID NO: 13807 - DNA, 25 bp, Saccharomyces pastorianus
aattcgctgttcctggtggtttaat

SEQ ID NO: 13808 - DNA, 25 bp, Saccharomyces pastorianus
gttgaccctactttatgtagagccg

SEQ ID NO: 13809 - DNA, 25 bp, Saccharomyces pastorianus
gacatcacctgcttgtactgaagtt

SEQ ID NO: 13810 - DNA, 25 bp, Saccharomyces pastorianus
caagtcgttggtgctactggtcatt

SEQ ID NO: 13811 - DNA, 25 bp, Saccharomyces pastorianus
aacatcgtttccttattcgctgaac

SEQ ID NO: 13812 - DNA, 25 bp, Saccharomyces pastorianus
gtgttgccggtggatctatcctaaa

SEQ ID NO: 13813 - DNA, 25 bp, Saccharomyces pastorianus
atcaactatttcttattacgtcgtc

SEQ ID NO: 13814 - DNA, 25 bp, Saccharomyces pastorianus
gattcacacttacaggcaaacctca

SEQ ID NO: 13815 - DNA, 25 bp, Saccharomyces pastorianus
gttctctgggttttactcgattgtg

SEQ ID NO: 13816 - DNA, 25 bp, Saccharomyces pastorianus
acagcatcccattcggtattttcag

SEQ ID NO: 13817 - DNA, 25 bp, Saccharomyces pastorianus
caagaactggactcattggccgatt

SEQ ID NO: 13818 - DNA, 25 bp, Saccharomyces pastorianus
gattctgtcattcttcgttctatgt

SEQ ID NO: 13819 - DNA, 25 bp, Saccharomyces pastorianus
agttgcctaaggattcttccaccgg

SEQ ID NO: 13820 - DNA, 25 bp, Saccharomyces pastorianus
attggccgatttagtctcctttggt

SEQ ID NO: 13821 - DNA, 25 bp, Saccharomyces pastorianus
tctattgcgtttgccattggtttcc

SEQ ID NO: 13822 - DNA, 25 bp, Saccharomyces pastorianus
agcaagatttaacgtcaccgtcgcc

SEQ ID NO: 13823 - DNA, 25 bp, Saccharomyces pastorianus
atagatcgtctctgatgggtcaaga

SEQ ID NO: 13824 - DNA, 25 bp, Saccharomyces pastorianus
ggtttccaaaccacacttgatgtca

SEQ ID NO: 13825 - DNA, 25 bp, Saccharomyces pastorianus
tgaacctcagcaacaagcatccgat

SEQ ID NO: 13826 - DNA, 25 bp, Saccharomyces pastorianus
gaatatggcttggttgactcctcca

SEQ ID NO: 13827 - DNA, 25 bp, Saccharomyces pastorianus
atggaagtaactgcaccacctgact

SEQ ID NO: 13828 - DNA, 25 bp, Saccharomyces pastorianus
gtgcgtcgcgtcaattgttcgatac

SEQ ID NO: 13829 - DNA, 25 bp, Saccharomyces pastorianus
gatgacatgggcgacggttacactc

SEQ ID NO: 13830 - DNA, 25 bp, Saccharomyces pastorianus
agttgccacctcacctggaaaacgt

SEQ ID NO: 13831 - DNA, 25 bp, Saccharomyces pastorianus
tgagcgctcggtcaaggatcgcatt

SEQ ID NO: 13832 - DNA, 25 bp, Saccharomyces pastorianus
ggttacactcgtttccacgatgaaa

SEQ ID NO: 13833 - DNA, 25 bp, Saccharomyces pastorianus
gaaccatctggcgactagcagtatt

SEQ ID NO: 13834 - DNA, 25 bp, Saccharomyces pastorianus
gaatacacccaagatatacctgcag

SEQ ID NO: 13835 - DNA, 25 bp, Saccharomyces pastorianus
tttagtgattatttgcccaccgcaa

SEQ ID NO: 13836 - DNA, 25 bp, Saccharomyces pastorianus
gtcgactagccaacctgatcgatta

SEQ ID NO: 13837 - DNA, 25 bp, Saccharomyces pastorianus
gtggtcccggcgatagcattagtac

SEQ ID NO: 13838 - DNA, 25 bp, Saccharomyces pastorianus
gaacagattctgtctacggtggtag

SEQ ID NO: 13839 - DNA, 25 bp, Saccharomyces pastorianus
aggtggcacacggtagtcgactagc

SEQ ID NO: 13840 - DNA, 25 bp, Saccharomyces pastorianus
atatcgggcaattgttggcgtttga

SEQ ID NO: 13841 - DNA, 25 bp, Saccharomyces pastorianus
gagaaatagcacaaccttcctcgag

SEQ ID NO: 13842 - DNA, 25 bp, Saccharomyces pastorianus
gagtacccaggactcagctggacaa

SEQ ID NO: 13843 - DNA, 25 bp, Saccharomyces pastorianus
ggtagaggataagccactgctatct

SEQ ID NO: 13844 - DNA, 25 bp, Saccharomyces pastorianus
aggtacagcaatagcggtggtcccg

SEQ ID NO: 13845 - DNA, 25 bp, Saccharomyces pastorianus
agacggtgcgtccttgaatatcaaa

SEQ ID NO: 13846 - DNA, 25 bp, Saccharomyces pastorianus
agggttcttacccaagatggccgag

SEQ ID NO: 13847 - DNA, 25 bp, Saccharomyces pastorianus
ttacgtgctgtacccacagaagagt

SEQ ID NO: 13848 - DNA, 25 bp, Saccharomyces pastorianus
ggctgtcggtgccttgatcgtatac

SEQ ID NO: 13849 - DNA, 25 bp, Saccharomyces pastorianus
agcaccaaatggatctcgcagattc

SEQ ID NO: 13850 - DNA, 25 bp, Saccharomyces pastorianus
gagtttgccaccaggactctggaga

SEQ ID NO: 13851 - DNA, 25 bp, Saccharomyces pastorianus
aattgtgctgattggcgattccgga

SEQ ID NO: 13852 - DNA, 25 bp, Saccharomyces pastorianus
taaccactggttatcggagcttagg

SEQ ID NO: 13853 - DNA, 25 bp, Saccharomyces pastorianus
gttaccggaaatgccaatggcgcat

SEQ ID NO: 13854 - DNA, 25 bp, Saccharomyces pastorianus
ctcgcagattctggtgttaccggaa

SEQ ID NO: 13855 - DNA, 25 bp, Saccharomyces pastorianus
aatggcgcatctgctccaaatggtc

SEQ ID NO: 13856 - DNA, 25 bp, Saccharomyces pastorianus
gatgacaacgttgcggttggtctta

SEQ ID NO: 13857 - DNA, 25 bp, Saccharomyces pastorianus
catggattccaagtccactattggg

SEQ ID NO: 13858 - DNA, 25 bp, Saccharomyces pastorianus
taacgcctaccaattcattcagcaa

SEQ ID NO: 13859 - DNA, 25 bp, Saccharomyces pastorianus
attattcattaagtcccatccagga

SEQ ID NO: 13860 - DNA, 25 bp, Saccharomyces pastorianus
gcctttgcgacgtggttccagaaat

SEQ ID NO: 13861 - DNA, 25 bp, Saccharomyces pastorianus
aagactgtcacctttttcaataaca

SEQ ID NO: 13862 - DNA, 25 bp, Saccharomyces pastorianus
aatatcaaatgcatacctctcacca

SEQ ID NO: 13863 - DNA, 25 bp, Saccharomyces pastorianus
aactatgtaatctcacccactttac

SEQ ID NO: 13864 - DNA, 25 bp, Saccharomyces pastorianus
tgtatctccattttcatctttgtcc

SEQ ID NO: 13865 - DNA, 25 bp, Saccharomyces pastorianus
tggtacattgaaatcgcctttgcga

SEQ ID NO: 13866 - DNA, 25 bp, Saccharomyces pastorianus
tttgtcctcgtccttcagaagtaca

SEQ ID NO: 13867 - DNA, 25 bp, Saccharomyces pastorianus
gataacaactcgctctcacggaagt

SEQ ID NO: 13868 - DNA, 25 bp, Saccharomyces pastorianus
agagatgatcctaaccgtggtacat

SEQ ID NO: 13869 - DNA, 25 bp, Saccharomyces pastorianus
gataccatgaggacccggagctggc

SEQ ID NO: 13870 - DNA, 25 bp, Saccharomyces pastorianus
gcccagcgacaggaagtaccggtta

SEQ ID NO: 13871 - DNA, 25 bp, Saccharomyces pastorianus
gtcggcagctgcaggattacggcaa

SEQ ID NO: 13872 - DNA, 25 bp, Saccharomyces pastorianus
gtgccgatgcactgaagaccaagga

SEQ ID NO: 13873 - DNA, 25 bp, Saccharomyces pastorianus
aaacagatgggtgccgccgagctta

SEQ ID NO: 13874 - DNA, 25 bp, Saccharomyces pastorianus
gcagcagtaggagccacttcgccgt

SEQ ID NO: 13875 - DNA, 25 bp, Saccharomyces pastorianus
tgaaacggaagcatgccacgcccag

SEQ ID NO: 13876 - DNA, 25 bp, Saccharomyces pastorianus
gagcttaatcgctggttgcaccaac

SEQ ID NO: 13877 - DNA, 25 bp, Saccharomyces pastorianus
aacagcctgaattggacacgaacga

SEQ ID NO: 13878 - DNA, 25 bp, Saccharomyces pastorianus
ggattacggcaacacggacaccaac

SEQ ID NO: 13879 - DNA, 25 bp, Saccharomyces pastorianus
gagctggcgttcgaggacccgaaca

SEQ ID NO: 13880 - DNA, 25 bp, Saccharomyces pastorianus
ggtaaatccaccctattgaagatca

SEQ ID NO: 13881 - DNA, 25 bp, Saccharomyces pastorianus
ctttgccctgttggctttggaacaa

SEQ ID NO: 13882 - DNA, 25 bp, Saccharomyces pastorianus
aaatggccaccctatcagaaggtca

SEQ ID NO: 13883 - DNA, 25 bp, Saccharomyces pastorianus
gtcgtctcgcatgatttcagactac

SEQ ID NO: 13884 - DNA, 25 bp, Saccharomyces pastorianus
aagtaccctagcatttcacaagatt

SEQ ID NO: 13885 - DNA, 25 bp, Saccharomyces pastorianus
atccggccgtgtttccagacataca

SEQ ID NO: 13886 - DNA, 25 bp, Saccharomyces pastorianus
atgggacggctctatcttgcaatat

SEQ ID NO: 13887 - DNA, 25 bp, Saccharomyces pastorianus
gaattcgttcgtgacaagtacccta

SEQ ID NO: 13888 - DNA, 25 bp, Saccharomyces pastorianus
gaccaagtctgccttagaattcgtt

SEQ ID NO: 13889 - DNA, 25 bp, Saccharomyces pastorianus
aggtgtctactcacaacattcgcaa

SEQ ID NO: 13890 - DNA, 25 bp, Saccharomyces pastorianus
accaaacgtcctattgctggatgaa

SEQ ID NO: 13891 - DNA, 25 bp, Saccharomyces pastorianus
gcaacagttctccatactgaaggat

SEQ ID NO: 13892 - DNA, 25 bp, Saccharomyces pastorianus
gtgggcatgggtcatgttatccatt

SEQ ID NO: 13893 - DNA, 25 bp, Saccharomyces pastorianus
agaaacactttctatccatcttcct

SEQ ID NO: 13894 - DNA, 25 bp, Saccharomyces pastorianus
gctgatttgtttgacggcatcacat

SEQ ID NO: 13895 - DNA, 25 bp, Saccharomyces pastorianus
gattcttcgagactgccaaattaca

SEQ ID NO: 13896 - DNA, 25 bp, Saccharomyces pastorianus
aagccagatccaagattcttcgaga

SEQ ID NO: 13897 - DNA, 25 bp, Saccharomyces pastorianus
atatccttgagatccccttggtaat

SEQ ID NO: 13898 - DNA, 25 bp, Saccharomyces pastorianus
gttcatagatgattccttacccttg

SEQ ID NO: 13899 - DNA, 25 bp, Saccharomyces pastorianus
gaaagtaatgtggaggccgccttaa

SEQ ID NO: 13900 - DNA, 25 bp, Saccharomyces pastorianus
gccaacgcttggtttatcgatgata

SEQ ID NO: 13901 - DNA, 25 bp, Saccharomyces pastorianus
ctatccatcttccttcgcaataaag

SEQ ID NO: 13902 - DNA, 25 bp, Saccharomyces pastorianus
gacacaacacgccaaaatctgatcg

SEQ ID NO: 13903 - DNA, 25 bp, Saccharomyces pastorianus
tccatggaattcgagttcaggctgt

SEQ ID NO: 13904 - DNA, 25 bp, Saccharomyces pastorianus
tgtgcaccatttttcccactgaaaa

SEQ ID NO: 13905 - DNA, 25 bp, Saccharomyces pastorianus
gaggaagccacaagcgacacaacac

SEQ ID NO: 13906 - DNA, 25 bp, Saccharomyces pastorianus
gataaactgtgcaccatttttccca

SEQ ID NO: 13907 - DNA, 25 bp, Saccharomyces pastorianus
gaaactatttgacgagactcatttt

SEQ ID NO: 13908 - DNA, 25 bp, Saccharomyces pastorianus
gagactgtatactggatgtttctaa

SEQ ID NO: 13909 - DNA, 25 bp, Saccharomyces pastorianus
gatgtactattataagggcgacggt

SEQ ID NO: 13910 - DNA, 25 bp, Saccharomyces pastorianus
gacgatttcttcttacattataggc

SEQ ID NO: 13911 - DNA, 25 bp, Saccharomyces pastorianus
aaatgcttaaattcctgatgtacta

SEQ ID NO: 13912 - DNA, 25 bp, Saccharomyces pastorianus
taggctattacaaattttccccatt

SEQ ID NO: 13913 - DNA, 25 bp, Saccharomyces pastorianus
caagatcgtcgaattttgttaccca

SEQ ID NO: 13914 - DNA, 25 bp, Saccharomyces pastorianus
aatttcgatatcttcaacgctccgt

SEQ ID NO: 13915 - DNA, 25 bp, Saccharomyces pastorianus
gaacgtcaattcaaatagcccttta

SEQ ID NO: 13916 - DNA, 25 bp, Saccharomyces pastorianus
tcacacttcgctgttgtcacaacaa

SEQ ID NO: 13917 - DNA, 25 bp, Saccharomyces pastorianus
tcaccgggtatttcaagaccgtctt

SEQ ID NO: 13918 - DNA, 25 bp, Saccharomyces pastorianus
tcggtagttctacatcacccatgaa

SEQ ID NO: 13919 - DNA, 25 bp, Saccharomyces pastorianus
aacgctccgtcagattcaccgggta

SEQ ID NO: 13920 - DNA, 25 bp, Saccharomyces pastorianus
atatgacgcgaattcgagtgctggc

SEQ ID NO: 13921 - DNA, 25 bp, Saccharomyces pastorianus
aacaaaacctgctatccaactcttt

SEQ ID NO: 13922 - DNA, 25 bp, Saccharomyces pastorianus
catcgttcatggctgcatctttaca

SEQ ID NO: 13923 - DNA, 25 bp, Saccharomyces pastorianus
gtcacgtaatgcatctcattcctca

SEQ ID NO: 13924 - DNA, 25 bp, Saccharomyces pastorianus
gagagcatttctcagtgcttgacca

SEQ ID NO: 13925 - DNA, 25 bp, Saccharomyces pastorianus
agtgcttgaccagcttgtcacagac

SEQ ID NO: 13926 - DNA, 25 bp, Saccharomyces pastorianus
gatgaagcaaaccttgaagcccgtg

SEQ ID NO: 13927 - DNA, 25 bp, Saccharomyces pastorianus
acaagatactgtcgaccggttcctt

SEQ ID NO: 13928 - DNA, 25 bp, Saccharomyces pastorianus
tgaagcccgtgaagaagcgcctttt

SEQ ID NO: 13929 - DNA, 25 bp, Saccharomyces pastorianus
cagtgcttgataactcgcctggcaa

SEQ ID NO: 13930 - DNA, 25 bp, Saccharomyces pastorianus
aggttccgggatcttgctcaaaata

SEQ ID NO: 13931 - DNA, 25 bp, Saccharomyces pastorianus
ttagaaagcatgcatcaccgattaa

SEQ ID NO: 13932 - DNA, 25 bp, Saccharomyces pastorianus
aaagttggccaatctacgactagag

SEQ ID NO: 13933 - DNA, 25 bp, Saccharomyces pastorianus
gaagcgccttttcgtggacacagac

SEQ ID NO: 13934 - DNA, 25 bp, Saccharomyces pastorianus
catacctgacttctactggcaatat

SEQ ID NO: 13935 - DNA, 25 bp, Saccharomyces pastorianus
tttatgacgctgaagagtaccacca

SEQ ID NO: 13936 - DNA, 25 bp, Saccharomyces pastorianus
ctttttcagaattcatgaccccacc

SEQ ID NO: 13937 - DNA, 25 bp, Saccharomyces pastorianus
gcagcggattatttgctcattcaga

SEQ ID NO: 13938 - DNA, 25 bp, Saccharomyces pastorianus
gagtaccaccagttatacttggata

SEQ ID NO: 13939 - DNA, 25 bp, Saccharomyces pastorianus
gccgaagttctacaagtatcctata

SEQ ID NO: 13940 - DNA, 25 bp, Saccharomyces pastorianus
tcatcgctcatctctaaaacaatta

SEQ ID NO: 13941 - DNA, 25 bp, Saccharomyces pastorianus
aaaggattctgctcacggtgtatct

SEQ ID NO: 13942 - DNA, 25 bp, Saccharomyces pastorianus
taccctggtcgaacccatcaaaaat

SEQ ID NO: 13943 - DNA, 25 bp, Saccharomyces pastorianus
ggtgacaccgattttgccgaagttc

SEQ ID NO: 13944 - DNA, 25 bp, Saccharomyces pastorianus
taataagattgctaccctggtcgaa

SEQ ID NO: 13945 - DNA, 25 bp, Saccharomyces pastorianus
aaggaacgcagtatcgcagcggatt

SEQ ID NO: 13946 - DNA, 25 bp, Saccharomyces pastorianus
gaagccgttgctaaattccacttgg

SEQ ID NO: 13947 - DNA, 25 bp, Saccharomyces pastorianus
attggtcaagtctttgtcaccacca

SEQ ID NO: 13948 - DNA, 25 bp, Saccharomyces pastorianus
caccaccactggttgcagagacatt

SEQ ID NO: 13949 - DNA, 25 bp, Saccharomyces pastorianus
ggaagatgcttctcatattggtcaa

SEQ ID NO: 13950 - DNA, 25 bp, Saccharomyces pastorianus
gcccgtgttttggttactgaaatcg

SEQ ID NO: 13951 - DNA, 25 bp, Saccharomyces pastorianus
gaaggttaccaagtcatcaccatgg

SEQ ID NO: 13952 - DNA, 25 bp, Saccharomyces pastorianus
gtgttcatgtcctaccaaagatttt

SEQ ID NO: 13953 - DNA, 25 bp, Saccharomyces pastorianus
tccacttgggtaacttgggtgtcaa

SEQ ID NO: 13954 - DNA, 25 bp, Saccharomyces pastorianus
tgttctttctctaaccaagttttgg

SEQ ID NO: 13955 - DNA, 25 bp, Saccharomyces pastorianus
gtccattcggagttggtgttcatgt

SEQ ID NO: 13956 - DNA, 25 bp, Saccharomyces pastorianus
gctattgtctgtaacatcggtcatt

SEQ ID NO: 13957 - DNA, 25 bp, Saccharomyces pastorianus
accttcgtcgcctgtattatcagat

SEQ ID NO: 13958 - DNA, 25 bp, Saccharomyces pastorianus
gggcccattgattgtttcaaccaca

SEQ ID NO: 13959 - DNA, 25 bp, Saccharomyces pastorianus
gagtctacgagagaaagcctaccga

SEQ ID NO: 13960 - DNA, 25 bp, Saccharomyces pastorianus
agcctaccgaaacaacacacttaag

SEQ ID NO: 13961 - DNA, 25 bp, Saccharomyces pastorianus
tcatgtcttatgtcgttgctctttt

SEQ ID NO: 13962 - DNA, 25 bp, Saccharomyces pastorianus
aattcagtccagacttacatttctg

SEQ ID NO: 13963 - DNA, 25 bp, Saccharomyces pastorianus
tgctcttttccatttcggttccgaa

SEQ ID NO: 13964 - DNA, 25 bp, Saccharomyces pastorianus
atgttcaacctccaagacgtaataa

SEQ ID NO: 13965 - DNA, 25 bp, Saccharomyces pastorianus
tccatcgtatccgtctttaattcag

SEQ ID NO: 13966 - DNA, 25 bp, Saccharomyces pastorianus
ttcggttccgaactgttgattttca

SEQ ID NO: 13967 - DNA, 25 bp, Saccharomyces pastorianus
gttactgttcatttccatcgtatcc

SEQ ID NO: 13968 - DNA, 25 bp, Saccharomyces pastorianus
gccttaccagacgacgtacttatag

SEQ ID NO: 13969 - DNA, 25 bp, Saccharomyces pastorianus
accgagcgcgttgcaggcaatggca

SEQ ID NO: 13970 - DNA, 25 bp, Saccharomyces pastorianus
taaacacggaaaacggctcgctaat

SEQ ID NO: 13971 - DNA, 25 bp, Saccharomyces pastorianus
ggcaatggcaattcacagcagacaa

SEQ ID NO: 13972 - DNA, 25 bp, Saccharomyces pastorianus
ggctcgctaattcccctgtcaaaaa

SEQ ID NO: 13973 - DNA, 25 bp, Saccharomyces pastorianus
tctaatttcaccgaactgtacccta

SEQ ID NO: 13974 - DNA, 25 bp, Saccharomyces pastorianus
gacccgcctcagtttcaaagactaa

SEQ ID NO: 13975 - DNA, 25 bp, Saccharomyces pastorianus
aggcataacgttgcttggctaccca

SEQ ID NO: 13976 - DNA, 25 bp, Saccharomyces pastorianus
gaactgtaccctattgatctggcca

SEQ ID NO: 13977 - DNA, 25 bp, Saccharomyces pastorianus
ggtgctacagctggaactttaacaa

SEQ ID NO: 13978 - DNA, 25 bp, Saccharomyces pastorianus
ttgaaagacgtttccgccttaccag

SEQ ID NO: 13979 - DNA, 25 bp, Saccharomyces pastorianus
gtggtcatcattatcgagtgcagca

SEQ ID NO: 13980 - DNA, 25 bp, Saccharomyces pastorianus
atcgccctctattgtatttgtggac

SEQ ID NO: 13981 - DNA, 25 bp, Saccharomyces pastorianus
gcacacgcttactgacttagatttt

SEQ ID NO: 13982 - DNA, 25 bp, Saccharomyces pastorianus
gtgcagcagctggttcaaacaagaa

SEQ ID NO: 13983 - DNA, 25 bp, Saccharomyces pastorianus
gacctataggtctggtggacttcaa

SEQ ID NO: 13984 - DNA, 25 bp, Saccharomyces pastorianus
gagggcactggctccaataacaata

SEQ ID NO: 13985 - DNA, 25 bp, Saccharomyces pastorianus
ctaaggatgcagctatgggcccact

SEQ ID NO: 13986 - DNA, 25 bp, Saccharomyces pastorianus
gtttgcagtatatcaagccgtccgt

SEQ ID NO: 13987 - DNA, 25 bp, Saccharomyces pastorianus
aagccgtccgtgtcccaggatgggt

SEQ ID NO: 13988 - DNA, 25 bp, Saccharomyces pastorianus
atatattccgttgccagaggaccag

SEQ ID NO: 13989 - DNA, 25 bp, Saccharomyces pastorianus
tgctaagaaactatcgccctctatt

SEQ ID NO: 13990 - DNA, 25 bp, Saccharomyces pastorianus
aaatttgaatccacactggccggta

SEQ ID NO: 13991 - DNA, 25 bp, Saccharomyces pastorianus
taccaggtatttaatcgccgtcaag

SEQ ID NO: 13992 - DNA, 25 bp, Saccharomyces pastorianus
gcttttcacaggtactcgagacaat

SEQ ID NO: 13993 - DNA, 25 bp, Saccharomyces pastorianus
tacgggttttccaagcttttcacag

SEQ ID NO: 13994 - DNA, 25 bp, Saccharomyces pastorianus
gtgggccatgtccaaattcgaactt

SEQ ID NO: 13995 - DNA, 25 bp, Saccharomyces pastorianus
aaggctctaggtgtcatgtgggcca

SEQ ID NO: 13996 - DNA, 25 bp, Saccharomyces pastorianus
gctaacaagtttgccggcgccagaa

SEQ ID NO: 13997 - DNA, 25 bp, Saccharomyces pastorianus
gagcttgaccaatacgaacgtgcca

SEQ ID NO: 13998 - DNA, 25 bp, Saccharomyces pastorianus
agtgtcttctaaggagcgtctcgca

SEQ ID NO: 13999 - DNA, 25 bp, Saccharomyces pastorianus
ttgttgtacttgttggccagggttt

SEQ ID NO: 14000 - DNA, 25 bp, Saccharomyces pastorianus
aggcaatgctattcatcgctaacaa

SEQ ID NO: 14001 - DNA, 25 bp, Saccharomyces pastorianus
aagacagtcagtcatttcccaaatg

SEQ ID NO: 14002 - DNA, 25 bp, Saccharomyces pastorianus
gaagaacaagggacactttcaggga

SEQ ID NO: 14003 - DNA, 25 bp, Saccharomyces pastorianus
atttcccaaatgtataccttcgata

SEQ ID NO: 14004 - DNA, 25 bp, Saccharomyces pastorianus
tatcaagaattccaaccagttcaat

SEQ ID NO: 14005 - DNA, 25 bp, Saccharomyces pastorianus
gaaccaaaaagatccgaaagtgcta

SEQ ID NO: 14006 - DNA, 25 bp, Saccharomyces pastorianus
aatgtataccttcgatagactggtt

SEQ ID NO: 14007 - DNA, 25 bp, Saccharomyces pastorianus
cagctccaacaagaggacaagtgtt

SEQ ID NO: 14008 - DNA, 25 bp, Saccharomyces pastorianus
gaatctattcaaggacgcgaagaac

SEQ ID NO: 14009 - DNA, 25 bp, Saccharomyces pastorianus
acaactttagacagtactttcttag

SEQ ID NO: 14010 - DNA, 25 bp, Saccharomyces pastorianus
gacaagtgttgtcgttatacaaaca

SEQ ID NO: 14011 - DNA, 25 bp, Saccharomyces pastorianus
acgcgaagaacgaattgggtgtctt

SEQ ID NO: 14012 - DNA, 25 bp, Saccharomyces pastorianus
ttgaccccttctcctggttgggaat

SEQ ID NO: 14013 - DNA, 25 bp, Saccharomyces pastorianus
gacagtggtgactctgttctgatta

SEQ ID NO: 14014 - DNA, 25 bp, Saccharomyces pastorianus
gtatttagccttgctgacttctttg

SEQ ID NO: 14015 - DNA, 25 bp, Saccharomyces pastorianus
tagccaccaagtgccgtttcaatga

SEQ ID NO: 14016 - DNA, 25 bp, Saccharomyces pastorianus
gaacactttcaacttggtcctgaga

SEQ ID NO: 14017 - DNA, 25 bp, Saccharomyces pastorianus
gttaagtacgttagctggagtgcca

SEQ ID NO: 14018 - DNA, 25 bp, Saccharomyces pastorianus
gtgcccagtcagtgaacaagtcctc

SEQ ID NO: 14019 - DNA, 25 bp, Saccharomyces pastorianus
atcttccacaagagcaccattttca

SEQ ID NO: 14020 - DNA, 25 bp, Saccharomyces pastorianus
aattgccgatgcttctggtaacagt

SEQ ID NO: 14021 - DNA, 25 bp, Saccharomyces pastorianus
agctagcgttgattgacttggccat

SEQ ID NO: 14022 - DNA, 25 bp, Saccharomyces pastorianus
ttctgattaacgatccacctgcttg

SEQ ID NO: 14023 - DNA, 25 bp, Saccharomyces pastorianus
tggttaactccaggcgttactgtgt

SEQ ID NO: 14024 - DNA, 25 bp, Saccharomyces pastorianus
cgttactgtgtacttaatggcctca

SEQ ID NO: 14025 - DNA, 25 bp, Saccharomyces pastorianus
caagggtattgttcctctatggtgc

SEQ ID NO: 14026 - DNA, 25 bp, Saccharomyces pastorianus
aaaagattggatttgccggactatg

SEQ ID NO: 14027 - DNA, 25 bp, Saccharomyces pastorianus
accgctgagttccttgctgacataa

SEQ ID NO: 14028 - DNA, 25 bp, Saccharomyces pastorianus
gagcccattggagcagatatctgtc

SEQ ID NO: 14029 - DNA, 25 bp, Saccharomyces pastorianus
ctatttggccggtatattatgtgct

SEQ ID NO: 14030 - DNA, 25 bp, Saccharomyces pastorianus
ggtgcagacagatcccatacacgat

SEQ ID NO: 14031 - DNA, 25 bp, Saccharomyces pastorianus
attatgtgctgccatttcgcatcca

SEQ ID NO: 14032 - DNA, 25 bp, Saccharomyces pastorianus
taatgaatccatgtctgtcgcctca

SEQ ID NO: 14033 - DNA, 25 bp, Saccharomyces pastorianus
aagcatttatattccggctggttaa

SEQ ID NO: 14034 - DNA, 25 bp, Saccharomyces pastorianus
tatttttgccttcaccttcgtcttc

SEQ ID NO: 14035 - DNA, 25 bp, Saccharomyces pastorianus
tcttaagtatttttgccttcacctt

SEQ ID NO: 14036 - DNA, 25 bp, Saccharomyces pastorianus
gaagtattcttaagtatttttgcct

SEQ ID NO: 14037 - DNA, 25 bp, Saccharomyces pastorianus
ttcttaagtatttttgccttcacct

SEQ ID NO: 14038 - DNA, 25 bp, Saccharomyces pastorianus
ttaagtatttttgccttcaccttcg

SEQ ID NO: 14039 - DNA, 25 bp, Saccharomyces pastorianus
tcaccttcgtcttctactttggtgc

SEQ ID NO: 14040 - DNA, 25 bp, Saccharomyces pastorianus
atgcaagatctagaagtattcttaa

SEQ ID NO: 14041 - DNA, 25 bp, Saccharomyces pastorianus
tattcttaagtatttttgccttcac

SEQ ID NO: 14042 - DNA, 25 bp, Saccharomyces pastorianus
agtatttttgccttcaccttcgtct

SEQ ID NO: 14043 - DNA, 25 bp, Saccharomyces pastorianus
caccttcgtcttctactttggtgct

SEQ ID NO: 14044 - DNA, 25 bp, Saccharomyces pastorianus
gtatttttgccttcaccttcgtctt

SEQ ID NO: 14045 - DNA, 25 bp, Saccharomyces pastorianus
tatttttgccttcaccttcgtcttc

SEQ ID NO: 14046 - DNA, 25 bp, Saccharomyces pastorianus
tggtgctcatagaacagtcatgaag

SEQ ID NO: 14047 - DNA, 25 bp, Saccharomyces pastorianus
gaagtattcttaagtatttttgcct

SEQ ID NO: 14048 - DNA, 25 bp, Saccharomyces pastorianus
tcgtcttctactttggtgctcatag

SEQ ID NO: 14049 - DNA, 25 bp, Saccharomyces pastorianus
ttcttaagtatttttgccttcacct

SEQ ID NO: 14050 - DNA, 25 bp, Saccharomyces pastorianus
ttaagtatttttgccttcaccttcg

SEQ ID NO: 14051 - DNA, 25 bp, Saccharomyces pastorianus
tcaccttcgtcttctactttggtgc

SEQ ID NO: 14052 - DNA, 25 bp, Saccharomyces pastorianus
atgcaagatctagaagtattcttaa

SEQ ID NO: 14053 - DNA, 25 bp, Saccharomyces pastorianus
agtatttttgccttcaccttcgtct

SEQ ID NO: 14054 - DNA, 25 bp, Saccharomyces pastorianus
tattcttaagtatttttgccttcac

SEQ ID NO: 14055 - DNA, 25 bp, Saccharomyces pastorianus
caccttcgtcttctactttggtgct

SEQ ID NO: 14056 - DNA, 25 bp, Saccharomyces pastorianus
gtggttctgtagaggcatcatgcgc

SEQ ID NO: 14057 - DNA, 25 bp, Saccharomyces pastorianus
gagctgctggtttgatcgacatcgc

SEQ ID NO: 14058 - DNA, 25 bp, Saccharomyces pastorianus
atcatgcgcgctgggaatcggtgac

SEQ ID NO: 14059 - DNA, 25 bp, Saccharomyces pastorianus
gacatcgctactgtattgggcacaa

SEQ ID NO: 14060 - DNA, 25 bp, Saccharomyces pastorianus
gtttgatcgccaccatcaagtcaag

SEQ ID NO: 14061 - DNA, 25 bp, Saccharomyces pastorianus
gggtcgctgtcagttctatgatcga

SEQ ID NO: 14062 - DNA, 25 bp, Saccharomyces pastorianus
gggcacaagcgcctacctaatagaa

SEQ ID NO: 14063 - DNA, 25 bp, Saccharomyces pastorianus
tgtttcgtgtatctacaacgctccc

SEQ ID NO: 14064 - DNA, 25 bp, Saccharomyces pastorianus
tggacctaccgatcgatttgcagtt

SEQ ID NO: 14065 - DNA, 25 bp, Saccharomyces pastorianus
tgttaccagttttgtcagacttgct

SEQ ID NO: 14066 - DNA, 25 bp, Saccharomyces pastorianus
tcggtgacgctattgtggatcttgt

SEQ ID NO: 14067 - DNA, 25 bp, Saccharomyces pastorianus
atcatgtgtcgctgttgctgctttg

SEQ ID NO: 14068 - DNA, 25 bp, Saccharomyces pastorianus
gctggttgaaggatccatagctgat

SEQ ID NO: 14069 - DNA, 25 bp, Saccharomyces pastorianus
acaacttgatttacacttctggcca

SEQ ID NO: 14070 - DNA, 25 bp, Saccharomyces pastorianus
aactccagtcttttgtgaatccgct

SEQ ID NO: 14071 - DNA, 25 bp, Saccharomyces pastorianus
tcatactcccatgctatgaaggcaa

SEQ ID NO: 14072 - DNA, 25 bp, Saccharomyces pastorianus
ctttgctgaatttaacactgtttac

SEQ ID NO: 14073 - DNA, 25 bp, Saccharomyces pastorianus
taacattttcttggctgacattaaa

SEQ ID NO: 14074 - DNA, 25 bp, Saccharomyces pastorianus
ataagcctgctagatcatgtgtcgc

SEQ ID NO: 14075 - DNA, 25 bp, Saccharomyces pastorianus
acttctggccaaatcccaatgactt

SEQ ID NO: 14076 - DNA, 25 bp, Saccharomyces pastorianus
agtatttcaccacccataagcctgc

SEQ ID NO: 14077 - DNA, 25 bp, Saccharomyces pastorianus
aatgacttccgacaacaagctggtt

SEQ ID NO: 14078 - DNA, 25 bp, Saccharomyces pastorianus
gaattcagaagtattgtcccactac

SEQ ID NO: 14079 - DNA, 25 bp, Saccharomyces pastorianus
gattggccttgatcagtactttcag

SEQ ID NO: 14080 - DNA, 25 bp, Saccharomyces pastorianus
agggtcggaggcatatcgttacaag

SEQ ID NO: 14081 - DNA, 25 bp, Saccharomyces pastorianus
agagctgcagtttctggttttatgc

SEQ ID NO: 14082 - DNA, 25 bp, Saccharomyces pastorianus
aaattcctgagcgattttttctaca

SEQ ID NO: 14083 - DNA, 25 bp, Saccharomyces pastorianus
ccagatgttcgttatggattcccat

SEQ ID NO: 14084 - DNA, 25 bp, Saccharomyces pastorianus
ggttccgaggaaagcacgtgccaca

SEQ ID NO: 14085 - DNA, 25 bp, Saccharomyces pastorianus
gaggtacgcggatttactatacaga

SEQ ID NO: 14086 - DNA, 25 bp, Saccharomyces pastorianus
gattcccataatatccatcgactaa

SEQ ID NO: 14087 - DNA, 25 bp, Saccharomyces pastorianus
atagtgctactacaacgcccaaaac

SEQ ID NO: 14088 - DNA, 25 bp, Saccharomyces pastorianus
ttttatcactgcttgtctatttcga

SEQ ID NO: 14089 - DNA, 25 bp, Saccharomyces pastorianus
tggcactttccaccattgctaataa

SEQ ID NO: 14090 - DNA, 25 bp, Saccharomyces pastorianus
ttgtgttctattggcactttccacc

SEQ ID NO: 14091 - DNA, 25 bp, Saccharomyces pastorianus
atgttcctggcatgtatactgttgc

SEQ ID NO: 14092 - DNA, 25 bp, Saccharomyces pastorianus
aactgggctgctctacctattggta

SEQ ID NO: 14093 - DNA, 25 bp, Saccharomyces pastorianus
gattggccgtttgattggtgagcat

SEQ ID NO: 14094 - DNA, 25 bp, Saccharomyces pastorianus
acctactgggttggtgagattggcc

SEQ ID NO: 14095 - DNA, 25 bp, Saccharomyces pastorianus
gatgactgggacaactgggctgctc

SEQ ID NO: 14096 - DNA, 25 bp, Saccharomyces pastorianus
tgggctgctctacctattggtattg

SEQ ID NO: 14097 - DNA, 25 bp, Saccharomyces pastorianus
accattgctaataatgttcctggca

SEQ ID NO: 14098 - DNA, 25 bp, Saccharomyces pastorianus
tatgtctcaaacctactgggttggt

SEQ ID NO: 14099 - DNA, 25 bp, Saccharomyces pastorianus
gggcatttattatttacaacatcgc

SEQ ID NO: 14100 - DNA, 25 bp, Saccharomyces pastorianus
gcaatgccttgaacgctttaccaaa

SEQ ID NO: 14101 - DNA, 25 bp, Saccharomyces pastorianus
gaatctattagggttggcggttata

SEQ ID NO: 14102 - DNA, 25 bp, Saccharomyces pastorianus
tggcccaaaagtggttcgaacattt

SEQ ID NO: 14103 - DNA, 25 bp, Saccharomyces pastorianus
gagaacttatgacgctatcgccaag

SEQ ID NO: 14104 - DNA, 25 bp, Saccharomyces pastorianus
taaacctttccctgaaccatatttg

SEQ ID NO: 14105 - DNA, 25 bp, Saccharomyces pastorianus
agaaaaatgggctgtggccacttct

SEQ ID NO: 14106 - DNA, 25 bp, Saccharomyces pastorianus
agcacgtcatcgaagtctcacatgg

SEQ ID NO: 14107 - DNA, 25 bp, Saccharomyces pastorianus
acgcgatccttccaaatccaaggta

SEQ ID NO: 14108 - DNA, 25 bp, Saccharomyces pastorianus
tagggtacccaatcaacgaacgcga

SEQ ID NO: 14109 - DNA, 25 bp, Saccharomyces pastorianus
gtttgctcctgattttgccaacgaa

SEQ ID NO: 14110 - DNA, 25 bp, Saccharomyces pastorianus
gagaccaaaatacttcatcacagct

SEQ ID NO: 14111 - DNA, 25 bp, Saccharomyces pastorianus
agaccaggcagacatcgactctata

SEQ ID NO: 14112 - DNA, 25 bp, Saccharomyces pastorianus
gaagcccagataacctccgatgatg

SEQ ID NO: 14113 - DNA, 25 bp, Saccharomyces pastorianus
gaagctccggccgaaactaaagacg

SEQ ID NO: 14114 - DNA, 25 bp, Saccharomyces pastorianus
gaaccagcccctaaagatgctattg

SEQ ID NO: 14115 - DNA, 25 bp, Saccharomyces pastorianus
aatgcatcgtgctaacaaattcggt

SEQ ID NO: 14116 - DNA, 25 bp, Saccharomyces pastorianus
agtagcgacagcagtagacccaaaa

SEQ ID NO: 14117 - DNA, 25 bp, Saccharomyces pastorianus
gccccggttctatcaccagaagaaa

SEQ ID NO: 14118 - DNA, 25 bp, Saccharomyces pastorianus
gaggaattaggccttgtcactagga

SEQ ID NO: 14119 - DNA, 25 bp, Saccharomyces pastorianus
aggccaacgccttagatctactgaa

SEQ ID NO: 14120 - DNA, 25 bp, Saccharomyces pastorianus
gaacaaccgttctagagtcagtaag

SEQ ID NO: 14121 - DNA, 25 bp, Saccharomyces pastorianus
tgatgtttcccctactgctcaaaaa

SEQ ID NO: 14122 - DNA, 25 bp, Saccharomyces pastorianus
atttgctccatacgcggacttggta

SEQ ID NO: 14123 - DNA, 25 bp, Saccharomyces pastorianus
ttacaacttatctccttcgttcaac

SEQ ID NO: 14124 - DNA, 25 bp, Saccharomyces pastorianus
aaaagtttcctgaccaatggctcgc

SEQ ID NO: 14125 - DNA, 25 bp, Saccharomyces pastorianus
acaacttcgctcgtgattttgccaa

SEQ ID NO: 14126 - DNA, 25 bp, Saccharomyces pastorianus
gtgtcgacgtgttgatgcaccaaaa

SEQ ID NO: 14127 - DNA, 25 bp, Saccharomyces pastorianus
aatttatcactctagccggtttaca

SEQ ID NO: 14128 - DNA, 25 bp, Saccharomyces pastorianus
ggccaaaggccatgtctgttgacga

SEQ ID NO: 14129 - DNA, 25 bp, Saccharomyces pastorianus
gacgagcaacacactttcattcaga

SEQ ID NO: 14130 - DNA, 25 bp, Saccharomyces pastorianus
gaggtggtactcaatgttctgtcat

SEQ ID NO: 14131 - DNA, 25 bp, Saccharomyces pastorianus
atgcgttagcaatccacaacttcgc

SEQ ID NO: 14132 - DNA, 25 bp, Saccharomyces pastorianus
gttctgtcatgagagctcgtgcatt

SEQ ID NO: 14133 - DNA, 25 bp, Saccharomyces pastorianus
gacttgcaaggcttcgagaatttca

SEQ ID NO: 14134 - DNA, 25 bp, Saccharomyces pastorianus
tagtgtgtacacatgacgatgccat

SEQ ID NO: 14135 - DNA, 25 bp, Saccharomyces pastorianus
agctgaattactatccaccatttgt

SEQ ID NO: 14136 - DNA, 25 bp, Saccharomyces pastorianus
gaaaccgagtatcatggtaggccat

SEQ ID NO: 14137 - DNA, 25 bp, Saccharomyces pastorianus
ggtacagaccgttactactgaggac

SEQ ID NO: 14138 - DNA, 25 bp, Saccharomyces pastorianus
actctgcaaactctcattccaaaaa

SEQ ID NO: 14139 - DNA, 25 bp, Saccharomyces pastorianus
tccaccatttgttctacacgagtca

SEQ ID NO: 14140 - DNA, 25 bp, Saccharomyces pastorianus
gacgattttgaccacttacattgta

SEQ ID NO: 14141 - DNA, 25 bp, Saccharomyces pastorianus
gaggacggtgaatctgtgaagctat

SEQ ID NO: 14142 - DNA, 25 bp, Saccharomyces pastorianus
tgacgatgccatggtgtttgtcgac

SEQ ID NO: 14143 - DNA, 25 bp, Saccharomyces pastorianus
aagtttgtgcgtcacttgcatcagc

SEQ ID NO: 14144 - DNA, 25 bp, Saccharomyces pastorianus
gactcgttggctaaaggcatctctg

SEQ ID NO: 14145 - DNA, 25 bp, Saccharomyces pastorianus
gaggaaaaagctgctcccgttgcgg

SEQ ID NO: 14146 - DNA, 25 bp, Saccharomyces pastorianus
ttctgctgctattcaattcaccatc

SEQ ID NO: 14147 - DNA, 25 bp, Saccharomyces pastorianus
catcgaccaatctcactctttgaat

SEQ ID NO: 14148 - DNA, 25 bp, Saccharomyces pastorianus
gaccgtgccatttacatcgaccaat

SEQ ID NO: 14149 - DNA, 25 bp, Saccharomyces pastorianus
aaacgttaccattccatctctagat

SEQ ID NO: 14150 - DNA, 25 bp, Saccharomyces pastorianus
atatcgccgatatctctaacttgaa

SEQ ID NO: 14151 - DNA, 25 bp, Saccharomyces pastorianus
gcttcaagtgcaagttacgctgcca

SEQ ID NO: 14152 - DNA, 25 bp, Saccharomyces pastorianus
aagagatgcatctccagctccagta

SEQ ID NO: 14153 - DNA, 25 bp, Saccharomyces pastorianus
aaggttgctgatcaagctaccgaga

SEQ ID NO: 14154 - DNA, 25 bp, Saccharomyces pastorianus
agctccagtaggcaatgactcgttg

SEQ ID NO: 14155 - DNA, 25 bp, Saccharomyces pastorianus
gtctcagtaactacgttggacttaa

SEQ ID NO: 14156 - DNA, 25 bp, Saccharomyces pastorianus
atgagaccgatctttcgaccaagtc

SEQ ID NO: 14157 - DNA, 25 bp, Saccharomyces pastorianus
gaacaccgaaattgagatccatgat

SEQ ID NO: 14158 - DNA, 25 bp, Saccharomyces pastorianus
gatataggcgcatcatggcagtcaa

SEQ ID NO: 14159 - DNA, 25 bp, Saccharomyces pastorianus
gaaccctttgataaaatcggtcctg

SEQ ID NO: 14160 - DNA, 25 bp, Saccharomyces pastorianus
tcctctgccccaagaaaagctaatt

SEQ ID NO: 14161 - DNA, 25 bp, Saccharomyces pastorianus
gaccaagtcattttcgaaccctttg

SEQ ID NO: 14162 - DNA, 25 bp, Saccharomyces pastorianus
gggctctaatttttcattcaagaat

SEQ ID NO: 14163 - DNA, 25 bp, Saccharomyces pastorianus
atacaagtacatagtctcagtaact

SEQ ID NO: 14164 - DNA, 25 bp, Saccharomyces pastorianus
gaaaagcattcttccttatacaagt

SEQ ID NO: 14165 - DNA, 25 bp, Saccharomyces pastorianus
tggacttaaaagaacccactgaggg

SEQ ID NO: 14166 - DNA, 25 bp, Saccharomyces pastorianus
gggtcagtgctggattatttacatt

SEQ ID NO: 14167 - DNA, 25 bp, Saccharomyces pastorianus
gaagattgctttacccacaagagtg

SEQ ID NO: 14168 - DNA, 25 bp, Saccharomyces pastorianus
tgaacgtacctttttgtcatggtta

SEQ ID NO: 14169 - DNA, 25 bp, Saccharomyces pastorianus
agaggttcaggtccttacgacgaca

SEQ ID NO: 14170 - DNA, 25 bp, Saccharomyces pastorianus
tacgcacttgtgacataccattgga

SEQ ID NO: 14171 - DNA, 25 bp, Saccharomyces pastorianus
ttatttacatttgttgccatgggca

SEQ ID NO: 14172 - DNA, 25 bp, Saccharomyces pastorianus
cttcacagtgatgctgggtgggctt

SEQ ID NO: 14173 - DNA, 25 bp, Saccharomyces pastorianus
gcctactttgttatgctttttccta

SEQ ID NO: 14174 - DNA, 25 bp, Saccharomyces pastorianus
ggaacctaaagtcttctttgccaat

SEQ ID NO: 14175 - DNA, 25 bp, Saccharomyces pastorianus
ttttcctactagtcgctgtcattat

SEQ ID NO: 14176 - DNA, 25 bp, Saccharomyces pastorianus
agagccgccgcaatcagacgtagag

SEQ ID NO: 14177 - DNA, 25 bp, Saccharomyces pastorianus
atgattctcaatacgggctagctgc

SEQ ID NO: 14178 - DNA, 25 bp, Saccharomyces pastorianus
taaccgtttccaagttctctactgt

SEQ ID NO: 14179 - DNA, 25 bp, Saccharomyces pastorianus
tcaactccggtgaagtctgctgtgc

SEQ ID NO: 14180 - DNA, 25 bp, Saccharomyces pastorianus
gaggaagtatttggccctatcgtaa

SEQ ID NO: 14181 - DNA, 25 bp, Saccharomyces pastorianus
gattctggattacgtcaatgtggca

SEQ ID NO: 14182 - DNA, 25 bp, Saccharomyces pastorianus
tctgctgtgcaggttctagaattta

SEQ ID NO: 14183 - DNA, 25 bp, Saccharomyces pastorianus
aaatcagagggagctcgtcttgtta

SEQ ID NO: 14184 - DNA, 25 bp, Saccharomyces pastorianus
ggtgacgctgctttgagtaattaca

SEQ ID NO: 14185 - DNA, 25 bp, Saccharomyces pastorianus
agccaacgatttttgctgacgtcaa

SEQ ID NO: 14186 - DNA, 25 bp, Saccharomyces pastorianus
ggctagctgccggtattcacacaaa

SEQ ID NO: 14187 - DNA, 25 bp, Saccharomyces pastorianus
aagggctactttgtcaagccaacga

SEQ ID NO: 14188 - DNA, 25 bp, Saccharomyces pastorianus
agacctttatgaagccgtattgaac

SEQ ID NO: 14189 - DNA, 25 bp, Saccharomyces pastorianus
tatcggccataatttaggtctagac

SEQ ID NO: 14190 - DNA, 25 bp, Saccharomyces pastorianus
gtttactggcgcacaaagagacctt

SEQ ID NO: 14191 - DNA, 25 bp, Saccharomyces pastorianus
tgaaatggttcttgttgacgcagct

SEQ ID NO: 14192 - DNA, 25 bp, Saccharomyces pastorianus
aattattctctccatgacgttcatg

SEQ ID NO: 14193 - DNA, 25 bp, Saccharomyces pastorianus
tagacgttcacgatgtgcccaaagc

SEQ ID NO: 14194 - DNA, 25 bp, Saccharomyces pastorianus
tgttgacgcagctggttccttgggt

SEQ ID NO: 14195 - DNA, 25 bp, Saccharomyces pastorianus
aaattataccctcactatatcggcc

SEQ ID NO: 14196 - DNA, 25 bp, Saccharomyces pastorianus
gtgaatcattcccatcttattttag

SEQ ID NO: 14197 - DNA, 25 bp, Saccharomyces pastorianus
ggttcaaactcactatgcatccatt

SEQ ID NO: 14198 - DNA, 25 bp, Saccharomyces pastorianus
aaccgggcttgtacattcctgatag

SEQ ID NO: 14199 - DNA, 25 bp, Saccharomyces pastorianus
agtaacgccgaatcagcgccattaa

SEQ ID NO: 14200 - DNA, 25 bp, Saccharomyces pastorianus
gttcaaaggacattgcctcggctat

SEQ ID NO: 14201 - DNA, 25 bp, Saccharomyces pastorianus
atcattccccttctttgaactcaat

SEQ ID NO: 14202 - DNA, 25 bp, Saccharomyces pastorianus
gtgatttctaactcttctacttcat

SEQ ID NO: 14203 - DNA, 25 bp, Saccharomyces pastorianus
atagatccaccaatctggacctaga

SEQ ID NO: 14204 - DNA, 25 bp, Saccharomyces pastorianus
ggctctatcacttcaggagcttcta

SEQ ID NO: 14205 - DNA, 25 bp, Saccharomyces pastorianus
aatctgctgaactctatggttcgca

SEQ ID NO: 14206 - DNA, 25 bp, Saccharomyces pastorianus
taatggtaacaagtcccctactcca

SEQ ID NO: 14207 - DNA, 25 bp, Saccharomyces pastorianus
agaaccaactctggtggctctatca

SEQ ID NO: 14208 - DNA, 25 bp, Saccharomyces pastorianus
taatgcgaactacccacaatccaat

SEQ ID NO: 14209 - DNA, 25 bp, Saccharomyces pastorianus
ttccaatatcgcttcgggtgaggac

SEQ ID NO: 14210 - DNA, 25 bp, Saccharomyces pastorianus
ggctgggttcctcaagacatgtttg

SEQ ID NO: 14211 - DNA, 25 bp, Saccharomyces pastorianus
gtgcaccaagccattcattttacaa

SEQ ID NO: 14212 - DNA, 25 bp, Saccharomyces pastorianus
atttgctagtggacgaatcgctgtt

SEQ ID NO: 14213 - DNA, 25 bp, Saccharomyces pastorianus
gactttgacaagctatccgaaccag

SEQ ID NO: 14214 - DNA, 25 bp, Saccharomyces pastorianus
gaaattcccattggactacacaaag

SEQ ID NO: 14215 - DNA, 25 bp, Saccharomyces pastorianus
attagattttgaaggtgcgtgcacc

SEQ ID NO: 14216 - DNA, 25 bp, Saccharomyces pastorianus
gaagtctgggacatatttgcccaaa

SEQ ID NO: 14217 - DNA, 25 bp, Saccharomyces pastorianus
atttgccgccactcaaggctgggtt

SEQ ID NO: 14218 - DNA, 25 bp, Saccharomyces pastorianus
tcagctgattagtgcagtggccccg

SEQ ID NO: 14219 - DNA, 25 bp, Saccharomyces pastorianus
aatttattgcttatgaagggcccaa

SEQ ID NO: 14220 - DNA, 25 bp, Saccharomyces pastorianus
caattcatgtataaacggacccgta

SEQ ID NO: 14221 - DNA, 25 bp, Saccharomyces pastorianus
tgggttactcttaccatgacgaaac

SEQ ID NO: 14222 - DNA, 25 bp, Saccharomyces pastorianus
tagcgaagtccccaaggcttacatc

SEQ ID NO: 14223 - DNA, 25 bp, Saccharomyces pastorianus
tgcccttggtttcgaagctgtggat

SEQ ID NO: 14224 - DNA, 25 bp, Saccharomyces pastorianus
ttaattactatacctgacgtcccag

SEQ ID NO: 14225 - DNA, 25 bp, Saccharomyces pastorianus
gacgtcccaggtgcattcaagaaat

SEQ ID NO: 14226 - DNA, 25 bp, Saccharomyces pastorianus
cgtcatgaatcctctagcgaagtcc

SEQ ID NO: 14227 - DNA, 25 bp, Saccharomyces pastorianus
gatgcaacaactaagtgcccttggt

SEQ ID NO: 14228 - DNA, 25 bp, Saccharomyces pastorianus
ggcagggatttctgttccaccaaga

SEQ ID NO: 14229 - DNA, 25 bp, Saccharomyces pastorianus
gcgactcttggaatttaactctgtt

SEQ ID NO: 14230 - DNA, 25 bp, Saccharomyces pastorianus
gttcctaggtggtttaagcgactct

SEQ ID NO: 14231 - DNA, 25 bp, Saccharomyces pastorianus
gtcggtggtgcttctaaagtgccaa

SEQ ID NO: 14232 - DNA, 25 bp, Saccharomyces pastorianus
ggccacatatttttactgggcaaca

SEQ ID NO: 14233 - DNA, 25 bp, Saccharomyces pastorianus
aatgggtttagatggccagccataa

SEQ ID NO: 14234 - DNA, 25 bp, Saccharomyces pastorianus
gtattcgaagccactgaacgtcaag

SEQ ID NO: 14235 - DNA, 25 bp, Saccharomyces pastorianus
aaaacacgttgtcccgattgagcac

SEQ ID NO: 14236 - DNA, 25 bp, Saccharomyces pastorianus
aaagcatcgaagttggccacatatt

SEQ ID NO: 14237 - DNA, 25 bp, Saccharomyces pastorianus
ttatgtgtcatcgtaggcccaaaga

SEQ ID NO: 14238 - DNA, 25 bp, Saccharomyces pastorianus
tgtcccgattgagcacttggcagaa

SEQ ID NO: 14239 - DNA, 25 bp, Saccharomyces pastorianus
gataaagttatctcatgccatgggc

SEQ ID NO: 14240 - DNA, 25 bp, Saccharomyces pastorianus
tgtctatatgtaccgggcccagtaa

SEQ ID NO: 14241 - DNA, 25 bp, Saccharomyces pastorianus
aactgggccgtgatgcaaatgggtt

SEQ ID NO: 14242 - DNA, 25 bp, Saccharomyces pastorianus
acggcatcggagtaagcaggctaac

SEQ ID NO: 14243 - DNA, 25 bp, Saccharomyces pastorianus
ttgcagcttccgctcaaactaagaa

SEQ ID NO: 14244 - DNA, 25 bp, Saccharomyces pastorianus
cggttttattttctctgttgttgca

SEQ ID NO: 14245 - DNA, 25 bp, Saccharomyces pastorianus
gggctaagagtcgatcctttagtag

SEQ ID NO: 14246 - DNA, 25 bp, Saccharomyces pastorianus
tattttctctgttgttgcattgcat

SEQ ID NO: 14247 - DNA, 25 bp, Saccharomyces pastorianus
cacaaaaagttgcagcttccgctca

SEQ ID NO: 14248 - DNA, 25 bp, Saccharomyces pastorianus
gagtcgatcctttagtagtgttatt

SEQ ID NO: 14249 - DNA, 25 bp, Saccharomyces pastorianus
agtagtgttattcctagcggtcggt

SEQ ID NO: 14250 - DNA, 25 bp, Saccharomyces pastorianus
cgatcttgaagattttttccgatga

SEQ ID NO: 14251 - DNA, 25 bp, Saccharomyces pastorianus
gaagagcaacaactcgatcttgaag

SEQ ID NO: 14252 - DNA, 25 bp, Saccharomyces pastorianus
gcttccgctcaaactaagaacacga

SEQ ID NO: 14253 - DNA, 25 bp, Saccharomyces pastorianus
tagcggtcggttttattttctctgt

SEQ ID NO: 14254 - DNA, 25 bp, Saccharomyces pastorianus
aagaactatccaaaccatatcggtt

SEQ ID NO: 14255 - DNA, 25 bp, Saccharomyces pastorianus
accagctttgagagaaggtttgcca

SEQ ID NO: 14256 - DNA, 25 bp, Saccharomyces pastorianus
aggtttgtttgatatccattctcca

SEQ ID NO: 14257 - DNA, 25 bp, Saccharomyces pastorianus
agagaaggtgctgaaagatccgctt

SEQ ID NO: 14258 - DNA, 25 bp, Saccharomyces pastorianus
gaattcattaccaagatttctgcca

SEQ ID NO: 14259 - DNA, 25 bp, Saccharomyces pastorianus
agctgctggcattaaggtcattcaa

SEQ ID NO: 14260 - DNA, 25 bp, Saccharomyces pastorianus
gccatcttgaaaacttatcctgctg

SEQ ID NO: 14261 - DNA, 25 bp, Saccharomyces pastorianus
tgtcgaccaaagaacccaagccatg

SEQ ID NO: 14262 - DNA, 25 bp, Saccharomyces pastorianus
aagatccgcttactacagctgggct

SEQ ID NO: 14263 - DNA, 25 bp, Saccharomyces pastorianus
aaggtatgttaactggtccaatcac

SEQ ID NO: 14264 - DNA, 25 bp, Saccharomyces pastorianus
tatcctgctgaaaaattctgggtta

SEQ ID NO: 14265 - DNA, 25 bp, Saccharomyces pastorianus
gctactgacggccaaactggagaat

SEQ ID NO: 14266 - DNA, 25 bp, Saccharomyces pastorianus
gagaatataccactttgttgagaaa

SEQ ID NO: 14267 - DNA, 25 bp, Saccharomyces pastorianus
tgctgaatagcatagataccgaagg

SEQ ID NO: 14268 - DNA, 25 bp, Saccharomyces pastorianus
gaaggtgcccgaattgaaatggtac

SEQ ID NO: 14269 - DNA, 25 bp, Saccharomyces pastorianus
gttgatggacgcttatactttatac

SEQ ID NO: 14270 - DNA, 25 bp, Saccharomyces pastorianus
gaacaaatatcgctactgacggcca

SEQ ID NO: 14271 - DNA, 25 bp, Saccharomyces pastorianus
gttgatcaaacaggacgctacactg

SEQ ID NO: 14272 - DNA, 25 bp, Saccharomyces pastorianus
gtcgagtgtgataacggtgctgaat

SEQ ID NO: 14273 - DNA, 25 bp, Saccharomyces pastorianus
gaagatactgacgttcccgaagagt

SEQ ID NO: 14274 - DNA, 25 bp, Saccharomyces pastorianus
ggcagtacagaaatcccacgtttga

SEQ ID NO: 14275 - DNA, 25 bp, Saccharomyces pastorianus
gaaatcccacgtttgatatcagaaa

SEQ ID NO: 14276 - DNA, 25 bp, Saccharomyces pastorianus
gagaagatcttccattacggccatg

SEQ ID NO: 14277 - DNA, 25 bp, Saccharomyces pastorianus
gccagtcgctgggtgtgtcgaataa

SEQ ID NO: 14278 - DNA, 25 bp, Saccharomyces pastorianus
atagagccggaaacgttcacgcaat

SEQ ID NO: 14279 - DNA, 25 bp, Saccharomyces pastorianus
ggtaaagactgtgtggccattgcct

SEQ ID NO: 14280 - DNA, 25 bp, Saccharomyces pastorianus
acgcaattggtgtctagttcgcttt

SEQ ID NO: 14281 - DNA, 25 bp, Saccharomyces pastorianus
aaggacttcatcgtcagcggtactg

SEQ ID NO: 14282 - DNA, 25 bp, Saccharomyces pastorianus
tccaagtccggaaaacccttcattg

SEQ ID NO: 14283 - DNA, 25 bp, Saccharomyces pastorianus
ttcattgccgggttcgacctaatcg

SEQ ID NO: 14284 - DNA, 25 bp, Saccharomyces pastorianus
taaacggtggtattgtcgtcgcaat

SEQ ID NO: 14285 - DNA, 25 bp, Saccharomyces pastorianus
gtgtgagtccttgtacgagccaaat

SEQ ID NO: 14286 - DNA, 25 bp, Saccharomyces pastorianus
attgcctgcgatttgcgtctcggga

SEQ ID NO: 14287 - DNA, 25 bp, Saccharomyces pastorianus
gttggtgtccattgctcaaaggttc

SEQ ID NO: 14288 - DNA, 25 bp, Saccharomyces pastorianus
gaacagacttttcaggccgtggtga

SEQ ID NO: 14289 - DNA, 25 bp, Saccharomyces pastorianus
atggtggcatgtctttcaacccaga

SEQ ID NO: 14290 - DNA, 25 bp, Saccharomyces pastorianus
caattcggtgttgctgtcgtcatca

SEQ ID NO: 14291 - DNA, 25 bp, Saccharomyces pastorianus
tgagtgtgtctttgccatctacgaa

SEQ ID NO: 14292 - DNA, 25 bp, Saccharomyces pastorianus
ggttggatccggacgatgccctaaa

SEQ ID NO: 14293 - DNA, 25 bp, Saccharomyces pastorianus
tgaccatcagttgaggctcctggac

SEQ ID NO: 14294 - DNA, 25 bp, Saccharomyces pastorianus
tatgtcacactttagcagtcacctg

SEQ ID NO: 14295 - DNA, 25 bp, Saccharomyces pastorianus
ttgtttacccgaagctgagtgtgtc

SEQ ID NO: 14296 - DNA, 25 bp, Saccharomyces pastorianus
ggtggtaacatcatggcccattcat

SEQ ID NO: 14297 - DNA, 25 bp, Saccharomyces pastorianus
taaagtcgtggactcgccttgttta

SEQ ID NO: 14298 - DNA, 25 bp, Saccharomyces pastorianus
tatccggatgcgcagtacctgttag

SEQ ID NO: 14299 - DNA, 25 bp, Saccharomyces pastorianus
caatagtttaatttgcggtgcccct

SEQ ID NO: 14300 - DNA, 25 bp, Saccharomyces pastorianus
aattaagtgctgtcggatatccgga

SEQ ID NO: 14301 - DNA, 25 bp, Saccharomyces pastorianus
ttaggcgacgcttactcttctggag

SEQ ID NO: 14302 - DNA, 25 bp, Saccharomyces pastorianus
taactttttaacctttgcagcaact

SEQ ID NO: 14303 - DNA, 25 bp, Saccharomyces pastorianus
gcggtgccccttatgaattggctaa

SEQ ID NO: 14304 - DNA, 25 bp, Saccharomyces pastorianus
gaagggctacatccatggccaatag

SEQ ID NO: 14305 - DNA, 25 bp, Saccharomyces pastorianus
attcttttcacggtttgatgggtct

SEQ ID NO: 14306 - DNA, 25 bp, Saccharomyces pastorianus
aagaccttattatttcagatccaga

SEQ ID NO: 14307 - DNA, 25 bp, Saccharomyces pastorianus
ctaaaaatcaccctgctgcaatgta

SEQ ID NO: 14308 - DNA, 25 bp, Saccharomyces pastorianus
agaagggcatttctcctgttcttag

SEQ ID NO: 14309 - DNA, 25 bp, Saccharomyces pastorianus
caggccattcgggtgatcaaacaac

SEQ ID NO: 14310 - DNA, 25 bp, Saccharomyces pastorianus
gggtggctgttatatgacgacgaaa

SEQ ID NO: 14311 - DNA, 25 bp, Saccharomyces pastorianus
aattgagtggcgtcgtaatgcatat

SEQ ID NO: 14312 - DNA, 25 bp, Saccharomyces pastorianus
gactggttaagaaatcgcgcattga

SEQ ID NO: 14313 - DNA, 25 bp, Saccharomyces pastorianus
aacggtattgcagtttacaggccat

SEQ ID NO: 14314 - DNA, 25 bp, Saccharomyces pastorianus
aaggcacctgtaagaactgttgata

SEQ ID NO: 14315 - DNA, 25 bp, Saccharomyces pastorianus
gagagacactgtgacttcagatcaa

SEQ ID NO: 14316 - DNA, 25 bp, Saccharomyces pastorianus
gtacctagacgtttcttctacattt

SEQ ID NO: 14317 - DNA, 25 bp, Saccharomyces pastorianus
agcaggtgccttatattctgtcgct

SEQ ID NO: 14318 - DNA, 25 bp, Saccharomyces pastorianus
gatacgctatccattgtacctagac

SEQ ID NO: 14319 - DNA, 25 bp, Saccharomyces pastorianus
ggtccccagcatggccattatgtat

SEQ ID NO: 14320 - DNA, 25 bp, Saccharomyces pastorianus
ggatactccctataaagctggccaa

SEQ ID NO: 14321 - DNA, 25 bp, Saccharomyces pastorianus
gaatgattacaccaaacggacgttt

SEQ ID NO: 14322 - DNA, 25 bp, Saccharomyces pastorianus
tggaatcccggttggtccgtatcga

SEQ ID NO: 14323 - DNA, 25 bp, Saccharomyces pastorianus
aactggatccattactacgtcggat

SEQ ID NO: 14324 - DNA, 25 bp, Saccharomyces pastorianus
atgtctttccatgagtgattaccac

SEQ ID NO: 14325 - DNA, 25 bp, Saccharomyces pastorianus
gaacggcagttcttccatggtttat

SEQ ID NO: 14326 - DNA, 25 bp, Saccharomyces pastorianus
gctggccaatatcatggtaccttga

SEQ ID NO: 14327 - DNA, 25 bp, Saccharomyces pastorianus
gaagctcttggcaaagaactccgtg

SEQ ID NO: 14328 - DNA, 25 bp, Saccharomyces pastorianus
tgattaccaccctgatacctggaat

SEQ ID NO: 14329 - DNA, 25 bp, Saccharomyces pastorianus
aagccacccgccatcagaatgatta

SEQ ID NO: 14330 - DNA, 25 bp, Saccharomyces pastorianus
gtaccttgactttcccatcggatta

SEQ ID NO: 14331 - DNA, 25 bp, Saccharomyces pastorianus
gaaaccgaagcttacacacagggta

SEQ ID NO: 14332 - DNA, 25 bp, Saccharomyces pastorianus
cacagggtaaattcaacgccgtatt

SEQ ID NO: 14333 - DNA, 25 bp, Saccharomyces pastorianus
gtctggtaacggttcaacggtattg

SEQ ID NO: 14334 - DNA, 25 bp, Saccharomyces pastorianus
aattggttgttgtgacgtctggtaa

SEQ ID NO: 14335 - DNA, 25 bp, Saccharomyces pastorianus
tactcatttttatttcgaccctaat

SEQ ID NO: 14336 - DNA, 25 bp, Saccharomyces pastorianus
ggtattgtctgaacacttccccgac

SEQ ID NO: 14337 - DNA, 25 bp, Saccharomyces pastorianus
tcaaggaggcgttttcttatatggc

SEQ ID NO: 14338 - DNA, 25 bp, Saccharomyces pastorianus
gatgtttggctcaatgttgtggtca

SEQ ID NO: 14339 - DNA, 25 bp, Saccharomyces pastorianus
gagtcattcaagttccttaattcgt

SEQ ID NO: 14340 - DNA, 25 bp, Saccharomyces pastorianus
cttaattcgtgctaaaggcgcttat

SEQ ID NO: 14341 - DNA, 25 bp, Saccharomyces pastorianus
aggcgcttatattaccactgttggt

SEQ ID NO: 14342 - DNA, 25 bp, Saccharomyces pastorianus
agccactggtgctaaacgtgctcaa

SEQ ID NO: 14343 - DNA, 25 bp, Saccharomyces pastorianus
cagccactggtgctaaacgtgctca

SEQ ID NO: 14344 - DNA, 25 bp, Saccharomyces pastorianus
aagatcagccactggtgctaaacgt

SEQ ID NO: 14345 - DNA, 25 bp, Saccharomyces pastorianus
gccactggtgctaaacgtgctcaat

SEQ ID NO: 14346 - DNA, 25 bp, Saccharomyces pastorianus
gatcagccactggtgctaaacgtgc

SEQ ID NO: 14347 - DNA, 25 bp, Saccharomyces pastorianus
actggtgctaaacgtgctcaattca

SEQ ID NO: 14348 - DNA, 25 bp, Saccharomyces pastorianus
tcagccactggtgctaaacgtgctc

SEQ ID NO: 14349 - DNA, 25 bp, Saccharomyces pastorianus
atcagccactggtgctaaacgtgct

SEQ ID NO: 14350 - DNA, 25 bp, Saccharomyces pastorianus
tggtgctaaacgtgctcaattcaga

SEQ ID NO: 14351 - DNA, 25 bp, Saccharomyces pastorianus
ccactggtgctaaacgtgctcaatt

SEQ ID NO: 14352 - DNA, 25 bp, Saccharomyces pastorianus
aaaagatcagccactggtgctaaac

SEQ ID NO: 14353 - DNA, 25 bp, Saccharomyces pastorianus
ttctcctgggcttccgaaggtatct

SEQ ID NO: 14354 - DNA, 25 bp, Saccharomyces pastorianus
agaagaccagaatcgccggtgtcgt

SEQ ID NO: 14355 - DNA, 25 bp, Saccharomyces pastorianus
gaatcgaaaccggtaacttctcctg

SEQ ID NO: 14356 - DNA, 25 bp, Saccharomyces pastorianus
gtgactctcgtcataaaagatcagc

SEQ ID NO: 14357 - DNA, 25 bp, Saccharomyces pastorianus
taaaagatcagccactggtgctaaa

SEQ ID NO: 14358 - DNA, 25 bp, Saccharomyces pastorianus
agaatcgccggtgtcgtttaccatc

SEQ ID NO: 14359 - DNA, 25 bp, Saccharomyces pastorianus
tgttgtcaagaccaaaaactctgaa

SEQ ID NO: 14360 - DNA, 25 bp, Saccharomyces pastorianus
ggctgctgttgttcaaattgatgct

SEQ ID NO: 14361 - DNA, 25 bp, Saccharomyces pastorianus
tggtgctaaacgtgctcaattcaga

SEQ ID NO: 14362 - DNA, 25 bp, Saccharomyces pastorianus
tgttgaatcccaattcagcgctggt

SEQ ID NO: 14363 - DNA, 25 bp, Saccharomyces pastorianus
tgaccaaggctgctgttgttcaaat

SEQ ID NO: 14364 - DNA, 25 bp, Saccharomyces pastorianus
gaattagaagctattgccaacccta

SEQ ID NO: 14365 - DNA, 25 bp, Saccharomyces pastorianus
ttgccaaccctattatgactaaatt

SEQ ID NO: 14366 - DNA, 25 bp, Saccharomyces pastorianus
aggagctggtccagacccaaccggt

SEQ ID NO: 14367 - DNA, 25 bp, Saccharomyces pastorianus
tagaaacggctgctcaagataccat

SEQ ID NO: 14368 - DNA, 25 bp, Saccharomyces pastorianus
tccaggaggaggtcctgtcccagga

SEQ ID NO: 14369 - DNA, 25 bp, Saccharomyces pastorianus
tagatgcttcacaggcggcctccag

SEQ ID NO: 14370 - DNA, 25 bp, Saccharomyces pastorianus
gatatcgatgcaaacggtattttaa

SEQ ID NO: 14371 - DNA, 25 bp, Saccharomyces pastorianus
agaggaagccggacgtgttcaagtt

SEQ ID NO: 14372 - DNA, 25 bp, Saccharomyces pastorianus
aatcagctagagtcatacgccttta

SEQ ID NO: 14373 - DNA, 25 bp, Saccharomyces pastorianus
attttaaacgtatctgctgtcgaaa

SEQ ID NO: 14374 - DNA, 25 bp, Saccharomyces pastorianus
ggcggcctccagtcaagaatacaat

SEQ ID NO: 14375 - DNA, 25 bp, Saccharomyces pastorianus
ttgccacctcggaacagcaacgaat

SEQ ID NO: 14376 - DNA, 25 bp, Saccharomyces pastorianus
gattctccttccatagtttcaagtg

SEQ ID NO: 14377 - DNA, 25 bp, Saccharomyces pastorianus
aagaaatgcggtcccttcagacatg

SEQ ID NO: 14378 - DNA, 25 bp, Saccharomyces pastorianus
gatgatttgcttgcctttatcgaga

SEQ ID NO: 14379 - DNA, 25 bp, Saccharomyces pastorianus
gtaggttattccatgcattctaggt

SEQ ID NO: 14380 - DNA, 25 bp, Saccharomyces pastorianus
gatcatgcaaggtgagcgtcttcga

SEQ ID NO: 14381 - DNA, 25 bp, Saccharomyces pastorianus
agcaaccacgctttgaatccagatg

SEQ ID NO: 14382 - DNA, 25 bp, Saccharomyces pastorianus
aacaatctgactcgaatctttcctc

SEQ ID NO: 14383 - DNA, 25 bp, Saccharomyces pastorianus
aagtttttggacctcattcttcatc

SEQ ID NO: 14384 - DNA, 25 bp, Saccharomyces pastorianus
gctagaacagcttttgaacaaccct

SEQ ID NO: 14385 - DNA, 25 bp, Saccharomyces pastorianus
gaatctttcctccaatgggagcata

SEQ ID NO: 14386 - DNA, 25 bp, Saccharomyces pastorianus
tctagacgccgatcctgttcagaat

SEQ ID NO: 14387 - DNA, 25 bp, Saccharomyces pastorianus
gggacccagaatctttcatttctga

SEQ ID NO: 14388 - DNA, 25 bp, Saccharomyces pastorianus
tcaatggaaaagtgcttcccctttc

SEQ ID NO: 14389 - DNA, 25 bp, Saccharomyces pastorianus
acgtggttctattccgttggatcaa

SEQ ID NO: 14390 - DNA, 25 bp, Saccharomyces pastorianus
aatgattgtgcagatccgttaggat

SEQ ID NO: 14391 - DNA, 25 bp, Saccharomyces pastorianus
cagatagatctgtccggtcaatttt

SEQ ID NO: 14392 - DNA, 25 bp, Saccharomyces pastorianus
tcccctttcctatcttttcaatgat

SEQ ID NO: 14393 - DNA, 25 bp, Saccharomyces pastorianus
atttcaagcgctctgattcgagttg

SEQ ID NO: 14394 - DNA, 25 bp, Saccharomyces pastorianus
gaatgggatctactgttcgatgcta

SEQ ID NO: 14395 - DNA, 25 bp, Saccharomyces pastorianus
gtccggtcaatttttatatcagcag

SEQ ID NO: 14396 - DNA, 25 bp, Saccharomyces pastorianus
gataatatttccagttcatttccta

SEQ ID NO: 14397 - DNA, 25 bp, Saccharomyces pastorianus
gtggcgacggtacctttaatttctg

SEQ ID NO: 14398 - DNA, 25 bp, Saccharomyces pastorianus
ggttctcatttaagtgccatcgcca

SEQ ID NO: 14399 - DNA, 25 bp, Saccharomyces pastorianus
cccagccggtgtcgacagtaatgat

SEQ ID NO: 14400 - DNA, 25 bp, Saccharomyces pastorianus
gttacgactggcatcaagggcatat

SEQ ID NO: 14401 - DNA, 25 bp, Saccharomyces pastorianus
gtatagcatttcatccattgtatgg

SEQ ID NO: 14402 - DNA, 25 bp, Saccharomyces pastorianus
cagatgggtatgcaatcggttcagt

SEQ ID NO: 14403 - DNA, 25 bp, Saccharomyces pastorianus
gctactgcagagagacatattgtca

SEQ ID NO: 14404 - DNA, 25 bp, Saccharomyces pastorianus
ggttcagttgaaggcagatgttcca

SEQ ID NO: 14405 - DNA, 25 bp, Saccharomyces pastorianus
aatgtcatcaggctgcatgctacaa

SEQ ID NO: 14406 - DNA, 25 bp, Saccharomyces pastorianus
ttggcgaacccaacaagcatattca

SEQ ID NO: 14407 - DNA, 25 bp, Saccharomyces pastorianus
atctttattggtcgtagctactgca

SEQ ID NO: 14408 - DNA, 25 bp, Saccharomyces pastorianus
gtcataatgcttttactccagaggg

SEQ ID NO: 14409 - DNA, 25 bp, Saccharomyces pastorianus
ttgccgactgcaaactctctggaag

SEQ ID NO: 14410 - DNA, 25 bp, Saccharomyces pastorianus
gtgatagtgcatcggttcagcctgc

SEQ ID NO: 14411 - DNA, 25 bp, Saccharomyces pastorianus
gatttcggtctaaacttactggaca

SEQ ID NO: 14412 - DNA, 25 bp, Saccharomyces pastorianus
tcagcatcatctcctttaaacatat

SEQ ID NO: 14413 - DNA, 25 bp, Saccharomyces pastorianus
ccgcaagggttctcaactactaact

SEQ ID NO: 14414 - DNA, 25 bp, Saccharomyces pastorianus
aaacatatcaacgtctccatctggt

SEQ ID NO: 14415 - DNA, 25 bp, Saccharomyces pastorianus
aatccgaattctttgatgcttccaa

SEQ ID NO: 14416 - DNA, 25 bp, Saccharomyces pastorianus
ggtcataaagcctccgcaagggttc

SEQ ID NO: 14417 - DNA, 25 bp, Saccharomyces pastorianus
gagctcaataataatcccatcacag

SEQ ID NO: 14418 - DNA, 25 bp, Saccharomyces pastorianus
ctaagccaacaggaagtgcggtcat

SEQ ID NO: 14419 - DNA, 25 bp, Saccharomyces pastorianus
gctgctgaagacgacgaagccacca

SEQ ID NO: 14420 - DNA, 25 bp, Saccharomyces pastorianus
ggcacatttgccattgcacactggt

SEQ ID NO: 14421 - DNA, 25 bp, Saccharomyces pastorianus
gaaaataaccctgttgtcacaaacg

SEQ ID NO: 14422 - DNA, 25 bp, Saccharomyces pastorianus
gaagccaccagagaaatcattgaca

SEQ ID NO: 14423 - DNA, 25 bp, Saccharomyces pastorianus
atttctgccatttatgaacccgttt

SEQ ID NO: 14424 - DNA, 25 bp, Saccharomyces pastorianus
gaattgttgaatgctgccgaccaaa

SEQ ID NO: 14425 - DNA, 25 bp, Saccharomyces pastorianus
ttgaaggcgctttacgaattgttga

SEQ ID NO: 14426 - DNA, 25 bp, Saccharomyces pastorianus
gagattttcagcgttgtgttcacta

SEQ ID NO: 14427 - DNA, 25 bp, Saccharomyces pastorianus
tgttgtcacaaacgagaccccaagg

SEQ ID NO: 14428 - DNA, 25 bp, Saccharomyces pastorianus
gaccaaaaggctctagctgctgaag

SEQ ID NO: 14429 - DNA, 25 bp, Saccharomyces pastorianus
tgacagagcatacgcgaacgcaagt

SEQ ID NO: 14430 - DNA, 25 bp, Saccharomyces pastorianus
tcgagctcttcttcgcccaataata

SEQ ID NO: 14431 - DNA, 25 bp, Saccharomyces pastorianus
acacaagtccaatttcgaagtcgag

SEQ ID NO: 14432 - DNA, 25 bp, Saccharomyces pastorianus
gatgctttcaattccgtgtcaacga

SEQ ID NO: 14433 - DNA, 25 bp, Saccharomyces pastorianus
tcccaattcacaatcacatccggaa

SEQ ID NO: 14434 - DNA, 25 bp, Saccharomyces pastorianus
aagacggatgacaacgctgaaaata

SEQ ID NO: 14435 - DNA, 25 bp, Saccharomyces pastorianus
ttccgtgtcaacgaaagtttccata

SEQ ID NO: 14436 - DNA, 25 bp, Saccharomyces pastorianus
aaagccgaatcctctatatctaaca

SEQ ID NO: 14437 - DNA, 25 bp, Saccharomyces pastorianus
gaaggttgacgtagatcccaattca

SEQ ID NO: 14438 - DNA, 25 bp, Saccharomyces pastorianus
gagtttggagaagtcacaggcttta

SEQ ID NO: 14439 - DNA, 25 bp, Saccharomyces pastorianus
tagagctagccactgaactgacatt

SEQ ID NO: 14440 - DNA, 25 bp, Saccharomyces pastorianus
ggaacctaatcggtatcaccatcga

SEQ ID NO: 14441 - DNA, 25 bp, Saccharomyces pastorianus
actctatctggcgtaaccgaatata

SEQ ID NO: 14442 - DNA, 25 bp, Saccharomyces pastorianus
aacagtaacaataaccgccgcccat

SEQ ID NO: 14443 - DNA, 25 bp, Saccharomyces pastorianus
gcaatccaaatatgaacagcggttt

SEQ ID NO: 14444 - DNA, 25 bp, Saccharomyces pastorianus
gaaatttatgtcagaggaaccttca

SEQ ID NO: 14445 - DNA, 25 bp, Saccharomyces pastorianus
gcggtttaggtggatccgttcaaca

SEQ ID NO: 14446 - DNA, 25 bp, Saccharomyces pastorianus
tcccagcatcgtcaattcaacaaca

SEQ ID NO: 14447 - DNA, 25 bp, Saccharomyces pastorianus
ggcgaagatagtgctgacagtagta

SEQ ID NO: 14448 - DNA, 25 bp, Saccharomyces pastorianus
aatggcgaaatcatacagggtacat

SEQ ID NO: 14449 - DNA, 25 bp, Saccharomyces pastorianus
gaatttgactctatctggcgtaacc

SEQ ID NO: 14450 - DNA, 25 bp, Saccharomyces pastorianus
aaagcctagtcagtggcgaagatag

SEQ ID NO: 14451 - DNA, 25 bp, Saccharomyces pastorianus
ggtggatccgttcaacataatttca

SEQ ID NO: 14452 - DNA, 25 bp, Saccharomyces pastorianus
gtcaagctgaccgtacaatttctgc

SEQ ID NO: 14453 - DNA, 25 bp, Saccharomyces pastorianus
tatactactccaacggtttccttga

SEQ ID NO: 14454 - DNA, 25 bp, Saccharomyces pastorianus
gggatgttatctcctggactggctc

SEQ ID NO: 14455 - DNA, 25 bp, Saccharomyces pastorianus
tcgcactcattacttcgcggtggaa

SEQ ID NO: 14456 - DNA, 25 bp, Saccharomyces pastorianus
gatggctgcattgatcaagactact

SEQ ID NO: 14457 - DNA, 25 bp, Saccharomyces pastorianus
ggctcaaatgggttttctagtcctt

SEQ ID NO: 14458 - DNA, 25 bp, Saccharomyces pastorianus
taccatatctactccaaatctgtcc

SEQ ID NO: 14459 - DNA, 25 bp, Saccharomyces pastorianus
taacggaggaggactacttcgggca

SEQ ID NO: 14460 - DNA, 25 bp, Saccharomyces pastorianus
gacacttcagttccagtcattagtt

SEQ ID NO: 14461 - DNA, 25 bp, Saccharomyces pastorianus
tttcttactggcttctgggatgtta

SEQ ID NO: 14462 - DNA, 25 bp, Saccharomyces pastorianus
tgttttaaactactacctccacagc

SEQ ID NO: 14463 - DNA, 25 bp, Saccharomyces pastorianus
tcctcttcacgctttcttgacaata

SEQ ID NO: 14464 - DNA, 25 bp, Saccharomyces pastorianus
gcataccggtaactgccttcaaaat

SEQ ID NO: 14465 - DNA, 25 bp, Saccharomyces pastorianus
taccgcggaactattgctcaagagg

SEQ ID NO: 14466 - DNA, 25 bp, Saccharomyces pastorianus
tcatgaccagtcagttgcactcgat

SEQ ID NO: 14467 - DNA, 25 bp, Saccharomyces pastorianus
tgagttgctactgcagggcgcatat

SEQ ID NO: 14468 - DNA, 25 bp, Saccharomyces pastorianus
aaatgcaaagtctccctttaccgcg

SEQ ID NO: 14469 - DNA, 25 bp, Saccharomyces pastorianus
gatgtgcgtgtcaacaagccactct

SEQ ID NO: 14470 - DNA, 25 bp, Saccharomyces pastorianus
agttgcactcgattggcttgggtcc

SEQ ID NO: 14471 - DNA, 25 bp, Saccharomyces pastorianus
gagaggtgcgagatgtccgctccac

SEQ ID NO: 14472 - DNA, 25 bp, Saccharomyces pastorianus
tatggcaatcatactcttcctccaa

SEQ ID NO: 14473 - DNA, 25 bp, Saccharomyces pastorianus
gtggatttacccattgcataccggt

SEQ ID NO: 14474 - DNA, 25 bp, Saccharomyces pastorianus
tcggccactgtgcactttgcagaag

SEQ ID NO: 14475 - DNA, 25 bp, Saccharomyces pastorianus
tggtaacagtactgcaagcgccgct

SEQ ID NO: 14476 - DNA, 25 bp, Saccharomyces pastorianus
gttcagggcactcgaagaaggctct

SEQ ID NO: 14477 - DNA, 25 bp, Saccharomyces pastorianus
aataatgctgccacaacacacgatg

SEQ ID NO: 14478 - DNA, 25 bp, Saccharomyces pastorianus
agtgcttctctcatctctcaagaaa

SEQ ID NO: 14479 - DNA, 25 bp, Saccharomyces pastorianus
gacgaactgtcgacttgactgcaga

SEQ ID NO: 14480 - DNA, 25 bp, Saccharomyces pastorianus
cgatgacacatctctgttcagggca

SEQ ID NO: 14481 - DNA, 25 bp, Saccharomyces pastorianus
ttcacaaacagcagacccttcaagt

SEQ ID NO: 14482 - DNA, 25 bp, Saccharomyces pastorianus
acagttccagaacctgcaggcagtt

SEQ ID NO: 14483 - DNA, 25 bp, Saccharomyces pastorianus
agactgctctcatgaccttatgtgg

SEQ ID NO: 14484 - DNA, 25 bp, Saccharomyces pastorianus
atttgcttcgatccgccagagactg

SEQ ID NO: 14485 - DNA, 25 bp, Saccharomyces pastorianus
gccggctatctaacgtttggtgaca

SEQ ID NO: 14486 - DNA, 25 bp, Saccharomyces pastorianus
ggaaacatcatcatgctttacccac

SEQ ID NO: 14487 - DNA, 25 bp, Saccharomyces pastorianus
taacgtgtggtatcctggttgcgtc

SEQ ID NO: 14488 - DNA, 25 bp, Saccharomyces pastorianus
gttccacctctatctcatttatttt

SEQ ID NO: 14489 - DNA, 25 bp, Saccharomyces pastorianus
atgtgctagccatcgtgggtgccac

SEQ ID NO: 14490 - DNA, 25 bp, Saccharomyces pastorianus
acaagtactacatcggtggctggcc

SEQ ID NO: 14491 - DNA, 25 bp, Saccharomyces pastorianus
gctccccgttgatccttaacaatag

SEQ ID NO: 14492 - DNA, 25 bp, Saccharomyces pastorianus
aagtgtctcgagtaccgttggcaga

SEQ ID NO: 14493 - DNA, 25 bp, Saccharomyces pastorianus
atagcgatcgtgctgcttgtgatgc

SEQ ID NO: 14494 - DNA, 25 bp, Saccharomyces pastorianus
agaagagccgatttaccaacccaag

SEQ ID NO: 14495 - DNA, 25 bp, Saccharomyces pastorianus
aatctcagtatcatcgttggcccat

SEQ ID NO: 14496 - DNA, 25 bp, Saccharomyces pastorianus
aaacgaatcctccagcatgggtcta

SEQ ID NO: 14497 - DNA, 25 bp, Saccharomyces pastorianus
gaaagccctgttgaactggaaaccg

SEQ ID NO: 14498 - DNA, 25 bp, Saccharomyces pastorianus
aataaaggaacctgcaaccctgcct

SEQ ID NO: 14499 - DNA, 25 bp, Saccharomyces pastorianus
agctcccaagttctactgcgtaaga

SEQ ID NO: 14500 - DNA, 25 bp, Saccharomyces pastorianus
cgtacgtcaaccatcgaaccaaaat

SEQ ID NO: 14501 - DNA, 25 bp, Saccharomyces pastorianus
aaggatgtcgttgagcccgtggccc

SEQ ID NO: 14502 - DNA, 25 bp, Saccharomyces pastorianus
gaaaccgagccacctgttcaaataa

SEQ ID NO: 14503 - DNA, 25 bp, Saccharomyces pastorianus
aggtcatcttcctgggtctgactga

SEQ ID NO: 14504 - DNA, 25 bp, Saccharomyces pastorianus
gccgcggacttcaagtgtcgtgaca

SEQ ID NO: 14505 - DNA, 25 bp, Saccharomyces pastorianus
agacgatccaggtccaggtcatctt

SEQ ID NO: 14506 - DNA, 25 bp, Saccharomyces pastorianus
gaaagaagaagttccacctgccatc

SEQ ID NO: 14507 - DNA, 25 bp, Saccharomyces pastorianus
gatccagttcattcgatggtcgcaa

SEQ ID NO: 14508 - DNA, 25 bp, Saccharomyces pastorianus
gatactctaacaccgaagtttgcta

SEQ ID NO: 14509 - DNA, 25 bp, Saccharomyces pastorianus
atctcatcatcctcgtattttggcg

SEQ ID NO: 14510 - DNA, 25 bp, Saccharomyces pastorianus
gataatgccacatcgatctcatcat

SEQ ID NO: 14511 - DNA, 25 bp, Saccharomyces pastorianus
agtagcccagggtccaagatataca

SEQ ID NO: 14512 - DNA, 25 bp, Saccharomyces pastorianus
tccgatcagctttttggtcgtggtt

SEQ ID NO: 14513 - DNA, 25 bp, Saccharomyces pastorianus
gattcccaattcatcaatagcggca

SEQ ID NO: 14514 - DNA, 25 bp, Saccharomyces pastorianus
aaaggctatatcttccgatcagctt

SEQ ID NO: 14515 - DNA, 25 bp, Saccharomyces pastorianus
agtgacttcttgaatgacgctccaa

SEQ ID NO: 14516 - DNA, 25 bp, Saccharomyces pastorianus
gaccatgaatgacgctaacgattta

SEQ ID NO: 14517 - DNA, 25 bp, Saccharomyces pastorianus
gacgctccaagcaactctgatacaa

SEQ ID NO: 14518 - DNA, 25 bp, Saccharomyces pastorianus
atggatgacgccttgagattgaaca

SEQ ID NO: 14519 - DNA, 25 bp, Saccharomyces pastorianus
tacggcaatccgaatccaagggcta

SEQ ID NO: 14520 - DNA, 25 bp, Saccharomyces pastorianus
aagggctaacttgcatgggtacggc

SEQ ID NO: 14521 - DNA, 25 bp, Saccharomyces pastorianus
gccagtgccgacagctaagcaacaa

SEQ ID NO: 14522 - DNA, 25 bp, Saccharomyces pastorianus
gactctatcagtcatccccaaaatt

SEQ ID NO: 14523 - DNA, 25 bp, Saccharomyces pastorianus
caagggctaatggtaacacgacaag

SEQ ID NO: 14524 - DNA, 25 bp, Saccharomyces pastorianus
aacccgaaatactacgccagtgccg

SEQ ID NO: 14525 - DNA, 25 bp, Saccharomyces pastorianus
gtactaacgagcataacttaccaaa

SEQ ID NO: 14526 - DNA, 25 bp, Saccharomyces pastorianus
tagaatttcatcaaacccacaaagt

SEQ ID NO: 14527 - DNA, 25 bp, Saccharomyces pastorianus
taccaaagccaacactacgaacaag

SEQ ID NO: 14528 - DNA, 25 bp, Saccharomyces pastorianus
tattcaagcttaaaacccaatccta

SEQ ID NO: 14529 - DNA, 25 bp, Saccharomyces pastorianus
ttaactcaattaacctagacgggat

SEQ ID NO: 14530 - DNA, 25 bp, Saccharomyces pastorianus
ttaataactctcgacaacttctgtg

SEQ ID NO: 14531 - DNA, 25 bp, Saccharomyces pastorianus
gaaagcgatcaaagtctcacggata

SEQ ID NO: 14532 - DNA, 25 bp, Saccharomyces pastorianus
gtttgttgtatagcagtgacgacca

SEQ ID NO: 14533 - DNA, 25 bp, Saccharomyces pastorianus
gacaacttctgtgaactgggattac

SEQ ID NO: 14534 - DNA, 25 bp, Saccharomyces pastorianus
gaaatttctgattcatccgttttat

SEQ ID NO: 14535 - DNA, 25 bp, Saccharomyces pastorianus
tgctcttcagcaaatactattggtg

SEQ ID NO: 14536 - DNA, 25 bp, Saccharomyces pastorianus
gattgcacagtgaccaagaagatgt

SEQ ID NO: 14537 - DNA, 25 bp, Saccharomyces pastorianus
gatttcgctcaagggaacagggtgt

SEQ ID NO: 14538 - DNA, 25 bp, Saccharomyces pastorianus
acaacgtcaacactggtaaaccaat

SEQ ID NO: 14539 - DNA, 25 bp, Saccharomyces pastorianus
ttttttgttcttggagacgacgaat

SEQ ID NO: 14540 - DNA, 25 bp, Saccharomyces pastorianus
gctgccaaagtctcatacatgtttc

SEQ ID NO: 14541 - DNA, 25 bp, Saccharomyces pastorianus
gaagacttagtgaccgtgtttgacg

SEQ ID NO: 14542 - DNA, 25 bp, Saccharomyces pastorianus
atagacggtgtcttggacctcacat

SEQ ID NO: 14543 - DNA, 25 bp, Saccharomyces pastorianus
gagttgatttaccacaatatgtcga

SEQ ID NO: 14544 - DNA, 25 bp, Saccharomyces pastorianus
ggacctcacatttagtgccgacgat

SEQ ID NO: 14545 - DNA, 25 bp, Saccharomyces pastorianus
gaccgtgtttgacgaacgtgaacta

SEQ ID NO: 14546 - DNA, 25 bp, Saccharomyces pastorianus
aaagggcacgtttattgcaattcac

SEQ ID NO: 14547 - DNA, 25 bp, Saccharomyces pastorianus
gatctacaaggttccgatggtccaa

SEQ ID NO: 14548 - DNA, 25 bp, Saccharomyces pastorianus
tgttgattggtggtatcgcagaaat

SEQ ID NO: 14549 - DNA, 25 bp, Saccharomyces pastorianus
ttctcgtatacctgttaatgggttc

SEQ ID NO: 14550 - DNA, 25 bp, Saccharomyces pastorianus
ggtgaagtacaacagctgccaaagt

SEQ ID NO: 14551 - DNA, 25 bp, Saccharomyces pastorianus
tgacgctttgcccacatatttgttg

SEQ ID NO: 14552 - DNA, 25 bp, Saccharomyces pastorianus
gaaggattcaccagaagaccagtaa

SEQ ID NO: 14553 - DNA, 25 bp, Saccharomyces pastorianus
tcgaagtcaacgtttcagaactggg

SEQ ID NO: 14554 - DNA, 25 bp, Saccharomyces pastorianus
gtgactcatccagaattggccgtta

SEQ ID NO: 14555 - DNA, 25 bp, Saccharomyces pastorianus
gacaagttttcagtaccactaccaa

SEQ ID NO: 14556 - DNA, 25 bp, Saccharomyces pastorianus
gaattggccgttactgtcttcttac

SEQ ID NO: 14557 - DNA, 25 bp, Saccharomyces pastorianus
actgtcttcttaccaattctagctg

SEQ ID NO: 14558 - DNA, 25 bp, Saccharomyces pastorianus
gaacaaaccaatacagccaaagcta

SEQ ID NO: 14559 - DNA, 25 bp, Saccharomyces pastorianus
ccaagggtaccattatcgaagtcaa

SEQ ID NO: 14560 - DNA, 25 bp, Saccharomyces pastorianus
ttattaggccaagtgcattgagaca

SEQ ID NO: 14561 - DNA, 25 bp, Saccharomyces pastorianus
gaaaggcaaatgtgactcatccaga

SEQ ID NO: 14562 - DNA, 25 bp, Saccharomyces pastorianus
aatcctttgaaattgcttggtaata

SEQ ID NO: 14563 - DNA, 25 bp, Saccharomyces pastorianus
gaagtacccgaaccaatctcagatc

SEQ ID NO: 14564 - DNA, 25 bp, Saccharomyces pastorianus
gtactcttatcaagacccattctct

SEQ ID NO: 14565 - DNA, 25 bp, Saccharomyces pastorianus
gatcatgccatcataaatcctttga

SEQ ID NO: 14566 - DNA, 25 bp, Saccharomyces pastorianus
aagacccattctcttgaacaagaaa

SEQ ID NO: 14567 - DNA, 25 bp, Saccharomyces pastorianus
atctcagatccaagcgatgattcaa

SEQ ID NO: 14568 - DNA, 25 bp, Saccharomyces pastorianus
actccgcctttgaatcgtctttaag

SEQ ID NO: 14569 - DNA, 25 bp, Saccharomyces pastorianus
gaagtactaataaactccgcctttg

SEQ ID NO: 14570 - DNA, 25 bp, Saccharomyces pastorianus
aaggaagcttctactcacatcgcaa

SEQ ID NO: 14571 - DNA, 25 bp, Saccharomyces pastorianus
caacgaatccgttcaagtcaaacaa

SEQ ID NO: 14572 - DNA, 25 bp, Saccharomyces pastorianus
gcaagtaaaatctcaacgaatccgt

SEQ ID NO: 14573 - DNA, 25 bp, Saccharomyces pastorianus
ctgaagcttccgtgtaccctgaata

SEQ ID NO: 14574 - DNA, 25 bp, Saccharomyces pastorianus
cgccagaatcgtcagagttagatct

SEQ ID NO: 14575 - DNA, 25 bp, Saccharomyces pastorianus
gctctaccaaagacctacaacaagt

SEQ ID NO: 14576 - DNA, 25 bp, Saccharomyces pastorianus
atttgtctgaagcttccgtgtaccc

SEQ ID NO: 14577 - DNA, 25 bp, Saccharomyces pastorianus
gtgtaccctgaatacgctctaccaa

SEQ ID NO: 14578 - DNA, 25 bp, Saccharomyces pastorianus
gaatcgtcagagttagatctagaga

SEQ ID NO: 14579 - DNA, 25 bp, Saccharomyces pastorianus
tgtctgaagcttccgtgtaccctga

SEQ ID NO: 14580 - DNA, 25 bp, Saccharomyces pastorianus
gtaccctgaatacgctctaccaaag

SEQ ID NO: 14581 - DNA, 25 bp, Saccharomyces pastorianus
gaatacgctctaccaaagacctaca

SEQ ID NO: 14582 - DNA, 25 bp, Saccharomyces pastorianus
gagatttgtctgaagcttccgtgta

SEQ ID NO: 14583 - DNA, 25 bp, Saccharomyces pastorianus
ttccgtgtaccctgaatacgctcta

SEQ ID NO: 14584 - DNA, 25 bp, Saccharomyces pastorianus
gatttagtacccagacgacacactc

SEQ ID NO: 14585 - DNA, 25 bp, Saccharomyces pastorianus
gagtgattatactgcatctcaacaa

SEQ ID NO: 14586 - DNA, 25 bp, Saccharomyces pastorianus
ggttcggctcaaatttctcctagaa

SEQ ID NO: 14587 - DNA, 25 bp, Saccharomyces pastorianus
tccgctttattcatgaaccctgcaa

SEQ ID NO: 14588 - DNA, 25 bp, Saccharomyces pastorianus
tcgagcaagtttatccagccgggtt

SEQ ID NO: 14589 - DNA, 25 bp, Saccharomyces pastorianus
gaaattggcgacaagttccccgatt

SEQ ID NO: 14590 - DNA, 25 bp, Saccharomyces pastorianus
tcctaccttgagcagacagcattct

SEQ ID NO: 14591 - DNA, 25 bp, Saccharomyces pastorianus
gcattcaagaagacctcgagcaagt

SEQ ID NO: 14592 - DNA, 25 bp, Saccharomyces pastorianus
agttccccgatttcagaagcattca

SEQ ID NO: 14593 - DNA, 25 bp, Saccharomyces pastorianus
agtggatattttcccacgaggatcc

SEQ ID NO: 14594 - DNA, 25 bp, Saccharomyces pastorianus
ttctcctagaacgtctgtgagtgat

SEQ ID NO: 14595 - DNA, 25 bp, Saccharomyces pastorianus
gggtcattatctagccattatttcc

SEQ ID NO: 14596 - DNA, 25 bp, Saccharomyces pastorianus
agctccattagtaatcgctgatcca

SEQ ID NO: 14597 - DNA, 25 bp, Saccharomyces pastorianus
agaacctgcctttaagcttctagga

SEQ ID NO: 14598 - DNA, 25 bp, Saccharomyces pastorianus
aaatcacccagttccaaacactagt

SEQ ID NO: 14599 - DNA, 25 bp, Saccharomyces pastorianus
ggtacttatatgctggatacaccaa

SEQ ID NO: 14600 - DNA, 25 bp, Saccharomyces pastorianus
tgatccaacttacttccctgaaaaa

SEQ ID NO: 14601 - DNA, 25 bp, Saccharomyces pastorianus
tttacttgtccagatcttacgatgc

SEQ ID NO: 14602 - DNA, 25 bp, Saccharomyces pastorianus
taagcttctaggacccattgaggaa

SEQ ID NO: 14603 - DNA, 25 bp, Saccharomyces pastorianus
cacaacgtttgctctaagggtcatt

SEQ ID NO: 14604 - DNA, 25 bp, Saccharomyces pastorianus
ggccaaagagtcatcagagccattt

SEQ ID NO: 14605 - DNA, 25 bp, Saccharomyces pastorianus
ttacgatgcatcttcccactttgaa

SEQ ID NO: 14606 - DNA, 25 bp, Saccharomyces pastorianus
gttgtcgcaggctatggatgtctta

SEQ ID NO: 14607 - DNA, 25 bp, Saccharomyces pastorianus
gatattgtcaggttgtcgcaggcta

SEQ ID NO: 14608 - DNA, 25 bp, Saccharomyces pastorianus
taaagtgttctttctgtcaccagcc

SEQ ID NO: 14609 - DNA, 25 bp, Saccharomyces pastorianus
cacagtgctgcggaacggcatcgaa

SEQ ID NO: 14610 - DNA, 25 bp, Saccharomyces pastorianus
gaaggcgattcaacggatacaccac

SEQ ID NO: 14611 - DNA, 25 bp, Saccharomyces pastorianus
taagtctgaatgacagcgccggcac

SEQ ID NO: 14612 - DNA, 25 bp, Saccharomyces pastorianus
gatacaccacaggatgcagccagca

SEQ ID NO: 14613 - DNA, 25 bp, Saccharomyces pastorianus
aggatggatctcagttacaggtgga

SEQ ID NO: 14614 - DNA, 25 bp, Saccharomyces pastorianus
ggagatacgctctgatacccataaa

SEQ ID NO: 14615 - DNA, 25 bp, Saccharomyces pastorianus
gatggacgccaatggtcttgacaca

SEQ ID NO: 14616 - DNA, 25 bp, Saccharomyces pastorianus
agcccggacacacaagagcacgttg

SEQ ID NO: 14617 - DNA, 25 bp, Saccharomyces pastorianus
ggatatcccctttgtgggacagcac

SEQ ID NO: 14618 - DNA, 25 bp, Saccharomyces pastorianus
actttagatgctcccagttttacca

SEQ ID NO: 14619 - DNA, 25 bp, Saccharomyces pastorianus
ggattcatttgtttgaagaccccga

SEQ ID NO: 14620 - DNA, 25 bp, Saccharomyces pastorianus
agaccccgaacaggacaagcatgat

SEQ ID NO: 14621 - DNA, 25 bp, Saccharomyces pastorianus
gttttaccaagtacagctatcagat

SEQ ID NO: 14622 - DNA, 25 bp, Saccharomyces pastorianus
caaatttcactttagatgctcccag

SEQ ID NO: 14623 - DNA, 25 bp, Saccharomyces pastorianus
atttgagtcgatttctcactcccga

SEQ ID NO: 14624 - DNA, 25 bp, Saccharomyces pastorianus
gatcatcggtctactgtgtgattca

SEQ ID NO: 14625 - DNA, 25 bp, Saccharomyces pastorianus
acggatacgtgatcccttttcaatg

SEQ ID NO: 14626 - DNA, 25 bp, Saccharomyces pastorianus
tatgtatcaagacctcgtggacgag

SEQ ID NO: 14627 - DNA, 25 bp, Saccharomyces pastorianus
tgggacagcaccagaacggatacgt

SEQ ID NO: 14628 - DNA, 25 bp, Saccharomyces pastorianus
gaagttcaatcggatccgtccacag

SEQ ID NO: 14629 - DNA, 25 bp, Saccharomyces pastorianus
aaagcccacggtcactcgagaatgt

SEQ ID NO: 14630 - DNA, 25 bp, Saccharomyces pastorianus
gtctttacctgcgtttgttgtacta

SEQ ID NO: 14631 - DNA, 25 bp, Saccharomyces pastorianus
attcattgtcatggtcaggccgacg

SEQ ID NO: 14632 - DNA, 25 bp, Saccharomyces pastorianus
aaatattttgcctggcctacgtact

SEQ ID NO: 14633 - DNA, 25 bp, Saccharomyces pastorianus
gcacgcctacatcacgaagttcaat

SEQ ID NO: 14634 - DNA, 25 bp, Saccharomyces pastorianus
actcctcccagtatcaatgacatta

SEQ ID NO: 14635 - DNA, 25 bp, Saccharomyces pastorianus
acgcttttcaaatcaccggagtcct

SEQ ID NO: 14636 - DNA, 25 bp, Saccharomyces pastorianus
ggcatgggcaagatcgacatcgcta

SEQ ID NO: 14637 - DNA, 25 bp, Saccharomyces pastorianus
gcatcggtgttttcgttagccttac

SEQ ID NO: 14638 - DNA, 25 bp, Saccharomyces pastorianus
agtcctcttaccttccattattatt

SEQ ID NO: 14639 - DNA, 25 bp, Saccharomyces pastorianus
aaaacgcagtgacttccttacatgt

SEQ ID NO: 14640 - DNA, 25 bp, Saccharomyces pastorianus
tggatagcccggcaattggcccaat

SEQ ID NO: 14641 - DNA, 25 bp, Saccharomyces pastorianus
gcctacgttgcattcacatctgtgt

SEQ ID NO: 14642 - DNA, 25 bp, Saccharomyces pastorianus
acattacaggccacccttggtattt

SEQ ID NO: 14643 - DNA, 25 bp, Saccharomyces pastorianus
gtatctagtcccagtttcattagcc

SEQ ID NO: 14644 - DNA, 25 bp, Saccharomyces pastorianus
ggtacatagaacctgtgcctacgtt

SEQ ID NO: 14645 - DNA, 25 bp, Saccharomyces pastorianus
ggatctataacacttggcccaaaat

SEQ ID NO: 14646 - DNA, 25 bp, Saccharomyces pastorianus
gtttcattagcctctatccatcaag

SEQ ID NO: 14647 - DNA, 25 bp, Saccharomyces pastorianus
gtgttagctgcccatatgtatgcca

SEQ ID NO: 14648 - DNA, 25 bp, Saccharomyces pastorianus
tttattggcggtgtcttttctgacc

SEQ ID NO: 14649 - DNA, 25 bp, Saccharomyces pastorianus
ttggttttcgcctctcaactaagaa

SEQ ID NO: 14650 - DNA, 25 bp, Saccharomyces pastorianus
acaaccatcatgtccaccagattag

SEQ ID NO: 14651 - DNA, 25 bp, Saccharomyces pastorianus
gcatttgtagacactggtgcccaaa

SEQ ID NO: 14652 - DNA, 25 bp, Saccharomyces pastorianus
gtaagatccaccaagctcaagtcaa

SEQ ID NO: 14653 - DNA, 25 bp, Saccharomyces pastorianus
tagggacgctgttgtcaaggcctta

SEQ ID NO: 14654 - DNA, 25 bp, Saccharomyces pastorianus
gacatttggcttgcgtagacttgaa

SEQ ID NO: 14655 - DNA, 25 bp, Saccharomyces pastorianus
ggacttgggattttctagggacgct

SEQ ID NO: 14656 - DNA, 25 bp, Saccharomyces pastorianus
gacaagctctagtttgcagccgcaa

SEQ ID NO: 14657 - DNA, 25 bp, Saccharomyces pastorianus
tggtgttacgagaatgttccccgaa

SEQ ID NO: 14658 - DNA, 25 bp, Saccharomyces pastorianus
attccatgtagttttactgtcctag

SEQ ID NO: 14659 - DNA, 25 bp, Saccharomyces pastorianus
ggcgcttgctccaaagacaggcgta

SEQ ID NO: 14660 - DNA, 25 bp, Saccharomyces pastorianus
gtcggtcgcatcttcgtctaacaag

SEQ ID NO: 14661 - DNA, 25 bp, Saccharomyces pastorianus
aaagcaaccttccactaagcaactt

SEQ ID NO: 14662 - DNA, 25 bp, Saccharomyces pastorianus
caatggtcgtgttctaaatgtctaa

SEQ ID NO: 14663 - DNA, 25 bp, Saccharomyces pastorianus
tggatcttacaccatactgggccag

SEQ ID NO: 14664 - DNA, 25 bp, Saccharomyces pastorianus
actgggccagagctttcaatcatga

SEQ ID NO: 14665 - DNA, 25 bp, Saccharomyces pastorianus
ggttgcgtgccattcaggaagctta

SEQ ID NO: 14666 - DNA, 25 bp, Saccharomyces pastorianus
tgtcccacgcattatgacctgtaac

SEQ ID NO: 14667 - DNA, 25 bp, Saccharomyces pastorianus
tgccaggcctgtgaacatacttcta

SEQ ID NO: 14668 - DNA, 25 bp, Saccharomyces pastorianus
gcgtctagattacaatgccaggcct

SEQ ID NO: 14669 - DNA, 25 bp, Saccharomyces pastorianus
tgatgaggacattcccaccagaggc

SEQ ID NO: 14670 - DNA, 25 bp, Saccharomyces pastorianus
gccaaattccgccattcagatatag

SEQ ID NO: 14671 - DNA, 25 bp, Saccharomyces pastorianus
ggtggccattacacatcatatgtct

SEQ ID NO: 14672 - DNA, 25 bp, Saccharomyces pastorianus
gattttgtatctgatttccgccggt

SEQ ID NO: 14673 - DNA, 25 bp, Saccharomyces pastorianus
gctgcagattttcttgatcctgtcc

SEQ ID NO: 14674 - DNA, 25 bp, Saccharomyces pastorianus
aacattaacttcaaccaggacggtg

SEQ ID NO: 14675 - DNA, 25 bp, Saccharomyces pastorianus
tcaactgctgcaacccggaactgga

SEQ ID NO: 14676 - DNA, 25 bp, Saccharomyces pastorianus
gatcctgtccacctcgattttgtat

SEQ ID NO: 14677 - DNA, 25 bp, Saccharomyces pastorianus
aaccttgctagtggtggtgacgcct

SEQ ID NO: 14678 - DNA, 25 bp, Saccharomyces pastorianus
gaaacacatcaacccaggctactgg

SEQ ID NO: 14679 - DNA, 25 bp, Saccharomyces pastorianus
acctgtcctccatgttgtgttacaa

SEQ ID NO: 14680 - DNA, 25 bp, Saccharomyces pastorianus
agaaaggccgtgtaccacgtcaact

SEQ ID NO: 14681 - DNA, 25 bp, Saccharomyces pastorianus
tggctggtgcttattatcgtgttga

SEQ ID NO: 14682 - DNA, 25 bp, Saccharomyces pastorianus
tgttgtactacggtgcctccaaatc

SEQ ID NO: 14683 - DNA, 25 bp, Saccharomyces pastorianus
acatctgccacatctggtattgttc

SEQ ID NO: 14684 - DNA, 25 bp, Saccharomyces pastorianus
acatctggtattgttccaacattgc

SEQ ID NO: 14685 - DNA, 25 bp, Saccharomyces pastorianus
agaatcccgatggtacaaagctagc

SEQ ID NO: 14686 - DNA, 25 bp, Saccharomyces pastorianus
attgcaaaatattgtggccactgtg

SEQ ID NO: 14687 - DNA, 25 bp, Saccharomyces pastorianus
agaagacataaagagggcggcccca

SEQ ID NO: 14688 - DNA, 25 bp, Saccharomyces pastorianus
gaaaaggatacatctgccacatctg

SEQ ID NO: 14689 - DNA, 25 bp, Saccharomyces pastorianus
aagctagcaactacttttcaaagtg

SEQ ID NO: 14690 - DNA, 25 bp, Saccharomyces pastorianus
aaagagggcggccccagaatctgaa

SEQ ID NO: 14691 - DNA, 25 bp, Saccharomyces pastorianus
tggtattgttccaacattgcaaaat

SEQ ID NO: 14692 - DNA, 25 bp, Saccharomyces pastorianus
tcccgatggtacaaagctagcaact

SEQ ID NO: 14693 - DNA, 25 bp, Saccharomyces pastorianus
ggatacatctgccacatctggtatt

SEQ ID NO: 14694 - DNA, 25 bp, Saccharomyces pastorianus
gtcgttaccggtgccaaaagtgaag

SEQ ID NO: 14695 - DNA, 25 bp, Saccharomyces pastorianus
gaaaatatgccagaatcattcaaaa

SEQ ID NO: 14696 - DNA, 25 bp, Saccharomyces pastorianus
tgggtttgctgccaaattcacggac

SEQ ID NO: 14697 - DNA, 25 bp, Saccharomyces pastorianus
cactacatgcgcgtaatgcggagta

SEQ ID NO: 14698 - DNA, 25 bp, Saccharomyces pastorianus
ggtgccaaaagtgaagatgactcta

SEQ ID NO: 14699 - DNA, 25 bp, Saccharomyces pastorianus
aaacgtttcgctgctgttatcatgc

SEQ ID NO: 14700 - DNA, 25 bp, Saccharomyces pastorianus
cgctgctgttatcatgcgtatcaga

SEQ ID NO: 14701 - DNA, 25 bp, Saccharomyces pastorianus
attcaaaaaattgggtttgctgcca

SEQ ID NO: 14702 - DNA, 25 bp, Saccharomyces pastorianus
gtataaccctaaacgtttcgctgct

SEQ ID NO: 14703 - DNA, 25 bp, Saccharomyces pastorianus
gatgactctaaattagccagtagaa

SEQ ID NO: 14704 - DNA, 25 bp, Saccharomyces pastorianus
gcgcgtaatgcggagtataacccta

SEQ ID NO: 14705 - DNA, 25 bp, Saccharomyces pastorianus
tctcctcttatgaacccgaattatt

SEQ ID NO: 14706 - DNA, 25 bp, Saccharomyces pastorianus
gtccttaccggtgccaagcaaagag

SEQ ID NO: 14707 - DNA, 25 bp, Saccharomyces pastorianus
tggtactttctcctcttatgaaccc

SEQ ID NO: 14708 - DNA, 25 bp, Saccharomyces pastorianus
tgtgctgttaattttcgtttccggt

SEQ ID NO: 14709 - DNA, 25 bp, Saccharomyces pastorianus
actttctcctcttatgaacccgaat

SEQ ID NO: 14710 - DNA, 25 bp, Saccharomyces pastorianus
gtaagatcgtccttaccggtgccaa

SEQ ID NO: 14711 - DNA, 25 bp, Saccharomyces pastorianus
tatgaacccgaattatttcctggtt

SEQ ID NO: 14712 - DNA, 25 bp, Saccharomyces pastorianus
ctatacgtttggaagggttggcatt

SEQ ID NO: 14713 - DNA, 25 bp, Saccharomyces pastorianus
ggtgaagccaaagattgtgctgtta

SEQ ID NO: 14714 - DNA, 25 bp, Saccharomyces pastorianus
gtttggaagggttggcattcagtca

SEQ ID NO: 14715 - DNA, 25 bp, Saccharomyces pastorianus
tatatcaagcttttgaagccatata

SEQ ID NO: 14716 - DNA, 25 bp, Saccharomyces pastorianus
acacttgtgtcaacctggaaaagac

SEQ ID NO: 14717 - DNA, 25 bp, Saccharomyces pastorianus
gtgagctcgccagctacgtgggatc

SEQ ID NO: 14718 - DNA, 25 bp, Saccharomyces pastorianus
gagacggcgtttaatgatttgcaac

SEQ ID NO: 14719 - DNA, 25 bp, Saccharomyces pastorianus
agtatatcatcaccggtgagctcgc

SEQ ID NO: 14720 - DNA, 25 bp, Saccharomyces pastorianus
gactactgaactatcattcgaattt

SEQ ID NO: 14721 - DNA, 25 bp, Saccharomyces pastorianus
aacaggtggctctggatcacgctca

SEQ ID NO: 14722 - DNA, 25 bp, Saccharomyces pastorianus
ttactatccgcttcatctaactctt

SEQ ID NO: 14723 - DNA, 25 bp, Saccharomyces pastorianus
catctaactcttccgcagatcaaga

SEQ ID NO: 14724 - DNA, 25 bp, Saccharomyces pastorianus
ggaactggccgaagaacgtgaacat

SEQ ID NO: 14725 - DNA, 25 bp, Saccharomyces pastorianus
aaagactacaccgttactatccgct

SEQ ID NO: 14726 - DNA, 25 bp, Saccharomyces pastorianus
aacgatcgtgccgaatacgtacaag

SEQ ID NO: 14727 - DNA, 25 bp, Saccharomyces pastorianus
agtcaccaactgtccttgtactatc

SEQ ID NO: 14728 - DNA, 25 bp, Saccharomyces pastorianus
aactctagctcctctgtcattgtgg

SEQ ID NO: 14729 - DNA, 25 bp, Saccharomyces pastorianus
gtggaaacaaacgtcaatgctgcta

SEQ ID NO: 14730 - DNA, 25 bp, Saccharomyces pastorianus
aaagttcctactaccattggccatg

SEQ ID NO: 14731 - DNA, 25 bp, Saccharomyces pastorianus
aacgctacatacactgttacagccc

SEQ ID NO: 14732 - DNA, 25 bp, Saccharomyces pastorianus
attgtggcgccatcgagcgacgctt

SEQ ID NO: 14733 - DNA, 25 bp, Saccharomyces pastorianus
gttttctacaactctactgctacca

SEQ ID NO: 14734 - DNA, 25 bp, Saccharomyces pastorianus
tcttcttctgttccagttttctaca

SEQ ID NO: 14735 - DNA, 25 bp, Saccharomyces pastorianus
acagcttcctctacacatgacgtgg

SEQ ID NO: 14736 - DNA, 25 bp, Saccharomyces pastorianus
tagcgagtttactacctactgtcct

SEQ ID NO: 14737 - DNA, 25 bp, Saccharomyces pastorianus
ttcatcggcggtaacggcactgcta

SEQ ID NO: 14738 - DNA, 25 bp, Saccharomyces pastorianus
gtggccctgcaccaggacaagctgt

SEQ ID NO: 14739 - DNA, 25 bp, Saccharomyces pastorianus
tttgcgcgcggaactatgcactcca

SEQ ID NO: 14740 - DNA, 25 bp, Saccharomyces pastorianus
gaagaacgaatggtcgctgccgcta

SEQ ID NO: 14741 - DNA, 25 bp, Saccharomyces pastorianus
gttctagcggagtttcggcagtgtt

SEQ ID NO: 14742 - DNA, 25 bp, Saccharomyces pastorianus
ttcgagctccgcagggtcaaagtgg

SEQ ID NO: 14743 - DNA, 25 bp, Saccharomyces pastorianus
actccacggctcttagcgagaagtg

SEQ ID NO: 14744 - DNA, 25 bp, Saccharomyces pastorianus
gacaagctgttcctgccggcgcagt

SEQ ID NO: 14745 - DNA, 25 bp, Saccharomyces pastorianus
gcggcaaccgctggtcgtgaagaac

SEQ ID NO: 14746 - DNA, 25 bp, Saccharomyces pastorianus
ggcgctagcacacgtcgaaaccata

SEQ ID NO: 14747 - DNA, 25 bp, Saccharomyces pastorianus
agttcctacagcaccaccagacgat

SEQ ID NO: 14748 - DNA, 25 bp, Saccharomyces pastorianus
atagcgtacgtgtggtaccaccacg

SEQ ID NO: 14749 - DNA, 25 bp, Saccharomyces pastorianus
agacacatggccaactacccggtag

SEQ ID NO: 14750 - DNA, 25 bp, Saccharomyces pastorianus
tccgtcctacaaacacttgtcttga

SEQ ID NO: 14751 - DNA, 25 bp, Saccharomyces pastorianus
ccttacttgggcctgcaggtcatta

SEQ ID NO: 14752 - DNA, 25 bp, Saccharomyces pastorianus
tcagctccccaatgaagcgtctttt

SEQ ID NO: 14753 - DNA, 25 bp, Saccharomyces pastorianus
aaatacctattgctctcgggttctt

SEQ ID NO: 14754 - DNA, 25 bp, Saccharomyces pastorianus
gagaccggtgctcaacagttcagct

SEQ ID NO: 14755 - DNA, 25 bp, Saccharomyces pastorianus
gccgcagtgttcatttcattcacga

SEQ ID NO: 14756 - DNA, 25 bp, Saccharomyces pastorianus
ttctttaacgccctgagacacatgg

SEQ ID NO: 14757 - DNA, 25 bp, Saccharomyces pastorianus
ccctggcgcttcatcaacggaaaat

SEQ ID NO: 14758 - DNA, 25 bp, Saccharomyces pastorianus
atcaagaacaggtggctagccgccc

SEQ ID NO: 14759 - DNA, 25 bp, Saccharomyces pastorianus
atatgggcattttccagtccatgaa

SEQ ID NO: 14760 - DNA, 25 bp, Saccharomyces pastorianus
ctcccttttctcacatgcaatggta

SEQ ID NO: 14761 - DNA, 25 bp, Saccharomyces pastorianus
ggacgcatctaatttggctattgtg

SEQ ID NO: 14762 - DNA, 25 bp, Saccharomyces pastorianus
gataactccttcaccttagaggatg

SEQ ID NO: 14763 - DNA, 25 bp, Saccharomyces pastorianus
atttgagagagctaccggactccct

SEQ ID NO: 14764 - DNA, 25 bp, Saccharomyces pastorianus
aagaaggtgccaccgataactcctt

SEQ ID NO: 14765 - DNA, 25 bp, Saccharomyces pastorianus
caaagcgcatgatatgtcctgtgaa

SEQ ID NO: 14766 - DNA, 25 bp, Saccharomyces pastorianus
atagaattcccggttccattggtag

SEQ ID NO: 14767 - DNA, 25 bp, Saccharomyces pastorianus
ggactactgggaaagctacctaggt

SEQ ID NO: 14768 - DNA, 25 bp, Saccharomyces pastorianus
gctacctaggtgctactatcaaact

SEQ ID NO: 14769 - DNA, 25 bp, Saccharomyces pastorianus
agttcaaaccattctccaggatttc

SEQ ID NO: 14770 - DNA, 25 bp, Saccharomyces pastorianus
gaatgccatcgcaggatgtttcaag

SEQ ID NO: 14771 - DNA, 25 bp, Saccharomyces pastorianus
aagatcattgttttgccccagttct

SEQ ID NO: 14772 - DNA, 25 bp, Saccharomyces pastorianus
gtgccagcacgtttatcggcgaggt

SEQ ID NO: 14773 - DNA, 25 bp, Saccharomyces pastorianus
aaaggctacggcgaatcatggttgc

SEQ ID NO: 14774 - DNA, 25 bp, Saccharomyces pastorianus
agcatccccggaatcgtttcaggaa

SEQ ID NO: 14775 - DNA, 25 bp, Saccharomyces pastorianus
agttgagctccaagagtggcgtccc

SEQ ID NO: 14776 - DNA, 25 bp, Saccharomyces pastorianus
cagcgggcttcattggcggtgccaa

SEQ ID NO: 14777 - DNA, 25 bp, Saccharomyces pastorianus
aggattcctccgatgagtccttcga

SEQ ID NO: 14778 - DNA, 25 bp, Saccharomyces pastorianus
aagaggcctgccagaaccactgaga

SEQ ID NO: 14779 - DNA, 25 bp, Saccharomyces pastorianus
cgaggtcttcgtcacactggtgaaa

SEQ ID NO: 14780 - DNA, 25 bp, Saccharomyces pastorianus
agatcgagtttgtcctgttcacaga

SEQ ID NO: 14781 - DNA, 25 bp, Saccharomyces pastorianus
gtggcgtcccaggatgcatcttcat

SEQ ID NO: 14782 - DNA, 25 bp, Saccharomyces pastorianus
aaagcataacgatggccccggatat

SEQ ID NO: 14783 - DNA, 25 bp, Saccharomyces pastorianus
tcaaaaacaaagtcaccggaacctg

SEQ ID NO: 14784 - DNA, 25 bp, Saccharomyces pastorianus
gcccacgcctcaataaaccaggttt

SEQ ID NO: 14785 - DNA, 25 bp, Saccharomyces pastorianus
gaggaagcccatcgtagcagatcaa

SEQ ID NO: 14786 - DNA, 25 bp, Saccharomyces pastorianus
aagaaagcctctcctggtttagcat

SEQ ID NO: 14787 - DNA, 25 bp, Saccharomyces pastorianus
ttagcatcgcgtgggacaccatcaa

SEQ ID NO: 14788 - DNA, 25 bp, Saccharomyces pastorianus
attaccagagcaacacaggcctgtt

SEQ ID NO: 14789 - DNA, 25 bp, Saccharomyces pastorianus
ggaacctgttgctacggagcgccca

SEQ ID NO: 14790 - DNA, 25 bp, Saccharomyces pastorianus
aggcctgttaagctcaatcttccta

SEQ ID NO: 14791 - DNA, 25 bp, Saccharomyces pastorianus
tacgaatggattcgcgcaacctaat

SEQ ID NO: 14792 - DNA, 25 bp, Saccharomyces pastorianus
agcgctcagaatatgcttacgatga

SEQ ID NO: 14793 - DNA, 25 bp, Saccharomyces pastorianus
acgtcaatcgatacagccagggcac

SEQ ID NO: 14794 - DNA, 25 bp, Saccharomyces pastorianus
ttctggcagagttccacggatcatc

SEQ ID NO: 14795 - DNA, 25 bp, Saccharomyces pastorianus
tggccacgctgattccttacgagga

SEQ ID NO: 14796 - DNA, 25 bp, Saccharomyces pastorianus
cgggtgttgcttacgacggtgtaca

SEQ ID NO: 14797 - DNA, 25 bp, Saccharomyces pastorianus
aatcattcatggctttgcacgtcgg

SEQ ID NO: 14798 - DNA, 25 bp, Saccharomyces pastorianus
aagagtcatcgctacgtcgcatgga

SEQ ID NO: 14799 - DNA, 25 bp, Saccharomyces pastorianus
tgtggtatactacatcccgtctgaa

SEQ ID NO: 14800 - DNA, 25 bp, Saccharomyces pastorianus
ggtactgtcgacaacgaggctttca

SEQ ID NO: 14801 - DNA, 25 bp, Saccharomyces pastorianus
aaaactgcagcaggcgcttgcacaa

SEQ ID NO: 14802 - DNA, 25 bp, Saccharomyces pastorianus
aaatgggtacactctgcacgaggtt

SEQ ID NO: 14803 - DNA, 25 bp, Saccharomyces pastorianus
agggcacatctattcagggtccgga

SEQ ID NO: 14804 - DNA, 25 bp, Saccharomyces pastorianus
agtcgatgacgccagaaaccgccaa

SEQ ID NO: 14805 - DNA, 25 bp, Saccharomyces pastorianus
agacaaattccgcaagcacctctgg

SEQ ID NO: 14806 - DNA, 25 bp, Saccharomyces pastorianus
agtccaagtactgagccaagcatga

SEQ ID NO: 14807 - DNA, 25 bp, Saccharomyces pastorianus
gactgccgacatacgatgagcgcta

SEQ ID NO: 14808 - DNA, 25 bp, Saccharomyces pastorianus
tacagtgctaacttctggccagcag

SEQ ID NO: 14809 - DNA, 25 bp, Saccharomyces pastorianus
gcaaccccagtagtggtagtgccca

SEQ ID NO: 14810 - DNA, 25 bp, Saccharomyces pastorianus
aagcatgaagaaactccccactgga

SEQ ID NO: 14811 - DNA, 25 bp, Saccharomyces pastorianus
tacggacttcattaaagcgcctcag

SEQ ID NO: 14812 - DNA, 25 bp, Saccharomyces pastorianus
aaggccctgcggctttgataaacag

SEQ ID NO: 14813 - DNA, 25 bp, Saccharomyces pastorianus
atcatctaagttcaaggcctccagg

SEQ ID NO: 14814 - DNA, 25 bp, Saccharomyces pastorianus
gaattaaccaccatcggcaagcata

SEQ ID NO: 14815 - DNA, 25 bp, Saccharomyces pastorianus
gaatggcccagtttacggtgttcct

SEQ ID NO: 14816 - DNA, 25 bp, Saccharomyces pastorianus
ggtatgccaccacaattcaggaatg

SEQ ID NO: 14817 - DNA, 25 bp, Saccharomyces pastorianus
cagtttacggtgttcctccacaagg

SEQ ID NO: 14818 - DNA, 25 bp, Saccharomyces pastorianus
ttccgctgcttacgaatctttcaag

SEQ ID NO: 14819 - DNA, 25 bp, Saccharomyces pastorianus
aagaagcttccgctgcttacgaatc

SEQ ID NO: 14820 - DNA, 25 bp, Saccharomyces pastorianus
accacaattcaggaatggcccagtt

SEQ ID NO: 14821 - DNA, 25 bp, Saccharomyces pastorianus
aacgatgaattgtttgaacagcatt

SEQ ID NO: 14822 - DNA, 25 bp, Saccharomyces pastorianus
gaagaagcaaccaaagccatcactg

SEQ ID NO: 14823 - DNA, 25 bp, Saccharomyces pastorianus
gcaaccaaagccatcactgaaaaga

SEQ ID NO: 14824 - DNA, 25 bp, Saccharomyces pastorianus
atgccaaagaatggtatgccaccac

SEQ ID NO: 14825 - DNA, 25 bp, Saccharomyces pastorianus
gcattataaagaagcttccgctgct

SEQ ID NO: 14826 - DNA, 25 bp, Saccharomyces pastorianus
aaatcggcagacactttcataggca

SEQ ID NO: 14827 - DNA, 25 bp, Saccharomyces pastorianus
aatccagagtcttttttccatgaac

SEQ ID NO: 14828 - DNA, 25 bp, Saccharomyces pastorianus
aatagcagcatcgtggattccgtaa

SEQ ID NO: 14829 - DNA, 25 bp, Saccharomyces pastorianus
gagtgatgcaaatctcgaccatttt

SEQ ID NO: 14830 - DNA, 25 bp, Saccharomyces pastorianus
tatccactaccacaagcaatgcaac

SEQ ID NO: 14831 - DNA, 25 bp, Saccharomyces pastorianus
gcaaccgtttcattgggcgacttga

SEQ ID NO: 14832 - DNA, 25 bp, Saccharomyces pastorianus
ataggcaatatatccccagacacct

SEQ ID NO: 14833 - DNA, 25 bp, Saccharomyces pastorianus
cacacctttgttccacaatttcaac

SEQ ID NO: 14834 - DNA, 25 bp, Saccharomyces pastorianus
ggattccgtaatgacaaactcgata

SEQ ID NO: 14835 - DNA, 25 bp, Saccharomyces pastorianus
agaaatttctacgacggccacacct

SEQ ID NO: 14836 - DNA, 25 bp, Saccharomyces pastorianus
atgcaaccggcaactatttccaaga

SEQ ID NO: 14837 - DNA, 25 bp, Saccharomyces pastorianus
aacccatagtggacggcaagcaaat

SEQ ID NO: 14838 - DNA, 25 bp, Saccharomyces pastorianus
ggagaagcttcccattttgagaaaa

SEQ ID NO: 14839 - DNA, 25 bp, Saccharomyces pastorianus
cacgtccctcttagatgcattttta

SEQ ID NO: 14840 - DNA, 25 bp, Saccharomyces pastorianus
gagatttacaaatggctcgctgttg

SEQ ID NO: 14841 - DNA, 25 bp, Saccharomyces pastorianus
gtactggaaatgaaacctggcccgt

SEQ ID NO: 14842 - DNA, 25 bp, Saccharomyces pastorianus
ggctcgctgttgcaaaaatcggaaa

SEQ ID NO: 14843 - DNA, 25 bp, Saccharomyces pastorianus
ataacttgttatccgtcccagaaag

SEQ ID NO: 14844 - DNA, 25 bp, Saccharomyces pastorianus
aagaactgagtctcttctccacaat

SEQ ID NO: 14845 - DNA, 25 bp, Saccharomyces pastorianus
ggcagtttgataaccctgaaggaac

SEQ ID NO: 14846 - DNA, 25 bp, Saccharomyces pastorianus
gattgccacgaactaaaacccatag

SEQ ID NO: 14847 - DNA, 25 bp, Saccharomyces pastorianus
ggtcaatcacatagtttccagcaga

SEQ ID NO: 14848 - DNA, 25 bp, Saccharomyces pastorianus
gatgccatgagacatgctgcacaat

SEQ ID NO: 14849 - DNA, 25 bp, Saccharomyces pastorianus
gcagaccgtagattttccaggaaaa

SEQ ID NO: 14850 - DNA, 25 bp, Saccharomyces pastorianus
agaaaagcctgctcaaacggacggg

SEQ ID NO: 14851 - DNA, 25 bp, Saccharomyces pastorianus
gaacgatttcttatcttttgatgcc

SEQ ID NO: 14852 - DNA, 25 bp, Saccharomyces pastorianus
taatgataggtattccctttcaata

SEQ ID NO: 14853 - DNA, 25 bp, Saccharomyces pastorianus
gaaacaccagatgctcaagaaacat

SEQ ID NO: 14854 - DNA, 25 bp, Saccharomyces pastorianus
gaaacatctttagctttggagacat

SEQ ID NO: 14855 - DNA, 25 bp, Saccharomyces pastorianus
ggctatatctaacaccaaacaattt

SEQ ID NO: 14856 - DNA, 25 bp, Saccharomyces pastorianus
gattgcccagggtttatcagacgct

SEQ ID NO: 14857 - DNA, 25 bp, Saccharomyces pastorianus
tttaaggacaatggcccaacccacg

SEQ ID NO: 14858 - DNA, 25 bp, Saccharomyces pastorianus
gacgctgacttaaatctttctactg

SEQ ID NO: 14859 - DNA, 25 bp, Saccharomyces pastorianus
gagttccttaatctcaggtgcaaaa

SEQ ID NO: 14860 - DNA, 25 bp, Saccharomyces pastorianus
cggtgattcacaacttgctcaggtt

SEQ ID NO: 14861 - DNA, 25 bp, Saccharomyces pastorianus
aatgctcattcaaggtgtctgggat

SEQ ID NO: 14862 - DNA, 25 bp, Saccharomyces pastorianus
gagactttgaacctgacaacctaca

SEQ ID NO: 14863 - DNA, 25 bp, Saccharomyces pastorianus
gatactaactctcggtgattcacaa

SEQ ID NO: 14864 - DNA, 25 bp, Saccharomyces pastorianus
gtaatcgttgatattctctcagcaa

SEQ ID NO: 14865 - DNA, 25 bp, Saccharomyces pastorianus
gagtttgatattccaccaactggta

SEQ ID NO: 14866 - DNA, 25 bp, Saccharomyces pastorianus
tgctcaggttgccacatttgttaat

SEQ ID NO: 14867 - DNA, 25 bp, Saccharomyces pastorianus
atgttgaacttacctattctttgga

SEQ ID NO: 14868 - DNA, 25 bp, Saccharomyces pastorianus
tattctctcagcaaacgggtatcta

SEQ ID NO: 14869 - DNA, 25 bp, Saccharomyces pastorianus
gtttgtgattcataccttgatgcag

SEQ ID NO: 14870 - DNA, 25 bp, Saccharomyces pastorianus
gaccttttcgaaatagcagctgtac

SEQ ID NO: 14871 - DNA, 25 bp, Saccharomyces pastorianus
cccacattccctcagttgtatatta

SEQ ID NO: 14872 - DNA, 25 bp, Saccharomyces pastorianus
ttccgcctcaatatccaacaatgtt

SEQ ID NO: 14873 - DNA, 25 bp, Saccharomyces pastorianus
gcagctgtaccatattttatcttca

SEQ ID NO: 14874 - DNA, 25 bp, Saccharomyces pastorianus
ggcgcctgtaatgctcttcatgaag

SEQ ID NO: 14875 - DNA, 25 bp, Saccharomyces pastorianus
aagaagttttccgattggcccacat

SEQ ID NO: 14876 - DNA, 25 bp, Saccharomyces pastorianus
ggacccagatccacttcagatgtag

SEQ ID NO: 14877 - DNA, 25 bp, Saccharomyces pastorianus
gcgaggtgctcgaagccatcagtga

SEQ ID NO: 14878 - DNA, 25 bp, Saccharomyces pastorianus
aaacagtgggtcttctgatgacgaa

SEQ ID NO: 14879 - DNA, 25 bp, Saccharomyces pastorianus
ttagagactctctccaatggttccg

SEQ ID NO: 14880 - DNA, 25 bp, Saccharomyces pastorianus
aatgcgggttttctagacaattggt

SEQ ID NO: 14881 - DNA, 25 bp, Saccharomyces pastorianus
gtgcccattggtttgatttcgacaa

SEQ ID NO: 14882 - DNA, 25 bp, Saccharomyces pastorianus
gtttcatttgaaatctctcccagtg

SEQ ID NO: 14883 - DNA, 25 bp, Saccharomyces pastorianus
atctttccggactatcctgaatttg

SEQ ID NO: 14884 - DNA, 25 bp, Saccharomyces pastorianus
atccgaagcttttccgtcatattca

SEQ ID NO: 14885 - DNA, 25 bp, Saccharomyces pastorianus
tattaccgcggtggaatgtgcccat

SEQ ID NO: 14886 - DNA, 25 bp, Saccharomyces pastorianus
caggatatcgcggactggtttattg

SEQ ID NO: 14887 - DNA, 25 bp, Saccharomyces pastorianus
tatggcaaggaaaccctaggccctt

SEQ ID NO: 14888 - DNA, 25 bp, Saccharomyces pastorianus
gaccggaacttactgctaataccaa

SEQ ID NO: 14889 - DNA, 25 bp, Saccharomyces pastorianus
tgaaagacttcaccctggatccgaa

SEQ ID NO: 14890 - DNA, 25 bp, Saccharomyces pastorianus
aaagatctgtccatgccaatttgag

SEQ ID NO: 14891 - DNA, 25 bp, Saccharomyces pastorianus
agaacctggagtgcttaccaccaat

SEQ ID NO: 14892 - DNA, 25 bp, Saccharomyces pastorianus
gcacaacgtgacctgctatctgagg

SEQ ID NO: 14893 - DNA, 25 bp, Saccharomyces pastorianus
acggtgacccgctgtggagagacta

SEQ ID NO: 14894 - DNA, 25 bp, Saccharomyces pastorianus
atcatcaacggtctgcatgtcgcca

SEQ ID NO: 14895 - DNA, 25 bp, Saccharomyces pastorianus
atggcctggcgtggagcatcctctg

SEQ ID NO: 14896 - DNA, 25 bp, Saccharomyces pastorianus
tctgttcttctaccaatgcgatctg

SEQ ID NO: 14897 - DNA, 25 bp, Saccharomyces pastorianus
aagcacggcctgattgtggtcggta

SEQ ID NO: 14898 - DNA, 25 bp, Saccharomyces pastorianus
tggattccttccaaggccacgagaa

SEQ ID NO: 14899 - DNA, 25 bp, Saccharomyces pastorianus
aaggagccagcagcttgcagaacaa

SEQ ID NO: 14900 - DNA, 25 bp, Saccharomyces pastorianus
acaaaatcggattcctgcgcgataa

SEQ ID NO: 14901 - DNA, 25 bp, Saccharomyces pastorianus
gtggagagactacattgcctacctc

SEQ ID NO: 14902 - DNA, 25 bp, Saccharomyces pastorianus
atcgaactatttaacgcggccggct

SEQ ID NO: 14903 - DNA, 25 bp, Saccharomyces pastorianus
ttcgacgacgctattgccgagttag

SEQ ID NO: 14904 - DNA, 25 bp, Saccharomyces pastorianus
gagaatcgtatcctctatcgaacag

SEQ ID NO: 14905 - DNA, 25 bp, Saccharomyces pastorianus
cgtcgtgcttcctggagaatcgtat

SEQ ID NO: 14906 - DNA, 25 bp, Saccharomyces pastorianus
gaacaccaggtcgagctgattcgct

SEQ ID NO: 14907 - DNA, 25 bp, Saccharomyces pastorianus
gacattttatccgtgctagactctc

SEQ ID NO: 14908 - DNA, 25 bp, Saccharomyces pastorianus
gagttttccagtactgacgccagag

SEQ ID NO: 14909 - DNA, 25 bp, Saccharomyces pastorianus
tacaagaccgcctctgagattgcta

SEQ ID NO: 14910 - DNA, 25 bp, Saccharomyces pastorianus
taacgcttctttggaggcctacaag

SEQ ID NO: 14911 - DNA, 25 bp, Saccharomyces pastorianus
tgaacttaccaagatctccgacgac

SEQ ID NO: 14912 - DNA, 25 bp, Saccharomyces pastorianus
gagattgctaccacagagttgccac

SEQ ID NO: 14913 - DNA, 25 bp, Saccharomyces pastorianus
agacatgtccgaatcaggccaggct

SEQ ID NO: 14914 - DNA, 25 bp, Saccharomyces pastorianus
tgtggccctttttatcacctataca

SEQ ID NO: 14915 - DNA, 25 bp, Saccharomyces pastorianus
aattgccggtacatatccgatgttt

SEQ ID NO: 14916 - DNA, 25 bp, Saccharomyces pastorianus
ggattacttgggattctttcagcta

SEQ ID NO: 14917 - DNA, 25 bp, Saccharomyces pastorianus
gagcagcttcagtcatttgatttcg

SEQ ID NO: 14918 - DNA, 25 bp, Saccharomyces pastorianus
ttgcttatactagcccattgagata

SEQ ID NO: 14919 - DNA, 25 bp, Saccharomyces pastorianus
tatacttacccctcgattgcttata

SEQ ID NO: 14920 - DNA, 25 bp, Saccharomyces pastorianus
aatatcagggcccaacactaccatt

SEQ ID NO: 14921 - DNA, 25 bp, Saccharomyces pastorianus
atataccaaaatccccgtctataga

SEQ ID NO: 14922 - DNA, 25 bp, Saccharomyces pastorianus
gaacctgatgattacgaagccatta

SEQ ID NO: 14923 - DNA, 25 bp, Saccharomyces pastorianus
caatctgattcggatcttgttatcg

SEQ ID NO: 14924 - DNA, 25 bp, Saccharomyces pastorianus
gtgatcgcggttatgactgtggccc

SEQ ID NO: 14925 - DNA, 25 bp, Saccharomyces pastorianus
aacagcaggaggtttgtgagcacct

SEQ ID NO: 14926 - DNA, 25 bp, Saccharomyces pastorianus
gttagtgcgtcaaaccaaacttttg

SEQ ID NO: 14927 - DNA, 25 bp, Saccharomyces pastorianus
aagccaacgttagcgataaggaagt

SEQ ID NO: 14928 - DNA, 25 bp, Saccharomyces pastorianus
gtcagtacccaattatcttttgaag

SEQ ID NO: 14929 - DNA, 25 bp, Saccharomyces pastorianus
tgtgagcacctcaaacaagaaaatg

SEQ ID NO: 14930 - DNA, 25 bp, Saccharomyces pastorianus
acaccagcagcgatttaccagtcag

SEQ ID NO: 14931 - DNA, 25 bp, Saccharomyces pastorianus
atcttttgaagccaacgttagcgat

SEQ ID NO: 14932 - DNA, 25 bp, Saccharomyces pastorianus
gatctgctctggaataagacattgg

SEQ ID NO: 14933 - DNA, 25 bp, Saccharomyces pastorianus
gcgatttaccagtcagtacccaatt

SEQ ID NO: 14934 - DNA, 25 bp, Saccharomyces pastorianus
atgtctgcagaaaacaccagcagcg

SEQ ID NO: 14935 - DNA, 25 bp, Saccharomyces pastorianus
gatactttagatctgctctggaata

SEQ ID NO: 14936 - DNA, 25 bp, Saccharomyces pastorianus
ggctcaggtatcttcaagtcttcaa

SEQ ID NO: 14937 - DNA, 25 bp, Saccharomyces pastorianus
aagtgaggtcttgaccccagctgac

SEQ ID NO: 14938 - DNA, 25 bp, Saccharomyces pastorianus
taaggagtcagatcttgccgcaaaa

SEQ ID NO: 14939 - DNA, 25 bp, Saccharomyces pastorianus
aagcgctacaggtggactatatcga

SEQ ID NO: 14940 - DNA, 25 bp, Saccharomyces pastorianus
gtgtccgaagccgtgaagcacatca

SEQ ID NO: 14941 - DNA, 25 bp, Saccharomyces pastorianus
ttacccgtagttaatttcgctgccg

SEQ ID NO: 14942 - DNA, 25 bp, Saccharomyces pastorianus
ttcaaaccctgataagttggcccgc

SEQ ID NO: 14943 - DNA, 25 bp, Saccharomyces pastorianus
gaagaacagcttccaggtcccattt

SEQ ID NO: 14944 - DNA, 25 bp, Saccharomyces pastorianus
aagctggtactggtgatgtgtccga

SEQ ID NO: 14945 - DNA, 25 bp, Saccharomyces pastorianus
aaggcgctgcgatgatccgtactaa

SEQ ID NO: 14946 - DNA, 25 bp, Saccharomyces pastorianus
gaagtatccagcgacttgggtgatt

SEQ ID NO: 14947 - DNA, 25 bp, Saccharomyces pastorianus
agtctaccgactacatgttgaacaa

SEQ ID NO: 14948 - DNA, 25 bp, Saccharomyces pastorianus
acgttgacttcaagccacaattgga

SEQ ID NO: 14949 - DNA, 25 bp, Saccharomyces pastorianus
tgaacaacccagttgaagcttggaa

SEQ ID NO: 14950 - DNA, 25 bp, Saccharomyces pastorianus
gcacaaggcagaccagctaccgatg

SEQ ID NO: 14951 - DNA, 25 bp, Saccharomyces pastorianus
tggacactgatttgtcttacaaaca

SEQ ID NO: 14952 - DNA, 25 bp, Saccharomyces pastorianus
cgataagttggcttgtttgggctgt

SEQ ID NO: 14953 - DNA, 25 bp, Saccharomyces pastorianus
gaggaatacttaaccgcacaaggca

SEQ ID NO: 14954 - DNA, 25 bp, Saccharomyces pastorianus
tttgggctgttgttgtttctgtacc

SEQ ID NO: 14955 - DNA, 25 bp, Saccharomyces pastorianus
tgactccagacgactataccgccgt

SEQ ID NO: 14956 - DNA, 25 bp, Saccharomyces pastorianus
tgaaagcccttaagaagtctaccga

SEQ ID NO: 14957 - DNA, 25 bp, Saccharomyces pastorianus
tgaaggtaagattgacgccggtgtt

SEQ ID NO: 14958 - DNA, 25 bp, Saccharomyces pastorianus
gaagctgcaaaacgccatggtcaag

SEQ ID NO: 14959 - DNA, 25 bp, Saccharomyces pastorianus
tctcgctaacgacatcaacgcttta

SEQ ID NO: 14960 - DNA, 25 bp, Saccharomyces pastorianus
ccaacgttccacaaagcaatctact

SEQ ID NO: 14961 - DNA, 25 bp, Saccharomyces pastorianus
gattctttgattcctaacgttaacg

SEQ ID NO: 14962 - DNA, 25 bp, Saccharomyces pastorianus
tgggccagccaaaaatgatcacgaa

SEQ ID NO: 14963 - DNA, 25 bp, Saccharomyces pastorianus
tctactgaggacatcattgctgaag

SEQ ID NO: 14964 - DNA, 25 bp, Saccharomyces pastorianus
gccatggtcaaggtggtcctcaagt

SEQ ID NO: 14965 - DNA, 25 bp, Saccharomyces pastorianus
aacgttaacgcaatgggccagccaa

SEQ ID NO: 14966 - DNA, 25 bp, Saccharomyces pastorianus
catggcttctttaaccaaccaacgt

SEQ ID NO: 14967 - DNA, 25 bp, Saccharomyces pastorianus
tggctgcttccattaattttcatta

SEQ ID NO: 14968 - DNA, 25 bp, Saccharomyces pastorianus
aaaattgatgatttggctgcttcca

SEQ ID NO: 14969 - DNA, 25 bp, Saccharomyces pastorianus
gggtgtatcatgtctcacaagatct

SEQ ID NO: 14970 - DNA, 25 bp, Saccharomyces pastorianus
gtgtctgcacgggtacctttgcact

SEQ ID NO: 14971 - DNA, 25 bp, Saccharomyces pastorianus
caaacgtattgttggaattcctaca

SEQ ID NO: 14972 - DNA, 25 bp, Saccharomyces pastorianus
caatggttgataggtgtctgcacgg

SEQ ID NO: 14973 - DNA, 25 bp, Saccharomyces pastorianus
gaagtgcgttgttattcagcaatga

SEQ ID NO: 14974 - DNA, 25 bp, Saccharomyces pastorianus
aagactaacgcaggctttaagctag

SEQ ID NO: 14975 - DNA, 25 bp, Saccharomyces pastorianus
cgcgaagttgagagatcagctacta

SEQ ID NO: 14976 - DNA, 25 bp, Saccharomyces pastorianus
acagcgtgttgatttcgcgaagttg

SEQ ID NO: 14977 - DNA, 25 bp, Saccharomyces pastorianus
ttcctacaaggcgtgttttccatag

SEQ ID NO: 14978 - DNA, 25 bp, Saccharomyces pastorianus
ggctttaagctagatctgtccttag

SEQ ID NO: 14979 - DNA, 25 bp, Saccharomyces pastorianus
acaactaagttaccaacagcgtgtt

SEQ ID NO: 14980 - DNA, 25 bp, Saccharomyces pastorianus
acaaattggctgtgttcgttttaag

SEQ ID NO: 14981 - DNA, 25 bp, Saccharomyces pastorianus
gatgtcttcccagctggttgggata

SEQ ID NO: 14982 - DNA, 25 bp, Saccharomyces pastorianus
ggcttcccaatctttcatcaactgg

SEQ ID NO: 14983 - DNA, 25 bp, Saccharomyces pastorianus
gcaacacgttgctaaggatggtttc

SEQ ID NO: 14984 - DNA, 25 bp, Saccharomyces pastorianus
gattacgaaatctttgctgacgaaa

SEQ ID NO: 14985 - DNA, 25 bp, Saccharomyces pastorianus
tggtggttccgatttgagcaagcaa

SEQ ID NO: 14986 - DNA, 25 bp, Saccharomyces pastorianus
gggtaaggaactggcttcccaatct

SEQ ID NO: 14987 - DNA, 25 bp, Saccharomyces pastorianus
gacaaagtacaccaaattagagcta

SEQ ID NO: 14988 - DNA, 25 bp, Saccharomyces pastorianus
aaatctcctttgatgtcttcccagc

SEQ ID NO: 14989 - DNA, 25 bp, Saccharomyces pastorianus
atacttgtcggaaattgacttgcca

SEQ ID NO: 14990 - DNA, 25 bp, Saccharomyces pastorianus
acgattttgactactctttctctga

SEQ ID NO: 14991 - DNA, 25 bp, Saccharomyces pastorianus
gacgtttctatgtcctgtgatgatc

SEQ ID NO: 14992 - DNA, 25 bp, Saccharomyces pastorianus
gggatttttgcgatgagcctttcta

SEQ ID NO: 14993 - DNA, 25 bp, Saccharomyces pastorianus
gcattgtgcttcctgattgttggga

SEQ ID NO: 14994 - DNA, 25 bp, Saccharomyces pastorianus
ggtcaagataccaaaccgatcgatg

SEQ ID NO: 14995 - DNA, 25 bp, Saccharomyces pastorianus
gggtatcaagactccagattcgaat

SEQ ID NO: 14996 - DNA, 25 bp, Saccharomyces pastorianus
gcgggtggatcttagcattgtgctt

SEQ ID NO: 14997 - DNA, 25 bp, Saccharomyces pastorianus
ggctccatacggtcctcggaagaag

SEQ ID NO: 14998 - DNA, 25 bp, Saccharomyces pastorianus
gcggattccccataagtgggctatt

SEQ ID NO: 14999 - DNA, 25 bp, Saccharomyces pastorianus
taatcacagtgctgggcggattccc

SEQ ID NO: 15000 - DNA, 25 bp, Saccharomyces pastorianus
acagagtggaccctcatttgcatga

SEQ ID NO: 15001 - DNA, 25 bp, Saccharomyces pastorianus
gaattccaatatcggctccatacgg

SEQ ID NO: 15002 - DNA, 25 bp, Saccharomyces pastorianus
taacaacgtgcaaaccgccgtgtgt

SEQ ID NO: 15003 - DNA, 25 bp, Saccharomyces pastorianus
gccactgactgcgattggttctcaa

SEQ ID NO: 15004 - DNA, 25 bp, Saccharomyces pastorianus
attgctaactctacatccatccaag

SEQ ID NO: 15005 - DNA, 25 bp, Saccharomyces pastorianus
tggttctcaatcgttcagatcgttg

SEQ ID NO: 15006 - DNA, 25 bp, Saccharomyces pastorianus
tcatggttgggtatgcgccactgac

SEQ ID NO: 15007 - DNA, 25 bp, Saccharomyces pastorianus
tgatggccgctgctgacccaagaaa

SEQ ID NO: 15008 - DNA, 25 bp, Saccharomyces pastorianus
agatcgttgaccgttcctgaattga

SEQ ID NO: 15009 - DNA, 25 bp, Saccharomyces pastorianus
tgacccagcaaatgttcgactccaa

SEQ ID NO: 15010 - DNA, 25 bp, Saccharomyces pastorianus
ggaattctctgaagctgagtccaac

SEQ ID NO: 15011 - DNA, 25 bp, Saccharomyces pastorianus
aattggcagtcaatctggtcccatt

SEQ ID NO: 15012 - DNA, 25 bp, Saccharomyces pastorianus
ggtagatacttgaccgttgcggcat

SEQ ID NO: 15013 - DNA, 25 bp, Saccharomyces pastorianus
atgcttcgcatatgctgttgagtgc

SEQ ID NO: 15014 - DNA, 25 bp, Saccharomyces pastorianus
tcattcactcattggatgcttcgca

SEQ ID NO: 15015 - DNA, 25 bp, Saccharomyces pastorianus
aaatagccccttgccggaggataga

SEQ ID NO: 15016 - DNA, 25 bp, Saccharomyces pastorianus
ataagagctacgtcaagattggcaa

SEQ ID NO: 15017 - DNA, 25 bp, Saccharomyces pastorianus
tgtcaaccccgtcaatgcaagaaga

SEQ ID NO: 15018 - DNA, 25 bp, Saccharomyces pastorianus
gtatgagcgttcttttacccctaag

SEQ ID NO: 15019 - DNA, 25 bp, Saccharomyces pastorianus
agaccggtcttccaccaaatttcat

SEQ ID NO: 15020 - DNA, 25 bp, Saccharomyces pastorianus
aaggattggattttgcgtctgtgca

SEQ ID NO: 15021 - DNA, 25 bp, Saccharomyces pastorianus
tacaaccgtatcgttatttcaggac

SEQ ID NO: 15022 - DNA, 25 bp, Saccharomyces pastorianus
aggtcgatttggttatgaggctcag

SEQ ID NO: 15023 - DNA, 25 bp, Saccharomyces pastorianus
gcgtctgtgcatgattcctactgga

SEQ ID NO: 15024 - DNA, 25 bp, Saccharomyces pastorianus
gagtgctggaagaaccattctcccg

SEQ ID NO: 15025 - DNA, 25 bp, Saccharomyces pastorianus
tcagaccaccatcaacaccaaaaat

SEQ ID NO: 15026 - DNA, 25 bp, Saccharomyces pastorianus
taaatccaccacagagtccgaatca

SEQ ID NO: 15027 - DNA, 25 bp, Saccharomyces pastorianus
aaacgtaaagatgccgcccttgtcg

SEQ ID NO: 15028 - DNA, 25 bp, Saccharomyces pastorianus
gaatctgccagctgaagacacgaat

SEQ ID NO: 15029 - DNA, 25 bp, Saccharomyces pastorianus
gaatctttagacgaaacccagctca

SEQ ID NO: 15030 - DNA, 25 bp, Saccharomyces pastorianus
acaatagctgggtgccgaaatggct

SEQ ID NO: 15031 - DNA, 25 bp, Saccharomyces pastorianus
ggaagaaccattctcccggaggatg

SEQ ID NO: 15032 - DNA, 25 bp, Saccharomyces pastorianus
agacctgccagaaacagatgccaat

SEQ ID NO: 15033 - DNA, 25 bp, Saccharomyces pastorianus
gtaagcgatgtcgatgcagcgcaaa

SEQ ID NO: 15034 - DNA, 25 bp, Saccharomyces pastorianus
ggagcggaagcttcaactgaatctt

SEQ ID NO: 15035 - DNA, 25 bp, Saccharomyces pastorianus
tggttattgccggtggtatccacaa

SEQ ID NO: 15036 - DNA, 25 bp, Saccharomyces pastorianus
gatttgcaccgcgaaatgagcgact

SEQ ID NO: 15037 - DNA, 25 bp, Saccharomyces pastorianus
tgatcaacagtctcgacgtggcctt

SEQ ID NO: 15038 - DNA, 25 bp, Saccharomyces pastorianus
cacggctacttctcgtctttgagaa

SEQ ID NO: 15039 - DNA, 25 bp, Saccharomyces pastorianus
acatgggcgtgaccgcttgtaacaa

SEQ ID NO: 15040 - DNA, 25 bp, Saccharomyces pastorianus
gatgggccccgatcatgcagggata

SEQ ID NO: 15041 - DNA, 25 bp, Saccharomyces pastorianus
gagaacggccaagtgcacggctact

SEQ ID NO: 15042 - DNA, 25 bp, Saccharomyces pastorianus
gtgcagcagcaggttcatggactac

SEQ ID NO: 15043 - DNA, 25 bp, Saccharomyces pastorianus
aagacagtctggtgaacggcttgca

SEQ ID NO: 15044 - DNA, 25 bp, Saccharomyces pastorianus
agtacatccgtattggccacatggg

SEQ ID NO: 15045 - DNA, 25 bp, Saccharomyces pastorianus
tgactgcgtcccagaaggccattgg

SEQ ID NO: 15046 - DNA, 25 bp, Saccharomyces pastorianus
gtcactactgatgattgtctcccaa

SEQ ID NO: 15047 - DNA, 25 bp, Saccharomyces pastorianus
ataagctgggcataccgtctctcga

SEQ ID NO: 15048 - DNA, 25 bp, Saccharomyces pastorianus
gattgtctcccaatggtttcagagg

SEQ ID NO: 15049 - DNA, 25 bp, Saccharomyces pastorianus
acgccgttgcaaaacatgggtctgt

SEQ ID NO: 15050 - DNA, 25 bp, Saccharomyces pastorianus
gattgatctgctcgatcttcgataa

SEQ ID NO: 15051 - DNA, 25 bp, Saccharomyces pastorianus
ggatatacaaggcacccgaggttct

SEQ ID NO: 15052 - DNA, 25 bp, Saccharomyces pastorianus
atgggacacgttccggcgatgatta

SEQ ID NO: 15053 - DNA, 25 bp, Saccharomyces pastorianus
gtctgtagacgcctttgttggaatg

SEQ ID NO: 15054 - DNA, 25 bp, Saccharomyces pastorianus
cagaacattgtgctgacggctggca

SEQ ID NO: 15055 - DNA, 25 bp, Saccharomyces pastorianus
gactccccaaggctgtacataattg

SEQ ID NO: 15056 - DNA, 25 bp, Saccharomyces pastorianus
gaatggtctcgttttcaccaagtga

SEQ ID NO: 15057 - DNA, 25 bp, Saccharomyces pastorianus
gagagtcctactacttgacgaggtc

SEQ ID NO: 15058 - DNA, 25 bp, Saccharomyces pastorianus
ggatcctagacattgacgtgcgctg

SEQ ID NO: 15059 - DNA, 25 bp, Saccharomyces pastorianus
gagttttccgaggtggtcaacgcca

SEQ ID NO: 15060 - DNA, 25 bp, Saccharomyces pastorianus
ggcctgaccaagtgttccatatgaa

SEQ ID NO: 15061 - DNA, 25 bp, Saccharomyces pastorianus
gacttggacgttattgccagggcaa

SEQ ID NO: 15062 - DNA, 25 bp, Saccharomyces pastorianus
tgacgaggtcactgtggacttggac

SEQ ID NO: 15063 - DNA, 25 bp, Saccharomyces pastorianus
atctggtaagatcctcaacaagctg

SEQ ID NO: 15064 - DNA, 25 bp, Saccharomyces pastorianus
ggccaagtggcctttgatgaagaca

SEQ ID NO: 15065 - DNA, 25 bp, Saccharomyces pastorianus
gtttacgctacgcatatttttgatg

SEQ ID NO: 15066 - DNA, 25 bp, Saccharomyces pastorianus
aacaagctggactttctcaaggatg

SEQ ID NO: 15067 - DNA, 25 bp, Saccharomyces pastorianus
agtccaattagccatgggtcttttg

SEQ ID NO: 15068 - DNA, 25 bp, Saccharomyces pastorianus
tggccatcctgtaccaactacggaa

SEQ ID NO: 15069 - DNA, 25 bp, Saccharomyces pastorianus
gctattgcaaaacgcacccgaaata

SEQ ID NO: 15070 - DNA, 25 bp, Saccharomyces pastorianus
acgacggaatcgcaactaggtccaa

SEQ ID NO: 15071 - DNA, 25 bp, Saccharomyces pastorianus
ttactcaatacagcgtgcggcaacc

SEQ ID NO: 15072 - DNA, 25 bp, Saccharomyces pastorianus
tactaatcggaatcgtggccatcct

SEQ ID NO: 15073 - DNA, 25 bp, Saccharomyces pastorianus
aataactagggaccattcggcaaat

SEQ ID NO: 15074 - DNA, 25 bp, Saccharomyces pastorianus
gcaacccatccagtttccaaatgga

SEQ ID NO: 15075 - DNA, 25 bp, Saccharomyces pastorianus
acaagggcactagtccagaggctgg

SEQ ID NO: 15076 - DNA, 25 bp, Saccharomyces pastorianus
tggacgccgttgttttctacctaga

SEQ ID NO: 15077 - DNA, 25 bp, Saccharomyces pastorianus
cgatttcgatttgcgtcatggagct

SEQ ID NO: 15078 - DNA, 25 bp, Saccharomyces pastorianus
acacgaggtcgttaagtctagtact

SEQ ID NO: 15079 - DNA, 25 bp, Saccharomyces pastorianus
gtgaacgtgtcgctgtgtatactcc

SEQ ID NO: 15080 - DNA, 25 bp, Saccharomyces pastorianus
aaaaacaccacgacagggccatttg

SEQ ID NO: 15081 - DNA, 25 bp, Saccharomyces pastorianus
agaagattccttggcctcaaacaat

SEQ ID NO: 15082 - DNA, 25 bp, Saccharomyces pastorianus
tatactcccaatactgctgcagatg

SEQ ID NO: 15083 - DNA, 25 bp, Saccharomyces pastorianus
aaccactgttgccacattgttagct

SEQ ID NO: 15084 - DNA, 25 bp, Saccharomyces pastorianus
acaaacggattctacccaggtggat

SEQ ID NO: 15085 - DNA, 25 bp, Saccharomyces pastorianus
attgttagctgttttgtctctgcca

SEQ ID NO: 15086 - DNA, 25 bp, Saccharomyces pastorianus
gtcaatctttgttagtcccatcagt

SEQ ID NO: 15087 - DNA, 25 bp, Saccharomyces pastorianus
gttgcctacgcctacaagttcaaaa

SEQ ID NO: 15088 - DNA, 25 bp, Saccharomyces pastorianus
gccattgtcatctatgtgggccaca

SEQ ID NO: 15089 - DNA, 25 bp, Saccharomyces pastorianus
aacctttgtggatgggactgcgaac

SEQ ID NO: 15090 - DNA, 25 bp, Saccharomyces pastorianus
accgttctcttattcgtgtatacaa

SEQ ID NO: 15091 - DNA, 25 bp, Saccharomyces pastorianus
gttagcgcgattaacattcctatcg

SEQ ID NO: 15092 - DNA, 25 bp, Saccharomyces pastorianus
gatcacatcacaacatcctagctgt

SEQ ID NO: 15093 - DNA, 25 bp, Saccharomyces pastorianus
tagcgctactacagccatcaaacga

SEQ ID NO: 15094 - DNA, 25 bp, Saccharomyces pastorianus
tacctgtgtcagaatagcgctacta

SEQ ID NO: 15095 - DNA, 25 bp, Saccharomyces pastorianus
attcctatcgtcattgttttcttac

SEQ ID NO: 15096 - DNA, 25 bp, Saccharomyces pastorianus
atgctattcagcttcatttatggaa

SEQ ID NO: 15097 - DNA, 25 bp, Saccharomyces pastorianus
ggatggtgcaattaccgttctctta

SEQ ID NO: 15098 - DNA, 25 bp, Saccharomyces pastorianus
tcctagctgtggcaccaattatctt

SEQ ID NO: 15099 - DNA, 25 bp, Saccharomyces pastorianus
gggaaacttcgttcagatcacatca

SEQ ID NO: 15100 - DNA, 25 bp, Saccharomyces pastorianus
gttattcagatagctacctgtgtca

SEQ ID NO: 15101 - DNA, 25 bp, Saccharomyces pastorianus
tgacgaatttgtgaggctttacgac

SEQ ID NO: 15102 - DNA, 25 bp, Saccharomyces pastorianus
gcaacgatcaagtaccgtagggact

SEQ ID NO: 15103 - DNA, 25 bp, Saccharomyces pastorianus
atggaagtacgattccccacaaaat

SEQ ID NO: 15104 - DNA, 25 bp, Saccharomyces pastorianus
aggctgaaacagacccacatgcaac

SEQ ID NO: 15105 - DNA, 25 bp, Saccharomyces pastorianus
accggcaaggttaaatcagatttct

SEQ ID NO: 15106 - DNA, 25 bp, Saccharomyces pastorianus
ccgccaagccaagcagttctttaat

SEQ ID NO: 15107 - DNA, 25 bp, Saccharomyces pastorianus
gaacgattcattggtaaatcccggg

SEQ ID NO: 15108 - DNA, 25 bp, Saccharomyces pastorianus
cgtagggactacatcaacaggctga

SEQ ID NO: 15109 - DNA, 25 bp, Saccharomyces pastorianus
gttgggtaccaaatcctatgaacaa

SEQ ID NO: 15110 - DNA, 25 bp, Saccharomyces pastorianus
tacaaactcgtcaaattccctgaaa

SEQ ID NO: 15111 - DNA, 25 bp, Saccharomyces pastorianus
tatacaataacatccgccaagccaa

SEQ ID NO: 15112 - DNA, 25 bp, Saccharomyces pastorianus
cgctgagttccaccaggtcgaaggt

SEQ ID NO: 15113 - DNA, 25 bp, Saccharomyces pastorianus
aactggaagcccgaggagtgtcaaa

SEQ ID NO: 15114 - DNA, 25 bp, Saccharomyces pastorianus
aaaactggtcctgagaacgcacacc

SEQ ID NO: 15115 - DNA, 25 bp, Saccharomyces pastorianus
tttgagattcaagcccacttacaac

SEQ ID NO: 15116 - DNA, 25 bp, Saccharomyces pastorianus
catgggcctgccaaaggacctgagg

SEQ ID NO: 15117 - DNA, 25 bp, Saccharomyces pastorianus
gcaaggtaagttcggctccatcggt

SEQ ID NO: 15118 - DNA, 25 bp, Saccharomyces pastorianus
tcgaaggtgtcttggccgactacaa

SEQ ID NO: 15119 - DNA, 25 bp, Saccharomyces pastorianus
aaggtctccttggacttcatcgaaa

SEQ ID NO: 15120 - DNA, 25 bp, Saccharomyces pastorianus
gtgtgttccgtaacgaggccgtcga

SEQ ID NO: 15121 - DNA, 25 bp, Saccharomyces pastorianus
gagatcttctcctggcacgagggtt

SEQ ID NO: 15122 - DNA, 25 bp, Saccharomyces pastorianus
tcaaggccgtccacgagcaaggtaa

SEQ ID NO: 15123 - DNA, 25 bp, Saccharomyces pastorianus
gctgaggttttgttagtcgctgttg

SEQ ID NO: 15124 - DNA, 25 bp, Saccharomyces pastorianus
gaccttacatcgctggcttagatgc

SEQ ID NO: 15125 - DNA, 25 bp, Saccharomyces pastorianus
gaaattcccatttgcagctaactca

SEQ ID NO: 15126 - DNA, 25 bp, Saccharomyces pastorianus
aatgatcgccgaagctggtttagct

SEQ ID NO: 15127 - DNA, 25 bp, Saccharomyces pastorianus
gtggagattttcaaaaccggtcacg

SEQ ID NO: 15128 - DNA, 25 bp, Saccharomyces pastorianus
agagaggccgtctagtcattgatga

SEQ ID NO: 15129 - DNA, 25 bp, Saccharomyces pastorianus
gatcctgattgatgccaagaccgaa

SEQ ID NO: 15130 - DNA, 25 bp, Saccharomyces pastorianus
aatacggtgcctctgctgaagatgt

SEQ ID NO: 15131 - DNA, 25 bp, Saccharomyces pastorianus
atatcccctcagtgatgtattctca

SEQ ID NO: 15132 - DNA, 25 bp, Saccharomyces pastorianus
aagagtatgtcatgctcatcctact

SEQ ID NO: 15133 - DNA, 25 bp, Saccharomyces pastorianus
accggtcacggccatgtgaactata

SEQ ID NO: 15134 - DNA, 25 bp, Saccharomyces pastorianus
gtttccactcctgaactgaagaaat

SEQ ID NO: 15135 - DNA, 25 bp, Saccharomyces pastorianus
agcaacttgccgctgggcttgcaaa

SEQ ID NO: 15136 - DNA, 25 bp, Saccharomyces pastorianus
atgctgaatataaacgggtcccgga

SEQ ID NO: 15137 - DNA, 25 bp, Saccharomyces pastorianus
cagggatcttgagaggctacgacat

SEQ ID NO: 15138 - DNA, 25 bp, Saccharomyces pastorianus
ctgaacattgttctcgatgacgcaa

SEQ ID NO: 15139 - DNA, 25 bp, Saccharomyces pastorianus
tgaagatcccgctagcaacttgccg

SEQ ID NO: 15140 - DNA, 25 bp, Saccharomyces pastorianus
gccgctgggcttgcaaaccgtcatt

SEQ ID NO: 15141 - DNA, 25 bp, Saccharomyces pastorianus
gctacgacatcttcctgaacattgt

SEQ ID NO: 15142 - DNA, 25 bp, Saccharomyces pastorianus
ggtcccggaagatagcagggatctt

SEQ ID NO: 15143 - DNA, 25 bp, Saccharomyces pastorianus
taaacggtgaagatcccgctagcaa

SEQ ID NO: 15144 - DNA, 25 bp, Saccharomyces pastorianus
atgacgcaatggagataaacggtga

SEQ ID NO: 15145 - DNA, 25 bp, Saccharomyces pastorianus
caaccctatggtgatcgtggacaag

SEQ ID NO: 15146 - DNA, 25 bp, Saccharomyces pastorianus
gtgaacccgaagtaccaaggccaag

SEQ ID NO: 15147 - DNA, 25 bp, Saccharomyces pastorianus
aaggcttgggcaaactcttgatcga

SEQ ID NO: 15148 - DNA, 25 bp, Saccharomyces pastorianus
agctggtagccatcgggttcagcta

SEQ ID NO: 15149 - DNA, 25 bp, Saccharomyces pastorianus
acgaactagcgttatgtggccacat

SEQ ID NO: 15150 - DNA, 25 bp, Saccharomyces pastorianus
aaactcttgatcgaccagctggtag

SEQ ID NO: 15151 - DNA, 25 bp, Saccharomyces pastorianus
acatcgaggacatcgcggtgaaccc

SEQ ID NO: 15152 - DNA, 25 bp, Saccharomyces pastorianus
taggcacaattgctcctgaggcctt

SEQ ID NO: 15153 - DNA, 25 bp, Saccharomyces pastorianus
gtggacaagcgcactgagaccgtcg

SEQ ID NO: 15154 - DNA, 25 bp, Saccharomyces pastorianus
gctacggctgctacaagatcatctt

SEQ ID NO: 15155 - DNA, 25 bp, Saccharomyces pastorianus
gaaagtcttgaccaccgtaggcaca

SEQ ID NO: 15156 - DNA, 25 bp, Saccharomyces pastorianus
aggccctggccgatgtgaccaacga

SEQ ID NO: 15157 - DNA, 25 bp, Saccharomyces pastorianus
gccgtggaggccgatcttcaagact

SEQ ID NO: 15158 - DNA, 25 bp, Saccharomyces pastorianus
agaaatgtctctgggaggccctggc

SEQ ID NO: 15159 - DNA, 25 bp, Saccharomyces pastorianus
tgagaatccgcgtcgacaaggaccc

SEQ ID NO: 15160 - DNA, 25 bp, Saccharomyces pastorianus
acgggaaccgccatcaacgaagaga

SEQ ID NO: 15161 - DNA, 25 bp, Saccharomyces pastorianus
agaaaaccatgcagccgggaaccgc

SEQ ID NO: 15162 - DNA, 25 bp, Saccharomyces pastorianus
ctcgaccctgcgtggtgacatgaag

SEQ ID NO: 15163 - DNA, 25 bp, Saccharomyces pastorianus
caaggaccccagtttctccataaga

SEQ ID NO: 15164 - DNA, 25 bp, Saccharomyces pastorianus
tcatgggctgcaagacggcgacgtc

SEQ ID NO: 15165 - DNA, 25 bp, Saccharomyces pastorianus
acatgggtgtgccaagaacctcgac

SEQ ID NO: 15166 - DNA, 25 bp, Saccharomyces pastorianus
acaaccaagtgatatccatcccgaa

SEQ ID NO: 15167 - DNA, 25 bp, Saccharomyces pastorianus
aaggattcggcgacaaggcttctga

SEQ ID NO: 15168 - DNA, 25 bp, Saccharomyces pastorianus
gtccaagttgaacgacgctgttgaa

SEQ ID NO: 15169 - DNA, 25 bp, Saccharomyces pastorianus
aacgacgctgttgaatacgtttccg

SEQ ID NO: 15170 - DNA, 25 bp, Saccharomyces pastorianus
gtcgccggtaaggtcgaaagcaacg

SEQ ID NO: 15171 - DNA, 25 bp, Saccharomyces pastorianus
acgctgacagccaaggtgaatcttt

SEQ ID NO: 15172 - DNA, 25 bp, Saccharomyces pastorianus
tcacgactccgctcaacaaggtaag

SEQ ID NO: 15173 - DNA, 25 bp, Saccharomyces pastorianus
cagagactacatgggtgccgccaag

SEQ ID NO: 15174 - DNA, 25 bp, Saccharomyces pastorianus
tgccgaccaagccagagactacatg

SEQ ID NO: 15175 - DNA, 25 bp, Saccharomyces pastorianus
caaggcttctgaggctttgaaacca

SEQ ID NO: 15176 - DNA, 25 bp, Saccharomyces pastorianus
aaggtaaggacaacgctgacagcca

SEQ ID NO: 15177 - DNA, 25 bp, Saccharomyces pastorianus
ggtgaatcttttgccgaccaagcca

SEQ ID NO: 15178 - DNA, 25 bp, Saccharomyces pastorianus
caacaagcctactattcacagcaac

SEQ ID NO: 15179 - DNA, 25 bp, Saccharomyces pastorianus
gcacccaagggtaccacatggtcaa

SEQ ID NO: 15180 - DNA, 25 bp, Saccharomyces pastorianus
tgacttcgacggtggctatgacggc

SEQ ID NO: 15181 - DNA, 25 bp, Saccharomyces pastorianus
acgccatgatgggtggtctactcgg

SEQ ID NO: 15182 - DNA, 25 bp, Saccharomyces pastorianus
tactcggtgttggtgctggtttatt

SEQ ID NO: 15183 - DNA, 25 bp, Saccharomyces pastorianus
tcgacgaacagctcccagtgggaag

SEQ ID NO: 15184 - DNA, 25 bp, Saccharomyces pastorianus
aatgcatttgataaccacgaccaag

SEQ ID NO: 15185 - DNA, 25 bp, Saccharomyces pastorianus
gtgccgccccaaacgctaagaaaag

SEQ ID NO: 15186 - DNA, 25 bp, Saccharomyces pastorianus
agcagcaccacagcaagcatactat

SEQ ID NO: 15187 - DNA, 25 bp, Saccharomyces pastorianus
tgatgacaatggtggtgacttcgac

SEQ ID NO: 15188 - DNA, 25 bp, Saccharomyces pastorianus
agctcagcaagctcgctactatcag

SEQ ID NO: 15189 - DNA, 25 bp, Saccharomyces pastorianus
acgtccaaagaatcgcagcctacat

SEQ ID NO: 15190 - DNA, 25 bp, Saccharomyces pastorianus
ccttcttcgtcctcgatgaagtgga

SEQ ID NO: 15191 - DNA, 25 bp, Saccharomyces pastorianus
aagacttttgactacgtgagtgacc

SEQ ID NO: 15192 - DNA, 25 bp, Saccharomyces pastorianus
tactattcgctatcaactcttacca

SEQ ID NO: 15193 - DNA, 25 bp, Saccharomyces pastorianus
ggacctccagttcattgtcatttcg

SEQ ID NO: 15194 - DNA, 25 bp, Saccharomyces pastorianus
atgttcgaaaagtctgacgccctcg

SEQ ID NO: 15195 - DNA, 25 bp, Saccharomyces pastorianus
gcggcaatgcctctttgaccattga

SEQ ID NO: 15196 - DNA, 25 bp, Saccharomyces pastorianus
agacgaggacgaaccattcaatgcg

SEQ ID NO: 15197 - DNA, 25 bp, Saccharomyces pastorianus
gtgagtgaccatttagatgcgatct

SEQ ID NO: 15198 - DNA, 25 bp, Saccharomyces pastorianus
gatgcgatctacagagagctaacca

SEQ ID NO: 15199 - DNA, 25 bp, Saccharomyces pastorianus
atgaagtggacgcagctctcgacat

SEQ ID NO: 15200 - DNA, 25 bp, Saccharomyces pastorianus
accaccatcggtattgacttcaaga

SEQ ID NO: 15201 - DNA, 25 bp, Saccharomyces pastorianus
tgagtccagtgccaagaacgatgat

SEQ ID NO: 15202 - DNA, 25 bp, Saccharomyces pastorianus
aagcgcaactgctgttggtcggtaa

SEQ ID NO: 15203 - DNA, 25 bp, Saccharomyces pastorianus
tgcaactttgggacactgcgggcca

SEQ ID NO: 15204 - DNA, 25 bp, Saccharomyces pastorianus
tgacagctgatcagggtgaggcctt

SEQ ID NO: 15205 - DNA, 25 bp, Saccharomyces pastorianus
aaacttgtcggcgttggcaatggta

SEQ ID NO: 15206 - DNA, 25 bp, Saccharomyces pastorianus
ataccatttattgagtccagtgcca

SEQ ID NO: 15207 - DNA, 25 bp, Saccharomyces pastorianus
gaacgggaagagctacgactctatt

SEQ ID NO: 15208 - DNA, 25 bp, Saccharomyces pastorianus
aagacaaattcaacccctcattcat

SEQ ID NO: 15209 - DNA, 25 bp, Saccharomyces pastorianus
agattttactgattggtgattccgg

SEQ ID NO: 15210 - DNA, 25 bp, Saccharomyces pastorianus
aatcttcttcacattggctaggttg

SEQ ID NO: 15211 - DNA, 25 bp, Saccharomyces pastorianus
caggaaggagttttctcaggaaact

SEQ ID NO: 15212 - DNA, 25 bp, Saccharomyces pastorianus
atcattctgcaagttccatttttag

SEQ ID NO: 15213 - DNA, 25 bp, Saccharomyces pastorianus
tttagcttggtcagataaaacctca

SEQ ID NO: 15214 - DNA, 25 bp, Saccharomyces pastorianus
gttccatttttagacttcaatcgtt

SEQ ID NO: 15215 - DNA, 25 bp, Saccharomyces pastorianus
gaggagggacatattcaagaggact

SEQ ID NO: 15216 - DNA, 25 bp, Saccharomyces pastorianus
ttgcaaaaatgtatggtctcttccg

SEQ ID NO: 15217 - DNA, 25 bp, Saccharomyces pastorianus
ggtggatcctccgattaatattaat

SEQ ID NO: 15218 - DNA, 25 bp, Saccharomyces pastorianus
aggaaactggctggtggatcctccg

SEQ ID NO: 15219 - DNA, 25 bp, Saccharomyces pastorianus
gactggaaagagattgtcttgcaaa

SEQ ID NO: 15220 - DNA, 25 bp, Saccharomyces pastorianus
aaatatctaactactgaaaaccagg

SEQ ID NO: 15221 - DNA, 25 bp, Saccharomyces pastorianus
atggtctcttccgtttacctcgaat

SEQ ID NO: 15222 - DNA, 25 bp, Saccharomyces pastorianus
gaaattgtcttgtgcctgcttgata

SEQ ID NO: 15223 - DNA, 25 bp, Saccharomyces pastorianus
ttccttgtcggccaaacgcatgaag

SEQ ID NO: 15224 - DNA, 25 bp, Saccharomyces pastorianus
aaagcccgtttacgatatggcggat

SEQ ID NO: 15225 - DNA, 25 bp, Saccharomyces pastorianus
aagagcctgcaaccgacgatcataa

SEQ ID NO: 15226 - DNA, 25 bp, Saccharomyces pastorianus
gcggctgaggcgttaacattacact

SEQ ID NO: 15227 - DNA, 25 bp, Saccharomyces pastorianus
gatattttgcctacagcagatgcta

SEQ ID NO: 15228 - DNA, 25 bp, Saccharomyces pastorianus
ttcccgtttctgatactttctactg

SEQ ID NO: 15229 - DNA, 25 bp, Saccharomyces pastorianus
ttgttatacgattgcacctttcctc

SEQ ID NO: 15230 - DNA, 25 bp, Saccharomyces pastorianus
tgagtgcagagattcttcccgtttc

SEQ ID NO: 15231 - DNA, 25 bp, Saccharomyces pastorianus
tgggttgaaggccactgtttccaac

SEQ ID NO: 15232 - DNA, 25 bp, Saccharomyces pastorianus
gcgattaagtttacgacggcggctg

SEQ ID NO: 15233 - DNA, 25 bp, Saccharomyces pastorianus
tggaattattggacttactcccctt

SEQ ID NO: 15234 - DNA, 25 bp, Saccharomyces pastorianus
ttactcccctttacagacgaactgt

SEQ ID NO: 15235 - DNA, 25 bp, Saccharomyces pastorianus
cagccgttgattggacccgatgata

SEQ ID NO: 15236 - DNA, 25 bp, Saccharomyces pastorianus
cggcatatcgaagcagatccacatt

SEQ ID NO: 15237 - DNA, 25 bp, Saccharomyces pastorianus
gaaggcccaggacttttctagtcta

SEQ ID NO: 15238 - DNA, 25 bp, Saccharomyces pastorianus
gttgctcttgaacatttccagaatt

SEQ ID NO: 15239 - DNA, 25 bp, Saccharomyces pastorianus
agcaactctgttttgctggccagaa

SEQ ID NO: 15240 - DNA, 25 bp, Saccharomyces pastorianus
tggttcgtactttgaacggcagcaa

SEQ ID NO: 15241 - DNA, 25 bp, Saccharomyces pastorianus
gtatcctgttgtatcaactcgctga

SEQ ID NO: 15242 - DNA, 25 bp, Saccharomyces pastorianus
gagtgatacgctcagtgcctcagat

SEQ ID NO: 15243 - DNA, 25 bp, Saccharomyces pastorianus
agtgcctcagatttggaccagccgt

SEQ ID NO: 15244 - DNA, 25 bp, Saccharomyces pastorianus
aaagagatcatatagccccaacgcc

SEQ ID NO: 15245 - DNA, 25 bp, Saccharomyces pastorianus
atcttcgtcatcatcagagtctgaa

SEQ ID NO: 15246 - DNA, 25 bp, Saccharomyces pastorianus
aagaggtaccggcagttttgcaact

SEQ ID NO: 15247 - DNA, 25 bp, Saccharomyces pastorianus
agaggcaaggtccacgagacacaat

SEQ ID NO: 15248 - DNA, 25 bp, Saccharomyces pastorianus
gaagatcggaaagacgccatcgtaa

SEQ ID NO: 15249 - DNA, 25 bp, Saccharomyces pastorianus
gtgcaaccatccgtcagatcatgat

SEQ ID NO: 15250 - DNA, 25 bp, Saccharomyces pastorianus
aagatctgctgtattttccatccgc

SEQ ID NO: 15251 - DNA, 25 bp, Saccharomyces pastorianus
aacgcctatgaattccaaccagatt

SEQ ID NO: 15252 - DNA, 25 bp, Saccharomyces pastorianus
aaggatcttgatttcgacgaacgta

SEQ ID NO: 15253 - DNA, 25 bp, Saccharomyces pastorianus
tgggatcggaacaacaacagactgc

SEQ ID NO: 15254 - DNA, 25 bp, Saccharomyces pastorianus
ttttgcaactgcgagctacacaaga

SEQ ID NO: 15255 - DNA, 25 bp, Saccharomyces pastorianus
gaaacggctgatgaaactctggaaa

SEQ ID NO: 15256 - DNA, 25 bp, Saccharomyces pastorianus
aaataacattgtttcggtgctgacg

SEQ ID NO: 15257 - DNA, 25 bp, Saccharomyces pastorianus
ggttgattgacaccggtgcattgat

SEQ ID NO: 15258 - DNA, 25 bp, Saccharomyces pastorianus
acatcctgggttcggttgttggcta

SEQ ID NO: 15259 - DNA, 25 bp, Saccharomyces pastorianus
gattatcacaagaccccacaagaga

SEQ ID NO: 15260 - DNA, 25 bp, Saccharomyces pastorianus
aagagtctaatttggctgcgacaaa

SEQ ID NO: 15261 - DNA, 25 bp, Saccharomyces pastorianus
aagtcgtcattgatgcctttaggtt

SEQ ID NO: 15262 - DNA, 25 bp, Saccharomyces pastorianus
gttgttggctatcatccgtagatgt

SEQ ID NO: 15263 - DNA, 25 bp, Saccharomyces pastorianus
tgttaacacccaaaaatccttcgag

SEQ ID NO: 15264 - DNA, 25 bp, Saccharomyces pastorianus
atattcaagctttgattcacggtct

SEQ ID NO: 15265 - DNA, 25 bp, Saccharomyces pastorianus
gttgtcgggtggtaccattcacatc

SEQ ID NO: 15266 - DNA, 25 bp, Saccharomyces pastorianus
tatgagaccgttcttgatatgcaga

SEQ ID NO: 15267 - DNA, 25 bp, Saccharomyces pastorianus
ggttattacgaatgagccgggctgc

SEQ ID NO: 15268 - DNA, 25 bp, Saccharomyces pastorianus
aaatacatgtacgtcggcggtgtga

SEQ ID NO: 15269 - DNA, 25 bp, Saccharomyces pastorianus
taaaatcttcaggagcagggcttct

SEQ ID NO: 15270 - DNA, 25 bp, Saccharomyces pastorianus
gggacgacttgcatgcattgacaca

SEQ ID NO: 15271 - DNA, 25 bp, Saccharomyces pastorianus
gccgggctgctattttaatgagttt

SEQ ID NO: 15272 - DNA, 25 bp, Saccharomyces pastorianus
tatccccacggcttaggccatatgt

SEQ ID NO: 15273 - DNA, 25 bp, Saccharomyces pastorianus
tgatgtccacgacgttgccggtaat

SEQ ID NO: 15274 - DNA, 25 bp, Saccharomyces pastorianus
agcagggcttcttgtgccttttatc

SEQ ID NO: 15275 - DNA, 25 bp, Saccharomyces pastorianus
acttgactggcataacttctgaccc

SEQ ID NO: 15276 - DNA, 25 bp, Saccharomyces pastorianus
aggatccgccgtactctgaaggaaa

SEQ ID NO: 15277 - DNA, 25 bp, Saccharomyces pastorianus
gggttcaaccatgccttaaaagatc

SEQ ID NO: 15278 - DNA, 25 bp, Saccharomyces pastorianus
acaggagccctacttgtctacaaga

SEQ ID NO: 15279 - DNA, 25 bp, Saccharomyces pastorianus
gaattttagccaagacatccctctg

SEQ ID NO: 15280 - DNA, 25 bp, Saccharomyces pastorianus
tcgaaaatcctgaggctgcccataa

SEQ ID NO: 15281 - DNA, 25 bp, Saccharomyces pastorianus
aatcaggcttggtgacaactcttca

SEQ ID NO: 15282 - DNA, 25 bp, Saccharomyces pastorianus
gatcagtcggccctcgataatatta

SEQ ID NO: 15283 - DNA, 25 bp, Saccharomyces pastorianus
gcaaggccccttcgtatgataaatc

SEQ ID NO: 15284 - DNA, 25 bp, Saccharomyces pastorianus
actccggaccaatactgcatttcga

SEQ ID NO: 15285 - DNA, 25 bp, Saccharomyces pastorianus
ttcgccaccgacttttgacagtaat

SEQ ID NO: 15286 - DNA, 25 bp, Saccharomyces pastorianus
ggatggattccatttgtctcgaaga

SEQ ID NO: 15287 - DNA, 25 bp, Saccharomyces pastorianus
agacttttagccaagcggttcctga

SEQ ID NO: 15288 - DNA, 25 bp, Saccharomyces pastorianus
tggatactaccggtctagatgcctt

SEQ ID NO: 15289 - DNA, 25 bp, Saccharomyces pastorianus
aatgcaactgttgtccggtggtcaa

SEQ ID NO: 15290 - DNA, 25 bp, Saccharomyces pastorianus
gtcatttgggttcgtttggtatcac

SEQ ID NO: 15291 - DNA, 25 bp, Saccharomyces pastorianus
tagatgccttggtggatgccttgaa

SEQ ID NO: 15292 - DNA, 25 bp, Saccharomyces pastorianus
gatgtctaattctttcccaggtaag

SEQ ID NO: 15293 - DNA, 25 bp, Saccharomyces pastorianus
ggatttgaacacttctgccgtggat

SEQ ID NO: 15294 - DNA, 25 bp, Saccharomyces pastorianus
acccacatatcttggttctggatga

SEQ ID NO: 15295 - DNA, 25 bp, Saccharomyces pastorianus
tccgttattaactctgtctgcaagg

SEQ ID NO: 15296 - DNA, 25 bp, Saccharomyces pastorianus
aattgcgcttgtgggtgctaacggt

SEQ ID NO: 15297 - DNA, 25 bp, Saccharomyces pastorianus
gtattggttacttcacgcaacatca

SEQ ID NO: 15298 - DNA, 25 bp, Saccharomyces pastorianus
gcgtttgctgccttgtgtctaaaca

SEQ ID NO: 15299 - DNA, 25 bp, Saccharomyces pastorianus
atacgataaccaaatggcttacaga

SEQ ID NO: 15300 - DNA, 25 bp, Saccharomyces pastorianus
tccccacctattattcaactacaag

SEQ ID NO: 15301 - DNA, 25 bp, Saccharomyces pastorianus
attatccccacctattattcaacta

SEQ ID NO: 15302 - DNA, 25 bp, Saccharomyces pastorianus
ccagaacaggacaaaaccgttgatt

SEQ ID NO: 15303 - DNA, 25 bp, Saccharomyces pastorianus
cgtgaatacgataaccaaatggctt

SEQ ID NO: 15304 - DNA, 25 bp, Saccharomyces pastorianus
tcccgttttggaaccaccagaacag

SEQ ID NO: 15305 - DNA, 25 bp, Saccharomyces pastorianus
gaatgtgataaattatccccaccta

SEQ ID NO: 15306 - DNA, 25 bp, Saccharomyces pastorianus
gcatttgcaagagtttatcgacaag

SEQ ID NO: 15307 - DNA, 25 bp, Saccharomyces pastorianus
cgacaagtatagatacaatgctgcc

SEQ ID NO: 15308 - DNA, 25 bp, Saccharomyces pastorianus
gcaagagtttatcgacaagtataga

SEQ ID NO: 15309 - DNA, 25 bp, Saccharomyces pastorianus
ttttggaaccaccagaacaggacaa

SEQ ID NO: 15310 - DNA, 25 bp, Saccharomyces pastorianus
gaagctaaccttatttgatcaacta

SEQ ID NO: 15311 - DNA, 25 bp, Saccharomyces pastorianus
tatacactccacaaactcagatcga

SEQ ID NO: 15312 - DNA, 25 bp, Saccharomyces pastorianus
cttccaaagtgggtacaggtgctga

SEQ ID NO: 15313 - DNA, 25 bp, Saccharomyces pastorianus
gatgccactgatggagtgtcgtcaa

SEQ ID NO: 15314 - DNA, 25 bp, Saccharomyces pastorianus
actcagatcgatttttcgcagtcct

SEQ ID NO: 15315 - DNA, 25 bp, Saccharomyces pastorianus
gaatggccagatcgagtctttaaat

SEQ ID NO: 15316 - DNA, 25 bp, Saccharomyces pastorianus
ttcgcagtccttagtatctcaattg

SEQ ID NO: 15317 - DNA, 25 bp, Saccharomyces pastorianus
gagagtactttgaacaattccctat

SEQ ID NO: 15318 - DNA, 25 bp, Saccharomyces pastorianus
ctgagtgccttttggccaatagagg

SEQ ID NO: 15319 - DNA, 25 bp, Saccharomyces pastorianus
aggtcgctcaaaggctatctgactt

SEQ ID NO: 15320 - DNA, 25 bp, Saccharomyces pastorianus
gtgccaagagcaagtccgataccaa

SEQ ID NO: 15321 - DNA, 25 bp, Saccharomyces pastorianus
tgtgtcacgattcagcaacattgtt

SEQ ID NO: 15322 - DNA, 25 bp, Saccharomyces pastorianus
tactgctgattctaatccctcttta

SEQ ID NO: 15323 - DNA, 25 bp, Saccharomyces pastorianus
ttcaaactcttttaccacgatacgc

SEQ ID NO: 15324 - DNA, 25 bp, Saccharomyces pastorianus
gaagcaccaccggttgagcagaaac

SEQ ID NO: 15325 - DNA, 25 bp, Saccharomyces pastorianus
atacgccttctttggcgcatgatgt

SEQ ID NO: 15326 - DNA, 25 bp, Saccharomyces pastorianus
gtgatttctatttcattcttcgtga

SEQ ID NO: 15327 - DNA, 25 bp, Saccharomyces pastorianus
atccctctttaaatacgaatccact

SEQ ID NO: 15328 - DNA, 25 bp, Saccharomyces pastorianus
gatgcaaaatacaactccgcgagaa

SEQ ID NO: 15329 - DNA, 25 bp, Saccharomyces pastorianus
aattcctggaattcttagactgtaa

SEQ ID NO: 15330 - DNA, 25 bp, Saccharomyces pastorianus
catgatgtcgcgcagggtaaaaata

SEQ ID NO: 15331 - DNA, 25 bp, Saccharomyces pastorianus
gaaagcgccgtggttaccgaagcac

SEQ ID NO: 15332 - DNA, 25 bp, Saccharomyces pastorianus
gtagagcttacccagaccagttcaa

SEQ ID NO: 15333 - DNA, 25 bp, Saccharomyces pastorianus
ggttccctcaatcacaacaaacgtt

SEQ ID NO: 15334 - DNA, 25 bp, Saccharomyces pastorianus
cgtttccgggtttggtgcctatatg

SEQ ID NO: 15335 - DNA, 25 bp, Saccharomyces pastorianus
gattgccagacctctaagtgtacct

SEQ ID NO: 15336 - DNA, 25 bp, Saccharomyces pastorianus
atatgaatacccttgccggtggtaa

SEQ ID NO: 15337 - DNA, 25 bp, Saccharomyces pastorianus
gaatctgtggagcaattagccgact

SEQ ID NO: 15338 - DNA, 25 bp, Saccharomyces pastorianus
taagtgtacctggatctcccaaggt

SEQ ID NO: 15339 - DNA, 25 bp, Saccharomyces pastorianus
gaaccgagagactatctgatctgtt

SEQ ID NO: 15340 - DNA, 25 bp, Saccharomyces pastorianus
gacaattgggtcttcgtagagctta

SEQ ID NO: 15341 - DNA, 25 bp, Saccharomyces pastorianus
tacacgccggcagaatgtaccgtta

SEQ ID NO: 15342 - DNA, 25 bp, Saccharomyces pastorianus
tatcgtggaccgtcgtttcaaagcc

SEQ ID NO: 15343 - DNA, 25 bp, Saccharomyces pastorianus
gtctcggagtcttcctcgggagcag

SEQ ID NO: 15344 - DNA, 25 bp, Saccharomyces pastorianus
tccggaacaagtgaccagccaatct

SEQ ID NO: 15345 - DNA, 25 bp, Saccharomyces pastorianus
gaataccatccacaacttgcagtac

SEQ ID NO: 15346 - DNA, 25 bp, Saccharomyces pastorianus
aatcttcaagagctcgttcctcaac

SEQ ID NO: 15347 - DNA, 25 bp, Saccharomyces pastorianus
aacgactcggacatgagccacgcgg

SEQ ID NO: 15348 - DNA, 25 bp, Saccharomyces pastorianus
taactacatggacgcactcagttcc

SEQ ID NO: 15349 - DNA, 25 bp, Saccharomyces pastorianus
gttcctcaacaacggcagcggtaac

SEQ ID NO: 15350 - DNA, 25 bp, Saccharomyces pastorianus
gcaagctacgccaggtcgcaggact

SEQ ID NO: 15351 - DNA, 25 bp, Saccharomyces pastorianus
gccacgcaggaagtcgtcctttaag

SEQ ID NO: 15352 - DNA, 25 bp, Saccharomyces pastorianus
aacaacactaggattcctcgcgacg

SEQ ID NO: 15353 - DNA, 25 bp, Saccharomyces pastorianus
agacggcggtccactaactacatgg

SEQ ID NO: 15354 - DNA, 25 bp, Saccharomyces pastorianus
taagttcgcgccaagttattttgaa

SEQ ID NO: 15355 - DNA, 25 bp, Saccharomyces pastorianus
gggcctctgtctggaatgacacttt

SEQ ID NO: 15356 - DNA, 25 bp, Saccharomyces pastorianus
gttccatgatttaccaacaactttg

SEQ ID NO: 15357 - DNA, 25 bp, Saccharomyces pastorianus
ataaaaagcttctgagggcctctgt

SEQ ID NO: 15358 - DNA, 25 bp, Saccharomyces pastorianus
gaatgtcatggattactctctagtc

SEQ ID NO: 15359 - DNA, 25 bp, Saccharomyces pastorianus
gaaaagttctatatcgagctctaaa

SEQ ID NO: 15360 - DNA, 25 bp, Saccharomyces pastorianus
tagacatgtcgagcaaacgggcaaa

SEQ ID NO: 15361 - DNA, 25 bp, Saccharomyces pastorianus
aacagcctacggttgtaacacctag

SEQ ID NO: 15362 - DNA, 25 bp, Saccharomyces pastorianus
cacccatccatgtccgtgaatatga

SEQ ID NO: 15363 - DNA, 25 bp, Saccharomyces pastorianus
ggagccagtgtaatcaaacagccta

SEQ ID NO: 15364 - DNA, 25 bp, Saccharomyces pastorianus
gagtacatttacgaatcacccatcc

SEQ ID NO: 15365 - DNA, 25 bp, Saccharomyces pastorianus
ggttacctgtacaacttcgtcatgg

SEQ ID NO: 15366 - DNA, 25 bp, Saccharomyces pastorianus
tacttggcggttacaggttcctcca

SEQ ID NO: 15367 - DNA, 25 bp, Saccharomyces pastorianus
ggaacactcgatgggcagcaacaga

SEQ ID NO: 15368 - DNA, 25 bp, Saccharomyces pastorianus
agagaaccgtacgtggacgcgtcaa

SEQ ID NO: 15369 - DNA, 25 bp, Saccharomyces pastorianus
atcaaagtcacctcactcttggaat

SEQ ID NO: 15370 - DNA, 25 bp, Saccharomyces pastorianus
gattcccatcagagttgtttcgtcg

SEQ ID NO: 15371 - DNA, 25 bp, Saccharomyces pastorianus
gctgatgactcgtcgttggacacta

SEQ ID NO: 15372 - DNA, 25 bp, Saccharomyces pastorianus
gacgaattcccatgtgatgaccata

SEQ ID NO: 15373 - DNA, 25 bp, Saccharomyces pastorianus
gcgtctttgaaactccccattgaga

SEQ ID NO: 15374 - DNA, 25 bp, Saccharomyces pastorianus
gacacgtcagaatacccggaacttt

SEQ ID NO: 15375 - DNA, 25 bp, Saccharomyces pastorianus
cggatgatacgctactcttctcaga

SEQ ID NO: 15376 - DNA, 25 bp, Saccharomyces pastorianus
attggtgaagacttacctcccactt

SEQ ID NO: 15377 - DNA, 25 bp, Saccharomyces pastorianus
tagtttccattcttccagttttagg

SEQ ID NO: 15378 - DNA, 25 bp, Saccharomyces pastorianus
ggaacatctcttaatacgcttggtg

SEQ ID NO: 15379 - DNA, 25 bp, Saccharomyces pastorianus
atcacccgttttgctttcaagatca

SEQ ID NO: 15380 - DNA, 25 bp, Saccharomyces pastorianus
agaacacttctagcctcaacaacag

SEQ ID NO: 15381 - DNA, 25 bp, Saccharomyces pastorianus
attatcgccgttattaaatgtcccg

SEQ ID NO: 15382 - DNA, 25 bp, Saccharomyces pastorianus
agtacctccgagcttgaattatctg

SEQ ID NO: 15383 - DNA, 25 bp, Saccharomyces pastorianus
gctaatgacgtgctaccagtacctc

SEQ ID NO: 15384 - DNA, 25 bp, Saccharomyces pastorianus
caatggctccaggtgtagttctagt

SEQ ID NO: 15385 - DNA, 25 bp, Saccharomyces pastorianus
ctcccacttatttctgttcgataca

SEQ ID NO: 15386 - DNA, 25 bp, Saccharomyces pastorianus
gcttcccctatctcgataatcaatg

SEQ ID NO: 15387 - DNA, 25 bp, Saccharomyces pastorianus
gagcatcgttataacatcctgggaa

SEQ ID NO: 15388 - DNA, 25 bp, Saccharomyces pastorianus
aaaccagcgatttgaactcctcaca

SEQ ID NO: 15389 - DNA, 25 bp, Saccharomyces pastorianus
gcgagagctccttcatcaatgagta

SEQ ID NO: 15390 - DNA, 25 bp, Saccharomyces pastorianus
cttccgcttattctgggtacattaa

SEQ ID NO: 15391 - DNA, 25 bp, Saccharomyces pastorianus
gtgaaaacacttccgcttattctgg

SEQ ID NO: 15392 - DNA, 25 bp, Saccharomyces pastorianus
gagcagtccctatcacgaaggtgtt

SEQ ID NO: 15393 - DNA, 25 bp, Saccharomyces pastorianus
aatatcaggcctttcaagattcaaa

SEQ ID NO: 15394 - DNA, 25 bp, Saccharomyces pastorianus
atcacgatgattacgggatccggaa

SEQ ID NO: 15395 - DNA, 25 bp, Saccharomyces pastorianus
acaagttaccccatactaccattat

SEQ ID NO: 15396 - DNA, 25 bp, Saccharomyces pastorianus
tactaccattattcacaaaccagcg

SEQ ID NO: 15397 - DNA, 25 bp, Saccharomyces pastorianus
gaactcctcacagtatgctgcgaga

SEQ ID NO: 15398 - DNA, 25 bp, Saccharomyces pastorianus
acttttcttgctgtcttacttccat

SEQ ID NO: 15399 - DNA, 25 bp, Saccharomyces pastorianus
agtggcatgctggtggatcctaaaa

SEQ ID NO: 15400 - DNA, 25 bp, Saccharomyces pastorianus
agttccaattgcctcgttagacgtc

SEQ ID NO: 15401 - DNA, 25 bp, Saccharomyces pastorianus
ggtgtaccaccgcagaaagtgccat

SEQ ID NO: 15402 - DNA, 25 bp, Saccharomyces pastorianus
ttcaagttgtttctacccagtggca

SEQ ID NO: 15403 - DNA, 25 bp, Saccharomyces pastorianus
aatggccggacgtatacgacgcagt

SEQ ID NO: 15404 - DNA, 25 bp, Saccharomyces pastorianus
attcgttgcattccctcaatgacaa

SEQ ID NO: 15405 - DNA, 25 bp, Saccharomyces pastorianus
ggccatttcgacctgttcaagttgt

SEQ ID NO: 15406 - DNA, 25 bp, Saccharomyces pastorianus
tagacgtcatcaaccaatggccgga

SEQ ID NO: 15407 - DNA, 25 bp, Saccharomyces pastorianus
gtaaggccgtttgcgacctggtcaa

SEQ ID NO: 15408 - DNA, 25 bp, Saccharomyces pastorianus
aacgggatccccattgactttgatc

SEQ ID NO: 15409 - DNA, 25 bp, Saccharomyces pastorianus
aatccaacggcgaagttcgagccat

SEQ ID NO: 15410 - DNA, 25 bp, Saccharomyces pastorianus
tccattgaactcctcgcctttaaaa

SEQ ID NO: 15411 - DNA, 25 bp, Saccharomyces pastorianus
gggaccactcgagtacgatgcattt

SEQ ID NO: 15412 - DNA, 25 bp, Saccharomyces pastorianus
tagcatacacgaagcgggaccactc

SEQ ID NO: 15413 - DNA, 25 bp, Saccharomyces pastorianus
aaagcatccgatcgtggacgctgga

SEQ ID NO: 15414 - DNA, 25 bp, Saccharomyces pastorianus
gaagttgtccccagaagccaggtgg

SEQ ID NO: 15415 - DNA, 25 bp, Saccharomyces pastorianus
aaaatggctcgtctattgtccacca

SEQ ID NO: 15416 - DNA, 25 bp, Saccharomyces pastorianus
gaagccaggtggcatggtcacaacc

SEQ ID NO: 15417 - DNA, 25 bp, Saccharomyces pastorianus
gaacaatgagcttaatgcgccacac

SEQ ID NO: 15418 - DNA, 25 bp, Saccharomyces pastorianus
ggtcacaacccactgatagcggcgg

SEQ ID NO: 15419 - DNA, 25 bp, Saccharomyces pastorianus
gaaaccttgggatcgcgaccaaatt

SEQ ID NO: 15420 - DNA, 25 bp, Saccharomyces pastorianus
gagatttgacaatgacgccgccacc

SEQ ID NO: 15421 - DNA, 25 bp, Saccharomyces pastorianus
gatgaatccatgcacgataccaata

SEQ ID NO: 15422 - DNA, 25 bp, Saccharomyces pastorianus
aaaaggacaacgagcgccgcaggtg

SEQ ID NO: 15423 - DNA, 25 bp, Saccharomyces pastorianus
cacctaacagccatggagcgcttaa

SEQ ID NO: 15424 - DNA, 25 bp, Saccharomyces pastorianus
ttactctaagagtccacgcagaaga

SEQ ID NO: 15425 - DNA, 25 bp, Saccharomyces pastorianus
caatgcggcggatgataccatacta

SEQ ID NO: 15426 - DNA, 25 bp, Saccharomyces pastorianus
gaggctattggtggactttacccct

SEQ ID NO: 15427 - DNA, 25 bp, Saccharomyces pastorianus
aagtttgggtgtgccacagacttcg

SEQ ID NO: 15428 - DNA, 25 bp, Saccharomyces pastorianus
atatgacttctcatgccggcaggaa

SEQ ID NO: 15429 - DNA, 25 bp, Saccharomyces pastorianus
aaacgacatcttgtctgcttcatcg

SEQ ID NO: 15430 - DNA, 25 bp, Saccharomyces pastorianus
cgagccaaccttcaacagcgaatag

SEQ ID NO: 15431 - DNA, 25 bp, Saccharomyces pastorianus
aaaagcgtccggtccattgacacgt

SEQ ID NO: 15432 - DNA, 25 bp, Saccharomyces pastorianus
gatgccaagtacctgacgtgctcca

SEQ ID NO: 15433 - DNA, 25 bp, Saccharomyces pastorianus
gaaccattcttgttgaaaccgtcgc

SEQ ID NO: 15434 - DNA, 25 bp, Saccharomyces pastorianus
tatcacgtctacagcattcaactcg

SEQ ID NO: 15435 - DNA, 25 bp, Saccharomyces pastorianus
gggaacccgaacctgatgtgtatca

SEQ ID NO: 15436 - DNA, 25 bp, Saccharomyces pastorianus
atgggtccgtctacattatgtgtgc

SEQ ID NO: 15437 - DNA, 25 bp, Saccharomyces pastorianus
ggcaacaagctatacatcctggaca

SEQ ID NO: 15438 - DNA, 25 bp, Saccharomyces pastorianus
atccacaagtgcgaaatctctccaa

SEQ ID NO: 15439 - DNA, 25 bp, Saccharomyces pastorianus
attggagtctcgcttcttgatcatc

SEQ ID NO: 15440 - DNA, 25 bp, Saccharomyces pastorianus
cttcttcgtggaggactttgcgttt

SEQ ID NO: 15441 - DNA, 25 bp, Saccharomyces pastorianus
acgaatcggccatcttgcggttcaa

SEQ ID NO: 15442 - DNA, 25 bp, Saccharomyces pastorianus
gaagcttacaaagacgccggtatca

SEQ ID NO: 15443 - DNA, 25 bp, Saccharomyces pastorianus
gtcaagattgatttggatgccgcaa

SEQ ID NO: 15444 - DNA, 25 bp, Saccharomyces pastorianus
atcggtgctgcattctcaagagatc

SEQ ID NO: 15445 - DNA, 25 bp, Saccharomyces pastorianus
tgatcgataacgtaggttcctttta

SEQ ID NO: 15446 - DNA, 25 bp, Saccharomyces pastorianus
ggtttggccccatttaaagcaatcg

SEQ ID NO: 15447 - DNA, 25 bp, Saccharomyces pastorianus
gttgtcgtcgattggctggataaca

SEQ ID NO: 15448 - DNA, 25 bp, Saccharomyces pastorianus
gtatatctcagacttggctatcgga

SEQ ID NO: 15449 - DNA, 25 bp, Saccharomyces pastorianus
gtgcatccaaatgaagttcacctgt

SEQ ID NO: 15450 - DNA, 25 bp, Saccharomyces pastorianus
ttcacctgttgattgttgtcgtcga

SEQ ID NO: 15451 - DNA, 25 bp, Saccharomyces pastorianus
ttccttttacttatgtggtcctact

SEQ ID NO: 15452 - DNA, 25 bp, Saccharomyces pastorianus
ggtatcatcacccatatcggtgctg

SEQ ID NO: 15453 - DNA, 25 bp, Saccharomyces pastorianus
ggatcgcaattcatagtcgtttctc

SEQ ID NO: 15454 - DNA, 25 bp, Saccharomyces pastorianus
agatgaggttgacgctgctcttgat

SEQ ID NO: 15455 - DNA, 25 bp, Saccharomyces pastorianus
gaccagcgccgatgtatatcttaga

SEQ ID NO: 15456 - DNA, 25 bp, Saccharomyces pastorianus
gaaaaggtgacactcgattttggta

SEQ ID NO: 15457 - DNA, 25 bp, Saccharomyces pastorianus
gatgtcacgcaaggtctagaagtta

SEQ ID NO: 15458 - DNA, 25 bp, Saccharomyces pastorianus
gacaaggttcaaaggatcgcaattc

SEQ ID NO: 15459 - DNA, 25 bp, Saccharomyces pastorianus
aactatcaggtggacaacgatctct

SEQ ID NO: 15460 - DNA, 25 bp, Saccharomyces pastorianus
ttcgccaaattggttccttgcaaag

SEQ ID NO: 15461 - DNA, 25 bp, Saccharomyces pastorianus
tgccgatcttttaccaaactcattc

SEQ ID NO: 15462 - DNA, 25 bp, Saccharomyces pastorianus
aacgatctctgattgccttagcatt

SEQ ID NO: 15463 - DNA, 25 bp, Saccharomyces pastorianus
tattacaattcagaccagcgccgat

SEQ ID NO: 15464 - DNA, 25 bp, Saccharomyces pastorianus
gctaagtctaagaaccataccgctc

SEQ ID NO: 15465 - DNA, 25 bp, Saccharomyces pastorianus
agtctaagaaccataccgctcacaa

SEQ ID NO: 15466 - DNA, 25 bp, Saccharomyces pastorianus
ggctcacagaaacggtatcaagaag

SEQ ID NO: 15467 - DNA, 25 bp, Saccharomyces pastorianus
tcaagaagccaaagacctacaagta

SEQ ID NO: 15468 - DNA, 25 bp, Saccharomyces pastorianus
cggtatcaagaagccaaagacctac

SEQ ID NO: 15469 - DNA, 25 bp, Saccharomyces pastorianus
aagtctaagaaccataccgctcaca

SEQ ID NO: 15470 - DNA, 25 bp, Saccharomyces pastorianus
taagtctaagaaccataccgctcac

SEQ ID NO: 15471 - DNA, 25 bp, Saccharomyces pastorianus
aaggctcacagaaacggtatcaaga

SEQ ID NO: 15472 - DNA, 25 bp, Saccharomyces pastorianus
gaaacggtatcaagaagccaaagac

SEQ ID NO: 15473 - DNA, 25 bp, Saccharomyces pastorianus
taagaaccataccgctcacaaccaa

SEQ ID NO: 15474 - DNA, 25 bp, Saccharomyces pastorianus
gtctaagaaccataccgctcacaac

SEQ ID NO: 15475 - DNA, 25 bp, Saccharomyces pastorianus
gagtttttccacctgcagcactact

SEQ ID NO: 15476 - DNA, 25 bp, Saccharomyces pastorianus
gaaggagaccgttttgcccgtcgtg

SEQ ID NO: 15477 - DNA, 25 bp, Saccharomyces pastorianus
aaagtgctcgtacaccactacgaag

SEQ ID NO: 15478 - DNA, 25 bp, Saccharomyces pastorianus
gcgtgttggaacttgctggtgaata

SEQ ID NO: 15479 - DNA, 25 bp, Saccharomyces pastorianus
gatgaggaggccgtcaccgatcaat

SEQ ID NO: 15480 - DNA, 25 bp, Saccharomyces pastorianus
ccgcggctgaggatgatgacaacga

SEQ ID NO: 15481 - DNA, 25 bp, Saccharomyces pastorianus
acctgcagcactacttggacacgtg

SEQ ID NO: 15482 - DNA, 25 bp, Saccharomyces pastorianus
gagcgtgtcaaggtacagcagcaac

SEQ ID NO: 15483 - DNA, 25 bp, Saccharomyces pastorianus
taccaggacctcgaccacaaggagg

SEQ ID NO: 15484 - DNA, 25 bp, Saccharomyces pastorianus
actacgaagagtgcgccgagcgtgt

SEQ ID NO: 15485 - DNA, 25 bp, Saccharomyces pastorianus
ggccgtcaccgatcaattggaagat

SEQ ID NO: 15486 - DNA, 25 bp, Saccharomyces pastorianus
ttgcaacgacaaaacggcctccgtt

SEQ ID NO: 15487 - DNA, 25 bp, Saccharomyces pastorianus
aggacgatgtgtcttccctggtcga

SEQ ID NO: 15488 - DNA, 25 bp, Saccharomyces pastorianus
tctgcatctgtctaccgacaacaat

SEQ ID NO: 15489 - DNA, 25 bp, Saccharomyces pastorianus
gatgaagttcttccaaagcaaaaac

SEQ ID NO: 15490 - DNA, 25 bp, Saccharomyces pastorianus
tactctgcagctcagccaggacgat

SEQ ID NO: 15491 - DNA, 25 bp, Saccharomyces pastorianus
gacgatatggcttcttgcaacgaca

SEQ ID NO: 15492 - DNA, 25 bp, Saccharomyces pastorianus
ttccctggtcgatgatctcaacgag

SEQ ID NO: 15493 - DNA, 25 bp, Saccharomyces pastorianus
tacgctccaacacggacgtccaaga

SEQ ID NO: 15494 - DNA, 25 bp, Saccharomyces pastorianus
tcacaaaacgttgtcgacgacgacg

SEQ ID NO: 15495 - DNA, 25 bp, Saccharomyces pastorianus
aggatcctatcctctctgcatctgt

SEQ ID NO: 15496 - DNA, 25 bp, Saccharomyces pastorianus
gttgcacacaacaggatcctatcct

SEQ ID NO: 15497 - DNA, 25 bp, Saccharomyces pastorianus
tagactcaggcatacagctggtgga

SEQ ID NO: 15498 - DNA, 25 bp, Saccharomyces pastorianus
agtggcgcgtctgggtccaaactga

SEQ ID NO: 15499 - DNA, 25 bp, Saccharomyces pastorianus
cgaagctgtgtgatctggagacgca

SEQ ID NO: 15500 - DNA, 25 bp, Saccharomyces pastorianus
gaccggttatcgttgagcaagcaga

SEQ ID NO: 15501 - DNA, 25 bp, Saccharomyces pastorianus
acgatgcggtcgttgcgttgttgca

SEQ ID NO: 15502 - DNA, 25 bp, Saccharomyces pastorianus
gatcctggacgttaacaagtcgctg

SEQ ID NO: 15503 - DNA, 25 bp, Saccharomyces pastorianus
gagtttgccaatcgaagacagctat

SEQ ID NO: 15504 - DNA, 25 bp, Saccharomyces pastorianus
ggagatctcgcagaagtacattcag

SEQ ID NO: 15505 - DNA, 25 bp, Saccharomyces pastorianus
gacggcaacacggtcacgggacatg

SEQ ID NO: 15506 - DNA, 25 bp, Saccharomyces pastorianus
ttcacgaggtggttggctcgcaact

SEQ ID NO: 15507 - DNA, 25 bp, Saccharomyces pastorianus
aagagcgaccacagcagtggcgcgt

SEQ ID NO: 15508 - DNA, 25 bp, Saccharomyces pastorianus
gacactttaaacaagccttcattga

SEQ ID NO: 15509 - DNA, 25 bp, Saccharomyces pastorianus
gagagattgaacttggctacccaaa

SEQ ID NO: 15510 - DNA, 25 bp, Saccharomyces pastorianus
acctgcctcggtatggaacgttact

SEQ ID NO: 15511 - DNA, 25 bp, Saccharomyces pastorianus
gtgatgtctacgttatagagcctga

SEQ ID NO: 15512 - DNA, 25 bp, Saccharomyces pastorianus
gggtttcccaactatgattttcaca

SEQ ID NO: 15513 - DNA, 25 bp, Saccharomyces pastorianus
tttaccagggtcaagcccaagacgt

SEQ ID NO: 15514 - DNA, 25 bp, Saccharomyces pastorianus
aagacctctgtgaagaagggccaaa

SEQ ID NO: 15515 - DNA, 25 bp, Saccharomyces pastorianus
gacgtggtttatattggctttcata

SEQ ID NO: 15516 - DNA, 25 bp, Saccharomyces pastorianus
gaaacattgatctctccagacactt

SEQ ID NO: 15517 - DNA, 25 bp, Saccharomyces pastorianus
agatttattggcactaccgtggaag

SEQ ID NO: 15518 - DNA, 25 bp, Saccharomyces pastorianus
ggctacccaaattctttccaatggt

SEQ ID NO: 15519 - DNA, 25 bp, Saccharomyces pastorianus
gtcgttatcgcaagcatactgtcat

SEQ ID NO: 15520 - DNA, 25 bp, Saccharomyces pastorianus
tatgcagcattattcacgcggtggc

SEQ ID NO: 15521 - DNA, 25 bp, Saccharomyces pastorianus
tagggttgttctactagcatacttc

SEQ ID NO: 15522 - DNA, 25 bp, Saccharomyces pastorianus
gatatacttgatgctttgctcgagc

SEQ ID NO: 15523 - DNA, 25 bp, Saccharomyces pastorianus
atcctattccagcttcatcatttgt

SEQ ID NO: 15524 - DNA, 25 bp, Saccharomyces pastorianus
ggaaagccaacacctttatcacgtt

SEQ ID NO: 15525 - DNA, 25 bp, Saccharomyces pastorianus
gaactatcattctactccaacatta

SEQ ID NO: 15526 - DNA, 25 bp, Saccharomyces pastorianus
tcgtggaaacactttggctgcttaa

SEQ ID NO: 15527 - DNA, 25 bp, Saccharomyces pastorianus
gctgatactaatgcccttggtggga

SEQ ID NO: 15528 - DNA, 25 bp, Saccharomyces pastorianus
tatcacgttgcccattttatatttg

SEQ ID NO: 15529 - DNA, 25 bp, Saccharomyces pastorianus
gccacaagtttcctatatgcagcat

SEQ ID NO: 15530 - DNA, 25 bp, Saccharomyces pastorianus
acctggctttgggagggatcgcaca

SEQ ID NO: 15531 - DNA, 25 bp, Saccharomyces pastorianus
gaaggactgtctgaaccattgcccg

SEQ ID NO: 15532 - DNA, 25 bp, Saccharomyces pastorianus
aagacggtgcgttcaaggatacaaa

SEQ ID NO: 15533 - DNA, 25 bp, Saccharomyces pastorianus
gcatggtcagaagtcgatccctata

SEQ ID NO: 15534 - DNA, 25 bp, Saccharomyces pastorianus
tggtccgccatacaggaagagtctt

SEQ ID NO: 15535 - DNA, 25 bp, Saccharomyces pastorianus
tcgcgcatgaattgcttcccatgga

SEQ ID NO: 15536 - DNA, 25 bp, Saccharomyces pastorianus
acgcgtttgcatgttccgacaataa

SEQ ID NO: 15537 - DNA, 25 bp, Saccharomyces pastorianus
tattacccaaccaatcatggtccgc

SEQ ID NO: 15538 - DNA, 25 bp, Saccharomyces pastorianus
gaatgttttggagacgccacctggc

SEQ ID NO: 15539 - DNA, 25 bp, Saccharomyces pastorianus
tgacgatatgttcgagctcgcgcat

SEQ ID NO: 15540 - DNA, 25 bp, Saccharomyces pastorianus
agacaatccggtacatgatcccacg

SEQ ID NO: 15541 - DNA, 25 bp, Saccharomyces pastorianus
tcttgctagcggaaaggactgcctt

SEQ ID NO: 15542 - DNA, 25 bp, Saccharomyces pastorianus
ggctaccggttccataacaaaggct

SEQ ID NO: 15543 - DNA, 25 bp, Saccharomyces pastorianus
ggactgccttaaacatccttagtag

SEQ ID NO: 15544 - DNA, 25 bp, Saccharomyces pastorianus
gtggatgtgacacccacaggtacga

SEQ ID NO: 15545 - DNA, 25 bp, Saccharomyces pastorianus
ggctggcgcggatgtcatcatgtta

SEQ ID NO: 15546 - DNA, 25 bp, Saccharomyces pastorianus
tgcttggcacgttctacaggttaca

SEQ ID NO: 15547 - DNA, 25 bp, Saccharomyces pastorianus
ttctcttggaatgtagcggtggctt

SEQ ID NO: 15548 - DNA, 25 bp, Saccharomyces pastorianus
ggacccgctaaaaacatcttgctag

SEQ ID NO: 15549 - DNA, 25 bp, Saccharomyces pastorianus
gacaatcacatttgggctaccggtt

SEQ ID NO: 15550 - DNA, 25 bp, Saccharomyces pastorianus
ccaccgcttcgcacaggattatttg

SEQ ID NO: 15551 - DNA, 25 bp, Saccharomyces pastorianus
gaaagactacacctgggttacgtcg

SEQ ID NO: 15552 - DNA, 25 bp, Saccharomyces pastorianus
aagacctccgcgttcgtaaacagag

SEQ ID NO: 15553 - DNA, 25 bp, Saccharomyces pastorianus
atccattttcgaattacctgccagg

SEQ ID NO: 15554 - DNA, 25 bp, Saccharomyces pastorianus
gttccagttcaagcccattggtgaa

SEQ ID NO: 15555 - DNA, 25 bp, Saccharomyces pastorianus
ccaatgatcaggttcgtcggtgcaa

SEQ ID NO: 15556 - DNA, 25 bp, Saccharomyces pastorianus
gtgaaacacgctcccgagatcattg

SEQ ID NO: 15557 - DNA, 25 bp, Saccharomyces pastorianus
aagagtgcgtatgagccaatgatca

SEQ ID NO: 15558 - DNA, 25 bp, Saccharomyces pastorianus
attacctgccaggttccagttcaag

SEQ ID NO: 15559 - DNA, 25 bp, Saccharomyces pastorianus
tcggtgcaagacaccctgcagtgaa

SEQ ID NO: 15560 - DNA, 25 bp, Saccharomyces pastorianus
taaaccggagtgtcagcgctagtcc

SEQ ID NO: 15561 - DNA, 25 bp, Saccharomyces pastorianus
atcattgttcatccatgtgctacca

SEQ ID NO: 15562 - DNA, 25 bp, Saccharomyces pastorianus
gatgagcttgcatccattttcgaat

SEQ ID NO: 15563 - DNA, 25 bp, Saccharomyces pastorianus
gccatcatcgttgccggtgtagaat

SEQ ID NO: 15564 - DNA, 25 bp, Saccharomyces pastorianus
tactaggtgttacatattcctcccc

SEQ ID NO: 15565 - DNA, 25 bp, Saccharomyces pastorianus
tacgggtcccttctaaggttcaatg

SEQ ID NO: 15566 - DNA, 25 bp, Saccharomyces pastorianus
ggcgcacatggctaatccactgtta

SEQ ID NO: 15567 - DNA, 25 bp, Saccharomyces pastorianus
gaagtttctccttggctataatcga

SEQ ID NO: 15568 - DNA, 25 bp, Saccharomyces pastorianus
gatatccccaagacaactctacaaa

SEQ ID NO: 15569 - DNA, 25 bp, Saccharomyces pastorianus
gttgaccgagaatccgatatcccca

SEQ ID NO: 15570 - DNA, 25 bp, Saccharomyces pastorianus
atgcatacgacaatcctttggcgga

SEQ ID NO: 15571 - DNA, 25 bp, Saccharomyces pastorianus
tgagcccagccatgtcttcgaatat

SEQ ID NO: 15572 - DNA, 25 bp, Saccharomyces pastorianus
gaaagactcattcctgtgggtgaaa

SEQ ID NO: 15573 - DNA, 25 bp, Saccharomyces pastorianus
aaagctactagaagacctggtcact

SEQ ID NO: 15574 - DNA, 25 bp, Saccharomyces pastorianus
acagggcttcgatgtcaccattgaa

SEQ ID NO: 15575 - DNA, 25 bp, Saccharomyces pastorianus
taagcagtctttcctatccagtaaa

SEQ ID NO: 15576 - DNA, 25 bp, Saccharomyces pastorianus
atggccgtcgattctgtcgtcatgg

SEQ ID NO: 15577 - DNA, 25 bp, Saccharomyces pastorianus
cgcggaggccgaagtcatcaacatg

SEQ ID NO: 15578 - DNA, 25 bp, Saccharomyces pastorianus
agagttgccttacgatgtcatcacc

SEQ ID NO: 15579 - DNA, 25 bp, Saccharomyces pastorianus
ggaacttccatcagtgtcagccaaa

SEQ ID NO: 15580 - DNA, 25 bp, Saccharomyces pastorianus
agacgatgattcactggtcccattg

SEQ ID NO: 15581 - DNA, 25 bp, Saccharomyces pastorianus
gaacttactgatttggtcttcacca

SEQ ID NO: 15582 - DNA, 25 bp, Saccharomyces pastorianus
acgaggacgcgttgtacccaatgac

SEQ ID NO: 15583 - DNA, 25 bp, Saccharomyces pastorianus
gggacgtatccgctaagagcttcac

SEQ ID NO: 15584 - DNA, 25 bp, Saccharomyces pastorianus
aacgactcaggtgtgctagcattct

SEQ ID NO: 15585 - DNA, 25 bp, Saccharomyces pastorianus
acttggaggatgactcgctcttgtc

SEQ ID NO: 15586 - DNA, 25 bp, Saccharomyces pastorianus
agtagcgaccacaaactgtccgaat

SEQ ID NO: 15587 - DNA, 25 bp, Saccharomyces pastorianus
gactccttcaccgacattttgaaat

SEQ ID NO: 15588 - DNA, 25 bp, Saccharomyces pastorianus
gttttcgacagctacttcaaccaat

SEQ ID NO: 15589 - DNA, 25 bp, Saccharomyces pastorianus
agaacactgagttgtcgtacgactt

SEQ ID NO: 15590 - DNA, 25 bp, Saccharomyces pastorianus
cataaaggccctgttgttcttcaac

SEQ ID NO: 15591 - DNA, 25 bp, Saccharomyces pastorianus
atggagggctcgtaccagaaggctt

SEQ ID NO: 15592 - DNA, 25 bp, Saccharomyces pastorianus
taagtctgtacctgttgaacctgct

SEQ ID NO: 15593 - DNA, 25 bp, Saccharomyces pastorianus
gaaggcttgggatcttttgcagtct

SEQ ID NO: 15594 - DNA, 25 bp, Saccharomyces pastorianus
gccaacatctacacgtttgacttcg

SEQ ID NO: 15595 - DNA, 25 bp, Saccharomyces pastorianus
tcgtacccgatcaagctggacagat

SEQ ID NO: 15596 - DNA, 25 bp, Saccharomyces pastorianus
ggtatcaagacatccttgcccgaac

SEQ ID NO: 15597 - DNA, 25 bp, Saccharomyces pastorianus
aacttggaagacaccgacgacattt

SEQ ID NO: 15598 - DNA, 25 bp, Saccharomyces pastorianus
tgctgcgtatggtgttgatcgactt

SEQ ID NO: 15599 - DNA, 25 bp, Saccharomyces pastorianus
atacatcatggacacttcgtaccca

SEQ ID NO: 15600 - DNA, 25 bp, Saccharomyces pastorianus
ttgcccgaacgtaagctgatcagaa

SEQ ID NO: 15601 - DNA, 25 bp, Saccharomyces pastorianus
agacttgctgtctgtggtatcggtg

SEQ ID NO: 15602 - DNA, 25 bp, Saccharomyces pastorianus
gtatcggtgccatttgccaaaagag

SEQ ID NO: 15603 - DNA, 25 bp, Saccharomyces pastorianus
caagaccgggccaacaagcgtttga

SEQ ID NO: 15604 - DNA, 25 bp, Saccharomyces pastorianus
aggctacaagacaggccacattgcc

SEQ ID NO: 15605 - DNA, 25 bp, Saccharomyces pastorianus
tgtatccaggtttcaaagccgctgc

SEQ ID NO: 15606 - DNA, 25 bp, Saccharomyces pastorianus
gatggaccggtgatgccaccaacga

SEQ ID NO: 15607 - DNA, 25 bp, Saccharomyces pastorianus
gatcgtggatgactctgatttttct

SEQ ID NO: 15608 - DNA, 25 bp, Saccharomyces pastorianus
aaatcgctattttgacttcactgaa

SEQ ID NO: 15609 - DNA, 25 bp, Saccharomyces pastorianus
aaaatccccatggttcttgatggtg

SEQ ID NO: 15610 - DNA, 25 bp, Saccharomyces pastorianus
aacttatttgctgctttgaggaaag

SEQ ID NO: 15611 - DNA, 25 bp, Saccharomyces pastorianus
agtactgtggtcgatgggctatgca

SEQ ID NO: 15612 - DNA, 25 bp, Saccharomyces pastorianus
gaattaggtggcgaagcttggtctc

SEQ ID NO: 15613 - DNA, 25 bp, Saccharomyces pastorianus
cctcggccaaggtcattttgttagt

SEQ ID NO: 15614 - DNA, 25 bp, Saccharomyces pastorianus
ctggcggtttcacttatgaggagat

SEQ ID NO: 15615 - DNA, 25 bp, Saccharomyces pastorianus
atatagacattattctccctcggcc

SEQ ID NO: 15616 - DNA, 25 bp, Saccharomyces pastorianus
gaagggctggctgtcatgaacagat

SEQ ID NO: 15617 - DNA, 25 bp, Saccharomyces pastorianus
gttagtgcctaacacaagtgacacc

SEQ ID NO: 15618 - DNA, 25 bp, Saccharomyces pastorianus
gtgctatatatataccgttcttcca

SEQ ID NO: 15619 - DNA, 25 bp, Saccharomyces pastorianus
tacccaacccactaaatgcgatgca

SEQ ID NO: 15620 - DNA, 25 bp, Saccharomyces pastorianus
gaaacgtttacttactactgcaact

SEQ ID NO: 15621 - DNA, 25 bp, Saccharomyces pastorianus
gaagcctccaagaaaacgtactgat

SEQ ID NO: 15622 - DNA, 25 bp, Saccharomyces pastorianus
tggtccaccagctcaatcattgggt

SEQ ID NO: 15623 - DNA, 25 bp, Saccharomyces pastorianus
tttcaattgtctacctctgtggctg

SEQ ID NO: 15624 - DNA, 25 bp, Saccharomyces pastorianus
aactatgcagttggactttcactat

SEQ ID NO: 15625 - DNA, 25 bp, Saccharomyces pastorianus
gggtgtctgacatattactgctatt

SEQ ID NO: 15626 - DNA, 25 bp, Saccharomyces pastorianus
ctctgtggctgcgttatcgttggtc

SEQ ID NO: 15627 - DNA, 25 bp, Saccharomyces pastorianus
tgtctacggcattcaaactacccaa

SEQ ID NO: 15628 - DNA, 25 bp, Saccharomyces pastorianus
atgacttttacttgctttgttttct

SEQ ID NO: 15629 - DNA, 25 bp, Saccharomyces pastorianus
ggcctgaacagcgtcgatcttattg

SEQ ID NO: 15630 - DNA, 25 bp, Saccharomyces pastorianus
agcatcgtgccatagctcagtcagt

SEQ ID NO: 15631 - DNA, 25 bp, Saccharomyces pastorianus
ggatgcatgtgtgcttccaagcgac

SEQ ID NO: 15632 - DNA, 25 bp, Saccharomyces pastorianus
acgttccaacaatgctgcgattcgg

SEQ ID NO: 15633 - DNA, 25 bp, Saccharomyces pastorianus
agcccctcgtcgtatgtggacatga

SEQ ID NO: 15634 - DNA, 25 bp, Saccharomyces pastorianus
tggagtcacccctacaaagcgatgg

SEQ ID NO: 15635 - DNA, 25 bp, Saccharomyces pastorianus
agatggcccgctgcaagtgatcagg

SEQ ID NO: 15636 - DNA, 25 bp, Saccharomyces pastorianus
cgatgttgacattccgttttctatt

SEQ ID NO: 15637 - DNA, 25 bp, Saccharomyces pastorianus
gaaggcgagccctgtaagtgccaca

SEQ ID NO: 15638 - DNA, 25 bp, Saccharomyces pastorianus
atagacgagctagggttgcctcttc

SEQ ID NO: 15639 - DNA, 25 bp, Saccharomyces pastorianus
aatttcaacccttctggcggatgca

SEQ ID NO: 15640 - DNA, 25 bp, Saccharomyces pastorianus
tactggagcagagaagccgcctatc

SEQ ID NO: 15641 - DNA, 25 bp, Saccharomyces pastorianus
ggatacaccacaggaacttactata

SEQ ID NO: 15642 - DNA, 25 bp, Saccharomyces pastorianus
aagattgtccatttacctgaacgat

SEQ ID NO: 15643 - DNA, 25 bp, Saccharomyces pastorianus
tagtgtttccggcaaacttcttcga

SEQ ID NO: 15644 - DNA, 25 bp, Saccharomyces pastorianus
gctactcgagtacattgtccggttg

SEQ ID NO: 15645 - DNA, 25 bp, Saccharomyces pastorianus
aaaacttcatcgatcacgctactcg

SEQ ID NO: 15646 - DNA, 25 bp, Saccharomyces pastorianus
aagaacaagattcaccggtgttggt

SEQ ID NO: 15647 - DNA, 25 bp, Saccharomyces pastorianus
gaaaataaactctcacggtgatcaa

SEQ ID NO: 15648 - DNA, 25 bp, Saccharomyces pastorianus
gtccggttgacgtctttgcaaagca

SEQ ID NO: 15649 - DNA, 25 bp, Saccharomyces pastorianus
ggtgatcaagagaacgcgactactg

SEQ ID NO: 15650 - DNA, 25 bp, Saccharomyces pastorianus
agccgcctatcgaagacattacttg

SEQ ID NO: 15651 - DNA, 25 bp, Saccharomyces pastorianus
gccgcacggttagatggtacactgt

SEQ ID NO: 15652 - DNA, 25 bp, Saccharomyces pastorianus
aagagcacctgctatgctttatggt

SEQ ID NO: 15653 - DNA, 25 bp, Saccharomyces pastorianus
ctttatggtgatgcgactacttgga

SEQ ID NO: 15654 - DNA, 25 bp, Saccharomyces pastorianus
gaattcattttccttttgagttcca

SEQ ID NO: 15655 - DNA, 25 bp, Saccharomyces pastorianus
gaaacacacgaaacttaccactgta

SEQ ID NO: 15656 - DNA, 25 bp, Saccharomyces pastorianus
gaaaagacaaacgaccacctgctaa

SEQ ID NO: 15657 - DNA, 25 bp, Saccharomyces pastorianus
cttgagttcatgtgtggtcgatgca

SEQ ID NO: 15658 - DNA, 25 bp, Saccharomyces pastorianus
acaagcattatagtgccgcacggtt

SEQ ID NO: 15659 - DNA, 25 bp, Saccharomyces pastorianus
gtaaccgttgtaatgcgcagggaaa

SEQ ID NO: 15660 - DNA, 25 bp, Saccharomyces pastorianus
gatcaacaagccttggcgcgtgtat

SEQ ID NO: 15661 - DNA, 25 bp, Saccharomyces pastorianus
gatggtacactgtcgatcaacaaga

SEQ ID NO: 15662 - DNA, 25 bp, Saccharomyces pastorianus
caacgactgcgatttgtacggtgct

SEQ ID NO: 15663 - DNA, 25 bp, Saccharomyces pastorianus
agcggtgggctgagcttcatcataa

SEQ ID NO: 15664 - DNA, 25 bp, Saccharomyces pastorianus
gtttgagaacggtgcaggccattca

SEQ ID NO: 15665 - DNA, 25 bp, Saccharomyces pastorianus
gggtgccattcatcacgatgcaggt

SEQ ID NO: 15666 - DNA, 25 bp, Saccharomyces pastorianus
attcaatgggcgatcgtagctcttg

SEQ ID NO: 15667 - DNA, 25 bp, Saccharomyces pastorianus
ttcagtttacgggtactccaatttg

SEQ ID NO: 15668 - DNA, 25 bp, Saccharomyces pastorianus
tatctgttattgttgccattgccct

SEQ ID NO: 15669 - DNA, 25 bp, Saccharomyces pastorianus
aagaagctgctccattcaatctggc

SEQ ID NO: 15670 - DNA, 25 bp, Saccharomyces pastorianus
gagtgtccccgaattgatttcagtt

SEQ ID NO: 15671 - DNA, 25 bp, Saccharomyces pastorianus
caatctggctgttttacgggtatac

SEQ ID NO: 15672 - DNA, 25 bp, Saccharomyces pastorianus
ggcacaatcgtcgtatttcttgaag

SEQ ID NO: 15673 - DNA, 25 bp, Saccharomyces pastorianus
gtcgcgaagtttgaagtttgccatc

SEQ ID NO: 15674 - DNA, 25 bp, Saccharomyces pastorianus
gactatcgttgttaagatctccaaa

SEQ ID NO: 15675 - DNA, 25 bp, Saccharomyces pastorianus
aagctccccaaagacattggccaga

SEQ ID NO: 15676 - DNA, 25 bp, Saccharomyces pastorianus
gggaatcctttgcttcattgaatac

SEQ ID NO: 15677 - DNA, 25 bp, Saccharomyces pastorianus
gagaacgttatcttgtccaacataa

SEQ ID NO: 15678 - DNA, 25 bp, Saccharomyces pastorianus
ttggccagagttttgatgacatcgt

SEQ ID NO: 15679 - DNA, 25 bp, Saccharomyces pastorianus
atgacatcgtaagcatctccggcga

SEQ ID NO: 15680 - DNA, 25 bp, Saccharomyces pastorianus
tacaatttcaactacaagctcccca

SEQ ID NO: 15681 - DNA, 25 bp, Saccharomyces pastorianus
gacaccgtcaagctagctcacgaat

SEQ ID NO: 15682 - DNA, 25 bp, Saccharomyces pastorianus
gaagatcgtgccatcagatccaatt

SEQ ID NO: 15683 - DNA, 25 bp, Saccharomyces pastorianus
gggcgttatccagtgacaccgtcaa

SEQ ID NO: 15684 - DNA, 25 bp, Saccharomyces pastorianus
tatcgcggttgccattttgtacata

SEQ ID NO: 15685 - DNA, 25 bp, Saccharomyces pastorianus
ccaatcggatgacggtggtttccaa

SEQ ID NO: 15686 - DNA, 25 bp, Saccharomyces pastorianus
gaattctttgcagttactcacagac

SEQ ID NO: 15687 - DNA, 25 bp, Saccharomyces pastorianus
gggaactatgcatacctcaaaagat

SEQ ID NO: 15688 - DNA, 25 bp, Saccharomyces pastorianus
gaatgctacatatgaccaatcggat

SEQ ID NO: 15689 - DNA, 25 bp, Saccharomyces pastorianus
aattatctacttaatcggacgcaga

SEQ ID NO: 15690 - DNA, 25 bp, Saccharomyces pastorianus
ttggtacccacaatgaaccgcatgc

SEQ ID NO: 15691 - DNA, 25 bp, Saccharomyces pastorianus
cagggtatacgtcttgtgcactttc

SEQ ID NO: 15692 - DNA, 25 bp, Saccharomyces pastorianus
atgctacgcattctggtgcttgaat

SEQ ID NO: 15693 - DNA, 25 bp, Saccharomyces pastorianus
gtgcactttctactctagcattatt

SEQ ID NO: 15694 - DNA, 25 bp, Saccharomyces pastorianus
aaatttgccgatacatgctacgcat

SEQ ID NO: 15695 - DNA, 25 bp, Saccharomyces pastorianus
aatgaaattagcgtgcccgactggc

SEQ ID NO: 15696 - DNA, 25 bp, Saccharomyces pastorianus
agaccattttccatgtctcctaatg

SEQ ID NO: 15697 - DNA, 25 bp, Saccharomyces pastorianus
atacctggtatagacgcgatcccat

SEQ ID NO: 15698 - DNA, 25 bp, Saccharomyces pastorianus
taggtgacacaatttccgaactgca

SEQ ID NO: 15699 - DNA, 25 bp, Saccharomyces pastorianus
tgcgtccgaaatcctagccaagatg

SEQ ID NO: 15700 - DNA, 25 bp, Saccharomyces pastorianus
taagctcgagatgtccaacctacaa

SEQ ID NO: 15701 - DNA, 25 bp, Saccharomyces pastorianus
agaacggtgataatgctgccaacga

SEQ ID NO: 15702 - DNA, 25 bp, Saccharomyces pastorianus
aaccgggaaccaactgacatgcatg

SEQ ID NO: 15703 - DNA, 25 bp, Saccharomyces pastorianus
atgtctcctaatggcatacctggta

SEQ ID NO: 15704 - DNA, 25 bp, Saccharomyces pastorianus
aggcaaacaccgttccggcatggaa

SEQ ID NO: 15705 - DNA, 25 bp, Saccharomyces pastorianus
gatagcaatggctccatcccggaat

SEQ ID NO: 15706 - DNA, 25 bp, Saccharomyces pastorianus
attgctgaacgattcggccttagca

SEQ ID NO: 15707 - DNA, 25 bp, Saccharomyces pastorianus
ctcctttgcagtacttcttcatgaa

SEQ ID NO: 15708 - DNA, 25 bp, Saccharomyces pastorianus
gaaggcctagccaagactaacaaaa

SEQ ID NO: 15709 - DNA, 25 bp, Saccharomyces pastorianus
aaacgaagttgctcaagacgatgat

SEQ ID NO: 15710 - DNA, 25 bp, Saccharomyces pastorianus
aactagccacctatggagttccagg

SEQ ID NO: 15711 - DNA, 25 bp, Saccharomyces pastorianus
aagagggactcctttgcagtacttc

SEQ ID NO: 15712 - DNA, 25 bp, Saccharomyces pastorianus
gacaagcctaacgacatatcgatga

SEQ ID NO: 15713 - DNA, 25 bp, Saccharomyces pastorianus
gattcggccttagcaattggtgaga

SEQ ID NO: 15714 - DNA, 25 bp, Saccharomyces pastorianus
gaacgatacaagtgctcaagcttat

SEQ ID NO: 15715 - DNA, 25 bp, Saccharomyces pastorianus
aacagctgtgataatgacaagccta

SEQ ID NO: 15716 - DNA, 25 bp, Saccharomyces pastorianus
ttggtgacgccaaagaattttcttt

SEQ ID NO: 15717 - DNA, 25 bp, Saccharomyces pastorianus
ttctgcggtcagattaacccacatc

SEQ ID NO: 15718 - DNA, 25 bp, Saccharomyces pastorianus
aaagagtcaggtttcgagcacgaat

SEQ ID NO: 15719 - DNA, 25 bp, Saccharomyces pastorianus
aagaatccccagtacagagaccaag

SEQ ID NO: 15720 - DNA, 25 bp, Saccharomyces pastorianus
atcactgaccacagatgcgggttca

SEQ ID NO: 15721 - DNA, 25 bp, Saccharomyces pastorianus
gaggccatggctaactacgacagta

SEQ ID NO: 15722 - DNA, 25 bp, Saccharomyces pastorianus
ggccgtgattgtactaccccagatg

SEQ ID NO: 15723 - DNA, 25 bp, Saccharomyces pastorianus
gaacgtacaatttcccacagaacag

SEQ ID NO: 15724 - DNA, 25 bp, Saccharomyces pastorianus
gaaggacgcatacatccacagcggc

SEQ ID NO: 15725 - DNA, 25 bp, Saccharomyces pastorianus
gggcgacgaatctgccaaatccatt

SEQ ID NO: 15726 - DNA, 25 bp, Saccharomyces pastorianus
ctcaggtatcgttgtttccatgcaa

SEQ ID NO: 15727 - DNA, 25 bp, Saccharomyces pastorianus
gggttcacgttattggacctgccag

SEQ ID NO: 15728 - DNA, 25 bp, Saccharomyces pastorianus
ggcaccgtcacaaaagtgattccct

SEQ ID NO: 15729 - DNA, 25 bp, Saccharomyces pastorianus
agtccttaacttcagaattcttggg

SEQ ID NO: 15730 - DNA, 25 bp, Saccharomyces pastorianus
gcacggttccattgacacctattat

SEQ ID NO: 15731 - DNA, 25 bp, Saccharomyces pastorianus
gcacgatccaatgatgaacgcatga

SEQ ID NO: 15732 - DNA, 25 bp, Saccharomyces pastorianus
acagaccctgatcatcataatccag

SEQ ID NO: 15733 - DNA, 25 bp, Saccharomyces pastorianus
gcctcgtgctgctttgataagaaca

SEQ ID NO: 15734 - DNA, 25 bp, Saccharomyces pastorianus
aagcgagaacgtttggcattttcat

SEQ ID NO: 15735 - DNA, 25 bp, Saccharomyces pastorianus
gtgattccctatttacatactttaa

SEQ ID NO: 15736 - DNA, 25 bp, Saccharomyces pastorianus
gatacgagatgctaacagaccctga

SEQ ID NO: 15737 - DNA, 25 bp, Saccharomyces pastorianus
ctctggtacattccctaattctagt

SEQ ID NO: 15738 - DNA, 25 bp, Saccharomyces pastorianus
aaacattgagaagcctcgtgctgct

SEQ ID NO: 15739 - DNA, 25 bp, Saccharomyces pastorianus
taagtcctgtggtgtcgacgccatg

SEQ ID NO: 15740 - DNA, 25 bp, Saccharomyces pastorianus
tgacagagctaagtcctgtggtgtc

SEQ ID NO: 15741 - DNA, 25 bp, Saccharomyces pastorianus
gagctaagtcctgtggtgtcgacgc

SEQ ID NO: 15742 - DNA, 25 bp, Saccharomyces pastorianus
cgttaacttcttggtctctttgttg

SEQ ID NO: 15743 - DNA, 25 bp, Saccharomyces pastorianus
catgtctctttgtatcttcggtgat

SEQ ID NO: 15744 - DNA, 25 bp, Saccharomyces pastorianus
agaagatgttttggctaaccaaatt

SEQ ID NO: 15745 - DNA, 25 bp, Saccharomyces pastorianus
aagaccaaacatgtctctttgtatc

SEQ ID NO: 15746 - DNA, 25 bp, Saccharomyces pastorianus
tggtgtcgacgccatgtccgttgat

SEQ ID NO: 15747 - DNA, 25 bp, Saccharomyces pastorianus
gtccgttaacttcttggtctctttg

SEQ ID NO: 15748 - DNA, 25 bp, Saccharomyces pastorianus
tgatgtccgttaacttcttggtctc

SEQ ID NO: 15749 - DNA, 25 bp, Saccharomyces pastorianus
ggctaaccaaattttgatgtccgtt

SEQ ID NO: 15750 - DNA, 25 bp, Saccharomyces pastorianus
gtgtaagatcactaccgcagcatac

SEQ ID NO: 15751 - DNA, 25 bp, Saccharomyces pastorianus
gggcggatgtcaattcgcgtttaaa

SEQ ID NO: 15752 - DNA, 25 bp, Saccharomyces pastorianus
ccaatggcggtgacggtgtaagatc

SEQ ID NO: 15753 - DNA, 25 bp, Saccharomyces pastorianus
gtattacaactacgatgctaagcca

SEQ ID NO: 15754 - DNA, 25 bp, Saccharomyces pastorianus
tagaacaaccactaaacggcagaat

SEQ ID NO: 15755 - DNA, 25 bp, Saccharomyces pastorianus
gaagacctttctttacctaaagatg

SEQ ID NO: 15756 - DNA, 25 bp, Saccharomyces pastorianus
gattccgtttcattggaggatcttg

SEQ ID NO: 15757 - DNA, 25 bp, Saccharomyces pastorianus
gcagcatacccaaaatgccatgcca

SEQ ID NO: 15758 - DNA, 25 bp, Saccharomyces pastorianus
atgccaccacttcctaaacaaatgc

SEQ ID NO: 15759 - DNA, 25 bp, Saccharomyces pastorianus
accaccacctacaacgaacaatgat

SEQ ID NO: 15760 - DNA, 25 bp, Saccharomyces pastorianus
ggtaatcatacgtcagtggttcaaa

SEQ ID NO: 15761 - DNA, 25 bp, Saccharomyces pastorianus
gaaatcttttgagtaggtccatatt

SEQ ID NO: 15762 - DNA, 25 bp, Saccharomyces pastorianus
tcagcaattgcatggcacggtggta

SEQ ID NO: 15763 - DNA, 25 bp, Saccharomyces pastorianus
ggttcaaactaagcgatatcccagc

SEQ ID NO: 15764 - DNA, 25 bp, Saccharomyces pastorianus
tacatcatcggaaactcgtcatttg

SEQ ID NO: 15765 - DNA, 25 bp, Saccharomyces pastorianus
gaatgactttttctgaactggacga

SEQ ID NO: 15766 - DNA, 25 bp, Saccharomyces pastorianus
gtcatgccgcatttcgaaatcaaca

SEQ ID NO: 15767 - DNA, 25 bp, Saccharomyces pastorianus
gggtgacgcccaagtttgagttata

SEQ ID NO: 15768 - DNA, 25 bp, Saccharomyces pastorianus
agcacccatggtccatcattttata

SEQ ID NO: 15769 - DNA, 25 bp, Saccharomyces pastorianus
gaacaggaatccgtcaatatgctag

SEQ ID NO: 15770 - DNA, 25 bp, Saccharomyces pastorianus
agcagcatttcattggattcgccgc

SEQ ID NO: 15771 - DNA, 25 bp, Saccharomyces pastorianus
aaacgttcagtatgtcatgccgcat

SEQ ID NO: 15772 - DNA, 25 bp, Saccharomyces pastorianus
ggaaggtacatctgggaacgaaaca

SEQ ID NO: 15773 - DNA, 25 bp, Saccharomyces pastorianus
tacgctttcggatcgtgtagatcat

SEQ ID NO: 15774 - DNA, 25 bp, Saccharomyces pastorianus
catctttattggctcttttgtcaga

SEQ ID NO: 15775 - DNA, 25 bp, Saccharomyces pastorianus
tacagtcacaacacttccatcttta

SEQ ID NO: 15776 - DNA, 25 bp, Saccharomyces pastorianus
gcttctcagaggttttgttgttttc

SEQ ID NO: 15777 - DNA, 25 bp, Saccharomyces pastorianus
aaactgggacgtggacaagctcttc

SEQ ID NO: 15778 - DNA, 25 bp, Saccharomyces pastorianus
gttaacgagaactgacgagtccctt

SEQ ID NO: 15779 - DNA, 25 bp, Saccharomyces pastorianus
gagagaccaggcaagacgcgtttac

SEQ ID NO: 15780 - DNA, 25 bp, Saccharomyces pastorianus
agacgcgtttacagagatgttctct

SEQ ID NO: 15781 - DNA, 25 bp, Saccharomyces pastorianus
aagctcttcgcgcagttgcaagaag

SEQ ID NO: 15782 - DNA, 25 bp, Saccharomyces pastorianus
ggagaattacatacgctttcggatc

SEQ ID NO: 15783 - DNA, 25 bp, Saccharomyces pastorianus
gatagccccaaatatttcgataaca

SEQ ID NO: 15784 - DNA, 25 bp, Saccharomyces pastorianus
ttgatccaccccagtacagttcttg

SEQ ID NO: 15785 - DNA, 25 bp, Saccharomyces pastorianus
agaacatattcgctcacccagatgg

SEQ ID NO: 15786 - DNA, 25 bp, Saccharomyces pastorianus
gataacatccgctctcaactggaaa

SEQ ID NO: 15787 - DNA, 25 bp, Saccharomyces pastorianus
atagcacctgcatactacgatatgg

SEQ ID NO: 15788 - DNA, 25 bp, Saccharomyces pastorianus
atcacgggttcaagtcagacgaggc

SEQ ID NO: 15789 - DNA, 25 bp, Saccharomyces pastorianus
aatgaattcgtcctcacgtcgaaga

SEQ ID NO: 15790 - DNA, 25 bp, Saccharomyces pastorianus
aatggtgccgtgatcactacttaaa

SEQ ID NO: 15791 - DNA, 25 bp, Saccharomyces pastorianus
cacagatctatttctgctgcagata

SEQ ID NO: 15792 - DNA, 25 bp, Saccharomyces pastorianus
agtcacatctgttaggcccgaatgg

SEQ ID NO: 15793 - DNA, 25 bp, Saccharomyces pastorianus
agtacagttcttggtcatgacgcag

SEQ ID NO: 15794 - DNA, 25 bp, Saccharomyces pastorianus
gtgacttcatgtttgacatcctccg

SEQ ID NO: 15795 - DNA, 25 bp, Saccharomyces pastorianus
aactactaggtgatttcgtcatcca

SEQ ID NO: 15796 - DNA, 25 bp, Saccharomyces pastorianus
ggtacgctacgattacatcttcagt

SEQ ID NO: 15797 - DNA, 25 bp, Saccharomyces pastorianus
atcggcgaagtctataatcacctca

SEQ ID NO: 15798 - DNA, 25 bp, Saccharomyces pastorianus
agagcagcgagaacaacagccgtct

SEQ ID NO: 15799 - DNA, 25 bp, Saccharomyces pastorianus
acagccgtctggtaggtattactaa

SEQ ID NO: 15800 - DNA, 25 bp, Saccharomyces pastorianus
cagccctattttctttgatctacat

SEQ ID NO: 15801 - DNA, 25 bp, Saccharomyces pastorianus
aatgggtattggtcattcagcccta

SEQ ID NO: 15802 - DNA, 25 bp, Saccharomyces pastorianus
ggacgtttcaggcatgcatctcgac

SEQ ID NO: 15803 - DNA, 25 bp, Saccharomyces pastorianus
atcagtaattccaacgcatacgcgg

SEQ ID NO: 15804 - DNA, 25 bp, Saccharomyces pastorianus
ggtccccaaccgagcttgttgaaga

SEQ ID NO: 15805 - DNA, 25 bp, Saccharomyces pastorianus
agttggtgtccatactctccgaata

SEQ ID NO: 15806 - DNA, 25 bp, Saccharomyces pastorianus
tccgaatatcctagcctctggaggt

SEQ ID NO: 15807 - DNA, 25 bp, Saccharomyces pastorianus
aaagaaaacgcacaccgctgctgtg

SEQ ID NO: 15808 - DNA, 25 bp, Saccharomyces pastorianus
aaaaaggcagcgtcatggatggtat

SEQ ID NO: 15809 - DNA, 25 bp, Saccharomyces pastorianus
gggcaatcccgagaatgcaatctct

SEQ ID NO: 15810 - DNA, 25 bp, Saccharomyces pastorianus
tgttgttcgcaattatccccagatg

SEQ ID NO: 15811 - DNA, 25 bp, Saccharomyces pastorianus
aaatgagatccatacaggacggcct

SEQ ID NO: 15812 - DNA, 25 bp, Saccharomyces pastorianus
gagaacatctttgcctcagttttca

SEQ ID NO: 15813 - DNA, 25 bp, Saccharomyces pastorianus
gggccaaagttatatgtccaccagt

SEQ ID NO: 15814 - DNA, 25 bp, Saccharomyces pastorianus
ggttcaatcaatactggatctcagg

SEQ ID NO: 15815 - DNA, 25 bp, Saccharomyces pastorianus
acaggcgcaagagtaggttcaatca

SEQ ID NO: 15816 - DNA, 25 bp, Saccharomyces pastorianus
agcgggctctcggagttgaccaatt

SEQ ID NO: 15817 - DNA, 25 bp, Saccharomyces pastorianus
ggatacagcttccattcatccatct

SEQ ID NO: 15818 - DNA, 25 bp, Saccharomyces pastorianus
gtcactaagcgttggagaagccctt

SEQ ID NO: 15819 - DNA, 25 bp, Saccharomyces pastorianus
gacgtcatccaattgcttactcaag

SEQ ID NO: 15820 - DNA, 25 bp, Saccharomyces pastorianus
aaattgttgtcagtgttcttaccca

SEQ ID NO: 15821 - DNA, 25 bp, Saccharomyces pastorianus
gaatcttgaagtttgttgctctgaa

SEQ ID NO: 15822 - DNA, 25 bp, Saccharomyces pastorianus
acgattgattggtgtcttgacgcta

SEQ ID NO: 15823 - DNA, 25 bp, Saccharomyces pastorianus
aagcatacgatgttctgggtttgat

SEQ ID NO: 15824 - DNA, 25 bp, Saccharomyces pastorianus
gggcatctacaacgacttgtcacta

SEQ ID NO: 15825 - DNA, 25 bp, Saccharomyces pastorianus
tcttctgtccctatcgtcgatgaaa

SEQ ID NO: 15826 - DNA, 25 bp, Saccharomyces pastorianus
gagactcatttcctaaagatcccaa

SEQ ID NO: 15827 - DNA, 25 bp, Saccharomyces pastorianus
aacagttcaggatacctacggcagt

SEQ ID NO: 15828 - DNA, 25 bp, Saccharomyces pastorianus
gggctatatttgctgtactatcgct

SEQ ID NO: 15829 - DNA, 25 bp, Saccharomyces pastorianus
atcggagcctgttggtctgttattt

SEQ ID NO: 15830 - DNA, 25 bp, Saccharomyces pastorianus
aggtattgcagaagcttccgctcaa

SEQ ID NO: 15831 - DNA, 25 bp, Saccharomyces pastorianus
ccagctttaccatcgcaagattcat

SEQ ID NO: 15832 - DNA, 25 bp, Saccharomyces pastorianus
tatacccaggaatagacccggatcg

SEQ ID NO: 15833 - DNA, 25 bp, Saccharomyces pastorianus
ggttggcttcacatctttggttaaa

SEQ ID NO: 15834 - DNA, 25 bp, Saccharomyces pastorianus
aattctgcgcccagttgatcggagc

SEQ ID NO: 15835 - DNA, 25 bp, Saccharomyces pastorianus
tattccttccggagtagcagtcggt

SEQ ID NO: 15836 - DNA, 25 bp, Saccharomyces pastorianus
atacaatccccagtgaacagttcag

SEQ ID NO: 15837 - DNA, 25 bp, Saccharomyces pastorianus
aagattcatcggtgggttggcttca

SEQ ID NO: 15838 - DNA, 25 bp, Saccharomyces pastorianus
gagaaaattcccacaagcctataaa

SEQ ID NO: 15839 - DNA, 25 bp, Saccharomyces pastorianus
gcggtgtcaccatcgggtatcatat

SEQ ID NO: 15840 - DNA, 25 bp, Saccharomyces pastorianus
aactgggcgcgtttagtattcaatg

SEQ ID NO: 15841 - DNA, 25 bp, Saccharomyces pastorianus
actacgtgattttgctgcatcctta

SEQ ID NO: 15842 - DNA, 25 bp, Saccharomyces pastorianus
attcattcattgatgccctcgatat

SEQ ID NO: 15843 - DNA, 25 bp, Saccharomyces pastorianus
gctgcatccttactagactacgtat

SEQ ID NO: 15844 - DNA, 25 bp, Saccharomyces pastorianus
ttaggtaacctgaataactgggcgc

SEQ ID NO: 15845 - DNA, 25 bp, Saccharomyces pastorianus
ataaatcgtgtctttgggacttatt

SEQ ID NO: 15846 - DNA, 25 bp, Saccharomyces pastorianus
aaggatttgccagacttgtatgaag

SEQ ID NO: 15847 - DNA, 25 bp, Saccharomyces pastorianus
gatattaacattgctcctggctaaa

SEQ ID NO: 15848 - DNA, 25 bp, Saccharomyces pastorianus
gtggatactgtcattagcgcattgt

SEQ ID NO: 15849 - DNA, 25 bp, Saccharomyces pastorianus
ggagcaagagctaatcacaatcgta

SEQ ID NO: 15850 - DNA, 25 bp, Saccharomyces pastorianus
gtcgcgaatgttggagagatcacct

SEQ ID NO: 15851 - DNA, 25 bp, Saccharomyces pastorianus
gaaagaacacacttcatggtcagat

SEQ ID NO: 15852 - DNA, 25 bp, Saccharomyces pastorianus
caaattgaaggctggtcgcgaatgt

SEQ ID NO: 15853 - DNA, 25 bp, Saccharomyces pastorianus
tttcaaatctggtaagacgtcgtac

SEQ ID NO: 15854 - DNA, 25 bp, Saccharomyces pastorianus
gacgtcgtacgttcataaccgtgat

SEQ ID NO: 15855 - DNA, 25 bp, Saccharomyces pastorianus
gagatcacctcaacgagccaggctt

SEQ ID NO: 15856 - DNA, 25 bp, Saccharomyces pastorianus
gaagctgatgtgagccgatctgatt

SEQ ID NO: 15857 - DNA, 25 bp, Saccharomyces pastorianus
gtacgatgctgttgaagcttactta

SEQ ID NO: 15858 - DNA, 25 bp, Saccharomyces pastorianus
gaaggatgaaccacagtctgttgaa

SEQ ID NO: 15859 - DNA, 25 bp, Saccharomyces pastorianus
aacaaccttcgcagtacgatgctgt

SEQ ID NO: 15860 - DNA, 25 bp, Saccharomyces pastorianus
gtcaatcgtggtactacgaacgcaa

SEQ ID NO: 15861 - DNA, 25 bp, Saccharomyces pastorianus
ttaaaaagcacaacaggccagcctg

SEQ ID NO: 15862 - DNA, 25 bp, Saccharomyces pastorianus
aagtaagtcccaaagaagctgcaag

SEQ ID NO: 15863 - DNA, 25 bp, Saccharomyces pastorianus
aagtaaatctcaaccaatgccctcg

SEQ ID NO: 15864 - DNA, 25 bp, Saccharomyces pastorianus
gactagcagccgagaaaagatttca

SEQ ID NO: 15865 - DNA, 25 bp, Saccharomyces pastorianus
atgccctcgcaaaccacaacagtaa

SEQ ID NO: 15866 - DNA, 25 bp, Saccharomyces pastorianus
gcaagaacgtgccaagtctcacaag

SEQ ID NO: 15867 - DNA, 25 bp, Saccharomyces pastorianus
gggtaagaaactggcgcaagaacgt

SEQ ID NO: 15868 - DNA, 25 bp, Saccharomyces pastorianus
gtctcacaagactcgtttgatagaa

SEQ ID NO: 15869 - DNA, 25 bp, Saccharomyces pastorianus
cagtggcgcaagtgatacgagcaaa

SEQ ID NO: 15870 - DNA, 25 bp, Saccharomyces pastorianus
gaaggtagcaaactcagtggcgcaa

SEQ ID NO: 15871 - DNA, 25 bp, Saccharomyces pastorianus
gtctctgtcggtgatttgaggtaca

SEQ ID NO: 15872 - DNA, 25 bp, Saccharomyces pastorianus
cttcatcaaggcgtttcaggtgttt

SEQ ID NO: 15873 - DNA, 25 bp, Saccharomyces pastorianus
ggaccagatctccagcctgattgag

SEQ ID NO: 15874 - DNA, 25 bp, Saccharomyces pastorianus
atgtcagctaccagggccaacaagg

SEQ ID NO: 15875 - DNA, 25 bp, Saccharomyces pastorianus
tgagagatgcctccagcttgacatt

SEQ ID NO: 15876 - DNA, 25 bp, Saccharomyces pastorianus
gaaggaattagacgccaccaccagt

SEQ ID NO: 15877 - DNA, 25 bp, Saccharomyces pastorianus
gagactatttgagggccattggcta

SEQ ID NO: 15878 - DNA, 25 bp, Saccharomyces pastorianus
gggccaacaaggacattttcacact

SEQ ID NO: 15879 - DNA, 25 bp, Saccharomyces pastorianus
gaggtacatgcttacaggcctggga

SEQ ID NO: 15880 - DNA, 25 bp, Saccharomyces pastorianus
gaacgcggactccagcttgagagat

SEQ ID NO: 15881 - DNA, 25 bp, Saccharomyces pastorianus
aaccagttcgtgcaggacatcttga

SEQ ID NO: 15882 - DNA, 25 bp, Saccharomyces pastorianus
acaacggtactgatgtcgacatgga

SEQ ID NO: 15883 - DNA, 25 bp, Saccharomyces pastorianus
agcaaaccatctacagtctgacttt

SEQ ID NO: 15884 - DNA, 25 bp, Saccharomyces pastorianus
gaaccttctgacttgagatcatgga

SEQ ID NO: 15885 - DNA, 25 bp, Saccharomyces pastorianus
gcatattgcagccagacttcccggt

SEQ ID NO: 15886 - DNA, 25 bp, Saccharomyces pastorianus
caatactaagtagcgctggcgacga

SEQ ID NO: 15887 - DNA, 25 bp, Saccharomyces pastorianus
gtctggtctgtgtcttggaacttaa

SEQ ID NO: 15888 - DNA, 25 bp, Saccharomyces pastorianus
acttcagaggagtcttctagcaact

SEQ ID NO: 15889 - DNA, 25 bp, Saccharomyces pastorianus
agcaactcaaacctattcgacaacg

SEQ ID NO: 15890 - DNA, 25 bp, Saccharomyces pastorianus
agggcgaactacaatcaagcttgga

SEQ ID NO: 15891 - DNA, 25 bp, Saccharomyces pastorianus
aaagcttgcagtatcttcattggag

SEQ ID NO: 15892 - DNA, 25 bp, Saccharomyces pastorianus
ggagcaagcgattatttaccaaaga

SEQ ID NO: 15893 - DNA, 25 bp, Saccharomyces pastorianus
tcctccacctcatcttgaagacgat

SEQ ID NO: 15894 - DNA, 25 bp, Saccharomyces pastorianus
ttctctgctcatactggtggtgaca

SEQ ID NO: 15895 - DNA, 25 bp, Saccharomyces pastorianus
caaggttacggttcagccgatgaat

SEQ ID NO: 15896 - DNA, 25 bp, Saccharomyces pastorianus
attactgtatatcaatcctccacct

SEQ ID NO: 15897 - DNA, 25 bp, Saccharomyces pastorianus
gttgcgtacgcaagagcacgtggtt

SEQ ID NO: 15898 - DNA, 25 bp, Saccharomyces pastorianus
agacgatacgccttacaccagagaa

SEQ ID NO: 15899 - DNA, 25 bp, Saccharomyces pastorianus
gagaaattccaactgctcaagaact

SEQ ID NO: 15900 - DNA, 25 bp, Saccharomyces pastorianus
tatgtctttgacaggctaccggaaa

SEQ ID NO: 15901 - DNA, 25 bp, Saccharomyces pastorianus
ggaagctaaatctgtcacacatggt

SEQ ID NO: 15902 - DNA, 25 bp, Saccharomyces pastorianus
ggtggtaagcaagccgcgttataca

SEQ ID NO: 15903 - DNA, 25 bp, Saccharomyces pastorianus
gaatcaactgacattctctgctcat

SEQ ID NO: 15904 - DNA, 25 bp, Saccharomyces pastorianus
aggttctcaccattcggttgctgtt

SEQ ID NO: 15905 - DNA, 25 bp, Saccharomyces pastorianus
atgcggcggtcaattttctgtatct

SEQ ID NO: 15906 - DNA, 25 bp, Saccharomyces pastorianus
gttgcccaaaatggtattgcctatt

SEQ ID NO: 15907 - DNA, 25 bp, Saccharomyces pastorianus
accactaaaggtagcattgcccgag

SEQ ID NO: 15908 - DNA, 25 bp, Saccharomyces pastorianus
aaactgttgcagcaggttctcacca

SEQ ID NO: 15909 - DNA, 25 bp, Saccharomyces pastorianus
accattccctggtcttatctcaaga

SEQ ID NO: 15910 - DNA, 25 bp, Saccharomyces pastorianus
gacggcgatttgtactcttttggta

SEQ ID NO: 15911 - DNA, 25 bp, Saccharomyces pastorianus
agggccttctgatgaggataccgaa

SEQ ID NO: 15912 - DNA, 25 bp, Saccharomyces pastorianus
taacatcattttggccggatgcggc

SEQ ID NO: 15913 - DNA, 25 bp, Saccharomyces pastorianus
gacgttcacaataaggcccgttccg

SEQ ID NO: 15914 - DNA, 25 bp, Saccharomyces pastorianus
aatttggtcagtgcggtgtctcaga

SEQ ID NO: 15915 - DNA, 25 bp, Saccharomyces pastorianus
taacgcaggatttctctccggaaga

SEQ ID NO: 15916 - DNA, 25 bp, Saccharomyces pastorianus
gtatacatgcaacatatcccggaaa

SEQ ID NO: 15917 - DNA, 25 bp, Saccharomyces pastorianus
acagattcaaatcgctcttcaaccg

SEQ ID NO: 15918 - DNA, 25 bp, Saccharomyces pastorianus
gagagttgtcttaggtggcacatct

SEQ ID NO: 15919 - DNA, 25 bp, Saccharomyces pastorianus
gccaactggttgagcttttaacgca

SEQ ID NO: 15920 - DNA, 25 bp, Saccharomyces pastorianus
tcccggaaatctcatcattgctaac

SEQ ID NO: 15921 - DNA, 25 bp, Saccharomyces pastorianus
gaagacgtcaattttttccacagat

SEQ ID NO: 15922 - DNA, 25 bp, Saccharomyces pastorianus
gggatgactcaaactcagctcagaa

SEQ ID NO: 15923 - DNA, 25 bp, Saccharomyces pastorianus
cacactgtccagagatcgttttaaa

SEQ ID NO: 15924 - DNA, 25 bp, Saccharomyces pastorianus
agagctctccaaaaacacactgtcc

SEQ ID NO: 15925 - DNA, 25 bp, Saccharomyces pastorianus
ggtggcacatctatagtgtctacta

SEQ ID NO: 15926 - DNA, 25 bp, Saccharomyces pastorianus
gcaacgaagcgttaatctggttaca

SEQ ID NO: 15927 - DNA, 25 bp, Saccharomyces pastorianus
ggtcaagaacgatcctaccgcagaa

SEQ ID NO: 15928 - DNA, 25 bp, Saccharomyces pastorianus
ggattagcggttgtctacgaaggta

SEQ ID NO: 15929 - DNA, 25 bp, Saccharomyces pastorianus
ataatcgttgtgtggctcgagtgtc

SEQ ID NO: 15930 - DNA, 25 bp, Saccharomyces pastorianus
gcggtgacgagaacttgagcttttt

SEQ ID NO: 15931 - DNA, 25 bp, Saccharomyces pastorianus
aacctaccgacgattcccattagat

SEQ ID NO: 15932 - DNA, 25 bp, Saccharomyces pastorianus
aatttccattttttccacatgcctg

SEQ ID NO: 15933 - DNA, 25 bp, Saccharomyces pastorianus
gtaacccagcgcagccgtttggcaa

SEQ ID NO: 15934 - DNA, 25 bp, Saccharomyces pastorianus
atgggtgaaacctttgtctatagac

SEQ ID NO: 15935 - DNA, 25 bp, Saccharomyces pastorianus
tcgagtgtcgtattgggactggcta

SEQ ID NO: 15936 - DNA, 25 bp, Saccharomyces pastorianus
gttggttacgatccatccctcaaat

SEQ ID NO: 15937 - DNA, 25 bp, Saccharomyces pastorianus
acgcctttccaaatttccatgatcg

SEQ ID NO: 15938 - DNA, 25 bp, Saccharomyces pastorianus
gactatgggctcttattgatggaat

SEQ ID NO: 15939 - DNA, 25 bp, Saccharomyces pastorianus
ttgctactcaatttctctctcatta

SEQ ID NO: 15940 - DNA, 25 bp, Saccharomyces pastorianus
aacaactacagtgcattggcgttct

SEQ ID NO: 15941 - DNA, 25 bp, Saccharomyces pastorianus
gttctcttccttttgcctgaaattt

SEQ ID NO: 15942 - DNA, 25 bp, Saccharomyces pastorianus
ttttgtttgggctctgatggtacta

SEQ ID NO: 15943 - DNA, 25 bp, Saccharomyces pastorianus
ttattccgacactatctggtacaga

SEQ ID NO: 15944 - DNA, 25 bp, Saccharomyces pastorianus
atgggtgatgatgatcgccaatcta

SEQ ID NO: 15945 - DNA, 25 bp, Saccharomyces pastorianus
ttttttccttcgtggccatatggca

SEQ ID NO: 15946 - DNA, 25 bp, Saccharomyces pastorianus
gttatatttacattcctctcggcgg

SEQ ID NO: 15947 - DNA, 25 bp, Saccharomyces pastorianus
tagaatcctaacctctttagccgtt

SEQ ID NO: 15948 - DNA, 25 bp, Saccharomyces pastorianus
ggacagaatgaatcctacatctcca

SEQ ID NO: 15949 - DNA, 25 bp, Saccharomyces pastorianus
tatacgggcaactttattcctacaa

SEQ ID NO: 15950 - DNA, 25 bp, Saccharomyces pastorianus
aagaaaagcaagttcctctcccaca

SEQ ID NO: 15951 - DNA, 25 bp, Saccharomyces pastorianus
ggatctcaagatgcattttatacgg

SEQ ID NO: 15952 - DNA, 25 bp, Saccharomyces pastorianus
gaaatcctttttggcgaggtctgcc

SEQ ID NO: 15953 - DNA, 25 bp, Saccharomyces pastorianus
tcagcacgcaggtagagcagccagt

SEQ ID NO: 15954 - DNA, 25 bp, Saccharomyces pastorianus
gtcctatgccgtgctgttcagaaat

SEQ ID NO: 15955 - DNA, 25 bp, Saccharomyces pastorianus
aacccctttagtgatcagcacgcag

SEQ ID NO: 15956 - DNA, 25 bp, Saccharomyces pastorianus
aaccgcagggacataacttggcaat

SEQ ID NO: 15957 - DNA, 25 bp, Saccharomyces pastorianus
gaaatgatcatttttgcacactgta

SEQ ID NO: 15958 - DNA, 25 bp, Saccharomyces pastorianus
ttggcaatcgctgaagtctgttaac

SEQ ID NO: 15959 - DNA, 25 bp, Saccharomyces pastorianus
ttcacggtgatttatcccaacagca

SEQ ID NO: 15960 - DNA, 25 bp, Saccharomyces pastorianus
agaagactacgtccatagaatcggt

SEQ ID NO: 15961 - DNA, 25 bp, Saccharomyces pastorianus
gcatttggctggtggtttagttaac

SEQ ID NO: 15962 - DNA, 25 bp, Saccharomyces pastorianus
gtctaatttgttattggctaccgat

SEQ ID NO: 15963 - DNA, 25 bp, Saccharomyces pastorianus
gtactgctcatactttgttcactga

SEQ ID NO: 15964 - DNA, 25 bp, Saccharomyces pastorianus
taatcaacccgttcctgaggacttg

SEQ ID NO: 15965 - DNA, 25 bp, Saccharomyces pastorianus
acaatgttgctgctattcacggtga

SEQ ID NO: 15966 - DNA, 25 bp, Saccharomyces pastorianus
ggatatacccaatgttaagaccgtt

SEQ ID NO: 15967 - DNA, 25 bp, Saccharomyces pastorianus
gagcacagtgcttatggttcatttt

SEQ ID NO: 15968 - DNA, 25 bp, Saccharomyces pastorianus
agctggccaaacaggtactgctcat

SEQ ID NO: 15969 - DNA, 25 bp, Saccharomyces pastorianus
tgaagttgtggatccccgtggtaaa

SEQ ID NO: 15970 - DNA, 25 bp, Saccharomyces pastorianus
atttgacacattttgacgccgcgaa

SEQ ID NO: 15971 - DNA, 25 bp, Saccharomyces pastorianus
gtgctcaccatcctgtagattttca

SEQ ID NO: 15972 - DNA, 25 bp, Saccharomyces pastorianus
gatcacacgcgtctggaaagtcaag

SEQ ID NO: 15973 - DNA, 25 bp, Saccharomyces pastorianus
acattactgacctgagcaactcact

SEQ ID NO: 15974 - DNA, 25 bp, Saccharomyces pastorianus
ggaatatccccatagtcatgaccac

SEQ ID NO: 15975 - DNA, 25 bp, Saccharomyces pastorianus
tcatcatattccagatcacacgcgt

SEQ ID NO: 15976 - DNA, 25 bp, Saccharomyces pastorianus
gttcttgcaaaatagcccacacggt

SEQ ID NO: 15977 - DNA, 25 bp, Saccharomyces pastorianus
aacagcggcagcaggaatatcccca

SEQ ID NO: 15978 - DNA, 25 bp, Saccharomyces pastorianus
tgatagataacccttcgaccagaat

SEQ ID NO: 15979 - DNA, 25 bp, Saccharomyces pastorianus
tcatgccgccaatacttcaaacgat

SEQ ID NO: 15980 - DNA, 25 bp, Saccharomyces pastorianus
ttcggaaggcgatttcagccaaatt

SEQ ID NO: 15981 - DNA, 25 bp, Saccharomyces pastorianus
caataggctgttattcgaatgcaga

SEQ ID NO: 15982 - DNA, 25 bp, Saccharomyces pastorianus
gtcttgctcgcatatatttacttct

SEQ ID NO: 15983 - DNA, 25 bp, Saccharomyces pastorianus
acaggcatgaactgatcacgaacat

SEQ ID NO: 15984 - DNA, 25 bp, Saccharomyces pastorianus
tgatccgacgcttccgagatctgat

SEQ ID NO: 15985 - DNA, 25 bp, Saccharomyces pastorianus
gttgtaccctcgtgaagacaaggag

SEQ ID NO: 15986 - DNA, 25 bp, Saccharomyces pastorianus
agggaatgtcctaaatgccactctc

SEQ ID NO: 15987 - DNA, 25 bp, Saccharomyces pastorianus
aaacgtgtttttccaatcgcagcaa

SEQ ID NO: 15988 - DNA, 25 bp, Saccharomyces pastorianus
tgtgtgtttgtcttgctcgcatata

SEQ ID NO: 15989 - DNA, 25 bp, Saccharomyces pastorianus
aagacattggttctgatccgacgct

SEQ ID NO: 15990 - DNA, 25 bp, Saccharomyces pastorianus
gactgcgggcgtagtgcaagacatt

SEQ ID NO: 15991 - DNA, 25 bp, Saccharomyces pastorianus
atgccactctcgtgaaaacgtgttt

SEQ ID NO: 15992 - DNA, 25 bp, Saccharomyces pastorianus
agccggaggccaaaactgtgttcac

SEQ ID NO: 15993 - DNA, 25 bp, Saccharomyces pastorianus
gtcaaaggtttactaggtctctcac

SEQ ID NO: 15994 - DNA, 25 bp, Saccharomyces pastorianus
aaccgtcccagctacagaggctaaa

SEQ ID NO: 15995 - DNA, 25 bp, Saccharomyces pastorianus
cgactacaactgcaccattgtctaa

SEQ ID NO: 15996 - DNA, 25 bp, Saccharomyces pastorianus
aagaaattcgtcgaggctgctccaa

SEQ ID NO: 15997 - DNA, 25 bp, Saccharomyces pastorianus
catcccagagatgaccatgcctatg

SEQ ID NO: 15998 - DNA, 25 bp, Saccharomyces pastorianus
taggtctctcactagttgaagctaa

SEQ ID NO: 15999 - DNA, 25 bp, Saccharomyces pastorianus
gactcttttggaaacctctagtttg

SEQ ID NO: 16000 - DNA, 25 bp, Saccharomyces pastorianus
gtgaagttggattctttcgacgcaa

SEQ ID NO: 16001 - DNA, 25 bp, Saccharomyces pastorianus
taacgcagcaggctcagctggtgaa

SEQ ID NO: 16002 - DNA, 25 bp, Saccharomyces pastorianus
tcgaggctgctccaaaggtcttgaa

SEQ ID NO: 16003 - DNA, 25 bp, Saccharomyces pastorianus
tgggatccgcgttccattcaaaaat

SEQ ID NO: 16004 - DNA, 25 bp, Saccharomyces pastorianus
gcaccaagcttcaatgttccaacga

SEQ ID NO: 16005 - DNA, 25 bp, Saccharomyces pastorianus
tgaccaactcggactactctaaatg

SEQ ID NO: 16006 - DNA, 25 bp, Saccharomyces pastorianus
aatttgcccggaagcaccactattg

SEQ ID NO: 16007 - DNA, 25 bp, Saccharomyces pastorianus
ctacccttgtagcttgatgatcggc

SEQ ID NO: 16008 - DNA, 25 bp, Saccharomyces pastorianus
gatgatcggctgtctgggtattgtc

SEQ ID NO: 16009 - DNA, 25 bp, Saccharomyces pastorianus
gggtattgtcgaattcaacttccac

SEQ ID NO: 16010 - DNA, 25 bp, Saccharomyces pastorianus
ggagccttctgagaccattgaggaa

SEQ ID NO: 16011 - DNA, 25 bp, Saccharomyces pastorianus
aactgtttccagtggacgcaggcac

SEQ ID NO: 16012 - DNA, 25 bp, Saccharomyces pastorianus
caatgtcagagatgcgcgtgtcaat

SEQ ID NO: 16013 - DNA, 25 bp, Saccharomyces pastorianus
ttgccccggttgtggatctaaactg

SEQ ID NO: 16014 - DNA, 25 bp, Saccharomyces pastorianus
atagcttacctgtatacgtcgatca

SEQ ID NO: 16015 - DNA, 25 bp, Saccharomyces pastorianus
gagaatctaccttccaaatcaacga

SEQ ID NO: 16016 - DNA, 25 bp, Saccharomyces pastorianus
aaggccatataactcggtcacgaca

SEQ ID NO: 16017 - DNA, 25 bp, Saccharomyces pastorianus
gatcgaatccaaggtatgccagcca

SEQ ID NO: 16018 - DNA, 25 bp, Saccharomyces pastorianus
gataccaagggttaccagccggtgg

SEQ ID NO: 16019 - DNA, 25 bp, Saccharomyces pastorianus
aagcaggctacatccacaagttgat

SEQ ID NO: 16020 - DNA, 25 bp, Saccharomyces pastorianus
agaaggccagtgtctgccaatggaa

SEQ ID NO: 16021 - DNA, 25 bp, Saccharomyces pastorianus
gtaagtcaacgaattctatcctaga

SEQ ID NO: 16022 - DNA, 25 bp, Saccharomyces pastorianus
gtggatcaacatacattctcaagca

SEQ ID NO: 16023 - DNA, 25 bp, Saccharomyces pastorianus
gttggccacgaacacttttacaagg

SEQ ID NO: 16024 - DNA, 25 bp, Saccharomyces pastorianus
gtcacgacacagtccttactcaagg

SEQ ID NO: 16025 - DNA, 25 bp, Saccharomyces pastorianus
gatcgagttcattctagtgctaaat

SEQ ID NO: 16026 - DNA, 25 bp, Saccharomyces pastorianus
gaatcttgaggcatcaccgtcagtg

SEQ ID NO: 16027 - DNA, 25 bp, Saccharomyces pastorianus
aattttcacaaattgcctggcttgc

SEQ ID NO: 16028 - DNA, 25 bp, Saccharomyces pastorianus
cttttactttttgcccacacatcta

SEQ ID NO: 16029 - DNA, 25 bp, Saccharomyces pastorianus
aaatctatggtcgtttggcaaatct

SEQ ID NO: 16030 - DNA, 25 bp, Saccharomyces pastorianus
attggaacggtgacctgtccttgca

SEQ ID NO: 16031 - DNA, 25 bp, Saccharomyces pastorianus
gatatgggaccgatgcagttttgaa

SEQ ID NO: 16032 - DNA, 25 bp, Saccharomyces pastorianus
aggccatacatgcatacgtcgttag

SEQ ID NO: 16033 - DNA, 25 bp, Saccharomyces pastorianus
gcctggcttgcaaacagtatccatt

SEQ ID NO: 16034 - DNA, 25 bp, Saccharomyces pastorianus
accgtcagtgacattaaggccatac

SEQ ID NO: 16035 - DNA, 25 bp, Saccharomyces pastorianus
tgtccttgcattcgatgcctggata

SEQ ID NO: 16036 - DNA, 25 bp, Saccharomyces pastorianus
gagatgttccatccaaacgtctatg

SEQ ID NO: 16037 - DNA, 25 bp, Saccharomyces pastorianus
gacggtacatttcgattgcttctag

SEQ ID NO: 16038 - DNA, 25 bp, Saccharomyces pastorianus
accaggagtatctgcttcgccacta

SEQ ID NO: 16039 - DNA, 25 bp, Saccharomyces pastorianus
ggaccccgacatatgatgtagcatc

SEQ ID NO: 16040 - DNA, 25 bp, Saccharomyces pastorianus
cttcgccactacctgataatgtcat

SEQ ID NO: 16041 - DNA, 25 bp, Saccharomyces pastorianus
ttttgcaaaacagatggaccccgac

SEQ ID NO: 16042 - DNA, 25 bp, Saccharomyces pastorianus
agccgccacatgttaaatttttaag

SEQ ID NO: 16043 - DNA, 25 bp, Saccharomyces pastorianus
tttaacgatccaaatccggcttcac

SEQ ID NO: 16044 - DNA, 25 bp, Saccharomyces pastorianus
ttcacccgcaaacgtagaagccgca

SEQ ID NO: 16045 - DNA, 25 bp, Saccharomyces pastorianus
agaatacccaaataagccgccacat

SEQ ID NO: 16046 - DNA, 25 bp, Saccharomyces pastorianus
gctatgatcattggcccagcagaca

SEQ ID NO: 16047 - DNA, 25 bp, Saccharomyces pastorianus
atggctagctctccagttctaaaat

SEQ ID NO: 16048 - DNA, 25 bp, Saccharomyces pastorianus
ccaatcttctgcatcttccgaaaaa

SEQ ID NO: 16049 - DNA, 25 bp, Saccharomyces pastorianus
aactgataggtgtcgtgtctttaac

SEQ ID NO: 16050 - DNA, 25 bp, Saccharomyces pastorianus
gtacagccgaacgacaaccaatctt

SEQ ID NO: 16051 - DNA, 25 bp, Saccharomyces pastorianus
attagtggccaccaaatctcacaga

SEQ ID NO: 16052 - DNA, 25 bp, Saccharomyces pastorianus
ttcaaacagttcttcggcatctcca

SEQ ID NO: 16053 - DNA, 25 bp, Saccharomyces pastorianus
tccttggcaaggacgttcgcaaaat

SEQ ID NO: 16054 - DNA, 25 bp, Saccharomyces pastorianus
atgtcgccagctcagcaacagcaaa

SEQ ID NO: 16055 - DNA, 25 bp, Saccharomyces pastorianus
gagaacttcccaatatccgctattg

SEQ ID NO: 16056 - DNA, 25 bp, Saccharomyces pastorianus
tcgtcattttgtctcagtcattctg

SEQ ID NO: 16057 - DNA, 25 bp, Saccharomyces pastorianus
tgtaacaactttcccatcgcttgca

SEQ ID NO: 16058 - DNA, 25 bp, Saccharomyces pastorianus
cctctttggtcggtctagcatatga

SEQ ID NO: 16059 - DNA, 25 bp, Saccharomyces pastorianus
aaaacgccattgaagaagctctgat

SEQ ID NO: 16060 - DNA, 25 bp, Saccharomyces pastorianus
gactgcattaggcaaagacgccaca

SEQ ID NO: 16061 - DNA, 25 bp, Saccharomyces pastorianus
catctccgggattgttcacgacgta

SEQ ID NO: 16062 - DNA, 25 bp, Saccharomyces pastorianus
ttatctatctaacctctttggtcgg

SEQ ID NO: 16063 - DNA, 25 bp, Saccharomyces pastorianus
gccactcaaacgctgctcaaaatgt

SEQ ID NO: 16064 - DNA, 25 bp, Saccharomyces pastorianus
gcccagttttgaccgatttgccagt

SEQ ID NO: 16065 - DNA, 25 bp, Saccharomyces pastorianus
acaagggtttggtcatcatctccgg

SEQ ID NO: 16066 - DNA, 25 bp, Saccharomyces pastorianus
tgaaaaaattctcccaaaacgccat

SEQ ID NO: 16067 - DNA, 25 bp, Saccharomyces pastorianus
cacaaaggccttcagtggtggtgtc

SEQ ID NO: 16068 - DNA, 25 bp, Saccharomyces pastorianus
tcacgaattccctaccgattacaga

SEQ ID NO: 16069 - DNA, 25 bp, Saccharomyces pastorianus
gaagccgattatatcaacccaattg

SEQ ID NO: 16070 - DNA, 25 bp, Saccharomyces pastorianus
taaatttgccagttttagcctacaa

SEQ ID NO: 16071 - DNA, 25 bp, Saccharomyces pastorianus
aagtcaacaagcttattacacctga

SEQ ID NO: 16072 - DNA, 25 bp, Saccharomyces pastorianus
gccctatctttgctgttcttattga

SEQ ID NO: 16073 - DNA, 25 bp, Saccharomyces pastorianus
gaagccgcattacatggtgccctat

SEQ ID NO: 16074 - DNA, 25 bp, Saccharomyces pastorianus
ggttcaacttttggacgctacagaa

SEQ ID NO: 16075 - DNA, 25 bp, Saccharomyces pastorianus
taactgtatcaacttgttcggccaa

SEQ ID NO: 16076 - DNA, 25 bp, Saccharomyces pastorianus
attcagaactttgggtaagcacaag

SEQ ID NO: 16077 - DNA, 25 bp, Saccharomyces pastorianus
ttattacacctgaagccgcattaca

SEQ ID NO: 16078 - DNA, 25 bp, Saccharomyces pastorianus
gttcggccaagtgcactttacaatt

SEQ ID NO: 16079 - DNA, 25 bp, Saccharomyces pastorianus
gctgttcttattgaacggttactgg

SEQ ID NO: 16080 - DNA, 25 bp, Saccharomyces pastorianus
acagtaatcgattctcttccaacag

SEQ ID NO: 16081 - DNA, 25 bp, Saccharomyces pastorianus
gatttgaacaacgatccatctgaag

SEQ ID NO: 16082 - DNA, 25 bp, Saccharomyces pastorianus
actttggaatctgtcattgagctac

SEQ ID NO: 16083 - DNA, 25 bp, Saccharomyces pastorianus
cagtacttctcgacaatctattttt

SEQ ID NO: 16084 - DNA, 25 bp, Saccharomyces pastorianus
gagctactggatactgtgggtaaac

SEQ ID NO: 16085 - DNA, 25 bp, Saccharomyces pastorianus
gaagaatcttcccaagctccaaagg

SEQ ID NO: 16086 - DNA, 25 bp, Saccharomyces pastorianus
aagccactcttgaaggttcagtact

SEQ ID NO: 16087 - DNA, 25 bp, Saccharomyces pastorianus
gatgctggaccgaagacaattcaac

SEQ ID NO: 16088 - DNA, 25 bp, Saccharomyces pastorianus
gacaagtttgtcacgcctcaagcca

SEQ ID NO: 16089 - DNA, 25 bp, Saccharomyces pastorianus
tgcctcttcaaaaacaacctctttc

SEQ ID NO: 16090 - DNA, 25 bp, Saccharomyces pastorianus
ccaagctccaaaggccaatatgttt

SEQ ID NO: 16091 - DNA, 25 bp, Saccharomyces pastorianus
ggaggaggcgtcatccacgaacaac

SEQ ID NO: 16092 - DNA, 25 bp, Saccharomyces pastorianus
tgaccactccggcaatgatgatatc

SEQ ID NO: 16093 - DNA, 25 bp, Saccharomyces pastorianus
ttgttagagctgtgcccgcaattga

SEQ ID NO: 16094 - DNA, 25 bp, Saccharomyces pastorianus
ggagctgctgctaaccaatggcata

SEQ ID NO: 16095 - DNA, 25 bp, Saccharomyces pastorianus
gtggacgagaactcatcccgacgat

SEQ ID NO: 16096 - DNA, 25 bp, Saccharomyces pastorianus
caattgagttttgccactgcggagc

SEQ ID NO: 16097 - DNA, 25 bp, Saccharomyces pastorianus
aaatcgctattctgcccgatgacga

SEQ ID NO: 16098 - DNA, 25 bp, Saccharomyces pastorianus
gaaggacctcctaaagcaagtgcta

SEQ ID NO: 16099 - DNA, 25 bp, Saccharomyces pastorianus
ttaacgaagtgctggatccggcggt

SEQ ID NO: 16100 - DNA, 25 bp, Saccharomyces pastorianus
gacgatgccgtttcgttgttagagc

SEQ ID NO: 16101 - DNA, 25 bp, Saccharomyces pastorianus
agtggacgacttgattcccttagcg

SEQ ID NO: 16102 - DNA, 25 bp, Saccharomyces pastorianus
acgcctgcaaatggatctatgaacg

SEQ ID NO: 16103 - DNA, 25 bp, Saccharomyces pastorianus
gagatagtgagcatcctcctcaatc

SEQ ID NO: 16104 - DNA, 25 bp, Saccharomyces pastorianus
gaaggtgtcctactaccaattgcaa

SEQ ID NO: 16105 - DNA, 25 bp, Saccharomyces pastorianus
tggcgccagcacctttgaagcaaaa

SEQ ID NO: 16106 - DNA, 25 bp, Saccharomyces pastorianus
gcccgagtttttagctacatgcgat

SEQ ID NO: 16107 - DNA, 25 bp, Saccharomyces pastorianus
agccgcctataagggcagataccgt

SEQ ID NO: 16108 - DNA, 25 bp, Saccharomyces pastorianus
cctcctcaatcaattttacacactg

SEQ ID NO: 16109 - DNA, 25 bp, Saccharomyces pastorianus
tgaacgggtcagaacaacctgcctc

SEQ ID NO: 16110 - DNA, 25 bp, Saccharomyces pastorianus
ttaaaggccctttacgatgtattgg

SEQ ID NO: 16111 - DNA, 25 bp, Saccharomyces pastorianus
tgcgataccagtgaagccgcctata

SEQ ID NO: 16112 - DNA, 25 bp, Saccharomyces pastorianus
aaacggtgatatagcgcccgagttt

SEQ ID NO: 16113 - DNA, 25 bp, Saccharomyces pastorianus
tgattaacgccggtttggcccataa

SEQ ID NO: 16114 - DNA, 25 bp, Saccharomyces pastorianus
ggttttgtacgatgacggctccata

SEQ ID NO: 16115 - DNA, 25 bp, Saccharomyces pastorianus
gagaacgcagtgtctccagactggc

SEQ ID NO: 16116 - DNA, 25 bp, Saccharomyces pastorianus
gactggctgctgtagccgttaacta

SEQ ID NO: 16117 - DNA, 25 bp, Saccharomyces pastorianus
aatgctgcatgctgctgccgaaaag

SEQ ID NO: 16118 - DNA, 25 bp, Saccharomyces pastorianus
ttgtgaatacacttcccatggtcat

SEQ ID NO: 16119 - DNA, 25 bp, Saccharomyces pastorianus
tgcacattgtgtggcgccaagcgat

SEQ ID NO: 16120 - DNA, 25 bp, Saccharomyces pastorianus
gttctgctccttctagtggtgatag

SEQ ID NO: 16121 - DNA, 25 bp, Saccharomyces pastorianus
aatcgctttcgaatctcatcaaggt

SEQ ID NO: 16122 - DNA, 25 bp, Saccharomyces pastorianus
acctttgttatgtcttacgctgcta

SEQ ID NO: 16123 - DNA, 25 bp, Saccharomyces pastorianus
gtaaggacctaccaatctgtgccta

SEQ ID NO: 16124 - DNA, 25 bp, Saccharomyces pastorianus
acaagaccactgttctgctggacta

SEQ ID NO: 16125 - DNA, 25 bp, Saccharomyces pastorianus
tgctcaccaagcacatgaagattgt

SEQ ID NO: 16126 - DNA, 25 bp, Saccharomyces pastorianus
tactactccgccttcaatgatatct

SEQ ID NO: 16127 - DNA, 25 bp, Saccharomyces pastorianus
atcagcgaggatccagaggtcgtca

SEQ ID NO: 16128 - DNA, 25 bp, Saccharomyces pastorianus
acgaggtctacatcgtcggtgtttc

SEQ ID NO: 16129 - DNA, 25 bp, Saccharomyces pastorianus
ggactacacaagacctatcagcgag

SEQ ID NO: 16130 - DNA, 25 bp, Saccharomyces pastorianus
gaaaagcaccacacagacgaggtct

SEQ ID NO: 16131 - DNA, 25 bp, Saccharomyces pastorianus
atcgtcggtgtttccttggagtact

SEQ ID NO: 16132 - DNA, 25 bp, Saccharomyces pastorianus
agagctgggctacaagaccactgtt

SEQ ID NO: 16133 - DNA, 25 bp, Saccharomyces pastorianus
gagtactgtgtcaaggctaccgcca

SEQ ID NO: 16134 - DNA, 25 bp, Saccharomyces pastorianus
taatggatcaagtgctcaccaagca

SEQ ID NO: 16135 - DNA, 25 bp, Saccharomyces pastorianus
atacgatgcttattcttccaactcc

SEQ ID NO: 16136 - DNA, 25 bp, Saccharomyces pastorianus
ctttgtaccgtcctcatcgaataat

SEQ ID NO: 16137 - DNA, 25 bp, Saccharomyces pastorianus
gtgacatcagtctccaccaatgaac

SEQ ID NO: 16138 - DNA, 25 bp, Saccharomyces pastorianus
tagagccactgatgccatgacgact

SEQ ID NO: 16139 - DNA, 25 bp, Saccharomyces pastorianus
gcagtactcaagtatctggatctat

SEQ ID NO: 16140 - DNA, 25 bp, Saccharomyces pastorianus
aatatcgaggctttcactccatcat

SEQ ID NO: 16141 - DNA, 25 bp, Saccharomyces pastorianus
aagtagccttatctcacaagaacat

SEQ ID NO: 16142 - DNA, 25 bp, Saccharomyces pastorianus
gaggcaggcaactacgttaactaga

SEQ ID NO: 16143 - DNA, 25 bp, Saccharomyces pastorianus
gaacttcctatatcattacaaccaa

SEQ ID NO: 16144 - DNA, 25 bp, Saccharomyces pastorianus
atacaacaccatcttcctctaatag

SEQ ID NO: 16145 - DNA, 25 bp, Saccharomyces pastorianus
ccttcaacaccaacttcatacaata

SEQ ID NO: 16146 - DNA, 25 bp, Saccharomyces pastorianus
gtactacacctctattattatcgcc

SEQ ID NO: 16147 - DNA, 25 bp, Saccharomyces pastorianus
ttcgtcgtccgatttccagagagag

SEQ ID NO: 16148 - DNA, 25 bp, Saccharomyces pastorianus
agaaccattcccattctgaatcttc

SEQ ID NO: 16149 - DNA, 25 bp, Saccharomyces pastorianus
aaatgaatccgactccgatttcacc

SEQ ID NO: 16150 - DNA, 25 bp, Saccharomyces pastorianus
gtatcaatccagcagacgcccaaat

SEQ ID NO: 16151 - DNA, 25 bp, Saccharomyces pastorianus
cacacccacgacaatgctgagtagg

SEQ ID NO: 16152 - DNA, 25 bp, Saccharomyces pastorianus
ggtacgaatctgcatactttggaat

SEQ ID NO: 16153 - DNA, 25 bp, Saccharomyces pastorianus
gatgaacatgattaataccgccgta

SEQ ID NO: 16154 - DNA, 25 bp, Saccharomyces pastorianus
taaaggatccatccaactccagcat

SEQ ID NO: 16155 - DNA, 25 bp, Saccharomyces pastorianus
gcaaaactcgtcgttgtccagtcaa

SEQ ID NO: 16156 - DNA, 25 bp, Saccharomyces pastorianus
accagccaaagctccatacagttga

SEQ ID NO: 16157 - DNA, 25 bp, Saccharomyces pastorianus
gacgccatattctgtgtcaaccact

SEQ ID NO: 16158 - DNA, 25 bp, Saccharomyces pastorianus
aacttatgtcagtagttgcgggtct

SEQ ID NO: 16159 - DNA, 25 bp, Saccharomyces pastorianus
agcaatgcagggtgtattcgaatac

SEQ ID NO: 16160 - DNA, 25 bp, Saccharomyces pastorianus
atgcaattctcgcagtatttgtcgt

SEQ ID NO: 16161 - DNA, 25 bp, Saccharomyces pastorianus
gtatttgtcgttaatttccctgttg

SEQ ID NO: 16162 - DNA, 25 bp, Saccharomyces pastorianus
tgctagcttagagtcgacgccatat

SEQ ID NO: 16163 - DNA, 25 bp, Saccharomyces pastorianus
cactgctattcttgccaacgggaaa

SEQ ID NO: 16164 - DNA, 25 bp, Saccharomyces pastorianus
ggatgtggcggtttcatgcgaacaa

SEQ ID NO: 16165 - DNA, 25 bp, Saccharomyces pastorianus
gttggttccagctttagcacaggat

SEQ ID NO: 16166 - DNA, 25 bp, Saccharomyces pastorianus
gaacaaattccctctgctagcttag

SEQ ID NO: 16167 - DNA, 25 bp, Saccharomyces pastorianus
gggtctgtggccactacaacaaaga

SEQ ID NO: 16168 - DNA, 25 bp, Saccharomyces pastorianus
gaaatcgattccttttcaggtaaca

SEQ ID NO: 16169 - DNA, 25 bp, Saccharomyces pastorianus
ttcaggtaacagaatctacccaggt

SEQ ID NO: 16170 - DNA, 25 bp, Saccharomyces pastorianus
tcgattccttttcaggtaacagaat

SEQ ID NO: 16171 - DNA, 25 bp, Saccharomyces pastorianus
ttccttttcaggtaacagaatctac

SEQ ID NO: 16172 - DNA, 25 bp, Saccharomyces pastorianus
agtctgttggtactcaaggttccaa

SEQ ID NO: 16173 - DNA, 25 bp, Saccharomyces pastorianus
aagtctgttggtactcaaggttcca

SEQ ID NO: 16174 - DNA, 25 bp, Saccharomyces pastorianus
ccacaagaaaggtatcactgaagaa

SEQ ID NO: 16175 - DNA, 25 bp, Saccharomyces pastorianus
acgaaaaattgaaggctgacaagga

SEQ ID NO: 16176 - DNA, 25 bp, Saccharomyces pastorianus
aatcgattccttttcaggtaacaga

SEQ ID NO: 16177 - DNA, 25 bp, Saccharomyces pastorianus
aggtaacagaatctacccaggtaga

SEQ ID NO: 16178 - DNA, 25 bp, Saccharomyces pastorianus
aagcaccacaagaaaggtatcactg

SEQ ID NO: 16179 - DNA, 25 bp, Saccharomyces pastorianus
taagacgttgacatcatgggagctt

SEQ ID NO: 16180 - DNA, 25 bp, Saccharomyces pastorianus
gaaaaggcgccattgagggtcaaaa

SEQ ID NO: 16181 - DNA, 25 bp, Saccharomyces pastorianus
gagcgtttatctgctaagatgcacg

SEQ ID NO: 16182 - DNA, 25 bp, Saccharomyces pastorianus
ttgacatcatgggagcttaaaaaac

SEQ ID NO: 16183 - DNA, 25 bp, Saccharomyces pastorianus
tctggaaggtggaaaaggcgccatt

SEQ ID NO: 16184 - DNA, 25 bp, Saccharomyces pastorianus
gatacgagcgtttatctgctaagat

SEQ ID NO: 16185 - DNA, 25 bp, Saccharomyces pastorianus
agaagaagcacgtcaaactaagata

SEQ ID NO: 16186 - DNA, 25 bp, Saccharomyces pastorianus
gcacgtcaaactaagataaccactt

SEQ ID NO: 16187 - DNA, 25 bp, Saccharomyces pastorianus
caaaggctgcaaaaggtactttagt

SEQ ID NO: 16188 - DNA, 25 bp, Saccharomyces pastorianus
gcagaaaatgaaagatacgagcgtt

SEQ ID NO: 16189 - DNA, 25 bp, Saccharomyces pastorianus
atgcacgctaagaaggttgagagat

SEQ ID NO: 16190 - DNA, 25 bp, Saccharomyces pastorianus
ttggtgccgccaagtttgatgccat

SEQ ID NO: 16191 - DNA, 25 bp, Saccharomyces pastorianus
gttcaacaattccatttctgctcag

SEQ ID NO: 16192 - DNA, 25 bp, Saccharomyces pastorianus
tggatctctcaaatggcaccaggga

SEQ ID NO: 16193 - DNA, 25 bp, Saccharomyces pastorianus
taacggtgccattctttgtattcaa

SEQ ID NO: 16194 - DNA, 25 bp, Saccharomyces pastorianus
ttattccctacctttgtcacaggtg

SEQ ID NO: 16195 - DNA, 25 bp, Saccharomyces pastorianus
gttgagctcttcgacgagcacctta

SEQ ID NO: 16196 - DNA, 25 bp, Saccharomyces pastorianus
ggtccccgtttacaagttgagctct

SEQ ID NO: 16197 - DNA, 25 bp, Saccharomyces pastorianus
ccacctgcggtgttagagactcaag

SEQ ID NO: 16198 - DNA, 25 bp, Saccharomyces pastorianus
tccaaggccatctccacaagttgag

SEQ ID NO: 16199 - DNA, 25 bp, Saccharomyces pastorianus
ttaatcaactgttcttggctcccaa

SEQ ID NO: 16200 - DNA, 25 bp, Saccharomyces pastorianus
atggctttacaaggcgtttctttgg

SEQ ID NO: 16201 - DNA, 25 bp, Saccharomyces pastorianus
ttgtcaggacctgtatctgcctcaa

SEQ ID NO: 16202 - DNA, 25 bp, Saccharomyces pastorianus
ccaggtctgcaagcgatggctgaga

SEQ ID NO: 16203 - DNA, 25 bp, Saccharomyces pastorianus
gttactactgtaacggcatgcaatt

SEQ ID NO: 16204 - DNA, 25 bp, Saccharomyces pastorianus
ttatacggtttgatccacgcgaggt

SEQ ID NO: 16205 - DNA, 25 bp, Saccharomyces pastorianus
aatgacgaagccgtatctggcccca

SEQ ID NO: 16206 - DNA, 25 bp, Saccharomyces pastorianus
gcatgcaattactgccttgtgggct

SEQ ID NO: 16207 - DNA, 25 bp, Saccharomyces pastorianus
gagattgtattgtcctagttgtcag

SEQ ID NO: 16208 - DNA, 25 bp, Saccharomyces pastorianus
gagacaatacccattcacggaggaa

SEQ ID NO: 16209 - DNA, 25 bp, Saccharomyces pastorianus
acgcgaggttcattctgaccaagcc

SEQ ID NO: 16210 - DNA, 25 bp, Saccharomyces pastorianus
gatgcaaagtaatgacggccacgat

SEQ ID NO: 16211 - DNA, 25 bp, Saccharomyces pastorianus
tgcctcaatcatctaggttcctgtg

SEQ ID NO: 16212 - DNA, 25 bp, Saccharomyces pastorianus
ggtccaacttggcaaaggccttcaa

SEQ ID NO: 16213 - DNA, 25 bp, Saccharomyces pastorianus
atccgcagctcttgttggaagtgct

SEQ ID NO: 16214 - DNA, 25 bp, Saccharomyces pastorianus
acatgctcaaactcttgcgcaacat

SEQ ID NO: 16215 - DNA, 25 bp, Saccharomyces pastorianus
tggagcaatgctaccgtgacaagaa

SEQ ID NO: 16216 - DNA, 25 bp, Saccharomyces pastorianus
gacgttcatgacgagttgtcccaga

SEQ ID NO: 16217 - DNA, 25 bp, Saccharomyces pastorianus
gctgctgcagtgaaattgaccgtgg

SEQ ID NO: 16218 - DNA, 25 bp, Saccharomyces pastorianus
gaagactcgtctctacattttacga

SEQ ID NO: 16219 - DNA, 25 bp, Saccharomyces pastorianus
aagtgaccacgagtgatccgcagct

SEQ ID NO: 16220 - DNA, 25 bp, Saccharomyces pastorianus
gtgacaagaattacgctgctgcagt

SEQ ID NO: 16221 - DNA, 25 bp, Saccharomyces pastorianus
acccggacatggctcagcaaggtag

SEQ ID NO: 16222 - DNA, 25 bp, Saccharomyces pastorianus
agcaaggtagcgagcagtcttccac

SEQ ID NO: 16223 - DNA, 25 bp, Saccharomyces pastorianus
ggattcgcccactgacaaatttcta

SEQ ID NO: 16224 - DNA, 25 bp, Saccharomyces pastorianus
aggacaacatgaccaagctccgcgt

SEQ ID NO: 16225 - DNA, 25 bp, Saccharomyces pastorianus
aggactgccctaagatgaactacaa

SEQ ID NO: 16226 - DNA, 25 bp, Saccharomyces pastorianus
attcggcttcgagacttgcatgaaa

SEQ ID NO: 16227 - DNA, 25 bp, Saccharomyces pastorianus
gatgcgatacggttattcggcttcg

SEQ ID NO: 16228 - DNA, 25 bp, Saccharomyces pastorianus
gggaaggctattcttgttcgaagtt

SEQ ID NO: 16229 - DNA, 25 bp, Saccharomyces pastorianus
gatactatctattaccagcaaggac

SEQ ID NO: 16230 - DNA, 25 bp, Saccharomyces pastorianus
ccgctctgggagttgttggatttca

SEQ ID NO: 16231 - DNA, 25 bp, Saccharomyces pastorianus
aggcaatctgtttgttctgggtgaa

SEQ ID NO: 16232 - DNA, 25 bp, Saccharomyces pastorianus
tcaaatctgcaaacgagtctgtatt

SEQ ID NO: 16233 - DNA, 25 bp, Saccharomyces pastorianus
aggagctttacagcgtaccgtacga

SEQ ID NO: 16234 - DNA, 25 bp, Saccharomyces pastorianus
agccttcttccttgttgtcttaatt

SEQ ID NO: 16235 - DNA, 25 bp, Saccharomyces pastorianus
catttttgccctaccaagtcttgaa

SEQ ID NO: 16236 - DNA, 25 bp, Saccharomyces pastorianus
acgtcgtcctactatgtgcttatta

SEQ ID NO: 16237 - DNA, 25 bp, Saccharomyces pastorianus
tatgttggcccattggttgtacgcc

SEQ ID NO: 16238 - DNA, 25 bp, Saccharomyces pastorianus
gttgtacgccaacgcatgtgccaag

SEQ ID NO: 16239 - DNA, 25 bp, Saccharomyces pastorianus
tagcggctcatatcttctgattgat

SEQ ID NO: 16240 - DNA, 25 bp, Saccharomyces pastorianus
ttgggccctatcttgtggcttcaat

SEQ ID NO: 16241 - DNA, 25 bp, Saccharomyces pastorianus
atatatggtcacttctagcggctca

SEQ ID NO: 16242 - DNA, 25 bp, Saccharomyces pastorianus
caatatttcactgtacgtcgtccta

SEQ ID NO: 16243 - DNA, 25 bp, Saccharomyces pastorianus
gactcaatccttaatttgggcccta

SEQ ID NO: 16244 - DNA, 25 bp, Saccharomyces pastorianus
gcttcaattcggtattcccatggtt

SEQ ID NO: 16245 - DNA, 25 bp, Saccharomyces pastorianus
gaagtcggcgttgcaaccagtggca

SEQ ID NO: 16246 - DNA, 25 bp, Saccharomyces pastorianus
aagagaatggccaatctgtcccaaa

SEQ ID NO: 16247 - DNA, 25 bp, Saccharomyces pastorianus
tgcaagaaacgctgccttaagggct

SEQ ID NO: 16248 - DNA, 25 bp, Saccharomyces pastorianus
cttggacccagatactgtttcgtat

SEQ ID NO: 16249 - DNA, 25 bp, Saccharomyces pastorianus
atctgtcccaaatctacactcaaag

SEQ ID NO: 16250 - DNA, 25 bp, Saccharomyces pastorianus
gatcctgcaggttattttgttggtt

SEQ ID NO: 16251 - DNA, 25 bp, Saccharomyces pastorianus
ggacgaagaattgggcccatccatt

SEQ ID NO: 16252 - DNA, 25 bp, Saccharomyces pastorianus
atatgccgtgtgatgttctggctaa

SEQ ID NO: 16253 - DNA, 25 bp, Saccharomyces pastorianus
tacttacatttgtttccgtggacga

SEQ ID NO: 16254 - DNA, 25 bp, Saccharomyces pastorianus
gtagtcgaatttgccattacccata

SEQ ID NO: 16255 - DNA, 25 bp, Saccharomyces pastorianus
agtacctgacaaactcttggaccca

SEQ ID NO: 16256 - DNA, 25 bp, Saccharomyces pastorianus
cttctactaaaccatgcgctaatca

SEQ ID NO: 16257 - DNA, 25 bp, Saccharomyces pastorianus
tttgattcactccatattcgttcct

SEQ ID NO: 16258 - DNA, 25 bp, Saccharomyces pastorianus
taagatctcaactcgggttttacaa

SEQ ID NO: 16259 - DNA, 25 bp, Saccharomyces pastorianus
tcgcggtttcacgttaactactttg

SEQ ID NO: 16260 - DNA, 25 bp, Saccharomyces pastorianus
gcaggatttttcttacttctactaa

SEQ ID NO: 16261 - DNA, 25 bp, Saccharomyces pastorianus
gagtcaatttatatcgcggtttcac

SEQ ID NO: 16262 - DNA, 25 bp, Saccharomyces pastorianus
gagctaggtttgtttgttatcggat

SEQ ID NO: 16263 - DNA, 25 bp, Saccharomyces pastorianus
tttggtattggctccgtactttata

SEQ ID NO: 16264 - DNA, 25 bp, Saccharomyces pastorianus
atattcgttcctactatcctgttta

SEQ ID NO: 16265 - DNA, 25 bp, Saccharomyces pastorianus
gctgtttatatctgcctacaggcct

SEQ ID NO: 16266 - DNA, 25 bp, Saccharomyces pastorianus
cctacaggccttctagcaggatttt

SEQ ID NO: 16267 - DNA, 25 bp, Saccharomyces pastorianus
gcactgtctagttaacggccttgac

SEQ ID NO: 16268 - DNA, 25 bp, Saccharomyces pastorianus
gtgccgttcttgttgaccattttga

SEQ ID NO: 16269 - DNA, 25 bp, Saccharomyces pastorianus
tactaaagttcgacaacgctccaag

SEQ ID NO: 16270 - DNA, 25 bp, Saccharomyces pastorianus
gggtttgttctatgaatggcgtttc

SEQ ID NO: 16271 - DNA, 25 bp, Saccharomyces pastorianus
aaagtcaattatcgctccttcctat

SEQ ID NO: 16272 - DNA, 25 bp, Saccharomyces pastorianus
ttaacggccttgacgatatcggtat

SEQ ID NO: 16273 - DNA, 25 bp, Saccharomyces pastorianus
cgctccttcctatggtgatattttc

SEQ ID NO: 16274 - DNA, 25 bp, Saccharomyces pastorianus
gagagcacgcaccatgggctttgaa

SEQ ID NO: 16275 - DNA, 25 bp, Saccharomyces pastorianus
tactcgttcttggagggtggttcta

SEQ ID NO: 16276 - DNA, 25 bp, Saccharomyces pastorianus
gattttggattccaacggtgccgtt

SEQ ID NO: 16277 - DNA, 25 bp, Saccharomyces pastorianus
tttcgggtgtggttcttcaagagag

SEQ ID NO: 16278 - DNA, 25 bp, Saccharomyces pastorianus
ggcggatgccaagttttgatcatgt

SEQ ID NO: 16279 - DNA, 25 bp, Saccharomyces pastorianus
attcaacaccttcgtttggttacag

SEQ ID NO: 16280 - DNA, 25 bp, Saccharomyces pastorianus
gattttatcacaggctacattgcaa

SEQ ID NO: 16281 - DNA, 25 bp, Saccharomyces pastorianus
aataatggcaatcattggcggatgc

SEQ ID NO: 16282 - DNA, 25 bp, Saccharomyces pastorianus
gatttctgtttcgacttggaagatg

SEQ ID NO: 16283 - DNA, 25 bp, Saccharomyces pastorianus
cgctcatcgtctttgatttctgttt

SEQ ID NO: 16284 - DNA, 25 bp, Saccharomyces pastorianus
gatagaatttcaactgcaaacttaa

SEQ ID NO: 16285 - DNA, 25 bp, Saccharomyces pastorianus
gcaaacttaaacttcttccaagact

SEQ ID NO: 16286 - DNA, 25 bp, Saccharomyces pastorianus
gaagctgacggcatatcaagttgga

SEQ ID NO: 16287 - DNA, 25 bp, Saccharomyces pastorianus
ggttacagttctttactatgctagt

SEQ ID NO: 16288 - DNA, 25 bp, Saccharomyces pastorianus
ggcccgaattatttttcaatagcca

SEQ ID NO: 16289 - DNA, 25 bp, Saccharomyces pastorianus
aacactaccgatggcgtgggcacct

SEQ ID NO: 16290 - DNA, 25 bp, Saccharomyces pastorianus
tcgactgaatcgctaaggtcatcta

SEQ ID NO: 16291 - DNA, 25 bp, Saccharomyces pastorianus
gtggaaacactgctaccatgggtag

SEQ ID NO: 16292 - DNA, 25 bp, Saccharomyces pastorianus
ataccttgggaagtgccgtaagagc

SEQ ID NO: 16293 - DNA, 25 bp, Saccharomyces pastorianus
gtgggcaccttctagatccagggaa

SEQ ID NO: 16294 - DNA, 25 bp, Saccharomyces pastorianus
gagtactatctggataccttgggaa

SEQ ID NO: 16295 - DNA, 25 bp, Saccharomyces pastorianus
ttgtctcaaacactaccgatggcgt

SEQ ID NO: 16296 - DNA, 25 bp, Saccharomyces pastorianus
gaatcgctagctttaacgtctggaa

SEQ ID NO: 16297 - DNA, 25 bp, Saccharomyces pastorianus
aggtcatctaagctggagtactatc

SEQ ID NO: 16298 - DNA, 25 bp, Saccharomyces pastorianus
ggtagcgacatttcaataagcgact

SEQ ID NO: 16299 - DNA, 25 bp, Saccharomyces pastorianus
ataagcgacttcaagacatctctga

SEQ ID NO: 16300 - DNA, 25 bp, Saccharomyces pastorianus
gagtccttcatttgaccttatctaa

SEQ ID NO: 16301 - DNA, 25 bp, Saccharomyces pastorianus
gaacttgtgacatcgcatggttatt

SEQ ID NO: 16302 - DNA, 25 bp, Saccharomyces pastorianus
ttccaaatccccaatcttgacattt

SEQ ID NO: 16303 - DNA, 25 bp, Saccharomyces pastorianus
acacagtttcagagtccttcatttg

SEQ ID NO: 16304 - DNA, 25 bp, Saccharomyces pastorianus
atagacagtggctctcagatatgta

SEQ ID NO: 16305 - DNA, 25 bp, Saccharomyces pastorianus
ataagcttgcatcaggtggtaacga

SEQ ID NO: 16306 - DNA, 25 bp, Saccharomyces pastorianus
agaatgccggatcctttcttcgaaa

SEQ ID NO: 16307 - DNA, 25 bp, Saccharomyces pastorianus
aatggcttggtctcctcacaaaagg

SEQ ID NO: 16308 - DNA, 25 bp, Saccharomyces pastorianus
gtacttccatggatccaatcgcaat

SEQ ID NO: 16309 - DNA, 25 bp, Saccharomyces pastorianus
atactcaggaagtctgcggcttgaa

SEQ ID NO: 16310 - DNA, 25 bp, Saccharomyces pastorianus
atgggaccactgttgtttctggagc

SEQ ID NO: 16311 - DNA, 25 bp, Saccharomyces pastorianus
cagagttctccttcaggtgacttca

SEQ ID NO: 16312 - DNA, 25 bp, Saccharomyces pastorianus
aaatctgtcttcaatcccaagtaaa

SEQ ID NO: 16313 - DNA, 25 bp, Saccharomyces pastorianus
tgctcttcccagtcaaagtgattac

SEQ ID NO: 16314 - DNA, 25 bp, Saccharomyces pastorianus
gagcctctgcattttatttctatgg

SEQ ID NO: 16315 - DNA, 25 bp, Saccharomyces pastorianus
gaatctgtaaactctcgcgcaatgt

SEQ ID NO: 16316 - DNA, 25 bp, Saccharomyces pastorianus
agtggtccatcaacagagttctcct

SEQ ID NO: 16317 - DNA, 25 bp, Saccharomyces pastorianus
tgacttcacgttcctggcattagaa

SEQ ID NO: 16318 - DNA, 25 bp, Saccharomyces pastorianus
gattcaagtcattatcctgatctca

SEQ ID NO: 16319 - DNA, 25 bp, Saccharomyces pastorianus
gcgcaatgtggtggatcgtgattca

SEQ ID NO: 16320 - DNA, 25 bp, Saccharomyces pastorianus
aagttggaggactatgctcttccca

SEQ ID NO: 16321 - DNA, 25 bp, Saccharomyces pastorianus
tactggctcttgtgttatcgccctt

SEQ ID NO: 16322 - DNA, 25 bp, Saccharomyces pastorianus
ggaggtctctggtgaaactttcttt

SEQ ID NO: 16323 - DNA, 25 bp, Saccharomyces pastorianus
gatgctcatgttttagccgcacata

SEQ ID NO: 16324 - DNA, 25 bp, Saccharomyces pastorianus
aatttgcgctggttacctttcagaa

SEQ ID NO: 16325 - DNA, 25 bp, Saccharomyces pastorianus
gaaaagaccagttgcaatttgcgct

SEQ ID NO: 16326 - DNA, 25 bp, Saccharomyces pastorianus
gggccttagctcgtacagtttggaa

SEQ ID NO: 16327 - DNA, 25 bp, Saccharomyces pastorianus
agagccagggttgactccgtttaga

SEQ ID NO: 16328 - DNA, 25 bp, Saccharomyces pastorianus
gccgcacataagttgcttgacccaa

SEQ ID NO: 16329 - DNA, 25 bp, Saccharomyces pastorianus
ggcaaacgatccagacagcgatttt

SEQ ID NO: 16330 - DNA, 25 bp, Saccharomyces pastorianus
atgccggtaatgtcgctgatgctca

SEQ ID NO: 16331 - DNA, 25 bp, Saccharomyces pastorianus
gacagttggtgccaggtcttagaca

SEQ ID NO: 16332 - DNA, 25 bp, Saccharomyces pastorianus
ttatactgttgcacttcgtccagca

SEQ ID NO: 16333 - DNA, 25 bp, Saccharomyces pastorianus
ggcgttgggcgtaataacacacggt

SEQ ID NO: 16334 - DNA, 25 bp, Saccharomyces pastorianus
tgtgatgccatcaaacgacgtaatg

SEQ ID NO: 16335 - DNA, 25 bp, Saccharomyces pastorianus
gtacagcacgcttttagcagacaaa

SEQ ID NO: 16336 - DNA, 25 bp, Saccharomyces pastorianus
acacggtgaaaaactatcgccagga

SEQ ID NO: 16337 - DNA, 25 bp, Saccharomyces pastorianus
tcaagaactttctttaccctctcgt

SEQ ID NO: 16338 - DNA, 25 bp, Saccharomyces pastorianus
gatgtcacagctgtacagcacgctt

SEQ ID NO: 16339 - DNA, 25 bp, Saccharomyces pastorianus
ttacacaatatctcacatctcaggg

SEQ ID NO: 16340 - DNA, 25 bp, Saccharomyces pastorianus
tatcgacctttaaaccagcgctaca

SEQ ID NO: 16341 - DNA, 25 bp, Saccharomyces pastorianus
gaagatctgagagtgcgtacgctga

SEQ ID NO: 16342 - DNA, 25 bp, Saccharomyces pastorianus
gtaagcacgatccaaacattcctga

SEQ ID NO: 16343 - DNA, 25 bp, Saccharomyces pastorianus
ggattctcctcattcagatcagtca

SEQ ID NO: 16344 - DNA, 25 bp, Saccharomyces pastorianus
ggacgtccactatgctgagctatga

SEQ ID NO: 16345 - DNA, 25 bp, Saccharomyces pastorianus
tgaatttctgaattcttcccctagc

SEQ ID NO: 16346 - DNA, 25 bp, Saccharomyces pastorianus
gaaaggtttcgttcagtgcagcaaa

SEQ ID NO: 16347 - DNA, 25 bp, Saccharomyces pastorianus
cccctagccctgatatgtttacatt

SEQ ID NO: 16348 - DNA, 25 bp, Saccharomyces pastorianus
gactgttcttttcaaagtcgccctt

SEQ ID NO: 16349 - DNA, 25 bp, Saccharomyces pastorianus
gacagcaacagtgacgaccacgtat

SEQ ID NO: 16350 - DNA, 25 bp, Saccharomyces pastorianus
tgaataccctcgctccaaaaagtga

SEQ ID NO: 16351 - DNA, 25 bp, Saccharomyces pastorianus
cttcctgcttctgctactaaaacta

SEQ ID NO: 16352 - DNA, 25 bp, Saccharomyces pastorianus
gaccacgtatgacaatgagcccaat

SEQ ID NO: 16353 - DNA, 25 bp, Saccharomyces pastorianus
taacccttcagctacagacacatat

SEQ ID NO: 16354 - DNA, 25 bp, Saccharomyces pastorianus
agtgcatattataccttcctctagt

SEQ ID NO: 16355 - DNA, 25 bp, Saccharomyces pastorianus
gaagggaccttatgcgttcaagtat

SEQ ID NO: 16356 - DNA, 25 bp, Saccharomyces pastorianus
agttatgccatctatgaatgatcca

SEQ ID NO: 16357 - DNA, 25 bp, Saccharomyces pastorianus
gacgagtatgattactggtctctaa

SEQ ID NO: 16358 - DNA, 25 bp, Saccharomyces pastorianus
gaggtcagacaactctaatttcttg

SEQ ID NO: 16359 - DNA, 25 bp, Saccharomyces pastorianus
tatcaaatctattcgtatgccaaag

SEQ ID NO: 16360 - DNA, 25 bp, Saccharomyces pastorianus
gagacaggtatatcccatacgttaa

SEQ ID NO: 16361 - DNA, 25 bp, Saccharomyces pastorianus
gaacagtttgtcacgaatgtcaagt

SEQ ID NO: 16362 - DNA, 25 bp, Saccharomyces pastorianus
ttagccgatgagcagacaggttccg

SEQ ID NO: 16363 - DNA, 25 bp, Saccharomyces pastorianus
caggttccgcgggagagaataccca

SEQ ID NO: 16364 - DNA, 25 bp, Saccharomyces pastorianus
gtgtttggacaaggttgctactctt

SEQ ID NO: 16365 - DNA, 25 bp, Saccharomyces pastorianus
ggactatctatttaagctgtttgac

SEQ ID NO: 16366 - DNA, 25 bp, Saccharomyces pastorianus
atgccgacgcattagctcagtgtaa

SEQ ID NO: 16367 - DNA, 25 bp, Saccharomyces pastorianus
gattactcaagcaccatcatgacga

SEQ ID NO: 16368 - DNA, 25 bp, Saccharomyces pastorianus
aaagctgattgtcggcatcactaca

SEQ ID NO: 16369 - DNA, 25 bp, Saccharomyces pastorianus
gagcgttctctaagcgttctaagtt

SEQ ID NO: 16370 - DNA, 25 bp, Saccharomyces pastorianus
ggagatttcgacttatttcacatgg

SEQ ID NO: 16371 - DNA, 25 bp, Saccharomyces pastorianus
aaataatacgttggcgcctactcat

SEQ ID NO: 16372 - DNA, 25 bp, Saccharomyces pastorianus
atatcgtataggcacggctgtcctc

SEQ ID NO: 16373 - DNA, 25 bp, Saccharomyces pastorianus
ttattattaatgctgatgccgacgc

SEQ ID NO: 16374 - DNA, 25 bp, Saccharomyces pastorianus
acggctgtcctcacggaaggcggaa

SEQ ID NO: 16375 - DNA, 25 bp, Saccharomyces pastorianus
aatggatctccacccagacaaaaag

SEQ ID NO: 16376 - DNA, 25 bp, Saccharomyces pastorianus
gctaggtttttattcagttgccgaa

SEQ ID NO: 16377 - DNA, 25 bp, Saccharomyces pastorianus
gaatccccaaatcacatcaaaaaac

SEQ ID NO: 16378 - DNA, 25 bp, Saccharomyces pastorianus
ttgacagtggtgaaatacctccagt

SEQ ID NO: 16379 - DNA, 25 bp, Saccharomyces pastorianus
aatccaaagtacttctcacacactg

SEQ ID NO: 16380 - DNA, 25 bp, Saccharomyces pastorianus
cagtggtgaaatacctccagtattc

SEQ ID NO: 16381 - DNA, 25 bp, Saccharomyces pastorianus
gtaagccaggtgacgagatcgatga

SEQ ID NO: 16382 - DNA, 25 bp, Saccharomyces pastorianus
gatcgatgatttaattgacagtggt

SEQ ID NO: 16383 - DNA, 25 bp, Saccharomyces pastorianus
agggtcaaactctcaagcacatgaa

SEQ ID NO: 16384 - DNA, 25 bp, Saccharomyces pastorianus
caaataaatggactgaacgtgaatc

SEQ ID NO: 16385 - DNA, 25 bp, Saccharomyces pastorianus
aacgtgaatcaaaagctaatccaaa

SEQ ID NO: 16386 - DNA, 25 bp, Saccharomyces pastorianus
gccaggtgacgagatcgatgattta

SEQ ID NO: 16387 - DNA, 25 bp, Saccharomyces pastorianus
gaagagggtcaaactctcaagcaca

SEQ ID NO: 16388 - DNA, 25 bp, Saccharomyces pastorianus
agaagatggctttgaccactggtca

SEQ ID NO: 16389 - DNA, 25 bp, Saccharomyces pastorianus
gtggccgacgaaaaagtagccgaat

SEQ ID NO: 16390 - DNA, 25 bp, Saccharomyces pastorianus
ggaccaaatccaacaagttagtaat

SEQ ID NO: 16391 - DNA, 25 bp, Saccharomyces pastorianus
gaacacactgggtatgctaggtcac

SEQ ID NO: 16392 - DNA, 25 bp, Saccharomyces pastorianus
tgtttctaatccgttcaattctaaa

SEQ ID NO: 16393 - DNA, 25 bp, Saccharomyces pastorianus
tcaacaaatctcaaggtccactcaa

SEQ ID NO: 16394 - DNA, 25 bp, Saccharomyces pastorianus
gaatcgtagtatacttgccgttcat

SEQ ID NO: 16395 - DNA, 25 bp, Saccharomyces pastorianus
tacttgccgttcatgtttctaatcc

SEQ ID NO: 16396 - DNA, 25 bp, Saccharomyces pastorianus
cgcaagacgccgagagagctggtat

SEQ ID NO: 16397 - DNA, 25 bp, Saccharomyces pastorianus
tgctaggtcaccaaagtgaacagtt

SEQ ID NO: 16398 - DNA, 25 bp, Saccharomyces pastorianus
gagagctggtatgaacacactgggt

SEQ ID NO: 16399 - DNA, 25 bp, Saccharomyces pastorianus
gttggtggttatttctctccagtta

SEQ ID NO: 16400 - DNA, 25 bp, Saccharomyces pastorianus
aaggacctcatcgtggttaatggtt

SEQ ID NO: 16401 - DNA, 25 bp, Saccharomyces pastorianus
gaattagcttgcgaaaggacctcat

SEQ ID NO: 16402 - DNA, 25 bp, Saccharomyces pastorianus
agtccatgggtgaacctcacgtgtg

SEQ ID NO: 16403 - DNA, 25 bp, Saccharomyces pastorianus
gaatatcgaccgtggatggtcaaaa

SEQ ID NO: 16404 - DNA, 25 bp, Saccharomyces pastorianus
gattagcgccagctcatcatcgtgt

SEQ ID NO: 16405 - DNA, 25 bp, Saccharomyces pastorianus
ggtgatcttattgagtccatgggtg

SEQ ID NO: 16406 - DNA, 25 bp, Saccharomyces pastorianus
gactggatcggatgttagatctttc

SEQ ID NO: 16407 - DNA, 25 bp, Saccharomyces pastorianus
acgtgtgggctgattccgacttgca

SEQ ID NO: 16408 - DNA, 25 bp, Saccharomyces pastorianus
aaaacgtggattagcgccagctcat

SEQ ID NO: 16409 - DNA, 25 bp, Saccharomyces pastorianus
atgttactagcaggtggtgatctta

SEQ ID NO: 16410 - DNA, 25 bp, Saccharomyces pastorianus
ggataagtttcaaccatgcgatgga

SEQ ID NO: 16411 - DNA, 25 bp, Saccharomyces pastorianus
aatgattaccttttattcagcaaat

SEQ ID NO: 16412 - DNA, 25 bp, Saccharomyces pastorianus
gcttgaatcccggttacgcttatga

SEQ ID NO: 16413 - DNA, 25 bp, Saccharomyces pastorianus
gaggtcaatgcccacattacgaata

SEQ ID NO: 16414 - DNA, 25 bp, Saccharomyces pastorianus
gatgacatatccatgttaccgttag

SEQ ID NO: 16415 - DNA, 25 bp, Saccharomyces pastorianus
gggcatgttaaattagcacttcttg

SEQ ID NO: 16416 - DNA, 25 bp, Saccharomyces pastorianus
tattttgggtcgctgtaatcgtaaa

SEQ ID NO: 16417 - DNA, 25 bp, Saccharomyces pastorianus
gatctgctcatgcattacgcttaga

SEQ ID NO: 16418 - DNA, 25 bp, Saccharomyces pastorianus
acattgttctatttacaggttccga

SEQ ID NO: 16419 - DNA, 25 bp, Saccharomyces pastorianus
ggcgctaattccttgatctgctcat

SEQ ID NO: 16420 - DNA, 25 bp, Saccharomyces pastorianus
tacaggttccgatggttttattttg

SEQ ID NO: 16421 - DNA, 25 bp, Saccharomyces pastorianus
agctttatattatctaggcagttca

SEQ ID NO: 16422 - DNA, 25 bp, Saccharomyces pastorianus
atcggtttagtggtcaaagctttat

SEQ ID NO: 16423 - DNA, 25 bp, Saccharomyces pastorianus
gacgccgacgatcataacattaaca

SEQ ID NO: 16424 - DNA, 25 bp, Saccharomyces pastorianus
gaaattttttcaccgcggctttcag

SEQ ID NO: 16425 - DNA, 25 bp, Saccharomyces pastorianus
tatagaaagccagcgccgggccaaa

SEQ ID NO: 16426 - DNA, 25 bp, Saccharomyces pastorianus
gacaatggtcttctctatccagaca

SEQ ID NO: 16427 - DNA, 25 bp, Saccharomyces pastorianus
ggatgaggattctcaaccacaacca

SEQ ID NO: 16428 - DNA, 25 bp, Saccharomyces pastorianus
gaagtgtgtgtctatttcccagaaa

SEQ ID NO: 16429 - DNA, 25 bp, Saccharomyces pastorianus
tttggtatcgtttgtctttgtattg

SEQ ID NO: 16430 - DNA, 25 bp, Saccharomyces pastorianus
gatacttcaattaacgaccacaacg

SEQ ID NO: 16431 - DNA, 25 bp, Saccharomyces pastorianus
ggccaaaagcttacctctgaaacca

SEQ ID NO: 16432 - DNA, 25 bp, Saccharomyces pastorianus
gaaggtggtgataaccacgcctcta

SEQ ID NO: 16433 - DNA, 25 bp, Saccharomyces pastorianus
tggtgtcacgaatacgccgatatcc

SEQ ID NO: 16434 - DNA, 25 bp, Saccharomyces pastorianus
gggccactggtaaactctggtgtca

SEQ ID NO: 16435 - DNA, 25 bp, Saccharomyces pastorianus
taacgtgggtggatgtgcagtcaat

SEQ ID NO: 16436 - DNA, 25 bp, Saccharomyces pastorianus
tcgcatgggatttacctactggtga

SEQ ID NO: 16437 - DNA, 25 bp, Saccharomyces pastorianus
gaggagaaacatgccgatattttta

SEQ ID NO: 16438 - DNA, 25 bp, Saccharomyces pastorianus
acctgtggatttggtgacattttcg

SEQ ID NO: 16439 - DNA, 25 bp, Saccharomyces pastorianus
tgaacccgccagaatgatcattgct

SEQ ID NO: 16440 - DNA, 25 bp, Saccharomyces pastorianus
gtatcctgaaaacttccaaagcttg

SEQ ID NO: 16441 - DNA, 25 bp, Saccharomyces pastorianus
gggcacattcatcgcatgggattta

SEQ ID NO: 16442 - DNA, 25 bp, Saccharomyces pastorianus
gagagacgttactttgaaacacaat

SEQ ID NO: 16443 - DNA, 25 bp, Saccharomyces pastorianus
tgctatcttagaaatcccctccaag

SEQ ID NO: 16444 - DNA, 25 bp, Saccharomyces pastorianus
tcaatgcattccctgctatcttaga

SEQ ID NO: 16445 - DNA, 25 bp, Saccharomyces pastorianus
gctggtattggacaaatctctcctg

SEQ ID NO: 16446 - DNA, 25 bp, Saccharomyces pastorianus
aaatcccctccaaggatcatcctta

SEQ ID NO: 16447 - DNA, 25 bp, Saccharomyces pastorianus
cacaaccggtttattgttagctggt

SEQ ID NO: 16448 - DNA, 25 bp, Saccharomyces pastorianus
acaaagggacgatattgctattctt

SEQ ID NO: 16449 - DNA, 25 bp, Saccharomyces pastorianus
agctgacgaggataccacaaccggt

SEQ ID NO: 16450 - DNA, 25 bp, Saccharomyces pastorianus
accaccaaggaggagatcactgaca

SEQ ID NO: 16451 - DNA, 25 bp, Saccharomyces pastorianus
gctattcttttgatcaaccagcata

SEQ ID NO: 16452 - DNA, 25 bp, Saccharomyces pastorianus
ggatcatccttacgatcctgaaaag

SEQ ID NO: 16453 - DNA, 25 bp, Saccharomyces pastorianus
gacaagtttgatcacttcaccgaac

SEQ ID NO: 16454 - DNA, 25 bp, Saccharomyces pastorianus
agctactgcctttcatgattctaag

SEQ ID NO: 16455 - DNA, 25 bp, Saccharomyces pastorianus
gagttgcttgttatcctagctttga

SEQ ID NO: 16456 - DNA, 25 bp, Saccharomyces pastorianus
tattgtcttccgagaacttccattc

SEQ ID NO: 16457 - DNA, 25 bp, Saccharomyces pastorianus
aatgtaccgtctgtctctaattggc

SEQ ID NO: 16458 - DNA, 25 bp, Saccharomyces pastorianus
acatctgctagcttattcggagttg

SEQ ID NO: 16459 - DNA, 25 bp, Saccharomyces pastorianus
tggacttaaccctacatggagtgat

SEQ ID NO: 16460 - DNA, 25 bp, Saccharomyces pastorianus
gaaactgttaggttggagcccacaa

SEQ ID NO: 16461 - DNA, 25 bp, Saccharomyces pastorianus
ttccattctgttttgattgcctgct

SEQ ID NO: 16462 - DNA, 25 bp, Saccharomyces pastorianus
aaagtcgttctacaagctactgcct

SEQ ID NO: 16463 - DNA, 25 bp, Saccharomyces pastorianus
atgctgatcatctacgtcggtattt

SEQ ID NO: 16464 - DNA, 25 bp, Saccharomyces pastorianus
ggaacctccggatttatgctgatca

SEQ ID NO: 16465 - DNA, 25 bp, Saccharomyces pastorianus
atacgtttctgtctctgttttggtc

SEQ ID NO: 16466 - DNA, 25 bp, Saccharomyces pastorianus
acgtttctgtctctgttttggtcga

SEQ ID NO: 16467 - DNA, 25 bp, Saccharomyces pastorianus
aacttacagatacgtttctgtctct

SEQ ID NO: 16468 - DNA, 25 bp, Saccharomyces pastorianus
ttacagatacgtttctgtctctgtt

SEQ ID NO: 16469 - DNA, 25 bp, Saccharomyces pastorianus
tacgtttctgtctctgttttggtcg

SEQ ID NO: 16470 - DNA, 25 bp, Saccharomyces pastorianus
gatacgtttctgtctctgttttggt

SEQ ID NO: 16471 - DNA, 25 bp, Saccharomyces pastorianus
acttacagatacgtttctgtctctg

SEQ ID NO: 16472 - DNA, 25 bp, Saccharomyces pastorianus
cagatacgtttctgtctctgttttg

SEQ ID NO: 16473 - DNA, 25 bp, Saccharomyces pastorianus
cttacagatacgtttctgtctctgt

SEQ ID NO: 16474 - DNA, 25 bp, Saccharomyces pastorianus
agatacgtttctgtctctgttttgg

SEQ ID NO: 16475 - DNA, 25 bp, Saccharomyces pastorianus
gctacctggttcaggccaacggttt

SEQ ID NO: 16476 - DNA, 25 bp, Saccharomyces pastorianus
gttactgcgactttgaaagccgaat

SEQ ID NO: 16477 - DNA, 25 bp, Saccharomyces pastorianus
aatgattattggtgctactaaccgg

SEQ ID NO: 16478 - DNA, 25 bp, Saccharomyces pastorianus
ggtgttaacgatacttcttctctga

SEQ ID NO: 16479 - DNA, 25 bp, Saccharomyces pastorianus
caaaggattctcagggtcggactta

SEQ ID NO: 16480 - DNA, 25 bp, Saccharomyces pastorianus
tccaccgatcatgaagttactgcga

SEQ ID NO: 16481 - DNA, 25 bp, Saccharomyces pastorianus
aaaagattccttgtttcgctacctg

SEQ ID NO: 16482 - DNA, 25 bp, Saccharomyces pastorianus
ttcttgagagaacgttcttccaccg

SEQ ID NO: 16483 - DNA, 25 bp, Saccharomyces pastorianus
aaggcagctaattgacagtggcaaa

SEQ ID NO: 16484 - DNA, 25 bp, Saccharomyces pastorianus
gggtcggacttaaaagagctctgca

SEQ ID NO: 16485 - DNA, 25 bp, Saccharomyces pastorianus
agagccttgcataattttcattgat

SEQ ID NO: 16486 - DNA, 25 bp, Saccharomyces pastorianus
gctcatacagtatcacggcatatca

SEQ ID NO: 16487 - DNA, 25 bp, Saccharomyces pastorianus
aatcactgcctctgctgtaaattta

SEQ ID NO: 16488 - DNA, 25 bp, Saccharomyces pastorianus
atcacttttgtatccggttctaatg

SEQ ID NO: 16489 - DNA, 25 bp, Saccharomyces pastorianus
gtaaacaaatcactgcctctgctgt

SEQ ID NO: 16490 - DNA, 25 bp, Saccharomyces pastorianus
actcaatgcctactgtttcttcaag

SEQ ID NO: 16491 - DNA, 25 bp, Saccharomyces pastorianus
gagcaacaacagcacgtactttgtg

SEQ ID NO: 16492 - DNA, 25 bp, Saccharomyces pastorianus
gcgacaatggtacgctcatacagta

SEQ ID NO: 16493 - DNA, 25 bp, Saccharomyces pastorianus
gaatcaatcataccacctttaacaa

SEQ ID NO: 16494 - DNA, 25 bp, Saccharomyces pastorianus
ttgtgtattctcttatggtcctcat

SEQ ID NO: 16495 - DNA, 25 bp, Saccharomyces pastorianus
aaggaccacgaaagcttgcatcagt

SEQ ID NO: 16496 - DNA, 25 bp, Saccharomyces pastorianus
agacatctcttcttacactcaatgc

SEQ ID NO: 16497 - DNA, 25 bp, Saccharomyces pastorianus
atgtatgtagacgttcctggtgaga

SEQ ID NO: 16498 - DNA, 25 bp, Saccharomyces pastorianus
agaaacagacctatcgtatccacga

SEQ ID NO: 16499 - DNA, 25 bp, Saccharomyces pastorianus
gtctgcttctacatttactttctca

SEQ ID NO: 16500 - DNA, 25 bp, Saccharomyces pastorianus
gttatacactaacggcgcaggtgca

SEQ ID NO: 16501 - DNA, 25 bp, Saccharomyces pastorianus
tactttctcaggcatacttgtgata

SEQ ID NO: 16502 - DNA, 25 bp, Saccharomyces pastorianus
ttcagttcctagttctaagggcttt

SEQ ID NO: 16503 - DNA, 25 bp, Saccharomyces pastorianus
gacacacaacttttcaatagagccg

SEQ ID NO: 16504 - DNA, 25 bp, Saccharomyces pastorianus
atggccacaggttaagtctgcttct

SEQ ID NO: 16505 - DNA, 25 bp, Saccharomyces pastorianus
aagcacaaaccgttatggccacagg

SEQ ID NO: 16506 - DNA, 25 bp, Saccharomyces pastorianus
gataggcgctgttggtatatccact

SEQ ID NO: 16507 - DNA, 25 bp, Saccharomyces pastorianus
ttggcactggttcatctagaggcta

SEQ ID NO: 16508 - DNA, 25 bp, Saccharomyces pastorianus
gatggatactgaaaactctgacaac

SEQ ID NO: 16509 - DNA, 25 bp, Saccharomyces pastorianus
tccgcgcaatagcacacctaacaaa

SEQ ID NO: 16510 - DNA, 25 bp, Saccharomyces pastorianus
gacgacatttctgtgtctagtccta

SEQ ID NO: 16511 - DNA, 25 bp, Saccharomyces pastorianus
aacagtaactcgttcatgcgctcca

SEQ ID NO: 16512 - DNA, 25 bp, Saccharomyces pastorianus
taagggcgaaagcactccgcgcaat

SEQ ID NO: 16513 - DNA, 25 bp, Saccharomyces pastorianus
ggttaaaccaatatcatccctcaca

SEQ ID NO: 16514 - DNA, 25 bp, Saccharomyces pastorianus
gccaatcttgcaagaccgatggata

SEQ ID NO: 16515 - DNA, 25 bp, Saccharomyces pastorianus
atccctcacaaacacagtcacaaga

SEQ ID NO: 16516 - DNA, 25 bp, Saccharomyces pastorianus
gctccatcgtttcttccttaatggt

SEQ ID NO: 16517 - DNA, 25 bp, Saccharomyces pastorianus
acgatttgtttaaagctgctgctga

SEQ ID NO: 16518 - DNA, 25 bp, Saccharomyces pastorianus
ggccaaatccagaagaggctccaat

SEQ ID NO: 16519 - DNA, 25 bp, Saccharomyces pastorianus
tacggtctatacaagcaagctacag

SEQ ID NO: 16520 - DNA, 25 bp, Saccharomyces pastorianus
aaccctcaaccgatgaactactgga

SEQ ID NO: 16521 - DNA, 25 bp, Saccharomyces pastorianus
aagctacagtaggagacaatgacaa

SEQ ID NO: 16522 - DNA, 25 bp, Saccharomyces pastorianus
ggccaaggctgtcaacgagctacca

SEQ ID NO: 16523 - DNA, 25 bp, Saccharomyces pastorianus
ggaactttacggtctatacaagcaa

SEQ ID NO: 16524 - DNA, 25 bp, Saccharomyces pastorianus
agacaatgacaaggaaaagccaggt

SEQ ID NO: 16525 - DNA, 25 bp, Saccharomyces pastorianus
caacaaaaccctcaaccgatgaact

SEQ ID NO: 16526 - DNA, 25 bp, Saccharomyces pastorianus
aaaggccaaggctgtcaacgagcta

SEQ ID NO: 16527 - DNA, 25 bp, Saccharomyces pastorianus
tgccgaaaaggagtacatcgcgtat

SEQ ID NO: 16528 - DNA, 25 bp, Saccharomyces pastorianus
gaactactggaactttacggtctat

SEQ ID NO: 16529 - DNA, 25 bp, Saccharomyces pastorianus
tattcgaagaaaaggccaaggctgt

SEQ ID NO: 16530 - DNA, 25 bp, Saccharomyces pastorianus
gccttatttctggttagtactcact

SEQ ID NO: 16531 - DNA, 25 bp, Saccharomyces pastorianus
gggtcgtacgtcatgttccatttga

SEQ ID NO: 16532 - DNA, 25 bp, Saccharomyces pastorianus
agaacttaagccatttccttctgcc

SEQ ID NO: 16533 - DNA, 25 bp, Saccharomyces pastorianus
gattatcgtgccaattgccttattt

SEQ ID NO: 16534 - DNA, 25 bp, Saccharomyces pastorianus
acgtggtcgtcatcacactgttgaa

SEQ ID NO: 16535 - DNA, 25 bp, Saccharomyces pastorianus
ggcagtgcttcttcgtcaatcaaaa

SEQ ID NO: 16536 - DNA, 25 bp, Saccharomyces pastorianus
gttttcctggaactgctttttgaca

SEQ ID NO: 16537 - DNA, 25 bp, Saccharomyces pastorianus
tggaccctgactaacatgacttacg

SEQ ID NO: 16538 - DNA, 25 bp, Saccharomyces pastorianus
acattcgttgctgttgttccaaagt

SEQ ID NO: 16539 - DNA, 25 bp, Saccharomyces pastorianus
tatttttcaacttgttccctggtgt

SEQ ID NO: 16540 - DNA, 25 bp, Saccharomyces pastorianus
gcttggatcattcacgtggtcgtca

SEQ ID NO: 16541 - DNA, 25 bp, Saccharomyces pastorianus
aaacatttgctaaaggcgcggacca

SEQ ID NO: 16542 - DNA, 25 bp, Saccharomyces pastorianus
aaccgatccgctccaaatcatattt

SEQ ID NO: 16543 - DNA, 25 bp, Saccharomyces pastorianus
acctcgggtggtcaaaactcactgt

SEQ ID NO: 16544 - DNA, 25 bp, Saccharomyces pastorianus
aaacgcgtggattctccgaagtcta

SEQ ID NO: 16545 - DNA, 25 bp, Saccharomyces pastorianus
agaatagacacatcctccatacatt

SEQ ID NO: 16546 - DNA, 25 bp, Saccharomyces pastorianus
tgtgcacctgtgttttaattccgcc

SEQ ID NO: 16547 - DNA, 25 bp, Saccharomyces pastorianus
atggcaatcgccctttcaaatgcac

SEQ ID NO: 16548 - DNA, 25 bp, Saccharomyces pastorianus
gcacacgatacccattcagagaata

SEQ ID NO: 16549 - DNA, 25 bp, Saccharomyces pastorianus
gctgttctttttcttttccattgat

SEQ ID NO: 16550 - DNA, 25 bp, Saccharomyces pastorianus
atcatatttatcgttcccaagctcc

SEQ ID NO: 16551 - DNA, 25 bp, Saccharomyces pastorianus
attcgtatgactcccaaacgcgtgg

SEQ ID NO: 16552 - DNA, 25 bp, Saccharomyces pastorianus
aagcaacctgcttcctcagaacgtg

SEQ ID NO: 16553 - DNA, 25 bp, Saccharomyces pastorianus
gaaccacatttcaactgcaagggag

SEQ ID NO: 16554 - DNA, 25 bp, Saccharomyces pastorianus
gtggcgctagaggtggattcaacat

SEQ ID NO: 16555 - DNA, 25 bp, Saccharomyces pastorianus
aaactggtgtaagaatggcggccaa

SEQ ID NO: 16556 - DNA, 25 bp, Saccharomyces pastorianus
ttcacgtcagaacagatcctcctat

SEQ ID NO: 16557 - DNA, 25 bp, Saccharomyces pastorianus
agatcctcctattctatcagtgcaa

SEQ ID NO: 16558 - DNA, 25 bp, Saccharomyces pastorianus
agaagtccagaaacggtgcaaccag

SEQ ID NO: 16559 - DNA, 25 bp, Saccharomyces pastorianus
cagaacgtgtgcctactttgaacca

SEQ ID NO: 16560 - DNA, 25 bp, Saccharomyces pastorianus
aatgagttgaacaggccgagtataa

SEQ ID NO: 16561 - DNA, 25 bp, Saccharomyces pastorianus
gtgaacaagccttttaagaagccca

SEQ ID NO: 16562 - DNA, 25 bp, Saccharomyces pastorianus
ttcaagtaacagcatttcacgtcag

SEQ ID NO: 16563 - DNA, 25 bp, Saccharomyces pastorianus
gttacacgagtcaacagatcctatt

SEQ ID NO: 16564 - DNA, 25 bp, Saccharomyces pastorianus
gaacctcacttcagatacgtcttta

SEQ ID NO: 16565 - DNA, 25 bp, Saccharomyces pastorianus
gcggcttcctttagaaaccttgacg

SEQ ID NO: 16566 - DNA, 25 bp, Saccharomyces pastorianus
gactctcccactgaatattttgcaa

SEQ ID NO: 16567 - DNA, 25 bp, Saccharomyces pastorianus
tttccttcactcaagctgtagcatg

SEQ ID NO: 16568 - DNA, 25 bp, Saccharomyces pastorianus
acatgaccttgttgttttccttcac

SEQ ID NO: 16569 - DNA, 25 bp, Saccharomyces pastorianus
gagggcatccaagctgctaaagagt

SEQ ID NO: 16570 - DNA, 25 bp, Saccharomyces pastorianus
aataccgaggtgatggcggcttcct

SEQ ID NO: 16571 - DNA, 25 bp, Saccharomyces pastorianus
atcccggtgttctctctgtgagaaa

SEQ ID NO: 16572 - DNA, 25 bp, Saccharomyces pastorianus
cttgacgagctgaaggccttggcag

SEQ ID NO: 16573 - DNA, 25 bp, Saccharomyces pastorianus
catggatttctacaaggagcggtca

SEQ ID NO: 16574 - DNA, 25 bp, Saccharomyces pastorianus
tccgaattcgtttccaaatttcaag

SEQ ID NO: 16575 - DNA, 25 bp, Saccharomyces pastorianus
tacgagtgcaatactggaaccagct

SEQ ID NO: 16576 - DNA, 25 bp, Saccharomyces pastorianus
gaaagctgccgctacattggctaag

SEQ ID NO: 16577 - DNA, 25 bp, Saccharomyces pastorianus
aaagactcttactcagccgcataag

SEQ ID NO: 16578 - DNA, 25 bp, Saccharomyces pastorianus
gagtgcactgcaaaccattaaaggt

SEQ ID NO: 16579 - DNA, 25 bp, Saccharomyces pastorianus
gctaaacctgaaagctgccgctaca

SEQ ID NO: 16580 - DNA, 25 bp, Saccharomyces pastorianus
gtacttcaacccatttgctaatata

SEQ ID NO: 16581 - DNA, 25 bp, Saccharomyces pastorianus
attggctaagcattacaccctagag

SEQ ID NO: 16582 - DNA, 25 bp, Saccharomyces pastorianus
gccgcataagtaaatcgagtgcact

SEQ ID NO: 16583 - DNA, 25 bp, Saccharomyces pastorianus
gagataaccgctttgagttacgcag

SEQ ID NO: 16584 - DNA, 25 bp, Saccharomyces pastorianus
ccgctttgagttacgcaggtgatat

SEQ ID NO: 16585 - DNA, 25 bp, Saccharomyces pastorianus
gaaagccttcgatagttgcagatat

SEQ ID NO: 16586 - DNA, 25 bp, Saccharomyces pastorianus
atgctgttttgctttactctagtag

SEQ ID NO: 16587 - DNA, 25 bp, Saccharomyces pastorianus
tttatgtattccttatgccgcgggc

SEQ ID NO: 16588 - DNA, 25 bp, Saccharomyces pastorianus
aaaagtcatcgccatacctgtacta

SEQ ID NO: 16589 - DNA, 25 bp, Saccharomyces pastorianus
aaaacacgccgcatacaactgtatt

SEQ ID NO: 16590 - DNA, 25 bp, Saccharomyces pastorianus
gctatcgcatattcatcgtgccatg

SEQ ID NO: 16591 - DNA, 25 bp, Saccharomyces pastorianus
atacttcacggattgcgatatttgt

SEQ ID NO: 16592 - DNA, 25 bp, Saccharomyces pastorianus
gtagaggctttctttcagcattaca

SEQ ID NO: 16593 - DNA, 25 bp, Saccharomyces pastorianus
ggccttcctctctgaatattctaag

SEQ ID NO: 16594 - DNA, 25 bp, Saccharomyces pastorianus
ggttaacggctcaaagacattttca

SEQ ID NO: 16595 - DNA, 25 bp, Saccharomyces pastorianus
tttagggcgctcttttcatttgatt

SEQ ID NO: 16596 - DNA, 25 bp, Saccharomyces pastorianus
catggtcaagggatctcgttacgaa

SEQ ID NO: 16597 - DNA, 25 bp, Saccharomyces pastorianus
ttgcctgaaggccaactattttttg

SEQ ID NO: 16598 - DNA, 25 bp, Saccharomyces pastorianus
gaaggctcccaagaggaatccggaa

SEQ ID NO: 16599 - DNA, 25 bp, Saccharomyces pastorianus
ataacgtttgatggccaacctgcca

SEQ ID NO: 16600 - DNA, 25 bp, Saccharomyces pastorianus
atgtgtcattgagaccgacttggta

SEQ ID NO: 16601 - DNA, 25 bp, Saccharomyces pastorianus
gaggtgaaacctgaatcgtcatcaa

SEQ ID NO: 16602 - DNA, 25 bp, Saccharomyces pastorianus
gtcaagtcttagatccatcggtgct

SEQ ID NO: 16603 - DNA, 25 bp, Saccharomyces pastorianus
ggattttgcgccacccgtaggatat

SEQ ID NO: 16604 - DNA, 25 bp, Saccharomyces pastorianus
gacttggtaacggattttgcgccac

SEQ ID NO: 16605 - DNA, 25 bp, Saccharomyces pastorianus
aacctgccaaactagatttgcctga

SEQ ID NO: 16606 - DNA, 25 bp, Saccharomyces pastorianus
ggatttccaatggttctaccgaagg

SEQ ID NO: 16607 - DNA, 25 bp, Saccharomyces pastorianus
gttttcaattagatcggtaccagtg

SEQ ID NO: 16608 - DNA, 25 bp, Saccharomyces pastorianus
atcccagtgttgcacggaagatcca

SEQ ID NO: 16609 - DNA, 25 bp, Saccharomyces pastorianus
tcgacgaagagtgccgcttgcatat

SEQ ID NO: 16610 - DNA, 25 bp, Saccharomyces pastorianus
gacgtcgagttgattcattacggaa

SEQ ID NO: 16611 - DNA, 25 bp, Saccharomyces pastorianus
gaatacattgatgacgcagccgaaa

SEQ ID NO: 16612 - DNA, 25 bp, Saccharomyces pastorianus
agaattacaacactcttacgcccaa

SEQ ID NO: 16613 - DNA, 25 bp, Saccharomyces pastorianus
ataccggaagatcgttgcaaaattt

SEQ ID NO: 16614 - DNA, 25 bp, Saccharomyces pastorianus
tccataccattgaagacgtcgagtt

SEQ ID NO: 16615 - DNA, 25 bp, Saccharomyces pastorianus
ttacgcccaatgacaaactggttat

SEQ ID NO: 16616 - DNA, 25 bp, Saccharomyces pastorianus
tctaagccagagattaacgacgagt

SEQ ID NO: 16617 - DNA, 25 bp, Saccharomyces pastorianus
ataaggcttctttgaatgccatcag

SEQ ID NO: 16618 - DNA, 25 bp, Saccharomyces pastorianus
tgtacaatcaccattatagctccgc

SEQ ID NO: 16619 - DNA, 25 bp, Saccharomyces pastorianus
atcaatttcgccatcagtgctggtt

SEQ ID NO: 16620 - DNA, 25 bp, Saccharomyces pastorianus
ctggatccactgtgtgatcgcatgg

SEQ ID NO: 16621 - DNA, 25 bp, Saccharomyces pastorianus
gtcacagggtttttcgcattatcta

SEQ ID NO: 16622 - DNA, 25 bp, Saccharomyces pastorianus
aacagttgggtcgtgaaggtatcct

SEQ ID NO: 16623 - DNA, 25 bp, Saccharomyces pastorianus
tgatcattgcaccatatgttcctcc

SEQ ID NO: 16624 - DNA, 25 bp, Saccharomyces pastorianus
atcaaggccggcgtttttgtcacag

SEQ ID NO: 16625 - DNA, 25 bp, Saccharomyces pastorianus
acggcgagtccgtttattcaagcat

SEQ ID NO: 16626 - DNA, 25 bp, Saccharomyces pastorianus
tatgttcctccatcaaacggcgagt

SEQ ID NO: 16627 - DNA, 25 bp, Saccharomyces pastorianus
gcctccaggtgatgcgtatctacta

SEQ ID NO: 16628 - DNA, 25 bp, Saccharomyces pastorianus
tgaaggtatcctgccgttttccaac

SEQ ID NO: 16629 - DNA, 25 bp, Saccharomyces pastorianus
atttgatccgtatgctgagtttata

SEQ ID NO: 16630 - DNA, 25 bp, Saccharomyces pastorianus
taacgacatcaatggatcactcacc

SEQ ID NO: 16631 - DNA, 25 bp, Saccharomyces pastorianus
gtccgtgagaaaacatttgatccgt

SEQ ID NO: 16632 - DNA, 25 bp, Saccharomyces pastorianus
gcctcaactgctccttttgatagta

SEQ ID NO: 16633 - DNA, 25 bp, Saccharomyces pastorianus
agtgcataacccacaagtaccggcc

SEQ ID NO: 16634 - DNA, 25 bp, Saccharomyces pastorianus
gtatatcatcagtggatgccctaat

SEQ ID NO: 16635 - DNA, 25 bp, Saccharomyces pastorianus
caggcggaattcatctctttataca

SEQ ID NO: 16636 - DNA, 25 bp, Saccharomyces pastorianus
gttcagctgtttcacaaccatgaca

SEQ ID NO: 16637 - DNA, 25 bp, Saccharomyces pastorianus
gggcaaaaatcgactgacggcagaa

SEQ ID NO: 16638 - DNA, 25 bp, Saccharomyces pastorianus
gatatgcaggtagccgttcagctgt

SEQ ID NO: 16639 - DNA, 25 bp, Saccharomyces pastorianus
atctgataccttttgaggtccgtga

SEQ ID NO: 16640 - DNA, 25 bp, Saccharomyces pastorianus
aagtggctacagaatgggaccctga

SEQ ID NO: 16641 - DNA, 25 bp, Saccharomyces pastorianus
gttcaacgatatttctaaccaagag

SEQ ID NO: 16642 - DNA, 25 bp, Saccharomyces pastorianus
aaagattcttcttgactggcatctg

SEQ ID NO: 16643 - DNA, 25 bp, Saccharomyces pastorianus
gtctaaccaccaacacggttgaaat

SEQ ID NO: 16644 - DNA, 25 bp, Saccharomyces pastorianus
ataaccagacagctagaggccaaga

SEQ ID NO: 16645 - DNA, 25 bp, Saccharomyces pastorianus
aagccagagactgtctaaccaccaa

SEQ ID NO: 16646 - DNA, 25 bp, Saccharomyces pastorianus
agaggccaagaaaaggttcaacgat

SEQ ID NO: 16647 - DNA, 25 bp, Saccharomyces pastorianus
gactggcatctgatcgactttgtag

SEQ ID NO: 16648 - DNA, 25 bp, Saccharomyces pastorianus
aagagttccaaccatcattcaacgg

SEQ ID NO: 16649 - DNA, 25 bp, Saccharomyces pastorianus
gggactgttgaaatcgagaacgaaa

SEQ ID NO: 16650 - DNA, 25 bp, Saccharomyces pastorianus
ggaccctgaatttataaccagacag

SEQ ID NO: 16651 - DNA, 25 bp, Saccharomyces pastorianus
tatctctaggtttcggtaccgtcgg

SEQ ID NO: 16652 - DNA, 25 bp, Saccharomyces pastorianus
tacttcatcggtaactacgcctctt

SEQ ID NO: 16653 - DNA, 25 bp, Saccharomyces pastorianus
ttggtcgaagctattcctatctgga

SEQ ID NO: 16654 - DNA, 25 bp, Saccharomyces pastorianus
accctgctgaaactctatctctagg

SEQ ID NO: 16655 - DNA, 25 bp, Saccharomyces pastorianus
cggttacgatttcccatggtctttg

SEQ ID NO: 16656 - DNA, 25 bp, Saccharomyces pastorianus
tgggattactgcctagacaccgagt

SEQ ID NO: 16657 - DNA, 25 bp, Saccharomyces pastorianus
cgaagtcccattcccatctattaaa

SEQ ID NO: 16658 - DNA, 25 bp, Saccharomyces pastorianus
agatatgccgctccattcggtctat

SEQ ID NO: 16659 - DNA, 25 bp, Saccharomyces pastorianus
atacgtcatgtacaccggtcactta

SEQ ID NO: 16660 - DNA, 25 bp, Saccharomyces pastorianus
ggtcacttacatttgttcactctat

SEQ ID NO: 16661 - DNA, 25 bp, Saccharomyces pastorianus
tgttgactctcattccggttacgat

SEQ ID NO: 16662 - DNA, 25 bp, Saccharomyces pastorianus
aagattaacgcgaatggcaccctca

SEQ ID NO: 16663 - DNA, 25 bp, Saccharomyces pastorianus
aaattccgctttgggtgacgctctc

SEQ ID NO: 16664 - DNA, 25 bp, Saccharomyces pastorianus
agtgcaggatccaggcgtcttgacc

SEQ ID NO: 16665 - DNA, 25 bp, Saccharomyces pastorianus
ggatctttcgatctaagctcacctt

SEQ ID NO: 16666 - DNA, 25 bp, Saccharomyces pastorianus
tagaaactttctatcctgcttggat

SEQ ID NO: 16667 - DNA, 25 bp, Saccharomyces pastorianus
tgacgctctccatgggtatcaggac

SEQ ID NO: 16668 - DNA, 25 bp, Saccharomyces pastorianus
gaactttggccgtgctgaacgtgga

SEQ ID NO: 16669 - DNA, 25 bp, Saccharomyces pastorianus
aaaacgcgctattgcctattgtcca

SEQ ID NO: 16670 - DNA, 25 bp, Saccharomyces pastorianus
tattagcgcccattctggttggaac

SEQ ID NO: 16671 - DNA, 25 bp, Saccharomyces pastorianus
tcacagctgtactctttggtgcaga

SEQ ID NO: 16672 - DNA, 25 bp, Saccharomyces pastorianus
gacgcttacagaggcccagctaata

SEQ ID NO: 16673 - DNA, 25 bp, Saccharomyces pastorianus
aatgatatctatcacctggacggtg

SEQ ID NO: 16674 - DNA, 25 bp, Saccharomyces pastorianus
aagtggtcactcttttcgaaggcta

SEQ ID NO: 16675 - DNA, 25 bp, Saccharomyces pastorianus
ggttattactatcatcctgcttgtg

SEQ ID NO: 16676 - DNA, 25 bp, Saccharomyces pastorianus
aggtttggtcacttcagtactggaa

SEQ ID NO: 16677 - DNA, 25 bp, Saccharomyces pastorianus
aatacccattatgttcgacgcactg

SEQ ID NO: 16678 - DNA, 25 bp, Saccharomyces pastorianus
taaaacctcgcattctttggaccca

SEQ ID NO: 16679 - DNA, 25 bp, Saccharomyces pastorianus
ggtggctctcaatcgtctaaataca

SEQ ID NO: 16680 - DNA, 25 bp, Saccharomyces pastorianus
actggcccgcagaggaaccgtttga

SEQ ID NO: 16681 - DNA, 25 bp, Saccharomyces pastorianus
gaaccgtttgatccgtacatggctc

SEQ ID NO: 16682 - DNA, 25 bp, Saccharomyces pastorianus
gttttactacgtctgcttggaccaa

SEQ ID NO: 16683 - DNA, 25 bp, Saccharomyces pastorianus
agaaactcgagctggtgcctactaa

SEQ ID NO: 16684 - DNA, 25 bp, Saccharomyces pastorianus
cagctcataactttttgcatacgat

SEQ ID NO: 16685 - DNA, 25 bp, Saccharomyces pastorianus
aaagcgatttccatattttcagtga

SEQ ID NO: 16686 - DNA, 25 bp, Saccharomyces pastorianus
tctcatccttacgttttggcagtta

SEQ ID NO: 16687 - DNA, 25 bp, Saccharomyces pastorianus
gcctttgtcattttcatttctggag

SEQ ID NO: 16688 - DNA, 25 bp, Saccharomyces pastorianus
gagcttgtacgttgtgtactcggca

SEQ ID NO: 16689 - DNA, 25 bp, Saccharomyces pastorianus
aagagggtcattttggcagctcata

SEQ ID NO: 16690 - DNA, 25 bp, Saccharomyces pastorianus
agcagttcgcatattctcatcctta

SEQ ID NO: 16691 - DNA, 25 bp, Saccharomyces pastorianus
catgtttagggcacactctcaaagt

SEQ ID NO: 16692 - DNA, 25 bp, Saccharomyces pastorianus
actcggcaataaggttcgcatgttt

SEQ ID NO: 16693 - DNA, 25 bp, Saccharomyces pastorianus
tagtgtcgattcagagcctttgtca

SEQ ID NO: 16694 - DNA, 25 bp, Saccharomyces pastorianus
gtaggtcccttgatatctgactttg

SEQ ID NO: 16695 - DNA, 25 bp, Saccharomyces pastorianus
gaaactatcgccatacgtgaaaaag

SEQ ID NO: 16696 - DNA, 25 bp, Saccharomyces pastorianus
gaatactcatttcaggactttagtg

SEQ ID NO: 16697 - DNA, 25 bp, Saccharomyces pastorianus
ctttagtgtcttgaagtccttggac

SEQ ID NO: 16698 - DNA, 25 bp, Saccharomyces pastorianus
aagcaatctaattcttctcagcctc

SEQ ID NO: 16699 - DNA, 25 bp, Saccharomyces pastorianus
gatgaccgtgagaaaagcagtgcca

SEQ ID NO: 16700 - DNA, 25 bp, Saccharomyces pastorianus
aacgtcgaagaaggactcggcacaa

SEQ ID NO: 16701 - DNA, 25 bp, Saccharomyces pastorianus
agcgcagtcgtcgttcaaattcaaa

SEQ ID NO: 16702 - DNA, 25 bp, Saccharomyces pastorianus
aagcagtgccaccaagactaagaat

SEQ ID NO: 16703 - DNA, 25 bp, Saccharomyces pastorianus
acaaccccagacttgaaactatcgc

SEQ ID NO: 16704 - DNA, 25 bp, Saccharomyces pastorianus
gaaaaagttcacacaaacgtcgaag

SEQ ID NO: 16705 - DNA, 25 bp, Saccharomyces pastorianus
tagttggtgctggtgacaaggtcaa

SEQ ID NO: 16706 - DNA, 25 bp, Saccharomyces pastorianus
aagacagataatcctgccggactcc

SEQ ID NO: 16707 - DNA, 25 bp, Saccharomyces pastorianus
acaagccacgacaggtacgacgggt

SEQ ID NO: 16708 - DNA, 25 bp, Saccharomyces pastorianus
gtaaagttaacgctgccacaacctc

SEQ ID NO: 16709 - DNA, 25 bp, Saccharomyces pastorianus
aacgccttaagaagatcgggccaag

SEQ ID NO: 16710 - DNA, 25 bp, Saccharomyces pastorianus
ggaacactacaatcagtatcaccac

SEQ ID NO: 16711 - DNA, 25 bp, Saccharomyces pastorianus
atgaatgccatcctaacagacgtaa

SEQ ID NO: 16712 - DNA, 25 bp, Saccharomyces pastorianus
gccaagttgccagtgaccctaataa

SEQ ID NO: 16713 - DNA, 25 bp, Saccharomyces pastorianus
tggattcgctgctggttgaccaaat

SEQ ID NO: 16714 - DNA, 25 bp, Saccharomyces pastorianus
tgagcaagttaccatcgagttaaag

SEQ ID NO: 16715 - DNA, 25 bp, Saccharomyces pastorianus
gaccaaatgcaactaaacgccttaa

SEQ ID NO: 16716 - DNA, 25 bp, Saccharomyces pastorianus
ggtacgacgggtgacaatatagcaa

SEQ ID NO: 16717 - DNA, 25 bp, Saccharomyces pastorianus
gacccactttgcaacaattgacctt

SEQ ID NO: 16718 - DNA, 25 bp, Saccharomyces pastorianus
ggttgaaattagacccactttgcaa

SEQ ID NO: 16719 - DNA, 25 bp, Saccharomyces pastorianus
gtgcatcctgatgaaactggttgaa

SEQ ID NO: 16720 - DNA, 25 bp, Saccharomyces pastorianus
agtcgattggttggtcactcaagac

SEQ ID NO: 16721 - DNA, 25 bp, Saccharomyces pastorianus
gtgaacgactcgaacacttttagtt

SEQ ID NO: 16722 - DNA, 25 bp, Saccharomyces pastorianus
aaatattcacagcagttttccaaac

SEQ ID NO: 16723 - DNA, 25 bp, Saccharomyces pastorianus
ggtttatgcgcggttgcaatactat

SEQ ID NO: 16724 - DNA, 25 bp, Saccharomyces pastorianus
aacatgtctgttctaggtggtgtag

SEQ ID NO: 16725 - DNA, 25 bp, Saccharomyces pastorianus
agtggattgctttgctcattctaat

SEQ ID NO: 16726 - DNA, 25 bp, Saccharomyces pastorianus
gtcattatcggcaaatttggcgcat

SEQ ID NO: 16727 - DNA, 25 bp, Saccharomyces pastorianus
gtacattaccgctttgattctggtt

SEQ ID NO: 16728 - DNA, 25 bp, Saccharomyces pastorianus
atttttccaaagatatccgccttca

SEQ ID NO: 16729 - DNA, 25 bp, Saccharomyces pastorianus
gggtgttctcttacctaaaggtcat

SEQ ID NO: 16730 - DNA, 25 bp, Saccharomyces pastorianus
gacaatctgattgcatccaagaagg

SEQ ID NO: 16731 - DNA, 25 bp, Saccharomyces pastorianus
agctggcattgcgttatggagtgca

SEQ ID NO: 16732 - DNA, 25 bp, Saccharomyces pastorianus
tccgccttcaatcaaatattcttcg

SEQ ID NO: 16733 - DNA, 25 bp, Saccharomyces pastorianus
acatccagtcacacaacggttacat

SEQ ID NO: 16734 - DNA, 25 bp, Saccharomyces pastorianus
aacggttacatgatcctaaatactc

SEQ ID NO: 16735 - DNA, 25 bp, Saccharomyces pastorianus
gcaagactttttaccacctatcgat

SEQ ID NO: 16736 - DNA, 25 bp, Saccharomyces pastorianus
ggtatccacatcaacaaaggccgtt

SEQ ID NO: 16737 - DNA, 25 bp, Saccharomyces pastorianus
tgccaaccccttcttgccaaataaa

SEQ ID NO: 16738 - DNA, 25 bp, Saccharomyces pastorianus
atattcttcggtatccacatcaaca

SEQ ID NO: 16739 - DNA, 25 bp, Saccharomyces pastorianus
acaacggcagcttgagattcgacaa

SEQ ID NO: 16740 - DNA, 25 bp, Saccharomyces pastorianus
ataactcggtcaaacttgtctccca

SEQ ID NO: 16741 - DNA, 25 bp, Saccharomyces pastorianus
tgcccctctgtggatgcgttacaaa

SEQ ID NO: 16742 - DNA, 25 bp, Saccharomyces pastorianus
aacttctttatctattcttgcccat

SEQ ID NO: 16743 - DNA, 25 bp, Saccharomyces pastorianus
tcaaggtcgattccgagaggcctat

SEQ ID NO: 16744 - DNA, 25 bp, Saccharomyces pastorianus
gtatgcttccaacaagaacgggttc

SEQ ID NO: 16745 - DNA, 25 bp, Saccharomyces pastorianus
gatggtgatcgtactgttgctcaaa

SEQ ID NO: 16746 - DNA, 25 bp, Saccharomyces pastorianus
aaatcgtcattgtccgccaaaagtg

SEQ ID NO: 16747 - DNA, 25 bp, Saccharomyces pastorianus
ctgggcccagctatacgatatttaa

SEQ ID NO: 16748 - DNA, 25 bp, Saccharomyces pastorianus
gcgttacaaatcgacttgcctgggc

SEQ ID NO: 16749 - DNA, 25 bp, Saccharomyces pastorianus
gaagatgaccttgaccgtggttcca

SEQ ID NO: 16750 - DNA, 25 bp, Saccharomyces pastorianus
aatcaaaccctgtcttacgtggctt

SEQ ID NO: 16751 - DNA, 25 bp, Saccharomyces pastorianus
gaaagagaggccacattcactacca

SEQ ID NO: 16752 - DNA, 25 bp, Saccharomyces pastorianus
ggctaaggatcctatccctagtgat

SEQ ID NO: 16753 - DNA, 25 bp, Saccharomyces pastorianus
cctgcggatttgttaggtatctatc

SEQ ID NO: 16754 - DNA, 25 bp, Saccharomyces pastorianus
gttatgctgtttactttgactacca

SEQ ID NO: 16755 - DNA, 25 bp, Saccharomyces pastorianus
gtggctttgccatcacaacagctat

SEQ ID NO: 16756 - DNA, 25 bp, Saccharomyces pastorianus
tgactgtatatcctcaacctgcgga

SEQ ID NO: 16757 - DNA, 25 bp, Saccharomyces pastorianus
aagtcacggaattcttatctgtaga

SEQ ID NO: 16758 - DNA, 25 bp, Saccharomyces pastorianus
gccaagagccatgccaaggaggtca

SEQ ID NO: 16759 - DNA, 25 bp, Saccharomyces pastorianus
gaaagactgtccatgcaacaaggta

SEQ ID NO: 16760 - DNA, 25 bp, Saccharomyces pastorianus
tatcaaagatccatccctgaagcca

SEQ ID NO: 16761 - DNA, 25 bp, Saccharomyces pastorianus
ggatggcaagaactaccttcattaa

SEQ ID NO: 16762 - DNA, 25 bp, Saccharomyces pastorianus
tattgtatgatttgacgccacccga

SEQ ID NO: 16763 - DNA, 25 bp, Saccharomyces pastorianus
ttagacacggttttcaacatggacg

SEQ ID NO: 16764 - DNA, 25 bp, Saccharomyces pastorianus
aggtcatcactgaattcggtgcttt

SEQ ID NO: 16765 - DNA, 25 bp, Saccharomyces pastorianus
ggcgtcaacgttatgtatgctctca

SEQ ID NO: 16766 - DNA, 25 bp, Saccharomyces pastorianus
acctgtattggtgtgctgtgaaagt

SEQ ID NO: 16767 - DNA, 25 bp, Saccharomyces pastorianus
gacgccacccgaatacatcaaaaag

SEQ ID NO: 16768 - DNA, 25 bp, Saccharomyces pastorianus
gtattcttgggagcacattctattt

SEQ ID NO: 16769 - DNA, 25 bp, Saccharomyces pastorianus
ggtgcgttactaaaccagttcgtga

SEQ ID NO: 16770 - DNA, 25 bp, Saccharomyces pastorianus
agagcgggtacagcaatgttggcaa

SEQ ID NO: 16771 - DNA, 25 bp, Saccharomyces pastorianus
acatttaacgaattggcggatccga

SEQ ID NO: 16772 - DNA, 25 bp, Saccharomyces pastorianus
atggccaaggcagatggtccgaaga

SEQ ID NO: 16773 - DNA, 25 bp, Saccharomyces pastorianus
aagaattggtccgtgccgaagccga

SEQ ID NO: 16774 - DNA, 25 bp, Saccharomyces pastorianus
gtacaaggatcctcaatcccctaag

SEQ ID NO: 16775 - DNA, 25 bp, Saccharomyces pastorianus
aaaatcgctttgatcgctggttacg

SEQ ID NO: 16776 - DNA, 25 bp, Saccharomyces pastorianus
agatccaagttgagagccgctttca

SEQ ID NO: 16777 - DNA, 25 bp, Saccharomyces pastorianus
gaacacgaacatgccgatcatcaac

SEQ ID NO: 16778 - DNA, 25 bp, Saccharomyces pastorianus
tttgattccatcatcgaacactccg

SEQ ID NO: 16779 - DNA, 25 bp, Saccharomyces pastorianus
gccgctttcaactaccagtttgatt

SEQ ID NO: 16780 - DNA, 25 bp, Saccharomyces pastorianus
aatggactctagattccgcccaagt

SEQ ID NO: 16781 - DNA, 25 bp, Saccharomyces pastorianus
aggtgaaaccagacctgcctacgac

SEQ ID NO: 16782 - DNA, 25 bp, Saccharomyces pastorianus
cgaagccgaatccttagtcgctgaa

SEQ ID NO: 16783 - DNA, 25 bp, Saccharomyces pastorianus
gtgtttgacgctccagagagtctga

SEQ ID NO: 16784 - DNA, 25 bp, Saccharomyces pastorianus
gagctgtccaagttcctgcaagagg

SEQ ID NO: 16785 - DNA, 25 bp, Saccharomyces pastorianus
agctgaccagagatccggagttcca

SEQ ID NO: 16786 - DNA, 25 bp, Saccharomyces pastorianus
gaactaaagcttcccgtgtttgacg

SEQ ID NO: 16787 - DNA, 25 bp, Saccharomyces pastorianus
agaagaactccgtgatcagactgat

SEQ ID NO: 16788 - DNA, 25 bp, Saccharomyces pastorianus
taaaccagacaagcttcccgaagga

SEQ ID NO: 16789 - DNA, 25 bp, Saccharomyces pastorianus
atcggtgacgggtcgctgcaattga

SEQ ID NO: 16790 - DNA, 25 bp, Saccharomyces pastorianus
ggagagtcatcctgttcatcggtga

SEQ ID NO: 16791 - DNA, 25 bp, Saccharomyces pastorianus
gacgcctacggcatttcacaagttt

SEQ ID NO: 16792 - DNA, 25 bp, Saccharomyces pastorianus
gagggcgacgttattatatccgaga

SEQ ID NO: 16793 - DNA, 25 bp, Saccharomyces pastorianus
gcacgtccgcgttcggtataaacca

SEQ ID NO: 16794 - DNA, 25 bp, Saccharomyces pastorianus
ctttcactcctcaactagatagcga

SEQ ID NO: 16795 - DNA, 25 bp, Saccharomyces pastorianus
ggatatacaccattcagcggatcat

SEQ ID NO: 16796 - DNA, 25 bp, Saccharomyces pastorianus
caaggttctagtggcgtcttattta

SEQ ID NO: 16797 - DNA, 25 bp, Saccharomyces pastorianus
aagaaggccccgacaatcagatgga

SEQ ID NO: 16798 - DNA, 25 bp, Saccharomyces pastorianus
gaagtacgactttaccgtggattat

SEQ ID NO: 16799 - DNA, 25 bp, Saccharomyces pastorianus
gaagagctgcattttccgatagaac

SEQ ID NO: 16800 - DNA, 25 bp, Saccharomyces pastorianus
ggatctccagattacatggctctag

SEQ ID NO: 16801 - DNA, 25 bp, Saccharomyces pastorianus
gcggatcatccactaacgagacgta

SEQ ID NO: 16802 - DNA, 25 bp, Saccharomyces pastorianus
actaacggccatggtagatgactct

SEQ ID NO: 16803 - DNA, 25 bp, Saccharomyces pastorianus
ggtcattaggttgcatgctctttga

SEQ ID NO: 16804 - DNA, 25 bp, Saccharomyces pastorianus
gactctgcagtatcatcgaaactag

SEQ ID NO: 16805 - DNA, 25 bp, Saccharomyces pastorianus
gaagttccgtgctgctttagataga

SEQ ID NO: 16806 - DNA, 25 bp, Saccharomyces pastorianus
atgtctacggctgttttcgagatac

SEQ ID NO: 16807 - DNA, 25 bp, Saccharomyces pastorianus
ttagcttaccaatccagccttgtaa

SEQ ID NO: 16808 - DNA, 25 bp, Saccharomyces pastorianus
gtggaattctccaacttgtctacaa

SEQ ID NO: 16809 - DNA, 25 bp, Saccharomyces pastorianus
gagctggcacagagcctgttagctt

SEQ ID NO: 16810 - DNA, 25 bp, Saccharomyces pastorianus
atgctacgactctttttcctcagaa

SEQ ID NO: 16811 - DNA, 25 bp, Saccharomyces pastorianus
aagcaagttgttcctattccgaaat

SEQ ID NO: 16812 - DNA, 25 bp, Saccharomyces pastorianus
gaacgttctgttcatttccataagc

SEQ ID NO: 16813 - DNA, 25 bp, Saccharomyces pastorianus
ttggaagacgcgtattagccttctt

SEQ ID NO: 16814 - DNA, 25 bp, Saccharomyces pastorianus
aaaaatattcctggccagcttcaac

SEQ ID NO: 16815 - DNA, 25 bp, Saccharomyces pastorianus
attacttgcaattcactgtctacga

SEQ ID NO: 16816 - DNA, 25 bp, Saccharomyces pastorianus
tgatcagtcagctacggcaccttca

SEQ ID NO: 16817 - DNA, 25 bp, Saccharomyces pastorianus
gcgaatcaccatatcaaacccttaa

SEQ ID NO: 16818 - DNA, 25 bp, Saccharomyces pastorianus
agcttctagagttcatcctgtcaga

SEQ ID NO: 16819 - DNA, 25 bp, Saccharomyces pastorianus
gttccagtataatcgctacagggat

SEQ ID NO: 16820 - DNA, 25 bp, Saccharomyces pastorianus
agactccagcccatcttataatgaa

SEQ ID NO: 16821 - DNA, 25 bp, Saccharomyces pastorianus
gaaaaatgtatccttcagttctttg

SEQ ID NO: 16822 - DNA, 25 bp, Saccharomyces pastorianus
gaagtacatctgctgggaatccacc

SEQ ID NO: 16823 - DNA, 25 bp, Saccharomyces pastorianus
ggaaatgttccatctttaagcacag

SEQ ID NO: 16824 - DNA, 25 bp, Saccharomyces pastorianus
atgttaaaactgtccctgctgatca

SEQ ID NO: 16825 - DNA, 25 bp, Saccharomyces pastorianus
acgcgcaccctgctttttataaaag

SEQ ID NO: 16826 - DNA, 25 bp, Saccharomyces pastorianus
gctcaaaacttgaccactactggca

SEQ ID NO: 16827 - DNA, 25 bp, Saccharomyces pastorianus
gaatgctgtgcaagaaaggcctttt

SEQ ID NO: 16828 - DNA, 25 bp, Saccharomyces pastorianus
ggatgattttacatcggaccatcaa

SEQ ID NO: 16829 - DNA, 25 bp, Saccharomyces pastorianus
gttacgatcatccattcacgtcgat

SEQ ID NO: 16830 - DNA, 25 bp, Saccharomyces pastorianus
aaggccttttgaaccgttatcagca

SEQ ID NO: 16831 - DNA, 25 bp, Saccharomyces pastorianus
tgaacaagttcgtcgccgggtcgat

SEQ ID NO: 16832 - DNA, 25 bp, Saccharomyces pastorianus
agcataagggcgaaccctgctctag

SEQ ID NO: 16833 - DNA, 25 bp, Saccharomyces pastorianus
gaaagcacgccaactgacgcagcaa

SEQ ID NO: 16834 - DNA, 25 bp, Saccharomyces pastorianus
ttttttctccaacacgttacgatca

SEQ ID NO: 16835 - DNA, 25 bp, Saccharomyces pastorianus
aaagctcctggtttgaagttgacga

SEQ ID NO: 16836 - DNA, 25 bp, Saccharomyces pastorianus
gatggcatcttagctgacggcaaaa

SEQ ID NO: 16837 - DNA, 25 bp, Saccharomyces pastorianus
gaggaactgctgcaaagctcctggt

SEQ ID NO: 16838 - DNA, 25 bp, Saccharomyces pastorianus
gtattcgggttgtggcaatcgccta

SEQ ID NO: 16839 - DNA, 25 bp, Saccharomyces pastorianus
atactgttatttgtcttccctgttc

SEQ ID NO: 16840 - DNA, 25 bp, Saccharomyces pastorianus
gaggttcctccagaagtacatgtta

SEQ ID NO: 16841 - DNA, 25 bp, Saccharomyces pastorianus
aagcttgcacgcttggctattgcag

SEQ ID NO: 16842 - DNA, 25 bp, Saccharomyces pastorianus
gatgcttttcatatttgttccctca

SEQ ID NO: 16843 - DNA, 25 bp, Saccharomyces pastorianus
gttatggtacccgaagcttgcacgc

SEQ ID NO: 16844 - DNA, 25 bp, Saccharomyces pastorianus
gggatcaatcttgctgtattcgggt

SEQ ID NO: 16845 - DNA, 25 bp, Saccharomyces pastorianus
ggcgcctgggtagcatttttagcat

SEQ ID NO: 16846 - DNA, 25 bp, Saccharomyces pastorianus
ggtgcatccaatttcttctctttat

SEQ ID NO: 16847 - DNA, 25 bp, Saccharomyces pastorianus
tcatttggtgtttcactctcgtcaa

SEQ ID NO: 16848 - DNA, 25 bp, Saccharomyces pastorianus
atgcagcacatctaggaggctccat

SEQ ID NO: 16849 - DNA, 25 bp, Saccharomyces pastorianus
aactgctgcgattatcaggcttgcc

SEQ ID NO: 16850 - DNA, 25 bp, Saccharomyces pastorianus
agggtatgacgctcgactgatgccg

SEQ ID NO: 16851 - DNA, 25 bp, Saccharomyces pastorianus
gcctgggaagttaccggttagcatc

SEQ ID NO: 16852 - DNA, 25 bp, Saccharomyces pastorianus
agccattcaaatgcaactcgccaag

SEQ ID NO: 16853 - DNA, 25 bp, Saccharomyces pastorianus
tcgccaagcagttatcattcgtcaa

SEQ ID NO: 16854 - DNA, 25 bp, Saccharomyces pastorianus
gcttgcccctagaaggagcggacat

SEQ ID NO: 16855 - DNA, 25 bp, Saccharomyces pastorianus
ggatgctactagacgctgttaaaca

SEQ ID NO: 16856 - DNA, 25 bp, Saccharomyces pastorianus
acctgtgtggtctgttcatgaatac

SEQ ID NO: 16857 - DNA, 25 bp, Saccharomyces pastorianus
gattgccacctgtagagcttgtgaa

SEQ ID NO: 16858 - DNA, 25 bp, Saccharomyces pastorianus
cggttagcatccaccggaggagcta

SEQ ID NO: 16859 - DNA, 25 bp, Saccharomyces pastorianus
ggagaatacccttagattgccacct

SEQ ID NO: 16860 - DNA, 25 bp, Saccharomyces pastorianus
ggtgtcaaatattcagaagctcctg

SEQ ID NO: 16861 - DNA, 25 bp, Saccharomyces pastorianus
gaagctcctgaagccagcaagggtg

SEQ ID NO: 16862 - DNA, 25 bp, Saccharomyces pastorianus
gatgaaatattccaactccaaaaag

SEQ ID NO: 16863 - DNA, 25 bp, Saccharomyces pastorianus
cagccgcaatgggtctttgattgta

SEQ ID NO: 16864 - DNA, 25 bp, Saccharomyces pastorianus
agcaagggtgccaataagccaaaga

SEQ ID NO: 16865 - DNA, 25 bp, Saccharomyces pastorianus
tgaaacacttccacctcatttgagt

SEQ ID NO: 16866 - DNA, 25 bp, Saccharomyces pastorianus
ggtagaacatatattcagccgcaat

SEQ ID NO: 16867 - DNA, 25 bp, Saccharomyces pastorianus
gacatgtctaagattacccatcaaa

SEQ ID NO: 16868 - DNA, 25 bp, Saccharomyces pastorianus
gtatcttccaggtgaaacacttcca

SEQ ID NO: 16869 - DNA, 25 bp, Saccharomyces pastorianus
gttggttcctgccaacaagtatctt

SEQ ID NO: 16870 - DNA, 25 bp, Saccharomyces pastorianus
aataagggtgagttggttcctgcca

SEQ ID NO: 16871 - DNA, 25 bp, Saccharomyces pastorianus
gagttccagtatctcacaattggtg

SEQ ID NO: 16872 - DNA, 25 bp, Saccharomyces pastorianus
gattatactatcttcggctggtgaa

SEQ ID NO: 16873 - DNA, 25 bp, Saccharomyces pastorianus
tcagatattccagctgcaggtaata

SEQ ID NO: 16874 - DNA, 25 bp, Saccharomyces pastorianus
tagacatggacgcaacttccaccgt

SEQ ID NO: 16875 - DNA, 25 bp, Saccharomyces pastorianus
ttccaccgtttccaacaagtcatgt

SEQ ID NO: 16876 - DNA, 25 bp, Saccharomyces pastorianus
gatacatcgacttaagtgtaccaga

SEQ ID NO: 16877 - DNA, 25 bp, Saccharomyces pastorianus
cttcggctggtgaaaactcatcaat

SEQ ID NO: 16878 - DNA, 25 bp, Saccharomyces pastorianus
aacaagtcatgttcttcttggtcat

SEQ ID NO: 16879 - DNA, 25 bp, Saccharomyces pastorianus
gtaacaacagtactaccgtgggcaa

SEQ ID NO: 16880 - DNA, 25 bp, Saccharomyces pastorianus
atttcgctggactattctatgacaa

SEQ ID NO: 16881 - DNA, 25 bp, Saccharomyces pastorianus
gacgaagttccacagaccaacagta

SEQ ID NO: 16882 - DNA, 25 bp, Saccharomyces pastorianus
cttctgtgaagatactggcgattat

SEQ ID NO: 16883 - DNA, 25 bp, Saccharomyces pastorianus
acaccctagtcagtggaggtttagc

SEQ ID NO: 16884 - DNA, 25 bp, Saccharomyces pastorianus
aacagtacacaccaaacaccctagt

SEQ ID NO: 16885 - DNA, 25 bp, Saccharomyces pastorianus
cgttctcatcgtttacatcgttgta

SEQ ID NO: 16886 - DNA, 25 bp, Saccharomyces pastorianus
aatgtcgttctcatcgtttacatcg

SEQ ID NO: 16887 - DNA, 25 bp, Saccharomyces pastorianus
gtttaccgtggcaatggttgtacta

SEQ ID NO: 16888 - DNA, 25 bp, Saccharomyces pastorianus
atgtacctcgtactgtaatcaataa

SEQ ID NO: 16889 - DNA, 25 bp, Saccharomyces pastorianus
tacatcgttgtagccttctgtgaag

SEQ ID NO: 16890 - DNA, 25 bp, Saccharomyces pastorianus
gccgtcgatgtacctcgtactgtaa

SEQ ID NO: 16891 - DNA, 25 bp, Saccharomyces pastorianus
tgtacttacgtttttcattattcaa

SEQ ID NO: 16892 - DNA, 25 bp, Saccharomyces pastorianus
tggttgtactacctgtacttacgtt

SEQ ID NO: 16893 - DNA, 25 bp, Saccharomyces pastorianus
gtgcctaattgtttctgcattgttg

SEQ ID NO: 16894 - DNA, 25 bp, Saccharomyces pastorianus
tgctattgccatcttcgagttcgaa

SEQ ID NO: 16895 - DNA, 25 bp, Saccharomyces pastorianus
taatgaggtcgctttagtcgtcgct

SEQ ID NO: 16896 - DNA, 25 bp, Saccharomyces pastorianus
gaccgagggacttcttatgtgccta

SEQ ID NO: 16897 - DNA, 25 bp, Saccharomyces pastorianus
gactgtcgttatcaattcggttggt

SEQ ID NO: 16898 - DNA, 25 bp, Saccharomyces pastorianus
ggttggtaccattgacactgatgac

SEQ ID NO: 16899 - DNA, 25 bp, Saccharomyces pastorianus
tcattgcgctctcttggatatctaa

SEQ ID NO: 16900 - DNA, 25 bp, Saccharomyces pastorianus
agtcgtcgctgatgaattgcctatg

SEQ ID NO: 16901 - DNA, 25 bp, Saccharomyces pastorianus
tgatgactataactttgctgccaaa

SEQ ID NO: 16902 - DNA, 25 bp, Saccharomyces pastorianus
gtgttgttcaaatttccttctagcg

SEQ ID NO: 16903 - DNA, 25 bp, Saccharomyces pastorianus
gatttattgtacgaccacttcttag

SEQ ID NO: 16904 - DNA, 25 bp, Saccharomyces pastorianus
gcctcggcagcaatgtttctttcta

SEQ ID NO: 16905 - DNA, 25 bp, Saccharomyces pastorianus
attagcttcgctaatccgatgaatt

SEQ ID NO: 16906 - DNA, 25 bp, Saccharomyces pastorianus
gaacactagccaaattcttgatgga

SEQ ID NO: 16907 - DNA, 25 bp, Saccharomyces pastorianus
actgtatccagtttgccaattgttg

SEQ ID NO: 16908 - DNA, 25 bp, Saccharomyces pastorianus
atctgggatggcaacttgattcact

SEQ ID NO: 16909 - DNA, 25 bp, Saccharomyces pastorianus
gggcctgctctgtggacgagatcaa

SEQ ID NO: 16910 - DNA, 25 bp, Saccharomyces pastorianus
gatggattatcttgtagggcctacc

SEQ ID NO: 16911 - DNA, 25 bp, Saccharomyces pastorianus
tagggcctaccattcacgacgagtt

SEQ ID NO: 16912 - DNA, 25 bp, Saccharomyces pastorianus
ggaatattaccgtctttatgcgcct

SEQ ID NO: 16913 - DNA, 25 bp, Saccharomyces pastorianus
atcatgtttgttcattgcctctaaa

SEQ ID NO: 16914 - DNA, 25 bp, Saccharomyces pastorianus
taaacttccaaattagcttcgctaa

SEQ ID NO: 16915 - DNA, 25 bp, Saccharomyces pastorianus
tccagtatcgtgaccttttcatcat

SEQ ID NO: 16916 - DNA, 25 bp, Saccharomyces pastorianus
aaagctgtccttcggatttgcattg

SEQ ID NO: 16917 - DNA, 25 bp, Saccharomyces pastorianus
cagtgctgtcagacctcctaagggt

SEQ ID NO: 16918 - DNA, 25 bp, Saccharomyces pastorianus
ggatgcatgcgctagaattctggga

SEQ ID NO: 16919 - DNA, 25 bp, Saccharomyces pastorianus
gttcattttcactattgcaccagat

SEQ ID NO: 16920 - DNA, 25 bp, Saccharomyces pastorianus
tcctaagggttataccgccgacaag

SEQ ID NO: 16921 - DNA, 25 bp, Saccharomyces pastorianus
aaacagttgctgagccaagccataa

SEQ ID NO: 16922 - DNA, 25 bp, Saccharomyces pastorianus
attattccaattgctgaccgaactg

SEQ ID NO: 16923 - DNA, 25 bp, Saccharomyces pastorianus
agacatattcaagtggttccagtat

SEQ ID NO: 16924 - DNA, 25 bp, Saccharomyces pastorianus
gacgattctaaactcttttcggata

SEQ ID NO: 16925 - DNA, 25 bp, Saccharomyces pastorianus
ataatggctccatcagtgctgtcag

SEQ ID NO: 16926 - DNA, 25 bp, Saccharomyces pastorianus
gcatcatttatcgttgcctcaaggg

SEQ ID NO: 16927 - DNA, 25 bp, Saccharomyces pastorianus
gaggcagctgaccaaacaatcgagt

SEQ ID NO: 16928 - DNA, 25 bp, Saccharomyces pastorianus
aattggtctgcttagtaaggccacc

SEQ ID NO: 16929 - DNA, 25 bp, Saccharomyces pastorianus
ggcaagtgccggacatttacgatat

SEQ ID NO: 16930 - DNA, 25 bp, Saccharomyces pastorianus
gaaggatcatccgatacgcgacgaa

SEQ ID NO: 16931 - DNA, 25 bp, Saccharomyces pastorianus
tgagcacgatccttttagccgtagc

SEQ ID NO: 16932 - DNA, 25 bp, Saccharomyces pastorianus
agccgtagctcttgcgaaggctaaa

SEQ ID NO: 16933 - DNA, 25 bp, Saccharomyces pastorianus
gggcggagttgtgtctcaagaccaa

SEQ ID NO: 16934 - DNA, 25 bp, Saccharomyces pastorianus
tgtaaacctatccaattccaagcct

SEQ ID NO: 16935 - DNA, 25 bp, Saccharomyces pastorianus
ggtaggaagcccacgattgatttga

SEQ ID NO: 16936 - DNA, 25 bp, Saccharomyces pastorianus
tagtaacatggtacggcctttccct

SEQ ID NO: 16937 - DNA, 25 bp, Saccharomyces pastorianus
atatcgctcggaagtggtgccgcta

SEQ ID NO: 16938 - DNA, 25 bp, Saccharomyces pastorianus
ggatagtcaatggtcccatggcaaa

SEQ ID NO: 16939 - DNA, 25 bp, Saccharomyces pastorianus
ctggagctgatttgccgggcatcga

SEQ ID NO: 16940 - DNA, 25 bp, Saccharomyces pastorianus
agaaggtctactaaggccgccaaca

SEQ ID NO: 16941 - DNA, 25 bp, Saccharomyces pastorianus
aaatagcattgcctctggagctgat

SEQ ID NO: 16942 - DNA, 25 bp, Saccharomyces pastorianus
gaagaaacagttcagccaaccgctg

SEQ ID NO: 16943 - DNA, 25 bp, Saccharomyces pastorianus
agggacatccaaatcctctcaaggg

SEQ ID NO: 16944 - DNA, 25 bp, Saccharomyces pastorianus
aagaggcattccatgttcactgaaa

SEQ ID NO: 16945 - DNA, 25 bp, Saccharomyces pastorianus
cagcgaggcgtcctttgttctaaac

SEQ ID NO: 16946 - DNA, 25 bp, Saccharomyces pastorianus
aggccgccaacaacttgtcaacaga

SEQ ID NO: 16947 - DNA, 25 bp, Saccharomyces pastorianus
tgttcccttcctcgcaagtaagaaa

SEQ ID NO: 16948 - DNA, 25 bp, Saccharomyces pastorianus
gaccctgcgggcttaggtaagacta

SEQ ID NO: 16949 - DNA, 25 bp, Saccharomyces pastorianus
gaaattctaacgaaccagcagcgtg

SEQ ID NO: 16950 - DNA, 25 bp, Saccharomyces pastorianus
agacaatatgtcacaaggcaccggt

SEQ ID NO: 16951 - DNA, 25 bp, Saccharomyces pastorianus
tttattacaacgcagtgaggaccct

SEQ ID NO: 16952 - DNA, 25 bp, Saccharomyces pastorianus
gcatccagggttttgaaggcacaat

SEQ ID NO: 16953 - DNA, 25 bp, Saccharomyces pastorianus
ggtcacaattccagactttattaca

SEQ ID NO: 16954 - DNA, 25 bp, Saccharomyces pastorianus
caatggagagtaaaccctcttccca

SEQ ID NO: 16955 - DNA, 25 bp, Saccharomyces pastorianus
gaattggacactgcatccagggttt

SEQ ID NO: 16956 - DNA, 25 bp, Saccharomyces pastorianus
gaacgcgccaagaacatttctagcc

SEQ ID NO: 16957 - DNA, 25 bp, Saccharomyces pastorianus
aactaggcacacaattggcgatttt

SEQ ID NO: 16958 - DNA, 25 bp, Saccharomyces pastorianus
agcagcgtggtataacgtacttgaa

SEQ ID NO: 16959 - DNA, 25 bp, Saccharomyces pastorianus
gggtcctataacactgcattgcaat

SEQ ID NO: 16960 - DNA, 25 bp, Saccharomyces pastorianus
tgaatatagtccctaactcgcagct

SEQ ID NO: 16961 - DNA, 25 bp, Saccharomyces pastorianus
gtgggatcgccattggaatgcttca

SEQ ID NO: 16962 - DNA, 25 bp, Saccharomyces pastorianus
gaaagcatcctctacatacaaaaac

SEQ ID NO: 16963 - DNA, 25 bp, Saccharomyces pastorianus
atctatcttttcctgtcaattaacc

SEQ ID NO: 16964 - DNA, 25 bp, Saccharomyces pastorianus
gcattgcaatgccaggatggccgta

SEQ ID NO: 16965 - DNA, 25 bp, Saccharomyces pastorianus
aagaactggacatcctatcttccac

SEQ ID NO: 16966 - DNA, 25 bp, Saccharomyces pastorianus
gtggacttcctcttcttaaagtatt

SEQ ID NO: 16967 - DNA, 25 bp, Saccharomyces pastorianus
aactaggcacgtccagtgtcttcta

SEQ ID NO: 16968 - DNA, 25 bp, Saccharomyces pastorianus
acgccaagctttgtattgggtccta

SEQ ID NO: 16969 - DNA, 25 bp, Saccharomyces pastorianus
gatggccgtatagtggacttcctct

SEQ ID NO: 16970 - DNA, 25 bp, Saccharomyces pastorianus
attttccgacggtgtgggctactcg

SEQ ID NO: 16971 - DNA, 25 bp, Saccharomyces pastorianus
gagccaacaaatctactttagcctg

SEQ ID NO: 16972 - DNA, 25 bp, Saccharomyces pastorianus
aaggactttttgcaactgtgtatga

SEQ ID NO: 16973 - DNA, 25 bp, Saccharomyces pastorianus
gagttccataccgaatccgtacaac

SEQ ID NO: 16974 - DNA, 25 bp, Saccharomyces pastorianus
gccgctgataccgtcatgagatgga

SEQ ID NO: 16975 - DNA, 25 bp, Saccharomyces pastorianus
aaattcgatgcctggtttcctcaaa

SEQ ID NO: 16976 - DNA, 25 bp, Saccharomyces pastorianus
gggtgacgacatcccaactactaag

SEQ ID NO: 16977 - DNA, 25 bp, Saccharomyces pastorianus
tttcctcaaaagaccgccgctgata

SEQ ID NO: 16978 - DNA, 25 bp, Saccharomyces pastorianus
tgttcgccaatccaaaagctagctg

SEQ ID NO: 16979 - DNA, 25 bp, Saccharomyces pastorianus
tatttcagacgctatgttcgccaat

SEQ ID NO: 16980 - DNA, 25 bp, Saccharomyces pastorianus
ggctactcgtggatcgacggtctaa

SEQ ID NO: 16981 - DNA, 25 bp, Saccharomyces pastorianus
gtggctcagaacgtctttgcaaatg

SEQ ID NO: 16982 - DNA, 25 bp, Saccharomyces pastorianus
tatgtccctatttcagtagacgcag

SEQ ID NO: 16983 - DNA, 25 bp, Saccharomyces pastorianus
aaatcatcgccccaggaaacactat

SEQ ID NO: 16984 - DNA, 25 bp, Saccharomyces pastorianus
acacccctcgtaatcatcaaatgct

SEQ ID NO: 16985 - DNA, 25 bp, Saccharomyces pastorianus
gcatcaaggacactaggttcaagga

SEQ ID NO: 16986 - DNA, 25 bp, Saccharomyces pastorianus
tagaaacttgatgtccctaccaacc

SEQ ID NO: 16987 - DNA, 25 bp, Saccharomyces pastorianus
tgcactaaagcaatatcgacctgat

SEQ ID NO: 16988 - DNA, 25 bp, Saccharomyces pastorianus
atcaaatgctttccgtggctcagaa

SEQ ID NO: 16989 - DNA, 25 bp, Saccharomyces pastorianus
aagttctgggctcaactatgtccct

SEQ ID NO: 16990 - DNA, 25 bp, Saccharomyces pastorianus
agaaaaccttgcattgtacgtggag

SEQ ID NO: 16991 - DNA, 25 bp, Saccharomyces pastorianus
atcgacctgatatcgtatccgaagt

SEQ ID NO: 16992 - DNA, 25 bp, Saccharomyces pastorianus
agaagggtactccagacatcacagc

SEQ ID NO: 16993 - DNA, 25 bp, Saccharomyces pastorianus
agctccagagcagcctcttttgaag

SEQ ID NO: 16994 - DNA, 25 bp, Saccharomyces pastorianus
gctactgcgtattctcaaggttctt

SEQ ID NO: 16995 - DNA, 25 bp, Saccharomyces pastorianus
gaaaaggccaacttctaactcgata

SEQ ID NO: 16996 - DNA, 25 bp, Saccharomyces pastorianus
caaggttcttccctagaatccgata

SEQ ID NO: 16997 - DNA, 25 bp, Saccharomyces pastorianus
gatggttacacacaatgcgttagaa

SEQ ID NO: 16998 - DNA, 25 bp, Saccharomyces pastorianus
aagactctcgtgtttccggagcaaa

SEQ ID NO: 16999 - DNA, 25 bp, Saccharomyces pastorianus
aaattcggcgcacgatgctgcattt

SEQ ID NO: 17000 - DNA, 25 bp, Saccharomyces pastorianus
atcacagccccagtaacaaattcgg

SEQ ID NO: 17001 - DNA, 25 bp, Saccharomyces pastorianus
gtcactctgatgtgcactctcatca

SEQ ID NO: 17002 - DNA, 25 bp, Saccharomyces pastorianus
acagtgtaggcgatcagcaccgtca

SEQ ID NO: 17003 - DNA, 25 bp, Saccharomyces pastorianus
gacgtgagtcactactcagcatctg

SEQ ID NO: 17004 - DNA, 25 bp, Saccharomyces pastorianus
tactttcactgtattaggctccgcc

SEQ ID NO: 17005 - DNA, 25 bp, Saccharomyces pastorianus
gttgttttcaactcgcttcaaagtg

SEQ ID NO: 17006 - DNA, 25 bp, Saccharomyces pastorianus
ttacagatgcttgtggacccaaacg

SEQ ID NO: 17007 - DNA, 25 bp, Saccharomyces pastorianus
gcttcaaagtgttctcttccagata

SEQ ID NO: 17008 - DNA, 25 bp, Saccharomyces pastorianus
gataccacttcaaagccggatcttt

SEQ ID NO: 17009 - DNA, 25 bp, Saccharomyces pastorianus
gaacaccatatatgtgccgccttta

SEQ ID NO: 17010 - DNA, 25 bp, Saccharomyces pastorianus
gatggcgactactacggaacacgat

SEQ ID NO: 17011 - DNA, 25 bp, Saccharomyces pastorianus
ggtgactttaacttcttctatggtg

SEQ ID NO: 17012 - DNA, 25 bp, Saccharomyces pastorianus
gcctgcagacgagatcctgattctt

SEQ ID NO: 17013 - DNA, 25 bp, Saccharomyces pastorianus
tgatttgggcgcgtctatacccgat

SEQ ID NO: 17014 - DNA, 25 bp, Saccharomyces pastorianus
gaagttcatatgaccaactcgcgaa

SEQ ID NO: 17015 - DNA, 25 bp, Saccharomyces pastorianus
aagggtggacgcatctctaaagaca

SEQ ID NO: 17016 - DNA, 25 bp, Saccharomyces pastorianus
gagatccaggaagccagtgcaaatc

SEQ ID NO: 17017 - DNA, 25 bp, Saccharomyces pastorianus
ggaaaatgttaaggcaccaactggt

SEQ ID NO: 17018 - DNA, 25 bp, Saccharomyces pastorianus
aaagctttccactacactgttcaag

SEQ ID NO: 17019 - DNA, 25 bp, Saccharomyces pastorianus
agtaaataaactggcctctactttg

SEQ ID NO: 17020 - DNA, 25 bp, Saccharomyces pastorianus
aaccctaagaaatctcactacacag

SEQ ID NO: 17021 - DNA, 25 bp, Saccharomyces pastorianus
gcaccaactggtgtcgaaagtttta

SEQ ID NO: 17022 - DNA, 25 bp, Saccharomyces pastorianus
gaaaaccaagagtctatagcatgga

SEQ ID NO: 17023 - DNA, 25 bp, Saccharomyces pastorianus
gcctctactttggagtctgaatcga

SEQ ID NO: 17024 - DNA, 25 bp, Saccharomyces pastorianus
aagactcaagggactggaagttcat

SEQ ID NO: 17025 - DNA, 25 bp, Saccharomyces pastorianus
gaacgccgtgctcatgaagaacaat

SEQ ID NO: 17026 - DNA, 25 bp, Saccharomyces pastorianus
ggactcatttatcggcaatcaccaa

SEQ ID NO: 17027 - DNA, 25 bp, Saccharomyces pastorianus
aaaatgctgatgacgctctgaaaca

SEQ ID NO: 17028 - DNA, 25 bp, Saccharomyces pastorianus
agctgaaggcttacatgcggccgaa

SEQ ID NO: 17029 - DNA, 25 bp, Saccharomyces pastorianus
aagagagcaagcacgccattccaaa

SEQ ID NO: 17030 - DNA, 25 bp, Saccharomyces pastorianus
aaaacaccatccaatcacttacaag

SEQ ID NO: 17031 - DNA, 25 bp, Saccharomyces pastorianus
tgatatcgacgctcaaatttccacc

SEQ ID NO: 17032 - DNA, 25 bp, Saccharomyces pastorianus
agaagaacaggctcaccaggctcaa

SEQ ID NO: 17033 - DNA, 25 bp, Saccharomyces pastorianus
aaacttgaagatgaacgccgtgctc

SEQ ID NO: 17034 - DNA, 25 bp, Saccharomyces pastorianus
gaagagcagatcacgcaggtcaaaa

SEQ ID NO: 17035 - DNA, 25 bp, Saccharomyces pastorianus
agccatcgaagaacaaacccgtcaa

SEQ ID NO: 17036 - DNA, 25 bp, Saccharomyces pastorianus
tagaagcctccaaggacattgccca

SEQ ID NO: 17037 - DNA, 25 bp, Saccharomyces pastorianus
tggccaattccagtagtgttatcta

SEQ ID NO: 17038 - DNA, 25 bp, Saccharomyces pastorianus
tagcacagtttgatgcagccgagtt

SEQ ID NO: 17039 - DNA, 25 bp, Saccharomyces pastorianus
ggaagatgtctcaattacccatatg

SEQ ID NO: 17040 - DNA, 25 bp, Saccharomyces pastorianus
tacccatatgacgtttggccccgaa

SEQ ID NO: 17041 - DNA, 25 bp, Saccharomyces pastorianus
attgccacgaacactggtactagag

SEQ ID NO: 17042 - DNA, 25 bp, Saccharomyces pastorianus
gagtcttgcacagaccagaggtttt

SEQ ID NO: 17043 - DNA, 25 bp, Saccharomyces pastorianus
aatggtgtccttgacgttaagagtc

SEQ ID NO: 17044 - DNA, 25 bp, Saccharomyces pastorianus
ggttttacaactgccttccatatat

SEQ ID NO: 17045 - DNA, 25 bp, Saccharomyces pastorianus
gacattgcccaaactctggccaatt

SEQ ID NO: 17046 - DNA, 25 bp, Saccharomyces pastorianus
tttaccaagtcaacacgccggtagt

SEQ ID NO: 17047 - DNA, 25 bp, Saccharomyces pastorianus
catttatctatgctggccatgatga

SEQ ID NO: 17048 - DNA, 25 bp, Saccharomyces pastorianus
gaccattcggtgtatcatttatcta

SEQ ID NO: 17049 - DNA, 25 bp, Saccharomyces pastorianus
gttggagcaagacacttccacggaa

SEQ ID NO: 17050 - DNA, 25 bp, Saccharomyces pastorianus
taaaattgctgtcgctgttgctggg

SEQ ID NO: 17051 - DNA, 25 bp, Saccharomyces pastorianus
gacagtagcgcgttgacatacgaca

SEQ ID NO: 17052 - DNA, 25 bp, Saccharomyces pastorianus
gagttcacgctcaaaactacctaaa

SEQ ID NO: 17053 - DNA, 25 bp, Saccharomyces pastorianus
gaaggctatcagtgttggtgctaac

SEQ ID NO: 17054 - DNA, 25 bp, Saccharomyces pastorianus
gaagaccggcatcaccaagaaggat

SEQ ID NO: 17055 - DNA, 25 bp, Saccharomyces pastorianus
tacggttaccaactgtatacttcca

SEQ ID NO: 17056 - DNA, 25 bp, Saccharomyces pastorianus
gtatacttccaatccatcgggtaac

SEQ ID NO: 17057 - DNA, 25 bp, Saccharomyces pastorianus
acgacaggttagagtttgccactat

SEQ ID NO: 17058 - DNA, 25 bp, Saccharomyces pastorianus
cgcctccatcttatggaccagtagt

SEQ ID NO: 17059 - DNA, 25 bp, Saccharomyces pastorianus
gagtgtgccgaagccttatatgatt

SEQ ID NO: 17060 - DNA, 25 bp, Saccharomyces pastorianus
aatgggttacgtccaagcaccacct

SEQ ID NO: 17061 - DNA, 25 bp, Saccharomyces pastorianus
gaaggcgaccttcctttgaaagcag

SEQ ID NO: 17062 - DNA, 25 bp, Saccharomyces pastorianus
taaaatatctcgtcctagtgcgccg

SEQ ID NO: 17063 - DNA, 25 bp, Saccharomyces pastorianus
gaagatctcccctaattggtataga

SEQ ID NO: 17064 - DNA, 25 bp, Saccharomyces pastorianus
agtagtctcatcatactcttcacag

SEQ ID NO: 17065 - DNA, 25 bp, Saccharomyces pastorianus
gggtgggtatatttcctgcaaacta

SEQ ID NO: 17066 - DNA, 25 bp, Saccharomyces pastorianus
ttccacaacgcatccgtagaagagt

SEQ ID NO: 17067 - DNA, 25 bp, Saccharomyces pastorianus
gcatttgcaagatcagcttcacctg

SEQ ID NO: 17068 - DNA, 25 bp, Saccharomyces pastorianus
atcttacgctcctccaatgggttac

SEQ ID NO: 17069 - DNA, 25 bp, Saccharomyces pastorianus
cactctttattcaacctctttacat

SEQ ID NO: 17070 - DNA, 25 bp, Saccharomyces pastorianus
tggtgtggcatctcaatctttgcaa

SEQ ID NO: 17071 - DNA, 25 bp, Saccharomyces pastorianus
gaggaggccggctatttccaaaaat

SEQ ID NO: 17072 - DNA, 25 bp, Saccharomyces pastorianus
aactcgattacttgcgatccagaag

SEQ ID NO: 17073 - DNA, 25 bp, Saccharomyces pastorianus
ggccgttatgaatctgggtatctct

SEQ ID NO: 17074 - DNA, 25 bp, Saccharomyces pastorianus
cagcctaaaggctctaactcgatta

SEQ ID NO: 17075 - DNA, 25 bp, Saccharomyces pastorianus
aagaaccaatgtcggccgttatgaa

SEQ ID NO: 17076 - DNA, 25 bp, Saccharomyces pastorianus
gccgtctctgcgatttctactttaa

SEQ ID NO: 17077 - DNA, 25 bp, Saccharomyces pastorianus
aatctttgcaaatcgctccgtttga

SEQ ID NO: 17078 - DNA, 25 bp, Saccharomyces pastorianus
agaaaatccaaccttcactctttat

SEQ ID NO: 17079 - DNA, 25 bp, Saccharomyces pastorianus
gactacgtcagattgtatcagccta

SEQ ID NO: 17080 - DNA, 25 bp, Saccharomyces pastorianus
aggtccttccgtgggaacgcaagag

SEQ ID NO: 17081 - DNA, 25 bp, Saccharomyces pastorianus
aatgaaagcaggtccttccgtggga

SEQ ID NO: 17082 - DNA, 25 bp, Saccharomyces pastorianus
tcttacatcgtaatcatcgtggtga

SEQ ID NO: 17083 - DNA, 25 bp, Saccharomyces pastorianus
gctgctaaacgtatcagagccttga

SEQ ID NO: 17084 - DNA, 25 bp, Saccharomyces pastorianus
agggcgaaggtgctcatgttacatt

SEQ ID NO: 17085 - DNA, 25 bp, Saccharomyces pastorianus
agagccttgactgctgccgaagaat

SEQ ID NO: 17086 - DNA, 25 bp, Saccharomyces pastorianus
gacacagtaaaaccaaacgtcctga

SEQ ID NO: 17087 - DNA, 25 bp, Saccharomyces pastorianus
tgaagcagaacttacgtttgttccc

SEQ ID NO: 17088 - DNA, 25 bp, Saccharomyces pastorianus
tgactgctgccgaagaatctgatga

SEQ ID NO: 17089 - DNA, 25 bp, Saccharomyces pastorianus
gttacattcggtgaacaagtcggag

SEQ ID NO: 17090 - DNA, 25 bp, Saccharomyces pastorianus
aagcaaagagcactaatcgtacgta

SEQ ID NO: 17091 - DNA, 25 bp, Saccharomyces pastorianus
ttatcttcttctccatcgtcatcaa

SEQ ID NO: 17092 - DNA, 25 bp, Saccharomyces pastorianus
ggctacgacgatactaatgaacact

SEQ ID NO: 17093 - DNA, 25 bp, Saccharomyces pastorianus
agttagattctttgctcatttcccc

SEQ ID NO: 17094 - DNA, 25 bp, Saccharomyces pastorianus
gtcatcaactattccctttgacgaa

SEQ ID NO: 17095 - DNA, 25 bp, Saccharomyces pastorianus
aaaggcacacttgggctacgaaaat

SEQ ID NO: 17096 - DNA, 25 bp, Saccharomyces pastorianus
aaaggcttctcattcgcaagatctc

SEQ ID NO: 17097 - DNA, 25 bp, Saccharomyces pastorianus
gaagctattgtctcacctacataag

SEQ ID NO: 17098 - DNA, 25 bp, Saccharomyces pastorianus
tgctgccccaagatggtgtcgcaaa

SEQ ID NO: 17099 - DNA, 25 bp, Saccharomyces pastorianus
aaaggaattccattccactcacgtc

SEQ ID NO: 17100 - DNA, 25 bp, Saccharomyces pastorianus
gaacactatttgaacctaaccgact

SEQ ID NO: 17101 - DNA, 25 bp, Saccharomyces pastorianus
gtttgtgatcgtcttattccttcat

SEQ ID NO: 17102 - DNA, 25 bp, Saccharomyces pastorianus
aacaccatccttcgttagattcttg

SEQ ID NO: 17103 - DNA, 25 bp, Saccharomyces pastorianus
gtttcttaggagtccattcactagg

SEQ ID NO: 17104 - DNA, 25 bp, Saccharomyces pastorianus
gttaacatgtattgatttgccccta

SEQ ID NO: 17105 - DNA, 25 bp, Saccharomyces pastorianus
gcagaagtttggcatcgacctaatg

SEQ ID NO: 17106 - DNA, 25 bp, Saccharomyces pastorianus
agaactgctgatcgcgtacggtgta

SEQ ID NO: 17107 - DNA, 25 bp, Saccharomyces pastorianus
gacagcacgctgttagcagaactgc

SEQ ID NO: 17108 - DNA, 25 bp, Saccharomyces pastorianus
acgagagcacaagcgcactggaaat

SEQ ID NO: 17109 - DNA, 25 bp, Saccharomyces pastorianus
tgaggaagaagcaagcccgccgcga

SEQ ID NO: 17110 - DNA, 25 bp, Saccharomyces pastorianus
aaatacggttattctgcattgatcg

SEQ ID NO: 17111 - DNA, 25 bp, Saccharomyces pastorianus
aatcatcgtaagagtgcccctgacg

SEQ ID NO: 17112 - DNA, 25 bp, Saccharomyces pastorianus
aagcattccaaatgatggcctcgga

SEQ ID NO: 17113 - DNA, 25 bp, Saccharomyces pastorianus
gaaatcgattccttttcaggtaaca

SEQ ID NO: 17114 - DNA, 25 bp, Saccharomyces pastorianus
ttcaggtaacagaatctacccaggt

SEQ ID NO: 17115 - DNA, 25 bp, Saccharomyces pastorianus
tcgattccttttcaggtaacagaat

SEQ ID NO: 17116 - DNA, 25 bp, Saccharomyces pastorianus
ttccttttcaggtaacagaatctac

SEQ ID NO: 17117 - DNA, 25 bp, Saccharomyces pastorianus
agtctgttggtactcaaggttccaa

SEQ ID NO: 17118 - DNA, 25 bp, Saccharomyces pastorianus
aagtctgttggtactcaaggttcca

SEQ ID NO: 17119 - DNA, 25 bp, Saccharomyces pastorianus
ccacaagaaaggtatcactgaagaa

SEQ ID NO: 17120 - DNA, 25 bp, Saccharomyces pastorianus
acgaaaaattgaaggctgacaagga

SEQ ID NO: 17121 - DNA, 25 bp, Saccharomyces pastorianus
aatcgattccttttcaggtaacaga

SEQ ID NO: 17122 - DNA, 25 bp, Saccharomyces pastorianus
aggtaacagaatctacccaggtaga

SEQ ID NO: 17123 - DNA, 25 bp, Saccharomyces pastorianus
aagcaccacaagaaaggtatcactg

SEQ ID NO: 17124 - DNA, 25 bp, Saccharomyces pastorianus
ctaggcttcctagctctgcaaaaaa

SEQ ID NO: 17125 - DNA, 25 bp, Saccharomyces pastorianus
gtgtattcagtaacggaccgacaat

SEQ ID NO: 17126 - DNA, 25 bp, Saccharomyces pastorianus
aatgggtttcctcttggtgtattca

SEQ ID NO: 17127 - DNA, 25 bp, Saccharomyces pastorianus
aatgtcgacgaagtgtttgtggatc

SEQ ID NO: 17128 - DNA, 25 bp, Saccharomyces pastorianus
gaaaagcgtaaaccatcacacccag

SEQ ID NO: 17129 - DNA, 25 bp, Saccharomyces pastorianus
gggcagagtcccattttatgaaacc

SEQ ID NO: 17130 - DNA, 25 bp, Saccharomyces pastorianus
gaaccagtcttcatcgtctaggctt

SEQ ID NO: 17131 - DNA, 25 bp, Saccharomyces pastorianus
ataagtcatcacatggccaagccaa

SEQ ID NO: 17132 - DNA, 25 bp, Saccharomyces pastorianus
gaatcaaagattccgaccgtgttcc

SEQ ID NO: 17133 - DNA, 25 bp, Saccharomyces pastorianus
gaaaccagcgctttattgagaagta

SEQ ID NO: 17134 - DNA, 25 bp, Saccharomyces pastorianus
accgtgttccaatggtcctaatagg

SEQ ID NO: 17135 - DNA, 25 bp, Saccharomyces pastorianus
gaagacgacgtcattgtcgccattt

SEQ ID NO: 17136 - DNA, 25 bp, Saccharomyces pastorianus
gtcgtttccgtcaaggagactgcca

SEQ ID NO: 17137 - DNA, 25 bp, Saccharomyces pastorianus
tgggtgacttgaaccgtttctttga

SEQ ID NO: 17138 - DNA, 25 bp, Saccharomyces pastorianus
gccaaggtggccgatgtcatcaaga

SEQ ID NO: 17139 - DNA, 25 bp, Saccharomyces pastorianus
tatctatcaacaacgctgctagcga

SEQ ID NO: 17140 - DNA, 25 bp, Saccharomyces pastorianus
atcttgacccgtttcgatacatcta

SEQ ID NO: 17141 - DNA, 25 bp, Saccharomyces pastorianus
atgtcttcggtgacgctactgtaaa

SEQ ID NO: 17142 - DNA, 25 bp, Saccharomyces pastorianus
gccattttcccagattccgttagat

SEQ ID NO: 17143 - DNA, 25 bp, Saccharomyces pastorianus
acggcttgaagccaatccatattgt

SEQ ID NO: 17144 - DNA, 25 bp, Saccharomyces pastorianus
caattgcctgtattggccgaagacg

SEQ ID NO: 17145 - DNA, 25 bp, Saccharomyces pastorianus
aaactcctctgctgttatcactgac

SEQ ID NO: 17146 - DNA, 25 bp, Saccharomyces pastorianus
attcaaacacccctatgggcggaat

SEQ ID NO: 17147 - DNA, 25 bp, Saccharomyces pastorianus
agtgaggttccatcgatgctttcaa

SEQ ID NO: 17148 - DNA, 25 bp, Saccharomyces pastorianus
taaacactgcagaagcgccatccgg

SEQ ID NO: 17149 - DNA, 25 bp, Saccharomyces pastorianus
gcacgtttcgtccaatgacgtcaat

SEQ ID NO: 17150 - DNA, 25 bp, Saccharomyces pastorianus
ataaccacgccaacaatatgccagt

SEQ ID NO: 17151 - DNA, 25 bp, Saccharomyces pastorianus
aactcaaggctctgtgcccatgaac

SEQ ID NO: 17152 - DNA, 25 bp, Saccharomyces pastorianus
ctttacaacagcagccgtttggctt

SEQ ID NO: 17153 - DNA, 25 bp, Saccharomyces pastorianus
agaaacaatactccgctgcacgttt

SEQ ID NO: 17154 - DNA, 25 bp, Saccharomyces pastorianus
caaccctcgttggttcagcaacaaa

SEQ ID NO: 17155 - DNA, 25 bp, Saccharomyces pastorianus
tattgcgaaactgcagctgctaccc

SEQ ID NO: 17156 - DNA, 25 bp, Saccharomyces pastorianus
tatctgtgacacaagccctattgga

SEQ ID NO: 17157 - DNA, 25 bp, Saccharomyces pastorianus
gaaatgttcgctaagcacggtgaag

SEQ ID NO: 17158 - DNA, 25 bp, Saccharomyces pastorianus
aatactccagcttggacgacgccaa

SEQ ID NO: 17159 - DNA, 25 bp, Saccharomyces pastorianus
agaccaagtggttccggtgccaaca

SEQ ID NO: 17160 - DNA, 25 bp, Saccharomyces pastorianus
gtttcggttacgttcaatactccag

SEQ ID NO: 17161 - DNA, 25 bp, Saccharomyces pastorianus
agaagttcggtgacactccatctga

SEQ ID NO: 17162 - DNA, 25 bp, Saccharomyces pastorianus
gccaacactgctccattaggcagat

SEQ ID NO: 17163 - DNA, 25 bp, Saccharomyces pastorianus
ttattcttgggtaacttgtccttca

SEQ ID NO: 17164 - DNA, 25 bp, Saccharomyces pastorianus
atttccacaagtaagccagccggta

SEQ ID NO: 17165 - DNA, 25 bp, Saccharomyces pastorianus
gtcagactagactactcttctccaa

SEQ ID NO: 17166 - DNA, 25 bp, Saccharomyces pastorianus
gacttcgaaaaccaatcttatgctg

SEQ ID NO: 17167 - DNA, 25 bp, Saccharomyces pastorianus
ggtagaccaattaactgtgacattt

SEQ ID NO: 17168 - DNA, 25 bp, Saccharomyces pastorianus
aagatcatcgccctctttggagagc

SEQ ID NO: 17169 - DNA, 25 bp, Saccharomyces pastorianus
gaaggcgttcttccaattacagtat

SEQ ID NO: 17170 - DNA, 25 bp, Saccharomyces pastorianus
agccggaatgcttctatgtccagca

SEQ ID NO: 17171 - DNA, 25 bp, Saccharomyces pastorianus
tgaaaaatcaactacaccacccatt

SEQ ID NO: 17172 - DNA, 25 bp, Saccharomyces pastorianus
tcagacacaatcttccccatagaaa

SEQ ID NO: 17173 - DNA, 25 bp, Saccharomyces pastorianus
aagaggaacctttctgccgatctct

SEQ ID NO: 17174 - DNA, 25 bp, Saccharomyces pastorianus
gatggctcgaactctttgaaggctg

SEQ ID NO: 17175 - DNA, 25 bp, Saccharomyces pastorianus
gaaacgggcactttgcttcatgata

SEQ ID NO: 17176 - DNA, 25 bp, Saccharomyces pastorianus
gatgactgcagttacggctacacgt

SEQ ID NO: 17177 - DNA, 25 bp, Saccharomyces pastorianus
aaggattccatgacacacattgccc

SEQ ID NO: 17178 - DNA, 25 bp, Saccharomyces pastorianus
gagcgaatcggctgttttcgacgat

SEQ ID NO: 17179 - DNA, 25 bp, Saccharomyces pastorianus
aaaagaagaaccctctgcaccaact

SEQ ID NO: 17180 - DNA, 25 bp, Saccharomyces pastorianus
acgcccctcctgcattaaaggatag

SEQ ID NO: 17181 - DNA, 25 bp, Saccharomyces pastorianus
catccgaagaaaccctagagtcagt

SEQ ID NO: 17182 - DNA, 25 bp, Saccharomyces pastorianus
ggaaggttcccaattactcgatagt

SEQ ID NO: 17183 - DNA, 25 bp, Saccharomyces pastorianus
aacttccactgccacaaatatgttt

SEQ ID NO: 17184 - DNA, 25 bp, Saccharomyces pastorianus
ttcatcggtttcttgtaccgtttga

SEQ ID NO: 17185 - DNA, 25 bp, Saccharomyces pastorianus
tagtttcagaacaggccaagccaca

SEQ ID NO: 17186 - DNA, 25 bp, Saccharomyces pastorianus
cattcttacagaagagacgcccctc

SEQ ID NO: 17187 - DNA, 25 bp, Saccharomyces pastorianus
aagaaacactcaaagggctccacct

SEQ ID NO: 17188 - DNA, 25 bp, Saccharomyces pastorianus
aagagcaactcaagatcgaattcga

SEQ ID NO: 17189 - DNA, 25 bp, Saccharomyces pastorianus
tttgactgactctccatccgaagaa

SEQ ID NO: 17190 - DNA, 25 bp, Saccharomyces pastorianus
gggaaatttgcccattccgactcgg

SEQ ID NO: 17191 - DNA, 25 bp, Saccharomyces pastorianus
gatcatccgggactggataccgaca

SEQ ID NO: 17192 - DNA, 25 bp, Saccharomyces pastorianus
tggaaggacgcaccaaatccggatc

SEQ ID NO: 17193 - DNA, 25 bp, Saccharomyces pastorianus
gacttagaattatggctgcacgctt

SEQ ID NO: 17194 - DNA, 25 bp, Saccharomyces pastorianus
aagacccattgctgtcagacttaga

SEQ ID NO: 17195 - DNA, 25 bp, Saccharomyces pastorianus
gaatactctttttgacgacattgct

SEQ ID NO: 17196 - DNA, 25 bp, Saccharomyces pastorianus
ttggtcatcccatagtcaacgataa

SEQ ID NO: 17197 - DNA, 25 bp, Saccharomyces pastorianus
gaagtcgcccatatattccatcgat

SEQ ID NO: 17198 - DNA, 25 bp, Saccharomyces pastorianus
aatccggatccatttagccaggctt

SEQ ID NO: 17199 - DNA, 25 bp, Saccharomyces pastorianus
tccgactcggtactgaacggcgaat

SEQ ID NO: 17200 - DNA, 25 bp, Saccharomyces pastorianus
attccccacgccgatgaaagtgttg

SEQ ID NO: 17201 - DNA, 25 bp, Saccharomyces pastorianus
aagcgttactagctgcagaggaaga

SEQ ID NO: 17202 - DNA, 25 bp, Saccharomyces pastorianus
gcttttcggaatccgctgctaagaa

SEQ ID NO: 17203 - DNA, 25 bp, Saccharomyces pastorianus
aacgcttttcggaatccgctgctaa

SEQ ID NO: 17204 - DNA, 25 bp, Saccharomyces pastorianus
gagaccaagctcgtattaagcagag

SEQ ID NO: 17205 - DNA, 25 bp, Saccharomyces pastorianus
gcaaggaaaagagaccaagctcgta

SEQ ID NO: 17206 - DNA, 25 bp, Saccharomyces pastorianus
gaaaagctagaagcagaggaggctt

SEQ ID NO: 17207 - DNA, 25 bp, Saccharomyces pastorianus
aaagcagctggtatggcaaggaaaa

SEQ ID NO: 17208 - DNA, 25 bp, Saccharomyces pastorianus
aggcttctaagtgggagcaaggctc

SEQ ID NO: 17209 - DNA, 25 bp, Saccharomyces pastorianus
gggaaacgcttttcggaatccgctg

SEQ ID NO: 17210 - DNA, 25 bp, Saccharomyces pastorianus
taagggccaagaaagagcgtgaagc

SEQ ID NO: 17211 - DNA, 25 bp, Saccharomyces pastorianus
gagcgtgaagcgttactagctgcag

SEQ ID NO: 17212 - DNA, 25 bp, Saccharomyces pastorianus
tgttcgcagcgagttggatgtcttt

SEQ ID NO: 17213 - DNA, 25 bp, Saccharomyces pastorianus
gaacataagagttgtcattcccatt

SEQ ID NO: 17214 - DNA, 25 bp, Saccharomyces pastorianus
gtaagtgcagcatcggtatatttag

SEQ ID NO: 17215 - DNA, 25 bp, Saccharomyces pastorianus
gatacttcaaattcggtggatccac

SEQ ID NO: 17216 - DNA, 25 bp, Saccharomyces pastorianus
tgtaaacccaatggctgttcgcagc

SEQ ID NO: 17217 - DNA, 25 bp, Saccharomyces pastorianus
attcccattgattctcctgagtttg

SEQ ID NO: 17218 - DNA, 25 bp, Saccharomyces pastorianus
gttatcccacaggacaacttcatgt

SEQ ID NO: 17219 - DNA, 25 bp, Saccharomyces pastorianus
aaattcttcggagcgtattgaaacg

SEQ ID NO: 17220 - DNA, 25 bp, Saccharomyces pastorianus
gctagagccgctgggaatgtcacat

SEQ ID NO: 17221 - DNA, 25 bp, Saccharomyces pastorianus
cggtggatccactattgtaattgtt

SEQ ID NO: 17222 - DNA, 25 bp, Saccharomyces pastorianus
aacttcatgtttgactcagatcttg

SEQ ID NO: 17223 - DNA, 25 bp, Saccharomyces pastorianus
ccatggtatccacagagacttcaag

SEQ ID NO: 17224 - DNA, 25 bp, Saccharomyces pastorianus
attcacctctcctccaaagaataat

SEQ ID NO: 17225 - DNA, 25 bp, Saccharomyces pastorianus
agaccagtgttcaatgatcccctag

SEQ ID NO: 17226 - DNA, 25 bp, Saccharomyces pastorianus
aagagactatcgtatccataacgca

SEQ ID NO: 17227 - DNA, 25 bp, Saccharomyces pastorianus
ggtgatctatgccatggtatccaca

SEQ ID NO: 17228 - DNA, 25 bp, Saccharomyces pastorianus
ttggccagagaaccgaacaccgttg

SEQ ID NO: 17229 - DNA, 25 bp, Saccharomyces pastorianus
atccgccaagcattctcctcaaaaa

SEQ ID NO: 17230 - DNA, 25 bp, Saccharomyces pastorianus
tgtcaaagttacattcacctctcct

SEQ ID NO: 17231 - DNA, 25 bp, Saccharomyces pastorianus
gaggacggattcgaccattggtgat

SEQ ID NO: 17232 - DNA, 25 bp, Saccharomyces pastorianus
atgatcccctagtagtgaggacgga

SEQ ID NO: 17233 - DNA, 25 bp, Saccharomyces pastorianus
ccagttgaatttgagccgggtctat

SEQ ID NO: 17234 - DNA, 25 bp, Saccharomyces pastorianus
gacgttgtcttgttgatcaagaaga

SEQ ID NO: 17235 - DNA, 25 bp, Saccharomyces pastorianus
gattggtgaactagacttcagtgac

SEQ ID NO: 17236 - DNA, 25 bp, Saccharomyces pastorianus
tatcagtcgctttgtactcgttgtt

SEQ ID NO: 17237 - DNA, 25 bp, Saccharomyces pastorianus
gccagccagacaaaacgatgtcaca

SEQ ID NO: 17238 - DNA, 25 bp, Saccharomyces pastorianus
gttatcggtgatgcccttaacatga

SEQ ID NO: 17239 - DNA, 25 bp, Saccharomyces pastorianus
gagttacgactctgttatcaacgtt

SEQ ID NO: 17240 - DNA, 25 bp, Saccharomyces pastorianus
gtactcgttgtttgccgctgatagc

SEQ ID NO: 17241 - DNA, 25 bp, Saccharomyces pastorianus
ttaacatgagacacccattgaccgg

SEQ ID NO: 17242 - DNA, 25 bp, Saccharomyces pastorianus
tgtttgccgctgatagcgataactt

SEQ ID NO: 17243 - DNA, 25 bp, Saccharomyces pastorianus
gatgcccttaacatgagacacccat

SEQ ID NO: 17244 - DNA, 25 bp, Saccharomyces pastorianus
gttatcaacgttttatcagtcgctt

SEQ ID NO: 17245 - DNA, 25 bp, Saccharomyces pastorianus
attccagcctcaaccaatgttttac

SEQ ID NO: 17246 - DNA, 25 bp, Saccharomyces pastorianus
aatgttttaccacccatcaatgccg

SEQ ID NO: 17247 - DNA, 25 bp, Saccharomyces pastorianus
tatgccctcaggtttcatggcaggt

SEQ ID NO: 17248 - DNA, 25 bp, Saccharomyces pastorianus
ttgaaaagccttacttcactgcgcc

SEQ ID NO: 17249 - DNA, 25 bp, Saccharomyces pastorianus
gggaacatatcacctcatatgccct

SEQ ID NO: 17250 - DNA, 25 bp, Saccharomyces pastorianus
atcccggtgggatgccatttcaagg

SEQ ID NO: 17251 - DNA, 25 bp, Saccharomyces pastorianus
atcaggtccatctgggatgccggca

SEQ ID NO: 17252 - DNA, 25 bp, Saccharomyces pastorianus
atgggaggtccaaacgcttcaccaa

SEQ ID NO: 17253 - DNA, 25 bp, Saccharomyces pastorianus
caggttccagcaacgccaaatgaat

SEQ ID NO: 17254 - DNA, 25 bp, Saccharomyces pastorianus
gatgaatggtttcgccgcaggatcc

SEQ ID NO: 17255 - DNA, 25 bp, Saccharomyces pastorianus
tggttcggcaattcacagtcatggt

SEQ ID NO: 17256 - DNA, 25 bp, Saccharomyces pastorianus
aaaaatgcttaacctctccatacac

SEQ ID NO: 17257 - DNA, 25 bp, Saccharomyces pastorianus
aaaggacgcagcttcaagtgctaag

SEQ ID NO: 17258 - DNA, 25 bp, Saccharomyces pastorianus
atcgctcaagagctggccgtggcca

SEQ ID NO: 17259 - DNA, 25 bp, Saccharomyces pastorianus
ctatcttctatcttcggtggcggag

SEQ ID NO: 17260 - DNA, 25 bp, Saccharomyces pastorianus
tggccaatgccactgaactggtgaa

SEQ ID NO: 17261 - DNA, 25 bp, Saccharomyces pastorianus
tgcattgaccagtgcttagccaaat

SEQ ID NO: 17262 - DNA, 25 bp, Saccharomyces pastorianus
ggtggcggagcaccatctcaacaaa

SEQ ID NO: 17263 - DNA, 25 bp, Saccharomyces pastorianus
gaactaaagaaccagatcgctcaag

SEQ ID NO: 17264 - DNA, 25 bp, Saccharomyces pastorianus
gaaatgacccatgcattgaccagtg

SEQ ID NO: 17265 - DNA, 25 bp, Saccharomyces pastorianus
ttggaacgtcatatcgaaagcttat

SEQ ID NO: 17266 - DNA, 25 bp, Saccharomyces pastorianus
gtgctaagacttcatcaaacccaat

SEQ ID NO: 17267 - DNA, 25 bp, Saccharomyces pastorianus
acgacgaaactggtcaggcggccaa

SEQ ID NO: 17268 - DNA, 25 bp, Saccharomyces pastorianus
gcagcctccttccaatatttttgta

SEQ ID NO: 17269 - DNA, 25 bp, Saccharomyces pastorianus
gctccatatctaaattcgcacggtg

SEQ ID NO: 17270 - DNA, 25 bp, Saccharomyces pastorianus
gtgaccatactttctaacggatttt

SEQ ID NO: 17271 - DNA, 25 bp, Saccharomyces pastorianus
gggtgacgaattccgagtgaccata

SEQ ID NO: 17272 - DNA, 25 bp, Saccharomyces pastorianus
tatttttgtatctgctccatatcta

SEQ ID NO: 17273 - DNA, 25 bp, Saccharomyces pastorianus
caggcggccaacttattcggcgttg

SEQ ID NO: 17274 - DNA, 25 bp, Saccharomyces pastorianus
gaagtttgtctgcatctgacgcagc

SEQ ID NO: 17275 - DNA, 25 bp, Saccharomyces pastorianus
ggccccagtttgatggagcgactat

SEQ ID NO: 17276 - DNA, 25 bp, Saccharomyces pastorianus
gaaacacacttcaacctcagggaaa

SEQ ID NO: 17277 - DNA, 25 bp, Saccharomyces pastorianus
gaccaagaagagtgcctccaacaga

SEQ ID NO: 17278 - DNA, 25 bp, Saccharomyces pastorianus
aagtacccaggaggcgccaagactg

SEQ ID NO: 17279 - DNA, 25 bp, Saccharomyces pastorianus
gtttggcgcaaaccactttgaattt

SEQ ID NO: 17280 - DNA, 25 bp, Saccharomyces pastorianus
ttcggtggcccaataaccttcaaag

SEQ ID NO: 17281 - DNA, 25 bp, Saccharomyces pastorianus
gtctgcatctgatccaaattccaag

SEQ ID NO: 17282 - DNA, 25 bp, Saccharomyces pastorianus
gtagccctggtaacatcgaagacaa

SEQ ID NO: 17283 - DNA, 25 bp, Saccharomyces pastorianus
aaaacttgccaagtctgggctacaa

SEQ ID NO: 17284 - DNA, 25 bp, Saccharomyces pastorianus
gagaagggctatccagtcgcagcac

SEQ ID NO: 17285 - DNA, 25 bp, Saccharomyces pastorianus
tgtcagttcggtggtgtcgaccaaa

SEQ ID NO: 17286 - DNA, 25 bp, Saccharomyces pastorianus
atcagagaggagttcgccactaaca

SEQ ID NO: 17287 - DNA, 25 bp, Saccharomyces pastorianus
catggttccgggactgactcaaggt

SEQ ID NO: 17288 - DNA, 25 bp, Saccharomyces pastorianus
gggcacatctaatgaatcccatggt

SEQ ID NO: 17289 - DNA, 25 bp, Saccharomyces pastorianus
agatattgttgacgctattggtgat

SEQ ID NO: 17290 - DNA, 25 bp, Saccharomyces pastorianus
agtagaaactccagtgcctctcata

SEQ ID NO: 17291 - DNA, 25 bp, Saccharomyces pastorianus
acgaacgtgcataaagatcctaatt

SEQ ID NO: 17292 - DNA, 25 bp, Saccharomyces pastorianus
agtagcgagccaaccatggcatcgt

SEQ ID NO: 17293 - DNA, 25 bp, Saccharomyces pastorianus
gagattaacccatacctgtctgaat

SEQ ID NO: 17294 - DNA, 25 bp, Saccharomyces pastorianus
ggcatcgtcacccatcaaaacagag

SEQ ID NO: 17295 - DNA, 25 bp, Saccharomyces pastorianus
gaagtcatcacctaagaaacagcaa

SEQ ID NO: 17296 - DNA, 25 bp, Saccharomyces pastorianus
agaatggaatcctcaagttgcaaat

SEQ ID NO: 17297 - DNA, 25 bp, Saccharomyces pastorianus
aaataccctggtgctgagaacaaga

SEQ ID NO: 17298 - DNA, 25 bp, Saccharomyces pastorianus
ggcagcattgtattcttcagacgag

SEQ ID NO: 17299 - DNA, 25 bp, Saccharomyces pastorianus
catacctgtctgaatcggatttgga

SEQ ID NO: 17300 - DNA, 25 bp, Saccharomyces pastorianus
atctgttgccgtacattttgttgcc

SEQ ID NO: 17301 - DNA, 25 bp, Saccharomyces pastorianus
agaagacatgtttaatttgcctgat

SEQ ID NO: 17302 - DNA, 25 bp, Saccharomyces pastorianus
agaatatgatcttgttgtccccatt

SEQ ID NO: 17303 - DNA, 25 bp, Saccharomyces pastorianus
tacccgcttgtaagagagttgcaca

SEQ ID NO: 17304 - DNA, 25 bp, Saccharomyces pastorianus
taagaagcaagtccgtttacccgct

SEQ ID NO: 17305 - DNA, 25 bp, Saccharomyces pastorianus
cccatttccaaactgctagtcttta

SEQ ID NO: 17306 - DNA, 25 bp, Saccharomyces pastorianus
tgccatcatatgctgccacttagaa

SEQ ID NO: 17307 - DNA, 25 bp, Saccharomyces pastorianus
ttttgttgcctattgctagtgcgaa

SEQ ID NO: 17308 - DNA, 25 bp, Saccharomyces pastorianus
agcctgatgccggtgtcgtagaaga

SEQ ID NO: 17309 - DNA, 25 bp, Saccharomyces pastorianus
aagcaaagagatcccattcctgcca

SEQ ID NO: 17310 - DNA, 25 bp, Saccharomyces pastorianus
tgtgtacaacaaatgccgccagaga

SEQ ID NO: 17311 - DNA, 25 bp, Saccharomyces pastorianus
tcgtcgttttgttcctagttttgat

SEQ ID NO: 17312 - DNA, 25 bp, Saccharomyces pastorianus
ctcacattagattccgtcaagccat

SEQ ID NO: 17313 - DNA, 25 bp, Saccharomyces pastorianus
aggcgctagcgcagaatctttcttt

SEQ ID NO: 17314 - DNA, 25 bp, Saccharomyces pastorianus
gatagcgtctttctggacttctatg

SEQ ID NO: 17315 - DNA, 25 bp, Saccharomyces pastorianus
ccattcatttctcaaaccggtgttt

SEQ ID NO: 17316 - DNA, 25 bp, Saccharomyces pastorianus
atggccattaatctctctcacatta

SEQ ID NO: 17317 - DNA, 25 bp, Saccharomyces pastorianus
aacaagctgaggtctttacctggct

SEQ ID NO: 17318 - DNA, 25 bp, Saccharomyces pastorianus
gaagacatggatctcgacactggta

SEQ ID NO: 17319 - DNA, 25 bp, Saccharomyces pastorianus
tatgttcccaatcggcggttcaggc

SEQ ID NO: 17320 - DNA, 25 bp, Saccharomyces pastorianus
ggccatggcccatatcggtaattta

SEQ ID NO: 17321 - DNA, 25 bp, Saccharomyces pastorianus
ctttacctggctgagtgctttatca

SEQ ID NO: 17322 - DNA, 25 bp, Saccharomyces pastorianus
ccggtgccgccaaggctgtcggtaa

SEQ ID NO: 17323 - DNA, 25 bp, Saccharomyces pastorianus
cgccactcaaaagactgtcgatggt

SEQ ID NO: 17324 - DNA, 25 bp, Saccharomyces pastorianus
gttgaacaaggaaaccacctacgat

SEQ ID NO: 17325 - DNA, 25 bp, Saccharomyces pastorianus
tcaaaagactgtcgatggtccatcc

SEQ ID NO: 17326 - DNA, 25 bp, Saccharomyces pastorianus
atcctccaccggtgccgccaaggct

SEQ ID NO: 17327 - DNA, 25 bp, Saccharomyces pastorianus
caaggctgcctctgaaggtaagatg

SEQ ID NO: 17328 - DNA, 25 bp, Saccharomyces pastorianus
tcctccaccggtgccgccaaggctg

SEQ ID NO: 17329 - DNA, 25 bp, Saccharomyces pastorianus
tcaaggctgcctctgaaggtaagat

SEQ ID NO: 17330 - DNA, 25 bp, Saccharomyces pastorianus
gaccgccactcaaaagactgtcgat

SEQ ID NO: 17331 - DNA, 25 bp, Saccharomyces pastorianus
accgccactcaaaagactgtcgatg

SEQ ID NO: 17332 - DNA, 25 bp, Saccharomyces pastorianus
ctctgaaggtaagatgaagggtgtt

SEQ ID NO: 17333 - DNA, 25 bp, Saccharomyces pastorianus
gaggcttaccagtttactcatgaag

SEQ ID NO: 17334 - DNA, 25 bp, Saccharomyces pastorianus
gaacgaatacttgctaaccttaaat

SEQ ID NO: 17335 - DNA, 25 bp, Saccharomyces pastorianus
gaggatcttgtcacgttgaacccaa

SEQ ID NO: 17336 - DNA, 25 bp, Saccharomyces pastorianus
tacggtttcattcagatccccaagg

SEQ ID NO: 17337 - DNA, 25 bp, Saccharomyces pastorianus
taaatattttgatcctgtcttcgag

SEQ ID NO: 17338 - DNA, 25 bp, Saccharomyces pastorianus
agcagttggtgttccatgctccagt

SEQ ID NO: 17339 - DNA, 25 bp, Saccharomyces pastorianus
gcgtgagtcacttaacactttcatg

SEQ ID NO: 17340 - DNA, 25 bp, Saccharomyces pastorianus
atattcgatctcctaacaggcgcag

SEQ ID NO: 17341 - DNA, 25 bp, Saccharomyces pastorianus
gcagatgccaacgtctcatcagaga

SEQ ID NO: 17342 - DNA, 25 bp, Saccharomyces pastorianus
tgctccagtttctgttccctttgaa

SEQ ID NO: 17343 - DNA, 25 bp, Saccharomyces pastorianus
aatcccacccttacaattcgaagag

SEQ ID NO: 17344 - DNA, 25 bp, Saccharomyces pastorianus
gctcgctctgatagacgctggtata

SEQ ID NO: 17345 - DNA, 25 bp, Saccharomyces pastorianus
aggcgtgtccttgagattcaaactt

SEQ ID NO: 17346 - DNA, 25 bp, Saccharomyces pastorianus
atcactctcgtgaagggtccaaagg

SEQ ID NO: 17347 - DNA, 25 bp, Saccharomyces pastorianus
tgatcaatggtatcacgctcgctct

SEQ ID NO: 17348 - DNA, 25 bp, Saccharomyces pastorianus
tagagaacgtcctagccatcggtat

SEQ ID NO: 17349 - DNA, 25 bp, Saccharomyces pastorianus
gccatcggtattgcgggtgctcata

SEQ ID NO: 17350 - DNA, 25 bp, Saccharomyces pastorianus
gttgaacatttaccccagaacagtt

SEQ ID NO: 17351 - DNA, 25 bp, Saccharomyces pastorianus
aatccccttggacagactagagaac

SEQ ID NO: 17352 - DNA, 25 bp, Saccharomyces pastorianus
tatcgaaatccacgtccttgagcag

SEQ ID NO: 17353 - DNA, 25 bp, Saccharomyces pastorianus
tggtggtatcatgggcacactgatc

SEQ ID NO: 17354 - DNA, 25 bp, Saccharomyces pastorianus
atggatacttcgaaggccctgttaa

SEQ ID NO: 17355 - DNA, 25 bp, Saccharomyces pastorianus
ttgccaatggtcataaccacggatt

SEQ ID NO: 17356 - DNA, 25 bp, Saccharomyces pastorianus
tgaagaaccaaagactaagccacct

SEQ ID NO: 17357 - DNA, 25 bp, Saccharomyces pastorianus
gaacttagtggaatctacgcatgct

SEQ ID NO: 17358 - DNA, 25 bp, Saccharomyces pastorianus
gatatcctaagaaattgtctcgcaa

SEQ ID NO: 17359 - DNA, 25 bp, Saccharomyces pastorianus
acggtgaagaggtcatcgaagcccc

SEQ ID NO: 17360 - DNA, 25 bp, Saccharomyces pastorianus
cacgttatgtgggactgcccaaatt

SEQ ID NO: 17361 - DNA, 25 bp, Saccharomyces pastorianus
taagattaaataccccacgttatgt

SEQ ID NO: 17362 - DNA, 25 bp, Saccharomyces pastorianus
aggattttcccggtatcaatattga

SEQ ID NO: 17363 - DNA, 25 bp, Saccharomyces pastorianus
ttggccgcaggcaacaaatgcagcc

SEQ ID NO: 17364 - DNA, 25 bp, Saccharomyces pastorianus
tctacgcatgctgtttctatcggcc

SEQ ID NO: 17365 - DNA, 25 bp, Saccharomyces pastorianus
acctgtagtctaattgattccatgg

SEQ ID NO: 17366 - DNA, 25 bp, Saccharomyces pastorianus
agtccatgaccgacatcctatatat

SEQ ID NO: 17367 - DNA, 25 bp, Saccharomyces pastorianus
aagtcccggtcgagtcaagttgcat

SEQ ID NO: 17368 - DNA, 25 bp, Saccharomyces pastorianus
attaattgctgcgtatgccggtgtt

SEQ ID NO: 17369 - DNA, 25 bp, Saccharomyces pastorianus
cggtgggtttatacaattcgctagt

SEQ ID NO: 17370 - DNA, 25 bp, Saccharomyces pastorianus
agttgaacaccaagtccatgaccga

SEQ ID NO: 17371 - DNA, 25 bp, Saccharomyces pastorianus
tgtgtgccgagttcaaagtcccggt

SEQ ID NO: 17372 - DNA, 25 bp, Saccharomyces pastorianus
tcaccaagggtgtacccgaactttg

SEQ ID NO: 17373 - DNA, 25 bp, Saccharomyces pastorianus
ggtaatgacctaccagccatgggta

SEQ ID NO: 17374 - DNA, 25 bp, Saccharomyces pastorianus
ctaactggtaagacactgggtgcta

SEQ ID NO: 17375 - DNA, 25 bp, Saccharomyces pastorianus
aacacttttacaactgtgtgccgag

SEQ ID NO: 17376 - DNA, 25 bp, Saccharomyces pastorianus
aaacttgctgttttgagcggtgggt

SEQ ID NO: 17377 - DNA, 25 bp, Saccharomyces pastorianus
ttagggctccaagcattcaaggatg

SEQ ID NO: 17378 - DNA, 25 bp, Saccharomyces pastorianus
aagctgcaccaggaccttggattgt

SEQ ID NO: 17379 - DNA, 25 bp, Saccharomyces pastorianus
tgtgggataccgcttctgaaattca

SEQ ID NO: 17380 - DNA, 25 bp, Saccharomyces pastorianus
agttacccaaacacgcttgtcgaag

SEQ ID NO: 17381 - DNA, 25 bp, Saccharomyces pastorianus
gttgcgcccatcgaatacaagcata

SEQ ID NO: 17382 - DNA, 25 bp, Saccharomyces pastorianus
gagctgccgtttcatgtcgtagacg

SEQ ID NO: 17383 - DNA, 25 bp, Saccharomyces pastorianus
gctgcattgttgtgtaagttaccca

SEQ ID NO: 17384 - DNA, 25 bp, Saccharomyces pastorianus
ttagaggttgtctctcctcaacagt

SEQ ID NO: 17385 - DNA, 25 bp, Saccharomyces pastorianus
aaggatgcgtgcaacaccgagctgc

SEQ ID NO: 17386 - DNA, 25 bp, Saccharomyces pastorianus
gagtgcaaggcccataacgtttcct

SEQ ID NO: 17387 - DNA, 25 bp, Saccharomyces pastorianus
cagtgggccttcttctacttttgaa

SEQ ID NO: 17388 - DNA, 25 bp, Saccharomyces pastorianus
ttgcaagctactacggaaacccaga

SEQ ID NO: 17389 - DNA, 25 bp, Saccharomyces pastorianus
aaaaggcccttcgattgcaagctac

SEQ ID NO: 17390 - DNA, 25 bp, Saccharomyces pastorianus
gaagacactatatcctgacattgaa

SEQ ID NO: 17391 - DNA, 25 bp, Saccharomyces pastorianus
taaccttgacgaacagtaccgatta

SEQ ID NO: 17392 - DNA, 25 bp, Saccharomyces pastorianus
gagcgtgcccaaagctagactgcta

SEQ ID NO: 17393 - DNA, 25 bp, Saccharomyces pastorianus
tgacattgaattcgttaaccttgac

SEQ ID NO: 17394 - DNA, 25 bp, Saccharomyces pastorianus
ttatccgcgaaaatatttgaccaga

SEQ ID NO: 17395 - DNA, 25 bp, Saccharomyces pastorianus
gacatctgaagacactatatcctga

SEQ ID NO: 17396 - DNA, 25 bp, Saccharomyces pastorianus
ttgaccagaattttaatcccaccgg

SEQ ID NO: 17397 - DNA, 25 bp, Saccharomyces pastorianus
taaaggtagccgaattatccgcgaa

SEQ ID NO: 17398 - DNA, 25 bp, Saccharomyces pastorianus
taatcccaccggtattagaacaggt

SEQ ID NO: 17399 - DNA, 25 bp, Saccharomyces pastorianus
tctggtgttcttaactcctacagtt

SEQ ID NO: 17400 - DNA, 25 bp, Saccharomyces pastorianus
tatcatgggcagtcttttcaactta

SEQ ID NO: 17401 - DNA, 25 bp, Saccharomyces pastorianus
gggtggtatttccatagaactccaa

SEQ ID NO: 17402 - DNA, 25 bp, Saccharomyces pastorianus
gaggctattattgcgctcatcaacc

SEQ ID NO: 17403 - DNA, 25 bp, Saccharomyces pastorianus
agtaaactgtaccactgccagctaa

SEQ ID NO: 17404 - DNA, 25 bp, Saccharomyces pastorianus
gcatgcctactacgttggaacttaa

SEQ ID NO: 17405 - DNA, 25 bp, Saccharomyces pastorianus
cacgttctatattctgcattgccaa

SEQ ID NO: 17406 - DNA, 25 bp, Saccharomyces pastorianus
atttttcatttgtcactgtacggca

SEQ ID NO: 17407 - DNA, 25 bp, Saccharomyces pastorianus
gttgctgtttattattctggtgttc

SEQ ID NO: 17408 - DNA, 25 bp, Saccharomyces pastorianus
caaccatttccctttgtttgcatta

SEQ ID NO: 17409 - DNA, 25 bp, Saccharomyces pastorianus
gccgtatagcctattgttggcgcaa

SEQ ID NO: 17410 - DNA, 25 bp, Saccharomyces pastorianus
aattatttcttcgtttttgtcagcg

SEQ ID NO: 17411 - DNA, 25 bp, Saccharomyces pastorianus
gattctgatcacaagtccgggtttt

SEQ ID NO: 17412 - DNA, 25 bp, Saccharomyces pastorianus
accccacggattacttgtttgctga

SEQ ID NO: 17413 - DNA, 25 bp, Saccharomyces pastorianus
gcaaattgcattggacttggtcaaa

SEQ ID NO: 17414 - DNA, 25 bp, Saccharomyces pastorianus
gtgccgtcccatttgctaatgaatt

SEQ ID NO: 17415 - DNA, 25 bp, Saccharomyces pastorianus
gaagtaggaggtgaccccacggatt

SEQ ID NO: 17416 - DNA, 25 bp, Saccharomyces pastorianus
tccgggttttccaagcaatcgttgt

SEQ ID NO: 17417 - DNA, 25 bp, Saccharomyces pastorianus
taaatagcgcattccctcacttaac

SEQ ID NO: 17418 - DNA, 25 bp, Saccharomyces pastorianus
atattgaaagaatgggtgccgtccc

SEQ ID NO: 17419 - DNA, 25 bp, Saccharomyces pastorianus
tacaagtttcttatctgcattgact

SEQ ID NO: 17420 - DNA, 25 bp, Saccharomyces pastorianus
ctcccgccgcattcaaattatttgt

SEQ ID NO: 17421 - DNA, 25 bp, Saccharomyces pastorianus
ggaccgctttgatattatgtaccat

SEQ ID NO: 17422 - DNA, 25 bp, Saccharomyces pastorianus
gacactacacattctatcttttcag

SEQ ID NO: 17423 - DNA, 25 bp, Saccharomyces pastorianus
taaaagacttgcaacccgccaaaga

SEQ ID NO: 17424 - DNA, 25 bp, Saccharomyces pastorianus
taatgagacctaaccagctcacctt

SEQ ID NO: 17425 - DNA, 25 bp, Saccharomyces pastorianus
tgacaccaatctaccatttttctac

SEQ ID NO: 17426 - DNA, 25 bp, Saccharomyces pastorianus
atttttctacttttgcataccttga

SEQ ID NO: 17427 - DNA, 25 bp, Saccharomyces pastorianus
gaacctcgttattatatcttaccat

SEQ ID NO: 17428 - DNA, 25 bp, Saccharomyces pastorianus
acatgcagctgtgaaccgttaataa

SEQ ID NO: 17429 - DNA, 25 bp, Saccharomyces pastorianus
tattattccatctcccttattcgaa

SEQ ID NO: 17430 - DNA, 25 bp, Saccharomyces pastorianus
gacacatgtgtcatggaccgctttg

SEQ ID NO: 17431 - DNA, 25 bp, Saccharomyces pastorianus
ggaagcgatacatttgcccatacaa

SEQ ID NO: 17432 - DNA, 25 bp, Saccharomyces pastorianus
gcgaaattccaaagcatgccacgag

SEQ ID NO: 17433 - DNA, 25 bp, Saccharomyces pastorianus
caatgggcccatacaagactatttt

SEQ ID NO: 17434 - DNA, 25 bp, Saccharomyces pastorianus
gccacgagcgcacctaatgaaactt

SEQ ID NO: 17435 - DNA, 25 bp, Saccharomyces pastorianus
gcaaccttctacttttggtgacgaa

SEQ ID NO: 17436 - DNA, 25 bp, Saccharomyces pastorianus
aaataaaccggaggcgccagtggca

SEQ ID NO: 17437 - DNA, 25 bp, Saccharomyces pastorianus
gaaccacctcttcaacagcaaaaat

SEQ ID NO: 17438 - DNA, 25 bp, Saccharomyces pastorianus
gaagatgaagatgtcgctgaaccaa

SEQ ID NO: 17439 - DNA, 25 bp, Saccharomyces pastorianus
aaactttaagctccgctgaagtggc

SEQ ID NO: 17440 - DNA, 25 bp, Saccharomyces pastorianus
gccagtggcaaatgagcaaccttct

SEQ ID NO: 17441 - DNA, 25 bp, Saccharomyces pastorianus
gcaaaaatacatgcctggcgcgcaa

SEQ ID NO: 17442 - DNA, 25 bp, Saccharomyces pastorianus
gttacagcaacagaaacctcaacct

SEQ ID NO: 17443 - DNA, 25 bp, Saccharomyces pastorianus
gcatccgtgggctctttaagattga

SEQ ID NO: 17444 - DNA, 25 bp, Saccharomyces pastorianus
taacgccgagtacgatcttgtggat

SEQ ID NO: 17445 - DNA, 25 bp, Saccharomyces pastorianus
gttcaatcaaatcccactacacaga

SEQ ID NO: 17446 - DNA, 25 bp, Saccharomyces pastorianus
ttgcctgctcagtcggaaatttaga

SEQ ID NO: 17447 - DNA, 25 bp, Saccharomyces pastorianus
aaggcgtcacatgcctacatttggc

SEQ ID NO: 17448 - DNA, 25 bp, Saccharomyces pastorianus
ataaggtcaccaaccaaggcgtcac

SEQ ID NO: 17449 - DNA, 25 bp, Saccharomyces pastorianus
ataatggcgcctccgtgagaatcaa

SEQ ID NO: 17450 - DNA, 25 bp, Saccharomyces pastorianus
gacgctgccgtattgttagtagaaa

SEQ ID NO: 17451 - DNA, 25 bp, Saccharomyces pastorianus
actgcttcattgcaaaccttcgttg

SEQ ID NO: 17452 - DNA, 25 bp, Saccharomyces pastorianus
tggactccaatattccacgctttag

SEQ ID NO: 17453 - DNA, 25 bp, Saccharomyces pastorianus
gatggacgccattccatattgcctg

SEQ ID NO: 17454 - DNA, 25 bp, Saccharomyces pastorianus
tctgcccagtattaccacgatgcaa

SEQ ID NO: 17455 - DNA, 25 bp, Saccharomyces pastorianus
tcagacgctaaagaggccactatta

SEQ ID NO: 17456 - DNA, 25 bp, Saccharomyces pastorianus
gttttacgtcgactattgcaagctt

SEQ ID NO: 17457 - DNA, 25 bp, Saccharomyces pastorianus
taccatgccccttatattgggctca

SEQ ID NO: 17458 - DNA, 25 bp, Saccharomyces pastorianus
caataatgtcatgggtcttgctcat

SEQ ID NO: 17459 - DNA, 25 bp, Saccharomyces pastorianus
taataccaggcttatcgtccacttt

SEQ ID NO: 17460 - DNA, 25 bp, Saccharomyces pastorianus
tattgggctcatgttgctttgcgta

SEQ ID NO: 17461 - DNA, 25 bp, Saccharomyces pastorianus
ggttgtcgggaagtattacgctcgt

SEQ ID NO: 17462 - DNA, 25 bp, Saccharomyces pastorianus
ttgcaagcttacatactgacccaga

SEQ ID NO: 17463 - DNA, 25 bp, Saccharomyces pastorianus
atcgtccactttagttgcctttatg

SEQ ID NO: 17464 - DNA, 25 bp, Saccharomyces pastorianus
gattcagtaacacatctgcccagta

SEQ ID NO: 17465 - DNA, 25 bp, Saccharomyces pastorianus
gtgacgagtcagttgcctccataaa

SEQ ID NO: 17466 - DNA, 25 bp, Saccharomyces pastorianus
gataacaccctcatgaaatacgata

SEQ ID NO: 17467 - DNA, 25 bp, Saccharomyces pastorianus
agggcagcggaaggttcaccaccat

SEQ ID NO: 17468 - DNA, 25 bp, Saccharomyces pastorianus
atcatcaccatcatgtttcaaggac

SEQ ID NO: 17469 - DNA, 25 bp, Saccharomyces pastorianus
aaatcagctggcctatcaccaagaa

SEQ ID NO: 17470 - DNA, 25 bp, Saccharomyces pastorianus
taaggccaaaaccttccaggcaaat

SEQ ID NO: 17471 - DNA, 25 bp, Saccharomyces pastorianus
accaagatttacctcacatccaatg

SEQ ID NO: 17472 - DNA, 25 bp, Saccharomyces pastorianus
ggcagaaaattaactcccgttgagt

SEQ ID NO: 17473 - DNA, 25 bp, Saccharomyces pastorianus
aagcgtagttccaagcgtagttcaa

SEQ ID NO: 17474 - DNA, 25 bp, Saccharomyces pastorianus
catcatcttcttcagggcagcggaa

SEQ ID NO: 17475 - DNA, 25 bp, Saccharomyces pastorianus
gaacgtcaactacatcatcttcttc

SEQ ID NO: 17476 - DNA, 25 bp, Saccharomyces pastorianus
acagaatctgtccttattggccacg

SEQ ID NO: 17477 - DNA, 25 bp, Saccharomyces pastorianus
ggttgcactgctgggtaccatctaa

SEQ ID NO: 17478 - DNA, 25 bp, Saccharomyces pastorianus
gtaccatctaacgaggattgccaat

SEQ ID NO: 17479 - DNA, 25 bp, Saccharomyces pastorianus
cttttgggcgcccactttgaaatgg

SEQ ID NO: 17480 - DNA, 25 bp, Saccharomyces pastorianus
agacacctgcggctgtcgcggcaaa

SEQ ID NO: 17481 - DNA, 25 bp, Saccharomyces pastorianus
acgtacaaacaagccctacactata

SEQ ID NO: 17482 - DNA, 25 bp, Saccharomyces pastorianus
atcagcctttaattctgccttcaga

SEQ ID NO: 17483 - DNA, 25 bp, Saccharomyces pastorianus
attaagcccaagaactacctgctcg

SEQ ID NO: 17484 - DNA, 25 bp, Saccharomyces pastorianus
aaagtccgcatctgcctcggtgaat

SEQ ID NO: 17485 - DNA, 25 bp, Saccharomyces pastorianus
tgtgaacttcttcctgggttgcact

SEQ ID NO: 17486 - DNA, 25 bp, Saccharomyces pastorianus
gttggtctttgcagggctaaacgat

SEQ ID NO: 17487 - DNA, 25 bp, Saccharomyces pastorianus
aaatcgtgaactgcgtgggacctgt

SEQ ID NO: 17488 - DNA, 25 bp, Saccharomyces pastorianus
ccaggcatcgttgcgggtagttcaa

SEQ ID NO: 17489 - DNA, 25 bp, Saccharomyces pastorianus
aacactgacgggtccaacgaggtgc

SEQ ID NO: 17490 - DNA, 25 bp, Saccharomyces pastorianus
acgtctcgctgctatattctgatat

SEQ ID NO: 17491 - DNA, 25 bp, Saccharomyces pastorianus
acgaagaatttcagccacacgtctc

SEQ ID NO: 17492 - DNA, 25 bp, Saccharomyces pastorianus
tgtgcggccgctattcaatcggtaa

SEQ ID NO: 17493 - DNA, 25 bp, Saccharomyces pastorianus
gatattcgtccagtgagccaggcat

SEQ ID NO: 17494 - DNA, 25 bp, Saccharomyces pastorianus
gtgacgtctcacttggtatgtaaca

SEQ ID NO: 17495 - DNA, 25 bp, Saccharomyces pastorianus
aacaagatccttacttcctgtgcgg

SEQ ID NO: 17496 - DNA, 25 bp, Saccharomyces pastorianus
gacgccttggacgtgcaattggtga

SEQ ID NO: 17497 - DNA, 25 bp, Saccharomyces pastorianus
agatgggacttcgacatctcttcgt

SEQ ID NO: 17498 - DNA, 25 bp, Saccharomyces pastorianus
atgctctttgttccccggagaagaa

SEQ ID NO: 17499 - DNA, 25 bp, Saccharomyces pastorianus
gacgacggacacacatgctctttgt

SEQ ID NO: 17500 - DNA, 25 bp, Saccharomyces pastorianus
agtctggtgctacaattcgccgaaa

SEQ ID NO: 17501 - DNA, 25 bp, Saccharomyces pastorianus
gctccccagtgtcttggtcaatgaa

SEQ ID NO: 17502 - DNA, 25 bp, Saccharomyces pastorianus
atcgcggacgccaagaacgtttgct

SEQ ID NO: 17503 - DNA, 25 bp, Saccharomyces pastorianus
acaaagacactttcccgcatataaa

SEQ ID NO: 17504 - DNA, 25 bp, Saccharomyces pastorianus
aagatcgccgaggagtacgcgtctt

SEQ ID NO: 17505 - DNA, 25 bp, Saccharomyces pastorianus
acctggtcctactgggatgtggcga

SEQ ID NO: 17506 - DNA, 25 bp, Saccharomyces pastorianus
agtgctatacgaaggcctggtgaac

SEQ ID NO: 17507 - DNA, 25 bp, Saccharomyces pastorianus
aaccagtccttgatcggcggtggcg

SEQ ID NO: 17508 - DNA, 25 bp, Saccharomyces pastorianus
gaagaattcaactacctcgtggaag

SEQ ID NO: 17509 - DNA, 25 bp, Saccharomyces pastorianus
atggacgtcgatgcaatctttcagg

SEQ ID NO: 17510 - DNA, 25 bp, Saccharomyces pastorianus
gacgataccattgcccttacaagaa

SEQ ID NO: 17511 - DNA, 25 bp, Saccharomyces pastorianus
gaactctgtttgtaactctgtttcc

SEQ ID NO: 17512 - DNA, 25 bp, Saccharomyces pastorianus
gtttcatccaggttctttcacgcaa

SEQ ID NO: 17513 - DNA, 25 bp, Saccharomyces pastorianus
atggccccatcatattcatcttatt

SEQ ID NO: 17514 - DNA, 25 bp, Saccharomyces pastorianus
tgaaggctactactaccttgccaat

SEQ ID NO: 17515 - DNA, 25 bp, Saccharomyces pastorianus
gactctcctagtttggcagtgtgta

SEQ ID NO: 17516 - DNA, 25 bp, Saccharomyces pastorianus
aatccctcctacaatgaactctgtt

SEQ ID NO: 17517 - DNA, 25 bp, Saccharomyces pastorianus
gcgatttaccgcaacaagaccttaa

SEQ ID NO: 17518 - DNA, 25 bp, Saccharomyces pastorianus
attctggttgtaactctgcttctga

SEQ ID NO: 17519 - DNA, 25 bp, Saccharomyces pastorianus
gaacaagcttgtctcttttacagaa

SEQ ID NO: 17520 - DNA, 25 bp, Saccharomyces pastorianus
ttgatgcaatgctctatgttaccga

SEQ ID NO: 17521 - DNA, 25 bp, Saccharomyces pastorianus
gcgatacagaatatcctcacggaat

SEQ ID NO: 17522 - DNA, 25 bp, Saccharomyces pastorianus
gcctggcctttcttacaaccagtta

SEQ ID NO: 17523 - DNA, 25 bp, Saccharomyces pastorianus
gaggtgcctgactactatgatttta

SEQ ID NO: 17524 - DNA, 25 bp, Saccharomyces pastorianus
caattgacccgatgactattcctgg

SEQ ID NO: 17525 - DNA, 25 bp, Saccharomyces pastorianus
gaatcacaaaaccatgcggcggcct

SEQ ID NO: 17526 - DNA, 25 bp, Saccharomyces pastorianus
gaaatggacgccttggcgcaacgtc

SEQ ID NO: 17527 - DNA, 25 bp, Saccharomyces pastorianus
aaacgtggtcctcacgatgcagcga

SEQ ID NO: 17528 - DNA, 25 bp, Saccharomyces pastorianus
ctactccaggaagcggcactacgaa

SEQ ID NO: 17529 - DNA, 25 bp, Saccharomyces pastorianus
aatctcacattgtaaggcccgggct

SEQ ID NO: 17530 - DNA, 25 bp, Saccharomyces pastorianus
ggcccgggctagaccaattcagaga

SEQ ID NO: 17531 - DNA, 25 bp, Saccharomyces pastorianus
gttacaacgctaaggccatcggttc

SEQ ID NO: 17532 - DNA, 25 bp, Saccharomyces pastorianus
gagtgggctcacagcagatgctcgt

SEQ ID NO: 17533 - DNA, 25 bp, Saccharomyces pastorianus
atcggttctggttctgaaggtgccc

SEQ ID NO: 17534 - DNA, 25 bp, Saccharomyces pastorianus
gtaccgctgcagtaacacacaattt

SEQ ID NO: 17535 - DNA, 25 bp, Saccharomyces pastorianus
ggtcatgatgcggatgctggctatc

SEQ ID NO: 17536 - DNA, 25 bp, Saccharomyces pastorianus
gggttgccttattgatcgctggtca

SEQ ID NO: 17537 - DNA, 25 bp, Saccharomyces pastorianus
gttctatgatcgagcatgcgcgtac

SEQ ID NO: 17538 - DNA, 25 bp, Saccharomyces pastorianus
acagtcagtttgtgatcttgctcta

SEQ ID NO: 17539 - DNA, 25 bp, Saccharomyces pastorianus
tgaaggtgcccaagcggaactttta

SEQ ID NO: 17540 - DNA, 25 bp, Saccharomyces pastorianus
tggctatcagcttttccacgcagaa

SEQ ID NO: 17541 - DNA, 25 bp, Saccharomyces pastorianus
gatcgatcgccatatcggttgtgca

SEQ ID NO: 17542 - DNA, 25 bp, Saccharomyces pastorianus
ggttgactggtcctcaattggctga

SEQ ID NO: 17543 - DNA, 25 bp, Saccharomyces pastorianus
actggtcctcaattggctgacttgt

SEQ ID NO: 17544 - DNA, 25 bp, Saccharomyces pastorianus
agtggttgactggtcctcaattggc

SEQ ID NO: 17545 - DNA, 25 bp, Saccharomyces pastorianus
tgactggtcctcaattggctgactt

SEQ ID NO: 17546 - DNA, 25 bp, Saccharomyces pastorianus
tggtcctcaattggctgacttgtac

SEQ ID NO: 17547 - DNA, 25 bp, Saccharomyces pastorianus
gtcctcaattggctgacttgtacca

SEQ ID NO: 17548 - DNA, 25 bp, Saccharomyces pastorianus
ctcaattggctgacttgtaccactc

SEQ ID NO: 17549 - DNA, 25 bp, Saccharomyces pastorianus
gttgactggtcctcaattggctgac

SEQ ID NO: 17550 - DNA, 25 bp, Saccharomyces pastorianus
caacccaaagagaattgctaccgct

SEQ ID NO: 17551 - DNA, 25 bp, Saccharomyces pastorianus
gaatccaaactctgacaaatccaag

SEQ ID NO: 17552 - DNA, 25 bp, Saccharomyces pastorianus
aagtggttgactggtcctcaattgg

SEQ ID NO: 17553 - DNA, 25 bp, Saccharomyces pastorianus
gcagcaactagtatagcgcccttag

SEQ ID NO: 17554 - DNA, 25 bp, Saccharomyces pastorianus
agaaggtttcgctgctctctacaca

SEQ ID NO: 17555 - DNA, 25 bp, Saccharomyces pastorianus
gacattgaaccctctcttttgtggg

SEQ ID NO: 17556 - DNA, 25 bp, Saccharomyces pastorianus
caagtttctagataccatacggcgt

SEQ ID NO: 17557 - DNA, 25 bp, Saccharomyces pastorianus
atgatagctgctatttgcacccatc

SEQ ID NO: 17558 - DNA, 25 bp, Saccharomyces pastorianus
cacccatcccttcgatgttggtaaa

SEQ ID NO: 17559 - DNA, 25 bp, Saccharomyces pastorianus
tttgccagtggttgcgtaagcggaa

SEQ ID NO: 17560 - DNA, 25 bp, Saccharomyces pastorianus
cgagacgttccatttagcgcaatat

SEQ ID NO: 17561 - DNA, 25 bp, Saccharomyces pastorianus
ggtccgtctagagctcttttcaaag

SEQ ID NO: 17562 - DNA, 25 bp, Saccharomyces pastorianus
ggctagatgctaaccagtattcacg

SEQ ID NO: 17563 - DNA, 25 bp, Saccharomyces pastorianus
agtatacctagatcttcgaagtcca

SEQ ID NO: 17564 - DNA, 25 bp, Saccharomyces pastorianus
atgggtatttacgtcaatgccgctt

SEQ ID NO: 17565 - DNA, 25 bp, Saccharomyces pastorianus
aatgccgcttgtaactgtttgtggt

SEQ ID NO: 17566 - DNA, 25 bp, Saccharomyces pastorianus
taggagcctgtataaccacgtcgat

SEQ ID NO: 17567 - DNA, 25 bp, Saccharomyces pastorianus
gggtgaacccatcccatacgatgaa

SEQ ID NO: 17568 - DNA, 25 bp, Saccharomyces pastorianus
cttggttctgaggttcacggtgtaa

SEQ ID NO: 17569 - DNA, 25 bp, Saccharomyces pastorianus
gtatagcaatcgtccttggttctga

SEQ ID NO: 17570 - DNA, 25 bp, Saccharomyces pastorianus
gcagtttggtccgatcgtgtgaaat

SEQ ID NO: 17571 - DNA, 25 bp, Saccharomyces pastorianus
ggttcaggtttagtctctggccaaa

SEQ ID NO: 17572 - DNA, 25 bp, Saccharomyces pastorianus
ttagagcgcaattaatgaccgtccc

SEQ ID NO: 17573 - DNA, 25 bp, Saccharomyces pastorianus
tttgtccatcagtttagccttccaa

SEQ ID NO: 17574 - DNA, 25 bp, Saccharomyces pastorianus
atctttttcctcacggcaattgtct

SEQ ID NO: 17575 - DNA, 25 bp, Saccharomyces pastorianus
aaagtgggccgccagattggcttac

SEQ ID NO: 17576 - DNA, 25 bp, Saccharomyces pastorianus
acgagtcacgtttgctggcgaaatt

SEQ ID NO: 17577 - DNA, 25 bp, Saccharomyces pastorianus
ttacagacacccacagatagaccag

SEQ ID NO: 17578 - DNA, 25 bp, Saccharomyces pastorianus
gtgtccctcaactaatagcatgcga

SEQ ID NO: 17579 - DNA, 25 bp, Saccharomyces pastorianus
tggaatgattactgccacggcgatt

SEQ ID NO: 17580 - DNA, 25 bp, Saccharomyces pastorianus
tttgaagcagtctacctcgaacgag

SEQ ID NO: 17581 - DNA, 25 bp, Saccharomyces pastorianus
gatcttgtggcagctacgttgcata

SEQ ID NO: 17582 - DNA, 25 bp, Saccharomyces pastorianus
taagcaccgcaccttgaacgagtca

SEQ ID NO: 17583 - DNA, 25 bp, Saccharomyces pastorianus
gagccatcttaagtacgcattccaa

SEQ ID NO: 17584 - DNA, 25 bp, Saccharomyces pastorianus
aagatggtgccggatggatgcccca

SEQ ID NO: 17585 - DNA, 25 bp, Saccharomyces pastorianus
gatgccccatcttattgatttcggt

SEQ ID NO: 17586 - DNA, 25 bp, Saccharomyces pastorianus
aaagcgtggccattttcgactacat

SEQ ID NO: 17587 - DNA, 25 bp, Saccharomyces pastorianus
gacggattagaccatttcacttcca

SEQ ID NO: 17588 - DNA, 25 bp, Saccharomyces pastorianus
attcagcaggcggtaacgcggtttt

SEQ ID NO: 17589 - DNA, 25 bp, Saccharomyces pastorianus
gaccggtggacgaggataccatcta

SEQ ID NO: 17590 - DNA, 25 bp, Saccharomyces pastorianus
attactcccgaaacatggaccggtg

SEQ ID NO: 17591 - DNA, 25 bp, Saccharomyces pastorianus
gatttcactaatgacccttttgtta

SEQ ID NO: 17592 - DNA, 25 bp, Saccharomyces pastorianus
ggtcgaacatcaaggctttcacacc

SEQ ID NO: 17593 - DNA, 25 bp, Saccharomyces pastorianus
ttacttacgggagtgacgagctgct

SEQ ID NO: 17594 - DNA, 25 bp, Saccharomyces pastorianus
aggatgttcgtaggcaacaacccaa

SEQ ID NO: 17595 - DNA, 25 bp, Saccharomyces pastorianus
gccaatgccacttttttccatgaag

SEQ ID NO: 17596 - DNA, 25 bp, Saccharomyces pastorianus
gaagtatcccctacaagttctacaa

SEQ ID NO: 17597 - DNA, 25 bp, Saccharomyces pastorianus
aggtctactagataccccacagagg

SEQ ID NO: 17598 - DNA, 25 bp, Saccharomyces pastorianus
atcatttagtgccattcttcggtaa

SEQ ID NO: 17599 - DNA, 25 bp, Saccharomyces pastorianus
aaaggctcacgaagcagattgcgat

SEQ ID NO: 17600 - DNA, 25 bp, Saccharomyces pastorianus
attaagaccatcctgaccgaactag

SEQ ID NO: 17601 - DNA, 25 bp, Saccharomyces pastorianus
agttcatatcggctacataccaaac

SEQ ID NO: 17602 - DNA, 25 bp, Saccharomyces pastorianus
gatgatgtcatcaagaatgccgtct

SEQ ID NO: 17603 - DNA, 25 bp, Saccharomyces pastorianus
aaaccattgggtgttgccgttgtca

SEQ ID NO: 17604 - DNA, 25 bp, Saccharomyces pastorianus
aggatcttctacagtaacttcatgt

SEQ ID NO: 17605 - DNA, 25 bp, Saccharomyces pastorianus
aattcagcgtatttcaggcgcaatt

SEQ ID NO: 17606 - DNA, 25 bp, Saccharomyces pastorianus
cagaggtatgccaaagccatgcttt

SEQ ID NO: 17607 - DNA, 25 bp, Saccharomyces pastorianus
gttgccgttgtcatggaagctactc

SEQ ID NO: 17608 - DNA, 25 bp, Saccharomyces pastorianus
gacacacatgacgatggcttgccga

SEQ ID NO: 17609 - DNA, 25 bp, Saccharomyces pastorianus
aacgggcccttgtgcgttcaaccag

SEQ ID NO: 17610 - DNA, 25 bp, Saccharomyces pastorianus
atacactagcgcatggcagggaaac

SEQ ID NO: 17611 - DNA, 25 bp, Saccharomyces pastorianus
gaagatatgtgctccttgtgccatg

SEQ ID NO: 17612 - DNA, 25 bp, Saccharomyces pastorianus
taccaaatgcccgtatacactagcg

SEQ ID NO: 17613 - DNA, 25 bp, Saccharomyces pastorianus
acataccctcccaagttctattgta

SEQ ID NO: 17614 - DNA, 25 bp, Saccharomyces pastorianus
gagaggttgcagtcccaacagcagc

SEQ ID NO: 17615 - DNA, 25 bp, Saccharomyces pastorianus
aaaataacattactgctgccccttc

SEQ ID NO: 17616 - DNA, 25 bp, Saccharomyces pastorianus
aacaaagctcaagcttgccctggac

SEQ ID NO: 17617 - DNA, 25 bp, Saccharomyces pastorianus
gcagaggttctggacgtactaggtt

SEQ ID NO: 17618 - DNA, 25 bp, Saccharomyces pastorianus
gtactaggttcctcttggacgaaga

SEQ ID NO: 17619 - DNA, 25 bp, Saccharomyces pastorianus
gcaaagacgtggtatacacacacaa

SEQ ID NO: 17620 - DNA, 25 bp, Saccharomyces pastorianus
gaaatcacaacaacgtaggacagct

SEQ ID NO: 17621 - DNA, 25 bp, Saccharomyces pastorianus
aatggcagcgagttttccggtgcaa

SEQ ID NO: 17622 - DNA, 25 bp, Saccharomyces pastorianus
gaacaatcctgacgagatcaaccaa

SEQ ID NO: 17623 - DNA, 25 bp, Saccharomyces pastorianus
gaacaaacaagtcctgtccgatgta

SEQ ID NO: 17624 - DNA, 25 bp, Saccharomyces pastorianus
gatcctagggtcatccaagggtatg

SEQ ID NO: 17625 - DNA, 25 bp, Saccharomyces pastorianus
gtggctcaacaacaacgggcgtatg

SEQ ID NO: 17626 - DNA, 25 bp, Saccharomyces pastorianus
cgttgagtataagtaatccgtttga

SEQ ID NO: 17627 - DNA, 25 bp, Saccharomyces pastorianus
aacagcggcgcaacaaagatggaag

SEQ ID NO: 17628 - DNA, 25 bp, Saccharomyces pastorianus
aagaagatgcgctacctgtggacaa

SEQ ID NO: 17629 - DNA, 25 bp, Saccharomyces pastorianus
gcgctacctgtggacaaatcggaca

SEQ ID NO: 17630 - DNA, 25 bp, Saccharomyces pastorianus
gactctaaaggctgtttgatccgtt

SEQ ID NO: 17631 - DNA, 25 bp, Saccharomyces pastorianus
ggtatacgagaatgccgcaccaggc

SEQ ID NO: 17632 - DNA, 25 bp, Saccharomyces pastorianus
ggccatggaataacctttcgactga

SEQ ID NO: 17633 - DNA, 25 bp, Saccharomyces pastorianus
gggaacccgaaatagcagacgccat

SEQ ID NO: 17634 - DNA, 25 bp, Saccharomyces pastorianus
tcgactgaattagacgtcatccaag

SEQ ID NO: 17635 - DNA, 25 bp, Saccharomyces pastorianus
gatattggacagcacctgacacagg

SEQ ID NO: 17636 - DNA, 25 bp, Saccharomyces pastorianus
ggtcatgtcaggtacaggcgataca

SEQ ID NO: 17637 - DNA, 25 bp, Saccharomyces pastorianus
gcatttggcataggcatcaacacgg

SEQ ID NO: 17638 - DNA, 25 bp, Saccharomyces pastorianus
aggcaccatgattctggtcatgtca

SEQ ID NO: 17639 - DNA, 25 bp, Saccharomyces pastorianus
aagaaaccacggttcttcgtgatat

SEQ ID NO: 17640 - DNA, 25 bp, Saccharomyces pastorianus
gaatttgttcactaagttgcatcgt

SEQ ID NO: 17641 - DNA, 25 bp, Saccharomyces pastorianus
acagcggtccagttgtctccgttga

SEQ ID NO: 17642 - DNA, 25 bp, Saccharomyces pastorianus
aatacatcgacaccggtagagccgc

SEQ ID NO: 17643 - DNA, 25 bp, Saccharomyces pastorianus
tcggctgttgaaacgtacggttctt

SEQ ID NO: 17644 - DNA, 25 bp, Saccharomyces pastorianus
tgttgccgtcccatctaaggaaaac

SEQ ID NO: 17645 - DNA, 25 bp, Saccharomyces pastorianus
aagcttttcctaggtgtctactacg

SEQ ID NO: 17646 - DNA, 25 bp, Saccharomyces pastorianus
acaccttcattgctgtcatcaacaa

SEQ ID NO: 17647 - DNA, 25 bp, Saccharomyces pastorianus
gtattgacaccatcaagtcggctgt

SEQ ID NO: 17648 - DNA, 25 bp, Saccharomyces pastorianus
aaaggacgctgtctcttctatcacc

SEQ ID NO: 17649 - DNA, 25 bp, Saccharomyces pastorianus
ttattgttactgaatccggctggcc

SEQ ID NO: 17650 - DNA, 25 bp, Saccharomyces pastorianus
gacaaaaacactgctgcccaagact

SEQ ID NO: 17651 - DNA, 25 bp, Saccharomyces pastorianus
gtaactactcagactacatggccgt

SEQ ID NO: 17652 - DNA, 25 bp, Saccharomyces pastorianus
gatctcgcaagaattggacacgcag

SEQ ID NO: 17653 - DNA, 25 bp, Saccharomyces pastorianus
tgaaatccagcgagtctgcgtccaa

SEQ ID NO: 17654 - DNA, 25 bp, Saccharomyces pastorianus
cgtccaatattcctgattcggtgaa

SEQ ID NO: 17655 - DNA, 25 bp, Saccharomyces pastorianus
agaagtcctggcaagcacctgggac

SEQ ID NO: 17656 - DNA, 25 bp, Saccharomyces pastorianus
acgagttcgacaacggcgagtgcgc

SEQ ID NO: 17657 - DNA, 25 bp, Saccharomyces pastorianus
ttttccagcggattctaggtcgttt

SEQ ID NO: 17658 - DNA, 25 bp, Saccharomyces pastorianus
agggcagcactaatggactccaagg

SEQ ID NO: 17659 - DNA, 25 bp, Saccharomyces pastorianus
ggctgggcgccaaactgaagcgtaa

SEQ ID NO: 17660 - DNA, 25 bp, Saccharomyces pastorianus
actcgcctacgtcgcatatcaaagt

SEQ ID NO: 17661 - DNA, 25 bp, Saccharomyces pastorianus
tgaacacgaggctgtcggtgcgctc

SEQ ID NO: 17662 - DNA, 25 bp, Saccharomyces pastorianus
ggacccgaagactcacaaactcaga

SEQ ID NO: 17663 - DNA, 25 bp, Saccharomyces pastorianus
gattccgatggaagctcttactctg

SEQ ID NO: 17664 - DNA, 25 bp, Saccharomyces pastorianus
taagcaagttggtaccgtcgactcc

SEQ ID NO: 17665 - DNA, 25 bp, Saccharomyces pastorianus
ttgctggttacaactccgctgttat

SEQ ID NO: 17666 - DNA, 25 bp, Saccharomyces pastorianus
tactgatatcactttctgggtcggt

SEQ ID NO: 17667 - DNA, 25 bp, Saccharomyces pastorianus
tggctctgaagctttgtaccgtgac

SEQ ID NO: 17668 - DNA, 25 bp, Saccharomyces pastorianus
tgtaccgtgacgatttgaccgcttc

SEQ ID NO: 17669 - DNA, 25 bp, Saccharomyces pastorianus
gttgctgacatttctgattccgatg

SEQ ID NO: 17670 - DNA, 25 bp, Saccharomyces pastorianus
ttccgattttgtcatggccaacgct

SEQ ID NO: 17671 - DNA, 25 bp, Saccharomyces pastorianus
gaccgcttcgcaactatcggataag

SEQ ID NO: 17672 - DNA, 25 bp, Saccharomyces pastorianus
gatatccgtagctttgttgctgaca

SEQ ID NO: 17673 - DNA, 25 bp, Saccharomyces pastorianus
ttaagaaatccactgttgccggttt

SEQ ID NO: 17674 - DNA, 25 bp, Saccharomyces pastorianus
acttctttgttgttgtgttcctggt

SEQ ID NO: 17675 - DNA, 25 bp, Saccharomyces pastorianus
gttcattgccttcacatttagtaaa

SEQ ID NO: 17676 - DNA, 25 bp, Saccharomyces pastorianus
ttactgtcgtcataaccatcatcgg

SEQ ID NO: 17677 - DNA, 25 bp, Saccharomyces pastorianus
gctggtgccagtttgttagtcctaa

SEQ ID NO: 17678 - DNA, 25 bp, Saccharomyces pastorianus
attcacaggctcatcatttgtccta

SEQ ID NO: 17679 - DNA, 25 bp, Saccharomyces pastorianus
gaaacttcagtgtcattggtggatt

SEQ ID NO: 17680 - DNA, 25 bp, Saccharomyces pastorianus
ttcctggttgtggttacggtctcta

SEQ ID NO: 17681 - DNA, 25 bp, Saccharomyces pastorianus
taccaatactggtgccggtgaatta

SEQ ID NO: 17682 - DNA, 25 bp, Saccharomyces pastorianus
acggtctctatgttggctggtgcca

SEQ ID NO: 17683 - DNA, 25 bp, Saccharomyces pastorianus
tatgcgcttgtgttgtttctcaggc

SEQ ID NO: 17684 - DNA, 25 bp, Saccharomyces pastorianus
accatcatcggcaccatttgttttg

SEQ ID NO: 17685 - DNA, 25 bp, Saccharomyces pastorianus
gttgtaacagtatcttcaccggtaa

SEQ ID NO: 17686 - DNA, 25 bp, Saccharomyces pastorianus
ggactccaatggctgaggaacttgc

SEQ ID NO: 17687 - DNA, 25 bp, Saccharomyces pastorianus
aaccataacatcgacacttccagag

SEQ ID NO: 17688 - DNA, 25 bp, Saccharomyces pastorianus
gagaaccattgccacagcgagaata

SEQ ID NO: 17689 - DNA, 25 bp, Saccharomyces pastorianus
gaggaacttgccgatccaaagagta

SEQ ID NO: 17690 - DNA, 25 bp, Saccharomyces pastorianus
catcctgagtccctaccaattaata

SEQ ID NO: 17691 - DNA, 25 bp, Saccharomyces pastorianus
ggccattataagacttgccgctggt

SEQ ID NO: 17692 - DNA, 25 bp, Saccharomyces pastorianus
tgccgctggtcgttatacaatgaaa

SEQ ID NO: 17693 - DNA, 25 bp, Saccharomyces pastorianus
attatccaatatgtctcctcatcct

SEQ ID NO: 17694 - DNA, 25 bp, Saccharomyces pastorianus
gaataaaagcctgtaccggtggtat

SEQ ID NO: 17695 - DNA, 25 bp, Saccharomyces pastorianus
agagcaatttgtctgtttcatggca

SEQ ID NO: 17696 - DNA, 25 bp, Saccharomyces pastorianus
aaagactgtctcaatgacgcgttat

SEQ ID NO: 17697 - DNA, 25 bp, Saccharomyces pastorianus
gctacatccgcacatcgttaaactg

SEQ ID NO: 17698 - DNA, 25 bp, Saccharomyces pastorianus
atcgtggcagataccgtcattgaca

SEQ ID NO: 17699 - DNA, 25 bp, Saccharomyces pastorianus
aaatttgccaattcgctcttattga

SEQ ID NO: 17700 - DNA, 25 bp, Saccharomyces pastorianus
gcatctgtggtgtctcaaaggttac

SEQ ID NO: 17701 - DNA, 25 bp, Saccharomyces pastorianus
gacgtcatggagtacttgccatttt

SEQ ID NO: 17702 - DNA, 25 bp, Saccharomyces pastorianus
cgctcttattgatgtttggtgctat

SEQ ID NO: 17703 - DNA, 25 bp, Saccharomyces pastorianus
gcatccaatcaaaagctacatccgc

SEQ ID NO: 17704 - DNA, 25 bp, Saccharomyces pastorianus
ggataaggcaattcatcgtggcaga

SEQ ID NO: 17705 - DNA, 25 bp, Saccharomyces pastorianus
ggtatcgaccaactggcatctgtgg

SEQ ID NO: 17706 - DNA, 25 bp, Saccharomyces pastorianus
gacgcgttattgctctggataatca

SEQ ID NO: 17707 - DNA, 25 bp, Saccharomyces pastorianus
ataacgttccattcaaggccaccaa

SEQ ID NO: 17708 - DNA, 25 bp, Saccharomyces pastorianus
ggaattgactgttgacgttgccgtt

SEQ ID NO: 17709 - DNA, 25 bp, Saccharomyces pastorianus
gagcaagtacgacaccaacgtggtt

SEQ ID NO: 17710 - DNA, 25 bp, Saccharomyces pastorianus
aggtaccttcagaggtggtgccaga

SEQ ID NO: 17711 - DNA, 25 bp, Saccharomyces pastorianus
gttcccatccaagattgatttcgac

SEQ ID NO: 17712 - DNA, 25 bp, Saccharomyces pastorianus
gccttcagaggcagagctggtttca

SEQ ID NO: 17713 - DNA, 25 bp, Saccharomyces pastorianus
accggtagaatcttcacttccgatt

SEQ ID NO: 17714 - DNA, 25 bp, Saccharomyces pastorianus
gacgttgccgttgtcagaccagaaa

SEQ ID NO: 17715 - DNA, 25 bp, Saccharomyces pastorianus
gtatggcctttgtcactttcgaagg

SEQ ID NO: 17716 - DNA, 25 bp, Saccharomyces pastorianus
gaattcttcggtgctaacgccgact

SEQ ID NO: 17717 - DNA, 25 bp, Saccharomyces pastorianus
aggcggtttcagaggtaccttcaga

SEQ ID NO: 17718 - DNA, 25 bp, Saccharomyces pastorianus
cttctccaaagccatacgctgttaa

SEQ ID NO: 17719 - DNA, 25 bp, Saccharomyces pastorianus
cgctatcgctgaaggtaagtctaag

SEQ ID NO: 17720 - DNA, 25 bp, Saccharomyces pastorianus
gccatacgctgttaagtacggtttg

SEQ ID NO: 17721 - DNA, 25 bp, Saccharomyces pastorianus
tctccaaagccatacgctgttaagt

SEQ ID NO: 17722 - DNA, 25 bp, Saccharomyces pastorianus
catacgctgttaagtacggtttgaa

SEQ ID NO: 17723 - DNA, 25 bp, Saccharomyces pastorianus
cgctgaaggtaagtctaagcaagac

SEQ ID NO: 17724 - DNA, 25 bp, Saccharomyces pastorianus
agctgccgctatcgctgaaggtaag

SEQ ID NO: 17725 - DNA, 25 bp, Saccharomyces pastorianus
ctgccgctatcgctgaaggtaagtc

SEQ ID NO: 17726 - DNA, 25 bp, Saccharomyces pastorianus
gccgctatcgctgaaggtaagtcta

SEQ ID NO: 17727 - DNA, 25 bp, Saccharomyces pastorianus
aagccatacgctgttaagtacggtt

SEQ ID NO: 17728 - DNA, 25 bp, Saccharomyces pastorianus
tatcgctgaaggtaagtctaagcaa

SEQ ID NO: 17729 - DNA, 25 bp, Saccharomyces pastorianus
ggacatcttgggtccctgtgtcaag

SEQ ID NO: 17730 - DNA, 25 bp, Saccharomyces pastorianus
tgtggaaggacttgcacgacgtcaa

SEQ ID NO: 17731 - DNA, 25 bp, Saccharomyces pastorianus
aaagcgaacagatctcaccggatgt

SEQ ID NO: 17732 - DNA, 25 bp, Saccharomyces pastorianus
aggtcagaagatctccaacagcgga

SEQ ID NO: 17733 - DNA, 25 bp, Saccharomyces pastorianus
aaagacaccgttgtcggttctggct

SEQ ID NO: 17734 - DNA, 25 bp, Saccharomyces pastorianus
agagatttccgatgttacgtacgaa

SEQ ID NO: 17735 - DNA, 25 bp, Saccharomyces pastorianus
tactgggaccctgatgctagagcca

SEQ ID NO: 17736 - DNA, 25 bp, Saccharomyces pastorianus
tttgcttccaagctagagccatctt

SEQ ID NO: 17737 - DNA, 25 bp, Saccharomyces pastorianus
ccggatgttcatcccaacttaagga

SEQ ID NO: 17738 - DNA, 25 bp, Saccharomyces pastorianus
aggatattcgcaagccaatctgacg

SEQ ID NO: 17739 - DNA, 25 bp, Saccharomyces pastorianus
ccaaaggctggctcaaggacatcga

SEQ ID NO: 17740 - DNA, 25 bp, Saccharomyces pastorianus
ggcgtcaaccagctcatcatgaaga

SEQ ID NO: 17741 - DNA, 25 bp, Saccharomyces pastorianus
gaagagcttccgcaacatcaggtcc

SEQ ID NO: 17742 - DNA, 25 bp, Saccharomyces pastorianus
agcgcaacaggctcaatctgctatt

SEQ ID NO: 17743 - DNA, 25 bp, Saccharomyces pastorianus
ccatcgctgacgctgacgagtatat

SEQ ID NO: 17744 - DNA, 25 bp, Saccharomyces pastorianus
aaaacgccgtcgtattggccacgat

SEQ ID NO: 17745 - DNA, 25 bp, Saccharomyces pastorianus
gattgaccagtccaacaacgtcgta

SEQ ID NO: 17746 - DNA, 25 bp, Saccharomyces pastorianus
aatagacacgcagctggaggccatc

SEQ ID NO: 17747 - DNA, 25 bp, Saccharomyces pastorianus
aacagggtgctgcagactctacaaa

SEQ ID NO: 17748 - DNA, 25 bp, Saccharomyces pastorianus
caggacgtggtcgagtcgctgacaa

SEQ ID NO: 17749 - DNA, 25 bp, Saccharomyces pastorianus
gctgacaaagatctgcgactccaac

SEQ ID NO: 17750 - DNA, 25 bp, Saccharomyces pastorianus
ggtcgcagtttcactcgcaaagcaa

SEQ ID NO: 17751 - DNA, 25 bp, Saccharomyces pastorianus
atacgatcagtagcaccgatttcat

SEQ ID NO: 17752 - DNA, 25 bp, Saccharomyces pastorianus
gagacgattagatccttaggcaatg

SEQ ID NO: 17753 - DNA, 25 bp, Saccharomyces pastorianus
acctcttccacaacgacaagatcat

SEQ ID NO: 17754 - DNA, 25 bp, Saccharomyces pastorianus
gcaacttgctgcgagtgagattggc

SEQ ID NO: 17755 - DNA, 25 bp, Saccharomyces pastorianus
aaggtcattgtcgatgtgtgtaaca

SEQ ID NO: 17756 - DNA, 25 bp, Saccharomyces pastorianus
tgaacgaaatcgcatacctcttcca

SEQ ID NO: 17757 - DNA, 25 bp, Saccharomyces pastorianus
caaacccaacactgacattacacaa

SEQ ID NO: 17758 - DNA, 25 bp, Saccharomyces pastorianus
aagtcgtctaagcagaacatcgaga

SEQ ID NO: 17759 - DNA, 25 bp, Saccharomyces pastorianus
tccgcaagatgcaacgatcgtacta

SEQ ID NO: 17760 - DNA, 25 bp, Saccharomyces pastorianus
gtacgttagtgtaaatccgcaagat

SEQ ID NO: 17761 - DNA, 25 bp, Saccharomyces pastorianus
gatgaagattccaccagacatacat

SEQ ID NO: 17762 - DNA, 25 bp, Saccharomyces pastorianus
ggttccaaacaattcccatacgatt

SEQ ID NO: 17763 - DNA, 25 bp, Saccharomyces pastorianus
acaatgatcctttttggtttcctga

SEQ ID NO: 17764 - DNA, 25 bp, Saccharomyces pastorianus
atttccacctcttcatcattacaat

SEQ ID NO: 17765 - DNA, 25 bp, Saccharomyces pastorianus
aaagcctcgcactgtttcgatgatc

SEQ ID NO: 17766 - DNA, 25 bp, Saccharomyces pastorianus
acagattccaatatatccagcccgc

SEQ ID NO: 17767 - DNA, 25 bp, Saccharomyces pastorianus
attacaatccaacctcaactcaagt

SEQ ID NO: 17768 - DNA, 25 bp, Saccharomyces pastorianus
aagtgtccatatttccaattctcat

SEQ ID NO: 17769 - DNA, 25 bp, Saccharomyces pastorianus
ggtttcctgatctcgacagtatgga

SEQ ID NO: 17770 - DNA, 25 bp, Saccharomyces pastorianus
aatagcgattcaaacgatggccgta

SEQ ID NO: 17771 - DNA, 25 bp, Saccharomyces pastorianus
catcgaccctcatatgcaactgatt

SEQ ID NO: 17772 - DNA, 25 bp, Saccharomyces pastorianus
aagctcagacgaatggtacgccacc

SEQ ID NO: 17773 - DNA, 25 bp, Saccharomyces pastorianus
taccagcctatgcaagtcactacaa

SEQ ID NO: 17774 - DNA, 25 bp, Saccharomyces pastorianus
ttctacaagctgttccatcttaccg

SEQ ID NO: 17775 - DNA, 25 bp, Saccharomyces pastorianus
gatggtttattgcaagcttcgctag

SEQ ID NO: 17776 - DNA, 25 bp, Saccharomyces pastorianus
tattatgaatcaccatcaccagccc

SEQ ID NO: 17777 - DNA, 25 bp, Saccharomyces pastorianus
tatgcccaattactcttctacaagc

SEQ ID NO: 17778 - DNA, 25 bp, Saccharomyces pastorianus
tcattaaggactacttgctgtgctg

SEQ ID NO: 17779 - DNA, 25 bp, Saccharomyces pastorianus
ttcagttgaccaaatacccggcagg

SEQ ID NO: 17780 - DNA, 25 bp, Saccharomyces pastorianus
ttgccacctttgcactcgaatacta

SEQ ID NO: 17781 - DNA, 25 bp, Saccharomyces pastorianus
agataccaatgttgccatctcgtcc

SEQ ID NO: 17782 - DNA, 25 bp, Saccharomyces pastorianus
cttagttaccgaacatttgccacct

SEQ ID NO: 17783 - DNA, 25 bp, Saccharomyces pastorianus
tctcgtcctacgatggtgagcggaa

SEQ ID NO: 17784 - DNA, 25 bp, Saccharomyces pastorianus
gatctggtagaagccgtctttgtgc

SEQ ID NO: 17785 - DNA, 25 bp, Saccharomyces pastorianus
aaaggaagcggtgcctgcagtcgac

SEQ ID NO: 17786 - DNA, 25 bp, Saccharomyces pastorianus
gcgcccgaggactattggacacata

SEQ ID NO: 17787 - DNA, 25 bp, Saccharomyces pastorianus
aatcccagtggagcctcgacagaaa

SEQ ID NO: 17788 - DNA, 25 bp, Saccharomyces pastorianus
gaggccaggctacgaatcagacaga

SEQ ID NO: 17789 - DNA, 25 bp, Saccharomyces pastorianus
agggccctaaagtactcggatctca

SEQ ID NO: 17790 - DNA, 25 bp, Saccharomyces pastorianus
acccgcagctccaaggatctggtag

SEQ ID NO: 17791 - DNA, 25 bp, Saccharomyces pastorianus
ggaaccgctatcacagcagcagcag

SEQ ID NO: 17792 - DNA, 25 bp, Saccharomyces pastorianus
ggatctcatactagccgccgagaac

SEQ ID NO: 17793 - DNA, 25 bp, Saccharomyces pastorianus
gccgagcccttcaatacaaactttg

SEQ ID NO: 17794 - DNA, 25 bp, Saccharomyces pastorianus
ggacgcacggttggagccgcaacaa

SEQ ID NO: 17795 - DNA, 25 bp, Saccharomyces pastorianus
gaagatacaacgctgctaattcctt

SEQ ID NO: 17796 - DNA, 25 bp, Saccharomyces pastorianus
gaactgccctctgaaattcctgaat

SEQ ID NO: 17797 - DNA, 25 bp, Saccharomyces pastorianus
aatgcaataccacatgggccccatg

SEQ ID NO: 17798 - DNA, 25 bp, Saccharomyces pastorianus
aaatctatgcccaatgcctggtctt

SEQ ID NO: 17799 - DNA, 25 bp, Saccharomyces pastorianus
cagccggcagctctaacaacaataa

SEQ ID NO: 17800 - DNA, 25 bp, Saccharomyces pastorianus
cttcgccctcgtctaagagtttgaa

SEQ ID NO: 17801 - DNA, 25 bp, Saccharomyces pastorianus
aatatgggtcaaccccacagtgcta

SEQ ID NO: 17802 - DNA, 25 bp, Saccharomyces pastorianus
gaaatgttcccaccaaattactcca

SEQ ID NO: 17803 - DNA, 25 bp, Saccharomyces pastorianus
atacatgatggtttaccccatgccg

SEQ ID NO: 17804 - DNA, 25 bp, Saccharomyces pastorianus
tactacttacaataactcctcagcc

SEQ ID NO: 17805 - DNA, 25 bp, Saccharomyces pastorianus
ggtgatgagacttctgaactgccct

SEQ ID NO: 17806 - DNA, 25 bp, Saccharomyces pastorianus
gaaagcgggcaacccaatggcaaca

SEQ ID NO: 17807 - DNA, 25 bp, Saccharomyces pastorianus
gactatacaataattctggagcccg

SEQ ID NO: 17808 - DNA, 25 bp, Saccharomyces pastorianus
gtccccatggagctggttatcataa

SEQ ID NO: 17809 - DNA, 25 bp, Saccharomyces pastorianus
caggacgacctggtttggattacaa

SEQ ID NO: 17810 - DNA, 25 bp, Saccharomyces pastorianus
gacgatccggagatgcagcacgact

SEQ ID NO: 17811 - DNA, 25 bp, Saccharomyces pastorianus
aacatttattaatatccgcgtggat

SEQ ID NO: 17812 - DNA, 25 bp, Saccharomyces pastorianus
gatgcatttatgatcaaccttcaga

SEQ ID NO: 17813 - DNA, 25 bp, Saccharomyces pastorianus
gtcatggcgatgacctcgataataa

SEQ ID NO: 17814 - DNA, 25 bp, Saccharomyces pastorianus
tggagcccgagagagccacggcaat

SEQ ID NO: 17815 - DNA, 25 bp, Saccharomyces pastorianus
gatacgtgacacaattgctaacatt

SEQ ID NO: 17816 - DNA, 25 bp, Saccharomyces pastorianus
agagacgccaatgccaacgaagaat

SEQ ID NO: 17817 - DNA, 25 bp, Saccharomyces pastorianus
tttgcatgccaactctttgacaagt

SEQ ID NO: 17818 - DNA, 25 bp, Saccharomyces pastorianus
gagagtcagactttgaagcctacga

SEQ ID NO: 17819 - DNA, 25 bp, Saccharomyces pastorianus
gtccaaacctttgatcgagcattat

SEQ ID NO: 17820 - DNA, 25 bp, Saccharomyces pastorianus
ttccaaatcttacagtccttaccca

SEQ ID NO: 17821 - DNA, 25 bp, Saccharomyces pastorianus
ggatgccttttatgctacacgtaac

SEQ ID NO: 17822 - DNA, 25 bp, Saccharomyces pastorianus
gttgcccgaaaattgctgtgtcata

SEQ ID NO: 17823 - DNA, 25 bp, Saccharomyces pastorianus
gcacctttcacttttggtatttacg

SEQ ID NO: 17824 - DNA, 25 bp, Saccharomyces pastorianus
gaagctttgcaaatcgttcctgtaa

SEQ ID NO: 17825 - DNA, 25 bp, Saccharomyces pastorianus
gtccttacccaccagtcagggagaa

SEQ ID NO: 17826 - DNA, 25 bp, Saccharomyces pastorianus
atgaactatttcgtggatgcctttt

SEQ ID NO: 17827 - DNA, 25 bp, Saccharomyces pastorianus
atcaaatgcatcaactactctccgc

SEQ ID NO: 17828 - DNA, 25 bp, Saccharomyces pastorianus
agcaaatccggttcaaggccaactt

SEQ ID NO: 17829 - DNA, 25 bp, Saccharomyces pastorianus
atgtcgcccctcgagataagctggt

SEQ ID NO: 17830 - DNA, 25 bp, Saccharomyces pastorianus
tttcgagatcccgtattgcacatgc

SEQ ID NO: 17831 - DNA, 25 bp, Saccharomyces pastorianus
gaactgaaaacctctatgaacccgc

SEQ ID NO: 17832 - DNA, 25 bp, Saccharomyces pastorianus
cgacgacttcttgctctgggaaata

SEQ ID NO: 17833 - DNA, 25 bp, Saccharomyces pastorianus
tatgaagggccaccgtgaacgcaac

SEQ ID NO: 17834 - DNA, 25 bp, Saccharomyces pastorianus
ggcaaagtcgtgttcaacctgagcg

SEQ ID NO: 17835 - DNA, 25 bp, Saccharomyces pastorianus
aagctggtcagcgtcgatttcgaga

SEQ ID NO: 17836 - DNA, 25 bp, Saccharomyces pastorianus
agatcccgctgacaaaggtctttca

SEQ ID NO: 17837 - DNA, 25 bp, Saccharomyces pastorianus
acaggaggacaatgccagcgctctg

SEQ ID NO: 17838 - DNA, 25 bp, Saccharomyces pastorianus
gagttcccactgttcaaccaggaag

SEQ ID NO: 17839 - DNA, 25 bp, Saccharomyces pastorianus
ctcaacctcggtgtcgtgataagta

SEQ ID NO: 17840 - DNA, 25 bp, Saccharomyces pastorianus
ctagcccgtggtttaaagattgcct

SEQ ID NO: 17841 - DNA, 25 bp, Saccharomyces pastorianus
aaagattgcctacttcctgtgtgta

SEQ ID NO: 17842 - DNA, 25 bp, Saccharomyces pastorianus
cctgtgtgtattttttgccttggca

SEQ ID NO: 17843 - DNA, 25 bp, Saccharomyces pastorianus
ctgggatttatctggccaaacctat

SEQ ID NO: 17844 - DNA, 25 bp, Saccharomyces pastorianus
ttgccttggcatttttagtggtttg

SEQ ID NO: 17845 - DNA, 25 bp, Saccharomyces pastorianus
aattgaatgacctcaacctcggtgt

SEQ ID NO: 17846 - DNA, 25 bp, Saccharomyces pastorianus
gattatctggcttttctgtagtgca

SEQ ID NO: 17847 - DNA, 25 bp, Saccharomyces pastorianus
gtgcaagactgcatacacaatcgtc

SEQ ID NO: 17848 - DNA, 25 bp, Saccharomyces pastorianus
acaaattccctgacttctgcagaga

SEQ ID NO: 17849 - DNA, 25 bp, Saccharomyces pastorianus
gaattggctcaagctgatcccgata

SEQ ID NO: 17850 - DNA, 25 bp, Saccharomyces pastorianus
atgtttcttctaacatcgtcaagaa

SEQ ID NO: 17851 - DNA, 25 bp, Saccharomyces pastorianus
gaatcactttgacttctaccaaggt

SEQ ID NO: 17852 - DNA, 25 bp, Saccharomyces pastorianus
ggaagctccagttcaaatcgttaag

SEQ ID NO: 17853 - DNA, 25 bp, Saccharomyces pastorianus
gagaatcacccaaatcaccattgaa

SEQ ID NO: 17854 - DNA, 25 bp, Saccharomyces pastorianus
ggaaaatgtttcttctaacatcgtc

SEQ ID NO: 17855 - DNA, 25 bp, Saccharomyces pastorianus
agatacatcgacttggaagctccag

SEQ ID NO: 17856 - DNA, 25 bp, Saccharomyces pastorianus
gggtccagtcagattaccaactaag

SEQ ID NO: 17857 - DNA, 25 bp, Saccharomyces pastorianus
ttcttctaacatcgtcaagaacgct

SEQ ID NO: 17858 - DNA, 25 bp, Saccharomyces pastorianus
aaatgtttcttctaacatcgtcaag

SEQ ID NO: 17859 - DNA, 25 bp, Saccharomyces pastorianus
gcaattggaaaatgtttcttctaac

SEQ ID NO: 17860 - DNA, 25 bp, Saccharomyces pastorianus
gtttcttctaacatcgtcaagaacg

SEQ ID NO: 17861 - DNA, 25 bp, Saccharomyces pastorianus
aacttcgccatgatccaaaagagct

SEQ ID NO: 17862 - DNA, 25 bp, Saccharomyces pastorianus
ggaagcttcgcaacaacctgatttt

SEQ ID NO: 17863 - DNA, 25 bp, Saccharomyces pastorianus
gttcgatatacaacctgacggccac

SEQ ID NO: 17864 - DNA, 25 bp, Saccharomyces pastorianus
agaaaactaagatcgctgagctgta

SEQ ID NO: 17865 - DNA, 25 bp, Saccharomyces pastorianus
attgagatcttagctctatcccacg

SEQ ID NO: 17866 - DNA, 25 bp, Saccharomyces pastorianus
aacacagccaacaggatgttcccgg

SEQ ID NO: 17867 - DNA, 25 bp, Saccharomyces pastorianus
gaatctatagaccaattatgcgagg

SEQ ID NO: 17868 - DNA, 25 bp, Saccharomyces pastorianus
ctatcccacgtttttgattgtccga

SEQ ID NO: 17869 - DNA, 25 bp, Saccharomyces pastorianus
ccactgtctattcgcctcaatatta

SEQ ID NO: 17870 - DNA, 25 bp, Saccharomyces pastorianus
gatgttcccggccaacaagatcaac

SEQ ID NO: 17871 - DNA, 25 bp, Saccharomyces pastorianus
gacgatttcgttccttatttgttcg

SEQ ID NO: 17872 - DNA, 25 bp, Saccharomyces pastorianus
ggaactggaccatttaactgtaaca

SEQ ID NO: 17873 - DNA, 25 bp, Saccharomyces pastorianus
agtatctgtcccgtgaaagtgcaag

SEQ ID NO: 17874 - DNA, 25 bp, Saccharomyces pastorianus
taagattcgaattactgccatcaat

SEQ ID NO: 17875 - DNA, 25 bp, Saccharomyces pastorianus
gattgtatcggcttcttttcaaata

SEQ ID NO: 17876 - DNA, 25 bp, Saccharomyces pastorianus
aaatttgccgatttgttcaagtgaa

SEQ ID NO: 17877 - DNA, 25 bp, Saccharomyces pastorianus
ggattctcagtctctatcctttaag

SEQ ID NO: 17878 - DNA, 25 bp, Saccharomyces pastorianus
gtaatcaccattcctgatggctcta

SEQ ID NO: 17879 - DNA, 25 bp, Saccharomyces pastorianus
ctagcaacatgcgaggacttattcc

SEQ ID NO: 17880 - DNA, 25 bp, Saccharomyces pastorianus
attcatggagactttgcacttgcaa

SEQ ID NO: 17881 - DNA, 25 bp, Saccharomyces pastorianus
agagggaccgtcattatcatttgtg

SEQ ID NO: 17882 - DNA, 25 bp, Saccharomyces pastorianus
aacagatttttaccgctagcaacat

SEQ ID NO: 17883 - DNA, 25 bp, Saccharomyces pastorianus
catcgatattagtagtgtgctggct

SEQ ID NO: 17884 - DNA, 25 bp, Saccharomyces pastorianus
tatggccgacacgtgtggtactcta

SEQ ID NO: 17885 - DNA, 25 bp, Saccharomyces pastorianus
cacgtgtggtactctagctaaggct

SEQ ID NO: 17886 - DNA, 25 bp, Saccharomyces pastorianus
ggatttttcgatgttcccgtagata

SEQ ID NO: 17887 - DNA, 25 bp, Saccharomyces pastorianus
tggtgctaagcgtgctgccactttg

SEQ ID NO: 17888 - DNA, 25 bp, Saccharomyces pastorianus
gtccaaaactggctgtcatcgatat

SEQ ID NO: 17889 - DNA, 25 bp, Saccharomyces pastorianus
aaccactgctggctgtgatcatgtg

SEQ ID NO: 17890 - DNA, 25 bp, Saccharomyces pastorianus
gatggctgacatgctaaccactgct

SEQ ID NO: 17891 - DNA, 25 bp, Saccharomyces pastorianus
gagccaagtctgtcattgctattgt

SEQ ID NO: 17892 - DNA, 25 bp, Saccharomyces pastorianus
gtatggtccttgttggtgatgtcac

SEQ ID NO: 17893 - DNA, 25 bp, Saccharomyces pastorianus
gtgttttatccggtaaagctattga

SEQ ID NO: 17894 - DNA, 25 bp, Saccharomyces pastorianus
gaaactgcagtttcaagctgctcaa

SEQ ID NO: 17895 - DNA, 25 bp, Saccharomyces pastorianus
gaaggtaccgtcttagtacaacaga

SEQ ID NO: 17896 - DNA, 25 bp, Saccharomyces pastorianus
gatgaactacaaaacccggattatg

SEQ ID NO: 17897 - DNA, 25 bp, Saccharomyces pastorianus
aggagcccaggcatctaaaagcaag

SEQ ID NO: 17898 - DNA, 25 bp, Saccharomyces pastorianus
gggaataccatctagaatacgtgca

SEQ ID NO: 17899 - DNA, 25 bp, Saccharomyces pastorianus
acgtgcaagtgctgatttctcaatt

SEQ ID NO: 17900 - DNA, 25 bp, Saccharomyces pastorianus
gttttacctggactctcgagaacaa

SEQ ID NO: 17901 - DNA, 25 bp, Saccharomyces pastorianus
tggccgaatccaagcagggtctaga

SEQ ID NO: 17902 - DNA, 25 bp, Saccharomyces pastorianus
gttgcaggccaacttagatcatttg

SEQ ID NO: 17903 - DNA, 25 bp, Saccharomyces pastorianus
tacaacagaccctgggaggagccca

SEQ ID NO: 17904 - DNA, 25 bp, Saccharomyces pastorianus
gaactggcagcaaacttcttgagac

SEQ ID NO: 17905 - DNA, 25 bp, Saccharomyces pastorianus
gaatatggccccaaagtggatattt

SEQ ID NO: 17906 - DNA, 25 bp, Saccharomyces pastorianus
acgagactcccctaagagcactgta

SEQ ID NO: 17907 - DNA, 25 bp, Saccharomyces pastorianus
aagggtgttcttcatagagacatca

SEQ ID NO: 17908 - DNA, 25 bp, Saccharomyces pastorianus
gacaacatcttattatccatggaag

SEQ ID NO: 17909 - DNA, 25 bp, Saccharomyces pastorianus
attaccgaaatagccgaagccaatt

SEQ ID NO: 17910 - DNA, 25 bp, Saccharomyces pastorianus
ccgctagtcaaattggcccgattaa

SEQ ID NO: 17911 - DNA, 25 bp, Saccharomyces pastorianus
gagcaagtgctacagatttacttca

SEQ ID NO: 17912 - DNA, 25 bp, Saccharomyces pastorianus
aggcgaacctccttatctaaacgag

SEQ ID NO: 17913 - DNA, 25 bp, Saccharomyces pastorianus
ggaaccagagaatttatcgtcatac

SEQ ID NO: 17914 - DNA, 25 bp, Saccharomyces pastorianus
ttaattgctacgaacggtacaccaa

SEQ ID NO: 17915 - DNA, 25 bp, Saccharomyces pastorianus
gggaacaccgtattggatggcacct

SEQ ID NO: 17916 - DNA, 25 bp, Saccharomyces pastorianus
tgttgttttcggtttgttcgtgtct

SEQ ID NO: 17917 - DNA, 25 bp, Saccharomyces pastorianus
tatgtgttaaattacgccacgcaac

SEQ ID NO: 17918 - DNA, 25 bp, Saccharomyces pastorianus
atggtctgtcatgacggaattccgt

SEQ ID NO: 17919 - DNA, 25 bp, Saccharomyces pastorianus
caccatggatgtttcggattttttc

SEQ ID NO: 17920 - DNA, 25 bp, Saccharomyces pastorianus
gttttccaccatattgtgacgctgt

SEQ ID NO: 17921 - DNA, 25 bp, Saccharomyces pastorianus
tggtgctaatcggagctttacaatt

SEQ ID NO: 17922 - DNA, 25 bp, Saccharomyces pastorianus
gacaagcagcgttttgggcacaaca

SEQ ID NO: 17923 - DNA, 25 bp, Saccharomyces pastorianus
ttcgttgccgatcatattggtgcta

SEQ ID NO: 17924 - DNA, 25 bp, Saccharomyces pastorianus
ttaaattccatgttcacccctgttg

SEQ ID NO: 17925 - DNA, 25 bp, Saccharomyces pastorianus
aagcctgtgtccttgttttacaatt

SEQ ID NO: 17926 - DNA, 25 bp, Saccharomyces pastorianus
gttcgtgtctttctggatttatcta

SEQ ID NO: 17927 - DNA, 25 bp, Saccharomyces pastorianus
tacaggatcctcatattggcgatat

SEQ ID NO: 17928 - DNA, 25 bp, Saccharomyces pastorianus
ccgacgttccgcagtatggttatga

SEQ ID NO: 17929 - DNA, 25 bp, Saccharomyces pastorianus
tgtaacgccaattgctgagccatcg

SEQ ID NO: 17930 - DNA, 25 bp, Saccharomyces pastorianus
ttctgtgaatagtaagcccgacgtt

SEQ ID NO: 17931 - DNA, 25 bp, Saccharomyces pastorianus
tctccttacgtcaagtactcgcaaa

SEQ ID NO: 17932 - DNA, 25 bp, Saccharomyces pastorianus
gaaagaggacatgctctccttacgt

SEQ ID NO: 17933 - DNA, 25 bp, Saccharomyces pastorianus
gatatgtacggttcaataacgcctt

SEQ ID NO: 17934 - DNA, 25 bp, Saccharomyces pastorianus
taatggaccgcgcagcaaacgttta

SEQ ID NO: 17935 - DNA, 25 bp, Saccharomyces pastorianus
ggaatgcccaacactaatgtcgctc

SEQ ID NO: 17936 - DNA, 25 bp, Saccharomyces pastorianus
aaaccctgattatgcatcgtactcc

SEQ ID NO: 17937 - DNA, 25 bp, Saccharomyces pastorianus
tgcatcgtactccttgaatcaacat

SEQ ID NO: 17938 - DNA, 25 bp, Saccharomyces pastorianus
tgcgccctattctgtattggaactc

SEQ ID NO: 17939 - DNA, 25 bp, Saccharomyces pastorianus
atttacacggaaccagcttcaacca

SEQ ID NO: 17940 - DNA, 25 bp, Saccharomyces pastorianus
ggaatgattccatacgcaggcgtat

SEQ ID NO: 17941 - DNA, 25 bp, Saccharomyces pastorianus
tgatctcgggtggattagcaggcat

SEQ ID NO: 17942 - DNA, 25 bp, Saccharomyces pastorianus
caaagtgacgcctatggttgcatgt

SEQ ID NO: 17943 - DNA, 25 bp, Saccharomyces pastorianus
gcaagtaagtgctttatcgccaaaa

SEQ ID NO: 17944 - DNA, 25 bp, Saccharomyces pastorianus
caaacagccgcatatccattagaaa

SEQ ID NO: 17945 - DNA, 25 bp, Saccharomyces pastorianus
tagcaggcatggcatctcaaacagc

SEQ ID NO: 17946 - DNA, 25 bp, Saccharomyces pastorianus
aaaatgagcatctacccaactggtt

SEQ ID NO: 17947 - DNA, 25 bp, Saccharomyces pastorianus
atgatttgctgcatgacgtgctgaa

SEQ ID NO: 17948 - DNA, 25 bp, Saccharomyces pastorianus
gaggttttgttccaacagtactcgg

SEQ ID NO: 17949 - DNA, 25 bp, Saccharomyces pastorianus
gacgatgtactgtcctctgtagatg

SEQ ID NO: 17950 - DNA, 25 bp, Saccharomyces pastorianus
gatgcttgatccacgcagggacgat

SEQ ID NO: 17951 - DNA, 25 bp, Saccharomyces pastorianus
gcggtaaagaccaatcatctgtgat

SEQ ID NO: 17952 - DNA, 25 bp, Saccharomyces pastorianus
gggtactctacaaagctagctctaa

SEQ ID NO: 17953 - DNA, 25 bp, Saccharomyces pastorianus
ggctaaaattccatgacggcatact

SEQ ID NO: 17954 - DNA, 25 bp, Saccharomyces pastorianus
ggattccggtggtttttagcaatga

SEQ ID NO: 17955 - DNA, 25 bp, Saccharomyces pastorianus
aagccctgaggcacttaccgaaatt

SEQ ID NO: 17956 - DNA, 25 bp, Saccharomyces pastorianus
aaatctcctatcagcgggtactcta

SEQ ID NO: 17957 - DNA, 25 bp, Saccharomyces pastorianus
gaggtgtctttgaccaaccttgttc

SEQ ID NO: 17958 - DNA, 25 bp, Saccharomyces pastorianus
gaaattaggaaccatgccaggcatt

SEQ ID NO: 17959 - DNA, 25 bp, Saccharomyces pastorianus
gagagcactgtgctatcaatgctag

SEQ ID NO: 17960 - DNA, 25 bp, Saccharomyces pastorianus
taagtgacccgacggatacggacct

SEQ ID NO: 17961 - DNA, 25 bp, Saccharomyces pastorianus
aaggcagtcctctgtcttctttgga

SEQ ID NO: 17962 - DNA, 25 bp, Saccharomyces pastorianus
gagaccctattgtgatttgttttta

SEQ ID NO: 17963 - DNA, 25 bp, Saccharomyces pastorianus
ggacctactaaacctattgccattt

SEQ ID NO: 17964 - DNA, 25 bp, Saccharomyces pastorianus
gagggacggtgttggctacatcaaa

SEQ ID NO: 17965 - DNA, 25 bp, Saccharomyces pastorianus
gatactcaaccgatgtcaggaatat

SEQ ID NO: 17966 - DNA, 25 bp, Saccharomyces pastorianus
attcttctcaggctcatttagtgga

SEQ ID NO: 17967 - DNA, 25 bp, Saccharomyces pastorianus
attccgcttctcgaggtacaacaca

SEQ ID NO: 17968 - DNA, 25 bp, Saccharomyces pastorianus
gttatagaccttgacgagaccttaa

SEQ ID NO: 17969 - DNA, 25 bp, Saccharomyces pastorianus
gacgagaccttaattcattccgctt

SEQ ID NO: 17970 - DNA, 25 bp, Saccharomyces pastorianus
agaaggctcctttgcagctagtttt

SEQ ID NO: 17971 - DNA, 25 bp, Saccharomyces pastorianus
gctaccgatacccaaaccatgaaat

SEQ ID NO: 17972 - DNA, 25 bp, Saccharomyces pastorianus
actgcagttctatttgtcttagcga

SEQ ID NO: 17973 - DNA, 25 bp, Saccharomyces pastorianus
aaacgaacatgtgctaccgataccc

SEQ ID NO: 17974 - DNA, 25 bp, Saccharomyces pastorianus
caaagttcttgatgctggtggacag

SEQ ID NO: 17975 - DNA, 25 bp, Saccharomyces pastorianus
aatacttccctgactatcaaggtcg

SEQ ID NO: 17976 - DNA, 25 bp, Saccharomyces pastorianus
atcaaggtcgtgttggcgatgcaga

SEQ ID NO: 17977 - DNA, 25 bp, Saccharomyces pastorianus
gaaggatcggcagcgtattatttcg

SEQ ID NO: 17978 - DNA, 25 bp, Saccharomyces pastorianus
gatacaccattcatcctatttttaa

SEQ ID NO: 17979 - DNA, 25 bp, Saccharomyces pastorianus
agcgccgtcactgatctgataattc

SEQ ID NO: 17980 - DNA, 25 bp, Saccharomyces pastorianus
cgaggacatcttaaagggccgtata

SEQ ID NO: 17981 - DNA, 25 bp, Saccharomyces pastorianus
tgaaattcgttttgagcgccgtcac

SEQ ID NO: 17982 - DNA, 25 bp, Saccharomyces pastorianus
ggcggcggtcaacctcagttatcat

SEQ ID NO: 17983 - DNA, 25 bp, Saccharomyces pastorianus
ttcaagctgcggaggctgaattgga

SEQ ID NO: 17984 - DNA, 25 bp, Saccharomyces pastorianus
tactccgagggtgaactaaacaaga

SEQ ID NO: 17985 - DNA, 25 bp, Saccharomyces pastorianus
acgtgcttagacaggtgtgtggcta

SEQ ID NO: 17986 - DNA, 25 bp, Saccharomyces pastorianus
acctcagttatcatcccagcaaaag

SEQ ID NO: 17987 - DNA, 25 bp, Saccharomyces pastorianus
tttcctaggattcggcggcggtcaa

SEQ ID NO: 17988 - DNA, 25 bp, Saccharomyces pastorianus
ggctgaattggatttagttactgat

SEQ ID NO: 17989 - DNA, 25 bp, Saccharomyces pastorianus
caatacttcctactccgagggtgaa

SEQ ID NO: 17990 - DNA, 25 bp, Saccharomyces pastorianus
gaacgaatctacgtgcttagacagg

SEQ ID NO: 17991 - DNA, 25 bp, Saccharomyces pastorianus
gtgtgtggctaaatactttgaaacc

SEQ ID NO: 17992 - DNA, 25 bp, Saccharomyces pastorianus
tgaaaccaacgttcaggtcggtgaa

SEQ ID NO: 17993 - DNA, 25 bp, Saccharomyces pastorianus
aaatcgctacgaacactcaatggtt

SEQ ID NO: 17994 - DNA, 25 bp, Saccharomyces pastorianus
atcagcattatctccactttcaggg

SEQ ID NO: 17995 - DNA, 25 bp, Saccharomyces pastorianus
atatacactacatatgggctcccca

SEQ ID NO: 17996 - DNA, 25 bp, Saccharomyces pastorianus
aactatacccattagactcggagca

SEQ ID NO: 17997 - DNA, 25 bp, Saccharomyces pastorianus
tggacgagcacacaattggccacct

SEQ ID NO: 17998 - DNA, 25 bp, Saccharomyces pastorianus
aaaaatgcgccaattatatctcccc

SEQ ID NO: 17999 - DNA, 25 bp, Saccharomyces pastorianus
gactcggagcaatcgtttttagaat

SEQ ID NO: 18000 - DNA, 25 bp, Saccharomyces pastorianus
taaatgccaagcagtcccacagaga

SEQ ID NO: 18001 - DNA, 25 bp, Saccharomyces pastorianus
gcacatctcttgtagcccaggaata

SEQ ID NO: 18002 - DNA, 25 bp, Saccharomyces pastorianus
ttatcctccgtttcatcagcattat

SEQ ID NO: 18003 - DNA, 25 bp, Saccharomyces pastorianus
agagacgacaccctgccgacaaaaa

SEQ ID NO: 18004 - DNA, 25 bp, Saccharomyces pastorianus
gagcattttgcttactgtcagttag

SEQ ID NO: 18005 - DNA, 25 bp, Saccharomyces pastorianus
atgaattcaacatccaccgttggaa

SEQ ID NO: 18006 - DNA, 25 bp, Saccharomyces pastorianus
ggtgccatttccaagggtgttactt

SEQ ID NO: 18007 - DNA, 25 bp, Saccharomyces pastorianus
aaggtaagagtgtcccatctcctga

SEQ ID NO: 18008 - DNA, 25 bp, Saccharomyces pastorianus
caaacagttcttatgtcattccaga

SEQ ID NO: 18009 - DNA, 25 bp, Saccharomyces pastorianus
catctcctgatttcacatctatggt

SEQ ID NO: 18010 - DNA, 25 bp, Saccharomyces pastorianus
gtcattccagaaggctaccacgttt

SEQ ID NO: 18011 - DNA, 25 bp, Saccharomyces pastorianus
aactttgagattgcaccatccattg

SEQ ID NO: 18012 - DNA, 25 bp, Saccharomyces pastorianus
aagagacgaatatttcccacacgcc

SEQ ID NO: 18013 - DNA, 25 bp, Saccharomyces pastorianus
ctcctcttcttactctgttggtgaa

SEQ ID NO: 18014 - DNA, 25 bp, Saccharomyces pastorianus
caagggtgttacttccccatacttg

SEQ ID NO: 18015 - DNA, 25 bp, Saccharomyces pastorianus
agaacatcaaattccacggcggcgg

SEQ ID NO: 18016 - DNA, 25 bp, Saccharomyces pastorianus
tggaaccttatatttcgggccaaat

SEQ ID NO: 18017 - DNA, 25 bp, Saccharomyces pastorianus
ttcatcgtcaagaacctgtccaatg

SEQ ID NO: 18018 - DNA, 25 bp, Saccharomyces pastorianus
ttccacgaactctcgaatcttctgg

SEQ ID NO: 18019 - DNA, 25 bp, Saccharomyces pastorianus
ggagccaagcccagcaaacgcaaga

SEQ ID NO: 18020 - DNA, 25 bp, Saccharomyces pastorianus
cttggttcctttggttgccatcgat

SEQ ID NO: 18021 - DNA, 25 bp, Saccharomyces pastorianus
acaaaccattgcctgttctgggaaa

SEQ ID NO: 18022 - DNA, 25 bp, Saccharomyces pastorianus
cctggctccagagtcacaaggtggt

SEQ ID NO: 18023 - DNA, 25 bp, Saccharomyces pastorianus
taaagtcactttgccagacctaaag

SEQ ID NO: 18024 - DNA, 25 bp, Saccharomyces pastorianus
gtcgactacttcaaaaccatctgga

SEQ ID NO: 18025 - DNA, 25 bp, Saccharomyces pastorianus
caaaactagccggtgtgcaaggttc

SEQ ID NO: 18026 - DNA, 25 bp, Saccharomyces pastorianus
aagacagtggctccgtatgccatac

SEQ ID NO: 18027 - DNA, 25 bp, Saccharomyces pastorianus
agttgtccccaacgctatcaaaggg

SEQ ID NO: 18028 - DNA, 25 bp, Saccharomyces pastorianus
ctaccggtgttgaatgttcctacaa

SEQ ID NO: 18029 - DNA, 25 bp, Saccharomyces pastorianus
aagcaggcatgttttctaccggtgt

SEQ ID NO: 18030 - DNA, 25 bp, Saccharomyces pastorianus
gggccctggacgtccaaaattctga

SEQ ID NO: 18031 - DNA, 25 bp, Saccharomyces pastorianus
aagatctctatatcgcaagcggtca

SEQ ID NO: 18032 - DNA, 25 bp, Saccharomyces pastorianus
gagctgtatcattacgtatccaagt

SEQ ID NO: 18033 - DNA, 25 bp, Saccharomyces pastorianus
aatgcgcccgcgacaggcaaattaa

SEQ ID NO: 18034 - DNA, 25 bp, Saccharomyces pastorianus
catacctgaaagctcggatgacgtt

SEQ ID NO: 18035 - DNA, 25 bp, Saccharomyces pastorianus
gagcgcattctatcactatcaaacc

SEQ ID NO: 18036 - DNA, 25 bp, Saccharomyces pastorianus
gttcctacaagttcaggtcccctga

SEQ ID NO: 18037 - DNA, 25 bp, Saccharomyces pastorianus
gaagggtctttatcgtgtccacgag

SEQ ID NO: 18038 - DNA, 25 bp, Saccharomyces pastorianus
gaacttctatgatcccagaactggc

SEQ ID NO: 18039 - DNA, 25 bp, Saccharomyces pastorianus
atttaggattagttgccactgcaga

SEQ ID NO: 18040 - DNA, 25 bp, Saccharomyces pastorianus
aagtggaactcttttgctggagcaa

SEQ ID NO: 18041 - DNA, 25 bp, Saccharomyces pastorianus
ggaaagcttgagtatgtgcacacac

SEQ ID NO: 18042 - DNA, 25 bp, Saccharomyces pastorianus
tgattgccctggtagagaacttcta

SEQ ID NO: 18043 - DNA, 25 bp, Saccharomyces pastorianus
cacactgaacggtactgcaatggca

SEQ ID NO: 18044 - DNA, 25 bp, Saccharomyces pastorianus
aattagtagcgcctccaattgtacc

SEQ ID NO: 18045 - DNA, 25 bp, Saccharomyces pastorianus
ggcgagatatttgttcccgaatgct

SEQ ID NO: 18046 - DNA, 25 bp, Saccharomyces pastorianus
aagttcttgatctaagctctgctga

SEQ ID NO: 18047 - DNA, 25 bp, Saccharomyces pastorianus
ttatgggctccaagatacgaattta

SEQ ID NO: 18048 - DNA, 25 bp, Saccharomyces pastorianus
acgactttagattgtgatggcgcag

SEQ ID NO: 18049 - DNA, 25 bp, Saccharomyces pastorianus
cactcaccgccgcttgaaagaaaat

SEQ ID NO: 18050 - DNA, 25 bp, Saccharomyces pastorianus
atagagacacattggcctttgaggt

SEQ ID NO: 18051 - DNA, 25 bp, Saccharomyces pastorianus
gatgaatgatgacccagaccagcaa

SEQ ID NO: 18052 - DNA, 25 bp, Saccharomyces pastorianus
attgaccctggatgggaccaatgat

SEQ ID NO: 18053 - DNA, 25 bp, Saccharomyces pastorianus
atgtatcatattctttcttggccag

SEQ ID NO: 18054 - DNA, 25 bp, Saccharomyces pastorianus
ggccagaaacttcctttgttgctac

SEQ ID NO: 18055 - DNA, 25 bp, Saccharomyces pastorianus
aaattggatccaacgtacctggctc

SEQ ID NO: 18056 - DNA, 25 bp, Saccharomyces pastorianus
aaatggtcacatcacgtctttaagt

SEQ ID NO: 18057 - DNA, 25 bp, Saccharomyces pastorianus
gtacctggctcctggcgaaaaattg

SEQ ID NO: 18058 - DNA, 25 bp, Saccharomyces pastorianus
gtgagacaatccaacagagctgctt

SEQ ID NO: 18059 - DNA, 25 bp, Saccharomyces pastorianus
agggaaccctgtatttctgacaccg

SEQ ID NO: 18060 - DNA, 25 bp, Saccharomyces pastorianus
aagagaaccatccatgtttccgctc

SEQ ID NO: 18061 - DNA, 25 bp, Saccharomyces pastorianus
gtttccgctcccgtattatattgct

SEQ ID NO: 18062 - DNA, 25 bp, Saccharomyces pastorianus
tctgacaccgtgctataatccaagt

SEQ ID NO: 18063 - DNA, 25 bp, Saccharomyces pastorianus
tgtcgccctcctttgataaatcatt

SEQ ID NO: 18064 - DNA, 25 bp, Saccharomyces pastorianus
gcccatgtataacttcaacccgtat

SEQ ID NO: 18065 - DNA, 25 bp, Saccharomyces pastorianus
ggttcaaaagctccagatgtccgat

SEQ ID NO: 18066 - DNA, 25 bp, Saccharomyces pastorianus
gtgaattatgcaatccccgttcaac

SEQ ID NO: 18067 - DNA, 25 bp, Saccharomyces pastorianus
ttccgctcagccttctcaaataaga

SEQ ID NO: 18068 - DNA, 25 bp, Saccharomyces pastorianus
aataccgtccaatatttcctatctc

SEQ ID NO: 18069 - DNA, 25 bp, Saccharomyces pastorianus
gtgtacgattcaccattgtttgaca

SEQ ID NO: 18070 - DNA, 25 bp, Saccharomyces pastorianus
atgtattccatttgaccaacctata

SEQ ID NO: 18071 - DNA, 25 bp, Saccharomyces pastorianus
gaaccaagttgtcgttgtccgtaga

SEQ ID NO: 18072 - DNA, 25 bp, Saccharomyces pastorianus
gaagggtacaccaatccgtattgaa

SEQ ID NO: 18073 - DNA, 25 bp, Saccharomyces pastorianus
aggaactatttgacactcacagagt

SEQ ID NO: 18074 - DNA, 25 bp, Saccharomyces pastorianus
gggtgctaagtctctatgtattcca

SEQ ID NO: 18075 - DNA, 25 bp, Saccharomyces pastorianus
gtaaacacattcacgaatccgccag

SEQ ID NO: 18076 - DNA, 25 bp, Saccharomyces pastorianus
tccgccagaagcgtggaagctcgtt

SEQ ID NO: 18077 - DNA, 25 bp, Saccharomyces pastorianus
actccaggctggaaattctctcaat

SEQ ID NO: 18078 - DNA, 25 bp, Saccharomyces pastorianus
ggagagattttgttccagctttgaa

SEQ ID NO: 18079 - DNA, 25 bp, Saccharomyces pastorianus
atgtcgtttcccttgatgacttgga

SEQ ID NO: 18080 - DNA, 25 bp, Saccharomyces pastorianus
attttggctccatggtgtggcatca

SEQ ID NO: 18081 - DNA, 25 bp, Saccharomyces pastorianus
ggtaaacctaccgttgttatgcaag

SEQ ID NO: 18082 - DNA, 25 bp, Saccharomyces pastorianus
tatctcactatcttgcatacctcag

SEQ ID NO: 18083 - DNA, 25 bp, Saccharomyces pastorianus
gaccagacgatatttcccgtgttgc

SEQ ID NO: 18084 - DNA, 25 bp, Saccharomyces pastorianus
attcccgtttgtatacacatgtcct

SEQ ID NO: 18085 - DNA, 25 bp, Saccharomyces pastorianus
gactcaggcattttcggtatctcac

SEQ ID NO: 18086 - DNA, 25 bp, Saccharomyces pastorianus
cagccccacaggcagttgaggtgat

SEQ ID NO: 18087 - DNA, 25 bp, Saccharomyces pastorianus
aagcgcctttggtgacgtagagcat

SEQ ID NO: 18088 - DNA, 25 bp, Saccharomyces pastorianus
cggttcattcagtgcgggtggtccc

SEQ ID NO: 18089 - DNA, 25 bp, Saccharomyces pastorianus
aaccactcttattctgactcaggca

SEQ ID NO: 18090 - DNA, 25 bp, Saccharomyces pastorianus
aattgcgtcgcattcaaccactctt

SEQ ID NO: 18091 - DNA, 25 bp, Saccharomyces pastorianus
aatgcatggccgtaaggttcctatt

SEQ ID NO: 18092 - DNA, 25 bp, Saccharomyces pastorianus
cgggttctgtggctcatttctaaga

SEQ ID NO: 18093 - DNA, 25 bp, Saccharomyces pastorianus
aagtgtattgctatcatcccacaat

SEQ ID NO: 18094 - DNA, 25 bp, Saccharomyces pastorianus
tactgctgccatgatgggcgggttc

SEQ ID NO: 18095 - DNA, 25 bp, Saccharomyces pastorianus
aaatcccattgtctgaggtgcttcc

SEQ ID NO: 18096 - DNA, 25 bp, Saccharomyces pastorianus
ggaacccagccatcaagtgtattgc

SEQ ID NO: 18097 - DNA, 25 bp, Saccharomyces pastorianus
tggccttggctactgagaacttcga

SEQ ID NO: 18098 - DNA, 25 bp, Saccharomyces pastorianus
gattccagaggcattcttccaaagg

SEQ ID NO: 18099 - DNA, 25 bp, Saccharomyces pastorianus
atttgagttgtctaccgctgattcc

SEQ ID NO: 18100 - DNA, 25 bp, Saccharomyces pastorianus
acggtgtcgagtgttcctggaagtt

SEQ ID NO: 18101 - DNA, 25 bp, Saccharomyces pastorianus
aaagactggccgtattgaccactgc

SEQ ID NO: 18102 - DNA, 25 bp, Saccharomyces pastorianus
aaggcctaccctacgcaagatttgg

SEQ ID NO: 18103 - DNA, 25 bp, Saccharomyces pastorianus
tggacttgtttaatgacgctcacgt

SEQ ID NO: 18104 - DNA, 25 bp, Saccharomyces pastorianus
accactgcagttgggttagtatcgc

SEQ ID NO: 18105 - DNA, 25 bp, Saccharomyces pastorianus
gcatcaatcttaaccactgcagttg

SEQ ID NO: 18106 - DNA, 25 bp, Saccharomyces pastorianus
ttactcacgtgaacaagatgctctg

SEQ ID NO: 18107 - DNA, 25 bp, Saccharomyces pastorianus
caagatgctctgtttatcacaagat

SEQ ID NO: 18108 - DNA, 25 bp, Saccharomyces pastorianus
tgaaggttttcgacactttaacacg

SEQ ID NO: 18109 - DNA, 25 bp, Saccharomyces pastorianus
agattagcccaacttttgagacagt

SEQ ID NO: 18110 - DNA, 25 bp, Saccharomyces pastorianus
ggtcaacgtacgtgtcggacaagca

SEQ ID NO: 18111 - DNA, 25 bp, Saccharomyces pastorianus
taacacgtttctcgcatgatgctga

SEQ ID NO: 18112 - DNA, 25 bp, Saccharomyces pastorianus
ggattacacaatctacacctgtctt

SEQ ID NO: 18113 - DNA, 25 bp, Saccharomyces pastorianus
gaattctatttttgccatgggttta

SEQ ID NO: 18114 - DNA, 25 bp, Saccharomyces pastorianus
gaaagatacatgcacactcctcaag

SEQ ID NO: 18115 - DNA, 25 bp, Saccharomyces pastorianus
gatttagatcgcttgtccgtgataa

SEQ ID NO: 18116 - DNA, 25 bp, Saccharomyces pastorianus
gtattccctgattctgaccacagta

SEQ ID NO: 18117 - DNA, 25 bp, Saccharomyces pastorianus
acgggatgtctgttgctccggtaac

SEQ ID NO: 18118 - DNA, 25 bp, Saccharomyces pastorianus
tatggttccctgagtttcgtggact

SEQ ID NO: 18119 - DNA, 25 bp, Saccharomyces pastorianus
gattgttttcgacaagctgcttgct

SEQ ID NO: 18120 - DNA, 25 bp, Saccharomyces pastorianus
aacaggttcctactaatgcatggta

SEQ ID NO: 18121 - DNA, 25 bp, Saccharomyces pastorianus
tcgatggtcgtggtactggtttcaa

SEQ ID NO: 18122 - DNA, 25 bp, Saccharomyces pastorianus
aatgtcacagcgttggcccaagtaa

SEQ ID NO: 18123 - DNA, 25 bp, Saccharomyces pastorianus
gactggagattctacgactctgtct

SEQ ID NO: 18124 - DNA, 25 bp, Saccharomyces pastorianus
taagcttggcgattacgaggcccgt

SEQ ID NO: 18125 - DNA, 25 bp, Saccharomyces pastorianus
ggaccaaactgggttgttgctttag

SEQ ID NO: 18126 - DNA, 25 bp, Saccharomyces pastorianus
agcactgttgcgcactggaccaaac

SEQ ID NO: 18127 - DNA, 25 bp, Saccharomyces pastorianus
aatccgaacttcactatgctcacag

SEQ ID NO: 18128 - DNA, 25 bp, Saccharomyces pastorianus
atgagagcattttctccgttggaca

SEQ ID NO: 18129 - DNA, 25 bp, Saccharomyces pastorianus
tccttgagtttacccagaataccac

SEQ ID NO: 18130 - DNA, 25 bp, Saccharomyces pastorianus
aattcattgtggctccagcactgtt

SEQ ID NO: 18131 - DNA, 25 bp, Saccharomyces pastorianus
gtagcacttcataccatgtagcggg

SEQ ID NO: 18132 - DNA, 25 bp, Saccharomyces pastorianus
atcctgtttgcggaagcggttctgt

SEQ ID NO: 18133 - DNA, 25 bp, Saccharomyces pastorianus
gagcgggagctatcccattaacagt

SEQ ID NO: 18134 - DNA, 25 bp, Saccharomyces pastorianus
gtagaggacgcagaaacttgtttca

SEQ ID NO: 18135 - DNA, 25 bp, Saccharomyces pastorianus
gcaacttcgctcgttcaagaatgca

SEQ ID NO: 18136 - DNA, 25 bp, Saccharomyces pastorianus
atatcgatgaagaccctgtttgcgg

SEQ ID NO: 18137 - DNA, 25 bp, Saccharomyces pastorianus
gatgcagaaacctgtttcaatgcca

SEQ ID NO: 18138 - DNA, 25 bp, Saccharomyces pastorianus
aaattcattgcgactccagcactgc

SEQ ID NO: 18139 - DNA, 25 bp, Saccharomyces pastorianus
gggcccaaaaaagaatgctccgatt

SEQ ID NO: 18140 - DNA, 25 bp, Saccharomyces pastorianus
aagaataacactgcaacttcgcttg

SEQ ID NO: 18141 - DNA, 25 bp, Saccharomyces pastorianus
tacagggattattttggcgggccca

SEQ ID NO: 18142 - DNA, 25 bp, Saccharomyces pastorianus
atgctccgattaggaactcatacga

SEQ ID NO: 18143 - DNA, 25 bp, Saccharomyces pastorianus
agcactgctgcacactggaccggag

SEQ ID NO: 18144 - DNA, 25 bp, Saccharomyces pastorianus
gaacttcactgtactcacacagcaa

SEQ ID NO: 18145 - DNA, 25 bp, Saccharomyces pastorianus
aaatgagggcatttcctacagcgga

SEQ ID NO: 18146 - DNA, 25 bp, Saccharomyces pastorianus
gtaacacttcataccatgtggcagg

SEQ ID NO: 18147 - DNA, 25 bp, Saccharomyces pastorianus
aatggctgtaccctcaaactctgtt

SEQ ID NO: 18148 - DNA, 25 bp, Saccharomyces pastorianus
aagacaaccattactagcagagcaa

SEQ ID NO: 18149 - DNA, 25 bp, Saccharomyces pastorianus
tgttaatttatacccaaacgccaat

SEQ ID NO: 18150 - DNA, 25 bp, Saccharomyces pastorianus
gttttgaatccgtcaacgacatgga

SEQ ID NO: 18151 - DNA, 25 bp, Saccharomyces pastorianus
aaacgccaatgcacaagccttggat

SEQ ID NO: 18152 - DNA, 25 bp, Saccharomyces pastorianus
tatgatggatatgaggtctgcccct

SEQ ID NO: 18153 - DNA, 25 bp, Saccharomyces pastorianus
gaatgaccgttgatgaggcgctaga

SEQ ID NO: 18154 - DNA, 25 bp, Saccharomyces pastorianus
tttgccagggcacgatacagatttc

SEQ ID NO: 18155 - DNA, 25 bp, Saccharomyces pastorianus
gaacacccttacttgtctatatggc

SEQ ID NO: 18156 - DNA, 25 bp, Saccharomyces pastorianus
gttccaccacaacaagagtcatttg

SEQ ID NO: 18157 - DNA, 25 bp, Saccharomyces pastorianus
cctggaatcccgtctcaagatgata

SEQ ID NO: 18158 - DNA, 25 bp, Saccharomyces pastorianus
tgatatgcgacttgtgagccgggtc

SEQ ID NO: 18159 - DNA, 25 bp, Saccharomyces pastorianus
gaagccggtcaagtttacgttgcgt

SEQ ID NO: 18160 - DNA, 25 bp, Saccharomyces pastorianus
agaactcagattcccctaatgctgt

SEQ ID NO: 18161 - DNA, 25 bp, Saccharomyces pastorianus
tgagcttatggtcccagagcgtttc

SEQ ID NO: 18162 - DNA, 25 bp, Saccharomyces pastorianus
ggtcgtcggcaatcctattttgaaa

SEQ ID NO: 18163 - DNA, 25 bp, Saccharomyces pastorianus
gggcattatccattcacaaggcgca

SEQ ID NO: 18164 - DNA, 25 bp, Saccharomyces pastorianus
aaaccggcctgatgtggatttagtc

SEQ ID NO: 18165 - DNA, 25 bp, Saccharomyces pastorianus
atgcagtcaagatttcccctcataa

SEQ ID NO: 18166 - DNA, 25 bp, Saccharomyces pastorianus
aaatttccttatgttcgctggacaa

SEQ ID NO: 18167 - DNA, 25 bp, Saccharomyces pastorianus
gttgtcgagagcagtcaccatggat

SEQ ID NO: 18168 - DNA, 25 bp, Saccharomyces pastorianus
gagcgtttccccattgatataccaa

SEQ ID NO: 18169 - DNA, 25 bp, Saccharomyces pastorianus
acaagctgcggattctcgtcgagaa

SEQ ID NO: 18170 - DNA, 25 bp, Saccharomyces pastorianus
gagattgacgagaccgctatcgccc

SEQ ID NO: 18171 - DNA, 25 bp, Saccharomyces pastorianus
atagcgttccccaagatgaggcaga

SEQ ID NO: 18172 - DNA, 25 bp, Saccharomyces pastorianus
acgagttgagcataccgttgccgca

SEQ ID NO: 18173 - DNA, 25 bp, Saccharomyces pastorianus
aagaggccagcaacccgatgagcgt

SEQ ID NO: 18174 - DNA, 25 bp, Saccharomyces pastorianus
agtcatgcgagatccgtgagtccgt

SEQ ID NO: 18175 - DNA, 25 bp, Saccharomyces pastorianus
ggcagacatcaagatcttccacgtt

SEQ ID NO: 18176 - DNA, 25 bp, Saccharomyces pastorianus
gttcccagtggcgaaggcaccggta

SEQ ID NO: 18177 - DNA, 25 bp, Saccharomyces pastorianus
gagatccctgcgctggagatactga

SEQ ID NO: 18178 - DNA, 25 bp, Saccharomyces pastorianus
gtcgtgctttgcagggaccacatag

SEQ ID NO: 18179 - DNA, 25 bp, Saccharomyces pastorianus
gcagcctgacaagcccgagtacgag

SEQ ID NO: 18180 - DNA, 25 bp, Saccharomyces pastorianus
atcaaaagatatcccgtgtcacctc

SEQ ID NO: 18181 - DNA, 25 bp, Saccharomyces pastorianus
gacatcgagagcatcatacgccttg

SEQ ID NO: 18182 - DNA, 25 bp, Saccharomyces pastorianus
gtttaccggctttggaccaacagtg

SEQ ID NO: 18183 - DNA, 25 bp, Saccharomyces pastorianus
caaattttttactcggattcgtgcg

SEQ ID NO: 18184 - DNA, 25 bp, Saccharomyces pastorianus
taagagctactacggcgatggcatc

SEQ ID NO: 18185 - DNA, 25 bp, Saccharomyces pastorianus
gagcgcacagctgtttggagacatc

SEQ ID NO: 18186 - DNA, 25 bp, Saccharomyces pastorianus
tttcaaattgcccaagccgtggtca

SEQ ID NO: 18187 - DNA, 25 bp, Saccharomyces pastorianus
aacatcatcgtctgaggcatcttcc

SEQ ID NO: 18188 - DNA, 25 bp, Saccharomyces pastorianus
tttgcggcatcataacttggtgttt

SEQ ID NO: 18189 - DNA, 25 bp, Saccharomyces pastorianus
agatgacttttatgaccggaacgaa

SEQ ID NO: 18190 - DNA, 25 bp, Saccharomyces pastorianus
ggagacatcatcaattcgtttatag

SEQ ID NO: 18191 - DNA, 25 bp, Saccharomyces pastorianus
cagaatcgcgattaaaagtagccaa

SEQ ID NO: 18192 - DNA, 25 bp, Saccharomyces pastorianus
gatattgcaaccacttctcttaaag

SEQ ID NO: 18193 - DNA, 25 bp, Saccharomyces pastorianus
gccaacttgaacttgactcctgaaa

SEQ ID NO: 18194 - DNA, 25 bp, Saccharomyces pastorianus
gttcttgccgccaacttgaacttga

SEQ ID NO: 18195 - DNA, 25 bp, Saccharomyces pastorianus
ataaccgttttcgatcctaaagatg

SEQ ID NO: 18196 - DNA, 25 bp, Saccharomyces pastorianus
ttctgacaaaggctgaagctcaatt

SEQ ID NO: 18197 - DNA, 25 bp, Saccharomyces pastorianus
ggaccatcagaggtagtatcctcaa

SEQ ID NO: 18198 - DNA, 25 bp, Saccharomyces pastorianus
gttgacgtaaatgaacttctgacaa

SEQ ID NO: 18199 - DNA, 25 bp, Saccharomyces pastorianus
gatgactccgttaggaaagccgaac

SEQ ID NO: 18200 - DNA, 25 bp, Saccharomyces pastorianus
ttcgaagattataaacagtcctcat

SEQ ID NO: 18201 - DNA, 25 bp, Saccharomyces pastorianus
aagaatgcactcctaataaccgttt

SEQ ID NO: 18202 - DNA, 25 bp, Saccharomyces pastorianus
aaaggtgctcgtttacttcatggtg

SEQ ID NO: 18203 - DNA, 25 bp, Saccharomyces pastorianus
tttccaaccaactctcctagtagat

SEQ ID NO: 18204 - DNA, 25 bp, Saccharomyces pastorianus
agagtttcattgtgggtgcttatac

SEQ ID NO: 18205 - DNA, 25 bp, Saccharomyces pastorianus
gaaagctagagataccgaccactgt

SEQ ID NO: 18206 - DNA, 25 bp, Saccharomyces pastorianus
tctaggtggctctgtatttggttca

SEQ ID NO: 18207 - DNA, 25 bp, Saccharomyces pastorianus
ttcgctactttctatgtttgtcaac

SEQ ID NO: 18208 - DNA, 25 bp, Saccharomyces pastorianus
ttcatggtggctcccgttttaaaca

SEQ ID NO: 18209 - DNA, 25 bp, Saccharomyces pastorianus
gaccactgtatccaattggccaact

SEQ ID NO: 18210 - DNA, 25 bp, Saccharomyces pastorianus
aagtgtttggtcctattttggtcat

SEQ ID NO: 18211 - DNA, 25 bp, Saccharomyces pastorianus
gggcctattgggtctatgtaatgcc

SEQ ID NO: 18212 - DNA, 25 bp, Saccharomyces pastorianus
gtattaatggttccggctatggtaa

SEQ ID NO: 18213 - DNA, 25 bp, Saccharomyces pastorianus
tcccgtgataccgatgactttctat

SEQ ID NO: 18214 - DNA, 25 bp, Saccharomyces pastorianus
gcccacgtaacctcttcgataatta

SEQ ID NO: 18215 - DNA, 25 bp, Saccharomyces pastorianus
aacttgcctgttcattacgatctaa

SEQ ID NO: 18216 - DNA, 25 bp, Saccharomyces pastorianus
ataatggtgccttcatctacgtttg

SEQ ID NO: 18217 - DNA, 25 bp, Saccharomyces pastorianus
aacaacgtctccttgggtaagcatc

SEQ ID NO: 18218 - DNA, 25 bp, Saccharomyces pastorianus
agcatctattattctacgggtcccg

SEQ ID NO: 18219 - DNA, 25 bp, Saccharomyces pastorianus
aaatggtggtggctcactccagatt

SEQ ID NO: 18220 - DNA, 25 bp, Saccharomyces pastorianus
gagaacgtgtcgcattcatggaatc

SEQ ID NO: 18221 - DNA, 25 bp, Saccharomyces pastorianus
ggtgtgttaaatgctctgatcggaa

SEQ ID NO: 18222 - DNA, 25 bp, Saccharomyces pastorianus
aacatcgatgacactaacttgcctg

SEQ ID NO: 18223 - DNA, 25 bp, Saccharomyces pastorianus
tcatgttcgtcgttccactttcaga

SEQ ID NO: 18224 - DNA, 25 bp, Saccharomyces pastorianus
acagtttggatctcgtgtggttctc

SEQ ID NO: 18225 - DNA, 25 bp, Saccharomyces pastorianus
gtattcgtggctttagtatcggtaa

SEQ ID NO: 18226 - DNA, 25 bp, Saccharomyces pastorianus
atggacccttaagcacaacgttaga

SEQ ID NO: 18227 - DNA, 25 bp, Saccharomyces pastorianus
gcagaacgcaatgaacttggccgaa

SEQ ID NO: 18228 - DNA, 25 bp, Saccharomyces pastorianus
agtttttgacagctcggtggataat

SEQ ID NO: 18229 - DNA, 25 bp, Saccharomyces pastorianus
accagtcgagtcaaatcgtttgcag

SEQ ID NO: 18230 - DNA, 25 bp, Saccharomyces pastorianus
gcccatagcacatacgaatttttac

SEQ ID NO: 18231 - DNA, 25 bp, Saccharomyces pastorianus
gattgaaccgaatgctcttgagaaa

SEQ ID NO: 18232 - DNA, 25 bp, Saccharomyces pastorianus
taaattttacttatcctgggcgatt

SEQ ID NO: 18233 - DNA, 25 bp, Saccharomyces pastorianus
agtgatttcaacatttcctgcaaag

SEQ ID NO: 18234 - DNA, 25 bp, Saccharomyces pastorianus
ggttggatgcctttagtcggtatat

SEQ ID NO: 18235 - DNA, 25 bp, Saccharomyces pastorianus
agttgtacttcgctaggcctaacga

SEQ ID NO: 18236 - DNA, 25 bp, Saccharomyces pastorianus
gataacaggacatacttggccgtaa

SEQ ID NO: 18237 - DNA, 25 bp, Saccharomyces pastorianus
atttaggatcctctgcgatgaccat

SEQ ID NO: 18238 - DNA, 25 bp, Saccharomyces pastorianus
ggtggcattacaaccaggctcagca

SEQ ID NO: 18239 - DNA, 25 bp, Saccharomyces pastorianus
tttcgtgcgattatggttttgtcca

SEQ ID NO: 18240 - DNA, 25 bp, Saccharomyces pastorianus
gtttgcgctggatggtgtattctaa

SEQ ID NO: 18241 - DNA, 25 bp, Saccharomyces pastorianus
taaagagcccgtggtaggcgttatt

SEQ ID NO: 18242 - DNA, 25 bp, Saccharomyces pastorianus
gatgaccatggcatatatcgctatg

SEQ ID NO: 18243 - DNA, 25 bp, Saccharomyces pastorianus
gggaaaggctttgaccaccaagcta

SEQ ID NO: 18244 - DNA, 25 bp, Saccharomyces pastorianus
tttataatccacacattgacctcct

SEQ ID NO: 18245 - DNA, 25 bp, Saccharomyces pastorianus
gacctcctcatatcagcttctaaag

SEQ ID NO: 18246 - DNA, 25 bp, Saccharomyces pastorianus
agagattgcagccaggttcacctgt

SEQ ID NO: 18247 - DNA, 25 bp, Saccharomyces pastorianus
gcccaagctttcgacaccattagag

SEQ ID NO: 18248 - DNA, 25 bp, Saccharomyces pastorianus
aaaaagccattcttgcgttgatcaa

SEQ ID NO: 18249 - DNA, 25 bp, Saccharomyces pastorianus
tcacctccgttgaagatcttgaaaa

SEQ ID NO: 18250 - DNA, 25 bp, Saccharomyces pastorianus
tgatcaagccagctgttttcaacac

SEQ ID NO: 18251 - DNA, 25 bp, Saccharomyces pastorianus
attgttgcgttgagagccttgggta

SEQ ID NO: 18252 - DNA, 25 bp, Saccharomyces pastorianus
agaaccttgggttacttgttggatg

SEQ ID NO: 18253 - DNA, 25 bp, Saccharomyces pastorianus
gctgcgtgcgcatctggtgacaaaa

SEQ ID NO: 18254 - DNA, 25 bp, Saccharomyces pastorianus
gaaccaggacttctacataccaatg

SEQ ID NO: 18255 - DNA, 25 bp, Saccharomyces pastorianus
taccaaaaccctatttcttcagatg

SEQ ID NO: 18256 - DNA, 25 bp, Saccharomyces pastorianus
ggcttcgaccaaacgttggcccaag

SEQ ID NO: 18257 - DNA, 25 bp, Saccharomyces pastorianus
gtattgtcggtttctcccagggtgc

SEQ ID NO: 18258 - DNA, 25 bp, Saccharomyces pastorianus
ggcaagccactttggatgcagacgt

SEQ ID NO: 18259 - DNA, 25 bp, Saccharomyces pastorianus
gacatctcccacgaattggacgtct

SEQ ID NO: 18260 - DNA, 25 bp, Saccharomyces pastorianus
agtgtggtcatttcaggctactcct

SEQ ID NO: 18261 - DNA, 25 bp, Saccharomyces pastorianus
ggctaacggtccatacgacggtatt

SEQ ID NO: 18262 - DNA, 25 bp, Saccharomyces pastorianus
tcagtgtgactatatcgatgcgcct

SEQ ID NO: 18263 - DNA, 25 bp, Saccharomyces pastorianus
gatgattttcatctacggtgcctcc

SEQ ID NO: 18264 - DNA, 25 bp, Saccharomyces pastorianus
gatgcgcctgttctcttggaaaaga

SEQ ID NO: 18265 - DNA, 25 bp, Saccharomyces pastorianus
gagactcattcgctgtaaagccaga

SEQ ID NO: 18266 - DNA, 25 bp, Saccharomyces pastorianus
agagcttggttctaccacagcgaca

SEQ ID NO: 18267 - DNA, 25 bp, Saccharomyces pastorianus
ggaattggttccagaccacccagaa

SEQ ID NO: 18268 - DNA, 25 bp, Saccharomyces pastorianus
attctcgtccttgtagcagggcgca

SEQ ID NO: 18269 - DNA, 25 bp, Saccharomyces pastorianus
ggaacaatcgtgaccgtgcttgcag

SEQ ID NO: 18270 - DNA, 25 bp, Saccharomyces pastorianus
tgtggctgatcatttcgggcttaaa

SEQ ID NO: 18271 - DNA, 25 bp, Saccharomyces pastorianus
tccggtgctcttaatgcgtcacaag

SEQ ID NO: 18272 - DNA, 25 bp, Saccharomyces pastorianus
agacctctcaagaacttcggacaag

SEQ ID NO: 18273 - DNA, 25 bp, Saccharomyces pastorianus
atgggtagcagctcacaggaccgtg

SEQ ID NO: 18274 - DNA, 25 bp, Saccharomyces pastorianus
taaactggactgtgtcaccggcatt

SEQ ID NO: 18275 - DNA, 25 bp, Saccharomyces pastorianus
tcacaagtggtgctttctctactgt

SEQ ID NO: 18276 - DNA, 25 bp, Saccharomyces pastorianus
aatatcatgcgcgtacagctcaacc

SEQ ID NO: 18277 - DNA, 25 bp, Saccharomyces pastorianus
gctatgcagctctctttcaaaaggt

SEQ ID NO: 18278 - DNA, 25 bp, Saccharomyces pastorianus
gttttccatttacaacctgctatgc

SEQ ID NO: 18279 - DNA, 25 bp, Saccharomyces pastorianus
gcacgacgatgaaaccttcgaggaa

SEQ ID NO: 18280 - DNA, 25 bp, Saccharomyces pastorianus
gaagtattctgacgcgcacgacgat

SEQ ID NO: 18281 - DNA, 25 bp, Saccharomyces pastorianus
tttctcttacgatttggtccctgct

SEQ ID NO: 18282 - DNA, 25 bp, Saccharomyces pastorianus
tgttgagtgccagacctgccgctta

SEQ ID NO: 18283 - DNA, 25 bp, Saccharomyces pastorianus
gaagcttacgacttgttcgaagtgc

SEQ ID NO: 18284 - DNA, 25 bp, Saccharomyces pastorianus
acctaccgccatcagagtatttgaa

SEQ ID NO: 18285 - DNA, 25 bp, Saccharomyces pastorianus
ctccggcagtcatcgaaaaggcttt

SEQ ID NO: 18286 - DNA, 25 bp, Saccharomyces pastorianus
tgccgcttacactgcgaccagattg

SEQ ID NO: 18287 - DNA, 25 bp, Saccharomyces pastorianus
tcagaaaagagctgggcgttccctt

SEQ ID NO: 18288 - DNA, 25 bp, Saccharomyces pastorianus
gtgttgaacaactgtttctcttacg

SEQ ID NO: 18289 - DNA, 25 bp, Saccharomyces pastorianus
gcgaccagattgaccagaagttcat

SEQ ID NO: 18290 - DNA, 25 bp, Saccharomyces pastorianus
gtaatccccaactttatgatccagg

SEQ ID NO: 18291 - DNA, 25 bp, Saccharomyces pastorianus
acgaggcatcgtggcttgacggcaa

SEQ ID NO: 18292 - DNA, 25 bp, Saccharomyces pastorianus
gcaaacatgtggtcttcggccaagt

SEQ ID NO: 18293 - DNA, 25 bp, Saccharomyces pastorianus
tacggagacacgtttcccgacgaga

SEQ ID NO: 18294 - DNA, 25 bp, Saccharomyces pastorianus
aagaacttttacgagctgagcacca

SEQ ID NO: 18295 - DNA, 25 bp, Saccharomyces pastorianus
ttagcgccaacgtaatcgcgtctaa

SEQ ID NO: 18296 - DNA, 25 bp, Saccharomyces pastorianus
tttggtttatggtactggctgctgc

SEQ ID NO: 18297 - DNA, 25 bp, Saccharomyces pastorianus
atgatccagggaggcgacttcacac

SEQ ID NO: 18298 - DNA, 25 bp, Saccharomyces pastorianus
tcgagtccactttccacagagtaat

SEQ ID NO: 18299 - DNA, 25 bp, Saccharomyces pastorianus
gaaaatctgtcccaagaccgtcaag

SEQ ID NO: 18300 - DNA, 25 bp, Saccharomyces pastorianus
attacatccagcacgttgccaggga

SEQ ID NO: 18301 - DNA, 25 bp, Saccharomyces pastorianus
cagactgtggacaatggtgccggcc

SEQ ID NO: 18302 - DNA, 25 bp, Saccharomyces pastorianus
ggtaccgagtacgtgctaagcagtg

SEQ ID NO: 18303 - DNA, 25 bp, Saccharomyces pastorianus
aacatgaccgtcaacaccgtgggca

SEQ ID NO: 18304 - DNA, 25 bp, Saccharomyces pastorianus
ggtgccaacgtatatcaatcgccga

SEQ ID NO: 18305 - DNA, 25 bp, Saccharomyces pastorianus
gcaaatatggccactgttccctcga

SEQ ID NO: 18306 - DNA, 25 bp, Saccharomyces pastorianus
ggctgatgtctactagttaccacct

SEQ ID NO: 18307 - DNA, 25 bp, Saccharomyces pastorianus
tcgccgacggttttcaagattgtac

SEQ ID NO: 18308 - DNA, 25 bp, Saccharomyces pastorianus
gagaaccggacttctgggtcatcaa

SEQ ID NO: 18309 - DNA, 25 bp, Saccharomyces pastorianus
gcctaggatcattccgctacaggat

SEQ ID NO: 18310 - DNA, 25 bp, Saccharomyces pastorianus
ataagaacagtgtacggcccaccgg

SEQ ID NO: 18311 - DNA, 25 bp, Saccharomyces pastorianus
gaagagcctgtacgacctcatcgaa

SEQ ID NO: 18312 - DNA, 25 bp, Saccharomyces pastorianus
acatttctagccaaaatcggccgta

SEQ ID NO: 18313 - DNA, 25 bp, Saccharomyces pastorianus
aatcggccgtaattgtaacgaactg

SEQ ID NO: 18314 - DNA, 25 bp, Saccharomyces pastorianus
taccgtaacaatgaacccatccgtg

SEQ ID NO: 18315 - DNA, 25 bp, Saccharomyces pastorianus
aacgaactgaaggacacatttgaga

SEQ ID NO: 18316 - DNA, 25 bp, Saccharomyces pastorianus
gtcactgactacttctaaagctgcg

SEQ ID NO: 18317 - DNA, 25 bp, Saccharomyces pastorianus
aacagatacctgatgtcgatacatt

SEQ ID NO: 18318 - DNA, 25 bp, Saccharomyces pastorianus
tgctcttgaagaggtcactgactac

SEQ ID NO: 18319 - DNA, 25 bp, Saccharomyces pastorianus
atctttttctatgggattccaagac

SEQ ID NO: 18320 - DNA, 25 bp, Saccharomyces pastorianus
tcggtttcattcaaccatccctaaa

SEQ ID NO: 18321 - DNA, 25 bp, Saccharomyces pastorianus
tacgaatgaacaacggcctcccaat

SEQ ID NO: 18322 - DNA, 25 bp, Saccharomyces pastorianus
ctaaagctgcgtatcggtttcattc

SEQ ID NO: 18323 - DNA, 25 bp, Saccharomyces pastorianus
atgaatcttcgtccagcgaggatga

SEQ ID NO: 18324 - DNA, 25 bp, Saccharomyces pastorianus
gtccagcgaggatgagcattacagt

SEQ ID NO: 18325 - DNA, 25 bp, Saccharomyces pastorianus
gtgatgatgaatcttcgtccagcga

SEQ ID NO: 18326 - DNA, 25 bp, Saccharomyces pastorianus
gccgatgctgtgagtgatgatgaat

SEQ ID NO: 18327 - DNA, 25 bp, Saccharomyces pastorianus
gatgatgaatcttcgtccagcgagg

SEQ ID NO: 18328 - DNA, 25 bp, Saccharomyces pastorianus
gtgagtgatgatgaatcttcgtcca

SEQ ID NO: 18329 - DNA, 25 bp, Saccharomyces pastorianus
gaatcttcgtccagcgaggatgagc

SEQ ID NO: 18330 - DNA, 25 bp, Saccharomyces pastorianus
ttcgtccagcgaggatgagcattac

SEQ ID NO: 18331 - DNA, 25 bp, Saccharomyces pastorianus
tgatgaatcttcgtccagcgaggat

SEQ ID NO: 18332 - DNA, 25 bp, Saccharomyces pastorianus
gcgaggatgagcattacagtgatgt

SEQ ID NO: 18333 - DNA, 25 bp, Saccharomyces pastorianus
tcttcgtccagcgaggatgagcatt

SEQ ID NO: 18334 - DNA, 25 bp, Saccharomyces pastorianus
gcaatctcaaaactcgaaacctcaa

SEQ ID NO: 18335 - DNA, 25 bp, Saccharomyces pastorianus
agacatgctgcaaagatgagactca

SEQ ID NO: 18336 - DNA, 25 bp, Saccharomyces pastorianus
cttggaccacgatttgggtgcctat

SEQ ID NO: 18337 - DNA, 25 bp, Saccharomyces pastorianus
aagtgttgcatcacgaatacgttca

SEQ ID NO: 18338 - DNA, 25 bp, Saccharomyces pastorianus
cgacggtgaaaacaaggccgatgct

SEQ ID NO: 18339 - DNA, 25 bp, Saccharomyces pastorianus
gacatttcctcattaatcttggacc

SEQ ID NO: 18340 - DNA, 25 bp, Saccharomyces pastorianus
agacgtcaaagcaaagcaatctcaa

SEQ ID NO: 18341 - DNA, 25 bp, Saccharomyces pastorianus
gaattgggaccaagactaaccttga

SEQ ID NO: 18342 - DNA, 25 bp, Saccharomyces pastorianus
gaatctgttcaggaaaagtgttgca

SEQ ID NO: 18343 - DNA, 25 bp, Saccharomyces pastorianus
aagaaggctgtcaaagatgctaaga

SEQ ID NO: 18344 - DNA, 25 bp, Saccharomyces pastorianus
gtggttgataaccaagacgtcaaag

SEQ ID NO: 18345 - DNA, 25 bp, Saccharomyces pastorianus
gaaagcctattacacaactgcggta

SEQ ID NO: 18346 - DNA, 25 bp, Saccharomyces pastorianus
acaaggaatactgtcgccgagttga

SEQ ID NO: 18347 - DNA, 25 bp, Saccharomyces pastorianus
tgaaagggcccttctacaaagtcac

SEQ ID NO: 18348 - DNA, 25 bp, Saccharomyces pastorianus
gtcaatctttgaattcttcggccca

SEQ ID NO: 18349 - DNA, 25 bp, Saccharomyces pastorianus
gatatcatcatgcaaggtccctttt

SEQ ID NO: 18350 - DNA, 25 bp, Saccharomyces pastorianus
agacgttccaagtcagagacctcca

SEQ ID NO: 18351 - DNA, 25 bp, Saccharomyces pastorianus
ttactgaaatgcatccagccgcttt

SEQ ID NO: 18352 - DNA, 25 bp, Saccharomyces pastorianus
gcgtatgggcaattgtctctaaatc

SEQ ID NO: 18353 - DNA, 25 bp, Saccharomyces pastorianus
aggtcccttttcaatccagctatta

SEQ ID NO: 18354 - DNA, 25 bp, Saccharomyces pastorianus
gggtcaaggcgagcttatccagtat

SEQ ID NO: 18355 - DNA, 25 bp, Saccharomyces pastorianus
tattcgcccatcaacttagaccaag

SEQ ID NO: 18356 - DNA, 25 bp, Saccharomyces pastorianus
aacaagatcccaatcttttgcccat

SEQ ID NO: 18357 - DNA, 25 bp, Saccharomyces pastorianus
gatatgttgtttttccacactttca

SEQ ID NO: 18358 - DNA, 25 bp, Saccharomyces pastorianus
atctttgaccgatggttccattggt

SEQ ID NO: 18359 - DNA, 25 bp, Saccharomyces pastorianus
gaatggattgttccagtcttggaca

SEQ ID NO: 18360 - DNA, 25 bp, Saccharomyces pastorianus
cggtcctttactgggctcacaagaa

SEQ ID NO: 18361 - DNA, 25 bp, Saccharomyces pastorianus
aagacgtagactcgcccatttggac

SEQ ID NO: 18362 - DNA, 25 bp, Saccharomyces pastorianus
ttttcccattgattgtcgctgctac

SEQ ID NO: 18363 - DNA, 25 bp, Saccharomyces pastorianus
atccgtaaggttaactccatgtcca

SEQ ID NO: 18364 - DNA, 25 bp, Saccharomyces pastorianus
ggcgctagacctgatgaggctgttt

SEQ ID NO: 18365 - DNA, 25 bp, Saccharomyces pastorianus
gatggttctgatgcaggcgctagac

SEQ ID NO: 18366 - DNA, 25 bp, Saccharomyces pastorianus
gcgttgactgtttggatgccaacca

SEQ ID NO: 18367 - DNA, 25 bp, Saccharomyces pastorianus
aaaacctctcagatggacctggcaa

SEQ ID NO: 18368 - DNA, 25 bp, Saccharomyces pastorianus
ggaggtgcagtctctgttccaggac

SEQ ID NO: 18369 - DNA, 25 bp, Saccharomyces pastorianus
gttttgtcaagttccaagctcttta

SEQ ID NO: 18370 - DNA, 25 bp, Saccharomyces pastorianus
aatttgcccggtaacatcaccgtgg

SEQ ID NO: 18371 - DNA, 25 bp, Saccharomyces pastorianus
catcaaggcgttggcattctgcgaa

SEQ ID NO: 18372 - DNA, 25 bp, Saccharomyces pastorianus
gagcagtatcgttaaacccttccat

SEQ ID NO: 18373 - DNA, 25 bp, Saccharomyces pastorianus
gttccaggacggtagtgcttcttta

SEQ ID NO: 18374 - DNA, 25 bp, Saccharomyces pastorianus
ttgccggtatgcgaatgtcatcaag

SEQ ID NO: 18375 - DNA, 25 bp, Saccharomyces pastorianus
gaatgacccttccatatcaaacagc

SEQ ID NO: 18376 - DNA, 25 bp, Saccharomyces pastorianus
tcggtattactcaacagcgtgtggt

SEQ ID NO: 18377 - DNA, 25 bp, Saccharomyces pastorianus
tcgaataaatcatcgggccccactg

SEQ ID NO: 18378 - DNA, 25 bp, Saccharomyces pastorianus
agacggtcaagtccttcaacatgga

SEQ ID NO: 18379 - DNA, 25 bp, Saccharomyces pastorianus
aacaaggttgcccagacggtcaagt

SEQ ID NO: 18380 - DNA, 25 bp, Saccharomyces pastorianus
gacggcacgattaagatccctgttc

SEQ ID NO: 18381 - DNA, 25 bp, Saccharomyces pastorianus
gagagctacaagtccctgcaagaga

SEQ ID NO: 18382 - DNA, 25 bp, Saccharomyces pastorianus
cgcttcaaagaagtgccgatcccag

SEQ ID NO: 18383 - DNA, 25 bp, Saccharomyces pastorianus
acgagttgcacgagcgcgttcatgc

SEQ ID NO: 18384 - DNA, 25 bp, Saccharomyces pastorianus
aagaggtcaccgagcacgagttgca

SEQ ID NO: 18385 - DNA, 25 bp, Saccharomyces pastorianus
tgcacgtgcactgcttcgagaagta

SEQ ID NO: 18386 - DNA, 25 bp, Saccharomyces pastorianus
atcccagctcgaatcagtcactatg

SEQ ID NO: 18387 - DNA, 25 bp, Saccharomyces pastorianus
agtcactatgtcatgaacctgcccg

SEQ ID NO: 18388 - DNA, 25 bp, Saccharomyces pastorianus
ttggccaatgacctgaacccggaga

SEQ ID NO: 18389 - DNA, 25 bp, Saccharomyces pastorianus
agaagagcactgagaccggcgaaat

SEQ ID NO: 18390 - DNA, 25 bp, Saccharomyces pastorianus
cggcaaaagaatctacacattgaag

SEQ ID NO: 18391 - DNA, 25 bp, Saccharomyces pastorianus
accggcgaaattacaaagtctgctc

SEQ ID NO: 18392 - DNA, 25 bp, Saccharomyces pastorianus
tccagccagattttctccagatgac

SEQ ID NO: 18393 - DNA, 25 bp, Saccharomyces pastorianus
tcatccagccagattttctccagat

SEQ ID NO: 18394 - DNA, 25 bp, Saccharomyces pastorianus
cacattgaagaagagcactgagacc

SEQ ID NO: 18395 - DNA, 25 bp, Saccharomyces pastorianus
gaaattacaaagtctgctcatccag

SEQ ID NO: 18396 - DNA, 25 bp, Saccharomyces pastorianus
agagcactgagaccggcgaaattac

SEQ ID NO: 18397 - DNA, 25 bp, Saccharomyces pastorianus
atccagccagattttctccagatga

SEQ ID NO: 18398 - DNA, 25 bp, Saccharomyces pastorianus
aaagtctgctcatccagccagattt

SEQ ID NO: 18399 - DNA, 25 bp, Saccharomyces pastorianus
ttacaaagtctgctcatccagccag

SEQ ID NO: 18400 - DNA, 25 bp, Saccharomyces pastorianus
agaagagcactgagaccggcgaaat

SEQ ID NO: 18401 - DNA, 25 bp, Saccharomyces pastorianus
cggcaaaagaatctacacattgaag

SEQ ID NO: 18402 - DNA, 25 bp, Saccharomyces pastorianus
accggcgaaattacaaagtctgctc

SEQ ID NO: 18403 - DNA, 25 bp, Saccharomyces pastorianus
tccagccagattttctccagatgac

SEQ ID NO: 18404 - DNA, 25 bp, Saccharomyces pastorianus
tcatccagccagattttctccagat

SEQ ID NO: 18405 - DNA, 25 bp, Saccharomyces pastorianus
tgatgtacactttaggcccagacgg

SEQ ID NO: 18406 - DNA, 25 bp, Saccharomyces pastorianus
cacattgaagaagagcactgagacc

SEQ ID NO: 18407 - DNA, 25 bp, Saccharomyces pastorianus
gaaattacaaagtctgctcatccag

SEQ ID NO: 18408 - DNA, 25 bp, Saccharomyces pastorianus
agagcactgagaccggcgaaattac

SEQ ID NO: 18409 - DNA, 25 bp, Saccharomyces pastorianus
aaagtctgctcatccagccagattt

SEQ ID NO: 18410 - DNA, 25 bp, Saccharomyces pastorianus
ttacaaagtctgctcatccagccag

SEQ ID NO: 18411 - DNA, 25 bp, Saccharomyces pastorianus
aagttagagcaactccagcgtgaga

SEQ ID NO: 18412 - DNA, 25 bp, Saccharomyces pastorianus
gatgttgagcctagatatttcgaga

SEQ ID NO: 18413 - DNA, 25 bp, Saccharomyces pastorianus
actgagaccagatattagggcatac

SEQ ID NO: 18414 - DNA, 25 bp, Saccharomyces pastorianus
tggacgcagccaactacaattctaa

SEQ ID NO: 18415 - DNA, 25 bp, Saccharomyces pastorianus
gaggtatatggagccggttaacgaa

SEQ ID NO: 18416 - DNA, 25 bp, Saccharomyces pastorianus
tgccacctactgattcgagactgag

SEQ ID NO: 18417 - DNA, 25 bp, Saccharomyces pastorianus
tttccgtaatcccaccagtttcaag

SEQ ID NO: 18418 - DNA, 25 bp, Saccharomyces pastorianus
aactctggccggtaaatggacacaa

SEQ ID NO: 18419 - DNA, 25 bp, Saccharomyces pastorianus
ggtaatttgccacctactgattcga

SEQ ID NO: 18420 - DNA, 25 bp, Saccharomyces pastorianus
gcttgatcaatgaaaccactcatga

SEQ ID NO: 18421 - DNA, 25 bp, Saccharomyces pastorianus
tcccaccagtttcaagtcaccgtaa

SEQ ID NO: 18422 - DNA, 25 bp, Saccharomyces pastorianus
aacagatttgatttgcgtcccttct

SEQ ID NO: 18423 - DNA, 25 bp, Saccharomyces pastorianus
aaatatgattgttcttcggctgata

SEQ ID NO: 18424 - DNA, 25 bp, Saccharomyces pastorianus
ggacgactttttaaatgctacgcca

SEQ ID NO: 18425 - DNA, 25 bp, Saccharomyces pastorianus
gctggtgctaggtagtgccaatgtt

SEQ ID NO: 18426 - DNA, 25 bp, Saccharomyces pastorianus
gtgggttcgtggcattccaaattcc

SEQ ID NO: 18427 - DNA, 25 bp, Saccharomyces pastorianus
atgacatgccaatcttggacgactt

SEQ ID NO: 18428 - DNA, 25 bp, Saccharomyces pastorianus
tggtcaccaaaattatcgcctcgtc

SEQ ID NO: 18429 - DNA, 25 bp, Saccharomyces pastorianus
aaattccggcggtttgctggtgcta

SEQ ID NO: 18430 - DNA, 25 bp, Saccharomyces pastorianus
tcggctgatattaaccccatcggag

SEQ ID NO: 18431 - DNA, 25 bp, Saccharomyces pastorianus
aagtttcattgcatacgcttctaaa

SEQ ID NO: 18432 - DNA, 25 bp, Saccharomyces pastorianus
atgctacgccaaccgcagaactaga

SEQ ID NO: 18433 - DNA, 25 bp, Saccharomyces pastorianus
aaggccgactgctatgagagttcta

SEQ ID NO: 18434 - DNA, 25 bp, Saccharomyces pastorianus
ctgatggatttgttgagagctctta

SEQ ID NO: 18435 - DNA, 25 bp, Saccharomyces pastorianus
cgaagctacagatttgatttctcaa

SEQ ID NO: 18436 - DNA, 25 bp, Saccharomyces pastorianus
aggtaagcatccttttggtgataaa

SEQ ID NO: 18437 - DNA, 25 bp, Saccharomyces pastorianus
agtgtcttcgcgatagatctctggc

SEQ ID NO: 18438 - DNA, 25 bp, Saccharomyces pastorianus
gatatttcaggctttgttattccta

SEQ ID NO: 18439 - DNA, 25 bp, Saccharomyces pastorianus
catcatttcatggatctgcccgaag

SEQ ID NO: 18440 - DNA, 25 bp, Saccharomyces pastorianus
caaggaccccgcaagtgacttgtta

SEQ ID NO: 18441 - DNA, 25 bp, Saccharomyces pastorianus
ttcctaatgggaactggaccgtcaa

SEQ ID NO: 18442 - DNA, 25 bp, Saccharomyces pastorianus
agatctctggctgccgaagctacag

SEQ ID NO: 18443 - DNA, 25 bp, Saccharomyces pastorianus
aaaaccttcatggacaatctcggga

SEQ ID NO: 18444 - DNA, 25 bp, Saccharomyces pastorianus
ctgggcccacagtttactcttaaat

SEQ ID NO: 18445 - DNA, 25 bp, Saccharomyces pastorianus
gagggcccaactttctacttcaaat

SEQ ID NO: 18446 - DNA, 25 bp, Saccharomyces pastorianus
ggcaggttgttccagtctattttac

SEQ ID NO: 18447 - DNA, 25 bp, Saccharomyces pastorianus
gaccaactagtcatattccagagct

SEQ ID NO: 18448 - DNA, 25 bp, Saccharomyces pastorianus
aaggcatcgttacgtcttcaaagac

SEQ ID NO: 18449 - DNA, 25 bp, Saccharomyces pastorianus
gaatttgctaacatcctgattgagg

SEQ ID NO: 18450 - DNA, 25 bp, Saccharomyces pastorianus
gtctattttacctcaggaccctgat

SEQ ID NO: 18451 - DNA, 25 bp, Saccharomyces pastorianus
aagagaaatttcaccgacattgtta

SEQ ID NO: 18452 - DNA, 25 bp, Saccharomyces pastorianus
ggtaacgggtttgacattcatacat

SEQ ID NO: 18453 - DNA, 25 bp, Saccharomyces pastorianus
aacgaaccaccaaagatcttcctga

SEQ ID NO: 18454 - DNA, 25 bp, Saccharomyces pastorianus
gaggtgttgccaaatgtcacttttg

SEQ ID NO: 18455 - DNA, 25 bp, Saccharomyces pastorianus
gctgcgtctagctcaggatctatac

SEQ ID NO: 18456 - DNA, 25 bp, Saccharomyces pastorianus
aaatggttgcttgcgatggtcctaa

SEQ ID NO: 18457 - DNA, 25 bp, Saccharomyces pastorianus
aagacggtgtgctagctcctgtaga

SEQ ID NO: 18458 - DNA, 25 bp, Saccharomyces pastorianus
tggcaagggtcaaaacggctcattt

SEQ ID NO: 18459 - DNA, 25 bp, Saccharomyces pastorianus
aaaccaatcgtgcatctaagctcca

SEQ ID NO: 18460 - DNA, 25 bp, Saccharomyces pastorianus
tacgtggtactgtcctgactgcaaa

SEQ ID NO: 18461 - DNA, 25 bp, Saccharomyces pastorianus
aaaccttatactgcttttgccaaag

SEQ ID NO: 18462 - DNA, 25 bp, Saccharomyces pastorianus
gaataccgcgctctttttaattgct

SEQ ID NO: 18463 - DNA, 25 bp, Saccharomyces pastorianus
aaaaatctgtcaccccaatgagtcc

SEQ ID NO: 18464 - DNA, 25 bp, Saccharomyces pastorianus
atctataccgcccactttgaaaaag

SEQ ID NO: 18465 - DNA, 25 bp, Saccharomyces pastorianus
aaagtgctgctgaagcctccagaga

SEQ ID NO: 18466 - DNA, 25 bp, Saccharomyces pastorianus
atcacgtcaacttcggtatggttca

SEQ ID NO: 18467 - DNA, 25 bp, Saccharomyces pastorianus
ataccacgacttgccatatattcag

SEQ ID NO: 18468 - DNA, 25 bp, Saccharomyces pastorianus
ggtatatctgccataatcattcaag

SEQ ID NO: 18469 - DNA, 25 bp, Saccharomyces pastorianus
gaagatccacatcaggttgccgatt

SEQ ID NO: 18470 - DNA, 25 bp, Saccharomyces pastorianus
ttttgaaggtgacacaggcccctac

SEQ ID NO: 18471 - DNA, 25 bp, Saccharomyces pastorianus
gtcaccaggtctcttcatgttataa

SEQ ID NO: 18472 - DNA, 25 bp, Saccharomyces pastorianus
ggagctccagtaatattacagccga

SEQ ID NO: 18473 - DNA, 25 bp, Saccharomyces pastorianus
gagcccgctacaattataacgtatt

SEQ ID NO: 18474 - DNA, 25 bp, Saccharomyces pastorianus
tatccggacgtcctcaaacgagcgt

SEQ ID NO: 18475 - DNA, 25 bp, Saccharomyces pastorianus
gacgatgttgctataccacgacttg

SEQ ID NO: 18476 - DNA, 25 bp, Saccharomyces pastorianus
gattaagcttgtcagactcctggct

SEQ ID NO: 18477 - DNA, 25 bp, Saccharomyces pastorianus
ttaagacccaacgtcgaccaatact

SEQ ID NO: 18478 - DNA, 25 bp, Saccharomyces pastorianus
ttgtttagtgggtcgttgcctgaaa

SEQ ID NO: 18479 - DNA, 25 bp, Saccharomyces pastorianus
aagacgacttcatcaaagtgtcccc

SEQ ID NO: 18480 - DNA, 25 bp, Saccharomyces pastorianus
ggaggaatcgttgcctatcaaccaa

SEQ ID NO: 18481 - DNA, 25 bp, Saccharomyces pastorianus
ctttatccgcaaatcataccattcc

SEQ ID NO: 18482 - DNA, 25 bp, Saccharomyces pastorianus
gagaagttcacattccaatttcgtt

SEQ ID NO: 18483 - DNA, 25 bp, Saccharomyces pastorianus
gagccagctgctctgtgaagataag

SEQ ID NO: 18484 - DNA, 25 bp, Saccharomyces pastorianus
acaagtcgactctaccagtggtttt

SEQ ID NO: 18485 - DNA, 25 bp, Saccharomyces pastorianus
gatctaaccttttatgatgccaacg

SEQ ID NO: 18486 - DNA, 25 bp, Saccharomyces pastorianus
aagaccgtcaataggatcgaatcgt

SEQ ID NO: 18487 - DNA, 25 bp, Saccharomyces pastorianus
ggtgacatcatttacctgtggttca

SEQ ID NO: 18488 - DNA, 25 bp, Saccharomyces pastorianus
atacggcgggttccagttctgatga

SEQ ID NO: 18489 - DNA, 25 bp, Saccharomyces pastorianus
atatggccggattactctcaacact

SEQ ID NO: 18490 - DNA, 25 bp, Saccharomyces pastorianus
gaactcccaataccaattcacgatt

SEQ ID NO: 18491 - DNA, 25 bp, Saccharomyces pastorianus
ggtgtacccgtattaagacattcta

SEQ ID NO: 18492 - DNA, 25 bp, Saccharomyces pastorianus
gataggcttttcacggacattctga

SEQ ID NO: 18493 - DNA, 25 bp, Saccharomyces pastorianus
tagtcgtccccactttcaatgaact

SEQ ID NO: 18494 - DNA, 25 bp, Saccharomyces pastorianus
cgctgtgtaagcctagtctagtcgt

SEQ ID NO: 18495 - DNA, 25 bp, Saccharomyces pastorianus
tggcacactaaatacgcttcggctg

SEQ ID NO: 18496 - DNA, 25 bp, Saccharomyces pastorianus
tggaagacaagaccggtgtacccgt

SEQ ID NO: 18497 - DNA, 25 bp, Saccharomyces pastorianus
tgctttacaacccatcgctgtgtaa

SEQ ID NO: 18498 - DNA, 25 bp, Saccharomyces pastorianus
tggacaaagacaactgcatctcctt

SEQ ID NO: 18499 - DNA, 25 bp, Saccharomyces pastorianus
ttaacacgggtgttgctggaaccaa

SEQ ID NO: 18500 - DNA, 25 bp, Saccharomyces pastorianus
cagagtattcaaccgggaacccaat

SEQ ID NO: 18501 - DNA, 25 bp, Saccharomyces pastorianus
gaattctactactgctgttgcgaac

SEQ ID NO: 18502 - DNA, 25 bp, Saccharomyces pastorianus
ggcaatccctgtggcaccaataaca

SEQ ID NO: 18503 - DNA, 25 bp, Saccharomyces pastorianus
cggcgctaacaacaacatttctctt

SEQ ID NO: 18504 - DNA, 25 bp, Saccharomyces pastorianus
gatgtatcctccaccacagagttta

SEQ ID NO: 18505 - DNA, 25 bp, Saccharomyces pastorianus
acatttctcttgctattaacacggg

SEQ ID NO: 18506 - DNA, 25 bp, Saccharomyces pastorianus
aatatccttaactcaactgttcccg

SEQ ID NO: 18507 - DNA, 25 bp, Saccharomyces pastorianus
gattcaacacaagtagcgcgtccaa

SEQ ID NO: 18508 - DNA, 25 bp, Saccharomyces pastorianus
acaactgctccaatttctcaacaga

SEQ ID NO: 18509 - DNA, 25 bp, Saccharomyces pastorianus
gagggactcccttgtatcgaacatg

SEQ ID NO: 18510 - DNA, 25 bp, Saccharomyces pastorianus
gtggatcatttcagggcttaggact

SEQ ID NO: 18511 - DNA, 25 bp, Saccharomyces pastorianus
gtatcaacttcaacacgtggtggaa

SEQ ID NO: 18512 - DNA, 25 bp, Saccharomyces pastorianus
tggccgccggatacttactgcaaaa

SEQ ID NO: 18513 - DNA, 25 bp, Saccharomyces pastorianus
tgacgaactcttattccatcacttc

SEQ ID NO: 18514 - DNA, 25 bp, Saccharomyces pastorianus
catcacttcctcgtgagtggatcat

SEQ ID NO: 18515 - DNA, 25 bp, Saccharomyces pastorianus
aagatcttggtttcatttgcattga

SEQ ID NO: 18516 - DNA, 25 bp, Saccharomyces pastorianus
catccccgtattcatcgacgatgaa

SEQ ID NO: 18517 - DNA, 25 bp, Saccharomyces pastorianus
gtggtggaacatcttggaacgcatt

SEQ ID NO: 18518 - DNA, 25 bp, Saccharomyces pastorianus
tgaccaaaggttttgcatccccgta

SEQ ID NO: 18519 - DNA, 25 bp, Saccharomyces pastorianus
aaagcctttgtcacgtaggtgacca

SEQ ID NO: 18520 - DNA, 25 bp, Saccharomyces pastorianus
atccatctcgtcacagggtatagtt

SEQ ID NO: 18521 - DNA, 25 bp, Saccharomyces pastorianus
ataaccgaggctcatgtccctatta

SEQ ID NO: 18522 - DNA, 25 bp, Saccharomyces pastorianus
gaacacttggtggacttctgtaaga

SEQ ID NO: 18523 - DNA, 25 bp, Saccharomyces pastorianus
aagcctgtggctttgcaaatcgagc

SEQ ID NO: 18524 - DNA, 25 bp, Saccharomyces pastorianus
gaaactcactctaaccgagcaggaa

SEQ ID NO: 18525 - DNA, 25 bp, Saccharomyces pastorianus
aaatcgagcatcatccctacttgac

SEQ ID NO: 18526 - DNA, 25 bp, Saccharomyces pastorianus
gaaatggaccttggcttggcaaaga

SEQ ID NO: 18527 - DNA, 25 bp, Saccharomyces pastorianus
ggtatcgccgttattccaaagtcct

SEQ ID NO: 18528 - DNA, 25 bp, Saccharomyces pastorianus
aagagcacaccaacgctgtttgaaa

SEQ ID NO: 18529 - DNA, 25 bp, Saccharomyces pastorianus
ctttggccctcaatcgttcattgaa

SEQ ID NO: 18530 - DNA, 25 bp, Saccharomyces pastorianus
caagtgctcctgagatgggctactc

SEQ ID NO: 18531 - DNA, 25 bp, Saccharomyces pastorianus
ttcgaagagaagtacccaccagggt

SEQ ID NO: 18532 - DNA, 25 bp, Saccharomyces pastorianus
caatctggtaatttcatggctgcaa

SEQ ID NO: 18533 - DNA, 25 bp, Saccharomyces pastorianus
ttacaaacttaacctcgtcgccaat

SEQ ID NO: 18534 - DNA, 25 bp, Saccharomyces pastorianus
acatcaagtacggttgcctctctac

SEQ ID NO: 18535 - DNA, 25 bp, Saccharomyces pastorianus
tttgggactttcaagccctcaacca

SEQ ID NO: 18536 - DNA, 25 bp, Saccharomyces pastorianus
ctcgtcgccaatctcaaatttagtc

SEQ ID NO: 18537 - DNA, 25 bp, Saccharomyces pastorianus
taacgacttggatcttttgggactt

SEQ ID NO: 18538 - DNA, 25 bp, Saccharomyces pastorianus
ggtgatctgactgacttatccattt

SEQ ID NO: 18539 - DNA, 25 bp, Saccharomyces pastorianus
aaacagcttttggtcttggaggtga

SEQ ID NO: 18540 - DNA, 25 bp, Saccharomyces pastorianus
aatgctccaattaacccttcgaaat

SEQ ID NO: 18541 - DNA, 25 bp, Saccharomyces pastorianus
cagttaccactaccacaaattcgaa

SEQ ID NO: 18542 - DNA, 25 bp, Saccharomyces pastorianus
atattctgttaattccactccagcc

SEQ ID NO: 18543 - DNA, 25 bp, Saccharomyces pastorianus
atttatctgatctttgcgcttgtcc

SEQ ID NO: 18544 - DNA, 25 bp, Saccharomyces pastorianus
agccagcttggccataaccgtggat

SEQ ID NO: 18545 - DNA, 25 bp, Saccharomyces pastorianus
gggagagtgttccagttgacccaaa

SEQ ID NO: 18546 - DNA, 25 bp, Saccharomyces pastorianus
taatgacgtggtccgtacttcagtt

SEQ ID NO: 18547 - DNA, 25 bp, Saccharomyces pastorianus
gacccaaaggctatcttcgattcgc

SEQ ID NO: 18548 - DNA, 25 bp, Saccharomyces pastorianus
cttcagttcttcatgctagtggcag

SEQ ID NO: 18549 - DNA, 25 bp, Saccharomyces pastorianus
gaaggtgttcatttttacgccagac

SEQ ID NO: 18550 - DNA, 25 bp, Saccharomyces pastorianus
ggaacataggatgtgcttcaccccg

SEQ ID NO: 18551 - DNA, 25 bp, Saccharomyces pastorianus
ttcaccccgtcgtacaacaagaagt

SEQ ID NO: 18552 - DNA, 25 bp, Saccharomyces pastorianus
aatcggcaacgtcgaagcgcttgat

SEQ ID NO: 18553 - DNA, 25 bp, Saccharomyces pastorianus
ttcgataacgatcaccgtgtcctga

SEQ ID NO: 18554 - DNA, 25 bp, Saccharomyces pastorianus
ggcccatgcattggattggtcggca

SEQ ID NO: 18555 - DNA, 25 bp, Saccharomyces pastorianus
tgaggcaatcaatcttccagtcaaa

SEQ ID NO: 18556 - DNA, 25 bp, Saccharomyces pastorianus
gagactctaaaactcatcctaggtg

SEQ ID NO: 18557 - DNA, 25 bp, Saccharomyces pastorianus
acaaatttgggctctcgaacgtaag

SEQ ID NO: 18558 - DNA, 25 bp, Saccharomyces pastorianus
ggcttcccacaacaaagtctgcgta

SEQ ID NO: 18559 - DNA, 25 bp, Saccharomyces pastorianus
gatgctatattcaggcttcccacaa

SEQ ID NO: 18560 - DNA, 25 bp, Saccharomyces pastorianus
acgatgatggccgtcgagactctaa

SEQ ID NO: 18561 - DNA, 25 bp, Saccharomyces pastorianus
atgaacttttttgtggctcgcggaa

SEQ ID NO: 18562 - DNA, 25 bp, Saccharomyces pastorianus
aactataacgtttgtcagcctgatg

SEQ ID NO: 18563 - DNA, 25 bp, Saccharomyces pastorianus
ctgccgttatgggaatgactctcaa

SEQ ID NO: 18564 - DNA, 25 bp, Saccharomyces pastorianus
cgatatagtggttctctgccgttat

SEQ ID NO: 18565 - DNA, 25 bp, Saccharomyces pastorianus
gacagacccatacatcgatcagact

SEQ ID NO: 18566 - DNA, 25 bp, Saccharomyces pastorianus
atatcgtcttgtattccgctaccaa

SEQ ID NO: 18567 - DNA, 25 bp, Saccharomyces pastorianus
gaaagtttcatgttattgcggtcac

SEQ ID NO: 18568 - DNA, 25 bp, Saccharomyces pastorianus
agtggtgtcctcgtagtcaaagatg

SEQ ID NO: 18569 - DNA, 25 bp, Saccharomyces pastorianus
tgcggtcactcagaacttacgaact

SEQ ID NO: 18570 - DNA, 25 bp, Saccharomyces pastorianus
taggatgcgagtccgccgatgattt

SEQ ID NO: 18571 - DNA, 25 bp, Saccharomyces pastorianus
tcggcggtcactctgacttattgag

SEQ ID NO: 18572 - DNA, 25 bp, Saccharomyces pastorianus
agtactagattccacgtttgcgtct

SEQ ID NO: 18573 - DNA, 25 bp, Saccharomyces pastorianus
gcgtctccaccattgcaatatgcat

SEQ ID NO: 18574 - DNA, 25 bp, Saccharomyces pastorianus
taaaatactttcaccatgcgacctc

SEQ ID NO: 18575 - DNA, 25 bp, Saccharomyces pastorianus
aagatgaagctgtttctcggcgcct

SEQ ID NO: 18576 - DNA, 25 bp, Saccharomyces pastorianus
tagagaaaccgctggttctgccgat

SEQ ID NO: 18577 - DNA, 25 bp, Saccharomyces pastorianus
gcagtggtcccgtcatcaagataaa

SEQ ID NO: 18578 - DNA, 25 bp, Saccharomyces pastorianus
aaatcgttcttcctatcttctgacg

SEQ ID NO: 18579 - DNA, 25 bp, Saccharomyces pastorianus
ggtcctatcttagcgtccaagacag

SEQ ID NO: 18580 - DNA, 25 bp, Saccharomyces pastorianus
gttgcaaacgactctccatgtggtt

SEQ ID NO: 18581 - DNA, 25 bp, Saccharomyces pastorianus
agattccaacttcttgcctaacatc

SEQ ID NO: 18582 - DNA, 25 bp, Saccharomyces pastorianus
atgtggttccacaatcggtcctatc

SEQ ID NO: 18583 - DNA, 25 bp, Saccharomyces pastorianus
atggtttgacgttggcagccgacac

SEQ ID NO: 18584 - DNA, 25 bp, Saccharomyces pastorianus
aggagataggttcgtcttctgctca

SEQ ID NO: 18585 - DNA, 25 bp, Saccharomyces pastorianus
taaagttcctctgcagctgtttgtc

SEQ ID NO: 18586 - DNA, 25 bp, Saccharomyces pastorianus
accattgcctaactcatcgattttg

SEQ ID NO: 18587 - DNA, 25 bp, Saccharomyces pastorianus
gatggcgacatcatacagcttggca

SEQ ID NO: 18588 - DNA, 25 bp, Saccharomyces pastorianus
taatatcacggacccatggctgttt

SEQ ID NO: 18589 - DNA, 25 bp, Saccharomyces pastorianus
acaagtcctggaagctgaaggccaa

SEQ ID NO: 18590 - DNA, 25 bp, Saccharomyces pastorianus
ggacgtcaagtcctccagtggaacg

SEQ ID NO: 18591 - DNA, 25 bp, Saccharomyces pastorianus
tggaacgtttctgaaccaccaacgc

SEQ ID NO: 18592 - DNA, 25 bp, Saccharomyces pastorianus
aagccactctagaatccgaatctga

SEQ ID NO: 18593 - DNA, 25 bp, Saccharomyces pastorianus
gatgatcagggcaactggttcttaa

SEQ ID NO: 18594 - DNA, 25 bp, Saccharomyces pastorianus
ccccaactgtagatcgaactgtgac

SEQ ID NO: 18595 - DNA, 25 bp, Saccharomyces pastorianus
tcgcggcggcacagaagagatatac

SEQ ID NO: 18596 - DNA, 25 bp, Saccharomyces pastorianus
gaactgtgacttagaagccactcta

SEQ ID NO: 18597 - DNA, 25 bp, Saccharomyces pastorianus
gatcagtatcatccagtggtcttca

SEQ ID NO: 18598 - DNA, 25 bp, Saccharomyces pastorianus
tggtaaggccactatcctagccaga

SEQ ID NO: 18599 - DNA, 25 bp, Saccharomyces pastorianus
gaagtacccactttttacgctgaga

SEQ ID NO: 18600 - DNA, 25 bp, Saccharomyces pastorianus
ggccaagattggtctagcccaacta

SEQ ID NO: 18601 - DNA, 25 bp, Saccharomyces pastorianus
tacccctacatccaattggcttgtt

SEQ ID NO: 18602 - DNA, 25 bp, Saccharomyces pastorianus
tcaggagtcggcaactttggcaaga

SEQ ID NO: 18603 - DNA, 25 bp, Saccharomyces pastorianus
aaggcgacttcaatactgcgatcaa

SEQ ID NO: 18604 - DNA, 25 bp, Saccharomyces pastorianus
aactacatttgctgaagccgcgaag

SEQ ID NO: 18605 - DNA, 25 bp, Saccharomyces pastorianus
tgaaattccccattttacctgaagt

SEQ ID NO: 18606 - DNA, 25 bp, Saccharomyces pastorianus
aagttttccgaagctgagtctcttt

SEQ ID NO: 18607 - DNA, 25 bp, Saccharomyces pastorianus
atatggccatcgatctattgactaa

SEQ ID NO: 18608 - DNA, 25 bp, Saccharomyces pastorianus
tacacgtaggtattgggcccttgat

SEQ ID NO: 18609 - DNA, 25 bp, Saccharomyces pastorianus
aaggctgcaattggtactgaatctg

SEQ ID NO: 18610 - DNA, 25 bp, Saccharomyces pastorianus
tcagttccccaagaagtctcatctt

SEQ ID NO: 18611 - DNA, 25 bp, Saccharomyces pastorianus
gggctaacgaagaactgacctatga

SEQ ID NO: 18612 - DNA, 25 bp, Saccharomyces pastorianus
gaaagaatcagacaacccgtagcag

SEQ ID NO: 18613 - DNA, 25 bp, Saccharomyces pastorianus
cgaggaaagattgccctgtttgtgt

SEQ ID NO: 18614 - DNA, 25 bp, Saccharomyces pastorianus
actgaatctgaactgctgtcactga

SEQ ID NO: 18615 - DNA, 25 bp, Saccharomyces pastorianus
aaccagtcatgtttgcacgttctgc

SEQ ID NO: 18616 - DNA, 25 bp, Saccharomyces pastorianus
gggctatatgctctggattccattg

SEQ ID NO: 18617 - DNA, 25 bp, Saccharomyces pastorianus
ggtattgccagatttatcaaccatt

SEQ ID NO: 18618 - DNA, 25 bp, Saccharomyces pastorianus
aattgttatttatgcattgcgcgat

SEQ ID NO: 18619 - DNA, 25 bp, Saccharomyces pastorianus
caaaagagccttcggactcagttcc

SEQ ID NO: 18620 - DNA, 25 bp, Saccharomyces pastorianus
ggttccgcggatgatctatacaatg

SEQ ID NO: 18621 - DNA, 25 bp, Saccharomyces pastorianus
acgatcactggccattcttgatgag

SEQ ID NO: 18622 - DNA, 25 bp, Saccharomyces pastorianus
gcgatcatagtaattttggcacaaa

SEQ ID NO: 18623 - DNA, 25 bp, Saccharomyces pastorianus
aaccaatgtagaactctctttgcta

SEQ ID NO: 18624 - DNA, 25 bp, Saccharomyces pastorianus
ttttcagcagagttggttccgcgga

SEQ ID NO: 18625 - DNA, 25 bp, Saccharomyces pastorianus
aaagccaggcatttgcatgaaatca

SEQ ID NO: 18626 - DNA, 25 bp, Saccharomyces pastorianus
attactggaccgaacatgggtggta

SEQ ID NO: 18627 - DNA, 25 bp, Saccharomyces pastorianus
gacatcatttattcttcaaggcgct

SEQ ID NO: 18628 - DNA, 25 bp, Saccharomyces pastorianus
agaaactttcacagccaatgattgt

SEQ ID NO: 18629 - DNA, 25 bp, Saccharomyces pastorianus
gattggacgtggaaccagtggcaaa

SEQ ID NO: 18630 - DNA, 25 bp, Saccharomyces pastorianus
tcaaggcgctaccacacgatcactg

SEQ ID NO: 18631 - DNA, 25 bp, Saccharomyces pastorianus
caccaagtgggtcggcaaggatatc

SEQ ID NO: 18632 - DNA, 25 bp, Saccharomyces pastorianus
gacatcaaagttttacacgaaggca

SEQ ID NO: 18633 - DNA, 25 bp, Saccharomyces pastorianus
gaaccaatctcctcaaagtttcaaa

SEQ ID NO: 18634 - DNA, 25 bp, Saccharomyces pastorianus
gttttcaagactataggtgacacca

SEQ ID NO: 18635 - DNA, 25 bp, Saccharomyces pastorianus
gatcaagtgtacattcgttaagcat

SEQ ID NO: 18636 - DNA, 25 bp, Saccharomyces pastorianus
acacgaaggcagtaaccaatccatt

SEQ ID NO: 18637 - DNA, 25 bp, Saccharomyces pastorianus
tcatcgaacaataccctcactatac

SEQ ID NO: 18638 - DNA, 25 bp, Saccharomyces pastorianus
taaggtgcaaccaccatatacggtt

SEQ ID NO: 18639 - DNA, 25 bp, Saccharomyces pastorianus
ggtgacaaaccttcctttaattcat

SEQ ID NO: 18640 - DNA, 25 bp, Saccharomyces pastorianus
aaaccctcatacgtgagtgtggaaa

SEQ ID NO: 18641 - DNA, 25 bp, Saccharomyces pastorianus
gcaacaaattaaaccctcatacgtg

SEQ ID NO: 18642 - DNA, 25 bp, Saccharomyces pastorianus
attggacaaactactctcgattcga

SEQ ID NO: 18643 - DNA, 25 bp, Saccharomyces pastorianus
ctgctctctagctactttgattggt

SEQ ID NO: 18644 - DNA, 25 bp, Saccharomyces pastorianus
taaagagcgtgtagcagctgcttgt

SEQ ID NO: 18645 - DNA, 25 bp, Saccharomyces pastorianus
gccttgggcagctttctattgtaaa

SEQ ID NO: 18646 - DNA, 25 bp, Saccharomyces pastorianus
gaggctcttgctgaagatagaccat

SEQ ID NO: 18647 - DNA, 25 bp, Saccharomyces pastorianus
tccacccgaattgacttccgatgaa

SEQ ID NO: 18648 - DNA, 25 bp, Saccharomyces pastorianus
gattgcgcatatttctgatcctgaa

SEQ ID NO: 18649 - DNA, 25 bp, Saccharomyces pastorianus
agccaaggaccttttgctaggcggt

SEQ ID NO: 18650 - DNA, 25 bp, Saccharomyces pastorianus
gatctcttcctcctagattcagaat

SEQ ID NO: 18651 - DNA, 25 bp, Saccharomyces pastorianus
gaataacgccaaccattacacactg

SEQ ID NO: 18652 - DNA, 25 bp, Saccharomyces pastorianus
accattctcccaaatctcaagtgtt

SEQ ID NO: 18653 - DNA, 25 bp, Saccharomyces pastorianus
ctctaccatctcgtacatttactag

SEQ ID NO: 18654 - DNA, 25 bp, Saccharomyces pastorianus
tctcttccaaatatctccttttcga

SEQ ID NO: 18655 - DNA, 25 bp, Saccharomyces pastorianus
ttttcgatattacctaactcagcag

SEQ ID NO: 18656 - DNA, 25 bp, Saccharomyces pastorianus
aaactgcacttcttccagcaatgga

SEQ ID NO: 18657 - DNA, 25 bp, Saccharomyces pastorianus
gagttggttcgctagcattcaaaaa

SEQ ID NO: 18658 - DNA, 25 bp, Saccharomyces pastorianus
aactagctctgggaacgaactctct

SEQ ID NO: 18659 - DNA, 25 bp, Saccharomyces pastorianus
acgtggatcgactatgttctaaagg

SEQ ID NO: 18660 - DNA, 25 bp, Saccharomyces pastorianus
taaaatatccgagctcctcttcaag

SEQ ID NO: 18661 - DNA, 25 bp, Saccharomyces pastorianus
aaaaccagcatacacctttgaacat

SEQ ID NO: 18662 - DNA, 25 bp, Saccharomyces pastorianus
tggcatattcgagcagtatttctgt

SEQ ID NO: 18663 - DNA, 25 bp, Saccharomyces pastorianus
agtagcgagtggtactctaccatct

SEQ ID NO: 18664 - DNA, 25 bp, Saccharomyces pastorianus
aatcaatgttaacaccagccctggc

SEQ ID NO: 18665 - DNA, 25 bp, Saccharomyces pastorianus
gatgctgttcaatctgacattgggt

SEQ ID NO: 18666 - DNA, 25 bp, Saccharomyces pastorianus
ttctggatccgctactgcaaaagtc

SEQ ID NO: 18667 - DNA, 25 bp, Saccharomyces pastorianus
tagcatatcctacgacacaatctct

SEQ ID NO: 18668 - DNA, 25 bp, Saccharomyces pastorianus
aattgtttcatggagctctagtgga

SEQ ID NO: 18669 - DNA, 25 bp, Saccharomyces pastorianus
aagtgagggatttgccttctggatc

SEQ ID NO: 18670 - DNA, 25 bp, Saccharomyces pastorianus
aacatgaacatctcattgggctcca

SEQ ID NO: 18671 - DNA, 25 bp, Saccharomyces pastorianus
gaagatcccagaaggccagcagtac

SEQ ID NO: 18672 - DNA, 25 bp, Saccharomyces pastorianus
ttgggctccaatactctcaatggca

SEQ ID NO: 18673 - DNA, 25 bp, Saccharomyces pastorianus
cagctcgttatctcaaccaattcag

SEQ ID NO: 18674 - DNA, 25 bp, Saccharomyces pastorianus
gaacgcgggccttctagcaaaagaa

SEQ ID NO: 18675 - DNA, 25 bp, Saccharomyces pastorianus
gctggcgtttctttattttctagta

SEQ ID NO: 18676 - DNA, 25 bp, Saccharomyces pastorianus
tcctcaaatcgtcggctcggaatat

SEQ ID NO: 18677 - DNA, 25 bp, Saccharomyces pastorianus
gaggtcaactttgctttcatcgata

SEQ ID NO: 18678 - DNA, 25 bp, Saccharomyces pastorianus
gtattcaagctacctgacgggaaat

SEQ ID NO: 18679 - DNA, 25 bp, Saccharomyces pastorianus
acggtttcgcattacctgcatctat

SEQ ID NO: 18680 - DNA, 25 bp, Saccharomyces pastorianus
gaatctcaggattcgacatctgtat

SEQ ID NO: 18681 - DNA, 25 bp, Saccharomyces pastorianus
caattgcgaaaatcagctggcgttt

SEQ ID NO: 18682 - DNA, 25 bp, Saccharomyces pastorianus
aacgtgagattgttcgtacgatcaa

SEQ ID NO: 18683 - DNA, 25 bp, Saccharomyces pastorianus
tggtggaaccacaactcttcgaggg

SEQ ID NO: 18684 - DNA, 25 bp, Saccharomyces pastorianus
cagggttatccacctttcaaaggct

SEQ ID NO: 18685 - DNA, 25 bp, Saccharomyces pastorianus
aatattgttctctcctcaaatcgtc

SEQ ID NO: 18686 - DNA, 25 bp, Saccharomyces pastorianus
ggatttatcgaagttgacaccacag

SEQ ID NO: 18687 - DNA, 25 bp, Saccharomyces pastorianus
aagaaagatctgttacggcacaaga

SEQ ID NO: 18688 - DNA, 25 bp, Saccharomyces pastorianus
gacagcggtgattatgcgttgaaga

SEQ ID NO: 18689 - DNA, 25 bp, Saccharomyces pastorianus
taataatcttccagtcaccaatccc

SEQ ID NO: 18690 - DNA, 25 bp, Saccharomyces pastorianus
ggcacaagatgcaagaccgtcagta

SEQ ID NO: 18691 - DNA, 25 bp, Saccharomyces pastorianus
aagaccgtcagtattttgacagcgg

SEQ ID NO: 18692 - DNA, 25 bp, Saccharomyces pastorianus
ttcacccaccagcagcagagtggat

SEQ ID NO: 18693 - DNA, 25 bp, Saccharomyces pastorianus
agtcaccaatcccagtggcctgagg

SEQ ID NO: 18694 - DNA, 25 bp, Saccharomyces pastorianus
ggtggcgactccatttcgagacaag

SEQ ID NO: 18695 - DNA, 25 bp, Saccharomyces pastorianus
agtggcctgagggagtctattatta

SEQ ID NO: 18696 - DNA, 25 bp, Saccharomyces pastorianus
gtagtagtagcggtggcgactccat

SEQ ID NO: 18697 - DNA, 25 bp, Saccharomyces pastorianus
atgaaattgaatgacggccgtgggt

SEQ ID NO: 18698 - DNA, 25 bp, Saccharomyces pastorianus
tgaaacagcggacggccagtacgat

SEQ ID NO: 18699 - DNA, 25 bp, Saccharomyces pastorianus
gacggccagtacgattggatgaaat

SEQ ID NO: 18700 - DNA, 25 bp, Saccharomyces pastorianus
gatgctgatttacgcaattctcaat

SEQ ID NO: 18701 - DNA, 25 bp, Saccharomyces pastorianus
aagcagcttcaacttcaacagcagc

SEQ ID NO: 18702 - DNA, 25 bp, Saccharomyces pastorianus
tcatcctaatccaccaaacgacaaa

SEQ ID NO: 18703 - DNA, 25 bp, Saccharomyces pastorianus
gaaaccgaacctacatggttatggt

SEQ ID NO: 18704 - DNA, 25 bp, Saccharomyces pastorianus
tagaacccctcatcaacaactgaat

SEQ ID NO: 18705 - DNA, 25 bp, Saccharomyces pastorianus
tagaccccacctcttatgaagcata

SEQ ID NO: 18706 - DNA, 25 bp, Saccharomyces pastorianus
aatcccaacaattcggtgccactcg

SEQ ID NO: 18707 - DNA, 25 bp, Saccharomyces pastorianus
tagttcaagcttagcagcttcccgc

SEQ ID NO: 18708 - DNA, 25 bp, Saccharomyces pastorianus
tcatcttctggtccattggttccaa

SEQ ID NO: 18709 - DNA, 25 bp, Saccharomyces pastorianus
atctaactcatctactgcagctggg

SEQ ID NO: 18710 - DNA, 25 bp, Saccharomyces pastorianus
aggctccaatattcagggtctagtc

SEQ ID NO: 18711 - DNA, 25 bp, Saccharomyces pastorianus
gatgcgtcttccagtcatgatggtt

SEQ ID NO: 18712 - DNA, 25 bp, Saccharomyces pastorianus
gtactacaacatcatgggcgtcggt

SEQ ID NO: 18713 - DNA, 25 bp, Saccharomyces pastorianus
gacgcatgtcaaccaaccttgattg

SEQ ID NO: 18714 - DNA, 25 bp, Saccharomyces pastorianus
cccttcccagttgtttatgctattg

SEQ ID NO: 18715 - DNA, 25 bp, Saccharomyces pastorianus
gtattctaacttcaccaacacacag

SEQ ID NO: 18716 - DNA, 25 bp, Saccharomyces pastorianus
caagttcagtggttctacgacgcat

SEQ ID NO: 18717 - DNA, 25 bp, Saccharomyces pastorianus
ggtggtggtgcttcaaacagctcta

SEQ ID NO: 18718 - DNA, 25 bp, Saccharomyces pastorianus
ggtctagtcgtgatcagttctggta

SEQ ID NO: 18719 - DNA, 25 bp, Saccharomyces pastorianus
ggtttttaggcttcaacatctggga

SEQ ID NO: 18720 - DNA, 25 bp, Saccharomyces pastorianus
ttagtttatgcattctcttcacaga

SEQ ID NO: 18721 - DNA, 25 bp, Saccharomyces pastorianus
tagcgtcgatggatgcttccgggat

SEQ ID NO: 18722 - DNA, 25 bp, Saccharomyces pastorianus
gggcttttcttctttgtagcaggac

SEQ ID NO: 18723 - DNA, 25 bp, Saccharomyces pastorianus
gttttcgtcatctgtcaactactgg

SEQ ID NO: 18724 - DNA, 25 bp, Saccharomyces pastorianus
gactaccgatgatgacctggaattc

SEQ ID NO: 18725 - DNA, 25 bp, Saccharomyces pastorianus
ttctgcgtcatatccttacttcgtg

SEQ ID NO: 18726 - DNA, 25 bp, Saccharomyces pastorianus
ggcgcatgttgctgggctttattaa

SEQ ID NO: 18727 - DNA, 25 bp, Saccharomyces pastorianus
gcactacttggatggcttattcttt

SEQ ID NO: 18728 - DNA, 25 bp, Saccharomyces pastorianus
atgctattggttcgaggagcctcct

SEQ ID NO: 18729 - DNA, 25 bp, Saccharomyces pastorianus
aggagcctccttattgggatttgta

SEQ ID NO: 18730 - DNA, 25 bp, Saccharomyces pastorianus
caaatttagatgctgctgccgcagg

SEQ ID NO: 18731 - DNA, 25 bp, Saccharomyces pastorianus
ttagatgctgctgccgcaggtacct

SEQ ID NO: 18732 - DNA, 25 bp, Saccharomyces pastorianus
gtaaattatccttgtctagaactga

SEQ ID NO: 18733 - DNA, 25 bp, Saccharomyces pastorianus
tcccaatccagaaccgctactttga

SEQ ID NO: 18734 - DNA, 25 bp, Saccharomyces pastorianus
gattgtggtcacagaatcttgttaa

SEQ ID NO: 18735 - DNA, 25 bp, Saccharomyces pastorianus
caacaaatttagatgctgctgccgc

SEQ ID NO: 18736 - DNA, 25 bp, Saccharomyces pastorianus
gtctagaactgatccagtccgttgt

SEQ ID NO: 18737 - DNA, 25 bp, Saccharomyces pastorianus
ccagaaccgctactttgaaatatat

SEQ ID NO: 18738 - DNA, 25 bp, Saccharomyces pastorianus
tatccttgtctagaactgatccagt

SEQ ID NO: 18739 - DNA, 25 bp, Saccharomyces pastorianus
cagaatcttgttaaaagccagaacc

SEQ ID NO: 18740 - DNA, 25 bp, Saccharomyces pastorianus
aatccagaaccgctactttgaaata

SEQ ID NO: 18741 - DNA, 25 bp, Saccharomyces pastorianus
tggttataatgggacgccccgtcat

SEQ ID NO: 18742 - DNA, 25 bp, Saccharomyces pastorianus
gtgcagagttattgccactggttat

SEQ ID NO: 18743 - DNA, 25 bp, Saccharomyces pastorianus
aatggtcccaccaatgagacctagt

SEQ ID NO: 18744 - DNA, 25 bp, Saccharomyces pastorianus
ttagcggcatctcgttctaattgca

SEQ ID NO: 18745 - DNA, 25 bp, Saccharomyces pastorianus
gggttgtccacgttgcaatgatggt

SEQ ID NO: 18746 - DNA, 25 bp, Saccharomyces pastorianus
ctgcctaacatgctccgtaaagatc

SEQ ID NO: 18747 - DNA, 25 bp, Saccharomyces pastorianus
gcaggaatcactgttcgacaattta

SEQ ID NO: 18748 - DNA, 25 bp, Saccharomyces pastorianus
atattgtgatacttgtccctgccta

SEQ ID NO: 18749 - DNA, 25 bp, Saccharomyces pastorianus
aaacttacacacttgtctctgtcta

SEQ ID NO: 18750 - DNA, 25 bp, Saccharomyces pastorianus
atgaagctggccacattagcggcat

SEQ ID NO: 18751 - DNA, 25 bp, Saccharomyces pastorianus
gacgccccgtcatttgacaaattgt

SEQ ID NO: 18752 - DNA, 25 bp, Saccharomyces pastorianus
ggaactatccattgaagtccctgat

SEQ ID NO: 18753 - DNA, 25 bp, Saccharomyces pastorianus
tgaggaagttccatccaccagaacc

SEQ ID NO: 18754 - DNA, 25 bp, Saccharomyces pastorianus
taccgctttacacatcgccagaagt

SEQ ID NO: 18755 - DNA, 25 bp, Saccharomyces pastorianus
caagttcttctctttgctgcgaaat

SEQ ID NO: 18756 - DNA, 25 bp, Saccharomyces pastorianus
cttgccgtcctcagattcgtaggaa

SEQ ID NO: 18757 - DNA, 25 bp, Saccharomyces pastorianus
tgctcctacatctctgatcatagaa

SEQ ID NO: 18758 - DNA, 25 bp, Saccharomyces pastorianus
tgttgtcaaatcacctgctcctaca

SEQ ID NO: 18759 - DNA, 25 bp, Saccharomyces pastorianus
aagtccctgatttcttgcagttgga

SEQ ID NO: 18760 - DNA, 25 bp, Saccharomyces pastorianus
ggataagtaccagcgttccatgtgg

SEQ ID NO: 18761 - DNA, 25 bp, Saccharomyces pastorianus
gactaaattattacgctcccatgtg

SEQ ID NO: 18762 - DNA, 25 bp, Saccharomyces pastorianus
aggtttccatgagtacactgtctat

SEQ ID NO: 18763 - DNA, 25 bp, Saccharomyces pastorianus
aataaacgatcctgcttaccttgtg

SEQ ID NO: 18764 - DNA, 25 bp, Saccharomyces pastorianus
tatatgccatgggtgttttgactac

SEQ ID NO: 18765 - DNA, 25 bp, Saccharomyces pastorianus
tattcgtcgcctcgctaacaagtta

SEQ ID NO: 18766 - DNA, 25 bp, Saccharomyces pastorianus
ggccatgttcgtgtaggtcctaatc

SEQ ID NO: 18767 - DNA, 25 bp, Saccharomyces pastorianus
tgtctcctactgatccatttcgtag

SEQ ID NO: 18768 - DNA, 25 bp, Saccharomyces pastorianus
aaggtcatcgcgacactcaggtcat

SEQ ID NO: 18769 - DNA, 25 bp, Saccharomyces pastorianus
gatttcctcgagtggaagcaggacc

SEQ ID NO: 18770 - DNA, 25 bp, Saccharomyces pastorianus
gtagaagacgattgcctgtaattat

SEQ ID NO: 18771 - DNA, 25 bp, Saccharomyces pastorianus
aagttatcattgctgtctcctactg

SEQ ID NO: 18772 - DNA, 25 bp, Saccharomyces pastorianus
gatcctgcttaccttgtgacaagga

SEQ ID NO: 18773 - DNA, 25 bp, Saccharomyces pastorianus
aaattaccgtcagcgctatgtgtag

SEQ ID NO: 18774 - DNA, 25 bp, Saccharomyces pastorianus
gttcctttgccctattatttattgt

SEQ ID NO: 18775 - DNA, 25 bp, Saccharomyces pastorianus
agatcgttgatctcttatttgcaaa

SEQ ID NO: 18776 - DNA, 25 bp, Saccharomyces pastorianus
atgatggttcctgcatcggtttgtt

SEQ ID NO: 18777 - DNA, 25 bp, Saccharomyces pastorianus
ttacaattgcgtcctcttgcactat

SEQ ID NO: 18778 - DNA, 25 bp, Saccharomyces pastorianus
gtccgtatgcaagttgtccgtacca

SEQ ID NO: 18779 - DNA, 25 bp, Saccharomyces pastorianus
tatttgcaaaacgagtccttccctg

SEQ ID NO: 18780 - DNA, 25 bp, Saccharomyces pastorianus
gagtgtgttgagagtccctatttat

SEQ ID NO: 18781 - DNA, 25 bp, Saccharomyces pastorianus
ggccggcacgctagaggcttacaat

SEQ ID NO: 18782 - DNA, 25 bp, Saccharomyces pastorianus
aatgtccggatcagtatagcttcaa

SEQ ID NO: 18783 - DNA, 25 bp, Saccharomyces pastorianus
tcgatcacccagtcaacttctaagt

SEQ ID NO: 18784 - DNA, 25 bp, Saccharomyces pastorianus
acttctaagtccatgaactcggccg

SEQ ID NO: 18785 - DNA, 25 bp, Saccharomyces pastorianus
agggacctcttgaagcaggattcga

SEQ ID NO: 18786 - DNA, 25 bp, Saccharomyces pastorianus
ggcaacaatgcatccgcagagactg

SEQ ID NO: 18787 - DNA, 25 bp, Saccharomyces pastorianus
gtatcaccatgctcgcttaagttga

SEQ ID NO: 18788 - DNA, 25 bp, Saccharomyces pastorianus
gggaaatcacagcattccgaatttt

SEQ ID NO: 18789 - DNA, 25 bp, Saccharomyces pastorianus
ttaacttcaagggtcatctcgaggc

SEQ ID NO: 18790 - DNA, 25 bp, Saccharomyces pastorianus
gggtcatctcgaggccgattcggaa

SEQ ID NO: 18791 - DNA, 25 bp, Saccharomyces pastorianus
aaaacaatgccactaccgacaataa

SEQ ID NO: 18792 - DNA, 25 bp, Saccharomyces pastorianus
atagactagtatcaccatgctcgct

SEQ ID NO: 18793 - DNA, 25 bp, Saccharomyces pastorianus
gtgaccaatcagcatacacggtttc

SEQ ID NO: 18794 - DNA, 25 bp, Saccharomyces pastorianus
gcagcagaggtttgcatcaccgact

SEQ ID NO: 18795 - DNA, 25 bp, Saccharomyces pastorianus
cacggtttccttccttaagactgat

SEQ ID NO: 18796 - DNA, 25 bp, Saccharomyces pastorianus
gtaaaatacatcatccacgggatcg

SEQ ID NO: 18797 - DNA, 25 bp, Saccharomyces pastorianus
actgcgaaaaatagccatctccaaa

SEQ ID NO: 18798 - DNA, 25 bp, Saccharomyces pastorianus
gtccgacttggccaacatactggaa

SEQ ID NO: 18799 - DNA, 25 bp, Saccharomyces pastorianus
gagttgttcgatgatgcctctgcga

SEQ ID NO: 18800 - DNA, 25 bp, Saccharomyces pastorianus
acgggatcgaactgttgtccgactt

SEQ ID NO: 18801 - DNA, 25 bp, Saccharomyces pastorianus
gaaacagcgctagaagccctggcaa

SEQ ID NO: 18802 - DNA, 25 bp, Saccharomyces pastorianus
gaacgacgtcatagatgcagaacaa

SEQ ID NO: 18803 - DNA, 25 bp, Saccharomyces pastorianus
aaacctggtcaaactctcggacaat

SEQ ID NO: 18804 - DNA, 25 bp, Saccharomyces pastorianus
gtcgtactggcaaaacacctacttc

SEQ ID NO: 18805 - DNA, 25 bp, Saccharomyces pastorianus
cacctacttccaaaacaacgtcatt

SEQ ID NO: 18806 - DNA, 25 bp, Saccharomyces pastorianus
caacgtcattgtgaaatttcgcgaa

SEQ ID NO: 18807 - DNA, 25 bp, Saccharomyces pastorianus
gcagcaatgtgcatcatgacacgta

SEQ ID NO: 18808 - DNA, 25 bp, Saccharomyces pastorianus
aaacgaggccgctgtcttcgtctag

SEQ ID NO: 18809 - DNA, 25 bp, Saccharomyces pastorianus
atgacacgtacgaactatcctgaat

SEQ ID NO: 18810 - DNA, 25 bp, Saccharomyces pastorianus
cggtcagcttcaacttaccttttga

SEQ ID NO: 18811 - DNA, 25 bp, Saccharomyces pastorianus
atacggcgacgactcattgacacaa

SEQ ID NO: 18812 - DNA, 25 bp, Saccharomyces pastorianus
tgcacacaggactttcttcgacaat

SEQ ID NO: 18813 - DNA, 25 bp, Saccharomyces pastorianus
gttatcacaagaagccagcgactct

SEQ ID NO: 18814 - DNA, 25 bp, Saccharomyces pastorianus
tttggcgacactataaacctctcag

SEQ ID NO: 18815 - DNA, 25 bp, Saccharomyces pastorianus
tgcagtccgattattctgtcgtaat

SEQ ID NO: 18816 - DNA, 25 bp, Saccharomyces pastorianus
gtacagcgacacattatacggcgac

SEQ ID NO: 18817 - DNA, 25 bp, Saccharomyces pastorianus
tatctcttccttttgtctttggcga

SEQ ID NO: 18818 - DNA, 25 bp, Saccharomyces pastorianus
ggcagcgccatctttagggttttca

SEQ ID NO: 18819 - DNA, 25 bp, Saccharomyces pastorianus
gaggaacttcctgggctacagattt

SEQ ID NO: 18820 - DNA, 25 bp, Saccharomyces pastorianus
gttttccacgacagatcatcaatta

SEQ ID NO: 18821 - DNA, 25 bp, Saccharomyces pastorianus
tggaaatccctctgcgaaacgaatt

SEQ ID NO: 18822 - DNA, 25 bp, Saccharomyces pastorianus
atggacatggcttcgttttccacga

SEQ ID NO: 18823 - DNA, 25 bp, Saccharomyces pastorianus
accagaaattctcagcgccaaaaat

SEQ ID NO: 18824 - DNA, 25 bp, Saccharomyces pastorianus
agtgatggctctgtgattttgaaaa

SEQ ID NO: 18825 - DNA, 25 bp, Saccharomyces pastorianus
agtacagaaatacgctcgcctcagg

SEQ ID NO: 18826 - DNA, 25 bp, Saccharomyces pastorianus
gtactgaaagttgggctggcttcga

SEQ ID NO: 18827 - DNA, 25 bp, Saccharomyces pastorianus
gaaagggttggcttccgatatagtg

SEQ ID NO: 18828 - DNA, 25 bp, Saccharomyces pastorianus
gggttttcacgccatactatggaca

SEQ ID NO: 18829 - DNA, 25 bp, Saccharomyces pastorianus
gaccgtcgcagtgggaaactctaca

SEQ ID NO: 18830 - DNA, 25 bp, Saccharomyces pastorianus
taatgcggaatctttgcctcaatac

SEQ ID NO: 18831 - DNA, 25 bp, Saccharomyces pastorianus
tctggtcccaatcaacaagtcgtta

SEQ ID NO: 18832 - DNA, 25 bp, Saccharomyces pastorianus
acacaggaacctactttgccaaatc

SEQ ID NO: 18833 - DNA, 25 bp, Saccharomyces pastorianus
aacgttatgacgactccgacgagca

SEQ ID NO: 18834 - DNA, 25 bp, Saccharomyces pastorianus
aaataatgcgggtattgcccaaccg

SEQ ID NO: 18835 - DNA, 25 bp, Saccharomyces pastorianus
gttcgaacaacccatttgcactaca

SEQ ID NO: 18836 - DNA, 25 bp, Saccharomyces pastorianus
agcagggctattttgcacccgtaaa

SEQ ID NO: 18837 - DNA, 25 bp, Saccharomyces pastorianus
taaactccactgtcaatcctattct

SEQ ID NO: 18838 - DNA, 25 bp, Saccharomyces pastorianus
aacagaaaatacctccgcacgcaat

SEQ ID NO: 18839 - DNA, 25 bp, Saccharomyces pastorianus
agggtattctgtttcgcaaggcacg

SEQ ID NO: 18840 - DNA, 25 bp, Saccharomyces pastorianus
tcgttcgtcatcaagcccaggaata

SEQ ID NO: 18841 - DNA, 25 bp, Saccharomyces pastorianus
cactgcgatgatttggacccgttgg

SEQ ID NO: 18842 - DNA, 25 bp, Saccharomyces pastorianus
gaaaatttccggtgctcaaaacttg

SEQ ID NO: 18843 - DNA, 25 bp, Saccharomyces pastorianus
ttcaggccgttctggcagagcgaga

SEQ ID NO: 18844 - DNA, 25 bp, Saccharomyces pastorianus
tccatatcgcagttattcagctaca

SEQ ID NO: 18845 - DNA, 25 bp, Saccharomyces pastorianus
cgagacaggccctaagacggtccat

SEQ ID NO: 18846 - DNA, 25 bp, Saccharomyces pastorianus
acatcctcggtacgttttgcattca

SEQ ID NO: 18847 - DNA, 25 bp, Saccharomyces pastorianus
ggaatatcttgttggcctcagtcaa

SEQ ID NO: 18848 - DNA, 25 bp, Saccharomyces pastorianus
ctaacggccggctaccaattgagta

SEQ ID NO: 18849 - DNA, 25 bp, Saccharomyces pastorianus
cggtgctcaaaacttgtcgctgctc

SEQ ID NO: 18850 - DNA, 25 bp, Saccharomyces pastorianus
gaacggtgattccatatcgcagtta

SEQ ID NO: 18851 - DNA, 25 bp, Saccharomyces pastorianus
aactcgttagcgacaaacctatcat

SEQ ID NO: 18852 - DNA, 25 bp, Saccharomyces pastorianus
gagcggtgtgccatgtgaagatatt

SEQ ID NO: 18853 - DNA, 25 bp, Saccharomyces pastorianus
tgccatgacgagagccaaatccaaa

SEQ ID NO: 18854 - DNA, 25 bp, Saccharomyces pastorianus
atcacgtctcaatccaaactcgtta

SEQ ID NO: 18855 - DNA, 25 bp, Saccharomyces pastorianus
agatgccccgacattatggagcaaa

SEQ ID NO: 18856 - DNA, 25 bp, Saccharomyces pastorianus
aacgggtgccaaggctatcacgtct

SEQ ID NO: 18857 - DNA, 25 bp, Saccharomyces pastorianus
ttatacagagcgcagttgaggttac

SEQ ID NO: 18858 - DNA, 25 bp, Saccharomyces pastorianus
tttgaattatgacagatgccccgac

SEQ ID NO: 18859 - DNA, 25 bp, Saccharomyces pastorianus
ggccatataagtacaagttccctga

SEQ ID NO: 18860 - DNA, 25 bp, Saccharomyces pastorianus
aaactgatcatcatcggctcaaaaa

SEQ ID NO: 18861 - DNA, 25 bp, Saccharomyces pastorianus
aagggctagagatcctgaccgccga

SEQ ID NO: 18862 - DNA, 25 bp, Saccharomyces pastorianus
aattgctaggttgggttcatactca

SEQ ID NO: 18863 - DNA, 25 bp, Saccharomyces pastorianus
gtcacgtaggctccgtccaaataag

SEQ ID NO: 18864 - DNA, 25 bp, Saccharomyces pastorianus
tcagctccaggatctgtttcattaa

SEQ ID NO: 18865 - DNA, 25 bp, Saccharomyces pastorianus
ttggcgcctcaattgggtcacgtag

SEQ ID NO: 18866 - DNA, 25 bp, Saccharomyces pastorianus
gaaattactgccctgccagatacag

SEQ ID NO: 18867 - DNA, 25 bp, Saccharomyces pastorianus
gtccggtgcactttttacagttcaa

SEQ ID NO: 18868 - DNA, 25 bp, Saccharomyces pastorianus
atgggcacagcctttgatccagaag

SEQ ID NO: 18869 - DNA, 25 bp, Saccharomyces pastorianus
tgaacctactttcagcacacatgct

SEQ ID NO: 18870 - DNA, 25 bp, Saccharomyces pastorianus
gatatttccatcttttcagctccag

SEQ ID NO: 18871 - DNA, 25 bp, Saccharomyces pastorianus
tactactttctgaccgtatcatggg

SEQ ID NO: 18872 - DNA, 25 bp, Saccharomyces pastorianus
tcaagactgttgttttggcgcctca

SEQ ID NO: 18873 - DNA, 25 bp, Saccharomyces pastorianus
tatttccgtcgagctctaacattag

SEQ ID NO: 18874 - DNA, 25 bp, Saccharomyces pastorianus
gagtgtccagcggaacgtctcagga

SEQ ID NO: 18875 - DNA, 25 bp, Saccharomyces pastorianus
agtggatatctgtcctcgagacttt

SEQ ID NO: 18876 - DNA, 25 bp, Saccharomyces pastorianus
gatgggccacgaattcgtcgaactt

SEQ ID NO: 18877 - DNA, 25 bp, Saccharomyces pastorianus
gctttggctggctgtgtttgaaata

SEQ ID NO: 18878 - DNA, 25 bp, Saccharomyces pastorianus
atgcacctatactctctttactatt

SEQ ID NO: 18879 - DNA, 25 bp, Saccharomyces pastorianus
tacgattacgcgatgggagtgtcca

SEQ ID NO: 18880 - DNA, 25 bp, Saccharomyces pastorianus
taacgcatggaccttgatgggccac

SEQ ID NO: 18881 - DNA, 25 bp, Saccharomyces pastorianus
aagcctatgcgctcttggacatgca

SEQ ID NO: 18882 - DNA, 25 bp, Saccharomyces pastorianus
gcaggcaactatcaactagcgtacg

SEQ ID NO: 18883 - DNA, 25 bp, Saccharomyces pastorianus
aattctcatgctgcgatcgagtgct

SEQ ID NO: 18884 - DNA, 25 bp, Saccharomyces pastorianus
gactatgtgcccgatgtggttcttg

SEQ ID NO: 18885 - DNA, 25 bp, Saccharomyces pastorianus
atctcatctcggtgctatttgccat

SEQ ID NO: 18886 - DNA, 25 bp, Saccharomyces pastorianus
acaaggatattgacgcctctctgga

SEQ ID NO: 18887 - DNA, 25 bp, Saccharomyces pastorianus
gaagacgaagatgctccacaaatta

SEQ ID NO: 18888 - DNA, 25 bp, Saccharomyces pastorianus
gtttactataccagatctcatctcg

SEQ ID NO: 18889 - DNA, 25 bp, Saccharomyces pastorianus
gatataacccttgctagaacttcag

SEQ ID NO: 18890 - DNA, 25 bp, Saccharomyces pastorianus
tggcagacgtcacccaattagtcga

SEQ ID NO: 18891 - DNA, 25 bp, Saccharomyces pastorianus
gggtgtcaacgaccaagtttactat

SEQ ID NO: 18892 - DNA, 25 bp, Saccharomyces pastorianus
gtcgaattcatagtcctggacgtgg

SEQ ID NO: 18893 - DNA, 25 bp, Saccharomyces pastorianus
agctgcgcctactgaagagcatgat

SEQ ID NO: 18894 - DNA, 25 bp, Saccharomyces pastorianus
cgcctctctggattacaactcgaaa

SEQ ID NO: 18895 - DNA, 25 bp, Saccharomyces pastorianus
aatcctataatagtcccatccttgc

SEQ ID NO: 18896 - DNA, 25 bp, Saccharomyces pastorianus
atgtcaactagatcccgtactctat

SEQ ID NO: 18897 - DNA, 25 bp, Saccharomyces pastorianus
ttatctgacttgattcccctacaat

SEQ ID NO: 18898 - DNA, 25 bp, Saccharomyces pastorianus
aacgaattctcttctctataacgcc

SEQ ID NO: 18899 - DNA, 25 bp, Saccharomyces pastorianus
gtctcgcgaggtttgcccaagagtt

SEQ ID NO: 18900 - DNA, 25 bp, Saccharomyces pastorianus
atggagtacttcaaccaggacgtaa

SEQ ID NO: 18901 - DNA, 25 bp, Saccharomyces pastorianus
gaagatactgccttggagctcatgc

SEQ ID NO: 18902 - DNA, 25 bp, Saccharomyces pastorianus
gaaatttcgaccagtgtctcgcgag

SEQ ID NO: 18903 - DNA, 25 bp, Saccharomyces pastorianus
gacagttcgagtgccgatgctgcag

SEQ ID NO: 18904 - DNA, 25 bp, Saccharomyces pastorianus
gaagatgccggctaccaggaagata

SEQ ID NO: 18905 - DNA, 25 bp, Saccharomyces pastorianus
ccatccttgccgttgatattcagaa

SEQ ID NO: 18906 - DNA, 25 bp, Saccharomyces pastorianus
aaatgcgccgacgtgtttcaaaata

SEQ ID NO: 18907 - DNA, 25 bp, Saccharomyces pastorianus
agccattccactgccaatgtgatat

SEQ ID NO: 18908 - DNA, 25 bp, Saccharomyces pastorianus
ggattactcttttcagaacattgac

SEQ ID NO: 18909 - DNA, 25 bp, Saccharomyces pastorianus
ggatctttgccatgaaatgcgccga

SEQ ID NO: 18910 - DNA, 25 bp, Saccharomyces pastorianus
tggcgcaagcgattcgtaccaagat

SEQ ID NO: 18911 - DNA, 25 bp, Saccharomyces pastorianus
attaggtgagttttgcctgcaagcc

SEQ ID NO: 18912 - DNA, 25 bp, Saccharomyces pastorianus
catcgactcactatccacattaggt

SEQ ID NO: 18913 - DNA, 25 bp, Saccharomyces pastorianus
tttgtactgtctttgccaatggagc

SEQ ID NO: 18914 - DNA, 25 bp, Saccharomyces pastorianus
gtgatatctttccatagctcagaga

SEQ ID NO: 18915 - DNA, 25 bp, Saccharomyces pastorianus
acacctacaccctatacaagaagcg

SEQ ID NO: 18916 - DNA, 25 bp, Saccharomyces pastorianus
catctgcattaataccgaagccgcc

SEQ ID NO: 18917 - DNA, 25 bp, Saccharomyces pastorianus
gatggattcccattcaaactcacac

SEQ ID NO: 18918 - DNA, 25 bp, Saccharomyces pastorianus
aaccttcctactaagttgcgtatgc

SEQ ID NO: 18919 - DNA, 25 bp, Saccharomyces pastorianus
ttattctgtagctcgtgtatttggc

SEQ ID NO: 18920 - DNA, 25 bp, Saccharomyces pastorianus
gtgattatgtcttgccaacaaccag

SEQ ID NO: 18921 - DNA, 25 bp, Saccharomyces pastorianus
ccgttggtttggtccgtgtagtgat

SEQ ID NO: 18922 - DNA, 25 bp, Saccharomyces pastorianus
actatatacctcgtaggcgtgccag

SEQ ID NO: 18923 - DNA, 25 bp, Saccharomyces pastorianus
ctacttttgctactggatggattcc

SEQ ID NO: 18924 - DNA, 25 bp, Saccharomyces pastorianus
tgccagttttgctgaggtggcctca

SEQ ID NO: 18925 - DNA, 25 bp, Saccharomyces pastorianus
tttatctcattaaccagcccaacct

SEQ ID NO: 18926 - DNA, 25 bp, Saccharomyces pastorianus
gaaattccaccgcagttcagatatg

SEQ ID NO: 18927 - DNA, 25 bp, Saccharomyces pastorianus
atttgccctatttgtttccctatca

SEQ ID NO: 18928 - DNA, 25 bp, Saccharomyces pastorianus
ggcattttcaagtgctcagccgcaa

SEQ ID NO: 18929 - DNA, 25 bp, Saccharomyces pastorianus
ataaagatcttgtcgccagcgttgt

SEQ ID NO: 18930 - DNA, 25 bp, Saccharomyces pastorianus
aaagagccgttgatttcgttgtgcg

SEQ ID NO: 18931 - DNA, 25 bp, Saccharomyces pastorianus
tcccattagcacaccactttttaag

SEQ ID NO: 18932 - DNA, 25 bp, Saccharomyces pastorianus
attccacggcctttcaagactagtt

SEQ ID NO: 18933 - DNA, 25 bp, Saccharomyces pastorianus
ccagcgttgtacacattctttacca

SEQ ID NO: 18934 - DNA, 25 bp, Saccharomyces pastorianus
ccacgaaccgtgtgcgatttattca

SEQ ID NO: 18935 - DNA, 25 bp, Saccharomyces pastorianus
ggagaccaaaatggcccgttcattc

SEQ ID NO: 18936 - DNA, 25 bp, Saccharomyces pastorianus
ggaaattccccacgaacacagtaag

SEQ ID NO: 18937 - DNA, 25 bp, Saccharomyces pastorianus
aaattgtggctactcgaactgcccg

SEQ ID NO: 18938 - DNA, 25 bp, Saccharomyces pastorianus
gcatagtcccttcaaacagttacga

SEQ ID NO: 18939 - DNA, 25 bp, Saccharomyces pastorianus
agtcagagcttccaaggtcttgcca

SEQ ID NO: 18940 - DNA, 25 bp, Saccharomyces pastorianus
agatccgtcttcttggctgaaatca

SEQ ID NO: 18941 - DNA, 25 bp, Saccharomyces pastorianus
cgatgctgttaccaaggctcaatct

SEQ ID NO: 18942 - DNA, 25 bp, Saccharomyces pastorianus
agctttgtacgcttccaagatcatc

SEQ ID NO: 18943 - DNA, 25 bp, Saccharomyces pastorianus
ctcaacgtgattacttcggtgccca

SEQ ID NO: 18944 - DNA, 25 bp, Saccharomyces pastorianus
ctgctttgaccttctacgatgggta

SEQ ID NO: 18945 - DNA, 25 bp, Saccharomyces pastorianus
caacaagttcttcgccgatgctgtt

SEQ ID NO: 18946 - DNA, 25 bp, Saccharomyces pastorianus
gaatgtgcatccgaaaacttgccag

SEQ ID NO: 18947 - DNA, 25 bp, Saccharomyces pastorianus
gttgatccgtgaagccgctgccaca

SEQ ID NO: 18948 - DNA, 25 bp, Saccharomyces pastorianus
acactttcagagtcttgcccgaatg

SEQ ID NO: 18949 - DNA, 25 bp, Saccharomyces pastorianus
atccattgcattggctaccacatac

SEQ ID NO: 18950 - DNA, 25 bp, Saccharomyces pastorianus
atgctgctagtttaaggaaccttgc

SEQ ID NO: 18951 - DNA, 25 bp, Saccharomyces pastorianus
aaagcaaatccagacccgacaaata

SEQ ID NO: 18952 - DNA, 25 bp, Saccharomyces pastorianus
gagtaaaatcttcgctgcagcattg

SEQ ID NO: 18953 - DNA, 25 bp, Saccharomyces pastorianus
gaccctttgatattgagaagcgcaa

SEQ ID NO: 18954 - DNA, 25 bp, Saccharomyces pastorianus
atcagcaacctgagctcattggtat

SEQ ID NO: 18955 - DNA, 25 bp, Saccharomyces pastorianus
atattccgccaattataagtgttca

SEQ ID NO: 18956 - DNA, 25 bp, Saccharomyces pastorianus
tttggaacgaaacactctctgagta

SEQ ID NO: 18957 - DNA, 25 bp, Saccharomyces pastorianus
gtagatggtaatcccattacttcaa

SEQ ID NO: 18958 - DNA, 25 bp, Saccharomyces pastorianus
tatggtaaactacgcttcggagtcg

SEQ ID NO: 18959 - DNA, 25 bp, Saccharomyces pastorianus
cggagtcgcgccacttgaggaagaa

SEQ ID NO: 18960 - DNA, 25 bp, Saccharomyces pastorianus
ggtgtagccggattcaatgattcgt

SEQ ID NO: 18961 - DNA, 25 bp, Saccharomyces pastorianus
ccttgattacttcactgacggctga

SEQ ID NO: 18962 - DNA, 25 bp, Saccharomyces pastorianus
atcagacgcgttcttatcctcgatg

SEQ ID NO: 18963 - DNA, 25 bp, Saccharomyces pastorianus
aatgtggcttcccaatacggatcac

SEQ ID NO: 18964 - DNA, 25 bp, Saccharomyces pastorianus
tgccaccaattctcatgattctgtt

SEQ ID NO: 18965 - DNA, 25 bp, Saccharomyces pastorianus
gacggctgatcaattggctggtaat

SEQ ID NO: 18966 - DNA, 25 bp, Saccharomyces pastorianus
tctctcagagtatacgatcgccgtt

SEQ ID NO: 18967 - DNA, 25 bp, Saccharomyces pastorianus
gcatgctcctatcattgcgacaggt

SEQ ID NO: 18968 - DNA, 25 bp, Saccharomyces pastorianus
ccaacatctttatcgtactcttcaa

SEQ ID NO: 18969 - DNA, 25 bp, Saccharomyces pastorianus
tggacaacatctggcgatctcttga

SEQ ID NO: 18970 - DNA, 25 bp, Saccharomyces pastorianus
acgttagctgctactggtattccaa

SEQ ID NO: 18971 - DNA, 25 bp, Saccharomyces pastorianus
aaaccgaccacaatgacctgtatgc

SEQ ID NO: 18972 - DNA, 25 bp, Saccharomyces pastorianus
caaggcggtgccattgtctatgaat

SEQ ID NO: 18973 - DNA, 25 bp, Saccharomyces pastorianus
aggtttttgtccgagattgcatctg

SEQ ID NO: 18974 - DNA, 25 bp, Saccharomyces pastorianus
tggctcttttacagttcatggctac

SEQ ID NO: 18975 - DNA, 25 bp, Saccharomyces pastorianus
attatcccgataaactggctctttt

SEQ ID NO: 18976 - DNA, 25 bp, Saccharomyces pastorianus
ttgcagggactgaccacttttaacc

SEQ ID NO: 18977 - DNA, 25 bp, Saccharomyces pastorianus
gaccaagttgaattgcccttcttag

SEQ ID NO: 18978 - DNA, 25 bp, Saccharomyces pastorianus
tgcactatgcttgctacttaccata

SEQ ID NO: 18979 - DNA, 25 bp, Saccharomyces pastorianus
aacgacgatcatgtggcaatacctg

SEQ ID NO: 18980 - DNA, 25 bp, Saccharomyces pastorianus
gattgcatctgttcactgcactatg

SEQ ID NO: 18981 - DNA, 25 bp, Saccharomyces pastorianus
gttcatggctactacgatcttggat

SEQ ID NO: 18982 - DNA, 25 bp, Saccharomyces pastorianus
tgaatttaggattccccgtgggttg

SEQ ID NO: 18983 - DNA, 25 bp, Saccharomyces pastorianus
taaatactatctccaagcggctgat

SEQ ID NO: 18984 - DNA, 25 bp, Saccharomyces pastorianus
ggctgatagacaaaggcccgctcat

SEQ ID NO: 18985 - DNA, 25 bp, Saccharomyces pastorianus
gcccgctcatctggaattcacaatg

SEQ ID NO: 18986 - DNA, 25 bp, Saccharomyces pastorianus
acaatgttgattccagcccattcga

SEQ ID NO: 18987 - DNA, 25 bp, Saccharomyces pastorianus
tgctgttatctctatctacaccgga

SEQ ID NO: 18988 - DNA, 25 bp, Saccharomyces pastorianus
agaccgtggtgggattcgtactgcc

SEQ ID NO: 18989 - DNA, 25 bp, Saccharomyces pastorianus
gtgattaccgtactgtcaccagaat

SEQ ID NO: 18990 - DNA, 25 bp, Saccharomyces pastorianus
agtacccaccagatgctaatcacgg

SEQ ID NO: 18991 - DNA, 25 bp, Saccharomyces pastorianus
agcccattcgaacatcgtcatgact

SEQ ID NO: 18992 - DNA, 25 bp, Saccharomyces pastorianus
tactgccttccacaacgataacgat

SEQ ID NO: 18993 - DNA, 25 bp, Saccharomyces pastorianus
aatcgttgccatggttcgtcagagt

SEQ ID NO: 18994 - DNA, 25 bp, Saccharomyces pastorianus
aacgggctacggagccttgtgcaat

SEQ ID NO: 18995 - DNA, 25 bp, Saccharomyces pastorianus
aggctcgtcacgtggttatccatga

SEQ ID NO: 18996 - DNA, 25 bp, Saccharomyces pastorianus
caatgtagtggtggccgtgtaccct

SEQ ID NO: 18997 - DNA, 25 bp, Saccharomyces pastorianus
agtcaggcggccagtatatgaacct

SEQ ID NO: 18998 - DNA, 25 bp, Saccharomyces pastorianus
gtgagaactgcacgctactgaagtc

SEQ ID NO: 18999 - DNA, 25 bp, Saccharomyces pastorianus
gtcgggttgtacatgctagagctct

SEQ ID NO: 19000 - DNA, 25 bp, Saccharomyces pastorianus
agagctcttgcgtaagcggcttggc

SEQ ID NO: 19001 - DNA, 25 bp, Saccharomyces pastorianus
gcacaccttggtcacagagagcgaa

SEQ ID NO: 19002 - DNA, 25 bp, Saccharomyces pastorianus
taattctagggaccctgcgagcgta

SEQ ID NO: 19003 - DNA, 25 bp, Saccharomyces pastorianus
gcagaacaaggcctactctcctgtg

SEQ ID NO: 19004 - DNA, 25 bp, Saccharomyces pastorianus
agggataggcaatccggagccgcaa

SEQ ID NO: 19005 - DNA, 25 bp, Saccharomyces pastorianus
gggtaccacatgctacttgattttg

SEQ ID NO: 19006 - DNA, 25 bp, Saccharomyces pastorianus
actttccaattctgtgcaattccac

SEQ ID NO: 19007 - DNA, 25 bp, Saccharomyces pastorianus
gcaattccacaagtcatggccatcg

SEQ ID NO: 19008 - DNA, 25 bp, Saccharomyces pastorianus
gttaagatccgcaagggtaccacat

SEQ ID NO: 19009 - DNA, 25 bp, Saccharomyces pastorianus
ggccgtgcaagatccaaactaccta

SEQ ID NO: 19010 - DNA, 25 bp, Saccharomyces pastorianus
gtgttcacgaacagtctactttcca

SEQ ID NO: 19011 - DNA, 25 bp, Saccharomyces pastorianus
gatgtgttgacctacttagccagtg

SEQ ID NO: 19012 - DNA, 25 bp, Saccharomyces pastorianus
gaacgcattggatcacgtcattgat

SEQ ID NO: 19013 - DNA, 25 bp, Saccharomyces pastorianus
aatctggtctcaatacgttcctcaa

SEQ ID NO: 19014 - DNA, 25 bp, Saccharomyces pastorianus
ttacctgccaacgtgaaaccaaatg

SEQ ID NO: 19015 - DNA, 25 bp, Saccharomyces pastorianus
ttgtctatcattgtttccgttcttc

SEQ ID NO: 19016 - DNA, 25 bp, Saccharomyces pastorianus
gctggcacagggagattcccactat

SEQ ID NO: 19017 - DNA, 25 bp, Saccharomyces pastorianus
gtgatctggaattacctaaggactt

SEQ ID NO: 19018 - DNA, 25 bp, Saccharomyces pastorianus
gaagctgacacagtcccaggagaaa

SEQ ID NO: 19019 - DNA, 25 bp, Saccharomyces pastorianus
gagctactctgtttgtcggtaagaa

SEQ ID NO: 19020 - DNA, 25 bp, Saccharomyces pastorianus
gccggtaggtattatgcatttcaat

SEQ ID NO: 19021 - DNA, 25 bp, Saccharomyces pastorianus
taaggacttctcgtcgctggcacag

SEQ ID NO: 19022 - DNA, 25 bp, Saccharomyces pastorianus
gagattcccactatgaagcaaggtt

SEQ ID NO: 19023 - DNA, 25 bp, Saccharomyces pastorianus
acggtttgggctattacagcttgac

SEQ ID NO: 19024 - DNA, 25 bp, Saccharomyces pastorianus
gcaaggttcagcaaacaggacggta

SEQ ID NO: 19025 - DNA, 25 bp, Saccharomyces pastorianus
cgaagttagacgtgccggtaggtat

SEQ ID NO: 19026 - DNA, 25 bp, Saccharomyces pastorianus
agcttgacggcgagagagctactct

SEQ ID NO: 19027 - DNA, 25 bp, Saccharomyces pastorianus
attaatagcgcattgatccggccca

SEQ ID NO: 19028 - DNA, 25 bp, Saccharomyces pastorianus
agaggtgtacgacgcctttgctaac

SEQ ID NO: 19029 - DNA, 25 bp, Saccharomyces pastorianus
tggacttctccctaagactttacaa

SEQ ID NO: 19030 - DNA, 25 bp, Saccharomyces pastorianus
atccggcccattgtagggtacatca

SEQ ID NO: 19031 - DNA, 25 bp, Saccharomyces pastorianus
tggacatcgaccatctgaatgccgg

SEQ ID NO: 19032 - DNA, 25 bp, Saccharomyces pastorianus
tcttcacttcgggactgacgtatat

SEQ ID NO: 19033 - DNA, 25 bp, Saccharomyces pastorianus
attcctatcaagtgccggatcgtga

SEQ ID NO: 19034 - DNA, 25 bp, Saccharomyces pastorianus
ggaccatctacgattcctacttgat

SEQ ID NO: 19035 - DNA, 25 bp, Saccharomyces pastorianus
gaagggtcggcttttggtcgctaca

SEQ ID NO: 19036 - DNA, 25 bp, Saccharomyces pastorianus
gactttgaaggctcatggaccatct

SEQ ID NO: 19037 - DNA, 25 bp, Saccharomyces pastorianus
gttgacatggttggcgacgtacttt

SEQ ID NO: 19038 - DNA, 25 bp, Saccharomyces pastorianus
acgcgggacaccaaaacgacatctt

SEQ ID NO: 19039 - DNA, 25 bp, Saccharomyces pastorianus
ggtctgaacccatcatactgagcta

SEQ ID NO: 19040 - DNA, 25 bp, Saccharomyces pastorianus
acacgcttagtgaccaacctgagga

SEQ ID NO: 19041 - DNA, 25 bp, Saccharomyces pastorianus
gataactcgctggacgacaacgacg

SEQ ID NO: 19042 - DNA, 25 bp, Saccharomyces pastorianus
gaaccgcacgacgaattcaacgaag

SEQ ID NO: 19043 - DNA, 25 bp, Saccharomyces pastorianus
gacatcttcccttaagtcaagcaca

SEQ ID NO: 19044 - DNA, 25 bp, Saccharomyces pastorianus
gggctcaatagacctcagatccatc

SEQ ID NO: 19045 - DNA, 25 bp, Saccharomyces pastorianus
cacatcgtttccgttatcattcaag

SEQ ID NO: 19046 - DNA, 25 bp, Saccharomyces pastorianus
gaagacaacccaacggagccagagt

SEQ ID NO: 19047 - DNA, 25 bp, Saccharomyces pastorianus
gagtttaccgccaagagagaccata

SEQ ID NO: 19048 - DNA, 25 bp, Saccharomyces pastorianus
ctgctgttccagtccagaagtagaa

SEQ ID NO: 19049 - DNA, 25 bp, Saccharomyces pastorianus
gagaagaccttgcacaattgaccat

SEQ ID NO: 19050 - DNA, 25 bp, Saccharomyces pastorianus
tattttcaacagtatcagagccaat

SEQ ID NO: 19051 - DNA, 25 bp, Saccharomyces pastorianus
ggcttccgaaagctggacagaatct

SEQ ID NO: 19052 - DNA, 25 bp, Saccharomyces pastorianus
aaaagcctgaacaagactcgatcgt

SEQ ID NO: 19053 - DNA, 25 bp, Saccharomyces pastorianus
attattggacgatctggcttccgaa

SEQ ID NO: 19054 - DNA, 25 bp, Saccharomyces pastorianus
atctccaatattcttttgtctcatt

SEQ ID NO: 19055 - DNA, 25 bp, Saccharomyces pastorianus
tcattggaccatttgagcagaatat

SEQ ID NO: 19056 - DNA, 25 bp, Saccharomyces pastorianus
gactcgatcgtttatgccaacggag

SEQ ID NO: 19057 - DNA, 25 bp, Saccharomyces pastorianus
ttacctgttttacttgggatacaag

SEQ ID NO: 19058 - DNA, 25 bp, Saccharomyces pastorianus
ggaatgagcaacgtctgcttccgtt

SEQ ID NO: 19059 - DNA, 25 bp, Saccharomyces pastorianus
tttgcaggatcaaacatcatctgtt

SEQ ID NO: 19060 - DNA, 25 bp, Saccharomyces pastorianus
gcattctgaagaacccggactcgca

SEQ ID NO: 19061 - DNA, 25 bp, Saccharomyces pastorianus
caaggccccggtcttgatcaataac

SEQ ID NO: 19062 - DNA, 25 bp, Saccharomyces pastorianus
tcgggacgacgacttcttcattgag

SEQ ID NO: 19063 - DNA, 25 bp, Saccharomyces pastorianus
aggagaacctgcgtacagccttgga

SEQ ID NO: 19064 - DNA, 25 bp, Saccharomyces pastorianus
ataacctcttggacagtgggatcag

SEQ ID NO: 19065 - DNA, 25 bp, Saccharomyces pastorianus
aagaactacacgactgcttcaggag

SEQ ID NO: 19066 - DNA, 25 bp, Saccharomyces pastorianus
aaagaacctctcatcgggaagctct

SEQ ID NO: 19067 - DNA, 25 bp, Saccharomyces pastorianus
gtctcaggcgtttatcgacatcgcg

SEQ ID NO: 19068 - DNA, 25 bp, Saccharomyces pastorianus
gttgaacaaggactgctctctgagc

SEQ ID NO: 19069 - DNA, 25 bp, Saccharomyces pastorianus
tggaggccgggtttcaagaactaca

SEQ ID NO: 19070 - DNA, 25 bp, Saccharomyces pastorianus
aggacaagcacttggtcgccgaggt

SEQ ID NO: 19071 - DNA, 25 bp, Saccharomyces pastorianus
attcttgctggtttgcacgatacgc

SEQ ID NO: 19072 - DNA, 25 bp, Saccharomyces pastorianus
gtggacattatcaacttcggcgaga

SEQ ID NO: 19073 - DNA, 25 bp, Saccharomyces pastorianus
gcgtcctctcctataattcttgaag

SEQ ID NO: 19074 - DNA, 25 bp, Saccharomyces pastorianus
gattagactggccaagacgctgaag

SEQ ID NO: 19075 - DNA, 25 bp, Saccharomyces pastorianus
gagactagtcacttgctgaccgtgg

SEQ ID NO: 19076 - DNA, 25 bp, Saccharomyces pastorianus
gtggcgttcgtatgcagtcccataa

SEQ ID NO: 19077 - DNA, 25 bp, Saccharomyces pastorianus
ggcacgttcatggacttcggtgtag

SEQ ID NO: 19078 - DNA, 25 bp, Saccharomyces pastorianus
gactctgacgctaatggcacgttca

SEQ ID NO: 19079 - DNA, 25 bp, Saccharomyces pastorianus
actgttggacgagtttgttgccgcg

SEQ ID NO: 19080 - DNA, 25 bp, Saccharomyces pastorianus
ggccttgcgtctctccatggaggaa

SEQ ID NO: 19081 - DNA, 25 bp, Saccharomyces pastorianus
ctgcagattgcccagctgactttga

SEQ ID NO: 19082 - DNA, 25 bp, Saccharomyces pastorianus
attggtagttgcctccaaggtcgaa

SEQ ID NO: 19083 - DNA, 25 bp, Saccharomyces pastorianus
gttatcgcttcgctgggcataccat

SEQ ID NO: 19084 - DNA, 25 bp, Saccharomyces pastorianus
acgactgttctcattatggcggcga

SEQ ID NO: 19085 - DNA, 25 bp, Saccharomyces pastorianus
gccatggtgatgacacgcctcataa

SEQ ID NO: 19086 - DNA, 25 bp, Saccharomyces pastorianus
ggcatttcatcacagtaccattggt

SEQ ID NO: 19087 - DNA, 25 bp, Saccharomyces pastorianus
tacgcatgaagaacctgaccgccaa

SEQ ID NO: 19088 - DNA, 25 bp, Saccharomyces pastorianus
ctacggaagatgattttggctgcca

SEQ ID NO: 19089 - DNA, 25 bp, Saccharomyces pastorianus
gagcttgacgtattgaacgccgtaa

SEQ ID NO: 19090 - DNA, 25 bp, Saccharomyces pastorianus
gcctcataactcacagcgggaatat

SEQ ID NO: 19091 - DNA, 25 bp, Saccharomyces pastorianus
gaatatgttattcccaacgtggttc

SEQ ID NO: 19092 - DNA, 25 bp, Saccharomyces pastorianus
attctgcctaatttgataccctcga

SEQ ID NO: 19093 - DNA, 25 bp, Saccharomyces pastorianus
agatcgagcccaccactgaaatatt

SEQ ID NO: 19094 - DNA, 25 bp, Saccharomyces pastorianus
atttgtattcttccgtgtttctcta

SEQ ID NO: 19095 - DNA, 25 bp, Saccharomyces pastorianus
gtgccattgagctagaacctgcgtt

SEQ ID NO: 19096 - DNA, 25 bp, Saccharomyces pastorianus
taaagccttcacacatgcaacacta

SEQ ID NO: 19097 - DNA, 25 bp, Saccharomyces pastorianus
aaatccgcagttcagtacgtgtcag

SEQ ID NO: 19098 - DNA, 25 bp, Saccharomyces pastorianus
tatagtgccccgacatggaactgtc

SEQ ID NO: 19099 - DNA, 25 bp, Saccharomyces pastorianus
aactttatgcatgtttccaccgaca

SEQ ID NO: 19100 - DNA, 25 bp, Saccharomyces pastorianus
tagtcactgcatcaacgttccaaga

SEQ ID NO: 19101 - DNA, 25 bp, Saccharomyces pastorianus
acatgtgcgataccacggcggattt

SEQ ID NO: 19102 - DNA, 25 bp, Saccharomyces pastorianus
aaagtgactactacggcgacctagt

SEQ ID NO: 19103 - DNA, 25 bp, Saccharomyces pastorianus
tacagccggctgttcgagatcgata

SEQ ID NO: 19104 - DNA, 25 bp, Saccharomyces pastorianus
caagccaagtttgccggattcacct

SEQ ID NO: 19105 - DNA, 25 bp, Saccharomyces pastorianus
ataatgacagctacgccactatcgc

SEQ ID NO: 19106 - DNA, 25 bp, Saccharomyces pastorianus
agtcaagttccccagagacgtgttg

SEQ ID NO: 19107 - DNA, 25 bp, Saccharomyces pastorianus
cccatccgtacttcgcagatattga

SEQ ID NO: 19108 - DNA, 25 bp, Saccharomyces pastorianus
caagcatagactgggcgccatcgat

SEQ ID NO: 19109 - DNA, 25 bp, Saccharomyces pastorianus
gacagcatccacctcgtatatgaac

SEQ ID NO: 19110 - DNA, 25 bp, Saccharomyces pastorianus
aacagcaattcacacatcgattttg

SEQ ID NO: 19111 - DNA, 25 bp, Saccharomyces pastorianus
gaagcagaagagaatcccaccacct

SEQ ID NO: 19112 - DNA, 25 bp, Saccharomyces pastorianus
tttgacccggagttcacgacagcat

SEQ ID NO: 19113 - DNA, 25 bp, Saccharomyces pastorianus
gattcacctttgtcgatgagtctgc

SEQ ID NO: 19114 - DNA, 25 bp, Saccharomyces pastorianus
gggagatcctttgtcaagggcctat

SEQ ID NO: 19115 - DNA, 25 bp, Saccharomyces pastorianus
gtaccacattcttcaatgggctcta

SEQ ID NO: 19116 - DNA, 25 bp, Saccharomyces pastorianus
atcaacaactgttccatgctcaaca

SEQ ID NO: 19117 - DNA, 25 bp, Saccharomyces pastorianus
gatttgattacctacttacagcatg

SEQ ID NO: 19118 - DNA, 25 bp, Saccharomyces pastorianus
gtgccacggctacatctatcgtaag

SEQ ID NO: 19119 - DNA, 25 bp, Saccharomyces pastorianus
atggtctttcggctatttcaacgct

SEQ ID NO: 19120 - DNA, 25 bp, Saccharomyces pastorianus
gctagaccagacgtatccataccga

SEQ ID NO: 19121 - DNA, 25 bp, Saccharomyces pastorianus
gtctgcgcagcacggtcaacaagaa

SEQ ID NO: 19122 - DNA, 25 bp, Saccharomyces pastorianus
ttggccaagccattcacgagagacg

SEQ ID NO: 19123 - DNA, 25 bp, Saccharomyces pastorianus
atgtaagcagcagttaccaccgcgc

SEQ ID NO: 19124 - DNA, 25 bp, Saccharomyces pastorianus
taatccgtctactacaacacctgtt

SEQ ID NO: 19125 - DNA, 25 bp, Saccharomyces pastorianus
ggatcgcattcctttatgtaagcag

SEQ ID NO: 19126 - DNA, 25 bp, Saccharomyces pastorianus
atgtcagtgtgaccgttgccgaaat

SEQ ID NO: 19127 - DNA, 25 bp, Saccharomyces pastorianus
gacactagtgacgatactcctggta

SEQ ID NO: 19128 - DNA, 25 bp, Saccharomyces pastorianus
aaaatcgtctatgcgggaggctcag

SEQ ID NO: 19129 - DNA, 25 bp, Saccharomyces pastorianus
cgttgccgaaatgagttgtctactt

SEQ ID NO: 19130 - DNA, 25 bp, Saccharomyces pastorianus
gcgtcacttacgtaaatcccttaca

SEQ ID NO: 19131 - DNA, 25 bp, Saccharomyces pastorianus
ttattctgtggtgctttccctaaag

SEQ ID NO: 19132 - DNA, 25 bp, Saccharomyces pastorianus
gaaagtgtgaccaccaatttggcta

SEQ ID NO: 19133 - DNA, 25 bp, Saccharomyces pastorianus
aaccatgattgggacgttcaacatt

SEQ ID NO: 19134 - DNA, 25 bp, Saccharomyces pastorianus
gagcaagtttgcgtcacttacgtaa

SEQ ID NO: 19135 - DNA, 25 bp, Saccharomyces pastorianus
ggctaaggttgattctgatgacact

SEQ ID NO: 19136 - DNA, 25 bp, Saccharomyces pastorianus
ttggcactcattcatgaaccacgat

SEQ ID NO: 19137 - DNA, 25 bp, Saccharomyces pastorianus
gaaagagttggttactgccccatta

SEQ ID NO: 19138 - DNA, 25 bp, Saccharomyces pastorianus
tttgaccaagcaagtcgcccaatgg

SEQ ID NO: 19139 - DNA, 25 bp, Saccharomyces pastorianus
cacttctccagttggtccttattac

SEQ ID NO: 19140 - DNA, 25 bp, Saccharomyces pastorianus
tatcaatgttccattattgcctggt

SEQ ID NO: 19141 - DNA, 25 bp, Saccharomyces pastorianus
tgccccattagacggtactatcttg

SEQ ID NO: 19142 - DNA, 25 bp, Saccharomyces pastorianus
ctgctgttgtctcaccaatcaagga

SEQ ID NO: 19143 - DNA, 25 bp, Saccharomyces pastorianus
gattctgttttgagtttggctcgtg

SEQ ID NO: 19144 - DNA, 25 bp, Saccharomyces pastorianus
tatgctccatgtatcttacctcaat

SEQ ID NO: 19145 - DNA, 25 bp, Saccharomyces pastorianus
agtcggcaccatgaacgtgttcttc

SEQ ID NO: 19146 - DNA, 25 bp, Saccharomyces pastorianus
gtgagcaatctggtgctttgaccaa

SEQ ID NO: 19147 - DNA, 25 bp, Saccharomyces pastorianus
tcttacctcaattgcaagctgctaa

SEQ ID NO: 19148 - DNA, 25 bp, Saccharomyces pastorianus
ggagcatatacgcttcttggattag

SEQ ID NO: 19149 - DNA, 25 bp, Saccharomyces pastorianus
gttatcagcgcggaggcaattcatt

SEQ ID NO: 19150 - DNA, 25 bp, Saccharomyces pastorianus
taacgcccttggtgaagacttatcc

SEQ ID NO: 19151 - DNA, 25 bp, Saccharomyces pastorianus
gcgataacttggacttacctttgaa

SEQ ID NO: 19152 - DNA, 25 bp, Saccharomyces pastorianus
aaaataaatttctctggcgcacaac

SEQ ID NO: 19153 - DNA, 25 bp, Saccharomyces pastorianus
gaaatgctacgttctttattaccag

SEQ ID NO: 19154 - DNA, 25 bp, Saccharomyces pastorianus
agaggcttgtcattgcgataacttg

SEQ ID NO: 19155 - DNA, 25 bp, Saccharomyces pastorianus
ggcgcacaactatcactttgacaca

SEQ ID NO: 19156 - DNA, 25 bp, Saccharomyces pastorianus
gatgtcgaggtctccatttataacc

SEQ ID NO: 19157 - DNA, 25 bp, Saccharomyces pastorianus
atttataacccttcagacccagata

SEQ ID NO: 19158 - DNA, 25 bp, Saccharomyces pastorianus
ggattttactccagaagcgtcaaat

SEQ ID NO: 19159 - DNA, 25 bp, Saccharomyces pastorianus
caattccaggtcaagctttgctatt

SEQ ID NO: 19160 - DNA, 25 bp, Saccharomyces pastorianus
cattcttgcaggttgggtttccgaa

SEQ ID NO: 19161 - DNA, 25 bp, Saccharomyces pastorianus
caccttacatgtcgctgatcttgaa

SEQ ID NO: 19162 - DNA, 25 bp, Saccharomyces pastorianus
tactcactggtgtacttggtcttcc

SEQ ID NO: 19163 - DNA, 25 bp, Saccharomyces pastorianus
ttgggtgcttccttttattgtttct

SEQ ID NO: 19164 - DNA, 25 bp, Saccharomyces pastorianus
aagcatgaatttctccacctttctt

SEQ ID NO: 19165 - DNA, 25 bp, Saccharomyces pastorianus
ggcagttgccacaaagttctactat

SEQ ID NO: 19166 - DNA, 25 bp, Saccharomyces pastorianus
tattgtttctttagtcgctttgcca

SEQ ID NO: 19167 - DNA, 25 bp, Saccharomyces pastorianus
aaattcggtgagatcgcgtgcgata

SEQ ID NO: 19168 - DNA, 25 bp, Saccharomyces pastorianus
ttacttggacactactactgatcta

SEQ ID NO: 19169 - DNA, 25 bp, Saccharomyces pastorianus
ggctcttctaggatttgcttgtttc

SEQ ID NO: 19170 - DNA, 25 bp, Saccharomyces pastorianus
tgcaggtaatgcgtctcaggtctct

SEQ ID NO: 19171 - DNA, 25 bp, Saccharomyces pastorianus
gaaatcaacgaagcctttgccgctc

SEQ ID NO: 19172 - DNA, 25 bp, Saccharomyces pastorianus
taacgtcacggcagaatcacttggg

SEQ ID NO: 19173 - DNA, 25 bp, Saccharomyces pastorianus
cagacggcacggttttccagaaaga

SEQ ID NO: 19174 - DNA, 25 bp, Saccharomyces pastorianus
gccgctcaagctttatactgtatcc

SEQ ID NO: 19175 - DNA, 25 bp, Saccharomyces pastorianus
tcaggtctctgatggtgtcgccggt

SEQ ID NO: 19176 - DNA, 25 bp, Saccharomyces pastorianus
ttgggagcatcaagcctgcgtttat

SEQ ID NO: 19177 - DNA, 25 bp, Saccharomyces pastorianus
aaccagttggatttgcccgtgctag

SEQ ID NO: 19178 - DNA, 25 bp, Saccharomyces pastorianus
gacagaggcactaccactgcaggta

SEQ ID NO: 19179 - DNA, 25 bp, Saccharomyces pastorianus
accggcgcaagacaagtggctacta

SEQ ID NO: 19180 - DNA, 25 bp, Saccharomyces pastorianus
agtaaaccccagaggtggtgccatc

SEQ ID NO: 19181 - DNA, 25 bp, Saccharomyces pastorianus
cattcattgaatttttggccatgtt

SEQ ID NO: 19182 - DNA, 25 bp, Saccharomyces pastorianus
gcggtcactcagtttcagacaggaa

SEQ ID NO: 19183 - DNA, 25 bp, Saccharomyces pastorianus
aagattgaaaatgcggtcactcagt

SEQ ID NO: 19184 - DNA, 25 bp, Saccharomyces pastorianus
ggtgaagaccacgtactgtttgaga

SEQ ID NO: 19185 - DNA, 25 bp, Saccharomyces pastorianus
gtcaaattcaagatcaatcgggcta

SEQ ID NO: 19186 - DNA, 25 bp, Saccharomyces pastorianus
tgatctctaaattgcgtgaagtaaa

SEQ ID NO: 19187 - DNA, 25 bp, Saccharomyces pastorianus
gatgctgttgatttattgatctcta

SEQ ID NO: 19188 - DNA, 25 bp, Saccharomyces pastorianus
gaaggactcggaaccattaagaaga

SEQ ID NO: 19189 - DNA, 25 bp, Saccharomyces pastorianus
aattggaatgccgtgaatttcagca

SEQ ID NO: 19190 - DNA, 25 bp, Saccharomyces pastorianus
ggtgaagatcccaatgacaaagaaa

SEQ ID NO: 19191 - DNA, 25 bp, Saccharomyces pastorianus
accaaactcaacgaaatcactgtga

SEQ ID NO: 19192 - DNA, 25 bp, Saccharomyces pastorianus
gtccctgtcattttcagcggtgaga

SEQ ID NO: 19193 - DNA, 25 bp, Saccharomyces pastorianus
cgtgggcgtaacaatagctctgata

SEQ ID NO: 19194 - DNA, 25 bp, Saccharomyces pastorianus
acacgatcaataccagtctgcacga

SEQ ID NO: 19195 - DNA, 25 bp, Saccharomyces pastorianus
gaagtggctgtgtccgtatatgaaa

SEQ ID NO: 19196 - DNA, 25 bp, Saccharomyces pastorianus
gaacaagatctcaagccctgcgagg

SEQ ID NO: 19197 - DNA, 25 bp, Saccharomyces pastorianus
gtaggtacgactgttggaattccaa

SEQ ID NO: 19198 - DNA, 25 bp, Saccharomyces pastorianus
gagccgcttatatcaatgtccctgt

SEQ ID NO: 19199 - DNA, 25 bp, Saccharomyces pastorianus
agaacactcctagtcgtcgagctaa

SEQ ID NO: 19200 - DNA, 25 bp, Saccharomyces pastorianus
atgtacccattgactttgacgcgca

SEQ ID NO: 19201 - DNA, 25 bp, Saccharomyces pastorianus
taaaaaaccacagggagccgcttat

SEQ ID NO: 19202 - DNA, 25 bp, Saccharomyces pastorianus
tacaccggcgtataggcgacaattg

SEQ ID NO: 19203 - DNA, 25 bp, Saccharomyces pastorianus
aacttctgcacctgcatcaacgacg

SEQ ID NO: 19204 - DNA, 25 bp, Saccharomyces pastorianus
tcatcctgggcaccttgcagaactt

SEQ ID NO: 19205 - DNA, 25 bp, Saccharomyces pastorianus
atgcagctgctcaccaagggcgccg

SEQ ID NO: 19206 - DNA, 25 bp, Saccharomyces pastorianus
tcatgggcgccgtgctcaaccaggg

SEQ ID NO: 19207 - DNA, 25 bp, Saccharomyces pastorianus
gtacgtcagggccatgcagctgctc

SEQ ID NO: 19208 - DNA, 25 bp, Saccharomyces pastorianus
gaatccgcaaacacgtcatgcacct

SEQ ID NO: 19209 - DNA, 25 bp, Saccharomyces pastorianus
gcatgaaagtgctccccaacttctg

SEQ ID NO: 19210 - DNA, 25 bp, Saccharomyces pastorianus
tacgacctgggcatgaaagtgctcc

SEQ ID NO: 19211 - DNA, 25 bp, Saccharomyces pastorianus
ccaccctcgctgtcagaaagaaact

SEQ ID NO: 19212 - DNA, 25 bp, Saccharomyces pastorianus
gcatcaacgacgtgctggactccag

SEQ ID NO: 19213 - DNA, 25 bp, Saccharomyces pastorianus
aaatgctcgccaacgtcgccagaat

SEQ ID NO: 19214 - DNA, 25 bp, Saccharomyces pastorianus
aggacctccgttgccaaagctagtt

SEQ ID NO: 19215 - DNA, 25 bp, Saccharomyces pastorianus
gcaactacatagctccgtcaaggac

SEQ ID NO: 19216 - DNA, 25 bp, Saccharomyces pastorianus
aaatacgccatcacagagctcagga

SEQ ID NO: 19217 - DNA, 25 bp, Saccharomyces pastorianus
ggatgcccagcaggataacagccac

SEQ ID NO: 19218 - DNA, 25 bp, Saccharomyces pastorianus
ataaactcagtaacgctggcgcctc

SEQ ID NO: 19219 - DNA, 25 bp, Saccharomyces pastorianus
caattattcacgacctatctcatac

SEQ ID NO: 19220 - DNA, 25 bp, Saccharomyces pastorianus
tgctcataaagctcccgacgaaaga

SEQ ID NO: 19221 - DNA, 25 bp, Saccharomyces pastorianus
ggcgcctcactagtgatcgattcaa

SEQ ID NO: 19222 - DNA, 25 bp, Saccharomyces pastorianus
aattcatcggccctcatggaagcaa

SEQ ID NO: 19223 - DNA, 25 bp, Saccharomyces pastorianus
cagtccataagttctctatcctggt

SEQ ID NO: 19224 - DNA, 25 bp, Saccharomyces pastorianus
tacagactccagacttgtttcgcaa

SEQ ID NO: 19225 - DNA, 25 bp, Saccharomyces pastorianus
tacttggaagacacacgttgacgaa

SEQ ID NO: 19226 - DNA, 25 bp, Saccharomyces pastorianus
ttcgtggttaagacatttcgcacat

SEQ ID NO: 19227 - DNA, 25 bp, Saccharomyces pastorianus
ggccgtgccaaggaatttgcagttt

SEQ ID NO: 19228 - DNA, 25 bp, Saccharomyces pastorianus
agtcattatacgatgctagcactaa

SEQ ID NO: 19229 - DNA, 25 bp, Saccharomyces pastorianus
ttgtcattgacgctacttcgtggtt

SEQ ID NO: 19230 - DNA, 25 bp, Saccharomyces pastorianus
gatgctattgctaggctgaaccaaa

SEQ ID NO: 19231 - DNA, 25 bp, Saccharomyces pastorianus
attgttcggtttactttgtcattga

SEQ ID NO: 19232 - DNA, 25 bp, Saccharomyces pastorianus
agaattacgctatttgagaggctca

SEQ ID NO: 19233 - DNA, 25 bp, Saccharomyces pastorianus
caaggtctgtgattactattaggca

SEQ ID NO: 19234 - DNA, 25 bp, Saccharomyces pastorianus
tcgcacatattttcaagttagccaa

SEQ ID NO: 19235 - DNA, 25 bp, Saccharomyces pastorianus
gtttacagggaatatagccacgcat

SEQ ID NO: 19236 - DNA, 25 bp, Saccharomyces pastorianus
gatttgatccgacccatgggaaaat

SEQ ID NO: 19237 - DNA, 25 bp, Saccharomyces pastorianus
gagaaagtcatcctggcaccttcaa

SEQ ID NO: 19238 - DNA, 25 bp, Saccharomyces pastorianus
aacgggactgattcaacgtctagga

SEQ ID NO: 19239 - DNA, 25 bp, Saccharomyces pastorianus
gagagtccaagaacaaccgcgttaa

SEQ ID NO: 19240 - DNA, 25 bp, Saccharomyces pastorianus
gagagtgctctccaaacgggactga

SEQ ID NO: 19241 - DNA, 25 bp, Saccharomyces pastorianus
gtagattctcaacctagtttataca

SEQ ID NO: 19242 - DNA, 25 bp, Saccharomyces pastorianus
aaagtgcttaagtcctctgttcccg

SEQ ID NO: 19243 - DNA, 25 bp, Saccharomyces pastorianus
gtcattaatgatctcctacagtaca

SEQ ID NO: 19244 - DNA, 25 bp, Saccharomyces pastorianus
gaagtacccgtaaaggtctctctga

SEQ ID NO: 19245 - DNA, 25 bp, Saccharomyces pastorianus
ctgttcccggcggagagtccaagaa

SEQ ID NO: 19246 - DNA, 25 bp, Saccharomyces pastorianus
aatccacagcattgagccgtgagct

SEQ ID NO: 19247 - DNA, 25 bp, Saccharomyces pastorianus
aaccctgatttttccgttgatgaat

SEQ ID NO: 19248 - DNA, 25 bp, Saccharomyces pastorianus
cttttctttctttggattcttctag

SEQ ID NO: 19249 - DNA, 25 bp, Saccharomyces pastorianus
atcaggtccttcaattcgcaatcgt

SEQ ID NO: 19250 - DNA, 25 bp, Saccharomyces pastorianus
tcgcaatcgtctttactagcttctt

SEQ ID NO: 19251 - DNA, 25 bp, Saccharomyces pastorianus
gataaacttcaattcggacggattc

SEQ ID NO: 19252 - DNA, 25 bp, Saccharomyces pastorianus
tgaccgctctgtacaggcctttgaa

SEQ ID NO: 19253 - DNA, 25 bp, Saccharomyces pastorianus
agagacacggttaactcggctacca

SEQ ID NO: 19254 - DNA, 25 bp, Saccharomyces pastorianus
atgaatgatttcttcctgaccgctc

SEQ ID NO: 19255 - DNA, 25 bp, Saccharomyces pastorianus
aagatctgtctttggaatacgtgca

SEQ ID NO: 19256 - DNA, 25 bp, Saccharomyces pastorianus
gtaacatactttgtcaccgcagcat

SEQ ID NO: 19257 - DNA, 25 bp, Saccharomyces pastorianus
gggcgtttcaatcactattgggata

SEQ ID NO: 19258 - DNA, 25 bp, Saccharomyces pastorianus
cgaaggttcgttggctggtcttgct

SEQ ID NO: 19259 - DNA, 25 bp, Saccharomyces pastorianus
gatacgtccattgatttaccggagg

SEQ ID NO: 19260 - DNA, 25 bp, Saccharomyces pastorianus
aaacattccaaacctggcatacgcc

SEQ ID NO: 19261 - DNA, 25 bp, Saccharomyces pastorianus
atacgcctcgccaagggaacgtaga

SEQ ID NO: 19262 - DNA, 25 bp, Saccharomyces pastorianus
ggtttccaaggatactcaagagatg

SEQ ID NO: 19263 - DNA, 25 bp, Saccharomyces pastorianus
gccggtgatgatgctgacaattctg

SEQ ID NO: 19264 - DNA, 25 bp, Saccharomyces pastorianus
atgtttaatccaaatctcttcgcac

SEQ ID NO: 19265 - DNA, 25 bp, Saccharomyces pastorianus
tttaccggaggctacatgtttaatc

SEQ ID NO: 19266 - DNA, 25 bp, Saccharomyces pastorianus
gggagaggctcaaacggtcacaaga

SEQ ID NO: 19267 - DNA, 25 bp, Saccharomyces pastorianus
gagacaagctttccttgtagatcaa

SEQ ID NO: 19268 - DNA, 25 bp, Saccharomyces pastorianus
aatgcattcttttactccttggttt

SEQ ID NO: 19269 - DNA, 25 bp, Saccharomyces pastorianus
agcagtcgtgagctcagcatccgaa

SEQ ID NO: 19270 - DNA, 25 bp, Saccharomyces pastorianus
gagtggacaacatcatccgtgccag

SEQ ID NO: 19271 - DNA, 25 bp, Saccharomyces pastorianus
aaagccgtggacactcaagcgcaaa

SEQ ID NO: 19272 - DNA, 25 bp, Saccharomyces pastorianus
aacagtcttaggtggcggttgcgcc

SEQ ID NO: 19273 - DNA, 25 bp, Saccharomyces pastorianus
gtgccttaagacagctgccaactat

SEQ ID NO: 19274 - DNA, 25 bp, Saccharomyces pastorianus
gtgctgtcccagaccactaaggaaa

SEQ ID NO: 19275 - DNA, 25 bp, Saccharomyces pastorianus
gaggtgccaccgaacagatgctaga

SEQ ID NO: 19276 - DNA, 25 bp, Saccharomyces pastorianus
atccgaagccgctgaggtgctatta

SEQ ID NO: 19277 - DNA, 25 bp, Saccharomyces pastorianus
tgagagatccttacacgacgcattg

SEQ ID NO: 19278 - DNA, 25 bp, Saccharomyces pastorianus
gaggcctgtaccatcgttttaagag

SEQ ID NO: 19279 - DNA, 25 bp, Saccharomyces pastorianus
aagtggtgtccacgttcgacgagcc

SEQ ID NO: 19280 - DNA, 25 bp, Saccharomyces pastorianus
cttgccagattctcgttctgtaaca

SEQ ID NO: 19281 - DNA, 25 bp, Saccharomyces pastorianus
ttaccagcagttcctgacggtgtca

SEQ ID NO: 19282 - DNA, 25 bp, Saccharomyces pastorianus
aactatttgacttggatgtgccgcc

SEQ ID NO: 19283 - DNA, 25 bp, Saccharomyces pastorianus
aaatggtaaccttcccttgccagat

SEQ ID NO: 19284 - DNA, 25 bp, Saccharomyces pastorianus
tacatggacagtgagccggccgtaa

SEQ ID NO: 19285 - DNA, 25 bp, Saccharomyces pastorianus
agatcttcttcagtttacatggaca

SEQ ID NO: 19286 - DNA, 25 bp, Saccharomyces pastorianus
ggtaagactttctgctgggttcaca

SEQ ID NO: 19287 - DNA, 25 bp, Saccharomyces pastorianus
acaatgtcaacctcgtcttctgatg

SEQ ID NO: 19288 - DNA, 25 bp, Saccharomyces pastorianus
gtacgatgacgcatttcagtcccaa

SEQ ID NO: 19289 - DNA, 25 bp, Saccharomyces pastorianus
cgttactttgtcttcattggaccca

SEQ ID NO: 19290 - DNA, 25 bp, Saccharomyces pastorianus
gatatacgggcgacttaccagcagt

SEQ ID NO: 19291 - DNA, 25 bp, Saccharomyces pastorianus
aagcattgtctgctaagaacgagca

SEQ ID NO: 19292 - DNA, 25 bp, Saccharomyces pastorianus
gaaaactacaccaagaagaatcaag

SEQ ID NO: 19293 - DNA, 25 bp, Saccharomyces pastorianus
gagcagttcgatcatgaagtagaaa

SEQ ID NO: 19294 - DNA, 25 bp, Saccharomyces pastorianus
ttggctgaagactcgaacaatttaa

SEQ ID NO: 19295 - DNA, 25 bp, Saccharomyces pastorianus
tggctgaaactaaacaattggctga

SEQ ID NO: 19296 - DNA, 25 bp, Saccharomyces pastorianus
aattagagcatcaattggctgaaac

SEQ ID NO: 19297 - DNA, 25 bp, Saccharomyces pastorianus
ctcgaacaatttaaggtctcataat

SEQ ID NO: 19298 - DNA, 25 bp, Saccharomyces pastorianus
actagaatctgaatcatggcaggaa

SEQ ID NO: 19299 - DNA, 25 bp, Saccharomyces pastorianus
aaacgagatcaaagcattgtctgct

SEQ ID NO: 19300 - DNA, 25 bp, Saccharomyces pastorianus
agaagcagacttgaactctgagcaa

SEQ ID NO: 19301 - DNA, 25 bp, Saccharomyces pastorianus
atgggcagaaagatcgttgctttag

SEQ ID NO: 19302 - DNA, 25 bp, Saccharomyces pastorianus
gcgttattcgggttcaactacaact

SEQ ID NO: 19303 - DNA, 25 bp, Saccharomyces pastorianus
gttcacggacaatttcgaccaatgg

SEQ ID NO: 19304 - DNA, 25 bp, Saccharomyces pastorianus
attccatccttgttgtagtgtctca

SEQ ID NO: 19305 - DNA, 25 bp, Saccharomyces pastorianus
gtcaaacacagctcttgtgccggta

SEQ ID NO: 19306 - DNA, 25 bp, Saccharomyces pastorianus
gaagcatttccttggtaatctttca

SEQ ID NO: 19307 - DNA, 25 bp, Saccharomyces pastorianus
ggatgacatctggacttctgttcaa

SEQ ID NO: 19308 - DNA, 25 bp, Saccharomyces pastorianus
aggcgaccgtctgcacaaggtgttg

SEQ ID NO: 19309 - DNA, 25 bp, Saccharomyces pastorianus
gtgccggtatcacgaaccacattgt

SEQ ID NO: 19310 - DNA, 25 bp, Saccharomyces pastorianus
aagtcgttcgggaattgatctggaa

SEQ ID NO: 19311 - DNA, 25 bp, Saccharomyces pastorianus
gaagggcactactacaggcgaccgt

SEQ ID NO: 19312 - DNA, 25 bp, Saccharomyces pastorianus
atgtttgttccagatgagccagaaa

SEQ ID NO: 19313 - DNA, 25 bp, Saccharomyces pastorianus
ctgcggcccaactttctaaggatga

SEQ ID NO: 19314 - DNA, 25 bp, Saccharomyces pastorianus
ggacagcaaccctttgaatcgtttg

SEQ ID NO: 19315 - DNA, 25 bp, Saccharomyces pastorianus
tggacggccaaggtcgacaacgaca

SEQ ID NO: 19316 - DNA, 25 bp, Saccharomyces pastorianus
aagaggaacgcgtcttcgcagccta

SEQ ID NO: 19317 - DNA, 25 bp, Saccharomyces pastorianus
gctggttcggttacaacaagggcga

SEQ ID NO: 19318 - DNA, 25 bp, Saccharomyces pastorianus
agcagtacggtagccattggtggtc

SEQ ID NO: 19319 - DNA, 25 bp, Saccharomyces pastorianus
aagaacgtgaacagcggtagtaccg

SEQ ID NO: 19320 - DNA, 25 bp, Saccharomyces pastorianus
gatgacttcattgtccaaagccaag

SEQ ID NO: 19321 - DNA, 25 bp, Saccharomyces pastorianus
aaacgtgtcggacgcgatgacttca

SEQ ID NO: 19322 - DNA, 25 bp, Saccharomyces pastorianus
gtacgacgacgccaaggacaaattt

SEQ ID NO: 19323 - DNA, 25 bp, Saccharomyces pastorianus
tagtgaggcccaaaggcgtctcaac

SEQ ID NO: 19324 - DNA, 25 bp, Saccharomyces pastorianus
caaacatcatgactgggaagcccaa

SEQ ID NO: 19325 - DNA, 25 bp, Saccharomyces pastorianus
tcaggcaccgtccattcgagaagaa

SEQ ID NO: 19326 - DNA, 25 bp, Saccharomyces pastorianus
gaagaccgcctatgcaaaatcacta

SEQ ID NO: 19327 - DNA, 25 bp, Saccharomyces pastorianus
aagcccaaatccaagttccatatcg

SEQ ID NO: 19328 - DNA, 25 bp, Saccharomyces pastorianus
acatgggctttaccaaccctttcat

SEQ ID NO: 19329 - DNA, 25 bp, Saccharomyces pastorianus
aaactagaatcgcagctggctccgt

SEQ ID NO: 19330 - DNA, 25 bp, Saccharomyces pastorianus
agcgctggcgccgtgctatcaagat

SEQ ID NO: 19331 - DNA, 25 bp, Saccharomyces pastorianus
ttatgaatacgccttctcacttgcc

SEQ ID NO: 19332 - DNA, 25 bp, Saccharomyces pastorianus
gtcaccatcaattgctgtcaacaca

SEQ ID NO: 19333 - DNA, 25 bp, Saccharomyces pastorianus
ggcagtgaaggcttttcgtctgaag

SEQ ID NO: 19334 - DNA, 25 bp, Saccharomyces pastorianus
aaatcactactcgttttcgtcatca

SEQ ID NO: 19335 - DNA, 25 bp, Saccharomyces pastorianus
gaaatcacctcctttggcaaaatgg

SEQ ID NO: 19336 - DNA, 25 bp, Saccharomyces pastorianus
gtctgcaaacctagtacgagccatt

SEQ ID NO: 19337 - DNA, 25 bp, Saccharomyces pastorianus
ggtattgttcctgcactatttggtg

SEQ ID NO: 19338 - DNA, 25 bp, Saccharomyces pastorianus
agggcccgagcaaatccagcataaa

SEQ ID NO: 19339 - DNA, 25 bp, Saccharomyces pastorianus
gctatcttgacgaaccctatctggg

SEQ ID NO: 19340 - DNA, 25 bp, Saccharomyces pastorianus
gtgtccagcgattgctacgaaccga

SEQ ID NO: 19341 - DNA, 25 bp, Saccharomyces pastorianus
agtggactgttgacggctatcttga

SEQ ID NO: 19342 - DNA, 25 bp, Saccharomyces pastorianus
gggctcttacacttccatatacaat

SEQ ID NO: 19343 - DNA, 25 bp, Saccharomyces pastorianus
attcgcttatctacttatctgctgg

SEQ ID NO: 19344 - DNA, 25 bp, Saccharomyces pastorianus
aatggtatctgtcactttggtctac

SEQ ID NO: 19345 - DNA, 25 bp, Saccharomyces pastorianus
aatgacggcttcctgggactttata

SEQ ID NO: 19346 - DNA, 25 bp, Saccharomyces pastorianus
agaggccaccttcacgagataatat

SEQ ID NO: 19347 - DNA, 25 bp, Saccharomyces pastorianus
agatacctcacctgataccgaaatt

SEQ ID NO: 19348 - DNA, 25 bp, Saccharomyces pastorianus
agaggttctaacagctttctttcaa

SEQ ID NO: 19349 - DNA, 25 bp, Saccharomyces pastorianus
atattcttggcgtatttgatcagct

SEQ ID NO: 19350 - DNA, 25 bp, Saccharomyces pastorianus
aacttccgcatgagtattgacaaca

SEQ ID NO: 19351 - DNA, 25 bp, Saccharomyces pastorianus
tttctttcaaccgatattgcacttg

SEQ ID NO: 19352 - DNA, 25 bp, Saccharomyces pastorianus
atgcttgatgctacagatgacgttt

SEQ ID NO: 19353 - DNA, 25 bp, Saccharomyces pastorianus
ggctttgctcaatggcagaggccac

SEQ ID NO: 19354 - DNA, 25 bp, Saccharomyces pastorianus
cagctagatgctcaactttttggga

SEQ ID NO: 19355 - DNA, 25 bp, Saccharomyces pastorianus
ttgcacttgatgataaccaccaacg

SEQ ID NO: 19356 - DNA, 25 bp, Saccharomyces pastorianus
aatagctccaatccagttatcacaa

SEQ ID NO: 19357 - DNA, 25 bp, Saccharomyces pastorianus
gcgatttgtttccacttttattgca

SEQ ID NO: 19358 - DNA, 25 bp, Saccharomyces pastorianus
caattacctgactgcgttatcgcta

SEQ ID NO: 19359 - DNA, 25 bp, Saccharomyces pastorianus
caagccagttagtgggtccgttcat

SEQ ID NO: 19360 - DNA, 25 bp, Saccharomyces pastorianus
gttgttaacattagttccctacaga

SEQ ID NO: 19361 - DNA, 25 bp, Saccharomyces pastorianus
ttcggtgatattttccagactctag

SEQ ID NO: 19362 - DNA, 25 bp, Saccharomyces pastorianus
ttatcccttgttcttccgcaaaaat

SEQ ID NO: 19363 - DNA, 25 bp, Saccharomyces pastorianus
gtattgaaacacactccaagccagt

SEQ ID NO: 19364 - DNA, 25 bp, Saccharomyces pastorianus
tagttccattatcgttatcccttgt

SEQ ID NO: 19365 - DNA, 25 bp, Saccharomyces pastorianus
ggtccgttcattagcgatttgtttc

SEQ ID NO: 19366 - DNA, 25 bp, Saccharomyces pastorianus
ttgtggtcccattaaattattgcct

SEQ ID NO: 19367 - DNA, 25 bp, Saccharomyces pastorianus
ggctagtgccggttttatctgataa

SEQ ID NO: 19368 - DNA, 25 bp, Saccharomyces pastorianus
gaagcgtcagaattccaagcaactt

SEQ ID NO: 19369 - DNA, 25 bp, Saccharomyces pastorianus
tcattctcccttagtgaagcgtcag

SEQ ID NO: 19370 - DNA, 25 bp, Saccharomyces pastorianus
cttctgctgttaatgggctgctgtt

SEQ ID NO: 19371 - DNA, 25 bp, Saccharomyces pastorianus
agtctcgaccatgaaggcggacaga

SEQ ID NO: 19372 - DNA, 25 bp, Saccharomyces pastorianus
aatgggctgctgttgagtcttttgc

SEQ ID NO: 19373 - DNA, 25 bp, Saccharomyces pastorianus
ttgacaccgggattggcccctgtag

SEQ ID NO: 19374 - DNA, 25 bp, Saccharomyces pastorianus
gaaggtactttgactgagcatgaaa

SEQ ID NO: 19375 - DNA, 25 bp, Saccharomyces pastorianus
ttgcccggcgttcctaaagtcagag

SEQ ID NO: 19376 - DNA, 25 bp, Saccharomyces pastorianus
aagagcgactagagcaactggcgaa

SEQ ID NO: 19377 - DNA, 25 bp, Saccharomyces pastorianus
cataggtacccaggtttgacaccgg

SEQ ID NO: 19378 - DNA, 25 bp, Saccharomyces pastorianus
gcgattctgctagagaccataggta

SEQ ID NO: 19379 - DNA, 25 bp, Saccharomyces pastorianus
agcaattgttacgtcatccactagc

SEQ ID NO: 19380 - DNA, 25 bp, Saccharomyces pastorianus
ctacgccagccaacttatttcatat

SEQ ID NO: 19381 - DNA, 25 bp, Saccharomyces pastorianus
taggcgataaaaccactgctttctt

SEQ ID NO: 19382 - DNA, 25 bp, Saccharomyces pastorianus
attcgctcaactacgtgactctttg

SEQ ID NO: 19383 - DNA, 25 bp, Saccharomyces pastorianus
gatcctcgctatctgagttttctga

SEQ ID NO: 19384 - DNA, 25 bp, Saccharomyces pastorianus
gcaaggcattgcatgtggtcgaaga

SEQ ID NO: 19385 - DNA, 25 bp, Saccharomyces pastorianus
gtaatttccaagtcgtgtatccaac

SEQ ID NO: 19386 - DNA, 25 bp, Saccharomyces pastorianus
tgaagaactacatcctttcccattc

SEQ ID NO: 19387 - DNA, 25 bp, Saccharomyces pastorianus
ggcgctattcttctctaagcaattg

SEQ ID NO: 19388 - DNA, 25 bp, Saccharomyces pastorianus
aacatcgtcagttccgtaagccttt

SEQ ID NO: 19389 - DNA, 25 bp, Saccharomyces pastorianus
acgtgactctttgaactcttatcca

SEQ ID NO: 19390 - DNA, 25 bp, Saccharomyces pastorianus
agtgctatttgttccctactgggta

SEQ ID NO: 19391 - DNA, 25 bp, Saccharomyces pastorianus
gtagtatctattccgcttccaaagc

SEQ ID NO: 19392 - DNA, 25 bp, Saccharomyces pastorianus
tgggccaacctcatgcgtttagtag

SEQ ID NO: 19393 - DNA, 25 bp, Saccharomyces pastorianus
gtcagagttgtacttttgccgcagt

SEQ ID NO: 19394 - DNA, 25 bp, Saccharomyces pastorianus
atgtcggctgaagcttacgccaagc

SEQ ID NO: 19395 - DNA, 25 bp, Saccharomyces pastorianus
taacattccccttcggtagtatcta

SEQ ID NO: 19396 - DNA, 25 bp, Saccharomyces pastorianus
gacccttacctgaaacttccatata

SEQ ID NO: 19397 - DNA, 25 bp, Saccharomyces pastorianus
actatcgttttcactggttctcttg

SEQ ID NO: 19398 - DNA, 25 bp, Saccharomyces pastorianus
aagagtcatcaacgccattactggc

SEQ ID NO: 19399 - DNA, 25 bp, Saccharomyces pastorianus
agtggatgccactgatgctgtagtt

SEQ ID NO: 19400 - DNA, 25 bp, Saccharomyces pastorianus
gtggccaccgacattcatgacaaaa

SEQ ID NO: 19401 - DNA, 25 bp, Saccharomyces pastorianus
gtaccgttcaaacactgacaccgat

SEQ ID NO: 19402 - DNA, 25 bp, Saccharomyces pastorianus
cattgaactttggtgccgggtcgac

SEQ ID NO: 19403 - DNA, 25 bp, Saccharomyces pastorianus
actctggcggttctgatggttgtac

SEQ ID NO: 19404 - DNA, 25 bp, Saccharomyces pastorianus
aaggtggtagctcgctgccattgac

SEQ ID NO: 19405 - DNA, 25 bp, Saccharomyces pastorianus
ggatcggtaactgggctccattgaa

SEQ ID NO: 19406 - DNA, 25 bp, Saccharomyces pastorianus
aagccgcctacgtcgtttctgaatt

SEQ ID NO: 19407 - DNA, 25 bp, Saccharomyces pastorianus
aagactcctacttcacctgggaagg

SEQ ID NO: 19408 - DNA, 25 bp, Saccharomyces pastorianus
ggtcgactgacggtatcacatactt

SEQ ID NO: 19409 - DNA, 25 bp, Saccharomyces pastorianus
gtcaaaattgttgccgccgatgatt

SEQ ID NO: 19410 - DNA, 25 bp, Saccharomyces pastorianus
gttgatccctaacccaaacaatggc

SEQ ID NO: 19411 - DNA, 25 bp, Saccharomyces pastorianus
tgactgttgtcgaccaagactccta

SEQ ID NO: 19412 - DNA, 25 bp, Saccharomyces pastorianus
gatgaattcaaaccccgagtcccag

SEQ ID NO: 19413 - DNA, 25 bp, Saccharomyces pastorianus
gctcgcaatatctctctttaaacca

SEQ ID NO: 19414 - DNA, 25 bp, Saccharomyces pastorianus
gtgtcggttacccacaaatgcatca

SEQ ID NO: 19415 - DNA, 25 bp, Saccharomyces pastorianus
agacacccgtgatgagctcgcaata

SEQ ID NO: 19416 - DNA, 25 bp, Saccharomyces pastorianus
ccatgcggaattctcaacacggttc

SEQ ID NO: 19417 - DNA, 25 bp, Saccharomyces pastorianus
agtccccgaggccacagaaggtata

SEQ ID NO: 19418 - DNA, 25 bp, Saccharomyces pastorianus
atatccgccgggtatgggaccgcaa

SEQ ID NO: 19419 - DNA, 25 bp, Saccharomyces pastorianus
caacatttccatggcgaacttccgg

SEQ ID NO: 19420 - DNA, 25 bp, Saccharomyces pastorianus
agatcggacatacccactgtatcag

SEQ ID NO: 19421 - DNA, 25 bp, Saccharomyces pastorianus
tgccggtgcctgcaaaccagtggat

SEQ ID NO: 19422 - DNA, 25 bp, Saccharomyces pastorianus
aaatgcatcagcaaccgggcgcata

SEQ ID NO: 19423 - DNA, 25 bp, Saccharomyces pastorianus
gaaacatcatcctcaaatcgcaaaa

SEQ ID NO: 19424 - DNA, 25 bp, Saccharomyces pastorianus
aagtagaaccctcattcatcagtcc

SEQ ID NO: 19425 - DNA, 25 bp, Saccharomyces pastorianus
gtggcagacgatgttcaatactatt

SEQ ID NO: 19426 - DNA, 25 bp, Saccharomyces pastorianus
attttcgttattgtcatcagcacca

SEQ ID NO: 19427 - DNA, 25 bp, Saccharomyces pastorianus
gaggccagccaaaaatactacccac

SEQ ID NO: 19428 - DNA, 25 bp, Saccharomyces pastorianus
accgcgggatccacaacagcaagaa

SEQ ID NO: 19429 - DNA, 25 bp, Saccharomyces pastorianus
ttcagtgctcactacggatatgatc

SEQ ID NO: 19430 - DNA, 25 bp, Saccharomyces pastorianus
catcgcctttctttcagcaaacaat

SEQ ID NO: 19431 - DNA, 25 bp, Saccharomyces pastorianus
taagtacgccagagcacattcggtc

SEQ ID NO: 19432 - DNA, 25 bp, Saccharomyces pastorianus
gagcacattcggtccagcatgaata

SEQ ID NO: 19433 - DNA, 25 bp, Saccharomyces pastorianus
aatgcctttacaactaccgcgggat

SEQ ID NO: 19434 - DNA, 25 bp, Saccharomyces pastorianus
caccagaggttatttcccggaagtg

SEQ ID NO: 19435 - DNA, 25 bp, Saccharomyces pastorianus
attactgaccactgtgaaggcgtta

SEQ ID NO: 19436 - DNA, 25 bp, Saccharomyces pastorianus
gcgattccttggagaacgtccagaa

SEQ ID NO: 19437 - DNA, 25 bp, Saccharomyces pastorianus
gcataatgctatgtttcagtatcga

SEQ ID NO: 19438 - DNA, 25 bp, Saccharomyces pastorianus
cgacagtaaacacatcacgctatct

SEQ ID NO: 19439 - DNA, 25 bp, Saccharomyces pastorianus
gcctgtggtaagacctcgttactga

SEQ ID NO: 19440 - DNA, 25 bp, Saccharomyces pastorianus
agtatcgattcacgcgattccttgg

SEQ ID NO: 19441 - DNA, 25 bp, Saccharomyces pastorianus
attcatgatatctttgtcgacagta

SEQ ID NO: 19442 - DNA, 25 bp, Saccharomyces pastorianus
gtcatattcagatacccaatgcata

SEQ ID NO: 19443 - DNA, 25 bp, Saccharomyces pastorianus
tcccggaagtgtacgaacccactgt

SEQ ID NO: 19444 - DNA, 25 bp, Saccharomyces pastorianus
gttactgaacgtcttcaccagaggt

SEQ ID NO: 19445 - DNA, 25 bp, Saccharomyces pastorianus
aactgtgaggctgtaccgtgcctaa

SEQ ID NO: 19446 - DNA, 25 bp, Saccharomyces pastorianus
ggaaattctgccctttgatgtagtt

SEQ ID NO: 19447 - DNA, 25 bp, Saccharomyces pastorianus
taaggcgcgcttatgacctgctgaa

SEQ ID NO: 19448 - DNA, 25 bp, Saccharomyces pastorianus
taccggtgggagcacgattccgaca

SEQ ID NO: 19449 - DNA, 25 bp, Saccharomyces pastorianus
aagacttgcagacgcaggtgccctc

SEQ ID NO: 19450 - DNA, 25 bp, Saccharomyces pastorianus
ggagcgcatctatctgttctcggag

SEQ ID NO: 19451 - DNA, 25 bp, Saccharomyces pastorianus
atcgggacggatctggccttgctaa

SEQ ID NO: 19452 - DNA, 25 bp, Saccharomyces pastorianus
tacactgccagtgtggactgtcgag

SEQ ID NO: 19453 - DNA, 25 bp, Saccharomyces pastorianus
tgaagttccaccacttgagcctaag

SEQ ID NO: 19454 - DNA, 25 bp, Saccharomyces pastorianus
tgtgcaaagtgtacccgaagggccc

SEQ ID NO: 19455 - DNA, 25 bp, Saccharomyces pastorianus
catcgagtactatcactaccggtgg

SEQ ID NO: 19456 - DNA, 25 bp, Saccharomyces pastorianus
gcctcacggaaaagacgcttcatga

SEQ ID NO: 19457 - DNA, 25 bp, Saccharomyces pastorianus
ccatggcatggatcaactgggatga

SEQ ID NO: 19458 - DNA, 25 bp, Saccharomyces pastorianus
gattcttaccgctgtactattacgt

SEQ ID NO: 19459 - DNA, 25 bp, Saccharomyces pastorianus
atttgctctcaaaggatggacattc

SEQ ID NO: 19460 - DNA, 25 bp, Saccharomyces pastorianus
acttggcctccctttggaatatgtt

SEQ ID NO: 19461 - DNA, 25 bp, Saccharomyces pastorianus
agatttgcaagtagcctcacggaaa

SEQ ID NO: 19462 - DNA, 25 bp, Saccharomyces pastorianus
gaagccagacattcccataacaata

SEQ ID NO: 19463 - DNA, 25 bp, Saccharomyces pastorianus
ttcgacggcgttgatttggatacta

SEQ ID NO: 19464 - DNA, 25 bp, Saccharomyces pastorianus
gaaatttcctgttgatccaacccac

SEQ ID NO: 19465 - DNA, 25 bp, Saccharomyces pastorianus
aacatcgtatgagcatatccactat

SEQ ID NO: 19466 - DNA, 25 bp, Saccharomyces pastorianus
aaatttattaatttgcccatggcat

SEQ ID NO: 19467 - DNA, 25 bp, Saccharomyces pastorianus
gactatgggcttcgagcactttggt

SEQ ID NO: 19468 - DNA, 25 bp, Saccharomyces pastorianus
gaagctgggttaccactacaaactg

SEQ ID NO: 19469 - DNA, 25 bp, Saccharomyces pastorianus
agtcgttttgcctcaacctctcaat

SEQ ID NO: 19470 - DNA, 25 bp, Saccharomyces pastorianus
cccgatgtctactcattgcatgata

SEQ ID NO: 19471 - DNA, 25 bp, Saccharomyces pastorianus
ttggcactcaggatattttcgacat

SEQ ID NO: 19472 - DNA, 25 bp, Saccharomyces pastorianus
atgctgttccggctttagtatttga

SEQ ID NO: 19473 - DNA, 25 bp, Saccharomyces pastorianus
aagtgaacctgttaaccatgcatct

SEQ ID NO: 19474 - DNA, 25 bp, Saccharomyces pastorianus
aagatggtgaaaccaccgccacagt

SEQ ID NO: 19475 - DNA, 25 bp, Saccharomyces pastorianus
aaccagctaagaaaccatgacgata

SEQ ID NO: 19476 - DNA, 25 bp, Saccharomyces pastorianus
gtgcctccgctttgaacattttaga

SEQ ID NO: 19477 - DNA, 25 bp, Saccharomyces pastorianus
ttgttccaagtgatcatcgtgcctc

SEQ ID NO: 19478 - DNA, 25 bp, Saccharomyces pastorianus
atggtggcggtacctccatttcaat

SEQ ID NO: 19479 - DNA, 25 bp, Saccharomyces pastorianus
ttacatggcaaaaactactctacgg

SEQ ID NO: 19480 - DNA, 25 bp, Saccharomyces pastorianus
gtaacgcaatttctaacacagtcaa

SEQ ID NO: 19481 - DNA, 25 bp, Saccharomyces pastorianus
taacgtgaatccactattggctaac

SEQ ID NO: 19482 - DNA, 25 bp, Saccharomyces pastorianus
aaaataccattgtctgcaccattaa

SEQ ID NO: 19483 - DNA, 25 bp, Saccharomyces pastorianus
ttgcaagtgactttctatcgaggaa

SEQ ID NO: 19484 - DNA, 25 bp, Saccharomyces pastorianus
aaatccaacgtagcttcttcgtcat

SEQ ID NO: 19485 - DNA, 25 bp, Saccharomyces pastorianus
atgggcccaaaaatactgttagtgc

SEQ ID NO: 19486 - DNA, 25 bp, Saccharomyces pastorianus
tccatcgtccaaggattgttccaaa

SEQ ID NO: 19487 - DNA, 25 bp, Saccharomyces pastorianus
agaatgatttgtcagatgggcccaa

SEQ ID NO: 19488 - DNA, 25 bp, Saccharomyces pastorianus
ttcttcgtcatcttcccagaatgat

SEQ ID NO: 19489 - DNA, 25 bp, Saccharomyces pastorianus
gttctaacaccgaatttcttacatg

SEQ ID NO: 19490 - DNA, 25 bp, Saccharomyces pastorianus
gtcattacctaacaccaacgattct

SEQ ID NO: 19491 - DNA, 25 bp, Saccharomyces pastorianus
gaacagtaattatgtggagtccaca

SEQ ID NO: 19492 - DNA, 25 bp, Saccharomyces pastorianus
gtgttacacgccaagcaaaatggta

SEQ ID NO: 19493 - DNA, 25 bp, Saccharomyces pastorianus
aacacatccatgtcgtcattaccta

SEQ ID NO: 19494 - DNA, 25 bp, Saccharomyces pastorianus
tgacatctactgcaagcttacaaga

SEQ ID NO: 19495 - DNA, 25 bp, Saccharomyces pastorianus
ttgggttttcaaggccgactcttat

SEQ ID NO: 19496 - DNA, 25 bp, Saccharomyces pastorianus
gtaccgtgacagaacattccagaaa

SEQ ID NO: 19497 - DNA, 25 bp, Saccharomyces pastorianus
gcaaatgataataaccccggtaacg

SEQ ID NO: 19498 - DNA, 25 bp, Saccharomyces pastorianus
cggatgctaaatttgtgttacacgc

SEQ ID NO: 19499 - DNA, 25 bp, Saccharomyces pastorianus
gagtccacaatcacacccaaattgg

SEQ ID NO: 19500 - DNA, 25 bp, Saccharomyces pastorianus
cgaatgcattgcttcgttcaacgaa

SEQ ID NO: 19501 - DNA, 25 bp, Saccharomyces pastorianus
aaaagtacttctgggtgatctcacc

SEQ ID NO: 19502 - DNA, 25 bp, Saccharomyces pastorianus
gagactggtcatacgagcattatta

SEQ ID NO: 19503 - DNA, 25 bp, Saccharomyces pastorianus
aaagcgtggacgtttgtgtactata

SEQ ID NO: 19504 - DNA, 25 bp, Saccharomyces pastorianus
atactactgaaagcgcttggaccat

SEQ ID NO: 19505 - DNA, 25 bp, Saccharomyces pastorianus
gttatgcccgcaaatatcgtttcta

SEQ ID NO: 19506 - DNA, 25 bp, Saccharomyces pastorianus
aggagagctctaagctacccgctac

SEQ ID NO: 19507 - DNA, 25 bp, Saccharomyces pastorianus
aacatttcgtttccacgacgtgtat

SEQ ID NO: 19508 - DNA, 25 bp, Saccharomyces pastorianus
acctcgtggttcatctctcagggta

SEQ ID NO: 19509 - DNA, 25 bp, Saccharomyces pastorianus
gacgtttctatcatcaagcttgcca

SEQ ID NO: 19510 - DNA, 25 bp, Saccharomyces pastorianus
aagcttgccatcataacgggtatca

SEQ ID NO: 19511 - DNA, 25 bp, Saccharomyces pastorianus
gatcttaatgagaacaccccgcagt

SEQ ID NO: 19512 - DNA, 25 bp, Saccharomyces pastorianus
gtagatcaatcaaactccaatggga

SEQ ID NO: 19513 - DNA, 25 bp, Saccharomyces pastorianus
tagtttttaacttccctcataatgg

SEQ ID NO: 19514 - DNA, 25 bp, Saccharomyces pastorianus
ggctatggcaatatcatcttgtctg

SEQ ID NO: 19515 - DNA, 25 bp, Saccharomyces pastorianus
gtcaagagcttcaaaatctccagaa

SEQ ID NO: 19516 - DNA, 25 bp, Saccharomyces pastorianus
gggaaccttacgattcatggcaaat

SEQ ID NO: 19517 - DNA, 25 bp, Saccharomyces pastorianus
gtttcggacaatcaacagactcagt

SEQ ID NO: 19518 - DNA, 25 bp, Saccharomyces pastorianus
ggaaaactttccagggtatcatcat

SEQ ID NO: 19519 - DNA, 25 bp, Saccharomyces pastorianus
gatgcttttcgttatacacagggtt

SEQ ID NO: 19520 - DNA, 25 bp, Saccharomyces pastorianus
gaatattccaatgttcttccaaatt

SEQ ID NO: 19521 - DNA, 25 bp, Saccharomyces pastorianus
gcgaaggaacgtgatgctagatttt

SEQ ID NO: 19522 - DNA, 25 bp, Saccharomyces pastorianus
gatgttccagtcatttgcaatcaag

SEQ ID NO: 19523 - DNA, 25 bp, Saccharomyces pastorianus
gcatgccgccttcgatattatcaga

SEQ ID NO: 19524 - DNA, 25 bp, Saccharomyces pastorianus
aaacgatgcctaccacaacagcgag

SEQ ID NO: 19525 - DNA, 25 bp, Saccharomyces pastorianus
gtataagtctgcctcagggtatggt

SEQ ID NO: 19526 - DNA, 25 bp, Saccharomyces pastorianus
gccaccaaaaccgttgcatttaaga

SEQ ID NO: 19527 - DNA, 25 bp, Saccharomyces pastorianus
gattattacagatcccattccccag

SEQ ID NO: 19528 - DNA, 25 bp, Saccharomyces pastorianus
gaaagaatttctagtgaagccaccg

SEQ ID NO: 19529 - DNA, 25 bp, Saccharomyces pastorianus
ggaagttggaacatcgtcgcagcat

SEQ ID NO: 19530 - DNA, 25 bp, Saccharomyces pastorianus
tgaagccaccgaaacgattgttgat

SEQ ID NO: 19531 - DNA, 25 bp, Saccharomyces pastorianus
acagcgagacccactctaaaatcga

SEQ ID NO: 19532 - DNA, 25 bp, Saccharomyces pastorianus
aagtctaatcgacagtccagcgtaa

SEQ ID NO: 19533 - DNA, 25 bp, Saccharomyces pastorianus
gagagaaggcgctatcacgactcct

SEQ ID NO: 19534 - DNA, 25 bp, Saccharomyces pastorianus
atattatccgatggtgctgctgcat

SEQ ID NO: 19535 - DNA, 25 bp, Saccharomyces pastorianus
tcacgactcctgatttaggcggtaa

SEQ ID NO: 19536 - DNA, 25 bp, Saccharomyces pastorianus
gtcttgtcccaaaccgatggtctat

SEQ ID NO: 19537 - DNA, 25 bp, Saccharomyces pastorianus
aacgaggctgcccaagacatttata

SEQ ID NO: 19538 - DNA, 25 bp, Saccharomyces pastorianus
gggcgaagccactttaacggtgaca

SEQ ID NO: 19539 - DNA, 25 bp, Saccharomyces pastorianus
gtggattccatggtctacagattgt

SEQ ID NO: 19540 - DNA, 25 bp, Saccharomyces pastorianus
gatagtcgcacctaacctatacggt

SEQ ID NO: 19541 - DNA, 25 bp, Saccharomyces pastorianus
gctgctgcattagtgggttctctgg

SEQ ID NO: 19542 - DNA, 25 bp, Saccharomyces pastorianus
gtcggccccgaaatagtcattggtg

SEQ ID NO: 19543 - DNA, 25 bp, Saccharomyces pastorianus
ctctgggtgttgttccaagtgccaa

SEQ ID NO: 19544 - DNA, 25 bp, Saccharomyces pastorianus
gcggaccatgcacttactcaaaaca

SEQ ID NO: 19545 - DNA, 25 bp, Saccharomyces pastorianus
gagcaatcctgctgggtcttggaag

SEQ ID NO: 19546 - DNA, 25 bp, Saccharomyces pastorianus
gttcggatccatcttcggagtttca

SEQ ID NO: 19547 - DNA, 25 bp, Saccharomyces pastorianus
ttcggagtttcatccatcgagcatg

SEQ ID NO: 19548 - DNA, 25 bp, Saccharomyces pastorianus
gaaagcgtcattcagcggaccatgc

SEQ ID NO: 19549 - DNA, 25 bp, Saccharomyces pastorianus
gcaagctaacgctaatggactttac

SEQ ID NO: 19550 - DNA, 25 bp, Saccharomyces pastorianus
aagcaacacccttgggagctgtcaa

SEQ ID NO: 19551 - DNA, 25 bp, Saccharomyces pastorianus
aggacgacgctacattggacacggc

SEQ ID NO: 19552 - DNA, 25 bp, Saccharomyces pastorianus
ggaggacaggcttagagttcttttt

SEQ ID NO: 19553 - DNA, 25 bp, Saccharomyces pastorianus
gaggcatacgaccacgcaagatacg

SEQ ID NO: 19554 - DNA, 25 bp, Saccharomyces pastorianus
attggagccatatgcctcaactagg

SEQ ID NO: 19555 - DNA, 25 bp, Saccharomyces pastorianus
atgcctttttgggtaacactgattt

SEQ ID NO: 19556 - DNA, 25 bp, Saccharomyces pastorianus
aattagacggtctttcactggaaag

SEQ ID NO: 19557 - DNA, 25 bp, Saccharomyces pastorianus
cagtattgtcaaatctacgggctat

SEQ ID NO: 19558 - DNA, 25 bp, Saccharomyces pastorianus
atatccactgttaggtgtgtttaca

SEQ ID NO: 19559 - DNA, 25 bp, Saccharomyces pastorianus
gacgacgattctgtttggcgatata

SEQ ID NO: 19560 - DNA, 25 bp, Saccharomyces pastorianus
taagccaccaaataatccagagttt

SEQ ID NO: 19561 - DNA, 25 bp, Saccharomyces pastorianus
aagtgttattattcccagtattgtc

SEQ ID NO: 19562 - DNA, 25 bp, Saccharomyces pastorianus
gatcactatttcaacaaggccgcgt

SEQ ID NO: 19563 - DNA, 25 bp, Saccharomyces pastorianus
atagaaccagaaacctccagtatcg

SEQ ID NO: 19564 - DNA, 25 bp, Saccharomyces pastorianus
caaggccgcgtgaaagttctgttat

SEQ ID NO: 19565 - DNA, 25 bp, Saccharomyces pastorianus
gattcaagttcttcacaagtgttat

SEQ ID NO: 19566 - DNA, 25 bp, Saccharomyces pastorianus
agtccctgtatactgattgctatgt

SEQ ID NO: 19567 - DNA, 25 bp, Saccharomyces pastorianus
gggttctggaactggtgcaatattt

SEQ ID NO: 19568 - DNA, 25 bp, Saccharomyces pastorianus
ggaagacagctagcgatctccatga

SEQ ID NO: 19569 - DNA, 25 bp, Saccharomyces pastorianus
aatctactgtgctatttccataacg

SEQ ID NO: 19570 - DNA, 25 bp, Saccharomyces pastorianus
gattttgcagtattccggtgagtta

SEQ ID NO: 19571 - DNA, 25 bp, Saccharomyces pastorianus
gtgaatcagtatcaccagccatagt

SEQ ID NO: 19572 - DNA, 25 bp, Saccharomyces pastorianus
ttgcctacggcggataatctactgt

SEQ ID NO: 19573 - DNA, 25 bp, Saccharomyces pastorianus
ggcaacaaggattatccccgcttta

SEQ ID NO: 19574 - DNA, 25 bp, Saccharomyces pastorianus
aacgaattttgccaagtcacgatta

SEQ ID NO: 19575 - DNA, 25 bp, Saccharomyces pastorianus
cttcagtgttccgttatccatcaac

SEQ ID NO: 19576 - DNA, 25 bp, Saccharomyces pastorianus
atggtttggaccagatcagccagaa

SEQ ID NO: 19577 - DNA, 25 bp, Saccharomyces pastorianus
gatttcattcactctacctggttta

SEQ ID NO: 19578 - DNA, 25 bp, Saccharomyces pastorianus
gaacatcacgcaccattcgttaagt

SEQ ID NO: 19579 - DNA, 25 bp, Saccharomyces pastorianus
ggagccacaggttcaacgtcgattt

SEQ ID NO: 19580 - DNA, 25 bp, Saccharomyces pastorianus
gtcgtttgcattggttctttcatta

SEQ ID NO: 19581 - DNA, 25 bp, Saccharomyces pastorianus
aatctaatgcgttggctaccgatgc

SEQ ID NO: 19582 - DNA, 25 bp, Saccharomyces pastorianus
tgtacactctagcattatccgtcca

SEQ ID NO: 19583 - DNA, 25 bp, Saccharomyces pastorianus
gaggcactatggcagtccctgtaga

SEQ ID NO: 19584 - DNA, 25 bp, Saccharomyces pastorianus
ggaaacctcgacaatggctcaatag

SEQ ID NO: 19585 - DNA, 25 bp, Saccharomyces pastorianus
atctggctcgaaatcacttttggca

SEQ ID NO: 19586 - DNA, 25 bp, Saccharomyces pastorianus
tttattccagccattacgcgtagca

SEQ ID NO: 19587 - DNA, 25 bp, Saccharomyces pastorianus
taattggttctgactcgttagctgt

SEQ ID NO: 19588 - DNA, 25 bp, Saccharomyces pastorianus
gaaggtgcctccagtcaaaaagtcc

SEQ ID NO: 19589 - DNA, 25 bp, Saccharomyces pastorianus
gtttattgctacatggtctaccttg

SEQ ID NO: 19590 - DNA, 25 bp, Saccharomyces pastorianus
agtcccactactgatgaagctaagg

SEQ ID NO: 19591 - DNA, 25 bp, Saccharomyces pastorianus
atgagctactttcaccatttcgctg

SEQ ID NO: 19592 - DNA, 25 bp, Saccharomyces pastorianus
gatcatctacacctcgagttggtat

SEQ ID NO: 19593 - DNA, 25 bp, Saccharomyces pastorianus
agtgctgtccccatctttgaaggtg

SEQ ID NO: 19594 - DNA, 25 bp, Saccharomyces pastorianus
tatcgtccttatcattggccaacgc

SEQ ID NO: 19595 - DNA, 25 bp, Saccharomyces pastorianus
gtataagtgctaagaccgccctttt

SEQ ID NO: 19596 - DNA, 25 bp, Saccharomyces pastorianus
caatgtccagggtattttccagatc

SEQ ID NO: 19597 - DNA, 25 bp, Saccharomyces pastorianus
atttcgctggttatacgctttgaca

SEQ ID NO: 19598 - DNA, 25 bp, Saccharomyces pastorianus
ttggccgttagtgctatcgtcctta

SEQ ID NO: 19599 - DNA, 25 bp, Saccharomyces pastorianus
gcccctgcatggacattttctttga

SEQ ID NO: 19600 - DNA, 25 bp, Saccharomyces pastorianus
gcgcccatccattcgattggtttag

SEQ ID NO: 19601 - DNA, 25 bp, Saccharomyces pastorianus
gcaagattttccaggctgctacaag

SEQ ID NO: 19602 - DNA, 25 bp, Saccharomyces pastorianus
gattctggacctagaagacgttcat

SEQ ID NO: 19603 - DNA, 25 bp, Saccharomyces pastorianus
gacattcgtcgttacaacattgccc

SEQ ID NO: 19604 - DNA, 25 bp, Saccharomyces pastorianus
gctgctacaagccttccataaaaga

SEQ ID NO: 19605 - DNA, 25 bp, Saccharomyces pastorianus
gaaagggcgcgctctaagataccat

SEQ ID NO: 19606 - DNA, 25 bp, Saccharomyces pastorianus
tcgaggataattctagcccctgcat

SEQ ID NO: 19607 - DNA, 25 bp, Saccharomyces pastorianus
tatggcttcggatctggatgccgat

SEQ ID NO: 19608 - DNA, 25 bp, Saccharomyces pastorianus
atgccgatgcgtctgtcccaagaat

SEQ ID NO: 19609 - DNA, 25 bp, Saccharomyces pastorianus
acaacttgtgccatttttggagcaa

SEQ ID NO: 19610 - DNA, 25 bp, Saccharomyces pastorianus
agaaaagccgcggtgctcaacgata

SEQ ID NO: 19611 - DNA, 25 bp, Saccharomyces pastorianus
gacctttacgcattcttatttggag

SEQ ID NO: 19612 - DNA, 25 bp, Saccharomyces pastorianus
gactactgatggacgtagccaacgt

SEQ ID NO: 19613 - DNA, 25 bp, Saccharomyces pastorianus
gagtacggtaaagacacggccaacg

SEQ ID NO: 19614 - DNA, 25 bp, Saccharomyces pastorianus
tttaacaacccagcttacaagtcag

SEQ ID NO: 19615 - DNA, 25 bp, Saccharomyces pastorianus
aagtggttgggactcttcatccaat

SEQ ID NO: 19616 - DNA, 25 bp, Saccharomyces pastorianus
aatgaaggcaccgacctttacgcat

SEQ ID NO: 19617 - DNA, 25 bp, Saccharomyces pastorianus
aaagtgccaccgacacaggtgcggg

SEQ ID NO: 19618 - DNA, 25 bp, Saccharomyces pastorianus
caacgtccattcctatgccatgaat

SEQ ID NO: 19619 - DNA, 25 bp, Saccharomyces pastorianus
aaggatctcagttcccacactttaa

SEQ ID NO: 19620 - DNA, 25 bp, Saccharomyces pastorianus
atggcgtctgattcggatttcttac

SEQ ID NO: 19621 - DNA, 25 bp, Saccharomyces pastorianus
gaagtcattacacgccatgatcaat

SEQ ID NO: 19622 - DNA, 25 bp, Saccharomyces pastorianus
gttatcggaaacctgcttcagacaa

SEQ ID NO: 19623 - DNA, 25 bp, Saccharomyces pastorianus
gatcctgttcctaagttcctaagaa

SEQ ID NO: 19624 - DNA, 25 bp, Saccharomyces pastorianus
gttgtctattctacttggctgcagc

SEQ ID NO: 19625 - DNA, 25 bp, Saccharomyces pastorianus
gccatgatcgtttcctttaagctag

SEQ ID NO: 19626 - DNA, 25 bp, Saccharomyces pastorianus
tatacaagtctacacaggctctgga

SEQ ID NO: 19627 - DNA, 25 bp, Saccharomyces pastorianus
gatgaatccatgctgttatacaagt

SEQ ID NO: 19628 - DNA, 25 bp, Saccharomyces pastorianus
gactggtggaatcatgggcaactca

SEQ ID NO: 19629 - DNA, 25 bp, Saccharomyces pastorianus
ggctgcagccgtcagtgattttttc

SEQ ID NO: 19630 - DNA, 25 bp, Saccharomyces pastorianus
gattttttcgttccatactcaagat

SEQ ID NO: 19631 - DNA, 25 bp, Saccharomyces pastorianus
gatagttaacctggatcctgttcct

SEQ ID NO: 19632 - DNA, 25 bp, Saccharomyces pastorianus
gagctcaaacagcactatttcgacg

SEQ ID NO: 19633 - DNA, 25 bp, Saccharomyces pastorianus
gccattttggagacgactgtgcaga

SEQ ID NO: 19634 - DNA, 25 bp, Saccharomyces pastorianus
acggaagtgcgttttgcggcgataa

SEQ ID NO: 19635 - DNA, 25 bp, Saccharomyces pastorianus
gaagaagacaccatttagcccacac

SEQ ID NO: 19636 - DNA, 25 bp, Saccharomyces pastorianus
atgagtacccaagccattccaacta

SEQ ID NO: 19637 - DNA, 25 bp, Saccharomyces pastorianus
gatgcatatgactacccaggttcta

SEQ ID NO: 19638 - DNA, 25 bp, Saccharomyces pastorianus
ggacaacgaccagcaattcaacttc

SEQ ID NO: 19639 - DNA, 25 bp, Saccharomyces pastorianus
aacagggctcaatcatccagaaata

SEQ ID NO: 19640 - DNA, 25 bp, Saccharomyces pastorianus
gcggcgataatctagctatggagct

SEQ ID NO: 19641 - DNA, 25 bp, Saccharomyces pastorianus
aaaaatgtgcatgcgcatcccttag

SEQ ID NO: 19642 - DNA, 25 bp, Saccharomyces pastorianus
gatcgtctagagtgccgaacacaga

SEQ ID NO: 19643 - DNA, 25 bp, Saccharomyces pastorianus
gaccagttatgattcatcgtgccat

SEQ ID NO: 19644 - DNA, 25 bp, Saccharomyces pastorianus
tgccattttgggttccgttgaaaga

SEQ ID NO: 19645 - DNA, 25 bp, Saccharomyces pastorianus
gaatacgccgaagatgtccgcaacc

SEQ ID NO: 19646 - DNA, 25 bp, Saccharomyces pastorianus
aggcttctatgctgatgtcgacttg

SEQ ID NO: 19647 - DNA, 25 bp, Saccharomyces pastorianus
gtcgacttgactggtaacactctac

SEQ ID NO: 19648 - DNA, 25 bp, Saccharomyces pastorianus
atctccacgtcaagtcttggttgtc

SEQ ID NO: 19649 - DNA, 25 bp, Saccharomyces pastorianus
tcttggttgtcccagttggtgtgaa

SEQ ID NO: 19650 - DNA, 25 bp, Saccharomyces pastorianus
tgccaccgtttctgtcgaagaggtt

SEQ ID NO: 19651 - DNA, 25 bp, Saccharomyces pastorianus
taagtggccattctggttatctcca

SEQ ID NO: 19652 - DNA, 25 bp, Saccharomyces pastorianus
aatcaacgccggtgatggtgctttc

SEQ ID NO: 19653 - DNA, 25 bp, Saccharomyces pastorianus
gcaaccaattacacgacgcaggctt

SEQ ID NO: 19654 - DNA, 25 bp, Saccharomyces pastorianus
gaacaaatactcttcgaagccttat

SEQ ID NO: 19655 - DNA, 25 bp, Saccharomyces pastorianus
atatttctttcatcaaggacgacag

SEQ ID NO: 19656 - DNA, 25 bp, Saccharomyces pastorianus
gatgtattcagctatccaaagatgt

SEQ ID NO: 19657 - DNA, 25 bp, Saccharomyces pastorianus
tccctatcttttactccaacaacag

SEQ ID NO: 19658 - DNA, 25 bp, Saccharomyces pastorianus
caacaacagttatcggtatccgcgg

SEQ ID NO: 19659 - DNA, 25 bp, Saccharomyces pastorianus
taatatgactcgtatactgccccag

SEQ ID NO: 19660 - DNA, 25 bp, Saccharomyces pastorianus
gatgtacgaggaagccagtggtaaa

SEQ ID NO: 19661 - DNA, 25 bp, Saccharomyces pastorianus
gttctttccaccactgcaagagcaa

SEQ ID NO: 19662 - DNA, 25 bp, Saccharomyces pastorianus
gtatccgcggtaatgaccaaactat

SEQ ID NO: 19663 - DNA, 25 bp, Saccharomyces pastorianus
aaaaggtagctactgctgttctttc

SEQ ID NO: 19664 - DNA, 25 bp, Saccharomyces pastorianus
gtatactgccccagcaatcaagata

SEQ ID NO: 19665 - DNA, 25 bp, Saccharomyces pastorianus
ttgccaaatattatcctgaccccac

SEQ ID NO: 19666 - DNA, 25 bp, Saccharomyces pastorianus
gtactgtggtagatatcccggcttt

SEQ ID NO: 19667 - DNA, 25 bp, Saccharomyces pastorianus
ggagcagctctggatgtttacccac

SEQ ID NO: 19668 - DNA, 25 bp, Saccharomyces pastorianus
aggtaacaccgtgggctctgtgaat

SEQ ID NO: 19669 - DNA, 25 bp, Saccharomyces pastorianus
ttacccacatgaacctgccaaaaat

SEQ ID NO: 19670 - DNA, 25 bp, Saccharomyces pastorianus
tcaacgcttcgagaggtactgtggt

SEQ ID NO: 19671 - DNA, 25 bp, Saccharomyces pastorianus
atatcccggctttggttcaagctaa

SEQ ID NO: 19672 - DNA, 25 bp, Saccharomyces pastorianus
tgatggccgatatctcttctgttaa

SEQ ID NO: 19673 - DNA, 25 bp, Saccharomyces pastorianus
tccgaactggtttccttgccaaata

SEQ ID NO: 19674 - DNA, 25 bp, Saccharomyces pastorianus
gaaagacggcgcatatgtgatcaac

SEQ ID NO: 19675 - DNA, 25 bp, Saccharomyces pastorianus
gtgaaatcgcctatttgatggccga

SEQ ID NO: 19676 - DNA, 25 bp, Saccharomyces pastorianus
tattgcatttcactaccagttcacc

SEQ ID NO: 19677 - DNA, 25 bp, Saccharomyces pastorianus
ggtatgtcacgaattctgttcttgt

SEQ ID NO: 19678 - DNA, 25 bp, Saccharomyces pastorianus
atgtatgttgagactctttctccct

SEQ ID NO: 19679 - DNA, 25 bp, Saccharomyces pastorianus
taccagttcacccaaagccggaagc

SEQ ID NO: 19680 - DNA, 25 bp, Saccharomyces pastorianus
ggatgaaacactctgcctggataat

SEQ ID NO: 19681 - DNA, 25 bp, Saccharomyces pastorianus
gccctatttgtcttctttttggatg

SEQ ID NO: 19682 - DNA, 25 bp, Saccharomyces pastorianus
gatagctttattcacctcgaggatc

SEQ ID NO: 19683 - DNA, 25 bp, Saccharomyces pastorianus
tcaattcaagccttccaactcaaga

SEQ ID NO: 19684 - DNA, 25 bp, Saccharomyces pastorianus
ttgcaagagcttgacctcaattcaa

SEQ ID NO: 19685 - DNA, 25 bp, Saccharomyces pastorianus
aaagagttgctttcgccctatttgt

SEQ ID NO: 19686 - DNA, 25 bp, Saccharomyces pastorianus
gaaagagaggcttcccagcttccat

SEQ ID NO: 19687 - DNA, 25 bp, Saccharomyces pastorianus
atgtgttctttgacgttgcccaaat

SEQ ID NO: 19688 - DNA, 25 bp, Saccharomyces pastorianus
agagagctagtataccacggtccac

SEQ ID NO: 19689 - DNA, 25 bp, Saccharomyces pastorianus
atatcgacgccttatcagacaactt

SEQ ID NO: 19690 - DNA, 25 bp, Saccharomyces pastorianus
gtatccctctgttgatgctgctttg

SEQ ID NO: 19691 - DNA, 25 bp, Saccharomyces pastorianus
gggaaaccgttcatgtgttctttga

SEQ ID NO: 19692 - DNA, 25 bp, Saccharomyces pastorianus
aactgaaccagctgtctcatttgag

SEQ ID NO: 19693 - DNA, 25 bp, Saccharomyces pastorianus
gacaactttgctaacgtcaacgtcg

SEQ ID NO: 19694 - DNA, 25 bp, Saccharomyces pastorianus
cacggtccaccattttctaacttgg

SEQ ID NO: 19695 - DNA, 25 bp, Saccharomyces pastorianus
atctgccgaggctgagatttcaaga

SEQ ID NO: 19696 - DNA, 25 bp, Saccharomyces pastorianus
attctatgtcgatagtgctaccccg

SEQ ID NO: 19697 - DNA, 25 bp, Saccharomyces pastorianus
acgttgccagaatcaacttcgttgg

SEQ ID NO: 19698 - DNA, 25 bp, Saccharomyces pastorianus
tcactccttgtcatggcatctgaat

SEQ ID NO: 19699 - DNA, 25 bp, Saccharomyces pastorianus
tgcttctgtacggtccccaacaaaa

SEQ ID NO: 19700 - DNA, 25 bp, Saccharomyces pastorianus
agggtgtgcgacaagaggctcctca

SEQ ID NO: 19701 - DNA, 25 bp, Saccharomyces pastorianus
aggagcgtctttgaagccaccaatt

SEQ ID NO: 19702 - DNA, 25 bp, Saccharomyces pastorianus
tctcgacgcctctaacggaacaata

SEQ ID NO: 19703 - DNA, 25 bp, Saccharomyces pastorianus
gtagcgttaggatccttgccaggac

SEQ ID NO: 19704 - DNA, 25 bp, Saccharomyces pastorianus
gttcagtgctcgttccagggtgtgc

SEQ ID NO: 19705 - DNA, 25 bp, Saccharomyces pastorianus
ttcgacgatcagaatcactccttgt

SEQ ID NO: 19706 - DNA, 25 bp, Saccharomyces pastorianus
gagtgcatcactacattttgggttc

SEQ ID NO: 19707 - DNA, 25 bp, Saccharomyces pastorianus
ggctcctcagcatatttgtttcaag

SEQ ID NO: 19708 - DNA, 25 bp, Saccharomyces pastorianus
gacacagtcagcatcgataatcttc

SEQ ID NO: 19709 - DNA, 25 bp, Saccharomyces pastorianus
gcgagtactctatggccaagcgata

SEQ ID NO: 19710 - DNA, 25 bp, Saccharomyces pastorianus
gcccacgctgaaggacgcatacgaa

SEQ ID NO: 19711 - DNA, 25 bp, Saccharomyces pastorianus
gggcctgatcaagtccacagacgtg

SEQ ID NO: 19712 - DNA, 25 bp, Saccharomyces pastorianus
gacgggagtgcttgtactacctgac

SEQ ID NO: 19713 - DNA, 25 bp, Saccharomyces pastorianus
actacctgacgatcggctgctacaa

SEQ ID NO: 19714 - DNA, 25 bp, Saccharomyces pastorianus
aaatactgcgccagcaggtggtctc

SEQ ID NO: 19715 - DNA, 25 bp, Saccharomyces pastorianus
aaggtcctcacggatatctacaagg

SEQ ID NO: 19716 - DNA, 25 bp, Saccharomyces pastorianus
gacgaagatcgatttctggcccacg

SEQ ID NO: 19717 - DNA, 25 bp, Saccharomyces pastorianus
gaacggctcggcgtgaaggtcctca

SEQ ID NO: 19718 - DNA, 25 bp, Saccharomyces pastorianus
tatgtagacactctcttcgaacacg

SEQ ID NO: 19719 - DNA, 25 bp, Saccharomyces pastorianus
gctgctacaagctgggcgagtactc

SEQ ID NO: 19720 - DNA, 25 bp, Saccharomyces pastorianus
aagcgacgcagcaagacctctcaaa

SEQ ID NO: 19721 - DNA, 25 bp, Saccharomyces pastorianus
aaagacgtcagaagccccaagcgac

SEQ ID NO: 19722 - DNA, 25 bp, Saccharomyces pastorianus
gagtgcatataccaagtcaacgcta

SEQ ID NO: 19723 - DNA, 25 bp, Saccharomyces pastorianus
attggtcaaagggttcaccgtgcaa

SEQ ID NO: 19724 - DNA, 25 bp, Saccharomyces pastorianus
tcttcatcggcgtccaatacaacta

SEQ ID NO: 19725 - DNA, 25 bp, Saccharomyces pastorianus
ggattcaccggttcgttgcaaagcg

SEQ ID NO: 19726 - DNA, 25 bp, Saccharomyces pastorianus
acccgtatagtcatgagatcccgtg

SEQ ID NO: 19727 - DNA, 25 bp, Saccharomyces pastorianus
gatcccgtggtatcttgaaagtcat

SEQ ID NO: 19728 - DNA, 25 bp, Saccharomyces pastorianus
cataagattgttggccgtggacgac

SEQ ID NO: 19729 - DNA, 25 bp, Saccharomyces pastorianus
aaactgtaccagctctccaagatag

SEQ ID NO: 19730 - DNA, 25 bp, Saccharomyces pastorianus
aacagcgactctgagcagcgggcaa

SEQ ID NO: 19731 - DNA, 25 bp, Saccharomyces pastorianus
gaaacagggtggtgtcttgcttgct

SEQ ID NO: 19732 - DNA, 25 bp, Saccharomyces pastorianus
aatcaattgcgttcgctggccacga

SEQ ID NO: 19733 - DNA, 25 bp, Saccharomyces pastorianus
acagtatttcgtgagcgtgcttgaa

SEQ ID NO: 19734 - DNA, 25 bp, Saccharomyces pastorianus
tcaaggctttgaacgactcccagaa

SEQ ID NO: 19735 - DNA, 25 bp, Saccharomyces pastorianus
ttgacacaggtcagacaggccgata

SEQ ID NO: 19736 - DNA, 25 bp, Saccharomyces pastorianus
aattacccaagtcagcggtgtcacg

SEQ ID NO: 19737 - DNA, 25 bp, Saccharomyces pastorianus
caggccgatattggtaacgtagtca

SEQ ID NO: 19738 - DNA, 25 bp, Saccharomyces pastorianus
gtcttgcttgcttggttggaaaaaa

SEQ ID NO: 19739 - DNA, 25 bp, Saccharomyces pastorianus
gttgactgctgctgatctggtgcca

SEQ ID NO: 19740 - DNA, 25 bp, Saccharomyces pastorianus
catacagtgcggacgctgcgacaaa

SEQ ID NO: 19741 - DNA, 25 bp, Saccharomyces pastorianus
gatatcgatgcatttgacccggaaa

SEQ ID NO: 19742 - DNA, 25 bp, Saccharomyces pastorianus
agacacaagatatcacgcccaccgg

SEQ ID NO: 19743 - DNA, 25 bp, Saccharomyces pastorianus
tggaagattgccgtacgacctcaac

SEQ ID NO: 19744 - DNA, 25 bp, Saccharomyces pastorianus
tagtattcaaggaccccatcagcag

SEQ ID NO: 19745 - DNA, 25 bp, Saccharomyces pastorianus
atcccaggaagatttgcgaccgcaa

SEQ ID NO: 19746 - DNA, 25 bp, Saccharomyces pastorianus
ggtcacctcggtatacaagtccaga

SEQ ID NO: 19747 - DNA, 25 bp, Saccharomyces pastorianus
gtacactccggatagatacaccagt

SEQ ID NO: 19748 - DNA, 25 bp, Saccharomyces pastorianus
gaaccgtcaagtacttcaagccaag

SEQ ID NO: 19749 - DNA, 25 bp, Saccharomyces pastorianus
actgcaaaagcatttcgccaagttt

SEQ ID NO: 19750 - DNA, 25 bp, Saccharomyces pastorianus
tagatacaccagtgtcaccgcagac

SEQ ID NO: 19751 - DNA, 25 bp, Saccharomyces pastorianus
atggagagaatccacgctcccaggc

SEQ ID NO: 19752 - DNA, 25 bp, Saccharomyces pastorianus
gctttcaaggaaatcggcgtgcaca

SEQ ID NO: 19753 - DNA, 25 bp, Saccharomyces pastorianus
gtatcacctgagaacgacgatccga

SEQ ID NO: 19754 - DNA, 25 bp, Saccharomyces pastorianus
cataatgaacctgtacctgtaccat

SEQ ID NO: 19755 - DNA, 25 bp, Saccharomyces pastorianus
aatggcccacccactgtgtctgaaa

SEQ ID NO: 19756 - DNA, 25 bp, Saccharomyces pastorianus
gattagagacatttcttccatcccc

SEQ ID NO: 19757 - DNA, 25 bp, Saccharomyces pastorianus
ctgtaccatccgtcaccaaaaataa

SEQ ID NO: 19758 - DNA, 25 bp, Saccharomyces pastorianus
cttcacgttccaccagttgagtaat

SEQ ID NO: 19759 - DNA, 25 bp, Saccharomyces pastorianus
gagattattcgattcattttccaca

SEQ ID NO: 19760 - DNA, 25 bp, Saccharomyces pastorianus
agataatagcatgccgctacccatc

SEQ ID NO: 19761 - DNA, 25 bp, Saccharomyces pastorianus
gcaaacattagcatcactgccactg

SEQ ID NO: 19762 - DNA, 25 bp, Saccharomyces pastorianus
caaccgtcgggtgatcataagattc

SEQ ID NO: 19763 - DNA, 25 bp, Saccharomyces pastorianus
gaagataaccctattcctactgcaa

SEQ ID NO: 19764 - DNA, 25 bp, Saccharomyces pastorianus
ctacgacgccatcgccaagtttgct

SEQ ID NO: 19765 - DNA, 25 bp, Saccharomyces pastorianus
ggttggagaacctacgacgccatcg

SEQ ID NO: 19766 - DNA, 25 bp, Saccharomyces pastorianus
gaagttgtgtaacgctttgaacgct

SEQ ID NO: 19767 - DNA, 25 bp, Saccharomyces pastorianus
agatcgtcggtatcgctaccacttt

SEQ ID NO: 19768 - DNA, 25 bp, Saccharomyces pastorianus
aagtccaaggtcgtcgtctttgaag

SEQ ID NO: 19769 - DNA, 25 bp, Saccharomyces pastorianus
ttcgccgatgaagaatacgtcaaca

SEQ ID NO: 19770 - DNA, 25 bp, Saccharomyces pastorianus
aagtggttcgacatcttgaacatca

SEQ ID NO: 19771 - DNA, 25 bp, Saccharomyces pastorianus
cgctggttgtaagatcgtcggtatc

SEQ ID NO: 19772 - DNA, 25 bp, Saccharomyces pastorianus
tgctccagacttcgccgatgaagaa

SEQ ID NO: 19773 - DNA, 25 bp, Saccharomyces pastorianus
gaaaaagacccatccaagtccaagg

SEQ ID NO: 19774 - DNA, 25 bp, Saccharomyces pastorianus
aagtttgctccagacttcgccgatg

SEQ ID NO: 19775 - DNA, 25 bp, Saccharomyces pastorianus
caaagtcaacgttttcttagctgat

SEQ ID NO: 19776 - DNA, 25 bp, Saccharomyces pastorianus
atcttggctgaaagcaactcgtctt

SEQ ID NO: 19777 - DNA, 25 bp, Saccharomyces pastorianus
ttttgagaaccaccccaatcttgaa

SEQ ID NO: 19778 - DNA, 25 bp, Saccharomyces pastorianus
gaattcaattcagtgtatgccaaac

SEQ ID NO: 19779 - DNA, 25 bp, Saccharomyces pastorianus
aagatcatgcgtcggtgttgcttct

SEQ ID NO: 19780 - DNA, 25 bp, Saccharomyces pastorianus
tgttgcttctttgccattgaacgtt

SEQ ID NO: 19781 - DNA, 25 bp, Saccharomyces pastorianus
ctcttattcccaggccatgaaggcg

SEQ ID NO: 19782 - DNA, 25 bp, Saccharomyces pastorianus
ggtttgacaacattgaccccggtca

SEQ ID NO: 19783 - DNA, 25 bp, Saccharomyces pastorianus
gtctggtcaaatcccatataccgca

SEQ ID NO: 19784 - DNA, 25 bp, Saccharomyces pastorianus
gaacaacttcgtctacgtgtctggt

SEQ ID NO: 19785 - DNA, 25 bp, Saccharomyces pastorianus
aactcgtctttgaacagcgttgtca

SEQ ID NO: 19786 - DNA, 25 bp, Saccharomyces pastorianus
tatccacagattgctcattacgggt

SEQ ID NO: 19787 - DNA, 25 bp, Saccharomyces pastorianus
aaacatagtagatttccccacggat

SEQ ID NO: 19788 - DNA, 25 bp, Saccharomyces pastorianus
ggaaaaacgtccctgagatcgccgt

SEQ ID NO: 19789 - DNA, 25 bp, Saccharomyces pastorianus
ttatgggtccagtcctgaccgaaat

SEQ ID NO: 19790 - DNA, 25 bp, Saccharomyces pastorianus
ttatagcaactctcggtacgccaag

SEQ ID NO: 19791 - DNA, 25 bp, Saccharomyces pastorianus
gtcctgtgcgacttcaaattactag

SEQ ID NO: 19792 - DNA, 25 bp, Saccharomyces pastorianus
ttggctcccgttttggcattttatg

SEQ ID NO: 19793 - DNA, 25 bp, Saccharomyces pastorianus
atgacatctttctttccttactagt

SEQ ID NO: 19794 - DNA, 25 bp, Saccharomyces pastorianus
gaattgcaattcctagtcctgtgcg

SEQ ID NO: 19795 - DNA, 25 bp, Saccharomyces pastorianus
agatcgccgtggtccagtacttgga

SEQ ID NO: 19796 - DNA, 25 bp, Saccharomyces pastorianus
gatgaagacgaactcttggctcccg

SEQ ID NO: 19797 - DNA, 25 bp, Saccharomyces pastorianus
ggtcaaatactcactgcccagcggg

SEQ ID NO: 19798 - DNA, 25 bp, Saccharomyces pastorianus
attatttattccactctgttgccct

SEQ ID NO: 19799 - DNA, 25 bp, Saccharomyces pastorianus
gtgtcttggcgcaactggtcaaata

SEQ ID NO: 19800 - DNA, 25 bp, Saccharomyces pastorianus
ggatgttcggccttgtatgttgccc

SEQ ID NO: 19801 - DNA, 25 bp, Saccharomyces pastorianus
tattccgtactcttgctgattttaa

SEQ ID NO: 19802 - DNA, 25 bp, Saccharomyces pastorianus
gtactttgcccacttctattatctg

SEQ ID NO: 19803 - DNA, 25 bp, Saccharomyces pastorianus
ggctctacgaaacccttcatgtatt

SEQ ID NO: 19804 - DNA, 25 bp, Saccharomyces pastorianus
tctaccccaagtaccctattgtttg

SEQ ID NO: 19805 - DNA, 25 bp, Saccharomyces pastorianus
tgtcgtcaatcaccctatacttcta

SEQ ID NO: 19806 - DNA, 25 bp, Saccharomyces pastorianus
gtttggatcattttcggccactcat

SEQ ID NO: 19807 - DNA, 25 bp, Saccharomyces pastorianus
cactaatttgggtcatcgcaagctt

SEQ ID NO: 19808 - DNA, 25 bp, Saccharomyces pastorianus
gaactgatcatggttgctttagaaa

SEQ ID NO: 19809 - DNA, 25 bp, Saccharomyces pastorianus
ttactttcattattccagggttctg

SEQ ID NO: 19810 - DNA, 25 bp, Saccharomyces pastorianus
aagcagtctattccgtttgttcatt

SEQ ID NO: 19811 - DNA, 25 bp, Saccharomyces pastorianus
tgatttaagttttatgaccaccgta

SEQ ID NO: 19812 - DNA, 25 bp, Saccharomyces pastorianus
tatgctgaactcttggtgatcctac

SEQ ID NO: 19813 - DNA, 25 bp, Saccharomyces pastorianus
gccactttgttgttttacgtagcat

SEQ ID NO: 19814 - DNA, 25 bp, Saccharomyces pastorianus
gatcctactaatttcagtcttccct

SEQ ID NO: 19815 - DNA, 25 bp, Saccharomyces pastorianus
gtttcaccgccttaattttgaatga

SEQ ID NO: 19816 - DNA, 25 bp, Saccharomyces pastorianus
aatggttgctatcagtttcaccgcc

SEQ ID NO: 19817 - DNA, 25 bp, Saccharomyces pastorianus
ttattgccatttgccaagcagtcta

SEQ ID NO: 19818 - DNA, 25 bp, Saccharomyces pastorianus
tagcatctgttccattcctaggtga

SEQ ID NO: 19819 - DNA, 25 bp, Saccharomyces pastorianus
attttgctatggtctgggatatcct

SEQ ID NO: 19820 - DNA, 25 bp, Saccharomyces pastorianus
atgaacatgtcgctaacgtccatct

SEQ ID NO: 19821 - DNA, 25 bp, Saccharomyces pastorianus
ggattgtgtatgcaattgcccctca

SEQ ID NO: 19822 - DNA, 25 bp, Saccharomyces pastorianus
aacgtccatctattcagagtcaccg

SEQ ID NO: 19823 - DNA, 25 bp, Saccharomyces pastorianus
aagacgggagctattcattcagaag

SEQ ID NO: 19824 - DNA, 25 bp, Saccharomyces pastorianus
ttaccttatccaatctcgcaagttg

SEQ ID NO: 19825 - DNA, 25 bp, Saccharomyces pastorianus
agagtcaccggtgatgctcccttac

SEQ ID NO: 19826 - DNA, 25 bp, Saccharomyces pastorianus
cgtgacgtcatttattttggctact

SEQ ID NO: 19827 - DNA, 25 bp, Saccharomyces pastorianus
attgcccctcaaacgattcaacaaa

SEQ ID NO: 19828 - DNA, 25 bp, Saccharomyces pastorianus
gctcataacaccacatcttacaatt

SEQ ID NO: 19829 - DNA, 25 bp, Saccharomyces pastorianus
gattcaacaaagtgccgtgacgtca

SEQ ID NO: 19830 - DNA, 25 bp, Saccharomyces pastorianus
acacttgctgtcgtgcggactggac

SEQ ID NO: 19831 - DNA, 25 bp, Saccharomyces pastorianus
aattcgtgcctgaaagtgttccggg

SEQ ID NO: 19832 - DNA, 25 bp, Saccharomyces pastorianus
taaggatgcggagaacctggccacc

SEQ ID NO: 19833 - DNA, 25 bp, Saccharomyces pastorianus
aagagacactcaaccaacgcagacg

SEQ ID NO: 19834 - DNA, 25 bp, Saccharomyces pastorianus
tacgcatgtgggacatccgaaccaa

SEQ ID NO: 19835 - DNA, 25 bp, Saccharomyces pastorianus
gcagacgcaatctctgggcgacaaa

SEQ ID NO: 19836 - DNA, 25 bp, Saccharomyces pastorianus
gttccagggacgcaggctacaaaga

SEQ ID NO: 19837 - DNA, 25 bp, Saccharomyces pastorianus
tgtttcagcggtgacgagttcggat

SEQ ID NO: 19838 - DNA, 25 bp, Saccharomyces pastorianus
gaagtgcatgcacacgttccaggga

SEQ ID NO: 19839 - DNA, 25 bp, Saccharomyces pastorianus
gcgggtcccacgacggaagtatcaa

SEQ ID NO: 19840 - DNA, 25 bp, Saccharomyces pastorianus
agagtttctcgtgtttcagttgcag

SEQ ID NO: 19841 - DNA, 25 bp, Saccharomyces pastorianus
gaaaacggtccatgaatcagaatgc

SEQ ID NO: 19842 - DNA, 25 bp, Saccharomyces pastorianus
ttttgaatttatctcgcggcaggcc

SEQ ID NO: 19843 - DNA, 25 bp, Saccharomyces pastorianus
gacgcaaagaaggactctgacaaat

SEQ ID NO: 19844 - DNA, 25 bp, Saccharomyces pastorianus
ataataagaacttccccatcttaag

SEQ ID NO: 19845 - DNA, 25 bp, Saccharomyces pastorianus
gaatgcgtctatttctctaatgcaa

SEQ ID NO: 19846 - DNA, 25 bp, Saccharomyces pastorianus
ggatatcttcaaattctccatcgat

SEQ ID NO: 19847 - DNA, 25 bp, Saccharomyces pastorianus
tggacgccaacaacttattttacgg

SEQ ID NO: 19848 - DNA, 25 bp, Saccharomyces pastorianus
aatcagagatctcactggacgccaa

SEQ ID NO: 19849 - DNA, 25 bp, Saccharomyces pastorianus
tcaggtttccacaacatgactatag

SEQ ID NO: 19850 - DNA, 25 bp, Saccharomyces pastorianus
gcggcaggcctgtttttctacaaga

SEQ ID NO: 19851 - DNA, 25 bp, Saccharomyces pastorianus
gagcttactttactatcaggtttcc

SEQ ID NO: 19852 - DNA, 25 bp, Saccharomyces pastorianus
gtcgggcgatgctactctgcataaa

SEQ ID NO: 19853 - DNA, 25 bp, Saccharomyces pastorianus
atactctaaaccttcgactcagact

SEQ ID NO: 19854 - DNA, 25 bp, Saccharomyces pastorianus
aacttgcaggtttcatctctttcca

SEQ ID NO: 19855 - DNA, 25 bp, Saccharomyces pastorianus
tagtcctggaattattggtaccggt

SEQ ID NO: 19856 - DNA, 25 bp, Saccharomyces pastorianus
aaagccagagctcgttcttcaatac

SEQ ID NO: 19857 - DNA, 25 bp, Saccharomyces pastorianus
taatcaatcttctgtctcgaacgcg

SEQ ID NO: 19858 - DNA, 25 bp, Saccharomyces pastorianus
tctctttccaagaccacttctaata

SEQ ID NO: 19859 - DNA, 25 bp, Saccharomyces pastorianus
gttcttcaataccacgatacctcag

SEQ ID NO: 19860 - DNA, 25 bp, Saccharomyces pastorianus
tccgtcgccattagttagtcctgga

SEQ ID NO: 19861 - DNA, 25 bp, Saccharomyces pastorianus
aataacgccaactcgaactccaatt

SEQ ID NO: 19862 - DNA, 25 bp, Saccharomyces pastorianus
gacttgtcaagcatcgtcaacgggt

SEQ ID NO: 19863 - DNA, 25 bp, Saccharomyces pastorianus
ggagcacgtccccatagaggtcaat

SEQ ID NO: 19864 - DNA, 25 bp, Saccharomyces pastorianus
tatctgtcgctgacggcgcaaaaca

SEQ ID NO: 19865 - DNA, 25 bp, Saccharomyces pastorianus
gtggaggcgctcatgttcgactact

SEQ ID NO: 19866 - DNA, 25 bp, Saccharomyces pastorianus
gcgacctacccatagtgcagttggt

SEQ ID NO: 19867 - DNA, 25 bp, Saccharomyces pastorianus
agttggtcaagcacgtctcggacta

SEQ ID NO: 19868 - DNA, 25 bp, Saccharomyces pastorianus
tggcctgcccatgtgtaaaacgtat

SEQ ID NO: 19869 - DNA, 25 bp, Saccharomyces pastorianus
atacgatcgggatcctgcagcgcga

SEQ ID NO: 19870 - DNA, 25 bp, Saccharomyces pastorianus
aagctactggtgacgcactatctgt

SEQ ID NO: 19871 - DNA, 25 bp, Saccharomyces pastorianus
gccaatcctggagtacatcatgaca

SEQ ID NO: 19872 - DNA, 25 bp, Saccharomyces pastorianus
ttcgaggcgcagatagcacacggca

SEQ ID NO: 19873 - DNA, 25 bp, Saccharomyces pastorianus
caatctcttgaagccggacgacgat

SEQ ID NO: 19874 - DNA, 25 bp, Saccharomyces pastorianus
gaggcgcagaacatcttggtcgctc

SEQ ID NO: 19875 - DNA, 25 bp, Saccharomyces pastorianus
attcttgtccgattcattcgctcaa

SEQ ID NO: 19876 - DNA, 25 bp, Saccharomyces pastorianus
acctcttccgccctaatgaaggaat

SEQ ID NO: 19877 - DNA, 25 bp, Saccharomyces pastorianus
ttggtcgctccaggccctataaagg

SEQ ID NO: 19878 - DNA, 25 bp, Saccharomyces pastorianus
gagcctgaatcaaagcctcaagcag

SEQ ID NO: 19879 - DNA, 25 bp, Saccharomyces pastorianus
tggaggaccagttcggccaagtcac

SEQ ID NO: 19880 - DNA, 25 bp, Saccharomyces pastorianus
gtggctttgaactctagcgagtgtt

SEQ ID NO: 19881 - DNA, 25 bp, Saccharomyces pastorianus
gagcccaagacattgaactatgctt

SEQ ID NO: 19882 - DNA, 25 bp, Saccharomyces pastorianus
tcttcgctcttgcagttcagtgatg

SEQ ID NO: 19883 - DNA, 25 bp, Saccharomyces pastorianus
aggaagcttccctaagagtccaaat

SEQ ID NO: 19884 - DNA, 25 bp, Saccharomyces pastorianus
tgtcgcaaggaagtccactccatga

SEQ ID NO: 19885 - DNA, 25 bp, Saccharomyces pastorianus
ttgctaatgaacctgatcaccctgg

SEQ ID NO: 19886 - DNA, 25 bp, Saccharomyces pastorianus
gttagtcgtatcctgcatcggaatt

SEQ ID NO: 19887 - DNA, 25 bp, Saccharomyces pastorianus
tgtctgtggtcacccaatgtttgaa

SEQ ID NO: 19888 - DNA, 25 bp, Saccharomyces pastorianus
attcctgtatgtggcgttagtcgta

SEQ ID NO: 19889 - DNA, 25 bp, Saccharomyces pastorianus
aaccccaatacgagctgtctgtggt

SEQ ID NO: 19890 - DNA, 25 bp, Saccharomyces pastorianus
tttcaactctcgttcatttccttta

SEQ ID NO: 19891 - DNA, 25 bp, Saccharomyces pastorianus
atttctataacttcgccatgtccaa

SEQ ID NO: 19892 - DNA, 25 bp, Saccharomyces pastorianus
caggtactacgcattcaagatctat

SEQ ID NO: 19893 - DNA, 25 bp, Saccharomyces pastorianus
gatcaccctggttaagagattcctg

SEQ ID NO: 19894 - DNA, 25 bp, Saccharomyces pastorianus
gaatttacttacgtggttcccagca

SEQ ID NO: 19895 - DNA, 25 bp, Saccharomyces pastorianus
atccaatggttgatcccggcaatca

SEQ ID NO: 19896 - DNA, 25 bp, Saccharomyces pastorianus
cggtagtactgttttattgacccat

SEQ ID NO: 19897 - DNA, 25 bp, Saccharomyces pastorianus
gggacacttcaacaccgatacaatg

SEQ ID NO: 19898 - DNA, 25 bp, Saccharomyces pastorianus
gtgagcgtaaattcgccggtagtac

SEQ ID NO: 19899 - DNA, 25 bp, Saccharomyces pastorianus
gtagtgctaaacgatcttcttttgg

SEQ ID NO: 19900 - DNA, 25 bp, Saccharomyces pastorianus
ggaaggccctgctttacaaccagaa

SEQ ID NO: 19901 - DNA, 25 bp, Saccharomyces pastorianus
atccagatgttgatgcccctgaatc

SEQ ID NO: 19902 - DNA, 25 bp, Saccharomyces pastorianus
gtggttcgctaaagtatccctactt

SEQ ID NO: 19903 - DNA, 25 bp, Saccharomyces pastorianus
ataagaagtcttccgccacttggga

SEQ ID NO: 19904 - DNA, 25 bp, Saccharomyces pastorianus
ctaacacgacacatccttggagaat

SEQ ID NO: 19905 - DNA, 25 bp, Saccharomyces pastorianus
aaaactgggcttctaagatctcaaa

SEQ ID NO: 19906 - DNA, 25 bp, Saccharomyces pastorianus
aaggtttgtgctacgatggcccaga

SEQ ID NO: 19907 - DNA, 25 bp, Saccharomyces pastorianus
atgcgttgttcattgcgcgacgtaa

SEQ ID NO: 19908 - DNA, 25 bp, Saccharomyces pastorianus
tagactactcatttttacaaccacc

SEQ ID NO: 19909 - DNA, 25 bp, Saccharomyces pastorianus
aagagatctcgtgatatgtgcgaaa

SEQ ID NO: 19910 - DNA, 25 bp, Saccharomyces pastorianus
gagagttcatcatcggtctatgaca

SEQ ID NO: 19911 - DNA, 25 bp, Saccharomyces pastorianus
gaggctggcgatattgatgttgaca

SEQ ID NO: 19912 - DNA, 25 bp, Saccharomyces pastorianus
tttttacaaccacccgtcgatgcag

SEQ ID NO: 19913 - DNA, 25 bp, Saccharomyces pastorianus
ttctagactagtcgaagtaccgcaa

SEQ ID NO: 19914 - DNA, 25 bp, Saccharomyces pastorianus
aatttctcatggtaagcaactcttg

SEQ ID NO: 19915 - DNA, 25 bp, Saccharomyces pastorianus
gagatgttcacactattctacaatt

SEQ ID NO: 19916 - DNA, 25 bp, Saccharomyces pastorianus
gatgcagtacctgaggctggcgata

SEQ ID NO: 19917 - DNA, 25 bp, Saccharomyces pastorianus
attcagatccactcaacaatgggat

SEQ ID NO: 19918 - DNA, 25 bp, Saccharomyces pastorianus
tgagcaccgactctgtcacagtatt

SEQ ID NO: 19919 - DNA, 25 bp, Saccharomyces pastorianus
ggctgacccaagcttacgagcacaa

SEQ ID NO: 19920 - DNA, 25 bp, Saccharomyces pastorianus
aaattgaacctcttctgagcaccga

SEQ ID NO: 19921 - DNA, 25 bp, Saccharomyces pastorianus
agcctgtttgatcatactgcttcac

SEQ ID NO: 19922 - DNA, 25 bp, Saccharomyces pastorianus
ttggacatcaacgaacggttcctct

SEQ ID NO: 19923 - DNA, 25 bp, Saccharomyces pastorianus
gttgccggagccagtacatcattag

SEQ ID NO: 19924 - DNA, 25 bp, Saccharomyces pastorianus
aacacatttcacgtttcaggctgac

SEQ ID NO: 19925 - DNA, 25 bp, Saccharomyces pastorianus
gacactctcatcactgggaaagcgt

SEQ ID NO: 19926 - DNA, 25 bp, Saccharomyces pastorianus
ttgtgcgcgaacttccaattggaca

SEQ ID NO: 19927 - DNA, 25 bp, Saccharomyces pastorianus
ttccgtcccactgaatagagttgcc

SEQ ID NO: 19928 - DNA, 25 bp, Saccharomyces pastorianus
tattcatgaaccagtattccgtccc

SEQ ID NO: 19929 - DNA, 25 bp, Saccharomyces pastorianus
taatctgttgaaatacgaccaccaa

SEQ ID NO: 19930 - DNA, 25 bp, Saccharomyces pastorianus
gcatcgagattcttcaagggtccag

SEQ ID NO: 19931 - DNA, 25 bp, Saccharomyces pastorianus
tcaagggtccagaactactagtaga

SEQ ID NO: 19932 - DNA, 25 bp, Saccharomyces pastorianus
gattactctttagatctatggtcat

SEQ ID NO: 19933 - DNA, 25 bp, Saccharomyces pastorianus
gtcaaagtgcttggtacaacggatt

SEQ ID NO: 19934 - DNA, 25 bp, Saccharomyces pastorianus
gctaaagaagcaatgggtcacccat

SEQ ID NO: 19935 - DNA, 25 bp, Saccharomyces pastorianus
gggatgttaagcctcataacgtgat

SEQ ID NO: 19936 - DNA, 25 bp, Saccharomyces pastorianus
gaacaatgctagcttccatgatatt

SEQ ID NO: 19937 - DNA, 25 bp, Saccharomyces pastorianus
tttccatggaactagtaatacagat

SEQ ID NO: 19938 - DNA, 25 bp, Saccharomyces pastorianus
tataatgtccgtgttgcatcgagat

SEQ ID NO: 19939 - DNA, 25 bp, Saccharomyces pastorianus
gaaatacgaccaccaagaaagacta

SEQ ID NO: 19940 - DNA, 25 bp, Saccharomyces pastorianus
gggtatctccagtgtgtatctttgg

SEQ ID NO: 19941 - DNA, 25 bp, Saccharomyces pastorianus
tatttcccagaattgtccccagagg

SEQ ID NO: 19942 - DNA, 25 bp, Saccharomyces pastorianus
tcacacgttgctaatttgggatcct

SEQ ID NO: 19943 - DNA, 25 bp, Saccharomyces pastorianus
aagggcatcgccgtggacatgtccc

SEQ ID NO: 19944 - DNA, 25 bp, Saccharomyces pastorianus
gaccaggactcccatatgatgttgt

SEQ ID NO: 19945 - DNA, 25 bp, Saccharomyces pastorianus
tccttccgcgcctttgagagagatg

SEQ ID NO: 19946 - DNA, 25 bp, Saccharomyces pastorianus
aactcccggctctttcgattataga

SEQ ID NO: 19947 - DNA, 25 bp, Saccharomyces pastorianus
gatcttggctaatgactctttcgat

SEQ ID NO: 19948 - DNA, 25 bp, Saccharomyces pastorianus
aagaacgctgcgattgcatcctctg

SEQ ID NO: 19949 - DNA, 25 bp, Saccharomyces pastorianus
ggatttgcaagacagtccctttcct

SEQ ID NO: 19950 - DNA, 25 bp, Saccharomyces pastorianus
gtatccatgttttcgaagtcacagc

SEQ ID NO: 19951 - DNA, 25 bp, Saccharomyces pastorianus
tgggccctagataggctcaccttta

SEQ ID NO: 19952 - DNA, 25 bp, Saccharomyces pastorianus
gaaggaccacgactatttcggcgaa

SEQ ID NO: 19953 - DNA, 25 bp, Saccharomyces pastorianus
tacttctacgtggtggagcagggca

SEQ ID NO: 19954 - DNA, 25 bp, Saccharomyces pastorianus
gtgaccagggtgactacttctacgt

SEQ ID NO: 19955 - DNA, 25 bp, Saccharomyces pastorianus
gaaaagcttgactacgtatgaccgt

SEQ ID NO: 19956 - DNA, 25 bp, Saccharomyces pastorianus
gggagctggctctcatgtacaacag

SEQ ID NO: 19957 - DNA, 25 bp, Saccharomyces pastorianus
aagactattaggtcctgcggtagac

SEQ ID NO: 19958 - DNA, 25 bp, Saccharomyces pastorianus
aggaagatcctgttgggcagctctt

SEQ ID NO: 19959 - DNA, 25 bp, Saccharomyces pastorianus
aacttctacctgatcgagtacggcg

SEQ ID NO: 19960 - DNA, 25 bp, Saccharomyces pastorianus
atgggtctaccatcatcaagcaagg

SEQ ID NO: 19961 - DNA, 25 bp, Saccharomyces pastorianus
gttgaagaccatgcccgtgttgaaa

SEQ ID NO: 19962 - DNA, 25 bp, Saccharomyces pastorianus
gatcggtagcaatcctaatggtgaa

SEQ ID NO: 19963 - DNA, 25 bp, Saccharomyces pastorianus
gtgctattacactctggtttctcaa

SEQ ID NO: 19964 - DNA, 25 bp, Saccharomyces pastorianus
gttcttgcagtatttacgtctttca

SEQ ID NO: 19965 - DNA, 25 bp, Saccharomyces pastorianus
atcgctaaacaatgcacaaaccgta

SEQ ID NO: 19966 - DNA, 25 bp, Saccharomyces pastorianus
gaaatcgttttcactccaagctttg

SEQ ID NO: 19967 - DNA, 25 bp, Saccharomyces pastorianus
aaccgtaatccatgaattgcccaag

SEQ ID NO: 19968 - DNA, 25 bp, Saccharomyces pastorianus
gcagtttctacgttagtgctattac

SEQ ID NO: 19969 - DNA, 25 bp, Saccharomyces pastorianus
tgccaattgagagcaacgacgggat

SEQ ID NO: 19970 - DNA, 25 bp, Saccharomyces pastorianus
aagctttgttgatgtccacgctaag

SEQ ID NO: 19971 - DNA, 25 bp, Saccharomyces pastorianus
acgctcgtctccaaattactttatg

SEQ ID NO: 19972 - DNA, 25 bp, Saccharomyces pastorianus
ggattactattatttgttcttgcag

SEQ ID NO: 19973 - DNA, 25 bp, Saccharomyces pastorianus
gttttgcagtacgacagcagcgcac

SEQ ID NO: 19974 - DNA, 25 bp, Saccharomyces pastorianus
gagatcgtgtactggaactctgata

SEQ ID NO: 19975 - DNA, 25 bp, Saccharomyces pastorianus
aggaccaacgcagcacgatgttcaa

SEQ ID NO: 19976 - DNA, 25 bp, Saccharomyces pastorianus
agtgtgacttccacgaggcgttcaa

SEQ ID NO: 19977 - DNA, 25 bp, Saccharomyces pastorianus
gtcgcatagcgacctaagcagcacg

SEQ ID NO: 19978 - DNA, 25 bp, Saccharomyces pastorianus
tttttacttatcatccccgaagacg

SEQ ID NO: 19979 - DNA, 25 bp, Saccharomyces pastorianus
gaggcaagccagctcatggacgtac

SEQ ID NO: 19980 - DNA, 25 bp, Saccharomyces pastorianus
gcgcacagaactacacggtccaaat

SEQ ID NO: 19981 - DNA, 25 bp, Saccharomyces pastorianus
aactacttcgacaccgtgacggata

SEQ ID NO: 19982 - DNA, 25 bp, Saccharomyces pastorianus
gactacgtcaacttgtcgtcgcata

SEQ ID NO: 19983 - DNA, 25 bp, Saccharomyces pastorianus
ggaaggagtctctgaacgggctaat

SEQ ID NO: 19984 - DNA, 25 bp, Saccharomyces pastorianus
gcaccgccattggttgtctgatcaa

SEQ ID NO: 19985 - DNA, 25 bp, Saccharomyces pastorianus
agcatagccattactttccacgaaa

SEQ ID NO: 19986 - DNA, 25 bp, Saccharomyces pastorianus
aacgtggtgcctcagatcctgcaaa

SEQ ID NO: 19987 - DNA, 25 bp, Saccharomyces pastorianus
agtggtgtttccgagctcatgctgc

SEQ ID NO: 19988 - DNA, 25 bp, Saccharomyces pastorianus
gactggcttcaacatgtctgcgtac

SEQ ID NO: 19989 - DNA, 25 bp, Saccharomyces pastorianus
ggtggcctcatttacatcgctacga

SEQ ID NO: 19990 - DNA, 25 bp, Saccharomyces pastorianus
atgcaccaacatcgtcgtcgagtgg

SEQ ID NO: 19991 - DNA, 25 bp, Saccharomyces pastorianus
agcggtgggtcttacaactgggctc

SEQ ID NO: 19992 - DNA, 25 bp, Saccharomyces pastorianus
tacagctctgcgcaggtcggcataa

SEQ ID NO: 19993 - DNA, 25 bp, Saccharomyces pastorianus
gcgtacttgaacgtcatatccggta

SEQ ID NO: 19994 - DNA, 25 bp, Saccharomyces pastorianus
atctgcttcttgaccctggacaaaa

SEQ ID NO: 19995 - DNA, 25 bp, Saccharomyces pastorianus
agagaagaccgctgtgggccgttcc

SEQ ID NO: 19996 - DNA, 25 bp, Saccharomyces pastorianus
gagagagtacatcgtcccggagatc

SEQ ID NO: 19997 - DNA, 25 bp, Saccharomyces pastorianus
gtatgccatggtcttcaccagagat

SEQ ID NO: 19998 - DNA, 25 bp, Saccharomyces pastorianus
gaggcgtcgagatcgtcagcgcaaa

SEQ ID NO: 19999 - DNA, 25 bp, Saccharomyces pastorianus
ggtgacgaagccaacatcctgatga

SEQ ID NO: 20000 - DNA, 25 bp, Saccharomyces pastorianus
tgacggccgtatcctggacatcaga

SEQ ID NO: 20001 - DNA, 25 bp, Saccharomyces pastorianus
acatcctgatgagctcgtatgccat

SEQ ID NO: 20002 - DNA, 25 bp, Saccharomyces pastorianus
gggccgttccattcaatcgttaaag

SEQ ID NO: 20003 - DNA, 25 bp, Saccharomyces pastorianus
aatcgtcccgtgtgtacagccagtt

SEQ ID NO: 20004 - DNA, 25 bp, Saccharomyces pastorianus
gtctacgccgctcaacagaagattt

SEQ ID NO: 20005 - DNA, 25 bp, Saccharomyces pastorianus
gtgaaaaccctctgatcgtcattat

SEQ ID NO: 20006 - DNA, 25 bp, Saccharomyces pastorianus
gtgtcgaaccttctgggacgcaata

SEQ ID NO: 20007 - DNA, 25 bp, Saccharomyces pastorianus
aacgtgtacgccaaggacttagtca

SEQ ID NO: 20008 - DNA, 25 bp, Saccharomyces pastorianus
aaggcgacgcctttgattataaagc

SEQ ID NO: 20009 - DNA, 25 bp, Saccharomyces pastorianus
gagctgaaactaacttgtgttgcca

SEQ ID NO: 20010 - DNA, 25 bp, Saccharomyces pastorianus
atcggtcaccctgtcatacaagata

SEQ ID NO: 20011 - DNA, 25 bp, Saccharomyces pastorianus
atggccccagtccaaaaactgcgaa

SEQ ID NO: 20012 - DNA, 25 bp, Saccharomyces pastorianus
ccggcagcggccatagaattcgaat

SEQ ID NO: 20013 - DNA, 25 bp, Saccharomyces pastorianus
aagccgaggcagacacattttacat

SEQ ID NO: 20014 - DNA, 25 bp, Saccharomyces pastorianus
ggacttagtcatcgtgtcgaacctt

SEQ ID NO: 20015 - DNA, 25 bp, Saccharomyces pastorianus
gagtccgtagggtccattacagtcg

SEQ ID NO: 20016 - DNA, 25 bp, Saccharomyces pastorianus
aacggtgtgcttatttgcaagctga

SEQ ID NO: 20017 - DNA, 25 bp, Saccharomyces pastorianus
gtatagcttatcaagacgaccaagt

SEQ ID NO: 20018 - DNA, 25 bp, Saccharomyces pastorianus
ggtcagcaaacacgtccaaaggatt

SEQ ID NO: 20019 - DNA, 25 bp, Saccharomyces pastorianus
caggtccacgaggaacgggttgatt

SEQ ID NO: 20020 - DNA, 25 bp, Saccharomyces pastorianus
cagaaggtgggattgtcttgtcaaa

SEQ ID NO: 20021 - DNA, 25 bp, Saccharomyces pastorianus
gagagtcacacttgctgagtgcctt

SEQ ID NO: 20022 - DNA, 25 bp, Saccharomyces pastorianus
ctgagtgccttcagcaatggtggaa

SEQ ID NO: 20023 - DNA, 25 bp, Saccharomyces pastorianus
aatggtggaagtaactctgcggata

SEQ ID NO: 20024 - DNA, 25 bp, Saccharomyces pastorianus
aatcaccagtgtaggcaggtccacg

SEQ ID NO: 20025 - DNA, 25 bp, Saccharomyces pastorianus
aagctagatcgcgtacattggaaat

SEQ ID NO: 20026 - DNA, 25 bp, Saccharomyces pastorianus
atcgcatcagcggaaacaacaaggg

SEQ ID NO: 20027 - DNA, 25 bp, Saccharomyces pastorianus
attgactctgcaaagtatgggcggt

SEQ ID NO: 20028 - DNA, 25 bp, Saccharomyces pastorianus
atgtacaagttacacgggctacggt

SEQ ID NO: 20029 - DNA, 25 bp, Saccharomyces pastorianus
ataattgtcaacttggctgcagtaa

SEQ ID NO: 20030 - DNA, 25 bp, Saccharomyces pastorianus
gaaaggtagcacttcgaatgtacaa

SEQ ID NO: 20031 - DNA, 25 bp, Saccharomyces pastorianus
ccagttgctggtggatactccagag

SEQ ID NO: 20032 - DNA, 25 bp, Saccharomyces pastorianus
gaaggcgacgagtttgttcgtactc

SEQ ID NO: 20033 - DNA, 25 bp, Saccharomyces pastorianus
gggaccgggacattcaccaagtgat

SEQ ID NO: 20034 - DNA, 25 bp, Saccharomyces pastorianus
actgacgaatcgctatctgttagag

SEQ ID NO: 20035 - DNA, 25 bp, Saccharomyces pastorianus
agtattttgacgagccggatggcga

SEQ ID NO: 20036 - DNA, 25 bp, Saccharomyces pastorianus
gaaaatccacaatcaacggtcacga

SEQ ID NO: 20037 - DNA, 25 bp, Saccharomyces pastorianus
aagttagcgtgcctatgggtcctaa

SEQ ID NO: 20038 - DNA, 25 bp, Saccharomyces pastorianus
ttcgtactcccgcagcgaaaggtag

SEQ ID NO: 20039 - DNA, 25 bp, Saccharomyces pastorianus
tgagcaagaccagcacttcgacgta

SEQ ID NO: 20040 - DNA, 25 bp, Saccharomyces pastorianus
ataatcgcggccgtattcttggtca

SEQ ID NO: 20041 - DNA, 25 bp, Saccharomyces pastorianus
cgtattcttggtcacggtcactaga

SEQ ID NO: 20042 - DNA, 25 bp, Saccharomyces pastorianus
acggatcggaaatgtgtccttgaga

SEQ ID NO: 20043 - DNA, 25 bp, Saccharomyces pastorianus
gagctggacggtattgacctgatta

SEQ ID NO: 20044 - DNA, 25 bp, Saccharomyces pastorianus
ggtcactagacctagcagtagcaag

SEQ ID NO: 20045 - DNA, 25 bp, Saccharomyces pastorianus
cacttaccttggaagaacggatcgg

SEQ ID NO: 20046 - DNA, 25 bp, Saccharomyces pastorianus
gcaactactgcaacgagatgctgtt

SEQ ID NO: 20047 - DNA, 25 bp, Saccharomyces pastorianus
ggatgtttatgaacgcaactactgc

SEQ ID NO: 20048 - DNA, 25 bp, Saccharomyces pastorianus
tcttataagtaggttcgattccggt

SEQ ID NO: 20049 - DNA, 25 bp, Saccharomyces pastorianus
gacgtacgtcgtgctggccataatc

SEQ ID NO: 20050 - DNA, 25 bp, Saccharomyces pastorianus
tattccacagactagcatgcaagct

SEQ ID NO: 20051 - DNA, 25 bp, Saccharomyces pastorianus
aaaggtttctcaagtcctacgcact

SEQ ID NO: 20052 - DNA, 25 bp, Saccharomyces pastorianus
atattcctactgatgggtccattcc

SEQ ID NO: 20053 - DNA, 25 bp, Saccharomyces pastorianus
atgcaagctcttaattccacaacaa

SEQ ID NO: 20054 - DNA, 25 bp, Saccharomyces pastorianus
atcaatcagcgccttattacgatgc

SEQ ID NO: 20055 - DNA, 25 bp, Saccharomyces pastorianus
tgatccatttacagtcacttccgat

SEQ ID NO: 20056 - DNA, 25 bp, Saccharomyces pastorianus
gtgcaacggcgcgtaatcaatcagc

SEQ ID NO: 20057 - DNA, 25 bp, Saccharomyces pastorianus
tgcacaaccttggtccactaatgat

SEQ ID NO: 20058 - DNA, 25 bp, Saccharomyces pastorianus
gacgtttgcaaaactacgctctctt

SEQ ID NO: 20059 - DNA, 25 bp, Saccharomyces pastorianus
caggtcgactactacattgagcaaa

SEQ ID NO: 20060 - DNA, 25 bp, Saccharomyces pastorianus
gcactcaatgcctcaaactacagtt

SEQ ID NO: 20061 - DNA, 25 bp, Saccharomyces pastorianus
aaggctacttcttcagcagcaaagt

SEQ ID NO: 20062 - DNA, 25 bp, Saccharomyces pastorianus
ttaggtgacgatgccgctgctgctt

SEQ ID NO: 20063 - DNA, 25 bp, Saccharomyces pastorianus
atgtctaccaacacatgaccactta

SEQ ID NO: 20064 - DNA, 25 bp, Saccharomyces pastorianus
ttctctctgctttacaaagtgccgg

SEQ ID NO: 20065 - DNA, 25 bp, Saccharomyces pastorianus
gaatctgcttccgaatctgcttcag

SEQ ID NO: 20066 - DNA, 25 bp, Saccharomyces pastorianus
aaatcaccaccgctatgcaacaagt

SEQ ID NO: 20067 - DNA, 25 bp, Saccharomyces pastorianus
acggtacctcctctgctagtaagaa

SEQ ID NO: 20068 - DNA, 25 bp, Saccharomyces pastorianus
ctagtaagaacgctggtgccgctat

SEQ ID NO: 20069 - DNA, 25 bp, Saccharomyces pastorianus
gtgccgctatcaacatgggtttctt

SEQ ID NO: 20070 - DNA, 25 bp, Saccharomyces pastorianus
gactggtacctgaaattctctctgc

SEQ ID NO: 20071 - DNA, 25 bp, Saccharomyces pastorianus
ggtatcactgttaccgctttaggtg

SEQ ID NO: 20072 - DNA, 25 bp, Saccharomyces pastorianus
ctatccccgatttgagtctcttaaa

SEQ ID NO: 20073 - DNA, 25 bp, Saccharomyces pastorianus
gctttccggttctgttagatcacat

SEQ ID NO: 20074 - DNA, 25 bp, Saccharomyces pastorianus
gtgccaagaaaacaccgctttccgg

SEQ ID NO: 20075 - DNA, 25 bp, Saccharomyces pastorianus
gtagaccacagttcgtcaggtgcta

SEQ ID NO: 20076 - DNA, 25 bp, Saccharomyces pastorianus
gatgagtctgtctccttgaaagaaa

SEQ ID NO: 20077 - DNA, 25 bp, Saccharomyces pastorianus
gcaagcctgtgggttccgggacaac

SEQ ID NO: 20078 - DNA, 25 bp, Saccharomyces pastorianus
acatgcggctgtctttggattgagt

SEQ ID NO: 20079 - DNA, 25 bp, Saccharomyces pastorianus
aatttgccctaccatttattgagtg

SEQ ID NO: 20080 - DNA, 25 bp, Saccharomyces pastorianus
gaagatctcaaggaacatgcggctg

SEQ ID NO: 20081 - DNA, 25 bp, Saccharomyces pastorianus
aagcaagcacacctggttgtaccag

SEQ ID NO: 20082 - DNA, 25 bp, Saccharomyces pastorianus
gatcacatttcgtctttgctgatgg

SEQ ID NO: 20083 - DNA, 25 bp, Saccharomyces pastorianus
aacgacgtcagtattttcatcgaag

SEQ ID NO: 20084 - DNA, 25 bp, Saccharomyces pastorianus
atcctgtaacagtgggtgacttgat

SEQ ID NO: 20085 - DNA, 25 bp, Saccharomyces pastorianus
gggtgcataaagtcaccgtggacaa

SEQ ID NO: 20086 - DNA, 25 bp, Saccharomyces pastorianus
tcaccgtggacaaagaggatcctgt

SEQ ID NO: 20087 - DNA, 25 bp, Saccharomyces pastorianus
gattaagaatcccaacgacgtcagt

SEQ ID NO: 20088 - DNA, 25 bp, Saccharomyces pastorianus
tagtgtccaccatgattaagaatcc

SEQ ID NO: 20089 - DNA, 25 bp, Saccharomyces pastorianus
taaggcccggcatcctcacattaat

SEQ ID NO: 20090 - DNA, 25 bp, Saccharomyces pastorianus
tgattgagcatatagtgtccaccat

SEQ ID NO: 20091 - DNA, 25 bp, Saccharomyces pastorianus
gaagatgactctataaggcccggca

SEQ ID NO: 20092 - DNA, 25 bp, Saccharomyces pastorianus
gactgtgtcttagaagatggcgata

SEQ ID NO: 20093 - DNA, 25 bp, Saccharomyces pastorianus
gggcggattggatgctatttttgaa

SEQ ID NO: 20094 - DNA, 25 bp, Saccharomyces pastorianus
gaacgacttgaaccaccttttgcaa

SEQ ID NO: 20095 - DNA, 25 bp, Saccharomyces pastorianus
cattacctgttcgtctcttgagaga

SEQ ID NO: 20096 - DNA, 25 bp, Saccharomyces pastorianus
gtagacgtgctgcagatcaccatga

SEQ ID NO: 20097 - DNA, 25 bp, Saccharomyces pastorianus
ggaggcttatttcagcgtgctcaag

SEQ ID NO: 20098 - DNA, 25 bp, Saccharomyces pastorianus
acatgtcctgttgaatctgcacttt

SEQ ID NO: 20099 - DNA, 25 bp, Saccharomyces pastorianus
tagacccgagtctggcgtcgaggat

SEQ ID NO: 20100 - DNA, 25 bp, Saccharomyces pastorianus
atgggaaaattctcaccacgtcgct

SEQ ID NO: 20101 - DNA, 25 bp, Saccharomyces pastorianus
gtcgctgacaccttctaggaactgg

SEQ ID NO: 20102 - DNA, 25 bp, Saccharomyces pastorianus
tggtatggattctgcgctagtcacg

SEQ ID NO: 20103 - DNA, 25 bp, Saccharomyces pastorianus
agacggatatcgaggcccagctgga

SEQ ID NO: 20104 - DNA, 25 bp, Saccharomyces pastorianus
tcgttgcaggcagtccatcggataa

SEQ ID NO: 20105 - DNA, 25 bp, Saccharomyces pastorianus
gaaaaagacaccagccgacaaaatt

SEQ ID NO: 20106 - DNA, 25 bp, Saccharomyces pastorianus
gaaggccttgtacagctctaaaatg

SEQ ID NO: 20107 - DNA, 25 bp, Saccharomyces pastorianus
gacatagtccatcagaacggcattt

SEQ ID NO: 20108 - DNA, 25 bp, Saccharomyces pastorianus
tcttctcgcgagcttcgattacgaa

SEQ ID NO: 20109 - DNA, 25 bp, Saccharomyces pastorianus
gaggcatttgtctctctaaatattc

SEQ ID NO: 20110 - DNA, 25 bp, Saccharomyces pastorianus
aacgcttttagcttcttagacatag

SEQ ID NO: 20111 - DNA, 25 bp, Saccharomyces pastorianus
aaatattccatcgaaggccttgtac

SEQ ID NO: 20112 - DNA, 25 bp, Saccharomyces pastorianus
ggtaatactttaacggccaatgagc

SEQ ID NO: 20113 - DNA, 25 bp, Saccharomyces pastorianus
ggccaatgagcctctcttactaaga

SEQ ID NO: 20114 - DNA, 25 bp, Saccharomyces pastorianus
tgatgaattctccattccacaacgc

SEQ ID NO: 20115 - DNA, 25 bp, Saccharomyces pastorianus
gaacggcatttacggctatctttgt

SEQ ID NO: 20116 - DNA, 25 bp, Saccharomyces pastorianus
cggtgaatcattcccttatttctac

SEQ ID NO: 20117 - DNA, 25 bp, Saccharomyces pastorianus
gagggatcccaacccttttatcgag

SEQ ID NO: 20118 - DNA, 25 bp, Saccharomyces pastorianus
accaccacctagttcagacttgaaa

SEQ ID NO: 20119 - DNA, 25 bp, Saccharomyces pastorianus
gcaacgatgcgatagctgggcctac

SEQ ID NO: 20120 - DNA, 25 bp, Saccharomyces pastorianus
gtgttttccgatcatcgaccagtat

SEQ ID NO: 20121 - DNA, 25 bp, Saccharomyces pastorianus
tatatgcaacattcagggccagagt

SEQ ID NO: 20122 - DNA, 25 bp, Saccharomyces pastorianus
gaaatggcaatcgatttcccgccta

SEQ ID NO: 20123 - DNA, 25 bp, Saccharomyces pastorianus
aagtggttcttgacgtggacccaga

SEQ ID NO: 20124 - DNA, 25 bp, Saccharomyces pastorianus
cccgcctacctataaatttgatcct

SEQ ID NO: 20125 - DNA, 25 bp, Saccharomyces pastorianus
gataccagcttggactgaccggatt

SEQ ID NO: 20126 - DNA, 25 bp, Saccharomyces pastorianus
tccaacaccaattcctgaaccgaaa

SEQ ID NO: 20127 - DNA, 25 bp, Saccharomyces pastorianus
agacgcatgctcttaacagcaccgg

SEQ ID NO: 20128 - DNA, 25 bp, Saccharomyces pastorianus
gttgagccaaatcttctacagttta

SEQ ID NO: 20129 - DNA, 25 bp, Saccharomyces pastorianus
ggcgcttcttttgatgttgagccaa

SEQ ID NO: 20130 - DNA, 25 bp, Saccharomyces pastorianus
tgccacactgccagaaggtttccgg

SEQ ID NO: 20131 - DNA, 25 bp, Saccharomyces pastorianus
tatggctacatttgtgaacggtcac

SEQ ID NO: 20132 - DNA, 25 bp, Saccharomyces pastorianus
gaacggtcacagtttcccaatgaaa

SEQ ID NO: 20133 - DNA, 25 bp, Saccharomyces pastorianus
atcgccaatgttcaaaacctagccc

SEQ ID NO: 20134 - DNA, 25 bp, Saccharomyces pastorianus
ataaggaggccaacgtgccacactg

SEQ ID NO: 20135 - DNA, 25 bp, Saccharomyces pastorianus
atgaatcatctcagtctttgacttt

SEQ ID NO: 20136 - DNA, 25 bp, Saccharomyces pastorianus
gatcactatgtaccagaaggcgctt

SEQ ID NO: 20137 - DNA, 25 bp, Saccharomyces pastorianus
gaacaaccttgcattgaattcagat

SEQ ID NO: 20138 - DNA, 25 bp, Saccharomyces pastorianus
gggcggtatattccactctatgaaa

SEQ ID NO: 20139 - DNA, 25 bp, Saccharomyces pastorianus
gaacttattcgggatgggcggtata

SEQ ID NO: 20140 - DNA, 25 bp, Saccharomyces pastorianus
cttgcgtctcagaacttattcggga

SEQ ID NO: 20141 - DNA, 25 bp, Saccharomyces pastorianus
ggcgagtacgaatgataaacctttg

SEQ ID NO: 20142 - DNA, 25 bp, Saccharomyces pastorianus
acaagagcagctgttaatgggcaaa

SEQ ID NO: 20143 - DNA, 25 bp, Saccharomyces pastorianus
aagctattgggcgaagtcttcaaga

SEQ ID NO: 20144 - DNA, 25 bp, Saccharomyces pastorianus
gatacattgagaaccgtttcggcag

SEQ ID NO: 20145 - DNA, 25 bp, Saccharomyces pastorianus
ttcggcagccatagatgcacaaaat

SEQ ID NO: 20146 - DNA, 25 bp, Saccharomyces pastorianus
aaatggaatcttttggtctagacat

SEQ ID NO: 20147 - DNA, 25 bp, Saccharomyces pastorianus
acatccactttacgcggtgtctgta

SEQ ID NO: 20148 - DNA, 25 bp, Saccharomyces pastorianus
aggctgaaattttccttgcgtctca

SEQ ID NO: 20149 - DNA, 25 bp, Saccharomyces pastorianus
gaaactggcagtcccattccggtag

SEQ ID NO: 20150 - DNA, 25 bp, Saccharomyces pastorianus
aggaccatcaattccattagctccg

SEQ ID NO: 20151 - DNA, 25 bp, Saccharomyces pastorianus
tttatcaatccctgaatcggtcggc

SEQ ID NO: 20152 - DNA, 25 bp, Saccharomyces pastorianus
gctcctatcgcacaagtactttctg

SEQ ID NO: 20153 - DNA, 25 bp, Saccharomyces pastorianus
tattttagctactccaccaattcca

SEQ ID NO: 20154 - DNA, 25 bp, Saccharomyces pastorianus
ttacctggtgctgttcaagagccac

SEQ ID NO: 20155 - DNA, 25 bp, Saccharomyces pastorianus
ggtcccgattccgatgatgatgttt

SEQ ID NO: 20156 - DNA, 25 bp, Saccharomyces pastorianus
ttacccagtgtcaatgaaccccaag

SEQ ID NO: 20157 - DNA, 25 bp, Saccharomyces pastorianus
cccgttctgaacctactatcgatat

SEQ ID NO: 20158 - DNA, 25 bp, Saccharomyces pastorianus
aaacacaatctgcttctgttgcacc

SEQ ID NO: 20159 - DNA, 25 bp, Saccharomyces pastorianus
atatgggtgcatatggtcccgattc

SEQ ID NO: 20160 - DNA, 25 bp, Saccharomyces pastorianus
tacacacatattcttaccacgtcat

SEQ ID NO: 20161 - DNA, 25 bp, Saccharomyces pastorianus
attccatatctacctccaaatcaaa

SEQ ID NO: 20162 - DNA, 25 bp, Saccharomyces pastorianus
accacgtcatcattttgcacttaac

SEQ ID NO: 20163 - DNA, 25 bp, Saccharomyces pastorianus
tgaagatttctccatttggtcccca

SEQ ID NO: 20164 - DNA, 25 bp, Saccharomyces pastorianus
gacgcaattatgagaccattcccga

SEQ ID NO: 20165 - DNA, 25 bp, Saccharomyces pastorianus
gggtacagggctcttgacgcaatta

SEQ ID NO: 20166 - DNA, 25 bp, Saccharomyces pastorianus
aatacgctcgtcatcaggccaatac

SEQ ID NO: 20167 - DNA, 25 bp, Saccharomyces pastorianus
aacgggaatgacgacggccactaca

SEQ ID NO: 20168 - DNA, 25 bp, Saccharomyces pastorianus
atcaaaactaaattcctcctcacaa

SEQ ID NO: 20169 - DNA, 25 bp, Saccharomyces pastorianus
ggatagcccatcatgcagtctagag

SEQ ID NO: 20170 - DNA, 25 bp, Saccharomyces pastorianus
gagcagtaccccagttagcgatgat

SEQ ID NO: 20171 - DNA, 25 bp, Saccharomyces pastorianus
acacgtacgtgaattctcttttgaa

SEQ ID NO: 20172 - DNA, 25 bp, Saccharomyces pastorianus
gaccagttgaaacccttctttgtca

SEQ ID NO: 20173 - DNA, 25 bp, Saccharomyces pastorianus
gaccttataccctaaactggatgtg

SEQ ID NO: 20174 - DNA, 25 bp, Saccharomyces pastorianus
tacagggaacgtctgtgtgcccatt

SEQ ID NO: 20175 - DNA, 25 bp, Saccharomyces pastorianus
aggcgccgaaattgattgctttaca

SEQ ID NO: 20176 - DNA, 25 bp, Saccharomyces pastorianus
caggtggccacgtctctttttaaag

SEQ ID NO: 20177 - DNA, 25 bp, Saccharomyces pastorianus
gatgaccagcatgccattcaaactt

SEQ ID NO: 20178 - DNA, 25 bp, Saccharomyces pastorianus
atcgtttactccagaaaaggcgccg

SEQ ID NO: 20179 - DNA, 25 bp, Saccharomyces pastorianus
aatgacgtttcactaacctctttgc

SEQ ID NO: 20180 - DNA, 25 bp, Saccharomyces pastorianus
agctttgaagagaccttaccaccct

SEQ ID NO: 20181 - DNA, 25 bp, Saccharomyces pastorianus
tcgctcgttcgttggaccagttgaa

SEQ ID NO: 20182 - DNA, 25 bp, Saccharomyces pastorianus
aacttcaagaaacagcgaggccagg

SEQ ID NO: 20183 - DNA, 25 bp, Saccharomyces pastorianus
aacggctgcgaatgaacctgttcct

SEQ ID NO: 20184 - DNA, 25 bp, Saccharomyces pastorianus
gaacacgctatatgtgagccagctg

SEQ ID NO: 20185 - DNA, 25 bp, Saccharomyces pastorianus
tcaccgtattgcgaccgaacgtgta

SEQ ID NO: 20186 - DNA, 25 bp, Saccharomyces pastorianus
ttcctgctgttttccacatttggag

SEQ ID NO: 20187 - DNA, 25 bp, Saccharomyces pastorianus
gaggccaggcctttattacattgag

SEQ ID NO: 20188 - DNA, 25 bp, Saccharomyces pastorianus
tacattgaggaccatcgaccaggcc

SEQ ID NO: 20189 - DNA, 25 bp, Saccharomyces pastorianus
gcagaagactgatcgcgatcctcac

SEQ ID NO: 20190 - DNA, 25 bp, Saccharomyces pastorianus
ggccagtttggctcagatttcattg

SEQ ID NO: 20191 - DNA, 25 bp, Saccharomyces pastorianus
aaagatcaacacacaacggctgcga

SEQ ID NO: 20192 - DNA, 25 bp, Saccharomyces pastorianus
gaacgtgtagcggaacccaagaaca

SEQ ID NO: 20193 - DNA, 25 bp, Saccharomyces pastorianus
gacactgaactacgacagctgtttc

SEQ ID NO: 20194 - DNA, 25 bp, Saccharomyces pastorianus
acaaccgcatgaaccagctttggac

SEQ ID NO: 20195 - DNA, 25 bp, Saccharomyces pastorianus
gaatgggctactacactagacacct

SEQ ID NO: 20196 - DNA, 25 bp, Saccharomyces pastorianus
ctagacacctcgagaccggatcttg

SEQ ID NO: 20197 - DNA, 25 bp, Saccharomyces pastorianus
gaactcacattcattagccttaagc

SEQ ID NO: 20198 - DNA, 25 bp, Saccharomyces pastorianus
attaacttcactatcatcacaaccg

SEQ ID NO: 20199 - DNA, 25 bp, Saccharomyces pastorianus
ggacgatgaccattcgcaagctatt

SEQ ID NO: 20200 - DNA, 25 bp, Saccharomyces pastorianus
gaatctattggtcggcaaggtgtac

SEQ ID NO: 20201 - DNA, 25 bp, Saccharomyces pastorianus
ggtaccagtcacacatattgaactc

SEQ ID NO: 20202 - DNA, 25 bp, Saccharomyces pastorianus
gaaataacgacctccaagctgaaaa

SEQ ID NO: 20203 - DNA, 25 bp, Saccharomyces pastorianus
ggactcacaactcacgtttgcagat

SEQ ID NO: 20204 - DNA, 25 bp, Saccharomyces pastorianus
aatgcatgcggattgttctttagaa

SEQ ID NO: 20205 - DNA, 25 bp, Saccharomyces pastorianus
ggaaatcaaaacttcactgcagtgg

SEQ ID NO: 20206 - DNA, 25 bp, Saccharomyces pastorianus
actaacgttgcggttcggtagagca

SEQ ID NO: 20207 - DNA, 25 bp, Saccharomyces pastorianus
aaaaaatccccgtgcaactgttgct

SEQ ID NO: 20208 - DNA, 25 bp, Saccharomyces pastorianus
ggtatcactaggacttgcgggcaat

SEQ ID NO: 20209 - DNA, 25 bp, Saccharomyces pastorianus
aactgctttccctgactctattcca

SEQ ID NO: 20210 - DNA, 25 bp, Saccharomyces pastorianus
ctaggcttccaaccgtgatttcaaa

SEQ ID NO: 20211 - DNA, 25 bp, Saccharomyces pastorianus
aatagcgggtctacagcaccaactg

SEQ ID NO: 20212 - DNA, 25 bp, Saccharomyces pastorianus
agcaaatcaagggaacggccgccaa

SEQ ID NO: 20213 - DNA, 25 bp, Saccharomyces pastorianus
aatggtgccgcctgcttgtgcaatg

SEQ ID NO: 20214 - DNA, 25 bp, Saccharomyces pastorianus
aactgttgctgaatagcgggtctac

SEQ ID NO: 20215 - DNA, 25 bp, Saccharomyces pastorianus
atgctttttgtttgcgtctgcctac

SEQ ID NO: 20216 - DNA, 25 bp, Saccharomyces pastorianus
gagacagcacaacgatcatgcggat

SEQ ID NO: 20217 - DNA, 25 bp, Saccharomyces pastorianus
aaaggtgacaacaatgccggcaacg

SEQ ID NO: 20218 - DNA, 25 bp, Saccharomyces pastorianus
gcaacgatatttcattgtacgccaa

SEQ ID NO: 20219 - DNA, 25 bp, Saccharomyces pastorianus
acccatcgtggttgttctttcaggc

SEQ ID NO: 20220 - DNA, 25 bp, Saccharomyces pastorianus
gttaagggctacttcccacaattgg

SEQ ID NO: 20221 - DNA, 25 bp, Saccharomyces pastorianus
gggaaaacagatccccattgtgcat

SEQ ID NO: 20222 - DNA, 25 bp, Saccharomyces pastorianus
gcctacatgttttggcagggcttag

SEQ ID NO: 20223 - DNA, 25 bp, Saccharomyces pastorianus
gaaacactctgagccaagtcggtga

SEQ ID NO: 20224 - DNA, 25 bp, Saccharomyces pastorianus
gatcatgcggataaacagtaccttt

SEQ ID NO: 20225 - DNA, 25 bp, Saccharomyces pastorianus
gaaccggctttccaaagaggtgaca

SEQ ID NO: 20226 - DNA, 25 bp, Saccharomyces pastorianus
ggtatagcaccaaatttgcctggct

SEQ ID NO: 20227 - DNA, 25 bp, Saccharomyces pastorianus
tggtgtcatttgctcggactatttt

SEQ ID NO: 20228 - DNA, 25 bp, Saccharomyces pastorianus
tatcggtgacgtgggcgctccaaaa

SEQ ID NO: 20229 - DNA, 25 bp, Saccharomyces pastorianus
aactgcgtagagctgacttatgcga

SEQ ID NO: 20230 - DNA, 25 bp, Saccharomyces pastorianus
gtacggcttcaattggagggccctt

SEQ ID NO: 20231 - DNA, 25 bp, Saccharomyces pastorianus
atcggactgtgttactttttcccag

SEQ ID NO: 20232 - DNA, 25 bp, Saccharomyces pastorianus
gggttcttcattagtgctgtgatat

SEQ ID NO: 20233 - DNA, 25 bp, Saccharomyces pastorianus
ttgttgcgtatctctgcggtatagc

SEQ ID NO: 20234 - DNA, 25 bp, Saccharomyces pastorianus
ggtactccagtagacaacattctta

SEQ ID NO: 20235 - DNA, 25 bp, Saccharomyces pastorianus
aatttgcctggctttatcggtgacg

SEQ ID NO: 20236 - DNA, 25 bp, Saccharomyces pastorianus
ctggcgcaggaaggctcttactata

SEQ ID NO: 20237 - DNA, 25 bp, Saccharomyces pastorianus
gactattcggatcagcactttggtt

SEQ ID NO: 20238 - DNA, 25 bp, Saccharomyces pastorianus
tcagcactttggttcagccgataac

SEQ ID NO: 20239 - DNA, 25 bp, Saccharomyces pastorianus
gataacttgttattgccaggccgag

SEQ ID NO: 20240 - DNA, 25 bp, Saccharomyces pastorianus
gactgggcccgataaagaacatgta

SEQ ID NO: 20241 - DNA, 25 bp, Saccharomyces pastorianus
aggccgaggccatgatatgtctgat

SEQ ID NO: 20242 - DNA, 25 bp, Saccharomyces pastorianus
atcgttgatacagcacactacaggg

SEQ ID NO: 20243 - DNA, 25 bp, Saccharomyces pastorianus
gtgtggtccttcacaaagacacttt

SEQ ID NO: 20244 - DNA, 25 bp, Saccharomyces pastorianus
gaagtagcggccttactgaacaaaa

SEQ ID NO: 20245 - DNA, 25 bp, Saccharomyces pastorianus
aacttcccgcagtttatcagtgtgc

SEQ ID NO: 20246 - DNA, 25 bp, Saccharomyces pastorianus
ttgtacggaaaagtcgcccctccag

SEQ ID NO: 20247 - DNA, 25 bp, Saccharomyces pastorianus
aaccaggccataccgattgggcaat

SEQ ID NO: 20248 - DNA, 25 bp, Saccharomyces pastorianus
ttagcaacatgggtacagcgaatca

SEQ ID NO: 20249 - DNA, 25 bp, Saccharomyces pastorianus
taagaggttctggttgcgtcccaat

SEQ ID NO: 20250 - DNA, 25 bp, Saccharomyces pastorianus
atttcttgaccactttgctgtacga

SEQ ID NO: 20251 - DNA, 25 bp, Saccharomyces pastorianus
gtgactccggaggtaaccgcgaaga

SEQ ID NO: 20252 - DNA, 25 bp, Saccharomyces pastorianus
gcgaatcaaatttacttcatcccag

SEQ ID NO: 20253 - DNA, 25 bp, Saccharomyces pastorianus
gaggaggctacaaaactggcttcaa

SEQ ID NO: 20254 - DNA, 25 bp, Saccharomyces pastorianus
tggcttcaacaagtcccgtaggtga

SEQ ID NO: 20255 - DNA, 25 bp, Saccharomyces pastorianus
aacacggtgtcattctaagcgatac

SEQ ID NO: 20256 - DNA, 25 bp, Saccharomyces pastorianus
taagtatttcttgcccgaagtcacg

SEQ ID NO: 20257 - DNA, 25 bp, Saccharomyces pastorianus
ggatgatccaaaggccaacgaaatt

SEQ ID NO: 20258 - DNA, 25 bp, Saccharomyces pastorianus
gaataagtttgccttagcagctaag

SEQ ID NO: 20259 - DNA, 25 bp, Saccharomyces pastorianus
ggcatacttgatagtcgtggccaaa

SEQ ID NO: 20260 - DNA, 25 bp, Saccharomyces pastorianus
gtccttgaaaagcacccgagtagtt

SEQ ID NO: 20261 - DNA, 25 bp, Saccharomyces pastorianus
gaacaagccagacttatctacggta

SEQ ID NO: 20262 - DNA, 25 bp, Saccharomyces pastorianus
aagtgccaaccatgggactgcaatc

SEQ ID NO: 20263 - DNA, 25 bp, Saccharomyces pastorianus
gaaattccgctgaagtggcatactt

SEQ ID NO: 20264 - DNA, 25 bp, Saccharomyces pastorianus
aggctgtgacctacggcttgggcat

SEQ ID NO: 20265 - DNA, 25 bp, Saccharomyces pastorianus
gaaagtctggatcccgaataccctg

SEQ ID NO: 20266 - DNA, 25 bp, Saccharomyces pastorianus
gaacttgtttcgttgcttcccgcaa

SEQ ID NO: 20267 - DNA, 25 bp, Saccharomyces pastorianus
agtagttcgcaaacgttcgtgccca

SEQ ID NO: 20268 - DNA, 25 bp, Saccharomyces pastorianus
gagccgttgacgatagattctttca

SEQ ID NO: 20269 - DNA, 25 bp, Saccharomyces pastorianus
atgctcccatgatagtgcttggcgt

SEQ ID NO: 20270 - DNA, 25 bp, Saccharomyces pastorianus
aatgttgtagagcagtcctcatcta

SEQ ID NO: 20271 - DNA, 25 bp, Saccharomyces pastorianus
acgggaacacgtcactctggaatag

SEQ ID NO: 20272 - DNA, 25 bp, Saccharomyces pastorianus
gaactttccgacattggaactaaca

SEQ ID NO: 20273 - DNA, 25 bp, Saccharomyces pastorianus
gactccactgaggacaacgggaaca

SEQ ID NO: 20274 - DNA, 25 bp, Saccharomyces pastorianus
tatttttctggattcccttgacctt

SEQ ID NO: 20275 - DNA, 25 bp, Saccharomyces pastorianus
gaactaacattaatgactccactga

SEQ ID NO: 20276 - DNA, 25 bp, Saccharomyces pastorianus
ttgaccttgctgcttttaacgtcgt

SEQ ID NO: 20277 - DNA, 25 bp, Saccharomyces pastorianus
gagcagtcctcatctaatgtggaaa

SEQ ID NO: 20278 - DNA, 25 bp, Saccharomyces pastorianus
atgaggatttgttcccactatcttg

SEQ ID NO: 20279 - DNA, 25 bp, Saccharomyces pastorianus
aatcaagacaactccatcaaccata

SEQ ID NO: 20280 - DNA, 25 bp, Saccharomyces pastorianus
gaaaacctctttgttgccgatgaag

SEQ ID NO: 20281 - DNA, 25 bp, Saccharomyces pastorianus
aactgtcttgatcatcggcgctaag

SEQ ID NO: 20282 - DNA, 25 bp, Saccharomyces pastorianus
tgtcatttccatcgatcatttgccc

SEQ ID NO: 20283 - DNA, 25 bp, Saccharomyces pastorianus
aatcctatcccgatatacacggtgg

SEQ ID NO: 20284 - DNA, 25 bp, Saccharomyces pastorianus
aaaatcggcgttcctgatgccaata

SEQ ID NO: 20285 - DNA, 25 bp, Saccharomyces pastorianus
acggtggctactgtgttcaacgaac

SEQ ID NO: 20286 - DNA, 25 bp, Saccharomyces pastorianus
gttcaacgaacccactgtgctggta

SEQ ID NO: 20287 - DNA, 25 bp, Saccharomyces pastorianus
atatgaaggaaacctcccgcggtgg

SEQ ID NO: 20288 - DNA, 25 bp, Saccharomyces pastorianus
tcagagtttttctcgcatgaccttc

SEQ ID NO: 20289 - DNA, 25 bp, Saccharomyces pastorianus
aaccaattgcaccttttaccaacat

SEQ ID NO: 20290 - DNA, 25 bp, Saccharomyces pastorianus
tacaaacaagctttggccacgggcg

SEQ ID NO: 20291 - DNA, 25 bp, Saccharomyces pastorianus
atgaccttctgccatctttagaact

SEQ ID NO: 20292 - DNA, 25 bp, Saccharomyces pastorianus
tggctcccggtatcgtggacacgga

SEQ ID NO: 20293 - DNA, 25 bp, Saccharomyces pastorianus
caggtcaaggccattgctgtggctc

SEQ ID NO: 20294 - DNA, 25 bp, Saccharomyces pastorianus
gtaagatcgactcgcttgtggccaa

SEQ ID NO: 20295 - DNA, 25 bp, Saccharomyces pastorianus
gcattgcgctgcctgagttgaagaa

SEQ ID NO: 20296 - DNA, 25 bp, Saccharomyces pastorianus
ttgtgtcgttagtttgcattgcgct

SEQ ID NO: 20297 - DNA, 25 bp, Saccharomyces pastorianus
cgacgactccgtgttgaagcaattg

SEQ ID NO: 20298 - DNA, 25 bp, Saccharomyces pastorianus
atggtgacaggttcttctacgtcgt

SEQ ID NO: 20299 - DNA, 25 bp, Saccharomyces pastorianus
accactttgctatgacgttggccaa

SEQ ID NO: 20300 - DNA, 25 bp, Saccharomyces pastorianus
tcttggagcccgtgcagaatgtcaa

SEQ ID NO: 20301 - DNA, 25 bp, Saccharomyces pastorianus
tccgacatgtacttcagctcttggg

SEQ ID NO: 20302 - DNA, 25 bp, Saccharomyces pastorianus
gaacggcatcccagaaggtgctaat

SEQ ID NO: 20303 - DNA, 25 bp, Saccharomyces pastorianus
gagagatactcttcgctaaccaagc

SEQ ID NO: 20304 - DNA, 25 bp, Saccharomyces pastorianus
aacgtcgcctccaagtgtgggttca

SEQ ID NO: 20305 - DNA, 25 bp, Saccharomyces pastorianus
taagctagctcctaccgacaagaag

SEQ ID NO: 20306 - DNA, 25 bp, Saccharomyces pastorianus
gaagacatagctcagttctgccaat

SEQ ID NO: 20307 - DNA, 25 bp, Saccharomyces pastorianus
tactattatcgggtttccttgcaac

SEQ ID NO: 20308 - DNA, 25 bp, Saccharomyces pastorianus
ttgcaaccaattcggccaccaagag

SEQ ID NO: 20309 - DNA, 25 bp, Saccharomyces pastorianus
gtggttcttatcgttaacgtcgcct

SEQ ID NO: 20310 - DNA, 25 bp, Saccharomyces pastorianus
ttcaccccgcagtacaaggaactag

SEQ ID NO: 20311 - DNA, 25 bp, Saccharomyces pastorianus
aagagcctggttccgatgaagacat

SEQ ID NO: 20312 - DNA, 25 bp, Saccharomyces pastorianus
ttaaactacggtgtgactttccctg

SEQ ID NO: 20313 - DNA, 25 bp, Saccharomyces pastorianus
agaagtccggtatgctgggcttgaa

SEQ ID NO: 20314 - DNA, 25 bp, Saccharomyces pastorianus
atctccaacagtattccaggtgcta

SEQ ID NO: 20315 - DNA, 25 bp, Saccharomyces pastorianus
aacggaactccggtgacagaataca

SEQ ID NO: 20316 - DNA, 25 bp, Saccharomyces pastorianus
cggaccaaggatcactgtcttttaa

SEQ ID NO: 20317 - DNA, 25 bp, Saccharomyces pastorianus
gaataccaaactttactctctgctg

SEQ ID NO: 20318 - DNA, 25 bp, Saccharomyces pastorianus
ggtgtatacaccagatagtcccata

SEQ ID NO: 20319 - DNA, 25 bp, Saccharomyces pastorianus
aaggttacatcgctgattgttcaaa

SEQ ID NO: 20320 - DNA, 25 bp, Saccharomyces pastorianus
gaagccacagattcgggattcgtgt

SEQ ID NO: 20321 - DNA, 25 bp, Saccharomyces pastorianus
gcagcagtagcagttcagaccaaac

SEQ ID NO: 20322 - DNA, 25 bp, Saccharomyces pastorianus
acaacctattctactttacctacag

SEQ ID NO: 20323 - DNA, 25 bp, Saccharomyces pastorianus
ggacctcatattcagactattcgga

SEQ ID NO: 20324 - DNA, 25 bp, Saccharomyces pastorianus
tggatactccagcacatgggtgtat

SEQ ID NO: 20325 - DNA, 25 bp, Saccharomyces pastorianus
acgagggtacctttcgacaagcgat

SEQ ID NO: 20326 - DNA, 25 bp, Saccharomyces pastorianus
ttaaacgggccatctcgtagggcgg

SEQ ID NO: 20327 - DNA, 25 bp, Saccharomyces pastorianus
actgaacgcgccgttggtactttag

SEQ ID NO: 20328 - DNA, 25 bp, Saccharomyces pastorianus
tagtgaaaaacacggctcggaactt

SEQ ID NO: 20329 - DNA, 25 bp, Saccharomyces pastorianus
tattgcaacagaagcccaatttctt

SEQ ID NO: 20330 - DNA, 25 bp, Saccharomyces pastorianus
gaattgatcaagcaagcggttcgct

SEQ ID NO: 20331 - DNA, 25 bp, Saccharomyces pastorianus
gtcgaactagagacacccaatggtt

SEQ ID NO: 20332 - DNA, 25 bp, Saccharomyces pastorianus
cggcgatgcgtttgggatttaagta

SEQ ID NO: 20333 - DNA, 25 bp, Saccharomyces pastorianus
gtaccagtgggaccattcaatgact

SEQ ID NO: 20334 - DNA, 25 bp, Saccharomyces pastorianus
gccgttggtactttagccctaatga

SEQ ID NO: 20335 - DNA, 25 bp, Saccharomyces pastorianus
gggtatgtcattttttcgccagaat

SEQ ID NO: 20336 - DNA, 25 bp, Saccharomyces pastorianus
tactgtagactagaacccctcgata

SEQ ID NO: 20337 - DNA, 25 bp, Saccharomyces pastorianus
aacatgagggtacgtttcgacaagt

SEQ ID NO: 20338 - DNA, 25 bp, Saccharomyces pastorianus
taatacctatggtaaagcgggcgaa

SEQ ID NO: 20339 - DNA, 25 bp, Saccharomyces pastorianus
aatcgatcaagccagcggttcactt

SEQ ID NO: 20340 - DNA, 25 bp, Saccharomyces pastorianus
atgggccatcaagcagggcggcaat

SEQ ID NO: 20341 - DNA, 25 bp, Saccharomyces pastorianus
cgtgctgttggtacattatgcctaa

SEQ ID NO: 20342 - DNA, 25 bp, Saccharomyces pastorianus
atgggtagacattcgcaaaactttt

SEQ ID NO: 20343 - DNA, 25 bp, Saccharomyces pastorianus
agcatgggccagaactttttaatac

SEQ ID NO: 20344 - DNA, 25 bp, Saccharomyces pastorianus
actgaagctcaattccttttgatga

SEQ ID NO: 20345 - DNA, 25 bp, Saccharomyces pastorianus
aatgaagagactaaacgtgctgttg

SEQ ID NO: 20346 - DNA, 25 bp, Saccharomyces pastorianus
gcggcaatgcgcttagggtttaaac

SEQ ID NO: 20347 - DNA, 25 bp, Saccharomyces pastorianus
tgctcacctgaacgtgctgggttac

SEQ ID NO: 20348 - DNA, 25 bp, Saccharomyces pastorianus
ctgggttacaagtcaccttctcaga

SEQ ID NO: 20349 - DNA, 25 bp, Saccharomyces pastorianus
agacatggccactggtacgtttagc

SEQ ID NO: 20350 - DNA, 25 bp, Saccharomyces pastorianus
aatctgacttctggcgtgaaaccta

SEQ ID NO: 20351 - DNA, 25 bp, Saccharomyces pastorianus
tgaattctggcttcggattaccgtc

SEQ ID NO: 20352 - DNA, 25 bp, Saccharomyces pastorianus
taaggcttcaagtgtcttcagacaa

SEQ ID NO: 20353 - DNA, 25 bp, Saccharomyces pastorianus
tatctagttggaccgatggcctgct

SEQ ID NO: 20354 - DNA, 25 bp, Saccharomyces pastorianus
gaaacctactatggatttacccgtg

SEQ ID NO: 20355 - DNA, 25 bp, Saccharomyces pastorianus
atttcctgtgtcagaccactatcta

SEQ ID NO: 20356 - DNA, 25 bp, Saccharomyces pastorianus
ttacccgtgacagtggacatttctt

SEQ ID NO: 20357 - DNA, 25 bp, Saccharomyces pastorianus
gctttttctgcacaattacgggttc

SEQ ID NO: 20358 - DNA, 25 bp, Saccharomyces pastorianus
ttcttatgcgtacaatacccgggag

SEQ ID NO: 20359 - DNA, 25 bp, Saccharomyces pastorianus
tgacggcttgtgtaccactgatcaa

SEQ ID NO: 20360 - DNA, 25 bp, Saccharomyces pastorianus
tactccctacaactactcgttattt

SEQ ID NO: 20361 - DNA, 25 bp, Saccharomyces pastorianus
aaatatcttttctcaccagggcgta

SEQ ID NO: 20362 - DNA, 25 bp, Saccharomyces pastorianus
tggtcgtctacgctgttcaatggaa

SEQ ID NO: 20363 - DNA, 25 bp, Saccharomyces pastorianus
tgtctttttcacaggtccaggtaac

SEQ ID NO: 20364 - DNA, 25 bp, Saccharomyces pastorianus
tggtttattattcccaatggtcgtc

SEQ ID NO: 20365 - DNA, 25 bp, Saccharomyces pastorianus
attcctccatcatttggtctttacc

SEQ ID NO: 20366 - DNA, 25 bp, Saccharomyces pastorianus
gtcgtacagttttcaattcctccat

SEQ ID NO: 20367 - DNA, 25 bp, Saccharomyces pastorianus
aacgggttcacttgtgccaatggtc

SEQ ID NO: 20368 - DNA, 25 bp, Saccharomyces pastorianus
tgtcgcaatcgctgttgtcattatc

SEQ ID NO: 20369 - DNA, 25 bp, Saccharomyces pastorianus
ggaagatcacccactttgtgttcaa

SEQ ID NO: 20370 - DNA, 25 bp, Saccharomyces pastorianus
agacagctgctgtggaacgcacttc

SEQ ID NO: 20371 - DNA, 25 bp, Saccharomyces pastorianus
gcctatcatggttgcggtgtgacta

SEQ ID NO: 20372 - DNA, 25 bp, Saccharomyces pastorianus
aacgcacttctggagctattttcaa

SEQ ID NO: 20373 - DNA, 25 bp, Saccharomyces pastorianus
aatccataccagattgcttgctgcc

SEQ ID NO: 20374 - DNA, 25 bp, Saccharomyces pastorianus
ggctctgtgtttgctggattggaat

SEQ ID NO: 20375 - DNA, 25 bp, Saccharomyces pastorianus
cttgtcgcccgtgtatagaatgttt

SEQ ID NO: 20376 - DNA, 25 bp, Saccharomyces pastorianus
ggtgtgactaatttcgtgcggtttc

SEQ ID NO: 20377 - DNA, 25 bp, Saccharomyces pastorianus
ctgagcggtgtagctttccgatgca

SEQ ID NO: 20378 - DNA, 25 bp, Saccharomyces pastorianus
aagtggctcaacgtggcctatcatg

SEQ ID NO: 20379 - DNA, 25 bp, Saccharomyces pastorianus
aactactgctatgtgtgcgtcgtga

SEQ ID NO: 20380 - DNA, 25 bp, Saccharomyces pastorianus
tagatatttttctttgggcatgcgc

SEQ ID NO: 20381 - DNA, 25 bp, Saccharomyces pastorianus
cgaacatagaagctccctttggaat

SEQ ID NO: 20382 - DNA, 25 bp, Saccharomyces pastorianus
ggaatgtcgtttcttccttatacat

SEQ ID NO: 20383 - DNA, 25 bp, Saccharomyces pastorianus
gatgttggcctatggatcgattatc

SEQ ID NO: 20384 - DNA, 25 bp, Saccharomyces pastorianus
gcattaagcgccttacagacagaaa

SEQ ID NO: 20385 - DNA, 25 bp, Saccharomyces pastorianus
gatggccctcatcaatgaacttctg

SEQ ID NO: 20386 - DNA, 25 bp, Saccharomyces pastorianus
actataccacccaaacaagcgatgt

SEQ ID NO: 20387 - DNA, 25 bp, Saccharomyces pastorianus
aagctcatgattttgaccccgaaca

SEQ ID NO: 20388 - DNA, 25 bp, Saccharomyces pastorianus
aattgtaatccgttcatcatctcca

SEQ ID NO: 20389 - DNA, 25 bp, Saccharomyces pastorianus
gggcatgcgcagaattgtaccaaaa

SEQ ID NO: 20390 - DNA, 25 bp, Saccharomyces pastorianus
aaacagattcgctatcttgaggaat

SEQ ID NO: 20391 - DNA, 25 bp, Saccharomyces pastorianus
tactgtccaacggatactccaatct

SEQ ID NO: 20392 - DNA, 25 bp, Saccharomyces pastorianus
gattctttatctctagcgaacattg

SEQ ID NO: 20393 - DNA, 25 bp, Saccharomyces pastorianus
gagatttttccaagatatccaagct

SEQ ID NO: 20394 - DNA, 25 bp, Saccharomyces pastorianus
ctactacacaacctattactttcca

SEQ ID NO: 20395 - DNA, 25 bp, Saccharomyces pastorianus
gtttctttaatggatgcttatgctc

SEQ ID NO: 20396 - DNA, 25 bp, Saccharomyces pastorianus
gcaaaggaaatcatggctctggcca

SEQ ID NO: 20397 - DNA, 25 bp, Saccharomyces pastorianus
gaagcactaaacaactctactacac

SEQ ID NO: 20398 - DNA, 25 bp, Saccharomyces pastorianus
gcttatgctcagtcagaatctgtag

SEQ ID NO: 20399 - DNA, 25 bp, Saccharomyces pastorianus
gaataccgctaaatactcgtcatta

SEQ ID NO: 20400 - DNA, 25 bp, Saccharomyces pastorianus
gtggctgcgcagatatcctattgga

SEQ ID NO: 20401 - DNA, 25 bp, Saccharomyces pastorianus
aagcgtcatcgtcaattgcgttatg

SEQ ID NO: 20402 - DNA, 25 bp, Saccharomyces pastorianus
gctttatatctacagaaggcgctat

SEQ ID NO: 20403 - DNA, 25 bp, Saccharomyces pastorianus
ttgtaccttattttgttggattgaa

SEQ ID NO: 20404 - DNA, 25 bp, Saccharomyces pastorianus
tattagggtcgttgagttactttct

SEQ ID NO: 20405 - DNA, 25 bp, Saccharomyces pastorianus
gatctgtgatctaaattacttctat

SEQ ID NO: 20406 - DNA, 25 bp, Saccharomyces pastorianus
gggcaattgtatatcatatccggaa

SEQ ID NO: 20407 - DNA, 25 bp, Saccharomyces pastorianus
taatcattgtttcctattgactggg

SEQ ID NO: 20408 - DNA, 25 bp, Saccharomyces pastorianus
atttcattcgttttcaagactctac

SEQ ID NO: 20409 - DNA, 25 bp, Saccharomyces pastorianus
gggcgaccgataagggtaccattga

SEQ ID NO: 20410 - DNA, 25 bp, Saccharomyces pastorianus
ggcgctatttggttgatctgtgatc

SEQ ID NO: 20411 - DNA, 25 bp, Saccharomyces pastorianus
gtaccattgatgtctaccaacaaga

SEQ ID NO: 20412 - DNA, 25 bp, Saccharomyces pastorianus
aagactctacagttacctgacgact

SEQ ID NO: 20413 - DNA, 25 bp, Saccharomyces pastorianus
cacgtttaccgattttgtcactcag

SEQ ID NO: 20414 - DNA, 25 bp, Saccharomyces pastorianus
gatatttgaccgtgtcagtccagtg

SEQ ID NO: 20415 - DNA, 25 bp, Saccharomyces pastorianus
aaattctttattcctgaccacacag

SEQ ID NO: 20416 - DNA, 25 bp, Saccharomyces pastorianus
gtataaacgcataatctcttccgag

SEQ ID NO: 20417 - DNA, 25 bp, Saccharomyces pastorianus
gtaaccttggatgcatagcctcgaa

SEQ ID NO: 20418 - DNA, 25 bp, Saccharomyces pastorianus
agatgctctcgatttatcccagatg

SEQ ID NO: 20419 - DNA, 25 bp, Saccharomyces pastorianus
tggcgagggctctttacagttttta

SEQ ID NO: 20420 - DNA, 25 bp, Saccharomyces pastorianus
gatcccgtgggatgaattcactcaa

SEQ ID NO: 20421 - DNA, 25 bp, Saccharomyces pastorianus
aaaatacaatttgcggcgatcccgt

SEQ ID NO: 20422 - DNA, 25 bp, Saccharomyces pastorianus
aaacagttcacatccgttacacaac

SEQ ID NO: 20423 - DNA, 25 bp, Saccharomyces pastorianus
aataatcaaactcacggcacgctac

SEQ ID NO: 20424 - DNA, 25 bp, Saccharomyces pastorianus
atccgacaatagaccatggaccgta

SEQ ID NO: 20425 - DNA, 25 bp, Saccharomyces pastorianus
acggtgactcatttatcattaaggc

SEQ ID NO: 20426 - DNA, 25 bp, Saccharomyces pastorianus
gggtcatcttgaaaatatctcctat

SEQ ID NO: 20427 - DNA, 25 bp, Saccharomyces pastorianus
gaacatgctgctttatcgccaagat

SEQ ID NO: 20428 - DNA, 25 bp, Saccharomyces pastorianus
tctgctgcaggtgtttggttgaaat

SEQ ID NO: 20429 - DNA, 25 bp, Saccharomyces pastorianus
ggtatgctaccattgacctttgcta

SEQ ID NO: 20430 - DNA, 25 bp, Saccharomyces pastorianus
gaatcttgccgacatgattgccaaa

SEQ ID NO: 20431 - DNA, 25 bp, Saccharomyces pastorianus
tgacctttgctactgaatctgacta

SEQ ID NO: 20432 - DNA, 25 bp, Saccharomyces pastorianus
ggctctgcaagagaacatgctgctt

SEQ ID NO: 20433 - DNA, 25 bp, Saccharomyces pastorianus
aaggcaaagcataccatgtcgaaag

SEQ ID NO: 20434 - DNA, 25 bp, Saccharomyces pastorianus
agcttatgatcttgacggcactgaa

SEQ ID NO: 20435 - DNA, 25 bp, Saccharomyces pastorianus
gaggatgttcaaacccctgaataca

SEQ ID NO: 20436 - DNA, 25 bp, Saccharomyces pastorianus
ttacattcgccgtactaaggatggg

SEQ ID NO: 20437 - DNA, 25 bp, Saccharomyces pastorianus
atgagagcactggacttgaagactt

SEQ ID NO: 20438 - DNA, 25 bp, Saccharomyces pastorianus
aggtggcgggcattacactgcatac

SEQ ID NO: 20439 - DNA, 25 bp, Saccharomyces pastorianus
gaaaacagtattgccggatcagcat

SEQ ID NO: 20440 - DNA, 25 bp, Saccharomyces pastorianus
gggagtcacgccaggaatacgattt

SEQ ID NO: 20441 - DNA, 25 bp, Saccharomyces pastorianus
gggctccatctatgatttgtacgcg

SEQ ID NO: 20442 - DNA, 25 bp, Saccharomyces pastorianus
aagaatttggactcaggttcatcga

SEQ ID NO: 20443 - DNA, 25 bp, Saccharomyces pastorianus
gaattgggcggctctaaactacaag

SEQ ID NO: 20444 - DNA, 25 bp, Saccharomyces pastorianus
aatcgcagtttagaggttggacaca

SEQ ID NO: 20445 - DNA, 25 bp, Saccharomyces pastorianus
gttggacacattgaaacgcgggatt

SEQ ID NO: 20446 - DNA, 25 bp, Saccharomyces pastorianus
gaacggaactttccacttcattcaa

SEQ ID NO: 20447 - DNA, 25 bp, Saccharomyces pastorianus
tgtgattcaatcttttcccgtgtct

SEQ ID NO: 20448 - DNA, 25 bp, Saccharomyces pastorianus
tcccgtgtctctgcttttattgaac

SEQ ID NO: 20449 - DNA, 25 bp, Saccharomyces pastorianus
gataactttccacttattaggcgaa

SEQ ID NO: 20450 - DNA, 25 bp, Saccharomyces pastorianus
actaactcaggatcttcccgggaag

SEQ ID NO: 20451 - DNA, 25 bp, Saccharomyces pastorianus
atgatttacatctccctcgtgggat

SEQ ID NO: 20452 - DNA, 25 bp, Saccharomyces pastorianus
gattcccctttacctatctatgaaa

SEQ ID NO: 20453 - DNA, 25 bp, Saccharomyces pastorianus
gaagaatcacctggctacagatcct

SEQ ID NO: 20454 - DNA, 25 bp, Saccharomyces pastorianus
cagatcctcggcttggttttgaata

SEQ ID NO: 20455 - DNA, 25 bp, Saccharomyces pastorianus
atgcgctgtcatatcgatgttcatt

SEQ ID NO: 20456 - DNA, 25 bp, Saccharomyces pastorianus
ttgcctatctttttgctggtttatc

SEQ ID NO: 20457 - DNA, 25 bp, Saccharomyces pastorianus
gcatgggtaccgaagttcctcatag

SEQ ID NO: 20458 - DNA, 25 bp, Saccharomyces pastorianus
taaaagtctcaaaattcccgcatgg

SEQ ID NO: 20459 - DNA, 25 bp, Saccharomyces pastorianus
gctgcgaacgttatattgccggaca

SEQ ID NO: 20460 - DNA, 25 bp, Saccharomyces pastorianus
ggtctggttctgcataaaagtctca

SEQ ID NO: 20461 - DNA, 25 bp, Saccharomyces pastorianus
gcagatattttctccctaggtttaa

SEQ ID NO: 20462 - DNA, 25 bp, Saccharomyces pastorianus
gttcctcatagatggcgagtcactc

SEQ ID NO: 20463 - DNA, 25 bp, Saccharomyces pastorianus
gtgcaggcgccatcattcaggaaga

SEQ ID NO: 20464 - DNA, 25 bp, Saccharomyces pastorianus
aaatgactcgtagtgcaggcgccat

SEQ ID NO: 20465 - DNA, 25 bp, Saccharomyces pastorianus
gaggagacccactgcaaatcaaatt

SEQ ID NO: 20466 - DNA, 25 bp, Saccharomyces pastorianus
cgccaatactgctactgctattact

SEQ ID NO: 20467 - DNA, 25 bp, Saccharomyces pastorianus
ggcggttaagttctacggatatcca

SEQ ID NO: 20468 - DNA, 25 bp, Saccharomyces pastorianus
aatgacgatggctctgatttggata

SEQ ID NO: 20469 - DNA, 25 bp, Saccharomyces pastorianus
cggattctggaaaccgcaacggtat

SEQ ID NO: 20470 - DNA, 25 bp, Saccharomyces pastorianus
gatccatggactttgttccgcgaaa

SEQ ID NO: 20471 - DNA, 25 bp, Saccharomyces pastorianus
gcaacggtatgcaatggatttcgaa

SEQ ID NO: 20472 - DNA, 25 bp, Saccharomyces pastorianus
gacaaagaaacctttattgccgccg

SEQ ID NO: 20473 - DNA, 25 bp, Saccharomyces pastorianus
gctctctcaaggtactgcaggcgaa

SEQ ID NO: 20474 - DNA, 25 bp, Saccharomyces pastorianus
aaagaatccttctgtactcctgtga

SEQ ID NO: 20475 - DNA, 25 bp, Saccharomyces pastorianus
acgaacgattaccaaggccttgctt

SEQ ID NO: 20476 - DNA, 25 bp, Saccharomyces pastorianus
gcaagttattacaaggcggatccat

SEQ ID NO: 20477 - DNA, 25 bp, Saccharomyces pastorianus
aaggccttgctttgctccagcataa

SEQ ID NO: 20478 - DNA, 25 bp, Saccharomyces pastorianus
gcccatgctctgaatgtaccatatt

SEQ ID NO: 20479 - DNA, 25 bp, Saccharomyces pastorianus
aagtactgcatcttcttcggtggaa

SEQ ID NO: 20480 - DNA, 25 bp, Saccharomyces pastorianus
cgttgccttttgaattcgacagatt

SEQ ID NO: 20481 - DNA, 25 bp, Saccharomyces pastorianus
attttgagaacctgtcgccgtacaa

SEQ ID NO: 20482 - DNA, 25 bp, Saccharomyces pastorianus
gggacctcttttgatataccgtcaa

SEQ ID NO: 20483 - DNA, 25 bp, Saccharomyces pastorianus
acagcgtgactccattttcaggtat

SEQ ID NO: 20484 - DNA, 25 bp, Saccharomyces pastorianus
gtcgaaccgctcatcaagtactgca

SEQ ID NO: 20485 - DNA, 25 bp, Saccharomyces pastorianus
ggtgtttgagcagccacttcttaaa

SEQ ID NO: 20486 - DNA, 25 bp, Saccharomyces pastorianus
tgatataccatcgtttttcccacag

SEQ ID NO: 20487 - DNA, 25 bp, Saccharomyces pastorianus
ggcgccaatcttcgcaatattcaat

SEQ ID NO: 20488 - DNA, 25 bp, Saccharomyces pastorianus
agttccctccgacgagattgctata

SEQ ID NO: 20489 - DNA, 25 bp, Saccharomyces pastorianus
taaaagttcaccaccatcagaccag

SEQ ID NO: 20490 - DNA, 25 bp, Saccharomyces pastorianus
ttcagccaagatcattattccccat

SEQ ID NO: 20491 - DNA, 25 bp, Saccharomyces pastorianus
agattctggatctggctctactaag

SEQ ID NO: 20492 - DNA, 25 bp, Saccharomyces pastorianus
gttgctaatgacttccatggccaag

SEQ ID NO: 20493 - DNA, 25 bp, Saccharomyces pastorianus
ggtcaccttttacaatggcatccta

SEQ ID NO: 20494 - DNA, 25 bp, Saccharomyces pastorianus
gatacatattccttcgtcgttgcta

SEQ ID NO: 20495 - DNA, 25 bp, Saccharomyces pastorianus
atgaaggtgatttggccgcttcctt

SEQ ID NO: 20496 - DNA, 25 bp, Saccharomyces pastorianus
aacacgatgcttctttggattcaga

SEQ ID NO: 20497 - DNA, 25 bp, Saccharomyces pastorianus
gatgaaccttgacctttctttacaa

SEQ ID NO: 20498 - DNA, 25 bp, Saccharomyces pastorianus
atggcatcctaccttactgggcaag

SEQ ID NO: 20499 - DNA, 25 bp, Saccharomyces pastorianus
cggcgacgcgtaccattacaatgaa

SEQ ID NO: 20500 - DNA, 25 bp, Saccharomyces pastorianus
aaacgttccagtcgtggctaactca

SEQ ID NO: 20501 - DNA, 25 bp, Saccharomyces pastorianus
atgggacctggctatccttgagaaa

SEQ ID NO: 20502 - DNA, 25 bp, Saccharomyces pastorianus
tactccctggcttgaaaactgacat

SEQ ID NO: 20503 - DNA, 25 bp, Saccharomyces pastorianus
aaatcgttcatctgcggtgtgctat

SEQ ID NO: 20504 - DNA, 25 bp, Saccharomyces pastorianus
gtgctgccactttggaaaccatctt

SEQ ID NO: 20505 - DNA, 25 bp, Saccharomyces pastorianus
ggaaactacgtgctgcccaaaatga

SEQ ID NO: 20506 - DNA, 25 bp, Saccharomyces pastorianus
gaaaaaattgttcgtgctgccactt

SEQ ID NO: 20507 - DNA, 25 bp, Saccharomyces pastorianus
aaatctctgataatctactccctgg

SEQ ID NO: 20508 - DNA, 25 bp, Saccharomyces pastorianus
tccaaattttcttcccagcatgatg

SEQ ID NO: 20509 - DNA, 25 bp, Saccharomyces pastorianus
gataccttgttagtgttttcgccca

SEQ ID NO: 20510 - DNA, 25 bp, Saccharomyces pastorianus
ggctgtgatcctcaattggtcgcaa

SEQ ID NO: 20511 - DNA, 25 bp, Saccharomyces pastorianus
gttttcgcccacgagtgagtttgaa

SEQ ID NO: 20512 - DNA, 25 bp, Saccharomyces pastorianus
tcctgtggaaaatcgtttatcttgc

SEQ ID NO: 20513 - DNA, 25 bp, Saccharomyces pastorianus
gacaagaaaagctggctgaactaac

SEQ ID NO: 20514 - DNA, 25 bp, Saccharomyces pastorianus
gaaatgacagcgagtttaagaaact

SEQ ID NO: 20515 - DNA, 25 bp, Saccharomyces pastorianus
catggttaaccaacaattagcatat

SEQ ID NO: 20516 - DNA, 25 bp, Saccharomyces pastorianus
tagagtcttacccaacggataaatt

SEQ ID NO: 20517 - DNA, 25 bp, Saccharomyces pastorianus
atcgtttatcttgcaagagaaagcc

SEQ ID NO: 20518 - DNA, 25 bp, Saccharomyces pastorianus
gataaattgtggagatcctgtggaa

SEQ ID NO: 20519 - DNA, 25 bp, Saccharomyces pastorianus
gagaaagccaaatatgtcaatgact

SEQ ID NO: 20520 - DNA, 25 bp, Saccharomyces pastorianus
ctctagaacgcaactagacatggtt

SEQ ID NO: 20521 - DNA, 25 bp, Saccharomyces pastorianus
gtttaagaaactctagaacgcaact

SEQ ID NO: 20522 - DNA, 25 bp, Saccharomyces pastorianus
tgtcaatgacttatcacatgatgaa

SEQ ID NO: 20523 - DNA, 25 bp, Saccharomyces pastorianus
aatgacgttaaaccgatttccatcg

SEQ ID NO: 20524 - DNA, 25 bp, Saccharomyces pastorianus
tcgttgggcctaagaagccatgttt

SEQ ID NO: 20525 - DNA, 25 bp, Saccharomyces pastorianus
atgtttttgccacccatgaggagag

SEQ ID NO: 20526 - DNA, 25 bp, Saccharomyces pastorianus
aatagctcaatgacggatagggacg

SEQ ID NO: 20527 - DNA, 25 bp, Saccharomyces pastorianus
gactcaaagagccatccaatctgaa

SEQ ID NO: 20528 - DNA, 25 bp, Saccharomyces pastorianus
aaattgctctatcatcgttgggcct

SEQ ID NO: 20529 - DNA, 25 bp, Saccharomyces pastorianus
aagactgtacaagccatgactcaaa

SEQ ID NO: 20530 - DNA, 25 bp, Saccharomyces pastorianus
ttaacgtcctaaccaaatgcttgaa

SEQ ID NO: 20531 - DNA, 25 bp, Saccharomyces pastorianus
ggcgagacccttaatgaacaaaaca

SEQ ID NO: 20532 - DNA, 25 bp, Saccharomyces pastorianus
aggtcgcagataaaccactttcgaa

SEQ ID NO: 20533 - DNA, 25 bp, Saccharomyces pastorianus
gaaacatgttatccaaacccgaaag

SEQ ID NO: 20534 - DNA, 25 bp, Saccharomyces pastorianus
aatacgctaccagtgcagtgacata

SEQ ID NO: 20535 - DNA, 25 bp, Saccharomyces pastorianus
ggttggtcttattcgatatcttctg

SEQ ID NO: 20536 - DNA, 25 bp, Saccharomyces pastorianus
aaggttaccgctacgacatggacaa

SEQ ID NO: 20537 - DNA, 25 bp, Saccharomyces pastorianus
attgccccagcaagaaactactcta

SEQ ID NO: 20538 - DNA, 25 bp, Saccharomyces pastorianus
aagcatcttccatcgatagtcgttc

SEQ ID NO: 20539 - DNA, 25 bp, Saccharomyces pastorianus
taatcaaggttctaccacccattat

SEQ ID NO: 20540 - DNA, 25 bp, Saccharomyces pastorianus
aaacccagtgctttggctcaggatc

SEQ ID NO: 20541 - DNA, 25 bp, Saccharomyces pastorianus
aactactctaactccaggttggtct

SEQ ID NO: 20542 - DNA, 25 bp, Saccharomyces pastorianus
acatccatgggaggtactacagctt

SEQ ID NO: 20543 - DNA, 25 bp, Saccharomyces pastorianus
gtgacatacttttctactttcggga

SEQ ID NO: 20544 - DNA, 25 bp, Saccharomyces pastorianus
tatacatacagtgactcggcggcgc

SEQ ID NO: 20545 - DNA, 25 bp, Saccharomyces pastorianus
ggttttttaattcttgatgctgtac

SEQ ID NO: 20546 - DNA, 25 bp, Saccharomyces pastorianus
aaatcaagtcacaacccacagagtc

SEQ ID NO: 20547 - DNA, 25 bp, Saccharomyces pastorianus
acagagtcccaactggtcttgcaat

SEQ ID NO: 20548 - DNA, 25 bp, Saccharomyces pastorianus
tttacacggtgtggtcgctttacaa

SEQ ID NO: 20549 - DNA, 25 bp, Saccharomyces pastorianus
aacaagacgttcgaggtggattcgt

SEQ ID NO: 20550 - DNA, 25 bp, Saccharomyces pastorianus
gtaggaacaatgacgatggcgaatt

SEQ ID NO: 20551 - DNA, 25 bp, Saccharomyces pastorianus
gtacgaattcgtttgtaggaacaat

SEQ ID NO: 20552 - DNA, 25 bp, Saccharomyces pastorianus
aacaatatccgtgtctcgatgaaca

SEQ ID NO: 20553 - DNA, 25 bp, Saccharomyces pastorianus
aatcgccgaccatgtcgtcgacgaa

SEQ ID NO: 20554 - DNA, 25 bp, Saccharomyces pastorianus
agtgaaacacccagaatcgacccca

SEQ ID NO: 20555 - DNA, 25 bp, Saccharomyces pastorianus
acgaagagctaagtttacacggtgt

SEQ ID NO: 20556 - DNA, 25 bp, Saccharomyces pastorianus
atttatccgctattgccttcgttta

SEQ ID NO: 20557 - DNA, 25 bp, Saccharomyces pastorianus
attttcaccaaattcaggccctgtt

SEQ ID NO: 20558 - DNA, 25 bp, Saccharomyces pastorianus
ggatatcttggcaggtaccattcaa

SEQ ID NO: 20559 - DNA, 25 bp, Saccharomyces pastorianus
gcttgttgatttcatttccgagcaa

SEQ ID NO: 20560 - DNA, 25 bp, Saccharomyces pastorianus
ttctgtctcttctgtctttgaaaga

SEQ ID NO: 20561 - DNA, 25 bp, Saccharomyces pastorianus
gttaaagccaatgccctacctgaaa

SEQ ID NO: 20562 - DNA, 25 bp, Saccharomyces pastorianus
agagttggagccagcaccattttca

SEQ ID NO: 20563 - DNA, 25 bp, Saccharomyces pastorianus
agaattctatgttaccactggttta

SEQ ID NO: 20564 - DNA, 25 bp, Saccharomyces pastorianus
agtcaatttacactcttctgtctct

SEQ ID NO: 20565 - DNA, 25 bp, Saccharomyces pastorianus
gaacacgtagatgtgccaggccatt

SEQ ID NO: 20566 - DNA, 25 bp, Saccharomyces pastorianus
gacttgggccacattgacgttactg

SEQ ID NO: 20567 - DNA, 25 bp, Saccharomyces pastorianus
aaggctttggaacttgcctctgcag

SEQ ID NO: 20568 - DNA, 25 bp, Saccharomyces pastorianus
gttcgtgggtcatcaacaaggcttt

SEQ ID NO: 20569 - DNA, 25 bp, Saccharomyces pastorianus
tttcaagaccgcttactattccttt

SEQ ID NO: 20570 - DNA, 25 bp, Saccharomyces pastorianus
gccggcatcaccgacgaaaaggatt

SEQ ID NO: 20571 - DNA, 25 bp, Saccharomyces pastorianus
ctagccatgtatgttgccggcatca

SEQ ID NO: 20572 - DNA, 25 bp, Saccharomyces pastorianus
gaatctcgtggtttcaaagccgatg

SEQ ID NO: 20573 - DNA, 25 bp, Saccharomyces pastorianus
acatagacgtgaccgaattgttcca

SEQ ID NO: 20574 - DNA, 25 bp, Saccharomyces pastorianus
tgaagttactttccaaaccgagttg

SEQ ID NO: 20575 - DNA, 25 bp, Saccharomyces pastorianus
tactattccttttacttgcctgttg

SEQ ID NO: 20576 - DNA, 25 bp, Saccharomyces pastorianus
aaggactccacctcagaagccaagt

SEQ ID NO: 20577 - DNA, 25 bp, Saccharomyces pastorianus
aggacgtcttgatcccattgggtga

SEQ ID NO: 20578 - DNA, 25 bp, Saccharomyces pastorianus
aaccattgcaaggtatattccacaa

SEQ ID NO: 20579 - DNA, 25 bp, Saccharomyces pastorianus
gggtataactgcatacgcggtctct

SEQ ID NO: 20580 - DNA, 25 bp, Saccharomyces pastorianus
gttcctgtatgttttgatacctgca

SEQ ID NO: 20581 - DNA, 25 bp, Saccharomyces pastorianus
attcaacactttcaggagattcaaa

SEQ ID NO: 20582 - DNA, 25 bp, Saccharomyces pastorianus
tataactgcatacgcggtctctcca

SEQ ID NO: 20583 - DNA, 25 bp, Saccharomyces pastorianus
gtatgttttgatacctgcagggatt

SEQ ID NO: 20584 - DNA, 25 bp, Saccharomyces pastorianus
aacgccgtattcaacactttcagga

SEQ ID NO: 20585 - DNA, 25 bp, Saccharomyces pastorianus
tgaatatctatatagcaaggctggt

SEQ ID NO: 20586 - DNA, 25 bp, Saccharomyces pastorianus
aaggtatattccacaacgccgtatt

SEQ ID NO: 20587 - DNA, 25 bp, Saccharomyces pastorianus
gagattcaaatctcagttcctgtat

SEQ ID NO: 20588 - DNA, 25 bp, Saccharomyces pastorianus
acctgcagggatttattggtattgg

SEQ ID NO: 20589 - DNA, 25 bp, Saccharomyces pastorianus
gagaatattctgttccaaccaaatg

SEQ ID NO: 20590 - DNA, 25 bp, Saccharomyces pastorianus
agagccatacgttgcgcctgaagag

SEQ ID NO: 20591 - DNA, 25 bp, Saccharomyces pastorianus
ggaaggttccgggagcccattgcat

SEQ ID NO: 20592 - DNA, 25 bp, Saccharomyces pastorianus
aactgttgcaaagctcttggatgag

SEQ ID NO: 20593 - DNA, 25 bp, Saccharomyces pastorianus
attcctgaaaaggactccctgttca

SEQ ID NO: 20594 - DNA, 25 bp, Saccharomyces pastorianus
tcgacccgaccaaaagaatctccat

SEQ ID NO: 20595 - DNA, 25 bp, Saccharomyces pastorianus
cctgttcaaatctttcctcagcgaa

SEQ ID NO: 20596 - DNA, 25 bp, Saccharomyces pastorianus
gaatctccattgaacaactgttgca

SEQ ID NO: 20597 - DNA, 25 bp, Saccharomyces pastorianus
gatcgcattgtatagaacattccag

SEQ ID NO: 20598 - DNA, 25 bp, Saccharomyces pastorianus
cattgcatcctctagaagctgactg

SEQ ID NO: 20599 - DNA, 25 bp, Saccharomyces pastorianus
gttcggttttccaaacagcatggga

SEQ ID NO: 20600 - DNA, 25 bp, Saccharomyces pastorianus
gttccagatgtcacgtacacgttgt

SEQ ID NO: 20601 - DNA, 25 bp, Saccharomyces pastorianus
ggaagacatcaactatggcgttcaa

SEQ ID NO: 20602 - DNA, 25 bp, Saccharomyces pastorianus
aaatgccgagttaagattcccgcca

SEQ ID NO: 20603 - DNA, 25 bp, Saccharomyces pastorianus
tggtactccggattacatagcgcct

SEQ ID NO: 20604 - DNA, 25 bp, Saccharomyces pastorianus
aggtgacacttctcagtttgacaag

SEQ ID NO: 20605 - DNA, 25 bp, Saccharomyces pastorianus
aagttctatgctgccgaagtttgtt

SEQ ID NO: 20606 - DNA, 25 bp, Saccharomyces pastorianus
acacgttgtgtggtactccggatta

SEQ ID NO: 20607 - DNA, 25 bp, Saccharomyces pastorianus
taagattcccgccatttttcaacga

SEQ ID NO: 20608 - DNA, 25 bp, Saccharomyces pastorianus
tcagtttgacaagtaccccgaggaa

SEQ ID NO: 20609 - DNA, 25 bp, Saccharomyces pastorianus
aaatgctggcgggatacactccatt

SEQ ID NO: 20610 - DNA, 25 bp, Saccharomyces pastorianus
gatttgctaagtacgttccagatgt

SEQ ID NO: 20611 - DNA, 25 bp, Saccharomyces pastorianus
gggttcccatccctgatatatatgg

SEQ ID NO: 20612 - DNA, 25 bp, Saccharomyces pastorianus
ttatgcaattatcaagccttatcgg

SEQ ID NO: 20613 - DNA, 25 bp, Saccharomyces pastorianus
gtctaagacgaagcgaggtcctcct

SEQ ID NO: 20614 - DNA, 25 bp, Saccharomyces pastorianus
atatggcccttagactcagaatgaa

SEQ ID NO: 20615 - DNA, 25 bp, Saccharomyces pastorianus
ggtgatgtctcacaatttgcaattg

SEQ ID NO: 20616 - DNA, 25 bp, Saccharomyces pastorianus
gtagttggtgtcgtcgggttcccat

SEQ ID NO: 20617 - DNA, 25 bp, Saccharomyces pastorianus
gacaggcctggcatctttatatttg

SEQ ID NO: 20618 - DNA, 25 bp, Saccharomyces pastorianus
taacaacactatatgggacaggcct

SEQ ID NO: 20619 - DNA, 25 bp, Saccharomyces pastorianus
agccttatcggcagttcttctttgg

SEQ ID NO: 20620 - DNA, 25 bp, Saccharomyces pastorianus
gaggtcctcctgctattacagaaga

SEQ ID NO: 20621 - DNA, 25 bp, Saccharomyces pastorianus
gatatagtccacgattcaccaaata

SEQ ID NO: 20622 - DNA, 25 bp, Saccharomyces pastorianus
ttccgccaaggccaagagagacgtt

SEQ ID NO: 20623 - DNA, 25 bp, Saccharomyces pastorianus
gtcaaattcaagcatcaaccaccgc

SEQ ID NO: 20624 - DNA, 25 bp, Saccharomyces pastorianus
gatggttacttagccttaggtgaca

SEQ ID NO: 20625 - DNA, 25 bp, Saccharomyces pastorianus
ccaatacacctctactttcggtatt

SEQ ID NO: 20626 - DNA, 25 bp, Saccharomyces pastorianus
ccatctttgaaggacagctcttgta

SEQ ID NO: 20627 - DNA, 25 bp, Saccharomyces pastorianus
aaggacggtgtcttgactgacggta

SEQ ID NO: 20628 - DNA, 25 bp, Saccharomyces pastorianus
acaaccagttccgtgaagtcctctt

SEQ ID NO: 20629 - DNA, 25 bp, Saccharomyces pastorianus
cgctcaagccactgacggtcaaatt

SEQ ID NO: 20630 - DNA, 25 bp, Saccharomyces pastorianus
gctcttgtaagaactcaggtacttt

SEQ ID NO: 20631 - DNA, 25 bp, Saccharomyces pastorianus
taggtgacaaggacgtcttctacca

SEQ ID NO: 20632 - DNA, 25 bp, Saccharomyces pastorianus
gtattgccgttcaagctgtttcttc

SEQ ID NO: 20633 - DNA, 25 bp, Saccharomyces pastorianus
ctagggcttatggtacgaaggtcac

SEQ ID NO: 20634 - DNA, 25 bp, Saccharomyces pastorianus
agtacctcccttacaagaaattgca

SEQ ID NO: 20635 - DNA, 25 bp, Saccharomyces pastorianus
ttataacccatcaagctgtgcttcg

SEQ ID NO: 20636 - DNA, 25 bp, Saccharomyces pastorianus
gctgtgcttcggtgcatatatgcat

SEQ ID NO: 20637 - DNA, 25 bp, Saccharomyces pastorianus
aaacattcctgcagtaagtacgtat

SEQ ID NO: 20638 - DNA, 25 bp, Saccharomyces pastorianus
gaacacagcaaacggccaagtacct

SEQ ID NO: 20639 - DNA, 25 bp, Saccharomyces pastorianus
cgaactagatgctggtgtctgtgat

SEQ ID NO: 20640 - DNA, 25 bp, Saccharomyces pastorianus
gaagacttcaaagctcgtgacaatg

SEQ ID NO: 20641 - DNA, 25 bp, Saccharomyces pastorianus
gcatactttatgaacgtcccacaag

SEQ ID NO: 20642 - DNA, 25 bp, Saccharomyces pastorianus
gacagcatggacgtctactctgaag

SEQ ID NO: 20643 - DNA, 25 bp, Saccharomyces pastorianus
acgagtatacgtaccgaggcggaga

SEQ ID NO: 20644 - DNA, 25 bp, Saccharomyces pastorianus
gtatattccgattcaccatttccaa

SEQ ID NO: 20645 - DNA, 25 bp, Saccharomyces pastorianus
gtagcaaccgcttcaggtagcaagt

SEQ ID NO: 20646 - DNA, 25 bp, Saccharomyces pastorianus
gacactaacgttgccgttgggtcag

SEQ ID NO: 20647 - DNA, 25 bp, Saccharomyces pastorianus
cacacctttggtgggcaacggaaat

SEQ ID NO: 20648 - DNA, 25 bp, Saccharomyces pastorianus
aactcaatgaacgacctgcacatca

SEQ ID NO: 20649 - DNA, 25 bp, Saccharomyces pastorianus
aagacggatctggaatcgccgataa

SEQ ID NO: 20650 - DNA, 25 bp, Saccharomyces pastorianus
acaaagatctcttcgcgtggcggat

SEQ ID NO: 20651 - DNA, 25 bp, Saccharomyces pastorianus
atcaagtccaacgtcaatccggaag

SEQ ID NO: 20652 - DNA, 25 bp, Saccharomyces pastorianus
tatttcattcatggcgacgaggctg

SEQ ID NO: 20653 - DNA, 25 bp, Saccharomyces pastorianus
caccatttccaacgtacttgcgaat

SEQ ID NO: 20654 - DNA, 25 bp, Saccharomyces pastorianus
gaacacattgaacggatcttctaca

SEQ ID NO: 20655 - DNA, 25 bp, Saccharomyces pastorianus
tagtgatgacactgctaccaccatt

SEQ ID NO: 20656 - DNA, 25 bp, Saccharomyces pastorianus
aactccaaatcgcagctagtaccta

SEQ ID NO: 20657 - DNA, 25 bp, Saccharomyces pastorianus
gatatcattatgtgctaccacgccc

SEQ ID NO: 20658 - DNA, 25 bp, Saccharomyces pastorianus
gcccgcatgagcgagcctgaaatgg

SEQ ID NO: 20659 - DNA, 25 bp, Saccharomyces pastorianus
aaaggcttgtgatgcttacccgagc

SEQ ID NO: 20660 - DNA, 25 bp, Saccharomyces pastorianus
ccacgccctaattcatcatttcaaa

SEQ ID NO: 20661 - DNA, 25 bp, Saccharomyces pastorianus
tttattaccgtactcaaaggcttgt

SEQ ID NO: 20662 - DNA, 25 bp, Saccharomyces pastorianus
tgttaataatccataccaccactct

SEQ ID NO: 20663 - DNA, 25 bp, Saccharomyces pastorianus
gcgtgagaacccaaccaatgaactt

SEQ ID NO: 20664 - DNA, 25 bp, Saccharomyces pastorianus
gacattaatatggatctgcctcagg

SEQ ID NO: 20665 - DNA, 25 bp, Saccharomyces pastorianus
atttccgatgacttagaactcccac

SEQ ID NO: 20666 - DNA, 25 bp, Saccharomyces pastorianus
aagatttcggcgtcactgagaatgt

SEQ ID NO: 20667 - DNA, 25 bp, Saccharomyces pastorianus
gaaaattccaaggtcccagctattg

SEQ ID NO: 20668 - DNA, 25 bp, Saccharomyces pastorianus
gagagttcctcgtaaagacgttcca

SEQ ID NO: 20669 - DNA, 25 bp, Saccharomyces pastorianus
ggaacacttcgccacaggttatgat

SEQ ID NO: 20670 - DNA, 25 bp, Saccharomyces pastorianus
atttgaaaagctttcccctcgacag

SEQ ID NO: 20671 - DNA, 25 bp, Saccharomyces pastorianus
gaaaccctaaagattgccgccacag

SEQ ID NO: 20672 - DNA, 25 bp, Saccharomyces pastorianus
gatctggctgatcaagtttccgtca

SEQ ID NO: 20673 - DNA, 25 bp, Saccharomyces pastorianus
gtatgagcttgttggttccttcaga

SEQ ID NO: 20674 - DNA, 25 bp, Saccharomyces pastorianus
gagactttattgacacagggcaacc

SEQ ID NO: 20675 - DNA, 25 bp, Saccharomyces pastorianus
tgaatcctccacaactatgaccgtt

SEQ ID NO: 20676 - DNA, 25 bp, Saccharomyces pastorianus
aggatagcacaccattacaattcga

SEQ ID NO: 20677 - DNA, 25 bp, Saccharomyces pastorianus
gcgacgccttttatggagatgctta

SEQ ID NO: 20678 - DNA, 25 bp, Saccharomyces pastorianus
gatttacagtttcccttgcgacgcc

SEQ ID NO: 20679 - DNA, 25 bp, Saccharomyces pastorianus
atatccatcttactatactacaggt

SEQ ID NO: 20680 - DNA, 25 bp, Saccharomyces pastorianus
actacaggtcacgtattgcgcaaat

SEQ ID NO: 20681 - DNA, 25 bp, Saccharomyces pastorianus
aataccgttttatcagatccttaga

SEQ ID NO: 20682 - DNA, 25 bp, Saccharomyces pastorianus
gaaacgatcaccttcaccaaaaatc

SEQ ID NO: 20683 - DNA, 25 bp, Saccharomyces pastorianus
aggctcgctggttgtcagactacaa

SEQ ID NO: 20684 - DNA, 25 bp, Saccharomyces pastorianus
aagcatacaccggacttgccaaaat

SEQ ID NO: 20685 - DNA, 25 bp, Saccharomyces pastorianus
tgaaaaatcctacttgttacctgaa

SEQ ID NO: 20686 - DNA, 25 bp, Saccharomyces pastorianus
gattacttgtttgtgcactgaggac

SEQ ID NO: 20687 - DNA, 25 bp, Saccharomyces pastorianus
cagcaccatcttctacatcaataat

SEQ ID NO: 20688 - DNA, 25 bp, Saccharomyces pastorianus
ttgcggagatcttacaaccgtaaag

SEQ ID NO: 20689 - DNA, 25 bp, Saccharomyces pastorianus
gaaacctgtgttttattatcgaata

SEQ ID NO: 20690 - DNA, 25 bp, Saccharomyces pastorianus
gaccactattcccacggacaggtta

SEQ ID NO: 20691 - DNA, 25 bp, Saccharomyces pastorianus
gtgcagtcgcaatgtgtatcaagga

SEQ ID NO: 20692 - DNA, 25 bp, Saccharomyces pastorianus
gctggcctgcaaccaaattctataa

SEQ ID NO: 20693 - DNA, 25 bp, Saccharomyces pastorianus
caaggagtacttcacgatttatgga

SEQ ID NO: 20694 - DNA, 25 bp, Saccharomyces pastorianus
aactgctggaaagccctgaggtgtc

SEQ ID NO: 20695 - DNA, 25 bp, Saccharomyces pastorianus
acgaagaccctcagattatcatatt

SEQ ID NO: 20696 - DNA, 25 bp, Saccharomyces pastorianus
aggttcgagttgatctgctatttat

SEQ ID NO: 20697 - DNA, 25 bp, Saccharomyces pastorianus
agaattatgttagtgctggcctgca

SEQ ID NO: 20698 - DNA, 25 bp, Saccharomyces pastorianus
aatgatggttactgtgctgtgcccg

SEQ ID NO: 20699 - DNA, 25 bp, Saccharomyces pastorianus
gcaacagcagcatactcaggagccg

SEQ ID NO: 20700 - DNA, 25 bp, Saccharomyces pastorianus
aacccgcccagcctagtgtgatata

SEQ ID NO: 20701 - DNA, 25 bp, Saccharomyces pastorianus
gatatactactttgtggagttgacc

SEQ ID NO: 20702 - DNA, 25 bp, Saccharomyces pastorianus
aagcacttcaacgatatacacgaca

SEQ ID NO: 20703 - DNA, 25 bp, Saccharomyces pastorianus
gtgaattcgggaccactaatcaacc

SEQ ID NO: 20704 - DNA, 25 bp, Saccharomyces pastorianus
tcaggagccggaaggaccagaccaa

SEQ ID NO: 20705 - DNA, 25 bp, Saccharomyces pastorianus
gacccgttagtagaagaatatccca

SEQ ID NO: 20706 - DNA, 25 bp, Saccharomyces pastorianus
tggagttgaccaatgcaggcataca

SEQ ID NO: 20707 - DNA, 25 bp, Saccharomyces pastorianus
agcggtgcccgttacggccacggca

SEQ ID NO: 20708 - DNA, 25 bp, Saccharomyces pastorianus
gaccagaccaaggtggacccgttag

SEQ ID NO: 20709 - DNA, 25 bp, Saccharomyces pastorianus
aagaatatcccatgggtgaattcgg

SEQ ID NO: 20710 - DNA, 25 bp, Saccharomyces pastorianus
gaacgctatcattgccgggtttttt

SEQ ID NO: 20711 - DNA, 25 bp, Saccharomyces pastorianus
gattgcgctgtgaaagccgtcagga

SEQ ID NO: 20712 - DNA, 25 bp, Saccharomyces pastorianus
gggctcatgttccagagatacgctg

SEQ ID NO: 20713 - DNA, 25 bp, Saccharomyces pastorianus
gagaagatccatggaacgctatcat

SEQ ID NO: 20714 - DNA, 25 bp, Saccharomyces pastorianus
gatccatgtcccatagtcatactta

SEQ ID NO: 20715 - DNA, 25 bp, Saccharomyces pastorianus
cgcgtgctcctgtgcttggtggtaa

SEQ ID NO: 20716 - DNA, 25 bp, Saccharomyces pastorianus
ccagagatacgctgcttggcaagcc

SEQ ID NO: 20717 - DNA, 25 bp, Saccharomyces pastorianus
aaagccgtcaggaaaagagaagatc

SEQ ID NO: 20718 - DNA, 25 bp, Saccharomyces pastorianus
tttactggtggtgccttggctgtaa

SEQ ID NO: 20719 - DNA, 25 bp, Saccharomyces pastorianus
ttggagacatacaagaaacagttct

SEQ ID NO: 20720 - DNA, 25 bp, Saccharomyces pastorianus
gctcctgtgcttggtggtaattttg

SEQ ID NO: 20721 - DNA, 25 bp, Saccharomyces pastorianus
tagcaccagaagatagcggcaactc

SEQ ID NO: 20722 - DNA, 25 bp, Saccharomyces pastorianus
cgttgatatcggctctattggtaaa

SEQ ID NO: 20723 - DNA, 25 bp, Saccharomyces pastorianus
agtcattccgttcaagaaggcccct

SEQ ID NO: 20724 - DNA, 25 bp, Saccharomyces pastorianus
agctatgctacatccatttatcaca

SEQ ID NO: 20725 - DNA, 25 bp, Saccharomyces pastorianus
aaactccgacaacgatgctaatcat

SEQ ID NO: 20726 - DNA, 25 bp, Saccharomyces pastorianus
tagccggtgtgcttaatttgaatcc

SEQ ID NO: 20727 - DNA, 25 bp, Saccharomyces pastorianus
ttacctggcccatcgagaaaacacg

SEQ ID NO: 20728 - DNA, 25 bp, Saccharomyces pastorianus
gtctgattcatttcttagccggtgt

SEQ ID NO: 20729 - DNA, 25 bp, Saccharomyces pastorianus
caactcctcccaaaagcatcgtatg

SEQ ID NO: 20730 - DNA, 25 bp, Saccharomyces pastorianus
tattcacaggtgaatggtttcctcc

SEQ ID NO: 20731 - DNA, 25 bp, Saccharomyces pastorianus
ttaatgctggcgacggcagtgctga

SEQ ID NO: 20732 - DNA, 25 bp, Saccharomyces pastorianus
gcaactgggccaggagttccaattg

SEQ ID NO: 20733 - DNA, 25 bp, Saccharomyces pastorianus
gaaaatgctgccactttgcaactgg

SEQ ID NO: 20734 - DNA, 25 bp, Saccharomyces pastorianus
ggagtccatcgatgttctactagaa

SEQ ID NO: 20735 - DNA, 25 bp, Saccharomyces pastorianus
ttacacccgtttgaggtggcgcaac

SEQ ID NO: 20736 - DNA, 25 bp, Saccharomyces pastorianus
gcgccaatgacgaaacgactgctgt

SEQ ID NO: 20737 - DNA, 25 bp, Saccharomyces pastorianus
gcaactgggctctttggcctgtgac

SEQ ID NO: 20738 - DNA, 25 bp, Saccharomyces pastorianus
gaaaccgtgggtgctgttatacagc

SEQ ID NO: 20739 - DNA, 25 bp, Saccharomyces pastorianus
agctgctgaaaagcaccggcttaca

SEQ ID NO: 20740 - DNA, 25 bp, Saccharomyces pastorianus
tgcagtacttgacgagtttctcccg

SEQ ID NO: 20741 - DNA, 25 bp, Saccharomyces pastorianus
gtttctcccggttcagagaccagga

SEQ ID NO: 20742 - DNA, 25 bp, Saccharomyces pastorianus
gcgaggccaggctagtgatcaaaga

SEQ ID NO: 20743 - DNA, 25 bp, Saccharomyces pastorianus
gacgacaaattcactgtttccgcca

SEQ ID NO: 20744 - DNA, 25 bp, Saccharomyces pastorianus
ctacgatttgccatccaacaaggaa

SEQ ID NO: 20745 - DNA, 25 bp, Saccharomyces pastorianus
gttggtgctatgagagaaatcgaaa

SEQ ID NO: 20746 - DNA, 25 bp, Saccharomyces pastorianus
tgctaccaccaactactcaagttgt

SEQ ID NO: 20747 - DNA, 25 bp, Saccharomyces pastorianus
aaattttcacattgctaccaccaac

SEQ ID NO: 20748 - DNA, 25 bp, Saccharomyces pastorianus
caccaagttgagagacgacaaattc

SEQ ID NO: 20749 - DNA, 25 bp, Saccharomyces pastorianus
atcaactacgatttgccatccaaca

SEQ ID NO: 20750 - DNA, 25 bp, Saccharomyces pastorianus
aatgtttgaccgatttgtacgattc

SEQ ID NO: 20751 - DNA, 25 bp, Saccharomyces pastorianus
cactgtttccgccatctactctgat

SEQ ID NO: 20752 - DNA, 25 bp, Saccharomyces pastorianus
gacttcaagtatgaatgtttgaccg

SEQ ID NO: 20753 - DNA, 25 bp, Saccharomyces pastorianus
aaattcactgtttccgccatctact

SEQ ID NO: 20754 - DNA, 25 bp, Saccharomyces pastorianus
atatacttcaagtgcggcttcccga

SEQ ID NO: 20755 - DNA, 25 bp, Saccharomyces pastorianus
gtttccaagacagcgttgcgttcat

SEQ ID NO: 20756 - DNA, 25 bp, Saccharomyces pastorianus
tagacgagtgcccttgtttccaaga

SEQ ID NO: 20757 - DNA, 25 bp, Saccharomyces pastorianus
gcaagctcgaatgtccactgtatat

SEQ ID NO: 20758 - DNA, 25 bp, Saccharomyces pastorianus
ggcttcccgaacctacatatcgaaa

SEQ ID NO: 20759 - DNA, 25 bp, Saccharomyces pastorianus
caggttactggtgggcttagcgttt

SEQ ID NO: 20760 - DNA, 25 bp, Saccharomyces pastorianus
agaggttcgggttcacatcagtgta

SEQ ID NO: 20761 - DNA, 25 bp, Saccharomyces pastorianus
cgttggtgtactctctgctaattaa

SEQ ID NO: 20762 - DNA, 25 bp, Saccharomyces pastorianus
ttcgttatttatgcgggaatcccct

SEQ ID NO: 20763 - DNA, 25 bp, Saccharomyces pastorianus
gtggcatgcatggactactggactt

SEQ ID NO: 20764 - DNA, 25 bp, Saccharomyces pastorianus
tcgacatagtgggacggttcgttat

SEQ ID NO: 20765 - DNA, 25 bp, Saccharomyces pastorianus
attgccagcgccgttttcaagagat

SEQ ID NO: 20766 - DNA, 25 bp, Saccharomyces pastorianus
aagcgtctcgagaatagccgccgga

SEQ ID NO: 20767 - DNA, 25 bp, Saccharomyces pastorianus
gccagcgccgttttcaagagatctc

SEQ ID NO: 20768 - DNA, 25 bp, Saccharomyces pastorianus
gttgcctccgcaagcgtctcgagaa

SEQ ID NO: 20769 - DNA, 25 bp, Saccharomyces pastorianus
gggcaactcgttcacgtcgttcaaa

SEQ ID NO: 20770 - DNA, 25 bp, Saccharomyces pastorianus
atgccaagacgtacgggcccttaag

SEQ ID NO: 20771 - DNA, 25 bp, Saccharomyces pastorianus
gttcacgtcgttcaaagagtacaga

SEQ ID NO: 20772 - DNA, 25 bp, Saccharomyces pastorianus
atgatcgctcaaagtacaagattag

SEQ ID NO: 20773 - DNA, 25 bp, Saccharomyces pastorianus
tacgggcccttaagcgcctcgttgg

SEQ ID NO: 20774 - DNA, 25 bp, Saccharomyces pastorianus
gaatagccgccggagccattgccag

SEQ ID NO: 20775 - DNA, 25 bp, Saccharomyces pastorianus
gagtacagagagaatgccaagacgt

SEQ ID NO: 20776 - DNA, 25 bp, Saccharomyces pastorianus
gcattttactattcttacccaacca

SEQ ID NO: 20777 - DNA, 25 bp, Saccharomyces pastorianus
gcagccagtgccatatatcaagttt

SEQ ID NO: 20778 - DNA, 25 bp, Saccharomyces pastorianus
aatcccctcatacattgtctgtgtg

SEQ ID NO: 20779 - DNA, 25 bp, Saccharomyces pastorianus
acttcgggacgtacgagttctgcaa

SEQ ID NO: 20780 - DNA, 25 bp, Saccharomyces pastorianus
aagacggccatcagtggtgcctgtg

SEQ ID NO: 20781 - DNA, 25 bp, Saccharomyces pastorianus
aacacctccgcatcagtatggcaga

SEQ ID NO: 20782 - DNA, 25 bp, Saccharomyces pastorianus
tatcagcggatcgacatgtgcggcg

SEQ ID NO: 20783 - DNA, 25 bp, Saccharomyces pastorianus
aacggcctcagacgcactaatgaac

SEQ ID NO: 20784 - DNA, 25 bp, Saccharomyces pastorianus
gcgatcacaacacctttagactgca

SEQ ID NO: 20785 - DNA, 25 bp, Saccharomyces pastorianus
tgaacatcccattcgcagcatttaa

SEQ ID NO: 20786 - DNA, 25 bp, Saccharomyces pastorianus
gaagaacctgattgacccaagcgat

SEQ ID NO: 20787 - DNA, 25 bp, Saccharomyces pastorianus
agtcgtacatggcacctgagcgtat

SEQ ID NO: 20788 - DNA, 25 bp, Saccharomyces pastorianus
gaaagacgcaccaaaatcctacggg

SEQ ID NO: 20789 - DNA, 25 bp, Saccharomyces pastorianus
atttattgccaacgctgtcatccat

SEQ ID NO: 20790 - DNA, 25 bp, Saccharomyces pastorianus
tccatatccaccagaaactttcgac

SEQ ID NO: 20791 - DNA, 25 bp, Saccharomyces pastorianus
accacccaggttgccatcagaaaga

SEQ ID NO: 20792 - DNA, 25 bp, Saccharomyces pastorianus
gaaagaagacccacttacacagcct

SEQ ID NO: 20793 - DNA, 25 bp, Saccharomyces pastorianus
aaacatattgtgctctgccaaccaa

SEQ ID NO: 20794 - DNA, 25 bp, Saccharomyces pastorianus
acggaacatccctggctggtaaaat

SEQ ID NO: 20795 - DNA, 25 bp, Saccharomyces pastorianus
aattgagcgccattgttgacggacc

SEQ ID NO: 20796 - DNA, 25 bp, Saccharomyces pastorianus
gcacctgagcgtatcaagtccttga

SEQ ID NO: 20797 - DNA, 25 bp, Saccharomyces pastorianus
tcagaaagattcagtcccgacgcac

SEQ ID NO: 20798 - DNA, 25 bp, Saccharomyces pastorianus
tttccaattcttgggctacttgggc

SEQ ID NO: 20799 - DNA, 25 bp, Saccharomyces pastorianus
caattcttgggctacttgggcagtt

SEQ ID NO: 20800 - DNA, 25 bp, Saccharomyces pastorianus
aaccaggtccgctcgatctttacag

SEQ ID NO: 20801 - DNA, 25 bp, Saccharomyces pastorianus
atatttttcttcaaccaggtccgct

SEQ ID NO: 20802 - DNA, 25 bp, Saccharomyces pastorianus
tcgatctttacagctttgcacacac

SEQ ID NO: 20803 - DNA, 25 bp, Saccharomyces pastorianus
ctacttgggcagttgcgttgtgatt

SEQ ID NO: 20804 - DNA, 25 bp, Saccharomyces pastorianus
aatcaagttgtcaagaagggccttt

SEQ ID NO: 20805 - DNA, 25 bp, Saccharomyces pastorianus
attcttgggctacttgggcagttgc

SEQ ID NO: 20806 - DNA, 25 bp, Saccharomyces pastorianus
aggtccgctcgatctttacagcttt

SEQ ID NO: 20807 - DNA, 25 bp, Saccharomyces pastorianus
atctttacagctttgcacacaccca

SEQ ID NO: 20808 - DNA, 25 bp, Saccharomyces pastorianus
ttttcttcaaccaggtccgctcgat

SEQ ID NO: 20809 - DNA, 25 bp, Saccharomyces pastorianus
ttgcttcggcgaagagccctaagag

SEQ ID NO: 20810 - DNA, 25 bp, Saccharomyces pastorianus
gacctttgcgatccagcatgggaga

SEQ ID NO: 20811 - DNA, 25 bp, Saccharomyces pastorianus
aatatgctacgatattcgcttcccg

SEQ ID NO: 20812 - DNA, 25 bp, Saccharomyces pastorianus
tatgtttccccagtgcatttactac

SEQ ID NO: 20813 - DNA, 25 bp, Saccharomyces pastorianus
gtccgcagctttttgttacagattt

SEQ ID NO: 20814 - DNA, 25 bp, Saccharomyces pastorianus
aaaactccggtctatgggagctgaa

SEQ ID NO: 20815 - DNA, 25 bp, Saccharomyces pastorianus
gatcgggtcaagaatgttctcctct

SEQ ID NO: 20816 - DNA, 25 bp, Saccharomyces pastorianus
atgctatgtggtcatgccaggacaa

SEQ ID NO: 20817 - DNA, 25 bp, Saccharomyces pastorianus
gtaatagctcgtgcagacccaaatt

SEQ ID NO: 20818 - DNA, 25 bp, Saccharomyces pastorianus
acccaaattgtgtcggtccgcagct

SEQ ID NO: 20819 - DNA, 25 bp, Saccharomyces pastorianus
aagaaggtgtccacgacctttgcga

SEQ ID NO: 20820 - DNA, 25 bp, Saccharomyces pastorianus
attgagaacatttgaccagtacgca

SEQ ID NO: 20821 - DNA, 25 bp, Saccharomyces pastorianus
gaggtaaagaaatggcccgtcatgg

SEQ ID NO: 20822 - DNA, 25 bp, Saccharomyces pastorianus
accactgccgctattgtaagttcag

SEQ ID NO: 20823 - DNA, 25 bp, Saccharomyces pastorianus
tgacgccatggagcgcataccattc

SEQ ID NO: 20824 - DNA, 25 bp, Saccharomyces pastorianus
gtaagttcagtggaccgcaagatct

SEQ ID NO: 20825 - DNA, 25 bp, Saccharomyces pastorianus
gagagaacccaatccggtcaagaca

SEQ ID NO: 20826 - DNA, 25 bp, Saccharomyces pastorianus
agtacaattttactaccactgccgc

SEQ ID NO: 20827 - DNA, 25 bp, Saccharomyces pastorianus
taccattcaaggaagcctggcagat

SEQ ID NO: 20828 - DNA, 25 bp, Saccharomyces pastorianus
gacaacagcaacacttctccaagaa

SEQ ID NO: 20829 - DNA, 25 bp, Saccharomyces pastorianus
aaatgtcgtcatgctgggcgaagta

SEQ ID NO: 20830 - DNA, 25 bp, Saccharomyces pastorianus
gcaagatctttgtccttttacgtga

SEQ ID NO: 20831 - DNA, 25 bp, Saccharomyces pastorianus
atcaaatctgtagcactggacctat

SEQ ID NO: 20832 - DNA, 25 bp, Saccharomyces pastorianus
gtctcacggcttactcatcgagaac

SEQ ID NO: 20833 - DNA, 25 bp, Saccharomyces pastorianus
atccagcgcaaactctagatccggg

SEQ ID NO: 20834 - DNA, 25 bp, Saccharomyces pastorianus
atgtgattgacgacacctcgtctca

SEQ ID NO: 20835 - DNA, 25 bp, Saccharomyces pastorianus
atcactacaaggaccctttccaaga

SEQ ID NO: 20836 - DNA, 25 bp, Saccharomyces pastorianus
aaggatgcaggcgaaacttccaccg

SEQ ID NO: 20837 - DNA, 25 bp, Saccharomyces pastorianus
aaagcaggtctgttgcagccagcca

SEQ ID NO: 20838 - DNA, 25 bp, Saccharomyces pastorianus
aaactgttagtcgatgcaagtgcta

SEQ ID NO: 20839 - DNA, 25 bp, Saccharomyces pastorianus
aaccacagggtgcactctttgggta

SEQ ID NO: 20840 - DNA, 25 bp, Saccharomyces pastorianus
tatggacatcgacttggacagcacc

SEQ ID NO: 20841 - DNA, 25 bp, Saccharomyces pastorianus
gaaacttgaaatacgctgcgcaaag

SEQ ID NO: 20842 - DNA, 25 bp, Saccharomyces pastorianus
gactgggctttgttgcattctaaaa

SEQ ID NO: 20843 - DNA, 25 bp, Saccharomyces pastorianus
taggttgtcgtcgtgtgtacgtcaa

SEQ ID NO: 20844 - DNA, 25 bp, Saccharomyces pastorianus
tcccgtgtgtctgatgcgtatttta

SEQ ID NO: 20845 - DNA, 25 bp, Saccharomyces pastorianus
atttagtcatgagcgtcaccactgt

SEQ ID NO: 20846 - DNA, 25 bp, Saccharomyces pastorianus
cttactggtatagtgttcaccgcaa

SEQ ID NO: 20847 - DNA, 25 bp, Saccharomyces pastorianus
caactggtcgcttccaaaggtggga

SEQ ID NO: 20848 - DNA, 25 bp, Saccharomyces pastorianus
atttccggatggttctaccaactgg

SEQ ID NO: 20849 - DNA, 25 bp, Saccharomyces pastorianus
gacgtctactcattcgataacacac

SEQ ID NO: 20850 - DNA, 25 bp, Saccharomyces pastorianus
ccaactggcccgcatcaatgggaaa

SEQ ID NO: 20851 - DNA, 25 bp, Saccharomyces pastorianus
gtgggaaagtcttcggtatcaacct

SEQ ID NO: 20852 - DNA, 25 bp, Saccharomyces pastorianus
ttggcccctaacgtggctttgacta

SEQ ID NO: 20853 - DNA, 25 bp, Saccharomyces pastorianus
tccgactccattgctctttgtagaa

SEQ ID NO: 20854 - DNA, 25 bp, Saccharomyces pastorianus
atgaagacggttccttcaccggcga

SEQ ID NO: 20855 - DNA, 25 bp, Saccharomyces pastorianus
atccatcggtggtctgttgtgtaaa

SEQ ID NO: 20856 - DNA, 25 bp, Saccharomyces pastorianus
gaagcgtatctgtcgttgattccaa

SEQ ID NO: 20857 - DNA, 25 bp, Saccharomyces pastorianus
gcacttctggttcagacgtcggcaa

SEQ ID NO: 20858 - DNA, 25 bp, Saccharomyces pastorianus
accggcgatggttctgatggctgta

SEQ ID NO: 20859 - DNA, 25 bp, Saccharomyces pastorianus
gtagaactgattacccaggctctga

SEQ ID NO: 20860 - DNA, 25 bp, Saccharomyces pastorianus
gacttgtgttcgactgaccagacat

SEQ ID NO: 20861 - DNA, 25 bp, Saccharomyces pastorianus
gaacccggtatgtcgaagactcaat

SEQ ID NO: 20862 - DNA, 25 bp, Saccharomyces pastorianus
gaaaacatggtcattcccactctag

SEQ ID NO: 20863 - DNA, 25 bp, Saccharomyces pastorianus
attgggctccaatagtcttgggcgc

SEQ ID NO: 20864 - DNA, 25 bp, Saccharomyces pastorianus
gccgaactgattcctgccagtgagt

SEQ ID NO: 20865 - DNA, 25 bp, Saccharomyces pastorianus
cctactaagttgttcctatgacggg

SEQ ID NO: 20866 - DNA, 25 bp, Saccharomyces pastorianus
gtatccgcctgatcaaccgggcgta

SEQ ID NO: 20867 - DNA, 25 bp, Saccharomyces pastorianus
aacgggcatgaagacggcagtgaca

SEQ ID NO: 20868 - DNA, 25 bp, Saccharomyces pastorianus
gaagtaggcccctcaaacgggcatg

SEQ ID NO: 20869 - DNA, 25 bp, Saccharomyces pastorianus
gttcgttagagtgggctactacgta

SEQ ID NO: 20870 - DNA, 25 bp, Saccharomyces pastorianus
gagttaagagagaacccgccagcaa

SEQ ID NO: 20871 - DNA, 25 bp, Saccharomyces pastorianus
gccagcaaaggttcaggtcgaccat

SEQ ID NO: 20872 - DNA, 25 bp, Saccharomyces pastorianus
gggagcagcccacagatatcgagtc

SEQ ID NO: 20873 - DNA, 25 bp, Saccharomyces pastorianus
atgaaggagacctgtatccgcctga

SEQ ID NO: 20874 - DNA, 25 bp, Saccharomyces pastorianus
gtgtaaccgttatcctactaagttg

SEQ ID NO: 20875 - DNA, 25 bp, Saccharomyces pastorianus
gccgccgttgtagtcgctgatgaaa

SEQ ID NO: 20876 - DNA, 25 bp, Saccharomyces pastorianus
ctgcatgtttggtcacaggctcata

SEQ ID NO: 20877 - DNA, 25 bp, Saccharomyces pastorianus
gtataggcgcccttcaaagttttga

SEQ ID NO: 20878 - DNA, 25 bp, Saccharomyces pastorianus
caaagttttgatgcggccttggcca

SEQ ID NO: 20879 - DNA, 25 bp, Saccharomyces pastorianus
aaggatgaaagctggccctgcgttg

SEQ ID NO: 20880 - DNA, 25 bp, Saccharomyces pastorianus
cagtgggatttacgctccgggaaat

SEQ ID NO: 20881 - DNA, 25 bp, Saccharomyces pastorianus
gaaacgtctgtccaggtgtacgata

SEQ ID NO: 20882 - DNA, 25 bp, Saccharomyces pastorianus
gtaatccgtactttggaaggccaca

SEQ ID NO: 20883 - DNA, 25 bp, Saccharomyces pastorianus
agatttctcacaggataacgccgcc

SEQ ID NO: 20884 - DNA, 25 bp, Saccharomyces pastorianus
gtgcacccgtgctatcattagattt

SEQ ID NO: 20885 - DNA, 25 bp, Saccharomyces pastorianus
taatgtcttatcaacctccaccaat

SEQ ID NO: 20886 - DNA, 25 bp, Saccharomyces pastorianus
aagcaaccgtttaatgagcatacag

SEQ ID NO: 20887 - DNA, 25 bp, Saccharomyces pastorianus
ggtaatgcatctttaggcgattcat

SEQ ID NO: 20888 - DNA, 25 bp, Saccharomyces pastorianus
gagatccgtaataacttggcactgt

SEQ ID NO: 20889 - DNA, 25 bp, Saccharomyces pastorianus
attccaccatttcggactctattga

SEQ ID NO: 20890 - DNA, 25 bp, Saccharomyces pastorianus
cactgtgtcaactgcctgatgaaga

SEQ ID NO: 20891 - DNA, 25 bp, Saccharomyces pastorianus
attcaatgccagactttactccaag

SEQ ID NO: 20892 - DNA, 25 bp, Saccharomyces pastorianus
ggactctattgatgaaacggactta

SEQ ID NO: 20893 - DNA, 25 bp, Saccharomyces pastorianus
gattttgacatcaaccacaacgaca

SEQ ID NO: 20894 - DNA, 25 bp, Saccharomyces pastorianus
ggatacggattccaccatttcggac

SEQ ID NO: 20895 - DNA, 25 bp, Saccharomyces pastorianus
gatgaccattcaatacctgacgtgg

SEQ ID NO: 20896 - DNA, 25 bp, Saccharomyces pastorianus
taactctcaaacagtgtgtacacca

SEQ ID NO: 20897 - DNA, 25 bp, Saccharomyces pastorianus
ggctcatagggctttcatacaagtc

SEQ ID NO: 20898 - DNA, 25 bp, Saccharomyces pastorianus
tagggctttcatacaagtcataatc

SEQ ID NO: 20899 - DNA, 25 bp, Saccharomyces pastorianus
tgaggcttacagacaagcggcttca

SEQ ID NO: 20900 - DNA, 25 bp, Saccharomyces pastorianus
aaaagcattcgctgaggcttacaga

SEQ ID NO: 20901 - DNA, 25 bp, Saccharomyces pastorianus
ggtggaagcttttatttacagagta

SEQ ID NO: 20902 - DNA, 25 bp, Saccharomyces pastorianus
gcaaggtgctactaatgcttcaaga

SEQ ID NO: 20903 - DNA, 25 bp, Saccharomyces pastorianus
gaaaggcggcttgaacatggacaaa

SEQ ID NO: 20904 - DNA, 25 bp, Saccharomyces pastorianus
gagacctcctccaaattcaacaagt

SEQ ID NO: 20905 - DNA, 25 bp, Saccharomyces pastorianus
agattaaaatgggagctggctcaaa

SEQ ID NO: 20906 - DNA, 25 bp, Saccharomyces pastorianus
aggtgaatatggtggcattacatta

SEQ ID NO: 20907 - DNA, 25 bp, Saccharomyces pastorianus
caacgacagattcaactatttattt

SEQ ID NO: 20908 - DNA, 25 bp, Saccharomyces pastorianus
ggaagtcactttgcagagagcttta

SEQ ID NO: 20909 - DNA, 25 bp, Saccharomyces pastorianus
attagtaagctgcacgccaatatgt

SEQ ID NO: 20910 - DNA, 25 bp, Saccharomyces pastorianus
gacctgcaggttataatacgatcca

SEQ ID NO: 20911 - DNA, 25 bp, Saccharomyces pastorianus
gattttttcaatattcccatcctgg

SEQ ID NO: 20912 - DNA, 25 bp, Saccharomyces pastorianus
ggacttaactcatgacctgcaggtt

SEQ ID NO: 20913 - DNA, 25 bp, Saccharomyces pastorianus
taaattcatcgtcttcaacctcgtc

SEQ ID NO: 20914 - DNA, 25 bp, Saccharomyces pastorianus
gacggattttcttttactactgacg

SEQ ID NO: 20915 - DNA, 25 bp, Saccharomyces pastorianus
gacgggaaagccatcttcactaaat

SEQ ID NO: 20916 - DNA, 25 bp, Saccharomyces pastorianus
gatccatattggaacggtatgctcc

SEQ ID NO: 20917 - DNA, 25 bp, Saccharomyces pastorianus
aattcattcatattcgagtttctag

SEQ ID NO: 20918 - DNA, 25 bp, Saccharomyces pastorianus
aacggcctgtatttgaagtgtgctt

SEQ ID NO: 20919 - DNA, 25 bp, Saccharomyces pastorianus
aaattagcggccattgacaacggtt

SEQ ID NO: 20920 - DNA, 25 bp, Saccharomyces pastorianus
gcctccatccttttgcgaacaaaaa

SEQ ID NO: 20921 - DNA, 25 bp, Saccharomyces pastorianus
gaacctatcggatcaaactcctctt

SEQ ID NO: 20922 - DNA, 25 bp, Saccharomyces pastorianus
tatattatgattccagcctccatcc

SEQ ID NO: 20923 - DNA, 25 bp, Saccharomyces pastorianus
agacgagtggcgtttgtacccatac

SEQ ID NO: 20924 - DNA, 25 bp, Saccharomyces pastorianus
aaagggccaagcattcaacgtcgtg

SEQ ID NO: 20925 - DNA, 25 bp, Saccharomyces pastorianus
gtacccatacggctggttgtattta

SEQ ID NO: 20926 - DNA, 25 bp, Saccharomyces pastorianus
cggtttggccttcccatggaaacat

SEQ ID NO: 20927 - DNA, 25 bp, Saccharomyces pastorianus
acgattccatctcatgtacacaggc

SEQ ID NO: 20928 - DNA, 25 bp, Saccharomyces pastorianus
tatttacctttgcacatactggcca

SEQ ID NO: 20929 - DNA, 25 bp, Saccharomyces pastorianus
gagtttttgactctcttcagcagag

SEQ ID NO: 20930 - DNA, 25 bp, Saccharomyces pastorianus
gacggatttcaactggatgcggatt

SEQ ID NO: 20931 - DNA, 25 bp, Saccharomyces pastorianus
tgaaattcaacccacgtcctgattc

SEQ ID NO: 20932 - DNA, 25 bp, Saccharomyces pastorianus
acgactgggagtcatcatcttcgaa

SEQ ID NO: 20933 - DNA, 25 bp, Saccharomyces pastorianus
gacttccggcgcatatgcattatgt

SEQ ID NO: 20934 - DNA, 25 bp, Saccharomyces pastorianus
cgcccgtttatcaacatcagttcga

SEQ ID NO: 20935 - DNA, 25 bp, Saccharomyces pastorianus
tttcaagcgcgaatggccataactt

SEQ ID NO: 20936 - DNA, 25 bp, Saccharomyces pastorianus
aatcgatataagctcgcccgtttat

SEQ ID NO: 20937 - DNA, 25 bp, Saccharomyces pastorianus
gaattcgttgcccaagagagcttct

SEQ ID NO: 20938 - DNA, 25 bp, Saccharomyces pastorianus
gagagcttctccttccaaaatcgat

SEQ ID NO: 20939 - DNA, 25 bp, Saccharomyces pastorianus
ggcacaggacatcggtggtcacact

SEQ ID NO: 20940 - DNA, 25 bp, Saccharomyces pastorianus
gatttagatgatgcgacttccggcg

SEQ ID NO: 20941 - DNA, 25 bp, Saccharomyces pastorianus
aactctggccagtccaataacttga

SEQ ID NO: 20942 - DNA, 25 bp, Saccharomyces pastorianus
gaatgagtctgcgtcaagtcaaatg

SEQ ID NO: 20943 - DNA, 25 bp, Saccharomyces pastorianus
gttgacaaccgtccgattatctcga

SEQ ID NO: 20944 - DNA, 25 bp, Saccharomyces pastorianus
gacgagttagatttatccgacgacg

SEQ ID NO: 20945 - DNA, 25 bp, Saccharomyces pastorianus
gatatattctcccaactgacgcgag

SEQ ID NO: 20946 - DNA, 25 bp, Saccharomyces pastorianus
aagatctcgaaataggcggtccaaa

SEQ ID NO: 20947 - DNA, 25 bp, Saccharomyces pastorianus
gaagagatcttttaaccccagggat

SEQ ID NO: 20948 - DNA, 25 bp, Saccharomyces pastorianus
tattcatgttccaactgcaggcacg

SEQ ID NO: 20949 - DNA, 25 bp, Saccharomyces pastorianus
aattgaagcccaatcgaactgcgat

SEQ ID NO: 20950 - DNA, 25 bp, Saccharomyces pastorianus
tagtgagtgctctaatctttctagc

SEQ ID NO: 20951 - DNA, 25 bp, Saccharomyces pastorianus
acgcgaagtttttggctgatgcagc

SEQ ID NO: 20952 - DNA, 25 bp, Saccharomyces pastorianus
taccgaacgcagttctcaatgtaga

SEQ ID NO: 20953 - DNA, 25 bp, Saccharomyces pastorianus
gaagtagcttaccatcgactgtcaa

SEQ ID NO: 20954 - DNA, 25 bp, Saccharomyces pastorianus
aaatccccagagagacagatgccaa

SEQ ID NO: 20955 - DNA, 25 bp, Saccharomyces pastorianus
gatagcgacgaaatcttcttgaata

SEQ ID NO: 20956 - DNA, 25 bp, Saccharomyces pastorianus
ggaaaagcccataagacgacataca

SEQ ID NO: 20957 - DNA, 25 bp, Saccharomyces pastorianus
aaatggtgcattatttgcccaagag

SEQ ID NO: 20958 - DNA, 25 bp, Saccharomyces pastorianus
tcgactgtcaaggagaaatccccag

SEQ ID NO: 20959 - DNA, 25 bp, Saccharomyces pastorianus
gaaactcctcattatcagagcattc

SEQ ID NO: 20960 - DNA, 25 bp, Saccharomyces pastorianus
atatccacgaatctaccgaacgcag

SEQ ID NO: 20961 - DNA, 25 bp, Saccharomyces pastorianus
aattattatccattgcgtctgaaga

SEQ ID NO: 20962 - DNA, 25 bp, Saccharomyces pastorianus
agagtcaccgccaaagaatttcgtt

SEQ ID NO: 20963 - DNA, 25 bp, Saccharomyces pastorianus
gaaataatcaactccccacaagaaa

SEQ ID NO: 20964 - DNA, 25 bp, Saccharomyces pastorianus
gtcaaacggtacatcaaaggtcaac

SEQ ID NO: 20965 - DNA, 25 bp, Saccharomyces pastorianus
aattctcaacagtgatggctccagc

SEQ ID NO: 20966 - DNA, 25 bp, Saccharomyces pastorianus
tccaagcccgatttcagatccaaat

SEQ ID NO: 20967 - DNA, 25 bp, Saccharomyces pastorianus
gcgataacagtttacccttggagat

SEQ ID NO: 20968 - DNA, 25 bp, Saccharomyces pastorianus
aggtcaacactcaacttaatctttt

SEQ ID NO: 20969 - DNA, 25 bp, Saccharomyces pastorianus
ctgtaaacttcaatccaagcccgat

SEQ ID NO: 20970 - DNA, 25 bp, Saccharomyces pastorianus
tttcttaaagcatctccatacgact

SEQ ID NO: 20971 - DNA, 25 bp, Saccharomyces pastorianus
aatctaaattctcattcgccatcga

SEQ ID NO: 20972 - DNA, 25 bp, Saccharomyces pastorianus
gccatcgactccgacgacaaggaaa

SEQ ID NO: 20973 - DNA, 25 bp, Saccharomyces pastorianus
ttacccttggagatccctttcaata

SEQ ID NO: 20974 - DNA, 25 bp, Saccharomyces pastorianus
gacacttttgtctccatgggtgaag

SEQ ID NO: 20975 - DNA, 25 bp, Saccharomyces pastorianus
gttccaattatcaactccctatgtg

SEQ ID NO: 20976 - DNA, 25 bp, Saccharomyces pastorianus
agcgatgacgtcttctacggtgagc

SEQ ID NO: 20977 - DNA, 25 bp, Saccharomyces pastorianus
actaacgcatgactctttgaaggca

SEQ ID NO: 20978 - DNA, 25 bp, Saccharomyces pastorianus
cagctatgtctgctattgacgtctt

SEQ ID NO: 20979 - DNA, 25 bp, Saccharomyces pastorianus
taaatttcatcctctacaagccgtt

SEQ ID NO: 20980 - DNA, 25 bp, Saccharomyces pastorianus
attgcaactcctcccggtattgaaa

SEQ ID NO: 20981 - DNA, 25 bp, Saccharomyces pastorianus
tacaagccgtttgcgacttattaac

SEQ ID NO: 20982 - DNA, 25 bp, Saccharomyces pastorianus
tttgaaggcatctactggagctagt

SEQ ID NO: 20983 - DNA, 25 bp, Saccharomyces pastorianus
aaccgcagtagctgatccaaacttc

SEQ ID NO: 20984 - DNA, 25 bp, Saccharomyces pastorianus
acggtgagcattccatagttttcga

SEQ ID NO: 20985 - DNA, 25 bp, Saccharomyces pastorianus
ggattactcgcaaacgacagacttc

SEQ ID NO: 20986 - DNA, 25 bp, Saccharomyces pastorianus
attgggccacgtgatgtcgtctcgt

SEQ ID NO: 20987 - DNA, 25 bp, Saccharomyces pastorianus
gacttccatattacattgggccacg

SEQ ID NO: 20988 - DNA, 25 bp, Saccharomyces pastorianus
gaaaccgggtgcctaattgacgtga

SEQ ID NO: 20989 - DNA, 25 bp, Saccharomyces pastorianus
aagtccaatccggtgaagctcaaga

SEQ ID NO: 20990 - DNA, 25 bp, Saccharomyces pastorianus
tgtcaaggcggtttattcgaacgtt

SEQ ID NO: 20991 - DNA, 25 bp, Saccharomyces pastorianus
aaagttcctcatattacggtatgta

SEQ ID NO: 20992 - DNA, 25 bp, Saccharomyces pastorianus
gatcagacctgtttacatttcagtt

SEQ ID NO: 20993 - DNA, 25 bp, Saccharomyces pastorianus
ggtgaacaccactgacaaactgaaa

SEQ ID NO: 20994 - DNA, 25 bp, Saccharomyces pastorianus
gacgtgaacggcgatattgtcaatg

SEQ ID NO: 20995 - DNA, 25 bp, Saccharomyces pastorianus
gcaattgtagtagagctttccggaa

SEQ ID NO: 20996 - DNA, 25 bp, Saccharomyces pastorianus
tgaacttgacgcttgtcgaacagat

SEQ ID NO: 20997 - DNA, 25 bp, Saccharomyces pastorianus
gaaatcatctcattggttatgccca

SEQ ID NO: 20998 - DNA, 25 bp, Saccharomyces pastorianus
cattatcgtgttttgtgagtgactg

SEQ ID NO: 20999 - DNA, 25 bp, Saccharomyces pastorianus
aatggacgcagttttcatcgatagt

SEQ ID NO: 21000 - DNA, 25 bp, Saccharomyces pastorianus
gaactaaactcaatgttggctgcag

SEQ ID NO: 21001 - DNA, 25 bp, Saccharomyces pastorianus
gactgtatagacacattggcggtta

SEQ ID NO: 21002 - DNA, 25 bp, Saccharomyces pastorianus
gaaagcacatcaaatatactcccga

SEQ ID NO: 21003 - DNA, 25 bp, Saccharomyces pastorianus
agtacaaactatccgatccgtcgat

SEQ ID NO: 21004 - DNA, 25 bp, Saccharomyces pastorianus
tggctgcagaaggtcacgcaaggtt

SEQ ID NO: 21005 - DNA, 25 bp, Saccharomyces pastorianus
gttgatgcccaatcaggagccagat

SEQ ID NO: 21006 - DNA, 25 bp, Saccharomyces pastorianus
ctgactggagagatttgactgcaaa

SEQ ID NO: 21007 - DNA, 25 bp, Saccharomyces pastorianus
caggcctagctgatctcgtatattc

SEQ ID NO: 21008 - DNA, 25 bp, Saccharomyces pastorianus
ggaacattccatcagctatgggttg

SEQ ID NO: 21009 - DNA, 25 bp, Saccharomyces pastorianus
aagtaaatctatttctccacctgcc

SEQ ID NO: 21010 - DNA, 25 bp, Saccharomyces pastorianus
tctccacctgccgacagtatagata

SEQ ID NO: 21011 - DNA, 25 bp, Saccharomyces pastorianus
gccacactccaactctggtgtagta

SEQ ID NO: 21012 - DNA, 25 bp, Saccharomyces pastorianus
gtggtagtatactcacaagcctagg

SEQ ID NO: 21013 - DNA, 25 bp, Saccharomyces pastorianus
gatattccggaagattggccacact

SEQ ID NO: 21014 - DNA, 25 bp, Saccharomyces pastorianus
tcaattcccggcttaagtgacaggt

SEQ ID NO: 21015 - DNA, 25 bp, Saccharomyces pastorianus
ttacgggtggtacatcctcaattcc

SEQ ID NO: 21016 - DNA, 25 bp, Saccharomyces pastorianus
gactgacaagaaacctgtgcctaca

SEQ ID NO: 21017 - DNA, 25 bp, Saccharomyces pastorianus
tagctcataatgtcgtacttacggg

SEQ ID NO: 21018 - DNA, 25 bp, Saccharomyces pastorianus
taaactagcccgtgctccaattcaa

SEQ ID NO: 21019 - DNA, 25 bp, Saccharomyces pastorianus
gacgttgttatcaatgtcccaagaa

SEQ ID NO: 21020 - DNA, 25 bp, Saccharomyces pastorianus
tcaatatgattgtcggcccaggtgg

SEQ ID NO: 21021 - DNA, 25 bp, Saccharomyces pastorianus
ggtgccgacaccaaaagattcaata

SEQ ID NO: 21022 - DNA, 25 bp, Saccharomyces pastorianus
ttggtgcaccaacatcttctgaaga

SEQ ID NO: 21023 - DNA, 25 bp, Saccharomyces pastorianus
gccctcgacactgccgttaaattga

SEQ ID NO: 21024 - DNA, 25 bp, Saccharomyces pastorianus
aggacgcttcaaacgactctgctaa

SEQ ID NO: 21025 - DNA, 25 bp, Saccharomyces pastorianus
taacgttccagcttctatttacgaa

SEQ ID NO: 21026 - DNA, 25 bp, Saccharomyces pastorianus
gagattgacctacgaacctgttgat

SEQ ID NO: 21027 - DNA, 25 bp, Saccharomyces pastorianus
gaattgcgaaggcaccatctgccac

SEQ ID NO: 21028 - DNA, 25 bp, Saccharomyces pastorianus
gaaaatgttcgtggctctacagaag

SEQ ID NO: 21029 - DNA, 25 bp, Saccharomyces pastorianus
gaagtctaccacacaagtcggttgt

SEQ ID NO: 21030 - DNA, 25 bp, Saccharomyces pastorianus
tcaggtactttaactcattccggtg

SEQ ID NO: 21031 - DNA, 25 bp, Saccharomyces pastorianus
gactatgatttctcgaacccaggtt

SEQ ID NO: 21032 - DNA, 25 bp, Saccharomyces pastorianus
ttctcgggcaacactggtcatttca

SEQ ID NO: 21033 - DNA, 25 bp, Saccharomyces pastorianus
aaagcagcttcgtctgttttgcaga

SEQ ID NO: 21034 - DNA, 25 bp, Saccharomyces pastorianus
caggcgccgttgatgcttggtataa

SEQ ID NO: 21035 - DNA, 25 bp, Saccharomyces pastorianus
cattccggtggctcatatggcgaaa

SEQ ID NO: 21036 - DNA, 25 bp, Saccharomyces pastorianus
gatacattggctacttacgctcaag

SEQ ID NO: 21037 - DNA, 25 bp, Saccharomyces pastorianus
tatgccgacaactacgactgttcag

SEQ ID NO: 21038 - DNA, 25 bp, Saccharomyces pastorianus
gcttctgcttccagcgatgctaaag

SEQ ID NO: 21039 - DNA, 25 bp, Saccharomyces pastorianus
acttatcagattttgcctcatccgt

SEQ ID NO: 21040 - DNA, 25 bp, Saccharomyces pastorianus
gaggtaccgctaaactagtcattca

SEQ ID NO: 21041 - DNA, 25 bp, Saccharomyces pastorianus
tacaaatggtagatcctgcctcctt

SEQ ID NO: 21042 - DNA, 25 bp, Saccharomyces pastorianus
agtgcggttgattctacattccaaa

SEQ ID NO: 21043 - DNA, 25 bp, Saccharomyces pastorianus
aagagctgtcaaccaatgcccaatt

SEQ ID NO: 21044 - DNA, 25 bp, Saccharomyces pastorianus
ggtgaaactgtctacaccggtgttt

SEQ ID NO: 21045 - DNA, 25 bp, Saccharomyces pastorianus
aatatccacagtcatcgaggtcaat

SEQ ID NO: 21046 - DNA, 25 bp, Saccharomyces pastorianus
tccgtttccttcaactctaagcaaa

SEQ ID NO: 21047 - DNA, 25 bp, Saccharomyces pastorianus
tgcccaattcatttgtacgacgttt

SEQ ID NO: 21048 - DNA, 25 bp, Saccharomyces pastorianus
tgcctccttttacttgtttgacgaa

SEQ ID NO: 21049 - DNA, 25 bp, Saccharomyces pastorianus
cagtgtgtgccattgctttaatctt

SEQ ID NO: 21050 - DNA, 25 bp, Saccharomyces pastorianus
agcagacaagtttttccgcgttaag

SEQ ID NO: 21051 - DNA, 25 bp, Saccharomyces pastorianus
acagaagtggtcctttgggttgctc

SEQ ID NO: 21052 - DNA, 25 bp, Saccharomyces pastorianus
ggacgatttccatgatcctgttcac

SEQ ID NO: 21053 - DNA, 25 bp, Saccharomyces pastorianus
gcagcagaccttttcgccagaagaa

SEQ ID NO: 21054 - DNA, 25 bp, Saccharomyces pastorianus
aggcccatccagatagattcagtga

SEQ ID NO: 21055 - DNA, 25 bp, Saccharomyces pastorianus
tcgctggcagctcattacgacagat

SEQ ID NO: 21056 - DNA, 25 bp, Saccharomyces pastorianus
gatcctgttcacgaattacgcggta

SEQ ID NO: 21057 - DNA, 25 bp, Saccharomyces pastorianus
agattcattctgcatctcttactgc

SEQ ID NO: 21058 - DNA, 25 bp, Saccharomyces pastorianus
gagctggcttattttggcacgtata

SEQ ID NO: 21059 - DNA, 25 bp, Saccharomyces pastorianus
agctgaggccgttcatcactgacat

SEQ ID NO: 21060 - DNA, 25 bp, Saccharomyces pastorianus
attttggcacgtatactcttcagta

SEQ ID NO: 21061 - DNA, 25 bp, Saccharomyces pastorianus
gtgaaaaaccagatacccagtcgct

SEQ ID NO: 21062 - DNA, 25 bp, Saccharomyces pastorianus
gttcctatacgttagaacctctgat

SEQ ID NO: 21063 - DNA, 25 bp, Saccharomyces pastorianus
tagctgctccattatcgtctgtgtc

SEQ ID NO: 21064 - DNA, 25 bp, Saccharomyces pastorianus
gttgtccagaacgagtgtgttgtct

SEQ ID NO: 21065 - DNA, 25 bp, Saccharomyces pastorianus
caccaagatcaacccttctagagat

SEQ ID NO: 21066 - DNA, 25 bp, Saccharomyces pastorianus
ttgaaagatcaagcctccaccaaga

SEQ ID NO: 21067 - DNA, 25 bp, Saccharomyces pastorianus
gtctgtgtcgctattaaattctgaa

SEQ ID NO: 21068 - DNA, 25 bp, Saccharomyces pastorianus
ttcaaattcctattctagctgctcc

SEQ ID NO: 21069 - DNA, 25 bp, Saccharomyces pastorianus
tacagcgttgcagcgagtatttact

SEQ ID NO: 21070 - DNA, 25 bp, Saccharomyces pastorianus
ccactttgggatacggcatcaatga

SEQ ID NO: 21071 - DNA, 25 bp, Saccharomyces pastorianus
gaaaaatcttccaccttaaatcata

SEQ ID NO: 21072 - DNA, 25 bp, Saccharomyces pastorianus
gcattctcctcgaaagcgattattt

SEQ ID NO: 21073 - DNA, 25 bp, Saccharomyces pastorianus
aaacgctggatgcacacttcaacaa

SEQ ID NO: 21074 - DNA, 25 bp, Saccharomyces pastorianus
tgcacgggtttgatcactcttacta

SEQ ID NO: 21075 - DNA, 25 bp, Saccharomyces pastorianus
acggtgccatctgcgggtacttgaa

SEQ ID NO: 21076 - DNA, 25 bp, Saccharomyces pastorianus
gtgaccaagtcgcaaatgatcctga

SEQ ID NO: 21077 - DNA, 25 bp, Saccharomyces pastorianus
atcacaggccattcgatgggcgggt

SEQ ID NO: 21078 - DNA, 25 bp, Saccharomyces pastorianus
gcagggtgcagggttctacctcaac

SEQ ID NO: 21079 - DNA, 25 bp, Saccharomyces pastorianus
gatacaagtcctgttctgcattcgc

SEQ ID NO: 21080 - DNA, 25 bp, Saccharomyces pastorianus
gaccggaattgctacttgaggctgc

SEQ ID NO: 21081 - DNA, 25 bp, Saccharomyces pastorianus
aagcttacgatccatgtgcgctaat

SEQ ID NO: 21082 - DNA, 25 bp, Saccharomyces pastorianus
acttcgttagcacttttgttccaga

SEQ ID NO: 21083 - DNA, 25 bp, Saccharomyces pastorianus
gacttcctggataacgtggccatca

SEQ ID NO: 21084 - DNA, 25 bp, Saccharomyces pastorianus
gatcacgaagaacctgaggctccta

SEQ ID NO: 21085 - DNA, 25 bp, Saccharomyces pastorianus
gcgtttgctaccgaattcttcattc

SEQ ID NO: 21086 - DNA, 25 bp, Saccharomyces pastorianus
atggccatctgcagttcttgaacga

SEQ ID NO: 21087 - DNA, 25 bp, Saccharomyces pastorianus
ttaaagtcgaccgatggccatctgc

SEQ ID NO: 21088 - DNA, 25 bp, Saccharomyces pastorianus
gtgtactcaacctatgtgatgggcg

SEQ ID NO: 21089 - DNA, 25 bp, Saccharomyces pastorianus
tgttcgctccagctgcctgtggaaa

SEQ ID NO: 21090 - DNA, 25 bp, Saccharomyces pastorianus
atacatggacacttcagacgacgca

SEQ ID NO: 21091 - DNA, 25 bp, Saccharomyces pastorianus
gacacatgaatcgttgcagcagcag

SEQ ID NO: 21092 - DNA, 25 bp, Saccharomyces pastorianus
gagttaggtacaccacgagcgtcat

SEQ ID NO: 21093 - DNA, 25 bp, Saccharomyces pastorianus
gacgtctccgccacgatattaaagt

SEQ ID NO: 21094 - DNA, 25 bp, Saccharomyces pastorianus
gagacggccttgaaacccaacattg

SEQ ID NO: 21095 - DNA, 25 bp, Saccharomyces pastorianus
ttcaagccggaagcgcagttgcaca

SEQ ID NO: 21096 - DNA, 25 bp, Saccharomyces pastorianus
gttgcacagtgagttctcgctgatt

SEQ ID NO: 21097 - DNA, 25 bp, Saccharomyces pastorianus
tgagagcgcagatccagagccagct

SEQ ID NO: 21098 - DNA, 25 bp, Saccharomyces pastorianus
gcgagctgacgctgcagaatctgta

SEQ ID NO: 21099 - DNA, 25 bp, Saccharomyces pastorianus
ggccttgccctacgataagacggtg

SEQ ID NO: 21100 - DNA, 25 bp, Saccharomyces pastorianus
gatcgtgtcgacacatgccaagtgt

SEQ ID NO: 21101 - DNA, 25 bp, Saccharomyces pastorianus
gaacggatcatcacctggacgaaga

SEQ ID NO: 21102 - DNA, 25 bp, Saccharomyces pastorianus
ttgaaacaagtctactcttccgcgt

SEQ ID NO: 21103 - DNA, 25 bp, Saccharomyces pastorianus
aacgagattgctccacggtacgtgg

SEQ ID NO: 21104 - DNA, 25 bp, Saccharomyces pastorianus
gagcgctcgcgacgaacaacagtgt

SEQ ID NO: 21105 - DNA, 25 bp, Saccharomyces pastorianus
aaagaagcctccagggtcgcagaac

SEQ ID NO: 21106 - DNA, 25 bp, Saccharomyces pastorianus
aatgtccattgcaaatttcgcgcca

SEQ ID NO: 21107 - DNA, 25 bp, Saccharomyces pastorianus
gtcaataaattatgggccttccccg

SEQ ID NO: 21108 - DNA, 25 bp, Saccharomyces pastorianus
ataccatggtgtttcttccgattat

SEQ ID NO: 21109 - DNA, 25 bp, Saccharomyces pastorianus
tcgcgccagcaatttattggtccat

SEQ ID NO: 21110 - DNA, 25 bp, Saccharomyces pastorianus
tttcacctaccactgcatttttgga

SEQ ID NO: 21111 - DNA, 25 bp, Saccharomyces pastorianus
atattggccaattcctcgttttcca

SEQ ID NO: 21112 - DNA, 25 bp, Saccharomyces pastorianus
caaaatttctcgttcttccaattcg

SEQ ID NO: 21113 - DNA, 25 bp, Saccharomyces pastorianus
gcttgatgacggcatgtatcctttt

SEQ ID NO: 21114 - DNA, 25 bp, Saccharomyces pastorianus
gaatctcgcgatgggattgctaaat

SEQ ID NO: 21115 - DNA, 25 bp, Saccharomyces pastorianus
tataacatcgctgtagtgggactac

SEQ ID NO: 21116 - DNA, 25 bp, Saccharomyces pastorianus
tattttctaggttggaatctcgcga

SEQ ID NO: 21117 - DNA, 25 bp, Saccharomyces pastorianus
aacagtttgaactaactcgccagtt

SEQ ID NO: 21118 - DNA, 25 bp, Saccharomyces pastorianus
tcgccagttacaatctacgtccaag

SEQ ID NO: 21119 - DNA, 25 bp, Saccharomyces pastorianus
aaagaatcatccctccagcagatcg

SEQ ID NO: 21120 - DNA, 25 bp, Saccharomyces pastorianus
tccagcagatcgtcaattacctttg

SEQ ID NO: 21121 - DNA, 25 bp, Saccharomyces pastorianus
gaaccagctagaaatctttaccgat

SEQ ID NO: 21122 - DNA, 25 bp, Saccharomyces pastorianus
atgggactctcaaagtagcaggcaa

SEQ ID NO: 21123 - DNA, 25 bp, Saccharomyces pastorianus
aagcccaatctttgggtgtctctat

SEQ ID NO: 21124 - DNA, 25 bp, Saccharomyces pastorianus
gtctgaaaccgccagtgctgataaa

SEQ ID NO: 21125 - DNA, 25 bp, Saccharomyces pastorianus
aacctttccaagattgccgaatccg

SEQ ID NO: 21126 - DNA, 25 bp, Saccharomyces pastorianus
gattcgtatcgagtctgaaaccgcc

SEQ ID NO: 21127 - DNA, 25 bp, Saccharomyces pastorianus
aatgggacgaactgcgcaagatgct

SEQ ID NO: 21128 - DNA, 25 bp, Saccharomyces pastorianus
ggctctgctggtaaatcatttgctg

SEQ ID NO: 21129 - DNA, 25 bp, Saccharomyces pastorianus
tgaattgggcttgccatacactgca

SEQ ID NO: 21130 - DNA, 25 bp, Saccharomyces pastorianus
gatttccgtatttctcattggttga

SEQ ID NO: 21131 - DNA, 25 bp, Saccharomyces pastorianus
gcacctgaaggctcatattttgtct

SEQ ID NO: 21132 - DNA, 25 bp, Saccharomyces pastorianus
aattgactttgactgttggctctgc

SEQ ID NO: 21133 - DNA, 25 bp, Saccharomyces pastorianus
gtcttggttgatttctcgaaggtca

SEQ ID NO: 21134 - DNA, 25 bp, Saccharomyces pastorianus
gttgggtcgtatccttaaatgcaga

SEQ ID NO: 21135 - DNA, 25 bp, Saccharomyces pastorianus
cccgtcaccattacaggaagcttgt

SEQ ID NO: 21136 - DNA, 25 bp, Saccharomyces pastorianus
aagagttgccacactttctccggaa

SEQ ID NO: 21137 - DNA, 25 bp, Saccharomyces pastorianus
agctgggtgtggttgctattcctcc

SEQ ID NO: 21138 - DNA, 25 bp, Saccharomyces pastorianus
acaagaatctgctttgcatccccgt

SEQ ID NO: 21139 - DNA, 25 bp, Saccharomyces pastorianus
aacgcttcccaatccttatataact

SEQ ID NO: 21140 - DNA, 25 bp, Saccharomyces pastorianus
aataaatcaggcagtatctcccacc

SEQ ID NO: 21141 - DNA, 25 bp, Saccharomyces pastorianus
gtttgggcctagaacctaagctttg

SEQ ID NO: 21142 - DNA, 25 bp, Saccharomyces pastorianus
agattggtacttccatacgtgcttc

SEQ ID NO: 21143 - DNA, 25 bp, Saccharomyces pastorianus
tccaggcagcacatctttcaaacat

SEQ ID NO: 21144 - DNA, 25 bp, Saccharomyces pastorianus
tcattcgccctggtcggtgatgata

SEQ ID NO: 21145 - DNA, 25 bp, Saccharomyces pastorianus
ggagaataagtccatgccctttttt

SEQ ID NO: 21146 - DNA, 25 bp, Saccharomyces pastorianus
aaatttatacattctggccttctta

SEQ ID NO: 21147 - DNA, 25 bp, Saccharomyces pastorianus
atctcccaccttattatttccaatt

SEQ ID NO: 21148 - DNA, 25 bp, Saccharomyces pastorianus
gcttccattaaccactgtctatttg

SEQ ID NO: 21149 - DNA, 25 bp, Saccharomyces pastorianus
atggttctatgtggttcattcgccc

SEQ ID NO: 21150 - DNA, 25 bp, Saccharomyces pastorianus
gatttggcagctgtgttattaccat

SEQ ID NO: 21151 - DNA, 25 bp, Saccharomyces pastorianus
gaaaacagcgtcactgaaacggata

SEQ ID NO: 21152 - DNA, 25 bp, Saccharomyces pastorianus
tccaagagtttccaatggtggcatg

SEQ ID NO: 21153 - DNA, 25 bp, Saccharomyces pastorianus
gagactctatagttttgccttgtta

SEQ ID NO: 21154 - DNA, 25 bp, Saccharomyces pastorianus
attaccattagatcggaccattagc

SEQ ID NO: 21155 - DNA, 25 bp, Saccharomyces pastorianus
ggctgtgatttttccattggttttc

SEQ ID NO: 21156 - DNA, 25 bp, Saccharomyces pastorianus
ttagcgacgatggtgactccacgat

SEQ ID NO: 21157 - DNA, 25 bp, Saccharomyces pastorianus
gtgagctcactatacaatttggaaa

SEQ ID NO: 21158 - DNA, 25 bp, Saccharomyces pastorianus
aaggctgggtgttatatggcgcata

SEQ ID NO: 21159 - DNA, 25 bp, Saccharomyces pastorianus
gaaaacttcgtgactagcaacgatg

SEQ ID NO: 21160 - DNA, 25 bp, Saccharomyces pastorianus
ccgggtacatattggctgtgatttt

SEQ ID NO: 21161 - DNA, 25 bp, Saccharomyces pastorianus
taagggctctcggtttactggcact

SEQ ID NO: 21162 - DNA, 25 bp, Saccharomyces pastorianus
ctttgagcctcaactggatatcatt

SEQ ID NO: 21163 - DNA, 25 bp, Saccharomyces pastorianus
atgagaccactaacagctttactga

SEQ ID NO: 21164 - DNA, 25 bp, Saccharomyces pastorianus
taacgatgtcagacccactgcaaaa

SEQ ID NO: 21165 - DNA, 25 bp, Saccharomyces pastorianus
atggtttttaaatctcccgttgatg

SEQ ID NO: 21166 - DNA, 25 bp, Saccharomyces pastorianus
ggtgatttctatactttcaaccatt

SEQ ID NO: 21167 - DNA, 25 bp, Saccharomyces pastorianus
ttggctttcgtacacgtcattggta

SEQ ID NO: 21168 - DNA, 25 bp, Saccharomyces pastorianus
gagaggtcagtacagttttgctaca

SEQ ID NO: 21169 - DNA, 25 bp, Saccharomyces pastorianus
gcacgttaaatttcaccaccatatc

SEQ ID NO: 21170 - DNA, 25 bp, Saccharomyces pastorianus
agcgccgtatcgtcagcaaaagtaa

SEQ ID NO: 21171 - DNA, 25 bp, Saccharomyces pastorianus
gatatcattgacctaaaagcacgca

SEQ ID NO: 21172 - DNA, 25 bp, Saccharomyces pastorianus
ttataatagtatagccacggcacca

SEQ ID NO: 21173 - DNA, 25 bp, Saccharomyces pastorianus
gagcgggtatgacttaacgcccaat

SEQ ID NO: 21174 - DNA, 25 bp, Saccharomyces pastorianus
gataatcaagtcttgccggcaccac

SEQ ID NO: 21175 - DNA, 25 bp, Saccharomyces pastorianus
ggatggcccagttgaagccgcagat

SEQ ID NO: 21176 - DNA, 25 bp, Saccharomyces pastorianus
ttgacagattcaacggccatccggt

SEQ ID NO: 21177 - DNA, 25 bp, Saccharomyces pastorianus
acttcaacagcgctagtgccgatgg

SEQ ID NO: 21178 - DNA, 25 bp, Saccharomyces pastorianus
aatcatggatgggtctccggtgaaa

SEQ ID NO: 21179 - DNA, 25 bp, Saccharomyces pastorianus
aacgcccaatgtgagctgtaattac

SEQ ID NO: 21180 - DNA, 25 bp, Saccharomyces pastorianus
ggtgagaccattcctatcagattgt

SEQ ID NO: 21181 - DNA, 25 bp, Saccharomyces pastorianus
aagagagtcctctggcttacaaacc

SEQ ID NO: 21182 - DNA, 25 bp, Saccharomyces pastorianus
atttgagcctggtcatcatcgatga

SEQ ID NO: 21183 - DNA, 25 bp, Saccharomyces pastorianus
acaccaaatacactccagacttgaa

SEQ ID NO: 21184 - DNA, 25 bp, Saccharomyces pastorianus
accaaatacactccagacttgaaga

SEQ ID NO: 21185 - DNA, 25 bp, Saccharomyces pastorianus
ggaaaaggaagccacctacgatcaa

SEQ ID NO: 21186 - DNA, 25 bp, Saccharomyces pastorianus
ccaaatacactccagacttgaagat

SEQ ID NO: 21187 - DNA, 25 bp, Saccharomyces pastorianus
cgtcaaggccgccgctgatggtcca

SEQ ID NO: 21188 - DNA, 25 bp, Saccharomyces pastorianus
gaaaaggaagccacctacgatcaaa

SEQ ID NO: 21189 - DNA, 25 bp, Saccharomyces pastorianus
aaaggaagccacctacgatcaaatc

SEQ ID NO: 21190 - DNA, 25 bp, Saccharomyces pastorianus
gaaggccgtcaaggccgccgctgat

SEQ ID NO: 21191 - DNA, 25 bp, Saccharomyces pastorianus
cacaccaaatacactccagacttga

SEQ ID NO: 21192 - DNA, 25 bp, Saccharomyces pastorianus
aaaaggaagccacctacgatcaaat

SEQ ID NO: 21193 - DNA, 25 bp, Saccharomyces pastorianus
caccaaatacactccagacttgaag

SEQ ID NO: 21194 - DNA, 25 bp, Saccharomyces pastorianus
atgaatacggttactccgccagagt

SEQ ID NO: 21195 - DNA, 25 bp, Saccharomyces pastorianus
ggaaaaggaagccacctacgatcaa

SEQ ID NO: 21196 - DNA, 25 bp, Saccharomyces pastorianus
ccaaatacactccagacttgaagat

SEQ ID NO: 21197 - DNA, 25 bp, Saccharomyces pastorianus
cgtcaaggccgccgctgatggtcca

SEQ ID NO: 21198 - DNA, 25 bp, Saccharomyces pastorianus
tccaccgctccaatgtttgttgttg

SEQ ID NO: 21199 - DNA, 25 bp, Saccharomyces pastorianus
gaaaaggaagccacctacgatcaaa

SEQ ID NO: 21200 - DNA, 25 bp, Saccharomyces pastorianus
gacttcttgggtgacactcacgctt

SEQ ID NO: 21201 - DNA, 25 bp, Saccharomyces pastorianus
aaaggaagccacctacgatcaaatc

SEQ ID NO: 21202 - DNA, 25 bp, Saccharomyces pastorianus
gaaggccgtcaaggccgccgctgat

SEQ ID NO: 21203 - DNA, 25 bp, Saccharomyces pastorianus
cacaccaaatacactccagacttga

SEQ ID NO: 21204 - DNA, 25 bp, Saccharomyces pastorianus
caccaaatacactccagacttgaag

SEQ ID NO: 21205 - DNA, 25 bp, Saccharomyces pastorianus
aaggaactcgtggacgttgccaaca

SEQ ID NO: 21206 - DNA, 25 bp, Saccharomyces pastorianus
tgttacgtcggttgggattctgcac

SEQ ID NO: 21207 - DNA, 25 bp, Saccharomyces pastorianus
gggattctgcactcctaatgacatt

SEQ ID NO: 21208 - DNA, 25 bp, Saccharomyces pastorianus
ggacgttgccaacactatcggtaac

SEQ ID NO: 21209 - DNA, 25 bp, Saccharomyces pastorianus
actatcggtaactcctctcttaagg

SEQ ID NO: 21210 - DNA, 25 bp, Saccharomyces pastorianus
gaattgtctgaacctttgaaggcca

SEQ ID NO: 21211 - DNA, 25 bp, Saccharomyces pastorianus
gagttgcatgcgaaatttccagtgg

SEQ ID NO: 21212 - DNA, 25 bp, Saccharomyces pastorianus
aagcagctgccttgttatcttgttt

SEQ ID NO: 21213 - DNA, 25 bp, Saccharomyces pastorianus
gaatcacaagctgtcatccaactag

SEQ ID NO: 21214 - DNA, 25 bp, Saccharomyces pastorianus
gatgaccttcgtcgccgtaagagag

SEQ ID NO: 21215 - DNA, 25 bp, Saccharomyces pastorianus
gttatcttgttttgcatttcaggaa

SEQ ID NO: 21216 - DNA, 25 bp, Saccharomyces pastorianus
ggaaggaacaacagcacctgtcaaa

SEQ ID NO: 21217 - DNA, 25 bp, Saccharomyces pastorianus
ggccgcgccgttgcaaacactattg

SEQ ID NO: 21218 - DNA, 25 bp, Saccharomyces pastorianus
gaagatgtacacgtttccgacaaat

SEQ ID NO: 21219 - DNA, 25 bp, Saccharomyces pastorianus
taccttcaaacattgggcacgagtc

SEQ ID NO: 21220 - DNA, 25 bp, Saccharomyces pastorianus
gaagactaccccaacagagatgatg

SEQ ID NO: 21221 - DNA, 25 bp, Saccharomyces pastorianus
ggaactcagatctcgtggaaacttt

SEQ ID NO: 21222 - DNA, 25 bp, Saccharomyces pastorianus
gaaagcacacactatcttggcagga

SEQ ID NO: 21223 - DNA, 25 bp, Saccharomyces pastorianus
actcgttgcttgatttggttgtttt

SEQ ID NO: 21224 - DNA, 25 bp, Saccharomyces pastorianus
gtctctgctgcagcgcgcaaggaat

SEQ ID NO: 21225 - DNA, 25 bp, Saccharomyces pastorianus
acagattgggcgctaactcgttgct

SEQ ID NO: 21226 - DNA, 25 bp, Saccharomyces pastorianus
gtgtcagaaacatcaccgaagttga

SEQ ID NO: 21227 - DNA, 25 bp, Saccharomyces pastorianus
atatggccttgaatatctcgccgtt

SEQ ID NO: 21228 - DNA, 25 bp, Saccharomyces pastorianus
atatctcgccgttcgaatatattag

SEQ ID NO: 21229 - DNA, 25 bp, Saccharomyces pastorianus
aactaggtctagctcaaggcgttgc

SEQ ID NO: 21230 - DNA, 25 bp, Saccharomyces pastorianus
ggagcagttacacaatgtcagcaca

SEQ ID NO: 21231 - DNA, 25 bp, Saccharomyces pastorianus
ggctagaagcagtcttaaaccgcaa

SEQ ID NO: 21232 - DNA, 25 bp, Saccharomyces pastorianus
gtcgaagccctagaggacctcaaca

SEQ ID NO: 21233 - DNA, 25 bp, Saccharomyces pastorianus
gggtcaggttgattacatcgatgaa

SEQ ID NO: 21234 - DNA, 25 bp, Saccharomyces pastorianus
gaaaagtcacttgatatggccttga

SEQ ID NO: 21235 - DNA, 25 bp, Saccharomyces pastorianus
aggcgttgctgatttatgcgcattg

SEQ ID NO: 21236 - DNA, 25 bp, Saccharomyces pastorianus
ataatacgacacatgcagaactggt

SEQ ID NO: 21237 - DNA, 25 bp, Saccharomyces pastorianus
ttaatgggactgaatcgctcgatac

SEQ ID NO: 21238 - DNA, 25 bp, Saccharomyces pastorianus
aaatcaggaagcttcacgcagagaa

SEQ ID NO: 21239 - DNA, 25 bp, Saccharomyces pastorianus
gataacatccttaacgggcgaatta

SEQ ID NO: 21240 - DNA, 25 bp, Saccharomyces pastorianus
gattatactaagctgggcaccaact

SEQ ID NO: 21241 - DNA, 25 bp, Saccharomyces pastorianus
ttggatcactagcagaccatcatat

SEQ ID NO: 21242 - DNA, 25 bp, Saccharomyces pastorianus
atttaatctctggttacggtggaag

SEQ ID NO: 21243 - DNA, 25 bp, Saccharomyces pastorianus
aaggaatctcttggatcactagcag

SEQ ID NO: 21244 - DNA, 25 bp, Saccharomyces pastorianus
gtacattgttgatttgaaagacctc

SEQ ID NO: 21245 - DNA, 25 bp, Saccharomyces pastorianus
gctgggcaccaacttgcaggaacta

SEQ ID NO: 21246 - DNA, 25 bp, Saccharomyces pastorianus
atgcgacaactgatcaaactgaagg

SEQ ID NO: 21247 - DNA, 25 bp, Saccharomyces pastorianus
taacacaattgtcctacggtttaca

SEQ ID NO: 21248 - DNA, 25 bp, Saccharomyces pastorianus
gaaagacctcgaacactacatcgat

SEQ ID NO: 21249 - DNA, 25 bp, Saccharomyces pastorianus
gagtgtacccgggatcttgcgaaga

SEQ ID NO: 21250 - DNA, 25 bp, Saccharomyces pastorianus
gtaatggtactgtcttgccggtaaa

SEQ ID NO: 21251 - DNA, 25 bp, Saccharomyces pastorianus
catgtataatgtgtgcgtctgccct

SEQ ID NO: 21252 - DNA, 25 bp, Saccharomyces pastorianus
gagctcccaagccacgatcgaagag

SEQ ID NO: 21253 - DNA, 25 bp, Saccharomyces pastorianus
ataagaacacgtttccaccgatgga

SEQ ID NO: 21254 - DNA, 25 bp, Saccharomyces pastorianus
ggtggcccacgctgaattcatggga

SEQ ID NO: 21255 - DNA, 25 bp, Saccharomyces pastorianus
gcgtctgcccttaagcaattgggaa

SEQ ID NO: 21256 - DNA, 25 bp, Saccharomyces pastorianus
gacattactctgtacgtgactgtag

SEQ ID NO: 21257 - DNA, 25 bp, Saccharomyces pastorianus
gaagccataatgctgctgaggtatt

SEQ ID NO: 21258 - DNA, 25 bp, Saccharomyces pastorianus
tcatgatacgtgtactcttgcgcct

SEQ ID NO: 21259 - DNA, 25 bp, Saccharomyces pastorianus
gaacgatacgaacaggtccttgact

SEQ ID NO: 21260 - DNA, 25 bp, Saccharomyces pastorianus
tgaagtcacatttgccctagacgct

SEQ ID NO: 21261 - DNA, 25 bp, Saccharomyces pastorianus
ggtaacgctgatggctctgctgctg

SEQ ID NO: 21262 - DNA, 25 bp, Saccharomyces pastorianus
ggtatcttaaaggtttctgccactg

SEQ ID NO: 21263 - DNA, 25 bp, Saccharomyces pastorianus
ttctgccactgataagggtaccggt

SEQ ID NO: 21264 - DNA, 25 bp, Saccharomyces pastorianus
gctctgctgctggtgattatgacga

SEQ ID NO: 21265 - DNA, 25 bp, Saccharomyces pastorianus
gggtaccggtaaatctgaatccatc

SEQ ID NO: 21266 - DNA, 25 bp, Saccharomyces pastorianus
ttgactccctatcaaaggttgctta

SEQ ID NO: 21267 - DNA, 25 bp, Saccharomyces pastorianus
gatgacaacttcgaaaccgccatgg

SEQ ID NO: 21268 - DNA, 25 bp, Saccharomyces pastorianus
gttggaaaactacgcccactctttg

SEQ ID NO: 21269 - DNA, 25 bp, Saccharomyces pastorianus
gtttgaattgactggtatcccacca

SEQ ID NO: 21270 - DNA, 25 bp, Saccharomyces pastorianus
aaatttgcctccgaagatgcttcta

SEQ ID NO: 21271 - DNA, 25 bp, Saccharomyces pastorianus
tcagttggtattgtgcgttgtggac

SEQ ID NO: 21272 - DNA, 25 bp, Saccharomyces pastorianus
gacgtgcaacatttcccaagcaatg

SEQ ID NO: 21273 - DNA, 25 bp, Saccharomyces pastorianus
aaaggtggtcctttgacgtgcaaca

SEQ ID NO: 21274 - DNA, 25 bp, Saccharomyces pastorianus
cagtcaatatcgctgaagggttcaa

SEQ ID NO: 21275 - DNA, 25 bp, Saccharomyces pastorianus
gtactagcgtacacagatgcggatg

SEQ ID NO: 21276 - DNA, 25 bp, Saccharomyces pastorianus
aaattctcttgcaagtccacaggtg

SEQ ID NO: 21277 - DNA, 25 bp, Saccharomyces pastorianus
tagaatgggcagactccgacagtaa

SEQ ID NO: 21278 - DNA, 25 bp, Saccharomyces pastorianus
tccacaggtggcttctgggtggcaa

SEQ ID NO: 21279 - DNA, 25 bp, Saccharomyces pastorianus
acacacgatgatgagctgaaggatt

SEQ ID NO: 21280 - DNA, 25 bp, Saccharomyces pastorianus
gggtacacttttacagtactagcgt

SEQ ID NO: 21281 - DNA, 25 bp, Saccharomyces pastorianus
gttacctttctaccggagctgacaa

SEQ ID NO: 21282 - DNA, 25 bp, Saccharomyces pastorianus
gacgaaattatactccccataggac

SEQ ID NO: 21283 - DNA, 25 bp, Saccharomyces pastorianus
cttacgaaagattaggcctggtgac

SEQ ID NO: 21284 - DNA, 25 bp, Saccharomyces pastorianus
gaagcacaatcagcacagctactgg

SEQ ID NO: 21285 - DNA, 25 bp, Saccharomyces pastorianus
gtcaacatcgggatagacgcttcca

SEQ ID NO: 21286 - DNA, 25 bp, Saccharomyces pastorianus
ttccatcccatactcaagtgttgtg

SEQ ID NO: 21287 - DNA, 25 bp, Saccharomyces pastorianus
gttgtgaccgattacgattttacca

SEQ ID NO: 21288 - DNA, 25 bp, Saccharomyces pastorianus
ttgactttcgacaatgcaaaccccg

SEQ ID NO: 21289 - DNA, 25 bp, Saccharomyces pastorianus
ggactaagaacattcggtgcgacta

SEQ ID NO: 21290 - DNA, 25 bp, Saccharomyces pastorianus
ttgtgccacaaattctatccgagtt

SEQ ID NO: 21291 - DNA, 25 bp, Saccharomyces pastorianus
attgagattctccttgactttcgac

SEQ ID NO: 21292 - DNA, 25 bp, Saccharomyces pastorianus
actttccaagaacatttgccaccac

SEQ ID NO: 21293 - DNA, 25 bp, Saccharomyces pastorianus
ggccgtttcactaacaacttgcata

SEQ ID NO: 21294 - DNA, 25 bp, Saccharomyces pastorianus
ggcattgcggtcattggccagccaa

SEQ ID NO: 21295 - DNA, 25 bp, Saccharomyces pastorianus
agcaaatacctctaccaccgtggtt

SEQ ID NO: 21296 - DNA, 25 bp, Saccharomyces pastorianus
cgtgcgctcagtagtctttcaagta

SEQ ID NO: 21297 - DNA, 25 bp, Saccharomyces pastorianus
cggattccagaatacgccagcaaat

SEQ ID NO: 21298 - DNA, 25 bp, Saccharomyces pastorianus
tcccggagtacggtgttgctcaaaa

SEQ ID NO: 21299 - DNA, 25 bp, Saccharomyces pastorianus
ggccagccaatatagtttcggacaa

SEQ ID NO: 21300 - DNA, 25 bp, Saccharomyces pastorianus
tgtcatatttgcacggccgtttcac

SEQ ID NO: 21301 - DNA, 25 bp, Saccharomyces pastorianus
aaactcctctgtatttgaccaaaat

SEQ ID NO: 21302 - DNA, 25 bp, Saccharomyces pastorianus
tcattcaattgaagcctctcgtgcg

SEQ ID NO: 21303 - DNA, 25 bp, Saccharomyces pastorianus
ggaatgctttactatcaacgccctc

SEQ ID NO: 21304 - DNA, 25 bp, Saccharomyces pastorianus
gatcagaacagccaggttgccctta

SEQ ID NO: 21305 - DNA, 25 bp, Saccharomyces pastorianus
aagacgctgagaaatcacccataag

SEQ ID NO: 21306 - DNA, 25 bp, Saccharomyces pastorianus
attgcaaggtattacacgtggtgta

SEQ ID NO: 21307 - DNA, 25 bp, Saccharomyces pastorianus
ttgcccttaagaaaaaccgctcaag

SEQ ID NO: 21308 - DNA, 25 bp, Saccharomyces pastorianus
aaagaggccgtacaatcaccctgaa

SEQ ID NO: 21309 - DNA, 25 bp, Saccharomyces pastorianus
gaaacgtatttctaagtgactatga

SEQ ID NO: 21310 - DNA, 25 bp, Saccharomyces pastorianus
acttcccgcgaatatggtccatttt

SEQ ID NO: 21311 - DNA, 25 bp, Saccharomyces pastorianus
gaagaagcatctttgggatcagaac

SEQ ID NO: 21312 - DNA, 25 bp, Saccharomyces pastorianus
aatgggcagattaaattccttcaaa

SEQ ID NO: 21313 - DNA, 25 bp, Saccharomyces pastorianus
ggtccatttttactccatagttgaa

SEQ ID NO: 21314 - DNA, 25 bp, Saccharomyces pastorianus
ggtgtagtcaattttctgaacataa

SEQ ID NO: 21315 - DNA, 25 bp, Saccharomyces pastorianus
gagcatgttctacaaactaccaggg

SEQ ID NO: 21316 - DNA, 25 bp, Saccharomyces pastorianus
ttatcatgcaatgcgtatggctctc

SEQ ID NO: 21317 - DNA, 25 bp, Saccharomyces pastorianus
gggtgttttcacatgtcgttgagca

SEQ ID NO: 21318 - DNA, 25 bp, Saccharomyces pastorianus
gactatgacgacaagttcctgaata

SEQ ID NO: 21319 - DNA, 25 bp, Saccharomyces pastorianus
tatcattgagttcgtccactttggg

SEQ ID NO: 21320 - DNA, 25 bp, Saccharomyces pastorianus
gcattgctagcgcattagttagaga

SEQ ID NO: 21321 - DNA, 25 bp, Saccharomyces pastorianus
ataccagggatgactggccgacggc

SEQ ID NO: 21322 - DNA, 25 bp, Saccharomyces pastorianus
tagccttgcctgaagaacgcctcat

SEQ ID NO: 21323 - DNA, 25 bp, Saccharomyces pastorianus
gatagtatgctagccttgcctgaag

SEQ ID NO: 21324 - DNA, 25 bp, Saccharomyces pastorianus
tgacactatataaggagcgcattgc

SEQ ID NO: 21325 - DNA, 25 bp, Saccharomyces pastorianus
gaacgcctcatgcaaatgtgttacc

SEQ ID NO: 21326 - DNA, 25 bp, Saccharomyces pastorianus
gaggctgcaactactgtgctttcta

SEQ ID NO: 21327 - DNA, 25 bp, Saccharomyces pastorianus
gtatttacgacatgcttgccaccaa

SEQ ID NO: 21328 - DNA, 25 bp, Saccharomyces pastorianus
ggtgccacccagaacaatctagacg

SEQ ID NO: 21329 - DNA, 25 bp, Saccharomyces pastorianus
gattattctaagaggtgccacccag

SEQ ID NO: 21330 - DNA, 25 bp, Saccharomyces pastorianus
aaattgttgcctggagctggtgcca

SEQ ID NO: 21331 - DNA, 25 bp, Saccharomyces pastorianus
gccttgctcggctaatgaggaccat

SEQ ID NO: 21332 - DNA, 25 bp, Saccharomyces pastorianus
aacaattcgccgttgcttttgaagt

SEQ ID NO: 21333 - DNA, 25 bp, Saccharomyces pastorianus
gaaatttgctatcaacgtcgccaca

SEQ ID NO: 21334 - DNA, 25 bp, Saccharomyces pastorianus
tgaagtggttcctcgtactctagca

SEQ ID NO: 21335 - DNA, 25 bp, Saccharomyces pastorianus
cacacaacgttagtgagccttgctc

SEQ ID NO: 21336 - DNA, 25 bp, Saccharomyces pastorianus
gagcgaacacctggtttactacagt

SEQ ID NO: 21337 - DNA, 25 bp, Saccharomyces pastorianus
gatcttgtaatccacaaaagagaat

SEQ ID NO: 21338 - DNA, 25 bp, Saccharomyces pastorianus
agaagttctccaggggatcttgtaa

SEQ ID NO: 21339 - DNA, 25 bp, Saccharomyces pastorianus
atatagcaccgggtatacaggacat

SEQ ID NO: 21340 - DNA, 25 bp, Saccharomyces pastorianus
tactgaagcatacaaaggatgttgg

SEQ ID NO: 21341 - DNA, 25 bp, Saccharomyces pastorianus
gcaccgggtatacaggacatactag

SEQ ID NO: 21342 - DNA, 25 bp, Saccharomyces pastorianus
catcaaatatttgcggattccatgg

SEQ ID NO: 21343 - DNA, 25 bp, Saccharomyces pastorianus
attgtttccccaatttatatgatat

SEQ ID NO: 21344 - DNA, 25 bp, Saccharomyces pastorianus
aatatttgcggattccatggttatt

SEQ ID NO: 21345 - DNA, 25 bp, Saccharomyces pastorianus
gttattaaaggatatagcaccgggt

SEQ ID NO: 21346 - DNA, 25 bp, Saccharomyces pastorianus
tttgcggattccatggttattaaag

SEQ ID NO: 21347 - DNA, 25 bp, Saccharomyces pastorianus
ttgtcattattgtttccccaattta

SEQ ID NO: 21348 - DNA, 25 bp, Saccharomyces pastorianus
aactattttagtcataccccaacat

SEQ ID NO: 21349 - DNA, 25 bp, Saccharomyces pastorianus
tcattcgatatgtgcgatctacaac

SEQ ID NO: 21350 - DNA, 25 bp, Saccharomyces pastorianus
gaccagaatctggattgccgcaaat

SEQ ID NO: 21351 - DNA, 25 bp, Saccharomyces pastorianus
ttgccgcaaataccagatcacctgt

SEQ ID NO: 21352 - DNA, 25 bp, Saccharomyces pastorianus
agagtcatgctcattcgattataga

SEQ ID NO: 21353 - DNA, 25 bp, Saccharomyces pastorianus
ctgccgattggcgttgaaaggttta

SEQ ID NO: 21354 - DNA, 25 bp, Saccharomyces pastorianus
tggtagggagctatcctttgattat

SEQ ID NO: 21355 - DNA, 25 bp, Saccharomyces pastorianus
tttaccggctgatttgctgccgatt

SEQ ID NO: 21356 - DNA, 25 bp, Saccharomyces pastorianus
cacctgttgaatgccgatccttata

SEQ ID NO: 21357 - DNA, 25 bp, Saccharomyces pastorianus
gatctacaacgtcatttaccggctg

SEQ ID NO: 21358 - DNA, 25 bp, Saccharomyces pastorianus
agatatgtactttcactggagctaa

SEQ ID NO: 21359 - DNA, 25 bp, Saccharomyces pastorianus
gcggcggatttattgaactagactc

SEQ ID NO: 21360 - DNA, 25 bp, Saccharomyces pastorianus
ggtattatgcaatcgatttctgaga

SEQ ID NO: 21361 - DNA, 25 bp, Saccharomyces pastorianus
actagaatcgaatccagtgtggcat

SEQ ID NO: 21362 - DNA, 25 bp, Saccharomyces pastorianus
tgcttccagacacgaatttgcatct

SEQ ID NO: 21363 - DNA, 25 bp, Saccharomyces pastorianus
gtggcattattacatttacgacaac

SEQ ID NO: 21364 - DNA, 25 bp, Saccharomyces pastorianus
gaactcgttactattgcgtatccta

SEQ ID NO: 21365 - DNA, 25 bp, Saccharomyces pastorianus
tgaactagactctcggacggaggga

SEQ ID NO: 21366 - DNA, 25 bp, Saccharomyces pastorianus
gggcattttttgactttggcgagca

SEQ ID NO: 21367 - DNA, 25 bp, Saccharomyces pastorianus
gaagggcaaggaatctctcaaggaa

SEQ ID NO: 21368 - DNA, 25 bp, Saccharomyces pastorianus
gtatcctaagattcttgcttccaga

SEQ ID NO: 21369 - DNA, 25 bp, Saccharomyces pastorianus
atctataatgtcagctttaagcggc

SEQ ID NO: 21370 - DNA, 25 bp, Saccharomyces pastorianus
tcgactttacgaacgcatacggttt

SEQ ID NO: 21371 - DNA, 25 bp, Saccharomyces pastorianus
aactcgcatgggattttgctatcac

SEQ ID NO: 21372 - DNA, 25 bp, Saccharomyces pastorianus
tgagttgaaaccttcccagatcttc

SEQ ID NO: 21373 - DNA, 25 bp, Saccharomyces pastorianus
gcatacggtttatcaatctcactgt

SEQ ID NO: 21374 - DNA, 25 bp, Saccharomyces pastorianus
aagaaggtatttgcgagtgccgaat

SEQ ID NO: 21375 - DNA, 25 bp, Saccharomyces pastorianus
ttattacaccacagcgatcgttctt

SEQ ID NO: 21376 - DNA, 25 bp, Saccharomyces pastorianus
gagagcttagagacaccttttttga

SEQ ID NO: 21377 - DNA, 25 bp, Saccharomyces pastorianus
tgtggtgttcctctatactcggaaa

SEQ ID NO: 21378 - DNA, 25 bp, Saccharomyces pastorianus
caatctcactgttatggcttctgga

SEQ ID NO: 21379 - DNA, 25 bp, Saccharomyces pastorianus
attggttacgcctagtcagcagcat

SEQ ID NO: 21380 - DNA, 25 bp, Saccharomyces pastorianus
tcaaacaagattctctctctccaag

SEQ ID NO: 21381 - DNA, 25 bp, Saccharomyces pastorianus
gagggacaaagccaaccgaccgcat

SEQ ID NO: 21382 - DNA, 25 bp, Saccharomyces pastorianus
agaattggcttttctcttgggagaa

SEQ ID NO: 21383 - DNA, 25 bp, Saccharomyces pastorianus
aagatacttgcgcataccgaatgaa

SEQ ID NO: 21384 - DNA, 25 bp, Saccharomyces pastorianus
gctgctgtggcttttggactcatta

SEQ ID NO: 21385 - DNA, 25 bp, Saccharomyces pastorianus
gcttagagacacttttttcgagggt

SEQ ID NO: 21386 - DNA, 25 bp, Saccharomyces pastorianus
tactgctaccattcttttctattgc

SEQ ID NO: 21387 - DNA, 25 bp, Saccharomyces pastorianus
agtggtatctttctacacgtgggaa

SEQ ID NO: 21388 - DNA, 25 bp, Saccharomyces pastorianus
gattggtcttcaaatagtcctttta

SEQ ID NO: 21389 - DNA, 25 bp, Saccharomyces pastorianus
aacgcttatggtctttcactatcgc

SEQ ID NO: 21390 - DNA, 25 bp, Saccharomyces pastorianus
gtgatcacacactactaggccaatc

SEQ ID NO: 21391 - DNA, 25 bp, Saccharomyces pastorianus
tgggactttgccattaccatacacg

SEQ ID NO: 21392 - DNA, 25 bp, Saccharomyces pastorianus
agcgatcaagtacgagcaaggcgat

SEQ ID NO: 21393 - DNA, 25 bp, Saccharomyces pastorianus
gcaaggcgatcgtaaagttcaggaa

SEQ ID NO: 21394 - DNA, 25 bp, Saccharomyces pastorianus
aggattgggagcctgtgcgcgtcgc

SEQ ID NO: 21395 - DNA, 25 bp, Saccharomyces pastorianus
ttaggtctagaagacagcagctagt

SEQ ID NO: 21396 - DNA, 25 bp, Saccharomyces pastorianus
aagcattgagtaagcacccctttct

SEQ ID NO: 21397 - DNA, 25 bp, Saccharomyces pastorianus
tattatcgtttacaaggtctttctg

SEQ ID NO: 21398 - DNA, 25 bp, Saccharomyces pastorianus
gttgtcaagctttacagcgatcaag

SEQ ID NO: 21399 - DNA, 25 bp, Saccharomyces pastorianus
tgggttcgttttggttgtcaagctt

SEQ ID NO: 21400 - DNA, 25 bp, Saccharomyces pastorianus
gtgcaacaatagtattgggttcgtt

SEQ ID NO: 21401 - DNA, 25 bp, Saccharomyces pastorianus
cattgagtaagcacccctttctttt

SEQ ID NO: 21402 - DNA, 25 bp, Saccharomyces pastorianus
tagtatatgaagcatctttagcggg

SEQ ID NO: 21403 - DNA, 25 bp, Saccharomyces pastorianus
gttatcaagctttacagcaatcaaa

SEQ ID NO: 21404 - DNA, 25 bp, Saccharomyces pastorianus
caagcaccccttcttatactttggt

SEQ ID NO: 21405 - DNA, 25 bp, Saccharomyces pastorianus
ataaaagatccctgagcaagcaccc

SEQ ID NO: 21406 - DNA, 25 bp, Saccharomyces pastorianus
gcagttagcgtatgaagcatcgtta

SEQ ID NO: 21407 - DNA, 25 bp, Saccharomyces pastorianus
ttttgcgcaacaatagcactaggct

SEQ ID NO: 21408 - DNA, 25 bp, Saccharomyces pastorianus
taccgtctacaaggtctttcagaag

SEQ ID NO: 21409 - DNA, 25 bp, Saccharomyces pastorianus
aagaagaatactaccgtctacaagg

SEQ ID NO: 21410 - DNA, 25 bp, Saccharomyces pastorianus
cgaagtgatcgtaaagtccaggaac

SEQ ID NO: 21411 - DNA, 25 bp, Saccharomyces pastorianus
gatcgagaaaacagcagttagcgta

SEQ ID NO: 21412 - DNA, 25 bp, Saccharomyces pastorianus
gcactaggctctatttggttatcaa

SEQ ID NO: 21413 - DNA, 25 bp, Saccharomyces pastorianus
gaagcatcgttagcaggacgatata

SEQ ID NO: 21414 - DNA, 25 bp, Saccharomyces pastorianus
aaattgtccgatttcttgcatgtat

SEQ ID NO: 21415 - DNA, 25 bp, Saccharomyces pastorianus
tgtcttagacatgctcctgcctgag

SEQ ID NO: 21416 - DNA, 25 bp, Saccharomyces pastorianus
ttctccagtcccttttacaaatgtt

SEQ ID NO: 21417 - DNA, 25 bp, Saccharomyces pastorianus
gctatattttcaccgcactaatggg

SEQ ID NO: 21418 - DNA, 25 bp, Saccharomyces pastorianus
ggcccaccggacactgtatatgata

SEQ ID NO: 21419 - DNA, 25 bp, Saccharomyces pastorianus
gaaattcgttgcttctatcccaatt

SEQ ID NO: 21420 - DNA, 25 bp, Saccharomyces pastorianus
ctgcctgagggagctactgatcatt

SEQ ID NO: 21421 - DNA, 25 bp, Saccharomyces pastorianus
ttgcatgtatcctctggctcagacg

SEQ ID NO: 21422 - DNA, 25 bp, Saccharomyces pastorianus
gaattatcggtatttcttccggaag

SEQ ID NO: 21423 - DNA, 25 bp, Saccharomyces pastorianus
agaagcctctgtctattgcttgcta

SEQ ID NO: 21424 - DNA, 25 bp, Saccharomyces pastorianus
attcgatattgattctccagtccct

SEQ ID NO: 21425 - DNA, 25 bp, Saccharomyces pastorianus
atggcccattggacactgtatatga

SEQ ID NO: 21426 - DNA, 25 bp, Saccharomyces pastorianus
ttcacagttggctggactaacccat

SEQ ID NO: 21427 - DNA, 25 bp, Saccharomyces pastorianus
tttggttgggcttgtttccacctca

SEQ ID NO: 21428 - DNA, 25 bp, Saccharomyces pastorianus
aaaagcctctatccattgcttgcta

SEQ ID NO: 21429 - DNA, 25 bp, Saccharomyces pastorianus
ggccatgttaagctgactttccaat

SEQ ID NO: 21430 - DNA, 25 bp, Saccharomyces pastorianus
gcttgctacatttttgcggcattga

SEQ ID NO: 21431 - DNA, 25 bp, Saccharomyces pastorianus
aatatgttgcttctatcccattgct

SEQ ID NO: 21432 - DNA, 25 bp, Saccharomyces pastorianus
gttactacccaatgatgctactgat

SEQ ID NO: 21433 - DNA, 25 bp, Saccharomyces pastorianus
agattccccttgtttggaggctgga

SEQ ID NO: 21434 - DNA, 25 bp, Saccharomyces pastorianus
gaaactcactttattaccgtcttag

SEQ ID NO: 21435 - DNA, 25 bp, Saccharomyces pastorianus
aacccattgtccgatttcttacatg

SEQ ID NO: 21436 - DNA, 25 bp, Saccharomyces pastorianus
ggtctgatttcagcgcttatgacta

SEQ ID NO: 21437 - DNA, 25 bp, Saccharomyces pastorianus
gaggacatgcggtttttcccaactt

SEQ ID NO: 21438 - DNA, 25 bp, Saccharomyces pastorianus
atgtattagtgtcgtgttgtccaca

SEQ ID NO: 21439 - DNA, 25 bp, Saccharomyces pastorianus
atcggttacggacataggtactgca

SEQ ID NO: 21440 - DNA, 25 bp, Saccharomyces pastorianus
gagagtggcttgtcacgtaaccata

SEQ ID NO: 21441 - DNA, 25 bp, Saccharomyces pastorianus
aacacatagatgaagcggccagcgc

SEQ ID NO: 21442 - DNA, 25 bp, Saccharomyces pastorianus
ttgcctaattttgccgtgttggttc

SEQ ID NO: 21443 - DNA, 25 bp, Saccharomyces pastorianus
agagctgcgaaaggccttcaagtat

SEQ ID NO: 21444 - DNA, 25 bp, Saccharomyces pastorianus
tatgactatcattcctatcgcaaag

SEQ ID NO: 21445 - DNA, 25 bp, Saccharomyces pastorianus
gcaagacctatcgtttctgtattgg

SEQ ID NO: 21446 - DNA, 25 bp, Saccharomyces pastorianus
aagaccccattgaacgcaagaccta

SEQ ID NO: 21447 - DNA, 25 bp, Saccharomyces pastorianus
atcattgcgtttttgggtgcaggct

SEQ ID NO: 21448 - DNA, 25 bp, Saccharomyces pastorianus
aggccgattgtttccgtgttagacg

SEQ ID NO: 21449 - DNA, 25 bp, Saccharomyces pastorianus
gcaggcttgtgtttcgcaatttgtc

SEQ ID NO: 21450 - DNA, 25 bp, Saccharomyces pastorianus
aatatgtgccagtgtcgtgttgtct

SEQ ID NO: 21451 - DNA, 25 bp, Saccharomyces pastorianus
tattcctattgccaaaactcctttg

SEQ ID NO: 21452 - DNA, 25 bp, Saccharomyces pastorianus
tccgaagttcgtatatgctctaatt

SEQ ID NO: 21453 - DNA, 25 bp, Saccharomyces pastorianus
ggacatgcagttttcccaaatttga

SEQ ID NO: 21454 - DNA, 25 bp, Saccharomyces pastorianus
aactcctttgagtgcaaggccgatt

SEQ ID NO: 21455 - DNA, 25 bp, Saccharomyces pastorianus
ggtcactgacataggtactgccgtt

SEQ ID NO: 21456 - DNA, 25 bp, Saccharomyces pastorianus
agctataagcctccctgaatttgac

SEQ ID NO: 21457 - DNA, 25 bp, Saccharomyces pastorianus
gatgaagcggacagccctatgaaaa

SEQ ID NO: 21458 - DNA, 25 bp, Saccharomyces pastorianus
taacgctctgctgccagggttataa

SEQ ID NO: 21459 - DNA, 25 bp, Saccharomyces pastorianus
tgctgattttgccagggtcatcttt

SEQ ID NO: 21460 - DNA, 25 bp, Saccharomyces pastorianus
cagatcttgctgaaagtgacgtatt

SEQ ID NO: 21461 - DNA, 25 bp, Saccharomyces pastorianus
gatatcagggccgactgctgcaaaa

SEQ ID NO: 21462 - DNA, 25 bp, Saccharomyces pastorianus
aaaaaatctcttagcccagtatgga

SEQ ID NO: 21463 - DNA, 25 bp, Saccharomyces pastorianus
gtcatctttgatggcgcactaggag

SEQ ID NO: 21464 - DNA, 25 bp, Saccharomyces pastorianus
acgtattaactgaatcgctcatttt

SEQ ID NO: 21465 - DNA, 25 bp, Saccharomyces pastorianus
gctcattttagcattcttatccaga

SEQ ID NO: 21466 - DNA, 25 bp, Saccharomyces pastorianus
gaaggatttcgaattagctcacaag

SEQ ID NO: 21467 - DNA, 25 bp, Saccharomyces pastorianus
gattaattggcgctttcaaaggtaa

SEQ ID NO: 21468 - DNA, 25 bp, Saccharomyces pastorianus
gctacaatacgctgaagcttttatt

SEQ ID NO: 21469 - DNA, 25 bp, Saccharomyces pastorianus
ttacatcctcttctttcgcaacaat

SEQ ID NO: 21470 - DNA, 25 bp, Saccharomyces pastorianus
taagcaccagttttacgccttctgt

SEQ ID NO: 21471 - DNA, 25 bp, Saccharomyces pastorianus
gtccctctccgtaagcaaaacatta

SEQ ID NO: 21472 - DNA, 25 bp, Saccharomyces pastorianus
gaagccaattgtccggtatccaaca

SEQ ID NO: 21473 - DNA, 25 bp, Saccharomyces pastorianus
acatcttcagttggccttaattctt

SEQ ID NO: 21474 - DNA, 25 bp, Saccharomyces pastorianus
gagcccacttttgtaaatgccacga

SEQ ID NO: 21475 - DNA, 25 bp, Saccharomyces pastorianus
atacgggttactttgagcacacggc

SEQ ID NO: 21476 - DNA, 25 bp, Saccharomyces pastorianus
gaaactccttaaattccttctgcag

SEQ ID NO: 21477 - DNA, 25 bp, Saccharomyces pastorianus
tagtgtcatccttgatcgcatatcc

SEQ ID NO: 21478 - DNA, 25 bp, Saccharomyces pastorianus
actgctgctgttccatctgaagagc

SEQ ID NO: 21479 - DNA, 25 bp, Saccharomyces pastorianus
gagcacacggctttgacaacatctt

SEQ ID NO: 21480 - DNA, 25 bp, Saccharomyces pastorianus
aattcagaaagccagtcctcgacga

SEQ ID NO: 21481 - DNA, 25 bp, Saccharomyces pastorianus
gccagtcctcgacgaagtccagaaa

SEQ ID NO: 21482 - DNA, 25 bp, Saccharomyces pastorianus
aacgtctcgtatatcaaacgcgata

SEQ ID NO: 21483 - DNA, 25 bp, Saccharomyces pastorianus
aactgctaccacaaagtcctatttt

SEQ ID NO: 21484 - DNA, 25 bp, Saccharomyces pastorianus
aactggagctaatagggaccgtcaa

SEQ ID NO: 21485 - DNA, 25 bp, Saccharomyces pastorianus
aaaacctgtttctcatatctttaga

SEQ ID NO: 21486 - DNA, 25 bp, Saccharomyces pastorianus
aacaaagacctcttgccagttgtag

SEQ ID NO: 21487 - DNA, 25 bp, Saccharomyces pastorianus
ctatcacggaaaccctcaactttat

SEQ ID NO: 21488 - DNA, 25 bp, Saccharomyces pastorianus
gtactggacggagagttgccactaa

SEQ ID NO: 21489 - DNA, 25 bp, Saccharomyces pastorianus
cacgaaattagatcccaccgttttg

SEQ ID NO: 21490 - DNA, 25 bp, Saccharomyces pastorianus
gtaggtaactcatttcctccaactg

SEQ ID NO: 21491 - DNA, 25 bp, Saccharomyces pastorianus
aatggctgatacttcgaacacgcta

SEQ ID NO: 21492 - DNA, 25 bp, Saccharomyces pastorianus
gaacacgctaacttttgaagctcta

SEQ ID NO: 21493 - DNA, 25 bp, Saccharomyces pastorianus
aaaggttgcaccgatcaggaaaaca

SEQ ID NO: 21494 - DNA, 25 bp, Saccharomyces pastorianus
gaaatttttcatcagacgccctaca

SEQ ID NO: 21495 - DNA, 25 bp, Saccharomyces pastorianus
accaagccctgttctaaatccaaat

SEQ ID NO: 21496 - DNA, 25 bp, Saccharomyces pastorianus
cagaaagtcagtcttcaacgaagtc

SEQ ID NO: 21497 - DNA, 25 bp, Saccharomyces pastorianus
ggagccaatagaaaccgccaaaatt

SEQ ID NO: 21498 - DNA, 25 bp, Saccharomyces pastorianus
aaaattattgccaccaagccctgtt

SEQ ID NO: 21499 - DNA, 25 bp, Saccharomyces pastorianus
taaaacctgtttcccatattttcag

SEQ ID NO: 21500 - DNA, 25 bp, Saccharomyces pastorianus
gtagtcaacaattcattctcgccga

SEQ ID NO: 21501 - DNA, 25 bp, Saccharomyces pastorianus
aaagacctcttaccagtagtcaaca

SEQ ID NO: 21502 - DNA, 25 bp, Saccharomyces pastorianus
gaaacaacaactagaagctcaagaa

SEQ ID NO: 21503 - DNA, 25 bp, Saccharomyces pastorianus
agaaggtgcgagaacccctaaccag

SEQ ID NO: 21504 - DNA, 25 bp, Saccharomyces pastorianus
aagagaccaattactagccgccgaa

SEQ ID NO: 21505 - DNA, 25 bp, Saccharomyces pastorianus
gcataatactggcaagagatactca

SEQ ID NO: 21506 - DNA, 25 bp, Saccharomyces pastorianus
aaaagtggcagcaggaagagcaaga

SEQ ID NO: 21507 - DNA, 25 bp, Saccharomyces pastorianus
gaccaattactagccgccgaagagg

SEQ ID NO: 21508 - DNA, 25 bp, Saccharomyces pastorianus
agagatactcagaaactgccaaaaa

SEQ ID NO: 21509 - DNA, 25 bp, Saccharomyces pastorianus
aggaccaactagagaaacaacaact

SEQ ID NO: 21510 - DNA, 25 bp, Saccharomyces pastorianus
gagaacccctaaccagaagaagctg

SEQ ID NO: 21511 - DNA, 25 bp, Saccharomyces pastorianus
gagcaagaaaacgtaggcaagctta

SEQ ID NO: 21512 - DNA, 25 bp, Saccharomyces pastorianus
agctcaagaagctcagaggtgggaa

SEQ ID NO: 21513 - DNA, 25 bp, Saccharomyces pastorianus
aattggcggctcaagaggctcagaa

SEQ ID NO: 21514 - DNA, 25 bp, Saccharomyces pastorianus
ggaacaaggtgcaagaactcctaat

SEQ ID NO: 21515 - DNA, 25 bp, Saccharomyces pastorianus
gaaaaagctggcattggagcaaaaa

SEQ ID NO: 21516 - DNA, 25 bp, Saccharomyces pastorianus
gaacttttattagccgccgaagaag

SEQ ID NO: 21517 - DNA, 25 bp, Saccharomyces pastorianus
attagccgccgaagaagaagtgttg

SEQ ID NO: 21518 - DNA, 25 bp, Saccharomyces pastorianus
aaaagttgctgcaggaagggccaga

SEQ ID NO: 21519 - DNA, 25 bp, Saccharomyces pastorianus
ggagaaacaacaattggcggctcaa

SEQ ID NO: 21520 - DNA, 25 bp, Saccharomyces pastorianus
gacaagcttacgagaaagaccagtt

SEQ ID NO: 21521 - DNA, 25 bp, Saccharomyces pastorianus
aagggccagaaagcgcagacaagct

SEQ ID NO: 21522 - DNA, 25 bp, Saccharomyces pastorianus
tcaagaggctcagaaatgggaacaa

SEQ ID NO: 21523 - DNA, 25 bp, Saccharomyces pastorianus
actcctaatgagaaaaagctggcat

SEQ ID NO: 21524 - DNA, 25 bp, Saccharomyces pastorianus
aagtgacaaatctctaccgcaacag

SEQ ID NO: 21525 - DNA, 25 bp, Saccharomyces pastorianus
atatctgtccctgaattcagttcta

SEQ ID NO: 21526 - DNA, 25 bp, Saccharomyces pastorianus
gtccctagaatcatacttcaacggt

SEQ ID NO: 21527 - DNA, 25 bp, Saccharomyces pastorianus
tgtattggataagtggccccacgtt

SEQ ID NO: 21528 - DNA, 25 bp, Saccharomyces pastorianus
ggccccacgtttacattgtggcaaa

SEQ ID NO: 21529 - DNA, 25 bp, Saccharomyces pastorianus
tatgcccggaaccaatgatccaagt

SEQ ID NO: 21530 - DNA, 25 bp, Saccharomyces pastorianus
taccttatggtgttatccgtacact

SEQ ID NO: 21531 - DNA, 25 bp, Saccharomyces pastorianus
gaatttagtgaccaacccatatgag

SEQ ID NO: 21532 - DNA, 25 bp, Saccharomyces pastorianus
tgtggcaaaccagccatattttgga

SEQ ID NO: 21533 - DNA, 25 bp, Saccharomyces pastorianus
aatggcgtagacgttctagccgttt

SEQ ID NO: 21534 - DNA, 25 bp, Saccharomyces pastorianus
atatctgttgatattatgcccggaa

SEQ ID NO: 21535 - DNA, 25 bp, Saccharomyces pastorianus
ggactcttacttcgatgactctaat

SEQ ID NO: 21536 - DNA, 25 bp, Saccharomyces pastorianus
agtggcaaatcgttacctcaacagc

SEQ ID NO: 21537 - DNA, 25 bp, Saccharomyces pastorianus
tgtgggtaaccaaccgagcttcgga

SEQ ID NO: 21538 - DNA, 25 bp, Saccharomyces pastorianus
atctccgttgacataatgcctggta

SEQ ID NO: 21539 - DNA, 25 bp, Saccharomyces pastorianus
gtagacgttctcactatttcaggta

SEQ ID NO: 21540 - DNA, 25 bp, Saccharomyces pastorianus
cacctactgcacctgatacgttatg

SEQ ID NO: 21541 - DNA, 25 bp, Saccharomyces pastorianus
gacaattcactggactcttacttcg

SEQ ID NO: 21542 - DNA, 25 bp, Saccharomyces pastorianus
aatattttaccttccatctccgttg

SEQ ID NO: 21543 - DNA, 25 bp, Saccharomyces pastorianus
tggtactaacgatcccagtggcaaa

SEQ ID NO: 21544 - DNA, 25 bp, Saccharomyces pastorianus
acgaatggccacacgtttacgttgt

SEQ ID NO: 21545 - DNA, 25 bp, Saccharomyces pastorianus
gtatctgtgcctgaattcagttcca

SEQ ID NO: 21546 - DNA, 25 bp, Saccharomyces pastorianus
gaagacgctgagttacaagctctat

SEQ ID NO: 21547 - DNA, 25 bp, Saccharomyces pastorianus
gagccgatgttgaagtgtcttgttt

SEQ ID NO: 21548 - DNA, 25 bp, Saccharomyces pastorianus
tatatgttttgaccacccaagcctt

SEQ ID NO: 21549 - DNA, 25 bp, Saccharomyces pastorianus
aaaatcagctgaagacatgtccaca

SEQ ID NO: 21550 - DNA, 25 bp, Saccharomyces pastorianus
tgcaacattaccatgccaccaaagg

SEQ ID NO: 21551 - DNA, 25 bp, Saccharomyces pastorianus
tatccatcattgacgaaactgtttg

SEQ ID NO: 21552 - DNA, 25 bp, Saccharomyces pastorianus
gactgttcattccattttaagatac

SEQ ID NO: 21553 - DNA, 25 bp, Saccharomyces pastorianus
tagtcgccgccccattatatgtttt

SEQ ID NO: 21554 - DNA, 25 bp, Saccharomyces pastorianus
gggaaggtattgaaccgccatcaaa

SEQ ID NO: 21555 - DNA, 25 bp, Saccharomyces pastorianus
tacggcggtgtttgcaacattacca

SEQ ID NO: 21556 - DNA, 25 bp, Saccharomyces pastorianus
ttaagatactgtgccgaaaaattcc

SEQ ID NO: 21557 - DNA, 25 bp, Saccharomyces pastorianus
tggacaggtatcgaaccgccatcaa

SEQ ID NO: 21558 - DNA, 25 bp, Saccharomyces pastorianus
gtcttaaccactcaagccttagata

SEQ ID NO: 21559 - DNA, 25 bp, Saccharomyces pastorianus
acaccacaagccgttaaaatcagag

SEQ ID NO: 21560 - DNA, 25 bp, Saccharomyces pastorianus
gcagacgctgaagtgtcttgtttca

SEQ ID NO: 21561 - DNA, 25 bp, Saccharomyces pastorianus
aaatcaccgaagtcattaccaagta

SEQ ID NO: 21562 - DNA, 25 bp, Saccharomyces pastorianus
agttaagttggttgccgccccattg

SEQ ID NO: 21563 - DNA, 25 bp, Saccharomyces pastorianus
gtatcgatgccatcaaagaggcttt

SEQ ID NO: 21564 - DNA, 25 bp, Saccharomyces pastorianus
gactgttcattccatcctaagatat

SEQ ID NO: 21565 - DNA, 25 bp, Saccharomyces pastorianus
ccaagtatggcggtgtttgtaacat

SEQ ID NO: 21566 - DNA, 25 bp, Saccharomyces pastorianus
ccattgtacgtcttaaccactcaag

SEQ ID NO: 21567 - DNA, 25 bp, Saccharomyces pastorianus
gaagtctgctgaagatatgtccaca

SEQ ID NO: 21568 - DNA, 25 bp, Saccharomyces pastorianus
gaaatcaccggaaacaccatatgcg

SEQ ID NO: 21569 - DNA, 25 bp, Saccharomyces pastorianus
cacatcatcaagttcccatttggca

SEQ ID NO: 21570 - DNA, 25 bp, Saccharomyces pastorianus
gcattggtaatatcttgtcggagta

SEQ ID NO: 21571 - DNA, 25 bp, Saccharomyces pastorianus
ggcatcaaatttcagtggcctaatt

SEQ ID NO: 21572 - DNA, 25 bp, Saccharomyces pastorianus
gatggtttctcataacagcgttgat

SEQ ID NO: 21573 - DNA, 25 bp, Saccharomyces pastorianus
atgcagctccccatgttggtggaaa

SEQ ID NO: 21574 - DNA, 25 bp, Saccharomyces pastorianus
gatatggctgaacattccttagaga

SEQ ID NO: 21575 - DNA, 25 bp, Saccharomyces pastorianus
gggccgcagattccaatatactggg

SEQ ID NO: 21576 - DNA, 25 bp, Saccharomyces pastorianus
gatgccggtccttcaggcatcaaat

SEQ ID NO: 21577 - DNA, 25 bp, Saccharomyces pastorianus
aatatactgggtacgtcggaagcaa

SEQ ID NO: 21578 - DNA, 25 bp, Saccharomyces pastorianus
cagcgttgatgttgatcgttgcatt

SEQ ID NO: 21579 - DNA, 25 bp, Saccharomyces pastorianus
aatcggagctgttatagcatgcata

SEQ ID NO: 21580 - DNA, 25 bp, Saccharomyces pastorianus
ggagaactttcaacagttatcactc

SEQ ID NO: 21581 - DNA, 25 bp, Saccharomyces pastorianus
gcataagttgtgtgattactctact

SEQ ID NO: 21582 - DNA, 25 bp, Saccharomyces pastorianus
gttctattggttacgtatggcataa

SEQ ID NO: 21583 - DNA, 25 bp, Saccharomyces pastorianus
atacagagaaaactgatcttcccca

SEQ ID NO: 21584 - DNA, 25 bp, Saccharomyces pastorianus
actctactatgtgttttaccagctt

SEQ ID NO: 21585 - DNA, 25 bp, Saccharomyces pastorianus
agcatgcatattgggattcgctcaa

SEQ ID NO: 21586 - DNA, 25 bp, Saccharomyces pastorianus
tgatcttccccatagattttcccag

SEQ ID NO: 21587 - DNA, 25 bp, Saccharomyces pastorianus
gttatcactcacaatcggagctgtt

SEQ ID NO: 21588 - DNA, 25 bp, Saccharomyces pastorianus
gggattcgctcaacaatcgttgtat

SEQ ID NO: 21589 - DNA, 25 bp, Saccharomyces pastorianus
tttcccagccaacagaaaacggaga

SEQ ID NO: 21590 - DNA, 25 bp, Saccharomyces pastorianus
gggaagctacgaacgatacggaaat

SEQ ID NO: 21591 - DNA, 25 bp, Saccharomyces pastorianus
acctgggaagtgtcgacatttgatt

SEQ ID NO: 21592 - DNA, 25 bp, Saccharomyces pastorianus
tatattttatactacctggcccaga

SEQ ID NO: 21593 - DNA, 25 bp, Saccharomyces pastorianus
gcagacggtacatgtgtgtcgcata

SEQ ID NO: 21594 - DNA, 25 bp, Saccharomyces pastorianus
gctggacctgcttaattgcaaactg

SEQ ID NO: 21595 - DNA, 25 bp, Saccharomyces pastorianus
atttggaagttccagctggacctgc

SEQ ID NO: 21596 - DNA, 25 bp, Saccharomyces pastorianus
taagcagattaaacgtcgatttcaa

SEQ ID NO: 21597 - DNA, 25 bp, Saccharomyces pastorianus
gcaaactgttcaatgagctttctaa

SEQ ID NO: 21598 - DNA, 25 bp, Saccharomyces pastorianus
agatcattttgaaacacctgggaag

SEQ ID NO: 21599 - DNA, 25 bp, Saccharomyces pastorianus
gacaggtttccgtttgttattggat

SEQ ID NO: 21600 - DNA, 25 bp, Saccharomyces pastorianus
ttgttttacaactgcagaactgctt

SEQ ID NO: 21601 - DNA, 25 bp, Saccharomyces pastorianus
tttgctcatacccacctgattactg

SEQ ID NO: 21602 - DNA, 25 bp, Saccharomyces pastorianus
tactgcgaattttcaggtaaattga

SEQ ID NO: 21603 - DNA, 25 bp, Saccharomyces pastorianus
tgcggagtttgctcatacccacctg

SEQ ID NO: 21604 - DNA, 25 bp, Saccharomyces pastorianus
gagtttgctcatacccacctgatta

SEQ ID NO: 21605 - DNA, 25 bp, Saccharomyces pastorianus
gtttactgcggagtttgctcatacc

SEQ ID NO: 21606 - DNA, 25 bp, Saccharomyces pastorianus
gaaagaagttgtttactgcggagtt

SEQ ID NO: 21607 - DNA, 25 bp, Saccharomyces pastorianus
atacccacctgattactgcgaattt

SEQ ID NO: 21608 - DNA, 25 bp, Saccharomyces pastorianus
ttactgcggagtttgctcataccca

SEQ ID NO: 21609 - DNA, 25 bp, Saccharomyces pastorianus
acccacctgattactgcgaattttc

SEQ ID NO: 21610 - DNA, 25 bp, Saccharomyces pastorianus
aagttgtttactgcggagtttgctc

SEQ ID NO: 21611 - DNA, 25 bp, Saccharomyces pastorianus
ctgattactgcgaattttcaggtaa

SEQ ID NO: 21612 - DNA, 25 bp, Saccharomyces pastorianus
attgatttgttgatctccgaacagg

SEQ ID NO: 21613 - DNA, 25 bp, Saccharomyces pastorianus
ttgatcggtcacattgtcccagaag

SEQ ID NO: 21614 - DNA, 25 bp, Saccharomyces pastorianus
gttctcatgggttcttgatcggtca

SEQ ID NO: 21615 - DNA, 25 bp, Saccharomyces pastorianus
tacttcaaaggtaaggcccgtgtct

SEQ ID NO: 21616 - DNA, 25 bp, Saccharomyces pastorianus
aatcttatacggttcattggcgcca

SEQ ID NO: 21617 - DNA, 25 bp, Saccharomyces pastorianus
acaggaaatgtctcaacgtaagcaa

SEQ ID NO: 21618 - DNA, 25 bp, Saccharomyces pastorianus
agagatcatcaaacctctttcccat

SEQ ID NO: 21619 - DNA, 25 bp, Saccharomyces pastorianus
ggcaccaagcttgcctgaaggccaa

SEQ ID NO: 21620 - DNA, 25 bp, Saccharomyces pastorianus
gtaagcaaaactgggtcgctcctcc

SEQ ID NO: 21621 - DNA, 25 bp, Saccharomyces pastorianus
gaccagcggtcacttacaaatctta

SEQ ID NO: 21622 - DNA, 25 bp, Saccharomyces pastorianus
gtaaggcccgtgtctacgaagaaga

SEQ ID NO: 21623 - DNA, 25 bp, Saccharomyces pastorianus
attgcagcaagcgtctcccaggaag

SEQ ID NO: 21624 - DNA, 25 bp, Saccharomyces pastorianus
acacacggacgagctagactacttc

SEQ ID NO: 21625 - DNA, 25 bp, Saccharomyces pastorianus
gcaagtacgtggacgctttccagta

SEQ ID NO: 21626 - DNA, 25 bp, Saccharomyces pastorianus
tcgtgcagggcaggtacttcgactc

SEQ ID NO: 21627 - DNA, 25 bp, Saccharomyces pastorianus
ttcgcgtacctgtcagactcgtatc

SEQ ID NO: 21628 - DNA, 25 bp, Saccharomyces pastorianus
ggagtaccagttccccaaggatgtg

SEQ ID NO: 21629 - DNA, 25 bp, Saccharomyces pastorianus
aaagagaggtcttgagcccggagaa

SEQ ID NO: 21630 - DNA, 25 bp, Saccharomyces pastorianus
gaacgactggatccacctcaaagta

SEQ ID NO: 21631 - DNA, 25 bp, Saccharomyces pastorianus
aggcctcgtcgctctttgaaagaga

SEQ ID NO: 21632 - DNA, 25 bp, Saccharomyces pastorianus
tagggtgagacagcccatcacgaca

SEQ ID NO: 21633 - DNA, 25 bp, Saccharomyces pastorianus
aaggatgtgttctactctgcaagac

SEQ ID NO: 21634 - DNA, 25 bp, Saccharomyces pastorianus
attgcctgggaatgttcctcacagt

SEQ ID NO: 21635 - DNA, 25 bp, Saccharomyces pastorianus
gagagtgagctccaaatgctagatt

SEQ ID NO: 21636 - DNA, 25 bp, Saccharomyces pastorianus
aagggatctatgcttctgaaggttg

SEQ ID NO: 21637 - DNA, 25 bp, Saccharomyces pastorianus
gaaccgattatcacatcaacccaac

SEQ ID NO: 21638 - DNA, 25 bp, Saccharomyces pastorianus
cacagtcccgttaggttcgctaata

SEQ ID NO: 21639 - DNA, 25 bp, Saccharomyces pastorianus
acagtgatgatcgttggtgggccca

SEQ ID NO: 21640 - DNA, 25 bp, Saccharomyces pastorianus
gcacgcaagtgaagcaagccatttt

SEQ ID NO: 21641 - DNA, 25 bp, Saccharomyces pastorianus
agtgattcttacttattgcctggga

SEQ ID NO: 21642 - DNA, 25 bp, Saccharomyces pastorianus
gcagatcttttgaagccaccggtga

SEQ ID NO: 21643 - DNA, 25 bp, Saccharomyces pastorianus
gatggtattgttcgcattgtcgcca

SEQ ID NO: 21644 - DNA, 25 bp, Saccharomyces pastorianus
tatcgttgtggagcaagacagacct

SEQ ID NO: 21645 - DNA, 25 bp, Saccharomyces pastorianus
gaatatatgccagagcctgatttag

SEQ ID NO: 21646 - DNA, 25 bp, Saccharomyces pastorianus
taatgcttctaatgacccaattggg

SEQ ID NO: 21647 - DNA, 25 bp, Saccharomyces pastorianus
atcggacattagaatcgacgactgt

SEQ ID NO: 21648 - DNA, 25 bp, Saccharomyces pastorianus
tcattggccctctttaacttagaaa

SEQ ID NO: 21649 - DNA, 25 bp, Saccharomyces pastorianus
gaaagcaaaggcataccactatata

SEQ ID NO: 21650 - DNA, 25 bp, Saccharomyces pastorianus
gaatctggcaccctcttgtttaaaa

SEQ ID NO: 21651 - DNA, 25 bp, Saccharomyces pastorianus
cgagccaaggcatactacagaagag

SEQ ID NO: 21652 - DNA, 25 bp, Saccharomyces pastorianus
aatgaggacgattttggtaacgctt

SEQ ID NO: 21653 - DNA, 25 bp, Saccharomyces pastorianus
aaatctatcattggccctctttaac

SEQ ID NO: 21654 - DNA, 25 bp, Saccharomyces pastorianus
ggagatgtacaatgttccgaacaaa

SEQ ID NO: 21655 - DNA, 25 bp, Saccharomyces pastorianus
ggaatatcctgatgacgatacacat

SEQ ID NO: 21656 - DNA, 25 bp, Saccharomyces pastorianus
gtatgggttgcaactacttggccgc

SEQ ID NO: 21657 - DNA, 25 bp, Saccharomyces pastorianus
aattactagagagtcccgccaaaga

SEQ ID NO: 21658 - DNA, 25 bp, Saccharomyces pastorianus
ttcggcacccagaagtctattggat

SEQ ID NO: 21659 - DNA, 25 bp, Saccharomyces pastorianus
atgattttgcatctcctttctcttc

SEQ ID NO: 21660 - DNA, 25 bp, Saccharomyces pastorianus
gaggcggagcctttcaaagccagta

SEQ ID NO: 21661 - DNA, 25 bp, Saccharomyces pastorianus
aacgtccctcgatcaagattcttct

SEQ ID NO: 21662 - DNA, 25 bp, Saccharomyces pastorianus
ggtgctatgacagctgaaccaacgt

SEQ ID NO: 21663 - DNA, 25 bp, Saccharomyces pastorianus
tacttggccgcttcacttgtgaaga

SEQ ID NO: 21664 - DNA, 25 bp, Saccharomyces pastorianus
ttgaaagaaattccgttcctgtcca

SEQ ID NO: 21665 - DNA, 25 bp, Saccharomyces pastorianus
gaacgtagctccaagcatgttagat

SEQ ID NO: 21666 - DNA, 25 bp, Saccharomyces pastorianus
gttagatgacttttcgcaaccaccg

SEQ ID NO: 21667 - DNA, 25 bp, Saccharomyces pastorianus
gaacaaggatctgcctgagctttgt

SEQ ID NO: 21668 - DNA, 25 bp, Saccharomyces pastorianus
aaaagggctgttgccatctgtttgc

SEQ ID NO: 21669 - DNA, 25 bp, Saccharomyces pastorianus
acccctctcaactggcaagtacgat

SEQ ID NO: 21670 - DNA, 25 bp, Saccharomyces pastorianus
agaggtcgccctgcgtgatgataga

SEQ ID NO: 21671 - DNA, 25 bp, Saccharomyces pastorianus
ttgccatctgtttgcagaggtcgcc

SEQ ID NO: 21672 - DNA, 25 bp, Saccharomyces pastorianus
cgtgatgatagagaggcacaaccct

SEQ ID NO: 21673 - DNA, 25 bp, Saccharomyces pastorianus
tagacaatccagacctgaacaagga

SEQ ID NO: 21674 - DNA, 25 bp, Saccharomyces pastorianus
ggcacaaccctcaagagtgtctaga

SEQ ID NO: 21675 - DNA, 25 bp, Saccharomyces pastorianus
ggacatgaccaagcggtttaccggt

SEQ ID NO: 21676 - DNA, 25 bp, Saccharomyces pastorianus
agcagtacgaaaacctgtgcacggg

SEQ ID NO: 21677 - DNA, 25 bp, Saccharomyces pastorianus
tgagctttgtatagcccagatgaaa

SEQ ID NO: 21678 - DNA, 25 bp, Saccharomyces pastorianus
tgtaactgcgtctgatcgtatacct

SEQ ID NO: 21679 - DNA, 25 bp, Saccharomyces pastorianus
attcaacagattcatttccggtttt

SEQ ID NO: 21680 - DNA, 25 bp, Saccharomyces pastorianus
agtacgtcggtggattttctgatga

SEQ ID NO: 21681 - DNA, 25 bp, Saccharomyces pastorianus
gccattggcgcacacatgctttaat

SEQ ID NO: 21682 - DNA, 25 bp, Saccharomyces pastorianus
gatagtaacgatttgccattggcgc

SEQ ID NO: 21683 - DNA, 25 bp, Saccharomyces pastorianus
acctgcaacaggtatttccaccatc

SEQ ID NO: 21684 - DNA, 25 bp, Saccharomyces pastorianus
aaatcagtcagctaggcacacatga

SEQ ID NO: 21685 - DNA, 25 bp, Saccharomyces pastorianus
gaagactgggactatccattacaaa

SEQ ID NO: 21686 - DNA, 25 bp, Saccharomyces pastorianus
gtatttccaccatcccatttaaaat

SEQ ID NO: 21687 - DNA, 25 bp, Saccharomyces pastorianus
atgactctaaaattgtccgttggtt

SEQ ID NO: 21688 - DNA, 25 bp, Saccharomyces pastorianus
cactgagatctgtgacgaagtacgt

SEQ ID NO: 21689 - DNA, 25 bp, Saccharomyces pastorianus
atgacctaggccatcgtgaaaactg

SEQ ID NO: 21690 - DNA, 25 bp, Saccharomyces pastorianus
tagaaggtgctggtctgtcatccat

SEQ ID NO: 21691 - DNA, 25 bp, Saccharomyces pastorianus
gagtctttgctatacgattcagcgt

SEQ ID NO: 21692 - DNA, 25 bp, Saccharomyces pastorianus
aagatgcattggttacgttctgaaa

SEQ ID NO: 21693 - DNA, 25 bp, Saccharomyces pastorianus
ttcacatataacgaagcgctggata

SEQ ID NO: 21694 - DNA, 25 bp, Saccharomyces pastorianus
gaggtatcgacgtctttgttatttc

SEQ ID NO: 21695 - DNA, 25 bp, Saccharomyces pastorianus
gtctgtcatccattttataaccgaa

SEQ ID NO: 21696 - DNA, 25 bp, Saccharomyces pastorianus
gaattttccgtgcatggatttccaa

SEQ ID NO: 21697 - DNA, 25 bp, Saccharomyces pastorianus
gaaacaatttacctctctgaattag

SEQ ID NO: 21698 - DNA, 25 bp, Saccharomyces pastorianus
tacgttctgaaaaggcacttggcca

SEQ ID NO: 21699 - DNA, 25 bp, Saccharomyces pastorianus
ttcagcgtctgaattttccgtgcat

SEQ ID NO: 21700 - DNA, 25 bp, Saccharomyces pastorianus
tgctttgtcagcatcatcgaagtta

SEQ ID NO: 21701 - DNA, 25 bp, Saccharomyces pastorianus
tttgaatgctttcctagacacacct

SEQ ID NO: 21702 - DNA, 25 bp, Saccharomyces pastorianus
ttttggtctcaaaaccttggctctt

SEQ ID NO: 21703 - DNA, 25 bp, Saccharomyces pastorianus
agatgttgcttcctttctgcttaaa

SEQ ID NO: 21704 - DNA, 25 bp, Saccharomyces pastorianus
gacacacctgggaggcagtatttca

SEQ ID NO: 21705 - DNA, 25 bp, Saccharomyces pastorianus
atgcatgacggcaaactctctatgg

SEQ ID NO: 21706 - DNA, 25 bp, Saccharomyces pastorianus
acttacagcctggtatttatgcaat

SEQ ID NO: 21707 - DNA, 25 bp, Saccharomyces pastorianus
cttggctctttacgcaatactgcat

SEQ ID NO: 21708 - DNA, 25 bp, Saccharomyces pastorianus
tccgttctttgccagcttttagaaa

SEQ ID NO: 21709 - DNA, 25 bp, Saccharomyces pastorianus
cagcggatgccgtatctagactaat

SEQ ID NO: 21710 - DNA, 25 bp, Saccharomyces pastorianus
gtttaagttgtctaatcgtcaccat

SEQ ID NO: 21711 - DNA, 25 bp, Saccharomyces pastorianus
tccactgctctactggctaggatga

SEQ ID NO: 21712 - DNA, 25 bp, Saccharomyces pastorianus
ttctaccccaccaaggaagtcatct

SEQ ID NO: 21713 - DNA, 25 bp, Saccharomyces pastorianus
agacatgggcctcaggtccactgct

SEQ ID NO: 21714 - DNA, 25 bp, Saccharomyces pastorianus
gaagattcgctcatggaagtgccta

SEQ ID NO: 21715 - DNA, 25 bp, Saccharomyces pastorianus
aaggaagtcatctccagtggcgaaa

SEQ ID NO: 21716 - DNA, 25 bp, Saccharomyces pastorianus
aatcgcctgaaaaagctgctgtcaa

SEQ ID NO: 21717 - DNA, 25 bp, Saccharomyces pastorianus
gtaagatcaaaaaccacaccagaag

SEQ ID NO: 21718 - DNA, 25 bp, Saccharomyces pastorianus
aagagtcctcttcgtttattgacga

SEQ ID NO: 21719 - DNA, 25 bp, Saccharomyces pastorianus
agctggacgagaacacacgacccaa

SEQ ID NO: 21720 - DNA, 25 bp, Saccharomyces pastorianus
gtggcgaaaagagccttatcttcta

SEQ ID NO: 21721 - DNA, 25 bp, Saccharomyces pastorianus
gacgaggacggctatatagtcacaa

SEQ ID NO: 21722 - DNA, 25 bp, Saccharomyces pastorianus
aagctgcatcatgtgcatgaccggt

SEQ ID NO: 21723 - DNA, 25 bp, Saccharomyces pastorianus
tactacccattatttgacatcttga

SEQ ID NO: 21724 - DNA, 25 bp, Saccharomyces pastorianus
ggattcgtcgaacactggccaggat

SEQ ID NO: 21725 - DNA, 25 bp, Saccharomyces pastorianus
gacttgaaagtctcaccgctaacaa

SEQ ID NO: 21726 - DNA, 25 bp, Saccharomyces pastorianus
aattgatcggccatctaagctgcat

SEQ ID NO: 21727 - DNA, 25 bp, Saccharomyces pastorianus
gacatcttgatctttttactggccc

SEQ ID NO: 21728 - DNA, 25 bp, Saccharomyces pastorianus
tcgtcttctaccattgccaattgat

SEQ ID NO: 21729 - DNA, 25 bp, Saccharomyces pastorianus
ggccaggatctagctcattttctga

SEQ ID NO: 21730 - DNA, 25 bp, Saccharomyces pastorianus
gatcatttctctttcagggttcctg

SEQ ID NO: 21731 - DNA, 25 bp, Saccharomyces pastorianus
atcagtaccatacatccgacttcat

SEQ ID NO: 21732 - DNA, 25 bp, Saccharomyces pastorianus
gacttcatgtcggattcgtcgaaca

SEQ ID NO: 21733 - DNA, 25 bp, Saccharomyces pastorianus
agcaatccattgaaaccgccaacaa

SEQ ID NO: 21734 - DNA, 25 bp, Saccharomyces pastorianus
aggccacaagcaaggattcctccat

SEQ ID NO: 21735 - DNA, 25 bp, Saccharomyces pastorianus
gatgaagccagaaagcaatccattg

SEQ ID NO: 21736 - DNA, 25 bp, Saccharomyces pastorianus
taagaacgactcaggcaacagcaac

SEQ ID NO: 21737 - DNA, 25 bp, Saccharomyces pastorianus
caacgacaccgaaaactccttgaag

SEQ ID NO: 21738 - DNA, 25 bp, Saccharomyces pastorianus
ggttagagatcaaatcacctcattg

SEQ ID NO: 21739 - DNA, 25 bp, Saccharomyces pastorianus
catcgacgccgatggtatcatcaac

SEQ ID NO: 21740 - DNA, 25 bp, Saccharomyces pastorianus
gaattgcaaaactcttccatgaaat

SEQ ID NO: 21741 - DNA, 25 bp, Saccharomyces pastorianus
agcaaggattcctccatcactgttg

SEQ ID NO: 21742 - DNA, 25 bp, Saccharomyces pastorianus
ttctgctagagacaaggccacaagc

SEQ ID NO: 21743 - DNA, 25 bp, Saccharomyces pastorianus
acctcattgaaggaattgatcgcta

SEQ ID NO: 21744 - DNA, 25 bp, Saccharomyces pastorianus
agttccatttgttcagagaaacgaa

SEQ ID NO: 21745 - DNA, 25 bp, Saccharomyces pastorianus
tcactcttgatgtcttcaccggtaa

SEQ ID NO: 21746 - DNA, 25 bp, Saccharomyces pastorianus
tgaaactgccgatgccggttcctct

SEQ ID NO: 21747 - DNA, 25 bp, Saccharomyces pastorianus
attgggtgacatcatgcaaactgct

SEQ ID NO: 21748 - DNA, 25 bp, Saccharomyces pastorianus
cgccaaggtccatttagtcactctt

SEQ ID NO: 21749 - DNA, 25 bp, Saccharomyces pastorianus
tcatgcaaactgctttcgacgaagg

SEQ ID NO: 21750 - DNA, 25 bp, Saccharomyces pastorianus
aaggtccatttagtcactcttgatg

SEQ ID NO: 21751 - DNA, 25 bp, Saccharomyces pastorianus
ttagtcactcttgatgtcttcaccg

SEQ ID NO: 21752 - DNA, 25 bp, Saccharomyces pastorianus
gtccatttagtcactcttgatgtct

SEQ ID NO: 21753 - DNA, 25 bp, Saccharomyces pastorianus
ggtgacatcatgcaaactgctttcg

SEQ ID NO: 21754 - DNA, 25 bp, Saccharomyces pastorianus
actcttgatgtcttcaccggtaaga

SEQ ID NO: 21755 - DNA, 25 bp, Saccharomyces pastorianus
gttccgcaaagaagggtgctactct

SEQ ID NO: 21756 - DNA, 25 bp, Saccharomyces pastorianus
aagggtactcttacactgacgctaa

SEQ ID NO: 21757 - DNA, 25 bp, Saccharomyces pastorianus
agggtgctactcttttcaagaccag

SEQ ID NO: 21758 - DNA, 25 bp, Saccharomyces pastorianus
attcaaagccggttccgcaaagaag

SEQ ID NO: 21759 - DNA, 25 bp, Saccharomyces pastorianus
cgaaaacaacatgtccgattacttg

SEQ ID NO: 21760 - DNA, 25 bp, Saccharomyces pastorianus
aaacttgcacgggatcttcggcaga

SEQ ID NO: 21761 - DNA, 25 bp, Saccharomyces pastorianus
ccggccaggctgaagggtactctta

SEQ ID NO: 21762 - DNA, 25 bp, Saccharomyces pastorianus
ttacactgacgctaacatcaagaag

SEQ ID NO: 21763 - DNA, 25 bp, Saccharomyces pastorianus
aggtcggtccaaacttgcacgggat

SEQ ID NO: 21764 - DNA, 25 bp, Saccharomyces pastorianus
atcttcggcagacactccggccagg

SEQ ID NO: 21765 - DNA, 25 bp, Saccharomyces pastorianus
ggcggcccacacaaggtcggtccaa

SEQ ID NO: 21766 - DNA, 25 bp, Saccharomyces pastorianus
ggacggctcgttaatgactgttgct

SEQ ID NO: 21767 - DNA, 25 bp, Saccharomyces pastorianus
tgaacgcgattgcactaacgcccat

SEQ ID NO: 21768 - DNA, 25 bp, Saccharomyces pastorianus
tatatgcgccagtccatacgctttt

SEQ ID NO: 21769 - DNA, 25 bp, Saccharomyces pastorianus
aacagccagtggaagttcatgcccc

SEQ ID NO: 21770 - DNA, 25 bp, Saccharomyces pastorianus
ttcacgcacatcctgtcgcaaaaga

SEQ ID NO: 21771 - DNA, 25 bp, Saccharomyces pastorianus
gatgaagtctagagccccagcatgg

SEQ ID NO: 21772 - DNA, 25 bp, Saccharomyces pastorianus
tagtgtgccccacggtgaacgcgat

SEQ ID NO: 21773 - DNA, 25 bp, Saccharomyces pastorianus
catattcgttaagtgccggcgggtc

SEQ ID NO: 21774 - DNA, 25 bp, Saccharomyces pastorianus
agccgacgggctaattgctgcaaca

SEQ ID NO: 21775 - DNA, 25 bp, Saccharomyces pastorianus
atttgcccacatgcgttaagcttca

SEQ ID NO: 21776 - DNA, 25 bp, Saccharomyces pastorianus
aatgactgttgctcaagccgacggg

SEQ ID NO: 21777 - DNA, 25 bp, Saccharomyces pastorianus
aagctcattacaatttgcctgtgaa

SEQ ID NO: 21778 - DNA, 25 bp, Saccharomyces pastorianus
tatacgacccgtctttgaatgaggt

SEQ ID NO: 21779 - DNA, 25 bp, Saccharomyces pastorianus
gtgcaaatcacagaactcaacgacg

SEQ ID NO: 21780 - DNA, 25 bp, Saccharomyces pastorianus
gagacccaagaacgtttccaagata

SEQ ID NO: 21781 - DNA, 25 bp, Saccharomyces pastorianus
gacgctagaagacagccatctgctg

SEQ ID NO: 21782 - DNA, 25 bp, Saccharomyces pastorianus
ttttgaagccaactggacgcctgtt

SEQ ID NO: 21783 - DNA, 25 bp, Saccharomyces pastorianus
gcacatcgaccacaagcttctggag

SEQ ID NO: 21784 - DNA, 25 bp, Saccharomyces pastorianus
atgtgcccactcttgctgatatgga

SEQ ID NO: 21785 - DNA, 25 bp, Saccharomyces pastorianus
ggctttggaattgcccgaagtgaaa

SEQ ID NO: 21786 - DNA, 25 bp, Saccharomyces pastorianus
ataaacaagacacgcatgtgcccac

SEQ ID NO: 21787 - DNA, 25 bp, Saccharomyces pastorianus
ggacgcctgttttaaaagctcatta

SEQ ID NO: 21788 - DNA, 25 bp, Saccharomyces pastorianus
gcctttgatggaaatattgcacccg

SEQ ID NO: 21789 - DNA, 25 bp, Saccharomyces pastorianus
agatcattaattaccaacgcctttg

SEQ ID NO: 21790 - DNA, 25 bp, Saccharomyces pastorianus
ggtattgtccaaaggcctatatgcc

SEQ ID NO: 21791 - DNA, 25 bp, Saccharomyces pastorianus
attgcacccgaaacttctgtgtatg

SEQ ID NO: 21792 - DNA, 25 bp, Saccharomyces pastorianus
tcttattacaccctaccactggtag

SEQ ID NO: 21793 - DNA, 25 bp, Saccharomyces pastorianus
tattggagtgtgtcgtctttggtaa

SEQ ID NO: 21794 - DNA, 25 bp, Saccharomyces pastorianus
gcggcgtccacggagccaatagatt

SEQ ID NO: 21795 - DNA, 25 bp, Saccharomyces pastorianus
gattcaaaactatggcctacagact

SEQ ID NO: 21796 - DNA, 25 bp, Saccharomyces pastorianus
agattacgcctgttgttcatttcac

SEQ ID NO: 21797 - DNA, 25 bp, Saccharomyces pastorianus
gatgcggtgaccatggacatacagt

SEQ ID NO: 21798 - DNA, 25 bp, Saccharomyces pastorianus
cagactacggcgcaagacttggtta

SEQ ID NO: 21799 - DNA, 25 bp, Saccharomyces pastorianus
ggtcttactgcattcataccagaaa

SEQ ID NO: 21800 - DNA, 25 bp, Saccharomyces pastorianus
ctacagctaggtgatatggcggtta

SEQ ID NO: 21801 - DNA, 25 bp, Saccharomyces pastorianus
gtgcgttgtgtagacgactcaatta

SEQ ID NO: 21802 - DNA, 25 bp, Saccharomyces pastorianus
attaggccaagtcggatccactttg

SEQ ID NO: 21803 - DNA, 25 bp, Saccharomyces pastorianus
tagaccaaataaccacggactcttt

SEQ ID NO: 21804 - DNA, 25 bp, Saccharomyces pastorianus
gaacgacaaatttcacacactctcc

SEQ ID NO: 21805 - DNA, 25 bp, Saccharomyces pastorianus
agatctagggtttgtgcgttgtgta

SEQ ID NO: 21806 - DNA, 25 bp, Saccharomyces pastorianus
gtaacattaacctgtcctgacttga

SEQ ID NO: 21807 - DNA, 25 bp, Saccharomyces pastorianus
actgccgcagtacttaatgaacgac

SEQ ID NO: 21808 - DNA, 25 bp, Saccharomyces pastorianus
acacactctccattgaatatccact

SEQ ID NO: 21809 - DNA, 25 bp, Saccharomyces pastorianus
ggtgagcaaaatcccaaattatccg

SEQ ID NO: 21810 - DNA, 25 bp, Saccharomyces pastorianus
acccgaagatttggcgctgaacaca

SEQ ID NO: 21811 - DNA, 25 bp, Saccharomyces pastorianus
aagttggcatcttggttcataccac

SEQ ID NO: 21812 - DNA, 25 bp, Saccharomyces pastorianus
atgaggtcactaaatgctccacccg

SEQ ID NO: 21813 - DNA, 25 bp, Saccharomyces pastorianus
atctgaggatgaagccgaccctttt

SEQ ID NO: 21814 - DNA, 25 bp, Saccharomyces pastorianus
acagaactcaagatccgcttcaagg

SEQ ID NO: 21815 - DNA, 25 bp, Saccharomyces pastorianus
agtacggcagctcaggtaagactac

SEQ ID NO: 21816 - DNA, 25 bp, Saccharomyces pastorianus
ggttgtcggtaatatggtcctcgat

SEQ ID NO: 21817 - DNA, 25 bp, Saccharomyces pastorianus
cgacccttttgcaggtattccggag

SEQ ID NO: 21818 - DNA, 25 bp, Saccharomyces pastorianus
ttcttacgttcccaaagccaactga

SEQ ID NO: 21819 - DNA, 25 bp, Saccharomyces pastorianus
tgaacacaactttccacttgagctc

SEQ ID NO: 21820 - DNA, 25 bp, Saccharomyces pastorianus
aagacgagaccattaccggcgtcga

SEQ ID NO: 21821 - DNA, 25 bp, Saccharomyces pastorianus
tgaaacctcgtacacttccaataac

SEQ ID NO: 21822 - DNA, 25 bp, Saccharomyces pastorianus
aagccacctagtttacagacaagcg

SEQ ID NO: 21823 - DNA, 25 bp, Saccharomyces pastorianus
agtgggctcaaccagaagtcgtcta

SEQ ID NO: 21824 - DNA, 25 bp, Saccharomyces pastorianus
gattttagacccaccgaataccaat

SEQ ID NO: 21825 - DNA, 25 bp, Saccharomyces pastorianus
agattctctgcgattttagacccac

SEQ ID NO: 21826 - DNA, 25 bp, Saccharomyces pastorianus
taatgaaactcggaggcccaagcca

SEQ ID NO: 21827 - DNA, 25 bp, Saccharomyces pastorianus
gaagtcgtctactaccaggctacta

SEQ ID NO: 21828 - DNA, 25 bp, Saccharomyces pastorianus
tcagggaaactggtcttccgaggaa

SEQ ID NO: 21829 - DNA, 25 bp, Saccharomyces pastorianus
ggctactacaatctacaacctcgac

SEQ ID NO: 21830 - DNA, 25 bp, Saccharomyces pastorianus
gaaacttttcagacgctcagagata

SEQ ID NO: 21831 - DNA, 25 bp, Saccharomyces pastorianus
gaagattcgagcgtcctcagtgggc

SEQ ID NO: 21832 - DNA, 25 bp, Saccharomyces pastorianus
gttccggaaacatgagtagcgacct

SEQ ID NO: 21833 - DNA, 25 bp, Saccharomyces pastorianus
aaatgtcctaagtgtagcatacgat

SEQ ID NO: 21834 - DNA, 25 bp, Saccharomyces pastorianus
gctcaggctgtagttaagtgtggta

SEQ ID NO: 21835 - DNA, 25 bp, Saccharomyces pastorianus
gaattctatcaactaccgttagcga

SEQ ID NO: 21836 - DNA, 25 bp, Saccharomyces pastorianus
gaaattccatttagcgaaggtttat

SEQ ID NO: 21837 - DNA, 25 bp, Saccharomyces pastorianus
aacggaccctagttcagagtccaat

SEQ ID NO: 21838 - DNA, 25 bp, Saccharomyces pastorianus
taccttaacacattgcgatatggtg

SEQ ID NO: 21839 - DNA, 25 bp, Saccharomyces pastorianus
aacaacagtgctatcgtaaccggta

SEQ ID NO: 21840 - DNA, 25 bp, Saccharomyces pastorianus
ataacgtccaattgcaagaactatt

SEQ ID NO: 21841 - DNA, 25 bp, Saccharomyces pastorianus
gtagcatacgatattgttccttgaa

SEQ ID NO: 21842 - DNA, 25 bp, Saccharomyces pastorianus
aagcacattcataaaaacgttctag

SEQ ID NO: 21843 - DNA, 25 bp, Saccharomyces pastorianus
ggaagttctggatgcatttttcggc

SEQ ID NO: 21844 - DNA, 25 bp, Saccharomyces pastorianus
acgagcccatatacctttgtcacat

SEQ ID NO: 21845 - DNA, 25 bp, Saccharomyces pastorianus
aacatagtcatgacgccattgcgca

SEQ ID NO: 21846 - DNA, 25 bp, Saccharomyces pastorianus
cgtctgtgagctggatatcgtcttc

SEQ ID NO: 21847 - DNA, 25 bp, Saccharomyces pastorianus
agaaggtacgctgggctctatttcg

SEQ ID NO: 21848 - DNA, 25 bp, Saccharomyces pastorianus
gagttctccgattcgacaaagctca

SEQ ID NO: 21849 - DNA, 25 bp, Saccharomyces pastorianus
tggacctgcttgatgacgagcccat

SEQ ID NO: 21850 - DNA, 25 bp, Saccharomyces pastorianus
agggaccacaagcaccagagtaatt

SEQ ID NO: 21851 - DNA, 25 bp, Saccharomyces pastorianus
ggctctatttcgtcatgggcgtgga

SEQ ID NO: 21852 - DNA, 25 bp, Saccharomyces pastorianus
agatatataggctcatctcctccag

SEQ ID NO: 21853 - DNA, 25 bp, Saccharomyces pastorianus
ttgtcacatccatctgttcgtggaa

SEQ ID NO: 21854 - DNA, 25 bp, Saccharomyces pastorianus
tagtccaaatgtgtcctccttaaag

SEQ ID NO: 21855 - DNA, 25 bp, Saccharomyces pastorianus
gtgtcttcatcaagcaactcgatta

SEQ ID NO: 21856 - DNA, 25 bp, Saccharomyces pastorianus
aattgctcaatctccatcacttaaa

SEQ ID NO: 21857 - DNA, 25 bp, Saccharomyces pastorianus
aagtcaatgatcaactctacccctt

SEQ ID NO: 21858 - DNA, 25 bp, Saccharomyces pastorianus
gagacgccaatttctgtcaaggaca

SEQ ID NO: 21859 - DNA, 25 bp, Saccharomyces pastorianus
cgtgaaaactgccacaccattgaat

SEQ ID NO: 21860 - DNA, 25 bp, Saccharomyces pastorianus
tagaaaaggcgacaccaacttccac

SEQ ID NO: 21861 - DNA, 25 bp, Saccharomyces pastorianus
gagaacctttgagtactaaacctag

SEQ ID NO: 21862 - DNA, 25 bp, Saccharomyces pastorianus
actagcgcacccaatgtgtcttcat

SEQ ID NO: 21863 - DNA, 25 bp, Saccharomyces pastorianus
aggtcatccatcaccacttagatat

SEQ ID NO: 21864 - DNA, 25 bp, Saccharomyces pastorianus
gatatcactaacagcgtcacgaacg

SEQ ID NO: 21865 - DNA, 25 bp, Saccharomyces pastorianus
aatcctaacgctgttttgggctcca

SEQ ID NO: 21866 - DNA, 25 bp, Saccharomyces pastorianus
gtcgtagggtcgttaattttctgct

SEQ ID NO: 21867 - DNA, 25 bp, Saccharomyces pastorianus
gccactgttttctatacatgcacct

SEQ ID NO: 21868 - DNA, 25 bp, Saccharomyces pastorianus
cgagtgcagccaatgcaaagccata

SEQ ID NO: 21869 - DNA, 25 bp, Saccharomyces pastorianus
gagatgaactaccacactctgcaac

SEQ ID NO: 21870 - DNA, 25 bp, Saccharomyces pastorianus
gcgttcccatctgcattaagagcta

SEQ ID NO: 21871 - DNA, 25 bp, Saccharomyces pastorianus
gaaggacggtgctaccatcaaggaa

SEQ ID NO: 21872 - DNA, 25 bp, Saccharomyces pastorianus
aaatgtccccaatgtggcaatgaag

SEQ ID NO: 21873 - DNA, 25 bp, Saccharomyces pastorianus
aacggcagaagacgcgttcccatct

SEQ ID NO: 21874 - DNA, 25 bp, Saccharomyces pastorianus
aaagtcatcactacaacggcagaag

SEQ ID NO: 21875 - DNA, 25 bp, Saccharomyces pastorianus
tttgggctccaatgtcgagtgcagc

SEQ ID NO: 21876 - DNA, 25 bp, Saccharomyces pastorianus
gaaaactcaggccttgatccaattg

SEQ ID NO: 21877 - DNA, 25 bp, Saccharomyces pastorianus
gaagctcagcgtgcattacatgatt

SEQ ID NO: 21878 - DNA, 25 bp, Saccharomyces pastorianus
ggtactaccaaggaccgtatgctaa

SEQ ID NO: 21879 - DNA, 25 bp, Saccharomyces pastorianus
ttgctcaagctttagacaccattcc

SEQ ID NO: 21880 - DNA, 25 bp, Saccharomyces pastorianus
atatgcattccgtggctttgctcaa

SEQ ID NO: 21881 - DNA, 25 bp, Saccharomyces pastorianus
gtggtatcgaccaatatgcattccg

SEQ ID NO: 21882 - DNA, 25 bp, Saccharomyces pastorianus
aggtacttgttccagaatctacgaa

SEQ ID NO: 21883 - DNA, 25 bp, Saccharomyces pastorianus
atggtcgtattgttccgagattcca

SEQ ID NO: 21884 - DNA, 25 bp, Saccharomyces pastorianus
gttgattgcttaggctacgggtcca

SEQ ID NO: 21885 - DNA, 25 bp, Saccharomyces pastorianus
catgtcgctggctgtttccgaagaa

SEQ ID NO: 21886 - DNA, 25 bp, Saccharomyces pastorianus
tgtcgttgatccctttatcggtaag

SEQ ID NO: 21887 - DNA, 25 bp, Saccharomyces pastorianus
tcaggcttgtcctattgatgttcgt

SEQ ID NO: 21888 - DNA, 25 bp, Saccharomyces pastorianus
ggtgggtccaccatgtttaaggatt

SEQ ID NO: 21889 - DNA, 25 bp, Saccharomyces pastorianus
gttccttgctggcacaaactgcaga

SEQ ID NO: 21890 - DNA, 25 bp, Saccharomyces pastorianus
tgactcctttgcctacggtggtaga

SEQ ID NO: 21891 - DNA, 25 bp, Saccharomyces pastorianus
gtggatgtttctgtgatttcccata

SEQ ID NO: 21892 - DNA, 25 bp, Saccharomyces pastorianus
aaagttactgtcacaccaagaagga

SEQ ID NO: 21893 - DNA, 25 bp, Saccharomyces pastorianus
catgtttaaggatttcgggcgtcgt

SEQ ID NO: 21894 - DNA, 25 bp, Saccharomyces pastorianus
gtggtagatcaaacaattcaggctt

SEQ ID NO: 21895 - DNA, 25 bp, Saccharomyces pastorianus
gattcttggctccagaaatcttttt

SEQ ID NO: 21896 - DNA, 25 bp, Saccharomyces pastorianus
aacatcgtattatcaggtgggtcca

SEQ ID NO: 21897 - DNA, 25 bp, Saccharomyces pastorianus
aacgctgtctggttcggtggttcct

SEQ ID NO: 21898 - DNA, 25 bp, Saccharomyces pastorianus
gacgttcctgaacaggtcgataaat

SEQ ID NO: 21899 - DNA, 25 bp, Saccharomyces pastorianus
taacgaggatgctgacatacgcaat

SEQ ID NO: 21900 - DNA, 25 bp, Saccharomyces pastorianus
gaagcatttgcatttgatccattga

SEQ ID NO: 21901 - DNA, 25 bp, Saccharomyces pastorianus
taactattgaggaagcagcgaacat

SEQ ID NO: 21902 - DNA, 25 bp, Saccharomyces pastorianus
ggtagtttccgtattacatgtgaac

SEQ ID NO: 21903 - DNA, 25 bp, Saccharomyces pastorianus
ggaatcgttgatggcaatcttagaa

SEQ ID NO: 21904 - DNA, 25 bp, Saccharomyces pastorianus
taccctgaaaaggttccatttagat

SEQ ID NO: 21905 - DNA, 25 bp, Saccharomyces pastorianus
ttgcctccgcaaaaacttactgaac

SEQ ID NO: 21906 - DNA, 25 bp, Saccharomyces pastorianus
gtttagcgagttagacgttcctgaa

SEQ ID NO: 21907 - DNA, 25 bp, Saccharomyces pastorianus
cttactgaacaaactggaatccaat

SEQ ID NO: 21908 - DNA, 25 bp, Saccharomyces pastorianus
ctagggcaatgcttgttttaagacg

SEQ ID NO: 21909 - DNA, 25 bp, Saccharomyces pastorianus
actacattaccaacgatagcttcga

SEQ ID NO: 21910 - DNA, 25 bp, Saccharomyces pastorianus
aagaatcatcgacccattagcatcc

SEQ ID NO: 21911 - DNA, 25 bp, Saccharomyces pastorianus
gtgcgtcggtggtgaatcagctaca

SEQ ID NO: 21912 - DNA, 25 bp, Saccharomyces pastorianus
tggttactgttcactacggattcga

SEQ ID NO: 21913 - DNA, 25 bp, Saccharomyces pastorianus
tgcagtccgcttcgaagagagcaca

SEQ ID NO: 21914 - DNA, 25 bp, Saccharomyces pastorianus
gcgacgatggtgttttggcaaaaat

SEQ ID NO: 21915 - DNA, 25 bp, Saccharomyces pastorianus
aacaatggaaacttactcaggcgta

SEQ ID NO: 21916 - DNA, 25 bp, Saccharomyces pastorianus
atgaccgcagatgcacaaagtgctt

SEQ ID NO: 21917 - DNA, 25 bp, Saccharomyces pastorianus
tagcatcccgttgttcaaaattcag

SEQ ID NO: 21918 - DNA, 25 bp, Saccharomyces pastorianus
aaaatcttggatatctctgcgggag

SEQ ID NO: 21919 - DNA, 25 bp, Saccharomyces pastorianus
gaggcattacgttactgcagtccgc

SEQ ID NO: 21920 - DNA, 25 bp, Saccharomyces pastorianus
aaaaatgctatctctcatcgaggta

SEQ ID NO: 21921 - DNA, 25 bp, Saccharomyces pastorianus
tcgtggtccaactacattcggctgg

SEQ ID NO: 21922 - DNA, 25 bp, Saccharomyces pastorianus
atggcttgccaggtgcttatatcaa

SEQ ID NO: 21923 - DNA, 25 bp, Saccharomyces pastorianus
aagattgtctcgagtcgtggtccaa

SEQ ID NO: 21924 - DNA, 25 bp, Saccharomyces pastorianus
agggtaagcaagctgttttggcctt

SEQ ID NO: 21925 - DNA, 25 bp, Saccharomyces pastorianus
gaagtccagtcaattttggcccaag

SEQ ID NO: 21926 - DNA, 25 bp, Saccharomyces pastorianus
ccactatttgctttgctggttccaa

SEQ ID NO: 21927 - DNA, 25 bp, Saccharomyces pastorianus
tcatcgaggtaaggcctttgctcag

SEQ ID NO: 21928 - DNA, 25 bp, Saccharomyces pastorianus
ggctgggactcaatctttgaacctc

SEQ ID NO: 21929 - DNA, 25 bp, Saccharomyces pastorianus
ttgtcactggtaacgccaacaaact

SEQ ID NO: 21930 - DNA, 25 bp, Saccharomyces pastorianus
aagaatgccgaagccgtgaccacta

SEQ ID NO: 21931 - DNA, 25 bp, Saccharomyces pastorianus
ggaattctactctcaactagacgtt

SEQ ID NO: 21932 - DNA, 25 bp, Saccharomyces pastorianus
tggtgaactccatgtcgctgatgct

SEQ ID NO: 21933 - DNA, 25 bp, Saccharomyces pastorianus
acgagttcatgcagtgtgtggacaa

SEQ ID NO: 21934 - DNA, 25 bp, Saccharomyces pastorianus
gatcacgacagcatagacgccctta

SEQ ID NO: 21935 - DNA, 25 bp, Saccharomyces pastorianus
aggacgccaacgacggccttgtaga

SEQ ID NO: 21936 - DNA, 25 bp, Saccharomyces pastorianus
gtttcactggtgacggctttgacga

SEQ ID NO: 21937 - DNA, 25 bp, Saccharomyces pastorianus
gaacgtcaaagagcgctgaacctga

SEQ ID NO: 21938 - DNA, 25 bp, Saccharomyces pastorianus
aaacgagaaggacaccgctgctgca

SEQ ID NO: 21939 - DNA, 25 bp, Saccharomyces pastorianus
acaatgggctgggttctggctacat

SEQ ID NO: 21940 - DNA, 25 bp, Saccharomyces pastorianus
gacgcccttagcgacctggaagagg

SEQ ID NO: 21941 - DNA, 25 bp, Saccharomyces pastorianus
tctggctacatgagttccttggtga

SEQ ID NO: 21942 - DNA, 25 bp, Saccharomyces pastorianus
gatcattcagcaactggtccacagc

SEQ ID NO: 21943 - DNA, 25 bp, Saccharomyces pastorianus
aatcctcatggacgacagggtcact

SEQ ID NO: 21944 - DNA, 25 bp, Saccharomyces pastorianus
cgccgtggtctacttcatgtacaag

SEQ ID NO: 21945 - DNA, 25 bp, Saccharomyces pastorianus
ggaagagccattcactgccatgatc

SEQ ID NO: 21946 - DNA, 25 bp, Saccharomyces pastorianus
tgggtgactacttcggaatcctcat

SEQ ID NO: 21947 - DNA, 25 bp, Saccharomyces pastorianus
ttcaattggccatcatgtgcacgat

SEQ ID NO: 21948 - DNA, 25 bp, Saccharomyces pastorianus
ttgcgcgaacaatccacatgctctt

SEQ ID NO: 21949 - DNA, 25 bp, Saccharomyces pastorianus
acatgctctttgatcgtgggcgaaa

SEQ ID NO: 21950 - DNA, 25 bp, Saccharomyces pastorianus
accattttctcgctagggatcatca

SEQ ID NO: 21951 - DNA, 25 bp, Saccharomyces pastorianus
gatgttcaatcccatcttctggaat

SEQ ID NO: 21952 - DNA, 25 bp, Saccharomyces pastorianus
gccaggtgcttgtgttgagctccat

SEQ ID NO: 21953 - DNA, 25 bp, Saccharomyces pastorianus
caccatctgatacacacgggcaaaa

SEQ ID NO: 21954 - DNA, 25 bp, Saccharomyces pastorianus
aaattgaatgcttcatcgtcttcat

SEQ ID NO: 21955 - DNA, 25 bp, Saccharomyces pastorianus
ttaataatggcattctcagcccacc

SEQ ID NO: 21956 - DNA, 25 bp, Saccharomyces pastorianus
aacacgaatccgttcaagccaaatg

SEQ ID NO: 21957 - DNA, 25 bp, Saccharomyces pastorianus
gtctgtcgcaacagaatccatccgt

SEQ ID NO: 21958 - DNA, 25 bp, Saccharomyces pastorianus
acaaacatgtacttgcgtgcgcttt

SEQ ID NO: 21959 - DNA, 25 bp, Saccharomyces pastorianus
agcattgtctggtgagtctgtcgca

SEQ ID NO: 21960 - DNA, 25 bp, Saccharomyces pastorianus
ggacgtggaggattcttcaatctct

SEQ ID NO: 21961 - DNA, 25 bp, Saccharomyces pastorianus
ctttgccatcatcggatccaacgaa

SEQ ID NO: 21962 - DNA, 25 bp, Saccharomyces pastorianus
atccaacgaagtctacgacgtgggt

SEQ ID NO: 21963 - DNA, 25 bp, Saccharomyces pastorianus
aacgcgttgttgatttctcatttga

SEQ ID NO: 21964 - DNA, 25 bp, Saccharomyces pastorianus
gaaggtgtcggctccttttacagcg

SEQ ID NO: 21965 - DNA, 25 bp, Saccharomyces pastorianus
gttgaagagcactttgggctgtcca

SEQ ID NO: 21966 - DNA, 25 bp, Saccharomyces pastorianus
tcgggttgctagctcaattggccaa

SEQ ID NO: 21967 - DNA, 25 bp, Saccharomyces pastorianus
gtactttgacctctttgcaattcgg

SEQ ID NO: 21968 - DNA, 25 bp, Saccharomyces pastorianus
gcgggttcacaccaattcttttcaa

SEQ ID NO: 21969 - DNA, 25 bp, Saccharomyces pastorianus
tttggctgctgctattgtctcgcaa

SEQ ID NO: 21970 - DNA, 25 bp, Saccharomyces pastorianus
tgatattgcgctgtgtcccctagag

SEQ ID NO: 21971 - DNA, 25 bp, Saccharomyces pastorianus
ggtcggcgggttttccagaatcttg

SEQ ID NO: 21972 - DNA, 25 bp, Saccharomyces pastorianus
cactttgctgaacttgctttccggt

SEQ ID NO: 21973 - DNA, 25 bp, Saccharomyces pastorianus
gccatggccgagtttttggctgata

SEQ ID NO: 21974 - DNA, 25 bp, Saccharomyces pastorianus
tgcctcgcagtacaagaactccgtg

SEQ ID NO: 21975 - DNA, 25 bp, Saccharomyces pastorianus
gaccttcattgttcattgcgactgt

SEQ ID NO: 21976 - DNA, 25 bp, Saccharomyces pastorianus
gggttgccaatgatgtcaattccaa

SEQ ID NO: 21977 - DNA, 25 bp, Saccharomyces pastorianus
aataacttccaagggccacgtcaag

SEQ ID NO: 21978 - DNA, 25 bp, Saccharomyces pastorianus
ctcccggaatattttggccatcaac

SEQ ID NO: 21979 - DNA, 25 bp, Saccharomyces pastorianus
gaagggcccgagaacaatactgatt

SEQ ID NO: 21980 - DNA, 25 bp, Saccharomyces pastorianus
gagagtgcccaaacttatcacgaac

SEQ ID NO: 21981 - DNA, 25 bp, Saccharomyces pastorianus
tgaagtctcgactaccaccgaaatt

SEQ ID NO: 21982 - DNA, 25 bp, Saccharomyces pastorianus
gaattgcatgtagaggccgcgaaca

SEQ ID NO: 21983 - DNA, 25 bp, Saccharomyces pastorianus
gacattgccaattccgttgagagac

SEQ ID NO: 21984 - DNA, 25 bp, Saccharomyces pastorianus
gacactctagaggaacgggttgcca

SEQ ID NO: 21985 - DNA, 25 bp, Saccharomyces pastorianus
gacaaaatcctggtgaactcccgga

SEQ ID NO: 21986 - DNA, 25 bp, Saccharomyces pastorianus
tcacatcatagccatgcagattcag

SEQ ID NO: 21987 - DNA, 25 bp, Saccharomyces pastorianus
gaagacgcctttgacagtttacaac

SEQ ID NO: 21988 - DNA, 25 bp, Saccharomyces pastorianus
aaaggcgcactactccggtaatgtc

SEQ ID NO: 21989 - DNA, 25 bp, Saccharomyces pastorianus
actactccggtaatgtcatcaaggg

SEQ ID NO: 21990 - DNA, 25 bp, Saccharomyces pastorianus
ggaactcagacgtcaaaggcgcact

SEQ ID NO: 21991 - DNA, 25 bp, Saccharomyces pastorianus
tccggtcatggtggaactcagacgt

SEQ ID NO: 21992 - DNA, 25 bp, Saccharomyces pastorianus
gagtatttttcacacaacagtaaca

SEQ ID NO: 21993 - DNA, 25 bp, Saccharomyces pastorianus
tgcagattcagcatttagtaacaat

SEQ ID NO: 21994 - DNA, 25 bp, Saccharomyces pastorianus
gtaacaacaatcattccggtcatgg

SEQ ID NO: 21995 - DNA, 25 bp, Saccharomyces pastorianus
gacaccttttccaaatcacatcata

SEQ ID NO: 21996 - DNA, 25 bp, Saccharomyces pastorianus
agtctcttcaagatgggaaacaaca

SEQ ID NO: 21997 - DNA, 25 bp, Saccharomyces pastorianus
ttcttcaacaagaccaatcgcaccg

SEQ ID NO: 21998 - DNA, 25 bp, Saccharomyces pastorianus
gaaatttaaacacaaccgctcctgt

SEQ ID NO: 21999 - DNA, 25 bp, Saccharomyces pastorianus
gcgtgtacaagatacgggtcctaat

SEQ ID NO: 22000 - DNA, 25 bp, Saccharomyces pastorianus
gggtcctaatcttactccaaatgca

SEQ ID NO: 22001 - DNA, 25 bp, Saccharomyces pastorianus
aaacaatactatgcccacccgtagg

SEQ ID NO: 22002 - DNA, 25 bp, Saccharomyces pastorianus
gaatcgtacccaacagcgtgtacaa

SEQ ID NO: 22003 - DNA, 25 bp, Saccharomyces pastorianus
tgaagtgcgcagtgacgatgacgat

SEQ ID NO: 22004 - DNA, 25 bp, Saccharomyces pastorianus
acgaatacctttccacattttctag

SEQ ID NO: 22005 - DNA, 25 bp, Saccharomyces pastorianus
aaccgctcctgttgatgatgataca

SEQ ID NO: 22006 - DNA, 25 bp, Saccharomyces pastorianus
gtaggccgaatcgttcaccgaatcg

SEQ ID NO: 22007 - DNA, 25 bp, Saccharomyces pastorianus
cctcctccattaccgtcaagaaata

SEQ ID NO: 22008 - DNA, 25 bp, Saccharomyces pastorianus
atcccatccttagtatccgggttgg

SEQ ID NO: 22009 - DNA, 25 bp, Saccharomyces pastorianus
tgcactttaacagagacggtgggct

SEQ ID NO: 22010 - DNA, 25 bp, Saccharomyces pastorianus
ttactaccgtaaaggctccatccca

SEQ ID NO: 22011 - DNA, 25 bp, Saccharomyces pastorianus
gatcattagaggtatgccttccagg

SEQ ID NO: 22012 - DNA, 25 bp, Saccharomyces pastorianus
gttgctcggtgcagggatcattaga

SEQ ID NO: 22013 - DNA, 25 bp, Saccharomyces pastorianus
ttgccgggtacttgctgcactttaa

SEQ ID NO: 22014 - DNA, 25 bp, Saccharomyces pastorianus
ttttaaccgctaccggtggtctcat

SEQ ID NO: 22015 - DNA, 25 bp, Saccharomyces pastorianus
attcggtagtgtgtacggtgttgcc

SEQ ID NO: 22016 - DNA, 25 bp, Saccharomyces pastorianus
ggtgcatcgaccttgttgctcggtg

SEQ ID NO: 22017 - DNA, 25 bp, Saccharomyces pastorianus
gtggtctcatgggttactaccgtaa

SEQ ID NO: 22018 - DNA, 25 bp, Saccharomyces pastorianus
cagcatttacattgggtcttttaac

SEQ ID NO: 22019 - DNA, 25 bp, Saccharomyces pastorianus
gataattaactacacttcaaacaca

SEQ ID NO: 22020 - DNA, 25 bp, Saccharomyces pastorianus
gattacgctctacccgagttatggg

SEQ ID NO: 22021 - DNA, 25 bp, Saccharomyces pastorianus
gaatgcatgccttacgataattaac

SEQ ID NO: 22022 - DNA, 25 bp, Saccharomyces pastorianus
tgtagttcagaactcaccacggctg

SEQ ID NO: 22023 - DNA, 25 bp, Saccharomyces pastorianus
gcgcaggttcgaatcattttagaga

SEQ ID NO: 22024 - DNA, 25 bp, Saccharomyces pastorianus
accacggctgcaagagcctcaggag

SEQ ID NO: 22025 - DNA, 25 bp, Saccharomyces pastorianus
aagagctcagtcgtgaaagaatcac

SEQ ID NO: 22026 - DNA, 25 bp, Saccharomyces pastorianus
aagagcctcaggaggagcagcagca

SEQ ID NO: 22027 - DNA, 25 bp, Saccharomyces pastorianus
caaaagattacgctctacccgagtt

SEQ ID NO: 22028 - DNA, 25 bp, Saccharomyces pastorianus
ggtaccccagcgcaggttcgaatca

SEQ ID NO: 22029 - DNA, 25 bp, Saccharomyces pastorianus
aagaatcaccgcttcgaatgcatgc

SEQ ID NO: 22030 - DNA, 25 bp, Saccharomyces pastorianus
caagtttacatccacagtactcacc

SEQ ID NO: 22031 - DNA, 25 bp, Saccharomyces pastorianus
gacggagatctagcatttttaatca

SEQ ID NO: 22032 - DNA, 25 bp, Saccharomyces pastorianus
ggatatgacattcaccaactgggta

SEQ ID NO: 22033 - DNA, 25 bp, Saccharomyces pastorianus
tgggtcaatcttaccagtcgtaggt

SEQ ID NO: 22034 - DNA, 25 bp, Saccharomyces pastorianus
gaaaactttgaccacagataccgaa

SEQ ID NO: 22035 - DNA, 25 bp, Saccharomyces pastorianus
agagctgactttggtgaatggtgca

SEQ ID NO: 22036 - DNA, 25 bp, Saccharomyces pastorianus
gaaggtgcgatctatcaagcatgaa

SEQ ID NO: 22037 - DNA, 25 bp, Saccharomyces pastorianus
atgacgctacattgtctaatgacaa

SEQ ID NO: 22038 - DNA, 25 bp, Saccharomyces pastorianus
ggaacaccaattgcctacgaagaac

SEQ ID NO: 22039 - DNA, 25 bp, Saccharomyces pastorianus
ggagacgcctatttatttatcaacc

SEQ ID NO: 22040 - DNA, 25 bp, Saccharomyces pastorianus
caagcctgaacctgggtcaatctta

SEQ ID NO: 22041 - DNA, 25 bp, Saccharomyces pastorianus
attctactcgaatacagccaagccg

SEQ ID NO: 22042 - DNA, 25 bp, Saccharomyces pastorianus
tttcacatatgtttgccactccgga

SEQ ID NO: 22043 - DNA, 25 bp, Saccharomyces pastorianus
gtatcggctcatctaaaggccatac

SEQ ID NO: 22044 - DNA, 25 bp, Saccharomyces pastorianus
aattatcctggtgtcttcccagtgg

SEQ ID NO: 22045 - DNA, 25 bp, Saccharomyces pastorianus
aaagcgccggatcgaagcataccac

SEQ ID NO: 22046 - DNA, 25 bp, Saccharomyces pastorianus
ctgtttccagtgttaaaagcgccgg

SEQ ID NO: 22047 - DNA, 25 bp, Saccharomyces pastorianus
actccggatgcatctggacaacata

SEQ ID NO: 22048 - DNA, 25 bp, Saccharomyces pastorianus
ataagaggcctttctgtttccagtg

SEQ ID NO: 22049 - DNA, 25 bp, Saccharomyces pastorianus
aagttgggttggcatctccctcaaa

SEQ ID NO: 22050 - DNA, 25 bp, Saccharomyces pastorianus
gtcaccaggccagtcattgaatgct

SEQ ID NO: 22051 - DNA, 25 bp, Saccharomyces pastorianus
ggaactcgtttatcattgccgcaat

SEQ ID NO: 22052 - DNA, 25 bp, Saccharomyces pastorianus
ggcaagctaaactcttctaacgaca

SEQ ID NO: 22053 - DNA, 25 bp, Saccharomyces pastorianus
gatgcatccaagtttcccaccatta

SEQ ID NO: 22054 - DNA, 25 bp, Saccharomyces pastorianus
gatcaaggcgtaacgacgtcagagt

SEQ ID NO: 22055 - DNA, 25 bp, Saccharomyces pastorianus
ttggtagtttcccaccattccctat

SEQ ID NO: 22056 - DNA, 25 bp, Saccharomyces pastorianus
gaaggcattttcgaaagcgtcggta

SEQ ID NO: 22057 - DNA, 25 bp, Saccharomyces pastorianus
aagccttggagacaaccaggagcta

SEQ ID NO: 22058 - DNA, 25 bp, Saccharomyces pastorianus
atcagatgaaagacccgcaacagag

SEQ ID NO: 22059 - DNA, 25 bp, Saccharomyces pastorianus
gtcagagtcgaaagccgttactaca

SEQ ID NO: 22060 - DNA, 25 bp, Saccharomyces pastorianus
ggatcctaatgggtttactaactct

SEQ ID NO: 22061 - DNA, 25 bp, Saccharomyces pastorianus
gtcggtataacaactatagaccctg

SEQ ID NO: 22062 - DNA, 25 bp, Saccharomyces pastorianus
gacacagacttgaatctcggcaata

SEQ ID NO: 22063 - DNA, 25 bp, Saccharomyces pastorianus
gtgccatcatgctattacccattag

SEQ ID NO: 22064 - DNA, 25 bp, Saccharomyces pastorianus
ataccagaatctaccccatattgaa

SEQ ID NO: 22065 - DNA, 25 bp, Saccharomyces pastorianus
gactcatactatcagcaccaatacc

SEQ ID NO: 22066 - DNA, 25 bp, Saccharomyces pastorianus
tgcactccattaacaaccgtcatta

SEQ ID NO: 22067 - DNA, 25 bp, Saccharomyces pastorianus
taacgcgtcccatagcatgtacgaa

SEQ ID NO: 22068 - DNA, 25 bp, Saccharomyces pastorianus
gttagtgcttccaacgaccaagatt

SEQ ID NO: 22069 - DNA, 25 bp, Saccharomyces pastorianus
tagatgagcctcaagtgccatcatg

SEQ ID NO: 22070 - DNA, 25 bp, Saccharomyces pastorianus
gctgctgcctattcagttagtgctt

SEQ ID NO: 22071 - DNA, 25 bp, Saccharomyces pastorianus
tacgcacaagatttttacccacaca

SEQ ID NO: 22072 - DNA, 25 bp, Saccharomyces pastorianus
ttattcgaaaccctcaaacgtccat

SEQ ID NO: 22073 - DNA, 25 bp, Saccharomyces pastorianus
aacaatagtagccttcttcacaata

SEQ ID NO: 22074 - DNA, 25 bp, Saccharomyces pastorianus
ggtttgatttcaggtgccattggac

SEQ ID NO: 22075 - DNA, 25 bp, Saccharomyces pastorianus
attcatgccgcctatactatcatta

SEQ ID NO: 22076 - DNA, 25 bp, Saccharomyces pastorianus
ggtgctggtatcactgaagccgttc

SEQ ID NO: 22077 - DNA, 25 bp, Saccharomyces pastorianus
tcgtactaatcggtacccaacttct

SEQ ID NO: 22078 - DNA, 25 bp, Saccharomyces pastorianus
aagctcagcatttgactccgacgga

SEQ ID NO: 22079 - DNA, 25 bp, Saccharomyces pastorianus
atacaataacgccattcatgccgcc

SEQ ID NO: 22080 - DNA, 25 bp, Saccharomyces pastorianus
gaggtgtttctttaaccgcagcaag

SEQ ID NO: 22081 - DNA, 25 bp, Saccharomyces pastorianus
gaagccgttcttgtggtgaatccca

SEQ ID NO: 22082 - DNA, 25 bp, Saccharomyces pastorianus
gagtggcaccgggtcaagccgttac

SEQ ID NO: 22083 - DNA, 25 bp, Saccharomyces pastorianus
aatggatgtcttaccttcgtgggaa

SEQ ID NO: 22084 - DNA, 25 bp, Saccharomyces pastorianus
gaaccaaacgctggccctaaataca

SEQ ID NO: 22085 - DNA, 25 bp, Saccharomyces pastorianus
atcgtaatccgggtcaagtactaat

SEQ ID NO: 22086 - DNA, 25 bp, Saccharomyces pastorianus
gatttctccttggattatgaggcaa

SEQ ID NO: 22087 - DNA, 25 bp, Saccharomyces pastorianus
aaatgactgatccagacctgttgaa

SEQ ID NO: 22088 - DNA, 25 bp, Saccharomyces pastorianus
agtactaatccgttggtctctacaa

SEQ ID NO: 22089 - DNA, 25 bp, Saccharomyces pastorianus
gaagctttcgctccattgtgtcatg

SEQ ID NO: 22090 - DNA, 25 bp, Saccharomyces pastorianus
aacataagccggtggtcaaccaaat

SEQ ID NO: 22091 - DNA, 25 bp, Saccharomyces pastorianus
gaggacattttctatactactaagc

SEQ ID NO: 22092 - DNA, 25 bp, Saccharomyces pastorianus
aaaccttgtcgttgaagctttcgct

SEQ ID NO: 22093 - DNA, 25 bp, Saccharomyces pastorianus
gcaaccttgcggcttacaattttga

SEQ ID NO: 22094 - DNA, 25 bp, Saccharomyces pastorianus
gatctcctattgattcattcaccat

SEQ ID NO: 22095 - DNA, 25 bp, Saccharomyces pastorianus
ttagatcatcctgacgcttacgagc

SEQ ID NO: 22096 - DNA, 25 bp, Saccharomyces pastorianus
agtaacagtgcaactccgagaacta

SEQ ID NO: 22097 - DNA, 25 bp, Saccharomyces pastorianus
tacacaaacattttctaccggccaa

SEQ ID NO: 22098 - DNA, 25 bp, Saccharomyces pastorianus
taagtgggcccatttccttaggtga

SEQ ID NO: 22099 - DNA, 25 bp, Saccharomyces pastorianus
gtatgcaatccttcattcattgagt

SEQ ID NO: 22100 - DNA, 25 bp, Saccharomyces pastorianus
gttggaaccaggatccgacttgata

SEQ ID NO: 22101 - DNA, 25 bp, Saccharomyces pastorianus
gcaatcgctgatcaatttgtcttgg

SEQ ID NO: 22102 - DNA, 25 bp, Saccharomyces pastorianus
agtaaaggccatcgtgctgctattc

SEQ ID NO: 22103 - DNA, 25 bp, Saccharomyces pastorianus
ttaggtgaaagcgatccaactgccg

SEQ ID NO: 22104 - DNA, 25 bp, Saccharomyces pastorianus
gctacggtggacattaatctgcatt

SEQ ID NO: 22105 - DNA, 25 bp, Saccharomyces pastorianus
caactgccgctgatctgattgaaca

SEQ ID NO: 22106 - DNA, 25 bp, Saccharomyces pastorianus
aacgcgtgtggtttgtatgcaatcc

SEQ ID NO: 22107 - DNA, 25 bp, Saccharomyces pastorianus
gcgtcaacctatgggatcatgccta

SEQ ID NO: 22108 - DNA, 25 bp, Saccharomyces pastorianus
gaatattcttccttctattaccgaa

SEQ ID NO: 22109 - DNA, 25 bp, Saccharomyces pastorianus
atgcctctaatttgcgtcaacctat

SEQ ID NO: 22110 - DNA, 25 bp, Saccharomyces pastorianus
aaagttcaggactggaccatgcctc

SEQ ID NO: 22111 - DNA, 25 bp, Saccharomyces pastorianus
ctatcgacgagtttggtaccttgaa

SEQ ID NO: 22112 - DNA, 25 bp, Saccharomyces pastorianus
aaacagcgcaatttctatcgacgag

SEQ ID NO: 22113 - DNA, 25 bp, Saccharomyces pastorianus
gccagggctggttatttctcgtaga

SEQ ID NO: 22114 - DNA, 25 bp, Saccharomyces pastorianus
gaaccatccaggctatttttgtcca

SEQ ID NO: 22115 - DNA, 25 bp, Saccharomyces pastorianus
agaatccaagactcgttcaacggca

SEQ ID NO: 22116 - DNA, 25 bp, Saccharomyces pastorianus
atttccccagaaaccagacattcga

SEQ ID NO: 22117 - DNA, 25 bp, Saccharomyces pastorianus
tctcgagtcatatcatccattccat

SEQ ID NO: 22118 - DNA, 25 bp, Saccharomyces pastorianus
ctccggtgtcgtcaagttcgagcaa

SEQ ID NO: 22119 - DNA, 25 bp, Saccharomyces pastorianus
agttgttcggtgtcaattccgtcgt

SEQ ID NO: 22120 - DNA, 25 bp, Saccharomyces pastorianus
agtgtcgtcatccatgctggtcaag

SEQ ID NO: 22121 - DNA, 25 bp, Saccharomyces pastorianus
gagcaagcctccgaatctgagccaa

SEQ ID NO: 22122 - DNA, 25 bp, Saccharomyces pastorianus
gggtaacttgaagaccgacgccaat

SEQ ID NO: 22123 - DNA, 25 bp, Saccharomyces pastorianus
gtagccaagggctctttccaagaca

SEQ ID NO: 22124 - DNA, 25 bp, Saccharomyces pastorianus
aaccactgtctcctacgaaatttct

SEQ ID NO: 22125 - DNA, 25 bp, Saccharomyces pastorianus
tccgtcgtcggcagaagtgtcgtca

SEQ ID NO: 22126 - DNA, 25 bp, Saccharomyces pastorianus
gaaatttctggtaacagccccaatg

SEQ ID NO: 22127 - DNA, 25 bp, Saccharomyces pastorianus
ttcaaccctttcaagaagacccacg

SEQ ID NO: 22128 - DNA, 25 bp, Saccharomyces pastorianus
gaccgacgccaatggtgtagccaag

SEQ ID NO: 22129 - DNA, 25 bp, Saccharomyces pastorianus
ctaacgaatctgaagccgaggcctt

SEQ ID NO: 22130 - DNA, 25 bp, Saccharomyces pastorianus
gttttgaacttgagtgctcccttca

SEQ ID NO: 22131 - DNA, 25 bp, Saccharomyces pastorianus
acatcggcgggttccatttgactgt

SEQ ID NO: 22132 - DNA, 25 bp, Saccharomyces pastorianus
agacgcctttgctggtgggttcatg

SEQ ID NO: 22133 - DNA, 25 bp, Saccharomyces pastorianus
gcattagccagagtcttgccttacg

SEQ ID NO: 22134 - DNA, 25 bp, Saccharomyces pastorianus
cgcgatcgtcaagttgggccaacac

SEQ ID NO: 22135 - DNA, 25 bp, Saccharomyces pastorianus
ttgtctatccaagaagtcggtcctt

SEQ ID NO: 22136 - DNA, 25 bp, Saccharomyces pastorianus
actgggacttggttgaagccgctaa

SEQ ID NO: 22137 - DNA, 25 bp, Saccharomyces pastorianus
atttgactgtgtctccagacgcgat

SEQ ID NO: 22138 - DNA, 25 bp, Saccharomyces pastorianus
aatggttggctgctttgtctatcca

SEQ ID NO: 22139 - DNA, 25 bp, Saccharomyces pastorianus
ggactctgcagttgacaagaccgtc

SEQ ID NO: 22140 - DNA, 25 bp, Saccharomyces pastorianus
tattgacgcaaaatccagacctgtt

SEQ ID NO: 22141 - DNA, 25 bp, Saccharomyces pastorianus
gagatgaacgacgaattgcgccata

SEQ ID NO: 22142 - DNA, 25 bp, Saccharomyces pastorianus
atccagacctgtttgagttcaacga

SEQ ID NO: 22143 - DNA, 25 bp, Saccharomyces pastorianus
aaagagcactgcaattccgatggat

SEQ ID NO: 22144 - DNA, 25 bp, Saccharomyces pastorianus
cttccaacaatttctagactgcgta

SEQ ID NO: 22145 - DNA, 25 bp, Saccharomyces pastorianus
ttccgatggatctaagggcttaaat

SEQ ID NO: 22146 - DNA, 25 bp, Saccharomyces pastorianus
gtttcaacaagatctgccgaacaag

SEQ ID NO: 22147 - DNA, 25 bp, Saccharomyces pastorianus
aattcaatggtggtggcaactgtat

SEQ ID NO: 22148 - DNA, 25 bp, Saccharomyces pastorianus
ttcttcatcactacccatggataaa

SEQ ID NO: 22149 - DNA, 25 bp, Saccharomyces pastorianus
gtggaatggatttcaccagacttga

SEQ ID NO: 22150 - DNA, 25 bp, Saccharomyces pastorianus
tgtcaatacggaacgtttctttcaa

SEQ ID NO: 22151 - DNA, 25 bp, Saccharomyces pastorianus
atagttcttcgttctcagagactgc

SEQ ID NO: 22152 - DNA, 25 bp, Saccharomyces pastorianus
ccatcaatggcctcactgtgttaag

SEQ ID NO: 22153 - DNA, 25 bp, Saccharomyces pastorianus
agtaataatcgcctctttggttcct

SEQ ID NO: 22154 - DNA, 25 bp, Saccharomyces pastorianus
tgaataatctgaactcctcgtaccc

SEQ ID NO: 22155 - DNA, 25 bp, Saccharomyces pastorianus
cgctgccatgggtaatagttcttcg

SEQ ID NO: 22156 - DNA, 25 bp, Saccharomyces pastorianus
tataataaagtttccacccgtgtgg

SEQ ID NO: 22157 - DNA, 25 bp, Saccharomyces pastorianus
gctatactcgtatcccaatggtgtg

SEQ ID NO: 22158 - DNA, 25 bp, Saccharomyces pastorianus
ttcctcaagatgtcaaccctcaatt

SEQ ID NO: 22159 - DNA, 25 bp, Saccharomyces pastorianus
gacattttgctaccgcatctggatt

SEQ ID NO: 22160 - DNA, 25 bp, Saccharomyces pastorianus
actagctcacgtttatggcccatta

SEQ ID NO: 22161 - DNA, 25 bp, Saccharomyces pastorianus
atcaacagccgacgttctttcaaaa

SEQ ID NO: 22162 - DNA, 25 bp, Saccharomyces pastorianus
tacgtgaacaccaagcaaggcgcta

SEQ ID NO: 22163 - DNA, 25 bp, Saccharomyces pastorianus
gttagctcgggaattggacgaccta

SEQ ID NO: 22164 - DNA, 25 bp, Saccharomyces pastorianus
tgacgagtatttgggctctcacacg

SEQ ID NO: 22165 - DNA, 25 bp, Saccharomyces pastorianus
tggacgagctaatcgcggaagccaa

SEQ ID NO: 22166 - DNA, 25 bp, Saccharomyces pastorianus
gagaggcccgcaatcgacgaacttt

SEQ ID NO: 22167 - DNA, 25 bp, Saccharomyces pastorianus
aatggactgctgctgcaaagcctga

SEQ ID NO: 22168 - DNA, 25 bp, Saccharomyces pastorianus
gacaaagtgagctcatgcttcccgc

SEQ ID NO: 22169 - DNA, 25 bp, Saccharomyces pastorianus
gaatacgcacggcatacgatacatt

SEQ ID NO: 22170 - DNA, 25 bp, Saccharomyces pastorianus
acacggaccagccagtgaatggact

SEQ ID NO: 22171 - DNA, 25 bp, Saccharomyces pastorianus
accgttacatgggaggtggcctcaa

SEQ ID NO: 22172 - DNA, 25 bp, Saccharomyces pastorianus
tgtggaatgccacgtctacagccag

SEQ ID NO: 22173 - DNA, 25 bp, Saccharomyces pastorianus
ttaacacgggtgtggccaaggcctc

SEQ ID NO: 22174 - DNA, 25 bp, Saccharomyces pastorianus
ctctcatgctcaccaagacttttaa

SEQ ID NO: 22175 - DNA, 25 bp, Saccharomyces pastorianus
aagatagacctcttgcatggcccgc

SEQ ID NO: 22176 - DNA, 25 bp, Saccharomyces pastorianus
aactggatcgtgcagagcgccaacc

SEQ ID NO: 22177 - DNA, 25 bp, Saccharomyces pastorianus
attctcttcaaaggactacctgccg

SEQ ID NO: 22178 - DNA, 25 bp, Saccharomyces pastorianus
aaccagcgggtgtccagcgactttg

SEQ ID NO: 22179 - DNA, 25 bp, Saccharomyces pastorianus
gagaaagcgcagtccatgctgtcta

SEQ ID NO: 22180 - DNA, 25 bp, Saccharomyces pastorianus
aggcgttgtacctggtgtactgcca

SEQ ID NO: 22181 - DNA, 25 bp, Saccharomyces pastorianus
gcaggatccgatccaggctctggaa

SEQ ID NO: 22182 - DNA, 25 bp, Saccharomyces pastorianus
gtccatgctgtctaaggcgttgtac

SEQ ID NO: 22183 - DNA, 25 bp, Saccharomyces pastorianus
catccccgtgccgttgaacaaaaga

SEQ ID NO: 22184 - DNA, 25 bp, Saccharomyces pastorianus
gatgcactacaatgtcgtcacctac

SEQ ID NO: 22185 - DNA, 25 bp, Saccharomyces pastorianus
agagcaagaactccattccgctgtg

SEQ ID NO: 22186 - DNA, 25 bp, Saccharomyces pastorianus
atggccgtgttcttcttggtcagaa

SEQ ID NO: 22187 - DNA, 25 bp, Saccharomyces pastorianus
gatgagttgcctaaagtctccgccg

SEQ ID NO: 22188 - DNA, 25 bp, Saccharomyces pastorianus
acgcggactcgtacagctcaatggt

SEQ ID NO: 22189 - DNA, 25 bp, Saccharomyces pastorianus
gaccatgtgcatgcgtcatttcaag

SEQ ID NO: 22190 - DNA, 25 bp, Saccharomyces pastorianus
aaagttgatttcgacgtccacaccg

SEQ ID NO: 22191 - DNA, 25 bp, Saccharomyces pastorianus
accgtgtcgatgattcaggctgcca

SEQ ID NO: 22192 - DNA, 25 bp, Saccharomyces pastorianus
tgaactttctgaacgtcctgtggtt

SEQ ID NO: 22193 - DNA, 25 bp, Saccharomyces pastorianus
acgtacgtgtttctgttgtccttga

SEQ ID NO: 22194 - DNA, 25 bp, Saccharomyces pastorianus
gtaggctactttctttgggacctga

SEQ ID NO: 22195 - DNA, 25 bp, Saccharomyces pastorianus
atgtggatccactgtattcaagcta

SEQ ID NO: 22196 - DNA, 25 bp, Saccharomyces pastorianus
aaaaacctctctaccatgaatgtgg

SEQ ID NO: 22197 - DNA, 25 bp, Saccharomyces pastorianus
tttagccaattgcacactttcctta

SEQ ID NO: 22198 - DNA, 25 bp, Saccharomyces pastorianus
gacccggtcatcactaaggaatttc

SEQ ID NO: 22199 - DNA, 25 bp, Saccharomyces pastorianus
agggttacctttcaccagcaagaga

SEQ ID NO: 22200 - DNA, 25 bp, Saccharomyces pastorianus
actcttcattttacgacacctttgg

SEQ ID NO: 22201 - DNA, 25 bp, Saccharomyces pastorianus
actggtggtttcattgacccggtca

SEQ ID NO: 22202 - DNA, 25 bp, Saccharomyces pastorianus
cgagattacagctgttttggcccat

SEQ ID NO: 22203 - DNA, 25 bp, Saccharomyces pastorianus
attcaagctaccattattctcaccc

SEQ ID NO: 22204 - DNA, 25 bp, Saccharomyces pastorianus
gacacctttggctttttcacagaga

SEQ ID NO: 22205 - DNA, 25 bp, Saccharomyces pastorianus
ttcaccagcgtctacagaaactctt

SEQ ID NO: 22206 - DNA, 25 bp, Saccharomyces pastorianus
atacaacaacggcactttatccttt

SEQ ID NO: 22207 - DNA, 25 bp, Saccharomyces pastorianus
gatgtgttctgttctcaatgtaaaa

SEQ ID NO: 22208 - DNA, 25 bp, Saccharomyces pastorianus
tttgctagacaatgctactcctcat

SEQ ID NO: 22209 - DNA, 25 bp, Saccharomyces pastorianus
tttgtattgcatgcgctcagtgacc

SEQ ID NO: 22210 - DNA, 25 bp, Saccharomyces pastorianus
accatatgttcagtggcctttgtat

SEQ ID NO: 22211 - DNA, 25 bp, Saccharomyces pastorianus
tcagtgaccccgaatctttaagaac

SEQ ID NO: 22212 - DNA, 25 bp, Saccharomyces pastorianus
tatcctttaatgacgcctttgctag

SEQ ID NO: 22213 - DNA, 25 bp, Saccharomyces pastorianus
gtcaacccaaaaaccatgtgtcttt

SEQ ID NO: 22214 - DNA, 25 bp, Saccharomyces pastorianus
tgttttgtgcactcaggatttcttg

SEQ ID NO: 22215 - DNA, 25 bp, Saccharomyces pastorianus
acagatttttggctaccttatggat

SEQ ID NO: 22216 - DNA, 25 bp, Saccharomyces pastorianus
tgaccttcaattccggtccggaaga

SEQ ID NO: 22217 - DNA, 25 bp, Saccharomyces pastorianus
ttatgacgttgcctctaaggtccaa

SEQ ID NO: 22218 - DNA, 25 bp, Saccharomyces pastorianus
tcacgaccacgaagaagggttccgt

SEQ ID NO: 22219 - DNA, 25 bp, Saccharomyces pastorianus
aaccattcgccgtcgccgaggtctt

SEQ ID NO: 22220 - DNA, 25 bp, Saccharomyces pastorianus
gctgccgtcgttggtcaagaacatt

SEQ ID NO: 22221 - DNA, 25 bp, Saccharomyces pastorianus
ggccaccgatatgggtcttctacaa

SEQ ID NO: 22222 - DNA, 25 bp, Saccharomyces pastorianus
ttccgttacttctgtccaagccgtt

SEQ ID NO: 22223 - DNA, 25 bp, Saccharomyces pastorianus
gattaaaggataccgtcgcatcatt

SEQ ID NO: 22224 - DNA, 25 bp, Saccharomyces pastorianus
gaaactctacaaacctataaatcgt

SEQ ID NO: 22225 - DNA, 25 bp, Saccharomyces pastorianus
caagattattggatgctgccgtcgt

SEQ ID NO: 22226 - DNA, 25 bp, Saccharomyces pastorianus
gtcgcatcatttaaagccgttttgg

SEQ ID NO: 22227 - DNA, 25 bp, Saccharomyces pastorianus
ttgcctctaaggtccaagaaactct

SEQ ID NO: 22228 - DNA, 25 bp, Saccharomyces pastorianus
aaaggctcaatgtccaatcgtcgaa

SEQ ID NO: 22229 - DNA, 25 bp, Saccharomyces pastorianus
cgctggtcgttacgccaacaagaga

SEQ ID NO: 22230 - DNA, 25 bp, Saccharomyces pastorianus
gaagtccaacaagctcaaaccgaga

SEQ ID NO: 22231 - DNA, 25 bp, Saccharomyces pastorianus
gactacgtccaagttagacaaccaa

SEQ ID NO: 22232 - DNA, 25 bp, Saccharomyces pastorianus
tatttctttgttgaccatcggtgct

SEQ ID NO: 22233 - DNA, 25 bp, Saccharomyces pastorianus
ggatgcttctttggttgactacgtc

SEQ ID NO: 22234 - DNA, 25 bp, Saccharomyces pastorianus
tagagaggccgctttcagaaacatc

SEQ ID NO: 22235 - DNA, 25 bp, Saccharomyces pastorianus
agattgactaactccttgatgatga

SEQ ID NO: 22236 - DNA, 25 bp, Saccharomyces pastorianus
gttttggctactccaattccagaag

SEQ ID NO: 22237 - DNA, 25 bp, Saccharomyces pastorianus
gaattcaccccagtagttttggcta

SEQ ID NO: 22238 - DNA, 25 bp, Saccharomyces pastorianus
aatctttgttgctcacaccgctggt

SEQ ID NO: 22239 - DNA, 25 bp, Saccharomyces pastorianus
cttccgctaattcaacatctttcta

SEQ ID NO: 22240 - DNA, 25 bp, Saccharomyces pastorianus
aagtatcccaaactaatgcctcctc

SEQ ID NO: 22241 - DNA, 25 bp, Saccharomyces pastorianus
tgccattgccgctgagcctaaaaaa

SEQ ID NO: 22242 - DNA, 25 bp, Saccharomyces pastorianus
gtcagagcaatgttactcctgccat

SEQ ID NO: 22243 - DNA, 25 bp, Saccharomyces pastorianus
gtttccaacacttcgttcaatttgt

SEQ ID NO: 22244 - DNA, 25 bp, Saccharomyces pastorianus
acggatcgtcacaagtacccaaaga

SEQ ID NO: 22245 - DNA, 25 bp, Saccharomyces pastorianus
gattttgtcgactttttctccaacg

SEQ ID NO: 22246 - DNA, 25 bp, Saccharomyces pastorianus
agaccctttcagcttgttgttttca

SEQ ID NO: 22247 - DNA, 25 bp, Saccharomyces pastorianus
gttgttttcaacagccaaggcatcc

SEQ ID NO: 22248 - DNA, 25 bp, Saccharomyces pastorianus
gaagcacctattacccctaaagtat

SEQ ID NO: 22249 - DNA, 25 bp, Saccharomyces pastorianus
tgggtcaagggataccaccactcct

SEQ ID NO: 22250 - DNA, 25 bp, Saccharomyces pastorianus
atgggagacttcctcatgcacgagc

SEQ ID NO: 22251 - DNA, 25 bp, Saccharomyces pastorianus
taaaatgtgcttactgtccgcgacg

SEQ ID NO: 22252 - DNA, 25 bp, Saccharomyces pastorianus
gaagctgcgctatacatgggagact

SEQ ID NO: 22253 - DNA, 25 bp, Saccharomyces pastorianus
gaatgccttgccacaagccaatgta

SEQ ID NO: 22254 - DNA, 25 bp, Saccharomyces pastorianus
tcggacctggtggagacgcagctta

SEQ ID NO: 22255 - DNA, 25 bp, Saccharomyces pastorianus
aacctgctctttaaacctttgattg

SEQ ID NO: 22256 - DNA, 25 bp, Saccharomyces pastorianus
aacgttctcgagatcggtgccggaa

SEQ ID NO: 22257 - DNA, 25 bp, Saccharomyces pastorianus
agtacaccgtggtaacgagcaccga

SEQ ID NO: 22258 - DNA, 25 bp, Saccharomyces pastorianus
agagtttgcccgagagtgccataaa

SEQ ID NO: 22259 - DNA, 25 bp, Saccharomyces pastorianus
ctggtggtcgcagcagacgttacat

SEQ ID NO: 22260 - DNA, 25 bp, Saccharomyces pastorianus
taagtctcgttctcttgcggaagta

SEQ ID NO: 22261 - DNA, 25 bp, Saccharomyces pastorianus
ccaagatcttcagtggtgattcgaa

SEQ ID NO: 22262 - DNA, 25 bp, Saccharomyces pastorianus
tggtggcttgttttcattgactttt

SEQ ID NO: 22263 - DNA, 25 bp, Saccharomyces pastorianus
gtattgccctttgctgacattgttt

SEQ ID NO: 22264 - DNA, 25 bp, Saccharomyces pastorianus
atctcgtaagagtcagtgtaggctt

SEQ ID NO: 22265 - DNA, 25 bp, Saccharomyces pastorianus
tacgaactttacgttggcatgcccg

SEQ ID NO: 22266 - DNA, 25 bp, Saccharomyces pastorianus
gccattatagcacattaccaggaat

SEQ ID NO: 22267 - DNA, 25 bp, Saccharomyces pastorianus
gcatgcccgtatgccattatagcac

SEQ ID NO: 22268 - DNA, 25 bp, Saccharomyces pastorianus
ggatccttagtgctgaaccctaggg

SEQ ID NO: 22269 - DNA, 25 bp, Saccharomyces pastorianus
ctggaactatgtaaaggaccgtctt

SEQ ID NO: 22270 - DNA, 25 bp, Saccharomyces pastorianus
gacattgtttgtagttctttgacca

SEQ ID NO: 22271 - DNA, 25 bp, Saccharomyces pastorianus
gaaggtattgctaccacaagtggga

SEQ ID NO: 22272 - DNA, 25 bp, Saccharomyces pastorianus
gtagcgattactccatgttgaactt

SEQ ID NO: 22273 - DNA, 25 bp, Saccharomyces pastorianus
aagacttccagcagcgttgagacaa

SEQ ID NO: 22274 - DNA, 25 bp, Saccharomyces pastorianus
gagtccatcataggcctacaacatg

SEQ ID NO: 22275 - DNA, 25 bp, Saccharomyces pastorianus
acagagcctttaatcacgttacagt

SEQ ID NO: 22276 - DNA, 25 bp, Saccharomyces pastorianus
tcggtccttgcgcttttgaaaatta

SEQ ID NO: 22277 - DNA, 25 bp, Saccharomyces pastorianus
gaagcattccttgacgttggtgatg

SEQ ID NO: 22278 - DNA, 25 bp, Saccharomyces pastorianus
gactccttggattttgtagacggct

SEQ ID NO: 22279 - DNA, 25 bp, Saccharomyces pastorianus
gacccttgtgactcagttagcttca

SEQ ID NO: 22280 - DNA, 25 bp, Saccharomyces pastorianus
ggattacaggctacattccgaatta

SEQ ID NO: 22281 - DNA, 25 bp, Saccharomyces pastorianus
aattttcatcatcaggtttcggagg

SEQ ID NO: 22282 - DNA, 25 bp, Saccharomyces pastorianus
gaagaggacccattgacaggatcaa

SEQ ID NO: 22283 - DNA, 25 bp, Saccharomyces pastorianus
agttgacgacactcgaactactctt

SEQ ID NO: 22284 - DNA, 25 bp, Saccharomyces pastorianus
gatccaagctatcggtttatctttg

SEQ ID NO: 22285 - DNA, 25 bp, Saccharomyces pastorianus
gaggatacggttttttctatatttg

SEQ ID NO: 22286 - DNA, 25 bp, Saccharomyces pastorianus
gtggtggtatgattcctgcgagaat

SEQ ID NO: 22287 - DNA, 25 bp, Saccharomyces pastorianus
aggataagcccaagaaagccgactt

SEQ ID NO: 22288 - DNA, 25 bp, Saccharomyces pastorianus
tcattacgctttgtcagaactggaa

SEQ ID NO: 22289 - DNA, 25 bp, Saccharomyces pastorianus
aaagccgacttacctgactctatga

SEQ ID NO: 22290 - DNA, 25 bp, Saccharomyces pastorianus
atgtggttatgttatccttgggatg

SEQ ID NO: 22291 - DNA, 25 bp, Saccharomyces pastorianus
gactctatgattaattctgggcgtt

SEQ ID NO: 22292 - DNA, 25 bp, Saccharomyces pastorianus
ctgggcgttatattgccgcgcaaac

SEQ ID NO: 22293 - DNA, 25 bp, Saccharomyces pastorianus
tcaacatttcgattccctgattggt

SEQ ID NO: 22294 - DNA, 25 bp, Saccharomyces pastorianus
tagagacctctttacaattgttggg

SEQ ID NO: 22295 - DNA, 25 bp, Saccharomyces pastorianus
gcgagcgctcaattatcgaattcta

SEQ ID NO: 22296 - DNA, 25 bp, Saccharomyces pastorianus
gaagcagctgatttgcaagcaatcc

SEQ ID NO: 22297 - DNA, 25 bp, Saccharomyces pastorianus
ttgcctcaagaaaactccatgctgt

SEQ ID NO: 22298 - DNA, 25 bp, Saccharomyces pastorianus
aacgacgagatattgaggctacttg

SEQ ID NO: 22299 - DNA, 25 bp, Saccharomyces pastorianus
gaagacgattcatctataaaaccca

SEQ ID NO: 22300 - DNA, 25 bp, Saccharomyces pastorianus
ggccgcacgacaccctaggtagtga

SEQ ID NO: 22301 - DNA, 25 bp, Saccharomyces pastorianus
agcatcgacgatatcccagaggaag

SEQ ID NO: 22302 - DNA, 25 bp, Saccharomyces pastorianus
ataccgtacagaagagcgagcgctc

SEQ ID NO: 22303 - DNA, 25 bp, Saccharomyces pastorianus
ggagaactatcaacctcaaaggaat

SEQ ID NO: 22304 - DNA, 25 bp, Saccharomyces pastorianus
aacccataggagatgggccgcacga

SEQ ID NO: 22305 - DNA, 25 bp, Saccharomyces pastorianus
gagctttctagcaccgaatatggac

SEQ ID NO: 22306 - DNA, 25 bp, Saccharomyces pastorianus
tatacaggcttttactcagggcaaa

SEQ ID NO: 22307 - DNA, 25 bp, Saccharomyces pastorianus
aagacttcgtggtgagctttctagc

SEQ ID NO: 22308 - DNA, 25 bp, Saccharomyces pastorianus
gacccaggaatcttcgcagagttac

SEQ ID NO: 22309 - DNA, 25 bp, Saccharomyces pastorianus
gagctgctggtattactacggcatc

SEQ ID NO: 22310 - DNA, 25 bp, Saccharomyces pastorianus
gggaaacctactgacccaggaatct

SEQ ID NO: 22311 - DNA, 25 bp, Saccharomyces pastorianus
gaatttcttgtcatcgaggatccaa

SEQ ID NO: 22312 - DNA, 25 bp, Saccharomyces pastorianus
aaagccctaccaactcagatgttaa

SEQ ID NO: 22313 - DNA, 25 bp, Saccharomyces pastorianus
gatttttcatccaagactatgccaa

SEQ ID NO: 22314 - DNA, 25 bp, Saccharomyces pastorianus
aatcggcttcagcttggtgtcgaat

SEQ ID NO: 22315 - DNA, 25 bp, Saccharomyces pastorianus
agagagagcagacccaatcggcttc

SEQ ID NO: 22316 - DNA, 25 bp, Saccharomyces pastorianus
gaaattgccactttcctagagggtg

SEQ ID NO: 22317 - DNA, 25 bp, Saccharomyces pastorianus
taagaaatgcgttggctctgtcaat

SEQ ID NO: 22318 - DNA, 25 bp, Saccharomyces pastorianus
caattcactaatacctgttttaaga

SEQ ID NO: 22319 - DNA, 25 bp, Saccharomyces pastorianus
ggcttctcttgatgatacctctaaa

SEQ ID NO: 22320 - DNA, 25 bp, Saccharomyces pastorianus
gcaaaaagttcaaatgtccatccat

SEQ ID NO: 22321 - DNA, 25 bp, Saccharomyces pastorianus
tgtccatccatcaattcactaatac

SEQ ID NO: 22322 - DNA, 25 bp, Saccharomyces pastorianus
atcaacatccgatttggcttctctt

SEQ ID NO: 22323 - DNA, 25 bp, Saccharomyces pastorianus
acagtgtctggctaactgtgtgaac

SEQ ID NO: 22324 - DNA, 25 bp, Saccharomyces pastorianus
gttggctctgtcaataatccagatt

SEQ ID NO: 22325 - DNA, 25 bp, Saccharomyces pastorianus
gccactttcctagagggtgagaact

SEQ ID NO: 22326 - DNA, 25 bp, Saccharomyces pastorianus
ctgtgtgaacaggtttttagatacc

SEQ ID NO: 22327 - DNA, 25 bp, Saccharomyces pastorianus
ttcagtgggttaagattatcctcat

SEQ ID NO: 22328 - DNA, 25 bp, Saccharomyces pastorianus
gagcaggcatcatcaaaccaactac

SEQ ID NO: 22329 - DNA, 25 bp, Saccharomyces pastorianus
tagcccttattggtaaggccccaca

SEQ ID NO: 22330 - DNA, 25 bp, Saccharomyces pastorianus
atacgggttacgtcacgattctatt

SEQ ID NO: 22331 - DNA, 25 bp, Saccharomyces pastorianus
gcttggtggtggttatcttggtcaa

SEQ ID NO: 22332 - DNA, 25 bp, Saccharomyces pastorianus
ccatggttaggtgaattagccctta

SEQ ID NO: 22333 - DNA, 25 bp, Saccharomyces pastorianus
gaatctgaacgttttcttcctgata

SEQ ID NO: 22334 - DNA, 25 bp, Saccharomyces pastorianus
gatgactggttgtccaaacggttgt

SEQ ID NO: 22335 - DNA, 25 bp, Saccharomyces pastorianus
accaattctggtcacttcaggttga

SEQ ID NO: 22336 - DNA, 25 bp, Saccharomyces pastorianus
ggaaagttgctgagtacatgcttaa

SEQ ID NO: 22337 - DNA, 25 bp, Saccharomyces pastorianus
caacctgtggtttagcatttgctga

SEQ ID NO: 22338 - DNA, 25 bp, Saccharomyces pastorianus
acagggcatccaagtttctacaaag

SEQ ID NO: 22339 - DNA, 25 bp, Saccharomyces pastorianus
gttaatccattccactcttttgttg

SEQ ID NO: 22340 - DNA, 25 bp, Saccharomyces pastorianus
ggaaaatccattcttcctcaagctc

SEQ ID NO: 22341 - DNA, 25 bp, Saccharomyces pastorianus
ctggcgcttacgttgcagaactacg

SEQ ID NO: 22342 - DNA, 25 bp, Saccharomyces pastorianus
tacaatcccatctgttaatccattc

SEQ ID NO: 22343 - DNA, 25 bp, Saccharomyces pastorianus
atatccatcatactggcgcttacgt

SEQ ID NO: 22344 - DNA, 25 bp, Saccharomyces pastorianus
ttatcttctgaaggcatctggattt

SEQ ID NO: 22345 - DNA, 25 bp, Saccharomyces pastorianus
ctcaagctctgcactagatgctcaa

SEQ ID NO: 22346 - DNA, 25 bp, Saccharomyces pastorianus
gagaaaatggttgcctctttttagc

SEQ ID NO: 22347 - DNA, 25 bp, Saccharomyces pastorianus
accgcagttcaagtacgttcaatat

SEQ ID NO: 22348 - DNA, 25 bp, Saccharomyces pastorianus
aactacgacccctaaattgattgat

SEQ ID NO: 22349 - DNA, 25 bp, Saccharomyces pastorianus
agttgatgtcgccaccaaatctgtc

SEQ ID NO: 22350 - DNA, 25 bp, Saccharomyces pastorianus
aggttacaccgaaccagatccaaga

SEQ ID NO: 22351 - DNA, 25 bp, Saccharomyces pastorianus
gcgttacactaatccagtcgtcatt

SEQ ID NO: 22352 - DNA, 25 bp, Saccharomyces pastorianus
aacgaattctccactagcgaagcta

SEQ ID NO: 22353 - DNA, 25 bp, Saccharomyces pastorianus
attgtcggtagaatatctggcgtcg

SEQ ID NO: 22354 - DNA, 25 bp, Saccharomyces pastorianus
tctggcgtcgaagttgaatccccaa

SEQ ID NO: 22355 - DNA, 25 bp, Saccharomyces pastorianus
gattctgttaaatctgtcgacgaat

SEQ ID NO: 22356 - DNA, 25 bp, Saccharomyces pastorianus
gaagccgcagctgaagacaaagtat

SEQ ID NO: 22357 - DNA, 25 bp, Saccharomyces pastorianus
caggtgctgctgtcactgctgctgg

SEQ ID NO: 22358 - DNA, 25 bp, Saccharomyces pastorianus
acttctttcccagttcaatctttga

SEQ ID NO: 22359 - DNA, 25 bp, Saccharomyces pastorianus
atacgattactctcatccatttgca

SEQ ID NO: 22360 - DNA, 25 bp, Saccharomyces pastorianus
aataccatcatctgcgggttctatt

SEQ ID NO: 22361 - DNA, 25 bp, Saccharomyces pastorianus
tattgcatccaaaggcactccagat

SEQ ID NO: 22362 - DNA, 25 bp, Saccharomyces pastorianus
acctccaagtcgagtgccgtgaaga

SEQ ID NO: 22363 - DNA, 25 bp, Saccharomyces pastorianus
gactaaaactcgcattccaactgaa

SEQ ID NO: 22364 - DNA, 25 bp, Saccharomyces pastorianus
tgaacttttagaacgcgccattagc

SEQ ID NO: 22365 - DNA, 25 bp, Saccharomyces pastorianus
agttatgtagagcagatcctcccca

SEQ ID NO: 22366 - DNA, 25 bp, Saccharomyces pastorianus
atttggacttgctttttgccatgaa

SEQ ID NO: 22367 - DNA, 25 bp, Saccharomyces pastorianus
cttcgacagtgtttgcctgggtatt

SEQ ID NO: 22368 - DNA, 25 bp, Saccharomyces pastorianus
gcatagcggaattgccttcgacagt

SEQ ID NO: 22369 - DNA, 25 bp, Saccharomyces pastorianus
tattcgaccagagcaagcatccgga

SEQ ID NO: 22370 - DNA, 25 bp, Saccharomyces pastorianus
gacttcaatactactggccttgtta

SEQ ID NO: 22371 - DNA, 25 bp, Saccharomyces pastorianus
agacatggctatattacaccggaaa

SEQ ID NO: 22372 - DNA, 25 bp, Saccharomyces pastorianus
aaacatggccattaatgctcgacaa

SEQ ID NO: 22373 - DNA, 25 bp, Saccharomyces pastorianus
gttgtttcttacctctactttacag

SEQ ID NO: 22374 - DNA, 25 bp, Saccharomyces pastorianus
gagcgtcgaggaagccaacttgcaa

SEQ ID NO: 22375 - DNA, 25 bp, Saccharomyces pastorianus
agtttcaacctattcagcttacaag

SEQ ID NO: 22376 - DNA, 25 bp, Saccharomyces pastorianus
gcccaattgcgctttagtaacggta

SEQ ID NO: 22377 - DNA, 25 bp, Saccharomyces pastorianus
gacatttctgtgacggcattcgaca

SEQ ID NO: 22378 - DNA, 25 bp, Saccharomyces pastorianus
ggcgggtgtacttggtataaccaca

SEQ ID NO: 22379 - DNA, 25 bp, Saccharomyces pastorianus
aggagattcggttctggatcccaag

SEQ ID NO: 22380 - DNA, 25 bp, Saccharomyces pastorianus
agccagtatcaaggctgccggtgtt

SEQ ID NO: 22381 - DNA, 25 bp, Saccharomyces pastorianus
tagaaagccatacgtccttatcgaa

SEQ ID NO: 22382 - DNA, 25 bp, Saccharomyces pastorianus
ttccaggttgtttcattggccgttt

SEQ ID NO: 22383 - DNA, 25 bp, Saccharomyces pastorianus
cagtgtttttggtgtgtgcctccac

SEQ ID NO: 22384 - DNA, 25 bp, Saccharomyces pastorianus
gacatcgcggttactatgctttaaa

SEQ ID NO: 22385 - DNA, 25 bp, Saccharomyces pastorianus
tatttcccgttctttttgatggctc

SEQ ID NO: 22386 - DNA, 25 bp, Saccharomyces pastorianus
gatggctcgtcaaaagtttctgcat

SEQ ID NO: 22387 - DNA, 25 bp, Saccharomyces pastorianus
tcttcatttcctggtgttgtcacta

SEQ ID NO: 22388 - DNA, 25 bp, Saccharomyces pastorianus
atcgtggccgatttgcttacaagac

SEQ ID NO: 22389 - DNA, 25 bp, Saccharomyces pastorianus
gatgaagatgttccaggtacacctt

SEQ ID NO: 22390 - DNA, 25 bp, Saccharomyces pastorianus
gctttgtctactttgcaccattggt

SEQ ID NO: 22391 - DNA, 25 bp, Saccharomyces pastorianus
gtcagcttatctccatcagaagtcg

SEQ ID NO: 22392 - DNA, 25 bp, Saccharomyces pastorianus
ataaactgtcgtcggagcatccatt

SEQ ID NO: 22393 - DNA, 25 bp, Saccharomyces pastorianus
gctactgcaccataggcgaagtttc

SEQ ID NO: 22394 - DNA, 25 bp, Saccharomyces pastorianus
gcgatcgtttctcccatcaaagaaa

SEQ ID NO: 22395 - DNA, 25 bp, Saccharomyces pastorianus
ttttggttctggtacagccgcgatc

SEQ ID NO: 22396 - DNA, 25 bp, Saccharomyces pastorianus
ccattggacggcaccattctggaag

SEQ ID NO: 22397 - DNA, 25 bp, Saccharomyces pastorianus
aatcggctggaagggcgaacctatc

SEQ ID NO: 22398 - DNA, 25 bp, Saccharomyces pastorianus
gcaggccgcctcaagaggttaccaa

SEQ ID NO: 22399 - DNA, 25 bp, Saccharomyces pastorianus
gagagattccatattaaccctcgcc

SEQ ID NO: 22400 - DNA, 25 bp, Saccharomyces pastorianus
gcgagcaaacgggaccattgaccaa

SEQ ID NO: 22401 - DNA, 25 bp, Saccharomyces pastorianus
agaacttgtggttgtttggcccaga

SEQ ID NO: 22402 - DNA, 25 bp, Saccharomyces pastorianus
gtaggcaccatgaacgcattctttg

SEQ ID NO: 22403 - DNA, 25 bp, Saccharomyces pastorianus
aattgggcgccaactatgctccttg

SEQ ID NO: 22404 - DNA, 25 bp, Saccharomyces pastorianus
aatttcagaagtttccacggccgca

SEQ ID NO: 22405 - DNA, 25 bp, Saccharomyces pastorianus
aggctactacgagcactaacgtcaa

SEQ ID NO: 22406 - DNA, 25 bp, Saccharomyces pastorianus
gtttgttccactgtgattgcaccaa

SEQ ID NO: 22407 - DNA, 25 bp, Saccharomyces pastorianus
ctaaggctgctatgaccaccgacgt

SEQ ID NO: 22408 - DNA, 25 bp, Saccharomyces pastorianus
actactataactagctgcgcaggtg

SEQ ID NO: 22409 - DNA, 25 bp, Saccharomyces pastorianus
atgccttccgcaattgaaactacca

SEQ ID NO: 22410 - DNA, 25 bp, Saccharomyces pastorianus
atctgcttcccatgctattgatatc

SEQ ID NO: 22411 - DNA, 25 bp, Saccharomyces pastorianus
accgacgtcactgttactagttgca

SEQ ID NO: 22412 - DNA, 25 bp, Saccharomyces pastorianus
aaactaccataaccagctgttcggc

SEQ ID NO: 22413 - DNA, 25 bp, Saccharomyces pastorianus
gctccaatcactactgtcagtatcg

SEQ ID NO: 22414 - DNA, 25 bp, Saccharomyces pastorianus
gggctggcacatcgaccaagacaga

SEQ ID NO: 22415 - DNA, 25 bp, Saccharomyces pastorianus
attaatgggactgcctactggtgct

SEQ ID NO: 22416 - DNA, 25 bp, Saccharomyces pastorianus
tgctatgccgttatgatcgtgcttt

SEQ ID NO: 22417 - DNA, 25 bp, Saccharomyces pastorianus
gtgtcctttccaatattagtgctaa

SEQ ID NO: 22418 - DNA, 25 bp, Saccharomyces pastorianus
tagctgctgaaagaggttaccccga

SEQ ID NO: 22419 - DNA, 25 bp, Saccharomyces pastorianus
tgttgaactagttgggtgcccgctt

SEQ ID NO: 22420 - DNA, 25 bp, Saccharomyces pastorianus
ctggctggtgcctacttatggtata

SEQ ID NO: 22421 - DNA, 25 bp, Saccharomyces pastorianus
gtattctggccgtatacgcagctaa

SEQ ID NO: 22422 - DNA, 25 bp, Saccharomyces pastorianus
atatctcccctgtttcgtttatttg

SEQ ID NO: 22423 - DNA, 25 bp, Saccharomyces pastorianus
tagtgctaactcttcaggctacagt

SEQ ID NO: 22424 - DNA, 25 bp, Saccharomyces pastorianus
caaggttgccatggtcgtttgctat

SEQ ID NO: 22425 - DNA, 25 bp, Saccharomyces pastorianus
aatttggctgcatatgctgctgcca

SEQ ID NO: 22426 - DNA, 25 bp, Saccharomyces pastorianus
gtagctctactaatgttttgattca

SEQ ID NO: 22427 - DNA, 25 bp, Saccharomyces pastorianus
aacggtcactggtggagttcctatt

SEQ ID NO: 22428 - DNA, 25 bp, Saccharomyces pastorianus
ccggtacaaccatcaaattcctcaa

SEQ ID NO: 22429 - DNA, 25 bp, Saccharomyces pastorianus
ttcagggatgtaccgtctataacca

SEQ ID NO: 22430 - DNA, 25 bp, Saccharomyces pastorianus
atgcgtttgacgtgggtagctctac

SEQ ID NO: 22431 - DNA, 25 bp, Saccharomyces pastorianus
agattttggttgagaatgcttccga

SEQ ID NO: 22432 - DNA, 25 bp, Saccharomyces pastorianus
ggtgattctgcaggtggccataaca

SEQ ID NO: 22433 - DNA, 25 bp, Saccharomyces pastorianus
gtggccgttcagataatgtcgtcaa

SEQ ID NO: 22434 - DNA, 25 bp, Saccharomyces pastorianus
gacgactgtattgccgtaaattccg

SEQ ID NO: 22435 - DNA, 25 bp, Saccharomyces pastorianus
gtctgggaattcaatcaccggtggt

SEQ ID NO: 22436 - DNA, 25 bp, Saccharomyces pastorianus
gaaggtgcaacaggctcagttaaaa

SEQ ID NO: 22437 - DNA, 25 bp, Saccharomyces pastorianus
gggtgcaacaggttcagtttcgaat

SEQ ID NO: 22438 - DNA, 25 bp, Saccharomyces pastorianus
atgttgtcaacggtttctgggccca

SEQ ID NO: 22439 - DNA, 25 bp, Saccharomyces pastorianus
gggcagttccaccaatgttgtaatc

SEQ ID NO: 22440 - DNA, 25 bp, Saccharomyces pastorianus
aacggtcacggtatctctataggct

SEQ ID NO: 22441 - DNA, 25 bp, Saccharomyces pastorianus
tggccacaacacagacgcgtttgat

SEQ ID NO: 22442 - DNA, 25 bp, Saccharomyces pastorianus
atcagtggtgtaaccgttgacgtca

SEQ ID NO: 22443 - DNA, 25 bp, Saccharomyces pastorianus
tcaaagctggtgactccgccggtgg

SEQ ID NO: 22444 - DNA, 25 bp, Saccharomyces pastorianus
gacgcgtttgatgtgggcagttcca

SEQ ID NO: 22445 - DNA, 25 bp, Saccharomyces pastorianus
ggtggccgttccgacaatgttgtca

SEQ ID NO: 22446 - DNA, 25 bp, Saccharomyces pastorianus
gtaaaaccactggttctgccactgg

SEQ ID NO: 22447 - DNA, 25 bp, Saccharomyces pastorianus
gactgtatcgccgtaaactctggta

SEQ ID NO: 22448 - DNA, 25 bp, Saccharomyces pastorianus
tgtcaactctatcaacagtgtaggt

SEQ ID NO: 22449 - DNA, 25 bp, Saccharomyces pastorianus
taggtattaaattgcctccttattt

SEQ ID NO: 22450 - DNA, 25 bp, Saccharomyces pastorianus
tcctggtaaaccacaagtcgcttat

SEQ ID NO: 22451 - DNA, 25 bp, Saccharomyces pastorianus
acagagctaaacttgtcatgtccaa

SEQ ID NO: 22452 - DNA, 25 bp, Saccharomyces pastorianus
gtcgcttatgattttgacttaacta

SEQ ID NO: 22453 - DNA, 25 bp, Saccharomyces pastorianus
gtcatgtccaaatgttcctggtaaa

SEQ ID NO: 22454 - DNA, 25 bp, Saccharomyces pastorianus
aaatgagttcccattagcctatgtc

SEQ ID NO: 22455 - DNA, 25 bp, Saccharomyces pastorianus
acttgctaatgttcgtgcgttttac

SEQ ID NO: 22456 - DNA, 25 bp, Saccharomyces pastorianus
ggtaatggtctctttatcgatgtag

SEQ ID NO: 22457 - DNA, 25 bp, Saccharomyces pastorianus
aagccaaccgcacttgctaatgttc

SEQ ID NO: 22458 - DNA, 25 bp, Saccharomyces pastorianus
ggtgaatacgtcaagccaaccgcac

SEQ ID NO: 22459 - DNA, 25 bp, Saccharomyces pastorianus
ccaggctgggatttgggtcttccga

SEQ ID NO: 22460 - DNA, 25 bp, Saccharomyces pastorianus
ggaagactcagtagaccacaaggta

SEQ ID NO: 22461 - DNA, 25 bp, Saccharomyces pastorianus
gtcttccgatccagcggtaaggtca

SEQ ID NO: 22462 - DNA, 25 bp, Saccharomyces pastorianus
ggtcaggagacagcttttatccaca

SEQ ID NO: 22463 - DNA, 25 bp, Saccharomyces pastorianus
ggtgccccagtattttcgaagattt

SEQ ID NO: 22464 - DNA, 25 bp, Saccharomyces pastorianus
gtaacacacctacttctgttgaagc

SEQ ID NO: 22465 - DNA, 25 bp, Saccharomyces pastorianus
gccaaaagcctagcagagtctctaa

SEQ ID NO: 22466 - DNA, 25 bp, Saccharomyces pastorianus
gacgtttccgattacactcttgatg

SEQ ID NO: 22467 - DNA, 25 bp, Saccharomyces pastorianus
gatcgggtagccattactgccaaaa

SEQ ID NO: 22468 - DNA, 25 bp, Saccharomyces pastorianus
agacagccggtccaagaacgtagta

SEQ ID NO: 22469 - DNA, 25 bp, Saccharomyces pastorianus
aggaagagccacctttgcccaagag

SEQ ID NO: 22470 - DNA, 25 bp, Saccharomyces pastorianus
gttgccgtagccacattaattttca

SEQ ID NO: 22471 - DNA, 25 bp, Saccharomyces pastorianus
gaacttttgccaattatagccgacg

SEQ ID NO: 22472 - DNA, 25 bp, Saccharomyces pastorianus
gaagccgcatatagactttccatgg

SEQ ID NO: 22473 - DNA, 25 bp, Saccharomyces pastorianus
ttatctactgtcgagcctacgttaa

SEQ ID NO: 22474 - DNA, 25 bp, Saccharomyces pastorianus
tagccatgctaactgtgcgtatctt

SEQ ID NO: 22475 - DNA, 25 bp, Saccharomyces pastorianus
tagccgacgctatgaacaccaagta

SEQ ID NO: 22476 - DNA, 25 bp, Saccharomyces pastorianus
gagctgttgctatcgtttgccaata

SEQ ID NO: 22477 - DNA, 25 bp, Saccharomyces pastorianus
gataccgaattctctcaagcatctg

SEQ ID NO: 22478 - DNA, 25 bp, Saccharomyces pastorianus
agagagaactctgacctggaacttt

SEQ ID NO: 22479 - DNA, 25 bp, Saccharomyces pastorianus
taaaacccctgcgtacgacatagtg

SEQ ID NO: 22480 - DNA, 25 bp, Saccharomyces pastorianus
gtggtgcgctacatgacatcgatga

SEQ ID NO: 22481 - DNA, 25 bp, Saccharomyces pastorianus
tccattactatcctcctatcaaaat

SEQ ID NO: 22482 - DNA, 25 bp, Saccharomyces pastorianus
atgtggcttctatcaagtcaccgtt

SEQ ID NO: 22483 - DNA, 25 bp, Saccharomyces pastorianus
gaattcggcgtcacgttattaccaa

SEQ ID NO: 22484 - DNA, 25 bp, Saccharomyces pastorianus
ggtaccggtgccttgaagactgatt

SEQ ID NO: 22485 - DNA, 25 bp, Saccharomyces pastorianus
tttgcgcagcaataaccgttttagg

SEQ ID NO: 22486 - DNA, 25 bp, Saccharomyces pastorianus
tgggttcttagtcgttcaccaaaca

SEQ ID NO: 22487 - DNA, 25 bp, Saccharomyces pastorianus
ggcgctgtcaaccaagtttttgttc

SEQ ID NO: 22488 - DNA, 25 bp, Saccharomyces pastorianus
gatgcagtcagtgtcgcttactcag

SEQ ID NO: 22489 - DNA, 25 bp, Saccharomyces pastorianus
gccacgattttcttccctaaggata

SEQ ID NO: 22490 - DNA, 25 bp, Saccharomyces pastorianus
tcattcctgctgagaccacgtggga

SEQ ID NO: 22491 - DNA, 25 bp, Saccharomyces pastorianus
aatatgttgtatttcgcgggtgccg

SEQ ID NO: 22492 - DNA, 25 bp, Saccharomyces pastorianus
ggacatggaacctcttgttgaagta

SEQ ID NO: 22493 - DNA, 25 bp, Saccharomyces pastorianus
aggacactcttttgatcgcactttc

SEQ ID NO: 22494 - DNA, 25 bp, Saccharomyces pastorianus
gaatcctagatttgaagttctcccc

SEQ ID NO: 22495 - DNA, 25 bp, Saccharomyces pastorianus
acgggtcgctacaggatttggccaa

SEQ ID NO: 22496 - DNA, 25 bp, Saccharomyces pastorianus
ggaatctactccaaaggacactctt

SEQ ID NO: 22497 - DNA, 25 bp, Saccharomyces pastorianus
tccgtactgactgaacctcactggt

SEQ ID NO: 22498 - DNA, 25 bp, Saccharomyces pastorianus
aagggtcctatttgcctaaaggctg

SEQ ID NO: 22499 - DNA, 25 bp, Saccharomyces pastorianus
tgtcgccgctgaacaggctttgaaa

SEQ ID NO: 22500 - DNA, 25 bp, Saccharomyces pastorianus
ggacaccgttcttctcatagttaag

SEQ ID NO: 22501 - DNA, 25 bp, Saccharomyces pastorianus
ggagaggccttgtgtcctaagaaaa

SEQ ID NO: 22502 - DNA, 25 bp, Saccharomyces pastorianus
tgcttctccatcaaagggtcctatt

SEQ ID NO: 22503 - DNA, 25 bp, Saccharomyces pastorianus
aaggatgtccccacacatgtatcta

SEQ ID NO: 22504 - DNA, 25 bp, Saccharomyces pastorianus
aaattcattgcaggccgtatcattc

SEQ ID NO: 22505 - DNA, 25 bp, Saccharomyces pastorianus
gttttgttaatctagctttaccatt

SEQ ID NO: 22506 - DNA, 25 bp, Saccharomyces pastorianus
ataaccgcatgttccaactgtagag

SEQ ID NO: 22507 - DNA, 25 bp, Saccharomyces pastorianus
tatgcttcctttttccctcaaaaga

SEQ ID NO: 22508 - DNA, 25 bp, Saccharomyces pastorianus
tggtcaccggtctggtcaatttaga

SEQ ID NO: 22509 - DNA, 25 bp, Saccharomyces pastorianus
tatcattcctgccattgcaacgaca

SEQ ID NO: 22510 - DNA, 25 bp, Saccharomyces pastorianus
aatctatccatctctcagttggtca

SEQ ID NO: 22511 - DNA, 25 bp, Saccharomyces pastorianus
atgctttcatatggtgtttctctgc

SEQ ID NO: 22512 - DNA, 25 bp, Saccharomyces pastorianus
caacgacaacttctttggtcaccgg

SEQ ID NO: 22513 - DNA, 25 bp, Saccharomyces pastorianus
gtgtttctctgctttatgcttcctt

SEQ ID NO: 22514 - DNA, 25 bp, Saccharomyces pastorianus
ttattctgcccctcttgagcaagta

SEQ ID NO: 22515 - DNA, 25 bp, Saccharomyces pastorianus
taagcgagtttgttaggccgatatc

SEQ ID NO: 22516 - DNA, 25 bp, Saccharomyces pastorianus
tgtgcgcccgcacgagatatattcg

SEQ ID NO: 22517 - DNA, 25 bp, Saccharomyces pastorianus
gatcttttgtcgacacttcgtctta

SEQ ID NO: 22518 - DNA, 25 bp, Saccharomyces pastorianus
gacaagatacccgttgaccagcaga

SEQ ID NO: 22519 - DNA, 25 bp, Saccharomyces pastorianus
aaaggcctcaaactttccgcagcat

SEQ ID NO: 22520 - DNA, 25 bp, Saccharomyces pastorianus
ggttcacgccaacgagtttccaaga

SEQ ID NO: 22521 - DNA, 25 bp, Saccharomyces pastorianus
gtagcgccttagagttatttcacaa

SEQ ID NO: 22522 - DNA, 25 bp, Saccharomyces pastorianus
gtttctgcaatggatcacttcccaa

SEQ ID NO: 22523 - DNA, 25 bp, Saccharomyces pastorianus
tcaacaattggttacggttcacgcc

SEQ ID NO: 22524 - DNA, 25 bp, Saccharomyces pastorianus
tatgcatctgggactctttgagtgc

SEQ ID NO: 22525 - DNA, 25 bp, Saccharomyces pastorianus
cttcatcatgaaatgcgttccgata

SEQ ID NO: 22526 - DNA, 25 bp, Saccharomyces pastorianus
gagaactgttcctcgttaacaacaa

SEQ ID NO: 22527 - DNA, 25 bp, Saccharomyces pastorianus
aatatacctcccacaaatacagcta

SEQ ID NO: 22528 - DNA, 25 bp, Saccharomyces pastorianus
gtcattcaccaataattccgtcaca

SEQ ID NO: 22529 - DNA, 25 bp, Saccharomyces pastorianus
gaacgatttggtcacttacacgcca

SEQ ID NO: 22530 - DNA, 25 bp, Saccharomyces pastorianus
gaatgcgtgaaatacttgacccaaa

SEQ ID NO: 22531 - DNA, 25 bp, Saccharomyces pastorianus
aattttgcctgtcatattgaacgat

SEQ ID NO: 22532 - DNA, 25 bp, Saccharomyces pastorianus
gagcaacttcatcaaacgtttcgga

SEQ ID NO: 22533 - DNA, 25 bp, Saccharomyces pastorianus
aacgatggcatctgacctggcaaga

SEQ ID NO: 22534 - DNA, 25 bp, Saccharomyces pastorianus
tttcggaaacgggtcatgcttggat

SEQ ID NO: 22535 - DNA, 25 bp, Saccharomyces pastorianus
agtggttaccgattcctatagagat

SEQ ID NO: 22536 - DNA, 25 bp, Saccharomyces pastorianus
gaaactggtattcaattgcccgtaa

SEQ ID NO: 22537 - DNA, 25 bp, Saccharomyces pastorianus
agctacctccgtggaaaacctatgc

SEQ ID NO: 22538 - DNA, 25 bp, Saccharomyces pastorianus
ggaagtttccgtatcacctgtgaaa

SEQ ID NO: 22539 - DNA, 25 bp, Saccharomyces pastorianus
aggactgggtgatcgacatcctagt

SEQ ID NO: 22540 - DNA, 25 bp, Saccharomyces pastorianus
ttcaacaagctacctccgtggaaaa

SEQ ID NO: 22541 - DNA, 25 bp, Saccharomyces pastorianus
tgaaaaggtgccgtttaggttgact

SEQ ID NO: 22542 - DNA, 25 bp, Saccharomyces pastorianus
cagcgatttggatgtgccggagcaa

SEQ ID NO: 22543 - DNA, 25 bp, Saccharomyces pastorianus
ggttgactaggatgctaacttatgc

SEQ ID NO: 22544 - DNA, 25 bp, Saccharomyces pastorianus
ttgcccgtaatgaacgccaatgagt

SEQ ID NO: 22545 - DNA, 25 bp, Saccharomyces pastorianus
ggattcattgatggccatcctcgaa

SEQ ID NO: 22546 - DNA, 25 bp, Saccharomyces pastorianus
gactgggtatattctaggactgggt

SEQ ID NO: 22547 - DNA, 25 bp, Saccharomyces pastorianus
gagtacttggtagcacatcccgagg

SEQ ID NO: 22548 - DNA, 25 bp, Saccharomyces pastorianus
gtcaggccagcttatactcttttga

SEQ ID NO: 22549 - DNA, 25 bp, Saccharomyces pastorianus
ttttttgctgagacggttgcttcca

SEQ ID NO: 22550 - DNA, 25 bp, Saccharomyces pastorianus
accagtgctggccaaagacaaagta

SEQ ID NO: 22551 - DNA, 25 bp, Saccharomyces pastorianus
attacatcggtgtgttccgctctgg

SEQ ID NO: 22552 - DNA, 25 bp, Saccharomyces pastorianus
tgataaggaataccccgtcaggcca

SEQ ID NO: 22553 - DNA, 25 bp, Saccharomyces pastorianus
agtaagtaccaagacccttcacagg

SEQ ID NO: 22554 - DNA, 25 bp, Saccharomyces pastorianus
acccttcacaggctgatgcgatcat

SEQ ID NO: 22555 - DNA, 25 bp, Saccharomyces pastorianus
acggttgcttccagaaccagtgctg

SEQ ID NO: 22556 - DNA, 25 bp, Saccharomyces pastorianus
tattggccacgtttacgctaggagc

SEQ ID NO: 22557 - DNA, 25 bp, Saccharomyces pastorianus
gaatgggccgatgttactgagacaa

SEQ ID NO: 22558 - DNA, 25 bp, Saccharomyces pastorianus
aggttgccaccattcagttagactt

SEQ ID NO: 22559 - DNA, 25 bp, Saccharomyces pastorianus
atcatgattcacagagccacttttg

SEQ ID NO: 22560 - DNA, 25 bp, Saccharomyces pastorianus
attctggctaaacccttaccaagca

SEQ ID NO: 22561 - DNA, 25 bp, Saccharomyces pastorianus
taatcgattcaaacgagggccgctg

SEQ ID NO: 22562 - DNA, 25 bp, Saccharomyces pastorianus
agggccgctggccattctggctaaa

SEQ ID NO: 22563 - DNA, 25 bp, Saccharomyces pastorianus
gcgaatgatatggagcctgttgctt

SEQ ID NO: 22564 - DNA, 25 bp, Saccharomyces pastorianus
gttagacttccaactacctgagaga

SEQ ID NO: 22565 - DNA, 25 bp, Saccharomyces pastorianus
tgggtaaaacccatcaggttgccac

SEQ ID NO: 22566 - DNA, 25 bp, Saccharomyces pastorianus
agccacttttggctccattgaaaga

SEQ ID NO: 22567 - DNA, 25 bp, Saccharomyces pastorianus
ggcacttcagtgctgatttagacat

SEQ ID NO: 22568 - DNA, 25 bp, Saccharomyces pastorianus
gatggtgccttttatggtcctaaac

SEQ ID NO: 22569 - DNA, 25 bp, Saccharomyces pastorianus
actaactatgaatctgcctccatct

SEQ ID NO: 22570 - DNA, 25 bp, Saccharomyces pastorianus
gggcctcattcaaccagatagacca

SEQ ID NO: 22571 - DNA, 25 bp, Saccharomyces pastorianus
aaaaccttgaccatctgtctcagtt

SEQ ID NO: 22572 - DNA, 25 bp, Saccharomyces pastorianus
gagctttacttatcacacaacttca

SEQ ID NO: 22573 - DNA, 25 bp, Saccharomyces pastorianus
gttaaccgacatatgggcctcattc

SEQ ID NO: 22574 - DNA, 25 bp, Saccharomyces pastorianus
aaatctgtcctctttgaagtcgctg

SEQ ID NO: 22575 - DNA, 25 bp, Saccharomyces pastorianus
gaacttgtccaatttgtcacgtttg

SEQ ID NO: 22576 - DNA, 25 bp, Saccharomyces pastorianus
atcgaacaaactcacctcgttggaa

SEQ ID NO: 22577 - DNA, 25 bp, Saccharomyces pastorianus
agccgactctttcgaaggcttgagt

SEQ ID NO: 22578 - DNA, 25 bp, Saccharomyces pastorianus
ttaaccactctggatgtcacatcga

SEQ ID NO: 22579 - DNA, 25 bp, Saccharomyces pastorianus
atcaacctacatcccttacataatt

SEQ ID NO: 22580 - DNA, 25 bp, Saccharomyces pastorianus
gagccaagatcaggtctctcaaaga

SEQ ID NO: 22581 - DNA, 25 bp, Saccharomyces pastorianus
agttatcgacgtcatcaaggccttc

SEQ ID NO: 22582 - DNA, 25 bp, Saccharomyces pastorianus
aaaggttctactccgccaacttgag

SEQ ID NO: 22583 - DNA, 25 bp, Saccharomyces pastorianus
gagaagcgtgggtgaaaccgtcaac

SEQ ID NO: 22584 - DNA, 25 bp, Saccharomyces pastorianus
atctgcaaaatttcgtcccgcatgg

SEQ ID NO: 22585 - DNA, 25 bp, Saccharomyces pastorianus
catcaaggccttcgacaagaactcc

SEQ ID NO: 22586 - DNA, 25 bp, Saccharomyces pastorianus
cttggacaccgtcgagttgctcgtg

SEQ ID NO: 22587 - DNA, 25 bp, Saccharomyces pastorianus
gcatcgccaacaaacagatctcaag

SEQ ID NO: 22588 - DNA, 25 bp, Saccharomyces pastorianus
cgagttgctcgtggccattgaagaa

SEQ ID NO: 22589 - DNA, 25 bp, Saccharomyces pastorianus
gatctcaagcgacactcaatttcac

SEQ ID NO: 22590 - DNA, 25 bp, Saccharomyces pastorianus
atactcgcacaaaggttctactccg

SEQ ID NO: 22591 - DNA, 25 bp, Saccharomyces pastorianus
gaagacgatcgctccaagcagctga

SEQ ID NO: 22592 - DNA, 25 bp, Saccharomyces pastorianus
aaggccactacgagcgctaacgcat

SEQ ID NO: 22593 - DNA, 25 bp, Saccharomyces pastorianus
ggatcgtggacttcaaagacgccat

SEQ ID NO: 22594 - DNA, 25 bp, Saccharomyces pastorianus
tacagaaccgttcgtggaagggcct

SEQ ID NO: 22595 - DNA, 25 bp, Saccharomyces pastorianus
tatatggtgcattctcggctgcaac

SEQ ID NO: 22596 - DNA, 25 bp, Saccharomyces pastorianus
tttacaagccgatcatcacaccgta

SEQ ID NO: 22597 - DNA, 25 bp, Saccharomyces pastorianus
aagggcctgggcagcgacttcgact

SEQ ID NO: 22598 - DNA, 25 bp, Saccharomyces pastorianus
agaagcactaccttttcgtggtcgg

SEQ ID NO: 22599 - DNA, 25 bp, Saccharomyces pastorianus
ttcccacagtgacgagccagagttt

SEQ ID NO: 22600 - DNA, 25 bp, Saccharomyces pastorianus
cgggcaaatacaccagcacatcaag

SEQ ID NO: 22601 - DNA, 25 bp, Saccharomyces pastorianus
aagggcacagtatccacttctgcgg

SEQ ID NO: 22602 - DNA, 25 bp, Saccharomyces pastorianus
attctccggaaaatctaaagcttat

SEQ ID NO: 22603 - DNA, 25 bp, Saccharomyces pastorianus
gaaattgattccttaccacgcataa

SEQ ID NO: 22604 - DNA, 25 bp, Saccharomyces pastorianus
agacaaagcaccaagctgctggcct

SEQ ID NO: 22605 - DNA, 25 bp, Saccharomyces pastorianus
gtatcaacaaactaatggctcacgg

SEQ ID NO: 22606 - DNA, 25 bp, Saccharomyces pastorianus
ttaagcgctgcattcactacacatc

SEQ ID NO: 22607 - DNA, 25 bp, Saccharomyces pastorianus
aagattctactttccttgatgagag

SEQ ID NO: 22608 - DNA, 25 bp, Saccharomyces pastorianus
tttaaactcgccatcctcagtaata

SEQ ID NO: 22609 - DNA, 25 bp, Saccharomyces pastorianus
acgcataatttcatcgacgacagac

SEQ ID NO: 22610 - DNA, 25 bp, Saccharomyces pastorianus
gaatctctacaaatcttaagcgctg

SEQ ID NO: 22611 - DNA, 25 bp, Saccharomyces pastorianus
ctgctggcctctttaatcgtgataa

SEQ ID NO: 22612 - DNA, 25 bp, Saccharomyces pastorianus
acacatcccaagttagtctctaagg

SEQ ID NO: 22613 - DNA, 25 bp, Saccharomyces pastorianus
aagcatgatgttgtcgtcggcgatt

SEQ ID NO: 22614 - DNA, 25 bp, Saccharomyces pastorianus
gacgaattctttcctgtgggttgtg

SEQ ID NO: 22615 - DNA, 25 bp, Saccharomyces pastorianus
gacaagagccacatatccgtataaa

SEQ ID NO: 22616 - DNA, 25 bp, Saccharomyces pastorianus
gtctgccgctactcaatttaacggt

SEQ ID NO: 22617 - DNA, 25 bp, Saccharomyces pastorianus
ataggtggcggattccaattcgaat

SEQ ID NO: 22618 - DNA, 25 bp, Saccharomyces pastorianus
taatctgggcgcctatacttcgtct

SEQ ID NO: 22619 - DNA, 25 bp, Saccharomyces pastorianus
ggcgttcactttagcaactcacata

SEQ ID NO: 22620 - DNA, 25 bp, Saccharomyces pastorianus
gccgacctcgaacctgtcaataaga

SEQ ID NO: 22621 - DNA, 25 bp, Saccharomyces pastorianus
acaacttgccgcctttgaagatttt

SEQ ID NO: 22622 - DNA, 25 bp, Saccharomyces pastorianus
gtagatactttgtggccacggcgtt

SEQ ID NO: 22623 - DNA, 25 bp, Saccharomyces pastorianus
aagcgcctcacccaaagactttata

SEQ ID NO: 22624 - DNA, 25 bp, Saccharomyces pastorianus
tgatgtctctccaatttttgccgaa

SEQ ID NO: 22625 - DNA, 25 bp, Saccharomyces pastorianus
taacggtcacgttatcggcgacgac

SEQ ID NO: 22626 - DNA, 25 bp, Saccharomyces pastorianus
acaccatcgttgtcactaacacata

SEQ ID NO: 22627 - DNA, 25 bp, Saccharomyces pastorianus
ttagtgcagccgaacatctggtcca

SEQ ID NO: 22628 - DNA, 25 bp, Saccharomyces pastorianus
agaaggtttatgttgtcgccaccca

SEQ ID NO: 22629 - DNA, 25 bp, Saccharomyces pastorianus
taggcggtacatacgacgctgtcga

SEQ ID NO: 22630 - DNA, 25 bp, Saccharomyces pastorianus
gtgagcttcattctatcgacgtcat

SEQ ID NO: 22631 - DNA, 25 bp, Saccharomyces pastorianus
gacgccattttggaatctgacggtg

SEQ ID NO: 22632 - DNA, 25 bp, Saccharomyces pastorianus
atagaccgggctctttcattagtgc

SEQ ID NO: 22633 - DNA, 25 bp, Saccharomyces pastorianus
gtcgttccgccattattctagatga

SEQ ID NO: 22634 - DNA, 25 bp, Saccharomyces pastorianus
gtcgccacccatggtatatttactg

SEQ ID NO: 22635 - DNA, 25 bp, Saccharomyces pastorianus
tgacatcaaggcaccgattccgagt

SEQ ID NO: 22636 - DNA, 25 bp, Saccharomyces pastorianus
atttctacagctgcgtttaatgcct

SEQ ID NO: 22637 - DNA, 25 bp, Saccharomyces pastorianus
taatgccttcataggagccgcggta

SEQ ID NO: 22638 - DNA, 25 bp, Saccharomyces pastorianus
gcaggttcccgtgactttcaaaacg

SEQ ID NO: 22639 - DNA, 25 bp, Saccharomyces pastorianus
ggttgcctttagctgatgacatcaa

SEQ ID NO: 22640 - DNA, 25 bp, Saccharomyces pastorianus
gcgatcactggtctctatttcaagt

SEQ ID NO: 22641 - DNA, 25 bp, Saccharomyces pastorianus
ggtattgtgtctctgttccgcaact

SEQ ID NO: 22642 - DNA, 25 bp, Saccharomyces pastorianus
tctatggtttccgtttgtctgccaa

SEQ ID NO: 22643 - DNA, 25 bp, Saccharomyces pastorianus
gggccattcggagtgcacctgtgaa

SEQ ID NO: 22644 - DNA, 25 bp, Saccharomyces pastorianus
ttccgcaactttcattcctttggtt

SEQ ID NO: 22645 - DNA, 25 bp, Saccharomyces pastorianus
atattttgtatcctggcgatcactg

SEQ ID NO: 22646 - DNA, 25 bp, Saccharomyces pastorianus
tatctgtcacgcaattgtggtaaga

SEQ ID NO: 22647 - DNA, 25 bp, Saccharomyces pastorianus
acgatggctgtgtagatagaacctt

SEQ ID NO: 22648 - DNA, 25 bp, Saccharomyces pastorianus
aaaaggctctccgaaaagccctgca

SEQ ID NO: 22649 - DNA, 25 bp, Saccharomyces pastorianus
aaagccctgcaatagtcggagatag

SEQ ID NO: 22650 - DNA, 25 bp, Saccharomyces pastorianus
tggcgaacctctcggaacaagaatt

SEQ ID NO: 22651 - DNA, 25 bp, Saccharomyces pastorianus
gaaggatggctctatggtcgcattt

SEQ ID NO: 22652 - DNA, 25 bp, Saccharomyces pastorianus
gattaataagaacactggcgaacct

SEQ ID NO: 22653 - DNA, 25 bp, Saccharomyces pastorianus
aattcaggagctcaattagcagagt

SEQ ID NO: 22654 - DNA, 25 bp, Saccharomyces pastorianus
ggaacagccaatactaatcgtgtaa

SEQ ID NO: 22655 - DNA, 25 bp, Saccharomyces pastorianus
ggtcgcatttggagacactgcctgt

SEQ ID NO: 22656 - DNA, 25 bp, Saccharomyces pastorianus
gagacactgcctgtgttttgattaa

SEQ ID NO: 22657 - DNA, 25 bp, Saccharomyces pastorianus
atacacactatgtgggaccccagat

SEQ ID NO: 22658 - DNA, 25 bp, Saccharomyces pastorianus
tcgttcctgatgtcacatacacact

SEQ ID NO: 22659 - DNA, 25 bp, Saccharomyces pastorianus
ttatacaccgttctacaactccaat

SEQ ID NO: 22660 - DNA, 25 bp, Saccharomyces pastorianus
gaagtggtcagcaccaagccatata

SEQ ID NO: 22661 - DNA, 25 bp, Saccharomyces pastorianus
ttccatccggatgcacaggacttat

SEQ ID NO: 22662 - DNA, 25 bp, Saccharomyces pastorianus
accacccgtggttcagcgaagtgat

SEQ ID NO: 22663 - DNA, 25 bp, Saccharomyces pastorianus
agaaacaccgtatgagccaccaatt

SEQ ID NO: 22664 - DNA, 25 bp, Saccharomyces pastorianus
ttgggtttgcaaaattcgttcctga

SEQ ID NO: 22665 - DNA, 25 bp, Saccharomyces pastorianus
gaggatattaagaaccacccgtggt

SEQ ID NO: 22666 - DNA, 25 bp, Saccharomyces pastorianus
tgcagaattgaagttcccgccattt

SEQ ID NO: 22667 - DNA, 25 bp, Saccharomyces pastorianus
gagccaccaattcaacagggtcaag

SEQ ID NO: 22668 - DNA, 25 bp, Saccharomyces pastorianus
atggatgagccctagtgagacagac

SEQ ID NO: 22669 - DNA, 25 bp, Saccharomyces pastorianus
gatcgagcccaacattattatcaat

SEQ ID NO: 22670 - DNA, 25 bp, Saccharomyces pastorianus
agtgagacagacacacgcacattgt

SEQ ID NO: 22671 - DNA, 25 bp, Saccharomyces pastorianus
ccacgcttaacagggtcgagccaga

SEQ ID NO: 22672 - DNA, 25 bp, Saccharomyces pastorianus
aagggtgtatttcatgacggacttc

SEQ ID NO: 22673 - DNA, 25 bp, Saccharomyces pastorianus
tacacgacccacgatttagtcagat

SEQ ID NO: 22674 - DNA, 25 bp, Saccharomyces pastorianus
gaaagaagcctcatctggaagacat

SEQ ID NO: 22675 - DNA, 25 bp, Saccharomyces pastorianus
attgactattcgtgcaaacttgcgt

SEQ ID NO: 22676 - DNA, 25 bp, Saccharomyces pastorianus
atattccagaacatcgactcttcac

SEQ ID NO: 22677 - DNA, 25 bp, Saccharomyces pastorianus
gtcagatactcttcataccataacg

SEQ ID NO: 22678 - DNA, 25 bp, Saccharomyces pastorianus
gtggaaccatactccgattcaatct

SEQ ID NO: 22679 - DNA, 25 bp, Saccharomyces pastorianus
ttcagatcaagagggcataagcacg

SEQ ID NO: 22680 - DNA, 25 bp, Saccharomyces pastorianus
cagtataggaactctttcatgcaag

SEQ ID NO: 22681 - DNA, 25 bp, Saccharomyces pastorianus
agaagtcaattctgggcgcggaagc

SEQ ID NO: 22682 - DNA, 25 bp, Saccharomyces pastorianus
agttcgtggcgaagtcgattctgat

SEQ ID NO: 22683 - DNA, 25 bp, Saccharomyces pastorianus
tagtgattggtttgatgctgtagaa

SEQ ID NO: 22684 - DNA, 25 bp, Saccharomyces pastorianus
ggtcagtctttccaaacgcgtataa

SEQ ID NO: 22685 - DNA, 25 bp, Saccharomyces pastorianus
agctggatacgaaattcaactgttt

SEQ ID NO: 22686 - DNA, 25 bp, Saccharomyces pastorianus
tcgctatcgcaaccggtggatgtat

SEQ ID NO: 22687 - DNA, 25 bp, Saccharomyces pastorianus
gaaaaatctgtatcatgcactctag

SEQ ID NO: 22688 - DNA, 25 bp, Saccharomyces pastorianus
tataaattcgctatcgcaaccggtg

SEQ ID NO: 22689 - DNA, 25 bp, Saccharomyces pastorianus
gcaagaggctagtccaaaagctgga

SEQ ID NO: 22690 - DNA, 25 bp, Saccharomyces pastorianus
gttcacagaaactggtcatgcttgt

SEQ ID NO: 22691 - DNA, 25 bp, Saccharomyces pastorianus
agctcaacctcgtcacaagccaatg

SEQ ID NO: 22692 - DNA, 25 bp, Saccharomyces pastorianus
accactcagtggctgttattgagaa

SEQ ID NO: 22693 - DNA, 25 bp, Saccharomyces pastorianus
gaaaactgtatagctcaacctcgtc

SEQ ID NO: 22694 - DNA, 25 bp, Saccharomyces pastorianus
aagccaatgccattaggtcgctgag

SEQ ID NO: 22695 - DNA, 25 bp, Saccharomyces pastorianus
gtcgctgagcatgagtgaaccctgt

SEQ ID NO: 22696 - DNA, 25 bp, Saccharomyces pastorianus
agtaaacgttcactgttcacagaaa

SEQ ID NO: 22697 - DNA, 25 bp, Saccharomyces pastorianus
taaacctattattgcgtactcgaga

SEQ ID NO: 22698 - DNA, 25 bp, Saccharomyces pastorianus
ggtcatgcttgtgcgaaatgccaaa

SEQ ID NO: 22699 - DNA, 25 bp, Saccharomyces pastorianus
tagcaagatccgtccttgttttaaa

SEQ ID NO: 22700 - DNA, 25 bp, Saccharomyces pastorianus
gggtgcctctcttgttagcaagatc

SEQ ID NO: 22701 - DNA, 25 bp, Saccharomyces pastorianus
ccgtcaagcgtaaaggtcatgtcat

SEQ ID NO: 22702 - DNA, 25 bp, Saccharomyces pastorianus
aaacttctggccacatcatgggata

SEQ ID NO: 22703 - DNA, 25 bp, Saccharomyces pastorianus
aaattactcctacttgattctccag

SEQ ID NO: 22704 - DNA, 25 bp, Saccharomyces pastorianus
acacaggatacttggccgcgcgtta

SEQ ID NO: 22705 - DNA, 25 bp, Saccharomyces pastorianus
gaggtcattttccaaacaagcttat

SEQ ID NO: 22706 - DNA, 25 bp, Saccharomyces pastorianus
tggacggtttcgaggtcattttcca

SEQ ID NO: 22707 - DNA, 25 bp, Saccharomyces pastorianus
gttggatcatcaggtgacgacacac

SEQ ID NO: 22708 - DNA, 25 bp, Saccharomyces pastorianus
atgtcatgatggacctatgtgcacc

SEQ ID NO: 22709 - DNA, 25 bp, Saccharomyces pastorianus
gattctccagagatcgcataaagat

SEQ ID NO: 22710 - DNA, 25 bp, Saccharomyces pastorianus
gcgttataaatgaccccgtcaagcg

SEQ ID NO: 22711 - DNA, 25 bp, Saccharomyces pastorianus
tataatgaccttgaagactctcttc

SEQ ID NO: 22712 - DNA, 25 bp, Saccharomyces pastorianus
gtaagaccgtcatggttgctgctca

SEQ ID NO: 22713 - DNA, 25 bp, Saccharomyces pastorianus
gatatcttatacacttctcaattgt

SEQ ID NO: 22714 - DNA, 25 bp, Saccharomyces pastorianus
tcaattgtctagagctatccaaact

SEQ ID NO: 22715 - DNA, 25 bp, Saccharomyces pastorianus
tatggatcccagtcaagagatcttg

SEQ ID NO: 22716 - DNA, 25 bp, Saccharomyces pastorianus
tcatggttgctgctcacggtaactc

SEQ ID NO: 22717 - DNA, 25 bp, Saccharomyces pastorianus
aatcgaagcttcttctccatactcc

SEQ ID NO: 22718 - DNA, 25 bp, Saccharomyces pastorianus
agaacgtccacccagatatcttata

SEQ ID NO: 22719 - DNA, 25 bp, Saccharomyces pastorianus
tgtcatcgccaaggacttattgagc

SEQ ID NO: 22720 - DNA, 25 bp, Saccharomyces pastorianus
aagacattacggtgctttgcaaggt

SEQ ID NO: 22721 - DNA, 25 bp, Saccharomyces pastorianus
aggtaaggacaaggccgctactttg

SEQ ID NO: 22722 - DNA, 25 bp, Saccharomyces pastorianus
gaaagatacagcttggttgacccaa

SEQ ID NO: 22723 - DNA, 25 bp, Saccharomyces pastorianus
acggcgaagtcggattcatttctaa

SEQ ID NO: 22724 - DNA, 25 bp, Saccharomyces pastorianus
caaaggaggacacccacctgtttgt

SEQ ID NO: 22725 - DNA, 25 bp, Saccharomyces pastorianus
ttaaccccttataccaattggctca

SEQ ID NO: 22726 - DNA, 25 bp, Saccharomyces pastorianus
gcgatcttgctcagaagggtcactt

SEQ ID NO: 22727 - DNA, 25 bp, Saccharomyces pastorianus
gagttcacatcttttcgaccttaag

SEQ ID NO: 22728 - DNA, 25 bp, Saccharomyces pastorianus
gggtcacttccaattagtcatcaag

SEQ ID NO: 22729 - DNA, 25 bp, Saccharomyces pastorianus
ggtgctggtacaggcattaacccct

SEQ ID NO: 22730 - DNA, 25 bp, Saccharomyces pastorianus
attcaagagcacattccaggcccaa

SEQ ID NO: 22731 - DNA, 25 bp, Saccharomyces pastorianus
atatacccctgtaagcgatcttgct

SEQ ID NO: 22732 - DNA, 25 bp, Saccharomyces pastorianus
gaaatggcaacctaactcgttcaag

SEQ ID NO: 22733 - DNA, 25 bp, Saccharomyces pastorianus
acgttgttagaccatatacccctgt

SEQ ID NO: 22734 - DNA, 25 bp, Saccharomyces pastorianus
gatggatttccaagtgtacagctga

SEQ ID NO: 22735 - DNA, 25 bp, Saccharomyces pastorianus
atatcggcaatcactcaccagctaa

SEQ ID NO: 22736 - DNA, 25 bp, Saccharomyces pastorianus
ttcccaatatcggtctttgcattac

SEQ ID NO: 22737 - DNA, 25 bp, Saccharomyces pastorianus
gatggctcttcctatatcagtgtca

SEQ ID NO: 22738 - DNA, 25 bp, Saccharomyces pastorianus
atcagtgtcacatttcgagccattg

SEQ ID NO: 22739 - DNA, 25 bp, Saccharomyces pastorianus
aattccgccagatcaatttcatcgc

SEQ ID NO: 22740 - DNA, 25 bp, Saccharomyces pastorianus
gggtgttattatacgcctgaagaga

SEQ ID NO: 22741 - DNA, 25 bp, Saccharomyces pastorianus
tgccctactaggtagttgccaaaca

SEQ ID NO: 22742 - DNA, 25 bp, Saccharomyces pastorianus
gggcgaagaaactccacaaactgaa

SEQ ID NO: 22743 - DNA, 25 bp, Saccharomyces pastorianus
cgagccattgtgtttaagccatttt

SEQ ID NO: 22744 - DNA, 25 bp, Saccharomyces pastorianus
ggatttggtacgaattccgccagat

SEQ ID NO: 22745 - DNA, 25 bp, Saccharomyces pastorianus
cgtgttctcgagttgcaagtggcca

SEQ ID NO: 22746 - DNA, 25 bp, Saccharomyces pastorianus
aagtcgaggctttccatatcaatga

SEQ ID NO: 22747 - DNA, 25 bp, Saccharomyces pastorianus
gaaatactccaaatccgtctcaaag

SEQ ID NO: 22748 - DNA, 25 bp, Saccharomyces pastorianus
aagcatgatgtgaccgatttcgact

SEQ ID NO: 22749 - DNA, 25 bp, Saccharomyces pastorianus
gacgcattcaatgacgttgcccgtt

SEQ ID NO: 22750 - DNA, 25 bp, Saccharomyces pastorianus
gtctcaaagaagtcagggtccgcca

SEQ ID NO: 22751 - DNA, 25 bp, Saccharomyces pastorianus
gacgatgttatagcggcattgccaa

SEQ ID NO: 22752 - DNA, 25 bp, Saccharomyces pastorianus
ttgactcgaccgattttgccacaaa

SEQ ID NO: 22753 - DNA, 25 bp, Saccharomyces pastorianus
aaacgccgacggtgacattcctgac

SEQ ID NO: 22754 - DNA, 25 bp, Saccharomyces pastorianus
gagaccaccgacgaagagctttcaa

SEQ ID NO: 22755 - DNA, 25 bp, Saccharomyces pastorianus
agaagactcgtcaactccttgaaaa

SEQ ID NO: 22756 - DNA, 25 bp, Saccharomyces pastorianus
gttattgaaaccatccgtcttctca

SEQ ID NO: 22757 - DNA, 25 bp, Saccharomyces pastorianus
aactgggactcaacaaatctgcttt

SEQ ID NO: 22758 - DNA, 25 bp, Saccharomyces pastorianus
tttgctccacctcatctttgaagaa

SEQ ID NO: 22759 - DNA, 25 bp, Saccharomyces pastorianus
gaacaccaaggctgctattgccgag

SEQ ID NO: 22760 - DNA, 25 bp, Saccharomyces pastorianus
caaggtctctgattggtatcaccag

SEQ ID NO: 22761 - DNA, 25 bp, Saccharomyces pastorianus
ttatttgcgatccacttcggtgaca

SEQ ID NO: 22762 - DNA, 25 bp, Saccharomyces pastorianus
attctcttcggtgtttctggtctac

SEQ ID NO: 22763 - DNA, 25 bp, Saccharomyces pastorianus
aattgacctggtacctctcttctat

SEQ ID NO: 22764 - DNA, 25 bp, Saccharomyces pastorianus
gtgtatacagaaccggttacgccgt

SEQ ID NO: 22765 - DNA, 25 bp, Saccharomyces pastorianus
gggattctacttgttgaccattctc

SEQ ID NO: 22766 - DNA, 25 bp, Saccharomyces pastorianus
tagacacctgttttgggacgcggcc

SEQ ID NO: 22767 - DNA, 25 bp, Saccharomyces pastorianus
gcaaagtacacggaagctggttaat

SEQ ID NO: 22768 - DNA, 25 bp, Saccharomyces pastorianus
actgaggcagtataaccagcttgct

SEQ ID NO: 22769 - DNA, 25 bp, Saccharomyces pastorianus
gtataaccagcttgctcacgaactc

SEQ ID NO: 22770 - DNA, 25 bp, Saccharomyces pastorianus
agacattatgtcaaagcagagcaat

SEQ ID NO: 22771 - DNA, 25 bp, Saccharomyces pastorianus
gaactcaaggagctgcaaacaaatt

SEQ ID NO: 22772 - DNA, 25 bp, Saccharomyces pastorianus
gagcaatgagaatttggttaaccaa

SEQ ID NO: 22773 - DNA, 25 bp, Saccharomyces pastorianus
accagcttgctcacgaactcaagga

SEQ ID NO: 22774 - DNA, 25 bp, Saccharomyces pastorianus
ggagctgcaaacaaatttacaggaa

SEQ ID NO: 22775 - DNA, 25 bp, Saccharomyces pastorianus
aagctggttaattggtagttatatc

SEQ ID NO: 22776 - DNA, 25 bp, Saccharomyces pastorianus
taaccaattaggcaaagtacacgga

SEQ ID NO: 22777 - DNA, 25 bp, Saccharomyces pastorianus
ggaaacgacaagacaactagacatt

SEQ ID NO: 22778 - DNA, 25 bp, Saccharomyces pastorianus
tgataaaaaagccaccggttacagg

SEQ ID NO: 22779 - DNA, 25 bp, Saccharomyces pastorianus
ggtccatttaaattaacaagccctg

SEQ ID NO: 22780 - DNA, 25 bp, Saccharomyces pastorianus
caccggttacaggaagggtattcat

SEQ ID NO: 22781 - DNA, 25 bp, Saccharomyces pastorianus
aggcctacacgttcagagatgtcag

SEQ ID NO: 22782 - DNA, 25 bp, Saccharomyces pastorianus
aagggctgacttaccaagaagcctt

SEQ ID NO: 22783 - DNA, 25 bp, Saccharomyces pastorianus
tctgtctttcccaaggagagccaaa

SEQ ID NO: 22784 - DNA, 25 bp, Saccharomyces pastorianus
aatcagttaacattaggcctacacg

SEQ ID NO: 22785 - DNA, 25 bp, Saccharomyces pastorianus
gattattgaacaagccctctgtctt

SEQ ID NO: 22786 - DNA, 25 bp, Saccharomyces pastorianus
gaaaggcttagaaacgttgaccaag

SEQ ID NO: 22787 - DNA, 25 bp, Saccharomyces pastorianus
aatgtccacgcatcaaaaatgccgt

SEQ ID NO: 22788 - DNA, 25 bp, Saccharomyces pastorianus
ggagagccaaatgtcatccaaagac

SEQ ID NO: 22789 - DNA, 25 bp, Saccharomyces pastorianus
tgatccgttgatccgtacgcaagat

SEQ ID NO: 22790 - DNA, 25 bp, Saccharomyces pastorianus
gaaattaccgcccttacttgatccg

SEQ ID NO: 22791 - DNA, 25 bp, Saccharomyces pastorianus
ttcggatctgtggttggtatgcctt

SEQ ID NO: 22792 - DNA, 25 bp, Saccharomyces pastorianus
atacggcgatactccactaactttt

SEQ ID NO: 22793 - DNA, 25 bp, Saccharomyces pastorianus
ggccgaaaagcttacaccaattgga

SEQ ID NO: 22794 - DNA, 25 bp, Saccharomyces pastorianus
gcttaatatctgtcgactggccgaa

SEQ ID NO: 22795 - DNA, 25 bp, Saccharomyces pastorianus
gtttgtatttcgaagggccaactat

SEQ ID NO: 22796 - DNA, 25 bp, Saccharomyces pastorianus
tatcgtatgcgggtcactgtatctt

SEQ ID NO: 22797 - DNA, 25 bp, Saccharomyces pastorianus
aactatggcgcctgttatcgtatgc

SEQ ID NO: 22798 - DNA, 25 bp, Saccharomyces pastorianus
ggattcaatctttcgagccaatgca

SEQ ID NO: 22799 - DNA, 25 bp, Saccharomyces pastorianus
gcaattgccgtcttagatttcctga

SEQ ID NO: 22800 - DNA, 25 bp, Saccharomyces pastorianus
ttgtcagctgcatggcactctatct

SEQ ID NO: 22801 - DNA, 25 bp, Saccharomyces pastorianus
gaagatctgacgctaacgactgaat

SEQ ID NO: 22802 - DNA, 25 bp, Saccharomyces pastorianus
aagagttcgatgtcgtcgccactaa

SEQ ID NO: 22803 - DNA, 25 bp, Saccharomyces pastorianus
acgaatcgggttcagatgccgaccc

SEQ ID NO: 22804 - DNA, 25 bp, Saccharomyces pastorianus
agtcatttacgcagagtggccacgc

SEQ ID NO: 22805 - DNA, 25 bp, Saccharomyces pastorianus
atgccgaccctctggataaggtcat

SEQ ID NO: 22806 - DNA, 25 bp, Saccharomyces pastorianus
agtggccacgctacgattcgaaaga

SEQ ID NO: 22807 - DNA, 25 bp, Saccharomyces pastorianus
atagcttcgatgtttgtcaaatgcg

SEQ ID NO: 22808 - DNA, 25 bp, Saccharomyces pastorianus
aggtcatcttaccaatagcttcgat

SEQ ID NO: 22809 - DNA, 25 bp, Saccharomyces pastorianus
attgcgcattggcagcaacttgcta

SEQ ID NO: 22810 - DNA, 25 bp, Saccharomyces pastorianus
gaatttttctctttgtcagctgcat

SEQ ID NO: 22811 - DNA, 25 bp, Saccharomyces pastorianus
tcatgctaatgtttgctcgtatcgc

SEQ ID NO: 22812 - DNA, 25 bp, Saccharomyces pastorianus
ggtcattagccaccagacaacaatt

SEQ ID NO: 22813 - DNA, 25 bp, Saccharomyces pastorianus
aaacacttttatgctgcgttccagg

SEQ ID NO: 22814 - DNA, 25 bp, Saccharomyces pastorianus
aaagcgttgcttactgcttcagcat

SEQ ID NO: 22815 - DNA, 25 bp, Saccharomyces pastorianus
gttgcaagctatttgacttcgtggt

SEQ ID NO: 22816 - DNA, 25 bp, Saccharomyces pastorianus
agacatggtattttcagggacactg

SEQ ID NO: 22817 - DNA, 25 bp, Saccharomyces pastorianus
tcggtgcaagcaaacactgcgtcat

SEQ ID NO: 22818 - DNA, 25 bp, Saccharomyces pastorianus
gcgttccaggcattatgttacatat

SEQ ID NO: 22819 - DNA, 25 bp, Saccharomyces pastorianus
actgcgtcatcctcttggtcattag

SEQ ID NO: 22820 - DNA, 25 bp, Saccharomyces pastorianus
tcgtatcgcccaacaggaaagcgtt

SEQ ID NO: 22821 - DNA, 25 bp, Saccharomyces pastorianus
gtcgttgcaatacttgggatcttac

SEQ ID NO: 22822 - DNA, 25 bp, Saccharomyces pastorianus
tctatatcgtataaaccacccacac

SEQ ID NO: 22823 - DNA, 25 bp, Saccharomyces pastorianus
gcatctgtcctcgaactacaaattt

SEQ ID NO: 22824 - DNA, 25 bp, Saccharomyces pastorianus
atagcgttcgcctattcgaggtgaa

SEQ ID NO: 22825 - DNA, 25 bp, Saccharomyces pastorianus
aaaatgttgtcggtctggtcacttt

SEQ ID NO: 22826 - DNA, 25 bp, Saccharomyces pastorianus
taagaaaagcgaacctacggccacg

SEQ ID NO: 22827 - DNA, 25 bp, Saccharomyces pastorianus
gaggtgtatctgtaaccccaggcaa

SEQ ID NO: 22828 - DNA, 25 bp, Saccharomyces pastorianus
aagcccattgacaacttcatcatga

SEQ ID NO: 22829 - DNA, 25 bp, Saccharomyces pastorianus
tggtggctcttcagcttcgaagaag

SEQ ID NO: 22830 - DNA, 25 bp, Saccharomyces pastorianus
gattgcttagtgcattgggcccaag

SEQ ID NO: 22831 - DNA, 25 bp, Saccharomyces pastorianus
gcaaggtgccaatactgtgcagaat

SEQ ID NO: 22832 - DNA, 25 bp, Saccharomyces pastorianus
gaatccatctcagacactattttct

SEQ ID NO: 22833 - DNA, 25 bp, Saccharomyces pastorianus
gggccgcatgatattccgcaaagct

SEQ ID NO: 22834 - DNA, 25 bp, Saccharomyces pastorianus
gcaaagctctacctcggatccgaag

SEQ ID NO: 22835 - DNA, 25 bp, Saccharomyces pastorianus
agagccggtgctattttcaaaaact

SEQ ID NO: 22836 - DNA, 25 bp, Saccharomyces pastorianus
gaggcgaggattatttcacttgcac

SEQ ID NO: 22837 - DNA, 25 bp, Saccharomyces pastorianus
taattctacgttattcgggccgcat

SEQ ID NO: 22838 - DNA, 25 bp, Saccharomyces pastorianus
atcagggttcgattcgtgttttcag

SEQ ID NO: 22839 - DNA, 25 bp, Saccharomyces pastorianus
agttgacgaatttagcactgcccca

SEQ ID NO: 22840 - DNA, 25 bp, Saccharomyces pastorianus
gatccgaagctaaagtgcgacgttt

SEQ ID NO: 22841 - DNA, 25 bp, Saccharomyces pastorianus
aattccacgcttataactcgttcca

SEQ ID NO: 22842 - DNA, 25 bp, Saccharomyces pastorianus
ctgccccaccttcaaatgtagataa

SEQ ID NO: 22843 - DNA, 25 bp, Saccharomyces pastorianus
aggtaagtcgccaagagccggtgct

SEQ ID NO: 22844 - DNA, 25 bp, Saccharomyces pastorianus
gtcgttggttctccattgtttttag

SEQ ID NO: 22845 - DNA, 25 bp, Saccharomyces pastorianus
ggagttaacgttgtttctggtgcta

SEQ ID NO: 22846 - DNA, 25 bp, Saccharomyces pastorianus
tttctggtgctacctctggtataat

SEQ ID NO: 22847 - DNA, 25 bp, Saccharomyces pastorianus
ttgcccctcatacgatcatgtgttt

SEQ ID NO: 22848 - DNA, 25 bp, Saccharomyces pastorianus
ataattggtgccgtcgttggttctc

SEQ ID NO: 22849 - DNA, 25 bp, Saccharomyces pastorianus
tcaagtcttcagaattgcccctcat

SEQ ID NO: 22850 - DNA, 25 bp, Saccharomyces pastorianus
gatggaccagccttacatttaaccg

SEQ ID NO: 22851 - DNA, 25 bp, Saccharomyces pastorianus
aacgggctggtcacaattttcaaga

SEQ ID NO: 22852 - DNA, 25 bp, Saccharomyces pastorianus
gctgttcagaggtatcgatgccgct

SEQ ID NO: 22853 - DNA, 25 bp, Saccharomyces pastorianus
aaggtttcgtggctcaagtcttcag

SEQ ID NO: 22854 - DNA, 25 bp, Saccharomyces pastorianus
tcgatgccgctattcttagaacagg

SEQ ID NO: 22855 - DNA, 25 bp, Saccharomyces pastorianus
ttctgttgtcgtggctatttggtac

SEQ ID NO: 22856 - DNA, 25 bp, Saccharomyces pastorianus
gtgtttttacaagggcacgctgtcc

SEQ ID NO: 22857 - DNA, 25 bp, Saccharomyces pastorianus
aaataaacctatctcgtcacttcga

SEQ ID NO: 22858 - DNA, 25 bp, Saccharomyces pastorianus
gtccccattaattcactgctatttt

SEQ ID NO: 22859 - DNA, 25 bp, Saccharomyces pastorianus
tcttgtaagtgtcgtttctgttgtc

SEQ ID NO: 22860 - DNA, 25 bp, Saccharomyces pastorianus
tactggaccgggacctctacaaatt

SEQ ID NO: 22861 - DNA, 25 bp, Saccharomyces pastorianus
catgttcgtctcttattgtgtctat

SEQ ID NO: 22862 - DNA, 25 bp, Saccharomyces pastorianus
aaatttcccagtacatgttcgtctc

SEQ ID NO: 22863 - DNA, 25 bp, Saccharomyces pastorianus
actgttgacaccactcgaattcgaa

SEQ ID NO: 22864 - DNA, 25 bp, Saccharomyces pastorianus
atgatttgccctgctcaatgagaga

SEQ ID NO: 22865 - DNA, 25 bp, Saccharomyces pastorianus
gagcttacaccttcgcaaatcaata

SEQ ID NO: 22866 - DNA, 25 bp, Saccharomyces pastorianus
tggcgctcaaggcatggacttcagt

SEQ ID NO: 22867 - DNA, 25 bp, Saccharomyces pastorianus
tgccccagacttaactatcaaacca

SEQ ID NO: 22868 - DNA, 25 bp, Saccharomyces pastorianus
tttggaagccgaatactggccacgt

SEQ ID NO: 22869 - DNA, 25 bp, Saccharomyces pastorianus
gaacatgggcgatttccaagaaaat

SEQ ID NO: 22870 - DNA, 25 bp, Saccharomyces pastorianus
gtcgctaatggtcaacactatttct

SEQ ID NO: 22871 - DNA, 25 bp, Saccharomyces pastorianus
aattgctgactgtgatgccccagac

SEQ ID NO: 22872 - DNA, 25 bp, Saccharomyces pastorianus
tgaaggtaacgatgccgcccaaggc

SEQ ID NO: 22873 - DNA, 25 bp, Saccharomyces pastorianus
gtcggtgacgagactgttcatcatt

SEQ ID NO: 22874 - DNA, 25 bp, Saccharomyces pastorianus
atcaaagcctcatgtcggtgacgag

SEQ ID NO: 22875 - DNA, 25 bp, Saccharomyces pastorianus
aggtgccggctctccagatatggct

SEQ ID NO: 22876 - DNA, 25 bp, Saccharomyces pastorianus
ggtggagctcaaggcatggacttca

SEQ ID NO: 22877 - DNA, 25 bp, Saccharomyces pastorianus
tgagacagcgtagcagggccacgtc

SEQ ID NO: 22878 - DNA, 25 bp, Saccharomyces pastorianus
ggatcagaggactatgtgtctccag

SEQ ID NO: 22879 - DNA, 25 bp, Saccharomyces pastorianus
aggattcaccaatttactacaggca

SEQ ID NO: 22880 - DNA, 25 bp, Saccharomyces pastorianus
gaactagcggacttcggtctttgta

SEQ ID NO: 22881 - DNA, 25 bp, Saccharomyces pastorianus
gcccgtaacggtggcttagagttat

SEQ ID NO: 22882 - DNA, 25 bp, Saccharomyces pastorianus
tgacgagatttacgattccccgttc

SEQ ID NO: 22883 - DNA, 25 bp, Saccharomyces pastorianus
aaaggatctttgcagagttggctct

SEQ ID NO: 22884 - DNA, 25 bp, Saccharomyces pastorianus
gcctccaaacgcttcaatgagacag

SEQ ID NO: 22885 - DNA, 25 bp, Saccharomyces pastorianus
acaccgtatagctagattcgattgg

SEQ ID NO: 22886 - DNA, 25 bp, Saccharomyces pastorianus
gatacgtgggctttaggcgtcatat

SEQ ID NO: 22887 - DNA, 25 bp, Saccharomyces pastorianus
gataggttaccatttgatccgcctc

SEQ ID NO: 22888 - DNA, 25 bp, Saccharomyces pastorianus
gacaccgagctggtcttgagaggcc

SEQ ID NO: 22889 - DNA, 25 bp, Saccharomyces pastorianus
ggctgttatttctagaccctgaagt

SEQ ID NO: 22890 - DNA, 25 bp, Saccharomyces pastorianus
gagttcatcgagtctggcgagtcaa

SEQ ID NO: 22891 - DNA, 25 bp, Saccharomyces pastorianus
gagaggcctcgatttgaccatagaa

SEQ ID NO: 22892 - DNA, 25 bp, Saccharomyces pastorianus
gttggtccagtgaccgctttgaaac

SEQ ID NO: 22893 - DNA, 25 bp, Saccharomyces pastorianus
tggaaaatccctgaaaactggccct

SEQ ID NO: 22894 - DNA, 25 bp, Saccharomyces pastorianus
aaaagagcagttggctgccgcagcc

SEQ ID NO: 22895 - DNA, 25 bp, Saccharomyces pastorianus
ggacactctttgttacagaacgccc

SEQ ID NO: 22896 - DNA, 25 bp, Saccharomyces pastorianus
tattatgctcggttgtgactactgt

SEQ ID NO: 22897 - DNA, 25 bp, Saccharomyces pastorianus
gttcgttgacctttgtattatgctc

SEQ ID NO: 22898 - DNA, 25 bp, Saccharomyces pastorianus
aaagggctaaggtcaggcattcagg

SEQ ID NO: 22899 - DNA, 25 bp, Saccharomyces pastorianus
gacggatgctttttcgtggatctgc

SEQ ID NO: 22900 - DNA, 25 bp, Saccharomyces pastorianus
taaaagtctgacctcgattggcggg

SEQ ID NO: 22901 - DNA, 25 bp, Saccharomyces pastorianus
aaacagcggacacaatgacccattg

SEQ ID NO: 22902 - DNA, 25 bp, Saccharomyces pastorianus
taaaacccgcatctcaatccaattt

SEQ ID NO: 22903 - DNA, 25 bp, Saccharomyces pastorianus
ttcaaactctttgtccaccagaaac

SEQ ID NO: 22904 - DNA, 25 bp, Saccharomyces pastorianus
aatttcattcaagtcctcgatgtgg

SEQ ID NO: 22905 - DNA, 25 bp, Saccharomyces pastorianus
tccaccacgttctgcgtaattcaaa

SEQ ID NO: 22906 - DNA, 25 bp, Saccharomyces pastorianus
aacaatcgttgggattctccgcttt

SEQ ID NO: 22907 - DNA, 25 bp, Saccharomyces pastorianus
aatgtcgtcactttggcgcaattgc

SEQ ID NO: 22908 - DNA, 25 bp, Saccharomyces pastorianus
ctattctcactccacaggacaatat

SEQ ID NO: 22909 - DNA, 25 bp, Saccharomyces pastorianus
tggatctgcccatcggtaatgtcgt

SEQ ID NO: 22910 - DNA, 25 bp, Saccharomyces pastorianus
tgagttcggaaatcacgttggctga

SEQ ID NO: 22911 - DNA, 25 bp, Saccharomyces pastorianus
ttatctaccaagttcaagcacgcag

SEQ ID NO: 22912 - DNA, 25 bp, Saccharomyces pastorianus
ttgaatttgcccatcccagaagaac

SEQ ID NO: 22913 - DNA, 25 bp, Saccharomyces pastorianus
gaatttcctgttcattcaagaccag

SEQ ID NO: 22914 - DNA, 25 bp, Saccharomyces pastorianus
acagcttcattgatgacctcgatga

SEQ ID NO: 22915 - DNA, 25 bp, Saccharomyces pastorianus
tcgaacgtgaatctctatgacttaa

SEQ ID NO: 22916 - DNA, 25 bp, Saccharomyces pastorianus
aatggtgccactgctactaacgagt

SEQ ID NO: 22917 - DNA, 25 bp, Saccharomyces pastorianus
tacttgccgcccactttagaagaat

SEQ ID NO: 22918 - DNA, 25 bp, Saccharomyces pastorianus
aaattgctacctccaagtcgaacgt

SEQ ID NO: 22919 - DNA, 25 bp, Saccharomyces pastorianus
gaacccgtttcctctgaacaagaca

SEQ ID NO: 22920 - DNA, 25 bp, Saccharomyces pastorianus
gagttcgaccaaaacagcttcattg

SEQ ID NO: 22921 - DNA, 25 bp, Saccharomyces pastorianus
cgcgtatttgatgaggttgtgccta

SEQ ID NO: 22922 - DNA, 25 bp, Saccharomyces pastorianus
tatggttcccgtgtggttaacgtgg

SEQ ID NO: 22923 - DNA, 25 bp, Saccharomyces pastorianus
ctcagaggttgcattacgtcagaaa

SEQ ID NO: 22924 - DNA, 25 bp, Saccharomyces pastorianus
tatgtattcctctccaccaggttat

SEQ ID NO: 22925 - DNA, 25 bp, Saccharomyces pastorianus
gccactgccgatgacgaaaacttaa

SEQ ID NO: 22926 - DNA, 25 bp, Saccharomyces pastorianus
gtaatggtgtttttctttgtcaatc

SEQ ID NO: 22927 - DNA, 25 bp, Saccharomyces pastorianus
agatgtttgaacgtcttcgctggcc

SEQ ID NO: 22928 - DNA, 25 bp, Saccharomyces pastorianus
caaggtttagagtccggtgatatgc

SEQ ID NO: 22929 - DNA, 25 bp, Saccharomyces pastorianus
ttaagtgttatcacacccgccactg

SEQ ID NO: 22930 - DNA, 25 bp, Saccharomyces pastorianus
ggtgatatgctaaaggacgcgtatt

SEQ ID NO: 22931 - DNA, 25 bp, Saccharomyces pastorianus
tattgactacttgtgtgaagctctc

SEQ ID NO: 22932 - DNA, 25 bp, Saccharomyces pastorianus
gtcaatattattcccctgcaactaa

SEQ ID NO: 22933 - DNA, 25 bp, Saccharomyces pastorianus
ggaggttccacaaactgtcgactgt

SEQ ID NO: 22934 - DNA, 25 bp, Saccharomyces pastorianus
tgccttggtaatgtttgctttgtca

SEQ ID NO: 22935 - DNA, 25 bp, Saccharomyces pastorianus
tcgactgtctgcaaggcctagtcaa

SEQ ID NO: 22936 - DNA, 25 bp, Saccharomyces pastorianus
aaacatggtgttttggccctggtcg

SEQ ID NO: 22937 - DNA, 25 bp, Saccharomyces pastorianus
ttggccctggtcgatgaaaacttac

SEQ ID NO: 22938 - DNA, 25 bp, Saccharomyces pastorianus
aaggtattgacgttgactttccaag

SEQ ID NO: 22939 - DNA, 25 bp, Saccharomyces pastorianus
gtaccagagattctttgttccccaa

SEQ ID NO: 22940 - DNA, 25 bp, Saccharomyces pastorianus
taccaatttgctgccgccttagagg

SEQ ID NO: 22941 - DNA, 25 bp, Saccharomyces pastorianus
aaggtcgtttcctccatcgaacaag

SEQ ID NO: 22942 - DNA, 25 bp, Saccharomyces pastorianus
acacttctcagtatattgccttggt

SEQ ID NO: 22943 - DNA, 25 bp, Saccharomyces pastorianus
tttctgcttccagcactgaaaccat

SEQ ID NO: 22944 - DNA, 25 bp, Saccharomyces pastorianus
ccagcactgaaaccatttctcaaca

SEQ ID NO: 22945 - DNA, 25 bp, Saccharomyces pastorianus
gttgaaaccgtttctgcttccagca

SEQ ID NO: 22946 - DNA, 25 bp, Saccharomyces pastorianus
cgctttcgtcgccttggccaacttt

SEQ ID NO: 22947 - DNA, 25 bp, Saccharomyces pastorianus
tgcttccagcactgaaaccatttct

SEQ ID NO: 22948 - DNA, 25 bp, Saccharomyces pastorianus
tgctccatcttcttcccacgttgaa

SEQ ID NO: 22949 - DNA, 25 bp, Saccharomyces pastorianus
tgtcgtttccgtcgctttcgtcgcc

SEQ ID NO: 22950 - DNA, 25 bp, Saccharomyces pastorianus
actgaaaccatttctcaacaaactg

SEQ ID NO: 22951 - DNA, 25 bp, Saccharomyces pastorianus
atctgctgccgccatctctcaaatt

SEQ ID NO: 22952 - DNA, 25 bp, Saccharomyces pastorianus
aaccgtttctgcttccagcactgaa

SEQ ID NO: 22953 - DNA, 25 bp, Saccharomyces pastorianus
tcttcccacgttgaaaccgtttctg

SEQ ID NO: 22954 - DNA, 25 bp, Saccharomyces pastorianus
gatggttcctcttacatattctctt

SEQ ID NO: 22955 - DNA, 25 bp, Saccharomyces pastorianus
ggaaggttccgaaagcgacgctact

SEQ ID NO: 22956 - DNA, 25 bp, Saccharomyces pastorianus
tttaagcgctactgtcaccgatgac

SEQ ID NO: 22957 - DNA, 25 bp, Saccharomyces pastorianus
gttgtcagtgacgatggttccctaa

SEQ ID NO: 22958 - DNA, 25 bp, Saccharomyces pastorianus
attctcttccaagcaatctagcgac

SEQ ID NO: 22959 - DNA, 25 bp, Saccharomyces pastorianus
gctgcttctgtcatctctcaaatta

SEQ ID NO: 22960 - DNA, 25 bp, Saccharomyces pastorianus
ttcctctgggttctatgctgtcaaa

SEQ ID NO: 22961 - DNA, 25 bp, Saccharomyces pastorianus
tagcgacgctactggtattgccatc

SEQ ID NO: 22962 - DNA, 25 bp, Saccharomyces pastorianus
aaaatggtgccgtcaaggctgccgt

SEQ ID NO: 22963 - DNA, 25 bp, Saccharomyces pastorianus
agcaaaaccggttcagtcgttccag

SEQ ID NO: 22964 - DNA, 25 bp, Saccharomyces pastorianus
tcgttccagacttttctccaagtga

SEQ ID NO: 22965 - DNA, 25 bp, Saccharomyces pastorianus
gacgatactatcaacgaccccaagg

SEQ ID NO: 22966 - DNA, 25 bp, Saccharomyces pastorianus
aagacactccattttctcgctagag

SEQ ID NO: 22967 - DNA, 25 bp, Saccharomyces pastorianus
gaactgaagctctacccaggtgcaa

SEQ ID NO: 22968 - DNA, 25 bp, Saccharomyces pastorianus
accctatgtctgttccaatgtacgg

SEQ ID NO: 22969 - DNA, 25 bp, Saccharomyces pastorianus
attcattcaggattgtccctctgac

SEQ ID NO: 22970 - DNA, 25 bp, Saccharomyces pastorianus
gacgtccgataaagcgtaccgcgat

SEQ ID NO: 22971 - DNA, 25 bp, Saccharomyces pastorianus
aagggcatccccttattcatgtggg

SEQ ID NO: 22972 - DNA, 25 bp, Saccharomyces pastorianus
ttactggctaagttcctgcccaaag

SEQ ID NO: 22973 - DNA, 25 bp, Saccharomyces pastorianus
aataaacccgtcattgtcatgcacg

SEQ ID NO: 22974 - DNA, 25 bp, Saccharomyces pastorianus
ggtacattggttcagggccgttaat

SEQ ID NO: 22975 - DNA, 25 bp, Saccharomyces pastorianus
gtacgggtcattcaggcagatccac

SEQ ID NO: 22976 - DNA, 25 bp, Saccharomyces pastorianus
gtacgtttctcctgaattggacact

SEQ ID NO: 22977 - DNA, 25 bp, Saccharomyces pastorianus
gccatagcgataccaactcatctgt

SEQ ID NO: 22978 - DNA, 25 bp, Saccharomyces pastorianus
agaaattccagctcttcaagacaat

SEQ ID NO: 22979 - DNA, 25 bp, Saccharomyces pastorianus
cgatcctgaagtcggcgctggaaat

SEQ ID NO: 22980 - DNA, 25 bp, Saccharomyces pastorianus
atcaatgctcaatttccctctaggt

SEQ ID NO: 22981 - DNA, 25 bp, Saccharomyces pastorianus
aatacaagatcgttctcgctaccta

SEQ ID NO: 22982 - DNA, 25 bp, Saccharomyces pastorianus
gcaaggcagcgtgcgaattcatcct

SEQ ID NO: 22983 - DNA, 25 bp, Saccharomyces pastorianus
aactcatctgtatggcctggagaag

SEQ ID NO: 22984 - DNA, 25 bp, Saccharomyces pastorianus
gacactttaactgccgatcctgaag

SEQ ID NO: 22985 - DNA, 25 bp, Saccharomyces pastorianus
aattcatcctcttcttcaaacacta

SEQ ID NO: 22986 - DNA, 25 bp, Saccharomyces pastorianus
taggtcaagatcgagatcctccgcc

SEQ ID NO: 22987 - DNA, 25 bp, Saccharomyces pastorianus
gaaccactacgtcttttgggaagag

SEQ ID NO: 22988 - DNA, 25 bp, Saccharomyces pastorianus
gacttggaattttgacggaggcttt

SEQ ID NO: 22989 - DNA, 25 bp, Saccharomyces pastorianus
gtatccatagtgtcggcgggatctc

SEQ ID NO: 22990 - DNA, 25 bp, Saccharomyces pastorianus
gaaactcatgaagaagccgtcgcaa

SEQ ID NO: 22991 - DNA, 25 bp, Saccharomyces pastorianus
gagcccgttagttgtagttactggt

SEQ ID NO: 22992 - DNA, 25 bp, Saccharomyces pastorianus
ccgattagatttccacggctttcta

SEQ ID NO: 22993 - DNA, 25 bp, Saccharomyces pastorianus
gcaacattcaagtaagccctcaacg

SEQ ID NO: 22994 - DNA, 25 bp, Saccharomyces pastorianus
ctaacgaggcggtttcaatcttgaa

SEQ ID NO: 22995 - DNA, 25 bp, Saccharomyces pastorianus
tagacctatcctccttactgataaa

SEQ ID NO: 22996 - DNA, 25 bp, Saccharomyces pastorianus
taaagtacaattcgtgagcccgtta

SEQ ID NO: 22997 - DNA, 25 bp, Saccharomyces pastorianus
cggaggctttactttgacatcgcaa

SEQ ID NO: 22998 - DNA, 25 bp, Saccharomyces pastorianus
attccatgtgatacaagggatcgtt

SEQ ID NO: 22999 - DNA, 25 bp, Saccharomyces pastorianus
gcaggtgaccatttcgcaagacact

SEQ ID NO: 23000 - DNA, 25 bp, Saccharomyces pastorianus
gttgccagccatatctggacagaaa

SEQ ID NO: 23001 - DNA, 25 bp, Saccharomyces pastorianus
ggccatacaattatgtgcctacagg

SEQ ID NO: 23002 - DNA, 25 bp, Saccharomyces pastorianus
agaatgttcttcgtgcaggtgacca

SEQ ID NO: 23003 - DNA, 25 bp, Saccharomyces pastorianus
tgggatattaaagttgccagccata

SEQ ID NO: 23004 - DNA, 25 bp, Saccharomyces pastorianus
tacttttcagataccagcattcaat

SEQ ID NO: 23005 - DNA, 25 bp, Saccharomyces pastorianus
gagacacgggatactagaggctaat

SEQ ID NO: 23006 - DNA, 25 bp, Saccharomyces pastorianus
gagtgtcaaaggttctacttttcag

SEQ ID NO: 23007 - DNA, 25 bp, Saccharomyces pastorianus
ttgcacctaacttatcacaagctga

SEQ ID NO: 23008 - DNA, 25 bp, Saccharomyces pastorianus
gaaatcatcgcatttgcacctaact

SEQ ID NO: 23009 - DNA, 25 bp, Saccharomyces pastorianus
aacgagcgggtctggaattacatca

SEQ ID NO: 23010 - DNA, 25 bp, Saccharomyces pastorianus
gagctggagtgttctgcaaacccgc

SEQ ID NO: 23011 - DNA, 25 bp, Saccharomyces pastorianus
actgggacccgaactcaaacgatat

SEQ ID NO: 23012 - DNA, 25 bp, Saccharomyces pastorianus
atcgcgtatcttacatctggccaag

SEQ ID NO: 23013 - DNA, 25 bp, Saccharomyces pastorianus
cgagcagcagcagccacttatttat

SEQ ID NO: 23014 - DNA, 25 bp, Saccharomyces pastorianus
aaggaccctcagtatgttaccgacg

SEQ ID NO: 23015 - DNA, 25 bp, Saccharomyces pastorianus
ttgtcgcagtccagagaggtctcca

SEQ ID NO: 23016 - DNA, 25 bp, Saccharomyces pastorianus
aagagcttggtttagatcgcgtatc

SEQ ID NO: 23017 - DNA, 25 bp, Saccharomyces pastorianus
cgtgcggcggtatcaaactgtctaa

SEQ ID NO: 23018 - DNA, 25 bp, Saccharomyces pastorianus
atatgaaggtcgtcgtgccactgca

SEQ ID NO: 23019 - DNA, 25 bp, Saccharomyces pastorianus
gaaaagcaattctacgaggccatga

SEQ ID NO: 23020 - DNA, 25 bp, Saccharomyces pastorianus
actctcctctattcaagtccgaagg

SEQ ID NO: 23021 - DNA, 25 bp, Saccharomyces pastorianus
caaaaagctgttcggtgtgaccacc

SEQ ID NO: 23022 - DNA, 25 bp, Saccharomyces pastorianus
gagaagattcatcctattggcgaac

SEQ ID NO: 23023 - DNA, 25 bp, Saccharomyces pastorianus
attgtcgcccaggtcttgaagagca

SEQ ID NO: 23024 - DNA, 25 bp, Saccharomyces pastorianus
gtcaacgtcattggtggtcactcag

SEQ ID NO: 23025 - DNA, 25 bp, Saccharomyces pastorianus
ccttgggcccagacggtatcgagaa

SEQ ID NO: 23026 - DNA, 25 bp, Saccharomyces pastorianus
attggcgaactttcctctcaagaag

SEQ ID NO: 23027 - DNA, 25 bp, Saccharomyces pastorianus
gcacgctggtgctaagttcgccaac

SEQ ID NO: 23028 - DNA, 25 bp, Saccharomyces pastorianus
tctcccagactacccataagttgat

SEQ ID NO: 23029 - DNA, 25 bp, Saccharomyces pastorianus
atcgaaccctcatttgtagactctc

SEQ ID NO: 23030 - DNA, 25 bp, Saccharomyces pastorianus
aacgccgtgttgtcgggcttcaagg

SEQ ID NO: 23031 - DNA, 25 bp, Saccharomyces pastorianus
aagtgctgtgccacatactttgcct

SEQ ID NO: 23032 - DNA, 25 bp, Saccharomyces pastorianus
atactttgcctgtttcgagtgccac

SEQ ID NO: 23033 - DNA, 25 bp, Saccharomyces pastorianus
atctcccttcaatccaggttgcaaa

SEQ ID NO: 23034 - DNA, 25 bp, Saccharomyces pastorianus
gtgccaccaagaattaagttcccat

SEQ ID NO: 23035 - DNA, 25 bp, Saccharomyces pastorianus
gccatcaaattcaagtgctgtgcca

SEQ ID NO: 23036 - DNA, 25 bp, Saccharomyces pastorianus
atcaatctcggtgtgttcactggca

SEQ ID NO: 23037 - DNA, 25 bp, Saccharomyces pastorianus
gtacgatcttcacgacgatactgat

SEQ ID NO: 23038 - DNA, 25 bp, Saccharomyces pastorianus
tgatcgtgtgtggagtttgccgtca

SEQ ID NO: 23039 - DNA, 25 bp, Saccharomyces pastorianus
ggaataccataacgctcaactcgtc

SEQ ID NO: 23040 - DNA, 25 bp, Saccharomyces pastorianus
aagttcccattccttgcagaagtac

SEQ ID NO: 23041 - DNA, 25 bp, Saccharomyces pastorianus
ctggcatctgccgaacgacgtaata

SEQ ID NO: 23042 - DNA, 25 bp, Saccharomyces pastorianus
aattatttttcatttccagcctcgc

SEQ ID NO: 23043 - DNA, 25 bp, Saccharomyces pastorianus
ttgcgttccaccctggtatggtaac

SEQ ID NO: 23044 - DNA, 25 bp, Saccharomyces pastorianus
ggattgaccattacacgaccaacgc

SEQ ID NO: 23045 - DNA, 25 bp, Saccharomyces pastorianus
gaggaaagcgcttccgcattagtta

SEQ ID NO: 23046 - DNA, 25 bp, Saccharomyces pastorianus
gaaagctgccttgaattttgccata

SEQ ID NO: 23047 - DNA, 25 bp, Saccharomyces pastorianus
aactctgggatctcgaattcctact

SEQ ID NO: 23048 - DNA, 25 bp, Saccharomyces pastorianus
caatttctgtttctgcttacggtca

SEQ ID NO: 23049 - DNA, 25 bp, Saccharomyces pastorianus
gcagcttgacattaccgacgacgaa

SEQ ID NO: 23050 - DNA, 25 bp, Saccharomyces pastorianus
aaaacaccatcattccagggcattg

SEQ ID NO: 23051 - DNA, 25 bp, Saccharomyces pastorianus
acgaccaacgctttaggaccaatat

SEQ ID NO: 23052 - DNA, 25 bp, Saccharomyces pastorianus
aaacctgagggcttcactgttgttg

SEQ ID NO: 23053 - DNA, 25 bp, Saccharomyces pastorianus
catgcgtacaagtcgttgggtgtca

SEQ ID NO: 23054 - DNA, 25 bp, Saccharomyces pastorianus
gtaatttgtctaatgcctcgtcttt

SEQ ID NO: 23055 - DNA, 25 bp, Saccharomyces pastorianus
ctcgtctttgatttggcatgcgtac

SEQ ID NO: 23056 - DNA, 25 bp, Saccharomyces pastorianus
atctagcgggttccatcatgccgat

SEQ ID NO: 23057 - DNA, 25 bp, Saccharomyces pastorianus
gaaggttgcctgtcaaacgattcaa

SEQ ID NO: 23058 - DNA, 25 bp, Saccharomyces pastorianus
actaagagtgagatcgttgtcccga

SEQ ID NO: 23059 - DNA, 25 bp, Saccharomyces pastorianus
gatacattgatactgggcccgtttc

SEQ ID NO: 23060 - DNA, 25 bp, Saccharomyces pastorianus
tcgttgtcccgatcatatccaatga

SEQ ID NO: 23061 - DNA, 25 bp, Saccharomyces pastorianus
attatcgtacgaggcactatctgac

SEQ ID NO: 23062 - DNA, 25 bp, Saccharomyces pastorianus
tgggccgggttttacgttagtcatg

SEQ ID NO: 23063 - DNA, 25 bp, Saccharomyces pastorianus
gtttgcgggactgcagcctcaaaaa

SEQ ID NO: 23064 - DNA, 25 bp, Saccharomyces pastorianus
tggtgccactaacccattggccagt

SEQ ID NO: 23065 - DNA, 25 bp, Saccharomyces pastorianus
ggtcaagcaaggtaggtccattctt

SEQ ID NO: 23066 - DNA, 25 bp, Saccharomyces pastorianus
ggtgacttcggtgttgatctaggca

SEQ ID NO: 23067 - DNA, 25 bp, Saccharomyces pastorianus
atctggcccaatcttggctactgta

SEQ ID NO: 23068 - DNA, 25 bp, Saccharomyces pastorianus
agtgctccgggcaccatcagaggtg

SEQ ID NO: 23069 - DNA, 25 bp, Saccharomyces pastorianus
ggcttctttcatgaaatctggccca

SEQ ID NO: 23070 - DNA, 25 bp, Saccharomyces pastorianus
atgctgaacacgttggtaaaccatt

SEQ ID NO: 23071 - DNA, 25 bp, Saccharomyces pastorianus
gaggtttagtctctcaaattttatc

SEQ ID NO: 23072 - DNA, 25 bp, Saccharomyces pastorianus
agttggttgctatcaaattagtcca

SEQ ID NO: 23073 - DNA, 25 bp, Saccharomyces pastorianus
gatctaggcagaaacgtttgtcatg

SEQ ID NO: 23074 - DNA, 25 bp, Saccharomyces pastorianus
gtaggtccattcttggtgccactaa

SEQ ID NO: 23075 - DNA, 25 bp, Saccharomyces pastorianus
gaccaaaacttctccaagaaccgag

SEQ ID NO: 23076 - DNA, 25 bp, Saccharomyces pastorianus
tattgtatttctctatttgcatccc

SEQ ID NO: 23077 - DNA, 25 bp, Saccharomyces pastorianus
aacatgtacatttctgggttcatat

SEQ ID NO: 23078 - DNA, 25 bp, Saccharomyces pastorianus
tcataatgggcggtcttgttgggct

SEQ ID NO: 23079 - DNA, 25 bp, Saccharomyces pastorianus
gcagctataaccaattgacggctaa

SEQ ID NO: 23080 - DNA, 25 bp, Saccharomyces pastorianus
gaaagttccaaagcaggccgactct

SEQ ID NO: 23081 - DNA, 25 bp, Saccharomyces pastorianus
gcaggccgactctactaaattggaa

SEQ ID NO: 23082 - DNA, 25 bp, Saccharomyces pastorianus
tttattcctaatgctcaccgttgag

SEQ ID NO: 23083 - DNA, 25 bp, Saccharomyces pastorianus
gttgggctgttgtttatcgattcgt

SEQ ID NO: 23084 - DNA, 25 bp, Saccharomyces pastorianus
acaggccttggcatcaagagcttac

SEQ ID NO: 23085 - DNA, 25 bp, Saccharomyces pastorianus
aagaggtcacaaatccgcgtttcat

SEQ ID NO: 23086 - DNA, 25 bp, Saccharomyces pastorianus
gaaggtcacacttctgatactccta

SEQ ID NO: 23087 - DNA, 25 bp, Saccharomyces pastorianus
agatctcttgcctcgttataaaacg

SEQ ID NO: 23088 - DNA, 25 bp, Saccharomyces pastorianus
ataatggtgctatgatgggtgcatc

SEQ ID NO: 23089 - DNA, 25 bp, Saccharomyces pastorianus
gcagcaggtcaaagtacccaaggag

SEQ ID NO: 23090 - DNA, 25 bp, Saccharomyces pastorianus
ggcgggtttttgactactccaatga

SEQ ID NO: 23091 - DNA, 25 bp, Saccharomyces pastorianus
gggtgcatcggacccaaatagcaat

SEQ ID NO: 23092 - DNA, 25 bp, Saccharomyces pastorianus
ggaaaacgatcttaagcctcaggtc

SEQ ID NO: 23093 - DNA, 25 bp, Saccharomyces pastorianus
atatgttacttttgtgcggtgttta

SEQ ID NO: 23094 - DNA, 25 bp, Saccharomyces pastorianus
taagcctcaggtcgactcagaaaag

SEQ ID NO: 23095 - DNA, 25 bp, Saccharomyces pastorianus
gatactcctactaccggtaatgaac

SEQ ID NO: 23096 - DNA, 25 bp, Saccharomyces pastorianus
caactcgcctattctgacctaaata

SEQ ID NO: 23097 - DNA, 25 bp, Saccharomyces pastorianus
gctgaacgtccttttgcttgcatgt

SEQ ID NO: 23098 - DNA, 25 bp, Saccharomyces pastorianus
tttagatgccgctgcaatgtcgacc

SEQ ID NO: 23099 - DNA, 25 bp, Saccharomyces pastorianus
ggaaatccattgctaccattgacca

SEQ ID NO: 23100 - DNA, 25 bp, Saccharomyces pastorianus
aaaccttcgatgatgctgtccgaca

SEQ ID NO: 23101 - DNA, 25 bp, Saccharomyces pastorianus
gtcgtcgagcatcactttaagtcca

SEQ ID NO: 23102 - DNA, 25 bp, Saccharomyces pastorianus
aagcgtctgtaagcccaaacctaag

SEQ ID NO: 23103 - DNA, 25 bp, Saccharomyces pastorianus
aagtccaactatctctcacaataac

SEQ ID NO: 23104 - DNA, 25 bp, Saccharomyces pastorianus
tagataatctcaacactgcaccagc

SEQ ID NO: 23105 - DNA, 25 bp, Saccharomyces pastorianus
aatgtcgacctacgatcgtgacgca

SEQ ID NO: 23106 - DNA, 25 bp, Saccharomyces pastorianus
tcgtgacgcagatccttttaacatt

SEQ ID NO: 23107 - DNA, 25 bp, Saccharomyces pastorianus
gacatttcgatgaatccctcgttca

SEQ ID NO: 23108 - DNA, 25 bp, Saccharomyces pastorianus
aattgtttgcaagaggatttcgatt

SEQ ID NO: 23109 - DNA, 25 bp, Saccharomyces pastorianus
aaacaacttatactatcacgtcgag

SEQ ID NO: 23110 - DNA, 25 bp, Saccharomyces pastorianus
gacacactggaagttaaggtagact

SEQ ID NO: 23111 - DNA, 25 bp, Saccharomyces pastorianus
caacttatactatcacgtcgagaaa

SEQ ID NO: 23112 - DNA, 25 bp, Saccharomyces pastorianus
gcaaaattggacacactggaagtta

SEQ ID NO: 23113 - DNA, 25 bp, Saccharomyces pastorianus
ttgacgcaaaattggacacactgga

SEQ ID NO: 23114 - DNA, 25 bp, Saccharomyces pastorianus
aactggtgaattgtttgcaagagga

SEQ ID NO: 23115 - DNA, 25 bp, Saccharomyces pastorianus
atgggtgaacaaaacaacttatact

SEQ ID NO: 23116 - DNA, 25 bp, Saccharomyces pastorianus
tatactatcacgtcgagaaactggt

SEQ ID NO: 23117 - DNA, 25 bp, Saccharomyces pastorianus
cacgtcgagaaactggtgaattgtt

SEQ ID NO: 23118 - DNA, 25 bp, Saccharomyces pastorianus
tttaaaagctgaaattgacgcaaaa

SEQ ID NO: 23119 - DNA, 25 bp, Saccharomyces pastorianus
aaggtgtatctctcttcactagtaa

SEQ ID NO: 23120 - DNA, 25 bp, Saccharomyces pastorianus
ctagaagaaatgaagcttggcttga

SEQ ID NO: 23121 - DNA, 25 bp, Saccharomyces pastorianus
aaggataacgttgagctcgatgatg

SEQ ID NO: 23122 - DNA, 25 bp, Saccharomyces pastorianus
gatttcgatttagattgcgctcaag

SEQ ID NO: 23123 - DNA, 25 bp, Saccharomyces pastorianus
tgcgctcaaggtgtatctctcttca

SEQ ID NO: 23124 - DNA, 25 bp, Saccharomyces pastorianus
gaattggacaacaagttcaaagtaa

SEQ ID NO: 23125 - DNA, 25 bp, Saccharomyces pastorianus
gtatctctcttcactagtaaatcta

SEQ ID NO: 23126 - DNA, 25 bp, Saccharomyces pastorianus
gtaaaggataacgttgagctcgatg

SEQ ID NO: 23127 - DNA, 25 bp, Saccharomyces pastorianus
gctcaaggtgtatctctcttcacta

SEQ ID NO: 23128 - DNA, 25 bp, Saccharomyces pastorianus
gattgcgctcaaggtgtatctctct

SEQ ID NO: 23129 - DNA, 25 bp, Saccharomyces pastorianus
gcttggcttgaagaattggacaaca

SEQ ID NO: 23130 - DNA, 25 bp, Saccharomyces pastorianus
gaagaaaacattggtacttgtgtca

SEQ ID NO: 23131 - DNA, 25 bp, Saccharomyces pastorianus
ggtgaaaagaccatgtccgctaaga

SEQ ID NO: 23132 - DNA, 25 bp, Saccharomyces pastorianus
caaaagtacaccaaggaacaaactg

SEQ ID NO: 23133 - DNA, 25 bp, Saccharomyces pastorianus
ggttccaaggacgacaagccattat

SEQ ID NO: 23134 - DNA, 25 bp, Saccharomyces pastorianus
gacgacaagccattattcttggtct

SEQ ID NO: 23135 - DNA, 25 bp, Saccharomyces pastorianus
agaccatgtccgctaagatctccaa

SEQ ID NO: 23136 - DNA, 25 bp, Saccharomyces pastorianus
aagatggccgctatgggtcaatggt

SEQ ID NO: 23137 - DNA, 25 bp, Saccharomyces pastorianus
gaacaaactggttccaaggacgaca

SEQ ID NO: 23138 - DNA, 25 bp, Saccharomyces pastorianus
caacaacgaaaatgctgacaaggat

SEQ ID NO: 23139 - DNA, 25 bp, Saccharomyces pastorianus
tgctgacaaggatgacttatacacc

SEQ ID NO: 23140 - DNA, 25 bp, Saccharomyces pastorianus
gtccgctaagatctccaagtctttg

SEQ ID NO: 23141 - DNA, 25 bp, Saccharomyces pastorianus
aatcatgatgcttcccagaacgggt

SEQ ID NO: 23142 - DNA, 25 bp, Saccharomyces pastorianus
aagcttcattggctatgcgtgtcct

SEQ ID NO: 23143 - DNA, 25 bp, Saccharomyces pastorianus
ccaagctgacggtaaagggtaatct

SEQ ID NO: 23144 - DNA, 25 bp, Saccharomyces pastorianus
gataacacccaatccaagctgacgg

SEQ ID NO: 23145 - DNA, 25 bp, Saccharomyces pastorianus
tgatgtttggactttcattgtgaaa

SEQ ID NO: 23146 - DNA, 25 bp, Saccharomyces pastorianus
ggctatgcgtgtcctagagaagttt

SEQ ID NO: 23147 - DNA, 25 bp, Saccharomyces pastorianus
cagccagagtgttatttccgtcgac

SEQ ID NO: 23148 - DNA, 25 bp, Saccharomyces pastorianus
gggtaatcttgacacatatgggttt

SEQ ID NO: 23149 - DNA, 25 bp, Saccharomyces pastorianus
gttgaggacagtaatcatgatgctt

SEQ ID NO: 23150 - DNA, 25 bp, Saccharomyces pastorianus
ttgacaaggttgtggcagaaacatt

SEQ ID NO: 23151 - DNA, 25 bp, Saccharomyces pastorianus
gtgttatttccgtcgacaagttgag

SEQ ID NO: 23152 - DNA, 25 bp, Saccharomyces pastorianus
tgcttacgacgccaagttggtagat

SEQ ID NO: 23153 - DNA, 25 bp, Saccharomyces pastorianus
cgccaagttggtagatgacgttatc

SEQ ID NO: 23154 - DNA, 25 bp, Saccharomyces pastorianus
tctaacccagacgaaatttccaagt

SEQ ID NO: 23155 - DNA, 25 bp, Saccharomyces pastorianus
gtcggtaatgataacatcgatatcg

SEQ ID NO: 23156 - DNA, 25 bp, Saccharomyces pastorianus
tgatgcttacgacgccaagttggta

SEQ ID NO: 23157 - DNA, 25 bp, Saccharomyces pastorianus
gaatctaacccagacgaaatttcca

SEQ ID NO: 23158 - DNA, 25 bp, Saccharomyces pastorianus
tatggtcaatgtcggtaatgataac

SEQ ID NO: 23159 - DNA, 25 bp, Saccharomyces pastorianus
ttgcaagaatctaacccagacgaaa

SEQ ID NO: 23160 - DNA, 25 bp, Saccharomyces pastorianus
catctgctgacggtggtgaagacga

SEQ ID NO: 23161 - DNA, 25 bp, Saccharomyces pastorianus
tccaagttcgaaaaaggtgctcaaa

SEQ ID NO: 23162 - DNA, 25 bp, Saccharomyces pastorianus
tttacaacaaaccgccttcgacaag

SEQ ID NO: 23163 - DNA, 25 bp, Saccharomyces pastorianus
cgcacccgaatgtaccgatttgaaa

SEQ ID NO: 23164 - DNA, 25 bp, Saccharomyces pastorianus
tctgttgagaacgaatgctccaaac

SEQ ID NO: 23165 - DNA, 25 bp, Saccharomyces pastorianus
gcaaggtatcaaaccagccctagat

SEQ ID NO: 23166 - DNA, 25 bp, Saccharomyces pastorianus
gaatggtacagcgagaagttcctga

SEQ ID NO: 23167 - DNA, 25 bp, Saccharomyces pastorianus
gaggccagagacgaagcgccatttg

SEQ ID NO: 23168 - DNA, 25 bp, Saccharomyces pastorianus
ctgtgtcaacgctgcactcgtcaag

SEQ ID NO: 23169 - DNA, 25 bp, Saccharomyces pastorianus
aaaccagccctagatgaggccagag

SEQ ID NO: 23170 - DNA, 25 bp, Saccharomyces pastorianus
tataatgtcagccagtttcgcaccc

SEQ ID NO: 23171 - DNA, 25 bp, Saccharomyces pastorianus
gggatgcctacacgacctgtgtcaa

SEQ ID NO: 23172 - DNA, 25 bp, Saccharomyces pastorianus
aacgaaatacgacagctgttttaat

SEQ ID NO: 23173 - DNA, 25 bp, Saccharomyces pastorianus
aatgctccaaacagtgggatgccta

SEQ ID NO: 23174 - DNA, 25 bp, Saccharomyces pastorianus
gcacagcctacaaatttgtctcctt

SEQ ID NO: 23175 - DNA, 25 bp, Saccharomyces pastorianus
ggtcacacctgtgggctgaattggt

SEQ ID NO: 23176 - DNA, 25 bp, Saccharomyces pastorianus
aatggccgctttagaagtcatggtc

SEQ ID NO: 23177 - DNA, 25 bp, Saccharomyces pastorianus
gttccaaggcgggtgcaggtatcat

SEQ ID NO: 23178 - DNA, 25 bp, Saccharomyces pastorianus
ggttaaacacatccgcaattgctgc

SEQ ID NO: 23179 - DNA, 25 bp, Saccharomyces pastorianus
gtcacctcgtaccaatggacttaca

SEQ ID NO: 23180 - DNA, 25 bp, Saccharomyces pastorianus
ttagatagacctgctccgtatactg

SEQ ID NO: 23181 - DNA, 25 bp, Saccharomyces pastorianus
aattgctgccgctaagtcatgttct

SEQ ID NO: 23182 - DNA, 25 bp, Saccharomyces pastorianus
ggttcggcttacctgtacaactaca

SEQ ID NO: 23183 - DNA, 25 bp, Saccharomyces pastorianus
acaactacaccggatcagatctctg

SEQ ID NO: 23184 - DNA, 25 bp, Saccharomyces pastorianus
tactgcagaagatggcggttcgtct

SEQ ID NO: 23185 - DNA, 25 bp, Saccharomyces pastorianus
gagccctctcgaatgaagtgtcttc

SEQ ID NO: 23186 - DNA, 25 bp, Saccharomyces pastorianus
agtcgaggcgaacggcatatctgtc

SEQ ID NO: 23187 - DNA, 25 bp, Saccharomyces pastorianus
aaattctggaccatttatacccact

SEQ ID NO: 23188 - DNA, 25 bp, Saccharomyces pastorianus
tggacttcgttccaccgtagttctt

SEQ ID NO: 23189 - DNA, 25 bp, Saccharomyces pastorianus
catatctgtcgtgcgcagggcggat

SEQ ID NO: 23190 - DNA, 25 bp, Saccharomyces pastorianus
taaagatcggctctatgcacctcaa

SEQ ID NO: 23191 - DNA, 25 bp, Saccharomyces pastorianus
tcaatgacgaccacgatggcggcaa

SEQ ID NO: 23192 - DNA, 25 bp, Saccharomyces pastorianus
cgtagttcttaaaccgcgtgtgatt

SEQ ID NO: 23193 - DNA, 25 bp, Saccharomyces pastorianus
tgatatcgacagtgaggcccaaaac

SEQ ID NO: 23194 - DNA, 25 bp, Saccharomyces pastorianus
aagtaccatctgctatcaagtcgag

SEQ ID NO: 23195 - DNA, 25 bp, Saccharomyces pastorianus
agcgtatatcctggctcagcgtgaa

SEQ ID NO: 23196 - DNA, 25 bp, Saccharomyces pastorianus
ttcagtccttacagattacgtcatg

SEQ ID NO: 23197 - DNA, 25 bp, Saccharomyces pastorianus
aatgatagagcatccttgccatctc

SEQ ID NO: 23198 - DNA, 25 bp, Saccharomyces pastorianus
atctcctttgaatacgatgtcgcca

SEQ ID NO: 23199 - DNA, 25 bp, Saccharomyces pastorianus
attcaccatcttctaatgcttgctt

SEQ ID NO: 23200 - DNA, 25 bp, Saccharomyces pastorianus
ccacgctcaaatcaaatccatcgga

SEQ ID NO: 23201 - DNA, 25 bp, Saccharomyces pastorianus
agatgcaggaatcaatccccgctca

SEQ ID NO: 23202 - DNA, 25 bp, Saccharomyces pastorianus
agtacgcatcatcatccttcacatt

SEQ ID NO: 23203 - DNA, 25 bp, Saccharomyces pastorianus
attcccatcgggattattcaccatc

SEQ ID NO: 23204 - DNA, 25 bp, Saccharomyces pastorianus
tgttctgccaatgagctgtacgaga

SEQ ID NO: 23205 - DNA, 25 bp, Saccharomyces pastorianus
gaaacacaacaaggcgcaccacagt

SEQ ID NO: 23206 - DNA, 25 bp, Saccharomyces pastorianus
atgcttgcttagagtgttctgccaa

SEQ ID NO: 23207 - DNA, 25 bp, Saccharomyces pastorianus
acagaggcggatcaagtcggtacta

SEQ ID NO: 23208 - DNA, 25 bp, Saccharomyces pastorianus
cttgcagaataagacccagcagctt

SEQ ID NO: 23209 - DNA, 25 bp, Saccharomyces pastorianus
aaatggcggatagcgcaggcttgat

SEQ ID NO: 23210 - DNA, 25 bp, Saccharomyces pastorianus
caggacagttcgattgtatgccaaa

SEQ ID NO: 23211 - DNA, 25 bp, Saccharomyces pastorianus
gttgcgagagctagcagtcttgcag

SEQ ID NO: 23212 - DNA, 25 bp, Saccharomyces pastorianus
aacggcagacttaccaacgaatgac

SEQ ID NO: 23213 - DNA, 25 bp, Saccharomyces pastorianus
aagcacagttagactctgttcgaat

SEQ ID NO: 23214 - DNA, 25 bp, Saccharomyces pastorianus
agtcaattccctagtgaggcttcct

SEQ ID NO: 23215 - DNA, 25 bp, Saccharomyces pastorianus
cagcagcttatcaagaaatccgcaa

SEQ ID NO: 23216 - DNA, 25 bp, Saccharomyces pastorianus
gaatgtacacctccaaagcacagtt

SEQ ID NO: 23217 - DNA, 25 bp, Saccharomyces pastorianus
atgtcgatcatgttccaacggcaga

SEQ ID NO: 23218 - DNA, 25 bp, Saccharomyces pastorianus
gagaacgtggccctcgagaacttcg

SEQ ID NO: 23219 - DNA, 25 bp, Saccharomyces pastorianus
gcaattgccatactgcacgagatct

SEQ ID NO: 23220 - DNA, 25 bp, Saccharomyces pastorianus
tgaagctgtccaactccatgaacga

SEQ ID NO: 23221 - DNA, 25 bp, Saccharomyces pastorianus
gtgcagatcaccagcgtgttgacga

SEQ ID NO: 23222 - DNA, 25 bp, Saccharomyces pastorianus
agaacagacgtcctgtgggccagat

SEQ ID NO: 23223 - DNA, 25 bp, Saccharomyces pastorianus
taagcagatgccaacgtcgctgatt

SEQ ID NO: 23224 - DNA, 25 bp, Saccharomyces pastorianus
gagttatctcgccttttgcaattgc

SEQ ID NO: 23225 - DNA, 25 bp, Saccharomyces pastorianus
gaaggccaggcctcgagtacacaga

SEQ ID NO: 23226 - DNA, 25 bp, Saccharomyces pastorianus
agatcgggccaaagcatccgcgaga

SEQ ID NO: 23227 - DNA, 25 bp, Saccharomyces pastorianus
gcgctacgacgccatctgagggaaa

SEQ ID NO: 23228 - DNA, 25 bp, Saccharomyces pastorianus
gaacttcgtcagtatcggctggaaa

SEQ ID NO: 23229 - DNA, 25 bp, Saccharomyces pastorianus
acatttcgaaggtgctcacggtgtt

SEQ ID NO: 23230 - DNA, 25 bp, Saccharomyces pastorianus
tgaccattaccggtaacgtcttctt

SEQ ID NO: 23231 - DNA, 25 bp, Saccharomyces pastorianus
ggtgccgctatcagacatttcgaag

SEQ ID NO: 23232 - DNA, 25 bp, Saccharomyces pastorianus
gttccgatttgttgttagtcaagtc

SEQ ID NO: 23233 - DNA, 25 bp, Saccharomyces pastorianus
agtcaagtcagatctgttccgtttg

SEQ ID NO: 23234 - DNA, 25 bp, Saccharomyces pastorianus
cattattgtttgctcagacggtcac

SEQ ID NO: 23235 - DNA, 25 bp, Saccharomyces pastorianus
gtcttcttaggtaagggcgtcacct

SEQ ID NO: 23236 - DNA, 25 bp, Saccharomyces pastorianus
aatccctcacatcccgaagattgtt

SEQ ID NO: 23237 - DNA, 25 bp, Saccharomyces pastorianus
gaaactagatccatcccgtttcggt

SEQ ID NO: 23238 - DNA, 25 bp, Saccharomyces pastorianus
gttgaactagaccacttgaccatta

SEQ ID NO: 23239 - DNA, 25 bp, Saccharomyces pastorianus
ggaagtcgcccaagtcccaaaggag

SEQ ID NO: 23240 - DNA, 25 bp, Saccharomyces pastorianus
gtttaccggtcatatatgttttcac

SEQ ID NO: 23241 - DNA, 25 bp, Saccharomyces pastorianus
attcttcaaacgtctttaggcatca

SEQ ID NO: 23242 - DNA, 25 bp, Saccharomyces pastorianus
ttgttgtatttctatcgctgtggct

SEQ ID NO: 23243 - DNA, 25 bp, Saccharomyces pastorianus
gtatttcaagccactttcgaaccag

SEQ ID NO: 23244 - DNA, 25 bp, Saccharomyces pastorianus
taaactcctactggattccccaaat

SEQ ID NO: 23245 - DNA, 25 bp, Saccharomyces pastorianus
cgctgtggctactgttccaaatcag

SEQ ID NO: 23246 - DNA, 25 bp, Saccharomyces pastorianus
taaccacgttttccatacttcatgt

SEQ ID NO: 23247 - DNA, 25 bp, Saccharomyces pastorianus
tggtgggaccgttcaaaacactgtt

SEQ ID NO: 23248 - DNA, 25 bp, Saccharomyces pastorianus
tatggtgacaccctgtaaccacgtt

SEQ ID NO: 23249 - DNA, 25 bp, Saccharomyces pastorianus
gagaacaagagctaccaacggagga

SEQ ID NO: 23250 - DNA, 25 bp, Saccharomyces pastorianus
tggttcttacctcaacacacgattc

SEQ ID NO: 23251 - DNA, 25 bp, Saccharomyces pastorianus
gagttgctgcaacagttccctgaag

SEQ ID NO: 23252 - DNA, 25 bp, Saccharomyces pastorianus
gaaaacgacccgagcggcaacacaa

SEQ ID NO: 23253 - DNA, 25 bp, Saccharomyces pastorianus
aagtgcccgaactgtccaagttggc

SEQ ID NO: 23254 - DNA, 25 bp, Saccharomyces pastorianus
gaaatcagacccacagtcgtcaagg

SEQ ID NO: 23255 - DNA, 25 bp, Saccharomyces pastorianus
aaaaatggcgcgaactggatcctgc

SEQ ID NO: 23256 - DNA, 25 bp, Saccharomyces pastorianus
atgacagcatcgttaacgaccccgt

SEQ ID NO: 23257 - DNA, 25 bp, Saccharomyces pastorianus
gtcgcgggcagcaatggcaacacca

SEQ ID NO: 23258 - DNA, 25 bp, Saccharomyces pastorianus
gttccctgaagcgaaagtgcccgaa

SEQ ID NO: 23259 - DNA, 25 bp, Saccharomyces pastorianus
gtcatcgtcgatgtcattgcaacag

SEQ ID NO: 23260 - DNA, 25 bp, Saccharomyces pastorianus
gtcctttcattcaattcacccagga

SEQ ID NO: 23261 - DNA, 25 bp, Saccharomyces pastorianus
ctggatcctgccaagaaggccgaat

SEQ ID NO: 23262 - DNA, 25 bp, Saccharomyces pastorianus
aaacgtcaagcccacatgtctggtg

SEQ ID NO: 23263 - DNA, 25 bp, Saccharomyces pastorianus
ggccgtcgatggataccgtatctca

SEQ ID NO: 23264 - DNA, 25 bp, Saccharomyces pastorianus
gaacaataactgttactccttcccg

SEQ ID NO: 23265 - DNA, 25 bp, Saccharomyces pastorianus
aactggccgaattgtcaccactgag

SEQ ID NO: 23266 - DNA, 25 bp, Saccharomyces pastorianus
gcgccaccatcattacggacaagat

SEQ ID NO: 23267 - DNA, 25 bp, Saccharomyces pastorianus
gagacggtcaaggtgcctcgtgact

SEQ ID NO: 23268 - DNA, 25 bp, Saccharomyces pastorianus
ataataacgccttggtggccacggg

SEQ ID NO: 23269 - DNA, 25 bp, Saccharomyces pastorianus
gaattggtcttggtgccgtgctttc

SEQ ID NO: 23270 - DNA, 25 bp, Saccharomyces pastorianus
gggcgccttcactcaagacgtagtg

SEQ ID NO: 23271 - DNA, 25 bp, Saccharomyces pastorianus
gaggccgttccagcggatctaatga

SEQ ID NO: 23272 - DNA, 25 bp, Saccharomyces pastorianus
gtacaggcccatgatcaaggtgcag

SEQ ID NO: 23273 - DNA, 25 bp, Saccharomyces pastorianus
ttgatcctgcggtcactgcatctgc

SEQ ID NO: 23274 - DNA, 25 bp, Saccharomyces pastorianus
tgccgcttcaactgctgcagataca

SEQ ID NO: 23275 - DNA, 25 bp, Saccharomyces pastorianus
atcagcccttggaagattggataat

SEQ ID NO: 23276 - DNA, 25 bp, Saccharomyces pastorianus
aaactcaaaaacatctgccgcttca

SEQ ID NO: 23277 - DNA, 25 bp, Saccharomyces pastorianus
agtaccatcggtaaatcagcccttg

SEQ ID NO: 23278 - DNA, 25 bp, Saccharomyces pastorianus
gaatgattactatgctgcgttagca

SEQ ID NO: 23279 - DNA, 25 bp, Saccharomyces pastorianus
gccgttcccgaatggcacaaacaaa

SEQ ID NO: 23280 - DNA, 25 bp, Saccharomyces pastorianus
aagatgtgactgatgcaactgatac

SEQ ID NO: 23281 - DNA, 25 bp, Saccharomyces pastorianus
cggctgaaaacgcattcgaggatga

SEQ ID NO: 23282 - DNA, 25 bp, Saccharomyces pastorianus
gaatgcgaacaacgaatccgtgcaa

SEQ ID NO: 23283 - DNA, 25 bp, Saccharomyces pastorianus
atacaaaggtggacgcagatgcaga

SEQ ID NO: 23284 - DNA, 25 bp, Saccharomyces pastorianus
aaattaatgttagtcacgccggatg

SEQ ID NO: 23285 - DNA, 25 bp, Saccharomyces pastorianus
aaattggtccgaatcaggtacgaag

SEQ ID NO: 23286 - DNA, 25 bp, Saccharomyces pastorianus
acaactggattacaagcacttggga

SEQ ID NO: 23287 - DNA, 25 bp, Saccharomyces pastorianus
acatagaatccgtcttatcaagaga

SEQ ID NO: 23288 - DNA, 25 bp, Saccharomyces pastorianus
ggcaggttattcagactggtcaata

SEQ ID NO: 23289 - DNA, 25 bp, Saccharomyces pastorianus
gtcacgccggatgagttgaactgta

SEQ ID NO: 23290 - DNA, 25 bp, Saccharomyces pastorianus
gttcatggtcttggagtcatcacaa

SEQ ID NO: 23291 - DNA, 25 bp, Saccharomyces pastorianus
aacccatgtactaagatgcttgaac

SEQ ID NO: 23292 - DNA, 25 bp, Saccharomyces pastorianus
gggacaactattattcaacttatca

SEQ ID NO: 23293 - DNA, 25 bp, Saccharomyces pastorianus
caggtacgaagttccccattatact

SEQ ID NO: 23294 - DNA, 25 bp, Saccharomyces pastorianus
gaagagtgtccatgacctgaccagt

SEQ ID NO: 23295 - DNA, 25 bp, Saccharomyces pastorianus
aaatccaatgtcgtccgtattcgtt

SEQ ID NO: 23296 - DNA, 25 bp, Saccharomyces pastorianus
aagcaagttcatcctgttcttcgat

SEQ ID NO: 23297 - DNA, 25 bp, Saccharomyces pastorianus
caaattcttgatcgacggattcccc

SEQ ID NO: 23298 - DNA, 25 bp, Saccharomyces pastorianus
caggcgacttgttgcgtgctgaaca

SEQ ID NO: 23299 - DNA, 25 bp, Saccharomyces pastorianus
caagtctctgtggtcttcgttctag

SEQ ID NO: 23300 - DNA, 25 bp, Saccharomyces pastorianus
tttcaaagacaccagcatgcccgtt

SEQ ID NO: 23301 - DNA, 25 bp, Saccharomyces pastorianus
ctgctacgaaaacaacaccggcttt

SEQ ID NO: 23302 - DNA, 25 bp, Saccharomyces pastorianus
ttcgttctaggaggacccggtgcag

SEQ ID NO: 23303 - DNA, 25 bp, Saccharomyces pastorianus
atcactctggcgctattacgtaacg

SEQ ID NO: 23304 - DNA, 25 bp, Saccharomyces pastorianus
atgattattcgtttgtccacctagc

SEQ ID NO: 23305 - DNA, 25 bp, Saccharomyces pastorianus
aagacgtcatgctccagaggctgtt

SEQ ID NO: 23306 - DNA, 25 bp, Saccharomyces pastorianus
gataagctagagatcaccacccgca

SEQ ID NO: 23307 - DNA, 25 bp, Saccharomyces pastorianus
gccagatctcgagcgctcaaagagg

SEQ ID NO: 23308 - DNA, 25 bp, Saccharomyces pastorianus
caaagagccgtctgtgtcgccagat

SEQ ID NO: 23309 - DNA, 25 bp, Saccharomyces pastorianus
aggtatcatcggaagcgcagacgct

SEQ ID NO: 23310 - DNA, 25 bp, Saccharomyces pastorianus
gaggagagcacccaagacgccaaag

SEQ ID NO: 23311 - DNA, 25 bp, Saccharomyces pastorianus
gtcgaacttgagcaacgcctggaag

SEQ ID NO: 23312 - DNA, 25 bp, Saccharomyces pastorianus
atgcggaccatgacgaagaggcttc

SEQ ID NO: 23313 - DNA, 25 bp, Saccharomyces pastorianus
aaggctctcaaaagatgcggaccat

SEQ ID NO: 23314 - DNA, 25 bp, Saccharomyces pastorianus
gaacgtgcaggtcgacaaacagtct

SEQ ID NO: 23315 - DNA, 25 bp, Saccharomyces pastorianus
gcagacgctctcagttcgaagacta

SEQ ID NO: 23316 - DNA, 25 bp, Saccharomyces pastorianus
acagtctatgctgttcgagaccgaa

SEQ ID NO: 23317 - DNA, 25 bp, Saccharomyces pastorianus
agatgacgacatgttccacaacctg

SEQ ID NO: 23318 - DNA, 25 bp, Saccharomyces pastorianus
cttcagatgaaattgccctagagtt

SEQ ID NO: 23319 - DNA, 25 bp, Saccharomyces pastorianus
aagtctgtcgaaatcgggctacacg

SEQ ID NO: 23320 - DNA, 25 bp, Saccharomyces pastorianus
caaggacgcctcattcaaacaaaat

SEQ ID NO: 23321 - DNA, 25 bp, Saccharomyces pastorianus
gttccacaacctgtctaaagtcgtc

SEQ ID NO: 23322 - DNA, 25 bp, Saccharomyces pastorianus
acgtaagtgactgcgaatcctcttc

SEQ ID NO: 23323 - DNA, 25 bp, Saccharomyces pastorianus
ggaacaggatgctgactcgtctaaa

SEQ ID NO: 23324 - DNA, 25 bp, Saccharomyces pastorianus
tttggatcccattgactttggtatt

SEQ ID NO: 23325 - DNA, 25 bp, Saccharomyces pastorianus
atggatgattcccaaacctcttctg

SEQ ID NO: 23326 - DNA, 25 bp, Saccharomyces pastorianus
acgacgggtctttatggaacaggat

SEQ ID NO: 23327 - DNA, 25 bp, Saccharomyces pastorianus
gggctacacgacaacaccattcaag

SEQ ID NO: 23328 - DNA, 25 bp, Saccharomyces pastorianus
acgagctgcaattcgtcttggacaa

SEQ ID NO: 23329 - DNA, 25 bp, Saccharomyces pastorianus
agagcctacaacttgcttgcaacta

SEQ ID NO: 23330 - DNA, 25 bp, Saccharomyces pastorianus
gttcttcagcgatttccaacacgaa

SEQ ID NO: 23331 - DNA, 25 bp, Saccharomyces pastorianus
aattgagtcctcgtatgctctggag

SEQ ID NO: 23332 - DNA, 25 bp, Saccharomyces pastorianus
gacaaattggtccagttcgccacat

SEQ ID NO: 23333 - DNA, 25 bp, Saccharomyces pastorianus
ggagttcttggcacaccgttggagc

SEQ ID NO: 23334 - DNA, 25 bp, Saccharomyces pastorianus
gtctcttctaaaattgcatccctct

SEQ ID NO: 23335 - DNA, 25 bp, Saccharomyces pastorianus
attgggaacgttttctcactgccgg

SEQ ID NO: 23336 - DNA, 25 bp, Saccharomyces pastorianus
gagcgtggactcatcgactcgagag

SEQ ID NO: 23337 - DNA, 25 bp, Saccharomyces pastorianus
gtatttgcgcgggttccaagaactc

SEQ ID NO: 23338 - DNA, 25 bp, Saccharomyces pastorianus
agaactcgcccatgatgctggtcaa

SEQ ID NO: 23339 - DNA, 25 bp, Saccharomyces pastorianus
ggcgatgcttctatcggcaataaga

SEQ ID NO: 23340 - DNA, 25 bp, Saccharomyces pastorianus
aggaacgttggtggcgatgcttcta

SEQ ID NO: 23341 - DNA, 25 bp, Saccharomyces pastorianus
ttggacgtatcaatgacaatggcat

SEQ ID NO: 23342 - DNA, 25 bp, Saccharomyces pastorianus
tggtggcgatgcttctatcggcaat

SEQ ID NO: 23343 - DNA, 25 bp, Saccharomyces pastorianus
ggacggatttggacgtatcaatgac

SEQ ID NO: 23344 - DNA, 25 bp, Saccharomyces pastorianus
gagatgtgttattcaaggacgctaa

SEQ ID NO: 23345 - DNA, 25 bp, Saccharomyces pastorianus
tcagctgggcgggtggatacataaa

SEQ ID NO: 23346 - DNA, 25 bp, Saccharomyces pastorianus
ctgggcgggtggatacataaatata

SEQ ID NO: 23347 - DNA, 25 bp, Saccharomyces pastorianus
ttacaaccactatcagctgggcggg

SEQ ID NO: 23348 - DNA, 25 bp, Saccharomyces pastorianus
aaggttctagtcttttcagaaagca

SEQ ID NO: 23349 - DNA, 25 bp, Saccharomyces pastorianus
taagatgggtgctcgaaggaacgtt

SEQ ID NO: 23350 - DNA, 25 bp, Saccharomyces pastorianus
atctttgatgcattcactggccaac

SEQ ID NO: 23351 - DNA, 25 bp, Saccharomyces pastorianus
ttgctttaccccagacggtgaattt

SEQ ID NO: 23352 - DNA, 25 bp, Saccharomyces pastorianus
aaatactccatgttcgttaccgcgg

SEQ ID NO: 23353 - DNA, 25 bp, Saccharomyces pastorianus
caagtggtctcgtctttgcattggg

SEQ ID NO: 23354 - DNA, 25 bp, Saccharomyces pastorianus
tggattccggatcagcttgctttac

SEQ ID NO: 23355 - DNA, 25 bp, Saccharomyces pastorianus
gattgccatctggaaccattctgac

SEQ ID NO: 23356 - DNA, 25 bp, Saccharomyces pastorianus
cggtgaatttgttctcgggacagac

SEQ ID NO: 23357 - DNA, 25 bp, Saccharomyces pastorianus
aaaggccttccccatgagagagttt

SEQ ID NO: 23358 - DNA, 25 bp, Saccharomyces pastorianus
atactttcctgtcgtcatcatatga

SEQ ID NO: 23359 - DNA, 25 bp, Saccharomyces pastorianus
aatatttactcgtcgggtcctcaat

SEQ ID NO: 23360 - DNA, 25 bp, Saccharomyces pastorianus
ataccctgtgtttcccatgagactt

SEQ ID NO: 23361 - DNA, 25 bp, Saccharomyces pastorianus
atggaattcccatcacggtcaatgt

SEQ ID NO: 23362 - DNA, 25 bp, Saccharomyces pastorianus
taaacgtcgccatgacaagacccag

SEQ ID NO: 23363 - DNA, 25 bp, Saccharomyces pastorianus
acgaaatttcccctcatttggtatg

SEQ ID NO: 23364 - DNA, 25 bp, Saccharomyces pastorianus
ttgacgctactccatccgatgatga

SEQ ID NO: 23365 - DNA, 25 bp, Saccharomyces pastorianus
aggtgatgagttccccgaaactgca

SEQ ID NO: 23366 - DNA, 25 bp, Saccharomyces pastorianus
cggtcaatgtatcacggccagttat

SEQ ID NO: 23367 - DNA, 25 bp, Saccharomyces pastorianus
cgatgaaaccgtggcaaaccgactt

SEQ ID NO: 23368 - DNA, 25 bp, Saccharomyces pastorianus
tagatttacccatcgttgacgctac

SEQ ID NO: 23369 - DNA, 25 bp, Saccharomyces pastorianus
gaaactgcagacgacgcgaccattc

SEQ ID NO: 23370 - DNA, 25 bp, Saccharomyces pastorianus
gtcccacaagattccatcggtgtta

SEQ ID NO: 23371 - DNA, 25 bp, Saccharomyces pastorianus
atttgagatctttaaacgtcccaca

SEQ ID NO: 23372 - DNA, 25 bp, Saccharomyces pastorianus
gccggtcaaaatcaatgcttctaaa

SEQ ID NO: 23373 - DNA, 25 bp, Saccharomyces pastorianus
acgacgaggcacgtaggcaattatt

SEQ ID NO: 23374 - DNA, 25 bp, Saccharomyces pastorianus
gccaaggaaaccgaatccctagtct

SEQ ID NO: 23375 - DNA, 25 bp, Saccharomyces pastorianus
gattgagtccttcgaaaaacacgca

SEQ ID NO: 23376 - DNA, 25 bp, Saccharomyces pastorianus
agatcaagcctgaaatcgatgcgaa

SEQ ID NO: 23377 - DNA, 25 bp, Saccharomyces pastorianus
aacagggtccacagccactcaattg

SEQ ID NO: 23378 - DNA, 25 bp, Saccharomyces pastorianus
aatccctagtctcccaggagttgaa

SEQ ID NO: 23379 - DNA, 25 bp, Saccharomyces pastorianus
agccactcaattgtccagtttcaag

SEQ ID NO: 23380 - DNA, 25 bp, Saccharomyces pastorianus
acattcaatcagcaagaccattcga

SEQ ID NO: 23381 - DNA, 25 bp, Saccharomyces pastorianus
tacgtgaaacagtaccagccggtca

SEQ ID NO: 23382 - DNA, 25 bp, Saccharomyces pastorianus
caccgaggtagacttcggccattat

SEQ ID NO: 23383 - DNA, 25 bp, Saccharomyces pastorianus
aagcaatgtggctaggtaataccat

SEQ ID NO: 23384 - DNA, 25 bp, Saccharomyces pastorianus
gtaataccatggatccaaccgcagc

SEQ ID NO: 23385 - DNA, 25 bp, Saccharomyces pastorianus
cgatattataactgcaactttggaa

SEQ ID NO: 23386 - DNA, 25 bp, Saccharomyces pastorianus
gatcaattagattctgtccacaact

SEQ ID NO: 23387 - DNA, 25 bp, Saccharomyces pastorianus
tgatgacgacttacaacagttgtta

SEQ ID NO: 23388 - DNA, 25 bp, Saccharomyces pastorianus
gaaattcgattccttgaactgtgaa

SEQ ID NO: 23389 - DNA, 25 bp, Saccharomyces pastorianus
gaaccttccactttcttcgatatta

SEQ ID NO: 23390 - DNA, 25 bp, Saccharomyces pastorianus
aagcctagccatgatgatagttcaa

SEQ ID NO: 23391 - DNA, 25 bp, Saccharomyces pastorianus
gaatccatgcctaatacggccagca

SEQ ID NO: 23392 - DNA, 25 bp, Saccharomyces pastorianus
aagcacaagcttaatcaaaaccgaa

SEQ ID NO: 23393 - DNA, 25 bp, Saccharomyces pastorianus
tacggccagcatacttccagaaagt

SEQ ID NO: 23394 - DNA, 25 bp, Saccharomyces pastorianus
aaggcgtatcgctgggtattatcaa

SEQ ID NO: 23395 - DNA, 25 bp, Saccharomyces pastorianus
tatggtttccgatgtgatgatgtcc

SEQ ID NO: 23396 - DNA, 25 bp, Saccharomyces pastorianus
ctgggtattatcaagttccactata

SEQ ID NO: 23397 - DNA, 25 bp, Saccharomyces pastorianus
aaaggacaatgtgctgaacagtgct

SEQ ID NO: 23398 - DNA, 25 bp, Saccharomyces pastorianus
gtagctgatgatggcggactgaata

SEQ ID NO: 23399 - DNA, 25 bp, Saccharomyces pastorianus
aagaggcaacaagacgacgataaca

SEQ ID NO: 23400 - DNA, 25 bp, Saccharomyces pastorianus
gatatccctatggtttccgatgtga

SEQ ID NO: 23401 - DNA, 25 bp, Saccharomyces pastorianus
agctgagttgggtcttggcgacaat

SEQ ID NO: 23402 - DNA, 25 bp, Saccharomyces pastorianus
actatacgtggttgggatatcccta

SEQ ID NO: 23403 - DNA, 25 bp, Saccharomyces pastorianus
aactttaccattacacgagaaggcg

SEQ ID NO: 23404 - DNA, 25 bp, Saccharomyces pastorianus
gaacagtgctgatgtcttacaaaat

SEQ ID NO: 23405 - DNA, 25 bp, Saccharomyces pastorianus
taacagccgttcgttactctctgga

SEQ ID NO: 23406 - DNA, 25 bp, Saccharomyces pastorianus
gaagtacccaatactagcgccgaat

SEQ ID NO: 23407 - DNA, 25 bp, Saccharomyces pastorianus
gagcaatttctcttctcaagaagta

SEQ ID NO: 23408 - DNA, 25 bp, Saccharomyces pastorianus
gtgtcccaatacctggctatagcat

SEQ ID NO: 23409 - DNA, 25 bp, Saccharomyces pastorianus
cctggctatagcatttcctttctaa

SEQ ID NO: 23410 - DNA, 25 bp, Saccharomyces pastorianus
ggaggctgccttaactttgagcaat

SEQ ID NO: 23411 - DNA, 25 bp, Saccharomyces pastorianus
atgtcacaatcactacgtccatacc

SEQ ID NO: 23412 - DNA, 25 bp, Saccharomyces pastorianus
ttctatatcctaagacgtgtcccaa

SEQ ID NO: 23413 - DNA, 25 bp, Saccharomyces pastorianus
ctgtccgtatgagtttgatggttaa

SEQ ID NO: 23414 - DNA, 25 bp, Saccharomyces pastorianus
attgagcccagtgtgaactctgtcc

SEQ ID NO: 23415 - DNA, 25 bp, Saccharomyces pastorianus
gatcgaacagattttggtccataag

SEQ ID NO: 23416 - DNA, 25 bp, Saccharomyces pastorianus
cgagaagccccaccaaatttgttga

SEQ ID NO: 23417 - DNA, 25 bp, Saccharomyces pastorianus
atttggcagactcattccttcattc

SEQ ID NO: 23418 - DNA, 25 bp, Saccharomyces pastorianus
tacgctcgtctgatccacatcggat

SEQ ID NO: 23419 - DNA, 25 bp, Saccharomyces pastorianus
agctgcagtatacggtacgctcgtc

SEQ ID NO: 23420 - DNA, 25 bp, Saccharomyces pastorianus
ccttcattctttgtcgtggatcgag

SEQ ID NO: 23421 - DNA, 25 bp, Saccharomyces pastorianus
tctcgaacagattctcttctccaat

SEQ ID NO: 23422 - DNA, 25 bp, Saccharomyces pastorianus
gacctcatattggtgtattcctaaa

SEQ ID NO: 23423 - DNA, 25 bp, Saccharomyces pastorianus
acaggatacgagatgcactttctaa

SEQ ID NO: 23424 - DNA, 25 bp, Saccharomyces pastorianus
attgctagtcttttgaattccacag

SEQ ID NO: 23425 - DNA, 25 bp, Saccharomyces pastorianus
gtacaaggaccatgtcttctaggta

SEQ ID NO: 23426 - DNA, 25 bp, Saccharomyces pastorianus
gaattccacagcactctccaaagat

SEQ ID NO: 23427 - DNA, 25 bp, Saccharomyces pastorianus
atggcctgacagcaaatgaatactt

SEQ ID NO: 23428 - DNA, 25 bp, Saccharomyces pastorianus
gcattttccgaaggtttctcgaaag

SEQ ID NO: 23429 - DNA, 25 bp, Saccharomyces pastorianus
attagtggacatgttcggacgggtt

SEQ ID NO: 23430 - DNA, 25 bp, Saccharomyces pastorianus
gaatgctgatactctttccagaaga

SEQ ID NO: 23431 - DNA, 25 bp, Saccharomyces pastorianus
tctcgaaagttttcctctacgaaag

SEQ ID NO: 23432 - DNA, 25 bp, Saccharomyces pastorianus
tgttcttaacattcaccgtacctgg

SEQ ID NO: 23433 - DNA, 25 bp, Saccharomyces pastorianus
attggtctgtgggaaccttatacac

SEQ ID NO: 23434 - DNA, 25 bp, Saccharomyces pastorianus
gtgtgctaactacttgaaactacct

SEQ ID NO: 23435 - DNA, 25 bp, Saccharomyces pastorianus
tgcagtttttaactgggtctcccaa

SEQ ID NO: 23436 - DNA, 25 bp, Saccharomyces pastorianus
gccgaacatggctacacaatggact

SEQ ID NO: 23437 - DNA, 25 bp, Saccharomyces pastorianus
ggtctcccaaacttccaatcggagg

SEQ ID NO: 23438 - DNA, 25 bp, Saccharomyces pastorianus
gaatcatacgctcgttcagactatt

SEQ ID NO: 23439 - DNA, 25 bp, Saccharomyces pastorianus
gaactccaaggctccattaacattc

SEQ ID NO: 23440 - DNA, 25 bp, Saccharomyces pastorianus
acgtggtggtcaaatcccagttgaa

SEQ ID NO: 23441 - DNA, 25 bp, Saccharomyces pastorianus
tcttgggcaggttctaagttgatca

SEQ ID NO: 23442 - DNA, 25 bp, Saccharomyces pastorianus
acattcaccattcctgaaggcatca

SEQ ID NO: 23443 - DNA, 25 bp, Saccharomyces pastorianus
agatgtcccaatgatccattctttg

SEQ ID NO: 23444 - DNA, 25 bp, Saccharomyces pastorianus
gacagcccatatctggtttgtacaa

SEQ ID NO: 23445 - DNA, 25 bp, Saccharomyces pastorianus
aagattaccattgacagcccatatc

SEQ ID NO: 23446 - DNA, 25 bp, Saccharomyces pastorianus
tacagatacgcttgggtcttgcatc

SEQ ID NO: 23447 - DNA, 25 bp, Saccharomyces pastorianus
gggtcttgcatctggacgacgtaag

SEQ ID NO: 23448 - DNA, 25 bp, Saccharomyces pastorianus
gaaggcatcatttactcacgtggtg

SEQ ID NO: 23449 - DNA, 25 bp, Saccharomyces pastorianus
tccgattttcttttgtccttgtcca

SEQ ID NO: 23450 - DNA, 25 bp, Saccharomyces pastorianus
cctttctctttttgcatttttgtcg

SEQ ID NO: 23451 - DNA, 25 bp, Saccharomyces pastorianus
acgtccttaattttgctactcagca

SEQ ID NO: 23452 - DNA, 25 bp, Saccharomyces pastorianus
gtcgtttcatggatttacttgcgtc

SEQ ID NO: 23453 - DNA, 25 bp, Saccharomyces pastorianus
ttacgtcttccacttcactaaaatg

SEQ ID NO: 23454 - DNA, 25 bp, Saccharomyces pastorianus
caaggtcttttatttgggccaagct

SEQ ID NO: 23455 - DNA, 25 bp, Saccharomyces pastorianus
attgatttggtcttcttacgtcttc

SEQ ID NO: 23456 - DNA, 25 bp, Saccharomyces pastorianus
ttggattctgtttttgctcctttct

SEQ ID NO: 23457 - DNA, 25 bp, Saccharomyces pastorianus
ttgggctcaacaagcttgtatcctt

SEQ ID NO: 23458 - DNA, 25 bp, Saccharomyces pastorianus
gcttgtatccttgtgttgcaactgg

SEQ ID NO: 23459 - DNA, 25 bp, Saccharomyces pastorianus
tacaatggacctttccgattttctt

SEQ ID NO: 23460 - DNA, 25 bp, Saccharomyces pastorianus
gccacatttctactcaagtccatta

SEQ ID NO: 23461 - DNA, 25 bp, Saccharomyces pastorianus
tacgaatttacgcacccaaagctgg

SEQ ID NO: 23462 - DNA, 25 bp, Saccharomyces pastorianus
tttcagtcgaccatttagggcacag

SEQ ID NO: 23463 - DNA, 25 bp, Saccharomyces pastorianus
agtatcttgctcaaaacttcccagg

SEQ ID NO: 23464 - DNA, 25 bp, Saccharomyces pastorianus
gtcagttttgccgtttatccagttc

SEQ ID NO: 23465 - DNA, 25 bp, Saccharomyces pastorianus
tagggcacagaggtctcgacatcga

SEQ ID NO: 23466 - DNA, 25 bp, Saccharomyces pastorianus
actaaggaactgaccggccacattt

SEQ ID NO: 23467 - DNA, 25 bp, Saccharomyces pastorianus
tgaactggacttttctttctctgac

SEQ ID NO: 23468 - DNA, 25 bp, Saccharomyces pastorianus
aacggttgcacgatcaattgcgcga

SEQ ID NO: 23469 - DNA, 25 bp, Saccharomyces pastorianus
atggtgacgttagtttccagtccgg

SEQ ID NO: 23470 - DNA, 25 bp, Saccharomyces pastorianus
tacactccgtcattttttcagtcga

SEQ ID NO: 23471 - DNA, 25 bp, Saccharomyces pastorianus
accaactgtttgcttctgatgatga

SEQ ID NO: 23472 - DNA, 25 bp, Saccharomyces pastorianus
aatgcaacagcacagggagagtcct

SEQ ID NO: 23473 - DNA, 25 bp, Saccharomyces pastorianus
acattttaggcaatcccaacggtga

SEQ ID NO: 23474 - DNA, 25 bp, Saccharomyces pastorianus
aaccgctgcaccttatctgaaagaa

SEQ ID NO: 23475 - DNA, 25 bp, Saccharomyces pastorianus
gaacacaggagtttggatcccaacc

SEQ ID NO: 23476 - DNA, 25 bp, Saccharomyces pastorianus
ggctatcggtgatgggaacctgttt

SEQ ID NO: 23477 - DNA, 25 bp, Saccharomyces pastorianus
taaagtgcgcgtttctatatccggg

SEQ ID NO: 23478 - DNA, 25 bp, Saccharomyces pastorianus
gaagtctcttcttctagagcgattt

SEQ ID NO: 23479 - DNA, 25 bp, Saccharomyces pastorianus
tagacatactgaaagcacctgctca

SEQ ID NO: 23480 - DNA, 25 bp, Saccharomyces pastorianus
gaagttgtagactccttggaaacca

SEQ ID NO: 23481 - DNA, 25 bp, Saccharomyces pastorianus
tagagggacgcttacctacaacaac

SEQ ID NO: 23482 - DNA, 25 bp, Saccharomyces pastorianus
gtatacacatttgccgatagtcgat

SEQ ID NO: 23483 - DNA, 25 bp, Saccharomyces pastorianus
atacaagtcttttctgcaggtggtc

SEQ ID NO: 23484 - DNA, 25 bp, Saccharomyces pastorianus
gatggcaggctcagtattgtcgtac

SEQ ID NO: 23485 - DNA, 25 bp, Saccharomyces pastorianus
aactatggaatgcacggctcgccag

SEQ ID NO: 23486 - DNA, 25 bp, Saccharomyces pastorianus
aacgatccattagccgcagattcta

SEQ ID NO: 23487 - DNA, 25 bp, Saccharomyces pastorianus
ttatttttggtgctttcccttcatt

SEQ ID NO: 23488 - DNA, 25 bp, Saccharomyces pastorianus
gaaccgagcgtaagcccttcgatat

SEQ ID NO: 23489 - DNA, 25 bp, Saccharomyces pastorianus
gcaggtggtcgtacacttctattga

SEQ ID NO: 23490 - DNA, 25 bp, Saccharomyces pastorianus
acaacagcattttctaactcttcag

SEQ ID NO: 23491 - DNA, 25 bp, Saccharomyces pastorianus
cattgcattccggttgttctactat

SEQ ID NO: 23492 - DNA, 25 bp, Saccharomyces pastorianus
taacgatatcgagagcgtccctttg

SEQ ID NO: 23493 - DNA, 25 bp, Saccharomyces pastorianus
gtatagccaactcaaatgcgccgaa

SEQ ID NO: 23494 - DNA, 25 bp, Saccharomyces pastorianus
atcgctacatcgctctttagggaag

SEQ ID NO: 23495 - DNA, 25 bp, Saccharomyces pastorianus
acttgatgtggcttcatcgctacat

SEQ ID NO: 23496 - DNA, 25 bp, Saccharomyces pastorianus
gatcgtctatcgttaaagctagtac

SEQ ID NO: 23497 - DNA, 25 bp, Saccharomyces pastorianus
taagggatattatacccatgggtat

SEQ ID NO: 23498 - DNA, 25 bp, Saccharomyces pastorianus
tgttgtatgaacttatcggactcgt

SEQ ID NO: 23499 - DNA, 25 bp, Saccharomyces pastorianus
tcttcagctgcagtacaatcggaaa

SEQ ID NO: 23500 - DNA, 25 bp, Saccharomyces pastorianus
gaactttgaagaaagaccctcgtgt

SEQ ID NO: 23501 - DNA, 25 bp, Saccharomyces pastorianus
accctcgtgtcataagatcgtctat

SEQ ID NO: 23502 - DNA, 25 bp, Saccharomyces pastorianus
gaaggaattatctaccacgattggg

SEQ ID NO: 23503 - DNA, 25 bp, Saccharomyces pastorianus
ttatcggactcgttcgtatagccaa

SEQ ID NO: 23504 - DNA, 25 bp, Saccharomyces pastorianus
tcagctccttacgaagctccaaagg

SEQ ID NO: 23505 - DNA, 25 bp, Saccharomyces pastorianus
gagttcactggtatttcagctcctt

SEQ ID NO: 23506 - DNA, 25 bp, Saccharomyces pastorianus
gagacagagcccgtgatttacataa

SEQ ID NO: 23507 - DNA, 25 bp, Saccharomyces pastorianus
gacggctgtaccgtttggttgaccg

SEQ ID NO: 23508 - DNA, 25 bp, Saccharomyces pastorianus
ttatttccccatacagagtcgatag

SEQ ID NO: 23509 - DNA, 25 bp, Saccharomyces pastorianus
gctgattcgtgtgctgtatccatca

SEQ ID NO: 23510 - DNA, 25 bp, Saccharomyces pastorianus
tccaaaggccccagagttgcattta

SEQ ID NO: 23511 - DNA, 25 bp, Saccharomyces pastorianus
gtgcactggaacaattactgcttca

SEQ ID NO: 23512 - DNA, 25 bp, Saccharomyces pastorianus
gactgttgaagaatgtgctgctatc

SEQ ID NO: 23513 - DNA, 25 bp, Saccharomyces pastorianus
gtatccatcacttcatttatttccc

SEQ ID NO: 23514 - DNA, 25 bp, Saccharomyces pastorianus
gtatccaagctattcgctgattcgt

SEQ ID NO: 23515 - DNA, 25 bp, Saccharomyces pastorianus
gccatccagtaaagctccagctatg

SEQ ID NO: 23516 - DNA, 25 bp, Saccharomyces pastorianus
gccaagttactgttgatcctaagac

SEQ ID NO: 23517 - DNA, 25 bp, Saccharomyces pastorianus
acagcccatcctgatcttttgaagg

SEQ ID NO: 23518 - DNA, 25 bp, Saccharomyces pastorianus
agaaactggctgctttagaatcacc

SEQ ID NO: 23519 - DNA, 25 bp, Saccharomyces pastorianus
attcttaaaagacgctactctccct

SEQ ID NO: 23520 - DNA, 25 bp, Saccharomyces pastorianus
gctactctccctacaaatgactttg

SEQ ID NO: 23521 - DNA, 25 bp, Saccharomyces pastorianus
gctgttaatcagcagttatttttct

SEQ ID NO: 23522 - DNA, 25 bp, Saccharomyces pastorianus
gaactatcgctgacattattccaaa

SEQ ID NO: 23523 - DNA, 25 bp, Saccharomyces pastorianus
gaagcgatctctaatcaatttgttc

SEQ ID NO: 23524 - DNA, 25 bp, Saccharomyces pastorianus
aaaattgcatcctcgccaagttact

SEQ ID NO: 23525 - DNA, 25 bp, Saccharomyces pastorianus
aggccacgggccaaatgactgaaag

SEQ ID NO: 23526 - DNA, 25 bp, Saccharomyces pastorianus
tttagatgccactcgtgagaccgta

SEQ ID NO: 23527 - DNA, 25 bp, Saccharomyces pastorianus
taaggcatatctaaccaccatgtat

SEQ ID NO: 23528 - DNA, 25 bp, Saccharomyces pastorianus
aaagcagttattgctgtccaacaga

SEQ ID NO: 23529 - DNA, 25 bp, Saccharomyces pastorianus
gatgctgcctcatcgagcgataatg

SEQ ID NO: 23530 - DNA, 25 bp, Saccharomyces pastorianus
aaccaccatgtatataggccttgat

SEQ ID NO: 23531 - DNA, 25 bp, Saccharomyces pastorianus
agatctaagtctgatgctgcctcat

SEQ ID NO: 23532 - DNA, 25 bp, Saccharomyces pastorianus
acatttgaaatggagcggccttgtt

SEQ ID NO: 23533 - DNA, 25 bp, Saccharomyces pastorianus
aatcaaaattgcacatcccttcact

SEQ ID NO: 23534 - DNA, 25 bp, Saccharomyces pastorianus
gtttttaacctagctctacgctttg

SEQ ID NO: 23535 - DNA, 25 bp, Saccharomyces pastorianus
acatcccttcactaagccatttgaa

SEQ ID NO: 23536 - DNA, 25 bp, Saccharomyces pastorianus
ggtagccataaaactgagccagcat

SEQ ID NO: 23537 - DNA, 25 bp, Saccharomyces pastorianus
ggatgcaaagcaatcacgctcttca

SEQ ID NO: 23538 - DNA, 25 bp, Saccharomyces pastorianus
gtgaccacactgtcgcaactgaaga

SEQ ID NO: 23539 - DNA, 25 bp, Saccharomyces pastorianus
ggaattccatccaaagctatttaga

SEQ ID NO: 23540 - DNA, 25 bp, Saccharomyces pastorianus
gaatctcctttgagaccgaaggtcc

SEQ ID NO: 23541 - DNA, 25 bp, Saccharomyces pastorianus
aaggtccgtccattgaatgagcaag

SEQ ID NO: 23542 - DNA, 25 bp, Saccharomyces pastorianus
aaaagtcttcctcgacacacataag

SEQ ID NO: 23543 - DNA, 25 bp, Saccharomyces pastorianus
gtacatctctgggacttacgatgca

SEQ ID NO: 23544 - DNA, 25 bp, Saccharomyces pastorianus
gcaaggcgagtacgaatccaggaaa

SEQ ID NO: 23545 - DNA, 25 bp, Saccharomyces pastorianus
gatgcattggctgttcgtgaccaca

SEQ ID NO: 23546 - DNA, 25 bp, Saccharomyces pastorianus
aaacctggcgaggaccttcattatt

SEQ ID NO: 23547 - DNA, 25 bp, Saccharomyces pastorianus
ttttaccaggtcaacacttcactga

SEQ ID NO: 23548 - DNA, 25 bp, Saccharomyces pastorianus
gacggagctcttttgtttaactcga

SEQ ID NO: 23549 - DNA, 25 bp, Saccharomyces pastorianus
atattcaactcttctggatctcagc

SEQ ID NO: 23550 - DNA, 25 bp, Saccharomyces pastorianus
caactacccgatgctgatactttta

SEQ ID NO: 23551 - DNA, 25 bp, Saccharomyces pastorianus
ccccatatctgtgtcttttggaaat

SEQ ID NO: 23552 - DNA, 25 bp, Saccharomyces pastorianus
aactcgattattttgctttcagcat

SEQ ID NO: 23553 - DNA, 25 bp, Saccharomyces pastorianus
atctcagcacttttccaactattac

SEQ ID NO: 23554 - DNA, 25 bp, Saccharomyces pastorianus
gacctaaattttcaactacccgatg

SEQ ID NO: 23555 - DNA, 25 bp, Saccharomyces pastorianus
ctgttcatcatggagtactttagca

SEQ ID NO: 23556 - DNA, 25 bp, Saccharomyces pastorianus
tgagaaaacatataccgccgattgg

SEQ ID NO: 23557 - DNA, 25 bp, Saccharomyces pastorianus
atccagttgtgcctaaacagtttac

SEQ ID NO: 23558 - DNA, 25 bp, Saccharomyces pastorianus
attactgctggaacactgctagatg

SEQ ID NO: 23559 - DNA, 25 bp, Saccharomyces pastorianus
gggcaaggtcacttccgagaatgaa

SEQ ID NO: 23560 - DNA, 25 bp, Saccharomyces pastorianus
atcggttaacgatcctgcacttatt

SEQ ID NO: 23561 - DNA, 25 bp, Saccharomyces pastorianus
atccactttccgacaattatgcttc

SEQ ID NO: 23562 - DNA, 25 bp, Saccharomyces pastorianus
ggccaagttcgaattcaccaagttt

SEQ ID NO: 23563 - DNA, 25 bp, Saccharomyces pastorianus
gaacgtccagtttccggatttagtg

SEQ ID NO: 23564 - DNA, 25 bp, Saccharomyces pastorianus
tatgcttcgccaaacgtttatgtcg

SEQ ID NO: 23565 - DNA, 25 bp, Saccharomyces pastorianus
gtcgttaacgatatcactcccaaag

SEQ ID NO: 23566 - DNA, 25 bp, Saccharomyces pastorianus
agaagctgagcctaatgccatccat

SEQ ID NO: 23567 - DNA, 25 bp, Saccharomyces pastorianus
tagggctggagcgtcttccaagaac

SEQ ID NO: 23568 - DNA, 25 bp, Saccharomyces pastorianus
gttaaagcatgccatttctgctgcc

SEQ ID NO: 23569 - DNA, 25 bp, Saccharomyces pastorianus
attggtgacggtcccagacggtata

SEQ ID NO: 23570 - DNA, 25 bp, Saccharomyces pastorianus
aacagcaggcaggttacggcacaca

SEQ ID NO: 23571 - DNA, 25 bp, Saccharomyces pastorianus
acagcggaatcgttattcagggaac

SEQ ID NO: 23572 - DNA, 25 bp, Saccharomyces pastorianus
ggaagacgacgccagtggacaatca

SEQ ID NO: 23573 - DNA, 25 bp, Saccharomyces pastorianus
gcgccgctccgaagtcgaatacatt

SEQ ID NO: 23574 - DNA, 25 bp, Saccharomyces pastorianus
gccaacgatgaatacgatgccgagc

SEQ ID NO: 23575 - DNA, 25 bp, Saccharomyces pastorianus
agaacgaggccctgctgagggaaca

SEQ ID NO: 23576 - DNA, 25 bp, Saccharomyces pastorianus
gagattttcagccagtcgcaagtag

SEQ ID NO: 23577 - DNA, 25 bp, Saccharomyces pastorianus
gagccgatctacagacgcagccagt

SEQ ID NO: 23578 - DNA, 25 bp, Saccharomyces pastorianus
ggacaatcagcgtcctcgagccgat

SEQ ID NO: 23579 - DNA, 25 bp, Saccharomyces pastorianus
acattcactgtacttacatctccgg

SEQ ID NO: 23580 - DNA, 25 bp, Saccharomyces pastorianus
cttacatctccggatttggccaaaa

SEQ ID NO: 23581 - DNA, 25 bp, Saccharomyces pastorianus
gcatactatggaacgtaagccttat

SEQ ID NO: 23582 - DNA, 25 bp, Saccharomyces pastorianus
aagcaattactttcggagcagcata

SEQ ID NO: 23583 - DNA, 25 bp, Saccharomyces pastorianus
gaaatttttgatgttcgcttatcag

SEQ ID NO: 23584 - DNA, 25 bp, Saccharomyces pastorianus
acctttgccaggttcaagaccatcg

SEQ ID NO: 23585 - DNA, 25 bp, Saccharomyces pastorianus
taaggagcctgttagatcaagaaat

SEQ ID NO: 23586 - DNA, 25 bp, Saccharomyces pastorianus
ttttttaaccttgcaatcccatttg

SEQ ID NO: 23587 - DNA, 25 bp, Saccharomyces pastorianus
caatcccatttgagcctatcatcaa

SEQ ID NO: 23588 - DNA, 25 bp, Saccharomyces pastorianus
ggttcaagaccatcgtgcaatcaga

SEQ ID NO: 23589 - DNA, 25 bp, Saccharomyces pastorianus
tttttccttcattctacaacccatg

SEQ ID NO: 23590 - DNA, 25 bp, Saccharomyces pastorianus
tctacaacccatgcaaactttttta

SEQ ID NO: 23591 - DNA, 25 bp, Saccharomyces pastorianus
agcttaacacaacctcagcaacaag

SEQ ID NO: 23592 - DNA, 25 bp, Saccharomyces pastorianus
agaggtgcacatgtatccccaaaaa

SEQ ID NO: 23593 - DNA, 25 bp, Saccharomyces pastorianus
ggcaccaatcctacatggtctttgt

SEQ ID NO: 23594 - DNA, 25 bp, Saccharomyces pastorianus
aatatttcaagctttgcgccccaag

SEQ ID NO: 23595 - DNA, 25 bp, Saccharomyces pastorianus
ggcagtaaagtttccggcaccaatc

SEQ ID NO: 23596 - DNA, 25 bp, Saccharomyces pastorianus
agagcaaggtttgccattcaaccat

SEQ ID NO: 23597 - DNA, 25 bp, Saccharomyces pastorianus
ttgacccagcattagccaaggcagt

SEQ ID NO: 23598 - DNA, 25 bp, Saccharomyces pastorianus
tgttgttgtcttggataacgctgcc

SEQ ID NO: 23599 - DNA, 25 bp, Saccharomyces pastorianus
caagcggcactgtataggttatctg

SEQ ID NO: 23600 - DNA, 25 bp, Saccharomyces pastorianus
ttgaatccgttacacattgacccag

SEQ ID NO: 23601 - DNA, 25 bp, Saccharomyces pastorianus
gggacattcttcatcagaggtgcac

SEQ ID NO: 23602 - DNA, 25 bp, Saccharomyces pastorianus
agcagctgtagtagtcggtggtttc

SEQ ID NO: 23603 - DNA, 25 bp, Saccharomyces pastorianus
ggcccctacagactacgtatacaag

SEQ ID NO: 23604 - DNA, 25 bp, Saccharomyces pastorianus
agacctcgtaagttccagattgtag

SEQ ID NO: 23605 - DNA, 25 bp, Saccharomyces pastorianus
tcttccttgagtaccgacgacgaca

SEQ ID NO: 23606 - DNA, 25 bp, Saccharomyces pastorianus
gagggattaccacgactcgctgaaa

SEQ ID NO: 23607 - DNA, 25 bp, Saccharomyces pastorianus
aagaacgtggtctccatggctatcc

SEQ ID NO: 23608 - DNA, 25 bp, Saccharomyces pastorianus
gaccaattctggtctcaattcgaca

SEQ ID NO: 23609 - DNA, 25 bp, Saccharomyces pastorianus
tctttaaatatcaacggcccttcca

SEQ ID NO: 23610 - DNA, 25 bp, Saccharomyces pastorianus
tttctccaataaattctctatcccc

SEQ ID NO: 23611 - DNA, 25 bp, Saccharomyces pastorianus
ccacctcaatggaaagcggctcaag

SEQ ID NO: 23612 - DNA, 25 bp, Saccharomyces pastorianus
gaccggttcaacatggaccttttca

SEQ ID NO: 23613 - DNA, 25 bp, Saccharomyces pastorianus
aaggaccttgcatccaagccaagta

SEQ ID NO: 23614 - DNA, 25 bp, Saccharomyces pastorianus
gcccaggatgatgtgacttcgtctt

SEQ ID NO: 23615 - DNA, 25 bp, Saccharomyces pastorianus
taggctatggcacaaccgcttctgt

SEQ ID NO: 23616 - DNA, 25 bp, Saccharomyces pastorianus
aaggacacaggctcgttgacttggt

SEQ ID NO: 23617 - DNA, 25 bp, Saccharomyces pastorianus
gacttcccaagtcggttgcggtttg

SEQ ID NO: 23618 - DNA, 25 bp, Saccharomyces pastorianus
gattacgtcatttgctcttaccaga

SEQ ID NO: 23619 - DNA, 25 bp, Saccharomyces pastorianus
ttccggcggcgcttatggtgaaaat

SEQ ID NO: 23620 - DNA, 25 bp, Saccharomyces pastorianus
tcaggaaacttggtccattccggcg

SEQ ID NO: 23621 - DNA, 25 bp, Saccharomyces pastorianus
gaaccctggtaattacattggcgaa

SEQ ID NO: 23622 - DNA, 25 bp, Saccharomyces pastorianus
ttaaatcggtacaagccacccagca

SEQ ID NO: 23623 - DNA, 25 bp, Saccharomyces pastorianus
gacaccttggctacatatgcgcaaa

SEQ ID NO: 23624 - DNA, 25 bp, Saccharomyces pastorianus
gcttctgtcgatgcttggtacaacg

SEQ ID NO: 23625 - DNA, 25 bp, Saccharomyces pastorianus
cgaacagcattgaagtggtcgtttg

SEQ ID NO: 23626 - DNA, 25 bp, Saccharomyces pastorianus
aacggtgggtacaaaagttcatgca

SEQ ID NO: 23627 - DNA, 25 bp, Saccharomyces pastorianus
aaagaataggcatttcgtggatcga

SEQ ID NO: 23628 - DNA, 25 bp, Saccharomyces pastorianus
ttggcaaatgcagtagagtttctat

SEQ ID NO: 23629 - DNA, 25 bp, Saccharomyces pastorianus
ttcggatgcatctcaaaacttaact

SEQ ID NO: 23630 - DNA, 25 bp, Saccharomyces pastorianus
tcgtggatcgatggacagtttttgt

SEQ ID NO: 23631 - DNA, 25 bp, Saccharomyces pastorianus
gaatttcttccaatgtacgatgtac

SEQ ID NO: 23632 - DNA, 25 bp, Saccharomyces pastorianus
atgagcatgaggtttcagccaaatt

SEQ ID NO: 23633 - DNA, 25 bp, Saccharomyces pastorianus
ggtcgtttgctgtggcattttattc

SEQ ID NO: 23634 - DNA, 25 bp, Saccharomyces pastorianus
gtaaccacatgatttgctcgagctg

SEQ ID NO: 23635 - DNA, 25 bp, Saccharomyces pastorianus
tggatttgtgaaggcccatgggccc

SEQ ID NO: 23636 - DNA, 25 bp, Saccharomyces pastorianus
gagcccaaggctatgcagatgacta

SEQ ID NO: 23637 - DNA, 25 bp, Saccharomyces pastorianus
tcagttcggtcgacttgttgggcaa

SEQ ID NO: 23638 - DNA, 25 bp, Saccharomyces pastorianus
aacggagtacaagaaccctgcgatt

SEQ ID NO: 23639 - DNA, 25 bp, Saccharomyces pastorianus
gagcttattttcagttcggtcgact

SEQ ID NO: 23640 - DNA, 25 bp, Saccharomyces pastorianus
cattgctacttcaccagtgcatgaa

SEQ ID NO: 23641 - DNA, 25 bp, Saccharomyces pastorianus
aatcgcatacttctataacggttac

SEQ ID NO: 23642 - DNA, 25 bp, Saccharomyces pastorianus
agaccgaagatccatgggcttaccc

SEQ ID NO: 23643 - DNA, 25 bp, Saccharomyces pastorianus
aaggaccttttggtgtcactgacat

SEQ ID NO: 23644 - DNA, 25 bp, Saccharomyces pastorianus
tgcgattgacgccttggactcagac

SEQ ID NO: 23645 - DNA, 25 bp, Saccharomyces pastorianus
gtggacaatccactggacgccattg

SEQ ID NO: 23646 - DNA, 25 bp, Saccharomyces pastorianus
accgccctttatgaacgtgctttat

SEQ ID NO: 23647 - DNA, 25 bp, Saccharomyces pastorianus
gtgagcaatagacaccgccatctag

SEQ ID NO: 23648 - DNA, 25 bp, Saccharomyces pastorianus
aatgaactctctaccggaagacggg

SEQ ID NO: 23649 - DNA, 25 bp, Saccharomyces pastorianus
tagaaaactgcccaacgttgtcgag

SEQ ID NO: 23650 - DNA, 25 bp, Saccharomyces pastorianus
gtaagcacactcaaggcaatggcca

SEQ ID NO: 23651 - DNA, 25 bp, Saccharomyces pastorianus
ggacgatcccactgtaatgaactct

SEQ ID NO: 23652 - DNA, 25 bp, Saccharomyces pastorianus
aaacaacacatcataggcccattca

SEQ ID NO: 23653 - DNA, 25 bp, Saccharomyces pastorianus
taggcccattcatcgcactaggaaa

SEQ ID NO: 23654 - DNA, 25 bp, Saccharomyces pastorianus
agatttgttaagctggtggcccgtc

SEQ ID NO: 23655 - DNA, 25 bp, Saccharomyces pastorianus
gatcctgaacattatcgtccacgat

SEQ ID NO: 23656 - DNA, 25 bp, Saccharomyces pastorianus
tagatatgcatcaaccacggtggta

SEQ ID NO: 23657 - DNA, 25 bp, Saccharomyces pastorianus
aagcgctccaatgttcccagtagtt

SEQ ID NO: 23658 - DNA, 25 bp, Saccharomyces pastorianus
gaagtccctgaggattaacaactta

SEQ ID NO: 23659 - DNA, 25 bp, Saccharomyces pastorianus
aacagatcagccacaagaagtccct

SEQ ID NO: 23660 - DNA, 25 bp, Saccharomyces pastorianus
actcccgggatgagcacggtacaga

SEQ ID NO: 23661 - DNA, 25 bp, Saccharomyces pastorianus
agggtaaacaagacgcgagcacaga

SEQ ID NO: 23662 - DNA, 25 bp, Saccharomyces pastorianus
gaagctgcccttcaagagtcttgtc

SEQ ID NO: 23663 - DNA, 25 bp, Saccharomyces pastorianus
aaatgctgacgagctggtgcagaat

SEQ ID NO: 23664 - DNA, 25 bp, Saccharomyces pastorianus
aagagattactgacgccaacaaaga

SEQ ID NO: 23665 - DNA, 25 bp, Saccharomyces pastorianus
agagtcttgtccagatccacaacaa

SEQ ID NO: 23666 - DNA, 25 bp, Saccharomyces pastorianus
gagggtgatactagcggacgccact

SEQ ID NO: 23667 - DNA, 25 bp, Saccharomyces pastorianus
gatccacaacaagcttctgggcaag

SEQ ID NO: 23668 - DNA, 25 bp, Saccharomyces pastorianus
gagtagctgttgaggaccgaaacga

SEQ ID NO: 23669 - DNA, 25 bp, Saccharomyces pastorianus
ggagaattcgcatttgcagtctaaa

SEQ ID NO: 23670 - DNA, 25 bp, Saccharomyces pastorianus
aaacgtggttgcagattcagatgat

SEQ ID NO: 23671 - DNA, 25 bp, Saccharomyces pastorianus
aatccagagttgttagctgcacaag

SEQ ID NO: 23672 - DNA, 25 bp, Saccharomyces pastorianus
atgacagaggttcccaaggacacaa

SEQ ID NO: 23673 - DNA, 25 bp, Saccharomyces pastorianus
tttccaggacacttccgcagagaga

SEQ ID NO: 23674 - DNA, 25 bp, Saccharomyces pastorianus
ggatagactgttacatttccaggac

SEQ ID NO: 23675 - DNA, 25 bp, Saccharomyces pastorianus
cgacctgaaacacatacacgctttg

SEQ ID NO: 23676 - DNA, 25 bp, Saccharomyces pastorianus
gaagcaattcgataggcctacgtat

SEQ ID NO: 23677 - DNA, 25 bp, Saccharomyces pastorianus
gttgtcagcatgaacataggcccca

SEQ ID NO: 23678 - DNA, 25 bp, Saccharomyces pastorianus
gataatttcagtggtctaagcgacg

SEQ ID NO: 23679 - DNA, 25 bp, Saccharomyces pastorianus
ataggcctacgtatgtgagcagaaa

SEQ ID NO: 23680 - DNA, 25 bp, Saccharomyces pastorianus
tctgttattgaattggaccctccgt

SEQ ID NO: 23681 - DNA, 25 bp, Saccharomyces pastorianus
ttttgcatctgggtcatttggctaa

SEQ ID NO: 23682 - DNA, 25 bp, Saccharomyces pastorianus
agaactattgactccggctttcaaa

SEQ ID NO: 23683 - DNA, 25 bp, Saccharomyces pastorianus
tttggctaagagttttgggctgcgt

SEQ ID NO: 23684 - DNA, 25 bp, Saccharomyces pastorianus
gaataaaatgttccgcatggctcgt

SEQ ID NO: 23685 - DNA, 25 bp, Saccharomyces pastorianus
gagcttacgctacacatatatcgca

SEQ ID NO: 23686 - DNA, 25 bp, Saccharomyces pastorianus
attcaaccataccatcccatgggtt

SEQ ID NO: 23687 - DNA, 25 bp, Saccharomyces pastorianus
atttgcatagagtgggtcgtaccgc

SEQ ID NO: 23688 - DNA, 25 bp, Saccharomyces pastorianus
ccgtttgctgttgaggaccatttgc

SEQ ID NO: 23689 - DNA, 25 bp, Saccharomyces pastorianus
tgggacactaatgccaccacatggc

SEQ ID NO: 23690 - DNA, 25 bp, Saccharomyces pastorianus
ggctgcgtgaaagacctaaggctat

SEQ ID NO: 23691 - DNA, 25 bp, Saccharomyces pastorianus
ttagacttcacacgtcgtacagacg

SEQ ID NO: 23692 - DNA, 25 bp, Saccharomyces pastorianus
atacctgtgaccctgattgtcgata

SEQ ID NO: 23693 - DNA, 25 bp, Saccharomyces pastorianus
aaaatgcattgcgtggacccaccat

SEQ ID NO: 23694 - DNA, 25 bp, Saccharomyces pastorianus
ttttacgtggtcaccgaaagtcaca

SEQ ID NO: 23695 - DNA, 25 bp, Saccharomyces pastorianus
aaatctcgtgggtacttactctgta

SEQ ID NO: 23696 - DNA, 25 bp, Saccharomyces pastorianus
actacaccgctcaagaatacatcac

SEQ ID NO: 23697 - DNA, 25 bp, Saccharomyces pastorianus
gtatgtttccgttgtcctctgatga

SEQ ID NO: 23698 - DNA, 25 bp, Saccharomyces pastorianus
tttcattgttgaaccacgcagccaa

SEQ ID NO: 23699 - DNA, 25 bp, Saccharomyces pastorianus
gaacggtcaacttttcgtgtccaga

SEQ ID NO: 23700 - DNA, 25 bp, Saccharomyces pastorianus
ggaaccagctatactctttgcttga

SEQ ID NO: 23701 - DNA, 25 bp, Saccharomyces pastorianus
gtgtccagagccaagaagtcccgta

SEQ ID NO: 23702 - DNA, 25 bp, Saccharomyces pastorianus
gttccagatatttgctcttcaggta

SEQ ID NO: 23703 - DNA, 25 bp, Saccharomyces pastorianus
gaatgggaattacttggcctgactt

SEQ ID NO: 23704 - DNA, 25 bp, Saccharomyces pastorianus
gattacatgctcgaatgcctttcag

SEQ ID NO: 23705 - DNA, 25 bp, Saccharomyces pastorianus
tatcagttgccaccagctcttaagt

SEQ ID NO: 23706 - DNA, 25 bp, Saccharomyces pastorianus
attttggcgaggttcgaccctatca

SEQ ID NO: 23707 - DNA, 25 bp, Saccharomyces pastorianus
gactcttcggatgaactttccacag

SEQ ID NO: 23708 - DNA, 25 bp, Saccharomyces pastorianus
gacctactcgtgaaactgatctcct

SEQ ID NO: 23709 - DNA, 25 bp, Saccharomyces pastorianus
actgatctccttccgtatacgattt

SEQ ID NO: 23710 - DNA, 25 bp, Saccharomyces pastorianus
gttgacattgttttggacctactcg

SEQ ID NO: 23711 - DNA, 25 bp, Saccharomyces pastorianus
tgcagtggcatgtctacgaaccagt

SEQ ID NO: 23712 - DNA, 25 bp, Saccharomyces pastorianus
agacttagcttctgaacgtccacac

SEQ ID NO: 23713 - DNA, 25 bp, Saccharomyces pastorianus
aaaccgcgattgaaagagctccgat

SEQ ID NO: 23714 - DNA, 25 bp, Saccharomyces pastorianus
aaggaacctatgacagacgcttcaa

SEQ ID NO: 23715 - DNA, 25 bp, Saccharomyces pastorianus
tactcttcgaatgtcaatacccctg

SEQ ID NO: 23716 - DNA, 25 bp, Saccharomyces pastorianus
taggcacgaactatcaccagagagt

SEQ ID NO: 23717 - DNA, 25 bp, Saccharomyces pastorianus
ggatttctcgtcatcacagttacat

SEQ ID NO: 23718 - DNA, 25 bp, Saccharomyces pastorianus
acgcttcaatgagttctaggcacga

SEQ ID NO: 23719 - DNA, 25 bp, Saccharomyces pastorianus
gaagcccttccctatcaagtttcaa

SEQ ID NO: 23720 - DNA, 25 bp, Saccharomyces pastorianus
gtttgtaatattgcgaagcccttta

SEQ ID NO: 23721 - DNA, 25 bp, Saccharomyces pastorianus
atcaatctactctcacgatactctt

SEQ ID NO: 23722 - DNA, 25 bp, Saccharomyces pastorianus
tataaggcatttggcggatttctcg

SEQ ID NO: 23723 - DNA, 25 bp, Saccharomyces pastorianus
gaacatcacgttgccaaggaaccta

SEQ ID NO: 23724 - DNA, 25 bp, Saccharomyces pastorianus
gggcaagagatgatccttctttctt

SEQ ID NO: 23725 - DNA, 25 bp, Saccharomyces pastorianus
gggttttttggcattataggtcatt

SEQ ID NO: 23726 - DNA, 25 bp, Saccharomyces pastorianus
gaattctctgtattgtttcgccatt

SEQ ID NO: 23727 - DNA, 25 bp, Saccharomyces pastorianus
ttttatgggtataaccagctccctt

SEQ ID NO: 23728 - DNA, 25 bp, Saccharomyces pastorianus
agttctgatttccataagctccgtc

SEQ ID NO: 23729 - DNA, 25 bp, Saccharomyces pastorianus
tttcttcatctttcagatagttctg

SEQ ID NO: 23730 - DNA, 25 bp, Saccharomyces pastorianus
tctctgctcattgggaattctctgt

SEQ ID NO: 23731 - DNA, 25 bp, Saccharomyces pastorianus
taagctccgtcatttggtcgattta

SEQ ID NO: 23732 - DNA, 25 bp, Saccharomyces pastorianus
atttgggttcgttatggcaactatt

SEQ ID NO: 23733 - DNA, 25 bp, Saccharomyces pastorianus
gcaaaattggatctctctgctcatt

SEQ ID NO: 23734 - DNA, 25 bp, Saccharomyces pastorianus
gatcatcttactatgcttgtatttc

SEQ ID NO: 23735 - DNA, 25 bp, Saccharomyces pastorianus
tatacgcgtccaatgctataaggaa

SEQ ID NO: 23736 - DNA, 25 bp, Saccharomyces pastorianus
gaacagcagttcgaagacctggata

SEQ ID NO: 23737 - DNA, 25 bp, Saccharomyces pastorianus
atgggcgtcaattcggatgctatgc

SEQ ID NO: 23738 - DNA, 25 bp, Saccharomyces pastorianus
acagctactgaaactggcatccaga

SEQ ID NO: 23739 - DNA, 25 bp, Saccharomyces pastorianus
gagtggattctgtcgcatcaagagt

SEQ ID NO: 23740 - DNA, 25 bp, Saccharomyces pastorianus
aatgagacaggtgtccgcatccatg

SEQ ID NO: 23741 - DNA, 25 bp, Saccharomyces pastorianus
gtgcaaaccgccgtcacaatgagac

SEQ ID NO: 23742 - DNA, 25 bp, Saccharomyces pastorianus
aggagatctcccgtatatacgcgtc

SEQ ID NO: 23743 - DNA, 25 bp, Saccharomyces pastorianus
taattccgccgcaggcttggagaat

SEQ ID NO: 23744 - DNA, 25 bp, Saccharomyces pastorianus
aaaacgagcggttacagctactgaa

SEQ ID NO: 23745 - DNA, 25 bp, Saccharomyces pastorianus
ggagaatacgcttttccaactaaag

SEQ ID NO: 23746 - DNA, 25 bp, Saccharomyces pastorianus
attgcccaattttacgtcgccttgt

SEQ ID NO: 23747 - DNA, 25 bp, Saccharomyces pastorianus
aagagctatcattcaaatcccctac

SEQ ID NO: 23748 - DNA, 25 bp, Saccharomyces pastorianus
agtgggcggttctccaagtgccgaa

SEQ ID NO: 23749 - DNA, 25 bp, Saccharomyces pastorianus
gaggcttatttgtcattcccacttg

SEQ ID NO: 23750 - DNA, 25 bp, Saccharomyces pastorianus
gggtcttatcgcatttgtggccgct

SEQ ID NO: 23751 - DNA, 25 bp, Saccharomyces pastorianus
gggttatcatcacttttcacatggg

SEQ ID NO: 23752 - DNA, 25 bp, Saccharomyces pastorianus
gttttcgctatgtacatcggtcaca

SEQ ID NO: 23753 - DNA, 25 bp, Saccharomyces pastorianus
ggtcgggatcattatcacttccata

SEQ ID NO: 23754 - DNA, 25 bp, Saccharomyces pastorianus
gaagttactcatcccagccgaagaa

SEQ ID NO: 23755 - DNA, 25 bp, Saccharomyces pastorianus
caagtgtttgcctacgtggatcgta

SEQ ID NO: 23756 - DNA, 25 bp, Saccharomyces pastorianus
ttactggccttgtctgggttatcat

SEQ ID NO: 23757 - DNA, 25 bp, Saccharomyces pastorianus
agggaatgctaacccgcgagatcat

SEQ ID NO: 23758 - DNA, 25 bp, Saccharomyces pastorianus
atatcatggtctttgctcatggcca

SEQ ID NO: 23759 - DNA, 25 bp, Saccharomyces pastorianus
tacgtgccaggcaaaccgtggactt

SEQ ID NO: 23760 - DNA, 25 bp, Saccharomyces pastorianus
gatcggtgtgttgtcgtacgcgcat

SEQ ID NO: 23761 - DNA, 25 bp, Saccharomyces pastorianus
gtgccatcggcagaatccagaactt

SEQ ID NO: 23762 - DNA, 25 bp, Saccharomyces pastorianus
gtacgcgcatcacaacattgacgag

SEQ ID NO: 23763 - DNA, 25 bp, Saccharomyces pastorianus
gagaccacccagcagatcgggttga

SEQ ID NO: 23764 - DNA, 25 bp, Saccharomyces pastorianus
agctggactcttacagacacttggt

SEQ ID NO: 23765 - DNA, 25 bp, Saccharomyces pastorianus
gagacagtcccatacgttaagctgg

SEQ ID NO: 23766 - DNA, 25 bp, Saccharomyces pastorianus
gacacttggtcgacaatccgtgctt

SEQ ID NO: 23767 - DNA, 25 bp, Saccharomyces pastorianus
tgcattggaactagcgggcccattt

SEQ ID NO: 23768 - DNA, 25 bp, Saccharomyces pastorianus
gaggtcctagacatggaacccgata

SEQ ID NO: 23769 - DNA, 25 bp, Saccharomyces pastorianus
gacgtgtctacaagcgagttccatt

SEQ ID NO: 23770 - DNA, 25 bp, Saccharomyces pastorianus
gctgcggtgcattgaatggccaatt

SEQ ID NO: 23771 - DNA, 25 bp, Saccharomyces pastorianus
agcgcgatcctggttgtctggcatt

SEQ ID NO: 23772 - DNA, 25 bp, Saccharomyces pastorianus
gaagatcgacatccagtatgccaaa

SEQ ID NO: 23773 - DNA, 25 bp, Saccharomyces pastorianus
gttctcattcgaggctgttcagcgc

SEQ ID NO: 23774 - DNA, 25 bp, Saccharomyces pastorianus
tgtctggcattacagcgaactcctg

SEQ ID NO: 23775 - DNA, 25 bp, Saccharomyces pastorianus
acaaagatacatcggctgcggtgca

SEQ ID NO: 23776 - DNA, 25 bp, Saccharomyces pastorianus
tcatcggcatataccttgtttctgt

SEQ ID NO: 23777 - DNA, 25 bp, Saccharomyces pastorianus
gatcgagaccgtggaacttctggac

SEQ ID NO: 23778 - DNA, 25 bp, Saccharomyces pastorianus
gaactcctgctcttgatcatcggca

SEQ ID NO: 23779 - DNA, 25 bp, Saccharomyces pastorianus
agatcggctctaccggagacgacaa

SEQ ID NO: 23780 - DNA, 25 bp, Saccharomyces pastorianus
caccgacaagttgcagtccgtgtac

SEQ ID NO: 23781 - DNA, 25 bp, Saccharomyces pastorianus
aaagccatcgtgtccaccggattgg

SEQ ID NO: 23782 - DNA, 25 bp, Saccharomyces pastorianus
tgagcaagtccgaaagcgtccccaa

SEQ ID NO: 23783 - DNA, 25 bp, Saccharomyces pastorianus
agggagttccttatcaagcctctgc

SEQ ID NO: 23784 - DNA, 25 bp, Saccharomyces pastorianus
gacaacaaggtcagcgactcttcgt

SEQ ID NO: 23785 - DNA, 25 bp, Saccharomyces pastorianus
caagctggacgagttggtcaacctt

SEQ ID NO: 23786 - DNA, 25 bp, Saccharomyces pastorianus
ggacctgggcaatgctactatcgag

SEQ ID NO: 23787 - DNA, 25 bp, Saccharomyces pastorianus
ggtgttgatggcttgctgtacgatt

SEQ ID NO: 23788 - DNA, 25 bp, Saccharomyces pastorianus
gattggaagtcgcattctggcaccc

SEQ ID NO: 23789 - DNA, 25 bp, Saccharomyces pastorianus
aacatctctaacacgctgttgaggg

SEQ ID NO: 23790 - DNA, 25 bp, Saccharomyces pastorianus
caaccacgcaccatttcgttgttta

SEQ ID NO: 23791 - DNA, 25 bp, Saccharomyces pastorianus
tatcgcaccggttcgacgtcgagat

SEQ ID NO: 23792 - DNA, 25 bp, Saccharomyces pastorianus
attgcagaggcagatccccaagctt

SEQ ID NO: 23793 - DNA, 25 bp, Saccharomyces pastorianus
tgaagagcgacgtatcgcaccggtt

SEQ ID NO: 23794 - DNA, 25 bp, Saccharomyces pastorianus
ccagaagggtctgtggaatccgcag

SEQ ID NO: 23795 - DNA, 25 bp, Saccharomyces pastorianus
agtacatgaagacgtcgtgcccgca

SEQ ID NO: 23796 - DNA, 25 bp, Saccharomyces pastorianus
atctcaagtcgcagaagtgcctcca

SEQ ID NO: 23797 - DNA, 25 bp, Saccharomyces pastorianus
agcttgccgcagtgctcaagtacaa

SEQ ID NO: 23798 - DNA, 25 bp, Saccharomyces pastorianus
cagggcacgacgtcattgcagaggc

SEQ ID NO: 23799 - DNA, 25 bp, Saccharomyces pastorianus
cgtgggaccaactgcagtacatgaa

SEQ ID NO: 23800 - DNA, 25 bp, Saccharomyces pastorianus
aagtgcctccagtcgctgaagagcg

SEQ ID NO: 23801 - DNA, 25 bp, Saccharomyces pastorianus
tgcagtagctttcccctggacaaaa

SEQ ID NO: 23802 - DNA, 25 bp, Saccharomyces pastorianus
taagaattttgatcctgaagccatg

SEQ ID NO: 23803 - DNA, 25 bp, Saccharomyces pastorianus
tgatgatccaaactacccagtcgtt

SEQ ID NO: 23804 - DNA, 25 bp, Saccharomyces pastorianus
atccaggttcttgttgttaccggca

SEQ ID NO: 23805 - DNA, 25 bp, Saccharomyces pastorianus
ggatgaaattcctatacgcactaag

SEQ ID NO: 23806 - DNA, 25 bp, Saccharomyces pastorianus
aatggtcccatttgccatcttgcat

SEQ ID NO: 23807 - DNA, 25 bp, Saccharomyces pastorianus
gcttctgtgcattgaaatggtccca

SEQ ID NO: 23808 - DNA, 25 bp, Saccharomyces pastorianus
gattgccttggttgtggtgatctga

SEQ ID NO: 23809 - DNA, 25 bp, Saccharomyces pastorianus
gataattttcgcctcttactggcaa

SEQ ID NO: 23810 - DNA, 25 bp, Saccharomyces pastorianus
tggccagagatctttccctgatgat

SEQ ID NO: 23811 - DNA, 25 bp, Saccharomyces pastorianus
caaacattgtttgctggtcctttat

SEQ ID NO: 23812 - DNA, 25 bp, Saccharomyces pastorianus
attaaccacgcctttggactgtata

SEQ ID NO: 23813 - DNA, 25 bp, Saccharomyces pastorianus
gtagcgagactgtttctatcggaat

SEQ ID NO: 23814 - DNA, 25 bp, Saccharomyces pastorianus
gtctgctagcaagtacttcaaccca

SEQ ID NO: 23815 - DNA, 25 bp, Saccharomyces pastorianus
gaaggacgccaatactttcggcaga

SEQ ID NO: 23816 - DNA, 25 bp, Saccharomyces pastorianus
acgaattctgcaaagctcgcttgat

SEQ ID NO: 23817 - DNA, 25 bp, Saccharomyces pastorianus
ggtactgttgctactattgctgctg

SEQ ID NO: 23818 - DNA, 25 bp, Saccharomyces pastorianus
agtggtgccacttgtgccgcattaa

SEQ ID NO: 23819 - DNA, 25 bp, Saccharomyces pastorianus
gatatgcagacacatcagccaatga

SEQ ID NO: 23820 - DNA, 25 bp, Saccharomyces pastorianus
gcggcgttttattattcctatccaa

SEQ ID NO: 23821 - DNA, 25 bp, Saccharomyces pastorianus
tgaacatcccatttgctgctttcaa

SEQ ID NO: 23822 - DNA, 25 bp, Saccharomyces pastorianus
gcttcgagagctatactggaggttc

SEQ ID NO: 23823 - DNA, 25 bp, Saccharomyces pastorianus
cgcctatcatgctgattggcctgaa

SEQ ID NO: 23824 - DNA, 25 bp, Saccharomyces pastorianus
gactttcccgacagattatatccca

SEQ ID NO: 23825 - DNA, 25 bp, Saccharomyces pastorianus
tagtagactcagaccgctctcatac

SEQ ID NO: 23826 - DNA, 25 bp, Saccharomyces pastorianus
gacctatacgaagctgatgacctct

SEQ ID NO: 23827 - DNA, 25 bp, Saccharomyces pastorianus
tgacctctcagatttggtggatcct

SEQ ID NO: 23828 - DNA, 25 bp, Saccharomyces pastorianus
aaacgccgatgtcctaatgatttgt

SEQ ID NO: 23829 - DNA, 25 bp, Saccharomyces pastorianus
atagaactagcgctgtgggacactg

SEQ ID NO: 23830 - DNA, 25 bp, Saccharomyces pastorianus
gattccctgtattctaaggagcctt

SEQ ID NO: 23831 - DNA, 25 bp, Saccharomyces pastorianus
atgtccaatgctcagctcggttgaa

SEQ ID NO: 23832 - DNA, 25 bp, Saccharomyces pastorianus
gaagatctttggtttccggaggtca

SEQ ID NO: 23833 - DNA, 25 bp, Saccharomyces pastorianus
acacacattgctatttgattccctg

SEQ ID NO: 23834 - DNA, 25 bp, Saccharomyces pastorianus
gacgacaaattcactgtttccgcca

SEQ ID NO: 23835 - DNA, 25 bp, Saccharomyces pastorianus
gttggtgctatgagagaaatcgaaa

SEQ ID NO: 23836 - DNA, 25 bp, Saccharomyces pastorianus
tgctaccaccaactactcaagttgt

SEQ ID NO: 23837 - DNA, 25 bp, Saccharomyces pastorianus
gatttgccatccaacaaggaaaact

SEQ ID NO: 23838 - DNA, 25 bp, Saccharomyces pastorianus
actacgatttgccatccaacaagga

SEQ ID NO: 23839 - DNA, 25 bp, Saccharomyces pastorianus
caccaagttgagagacgacaaattc

SEQ ID NO: 23840 - DNA, 25 bp, Saccharomyces pastorianus
atcaactacgatttgccatccaaca

SEQ ID NO: 23841 - DNA, 25 bp, Saccharomyces pastorianus
aatgtttgaccgatttgtacgattc

SEQ ID NO: 23842 - DNA, 25 bp, Saccharomyces pastorianus
cactgtttccgccatctactctgat

SEQ ID NO: 23843 - DNA, 25 bp, Saccharomyces pastorianus
gacttcaagtatgaatgtttgaccg

SEQ ID NO: 23844 - DNA, 25 bp, Saccharomyces pastorianus
aaattcactgtttccgccatctact

SEQ ID NO: 23845 - DNA, 25 bp, Saccharomyces pastorianus
gtgctcggcaacagattttatcatg

SEQ ID NO: 23846 - DNA, 25 bp, Saccharomyces pastorianus
atggccgagaaatgcgacccaattt

SEQ ID NO: 23847 - DNA, 25 bp, Saccharomyces pastorianus
taagtgtcagagtcgggcacatcca

SEQ ID NO: 23848 - DNA, 25 bp, Saccharomyces pastorianus
gtttacctatataccgattctcaga

SEQ ID NO: 23849 - DNA, 25 bp, Saccharomyces pastorianus
gacccaatttatgtgagagcgcaac

SEQ ID NO: 23850 - DNA, 25 bp, Saccharomyces pastorianus
gacgtggtgaatttcctgactgaca

SEQ ID NO: 23851 - DNA, 25 bp, Saccharomyces pastorianus
cgggcacatccaaaagcatactcta

SEQ ID NO: 23852 - DNA, 25 bp, Saccharomyces pastorianus
atttacttcctgatgtgctcggcaa

SEQ ID NO: 23853 - DNA, 25 bp, Saccharomyces pastorianus
gatccatccaccctgtatagagaaa

SEQ ID NO: 23854 - DNA, 25 bp, Saccharomyces pastorianus
tatagagtccaccatttacttcctg

SEQ ID NO: 23855 - DNA, 25 bp, Saccharomyces pastorianus
gactagcaacagtaccagtttacct

SEQ ID NO: 23856 - DNA, 25 bp, Saccharomyces pastorianus
gtgatttcccttacgatccatttaa

SEQ ID NO: 23857 - DNA, 25 bp, Saccharomyces pastorianus
ttgtctccaatttcgattttttcgg

SEQ ID NO: 23858 - DNA, 25 bp, Saccharomyces pastorianus
acatatgccttttggtacatgcccg

SEQ ID NO: 23859 - DNA, 25 bp, Saccharomyces pastorianus
gaaactccaagaaagatgcctctgt

SEQ ID NO: 23860 - DNA, 25 bp, Saccharomyces pastorianus
tgcccgtctgcatactacatgaaac

SEQ ID NO: 23861 - DNA, 25 bp, Saccharomyces pastorianus
attccgagtttatgggacgctgtcg

SEQ ID NO: 23862 - DNA, 25 bp, Saccharomyces pastorianus
gacgcaccagtgcattcgattgccg

SEQ ID NO: 23863 - DNA, 25 bp, Saccharomyces pastorianus
cgacctcaacgtcattagctgtttg

SEQ ID NO: 23864 - DNA, 25 bp, Saccharomyces pastorianus
tgcctctgtgatagcaatcatcctg

SEQ ID NO: 23865 - DNA, 25 bp, Saccharomyces pastorianus
atggctttgctattactatgtatga

SEQ ID NO: 23866 - DNA, 25 bp, Saccharomyces pastorianus
tcgattgccgtgtcactcttattaa

SEQ ID NO: 23867 - DNA, 25 bp, Saccharomyces pastorianus
gatctttcaagtatctttccaccta

SEQ ID NO: 23868 - DNA, 25 bp, Saccharomyces pastorianus
tgccacaatttgcagaattaccgag

SEQ ID NO: 23869 - DNA, 25 bp, Saccharomyces pastorianus
ggtaagcctgtgttggtcaatgagt

SEQ ID NO: 23870 - DNA, 25 bp, Saccharomyces pastorianus
gatgaagtcatcaattcgttggagg

SEQ ID NO: 23871 - DNA, 25 bp, Saccharomyces pastorianus
gttcattccccatcagaattactca

SEQ ID NO: 23872 - DNA, 25 bp, Saccharomyces pastorianus
aagcctgctagtgttgatccggcaa

SEQ ID NO: 23873 - DNA, 25 bp, Saccharomyces pastorianus
ggatttaaaggacggctggccacaa

SEQ ID NO: 23874 - DNA, 25 bp, Saccharomyces pastorianus
tttggtacaatagcggcggtaactt

SEQ ID NO: 23875 - DNA, 25 bp, Saccharomyces pastorianus
gtatctttccacctatgatgttcat

SEQ ID NO: 23876 - DNA, 25 bp, Saccharomyces pastorianus
aagagtcacgattcatccaagttat

SEQ ID NO: 23877 - DNA, 25 bp, Saccharomyces pastorianus
gggagaatgtccagctgccacaatt

SEQ ID NO: 23878 - DNA, 25 bp, Saccharomyces pastorianus
gtcccgctttgaagactgttaccaa

SEQ ID NO: 23879 - DNA, 25 bp, Saccharomyces pastorianus
gacaatttgacagcacggtggaggt

SEQ ID NO: 23880 - DNA, 25 bp, Saccharomyces pastorianus
taatactgtatctttgccggtccat

SEQ ID NO: 23881 - DNA, 25 bp, Saccharomyces pastorianus
aggcgatttggcatctttaaagcag

SEQ ID NO: 23882 - DNA, 25 bp, Saccharomyces pastorianus
agacagcttatcgtcaaggtttaac

SEQ ID NO: 23883 - DNA, 25 bp, Saccharomyces pastorianus
ggacgtcataataggcaatcttaat

SEQ ID NO: 23884 - DNA, 25 bp, Saccharomyces pastorianus
ggaagttaatcgaatgggttgccaa

SEQ ID NO: 23885 - DNA, 25 bp, Saccharomyces pastorianus
aaaagtttacgatctcatccccagg

SEQ ID NO: 23886 - DNA, 25 bp, Saccharomyces pastorianus
aacacgagggtgagacggctacatc

SEQ ID NO: 23887 - DNA, 25 bp, Saccharomyces pastorianus
agaaggagtctagtcccgctttgaa

SEQ ID NO: 23888 - DNA, 25 bp, Saccharomyces pastorianus
tatctttgccggtccatgctaacta

SEQ ID NO: 23889 - DNA, 25 bp, Saccharomyces pastorianus
gctttgaatactatcgctgttttaa

SEQ ID NO: 23890 - DNA, 25 bp, Saccharomyces pastorianus
aaacggaccgcacaccaaaacattg

SEQ ID NO: 23891 - DNA, 25 bp, Saccharomyces pastorianus
gaagaaacgttgtcaggccctgtca

SEQ ID NO: 23892 - DNA, 25 bp, Saccharomyces pastorianus
accgctatacccgtcaatgatcttg

SEQ ID NO: 23893 - DNA, 25 bp, Saccharomyces pastorianus
ggaatctcgtccgtatactttaacg

SEQ ID NO: 23894 - DNA, 25 bp, Saccharomyces pastorianus
gaccactttcaagtttcatcttcga

SEQ ID NO: 23895 - DNA, 25 bp, Saccharomyces pastorianus
tcaccccataggcagatacgacgat

SEQ ID NO: 23896 - DNA, 25 bp, Saccharomyces pastorianus
tacaacgggtatggatcggatatct

SEQ ID NO: 23897 - DNA, 25 bp, Saccharomyces pastorianus
gatgtttgtccagtcatgtcgcaat

SEQ ID NO: 23898 - DNA, 25 bp, Saccharomyces pastorianus
ggaataatgagtttcaccccatagg

SEQ ID NO: 23899 - DNA, 25 bp, Saccharomyces pastorianus
attttctcatccttttacgaccatg

SEQ ID NO: 23900 - DNA, 25 bp, Saccharomyces pastorianus
gaaaccgtttactgccgtcacgttg

SEQ ID NO: 23901 - DNA, 25 bp, Saccharomyces pastorianus
aatagggtcgatgcatcgtctcaaa

SEQ ID NO: 23902 - DNA, 25 bp, Saccharomyces pastorianus
aaactccactggcttgacatggtct

SEQ ID NO: 23903 - DNA, 25 bp, Saccharomyces pastorianus
atcagctccattagattgtcctcac

SEQ ID NO: 23904 - DNA, 25 bp, Saccharomyces pastorianus
ctgttccagactactacggcgagaa

SEQ ID NO: 23905 - DNA, 25 bp, Saccharomyces pastorianus
gattgtcctcacaaagactcttggt

SEQ ID NO: 23906 - DNA, 25 bp, Saccharomyces pastorianus
ggagaatcaacgtgggctcttcgct

SEQ ID NO: 23907 - DNA, 25 bp, Saccharomyces pastorianus
aacggcactacccttaagatcatat

SEQ ID NO: 23908 - DNA, 25 bp, Saccharomyces pastorianus
ttgggccctatagttggttcgcaaa

SEQ ID NO: 23909 - DNA, 25 bp, Saccharomyces pastorianus
gacatggtctgacttcttcaagttg

SEQ ID NO: 23910 - DNA, 25 bp, Saccharomyces pastorianus
gtaatatttcgtgggcttacctctc

SEQ ID NO: 23911 - DNA, 25 bp, Saccharomyces pastorianus
tacgtcaggacgttcttccagagat

SEQ ID NO: 23912 - DNA, 25 bp, Saccharomyces pastorianus
gcagaacggcttcaacttcctggag

SEQ ID NO: 23913 - DNA, 25 bp, Saccharomyces pastorianus
gttcttcaaggacttctctaaggtt

SEQ ID NO: 23914 - DNA, 25 bp, Saccharomyces pastorianus
gggcgcacgctctgggaaagactca

SEQ ID NO: 23915 - DNA, 25 bp, Saccharomyces pastorianus
cggtattgatttccccaaggacgca

SEQ ID NO: 23916 - DNA, 25 bp, Saccharomyces pastorianus
acttgttcagtctgggcggtgtcac

SEQ ID NO: 23917 - DNA, 25 bp, Saccharomyces pastorianus
agttcccatggatctcgtcaggtga

SEQ ID NO: 23918 - DNA, 25 bp, Saccharomyces pastorianus
gagcccatccataaggagttcccat

SEQ ID NO: 23919 - DNA, 25 bp, Saccharomyces pastorianus
ggtcgacagcccagagaataccact

SEQ ID NO: 23920 - DNA, 25 bp, Saccharomyces pastorianus
tgaccagggcgctgactacgtcagg

SEQ ID NO: 23921 - DNA, 25 bp, Saccharomyces pastorianus
aagactcacctgaagaactccgggt

SEQ ID NO: 23922 - DNA, 25 bp, Saccharomyces pastorianus
ggacgagaatcccttggcagacttt

SEQ ID NO: 23923 - DNA, 25 bp, Saccharomyces pastorianus
gatgaagtcactctggtattccaat

SEQ ID NO: 23924 - DNA, 25 bp, Saccharomyces pastorianus
atttttctaaacatcacgcccagta

SEQ ID NO: 23925 - DNA, 25 bp, Saccharomyces pastorianus
ggactcattttcgttgatcttggac

SEQ ID NO: 23926 - DNA, 25 bp, Saccharomyces pastorianus
atggcgtctaccacacaatcgaggt

SEQ ID NO: 23927 - DNA, 25 bp, Saccharomyces pastorianus
tttagctaggacagcgttgccacgt

SEQ ID NO: 23928 - DNA, 25 bp, Saccharomyces pastorianus
ataacattgggtgcaggctcattga

SEQ ID NO: 23929 - DNA, 25 bp, Saccharomyces pastorianus
ccaatatcttgtgcggtgttctgaa

SEQ ID NO: 23930 - DNA, 25 bp, Saccharomyces pastorianus
tggctccatagtggcgcaattgtgt

SEQ ID NO: 23931 - DNA, 25 bp, Saccharomyces pastorianus
cgttgccacgttgcgaaactctaat

SEQ ID NO: 23932 - DNA, 25 bp, Saccharomyces pastorianus
gagttgcccatggacgcgatgaagt

SEQ ID NO: 23933 - DNA, 25 bp, Saccharomyces pastorianus
aaatcaggatttactatgggccaat

SEQ ID NO: 23934 - DNA, 25 bp, Saccharomyces pastorianus
tgaccctcatgattgggcagctgat

SEQ ID NO: 23935 - DNA, 25 bp, Saccharomyces pastorianus
attaggcaccaagccttcagtttct

SEQ ID NO: 23936 - DNA, 25 bp, Saccharomyces pastorianus
gcaagatttcactttgggtaaacct

SEQ ID NO: 23937 - DNA, 25 bp, Saccharomyces pastorianus
tcaaggtgccttccgtttgttggtt

SEQ ID NO: 23938 - DNA, 25 bp, Saccharomyces pastorianus
tcggtgataaccctgcaagtgatat

SEQ ID NO: 23939 - DNA, 25 bp, Saccharomyces pastorianus
gattttgcgcatcatgtccttattg

SEQ ID NO: 23940 - DNA, 25 bp, Saccharomyces pastorianus
cactcagtgttcatggtcggtgata

SEQ ID NO: 23941 - DNA, 25 bp, Saccharomyces pastorianus
ttcagtttctccatttcactcagtg

SEQ ID NO: 23942 - DNA, 25 bp, Saccharomyces pastorianus
gccgtgttagtgtttaatgaccctc

SEQ ID NO: 23943 - DNA, 25 bp, Saccharomyces pastorianus
gagagattccggatttgactactaa

SEQ ID NO: 23944 - DNA, 25 bp, Saccharomyces pastorianus
atctagtgactcttctaaagctcaa

SEQ ID NO: 23945 - DNA, 25 bp, Saccharomyces pastorianus
aagtgccctttttcaaaatagctga

SEQ ID NO: 23946 - DNA, 25 bp, Saccharomyces pastorianus
tgtggctcttgctctctaggcgacg

SEQ ID NO: 23947 - DNA, 25 bp, Saccharomyces pastorianus
atgcagcgggtgtccttatttaggt

SEQ ID NO: 23948 - DNA, 25 bp, Saccharomyces pastorianus
ttatttaggtctgcctgctttcaag

SEQ ID NO: 23949 - DNA, 25 bp, Saccharomyces pastorianus
gataccaagctacccgcattcaaga

SEQ ID NO: 23950 - DNA, 25 bp, Saccharomyces pastorianus
taggcgacgcctttagatgcagcgg

SEQ ID NO: 23951 - DNA, 25 bp, Saccharomyces pastorianus
tgagttgactgagatcgatttcact

SEQ ID NO: 23952 - DNA, 25 bp, Saccharomyces pastorianus
ggatgactctagcaaacccatgatt

SEQ ID NO: 23953 - DNA, 25 bp, Saccharomyces pastorianus
tacatgcggcaaatccaagactaaa

SEQ ID NO: 23954 - DNA, 25 bp, Saccharomyces pastorianus
agcagacgacgctaaagtgcccttt

SEQ ID NO: 23955 - DNA, 25 bp, Saccharomyces pastorianus
gaaaccgagctgtcattgttcaaca

SEQ ID NO: 23956 - DNA, 25 bp, Saccharomyces pastorianus
gtaatgttgcatatgacactctaaa

SEQ ID NO: 23957 - DNA, 25 bp, Saccharomyces pastorianus
atgccaggccgctaaagaattctgt

SEQ ID NO: 23958 - DNA, 25 bp, Saccharomyces pastorianus
tcatgcacacggttccaagacggtt

SEQ ID NO: 23959 - DNA, 25 bp, Saccharomyces pastorianus
aaccgcgagggatctgttcaatgat

SEQ ID NO: 23960 - DNA, 25 bp, Saccharomyces pastorianus
gttattaacttcgaccacgacgacg

SEQ ID NO: 23961 - DNA, 25 bp, Saccharomyces pastorianus
taagacccttccgtaatgttgcata

SEQ ID NO: 23962 - DNA, 25 bp, Saccharomyces pastorianus
aaagactacgacatggaggagccat

SEQ ID NO: 23963 - DNA, 25 bp, Saccharomyces pastorianus
tacgatcttgcagagaaaaccgcga

SEQ ID NO: 23964 - DNA, 25 bp, Saccharomyces pastorianus
atatactcatgcacacggttccaag

SEQ ID NO: 23965 - DNA, 25 bp, Saccharomyces pastorianus
gacgacgactggattttagacttgg

SEQ ID NO: 23966 - DNA, 25 bp, Saccharomyces pastorianus
cgtgctgtatggtccggatttgact

SEQ ID NO: 23967 - DNA, 25 bp, Saccharomyces pastorianus
cccgctctctatcaactggaacaag

SEQ ID NO: 23968 - DNA, 25 bp, Saccharomyces pastorianus
atatctcatgcgcatcatctgtgga

SEQ ID NO: 23969 - DNA, 25 bp, Saccharomyces pastorianus
caattcacgagtcccttgtcaatat

SEQ ID NO: 23970 - DNA, 25 bp, Saccharomyces pastorianus
caactattcattcggcgccatggaa

SEQ ID NO: 23971 - DNA, 25 bp, Saccharomyces pastorianus
aatgtggcctacacagcaaccgagt

SEQ ID NO: 23972 - DNA, 25 bp, Saccharomyces pastorianus
aaacgatgtacaacgtcctcgtcat

SEQ ID NO: 23973 - DNA, 25 bp, Saccharomyces pastorianus
ggaaaccgacgtaaccgtgctgtat

SEQ ID NO: 23974 - DNA, 25 bp, Saccharomyces pastorianus
tggactctcacacatcatctatttt

SEQ ID NO: 23975 - DNA, 25 bp, Saccharomyces pastorianus
agaacgcctccctaggaaattgaag

SEQ ID NO: 23976 - DNA, 25 bp, Saccharomyces pastorianus
attctacatgtactaaggcctcttc

SEQ ID NO: 23977 - DNA, 25 bp, Saccharomyces pastorianus
aatatcttcgccgtgggagaccaat

SEQ ID NO: 23978 - DNA, 25 bp, Saccharomyces pastorianus
tcgatgcgtttaattcctgggtcta

SEQ ID NO: 23979 - DNA, 25 bp, Saccharomyces pastorianus
tgtcctgtgggacctggagactcaa

SEQ ID NO: 23980 - DNA, 25 bp, Saccharomyces pastorianus
gttcctgaacatctcaaacccgaaa

SEQ ID NO: 23981 - DNA, 25 bp, Saccharomyces pastorianus
gattcgaccctgtttatgttcagca

SEQ ID NO: 23982 - DNA, 25 bp, Saccharomyces pastorianus
catccggatattgaactctagtgcg

SEQ ID NO: 23983 - DNA, 25 bp, Saccharomyces pastorianus
ggtacactacggatttcgatcatat

SEQ ID NO: 23984 - DNA, 25 bp, Saccharomyces pastorianus
aagaaggtggatcttgttcctgaac

SEQ ID NO: 23985 - DNA, 25 bp, Saccharomyces pastorianus
cagagatggatacccgttcactcat

SEQ ID NO: 23986 - DNA, 25 bp, Saccharomyces pastorianus
gccgacatcaggctgtatactacta

SEQ ID NO: 23987 - DNA, 25 bp, Saccharomyces pastorianus
tatcaagctgcattatacgcgttcc

SEQ ID NO: 23988 - DNA, 25 bp, Saccharomyces pastorianus
aggacaaccaacttcgaatctacga

SEQ ID NO: 23989 - DNA, 25 bp, Saccharomyces pastorianus
aagattgatagaccctcttcccata

SEQ ID NO: 23990 - DNA, 25 bp, Saccharomyces pastorianus
gccaattgcttttcagtttaccact

SEQ ID NO: 23991 - DNA, 25 bp, Saccharomyces pastorianus
aataccaatctcttgatgtcgccac

SEQ ID NO: 23992 - DNA, 25 bp, Saccharomyces pastorianus
gaagtaatccctcaggactcgaact

SEQ ID NO: 23993 - DNA, 25 bp, Saccharomyces pastorianus
ggactcgaactacccagatagatct

SEQ ID NO: 23994 - DNA, 25 bp, Saccharomyces pastorianus
acttcaatcctcaccaagacaattt

SEQ ID NO: 23995 - DNA, 25 bp, Saccharomyces pastorianus
tgagaagaccttcactaccgcacat

SEQ ID NO: 23996 - DNA, 25 bp, Saccharomyces pastorianus
aaaacttcacatctcctaatgcagc

SEQ ID NO: 23997 - DNA, 25 bp, Saccharomyces pastorianus
aaatctagctctccaagaactccaa

SEQ ID NO: 23998 - DNA, 25 bp, Saccharomyces pastorianus
atacaactttctctcaagcgtcgat

SEQ ID NO: 23999 - DNA, 25 bp, Saccharomyces pastorianus
tgaggccattggtgtttctaacgaa

SEQ ID NO: 24000 - DNA, 25 bp, Saccharomyces pastorianus
aaagatatcccaagttgccccaact

SEQ ID NO: 24001 - DNA, 25 bp, Saccharomyces pastorianus
attgattcacgaagccacactagaa

SEQ ID NO: 24002 - DNA, 25 bp, Saccharomyces pastorianus
ggacacaaattcttcgtacagggat

SEQ ID NO: 24003 - DNA, 25 bp, Saccharomyces pastorianus
gaacagcagaccgtttttccgttgt

SEQ ID NO: 24004 - DNA, 25 bp, Saccharomyces pastorianus
gggatatcaacctaattaaccaaat

SEQ ID NO: 24005 - DNA, 25 bp, Saccharomyces pastorianus
gaattttgttttgcctttgatagta

SEQ ID NO: 24006 - DNA, 25 bp, Saccharomyces pastorianus
agttgattttgacgcatttttccca

SEQ ID NO: 24007 - DNA, 25 bp, Saccharomyces pastorianus
catatttccagacatgcagagcaat

SEQ ID NO: 24008 - DNA, 25 bp, Saccharomyces pastorianus
ggaattttcttctgcaattggttat

SEQ ID NO: 24009 - DNA, 25 bp, Saccharomyces pastorianus
ttgcgattgggcatattcgaattca

SEQ ID NO: 24010 - DNA, 25 bp, Saccharomyces pastorianus
acgatggtgccacagtgtactcggt

SEQ ID NO: 24011 - DNA, 25 bp, Saccharomyces pastorianus
aaaggaatgcgctcttgacgccgac

SEQ ID NO: 24012 - DNA, 25 bp, Saccharomyces pastorianus
gtactcggtggacgtcaacaacatt

SEQ ID NO: 24013 - DNA, 25 bp, Saccharomyces pastorianus
aagatggcgccgtatgcatcaactt

SEQ ID NO: 24014 - DNA, 25 bp, Saccharomyces pastorianus
attggcggctcttttggctaacgat

SEQ ID NO: 24015 - DNA, 25 bp, Saccharomyces pastorianus
gacgccgacgttgtcatcacaggtg

SEQ ID NO: 24016 - DNA, 25 bp, Saccharomyces pastorianus
aattgtcggcagaccattggcggct

SEQ ID NO: 24017 - DNA, 25 bp, Saccharomyces pastorianus
gtcaccatcgctatgttgctgagaa

SEQ ID NO: 24018 - DNA, 25 bp, Saccharomyces pastorianus
acaggtgtccctagcgagaactaca

SEQ ID NO: 24019 - DNA, 25 bp, Saccharomyces pastorianus
accccactagccattgtcaagatat

SEQ ID NO: 24020 - DNA, 25 bp, Saccharomyces pastorianus
aaaccgcttaaaatccattctgcct

SEQ ID NO: 24021 - DNA, 25 bp, Saccharomyces pastorianus
gaggcgaaactactgacttgcaaga

SEQ ID NO: 24022 - DNA, 25 bp, Saccharomyces pastorianus
gattggacctcgtttggacttcaaa

SEQ ID NO: 24023 - DNA, 25 bp, Saccharomyces pastorianus
gtgacaagctgggtagaatccacat

SEQ ID NO: 24024 - DNA, 25 bp, Saccharomyces pastorianus
cggtgagccattaccaaacgttcta

SEQ ID NO: 24025 - DNA, 25 bp, Saccharomyces pastorianus
cgtcgtattccgaggagggacaaga

SEQ ID NO: 24026 - DNA, 25 bp, Saccharomyces pastorianus
aagacatggtcattgaagctcacaa

SEQ ID NO: 24027 - DNA, 25 bp, Saccharomyces pastorianus
ttaaaacccaaattcgatcaaagcg

SEQ ID NO: 24028 - DNA, 25 bp, Saccharomyces pastorianus
gaatccatactccaactcaagacat

SEQ ID NO: 24029 - DNA, 25 bp, Saccharomyces pastorianus
gatacacatcccgtttataagcagg

SEQ ID NO: 24030 - DNA, 25 bp, Saccharomyces pastorianus
aaaagcagaagaacgcgacggcgac

SEQ ID NO: 24031 - DNA, 25 bp, Saccharomyces pastorianus
acttgcaagatgttgcgggtttaca

SEQ ID NO: 24032 - DNA, 25 bp, Saccharomyces pastorianus
gactactttctgtcgacggagactt

SEQ ID NO: 24033 - DNA, 25 bp, Saccharomyces pastorianus
gttaatctagactccatacgcgaag

SEQ ID NO: 24034 - DNA, 25 bp, Saccharomyces pastorianus
aactcactggagatcaaactacgct

SEQ ID NO: 24035 - DNA, 25 bp, Saccharomyces pastorianus
gttgaattcggataactcactggag

SEQ ID NO: 24036 - DNA, 25 bp, Saccharomyces pastorianus
gataaatcgttagtgaccccagagt

SEQ ID NO: 24037 - DNA, 25 bp, Saccharomyces pastorianus
aactacgctcaactattgggtctgt

SEQ ID NO: 24038 - DNA, 25 bp, Saccharomyces pastorianus
aacctagatgcaattgatgccgaaa

SEQ ID NO: 24039 - DNA, 25 bp, Saccharomyces pastorianus
aactgcttcagcacatagtcatgcg

SEQ ID NO: 24040 - DNA, 25 bp, Saccharomyces pastorianus
tagcgttttcaatgacgttttcaac

SEQ ID NO: 24041 - DNA, 25 bp, Saccharomyces pastorianus
aaaggcaatgaattccccttgccca

SEQ ID NO: 24042 - DNA, 25 bp, Saccharomyces pastorianus
gtggatctcctgtgcgataaatcgt

SEQ ID NO: 24043 - DNA, 25 bp, Saccharomyces pastorianus
aaatgggtacaaatgcggaagcagt

SEQ ID NO: 24044 - DNA, 25 bp, Saccharomyces pastorianus
gttgcagaagataacgagcctgacc

SEQ ID NO: 24045 - DNA, 25 bp, Saccharomyces pastorianus
gaagcagttgcgcagttgatgaaca

SEQ ID NO: 24046 - DNA, 25 bp, Saccharomyces pastorianus
atcacaggctagtttgggcttgcta

SEQ ID NO: 24047 - DNA, 25 bp, Saccharomyces pastorianus
tttgggcttgctacaatacgcggaa

SEQ ID NO: 24048 - DNA, 25 bp, Saccharomyces pastorianus
ctgaaacttcaactagtcaagctga

SEQ ID NO: 24049 - DNA, 25 bp, Saccharomyces pastorianus
tgacgaagaggaagatctggtaccc

SEQ ID NO: 24050 - DNA, 25 bp, Saccharomyces pastorianus
agcgaaaagaactgcagtcgttgca

SEQ ID NO: 24051 - DNA, 25 bp, Saccharomyces pastorianus
gagcctgaccgatggactgaaactt

SEQ ID NO: 24052 - DNA, 25 bp, Saccharomyces pastorianus
aagaaacgtgagtctgaacagcaaa

SEQ ID NO: 24053 - DNA, 25 bp, Saccharomyces pastorianus
aagatctaggatcccacgagaaaaa

SEQ ID NO: 24054 - DNA, 25 bp, Saccharomyces pastorianus
gatggattcctctactaactgttag

SEQ ID NO: 24055 - DNA, 25 bp, Saccharomyces pastorianus
gtccattcggcacaagttttcatct

SEQ ID NO: 24056 - DNA, 25 bp, Saccharomyces pastorianus
tgggttcaaaacaaagggctctggt

SEQ ID NO: 24057 - DNA, 25 bp, Saccharomyces pastorianus
aagtaggttctcaacagggacaatc

SEQ ID NO: 24058 - DNA, 25 bp, Saccharomyces pastorianus
gagattacgcaaagcttacccagaa

SEQ ID NO: 24059 - DNA, 25 bp, Saccharomyces pastorianus
catttattcttttcattggcgtcaa

SEQ ID NO: 24060 - DNA, 25 bp, Saccharomyces pastorianus
gctcaattcagcctggtgaatcttt

SEQ ID NO: 24061 - DNA, 25 bp, Saccharomyces pastorianus
aagacggcgacttggctgcatcagt

SEQ ID NO: 24062 - DNA, 25 bp, Saccharomyces pastorianus
atatccgtcggagcaaagttgcatc

SEQ ID NO: 24063 - DNA, 25 bp, Saccharomyces pastorianus
gaatagacccttgctaccaggaaca

SEQ ID NO: 24064 - DNA, 25 bp, Saccharomyces pastorianus
gattatttatctgtccattcggcac

SEQ ID NO: 24065 - DNA, 25 bp, Saccharomyces pastorianus
atggcaactaatgaccctcggaagg

SEQ ID NO: 24066 - DNA, 25 bp, Saccharomyces pastorianus
gcgtatcgccgttatttgtatcatt

SEQ ID NO: 24067 - DNA, 25 bp, Saccharomyces pastorianus
aacagtttgggtttccgcagacaca

SEQ ID NO: 24068 - DNA, 25 bp, Saccharomyces pastorianus
cacacgtaaggttttggccgccaag

SEQ ID NO: 24069 - DNA, 25 bp, Saccharomyces pastorianus
gaatgcattatcagccatcagaatc

SEQ ID NO: 24070 - DNA, 25 bp, Saccharomyces pastorianus
gagaaccctcagaagtacacacgta

SEQ ID NO: 24071 - DNA, 25 bp, Saccharomyces pastorianus
atcgccacgggttccatcaatagtg

SEQ ID NO: 24072 - DNA, 25 bp, Saccharomyces pastorianus
ttcctcgtagcttcatggcaactaa

SEQ ID NO: 24073 - DNA, 25 bp, Saccharomyces pastorianus
aatagtgaaaccgttcctcgtagct

SEQ ID NO: 24074 - DNA, 25 bp, Saccharomyces pastorianus
aggagttcgatatgcctgctcaggt

SEQ ID NO: 24075 - DNA, 25 bp, Saccharomyces pastorianus
gtgtgccgcagatcatttagtacca

SEQ ID NO: 24076 - DNA, 25 bp, Saccharomyces pastorianus
ttggtgttcaactgcatcccactag

SEQ ID NO: 24077 - DNA, 25 bp, Saccharomyces pastorianus
tgttcatttgaagactggcgttggt

SEQ ID NO: 24078 - DNA, 25 bp, Saccharomyces pastorianus
aatcacttgtcagagcacgggacat

SEQ ID NO: 24079 - DNA, 25 bp, Saccharomyces pastorianus
ggaatacggcgggttgctctacgac

SEQ ID NO: 24080 - DNA, 25 bp, Saccharomyces pastorianus
attcccgtagtctcttctggtaaag

SEQ ID NO: 24081 - DNA, 25 bp, Saccharomyces pastorianus
acgggacatccgagaccaactatta

SEQ ID NO: 24082 - DNA, 25 bp, Saccharomyces pastorianus
atcccactagcgcattgcatggatt

SEQ ID NO: 24083 - DNA, 25 bp, Saccharomyces pastorianus
tcctggtatctcaaaacattcccgt

SEQ ID NO: 24084 - DNA, 25 bp, Saccharomyces pastorianus
ggttgctctacgacattaagcgcgt

SEQ ID NO: 24085 - DNA, 25 bp, Saccharomyces pastorianus
tgatttgccaccctacgttatatat

SEQ ID NO: 24086 - DNA, 25 bp, Saccharomyces pastorianus
agctctaagggatggcgtggtacaa

SEQ ID NO: 24087 - DNA, 25 bp, Saccharomyces pastorianus
ctccattgtctccttcatagtattt

SEQ ID NO: 24088 - DNA, 25 bp, Saccharomyces pastorianus
ttactgtccactactactgggctga

SEQ ID NO: 24089 - DNA, 25 bp, Saccharomyces pastorianus
ttactccttaactaacggcgccatt

SEQ ID NO: 24090 - DNA, 25 bp, Saccharomyces pastorianus
taacgttagctttcgggtctgtgac

SEQ ID NO: 24091 - DNA, 25 bp, Saccharomyces pastorianus
gaatccgagtctactgggtccagag

SEQ ID NO: 24092 - DNA, 25 bp, Saccharomyces pastorianus
tactgagattatgcccattccctta

SEQ ID NO: 24093 - DNA, 25 bp, Saccharomyces pastorianus
ttgcaaaaccaagagcgccacgtat

SEQ ID NO: 24094 - DNA, 25 bp, Saccharomyces pastorianus
atgatcggatactccttactgtcca

SEQ ID NO: 24095 - DNA, 25 bp, Saccharomyces pastorianus
aacggcgccattgctggtgtttacg

SEQ ID NO: 24096 - DNA, 25 bp, Saccharomyces pastorianus
gatagtgctgctattctttgtcgca

SEQ ID NO: 24097 - DNA, 25 bp, Saccharomyces pastorianus
gcatggctactgtacttcaaaacta

SEQ ID NO: 24098 - DNA, 25 bp, Saccharomyces pastorianus
taaagagctcgccatttcgctcaag

SEQ ID NO: 24099 - DNA, 25 bp, Saccharomyces pastorianus
agttgcctctccaacatcgagaata

SEQ ID NO: 24100 - DNA, 25 bp, Saccharomyces pastorianus
ccctgtggacgtcaaagcctatggt

SEQ ID NO: 24101 - DNA, 25 bp, Saccharomyces pastorianus
tgcttcgttgaatccgcatcatcaa

SEQ ID NO: 24102 - DNA, 25 bp, Saccharomyces pastorianus
aggtattccataacatctgcttcgt

SEQ ID NO: 24103 - DNA, 25 bp, Saccharomyces pastorianus
ttgtcccacattctgctagtattga

SEQ ID NO: 24104 - DNA, 25 bp, Saccharomyces pastorianus
tggccgattgatgttccctgtggac

SEQ ID NO: 24105 - DNA, 25 bp, Saccharomyces pastorianus
gaaactgcattttggccggaagaat

SEQ ID NO: 24106 - DNA, 25 bp, Saccharomyces pastorianus
gaacgcattgtacgcagatccagag

SEQ ID NO: 24107 - DNA, 25 bp, Saccharomyces pastorianus
aatctttctcattttcagttgcctc

SEQ ID NO: 24108 - DNA, 25 bp, Saccharomyces pastorianus
aaaaaggcatcctctggccgattga

SEQ ID NO: 24109 - DNA, 25 bp, Saccharomyces pastorianus
gatcaacttcgaggcttgggaatta

SEQ ID NO: 24110 - DNA, 25 bp, Saccharomyces pastorianus
atttttccagagtagagagggccaa

SEQ ID NO: 24111 - DNA, 25 bp, Saccharomyces pastorianus
acttccgtttcatccgatgctagta

SEQ ID NO: 24112 - DNA, 25 bp, Saccharomyces pastorianus
gacggcgaaagaaagcatttttcca

SEQ ID NO: 24113 - DNA, 25 bp, Saccharomyces pastorianus
ggttcttatagaggtggttccatca

SEQ ID NO: 24114 - DNA, 25 bp, Saccharomyces pastorianus
cctataaaggtgctgctggtacatg

SEQ ID NO: 24115 - DNA, 25 bp, Saccharomyces pastorianus
tctaatgaatctactccatccactt

SEQ ID NO: 24116 - DNA, 25 bp, Saccharomyces pastorianus
agggccaagatcaacttcgaggctt

SEQ ID NO: 24117 - DNA, 25 bp, Saccharomyces pastorianus
gaaacccctgcttcttctaatgaat

SEQ ID NO: 24118 - DNA, 25 bp, Saccharomyces pastorianus
gggaattaacagacaacacctataa

SEQ ID NO: 24119 - DNA, 25 bp, Saccharomyces pastorianus
ttgaatattccagccggaaccgatg

SEQ ID NO: 24120 - DNA, 25 bp, Saccharomyces pastorianus
gaaatttttgcctccatcactggtt

SEQ ID NO: 24121 - DNA, 25 bp, Saccharomyces pastorianus
tcgcttgtttcatttctggttgttt

SEQ ID NO: 24122 - DNA, 25 bp, Saccharomyces pastorianus
aaggccggtccatggtatagtgcgc

SEQ ID NO: 24123 - DNA, 25 bp, Saccharomyces pastorianus
gtatgtcttgatttccttttcggaa

SEQ ID NO: 24124 - DNA, 25 bp, Saccharomyces pastorianus
ttgggttcatgttcgggtctcttgc

SEQ ID NO: 24125 - DNA, 25 bp, Saccharomyces pastorianus
aatgcctttggttccgccattggtt

SEQ ID NO: 24126 - DNA, 25 bp, Saccharomyces pastorianus
cattgccttaatcattttcatcccg

SEQ ID NO: 24127 - DNA, 25 bp, Saccharomyces pastorianus
attggttgtgccttgtctccagtca

SEQ ID NO: 24128 - DNA, 25 bp, Saccharomyces pastorianus
atggttattcactgggttggccgtc

SEQ ID NO: 24129 - DNA, 25 bp, Saccharomyces pastorianus
gcagattcctgcgtatgtcttgatt

SEQ ID NO: 24130 - DNA, 25 bp, Saccharomyces pastorianus
atgtcgattttcctgttgaccaatg

SEQ ID NO: 24131 - DNA, 25 bp, Saccharomyces pastorianus
aacggcagtaacaattcggagacta

SEQ ID NO: 24132 - DNA, 25 bp, Saccharomyces pastorianus
gtcagatgaccaggaaatcgacttg

SEQ ID NO: 24133 - DNA, 25 bp, Saccharomyces pastorianus
gtttacgggtaatgtcgcaacgcat

SEQ ID NO: 24134 - DNA, 25 bp, Saccharomyces pastorianus
gaggcactcagcacgtatattcaag

SEQ ID NO: 24135 - DNA, 25 bp, Saccharomyces pastorianus
ggagaacgcaaaccaaccgcacgct

SEQ ID NO: 24136 - DNA, 25 bp, Saccharomyces pastorianus
cgcttccacttatcgtttcaattat

SEQ ID NO: 24137 - DNA, 25 bp, Saccharomyces pastorianus
gcgacatcatggttgaggcactcag

SEQ ID NO: 24138 - DNA, 25 bp, Saccharomyces pastorianus
ggctattgaaatttgctatctgctt

SEQ ID NO: 24139 - DNA, 25 bp, Saccharomyces pastorianus
gtcgcaacgcatatcgaggagaact

SEQ ID NO: 24140 - DNA, 25 bp, Saccharomyces pastorianus
acatacttcgtctttgatgcgacat

SEQ ID NO: 24141 - DNA, 25 bp, Saccharomyces pastorianus
agcgaggacctgttcttgaagtgtt

SEQ ID NO: 24142 - DNA, 25 bp, Saccharomyces pastorianus
ggactgtcccaagtgtagaactact

SEQ ID NO: 24143 - DNA, 25 bp, Saccharomyces pastorianus
aaaccattccggaaatcttgtcaat

SEQ ID NO: 24144 - DNA, 25 bp, Saccharomyces pastorianus
gtacgcaatagtaaaccattccgga

SEQ ID NO: 24145 - DNA, 25 bp, Saccharomyces pastorianus
ggatttcattgttttgcctccaata

SEQ ID NO: 24146 - DNA, 25 bp, Saccharomyces pastorianus
tattcaatttgcactccagatcaag

SEQ ID NO: 24147 - DNA, 25 bp, Saccharomyces pastorianus
ggtgacaatgcttgggactgtccca

SEQ ID NO: 24148 - DNA, 25 bp, Saccharomyces pastorianus
gatgatgcgacagataactccaaaa

SEQ ID NO: 24149 - DNA, 25 bp, Saccharomyces pastorianus
tgcggtcgttcggtataagctgtac

SEQ ID NO: 24150 - DNA, 25 bp, Saccharomyces pastorianus
acagatttgggtcacgtttgatgat

SEQ ID NO: 24151 - DNA, 25 bp, Saccharomyces pastorianus
gtcaatggacattacacttctgtag

SEQ ID NO: 24152 - DNA, 25 bp, Saccharomyces pastorianus
gcctccaatactagtcatccattta

SEQ ID NO: 24153 - DNA, 25 bp, Saccharomyces pastorianus
ttaaccgtattgatcagtccgagat

SEQ ID NO: 24154 - DNA, 25 bp, Saccharomyces pastorianus
ggtaacgaaaccacatcccatgtag

SEQ ID NO: 24155 - DNA, 25 bp, Saccharomyces pastorianus
aagcggtttaggttccaacagtgag

SEQ ID NO: 24156 - DNA, 25 bp, Saccharomyces pastorianus
gatacgacctcatttgggctcatca

SEQ ID NO: 24157 - DNA, 25 bp, Saccharomyces pastorianus
tcaagatccgatactccgttaagag

SEQ ID NO: 24158 - DNA, 25 bp, Saccharomyces pastorianus
gagatctttagccactacgaaccca

SEQ ID NO: 24159 - DNA, 25 bp, Saccharomyces pastorianus
ttgatatgacgtctggtggctctac

SEQ ID NO: 24160 - DNA, 25 bp, Saccharomyces pastorianus
acagcctccagttgagaagcctact

SEQ ID NO: 24161 - DNA, 25 bp, Saccharomyces pastorianus
ttcctctctgacgaccaacaaattt

SEQ ID NO: 24162 - DNA, 25 bp, Saccharomyces pastorianus
ttatttacctccaacgatacgacct

SEQ ID NO: 24163 - DNA, 25 bp, Saccharomyces pastorianus
gtacaccagggcatcgtagcacata

SEQ ID NO: 24164 - DNA, 25 bp, Saccharomyces pastorianus
gttttacctgacatgccactattag

SEQ ID NO: 24165 - DNA, 25 bp, Saccharomyces pastorianus
gaggacgttatctcaaaacccttct

SEQ ID NO: 24166 - DNA, 25 bp, Saccharomyces pastorianus
aacggttcctaatttccatgagcta

SEQ ID NO: 24167 - DNA, 25 bp, Saccharomyces pastorianus
agcccagctggacaatttcaacaag

SEQ ID NO: 24168 - DNA, 25 bp, Saccharomyces pastorianus
attgcagcctacgtaaaatgtcttg

SEQ ID NO: 24169 - DNA, 25 bp, Saccharomyces pastorianus
gaattcatagataacggtgcgcgca

SEQ ID NO: 24170 - DNA, 25 bp, Saccharomyces pastorianus
cacgataatggtttgctgcgagatg

SEQ ID NO: 24171 - DNA, 25 bp, Saccharomyces pastorianus
gtattagtttcaaccagtctgcata

SEQ ID NO: 24172 - DNA, 25 bp, Saccharomyces pastorianus
cttctacgtcgggttatcagtgcac

SEQ ID NO: 24173 - DNA, 25 bp, Saccharomyces pastorianus
aaatctctgcatcaggttttacctg

SEQ ID NO: 24174 - DNA, 25 bp, Saccharomyces pastorianus
ggcccacacccagaagatattgatt

SEQ ID NO: 24175 - DNA, 25 bp, Saccharomyces pastorianus
agatatcgaccttgacagcggacat

SEQ ID NO: 24176 - DNA, 25 bp, Saccharomyces pastorianus
atgatcgctgtctacatcggacaca

SEQ ID NO: 24177 - DNA, 25 bp, Saccharomyces pastorianus
ggttctgtatctgcttttgtcaaat

SEQ ID NO: 24178 - DNA, 25 bp, Saccharomyces pastorianus
ggacacaggatttaccgcaaagatt

SEQ ID NO: 24179 - DNA, 25 bp, Saccharomyces pastorianus
agctctgccgctaatttctttgaat

SEQ ID NO: 24180 - DNA, 25 bp, Saccharomyces pastorianus
ttctaggctcattcaaggtcttgct

SEQ ID NO: 24181 - DNA, 25 bp, Saccharomyces pastorianus
aaggtcttgctacagcaggccagct

SEQ ID NO: 24182 - DNA, 25 bp, Saccharomyces pastorianus
tgcgttgtgttctatttcctttttt

SEQ ID NO: 24183 - DNA, 25 bp, Saccharomyces pastorianus
aaatatacgtatcagctgcgccggt

SEQ ID NO: 24184 - DNA, 25 bp, Saccharomyces pastorianus
ggccagcttccaaagatttgcggct

SEQ ID NO: 24185 - DNA, 25 bp, Saccharomyces pastorianus
gtggtgcttttggacttttaggctt

SEQ ID NO: 24186 - DNA, 25 bp, Saccharomyces pastorianus
aggttaccagtgacgcatatccatc

SEQ ID NO: 24187 - DNA, 25 bp, Saccharomyces pastorianus
caacagattgtccaaaccctttcaa

SEQ ID NO: 24188 - DNA, 25 bp, Saccharomyces pastorianus
ggatacgctgtttgcggataccatt

SEQ ID NO: 24189 - DNA, 25 bp, Saccharomyces pastorianus
accgattcacagacatgccttcaga

SEQ ID NO: 24190 - DNA, 25 bp, Saccharomyces pastorianus
tatccatccactagttagggtccac

SEQ ID NO: 24191 - DNA, 25 bp, Saccharomyces pastorianus
gagtccaacattccgctgtgattga

SEQ ID NO: 24192 - DNA, 25 bp, Saccharomyces pastorianus
ggaaccccgcacagttgtagtttgg

SEQ ID NO: 24193 - DNA, 25 bp, Saccharomyces pastorianus
ggacgtttcttacgagctacagccg

SEQ ID NO: 24194 - DNA, 25 bp, Saccharomyces pastorianus
tcatgtcatccacagctcgaaggag

SEQ ID NO: 24195 - DNA, 25 bp, Saccharomyces pastorianus
cgccttcgtatacttttttcactgt

SEQ ID NO: 24196 - DNA, 25 bp, Saccharomyces pastorianus
tagggtccaccctgttttgaagaag

SEQ ID NO: 24197 - DNA, 25 bp, Saccharomyces pastorianus
gaagttcggtgtgtctatttgcaat

SEQ ID NO: 24198 - DNA, 25 bp, Saccharomyces pastorianus
ggtttcgcagtggtttgtgccctta

SEQ ID NO: 24199 - DNA, 25 bp, Saccharomyces pastorianus
agccattctgttgttaatccacttc

SEQ ID NO: 24200 - DNA, 25 bp, Saccharomyces pastorianus
gcaagctcaagtgcctctggatata

SEQ ID NO: 24201 - DNA, 25 bp, Saccharomyces pastorianus
agtatcggtcgctggagcaggtttc

SEQ ID NO: 24202 - DNA, 25 bp, Saccharomyces pastorianus
ggattcccttcattatagctcttag

SEQ ID NO: 24203 - DNA, 25 bp, Saccharomyces pastorianus
cgctgccttaccatgggacaacaaa

SEQ ID NO: 24204 - DNA, 25 bp, Saccharomyces pastorianus
aagcgatacttcttcttctaacgaa

SEQ ID NO: 24205 - DNA, 25 bp, Saccharomyces pastorianus
gcaacttggcagtgttcgacctgac

SEQ ID NO: 24206 - DNA, 25 bp, Saccharomyces pastorianus
gcccttattgcttctttgacgttaa

SEQ ID NO: 24207 - DNA, 25 bp, Saccharomyces pastorianus
attggtaggatccattgctgccgct

SEQ ID NO: 24208 - DNA, 25 bp, Saccharomyces pastorianus
agtgtgttatagtgattaaaccgaa

SEQ ID NO: 24209 - DNA, 25 bp, Saccharomyces pastorianus
gggtcatatataaccagatcttgaa

SEQ ID NO: 24210 - DNA, 25 bp, Saccharomyces pastorianus
agatcttgaaatcgctgaacggtaa

SEQ ID NO: 24211 - DNA, 25 bp, Saccharomyces pastorianus
atcgctgaacggtaagctacagctc

SEQ ID NO: 24212 - DNA, 25 bp, Saccharomyces pastorianus
cgaaagacgggcttaccagggtcat

SEQ ID NO: 24213 - DNA, 25 bp, Saccharomyces pastorianus
gggcttaccagggtcatatataacc

SEQ ID NO: 24214 - DNA, 25 bp, Saccharomyces pastorianus
gaaatcgctgaacggtaagctacag

SEQ ID NO: 24215 - DNA, 25 bp, Saccharomyces pastorianus
taccagggtcatatataaccagatc

SEQ ID NO: 24216 - DNA, 25 bp, Saccharomyces pastorianus
aaagacgggcttaccagggtcatat

SEQ ID NO: 24217 - DNA, 25 bp, Saccharomyces pastorianus
gacgggcttaccagggtcatatata

SEQ ID NO: 24218 - DNA, 25 bp, Saccharomyces pastorianus
ttatagtgattaaaccgaaagacgg

SEQ ID NO: 24219 - DNA, 25 bp, Saccharomyces pastorianus
gaggctacagcttccattgattata

SEQ ID NO: 24220 - DNA, 25 bp, Saccharomyces pastorianus
gatgtgtcttgcgagatctttgcta

SEQ ID NO: 24221 - DNA, 25 bp, Saccharomyces pastorianus
gatcatccatattcgttattgctaa

SEQ ID NO: 24222 - DNA, 25 bp, Saccharomyces pastorianus
acctcatcagccgactcagaaaatg

SEQ ID NO: 24223 - DNA, 25 bp, Saccharomyces pastorianus
aaacgtgttaatctagtcagcgaag

SEQ ID NO: 24224 - DNA, 25 bp, Saccharomyces pastorianus
tctttgaggctctaaaacgtgttaa

SEQ ID NO: 24225 - DNA, 25 bp, Saccharomyces pastorianus
ggtgaccaatgatacctcatcagcc

SEQ ID NO: 24226 - DNA, 25 bp, Saccharomyces pastorianus
gatcttggttatggacgctggtgaa

SEQ ID NO: 24227 - DNA, 25 bp, Saccharomyces pastorianus
gatccaactttgttttcagggacaa

SEQ ID NO: 24228 - DNA, 25 bp, Saccharomyces pastorianus
ggaagcacaatattaactatcgcac

SEQ ID NO: 24229 - DNA, 25 bp, Saccharomyces pastorianus
gaaggtgggtccaacttgtcacaag

SEQ ID NO: 24230 - DNA, 25 bp, Saccharomyces pastorianus
gggtgttccatacgctatcgtaaag

SEQ ID NO: 24231 - DNA, 25 bp, Saccharomyces pastorianus
tacgctatcgtaaagggtaaggcca

SEQ ID NO: 24232 - DNA, 25 bp, Saccharomyces pastorianus
gctgccgccattgctgaaggtaaat

SEQ ID NO: 24233 - DNA, 25 bp, Saccharomyces pastorianus
tgctgaaggtaaatccaagcaagac

SEQ ID NO: 24234 - DNA, 25 bp, Saccharomyces pastorianus
taaccaaaagacctccgccgtcgct

SEQ ID NO: 24235 - DNA, 25 bp, Saccharomyces pastorianus
atcgtaaagggtaaggccagattag

SEQ ID NO: 24236 - DNA, 25 bp, Saccharomyces pastorianus
aagccattcgccatcaagtacggtt

SEQ ID NO: 24237 - DNA, 25 bp, Saccharomyces pastorianus
attcgccatcaagtacggtttgaac

SEQ ID NO: 24238 - DNA, 25 bp, Saccharomyces pastorianus
cgccgtcgctgctttgactgaagtc

SEQ ID NO: 24239 - DNA, 25 bp, Saccharomyces pastorianus
ttctccaaagccattcgccatcaag

SEQ ID NO: 24240 - DNA, 25 bp, Saccharomyces pastorianus
gccgccattgctgaaggtaaatcca

SEQ ID NO: 24241 - DNA, 25 bp, Saccharomyces pastorianus
gaaacagcttcactaggtgcgacta

SEQ ID NO: 24242 - DNA, 25 bp, Saccharomyces pastorianus
gtccaatttaagtctgttcagcgtg

SEQ ID NO: 24243 - DNA, 25 bp, Saccharomyces pastorianus
ttttgtcataaatgcctccatggcc

SEQ ID NO: 24244 - DNA, 25 bp, Saccharomyces pastorianus
gagtgatttctcctacaacaacgat

SEQ ID NO: 24245 - DNA, 25 bp, Saccharomyces pastorianus
gaatttggctcgtgacttaggccca

SEQ ID NO: 24246 - DNA, 25 bp, Saccharomyces pastorianus
gtgcgactaccacagattccatggg

SEQ ID NO: 24247 - DNA, 25 bp, Saccharomyces pastorianus
atggcctatcaaacgggtacagcaa

SEQ ID NO: 24248 - DNA, 25 bp, Saccharomyces pastorianus
gaacgttcggaggtataccaaccat

SEQ ID NO: 24249 - DNA, 25 bp, Saccharomyces pastorianus
gatacaccaccatcatttcttttgg

SEQ ID NO: 24250 - DNA, 25 bp, Saccharomyces pastorianus
cgccttgtacgctgttggatttgac

SEQ ID NO: 24251 - DNA, 25 bp, Saccharomyces pastorianus
gtaggtccatttcttggtgcattaa

SEQ ID NO: 24252 - DNA, 25 bp, Saccharomyces pastorianus
gaacaagatgctaccctaaccttta

SEQ ID NO: 24253 - DNA, 25 bp, Saccharomyces pastorianus
aatctattcagccttacttgcagag

SEQ ID NO: 24254 - DNA, 25 bp, Saccharomyces pastorianus
ggaaagccatgctgaacaactccat

SEQ ID NO: 24255 - DNA, 25 bp, Saccharomyces pastorianus
ggatttggtgcctgatttgactaat

SEQ ID NO: 24256 - DNA, 25 bp, Saccharomyces pastorianus
cctatggtattggatgcgttgctga

SEQ ID NO: 24257 - DNA, 25 bp, Saccharomyces pastorianus
tttgtgtgcatgttgttctacttca

SEQ ID NO: 24258 - DNA, 25 bp, Saccharomyces pastorianus
aaagatttaccccttgcctcatatg

SEQ ID NO: 24259 - DNA, 25 bp, Saccharomyces pastorianus
gcttatcgttggctcattgactcga

SEQ ID NO: 24260 - DNA, 25 bp, Saccharomyces pastorianus
cgccgttctaatgcaagcttatcgt

SEQ ID NO: 24261 - DNA, 25 bp, Saccharomyces pastorianus
gaacaactccatgtctttatacaga

SEQ ID NO: 24262 - DNA, 25 bp, Saccharomyces pastorianus
aagtgctgcagagtattccggaccg

SEQ ID NO: 24263 - DNA, 25 bp, Saccharomyces pastorianus
tgaatacctgtcacacgtcatcttg

SEQ ID NO: 24264 - DNA, 25 bp, Saccharomyces pastorianus
cagcagagtgcgtttaccaaggtac

SEQ ID NO: 24265 - DNA, 25 bp, Saccharomyces pastorianus
actttggaaagatccggcctccaga

SEQ ID NO: 24266 - DNA, 25 bp, Saccharomyces pastorianus
tatcagtgaccctatggaacgccgg

SEQ ID NO: 24267 - DNA, 25 bp, Saccharomyces pastorianus
ggtatgatcggactgccaactaaga

SEQ ID NO: 24268 - DNA, 25 bp, Saccharomyces pastorianus
ggaacgccggtctctgtacagaaat

SEQ ID NO: 24269 - DNA, 25 bp, Saccharomyces pastorianus
gggctattcgtccatccagggaatt

SEQ ID NO: 24270 - DNA, 25 bp, Saccharomyces pastorianus
cgaatacttcatccctatcagtgac

SEQ ID NO: 24271 - DNA, 25 bp, Saccharomyces pastorianus
tggattcctggatctcacaagtaat

SEQ ID NO: 24272 - DNA, 25 bp, Saccharomyces pastorianus
aaatattgctattgccgtcagagag

SEQ ID NO: 24273 - DNA, 25 bp, Saccharomyces pastorianus
gctcagtcatttgctagtaccctag

SEQ ID NO: 24274 - DNA, 25 bp, Saccharomyces pastorianus
cgacacgatcgacaatgtaaagagt

SEQ ID NO: 24275 - DNA, 25 bp, Saccharomyces pastorianus
cagaactttgtcggactataacatt

SEQ ID NO: 24276 - DNA, 25 bp, Saccharomyces pastorianus
gagggcattcctccggaccaacaga

SEQ ID NO: 24277 - DNA, 25 bp, Saccharomyces pastorianus
taaagagggcattcctccggaccaa

SEQ ID NO: 24278 - DNA, 25 bp, Saccharomyces pastorianus
aagagggcattcctccggaccaaca

SEQ ID NO: 24279 - DNA, 25 bp, Saccharomyces pastorianus
cggaccaacagaggttgatttttgc

SEQ ID NO: 24280 - DNA, 25 bp, Saccharomyces pastorianus
acacgatcgacaatgtaaagagtaa

SEQ ID NO: 24281 - DNA, 25 bp, Saccharomyces pastorianus
gataaagagggcattcctccggacc

SEQ ID NO: 24282 - DNA, 25 bp, Saccharomyces pastorianus
gtaagatacaggataaagagggcat

SEQ ID NO: 24283 - DNA, 25 bp, Saccharomyces pastorianus
ctccggaccaacagaggttgatttt

SEQ ID NO: 24284 - DNA, 25 bp, Saccharomyces pastorianus
ataaagagggcattcctccggacca

SEQ ID NO: 24285 - DNA, 25 bp, Saccharomyces pastorianus
accattactttggaggtcgagtcct

SEQ ID NO: 24286 - DNA, 25 bp, Saccharomyces pastorianus
gagtcctccgacacgatcgacaatg

SEQ ID NO: 24287 - DNA, 25 bp, Saccharomyces pastorianus
gagtcttctgacaccatcgacaacg

SEQ ID NO: 24288 - DNA, 25 bp, Saccharomyces pastorianus
atcgacaacgtcaagtccaagattc

SEQ ID NO: 24289 - DNA, 25 bp, Saccharomyces pastorianus
aaccttagaggtcgagtcttctgac

SEQ ID NO: 24290 - DNA, 25 bp, Saccharomyces pastorianus
gactggtaagaccataaccttagag

SEQ ID NO: 24291 - DNA, 25 bp, Saccharomyces pastorianus
gaactttgtcggactataacattca

SEQ ID NO: 24292 - DNA, 25 bp, Saccharomyces pastorianus
ctccggaccaacagaggttgatttt

SEQ ID NO: 24293 - DNA, 25 bp, Saccharomyces pastorianus
ggtatgcaaatcttcgtcaagacac

SEQ ID NO: 24294 - DNA, 25 bp, Saccharomyces pastorianus
atcttcgtcaagacactgactggta

SEQ ID NO: 24295 - DNA, 25 bp, Saccharomyces pastorianus
ataaagagggcattcctccggacca

SEQ ID NO: 24296 - DNA, 25 bp, Saccharomyces pastorianus
tggcggcacaagcagactatcgttt

SEQ ID NO: 24297 - DNA, 25 bp, Saccharomyces pastorianus
gatcatccagatcatccgaaagcgg

SEQ ID NO: 24298 - DNA, 25 bp, Saccharomyces pastorianus
ggaggaactcacaccgcagctgtat

SEQ ID NO: 24299 - DNA, 25 bp, Saccharomyces pastorianus
tggacttccagagacaacgcactaa

SEQ ID NO: 24300 - DNA, 25 bp, Saccharomyces pastorianus
gactttcaggtccaggatacccggg

SEQ ID NO: 24301 - DNA, 25 bp, Saccharomyces pastorianus
agtgaagactctcctagtgcagctg

SEQ ID NO: 24302 - DNA, 25 bp, Saccharomyces pastorianus
actgacgctggtgtcgtacttgatg

SEQ ID NO: 24303 - DNA, 25 bp, Saccharomyces pastorianus
acgctcgattttcattagtgcctct

SEQ ID NO: 24304 - DNA, 25 bp, Saccharomyces pastorianus
cgaaagcggctgttacttgggcaga

SEQ ID NO: 24305 - DNA, 25 bp, Saccharomyces pastorianus
aaggacgtgatccaattccggtcga

SEQ ID NO: 24306 - DNA, 25 bp, Saccharomyces pastorianus
tttgacgtacagtcccaagacggta

SEQ ID NO: 24307 - DNA, 25 bp, Saccharomyces pastorianus
catccggtttcccatggaattccaa

SEQ ID NO: 24308 - DNA, 25 bp, Saccharomyces pastorianus
cgcttttgaaatcggctcctttaca

SEQ ID NO: 24309 - DNA, 25 bp, Saccharomyces pastorianus
ttacgattttgctccgcttttgaaa

SEQ ID NO: 24310 - DNA, 25 bp, Saccharomyces pastorianus
aattagattacgattttgctccgct

SEQ ID NO: 24311 - DNA, 25 bp, Saccharomyces pastorianus
ggctcctttacagatttcatacggt

SEQ ID NO: 24312 - DNA, 25 bp, Saccharomyces pastorianus
acgtggtatccaaggcatccggttt

SEQ ID NO: 24313 - DNA, 25 bp, Saccharomyces pastorianus
gcttcacctgctaggttccatgcat

SEQ ID NO: 24314 - DNA, 25 bp, Saccharomyces pastorianus
ccatgcatcacaactacgaactttc

SEQ ID NO: 24315 - DNA, 25 bp, Saccharomyces pastorianus
atttaaatcacgcttcacctgctag

SEQ ID NO: 24316 - DNA, 25 bp, Saccharomyces pastorianus
aaggcatccggtttcccatggaatt

SEQ ID NO: 24317 - DNA, 25 bp, Saccharomyces pastorianus
tacggtggagataaacgtggtatcc

SEQ ID NO: 24318 - DNA, 25 bp, Saccharomyces pastorianus
tgatcgttgttccttttctgcaaac

SEQ ID NO: 24319 - DNA, 25 bp, Saccharomyces pastorianus
agataaacctatagatgctcgcaag

SEQ ID NO: 24320 - DNA, 25 bp, Saccharomyces pastorianus
ttacaacggacttggttacggctat

SEQ ID NO: 24321 - DNA, 25 bp, Saccharomyces pastorianus
aaatgccaggcgtgacaccagcaga

SEQ ID NO: 24322 - DNA, 25 bp, Saccharomyces pastorianus
acgtcaaacaaacagcctcaactac

SEQ ID NO: 24323 - DNA, 25 bp, Saccharomyces pastorianus
aatgctaaccacaatgctactaatg

SEQ ID NO: 24324 - DNA, 25 bp, Saccharomyces pastorianus
aagaccttatcactttcactattga

SEQ ID NO: 24325 - DNA, 25 bp, Saccharomyces pastorianus
gagctcgggccatcaagggatacat

SEQ ID NO: 24326 - DNA, 25 bp, Saccharomyces pastorianus
gaatggcgcgtttggtcatgaatac

SEQ ID NO: 24327 - DNA, 25 bp, Saccharomyces pastorianus
caaccgaattgctatctgattacat

SEQ ID NO: 24328 - DNA, 25 bp, Saccharomyces pastorianus
tttgggaagtccaccacaacgtcaa

SEQ ID NO: 24329 - DNA, 25 bp, Saccharomyces pastorianus
atagccatcatcctgaacacttttg

SEQ ID NO: 24330 - DNA, 25 bp, Saccharomyces pastorianus
ctggctcaattatcatacttcctca

SEQ ID NO: 24331 - DNA, 25 bp, Saccharomyces pastorianus
caagatttatcttcgctgctttgag

SEQ ID NO: 24332 - DNA, 25 bp, Saccharomyces pastorianus
tagggctcttatcataccaacactt

SEQ ID NO: 24333 - DNA, 25 bp, Saccharomyces pastorianus
aattggtccaattgccttagggctc

SEQ ID NO: 24334 - DNA, 25 bp, Saccharomyces pastorianus
ggacctcaaattctcgtttctttat

SEQ ID NO: 24335 - DNA, 25 bp, Saccharomyces pastorianus
gtcacagcctccagatgtcttaaag

SEQ ID NO: 24336 - DNA, 25 bp, Saccharomyces pastorianus
gttcggagtttttcctcttagtcat

SEQ ID NO: 24337 - DNA, 25 bp, Saccharomyces pastorianus
gtcactcaactggtggtcacattcg

SEQ ID NO: 24338 - DNA, 25 bp, Saccharomyces pastorianus
atttatctgggttactcacttccgt

SEQ ID NO: 24339 - DNA, 25 bp, Saccharomyces pastorianus
attcggcaccattgcatttgctagt

SEQ ID NO: 24340 - DNA, 25 bp, Saccharomyces pastorianus
gagagattggtgttccctgaagaca

SEQ ID NO: 24341 - DNA, 25 bp, Saccharomyces pastorianus
gccagacagtttctatggtcgcgtg

SEQ ID NO: 24342 - DNA, 25 bp, Saccharomyces pastorianus
atcataagcaacgagcccgggtact

SEQ ID NO: 24343 - DNA, 25 bp, Saccharomyces pastorianus
agaacggtggtgcatttcctgcaac

SEQ ID NO: 24344 - DNA, 25 bp, Saccharomyces pastorianus
ggatcttttctgaacgtccacgaag

SEQ ID NO: 24345 - DNA, 25 bp, Saccharomyces pastorianus
ggaaactgatcaacaccaagctact

SEQ ID NO: 24346 - DNA, 25 bp, Saccharomyces pastorianus
agtatcgacgccattgccagacagt

SEQ ID NO: 24347 - DNA, 25 bp, Saccharomyces pastorianus
tccggttcgcagttcctggaaggaa

SEQ ID NO: 24348 - DNA, 25 bp, Saccharomyces pastorianus
gtcgcgtgggctggactacaagcac

SEQ ID NO: 24349 - DNA, 25 bp, Saccharomyces pastorianus
tttcctgcaacctcaaagtatctca

SEQ ID NO: 24350 - DNA, 25 bp, Saccharomyces pastorianus
gatggacaactacacgctggttctc

SEQ ID NO: 24351 - DNA, 25 bp, Saccharomyces pastorianus
atcatcgagtcgtacttgcctttgg

SEQ ID NO: 24352 - DNA, 25 bp, Saccharomyces pastorianus
tgaattgccgtatatcgccttgatt

SEQ ID NO: 24353 - DNA, 25 bp, Saccharomyces pastorianus
gattgtactccatgatcgttgcagg

SEQ ID NO: 24354 - DNA, 25 bp, Saccharomyces pastorianus
acagtaggcggttccttcattgggt

SEQ ID NO: 24355 - DNA, 25 bp, Saccharomyces pastorianus
gtgtgtgctgcttttatctggtaca

SEQ ID NO: 24356 - DNA, 25 bp, Saccharomyces pastorianus
agaagcctaccctcttgtgtttgtg

SEQ ID NO: 24357 - DNA, 25 bp, Saccharomyces pastorianus
acggtatcctgtatctactgctaga

SEQ ID NO: 24358 - DNA, 25 bp, Saccharomyces pastorianus
ccgtgcctctgctgtttttgaaata

SEQ ID NO: 24359 - DNA, 25 bp, Saccharomyces pastorianus
gagatccggatttggtgcgtgcttc

SEQ ID NO: 24360 - DNA, 25 bp, Saccharomyces pastorianus
caggtactattttccccattggtat

SEQ ID NO: 24361 - DNA, 25 bp, Saccharomyces pastorianus
ttactaggtctattttccgctgcca

SEQ ID NO: 24362 - DNA, 25 bp, Saccharomyces pastorianus
atgacctctaatctaggtgccgaat

SEQ ID NO: 24363 - DNA, 25 bp, Saccharomyces pastorianus
gtcttaccaaaccacaaggctacta

SEQ ID NO: 24364 - DNA, 25 bp, Saccharomyces pastorianus
aagaaaggccatccataagatcgtg

SEQ ID NO: 24365 - DNA, 25 bp, Saccharomyces pastorianus
ggtgccgaattcatcaattcccaac

SEQ ID NO: 24366 - DNA, 25 bp, Saccharomyces pastorianus
gtgggtgctgttaagcaacacttca

SEQ ID NO: 24367 - DNA, 25 bp, Saccharomyces pastorianus
ctaaaaatttggtcgtgggtgctgt

SEQ ID NO: 24368 - DNA, 25 bp, Saccharomyces pastorianus
gggtgcacgtccattaaacagatta

SEQ ID NO: 24369 - DNA, 25 bp, Saccharomyces pastorianus
aaggctactacaagtgctgacacat

SEQ ID NO: 24370 - DNA, 25 bp, Saccharomyces pastorianus
aaaacccgtgatgaaaatgtctctg

SEQ ID NO: 24371 - DNA, 25 bp, Saccharomyces pastorianus
gaagccaaggatttcctagccagat

SEQ ID NO: 24372 - DNA, 25 bp, Saccharomyces pastorianus
gagccaagatccaagattcgactaa

SEQ ID NO: 24373 - DNA, 25 bp, Saccharomyces pastorianus
agagagcctacaacgcggtcaagat

SEQ ID NO: 24374 - DNA, 25 bp, Saccharomyces pastorianus
gatgtgttgtacctgattctggccg

SEQ ID NO: 24375 - DNA, 25 bp, Saccharomyces pastorianus
agtcgcgcatttccggcttgttaaa

SEQ ID NO: 24376 - DNA, 25 bp, Saccharomyces pastorianus
agatcctggatcatgctggcagtgt

SEQ ID NO: 24377 - DNA, 25 bp, Saccharomyces pastorianus
aaaagtgttccatctgtccagcaag

SEQ ID NO: 24378 - DNA, 25 bp, Saccharomyces pastorianus
tcaagatgagtctggtccgcgtgtc

SEQ ID NO: 24379 - DNA, 25 bp, Saccharomyces pastorianus
gccattttatgcttccagagatcct

SEQ ID NO: 24380 - DNA, 25 bp, Saccharomyces pastorianus
gattttcatcttgatcctgttcaga

SEQ ID NO: 24381 - DNA, 25 bp, Saccharomyces pastorianus
cagtttgatcccatttttcgcattt

SEQ ID NO: 24382 - DNA, 25 bp, Saccharomyces pastorianus
aaggcctcggtgaagtcgcgcattt

SEQ ID NO: 24383 - DNA, 25 bp, Saccharomyces pastorianus
gtggcatcctcaggttcatcgacaa

SEQ ID NO: 24384 - DNA, 25 bp, Saccharomyces pastorianus
gatttgcccaagagatcgagctggt

SEQ ID NO: 24385 - DNA, 25 bp, Saccharomyces pastorianus
agcgagttgtttgtgttcatcttca

SEQ ID NO: 24386 - DNA, 25 bp, Saccharomyces pastorianus
gaagtcttggacactttgagcgagt

SEQ ID NO: 24387 - DNA, 25 bp, Saccharomyces pastorianus
attcctgggcaagttggtgcgcgac

SEQ ID NO: 24388 - DNA, 25 bp, Saccharomyces pastorianus
ctaaaggactactgcgacgggttca

SEQ ID NO: 24389 - DNA, 25 bp, Saccharomyces pastorianus
aaaatggtccgtcttacatacaagg

SEQ ID NO: 24390 - DNA, 25 bp, Saccharomyces pastorianus
gaggagatcttgtccggtgcgcaac

SEQ ID NO: 24391 - DNA, 25 bp, Saccharomyces pastorianus
atactccaactcttacgatttcttc

SEQ ID NO: 24392 - DNA, 25 bp, Saccharomyces pastorianus
gaaagtgcacggcttatccaccgaa

SEQ ID NO: 24393 - DNA, 25 bp, Saccharomyces pastorianus
caccgacttctacatcttggacaaa

SEQ ID NO: 24394 - DNA, 25 bp, Saccharomyces pastorianus
cttggacaaattccccttggagatc

SEQ ID NO: 24395 - DNA, 25 bp, Saccharomyces pastorianus
gttcaggatagttgcgcactagtcc

SEQ ID NO: 24396 - DNA, 25 bp, Saccharomyces pastorianus
gagctccaatgaagaggtctttagt

SEQ ID NO: 24397 - DNA, 25 bp, Saccharomyces pastorianus
ttttcgaatcatttatcagagagtt

SEQ ID NO: 24398 - DNA, 25 bp, Saccharomyces pastorianus
gtggtcgataataaaaagcgtctac

SEQ ID NO: 24399 - DNA, 25 bp, Saccharomyces pastorianus
tcaatgggttcctttggttcctagc

SEQ ID NO: 24400 - DNA, 25 bp, Saccharomyces pastorianus
tcagagagttaactgggttcgtcat

SEQ ID NO: 24401 - DNA, 25 bp, Saccharomyces pastorianus
aagcgtctactattcgttcaggata

SEQ ID NO: 24402 - DNA, 25 bp, Saccharomyces pastorianus
gaatctgtcaatgggttcctttggt

SEQ ID NO: 24403 - DNA, 25 bp, Saccharomyces pastorianus
tacaaccagggaaattctaccaaag

SEQ ID NO: 24404 - DNA, 25 bp, Saccharomyces pastorianus
gcagggtttttgcagattgaatctg

SEQ ID NO: 24405 - DNA, 25 bp, Saccharomyces pastorianus
tcctagccctgtacaacttgatcaa

SEQ ID NO: 24406 - DNA, 25 bp, Saccharomyces pastorianus
cagattattcagagaggcttgctat

SEQ ID NO: 24407 - DNA, 25 bp, Saccharomyces pastorianus
ggtctttactgcaagtgtctcgagg

SEQ ID NO: 24408 - DNA, 25 bp, Saccharomyces pastorianus
tttgcgatctgctgatttcgtccta

SEQ ID NO: 24409 - DNA, 25 bp, Saccharomyces pastorianus
aacaagaccagtaccatgcaccggg

SEQ ID NO: 24410 - DNA, 25 bp, Saccharomyces pastorianus
atcaatctaacgctcttgcaacaag

SEQ ID NO: 24411 - DNA, 25 bp, Saccharomyces pastorianus
ttcgtcctacccgtggagatagatg

SEQ ID NO: 24412 - DNA, 25 bp, Saccharomyces pastorianus
gaccgttatcggagatcatcatcct

SEQ ID NO: 24413 - DNA, 25 bp, Saccharomyces pastorianus
gtgacccgctactcgatatactaga

SEQ ID NO: 24414 - DNA, 25 bp, Saccharomyces pastorianus
attcgaagtcgtggtctttactgca

SEQ ID NO: 24415 - DNA, 25 bp, Saccharomyces pastorianus
gactctagtacattcgtctttcaaa

SEQ ID NO: 24416 - DNA, 25 bp, Saccharomyces pastorianus
gtgtctcgaggtacggtgacccgct

SEQ ID NO: 24417 - DNA, 25 bp, Saccharomyces pastorianus
agaacaagaaaaccacgcggagtgc

SEQ ID NO: 24418 - DNA, 25 bp, Saccharomyces pastorianus
agccatgttgcgtctgtaagccaga

SEQ ID NO: 24419 - DNA, 25 bp, Saccharomyces pastorianus
aaacctaagccatgttgcgtctgta

SEQ ID NO: 24420 - DNA, 25 bp, Saccharomyces pastorianus
gtgcgaggacaaacctaagccatgt

SEQ ID NO: 24421 - DNA, 25 bp, Saccharomyces pastorianus
cttattcaatggacaagactctgaa

SEQ ID NO: 24422 - DNA, 25 bp, Saccharomyces pastorianus
aaaccacgcggagtgcgaggacaaa

SEQ ID NO: 24423 - DNA, 25 bp, Saccharomyces pastorianus
gttgcgtctgtaagccagaaaagga

SEQ ID NO: 24424 - DNA, 25 bp, Saccharomyces pastorianus
gcgggatacatgcatcttattcaat

SEQ ID NO: 24425 - DNA, 25 bp, Saccharomyces pastorianus
ggaggagcgggatacatgcatctta

SEQ ID NO: 24426 - DNA, 25 bp, Saccharomyces pastorianus
acatgcatcttattcaatggacaag

SEQ ID NO: 24427 - DNA, 25 bp, Saccharomyces pastorianus
agactctgaaaaatgcaaggaattc

SEQ ID NO: 24428 - DNA, 25 bp, Saccharomyces pastorianus
gatgataatggttcacgttcctata

SEQ ID NO: 24429 - DNA, 25 bp, Saccharomyces pastorianus
gaatgatcgtgtcacagaccaagaa

SEQ ID NO: 24430 - DNA, 25 bp, Saccharomyces pastorianus
gcattgttcgtgctgctatcaagag

SEQ ID NO: 24431 - DNA, 25 bp, Saccharomyces pastorianus
atcgtctcatgatcgtagcattgtt

SEQ ID NO: 24432 - DNA, 25 bp, Saccharomyces pastorianus
aagcgtgaagaagccatcgctgatg

SEQ ID NO: 24433 - DNA, 25 bp, Saccharomyces pastorianus
gtggaatcaatgagcgataccgttg

SEQ ID NO: 24434 - DNA, 25 bp, Saccharomyces pastorianus
ggatatccccaaaatcgaagtcgtt

SEQ ID NO: 24435 - DNA, 25 bp, Saccharomyces pastorianus
gctcttggtagaaacgtggactgga

SEQ ID NO: 24436 - DNA, 25 bp, Saccharomyces pastorianus
cgttgtcaattacgatatgcccaag

SEQ ID NO: 24437 - DNA, 25 bp, Saccharomyces pastorianus
tagggaaggtcgttctgtcacactt

SEQ ID NO: 24438 - DNA, 25 bp, Saccharomyces pastorianus
cacacttgtgggtgaatcgtctcat

SEQ ID NO: 24439 - DNA, 25 bp, Saccharomyces pastorianus
aacggatgatttgccttatttattt

SEQ ID NO: 24440 - DNA, 25 bp, Saccharomyces pastorianus
aatgtatacaccgaagttgagctaa

SEQ ID NO: 24441 - DNA, 25 bp, Saccharomyces pastorianus
gaagacccattaaacacggaagccg

SEQ ID NO: 24442 - DNA, 25 bp, Saccharomyces pastorianus
gaaacttatatcaccatcccatcat

SEQ ID NO: 24443 - DNA, 25 bp, Saccharomyces pastorianus
accgagccgtcgaactggtagtaat

SEQ ID NO: 24444 - DNA, 25 bp, Saccharomyces pastorianus
agagaacttacaacaccgagccgtc

SEQ ID NO: 24445 - DNA, 25 bp, Saccharomyces pastorianus
tcacgaggaggattcgatagcgcct

SEQ ID NO: 24446 - DNA, 25 bp, Saccharomyces pastorianus
agacacactgtttgacttgaggaaa

SEQ ID NO: 24447 - DNA, 25 bp, Saccharomyces pastorianus
ttgagctaaaagaccgcaacgacag

SEQ ID NO: 24448 - DNA, 25 bp, Saccharomyces pastorianus
cgcctccacccaaatcgaatgatga

SEQ ID NO: 24449 - DNA, 25 bp, Saccharomyces pastorianus
ataatcatgcgagtcttttagccag

SEQ ID NO: 24450 - DNA, 25 bp, Saccharomyces pastorianus
ttgggaacaagtgctgccttcgctc

SEQ ID NO: 24451 - DNA, 25 bp, Saccharomyces pastorianus
gtgggccagttgtttaagctttatc

SEQ ID NO: 24452 - DNA, 25 bp, Saccharomyces pastorianus
caatcgatttttccctcctacaaat

SEQ ID NO: 24453 - DNA, 25 bp, Saccharomyces pastorianus
ggaacgacttcattttgagcctatt

SEQ ID NO: 24454 - DNA, 25 bp, Saccharomyces pastorianus
aatttgttgctcaatttctcgaaga

SEQ ID NO: 24455 - DNA, 25 bp, Saccharomyces pastorianus
agtggactactcacccaatcgattt

SEQ ID NO: 24456 - DNA, 25 bp, Saccharomyces pastorianus
attcgtatcttgatcgttggcctgc

SEQ ID NO: 24457 - DNA, 25 bp, Saccharomyces pastorianus
gccttcgctcgatggagacaccgat

SEQ ID NO: 24458 - DNA, 25 bp, Saccharomyces pastorianus
gttggcctgcatgcaaagagcacaa

SEQ ID NO: 24459 - DNA, 25 bp, Saccharomyces pastorianus
ggagaagccccagatgcgtttgaaa

SEQ ID NO: 24460 - DNA, 25 bp, Saccharomyces pastorianus
cactgcgttcagagagactttgcca

SEQ ID NO: 24461 - DNA, 25 bp, Saccharomyces pastorianus
atccatctcctcaaatgcagaccaa

SEQ ID NO: 24462 - DNA, 25 bp, Saccharomyces pastorianus
aagagctattagttgaggaccagac

SEQ ID NO: 24463 - DNA, 25 bp, Saccharomyces pastorianus
gcggaaccgggaattgttatcaaag

SEQ ID NO: 24464 - DNA, 25 bp, Saccharomyces pastorianus
agcagttatgtgcttactcgtaaat

SEQ ID NO: 24465 - DNA, 25 bp, Saccharomyces pastorianus
taaatttctgtaaggattccgttca

SEQ ID NO: 24466 - DNA, 25 bp, Saccharomyces pastorianus
gacgaccttggaaacgctgaaccgc

SEQ ID NO: 24467 - DNA, 25 bp, Saccharomyces pastorianus
agggccaaccagtgtttgatgcatc

SEQ ID NO: 24468 - DNA, 25 bp, Saccharomyces pastorianus
ggattccgttcaaaataggctagtg

SEQ ID NO: 24469 - DNA, 25 bp, Saccharomyces pastorianus
accagcaacactaatggcactccat

SEQ ID NO: 24470 - DNA, 25 bp, Saccharomyces pastorianus
aagaatccctatttgaagagctatt

SEQ ID NO: 24471 - DNA, 25 bp, Saccharomyces pastorianus
gaggaccagactttggctcaagata

SEQ ID NO: 24472 - DNA, 25 bp, Saccharomyces pastorianus
ggccgatcctctcagtaacgaaaca

SEQ ID NO: 24473 - DNA, 25 bp, Saccharomyces pastorianus
ggaaagggctacagcattcaccaaa

SEQ ID NO: 24474 - DNA, 25 bp, Saccharomyces pastorianus
agaccatatattcttccgttccaaa

SEQ ID NO: 24475 - DNA, 25 bp, Saccharomyces pastorianus
gaattcgacaacctttcttctgacg

SEQ ID NO: 24476 - DNA, 25 bp, Saccharomyces pastorianus
taaatccctaaggttggccgatcct

SEQ ID NO: 24477 - DNA, 25 bp, Saccharomyces pastorianus
acatgtgcattggtcatactccaga

SEQ ID NO: 24478 - DNA, 25 bp, Saccharomyces pastorianus
agtatcgcgattctcaaattcattg

SEQ ID NO: 24479 - DNA, 25 bp, Saccharomyces pastorianus
aaatctcgggtctttactcatctga

SEQ ID NO: 24480 - DNA, 25 bp, Saccharomyces pastorianus
cactatgggataacgctcttcttga

SEQ ID NO: 24481 - DNA, 25 bp, Saccharomyces pastorianus
taacgtttccactaaagcagagctt

SEQ ID NO: 24482 - DNA, 25 bp, Saccharomyces pastorianus
ttgtggatgggctttacacgctatt

SEQ ID NO: 24483 - DNA, 25 bp, Saccharomyces pastorianus
ttgatacgtgaaaagaaccccgact

SEQ ID NO: 24484 - DNA, 25 bp, Saccharomyces pastorianus
gcaaaagttttctgtggcaccaaaa

SEQ ID NO: 24485 - DNA, 25 bp, Saccharomyces pastorianus
aacgtttacttggtgatagctcgaa

SEQ ID NO: 24486 - DNA, 25 bp, Saccharomyces pastorianus
gaaccccgacttgagtgctttggaa

SEQ ID NO: 24487 - DNA, 25 bp, Saccharomyces pastorianus
agaatgcagtcgttctctgtcaggt

SEQ ID NO: 24488 - DNA, 25 bp, Saccharomyces pastorianus
aatcgattcctacaagttcacctga

SEQ ID NO: 24489 - DNA, 25 bp, Saccharomyces pastorianus
aaggatttcctctctacagaaaaat

SEQ ID NO: 24490 - DNA, 25 bp, Saccharomyces pastorianus
gaaggacgatatagccactgtggaa

SEQ ID NO: 24491 - DNA, 25 bp, Saccharomyces pastorianus
attagagtagctgacgtttatcgta

SEQ ID NO: 24492 - DNA, 25 bp, Saccharomyces pastorianus
aaagatcgtcttttcaatgtccaat

SEQ ID NO: 24493 - DNA, 25 bp, Saccharomyces pastorianus
gattctttttatttcattgccacgc

SEQ ID NO: 24494 - DNA, 25 bp, Saccharomyces pastorianus
gggttcccgacacgaatatttgaag

SEQ ID NO: 24495 - DNA, 25 bp, Saccharomyces pastorianus
gtgatttgatgctgatcctctctac

SEQ ID NO: 24496 - DNA, 25 bp, Saccharomyces pastorianus
gaactacggtgacgaatctttctat

SEQ ID NO: 24497 - DNA, 25 bp, Saccharomyces pastorianus
tttagccagatcataccaccattta

SEQ ID NO: 24498 - DNA, 25 bp, Saccharomyces pastorianus
ttactcgacgagacccatttgaagg

SEQ ID NO: 24499 - DNA, 25 bp, Saccharomyces pastorianus
tcatgccactccaaactggtttatg

SEQ ID NO: 24500 - DNA, 25 bp, Saccharomyces pastorianus
tactccaactttttgctcatgccac

SEQ ID NO: 24501 - DNA, 25 bp, Saccharomyces pastorianus
cagtgtgtccatgctgtgatttgat

SEQ ID NO: 24502 - DNA, 25 bp, Saccharomyces pastorianus
gtttcagttgccaatctagattccc

SEQ ID NO: 24503 - DNA, 25 bp, Saccharomyces pastorianus
ggctattactccattacctgttaac

SEQ ID NO: 24504 - DNA, 25 bp, Saccharomyces pastorianus
aagttctcgttaccgctgcgaagat

SEQ ID NO: 24505 - DNA, 25 bp, Saccharomyces pastorianus
cattggagacctcagtcgtcgtgaa

SEQ ID NO: 24506 - DNA, 25 bp, Saccharomyces pastorianus
gaccaagttagccactcggtttaat

SEQ ID NO: 24507 - DNA, 25 bp, Saccharomyces pastorianus
agatttgttgctccgattgtgtgaa

SEQ ID NO: 24508 - DNA, 25 bp, Saccharomyces pastorianus
tgtctatgttaacttggcgtccacg

SEQ ID NO: 24509 - DNA, 25 bp, Saccharomyces pastorianus
ggaactccaatctgccgaaatgggt

SEQ ID NO: 24510 - DNA, 25 bp, Saccharomyces pastorianus
aagctcggcattgatcttcgctgca

SEQ ID NO: 24511 - DNA, 25 bp, Saccharomyces pastorianus
aaggcgttagatgcggccacgaatc

SEQ ID NO: 24512 - DNA, 25 bp, Saccharomyces pastorianus
ggagagaacagcctaccccaaattt

SEQ ID NO: 24513 - DNA, 25 bp, Saccharomyces pastorianus
aactgtattctcatggcagccacgg

SEQ ID NO: 24514 - DNA, 25 bp, Saccharomyces pastorianus
gtccacggatctcttacagtttcaa

SEQ ID NO: 24515 - DNA, 25 bp, Saccharomyces pastorianus
ttaaatcctgtactttcactgtggg

SEQ ID NO: 24516 - DNA, 25 bp, Saccharomyces pastorianus
ggccatggccagaatcgaagaaatc

SEQ ID NO: 24517 - DNA, 25 bp, Saccharomyces pastorianus
gagaagtccaaatcgccaagaattt

SEQ ID NO: 24518 - DNA, 25 bp, Saccharomyces pastorianus
ccaaggaacaagaaagagccgaatt

SEQ ID NO: 24519 - DNA, 25 bp, Saccharomyces pastorianus
gaatcagagaagtccaaatcgccaa

SEQ ID NO: 24520 - DNA, 25 bp, Saccharomyces pastorianus
taaccctgaactattgagaatcaga

SEQ ID NO: 24521 - DNA, 25 bp, Saccharomyces pastorianus
gattctgtcgttcgaaatgtcacaa

SEQ ID NO: 24522 - DNA, 25 bp, Saccharomyces pastorianus
tgttcctgttagatacaacagagaa

SEQ ID NO: 24523 - DNA, 25 bp, Saccharomyces pastorianus
gagccgaattagaaaaccaacaaga

SEQ ID NO: 24524 - DNA, 25 bp, Saccharomyces pastorianus
aacagagaactagttgccacaactt

SEQ ID NO: 24525 - DNA, 25 bp, Saccharomyces pastorianus
atcgccaagaatttggccaaggaac

SEQ ID NO: 24526 - DNA, 25 bp, Saccharomyces pastorianus
aagaattcagattctgtcgttcgaa

SEQ ID NO: 24527 - DNA, 25 bp, Saccharomyces pastorianus
actgacggccttttctgtaagatgg

SEQ ID NO: 24528 - DNA, 25 bp, Saccharomyces pastorianus
ggaacgtaccaaagcccgccaatct

SEQ ID NO: 24529 - DNA, 25 bp, Saccharomyces pastorianus
gcgagcgattgttttcggctcataa

SEQ ID NO: 24530 - DNA, 25 bp, Saccharomyces pastorianus
tgagtctatatatgagcgagcgatt

SEQ ID NO: 24531 - DNA, 25 bp, Saccharomyces pastorianus
atggtcgttcagttagtagacttct

SEQ ID NO: 24532 - DNA, 25 bp, Saccharomyces pastorianus
ggctcataaagacgatcccatgtta

SEQ ID NO: 24533 - DNA, 25 bp, Saccharomyces pastorianus
ggacagatccttgacattcgaattg

SEQ ID NO: 24534 - DNA, 25 bp, Saccharomyces pastorianus
gtagacttcttgttctgtgagcgta

SEQ ID NO: 24535 - DNA, 25 bp, Saccharomyces pastorianus
aggaacctttgctgttctggtgtaa

SEQ ID NO: 24536 - DNA, 25 bp, Saccharomyces pastorianus
taaagaacgcactgacggccttttc

SEQ ID NO: 24537 - DNA, 25 bp, Saccharomyces pastorianus
aagcacaaccgtattcaatcatcta

SEQ ID NO: 24538 - DNA, 25 bp, Saccharomyces pastorianus
tcctccaacggtacctgtttgaaca

SEQ ID NO: 24539 - DNA, 25 bp, Saccharomyces pastorianus
ggtgatgtcctgacactttcagaat

SEQ ID NO: 24540 - DNA, 25 bp, Saccharomyces pastorianus
gtggaaccacaggatgctatctctc

SEQ ID NO: 24541 - DNA, 25 bp, Saccharomyces pastorianus
atgtcatggatttggactcctccaa

SEQ ID NO: 24542 - DNA, 25 bp, Saccharomyces pastorianus
gcgttatccagtttaggagcgtcca

SEQ ID NO: 24543 - DNA, 25 bp, Saccharomyces pastorianus
ggatgctatctctcccgataaatat

SEQ ID NO: 24544 - DNA, 25 bp, Saccharomyces pastorianus
gaggcccttggataggaggtaccat

SEQ ID NO: 24545 - DNA, 25 bp, Saccharomyces pastorianus
atagccttaaagcacgtggaaccac

SEQ ID NO: 24546 - DNA, 25 bp, Saccharomyces pastorianus
aacaacgttgtagtgcctagggcca

SEQ ID NO: 24547 - DNA, 25 bp, Saccharomyces pastorianus
tgatttcagaccttcagggctgcta

SEQ ID NO: 24548 - DNA, 25 bp, Saccharomyces pastorianus
taagctggacttagatccgcgagat

SEQ ID NO: 24549 - DNA, 25 bp, Saccharomyces pastorianus
tagcccgtgagtgtgaactgcctta

SEQ ID NO: 24550 - DNA, 25 bp, Saccharomyces pastorianus
tttccacgcgtgctgagtccaagat

SEQ ID NO: 24551 - DNA, 25 bp, Saccharomyces pastorianus
aacatgagtgttatccctgaagcaa

SEQ ID NO: 24552 - DNA, 25 bp, Saccharomyces pastorianus
ggcctccaagatcattgtgtccatg

SEQ ID NO: 24553 - DNA, 25 bp, Saccharomyces pastorianus
aacgggcgtaatgcgaacctcttgg

SEQ ID NO: 24554 - DNA, 25 bp, Saccharomyces pastorianus
gggcataagacactcatcgtacctc

SEQ ID NO: 24555 - DNA, 25 bp, Saccharomyces pastorianus
ggattcggacaaccattttctgaga

SEQ ID NO: 24556 - DNA, 25 bp, Saccharomyces pastorianus
gaccgtagtctgcatggaaggccca

SEQ ID NO: 24557 - DNA, 25 bp, Saccharomyces pastorianus
ataccagagttcatgcacagcggcg

SEQ ID NO: 24558 - DNA, 25 bp, Saccharomyces pastorianus
agcccagggattttgttttgccgca

SEQ ID NO: 24559 - DNA, 25 bp, Saccharomyces pastorianus
aggcagagcctgtcaccgtggaaac

SEQ ID NO: 24560 - DNA, 25 bp, Saccharomyces pastorianus
tgaagcaggccaacaccgtgtacta

SEQ ID NO: 24561 - DNA, 25 bp, Saccharomyces pastorianus
tgtgccagctagtgatctctctgaa

SEQ ID NO: 24562 - DNA, 25 bp, Saccharomyces pastorianus
ggaacttgtcgactacgtgtgccag

SEQ ID NO: 24563 - DNA, 25 bp, Saccharomyces pastorianus
ggaagcttttgtccaccgtcaaaat

SEQ ID NO: 24564 - DNA, 25 bp, Saccharomyces pastorianus
gaacattctattctccttgtggaag

SEQ ID NO: 24565 - DNA, 25 bp, Saccharomyces pastorianus
aaaatcgccgatttgagcctgacca

SEQ ID NO: 24566 - DNA, 25 bp, Saccharomyces pastorianus
gtactactcgacgttcagttggttg

SEQ ID NO: 24567 - DNA, 25 bp, Saccharomyces pastorianus
aattttgcaacaggttgtcccggct

SEQ ID NO: 24568 - DNA, 25 bp, Saccharomyces pastorianus
aaagctcctgggtgtggatacgccg

SEQ ID NO: 24569 - DNA, 25 bp, Saccharomyces pastorianus
aagcaacgtttttggcagtctacaa

SEQ ID NO: 24570 - DNA, 25 bp, Saccharomyces pastorianus
gctaccagcggcactctattgagaa

SEQ ID NO: 24571 - DNA, 25 bp, Saccharomyces pastorianus
gaacctatcacagatcggcagaccg

SEQ ID NO: 24572 - DNA, 25 bp, Saccharomyces pastorianus
atccaccaccggctttttagagagg

SEQ ID NO: 24573 - DNA, 25 bp, Saccharomyces pastorianus
taacgagttgctggacatcatcccc

SEQ ID NO: 24574 - DNA, 25 bp, Saccharomyces pastorianus
gaagtgcctgatcttggaccttgac

SEQ ID NO: 24575 - DNA, 25 bp, Saccharomyces pastorianus
cttggttttcagacactcacgataa

SEQ ID NO: 24576 - DNA, 25 bp, Saccharomyces pastorianus
tacgaggttgtcgtcttcactgcta

SEQ ID NO: 24577 - DNA, 25 bp, Saccharomyces pastorianus
ggactttccagatttgatgcacttg

SEQ ID NO: 24578 - DNA, 25 bp, Saccharomyces pastorianus
attattctagacaactcaccggctt

SEQ ID NO: 24579 - DNA, 25 bp, Saccharomyces pastorianus
gttttgcccgtggagatcgatgacc

SEQ ID NO: 24580 - DNA, 25 bp, Saccharomyces pastorianus
acttgacgccaaccctagaggagga

SEQ ID NO: 24581 - DNA, 25 bp, Saccharomyces pastorianus
tagagaggcctgctacaactacgaa

SEQ ID NO: 24582 - DNA, 25 bp, Saccharomyces pastorianus
gcagcgacccaaaagtacctgtggt

SEQ ID NO: 24583 - DNA, 25 bp, Saccharomyces pastorianus
ggctaaacccgcttcttgatattga

SEQ ID NO: 24584 - DNA, 25 bp, Saccharomyces pastorianus
gtgcatcacccgacggcaatgaatt

SEQ ID NO: 24585 - DNA, 25 bp, Saccharomyces pastorianus
gataccagaagtgaacggcgcaatg

SEQ ID NO: 24586 - DNA, 25 bp, Saccharomyces pastorianus
gatattgatccagtgccattagcag

SEQ ID NO: 24587 - DNA, 25 bp, Saccharomyces pastorianus
acggcgcaatggttcaaggcaacat

SEQ ID NO: 24588 - DNA, 25 bp, Saccharomyces pastorianus
tattctttcaagtgcatcacccgac

SEQ ID NO: 24589 - DNA, 25 bp, Saccharomyces pastorianus
gtggtatgcatacaaatcgctgaat

SEQ ID NO: 24590 - DNA, 25 bp, Saccharomyces pastorianus
gaagcttaggaaacactggcgacaa

SEQ ID NO: 24591 - DNA, 25 bp, Saccharomyces pastorianus
ggattccacttatgaggtgtcctta

SEQ ID NO: 24592 - DNA, 25 bp, Saccharomyces pastorianus
acgaatttaagaccagcataccgaa

SEQ ID NO: 24593 - DNA, 25 bp, Saccharomyces pastorianus
gataatcccgatcgtaagagccaag

SEQ ID NO: 24594 - DNA, 25 bp, Saccharomyces pastorianus
attcagccctgtaatcaacaagcct

SEQ ID NO: 24595 - DNA, 25 bp, Saccharomyces pastorianus
agagacttaatgaccctgtgtgata

SEQ ID NO: 24596 - DNA, 25 bp, Saccharomyces pastorianus
ttttgggactacgaacattgatgat

SEQ ID NO: 24597 - DNA, 25 bp, Saccharomyces pastorianus
gagccgtcgaagcaacctgaactta

SEQ ID NO: 24598 - DNA, 25 bp, Saccharomyces pastorianus
gaagtgcttcaaatacaccaagttt

SEQ ID NO: 24599 - DNA, 25 bp, Saccharomyces pastorianus
ggaatcgaatccatggacgtgtata

SEQ ID NO: 24600 - DNA, 25 bp, Saccharomyces pastorianus
agagccaacagatccggaatcgaat

SEQ ID NO: 24601 - DNA, 25 bp, Saccharomyces pastorianus
ttccaagggtttggttgccaacaag

SEQ ID NO: 24602 - DNA, 25 bp, Saccharomyces pastorianus
gtgtataggtcttattgatcctgtc

SEQ ID NO: 24603 - DNA, 25 bp, Saccharomyces pastorianus
aaagtggccataggcgagccgtcga

SEQ ID NO: 24604 - DNA, 25 bp, Saccharomyces pastorianus
acagagtgaagcctccctaaaggaa

SEQ ID NO: 24605 - DNA, 25 bp, Saccharomyces pastorianus
taagcgatgctatatctagaccatt

SEQ ID NO: 24606 - DNA, 25 bp, Saccharomyces pastorianus
ggtaatggccaagaactcgctgaag

SEQ ID NO: 24607 - DNA, 25 bp, Saccharomyces pastorianus
gaataaggtctcgttgcccaatgtt

SEQ ID NO: 24608 - DNA, 25 bp, Saccharomyces pastorianus
atgcggcaccggcagcagagaataa

SEQ ID NO: 24609 - DNA, 25 bp, Saccharomyces pastorianus
atctgcatacccaaatcacaaacca

SEQ ID NO: 24610 - DNA, 25 bp, Saccharomyces pastorianus
ataataacgtcaatgcggcaccggc

SEQ ID NO: 24611 - DNA, 25 bp, Saccharomyces pastorianus
aacgatggaatctctggaacagcag

SEQ ID NO: 24612 - DNA, 25 bp, Saccharomyces pastorianus
gagagcgccaacttaaacctggaga

SEQ ID NO: 24613 - DNA, 25 bp, Saccharomyces pastorianus
tgagggccatgcaacagggtgctaa

SEQ ID NO: 24614 - DNA, 25 bp, Saccharomyces pastorianus
ggaacagcagctattctccatagag

SEQ ID NO: 24615 - DNA, 25 bp, Saccharomyces pastorianus
gaatcgatgctaacgtagacgacat

SEQ ID NO: 24616 - DNA, 25 bp, Saccharomyces pastorianus
acagatggcaaaagctctccaccga

SEQ ID NO: 24617 - DNA, 25 bp, Saccharomyces pastorianus
tggatatgaccacctacaacaactc

SEQ ID NO: 24618 - DNA, 25 bp, Saccharomyces pastorianus
aacccgttcatgacttcgttactcg

SEQ ID NO: 24619 - DNA, 25 bp, Saccharomyces pastorianus
gggaaccttttccagcaactggcct

SEQ ID NO: 24620 - DNA, 25 bp, Saccharomyces pastorianus
aacagggtgaggtcatccagagaat

SEQ ID NO: 24621 - DNA, 25 bp, Saccharomyces pastorianus
caactatccaacaacgtctacttac

SEQ ID NO: 24622 - DNA, 25 bp, Saccharomyces pastorianus
ttcgttactcgatgagtccgcagag

SEQ ID NO: 24623 - DNA, 25 bp, Saccharomyces pastorianus
ttgacttgaacatcagcggtgctca

SEQ ID NO: 24624 - DNA, 25 bp, Saccharomyces pastorianus
acggaacacgcccaaacagaagatc

SEQ ID NO: 24625 - DNA, 25 bp, Saccharomyces pastorianus
agccgcgaaggttttctttgtcatc

SEQ ID NO: 24626 - DNA, 25 bp, Saccharomyces pastorianus
ggcgtgaagttcattgctgccccat

SEQ ID NO: 24627 - DNA, 25 bp, Saccharomyces pastorianus
agtcgaattccgtttgctatgccaa

SEQ ID NO: 24628 - DNA, 25 bp, Saccharomyces pastorianus
acgcgatcgatctctttgttacagg

SEQ ID NO: 24629 - DNA, 25 bp, Saccharomyces pastorianus
atagagccgtgcagtccggcgtgaa

SEQ ID NO: 24630 - DNA, 25 bp, Saccharomyces pastorianus
gcggcggattcattcgatgttgtct

SEQ ID NO: 24631 - DNA, 25 bp, Saccharomyces pastorianus
gcaggccgtaatcgatttaaccgtt

SEQ ID NO: 24632 - DNA, 25 bp, Saccharomyces pastorianus
tcgaagagatccctgaacctttcac

SEQ ID NO: 24633 - DNA, 25 bp, Saccharomyces pastorianus
gacaagacggacaactggtggctaa

SEQ ID NO: 24634 - DNA, 25 bp, Saccharomyces pastorianus
gggagctggccaacaatcgcgcata

SEQ ID NO: 24635 - DNA, 25 bp, Saccharomyces pastorianus
gggcaaactaaccaacgtgtcgcta

SEQ ID NO: 24636 - DNA, 25 bp, Saccharomyces pastorianus
ggcagacaagtccaacgcgatcgat

SEQ ID NO: 24637 - DNA, 25 bp, Saccharomyces pastorianus
gaagttatcttggtcgaccctcaac

SEQ ID NO: 24638 - DNA, 25 bp, Saccharomyces pastorianus
tacttcgaagttatcttggtcgacc

SEQ ID NO: 24639 - DNA, 25 bp, Saccharomyces pastorianus
aagttatcttggtcgaccctcaaca

SEQ ID NO: 24640 - DNA, 25 bp, Saccharomyces pastorianus
gttatcttggtcgaccctcaacaca

SEQ ID NO: 24641 - DNA, 25 bp, Saccharomyces pastorianus
agttatcttggtcgaccctcaacac

SEQ ID NO: 24642 - DNA, 25 bp, Saccharomyces pastorianus
ttatcttggtcgaccctcaacacaa

SEQ ID NO: 24643 - DNA, 25 bp, Saccharomyces pastorianus
gtacttcgaagttatcttggtcgac

SEQ ID NO: 24644 - DNA, 25 bp, Saccharomyces pastorianus
tcgaagttatcttggtcgaccctca

SEQ ID NO: 24645 - DNA, 25 bp, Saccharomyces pastorianus
tatcttggtcgaccctcaacacaag

SEQ ID NO: 24646 - DNA, 25 bp, Saccharomyces pastorianus
cgaagttatcttggtcgaccctcaa

SEQ ID NO: 24647 - DNA, 25 bp, Saccharomyces pastorianus
ttcgaagttatcttggtcgaccctc

SEQ ID NO: 24648 - DNA, 25 bp, Saccharomyces pastorianus
tacaaatttgatggccgtctttctt

SEQ ID NO: 24649 - DNA, 25 bp, Saccharomyces pastorianus
ggagatggaacttactcacgctttc

SEQ ID NO: 24650 - DNA, 25 bp, Saccharomyces pastorianus
atgggagtcgtttactggccttgag

SEQ ID NO: 24651 - DNA, 25 bp, Saccharomyces pastorianus
agtcaagtaagatcactgccctaat

SEQ ID NO: 24652 - DNA, 25 bp, Saccharomyces pastorianus
gaccaagctatagatcggctccata

SEQ ID NO: 24653 - DNA, 25 bp, Saccharomyces pastorianus
gaatttgacttgtgcatctcatgcc

SEQ ID NO: 24654 - DNA, 25 bp, Saccharomyces pastorianus
atatacctctgcatcgaagtcaagt

SEQ ID NO: 24655 - DNA, 25 bp, Saccharomyces pastorianus
ctacctacttggacatcctggagat

SEQ ID NO: 24656 - DNA, 25 bp, Saccharomyces pastorianus
tgacgtcgccaagatctacaaattt

SEQ ID NO: 24657 - DNA, 25 bp, Saccharomyces pastorianus
tatattttcccaattctctacctac

SEQ ID NO: 24658 - DNA, 25 bp, Saccharomyces pastorianus
attgctactgtcactgaaagccggt

SEQ ID NO: 24659 - DNA, 25 bp, Saccharomyces pastorianus
aagcccaccaccgaggagagagaag

SEQ ID NO: 24660 - DNA, 25 bp, Saccharomyces pastorianus
gaaaacggtacagttgtggactcaa

SEQ ID NO: 24661 - DNA, 25 bp, Saccharomyces pastorianus
tgtggactcaacaacaagagggctt

SEQ ID NO: 24662 - DNA, 25 bp, Saccharomyces pastorianus
gataagttagtttcagagtcccttt

SEQ ID NO: 24663 - DNA, 25 bp, Saccharomyces pastorianus
taaatagagtttccaagcccaccac

SEQ ID NO: 24664 - DNA, 25 bp, Saccharomyces pastorianus
aagcttccaaaatggtacgccagat

SEQ ID NO: 24665 - DNA, 25 bp, Saccharomyces pastorianus
tacaatggcagtatacccgtagtaa

SEQ ID NO: 24666 - DNA, 25 bp, Saccharomyces pastorianus
gggcattcccagtcttacaaacaaa

SEQ ID NO: 24667 - DNA, 25 bp, Saccharomyces pastorianus
aattggacaccatcgaatcatattg

SEQ ID NO: 24668 - DNA, 25 bp, Saccharomyces pastorianus
aataaacagtgtaagggcattccca

SEQ ID NO: 24669 - DNA, 25 bp, Saccharomyces pastorianus
gataatgtaagtaccacctctaaga

SEQ ID NO: 24670 - DNA, 25 bp, Saccharomyces pastorianus
cctccattttcgtgtgggctttaat

SEQ ID NO: 24671 - DNA, 25 bp, Saccharomyces pastorianus
caggtttgatctttgcgttagccat

SEQ ID NO: 24672 - DNA, 25 bp, Saccharomyces pastorianus
gctactttcgttaattccgctattt

SEQ ID NO: 24673 - DNA, 25 bp, Saccharomyces pastorianus
gccatgctatgctcaggacagtctg

SEQ ID NO: 24674 - DNA, 25 bp, Saccharomyces pastorianus
gtgagggctcccaacgatgctaaca

SEQ ID NO: 24675 - DNA, 25 bp, Saccharomyces pastorianus
gattaatcgccattgtaccatgtgt

SEQ ID NO: 24676 - DNA, 25 bp, Saccharomyces pastorianus
gattttaccaatcgtttcagcgcct

SEQ ID NO: 24677 - DNA, 25 bp, Saccharomyces pastorianus
tgcaggtgccactttatctggtcaa

SEQ ID NO: 24678 - DNA, 25 bp, Saccharomyces pastorianus
gcgcctttgatttactttaccgcaa

SEQ ID NO: 24679 - DNA, 25 bp, Saccharomyces pastorianus
agtcgcttattaacctatacctcca

SEQ ID NO: 24680 - DNA, 25 bp, Saccharomyces pastorianus
gggtttctgcaatggtctttaccac

SEQ ID NO: 24681 - DNA, 25 bp, Saccharomyces pastorianus
tgctggcagtcatatgtggattacc

SEQ ID NO: 24682 - DNA, 25 bp, Saccharomyces pastorianus
caaaccaaacattgctggcagtcat

SEQ ID NO: 24683 - DNA, 25 bp, Saccharomyces pastorianus
gaaaacaccccattacacacagttg

SEQ ID NO: 24684 - DNA, 25 bp, Saccharomyces pastorianus
gtggattaccacaaatgtatcaata

SEQ ID NO: 24685 - DNA, 25 bp, Saccharomyces pastorianus
atttcgctccatgtaaggtgttctg

SEQ ID NO: 24686 - DNA, 25 bp, Saccharomyces pastorianus
ggtgttctggaagacctacaatgct

SEQ ID NO: 24687 - DNA, 25 bp, Saccharomyces pastorianus
ctacaatgctttatgtcccctagac

SEQ ID NO: 24688 - DNA, 25 bp, Saccharomyces pastorianus
acaccccattacacacagttggttt

SEQ ID NO: 24689 - DNA, 25 bp, Saccharomyces pastorianus
gccagattccctcaacaaaaccaaa

SEQ ID NO: 24690 - DNA, 25 bp, Saccharomyces pastorianus
gaagggtgaagatttcgctccatgt

SEQ ID NO: 24691 - DNA, 25 bp, Saccharomyces pastorianus
agttggtttcgatgccagattccct

SEQ ID NO: 24692 - DNA, 25 bp, Saccharomyces pastorianus
gctgttgctgactattactaccata

SEQ ID NO: 24693 - DNA, 25 bp, Saccharomyces pastorianus
aaggcttcggctacgactatatatc

SEQ ID NO: 24694 - DNA, 25 bp, Saccharomyces pastorianus
gcctcaacggctaatctggaatctg

SEQ ID NO: 24695 - DNA, 25 bp, Saccharomyces pastorianus
gctgcagatgctgatatgccgttct

SEQ ID NO: 24696 - DNA, 25 bp, Saccharomyces pastorianus
aagcacgagtcagcccatattttca

SEQ ID NO: 24697 - DNA, 25 bp, Saccharomyces pastorianus
aaagtcttcatcaatctcgtcaacc

SEQ ID NO: 24698 - DNA, 25 bp, Saccharomyces pastorianus
aaatagcttgtatttccccatggcg

SEQ ID NO: 24699 - DNA, 25 bp, Saccharomyces pastorianus
atattgctgacttagcctcaacggc

SEQ ID NO: 24700 - DNA, 25 bp, Saccharomyces pastorianus
aaaccgcatttccacagtatacttc

SEQ ID NO: 24701 - DNA, 25 bp, Saccharomyces pastorianus
tgccgttcttcctggtatttttgga

SEQ ID NO: 24702 - DNA, 25 bp, Saccharomyces pastorianus
gagtttcccgttcacgcaattcaaa

SEQ ID NO: 24703 - DNA, 25 bp, Saccharomyces pastorianus
acgccttcgtccagtgttataacta

SEQ ID NO: 24704 - DNA, 25 bp, Saccharomyces pastorianus
gggagttccaacgatcaattgcttc

SEQ ID NO: 24705 - DNA, 25 bp, Saccharomyces pastorianus
aatggctaatttcaccggatcttcc

SEQ ID NO: 24706 - DNA, 25 bp, Saccharomyces pastorianus
ggtgccgcaggttcaatcaagccat

SEQ ID NO: 24707 - DNA, 25 bp, Saccharomyces pastorianus
actataaccactcagcttacaacgt

SEQ ID NO: 24708 - DNA, 25 bp, Saccharomyces pastorianus
attactagtcgttcaagcgcaactt

SEQ ID NO: 24709 - DNA, 25 bp, Saccharomyces pastorianus
agtagtgacttccagcgtcatctca

SEQ ID NO: 24710 - DNA, 25 bp, Saccharomyces pastorianus
tacacctttcttgacgctgggagtt

SEQ ID NO: 24711 - DNA, 25 bp, Saccharomyces pastorianus
catcttcgtcagcaaactacacaac

SEQ ID NO: 24712 - DNA, 25 bp, Saccharomyces pastorianus
agtgctctagcttttattccaattg

SEQ ID NO: 24713 - DNA, 25 bp, Saccharomyces pastorianus
taccaatccgcaaactctactataa

SEQ ID NO: 24714 - DNA, 25 bp, Saccharomyces pastorianus
gccgccttttacaaattggacgttg

SEQ ID NO: 24715 - DNA, 25 bp, Saccharomyces pastorianus
cacaggccgccttttacaaattgga

SEQ ID NO: 24716 - DNA, 25 bp, Saccharomyces pastorianus
agaacgaagtctctgctatgccaac

SEQ ID NO: 24717 - DNA, 25 bp, Saccharomyces pastorianus
tgctatgccaactttggttcttttc

SEQ ID NO: 24718 - DNA, 25 bp, Saccharomyces pastorianus
gaagtcgctaaggttgttggtgcta

SEQ ID NO: 24719 - DNA, 25 bp, Saccharomyces pastorianus
aagtctctgctatgccaactttggt

SEQ ID NO: 24720 - DNA, 25 bp, Saccharomyces pastorianus
actagtcgtcgttgatttctacgcc

SEQ ID NO: 24721 - DNA, 25 bp, Saccharomyces pastorianus
ttttctgaacaatacccacaggccg

SEQ ID NO: 24722 - DNA, 25 bp, Saccharomyces pastorianus
gttgcccaaaagaacgaagtctctg

SEQ ID NO: 24723 - DNA, 25 bp, Saccharomyces pastorianus
cgctaaggttgttggtgctaaccca

SEQ ID NO: 24724 - DNA, 25 bp, Saccharomyces pastorianus
gacgaattaggtgaagttgcccaaa

SEQ ID NO: 24725 - DNA, 25 bp, Saccharomyces pastorianus
gggcttgaagccatacttgttcgtc

SEQ ID NO: 24726 - DNA, 25 bp, Saccharomyces pastorianus
cacagagttgctaccaccggtgaat

SEQ ID NO: 24727 - DNA, 25 bp, Saccharomyces pastorianus
gttgattcacggtccaaaggctcaa

SEQ ID NO: 24728 - DNA, 25 bp, Saccharomyces pastorianus
gttcgtcttgaacaacgatggttac

SEQ ID NO: 24729 - DNA, 25 bp, Saccharomyces pastorianus
gtatcaaccaagttgctttcccaaa

SEQ ID NO: 24730 - DNA, 25 bp, Saccharomyces pastorianus
ggtccaaaggctcaatacaacgaaa

SEQ ID NO: 24731 - DNA, 25 bp, Saccharomyces pastorianus
gatcgaaatcatgttgcctgtcttc

SEQ ID NO: 24732 - DNA, 25 bp, Saccharomyces pastorianus
gacaagtctttcaacgaaaactcca

SEQ ID NO: 24733 - DNA, 25 bp, Saccharomyces pastorianus
aaactgggaccacttatccttgttg

SEQ ID NO: 24734 - DNA, 25 bp, Saccharomyces pastorianus
accacttatccttgttgccaacttt

SEQ ID NO: 24735 - DNA, 25 bp, Saccharomyces pastorianus
cttacggtatttcccaagtcttatg

SEQ ID NO: 24736 - DNA, 25 bp, Saccharomyces pastorianus
ggacgtcgtgagcaacagttttacc

SEQ ID NO: 24737 - DNA, 25 bp, Saccharomyces pastorianus
taacggttttcatcgattcatcggt

SEQ ID NO: 24738 - DNA, 25 bp, Saccharomyces pastorianus
agtgtgtatcatcgtcatcttccag

SEQ ID NO: 24739 - DNA, 25 bp, Saccharomyces pastorianus
agaagtgccaactggcctccgtata

SEQ ID NO: 24740 - DNA, 25 bp, Saccharomyces pastorianus
ttttcggctatttcgttgacaaact

SEQ ID NO: 24741 - DNA, 25 bp, Saccharomyces pastorianus
caacacgattttttgctgtcagaga

SEQ ID NO: 24742 - DNA, 25 bp, Saccharomyces pastorianus
gctatactggtttgttcttcttgaa

SEQ ID NO: 24743 - DNA, 25 bp, Saccharomyces pastorianus
aacaagctactaacctggctgcgga

SEQ ID NO: 24744 - DNA, 25 bp, Saccharomyces pastorianus
ttgaactggttttgcaactgcccct

SEQ ID NO: 24745 - DNA, 25 bp, Saccharomyces pastorianus
gatctatggttggaacgcctcgcta

SEQ ID NO: 24746 - DNA, 25 bp, Saccharomyces pastorianus
gcctcgctaactacgctagtgtgta

SEQ ID NO: 24747 - DNA, 25 bp, Saccharomyces pastorianus
aagccggatgacaacatgcgccgtg

SEQ ID NO: 24748 - DNA, 25 bp, Saccharomyces pastorianus
tgattaagcatagagccgccctgga

SEQ ID NO: 24749 - DNA, 25 bp, Saccharomyces pastorianus
caagaagcagcgttgggaggtccca

SEQ ID NO: 24750 - DNA, 25 bp, Saccharomyces pastorianus
gtttgccattggtactatagtcgaa

SEQ ID NO: 24751 - DNA, 25 bp, Saccharomyces pastorianus
gaaagtccaccatcctagaaacgct

SEQ ID NO: 24752 - DNA, 25 bp, Saccharomyces pastorianus
ggcaagttgcccagtatcgagatag

SEQ ID NO: 24753 - DNA, 25 bp, Saccharomyces pastorianus
gaaaacggattcgatgccctagcca

SEQ ID NO: 24754 - DNA, 25 bp, Saccharomyces pastorianus
gacgatacctccaacaagtacttca

SEQ ID NO: 24755 - DNA, 25 bp, Saccharomyces pastorianus
ggatgacagcgactggttcgcctta

SEQ ID NO: 24756 - DNA, 25 bp, Saccharomyces pastorianus
atgcgccgtgaagtccagcgagatt

SEQ ID NO: 24757 - DNA, 25 bp, Saccharomyces pastorianus
aaacgctcatgggtgacgatacctc

SEQ ID NO: 24758 - DNA, 25 bp, Saccharomyces pastorianus
gaatgaccagtttctacaagctgtc

SEQ ID NO: 24759 - DNA, 25 bp, Saccharomyces pastorianus
tctaccttttctggtcacaccaata

SEQ ID NO: 24760 - DNA, 25 bp, Saccharomyces pastorianus
ggataacctctacactatgaatgac

SEQ ID NO: 24761 - DNA, 25 bp, Saccharomyces pastorianus
tcacaccaatagctcgactttcaaa

SEQ ID NO: 24762 - DNA, 25 bp, Saccharomyces pastorianus
gatccaagaaaacctactcgacgag

SEQ ID NO: 24763 - DNA, 25 bp, Saccharomyces pastorianus
gaaccaacaaagttcatcgaccccg

SEQ ID NO: 24764 - DNA, 25 bp, Saccharomyces pastorianus
gtggccatcccaaccaatgttaatg

SEQ ID NO: 24765 - DNA, 25 bp, Saccharomyces pastorianus
atcgatatactgtccaagatccaag

SEQ ID NO: 24766 - DNA, 25 bp, Saccharomyces pastorianus
agacacattgtagccgtggacgata

SEQ ID NO: 24767 - DNA, 25 bp, Saccharomyces pastorianus
aatgctaattccctggcgttcaata

SEQ ID NO: 24768 - DNA, 25 bp, Saccharomyces pastorianus
gaaggaaggcaaaccacccaatcgc

SEQ ID NO: 24769 - DNA, 25 bp, Saccharomyces pastorianus
tgacctgaaaatgccctcgaaacca

SEQ ID NO: 24770 - DNA, 25 bp, Saccharomyces pastorianus
ttgaaattgccgtccatttcgggtc

SEQ ID NO: 24771 - DNA, 25 bp, Saccharomyces pastorianus
gttcctggtcatcacggtggcatta

SEQ ID NO: 24772 - DNA, 25 bp, Saccharomyces pastorianus
aatcggtgttcatgacttccggatt

SEQ ID NO: 24773 - DNA, 25 bp, Saccharomyces pastorianus
taaagtaccgttcctcatcgttcct

SEQ ID NO: 24774 - DNA, 25 bp, Saccharomyces pastorianus
agtcgcccgcattgaacctggaaag

SEQ ID NO: 24775 - DNA, 25 bp, Saccharomyces pastorianus
acgcttgcgtggaacagtttgacct

SEQ ID NO: 24776 - DNA, 25 bp, Saccharomyces pastorianus
ggatgtcgcagtggcagcttcaaat

SEQ ID NO: 24777 - DNA, 25 bp, Saccharomyces pastorianus
tacatatttgggatcgacgcacgac

SEQ ID NO: 24778 - DNA, 25 bp, Saccharomyces pastorianus
tctcctgtgtgaaagccatgcccaa

SEQ ID NO: 24779 - DNA, 25 bp, Saccharomyces pastorianus
gaaagaggcccaaacattccaccat

SEQ ID NO: 24780 - DNA, 25 bp, Saccharomyces pastorianus
acttgtcaaacaaccctgctgtgaa

SEQ ID NO: 24781 - DNA, 25 bp, Saccharomyces pastorianus
actttcgtcaacttctggactgtca

SEQ ID NO: 24782 - DNA, 25 bp, Saccharomyces pastorianus
tcgtcatcgaatacttcaccttcat

SEQ ID NO: 24783 - DNA, 25 bp, Saccharomyces pastorianus
ggtcaatttaccactctctgggata

SEQ ID NO: 24784 - DNA, 25 bp, Saccharomyces pastorianus
tacttggcccacagatggttgcact

SEQ ID NO: 24785 - DNA, 25 bp, Saccharomyces pastorianus
gactgggtggttcataccgtagacc

SEQ ID NO: 24786 - DNA, 25 bp, Saccharomyces pastorianus
acgggttcttacaatccatctctta

SEQ ID NO: 24787 - DNA, 25 bp, Saccharomyces pastorianus
gtttgaccctactttgagagactcc

SEQ ID NO: 24788 - DNA, 25 bp, Saccharomyces pastorianus
gtgaacggtacagcgtgccacacag

SEQ ID NO: 24789 - DNA, 25 bp, Saccharomyces pastorianus
gaaatgaacggccactccaagcttt

SEQ ID NO: 24790 - DNA, 25 bp, Saccharomyces pastorianus
catgatccatgacggccaatacttg

SEQ ID NO: 24791 - DNA, 25 bp, Saccharomyces pastorianus
ggaaaaacaaagtctgccactgcag

SEQ ID NO: 24792 - DNA, 25 bp, Saccharomyces pastorianus
aatcgtttgaaatcctgctgagaga

SEQ ID NO: 24793 - DNA, 25 bp, Saccharomyces pastorianus
gaagcatgggcagacaatcgtttga

SEQ ID NO: 24794 - DNA, 25 bp, Saccharomyces pastorianus
acaaatggacaaaccatccggactg

SEQ ID NO: 24795 - DNA, 25 bp, Saccharomyces pastorianus
aaagcattaaataccacacccttgg

SEQ ID NO: 24796 - DNA, 25 bp, Saccharomyces pastorianus
ttggcaaagacatcaaaccgcatat

SEQ ID NO: 24797 - DNA, 25 bp, Saccharomyces pastorianus
gccactgcagcgaatgatgacgaaa

SEQ ID NO: 24798 - DNA, 25 bp, Saccharomyces pastorianus
ttggaaccacggtacaaatggagat

SEQ ID NO: 24799 - DNA, 25 bp, Saccharomyces pastorianus
gcgtagagtttacacatttggcaaa

SEQ ID NO: 24800 - DNA, 25 bp, Saccharomyces pastorianus
tggccattgtgggtcaacaaagtgg

SEQ ID NO: 24801 - DNA, 25 bp, Saccharomyces pastorianus
atatgagatccttgaaaatgaccag

SEQ ID NO: 24802 - DNA, 25 bp, Saccharomyces pastorianus
taacaaggctgtcgaattcgcccgc

SEQ ID NO: 24803 - DNA, 25 bp, Saccharomyces pastorianus
gaactccattccaggtgacaaatcc

SEQ ID NO: 24804 - DNA, 25 bp, Saccharomyces pastorianus
gtattggtgctccagctatgaccac

SEQ ID NO: 24805 - DNA, 25 bp, Saccharomyces pastorianus
attcgcccgcgaagttcaacaaagc

SEQ ID NO: 24806 - DNA, 25 bp, Saccharomyces pastorianus
aatcataccattgctgctttggcca

SEQ ID NO: 24807 - DNA, 25 bp, Saccharomyces pastorianus
actcccatatggttctagtatcctt

SEQ ID NO: 24808 - DNA, 25 bp, Saccharomyces pastorianus
tttggccactgccttgaagcaagct

SEQ ID NO: 24809 - DNA, 25 bp, Saccharomyces pastorianus
gtttctaacggtacagactcccata

SEQ ID NO: 24810 - DNA, 25 bp, Saccharomyces pastorianus
gacggtgcccgtgttgaatatatct

SEQ ID NO: 24811 - DNA, 25 bp, Saccharomyces pastorianus
gcaagctgctactccagaattcgta

SEQ ID NO: 24812 - DNA, 25 bp, Saccharomyces pastorianus
tgacaaatccgctttggtcccaggt

SEQ ID NO: 24813 - DNA, 25 bp, Saccharomyces pastorianus
agtgttgtccactatggtcctgagg

SEQ ID NO: 24814 - DNA, 25 bp, Saccharomyces pastorianus
agcaaccagagtcagcgtcttcgtc

SEQ ID NO: 24815 - DNA, 25 bp, Saccharomyces pastorianus
gagacagagtcccacgagtcaactg

SEQ ID NO: 24816 - DNA, 25 bp, Saccharomyces pastorianus
atctgctgcattatcaccgatggtc

SEQ ID NO: 24817 - DNA, 25 bp, Saccharomyces pastorianus
ttttggccggcaacagtgtgcacat

SEQ ID NO: 24818 - DNA, 25 bp, Saccharomyces pastorianus
cgatggtcatttaacgcccgtgcag

SEQ ID NO: 24819 - DNA, 25 bp, Saccharomyces pastorianus
agaacatcggtgttttggccggcaa

SEQ ID NO: 24820 - DNA, 25 bp, Saccharomyces pastorianus
gaaatgaccggcctggaccacgtga

SEQ ID NO: 24821 - DNA, 25 bp, Saccharomyces pastorianus
atcgaccatcttttctaccgaattg

SEQ ID NO: 24822 - DNA, 25 bp, Saccharomyces pastorianus
gaccggatcatcgaaatctgctgca

SEQ ID NO: 24823 - DNA, 25 bp, Saccharomyces pastorianus
gtgtgcacatggaccgtctgttcat

SEQ ID NO: 24824 - DNA, 25 bp, Saccharomyces pastorianus
gatcatgcagactttcagaacagaa

SEQ ID NO: 24825 - DNA, 25 bp, Saccharomyces pastorianus
gtgagaaccaccctattaccaggta

SEQ ID NO: 24826 - DNA, 25 bp, Saccharomyces pastorianus
ttcagaattgcatcatcccaagcct

SEQ ID NO: 24827 - DNA, 25 bp, Saccharomyces pastorianus
gaggagccattgttatgttcagatc

SEQ ID NO: 24828 - DNA, 25 bp, Saccharomyces pastorianus
gctggaagttttgccattgacctta

SEQ ID NO: 24829 - DNA, 25 bp, Saccharomyces pastorianus
gacctagcagtcaaattggccaatc

SEQ ID NO: 24830 - DNA, 25 bp, Saccharomyces pastorianus
tgtcaagacctacttccctggaaga

SEQ ID NO: 24831 - DNA, 25 bp, Saccharomyces pastorianus
aatgaacgtcattgggctgcgattt

SEQ ID NO: 24832 - DNA, 25 bp, Saccharomyces pastorianus
atacagatcggccacctgggtgtct

SEQ ID NO: 24833 - DNA, 25 bp, Saccharomyces pastorianus
ctggcgcatccggtagaggttactg

SEQ ID NO: 24834 - DNA, 25 bp, Saccharomyces pastorianus
gaagcagcctgacaacaatgaccta

SEQ ID NO: 24835 - DNA, 25 bp, Saccharomyces pastorianus
attatttgcggattgcgcgtgggcc

SEQ ID NO: 24836 - DNA, 25 bp, Saccharomyces pastorianus
acagatggcccaagtcttcgaaatt

SEQ ID NO: 24837 - DNA, 25 bp, Saccharomyces pastorianus
atcttccacttcctaaattacttca

SEQ ID NO: 24838 - DNA, 25 bp, Saccharomyces pastorianus
gtcctgttattttttctatcttcca

SEQ ID NO: 24839 - DNA, 25 bp, Saccharomyces pastorianus
gacgtacctgtggttcttcaagtta

SEQ ID NO: 24840 - DNA, 25 bp, Saccharomyces pastorianus
gaagttcaatatcacgcttttgcga

SEQ ID NO: 24841 - DNA, 25 bp, Saccharomyces pastorianus
catacttttcccttttctggagtgg

SEQ ID NO: 24842 - DNA, 25 bp, Saccharomyces pastorianus
actaccatttctaccattgttacca

SEQ ID NO: 24843 - DNA, 25 bp, Saccharomyces pastorianus
tatgctatcgtgctttaccagttct

SEQ ID NO: 24844 - DNA, 25 bp, Saccharomyces pastorianus
tatttggtacgatcctagccggttt

SEQ ID NO: 24845 - DNA, 25 bp, Saccharomyces pastorianus
gattggatgcctacatcagccgtac

SEQ ID NO: 24846 - DNA, 25 bp, Saccharomyces pastorianus
ggtggtgtttattactgtgtccaat

SEQ ID NO: 24847 - DNA, 25 bp, Saccharomyces pastorianus
ttttcctgtttttagggatggccat

SEQ ID NO: 24848 - DNA, 25 bp, Saccharomyces pastorianus
caggctataagctatacgggctcaa

SEQ ID NO: 24849 - DNA, 25 bp, Saccharomyces pastorianus
aaatgatggcccagatgccggcgat

SEQ ID NO: 24850 - DNA, 25 bp, Saccharomyces pastorianus
gtgatatccggttcacccaagtatg

SEQ ID NO: 24851 - DNA, 25 bp, Saccharomyces pastorianus
aacgaacctcgtttggacaatggat

SEQ ID NO: 24852 - DNA, 25 bp, Saccharomyces pastorianus
ggatggccattgtacgtcttttaat

SEQ ID NO: 24853 - DNA, 25 bp, Saccharomyces pastorianus
gccggcgatggcaagtcaaagtcta

SEQ ID NO: 24854 - DNA, 25 bp, Saccharomyces pastorianus
aaaatatgattatgcctggcgctca

SEQ ID NO: 24855 - DNA, 25 bp, Saccharomyces pastorianus
tgtgtccaatttacgcaggctataa

SEQ ID NO: 24856 - DNA, 25 bp, Saccharomyces pastorianus
gtaacgttggtataatagccttcag

SEQ ID NO: 24857 - DNA, 25 bp, Saccharomyces pastorianus
cgttctccctacctagtgatattga

SEQ ID NO: 24858 - DNA, 25 bp, Saccharomyces pastorianus
gttgtgtttatcatggcatcttcct

SEQ ID NO: 24859 - DNA, 25 bp, Saccharomyces pastorianus
aagtagatacttcggctcacaaaga

SEQ ID NO: 24860 - DNA, 25 bp, Saccharomyces pastorianus
ggtatttgtctatttgactgccgaa

SEQ ID NO: 24861 - DNA, 25 bp, Saccharomyces pastorianus
gccagtgaagtcactttttgggata

SEQ ID NO: 24862 - DNA, 25 bp, Saccharomyces pastorianus
aatgtatcgaatcatgccttttcat

SEQ ID NO: 24863 - DNA, 25 bp, Saccharomyces pastorianus
gcatcttcctactaccagttaatca

SEQ ID NO: 24864 - DNA, 25 bp, Saccharomyces pastorianus
cattggaacattcaaccatgggttg

SEQ ID NO: 24865 - DNA, 25 bp, Saccharomyces pastorianus
gacctaaatacagatttgactcccc

SEQ ID NO: 24866 - DNA, 25 bp, Saccharomyces pastorianus
ccatgggttggcttgttaacttacg

SEQ ID NO: 24867 - DNA, 25 bp, Saccharomyces pastorianus
taatcaataacagcgcgttctccct

SEQ ID NO: 24868 - DNA, 25 bp, Saccharomyces pastorianus
tggaaacccggatacgtgattttat

SEQ ID NO: 24869 - DNA, 25 bp, Saccharomyces pastorianus
gtctgttcagtggacttttcccata

SEQ ID NO: 24870 - DNA, 25 bp, Saccharomyces pastorianus
attgatgaattaccactgctgtgga

SEQ ID NO: 24871 - DNA, 25 bp, Saccharomyces pastorianus
tatcccaagatacggcacactcaag

SEQ ID NO: 24872 - DNA, 25 bp, Saccharomyces pastorianus
ggaatagcacagtagacgcactttt

SEQ ID NO: 24873 - DNA, 25 bp, Saccharomyces pastorianus
gaaatgagacattcctcgtacttta

SEQ ID NO: 24874 - DNA, 25 bp, Saccharomyces pastorianus
aaagattcaaggaccatttcatatg

SEQ ID NO: 24875 - DNA, 25 bp, Saccharomyces pastorianus
gagagtttaccatcgtctacaacac

SEQ ID NO: 24876 - DNA, 25 bp, Saccharomyces pastorianus
ttcatggacatgacttgattcacaa

SEQ ID NO: 24877 - DNA, 25 bp, Saccharomyces pastorianus
gatccgtataagttccaacccaagt

SEQ ID NO: 24878 - DNA, 25 bp, Saccharomyces pastorianus
gatacggcacactcaagtcataaat

SEQ ID NO: 24879 - DNA, 25 bp, Saccharomyces pastorianus
tcctaagatcgaggaccttttggat

SEQ ID NO: 24880 - DNA, 25 bp, Saccharomyces pastorianus
gaacaaggtcgggtcaacctctgat

SEQ ID NO: 24881 - DNA, 25 bp, Saccharomyces pastorianus
gaaccggtgtgaaagactctgttag

SEQ ID NO: 24882 - DNA, 25 bp, Saccharomyces pastorianus
gaacgaatcagagtatccaaggaaa

SEQ ID NO: 24883 - DNA, 25 bp, Saccharomyces pastorianus
gggtacagctaagcagagtcagaat

SEQ ID NO: 24884 - DNA, 25 bp, Saccharomyces pastorianus
ggaaggaatatctcaaagctctaaa

SEQ ID NO: 24885 - DNA, 25 bp, Saccharomyces pastorianus
gtatcacgaagaagaccagacttag

SEQ ID NO: 24886 - DNA, 25 bp, Saccharomyces pastorianus
gagaaggaacctagaaccggtgtga

SEQ ID NO: 24887 - DNA, 25 bp, Saccharomyces pastorianus
gaaagatcaaggaagccagggctac

SEQ ID NO: 24888 - DNA, 25 bp, Saccharomyces pastorianus
aacctctgatgggtcctaagatcga

SEQ ID NO: 24889 - DNA, 25 bp, Saccharomyces pastorianus
aagctctaaaggatgaagggtatac

SEQ ID NO: 24890 - DNA, 25 bp, Saccharomyces pastorianus
tggtgctcagccttgcatcagaaca

SEQ ID NO: 24891 - DNA, 25 bp, Saccharomyces pastorianus
gaaccattgtcggtggcagtccacg

SEQ ID NO: 24892 - DNA, 25 bp, Saccharomyces pastorianus
agggagactacagcgactctatcga

SEQ ID NO: 24893 - DNA, 25 bp, Saccharomyces pastorianus
gagatttggcgctcgatgcgtcgta

SEQ ID NO: 24894 - DNA, 25 bp, Saccharomyces pastorianus
ggcccgtaggtctgttgactggtaa

SEQ ID NO: 24895 - DNA, 25 bp, Saccharomyces pastorianus
gtttggtgcgacacatacggtcaac

SEQ ID NO: 24896 - DNA, 25 bp, Saccharomyces pastorianus
aaggctccttcaggtactgtcaggg

SEQ ID NO: 24897 - DNA, 25 bp, Saccharomyces pastorianus
gtagtcttcgtggacctgtcagaaa

SEQ ID NO: 24898 - DNA, 25 bp, Saccharomyces pastorianus
gattacacatcgctaccagtttaag

SEQ ID NO: 24899 - DNA, 25 bp, Saccharomyces pastorianus
tacggtcaactcaggcgacttgcca

SEQ ID NO: 24900 - DNA, 25 bp, Saccharomyces pastorianus
gttagtctcgactgggaagctctcg

SEQ ID NO: 24901 - DNA, 25 bp, Saccharomyces pastorianus
gcaatggtgttgcttgtgaccccag

SEQ ID NO: 24902 - DNA, 25 bp, Saccharomyces pastorianus
aaccgttttgcataatggtcgtgac

SEQ ID NO: 24903 - DNA, 25 bp, Saccharomyces pastorianus
gagactagggactgcagaaactgtt

SEQ ID NO: 24904 - DNA, 25 bp, Saccharomyces pastorianus
agatccagttccacattcattttgc

SEQ ID NO: 24905 - DNA, 25 bp, Saccharomyces pastorianus
gtgaccccagcgagatagagcctat

SEQ ID NO: 24906 - DNA, 25 bp, Saccharomyces pastorianus
cagtgcaattatcaccttcgaaccc

SEQ ID NO: 24907 - DNA, 25 bp, Saccharomyces pastorianus
agaaactgttaagccaacccttgca

SEQ ID NO: 24908 - DNA, 25 bp, Saccharomyces pastorianus
aaaattccgtactggtggaagccag

SEQ ID NO: 24909 - DNA, 25 bp, Saccharomyces pastorianus
gcacgccatccgtttaggcaatggt

SEQ ID NO: 24910 - DNA, 25 bp, Saccharomyces pastorianus
ggaagccagtactcgaccatggtga

SEQ ID NO: 24911 - DNA, 25 bp, Saccharomyces pastorianus
gaccatggtgaacattggattgcat

SEQ ID NO: 24912 - DNA, 25 bp, Saccharomyces pastorianus
agtaagctgttggtccaggacgcta

SEQ ID NO: 24913 - DNA, 25 bp, Saccharomyces pastorianus
ccgtccataccgctgaggatatatt

SEQ ID NO: 24914 - DNA, 25 bp, Saccharomyces pastorianus
agtcgctgccgaaggagtcgttcaa

SEQ ID NO: 24915 - DNA, 25 bp, Saccharomyces pastorianus
gatggacccgtcgtctatttataaa

SEQ ID NO: 24916 - DNA, 25 bp, Saccharomyces pastorianus
accggtgatctgtcgctggcgttta

SEQ ID NO: 24917 - DNA, 25 bp, Saccharomyces pastorianus
cagtgtgcgttccagaccggtgatc

SEQ ID NO: 24918 - DNA, 25 bp, Saccharomyces pastorianus
taaaacttgaggtacccgcggtctg

SEQ ID NO: 24919 - DNA, 25 bp, Saccharomyces pastorianus
caagctgcagacttcattggccaat

SEQ ID NO: 24920 - DNA, 25 bp, Saccharomyces pastorianus
tgtctaagcaccctgaattgtccat

SEQ ID NO: 24921 - DNA, 25 bp, Saccharomyces pastorianus
gattcaaccagtcaatctccttctt

SEQ ID NO: 24922 - DNA, 25 bp, Saccharomyces pastorianus
ggtacccgcggtctgcaaaataatt

SEQ ID NO: 24923 - DNA, 25 bp, Saccharomyces pastorianus
ggctcaagccggtgaagtcaaggat

SEQ ID NO: 24924 - DNA, 25 bp, Saccharomyces pastorianus
gaagaaggccactgtcgatgaattt

SEQ ID NO: 24925 - DNA, 25 bp, Saccharomyces pastorianus
gtcaacaaaagatcatcatgtccaa

SEQ ID NO: 24926 - DNA, 25 bp, Saccharomyces pastorianus
aagatcatcatgtccaagaagtggg

SEQ ID NO: 24927 - DNA, 25 bp, Saccharomyces pastorianus
acttgaagaaggctcaagccggtga

SEQ ID NO: 24928 - DNA, 25 bp, Saccharomyces pastorianus
gccactgtcgatgaatttccattgt

SEQ ID NO: 24929 - DNA, 25 bp, Saccharomyces pastorianus
atcagaatttacgatctaggtaaga

SEQ ID NO: 24930 - DNA, 25 bp, Saccharomyces pastorianus
gaccagactacttgaagaaggctca

SEQ ID NO: 24931 - DNA, 25 bp, Saccharomyces pastorianus
aaggccactgtcgatgaatttccat

SEQ ID NO: 24932 - DNA, 25 bp, Saccharomyces pastorianus
cggtgaagtcaaggatgacggttct

SEQ ID NO: 24933 - DNA, 25 bp, Saccharomyces pastorianus
aggtaagaagaaggccactgtcgat

SEQ ID NO: 24934 - DNA, 25 bp, Saccharomyces pastorianus
gggtcttaccatacgctagcattgg

SEQ ID NO: 24935 - DNA, 25 bp, Saccharomyces pastorianus
atattccagacgtcttgaagcccgg

SEQ ID NO: 24936 - DNA, 25 bp, Saccharomyces pastorianus
ggagctttacgcctttggttggaat

SEQ ID NO: 24937 - DNA, 25 bp, Saccharomyces pastorianus
attcactgtgatgacgaaacctcgt

SEQ ID NO: 24938 - DNA, 25 bp, Saccharomyces pastorianus
aggccgggtgtaattccagatcatt

SEQ ID NO: 24939 - DNA, 25 bp, Saccharomyces pastorianus
ataagattgcgtgcgggtcttacca

SEQ ID NO: 24940 - DNA, 25 bp, Saccharomyces pastorianus
tgaagcccggacaggataccacaga

SEQ ID NO: 24941 - DNA, 25 bp, Saccharomyces pastorianus
ggagttgcggttcacatgctgtctt

SEQ ID NO: 24942 - DNA, 25 bp, Saccharomyces pastorianus
aatatgtttcattccccagatcagt

SEQ ID NO: 24943 - DNA, 25 bp, Saccharomyces pastorianus
ttgttaacattcgtaggccgggtgt

SEQ ID NO: 24944 - DNA, 25 bp, Saccharomyces pastorianus
gctttgcccatctcgtacaatttag

SEQ ID NO: 24945 - DNA, 25 bp, Saccharomyces pastorianus
aagggctgctgtttgattcccagaa

SEQ ID NO: 24946 - DNA, 25 bp, Saccharomyces pastorianus
atcctgctcctcaacggtaatttta

SEQ ID NO: 24947 - DNA, 25 bp, Saccharomyces pastorianus
aacagtttctgttctcggtattgca

SEQ ID NO: 24948 - DNA, 25 bp, Saccharomyces pastorianus
gaactggacaccttactttacgtca

SEQ ID NO: 24949 - DNA, 25 bp, Saccharomyces pastorianus
atcttcatcggccagtagtgagtcg

SEQ ID NO: 24950 - DNA, 25 bp, Saccharomyces pastorianus
gatcaacacaaacgcagactcctat

SEQ ID NO: 24951 - DNA, 25 bp, Saccharomyces pastorianus
aacatggccgtgacaagtcctcaat

SEQ ID NO: 24952 - DNA, 25 bp, Saccharomyces pastorianus
gattacgagcccattaaaccacgaa

SEQ ID NO: 24953 - DNA, 25 bp, Saccharomyces pastorianus
gtgtcagccgaattcaactctcaaa

SEQ ID NO: 24954 - DNA, 25 bp, Saccharomyces pastorianus
gacacctcgttgcttatctacaggg

SEQ ID NO: 24955 - DNA, 25 bp, Saccharomyces pastorianus
agctctgttagctctgtgacaacga

SEQ ID NO: 24956 - DNA, 25 bp, Saccharomyces pastorianus
tcaaccttcctaatttttcgcagcg

SEQ ID NO: 24957 - DNA, 25 bp, Saccharomyces pastorianus
gactgcacacttttcggctgggaag

SEQ ID NO: 24958 - DNA, 25 bp, Saccharomyces pastorianus
gagagtctgtccatgctgccggaaa

SEQ ID NO: 24959 - DNA, 25 bp, Saccharomyces pastorianus
gaaatagtacgacccctcatgatag

SEQ ID NO: 24960 - DNA, 25 bp, Saccharomyces pastorianus
aagtgtctctttgtaagcccggtct

SEQ ID NO: 24961 - DNA, 25 bp, Saccharomyces pastorianus
gaggcaactgcctacagactggact

SEQ ID NO: 24962 - DNA, 25 bp, Saccharomyces pastorianus
atattacgagcacggtcctgactgg

SEQ ID NO: 24963 - DNA, 25 bp, Saccharomyces pastorianus
cgcagtttacagagaccgagtccta

SEQ ID NO: 24964 - DNA, 25 bp, Saccharomyces pastorianus
ggacttgccatgtgtcagtgccaga

SEQ ID NO: 24965 - DNA, 25 bp, Saccharomyces pastorianus
caattccagagacgtttttccatcc

SEQ ID NO: 24966 - DNA, 25 bp, Saccharomyces pastorianus
ggaatacgtactgcctgattttcaa

SEQ ID NO: 24967 - DNA, 25 bp, Saccharomyces pastorianus
tcgacaaggctgtctgcggagactt

SEQ ID NO: 24968 - DNA, 25 bp, Saccharomyces pastorianus
gtggatatcgaattccctccagata

SEQ ID NO: 24969 - DNA, 25 bp, Saccharomyces pastorianus
caatgcggcgatctgtacgttttcg

SEQ ID NO: 24970 - DNA, 25 bp, Saccharomyces pastorianus
taccgggagcgacaacagtccgatt

SEQ ID NO: 24971 - DNA, 25 bp, Saccharomyces pastorianus
gacttgatctttcatctcgttgaga

SEQ ID NO: 24972 - DNA, 25 bp, Saccharomyces pastorianus
gttcggcgacgaaaacctgcaagat

SEQ ID NO: 24973 - DNA, 25 bp, Saccharomyces pastorianus
atgaaggcgttcaatcccaaaccgc

SEQ ID NO: 24974 - DNA, 25 bp, Saccharomyces pastorianus
ctccaacatcactgcaaataccggg

SEQ ID NO: 24975 - DNA, 25 bp, Saccharomyces pastorianus
gtatcgaacttccagatcatccaca

SEQ ID NO: 24976 - DNA, 25 bp, Saccharomyces pastorianus
aagtcataagacctggcgatatcat

SEQ ID NO: 24977 - DNA, 25 bp, Saccharomyces pastorianus
aaatcaccagcgaaggttggcccat

SEQ ID NO: 24978 - DNA, 25 bp, Saccharomyces pastorianus
gaaaatgctgccaacaacccaactg

SEQ ID NO: 24979 - DNA, 25 bp, Saccharomyces pastorianus
gtgtcctcgtttacaggctatccga

SEQ ID NO: 24980 - DNA, 25 bp, Saccharomyces pastorianus
caaacagatgccactgctcttcagt

SEQ ID NO: 24981 - DNA, 25 bp, Saccharomyces pastorianus
gaaacggatatcgagcctgccgaaa

SEQ ID NO: 24982 - DNA, 25 bp, Saccharomyces pastorianus
tgtttggatttctcgcaagtggcgc

SEQ ID NO: 24983 - DNA, 25 bp, Saccharomyces pastorianus
aacccaactgatgctgaccgagatg

SEQ ID NO: 24984 - DNA, 25 bp, Saccharomyces pastorianus
atcacgtcgcaagagtacctcaaaa

SEQ ID NO: 24985 - DNA, 25 bp, Saccharomyces pastorianus
ggctatccgatagttacacgtatat

SEQ ID NO: 24986 - DNA, 25 bp, Saccharomyces pastorianus
atagcgtttacactgtttcaggtac

SEQ ID NO: 24987 - DNA, 25 bp, Saccharomyces pastorianus
ccatttcgttggtatcatttcatca

SEQ ID NO: 24988 - DNA, 25 bp, Saccharomyces pastorianus
gctcttcagtcactggttgacctaa

SEQ ID NO: 24989 - DNA, 25 bp, Saccharomyces pastorianus
aagccttggttcaacaatcgcggta

SEQ ID NO: 24990 - DNA, 25 bp, Saccharomyces pastorianus
cgacctgcttctaccgaacaaaaga

SEQ ID NO: 24991 - DNA, 25 bp, Saccharomyces pastorianus
aaagagctctttggttcgcgtgcac

SEQ ID NO: 24992 - DNA, 25 bp, Saccharomyces pastorianus
ggtacaatgctcaaaccatgcggga

SEQ ID NO: 24993 - DNA, 25 bp, Saccharomyces pastorianus
aagactactgcacccacaagagata

SEQ ID NO: 24994 - DNA, 25 bp, Saccharomyces pastorianus
aaaattgccctcatcaccagaaaaa

SEQ ID NO: 24995 - DNA, 25 bp, Saccharomyces pastorianus
gtgcactcggacgtcaagccttggt

SEQ ID NO: 24996 - DNA, 25 bp, Saccharomyces pastorianus
caaggtctccacacgggacatcaaa

SEQ ID NO: 24997 - DNA, 25 bp, Saccharomyces pastorianus
ggtggacgaccatctgctgaagcaa

SEQ ID NO: 24998 - DNA, 25 bp, Saccharomyces pastorianus
gaacgatctctttggcgattccacg

SEQ ID NO: 24999 - DNA, 25 bp, Saccharomyces pastorianus
aactcacatactccgatatctggtc

SEQ ID NO: 25000 - DNA, 25 bp, Saccharomyces pastorianus
aattttgacttcaccttactgaatg

SEQ ID NO: 25001 - DNA, 25 bp, Saccharomyces pastorianus
attgaaaactccgaagacactttgc

SEQ ID NO: 25002 - DNA, 25 bp, Saccharomyces pastorianus
gatgaattgtactacctcttgaaag

SEQ ID NO: 25003 - DNA, 25 bp, Saccharomyces pastorianus
gtcccaacgaaactttacttcagag

SEQ ID NO: 25004 - DNA, 25 bp, Saccharomyces pastorianus
aagggatttaccaattgaactgcaa

SEQ ID NO: 25005 - DNA, 25 bp, Saccharomyces pastorianus
atttattgggtaccttatctcacgg

SEQ ID NO: 25006 - DNA, 25 bp, Saccharomyces pastorianus
gtacttatctaaattcaacctcgaa

SEQ ID NO: 25007 - DNA, 25 bp, Saccharomyces pastorianus
caatcccaccattgcttatgtttgg

SEQ ID NO: 25008 - DNA, 25 bp, Saccharomyces pastorianus
cattgaactatgaactcgccagaaa

SEQ ID NO: 25009 - DNA, 25 bp, Saccharomyces pastorianus
tgaacttcttagacgcacctacatt

SEQ ID NO: 25010 - DNA, 25 bp, Saccharomyces pastorianus
ggaatgtctgatttcaatcccacca

SEQ ID NO: 25011 - DNA, 25 bp, Saccharomyces pastorianus
gcaggctacctgactactgagtcga

SEQ ID NO: 25012 - DNA, 25 bp, Saccharomyces pastorianus
aacgtcggtcttttgaatccagcaa

SEQ ID NO: 25013 - DNA, 25 bp, Saccharomyces pastorianus
atggaggttcctgatgctggtcaca

SEQ ID NO: 25014 - DNA, 25 bp, Saccharomyces pastorianus
aaatccatcgacaaactgtgcctca

SEQ ID NO: 25015 - DNA, 25 bp, Saccharomyces pastorianus
aggaacctgattgcgcgagatccaa

SEQ ID NO: 25016 - DNA, 25 bp, Saccharomyces pastorianus
gaaagctgaacgttcctcggttcat

SEQ ID NO: 25017 - DNA, 25 bp, Saccharomyces pastorianus
gctggtcacaacctatttctggaca

SEQ ID NO: 25018 - DNA, 25 bp, Saccharomyces pastorianus
tcatgtacggcgaacacgactggat

SEQ ID NO: 25019 - DNA, 25 bp, Saccharomyces pastorianus
aggtgcccgaccaactgtacaaaga

SEQ ID NO: 25020 - DNA, 25 bp, Saccharomyces pastorianus
aagctgtgctcgagttacatctcca

SEQ ID NO: 25021 - DNA, 25 bp, Saccharomyces pastorianus
aagactacctcttgcactcatttgt

SEQ ID NO: 25022 - DNA, 25 bp, Saccharomyces pastorianus
gcaaggccttggcacgatcagcagc

SEQ ID NO: 25023 - DNA, 25 bp, Saccharomyces pastorianus
ggacacatcggttgtcctgcaaggc

SEQ ID NO: 25024 - DNA, 25 bp, Saccharomyces pastorianus
catcgctgagcaacgagctggcgga

SEQ ID NO: 25025 - DNA, 25 bp, Saccharomyces pastorianus
aacgagctggcggatgcgcaacgcc

SEQ ID NO: 25026 - DNA, 25 bp, Saccharomyces pastorianus
acgccagtgggaggagtcgctgcaa

SEQ ID NO: 25027 - DNA, 25 bp, Saccharomyces pastorianus
cgatcagcagcctagagggtctgga

SEQ ID NO: 25028 - DNA, 25 bp, Saccharomyces pastorianus
tcggttgtcctgcaaggccttggca

SEQ ID NO: 25029 - DNA, 25 bp, Saccharomyces pastorianus
gcacgatcagcagcctagagggtct

SEQ ID NO: 25030 - DNA, 25 bp, Saccharomyces pastorianus
aggacgatgggtacctcagcgacga

SEQ ID NO: 25031 - DNA, 25 bp, Saccharomyces pastorianus
gggcaggaggatggccaagacgctt

SEQ ID NO: 25032 - DNA, 25 bp, Saccharomyces pastorianus
gacgaggacacatcgctgagcaacg

SEQ ID NO: 25033 - DNA, 25 bp, Saccharomyces pastorianus
accagtacgtggttcagcccggtat

SEQ ID NO: 25034 - DNA, 25 bp, Saccharomyces pastorianus
tattttggcatgttgctcctgttct

SEQ ID NO: 25035 - DNA, 25 bp, Saccharomyces pastorianus
gtcagacgttttcgcttatctacag

SEQ ID NO: 25036 - DNA, 25 bp, Saccharomyces pastorianus
aggacatcaagtacggttctgccac

SEQ ID NO: 25037 - DNA, 25 bp, Saccharomyces pastorianus
ttcacaagtcagtccttttccaagt

SEQ ID NO: 25038 - DNA, 25 bp, Saccharomyces pastorianus
aatgcacccgtgtacgtgactaggt

SEQ ID NO: 25039 - DNA, 25 bp, Saccharomyces pastorianus
ttgggtgtccagtatcatgtccgat

SEQ ID NO: 25040 - DNA, 25 bp, Saccharomyces pastorianus
ggccaaccccaatttcgaaaagcag

SEQ ID NO: 25041 - DNA, 25 bp, Saccharomyces pastorianus
gttctgccacttcatgggacggtat

SEQ ID NO: 25042 - DNA, 25 bp, Saccharomyces pastorianus
ttagttgacctgctgcatttggcca

SEQ ID NO: 25043 - DNA, 25 bp, Saccharomyces pastorianus
gatgggccggatctccatggcataa

SEQ ID NO: 25044 - DNA, 25 bp, Saccharomyces pastorianus
aagcccgatgcgcatgagaacgaca

SEQ ID NO: 25045 - DNA, 25 bp, Saccharomyces pastorianus
agtttgtgacaagttcgaggccgaa

SEQ ID NO: 25046 - DNA, 25 bp, Saccharomyces pastorianus
ggatctggtcagttctttgcaaagt

SEQ ID NO: 25047 - DNA, 25 bp, Saccharomyces pastorianus
gtattccacaaacagggccatcttg

SEQ ID NO: 25048 - DNA, 25 bp, Saccharomyces pastorianus
attacgcaccattttgcggccgtaa

SEQ ID NO: 25049 - DNA, 25 bp, Saccharomyces pastorianus
ggtacagacacctatcgaccagata

SEQ ID NO: 25050 - DNA, 25 bp, Saccharomyces pastorianus
agaacgacaacccagacgacagtgc

SEQ ID NO: 25051 - DNA, 25 bp, Saccharomyces pastorianus
gatgacctcgatagtttgacccata

SEQ ID NO: 25052 - DNA, 25 bp, Saccharomyces pastorianus
aatcgataattttttgcgggctgaa

SEQ ID NO: 25053 - DNA, 25 bp, Saccharomyces pastorianus
acgacagtgctgcaatgctgctgga

SEQ ID NO: 25054 - DNA, 25 bp, Saccharomyces pastorianus
atccaatgtcatgagagggttccca

SEQ ID NO: 25055 - DNA, 25 bp, Saccharomyces pastorianus
aacaccggtgttgccatactagaga

SEQ ID NO: 25056 - DNA, 25 bp, Saccharomyces pastorianus
attacccatggtgcttgccagtatg

SEQ ID NO: 25057 - DNA, 25 bp, Saccharomyces pastorianus
gaagacaagcaattattacccatgg

SEQ ID NO: 25058 - DNA, 25 bp, Saccharomyces pastorianus
ggaccagatctggacttgtacagaa

SEQ ID NO: 25059 - DNA, 25 bp, Saccharomyces pastorianus
attcgtcgagaggatctgtcgccat

SEQ ID NO: 25060 - DNA, 25 bp, Saccharomyces pastorianus
aggtatccccgtgggctggacacga

SEQ ID NO: 25061 - DNA, 25 bp, Saccharomyces pastorianus
aatgttgcgctgaatctgaagacaa

SEQ ID NO: 25062 - DNA, 25 bp, Saccharomyces pastorianus
gggtattcgattggcacaagattta

SEQ ID NO: 25063 - DNA, 25 bp, Saccharomyces pastorianus
aatgggtctcgaatttctggttaag

SEQ ID NO: 25064 - DNA, 25 bp, Saccharomyces pastorianus
attggctcatagaatgttgcgctga

SEQ ID NO: 25065 - DNA, 25 bp, Saccharomyces pastorianus
gtgtcttgcaagatggaccagatct

SEQ ID NO: 25066 - DNA, 25 bp, Saccharomyces pastorianus
gcagaattctgtgtcatgggccttg

SEQ ID NO: 25067 - DNA, 25 bp, Saccharomyces pastorianus
gcacagcctcaagacgtttacgaat

SEQ ID NO: 25068 - DNA, 25 bp, Saccharomyces pastorianus
ggccttgtttttaacctttgcactg

SEQ ID NO: 25069 - DNA, 25 bp, Saccharomyces pastorianus
atacattctttcgttcgatcctacg

SEQ ID NO: 25070 - DNA, 25 bp, Saccharomyces pastorianus
ctttgcactgcctgttctagaaata

SEQ ID NO: 25071 - DNA, 25 bp, Saccharomyces pastorianus
tagaaatatctcctgctaacctggc

SEQ ID NO: 25072 - DNA, 25 bp, Saccharomyces pastorianus
catggctggtgcgtacgatctggaa

SEQ ID NO: 25073 - DNA, 25 bp, Saccharomyces pastorianus
gctacgtagaaaggctcatcccaga

SEQ ID NO: 25074 - DNA, 25 bp, Saccharomyces pastorianus
gaatcattagaactcatgccggtgg

SEQ ID NO: 25075 - DNA, 25 bp, Saccharomyces pastorianus
ggtattccagtatagcacgtgttgt

SEQ ID NO: 25076 - DNA, 25 bp, Saccharomyces pastorianus
gaagacttttgtactctgctacgta

SEQ ID NO: 25077 - DNA, 25 bp, Saccharomyces pastorianus
gaatttgaactgtacacacggtttg

SEQ ID NO: 25078 - DNA, 25 bp, Saccharomyces pastorianus
gaaattccgtcaccgcaaatgaaat

SEQ ID NO: 25079 - DNA, 25 bp, Saccharomyces pastorianus
atccaaagaggctgcggaactattt

SEQ ID NO: 25080 - DNA, 25 bp, Saccharomyces pastorianus
gtctccatctgtgatttggcggtta

SEQ ID NO: 25081 - DNA, 25 bp, Saccharomyces pastorianus
gagtcacatctgataatccccgcat

SEQ ID NO: 25082 - DNA, 25 bp, Saccharomyces pastorianus
atgtcctgttgaaaactcccagcgg

SEQ ID NO: 25083 - DNA, 25 bp, Saccharomyces pastorianus
cacggtttgaagctacatttatcca

SEQ ID NO: 25084 - DNA, 25 bp, Saccharomyces pastorianus
gaaaatgatgactccgagccaccaa

SEQ ID NO: 25085 - DNA, 25 bp, Saccharomyces pastorianus
agcggtagaatcgatctgtccgaat

SEQ ID NO: 25086 - DNA, 25 bp, Saccharomyces pastorianus
ggccttatatcgacacggtttcata

SEQ ID NO: 25087 - DNA, 25 bp, Saccharomyces pastorianus
acggtacgaaatgcgccaatatctt

SEQ ID NO: 25088 - DNA, 25 bp, Saccharomyces pastorianus
gccacatcccaggttacattaacta

SEQ ID NO: 25089 - DNA, 25 bp, Saccharomyces pastorianus
tagatgggccatcgttgtcgaaaac

SEQ ID NO: 25090 - DNA, 25 bp, Saccharomyces pastorianus
ggacactacacacatcaagttcgct

SEQ ID NO: 25091 - DNA, 25 bp, Saccharomyces pastorianus
aggttgtgctttcaccaagtccatt

SEQ ID NO: 25092 - DNA, 25 bp, Saccharomyces pastorianus
agaaggtcatcatcactggtgctcc

SEQ ID NO: 25093 - DNA, 25 bp, Saccharomyces pastorianus
aagtccattggtttcgaattggctg

SEQ ID NO: 25094 - DNA, 25 bp, Saccharomyces pastorianus
accaagtcattgtcgtcaccgttga

SEQ ID NO: 25095 - DNA, 25 bp, Saccharomyces pastorianus
gccgccaaggaatctaacccaggtt

SEQ ID NO: 25096 - DNA, 25 bp, Saccharomyces pastorianus
gcctgggccaagagcttaggtgtca

SEQ ID NO: 25097 - DNA, 25 bp, Saccharomyces pastorianus
gttaacaaacaattcccatccggtg

SEQ ID NO: 25098 - DNA, 25 bp, Saccharomyces pastorianus
gtcgaaaacggtgtcgtcacctacg

SEQ ID NO: 25099 - DNA, 25 bp, Saccharomyces pastorianus
gattcttcagcaactgcttcgtaca

SEQ ID NO: 25100 - DNA, 25 bp, Saccharomyces pastorianus
gtgcatctatcgttactggcggtaa

SEQ ID NO: 25101 - DNA, 25 bp, Saccharomyces pastorianus
taccactttaacctatttgcccgag

SEQ ID NO: 25102 - DNA, 25 bp, Saccharomyces pastorianus
cgacatcatttcaacttctgttcca

SEQ ID NO: 25103 - DNA, 25 bp, Saccharomyces pastorianus
tagaagtttccatggcacaggccaa

SEQ ID NO: 25104 - DNA, 25 bp, Saccharomyces pastorianus
aggcgccaggctacacaaatacttg

SEQ ID NO: 25105 - DNA, 25 bp, Saccharomyces pastorianus
aatgccgcgctgtctagttttatct

SEQ ID NO: 25106 - DNA, 25 bp, Saccharomyces pastorianus
ttggtggctttcacatcaatgccgc

SEQ ID NO: 25107 - DNA, 25 bp, Saccharomyces pastorianus
taccaccaaaataccggccttgttg

SEQ ID NO: 25108 - DNA, 25 bp, Saccharomyces pastorianus
tggtgatcgtactgtgccatctcta

SEQ ID NO: 25109 - DNA, 25 bp, Saccharomyces pastorianus
tgggtattcttccaacaggtgatag

SEQ ID NO: 25110 - DNA, 25 bp, Saccharomyces pastorianus
caggagtttgttttggccatcaggt

SEQ ID NO: 25111 - DNA, 25 bp, Saccharomyces pastorianus
aacatccacccgtagcaggagtttg

SEQ ID NO: 25112 - DNA, 25 bp, Saccharomyces pastorianus
gaagtcccgagacaaggtgaacctt

SEQ ID NO: 25113 - DNA, 25 bp, Saccharomyces pastorianus
aatctttccgaggtgcatagcgact

SEQ ID NO: 25114 - DNA, 25 bp, Saccharomyces pastorianus
aagtgctaacgtttcaaggacatcc

SEQ ID NO: 25115 - DNA, 25 bp, Saccharomyces pastorianus
agcgactgtgttttcgatgtcccag

SEQ ID NO: 25116 - DNA, 25 bp, Saccharomyces pastorianus
taactagcgactttgaacatccacc

SEQ ID NO: 25117 - DNA, 25 bp, Saccharomyces pastorianus
catcaggtaattgcggctgccctag

SEQ ID NO: 25118 - DNA, 25 bp, Saccharomyces pastorianus
tgaaggaggcgttgtaccgcttaaa

SEQ ID NO: 25119 - DNA, 25 bp, Saccharomyces pastorianus
gaatacgaggtctttcatgtccaga

SEQ ID NO: 25120 - DNA, 25 bp, Saccharomyces pastorianus
taggcagttcagtgggtcggaaccc

SEQ ID NO: 25121 - DNA, 25 bp, Saccharomyces pastorianus
gactgcttgatctcttaaacttttg

SEQ ID NO: 25122 - DNA, 25 bp, Saccharomyces pastorianus
agagggaatgctagccaacttgggt

SEQ ID NO: 25123 - DNA, 25 bp, Saccharomyces pastorianus
gtccgaatctctgaatattgcacca

SEQ ID NO: 25124 - DNA, 25 bp, Saccharomyces pastorianus
gatgaaccagtctacttgtcattag

SEQ ID NO: 25125 - DNA, 25 bp, Saccharomyces pastorianus
aagaggtgtcctttctgaagagaat

SEQ ID NO: 25126 - DNA, 25 bp, Saccharomyces pastorianus
ggatatcaccggattactcctttac

SEQ ID NO: 25127 - DNA, 25 bp, Saccharomyces pastorianus
ttgtcattagagcagttgtccgaat

SEQ ID NO: 25128 - DNA, 25 bp, Saccharomyces pastorianus
gccaacttgggtgctatgaaactta

SEQ ID NO: 25129 - DNA, 25 bp, Saccharomyces pastorianus
agtgctggatgtatctttggaacaa

SEQ ID NO: 25130 - DNA, 25 bp, Saccharomyces pastorianus
gaagtatctaaacgttctagcggat

SEQ ID NO: 25131 - DNA, 25 bp, Saccharomyces pastorianus
atagccacactgattttaaccaaac

SEQ ID NO: 25132 - DNA, 25 bp, Saccharomyces pastorianus
gcataactacgaatttgccgatgaa

SEQ ID NO: 25133 - DNA, 25 bp, Saccharomyces pastorianus
tttgttgcataatcacctaccttta

SEQ ID NO: 25134 - DNA, 25 bp, Saccharomyces pastorianus
atgcccttctcgtacgtcttaaaat

SEQ ID NO: 25135 - DNA, 25 bp, Saccharomyces pastorianus
attgctgtaaaaaagacgcctgaac

SEQ ID NO: 25136 - DNA, 25 bp, Saccharomyces pastorianus
gggcgtcccagctagaagacgcgtt

SEQ ID NO: 25137 - DNA, 25 bp, Saccharomyces pastorianus
aactctggagtcattaaaagctggt

SEQ ID NO: 25138 - DNA, 25 bp, Saccharomyces pastorianus
ggtaattctgtcttgattgctgtaa

SEQ ID NO: 25139 - DNA, 25 bp, Saccharomyces pastorianus
attatcgaggataagggcgtcccag

SEQ ID NO: 25140 - DNA, 25 bp, Saccharomyces pastorianus
gaagcactagatttaggtatcgctg

SEQ ID NO: 25141 - DNA, 25 bp, Saccharomyces pastorianus
tgagatttactgatgccgtcatgaa

SEQ ID NO: 25142 - DNA, 25 bp, Saccharomyces pastorianus
agacgcgttgatggtgatgcccttc

SEQ ID NO: 25143 - DNA, 25 bp, Saccharomyces pastorianus
ggtcgctgagacaaactggcctgac

SEQ ID NO: 25144 - DNA, 25 bp, Saccharomyces pastorianus
actcttggatccctggttctagaag

SEQ ID NO: 25145 - DNA, 25 bp, Saccharomyces pastorianus
ctaatgggactagccttcactctga

SEQ ID NO: 25146 - DNA, 25 bp, Saccharomyces pastorianus
atgctggcagttttcatccttgaat

SEQ ID NO: 25147 - DNA, 25 bp, Saccharomyces pastorianus
tgacaaatttcgcatctgtaccggg

SEQ ID NO: 25148 - DNA, 25 bp, Saccharomyces pastorianus
acgtcacccatagcagtcgcaatag

SEQ ID NO: 25149 - DNA, 25 bp, Saccharomyces pastorianus
gccaacggtattttcgattcgatat

SEQ ID NO: 25150 - DNA, 25 bp, Saccharomyces pastorianus
cttagcgcctatttcatcatgtgtt

SEQ ID NO: 25151 - DNA, 25 bp, Saccharomyces pastorianus
gatcatcaagatgcttcccagttgg

SEQ ID NO: 25152 - DNA, 25 bp, Saccharomyces pastorianus
tgaaatagttccatcgagctcgcgt

SEQ ID NO: 25153 - DNA, 25 bp, Saccharomyces pastorianus
tgaattcggtatcatcttccactct

SEQ ID NO: 25154 - DNA, 25 bp, Saccharomyces pastorianus
agtcctaaacttcttgtactcttat

SEQ ID NO: 25155 - DNA, 25 bp, Saccharomyces pastorianus
ccgcacaactgccattctgataaat

SEQ ID NO: 25156 - DNA, 25 bp, Saccharomyces pastorianus
gtactcttatgtctcccatttaagg

SEQ ID NO: 25157 - DNA, 25 bp, Saccharomyces pastorianus
gatctagcaaatcatctctctgagt

SEQ ID NO: 25158 - DNA, 25 bp, Saccharomyces pastorianus
aagacggatcccagccctgtggaag

SEQ ID NO: 25159 - DNA, 25 bp, Saccharomyces pastorianus
ggccatcctacaaagcggtgagttg

SEQ ID NO: 25160 - DNA, 25 bp, Saccharomyces pastorianus
ataatgcagaggctccgcacaactg

SEQ ID NO: 25161 - DNA, 25 bp, Saccharomyces pastorianus
gagacccacggtccaattgttttgg

SEQ ID NO: 25162 - DNA, 25 bp, Saccharomyces pastorianus
aggctggtgtcagcatcgacacgtt

SEQ ID NO: 25163 - DNA, 25 bp, Saccharomyces pastorianus
gctctacaactcaatcctgcaatgg

SEQ ID NO: 25164 - DNA, 25 bp, Saccharomyces pastorianus
gacctcattggtctgggcataatca

SEQ ID NO: 25165 - DNA, 25 bp, Saccharomyces pastorianus
ggaaccaattgtccaacttcttaca

SEQ ID NO: 25166 - DNA, 25 bp, Saccharomyces pastorianus
taacaaagcccttccagctagtact

SEQ ID NO: 25167 - DNA, 25 bp, Saccharomyces pastorianus
aatgaagttcaaccttgggaccact

SEQ ID NO: 25168 - DNA, 25 bp, Saccharomyces pastorianus
accatggccgctgaagaacttgatc

SEQ ID NO: 25169 - DNA, 25 bp, Saccharomyces pastorianus
gaaacccacagagtcgttacaaccg

SEQ ID NO: 25170 - DNA, 25 bp, Saccharomyces pastorianus
tcacggtcctcacgctgaatataat

SEQ ID NO: 25171 - DNA, 25 bp, Saccharomyces pastorianus
accactttcccaacagacgtttatg

SEQ ID NO: 25172 - DNA, 25 bp, Saccharomyces pastorianus
gggaccacttggctttgttgccaac

SEQ ID NO: 25173 - DNA, 25 bp, Saccharomyces pastorianus
gtcggtgctcttttgggtgctacca

SEQ ID NO: 25174 - DNA, 25 bp, Saccharomyces pastorianus
ggtttgaagccatacattttcgtct

SEQ ID NO: 25175 - DNA, 25 bp, Saccharomyces pastorianus
ttccattggtttcactgtcggtgct

SEQ ID NO: 25176 - DNA, 25 bp, Saccharomyces pastorianus
aatgccaattcgcacatgggttgaa

SEQ ID NO: 25177 - DNA, 25 bp, Saccharomyces pastorianus
ttacgtccccaaatcttcacaattg

SEQ ID NO: 25178 - DNA, 25 bp, Saccharomyces pastorianus
gcaggagaccccaaagcagctatac

SEQ ID NO: 25179 - DNA, 25 bp, Saccharomyces pastorianus
gacttctgtacgacccacaattgat

SEQ ID NO: 25180 - DNA, 25 bp, Saccharomyces pastorianus
ggaggtacagatcaacccagattac

SEQ ID NO: 25181 - DNA, 25 bp, Saccharomyces pastorianus
aaactaggatactgcccctacggca

SEQ ID NO: 25182 - DNA, 25 bp, Saccharomyces pastorianus
atgctccatcttctccacaaaagat

SEQ ID NO: 25183 - DNA, 25 bp, Saccharomyces pastorianus
gtacttattgtaaccgcagtgccaa

SEQ ID NO: 25184 - DNA, 25 bp, Saccharomyces pastorianus
aaatttgcagcagttgtcccagcaa

SEQ ID NO: 25185 - DNA, 25 bp, Saccharomyces pastorianus
agagaagcaccagtcgcggcgatga

SEQ ID NO: 25186 - DNA, 25 bp, Saccharomyces pastorianus
tagtctggacactagcacactgacc

SEQ ID NO: 25187 - DNA, 25 bp, Saccharomyces pastorianus
gatggtggcaccagcggaccaagat

SEQ ID NO: 25188 - DNA, 25 bp, Saccharomyces pastorianus
cctgggtgacagttacgacgtggat

SEQ ID NO: 25189 - DNA, 25 bp, Saccharomyces pastorianus
aaagagtgctgctgttaagtccgct

SEQ ID NO: 25190 - DNA, 25 bp, Saccharomyces pastorianus
gatgatgaagagttgccaccattac

SEQ ID NO: 25191 - DNA, 25 bp, Saccharomyces pastorianus
accattacctgtggaagcacacgga

SEQ ID NO: 25192 - DNA, 25 bp, Saccharomyces pastorianus
gaaaagaacattgacacccgcaccg

SEQ ID NO: 25193 - DNA, 25 bp, Saccharomyces pastorianus
tcaagagcactaactgccgtaggtt

SEQ ID NO: 25194 - DNA, 25 bp, Saccharomyces pastorianus
ggcgtgccgccgtcattaaatgaag

SEQ ID NO: 25195 - DNA, 25 bp, Saccharomyces pastorianus
agataaatccgcacacgactcgtta

SEQ ID NO: 25196 - DNA, 25 bp, Saccharomyces pastorianus
ggagtccaagcatcactaactttag

SEQ ID NO: 25197 - DNA, 25 bp, Saccharomyces pastorianus
cccgcaccggtaggaggagtccaag

SEQ ID NO: 25198 - DNA, 25 bp, Saccharomyces pastorianus
gatcgcagtgccgaatagccaagca

SEQ ID NO: 25199 - DNA, 25 bp, Saccharomyces pastorianus
tattctgatatcaaccgcggctttg

SEQ ID NO: 25200 - DNA, 25 bp, Saccharomyces pastorianus
gatttgctgcccaattttgaccaga

SEQ ID NO: 25201 - DNA, 25 bp, Saccharomyces pastorianus
ctcaccactcctttgtacagttgaa

SEQ ID NO: 25202 - DNA, 25 bp, Saccharomyces pastorianus
gccggcagtgcccaggataaataca

SEQ ID NO: 25203 - DNA, 25 bp, Saccharomyces pastorianus
gaatttctcgtaaagtcccactgga

SEQ ID NO: 25204 - DNA, 25 bp, Saccharomyces pastorianus
agttgaattttactcctatgccgcc

SEQ ID NO: 25205 - DNA, 25 bp, Saccharomyces pastorianus
ccacccggacgcttggttaagtgat

SEQ ID NO: 25206 - DNA, 25 bp, Saccharomyces pastorianus
aatgagacctctcctgaaactgcag

SEQ ID NO: 25207 - DNA, 25 bp, Saccharomyces pastorianus
atcacatccgactacatccaagatt

SEQ ID NO: 25208 - DNA, 25 bp, Saccharomyces pastorianus
ggttcatacaggcagttggacttca

SEQ ID NO: 25209 - DNA, 25 bp, Saccharomyces pastorianus
tacctagaggtgctgttgccgaatg

SEQ ID NO: 25210 - DNA, 25 bp, Saccharomyces pastorianus
cctgggtgctttactgctgtcaaat

SEQ ID NO: 25211 - DNA, 25 bp, Saccharomyces pastorianus
ttacacaccatcacagtcaattcgc

SEQ ID NO: 25212 - DNA, 25 bp, Saccharomyces pastorianus
gatgacgttcctttttaccaacacg

SEQ ID NO: 25213 - DNA, 25 bp, Saccharomyces pastorianus
acaatgcttgcgaagcctgggtgct

SEQ ID NO: 25214 - DNA, 25 bp, Saccharomyces pastorianus
aatcggctcaagtaactctctatta

SEQ ID NO: 25215 - DNA, 25 bp, Saccharomyces pastorianus
agtcaattcgcctggatctcataaa

SEQ ID NO: 25216 - DNA, 25 bp, Saccharomyces pastorianus
ggaaacggacaacatctcacccaag

SEQ ID NO: 25217 - DNA, 25 bp, Saccharomyces pastorianus
ggattctctccatcaaacagttctg

SEQ ID NO: 25218 - DNA, 25 bp, Saccharomyces pastorianus
aagatttcggacttacctagaggtg

SEQ ID NO: 25219 - DNA, 25 bp, Saccharomyces pastorianus
acagttctggctttacaacattttg

SEQ ID NO: 25220 - DNA, 25 bp, Saccharomyces pastorianus
aagaggtggtactgggatttcaata

SEQ ID NO: 25221 - DNA, 25 bp, Saccharomyces pastorianus
gagccttagaacaagagtaccggtt

SEQ ID NO: 25222 - DNA, 25 bp, Saccharomyces pastorianus
agtaccggttgatattgctgctgaa

SEQ ID NO: 25223 - DNA, 25 bp, Saccharomyces pastorianus
gggcaatttgtaacgctaggctgtg

SEQ ID NO: 25224 - DNA, 25 bp, Saccharomyces pastorianus
aatacaggttgttgagccagagact

SEQ ID NO: 25225 - DNA, 25 bp, Saccharomyces pastorianus
tactagcaaacgtgagagccttata

SEQ ID NO: 25226 - DNA, 25 bp, Saccharomyces pastorianus
tacagagggcgttgtttcggcagtt

SEQ ID NO: 25227 - DNA, 25 bp, Saccharomyces pastorianus
ttgcacagactattacagagggcgt

SEQ ID NO: 25228 - DNA, 25 bp, Saccharomyces pastorianus
taggctgtgtactagtcgcattact

SEQ ID NO: 25229 - DNA, 25 bp, Saccharomyces pastorianus
ggtatggatcattcaacgagctaaa

SEQ ID NO: 25230 - DNA, 25 bp, Saccharomyces pastorianus
gaagatatccgcaacgttgtcagag

SEQ ID NO: 25231 - DNA, 25 bp, Saccharomyces pastorianus
atggcgcttttgacgatgagaggtt

SEQ ID NO: 25232 - DNA, 25 bp, Saccharomyces pastorianus
aagatcgctttctggacgggagcaa

SEQ ID NO: 25233 - DNA, 25 bp, Saccharomyces pastorianus
gctacataatgctctaaaccctgat

SEQ ID NO: 25234 - DNA, 25 bp, Saccharomyces pastorianus
ctgacggtccggctgaagctttttt

SEQ ID NO: 25235 - DNA, 25 bp, Saccharomyces pastorianus
gaagttcctgcccacgttgagtaat

SEQ ID NO: 25236 - DNA, 25 bp, Saccharomyces pastorianus
actgatagttcagaccctgacggtc

SEQ ID NO: 25237 - DNA, 25 bp, Saccharomyces pastorianus
gttaattgccccacaaagatcgctt

SEQ ID NO: 25238 - DNA, 25 bp, Saccharomyces pastorianus
ggttccaacgtatacctctggtcaa

SEQ ID NO: 25239 - DNA, 25 bp, Saccharomyces pastorianus
ggtggagatcgattcttcagttatt

SEQ ID NO: 25240 - DNA, 25 bp, Saccharomyces pastorianus
gacagtataccgttaattgccccac

SEQ ID NO: 25241 - DNA, 25 bp, Saccharomyces pastorianus
attgagctatctcggaagttcctgc

SEQ ID NO: 25242 - DNA, 25 bp, Saccharomyces pastorianus
gaaccaggcaaatcttgtgatgaat

SEQ ID NO: 25243 - DNA, 25 bp, Saccharomyces pastorianus
ccctgtggtcattgtttccattgga

SEQ ID NO: 25244 - DNA, 25 bp, Saccharomyces pastorianus
aacaagatcgatcagccagtgcgca

SEQ ID NO: 25245 - DNA, 25 bp, Saccharomyces pastorianus
gatcgatcagccagtgcgcattgat

SEQ ID NO: 25246 - DNA, 25 bp, Saccharomyces pastorianus
agttcatagtttttccctgtggtca

SEQ ID NO: 25247 - DNA, 25 bp, Saccharomyces pastorianus
gaacgagatctcagaagacatcata

SEQ ID NO: 25248 - DNA, 25 bp, Saccharomyces pastorianus
gaatgtgggaagttcttacagataa

SEQ ID NO: 25249 - DNA, 25 bp, Saccharomyces pastorianus
gatttacagaattttagaaccaggc

SEQ ID NO: 25250 - DNA, 25 bp, Saccharomyces pastorianus
aaagatctcttaccatttttcaacg

SEQ ID NO: 25251 - DNA, 25 bp, Saccharomyces pastorianus
ggaactgtttgatcaggttgatatt

SEQ ID NO: 25252 - DNA, 25 bp, Saccharomyces pastorianus
ggattatgcagtgatattaacgtaa

SEQ ID NO: 25253 - DNA, 25 bp, Saccharomyces pastorianus
gattcgactgcaacttcatcgtcaa

SEQ ID NO: 25254 - DNA, 25 bp, Saccharomyces pastorianus
caacataccgtgtttcttcggacta

SEQ ID NO: 25255 - DNA, 25 bp, Saccharomyces pastorianus
gattgaccctttgattctttctcac

SEQ ID NO: 25256 - DNA, 25 bp, Saccharomyces pastorianus
agggtgtctacatcgggtccaatta

SEQ ID NO: 25257 - DNA, 25 bp, Saccharomyces pastorianus
ggccacgtaaatttgagcgcgcata

SEQ ID NO: 25258 - DNA, 25 bp, Saccharomyces pastorianus
agcgcgcatactactgattcgactg

SEQ ID NO: 25259 - DNA, 25 bp, Saccharomyces pastorianus
gtaacccatcaaacgagacttctca

SEQ ID NO: 25260 - DNA, 25 bp, Saccharomyces pastorianus
tgaaagtttcctaagaccgccttca

SEQ ID NO: 25261 - DNA, 25 bp, Saccharomyces pastorianus
tcatcgtcaaattctgcatcccaaa

SEQ ID NO: 25262 - DNA, 25 bp, Saccharomyces pastorianus
actgactcttctaatggccacgtaa

SEQ ID NO: 25263 - DNA, 25 bp, Saccharomyces pastorianus
aactcctgacttaccgtcggatgat

SEQ ID NO: 25264 - DNA, 25 bp, Saccharomyces pastorianus
accgtcgtggtggtagaaccgccag

SEQ ID NO: 25265 - DNA, 25 bp, Saccharomyces pastorianus
aagggcaatgacagcactgccacca

SEQ ID NO: 25266 - DNA, 25 bp, Saccharomyces pastorianus
gatgccacttttgctgaagccaact

SEQ ID NO: 25267 - DNA, 25 bp, Saccharomyces pastorianus
gaccactcaattgtctctacaagac

SEQ ID NO: 25268 - DNA, 25 bp, Saccharomyces pastorianus
gatgtcactgactctgccgagacca

SEQ ID NO: 25269 - DNA, 25 bp, Saccharomyces pastorianus
aacaccatcaacagaggcaacttca

SEQ ID NO: 25270 - DNA, 25 bp, Saccharomyces pastorianus
actagaaaggccactgaccgtcact

SEQ ID NO: 25271 - DNA, 25 bp, Saccharomyces pastorianus
gaaccaacaagccagcaaccaattt

SEQ ID NO: 25272 - DNA, 25 bp, Saccharomyces pastorianus
gctaactctgctaactctgttcaaa

SEQ ID NO: 25273 - DNA, 25 bp, Saccharomyces pastorianus
gaatacttggacttcgatgccactt

SEQ ID NO: 25274 - DNA, 25 bp, Saccharomyces pastorianus
tgccgagaccaagaagcctaacact

SEQ ID NO: 25275 - DNA, 25 bp, Saccharomyces pastorianus
gacatggtcaatgcctagtgccact

SEQ ID NO: 25276 - DNA, 25 bp, Saccharomyces pastorianus
ataaagcacctgacggagagcccgt

SEQ ID NO: 25277 - DNA, 25 bp, Saccharomyces pastorianus
atacgcctgcgtgtggagagcatat

SEQ ID NO: 25278 - DNA, 25 bp, Saccharomyces pastorianus
aaagcaatatatccgcgttcataga

SEQ ID NO: 25279 - DNA, 25 bp, Saccharomyces pastorianus
tacagtacgcagttcttttcatcac

SEQ ID NO: 25280 - DNA, 25 bp, Saccharomyces pastorianus
tcctattatcggtgttctttgggta

SEQ ID NO: 25281 - DNA, 25 bp, Saccharomyces pastorianus
tatttcacggccttttatacgcctg

SEQ ID NO: 25282 - DNA, 25 bp, Saccharomyces pastorianus
gaaatgcgtgtgttccattaggact

SEQ ID NO: 25283 - DNA, 25 bp, Saccharomyces pastorianus
gagaccagcatctctgggagccata

SEQ ID NO: 25284 - DNA, 25 bp, Saccharomyces pastorianus
agtgccactgcccaggtttatttca

SEQ ID NO: 25285 - DNA, 25 bp, Saccharomyces pastorianus
tatgcgccctaattccctgggtgaa

SEQ ID NO: 25286 - DNA, 25 bp, Saccharomyces pastorianus
agtgccgctctaagcaatggcgcta

SEQ ID NO: 25287 - DNA, 25 bp, Saccharomyces pastorianus
gagagggcaccgaccgtaacgaatt

SEQ ID NO: 25288 - DNA, 25 bp, Saccharomyces pastorianus
aaagataccgggagtctagacgcgt

SEQ ID NO: 25289 - DNA, 25 bp, Saccharomyces pastorianus
gacgacaccatatacttccgtggga

SEQ ID NO: 25290 - DNA, 25 bp, Saccharomyces pastorianus
aaagactacaaattcgacgacacca

SEQ ID NO: 25291 - DNA, 25 bp, Saccharomyces pastorianus
caaggtccaaccacagagttcaaag

SEQ ID NO: 25292 - DNA, 25 bp, Saccharomyces pastorianus
gtctagacgcgtacacagtgaactt

SEQ ID NO: 25293 - DNA, 25 bp, Saccharomyces pastorianus
aatggcgctatcttgtcgggaaata

SEQ ID NO: 25294 - DNA, 25 bp, Saccharomyces pastorianus
gagctgcaaaaggagaagcccgcct

SEQ ID NO: 25295 - DNA, 25 bp, Saccharomyces pastorianus
gaacttcatgccttgttacacagaa

SEQ ID NO: 25296 - DNA, 25 bp, Saccharomyces pastorianus
actgctacacacgatacctcgagtg

SEQ ID NO: 25297 - DNA, 25 bp, Saccharomyces pastorianus
aacaagcctgtttcaatggttgctc

SEQ ID NO: 25298 - DNA, 25 bp, Saccharomyces pastorianus
ggttgctcttggaaatacatctact

SEQ ID NO: 25299 - DNA, 25 bp, Saccharomyces pastorianus
tagaaggtgtttcgtggtccgctcc

SEQ ID NO: 25300 - DNA, 25 bp, Saccharomyces pastorianus
ggacctttggccaattcgtatatgt

SEQ ID NO: 25301 - DNA, 25 bp, Saccharomyces pastorianus
ggcagctttgcttctatcgttagac

SEQ ID NO: 25302 - DNA, 25 bp, Saccharomyces pastorianus
agacggttcaacagccattgtcgaa

SEQ ID NO: 25303 - DNA, 25 bp, Saccharomyces pastorianus
ttgaggaaaagacgctgcccaccac

SEQ ID NO: 25304 - DNA, 25 bp, Saccharomyces pastorianus
gttgctttggctacgcaagctattg

SEQ ID NO: 25305 - DNA, 25 bp, Saccharomyces pastorianus
ggtccgctcctgattattttgttgc

SEQ ID NO: 25306 - DNA, 25 bp, Saccharomyces pastorianus
acacatgtcgccattgcactagaag

SEQ ID NO: 25307 - DNA, 25 bp, Saccharomyces pastorianus
gtcgttttccacatcatacgcagat

SEQ ID NO: 25308 - DNA, 25 bp, Saccharomyces pastorianus
tggtgtctttttggctaaccacaaa

SEQ ID NO: 25309 - DNA, 25 bp, Saccharomyces pastorianus
aagatcagacacaagcacaagaaag

SEQ ID NO: 25310 - DNA, 25 bp, Saccharomyces pastorianus
agtccactttacacttggttttgag

SEQ ID NO: 25311 - DNA, 25 bp, Saccharomyces pastorianus
gagtccactttacacttggttttga

SEQ ID NO: 25312 - DNA, 25 bp, Saccharomyces pastorianus
agatcagacacaagcacaagaaagt

SEQ ID NO: 25313 - DNA, 25 bp, Saccharomyces pastorianus
ggagtccactttacacttggttttg

SEQ ID NO: 25314 - DNA, 25 bp, Saccharomyces pastorianus
ctttttggctaaccacaaagacaga

SEQ ID NO: 25315 - DNA, 25 bp, Saccharomyces pastorianus
agacacaagcacaagaaagtcaagt

SEQ ID NO: 25316 - DNA, 25 bp, Saccharomyces pastorianus
gtccactttacacttggttttgaga

SEQ ID NO: 25317 - DNA, 25 bp, Saccharomyces pastorianus
tctttttggctaaccacaaagacag

SEQ ID NO: 25318 - DNA, 25 bp, Saccharomyces pastorianus
gtgtctttttggctaaccacaaaga

SEQ ID NO: 25319 - DNA, 25 bp, Saccharomyces pastorianus
agagaatgtagcaacccaacctgtg

SEQ ID NO: 25320 - DNA, 25 bp, Saccharomyces pastorianus
tggtgtctttttggctaaccacaaa

SEQ ID NO: 25321 - DNA, 25 bp, Saccharomyces pastorianus
aagatcagacacaagcacaagaaag

SEQ ID NO: 25322 - DNA, 25 bp, Saccharomyces pastorianus
gagtccactttacacttggttttga

SEQ ID NO: 25323 - DNA, 25 bp, Saccharomyces pastorianus
ggagtccactttacacttggttttg

SEQ ID NO: 25324 - DNA, 25 bp, Saccharomyces pastorianus
ctttttggctaaccacaaagacaga

SEQ ID NO: 25325 - DNA, 25 bp, Saccharomyces pastorianus
agacacaagcacaagaaagtcaagt

SEQ ID NO: 25326 - DNA, 25 bp, Saccharomyces pastorianus
gtccactttacacttggttttgaga

SEQ ID NO: 25327 - DNA, 25 bp, Saccharomyces pastorianus
aagttggctgtcttgtcgtactaca

SEQ ID NO: 25328 - DNA, 25 bp, Saccharomyces pastorianus
cccaacctgtggtgctggtgtcttt

SEQ ID NO: 25329 - DNA, 25 bp, Saccharomyces pastorianus
gtgtctttttggctaaccacaaaga

SEQ ID NO: 25330 - DNA, 25 bp, Saccharomyces pastorianus
tatccgcagggacgcttttcaaagg

SEQ ID NO: 25331 - DNA, 25 bp, Saccharomyces pastorianus
ggcggtagaaccattttgcagcaaa

SEQ ID NO: 25332 - DNA, 25 bp, Saccharomyces pastorianus
gataaggtcttggttacagaacgtt

SEQ ID NO: 25333 - DNA, 25 bp, Saccharomyces pastorianus
aacacttttccagcaagaggcccag

SEQ ID NO: 25334 - DNA, 25 bp, Saccharomyces pastorianus
gaagattggtccgtgcaaagatttt

SEQ ID NO: 25335 - DNA, 25 bp, Saccharomyces pastorianus
gaagacgtcaaaatatccgcaggga

SEQ ID NO: 25336 - DNA, 25 bp, Saccharomyces pastorianus
gaggcccagattactgcatacggat

SEQ ID NO: 25337 - DNA, 25 bp, Saccharomyces pastorianus
cgcacccagatgactctgctaataa

SEQ ID NO: 25338 - DNA, 25 bp, Saccharomyces pastorianus
tacacacgtcatcgctgtggatgtt

SEQ ID NO: 25339 - DNA, 25 bp, Saccharomyces pastorianus
agctgcaacttgacgatgtgtaatt

SEQ ID NO: 25340 - DNA, 25 bp, Saccharomyces pastorianus
cttaaccatgagaagctgcaacttg

SEQ ID NO: 25341 - DNA, 25 bp, Saccharomyces pastorianus
atctgacacctacgattctagcaag

SEQ ID NO: 25342 - DNA, 25 bp, Saccharomyces pastorianus
gatgtcgacaacgaactgttgactt

SEQ ID NO: 25343 - DNA, 25 bp, Saccharomyces pastorianus
gaaatggtatactgcaatgtctgct

SEQ ID NO: 25344 - DNA, 25 bp, Saccharomyces pastorianus
ggacacttatttcggcaacgtttgc

SEQ ID NO: 25345 - DNA, 25 bp, Saccharomyces pastorianus
atgtgcaacatcatcgaatacagcg

SEQ ID NO: 25346 - DNA, 25 bp, Saccharomyces pastorianus
ggaagtcatccatcgatttgtggaa

SEQ ID NO: 25347 - DNA, 25 bp, Saccharomyces pastorianus
aggtgctgcaccatgtgactgtgat

SEQ ID NO: 25348 - DNA, 25 bp, Saccharomyces pastorianus
ggtatataagcgatacgccagtctt

SEQ ID NO: 25349 - DNA, 25 bp, Saccharomyces pastorianus
cttcattgtgggagtgacgccggat

SEQ ID NO: 25350 - DNA, 25 bp, Saccharomyces pastorianus
caatgtctgctagtgaaaaggccaa

SEQ ID NO: 25351 - DNA, 25 bp, Saccharomyces pastorianus
atacgccagtcttttcttcattgtg

SEQ ID NO: 25352 - DNA, 25 bp, Saccharomyces pastorianus
tcgctggtcatcctgggtagacaat

SEQ ID NO: 25353 - DNA, 25 bp, Saccharomyces pastorianus
tgaacgctgtaggtgcatgtggctt

SEQ ID NO: 25354 - DNA, 25 bp, Saccharomyces pastorianus
tggtgaaccattacactcgctggtc

SEQ ID NO: 25355 - DNA, 25 bp, Saccharomyces pastorianus
aatacttgctagaattcgccgatga

SEQ ID NO: 25356 - DNA, 25 bp, Saccharomyces pastorianus
ggcatatacttcagacactcctgtc

SEQ ID NO: 25357 - DNA, 25 bp, Saccharomyces pastorianus
tcaaagcttcaagtctggcaccata

SEQ ID NO: 25358 - DNA, 25 bp, Saccharomyces pastorianus
actcctgtcgttgccatcagtagat

SEQ ID NO: 25359 - DNA, 25 bp, Saccharomyces pastorianus
aaaaatcgggcttcacactttggtg

SEQ ID NO: 25360 - DNA, 25 bp, Saccharomyces pastorianus
acatgtccatttctcaatgctgcga

SEQ ID NO: 25361 - DNA, 25 bp, Saccharomyces pastorianus
tggcttgcagctatacacttttggc

SEQ ID NO: 25362 - DNA, 25 bp, Saccharomyces pastorianus
tgtatctatggttttcttcactgag

SEQ ID NO: 25363 - DNA, 25 bp, Saccharomyces pastorianus
gattccgctgttaacgctgtatgtt

SEQ ID NO: 25364 - DNA, 25 bp, Saccharomyces pastorianus
gctattgccgttgcaattgctcaaa

SEQ ID NO: 25365 - DNA, 25 bp, Saccharomyces pastorianus
caccaagggtgaagctattgccgtt

SEQ ID NO: 25366 - DNA, 25 bp, Saccharomyces pastorianus
ggaatacgttccattagacaaggct

SEQ ID NO: 25367 - DNA, 25 bp, Saccharomyces pastorianus
attaatgattcctggtttattgcgt

SEQ ID NO: 25368 - DNA, 25 bp, Saccharomyces pastorianus
accatggtgttgttgccagtgtcaa

SEQ ID NO: 25369 - DNA, 25 bp, Saccharomyces pastorianus
aaggctgaacaatcatcctctgtta

SEQ ID NO: 25370 - DNA, 25 bp, Saccharomyces pastorianus
gaaatcgttttgatcaccaccaagg

SEQ ID NO: 25371 - DNA, 25 bp, Saccharomyces pastorianus
agaagctaagcctttgatcaaggaa

SEQ ID NO: 25372 - DNA, 25 bp, Saccharomyces pastorianus
tgcaattgctcaaatgtcaaccgtt

SEQ ID NO: 25373 - DNA, 25 bp, Saccharomyces pastorianus
tcatcctctgttactccagaagcta

SEQ ID NO: 25374 - DNA, 25 bp, Saccharomyces pastorianus
gtaaagaccctgatcgacacgacca

SEQ ID NO: 25375 - DNA, 25 bp, Saccharomyces pastorianus
caatggtaaacctgttcctcgcgaa

SEQ ID NO: 25376 - DNA, 25 bp, Saccharomyces pastorianus
acaataacaactcaagcggcggatt

SEQ ID NO: 25377 - DNA, 25 bp, Saccharomyces pastorianus
agatgagttgaaggcgctccacatt

SEQ ID NO: 25378 - DNA, 25 bp, Saccharomyces pastorianus
acaggttttgagatttgcgaccccg

SEQ ID NO: 25379 - DNA, 25 bp, Saccharomyces pastorianus
gaactggacccgaaactgtacgaca

SEQ ID NO: 25380 - DNA, 25 bp, Saccharomyces pastorianus
cgctccacattgctcagttgaaact

SEQ ID NO: 25381 - DNA, 25 bp, Saccharomyces pastorianus
aaacgcggagttccaattcgatagg

SEQ ID NO: 25382 - DNA, 25 bp, Saccharomyces pastorianus
tgaaccgcttgaaactagacgattt

SEQ ID NO: 25383 - DNA, 25 bp, Saccharomyces pastorianus
ttgtcgtggcgcctgaattgaaccg

SEQ ID NO: 25384 - DNA, 25 bp, Saccharomyces pastorianus
atttcgattcccttatcacgagcaa

SEQ ID NO: 25385 - DNA, 25 bp, Saccharomyces pastorianus
tgatagaatacatgggtcctgcccc

SEQ ID NO: 25386 - DNA, 25 bp, Saccharomyces pastorianus
tactggccatcgagtacacgtctaa

SEQ ID NO: 25387 - DNA, 25 bp, Saccharomyces pastorianus
tggactcgtccaagttctccaagat

SEQ ID NO: 25388 - DNA, 25 bp, Saccharomyces pastorianus
aaatggtccgagttttgccacctgg

SEQ ID NO: 25389 - DNA, 25 bp, Saccharomyces pastorianus
ggaagacgtcatccacgacacaagt

SEQ ID NO: 25390 - DNA, 25 bp, Saccharomyces pastorianus
gttttcctcttgtttaagcagccca

SEQ ID NO: 25391 - DNA, 25 bp, Saccharomyces pastorianus
gtggccatgggcaatacgctgtcta

SEQ ID NO: 25392 - DNA, 25 bp, Saccharomyces pastorianus
gatgacgacttgttcactatggtaa

SEQ ID NO: 25393 - DNA, 25 bp, Saccharomyces pastorianus
tttgcatccgaattcaactccgcag

SEQ ID NO: 25394 - DNA, 25 bp, Saccharomyces pastorianus
gaagccccaatttcagttcactttc

SEQ ID NO: 25395 - DNA, 25 bp, Saccharomyces pastorianus
gtcagcatcgactctttcaagaagc

SEQ ID NO: 25396 - DNA, 25 bp, Saccharomyces pastorianus
agagcaatctgcacttgatcggcgc

SEQ ID NO: 25397 - DNA, 25 bp, Saccharomyces pastorianus
aaggacctggagttcaagctgctag

SEQ ID NO: 25398 - DNA, 25 bp, Saccharomyces pastorianus
gggcgcgtacgactacatcaagcag

SEQ ID NO: 25399 - DNA, 25 bp, Saccharomyces pastorianus
gccatctctggcaagggtatcgtga

SEQ ID NO: 25400 - DNA, 25 bp, Saccharomyces pastorianus
cagaggtcaattggccgtcggcgat

SEQ ID NO: 25401 - DNA, 25 bp, Saccharomyces pastorianus
aggagagctgtctgtttcgtacgcc

SEQ ID NO: 25402 - DNA, 25 bp, Saccharomyces pastorianus
gtacgccgctacaaacgatgtccaa

SEQ ID NO: 25403 - DNA, 25 bp, Saccharomyces pastorianus
tgagaagcaactacatcgggcccgg

SEQ ID NO: 25404 - DNA, 25 bp, Saccharomyces pastorianus
aaggtcgacaacatcgtctcgtggg

SEQ ID NO: 25405 - DNA, 25 bp, Saccharomyces pastorianus
ataagctggcgctgctgatgaccga

SEQ ID NO: 25406 - DNA, 25 bp, Saccharomyces pastorianus
accggtacgtgttcttgttgtgcaa

SEQ ID NO: 25407 - DNA, 25 bp, Saccharomyces pastorianus
gagtacaaggacgaccacggcagat

SEQ ID NO: 25408 - DNA, 25 bp, Saccharomyces pastorianus
tacgccatcggtattgccgagccat

SEQ ID NO: 25409 - DNA, 25 bp, Saccharomyces pastorianus
gagcccaattgaagtccgaggtcat

SEQ ID NO: 25410 - DNA, 25 bp, Saccharomyces pastorianus
gcttgccgccggtctgtgtaagaga

SEQ ID NO: 25411 - DNA, 25 bp, Saccharomyces pastorianus
ggaaatcatcgccatcatcaagaag

SEQ ID NO: 25412 - DNA, 25 bp, Saccharomyces pastorianus
tcttacggtcatttcaccaaccaag

SEQ ID NO: 25413 - DNA, 25 bp, Saccharomyces pastorianus
agagttcaagtccaattctcctacg

SEQ ID NO: 25414 - DNA, 25 bp, Saccharomyces pastorianus
gggtcccacaaagaatcgacaccgt

SEQ ID NO: 25415 - DNA, 25 bp, Saccharomyces pastorianus
gacatctccaccgaggacctaagag

SEQ ID NO: 25416 - DNA, 25 bp, Saccharomyces pastorianus
gccttttctggtaaggactactcca

SEQ ID NO: 25417 - DNA, 25 bp, Saccharomyces pastorianus
tagatgggtcgccaagtctctgctt

SEQ ID NO: 25418 - DNA, 25 bp, Saccharomyces pastorianus
aggcggaagaactggtttaagatct

SEQ ID NO: 25419 - DNA, 25 bp, Saccharomyces pastorianus
gagactttggatgagttatccggga

SEQ ID NO: 25420 - DNA, 25 bp, Saccharomyces pastorianus
taagagcgttttatcttcaaaaccg

SEQ ID NO: 25421 - DNA, 25 bp, Saccharomyces pastorianus
caacaaacatacagccggtgatgat

SEQ ID NO: 25422 - DNA, 25 bp, Saccharomyces pastorianus
aaatcatcttcgatttcctctgtct

SEQ ID NO: 25423 - DNA, 25 bp, Saccharomyces pastorianus
aacttggtgagttcgttgaaaggcg

SEQ ID NO: 25424 - DNA, 25 bp, Saccharomyces pastorianus
tttaagatcttgtagaaggacgcat

SEQ ID NO: 25425 - DNA, 25 bp, Saccharomyces pastorianus
attaccatatgaaaaaatccctgtg

SEQ ID NO: 25426 - DNA, 25 bp, Saccharomyces pastorianus
gtttttaaacaggattcattaccat

SEQ ID NO: 25427 - DNA, 25 bp, Saccharomyces pastorianus
cggtgatgattctggtgtcgctgaa

SEQ ID NO: 25428 - DNA, 25 bp, Saccharomyces pastorianus
cctctgtctcttctgctgaaaacaa

SEQ ID NO: 25429 - DNA, 25 bp, Saccharomyces pastorianus
tggtgttagctatggcctctctcga

SEQ ID NO: 25430 - DNA, 25 bp, Saccharomyces pastorianus
gttctgttgaattgtgacgaccacc

SEQ ID NO: 25431 - DNA, 25 bp, Saccharomyces pastorianus
tctacatccagacaagccgaggcat

SEQ ID NO: 25432 - DNA, 25 bp, Saccharomyces pastorianus
cccgtcattcgtgtccaagattaca

SEQ ID NO: 25433 - DNA, 25 bp, Saccharomyces pastorianus
gacgaccaccaaggcctgttgaaaa

SEQ ID NO: 25434 - DNA, 25 bp, Saccharomyces pastorianus
gaccatttaccttccaaatgccgta

SEQ ID NO: 25435 - DNA, 25 bp, Saccharomyces pastorianus
aaatatcttctaatgggcctggtgg

SEQ ID NO: 25436 - DNA, 25 bp, Saccharomyces pastorianus
aaagtcggtctgtccaactacccat

SEQ ID NO: 25437 - DNA, 25 bp, Saccharomyces pastorianus
aactacccattgtccgcttcagttg

SEQ ID NO: 25438 - DNA, 25 bp, Saccharomyces pastorianus
tcatcaaaaaccctattaccgacca

SEQ ID NO: 25439 - DNA, 25 bp, Saccharomyces pastorianus
ggcattctcgttgaagttaacccta

SEQ ID NO: 25440 - DNA, 25 bp, Saccharomyces pastorianus
agtttacatcgggtttggctcgatt

SEQ ID NO: 25441 - DNA, 25 bp, Saccharomyces pastorianus
ttgcgtgctggtttacccactataa

SEQ ID NO: 25442 - DNA, 25 bp, Saccharomyces pastorianus
atagtggatccaaccaaactgccct

SEQ ID NO: 25443 - DNA, 25 bp, Saccharomyces pastorianus
acaggttgacgctgcagttcatcat

SEQ ID NO: 25444 - DNA, 25 bp, Saccharomyces pastorianus
tgattggttattcccacaggttgac

SEQ ID NO: 25445 - DNA, 25 bp, Saccharomyces pastorianus
gcagttcatcatggtggctcgggca

SEQ ID NO: 25446 - DNA, 25 bp, Saccharomyces pastorianus
aagctcttgtcgacgcagttgtaga

SEQ ID NO: 25447 - DNA, 25 bp, Saccharomyces pastorianus
gaggctctaaaggttgttacgacta

SEQ ID NO: 25448 - DNA, 25 bp, Saccharomyces pastorianus
atgcgagaagcgttaccttatcaaa

SEQ ID NO: 25449 - DNA, 25 bp, Saccharomyces pastorianus
gaggccgatgtttactgtattctaa

SEQ ID NO: 25450 - DNA, 25 bp, Saccharomyces pastorianus
ggctcgattgttgtatctaatgcca

SEQ ID NO: 25451 - DNA, 25 bp, Saccharomyces pastorianus
aggtggataccgttatgttcgaaga

SEQ ID NO: 25452 - DNA, 25 bp, Saccharomyces pastorianus
aatgcacattccatcgatgatcaat

SEQ ID NO: 25453 - DNA, 25 bp, Saccharomyces pastorianus
acaaggatcccgtgtccaaagacaa

SEQ ID NO: 25454 - DNA, 25 bp, Saccharomyces pastorianus
gtcgtcgggaatctcatccgaggaa

SEQ ID NO: 25455 - DNA, 25 bp, Saccharomyces pastorianus
attgactgagtctcccacagtagtg

SEQ ID NO: 25456 - DNA, 25 bp, Saccharomyces pastorianus
tatgaaagaccccagcgtacaagca

SEQ ID NO: 25457 - DNA, 25 bp, Saccharomyces pastorianus
accttcatcaacaacctctatgcag

SEQ ID NO: 25458 - DNA, 25 bp, Saccharomyces pastorianus
agaattaacgtctgcaccttcatca

SEQ ID NO: 25459 - DNA, 25 bp, Saccharomyces pastorianus
agaacaaccagactcgtcgtcggga

SEQ ID NO: 25460 - DNA, 25 bp, Saccharomyces pastorianus
aaagctagttcattccatgacgacg

SEQ ID NO: 25461 - DNA, 25 bp, Saccharomyces pastorianus
gatcaatacggacgaggcaaccagt

SEQ ID NO: 25462 - DNA, 25 bp, Saccharomyces pastorianus
gaagaccagcttttaccagggatac

SEQ ID NO: 25463 - DNA, 25 bp, Saccharomyces pastorianus
agaaaggccttatctaccgctattg

SEQ ID NO: 25464 - DNA, 25 bp, Saccharomyces pastorianus
gtaccgctactggtggtgcaggtaa

SEQ ID NO: 25465 - DNA, 25 bp, Saccharomyces pastorianus
gaatcctccgtcgataaagtcctat

SEQ ID NO: 25466 - DNA, 25 bp, Saccharomyces pastorianus
agatttcgatatgggtgccaccgat

SEQ ID NO: 25467 - DNA, 25 bp, Saccharomyces pastorianus
gaataacgctgctgacttgtttgct

SEQ ID NO: 25468 - DNA, 25 bp, Saccharomyces pastorianus
gcatccactgtttaccgctgaaaca

SEQ ID NO: 25469 - DNA, 25 bp, Saccharomyces pastorianus
agagagacaagctcgtttggcccgt

SEQ ID NO: 25470 - DNA, 25 bp, Saccharomyces pastorianus
tacacctattgaaacgcatccactg

SEQ ID NO: 25471 - DNA, 25 bp, Saccharomyces pastorianus
taggcgtcgctgaagaacacccaag

SEQ ID NO: 25472 - DNA, 25 bp, Saccharomyces pastorianus
acttgtttgctggtttaggcgtcgc

SEQ ID NO: 25473 - DNA, 25 bp, Saccharomyces pastorianus
agaagtcgggcaagctaccaacctg

SEQ ID NO: 25474 - DNA, 25 bp, Saccharomyces pastorianus
aatttgcgcacgacgaggctgctaa

SEQ ID NO: 25475 - DNA, 25 bp, Saccharomyces pastorianus
gaggtttccgtagtggatcccgcta

SEQ ID NO: 25476 - DNA, 25 bp, Saccharomyces pastorianus
cgctaactccaccatgaagacgtat

SEQ ID NO: 25477 - DNA, 25 bp, Saccharomyces pastorianus
accagttcgacagtgctacaagcag

SEQ ID NO: 25478 - DNA, 25 bp, Saccharomyces pastorianus
gaagtacgcacatattccctactga

SEQ ID NO: 25479 - DNA, 25 bp, Saccharomyces pastorianus
ggccaagcccttcttgagaggcata

SEQ ID NO: 25480 - DNA, 25 bp, Saccharomyces pastorianus
aagagtacacgacctaccagttcga

SEQ ID NO: 25481 - DNA, 25 bp, Saccharomyces pastorianus
tggtcgcgcaccaaattcgatgaaa

SEQ ID NO: 25482 - DNA, 25 bp, Saccharomyces pastorianus
gacgtatacccgaaacctggaccat

SEQ ID NO: 25483 - DNA, 25 bp, Saccharomyces pastorianus
gggcatggcttttgtcatccagaga

SEQ ID NO: 25484 - DNA, 25 bp, Saccharomyces pastorianus
aagcatcgttgcctttggagaaaca

SEQ ID NO: 25485 - DNA, 25 bp, Saccharomyces pastorianus
gatttcttttcgttctactcattgc

SEQ ID NO: 25486 - DNA, 25 bp, Saccharomyces pastorianus
tatgctactgatgcggatttccaat

SEQ ID NO: 25487 - DNA, 25 bp, Saccharomyces pastorianus
atgatttgaaattcgggcctggtga

SEQ ID NO: 25488 - DNA, 25 bp, Saccharomyces pastorianus
agacaggttcgatccaaaagctacg

SEQ ID NO: 25489 - DNA, 25 bp, Saccharomyces pastorianus
atgacgcatgcatcttggccaagaa

SEQ ID NO: 25490 - DNA, 25 bp, Saccharomyces pastorianus
ttcgtacgtggttgagcagccggat

SEQ ID NO: 25491 - DNA, 25 bp, Saccharomyces pastorianus
tgacttcgcaagataatccactttt

SEQ ID NO: 25492 - DNA, 25 bp, Saccharomyces pastorianus
gaaacaagtggtcttttcgtacgtg

SEQ ID NO: 25493 - DNA, 25 bp, Saccharomyces pastorianus
gagcaagtctttgacctgttcaaca

SEQ ID NO: 25494 - DNA, 25 bp, Saccharomyces pastorianus
atcgagattcgacttgatccaaatt

SEQ ID NO: 25495 - DNA, 25 bp, Saccharomyces pastorianus
gccggtatctccactatatgttcaa

SEQ ID NO: 25496 - DNA, 25 bp, Saccharomyces pastorianus
ggtaacgtatactcctttgatatca

SEQ ID NO: 25497 - DNA, 25 bp, Saccharomyces pastorianus
gtcttgagttcatcatttgcgccag

SEQ ID NO: 25498 - DNA, 25 bp, Saccharomyces pastorianus
atggaagttccccttggatgaaact

SEQ ID NO: 25499 - DNA, 25 bp, Saccharomyces pastorianus
gcagcatggttatcggtggtgtcaa

SEQ ID NO: 25500 - DNA, 25 bp, Saccharomyces pastorianus
gacactgttatgaccattgacgatc

SEQ ID NO: 25501 - DNA, 25 bp, Saccharomyces pastorianus
gatccgtacgtaaaagcttcaatag

SEQ ID NO: 25502 - DNA, 25 bp, Saccharomyces pastorianus
gagtaaacactggtccgtcatgtca

SEQ ID NO: 25503 - DNA, 25 bp, Saccharomyces pastorianus
gggacgttttcaccaacagatccgt

SEQ ID NO: 25504 - DNA, 25 bp, Saccharomyces pastorianus
ttgtcccgtgactttgatgtcggta

SEQ ID NO: 25505 - DNA, 25 bp, Saccharomyces pastorianus
gtccaagtatggttttgtcccgtga

SEQ ID NO: 25506 - DNA, 25 bp, Saccharomyces pastorianus
ttcggttccgtacttaagaagcaag

SEQ ID NO: 25507 - DNA, 25 bp, Saccharomyces pastorianus
aaacaagctgcttcaacagttcaaa

SEQ ID NO: 25508 - DNA, 25 bp, Saccharomyces pastorianus
gacaactattccgatgaaccatcta

SEQ ID NO: 25509 - DNA, 25 bp, Saccharomyces pastorianus
gaacgaattagccatccaagaagct

SEQ ID NO: 25510 - DNA, 25 bp, Saccharomyces pastorianus
tatggcttccagaattgacaactat

SEQ ID NO: 25511 - DNA, 25 bp, Saccharomyces pastorianus
aaaataagggtcgtatctctagata

SEQ ID NO: 25512 - DNA, 25 bp, Saccharomyces pastorianus
aatttctcacgctggttctctaacc

SEQ ID NO: 25513 - DNA, 25 bp, Saccharomyces pastorianus
actgtcgctccaaacttatctgaat

SEQ ID NO: 25514 - DNA, 25 bp, Saccharomyces pastorianus
gatgaaccatctaacgttttcggtt

SEQ ID NO: 25515 - DNA, 25 bp, Saccharomyces pastorianus
gaaaagatgcacactgtcgctccaa

SEQ ID NO: 25516 - DNA, 25 bp, Saccharomyces pastorianus
ttctaaggcctctgctaaaaataag

SEQ ID NO: 25517 - DNA, 25 bp, Saccharomyces pastorianus
atgggctcgttgattgatgtctgta

SEQ ID NO: 25518 - DNA, 25 bp, Saccharomyces pastorianus
caatggttcggacttgatcattcaa

SEQ ID NO: 25519 - DNA, 25 bp, Saccharomyces pastorianus
gaagacgaatgtacactccaaccac

SEQ ID NO: 25520 - DNA, 25 bp, Saccharomyces pastorianus
actctacaatttctcttttcccatt

SEQ ID NO: 25521 - DNA, 25 bp, Saccharomyces pastorianus
gttcaaatgtcttgtcgtgcctagc

SEQ ID NO: 25522 - DNA, 25 bp, Saccharomyces pastorianus
gtgcctagcgaaggtcctaacggtt

SEQ ID NO: 25523 - DNA, 25 bp, Saccharomyces pastorianus
aattctcattgtccgatatgggctc

SEQ ID NO: 25524 - DNA, 25 bp, Saccharomyces pastorianus
tcacacaattgataaccggccctaa

SEQ ID NO: 25525 - DNA, 25 bp, Saccharomyces pastorianus
ctaaaacctcccctgacataataat

SEQ ID NO: 25526 - DNA, 25 bp, Saccharomyces pastorianus
tcaatctacagatacccactcatgg

SEQ ID NO: 25527 - DNA, 25 bp, Saccharomyces pastorianus
gatttataggaagtgccctcacaca

SEQ ID NO: 25528 - DNA, 25 bp, Saccharomyces pastorianus
caattgaaagaagacacacccgtgt

SEQ ID NO: 25529 - DNA, 25 bp, Saccharomyces pastorianus
gtcagagctgggtacgaaatatcaa

SEQ ID NO: 25530 - DNA, 25 bp, Saccharomyces pastorianus
gggtacgaaatatcaacatttgcag

SEQ ID NO: 25531 - DNA, 25 bp, Saccharomyces pastorianus
tgtataagctaaccggcaacgttct

SEQ ID NO: 25532 - DNA, 25 bp, Saccharomyces pastorianus
acgtggcaatgtggagaagagacta

SEQ ID NO: 25533 - DNA, 25 bp, Saccharomyces pastorianus
aacaaagtgaagcacgtggcaatgt

SEQ ID NO: 25534 - DNA, 25 bp, Saccharomyces pastorianus
gacacacccgtgtataagctaaccg

SEQ ID NO: 25535 - DNA, 25 bp, Saccharomyces pastorianus
gaacaggtaagaaacgaactggtca

SEQ ID NO: 25536 - DNA, 25 bp, Saccharomyces pastorianus
atcaacatttgcagagtgaattaga

SEQ ID NO: 25537 - DNA, 25 bp, Saccharomyces pastorianus
tttaccggtggaacaaagtgaagca

SEQ ID NO: 25538 - DNA, 25 bp, Saccharomyces pastorianus
aagagactagaattcattgaaacag

SEQ ID NO: 25539 - DNA, 25 bp, Saccharomyces pastorianus
gatctgtactggctactacgaggaa

SEQ ID NO: 25540 - DNA, 25 bp, Saccharomyces pastorianus
ggaatatgtcaaatccgccacaccg

SEQ ID NO: 25541 - DNA, 25 bp, Saccharomyces pastorianus
ggatatcctgatggacccagtcaag

SEQ ID NO: 25542 - DNA, 25 bp, Saccharomyces pastorianus
gaattttcattctgggtgcccgtgc

SEQ ID NO: 25543 - DNA, 25 bp, Saccharomyces pastorianus
tgaagttcattcaccacaccgattt

SEQ ID NO: 25544 - DNA, 25 bp, Saccharomyces pastorianus
ggaactgaacgacatggaccctcaa

SEQ ID NO: 25545 - DNA, 25 bp, Saccharomyces pastorianus
aacatgtacattgccggtttcagag

SEQ ID NO: 25546 - DNA, 25 bp, Saccharomyces pastorianus
gatttcttccaagttttccacgaag

SEQ ID NO: 25547 - DNA, 25 bp, Saccharomyces pastorianus
taagtgcgccatctttactaccggt

SEQ ID NO: 25548 - DNA, 25 bp, Saccharomyces pastorianus
tccagtttctcttcccagaacaaaa

SEQ ID NO: 25549 - DNA, 25 bp, Saccharomyces pastorianus
gaaatccacttcatcgggcctgaat

SEQ ID NO: 25550 - DNA, 25 bp, Saccharomyces pastorianus
ggatattcctcctaagcattctaat

SEQ ID NO: 25551 - DNA, 25 bp, Saccharomyces pastorianus
ggcttccaaattatgtgtgctcaaa

SEQ ID NO: 25552 - DNA, 25 bp, Saccharomyces pastorianus
aagtagaagacctcatcaccatggg

SEQ ID NO: 25553 - DNA, 25 bp, Saccharomyces pastorianus
aaatgggaacccacagcagcagcag

SEQ ID NO: 25554 - DNA, 25 bp, Saccharomyces pastorianus
gaaccgtcgtacaaaatggcgccac

SEQ ID NO: 25555 - DNA, 25 bp, Saccharomyces pastorianus
gctaagcgctattacgatcaggtgt

SEQ ID NO: 25556 - DNA, 25 bp, Saccharomyces pastorianus
agggatttccatctggctaagcgct

SEQ ID NO: 25557 - DNA, 25 bp, Saccharomyces pastorianus
cagcctccaaagacttcgtggtaca

SEQ ID NO: 25558 - DNA, 25 bp, Saccharomyces pastorianus
aaagtgaactactgggcacccacta

SEQ ID NO: 25559 - DNA, 25 bp, Saccharomyces pastorianus
gaacctgggctatatgcacgagcac

SEQ ID NO: 25560 - DNA, 25 bp, Saccharomyces pastorianus
gaaacttctgagatcctgggattcc

SEQ ID NO: 25561 - DNA, 25 bp, Saccharomyces pastorianus
gatgctcacgcgatcggtgtcaact

SEQ ID NO: 25562 - DNA, 25 bp, Saccharomyces pastorianus
tagtagtcgcttcttccgatggtaa

SEQ ID NO: 25563 - DNA, 25 bp, Saccharomyces pastorianus
atggtggtgccaaggaatcccgcaa

SEQ ID NO: 25564 - DNA, 25 bp, Saccharomyces pastorianus
gcttccgtcaattccgttcaatggg

SEQ ID NO: 25565 - DNA, 25 bp, Saccharomyces pastorianus
aagaccgcacctgtatcatctggac

SEQ ID NO: 25566 - DNA, 25 bp, Saccharomyces pastorianus
cagttggtctttgtccggtaacata

SEQ ID NO: 25567 - DNA, 25 bp, Saccharomyces pastorianus
cggtaacatactagccctttctggg

SEQ ID NO: 25568 - DNA, 25 bp, Saccharomyces pastorianus
aggaatcccgcaagtttgtgactgg

SEQ ID NO: 25569 - DNA, 25 bp, Saccharomyces pastorianus
tgggccccagctacagtcgaagaag

SEQ ID NO: 25570 - DNA, 25 bp, Saccharomyces pastorianus
gttcatacttggctagtgtctcaca

SEQ ID NO: 25571 - DNA, 25 bp, Saccharomyces pastorianus
gagagacgtggcttggtcgccaacc

SEQ ID NO: 25572 - DNA, 25 bp, Saccharomyces pastorianus
aaagatccaaagaccgctacacgaa

SEQ ID NO: 25573 - DNA, 25 bp, Saccharomyces pastorianus
gacctcgtttcttggctttaagcga

SEQ ID NO: 25574 - DNA, 25 bp, Saccharomyces pastorianus
gtctctggtcctacatttgaaacaa

SEQ ID NO: 25575 - DNA, 25 bp, Saccharomyces pastorianus
ctgctcgagactacgtttccaataa

SEQ ID NO: 25576 - DNA, 25 bp, Saccharomyces pastorianus
gggccacgtccataacttaattgtc

SEQ ID NO: 25577 - DNA, 25 bp, Saccharomyces pastorianus
ggatgaatctcctgtgcctttagaa

SEQ ID NO: 25578 - DNA, 25 bp, Saccharomyces pastorianus
gatagtcctgccagtgcattggatg

SEQ ID NO: 25579 - DNA, 25 bp, Saccharomyces pastorianus
aacacttgtgtcgtggatagtcctg

SEQ ID NO: 25580 - DNA, 25 bp, Saccharomyces pastorianus
actgttcccgaggtcatagtggcaa

SEQ ID NO: 25581 - DNA, 25 bp, Saccharomyces pastorianus
aggtacttataccttcgtctctggt

SEQ ID NO: 25582 - DNA, 25 bp, Saccharomyces pastorianus
gaatattcctggcttggctgggcaa

SEQ ID NO: 25583 - DNA, 25 bp, Saccharomyces pastorianus
agtccgttctgagattgcgctgtca

SEQ ID NO: 25584 - DNA, 25 bp, Saccharomyces pastorianus
gtcgttcaaggaatacacccttctt

SEQ ID NO: 25585 - DNA, 25 bp, Saccharomyces pastorianus
atttcgtagaatgcttgcgcttgcc

SEQ ID NO: 25586 - DNA, 25 bp, Saccharomyces pastorianus
gagggtccttatggtgtaacgatac

SEQ ID NO: 25587 - DNA, 25 bp, Saccharomyces pastorianus
gatgatttcaggcacgcagtcgttc

SEQ ID NO: 25588 - DNA, 25 bp, Saccharomyces pastorianus
aatcacggtcaaatgccttaacaaa

SEQ ID NO: 25589 - DNA, 25 bp, Saccharomyces pastorianus
gtatctgtcatattcaccggttcca

SEQ ID NO: 25590 - DNA, 25 bp, Saccharomyces pastorianus
ggctgcagtttatccacatttcgta

SEQ ID NO: 25591 - DNA, 25 bp, Saccharomyces pastorianus
tgcgcttgccaactactgatcaatt

SEQ ID NO: 25592 - DNA, 25 bp, Saccharomyces pastorianus
catcaccttttattcgtgtggacca

SEQ ID NO: 25593 - DNA, 25 bp, Saccharomyces pastorianus
gtgtggaccatcgacgttcaatgat

SEQ ID NO: 25594 - DNA, 25 bp, Saccharomyces pastorianus
gaaaacgctaccgatccgacaacag

SEQ ID NO: 25595 - DNA, 25 bp, Saccharomyces pastorianus
gacaacaagttcaaccaccgatggt

SEQ ID NO: 25596 - DNA, 25 bp, Saccharomyces pastorianus
tcatcaacaacaaaccgagtccgct

SEQ ID NO: 25597 - DNA, 25 bp, Saccharomyces pastorianus
gaacgaaatgtccatcgctgaacca

SEQ ID NO: 25598 - DNA, 25 bp, Saccharomyces pastorianus
gttgtctcccaaccaacaatagtca

SEQ ID NO: 25599 - DNA, 25 bp, Saccharomyces pastorianus
gaagaaagcttccaggctgcctcac

SEQ ID NO: 25600 - DNA, 25 bp, Saccharomyces pastorianus
tagcgtctgccaccacgagaacaaa

SEQ ID NO: 25601 - DNA, 25 bp, Saccharomyces pastorianus
ggtaaggtgctccagttttcacaag

SEQ ID NO: 25602 - DNA, 25 bp, Saccharomyces pastorianus
taagacggtacaagctcaagcccct

SEQ ID NO: 25603 - DNA, 25 bp, Saccharomyces pastorianus
gctctttcgtcctcaaatgggctaa

SEQ ID NO: 25604 - DNA, 25 bp, Saccharomyces pastorianus
gccgccggatcctattcaaataacg

SEQ ID NO: 25605 - DNA, 25 bp, Saccharomyces pastorianus
atctcgggtgctatttctatgggtc

SEQ ID NO: 25606 - DNA, 25 bp, Saccharomyces pastorianus
ggtggacttcattatcagatacgga

SEQ ID NO: 25607 - DNA, 25 bp, Saccharomyces pastorianus
atcactggtgggtttgccgagttga

SEQ ID NO: 25608 - DNA, 25 bp, Saccharomyces pastorianus
acgttattctgctttggttatctga

SEQ ID NO: 25609 - DNA, 25 bp, Saccharomyces pastorianus
ttgccctgactgctggtttatcttc

SEQ ID NO: 25610 - DNA, 25 bp, Saccharomyces pastorianus
gtaccactactaccatatttctttg

SEQ ID NO: 25611 - DNA, 25 bp, Saccharomyces pastorianus
ggtagtagtagttcgacatccaaga

SEQ ID NO: 25612 - DNA, 25 bp, Saccharomyces pastorianus
gagaacttatcagtgccgtcacgat

SEQ ID NO: 25613 - DNA, 25 bp, Saccharomyces pastorianus
gaaatcgaagacatcctactggaaa

SEQ ID NO: 25614 - DNA, 25 bp, Saccharomyces pastorianus
gtttatcttcccttggtgatgcaaa

SEQ ID NO: 25615 - DNA, 25 bp, Saccharomyces pastorianus
gtaggcacgggtctgatttactcaa

SEQ ID NO: 25616 - DNA, 25 bp, Saccharomyces pastorianus
gccgatggtattttccaattctgga

SEQ ID NO: 25617 - DNA, 25 bp, Saccharomyces pastorianus
gggcacaacaacagattatgggctt

SEQ ID NO: 25618 - DNA, 25 bp, Saccharomyces pastorianus
gaatacgaatgctaggacccatgct

SEQ ID NO: 25619 - DNA, 25 bp, Saccharomyces pastorianus
tctaaagactttggatgggcacaac

SEQ ID NO: 25620 - DNA, 25 bp, Saccharomyces pastorianus
gttgatgccatagttccatacacac

SEQ ID NO: 25621 - DNA, 25 bp, Saccharomyces pastorianus
ggacaaatgcatttctgttggcaat

SEQ ID NO: 25622 - DNA, 25 bp, Saccharomyces pastorianus
atatgatcgtgagtgccgacgccga

SEQ ID NO: 25623 - DNA, 25 bp, Saccharomyces pastorianus
atttctactttaagcgacgagcagt

SEQ ID NO: 25624 - DNA, 25 bp, Saccharomyces pastorianus
gagttagaccatgcaatttctactt

SEQ ID NO: 25625 - DNA, 25 bp, Saccharomyces pastorianus
gttggcaatgtctttggatcaccca

SEQ ID NO: 25626 - DNA, 25 bp, Saccharomyces pastorianus
ggatcacccaatgaggctgttcaac

SEQ ID NO: 25627 - DNA, 25 bp, Saccharomyces pastorianus
gaaaaacgcgcatgttgccagatac

SEQ ID NO: 25628 - DNA, 25 bp, Saccharomyces pastorianus
taacgagtgctctttgtcatatgag

SEQ ID NO: 25629 - DNA, 25 bp, Saccharomyces pastorianus
gggtttagcgtgtttacaatctgac

SEQ ID NO: 25630 - DNA, 25 bp, Saccharomyces pastorianus
aacgagctgatcacatcggagggaa

SEQ ID NO: 25631 - DNA, 25 bp, Saccharomyces pastorianus
gaacctttgtatacaagcatccgga

SEQ ID NO: 25632 - DNA, 25 bp, Saccharomyces pastorianus
gagggtacgggtacaacgcatcttc

SEQ ID NO: 25633 - DNA, 25 bp, Saccharomyces pastorianus
gggcatctgcctagactatacaacg

SEQ ID NO: 25634 - DNA, 25 bp, Saccharomyces pastorianus
atcgtggctagtgcaggttacatca

SEQ ID NO: 25635 - DNA, 25 bp, Saccharomyces pastorianus
acgcatcttcccctggagttgagaa

SEQ ID NO: 25636 - DNA, 25 bp, Saccharomyces pastorianus
aaaccgtggttgctctttagaattg

SEQ ID NO: 25637 - DNA, 25 bp, Saccharomyces pastorianus
aagccggcgcaatttctcttataag

SEQ ID NO: 25638 - DNA, 25 bp, Saccharomyces pastorianus
gctaatacctaacaaggcggccagt

SEQ ID NO: 25639 - DNA, 25 bp, Saccharomyces pastorianus
ggatttggctaaacgaggctcttct

SEQ ID NO: 25640 - DNA, 25 bp, Saccharomyces pastorianus
aggctcttctgcgacttctaaaagg

SEQ ID NO: 25641 - DNA, 25 bp, Saccharomyces pastorianus
gtgaactacccgctatcatcaaatc

SEQ ID NO: 25642 - DNA, 25 bp, Saccharomyces pastorianus
acgatcatgctgtaaagttcccaac

SEQ ID NO: 25643 - DNA, 25 bp, Saccharomyces pastorianus
aacggtcagccggtacatctaaatt

SEQ ID NO: 25644 - DNA, 25 bp, Saccharomyces pastorianus
ttccctcgcgggtttgaagaagcaa

SEQ ID NO: 25645 - DNA, 25 bp, Saccharomyces pastorianus
aagttcccaaccacacaagaggatg

SEQ ID NO: 25646 - DNA, 25 bp, Saccharomyces pastorianus
cctttcatctaccagttctgtcaaa

SEQ ID NO: 25647 - DNA, 25 bp, Saccharomyces pastorianus
gttggaaataccctacatccgtcac

SEQ ID NO: 25648 - DNA, 25 bp, Saccharomyces pastorianus
aactatatgggctgtgagcgacaag

SEQ ID NO: 25649 - DNA, 25 bp, Saccharomyces pastorianus
gaaacttcatggtgcaagctgtcac

SEQ ID NO: 25650 - DNA, 25 bp, Saccharomyces pastorianus
ccagcctgtttctttgttatgcgac

SEQ ID NO: 25651 - DNA, 25 bp, Saccharomyces pastorianus
tatctctcatatattgcggtctgga

SEQ ID NO: 25652 - DNA, 25 bp, Saccharomyces pastorianus
cacattcattgcgttatctctcata

SEQ ID NO: 25653 - DNA, 25 bp, Saccharomyces pastorianus
cttcgccaacatctttacggactat

SEQ ID NO: 25654 - DNA, 25 bp, Saccharomyces pastorianus
agagatcacaacctgccggatactt

SEQ ID NO: 25655 - DNA, 25 bp, Saccharomyces pastorianus
aagtgacgtctgctaacttcgccaa

SEQ ID NO: 25656 - DNA, 25 bp, Saccharomyces pastorianus
gctttgaaactttcggatcccttca

SEQ ID NO: 25657 - DNA, 25 bp, Saccharomyces pastorianus
gttatgcgacggttacacattcatt

SEQ ID NO: 25658 - DNA, 25 bp, Saccharomyces pastorianus
aattgatcagatccggcgaagtaaa

SEQ ID NO: 25659 - DNA, 25 bp, Saccharomyces pastorianus
gattccctattgaagtgacgtctgc

SEQ ID NO: 25660 - DNA, 25 bp, Saccharomyces pastorianus
gtacccttccactgatgtctttttg

SEQ ID NO: 25661 - DNA, 25 bp, Saccharomyces pastorianus
tctaaaatgtgttgtcgtcggtgat

SEQ ID NO: 25662 - DNA, 25 bp, Saccharomyces pastorianus
ggtgccgttggtaaaacatgtctat

SEQ ID NO: 25663 - DNA, 25 bp, Saccharomyces pastorianus
aggtttgttcgatactgccggtcag

SEQ ID NO: 25664 - DNA, 25 bp, Saccharomyces pastorianus
ccatgcctagtcgttggtacgcaaa

SEQ ID NO: 25665 - DNA, 25 bp, Saccharomyces pastorianus
gattgagacctttgtcgtacccttc

SEQ ID NO: 25666 - DNA, 25 bp, Saccharomyces pastorianus
atgaggctatcgtggctgcgttaga

SEQ ID NO: 25667 - DNA, 25 bp, Saccharomyces pastorianus
attgtcctggtgtgccatgcctagt

SEQ ID NO: 25668 - DNA, 25 bp, Saccharomyces pastorianus
gatcggtgatgagccgtacacgcta

SEQ ID NO: 25669 - DNA, 25 bp, Saccharomyces pastorianus
actgccggtcaggaggattacgatc

SEQ ID NO: 25670 - DNA, 25 bp, Saccharomyces pastorianus
agccgtacacgctaggtttgttcga

SEQ ID NO: 25671 - DNA, 25 bp, Saccharomyces pastorianus
gactttgcttgttggtgttcgtata

SEQ ID NO: 25672 - DNA, 25 bp, Saccharomyces pastorianus
atacttaaattctggacccggcgct

SEQ ID NO: 25673 - DNA, 25 bp, Saccharomyces pastorianus
aatgtgatcaggttggcacccgcac

SEQ ID NO: 25674 - DNA, 25 bp, Saccharomyces pastorianus
gagggcatcatgtctaaggtattcc

SEQ ID NO: 25675 - DNA, 25 bp, Saccharomyces pastorianus
gcacccgcacctttgtataatacat

SEQ ID NO: 25676 - DNA, 25 bp, Saccharomyces pastorianus
ttacattactaactccaacggccaa

SEQ ID NO: 25677 - DNA, 25 bp, Saccharomyces pastorianus
gttcattcgaagcacactacacctg

SEQ ID NO: 25678 - DNA, 25 bp, Saccharomyces pastorianus
agcgtcattgatacggtcgcattga

SEQ ID NO: 25679 - DNA, 25 bp, Saccharomyces pastorianus
catggtgcccaattatctctttact

SEQ ID NO: 25680 - DNA, 25 bp, Saccharomyces pastorianus
ggtattccagtatttgcacgatcat

SEQ ID NO: 25681 - DNA, 25 bp, Saccharomyces pastorianus
gatttagacaatccaacccgagcgt

SEQ ID NO: 25682 - DNA, 25 bp, Saccharomyces pastorianus
ggacgccaacggcatcggcacagat

SEQ ID NO: 25683 - DNA, 25 bp, Saccharomyces pastorianus
cgcctccagggcagaagtcgtatct

SEQ ID NO: 25684 - DNA, 25 bp, Saccharomyces pastorianus
catgggcacgctgggaaaccaccaa

SEQ ID NO: 25685 - DNA, 25 bp, Saccharomyces pastorianus
aaaaatctgcgatgggcacgcctcc

SEQ ID NO: 25686 - DNA, 25 bp, Saccharomyces pastorianus
cttccagcgccgtgagatggagcaa

SEQ ID NO: 25687 - DNA, 25 bp, Saccharomyces pastorianus
acccaagcccatgaccgaaagtgag

SEQ ID NO: 25688 - DNA, 25 bp, Saccharomyces pastorianus
gagaggaacttcctcgacgtctacc

SEQ ID NO: 25689 - DNA, 25 bp, Saccharomyces pastorianus
tggctgtaagaataccctgctgcaa

SEQ ID NO: 25690 - DNA, 25 bp, Saccharomyces pastorianus
tacgtaactacgtccgcagcgagaa

SEQ ID NO: 25691 - DNA, 25 bp, Saccharomyces pastorianus
atgtcgcaagacacttcctggcatg

SEQ ID NO: 25692 - DNA, 25 bp, Saccharomyces pastorianus
aagtgagctcatcatcctcatggac

SEQ ID NO: 25693 - DNA, 25 bp, Saccharomyces pastorianus
agcaactgaaatctcgttttccaaa

SEQ ID NO: 25694 - DNA, 25 bp, Saccharomyces pastorianus
aaaagtgttccaggcgtgaatccca

SEQ ID NO: 25695 - DNA, 25 bp, Saccharomyces pastorianus
acaattctaagctacagtccatgga

SEQ ID NO: 25696 - DNA, 25 bp, Saccharomyces pastorianus
tgttctccaagaaatcattcgaagt

SEQ ID NO: 25697 - DNA, 25 bp, Saccharomyces pastorianus
aagtgatcacttgacgttattgaca

SEQ ID NO: 25698 - DNA, 25 bp, Saccharomyces pastorianus
gaacaatttccattgggatcatagc

SEQ ID NO: 25699 - DNA, 25 bp, Saccharomyces pastorianus
ggtacaagcagcacgttatccaacg

SEQ ID NO: 25700 - DNA, 25 bp, Saccharomyces pastorianus
aggcgtgaatcccaacgatgttggt

SEQ ID NO: 25701 - DNA, 25 bp, Saccharomyces pastorianus
tagttatacaactcacctggaatac

SEQ ID NO: 25702 - DNA, 25 bp, Saccharomyces pastorianus
gaccaggttagaagtcgaacgatat

SEQ ID NO: 25703 - DNA, 25 bp, Saccharomyces pastorianus
caagaacccttaactgcatccaaga

SEQ ID NO: 25704 - DNA, 25 bp, Saccharomyces pastorianus
ttactcggcgcttcatactaaaaaa

SEQ ID NO: 25705 - DNA, 25 bp, Saccharomyces pastorianus
gggactcgaccataatgcgtaacac

SEQ ID NO: 25706 - DNA, 25 bp, Saccharomyces pastorianus
tacagtacctttacttcgcaagtta

SEQ ID NO: 25707 - DNA, 25 bp, Saccharomyces pastorianus
tggccttatgataccctcatttcaa

SEQ ID NO: 25708 - DNA, 25 bp, Saccharomyces pastorianus
taactgtttcgttcgtacggtactg

SEQ ID NO: 25709 - DNA, 25 bp, Saccharomyces pastorianus
tggagcccatcattacagtaccttt

SEQ ID NO: 25710 - DNA, 25 bp, Saccharomyces pastorianus
gtggccaaattcaacttttccatta

SEQ ID NO: 25711 - DNA, 25 bp, Saccharomyces pastorianus
gggccagaactttgcttattcgaag

SEQ ID NO: 25712 - DNA, 25 bp, Saccharomyces pastorianus
ggacatcatatcctatacgatcctg

SEQ ID NO: 25713 - DNA, 25 bp, Saccharomyces pastorianus
attgttactaaactctcctactgga

SEQ ID NO: 25714 - DNA, 25 bp, Saccharomyces pastorianus
ggtggccaacttttacatcatcgaa

SEQ ID NO: 25715 - DNA, 25 bp, Saccharomyces pastorianus
tacgctaagaacagaacacccggtg

SEQ ID NO: 25716 - DNA, 25 bp, Saccharomyces pastorianus
gttgaaatcctaactgccagaaaca

SEQ ID NO: 25717 - DNA, 25 bp, Saccharomyces pastorianus
acgaaacctattatgttggcgacaa

SEQ ID NO: 25718 - DNA, 25 bp, Saccharomyces pastorianus
ttacccatctccattgaactactac

SEQ ID NO: 25719 - DNA, 25 bp, Saccharomyces pastorianus
gaacatactctgttagtcaccgaac

SEQ ID NO: 25720 - DNA, 25 bp, Saccharomyces pastorianus
tggacgtttctctatactatcaagg

SEQ ID NO: 25721 - DNA, 25 bp, Saccharomyces pastorianus
tgagaacttactgtgggcatggtgt

SEQ ID NO: 25722 - DNA, 25 bp, Saccharomyces pastorianus
gccaggcaccactttccaagaattg

SEQ ID NO: 25723 - DNA, 25 bp, Saccharomyces pastorianus
ggttatcatgccgacttgaacgaaa

SEQ ID NO: 25724 - DNA, 25 bp, Saccharomyces pastorianus
tgtgcccgacaaaactgtattgaaa

SEQ ID NO: 25725 - DNA, 25 bp, Saccharomyces pastorianus
taatgaagttatctgccacggtgtg

SEQ ID NO: 25726 - DNA, 25 bp, Saccharomyces pastorianus
aagagactcttccatactgttttcg

SEQ ID NO: 25727 - DNA, 25 bp, Saccharomyces pastorianus
ttggacgatccatggttgaactcat

SEQ ID NO: 25728 - DNA, 25 bp, Saccharomyces pastorianus
tagagctcgagccatccaggagata

SEQ ID NO: 25729 - DNA, 25 bp, Saccharomyces pastorianus
actttgaacacctcgactattctac

SEQ ID NO: 25730 - DNA, 25 bp, Saccharomyces pastorianus
cagtgggcaaactactagagctcga

SEQ ID NO: 25731 - DNA, 25 bp, Saccharomyces pastorianus
ggatgacaactacaacgccggtctg

SEQ ID NO: 25732 - DNA, 25 bp, Saccharomyces pastorianus
aaatcagtcccggtgccaagaacgc

SEQ ID NO: 25733 - DNA, 25 bp, Saccharomyces pastorianus
aggtacttctgagagacgccatcca

SEQ ID NO: 25734 - DNA, 25 bp, Saccharomyces pastorianus
ggagatacgacatcgaccagttctt

SEQ ID NO: 25735 - DNA, 25 bp, Saccharomyces pastorianus
gaactcatggagtattaggctcgct

SEQ ID NO: 25736 - DNA, 25 bp, Saccharomyces pastorianus
gcgcgacgcctttgatatcggtaac

SEQ ID NO: 25737 - DNA, 25 bp, Saccharomyces pastorianus
gacctcatttaatcgtcttagatga

SEQ ID NO: 25738 - DNA, 25 bp, Saccharomyces pastorianus
gactctttaggtgctttgtctcaag

SEQ ID NO: 25739 - DNA, 25 bp, Saccharomyces pastorianus
atggcaaagacctcatttaatcgtc

SEQ ID NO: 25740 - DNA, 25 bp, Saccharomyces pastorianus
ttaggtgctttgtctcaagctttga

SEQ ID NO: 25741 - DNA, 25 bp, Saccharomyces pastorianus
ggcaaagacctcatttaatcgtctt

SEQ ID NO: 25742 - DNA, 25 bp, Saccharomyces pastorianus
ctctttaggtgctttgtctcaagct

SEQ ID NO: 25743 - DNA, 25 bp, Saccharomyces pastorianus
tcatttaatcgtcttagatgaacct

SEQ ID NO: 25744 - DNA, 25 bp, Saccharomyces pastorianus
cgaatctcactccaagatggtcgct

SEQ ID NO: 25745 - DNA, 25 bp, Saccharomyces pastorianus
tgctttgtctcaagctttgaaggat

SEQ ID NO: 25746 - DNA, 25 bp, Saccharomyces pastorianus
ggtcgaatctcactccaagatggtc

SEQ ID NO: 25747 - DNA, 25 bp, Saccharomyces pastorianus
ctttaggtgctttgtctcaagcttt

SEQ ID NO: 25748 - DNA, 25 bp, Saccharomyces pastorianus
gctgccggtacatggcaaagacctc

SEQ ID NO: 25749 - DNA, 25 bp, Saccharomyces pastorianus
atgggtaacaagattgccggtggta

SEQ ID NO: 25750 - DNA, 25 bp, Saccharomyces pastorianus
gacggtagaatgactccatctggtc

SEQ ID NO: 25751 - DNA, 25 bp, Saccharomyces pastorianus
gttattatcattactcactctgctg

SEQ ID NO: 25752 - DNA, 25 bp, Saccharomyces pastorianus
agtggtcaaggtgctggtccaagaa

SEQ ID NO: 25753 - DNA, 25 bp, Saccharomyces pastorianus
gtttggacccagaaattgtttctca

SEQ ID NO: 25754 - DNA, 25 bp, Saccharomyces pastorianus
ttgtttctcactccagaattagagg

SEQ ID NO: 25755 - DNA, 25 bp, Saccharomyces pastorianus
tactcactctgctgaattcacaaag

SEQ ID NO: 25756 - DNA, 25 bp, Saccharomyces pastorianus
taagttggtcttagctgccggtaca

SEQ ID NO: 25757 - DNA, 25 bp, Saccharomyces pastorianus
gaattagaggtttgtctggtggtca

SEQ ID NO: 25758 - DNA, 25 bp, Saccharomyces pastorianus
ggtcaattccgtccattaaccagaa

SEQ ID NO: 25759 - DNA, 25 bp, Saccharomyces pastorianus
agcgtgtcgttaactttatcatgaa

SEQ ID NO: 25760 - DNA, 25 bp, Saccharomyces pastorianus
gaggcgcctctagagctacagtgat

SEQ ID NO: 25761 - DNA, 25 bp, Saccharomyces pastorianus
aaaagccacctgaaggactatcgtg

SEQ ID NO: 25762 - DNA, 25 bp, Saccharomyces pastorianus
ccggaaactttctttgcactacatg

SEQ ID NO: 25763 - DNA, 25 bp, Saccharomyces pastorianus
gtgtaggacaccattccggttttga

SEQ ID NO: 25764 - DNA, 25 bp, Saccharomyces pastorianus
agatccggacgtcaaggtcgttcac

SEQ ID NO: 25765 - DNA, 25 bp, Saccharomyces pastorianus
aatgctatggccaagcgtgtcgtta

SEQ ID NO: 25766 - DNA, 25 bp, Saccharomyces pastorianus
tgaaagtgatattctgtctctctac

SEQ ID NO: 25767 - DNA, 25 bp, Saccharomyces pastorianus
gaacacgagttacttcatcacgaac

SEQ ID NO: 25768 - DNA, 25 bp, Saccharomyces pastorianus
tggtatgggccagcatgatgaatct

SEQ ID NO: 25769 - DNA, 25 bp, Saccharomyces pastorianus
ttgaaggactacacgccggaaactt

SEQ ID NO: 25770 - DNA, 25 bp, Saccharomyces pastorianus
gtttggccagttttccaagcaatca

SEQ ID NO: 25771 - DNA, 25 bp, Saccharomyces pastorianus
cacacttttgaccaactgggcagtt

SEQ ID NO: 25772 - DNA, 25 bp, Saccharomyces pastorianus
ctggtctaatatggtcttgcgagtt

SEQ ID NO: 25773 - DNA, 25 bp, Saccharomyces pastorianus
aagggagcaatggtggcccacactt

SEQ ID NO: 25774 - DNA, 25 bp, Saccharomyces pastorianus
gggctgccattctattttacatgca

SEQ ID NO: 25775 - DNA, 25 bp, Saccharomyces pastorianus
tttgttccccagttccaagatagac

SEQ ID NO: 25776 - DNA, 25 bp, Saccharomyces pastorianus
ccgtcgtctatggttctttgatttt

SEQ ID NO: 25777 - DNA, 25 bp, Saccharomyces pastorianus
aaaggacagctagagccgtcgtcta

SEQ ID NO: 25778 - DNA, 25 bp, Saccharomyces pastorianus
gaaggcccaagacgactaacgcgat

SEQ ID NO: 25779 - DNA, 25 bp, Saccharomyces pastorianus
agtggaccaattagcgtttgcgccc

SEQ ID NO: 25780 - DNA, 25 bp, Saccharomyces pastorianus
gattattggccgttaaccttgttgc

SEQ ID NO: 25781 - DNA, 25 bp, Saccharomyces pastorianus
gcagtattgcgccaagacggtttat

SEQ ID NO: 25782 - DNA, 25 bp, Saccharomyces pastorianus
gtatgctaagttctggctatcgcta

SEQ ID NO: 25783 - DNA, 25 bp, Saccharomyces pastorianus
gacgcagcactgaactatgacattt

SEQ ID NO: 25784 - DNA, 25 bp, Saccharomyces pastorianus
gatcacggactgtataggtacccta

SEQ ID NO: 25785 - DNA, 25 bp, Saccharomyces pastorianus
attttatccagaatccccagcgtgg

SEQ ID NO: 25786 - DNA, 25 bp, Saccharomyces pastorianus
atgccaagggatttgccaacatcac

SEQ ID NO: 25787 - DNA, 25 bp, Saccharomyces pastorianus
acagatgagcagttcccactcttgg

SEQ ID NO: 25788 - DNA, 25 bp, Saccharomyces pastorianus
taggtaccctagcaccaggacaagg

SEQ ID NO: 25789 - DNA, 25 bp, Saccharomyces pastorianus
cgagaggcgtatcaaccagttgtat

SEQ ID NO: 25790 - DNA, 25 bp, Saccharomyces pastorianus
gacctgaccagacatcttgacgagt

SEQ ID NO: 25791 - DNA, 25 bp, Saccharomyces pastorianus
gacgagtgtttgcaaaacccgctgg

SEQ ID NO: 25792 - DNA, 25 bp, Saccharomyces pastorianus
aatttggacttggaaactgcgatac

SEQ ID NO: 25793 - DNA, 25 bp, Saccharomyces pastorianus
aacgccgtcatgaaccactgtaaca

SEQ ID NO: 25794 - DNA, 25 bp, Saccharomyces pastorianus
cctgctccacgctgtatttacaaaa

SEQ ID NO: 25795 - DNA, 25 bp, Saccharomyces pastorianus
aatgagattgagactgccaccaggg

SEQ ID NO: 25796 - DNA, 25 bp, Saccharomyces pastorianus
ggagctcttggaaagccacacgcaa

SEQ ID NO: 25797 - DNA, 25 bp, Saccharomyces pastorianus
ttctcctggaacacgagttgctcga

SEQ ID NO: 25798 - DNA, 25 bp, Saccharomyces pastorianus
ctgtaacatcccgaatacccagata

SEQ ID NO: 25799 - DNA, 25 bp, Saccharomyces pastorianus
gcaccgccggcgaggccaaaagaaa

SEQ ID NO: 25800 - DNA, 25 bp, Saccharomyces pastorianus
aagacaccattaaagtctccaccac

SEQ ID NO: 25801 - DNA, 25 bp, Saccharomyces pastorianus
agttgctcgacaccaaggacgcttt

SEQ ID NO: 25802 - DNA, 25 bp, Saccharomyces pastorianus
ataatatcctcactggagagccagc

SEQ ID NO: 25803 - DNA, 25 bp, Saccharomyces pastorianus
gatcggtatagacttcctttccaag

SEQ ID NO: 25804 - DNA, 25 bp, Saccharomyces pastorianus
gattgctaaatctctccctgaattt

SEQ ID NO: 25805 - DNA, 25 bp, Saccharomyces pastorianus
aacagcgaatcaacgcccttggatg

SEQ ID NO: 25806 - DNA, 25 bp, Saccharomyces pastorianus
tcattatcaggccacgatcggtata

SEQ ID NO: 25807 - DNA, 25 bp, Saccharomyces pastorianus
tagatcgttaataccttcatacatt

SEQ ID NO: 25808 - DNA, 25 bp, Saccharomyces pastorianus
aaaccaggcgttattgatatttcca

SEQ ID NO: 25809 - DNA, 25 bp, Saccharomyces pastorianus
tattgtttacgacatcaccaagaga

SEQ ID NO: 25810 - DNA, 25 bp, Saccharomyces pastorianus
taaaatcttcatggagacctctaca

SEQ ID NO: 25811 - DNA, 25 bp, Saccharomyces pastorianus
gagacaaatctccaccgaagaagga

SEQ ID NO: 25812 - DNA, 25 bp, Saccharomyces pastorianus
ctctacaaaggcaggttacaacgtt

SEQ ID NO: 25813 - DNA, 25 bp, Saccharomyces pastorianus
aacatctctgattactaggttcatg

SEQ ID NO: 25814 - DNA, 25 bp, Saccharomyces pastorianus
gaagcaacaacaggatatggatcct

SEQ ID NO: 25815 - DNA, 25 bp, Saccharomyces pastorianus
ctaatatgaagagcggtaagccttt

SEQ ID NO: 25816 - DNA, 25 bp, Saccharomyces pastorianus
atcctgaagaagttgctttcaaaga

SEQ ID NO: 25817 - DNA, 25 bp, Saccharomyces pastorianus
ggccgacgctgctgctaagaaagct

SEQ ID NO: 25818 - DNA, 25 bp, Saccharomyces pastorianus
tggatcctgaagaagttgctttcaa

SEQ ID NO: 25819 - DNA, 25 bp, Saccharomyces pastorianus
tatgaagagcggtaagcctttagtc

SEQ ID NO: 25820 - DNA, 25 bp, Saccharomyces pastorianus
tgtctggtcgtcaaggtggtaagat

SEQ ID NO: 25821 - DNA, 25 bp, Saccharomyces pastorianus
ctgaagaagttgctttcaaagaaaa

SEQ ID NO: 25822 - DNA, 25 bp, Saccharomyces pastorianus
tatggatcctgaagaagttgctttc

SEQ ID NO: 25823 - DNA, 25 bp, Saccharomyces pastorianus
gatatggatcctgaagaagttgctt

SEQ ID NO: 25824 - DNA, 25 bp, Saccharomyces pastorianus
aaaaggccgacgctgctgctaagaa

SEQ ID NO: 25825 - DNA, 25 bp, Saccharomyces pastorianus
ccgtaccatcgtcagaaacgttaag

SEQ ID NO: 25826 - DNA, 25 bp, Saccharomyces pastorianus
gttactcaagttcgtgttgaattct

SEQ ID NO: 25827 - DNA, 25 bp, Saccharomyces pastorianus
tcatcaaagttctaggccgtaccgg

SEQ ID NO: 25828 - DNA, 25 bp, Saccharomyces pastorianus
caagaccccagtcaccttagctaaa

SEQ ID NO: 25829 - DNA, 25 bp, Saccharomyces pastorianus
tacccgtaccatcgtcagaaacgtt

SEQ ID NO: 25830 - DNA, 25 bp, Saccharomyces pastorianus
taccatcgtcagaaacgttaagggc

SEQ ID NO: 25831 - DNA, 25 bp, Saccharomyces pastorianus
actacccgtaccatcgtcagaaacg

SEQ ID NO: 25832 - DNA, 25 bp, Saccharomyces pastorianus
ttctcgtggtggtgttactcaagtt

SEQ ID NO: 25833 - DNA, 25 bp, Saccharomyces pastorianus
gtaccatcgtcagaaacgttaaggg

SEQ ID NO: 25834 - DNA, 25 bp, Saccharomyces pastorianus
ttctaggccgtaccggttctcgtgg

SEQ ID NO: 25835 - DNA, 25 bp, Saccharomyces pastorianus
catcgtcagaaacgttaagggccca

SEQ ID NO: 25836 - DNA, 25 bp, Saccharomyces pastorianus
aagatcgtggtctccagaatgacac

SEQ ID NO: 25837 - DNA, 25 bp, Saccharomyces pastorianus
gacatagcccaggagttcgaacact

SEQ ID NO: 25838 - DNA, 25 bp, Saccharomyces pastorianus
gatccctcactgtctgaacaaaagc

SEQ ID NO: 25839 - DNA, 25 bp, Saccharomyces pastorianus
gtcatatgtgagtccggatacccaa

SEQ ID NO: 25840 - DNA, 25 bp, Saccharomyces pastorianus
cattgtcatagtcgccttcttcttt

SEQ ID NO: 25841 - DNA, 25 bp, Saccharomyces pastorianus
aaatccatggtcttctattttgtca

SEQ ID NO: 25842 - DNA, 25 bp, Saccharomyces pastorianus
tttatagacaagacgggctgcctct

SEQ ID NO: 25843 - DNA, 25 bp, Saccharomyces pastorianus
aatgagcgacatgagttcctccctg

SEQ ID NO: 25844 - DNA, 25 bp, Saccharomyces pastorianus
gtcaacttcgacaacttcctacaaa

SEQ ID NO: 25845 - DNA, 25 bp, Saccharomyces pastorianus
ggctcttttgaaatccactacttga

SEQ ID NO: 25846 - DNA, 25 bp, Saccharomyces pastorianus
cgccaccgaggccactttagaaagt

SEQ ID NO: 25847 - DNA, 25 bp, Saccharomyces pastorianus
gatggattcctaattttgcctgata

SEQ ID NO: 25848 - DNA, 25 bp, Saccharomyces pastorianus
aacagcattgctgccggcaaagcta

SEQ ID NO: 25849 - DNA, 25 bp, Saccharomyces pastorianus
aagagaatcgtccagccttacatcg

SEQ ID NO: 25850 - DNA, 25 bp, Saccharomyces pastorianus
tgttcctggttgttataactacgca

SEQ ID NO: 25851 - DNA, 25 bp, Saccharomyces pastorianus
ggttgccatcgtttatagaactgac

SEQ ID NO: 25852 - DNA, 25 bp, Saccharomyces pastorianus
ggactctttgtacttggttgccatc

SEQ ID NO: 25853 - DNA, 25 bp, Saccharomyces pastorianus
gggacggtatgaacctggactcttt

SEQ ID NO: 25854 - DNA, 25 bp, Saccharomyces pastorianus
taactacgcagtccatcctgatgag

SEQ ID NO: 25855 - DNA, 25 bp, Saccharomyces pastorianus
cattctttatgaaggtgccgaggca

SEQ ID NO: 25856 - DNA, 25 bp, Saccharomyces pastorianus
gcatccaggtctaggtaacagcatt

SEQ ID NO: 25857 - DNA, 25 bp, Saccharomyces pastorianus
aatattgattcactaccaaccctct

SEQ ID NO: 25858 - DNA, 25 bp, Saccharomyces pastorianus
ggccaaatgtttagacaacccagat

SEQ ID NO: 25859 - DNA, 25 bp, Saccharomyces pastorianus
gcttgtcttcgcagtattgtgaaaa

SEQ ID NO: 25860 - DNA, 25 bp, Saccharomyces pastorianus
aaggacatgtttaatgaccgttaca

SEQ ID NO: 25861 - DNA, 25 bp, Saccharomyces pastorianus
ggattatttgtaccgtcgtttacat

SEQ ID NO: 25862 - DNA, 25 bp, Saccharomyces pastorianus
aaaaggctaccgctattaattactg

SEQ ID NO: 25863 - DNA, 25 bp, Saccharomyces pastorianus
atttttcaccgaattagcttctaag

SEQ ID NO: 25864 - DNA, 25 bp, Saccharomyces pastorianus
aacgccatctataacgggttcattg

SEQ ID NO: 25865 - DNA, 25 bp, Saccharomyces pastorianus
gaaactgtcactgcagtattggagg

SEQ ID NO: 25866 - DNA, 25 bp, Saccharomyces pastorianus
gtatgcttcaacaatctggtagatg

SEQ ID NO: 25867 - DNA, 25 bp, Saccharomyces pastorianus
gggatgacattgcattcgtgttaaa

SEQ ID NO: 25868 - DNA, 25 bp, Saccharomyces pastorianus
tagcttctaaggacaacgccatcta

SEQ ID NO: 25869 - DNA, 25 bp, Saccharomyces pastorianus
ggccgctgaaaaactatcttcgaat

SEQ ID NO: 25870 - DNA, 25 bp, Saccharomyces pastorianus
tgcctctcaggatccaatcggtggt

SEQ ID NO: 25871 - DNA, 25 bp, Saccharomyces pastorianus
gataaagccttgtatgcgttggaga

SEQ ID NO: 25872 - DNA, 25 bp, Saccharomyces pastorianus
tgtcgacacacatagattttctcaa

SEQ ID NO: 25873 - DNA, 25 bp, Saccharomyces pastorianus
atttcaggcatctacaatggacgct

SEQ ID NO: 25874 - DNA, 25 bp, Saccharomyces pastorianus
atggcacgtcattatcagagatccg

SEQ ID NO: 25875 - DNA, 25 bp, Saccharomyces pastorianus
aaagatcgtctatccctattaccat

SEQ ID NO: 25876 - DNA, 25 bp, Saccharomyces pastorianus
atcagagatccgtcgttttgaacaa

SEQ ID NO: 25877 - DNA, 25 bp, Saccharomyces pastorianus
atttctatcgccaatcacgttatta

SEQ ID NO: 25878 - DNA, 25 bp, Saccharomyces pastorianus
tggttggtctacttcttaccaaact

SEQ ID NO: 25879 - DNA, 25 bp, Saccharomyces pastorianus
ctagaactaagtccaatcgcacagg

SEQ ID NO: 25880 - DNA, 25 bp, Saccharomyces pastorianus
cagcaatttcatttgtggtcccatt

SEQ ID NO: 25881 - DNA, 25 bp, Saccharomyces pastorianus
gatttgccaacaacagccaagtcgt

SEQ ID NO: 25882 - DNA, 25 bp, Saccharomyces pastorianus
atccaaagaagcgtcatccacatag

SEQ ID NO: 25883 - DNA, 25 bp, Saccharomyces pastorianus
gaattgcaaccttacacatttgacc

SEQ ID NO: 25884 - DNA, 25 bp, Saccharomyces pastorianus
taagcataagccgtcaatgttgcaa

SEQ ID NO: 25885 - DNA, 25 bp, Saccharomyces pastorianus
actcaagtcgccatcagggaagcca

SEQ ID NO: 25886 - DNA, 25 bp, Saccharomyces pastorianus
ggtaaaaccggtacagcaatttcat

SEQ ID NO: 25887 - DNA, 25 bp, Saccharomyces pastorianus
aacagccaagtcgtatgtgcataga

SEQ ID NO: 25888 - DNA, 25 bp, Saccharomyces pastorianus
ggtttccgtgccgtgactcaagtcg

SEQ ID NO: 25889 - DNA, 25 bp, Saccharomyces pastorianus
agattctttcgcgtatcatcaagca

SEQ ID NO: 25890 - DNA, 25 bp, Saccharomyces pastorianus
gtttgttccgttccacaatccaaag

SEQ ID NO: 25891 - DNA, 25 bp, Saccharomyces pastorianus
tgttgtcgacactatagctacttta

SEQ ID NO: 25892 - DNA, 25 bp, Saccharomyces pastorianus
tatgaacgtagattctgctccggct

SEQ ID NO: 25893 - DNA, 25 bp, Saccharomyces pastorianus
attctgctccggctagtgtgaagtt

SEQ ID NO: 25894 - DNA, 25 bp, Saccharomyces pastorianus
atgactgacaccgtagctgattctg

SEQ ID NO: 25895 - DNA, 25 bp, Saccharomyces pastorianus
gctgattctgtcattgcaatactta

SEQ ID NO: 25896 - DNA, 25 bp, Saccharomyces pastorianus
ggtgacggtacaaccaaatctggta

SEQ ID NO: 25897 - DNA, 25 bp, Saccharomyces pastorianus
gtcactatcggtaagaacactgcta

SEQ ID NO: 25898 - DNA, 25 bp, Saccharomyces pastorianus
gtcgctcttgtgacgatcatgaaca

SEQ ID NO: 25899 - DNA, 25 bp, Saccharomyces pastorianus
gtgaggctgatgttcttcaagacga

SEQ ID NO: 25900 - DNA, 25 bp, Saccharomyces pastorianus
gtgtgaagttatccagtcgctcttg

SEQ ID NO: 25901 - DNA, 25 bp, Saccharomyces pastorianus
atgacggcgaggtgcaatcttttgc

SEQ ID NO: 25902 - DNA, 25 bp, Saccharomyces pastorianus
gattatactccattattggccaaca

SEQ ID NO: 25903 - DNA, 25 bp, Saccharomyces pastorianus
aattgggtgctgcagcagctctacc

SEQ ID NO: 25904 - DNA, 25 bp, Saccharomyces pastorianus
agctctaccttctgtcatttgtgct

SEQ ID NO: 25905 - DNA, 25 bp, Saccharomyces pastorianus
tactgattatcctgatcctgatcta

SEQ ID NO: 25906 - DNA, 25 bp, Saccharomyces pastorianus
ggaatttttccaattggctaacgat

SEQ ID NO: 25907 - DNA, 25 bp, Saccharomyces pastorianus
aacagtcgaaatcagatctcgcgtt

SEQ ID NO: 25908 - DNA, 25 bp, Saccharomyces pastorianus
ggcgttagtagtgttttcaccacat

SEQ ID NO: 25909 - DNA, 25 bp, Saccharomyces pastorianus
atcgaaccatttggatgctcatcca

SEQ ID NO: 25910 - DNA, 25 bp, Saccharomyces pastorianus
catttgtgctttgaacggtgctaaa

SEQ ID NO: 25911 - DNA, 25 bp, Saccharomyces pastorianus
taacgatgagttcagtttggttcct

SEQ ID NO: 25912 - DNA, 25 bp, Saccharomyces pastorianus
gaaggactcggcaacatcagtgcag

SEQ ID NO: 25913 - DNA, 25 bp, Saccharomyces pastorianus
ttcaacaacttctacctctcaaaaa

SEQ ID NO: 25914 - DNA, 25 bp, Saccharomyces pastorianus
atgacagagactacttccacgacca

SEQ ID NO: 25915 - DNA, 25 bp, Saccharomyces pastorianus
caaagagtcctttcactactgctac

SEQ ID NO: 25916 - DNA, 25 bp, Saccharomyces pastorianus
gagatcgcatgctctgctgatggag

SEQ ID NO: 25917 - DNA, 25 bp, Saccharomyces pastorianus
ggagagtacgctgtttgtgaccaca

SEQ ID NO: 25918 - DNA, 25 bp, Saccharomyces pastorianus
taaaaactactctgtctactccaac

SEQ ID NO: 25919 - DNA, 25 bp, Saccharomyces pastorianus
atatgccgccggtcaattgaatggt

SEQ ID NO: 25920 - DNA, 25 bp, Saccharomyces pastorianus
tacgtcaaagaatactcccgctatc

SEQ ID NO: 25921 - DNA, 25 bp, Saccharomyces pastorianus
tgaccacagcgcctgggtttatatg

SEQ ID NO: 25922 - DNA, 25 bp, Saccharomyces pastorianus
caagtacactttctccaactacaag

SEQ ID NO: 25923 - DNA, 25 bp, Saccharomyces pastorianus
gaactacgtgttatgcttttgactc

SEQ ID NO: 25924 - DNA, 25 bp, Saccharomyces pastorianus
atgctcgttatgatgaagacctgtt

SEQ ID NO: 25925 - DNA, 25 bp, Saccharomyces pastorianus
tgacaaaccgatgtcttcgctatat

SEQ ID NO: 25926 - DNA, 25 bp, Saccharomyces pastorianus
actcatgaagtaattatccgctgca

SEQ ID NO: 25927 - DNA, 25 bp, Saccharomyces pastorianus
agagagtagttctgccaatccttcc

SEQ ID NO: 25928 - DNA, 25 bp, Saccharomyces pastorianus
cattgttcgctggaccgtggtagtt

SEQ ID NO: 25929 - DNA, 25 bp, Saccharomyces pastorianus
tatggacatccatcctgagcatgaa

SEQ ID NO: 25930 - DNA, 25 bp, Saccharomyces pastorianus
gcgttcgaggaagttgttttggcaa

SEQ ID NO: 25931 - DNA, 25 bp, Saccharomyces pastorianus
atcttgtgtattccattgttcgctg

SEQ ID NO: 25932 - DNA, 25 bp, Saccharomyces pastorianus
tgttccaaactatacgcagcgttcg

SEQ ID NO: 25933 - DNA, 25 bp, Saccharomyces pastorianus
gccaatccttcccaaaatcataata

SEQ ID NO: 25934 - DNA, 25 bp, Saccharomyces pastorianus
gaacaagaatctcttcccatgattg

SEQ ID NO: 25935 - DNA, 25 bp, Saccharomyces pastorianus
aatgggaatgctatcgacgccttat

SEQ ID NO: 25936 - DNA, 25 bp, Saccharomyces pastorianus
atgcttctgatctctctcgtagaaa

SEQ ID NO: 25937 - DNA, 25 bp, Saccharomyces pastorianus
gacgccttatccagggtattgcaca

SEQ ID NO: 25938 - DNA, 25 bp, Saccharomyces pastorianus
aatctgtctccagagggtttgcttc

SEQ ID NO: 25939 - DNA, 25 bp, Saccharomyces pastorianus
atgttatacgtttatgcgacagcaa

SEQ ID NO: 25940 - DNA, 25 bp, Saccharomyces pastorianus
cgttgcagcttatcacgaaccattt

SEQ ID NO: 25941 - DNA, 25 bp, Saccharomyces pastorianus
aagttacatgcttctgatctctctc

SEQ ID NO: 25942 - DNA, 25 bp, Saccharomyces pastorianus
aggtcgttatccaagctagggctaa

SEQ ID NO: 25943 - DNA, 25 bp, Saccharomyces pastorianus
gagggtttgcttctttggattatga

SEQ ID NO: 25944 - DNA, 25 bp, Saccharomyces pastorianus
gattgatatcacttaccttaacact

SEQ ID NO: 25945 - DNA, 25 bp, Saccharomyces pastorianus
tattaccttccgttatcacatttgg

SEQ ID NO: 25946 - DNA, 25 bp, Saccharomyces pastorianus
aaagaggcttggcatttgttcccga

SEQ ID NO: 25947 - DNA, 25 bp, Saccharomyces pastorianus
tgtcacacaatccaccgaaaccaat

SEQ ID NO: 25948 - DNA, 25 bp, Saccharomyces pastorianus
aagcggactgtctgttgaaattagg

SEQ ID NO: 25949 - DNA, 25 bp, Saccharomyces pastorianus
ccaaatcttactccacaaccaaatg

SEQ ID NO: 25950 - DNA, 25 bp, Saccharomyces pastorianus
gttgcacttcatgcttcgtagcaaa

SEQ ID NO: 25951 - DNA, 25 bp, Saccharomyces pastorianus
tcatccaaccagacgtctttgtgag

SEQ ID NO: 25952 - DNA, 25 bp, Saccharomyces pastorianus
attcagctaccagagttgcacttca

SEQ ID NO: 25953 - DNA, 25 bp, Saccharomyces pastorianus
atagatttgtctttggtgcttggaa

SEQ ID NO: 25954 - DNA, 25 bp, Saccharomyces pastorianus
gaggcattgcaagatctagactttt

SEQ ID NO: 25955 - DNA, 25 bp, Saccharomyces pastorianus
ataagtgcaagtggcgccgatgtca

SEQ ID NO: 25956 - DNA, 25 bp, Saccharomyces pastorianus
gatctagactttttactcggtacgg

SEQ ID NO: 25957 - DNA, 25 bp, Saccharomyces pastorianus
gacgtctgggacactgctggccaag

SEQ ID NO: 25958 - DNA, 25 bp, Saccharomyces pastorianus
ttgcaatactacgacatttccgcca

SEQ ID NO: 25959 - DNA, 25 bp, Saccharomyces pastorianus
gacatttccgccaaatctaactaca

SEQ ID NO: 25960 - DNA, 25 bp, Saccharomyces pastorianus
taaactagtccttgtcggtgatggt

SEQ ID NO: 25961 - DNA, 25 bp, Saccharomyces pastorianus
tttgtccttctacaccaatttcggt

SEQ ID NO: 25962 - DNA, 25 bp, Saccharomyces pastorianus
gaatgttcctaactggcacagagat

SEQ ID NO: 25963 - DNA, 25 bp, Saccharomyces pastorianus
ttagagtttgttgcttctccagctt

SEQ ID NO: 25964 - DNA, 25 bp, Saccharomyces pastorianus
cggtgttgaagtgcatcctttgtcc

SEQ ID NO: 25965 - DNA, 25 bp, Saccharomyces pastorianus
gaagtacattgccaccatcggtgtt

SEQ ID NO: 25966 - DNA, 25 bp, Saccharomyces pastorianus
gagatttggtccgtgtctgtgaaaa

SEQ ID NO: 25967 - DNA, 25 bp, Saccharomyces pastorianus
agacggttactacatcaatgctcaa

SEQ ID NO: 25968 - DNA, 25 bp, Saccharomyces pastorianus
aaagaagccaaccttaccagaattg

SEQ ID NO: 25969 - DNA, 25 bp, Saccharomyces pastorianus
tgacgaccacaagagtatcctacaa

SEQ ID NO: 25970 - DNA, 25 bp, Saccharomyces pastorianus
gtcaagccttggagcccaccaaaga

SEQ ID NO: 25971 - DNA, 25 bp, Saccharomyces pastorianus
tagaaaccgccaacgacaccaagag

SEQ ID NO: 25972 - DNA, 25 bp, Saccharomyces pastorianus
tacaggacttgtacttgagggaact

SEQ ID NO: 25973 - DNA, 25 bp, Saccharomyces pastorianus
acccagctctttgcaagatgccgag

SEQ ID NO: 25974 - DNA, 25 bp, Saccharomyces pastorianus
agacgccctaaaggcatacgccgat

SEQ ID NO: 25975 - DNA, 25 bp, Saccharomyces pastorianus
gatgccgagggtaacgtcaagcctt

SEQ ID NO: 25976 - DNA, 25 bp, Saccharomyces pastorianus
gtgctcaatgcttcgagattaccat

SEQ ID NO: 25977 - DNA, 25 bp, Saccharomyces pastorianus
gagggcgaagccgaaccaattgaag

SEQ ID NO: 25978 - DNA, 25 bp, Saccharomyces pastorianus
gaaggaaactaagctggcacccagc

SEQ ID NO: 25979 - DNA, 25 bp, Saccharomyces pastorianus
gacgccaaccgctttgatataggag

SEQ ID NO: 25980 - DNA, 25 bp, Saccharomyces pastorianus
gaaagatctgcgcaacacaccgtca

SEQ ID NO: 25981 - DNA, 25 bp, Saccharomyces pastorianus
aatcatcttcgagtaacagcggact

SEQ ID NO: 25982 - DNA, 25 bp, Saccharomyces pastorianus
tcgatcaacacactgcagtcgttat

SEQ ID NO: 25983 - DNA, 25 bp, Saccharomyces pastorianus
gatggcctacggaaaccggcgagtt

SEQ ID NO: 25984 - DNA, 25 bp, Saccharomyces pastorianus
aaggtgttcatagacgccaaccgct

SEQ ID NO: 25985 - DNA, 25 bp, Saccharomyces pastorianus
taaaggttacgtgcttgcccaataa

SEQ ID NO: 25986 - DNA, 25 bp, Saccharomyces pastorianus
atgcgagagcaatccgttccctaga

SEQ ID NO: 25987 - DNA, 25 bp, Saccharomyces pastorianus
gagcctccgaagatattgtcacagt

SEQ ID NO: 25988 - DNA, 25 bp, Saccharomyces pastorianus
gtacggacatcctacaaaccacgat

SEQ ID NO: 25989 - DNA, 25 bp, Saccharomyces pastorianus
taggagatttagtcaaggccagcaa

SEQ ID NO: 25990 - DNA, 25 bp, Saccharomyces pastorianus
ttatcattcatgacgcattccaaca

SEQ ID NO: 25991 - DNA, 25 bp, Saccharomyces pastorianus
gacgatattacttcgtggtccgatg

SEQ ID NO: 25992 - DNA, 25 bp, Saccharomyces pastorianus
actattgggatgactttatgactgc

SEQ ID NO: 25993 - DNA, 25 bp, Saccharomyces pastorianus
gaagcccactggaccgtttgcggtg

SEQ ID NO: 25994 - DNA, 25 bp, Saccharomyces pastorianus
gaattcgccgctgctatgacagatt

SEQ ID NO: 25995 - DNA, 25 bp, Saccharomyces pastorianus
gtagaagctcaattagacgcctttg

SEQ ID NO: 25996 - DNA, 25 bp, Saccharomyces pastorianus
actggtgtgttggacgaagcccact

SEQ ID NO: 25997 - DNA, 25 bp, Saccharomyces pastorianus
atcttcctacattggttcttgtgcc

SEQ ID NO: 25998 - DNA, 25 bp, Saccharomyces pastorianus
ttcggtgccagatacgatggttctt

SEQ ID NO: 25999 - DNA, 25 bp, Saccharomyces pastorianus
gaccaccaccattatcaagttttcg

SEQ ID NO: 26000 - DNA, 25 bp, Saccharomyces pastorianus
ggttcttgtgccaacaacgacgata

SEQ ID NO: 26001 - DNA, 25 bp, Saccharomyces pastorianus
tagtcattgctccatactttaccac

SEQ ID NO: 26002 - DNA, 25 bp, Saccharomyces pastorianus
gaaaagttcccacaattctctcaac

SEQ ID NO: 26003 - DNA, 25 bp, Saccharomyces pastorianus
tgaagcttgcttccaacttggccaa

SEQ ID NO: 26004 - DNA, 25 bp, Saccharomyces pastorianus
ggtatcctaccctggtttagcatct

SEQ ID NO: 26005 - DNA, 25 bp, Saccharomyces pastorianus
gtggtgtcttatccttcggtgttaa

SEQ ID NO: 26006 - DNA, 25 bp, Saccharomyces pastorianus
gcctctttcctactactacaaggtg

SEQ ID NO: 26007 - DNA, 25 bp, Saccharomyces pastorianus
gaaaagttggcttctggtgtcacca

SEQ ID NO: 26008 - DNA, 25 bp, Saccharomyces pastorianus
ttaaggacttgccaaacgctgacaa

SEQ ID NO: 26009 - DNA, 25 bp, Saccharomyces pastorianus
ggtgcccaagttgttgacggtttga

SEQ ID NO: 26010 - DNA, 25 bp, Saccharomyces pastorianus
agtctccttacgtatcctgggtatc

SEQ ID NO: 26011 - DNA, 25 bp, Saccharomyces pastorianus
ggccgaaggctaccacggtactata

SEQ ID NO: 26012 - DNA, 25 bp, Saccharomyces pastorianus
gtggaagccatcatcgagtgcgtta

SEQ ID NO: 26013 - DNA, 25 bp, Saccharomyces pastorianus
tatgtacgacgatcaaggccactgt

SEQ ID NO: 26014 - DNA, 25 bp, Saccharomyces pastorianus
tgagagcatcttcaccaagggttac

SEQ ID NO: 26015 - DNA, 25 bp, Saccharomyces pastorianus
ggcatcaagttcgaggcagtcccat

SEQ ID NO: 26016 - DNA, 25 bp, Saccharomyces pastorianus
atctttgatattgtcccgggtggca

SEQ ID NO: 26017 - DNA, 25 bp, Saccharomyces pastorianus
aggccactgtctacacattgatttc

SEQ ID NO: 26018 - DNA, 25 bp, Saccharomyces pastorianus
taatcgacgtgctacccaattcagt

SEQ ID NO: 26019 - DNA, 25 bp, Saccharomyces pastorianus
accggcctacttagacttcgaagag

SEQ ID NO: 26020 - DNA, 25 bp, Saccharomyces pastorianus
gtgcgttaaccccatgctaggaagc

SEQ ID NO: 26021 - DNA, 25 bp, Saccharomyces pastorianus
ttaaagcatatctggcggcacgtcc

SEQ ID NO: 26022 - DNA, 25 bp, Saccharomyces pastorianus
gtcttccatgcttcaagggtcacaa

SEQ ID NO: 26023 - DNA, 25 bp, Saccharomyces pastorianus
gtagcccaaatcgagtggtcaattt

SEQ ID NO: 26024 - DNA, 25 bp, Saccharomyces pastorianus
ggtacacatacttggtcacatgcat

SEQ ID NO: 26025 - DNA, 25 bp, Saccharomyces pastorianus
ggttaactgtggtcttatgggatca

SEQ ID NO: 26026 - DNA, 25 bp, Saccharomyces pastorianus
aagctttctcaaacattcgacgatg

SEQ ID NO: 26027 - DNA, 25 bp, Saccharomyces pastorianus
gagacacaggaccacttttttcgtt

SEQ ID NO: 26028 - DNA, 25 bp, Saccharomyces pastorianus
cacatgcatttttaccaagcctatc

SEQ ID NO: 26029 - DNA, 25 bp, Saccharomyces pastorianus
gttacttcgtgtttcaagctttctc

SEQ ID NO: 26030 - DNA, 25 bp, Saccharomyces pastorianus
gaaggactgtcgatcttgcgattaa

SEQ ID NO: 26031 - DNA, 25 bp, Saccharomyces pastorianus
gaatgctaccggtaaacactttcct

SEQ ID NO: 26032 - DNA, 25 bp, Saccharomyces pastorianus
gagaggtcatttagtcggtacacat

SEQ ID NO: 26033 - DNA, 25 bp, Saccharomyces pastorianus
acactgttagtttccctcatatata

SEQ ID NO: 26034 - DNA, 25 bp, Saccharomyces pastorianus
cggatattcttcagtttctaaaact

SEQ ID NO: 26035 - DNA, 25 bp, Saccharomyces pastorianus
aaaactgtccatgataagcccattg

SEQ ID NO: 26036 - DNA, 25 bp, Saccharomyces pastorianus
tttaccccaaagagctcacctacat

SEQ ID NO: 26037 - DNA, 25 bp, Saccharomyces pastorianus
ctacatcaacaaccatcccagttat

SEQ ID NO: 26038 - DNA, 25 bp, Saccharomyces pastorianus
acagcaaaatgctttaccccaaaga

SEQ ID NO: 26039 - DNA, 25 bp, Saccharomyces pastorianus
tcccagttataaaagatgctagtgc

SEQ ID NO: 26040 - DNA, 25 bp, Saccharomyces pastorianus
gatgctagtgctactcattatcgta

SEQ ID NO: 26041 - DNA, 25 bp, Saccharomyces pastorianus
caagcttaaacggatattcttcagt

SEQ ID NO: 26042 - DNA, 25 bp, Saccharomyces pastorianus
gtgctactcattatcgtagaatgtc

SEQ ID NO: 26043 - DNA, 25 bp, Saccharomyces pastorianus
taagcccattgttatctgcacagat

SEQ ID NO: 26044 - DNA, 25 bp, Saccharomyces pastorianus
gtagaatgtctaccataaacaactt

SEQ ID NO: 26045 - DNA, 25 bp, Saccharomyces pastorianus
tctgctctatattcttctccaattt

SEQ ID NO: 26046 - DNA, 25 bp, Saccharomyces pastorianus
atgtcccgcacatcgagaagcagta

SEQ ID NO: 26047 - DNA, 25 bp, Saccharomyces pastorianus
tgttgggaacgcagactttctccat

SEQ ID NO: 26048 - DNA, 25 bp, Saccharomyces pastorianus
actaaaggtaactcacactctgcta

SEQ ID NO: 26049 - DNA, 25 bp, Saccharomyces pastorianus
gactgtcatagaagcctctttggaa

SEQ ID NO: 26050 - DNA, 25 bp, Saccharomyces pastorianus
gcagactttctccataattcgacga

SEQ ID NO: 26051 - DNA, 25 bp, Saccharomyces pastorianus
cactctgctaccactagtgggacga

SEQ ID NO: 26052 - DNA, 25 bp, Saccharomyces pastorianus
atgaccgctatcgtttctgctctat

SEQ ID NO: 26053 - DNA, 25 bp, Saccharomyces pastorianus
gacagacatcgcatgtgtcccgttt

SEQ ID NO: 26054 - DNA, 25 bp, Saccharomyces pastorianus
gaagcagtatcaactctcattgcaa

SEQ ID NO: 26055 - DNA, 25 bp, Saccharomyces pastorianus
tcggtgtgtacctatctgatttgac

SEQ ID NO: 26056 - DNA, 25 bp, Saccharomyces pastorianus
ggcagccaagtaagaggccgttctt

SEQ ID NO: 26057 - DNA, 25 bp, Saccharomyces pastorianus
gttcgacccgatatccaaacaacaa

SEQ ID NO: 26058 - DNA, 25 bp, Saccharomyces pastorianus
gattattcacaaacttaccttatgc

SEQ ID NO: 26059 - DNA, 25 bp, Saccharomyces pastorianus
actgttttccaacaaaaggtgtctg

SEQ ID NO: 26060 - DNA, 25 bp, Saccharomyces pastorianus
gaaactgagctatttgcaagacata

SEQ ID NO: 26061 - DNA, 25 bp, Saccharomyces pastorianus
taccttatgctgtcgttgggtccaa

SEQ ID NO: 26062 - DNA, 25 bp, Saccharomyces pastorianus
gtggataatgacagccattccgatt

SEQ ID NO: 26063 - DNA, 25 bp, Saccharomyces pastorianus
ggtatcaagcaagacaactcagttt

SEQ ID NO: 26064 - DNA, 25 bp, Saccharomyces pastorianus
cagccattccgatttcaaccttttg

SEQ ID NO: 26065 - DNA, 25 bp, Saccharomyces pastorianus
ttctccaaacgttaatcattcccct

SEQ ID NO: 26066 - DNA, 25 bp, Saccharomyces pastorianus
aactacagatcatccaaattggcca

SEQ ID NO: 26067 - DNA, 25 bp, Saccharomyces pastorianus
atttgacttgcaatctacaggacag

SEQ ID NO: 26068 - DNA, 25 bp, Saccharomyces pastorianus
tacaacgatgactccataactccgg

SEQ ID NO: 26069 - DNA, 25 bp, Saccharomyces pastorianus
gacctctgctactttgcaaactcaa

SEQ ID NO: 26070 - DNA, 25 bp, Saccharomyces pastorianus
ggaagaatttgcctccatatattgt

SEQ ID NO: 26071 - DNA, 25 bp, Saccharomyces pastorianus
gataaatcgctaaccccagaaacct

SEQ ID NO: 26072 - DNA, 25 bp, Saccharomyces pastorianus
gactgggtcgatggccatttaatcc

SEQ ID NO: 26073 - DNA, 25 bp, Saccharomyces pastorianus
gatcttgatatgacctctgctactt

SEQ ID NO: 26074 - DNA, 25 bp, Saccharomyces pastorianus
ctttgccgcttccattgtacaggac

SEQ ID NO: 26075 - DNA, 25 bp, Saccharomyces pastorianus
gagttcattcccttagtatctcaat

SEQ ID NO: 26076 - DNA, 25 bp, Saccharomyces pastorianus
aatccaggaccatgtaccaaacgat

SEQ ID NO: 26077 - DNA, 25 bp, Saccharomyces pastorianus
gccgcattcggttatctatctggta

SEQ ID NO: 26078 - DNA, 25 bp, Saccharomyces pastorianus
attacttgcgcttttaccggtgata

SEQ ID NO: 26079 - DNA, 25 bp, Saccharomyces pastorianus
aggcagtgttttcgcatggttgcat

SEQ ID NO: 26080 - DNA, 25 bp, Saccharomyces pastorianus
atactaataccaacggaccagcagt

SEQ ID NO: 26081 - DNA, 25 bp, Saccharomyces pastorianus
gaaacattgttcttgatctactcat

SEQ ID NO: 26082 - DNA, 25 bp, Saccharomyces pastorianus
gtccgttataggatgggcgccatta

SEQ ID NO: 26083 - DNA, 25 bp, Saccharomyces pastorianus
atgctgttgctggacgtccgttata

SEQ ID NO: 26084 - DNA, 25 bp, Saccharomyces pastorianus
accagggacccattctatgaaacga

SEQ ID NO: 26085 - DNA, 25 bp, Saccharomyces pastorianus
gatctactcatcagtttggtgccgg

SEQ ID NO: 26086 - DNA, 25 bp, Saccharomyces pastorianus
gaaacgcagccattgtctataattt

SEQ ID NO: 26087 - DNA, 25 bp, Saccharomyces pastorianus
atcgtctcaggcttccatattattg

SEQ ID NO: 26088 - DNA, 25 bp, Saccharomyces pastorianus
ggcaaagcttacaacaggccaccgg

SEQ ID NO: 26089 - DNA, 25 bp, Saccharomyces pastorianus
gtctaacccaaaatacttttctcat

SEQ ID NO: 26090 - DNA, 25 bp, Saccharomyces pastorianus
ggcaaggcaggcgacgaaatcaacg

SEQ ID NO: 26091 - DNA, 25 bp, Saccharomyces pastorianus
gaagctaagtctaacccaaaatact

SEQ ID NO: 26092 - DNA, 25 bp, Saccharomyces pastorianus
gactctggcgagatcaagaccgttt

SEQ ID NO: 26093 - DNA, 25 bp, Saccharomyces pastorianus
atcaacgacttgatcgactctggcg

SEQ ID NO: 26094 - DNA, 25 bp, Saccharomyces pastorianus
taacgggaactttggcgaatctcca

SEQ ID NO: 26095 - DNA, 25 bp, Saccharomyces pastorianus
tggcgagatcaagaccgttttcaac

SEQ ID NO: 26096 - DNA, 25 bp, Saccharomyces pastorianus
tacttttctcataacgggaactttg

SEQ ID NO: 26097 - DNA, 25 bp, Saccharomyces pastorianus
acgacttgatcgactctggcgagat

SEQ ID NO: 26098 - DNA, 25 bp, Saccharomyces pastorianus
tggcgaatctccaaaccacatcaag

SEQ ID NO: 26099 - DNA, 25 bp, Saccharomyces pastorianus
gaagaggttctaattctcaaagcaa

SEQ ID NO: 26100 - DNA, 25 bp, Saccharomyces pastorianus
cgatatcatacgctctaaccaattc

SEQ ID NO: 26101 - DNA, 25 bp, Saccharomyces pastorianus
gggtatcccgaaatctactatatct

SEQ ID NO: 26102 - DNA, 25 bp, Saccharomyces pastorianus
ggaaaattgcatcactctcagttta

SEQ ID NO: 26103 - DNA, 25 bp, Saccharomyces pastorianus
atttctcttctttgatagtgtccca

SEQ ID NO: 26104 - DNA, 25 bp, Saccharomyces pastorianus
actatatctccgaattgtccacaac

SEQ ID NO: 26105 - DNA, 25 bp, Saccharomyces pastorianus
ggcctagagaacttcattcgcatgt

SEQ ID NO: 26106 - DNA, 25 bp, Saccharomyces pastorianus
tatggttttttctacgaccgcaaga

SEQ ID NO: 26107 - DNA, 25 bp, Saccharomyces pastorianus
aaccaattcttctgcattgcttcca

SEQ ID NO: 26108 - DNA, 25 bp, Saccharomyces pastorianus
aagcacgttcttagacaggcctaga

SEQ ID NO: 26109 - DNA, 25 bp, Saccharomyces pastorianus
ggaccagattattcctcacctaaac

SEQ ID NO: 26110 - DNA, 25 bp, Saccharomyces pastorianus
agccagaactgcttacacggttgaa

SEQ ID NO: 26111 - DNA, 25 bp, Saccharomyces pastorianus
gacacggtcgcaaatccagataatg

SEQ ID NO: 26112 - DNA, 25 bp, Saccharomyces pastorianus
agccatccaatgaaggtgccccaga

SEQ ID NO: 26113 - DNA, 25 bp, Saccharomyces pastorianus
ttccgccctctgagcaatctaaaaa

SEQ ID NO: 26114 - DNA, 25 bp, Saccharomyces pastorianus
gaaaccacagaacatgccccagaag

SEQ ID NO: 26115 - DNA, 25 bp, Saccharomyces pastorianus
aatgtaaccgccgatgatgttccgc

SEQ ID NO: 26116 - DNA, 25 bp, Saccharomyces pastorianus
aaatcgcacttgagaccgtaacgga

SEQ ID NO: 26117 - DNA, 25 bp, Saccharomyces pastorianus
gaatgtcaacagtgctaccgaacca

SEQ ID NO: 26118 - DNA, 25 bp, Saccharomyces pastorianus
caactgttagtgatcgtgttaccaa

SEQ ID NO: 26119 - DNA, 25 bp, Saccharomyces pastorianus
gaagtaaacagctccgcacaagaag

SEQ ID NO: 26120 - DNA, 25 bp, Saccharomyces pastorianus
gccatcaatgaaagtactgccccac

SEQ ID NO: 26121 - DNA, 25 bp, Saccharomyces pastorianus
ggaaaccgatgtagccgccaatgta

SEQ ID NO: 26122 - DNA, 25 bp, Saccharomyces pastorianus
cagcaccatcaccagtatcattaat

SEQ ID NO: 26123 - DNA, 25 bp, Saccharomyces pastorianus
gacagcgacagcataccacgtacta

SEQ ID NO: 26124 - DNA, 25 bp, Saccharomyces pastorianus
taaaacgatcctttctaaccactat

SEQ ID NO: 26125 - DNA, 25 bp, Saccharomyces pastorianus
ccgcaggtggtttggatctcgacga

SEQ ID NO: 26126 - DNA, 25 bp, Saccharomyces pastorianus
ggatcaaagttctctcttcgatatg

SEQ ID NO: 26127 - DNA, 25 bp, Saccharomyces pastorianus
ttaggtggtagcacatcttccgcag

SEQ ID NO: 26128 - DNA, 25 bp, Saccharomyces pastorianus
tataccactgttacgtattccccat

SEQ ID NO: 26129 - DNA, 25 bp, Saccharomyces pastorianus
gtcagcgacgagtaccaatctaatt

SEQ ID NO: 26130 - DNA, 25 bp, Saccharomyces pastorianus
gaaaagtcgttacagcctacagagc

SEQ ID NO: 26131 - DNA, 25 bp, Saccharomyces pastorianus
agcgactgccgatcctaataacaaa

SEQ ID NO: 26132 - DNA, 25 bp, Saccharomyces pastorianus
gtttcttccgatagtcgcggcagca

SEQ ID NO: 26133 - DNA, 25 bp, Saccharomyces pastorianus
agatacgtctctgtctccgttttag

SEQ ID NO: 26134 - DNA, 25 bp, Saccharomyces pastorianus
agtcccaacctacagatacgtctct

SEQ ID NO: 26135 - DNA, 25 bp, Saccharomyces pastorianus
aagatcggtggttctttagctagaa

SEQ ID NO: 26136 - DNA, 25 bp, Saccharomyces pastorianus
gtctctgtctccgttttagttgata

SEQ ID NO: 26137 - DNA, 25 bp, Saccharomyces pastorianus
aggtatcatcaagccaatctccaaa

SEQ ID NO: 26138 - DNA, 25 bp, Saccharomyces pastorianus
acatgctgtcatcttagaccaagaa

SEQ ID NO: 26139 - DNA, 25 bp, Saccharomyces pastorianus
ctctgtctccgttttagttgataga

SEQ ID NO: 26140 - DNA, 25 bp, Saccharomyces pastorianus
ggaagtcccaacctacagatacgtc

SEQ ID NO: 26141 - DNA, 25 bp, Saccharomyces pastorianus
ttttgaaggaagtcccaacctacag

SEQ ID NO: 26142 - DNA, 25 bp, Saccharomyces pastorianus
gccaatctccaaacactccaagcag

SEQ ID NO: 26143 - DNA, 25 bp, Saccharomyces pastorianus
gtctccgttttagttgatagattaa

SEQ ID NO: 26144 - DNA, 25 bp, Saccharomyces pastorianus
tgcttcttaccactacccagaaatc

SEQ ID NO: 26145 - DNA, 25 bp, Saccharomyces pastorianus
tgctgttagcaccattgcttccgtc

SEQ ID NO: 26146 - DNA, 25 bp, Saccharomyces pastorianus
aagcctctttgttgaacttgttgga

SEQ ID NO: 26147 - DNA, 25 bp, Saccharomyces pastorianus
tatgacaacggccaagttttcccat

SEQ ID NO: 26148 - DNA, 25 bp, Saccharomyces pastorianus
atgttaaggttgttgatgccggtaa

SEQ ID NO: 26149 - DNA, 25 bp, Saccharomyces pastorianus
ggaaatttctccattcacttatggt

SEQ ID NO: 26150 - DNA, 25 bp, Saccharomyces pastorianus
gaagatatctgggtcactgctgtta

SEQ ID NO: 26151 - DNA, 25 bp, Saccharomyces pastorianus
gatgccggtaacagagtcggtccat

SEQ ID NO: 26152 - DNA, 25 bp, Saccharomyces pastorianus
agtcggtccatctgaagcctctttg

SEQ ID NO: 26153 - DNA, 25 bp, Saccharomyces pastorianus
aaatccagacaagtacgcttccgct

SEQ ID NO: 26154 - DNA, 25 bp, Saccharomyces pastorianus
gtcactgctgttaacaccggtatgg

SEQ ID NO: 26155 - DNA, 25 bp, Saccharomyces pastorianus
gttcgggtcgatatgttagcagcaa

SEQ ID NO: 26156 - DNA, 25 bp, Saccharomyces pastorianus
aatgaaggaactgcttacgggaagt

SEQ ID NO: 26157 - DNA, 25 bp, Saccharomyces pastorianus
aatcagttggcaacggctctatcgc

SEQ ID NO: 26158 - DNA, 25 bp, Saccharomyces pastorianus
tgaattcaacgaccacatttacggg

SEQ ID NO: 26159 - DNA, 25 bp, Saccharomyces pastorianus
gcagcaagccagatagaattaccag

SEQ ID NO: 26160 - DNA, 25 bp, Saccharomyces pastorianus
tatatcaacggtgtgggttcgggtc

SEQ ID NO: 26161 - DNA, 25 bp, Saccharomyces pastorianus
ggctctatcgctctagtttcgaaaa

SEQ ID NO: 26162 - DNA, 25 bp, Saccharomyces pastorianus
gatatgatcttctcaaagctgcgca

SEQ ID NO: 26163 - DNA, 25 bp, Saccharomyces pastorianus
gatggcatgcccatggaaatatatc

SEQ ID NO: 26164 - DNA, 25 bp, Saccharomyces pastorianus
tcaaagctgcgcatgagacagaaat

SEQ ID NO: 26165 - DNA, 25 bp, Saccharomyces pastorianus
acatttacgggttggatggcatgcc

SEQ ID NO: 26166 - DNA, 25 bp, Saccharomyces pastorianus
ctgtgtcaactactgctgtgggttt

SEQ ID NO: 26167 - DNA, 25 bp, Saccharomyces pastorianus
gccgtcttgagtgtctttggtgata

SEQ ID NO: 26168 - DNA, 25 bp, Saccharomyces pastorianus
ggataccacctcaagagctgcagtt

SEQ ID NO: 26169 - DNA, 25 bp, Saccharomyces pastorianus
gtatagtcgcaggtctccatgataa

SEQ ID NO: 26170 - DNA, 25 bp, Saccharomyces pastorianus
atatagctgctatgttcccagacgg

SEQ ID NO: 26171 - DNA, 25 bp, Saccharomyces pastorianus
atggcattatgcgttgctgcacaga

SEQ ID NO: 26172 - DNA, 25 bp, Saccharomyces pastorianus
gcccaagtcgcagaagatcctcagt

SEQ ID NO: 26173 - DNA, 25 bp, Saccharomyces pastorianus
ctgtgggttttattgcggatatctc

SEQ ID NO: 26174 - DNA, 25 bp, Saccharomyces pastorianus
gtcggtaccatcttccaattcattg

SEQ ID NO: 26175 - DNA, 25 bp, Saccharomyces pastorianus
taggtgctgatttcatcccatactt

SEQ ID NO: 26176 - DNA, 25 bp, Saccharomyces pastorianus
taagccggaggctttgttcccatac

SEQ ID NO: 26177 - DNA, 25 bp, Saccharomyces pastorianus
gacccagaagtcattgcggcgttta

SEQ ID NO: 26178 - DNA, 25 bp, Saccharomyces pastorianus
gattatctatgctgagttggaccca

SEQ ID NO: 26179 - DNA, 25 bp, Saccharomyces pastorianus
tatacgtaatgctatgttccccggc

SEQ ID NO: 26180 - DNA, 25 bp, Saccharomyces pastorianus
gaactggccatgctgagtgcacgta

SEQ ID NO: 26181 - DNA, 25 bp, Saccharomyces pastorianus
tatgcagagctcgtaccatgcgtat

SEQ ID NO: 26182 - DNA, 25 bp, Saccharomyces pastorianus
gagaagtccaccacgattgacacga

SEQ ID NO: 26183 - DNA, 25 bp, Saccharomyces pastorianus
ggccaacatcggaaagtgcaccttt

SEQ ID NO: 26184 - DNA, 25 bp, Saccharomyces pastorianus
gaccccaagggcaatatcgtatctg

SEQ ID NO: 26185 - DNA, 25 bp, Saccharomyces pastorianus
gggcctttgctatggtctatccgag

SEQ ID NO: 26186 - DNA, 25 bp, Saccharomyces pastorianus
cacgggtccattgcattggcattta

SEQ ID NO: 26187 - DNA, 25 bp, Saccharomyces pastorianus
gatgtggacattcccaacggcatat

SEQ ID NO: 26188 - DNA, 25 bp, Saccharomyces pastorianus
cttcttccggttcatttttgtcatt

SEQ ID NO: 26189 - DNA, 25 bp, Saccharomyces pastorianus
aagcgatccttggactactcaaaga

SEQ ID NO: 26190 - DNA, 25 bp, Saccharomyces pastorianus
gaatatttgcatgatccggacttag

SEQ ID NO: 26191 - DNA, 25 bp, Saccharomyces pastorianus
tgacccgattgctggtagtgcttcc

SEQ ID NO: 26192 - DNA, 25 bp, Saccharomyces pastorianus
gcttccgcggcagctcaaattagag

SEQ ID NO: 26193 - DNA, 25 bp, Saccharomyces pastorianus
acttcgcacaccctgatgagttcat

SEQ ID NO: 26194 - DNA, 25 bp, Saccharomyces pastorianus
tgaaagttcacggtcacgttccgga

SEQ ID NO: 26195 - DNA, 25 bp, Saccharomyces pastorianus
agttcatctatgacccaagcgatcc

SEQ ID NO: 26196 - DNA, 25 bp, Saccharomyces pastorianus
aaggtctcaactgcgtctgtttgaa

SEQ ID NO: 26197 - DNA, 25 bp, Saccharomyces pastorianus
gcaacaatggtcctgttcgtcctga

SEQ ID NO: 26198 - DNA, 25 bp, Saccharomyces pastorianus
agaagaactccgctgctgagcagac

SEQ ID NO: 26199 - DNA, 25 bp, Saccharomyces pastorianus
aataccaggccgaagtgtacgacga

SEQ ID NO: 26200 - DNA, 25 bp, Saccharomyces pastorianus
aggagcctcggaacacgaacatttt

SEQ ID NO: 26201 - DNA, 25 bp, Saccharomyces pastorianus
ttgggagcatcgttatggtcatcat

SEQ ID NO: 26202 - DNA, 25 bp, Saccharomyces pastorianus
gacaccgcatctatacattcttttg

SEQ ID NO: 26203 - DNA, 25 bp, Saccharomyces pastorianus
tgaaccgttttcaccgtatggagga

SEQ ID NO: 26204 - DNA, 25 bp, Saccharomyces pastorianus
ttcattattggatgtggccccagaa

SEQ ID NO: 26205 - DNA, 25 bp, Saccharomyces pastorianus
tcatatgttgcatcgtggtaccgcc

SEQ ID NO: 26206 - DNA, 25 bp, Saccharomyces pastorianus
gtaccgcccttgtttttcattattg

SEQ ID NO: 26207 - DNA, 25 bp, Saccharomyces pastorianus
ggaacaccgagtggcgttgctacaa

SEQ ID NO: 26208 - DNA, 25 bp, Saccharomyces pastorianus
taagacgccatcaccattaagcaaa

SEQ ID NO: 26209 - DNA, 25 bp, Saccharomyces pastorianus
atggttccgaacactatgcctaatc

SEQ ID NO: 26210 - DNA, 25 bp, Saccharomyces pastorianus
aagttactttgatctctccattcgt

SEQ ID NO: 26211 - DNA, 25 bp, Saccharomyces pastorianus
gaaagttctctgctgatattgtcac

SEQ ID NO: 26212 - DNA, 25 bp, Saccharomyces pastorianus
tatctaacaatctctcctcaactat

SEQ ID NO: 26213 - DNA, 25 bp, Saccharomyces pastorianus
gtccttatcaagatcgcttctactt

SEQ ID NO: 26214 - DNA, 25 bp, Saccharomyces pastorianus
gtcgtttccgtcaagagtatttaca

SEQ ID NO: 26215 - DNA, 25 bp, Saccharomyces pastorianus
gaagccggcgacaaaatctcgtaca

SEQ ID NO: 26216 - DNA, 25 bp, Saccharomyces pastorianus
tattattctcctttggccaagccgt

SEQ ID NO: 26217 - DNA, 25 bp, Saccharomyces pastorianus
gatctctccattcgtcggtagaatt

SEQ ID NO: 26218 - DNA, 25 bp, Saccharomyces pastorianus
tacagggccagcaccggtaaggaat

SEQ ID NO: 26219 - DNA, 25 bp, Saccharomyces pastorianus
gaacgaagacgccatggccaccgaa

SEQ ID NO: 26220 - DNA, 25 bp, Saccharomyces pastorianus
agacggaatccactgtaacttgact

SEQ ID NO: 26221 - DNA, 25 bp, Saccharomyces pastorianus
tattgctatccttggcttcgtacaa

SEQ ID NO: 26222 - DNA, 25 bp, Saccharomyces pastorianus
atcacaaagggtgtcgcggtttcgt

SEQ ID NO: 26223 - DNA, 25 bp, Saccharomyces pastorianus
agtcgtggctacagctattgctatc

SEQ ID NO: 26224 - DNA, 25 bp, Saccharomyces pastorianus
tgagacacccttacttgttgtacgg

SEQ ID NO: 26225 - DNA, 25 bp, Saccharomyces pastorianus
tactctgggatcttggcttctgcta

SEQ ID NO: 26226 - DNA, 25 bp, Saccharomyces pastorianus
aatttgaggaatgcggccacctgct

SEQ ID NO: 26227 - DNA, 25 bp, Saccharomyces pastorianus
gtccttggttgtgcgtcttattaca

SEQ ID NO: 26228 - DNA, 25 bp, Saccharomyces pastorianus
ttatcacccgttctatccaatttga

SEQ ID NO: 26229 - DNA, 25 bp, Saccharomyces pastorianus
gcggtttcgtcaataggtctctact

SEQ ID NO: 26230 - DNA, 25 bp, Saccharomyces pastorianus
aagcctgtcgtttccgaactaagcg

SEQ ID NO: 26231 - DNA, 25 bp, Saccharomyces pastorianus
gttgtacggtatgcttgctgctcca

SEQ ID NO: 26232 - DNA, 25 bp, Saccharomyces pastorianus
gaaaaaatcgcaagcctcgcgctac

SEQ ID NO: 26233 - DNA, 25 bp, Saccharomyces pastorianus
aggcaaccaccttactgttcagggt

SEQ ID NO: 26234 - DNA, 25 bp, Saccharomyces pastorianus
agaccttctgcaaagttcactgcgc

SEQ ID NO: 26235 - DNA, 25 bp, Saccharomyces pastorianus
gtgacccacgtttagaacagtcgtt

SEQ ID NO: 26236 - DNA, 25 bp, Saccharomyces pastorianus
gttggttctccaggtgcaggcaacc

SEQ ID NO: 26237 - DNA, 25 bp, Saccharomyces pastorianus
aatggtcgatgctgcttcatcattc

SEQ ID NO: 26238 - DNA, 25 bp, Saccharomyces pastorianus
attcgtccttgggttgagaccttct

SEQ ID NO: 26239 - DNA, 25 bp, Saccharomyces pastorianus
agagacaatttaccaggcccattcg

SEQ ID NO: 26240 - DNA, 25 bp, Saccharomyces pastorianus
gtcgttgaacagatggtccggcacc

SEQ ID NO: 26241 - DNA, 25 bp, Saccharomyces pastorianus
tacagcgtactgatccacatagtca

SEQ ID NO: 26242 - DNA, 25 bp, Saccharomyces pastorianus
atcattcgtcttacctatttccata

SEQ ID NO: 26243 - DNA, 25 bp, Saccharomyces pastorianus
gataaatttttccaacccatctggg

SEQ ID NO: 26244 - DNA, 25 bp, Saccharomyces pastorianus
actggaaccatctactttcgttgga

SEQ ID NO: 26245 - DNA, 25 bp, Saccharomyces pastorianus
agatgttaccaacgccttgaaacct

SEQ ID NO: 26246 - DNA, 25 bp, Saccharomyces pastorianus
aaattggttcctctgctatggccta

SEQ ID NO: 26247 - DNA, 25 bp, Saccharomyces pastorianus
atttcatctggtttagtcgtgtatc

SEQ ID NO: 26248 - DNA, 25 bp, Saccharomyces pastorianus
tactttcgttggaagagctccacaa

SEQ ID NO: 26249 - DNA, 25 bp, Saccharomyces pastorianus
gctagacatctaggttctttattca

SEQ ID NO: 26250 - DNA, 25 bp, Saccharomyces pastorianus
attagagtgctttcccatcaagcag

SEQ ID NO: 26251 - DNA, 25 bp, Saccharomyces pastorianus
gagtttgctctttagctagacatct

SEQ ID NO: 26252 - DNA, 25 bp, Saccharomyces pastorianus
aatgcgttgcgaaagagtttgctct

SEQ ID NO: 26253 - DNA, 25 bp, Saccharomyces pastorianus
ttcccatcaagcagctgcagtggta

SEQ ID NO: 26254 - DNA, 25 bp, Saccharomyces pastorianus
gcaccatacaccattccaaaacaga

SEQ ID NO: 26255 - DNA, 25 bp, Saccharomyces pastorianus
agaggtcttctagctcggacaacat

SEQ ID NO: 26256 - DNA, 25 bp, Saccharomyces pastorianus
aacagagatatccttggtttcacaa

SEQ ID NO: 26257 - DNA, 25 bp, Saccharomyces pastorianus
acttcctctaccttacaagttgatg

SEQ ID NO: 26258 - DNA, 25 bp, Saccharomyces pastorianus
gaagtacttccgtaattgagagtca

SEQ ID NO: 26259 - DNA, 25 bp, Saccharomyces pastorianus
gccaactgggttattatcttttatt

SEQ ID NO: 26260 - DNA, 25 bp, Saccharomyces pastorianus
gaaatccattgctgcactacaaact

SEQ ID NO: 26261 - DNA, 25 bp, Saccharomyces pastorianus
gttacatacgctttgagaggtcttc

SEQ ID NO: 26262 - DNA, 25 bp, Saccharomyces pastorianus
atttctccatttgacggcaactcaa

SEQ ID NO: 26263 - DNA, 25 bp, Saccharomyces pastorianus
gagtcagtatcctctttactttact

SEQ ID NO: 26264 - DNA, 25 bp, Saccharomyces pastorianus
gagcaatgcattactttaacgccga

SEQ ID NO: 26265 - DNA, 25 bp, Saccharomyces pastorianus
gtcggtaattacgttcatcaggttt

SEQ ID NO: 26266 - DNA, 25 bp, Saccharomyces pastorianus
gccctcgtgggtacttataaagaag

SEQ ID NO: 26267 - DNA, 25 bp, Saccharomyces pastorianus
atggcgtttttccacattccattac

SEQ ID NO: 26268 - DNA, 25 bp, Saccharomyces pastorianus
gatgtcgtcagttgtgggcatgatc

SEQ ID NO: 26269 - DNA, 25 bp, Saccharomyces pastorianus
gaaggcgtcactgcacctaaatata

SEQ ID NO: 26270 - DNA, 25 bp, Saccharomyces pastorianus
tggtagccccaaagaaattttcgat

SEQ ID NO: 26271 - DNA, 25 bp, Saccharomyces pastorianus
gacgattccacaccaagtcaaattt

SEQ ID NO: 26272 - DNA, 25 bp, Saccharomyces pastorianus
atattcaatcgagtacacaccccgg

SEQ ID NO: 26273 - DNA, 25 bp, Saccharomyces pastorianus
aactctgaagggatggctactttgc

SEQ ID NO: 26274 - DNA, 25 bp, Saccharomyces pastorianus
tattgcctacaagacgattccacac

SEQ ID NO: 26275 - DNA, 25 bp, Saccharomyces pastorianus
ggtgagtacgctttattttttggat

SEQ ID NO: 26276 - DNA, 25 bp, Saccharomyces pastorianus
tacaacagagttggagcggagtttg

SEQ ID NO: 26277 - DNA, 25 bp, Saccharomyces pastorianus
gcaggagatgctggtggcctattaa

SEQ ID NO: 26278 - DNA, 25 bp, Saccharomyces pastorianus
cttgaacaactacgcaagccccatt

SEQ ID NO: 26279 - DNA, 25 bp, Saccharomyces pastorianus
aagtgatagtgataacagtcatact

SEQ ID NO: 26280 - DNA, 25 bp, Saccharomyces pastorianus
acaaagctgatgaaccttgaacaac

SEQ ID NO: 26281 - DNA, 25 bp, Saccharomyces pastorianus
acagacctggattaagtgaagaaga

SEQ ID NO: 26282 - DNA, 25 bp, Saccharomyces pastorianus
tgggcgataatccaaagatcgtttt

SEQ ID NO: 26283 - DNA, 25 bp, Saccharomyces pastorianus
gaagcggcggtcacagacctggatt

SEQ ID NO: 26284 - DNA, 25 bp, Saccharomyces pastorianus
ggcctattaagaagcggcggtcaca

SEQ ID NO: 26285 - DNA, 25 bp, Saccharomyces pastorianus
aagccccattgcataaaacccaatc

SEQ ID NO: 26286 - DNA, 25 bp, Saccharomyces pastorianus
aacccaatccaagagtttcagcagg

SEQ ID NO: 26287 - DNA, 25 bp, Saccharomyces pastorianus
gttgatgtggattcgatcttatcta

SEQ ID NO: 26288 - DNA, 25 bp, Saccharomyces pastorianus
ggttgcattggtttctaataagcga

SEQ ID NO: 26289 - DNA, 25 bp, Saccharomyces pastorianus
gactgcacggagacggtaactttga

SEQ ID NO: 26290 - DNA, 25 bp, Saccharomyces pastorianus
tggctgtacaatgcaacattccctc

SEQ ID NO: 26291 - DNA, 25 bp, Saccharomyces pastorianus
gacgtaagagttttgcggctcgcga

SEQ ID NO: 26292 - DNA, 25 bp, Saccharomyces pastorianus
acattccctcttgttcaattgttga

SEQ ID NO: 26293 - DNA, 25 bp, Saccharomyces pastorianus
ttggattttcttcaacagagacgta

SEQ ID NO: 26294 - DNA, 25 bp, Saccharomyces pastorianus
ggtaaatattgcgaagctgcctaaa

SEQ ID NO: 26295 - DNA, 25 bp, Saccharomyces pastorianus
aaaaggtggtgttctgactgcacgg

SEQ ID NO: 26296 - DNA, 25 bp, Saccharomyces pastorianus
gacgatcctagctttactaacttga

SEQ ID NO: 26297 - DNA, 25 bp, Saccharomyces pastorianus
gcggctcgcgaatccttgaagttca

SEQ ID NO: 26298 - DNA, 25 bp, Saccharomyces pastorianus
atgtccgcttttgttactaaggctg

SEQ ID NO: 26299 - DNA, 25 bp, Saccharomyces pastorianus
aaagctcacccatacttccaattat

SEQ ID NO: 26300 - DNA, 25 bp, Saccharomyces pastorianus
gtagaaacttaccaaccattgttgt

SEQ ID NO: 26301 - DNA, 25 bp, Saccharomyces pastorianus
gcatttcaaaaagttgtcggtagta

SEQ ID NO: 26302 - DNA, 25 bp, Saccharomyces pastorianus
aattatccgcaagctggtgtcctga

SEQ ID NO: 26303 - DNA, 25 bp, Saccharomyces pastorianus
gaaccgagagccaattgcacagatt

SEQ ID NO: 26304 - DNA, 25 bp, Saccharomyces pastorianus
ctgcgtatacgcaaactctgtttgg

SEQ ID NO: 26305 - DNA, 25 bp, Saccharomyces pastorianus
tggtgtcctgactgcgtatacgcaa

SEQ ID NO: 26306 - DNA, 25 bp, Saccharomyces pastorianus
ggacgaagtgtttgtttttgacatc

SEQ ID NO: 26307 - DNA, 25 bp, Saccharomyces pastorianus
tttgacatcggttctctgccaagaa

SEQ ID NO: 26308 - DNA, 25 bp, Saccharomyces pastorianus
aactctgtttgggacaggttcaacg

SEQ ID NO: 26309 - DNA, 25 bp, Saccharomyces pastorianus
gaaatcaaatctcctgccgacagag

SEQ ID NO: 26310 - DNA, 25 bp, Saccharomyces pastorianus
agtgctcatctatggaatcctcttc

SEQ ID NO: 26311 - DNA, 25 bp, Saccharomyces pastorianus
acaactccccatagtgaggctgtga

SEQ ID NO: 26312 - DNA, 25 bp, Saccharomyces pastorianus
agttcagaggaccagcataccctac

SEQ ID NO: 26313 - DNA, 25 bp, Saccharomyces pastorianus
attgacgagtgtttggacctgttcc

SEQ ID NO: 26314 - DNA, 25 bp, Saccharomyces pastorianus
gcgctaactccttcttcaagaattt

SEQ ID NO: 26315 - DNA, 25 bp, Saccharomyces pastorianus
ttagataacttcaccctacctggta

SEQ ID NO: 26316 - DNA, 25 bp, Saccharomyces pastorianus
aggtgttgactaacgtggccttaga

SEQ ID NO: 26317 - DNA, 25 bp, Saccharomyces pastorianus
aacagttccgtcaagagttgtcagt

SEQ ID NO: 26318 - DNA, 25 bp, Saccharomyces pastorianus
taaagacctacatccaacagttccg

SEQ ID NO: 26319 - DNA, 25 bp, Saccharomyces pastorianus
tggtacacccggttttcctctgaat

SEQ ID NO: 26320 - DNA, 25 bp, Saccharomyces pastorianus
gaatccttattagatcccgccgata

SEQ ID NO: 26321 - DNA, 25 bp, Saccharomyces pastorianus
acagaattcgcctttttcgtcaata

SEQ ID NO: 26322 - DNA, 25 bp, Saccharomyces pastorianus
gaaaccaatggcaatttaccgtgta

SEQ ID NO: 26323 - DNA, 25 bp, Saccharomyces pastorianus
cgcagaatgctcacgaatccttatt

SEQ ID NO: 26324 - DNA, 25 bp, Saccharomyces pastorianus
ttaccgaggtcacttttgattccga

SEQ ID NO: 26325 - DNA, 25 bp, Saccharomyces pastorianus
cagaaattcgccatttggtacccgt

SEQ ID NO: 26326 - DNA, 25 bp, Saccharomyces pastorianus
gccgatacatccttagagtttgcgc

SEQ ID NO: 26327 - DNA, 25 bp, Saccharomyces pastorianus
gccagtctccatctcatttttgaag

SEQ ID NO: 26328 - DNA, 25 bp, Saccharomyces pastorianus
aatcgtgactgcacacagttcgtca

SEQ ID NO: 26329 - DNA, 25 bp, Saccharomyces pastorianus
tccgttgtgtccttgccgataaaat

SEQ ID NO: 26330 - DNA, 25 bp, Saccharomyces pastorianus
cgtacattctcgctttcgatagtaa

SEQ ID NO: 26331 - DNA, 25 bp, Saccharomyces pastorianus
gtacatcctgatttgactcaagaaa

SEQ ID NO: 26332 - DNA, 25 bp, Saccharomyces pastorianus
gactccaccatctcgagcgaaatag

SEQ ID NO: 26333 - DNA, 25 bp, Saccharomyces pastorianus
gatgatgcaatgtcagtcttcttca

SEQ ID NO: 26334 - DNA, 25 bp, Saccharomyces pastorianus
atactcatcaactatcagactccac

SEQ ID NO: 26335 - DNA, 25 bp, Saccharomyces pastorianus
gacttcgttccaagagtacatcctg

SEQ ID NO: 26336 - DNA, 25 bp, Saccharomyces pastorianus
tagtggacgaagcttagcctcaccc

SEQ ID NO: 26337 - DNA, 25 bp, Saccharomyces pastorianus
acgttcccgtatgtagtgcattttg

SEQ ID NO: 26338 - DNA, 25 bp, Saccharomyces pastorianus
tcagtcttcttcatccatcagggaa

SEQ ID NO: 26339 - DNA, 25 bp, Saccharomyces pastorianus
caatttttggataacgatgctggac

SEQ ID NO: 26340 - DNA, 25 bp, Saccharomyces pastorianus
taacatgccattcaattccctcaat

SEQ ID NO: 26341 - DNA, 25 bp, Saccharomyces pastorianus
gttactagacatacacgttcccgta

SEQ ID NO: 26342 - DNA, 25 bp, Saccharomyces pastorianus
gaggtcaaatcggtacctacccaat

SEQ ID NO: 26343 - DNA, 25 bp, Saccharomyces pastorianus
aagacctggatcgagatctccggta

SEQ ID NO: 26344 - DNA, 25 bp, Saccharomyces pastorianus
ggttcgtgtgcagtcttctccaaga

SEQ ID NO: 26345 - DNA, 25 bp, Saccharomyces pastorianus
agaccgttgtctacatcacttttgt

SEQ ID NO: 26346 - DNA, 25 bp, Saccharomyces pastorianus
tctcgcaaatcctcttccaaaagta

SEQ ID NO: 26347 - DNA, 25 bp, Saccharomyces pastorianus
cttgacctccaacattttcttgatc

SEQ ID NO: 26348 - DNA, 25 bp, Saccharomyces pastorianus
gttggcatactacatccagccattg

SEQ ID NO: 26349 - DNA, 25 bp, Saccharomyces pastorianus
caatcaagctgttctacacttccaa

SEQ ID NO: 26350 - DNA, 25 bp, Saccharomyces pastorianus
aacgcgttcattcgtctgatcggtg

SEQ ID NO: 26351 - DNA, 25 bp, Saccharomyces pastorianus
agccattgatgtccgtatccgatgc

SEQ ID NO: 26352 - DNA, 25 bp, Saccharomyces pastorianus
atcatgttgcaaagcgccttgacct

SEQ ID NO: 26353 - DNA, 25 bp, Saccharomyces pastorianus
aagggacgacctggttcagcagttc

SEQ ID NO: 26354 - DNA, 25 bp, Saccharomyces pastorianus
agtcaagttcctgatcacgtgcttc

SEQ ID NO: 26355 - DNA, 25 bp, Saccharomyces pastorianus
atggatcgaacatcagcccgtggac

SEQ ID NO: 26356 - DNA, 25 bp, Saccharomyces pastorianus
ggaggccaccactcaatggatcgaa

SEQ ID NO: 26357 - DNA, 25 bp, Saccharomyces pastorianus
aactctctgctgcactctgtaagaa

SEQ ID NO: 26358 - DNA, 25 bp, Saccharomyces pastorianus
atcgagcagtccaagctgttcttta

SEQ ID NO: 26359 - DNA, 25 bp, Saccharomyces pastorianus
gaggctcactatccagagtcgctgg

SEQ ID NO: 26360 - DNA, 25 bp, Saccharomyces pastorianus
tcgcgtccaaaatcgtgttcaccaa

SEQ ID NO: 26361 - DNA, 25 bp, Saccharomyces pastorianus
aggataccgagacccgcgctaagat

SEQ ID NO: 26362 - DNA, 25 bp, Saccharomyces pastorianus
attggacccgtacatcagatcgaga

SEQ ID NO: 26363 - DNA, 25 bp, Saccharomyces pastorianus
agaagttttctctgttggtcatcga

SEQ ID NO: 26364 - DNA, 25 bp, Saccharomyces pastorianus
gatgtacaacgttacttgaagtcaa

SEQ ID NO: 26365 - DNA, 25 bp, Saccharomyces pastorianus
agtggccagcagttgagcgcgctac

SEQ ID NO: 26366 - DNA, 25 bp, Saccharomyces pastorianus
gcaaaaggttcttgctttgactaaa

SEQ ID NO: 26367 - DNA, 25 bp, Saccharomyces pastorianus
aacgatgcggaggtaaaacttcaca

SEQ ID NO: 26368 - DNA, 25 bp, Saccharomyces pastorianus
ggacgaatccaagattgtcggtatt

SEQ ID NO: 26369 - DNA, 25 bp, Saccharomyces pastorianus
tggttaacagcatctaccctgtggt

SEQ ID NO: 26370 - DNA, 25 bp, Saccharomyces pastorianus
agagtacaagacaccaacagatctg

SEQ ID NO: 26371 - DNA, 25 bp, Saccharomyces pastorianus
gcgcgctactgaatcccaatttaag

SEQ ID NO: 26372 - DNA, 25 bp, Saccharomyces pastorianus
tgtggtcccatcaatttcagaagag

SEQ ID NO: 26373 - DNA, 25 bp, Saccharomyces pastorianus
atggaaccaataccagtggccagca

SEQ ID NO: 26374 - DNA, 25 bp, Saccharomyces pastorianus
tgtcggtattgaacgttggttgcaa

SEQ ID NO: 26375 - DNA, 25 bp, Saccharomyces pastorianus
gattggtaccactctaatagtcaaa

SEQ ID NO: 26376 - DNA, 25 bp, Saccharomyces pastorianus
tgctgatatcgacagttccggtgtt

SEQ ID NO: 26377 - DNA, 25 bp, Saccharomyces pastorianus
gaaaagtccttttcccaaatggcat

SEQ ID NO: 26378 - DNA, 25 bp, Saccharomyces pastorianus
aagggaacatgctttgacgcagaca

SEQ ID NO: 26379 - DNA, 25 bp, Saccharomyces pastorianus
ggctacatggaaacctatgcgttct

SEQ ID NO: 26380 - DNA, 25 bp, Saccharomyces pastorianus
gacgaggcactaaacaggttgcata

SEQ ID NO: 26381 - DNA, 25 bp, Saccharomyces pastorianus
gaaaagcttagggttgtcacaggaa

SEQ ID NO: 26382 - DNA, 25 bp, Saccharomyces pastorianus
aattctctgggaacctttctttcat

SEQ ID NO: 26383 - DNA, 25 bp, Saccharomyces pastorianus
ttccgtgcatccttgaaagttcgaa

SEQ ID NO: 26384 - DNA, 25 bp, Saccharomyces pastorianus
gacgcagacatggatttccgtgcat

SEQ ID NO: 26385 - DNA, 25 bp, Saccharomyces pastorianus
aattccctaaaagctcgtgaccaga

SEQ ID NO: 26386 - DNA, 25 bp, Saccharomyces pastorianus
atctcccaatgatagtagttcggta

SEQ ID NO: 26387 - DNA, 25 bp, Saccharomyces pastorianus
gccttttcggtatactgatgatcat

SEQ ID NO: 26388 - DNA, 25 bp, Saccharomyces pastorianus
caatgtcccctatgaatgaggcaat

SEQ ID NO: 26389 - DNA, 25 bp, Saccharomyces pastorianus
aagaaatagtctctccaatgtcccc

SEQ ID NO: 26390 - DNA, 25 bp, Saccharomyces pastorianus
aagagtacccttctgatatgataaa

SEQ ID NO: 26391 - DNA, 25 bp, Saccharomyces pastorianus
gataacactaacttctgcgattcta

SEQ ID NO: 26392 - DNA, 25 bp, Saccharomyces pastorianus
gttgttcgaatcaccagttttcaca

SEQ ID NO: 26393 - DNA, 25 bp, Saccharomyces pastorianus
agatatctcacaaaggtccgtaagc

SEQ ID NO: 26394 - DNA, 25 bp, Saccharomyces pastorianus
gggctaataacaaatcacttctact

SEQ ID NO: 26395 - DNA, 25 bp, Saccharomyces pastorianus
gatcataccgcaatcgaaggcattt

SEQ ID NO: 26396 - DNA, 25 bp, Saccharomyces pastorianus
gatcatttcaaagccacttctgatg

SEQ ID NO: 26397 - DNA, 25 bp, Saccharomyces pastorianus
attatactactgtttccattgacga

SEQ ID NO: 26398 - DNA, 25 bp, Saccharomyces pastorianus
aaatacgcagatccgccgtgatatc

SEQ ID NO: 26399 - DNA, 25 bp, Saccharomyces pastorianus
agcagaagaactgttaccgccgccg

SEQ ID NO: 26400 - DNA, 25 bp, Saccharomyces pastorianus
ataccagagccttctacggatcatg

SEQ ID NO: 26401 - DNA, 25 bp, Saccharomyces pastorianus
gcacatgagttctaagcgccattgt

SEQ ID NO: 26402 - DNA, 25 bp, Saccharomyces pastorianus
gaggagcgtcaattgttcgccccat

SEQ ID NO: 26403 - DNA, 25 bp, Saccharomyces pastorianus
tatgttgtaactttcacggctctgg

SEQ ID NO: 26404 - DNA, 25 bp, Saccharomyces pastorianus
agcgccattgtaggctaccgtacga

SEQ ID NO: 26405 - DNA, 25 bp, Saccharomyces pastorianus
gggcgcaagactaggtcaccgtgca

SEQ ID NO: 26406 - DNA, 25 bp, Saccharomyces pastorianus
gactcagtgcggtacagcaggcata

SEQ ID NO: 26407 - DNA, 25 bp, Saccharomyces pastorianus
accgccgccgacaggaggatgatta

SEQ ID NO: 26408 - DNA, 25 bp, Saccharomyces pastorianus
ctgttcttcccacattggtttaatc

SEQ ID NO: 26409 - DNA, 25 bp, Saccharomyces pastorianus
tctgttcttcccacattggtttaat

SEQ ID NO: 26410 - DNA, 25 bp, Saccharomyces pastorianus
tcccacattggtttaatcagaaagt

SEQ ID NO: 26411 - DNA, 25 bp, Saccharomyces pastorianus
gtgtctgttcttcccacattggttt

SEQ ID NO: 26412 - DNA, 25 bp, Saccharomyces pastorianus
gtcgtgtctgttcttcccacattgg

SEQ ID NO: 26413 - DNA, 25 bp, Saccharomyces pastorianus
ccacattggtttaatcagaaagtac

SEQ ID NO: 26414 - DNA, 25 bp, Saccharomyces pastorianus
tcgtgtctgttcttcccacattggt

SEQ ID NO: 26415 - DNA, 25 bp, Saccharomyces pastorianus
attggtttaatcagaaagtacgact

SEQ ID NO: 26416 - DNA, 25 bp, Saccharomyces pastorianus
gttcttcccacattggtttaatcag

SEQ ID NO: 26417 - DNA, 25 bp, Saccharomyces pastorianus
gtctgttcttcccacattggtttaa

SEQ ID NO: 26418 - DNA, 25 bp, Saccharomyces pastorianus
tcttcccacattggtttaatcagaa

SEQ ID NO: 26419 - DNA, 25 bp, Saccharomyces pastorianus
agcaaagcttcatcctctagcaagg

SEQ ID NO: 26420 - DNA, 25 bp, Saccharomyces pastorianus
gaaaactccgccatcaagaagtgtt

SEQ ID NO: 26421 - DNA, 25 bp, Saccharomyces pastorianus
actgctttctcatcttattccattg

SEQ ID NO: 26422 - DNA, 25 bp, Saccharomyces pastorianus
aacaacgatgccgatgctgcttaca

SEQ ID NO: 26423 - DNA, 25 bp, Saccharomyces pastorianus
ttctccgaaggttctggtaacgtct

SEQ ID NO: 26424 - DNA, 25 bp, Saccharomyces pastorianus
acgaagttttagcaactcctccagc

SEQ ID NO: 26425 - DNA, 25 bp, Saccharomyces pastorianus
caagcctcttctaccgaacaagttt

SEQ ID NO: 26426 - DNA, 25 bp, Saccharomyces pastorianus
ctgtttgttggcttgtgttgctcaa

SEQ ID NO: 26427 - DNA, 25 bp, Saccharomyces pastorianus
tttggatgactctagcagcagtgct

SEQ ID NO: 26428 - DNA, 25 bp, Saccharomyces pastorianus
attccattgtgtctaaggtcccagt

SEQ ID NO: 26429 - DNA, 25 bp, Saccharomyces pastorianus
tacaccgctttcaagagctcttgtt

SEQ ID NO: 26430 - DNA, 25 bp, Saccharomyces pastorianus
gaatgctgtgaaaagcgcccttgta

SEQ ID NO: 26431 - DNA, 25 bp, Saccharomyces pastorianus
ggctttatattttcctcatctagtt

SEQ ID NO: 26432 - DNA, 25 bp, Saccharomyces pastorianus
atgctgatgctcgtttgggtctaaa

SEQ ID NO: 26433 - DNA, 25 bp, Saccharomyces pastorianus
tggctacgtctttttggtggaccaa

SEQ ID NO: 26434 - DNA, 25 bp, Saccharomyces pastorianus
tggcgtcagccgttttatttcgagt

SEQ ID NO: 26435 - DNA, 25 bp, Saccharomyces pastorianus
aacacttgctcgttggactaatcgt

SEQ ID NO: 26436 - DNA, 25 bp, Saccharomyces pastorianus
gcaagtccgggctttacgaagtaca

SEQ ID NO: 26437 - DNA, 25 bp, Saccharomyces pastorianus
gagctcaatggccatttcacatcag

SEQ ID NO: 26438 - DNA, 25 bp, Saccharomyces pastorianus
gactaatcgtattccaaactggcgt

SEQ ID NO: 26439 - DNA, 25 bp, Saccharomyces pastorianus
tcatctagttggtacttccgtggat

SEQ ID NO: 26440 - DNA, 25 bp, Saccharomyces pastorianus
gaaaatgttcttggcccctatttca

SEQ ID NO: 26441 - DNA, 25 bp, Saccharomyces pastorianus
gatttgctatcccatttattgcctg

SEQ ID NO: 26442 - DNA, 25 bp, Saccharomyces pastorianus
acaaatgatcagaaccacagccaag

SEQ ID NO: 26443 - DNA, 25 bp, Saccharomyces pastorianus
aaagacaccttacgctctttctcat

SEQ ID NO: 26444 - DNA, 25 bp, Saccharomyces pastorianus
tgactagacccattatcatgaaaag

SEQ ID NO: 26445 - DNA, 25 bp, Saccharomyces pastorianus
tagcaatattatgactagacccatt

SEQ ID NO: 26446 - DNA, 25 bp, Saccharomyces pastorianus
agatcagtacatttcaaggacggtg

SEQ ID NO: 26447 - DNA, 25 bp, Saccharomyces pastorianus
cttacgctctttctcattttggatt

SEQ ID NO: 26448 - DNA, 25 bp, Saccharomyces pastorianus
gacggtgtctatgagaacattccat

SEQ ID NO: 26449 - DNA, 25 bp, Saccharomyces pastorianus
ctcattttggatttttcgctgttgg

SEQ ID NO: 26450 - DNA, 25 bp, Saccharomyces pastorianus
ttcgctgttggatttgctatcccat

SEQ ID NO: 26451 - DNA, 25 bp, Saccharomyces pastorianus
cacagccaagagaactagcaatatt

SEQ ID NO: 26452 - DNA, 25 bp, Saccharomyces pastorianus
ttaggattcttcaccagcaaaactg

SEQ ID NO: 26453 - DNA, 25 bp, Saccharomyces pastorianus
agagcccaaaatttctcagacggaa

SEQ ID NO: 26454 - DNA, 25 bp, Saccharomyces pastorianus
aagcagatttgcataccgctccaag

SEQ ID NO: 26455 - DNA, 25 bp, Saccharomyces pastorianus
gatattgcgcttgtagtgttcctag

SEQ ID NO: 26456 - DNA, 25 bp, Saccharomyces pastorianus
ggctcaatacggtgcctttggaaga

SEQ ID NO: 26457 - DNA, 25 bp, Saccharomyces pastorianus
atagacagctttaagggaacctctc

SEQ ID NO: 26458 - DNA, 25 bp, Saccharomyces pastorianus
gttcctaggcggtgtaacaatgggt

SEQ ID NO: 26459 - DNA, 25 bp, Saccharomyces pastorianus
gaagctacctttgcttatagtggtg

SEQ ID NO: 26460 - DNA, 25 bp, Saccharomyces pastorianus
cttctcaacaacctttcattctatc

SEQ ID NO: 26461 - DNA, 25 bp, Saccharomyces pastorianus
ggaacctctcgtgccgctgaagata

SEQ ID NO: 26462 - DNA, 25 bp, Saccharomyces pastorianus
taagtggatccctgaaaccgtttct

SEQ ID NO: 26463 - DNA, 25 bp, Saccharomyces pastorianus
gaaattgatgccttgtctcctgata

SEQ ID NO: 26464 - DNA, 25 bp, Saccharomyces pastorianus
aagggtgttgtcattgttgcggcaa

SEQ ID NO: 26465 - DNA, 25 bp, Saccharomyces pastorianus
atctgcaagagctggcatgtcgcac

SEQ ID NO: 26466 - DNA, 25 bp, Saccharomyces pastorianus
atctggactgtctgctatcatggaa

SEQ ID NO: 26467 - DNA, 25 bp, Saccharomyces pastorianus
cgctctgcagcacctagtattattt

SEQ ID NO: 26468 - DNA, 25 bp, Saccharomyces pastorianus
agacggagggtctacatctgcggct

SEQ ID NO: 26469 - DNA, 25 bp, Saccharomyces pastorianus
gaagtcgtattgctctgccaagaat

SEQ ID NO: 26470 - DNA, 25 bp, Saccharomyces pastorianus
ccaccggacgtaaatgctcgtttag

SEQ ID NO: 26471 - DNA, 25 bp, Saccharomyces pastorianus
gacacatttatgttggcccaccgga

SEQ ID NO: 26472 - DNA, 25 bp, Saccharomyces pastorianus
agattctgctcttttaagacctggc

SEQ ID NO: 26473 - DNA, 25 bp, Saccharomyces pastorianus
acatctgcggctagtcaagtcttga

SEQ ID NO: 26474 - DNA, 25 bp, Saccharomyces pastorianus
atgaaagttcgtccaacacgtccaa

SEQ ID NO: 26475 - DNA, 25 bp, Saccharomyces pastorianus
aagttggctattctcgacagtgctt

SEQ ID NO: 26476 - DNA, 25 bp, Saccharomyces pastorianus
atacttcatctttatcgcctactag

SEQ ID NO: 26477 - DNA, 25 bp, Saccharomyces pastorianus
tttaacgctatacaactccttcttt

SEQ ID NO: 26478 - DNA, 25 bp, Saccharomyces pastorianus
aagtctatgcccaatatctctgaag

SEQ ID NO: 26479 - DNA, 25 bp, Saccharomyces pastorianus
ggtgcctctggtataacccgagata

SEQ ID NO: 26480 - DNA, 25 bp, Saccharomyces pastorianus
aatgacctaccgacttctaaactgg

SEQ ID NO: 26481 - DNA, 25 bp, Saccharomyces pastorianus
aaggcggctggcacgcggatctaaa

SEQ ID NO: 26482 - DNA, 25 bp, Saccharomyces pastorianus
gacagtgcttctcctttgagtcaaa

SEQ ID NO: 26483 - DNA, 25 bp, Saccharomyces pastorianus
gaatgggttttcttcatcgtcggat

SEQ ID NO: 26484 - DNA, 25 bp, Saccharomyces pastorianus
caggttcaaagagcggttcctccaa

SEQ ID NO: 26485 - DNA, 25 bp, Saccharomyces pastorianus
cccggtccagttttgaggagtccag

SEQ ID NO: 26486 - DNA, 25 bp, Saccharomyces pastorianus
atgcatgctatttttcctaacagga

SEQ ID NO: 26487 - DNA, 25 bp, Saccharomyces pastorianus
atgtcatcggcatttctgttttcca

SEQ ID NO: 26488 - DNA, 25 bp, Saccharomyces pastorianus
cactgatctgcctcaaacaacggat

SEQ ID NO: 26489 - DNA, 25 bp, Saccharomyces pastorianus
aaccaatccctatgcgtgacaatat

SEQ ID NO: 26490 - DNA, 25 bp, Saccharomyces pastorianus
gaaattgaacagctgggcccatctc

SEQ ID NO: 26491 - DNA, 25 bp, Saccharomyces pastorianus
ggatgcactgcgtttgtatttgttc

SEQ ID NO: 26492 - DNA, 25 bp, Saccharomyces pastorianus
gtagacgattcattgtcaccccaag

SEQ ID NO: 26493 - DNA, 25 bp, Saccharomyces pastorianus
gagtggagccactttcagaatgaat

SEQ ID NO: 26494 - DNA, 25 bp, Saccharomyces pastorianus
aagatatttcatacctctaggccta

SEQ ID NO: 26495 - DNA, 25 bp, Saccharomyces pastorianus
ctaggcctatagtctgtctcacagt

SEQ ID NO: 26496 - DNA, 25 bp, Saccharomyces pastorianus
gttgacaagtctaaacctcctgctt

SEQ ID NO: 26497 - DNA, 25 bp, Saccharomyces pastorianus
caccagcttgtgttgcttatttcac

SEQ ID NO: 26498 - DNA, 25 bp, Saccharomyces pastorianus
gcgttaccggagcttgactatttat

SEQ ID NO: 26499 - DNA, 25 bp, Saccharomyces pastorianus
atgtctccaggatgtcatacccaag

SEQ ID NO: 26500 - DNA, 25 bp, Saccharomyces pastorianus
tatgccttcgaagtttacacccgta

SEQ ID NO: 26501 - DNA, 25 bp, Saccharomyces pastorianus
agtttaccagagtcattatgccttc

SEQ ID NO: 26502 - DNA, 25 bp, Saccharomyces pastorianus
gacgcttctggccaaaaatcgcact

SEQ ID NO: 26503 - DNA, 25 bp, Saccharomyces pastorianus
aagatcctttggatgtccagctgga

SEQ ID NO: 26504 - DNA, 25 bp, Saccharomyces pastorianus
gaattgccagaaacgcgttaccgga

SEQ ID NO: 26505 - DNA, 25 bp, Saccharomyces pastorianus
agctgtattccgaagatctccttaa

SEQ ID NO: 26506 - DNA, 25 bp, Saccharomyces pastorianus
ttatcccagatcacttttgagcttt

SEQ ID NO: 26507 - DNA, 25 bp, Saccharomyces pastorianus
tggtggtcgtcgcacaatggcttac

SEQ ID NO: 26508 - DNA, 25 bp, Saccharomyces pastorianus
ttcttgtatcggttgttttgccctg

SEQ ID NO: 26509 - DNA, 25 bp, Saccharomyces pastorianus
ggaaaacaaccttgatcgctctaca

SEQ ID NO: 26510 - DNA, 25 bp, Saccharomyces pastorianus
agagtaaccattttcgtcctacaat

SEQ ID NO: 26511 - DNA, 25 bp, Saccharomyces pastorianus
atattctgctacgaacctcttggtt

SEQ ID NO: 26512 - DNA, 25 bp, Saccharomyces pastorianus
gtaccccagctttttggatcatatg

SEQ ID NO: 26513 - DNA, 25 bp, Saccharomyces pastorianus
gaatcggctcaaagcactgttagtt

SEQ ID NO: 26514 - DNA, 25 bp, Saccharomyces pastorianus
taactcccgtagaattgtaccccag

SEQ ID NO: 26515 - DNA, 25 bp, Saccharomyces pastorianus
catgttgttctttagtaactcccgt

SEQ ID NO: 26516 - DNA, 25 bp, Saccharomyces pastorianus
agcatttggcaaactactcaccaga

SEQ ID NO: 26517 - DNA, 25 bp, Saccharomyces pastorianus
gagctgcaagggttccataacgaag

SEQ ID NO: 26518 - DNA, 25 bp, Saccharomyces pastorianus
gaaaaatatcctcgcttgggcaagc

SEQ ID NO: 26519 - DNA, 25 bp, Saccharomyces pastorianus
gagtgcccacacttatggctagcaa

SEQ ID NO: 26520 - DNA, 25 bp, Saccharomyces pastorianus
gaacaaccttggatcaactccttct

SEQ ID NO: 26521 - DNA, 25 bp, Saccharomyces pastorianus
cggagtttacatcttgccgaatact

SEQ ID NO: 26522 - DNA, 25 bp, Saccharomyces pastorianus
ctatgagtctattgccacggagttt

SEQ ID NO: 26523 - DNA, 25 bp, Saccharomyces pastorianus
gttgtttccttatatgacccggtat

SEQ ID NO: 26524 - DNA, 25 bp, Saccharomyces pastorianus
aaacaactcttccaagctcaaggtc

SEQ ID NO: 26525 - DNA, 25 bp, Saccharomyces pastorianus
gcttgggcaagctcgtacattactt

SEQ ID NO: 26526 - DNA, 25 bp, Saccharomyces pastorianus
aatatactatcgtcggagtgcccac

SEQ ID NO: 26527 - DNA, 25 bp, Saccharomyces pastorianus
ccatgctcctttagatttgactgaa

SEQ ID NO: 26528 - DNA, 25 bp, Saccharomyces pastorianus
tatgggtccgtgttatatttccttc

SEQ ID NO: 26529 - DNA, 25 bp, Saccharomyces pastorianus
ttggtgttcagtatcctgcgttgga

SEQ ID NO: 26530 - DNA, 25 bp, Saccharomyces pastorianus
ttggcgttcgctgcgctaattatca

SEQ ID NO: 26531 - DNA, 25 bp, Saccharomyces pastorianus
gcataggttcgtgtctgggtactta

SEQ ID NO: 26532 - DNA, 25 bp, Saccharomyces pastorianus
ggtcaaatgcatgttcatcaccatc

SEQ ID NO: 26533 - DNA, 25 bp, Saccharomyces pastorianus
ttggatcatccatattaggccgctg

SEQ ID NO: 26534 - DNA, 25 bp, Saccharomyces pastorianus
gggcttgccctcgtatataaatatt

SEQ ID NO: 26535 - DNA, 25 bp, Saccharomyces pastorianus
gcggttgttggagctctactgaatt

SEQ ID NO: 26536 - DNA, 25 bp, Saccharomyces pastorianus
agactccatagctgacgtagttctc

SEQ ID NO: 26537 - DNA, 25 bp, Saccharomyces pastorianus
tattggtctgtggtcatactgtttg

SEQ ID NO: 26538 - DNA, 25 bp, Saccharomyces pastorianus
atactgtttggaggactcttcccac

SEQ ID NO: 26539 - DNA, 25 bp, Saccharomyces pastorianus
taggcattgtcctgagctttgtcaa

SEQ ID NO: 26540 - DNA, 25 bp, Saccharomyces pastorianus
gtcaacaagctctggtgctatcgaa

SEQ ID NO: 26541 - DNA, 25 bp, Saccharomyces pastorianus
taagagatttgaccccaaccactac

SEQ ID NO: 26542 - DNA, 25 bp, Saccharomyces pastorianus
atatccattcgtcttgtttaccaca

SEQ ID NO: 26543 - DNA, 25 bp, Saccharomyces pastorianus
ggaagacgctaaactgctttctgaa

SEQ ID NO: 26544 - DNA, 25 bp, Saccharomyces pastorianus
gagcattcattcatccaagttctgt

SEQ ID NO: 26545 - DNA, 25 bp, Saccharomyces pastorianus
gaaggtccaatttccaagcagtcaa

SEQ ID NO: 26546 - DNA, 25 bp, Saccharomyces pastorianus
tttggaaaatttacccctgcctgca

SEQ ID NO: 26547 - DNA, 25 bp, Saccharomyces pastorianus
aagaaactagagagccccgattatg

SEQ ID NO: 26548 - DNA, 25 bp, Saccharomyces pastorianus
tttaccacatcccaagtcactaata

SEQ ID NO: 26549 - DNA, 25 bp, Saccharomyces pastorianus
gcggaagtattcattcaccagggat

SEQ ID NO: 26550 - DNA, 25 bp, Saccharomyces pastorianus
attggctcccaatcagaacctggtg

SEQ ID NO: 26551 - DNA, 25 bp, Saccharomyces pastorianus
aagctatggtaatttgatttctgaa

SEQ ID NO: 26552 - DNA, 25 bp, Saccharomyces pastorianus
taaaattgacgatttctcttcctta

SEQ ID NO: 26553 - DNA, 25 bp, Saccharomyces pastorianus
gataatgggaattaccttccagaga

SEQ ID NO: 26554 - DNA, 25 bp, Saccharomyces pastorianus
gaactctctgacacaacattttgac

SEQ ID NO: 26555 - DNA, 25 bp, Saccharomyces pastorianus
gaacatgccgacttgtttaaagtgg

SEQ ID NO: 26556 - DNA, 25 bp, Saccharomyces pastorianus
agaaatacatactgaggtctctgaa

SEQ ID NO: 26557 - DNA, 25 bp, Saccharomyces pastorianus
gataccttcaagaattcctgtacag

SEQ ID NO: 26558 - DNA, 25 bp, Saccharomyces pastorianus
ccttccagagacaatatggcccggt

SEQ ID NO: 26559 - DNA, 25 bp, Saccharomyces pastorianus
ggacttaaatgctcaagaccagaaa

SEQ ID NO: 26560 - DNA, 25 bp, Saccharomyces pastorianus
gaaattttgaactctctgacacaac

SEQ ID NO: 26561 - DNA, 25 bp, Saccharomyces pastorianus
attgcgagatacagttacaggactt

SEQ ID NO: 26562 - DNA, 25 bp, Saccharomyces pastorianus
ggtatactcaattgccatatggccg

SEQ ID NO: 26563 - DNA, 25 bp, Saccharomyces pastorianus
gaacacgaacctacttatactatac

SEQ ID NO: 26564 - DNA, 25 bp, Saccharomyces pastorianus
ggcttaattggctaatcaacgtgat

SEQ ID NO: 26565 - DNA, 25 bp, Saccharomyces pastorianus
tatgaactgctgatacgaggaactt

SEQ ID NO: 26566 - DNA, 25 bp, Saccharomyces pastorianus
ggatcaagatagtgtggtccctttg

SEQ ID NO: 26567 - DNA, 25 bp, Saccharomyces pastorianus
gaccgtttaccgacagaagtagagc

SEQ ID NO: 26568 - DNA, 25 bp, Saccharomyces pastorianus
cttacacaggtccaaatggtggctt

SEQ ID NO: 26569 - DNA, 25 bp, Saccharomyces pastorianus
gtctctagttcattcaaggacgtag

SEQ ID NO: 26570 - DNA, 25 bp, Saccharomyces pastorianus
tgtggtccctttgtttgaaattcga

SEQ ID NO: 26571 - DNA, 25 bp, Saccharomyces pastorianus
agtcatgtctgacagctttcatgtt

SEQ ID NO: 26572 - DNA, 25 bp, Saccharomyces pastorianus
gaacattccgcttacaaaagtctct

SEQ ID NO: 26573 - DNA, 25 bp, Saccharomyces pastorianus
aaaacctgggcgaactagctcctat

SEQ ID NO: 26574 - DNA, 25 bp, Saccharomyces pastorianus
taacgggatagttttgccatctttt

SEQ ID NO: 26575 - DNA, 25 bp, Saccharomyces pastorianus
atctcgcaatccaaatttttcctgt

SEQ ID NO: 26576 - DNA, 25 bp, Saccharomyces pastorianus
gcactggcgcaagttttcatgagaa

SEQ ID NO: 26577 - DNA, 25 bp, Saccharomyces pastorianus
acaatccttgtcttgagtcatccaa

SEQ ID NO: 26578 - DNA, 25 bp, Saccharomyces pastorianus
aaggcatccccacctgaataatcta

SEQ ID NO: 26579 - DNA, 25 bp, Saccharomyces pastorianus
atggactcgaagaaacgcacatcta

SEQ ID NO: 26580 - DNA, 25 bp, Saccharomyces pastorianus
ggagatgatggcacacttaaggcat

SEQ ID NO: 26581 - DNA, 25 bp, Saccharomyces pastorianus
gttggatttttgttgcactggcgca

SEQ ID NO: 26582 - DNA, 25 bp, Saccharomyces pastorianus
tttcctgttggtatacgacgaagct

SEQ ID NO: 26583 - DNA, 25 bp, Saccharomyces pastorianus
gtgaattttttccaaatctcgcaat

SEQ ID NO: 26584 - DNA, 25 bp, Saccharomyces pastorianus
ttcaagacatgttactgcagcggat

SEQ ID NO: 26585 - DNA, 25 bp, Saccharomyces pastorianus
tatgaattcaccaatccccttaaat

SEQ ID NO: 26586 - DNA, 25 bp, Saccharomyces pastorianus
ggcgtaaaatacagttcatccctag

SEQ ID NO: 26587 - DNA, 25 bp, Saccharomyces pastorianus
caagaagacgttccggatgccacag

SEQ ID NO: 26588 - DNA, 25 bp, Saccharomyces pastorianus
ccgctacaagtacattggccatctt

SEQ ID NO: 26589 - DNA, 25 bp, Saccharomyces pastorianus
attctccacccactagtaatggcag

SEQ ID NO: 26590 - DNA, 25 bp, Saccharomyces pastorianus
ggctaccaattacgattccattatg

SEQ ID NO: 26591 - DNA, 25 bp, Saccharomyces pastorianus
ggatgccacagattctaccgattct

SEQ ID NO: 26592 - DNA, 25 bp, Saccharomyces pastorianus
gttactgaacagttgattcgccgct

SEQ ID NO: 26593 - DNA, 25 bp, Saccharomyces pastorianus
gctcttgtagatttggactggcgta

SEQ ID NO: 26594 - DNA, 25 bp, Saccharomyces pastorianus
ggccatcttccaataggtactgaga

SEQ ID NO: 26595 - DNA, 25 bp, Saccharomyces pastorianus
gtcaatcgcgcagaagatccatcca

SEQ ID NO: 26596 - DNA, 25 bp, Saccharomyces pastorianus
taccacggccagtaccaaggaatct

SEQ ID NO: 26597 - DNA, 25 bp, Saccharomyces pastorianus
gatccatccagagatacttccgggt

SEQ ID NO: 26598 - DNA, 25 bp, Saccharomyces pastorianus
ttcccctacgattaaccatgtgttg

SEQ ID NO: 26599 - DNA, 25 bp, Saccharomyces pastorianus
aggaatcttcttcagcagctaaggc

SEQ ID NO: 26600 - DNA, 25 bp, Saccharomyces pastorianus
aaagttgtccacattggttctgcaa

SEQ ID NO: 26601 - DNA, 25 bp, Saccharomyces pastorianus
atcgaaactgttattaccccaactg

SEQ ID NO: 26602 - DNA, 25 bp, Saccharomyces pastorianus
ggatacgtcgattaacaagctgcta

SEQ ID NO: 26603 - DNA, 25 bp, Saccharomyces pastorianus
agcaccggtatcaattgccacagat

SEQ ID NO: 26604 - DNA, 25 bp, Saccharomyces pastorianus
gagaatgaaaactctccggctcctt

SEQ ID NO: 26605 - DNA, 25 bp, Saccharomyces pastorianus
ggcttctaccaagtcgttaggctta

SEQ ID NO: 26606 - DNA, 25 bp, Saccharomyces pastorianus
tgagtttccctactggtccagaaaa

SEQ ID NO: 26607 - DNA, 25 bp, Saccharomyces pastorianus
ggatctcttgggtcattgtctgcac

SEQ ID NO: 26608 - DNA, 25 bp, Saccharomyces pastorianus
gtgcctccgattatggcgagcctga

SEQ ID NO: 26609 - DNA, 25 bp, Saccharomyces pastorianus
gtgcctgcaggtgtacgcaacagtt

SEQ ID NO: 26610 - DNA, 25 bp, Saccharomyces pastorianus
aatggttcctggtagtgtgcctgca

SEQ ID NO: 26611 - DNA, 25 bp, Saccharomyces pastorianus
gaaccaatatccaacaacacctgtg

SEQ ID NO: 26612 - DNA, 25 bp, Saccharomyces pastorianus
tgattatacaccttccatttccagt

SEQ ID NO: 26613 - DNA, 25 bp, Saccharomyces pastorianus
gaccggatcgaacgcatcacatagt

SEQ ID NO: 26614 - DNA, 25 bp, Saccharomyces pastorianus
ttgtctgcacatccgcaagtgagtt

SEQ ID NO: 26615 - DNA, 25 bp, Saccharomyces pastorianus
caacacctgtgggatctcatggatc

SEQ ID NO: 26616 - DNA, 25 bp, Saccharomyces pastorianus
tatagattcttatccgcaacctcag

SEQ ID NO: 26617 - DNA, 25 bp, Saccharomyces pastorianus
tcaagacattggctctaaatctttg

SEQ ID NO: 26618 - DNA, 25 bp, Saccharomyces pastorianus
ttgtcaagacattggctctaaatct

SEQ ID NO: 26619 - DNA, 25 bp, Saccharomyces pastorianus
ggctctggctcttggatcttctact

SEQ ID NO: 26620 - DNA, 25 bp, Saccharomyces pastorianus
gtgttcaaaacatcggtcacatcac

SEQ ID NO: 26621 - DNA, 25 bp, Saccharomyces pastorianus
aatgcatccacttctcgttactttt

SEQ ID NO: 26622 - DNA, 25 bp, Saccharomyces pastorianus
ttctgaatcagacagtgtgttggtt

SEQ ID NO: 26623 - DNA, 25 bp, Saccharomyces pastorianus
gaccggtaataagggtaatgcatcc

SEQ ID NO: 26624 - DNA, 25 bp, Saccharomyces pastorianus
tcaattagaaggtggtgtcaataat

SEQ ID NO: 26625 - DNA, 25 bp, Saccharomyces pastorianus
aaggctctggctcttggatcttcta

SEQ ID NO: 26626 - DNA, 25 bp, Saccharomyces pastorianus
atcggtcacatcaccaaggctctgg

SEQ ID NO: 26627 - DNA, 25 bp, Saccharomyces pastorianus
taagggtaatgcatccacttctcgt

SEQ ID NO: 26628 - DNA, 25 bp, Saccharomyces pastorianus
atcttcgtcctctattgctttagag

SEQ ID NO: 26629 - DNA, 25 bp, Saccharomyces pastorianus
aacacaactcaaaaccatttccatc

SEQ ID NO: 26630 - DNA, 25 bp, Saccharomyces pastorianus
gcacaccaaacaccgctgataactt

SEQ ID NO: 26631 - DNA, 25 bp, Saccharomyces pastorianus
gagctccaacaactcctttgaatag

SEQ ID NO: 26632 - DNA, 25 bp, Saccharomyces pastorianus
ggtggattctccttcttcaaatgga

SEQ ID NO: 26633 - DNA, 25 bp, Saccharomyces pastorianus
ggccaaataattctcaacatgctgt

SEQ ID NO: 26634 - DNA, 25 bp, Saccharomyces pastorianus
tgattcaagcagtggtcaagcaaat

SEQ ID NO: 26635 - DNA, 25 bp, Saccharomyces pastorianus
gactctttagggttggagacttcaa

SEQ ID NO: 26636 - DNA, 25 bp, Saccharomyces pastorianus
gggttggaactgatatccgactctt

SEQ ID NO: 26637 - DNA, 25 bp, Saccharomyces pastorianus
aaatcagcgcgggtgtagtgaataa

SEQ ID NO: 26638 - DNA, 25 bp, Saccharomyces pastorianus
actatttctaacagttccgtgacaa

SEQ ID NO: 26639 - DNA, 25 bp, Saccharomyces pastorianus
cgcaactggagtgggctagcagcct

SEQ ID NO: 26640 - DNA, 25 bp, Saccharomyces pastorianus
gatcaaccagagaaccatgtccacc

SEQ ID NO: 26641 - DNA, 25 bp, Saccharomyces pastorianus
aaggaccaactgatgaccgtaggca

SEQ ID NO: 26642 - DNA, 25 bp, Saccharomyces pastorianus
aacaacaaccagcaagaccttcaga

SEQ ID NO: 26643 - DNA, 25 bp, Saccharomyces pastorianus
gcatgcggatcagacagcgcgtcga

SEQ ID NO: 26644 - DNA, 25 bp, Saccharomyces pastorianus
actactccagtgttattgttccgca

SEQ ID NO: 26645 - DNA, 25 bp, Saccharomyces pastorianus
aaaagacagttccaacagcagcagc

SEQ ID NO: 26646 - DNA, 25 bp, Saccharomyces pastorianus
gcggtcatcagggactactccagtg

SEQ ID NO: 26647 - DNA, 25 bp, Saccharomyces pastorianus
ggctagcagccttgttccgaaaaga

SEQ ID NO: 26648 - DNA, 25 bp, Saccharomyces pastorianus
tgttccgcagtttaccaggtcgccg

SEQ ID NO: 26649 - DNA, 25 bp, Saccharomyces pastorianus
agcgcgtcgaccagggctatgcctc

SEQ ID NO: 26650 - DNA, 25 bp, Saccharomyces pastorianus
gaacctcgacgagcgggtgtacatc

SEQ ID NO: 26651 - DNA, 25 bp, Saccharomyces pastorianus
gatataccaactgaacaacgacgaa

SEQ ID NO: 26652 - DNA, 25 bp, Saccharomyces pastorianus
gggacacggtgaccttgatcagcac

SEQ ID NO: 26653 - DNA, 25 bp, Saccharomyces pastorianus
ggtgaccttgatcagcacgcccaac

SEQ ID NO: 26654 - DNA, 25 bp, Saccharomyces pastorianus
actgagcgagtctgaaagacggtgc

SEQ ID NO: 26655 - DNA, 25 bp, Saccharomyces pastorianus
ggagacgcccttggacctattgaaa

SEQ ID NO: 26656 - DNA, 25 bp, Saccharomyces pastorianus
acgctgcaggcgttcgactcgcact

SEQ ID NO: 26657 - DNA, 25 bp, Saccharomyces pastorianus
ggacctattgaaactgaacctcgac

SEQ ID NO: 26658 - DNA, 25 bp, Saccharomyces pastorianus
gaacaacgacgaactgagcgagtct

SEQ ID NO: 26659 - DNA, 25 bp, Saccharomyces pastorianus
gctgagcgacgcagtagagacgata

SEQ ID NO: 26660 - DNA, 25 bp, Saccharomyces pastorianus
gacgcagtagagacgatataccaac

SEQ ID NO: 26661 - DNA, 25 bp, Saccharomyces pastorianus
gcagtccatcagaaccactatgtgg

SEQ ID NO: 26662 - DNA, 25 bp, Saccharomyces pastorianus
gccgtgttcgggatctcagagacca

SEQ ID NO: 26663 - DNA, 25 bp, Saccharomyces pastorianus
agcagaacgtgcttgcccgcgagaa

SEQ ID NO: 26664 - DNA, 25 bp, Saccharomyces pastorianus
atgtggcagatcagacacgtcctca

SEQ ID NO: 26665 - DNA, 25 bp, Saccharomyces pastorianus
aactgcgccggttcaaggactcgga

SEQ ID NO: 26666 - DNA, 25 bp, Saccharomyces pastorianus
agcatgtgtcgccatcaaggacctg

SEQ ID NO: 26667 - DNA, 25 bp, Saccharomyces pastorianus
gaatcaagtttctcgcgaacctcaa

SEQ ID NO: 26668 - DNA, 25 bp, Saccharomyces pastorianus
gcgagaaccacctcttgaagaacgt

SEQ ID NO: 26669 - DNA, 25 bp, Saccharomyces pastorianus
agcgtgctgtccacgaagcatgtgt

SEQ ID NO: 26670 - DNA, 25 bp, Saccharomyces pastorianus
tgatatcggagctgtctcaggaccc

SEQ ID NO: 26671 - DNA, 25 bp, Saccharomyces pastorianus
ctaaccaacgaccactttctgaata

SEQ ID NO: 26672 - DNA, 25 bp, Saccharomyces pastorianus
gagtataaagattgtcccctggaca

SEQ ID NO: 26673 - DNA, 25 bp, Saccharomyces pastorianus
gactatgcgcttgtcaatctggatt

SEQ ID NO: 26674 - DNA, 25 bp, Saccharomyces pastorianus
tggacaacgagatccccacggagat

SEQ ID NO: 26675 - DNA, 25 bp, Saccharomyces pastorianus
gtataaggatctgcccaccacgaga

SEQ ID NO: 26676 - DNA, 25 bp, Saccharomyces pastorianus
tattggaattgaaccctcgcctgta

SEQ ID NO: 26677 - DNA, 25 bp, Saccharomyces pastorianus
tgctggagatttgccctctggagga

SEQ ID NO: 26678 - DNA, 25 bp, Saccharomyces pastorianus
ttccgggatctacgacagtttgtct

SEQ ID NO: 26679 - DNA, 25 bp, Saccharomyces pastorianus
agctagagttgagcgcacgtgactt

SEQ ID NO: 26680 - DNA, 25 bp, Saccharomyces pastorianus
accacgagaggcttgctttccggga

SEQ ID NO: 26681 - DNA, 25 bp, Saccharomyces pastorianus
gagcactggttgacgctgtaccaaa

SEQ ID NO: 26682 - DNA, 25 bp, Saccharomyces pastorianus
aactgtgtcgtgaacgtgggcaaca

SEQ ID NO: 26683 - DNA, 25 bp, Saccharomyces pastorianus
tctgaaattttgaccaaggaagttc

SEQ ID NO: 26684 - DNA, 25 bp, Saccharomyces pastorianus
tgctaccaaggaaattttccctcta

SEQ ID NO: 26685 - DNA, 25 bp, Saccharomyces pastorianus
attttccctctacaaaacattcacg

SEQ ID NO: 26686 - DNA, 25 bp, Saccharomyces pastorianus
atttctgaaattttgaccaaggaag

SEQ ID NO: 26687 - DNA, 25 bp, Saccharomyces pastorianus
tttgaccaaggaagttcaaggttct

SEQ ID NO: 26688 - DNA, 25 bp, Saccharomyces pastorianus
tttccctctacaaaacattcacgtt

SEQ ID NO: 26689 - DNA, 25 bp, Saccharomyces pastorianus
agtgcttccgatgccttaaaaggta

SEQ ID NO: 26690 - DNA, 25 bp, Saccharomyces pastorianus
atgctaccaaggaaattttccctct

SEQ ID NO: 26691 - DNA, 25 bp, Saccharomyces pastorianus
gagtgcttccgatgccttaaaaggt

SEQ ID NO: 26692 - DNA, 25 bp, Saccharomyces pastorianus
aagagtgcttccgatgccttaaaag

SEQ ID NO: 26693 - DNA, 25 bp, Saccharomyces pastorianus
agagtgcttccgatgccttaaaagg

SEQ ID NO: 26694 - DNA, 25 bp, Saccharomyces pastorianus
attttccctctacaaaacattcacg

SEQ ID NO: 26695 - DNA, 25 bp, Saccharomyces pastorianus
atttctgaaattttgaccaaggaag

SEQ ID NO: 26696 - DNA, 25 bp, Saccharomyces pastorianus
tttgaccaaggaagttcaaggttct

SEQ ID NO: 26697 - DNA, 25 bp, Saccharomyces pastorianus
tttccctctacaaaacattcacgtt

SEQ ID NO: 26698 - DNA, 25 bp, Saccharomyces pastorianus
agtgcttccgatgccttaaaaggta

SEQ ID NO: 26699 - DNA, 25 bp, Saccharomyces pastorianus
atgctaccaaggaaattttccctct

SEQ ID NO: 26700 - DNA, 25 bp, Saccharomyces pastorianus
gagtgcttccgatgccttaaaaggt

SEQ ID NO: 26701 - DNA, 25 bp, Saccharomyces pastorianus
cacggtatggatttcaccactgata

SEQ ID NO: 26702 - DNA, 25 bp, Saccharomyces pastorianus
aagagtgcttccgatgccttaaaag

SEQ ID NO: 26703 - DNA, 25 bp, Saccharomyces pastorianus
agagtgcttccgatgccttaaaagg

SEQ ID NO: 26704 - DNA, 25 bp, Saccharomyces pastorianus
gaccaaggaagttcaaggttctact

SEQ ID NO: 26705 - DNA, 25 bp, Saccharomyces pastorianus
gatcgcggaatgtattgctcaaaac

SEQ ID NO: 26706 - DNA, 25 bp, Saccharomyces pastorianus
agtcctactaggtttcgaagccgat

SEQ ID NO: 26707 - DNA, 25 bp, Saccharomyces pastorianus
tagagctgctttgggtaacgtttac

SEQ ID NO: 26708 - DNA, 25 bp, Saccharomyces pastorianus
gaaaccgtgttggtggatactccat

SEQ ID NO: 26709 - DNA, 25 bp, Saccharomyces pastorianus
attcactcaacagtttgccatcagc

SEQ ID NO: 26710 - DNA, 25 bp, Saccharomyces pastorianus
atactccattagctccttatttcaa

SEQ ID NO: 26711 - DNA, 25 bp, Saccharomyces pastorianus
gtaaactataccctcttgctacatt

SEQ ID NO: 26712 - DNA, 25 bp, Saccharomyces pastorianus
gaaaagatcccagagcctgctaaag

SEQ ID NO: 26713 - DNA, 25 bp, Saccharomyces pastorianus
cccactttgagtgttgcaaccgatc

SEQ ID NO: 26714 - DNA, 25 bp, Saccharomyces pastorianus
gaagcgtgacttattgcctaacatt

SEQ ID NO: 26715 - DNA, 25 bp, Saccharomyces pastorianus
agaaacatcacttggatcgcggaat

SEQ ID NO: 26716 - DNA, 25 bp, Saccharomyces pastorianus
ggcatcccagctaactctgaactaa

SEQ ID NO: 26717 - DNA, 25 bp, Saccharomyces pastorianus
agccgcatatgcctatggtacacaa

SEQ ID NO: 26718 - DNA, 25 bp, Saccharomyces pastorianus
tatcggtgtcgctggtatggctgtc

SEQ ID NO: 26719 - DNA, 25 bp, Saccharomyces pastorianus
gccgaatccaagaaagagcctgaag

SEQ ID NO: 26720 - DNA, 25 bp, Saccharomyces pastorianus
tggtacacaagctttgccaggcatc

SEQ ID NO: 26721 - DNA, 25 bp, Saccharomyces pastorianus
agaattgtcattccagccgcatatg

SEQ ID NO: 26722 - DNA, 25 bp, Saccharomyces pastorianus
tatcatcgaagaccgtgtcacaggt

SEQ ID NO: 26723 - DNA, 25 bp, Saccharomyces pastorianus
aaattgggtcatggcgaagtcatca

SEQ ID NO: 26724 - DNA, 25 bp, Saccharomyces pastorianus
taagggtccacatgccaagaaaagt

SEQ ID NO: 26725 - DNA, 25 bp, Saccharomyces pastorianus
gaagaatctgctaaacctgttgaaa

SEQ ID NO: 26726 - DNA, 25 bp, Saccharomyces pastorianus
ccgtgtcacaggtaagggtccacat

SEQ ID NO: 26727 - DNA, 25 bp, Saccharomyces pastorianus
agacgaaccctgtttcaagtggaga

SEQ ID NO: 26728 - DNA, 25 bp, Saccharomyces pastorianus
gaacatttaccaatagcgaccgctg

SEQ ID NO: 26729 - DNA, 25 bp, Saccharomyces pastorianus
atagcgaccgctgttggacacttag

SEQ ID NO: 26730 - DNA, 25 bp, Saccharomyces pastorianus
gattccggtgctatcacagatatga

SEQ ID NO: 26731 - DNA, 25 bp, Saccharomyces pastorianus
tggatccgaacccaatcaatgcagg

SEQ ID NO: 26732 - DNA, 25 bp, Saccharomyces pastorianus
gaagctccttaacaactccaaatag

SEQ ID NO: 26733 - DNA, 25 bp, Saccharomyces pastorianus
aatgttcaacagatggcgcagacca

SEQ ID NO: 26734 - DNA, 25 bp, Saccharomyces pastorianus
gaaacgcatgctgtgactcagacga

SEQ ID NO: 26735 - DNA, 25 bp, Saccharomyces pastorianus
gaatcccctaattccattatggcga

SEQ ID NO: 26736 - DNA, 25 bp, Saccharomyces pastorianus
gttctactagtagcggaagctcctt

SEQ ID NO: 26737 - DNA, 25 bp, Saccharomyces pastorianus
attgaaaccattccgttggatccga

SEQ ID NO: 26738 - DNA, 25 bp, Saccharomyces pastorianus
ggtcacacgttacaagaactgcctg

SEQ ID NO: 26739 - DNA, 25 bp, Saccharomyces pastorianus
gatcgggtcgccatatcaattgaac

SEQ ID NO: 26740 - DNA, 25 bp, Saccharomyces pastorianus
ttgaacatccaccataacttgcgtc

SEQ ID NO: 26741 - DNA, 25 bp, Saccharomyces pastorianus
tggcctatcatatttactcgtcata

SEQ ID NO: 26742 - DNA, 25 bp, Saccharomyces pastorianus
gaatctaactcttcttcagtcggtt

SEQ ID NO: 26743 - DNA, 25 bp, Saccharomyces pastorianus
agtcggttccacagatggtcacacg

SEQ ID NO: 26744 - DNA, 25 bp, Saccharomyces pastorianus
gttaatgaacaacgactccttccaa

SEQ ID NO: 26745 - DNA, 25 bp, Saccharomyces pastorianus
gaacgttttcctactagcttggatg

SEQ ID NO: 26746 - DNA, 25 bp, Saccharomyces pastorianus
ttcattgcttgaatccaccgaatct

SEQ ID NO: 26747 - DNA, 25 bp, Saccharomyces pastorianus
accggccccattaaatctagcagat

SEQ ID NO: 26748 - DNA, 25 bp, Saccharomyces pastorianus
actgacattatgttgcatccccaat

SEQ ID NO: 26749 - DNA, 25 bp, Saccharomyces pastorianus
aaggctccagaattgttgctggcga

SEQ ID NO: 26750 - DNA, 25 bp, Saccharomyces pastorianus
gttgctggcgaagatccttttatag

SEQ ID NO: 26751 - DNA, 25 bp, Saccharomyces pastorianus
agaaaacttccatatctcccagaaa

SEQ ID NO: 26752 - DNA, 25 bp, Saccharomyces pastorianus
caagccaggtgccagcgacaagaag

SEQ ID NO: 26753 - DNA, 25 bp, Saccharomyces pastorianus
ttgagatttcactactatttcgccg

SEQ ID NO: 26754 - DNA, 25 bp, Saccharomyces pastorianus
gaccatttttcgatttagaggcact

SEQ ID NO: 26755 - DNA, 25 bp, Saccharomyces pastorianus
tagaggaatttcaccccagttgtaa

SEQ ID NO: 26756 - DNA, 25 bp, Saccharomyces pastorianus
gagagaaacgcctccgtctgcggga

SEQ ID NO: 26757 - DNA, 25 bp, Saccharomyces pastorianus
gacctgggctgacctaatcacggaa

SEQ ID NO: 26758 - DNA, 25 bp, Saccharomyces pastorianus
agagattttgttgacctgggctgac

SEQ ID NO: 26759 - DNA, 25 bp, Saccharomyces pastorianus
tactatttcgccgtaggattcaaag

SEQ ID NO: 26760 - DNA, 25 bp, Saccharomyces pastorianus
taaagattgacctttcaccgtctcc

SEQ ID NO: 26761 - DNA, 25 bp, Saccharomyces pastorianus
gataccagaaatgcaaccactacat

SEQ ID NO: 26762 - DNA, 25 bp, Saccharomyces pastorianus
gctattcacttcaagccccatgaaa

SEQ ID NO: 26763 - DNA, 25 bp, Saccharomyces pastorianus
accacctcatcgctcaagagaaact

SEQ ID NO: 26764 - DNA, 25 bp, Saccharomyces pastorianus
aggacggccttcgtatttggatact

SEQ ID NO: 26765 - DNA, 25 bp, Saccharomyces pastorianus
aatgcttttacaacggcaaatcaag

SEQ ID NO: 26766 - DNA, 25 bp, Saccharomyces pastorianus
gaacgaattcgctattcacttcaag

SEQ ID NO: 26767 - DNA, 25 bp, Saccharomyces pastorianus
agaagggccatttcgaatctagtaa

SEQ ID NO: 26768 - DNA, 25 bp, Saccharomyces pastorianus
acatgaaagcatatcccctgattcc

SEQ ID NO: 26769 - DNA, 25 bp, Saccharomyces pastorianus
gatgcgaatcaatcactctatttag

SEQ ID NO: 26770 - DNA, 25 bp, Saccharomyces pastorianus
gaagaagccttctcaaggacggcct

SEQ ID NO: 26771 - DNA, 25 bp, Saccharomyces pastorianus
gtgttcaatatcttcatagcagctt

SEQ ID NO: 26772 - DNA, 25 bp, Saccharomyces pastorianus
ggctttagcgtctatcttggttgat

SEQ ID NO: 26773 - DNA, 25 bp, Saccharomyces pastorianus
aaagaatgttctccgtcatcgtttc

SEQ ID NO: 26774 - DNA, 25 bp, Saccharomyces pastorianus
taagccatatccatcccttggtgat

SEQ ID NO: 26775 - DNA, 25 bp, Saccharomyces pastorianus
atagcagctttcataacaccattta

SEQ ID NO: 26776 - DNA, 25 bp, Saccharomyces pastorianus
gcattattgtttctacacgctattg

SEQ ID NO: 26777 - DNA, 25 bp, Saccharomyces pastorianus
tgacactttcataccgtttttcaaa

SEQ ID NO: 26778 - DNA, 25 bp, Saccharomyces pastorianus
tagctccaattttctatcacctatg

SEQ ID NO: 26779 - DNA, 25 bp, Saccharomyces pastorianus
ggtacccaatcatatcagcattatt

SEQ ID NO: 26780 - DNA, 25 bp, Saccharomyces pastorianus
aacaccatttactttacgctaccat

SEQ ID NO: 26781 - DNA, 25 bp, Saccharomyces pastorianus
tccgtcatcgtttccatattatctt

SEQ ID NO: 26782 - DNA, 25 bp, Saccharomyces pastorianus
caaacattcggcagactatcagagt

SEQ ID NO: 26783 - DNA, 25 bp, Saccharomyces pastorianus
gaagttatttggatttgcccagaaa

SEQ ID NO: 26784 - DNA, 25 bp, Saccharomyces pastorianus
gaataactttttcagcatcttgaag

SEQ ID NO: 26785 - DNA, 25 bp, Saccharomyces pastorianus
gaaagctggcaaatccattcgttat

SEQ ID NO: 26786 - DNA, 25 bp, Saccharomyces pastorianus
acgctactgcccttaagattttgtt

SEQ ID NO: 26787 - DNA, 25 bp, Saccharomyces pastorianus
gaattgattgccctattacaaacat

SEQ ID NO: 26788 - DNA, 25 bp, Saccharomyces pastorianus
gcagccgccggcgtaggaagtaaat

SEQ ID NO: 26789 - DNA, 25 bp, Saccharomyces pastorianus
tccaaactactggttacgctactgc

SEQ ID NO: 26790 - DNA, 25 bp, Saccharomyces pastorianus
catttgacgatttgaggatgcccaa

SEQ ID NO: 26791 - DNA, 25 bp, Saccharomyces pastorianus
aacagactaacttctttcttccaga

SEQ ID NO: 26792 - DNA, 25 bp, Saccharomyces pastorianus
aaagtgtgccaaaagcagccgccgg

SEQ ID NO: 26793 - DNA, 25 bp, Saccharomyces pastorianus
aacttggtcaacgacaccttcttgg

SEQ ID NO: 26794 - DNA, 25 bp, Saccharomyces pastorianus
gaaatcttttggtgttcccgtcaag

SEQ ID NO: 26795 - DNA, 25 bp, Saccharomyces pastorianus
agatgtttctagatgctcgcggtat

SEQ ID NO: 26796 - DNA, 25 bp, Saccharomyces pastorianus
accttcttggtggacatcgactcat

SEQ ID NO: 26797 - DNA, 25 bp, Saccharomyces pastorianus
atgctgtccaccgaaaaccaattga

SEQ ID NO: 26798 - DNA, 25 bp, Saccharomyces pastorianus
ctatctttcgaacctctattccaag

SEQ ID NO: 26799 - DNA, 25 bp, Saccharomyces pastorianus
agcctactccacaatcatgcaagat

SEQ ID NO: 26800 - DNA, 25 bp, Saccharomyces pastorianus
gactcctccaaaaactatctttcga

SEQ ID NO: 26801 - DNA, 25 bp, Saccharomyces pastorianus
ctcgcggtatcaagcactcaatgct

SEQ ID NO: 26802 - DNA, 25 bp, Saccharomyces pastorianus
ggtcaaacacattccagagctggtc

SEQ ID NO: 26803 - DNA, 25 bp, Saccharomyces pastorianus
gtaactggtccttgaacgacatcaa

SEQ ID NO: 26804 - DNA, 25 bp, Saccharomyces pastorianus
tatcactttggaggtcgtacgaatc

SEQ ID NO: 26805 - DNA, 25 bp, Saccharomyces pastorianus
tgaacgagccactgaggtctaccac

SEQ ID NO: 26806 - DNA, 25 bp, Saccharomyces pastorianus
acagacgatggtgtcggttccacat

SEQ ID NO: 26807 - DNA, 25 bp, Saccharomyces pastorianus
aagaatcgcaagtacccatttcggc

SEQ ID NO: 26808 - DNA, 25 bp, Saccharomyces pastorianus
tactgcctgccgtggaatttatcaa

SEQ ID NO: 26809 - DNA, 25 bp, Saccharomyces pastorianus
gtacattcttgtgtcttctgtccaa

SEQ ID NO: 26810 - DNA, 25 bp, Saccharomyces pastorianus
tgatcgctgacccaatgaccggtaa

SEQ ID NO: 26811 - DNA, 25 bp, Saccharomyces pastorianus
ggagccgcccaatctgtcagacgaa

SEQ ID NO: 26812 - DNA, 25 bp, Saccharomyces pastorianus
gtcggttccacattttgtcaacgca

SEQ ID NO: 26813 - DNA, 25 bp, Saccharomyces pastorianus
ccatttcggcgcttaagtccaaatt

SEQ ID NO: 26814 - DNA, 25 bp, Saccharomyces pastorianus
aaatttggccaacctgtgcgtgaat

SEQ ID NO: 26815 - DNA, 25 bp, Saccharomyces pastorianus
agtactggcgataccgtggacttca

SEQ ID NO: 26816 - DNA, 25 bp, Saccharomyces pastorianus
gtgcgtgtccccatcgatggtaaag

SEQ ID NO: 26817 - DNA, 25 bp, Saccharomyces pastorianus
gctcttgtacgccaatgagaccgaa

SEQ ID NO: 26818 - DNA, 25 bp, Saccharomyces pastorianus
accccagtcctacagatcttaaatg

SEQ ID NO: 26819 - DNA, 25 bp, Saccharomyces pastorianus
aattgtggctggtggctcaggtatc

SEQ ID NO: 26820 - DNA, 25 bp, Saccharomyces pastorianus
gaactacgaaccaaattcctccaga

SEQ ID NO: 26821 - DNA, 25 bp, Saccharomyces pastorianus
atgagcgagtacttgccggaatatt

SEQ ID NO: 26822 - DNA, 25 bp, Saccharomyces pastorianus
tttgaccaaagtctcgctcttgtac

SEQ ID NO: 26823 - DNA, 25 bp, Saccharomyces pastorianus
acgggcacttggacttggtggtcaa

SEQ ID NO: 26824 - DNA, 25 bp, Saccharomyces pastorianus
taaatgaagtcgtcaccgttccgga

SEQ ID NO: 26825 - DNA, 25 bp, Saccharomyces pastorianus
aatattcggatgacaacaggctctt

SEQ ID NO: 26826 - DNA, 25 bp, Saccharomyces pastorianus
tgctggaccccaagagattcgaaaa

SEQ ID NO: 26827 - DNA, 25 bp, Saccharomyces pastorianus
ggacgactttccttgtgatttgttc

SEQ ID NO: 26828 - DNA, 25 bp, Saccharomyces pastorianus
taggctttccgacctcgatttggga

SEQ ID NO: 26829 - DNA, 25 bp, Saccharomyces pastorianus
agattgtgtgttcgctgatacctaa

SEQ ID NO: 26830 - DNA, 25 bp, Saccharomyces pastorianus
gagacatcgtcggagttcggcttcc

SEQ ID NO: 26831 - DNA, 25 bp, Saccharomyces pastorianus
agagtctgtacaaggcgtggtcgca

SEQ ID NO: 26832 - DNA, 25 bp, Saccharomyces pastorianus
cgccaagattttcgtgctactgcac

SEQ ID NO: 26833 - DNA, 25 bp, Saccharomyces pastorianus
agctgtcctccaatatggtctgttt

SEQ ID NO: 26834 - DNA, 25 bp, Saccharomyces pastorianus
acaatatctacgtcagcgagctgtc

SEQ ID NO: 26835 - DNA, 25 bp, Saccharomyces pastorianus
gaacaacggtactgtgctgctggac

SEQ ID NO: 26836 - DNA, 25 bp, Saccharomyces pastorianus
tgaggaagtactcgccggacgccaa

SEQ ID NO: 26837 - DNA, 25 bp, Saccharomyces pastorianus
tagcaataacattttcgccatcggt

SEQ ID NO: 26838 - DNA, 25 bp, Saccharomyces pastorianus
agtacaacgatttgggtgccctggc

SEQ ID NO: 26839 - DNA, 25 bp, Saccharomyces pastorianus
acttgtcgatgattttgtctgctag

SEQ ID NO: 26840 - DNA, 25 bp, Saccharomyces pastorianus
aatccccgaacagaactcttcaaag

SEQ ID NO: 26841 - DNA, 25 bp, Saccharomyces pastorianus
tcaaggtgtttttcgactggatcaa

SEQ ID NO: 26842 - DNA, 25 bp, Saccharomyces pastorianus
aaccgctcaagtggcgcatcaagag

SEQ ID NO: 26843 - DNA, 25 bp, Saccharomyces pastorianus
ggccgagtacctagctaagagtttc

SEQ ID NO: 26844 - DNA, 25 bp, Saccharomyces pastorianus
gccctggcatatcttggttctgaaa

SEQ ID NO: 26845 - DNA, 25 bp, Saccharomyces pastorianus
ggtgataacgcctttgccggattgc

SEQ ID NO: 26846 - DNA, 25 bp, Saccharomyces pastorianus
ttctgaaagggccatcgctaccatc

SEQ ID NO: 26847 - DNA, 25 bp, Saccharomyces pastorianus
agagactatcccatacggtacttta

SEQ ID NO: 26848 - DNA, 25 bp, Saccharomyces pastorianus
gccgtcacgcctgggttgatgaatt

SEQ ID NO: 26849 - DNA, 25 bp, Saccharomyces pastorianus
aagaagtctattttgcccaggtgcg

SEQ ID NO: 26850 - DNA, 25 bp, Saccharomyces pastorianus
agaaacaattgtagcgccgtcacgc

SEQ ID NO: 26851 - DNA, 25 bp, Saccharomyces pastorianus
gaatcctccgaatatcaataccaag

SEQ ID NO: 26852 - DNA, 25 bp, Saccharomyces pastorianus
ggtatttcaccaggccaatagatct

SEQ ID NO: 26853 - DNA, 25 bp, Saccharomyces pastorianus
gcagagagctattgctaccaccaac

SEQ ID NO: 26854 - DNA, 25 bp, Saccharomyces pastorianus
aaagctatcattttttgcagccgat

SEQ ID NO: 26855 - DNA, 25 bp, Saccharomyces pastorianus
gacgaggattcctttcagcagagaa

SEQ ID NO: 26856 - DNA, 25 bp, Saccharomyces pastorianus
gatgaattccccaacgaagtcaaag

SEQ ID NO: 26857 - DNA, 25 bp, Saccharomyces pastorianus
ggtggactcatttagcatcgccatc

SEQ ID NO: 26858 - DNA, 25 bp, Saccharomyces pastorianus
agccgattcagctgtctactaataa

SEQ ID NO: 26859 - DNA, 25 bp, Saccharomyces pastorianus
aagtgccgattcaagacgctggaaa

SEQ ID NO: 26860 - DNA, 25 bp, Saccharomyces pastorianus
caacgttgtcctataatcattcgaa

SEQ ID NO: 26861 - DNA, 25 bp, Saccharomyces pastorianus
ggatcggatgttatggcccaatacc

SEQ ID NO: 26862 - DNA, 25 bp, Saccharomyces pastorianus
cactcgacgtttatgtatgcagcta

SEQ ID NO: 26863 - DNA, 25 bp, Saccharomyces pastorianus
ctccgagtgatcctgaatatgcctt

SEQ ID NO: 26864 - DNA, 25 bp, Saccharomyces pastorianus
aggtcataatgcattctccgagtga

SEQ ID NO: 26865 - DNA, 25 bp, Saccharomyces pastorianus
aagaggctctttcccaaggcataga

SEQ ID NO: 26866 - DNA, 25 bp, Saccharomyces pastorianus
atcgctaaagcaagctccaccaagg

SEQ ID NO: 26867 - DNA, 25 bp, Saccharomyces pastorianus
aatacctcgcacaagttcaacactc

SEQ ID NO: 26868 - DNA, 25 bp, Saccharomyces pastorianus
gtcatcaagatcttccgattcgtcg

SEQ ID NO: 26869 - DNA, 25 bp, Saccharomyces pastorianus
attcgtcgtcggacatagaggtcat

SEQ ID NO: 26870 - DNA, 25 bp, Saccharomyces pastorianus
ggattacagccagcagtcattgatg

SEQ ID NO: 26871 - DNA, 25 bp, Saccharomyces pastorianus
taatgggaccctacaactacttgca

SEQ ID NO: 26872 - DNA, 25 bp, Saccharomyces pastorianus
gatgcgtcccaacaggatcaggaat

SEQ ID NO: 26873 - DNA, 25 bp, Saccharomyces pastorianus
aacctgccggccaaatgaattcaaa

SEQ ID NO: 26874 - DNA, 25 bp, Saccharomyces pastorianus
tgttgtcttcaacagggcaacctgc

SEQ ID NO: 26875 - DNA, 25 bp, Saccharomyces pastorianus
agactccctgtcttcttttctaatg

SEQ ID NO: 26876 - DNA, 25 bp, Saccharomyces pastorianus
gaaaccataccttgatctgtctgca

SEQ ID NO: 26877 - DNA, 25 bp, Saccharomyces pastorianus
aggatcaggaatcgcgtcccatcag

SEQ ID NO: 26878 - DNA, 25 bp, Saccharomyces pastorianus
taagccgttcatcactcacaagatc

SEQ ID NO: 26879 - DNA, 25 bp, Saccharomyces pastorianus
gcaagcaacccacatcacaaagagt

SEQ ID NO: 26880 - DNA, 25 bp, Saccharomyces pastorianus
acttgcaacggccattcattgtgaa

SEQ ID NO: 26881 - DNA, 25 bp, Saccharomyces pastorianus
gaaacgttgtggtcgcattttgaaa

SEQ ID NO: 26882 - DNA, 25 bp, Saccharomyces pastorianus
aggagctattcctcgacttgtcaag

SEQ ID NO: 26883 - DNA, 25 bp, Saccharomyces pastorianus
aaaagctggctttcttccaacagtt

SEQ ID NO: 26884 - DNA, 25 bp, Saccharomyces pastorianus
tgctatcaccatcaacccagaatta

SEQ ID NO: 26885 - DNA, 25 bp, Saccharomyces pastorianus
atctggtttttgagctgtgcctgcc

SEQ ID NO: 26886 - DNA, 25 bp, Saccharomyces pastorianus
tccaacagtttgatgccgatgctat

SEQ ID NO: 26887 - DNA, 25 bp, Saccharomyces pastorianus
aggctaatcaagttcgacaccacca

SEQ ID NO: 26888 - DNA, 25 bp, Saccharomyces pastorianus
aacgacatcctagacgaaaccgagt

SEQ ID NO: 26889 - DNA, 25 bp, Saccharomyces pastorianus
cattttgaaactgctgatcccgggt

SEQ ID NO: 26890 - DNA, 25 bp, Saccharomyces pastorianus
atcgtgtccacgtcatcagaggcca

SEQ ID NO: 26891 - DNA, 25 bp, Saccharomyces pastorianus
attgaaaggcctaccaacgacatcc

SEQ ID NO: 26892 - DNA, 25 bp, Saccharomyces pastorianus
gttaatgaacgagaataggctaaat

SEQ ID NO: 26893 - DNA, 25 bp, Saccharomyces pastorianus
aagacaaaattctcggcactccaga

SEQ ID NO: 26894 - DNA, 25 bp, Saccharomyces pastorianus
gtttagctggcttaaaagttaatgt

SEQ ID NO: 26895 - DNA, 25 bp, Saccharomyces pastorianus
gttaatgttattgatctgcatgaca

SEQ ID NO: 26896 - DNA, 25 bp, Saccharomyces pastorianus
tctcggcactccagaaaaaagttca

SEQ ID NO: 26897 - DNA, 25 bp, Saccharomyces pastorianus
attgatctgcatgacattttcaaga

SEQ ID NO: 26898 - DNA, 25 bp, Saccharomyces pastorianus
gagaattattattcacgaactttgt

SEQ ID NO: 26899 - DNA, 25 bp, Saccharomyces pastorianus
cgaactttgtatctgaccaattaaa

SEQ ID NO: 26900 - DNA, 25 bp, Saccharomyces pastorianus
ttttcaagaagcagattcacacttt

SEQ ID NO: 26901 - DNA, 25 bp, Saccharomyces pastorianus
gagatcagattattccaagagaatt

SEQ ID NO: 26902 - DNA, 25 bp, Saccharomyces pastorianus
caatgtgaagctaaatgaactttac

SEQ ID NO: 26903 - DNA, 25 bp, Saccharomyces pastorianus
caatttcttacaggcgacattcagt

SEQ ID NO: 26904 - DNA, 25 bp, Saccharomyces pastorianus
aaagggaggcagcaattcttcttta

SEQ ID NO: 26905 - DNA, 25 bp, Saccharomyces pastorianus
aaccatttaggttccatgaaagtag

SEQ ID NO: 26906 - DNA, 25 bp, Saccharomyces pastorianus
gcgcatccacggctactaaatttac

SEQ ID NO: 26907 - DNA, 25 bp, Saccharomyces pastorianus
gacattcagtaacggcgcatccacg

SEQ ID NO: 26908 - DNA, 25 bp, Saccharomyces pastorianus
aaaagttaagcctctacagtacaag

SEQ ID NO: 26909 - DNA, 25 bp, Saccharomyces pastorianus
aatttacccagcagattgtgcatac

SEQ ID NO: 26910 - DNA, 25 bp, Saccharomyces pastorianus
gaagttaaatcccaacatcaaagaa

SEQ ID NO: 26911 - DNA, 25 bp, Saccharomyces pastorianus
gcaattcttctttagcaacatccaa

SEQ ID NO: 26912 - DNA, 25 bp, Saccharomyces pastorianus
agcaacatccaacaacaatttctta

SEQ ID NO: 26913 - DNA, 25 bp, Saccharomyces pastorianus
gtaggttttattgcatccgtgtgaa

SEQ ID NO: 26914 - DNA, 25 bp, Saccharomyces pastorianus
atccgttaatggacttggcttatca

SEQ ID NO: 26915 - DNA, 25 bp, Saccharomyces pastorianus
ctaccacacccttgaacttcattga

SEQ ID NO: 26916 - DNA, 25 bp, Saccharomyces pastorianus
aaagtcttgcctgtcatgggatcca

SEQ ID NO: 26917 - DNA, 25 bp, Saccharomyces pastorianus
tggtttccaacggtgaagttctcga

SEQ ID NO: 26918 - DNA, 25 bp, Saccharomyces pastorianus
gattacgactcttatcagtacttag

SEQ ID NO: 26919 - DNA, 25 bp, Saccharomyces pastorianus
gggacaccgaatctacaatggatat

SEQ ID NO: 26920 - DNA, 25 bp, Saccharomyces pastorianus
acttcattgacgtggctggtggttc

SEQ ID NO: 26921 - DNA, 25 bp, Saccharomyces pastorianus
cttggcttatcaacaatgggctaaa

SEQ ID NO: 26922 - DNA, 25 bp, Saccharomyces pastorianus
aggcggtatcttttattgtttggag

SEQ ID NO: 26923 - DNA, 25 bp, Saccharomyces pastorianus
tggtggttccggtgatattgccttc

SEQ ID NO: 26924 - DNA, 25 bp, Saccharomyces pastorianus
gacatctacactgtttcctttggta

SEQ ID NO: 26925 - DNA, 25 bp, Saccharomyces pastorianus
aattcacagatagcgcctttggttt

SEQ ID NO: 26926 - DNA, 25 bp, Saccharomyces pastorianus
gtagaaagcccagctgattccatca

SEQ ID NO: 26927 - DNA, 25 bp, Saccharomyces pastorianus
gattccatcattttttctggcggta

SEQ ID NO: 26928 - DNA, 25 bp, Saccharomyces pastorianus
cacagttctgaatcggtcgtggaaa

SEQ ID NO: 26929 - DNA, 25 bp, Saccharomyces pastorianus
gattcgttcgatatcagtggcggcg

SEQ ID NO: 26930 - DNA, 25 bp, Saccharomyces pastorianus
ggtattcaatggtgattccgcgctg

SEQ ID NO: 26931 - DNA, 25 bp, Saccharomyces pastorianus
acaccagaatatccaaacgcaccga

SEQ ID NO: 26932 - DNA, 25 bp, Saccharomyces pastorianus
tgattccgcgctggcaatgacagat

SEQ ID NO: 26933 - DNA, 25 bp, Saccharomyces pastorianus
ggaggaagttatcgtcccaactctc

SEQ ID NO: 26934 - DNA, 25 bp, Saccharomyces pastorianus
gatctacagactcagccacttgaaa

SEQ ID NO: 26935 - DNA, 25 bp, Saccharomyces pastorianus
tggtttcccactgccaatgataaca

SEQ ID NO: 26936 - DNA, 25 bp, Saccharomyces pastorianus
aacgtcgtctcggtacagcaaactg

SEQ ID NO: 26937 - DNA, 25 bp, Saccharomyces pastorianus
gtcaagtgaaggtcggccatgccat

SEQ ID NO: 26938 - DNA, 25 bp, Saccharomyces pastorianus
cacggtgtcgctaaaccacattgat

SEQ ID NO: 26939 - DNA, 25 bp, Saccharomyces pastorianus
taacgacgtggccaagatcctgaag

SEQ ID NO: 26940 - DNA, 25 bp, Saccharomyces pastorianus
agattgcccggttcatactataaga

SEQ ID NO: 26941 - DNA, 25 bp, Saccharomyces pastorianus
gttgccagcgtcattggtgaagcca

SEQ ID NO: 26942 - DNA, 25 bp, Saccharomyces pastorianus
attttgcatgtgtatccggttcgtc

SEQ ID NO: 26943 - DNA, 25 bp, Saccharomyces pastorianus
gggtatccacgcttatgtttacaaa

SEQ ID NO: 26944 - DNA, 25 bp, Saccharomyces pastorianus
agaggaccaagaccgtgttgccagc

SEQ ID NO: 26945 - DNA, 25 bp, Saccharomyces pastorianus
acagcaaactggtctttccttgtct

SEQ ID NO: 26946 - DNA, 25 bp, Saccharomyces pastorianus
ctagacacaagttcgggccagatca

SEQ ID NO: 26947 - DNA, 25 bp, Saccharomyces pastorianus
atttggcaagggtttatggcaggtt

SEQ ID NO: 26948 - DNA, 25 bp, Saccharomyces pastorianus
gtaccgatgaagacaggcagcaaga

SEQ ID NO: 26949 - DNA, 25 bp, Saccharomyces pastorianus
caggcgacaattggtactctattta

SEQ ID NO: 26950 - DNA, 25 bp, Saccharomyces pastorianus
ggcaggttgcgcttgtaccgatgaa

SEQ ID NO: 26951 - DNA, 25 bp, Saccharomyces pastorianus
gaaggacgacgaaccaggcgacaat

SEQ ID NO: 26952 - DNA, 25 bp, Saccharomyces pastorianus
gctattttcagattgtgtacggata

SEQ ID NO: 26953 - DNA, 25 bp, Saccharomyces pastorianus
atcggtacggattctctttatggtt

SEQ ID NO: 26954 - DNA, 25 bp, Saccharomyces pastorianus
aagatcgttccccttatttggcaag

SEQ ID NO: 26955 - DNA, 25 bp, Saccharomyces pastorianus
agttttatgaagatacccctgaggg

SEQ ID NO: 26956 - DNA, 25 bp, Saccharomyces pastorianus
ggatcacctaaacgccatggaagag

SEQ ID NO: 26957 - DNA, 25 bp, Saccharomyces pastorianus
ggaagcaataaaccaccatacaatg

SEQ ID NO: 26958 - DNA, 25 bp, Saccharomyces pastorianus
ggcactttactaaagcccttggatg

SEQ ID NO: 26959 - DNA, 25 bp, Saccharomyces pastorianus
atctggtctccaatgtgaactacat

SEQ ID NO: 26960 - DNA, 25 bp, Saccharomyces pastorianus
gtgccgatagctttatacccgtatt

SEQ ID NO: 26961 - DNA, 25 bp, Saccharomyces pastorianus
ggaaggacacactaatgactttaca

SEQ ID NO: 26962 - DNA, 25 bp, Saccharomyces pastorianus
gactttacagaacatgtttcccgat

SEQ ID NO: 26963 - DNA, 25 bp, Saccharomyces pastorianus
ggaagtttctctcctaatccagaag

SEQ ID NO: 26964 - DNA, 25 bp, Saccharomyces pastorianus
catgtttcccgatatggatccaagc

SEQ ID NO: 26965 - DNA, 25 bp, Saccharomyces pastorianus
agtggattattctcacctaccgaag

SEQ ID NO: 26966 - DNA, 25 bp, Saccharomyces pastorianus
gggcaagtgcgatatctggtctcca

SEQ ID NO: 26967 - DNA, 25 bp, Saccharomyces pastorianus
gccttcaagctgcagtaaactttgt

SEQ ID NO: 26968 - DNA, 25 bp, Saccharomyces pastorianus
taaccgaatcttctttaaccattga

SEQ ID NO: 26969 - DNA, 25 bp, Saccharomyces pastorianus
aaccctgaggacactttgaatgaca

SEQ ID NO: 26970 - DNA, 25 bp, Saccharomyces pastorianus
atagtagacgacaacaaccctgagg

SEQ ID NO: 26971 - DNA, 25 bp, Saccharomyces pastorianus
atttctaggcggatgcagcccttat

SEQ ID NO: 26972 - DNA, 25 bp, Saccharomyces pastorianus
gcatgttcaatggattcactttact

SEQ ID NO: 26973 - DNA, 25 bp, Saccharomyces pastorianus
gatgtcaatcgaaaaaggcccttta

SEQ ID NO: 26974 - DNA, 25 bp, Saccharomyces pastorianus
gaatgggccgattcagaaactacaa

SEQ ID NO: 26975 - DNA, 25 bp, Saccharomyces pastorianus
tactacgattatatggtgcgcggaa

SEQ ID NO: 26976 - DNA, 25 bp, Saccharomyces pastorianus
aggccctttaagagtgctggtccgg

SEQ ID NO: 26977 - DNA, 25 bp, Saccharomyces pastorianus
ggataaagagaccataccgccttct

SEQ ID NO: 26978 - DNA, 25 bp, Saccharomyces pastorianus
acaaccgcaagagtccagatctatt

SEQ ID NO: 26979 - DNA, 25 bp, Saccharomyces pastorianus
gatacagggtctcagtcgcaggata

SEQ ID NO: 26980 - DNA, 25 bp, Saccharomyces pastorianus
ctcggatggcgaacaaggtggcaat

SEQ ID NO: 26981 - DNA, 25 bp, Saccharomyces pastorianus
ggaggtcattgctgaagcgtttgct

SEQ ID NO: 26982 - DNA, 25 bp, Saccharomyces pastorianus
gagatccttacgtatgccgattggc

SEQ ID NO: 26983 - DNA, 25 bp, Saccharomyces pastorianus
tatcaatcatctgcagtaccattcc

SEQ ID NO: 26984 - DNA, 25 bp, Saccharomyces pastorianus
gaagtggataccacgttgccgggct

SEQ ID NO: 26985 - DNA, 25 bp, Saccharomyces pastorianus
gaagatcttttgctaacagcagacg

SEQ ID NO: 26986 - DNA, 25 bp, Saccharomyces pastorianus
gaaaggtggtaaatcgaacggcgat

SEQ ID NO: 26987 - DNA, 25 bp, Saccharomyces pastorianus
tagtggatccatatggtggctcgga

SEQ ID NO: 26988 - DNA, 25 bp, Saccharomyces pastorianus
gccgattggccaagaatggacatct

SEQ ID NO: 26989 - DNA, 25 bp, Saccharomyces pastorianus
acagcagacgattccacaagattaa

SEQ ID NO: 26990 - DNA, 25 bp, Saccharomyces pastorianus
gaatgggctggtgtaggctctaaac

SEQ ID NO: 26991 - DNA, 25 bp, Saccharomyces pastorianus
gaggacgacattcttttgaaatcac

SEQ ID NO: 26992 - DNA, 25 bp, Saccharomyces pastorianus
atcgcaggagggtctggtatcactc

SEQ ID NO: 26993 - DNA, 25 bp, Saccharomyces pastorianus
tgtggttcataagccgaacggccta

SEQ ID NO: 26994 - DNA, 25 bp, Saccharomyces pastorianus
gggcctttaggtgaactcgaatatg

SEQ ID NO: 26995 - DNA, 25 bp, Saccharomyces pastorianus
tgggctggagtaacggatttcacaa

SEQ ID NO: 26996 - DNA, 25 bp, Saccharomyces pastorianus
aacaagcagaggatcaccgtttatt

SEQ ID NO: 26997 - DNA, 25 bp, Saccharomyces pastorianus
ggtatcactcccgtattacaagttt

SEQ ID NO: 26998 - DNA, 25 bp, Saccharomyces pastorianus
caaacacggtgtcgtttccaaatat

SEQ ID NO: 26999 - DNA, 25 bp, Saccharomyces pastorianus
gaaattattccatcgccagaagatc

SEQ ID NO: 27000 - DNA, 25 bp, Saccharomyces pastorianus
tacaccccagtaaatgtccctaata

SEQ ID NO: 27001 - DNA, 25 bp, Saccharomyces pastorianus
atatcgggtacgtgactttggaaga

SEQ ID NO: 27002 - DNA, 25 bp, Saccharomyces pastorianus
gttcgttgctcaaataccacgctac

SEQ ID NO: 27003 - DNA, 25 bp, Saccharomyces pastorianus
tatcgcccaagctgccattagcaaa

SEQ ID NO: 27004 - DNA, 25 bp, Saccharomyces pastorianus
gtccccatggaagttcgttgctcaa

SEQ ID NO: 27005 - DNA, 25 bp, Saccharomyces pastorianus
ttataggccttttggctgcaacacc

SEQ ID NO: 27006 - DNA, 25 bp, Saccharomyces pastorianus
gttcacccttttcgaaaacactatg

SEQ ID NO: 27007 - DNA, 25 bp, Saccharomyces pastorianus
gtactacgttcattggaccattcta

SEQ ID NO: 27008 - DNA, 25 bp, Saccharomyces pastorianus
aatgtttgccgtccattcttagaca

SEQ ID NO: 27009 - DNA, 25 bp, Saccharomyces pastorianus
gtcctggtgcagtctacggtaatgt

SEQ ID NO: 27010 - DNA, 25 bp, Saccharomyces pastorianus
gacaacactccatctcattgtagat

SEQ ID NO: 27011 - DNA, 25 bp, Saccharomyces pastorianus
gagttttatgttcatgtccccatgg

SEQ ID NO: 27012 - DNA, 25 bp, Saccharomyces pastorianus
aaggatgctgactacgacgatttcg

SEQ ID NO: 27013 - DNA, 25 bp, Saccharomyces pastorianus
ccaggaccatccgtatcaactataa

SEQ ID NO: 27014 - DNA, 25 bp, Saccharomyces pastorianus
gctaggcacaaatttcaccctggta

SEQ ID NO: 27015 - DNA, 25 bp, Saccharomyces pastorianus
ggtacggcggcttattttcattgac

SEQ ID NO: 27016 - DNA, 25 bp, Saccharomyces pastorianus
gttccatgacgaagaccacgctgag

SEQ ID NO: 27017 - DNA, 25 bp, Saccharomyces pastorianus
ctggtattcccctatactcttatga

SEQ ID NO: 27018 - DNA, 25 bp, Saccharomyces pastorianus
gaagacgccatctatctggagagaa

SEQ ID NO: 27019 - DNA, 25 bp, Saccharomyces pastorianus
tgaggccttctacgacaacttgcaa

SEQ ID NO: 27020 - DNA, 25 bp, Saccharomyces pastorianus
aaactccagggatttcatcgccagg

SEQ ID NO: 27021 - DNA, 25 bp, Saccharomyces pastorianus
atcgtgtgcagttccttgaccaaga

SEQ ID NO: 27022 - DNA, 25 bp, Saccharomyces pastorianus
aagccgggtgtacgactttgccact

SEQ ID NO: 27023 - DNA, 25 bp, Saccharomyces pastorianus
tgcaactaaataagggcccctcgct

SEQ ID NO: 27024 - DNA, 25 bp, Saccharomyces pastorianus
aaagctgctgatctctcttctaaca

SEQ ID NO: 27025 - DNA, 25 bp, Saccharomyces pastorianus
ccacccctgtccttaaagtgtattg

SEQ ID NO: 27026 - DNA, 25 bp, Saccharomyces pastorianus
gagtaaagctgctgatctctcttct

SEQ ID NO: 27027 - DNA, 25 bp, Saccharomyces pastorianus
gccgccgtctattacggtatgagta

SEQ ID NO: 27028 - DNA, 25 bp, Saccharomyces pastorianus
gtccttaaagtgtattggcccttct

SEQ ID NO: 27029 - DNA, 25 bp, Saccharomyces pastorianus
ttaaagtgtattggcccttcttcgt

SEQ ID NO: 27030 - DNA, 25 bp, Saccharomyces pastorianus
ggtgccgccgtctattacggtatga

SEQ ID NO: 27031 - DNA, 25 bp, Saccharomyces pastorianus
tattggcccttcttcgtggctggtg

SEQ ID NO: 27032 - DNA, 25 bp, Saccharomyces pastorianus
tgctgatctctcttctaacacgaag

SEQ ID NO: 27033 - DNA, 25 bp, Saccharomyces pastorianus
ttatcaacgatccaagaaacccaag

SEQ ID NO: 27034 - DNA, 25 bp, Saccharomyces pastorianus
ttcttcgtggctggtgccgccgtct

SEQ ID NO: 27035 - DNA, 25 bp, Saccharomyces pastorianus
attgccaagaatccaaagcctcgaa

SEQ ID NO: 27036 - DNA, 25 bp, Saccharomyces pastorianus
ggacaaggttttcccacgtgtggat

SEQ ID NO: 27037 - DNA, 25 bp, Saccharomyces pastorianus
gttcgtacagaaccgtgccatactg

SEQ ID NO: 27038 - DNA, 25 bp, Saccharomyces pastorianus
gaagatatctcacgctgtatggaaa

SEQ ID NO: 27039 - DNA, 25 bp, Saccharomyces pastorianus
aagattctaagacctctcttaccgc

SEQ ID NO: 27040 - DNA, 25 bp, Saccharomyces pastorianus
agatctgatcttgcaaccatgaatg

SEQ ID NO: 27041 - DNA, 25 bp, Saccharomyces pastorianus
gtaaagctgatgtaccgctagaatc

SEQ ID NO: 27042 - DNA, 25 bp, Saccharomyces pastorianus
aactatcggcgagatgcaggcttgg

SEQ ID NO: 27043 - DNA, 25 bp, Saccharomyces pastorianus
catgaatgcaaaggccacctgggaa

SEQ ID NO: 27044 - DNA, 25 bp, Saccharomyces pastorianus
gttttcaacgtagaccacactcagg

SEQ ID NO: 27045 - DNA, 25 bp, Saccharomyces pastorianus
gcaccacacggatatcagatctgat

SEQ ID NO: 27046 - DNA, 25 bp, Saccharomyces pastorianus
tattgaatcctacggtactgcttct

SEQ ID NO: 27047 - DNA, 25 bp, Saccharomyces pastorianus
aaggtgttcttcgatccagctgtca

SEQ ID NO: 27048 - DNA, 25 bp, Saccharomyces pastorianus
tggcaaacgctggtccaaacacgaa

SEQ ID NO: 27049 - DNA, 25 bp, Saccharomyces pastorianus
attatcccagatttcatgctccaag

SEQ ID NO: 27050 - DNA, 25 bp, Saccharomyces pastorianus
gttacaaaggtgttcctttccacag

SEQ ID NO: 27051 - DNA, 25 bp, Saccharomyces pastorianus
tacggttccaagtttgctgacgaga

SEQ ID NO: 27052 - DNA, 25 bp, Saccharomyces pastorianus
aactctgcttccagattgggcaaga

SEQ ID NO: 27053 - DNA, 25 bp, Saccharomyces pastorianus
actactgttccttgttcatggttgg

SEQ ID NO: 27054 - DNA, 25 bp, Saccharomyces pastorianus
ggtcccagttcttcattactactgt

SEQ ID NO: 27055 - DNA, 25 bp, Saccharomyces pastorianus
ttcagtcattcaacaatctcgccta

SEQ ID NO: 27056 - DNA, 25 bp, Saccharomyces pastorianus
caaggcaggcttgctatcaatggca

SEQ ID NO: 27057 - DNA, 25 bp, Saccharomyces pastorianus
aaaactatccaagggctctgtcaag

SEQ ID NO: 27058 - DNA, 25 bp, Saccharomyces pastorianus
gcagcagtcttatacacaggtcttg

SEQ ID NO: 27059 - DNA, 25 bp, Saccharomyces pastorianus
gttatcgccatatgattttgctgaa

SEQ ID NO: 27060 - DNA, 25 bp, Saccharomyces pastorianus
gtgagcaacaacctgttatcgccat

SEQ ID NO: 27061 - DNA, 25 bp, Saccharomyces pastorianus
attatccgatttcaagcagcagtct

SEQ ID NO: 27062 - DNA, 25 bp, Saccharomyces pastorianus
gactatggtttgtattattatccga

SEQ ID NO: 27063 - DNA, 25 bp, Saccharomyces pastorianus
tcggcatgatattctcgttacgctc

SEQ ID NO: 27064 - DNA, 25 bp, Saccharomyces pastorianus
gagttcacacatattgtacagcttc

SEQ ID NO: 27065 - DNA, 25 bp, Saccharomyces pastorianus
tggacactggcatccaatagtgcaa

SEQ ID NO: 27066 - DNA, 25 bp, Saccharomyces pastorianus
gcaaaactactattcggcatgatat

SEQ ID NO: 27067 - DNA, 25 bp, Saccharomyces pastorianus
attctcgttacgctctattacacaa

SEQ ID NO: 27068 - DNA, 25 bp, Saccharomyces pastorianus
gctcatgctgcagttcgtcgataag

SEQ ID NO: 27069 - DNA, 25 bp, Saccharomyces pastorianus
aacaagtctgtttaccaccgagcag

SEQ ID NO: 27070 - DNA, 25 bp, Saccharomyces pastorianus
gtctgcaactagtgtactgttcatt

SEQ ID NO: 27071 - DNA, 25 bp, Saccharomyces pastorianus
taagcgactcagtttgtctgcaact

SEQ ID NO: 27072 - DNA, 25 bp, Saccharomyces pastorianus
gtgatttggaaattccgttcccaat

SEQ ID NO: 27073 - DNA, 25 bp, Saccharomyces pastorianus
taaacgatctcactcgcggatcaag

SEQ ID NO: 27074 - DNA, 25 bp, Saccharomyces pastorianus
gcggatcaagcgacgtcaaactaag

SEQ ID NO: 27075 - DNA, 25 bp, Saccharomyces pastorianus
gctccagatgagtccagcgcgaata

SEQ ID NO: 27076 - DNA, 25 bp, Saccharomyces pastorianus
gcgcgaataccccatcatttagaaa

SEQ ID NO: 27077 - DNA, 25 bp, Saccharomyces pastorianus
actcggaacttctgcattacaacca

SEQ ID NO: 27078 - DNA, 25 bp, Saccharomyces pastorianus
gagcagctcgcccaagcgatcgata

SEQ ID NO: 27079 - DNA, 25 bp, Saccharomyces pastorianus
ggttccacaacttttgccaacatta

SEQ ID NO: 27080 - DNA, 25 bp, Saccharomyces pastorianus
tcttcttcctaaccaaaccaacatt

SEQ ID NO: 27081 - DNA, 25 bp, Saccharomyces pastorianus
tacaaaccgccttgggttcagacag

SEQ ID NO: 27082 - DNA, 25 bp, Saccharomyces pastorianus
ggatccgctggtgaagacgacgaat

SEQ ID NO: 27083 - DNA, 25 bp, Saccharomyces pastorianus
gatgaagatttccaagccagctccg

SEQ ID NO: 27084 - DNA, 25 bp, Saccharomyces pastorianus
gagttcgattcagatgcagcattaa

SEQ ID NO: 27085 - DNA, 25 bp, Saccharomyces pastorianus
atacccattggataacgcgttcttc

SEQ ID NO: 27086 - DNA, 25 bp, Saccharomyces pastorianus
ttggaagtagtattgcgctcgaaca

SEQ ID NO: 27087 - DNA, 25 bp, Saccharomyces pastorianus
gtgctgtttcatgttcctttaaggc

SEQ ID NO: 27088 - DNA, 25 bp, Saccharomyces pastorianus
gagcaggacaaacctctacatcgtc

SEQ ID NO: 27089 - DNA, 25 bp, Saccharomyces pastorianus
actgaccgtagggttatcgttcctg

SEQ ID NO: 27090 - DNA, 25 bp, Saccharomyces pastorianus
aaccaggcagctacaaaactttcaa

SEQ ID NO: 27091 - DNA, 25 bp, Saccharomyces pastorianus
gctcgaacttacaaaggtgccctaa

SEQ ID NO: 27092 - DNA, 25 bp, Saccharomyces pastorianus
ttgattccagcttcctttttaagaa

SEQ ID NO: 27093 - DNA, 25 bp, Saccharomyces pastorianus
aactttcaaagcattgtccgtacgc

SEQ ID NO: 27094 - DNA, 25 bp, Saccharomyces pastorianus
gagagactttttcataaccaggcag

SEQ ID NO: 27095 - DNA, 25 bp, Saccharomyces pastorianus
gattttcaggttgttacggacgatt

SEQ ID NO: 27096 - DNA, 25 bp, Saccharomyces pastorianus
gtacgcttgcgttacatgccgaagg

SEQ ID NO: 27097 - DNA, 25 bp, Saccharomyces pastorianus
tggagacttgctttatcccgatgac

SEQ ID NO: 27098 - DNA, 25 bp, Saccharomyces pastorianus
gatgacccctacgaacatttcagag

SEQ ID NO: 27099 - DNA, 25 bp, Saccharomyces pastorianus
ggaccttgacgatactatggttcag

SEQ ID NO: 27100 - DNA, 25 bp, Saccharomyces pastorianus
gccgaaggtgtgaccaatggtgcat

SEQ ID NO: 27101 - DNA, 25 bp, Saccharomyces pastorianus
tggtgttaacgtaccggttggcact

SEQ ID NO: 27102 - DNA, 25 bp, Saccharomyces pastorianus
ttggaggtgctctcagcgttggaaa

SEQ ID NO: 27103 - DNA, 25 bp, Saccharomyces pastorianus
gtgggtactactgctacttgcattt

SEQ ID NO: 27104 - DNA, 25 bp, Saccharomyces pastorianus
atcgcttgtttcctatccttttgaa

SEQ ID NO: 27105 - DNA, 25 bp, Saccharomyces pastorianus
atattagtaactctctctaccctga

SEQ ID NO: 27106 - DNA, 25 bp, Saccharomyces pastorianus
tggctcacctgatcctaatgcaaag

SEQ ID NO: 27107 - DNA, 25 bp, Saccharomyces pastorianus
gggaacgctctgtcaaaggccttga

SEQ ID NO: 27108 - DNA, 25 bp, Saccharomyces pastorianus
ttaacggcatggtgttctaccttgc

SEQ ID NO: 27109 - DNA, 25 bp, Saccharomyces pastorianus
ggaacccgatgacgtatccgtggta

SEQ ID NO: 27110 - DNA, 25 bp, Saccharomyces pastorianus
gggcttgccagatacgctattcagt

SEQ ID NO: 27111 - DNA, 25 bp, Saccharomyces pastorianus
ggttggcactgacatctattcgaga

SEQ ID NO: 27112 - DNA, 25 bp, Saccharomyces pastorianus
acaagagctgggtgacattgtcgat

SEQ ID NO: 27113 - DNA, 25 bp, Saccharomyces pastorianus
gacattgaactctcatgcgattaca

SEQ ID NO: 27114 - DNA, 25 bp, Saccharomyces pastorianus
aaatggatcccaagaacaagagctg

SEQ ID NO: 27115 - DNA, 25 bp, Saccharomyces pastorianus
aagacgaagatcttgtcgcaaacga

SEQ ID NO: 27116 - DNA, 25 bp, Saccharomyces pastorianus
aacgcacgtcatgaaagctttgaac

SEQ ID NO: 27117 - DNA, 25 bp, Saccharomyces pastorianus
aagactctcattcacggcaaagcta

SEQ ID NO: 27118 - DNA, 25 bp, Saccharomyces pastorianus
gacagttcacataacgcacgtcatg

SEQ ID NO: 27119 - DNA, 25 bp, Saccharomyces pastorianus
gacgcaggcatcttgttcaaacaaa

SEQ ID NO: 27120 - DNA, 25 bp, Saccharomyces pastorianus
atcaactgcttgacgcaggcatctt

SEQ ID NO: 27121 - DNA, 25 bp, Saccharomyces pastorianus
gggatttcattctcaatcaactgct

SEQ ID NO: 27122 - DNA, 25 bp, Saccharomyces pastorianus
ataacaaaaacgctgttccaacagg

SEQ ID NO: 27123 - DNA, 25 bp, Saccharomyces pastorianus
acatgagaaactcctcttcttcatc

SEQ ID NO: 27124 - DNA, 25 bp, Saccharomyces pastorianus
tcttgtttgatttgacgcgtccgga

SEQ ID NO: 27125 - DNA, 25 bp, Saccharomyces pastorianus
tcctctgtgatcatcttcttgtttg

SEQ ID NO: 27126 - DNA, 25 bp, Saccharomyces pastorianus
acgcagacgctaggtgtgaactttc

SEQ ID NO: 27127 - DNA, 25 bp, Saccharomyces pastorianus
gttagcatacgctcaaccgatatta

SEQ ID NO: 27128 - DNA, 25 bp, Saccharomyces pastorianus
ggtgttttgttctacagccaagtct

SEQ ID NO: 27129 - DNA, 25 bp, Saccharomyces pastorianus
taatctgacgttgaccatcccggaa

SEQ ID NO: 27130 - DNA, 25 bp, Saccharomyces pastorianus
gtagccagcaacgtcgacatcatag

SEQ ID NO: 27131 - DNA, 25 bp, Saccharomyces pastorianus
gagggagttcattaacatgcttcca

SEQ ID NO: 27132 - DNA, 25 bp, Saccharomyces pastorianus
aggtcatgaatgcaccgctggtgtt

SEQ ID NO: 27133 - DNA, 25 bp, Saccharomyces pastorianus
tatgggctgaatgactcggcaatcc

SEQ ID NO: 27134 - DNA, 25 bp, Saccharomyces pastorianus
agagacactcttacgctcaatcttc

SEQ ID NO: 27135 - DNA, 25 bp, Saccharomyces pastorianus
accagaaagcaagctaaccaagtta

SEQ ID NO: 27136 - DNA, 25 bp, Saccharomyces pastorianus
agttaagagacactcttacgctcaa

SEQ ID NO: 27137 - DNA, 25 bp, Saccharomyces pastorianus
gcaagctaaccaagttaagagacac

SEQ ID NO: 27138 - DNA, 25 bp, Saccharomyces pastorianus
gccttcaccagaaagcaagctaacc

SEQ ID NO: 27139 - DNA, 25 bp, Saccharomyces pastorianus
gattacgttttgagaatctttgcta

SEQ ID NO: 27140 - DNA, 25 bp, Saccharomyces pastorianus
ttcaccagaaagcaagctaaccaag

SEQ ID NO: 27141 - DNA, 25 bp, Saccharomyces pastorianus
attacgttttgagaatctttgctat

SEQ ID NO: 27142 - DNA, 25 bp, Saccharomyces pastorianus
gaaagcaagctaaccaagttaagag

SEQ ID NO: 27143 - DNA, 25 bp, Saccharomyces pastorianus
ttccagaagttatcaacaaggaaat

SEQ ID NO: 27144 - DNA, 25 bp, Saccharomyces pastorianus
aagttaagagacactcttacgctca

SEQ ID NO: 27145 - DNA, 25 bp, Saccharomyces pastorianus
ttcaccaccgacaaattgagatcca

SEQ ID NO: 27146 - DNA, 25 bp, Saccharomyces pastorianus
caagttgagagttgatgaagttcaa

SEQ ID NO: 27147 - DNA, 25 bp, Saccharomyces pastorianus
taccaaggacatctttccactacaa

SEQ ID NO: 27148 - DNA, 25 bp, Saccharomyces pastorianus
gtcatttctgaaatcttgaccagag

SEQ ID NO: 27149 - DNA, 25 bp, Saccharomyces pastorianus
cactttggcccaattgacttccaag

SEQ ID NO: 27150 - DNA, 25 bp, Saccharomyces pastorianus
gaatgcttccgatgccttgaagggt

SEQ ID NO: 27151 - DNA, 25 bp, Saccharomyces pastorianus
tgtttggctgacttgcaaggttctg

SEQ ID NO: 27152 - DNA, 25 bp, Saccharomyces pastorianus
aatcgaaaacgctaccaaggacatc

SEQ ID NO: 27153 - DNA, 25 bp, Saccharomyces pastorianus
ctctttcagaaaggtcaagttgaga

SEQ ID NO: 27154 - DNA, 25 bp, Saccharomyces pastorianus
ccaaaactccactttggcccaattg

SEQ ID NO: 27155 - DNA, 25 bp, Saccharomyces pastorianus
gtccaaaactccactttggcccaat

SEQ ID NO: 27156 - DNA, 25 bp, Saccharomyces pastorianus
gtacaatgttttaccaattacgaga

SEQ ID NO: 27157 - DNA, 25 bp, Saccharomyces pastorianus
gggcacaaggtgtcttgttttccaa

SEQ ID NO: 27158 - DNA, 25 bp, Saccharomyces pastorianus
gcaactgagactggcctacgtgatt

SEQ ID NO: 27159 - DNA, 25 bp, Saccharomyces pastorianus
ggtattgtacctgttgacgtccatg

SEQ ID NO: 27160 - DNA, 25 bp, Saccharomyces pastorianus
tgccgattgcgtttgcctaatgggc

SEQ ID NO: 27161 - DNA, 25 bp, Saccharomyces pastorianus
gacgtccatgtaagtagaatcgcta

SEQ ID NO: 27162 - DNA, 25 bp, Saccharomyces pastorianus
gagctagctacaagggcaactgaga

SEQ ID NO: 27163 - DNA, 25 bp, Saccharomyces pastorianus
cctacgtgatttgggctttggatat

SEQ ID NO: 27164 - DNA, 25 bp, Saccharomyces pastorianus
atcgcatgctggttgggcacaaggt

SEQ ID NO: 27165 - DNA, 25 bp, Saccharomyces pastorianus
aaagtcgactctggtattgcaagcg

SEQ ID NO: 27166 - DNA, 25 bp, Saccharomyces pastorianus
aatgggccttcacatggatggtatt

SEQ ID NO: 27167 - DNA, 25 bp, Saccharomyces pastorianus
agctccatcgaccatgacatgaaca

SEQ ID NO: 27168 - DNA, 25 bp, Saccharomyces pastorianus
gcaccgtgaccatggcagaattcag

SEQ ID NO: 27169 - DNA, 25 bp, Saccharomyces pastorianus
gctccggtgagctgaaatccatgtt

SEQ ID NO: 27170 - DNA, 25 bp, Saccharomyces pastorianus
ttctgcctcgtcactggaaatgtgg

SEQ ID NO: 27171 - DNA, 25 bp, Saccharomyces pastorianus
caacaacaaatttggctccggtgag

SEQ ID NO: 27172 - DNA, 25 bp, Saccharomyces pastorianus
aacagcagggacaagctccttccac

SEQ ID NO: 27173 - DNA, 25 bp, Saccharomyces pastorianus
aggcgcccatgctgtcttcccagaa

SEQ ID NO: 27174 - DNA, 25 bp, Saccharomyces pastorianus
attcagaagagtgcctttgccaccc

SEQ ID NO: 27175 - DNA, 25 bp, Saccharomyces pastorianus
ggaggagagactcagctccatcgac

SEQ ID NO: 27176 - DNA, 25 bp, Saccharomyces pastorianus
aacgcagcaactcacaacagcaggg

SEQ ID NO: 27177 - DNA, 25 bp, Saccharomyces pastorianus
aattctcaagactacttctacgccc

SEQ ID NO: 27178 - DNA, 25 bp, Saccharomyces pastorianus
aaggtgcctcaagagcgttgtccaa

SEQ ID NO: 27179 - DNA, 25 bp, Saccharomyces pastorianus
gttcaacgcaccgaagatgtcatta

SEQ ID NO: 27180 - DNA, 25 bp, Saccharomyces pastorianus
gtgagtggtgtggtgctatccaacc

SEQ ID NO: 27181 - DNA, 25 bp, Saccharomyces pastorianus
ggcagtgcccaacgatgtcttatat

SEQ ID NO: 27182 - DNA, 25 bp, Saccharomyces pastorianus
gaaggcgctctgtctgggcgctaaa

SEQ ID NO: 27183 - DNA, 25 bp, Saccharomyces pastorianus
attcctttacgccaactcatgctat

SEQ ID NO: 27184 - DNA, 25 bp, Saccharomyces pastorianus
tggcttgggtagaccattcctttac

SEQ ID NO: 27185 - DNA, 25 bp, Saccharomyces pastorianus
acaaacctacccattgtcatcaagg

SEQ ID NO: 27186 - DNA, 25 bp, Saccharomyces pastorianus
gtgttcgccgtggtacagatatttt

SEQ ID NO: 27187 - DNA, 25 bp, Saccharomyces pastorianus
tgagactcctaggtgttgccagtat

SEQ ID NO: 27188 - DNA, 25 bp, Saccharomyces pastorianus
aagcctgagctgttagacctgtcga

SEQ ID NO: 27189 - DNA, 25 bp, Saccharomyces pastorianus
aaacaattgcagttccggcaacaat

SEQ ID NO: 27190 - DNA, 25 bp, Saccharomyces pastorianus
ggcgcggcttccagcggaaatacta

SEQ ID NO: 27191 - DNA, 25 bp, Saccharomyces pastorianus
atgccgccgccacatataatggcaa

SEQ ID NO: 27192 - DNA, 25 bp, Saccharomyces pastorianus
tatcgaaataacacccttgacgccc

SEQ ID NO: 27193 - DNA, 25 bp, Saccharomyces pastorianus
atacatggtccacggttatttcggt

SEQ ID NO: 27194 - DNA, 25 bp, Saccharomyces pastorianus
aacgaccacttcgagtttgacacac

SEQ ID NO: 27195 - DNA, 25 bp, Saccharomyces pastorianus
tgccgcggctgtccataacaataat

SEQ ID NO: 27196 - DNA, 25 bp, Saccharomyces pastorianus
gcctctctactcaacgagtctgaat

SEQ ID NO: 27197 - DNA, 25 bp, Saccharomyces pastorianus
atcctgcccgctcaacatataattg

SEQ ID NO: 27198 - DNA, 25 bp, Saccharomyces pastorianus
ggaaatactagctccacacaacacc

SEQ ID NO: 27199 - DNA, 25 bp, Saccharomyces pastorianus
agtcatggaataacaggcgcggctt

SEQ ID NO: 27200 - DNA, 25 bp, Saccharomyces pastorianus
acgtcaacgttcctcatcagtttat

SEQ ID NO: 27201 - DNA, 25 bp, Saccharomyces pastorianus
atggaaccccttccgcagagaaaag

SEQ ID NO: 27202 - DNA, 25 bp, Saccharomyces pastorianus
tatcgtggagtttgtctcgcttgcc

SEQ ID NO: 27203 - DNA, 25 bp, Saccharomyces pastorianus
ggtgctccaagatgctatcgaacat

SEQ ID NO: 27204 - DNA, 25 bp, Saccharomyces pastorianus
aataccaatgcggtcactgcgactg

SEQ ID NO: 27205 - DNA, 25 bp, Saccharomyces pastorianus
tcgcttgccgttttctttgtcaaat

SEQ ID NO: 27206 - DNA, 25 bp, Saccharomyces pastorianus
aagctgggtgcctccatgatgggta

SEQ ID NO: 27207 - DNA, 25 bp, Saccharomyces pastorianus
gaaaagagacgccttctactacctg

SEQ ID NO: 27208 - DNA, 25 bp, Saccharomyces pastorianus
tatcgaacatggtcgtcgtcctcat

SEQ ID NO: 27209 - DNA, 25 bp, Saccharomyces pastorianus
tttacattctgacttggtgctccaa

SEQ ID NO: 27210 - DNA, 25 bp, Saccharomyces pastorianus
gtgtctttcgtcctttacattctga

SEQ ID NO: 27211 - DNA, 25 bp, Saccharomyces pastorianus
ggccagcaagctccaataaatccgg

SEQ ID NO: 27212 - DNA, 25 bp, Saccharomyces pastorianus
aatgtacctgtatcgtgtagtttca

SEQ ID NO: 27213 - DNA, 25 bp, Saccharomyces pastorianus
gacattcatggtaccaagggcgact

SEQ ID NO: 27214 - DNA, 25 bp, Saccharomyces pastorianus
gtaccaatctatctctgatttccat

SEQ ID NO: 27215 - DNA, 25 bp, Saccharomyces pastorianus
gttcccgactttaatggatgccctg

SEQ ID NO: 27216 - DNA, 25 bp, Saccharomyces pastorianus
gcactgccctcacagtttgtaatgc

SEQ ID NO: 27217 - DNA, 25 bp, Saccharomyces pastorianus
gtacccgatcacctattatttcaag

SEQ ID NO: 27218 - DNA, 25 bp, Saccharomyces pastorianus
taaatccgggctacgattccggcaa

SEQ ID NO: 27219 - DNA, 25 bp, Saccharomyces pastorianus
atgccctgatactacaccggttaat

SEQ ID NO: 27220 - DNA, 25 bp, Saccharomyces pastorianus
accgattaggtcagcgagttccgaa

SEQ ID NO: 27221 - DNA, 25 bp, Saccharomyces pastorianus
gagttccgaagaccgtacccgatca

SEQ ID NO: 27222 - DNA, 25 bp, Saccharomyces pastorianus
tttaccgacaacgataatgaacgat

SEQ ID NO: 27223 - DNA, 25 bp, Saccharomyces pastorianus
gtaaagccgaatgccgaatggtata

SEQ ID NO: 27224 - DNA, 25 bp, Saccharomyces pastorianus
gaaagaccacagatatcgaacagta

SEQ ID NO: 27225 - DNA, 25 bp, Saccharomyces pastorianus
gactcagtgccgttttggttaactt

SEQ ID NO: 27226 - DNA, 25 bp, Saccharomyces pastorianus
gatttcgatcctattttatatcctg

SEQ ID NO: 27227 - DNA, 25 bp, Saccharomyces pastorianus
aaagaagctggtcacgtcgggataa

SEQ ID NO: 27228 - DNA, 25 bp, Saccharomyces pastorianus
caatacgaaccagtcgcgggagtaa

SEQ ID NO: 27229 - DNA, 25 bp, Saccharomyces pastorianus
aaatttatcaaggagctgggcgtag

SEQ ID NO: 27230 - DNA, 25 bp, Saccharomyces pastorianus
aattctctcatcaaggactcagtgc

SEQ ID NO: 27231 - DNA, 25 bp, Saccharomyces pastorianus
gaaacttcaactttggattcaaacg

SEQ ID NO: 27232 - DNA, 25 bp, Saccharomyces pastorianus
gaaatgaaaatctcgaatccacaat

SEQ ID NO: 27233 - DNA, 25 bp, Saccharomyces pastorianus
gtttattttatctatgcatcttgcc

SEQ ID NO: 27234 - DNA, 25 bp, Saccharomyces pastorianus
ttgccattacctacttatggtcctc

SEQ ID NO: 27235 - DNA, 25 bp, Saccharomyces pastorianus
ggtaacacggacaacagttcagcgg

SEQ ID NO: 27236 - DNA, 25 bp, Saccharomyces pastorianus
atggtcctctttaattaattgtcaa

SEQ ID NO: 27237 - DNA, 25 bp, Saccharomyces pastorianus
gcatcttgccatttactaaaagccg

SEQ ID NO: 27238 - DNA, 25 bp, Saccharomyces pastorianus
gacgccgaggtttattttatctatg

SEQ ID NO: 27239 - DNA, 25 bp, Saccharomyces pastorianus
gatccctccatttatggaagacgcc

SEQ ID NO: 27240 - DNA, 25 bp, Saccharomyces pastorianus
gaaacagcgacctagttgggctgaa

SEQ ID NO: 27241 - DNA, 25 bp, Saccharomyces pastorianus
ggcggatttacaatcccaagtagat

SEQ ID NO: 27242 - DNA, 25 bp, Saccharomyces pastorianus
cagttcagcggataattcattcggg

SEQ ID NO: 27243 - DNA, 25 bp, Saccharomyces pastorianus
aaagccgatattttatccaggcaat

SEQ ID NO: 27244 - DNA, 25 bp, Saccharomyces pastorianus
acttcgatggttatggctggtctca

SEQ ID NO: 27245 - DNA, 25 bp, Saccharomyces pastorianus
gaacggaaatatctctgacgctgaa

SEQ ID NO: 27246 - DNA, 25 bp, Saccharomyces pastorianus
gcatacatgcttaacaacgactggt

SEQ ID NO: 27247 - DNA, 25 bp, Saccharomyces pastorianus
ttgatctccacatcgcagctatcat

SEQ ID NO: 27248 - DNA, 25 bp, Saccharomyces pastorianus
cattattatttatcccaagctgcag

SEQ ID NO: 27249 - DNA, 25 bp, Saccharomyces pastorianus
tgctgccaaggaacattctcactat

SEQ ID NO: 27250 - DNA, 25 bp, Saccharomyces pastorianus
tcaggctttgagacgtgctgccaag

SEQ ID NO: 27251 - DNA, 25 bp, Saccharomyces pastorianus
gaatcacggtatgtcacctgatgca

SEQ ID NO: 27252 - DNA, 25 bp, Saccharomyces pastorianus
cacctatgaggctgcgtctacaaga

SEQ ID NO: 27253 - DNA, 25 bp, Saccharomyces pastorianus
ggtagatctgtatcaactgcttctt

SEQ ID NO: 27254 - DNA, 25 bp, Saccharomyces pastorianus
acgggtttgggttagcatacatgct

SEQ ID NO: 27255 - DNA, 25 bp, Saccharomyces pastorianus
tccgcattggttggtggtgcatctt

SEQ ID NO: 27256 - DNA, 25 bp, Saccharomyces pastorianus
ggattcagcccttctaaacatgatg

SEQ ID NO: 27257 - DNA, 25 bp, Saccharomyces pastorianus
gagtgatctgaccagcgtaccacga

SEQ ID NO: 27258 - DNA, 25 bp, Saccharomyces pastorianus
gattaccacatgctctatatgcgga

SEQ ID NO: 27259 - DNA, 25 bp, Saccharomyces pastorianus
caggagcttctccagtcgaacagga

SEQ ID NO: 27260 - DNA, 25 bp, Saccharomyces pastorianus
gaaagatatacaccgcaggagcttc

SEQ ID NO: 27261 - DNA, 25 bp, Saccharomyces pastorianus
ggtatttcaaagtcttgcccctgat

SEQ ID NO: 27262 - DNA, 25 bp, Saccharomyces pastorianus
tttgcattcgtttctggattcagcc

SEQ ID NO: 27263 - DNA, 25 bp, Saccharomyces pastorianus
agaacctgtcagatttgcccaatgt

SEQ ID NO: 27264 - DNA, 25 bp, Saccharomyces pastorianus
tgcccaatgtgccaactttattgag

SEQ ID NO: 27265 - DNA, 25 bp, Saccharomyces pastorianus
gttgggtactgaagccggagacttt

SEQ ID NO: 27266 - DNA, 25 bp, Saccharomyces pastorianus
gattttgccaggctttgcagtcttt

SEQ ID NO: 27267 - DNA, 25 bp, Saccharomyces pastorianus
gactgtatctattgctggtatcgta

SEQ ID NO: 27268 - DNA, 25 bp, Saccharomyces pastorianus
gtgcaccttattctattactgttga

SEQ ID NO: 27269 - DNA, 25 bp, Saccharomyces pastorianus
gaacaaacacccgtattgactgtat

SEQ ID NO: 27270 - DNA, 25 bp, Saccharomyces pastorianus
gggcttcaaaccttcgaacacttag

SEQ ID NO: 27271 - DNA, 25 bp, Saccharomyces pastorianus
ttgtgtccatcgcaaagggctttgt

SEQ ID NO: 27272 - DNA, 25 bp, Saccharomyces pastorianus
aactctgttacttacatccttactc

SEQ ID NO: 27273 - DNA, 25 bp, Saccharomyces pastorianus
acacccaatccatacgatataccag

SEQ ID NO: 27274 - DNA, 25 bp, Saccharomyces pastorianus
acatccttactcgtggaaagaccat

SEQ ID NO: 27275 - DNA, 25 bp, Saccharomyces pastorianus
tcctggcatatttcattctagctta

SEQ ID NO: 27276 - DNA, 25 bp, Saccharomyces pastorianus
taccagttggctccgataatggcaa

SEQ ID NO: 27277 - DNA, 25 bp, Saccharomyces pastorianus
agacacaccatcgatcagactacgt

SEQ ID NO: 27278 - DNA, 25 bp, Saccharomyces pastorianus
ctaaggcggcaacctctgttcagaa

SEQ ID NO: 27279 - DNA, 25 bp, Saccharomyces pastorianus
aatgtattaccaaccgacgcagatc

SEQ ID NO: 27280 - DNA, 25 bp, Saccharomyces pastorianus
caaaggtagtacatcccaacgggag

SEQ ID NO: 27281 - DNA, 25 bp, Saccharomyces pastorianus
aatatcaggctcagtccatcagaca

SEQ ID NO: 27282 - DNA, 25 bp, Saccharomyces pastorianus
aaatcaaatactgtcaccgctgcgc

SEQ ID NO: 27283 - DNA, 25 bp, Saccharomyces pastorianus
ttacatttgtcactgctaaggcggc

SEQ ID NO: 27284 - DNA, 25 bp, Saccharomyces pastorianus
ggatgactctcttatgttcagtgat

SEQ ID NO: 27285 - DNA, 25 bp, Saccharomyces pastorianus
gcagatccgctgttggctaagcaaa

SEQ ID NO: 27286 - DNA, 25 bp, Saccharomyces pastorianus
gatgatttccaagacgacgatctga

SEQ ID NO: 27287 - DNA, 25 bp, Saccharomyces pastorianus
aagctccaatccaaactctaattca

SEQ ID NO: 27288 - DNA, 25 bp, Saccharomyces pastorianus
ggttcgttcatctatgggacttcta

SEQ ID NO: 27289 - DNA, 25 bp, Saccharomyces pastorianus
ggtacccattggatgtctactgacg

SEQ ID NO: 27290 - DNA, 25 bp, Saccharomyces pastorianus
tctactgacgactggtgcggtcatt

SEQ ID NO: 27291 - DNA, 25 bp, Saccharomyces pastorianus
tgtgggtctacaagcagctacattg

SEQ ID NO: 27292 - DNA, 25 bp, Saccharomyces pastorianus
gtgcggtcattctagcagcccaaaa

SEQ ID NO: 27293 - DNA, 25 bp, Saccharomyces pastorianus
agcagctacattggtcgcgctagtt

SEQ ID NO: 27294 - DNA, 25 bp, Saccharomyces pastorianus
gaaggcccagtattacttccgctgg

SEQ ID NO: 27295 - DNA, 25 bp, Saccharomyces pastorianus
gcagcccaaaatgtccgtcttggta

SEQ ID NO: 27296 - DNA, 25 bp, Saccharomyces pastorianus
gctagttgcgggttcgttcatctat

SEQ ID NO: 27297 - DNA, 25 bp, Saccharomyces pastorianus
tagtttcgacttcacccaaagggat

SEQ ID NO: 27298 - DNA, 25 bp, Saccharomyces pastorianus
gcgtataccttctagtttcgacttc

SEQ ID NO: 27299 - DNA, 25 bp, Saccharomyces pastorianus
ggaattgtcaatccttcaggctgaa

SEQ ID NO: 27300 - DNA, 25 bp, Saccharomyces pastorianus
attggctgaccgttgccatatgact

SEQ ID NO: 27301 - DNA, 25 bp, Saccharomyces pastorianus
ctccatccaaaatcaaacgctacgt

SEQ ID NO: 27302 - DNA, 25 bp, Saccharomyces pastorianus
taatacagacaatatcgccgccatc

SEQ ID NO: 27303 - DNA, 25 bp, Saccharomyces pastorianus
gaccccgtcattctttaaataggcg

SEQ ID NO: 27304 - DNA, 25 bp, Saccharomyces pastorianus
cgtcatgttcttcgccattggaaag

SEQ ID NO: 27305 - DNA, 25 bp, Saccharomyces pastorianus
gatgtccatgccacaccattggtat

SEQ ID NO: 27306 - DNA, 25 bp, Saccharomyces pastorianus
tgaagagtcgtcgtcgtcatgttct

SEQ ID NO: 27307 - DNA, 25 bp, Saccharomyces pastorianus
atagtgtagaccattctccatccaa

SEQ ID NO: 27308 - DNA, 25 bp, Saccharomyces pastorianus
ttgagaaatgtccagccccaacaaa

SEQ ID NO: 27309 - DNA, 25 bp, Saccharomyces pastorianus
gccaggctttaactttccacttgaa

SEQ ID NO: 27310 - DNA, 25 bp, Saccharomyces pastorianus
gtgtgcccaggcctcgtacgaaaag

SEQ ID NO: 27311 - DNA, 25 bp, Saccharomyces pastorianus
ctatcttcagaaatccaggcctttt

SEQ ID NO: 27312 - DNA, 25 bp, Saccharomyces pastorianus
aagctagccctacatcaatatccaa

SEQ ID NO: 27313 - DNA, 25 bp, Saccharomyces pastorianus
catagcaagttacgcccaagagtta

SEQ ID NO: 27314 - DNA, 25 bp, Saccharomyces pastorianus
acatcattggtctggaatcccgtgg

SEQ ID NO: 27315 - DNA, 25 bp, Saccharomyces pastorianus
gggttcttgtttggcccaactctag

SEQ ID NO: 27316 - DNA, 25 bp, Saccharomyces pastorianus
gtaaactgcctggtgagtgtgccca

SEQ ID NO: 27317 - DNA, 25 bp, Saccharomyces pastorianus
ggttccaacgttgttatcgtcgatg

SEQ ID NO: 27318 - DNA, 25 bp, Saccharomyces pastorianus
tgaatgccccagtgttcactctatt

SEQ ID NO: 27319 - DNA, 25 bp, Saccharomyces pastorianus
tagccatggctttaggtgtcggttt

SEQ ID NO: 27320 - DNA, 25 bp, Saccharomyces pastorianus
tgtcggtttcgttccagttagaaag

SEQ ID NO: 27321 - DNA, 25 bp, Saccharomyces pastorianus
gatttgtcagaaatatctcccgttg

SEQ ID NO: 27322 - DNA, 25 bp, Saccharomyces pastorianus
attaatgatcaactggtacccctgt

SEQ ID NO: 27323 - DNA, 25 bp, Saccharomyces pastorianus
ggtacccctgtattcatccatatgt

SEQ ID NO: 27324 - DNA, 25 bp, Saccharomyces pastorianus
atgtcttttcgcgaatcatcctaat

SEQ ID NO: 27325 - DNA, 25 bp, Saccharomyces pastorianus
ggtcattccaccatttataacgaga

SEQ ID NO: 27326 - DNA, 25 bp, Saccharomyces pastorianus
aaggttcacagacaccagcattcat

SEQ ID NO: 27327 - DNA, 25 bp, Saccharomyces pastorianus
aaataagcggatctctggcgggcac

SEQ ID NO: 27328 - DNA, 25 bp, Saccharomyces pastorianus
tctcccgttgaatactcaccatata

SEQ ID NO: 27329 - DNA, 25 bp, Saccharomyces pastorianus
gatagccggttctttattggacttg

SEQ ID NO: 27330 - DNA, 25 bp, Saccharomyces pastorianus
atccgtatcgattgccatggtgtat

SEQ ID NO: 27331 - DNA, 25 bp, Saccharomyces pastorianus
accagcattcatcactcggatagtt

SEQ ID NO: 27332 - DNA, 25 bp, Saccharomyces pastorianus
tttatcagtacgctttggttccaga

SEQ ID NO: 27333 - DNA, 25 bp, Saccharomyces pastorianus
ggaattcgtctattattttgtcgca

SEQ ID NO: 27334 - DNA, 25 bp, Saccharomyces pastorianus
atcgtgatgtcctcattatgtgtac

SEQ ID NO: 27335 - DNA, 25 bp, Saccharomyces pastorianus
tatcattcggtttgctttttccaag

SEQ ID NO: 27336 - DNA, 25 bp, Saccharomyces pastorianus
agaacgttcctcaccttgtggtata

SEQ ID NO: 27337 - DNA, 25 bp, Saccharomyces pastorianus
gccattcttagcctgtgttttgttc

SEQ ID NO: 27338 - DNA, 25 bp, Saccharomyces pastorianus
ctgcccatgacttcacgtataagcg

SEQ ID NO: 27339 - DNA, 25 bp, Saccharomyces pastorianus
atgtgtactgttaatttgcctgccc

SEQ ID NO: 27340 - DNA, 25 bp, Saccharomyces pastorianus
tagaattccctttattgcgcgtgat

SEQ ID NO: 27341 - DNA, 25 bp, Saccharomyces pastorianus
tgttcaccaagacttcaacgtccag

SEQ ID NO: 27342 - DNA, 25 bp, Saccharomyces pastorianus
gaaatcttttctgtatcgtcaatgt

SEQ ID NO: 27343 - DNA, 25 bp, Saccharomyces pastorianus
gagctgcccaaagaccctaaagtta

SEQ ID NO: 27344 - DNA, 25 bp, Saccharomyces pastorianus
gaagattttctttggctttgtcggc

SEQ ID NO: 27345 - DNA, 25 bp, Saccharomyces pastorianus
gaaatcagactctcgtcatcgctac

SEQ ID NO: 27346 - DNA, 25 bp, Saccharomyces pastorianus
gacgagtctcgtgtcaacatgaaga

SEQ ID NO: 27347 - DNA, 25 bp, Saccharomyces pastorianus
tttaacctgctctttctatggccat

SEQ ID NO: 27348 - DNA, 25 bp, Saccharomyces pastorianus
gggtctttcatttcatttatcggta

SEQ ID NO: 27349 - DNA, 25 bp, Saccharomyces pastorianus
cctcattctgggttcatttttcatc

SEQ ID NO: 27350 - DNA, 25 bp, Saccharomyces pastorianus
tacggcttttactgggcaacttgtt

SEQ ID NO: 27351 - DNA, 25 bp, Saccharomyces pastorianus
ggcaaaggctatgctgctgaccagt

SEQ ID NO: 27352 - DNA, 25 bp, Saccharomyces pastorianus
tatggccatcacttatcgtgctgga

SEQ ID NO: 27353 - DNA, 25 bp, Saccharomyces pastorianus
aatcatccttgtcaactgtctcatc

SEQ ID NO: 27354 - DNA, 25 bp, Saccharomyces pastorianus
aagcgtggaggctgtaccgtctaca

SEQ ID NO: 27355 - DNA, 25 bp, Saccharomyces pastorianus
gaaaacattcgtgtcctcttgcaag

SEQ ID NO: 27356 - DNA, 25 bp, Saccharomyces pastorianus
agacgagcccgatgtttactttgac

SEQ ID NO: 27357 - DNA, 25 bp, Saccharomyces pastorianus
caacaagctcgttattcagttcaat

SEQ ID NO: 27358 - DNA, 25 bp, Saccharomyces pastorianus
gggtaactcgttgttgcagtccaaa

SEQ ID NO: 27359 - DNA, 25 bp, Saccharomyces pastorianus
ttgcagtccaaatccctacagcagt

SEQ ID NO: 27360 - DNA, 25 bp, Saccharomyces pastorianus
tggccggcacagttactaaccaaac

SEQ ID NO: 27361 - DNA, 25 bp, Saccharomyces pastorianus
aatcgcttcgaggttttccatagaa

SEQ ID NO: 27362 - DNA, 25 bp, Saccharomyces pastorianus
actctgcccaatgcctactggagga

SEQ ID NO: 27363 - DNA, 25 bp, Saccharomyces pastorianus
taccaatccgatagtgtgcccgaag

SEQ ID NO: 27364 - DNA, 25 bp, Saccharomyces pastorianus
gtaccgtctacagtctgacactctg

SEQ ID NO: 27365 - DNA, 25 bp, Saccharomyces pastorianus
gaagggcttggcgacatcatcagta

SEQ ID NO: 27366 - DNA, 25 bp, Saccharomyces pastorianus
ttgacgaactccagcctttagatac

SEQ ID NO: 27367 - DNA, 25 bp, Saccharomyces pastorianus
gcccaacggcagtcttctagttgaa

SEQ ID NO: 27368 - DNA, 25 bp, Saccharomyces pastorianus
gttcgttaagaagtttccctccatg

SEQ ID NO: 27369 - DNA, 25 bp, Saccharomyces pastorianus
aagcaccgcagctaccattgaaggg

SEQ ID NO: 27370 - DNA, 25 bp, Saccharomyces pastorianus
atcatcagtaacgagcttgcttcct

SEQ ID NO: 27371 - DNA, 25 bp, Saccharomyces pastorianus
ggctgaaggcctgcattgacgaact

SEQ ID NO: 27372 - DNA, 25 bp, Saccharomyces pastorianus
ttgcttccttcgatcttgaacaggg

SEQ ID NO: 27373 - DNA, 25 bp, Saccharomyces pastorianus
gggcaaactccaattcgacttcgaa

SEQ ID NO: 27374 - DNA, 25 bp, Saccharomyces pastorianus
cgaagtgtactctagtgaccccgca

SEQ ID NO: 27375 - DNA, 25 bp, Saccharomyces pastorianus
agttcagaacctccagcggcaaaag

SEQ ID NO: 27376 - DNA, 25 bp, Saccharomyces pastorianus
aataccgtggccgttctttgagcag

SEQ ID NO: 27377 - DNA, 25 bp, Saccharomyces pastorianus
ggttatcattgtcttggcatcgcta

SEQ ID NO: 27378 - DNA, 25 bp, Saccharomyces pastorianus
gacatccactccgatggttctgttg

SEQ ID NO: 27379 - DNA, 25 bp, Saccharomyces pastorianus
aaccttttcgttcgtgattctgttg

SEQ ID NO: 27380 - DNA, 25 bp, Saccharomyces pastorianus
ggccgtacagggtttgcatttcgac

SEQ ID NO: 27381 - DNA, 25 bp, Saccharomyces pastorianus
ttcgctggtgaagtccgtgttgcct

SEQ ID NO: 27382 - DNA, 25 bp, Saccharomyces pastorianus
gtgatttcgtcaccgaaggccaatt

SEQ ID NO: 27383 - DNA, 25 bp, Saccharomyces pastorianus
catcgctaggtgcttggcaactcaa

SEQ ID NO: 27384 - DNA, 25 bp, Saccharomyces pastorianus
tcgttgacgaattggcctacttgaa

SEQ ID NO: 27385 - DNA, 25 bp, Saccharomyces pastorianus
tggtctccttggtggtggccgtaca

SEQ ID NO: 27386 - DNA, 25 bp, Saccharomyces pastorianus
gcccagagttggtttgtattcgtga

SEQ ID NO: 27387 - DNA, 25 bp, Saccharomyces pastorianus
gcggaatctagtttggatcacgata

SEQ ID NO: 27388 - DNA, 25 bp, Saccharomyces pastorianus
gatacgatgtacatgccaattactg

SEQ ID NO: 27389 - DNA, 25 bp, Saccharomyces pastorianus
gatgatatgtggtcgatgctaatta

SEQ ID NO: 27390 - DNA, 25 bp, Saccharomyces pastorianus
gaactaccgatatttttccaggact

SEQ ID NO: 27391 - DNA, 25 bp, Saccharomyces pastorianus
gcaagtccagtagtgttagctataa

SEQ ID NO: 27392 - DNA, 25 bp, Saccharomyces pastorianus
ggacttacaactggaacccacaatt

SEQ ID NO: 27393 - DNA, 25 bp, Saccharomyces pastorianus
gaaatgattagctctgcgactgacg

SEQ ID NO: 27394 - DNA, 25 bp, Saccharomyces pastorianus
gcgactgacgggaagaggcttttca

SEQ ID NO: 27395 - DNA, 25 bp, Saccharomyces pastorianus
gaaaatttccaatctcatcgggact

SEQ ID NO: 27396 - DNA, 25 bp, Saccharomyces pastorianus
gacgtatttagactttgcttgtgta

SEQ ID NO: 27397 - DNA, 25 bp, Saccharomyces pastorianus
actgaccagagcgaagggaccattg

SEQ ID NO: 27398 - DNA, 25 bp, Saccharomyces pastorianus
tacgctccattcttatcgtcttacg

SEQ ID NO: 27399 - DNA, 25 bp, Saccharomyces pastorianus
acgctccattcttatcgtcttacga

SEQ ID NO: 27400 - DNA, 25 bp, Saccharomyces pastorianus
ggtgaagaatctccatctcttgctt

SEQ ID NO: 27401 - DNA, 25 bp, Saccharomyces pastorianus
atgcgaagactggtgaagaatctcc

SEQ ID NO: 27402 - DNA, 25 bp, Saccharomyces pastorianus
cgttttatgcgaagactggtgaaga

SEQ ID NO: 27403 - DNA, 25 bp, Saccharomyces pastorianus
actggtgaagaatctccatctcttg

SEQ ID NO: 27404 - DNA, 25 bp, Saccharomyces pastorianus
ccattcttatcgtcttacgaagcat

SEQ ID NO: 27405 - DNA, 25 bp, Saccharomyces pastorianus
tggtgaagaatctccatctcttgct

SEQ ID NO: 27406 - DNA, 25 bp, Saccharomyces pastorianus
gctccattcttatcgtcttacgaag

SEQ ID NO: 27407 - DNA, 25 bp, Saccharomyces pastorianus
gactggtgaagaatctccatctctt

SEQ ID NO: 27408 - DNA, 25 bp, Saccharomyces pastorianus
gaagactggtgaagaatctccatct

SEQ ID NO: 27409 - DNA, 25 bp, Saccharomyces pastorianus
tggtgaagccgtgaatgcatcggat

SEQ ID NO: 27410 - DNA, 25 bp, Saccharomyces pastorianus
gacgtggacggtttatgttctgaac

SEQ ID NO: 27411 - DNA, 25 bp, Saccharomyces pastorianus
gacatgttcttcagggattcttcaa

SEQ ID NO: 27412 - DNA, 25 bp, Saccharomyces pastorianus
ataacccaagtctccagcaaagtac

SEQ ID NO: 27413 - DNA, 25 bp, Saccharomyces pastorianus
gaaaacgatagcgatgttgttccat

SEQ ID NO: 27414 - DNA, 25 bp, Saccharomyces pastorianus
cagcctttgtcacaatcacaacatc

SEQ ID NO: 27415 - DNA, 25 bp, Saccharomyces pastorianus
gacgacataccttttatcaacacaa

SEQ ID NO: 27416 - DNA, 25 bp, Saccharomyces pastorianus
atactctgatattgacgtggacggt

SEQ ID NO: 27417 - DNA, 25 bp, Saccharomyces pastorianus
gcaaaatcaatgtcccctatcaaca

SEQ ID NO: 27418 - DNA, 25 bp, Saccharomyces pastorianus
tgttctgaactgatggcaaaggcaa

SEQ ID NO: 27419 - DNA, 25 bp, Saccharomyces pastorianus
taacgaagaaccacaactgcaaaat

SEQ ID NO: 27420 - DNA, 25 bp, Saccharomyces pastorianus
gacccaattgtcaaactctaacaca

SEQ ID NO: 27421 - DNA, 25 bp, Saccharomyces pastorianus
tcgatgacgactatgacgaatacat

SEQ ID NO: 27422 - DNA, 25 bp, Saccharomyces pastorianus
gacgatagtggtgacgatgcttcat

SEQ ID NO: 27423 - DNA, 25 bp, Saccharomyces pastorianus
cattgtcagaacagtcaggtccaca

SEQ ID NO: 27424 - DNA, 25 bp, Saccharomyces pastorianus
tatttcccaactacattcgatgacg

SEQ ID NO: 27425 - DNA, 25 bp, Saccharomyces pastorianus
gtgggcgttcaatagacacaattct

SEQ ID NO: 27426 - DNA, 25 bp, Saccharomyces pastorianus
ttcagcggttgatccatatccaatg

SEQ ID NO: 27427 - DNA, 25 bp, Saccharomyces pastorianus
agtatcggagagtgggcgttcaata

SEQ ID NO: 27428 - DNA, 25 bp, Saccharomyces pastorianus
aatggcatctaacgtcactacagcc

SEQ ID NO: 27429 - DNA, 25 bp, Saccharomyces pastorianus
cactacagcccatcgttctataaga

SEQ ID NO: 27430 - DNA, 25 bp, Saccharomyces pastorianus
ggtccacaaatgtatttgccaacta

SEQ ID NO: 27431 - DNA, 25 bp, Saccharomyces pastorianus
gatattcctttgttcttgaccagtg

SEQ ID NO: 27432 - DNA, 25 bp, Saccharomyces pastorianus
gcgccctacaacaaaatcaagctga

SEQ ID NO: 27433 - DNA, 25 bp, Saccharomyces pastorianus
gcatgccaatgtaaattcaccagaa

SEQ ID NO: 27434 - DNA, 25 bp, Saccharomyces pastorianus
gtgaccaatgccagctcgtttgaaa

SEQ ID NO: 27435 - DNA, 25 bp, Saccharomyces pastorianus
cgggaagacctccttaatgcatcgt

SEQ ID NO: 27436 - DNA, 25 bp, Saccharomyces pastorianus
gaaattgcaagaagcgccctacaac

SEQ ID NO: 27437 - DNA, 25 bp, Saccharomyces pastorianus
attaacgtggataccgcctttgaag

SEQ ID NO: 27438 - DNA, 25 bp, Saccharomyces pastorianus
gttcttgaccagtgccaaaaacgcc

SEQ ID NO: 27439 - DNA, 25 bp, Saccharomyces pastorianus
ggatgaatttttagtgcatgccaat

SEQ ID NO: 27440 - DNA, 25 bp, Saccharomyces pastorianus
gaaaagtctgctcaagaacttgcca

SEQ ID NO: 27441 - DNA, 25 bp, Saccharomyces pastorianus
gatcatcttaggtgactctggcgtc

SEQ ID NO: 27442 - DNA, 25 bp, Saccharomyces pastorianus
ggtagcaagccactatttactgagt

SEQ ID NO: 27443 - DNA, 25 bp, Saccharomyces pastorianus
tacgacagtcctccgattggcagat

SEQ ID NO: 27444 - DNA, 25 bp, Saccharomyces pastorianus
agtcgtgtttccacttttggtagag

SEQ ID NO: 27445 - DNA, 25 bp, Saccharomyces pastorianus
gaaattccaggatatcccgaaagta

SEQ ID NO: 27446 - DNA, 25 bp, Saccharomyces pastorianus
acacggtttttcttatcagttatca

SEQ ID NO: 27447 - DNA, 25 bp, Saccharomyces pastorianus
gaaattagtcacctacatctctcca

SEQ ID NO: 27448 - DNA, 25 bp, Saccharomyces pastorianus
acaaggtacaaaccgttcgtcatgt

SEQ ID NO: 27449 - DNA, 25 bp, Saccharomyces pastorianus
acggaggatattggcgtcttattca

SEQ ID NO: 27450 - DNA, 25 bp, Saccharomyces pastorianus
gaagtagtcgatttctttgccaaat

SEQ ID NO: 27451 - DNA, 25 bp, Saccharomyces pastorianus
acatctctccatctcatgagagcac

SEQ ID NO: 27452 - DNA, 25 bp, Saccharomyces pastorianus
gagagcactacatatcctttggttg

SEQ ID NO: 27453 - DNA, 25 bp, Saccharomyces pastorianus
gtcagacccagatggaccaacagat

SEQ ID NO: 27454 - DNA, 25 bp, Saccharomyces pastorianus
aaacatgagcaacgcctcaggtcag

SEQ ID NO: 27455 - DNA, 25 bp, Saccharomyces pastorianus
gtttgcgcaaatggcctctactgcc

SEQ ID NO: 27456 - DNA, 25 bp, Saccharomyces pastorianus
agaccaagacaaacccaaaccagat

SEQ ID NO: 27457 - DNA, 25 bp, Saccharomyces pastorianus
gatccggatccgaaaccgctcctgt

SEQ ID NO: 27458 - DNA, 25 bp, Saccharomyces pastorianus
aaatttgtgatttttacttgcagca

SEQ ID NO: 27459 - DNA, 25 bp, Saccharomyces pastorianus
agtaccatcggccacactctaggtg

SEQ ID NO: 27460 - DNA, 25 bp, Saccharomyces pastorianus
ttgccgttggtagtaccatcggcca

SEQ ID NO: 27461 - DNA, 25 bp, Saccharomyces pastorianus
ctcctgctacgagttcgcagacaaa

SEQ ID NO: 27462 - DNA, 25 bp, Saccharomyces pastorianus
atgggaagaacctgcgagttagacg

SEQ ID NO: 27463 - DNA, 25 bp, Saccharomyces pastorianus
cacactctaggtgccggtattacgg

SEQ ID NO: 27464 - DNA, 25 bp, Saccharomyces pastorianus
atgattcccgttcacatatgagaag

SEQ ID NO: 27465 - DNA, 25 bp, Saccharomyces pastorianus
tttgttatggtatcgtgtctttggt

SEQ ID NO: 27466 - DNA, 25 bp, Saccharomyces pastorianus
aagtatctaatgtccagtctccttg

SEQ ID NO: 27467 - DNA, 25 bp, Saccharomyces pastorianus
gggctaggacggttcgtatctttgc

SEQ ID NO: 27468 - DNA, 25 bp, Saccharomyces pastorianus
ttatctggtcgcaagtccgatctat

SEQ ID NO: 27469 - DNA, 25 bp, Saccharomyces pastorianus
tatctttgccgtatacttcattgct

SEQ ID NO: 27470 - DNA, 25 bp, Saccharomyces pastorianus
gaaatcaccaggcagaccgacgctg

SEQ ID NO: 27471 - DNA, 25 bp, Saccharomyces pastorianus
agtctccttgcgaagttcatcaaca

SEQ ID NO: 27472 - DNA, 25 bp, Saccharomyces pastorianus
acttcattgcttaaacggcccgatg

SEQ ID NO: 27473 - DNA, 25 bp, Saccharomyces pastorianus
gatgctcccagtttatatgcacata

SEQ ID NO: 27474 - DNA, 25 bp, Saccharomyces pastorianus
atgtcgttgtctttgttcagcaagt

SEQ ID NO: 27475 - DNA, 25 bp, Saccharomyces pastorianus
ggatgttgtcccctaaattcagaat

SEQ ID NO: 27476 - DNA, 25 bp, Saccharomyces pastorianus
gaatctttactgacatcttactttc

SEQ ID NO: 27477 - DNA, 25 bp, Saccharomyces pastorianus
gaaactacgagcgacatctgcaaac

SEQ ID NO: 27478 - DNA, 25 bp, Saccharomyces pastorianus
acgtgccttccaagactgggcgaaa

SEQ ID NO: 27479 - DNA, 25 bp, Saccharomyces pastorianus
gaaagccagatcttagcggagcaga

SEQ ID NO: 27480 - DNA, 25 bp, Saccharomyces pastorianus
gaagtaactccaaagctgtatccag

SEQ ID NO: 27481 - DNA, 25 bp, Saccharomyces pastorianus
gcaatctaatagagcctggctgatt

SEQ ID NO: 27482 - DNA, 25 bp, Saccharomyces pastorianus
attgaattctaactatgccggtctt

SEQ ID NO: 27483 - DNA, 25 bp, Saccharomyces pastorianus
tcaattcttgataacacgtgccttc

SEQ ID NO: 27484 - DNA, 25 bp, Saccharomyces pastorianus
tatgccggtcttaaactcaatgagt

SEQ ID NO: 27485 - DNA, 25 bp, Saccharomyces pastorianus
tccagtgcagcaaaacagtaccata

SEQ ID NO: 27486 - DNA, 25 bp, Saccharomyces pastorianus
ggatttactatttgctctggaaaac

SEQ ID NO: 27487 - DNA, 25 bp, Saccharomyces pastorianus
gtgaggtttctatggctctgagagc

SEQ ID NO: 27488 - DNA, 25 bp, Saccharomyces pastorianus
atatggatggctaacttcgtcagtg

SEQ ID NO: 27489 - DNA, 25 bp, Saccharomyces pastorianus
gagagcagttgcactaatccaaaag

SEQ ID NO: 27490 - DNA, 25 bp, Saccharomyces pastorianus
gcgtcaaatgtcacagccgggctaa

SEQ ID NO: 27491 - DNA, 25 bp, Saccharomyces pastorianus
gaataaaccgacatctctaggagcg

SEQ ID NO: 27492 - DNA, 25 bp, Saccharomyces pastorianus
ttcctaaacacttaccatttctcca

SEQ ID NO: 27493 - DNA, 25 bp, Saccharomyces pastorianus
gaaatcatcgggtaaagtggcctct

SEQ ID NO: 27494 - DNA, 25 bp, Saccharomyces pastorianus
gaacatgatgtcaagcgcgtgcgaa

SEQ ID NO: 27495 - DNA, 25 bp, Saccharomyces pastorianus
aagaattgcgttgggccttgaaaag

SEQ ID NO: 27496 - DNA, 25 bp, Saccharomyces pastorianus
aagtggcctctgatattgctgctag

SEQ ID NO: 27497 - DNA, 25 bp, Saccharomyces pastorianus
tattgtgcaaccgaagccgacgtga

SEQ ID NO: 27498 - DNA, 25 bp, Saccharomyces pastorianus
gagatttactaattcttccgccggg

SEQ ID NO: 27499 - DNA, 25 bp, Saccharomyces pastorianus
gtcgatattcaccaaggctctttca

SEQ ID NO: 27500 - DNA, 25 bp, Saccharomyces pastorianus
aattaggtactgtctggaaggcact

SEQ ID NO: 27501 - DNA, 25 bp, Saccharomyces pastorianus
ggcacggagttttccctagatgagc

SEQ ID NO: 27502 - DNA, 25 bp, Saccharomyces pastorianus
gaaggcactgggtattttgacgtca

SEQ ID NO: 27503 - DNA, 25 bp, Saccharomyces pastorianus
gagcggcatcgattaccgcgaatct

SEQ ID NO: 27504 - DNA, 25 bp, Saccharomyces pastorianus
gaatctcacaattccggcacggagt

SEQ ID NO: 27505 - DNA, 25 bp, Saccharomyces pastorianus
ggcaggcgattaacaggtctaccca

SEQ ID NO: 27506 - DNA, 25 bp, Saccharomyces pastorianus
taccaccgtttcacgttgacgagta

SEQ ID NO: 27507 - DNA, 25 bp, Saccharomyces pastorianus
gagatgcttccacacctgaaaactg

SEQ ID NO: 27508 - DNA, 25 bp, Saccharomyces pastorianus
gaaagtccgtataacgctgctgtta

SEQ ID NO: 27509 - DNA, 25 bp, Saccharomyces pastorianus
aaggatttccatcgtgctctagaac

SEQ ID NO: 27510 - DNA, 25 bp, Saccharomyces pastorianus
catcatccagctccaacaagtattt

SEQ ID NO: 27511 - DNA, 25 bp, Saccharomyces pastorianus
aaacctgaactagccgacaagtctg

SEQ ID NO: 27512 - DNA, 25 bp, Saccharomyces pastorianus
ggttatactgaatcacgcctgggaa

SEQ ID NO: 27513 - DNA, 25 bp, Saccharomyces pastorianus
agctggaccaaagcctgctaacaca

SEQ ID NO: 27514 - DNA, 25 bp, Saccharomyces pastorianus
gcgactcttctaactctgcaaataa

SEQ ID NO: 27515 - DNA, 25 bp, Saccharomyces pastorianus
gcctgggaaatttgtttgctgcgtt

SEQ ID NO: 27516 - DNA, 25 bp, Saccharomyces pastorianus
acaggaccaaacgtcagcagctgga

SEQ ID NO: 27517 - DNA, 25 bp, Saccharomyces pastorianus
attacccaagattcatcatccagct

SEQ ID NO: 27518 - DNA, 25 bp, Saccharomyces pastorianus
acaactagctctgggtgttcaagat

SEQ ID NO: 27519 - DNA, 25 bp, Saccharomyces pastorianus
acctttgttggtgaatgactcgccc

SEQ ID NO: 27520 - DNA, 25 bp, Saccharomyces pastorianus
gggaactcttgcgttcaccataaca

SEQ ID NO: 27521 - DNA, 25 bp, Saccharomyces pastorianus
gtttgccgatgccagagaccatagt

SEQ ID NO: 27522 - DNA, 25 bp, Saccharomyces pastorianus
gcaaccgtgttcagtcatttaaccg

SEQ ID NO: 27523 - DNA, 25 bp, Saccharomyces pastorianus
accgcctctaggatctctaattgaa

SEQ ID NO: 27524 - DNA, 25 bp, Saccharomyces pastorianus
gaattggcgattctctggcatctat

SEQ ID NO: 27525 - DNA, 25 bp, Saccharomyces pastorianus
atagtgggcccctgatcatatccta

SEQ ID NO: 27526 - DNA, 25 bp, Saccharomyces pastorianus
gtcaaattcgttggcgaggtaccca

SEQ ID NO: 27527 - DNA, 25 bp, Saccharomyces pastorianus
atacctcccgaaaagtgtggcactt

SEQ ID NO: 27528 - DNA, 25 bp, Saccharomyces pastorianus
ctcgcccatgggattaataggtttg

SEQ ID NO: 27529 - DNA, 25 bp, Saccharomyces pastorianus
gtgtggcacttcattatattcttac

SEQ ID NO: 27530 - DNA, 25 bp, Saccharomyces pastorianus
acttgcctgaactgatggctggtta

SEQ ID NO: 27531 - DNA, 25 bp, Saccharomyces pastorianus
aaacgtgaagctcaagcggaactat

SEQ ID NO: 27532 - DNA, 25 bp, Saccharomyces pastorianus
gaagagcatccttcttgggttgcta

SEQ ID NO: 27533 - DNA, 25 bp, Saccharomyces pastorianus
ggccaaggtacataacttgcctgaa

SEQ ID NO: 27534 - DNA, 25 bp, Saccharomyces pastorianus
aatacggctctgaggctaagcatgt

SEQ ID NO: 27535 - DNA, 25 bp, Saccharomyces pastorianus
agcggaactatacgcttctagggaa

SEQ ID NO: 27536 - DNA, 25 bp, Saccharomyces pastorianus
gaacctagtggagaatcatccgatg

SEQ ID NO: 27537 - DNA, 25 bp, Saccharomyces pastorianus
gtgggcgtactgaagtgacctacaa

SEQ ID NO: 27538 - DNA, 25 bp, Saccharomyces pastorianus
agaaaaagaaccaactgccactggg

SEQ ID NO: 27539 - DNA, 25 bp, Saccharomyces pastorianus
aacatccgatgatcgtacggctaga

SEQ ID NO: 27540 - DNA, 25 bp, Saccharomyces pastorianus
cgaagctagagtcgctaaacgtgaa

SEQ ID NO: 27541 - DNA, 25 bp, Saccharomyces pastorianus
ttatgtcatgatcactttcgctgcc

SEQ ID NO: 27542 - DNA, 25 bp, Saccharomyces pastorianus
atgttgattccaaccttgtaccctg

SEQ ID NO: 27543 - DNA, 25 bp, Saccharomyces pastorianus
gtaccctgctttacatgaccctgaa

SEQ ID NO: 27544 - DNA, 25 bp, Saccharomyces pastorianus
attacactgcaccaaaaggcgctat

SEQ ID NO: 27545 - DNA, 25 bp, Saccharomyces pastorianus
tagctgatcgtccagatgttttaga

SEQ ID NO: 27546 - DNA, 25 bp, Saccharomyces pastorianus
ggttcacacgtttgtttaggtcaga

SEQ ID NO: 27547 - DNA, 25 bp, Saccharomyces pastorianus
gggtaaatttgctctatccaccgat

SEQ ID NO: 27548 - DNA, 25 bp, Saccharomyces pastorianus
aaaagatcaaggttttcgccaccat

SEQ ID NO: 27549 - DNA, 25 bp, Saccharomyces pastorianus
tcgccaccattttccctaaagatga

SEQ ID NO: 27550 - DNA, 25 bp, Saccharomyces pastorianus
atccaccgatttccatcacaaagta

SEQ ID NO: 27551 - DNA, 25 bp, Saccharomyces pastorianus
tttcccagtttcttccaattacact

SEQ ID NO: 27552 - DNA, 25 bp, Saccharomyces pastorianus
cgaaagctgtccatgtgtcaactgc

SEQ ID NO: 27553 - DNA, 25 bp, Saccharomyces pastorianus
aattactcgatattcacgcgtggtt

SEQ ID NO: 27554 - DNA, 25 bp, Saccharomyces pastorianus
ggtgggatttcctaaaactgcaagt

SEQ ID NO: 27555 - DNA, 25 bp, Saccharomyces pastorianus
tccgcggagcacaacaactgtatct

SEQ ID NO: 27556 - DNA, 25 bp, Saccharomyces pastorianus
taccactactggtgcgtcacatgat

SEQ ID NO: 27557 - DNA, 25 bp, Saccharomyces pastorianus
gggcgtcttcttaagtacacaatgt

SEQ ID NO: 27558 - DNA, 25 bp, Saccharomyces pastorianus
gttctgactcataagggcgtcttct

SEQ ID NO: 27559 - DNA, 25 bp, Saccharomyces pastorianus
tgcccacgctgcaagtattattccg

SEQ ID NO: 27560 - DNA, 25 bp, Saccharomyces pastorianus
acaattgcacttgcgatggctgctt

SEQ ID NO: 27561 - DNA, 25 bp, Saccharomyces pastorianus
aacagagcggtgttcctttgaccaa

SEQ ID NO: 27562 - DNA, 25 bp, Saccharomyces pastorianus
gtgtcaactgcctcatccatagaag

SEQ ID NO: 27563 - DNA, 25 bp, Saccharomyces pastorianus
atcgacgcttgcattctttggagag

SEQ ID NO: 27564 - DNA, 25 bp, Saccharomyces pastorianus
taacgttcacgccaagcattctaca

SEQ ID NO: 27565 - DNA, 25 bp, Saccharomyces pastorianus
tacccaaacggtgaagtgtgcatat

SEQ ID NO: 27566 - DNA, 25 bp, Saccharomyces pastorianus
ttgggattgtctcattcaagggccc

SEQ ID NO: 27567 - DNA, 25 bp, Saccharomyces pastorianus
aacagcccagaaacgtctgctcaag

SEQ ID NO: 27568 - DNA, 25 bp, Saccharomyces pastorianus
gatggtctcctgtacagagcgtgga

SEQ ID NO: 27569 - DNA, 25 bp, Saccharomyces pastorianus
gagagacaatagacccgaattcgag

SEQ ID NO: 27570 - DNA, 25 bp, Saccharomyces pastorianus
ggtgatgaccccaacatgtatgaac

SEQ ID NO: 27571 - DNA, 25 bp, Saccharomyces pastorianus
tggaattccccaaggactatccttt

SEQ ID NO: 27572 - DNA, 25 bp, Saccharomyces pastorianus
aaagattccccaccgggcatagtgg

SEQ ID NO: 27573 - DNA, 25 bp, Saccharomyces pastorianus
aacatcttcgtttgggattgtctca

SEQ ID NO: 27574 - DNA, 25 bp, Saccharomyces pastorianus
ggagctgtttcgttgttgcagtact

SEQ ID NO: 27575 - DNA, 25 bp, Saccharomyces pastorianus
tttcaccagcactatctagcttcaa

SEQ ID NO: 27576 - DNA, 25 bp, Saccharomyces pastorianus
ctgagttatgccctgtctgtgaaaa

SEQ ID NO: 27577 - DNA, 25 bp, Saccharomyces pastorianus
aaattatcggtcatactccggattt

SEQ ID NO: 27578 - DNA, 25 bp, Saccharomyces pastorianus
aacaaacatgtcgtcagccgtggca

SEQ ID NO: 27579 - DNA, 25 bp, Saccharomyces pastorianus
aagaaactctttgcgctatccaatt

SEQ ID NO: 27580 - DNA, 25 bp, Saccharomyces pastorianus
ttacccatgcgccatgagctatttg

SEQ ID NO: 27581 - DNA, 25 bp, Saccharomyces pastorianus
gattttatctttcacgggttcgcaa

SEQ ID NO: 27582 - DNA, 25 bp, Saccharomyces pastorianus
acctgtctcgtcaagtggtgaccaa

SEQ ID NO: 27583 - DNA, 25 bp, Saccharomyces pastorianus
gtcagccgtggcacttttacaaaat

SEQ ID NO: 27584 - DNA, 25 bp, Saccharomyces pastorianus
ggtggaccacgcaggacatgactac

SEQ ID NO: 27585 - DNA, 25 bp, Saccharomyces pastorianus
agacggtagagttcttcaaggtggc

SEQ ID NO: 27586 - DNA, 25 bp, Saccharomyces pastorianus
gcaccacgtcaaactgagtcaccag

SEQ ID NO: 27587 - DNA, 25 bp, Saccharomyces pastorianus
cgggcttcaccgacaaactggagac

SEQ ID NO: 27588 - DNA, 25 bp, Saccharomyces pastorianus
actggagaccataaacaagcctttg

SEQ ID NO: 27589 - DNA, 25 bp, Saccharomyces pastorianus
gtaaggctacaccaatttagtctga

SEQ ID NO: 27590 - DNA, 25 bp, Saccharomyces pastorianus
caatttcctcaaaaacgcaccacgt

SEQ ID NO: 27591 - DNA, 25 bp, Saccharomyces pastorianus
ggtacgggcagtatggacccacaat

SEQ ID NO: 27592 - DNA, 25 bp, Saccharomyces pastorianus
gagtcaccagggattcaagagcaga

SEQ ID NO: 27593 - DNA, 25 bp, Saccharomyces pastorianus
gaacttcacgcttgttgacaagaga

SEQ ID NO: 27594 - DNA, 25 bp, Saccharomyces pastorianus
atcgtaatgattctacgggcttcac

SEQ ID NO: 27595 - DNA, 25 bp, Saccharomyces pastorianus
gtgaagtgctatccaatttcctcaa

SEQ ID NO: 27596 - DNA, 25 bp, Saccharomyces pastorianus
gacggtgacggagacactactaata

SEQ ID NO: 27597 - DNA, 25 bp, Saccharomyces pastorianus
attgccaatgcagatcgacctgaac

SEQ ID NO: 27598 - DNA, 25 bp, Saccharomyces pastorianus
acaatttcgaaggtgtactgctaca

SEQ ID NO: 27599 - DNA, 25 bp, Saccharomyces pastorianus
aaaattggctccagcctcaacattg

SEQ ID NO: 27600 - DNA, 25 bp, Saccharomyces pastorianus
cgacagcataatcaccatatcctat

SEQ ID NO: 27601 - DNA, 25 bp, Saccharomyces pastorianus
aaacctggaaccgttgattgatgaa

SEQ ID NO: 27602 - DNA, 25 bp, Saccharomyces pastorianus
aaatctttaatcttgctgtcttcga

SEQ ID NO: 27603 - DNA, 25 bp, Saccharomyces pastorianus
atagacgctattggcgacgtcccaa

SEQ ID NO: 27604 - DNA, 25 bp, Saccharomyces pastorianus
gtgagttctactccggtgctaatta

SEQ ID NO: 27605 - DNA, 25 bp, Saccharomyces pastorianus
gctgtcttcgaatccatatcaactg

SEQ ID NO: 27606 - DNA, 25 bp, Saccharomyces pastorianus
cattgttggtttactcttttgatca

SEQ ID NO: 27607 - DNA, 25 bp, Saccharomyces pastorianus
gaacattccgttctctgtattagat

SEQ ID NO: 27608 - DNA, 25 bp, Saccharomyces pastorianus
aaacttcactcagctttttgaccat

SEQ ID NO: 27609 - DNA, 25 bp, Saccharomyces pastorianus
taaaacagactcaagcgtgcacgaa

SEQ ID NO: 27610 - DNA, 25 bp, Saccharomyces pastorianus
gaacagcgacggaaccactaacggt

SEQ ID NO: 27611 - DNA, 25 bp, Saccharomyces pastorianus
taacatcccggaacttcagtcgaaa

SEQ ID NO: 27612 - DNA, 25 bp, Saccharomyces pastorianus
gccaattttatgaccccaacacgaa

SEQ ID NO: 27613 - DNA, 25 bp, Saccharomyces pastorianus
tgaatgatctactcgctgaacctga

SEQ ID NO: 27614 - DNA, 25 bp, Saccharomyces pastorianus
attacaacagactctctaccagacg

SEQ ID NO: 27615 - DNA, 25 bp, Saccharomyces pastorianus
tgaccataattctccactattccaa

SEQ ID NO: 27616 - DNA, 25 bp, Saccharomyces pastorianus
gaatcccaactactaccaagagcaa

SEQ ID NO: 27617 - DNA, 25 bp, Saccharomyces pastorianus
attacccaccagtgcgagattggct

SEQ ID NO: 27618 - DNA, 25 bp, Saccharomyces pastorianus
ggctactaagaagacctccacttta

SEQ ID NO: 27619 - DNA, 25 bp, Saccharomyces pastorianus
attgcagccggttctgaggctcaaa

SEQ ID NO: 27620 - DNA, 25 bp, Saccharomyces pastorianus
gtgggttttcacaaggttcgtcgat

SEQ ID NO: 27621 - DNA, 25 bp, Saccharomyces pastorianus
gaaatccgcggaagttggccgtgat

SEQ ID NO: 27622 - DNA, 25 bp, Saccharomyces pastorianus
gaaattttgccaacccaacttgaag

SEQ ID NO: 27623 - DNA, 25 bp, Saccharomyces pastorianus
aagcttaactgctgacgaaggccca

SEQ ID NO: 27624 - DNA, 25 bp, Saccharomyces pastorianus
gaggctatgaaagacgtcgcttctg

SEQ ID NO: 27625 - DNA, 25 bp, Saccharomyces pastorianus
gtcgcttctgcacgcggtgatgata

SEQ ID NO: 27626 - DNA, 25 bp, Saccharomyces pastorianus
attgtcaaccaaagaggctcgcttg

SEQ ID NO: 27627 - DNA, 25 bp, Saccharomyces pastorianus
tagccaacgatggtcaagcagccaa

SEQ ID NO: 27628 - DNA, 25 bp, Saccharomyces pastorianus
aagaatatcgcagagccatctattg

SEQ ID NO: 27629 - DNA, 25 bp, Saccharomyces pastorianus
gaatccggctagtctatcaagagat

SEQ ID NO: 27630 - DNA, 25 bp, Saccharomyces pastorianus
cgactgattgggtactgctttggaa

SEQ ID NO: 27631 - DNA, 25 bp, Saccharomyces pastorianus
gataccatcgacacaaagttcccat

SEQ ID NO: 27632 - DNA, 25 bp, Saccharomyces pastorianus
aagggcttgccttttgataccatcg

SEQ ID NO: 27633 - DNA, 25 bp, Saccharomyces pastorianus
gcacctcaatgcaacctacgttaaa

SEQ ID NO: 27634 - DNA, 25 bp, Saccharomyces pastorianus
aaagttcccatatcctaagtcacaa

SEQ ID NO: 27635 - DNA, 25 bp, Saccharomyces pastorianus
aagtcacaagtgaacctgccaaggg

SEQ ID NO: 27636 - DNA, 25 bp, Saccharomyces pastorianus
atagctttgtcatgggtacctgtat

SEQ ID NO: 27637 - DNA, 25 bp, Saccharomyces pastorianus
tgacgttattcttttcaaggccccg

SEQ ID NO: 27638 - DNA, 25 bp, Saccharomyces pastorianus
tggtagcgattgtctggccaccgtc

SEQ ID NO: 27639 - DNA, 25 bp, Saccharomyces pastorianus
gcaacacattcggttccatttcaag

SEQ ID NO: 27640 - DNA, 25 bp, Saccharomyces pastorianus
acttctatcatcattttccacaaca

SEQ ID NO: 27641 - DNA, 25 bp, Saccharomyces pastorianus
agtgccgcttaccaaccaacaaaat

SEQ ID NO: 27642 - DNA, 25 bp, Saccharomyces pastorianus
tgaacgtccatttgcatgccacata

SEQ ID NO: 27643 - DNA, 25 bp, Saccharomyces pastorianus
ttccacaacaaaaccaccattctat

SEQ ID NO: 27644 - DNA, 25 bp, Saccharomyces pastorianus
aaatgaatatgaccccgtcatcgcc

SEQ ID NO: 27645 - DNA, 25 bp, Saccharomyces pastorianus
tgaagagaaaccgttccattgtcac

SEQ ID NO: 27646 - DNA, 25 bp, Saccharomyces pastorianus
atcaatgacgccatccaggagatca

SEQ ID NO: 27647 - DNA, 25 bp, Saccharomyces pastorianus
atggcaatgataccccaaactttga

SEQ ID NO: 27648 - DNA, 25 bp, Saccharomyces pastorianus
gataatgcatctgtcattgccaaag

SEQ ID NO: 27649 - DNA, 25 bp, Saccharomyces pastorianus
agacgaaaatctgcggtgccgttaa

SEQ ID NO: 27650 - DNA, 25 bp, Saccharomyces pastorianus
aagtggcaaccacaggcttgggtaa

SEQ ID NO: 27651 - DNA, 25 bp, Saccharomyces pastorianus
gagaggcctggcaagaatcgtccaa

SEQ ID NO: 27652 - DNA, 25 bp, Saccharomyces pastorianus
gagtccactgggaaagtctggcaca

SEQ ID NO: 27653 - DNA, 25 bp, Saccharomyces pastorianus
gtgttcccgaagcaggccagtatca

SEQ ID NO: 27654 - DNA, 25 bp, Saccharomyces pastorianus
tcggtcgcagctttgttatctctaa

SEQ ID NO: 27655 - DNA, 25 bp, Saccharomyces pastorianus
aaactcgtccgctgtggccattttg

SEQ ID NO: 27656 - DNA, 25 bp, Saccharomyces pastorianus
caacatggcagctcatcggtcgcag

SEQ ID NO: 27657 - DNA, 25 bp, Saccharomyces pastorianus
cgccaatgactactcgtttctagga

SEQ ID NO: 27658 - DNA, 25 bp, Saccharomyces pastorianus
cctgtacagcgggaagaccttcttg

SEQ ID NO: 27659 - DNA, 25 bp, Saccharomyces pastorianus
agcgatctgggcaagaacctgtaca

SEQ ID NO: 27660 - DNA, 25 bp, Saccharomyces pastorianus
gaggtgccgggaagccaaactcgtc

SEQ ID NO: 27661 - DNA, 25 bp, Saccharomyces pastorianus
gttcgacgagcccatcaagtgtttc

SEQ ID NO: 27662 - DNA, 25 bp, Saccharomyces pastorianus
acgagagtatgcctaagcctgcgcc

SEQ ID NO: 27663 - DNA, 25 bp, Saccharomyces pastorianus
aaagatgcaaactccagcgatgaag

SEQ ID NO: 27664 - DNA, 25 bp, Saccharomyces pastorianus
gcgatgaagaatttgcccagagctt

SEQ ID NO: 27665 - DNA, 25 bp, Saccharomyces pastorianus
gccaatgctaccttgattattccag

SEQ ID NO: 27666 - DNA, 25 bp, Saccharomyces pastorianus
ccagagcttggaggcggaaatgaac

SEQ ID NO: 27667 - DNA, 25 bp, Saccharomyces pastorianus
aagacgctgcctccaatatagacga

SEQ ID NO: 27668 - DNA, 25 bp, Saccharomyces pastorianus
ccactctgttgccacacgaagaaaa

SEQ ID NO: 27669 - DNA, 25 bp, Saccharomyces pastorianus
gttaggctattatccgatgacgagt

SEQ ID NO: 27670 - DNA, 25 bp, Saccharomyces pastorianus
gaaacgataagaacagtcccagaaa

SEQ ID NO: 27671 - DNA, 25 bp, Saccharomyces pastorianus
attcacgattcagaaccacgttcta

SEQ ID NO: 27672 - DNA, 25 bp, Saccharomyces pastorianus
aatgcaaaggcaacggccgtagcaa

SEQ ID NO: 27673 - DNA, 25 bp, Saccharomyces pastorianus
aagcgaatagtttaggccacatgaa

SEQ ID NO: 27674 - DNA, 25 bp, Saccharomyces pastorianus
tgatatgcagcgtcagcagcaccag

SEQ ID NO: 27675 - DNA, 25 bp, Saccharomyces pastorianus
tgaatcaagatcaggtgccaccagg

SEQ ID NO: 27676 - DNA, 25 bp, Saccharomyces pastorianus
gagcctatagtcacccaacaagaag

SEQ ID NO: 27677 - DNA, 25 bp, Saccharomyces pastorianus
aggaatctcatccaagcctgtctaa

SEQ ID NO: 27678 - DNA, 25 bp, Saccharomyces pastorianus
tgccaccaggcgcactgaaacagga

SEQ ID NO: 27679 - DNA, 25 bp, Saccharomyces pastorianus
aacaccatgctcagaatcctcaaac

SEQ ID NO: 27680 - DNA, 25 bp, Saccharomyces pastorianus
atgctaatcagaccccgataatcca

SEQ ID NO: 27681 - DNA, 25 bp, Saccharomyces pastorianus
gtaaaatctcaattgctaggtgcca

SEQ ID NO: 27682 - DNA, 25 bp, Saccharomyces pastorianus
gtacgccaaagttcgagcctatagt

SEQ ID NO: 27683 - DNA, 25 bp, Saccharomyces pastorianus
aagcctgtctaaatgcccctgatga

SEQ ID NO: 27684 - DNA, 25 bp, Saccharomyces pastorianus
gatgaattgcaaattgccctcaata

SEQ ID NO: 27685 - DNA, 25 bp, Saccharomyces pastorianus
gaattcataacaatcttccaatcag

SEQ ID NO: 27686 - DNA, 25 bp, Saccharomyces pastorianus
accacctaaggcgatcaagtaccat

SEQ ID NO: 27687 - DNA, 25 bp, Saccharomyces pastorianus
agctgttatgcgatgtcttatgttc

SEQ ID NO: 27688 - DNA, 25 bp, Saccharomyces pastorianus
gaatttacgcctgatacgactgatt

SEQ ID NO: 27689 - DNA, 25 bp, Saccharomyces pastorianus
ttccaatcagacaattccttactat

SEQ ID NO: 27690 - DNA, 25 bp, Saccharomyces pastorianus
gacattaaccaagtcgtttccatca

SEQ ID NO: 27691 - DNA, 25 bp, Saccharomyces pastorianus
cgtttccatcaaagacgacttcgaa

SEQ ID NO: 27692 - DNA, 25 bp, Saccharomyces pastorianus
gactgggtccacaagatttgtccat

SEQ ID NO: 27693 - DNA, 25 bp, Saccharomyces pastorianus
gaatttatgggatcgtttccaagaa

SEQ ID NO: 27694 - DNA, 25 bp, Saccharomyces pastorianus
attggagcatagttggactgggtcc

SEQ ID NO: 27695 - DNA, 25 bp, Saccharomyces pastorianus
taacaacagaatgccggtccaacag

SEQ ID NO: 27696 - DNA, 25 bp, Saccharomyces pastorianus
ggcaagaaactgaccggatagaatt

SEQ ID NO: 27697 - DNA, 25 bp, Saccharomyces pastorianus
tccagacactatactcgctttcaaa

SEQ ID NO: 27698 - DNA, 25 bp, Saccharomyces pastorianus
gaaactcaaacggtatcgactccca

SEQ ID NO: 27699 - DNA, 25 bp, Saccharomyces pastorianus
ccagcgaatcacaactgctcattta

SEQ ID NO: 27700 - DNA, 25 bp, Saccharomyces pastorianus
ttattaaaacgccttgccaaacaat

SEQ ID NO: 27701 - DNA, 25 bp, Saccharomyces pastorianus
gagtatcttcttcaattgactaaaa

SEQ ID NO: 27702 - DNA, 25 bp, Saccharomyces pastorianus
gattgggagtctatacccacagact

SEQ ID NO: 27703 - DNA, 25 bp, Saccharomyces pastorianus
cataccgttattgagcagttcgaaa

SEQ ID NO: 27704 - DNA, 25 bp, Saccharomyces pastorianus
tgtggccgtatttgcatcagataaa

SEQ ID NO: 27705 - DNA, 25 bp, Saccharomyces pastorianus
atagcgcaggcaacgatagttttga

SEQ ID NO: 27706 - DNA, 25 bp, Saccharomyces pastorianus
ctgcatcgcagttggctcaatcaaa

SEQ ID NO: 27707 - DNA, 25 bp, Saccharomyces pastorianus
gcctgatgggaatcgtatccgttca

SEQ ID NO: 27708 - DNA, 25 bp, Saccharomyces pastorianus
aactgttgtattttcctatgtggta

SEQ ID NO: 27709 - DNA, 25 bp, Saccharomyces pastorianus
gaatctatggtacttccttccgata

SEQ ID NO: 27710 - DNA, 25 bp, Saccharomyces pastorianus
aatagcaacactgaccgactaccag

SEQ ID NO: 27711 - DNA, 25 bp, Saccharomyces pastorianus
ggtataataccccattgcaactaag

SEQ ID NO: 27712 - DNA, 25 bp, Saccharomyces pastorianus
gtaaagcactggagtctgcatcgca

SEQ ID NO: 27713 - DNA, 25 bp, Saccharomyces pastorianus
ttccgatattcttttccatgccaat

SEQ ID NO: 27714 - DNA, 25 bp, Saccharomyces pastorianus
ccatgccaatatttacgtccaacta

SEQ ID NO: 27715 - DNA, 25 bp, Saccharomyces pastorianus
cgactaccagcttttcttaaacaca

SEQ ID NO: 27716 - DNA, 25 bp, Saccharomyces pastorianus
ataggctctataactctcgaggacg

SEQ ID NO: 27717 - DNA, 25 bp, Saccharomyces pastorianus
tatcggtcgacttgggcactggtaa

SEQ ID NO: 27718 - DNA, 25 bp, Saccharomyces pastorianus
ggttcgacaaagttcgtcaccgtga

SEQ ID NO: 27719 - DNA, 25 bp, Saccharomyces pastorianus
aaatgctaacttttgctaccacccg

SEQ ID NO: 27720 - DNA, 25 bp, Saccharomyces pastorianus
acgataccatttgcatgctcgctaa

SEQ ID NO: 27721 - DNA, 25 bp, Saccharomyces pastorianus
caacgttagttttatcgccactgat

SEQ ID NO: 27722 - DNA, 25 bp, Saccharomyces pastorianus
aaacgcactgcatttcgaagacgct

SEQ ID NO: 27723 - DNA, 25 bp, Saccharomyces pastorianus
gtttccaatggtgttccgcaactaa

SEQ ID NO: 27724 - DNA, 25 bp, Saccharomyces pastorianus
aggtcactgaatttgcccaacgttt

SEQ ID NO: 27725 - DNA, 25 bp, Saccharomyces pastorianus
gagcctctgagatcttggctctgaa

SEQ ID NO: 27726 - DNA, 25 bp, Saccharomyces pastorianus
tttggcccagttagttgttcgtgat

SEQ ID NO: 27727 - DNA, 25 bp, Saccharomyces pastorianus
ggagaatcctatgcgccattgggta

SEQ ID NO: 27728 - DNA, 25 bp, Saccharomyces pastorianus
atgtcttttatgcttcttggtggat

SEQ ID NO: 27729 - DNA, 25 bp, Saccharomyces pastorianus
acagcacggatgtcgattcttcggg

SEQ ID NO: 27730 - DNA, 25 bp, Saccharomyces pastorianus
tttcgctgccgacatttatgctatg

SEQ ID NO: 27731 - DNA, 25 bp, Saccharomyces pastorianus
caagcacgctgctggtactaacagt

SEQ ID NO: 27732 - DNA, 25 bp, Saccharomyces pastorianus
tatttccaagttagactggcccggg

SEQ ID NO: 27733 - DNA, 25 bp, Saccharomyces pastorianus
gcacgccgatgcatacagatatcct

SEQ ID NO: 27734 - DNA, 25 bp, Saccharomyces pastorianus
gattcgcctgagatgctgttgttca

SEQ ID NO: 27735 - DNA, 25 bp, Saccharomyces pastorianus
acccgatatcggacatttgctacag

SEQ ID NO: 27736 - DNA, 25 bp, Saccharomyces pastorianus
catctgtcgttatcatccttcaaaa

SEQ ID NO: 27737 - DNA, 25 bp, Saccharomyces pastorianus
gatctcactggcattcacaagcacg

SEQ ID NO: 27738 - DNA, 25 bp, Saccharomyces pastorianus
tgctgttccatgctctgggtgatga

SEQ ID NO: 27739 - DNA, 25 bp, Saccharomyces pastorianus
ctggaggacttggagttcggttcta

SEQ ID NO: 27740 - DNA, 25 bp, Saccharomyces pastorianus
cataaaccttccgtattcttgcctt

SEQ ID NO: 27741 - DNA, 25 bp, Saccharomyces pastorianus
ataccgtttatgacatcgtttcaca

SEQ ID NO: 27742 - DNA, 25 bp, Saccharomyces pastorianus
gagtcactctgataatgttccaaag

SEQ ID NO: 27743 - DNA, 25 bp, Saccharomyces pastorianus
ttcttgccttcaaacgaaccgctaa

SEQ ID NO: 27744 - DNA, 25 bp, Saccharomyces pastorianus
agagaacaagcagcccacggtctat

SEQ ID NO: 27745 - DNA, 25 bp, Saccharomyces pastorianus
aaaacaagtctgtcaccgagtgcct

SEQ ID NO: 27746 - DNA, 25 bp, Saccharomyces pastorianus
aaactgattcaacttccactggtcc

SEQ ID NO: 27747 - DNA, 25 bp, Saccharomyces pastorianus
taggtggtcctatcctaacgaaaag

SEQ ID NO: 27748 - DNA, 25 bp, Saccharomyces pastorianus
gtttcacaatccttgctcgatgaca

SEQ ID NO: 27749 - DNA, 25 bp, Saccharomyces pastorianus
aaacccttagccaacgatgatcaga

SEQ ID NO: 27750 - DNA, 25 bp, Saccharomyces pastorianus
atatcctcgatcagctatgcggtgg

SEQ ID NO: 27751 - DNA, 25 bp, Saccharomyces pastorianus
ataattctatgtattgcgctcggca

SEQ ID NO: 27752 - DNA, 25 bp, Saccharomyces pastorianus
agcgaatctattccatgtgagcggg

SEQ ID NO: 27753 - DNA, 25 bp, Saccharomyces pastorianus
tgcggtggcatataccaagcatcaa

SEQ ID NO: 27754 - DNA, 25 bp, Saccharomyces pastorianus
ggaggtgtattttctatctagcgat

SEQ ID NO: 27755 - DNA, 25 bp, Saccharomyces pastorianus
ggcgatcatccaatacgtgtcgatt

SEQ ID NO: 27756 - DNA, 25 bp, Saccharomyces pastorianus
gatagcgttcgggatcatcagtata

SEQ ID NO: 27757 - DNA, 25 bp, Saccharomyces pastorianus
gacagttcattaacgtgggcggtat

SEQ ID NO: 27758 - DNA, 25 bp, Saccharomyces pastorianus
atacgaatatcctcaagaaccccac

SEQ ID NO: 27759 - DNA, 25 bp, Saccharomyces pastorianus
gggctcgtgattcttttcattgaaa

SEQ ID NO: 27760 - DNA, 25 bp, Saccharomyces pastorianus
tcgattgcggtgatggccacgagtt

SEQ ID NO: 27761 - DNA, 25 bp, Saccharomyces pastorianus
ggcaccgtgatagcgatgacttgat

SEQ ID NO: 27762 - DNA, 25 bp, Saccharomyces pastorianus
gggcgcaactactactccagaagat

SEQ ID NO: 27763 - DNA, 25 bp, Saccharomyces pastorianus
gcgaggaaaccccttgtgaggacta

SEQ ID NO: 27764 - DNA, 25 bp, Saccharomyces pastorianus
ttcagggcttactcgatgatcccat

SEQ ID NO: 27765 - DNA, 25 bp, Saccharomyces pastorianus
gatggcaccgatccgaaactaaaca

SEQ ID NO: 27766 - DNA, 25 bp, Saccharomyces pastorianus
gatatttccggctatttgaagttcc

SEQ ID NO: 27767 - DNA, 25 bp, Saccharomyces pastorianus
ggttctcagtacctcaacggataaa

SEQ ID NO: 27768 - DNA, 25 bp, Saccharomyces pastorianus
aagtttccaccgtctcagttgaggg

SEQ ID NO: 27769 - DNA, 25 bp, Saccharomyces pastorianus
cattccaagttcatttcgctacagc

SEQ ID NO: 27770 - DNA, 25 bp, Saccharomyces pastorianus
agtgccctggactggcattcactga

SEQ ID NO: 27771 - DNA, 25 bp, Saccharomyces pastorianus
accgctacatatgcccgtatcaaga

SEQ ID NO: 27772 - DNA, 25 bp, Saccharomyces pastorianus
gaagcagccaatttgccgtcaacag

SEQ ID NO: 27773 - DNA, 25 bp, Saccharomyces pastorianus
gagcacctgttgcaacaagcttcag

SEQ ID NO: 27774 - DNA, 25 bp, Saccharomyces pastorianus
gaattcattatcaagagcacctgtt

SEQ ID NO: 27775 - DNA, 25 bp, Saccharomyces pastorianus
taatggacgatgtgcaggaccaaat

SEQ ID NO: 27776 - DNA, 25 bp, Saccharomyces pastorianus
gttgccatcgcggtctaaagaagaa

SEQ ID NO: 27777 - DNA, 25 bp, Saccharomyces pastorianus
gaaggacagacagcttgatacaagt

SEQ ID NO: 27778 - DNA, 25 bp, Saccharomyces pastorianus
gagttgatacgagctcatcctaaaa

SEQ ID NO: 27779 - DNA, 25 bp, Saccharomyces pastorianus
gaaacacagtttatcaatgggctga

SEQ ID NO: 27780 - DNA, 25 bp, Saccharomyces pastorianus
gcaacaagcttcagatcagctcatt

SEQ ID NO: 27781 - DNA, 25 bp, Saccharomyces pastorianus
aacagaagggttgccatcgcggtct

SEQ ID NO: 27782 - DNA, 25 bp, Saccharomyces pastorianus
gaatattaaggtgcggttcctattg

SEQ ID NO: 27783 - DNA, 25 bp, Saccharomyces pastorianus
gaatcaccattgatggccagcttta

SEQ ID NO: 27784 - DNA, 25 bp, Saccharomyces pastorianus
aaaaatgctggctcaggtaaacctg

SEQ ID NO: 27785 - DNA, 25 bp, Saccharomyces pastorianus
tcctccagtacaatcgacttcttta

SEQ ID NO: 27786 - DNA, 25 bp, Saccharomyces pastorianus
ttagtccaggtgatgaaaagctttc

SEQ ID NO: 27787 - DNA, 25 bp, Saccharomyces pastorianus
attgcagtcgcaggaaattcatact

SEQ ID NO: 27788 - DNA, 25 bp, Saccharomyces pastorianus
gaaactctctggtatttcaaatact

SEQ ID NO: 27789 - DNA, 25 bp, Saccharomyces pastorianus
aaagttgtgttgctagatccaaaac

SEQ ID NO: 27790 - DNA, 25 bp, Saccharomyces pastorianus
gatccgcctatcgacaaagttgtgt

SEQ ID NO: 27791 - DNA, 25 bp, Saccharomyces pastorianus
aggtggtttggcaatcgatccgcct

SEQ ID NO: 27792 - DNA, 25 bp, Saccharomyces pastorianus
ataatttgaatttcctcctggccaa

SEQ ID NO: 27793 - DNA, 25 bp, Saccharomyces pastorianus
ggattctatgatctcttctaactta

SEQ ID NO: 27794 - DNA, 25 bp, Saccharomyces pastorianus
tttctgtttcggaagccgccatctc

SEQ ID NO: 27795 - DNA, 25 bp, Saccharomyces pastorianus
agtggccccaatactatgtgccggt

SEQ ID NO: 27796 - DNA, 25 bp, Saccharomyces pastorianus
gttggtttgccagccaatgcctacg

SEQ ID NO: 27797 - DNA, 25 bp, Saccharomyces pastorianus
taaaagccggtgaatgggttgccat

SEQ ID NO: 27798 - DNA, 25 bp, Saccharomyces pastorianus
aatgcctacgtcaagtccgaggtct

SEQ ID NO: 27799 - DNA, 25 bp, Saccharomyces pastorianus
acgtgagaccaaccggtactgtcgt

SEQ ID NO: 27800 - DNA, 25 bp, Saccharomyces pastorianus
atggtctccgacatccaagaagcta

SEQ ID NO: 27801 - DNA, 25 bp, Saccharomyces pastorianus
gtccgaggtcttttctcatgttatc

SEQ ID NO: 27802 - DNA, 25 bp, Saccharomyces pastorianus
ttaggttctctagccgttcaatatg

SEQ ID NO: 27803 - DNA, 25 bp, Saccharomyces pastorianus
actgacttagctgaagtggccccaa

SEQ ID NO: 27804 - DNA, 25 bp, Saccharomyces pastorianus
catctctttatccacgcaatacgtg

SEQ ID NO: 27805 - DNA, 25 bp, Saccharomyces pastorianus
atcgcaaagagatcagctgaccgtg

SEQ ID NO: 27806 - DNA, 25 bp, Saccharomyces pastorianus
acaaggtgggtgtcgatgcaatctt

SEQ ID NO: 27807 - DNA, 25 bp, Saccharomyces pastorianus
tacactatcttgcaaccaggttcac

SEQ ID NO: 27808 - DNA, 25 bp, Saccharomyces pastorianus
tagcagtttctcaacacctttagcc

SEQ ID NO: 27809 - DNA, 25 bp, Saccharomyces pastorianus
tgggaaagactataccgttggcgaa

SEQ ID NO: 27810 - DNA, 25 bp, Saccharomyces pastorianus
aggcttgttgcaacccttggacaaa

SEQ ID NO: 27811 - DNA, 25 bp, Saccharomyces pastorianus
tgttgtttcggctcttaaggcagaa

SEQ ID NO: 27812 - DNA, 25 bp, Saccharomyces pastorianus
aggcctctgctttttactctattaa

SEQ ID NO: 27813 - DNA, 25 bp, Saccharomyces pastorianus
ggaggtctaaactggattacactat

SEQ ID NO: 27814 - DNA, 25 bp, Saccharomyces pastorianus
gaagggtctgcgtgcgtactacatc

SEQ ID NO: 27815 - DNA, 25 bp, Saccharomyces pastorianus
aatgcctccgtcaatgagattgctg

SEQ ID NO: 27816 - DNA, 25 bp, Saccharomyces pastorianus
ggtctttagtgcaggcgcaggttac

SEQ ID NO: 27817 - DNA, 25 bp, Saccharomyces pastorianus
tagtgagattgctgccgccatcaag

SEQ ID NO: 27818 - DNA, 25 bp, Saccharomyces pastorianus
tggcttctttcatcacacaaacttt

SEQ ID NO: 27819 - DNA, 25 bp, Saccharomyces pastorianus
acagtagcagtttcgcaacaccatt

SEQ ID NO: 27820 - DNA, 25 bp, Saccharomyces pastorianus
atcttgcaaccaggcacgctggagt

SEQ ID NO: 27821 - DNA, 25 bp, Saccharomyces pastorianus
aaaggcctctggtctttactctatc

SEQ ID NO: 27822 - DNA, 25 bp, Saccharomyces pastorianus
gaagactatacctttggtcaacggt

SEQ ID NO: 27823 - DNA, 25 bp, Saccharomyces pastorianus
ctggagtcaaacgagggcaccggtt

SEQ ID NO: 27824 - DNA, 25 bp, Saccharomyces pastorianus
gatatagaaacttcctccgctagtg

SEQ ID NO: 27825 - DNA, 25 bp, Saccharomyces pastorianus
gaagctccaagttagattacaccat

SEQ ID NO: 27826 - DNA, 25 bp, Saccharomyces pastorianus
ggagggtttgcgtgagtactacatc

SEQ ID NO: 27827 - DNA, 25 bp, Saccharomyces pastorianus
ggttctgcagttagcttgagtcaaa

SEQ ID NO: 27828 - DNA, 25 bp, Saccharomyces pastorianus
aatcatgttgcggttggtctggaag

SEQ ID NO: 27829 - DNA, 25 bp, Saccharomyces pastorianus
gtcgagatgggctttccataccagt

SEQ ID NO: 27830 - DNA, 25 bp, Saccharomyces pastorianus
atattttcatctactctgtcaagag

SEQ ID NO: 27831 - DNA, 25 bp, Saccharomyces pastorianus
aaagccttcctacgtatcgatttca

SEQ ID NO: 27832 - DNA, 25 bp, Saccharomyces pastorianus
ggctccctagataccaatattttca

SEQ ID NO: 27833 - DNA, 25 bp, Saccharomyces pastorianus
gaggaagaccttgttgccactggct

SEQ ID NO: 27834 - DNA, 25 bp, Saccharomyces pastorianus
gaattaaaaactcctctccgtgcaa

SEQ ID NO: 27835 - DNA, 25 bp, Saccharomyces pastorianus
aatttcatggagacctgccgctaac

SEQ ID NO: 27836 - DNA, 25 bp, Saccharomyces pastorianus
gtattgaattcgttcaccggagaga

SEQ ID NO: 27837 - DNA, 25 bp, Saccharomyces pastorianus
ggttgaagtcaccaggttctgcagt

SEQ ID NO: 27838 - DNA, 25 bp, Saccharomyces pastorianus
ttgaccaaatgacttttttccgttg

SEQ ID NO: 27839 - DNA, 25 bp, Saccharomyces pastorianus
caagatttttgagtcgtaaccagat

SEQ ID NO: 27840 - DNA, 25 bp, Saccharomyces pastorianus
aacggatcggatttccaggacagga

SEQ ID NO: 27841 - DNA, 25 bp, Saccharomyces pastorianus
gatacagttatcacgaacggatcgg

SEQ ID NO: 27842 - DNA, 25 bp, Saccharomyces pastorianus
gatcgtctttcccaagaatcttaag

SEQ ID NO: 27843 - DNA, 25 bp, Saccharomyces pastorianus
atttccacgggttcagagataatcc

SEQ ID NO: 27844 - DNA, 25 bp, Saccharomyces pastorianus
gacttttttccgttgtcaagcatta

SEQ ID NO: 27845 - DNA, 25 bp, Saccharomyces pastorianus
gtaacgttattgtaccaagagcatt

SEQ ID NO: 27846 - DNA, 25 bp, Saccharomyces pastorianus
gggctttaaaccacattagactaga

SEQ ID NO: 27847 - DNA, 25 bp, Saccharomyces pastorianus
tcaagcattagtttggcagtccgtt

SEQ ID NO: 27848 - DNA, 25 bp, Saccharomyces pastorianus
gaatcttaagtccttgacgatgaag

SEQ ID NO: 27849 - DNA, 25 bp, Saccharomyces pastorianus
aatttcgcagctggcggtgtagcta

SEQ ID NO: 27850 - DNA, 25 bp, Saccharomyces pastorianus
gagggtgccagtttccttgttgaaa

SEQ ID NO: 27851 - DNA, 25 bp, Saccharomyces pastorianus
actggtgatgtctctgaagcggtca

SEQ ID NO: 27852 - DNA, 25 bp, Saccharomyces pastorianus
gtatttgtcggttcaggaatcttca

SEQ ID NO: 27853 - DNA, 25 bp, Saccharomyces pastorianus
aattgccggtggtgaatttcgcagc

SEQ ID NO: 27854 - DNA, 25 bp, Saccharomyces pastorianus
ttgaagctaccacccatttcgataa

SEQ ID NO: 27855 - DNA, 25 bp, Saccharomyces pastorianus
gggcggtgtatctatcgaatccatt

SEQ ID NO: 27856 - DNA, 25 bp, Saccharomyces pastorianus
aaagttggccactgccgtggttgaa

SEQ ID NO: 27857 - DNA, 25 bp, Saccharomyces pastorianus
gcagctaggctgtgacggtgtattt

SEQ ID NO: 27858 - DNA, 25 bp, Saccharomyces pastorianus
gataatcccgccaaattactggaag

SEQ ID NO: 27859 - DNA, 25 bp, Saccharomyces pastorianus
ggaatcttcaaatcatctaaccctg

SEQ ID NO: 27860 - DNA, 25 bp, Saccharomyces pastorianus
caggcagactatcttctatatctaa

SEQ ID NO: 27861 - DNA, 25 bp, Saccharomyces pastorianus
aaaggaactctatcccggaagcaat

SEQ ID NO: 27862 - DNA, 25 bp, Saccharomyces pastorianus
tagcttcgaggacggccgaatccaa

SEQ ID NO: 27863 - DNA, 25 bp, Saccharomyces pastorianus
ttatcttatagacaccccaggtatc

SEQ ID NO: 27864 - DNA, 25 bp, Saccharomyces pastorianus
aggtatcatattcgaccctgaggca

SEQ ID NO: 27865 - DNA, 25 bp, Saccharomyces pastorianus
ggcgagctctcatacgaagggttat

SEQ ID NO: 27866 - DNA, 25 bp, Saccharomyces pastorianus
atagacccgatattccaggcagact

SEQ ID NO: 27867 - DNA, 25 bp, Saccharomyces pastorianus
cctgaggcactgttgggtaacgatg

SEQ ID NO: 27868 - DNA, 25 bp, Saccharomyces pastorianus
gaagcaatgattcacctacgaacga

SEQ ID NO: 27869 - DNA, 25 bp, Saccharomyces pastorianus
aagagcgatctttcacgagcatgat

SEQ ID NO: 27870 - DNA, 25 bp, Saccharomyces pastorianus
gttcctggccgagtttcagatcata

SEQ ID NO: 27871 - DNA, 25 bp, Saccharomyces pastorianus
ccggtggtcactttccatcaagaaa

SEQ ID NO: 27872 - DNA, 25 bp, Saccharomyces pastorianus
cgtgccattcaaatcgtcgacaagg

SEQ ID NO: 27873 - DNA, 25 bp, Saccharomyces pastorianus
gaacgatggtctccaacttggctgg

SEQ ID NO: 27874 - DNA, 25 bp, Saccharomyces pastorianus
ggagaacacttccacttccaaggaa

SEQ ID NO: 27875 - DNA, 25 bp, Saccharomyces pastorianus
ataatttgcctgatactgttgtttg

SEQ ID NO: 27876 - DNA, 25 bp, Saccharomyces pastorianus
gaaatcgccaatccggagttgacca

SEQ ID NO: 27877 - DNA, 25 bp, Saccharomyces pastorianus
catcactttggctcctggtaagaaa

SEQ ID NO: 27878 - DNA, 25 bp, Saccharomyces pastorianus
ggaacgctcatcaattgctttgcaa

SEQ ID NO: 27879 - DNA, 25 bp, Saccharomyces pastorianus
taagagtgacccaccaacggttcaa

SEQ ID NO: 27880 - DNA, 25 bp, Saccharomyces pastorianus
gaatgtcagtcctgaacgtgccatt

SEQ ID NO: 27881 - DNA, 25 bp, Saccharomyces pastorianus
ggtcacgttcatgatttcatcactt

SEQ ID NO: 27882 - DNA, 25 bp, Saccharomyces pastorianus
gaatgagatcttaggcgtacgccaa

SEQ ID NO: 27883 - DNA, 25 bp, Saccharomyces pastorianus
gtacgccaatgtgccaatttctcat

SEQ ID NO: 27884 - DNA, 25 bp, Saccharomyces pastorianus
atttctaccaccgtgcctgatgaaa

SEQ ID NO: 27885 - DNA, 25 bp, Saccharomyces pastorianus
agcactttcgctccgaatatttcta

SEQ ID NO: 27886 - DNA, 25 bp, Saccharomyces pastorianus
aatttgccaagtgccgtcgatgtaa

SEQ ID NO: 27887 - DNA, 25 bp, Saccharomyces pastorianus
acgacggcagctgacgtttcaaatt

SEQ ID NO: 27888 - DNA, 25 bp, Saccharomyces pastorianus
atactccaaatgaaccgggctcctt

SEQ ID NO: 27889 - DNA, 25 bp, Saccharomyces pastorianus
tattcgaacgttatcgtgtgcccaa

SEQ ID NO: 27890 - DNA, 25 bp, Saccharomyces pastorianus
ttaagatccactaacactaccacag

SEQ ID NO: 27891 - DNA, 25 bp, Saccharomyces pastorianus
gtttcaaattctaccagcactttcg

SEQ ID NO: 27892 - DNA, 25 bp, Saccharomyces pastorianus
tcgtgtgcccaaacccaatgataat

SEQ ID NO: 27893 - DNA, 25 bp, Saccharomyces pastorianus
cttttggtacgggttctaatcatgt

SEQ ID NO: 27894 - DNA, 25 bp, Saccharomyces pastorianus
gttgaccaactggaagcttttgtct

SEQ ID NO: 27895 - DNA, 25 bp, Saccharomyces pastorianus
gcttttgtctccaaatctggtgtga

SEQ ID NO: 27896 - DNA, 25 bp, Saccharomyces pastorianus
ttacaacaagcaccacccagaaaag

SEQ ID NO: 27897 - DNA, 25 bp, Saccharomyces pastorianus
gttcttcgggcgctacgattagatt

SEQ ID NO: 27898 - DNA, 25 bp, Saccharomyces pastorianus
aaaagatggtgtttgggccgtcatg

SEQ ID NO: 27899 - DNA, 25 bp, Saccharomyces pastorianus
attgtctggtacaggttcttcgggc

SEQ ID NO: 27900 - DNA, 25 bp, Saccharomyces pastorianus
taaatacggtcgtactttcttcact

SEQ ID NO: 27901 - DNA, 25 bp, Saccharomyces pastorianus
aaaagttatccatctgcggtgaaga

SEQ ID NO: 27902 - DNA, 25 bp, Saccharomyces pastorianus
gaatccgtgaatgttaccgactgtg

SEQ ID NO: 27903 - DNA, 25 bp, Saccharomyces pastorianus
ttctgtgtccgaccatcaaggtttg

SEQ ID NO: 27904 - DNA, 25 bp, Saccharomyces pastorianus
atatctaacatgtctcaaggcgagt

SEQ ID NO: 27905 - DNA, 25 bp, Saccharomyces pastorianus
acagctccgatgtggaggccgtcaa

SEQ ID NO: 27906 - DNA, 25 bp, Saccharomyces pastorianus
aagacacaagttatgttctcacaag

SEQ ID NO: 27907 - DNA, 25 bp, Saccharomyces pastorianus
ggagggcagattacccgcagacata

SEQ ID NO: 27908 - DNA, 25 bp, Saccharomyces pastorianus
tatcgggcacccaagacggagcagc

SEQ ID NO: 27909 - DNA, 25 bp, Saccharomyces pastorianus
ttctcacaagaatatcgggcaccca

SEQ ID NO: 27910 - DNA, 25 bp, Saccharomyces pastorianus
caaggcgagtttctgaggctttata

SEQ ID NO: 27911 - DNA, 25 bp, Saccharomyces pastorianus
tatgtcttcggtggacagctccgat

SEQ ID NO: 27912 - DNA, 25 bp, Saccharomyces pastorianus
ggagcagcctatgccggagaacatg

SEQ ID NO: 27913 - DNA, 25 bp, Saccharomyces pastorianus
atgagacggtcttctatgtcttcgg

SEQ ID NO: 27914 - DNA, 25 bp, Saccharomyces pastorianus
gtgatccaagtttgtacggcgggaa

SEQ ID NO: 27915 - DNA, 25 bp, Saccharomyces pastorianus
aactagccgacgctatgggtctaaa

SEQ ID NO: 27916 - DNA, 25 bp, Saccharomyces pastorianus
gttccagcaggcaagggtctagatg

SEQ ID NO: 27917 - DNA, 25 bp, Saccharomyces pastorianus
tgttttgccaatggttccagcaggc

SEQ ID NO: 27918 - DNA, 25 bp, Saccharomyces pastorianus
tacaatgggttacggtcttccagcc

SEQ ID NO: 27919 - DNA, 25 bp, Saccharomyces pastorianus
cgctcaagtcgctaaaccagattct

SEQ ID NO: 27920 - DNA, 25 bp, Saccharomyces pastorianus
caaagggccctgtcttgcttgaagt

SEQ ID NO: 27921 - DNA, 25 bp, Saccharomyces pastorianus
gagttcatatactttgatccagagg

SEQ ID NO: 27922 - DNA, 25 bp, Saccharomyces pastorianus
ggtgatgcatctttcaacatgacct

SEQ ID NO: 27923 - DNA, 25 bp, Saccharomyces pastorianus
gaatttgtttccacaaagggccctg

SEQ ID NO: 27924 - DNA, 25 bp, Saccharomyces pastorianus
gaatcgttattctcacacacatcag

SEQ ID NO: 27925 - DNA, 25 bp, Saccharomyces pastorianus
gttatagtcacaaccggtgtcgggc

SEQ ID NO: 27926 - DNA, 25 bp, Saccharomyces pastorianus
ccatagttacagcaggaggacccga

SEQ ID NO: 27927 - DNA, 25 bp, Saccharomyces pastorianus
gggaagactagcaacaccggagaac

SEQ ID NO: 27928 - DNA, 25 bp, Saccharomyces pastorianus
gaagatctgtatacatttaccatag

SEQ ID NO: 27929 - DNA, 25 bp, Saccharomyces pastorianus
gagcacgagagaacaattccagcag

SEQ ID NO: 27930 - DNA, 25 bp, Saccharomyces pastorianus
tgaaagaatgccctgcgttctggaa

SEQ ID NO: 27931 - DNA, 25 bp, Saccharomyces pastorianus
gaaacaagtataggcgatcgagtaa

SEQ ID NO: 27932 - DNA, 25 bp, Saccharomyces pastorianus
gcgttctggaacctggcaccaagag

SEQ ID NO: 27933 - DNA, 25 bp, Saccharomyces pastorianus
tattgaagccggagtacgatgaatc

SEQ ID NO: 27934 - DNA, 25 bp, Saccharomyces pastorianus
atgcttggatggatgtgactaagac

SEQ ID NO: 27935 - DNA, 25 bp, Saccharomyces pastorianus
gacccgaagagttagaatggctgca

SEQ ID NO: 27936 - DNA, 25 bp, Saccharomyces pastorianus
cctggcaccaagagttgggatgctt

SEQ ID NO: 27937 - DNA, 25 bp, Saccharomyces pastorianus
tccgccacgatcttgatgtcataag

SEQ ID NO: 27938 - DNA, 25 bp, Saccharomyces pastorianus
agaagagctggttagtctacttaag

SEQ ID NO: 27939 - DNA, 25 bp, Saccharomyces pastorianus
tgtatctacggcagacggttccgaa

SEQ ID NO: 27940 - DNA, 25 bp, Saccharomyces pastorianus
tctacttaaggatttggacgggcta

SEQ ID NO: 27941 - DNA, 25 bp, Saccharomyces pastorianus
gatcaaaataccatcactccagagg

SEQ ID NO: 27942 - DNA, 25 bp, Saccharomyces pastorianus
aaagatgatcgaatccgagctggaa

SEQ ID NO: 27943 - DNA, 25 bp, Saccharomyces pastorianus
atagacgttttacccttggatgaca

SEQ ID NO: 27944 - DNA, 25 bp, Saccharomyces pastorianus
gaaatatcgtttctcttcgtagtga

SEQ ID NO: 27945 - DNA, 25 bp, Saccharomyces pastorianus
aaaacatgctcgagagtcctgccga

SEQ ID NO: 27946 - DNA, 25 bp, Saccharomyces pastorianus
ctttaaagtatctgagtcgggcaaa

SEQ ID NO: 27947 - DNA, 25 bp, Saccharomyces pastorianus
gagagtcctgccgaatttctgaaag

SEQ ID NO: 27948 - DNA, 25 bp, Saccharomyces pastorianus
ataaaccgagtctacttgtgccaaa

SEQ ID NO: 27949 - DNA, 25 bp, Saccharomyces pastorianus
gatgcagacatcctttcaagaccta

SEQ ID NO: 27950 - DNA, 25 bp, Saccharomyces pastorianus
gaaatgagttggtacctctcttcct

SEQ ID NO: 27951 - DNA, 25 bp, Saccharomyces pastorianus
tcggattttacgctttcaccattac

SEQ ID NO: 27952 - DNA, 25 bp, Saccharomyces pastorianus
ttgcatcgtatatccggtgtcttat

SEQ ID NO: 27953 - DNA, 25 bp, Saccharomyces pastorianus
tagaccttcggttgggcaatcgtga

SEQ ID NO: 27954 - DNA, 25 bp, Saccharomyces pastorianus
ggtgtcttattagctctcggatttt

SEQ ID NO: 27955 - DNA, 25 bp, Saccharomyces pastorianus
gatctgtcgttttagctggtacgct

SEQ ID NO: 27956 - DNA, 25 bp, Saccharomyces pastorianus
catctgaccatttacgagcctgaaa

SEQ ID NO: 27957 - DNA, 25 bp, Saccharomyces pastorianus
gcaggatacttgtttgcgttccact

SEQ ID NO: 27958 - DNA, 25 bp, Saccharomyces pastorianus
aatttcttctccattctttttgcac

SEQ ID NO: 27959 - DNA, 25 bp, Saccharomyces pastorianus
ccctgttggatttgttttctcctga

SEQ ID NO: 27960 - DNA, 25 bp, Saccharomyces pastorianus
aagagacacatgacgccctgttgga

SEQ ID NO: 27961 - DNA, 25 bp, Saccharomyces pastorianus
aaattgacagcagcgaccacggcga

SEQ ID NO: 27962 - DNA, 25 bp, Saccharomyces pastorianus
acctctctggagattacgaaccttc

SEQ ID NO: 27963 - DNA, 25 bp, Saccharomyces pastorianus
attcctctcaggttccacactaaat

SEQ ID NO: 27964 - DNA, 25 bp, Saccharomyces pastorianus
tgctttgccctgtgcgaagattgta

SEQ ID NO: 27965 - DNA, 25 bp, Saccharomyces pastorianus
ttgagtcactctgggattccgatga

SEQ ID NO: 27966 - DNA, 25 bp, Saccharomyces pastorianus
ctttgatctatcttgtgctgtgtgc

SEQ ID NO: 27967 - DNA, 25 bp, Saccharomyces pastorianus
gatcgtttcaactagtcatatcctt

SEQ ID NO: 27968 - DNA, 25 bp, Saccharomyces pastorianus
gaaccgtccggtgaagactgtgact

SEQ ID NO: 27969 - DNA, 25 bp, Saccharomyces pastorianus
atactatggccttgtcgatgctttg

SEQ ID NO: 27970 - DNA, 25 bp, Saccharomyces pastorianus
ctatcttcagatgcgtttttcccat

SEQ ID NO: 27971 - DNA, 25 bp, Saccharomyces pastorianus
atacattgctgctccatctggctca

SEQ ID NO: 27972 - DNA, 25 bp, Saccharomyces pastorianus
aatccaactcagtatgttacgcaag

SEQ ID NO: 27973 - DNA, 25 bp, Saccharomyces pastorianus
ttaaccaatgtatcgctatcttcag

SEQ ID NO: 27974 - DNA, 25 bp, Saccharomyces pastorianus
ccgagcaggcggtaattgacttgac

SEQ ID NO: 27975 - DNA, 25 bp, Saccharomyces pastorianus
tggtcaacaatccagaatccactgt

SEQ ID NO: 27976 - DNA, 25 bp, Saccharomyces pastorianus
acaaagtcgtcttttcagctgccga

SEQ ID NO: 27977 - DNA, 25 bp, Saccharomyces pastorianus
ttcccattccctgataacgtttaca

SEQ ID NO: 27978 - DNA, 25 bp, Saccharomyces pastorianus
ttcgtaactggtcagattccaactg

SEQ ID NO: 27979 - DNA, 25 bp, Saccharomyces pastorianus
gagccgtcaaatctggtgtcaaata

SEQ ID NO: 27980 - DNA, 25 bp, Saccharomyces pastorianus
tgacagttgctaccatcgctttgaa

SEQ ID NO: 27981 - DNA, 25 bp, Saccharomyces pastorianus
ttgggttacaaagctaagcaaggtt

SEQ ID NO: 27982 - DNA, 25 bp, Saccharomyces pastorianus
tagaagattgggttacaaagctaag

SEQ ID NO: 27983 - DNA, 25 bp, Saccharomyces pastorianus
attgggttacaaagctaagcaaggt

SEQ ID NO: 27984 - DNA, 25 bp, Saccharomyces pastorianus
aagattgggttacaaagctaagcaa

SEQ ID NO: 27985 - DNA, 25 bp, Saccharomyces pastorianus
tgggttacaaagctaagcaaggttt

SEQ ID NO: 27986 - DNA, 25 bp, Saccharomyces pastorianus
agaagattgggttacaaagctaagc

SEQ ID NO: 27987 - DNA, 25 bp, Saccharomyces pastorianus
ctagaagattgggttacaaagctaa

SEQ ID NO: 27988 - DNA, 25 bp, Saccharomyces pastorianus
gattgggttacaaagctaagcaagg

SEQ ID NO: 27989 - DNA, 25 bp, Saccharomyces pastorianus
gaagattgggttacaaagctaagca

SEQ ID NO: 27990 - DNA, 25 bp, Saccharomyces pastorianus
agattgggttacaaagctaagcaag

SEQ ID NO: 27991 - DNA, 25 bp, Saccharomyces pastorianus
atggccagctcttcatccgtttcct

SEQ ID NO: 27992 - DNA, 25 bp, Saccharomyces pastorianus
aacaacagtgccgtagctgcctctt

SEQ ID NO: 27993 - DNA, 25 bp, Saccharomyces pastorianus
tgtccagaccaacagtgctctagtc

SEQ ID NO: 27994 - DNA, 25 bp, Saccharomyces pastorianus
tcttctgtctctgccagtgctagtg

SEQ ID NO: 27995 - DNA, 25 bp, Saccharomyces pastorianus
gtgctctagtcaacaacagtgccgt

SEQ ID NO: 27996 - DNA, 25 bp, Saccharomyces pastorianus
agtctcctggaagtacggtgccgtc

SEQ ID NO: 27997 - DNA, 25 bp, Saccharomyces pastorianus
agtacggtgccgtcatggctgccat

SEQ ID NO: 27998 - DNA, 25 bp, Saccharomyces pastorianus
agaacgccgccccaggtatggttgc

SEQ ID NO: 27999 - DNA, 25 bp, Saccharomyces pastorianus
agtgctagtgccagcgccaactcct

SEQ ID NO: 28000 - DNA, 25 bp, Saccharomyces pastorianus
tatggttgccaacccagtctcctgg

SEQ ID NO: 28001 - DNA, 25 bp, Saccharomyces pastorianus
gtaacagcactacctcttccaagaa

SEQ ID NO: 28002 - DNA, 25 bp, Saccharomyces pastorianus
gaaattgcttctaccgcgttaaacg

SEQ ID NO: 28003 - DNA, 25 bp, Saccharomyces pastorianus
gaaagcggttctcagtccaagatga

SEQ ID NO: 28004 - DNA, 25 bp, Saccharomyces pastorianus
ggcatcaagcccagttctatagaat

SEQ ID NO: 28005 - DNA, 25 bp, Saccharomyces pastorianus
cagctttgataatactctggctaag

SEQ ID NO: 28006 - DNA, 25 bp, Saccharomyces pastorianus
gcccaatatggacggttcaccttta

SEQ ID NO: 28007 - DNA, 25 bp, Saccharomyces pastorianus
gaagcattgctccaattgccaaaat

SEQ ID NO: 28008 - DNA, 25 bp, Saccharomyces pastorianus
gactcttgtctccacagaattagct

SEQ ID NO: 28009 - DNA, 25 bp, Saccharomyces pastorianus
ctggctaagtcgtatgaaccatctt

SEQ ID NO: 28010 - DNA, 25 bp, Saccharomyces pastorianus
acaccgaacttcgatgacacttcat

SEQ ID NO: 28011 - DNA, 25 bp, Saccharomyces pastorianus
atgagcgaactgactcttgtctcca

SEQ ID NO: 28012 - DNA, 25 bp, Saccharomyces pastorianus
acacttcatgcgtatccttttctga

SEQ ID NO: 28013 - DNA, 25 bp, Saccharomyces pastorianus
gaagagcatcctttagaagacgatt

SEQ ID NO: 28014 - DNA, 25 bp, Saccharomyces pastorianus
gatacgtcatttgcaaatttccaga

SEQ ID NO: 28015 - DNA, 25 bp, Saccharomyces pastorianus
atactgtttgttgagctgtgtcttt

SEQ ID NO: 28016 - DNA, 25 bp, Saccharomyces pastorianus
gtgtcactaacaagggatacgtcat

SEQ ID NO: 28017 - DNA, 25 bp, Saccharomyces pastorianus
gaaactggaggacacttttgctgat

SEQ ID NO: 28018 - DNA, 25 bp, Saccharomyces pastorianus
gattttcaggcaaagatgtcacaag

SEQ ID NO: 28019 - DNA, 25 bp, Saccharomyces pastorianus
gacgattctgattgtaatgggctta

SEQ ID NO: 28020 - DNA, 25 bp, Saccharomyces pastorianus
agtggcacggcatatttcatctggt

SEQ ID NO: 28021 - DNA, 25 bp, Saccharomyces pastorianus
gatgtggtgaattctcagtttgtta

SEQ ID NO: 28022 - DNA, 25 bp, Saccharomyces pastorianus
atgggcttaatgacaaacttgcaga

SEQ ID NO: 28023 - DNA, 25 bp, Saccharomyces pastorianus
ggtggagatttacctaattctgaag

SEQ ID NO: 28024 - DNA, 25 bp, Saccharomyces pastorianus
agaagtgccgttatcgcccttcgga

SEQ ID NO: 28025 - DNA, 25 bp, Saccharomyces pastorianus
catgcatattaacactgccaccata

SEQ ID NO: 28026 - DNA, 25 bp, Saccharomyces pastorianus
caagagtcccgaatacacaatcaga

SEQ ID NO: 28027 - DNA, 25 bp, Saccharomyces pastorianus
aggagatctcgcacattttgataaa

SEQ ID NO: 28028 - DNA, 25 bp, Saccharomyces pastorianus
gagccaaaggcaactggtttaagct

SEQ ID NO: 28029 - DNA, 25 bp, Saccharomyces pastorianus
gaagatctttctattgtgactggaa

SEQ ID NO: 28030 - DNA, 25 bp, Saccharomyces pastorianus
taaggatttggtttcgtatcaacaa

SEQ ID NO: 28031 - DNA, 25 bp, Saccharomyces pastorianus
gaatactctattggcatctcattga

SEQ ID NO: 28032 - DNA, 25 bp, Saccharomyces pastorianus
cttgcaatccttgaatacttggttc

SEQ ID NO: 28033 - DNA, 25 bp, Saccharomyces pastorianus
agacgtggattaggctcattactta

SEQ ID NO: 28034 - DNA, 25 bp, Saccharomyces pastorianus
ccttcggattgattgggtacctgaa

SEQ ID NO: 28035 - DNA, 25 bp, Saccharomyces pastorianus
gtttttgcaccaatcgaaattcccg

SEQ ID NO: 28036 - DNA, 25 bp, Saccharomyces pastorianus
atccagatttgatcagtttcttgaa

SEQ ID NO: 28037 - DNA, 25 bp, Saccharomyces pastorianus
aaggtgccggttggactggaattct

SEQ ID NO: 28038 - DNA, 25 bp, Saccharomyces pastorianus
agcactgtttccacatcggagatga

SEQ ID NO: 28039 - DNA, 25 bp, Saccharomyces pastorianus
gatttgctgaaggtgtactctaagg

SEQ ID NO: 28040 - DNA, 25 bp, Saccharomyces pastorianus
ggatatctatcggagtcacttgaca

SEQ ID NO: 28041 - DNA, 25 bp, Saccharomyces pastorianus
agataagcgtcctgatttgctgaag

SEQ ID NO: 28042 - DNA, 25 bp, Saccharomyces pastorianus
gaaatttgccagcactgtttccaca

SEQ ID NO: 28043 - DNA, 25 bp, Saccharomyces pastorianus
aatattgctgcggtttgagggtttt

SEQ ID NO: 28044 - DNA, 25 bp, Saccharomyces pastorianus
tgagcttgacctggcaaaacctgat

SEQ ID NO: 28045 - DNA, 25 bp, Saccharomyces pastorianus
gggttgtatgaaacattcgccgata

SEQ ID NO: 28046 - DNA, 25 bp, Saccharomyces pastorianus
gaaacataagccagccatctctgtc

SEQ ID NO: 28047 - DNA, 25 bp, Saccharomyces pastorianus
gataacaccgtaaccttgtgggatt

SEQ ID NO: 28048 - DNA, 25 bp, Saccharomyces pastorianus
aaccagtcgctcagtatgacttcca

SEQ ID NO: 28049 - DNA, 25 bp, Saccharomyces pastorianus
tcccaccccagttattatttgttca

SEQ ID NO: 28050 - DNA, 25 bp, Saccharomyces pastorianus
aaaattggctatttgcttgcaagcg

SEQ ID NO: 28051 - DNA, 25 bp, Saccharomyces pastorianus
gacattcagtggtctcggacagaat

SEQ ID NO: 28052 - DNA, 25 bp, Saccharomyces pastorianus
gggtgccattacttctattgcattt

SEQ ID NO: 28053 - DNA, 25 bp, Saccharomyces pastorianus
gacagtttacaccaagcaatgccga

SEQ ID NO: 28054 - DNA, 25 bp, Saccharomyces pastorianus
atctctgtcaaagcctctaataccg

SEQ ID NO: 28055 - DNA, 25 bp, Saccharomyces pastorianus
gcgacagctgcttgtgacggatata

SEQ ID NO: 28056 - DNA, 25 bp, Saccharomyces pastorianus
gacacacttccagatgggtgactga

SEQ ID NO: 28057 - DNA, 25 bp, Saccharomyces pastorianus
aatggtagtcggtacgcttgcattt

SEQ ID NO: 28058 - DNA, 25 bp, Saccharomyces pastorianus
tgtccactccattgaaattccatgt

SEQ ID NO: 28059 - DNA, 25 bp, Saccharomyces pastorianus
aagcttcacaggatgctagtcagtg

SEQ ID NO: 28060 - DNA, 25 bp, Saccharomyces pastorianus
attgaagagtttgaggaccgcgata

SEQ ID NO: 28061 - DNA, 25 bp, Saccharomyces pastorianus
aaagaaattttgtccactccattga

SEQ ID NO: 28062 - DNA, 25 bp, Saccharomyces pastorianus
aatacatccgaggaactagagcgcg

SEQ ID NO: 28063 - DNA, 25 bp, Saccharomyces pastorianus
gaaatataccgtgatctgattaggg

SEQ ID NO: 28064 - DNA, 25 bp, Saccharomyces pastorianus
aattccatgtggagttttcaccaga

SEQ ID NO: 28065 - DNA, 25 bp, Saccharomyces pastorianus
atttggaactagtctgcatgtgtta

SEQ ID NO: 28066 - DNA, 25 bp, Saccharomyces pastorianus
ataagcggtagaatcactctttttt

SEQ ID NO: 28067 - DNA, 25 bp, Saccharomyces pastorianus
gaagcctgtgtttgtttcagagcta

SEQ ID NO: 28068 - DNA, 25 bp, Saccharomyces pastorianus
gccagcgctgcttcgaacacaaaga

SEQ ID NO: 28069 - DNA, 25 bp, Saccharomyces pastorianus
gattccgtcgatagcagcagcatca

SEQ ID NO: 28070 - DNA, 25 bp, Saccharomyces pastorianus
gaaactgtggtcctggtgcgaaaac

SEQ ID NO: 28071 - DNA, 25 bp, Saccharomyces pastorianus
ataaattacatctcttccaaccaac

SEQ ID NO: 28072 - DNA, 25 bp, Saccharomyces pastorianus
aagcgtccgaattgttaaccgccag

SEQ ID NO: 28073 - DNA, 25 bp, Saccharomyces pastorianus
actccccaagtcgttacagaatctg

SEQ ID NO: 28074 - DNA, 25 bp, Saccharomyces pastorianus
tcaacaactactcctcttctgaatt

SEQ ID NO: 28075 - DNA, 25 bp, Saccharomyces pastorianus
acaacaactcgaagtttcccgatct

SEQ ID NO: 28076 - DNA, 25 bp, Saccharomyces pastorianus
aagcgcgaccaccttcaagaatttg

SEQ ID NO: 28077 - DNA, 25 bp, Saccharomyces pastorianus
tctgtactcgataaccttaagggcc

SEQ ID NO: 28078 - DNA, 25 bp, Saccharomyces pastorianus
aaactgctcaaattcattcacccga

SEQ ID NO: 28079 - DNA, 25 bp, Saccharomyces pastorianus
atgcgtgcgggctattttacagaaa

SEQ ID NO: 28080 - DNA, 25 bp, Saccharomyces pastorianus
atttcataaacaactccggcactgc

SEQ ID NO: 28081 - DNA, 25 bp, Saccharomyces pastorianus
aaaagtaacttatcatcgtctccct

SEQ ID NO: 28082 - DNA, 25 bp, Saccharomyces pastorianus
gagccattgattcagccaacgatcg

SEQ ID NO: 28083 - DNA, 25 bp, Saccharomyces pastorianus
tacctacataccgagtactaccttg

SEQ ID NO: 28084 - DNA, 25 bp, Saccharomyces pastorianus
tcactacctctactcatttcataaa

SEQ ID NO: 28085 - DNA, 25 bp, Saccharomyces pastorianus
gaagctacaggttccaagactggac

SEQ ID NO: 28086 - DNA, 25 bp, Saccharomyces pastorianus
gtccatacggtacaagaaccctttg

SEQ ID NO: 28087 - DNA, 25 bp, Saccharomyces pastorianus
gatttcatcaccattccaaacagat

SEQ ID NO: 28088 - DNA, 25 bp, Saccharomyces pastorianus
cgtctcccttcaatttgattaccta

SEQ ID NO: 28089 - DNA, 25 bp, Saccharomyces pastorianus
atcgaattctgtttccactgtggag

SEQ ID NO: 28090 - DNA, 25 bp, Saccharomyces pastorianus
gttccaagtcttcaatgtgccgtat

SEQ ID NO: 28091 - DNA, 25 bp, Saccharomyces pastorianus
cgtcgatgacgtggttgggtttata

SEQ ID NO: 28092 - DNA, 25 bp, Saccharomyces pastorianus
gtccgagatgatacctactgtgaac

SEQ ID NO: 28093 - DNA, 25 bp, Saccharomyces pastorianus
acttggtacccattagagtgctgaa

SEQ ID NO: 28094 - DNA, 25 bp, Saccharomyces pastorianus
gccgtattccgagcacagtagtttt

SEQ ID NO: 28095 - DNA, 25 bp, Saccharomyces pastorianus
ctggcgacatgagcgaatcgtttgt

SEQ ID NO: 28096 - DNA, 25 bp, Saccharomyces pastorianus
aatcgtttgttcacttggtacccat

SEQ ID NO: 28097 - DNA, 25 bp, Saccharomyces pastorianus
tggatgccaactgcttaaaggacgt

SEQ ID NO: 28098 - DNA, 25 bp, Saccharomyces pastorianus
atttgtgatgccaagctcggttaaa

SEQ ID NO: 28099 - DNA, 25 bp, Saccharomyces pastorianus
acgaaaatttactcactggcgacat

SEQ ID NO: 28100 - DNA, 25 bp, Saccharomyces pastorianus
gatggagtcataactttggcctaaa

SEQ ID NO: 28101 - DNA, 25 bp, Saccharomyces pastorianus
tttttggcgccaccaactataccaa

SEQ ID NO: 28102 - DNA, 25 bp, Saccharomyces pastorianus
ggcggaattgttgctaggccaacca

SEQ ID NO: 28103 - DNA, 25 bp, Saccharomyces pastorianus
gcaccggaactaatttttggcgcca

SEQ ID NO: 28104 - DNA, 25 bp, Saccharomyces pastorianus
gatccttcggaaagattcaatgctt

SEQ ID NO: 28105 - DNA, 25 bp, Saccharomyces pastorianus
gaaatatgctctatgaacccaaact

SEQ ID NO: 28106 - DNA, 25 bp, Saccharomyces pastorianus
gaactaggtcatttatcgcctgatg

SEQ ID NO: 28107 - DNA, 25 bp, Saccharomyces pastorianus
atatatggtcttctgggtgcgtgat

SEQ ID NO: 28108 - DNA, 25 bp, Saccharomyces pastorianus
gctttgcaatgtttatgtagcccat

SEQ ID NO: 28109 - DNA, 25 bp, Saccharomyces pastorianus
aaatcttaggcaccccatcaaagca

SEQ ID NO: 28110 - DNA, 25 bp, Saccharomyces pastorianus
gaaacctggtctttaaaactgtgtg

SEQ ID NO: 28111 - DNA, 25 bp, Saccharomyces pastorianus
atctgttagtagaccctgaaacctg

SEQ ID NO: 28112 - DNA, 25 bp, Saccharomyces pastorianus
acttacgtgtatatggcctccaata

SEQ ID NO: 28113 - DNA, 25 bp, Saccharomyces pastorianus
ttgtccttattgtgcaactgccgat

SEQ ID NO: 28114 - DNA, 25 bp, Saccharomyces pastorianus
tggtaagaaggtccgccaacgctac

SEQ ID NO: 28115 - DNA, 25 bp, Saccharomyces pastorianus
ggtatatcccctgatacttacgtgt

SEQ ID NO: 28116 - DNA, 25 bp, Saccharomyces pastorianus
gatcacttcagatactattcgtcca

SEQ ID NO: 28117 - DNA, 25 bp, Saccharomyces pastorianus
aactggactcggtggtatatcccct

SEQ ID NO: 28118 - DNA, 25 bp, Saccharomyces pastorianus
taatcttctaacttccgaaccagca

SEQ ID NO: 28119 - DNA, 25 bp, Saccharomyces pastorianus
gggtcctagtggaacgcctattcaa

SEQ ID NO: 28120 - DNA, 25 bp, Saccharomyces pastorianus
tatcagcctcccacaaatcgtaaaa

SEQ ID NO: 28121 - DNA, 25 bp, Saccharomyces pastorianus
aaccagttgccttcttcggtgatca

SEQ ID NO: 28122 - DNA, 25 bp, Saccharomyces pastorianus
tgaacctcatttccctcatgatgaa

SEQ ID NO: 28123 - DNA, 25 bp, Saccharomyces pastorianus
ggtgctcaagactctattttcgcca

SEQ ID NO: 28124 - DNA, 25 bp, Saccharomyces pastorianus
tgccttggcctacattggttcagat

SEQ ID NO: 28125 - DNA, 25 bp, Saccharomyces pastorianus
acagattggctggttcattcacttt

SEQ ID NO: 28126 - DNA, 25 bp, Saccharomyces pastorianus
aaaactacatctattgggtgctcaa

SEQ ID NO: 28127 - DNA, 25 bp, Saccharomyces pastorianus
gtcgctacgaacctaatgtccaaac

SEQ ID NO: 28128 - DNA, 25 bp, Saccharomyces pastorianus
ggtttatttcctactgctcaagtcg

SEQ ID NO: 28129 - DNA, 25 bp, Saccharomyces pastorianus
ttcgccatcggtgattgtacattcc

SEQ ID NO: 28130 - DNA, 25 bp, Saccharomyces pastorianus
aagtcgatgctaccactataaccgc

SEQ ID NO: 28131 - DNA, 25 bp, Saccharomyces pastorianus
taacgacgattcagaagccgctaga

SEQ ID NO: 28132 - DNA, 25 bp, Saccharomyces pastorianus
ggttcattcactttcttattctgga

SEQ ID NO: 28133 - DNA, 25 bp, Saccharomyces pastorianus
atgctccaagagaagtcgctacgaa

SEQ ID NO: 28134 - DNA, 25 bp, Saccharomyces pastorianus
gatcggcagagtgcaaggccatttc

SEQ ID NO: 28135 - DNA, 25 bp, Saccharomyces pastorianus
gatggtccactgagggcaagtacat

SEQ ID NO: 28136 - DNA, 25 bp, Saccharomyces pastorianus
tttcatcacatcatccagagacacc

SEQ ID NO: 28137 - DNA, 25 bp, Saccharomyces pastorianus
gagacaccagctcgttcttggtcga

SEQ ID NO: 28138 - DNA, 25 bp, Saccharomyces pastorianus
gtccaccctacaagtcctgaagaaa

SEQ ID NO: 28139 - DNA, 25 bp, Saccharomyces pastorianus
gcagtcagtccacaaggcacaagtt

SEQ ID NO: 28140 - DNA, 25 bp, Saccharomyces pastorianus
ggattgtccattaaacaccgctgtc

SEQ ID NO: 28141 - DNA, 25 bp, Saccharomyces pastorianus
gttcgaagccagattctaccacaag

SEQ ID NO: 28142 - DNA, 25 bp, Saccharomyces pastorianus
agatcaccacccatgaaggcttgga

SEQ ID NO: 28143 - DNA, 25 bp, Saccharomyces pastorianus
caagtacatcattgcgggtcacaaa

SEQ ID NO: 28144 - DNA, 25 bp, Saccharomyces pastorianus
gaatttatcattctcggcggtggtc

SEQ ID NO: 28145 - DNA, 25 bp, Saccharomyces pastorianus
tggtttccgtcgctacatttttctt

SEQ ID NO: 28146 - DNA, 25 bp, Saccharomyces pastorianus
attgttcataattcccttactaggc

SEQ ID NO: 28147 - DNA, 25 bp, Saccharomyces pastorianus
gatgtcatctttgaacccgttagcg

SEQ ID NO: 28148 - DNA, 25 bp, Saccharomyces pastorianus
gtccctcaaagttcgtcactgaaga

SEQ ID NO: 28149 - DNA, 25 bp, Saccharomyces pastorianus
tggcgcaacttgtatacattcgagc

SEQ ID NO: 28150 - DNA, 25 bp, Saccharomyces pastorianus
tatcggtgtggtatcgtttggcttc

SEQ ID NO: 28151 - DNA, 25 bp, Saccharomyces pastorianus
aggccagtaagcaatccaacgattc

SEQ ID NO: 28152 - DNA, 25 bp, Saccharomyces pastorianus
gagctaccagcaacactaaggccag

SEQ ID NO: 28153 - DNA, 25 bp, Saccharomyces pastorianus
gccattgctcgttctttagagacca

SEQ ID NO: 28154 - DNA, 25 bp, Saccharomyces pastorianus
gtagtgatcgggtttttctcctcat

SEQ ID NO: 28155 - DNA, 25 bp, Saccharomyces pastorianus
acattcgagcagatgccttcttgaa

SEQ ID NO: 28156 - DNA, 25 bp, Saccharomyces pastorianus
gctggcaagttcgacattcaacctg

SEQ ID NO: 28157 - DNA, 25 bp, Saccharomyces pastorianus
ttcactattttgtcgttgctcgtca

SEQ ID NO: 28158 - DNA, 25 bp, Saccharomyces pastorianus
gagttgccaagccaatagcccgaat

SEQ ID NO: 28159 - DNA, 25 bp, Saccharomyces pastorianus
tcgtcgcgactatcattgggtttga

SEQ ID NO: 28160 - DNA, 25 bp, Saccharomyces pastorianus
tgtatttcttaggtttcgtcgcgac

SEQ ID NO: 28161 - DNA, 25 bp, Saccharomyces pastorianus
aaactctctattggttggcctacct

SEQ ID NO: 28162 - DNA, 25 bp, Saccharomyces pastorianus
acctgggtgaattcttgcgctgctg

SEQ ID NO: 28163 - DNA, 25 bp, Saccharomyces pastorianus
gatcattctgatctatctctcgctg

SEQ ID NO: 28164 - DNA, 25 bp, Saccharomyces pastorianus
tcaacctgaaattcgtcacgtcttc

SEQ ID NO: 28165 - DNA, 25 bp, Saccharomyces pastorianus
agccacgttagattctgccttgtta

SEQ ID NO: 28166 - DNA, 25 bp, Saccharomyces pastorianus
ggcaactttgatcttagcatcctct

SEQ ID NO: 28167 - DNA, 25 bp, Saccharomyces pastorianus
agccattctgggattcaagacgcaa

SEQ ID NO: 28168 - DNA, 25 bp, Saccharomyces pastorianus
tgtagtggcgttgaagcccaccgac

SEQ ID NO: 28169 - DNA, 25 bp, Saccharomyces pastorianus
aacgtacaacgcattacccatgggt

SEQ ID NO: 28170 - DNA, 25 bp, Saccharomyces pastorianus
taaagtacccgagggccatgtttgg

SEQ ID NO: 28171 - DNA, 25 bp, Saccharomyces pastorianus
gggagagtctatgctgccaacgcta

SEQ ID NO: 28172 - DNA, 25 bp, Saccharomyces pastorianus
gccaacgctatcagccacgaatgat

SEQ ID NO: 28173 - DNA, 25 bp, Saccharomyces pastorianus
gtgcatgtcctgaagcatttccaaa

SEQ ID NO: 28174 - DNA, 25 bp, Saccharomyces pastorianus
tgcctactgcatataattcacacgt

SEQ ID NO: 28175 - DNA, 25 bp, Saccharomyces pastorianus
gcctggtgacatggtgctcgtcgac

SEQ ID NO: 28176 - DNA, 25 bp, Saccharomyces pastorianus
aggattaccggcatgcctggtgaca

SEQ ID NO: 28177 - DNA, 25 bp, Saccharomyces pastorianus
ttggtgcactgcctatttggtcaaa

SEQ ID NO: 28178 - DNA, 25 bp, Saccharomyces pastorianus
atccgtgtcatatgctttcgtccat

SEQ ID NO: 28179 - DNA, 25 bp, Saccharomyces pastorianus
accacctattgattctgtttacgag

SEQ ID NO: 28180 - DNA, 25 bp, Saccharomyces pastorianus
actttaatatcggtactgtagctgg

SEQ ID NO: 28181 - DNA, 25 bp, Saccharomyces pastorianus
taaggcggatgattccttttacgtt

SEQ ID NO: 28182 - DNA, 25 bp, Saccharomyces pastorianus
ttcaactggcgttttgcttcgccaa

SEQ ID NO: 28183 - DNA, 25 bp, Saccharomyces pastorianus
ttcaaaggtcttggtcatcggcgcc

SEQ ID NO: 28184 - DNA, 25 bp, Saccharomyces pastorianus
ttaggttatgactacttggtgccat

SEQ ID NO: 28185 - DNA, 25 bp, Saccharomyces pastorianus
gggaagcatatcagcagcccttaat

SEQ ID NO: 28186 - DNA, 25 bp, Saccharomyces pastorianus
aagttttatctccttgggaagcata

SEQ ID NO: 28187 - DNA, 25 bp, Saccharomyces pastorianus
agcagcccttaatccgttcaaaagt

SEQ ID NO: 28188 - DNA, 25 bp, Saccharomyces pastorianus
aatggagccctgattcaaaggtctt

SEQ ID NO: 28189 - DNA, 25 bp, Saccharomyces pastorianus
aagtttctaaaaatcgcgccctgca

SEQ ID NO: 28190 - DNA, 25 bp, Saccharomyces pastorianus
ttttgctaactttggcgagatctta

SEQ ID NO: 28191 - DNA, 25 bp, Saccharomyces pastorianus
gtttcatatagtcgagctgctctca

SEQ ID NO: 28192 - DNA, 25 bp, Saccharomyces pastorianus
aaaatcgcgccctgcaagagaatgg

SEQ ID NO: 28193 - DNA, 25 bp, Saccharomyces pastorianus
cgtcccatatacactggcgatggtt

SEQ ID NO: 28194 - DNA, 25 bp, Saccharomyces pastorianus
gctacttctagagctcgtaattcag

SEQ ID NO: 28195 - DNA, 25 bp, Saccharomyces pastorianus
gaagattcatagtggcgtgttaagc

SEQ ID NO: 28196 - DNA, 25 bp, Saccharomyces pastorianus
cggtacattgatcggctgtgtttca

SEQ ID NO: 28197 - DNA, 25 bp, Saccharomyces pastorianus
acaccgcacaaaaacgtcccatata

SEQ ID NO: 28198 - DNA, 25 bp, Saccharomyces pastorianus
gtgttaagctctatcgaatccgact

SEQ ID NO: 28199 - DNA, 25 bp, Saccharomyces pastorianus
aagccatctagtcaaacacacaccg

SEQ ID NO: 28200 - DNA, 25 bp, Saccharomyces pastorianus
ctgcaaggccggtgataaactgatt

SEQ ID NO: 28201 - DNA, 25 bp, Saccharomyces pastorianus
gtagttaccacaattcttgttccaa

SEQ ID NO: 28202 - DNA, 25 bp, Saccharomyces pastorianus
aaatcttccttgttgctatcatcgg

SEQ ID NO: 28203 - DNA, 25 bp, Saccharomyces pastorianus
ttgtagatccagtcagtgtcgtcga

SEQ ID NO: 28204 - DNA, 25 bp, Saccharomyces pastorianus
ttgtcaagacagtgcagtccctaga

SEQ ID NO: 28205 - DNA, 25 bp, Saccharomyces pastorianus
agctaaaatagatgcccctgggttc

SEQ ID NO: 28206 - DNA, 25 bp, Saccharomyces pastorianus
tatgttgacaatctaccggcaggta

SEQ ID NO: 28207 - DNA, 25 bp, Saccharomyces pastorianus
gtgtcgtcgactactttagaacttt

SEQ ID NO: 28208 - DNA, 25 bp, Saccharomyces pastorianus
ggctattttcccacaaggtgacgtt

SEQ ID NO: 28209 - DNA, 25 bp, Saccharomyces pastorianus
ccggcaggtatgctagtcatgcttt

SEQ ID NO: 28210 - DNA, 25 bp, Saccharomyces pastorianus
atatgggccggatacgtatgttgac

SEQ ID NO: 28211 - DNA, 25 bp, Saccharomyces pastorianus
aactgattcttgttcgcgctgagaa

SEQ ID NO: 28212 - DNA, 25 bp, Saccharomyces pastorianus
attgctcgaaagtcagagtggcttt

SEQ ID NO: 28213 - DNA, 25 bp, Saccharomyces pastorianus
aaacccgtgcttagtaactgtcgct

SEQ ID NO: 28214 - DNA, 25 bp, Saccharomyces pastorianus
agcttgcaaacacatgtgcccatct

SEQ ID NO: 28215 - DNA, 25 bp, Saccharomyces pastorianus
aaacatcaaacctttgcagccaggg

SEQ ID NO: 28216 - DNA, 25 bp, Saccharomyces pastorianus
gtgcccatctacagaattgctcgaa

SEQ ID NO: 28217 - DNA, 25 bp, Saccharomyces pastorianus
gatcccatacacgaaattacagtta

SEQ ID NO: 28218 - DNA, 25 bp, Saccharomyces pastorianus
cagagtggctttaacatcgatccca

SEQ ID NO: 28219 - DNA, 25 bp, Saccharomyces pastorianus
acgatgggcccagacaaagaatatg

SEQ ID NO: 28220 - DNA, 25 bp, Saccharomyces pastorianus
atacagagacaacaaacccgtgctt

SEQ ID NO: 28221 - DNA, 25 bp, Saccharomyces pastorianus
gtaactgtcgcttgatttctaaacc

SEQ ID NO: 28222 - DNA, 25 bp, Saccharomyces pastorianus
taagctgatcaagcggccatcccta

SEQ ID NO: 28223 - DNA, 25 bp, Saccharomyces pastorianus
ggcgctattgcctatcactatggat

SEQ ID NO: 28224 - DNA, 25 bp, Saccharomyces pastorianus
gccatccctaaaaccacagactagt

SEQ ID NO: 28225 - DNA, 25 bp, Saccharomyces pastorianus
tggcgcgctacacggataaggttct

SEQ ID NO: 28226 - DNA, 25 bp, Saccharomyces pastorianus
tacgcttactaaaggcattaacccg

SEQ ID NO: 28227 - DNA, 25 bp, Saccharomyces pastorianus
gagattggaattaggcgcttacagt

SEQ ID NO: 28228 - DNA, 25 bp, Saccharomyces pastorianus
ctgtgcactcccaattctgaacaaa

SEQ ID NO: 28229 - DNA, 25 bp, Saccharomyces pastorianus
ttaacccgatggagaatgtcagtat

SEQ ID NO: 28230 - DNA, 25 bp, Saccharomyces pastorianus
gttcaaagtcatgatgtggccatct

SEQ ID NO: 28231 - DNA, 25 bp, Saccharomyces pastorianus
taaagatcctagcactttggcgcgc

SEQ ID NO: 28232 - DNA, 25 bp, Saccharomyces pastorianus
agtattgcccagtggtaagctgatc

SEQ ID NO: 28233 - DNA, 25 bp, Saccharomyces pastorianus
atatccaaccatggttttcatctgg

SEQ ID NO: 28234 - DNA, 25 bp, Saccharomyces pastorianus
gaaatacccgatcttccattgaaac

SEQ ID NO: 28235 - DNA, 25 bp, Saccharomyces pastorianus
atagccttctggaaagcctcgaaca

SEQ ID NO: 28236 - DNA, 25 bp, Saccharomyces pastorianus
aaagtcgtcttagagagcgggtctc

SEQ ID NO: 28237 - DNA, 25 bp, Saccharomyces pastorianus
gaactgcaaaatctttcgagctatt

SEQ ID NO: 28238 - DNA, 25 bp, Saccharomyces pastorianus
agcgggtctctcagtaagtacaaat

SEQ ID NO: 28239 - DNA, 25 bp, Saccharomyces pastorianus
gaggacagacttcaaacaactctct

SEQ ID NO: 28240 - DNA, 25 bp, Saccharomyces pastorianus
gattacgcttccgacgagagatctt

SEQ ID NO: 28241 - DNA, 25 bp, Saccharomyces pastorianus
tttcatctggatatcttcaaaggga

SEQ ID NO: 28242 - DNA, 25 bp, Saccharomyces pastorianus
gtagatttaaaccacccagtagact

SEQ ID NO: 28243 - DNA, 25 bp, Saccharomyces pastorianus
gtttcatcttcttctttatcggtac

SEQ ID NO: 28244 - DNA, 25 bp, Saccharomyces pastorianus
gattcctaaagtagatgcgtctgat

SEQ ID NO: 28245 - DNA, 25 bp, Saccharomyces pastorianus
tacgggtccgtgtgctatgaactat

SEQ ID NO: 28246 - DNA, 25 bp, Saccharomyces pastorianus
acattccgtctatggcgaaactacc

SEQ ID NO: 28247 - DNA, 25 bp, Saccharomyces pastorianus
gcttttgaaaggctacattccgtct

SEQ ID NO: 28248 - DNA, 25 bp, Saccharomyces pastorianus
aagaaggtttttggcgcctaggcat

SEQ ID NO: 28249 - DNA, 25 bp, Saccharomyces pastorianus
ggaacacttatcttcactattagag

SEQ ID NO: 28250 - DNA, 25 bp, Saccharomyces pastorianus
gagcatatactctttccttgtatca

SEQ ID NO: 28251 - DNA, 25 bp, Saccharomyces pastorianus
cagtccagatggtagttttgaagct

SEQ ID NO: 28252 - DNA, 25 bp, Saccharomyces pastorianus
aaatctatatgaccttctatcggaa

SEQ ID NO: 28253 - DNA, 25 bp, Saccharomyces pastorianus
ggcgcctaggcatattctcaaggac

SEQ ID NO: 28254 - DNA, 25 bp, Saccharomyces pastorianus
ggacgttgtcgaaatagcaaacctt

SEQ ID NO: 28255 - DNA, 25 bp, Saccharomyces pastorianus
acgactatcagattcaggtgactca

SEQ ID NO: 28256 - DNA, 25 bp, Saccharomyces pastorianus
aggtgactcatttcatcatcccgta

SEQ ID NO: 28257 - DNA, 25 bp, Saccharomyces pastorianus
gaatctctgctggaggaagacgacg

SEQ ID NO: 28258 - DNA, 25 bp, Saccharomyces pastorianus
gccactttccaaatatctactgtct

SEQ ID NO: 28259 - DNA, 25 bp, Saccharomyces pastorianus
gtggactttactgaacttattgcaa

SEQ ID NO: 28260 - DNA, 25 bp, Saccharomyces pastorianus
gagtggtatcctttatgtcgtttta

SEQ ID NO: 28261 - DNA, 25 bp, Saccharomyces pastorianus
aacagtgaaatgtcttctctcataa

SEQ ID NO: 28262 - DNA, 25 bp, Saccharomyces pastorianus
gtctttggtcccactgaacaggttt

SEQ ID NO: 28263 - DNA, 25 bp, Saccharomyces pastorianus
aatttgcctctgatattcggcctaa

SEQ ID NO: 28264 - DNA, 25 bp, Saccharomyces pastorianus
actcctcagattcgctaccaaaaat

SEQ ID NO: 28265 - DNA, 25 bp, Saccharomyces pastorianus
tggtgttgccaaccgtcacaagagt

SEQ ID NO: 28266 - DNA, 25 bp, Saccharomyces pastorianus
ggtgtcgacaactaccttcaaacga

SEQ ID NO: 28267 - DNA, 25 bp, Saccharomyces pastorianus
gaatcaggcgaaagcggtgtcgaca

SEQ ID NO: 28268 - DNA, 25 bp, Saccharomyces pastorianus
gtttgggtcaactcatccaacgacg

SEQ ID NO: 28269 - DNA, 25 bp, Saccharomyces pastorianus
tttactgatgttccacaatcatcga

SEQ ID NO: 28270 - DNA, 25 bp, Saccharomyces pastorianus
tcatccaacgacgaagaggttaagg

SEQ ID NO: 28271 - DNA, 25 bp, Saccharomyces pastorianus
agaatgaaatcttcggaccggtcgt

SEQ ID NO: 28272 - DNA, 25 bp, Saccharomyces pastorianus
aaagcggtgtcgacaactaccttca

SEQ ID NO: 28273 - DNA, 25 bp, Saccharomyces pastorianus
gggtcaactcatccaacgacgaaga

SEQ ID NO: 28274 - DNA, 25 bp, Saccharomyces pastorianus
tccacaatcatcgaagctattgaag

SEQ ID NO: 28275 - DNA, 25 bp, Saccharomyces pastorianus
aactgtttgggtcaactcatccaac

SEQ ID NO: 28276 - DNA, 25 bp, Saccharomyces pastorianus
cgacaactaccttcaaacgaaatct

SEQ ID NO: 28277 - DNA, 25 bp, Saccharomyces pastorianus
tgcaaaggtggtaagcgatgctttt

SEQ ID NO: 28278 - DNA, 25 bp, Saccharomyces pastorianus
aatggcgacagcagtcacaaacccg

SEQ ID NO: 28279 - DNA, 25 bp, Saccharomyces pastorianus
taaggacaaaaacagcgacagcaat

SEQ ID NO: 28280 - DNA, 25 bp, Saccharomyces pastorianus
ccgattaccaggagcaatacaataa

SEQ ID NO: 28281 - DNA, 25 bp, Saccharomyces pastorianus
gcgatgcttttaaagagatggctaa

SEQ ID NO: 28282 - DNA, 25 bp, Saccharomyces pastorianus
gcgacagcagtcacaaacccgatta

SEQ ID NO: 28283 - DNA, 25 bp, Saccharomyces pastorianus
cacaaacccgattaccaggagcaat

SEQ ID NO: 28284 - DNA, 25 bp, Saccharomyces pastorianus
taaagagatggctaataaggacaaa

SEQ ID NO: 28285 - DNA, 25 bp, Saccharomyces pastorianus
aaacccgattaccaggagcaataca

SEQ ID NO: 28286 - DNA, 25 bp, Saccharomyces pastorianus
agcagtcacaaacccgattaccagg

SEQ ID NO: 28287 - DNA, 25 bp, Saccharomyces pastorianus
aacagcgacagcaatggcgacagca

SEQ ID NO: 28288 - DNA, 25 bp, Saccharomyces pastorianus
ggccaggatcaatctgaaggaaaaa

SEQ ID NO: 28289 - DNA, 25 bp, Saccharomyces pastorianus
gaagaccagatcttccaataaggaa

SEQ ID NO: 28290 - DNA, 25 bp, Saccharomyces pastorianus
ttcaaggtaaagacgattcccagca

SEQ ID NO: 28291 - DNA, 25 bp, Saccharomyces pastorianus
gaacatgaacatgggccaggatcaa

SEQ ID NO: 28292 - DNA, 25 bp, Saccharomyces pastorianus
gaaaatgggtcaagatcaatctgaa

SEQ ID NO: 28293 - DNA, 25 bp, Saccharomyces pastorianus
tgccagaaacatgaagaccagatct

SEQ ID NO: 28294 - DNA, 25 bp, Saccharomyces pastorianus
gacgattcccagcagaaggataaaa

SEQ ID NO: 28295 - DNA, 25 bp, Saccharomyces pastorianus
taaattcgcagaaaaacttcaaggt

SEQ ID NO: 28296 - DNA, 25 bp, Saccharomyces pastorianus
aaatgaatgccggtagaggaattgc

SEQ ID NO: 28297 - DNA, 25 bp, Saccharomyces pastorianus
gaacatgggccaggatcaatctgaa

SEQ ID NO: 28298 - DNA, 25 bp, Saccharomyces pastorianus
ggtaaagacgattcccagcagaagg

SEQ ID NO: 28299 - DNA, 25 bp, Saccharomyces pastorianus
ctgtttgatgtttttgcgttggcct

SEQ ID NO: 28300 - DNA, 25 bp, Saccharomyces pastorianus
ttgtctgtccaatatgcatgccatc

SEQ ID NO: 28301 - DNA, 25 bp, Saccharomyces pastorianus
aagtgggttctacctgacgatccaa

SEQ ID NO: 28302 - DNA, 25 bp, Saccharomyces pastorianus
gcatgccatctaacgtttctatcaa

SEQ ID NO: 28303 - DNA, 25 bp, Saccharomyces pastorianus
gctgcctttggcttacaaatgctta

SEQ ID NO: 28304 - DNA, 25 bp, Saccharomyces pastorianus
aggtccgttgagacgatactgtcaa

SEQ ID NO: 28305 - DNA, 25 bp, Saccharomyces pastorianus
gggtgtggctttactgacttgacag

SEQ ID NO: 28306 - DNA, 25 bp, Saccharomyces pastorianus
aaggcagtgccatggtcgaatgtga

SEQ ID NO: 28307 - DNA, 25 bp, Saccharomyces pastorianus
ttcctctggaggattgtgctagact

SEQ ID NO: 28308 - DNA, 25 bp, Saccharomyces pastorianus
aagttagtacctacgcacaagatca

SEQ ID NO: 28309 - DNA, 25 bp, Saccharomyces pastorianus
aaacttgttgaactgctgcctttgg

SEQ ID NO: 28310 - DNA, 25 bp, Saccharomyces pastorianus
ttcagttataactccgccagcaata

SEQ ID NO: 28311 - DNA, 25 bp, Saccharomyces pastorianus
attcttcctctgtgcccaacagtaa

SEQ ID NO: 28312 - DNA, 25 bp, Saccharomyces pastorianus
ggaacaagccttattgacccaatta

SEQ ID NO: 28313 - DNA, 25 bp, Saccharomyces pastorianus
gaacacaagcctctatctcacggag

SEQ ID NO: 28314 - DNA, 25 bp, Saccharomyces pastorianus
gctctaacgatgagtttgccaacca

SEQ ID NO: 28315 - DNA, 25 bp, Saccharomyces pastorianus
ttattcctcttccactccgaaggag

SEQ ID NO: 28316 - DNA, 25 bp, Saccharomyces pastorianus
gagagcaaccaacatcaacacgagt

SEQ ID NO: 28317 - DNA, 25 bp, Saccharomyces pastorianus
ttacaaatccctccaacttattcct

SEQ ID NO: 28318 - DNA, 25 bp, Saccharomyces pastorianus
gcaatagcggtgtgtgctctaacga

SEQ ID NO: 28319 - DNA, 25 bp, Saccharomyces pastorianus
aacacgagttccaacttgtcagccc

SEQ ID NO: 28320 - DNA, 25 bp, Saccharomyces pastorianus
gaagcttgctaactccagaagaaca

SEQ ID NO: 28321 - DNA, 25 bp, Saccharomyces pastorianus
atgctacatcatctgcttcgtgatc

SEQ ID NO: 28322 - DNA, 25 bp, Saccharomyces pastorianus
gacaatacacaatcattcagccgga

SEQ ID NO: 28323 - DNA, 25 bp, Saccharomyces pastorianus
agaatgttgaagacgcccagcagga

SEQ ID NO: 28324 - DNA, 25 bp, Saccharomyces pastorianus
attcagccggaagccacagacgaag

SEQ ID NO: 28325 - DNA, 25 bp, Saccharomyces pastorianus
gccaccgacttgcagtaccaattga

SEQ ID NO: 28326 - DNA, 25 bp, Saccharomyces pastorianus
aaatcttttctcaagctctgctaaa

SEQ ID NO: 28327 - DNA, 25 bp, Saccharomyces pastorianus
actgcgttggccgaagtgcaagcta

SEQ ID NO: 28328 - DNA, 25 bp, Saccharomyces pastorianus
gtcaacggccaacaaatcttttctc

SEQ ID NO: 28329 - DNA, 25 bp, Saccharomyces pastorianus
aaagactctaacaagcaggcccaag

SEQ ID NO: 28330 - DNA, 25 bp, Saccharomyces pastorianus
atggcagaactgacccaattattca

SEQ ID NO: 28331 - DNA, 25 bp, Saccharomyces pastorianus
gatctttgccgttgtcgtggtggtc

SEQ ID NO: 28332 - DNA, 25 bp, Saccharomyces pastorianus
gctgctactgagactgctactgatg

SEQ ID NO: 28333 - DNA, 25 bp, Saccharomyces pastorianus
gtggacgccccagctgccattagaa

SEQ ID NO: 28334 - DNA, 25 bp, Saccharomyces pastorianus
caacttctttcgcttcaagaatcaa

SEQ ID NO: 28335 - DNA, 25 bp, Saccharomyces pastorianus
gctgccattagaaccggccaattcg

SEQ ID NO: 28336 - DNA, 25 bp, Saccharomyces pastorianus
ctgctactgatgctccagtcgaaga

SEQ ID NO: 28337 - DNA, 25 bp, Saccharomyces pastorianus
aaggttgttgtctcttataaactag

SEQ ID NO: 28338 - DNA, 25 bp, Saccharomyces pastorianus
ccggccaattcggttggtctgctaa

SEQ ID NO: 28339 - DNA, 25 bp, Saccharomyces pastorianus
gactgaagctgctactgagactgct

SEQ ID NO: 28340 - DNA, 25 bp, Saccharomyces pastorianus
atctctccaagatctccaatcatta

SEQ ID NO: 28341 - DNA, 25 bp, Saccharomyces pastorianus
tataaactagtggacgccccagctg

SEQ ID NO: 28342 - DNA, 25 bp, Saccharomyces pastorianus
gaaatcttgggcgaacaagtcgaaa

SEQ ID NO: 28343 - DNA, 25 bp, Saccharomyces pastorianus
ggatttcatgctccaacgttagctt

SEQ ID NO: 28344 - DNA, 25 bp, Saccharomyces pastorianus
aagccaaaggtgtcgaagccattga

SEQ ID NO: 28345 - DNA, 25 bp, Saccharomyces pastorianus
ttgccaatctcttatgcctacatca

SEQ ID NO: 28346 - DNA, 25 bp, Saccharomyces pastorianus
attgtgctcatgaatttatcgtcga

SEQ ID NO: 28347 - DNA, 25 bp, Saccharomyces pastorianus
ggtaacgctttagtgttgccaatct

SEQ ID NO: 28348 - DNA, 25 bp, Saccharomyces pastorianus
acaagttctggccaactgttgctag

SEQ ID NO: 28349 - DNA, 25 bp, Saccharomyces pastorianus
ttgccattttctagtgtcatttcca

SEQ ID NO: 28350 - DNA, 25 bp, Saccharomyces pastorianus
aagaatgcccctcattgtttggaag

SEQ ID NO: 28351 - DNA, 25 bp, Saccharomyces pastorianus
ggcttatccattgcctttcttgaag

SEQ ID NO: 28352 - DNA, 25 bp, Saccharomyces pastorianus
gatgcattagtgtctggccaaccaa

SEQ ID NO: 28353 - DNA, 25 bp, Saccharomyces pastorianus
ccctgttcctgggactttgatggta

SEQ ID NO: 28354 - DNA, 25 bp, Saccharomyces pastorianus
tacggtgaatccaatatctttaaac

SEQ ID NO: 28355 - DNA, 25 bp, Saccharomyces pastorianus
taaagaactaggacccacaggatgg

SEQ ID NO: 28356 - DNA, 25 bp, Saccharomyces pastorianus
cccacaggatggaagttgcgttata

SEQ ID NO: 28357 - DNA, 25 bp, Saccharomyces pastorianus
gtatcaagatgactgccaaagtgct

SEQ ID NO: 28358 - DNA, 25 bp, Saccharomyces pastorianus
gatgcccctattttagaaacggccg

SEQ ID NO: 28359 - DNA, 25 bp, Saccharomyces pastorianus
ggagctgtttgctaacgttccagtt

SEQ ID NO: 28360 - DNA, 25 bp, Saccharomyces pastorianus
aactggaacacaagtctatcgggaa

SEQ ID NO: 28361 - DNA, 25 bp, Saccharomyces pastorianus
tgttggcctttttatatcccttgga

SEQ ID NO: 28362 - DNA, 25 bp, Saccharomyces pastorianus
gaactatccacataaggatgcccct

SEQ ID NO: 28363 - DNA, 25 bp, Saccharomyces pastorianus
cggcacgccaagaaagatatcagtt

SEQ ID NO: 28364 - DNA, 25 bp, Saccharomyces pastorianus
gatgaagtaattaacggcacgccaa

SEQ ID NO: 28365 - DNA, 25 bp, Saccharomyces pastorianus
caagcgttggctaatgtccaggact

SEQ ID NO: 28366 - DNA, 25 bp, Saccharomyces pastorianus
atttgccaaccaccaattgagcgag

SEQ ID NO: 28367 - DNA, 25 bp, Saccharomyces pastorianus
accaggtctgctcagtcttgtgata

SEQ ID NO: 28368 - DNA, 25 bp, Saccharomyces pastorianus
atgtctttgaactataccactcctc

SEQ ID NO: 28369 - DNA, 25 bp, Saccharomyces pastorianus
taaactgaccgatctttacgccaac

SEQ ID NO: 28370 - DNA, 25 bp, Saccharomyces pastorianus
ataccactcctcttgacgatgaggt

SEQ ID NO: 28371 - DNA, 25 bp, Saccharomyces pastorianus
gagcacgtgtcgatgagccaggatt

SEQ ID NO: 28372 - DNA, 25 bp, Saccharomyces pastorianus
gacgaaacgctattctcattagaga

SEQ ID NO: 28373 - DNA, 25 bp, Saccharomyces pastorianus
gatgagccaggattactcactccgt

SEQ ID NO: 28374 - DNA, 25 bp, Saccharomyces pastorianus
aggtcttcccgttgtcatttgccaa

SEQ ID NO: 28375 - DNA, 25 bp, Saccharomyces pastorianus
ataaatacggccgactcttgcgcag

SEQ ID NO: 28376 - DNA, 25 bp, Saccharomyces pastorianus
aggttgcctcgtactccaagatcat

SEQ ID NO: 28377 - DNA, 25 bp, Saccharomyces pastorianus
tgcgtccacggaaagctctgaacaa

SEQ ID NO: 28378 - DNA, 25 bp, Saccharomyces pastorianus
cgagcgtgccgttcattatggtgat

SEQ ID NO: 28379 - DNA, 25 bp, Saccharomyces pastorianus
aagcgccatcacagaataggaggaa

SEQ ID NO: 28380 - DNA, 25 bp, Saccharomyces pastorianus
ttatccactgatccatatttcaagg

SEQ ID NO: 28381 - DNA, 25 bp, Saccharomyces pastorianus
aagatcatctgtagccaccactgcg

SEQ ID NO: 28382 - DNA, 25 bp, Saccharomyces pastorianus
aggaagaggccttggtgcttctcac

SEQ ID NO: 28383 - DNA, 25 bp, Saccharomyces pastorianus
aatatcctgtgtgaggttgcctcgt

SEQ ID NO: 28384 - DNA, 25 bp, Saccharomyces pastorianus
aggaacccattctggattgacgcca

SEQ ID NO: 28385 - DNA, 25 bp, Saccharomyces pastorianus
gaatacttcgatggtgactcaggaa

SEQ ID NO: 28386 - DNA, 25 bp, Saccharomyces pastorianus
gacgccacaaagtagtatttcaagt

SEQ ID NO: 28387 - DNA, 25 bp, Saccharomyces pastorianus
agaggaattccactttgaagcaggt

SEQ ID NO: 28388 - DNA, 25 bp, Saccharomyces pastorianus
caaatcatgatggacctgaggtcac

SEQ ID NO: 28389 - DNA, 25 bp, Saccharomyces pastorianus
tcagaagcgccctcgcagcagatat

SEQ ID NO: 28390 - DNA, 25 bp, Saccharomyces pastorianus
agactcttcggagaccttaatacat

SEQ ID NO: 28391 - DNA, 25 bp, Saccharomyces pastorianus
attgatatcaagaggccactgcagt

SEQ ID NO: 28392 - DNA, 25 bp, Saccharomyces pastorianus
gcaaggcataccctgtttcaagcag

SEQ ID NO: 28393 - DNA, 25 bp, Saccharomyces pastorianus
gaactattcgacttgttagatcaga

SEQ ID NO: 28394 - DNA, 25 bp, Saccharomyces pastorianus
actgcagtctcttgtggactcaggt

SEQ ID NO: 28395 - DNA, 25 bp, Saccharomyces pastorianus
agttatgccattattgctgtgctaa

SEQ ID NO: 28396 - DNA, 25 bp, Saccharomyces pastorianus
gtttcaagcagattcatacgtcgat

SEQ ID NO: 28397 - DNA, 25 bp, Saccharomyces pastorianus
acagctgttaagcaaccatgcgatt

SEQ ID NO: 28398 - DNA, 25 bp, Saccharomyces pastorianus
gaaatgcccgatgagttccatatca

SEQ ID NO: 28399 - DNA, 25 bp, Saccharomyces pastorianus
aatgcatgtgcgtcctaagtttaga

SEQ ID NO: 28400 - DNA, 25 bp, Saccharomyces pastorianus
tgcagcacctattaagattaccttt

SEQ ID NO: 28401 - DNA, 25 bp, Saccharomyces pastorianus
ttgcagtatcgttgtcgtatcccag

SEQ ID NO: 28402 - DNA, 25 bp, Saccharomyces pastorianus
aaatatgaccgctttgcaactgagt

SEQ ID NO: 28403 - DNA, 25 bp, Saccharomyces pastorianus
cggttattcaatgagtgtgccccat

SEQ ID NO: 28404 - DNA, 25 bp, Saccharomyces pastorianus
gtggccacaaacgtgtacaagtgtt

SEQ ID NO: 28405 - DNA, 25 bp, Saccharomyces pastorianus
gaactgtgcgtttcgacgggaacac

SEQ ID NO: 28406 - DNA, 25 bp, Saccharomyces pastorianus
aacatcgagaagacgctagccctag

SEQ ID NO: 28407 - DNA, 25 bp, Saccharomyces pastorianus
cagcgttttcacaggtgctcactaa

SEQ ID NO: 28408 - DNA, 25 bp, Saccharomyces pastorianus
gaacagctattcaaacagtacggcg

SEQ ID NO: 28409 - DNA, 25 bp, Saccharomyces pastorianus
aatgcaaccgttatacttggcctac

SEQ ID NO: 28410 - DNA, 25 bp, Saccharomyces pastorianus
tgacgacacttcagcatcttctaag

SEQ ID NO: 28411 - DNA, 25 bp, Saccharomyces pastorianus
gatagagccttcattacctggtatt

SEQ ID NO: 28412 - DNA, 25 bp, Saccharomyces pastorianus
gcctcgttgattttccagcatggta

SEQ ID NO: 28413 - DNA, 25 bp, Saccharomyces pastorianus
gagaccttgaatcctacagacaccg

SEQ ID NO: 28414 - DNA, 25 bp, Saccharomyces pastorianus
agttgacggcagacagctgttcagc

SEQ ID NO: 28415 - DNA, 25 bp, Saccharomyces pastorianus
gctgttcagcgatccatgcaaagat

SEQ ID NO: 28416 - DNA, 25 bp, Saccharomyces pastorianus
gtcagtggaaatcctcgtgacccaa

SEQ ID NO: 28417 - DNA, 25 bp, Saccharomyces pastorianus
caacgcatcatttttaacctcgaat

SEQ ID NO: 28418 - DNA, 25 bp, Saccharomyces pastorianus
gtattagttactcattcaccgaaga

SEQ ID NO: 28419 - DNA, 25 bp, Saccharomyces pastorianus
taccggccaccaatgatgttaccaa

SEQ ID NO: 28420 - DNA, 25 bp, Saccharomyces pastorianus
ggtatgacccaccacttgcaaaagg

SEQ ID NO: 28421 - DNA, 25 bp, Saccharomyces pastorianus
aacgactacttcaccatcttacatg

SEQ ID NO: 28422 - DNA, 25 bp, Saccharomyces pastorianus
acagaaggtcattccggtgtccact

SEQ ID NO: 28423 - DNA, 25 bp, Saccharomyces pastorianus
tgtaacacggtcatcgccaaacatg

SEQ ID NO: 28424 - DNA, 25 bp, Saccharomyces pastorianus
agcaatacagtatgcctggcggctc

SEQ ID NO: 28425 - DNA, 25 bp, Saccharomyces pastorianus
gtacttgatcttatttggcacggct

SEQ ID NO: 28426 - DNA, 25 bp, Saccharomyces pastorianus
atcttacatggtacccaaactgccg

SEQ ID NO: 28427 - DNA, 25 bp, Saccharomyces pastorianus
ccactgccgaagacttttctactga

SEQ ID NO: 28428 - DNA, 25 bp, Saccharomyces pastorianus
gatgccgaaatttacactcccggta

SEQ ID NO: 28429 - DNA, 25 bp, Saccharomyces pastorianus
ttgccatatgccaccgatgccgaaa

SEQ ID NO: 28430 - DNA, 25 bp, Saccharomyces pastorianus
tcatcctgcatgcatctatctcaga

SEQ ID NO: 28431 - DNA, 25 bp, Saccharomyces pastorianus
ggcatccagccaactgtcgaaggat

SEQ ID NO: 28432 - DNA, 25 bp, Saccharomyces pastorianus
taccaagattggctgtggcttacaa

SEQ ID NO: 28433 - DNA, 25 bp, Saccharomyces pastorianus
cgaaggatctactaccattggtgcc

SEQ ID NO: 28434 - DNA, 25 bp, Saccharomyces pastorianus
attacaagcaggcatggtcccaatt

SEQ ID NO: 28435 - DNA, 25 bp, Saccharomyces pastorianus
aatgggaactccaatcggcatccag

SEQ ID NO: 28436 - DNA, 25 bp, Saccharomyces pastorianus
ggcttacaattcgaaaccgctggta

SEQ ID NO: 28437 - DNA, 25 bp, Saccharomyces pastorianus
agtcttgccaactttgtctgttttg

SEQ ID NO: 28438 - DNA, 25 bp, Saccharomyces pastorianus
aaggtcgcaccaaacgtcgaagcag

SEQ ID NO: 28439 - DNA, 25 bp, Saccharomyces pastorianus
aagccaatggtgctctgatcgcatc

SEQ ID NO: 28440 - DNA, 25 bp, Saccharomyces pastorianus
tgctccaggtgatgcaggtgtctca

SEQ ID NO: 28441 - DNA, 25 bp, Saccharomyces pastorianus
gattggatcttgtctggtcaactac

SEQ ID NO: 28442 - DNA, 25 bp, Saccharomyces pastorianus
gagcgataagtttgcgacctcgtct

SEQ ID NO: 28443 - DNA, 25 bp, Saccharomyces pastorianus
gttctaccgataccatgtcaagttc

SEQ ID NO: 28444 - DNA, 25 bp, Saccharomyces pastorianus
acaaagctcgactatcccaacggtt

SEQ ID NO: 28445 - DNA, 25 bp, Saccharomyces pastorianus
ttttgttaattcttccgtacctctg

SEQ ID NO: 28446 - DNA, 25 bp, Saccharomyces pastorianus
gacctcgtctacatcgattgttaag

SEQ ID NO: 28447 - DNA, 25 bp, Saccharomyces pastorianus
gaagaaccgcgcctatattgaatac

SEQ ID NO: 28448 - DNA, 25 bp, Saccharomyces pastorianus
atccggtgccattcgatagttattc

SEQ ID NO: 28449 - DNA, 25 bp, Saccharomyces pastorianus
gataatcagactcgatcagacttgg

SEQ ID NO: 28450 - DNA, 25 bp, Saccharomyces pastorianus
tattgaatactccagtggcttcgag

SEQ ID NO: 28451 - DNA, 25 bp, Saccharomyces pastorianus
aaagagcgtatatccggtgccattc

SEQ ID NO: 28452 - DNA, 25 bp, Saccharomyces pastorianus
agtggcttcgagtatgcatttgcag

SEQ ID NO: 28453 - DNA, 25 bp, Saccharomyces pastorianus
taaaccagcttacccaggtcatgtc

SEQ ID NO: 28454 - DNA, 25 bp, Saccharomyces pastorianus
tcaagggttctcacgtcgtttacaa

SEQ ID NO: 28455 - DNA, 25 bp, Saccharomyces pastorianus
agaggcagagcttttgtcgtcgact

SEQ ID NO: 28456 - DNA, 25 bp, Saccharomyces pastorianus
gtagattcgacgctaaaccagctta

SEQ ID NO: 28457 - DNA, 25 bp, Saccharomyces pastorianus
caaattggctgacgttatcactgct

SEQ ID NO: 28458 - DNA, 25 bp, Saccharomyces pastorianus
ctgctgttgtctgtgtcaagggttc

SEQ ID NO: 28459 - DNA, 25 bp, Saccharomyces pastorianus
gttacttggcaacttacgcttcttt

SEQ ID NO: 28460 - DNA, 25 bp, Saccharomyces pastorianus
gacaaggtcatttccgacactgctg

SEQ ID NO: 28461 - DNA, 25 bp, Saccharomyces pastorianus
gtgggtgctcaagtctcctatgttc

SEQ ID NO: 28462 - DNA, 25 bp, Saccharomyces pastorianus
tattgctcaagctcgtgctgctgaa

SEQ ID NO: 28463 - DNA, 25 bp, Saccharomyces pastorianus
tgtcgtcgactgtcaaggtggtaac

SEQ ID NO: 28464 - DNA, 25 bp, Saccharomyces pastorianus
gttccctgaagtaatgaaaccgctc

SEQ ID NO: 28465 - DNA, 25 bp, Saccharomyces pastorianus
tgctatgggcgaatgtgctctacaa

SEQ ID NO: 28466 - DNA, 25 bp, Saccharomyces pastorianus
gaaaccgctcttggatgctatgggc

SEQ ID NO: 28467 - DNA, 25 bp, Saccharomyces pastorianus
aaatcacgggttgcttgtttctatt

SEQ ID NO: 28468 - DNA, 25 bp, Saccharomyces pastorianus
aacaacatcctatatgagcagctgt

SEQ ID NO: 28469 - DNA, 25 bp, Saccharomyces pastorianus
ttctattggcgtttctcatcctgga

SEQ ID NO: 28470 - DNA, 25 bp, Saccharomyces pastorianus
gtaccggttgctgtttactgagggc

SEQ ID NO: 28471 - DNA, 25 bp, Saccharomyces pastorianus
gatctagtgactaacgtacgtgtac

SEQ ID NO: 28472 - DNA, 25 bp, Saccharomyces pastorianus
caagggctggatatcatgactcaat

SEQ ID NO: 28473 - DNA, 25 bp, Saccharomyces pastorianus
gtacaggctctgatgaagatgcttc

SEQ ID NO: 28474 - DNA, 25 bp, Saccharomyces pastorianus
gaggcggttgttctttgactttact

SEQ ID NO: 28475 - DNA, 25 bp, Saccharomyces pastorianus
aatgccaggtattctccaacagctt

SEQ ID NO: 28476 - DNA, 25 bp, Saccharomyces pastorianus
tctgttcccgaatagtgccgtttaa

SEQ ID NO: 28477 - DNA, 25 bp, Saccharomyces pastorianus
taacgattattctttctgttcccga

SEQ ID NO: 28478 - DNA, 25 bp, Saccharomyces pastorianus
gattctgatctttattttccgttat

SEQ ID NO: 28479 - DNA, 25 bp, Saccharomyces pastorianus
ttatatgctcctactgggctaacca

SEQ ID NO: 28480 - DNA, 25 bp, Saccharomyces pastorianus
gagtctgctcctcgaagtaaacgga

SEQ ID NO: 28481 - DNA, 25 bp, Saccharomyces pastorianus
ggattatattactacggccgtcacc

SEQ ID NO: 28482 - DNA, 25 bp, Saccharomyces pastorianus
ttccgtgaacgcaacaatttcccag

SEQ ID NO: 28483 - DNA, 25 bp, Saccharomyces pastorianus
atttcccttctgatacaataccgac

SEQ ID NO: 28484 - DNA, 25 bp, Saccharomyces pastorianus
ggccgtcaccttaggagattcgtca

SEQ ID NO: 28485 - DNA, 25 bp, Saccharomyces pastorianus
atcaactctctgattacgctacagc

SEQ ID NO: 28486 - DNA, 25 bp, Saccharomyces pastorianus
tgtgcctaatgtcgtcttaccaaac

SEQ ID NO: 28487 - DNA, 25 bp, Saccharomyces pastorianus
gttcgtactacatctccagattaca

SEQ ID NO: 28488 - DNA, 25 bp, Saccharomyces pastorianus
aagagatggatctgttcgctgttct

SEQ ID NO: 28489 - DNA, 25 bp, Saccharomyces pastorianus
tgtggctagatctaattccctgcga

SEQ ID NO: 28490 - DNA, 25 bp, Saccharomyces pastorianus
accaaacggtaattcaatgcccaat

SEQ ID NO: 28491 - DNA, 25 bp, Saccharomyces pastorianus
atcggtgaaatctcgcgttactaat

SEQ ID NO: 28492 - DNA, 25 bp, Saccharomyces pastorianus
agacgcctgtcgttgaggatcaaga

SEQ ID NO: 28493 - DNA, 25 bp, Saccharomyces pastorianus
ggtccttgatacaaaagacgcctgt

SEQ ID NO: 28494 - DNA, 25 bp, Saccharomyces pastorianus
tgttcgctgttctcaatcggtgaaa

SEQ ID NO: 28495 - DNA, 25 bp, Saccharomyces pastorianus
aaacaatgagagtcactgcgccaaa

SEQ ID NO: 28496 - DNA, 25 bp, Saccharomyces pastorianus
aatatcgagtgtttccgatcggagt

SEQ ID NO: 28497 - DNA, 25 bp, Saccharomyces pastorianus
atttactctggattcgggaccgaca

SEQ ID NO: 28498 - DNA, 25 bp, Saccharomyces pastorianus
aaagaatcgtccaccgttcaatctt

SEQ ID NO: 28499 - DNA, 25 bp, Saccharomyces pastorianus
gtgcggccaacatcaacatttcagt

SEQ ID NO: 28500 - DNA, 25 bp, Saccharomyces pastorianus
gttgccttctcaaccggcagaggtt

SEQ ID NO: 28501 - DNA, 25 bp, Saccharomyces pastorianus
cgttcctgccactatttactatgat

SEQ ID NO: 28502 - DNA, 25 bp, Saccharomyces pastorianus
gaccgacaactttacgttgccttct

SEQ ID NO: 28503 - DNA, 25 bp, Saccharomyces pastorianus
aactcggtgacagtggctctttaac

SEQ ID NO: 28504 - DNA, 25 bp, Saccharomyces pastorianus
aatcatcttcttattctacagctac

SEQ ID NO: 28505 - DNA, 25 bp, Saccharomyces pastorianus
ttgaccgactatgctgttccaacaa

SEQ ID NO: 28506 - DNA, 25 bp, Saccharomyces pastorianus
aaaatgcgctttcttcagactccat

SEQ ID NO: 28507 - DNA, 25 bp, Saccharomyces pastorianus
agtagccgttaggtctgtgtccaca

SEQ ID NO: 28508 - DNA, 25 bp, Saccharomyces pastorianus
gaaggccattcttacaccaaagatg

SEQ ID NO: 28509 - DNA, 25 bp, Saccharomyces pastorianus
gtccactgcgtgcttgatttttgaa

SEQ ID NO: 28510 - DNA, 25 bp, Saccharomyces pastorianus
agagttgtatggaagcggctccgac

SEQ ID NO: 28511 - DNA, 25 bp, Saccharomyces pastorianus
gagttaccgtcatatctgctgagga

SEQ ID NO: 28512 - DNA, 25 bp, Saccharomyces pastorianus
cagactttttgtcacctatgttaca

SEQ ID NO: 28513 - DNA, 25 bp, Saccharomyces pastorianus
tacaggtcaccggaagtgcttttgg

SEQ ID NO: 28514 - DNA, 25 bp, Saccharomyces pastorianus
ttgtggcgcagatatctggtccact

SEQ ID NO: 28515 - DNA, 25 bp, Saccharomyces pastorianus
aagatgacgaccacattgcacaaat

SEQ ID NO: 28516 - DNA, 25 bp, Saccharomyces pastorianus
gacgcaggcggcttggttaatcatc

SEQ ID NO: 28517 - DNA, 25 bp, Saccharomyces pastorianus
cggctccgacattcctggatggttt

SEQ ID NO: 28518 - DNA, 25 bp, Saccharomyces pastorianus
tttcgaacccgatgaaggccattct

SEQ ID NO: 28519 - DNA, 25 bp, Saccharomyces pastorianus
accactgatttcatgaccgctgatt

SEQ ID NO: 28520 - DNA, 25 bp, Saccharomyces pastorianus
ggtactttgtatccagatgtcattg

SEQ ID NO: 28521 - DNA, 25 bp, Saccharomyces pastorianus
aggtgaattgttgggaatccctcac

SEQ ID NO: 28522 - DNA, 25 bp, Saccharomyces pastorianus
agtttcttgaaaaaggtcgctgcga

SEQ ID NO: 28523 - DNA, 25 bp, Saccharomyces pastorianus
tgcttgtttattgcccgttaaatct

SEQ ID NO: 28524 - DNA, 25 bp, Saccharomyces pastorianus
tgacggtgttgcgagagttacttac

SEQ ID NO: 28525 - DNA, 25 bp, Saccharomyces pastorianus
ggtcgctgcgagaatcgttaacgaa

SEQ ID NO: 28526 - DNA, 25 bp, Saccharomyces pastorianus
gaattcctgttgcaaggtactttgt

SEQ ID NO: 28527 - DNA, 25 bp, Saccharomyces pastorianus
aagcaggctgggttatacaaccaaa

SEQ ID NO: 28528 - DNA, 25 bp, Saccharomyces pastorianus
tggtttccttttgaacacagtttct

SEQ ID NO: 28529 - DNA, 25 bp, Saccharomyces pastorianus
aatccctcacgatttggtctggaga

SEQ ID NO: 28530 - DNA, 25 bp, Saccharomyces pastorianus
aataccatggttactctaggctgtc

SEQ ID NO: 28531 - DNA, 25 bp, Saccharomyces pastorianus
gttccacccgatacaaaccgagaat

SEQ ID NO: 28532 - DNA, 25 bp, Saccharomyces pastorianus
tctaggctgtccaattcaatatgtg

SEQ ID NO: 28533 - DNA, 25 bp, Saccharomyces pastorianus
tgaggaatctggtaccgaagcaatt

SEQ ID NO: 28534 - DNA, 25 bp, Saccharomyces pastorianus
ccgaagcaattaactgtccctgtac

SEQ ID NO: 28535 - DNA, 25 bp, Saccharomyces pastorianus
atgatggcgggtatattcttgaaat

SEQ ID NO: 28536 - DNA, 25 bp, Saccharomyces pastorianus
tccatgggaaaaaacgaggcgcgat

SEQ ID NO: 28537 - DNA, 25 bp, Saccharomyces pastorianus
gttttgaccaattctttcgcgtacg

SEQ ID NO: 28538 - DNA, 25 bp, Saccharomyces pastorianus
aagaccgttctcgacaaaatgttgc

SEQ ID NO: 28539 - DNA, 25 bp, Saccharomyces pastorianus
ggttatctaagttttccgcacgttg

SEQ ID NO: 28540 - DNA, 25 bp, Saccharomyces pastorianus
gagaataccacatcggacaatacca

SEQ ID NO: 28541 - DNA, 25 bp, Saccharomyces pastorianus
tcccttcatggatctttctctagat

SEQ ID NO: 28542 - DNA, 25 bp, Saccharomyces pastorianus
acatactgtttttgaaggttcgctg

SEQ ID NO: 28543 - DNA, 25 bp, Saccharomyces pastorianus
aaactctacgagtgtcttgacagtt

SEQ ID NO: 28544 - DNA, 25 bp, Saccharomyces pastorianus
taagacgaccattgatcccttcatg

SEQ ID NO: 28545 - DNA, 25 bp, Saccharomyces pastorianus
attgcgattgcatagtacatactgt

SEQ ID NO: 28546 - DNA, 25 bp, Saccharomyces pastorianus
gggtatacacaagttgccatccgtt

SEQ ID NO: 28547 - DNA, 25 bp, Saccharomyces pastorianus
ctctatagtgtgtccaagctgtcaa

SEQ ID NO: 28548 - DNA, 25 bp, Saccharomyces pastorianus
tggtctcctcaatttctcaagaaga

SEQ ID NO: 28549 - DNA, 25 bp, Saccharomyces pastorianus
agttgccatccgttttagttttgca

SEQ ID NO: 28550 - DNA, 25 bp, Saccharomyces pastorianus
aggttcgctggagagctctatagtg

SEQ ID NO: 28551 - DNA, 25 bp, Saccharomyces pastorianus
atgattctatggtctcctcaatttc

SEQ ID NO: 28552 - DNA, 25 bp, Saccharomyces pastorianus
acgaggccagtctttcacttgataa

SEQ ID NO: 28553 - DNA, 25 bp, Saccharomyces pastorianus
aaagaaagagccgttcgcctgcagg

SEQ ID NO: 28554 - DNA, 25 bp, Saccharomyces pastorianus
gctccttcagactcgattgttatat

SEQ ID NO: 28555 - DNA, 25 bp, Saccharomyces pastorianus
aaaaaactgctgctccttcagactc

SEQ ID NO: 28556 - DNA, 25 bp, Saccharomyces pastorianus
aattacgccgggacaagccttcaag

SEQ ID NO: 28557 - DNA, 25 bp, Saccharomyces pastorianus
tgcaggtacgaaggcttcctccacg

SEQ ID NO: 28558 - DNA, 25 bp, Saccharomyces pastorianus
aggccagccactcccatggaaaatg

SEQ ID NO: 28559 - DNA, 25 bp, Saccharomyces pastorianus
accgactgagttcttttcaacccag

SEQ ID NO: 28560 - DNA, 25 bp, Saccharomyces pastorianus
atgataatgatgctcgagtcgatga

SEQ ID NO: 28561 - DNA, 25 bp, Saccharomyces pastorianus
gtgctaattctgttaggccagccac

SEQ ID NO: 28562 - DNA, 25 bp, Saccharomyces pastorianus
caagtactgctcaatctcatgttag

SEQ ID NO: 28563 - DNA, 25 bp, Saccharomyces pastorianus
acatcgtgaacttgggctcggtggc

SEQ ID NO: 28564 - DNA, 25 bp, Saccharomyces pastorianus
gttgccaattttccaagccaagaac

SEQ ID NO: 28565 - DNA, 25 bp, Saccharomyces pastorianus
gtcggtgcgttcactgacagtttga

SEQ ID NO: 28566 - DNA, 25 bp, Saccharomyces pastorianus
aaaacaccgtggttgccgacagctt

SEQ ID NO: 28567 - DNA, 25 bp, Saccharomyces pastorianus
acgtcaccgcgttgattaacatcac

SEQ ID NO: 28568 - DNA, 25 bp, Saccharomyces pastorianus
aggagtttcccaatgcaaaggtcca

SEQ ID NO: 28569 - DNA, 25 bp, Saccharomyces pastorianus
gcaaggctctgggttccgaacgtgt

SEQ ID NO: 28570 - DNA, 25 bp, Saccharomyces pastorianus
ggtcgagaccgaattctcactggtt

SEQ ID NO: 28571 - DNA, 25 bp, Saccharomyces pastorianus
ggccgatgacgtggctgacttaatc

SEQ ID NO: 28572 - DNA, 25 bp, Saccharomyces pastorianus
gggtcaactggacatcacacaggct

SEQ ID NO: 28573 - DNA, 25 bp, Saccharomyces pastorianus
ggacattcaggacgtgttcgacacc

SEQ ID NO: 28574 - DNA, 25 bp, Saccharomyces pastorianus
aaagcaggtttatcgacagcatcaa

SEQ ID NO: 28575 - DNA, 25 bp, Saccharomyces pastorianus
tgccggtgaggctccagcagaagaa

SEQ ID NO: 28576 - DNA, 25 bp, Saccharomyces pastorianus
gtcttcccagaagcagcatcaacaa

SEQ ID NO: 28577 - DNA, 25 bp, Saccharomyces pastorianus
gcaagagggcaagattaccggcgat

SEQ ID NO: 28578 - DNA, 25 bp, Saccharomyces pastorianus
caaggccacgaatcctctcttgaaa

SEQ ID NO: 28579 - DNA, 25 bp, Saccharomyces pastorianus
gaaacacacgagcttgaccaaaatg

SEQ ID NO: 28580 - DNA, 25 bp, Saccharomyces pastorianus
ttgaccaaaatgacctcgacatgat

SEQ ID NO: 28581 - DNA, 25 bp, Saccharomyces pastorianus
acagaagtcccacacaacgaagaag

SEQ ID NO: 28582 - DNA, 25 bp, Saccharomyces pastorianus
aagacacaagctgggcaaggccacg

SEQ ID NO: 28583 - DNA, 25 bp, Saccharomyces pastorianus
gacagcacacggaacttcttgttga

SEQ ID NO: 28584 - DNA, 25 bp, Saccharomyces pastorianus
tcaacaacctcctgacacagaagtc

SEQ ID NO: 28585 - DNA, 25 bp, Saccharomyces pastorianus
aacttttcacagagtggcctttcaa

SEQ ID NO: 28586 - DNA, 25 bp, Saccharomyces pastorianus
ggatgccaagtaccactgccagaaa

SEQ ID NO: 28587 - DNA, 25 bp, Saccharomyces pastorianus
gggatcccattgtgtttagtgccgc

SEQ ID NO: 28588 - DNA, 25 bp, Saccharomyces pastorianus
gacatggagggcagctatacttcaa

SEQ ID NO: 28589 - DNA, 25 bp, Saccharomyces pastorianus
tctaaccgtggctaacgtaacaggt

SEQ ID NO: 28590 - DNA, 25 bp, Saccharomyces pastorianus
gaaagcttctggcaagaccaagcat

SEQ ID NO: 28591 - DNA, 25 bp, Saccharomyces pastorianus
gaccaagcatgcgttccagatcgaa

SEQ ID NO: 28592 - DNA, 25 bp, Saccharomyces pastorianus
aagaacgccactaaacattgtcatg

SEQ ID NO: 28593 - DNA, 25 bp, Saccharomyces pastorianus
ctgctgaaaaagtgccccattgatt

SEQ ID NO: 28594 - DNA, 25 bp, Saccharomyces pastorianus
ccgcggacatctggcctacaaaagg

SEQ ID NO: 28595 - DNA, 25 bp, Saccharomyces pastorianus
ggccttattatgcagtggctgtcat

SEQ ID NO: 28596 - DNA, 25 bp, Saccharomyces pastorianus
gcagagttattcaaagctacggcca

SEQ ID NO: 28597 - DNA, 25 bp, Saccharomyces pastorianus
gagcttgtcaatatatggactctta

SEQ ID NO: 28598 - DNA, 25 bp, Saccharomyces pastorianus
ggcccgtacgattttgggtagcgct

SEQ ID NO: 28599 - DNA, 25 bp, Saccharomyces pastorianus
gaagacgtcttcaaaagagcttgtc

SEQ ID NO: 28600 - DNA, 25 bp, Saccharomyces pastorianus
ttgaagttgtccgtaagtttgctca

SEQ ID NO: 28601 - DNA, 25 bp, Saccharomyces pastorianus
cccagaaagaggtcgttcattattt

SEQ ID NO: 28602 - DNA, 25 bp, Saccharomyces pastorianus
gtagcgctttgaaggctctaccaaa

SEQ ID NO: 28603 - DNA, 25 bp, Saccharomyces pastorianus
ggctctaccaaaacgtagtcacatt

SEQ ID NO: 28604 - DNA, 25 bp, Saccharomyces pastorianus
ggactcttatgccattcatacaaaa

SEQ ID NO: 28605 - DNA, 25 bp, Saccharomyces pastorianus
gaaaagatttccatctgggtatcat

SEQ ID NO: 28606 - DNA, 25 bp, Saccharomyces pastorianus
gatttgtggaatgtttacgtggacc

SEQ ID NO: 28607 - DNA, 25 bp, Saccharomyces pastorianus
gagttgcctaattcagatctagtca

SEQ ID NO: 28608 - DNA, 25 bp, Saccharomyces pastorianus
taagcattccaactctgtcagatat

SEQ ID NO: 28609 - DNA, 25 bp, Saccharomyces pastorianus
cagatctagtcattcctttagtgga

SEQ ID NO: 28610 - DNA, 25 bp, Saccharomyces pastorianus
gagcgcctgaggacaacatttctga

SEQ ID NO: 28611 - DNA, 25 bp, Saccharomyces pastorianus
tggtgcatactttgagggagcgcct

SEQ ID NO: 28612 - DNA, 25 bp, Saccharomyces pastorianus
gtaatggtacctcatcatcaagggc

SEQ ID NO: 28613 - DNA, 25 bp, Saccharomyces pastorianus
atggttcaagtctcggtaatggtac

SEQ ID NO: 28614 - DNA, 25 bp, Saccharomyces pastorianus
gacacgccggtgaaccaggtaacga

SEQ ID NO: 28615 - DNA, 25 bp, Saccharomyces pastorianus
accgattcagaatacgtggccaaac

SEQ ID NO: 28616 - DNA, 25 bp, Saccharomyces pastorianus
tctgaacccttaatttcgggagctc

SEQ ID NO: 28617 - DNA, 25 bp, Saccharomyces pastorianus
aatgggtcaaaggacacgccggtga

SEQ ID NO: 28618 - DNA, 25 bp, Saccharomyces pastorianus
gaaatggttcaaagcacccttgaaa

SEQ ID NO: 28619 - DNA, 25 bp, Saccharomyces pastorianus
gactgtctcttaaagactgctggtt

SEQ ID NO: 28620 - DNA, 25 bp, Saccharomyces pastorianus
gctcgaggcacaagtggatgacctt

SEQ ID NO: 28621 - DNA, 25 bp, Saccharomyces pastorianus
aacactttcactaagcatgcttctt

SEQ ID NO: 28622 - DNA, 25 bp, Saccharomyces pastorianus
cagggcctggaaatcctggatttac

SEQ ID NO: 28623 - DNA, 25 bp, Saccharomyces pastorianus
gaaagtcgtcaagctataccaaaac

SEQ ID NO: 28624 - DNA, 25 bp, Saccharomyces pastorianus
tagctaaggctttgcctacttggaa

SEQ ID NO: 28625 - DNA, 25 bp, Saccharomyces pastorianus
ttgaaacatcctttttacctgccat

SEQ ID NO: 28626 - DNA, 25 bp, Saccharomyces pastorianus
tatcagacctaagggcgtggccact

SEQ ID NO: 28627 - DNA, 25 bp, Saccharomyces pastorianus
ccactttaattcactacgggctaca

SEQ ID NO: 28628 - DNA, 25 bp, Saccharomyces pastorianus
gctacaacacttacagggcctggaa

SEQ ID NO: 28629 - DNA, 25 bp, Saccharomyces pastorianus
tcgcagttcaagacatgggtatcac

SEQ ID NO: 28630 - DNA, 25 bp, Saccharomyces pastorianus
gaagcttctaagatgaggtccaaga

SEQ ID NO: 28631 - DNA, 25 bp, Saccharomyces pastorianus
agccgcaaaggctttccaagttgga

SEQ ID NO: 28632 - DNA, 25 bp, Saccharomyces pastorianus
agttattcgggctttgtgccaaaag

SEQ ID NO: 28633 - DNA, 25 bp, Saccharomyces pastorianus
atcgacgaagtagatgttcatggta

SEQ ID NO: 28634 - DNA, 25 bp, Saccharomyces pastorianus
gtctgcgcaaagaatctactggagt

SEQ ID NO: 28635 - DNA, 25 bp, Saccharomyces pastorianus
gattcagttttggtaaattccgaat

SEQ ID NO: 28636 - DNA, 25 bp, Saccharomyces pastorianus
tggataaccttttcatgctcctata

SEQ ID NO: 28637 - DNA, 25 bp, Saccharomyces pastorianus
aattccgaattgacctcttctcaaa

SEQ ID NO: 28638 - DNA, 25 bp, Saccharomyces pastorianus
ataccgattggcaatccgagcagtt

SEQ ID NO: 28639 - DNA, 25 bp, Saccharomyces pastorianus
gttggattgtctcaaagattttctc

SEQ ID NO: 28640 - DNA, 25 bp, Saccharomyces pastorianus
acagattctgaatggtgcggcgtca

SEQ ID NO: 28641 - DNA, 25 bp, Saccharomyces pastorianus
gaagccgctgccaaatcatgtgatg

SEQ ID NO: 28642 - DNA, 25 bp, Saccharomyces pastorianus
attcgtctacaaccagtgtgcttca

SEQ ID NO: 28643 - DNA, 25 bp, Saccharomyces pastorianus
cagaccagccccatacaaggaagat

SEQ ID NO: 28644 - DNA, 25 bp, Saccharomyces pastorianus
ggccttacaagtgttatggctcctt

SEQ ID NO: 28645 - DNA, 25 bp, Saccharomyces pastorianus
ggacctataaccacggtattgttct

SEQ ID NO: 28646 - DNA, 25 bp, Saccharomyces pastorianus
gtgcggcgtcatatttcttcaaaga

SEQ ID NO: 28647 - DNA, 25 bp, Saccharomyces pastorianus
attgttcttggtggtatggcgtata

SEQ ID NO: 28648 - DNA, 25 bp, Saccharomyces pastorianus
gcaaatgctggtatgaattcgtcta

SEQ ID NO: 28649 - DNA, 25 bp, Saccharomyces pastorianus
atcgtgcaggtgctgctattatcac

SEQ ID NO: 28650 - DNA, 25 bp, Saccharomyces pastorianus
atggctcctttcactagtgacacta

SEQ ID NO: 28651 - DNA, 25 bp, Saccharomyces pastorianus
aattgcaggtatcagggccgcagaa

SEQ ID NO: 28652 - DNA, 25 bp, Saccharomyces pastorianus
aaaagccaactgcaattgacccgaa

SEQ ID NO: 28653 - DNA, 25 bp, Saccharomyces pastorianus
gccactcatagtcaagttgccttgg

SEQ ID NO: 28654 - DNA, 25 bp, Saccharomyces pastorianus
ggtcatcgaggaggccactcatagt

SEQ ID NO: 28655 - DNA, 25 bp, Saccharomyces pastorianus
tgtagagttggcgacggtaccgttc

SEQ ID NO: 28656 - DNA, 25 bp, Saccharomyces pastorianus
aattgacccgaattccatagtagaa

SEQ ID NO: 28657 - DNA, 25 bp, Saccharomyces pastorianus
ttgaagcctatattggtggcctgat

SEQ ID NO: 28658 - DNA, 25 bp, Saccharomyces pastorianus
aagagccgcaattcctagaagtgaa

SEQ ID NO: 28659 - DNA, 25 bp, Saccharomyces pastorianus
cgcagaaagtgctcttcgtgacaag

SEQ ID NO: 28660 - DNA, 25 bp, Saccharomyces pastorianus
gaatctgtgctgaaggatccctcaa

SEQ ID NO: 28661 - DNA, 25 bp, Saccharomyces pastorianus
aagactggccaaaccggtcatcgag

SEQ ID NO: 28662 - DNA, 25 bp, Saccharomyces pastorianus
cgcgagattatgaacctgcccgaag

SEQ ID NO: 28663 - DNA, 25 bp, Saccharomyces pastorianus
ccgaagggcagttaccaccatggtg

SEQ ID NO: 28664 - DNA, 25 bp, Saccharomyces pastorianus
aatgggcactctagacttggattac

SEQ ID NO: 28665 - DNA, 25 bp, Saccharomyces pastorianus
acttgctacctttcggtgatgttta

SEQ ID NO: 28666 - DNA, 25 bp, Saccharomyces pastorianus
aattattccccatggtcagtcaagg

SEQ ID NO: 28667 - DNA, 25 bp, Saccharomyces pastorianus
gttggattgcctatagggtacccta

SEQ ID NO: 28668 - DNA, 25 bp, Saccharomyces pastorianus
aacgggagcgaactggaaacctgat

SEQ ID NO: 28669 - DNA, 25 bp, Saccharomyces pastorianus
aaatcgcaggcttgaattgggacat

SEQ ID NO: 28670 - DNA, 25 bp, Saccharomyces pastorianus
gaaactcctgaatttgaaaccacaa

SEQ ID NO: 28671 - DNA, 25 bp, Saccharomyces pastorianus
gaatcagtcaagaacttcgcgagat

SEQ ID NO: 28672 - DNA, 25 bp, Saccharomyces pastorianus
tggaaacctgatcacttgctacctt

SEQ ID NO: 28673 - DNA, 25 bp, Saccharomyces pastorianus
gtgtagttgccgtccatgatttcca

SEQ ID NO: 28674 - DNA, 25 bp, Saccharomyces pastorianus
gaattttactacaagccacgccatc

SEQ ID NO: 28675 - DNA, 25 bp, Saccharomyces pastorianus
gaagattttccatcatagccggcgg

SEQ ID NO: 28676 - DNA, 25 bp, Saccharomyces pastorianus
atgttcaaatcgactgcacacctga

SEQ ID NO: 28677 - DNA, 25 bp, Saccharomyces pastorianus
cttgggtgacgctttgggtaacatc

SEQ ID NO: 28678 - DNA, 25 bp, Saccharomyces pastorianus
gatccgattgtctctttgcttatca

SEQ ID NO: 28679 - DNA, 25 bp, Saccharomyces pastorianus
aacatggtatccattctgccacggt

SEQ ID NO: 28680 - DNA, 25 bp, Saccharomyces pastorianus
gataaattcattagctccgccaaat

SEQ ID NO: 28681 - DNA, 25 bp, Saccharomyces pastorianus
gccatctacaatttctgccgatcaa

SEQ ID NO: 28682 - DNA, 25 bp, Saccharomyces pastorianus
gaccgagtccatatacattgcatcc

SEQ ID NO: 28683 - DNA, 25 bp, Saccharomyces pastorianus
acatcggtgtcattacagcagcttt

SEQ ID NO: 28684 - DNA, 25 bp, Saccharomyces pastorianus
aacgccggagcgcaagagttctttt

SEQ ID NO: 28685 - DNA, 25 bp, Saccharomyces pastorianus
gagcgttttctttcgaactgttgaa

SEQ ID NO: 28686 - DNA, 25 bp, Saccharomyces pastorianus
aatgttgttggcgttggcgtctccg

SEQ ID NO: 28687 - DNA, 25 bp, Saccharomyces pastorianus
tgaattctagtaaacttcccggttg

SEQ ID NO: 28688 - DNA, 25 bp, Saccharomyces pastorianus
cgaaggctacagacggctccgataa

SEQ ID NO: 28689 - DNA, 25 bp, Saccharomyces pastorianus
ataccgaattatccattaccgaagg

SEQ ID NO: 28690 - DNA, 25 bp, Saccharomyces pastorianus
ggtggctttcaagttatcccaagaa

SEQ ID NO: 28691 - DNA, 25 bp, Saccharomyces pastorianus
ggaagtcccacaggcaattctttct

SEQ ID NO: 28692 - DNA, 25 bp, Saccharomyces pastorianus
tagacgctgtcgctgaacaaacgcc

SEQ ID NO: 28693 - DNA, 25 bp, Saccharomyces pastorianus
gtgagtactgggatcgcccacaagt

SEQ ID NO: 28694 - DNA, 25 bp, Saccharomyces pastorianus
ggtttgccaacacatagacgctgtc

SEQ ID NO: 28695 - DNA, 25 bp, Saccharomyces pastorianus
tatctcaagttgtcatttccgccgt

SEQ ID NO: 28696 - DNA, 25 bp, Saccharomyces pastorianus
gttatctcaagttgtcatttccgcc

SEQ ID NO: 28697 - DNA, 25 bp, Saccharomyces pastorianus
aactcctcaagctccaagaacgctg

SEQ ID NO: 28698 - DNA, 25 bp, Saccharomyces pastorianus
acgctgctcaaccaattgctggttt

SEQ ID NO: 28699 - DNA, 25 bp, Saccharomyces pastorianus
cttcaccggtttagttagtgctgcc

SEQ ID NO: 28700 - DNA, 25 bp, Saccharomyces pastorianus
aagaacgctgctcaaccaattgctg

SEQ ID NO: 28701 - DNA, 25 bp, Saccharomyces pastorianus
ttagttagtgctgccaacagctcca

SEQ ID NO: 28702 - DNA, 25 bp, Saccharomyces pastorianus
ttagtgctgccaacagctccaactc

SEQ ID NO: 28703 - DNA, 25 bp, Saccharomyces pastorianus
accggtttagttagtgctgccaaca

SEQ ID NO: 28704 - DNA, 25 bp, Saccharomyces pastorianus
caacggtaaggttgccggtgccgct

SEQ ID NO: 28705 - DNA, 25 bp, Saccharomyces pastorianus
aagttgtcatttccgccgtcgcctt

SEQ ID NO: 28706 - DNA, 25 bp, Saccharomyces pastorianus
cgtgttcggcattttttacaacgat

SEQ ID NO: 28707 - DNA, 25 bp, Saccharomyces pastorianus
atggatgagcacaacgattcgccgt

SEQ ID NO: 28708 - DNA, 25 bp, Saccharomyces pastorianus
gacaaagaggcgtactttccgtata

SEQ ID NO: 28709 - DNA, 25 bp, Saccharomyces pastorianus
caagctccaagaccaacgtatcgtt

SEQ ID NO: 28710 - DNA, 25 bp, Saccharomyces pastorianus
gaatcgggtttaagccattaagcac

SEQ ID NO: 28711 - DNA, 25 bp, Saccharomyces pastorianus
tgaagggactgatcatcggcatgga

SEQ ID NO: 28712 - DNA, 25 bp, Saccharomyces pastorianus
ggtggtagtcttatccccatgaaat

SEQ ID NO: 28713 - DNA, 25 bp, Saccharomyces pastorianus
ttcgtcgcacggcttcgacaaagag

SEQ ID NO: 28714 - DNA, 25 bp, Saccharomyces pastorianus
atcgggtaatagattcagccatcct

SEQ ID NO: 28715 - DNA, 25 bp, Saccharomyces pastorianus
attaagcacgatatacgcgcccgct

SEQ ID NO: 28716 - DNA, 25 bp, Saccharomyces pastorianus
agaattcatccagcggttcgtcaag

SEQ ID NO: 28717 - DNA, 25 bp, Saccharomyces pastorianus
ggatttattttccagctcctgctga

SEQ ID NO: 28718 - DNA, 25 bp, Saccharomyces pastorianus
aagactcattgccactttggtcggg

SEQ ID NO: 28719 - DNA, 25 bp, Saccharomyces pastorianus
ggtgataaggatccggtcagccaat

SEQ ID NO: 28720 - DNA, 25 bp, Saccharomyces pastorianus
gctgtgtctacatcattatccgtta

SEQ ID NO: 28721 - DNA, 25 bp, Saccharomyces pastorianus
aggatcgcttatggcatacacccag

SEQ ID NO: 28722 - DNA, 25 bp, Saccharomyces pastorianus
gttgatcgtgagaccatcgttctta

SEQ ID NO: 28723 - DNA, 25 bp, Saccharomyces pastorianus
atacacccagctgatttatgccgtg

SEQ ID NO: 28724 - DNA, 25 bp, Saccharomyces pastorianus
atcgttcttatttggagtgcccgaa

SEQ ID NO: 28725 - DNA, 25 bp, Saccharomyces pastorianus
gataattatcatcaccgctacgtta

SEQ ID NO: 28726 - DNA, 25 bp, Saccharomyces pastorianus
gctcctgctgactctgggaattcaa

SEQ ID NO: 28727 - DNA, 25 bp, Saccharomyces pastorianus
ttatgccgtgttctgggatgtcgca

SEQ ID NO: 28728 - DNA, 25 bp, Saccharomyces pastorianus
cacctgtttcgcctagcaagaataa

SEQ ID NO: 28729 - DNA, 25 bp, Saccharomyces pastorianus
gggcaagacttccactacaaacgaa

SEQ ID NO: 28730 - DNA, 25 bp, Saccharomyces pastorianus
aagactagtcatgaggagcaacaac

SEQ ID NO: 28731 - DNA, 25 bp, Saccharomyces pastorianus
gtttcgcctagcaagaataagcctg

SEQ ID NO: 28732 - DNA, 25 bp, Saccharomyces pastorianus
ataagcctgctaaaacgaagtccaa

SEQ ID NO: 28733 - DNA, 25 bp, Saccharomyces pastorianus
ccagacagaagaatccgcctcgtaa

SEQ ID NO: 28734 - DNA, 25 bp, Saccharomyces pastorianus
ttcccaaaagacaaccgaggtgcct

SEQ ID NO: 28735 - DNA, 25 bp, Saccharomyces pastorianus
gaagtccaaactggatgccgcttca

SEQ ID NO: 28736 - DNA, 25 bp, Saccharomyces pastorianus
actggatgccgcttcaaagatgaaa

SEQ ID NO: 28737 - DNA, 25 bp, Saccharomyces pastorianus
gtaaccagggcaagacttccactac

SEQ ID NO: 28738 - DNA, 25 bp, Saccharomyces pastorianus
aatccgcctcgtaaccagggcaaga

SEQ ID NO: 28739 - DNA, 25 bp, Saccharomyces pastorianus
cagaaagtgttccaatcgtccggta

SEQ ID NO: 28740 - DNA, 25 bp, Saccharomyces pastorianus
gtggagacatccaagatccgcatta

SEQ ID NO: 28741 - DNA, 25 bp, Saccharomyces pastorianus
tcgctgttgtcacaccactattata

SEQ ID NO: 28742 - DNA, 25 bp, Saccharomyces pastorianus
gagacatccaagatccgcattatat

SEQ ID NO: 28743 - DNA, 25 bp, Saccharomyces pastorianus
tgttccaatcgtccggtaaacctct

SEQ ID NO: 28744 - DNA, 25 bp, Saccharomyces pastorianus
tgtcacaccactattatacattcca

SEQ ID NO: 28745 - DNA, 25 bp, Saccharomyces pastorianus
aatcgtccggtaaacctctatggtg

SEQ ID NO: 28746 - DNA, 25 bp, Saccharomyces pastorianus
gatccgcattatatctatatccatt

SEQ ID NO: 28747 - DNA, 25 bp, Saccharomyces pastorianus
atctatatccattttatgccatttt

SEQ ID NO: 28748 - DNA, 25 bp, Saccharomyces pastorianus
tatgccatttttgcagtcgctgttg

SEQ ID NO: 28749 - DNA, 25 bp, Saccharomyces pastorianus
ttttgcagtcgctgttgtcacacca

SEQ ID NO: 28750 - DNA, 25 bp, Saccharomyces pastorianus
aaagcgtgagctttattacaaagaa

SEQ ID NO: 28751 - DNA, 25 bp, Saccharomyces pastorianus
ggtgaacttcctgagaacgctaaga

SEQ ID NO: 28752 - DNA, 25 bp, Saccharomyces pastorianus
gacggtaacaaaagaatggctcata

SEQ ID NO: 28753 - DNA, 25 bp, Saccharomyces pastorianus
tttgagagatttccaagacgaccaa

SEQ ID NO: 28754 - DNA, 25 bp, Saccharomyces pastorianus
cggtccaaagcgtgagctttattac

SEQ ID NO: 28755 - DNA, 25 bp, Saccharomyces pastorianus
agctagaacactgaagacccaaggt

SEQ ID NO: 28756 - DNA, 25 bp, Saccharomyces pastorianus
ttacaaagaagaaggccaggaatat

SEQ ID NO: 28757 - DNA, 25 bp, Saccharomyces pastorianus
gaagccagttgttttgacggtaaca

SEQ ID NO: 28758 - DNA, 25 bp, Saccharomyces pastorianus
ataacttcggtttcgaatctgacga

SEQ ID NO: 28759 - DNA, 25 bp, Saccharomyces pastorianus
gaacgctaagattaatgaaaccgat

SEQ ID NO: 28760 - DNA, 25 bp, Saccharomyces pastorianus
gatgaagctagaacactgaagaccc

SEQ ID NO: 28761 - DNA, 25 bp, Saccharomyces pastorianus
ccatcctttatggtagctccagatc

SEQ ID NO: 28762 - DNA, 25 bp, Saccharomyces pastorianus
taaaattcggctacaccatccttta

SEQ ID NO: 28763 - DNA, 25 bp, Saccharomyces pastorianus
taaggatatccacgcttatgtgcat

SEQ ID NO: 28764 - DNA, 25 bp, Saccharomyces pastorianus
tacctggctcctattacaagattgc

SEQ ID NO: 28765 - DNA, 25 bp, Saccharomyces pastorianus
agctccagatctacatatgccaaag

SEQ ID NO: 28766 - DNA, 25 bp, Saccharomyces pastorianus
gggttagccttagccgctgctgaat

SEQ ID NO: 28767 - DNA, 25 bp, Saccharomyces pastorianus
tggcgtcaataccaccgacaatagc

SEQ ID NO: 28768 - DNA, 25 bp, Saccharomyces pastorianus
agaagagctcgactggatgcaagaa

SEQ ID NO: 28769 - DNA, 25 bp, Saccharomyces pastorianus
gagccattgttcaagttggtcaagc

SEQ ID NO: 28770 - DNA, 25 bp, Saccharomyces pastorianus
gtatttctggttcaacatcacctat

SEQ ID NO: 28771 - DNA, 25 bp, Saccharomyces pastorianus
agaagatcaagaccgtgtcccaacc

SEQ ID NO: 28772 - DNA, 25 bp, Saccharomyces pastorianus
aactcgtggcgtaaactcatatcag

SEQ ID NO: 28773 - DNA, 25 bp, Saccharomyces pastorianus
gccaagtacgacaacctgccaaata

SEQ ID NO: 28774 - DNA, 25 bp, Saccharomyces pastorianus
agtgtaaacgatcccttatatccta

SEQ ID NO: 28775 - DNA, 25 bp, Saccharomyces pastorianus
atatcaggatcactacaggccaagt

SEQ ID NO: 28776 - DNA, 25 bp, Saccharomyces pastorianus
tttcctgggattttggatgctacca

SEQ ID NO: 28777 - DNA, 25 bp, Saccharomyces pastorianus
gctgcgaaattggttcagacgtttt

SEQ ID NO: 28778 - DNA, 25 bp, Saccharomyces pastorianus
gaataaatttgccttccgtgaacaa

SEQ ID NO: 28779 - DNA, 25 bp, Saccharomyces pastorianus
tatggtgccattccacaaacgtggg

SEQ ID NO: 28780 - DNA, 25 bp, Saccharomyces pastorianus
agatagtagtaagcctccttctgaa

SEQ ID NO: 28781 - DNA, 25 bp, Saccharomyces pastorianus
tatggactccgacaacgccatcaaa

SEQ ID NO: 28782 - DNA, 25 bp, Saccharomyces pastorianus
aaacggcgacttggctttgagaggt

SEQ ID NO: 28783 - DNA, 25 bp, Saccharomyces pastorianus
aaacacgatgccgagaagaccaact

SEQ ID NO: 28784 - DNA, 25 bp, Saccharomyces pastorianus
gaaaaagtacatctcgtcagtgact

SEQ ID NO: 28785 - DNA, 25 bp, Saccharomyces pastorianus
aagacttctcactttacgtaatagt

SEQ ID NO: 28786 - DNA, 25 bp, Saccharomyces pastorianus
aaactatgctgcacgacagggagat

SEQ ID NO: 28787 - DNA, 25 bp, Saccharomyces pastorianus
cgtcagtgactttaatggcgccatt

SEQ ID NO: 28788 - DNA, 25 bp, Saccharomyces pastorianus
atttctgtcggcttggcggataaga

SEQ ID NO: 28789 - DNA, 25 bp, Saccharomyces pastorianus
attgctgcgcatttataacttttga

SEQ ID NO: 28790 - DNA, 25 bp, Saccharomyces pastorianus
gatgcccatgatacttaacaattct

SEQ ID NO: 28791 - DNA, 25 bp, Saccharomyces pastorianus
gataaggtttcatcgagccaaatcg

SEQ ID NO: 28792 - DNA, 25 bp, Saccharomyces pastorianus
gaatggtacgatcaggcactatcaa

SEQ ID NO: 28793 - DNA, 25 bp, Saccharomyces pastorianus
gtgtttgtttccagtttccgataag

SEQ ID NO: 28794 - DNA, 25 bp, Saccharomyces pastorianus
taaaggtattccactggctgctatt

SEQ ID NO: 28795 - DNA, 25 bp, Saccharomyces pastorianus
ggactggaatgccaagccttgagat

SEQ ID NO: 28796 - DNA, 25 bp, Saccharomyces pastorianus
atcgatgatgtcatgaccgcgggaa

SEQ ID NO: 28797 - DNA, 25 bp, Saccharomyces pastorianus
ggttcaacgttcctgtattaagtat

SEQ ID NO: 28798 - DNA, 25 bp, Saccharomyces pastorianus
taagtatcgtttcactggctcacgt

SEQ ID NO: 28799 - DNA, 25 bp, Saccharomyces pastorianus
aatcgtgggagcatgtcttgaagac

SEQ ID NO: 28800 - DNA, 25 bp, Saccharomyces pastorianus
aattcgatgttatcttcggtccagc

SEQ ID NO: 28801 - DNA, 25 bp, Saccharomyces pastorianus
gtttaactctggtaagctgctagca

SEQ ID NO: 28802 - DNA, 25 bp, Saccharomyces pastorianus
ggttgttggttgtatcattgcccta

SEQ ID NO: 28803 - DNA, 25 bp, Saccharomyces pastorianus
ggctgctattgtgtgtgtcaaactc

SEQ ID NO: 28804 - DNA, 25 bp, Saccharomyces pastorianus
ctaaattcaggtaggcaatcgccat

SEQ ID NO: 28805 - DNA, 25 bp, Saccharomyces pastorianus
atgaactcgctatttgcttgcttcc

SEQ ID NO: 28806 - DNA, 25 bp, Saccharomyces pastorianus
agttttcgctttattgccactgtac

SEQ ID NO: 28807 - DNA, 25 bp, Saccharomyces pastorianus
tatttgtcattctgtgtgctccatt

SEQ ID NO: 28808 - DNA, 25 bp, Saccharomyces pastorianus
ggatctgctccattgttcggtaatt

SEQ ID NO: 28809 - DNA, 25 bp, Saccharomyces pastorianus
tgatgcctcccactttatttgtcat

SEQ ID NO: 28810 - DNA, 25 bp, Saccharomyces pastorianus
gtctgcatcgtttcttgtttcattt

SEQ ID NO: 28811 - DNA, 25 bp, Saccharomyces pastorianus
tatcagttgggctttggtgtcacct

SEQ ID NO: 28812 - DNA, 25 bp, Saccharomyces pastorianus
cacctcttggttctgggacgatgta

SEQ ID NO: 28813 - DNA, 25 bp, Saccharomyces pastorianus
tcattttgatgattggctgcccgaa

SEQ ID NO: 28814 - DNA, 25 bp, Saccharomyces pastorianus
ccaaattgccttcctttatgcgtaa

SEQ ID NO: 28815 - DNA, 25 bp, Saccharomyces pastorianus
atttggtacctacttgggtcctgat

SEQ ID NO: 28816 - DNA, 25 bp, Saccharomyces pastorianus
aatcctgtacacaacactctttggt

SEQ ID NO: 28817 - DNA, 25 bp, Saccharomyces pastorianus
aataccacattcacagctaagccat

SEQ ID NO: 28818 - DNA, 25 bp, Saccharomyces pastorianus
aaacagggttcacttccaagctggt

SEQ ID NO: 28819 - DNA, 25 bp, Saccharomyces pastorianus
tattttactgaccacatgcttccaa

SEQ ID NO: 28820 - DNA, 25 bp, Saccharomyces pastorianus
atgcaatctcatgggattcccgggc

SEQ ID NO: 28821 - DNA, 25 bp, Saccharomyces pastorianus
aaacctgtggtgctgtattgcccta

SEQ ID NO: 28822 - DNA, 25 bp, Saccharomyces pastorianus
atcactgttttttggactcgcacac

SEQ ID NO: 28823 - DNA, 25 bp, Saccharomyces pastorianus
aatgctacttcggtctgttgcttat

SEQ ID NO: 28824 - DNA, 25 bp, Saccharomyces pastorianus
tggtcccgtgctggattttgtacta

SEQ ID NO: 28825 - DNA, 25 bp, Saccharomyces pastorianus
ggaaggttccatgacaactctatct

SEQ ID NO: 28826 - DNA, 25 bp, Saccharomyces pastorianus
ggtcactttatattgtggtcccgtg

SEQ ID NO: 28827 - DNA, 25 bp, Saccharomyces pastorianus
tgcgttactagcgtccatgttccaa

SEQ ID NO: 28828 - DNA, 25 bp, Saccharomyces pastorianus
aatgatggaccctaacgctggcact

SEQ ID NO: 28829 - DNA, 25 bp, Saccharomyces pastorianus
attgaatcctttcgccaacgcaggc

SEQ ID NO: 28830 - DNA, 25 bp, Saccharomyces pastorianus
tatgttcaggcagatgctcaccaac

SEQ ID NO: 28831 - DNA, 25 bp, Saccharomyces pastorianus
aacccgcagatgctggacttcatga

SEQ ID NO: 28832 - DNA, 25 bp, Saccharomyces pastorianus
aatccgatcttccagtcgcagatga

SEQ ID NO: 28833 - DNA, 25 bp, Saccharomyces pastorianus
agatgctgcagagccctatgttcag

SEQ ID NO: 28834 - DNA, 25 bp, Saccharomyces pastorianus
aagcgccccagccagaggatacaag

SEQ ID NO: 28835 - DNA, 25 bp, Saccharomyces pastorianus
acttcatgattcagtccaatccgca

SEQ ID NO: 28836 - DNA, 25 bp, Saccharomyces pastorianus
aagaccaccagaggagcgctacgag

SEQ ID NO: 28837 - DNA, 25 bp, Saccharomyces pastorianus
agcgctacgagcaccaattgagaca

SEQ ID NO: 28838 - DNA, 25 bp, Saccharomyces pastorianus
gtatcatatcctccatttatcggtg

SEQ ID NO: 28839 - DNA, 25 bp, Saccharomyces pastorianus
attagcgctgctgttgttcttttac

SEQ ID NO: 28840 - DNA, 25 bp, Saccharomyces pastorianus
aagtctacatcgaagcctgtgcgaa

SEQ ID NO: 28841 - DNA, 25 bp, Saccharomyces pastorianus
atatcaatctgatactcccgaccat

SEQ ID NO: 28842 - DNA, 25 bp, Saccharomyces pastorianus
aagagggcttcttacttggcgaaat

SEQ ID NO: 28843 - DNA, 25 bp, Saccharomyces pastorianus
atgagtacattcgtctcactcttcg

SEQ ID NO: 28844 - DNA, 25 bp, Saccharomyces pastorianus
gaccataaacctgttctgccagtgg

SEQ ID NO: 28845 - DNA, 25 bp, Saccharomyces pastorianus
cactcttcgtgggtcagggacggaa

SEQ ID NO: 28846 - DNA, 25 bp, Saccharomyces pastorianus
tattatgttccgtttggtttcgaag

SEQ ID NO: 28847 - DNA, 25 bp, Saccharomyces pastorianus
tattatactgttccaagcccacttg

SEQ ID NO: 28848 - DNA, 25 bp, Saccharomyces pastorianus
tctgccagtggatccaacatctcaa

SEQ ID NO: 28849 - DNA, 25 bp, Saccharomyces pastorianus
atctattgttagatgctggcacttg

SEQ ID NO: 28850 - DNA, 25 bp, Saccharomyces pastorianus
gaggcttgagtattctagattcttt

SEQ ID NO: 28851 - DNA, 25 bp, Saccharomyces pastorianus
ggtatctttccacttgaatgacaac

SEQ ID NO: 28852 - DNA, 25 bp, Saccharomyces pastorianus
ttttgcatggaagccagcacacgac

SEQ ID NO: 28853 - DNA, 25 bp, Saccharomyces pastorianus
gttgagcccttctgttgattatgag

SEQ ID NO: 28854 - DNA, 25 bp, Saccharomyces pastorianus
ctggcacttgatgaagcattggcat

SEQ ID NO: 28855 - DNA, 25 bp, Saccharomyces pastorianus
gaggcaattgtatgacctggcgaaa

SEQ ID NO: 28856 - DNA, 25 bp, Saccharomyces pastorianus
gaggtaaaccctcagcagcgagaga

SEQ ID NO: 28857 - DNA, 25 bp, Saccharomyces pastorianus
gcagcgagagaattcatcaacgatt

SEQ ID NO: 28858 - DNA, 25 bp, Saccharomyces pastorianus
attcgcttgctattgatgttttaca

SEQ ID NO: 28859 - DNA, 25 bp, Saccharomyces pastorianus
gacaacgatcttcatagaggcttga

SEQ ID NO: 28860 - DNA, 25 bp, Saccharomyces pastorianus
atctgacttcaaaaacccatcattg

SEQ ID NO: 28861 - DNA, 25 bp, Saccharomyces pastorianus
acacgaagatgattccttgcggaaa

SEQ ID NO: 28862 - DNA, 25 bp, Saccharomyces pastorianus
gaagacccggccattcaaaggctaa

SEQ ID NO: 28863 - DNA, 25 bp, Saccharomyces pastorianus
ggaaaaatctgaagacccggccatt

SEQ ID NO: 28864 - DNA, 25 bp, Saccharomyces pastorianus
acatccttcactgtttgtactatcc

SEQ ID NO: 28865 - DNA, 25 bp, Saccharomyces pastorianus
atgggatactttaacctcagagatg

SEQ ID NO: 28866 - DNA, 25 bp, Saccharomyces pastorianus
gtttgctatcctatgattctggtga

SEQ ID NO: 28867 - DNA, 25 bp, Saccharomyces pastorianus
aaaattcccgagtttgctatcctat

SEQ ID NO: 28868 - DNA, 25 bp, Saccharomyces pastorianus
aaggacgttgacttctttattcaag

SEQ ID NO: 28869 - DNA, 25 bp, Saccharomyces pastorianus
aactcaaatccaattcacatccttc

SEQ ID NO: 28870 - DNA, 25 bp, Saccharomyces pastorianus
tttggaacacatcctacagcaagtt

SEQ ID NO: 28871 - DNA, 25 bp, Saccharomyces pastorianus
gtagcaaagtcgtatggtttcccag

SEQ ID NO: 28872 - DNA, 25 bp, Saccharomyces pastorianus
actatatcgatttgcctgttcttga

SEQ ID NO: 28873 - DNA, 25 bp, Saccharomyces pastorianus
tatggtttcccagttcctccaaaag

SEQ ID NO: 28874 - DNA, 25 bp, Saccharomyces pastorianus
aatctttaatgttcttgactcctaa

SEQ ID NO: 28875 - DNA, 25 bp, Saccharomyces pastorianus
tgcagccagaggtctagatatccct

SEQ ID NO: 28876 - DNA, 25 bp, Saccharomyces pastorianus
aagcatacgcttcacattctctgaa

SEQ ID NO: 28877 - DNA, 25 bp, Saccharomyces pastorianus
ggcaccaagggtaagggcaaatctt

SEQ ID NO: 28878 - DNA, 25 bp, Saccharomyces pastorianus
atcgtccaatttgatcctcctgatg

SEQ ID NO: 28879 - DNA, 25 bp, Saccharomyces pastorianus
gtgtaactctgtgaagtactacgct

SEQ ID NO: 28880 - DNA, 25 bp, Saccharomyces pastorianus
tgagtacgaattccccacaaataaa

SEQ ID NO: 28881 - DNA, 25 bp, Saccharomyces pastorianus
taatctgtacagatgttgcagccag

SEQ ID NO: 28882 - DNA, 25 bp, Saccharomyces pastorianus
agaaggtcacgttctgtgcgacgtc

SEQ ID NO: 28883 - DNA, 25 bp, Saccharomyces pastorianus
tcccacctatgggttccgtgtaaga

SEQ ID NO: 28884 - DNA, 25 bp, Saccharomyces pastorianus
ggctgatatatcgaacccaactaga

SEQ ID NO: 28885 - DNA, 25 bp, Saccharomyces pastorianus
tgggtgcttcttccaaccaaatgta

SEQ ID NO: 28886 - DNA, 25 bp, Saccharomyces pastorianus
aagctcagccttttgaacaagccgc

SEQ ID NO: 28887 - DNA, 25 bp, Saccharomyces pastorianus
atctgctgtggcctatgacgcgaac

SEQ ID NO: 28888 - DNA, 25 bp, Saccharomyces pastorianus
cttccgtagctgatcctatcttgga

SEQ ID NO: 28889 - DNA, 25 bp, Saccharomyces pastorianus
gtatgcctcaacagatgggtgcttc

SEQ ID NO: 28890 - DNA, 25 bp, Saccharomyces pastorianus
gtgcgacgtcttcggtcaaacaatc

SEQ ID NO: 28891 - DNA, 25 bp, Saccharomyces pastorianus
ttaaagatgcgtaccgcttccgtag

SEQ ID NO: 28892 - DNA, 25 bp, Saccharomyces pastorianus
gtgtaagacctgactttcccatgtt

SEQ ID NO: 28893 - DNA, 25 bp, Saccharomyces pastorianus
ttctgttcactacccaatccatgaa

SEQ ID NO: 28894 - DNA, 25 bp, Saccharomyces pastorianus
attacgaacccaacgatgagcatct

SEQ ID NO: 28895 - DNA, 25 bp, Saccharomyces pastorianus
aaggaacctcaatctggctccgtga

SEQ ID NO: 28896 - DNA, 25 bp, Saccharomyces pastorianus
atggttccactgtactccaatcaag

SEQ ID NO: 28897 - DNA, 25 bp, Saccharomyces pastorianus
atcgaaaacggcaacgtcccttctg

SEQ ID NO: 28898 - DNA, 25 bp, Saccharomyces pastorianus
atttcattgctcttaatcgctgctg

SEQ ID NO: 28899 - DNA, 25 bp, Saccharomyces pastorianus
aatcgctgctgtggaatacttcaaa

SEQ ID NO: 28900 - DNA, 25 bp, Saccharomyces pastorianus
tgtctgaatctgctcccattataac

SEQ ID NO: 28901 - DNA, 25 bp, Saccharomyces pastorianus
tatgttggctacgatacggactctg

SEQ ID NO: 28902 - DNA, 25 bp, Saccharomyces pastorianus
tggctccgtgatcaaactttgggct

SEQ ID NO: 28903 - DNA, 25 bp, Saccharomyces pastorianus
gcatctatccttctgtatcatcgaa

SEQ ID NO: 28904 - DNA, 25 bp, Saccharomyces pastorianus
gaaaccgtacagagaaggcttcgtt

SEQ ID NO: 28905 - DNA, 25 bp, Saccharomyces pastorianus
gatgattccatcgttagaggtacta

SEQ ID NO: 28906 - DNA, 25 bp, Saccharomyces pastorianus
gaacatttatcatgcctaaccaaag

SEQ ID NO: 28907 - DNA, 25 bp, Saccharomyces pastorianus
tagaggtactacttccagggaaatt

SEQ ID NO: 28908 - DNA, 25 bp, Saccharomyces pastorianus
gctcaaccctatggaatctgaattc

SEQ ID NO: 28909 - DNA, 25 bp, Saccharomyces pastorianus
attgcctataacagaaccaacgatg

SEQ ID NO: 28910 - DNA, 25 bp, Saccharomyces pastorianus
gaatcgatcgcaaacaactcttcag

SEQ ID NO: 28911 - DNA, 25 bp, Saccharomyces pastorianus
gaatctggtgcagcaaaggtcttct

SEQ ID NO: 28912 - DNA, 25 bp, Saccharomyces pastorianus
gataccaagaacttaattgcctata

SEQ ID NO: 28913 - DNA, 25 bp, Saccharomyces pastorianus
aaaggtcttctttgcatcagctgcg

SEQ ID NO: 28914 - DNA, 25 bp, Saccharomyces pastorianus
ctgcgccagctattcgttataatca

SEQ ID NO: 28915 - DNA, 25 bp, Saccharomyces pastorianus
taggatcctcataaatgggcgtgat

SEQ ID NO: 28916 - DNA, 25 bp, Saccharomyces pastorianus
gcatcttgaactattggctacaccc

SEQ ID NO: 28917 - DNA, 25 bp, Saccharomyces pastorianus
gtaccgggagttgtggaccattcag

SEQ ID NO: 28918 - DNA, 25 bp, Saccharomyces pastorianus
ttccctctggctcgagaacaagcgt

SEQ ID NO: 28919 - DNA, 25 bp, Saccharomyces pastorianus
gaccattcaggaggatctgcaccat

SEQ ID NO: 28920 - DNA, 25 bp, Saccharomyces pastorianus
ggctttgataccattgtcggagaaa

SEQ ID NO: 28921 - DNA, 25 bp, Saccharomyces pastorianus
tattagaagcaactttccctctggc

SEQ ID NO: 28922 - DNA, 25 bp, Saccharomyces pastorianus
gatacaccactttttaacgacacca

SEQ ID NO: 28923 - DNA, 25 bp, Saccharomyces pastorianus
catgtttttcgatgaggccacaagt

SEQ ID NO: 28924 - DNA, 25 bp, Saccharomyces pastorianus
aagcgtgtacattgcacatagactg

SEQ ID NO: 28925 - DNA, 25 bp, Saccharomyces pastorianus
ggctcaattagcaccactgatcaag

SEQ ID NO: 28926 - DNA, 25 bp, Saccharomyces pastorianus
taagctaagcgtcagaccttcgaat

SEQ ID NO: 28927 - DNA, 25 bp, Saccharomyces pastorianus
gtatcaaccctcagctgtggtatta

SEQ ID NO: 28928 - DNA, 25 bp, Saccharomyces pastorianus
tatgcgccgagtgttcaattgaatc

SEQ ID NO: 28929 - DNA, 25 bp, Saccharomyces pastorianus
gatgatgctacctatagagccgtgt

SEQ ID NO: 28930 - DNA, 25 bp, Saccharomyces pastorianus
gtcaatgttcctttacgagacggta

SEQ ID NO: 28931 - DNA, 25 bp, Saccharomyces pastorianus
ggtgctttgaaactggcctactgaa

SEQ ID NO: 28932 - DNA, 25 bp, Saccharomyces pastorianus
ggtgattccttgtctggtgatcgtc

SEQ ID NO: 28933 - DNA, 25 bp, Saccharomyces pastorianus
gaggattctgctgaggccaaagaca

SEQ ID NO: 28934 - DNA, 25 bp, Saccharomyces pastorianus
gagccgtgttcgaacctgtggtaaa

SEQ ID NO: 28935 - DNA, 25 bp, Saccharomyces pastorianus
gaaggtcatgctaactgtgtcaact

SEQ ID NO: 28936 - DNA, 25 bp, Saccharomyces pastorianus
ttgcttcaacctttccatggaaggt

SEQ ID NO: 28937 - DNA, 25 bp, Saccharomyces pastorianus
gtcgataattatacacccgttgatg

SEQ ID NO: 28938 - DNA, 25 bp, Saccharomyces pastorianus
tgaaaagagcgagattccaccaatg

SEQ ID NO: 28939 - DNA, 25 bp, Saccharomyces pastorianus
gaagcattgcttatagctcctgatg

SEQ ID NO: 28940 - DNA, 25 bp, Saccharomyces pastorianus
attcgtgatctttttgcatacaaca

SEQ ID NO: 28941 - DNA, 25 bp, Saccharomyces pastorianus
gagttgtacgagcattatctgcata

SEQ ID NO: 28942 - DNA, 25 bp, Saccharomyces pastorianus
atcggtgacttggattcgtgatctt

SEQ ID NO: 28943 - DNA, 25 bp, Saccharomyces pastorianus
acaaagccatgtctccatttacttc

SEQ ID NO: 28944 - DNA, 25 bp, Saccharomyces pastorianus
gatgatttcaccgaagcgtacaatg

SEQ ID NO: 28945 - DNA, 25 bp, Saccharomyces pastorianus
aaattctacgaaaaggtcctggatg

SEQ ID NO: 28946 - DNA, 25 bp, Saccharomyces pastorianus
agctcctgatgatgttctagtcgat

SEQ ID NO: 28947 - DNA, 25 bp, Saccharomyces pastorianus
gaagcgccagctgatattacggatg

SEQ ID NO: 28948 - DNA, 25 bp, Saccharomyces pastorianus
gtgcctatgccttacaagtttgtct

SEQ ID NO: 28949 - DNA, 25 bp, Saccharomyces pastorianus
agatccaacctcgagtgctgctgaa

SEQ ID NO: 28950 - DNA, 25 bp, Saccharomyces pastorianus
ggtcaaggaccagatctacctgtat

SEQ ID NO: 28951 - DNA, 25 bp, Saccharomyces pastorianus
tacaatttttgccttagtccccaat

SEQ ID NO: 28952 - DNA, 25 bp, Saccharomyces pastorianus
aatcgcagagatcctggtgtcttgt

SEQ ID NO: 28953 - DNA, 25 bp, Saccharomyces pastorianus
gaacgcagatgtttcctctagtctt

SEQ ID NO: 28954 - DNA, 25 bp, Saccharomyces pastorianus
catctcattcgctattcacggtaac

SEQ ID NO: 28955 - DNA, 25 bp, Saccharomyces pastorianus
gtggactctgtcctagaagacttcc

SEQ ID NO: 28956 - DNA, 25 bp, Saccharomyces pastorianus
aacgtggccctctcgatggaaattg

SEQ ID NO: 28957 - DNA, 25 bp, Saccharomyces pastorianus
tgtatactactgatgtccaccttgc

SEQ ID NO: 28958 - DNA, 25 bp, Saccharomyces pastorianus
aaatccctgctttggtcatctattc

SEQ ID NO: 28959 - DNA, 25 bp, Saccharomyces pastorianus
aaatctggaattcggagggcctcat

SEQ ID NO: 28960 - DNA, 25 bp, Saccharomyces pastorianus
aagtaccttattgatcctctgtccg

SEQ ID NO: 28961 - DNA, 25 bp, Saccharomyces pastorianus
gatcctctgtccgaatgctggtaat

SEQ ID NO: 28962 - DNA, 25 bp, Saccharomyces pastorianus
aggatgagattgtaccaccctttca

SEQ ID NO: 28963 - DNA, 25 bp, Saccharomyces pastorianus
gagacatgtcctagtgccaacaaga

SEQ ID NO: 28964 - DNA, 25 bp, Saccharomyces pastorianus
gtcgacggatccattccatactaag

SEQ ID NO: 28965 - DNA, 25 bp, Saccharomyces pastorianus
gtgtcatgtcacatctgtcgacgga

SEQ ID NO: 28966 - DNA, 25 bp, Saccharomyces pastorianus
tgccctttacattgcttccaaattc

SEQ ID NO: 28967 - DNA, 25 bp, Saccharomyces pastorianus
tcgagtttccgcttggttcacataa

SEQ ID NO: 28968 - DNA, 25 bp, Saccharomyces pastorianus
gtaattcggaaggttcgccaggcga

SEQ ID NO: 28969 - DNA, 25 bp, Saccharomyces pastorianus
aacaccatttttgttcctcagtggg

SEQ ID NO: 28970 - DNA, 25 bp, Saccharomyces pastorianus
gagcactttcaatggcgatttgcac

SEQ ID NO: 28971 - DNA, 25 bp, Saccharomyces pastorianus
agttacatttgtgctggtttctgaa

SEQ ID NO: 28972 - DNA, 25 bp, Saccharomyces pastorianus
tcaaagatccctatatcacctcaat

SEQ ID NO: 28973 - DNA, 25 bp, Saccharomyces pastorianus
aatggcctttcaacaattatctgga

SEQ ID NO: 28974 - DNA, 25 bp, Saccharomyces pastorianus
acctcaatgattctttccagtgtca

SEQ ID NO: 28975 - DNA, 25 bp, Saccharomyces pastorianus
gggacgcaagacctgtctgttgtat

SEQ ID NO: 28976 - DNA, 25 bp, Saccharomyces pastorianus
taattgtgacctgttgctttatttt

SEQ ID NO: 28977 - DNA, 25 bp, Saccharomyces pastorianus
cagtgtcaactttctctctacaata

SEQ ID NO: 28978 - DNA, 25 bp, Saccharomyces pastorianus
atttcccttgaggaccagagcactt

SEQ ID NO: 28979 - DNA, 25 bp, Saccharomyces pastorianus
gtgctggtttctgaactatttccct

SEQ ID NO: 28980 - DNA, 25 bp, Saccharomyces pastorianus
atttgccacttgtctgttagcgtta

SEQ ID NO: 28981 - DNA, 25 bp, Saccharomyces pastorianus
aaagacgagatttcaacctaccaag

SEQ ID NO: 28982 - DNA, 25 bp, Saccharomyces pastorianus
aatacgcatggtttcattacttcaa

SEQ ID NO: 28983 - DNA, 25 bp, Saccharomyces pastorianus
gtgggccatatatttgctactgcag

SEQ ID NO: 28984 - DNA, 25 bp, Saccharomyces pastorianus
gagcctattttgactataccgtatg

SEQ ID NO: 28985 - DNA, 25 bp, Saccharomyces pastorianus
attacttcaaagacacctcgccaag

SEQ ID NO: 28986 - DNA, 25 bp, Saccharomyces pastorianus
acttgaagcacatgcgctaccaaat

SEQ ID NO: 28987 - DNA, 25 bp, Saccharomyces pastorianus
gagtctatgttcactttggcatgct

SEQ ID NO: 28988 - DNA, 25 bp, Saccharomyces pastorianus
ttatcatataatccggtgggccata

SEQ ID NO: 28989 - DNA, 25 bp, Saccharomyces pastorianus
gaaattcccggtatcgattcatcaa

SEQ ID NO: 28990 - DNA, 25 bp, Saccharomyces pastorianus
acgcttacgatgacccgacgtacaa

SEQ ID NO: 28991 - DNA, 25 bp, Saccharomyces pastorianus
aagagtgaatttggtgctgcgccac

SEQ ID NO: 28992 - DNA, 25 bp, Saccharomyces pastorianus
tagactcctttttagacgtgaccaa

SEQ ID NO: 28993 - DNA, 25 bp, Saccharomyces pastorianus
caagaacaaccccatgtttgtcctt

SEQ ID NO: 28994 - DNA, 25 bp, Saccharomyces pastorianus
aggagtttgcaagaccgcacactac

SEQ ID NO: 28995 - DNA, 25 bp, Saccharomyces pastorianus
tggcagtttgttgggcctcagacaa

SEQ ID NO: 28996 - DNA, 25 bp, Saccharomyces pastorianus
gatgacctccctggcagaatacaag

SEQ ID NO: 28997 - DNA, 25 bp, Saccharomyces pastorianus
aacgcgttatgtgctgtaattcctg

SEQ ID NO: 28998 - DNA, 25 bp, Saccharomyces pastorianus
gatcccaatgctcctaaagttccat

SEQ ID NO: 28999 - DNA, 25 bp, Saccharomyces pastorianus
acactacctttcagtttcattcgga

SEQ ID NO: 29000 - DNA, 25 bp, Saccharomyces pastorianus
actacctaggcaatctctgtctgaa

SEQ ID NO: 29001 - DNA, 25 bp, Saccharomyces pastorianus
aaaggctctcctcaattcagtgttg

SEQ ID NO: 29002 - DNA, 25 bp, Saccharomyces pastorianus
tgtaattcctgtcgccatttatgat

SEQ ID NO: 29003 - DNA, 25 bp, Saccharomyces pastorianus
attttcactttctcagctcaagctg

SEQ ID NO: 29004 - DNA, 25 bp, Saccharomyces pastorianus
taaaggtcattcagggcccgatccg

SEQ ID NO: 29005 - DNA, 25 bp, Saccharomyces pastorianus
tgaacactcgggatcacaaccacta

SEQ ID NO: 29006 - DNA, 25 bp, Saccharomyces pastorianus
actacccctggattcgataaccatt

SEQ ID NO: 29007 - DNA, 25 bp, Saccharomyces pastorianus
gttcaatgagacagtgctgcctcca

SEQ ID NO: 29008 - DNA, 25 bp, Saccharomyces pastorianus
ggcaggcgtggtctgattctaacat

SEQ ID NO: 29009 - DNA, 25 bp, Saccharomyces pastorianus
tagactatctccataacgaacttga

SEQ ID NO: 29010 - DNA, 25 bp, Saccharomyces pastorianus
acacaatccctattagcctgtctaa

SEQ ID NO: 29011 - DNA, 25 bp, Saccharomyces pastorianus
tcgtcgactgaaggagctctatggt

SEQ ID NO: 29012 - DNA, 25 bp, Saccharomyces pastorianus
gcagatcgggcacaattttcacttt

SEQ ID NO: 29013 - DNA, 25 bp, Saccharomyces pastorianus
gggcacttttagatgagacaccaga

SEQ ID NO: 29014 - DNA, 25 bp, Saccharomyces pastorianus
ggctctattgacttacctattattg

SEQ ID NO: 29015 - DNA, 25 bp, Saccharomyces pastorianus
gaatctctcggtgaaatgcaaggta

SEQ ID NO: 29016 - DNA, 25 bp, Saccharomyces pastorianus
gcttgtgaagacttggtcgctgcat

SEQ ID NO: 29017 - DNA, 25 bp, Saccharomyces pastorianus
gtcgctgcatatgaatctctcggtg

SEQ ID NO: 29018 - DNA, 25 bp, Saccharomyces pastorianus
gagagctgttgcatctgacgcacaa

SEQ ID NO: 29019 - DNA, 25 bp, Saccharomyces pastorianus
agccatttcacataatcccgatttg

SEQ ID NO: 29020 - DNA, 25 bp, Saccharomyces pastorianus
gaagatgtcctagtggcatgcaaac

SEQ ID NO: 29021 - DNA, 25 bp, Saccharomyces pastorianus
atgggcccgacagtttggtgtgcaa

SEQ ID NO: 29022 - DNA, 25 bp, Saccharomyces pastorianus
gagagcttacagagccatttcacat

SEQ ID NO: 29023 - DNA, 25 bp, Saccharomyces pastorianus
aaatctggcgaaggctctattgact

SEQ ID NO: 29024 - DNA, 25 bp, Saccharomyces pastorianus
tcatatgtgtcactttacctcaagt

SEQ ID NO: 29025 - DNA, 25 bp, Saccharomyces pastorianus
gcacctagtgcggacgatggttagt

SEQ ID NO: 29026 - DNA, 25 bp, Saccharomyces pastorianus
taatgtctacccatcatctccatta

SEQ ID NO: 29027 - DNA, 25 bp, Saccharomyces pastorianus
tactaaagccagttttgcgtgtgaa

SEQ ID NO: 29028 - DNA, 25 bp, Saccharomyces pastorianus
tccattatccttttgggagcaccta

SEQ ID NO: 29029 - DNA, 25 bp, Saccharomyces pastorianus
aagtgctgttcctaacttggcaaca

SEQ ID NO: 29030 - DNA, 25 bp, Saccharomyces pastorianus
gcatttttcatcatgtacgcctaga

SEQ ID NO: 29031 - DNA, 25 bp, Saccharomyces pastorianus
aatgctaacgatgctgatgaccaag

SEQ ID NO: 29032 - DNA, 25 bp, Saccharomyces pastorianus
tgcgtgtgaacgtccctattgaagt

SEQ ID NO: 29033 - DNA, 25 bp, Saccharomyces pastorianus
aatatcccgttcactaatgtctacc

SEQ ID NO: 29034 - DNA, 25 bp, Saccharomyces pastorianus
atactcatcactcttactattggaa

SEQ ID NO: 29035 - DNA, 25 bp, Saccharomyces pastorianus
gatacgactgggagctattactaaa

SEQ ID NO: 29036 - DNA, 25 bp, Saccharomyces pastorianus
gtactacttgaacctgcctgaaaaa

SEQ ID NO: 29037 - DNA, 25 bp, Saccharomyces pastorianus
taacgacacgatgctgtactacttg

SEQ ID NO: 29038 - DNA, 25 bp, Saccharomyces pastorianus
agatctcgaacatctcgtatccttc

SEQ ID NO: 29039 - DNA, 25 bp, Saccharomyces pastorianus
tccaccggctgtctaggattcagaa

SEQ ID NO: 29040 - DNA, 25 bp, Saccharomyces pastorianus
aggtagtcaaggtcagcgacgccac

SEQ ID NO: 29041 - DNA, 25 bp, Saccharomyces pastorianus
aggatttcgatatccaccggctgtc

SEQ ID NO: 29042 - DNA, 25 bp, Saccharomyces pastorianus
gaagctgctttccagaccagcagta

SEQ ID NO: 29043 - DNA, 25 bp, Saccharomyces pastorianus
taatggacgatttcggcaagggccg

SEQ ID NO: 29044 - DNA, 25 bp, Saccharomyces pastorianus
agatggaactcgaccgggacgaacg

SEQ ID NO: 29045 - DNA, 25 bp, Saccharomyces pastorianus
aggctccacaattaccacgggcggt

SEQ ID NO: 29046 - DNA, 25 bp, Saccharomyces pastorianus
acacatttgacgttttctagcgtga

SEQ ID NO: 29047 - DNA, 25 bp, Saccharomyces pastorianus
gacattgtgaacctgttcctgtcca

SEQ ID NO: 29048 - DNA, 25 bp, Saccharomyces pastorianus
atcatgatcgggatgggcctcacgg

SEQ ID NO: 29049 - DNA, 25 bp, Saccharomyces pastorianus
atctggctagcggtaagtcctcgtc

SEQ ID NO: 29050 - DNA, 25 bp, Saccharomyces pastorianus
tccgctacgtctatatactactggc

SEQ ID NO: 29051 - DNA, 25 bp, Saccharomyces pastorianus
actgctgtcaatttttacgctctct

SEQ ID NO: 29052 - DNA, 25 bp, Saccharomyces pastorianus
atgtgctatgatgctttacttggac

SEQ ID NO: 29053 - DNA, 25 bp, Saccharomyces pastorianus
tggtggtgtcatttgtctcctgcat

SEQ ID NO: 29054 - DNA, 25 bp, Saccharomyces pastorianus
gctggtcgctctggcatatgacaag

SEQ ID NO: 29055 - DNA, 25 bp, Saccharomyces pastorianus
agttcaacctactttacggctggct

SEQ ID NO: 29056 - DNA, 25 bp, Saccharomyces pastorianus
taggtgccattcttttcactgcgta

SEQ ID NO: 29057 - DNA, 25 bp, Saccharomyces pastorianus
tgcgtacctgtttatcgacactcaa

SEQ ID NO: 29058 - DNA, 25 bp, Saccharomyces pastorianus
ttatctacacaacctgtcagcagtc

SEQ ID NO: 29059 - DNA, 25 bp, Saccharomyces pastorianus
gtaaagactacttctaccccataca

SEQ ID NO: 29060 - DNA, 25 bp, Saccharomyces pastorianus
gtcacctacgttgatgttaccacta

SEQ ID NO: 29061 - DNA, 25 bp, Saccharomyces pastorianus
taccccacaaagtaccacatcaatg

SEQ ID NO: 29062 - DNA, 25 bp, Saccharomyces pastorianus
gctgccaaaggttccgttgtcggac

SEQ ID NO: 29063 - DNA, 25 bp, Saccharomyces pastorianus
acatcaatggtctccaccgtaaaga

SEQ ID NO: 29064 - DNA, 25 bp, Saccharomyces pastorianus
tgccattgcttctgctgatgttact

SEQ ID NO: 29065 - DNA, 25 bp, Saccharomyces pastorianus
gtcagaataacaccactacaccagg

SEQ ID NO: 29066 - DNA, 25 bp, Saccharomyces pastorianus
acatttgttggtgccgctgccaaag

SEQ ID NO: 29067 - DNA, 25 bp, Saccharomyces pastorianus
tgatgttacttcagacggcgtcacc

SEQ ID NO: 29068 - DNA, 25 bp, Saccharomyces pastorianus
tacaccaggtatcagcacatttgtt

SEQ ID NO: 29069 - DNA, 25 bp, Saccharomyces pastorianus
ggcgctctatttaattgcaaccaat

SEQ ID NO: 29070 - DNA, 25 bp, Saccharomyces pastorianus
gttagatacagagcttccaccgaag

SEQ ID NO: 29071 - DNA, 25 bp, Saccharomyces pastorianus
agccactatggttggtacgccatat

SEQ ID NO: 29072 - DNA, 25 bp, Saccharomyces pastorianus
atccttggagattaagcgtttctta

SEQ ID NO: 29073 - DNA, 25 bp, Saccharomyces pastorianus
aggtgaaccaccatacttgaatgag

SEQ ID NO: 29074 - DNA, 25 bp, Saccharomyces pastorianus
acagattttggattctgcgctaaat

SEQ ID NO: 29075 - DNA, 25 bp, Saccharomyces pastorianus
aaatctgacaacgtcctgttggata

SEQ ID NO: 29076 - DNA, 25 bp, Saccharomyces pastorianus
gaggatcctttaaaggcgctctatt

SEQ ID NO: 29077 - DNA, 25 bp, Saccharomyces pastorianus
atacttcacgctcaccattaacaga

SEQ ID NO: 29078 - DNA, 25 bp, Saccharomyces pastorianus
gtttcttaagcgtttgtctttgcgt

SEQ ID NO: 29079 - DNA, 25 bp, Saccharomyces pastorianus
gaaaacagtcctgccaacgatactt

SEQ ID NO: 29080 - DNA, 25 bp, Saccharomyces pastorianus
gggaggcattgccattgactaatga

SEQ ID NO: 29081 - DNA, 25 bp, Saccharomyces pastorianus
aaggcccacgacagaagaagcggtt

SEQ ID NO: 29082 - DNA, 25 bp, Saccharomyces pastorianus
caagcatgggctgaagtctgaggtc

SEQ ID NO: 29083 - DNA, 25 bp, Saccharomyces pastorianus
aaggctatgaggagctcgtgctaca

SEQ ID NO: 29084 - DNA, 25 bp, Saccharomyces pastorianus
tacagagctccaaagttgcacttca

SEQ ID NO: 29085 - DNA, 25 bp, Saccharomyces pastorianus
gatctttagtgagcgatatcggtaa

SEQ ID NO: 29086 - DNA, 25 bp, Saccharomyces pastorianus
gaagaagcggttgacactgtgaaaa

SEQ ID NO: 29087 - DNA, 25 bp, Saccharomyces pastorianus
atgtctttcaattggcagatttcac

SEQ ID NO: 29088 - DNA, 25 bp, Saccharomyces pastorianus
tgactattctttcttaaggcccacg

SEQ ID NO: 29089 - DNA, 25 bp, Saccharomyces pastorianus
caaagcaaatgtatcttctgggaca

SEQ ID NO: 29090 - DNA, 25 bp, Saccharomyces pastorianus
acgtggcgcctgatactcaattaga

SEQ ID NO: 29091 - DNA, 25 bp, Saccharomyces pastorianus
aactgccccagtgatttcgggtttg

SEQ ID NO: 29092 - DNA, 25 bp, Saccharomyces pastorianus
gtatgtgcagtgtcaattccaagat

SEQ ID NO: 29093 - DNA, 25 bp, Saccharomyces pastorianus
tacgttagtacgaaactgccccagt

SEQ ID NO: 29094 - DNA, 25 bp, Saccharomyces pastorianus
ggtttgcctgccctaatgataaatc

SEQ ID NO: 29095 - DNA, 25 bp, Saccharomyces pastorianus
gatattcgccgatcatggcttgtga

SEQ ID NO: 29096 - DNA, 25 bp, Saccharomyces pastorianus
gatgtagcacgttatattccaagta

SEQ ID NO: 29097 - DNA, 25 bp, Saccharomyces pastorianus
atgtcggtggcgtgctattttcaca

SEQ ID NO: 29098 - DNA, 25 bp, Saccharomyces pastorianus
agtgacgttgcttattctgtaccca

SEQ ID NO: 29099 - DNA, 25 bp, Saccharomyces pastorianus
gaataagactctcatggcgcaaact

SEQ ID NO: 29100 - DNA, 25 bp, Saccharomyces pastorianus
tgtacccacatcatcattttcggtg

SEQ ID NO: 29101 - DNA, 25 bp, Saccharomyces pastorianus
ttacagttagtatcttgcgacgcag

SEQ ID NO: 29102 - DNA, 25 bp, Saccharomyces pastorianus
taagttctgccacgcttgttgacag

SEQ ID NO: 29103 - DNA, 25 bp, Saccharomyces pastorianus
tgggccaagtacacagacggtcttt

SEQ ID NO: 29104 - DNA, 25 bp, Saccharomyces pastorianus
cactgccgtgtgctatctgaacaag

SEQ ID NO: 29105 - DNA, 25 bp, Saccharomyces pastorianus
gacactgaagacttgatcctggatc

SEQ ID NO: 29106 - DNA, 25 bp, Saccharomyces pastorianus
gatactgagtgccaagttccacaac

SEQ ID NO: 29107 - DNA, 25 bp, Saccharomyces pastorianus
gacggtcttttcacgctagacgata

SEQ ID NO: 29108 - DNA, 25 bp, Saccharomyces pastorianus
tggatctacagcctctactggagcc

SEQ ID NO: 29109 - DNA, 25 bp, Saccharomyces pastorianus
agtgcaggcacaagtcctatcgctt

SEQ ID NO: 29110 - DNA, 25 bp, Saccharomyces pastorianus
tactggagcccatcaagcaggactt

SEQ ID NO: 29111 - DNA, 25 bp, Saccharomyces pastorianus
aaacgtgtctattgcatcggaccta

SEQ ID NO: 29112 - DNA, 25 bp, Saccharomyces pastorianus
aatataccgaacagcacgcgtacca

SEQ ID NO: 29113 - DNA, 25 bp, Saccharomyces pastorianus
gattctacgcggtcactaatgtgtt

SEQ ID NO: 29114 - DNA, 25 bp, Saccharomyces pastorianus
gtattgcccgccaagttgagagaca

SEQ ID NO: 29115 - DNA, 25 bp, Saccharomyces pastorianus
gtacgccaccgggaagactactgaa

SEQ ID NO: 29116 - DNA, 25 bp, Saccharomyces pastorianus
cgttggttcttttacagtgcgttgc

SEQ ID NO: 29117 - DNA, 25 bp, Saccharomyces pastorianus
taatcgtgtctgcaacgcgttggtt

SEQ ID NO: 29118 - DNA, 25 bp, Saccharomyces pastorianus
gttgctgaaagtcgtattgcccgcc

SEQ ID NO: 29119 - DNA, 25 bp, Saccharomyces pastorianus
gagctctctaaaacagtggcgattt

SEQ ID NO: 29120 - DNA, 25 bp, Saccharomyces pastorianus
taacgtttttgctcaggaccgacat

SEQ ID NO: 29121 - DNA, 25 bp, Saccharomyces pastorianus
acatcgtaccgctatgcctaaggat

SEQ ID NO: 29122 - DNA, 25 bp, Saccharomyces pastorianus
atacgacttcgaggcagaggacatt

SEQ ID NO: 29123 - DNA, 25 bp, Saccharomyces pastorianus
gagcatttgaccgtgagtacgccac

SEQ ID NO: 29124 - DNA, 25 bp, Saccharomyces pastorianus
aaagaagccatgtaccatctgtggt

SEQ ID NO: 29125 - DNA, 25 bp, Saccharomyces pastorianus
attcctttggtgacgccgatgctaa

SEQ ID NO: 29126 - DNA, 25 bp, Saccharomyces pastorianus
agttatcttggcagcattggtcata

SEQ ID NO: 29127 - DNA, 25 bp, Saccharomyces pastorianus
gttgtccaagaataccgcacccggt

SEQ ID NO: 29128 - DNA, 25 bp, Saccharomyces pastorianus
aaagattcagtgctacctcattgcc

SEQ ID NO: 29129 - DNA, 25 bp, Saccharomyces pastorianus
ggagactaaacattaccagccgtat

SEQ ID NO: 29130 - DNA, 25 bp, Saccharomyces pastorianus
gagagcaacgcttccaatggtgacg

SEQ ID NO: 29131 - DNA, 25 bp, Saccharomyces pastorianus
agacttcccagcaggtagacttaga

SEQ ID NO: 29132 - DNA, 25 bp, Saccharomyces pastorianus
ggtttcgccaattatgacctgccga

SEQ ID NO: 29133 - DNA, 25 bp, Saccharomyces pastorianus
ctcctctactagtacatctctggat

SEQ ID NO: 29134 - DNA, 25 bp, Saccharomyces pastorianus
ggatgggaagtcaagcacctcaaag

SEQ ID NO: 29135 - DNA, 25 bp, Saccharomyces pastorianus
gaccttcagttatcgatgagcgtca

SEQ ID NO: 29136 - DNA, 25 bp, Saccharomyces pastorianus
tatccactgtctgctcagatgggaa

SEQ ID NO: 29137 - DNA, 25 bp, Saccharomyces pastorianus
acttgcggacggaaaactggagatt

SEQ ID NO: 29138 - DNA, 25 bp, Saccharomyces pastorianus
tgacgaatctgatttccctatcctg

SEQ ID NO: 29139 - DNA, 25 bp, Saccharomyces pastorianus
ggtgactccaatgtttctcaaagaa

SEQ ID NO: 29140 - DNA, 25 bp, Saccharomyces pastorianus
ggagattccagagttcatgcatgac

SEQ ID NO: 29141 - DNA, 25 bp, Saccharomyces pastorianus
aattgacgagtctatccactgtctg

SEQ ID NO: 29142 - DNA, 25 bp, Saccharomyces pastorianus
gatctgctacttcgaccttcagtta

SEQ ID NO: 29143 - DNA, 25 bp, Saccharomyces pastorianus
ctgtcgcaaggttttgacgcgtttg

SEQ ID NO: 29144 - DNA, 25 bp, Saccharomyces pastorianus
gactcaagtcagtagcatcaccggt

SEQ ID NO: 29145 - DNA, 25 bp, Saccharomyces pastorianus
ggagacgctactaatgtaccaagac

SEQ ID NO: 29146 - DNA, 25 bp, Saccharomyces pastorianus
ttgggatactacatcttccactcgg

SEQ ID NO: 29147 - DNA, 25 bp, Saccharomyces pastorianus
aagcatccagactaagcgcggtacg

SEQ ID NO: 29148 - DNA, 25 bp, Saccharomyces pastorianus
agcccgttatttgagtgtttcacca

SEQ ID NO: 29149 - DNA, 25 bp, Saccharomyces pastorianus
ttacatactctttgcaagcccgtta

SEQ ID NO: 29150 - DNA, 25 bp, Saccharomyces pastorianus
ccttgactttctactactcgttgta

SEQ ID NO: 29151 - DNA, 25 bp, Saccharomyces pastorianus
cggtttcatgttagcgttcggagat

SEQ ID NO: 29152 - DNA, 25 bp, Saccharomyces pastorianus
actcgttgtatttcgcgacactgtt

SEQ ID NO: 29153 - DNA, 25 bp, Saccharomyces pastorianus
gggctaaatcgcaacatatcaacta

SEQ ID NO: 29154 - DNA, 25 bp, Saccharomyces pastorianus
gcaaggtcgtgggtattttgtcaat

SEQ ID NO: 29155 - DNA, 25 bp, Saccharomyces pastorianus
aactacggatggattcggtttcatg

SEQ ID NO: 29156 - DNA, 25 bp, Saccharomyces pastorianus
caacgatgcgttggttttagtcaat

SEQ ID NO: 29157 - DNA, 25 bp, Saccharomyces pastorianus
attgctggcatctcaggacagaagc

SEQ ID NO: 29158 - DNA, 25 bp, Saccharomyces pastorianus
caagcctgctcaaacatatttctct

SEQ ID NO: 29159 - DNA, 25 bp, Saccharomyces pastorianus
caaagcgtggtctctactacatcgt

SEQ ID NO: 29160 - DNA, 25 bp, Saccharomyces pastorianus
agacatcacgaaggtactttccgcc

SEQ ID NO: 29161 - DNA, 25 bp, Saccharomyces pastorianus
ggccacgatgcctttttgttggaat

SEQ ID NO: 29162 - DNA, 25 bp, Saccharomyces pastorianus
gttacattgccattacgcgtaagct

SEQ ID NO: 29163 - DNA, 25 bp, Saccharomyces pastorianus
atatttctctgcacaaagctacttg

SEQ ID NO: 29164 - DNA, 25 bp, Saccharomyces pastorianus
agcagccttcgctgatcatcggtat

SEQ ID NO: 29165 - DNA, 25 bp, Saccharomyces pastorianus
actacatcgtcttcggactcattaa

SEQ ID NO: 29166 - DNA, 25 bp, Saccharomyces pastorianus
tgatgggcttttcacatactccgaa

SEQ ID NO: 29167 - DNA, 25 bp, Saccharomyces pastorianus
gtaagctccgtcaccggtgaagtga

SEQ ID NO: 29168 - DNA, 25 bp, Saccharomyces pastorianus
ttgttgttaatactgcccgtggtgc

SEQ ID NO: 29169 - DNA, 25 bp, Saccharomyces pastorianus
gagttggtcgctcataacgctaaga

SEQ ID NO: 29170 - DNA, 25 bp, Saccharomyces pastorianus
ggatatcgtgtctgtaaacgtccca

SEQ ID NO: 29171 - DNA, 25 bp, Saccharomyces pastorianus
gcccgtggtgcagtcatagatgaac

SEQ ID NO: 29172 - DNA, 25 bp, Saccharomyces pastorianus
gttttgagcttacctcacatgggta

SEQ ID NO: 29173 - DNA, 25 bp, Saccharomyces pastorianus
acatgggtactcactgtgtggaaac

SEQ ID NO: 29174 - DNA, 25 bp, Saccharomyces pastorianus
gtgtgcttctccctttggttacgac

SEQ ID NO: 29175 - DNA, 25 bp, Saccharomyces pastorianus
gtttttgaagcgctcggatatcgtg

SEQ ID NO: 29176 - DNA, 25 bp, Saccharomyces pastorianus
tagtggcacccaccatctaatcgat

SEQ ID NO: 29177 - DNA, 25 bp, Saccharomyces pastorianus
aatgaccgatgctctacgcagtgga

SEQ ID NO: 29178 - DNA, 25 bp, Saccharomyces pastorianus
caaagaacttttatccatgcctcaa

SEQ ID NO: 29179 - DNA, 25 bp, Saccharomyces pastorianus
gaggagtgacactttcgacttcgaa

SEQ ID NO: 29180 - DNA, 25 bp, Saccharomyces pastorianus
gagaggattgcatgcatcttcaagc

SEQ ID NO: 29181 - DNA, 25 bp, Saccharomyces pastorianus
gaagacacagagaacgcaaccacag

SEQ ID NO: 29182 - DNA, 25 bp, Saccharomyces pastorianus
gaaagtgccactaccaacgataaaa

SEQ ID NO: 29183 - DNA, 25 bp, Saccharomyces pastorianus
aaagctcaagttgtatctccagaca

SEQ ID NO: 29184 - DNA, 25 bp, Saccharomyces pastorianus
atacctttgtcgtcatctagtacag

SEQ ID NO: 29185 - DNA, 25 bp, Saccharomyces pastorianus
gagtggaaactcgtcggcagcagaa

SEQ ID NO: 29186 - DNA, 25 bp, Saccharomyces pastorianus
tcagctgcgactactacgagtggaa

SEQ ID NO: 29187 - DNA, 25 bp, Saccharomyces pastorianus
acagatgaatcacccgccggtgtat

SEQ ID NO: 29188 - DNA, 25 bp, Saccharomyces pastorianus
ggaaagcttctcagcgtaagattca

SEQ ID NO: 29189 - DNA, 25 bp, Saccharomyces pastorianus
tgtccaggacgaactcaaaagctct

SEQ ID NO: 29190 - DNA, 25 bp, Saccharomyces pastorianus
cagcctgtagattttgtagccgcat

SEQ ID NO: 29191 - DNA, 25 bp, Saccharomyces pastorianus
tgatcaccataatctctgcgggcaa

SEQ ID NO: 29192 - DNA, 25 bp, Saccharomyces pastorianus
ggatcacattccagctttggttcaa

SEQ ID NO: 29193 - DNA, 25 bp, Saccharomyces pastorianus
gttctcgcacatccgttttatgcaa

SEQ ID NO: 29194 - DNA, 25 bp, Saccharomyces pastorianus
atgatgccgtacctagcttactatg

SEQ ID NO: 29195 - DNA, 25 bp, Saccharomyces pastorianus
tgcgggcaactccaacgtgtatatc

SEQ ID NO: 29196 - DNA, 25 bp, Saccharomyces pastorianus
atcgccctgatagttctgatccaag

SEQ ID NO: 29197 - DNA, 25 bp, Saccharomyces pastorianus
gtatatcggctcaagggtcctgtac

SEQ ID NO: 29198 - DNA, 25 bp, Saccharomyces pastorianus
ggattcctggctttcttagagactt

SEQ ID NO: 29199 - DNA, 25 bp, Saccharomyces pastorianus
atatcggtcttcctgtttgtggcaa

SEQ ID NO: 29200 - DNA, 25 bp, Saccharomyces pastorianus
aagtttctgtcgatcgttaccacgg

SEQ ID NO: 29201 - DNA, 25 bp, Saccharomyces pastorianus
ggtttcaagcattctgtccattcaa

SEQ ID NO: 29202 - DNA, 25 bp, Saccharomyces pastorianus
taaattcatgccctacggtgcctac

SEQ ID NO: 29203 - DNA, 25 bp, Saccharomyces pastorianus
gtcaccgtcatcattttcattcaag

SEQ ID NO: 29204 - DNA, 25 bp, Saccharomyces pastorianus
ttttggccttcttggttgtcaacaa

SEQ ID NO: 29205 - DNA, 25 bp, Saccharomyces pastorianus
gtgttttgtactctttggcccagac

SEQ ID NO: 29206 - DNA, 25 bp, Saccharomyces pastorianus
tggccgaattctttacgtcctacat

SEQ ID NO: 29207 - DNA, 25 bp, Saccharomyces pastorianus
tatggcgtgttgtctacagctgcat

SEQ ID NO: 29208 - DNA, 25 bp, Saccharomyces pastorianus
agtcttgatcactgttatctctgcc

SEQ ID NO: 29209 - DNA, 25 bp, Saccharomyces pastorianus
ttctttaattcttttggccgtcgtg

SEQ ID NO: 29210 - DNA, 25 bp, Saccharomyces pastorianus
tctgccgctaactcaaacgtttacg

SEQ ID NO: 29211 - DNA, 25 bp, Saccharomyces pastorianus
gaaacagcgtggtatctctcgtgat

SEQ ID NO: 29212 - DNA, 25 bp, Saccharomyces pastorianus
gttcattggctgcatattctgtcat

SEQ ID NO: 29213 - DNA, 25 bp, Saccharomyces pastorianus
acagctacgacaaaggtttcaatta

SEQ ID NO: 29214 - DNA, 25 bp, Saccharomyces pastorianus
taatatgcaaccttgttttgatgct

SEQ ID NO: 29215 - DNA, 25 bp, Saccharomyces pastorianus
attctcccggttcagtgggattcga

SEQ ID NO: 29216 - DNA, 25 bp, Saccharomyces pastorianus
agagagctcaagacaatttcgcctg

SEQ ID NO: 29217 - DNA, 25 bp, Saccharomyces pastorianus
gacaatttcgcctgttcattggctg

SEQ ID NO: 29218 - DNA, 25 bp, Saccharomyces pastorianus
taagggtggtattgcatcattgaat

SEQ ID NO: 29219 - DNA, 25 bp, Saccharomyces pastorianus
atgaaggtcatgtaagccacattga

SEQ ID NO: 29220 - DNA, 25 bp, Saccharomyces pastorianus
gggattcgaagctgcaccatttaaa

SEQ ID NO: 29221 - DNA, 25 bp, Saccharomyces pastorianus
ggtttatgctatcgaattctcccgg

SEQ ID NO: 29222 - DNA, 25 bp, Saccharomyces pastorianus
gccacattgattttgggtttatgct

SEQ ID NO: 29223 - DNA, 25 bp, Saccharomyces pastorianus
aagtttaatcttctaggccgctccg

SEQ ID NO: 29224 - DNA, 25 bp, Saccharomyces pastorianus
gtgaccatgccattcaacttgacta

SEQ ID NO: 29225 - DNA, 25 bp, Saccharomyces pastorianus
gcaacggatcatggactctggcaat

SEQ ID NO: 29226 - DNA, 25 bp, Saccharomyces pastorianus
aactatttcttgttcgtctacggct

SEQ ID NO: 29227 - DNA, 25 bp, Saccharomyces pastorianus
ttgaaactcatcttggtgcccttta

SEQ ID NO: 29228 - DNA, 25 bp, Saccharomyces pastorianus
ggctggtcacctacattcttatttg

SEQ ID NO: 29229 - DNA, 25 bp, Saccharomyces pastorianus
gtgccctttatcaacggtaccaaga

SEQ ID NO: 29230 - DNA, 25 bp, Saccharomyces pastorianus
gttctacttattcatagccttcggc

SEQ ID NO: 29231 - DNA, 25 bp, Saccharomyces pastorianus
gaactgttgtgttacgtcggttaca

SEQ ID NO: 29232 - DNA, 25 bp, Saccharomyces pastorianus
ggtgagcacccgttatgtgttcaat

SEQ ID NO: 29233 - DNA, 25 bp, Saccharomyces pastorianus
ctccggtgctggtgaagacgacata

SEQ ID NO: 29234 - DNA, 25 bp, Saccharomyces pastorianus
gaacatatttgaaccgctgactctt

SEQ ID NO: 29235 - DNA, 25 bp, Saccharomyces pastorianus
atcggctcttcgtgaggaaccttta

SEQ ID NO: 29236 - DNA, 25 bp, Saccharomyces pastorianus
gtcaacccaagatatttgcaacctt

SEQ ID NO: 29237 - DNA, 25 bp, Saccharomyces pastorianus
gattgctggctatttttcaagctat

SEQ ID NO: 29238 - DNA, 25 bp, Saccharomyces pastorianus
catttgttcgtatttggagcctaga

SEQ ID NO: 29239 - DNA, 25 bp, Saccharomyces pastorianus
tgaggtgttccaaaatctgtcagaa

SEQ ID NO: 29240 - DNA, 25 bp, Saccharomyces pastorianus
caaccttctttgtttgccattgaaa

SEQ ID NO: 29241 - DNA, 25 bp, Saccharomyces pastorianus
taagagcagccaaacgtacgaacta

SEQ ID NO: 29242 - DNA, 25 bp, Saccharomyces pastorianus
gctaatagcttcgtacatttgttcg

SEQ ID NO: 29243 - DNA, 25 bp, Saccharomyces pastorianus
aaactatttgttggcactgatgatg

SEQ ID NO: 29244 - DNA, 25 bp, Saccharomyces pastorianus
caaaagtggttctctatcggctctt

SEQ ID NO: 29245 - DNA, 25 bp, Saccharomyces pastorianus
agacgtgtacactacgctttcttac

SEQ ID NO: 29246 - DNA, 25 bp, Saccharomyces pastorianus
ggttttgacaagactagagccagac

SEQ ID NO: 29247 - DNA, 25 bp, Saccharomyces pastorianus
agcgcagttaataaggttttgacaa

SEQ ID NO: 29248 - DNA, 25 bp, Saccharomyces pastorianus
gtcatgacctgttcgggttgttcta

SEQ ID NO: 29249 - DNA, 25 bp, Saccharomyces pastorianus
gagccagacgtttctaagataaata

SEQ ID NO: 29250 - DNA, 25 bp, Saccharomyces pastorianus
acactacgctttcttacgactttat

SEQ ID NO: 29251 - DNA, 25 bp, Saccharomyces pastorianus
aatatatcacttgagcagcaatcag

SEQ ID NO: 29252 - DNA, 25 bp, Saccharomyces pastorianus
ttcgggttgttctagcgcagttaat

SEQ ID NO: 29253 - DNA, 25 bp, Saccharomyces pastorianus
gcagcaatcagtagacgtgtacact

SEQ ID NO: 29254 - DNA, 25 bp, Saccharomyces pastorianus
gactagagccagacgtttctaagat

SEQ ID NO: 29255 - DNA, 25 bp, Saccharomyces pastorianus
caaatcattaccaattcaatgtcgt

SEQ ID NO: 29256 - DNA, 25 bp, Saccharomyces pastorianus
gaaccggtcacatctccagagagtg

SEQ ID NO: 29257 - DNA, 25 bp, Saccharomyces pastorianus
gtggtggtccaaaccatatggctaa

SEQ ID NO: 29258 - DNA, 25 bp, Saccharomyces pastorianus
gtcaagccggccatatgtctagaga

SEQ ID NO: 29259 - DNA, 25 bp, Saccharomyces pastorianus
gaaggctagcggtagattctccaag

SEQ ID NO: 29260 - DNA, 25 bp, Saccharomyces pastorianus
tgtaacaagccaggtcacgtccaaa

SEQ ID NO: 29261 - DNA, 25 bp, Saccharomyces pastorianus
gattctccaaggtttcatgctataa

SEQ ID NO: 29262 - DNA, 25 bp, Saccharomyces pastorianus
gtaccgttcaacgttgtttcaactg

SEQ ID NO: 29263 - DNA, 25 bp, Saccharomyces pastorianus
ggccatttagccgaagattgtgatt

SEQ ID NO: 29264 - DNA, 25 bp, Saccharomyces pastorianus
agactgtactatgccaagaactgtt

SEQ ID NO: 29265 - DNA, 25 bp, Saccharomyces pastorianus
gaaaccggtcacgtcagaagcgaat

SEQ ID NO: 29266 - DNA, 25 bp, Saccharomyces pastorianus
agagactgccaaaacgacaagcttt

SEQ ID NO: 29267 - DNA, 25 bp, Saccharomyces pastorianus
gagctgttatatttggagcctaaag

SEQ ID NO: 29268 - DNA, 25 bp, Saccharomyces pastorianus
gagcctaaagtcactatgttgcgag

SEQ ID NO: 29269 - DNA, 25 bp, Saccharomyces pastorianus
tctgccgtagtagcactagacgtgt

SEQ ID NO: 29270 - DNA, 25 bp, Saccharomyces pastorianus
atggaagtcacatttttgttggctt

SEQ ID NO: 29271 - DNA, 25 bp, Saccharomyces pastorianus
tagccaaccacaaatctgacctagt

SEQ ID NO: 29272 - DNA, 25 bp, Saccharomyces pastorianus
atcatggtacattttgtcaggcaag

SEQ ID NO: 29273 - DNA, 25 bp, Saccharomyces pastorianus
ggtgtatttttacgatctcaacgaa

SEQ ID NO: 29274 - DNA, 25 bp, Saccharomyces pastorianus
gaagatactttgtcactggtagcag

SEQ ID NO: 29275 - DNA, 25 bp, Saccharomyces pastorianus
gcacatactagttccattactggta

SEQ ID NO: 29276 - DNA, 25 bp, Saccharomyces pastorianus
gaatccaaatctttagccaaccaca

SEQ ID NO: 29277 - DNA, 25 bp, Saccharomyces pastorianus
attcaagatttagactctgccgtag

SEQ ID NO: 29278 - DNA, 25 bp, Saccharomyces pastorianus
aggacgaccagaatagctcagcaga

SEQ ID NO: 29279 - DNA, 25 bp, Saccharomyces pastorianus
ggaagttaatctgcctagtagcaat

SEQ ID NO: 29280 - DNA, 25 bp, Saccharomyces pastorianus
ggtataccggacatcaagcatggca

SEQ ID NO: 29281 - DNA, 25 bp, Saccharomyces pastorianus
ttcccaaactttgacttatctgacg

SEQ ID NO: 29282 - DNA, 25 bp, Saccharomyces pastorianus
taggcggtgatcagatacacacttg

SEQ ID NO: 29283 - DNA, 25 bp, Saccharomyces pastorianus
ggaagttcgatttgacagccgacaa

SEQ ID NO: 29284 - DNA, 25 bp, Saccharomyces pastorianus
aaagcccttacacatcaacgcggag

SEQ ID NO: 29285 - DNA, 25 bp, Saccharomyces pastorianus
gatgttaacagacccgtcattccaa

SEQ ID NO: 29286 - DNA, 25 bp, Saccharomyces pastorianus
gacagccgacaagaatgacacattt

SEQ ID NO: 29287 - DNA, 25 bp, Saccharomyces pastorianus
aaatctcacattttggcagggaagt

SEQ ID NO: 29288 - DNA, 25 bp, Saccharomyces pastorianus
ttatctgacgactcaaagcccttac

SEQ ID NO: 29289 - DNA, 25 bp, Saccharomyces pastorianus
aatctctcaaaagatgcccaccgat

SEQ ID NO: 29290 - DNA, 25 bp, Saccharomyces pastorianus
aagatggtgctttgccgttaagaac

SEQ ID NO: 29291 - DNA, 25 bp, Saccharomyces pastorianus
agcatatcttcattatctcctgtac

SEQ ID NO: 29292 - DNA, 25 bp, Saccharomyces pastorianus
atttgatcccactgctcagctgaat

SEQ ID NO: 29293 - DNA, 25 bp, Saccharomyces pastorianus
gaagctgagaacgtcttgcaacatt

SEQ ID NO: 29294 - DNA, 25 bp, Saccharomyces pastorianus
atcatcgtgggcgaaggtgtctctt

SEQ ID NO: 29295 - DNA, 25 bp, Saccharomyces pastorianus
ttatctcctgtaccttacggcaatg

SEQ ID NO: 29296 - DNA, 25 bp, Saccharomyces pastorianus
gattccggcagaaacggtcctcgtt

SEQ ID NO: 29297 - DNA, 25 bp, Saccharomyces pastorianus
taccagcacggttacagcatcattc

SEQ ID NO: 29298 - DNA, 25 bp, Saccharomyces pastorianus
gttccccagcaacagcaatttgatc

SEQ ID NO: 29299 - DNA, 25 bp, Saccharomyces pastorianus
tccggtcaacctctagttactggta

SEQ ID NO: 29300 - DNA, 25 bp, Saccharomyces pastorianus
aagtactgctgcctcttataagatt

SEQ ID NO: 29301 - DNA, 25 bp, Saccharomyces pastorianus
gttgaaatcactccattagcacatg

SEQ ID NO: 29302 - DNA, 25 bp, Saccharomyces pastorianus
gcttgtttagagtactcggtgccgt

SEQ ID NO: 29303 - DNA, 25 bp, Saccharomyces pastorianus
tcggtgccgttgtcaaaggtgctac

SEQ ID NO: 29304 - DNA, 25 bp, Saccharomyces pastorianus
ggacggcatcttgagcagattcact

SEQ ID NO: 29305 - DNA, 25 bp, Saccharomyces pastorianus
tggcccaagcagaagcctttagtat

SEQ ID NO: 29306 - DNA, 25 bp, Saccharomyces pastorianus
ttatactacttatccctgttattgg

SEQ ID NO: 29307 - DNA, 25 bp, Saccharomyces pastorianus
acagccttcacaaatggccaagttg

SEQ ID NO: 29308 - DNA, 25 bp, Saccharomyces pastorianus
tttgcacttggacaacttcatcgtt

SEQ ID NO: 29309 - DNA, 25 bp, Saccharomyces pastorianus
attgcaatttatccgtgtttcacca

SEQ ID NO: 29310 - DNA, 25 bp, Saccharomyces pastorianus
accttctaaggtcgtcagcttgttt

SEQ ID NO: 29311 - DNA, 25 bp, Saccharomyces pastorianus
agccggatgctctcaagactgattt

SEQ ID NO: 29312 - DNA, 25 bp, Saccharomyces pastorianus
aaagctaccgaaagggctgccgctg

SEQ ID NO: 29313 - DNA, 25 bp, Saccharomyces pastorianus
agagacgacccaatgagcaagttca

SEQ ID NO: 29314 - DNA, 25 bp, Saccharomyces pastorianus
gaatgagctgctacacgcatcgaac

SEQ ID NO: 29315 - DNA, 25 bp, Saccharomyces pastorianus
atcgaacaaggaccagccggatgct

SEQ ID NO: 29316 - DNA, 25 bp, Saccharomyces pastorianus
aaggctcaacgctgcacagagacga

SEQ ID NO: 29317 - DNA, 25 bp, Saccharomyces pastorianus
caatgcagtaaaggcggcaccgctt

SEQ ID NO: 29318 - DNA, 25 bp, Saccharomyces pastorianus
agcaggacctggttaacgagcagca

SEQ ID NO: 29319 - DNA, 25 bp, Saccharomyces pastorianus
gcagcagaagctaaacacccggttg

SEQ ID NO: 29320 - DNA, 25 bp, Saccharomyces pastorianus
tcatctatactaaagcagcctgcgg

SEQ ID NO: 29321 - DNA, 25 bp, Saccharomyces pastorianus
gccgcacccaagaattcacacagga

SEQ ID NO: 29322 - DNA, 25 bp, Saccharomyces pastorianus
catgatcgcccagctcgggttgcaa

SEQ ID NO: 29323 - DNA, 25 bp, Saccharomyces pastorianus
gaaagactttaactacagtgcaggg

SEQ ID NO: 29324 - DNA, 25 bp, Saccharomyces pastorianus
gactttgcgtgtaacggtaacatcg

SEQ ID NO: 29325 - DNA, 25 bp, Saccharomyces pastorianus
ggtaacatcgtcaaggaccctgaaa

SEQ ID NO: 29326 - DNA, 25 bp, Saccharomyces pastorianus
aaggtgcttaagaaagactttgcgt

SEQ ID NO: 29327 - DNA, 25 bp, Saccharomyces pastorianus
agattatccagctgcagggtgacca

SEQ ID NO: 29328 - DNA, 25 bp, Saccharomyces pastorianus
taactacagtgcagggtgtgcccgc

SEQ ID NO: 29329 - DNA, 25 bp, Saccharomyces pastorianus
aaatgggtgagattatccagctgca

SEQ ID NO: 29330 - DNA, 25 bp, Saccharomyces pastorianus
aagtgtgcgagttcatgatcgccca

SEQ ID NO: 29331 - DNA, 25 bp, Saccharomyces pastorianus
gtgtgcccgcagagtacgacctgaa

SEQ ID NO: 29332 - DNA, 25 bp, Saccharomyces pastorianus
cagggtgaccagagagcaaaagtgt

SEQ ID NO: 29333 - DNA, 25 bp, Saccharomyces pastorianus
gttccgctaaaccagttctacttga

SEQ ID NO: 29334 - DNA, 25 bp, Saccharomyces pastorianus
gaaatcgccaccacaacaagtgttc

SEQ ID NO: 29335 - DNA, 25 bp, Saccharomyces pastorianus
aacactgttccaaggacgtcacgga

SEQ ID NO: 29336 - DNA, 25 bp, Saccharomyces pastorianus
ggcagcctctacaatccaattggta

SEQ ID NO: 29337 - DNA, 25 bp, Saccharomyces pastorianus
aatgttttgatctctactgcaagca

SEQ ID NO: 29338 - DNA, 25 bp, Saccharomyces pastorianus
gcaagggcttgggtaaccatgtcat

SEQ ID NO: 29339 - DNA, 25 bp, Saccharomyces pastorianus
gcaacctttggaattctcgtccgaa

SEQ ID NO: 29340 - DNA, 25 bp, Saccharomyces pastorianus
gtggccaacgctaccaatgttttga

SEQ ID NO: 29341 - DNA, 25 bp, Saccharomyces pastorianus
aaacctttgttatcgttggcactat

SEQ ID NO: 29342 - DNA, 25 bp, Saccharomyces pastorianus
ttccatccattccaaagctcaagac

SEQ ID NO: 29343 - DNA, 25 bp, Saccharomyces pastorianus
caacatttacgtgttgacgtcccca

SEQ ID NO: 29344 - DNA, 25 bp, Saccharomyces pastorianus
ggagtgtccatgattaccagcatac

SEQ ID NO: 29345 - DNA, 25 bp, Saccharomyces pastorianus
gattacatgcctggagttctaccta

SEQ ID NO: 29346 - DNA, 25 bp, Saccharomyces pastorianus
gggctggcggtatacttggaatttt

SEQ ID NO: 29347 - DNA, 25 bp, Saccharomyces pastorianus
gttaacaccttcaccgaacatagat

SEQ ID NO: 29348 - DNA, 25 bp, Saccharomyces pastorianus
ggagttctacctatatctggtcgaa

SEQ ID NO: 29349 - DNA, 25 bp, Saccharomyces pastorianus
tcttcactggatgggcaatgtctca

SEQ ID NO: 29350 - DNA, 25 bp, Saccharomyces pastorianus
caggtcttttatttatgggcgcgaa

SEQ ID NO: 29351 - DNA, 25 bp, Saccharomyces pastorianus
aatgtctcagcatgctcagcacttg

SEQ ID NO: 29352 - DNA, 25 bp, Saccharomyces pastorianus
ggacagcaaggcttccttccaaaat

SEQ ID NO: 29353 - DNA, 25 bp, Saccharomyces pastorianus
ccataatatgtttggcctgctttta

SEQ ID NO: 29354 - DNA, 25 bp, Saccharomyces pastorianus
attcgtttcaatatcttgctcccct

SEQ ID NO: 29355 - DNA, 25 bp, Saccharomyces pastorianus
ggatcatcatcaatctcaccgaagg

SEQ ID NO: 29356 - DNA, 25 bp, Saccharomyces pastorianus
ttaccggttgccaagcttacaacgc

SEQ ID NO: 29357 - DNA, 25 bp, Saccharomyces pastorianus
gggtcaactttactcttacatggcg

SEQ ID NO: 29358 - DNA, 25 bp, Saccharomyces pastorianus
gggttccgaaagcacgaagcctaga

SEQ ID NO: 29359 - DNA, 25 bp, Saccharomyces pastorianus
aagagctgcgctccaggtcaagatg

SEQ ID NO: 29360 - DNA, 25 bp, Saccharomyces pastorianus
aagtccttaattctgctgtcgacaa

SEQ ID NO: 29361 - DNA, 25 bp, Saccharomyces pastorianus
gtcatagaaacacttccaaccgcag

SEQ ID NO: 29362 - DNA, 25 bp, Saccharomyces pastorianus
agcggcattctagaattctcggtat

SEQ ID NO: 29363 - DNA, 25 bp, Saccharomyces pastorianus
gattcggatcttttttcacattaga

SEQ ID NO: 29364 - DNA, 25 bp, Saccharomyces pastorianus
aacgagctgcatttggtcaagacta

SEQ ID NO: 29365 - DNA, 25 bp, Saccharomyces pastorianus
agcagtgtcgtggagagcagcatca

SEQ ID NO: 29366 - DNA, 25 bp, Saccharomyces pastorianus
agcagtcctgctacgtttgatacaa

SEQ ID NO: 29367 - DNA, 25 bp, Saccharomyces pastorianus
gaggttacgcccagaatcaatgcat

SEQ ID NO: 29368 - DNA, 25 bp, Saccharomyces pastorianus
tggaaagcctacattactggacaat

SEQ ID NO: 29369 - DNA, 25 bp, Saccharomyces pastorianus
gacaagagaaccacagccacatatt

SEQ ID NO: 29370 - DNA, 25 bp, Saccharomyces pastorianus
atgataggcacccagaggtttccac

SEQ ID NO: 29371 - DNA, 25 bp, Saccharomyces pastorianus
atcatacggacgcacctgtagaggt

SEQ ID NO: 29372 - DNA, 25 bp, Saccharomyces pastorianus
tgacacctaattcacctgcgaaatc

SEQ ID NO: 29373 - DNA, 25 bp, Saccharomyces pastorianus
caactaactccgcaattggctcaaa

SEQ ID NO: 29374 - DNA, 25 bp, Saccharomyces pastorianus
caagagcctactcgcgtgacaagag

SEQ ID NO: 29375 - DNA, 25 bp, Saccharomyces pastorianus
gaccagtcagccatctatcaacaag

SEQ ID NO: 29376 - DNA, 25 bp, Saccharomyces pastorianus
taggcccgtttctatgtctttcaaa

SEQ ID NO: 29377 - DNA, 25 bp, Saccharomyces pastorianus
ggacagccatcgtctccaaagaagg

SEQ ID NO: 29378 - DNA, 25 bp, Saccharomyces pastorianus
gaagaaagacgctctagttcccgcc

SEQ ID NO: 29379 - DNA, 25 bp, Saccharomyces pastorianus
gaaatcgggcatcttcgtacaaaat

SEQ ID NO: 29380 - DNA, 25 bp, Saccharomyces pastorianus
agaccatactgtttacttccaaaga

SEQ ID NO: 29381 - DNA, 25 bp, Saccharomyces pastorianus
cgctccagcatcgattaccaatgat

SEQ ID NO: 29382 - DNA, 25 bp, Saccharomyces pastorianus
ggatgcaacgttgtccaggccggaa

SEQ ID NO: 29383 - DNA, 25 bp, Saccharomyces pastorianus
acaaaatgccggtcctgccggaaat

SEQ ID NO: 29384 - DNA, 25 bp, Saccharomyces pastorianus
cccactcgcaactgtacatgaaatc

SEQ ID NO: 29385 - DNA, 25 bp, Saccharomyces pastorianus
tggcgaccaagatcaacactgcact

SEQ ID NO: 29386 - DNA, 25 bp, Saccharomyces pastorianus
gcatgcacagcgtgtagcgtttggc

SEQ ID NO: 29387 - DNA, 25 bp, Saccharomyces pastorianus
gaattaccgtcgatctttctcaacc

SEQ ID NO: 29388 - DNA, 25 bp, Saccharomyces pastorianus
tgactacacgtaggattgacaccat

SEQ ID NO: 29389 - DNA, 25 bp, Saccharomyces pastorianus
gtatattactgtccaactttgccca

SEQ ID NO: 29390 - DNA, 25 bp, Saccharomyces pastorianus
gattgattcagcatgtctaacagac

SEQ ID NO: 29391 - DNA, 25 bp, Saccharomyces pastorianus
aaagtttacggatcaggcatactat

SEQ ID NO: 29392 - DNA, 25 bp, Saccharomyces pastorianus
gaatgtaatcttcttatgatcgaac

SEQ ID NO: 29393 - DNA, 25 bp, Saccharomyces pastorianus
aatcgtacttgctattggaattccc

SEQ ID NO: 29394 - DNA, 25 bp, Saccharomyces pastorianus
gagaaaaatccccttattagcaatt

SEQ ID NO: 29395 - DNA, 25 bp, Saccharomyces pastorianus
gcccaacgccttcatagacagatat

SEQ ID NO: 29396 - DNA, 25 bp, Saccharomyces pastorianus
gaactgacccatttaaagtcacgtt

SEQ ID NO: 29397 - DNA, 25 bp, Saccharomyces pastorianus
tggaattccctactccaaattacgg

SEQ ID NO: 29398 - DNA, 25 bp, Saccharomyces pastorianus
aggattgacaccatagatcaccatt

SEQ ID NO: 29399 - DNA, 25 bp, Saccharomyces pastorianus
ccaccccaagtcataaccttattga

SEQ ID NO: 29400 - DNA, 25 bp, Saccharomyces pastorianus
aatcacacatctgtagtggtcgaaa

SEQ ID NO: 29401 - DNA, 25 bp, Saccharomyces pastorianus
gagagggtctcggtattcaaggtaa

SEQ ID NO: 29402 - DNA, 25 bp, Saccharomyces pastorianus
gaaacaaagacaggctcacctttcc

SEQ ID NO: 29403 - DNA, 25 bp, Saccharomyces pastorianus
gattgttgggaaagacgccccagaa

SEQ ID NO: 29404 - DNA, 25 bp, Saccharomyces pastorianus
tgaccaattgttaaggcagagacca

SEQ ID NO: 29405 - DNA, 25 bp, Saccharomyces pastorianus
gatgatctgttcaagaaatacccat

SEQ ID NO: 29406 - DNA, 25 bp, Saccharomyces pastorianus
acccatacggtttccatgttcagaa

SEQ ID NO: 29407 - DNA, 25 bp, Saccharomyces pastorianus
gaaacttgccaaacactataacatg

SEQ ID NO: 29408 - DNA, 25 bp, Saccharomyces pastorianus
ttgggaaagctaatcacacatctgt

SEQ ID NO: 29409 - DNA, 25 bp, Saccharomyces pastorianus
gtattagcgagcctatctttgccaa

SEQ ID NO: 29410 - DNA, 25 bp, Saccharomyces pastorianus
gctagaccgtaatagaaggctcaaa

SEQ ID NO: 29411 - DNA, 25 bp, Saccharomyces pastorianus
ggtttattacaaatgctagaccgta

SEQ ID NO: 29412 - DNA, 25 bp, Saccharomyces pastorianus
aaccgagtggcaaagcggacatccc

SEQ ID NO: 29413 - DNA, 25 bp, Saccharomyces pastorianus
atcacaatctgcagaccgttataaa

SEQ ID NO: 29414 - DNA, 25 bp, Saccharomyces pastorianus
gataaacccaacgtgtactcatttg

SEQ ID NO: 29415 - DNA, 25 bp, Saccharomyces pastorianus
tagaaggctcaaaaaggccccagaa

SEQ ID NO: 29416 - DNA, 25 bp, Saccharomyces pastorianus
gtctttgattttgtttttacttgcg

SEQ ID NO: 29417 - DNA, 25 bp, Saccharomyces pastorianus
gagttagctgacatgttcaatgaca

SEQ ID NO: 29418 - DNA, 25 bp, Saccharomyces pastorianus
atgtctaatcatcgcaatccaaact

SEQ ID NO: 29419 - DNA, 25 bp, Saccharomyces pastorianus
aaagccatactggagttagctgaca

SEQ ID NO: 29420 - DNA, 25 bp, Saccharomyces pastorianus
gcctggtctgtcgatagataaaccc

SEQ ID NO: 29421 - DNA, 25 bp, Saccharomyces pastorianus
ggctgagggagtctatcgttccaat

SEQ ID NO: 29422 - DNA, 25 bp, Saccharomyces pastorianus
acgatctagagattccgctaccaga

SEQ ID NO: 29423 - DNA, 25 bp, Saccharomyces pastorianus
agcggcacgtaccatttgaactctg

SEQ ID NO: 29424 - DNA, 25 bp, Saccharomyces pastorianus
attagatctatcaatccagccgcgt

SEQ ID NO: 29425 - DNA, 25 bp, Saccharomyces pastorianus
tggaacgaggccatcccaaggacaa

SEQ ID NO: 29426 - DNA, 25 bp, Saccharomyces pastorianus
gattcatagaccaccattctgccat

SEQ ID NO: 29427 - DNA, 25 bp, Saccharomyces pastorianus
acagctgaaccattgccagtcgagg

SEQ ID NO: 29428 - DNA, 25 bp, Saccharomyces pastorianus
agccgcgttgtacgattgccatatc

SEQ ID NO: 29429 - DNA, 25 bp, Saccharomyces pastorianus
acaattaactccaacacttcttcat

SEQ ID NO: 29430 - DNA, 25 bp, Saccharomyces pastorianus
cagtctgctcgatatgttctcatta

SEQ ID NO: 29431 - DNA, 25 bp, Saccharomyces pastorianus
attggatttatcaccagcggcacgt

SEQ ID NO: 29432 - DNA, 25 bp, Saccharomyces pastorianus
gtcttttgcctggtgatttcccaga

SEQ ID NO: 29433 - DNA, 25 bp, Saccharomyces pastorianus
caaattccttccttttgccagataa

SEQ ID NO: 29434 - DNA, 25 bp, Saccharomyces pastorianus
tcttccctcaatcaaggtggcgtaa

SEQ ID NO: 29435 - DNA, 25 bp, Saccharomyces pastorianus
taattatacagctcccttagccgtt

SEQ ID NO: 29436 - DNA, 25 bp, Saccharomyces pastorianus
gaatggcctcttgctaaatgtgatt

SEQ ID NO: 29437 - DNA, 25 bp, Saccharomyces pastorianus
gttttcaacccattacatcttacag

SEQ ID NO: 29438 - DNA, 25 bp, Saccharomyces pastorianus
tagccgtttatgaacagctctcttc

SEQ ID NO: 29439 - DNA, 25 bp, Saccharomyces pastorianus
aatcaagtctatggtgttcgttaca

SEQ ID NO: 29440 - DNA, 25 bp, Saccharomyces pastorianus
gtgaacgtatgtactggccgtgaat

SEQ ID NO: 29441 - DNA, 25 bp, Saccharomyces pastorianus
aatctgggttcgatggtcttttgcc

SEQ ID NO: 29442 - DNA, 25 bp, Saccharomyces pastorianus
tgtcacgtattgtcgccttggttaa

SEQ ID NO: 29443 - DNA, 25 bp, Saccharomyces pastorianus
gggattgaacctacgcgagcagacc

SEQ ID NO: 29444 - DNA, 25 bp, Saccharomyces pastorianus
ggcacgacgcttccatgggattgaa

SEQ ID NO: 29445 - DNA, 25 bp, Saccharomyces pastorianus
taaaggaccacttgctttcatccat

SEQ ID NO: 29446 - DNA, 25 bp, Saccharomyces pastorianus
atggagaccatttcagcaacgctaa

SEQ ID NO: 29447 - DNA, 25 bp, Saccharomyces pastorianus
aacactgctcagtggctttcgaact

SEQ ID NO: 29448 - DNA, 25 bp, Saccharomyces pastorianus
aactggacttaggacttactggcga

SEQ ID NO: 29449 - DNA, 25 bp, Saccharomyces pastorianus
ggagccccaaatttatgacaccatt

SEQ ID NO: 29450 - DNA, 25 bp, Saccharomyces pastorianus
acgcagggatgctaccgggagactt

SEQ ID NO: 29451 - DNA, 25 bp, Saccharomyces pastorianus
gacaccattaacgttcagtaccgag

SEQ ID NO: 29452 - DNA, 25 bp, Saccharomyces pastorianus
tgggctctctctcgaacatgaagtt

SEQ ID NO: 29453 - DNA, 25 bp, Saccharomyces pastorianus
ggcctcgacactgcctgtataaagg

SEQ ID NO: 29454 - DNA, 25 bp, Saccharomyces pastorianus
ataagcttcccacccaaaatcgcaa

SEQ ID NO: 29455 - DNA, 25 bp, Saccharomyces pastorianus
agcttcacgatgttatctcaggaga

SEQ ID NO: 29456 - DNA, 25 bp, Saccharomyces pastorianus
gtatccacatgaaattgcagaggca

SEQ ID NO: 29457 - DNA, 25 bp, Saccharomyces pastorianus
gagacttgatggtctttccccgtta

SEQ ID NO: 29458 - DNA, 25 bp, Saccharomyces pastorianus
ttgacttgtttatccggagacttga

SEQ ID NO: 29459 - DNA, 25 bp, Saccharomyces pastorianus
tcgatcccgatacaataagcttccc

SEQ ID NO: 29460 - DNA, 25 bp, Saccharomyces pastorianus
gacagttcatggacaagcttcacga

SEQ ID NO: 29461 - DNA, 25 bp, Saccharomyces pastorianus
gagattatgaaccttcgcaagctga

SEQ ID NO: 29462 - DNA, 25 bp, Saccharomyces pastorianus
tcatgtcccgggtatttggacgcat

SEQ ID NO: 29463 - DNA, 25 bp, Saccharomyces pastorianus
aacatttcaaacagtctgccctttg

SEQ ID NO: 29464 - DNA, 25 bp, Saccharomyces pastorianus
agataacgtcaatccgccgcctcat

SEQ ID NO: 29465 - DNA, 25 bp, Saccharomyces pastorianus
attacaatcaaagtggcaacgagcc

SEQ ID NO: 29466 - DNA, 25 bp, Saccharomyces pastorianus
tgctcgtaaacggaagaacctgagt

SEQ ID NO: 29467 - DNA, 25 bp, Saccharomyces pastorianus
acaagacatgggatctggagactat

SEQ ID NO: 29468 - DNA, 25 bp, Saccharomyces pastorianus
tagaagtcatctgccgaacgaggat

SEQ ID NO: 29469 - DNA, 25 bp, Saccharomyces pastorianus
cgaaatggagtctgttatgaacggt

SEQ ID NO: 29470 - DNA, 25 bp, Saccharomyces pastorianus
ggaaagcacaacagactctactagg

SEQ ID NO: 29471 - DNA, 25 bp, Saccharomyces pastorianus
tttattggaggatggtggctctaaa

SEQ ID NO: 29472 - DNA, 25 bp, Saccharomyces pastorianus
aagggccggtaaatctagaagtcat

SEQ ID NO: 29473 - DNA, 25 bp, Saccharomyces pastorianus
tcaagttttgtaaagccgcgtaggc

SEQ ID NO: 29474 - DNA, 25 bp, Saccharomyces pastorianus
gtaggccttataatagcgacggtat

SEQ ID NO: 29475 - DNA, 25 bp, Saccharomyces pastorianus
agttgaggcgaccaaggaaagcaca

SEQ ID NO: 29476 - DNA, 25 bp, Saccharomyces pastorianus
gcgagatggcgctaaggagatacct

SEQ ID NO: 29477 - DNA, 25 bp, Saccharomyces pastorianus
aaaatgagggcgctgactttccatc

SEQ ID NO: 29478 - DNA, 25 bp, Saccharomyces pastorianus
ctgcggctcactgctcaatgagaat

SEQ ID NO: 29479 - DNA, 25 bp, Saccharomyces pastorianus
agatttctcctgaagccgttagaag

SEQ ID NO: 29480 - DNA, 25 bp, Saccharomyces pastorianus
gagcggttcaagatttctcctgaag

SEQ ID NO: 29481 - DNA, 25 bp, Saccharomyces pastorianus
gttagttccaatccaaacgcatctg

SEQ ID NO: 29482 - DNA, 25 bp, Saccharomyces pastorianus
tttccatcccaccagatcataagtg

SEQ ID NO: 29483 - DNA, 25 bp, Saccharomyces pastorianus
caaactttcccgagatgacagcatc

SEQ ID NO: 29484 - DNA, 25 bp, Saccharomyces pastorianus
aaatggaggctttgaggctattgaa

SEQ ID NO: 29485 - DNA, 25 bp, Saccharomyces pastorianus
gggaacatcattcaaggcaattgtc

SEQ ID NO: 29486 - DNA, 25 bp, Saccharomyces pastorianus
gcatctgattttgcggagcggttca

SEQ ID NO: 29487 - DNA, 25 bp, Saccharomyces pastorianus
tcaaacagccgagcaagggtgtctt

SEQ ID NO: 29488 - DNA, 25 bp, Saccharomyces pastorianus
gcgacttgcgagagttctttgcttt

SEQ ID NO: 29489 - DNA, 25 bp, Saccharomyces pastorianus
gagcaaagaccgctataccttcact

SEQ ID NO: 29490 - DNA, 25 bp, Saccharomyces pastorianus
cggcgacgtcgttgctgataatttc

SEQ ID NO: 29491 - DNA, 25 bp, Saccharomyces pastorianus
ggttatatcgccatcggctcagaaa

SEQ ID NO: 29492 - DNA, 25 bp, Saccharomyces pastorianus
gacaggcccatatgcaatttcttgg

SEQ ID NO: 29493 - DNA, 25 bp, Saccharomyces pastorianus
taccttcactcagccaagcggttaa

SEQ ID NO: 29494 - DNA, 25 bp, Saccharomyces pastorianus
cattagctttacgaaggcttccttt

SEQ ID NO: 29495 - DNA, 25 bp, Saccharomyces pastorianus
ggattcttgaagtcattccctgcaa

SEQ ID NO: 29496 - DNA, 25 bp, Saccharomyces pastorianus
gaccggaacattcagcatccatatt

SEQ ID NO: 29497 - DNA, 25 bp, Saccharomyces pastorianus
aacgattgttacctcgacaggccca

SEQ ID NO: 29498 - DNA, 25 bp, Saccharomyces pastorianus
gaggaacgctgcttataactcagat

SEQ ID NO: 29499 - DNA, 25 bp, Saccharomyces pastorianus
tggttattgatttcccacaatgtgt

SEQ ID NO: 29500 - DNA, 25 bp, Saccharomyces pastorianus
gtgggctcattcattgtgatttcaa

SEQ ID NO: 29501 - DNA, 25 bp, Saccharomyces pastorianus
atgagttagttcaggcttccggatt

SEQ ID NO: 29502 - DNA, 25 bp, Saccharomyces pastorianus
gagacgttgattgtattcgccgttt

SEQ ID NO: 29503 - DNA, 25 bp, Saccharomyces pastorianus
cgctttctagcggtgttggaaacct

SEQ ID NO: 29504 - DNA, 25 bp, Saccharomyces pastorianus
aaaccagactcatcaatgctcgata

SEQ ID NO: 29505 - DNA, 25 bp, Saccharomyces pastorianus
cagacggtttcggagatggttacaa

SEQ ID NO: 29506 - DNA, 25 bp, Saccharomyces pastorianus
agacgccgactactattttcaaaga

SEQ ID NO: 29507 - DNA, 25 bp, Saccharomyces pastorianus
attccgaatctggtgatgacagttc

SEQ ID NO: 29508 - DNA, 25 bp, Saccharomyces pastorianus
atggttacaaatacgcctatcccga

SEQ ID NO: 29509 - DNA, 25 bp, Saccharomyces pastorianus
gattgacattcaacgccactttagt

SEQ ID NO: 29510 - DNA, 25 bp, Saccharomyces pastorianus
ggtagtggccaagaattctcagatg

SEQ ID NO: 29511 - DNA, 25 bp, Saccharomyces pastorianus
gcactgcgtctcacactgataataa

SEQ ID NO: 29512 - DNA, 25 bp, Saccharomyces pastorianus
aaccatgaggacgacaacggcaacg

SEQ ID NO: 29513 - DNA, 25 bp, Saccharomyces pastorianus
gaaaccttagagctcgaggacattc

SEQ ID NO: 29514 - DNA, 25 bp, Saccharomyces pastorianus
actgatggtgaaaccgaccagccat

SEQ ID NO: 29515 - DNA, 25 bp, Saccharomyces pastorianus
gaggacattcccatcgaaattgaca

SEQ ID NO: 29516 - DNA, 25 bp, Saccharomyces pastorianus
acagaaattttctccgatgacgatg

SEQ ID NO: 29517 - DNA, 25 bp, Saccharomyces pastorianus
gaccagccatctatcttacaagaag

SEQ ID NO: 29518 - DNA, 25 bp, Saccharomyces pastorianus
gtgatctttccgatggtagtggcca

SEQ ID NO: 29519 - DNA, 25 bp, Saccharomyces pastorianus
agaagccactcgtcaaatgcaagat

SEQ ID NO: 29520 - DNA, 25 bp, Saccharomyces pastorianus
gaagcacacagctcattacgtggga

SEQ ID NO: 29521 - DNA, 25 bp, Saccharomyces pastorianus
ttcaaggtccctgtattgtcacaag

SEQ ID NO: 29522 - DNA, 25 bp, Saccharomyces pastorianus
gtggacgcaatctttggctttagtt

SEQ ID NO: 29523 - DNA, 25 bp, Saccharomyces pastorianus
aagaccttgtgtattgtggacgcaa

SEQ ID NO: 29524 - DNA, 25 bp, Saccharomyces pastorianus
gtattcgttattgctggacctggta

SEQ ID NO: 29525 - DNA, 25 bp, Saccharomyces pastorianus
ggataagggtccaatctcacagcct

SEQ ID NO: 29526 - DNA, 25 bp, Saccharomyces pastorianus
ttgtatctctaactgttcccaaacc

SEQ ID NO: 29527 - DNA, 25 bp, Saccharomyces pastorianus
acaagaccgtattcccattgtttct

SEQ ID NO: 29528 - DNA, 25 bp, Saccharomyces pastorianus
cattgtttctgtagatgtccccaca

SEQ ID NO: 29529 - DNA, 25 bp, Saccharomyces pastorianus
aaaccctgcggttcttgtatctcta

SEQ ID NO: 29530 - DNA, 25 bp, Saccharomyces pastorianus
tatgccgccaatttcctttgaagga

SEQ ID NO: 29531 - DNA, 25 bp, Saccharomyces pastorianus
tataccgctcgcaaaggctgtggaa

SEQ ID NO: 29532 - DNA, 25 bp, Saccharomyces pastorianus
gttccagttttgtagagacctcacc

SEQ ID NO: 29533 - DNA, 25 bp, Saccharomyces pastorianus
gattttggtaacgtcgctcttagga

SEQ ID NO: 29534 - DNA, 25 bp, Saccharomyces pastorianus
gaagtgcatgtggatccatctttat

SEQ ID NO: 29535 - DNA, 25 bp, Saccharomyces pastorianus
agggcttatgggttctataccgctc

SEQ ID NO: 29536 - DNA, 25 bp, Saccharomyces pastorianus
gaagctccacgctggcagaaagcaa

SEQ ID NO: 29537 - DNA, 25 bp, Saccharomyces pastorianus
gcatccttacatttcagctgtggtt

SEQ ID NO: 29538 - DNA, 25 bp, Saccharomyces pastorianus
atattgttgcatcccattatcgacg

SEQ ID NO: 29539 - DNA, 25 bp, Saccharomyces pastorianus
ggatctaccgtcattgtttccagat

SEQ ID NO: 29540 - DNA, 25 bp, Saccharomyces pastorianus
tacagattccgagtgtgcatttgca

SEQ ID NO: 29541 - DNA, 25 bp, Saccharomyces pastorianus
agactgacgaggcagcatccttaca

SEQ ID NO: 29542 - DNA, 25 bp, Saccharomyces pastorianus
gtgaataacgctgccgctggtccat

SEQ ID NO: 29543 - DNA, 25 bp, Saccharomyces pastorianus
gcgtgaacgataaggctgccgtgaa

SEQ ID NO: 29544 - DNA, 25 bp, Saccharomyces pastorianus
ctgactttgtcccaggatggtactt

SEQ ID NO: 29545 - DNA, 25 bp, Saccharomyces pastorianus
gttgccactgttgccatagctaaga

SEQ ID NO: 29546 - DNA, 25 bp, Saccharomyces pastorianus
ccacttctactcatactactcataa

SEQ ID NO: 29547 - DNA, 25 bp, Saccharomyces pastorianus
tattcggtgttaccgctggtagcgc

SEQ ID NO: 29548 - DNA, 25 bp, Saccharomyces pastorianus
aagttttcctcagttaccgctattg

SEQ ID NO: 29549 - DNA, 25 bp, Saccharomyces pastorianus
tgattttactactaccctgactttg

SEQ ID NO: 29550 - DNA, 25 bp, Saccharomyces pastorianus
tattgctctagctactgttgccact

SEQ ID NO: 29551 - DNA, 25 bp, Saccharomyces pastorianus
aggatggtactttgctcaccaccac

SEQ ID NO: 29552 - DNA, 25 bp, Saccharomyces pastorianus
atcaccacaccacttatggcgtgaa

SEQ ID NO: 29553 - DNA, 25 bp, Saccharomyces pastorianus
gatttaacggtacttcgtcatccaa

SEQ ID NO: 29554 - DNA, 25 bp, Saccharomyces pastorianus
gtggtcgtccatgaaggtcgttctc

SEQ ID NO: 29555 - DNA, 25 bp, Saccharomyces pastorianus
gagcaccagagactttacttgtaca

SEQ ID NO: 29556 - DNA, 25 bp, Saccharomyces pastorianus
aaggtgatttcgttgccactagcaa

SEQ ID NO: 29557 - DNA, 25 bp, Saccharomyces pastorianus
caagccgtttcatatccgatgtttt

SEQ ID NO: 29558 - DNA, 25 bp, Saccharomyces pastorianus
gggtacttgggctacttacgatgat

SEQ ID NO: 29559 - DNA, 25 bp, Saccharomyces pastorianus
tacgaggctaactcccaaggtgatt

SEQ ID NO: 29560 - DNA, 25 bp, Saccharomyces pastorianus
aaacgctgtcaagcacaactcgatc

SEQ ID NO: 29561 - DNA, 25 bp, Saccharomyces pastorianus
tccggtcattatattgcccactgta

SEQ ID NO: 29562 - DNA, 25 bp, Saccharomyces pastorianus
gcctaacgcctattatctcttgtat

SEQ ID NO: 29563 - DNA, 25 bp, Saccharomyces pastorianus
atgacggccgacaatattacttcgt

SEQ ID NO: 29564 - DNA, 25 bp, Saccharomyces pastorianus
gaccacctcgtattttgggagaact

SEQ ID NO: 29565 - DNA, 25 bp, Saccharomyces pastorianus
gtgccagttcccgtactaattacga

SEQ ID NO: 29566 - DNA, 25 bp, Saccharomyces pastorianus
gtgctcccgttaagggaccacctcg

SEQ ID NO: 29567 - DNA, 25 bp, Saccharomyces pastorianus
gcacggacaacctaacgtaagtacg

SEQ ID NO: 29568 - DNA, 25 bp, Saccharomyces pastorianus
gaattcaatgcaagatcggcaaatt

SEQ ID NO: 29569 - DNA, 25 bp, Saccharomyces pastorianus
aaattatcaaccaggcgtgccagtt

SEQ ID NO: 29570 - DNA, 25 bp, Saccharomyces pastorianus
aatgcatagcctgttggagatggaa

SEQ ID NO: 29571 - DNA, 25 bp, Saccharomyces pastorianus
taagtacgacattaaccggtgctcc

SEQ ID NO: 29572 - DNA, 25 bp, Saccharomyces pastorianus
accagataggacgttcacatttgaa

SEQ ID NO: 29573 - DNA, 25 bp, Saccharomyces pastorianus
gtatcgttaagtcaataatcggtgt

SEQ ID NO: 29574 - DNA, 25 bp, Saccharomyces pastorianus
agcgattgacttctgtaaggaattc

SEQ ID NO: 29575 - DNA, 25 bp, Saccharomyces pastorianus
tggtgcaaccaggaacaatgagatc

SEQ ID NO: 29576 - DNA, 25 bp, Saccharomyces pastorianus
agaattatccttgcgacatgctggt

SEQ ID NO: 29577 - DNA, 25 bp, Saccharomyces pastorianus
ggccaagtacatttcagactgctca

SEQ ID NO: 29578 - DNA, 25 bp, Saccharomyces pastorianus
tgcgacatgctggttgcaagttgtt

SEQ ID NO: 29579 - DNA, 25 bp, Saccharomyces pastorianus
gctcaattgtaaaattcgctcggaa

SEQ ID NO: 29580 - DNA, 25 bp, Saccharomyces pastorianus
taatgtggaagaccccttatggcaa

SEQ ID NO: 29581 - DNA, 25 bp, Saccharomyces pastorianus
gttatttaccaagagcggtcgtcgt

SEQ ID NO: 29582 - DNA, 25 bp, Saccharomyces pastorianus
gtatgcattaatgaccccagaactg

SEQ ID NO: 29583 - DNA, 25 bp, Saccharomyces pastorianus
tttactataccctatattgtggtta

SEQ ID NO: 29584 - DNA, 25 bp, Saccharomyces pastorianus
aaaatgttacaatcaccatggtgca

SEQ ID NO: 29585 - DNA, 25 bp, Saccharomyces pastorianus
gatccaatagtttacgtcgtgtcat

SEQ ID NO: 29586 - DNA, 25 bp, Saccharomyces pastorianus
gtacagatagcacactttccaagga

SEQ ID NO: 29587 - DNA, 25 bp, Saccharomyces pastorianus
taacgaccgccacaactaataacaa

SEQ ID NO: 29588 - DNA, 25 bp, Saccharomyces pastorianus
agatatgccatttacgagccggaat

SEQ ID NO: 29589 - DNA, 25 bp, Saccharomyces pastorianus
tcaagctggtgtccgagaggttttt

SEQ ID NO: 29590 - DNA, 25 bp, Saccharomyces pastorianus
atgttctgctgctactcaagctggt

SEQ ID NO: 29591 - DNA, 25 bp, Saccharomyces pastorianus
ttgaaaacctttctctcttcaccaa

SEQ ID NO: 29592 - DNA, 25 bp, Saccharomyces pastorianus
agtaggtaccaaggctgatctcaga

SEQ ID NO: 29593 - DNA, 25 bp, Saccharomyces pastorianus
ccacatccacatcccaataatagta

SEQ ID NO: 29594 - DNA, 25 bp, Saccharomyces pastorianus
aaagagaccaccaccgatgaactaa

SEQ ID NO: 29595 - DNA, 25 bp, Saccharomyces pastorianus
gagccggaatccaatctgcagaaat

SEQ ID NO: 29596 - DNA, 25 bp, Saccharomyces pastorianus
accaagatggccacaaagacgcatt

SEQ ID NO: 29597 - DNA, 25 bp, Saccharomyces pastorianus
agatatgtctttctaccagcactgg

SEQ ID NO: 29598 - DNA, 25 bp, Saccharomyces pastorianus
gctactgcagtaccaccatcaagaa

SEQ ID NO: 29599 - DNA, 25 bp, Saccharomyces pastorianus
tttacgtattcatctctcggttcat

SEQ ID NO: 29600 - DNA, 25 bp, Saccharomyces pastorianus
ccagcactggctgaacggtggttta

SEQ ID NO: 29601 - DNA, 25 bp, Saccharomyces pastorianus
gttcatctactcagggcggtttttc

SEQ ID NO: 29602 - DNA, 25 bp, Saccharomyces pastorianus
atttcccacgactgctcaagcaagg

SEQ ID NO: 29603 - DNA, 25 bp, Saccharomyces pastorianus
gtggtattcttgtatgcgcggtgat

SEQ ID NO: 29604 - DNA, 25 bp, Saccharomyces pastorianus
attcgataaatctcgggcctggctt

SEQ ID NO: 29605 - DNA, 25 bp, Saccharomyces pastorianus
ggagacatcagttcatgcccaggac

SEQ ID NO: 29606 - DNA, 25 bp, Saccharomyces pastorianus
ttaaggccaggtgtgctactgcagt

SEQ ID NO: 29607 - DNA, 25 bp, Saccharomyces pastorianus
cggtttttctgctttatcttcaaat

SEQ ID NO: 29608 - DNA, 25 bp, Saccharomyces pastorianus
agaaggctccactaatgcgttgaag

SEQ ID NO: 29609 - DNA, 25 bp, Saccharomyces pastorianus
tagtgtggcattggctaccgctcaa

SEQ ID NO: 29610 - DNA, 25 bp, Saccharomyces pastorianus
tgatgtcaccgatgatttgctaaga

SEQ ID NO: 29611 - DNA, 25 bp, Saccharomyces pastorianus
gttcgtttgacatctccaacaacag

SEQ ID NO: 29612 - DNA, 25 bp, Saccharomyces pastorianus
agggttcgcgtttatcgatttcaag

SEQ ID NO: 29613 - DNA, 25 bp, Saccharomyces pastorianus
ggaagatttcgtcgccatgtccaaa

SEQ ID NO: 29614 - DNA, 25 bp, Saccharomyces pastorianus
aaggactctgagaacttttcgggca

SEQ ID NO: 29615 - DNA, 25 bp, Saccharomyces pastorianus
cgtggattccaataaccgtactaag

SEQ ID NO: 29616 - DNA, 25 bp, Saccharomyces pastorianus
aacccaccctcaagaattctattcg

SEQ ID NO: 29617 - DNA, 25 bp, Saccharomyces pastorianus
gctaataggcgtccacccgtggatt

SEQ ID NO: 29618 - DNA, 25 bp, Saccharomyces pastorianus
gaagatccgtatggcaacattcgag

SEQ ID NO: 29619 - DNA, 25 bp, Saccharomyces pastorianus
gaactgccaaacctggtggcgcgaa

SEQ ID NO: 29620 - DNA, 25 bp, Saccharomyces pastorianus
gaacccacaagaggcaattccagta

SEQ ID NO: 29621 - DNA, 25 bp, Saccharomyces pastorianus
tagactatatgagctgtccgcagaa

SEQ ID NO: 29622 - DNA, 25 bp, Saccharomyces pastorianus
aaccgctacggatcacctgggtaag

SEQ ID NO: 29623 - DNA, 25 bp, Saccharomyces pastorianus
gcaacagtcgtcaaggaggcgcctg

SEQ ID NO: 29624 - DNA, 25 bp, Saccharomyces pastorianus
gggtaagacacaatcttccgattct

SEQ ID NO: 29625 - DNA, 25 bp, Saccharomyces pastorianus
gatggcctgagtggcactacaacca

SEQ ID NO: 29626 - DNA, 25 bp, Saccharomyces pastorianus
aagcaccccaatattggcctggtta

SEQ ID NO: 29627 - DNA, 25 bp, Saccharomyces pastorianus
gaaaagcccttgaatgaaaccacta

SEQ ID NO: 29628 - DNA, 25 bp, Saccharomyces pastorianus
tagaaccgctggtacgggcacggaa

SEQ ID NO: 29629 - DNA, 25 bp, Saccharomyces pastorianus
gaaaccactatagctgagaacccac

SEQ ID NO: 29630 - DNA, 25 bp, Saccharomyces pastorianus
atgcttcgaggcaccaactgaattc

SEQ ID NO: 29631 - DNA, 25 bp, Saccharomyces pastorianus
gagctacttctctaacggattttcg

SEQ ID NO: 29632 - DNA, 25 bp, Saccharomyces pastorianus
actccccaattgactgggtctgtaa

SEQ ID NO: 29633 - DNA, 25 bp, Saccharomyces pastorianus
agtaccgtcgttctatgcttcgagg

SEQ ID NO: 29634 - DNA, 25 bp, Saccharomyces pastorianus
attttctgtagcaccttacttccaa

SEQ ID NO: 29635 - DNA, 25 bp, Saccharomyces pastorianus
gggtctgtaaagttcgccgtcattt

SEQ ID NO: 29636 - DNA, 25 bp, Saccharomyces pastorianus
agttgctctattgggtggttggaaa

SEQ ID NO: 29637 - DNA, 25 bp, Saccharomyces pastorianus
aagccaactttctctgagctacttc

SEQ ID NO: 29638 - DNA, 25 bp, Saccharomyces pastorianus
gtatgacgcctgttggtgctacaaa

SEQ ID NO: 29639 - DNA, 25 bp, Saccharomyces pastorianus
gggcttcgaattgggcagtaccgtc

SEQ ID NO: 29640 - DNA, 25 bp, Saccharomyces pastorianus
gattttcgtgctcagaacctcatga

SEQ ID NO: 29641 - DNA, 25 bp, Saccharomyces pastorianus
cgacaagctcgtggacatggatttc

SEQ ID NO: 29642 - DNA, 25 bp, Saccharomyces pastorianus
atgaagacgggtccaatccagggcc

SEQ ID NO: 29643 - DNA, 25 bp, Saccharomyces pastorianus
gcccatattcatcccacgaggagta

SEQ ID NO: 29644 - DNA, 25 bp, Saccharomyces pastorianus
tttcatgccaatatccgctctaatc

SEQ ID NO: 29645 - DNA, 25 bp, Saccharomyces pastorianus
gaggctttcaacctacaaatccaac

SEQ ID NO: 29646 - DNA, 25 bp, Saccharomyces pastorianus
atctatcagtggtgtggctctagca

SEQ ID NO: 29647 - DNA, 25 bp, Saccharomyces pastorianus
acctggcgaccgtgttcattgtgaa

SEQ ID NO: 29648 - DNA, 25 bp, Saccharomyces pastorianus
agacggcgggactggtctcatgcta

SEQ ID NO: 29649 - DNA, 25 bp, Saccharomyces pastorianus
tattgtattaactggcacacctgcc

SEQ ID NO: 29650 - DNA, 25 bp, Saccharomyces pastorianus
gagaccgacggattcaagtttcaat

SEQ ID NO: 29651 - DNA, 25 bp, Saccharomyces pastorianus
aaacacttgtccaacgtcgctgaga

SEQ ID NO: 29652 - DNA, 25 bp, Saccharomyces pastorianus
gcaaaccctgatactcatgatgcta

SEQ ID NO: 29653 - DNA, 25 bp, Saccharomyces pastorianus
acccgctgaactctgtaccaaatat

SEQ ID NO: 29654 - DNA, 25 bp, Saccharomyces pastorianus
caatgcgggacagactacacagact

SEQ ID NO: 29655 - DNA, 25 bp, Saccharomyces pastorianus
tcatcgccaacatctacatctttat

SEQ ID NO: 29656 - DNA, 25 bp, Saccharomyces pastorianus
tagtatgaatatgtccaccccatcg

SEQ ID NO: 29657 - DNA, 25 bp, Saccharomyces pastorianus
atatgatgatctcacccatgctgtt

SEQ ID NO: 29658 - DNA, 25 bp, Saccharomyces pastorianus
aagtgcttcaagttctcaatttagt

SEQ ID NO: 29659 - DNA, 25 bp, Saccharomyces pastorianus
gaaatgacttttcaagtgccatgtc

SEQ ID NO: 29660 - DNA, 25 bp, Saccharomyces pastorianus
tgcgggatagtaccttcaagtgctt

SEQ ID NO: 29661 - DNA, 25 bp, Saccharomyces pastorianus
gaaaacgcaggatatccctccatta

SEQ ID NO: 29662 - DNA, 25 bp, Saccharomyces pastorianus
ccctccattaactcaagaccgataa

SEQ ID NO: 29663 - DNA, 25 bp, Saccharomyces pastorianus
gaacaagtacgatactcctgcttcg

SEQ ID NO: 29664 - DNA, 25 bp, Saccharomyces pastorianus
gataccgatgcaaatgactccgatt

SEQ ID NO: 29665 - DNA, 25 bp, Saccharomyces pastorianus
gaatgctcagggttcactgtctatg

SEQ ID NO: 29666 - DNA, 25 bp, Saccharomyces pastorianus
atgggagccgtaaatcttcactgaa

SEQ ID NO: 29667 - DNA, 25 bp, Saccharomyces pastorianus
aaacgaccgacacctcagaggactt

SEQ ID NO: 29668 - DNA, 25 bp, Saccharomyces pastorianus
aagtagcaattctggttcgagggat

SEQ ID NO: 29669 - DNA, 25 bp, Saccharomyces pastorianus
tcacttcagcatccgagttgggtaa

SEQ ID NO: 29670 - DNA, 25 bp, Saccharomyces pastorianus
gcatttagctgaccaaacgaccgac

SEQ ID NO: 29671 - DNA, 25 bp, Saccharomyces pastorianus
gaaacgacgcctgacaaatccattt

SEQ ID NO: 29672 - DNA, 25 bp, Saccharomyces pastorianus
agaagcactccgcttgattctcaat

SEQ ID NO: 29673 - DNA, 25 bp, Saccharomyces pastorianus
ctccgattcagctagtcgagaacta

SEQ ID NO: 29674 - DNA, 25 bp, Saccharomyces pastorianus
agaccattgggctatctcccagtat

SEQ ID NO: 29675 - DNA, 25 bp, Saccharomyces pastorianus
aagagatcgttgagggtggctaccc

SEQ ID NO: 29676 - DNA, 25 bp, Saccharomyces pastorianus
atgggacaactagtttggcctcacc

SEQ ID NO: 29677 - DNA, 25 bp, Saccharomyces pastorianus
gtggctaccctttacatgcaggaga

SEQ ID NO: 29678 - DNA, 25 bp, Saccharomyces pastorianus
agcctgacgttcatattcccatgat

SEQ ID NO: 29679 - DNA, 25 bp, Saccharomyces pastorianus
aaggataaacgtcacactgcatggg

SEQ ID NO: 29680 - DNA, 25 bp, Saccharomyces pastorianus
ttgattcttattgtcgttcacgccc

SEQ ID NO: 29681 - DNA, 25 bp, Saccharomyces pastorianus
ttctcgacgataccatggcatctta

SEQ ID NO: 29682 - DNA, 25 bp, Saccharomyces pastorianus
tcaccgttcgggtcaaacagcatca

SEQ ID NO: 29683 - DNA, 25 bp, Saccharomyces pastorianus
gttcatggactgaatctccgttggt

SEQ ID NO: 29684 - DNA, 25 bp, Saccharomyces pastorianus
gcatcaatctgcttgttctcgacga

SEQ ID NO: 29685 - DNA, 25 bp, Saccharomyces pastorianus
ctcaagtgttttgcccagactgtaa

SEQ ID NO: 29686 - DNA, 25 bp, Saccharomyces pastorianus
gtgctcgaaaacttaacgtacgtag

SEQ ID NO: 29687 - DNA, 25 bp, Saccharomyces pastorianus
gcccagactgtaatgagagacttca

SEQ ID NO: 29688 - DNA, 25 bp, Saccharomyces pastorianus
tgactctcaagtgttttgcccagac

SEQ ID NO: 29689 - DNA, 25 bp, Saccharomyces pastorianus
gataacgacgttttgagagttgcaa

SEQ ID NO: 29690 - DNA, 25 bp, Saccharomyces pastorianus
ccatttaaccaaagggaagtgctcg

SEQ ID NO: 29691 - DNA, 25 bp, Saccharomyces pastorianus
aatacagcaaaattacgccatcatc

SEQ ID NO: 29692 - DNA, 25 bp, Saccharomyces pastorianus
tctgacaagcctgactctcaagtgt

SEQ ID NO: 29693 - DNA, 25 bp, Saccharomyces pastorianus
attacgccatcatcatatgccccag

SEQ ID NO: 29694 - DNA, 25 bp, Saccharomyces pastorianus
aagcctgactctcaagtgttttgcc

SEQ ID NO: 29695 - DNA, 25 bp, Saccharomyces pastorianus
cctgtggctacccatttaaccaaag

SEQ ID NO: 29696 - DNA, 25 bp, Saccharomyces pastorianus
atttgccgttcattggttacactta

SEQ ID NO: 29697 - DNA, 25 bp, Saccharomyces pastorianus
attctgttctgaaaccccacaagag

SEQ ID NO: 29698 - DNA, 25 bp, Saccharomyces pastorianus
gtacgccagattatatcgcgcctga

SEQ ID NO: 29699 - DNA, 25 bp, Saccharomyces pastorianus
tcatccgtttttccgtggtgtcgat

SEQ ID NO: 29700 - DNA, 25 bp, Saccharomyces pastorianus
gccgacttttaacgcatgctgatca

SEQ ID NO: 29701 - DNA, 25 bp, Saccharomyces pastorianus
aaatcacgccgtttgatggcttact

SEQ ID NO: 29702 - DNA, 25 bp, Saccharomyces pastorianus
ggaagatcttatccgccgactttta

SEQ ID NO: 29703 - DNA, 25 bp, Saccharomyces pastorianus
agaacgtacctgattctccagctat

SEQ ID NO: 29704 - DNA, 25 bp, Saccharomyces pastorianus
gttgagctccattacggataccagg

SEQ ID NO: 29705 - DNA, 25 bp, Saccharomyces pastorianus
taccaggttcttcccaacagacgag

SEQ ID NO: 29706 - DNA, 25 bp, Saccharomyces pastorianus
ggcttactctacagtgggtacgcca

SEQ ID NO: 29707 - DNA, 25 bp, Saccharomyces pastorianus
gtattgtccgttacctctgataagt

SEQ ID NO: 29708 - DNA, 25 bp, Saccharomyces pastorianus
gatgcttccagaccaactttgattt

SEQ ID NO: 29709 - DNA, 25 bp, Saccharomyces pastorianus
gcttctaccttttcttatggtgctg

SEQ ID NO: 29710 - DNA, 25 bp, Saccharomyces pastorianus
gtatactccggtgttttcactccag

SEQ ID NO: 29711 - DNA, 25 bp, Saccharomyces pastorianus
aattctacttcttcatccattgcaa

SEQ ID NO: 29712 - DNA, 25 bp, Saccharomyces pastorianus
gatttcttctagctctgttatcaga

SEQ ID NO: 29713 - DNA, 25 bp, Saccharomyces pastorianus
cagagaacgctgtcggtgccggtta

SEQ ID NO: 29714 - DNA, 25 bp, Saccharomyces pastorianus
aattgtctacgatggcggttactcc

SEQ ID NO: 29715 - DNA, 25 bp, Saccharomyces pastorianus
tcgttgtttcttcaggttccagcaa

SEQ ID NO: 29716 - DNA, 25 bp, Saccharomyces pastorianus
gtattttcgaaaacggcgcaccaat

SEQ ID NO: 29717 - DNA, 25 bp, Saccharomyces pastorianus
gtcactgaagactctgcttacgcta

SEQ ID NO: 29718 - DNA, 25 bp, Saccharomyces pastorianus
tattggactaatactattcccgttt

SEQ ID NO: 29719 - DNA, 25 bp, Saccharomyces pastorianus
aatctatggcgtgagcggtactata

SEQ ID NO: 29720 - DNA, 25 bp, Saccharomyces pastorianus
tattcccgttttccgtgtataacat

SEQ ID NO: 29721 - DNA, 25 bp, Saccharomyces pastorianus
gattcgccgtttttagcaagacagc

SEQ ID NO: 29722 - DNA, 25 bp, Saccharomyces pastorianus
ggcaaattgggactacttggcaaat

SEQ ID NO: 29723 - DNA, 25 bp, Saccharomyces pastorianus
gcacgacacttattgcctataaaga

SEQ ID NO: 29724 - DNA, 25 bp, Saccharomyces pastorianus
cgtattttattcttccccgatgata

SEQ ID NO: 29725 - DNA, 25 bp, Saccharomyces pastorianus
actgtgtctcttgtttactgttatc

SEQ ID NO: 29726 - DNA, 25 bp, Saccharomyces pastorianus
ttcgtgaaattctctaccatcttaa

SEQ ID NO: 29727 - DNA, 25 bp, Saccharomyces pastorianus
aaacgcaaacgcagtcgattcgccg

SEQ ID NO: 29728 - DNA, 25 bp, Saccharomyces pastorianus
agacagcaaagtcctcttagaactt

SEQ ID NO: 29729 - DNA, 25 bp, Saccharomyces pastorianus
gcgattggaggcagtacgagttcaa

SEQ ID NO: 29730 - DNA, 25 bp, Saccharomyces pastorianus
ttgaccaaccctagcaagctacgag

SEQ ID NO: 29731 - DNA, 25 bp, Saccharomyces pastorianus
gatgagggcgaagctatcgacacaa

SEQ ID NO: 29732 - DNA, 25 bp, Saccharomyces pastorianus
gggtagtagacaacgcaactttgat

SEQ ID NO: 29733 - DNA, 25 bp, Saccharomyces pastorianus
gtaagaataatctgcccttgaccaa

SEQ ID NO: 29734 - DNA, 25 bp, Saccharomyces pastorianus
aactggcaatcacggatcttcacct

SEQ ID NO: 29735 - DNA, 25 bp, Saccharomyces pastorianus
tacgagttcaactccaactggcaat

SEQ ID NO: 29736 - DNA, 25 bp, Saccharomyces pastorianus
tatcgacacaagcaaattctctccc

SEQ ID NO: 29737 - DNA, 25 bp, Saccharomyces pastorianus
accatcgtctaacaacggtgcgatt

SEQ ID NO: 29738 - DNA, 25 bp, Saccharomyces pastorianus
gaaggataagcacctgtccatcgac

SEQ ID NO: 29739 - DNA, 25 bp, Saccharomyces pastorianus
tccatcgactgcgtctactgctggg

SEQ ID NO: 29740 - DNA, 25 bp, Saccharomyces pastorianus
aactcttctctacaagctgcaggtg

SEQ ID NO: 29741 - DNA, 25 bp, Saccharomyces pastorianus
taccggactggttgggttacgccat

SEQ ID NO: 29742 - DNA, 25 bp, Saccharomyces pastorianus
tactgagttgcatctgtatcgggat

SEQ ID NO: 29743 - DNA, 25 bp, Saccharomyces pastorianus
ttgttaagagctcagtaccccacga

SEQ ID NO: 29744 - DNA, 25 bp, Saccharomyces pastorianus
gcatcaacgccatgttaggtgtcac

SEQ ID NO: 29745 - DNA, 25 bp, Saccharomyces pastorianus
acgacagcttgctttctgtgattag

SEQ ID NO: 29746 - DNA, 25 bp, Saccharomyces pastorianus
gaatttcgttcattacttgcaagcc

SEQ ID NO: 29747 - DNA, 25 bp, Saccharomyces pastorianus
ccagaattcgcatcaagacctctta

SEQ ID NO: 29748 - DNA, 25 bp, Saccharomyces pastorianus
gacctcttattctcggcgttaaaat

SEQ ID NO: 29749 - DNA, 25 bp, Saccharomyces pastorianus
ttatctgcttcatccattcaccaaa

SEQ ID NO: 29750 - DNA, 25 bp, Saccharomyces pastorianus
gatggttccatatctatgctactga

SEQ ID NO: 29751 - DNA, 25 bp, Saccharomyces pastorianus
gcaactgcaacaagctcaggcccaa

SEQ ID NO: 29752 - DNA, 25 bp, Saccharomyces pastorianus
ttggatgaaactgaacggcggtcgt

SEQ ID NO: 29753 - DNA, 25 bp, Saccharomyces pastorianus
gtcatccaaatccacctaacgagaa

SEQ ID NO: 29754 - DNA, 25 bp, Saccharomyces pastorianus
acaacacggtgattcgcattacgat

SEQ ID NO: 29755 - DNA, 25 bp, Saccharomyces pastorianus
aagccaatcgctaccagttacaaca

SEQ ID NO: 29756 - DNA, 25 bp, Saccharomyces pastorianus
tcaatactcatcacctgacaatcac

SEQ ID NO: 29757 - DNA, 25 bp, Saccharomyces pastorianus
cgccaacaacgcaactcaagacatg

SEQ ID NO: 29758 - DNA, 25 bp, Saccharomyces pastorianus
aagcttctaagctcgatccaacttc

SEQ ID NO: 29759 - DNA, 25 bp, Saccharomyces pastorianus
gacaatcaccatcagtatactcagc

SEQ ID NO: 29760 - DNA, 25 bp, Saccharomyces pastorianus
tttcctgatactaatgctaacggtc

SEQ ID NO: 29761 - DNA, 25 bp, Saccharomyces pastorianus
gcggtcgtggctgggatttatcaat

SEQ ID NO: 29762 - DNA, 25 bp, Saccharomyces pastorianus
gaattgttgccccagggacaaagga

SEQ ID NO: 29763 - DNA, 25 bp, Saccharomyces pastorianus
gacaagatccagaccctgcaggata

SEQ ID NO: 29764 - DNA, 25 bp, Saccharomyces pastorianus
gcaaggtgagattgacggccgtctt

SEQ ID NO: 29765 - DNA, 25 bp, Saccharomyces pastorianus
gtcttgatgctctgaaggcttccct

SEQ ID NO: 29766 - DNA, 25 bp, Saccharomyces pastorianus
gtacctcgatgatgtttccctggag

SEQ ID NO: 29767 - DNA, 25 bp, Saccharomyces pastorianus
aggatgcacagcttctcgaggacaa

SEQ ID NO: 29768 - DNA, 25 bp, Saccharomyces pastorianus
aagtggccgcacagctcgaagagga

SEQ ID NO: 29769 - DNA, 25 bp, Saccharomyces pastorianus
gagttctcaaagctgatcatgcgca

SEQ ID NO: 29770 - DNA, 25 bp, Saccharomyces pastorianus
ctgtgcagtacaaggtcggcgacct

SEQ ID NO: 29771 - DNA, 25 bp, Saccharomyces pastorianus
tgtttccctggagatcgaactgatc

SEQ ID NO: 29772 - DNA, 25 bp, Saccharomyces pastorianus
gataccgttgcgcaggaattgactt

SEQ ID NO: 29773 - DNA, 25 bp, Saccharomyces pastorianus
attgataaactagacggaccttccg

SEQ ID NO: 29774 - DNA, 25 bp, Saccharomyces pastorianus
ggccgctcaagtggaacatgacaaa

SEQ ID NO: 29775 - DNA, 25 bp, Saccharomyces pastorianus
gcaattggccgctcaagtggaacat

SEQ ID NO: 29776 - DNA, 25 bp, Saccharomyces pastorianus
attggctaagaagcaattggccgct

SEQ ID NO: 29777 - DNA, 25 bp, Saccharomyces pastorianus
aaaggctctggaagaggccaaacaa

SEQ ID NO: 29778 - DNA, 25 bp, Saccharomyces pastorianus
ggaccttccgtagcagaaacgactt

SEQ ID NO: 29779 - DNA, 25 bp, Saccharomyces pastorianus
aggtctgaggagctgattgataaac

SEQ ID NO: 29780 - DNA, 25 bp, Saccharomyces pastorianus
ccgtagcagaaacgacttctttcgg

SEQ ID NO: 29781 - DNA, 25 bp, Saccharomyces pastorianus
tgatcgtaggcggttatatgttggt

SEQ ID NO: 29782 - DNA, 25 bp, Saccharomyces pastorianus
tagagaccctcttaaccagaataat

SEQ ID NO: 29783 - DNA, 25 bp, Saccharomyces pastorianus
gcggcaacttggatagagaccctct

SEQ ID NO: 29784 - DNA, 25 bp, Saccharomyces pastorianus
tagagcccagcgacatggacttggt

SEQ ID NO: 29785 - DNA, 25 bp, Saccharomyces pastorianus
ggtcacgaaccaactggccgagcag

SEQ ID NO: 29786 - DNA, 25 bp, Saccharomyces pastorianus
tgtggtggccacagacactaacgca

SEQ ID NO: 29787 - DNA, 25 bp, Saccharomyces pastorianus
ggtggagattctggccgaaaacgaa

SEQ ID NO: 29788 - DNA, 25 bp, Saccharomyces pastorianus
aatcagacgcggattgcgactttct

SEQ ID NO: 29789 - DNA, 25 bp, Saccharomyces pastorianus
aggtttgatgttgcccagcagagcc

SEQ ID NO: 29790 - DNA, 25 bp, Saccharomyces pastorianus
aaagagaccagtccgttttgcgatg

SEQ ID NO: 29791 - DNA, 25 bp, Saccharomyces pastorianus
gatggacctacaccagctcagggaa

SEQ ID NO: 29792 - DNA, 25 bp, Saccharomyces pastorianus
gttacaagacgaggcgtacgcccgc

SEQ ID NO: 29793 - DNA, 25 bp, Saccharomyces pastorianus
cgcgagcatctaacggcggctatcg

SEQ ID NO: 29794 - DNA, 25 bp, Saccharomyces pastorianus
agagccaacgtgctgcacagacgtt

SEQ ID NO: 29795 - DNA, 25 bp, Saccharomyces pastorianus
acggcattccaaaaactactctcag

SEQ ID NO: 29796 - DNA, 25 bp, Saccharomyces pastorianus
taacactaaacataccacctctcat

SEQ ID NO: 29797 - DNA, 25 bp, Saccharomyces pastorianus
gagtagccatatttctggttttctg

SEQ ID NO: 29798 - DNA, 25 bp, Saccharomyces pastorianus
aaactcagcatatttcaggacggca

SEQ ID NO: 29799 - DNA, 25 bp, Saccharomyces pastorianus
ggccctgccagtagcgtaaaaccat

SEQ ID NO: 29800 - DNA, 25 bp, Saccharomyces pastorianus
gcgtaaaaccattgcctatcttttc

SEQ ID NO: 29801 - DNA, 25 bp, Saccharomyces pastorianus
cttgtgctcttcttcataataatag

SEQ ID NO: 29802 - DNA, 25 bp, Saccharomyces pastorianus
ggatcattaaccttgtgctcttctt

SEQ ID NO: 29803 - DNA, 25 bp, Saccharomyces pastorianus
aaaaacaatcatcagggccctgcca

SEQ ID NO: 29804 - DNA, 25 bp, Saccharomyces pastorianus
aaaacttgatagatttcgacgacgt

SEQ ID NO: 29805 - DNA, 25 bp, Saccharomyces pastorianus
cgacgttaacgtggtagacaagaca

SEQ ID NO: 29806 - DNA, 25 bp, Saccharomyces pastorianus
gcccaagcttctcaaaaggacaagt

SEQ ID NO: 29807 - DNA, 25 bp, Saccharomyces pastorianus
tctgcccaagcttctcaaaaggaca

SEQ ID NO: 29808 - DNA, 25 bp, Saccharomyces pastorianus
caagcttctcaaaaggacaagtctt

SEQ ID NO: 29809 - DNA, 25 bp, Saccharomyces pastorianus
ttctcaaaaggacaagtcttccgag

SEQ ID NO: 29810 - DNA, 25 bp, Saccharomyces pastorianus
gtcttccgagaagaaagacaactat

SEQ ID NO: 29811 - DNA, 25 bp, Saccharomyces pastorianus
aaggacaagtcttccgagaagaaag

SEQ ID NO: 29812 - DNA, 25 bp, Saccharomyces pastorianus
gcttctcaaaaggacaagtcttccg

SEQ ID NO: 29813 - DNA, 25 bp, Saccharomyces pastorianus
caaaaggacaagtcttccgagaaga

SEQ ID NO: 29814 - DNA, 25 bp, Saccharomyces pastorianus
tgcccaagcttctcaaaaggacaag

SEQ ID NO: 29815 - DNA, 25 bp, Saccharomyces pastorianus
atctctgcccaagcttctcaaaagg

SEQ ID NO: 29816 - DNA, 25 bp, Saccharomyces pastorianus
tctctgcccaagcttctcaaaagga

SEQ ID NO: 29817 - DNA, 25 bp, Saccharomyces pastorianus
gatgatccagcttattttggcggtt

SEQ ID NO: 29818 - DNA, 25 bp, Saccharomyces pastorianus
gcgatcaaatcttgctaaccgtctg

SEQ ID NO: 29819 - DNA, 25 bp, Saccharomyces pastorianus
tgccttttgagacacatcgaacctg

SEQ ID NO: 29820 - DNA, 25 bp, Saccharomyces pastorianus
gtttagattctgctgaagcgccatt

SEQ ID NO: 29821 - DNA, 25 bp, Saccharomyces pastorianus
aagcgccatttccaccaaatttatt

SEQ ID NO: 29822 - DNA, 25 bp, Saccharomyces pastorianus
agttcgtctcagatgctctagattt

SEQ ID NO: 29823 - DNA, 25 bp, Saccharomyces pastorianus
aagaaggttctgctcagttcgtctc

SEQ ID NO: 29824 - DNA, 25 bp, Saccharomyces pastorianus
agatctgagattgactgcacacgca

SEQ ID NO: 29825 - DNA, 25 bp, Saccharomyces pastorianus
aatctgtttctgagttgccattgca

SEQ ID NO: 29826 - DNA, 25 bp, Saccharomyces pastorianus
aggatggtaccatttctgccttagg

SEQ ID NO: 29827 - DNA, 25 bp, Saccharomyces pastorianus
cgaagaagccactccgtttatcaag

SEQ ID NO: 29828 - DNA, 25 bp, Saccharomyces pastorianus
gtggaatttccaatccctgaacaaa

SEQ ID NO: 29829 - DNA, 25 bp, Saccharomyces pastorianus
acttcttgttcaactgccatcaatg

SEQ ID NO: 29830 - DNA, 25 bp, Saccharomyces pastorianus
aaactgaatcatgcagcgtggttct

SEQ ID NO: 29831 - DNA, 25 bp, Saccharomyces pastorianus
aaggtaaggtcaacgctatctcatt

SEQ ID NO: 29832 - DNA, 25 bp, Saccharomyces pastorianus
aacgacaccgagtctctagttattg

SEQ ID NO: 29833 - DNA, 25 bp, Saccharomyces pastorianus
ccattcggtacctcaaatttctatc

SEQ ID NO: 29834 - DNA, 25 bp, Saccharomyces pastorianus
tccactgtttcctccgcggaaggta

SEQ ID NO: 29835 - DNA, 25 bp, Saccharomyces pastorianus
aactcacaagaaccctgaactgcgt

SEQ ID NO: 29836 - DNA, 25 bp, Saccharomyces pastorianus
gcagcgtggttcttgattccagtat

SEQ ID NO: 29837 - DNA, 25 bp, Saccharomyces pastorianus
gaagcataacttcgccgatggcaaa

SEQ ID NO: 29838 - DNA, 25 bp, Saccharomyces pastorianus
tgaactgcgtcaatcttccactgtt

SEQ ID NO: 29839 - DNA, 25 bp, Saccharomyces pastorianus
gtcatctgcagggaacaccagcaat

SEQ ID NO: 29840 - DNA, 25 bp, Saccharomyces pastorianus
caaagcctgattctgaacgtgacac

SEQ ID NO: 29841 - DNA, 25 bp, Saccharomyces pastorianus
gtaaagccgcagctcctataaggaa

SEQ ID NO: 29842 - DNA, 25 bp, Saccharomyces pastorianus
gaagctgacgaaacactcgaatctg

SEQ ID NO: 29843 - DNA, 25 bp, Saccharomyces pastorianus
gtctagctcttctgaaaccacgaat

SEQ ID NO: 29844 - DNA, 25 bp, Saccharomyces pastorianus
aggatgaaccattagcgagaagaac

SEQ ID NO: 29845 - DNA, 25 bp, Saccharomyces pastorianus
gcaaaaataggactccggccactag

SEQ ID NO: 29846 - DNA, 25 bp, Saccharomyces pastorianus
aaggacctaggtgcaaagcctgatt

SEQ ID NO: 29847 - DNA, 25 bp, Saccharomyces pastorianus
gaggcattcgtcatctgcagggaac

SEQ ID NO: 29848 - DNA, 25 bp, Saccharomyces pastorianus
gaaaggcaggttcccgcaaaaatag

SEQ ID NO: 29849 - DNA, 25 bp, Saccharomyces pastorianus
gaacgcgaaaagtctagctcttctg

SEQ ID NO: 29850 - DNA, 25 bp, Saccharomyces pastorianus
aaaggctagattgaccatcccaggc

SEQ ID NO: 29851 - DNA, 25 bp, Saccharomyces pastorianus
tatccccaggtgacggagccacctt

SEQ ID NO: 29852 - DNA, 25 bp, Saccharomyces pastorianus
aagactggtgatttggttactatcc

SEQ ID NO: 29853 - DNA, 25 bp, Saccharomyces pastorianus
tgacagaggttctccattccaatgc

SEQ ID NO: 29854 - DNA, 25 bp, Saccharomyces pastorianus
agattatccccaggtgacggagcca

SEQ ID NO: 29855 - DNA, 25 bp, Saccharomyces pastorianus
ctatccactacaccggtactttaga

SEQ ID NO: 29856 - DNA, 25 bp, Saccharomyces pastorianus
atttggttactatccactacaccgg

SEQ ID NO: 29857 - DNA, 25 bp, Saccharomyces pastorianus
ggttctccattccaatgcaacattg

SEQ ID NO: 29858 - DNA, 25 bp, Saccharomyces pastorianus
tagattgaccatcccaggcccatac

SEQ ID NO: 29859 - DNA, 25 bp, Saccharomyces pastorianus
atcgacagattatccccaggtgacg

SEQ ID NO: 29860 - DNA, 25 bp, Saccharomyces pastorianus
ggtaacgtcaaaatcgacagattat

SEQ ID NO: 29861 - DNA, 25 bp, Saccharomyces pastorianus
ggctccgaagccgttcaagctatga

SEQ ID NO: 29862 - DNA, 25 bp, Saccharomyces pastorianus
tgtctagcgtacaaagtgccatttt

SEQ ID NO: 29863 - DNA, 25 bp, Saccharomyces pastorianus
aatgtcacaatatttccgtcaactg

SEQ ID NO: 29864 - DNA, 25 bp, Saccharomyces pastorianus
gaccgagtctcaaaagtccttagag

SEQ ID NO: 29865 - DNA, 25 bp, Saccharomyces pastorianus
gtcaactgttgagccaagctatcga

SEQ ID NO: 29866 - DNA, 25 bp, Saccharomyces pastorianus
gatatgatacctatgcttgcgcttc

SEQ ID NO: 29867 - DNA, 25 bp, Saccharomyces pastorianus
agctgccaaagccaaaggtgttgtt

SEQ ID NO: 29868 - DNA, 25 bp, Saccharomyces pastorianus
tggccattgggctgcaacgtaaaaa

SEQ ID NO: 29869 - DNA, 25 bp, Saccharomyces pastorianus
tgatttagaggaagccggctccgaa

SEQ ID NO: 29870 - DNA, 25 bp, Saccharomyces pastorianus
ggaattgaacttacctgccaatcag

SEQ ID NO: 29871 - DNA, 25 bp, Saccharomyces pastorianus
gcttgcgcttctatattttggtggt

SEQ ID NO: 29872 - DNA, 25 bp, Saccharomyces pastorianus
ttgaaagatatcgtacctccaggta

SEQ ID NO: 29873 - DNA, 25 bp, Saccharomyces pastorianus
tttttagttttacgagctctcttgt

SEQ ID NO: 29874 - DNA, 25 bp, Saccharomyces pastorianus
tgtcccattgtcattgtccatacta

SEQ ID NO: 29875 - DNA, 25 bp, Saccharomyces pastorianus
gactttgactaccactgcgttgttg

SEQ ID NO: 29876 - DNA, 25 bp, Saccharomyces pastorianus
cagatccggaaaccttgcctggact

SEQ ID NO: 29877 - DNA, 25 bp, Saccharomyces pastorianus
taaagaacgctttctccagatccgg

SEQ ID NO: 29878 - DNA, 25 bp, Saccharomyces pastorianus
gtagaagaaccacaattcggcggaa

SEQ ID NO: 29879 - DNA, 25 bp, Saccharomyces pastorianus
gactgccgcacaaaacgacgatgtt

SEQ ID NO: 29880 - DNA, 25 bp, Saccharomyces pastorianus
actgcgttgttgctaggtgtcccat

SEQ ID NO: 29881 - DNA, 25 bp, Saccharomyces pastorianus
gacgatgtcgtccaagtagaagaac

SEQ ID NO: 29882 - DNA, 25 bp, Saccharomyces pastorianus
ggaaaccaagccattatcgaagaaa

SEQ ID NO: 29883 - DNA, 25 bp, Saccharomyces pastorianus
gaaggtcctccagaaagggatatca

SEQ ID NO: 29884 - DNA, 25 bp, Saccharomyces pastorianus
gggactcaccagaagctttggattt

SEQ ID NO: 29885 - DNA, 25 bp, Saccharomyces pastorianus
caagtttggaacgagctaggagcta

SEQ ID NO: 29886 - DNA, 25 bp, Saccharomyces pastorianus
agccacgcccaattgtttgttaatg

SEQ ID NO: 29887 - DNA, 25 bp, Saccharomyces pastorianus
gaggccacattgatccatgaagatg

SEQ ID NO: 29888 - DNA, 25 bp, Saccharomyces pastorianus
agtcttatcgagaaagccacgccca

SEQ ID NO: 29889 - DNA, 25 bp, Saccharomyces pastorianus
ttagattccttctgggtggatccac

SEQ ID NO: 29890 - DNA, 25 bp, Saccharomyces pastorianus
taacattcaaaactgggactcacca

SEQ ID NO: 29891 - DNA, 25 bp, Saccharomyces pastorianus
tgaaagccctttaaaatcggtgtgc

SEQ ID NO: 29892 - DNA, 25 bp, Saccharomyces pastorianus
ggatttcaaactatttggcgcagag

SEQ ID NO: 29893 - DNA, 25 bp, Saccharomyces pastorianus
gacaacacaccgattgaaagccctt

SEQ ID NO: 29894 - DNA, 25 bp, Saccharomyces pastorianus
ttgagcgatgcttgcggacaggaaa

SEQ ID NO: 29895 - DNA, 25 bp, Saccharomyces pastorianus
ggaactgcccttatccattggaatt

SEQ ID NO: 29896 - DNA, 25 bp, Saccharomyces pastorianus
gcttccatcttttgcatatctttta

SEQ ID NO: 29897 - DNA, 25 bp, Saccharomyces pastorianus
gatatccggtgtttatctttacgaa

SEQ ID NO: 29898 - DNA, 25 bp, Saccharomyces pastorianus
gctcagagccttacttcagttttac

SEQ ID NO: 29899 - DNA, 25 bp, Saccharomyces pastorianus
aacacagaggtgcttccatcttttg

SEQ ID NO: 29900 - DNA, 25 bp, Saccharomyces pastorianus
gctactatcgacttttcaaccttga

SEQ ID NO: 29901 - DNA, 25 bp, Saccharomyces pastorianus
ggacaggaaattgcgctcagagcct

SEQ ID NO: 29902 - DNA, 25 bp, Saccharomyces pastorianus
gtaacaattctagtcaggatctctt

SEQ ID NO: 29903 - DNA, 25 bp, Saccharomyces pastorianus
gaagatcttggatatggacaccgta

SEQ ID NO: 29904 - DNA, 25 bp, Saccharomyces pastorianus
tgacatgtaccatccgatattgaag

SEQ ID NO: 29905 - DNA, 25 bp, Saccharomyces pastorianus
acataccttccttcaactgattttc

SEQ ID NO: 29906 - DNA, 25 bp, Saccharomyces pastorianus
gctcctttcctgttggtttgtgaag

SEQ ID NO: 29907 - DNA, 25 bp, Saccharomyces pastorianus
ctaattttgatttccatccttcgtg

SEQ ID NO: 29908 - DNA, 25 bp, Saccharomyces pastorianus
aaaccagatgagtttctacccgcct

SEQ ID NO: 29909 - DNA, 25 bp, Saccharomyces pastorianus
ggttgttgtttcattgctgcactaa

SEQ ID NO: 29910 - DNA, 25 bp, Saccharomyces pastorianus
gtagagctaacgtaaccatcatttt

SEQ ID NO: 29911 - DNA, 25 bp, Saccharomyces pastorianus
tacatgttcgcgttttggattcctg

SEQ ID NO: 29912 - DNA, 25 bp, Saccharomyces pastorianus
acctataatgggtcttgccggcgac

SEQ ID NO: 29913 - DNA, 25 bp, Saccharomyces pastorianus
ttcgtcaactattgcggtgctcctt

SEQ ID NO: 29914 - DNA, 25 bp, Saccharomyces pastorianus
gaacacggtcttgattgctgatatg

SEQ ID NO: 29915 - DNA, 25 bp, Saccharomyces pastorianus
gtgtcggtgtcgctaacgtcatgaa

SEQ ID NO: 29916 - DNA, 25 bp, Saccharomyces pastorianus
caatggctgatgtcccaaagggtgt

SEQ ID NO: 29917 - DNA, 25 bp, Saccharomyces pastorianus
gaatttcaaagtggttcgtgacggt

SEQ ID NO: 29918 - DNA, 25 bp, Saccharomyces pastorianus
ttaccattacttcccaaccgcagaa

SEQ ID NO: 29919 - DNA, 25 bp, Saccharomyces pastorianus
gcaattcaatatggtatctccgcaa

SEQ ID NO: 29920 - DNA, 25 bp, Saccharomyces pastorianus
gggagaatcatcaccagcaattcaa

SEQ ID NO: 29921 - DNA, 25 bp, Saccharomyces pastorianus
aaaccacaccatgctgttttacaag

SEQ ID NO: 29922 - DNA, 25 bp, Saccharomyces pastorianus
aatgtaccatttgctatttcactga

SEQ ID NO: 29923 - DNA, 25 bp, Saccharomyces pastorianus
gtatctccgcaacgaactttatcac

SEQ ID NO: 29924 - DNA, 25 bp, Saccharomyces pastorianus
gactacaattcatcactgtttctag

SEQ ID NO: 29925 - DNA, 25 bp, Saccharomyces pastorianus
ggtgatgtcattttatccgttgatg

SEQ ID NO: 29926 - DNA, 25 bp, Saccharomyces pastorianus
gatcattttgtaatatttgccggta

SEQ ID NO: 29927 - DNA, 25 bp, Saccharomyces pastorianus
gcaggtaaagacttcgacaaggcta

SEQ ID NO: 29928 - DNA, 25 bp, Saccharomyces pastorianus
gatccgatccagtattggctgccaa

SEQ ID NO: 29929 - DNA, 25 bp, Saccharomyces pastorianus
ggtcggtaaggctactttattgaca

SEQ ID NO: 29930 - DNA, 25 bp, Saccharomyces pastorianus
agatatcgacgaggctattgcatta

SEQ ID NO: 29931 - DNA, 25 bp, Saccharomyces pastorianus
gaaaccctgttcagtgaagctaaga

SEQ ID NO: 29932 - DNA, 25 bp, Saccharomyces pastorianus
aagagtctgctgatcttgccagaac

SEQ ID NO: 29933 - DNA, 25 bp, Saccharomyces pastorianus
aactagcatgtttagcataccgtga

SEQ ID NO: 29934 - DNA, 25 bp, Saccharomyces pastorianus
gttggtatcgcaccattggtcggta

SEQ ID NO: 29935 - DNA, 25 bp, Saccharomyces pastorianus
ggctattgcattattcgaagagtct

SEQ ID NO: 29936 - DNA, 25 bp, Saccharomyces pastorianus
aacatcttcccttacattcaactag

SEQ ID NO: 29937 - DNA, 25 bp, Saccharomyces pastorianus
gaaggtatttacgttggtatcgcac

SEQ ID NO: 29938 - DNA, 25 bp, Saccharomyces pastorianus
aagcgaagacaactcccacgaatta

SEQ ID NO: 29939 - DNA, 25 bp, Saccharomyces pastorianus
atagtatatacaccacgccaacagc

SEQ ID NO: 29940 - DNA, 25 bp, Saccharomyces pastorianus
gttacttgaatcctaattcactcga

SEQ ID NO: 29941 - DNA, 25 bp, Saccharomyces pastorianus
aacctggtagtattgacgcgaacat

SEQ ID NO: 29942 - DNA, 25 bp, Saccharomyces pastorianus
ttctaaggccgctgcaaccggattc

SEQ ID NO: 29943 - DNA, 25 bp, Saccharomyces pastorianus
gaagaatctccatcaaaattgccaa

SEQ ID NO: 29944 - DNA, 25 bp, Saccharomyces pastorianus
cccctaatgtctgctagtcaaggaa

SEQ ID NO: 29945 - DNA, 25 bp, Saccharomyces pastorianus
agaaattccgtgtctgaacatcaaa

SEQ ID NO: 29946 - DNA, 25 bp, Saccharomyces pastorianus
taccgataccccatcaaatgaattg

SEQ ID NO: 29947 - DNA, 25 bp, Saccharomyces pastorianus
cgtttgacatacgttccaatgggaa

SEQ ID NO: 29948 - DNA, 25 bp, Saccharomyces pastorianus
aaaggacgctgcatctccaaaacaa

SEQ ID NO: 29949 - DNA, 25 bp, Saccharomyces pastorianus
gtgtctcgttgccaattgtaccagt

SEQ ID NO: 29950 - DNA, 25 bp, Saccharomyces pastorianus
gttcctgaaaatgtcgtcacggctt

SEQ ID NO: 29951 - DNA, 25 bp, Saccharomyces pastorianus
aatggcaaggttaccaccgacggca

SEQ ID NO: 29952 - DNA, 25 bp, Saccharomyces pastorianus
atgggtcttgggttgcacatccggc

SEQ ID NO: 29953 - DNA, 25 bp, Saccharomyces pastorianus
gaatcaaatctacttcgttcctgaa

SEQ ID NO: 29954 - DNA, 25 bp, Saccharomyces pastorianus
gtcacggcttcaaacctcttggaga

SEQ ID NO: 29955 - DNA, 25 bp, Saccharomyces pastorianus
taagaggctcaggttgtgtgcccat

SEQ ID NO: 29956 - DNA, 25 bp, Saccharomyces pastorianus
tatccaaggcaagtccactaggcga

SEQ ID NO: 29957 - DNA, 25 bp, Saccharomyces pastorianus
ttgtacgacgagattgtgaccacca

SEQ ID NO: 29958 - DNA, 25 bp, Saccharomyces pastorianus
gcactggctccgatctgtaatgaag

SEQ ID NO: 29959 - DNA, 25 bp, Saccharomyces pastorianus
aaagacgatcccgtggccaatgaaa

SEQ ID NO: 29960 - DNA, 25 bp, Saccharomyces pastorianus
tgggactttcttgaaccaccaaaga

SEQ ID NO: 29961 - DNA, 25 bp, Saccharomyces pastorianus
aaagaagctttgcaacggttacaga

SEQ ID NO: 29962 - DNA, 25 bp, Saccharomyces pastorianus
ccgcaattcatatgtcccaactgta

SEQ ID NO: 29963 - DNA, 25 bp, Saccharomyces pastorianus
agaaggctagtcatgctctcatacc

SEQ ID NO: 29964 - DNA, 25 bp, Saccharomyces pastorianus
gaagattgctcgatttgtttgtgta

SEQ ID NO: 29965 - DNA, 25 bp, Saccharomyces pastorianus
ggtcgtatcaagaacacatggctgt

SEQ ID NO: 29966 - DNA, 25 bp, Saccharomyces pastorianus
atgtgaaatcttcgagtgggacttt

SEQ ID NO: 29967 - DNA, 25 bp, Saccharomyces pastorianus
atgtcaggctattttcatatctcca

SEQ ID NO: 29968 - DNA, 25 bp, Saccharomyces pastorianus
aaagcgaaggcgatcaactggttga

SEQ ID NO: 29969 - DNA, 25 bp, Saccharomyces pastorianus
tgcgatttggaagcttctttcgaaa

SEQ ID NO: 29970 - DNA, 25 bp, Saccharomyces pastorianus
ccccgcttcatcgttgtcaaaggat

SEQ ID NO: 29971 - DNA, 25 bp, Saccharomyces pastorianus
gaaagtgtcactagctccattttaa

SEQ ID NO: 29972 - DNA, 25 bp, Saccharomyces pastorianus
gggtggagattacaaacctcttggt

SEQ ID NO: 29973 - DNA, 25 bp, Saccharomyces pastorianus
gataaccgtgatggtcgcaatcatg

SEQ ID NO: 29974 - DNA, 25 bp, Saccharomyces pastorianus
tagagagtccttacaaaacgtcaaa

SEQ ID NO: 29975 - DNA, 25 bp, Saccharomyces pastorianus
aaacctcttggttgttggctcatca

SEQ ID NO: 29976 - DNA, 25 bp, Saccharomyces pastorianus
aacttggttgccttccgagattgaa

SEQ ID NO: 29977 - DNA, 25 bp, Saccharomyces pastorianus
tagagggtggccatgaagtatacaa

SEQ ID NO: 29978 - DNA, 25 bp, Saccharomyces pastorianus
gatagcatgatgctcgttgaatcat

SEQ ID NO: 29979 - DNA, 25 bp, Saccharomyces pastorianus
ttgaatcatggcacgaggaactgct

SEQ ID NO: 29980 - DNA, 25 bp, Saccharomyces pastorianus
aactatgttcagagactattacccc

SEQ ID NO: 29981 - DNA, 25 bp, Saccharomyces pastorianus
cagggacgtttcttgcgttctaaat

SEQ ID NO: 29982 - DNA, 25 bp, Saccharomyces pastorianus
acttgatggatctgtgcgacgtcgt

SEQ ID NO: 29983 - DNA, 25 bp, Saccharomyces pastorianus
gtctgaagacggaaccagcgcctct

SEQ ID NO: 29984 - DNA, 25 bp, Saccharomyces pastorianus
agcgcctctttccagattgttgaag

SEQ ID NO: 29985 - DNA, 25 bp, Saccharomyces pastorianus
gttctgcggttattcgatacctcat

SEQ ID NO: 29986 - DNA, 25 bp, Saccharomyces pastorianus
agaagaccacacactgggcaacgct

SEQ ID NO: 29987 - DNA, 25 bp, Saccharomyces pastorianus
acgtcagaattcagacctacggtga

SEQ ID NO: 29988 - DNA, 25 bp, Saccharomyces pastorianus
tcaagcttttaacacaggccacgtc

SEQ ID NO: 29989 - DNA, 25 bp, Saccharomyces pastorianus
gaacccagacgtagagttctgcggt

SEQ ID NO: 29990 - DNA, 25 bp, Saccharomyces pastorianus
aacgctctgcgttacatcataatga

SEQ ID NO: 29991 - DNA, 25 bp, Saccharomyces pastorianus
aaacaagaagactgccctagaggaa

SEQ ID NO: 29992 - DNA, 25 bp, Saccharomyces pastorianus
tgaaactaccgctgtggaggcctta

SEQ ID NO: 29993 - DNA, 25 bp, Saccharomyces pastorianus
ccagtgagcctgttgttgtaaagaa

SEQ ID NO: 29994 - DNA, 25 bp, Saccharomyces pastorianus
gaaggctgttacctctgaaagtcaa

SEQ ID NO: 29995 - DNA, 25 bp, Saccharomyces pastorianus
aagtcaaagtcaaggtagcgctaca

SEQ ID NO: 29996 - DNA, 25 bp, Saccharomyces pastorianus
agaagtcgccgaacacaacggtcca

SEQ ID NO: 29997 - DNA, 25 bp, Saccharomyces pastorianus
tgacgtcgacaaaaccagtgagcct

SEQ ID NO: 29998 - DNA, 25 bp, Saccharomyces pastorianus
ggtagcgctacattggtcatgattt

SEQ ID NO: 29999 - DNA, 25 bp, Saccharomyces pastorianus
gtggtcaggacgctacagatagttt

SEQ ID NO: 30000 - DNA, 25 bp, Saccharomyces pastorianus
gaagctttgaaactactgaaaactt

SEQ ID NO: 30001 - DNA, 25 bp, Saccharomyces pastorianus
gaacacaacggtccagaaaactgct

SEQ ID NO: 30002 - DNA, 25 bp, Saccharomyces pastorianus
gaaaactgctggatcatcatcgatg

SEQ ID NO: 30003 - DNA, 25 bp, Saccharomyces pastorianus
tggtcatgattttggccgttgtaat

SEQ ID NO: 30004 - DNA, 25 bp, Saccharomyces pastorianus
gaaactcgacgaatattctgccatt

SEQ ID NO: 30005 - DNA, 25 bp, Saccharomyces pastorianus
ggttgcccaagaatccatgaacaat

SEQ ID NO: 30006 - DNA, 25 bp, Saccharomyces pastorianus
aattacttgttaatgggccatctat

SEQ ID NO: 30007 - DNA, 25 bp, Saccharomyces pastorianus
tcaggaaactctagacattatgggt

SEQ ID NO: 30008 - DNA, 25 bp, Saccharomyces pastorianus
tagcagattaccacatgggttccac

SEQ ID NO: 30009 - DNA, 25 bp, Saccharomyces pastorianus
gagaagggtgttaccaagccagtga

SEQ ID NO: 30010 - DNA, 25 bp, Saccharomyces pastorianus
tgaaggtttggctgtttctgatgat

SEQ ID NO: 30011 - DNA, 25 bp, Saccharomyces pastorianus
aagaggacgcactggttgcccaaga

SEQ ID NO: 30012 - DNA, 25 bp, Saccharomyces pastorianus
agaatcatcatctaccagttcagat

SEQ ID NO: 30013 - DNA, 25 bp, Saccharomyces pastorianus
gggccatctattacaagtacgtcta

SEQ ID NO: 30014 - DNA, 25 bp, Saccharomyces pastorianus
gtacgtctattaccaaacggagcca

SEQ ID NO: 30015 - DNA, 25 bp, Saccharomyces pastorianus
ttatcccagaaccagcaactcatga

SEQ ID NO: 30016 - DNA, 25 bp, Saccharomyces pastorianus
gagtaaatttttcccagctatgata

SEQ ID NO: 30017 - DNA, 25 bp, Saccharomyces pastorianus
aaagatgtcataagttctggcccat

SEQ ID NO: 30018 - DNA, 25 bp, Saccharomyces pastorianus
ggatctgacgccgacattaaggcaa

SEQ ID NO: 30019 - DNA, 25 bp, Saccharomyces pastorianus
tctccgttttatcgttgcctggaaa

SEQ ID NO: 30020 - DNA, 25 bp, Saccharomyces pastorianus
gaatgcctttgaagccggatctgac

SEQ ID NO: 30021 - DNA, 25 bp, Saccharomyces pastorianus
gttctggcccattttcatcgaaagg

SEQ ID NO: 30022 - DNA, 25 bp, Saccharomyces pastorianus
gtagacccacagttgagtctcttaa

SEQ ID NO: 30023 - DNA, 25 bp, Saccharomyces pastorianus
tgattgttacacatgcagccactaa

SEQ ID NO: 30024 - DNA, 25 bp, Saccharomyces pastorianus
gtaatacatcttttctaactaacgg

SEQ ID NO: 30025 - DNA, 25 bp, Saccharomyces pastorianus
gaaacggaagttgcgctattgacaa

SEQ ID NO: 30026 - DNA, 25 bp, Saccharomyces pastorianus
gaagtctacacctaaagtacctgca

SEQ ID NO: 30027 - DNA, 25 bp, Saccharomyces pastorianus
gaagcctgcttatctaagcgctgct

SEQ ID NO: 30028 - DNA, 25 bp, Saccharomyces pastorianus
aaacgcagatgcttctccaaaggcc

SEQ ID NO: 30029 - DNA, 25 bp, Saccharomyces pastorianus
agcgctgctgctactaaggttaaca

SEQ ID NO: 30030 - DNA, 25 bp, Saccharomyces pastorianus
tataaccggagtgtcgtcgcataaa

SEQ ID NO: 30031 - DNA, 25 bp, Saccharomyces pastorianus
tgaaagtgccatttccaccgatagc

SEQ ID NO: 30032 - DNA, 25 bp, Saccharomyces pastorianus
aagtaagcccaatgtttctccaccg

SEQ ID NO: 30033 - DNA, 25 bp, Saccharomyces pastorianus
gaaacttcgcttaggccggtaatat

SEQ ID NO: 30034 - DNA, 25 bp, Saccharomyces pastorianus
aaaggcccctacacaatctgagaaa

SEQ ID NO: 30035 - DNA, 25 bp, Saccharomyces pastorianus
gaaggtactcttactgccttagagg

SEQ ID NO: 30036 - DNA, 25 bp, Saccharomyces pastorianus
ctcacgcctatcttcaaggtcaaat

SEQ ID NO: 30037 - DNA, 25 bp, Saccharomyces pastorianus
actgccacagtacttttcatttcca

SEQ ID NO: 30038 - DNA, 25 bp, Saccharomyces pastorianus
agtagaattacgtcccaactctggg

SEQ ID NO: 30039 - DNA, 25 bp, Saccharomyces pastorianus
atcatgctgtctacacctttacaat

SEQ ID NO: 30040 - DNA, 25 bp, Saccharomyces pastorianus
gtctctcgcctgtattccattggta

SEQ ID NO: 30041 - DNA, 25 bp, Saccharomyces pastorianus
cgattgcttactttggctctgacaa

SEQ ID NO: 30042 - DNA, 25 bp, Saccharomyces pastorianus
attccattgcgatcatgctgtctac

SEQ ID NO: 30043 - DNA, 25 bp, Saccharomyces pastorianus
gatccatcattgtcatcatcgttgt

SEQ ID NO: 30044 - DNA, 25 bp, Saccharomyces pastorianus
tagcttatggctcggatgtcaaaac

SEQ ID NO: 30045 - DNA, 25 bp, Saccharomyces pastorianus
aattccctctagtacttggattggt

SEQ ID NO: 30046 - DNA, 25 bp, Saccharomyces pastorianus
attcgtttcagtcatagggtctctc

SEQ ID NO: 30047 - DNA, 25 bp, Saccharomyces pastorianus
ggattggttattctcactgccacag

SEQ ID NO: 30048 - DNA, 25 bp, Saccharomyces pastorianus
ggctcactaatagcactgggtgcct

SEQ ID NO: 30049 - DNA, 25 bp, Saccharomyces pastorianus
acagaatctagttagtgccacggaa

SEQ ID NO: 30050 - DNA, 25 bp, Saccharomyces pastorianus
aactgtgtacatcattaccatcgag

SEQ ID NO: 30051 - DNA, 25 bp, Saccharomyces pastorianus
gcctttttcgctggcagtttagcag

SEQ ID NO: 30052 - DNA, 25 bp, Saccharomyces pastorianus
tgctgatcaacttgaccgctacgaa

SEQ ID NO: 30053 - DNA, 25 bp, Saccharomyces pastorianus
gcagaactgcgtttgctgatcaact

SEQ ID NO: 30054 - DNA, 25 bp, Saccharomyces pastorianus
aaaatgatctactaccacgcgactt

SEQ ID NO: 30055 - DNA, 25 bp, Saccharomyces pastorianus
cgagaatgttgctgccttgggtatt

SEQ ID NO: 30056 - DNA, 25 bp, Saccharomyces pastorianus
gaaatgccatattgatcagactcta

SEQ ID NO: 30057 - DNA, 25 bp, Saccharomyces pastorianus
tgggcacctcaaacatcacagaatc

SEQ ID NO: 30058 - DNA, 25 bp, Saccharomyces pastorianus
ataagcatactgtggtcccaggctc

SEQ ID NO: 30059 - DNA, 25 bp, Saccharomyces pastorianus
tagagcgtattgttcctcctttgaa

SEQ ID NO: 30060 - DNA, 25 bp, Saccharomyces pastorianus
gaatttagctagtgtgtccgaagaa

SEQ ID NO: 30061 - DNA, 25 bp, Saccharomyces pastorianus
gttgcttatagaggcctttgacact

SEQ ID NO: 30062 - DNA, 25 bp, Saccharomyces pastorianus
tatcccttgctagtctgttgcggta

SEQ ID NO: 30063 - DNA, 25 bp, Saccharomyces pastorianus
aatttgcggccataaacccggatgc

SEQ ID NO: 30064 - DNA, 25 bp, Saccharomyces pastorianus
tgagcactccatcatcaacgtactg

SEQ ID NO: 30065 - DNA, 25 bp, Saccharomyces pastorianus
tcctcctttgaatttttgtcctgtg

SEQ ID NO: 30066 - DNA, 25 bp, Saccharomyces pastorianus
cgtactgcaaaccatcgttactcaa

SEQ ID NO: 30067 - DNA, 25 bp, Saccharomyces pastorianus
gaacctcaggatacccttttagagt

SEQ ID NO: 30068 - DNA, 25 bp, Saccharomyces pastorianus
aaaaagtcttagtctcgcatgctcc

SEQ ID NO: 30069 - DNA, 25 bp, Saccharomyces pastorianus
atacctttataggtcaggccagccc

SEQ ID NO: 30070 - DNA, 25 bp, Saccharomyces pastorianus
tgactacgtgcccattgtggtggta

SEQ ID NO: 30071 - DNA, 25 bp, Saccharomyces pastorianus
gaggcttccaagcaggactctcaaa

SEQ ID NO: 30072 - DNA, 25 bp, Saccharomyces pastorianus
aactccgccggtaacgctgatggtg

SEQ ID NO: 30073 - DNA, 25 bp, Saccharomyces pastorianus
gcattgtctgagaacgaggcttcca

SEQ ID NO: 30074 - DNA, 25 bp, Saccharomyces pastorianus
atcaatagctccacgactgctgtaa

SEQ ID NO: 30075 - DNA, 25 bp, Saccharomyces pastorianus
ggtgcctatgctagaactgccaata

SEQ ID NO: 30076 - DNA, 25 bp, Saccharomyces pastorianus
aggtcagggttctgctgccaaacaa

SEQ ID NO: 30077 - DNA, 25 bp, Saccharomyces pastorianus
gtcgttgccaattcgttgccaagaa

SEQ ID NO: 30078 - DNA, 25 bp, Saccharomyces pastorianus
aacagcaagctacatccagtggcac

SEQ ID NO: 30079 - DNA, 25 bp, Saccharomyces pastorianus
aaacaatgtcgccagtgccaacaac

SEQ ID NO: 30080 - DNA, 25 bp, Saccharomyces pastorianus
gaagaggccttctacacattagcgc

SEQ ID NO: 30081 - DNA, 25 bp, Saccharomyces pastorianus
aagaatgatctcagctacgcagccg

SEQ ID NO: 30082 - DNA, 25 bp, Saccharomyces pastorianus
ctacgcagccggcagacaggatagc

SEQ ID NO: 30083 - DNA, 25 bp, Saccharomyces pastorianus
aagagaggccatggccgccaacaga

SEQ ID NO: 30084 - DNA, 25 bp, Saccharomyces pastorianus
acagggtgaacatttcccaccaact

SEQ ID NO: 30085 - DNA, 25 bp, Saccharomyces pastorianus
gaactggagtggttccacttgccgt

SEQ ID NO: 30086 - DNA, 25 bp, Saccharomyces pastorianus
ggccaggttggcagtagcacaagtt

SEQ ID NO: 30087 - DNA, 25 bp, Saccharomyces pastorianus
aacaccacaaatcccaatatcagcg

SEQ ID NO: 30088 - DNA, 25 bp, Saccharomyces pastorianus
tccggcaatgcatctacaccatgaa

SEQ ID NO: 30089 - DNA, 25 bp, Saccharomyces pastorianus
tcaaggccgaagaccaacgactacg

SEQ ID NO: 30090 - DNA, 25 bp, Saccharomyces pastorianus
tgggcgtggacaatcatccggcaat

SEQ ID NO: 30091 - DNA, 25 bp, Saccharomyces pastorianus
accgctctactgctattgcaatcag

SEQ ID NO: 30092 - DNA, 25 bp, Saccharomyces pastorianus
aaaatcggcaggctctatccaggat

SEQ ID NO: 30093 - DNA, 25 bp, Saccharomyces pastorianus
atggctgtcattctcgcactgatta

SEQ ID NO: 30094 - DNA, 25 bp, Saccharomyces pastorianus
ttattgcgtttatcccatggctcaa

SEQ ID NO: 30095 - DNA, 25 bp, Saccharomyces pastorianus
aactcccttgctagtatttttcttg

SEQ ID NO: 30096 - DNA, 25 bp, Saccharomyces pastorianus
aaatggagtgtgtgtccttcttctt

SEQ ID NO: 30097 - DNA, 25 bp, Saccharomyces pastorianus
ggctcaaggctctatttgtcactac

SEQ ID NO: 30098 - DNA, 25 bp, Saccharomyces pastorianus
gtcccattcgggttaatcttgttag

SEQ ID NO: 30099 - DNA, 25 bp, Saccharomyces pastorianus
tcatatactttaccgccagctatac

SEQ ID NO: 30100 - DNA, 25 bp, Saccharomyces pastorianus
acgcacctgcattaagcttttttat

SEQ ID NO: 30101 - DNA, 25 bp, Saccharomyces pastorianus
ttgagaccgtgttccatggctgtca

SEQ ID NO: 30102 - DNA, 25 bp, Saccharomyces pastorianus
aaagccgccgtggtacttgtcattt

SEQ ID NO: 30103 - DNA, 25 bp, Saccharomyces pastorianus
acggtatgtatggtgcttttatgga

SEQ ID NO: 30104 - DNA, 25 bp, Saccharomyces pastorianus
ttccagtcggaagccatcgctaaca

SEQ ID NO: 30105 - DNA, 25 bp, Saccharomyces pastorianus
ggcagacgattactgtttaccatct

SEQ ID NO: 30106 - DNA, 25 bp, Saccharomyces pastorianus
gaaaataccaccaacaaggctatac

SEQ ID NO: 30107 - DNA, 25 bp, Saccharomyces pastorianus
gaactttacctaacgtagaggcaga

SEQ ID NO: 30108 - DNA, 25 bp, Saccharomyces pastorianus
gagttgcatcaagaacctatccaaa

SEQ ID NO: 30109 - DNA, 25 bp, Saccharomyces pastorianus
aattcaatgagtgattccccgttgc

SEQ ID NO: 30110 - DNA, 25 bp, Saccharomyces pastorianus
gtgattccccgttgcatgaacaaga

SEQ ID NO: 30111 - DNA, 25 bp, Saccharomyces pastorianus
gactgcgttgcaatttccaaaccag

SEQ ID NO: 30112 - DNA, 25 bp, Saccharomyces pastorianus
ttagaagcttacaccacgactgcgt

SEQ ID NO: 30113 - DNA, 25 bp, Saccharomyces pastorianus
caaacaccgaaatcttctctgcaca

SEQ ID NO: 30114 - DNA, 25 bp, Saccharomyces pastorianus
agtaaggaacctaccattggtgccg

SEQ ID NO: 30115 - DNA, 25 bp, Saccharomyces pastorianus
ttttgtcaacgtgagaacctgtcat

SEQ ID NO: 30116 - DNA, 25 bp, Saccharomyces pastorianus
acaagctgctttggtcgtcttcgat

SEQ ID NO: 30117 - DNA, 25 bp, Saccharomyces pastorianus
cattggtgccgcctttttgacaaag

SEQ ID NO: 30118 - DNA, 25 bp, Saccharomyces pastorianus
aatcgacctcgaatcaacaactgtg

SEQ ID NO: 30119 - DNA, 25 bp, Saccharomyces pastorianus
tgcggtcggcaaatcatcaatagtc

SEQ ID NO: 30120 - DNA, 25 bp, Saccharomyces pastorianus
ggccaagagagattcgcccctttgg

SEQ ID NO: 30121 - DNA, 25 bp, Saccharomyces pastorianus
ttacttggagaatctgcggtcggca

SEQ ID NO: 30122 - DNA, 25 bp, Saccharomyces pastorianus
gatcacgacctgaccattactgatg

SEQ ID NO: 30123 - DNA, 25 bp, Saccharomyces pastorianus
ggatctaccggaacgatgaggccat

SEQ ID NO: 30124 - DNA, 25 bp, Saccharomyces pastorianus
tgaaatctgggatacggccggccaa

SEQ ID NO: 30125 - DNA, 25 bp, Saccharomyces pastorianus
taatggcatgaacgaccgcaccaat

SEQ ID NO: 30126 - DNA, 25 bp, Saccharomyces pastorianus
acagccctgcgttcatgacatcgaa

SEQ ID NO: 30127 - DNA, 25 bp, Saccharomyces pastorianus
tttattaggcagagccccgtgagtc

SEQ ID NO: 30128 - DNA, 25 bp, Saccharomyces pastorianus
ttgtctatctcttcccaggacagtt

SEQ ID NO: 30129 - DNA, 25 bp, Saccharomyces pastorianus
taacaaccactatagctcaccatat

SEQ ID NO: 30130 - DNA, 25 bp, Saccharomyces pastorianus
tgggaacggaaccattactcatgtt

SEQ ID NO: 30131 - DNA, 25 bp, Saccharomyces pastorianus
aaacccgacgtcactgatcgcagta

SEQ ID NO: 30132 - DNA, 25 bp, Saccharomyces pastorianus
agtatcgcaagtgccgctcgagaca

SEQ ID NO: 30133 - DNA, 25 bp, Saccharomyces pastorianus
gatggcaaatgttgaaccgctccca

SEQ ID NO: 30134 - DNA, 25 bp, Saccharomyces pastorianus
gaacttctatttgggacagcagtcc

SEQ ID NO: 30135 - DNA, 25 bp, Saccharomyces pastorianus
agtccttcttctctgctaaacaaac

SEQ ID NO: 30136 - DNA, 25 bp, Saccharomyces pastorianus
aataccacccgacagtgtttgagaa

SEQ ID NO: 30137 - DNA, 25 bp, Saccharomyces pastorianus
gaggcgttacgatattgccccgacg

SEQ ID NO: 30138 - DNA, 25 bp, Saccharomyces pastorianus
atttgaggcaggaggcccatatcaa

SEQ ID NO: 30139 - DNA, 25 bp, Saccharomyces pastorianus
atggttcccgccgaagatgcaaaac

SEQ ID NO: 30140 - DNA, 25 bp, Saccharomyces pastorianus
cgccgatcgttcttgtgggtttgaa

SEQ ID NO: 30141 - DNA, 25 bp, Saccharomyces pastorianus
tgagaattatgttaccgactgcagg

SEQ ID NO: 30142 - DNA, 25 bp, Saccharomyces pastorianus
gtgcctgtgggaaaacgtctttact

SEQ ID NO: 30143 - DNA, 25 bp, Saccharomyces pastorianus
gaacgtcttcgtccattttcatact

SEQ ID NO: 30144 - DNA, 25 bp, Saccharomyces pastorianus
ttgggtttgccgtggataactctga

SEQ ID NO: 30145 - DNA, 25 bp, Saccharomyces pastorianus
gctgtagacgaaatggttcccgccg

SEQ ID NO: 30146 - DNA, 25 bp, Saccharomyces pastorianus
ataactctgagtccctaatcaacgc

SEQ ID NO: 30147 - DNA, 25 bp, Saccharomyces pastorianus
gataagatgggttccgcttctgcaa

SEQ ID NO: 30148 - DNA, 25 bp, Saccharomyces pastorianus
taccgcaacgcccaagaagacaaag

SEQ ID NO: 30149 - DNA, 25 bp, Saccharomyces pastorianus
aactccttctctgttaaaggctcca

SEQ ID NO: 30150 - DNA, 25 bp, Saccharomyces pastorianus
agacgaggatgacgctgtaccgcaa

SEQ ID NO: 30151 - DNA, 25 bp, Saccharomyces pastorianus
aaagcgctccttcttcaacaggttc

SEQ ID NO: 30152 - DNA, 25 bp, Saccharomyces pastorianus
ccgctgtcaaagaggctgtcgcaaa

SEQ ID NO: 30153 - DNA, 25 bp, Saccharomyces pastorianus
caacaggttcgtcttctattttcga

SEQ ID NO: 30154 - DNA, 25 bp, Saccharomyces pastorianus
gaggaaattgttacggctaccgcaa

SEQ ID NO: 30155 - DNA, 25 bp, Saccharomyces pastorianus
aaaggtcagcaagagccgcatccgc

SEQ ID NO: 30156 - DNA, 25 bp, Saccharomyces pastorianus
tccgcttctgcaacatccaatgaaa

SEQ ID NO: 30157 - DNA, 25 bp, Saccharomyces pastorianus
gcatccgcccctaagaaatcttact

SEQ ID NO: 30158 - DNA, 25 bp, Saccharomyces pastorianus
gaatacatcggctgttttcaaaact

SEQ ID NO: 30159 - DNA, 25 bp, Saccharomyces pastorianus
tcggaattacctcagtctgacctaa

SEQ ID NO: 30160 - DNA, 25 bp, Saccharomyces pastorianus
gaagacactgaatccctcttggaat

SEQ ID NO: 30161 - DNA, 25 bp, Saccharomyces pastorianus
aagcactgggtttggaaccatcgat

SEQ ID NO: 30162 - DNA, 25 bp, Saccharomyces pastorianus
gaagattaccgctaagaatgctgaa

SEQ ID NO: 30163 - DNA, 25 bp, Saccharomyces pastorianus
tgtattggtaaagcggtcgttccct

SEQ ID NO: 30164 - DNA, 25 bp, Saccharomyces pastorianus
ggtcgttcccttatctactatcgaa

SEQ ID NO: 30165 - DNA, 25 bp, Saccharomyces pastorianus
taaatttgagttcgaaccccactat

SEQ ID NO: 30166 - DNA, 25 bp, Saccharomyces pastorianus
gctaagttcgggaattttgctacaa

SEQ ID NO: 30167 - DNA, 25 bp, Saccharomyces pastorianus
tcgaaccccactatactagcaatgt

SEQ ID NO: 30168 - DNA, 25 bp, Saccharomyces pastorianus
gaatgctgaaaacttgaccggtatc

SEQ ID NO: 30169 - DNA, 25 bp, Saccharomyces pastorianus
taatctcttcattaacctcaggtga

SEQ ID NO: 30170 - DNA, 25 bp, Saccharomyces pastorianus
gaaggtcgttagacgcttaccattt

SEQ ID NO: 30171 - DNA, 25 bp, Saccharomyces pastorianus
gctccttcagcgttgtctcaagcaa

SEQ ID NO: 30172 - DNA, 25 bp, Saccharomyces pastorianus
actattcgaagctgtgttaatctct

SEQ ID NO: 30173 - DNA, 25 bp, Saccharomyces pastorianus
tcgacgaagaagttcagccacccgc

SEQ ID NO: 30174 - DNA, 25 bp, Saccharomyces pastorianus
catcgaactaccatggtcctattga

SEQ ID NO: 30175 - DNA, 25 bp, Saccharomyces pastorianus
aactcttcgttcataccctgaggag

SEQ ID NO: 30176 - DNA, 25 bp, Saccharomyces pastorianus
catgatgtgggaattcttcttgcaa

SEQ ID NO: 30177 - DNA, 25 bp, Saccharomyces pastorianus
atgcgacgttttgaagctcgacgaa

SEQ ID NO: 30178 - DNA, 25 bp, Saccharomyces pastorianus
ttataaatccacacctaaccttgac

SEQ ID NO: 30179 - DNA, 25 bp, Saccharomyces pastorianus
gatgccttatctttagttgcgacag

SEQ ID NO: 30180 - DNA, 25 bp, Saccharomyces pastorianus
gagactcaaggaggttcaaaccgtt

SEQ ID NO: 30181 - DNA, 25 bp, Saccharomyces pastorianus
caatgcctttacagatgacaacagt

SEQ ID NO: 30182 - DNA, 25 bp, Saccharomyces pastorianus
ggtgaattataatctagagctctct

SEQ ID NO: 30183 - DNA, 25 bp, Saccharomyces pastorianus
catcagttgatagagatcccacatt

SEQ ID NO: 30184 - DNA, 25 bp, Saccharomyces pastorianus
tggtaccataacattcaacgagcta

SEQ ID NO: 30185 - DNA, 25 bp, Saccharomyces pastorianus
gctactctaacagacgagcaagttg

SEQ ID NO: 30186 - DNA, 25 bp, Saccharomyces pastorianus
gagctatccacaaagctttcgacta

SEQ ID NO: 30187 - DNA, 25 bp, Saccharomyces pastorianus
atcccacattctacttcattcattg

SEQ ID NO: 30188 - DNA, 25 bp, Saccharomyces pastorianus
agagctctctcaaccaagtgcgaag

SEQ ID NO: 30189 - DNA, 25 bp, Saccharomyces pastorianus
taacgtggtcgactcaaatgctgat

SEQ ID NO: 30190 - DNA, 25 bp, Saccharomyces pastorianus
aagcttaccaaactcgctagccgaa

SEQ ID NO: 30191 - DNA, 25 bp, Saccharomyces pastorianus
cgaaattagggttttatccatggat

SEQ ID NO: 30192 - DNA, 25 bp, Saccharomyces pastorianus
ttgtccacaatgaccatcgaaggtg

SEQ ID NO: 30193 - DNA, 25 bp, Saccharomyces pastorianus
gaatgcaccaactatcggaacctca

SEQ ID NO: 30194 - DNA, 25 bp, Saccharomyces pastorianus
gaggtcatccaaatagcgctggctt

SEQ ID NO: 30195 - DNA, 25 bp, Saccharomyces pastorianus
gagacatgctttacatttgcccgtt

SEQ ID NO: 30196 - DNA, 25 bp, Saccharomyces pastorianus
gaaggtgacgccagagcgatcgtaa

SEQ ID NO: 30197 - DNA, 25 bp, Saccharomyces pastorianus
ggtttcatactgtctctcaagcgga

SEQ ID NO: 30198 - DNA, 25 bp, Saccharomyces pastorianus
taagatcgatagacgcgggtttcat

SEQ ID NO: 30199 - DNA, 25 bp, Saccharomyces pastorianus
acggcggaaaaagtgtgctcgaaat

SEQ ID NO: 30200 - DNA, 25 bp, Saccharomyces pastorianus
gcgctggcttccaagttttatggta

SEQ ID NO: 30201 - DNA, 25 bp, Saccharomyces pastorianus
agcatagcaagcgaattgtccacaa

SEQ ID NO: 30202 - DNA, 25 bp, Saccharomyces pastorianus
aacttgaaattggaggccgagtcat

SEQ ID NO: 30203 - DNA, 25 bp, Saccharomyces pastorianus
tggaagctggcctctctgagacgaa

SEQ ID NO: 30204 - DNA, 25 bp, Saccharomyces pastorianus
ggccgagtctaagcaattgtccgag

SEQ ID NO: 30205 - DNA, 25 bp, Saccharomyces pastorianus
aaggacttcgagcaggaaaccgtcg

SEQ ID NO: 30206 - DNA, 25 bp, Saccharomyces pastorianus
gtcattggcggtgaagaactctcag

SEQ ID NO: 30207 - DNA, 25 bp, Saccharomyces pastorianus
aagagtcgccgctttagaagagcaa

SEQ ID NO: 30208 - DNA, 25 bp, Saccharomyces pastorianus
gacaccaagctgaaggagactaccg

SEQ ID NO: 30209 - DNA, 25 bp, Saccharomyces pastorianus
ggaactgaccgccaagtacgaagag

SEQ ID NO: 30210 - DNA, 25 bp, Saccharomyces pastorianus
agcagaccgagcaggacaacgtcga

SEQ ID NO: 30211 - DNA, 25 bp, Saccharomyces pastorianus
gaatccgacttgaaggcggaccaat

SEQ ID NO: 30212 - DNA, 25 bp, Saccharomyces pastorianus
agaaccagctcaagtctttgaccgt

SEQ ID NO: 30213 - DNA, 25 bp, Saccharomyces pastorianus
tgataactttaccaccgatttagga

SEQ ID NO: 30214 - DNA, 25 bp, Saccharomyces pastorianus
tacccgtctgtcacaatttgccaaa

SEQ ID NO: 30215 - DNA, 25 bp, Saccharomyces pastorianus
attgttacaacatcccgtgatccaa

SEQ ID NO: 30216 - DNA, 25 bp, Saccharomyces pastorianus
atgccaaaccttgtggacgcttgta

SEQ ID NO: 30217 - DNA, 25 bp, Saccharomyces pastorianus
gacgcttgtaagaagtccggtacca

SEQ ID NO: 30218 - DNA, 25 bp, Saccharomyces pastorianus
ctttgactatatcgcatttcccaca

SEQ ID NO: 30219 - DNA, 25 bp, Saccharomyces pastorianus
gaagttaacccacatctgatatttg

SEQ ID NO: 30220 - DNA, 25 bp, Saccharomyces pastorianus
gaggtgtcccaacatctttgactat

SEQ ID NO: 30221 - DNA, 25 bp, Saccharomyces pastorianus
acggacccactgcacaatttagttt

SEQ ID NO: 30222 - DNA, 25 bp, Saccharomyces pastorianus
tgcatgagcatagaggtgtcccaac

SEQ ID NO: 30223 - DNA, 25 bp, Saccharomyces pastorianus
aactcttgtttccaaatgccgttag

SEQ ID NO: 30224 - DNA, 25 bp, Saccharomyces pastorianus
cacaggtggctttggtctcggtata

SEQ ID NO: 30225 - DNA, 25 bp, Saccharomyces pastorianus
gaactcgatatcaacagccctaagg

SEQ ID NO: 30226 - DNA, 25 bp, Saccharomyces pastorianus
gaggatctagagcagctttcttcac

SEQ ID NO: 30227 - DNA, 25 bp, Saccharomyces pastorianus
atataccaccaacctacaattctat

SEQ ID NO: 30228 - DNA, 25 bp, Saccharomyces pastorianus
aatcgagactttatcaccggtcata

SEQ ID NO: 30229 - DNA, 25 bp, Saccharomyces pastorianus
gtcaaagacgaatacttctcctccg

SEQ ID NO: 30230 - DNA, 25 bp, Saccharomyces pastorianus
tagataggctttgcatgctcttctg

SEQ ID NO: 30231 - DNA, 25 bp, Saccharomyces pastorianus
tggccaagacagactcacgcaatga

SEQ ID NO: 30232 - DNA, 25 bp, Saccharomyces pastorianus
aaaagagtcgaagaggtcctgccct

SEQ ID NO: 30233 - DNA, 25 bp, Saccharomyces pastorianus
gaactcggtattgacttaatggccc

SEQ ID NO: 30234 - DNA, 25 bp, Saccharomyces pastorianus
ggtcgagtttctaccaacgctaaag

SEQ ID NO: 30235 - DNA, 25 bp, Saccharomyces pastorianus
agacatcaagttcacggtcgccaag

SEQ ID NO: 30236 - DNA, 25 bp, Saccharomyces pastorianus
gagacatacttgtcgaatccctcaa

SEQ ID NO: 30237 - DNA, 25 bp, Saccharomyces pastorianus
tcacgccgctagacatctcgagagg

SEQ ID NO: 30238 - DNA, 25 bp, Saccharomyces pastorianus
acgtgtacgtggacactgtcggacc

SEQ ID NO: 30239 - DNA, 25 bp, Saccharomyces pastorianus
gcgcacgacgtgacaatggctctga

SEQ ID NO: 30240 - DNA, 25 bp, Saccharomyces pastorianus
agagatcccgatgaggtcctgggct

SEQ ID NO: 30241 - DNA, 25 bp, Saccharomyces pastorianus
acatggtgaggttttcgtggcagac

SEQ ID NO: 30242 - DNA, 25 bp, Saccharomyces pastorianus
aagaccaggcagctgcagttgcaaa

SEQ ID NO: 30243 - DNA, 25 bp, Saccharomyces pastorianus
cagaccctcttggacgacgttagta

SEQ ID NO: 30244 - DNA, 25 bp, Saccharomyces pastorianus
gacccaaagaccgtagcctggctga

SEQ ID NO: 30245 - DNA, 25 bp, Saccharomyces pastorianus
cagtgtggccagtgtggtcgccaaa

SEQ ID NO: 30246 - DNA, 25 bp, Saccharomyces pastorianus
gcagaaaacgggttctcctttgaca

SEQ ID NO: 30247 - DNA, 25 bp, Saccharomyces pastorianus
gttaacatgttcacctcgatcatca

SEQ ID NO: 30248 - DNA, 25 bp, Saccharomyces pastorianus
tagaattaacaagctggccccagag

SEQ ID NO: 30249 - DNA, 25 bp, Saccharomyces pastorianus
gatcctggcaatcgctacggtcgaa

SEQ ID NO: 30250 - DNA, 25 bp, Saccharomyces pastorianus
tcgtccaagatatccgtctctaaac

SEQ ID NO: 30251 - DNA, 25 bp, Saccharomyces pastorianus
gaccatagaaccattgacggcgcta

SEQ ID NO: 30252 - DNA, 25 bp, Saccharomyces pastorianus
gacgctaatgcttactggttaccta

SEQ ID NO: 30253 - DNA, 25 bp, Saccharomyces pastorianus
acggcgctagaggtgctgagttcat

SEQ ID NO: 30254 - DNA, 25 bp, Saccharomyces pastorianus
gaggaattccaaggcggcaccatct

SEQ ID NO: 30255 - DNA, 25 bp, Saccharomyces pastorianus
aagaacgtcgatgtctctgtcgcag

SEQ ID NO: 30256 - DNA, 25 bp, Saccharomyces pastorianus
gacaatccttgaatgccacggcaaa

SEQ ID NO: 30257 - DNA, 25 bp, Saccharomyces pastorianus
ctttcattctaagcgatgaatccaa

SEQ ID NO: 30258 - DNA, 25 bp, Saccharomyces pastorianus
tatatttgggttgggctcacacacc

SEQ ID NO: 30259 - DNA, 25 bp, Saccharomyces pastorianus
tctaccatctttcattctaagcgat

SEQ ID NO: 30260 - DNA, 25 bp, Saccharomyces pastorianus
cacacccaacagaccaaacttcctt

SEQ ID NO: 30261 - DNA, 25 bp, Saccharomyces pastorianus
gattccatttgttttatatttgggt

SEQ ID NO: 30262 - DNA, 25 bp, Saccharomyces pastorianus
tttgggttgggctcacacacccaac

SEQ ID NO: 30263 - DNA, 25 bp, Saccharomyces pastorianus
attctaagcgatgaatccaaagaac

SEQ ID NO: 30264 - DNA, 25 bp, Saccharomyces pastorianus
gggttgggctcacacacccaacaga

SEQ ID NO: 30265 - DNA, 25 bp, Saccharomyces pastorianus
ttttatatttgggttgggctcacac

SEQ ID NO: 30266 - DNA, 25 bp, Saccharomyces pastorianus
accatctttcattctaagcgatgaa

SEQ ID NO: 30267 - DNA, 25 bp, Saccharomyces pastorianus
ttatatttgggttgggctcacacac

SEQ ID NO: 30268 - DNA, 25 bp, Saccharomyces pastorianus
tatatttgggttgggctcacacacc

SEQ ID NO: 30269 - DNA, 25 bp, Saccharomyces pastorianus
tctaccatctttcattctaagcgat

SEQ ID NO: 30270 - DNA, 25 bp, Saccharomyces pastorianus
cacacccaacagaccaaacttcctt

SEQ ID NO: 30271 - DNA, 25 bp, Saccharomyces pastorianus
tcattctaagcgatgaatccaaaga

SEQ ID NO: 30272 - DNA, 25 bp, Saccharomyces pastorianus
gattccatttgttttatatttgggt

SEQ ID NO: 30273 - DNA, 25 bp, Saccharomyces pastorianus
gtagcacattatggctggattccat

SEQ ID NO: 30274 - DNA, 25 bp, Saccharomyces pastorianus
gggttgggctcacacacccaacaga

SEQ ID NO: 30275 - DNA, 25 bp, Saccharomyces pastorianus
aattttctaccatctttcattctaa

SEQ ID NO: 30276 - DNA, 25 bp, Saccharomyces pastorianus
ttttatatttgggttgggctcacac

SEQ ID NO: 30277 - DNA, 25 bp, Saccharomyces pastorianus
accatctttcattctaagcgatgaa

SEQ ID NO: 30278 - DNA, 25 bp, Saccharomyces pastorianus
ttatatttgggttgggctcacacac

SEQ ID NO: 30279 - DNA, 25 bp, Saccharomyces pastorianus
tgtgaacaacacacccgctactaat

SEQ ID NO: 30280 - DNA, 25 bp, Saccharomyces pastorianus
caaacactcaggctccatattggat

SEQ ID NO: 30281 - DNA, 25 bp, Saccharomyces pastorianus
gaatctcttgcaatttagctctgtg

SEQ ID NO: 30282 - DNA, 25 bp, Saccharomyces pastorianus
aagggacttcccacaaatcaagata

SEQ ID NO: 30283 - DNA, 25 bp, Saccharomyces pastorianus
gcataaaaagttcccctggtgtttg

SEQ ID NO: 30284 - DNA, 25 bp, Saccharomyces pastorianus
gaggtgccgcgaatgccaaggaact

SEQ ID NO: 30285 - DNA, 25 bp, Saccharomyces pastorianus
atagacggcttactccatctacaaa

SEQ ID NO: 30286 - DNA, 25 bp, Saccharomyces pastorianus
aggagaacgctccttctgaaaagga

SEQ ID NO: 30287 - DNA, 25 bp, Saccharomyces pastorianus
aagatgttaactcttcgcctttgaa

SEQ ID NO: 30288 - DNA, 25 bp, Saccharomyces pastorianus
ttcccaaccttatgacacactacta

SEQ ID NO: 30289 - DNA, 25 bp, Saccharomyces pastorianus
cccctggtgtttggaatctcttgca

SEQ ID NO: 30290 - DNA, 25 bp, Saccharomyces pastorianus
cacattgatgttactttcaacagaa

SEQ ID NO: 30291 - DNA, 25 bp, Saccharomyces pastorianus
ttccagtcagagatggtgttgccat

SEQ ID NO: 30292 - DNA, 25 bp, Saccharomyces pastorianus
atggtgttgccatcgaattctccac

SEQ ID NO: 30293 - DNA, 25 bp, Saccharomyces pastorianus
gagttatcagagttaccggcccaag

SEQ ID NO: 30294 - DNA, 25 bp, Saccharomyces pastorianus
aaaacgccgccgatttgcaacaaat

SEQ ID NO: 30295 - DNA, 25 bp, Saccharomyces pastorianus
cgaaatcagaaacttcttgggtgac

SEQ ID NO: 30296 - DNA, 25 bp, Saccharomyces pastorianus
gaagatgtttcccaaaacgccgccg

SEQ ID NO: 30297 - DNA, 25 bp, Saccharomyces pastorianus
gaaggtgctaagttcatcgaaatca

SEQ ID NO: 30298 - DNA, 25 bp, Saccharomyces pastorianus
catcgaattctccaccaacgtcaaa

SEQ ID NO: 30299 - DNA, 25 bp, Saccharomyces pastorianus
tcaattgattaaggttgctgtccac

SEQ ID NO: 30300 - DNA, 25 bp, Saccharomyces pastorianus
aaggtgtcactgtcaacattaaatc

SEQ ID NO: 30301 - DNA, 25 bp, Saccharomyces pastorianus
agggtgaagcagaccaagctccaga

SEQ ID NO: 30302 - DNA, 25 bp, Saccharomyces pastorianus
acatgtttctggtgactggttgaaa

SEQ ID NO: 30303 - DNA, 25 bp, Saccharomyces pastorianus
caacaggacacgtgcttctagaggt

SEQ ID NO: 30304 - DNA, 25 bp, Saccharomyces pastorianus
gaaagtggccattgtcccaggtgaa

SEQ ID NO: 30305 - DNA, 25 bp, Saccharomyces pastorianus
agccactccaactattccaaagaag

SEQ ID NO: 30306 - DNA, 25 bp, Saccharomyces pastorianus
gttaagttcaccatcaagttcccag

SEQ ID NO: 30307 - DNA, 25 bp, Saccharomyces pastorianus
tctccgagagaccacacaagcattt

SEQ ID NO: 30308 - DNA, 25 bp, Saccharomyces pastorianus
ggaagttcatgttgagccaggtatg

SEQ ID NO: 30309 - DNA, 25 bp, Saccharomyces pastorianus
tgatgttgtcttcctagtctccgag

SEQ ID NO: 30310 - DNA, 25 bp, Saccharomyces pastorianus
tggccaaaaaatcgtcttcaagggt

SEQ ID NO: 30311 - DNA, 25 bp, Saccharomyces pastorianus
ccagttccaaaatacggcggttatg

SEQ ID NO: 30312 - DNA, 25 bp, Saccharomyces pastorianus
agggtacccaatgtcgctgaactat

SEQ ID NO: 30313 - DNA, 25 bp, Saccharomyces pastorianus
tactggacgttaggaactaccccat

SEQ ID NO: 30314 - DNA, 25 bp, Saccharomyces pastorianus
ccattaaatttgtcaccagtggtaa

SEQ ID NO: 30315 - DNA, 25 bp, Saccharomyces pastorianus
ggaaactactacaaggctggaccac

SEQ ID NO: 30316 - DNA, 25 bp, Saccharomyces pastorianus
gaactaccccattttagtgcattcc

SEQ ID NO: 30317 - DNA, 25 bp, Saccharomyces pastorianus
aagaaacgccgctggaggagtatca

SEQ ID NO: 30318 - DNA, 25 bp, Saccharomyces pastorianus
ggagtatcagagtttcttggaccta

SEQ ID NO: 30319 - DNA, 25 bp, Saccharomyces pastorianus
gacattattcctgggtttgctagaa

SEQ ID NO: 30320 - DNA, 25 bp, Saccharomyces pastorianus
gtttcatcaaggaccaactacattt

SEQ ID NO: 30321 - DNA, 25 bp, Saccharomyces pastorianus
aaggctggaccactgcaggcatata

SEQ ID NO: 30322 - DNA, 25 bp, Saccharomyces pastorianus
atcgttataccgatcagggtaccca

SEQ ID NO: 30323 - DNA, 25 bp, Saccharomyces pastorianus
gacatcactgtaagcgctttcaatc

SEQ ID NO: 30324 - DNA, 25 bp, Saccharomyces pastorianus
tggcgatgacaacaacggcagcgat

SEQ ID NO: 30325 - DNA, 25 bp, Saccharomyces pastorianus
cagcataagtgtttcgcaagtcgat

SEQ ID NO: 30326 - DNA, 25 bp, Saccharomyces pastorianus
ggatcctctgaagccaagcatgaca

SEQ ID NO: 30327 - DNA, 25 bp, Saccharomyces pastorianus
agtacgaggtgcctttcttcaacac

SEQ ID NO: 30328 - DNA, 25 bp, Saccharomyces pastorianus
acgcagaaatccacggctatccaaa

SEQ ID NO: 30329 - DNA, 25 bp, Saccharomyces pastorianus
gaacccctcgcatgtagacgagagt

SEQ ID NO: 30330 - DNA, 25 bp, Saccharomyces pastorianus
gagcatcaagcttctagaccctgga

SEQ ID NO: 30331 - DNA, 25 bp, Saccharomyces pastorianus
tcaatcccgggtttttcagcataag

SEQ ID NO: 30332 - DNA, 25 bp, Saccharomyces pastorianus
ggacatattcgccaagagctcgttt

SEQ ID NO: 30333 - DNA, 25 bp, Saccharomyces pastorianus
aactactcatcaagcacgactacga

SEQ ID NO: 30334 - DNA, 25 bp, Saccharomyces pastorianus
atcgctaagggtgttgctgctggtc

SEQ ID NO: 30335 - DNA, 25 bp, Saccharomyces pastorianus
ttatcacgcgtcacatccgtcagat

SEQ ID NO: 30336 - DNA, 25 bp, Saccharomyces pastorianus
agggtgactcaggtttcatcgctaa

SEQ ID NO: 30337 - DNA, 25 bp, Saccharomyces pastorianus
tactaaggctggtcgtttatcacgc

SEQ ID NO: 30338 - DNA, 25 bp, Saccharomyces pastorianus
gcatgccctttccaatgctgctgta

SEQ ID NO: 30339 - DNA, 25 bp, Saccharomyces pastorianus
gctgctggtctactattgtctgtgg

SEQ ID NO: 30340 - DNA, 25 bp, Saccharomyces pastorianus
gggcttttcgctgccatcagaatgg

SEQ ID NO: 30341 - DNA, 25 bp, Saccharomyces pastorianus
agacatcgtcaccaagttgactgaa

SEQ ID NO: 30342 - DNA, 25 bp, Saccharomyces pastorianus
gtgaagactccaagactatgaccaa

SEQ ID NO: 30343 - DNA, 25 bp, Saccharomyces pastorianus
aagcaagccgtgtggtacatctcct

SEQ ID NO: 30344 - DNA, 25 bp, Saccharomyces pastorianus
aattgccatgggttcagcttaccga

SEQ ID NO: 30345 - DNA, 25 bp, Saccharomyces pastorianus
ttacctgatcctatcaatgctaccg

SEQ ID NO: 30346 - DNA, 25 bp, Saccharomyces pastorianus
tatactctctacacgatatgcctga

SEQ ID NO: 30347 - DNA, 25 bp, Saccharomyces pastorianus
ctaccgcatccctctttgaaagata

SEQ ID NO: 30348 - DNA, 25 bp, Saccharomyces pastorianus
tgactaccgtgccagttcactgaat

SEQ ID NO: 30349 - DNA, 25 bp, Saccharomyces pastorianus
cagagccgcttcactacttaataaa

SEQ ID NO: 30350 - DNA, 25 bp, Saccharomyces pastorianus
agggatggtcccaagtgactaccgt

SEQ ID NO: 30351 - DNA, 25 bp, Saccharomyces pastorianus
agctgcctgttttgatagattcccc

SEQ ID NO: 30352 - DNA, 25 bp, Saccharomyces pastorianus
ggaccatctatcaatgaacccgcta

SEQ ID NO: 30353 - DNA, 25 bp, Saccharomyces pastorianus
acatctctggcgttcccgttggaaa

SEQ ID NO: 30354 - DNA, 25 bp, Saccharomyces pastorianus
gggacgctgttcctgaattactgaa

SEQ ID NO: 30355 - DNA, 25 bp, Saccharomyces pastorianus
gaacccgctaatctaactgcagaga

SEQ ID NO: 30356 - DNA, 25 bp, Saccharomyces pastorianus
ttcttattcgaaaacacgggcctag

SEQ ID NO: 30357 - DNA, 25 bp, Saccharomyces pastorianus
actggatttctcataaactggacga

SEQ ID NO: 30358 - DNA, 25 bp, Saccharomyces pastorianus
gattatgatatgtacctgcctttga

SEQ ID NO: 30359 - DNA, 25 bp, Saccharomyces pastorianus
agtattggtccacttgtacccgaat

SEQ ID NO: 30360 - DNA, 25 bp, Saccharomyces pastorianus
acacgggcctagatctttataacaa

SEQ ID NO: 30361 - DNA, 25 bp, Saccharomyces pastorianus
gaaactatcgctcttctataatgtt

SEQ ID NO: 30362 - DNA, 25 bp, Saccharomyces pastorianus
gagcatcattgttgaccgtcgaaat

SEQ ID NO: 30363 - DNA, 25 bp, Saccharomyces pastorianus
tatccaaattaacctcaccgacaat

SEQ ID NO: 30364 - DNA, 25 bp, Saccharomyces pastorianus
gtaaatatgattttccccgtggact

SEQ ID NO: 30365 - DNA, 25 bp, Saccharomyces pastorianus
gtatttgcctcaagcattgaccgat

SEQ ID NO: 30366 - DNA, 25 bp, Saccharomyces pastorianus
gacaatagccgatcacatttgcgat

SEQ ID NO: 30367 - DNA, 25 bp, Saccharomyces pastorianus
gtctcgtccatcatcgttgacaacg

SEQ ID NO: 30368 - DNA, 25 bp, Saccharomyces pastorianus
agacagagtaccctgacatcgacgt

SEQ ID NO: 30369 - DNA, 25 bp, Saccharomyces pastorianus
accactagagatatcggcggttctt

SEQ ID NO: 30370 - DNA, 25 bp, Saccharomyces pastorianus
ccggtgctaacttcggcagagacta

SEQ ID NO: 30371 - DNA, 25 bp, Saccharomyces pastorianus
agagactacgccgttttcgaaccag

SEQ ID NO: 30372 - DNA, 25 bp, Saccharomyces pastorianus
tccccggtgtggtagagtccttgaa

SEQ ID NO: 30373 - DNA, 25 bp, Saccharomyces pastorianus
gaaaggctgttaccgctgtgcataa

SEQ ID NO: 30374 - DNA, 25 bp, Saccharomyces pastorianus
agattcgcctttgatttcgccaaaa

SEQ ID NO: 30375 - DNA, 25 bp, Saccharomyces pastorianus
atcggtgccgccttaattggtggtg

SEQ ID NO: 30376 - DNA, 25 bp, Saccharomyces pastorianus
aaggccgttcacgaaactattgcag

SEQ ID NO: 30377 - DNA, 25 bp, Saccharomyces pastorianus
acgttggtctggacatcaagggcca

SEQ ID NO: 30378 - DNA, 25 bp, Saccharomyces pastorianus
gttcgctgtctcgtcgtggccatgg

SEQ ID NO: 30379 - DNA, 25 bp, Saccharomyces pastorianus
agatggacatcacccagaagctagt

SEQ ID NO: 30380 - DNA, 25 bp, Saccharomyces pastorianus
tggaacgcatggtgagactcgactt

SEQ ID NO: 30381 - DNA, 25 bp, Saccharomyces pastorianus
tgaagatcacctcgtgcacactgaa

SEQ ID NO: 30382 - DNA, 25 bp, Saccharomyces pastorianus
gtgcacactgaacttcatcgtcttg

SEQ ID NO: 30383 - DNA, 25 bp, Saccharomyces pastorianus
acaagctgaccaatgatgccgatat

SEQ ID NO: 30384 - DNA, 25 bp, Saccharomyces pastorianus
gagaattcgatggtgccgttccacg

SEQ ID NO: 30385 - DNA, 25 bp, Saccharomyces pastorianus
atcgtcttgctactcacggcgtggg

SEQ ID NO: 30386 - DNA, 25 bp, Saccharomyces pastorianus
ccagaagctagtgtatcccttcggg

SEQ ID NO: 30387 - DNA, 25 bp, Saccharomyces pastorianus
gggagtcggcaaggcttttacaaag

SEQ ID NO: 30388 - DNA, 25 bp, Saccharomyces pastorianus
gaagtacctacaagactacaagctg

SEQ ID NO: 30389 - DNA, 25 bp, Saccharomyces pastorianus
aatcgtcactgaccacaacaggcgt

SEQ ID NO: 30390 - DNA, 25 bp, Saccharomyces pastorianus
aggagccgtttgtcaacataccgtc

SEQ ID NO: 30391 - DNA, 25 bp, Saccharomyces pastorianus
gagtataggcgttttgcgttcccga

SEQ ID NO: 30392 - DNA, 25 bp, Saccharomyces pastorianus
ggagatatatcgcagcagtttcccc

SEQ ID NO: 30393 - DNA, 25 bp, Saccharomyces pastorianus
agttgacatccatcttggtgctcat

SEQ ID NO: 30394 - DNA, 25 bp, Saccharomyces pastorianus
gaaatcgtgcttgatccggcaaacc

SEQ ID NO: 30395 - DNA, 25 bp, Saccharomyces pastorianus
cataccgtccgacttgttaaccaag

SEQ ID NO: 30396 - DNA, 25 bp, Saccharomyces pastorianus
gcccgaaaacttcagccatgtcgtg

SEQ ID NO: 30397 - DNA, 25 bp, Saccharomyces pastorianus
gttcccgaaggccagagcgcttgac

SEQ ID NO: 30398 - DNA, 25 bp, Saccharomyces pastorianus
gactttacaggccatgaacacgttg

SEQ ID NO: 30399 - DNA, 25 bp, Saccharomyces pastorianus
agcgcttgaccagcagttcattgag

SEQ ID NO: 30400 - DNA, 25 bp, Saccharomyces pastorianus
tgaagacactaacttggctgccatc

SEQ ID NO: 30401 - DNA, 25 bp, Saccharomyces pastorianus
gaagacactaacttggctgccatcc

SEQ ID NO: 30402 - DNA, 25 bp, Saccharomyces pastorianus
aagacactaacttggctgccatcca

SEQ ID NO: 30403 - DNA, 25 bp, Saccharomyces pastorianus
ctgatttgagattccaatcttctgc

SEQ ID NO: 30404 - DNA, 25 bp, Saccharomyces pastorianus
aggtaccgtcgccttgagagaaatc

SEQ ID NO: 30405 - DNA, 25 bp, Saccharomyces pastorianus
gatttcaagactgatttgagattcc

SEQ ID NO: 30406 - DNA, 25 bp, Saccharomyces pastorianus
gtaccgtcgccttgagagaaatcag

SEQ ID NO: 30407 - DNA, 25 bp, Saccharomyces pastorianus
agactgatttgagattccaatcttc

SEQ ID NO: 30408 - DNA, 25 bp, Saccharomyces pastorianus
taccgtcgccttgagagaaatcaga

SEQ ID NO: 30409 - DNA, 25 bp, Saccharomyces pastorianus
tcaagactgatttgagattccaatc

SEQ ID NO: 30410 - DNA, 25 bp, Saccharomyces pastorianus
ggtaccgtcgccttgagagaaatca

SEQ ID NO: 30411 - DNA, 25 bp, Saccharomyces pastorianus
atctccggtttaatctacgaagaag

SEQ ID NO: 30412 - DNA, 25 bp, Saccharomyces pastorianus
tggtgtcaagcgtatctccggttta

SEQ ID NO: 30413 - DNA, 25 bp, Saccharomyces pastorianus
agcgtatctccggtttaatctacga

SEQ ID NO: 30414 - DNA, 25 bp, Saccharomyces pastorianus
tcaagcgtatctccggtttaatcta

SEQ ID NO: 30415 - DNA, 25 bp, Saccharomyces pastorianus
gtgtcaagcgtatctccggtttaat

SEQ ID NO: 30416 - DNA, 25 bp, Saccharomyces pastorianus
gcgtatctccggtttaatctacgaa

SEQ ID NO: 30417 - DNA, 25 bp, Saccharomyces pastorianus
gtcaagcgtatctccggtttaatct

SEQ ID NO: 30418 - DNA, 25 bp, Saccharomyces pastorianus
tgtcaagcgtatctccggtttaatc

SEQ ID NO: 30419 - DNA, 25 bp, Saccharomyces pastorianus
tctccggtttaatctacgaagaagt

SEQ ID NO: 30420 - DNA, 25 bp, Saccharomyces pastorianus
gtatctccggtttaatctacgaaga

SEQ ID NO: 30421 - DNA, 25 bp, Saccharomyces pastorianus
ggtgtcaagcgtatctccggtttaa

SEQ ID NO: 30422 - DNA, 25 bp, Saccharomyces pastorianus
gacgtgcattacttcagggacatcg

SEQ ID NO: 30423 - DNA, 25 bp, Saccharomyces pastorianus
accttagacttggacgacgtgcatt

SEQ ID NO: 30424 - DNA, 25 bp, Saccharomyces pastorianus
gtgccccatgaacaaactcgatatt

SEQ ID NO: 30425 - DNA, 25 bp, Saccharomyces pastorianus
cagacattcttccatacagcattgc

SEQ ID NO: 30426 - DNA, 25 bp, Saccharomyces pastorianus
gatattgaggactccactgggttct

SEQ ID NO: 30427 - DNA, 25 bp, Saccharomyces pastorianus
cgatccgaggttccagcgcaagaag

SEQ ID NO: 30428 - DNA, 25 bp, Saccharomyces pastorianus
cactgggttctgtctcaatgtttgg

SEQ ID NO: 30429 - DNA, 25 bp, Saccharomyces pastorianus
gaatttagtcaacagggctcgctcc

SEQ ID NO: 30430 - DNA, 25 bp, Saccharomyces pastorianus
aggagtttccctacgtgacgagcga

SEQ ID NO: 30431 - DNA, 25 bp, Saccharomyces pastorianus
gcggttgcagatgtaagtgccccat

SEQ ID NO: 30432 - DNA, 25 bp, Saccharomyces pastorianus
acaacctgtgtcatttctggagtaa

SEQ ID NO: 30433 - DNA, 25 bp, Saccharomyces pastorianus
gaagatgtattactcccctgtacga

SEQ ID NO: 30434 - DNA, 25 bp, Saccharomyces pastorianus
ttaccaacccatcacgcagaagtta

SEQ ID NO: 30435 - DNA, 25 bp, Saccharomyces pastorianus
ggaaagaagttcacaagaccgtata

SEQ ID NO: 30436 - DNA, 25 bp, Saccharomyces pastorianus
gtgatgccctcggtaggcatttcaa

SEQ ID NO: 30437 - DNA, 25 bp, Saccharomyces pastorianus
taacaatttcggtgtgcttctaaac

SEQ ID NO: 30438 - DNA, 25 bp, Saccharomyces pastorianus
agatgacttggaccagtttgaacca

SEQ ID NO: 30439 - DNA, 25 bp, Saccharomyces pastorianus
cgataatagtgcattctcttcgaag

SEQ ID NO: 30440 - DNA, 25 bp, Saccharomyces pastorianus
aattttgcttgtgacgtttgtggaa

SEQ ID NO: 30441 - DNA, 25 bp, Saccharomyces pastorianus
cagcgctaccatcagtgttcataat

SEQ ID NO: 30442 - DNA, 25 bp, Saccharomyces pastorianus
tattactcccctgtacgaggaagct

SEQ ID NO: 30443 - DNA, 25 bp, Saccharomyces pastorianus
acgaaaggccattcatatgttctat

SEQ ID NO: 30444 - DNA, 25 bp, Saccharomyces pastorianus
ttgccgcccacgaaaacgatttaat

SEQ ID NO: 30445 - DNA, 25 bp, Saccharomyces pastorianus
acctctacaggtatcggacttgtgc

SEQ ID NO: 30446 - DNA, 25 bp, Saccharomyces pastorianus
ggacttgtgctaaggcatcccatgg

SEQ ID NO: 30447 - DNA, 25 bp, Saccharomyces pastorianus
actaaacttcagcttacctattgcc

SEQ ID NO: 30448 - DNA, 25 bp, Saccharomyces pastorianus
atttcattactttctctaccacttt

SEQ ID NO: 30449 - DNA, 25 bp, Saccharomyces pastorianus
ggcatcccatggctagatttgaact

SEQ ID NO: 30450 - DNA, 25 bp, Saccharomyces pastorianus
taaggaacattctacctctacaggt

SEQ ID NO: 30451 - DNA, 25 bp, Saccharomyces pastorianus
ataggtggcgatgcttttgtttcat

SEQ ID NO: 30452 - DNA, 25 bp, Saccharomyces pastorianus
gcatcggtcagctttctaaggaaca

SEQ ID NO: 30453 - DNA, 25 bp, Saccharomyces pastorianus
ggaatcattttatgtgtcctacaaa

SEQ ID NO: 30454 - DNA, 25 bp, Saccharomyces pastorianus
atgtctctaagcaactgcatcggtc

SEQ ID NO: 30455 - DNA, 25 bp, Saccharomyces pastorianus
atcattagcgtctatggcttccgaa

SEQ ID NO: 30456 - DNA, 25 bp, Saccharomyces pastorianus
aaactgctggtctttgatcaacgat

SEQ ID NO: 30457 - DNA, 25 bp, Saccharomyces pastorianus
gaagcaaatcgtccaggtcttgaaa

SEQ ID NO: 30458 - DNA, 25 bp, Saccharomyces pastorianus
accgttttatggctgaatctctcgt

SEQ ID NO: 30459 - DNA, 25 bp, Saccharomyces pastorianus
tgtccatcatccttatcaatccttg

SEQ ID NO: 30460 - DNA, 25 bp, Saccharomyces pastorianus
gtggcatgtctgttcattaccattt

SEQ ID NO: 30461 - DNA, 25 bp, Saccharomyces pastorianus
agaggttctgaatcttctggttcgc

SEQ ID NO: 30462 - DNA, 25 bp, Saccharomyces pastorianus
gttcgcctgctcaattagctttcaa

SEQ ID NO: 30463 - DNA, 25 bp, Saccharomyces pastorianus
tgtacccacctcatattattgctgt

SEQ ID NO: 30464 - DNA, 25 bp, Saccharomyces pastorianus
gcttccgaagccatcagaggttctg

SEQ ID NO: 30465 - DNA, 25 bp, Saccharomyces pastorianus
aatgatgttcatttactgtacccac

SEQ ID NO: 30466 - DNA, 25 bp, Saccharomyces pastorianus
tgaaggttttggtgctttctggaaa

SEQ ID NO: 30467 - DNA, 25 bp, Saccharomyces pastorianus
cgttctcttttgcaagtgatattac

SEQ ID NO: 30468 - DNA, 25 bp, Saccharomyces pastorianus
attactactaatttgctcatgcact

SEQ ID NO: 30469 - DNA, 25 bp, Saccharomyces pastorianus
ggccatctctgttagatcgctacaa

SEQ ID NO: 30470 - DNA, 25 bp, Saccharomyces pastorianus
tgtttaattttcgttctcttttgca

SEQ ID NO: 30471 - DNA, 25 bp, Saccharomyces pastorianus
cagtccgtatgtaagtttggcatgt

SEQ ID NO: 30472 - DNA, 25 bp, Saccharomyces pastorianus
tgcacttatgttcatggacagtggc

SEQ ID NO: 30473 - DNA, 25 bp, Saccharomyces pastorianus
gatcgctacaaaaaccatgaaggtt

SEQ ID NO: 30474 - DNA, 25 bp, Saccharomyces pastorianus
aatttgctcatgcacttatgttcat

SEQ ID NO: 30475 - DNA, 25 bp, Saccharomyces pastorianus
ggacagtggccatctctgttagatc

SEQ ID NO: 30476 - DNA, 25 bp, Saccharomyces pastorianus
tgagagggccagtccgtatgtaagt

SEQ ID NO: 30477 - DNA, 25 bp, Saccharomyces pastorianus
acggtaatcaattttctgggagaca

SEQ ID NO: 30478 - DNA, 25 bp, Saccharomyces pastorianus
tattgtacatctcctgggccacaga

SEQ ID NO: 30479 - DNA, 25 bp, Saccharomyces pastorianus
ccgctggttcctttggtcgatgaaa

SEQ ID NO: 30480 - DNA, 25 bp, Saccharomyces pastorianus
gtactttgctagttgtcgttcatga

SEQ ID NO: 30481 - DNA, 25 bp, Saccharomyces pastorianus
gatacttccgatgtttgggccaaga

SEQ ID NO: 30482 - DNA, 25 bp, Saccharomyces pastorianus
agaggcaacggatttcatactagat

SEQ ID NO: 30483 - DNA, 25 bp, Saccharomyces pastorianus
atctggtacaattgacctgtcctcg

SEQ ID NO: 30484 - DNA, 25 bp, Saccharomyces pastorianus
atcaagtactttccagccattgcta

SEQ ID NO: 30485 - DNA, 25 bp, Saccharomyces pastorianus
tacggacggactaagcaatactgtt

SEQ ID NO: 30486 - DNA, 25 bp, Saccharomyces pastorianus
atacccctaactttgttcgaagctg

SEQ ID NO: 30487 - DNA, 25 bp, Saccharomyces pastorianus
tgtcctcgtcagttgtcatcgataa

SEQ ID NO: 30488 - DNA, 25 bp, Saccharomyces pastorianus
agcgtatgatcaacctgctcagttc

SEQ ID NO: 30489 - DNA, 25 bp, Saccharomyces pastorianus
atagcatctcttacctcatcaagta

SEQ ID NO: 30490 - DNA, 25 bp, Saccharomyces pastorianus
gagggtccaggcaagctaatagcat

SEQ ID NO: 30491 - DNA, 25 bp, Saccharomyces pastorianus
aaagatagtcttccgagtgattcaa

SEQ ID NO: 30492 - DNA, 25 bp, Saccharomyces pastorianus
ggcattcgttggtatcgttgacagt

SEQ ID NO: 30493 - DNA, 25 bp, Saccharomyces pastorianus
agacgatgattcttcgtcctcttca

SEQ ID NO: 30494 - DNA, 25 bp, Saccharomyces pastorianus
aagcggtcccataaacgtatccctg

SEQ ID NO: 30495 - DNA, 25 bp, Saccharomyces pastorianus
ttattccacccacgaaaacgctaag

SEQ ID NO: 30496 - DNA, 25 bp, Saccharomyces pastorianus
gcatcgatatcaagagccccagttt

SEQ ID NO: 30497 - DNA, 25 bp, Saccharomyces pastorianus
aagtctacctgaatcggcattcgtt

SEQ ID NO: 30498 - DNA, 25 bp, Saccharomyces pastorianus
aagtactccaggaagtagctccgct

SEQ ID NO: 30499 - DNA, 25 bp, Saccharomyces pastorianus
gacaaacaactttatcgttactcta

SEQ ID NO: 30500 - DNA, 25 bp, Saccharomyces pastorianus
agggtacaccatcaagcttccagat

SEQ ID NO: 30501 - DNA, 25 bp, Saccharomyces pastorianus
ggcggttctatcgaacacgagttcg

SEQ ID NO: 30502 - DNA, 25 bp, Saccharomyces pastorianus
gaagaacaccccagacgtggaaact

SEQ ID NO: 30503 - DNA, 25 bp, Saccharomyces pastorianus
gaacacgagttcgatattatcaaag

SEQ ID NO: 30504 - DNA, 25 bp, Saccharomyces pastorianus
aagttcttggattccgttcatcgtg

SEQ ID NO: 30505 - DNA, 25 bp, Saccharomyces pastorianus
aagcttccagatgttctcaaattga

SEQ ID NO: 30506 - DNA, 25 bp, Saccharomyces pastorianus
tcgatattatcaaagggtacaccat

SEQ ID NO: 30507 - DNA, 25 bp, Saccharomyces pastorianus
gattccgttcatcgtgtaggcggtt

SEQ ID NO: 30508 - DNA, 25 bp, Saccharomyces pastorianus
atcgtgtaggcggttctatcgaaca

SEQ ID NO: 30509 - DNA, 25 bp, Saccharomyces pastorianus
gaacagcatagcgatgtcatccaga

SEQ ID NO: 30510 - DNA, 25 bp, Saccharomyces pastorianus
atgccaccaaattgcttcttctgat

SEQ ID NO: 30511 - DNA, 25 bp, Saccharomyces pastorianus
tacctgccccggtaaacagaattct

SEQ ID NO: 30512 - DNA, 25 bp, Saccharomyces pastorianus
aggtatccggtctagatggttcaca

SEQ ID NO: 30513 - DNA, 25 bp, Saccharomyces pastorianus
aaatcccagagctatttctaaagtg

SEQ ID NO: 30514 - DNA, 25 bp, Saccharomyces pastorianus
ctactgccaatcctcattcttggta

SEQ ID NO: 30515 - DNA, 25 bp, Saccharomyces pastorianus
aagaactcgcagttacatttcgata

SEQ ID NO: 30516 - DNA, 25 bp, Saccharomyces pastorianus
tcttggtaatcttgccgaggtaatc

SEQ ID NO: 30517 - DNA, 25 bp, Saccharomyces pastorianus
tacgaactttgagtggcaagacttt

SEQ ID NO: 30518 - DNA, 25 bp, Saccharomyces pastorianus
aatgacaagtctactgccaatcctc

SEQ ID NO: 30519 - DNA, 25 bp, Saccharomyces pastorianus
catcgattccatgaccagagcaata

SEQ ID NO: 30520 - DNA, 25 bp, Saccharomyces pastorianus
gaagagtatgccaacccaatctata

SEQ ID NO: 30521 - DNA, 25 bp, Saccharomyces pastorianus
gacaaaacgttccattccacgaatt

SEQ ID NO: 30522 - DNA, 25 bp, Saccharomyces pastorianus
aatgtgacctgctattcgctaagag

SEQ ID NO: 30523 - DNA, 25 bp, Saccharomyces pastorianus
atgagagtccttttggccacgacaa

SEQ ID NO: 30524 - DNA, 25 bp, Saccharomyces pastorianus
gacggtaccaaatcctttagacaag

SEQ ID NO: 30525 - DNA, 25 bp, Saccharomyces pastorianus
gaaattcgaatctgctttgaagcca

SEQ ID NO: 30526 - DNA, 25 bp, Saccharomyces pastorianus
gtcgttgttgtttccagtggcatga

SEQ ID NO: 30527 - DNA, 25 bp, Saccharomyces pastorianus
gaagacatcttagccagcatgaagc

SEQ ID NO: 30528 - DNA, 25 bp, Saccharomyces pastorianus
aagacctggtcacttactgtaaaag

SEQ ID NO: 30529 - DNA, 25 bp, Saccharomyces pastorianus
ggcatgaagcccatcatcaaggttt

SEQ ID NO: 30530 - DNA, 25 bp, Saccharomyces pastorianus
acggtgtttccgacttaagtgctgc

SEQ ID NO: 30531 - DNA, 25 bp, Saccharomyces pastorianus
aagaaaatgatgtccctgtcgttgt

SEQ ID NO: 30532 - DNA, 25 bp, Saccharomyces pastorianus
gactgacagatcatcgtacgtaact

SEQ ID NO: 30533 - DNA, 25 bp, Saccharomyces pastorianus
gatgtccagtccgatattgtagccc

SEQ ID NO: 30534 - DNA, 25 bp, Saccharomyces pastorianus
attactccggatggccaaacatttg

SEQ ID NO: 30535 - DNA, 25 bp, Saccharomyces pastorianus
aaagacctggctttgatgctaggaa

SEQ ID NO: 30536 - DNA, 25 bp, Saccharomyces pastorianus
caaacatttgaaagtgaggctgccc

SEQ ID NO: 30537 - DNA, 25 bp, Saccharomyces pastorianus
tcaattttaattactccggatggcc

SEQ ID NO: 30538 - DNA, 25 bp, Saccharomyces pastorianus
aagacgtcgacaaattcaattgcat

SEQ ID NO: 30539 - DNA, 25 bp, Saccharomyces pastorianus
gtacggtgacaagacatttcagaca

SEQ ID NO: 30540 - DNA, 25 bp, Saccharomyces pastorianus
tattgtagcccagggatttggctcc

SEQ ID NO: 30541 - DNA, 25 bp, Saccharomyces pastorianus
atttggctcccttggtttaatgaca

SEQ ID NO: 30542 - DNA, 25 bp, Saccharomyces pastorianus
acagatgttaaagtccaagggcggg

SEQ ID NO: 30543 - DNA, 25 bp, Saccharomyces pastorianus
agctctccctcatatccggaagaag

SEQ ID NO: 30544 - DNA, 25 bp, Saccharomyces pastorianus
aggcatgcccggtggtttcagatca

SEQ ID NO: 30545 - DNA, 25 bp, Saccharomyces pastorianus
ttctacgtaccctggccaaggtatg

SEQ ID NO: 30546 - DNA, 25 bp, Saccharomyces pastorianus
agtccaagtcaatctgccagttagt

SEQ ID NO: 30547 - DNA, 25 bp, Saccharomyces pastorianus
gatattcaattaaaacccggctgga

SEQ ID NO: 30548 - DNA, 25 bp, Saccharomyces pastorianus
gaaagggtccacacggagcatccga

SEQ ID NO: 30549 - DNA, 25 bp, Saccharomyces pastorianus
gtagaaccttaccattgtcaagagt

SEQ ID NO: 30550 - DNA, 25 bp, Saccharomyces pastorianus
gtggactacccaatatcgttaaatg

SEQ ID NO: 30551 - DNA, 25 bp, Saccharomyces pastorianus
ttgtcaagagtgcaacccgttcaac

SEQ ID NO: 30552 - DNA, 25 bp, Saccharomyces pastorianus
gacttgatttacactttgccactat

SEQ ID NO: 30553 - DNA, 25 bp, Saccharomyces pastorianus
ggtttcagatcagcatcgagctctc

SEQ ID NO: 30554 - DNA, 25 bp, Saccharomyces pastorianus
aagtgatgggtctatgctggccgca

SEQ ID NO: 30555 - DNA, 25 bp, Saccharomyces pastorianus
atgctctgcggatcatacggctcgt

SEQ ID NO: 30556 - DNA, 25 bp, Saccharomyces pastorianus
acacctctctacagtctttatcaat

SEQ ID NO: 30557 - DNA, 25 bp, Saccharomyces pastorianus
acttagtaactgcatcatctgatca

SEQ ID NO: 30558 - DNA, 25 bp, Saccharomyces pastorianus
gagcacattctacttatataaccag

SEQ ID NO: 30559 - DNA, 25 bp, Saccharomyces pastorianus
aaaggcaattgctacgtgtgggaaa

SEQ ID NO: 30560 - DNA, 25 bp, Saccharomyces pastorianus
tgggattgtgcatttagcgctgaca

SEQ ID NO: 30561 - DNA, 25 bp, Saccharomyces pastorianus
tacggctcgtgtgtggtctattgaa

SEQ ID NO: 30562 - DNA, 25 bp, Saccharomyces pastorianus
agcgctgacagtgcgtacttagtaa

SEQ ID NO: 30563 - DNA, 25 bp, Saccharomyces pastorianus
gggaaatgcctaatcataccgatgc

SEQ ID NO: 30564 - DNA, 25 bp, Saccharomyces pastorianus
aaacatttggcgacatgctctgcgg

SEQ ID NO: 30565 - DNA, 25 bp, Saccharomyces pastorianus
aaaggacatcggcttggcaacatca

SEQ ID NO: 30566 - DNA, 25 bp, Saccharomyces pastorianus
atttgaagcctgtctttccagaaac

SEQ ID NO: 30567 - DNA, 25 bp, Saccharomyces pastorianus
aactcgcgtaagagcttccctgaag

SEQ ID NO: 30568 - DNA, 25 bp, Saccharomyces pastorianus
gtgtagcgaccttttgaactcatct

SEQ ID NO: 30569 - DNA, 25 bp, Saccharomyces pastorianus
gaactcatctacttctttcaataat

SEQ ID NO: 30570 - DNA, 25 bp, Saccharomyces pastorianus
ttccctgaagaatgggttctccgtt

SEQ ID NO: 30571 - DNA, 25 bp, Saccharomyces pastorianus
gagaaaatcccaagcctacaaacca

SEQ ID NO: 30572 - DNA, 25 bp, Saccharomyces pastorianus
ttaatcgggtacatttctgaacaag

SEQ ID NO: 30573 - DNA, 25 bp, Saccharomyces pastorianus
gtttctaggcgttttgactatatca

SEQ ID NO: 30574 - DNA, 25 bp, Saccharomyces pastorianus
ggcaacatcatatttaactcgcgta

SEQ ID NO: 30575 - DNA, 25 bp, Saccharomyces pastorianus
gaatgccaccaaagctcttttcaaa

SEQ ID NO: 30576 - DNA, 25 bp, Saccharomyces pastorianus
cgtgtccttctatgaccctaaagat

SEQ ID NO: 30577 - DNA, 25 bp, Saccharomyces pastorianus
atgacctttttgagaccattggaaa

SEQ ID NO: 30578 - DNA, 25 bp, Saccharomyces pastorianus
gagtgatctttatgacctttttgag

SEQ ID NO: 30579 - DNA, 25 bp, Saccharomyces pastorianus
aacttacctacttccatcaattggc

SEQ ID NO: 30580 - DNA, 25 bp, Saccharomyces pastorianus
gaaatgttgcacacgccgatgtaga

SEQ ID NO: 30581 - DNA, 25 bp, Saccharomyces pastorianus
tcccaatggaagattctccggtaaa

SEQ ID NO: 30582 - DNA, 25 bp, Saccharomyces pastorianus
tacaggatctggtaccgtgtccttc

SEQ ID NO: 30583 - DNA, 25 bp, Saccharomyces pastorianus
ggtacgactcgaaaggagcgccaac

SEQ ID NO: 30584 - DNA, 25 bp, Saccharomyces pastorianus
gagcgccaaccggaatatctgtagt

SEQ ID NO: 30585 - DNA, 25 bp, Saccharomyces pastorianus
actgcagtaatttgccattttctac

SEQ ID NO: 30586 - DNA, 25 bp, Saccharomyces pastorianus
tgaaaaggcctctacaggatctggt

SEQ ID NO: 30587 - DNA, 25 bp, Saccharomyces pastorianus
gaatggtttggctggcccactgcat

SEQ ID NO: 30588 - DNA, 25 bp, Saccharomyces pastorianus
gaagcctcattctataccgtattgt

SEQ ID NO: 30589 - DNA, 25 bp, Saccharomyces pastorianus
aatgtagattcccattccggtgttc

SEQ ID NO: 30590 - DNA, 25 bp, Saccharomyces pastorianus
tttagtgggttctgcattgtcttct

SEQ ID NO: 30591 - DNA, 25 bp, Saccharomyces pastorianus
ggttatggtcatgccgtcttaagaa

SEQ ID NO: 30592 - DNA, 25 bp, Saccharomyces pastorianus
gaactattcaagttggtgtccacca

SEQ ID NO: 30593 - DNA, 25 bp, Saccharomyces pastorianus
gagccattggtgtattgcctcaact

SEQ ID NO: 30594 - DNA, 25 bp, Saccharomyces pastorianus
catatctatctttagccgctggttt

SEQ ID NO: 30595 - DNA, 25 bp, Saccharomyces pastorianus
actgcatggtcgtgccaaccaagaa

SEQ ID NO: 30596 - DNA, 25 bp, Saccharomyces pastorianus
tactatgggttgactgaagcctcat

SEQ ID NO: 30597 - DNA, 25 bp, Saccharomyces pastorianus
gtagcgccaggtgttttaactaagc

SEQ ID NO: 30598 - DNA, 25 bp, Saccharomyces pastorianus
atgggcactattcacttttggtctc

SEQ ID NO: 30599 - DNA, 25 bp, Saccharomyces pastorianus
ggttcggtattctggacgcctacaa

SEQ ID NO: 30600 - DNA, 25 bp, Saccharomyces pastorianus
ggtccataagttcgctaatcctgct

SEQ ID NO: 30601 - DNA, 25 bp, Saccharomyces pastorianus
ttgttctttctcttagctgtcacgt

SEQ ID NO: 30602 - DNA, 25 bp, Saccharomyces pastorianus
acggtggcctggtgcaactgattgc

SEQ ID NO: 30603 - DNA, 25 bp, Saccharomyces pastorianus
aatgcttacgcaggtatcgccaata

SEQ ID NO: 30604 - DNA, 25 bp, Saccharomyces pastorianus
gctgtcacgttcttactattgtcaa

SEQ ID NO: 30605 - DNA, 25 bp, Saccharomyces pastorianus
gtactttctctgtgcaacgctaggg

SEQ ID NO: 30606 - DNA, 25 bp, Saccharomyces pastorianus
aatacttttggtggaactgccctgt

SEQ ID NO: 30607 - DNA, 25 bp, Saccharomyces pastorianus
taaggagtctgacctcgggaacgcc

SEQ ID NO: 30608 - DNA, 25 bp, Saccharomyces pastorianus
aacgtcgtcgtagggtgtgccatgt

SEQ ID NO: 30609 - DNA, 25 bp, Saccharomyces pastorianus
aagagcgtcaaatttcccacaagaa

SEQ ID NO: 30610 - DNA, 25 bp, Saccharomyces pastorianus
gtaaagaactattccaccacccagg

SEQ ID NO: 30611 - DNA, 25 bp, Saccharomyces pastorianus
gtttattacagcagcccaagtggcc

SEQ ID NO: 30612 - DNA, 25 bp, Saccharomyces pastorianus
tgtacagtttgcaaccgtcggtgga

SEQ ID NO: 30613 - DNA, 25 bp, Saccharomyces pastorianus
ttgaccccgtcaaatatcagatccc

SEQ ID NO: 30614 - DNA, 25 bp, Saccharomyces pastorianus
gcacgactgttacaaggtgacccta

SEQ ID NO: 30615 - DNA, 25 bp, Saccharomyces pastorianus
ccagcacgtggttctcaaatgttta

SEQ ID NO: 30616 - DNA, 25 bp, Saccharomyces pastorianus
gatccctctgcgaagttctggtgta

SEQ ID NO: 30617 - DNA, 25 bp, Saccharomyces pastorianus
gtggccaacgtggagttgaccccgt

SEQ ID NO: 30618 - DNA, 25 bp, Saccharomyces pastorianus
caccacccaggagatcttggagttt

SEQ ID NO: 30619 - DNA, 25 bp, Saccharomyces pastorianus
agaacttcgaaaatgggcccaacag

SEQ ID NO: 30620 - DNA, 25 bp, Saccharomyces pastorianus
taaccgacttgaatagaatcccgaa

SEQ ID NO: 30621 - DNA, 25 bp, Saccharomyces pastorianus
gaatcccgaaggagtactctccact

SEQ ID NO: 30622 - DNA, 25 bp, Saccharomyces pastorianus
aaaggtgtcgatcctgaaattacaa

SEQ ID NO: 30623 - DNA, 25 bp, Saccharomyces pastorianus
caaagcccttgaaatttgtcgttct

SEQ ID NO: 30624 - DNA, 25 bp, Saccharomyces pastorianus
gtggctccactttagaaagtttact

SEQ ID NO: 30625 - DNA, 25 bp, Saccharomyces pastorianus
gggcagactggagttcgatgaatat

SEQ ID NO: 30626 - DNA, 25 bp, Saccharomyces pastorianus
ttgaggacctgaatgtgggcagact

SEQ ID NO: 30627 - DNA, 25 bp, Saccharomyces pastorianus
gctgatttatacagtggctccactt

SEQ ID NO: 30628 - DNA, 25 bp, Saccharomyces pastorianus
ggtaaacctataactaatccactag

SEQ ID NO: 30629 - DNA, 25 bp, Saccharomyces pastorianus
ccccaccggctgataacattattaa

SEQ ID NO: 30630 - DNA, 25 bp, Saccharomyces pastorianus
gagaatttgaaatccaaagcccttg

SEQ ID NO: 30631 - DNA, 25 bp, Saccharomyces pastorianus
tattcagcaaccatcctaccagtat

SEQ ID NO: 30632 - DNA, 25 bp, Saccharomyces pastorianus
aaagtcgtcgaaccagagctggcca

SEQ ID NO: 30633 - DNA, 25 bp, Saccharomyces pastorianus
gaaagcttccacacaagagtcacat

SEQ ID NO: 30634 - DNA, 25 bp, Saccharomyces pastorianus
aattgctacaagctcctctgagact

SEQ ID NO: 30635 - DNA, 25 bp, Saccharomyces pastorianus
gtggacccaccttcaactactaatt

SEQ ID NO: 30636 - DNA, 25 bp, Saccharomyces pastorianus
attacacgctatgatttcccgactg

SEQ ID NO: 30637 - DNA, 25 bp, Saccharomyces pastorianus
ttatcacaacaatacactcttccac

SEQ ID NO: 30638 - DNA, 25 bp, Saccharomyces pastorianus
agaggtttcacatcaacgaccagaa

SEQ ID NO: 30639 - DNA, 25 bp, Saccharomyces pastorianus
aagttatcaactacctcctattcag

SEQ ID NO: 30640 - DNA, 25 bp, Saccharomyces pastorianus
tgttcccgcacgtaaagtcgtcgaa

SEQ ID NO: 30641 - DNA, 25 bp, Saccharomyces pastorianus
acaagttccctctgatccttataat

SEQ ID NO: 30642 - DNA, 25 bp, Saccharomyces pastorianus
ttcaccactaacacccgagcaaatg

SEQ ID NO: 30643 - DNA, 25 bp, Saccharomyces pastorianus
ggtactatctgtttctattcatcca

SEQ ID NO: 30644 - DNA, 25 bp, Saccharomyces pastorianus
tactcgacctcttatagggttccca

SEQ ID NO: 30645 - DNA, 25 bp, Saccharomyces pastorianus
ataggtgctagaaccgaacacgtaa

SEQ ID NO: 30646 - DNA, 25 bp, Saccharomyces pastorianus
gtttaatgccgatggttcaccacta

SEQ ID NO: 30647 - DNA, 25 bp, Saccharomyces pastorianus
tagggttcccaagatgtacatagta

SEQ ID NO: 30648 - DNA, 25 bp, Saccharomyces pastorianus
gattcgttacgtgtggaccaatatt

SEQ ID NO: 30649 - DNA, 25 bp, Saccharomyces pastorianus
gggcataatgctgcgaaccccttag

SEQ ID NO: 30650 - DNA, 25 bp, Saccharomyces pastorianus
ggagaactgaggctgcacacattga

SEQ ID NO: 30651 - DNA, 25 bp, Saccharomyces pastorianus
tattgctcaggaaaggtactacgac

SEQ ID NO: 30652 - DNA, 25 bp, Saccharomyces pastorianus
ggctgcacacattgacgatatcgat

SEQ ID NO: 30653 - DNA, 25 bp, Saccharomyces pastorianus
tgggcccaaggagtttcgccgtaca

SEQ ID NO: 30654 - DNA, 25 bp, Saccharomyces pastorianus
ttgaccatggcaatttcgcccgaat

SEQ ID NO: 30655 - DNA, 25 bp, Saccharomyces pastorianus
gtaagcagccagtatacttcacgga

SEQ ID NO: 30656 - DNA, 25 bp, Saccharomyces pastorianus
aacgagctgcaccacaggtactggt

SEQ ID NO: 30657 - DNA, 25 bp, Saccharomyces pastorianus
cagacaggttcgacatccgtggtgg

SEQ ID NO: 30658 - DNA, 25 bp, Saccharomyces pastorianus
ctcaacctgactatcgactacgaaa

SEQ ID NO: 30659 - DNA, 25 bp, Saccharomyces pastorianus
agcggccacggtgatctcattgagc

SEQ ID NO: 30660 - DNA, 25 bp, Saccharomyces pastorianus
cgagcacgtagacatcctaggcagt

SEQ ID NO: 30661 - DNA, 25 bp, Saccharomyces pastorianus
ctgggatcaacgtcaccgtggtgga

SEQ ID NO: 30662 - DNA, 25 bp, Saccharomyces pastorianus
gttgaacgactacatcctgaagatc

SEQ ID NO: 30663 - DNA, 25 bp, Saccharomyces pastorianus
ggacgctcctcacatgaagatctac

SEQ ID NO: 30664 - DNA, 25 bp, Saccharomyces pastorianus
taaagagtctgcctgttcccttgat

SEQ ID NO: 30665 - DNA, 25 bp, Saccharomyces pastorianus
aggtatgccgtgtcccgggaagcaa

SEQ ID NO: 30666 - DNA, 25 bp, Saccharomyces pastorianus
tcttttacatgctcccatggtggga

SEQ ID NO: 30667 - DNA, 25 bp, Saccharomyces pastorianus
gaaccacagcatgacaaggccctat

SEQ ID NO: 30668 - DNA, 25 bp, Saccharomyces pastorianus
acaacgcctatacgcaacatcataa

SEQ ID NO: 30669 - DNA, 25 bp, Saccharomyces pastorianus
gaaattggtgctgtctcagggccat

SEQ ID NO: 30670 - DNA, 25 bp, Saccharomyces pastorianus
ctctatctacagctcttacggcaat

SEQ ID NO: 30671 - DNA, 25 bp, Saccharomyces pastorianus
cagattcgtttacagtttgcctact

SEQ ID NO: 30672 - DNA, 25 bp, Saccharomyces pastorianus
atagtcataattgcgccttgtacca

SEQ ID NO: 30673 - DNA, 25 bp, Saccharomyces pastorianus
gggagcgaacccttgagttctaccg

SEQ ID NO: 30674 - DNA, 25 bp, Saccharomyces pastorianus
ttacggcaatgcatcttcttttaca

SEQ ID NO: 30675 - DNA, 25 bp, Saccharomyces pastorianus
accagtcccaatatcgatgagtcca

SEQ ID NO: 30676 - DNA, 25 bp, Saccharomyces pastorianus
gatccaaacaacctctcgaatcagt

SEQ ID NO: 30677 - DNA, 25 bp, Saccharomyces pastorianus
gtagatggcaaagaccactccgcta

SEQ ID NO: 30678 - DNA, 25 bp, Saccharomyces pastorianus
caacaggttctatcagacatcgttt

SEQ ID NO: 30679 - DNA, 25 bp, Saccharomyces pastorianus
ggaagatttcatccagcaacgcgaa

SEQ ID NO: 30680 - DNA, 25 bp, Saccharomyces pastorianus
gcaaatctttgatatccgaacatga

SEQ ID NO: 30681 - DNA, 25 bp, Saccharomyces pastorianus
agatacagcaggtgctgctacccac

SEQ ID NO: 30682 - DNA, 25 bp, Saccharomyces pastorianus
agcaggccacaaatctgagtactcc

SEQ ID NO: 30683 - DNA, 25 bp, Saccharomyces pastorianus
tttactgagcaaaagcccatccgag

SEQ ID NO: 30684 - DNA, 25 bp, Saccharomyces pastorianus
gaattcataccgcatattttctatt

SEQ ID NO: 30685 - DNA, 25 bp, Saccharomyces pastorianus
gatgagtccaatgctgacattacaa

SEQ ID NO: 30686 - DNA, 25 bp, Saccharomyces pastorianus
gggcacttgatgatattccggtaac

SEQ ID NO: 30687 - DNA, 25 bp, Saccharomyces pastorianus
agtttgatcaagtcactgccgtgaa

SEQ ID NO: 30688 - DNA, 25 bp, Saccharomyces pastorianus
gcgcagactttgttttttatttcga

SEQ ID NO: 30689 - DNA, 25 bp, Saccharomyces pastorianus
taacgcctggtgaacattccatgga

SEQ ID NO: 30690 - DNA, 25 bp, Saccharomyces pastorianus
acattattgctctcatgggcacttg

SEQ ID NO: 30691 - DNA, 25 bp, Saccharomyces pastorianus
agggtcaaatcatcagtggtgctgc

SEQ ID NO: 30692 - DNA, 25 bp, Saccharomyces pastorianus
gcgtagtggtttacttagcgaccga

SEQ ID NO: 30693 - DNA, 25 bp, Saccharomyces pastorianus
aagtcatttcattgcataccatgct

SEQ ID NO: 30694 - DNA, 25 bp, Saccharomyces pastorianus
tccaggtacttttagaccacggtat

SEQ ID NO: 30695 - DNA, 25 bp, Saccharomyces pastorianus
catttttgctgggatgattgtcacc

SEQ ID NO: 30696 - DNA, 25 bp, Saccharomyces pastorianus
gaaggttttcctcatggagggtcaa

SEQ ID NO: 30697 - DNA, 25 bp, Saccharomyces pastorianus
gaaagaaaccctgcagtcttcgacc

SEQ ID NO: 30698 - DNA, 25 bp, Saccharomyces pastorianus
atttccatgagctgcaatccaacca

SEQ ID NO: 30699 - DNA, 25 bp, Saccharomyces pastorianus
gcgatctacgggatatgccagtcaa

SEQ ID NO: 30700 - DNA, 25 bp, Saccharomyces pastorianus
actgaccgatcccttggaatacttg

SEQ ID NO: 30701 - DNA, 25 bp, Saccharomyces pastorianus
gtgctggagcaactcaccgacgatg

SEQ ID NO: 30702 - DNA, 25 bp, Saccharomyces pastorianus
gcagaaccctggagaaggcctcgaa

SEQ ID NO: 30703 - DNA, 25 bp, Saccharomyces pastorianus
tgctaagcagaatcgtccctgggaa

SEQ ID NO: 30704 - DNA, 25 bp, Saccharomyces pastorianus
ttgcccgttgtaagaccccagaaga

SEQ ID NO: 30705 - DNA, 25 bp, Saccharomyces pastorianus
gggcaaccaagttcgacaaccatat

SEQ ID NO: 30706 - DNA, 25 bp, Saccharomyces pastorianus
tgtcgcgagttcctgcaatgggcaa

SEQ ID NO: 30707 - DNA, 25 bp, Saccharomyces pastorianus
agacgaaagatgtccttccctgggt

SEQ ID NO: 30708 - DNA, 25 bp, Saccharomyces pastorianus
ggcaagcccaaggagctgtcgctga

SEQ ID NO: 30709 - DNA, 25 bp, Saccharomyces pastorianus
tggcgctgagctacaacatcgtcaa

SEQ ID NO: 30710 - DNA, 25 bp, Saccharomyces pastorianus
tgttcaagtcttccaagggcctgaa

SEQ ID NO: 30711 - DNA, 25 bp, Saccharomyces pastorianus
acaagggcgtggagtacctggacct

SEQ ID NO: 30712 - DNA, 25 bp, Saccharomyces pastorianus
agagtctgggcttcgagccgaacat

SEQ ID NO: 30713 - DNA, 25 bp, Saccharomyces pastorianus
tgggcaacaacgcaggcatcctggc

SEQ ID NO: 30714 - DNA, 25 bp, Saccharomyces pastorianus
tgaacacggtgctgaaccacatcac

SEQ ID NO: 30715 - DNA, 25 bp, Saccharomyces pastorianus
caacaacataatagcgggtcccggg

SEQ ID NO: 30716 - DNA, 25 bp, Saccharomyces pastorianus
agttgtcttcgctggagggctccca

SEQ ID NO: 30717 - DNA, 25 bp, Saccharomyces pastorianus
agggtctgaagaacatcccgcccaa

SEQ ID NO: 30718 - DNA, 25 bp, Saccharomyces pastorianus
agcccggccaagctgcagttgaaca

SEQ ID NO: 30719 - DNA, 25 bp, Saccharomyces pastorianus
gacggtatccgaagttcaagccctc

SEQ ID NO: 30720 - DNA, 25 bp, Saccharomyces pastorianus
gaacaccgcagatggagggccttga

SEQ ID NO: 30721 - DNA, 25 bp, Saccharomyces pastorianus
gaaaatgccctgaaggttgccgaag

SEQ ID NO: 30722 - DNA, 25 bp, Saccharomyces pastorianus
gaccaaatcatgaccagggcccaga

SEQ ID NO: 30723 - DNA, 25 bp, Saccharomyces pastorianus
gtcgagggcctgtctaacaacaagt

SEQ ID NO: 30724 - DNA, 25 bp, Saccharomyces pastorianus
ggcctctgtcgggttgagcatgtac

SEQ ID NO: 30725 - DNA, 25 bp, Saccharomyces pastorianus
cgtgatctttaaagtccttcccaga

SEQ ID NO: 30726 - DNA, 25 bp, Saccharomyces pastorianus
agcttcgatgccaccatgtacgggt

SEQ ID NO: 30727 - DNA, 25 bp, Saccharomyces pastorianus
cgggtcgtgggtactcgtcaacaag

SEQ ID NO: 30728 - DNA, 25 bp, Saccharomyces pastorianus
taggactgggttcgtttccaacgag

SEQ ID NO: 30729 - DNA, 25 bp, Saccharomyces pastorianus
agggcccagaagatcgtccaggcaa

SEQ ID NO: 30730 - DNA, 25 bp, Saccharomyces pastorianus
gatgctcagatcttgatgcaccctg

SEQ ID NO: 30731 - DNA, 25 bp, Saccharomyces pastorianus
gagattctacttgttcttctttcaa

SEQ ID NO: 30732 - DNA, 25 bp, Saccharomyces pastorianus
ttgtccccgggttcatcgtgatgta

SEQ ID NO: 30733 - DNA, 25 bp, Saccharomyces pastorianus
tagccgtacgcaattccgaatggac

SEQ ID NO: 30734 - DNA, 25 bp, Saccharomyces pastorianus
aagtaccattggtggccttgaccaa

SEQ ID NO: 30735 - DNA, 25 bp, Saccharomyces pastorianus
ggcgacaggtacttctacggtgatt

SEQ ID NO: 30736 - DNA, 25 bp, Saccharomyces pastorianus
cgagttggccatgtacgttatcttc

SEQ ID NO: 30737 - DNA, 25 bp, Saccharomyces pastorianus
acacgtttaccacagctctatgagt

SEQ ID NO: 30738 - DNA, 25 bp, Saccharomyces pastorianus
gtaacgttattttctggctgggcat

SEQ ID NO: 30739 - DNA, 25 bp, Saccharomyces pastorianus
gacatttttcttaagctccgtcgtc

SEQ ID NO: 30740 - DNA, 25 bp, Saccharomyces pastorianus
aaatgggctggattgctcgtagaca

SEQ ID NO: 30741 - DNA, 25 bp, Saccharomyces pastorianus
ccaacggctctccaaacaacaagaa

SEQ ID NO: 30742 - DNA, 25 bp, Saccharomyces pastorianus
cagagacaagctgtgtttggtcaaa

SEQ ID NO: 30743 - DNA, 25 bp, Saccharomyces pastorianus
aaattgcaccaagcgcatgagttga

SEQ ID NO: 30744 - DNA, 25 bp, Saccharomyces pastorianus
tccaggtgttaagggacttcccacg

SEQ ID NO: 30745 - DNA, 25 bp, Saccharomyces pastorianus
atggaggaagaacgccaacggctct

SEQ ID NO: 30746 - DNA, 25 bp, Saccharomyces pastorianus
gaactacttgcataatttcaacggg

SEQ ID NO: 30747 - DNA, 25 bp, Saccharomyces pastorianus
ggacttcccacgatttcaactattt

SEQ ID NO: 30748 - DNA, 25 bp, Saccharomyces pastorianus
agtgctcctaagtgctctgacaaag

SEQ ID NO: 30749 - DNA, 25 bp, Saccharomyces pastorianus
ccatctttgatgaggaactacttgc

SEQ ID NO: 30750 - DNA, 25 bp, Saccharomyces pastorianus
ggtcttttggattccgggatcacta

SEQ ID NO: 30751 - DNA, 25 bp, Saccharomyces pastorianus
ctcacagagtgaaggtccaggtgtt

SEQ ID NO: 30752 - DNA, 25 bp, Saccharomyces pastorianus
aagtgcccgataccgatgctctaaa

SEQ ID NO: 30753 - DNA, 25 bp, Saccharomyces pastorianus
tacccagtggcatgaaagaatcttc

SEQ ID NO: 30754 - DNA, 25 bp, Saccharomyces pastorianus
gctattgactctattacccagtggc

SEQ ID NO: 30755 - DNA, 25 bp, Saccharomyces pastorianus
ataccctgaaggtgttatccggtga

SEQ ID NO: 30756 - DNA, 25 bp, Saccharomyces pastorianus
aatgattgcatttcttctacttcca

SEQ ID NO: 30757 - DNA, 25 bp, Saccharomyces pastorianus
gcacatttacttccattagagccta

SEQ ID NO: 30758 - DNA, 25 bp, Saccharomyces pastorianus
aacactaataggtcactcgatgcaa

SEQ ID NO: 30759 - DNA, 25 bp, Saccharomyces pastorianus
gaaaacgaagccatgttgcgtgaaa

SEQ ID NO: 30760 - DNA, 25 bp, Saccharomyces pastorianus
ttgattcttgatatcgaagtgcccg

SEQ ID NO: 30761 - DNA, 25 bp, Saccharomyces pastorianus
tttcttctacttccaataccctgaa

SEQ ID NO: 30762 - DNA, 25 bp, Saccharomyces pastorianus
ttagcgaggacccagttaagacgtt

SEQ ID NO: 30763 - DNA, 25 bp, Saccharomyces pastorianus
gaacgtggttgatcgggtcccgcat

SEQ ID NO: 30764 - DNA, 25 bp, Saccharomyces pastorianus
tgttggatccggtactgggcgataa

SEQ ID NO: 30765 - DNA, 25 bp, Saccharomyces pastorianus
aatccgcacgttggacgatgccaag

SEQ ID NO: 30766 - DNA, 25 bp, Saccharomyces pastorianus
attttgaagcggaacctggtgccct

SEQ ID NO: 30767 - DNA, 25 bp, Saccharomyces pastorianus
actagccttgaactgtctgactttt

SEQ ID NO: 30768 - DNA, 25 bp, Saccharomyces pastorianus
aggatttgattcatcgcttagcgac

SEQ ID NO: 30769 - DNA, 25 bp, Saccharomyces pastorianus
gatcaacgcaaccttcagtgggagc

SEQ ID NO: 30770 - DNA, 25 bp, Saccharomyces pastorianus
cgcggcttcgagcagtttcacgaaa

SEQ ID NO: 30771 - DNA, 25 bp, Saccharomyces pastorianus
aggtctaagatcttcttggccacac

SEQ ID NO: 30772 - DNA, 25 bp, Saccharomyces pastorianus
actgagcacgtctttgggccaagta

SEQ ID NO: 30773 - DNA, 25 bp, Saccharomyces pastorianus
agtttcctagagtgacgcgagtcgt

SEQ ID NO: 30774 - DNA, 25 bp, Saccharomyces pastorianus
taatagcttgctatgctgtggccaa

SEQ ID NO: 30775 - DNA, 25 bp, Saccharomyces pastorianus
gtcactctaaaaacgtacctctact

SEQ ID NO: 30776 - DNA, 25 bp, Saccharomyces pastorianus
acccgtgggaccgtgatttagacag

SEQ ID NO: 30777 - DNA, 25 bp, Saccharomyces pastorianus
tagggtttccatggccagcgatgac

SEQ ID NO: 30778 - DNA, 25 bp, Saccharomyces pastorianus
gaatcatgcttggtatttcagcctt

SEQ ID NO: 30779 - DNA, 25 bp, Saccharomyces pastorianus
ttgccagatccgaagagagcccatg

SEQ ID NO: 30780 - DNA, 25 bp, Saccharomyces pastorianus
acgtacctctactatgacaaccaaa

SEQ ID NO: 30781 - DNA, 25 bp, Saccharomyces pastorianus
gtttgactcacgatagaccaggtag

SEQ ID NO: 30782 - DNA, 25 bp, Saccharomyces pastorianus
ggattttaccgactggagccataga

SEQ ID NO: 30783 - DNA, 25 bp, Saccharomyces pastorianus
atccgatatggcttctctgtttcaa

SEQ ID NO: 30784 - DNA, 25 bp, Saccharomyces pastorianus
tcccctgctgaagaaacatccgata

SEQ ID NO: 30785 - DNA, 25 bp, Saccharomyces pastorianus
tgattactcatgaaccaacggccgc

SEQ ID NO: 30786 - DNA, 25 bp, Saccharomyces pastorianus
agacatttggccttcgtttgattat

SEQ ID NO: 30787 - DNA, 25 bp, Saccharomyces pastorianus
taactgtccatatgagcgtacctcc

SEQ ID NO: 30788 - DNA, 25 bp, Saccharomyces pastorianus
atccatcctatatcaccaactttgt

SEQ ID NO: 30789 - DNA, 25 bp, Saccharomyces pastorianus
tgtttaccggattcgatccatccta

SEQ ID NO: 30790 - DNA, 25 bp, Saccharomyces pastorianus
caatggcgtttttgtatgtctcaag

SEQ ID NO: 30791 - DNA, 25 bp, Saccharomyces pastorianus
acatcattgggaactcgtcagctca

SEQ ID NO: 30792 - DNA, 25 bp, Saccharomyces pastorianus
gactatattgcccttgtccatattg

SEQ ID NO: 30793 - DNA, 25 bp, Saccharomyces pastorianus
gactgagaacgctactatattggaa

SEQ ID NO: 30794 - DNA, 25 bp, Saccharomyces pastorianus
gagcgtacctccatgtatgacaggt

SEQ ID NO: 30795 - DNA, 25 bp, Saccharomyces pastorianus
caggtgttaccttatttggcgaatt

SEQ ID NO: 30796 - DNA, 25 bp, Saccharomyces pastorianus
gagaaattccgcacgacggtgccat

SEQ ID NO: 30797 - DNA, 25 bp, Saccharomyces pastorianus
taaggcctcgattctggagctatat

SEQ ID NO: 30798 - DNA, 25 bp, Saccharomyces pastorianus
accgacggttctgcagatcctgaaa

SEQ ID NO: 30799 - DNA, 25 bp, Saccharomyces pastorianus
gaacagaatctacagggcacaccaa

SEQ ID NO: 30800 - DNA, 25 bp, Saccharomyces pastorianus
aaatccacgttggaccatccagata

SEQ ID NO: 30801 - DNA, 25 bp, Saccharomyces pastorianus
gttttcagacgtataccaagccaga

SEQ ID NO: 30802 - DNA, 25 bp, Saccharomyces pastorianus
accgtgtggtcagcaccgaattact

SEQ ID NO: 30803 - DNA, 25 bp, Saccharomyces pastorianus
ggattatcgcccaacgttcaaacta

SEQ ID NO: 30804 - DNA, 25 bp, Saccharomyces pastorianus
agcatttccaagtatcgcctcgtgg

SEQ ID NO: 30805 - DNA, 25 bp, Saccharomyces pastorianus
tactttgatgggttggtcaccaccg

SEQ ID NO: 30806 - DNA, 25 bp, Saccharomyces pastorianus
gtaaggaccagttctacttcaatgt

SEQ ID NO: 30807 - DNA, 25 bp, Saccharomyces pastorianus
ggtgatttcaagaaagtgttgtctt

SEQ ID NO: 30808 - DNA, 25 bp, Saccharomyces pastorianus
ggaccacatctctttggaagactac

SEQ ID NO: 30809 - DNA, 25 bp, Saccharomyces pastorianus
gggagcgtactgaaggaccacatct

SEQ ID NO: 30810 - DNA, 25 bp, Saccharomyces pastorianus
aggcactcagccaaacaagattgtt

SEQ ID NO: 30811 - DNA, 25 bp, Saccharomyces pastorianus
atgccttggtgaagacaccgtgggt

SEQ ID NO: 30812 - DNA, 25 bp, Saccharomyces pastorianus
gttgtctttacaaataggcactcag

SEQ ID NO: 30813 - DNA, 25 bp, Saccharomyces pastorianus
attgaagtggtcgttaatgaccgat

SEQ ID NO: 30814 - DNA, 25 bp, Saccharomyces pastorianus
cgtactgaaggaccacatctctttg

SEQ ID NO: 30815 - DNA, 25 bp, Saccharomyces pastorianus
tcgttaatgaccgattgggcaaaaa

SEQ ID NO: 30816 - DNA, 25 bp, Saccharomyces pastorianus
ggtgaagacaccgtgggtgatttca

SEQ ID NO: 30817 - DNA, 25 bp, Saccharomyces pastorianus
ctctttggaagactacgaagtgcat

SEQ ID NO: 30818 - DNA, 25 bp, Saccharomyces pastorianus
tatgaacttgttcctgacgtccgtg

SEQ ID NO: 30819 - DNA, 25 bp, Saccharomyces pastorianus
acaacggcggagctagctggcaatt

SEQ ID NO: 30820 - DNA, 25 bp, Saccharomyces pastorianus
gatccatgacgggtgcgcctaagaa

SEQ ID NO: 30821 - DNA, 25 bp, Saccharomyces pastorianus
gggaccgcagatggacctaactaag

SEQ ID NO: 30822 - DNA, 25 bp, Saccharomyces pastorianus
aatggacatcctcaagcattcgctg

SEQ ID NO: 30823 - DNA, 25 bp, Saccharomyces pastorianus
ggaggaatacgccactgtctaccaa

SEQ ID NO: 30824 - DNA, 25 bp, Saccharomyces pastorianus
ggacttgatccgaaatgacctttat

SEQ ID NO: 30825 - DNA, 25 bp, Saccharomyces pastorianus
atcaggtgcatgtactcctacaacg

SEQ ID NO: 30826 - DNA, 25 bp, Saccharomyces pastorianus
gggtcacaggctactggtccgtgaa

SEQ ID NO: 30827 - DNA, 25 bp, Saccharomyces pastorianus
tctgagcacactggacggcgaacta

SEQ ID NO: 30828 - DNA, 25 bp, Saccharomyces pastorianus
gactggtccgtcaacatcaggtgca

SEQ ID NO: 30829 - DNA, 25 bp, Saccharomyces pastorianus
gaaggcgcccgttatcaaaactata

SEQ ID NO: 30830 - DNA, 25 bp, Saccharomyces pastorianus
aaagtgggacatttatttcgcagat

SEQ ID NO: 30831 - DNA, 25 bp, Saccharomyces pastorianus
taatgaaggcgctgctggtcgtgtt

SEQ ID NO: 30832 - DNA, 25 bp, Saccharomyces pastorianus
gaaggtgctacgaaggcgcccgtta

SEQ ID NO: 30833 - DNA, 25 bp, Saccharomyces pastorianus
gtcattgttccccaatttccaagaa

SEQ ID NO: 30834 - DNA, 25 bp, Saccharomyces pastorianus
tccggtgatttgtcattctcacaga

SEQ ID NO: 30835 - DNA, 25 bp, Saccharomyces pastorianus
attcttactagggtgtgctcctgat

SEQ ID NO: 30836 - DNA, 25 bp, Saccharomyces pastorianus
atgaaagattggtgcccttcagctc

SEQ ID NO: 30837 - DNA, 25 bp, Saccharomyces pastorianus
tgctttgatagacgtctttgtgacc

SEQ ID NO: 30838 - DNA, 25 bp, Saccharomyces pastorianus
gatggccatattgcgtcattgttcc

SEQ ID NO: 30839 - DNA, 25 bp, Saccharomyces pastorianus
aatatcgctgactattccggtgatt

SEQ ID NO: 30840 - DNA, 25 bp, Saccharomyces pastorianus
ccacttgttggatacatctggtgta

SEQ ID NO: 30841 - DNA, 25 bp, Saccharomyces pastorianus
tctggtgtagcaaaggccattgaca

SEQ ID NO: 30842 - DNA, 25 bp, Saccharomyces pastorianus
gaagtctaccgctctaatttctgaa

SEQ ID NO: 30843 - DNA, 25 bp, Saccharomyces pastorianus
tcgccaatcgccgaagtggtgaaga

SEQ ID NO: 30844 - DNA, 25 bp, Saccharomyces pastorianus
atgcattcaagaaggccggccattt

SEQ ID NO: 30845 - DNA, 25 bp, Saccharomyces pastorianus
ggctattctgtttatgaagacgctg

SEQ ID NO: 30846 - DNA, 25 bp, Saccharomyces pastorianus
tttgacgaacacttccacttgttgg

SEQ ID NO: 30847 - DNA, 25 bp, Saccharomyces pastorianus
aggccattgacaattcgccaatcgc

SEQ ID NO: 30848 - DNA, 25 bp, Saccharomyces pastorianus
ggccatttcatcgtttatttcactc

SEQ ID NO: 30849 - DNA, 25 bp, Saccharomyces pastorianus
gacgctgaatacattggtcatgcat

SEQ ID NO: 30850 - DNA, 25 bp, Saccharomyces pastorianus
gccgaactaggtaggttaggctatt

SEQ ID NO: 30851 - DNA, 25 bp, Saccharomyces pastorianus
gagttgaagaaatcctaccagccac

SEQ ID NO: 30852 - DNA, 25 bp, Saccharomyces pastorianus
gctccacaagttctatattcgcacg

SEQ ID NO: 30853 - DNA, 25 bp, Saccharomyces pastorianus
gaatcaagtgcggatgccagacaac

SEQ ID NO: 30854 - DNA, 25 bp, Saccharomyces pastorianus
tcttcatcaagccttctaacgacag

SEQ ID NO: 30855 - DNA, 25 bp, Saccharomyces pastorianus
gaattgagccagcagcaaccaacgc

SEQ ID NO: 30856 - DNA, 25 bp, Saccharomyces pastorianus
ttccaaggcttacatgcactccaga

SEQ ID NO: 30857 - DNA, 25 bp, Saccharomyces pastorianus
aaccaacgcccatcgaggcagagat

SEQ ID NO: 30858 - DNA, 25 bp, Saccharomyces pastorianus
tacttccactaccacatcaaatgtt

SEQ ID NO: 30859 - DNA, 25 bp, Saccharomyces pastorianus
gttctgttcccacgtcattttcaaa

SEQ ID NO: 30860 - DNA, 25 bp, Saccharomyces pastorianus
aagagaaaccgccagatccagtccg

SEQ ID NO: 30861 - DNA, 25 bp, Saccharomyces pastorianus
attcgcacgagcctccattggagtt

SEQ ID NO: 30862 - DNA, 25 bp, Saccharomyces pastorianus
tgcctgtggaggtgtccgaagacat

SEQ ID NO: 30863 - DNA, 25 bp, Saccharomyces pastorianus
agacgcaatggctaagggcaccccg

SEQ ID NO: 30864 - DNA, 25 bp, Saccharomyces pastorianus
acaacggtaaggagtacgtgcctgt

SEQ ID NO: 30865 - DNA, 25 bp, Saccharomyces pastorianus
gaagggccccaacattgtgccgctc

SEQ ID NO: 30866 - DNA, 25 bp, Saccharomyces pastorianus
tagactgttatcacggtcggtgtgg

SEQ ID NO: 30867 - DNA, 25 bp, Saccharomyces pastorianus
aagctgggtgagttcgcgcccacta

SEQ ID NO: 30868 - DNA, 25 bp, Saccharomyces pastorianus
aagttccagatccacaacggtaagg

SEQ ID NO: 30869 - DNA, 25 bp, Saccharomyces pastorianus
gtgtccgaagacatggtgggccaca

SEQ ID NO: 30870 - DNA, 25 bp, Saccharomyces pastorianus
atcctaccccaatttgttgggctca

SEQ ID NO: 30871 - DNA, 25 bp, Saccharomyces pastorianus
gttgggctcaagttccagatccaca

SEQ ID NO: 30872 - DNA, 25 bp, Saccharomyces pastorianus
atcccgcggctagactgttatcacg

SEQ ID NO: 30873 - DNA, 25 bp, Saccharomyces pastorianus
aagtccaatgaatcctccatcagat

SEQ ID NO: 30874 - DNA, 25 bp, Saccharomyces pastorianus
agagccaacgagatcgggtctgcct

SEQ ID NO: 30875 - DNA, 25 bp, Saccharomyces pastorianus
gctcgcaatccagcattctaacaaa

SEQ ID NO: 30876 - DNA, 25 bp, Saccharomyces pastorianus
gggtctgcctataacctactagttg

SEQ ID NO: 30877 - DNA, 25 bp, Saccharomyces pastorianus
gaattggacttcaccttattggaat

SEQ ID NO: 30878 - DNA, 25 bp, Saccharomyces pastorianus
aaatcaattcatggcgcactcttcc

SEQ ID NO: 30879 - DNA, 25 bp, Saccharomyces pastorianus
attgcagatttctcacacgagtcga

SEQ ID NO: 30880 - DNA, 25 bp, Saccharomyces pastorianus
aacgcctccaagatcttagtgtttg

SEQ ID NO: 30881 - DNA, 25 bp, Saccharomyces pastorianus
gggaagtctgtcgagccatttgaat

SEQ ID NO: 30882 - DNA, 25 bp, Saccharomyces pastorianus
gaaagaacattcttcgacgacctaa

SEQ ID NO: 30883 - DNA, 25 bp, Saccharomyces pastorianus
taacaaacctccgtgacctggaaat

SEQ ID NO: 30884 - DNA, 25 bp, Saccharomyces pastorianus
ggaatcctatagcttccactgaaaa

SEQ ID NO: 30885 - DNA, 25 bp, Saccharomyces pastorianus
tacggccaaggtcgatgagctcatt

SEQ ID NO: 30886 - DNA, 25 bp, Saccharomyces pastorianus
atatctgattacttggccactttgg

SEQ ID NO: 30887 - DNA, 25 bp, Saccharomyces pastorianus
accgatgctggagctgagtctaaat

SEQ ID NO: 30888 - DNA, 25 bp, Saccharomyces pastorianus
gtatctgttcatttatcccttatta

SEQ ID NO: 30889 - DNA, 25 bp, Saccharomyces pastorianus
gattttatggcatgggcttactata

SEQ ID NO: 30890 - DNA, 25 bp, Saccharomyces pastorianus
gatggacctctacagttttgttgat

SEQ ID NO: 30891 - DNA, 25 bp, Saccharomyces pastorianus
gctcattacccatagctacgataaa

SEQ ID NO: 30892 - DNA, 25 bp, Saccharomyces pastorianus
aagaaagacccaccatacggccaag

SEQ ID NO: 30893 - DNA, 25 bp, Saccharomyces pastorianus
gggttttcaactacatcgttatcta

SEQ ID NO: 30894 - DNA, 25 bp, Saccharomyces pastorianus
aacgctgatgcaacaaccgatgctg

SEQ ID NO: 30895 - DNA, 25 bp, Saccharomyces pastorianus
cgcgctaggattcttgggtgctcaa

SEQ ID NO: 30896 - DNA, 25 bp, Saccharomyces pastorianus
aggaatcaagtcgaccgcgctggct

SEQ ID NO: 30897 - DNA, 25 bp, Saccharomyces pastorianus
tagtgttcacctaccctttgttcaa

SEQ ID NO: 30898 - DNA, 25 bp, Saccharomyces pastorianus
agggatcttcacctacaggctatta

SEQ ID NO: 30899 - DNA, 25 bp, Saccharomyces pastorianus
attgtacttcacatacgcgttggcg

SEQ ID NO: 30900 - DNA, 25 bp, Saccharomyces pastorianus
gtactatccacaggctgcattgagt

SEQ ID NO: 30901 - DNA, 25 bp, Saccharomyces pastorianus
ctcaaaccctggtcgggatgggcat

SEQ ID NO: 30902 - DNA, 25 bp, Saccharomyces pastorianus
ctggccgttgcaggcttaaacagtg

SEQ ID NO: 30903 - DNA, 25 bp, Saccharomyces pastorianus
gttcaagcggttcacgtactatcca

SEQ ID NO: 30904 - DNA, 25 bp, Saccharomyces pastorianus
tgagttggcccacgatgataccctt

SEQ ID NO: 30905 - DNA, 25 bp, Saccharomyces pastorianus
atgaaggtcatgtctgcgtctcaga

SEQ ID NO: 30906 - DNA, 25 bp, Saccharomyces pastorianus
aattgtcgcctatactttcgatgca

SEQ ID NO: 30907 - DNA, 25 bp, Saccharomyces pastorianus
gaaagcctgtgttcttgtcgtcagc

SEQ ID NO: 30908 - DNA, 25 bp, Saccharomyces pastorianus
gatggattccaactcgtttcacgcc

SEQ ID NO: 30909 - DNA, 25 bp, Saccharomyces pastorianus
atctacaaactgttcggctctgttc

SEQ ID NO: 30910 - DNA, 25 bp, Saccharomyces pastorianus
tttcgatgcaggtccaaacgccgtg

SEQ ID NO: 30911 - DNA, 25 bp, Saccharomyces pastorianus
ggtgccactccattaaccagtatta

SEQ ID NO: 30912 - DNA, 25 bp, Saccharomyces pastorianus
gtggcgacctccgaattgttcaaag

SEQ ID NO: 30913 - DNA, 25 bp, Saccharomyces pastorianus
gttgctagagtgatcttgacccaag

SEQ ID NO: 30914 - DNA, 25 bp, Saccharomyces pastorianus
acatgtcgtgcccaacaggtttgaa

SEQ ID NO: 30915 - DNA, 25 bp, Saccharomyces pastorianus
gttcactgcccgtgaattggatctt

SEQ ID NO: 30916 - DNA, 25 bp, Saccharomyces pastorianus
aatcaacaattcgactccgccaagt

SEQ ID NO: 30917 - DNA, 25 bp, Saccharomyces pastorianus
gggtgccagcgtcagaatccttctg

SEQ ID NO: 30918 - DNA, 25 bp, Saccharomyces pastorianus
aaattcatatgcaccgaactccaca

SEQ ID NO: 30919 - DNA, 25 bp, Saccharomyces pastorianus
aacagagacatccttgcactgctga

SEQ ID NO: 30920 - DNA, 25 bp, Saccharomyces pastorianus
gaactgcttcctacagcatgacaag

SEQ ID NO: 30921 - DNA, 25 bp, Saccharomyces pastorianus
gttctttcccaacatttacgctcag

SEQ ID NO: 30922 - DNA, 25 bp, Saccharomyces pastorianus
ctatgacactttgatcagcgactcc

SEQ ID NO: 30923 - DNA, 25 bp, Saccharomyces pastorianus
ataacgaacggacccagctgttctt

SEQ ID NO: 30924 - DNA, 25 bp, Saccharomyces pastorianus
ggtacatcaccctgcaggaaaccaa

SEQ ID NO: 30925 - DNA, 25 bp, Saccharomyces pastorianus
cttttccctcgcaacatttacgata

SEQ ID NO: 30926 - DNA, 25 bp, Saccharomyces pastorianus
cacgcggctgctgagagggtacatc

SEQ ID NO: 30927 - DNA, 25 bp, Saccharomyces pastorianus
atatctctggaaacctacacgcggc

SEQ ID NO: 30928 - DNA, 25 bp, Saccharomyces pastorianus
aactttctgaaatgccccgtcaagg

SEQ ID NO: 30929 - DNA, 25 bp, Saccharomyces pastorianus
actgctcaaggttgctggcgaactg

SEQ ID NO: 30930 - DNA, 25 bp, Saccharomyces pastorianus
aacccggagtttatgctgaatatca

SEQ ID NO: 30931 - DNA, 25 bp, Saccharomyces pastorianus
gcggccacatctactacatcaagaa

SEQ ID NO: 30932 - DNA, 25 bp, Saccharomyces pastorianus
taaacgatctgcacgtcatgctgct

SEQ ID NO: 30933 - DNA, 25 bp, Saccharomyces pastorianus
gagtccatcgagttcaacccggagt

SEQ ID NO: 30934 - DNA, 25 bp, Saccharomyces pastorianus
tgcaaacgtccatcaccgagggtga

SEQ ID NO: 30935 - DNA, 25 bp, Saccharomyces pastorianus
gccaactggtgcaggacgagtccat

SEQ ID NO: 30936 - DNA, 25 bp, Saccharomyces pastorianus
atatcatcgaccgtgtggactgggc

SEQ ID NO: 30937 - DNA, 25 bp, Saccharomyces pastorianus
agttcgacggcggtaagtgccaact

SEQ ID NO: 30938 - DNA, 25 bp, Saccharomyces pastorianus
accgaagtcggcatggcagttctaa

SEQ ID NO: 30939 - DNA, 25 bp, Saccharomyces pastorianus
gatatccataagcatctcgatgaac

SEQ ID NO: 30940 - DNA, 25 bp, Saccharomyces pastorianus
gcaatggccatactgccgcagtgga

SEQ ID NO: 30941 - DNA, 25 bp, Saccharomyces pastorianus
gaggatgacccgttccacgatttta

SEQ ID NO: 30942 - DNA, 25 bp, Saccharomyces pastorianus
tgaaatgctattcggcttcactcca

SEQ ID NO: 30943 - DNA, 25 bp, Saccharomyces pastorianus
gaagacggttatgactttgccaaac

SEQ ID NO: 30944 - DNA, 25 bp, Saccharomyces pastorianus
atcccagtgctatccgaagacggtt

SEQ ID NO: 30945 - DNA, 25 bp, Saccharomyces pastorianus
ggcttcactccatttaagggcgata

SEQ ID NO: 30946 - DNA, 25 bp, Saccharomyces pastorianus
gactttgccaaactgtcatctaaca

SEQ ID NO: 30947 - DNA, 25 bp, Saccharomyces pastorianus
tgtaaaatgggtgcagccgacgtga

SEQ ID NO: 30948 - DNA, 25 bp, Saccharomyces pastorianus
gaaagtacagtggtctctattgaga

SEQ ID NO: 30949 - DNA, 25 bp, Saccharomyces pastorianus
gagaaatcaagagccacctctcatc

SEQ ID NO: 30950 - DNA, 25 bp, Saccharomyces pastorianus
attccccgacggctatacggatgag

SEQ ID NO: 30951 - DNA, 25 bp, Saccharomyces pastorianus
acaaagtcctttgtactgaccacta

SEQ ID NO: 30952 - DNA, 25 bp, Saccharomyces pastorianus
aatggcactccagattacctactta

SEQ ID NO: 30953 - DNA, 25 bp, Saccharomyces pastorianus
ctttttgccattctgttcctgataa

SEQ ID NO: 30954 - DNA, 25 bp, Saccharomyces pastorianus
gagaactgctgcattacctaacttt

SEQ ID NO: 30955 - DNA, 25 bp, Saccharomyces pastorianus
aatgcatctgatgttgtaccgcctc

SEQ ID NO: 30956 - DNA, 25 bp, Saccharomyces pastorianus
tgggattgccactctttttgccatt

SEQ ID NO: 30957 - DNA, 25 bp, Saccharomyces pastorianus
tgtaccgcctccaaattgggctaaa

SEQ ID NO: 30958 - DNA, 25 bp, Saccharomyces pastorianus
tactgaccactaacagcatcatcgg

SEQ ID NO: 30959 - DNA, 25 bp, Saccharomyces pastorianus
tttccctgcggactaatagccaatt

SEQ ID NO: 30960 - DNA, 25 bp, Saccharomyces pastorianus
taagccaagacctatgcacgatcat

SEQ ID NO: 30961 - DNA, 25 bp, Saccharomyces pastorianus
gtttccaaatggagtgcgtcctcat

SEQ ID NO: 30962 - DNA, 25 bp, Saccharomyces pastorianus
gagccccattgttccgaaactaaag

SEQ ID NO: 30963 - DNA, 25 bp, Saccharomyces pastorianus
caaaaatgacctgggcctcaaaatt

SEQ ID NO: 30964 - DNA, 25 bp, Saccharomyces pastorianus
actttgctgttgttgatttcgagac

SEQ ID NO: 30965 - DNA, 25 bp, Saccharomyces pastorianus
aggcaaaccaatagagccccattgt

SEQ ID NO: 30966 - DNA, 25 bp, Saccharomyces pastorianus
gagtcagaccgatgctctagagaag

SEQ ID NO: 30967 - DNA, 25 bp, Saccharomyces pastorianus
atcagacctgaaactctaacgaaga

SEQ ID NO: 30968 - DNA, 25 bp, Saccharomyces pastorianus
gagaattccgacaggatcagcaaga

SEQ ID NO: 30969 - DNA, 25 bp, Saccharomyces pastorianus
gaatccaacggtagtgttccagcac

SEQ ID NO: 30970 - DNA, 25 bp, Saccharomyces pastorianus
aactcacctagcgtgtttccaaatg

SEQ ID NO: 30971 - DNA, 25 bp, Saccharomyces pastorianus
cagaacctgttgcaaacccaccaaa

SEQ ID NO: 30972 - DNA, 25 bp, Saccharomyces pastorianus
attgaccacgcttgctgacgaactg

SEQ ID NO: 30973 - DNA, 25 bp, Saccharomyces pastorianus
aacagcagcagtactcattgaccac

SEQ ID NO: 30974 - DNA, 25 bp, Saccharomyces pastorianus
gggtccatcagtacatgccgaactt

SEQ ID NO: 30975 - DNA, 25 bp, Saccharomyces pastorianus
gcagcatacgatctgggcttcctga

SEQ ID NO: 30976 - DNA, 25 bp, Saccharomyces pastorianus
ggcttcctgatcaacatcctgatga

SEQ ID NO: 30977 - DNA, 25 bp, Saccharomyces pastorianus
ggacgattccgtcacttggattaca

SEQ ID NO: 30978 - DNA, 25 bp, Saccharomyces pastorianus
ctttccctaagtgacgccaatggta

SEQ ID NO: 30979 - DNA, 25 bp, Saccharomyces pastorianus
cgcaactacttatggattctggctt

SEQ ID NO: 30980 - DNA, 25 bp, Saccharomyces pastorianus
actgtccatgcataagttcccgaac

SEQ ID NO: 30981 - DNA, 25 bp, Saccharomyces pastorianus
tgccaagattttccattttcaccac

SEQ ID NO: 30982 - DNA, 25 bp, Saccharomyces pastorianus
gtggccaaagtctcttgatgcttct

SEQ ID NO: 30983 - DNA, 25 bp, Saccharomyces pastorianus
gacatcaagcagcagccgtcgaaat

SEQ ID NO: 30984 - DNA, 25 bp, Saccharomyces pastorianus
caccttacatgaagcctgccaagat

SEQ ID NO: 30985 - DNA, 25 bp, Saccharomyces pastorianus
tcaaatgggctgacttgaccgaaca

SEQ ID NO: 30986 - DNA, 25 bp, Saccharomyces pastorianus
agaggtcccagcacaaaaccggtgt

SEQ ID NO: 30987 - DNA, 25 bp, Saccharomyces pastorianus
gaccgaacagattgcccgtgaaaat

SEQ ID NO: 30988 - DNA, 25 bp, Saccharomyces pastorianus
acgccaagctgtgtgcggagacgct

SEQ ID NO: 30989 - DNA, 25 bp, Saccharomyces pastorianus
aagcagcgtcgcgtggaaactaacc

SEQ ID NO: 30990 - DNA, 25 bp, Saccharomyces pastorianus
aaccggtgtggtgtatttctccagt

SEQ ID NO: 30991 - DNA, 25 bp, Saccharomyces pastorianus
gccaacaagctgaatgccgacttta

SEQ ID NO: 30992 - DNA, 25 bp, Saccharomyces pastorianus
gtaccttttaccacgatgatatcct

SEQ ID NO: 30993 - DNA, 25 bp, Saccharomyces pastorianus
gaaactaaccgtgctaatgccccta

SEQ ID NO: 30994 - DNA, 25 bp, Saccharomyces pastorianus
ggatggcccgtcacaacaagggtat

SEQ ID NO: 30995 - DNA, 25 bp, Saccharomyces pastorianus
atatcctgcatatttaccttcacct

SEQ ID NO: 30996 - DNA, 25 bp, Saccharomyces pastorianus
ggcgttgcaattatgaatgtcccca

SEQ ID NO: 30997 - DNA, 25 bp, Saccharomyces pastorianus
aactgtgatcattgggcctgccggt

SEQ ID NO: 30998 - DNA, 25 bp, Saccharomyces pastorianus
tttcgccttgccaatgtaccattat

SEQ ID NO: 30999 - DNA, 25 bp, Saccharomyces pastorianus
ttaatggattgttaccccggaatgg

SEQ ID NO: 31000 - DNA, 25 bp, Saccharomyces pastorianus
taactttggtatcactgctttcgcc

SEQ ID NO: 31001 - DNA, 25 bp, Saccharomyces pastorianus
actattttgtcctttggatggcccg

SEQ ID NO: 31002 - DNA, 25 bp, Saccharomyces pastorianus
atctggtaccgagaacacctacatc

SEQ ID NO: 31003 - DNA, 25 bp, Saccharomyces pastorianus
ttcacctgttccgattggttagctg

SEQ ID NO: 31004 - DNA, 25 bp, Saccharomyces pastorianus
acctacatcgcattggccgttatta

SEQ ID NO: 31005 - DNA, 25 bp, Saccharomyces pastorianus
ggtattttcatgcatggtccaactt

SEQ ID NO: 31006 - DNA, 25 bp, Saccharomyces pastorianus
aagtagttcctgacatcgtgtgcgt

SEQ ID NO: 31007 - DNA, 25 bp, Saccharomyces pastorianus
gccgtcggtattgtggagctgtaca

SEQ ID NO: 31008 - DNA, 25 bp, Saccharomyces pastorianus
gggaatcagccctactaaacaagtt

SEQ ID NO: 31009 - DNA, 25 bp, Saccharomyces pastorianus
ggtccaactttcatgggtaatgctt

SEQ ID NO: 31010 - DNA, 25 bp, Saccharomyces pastorianus
gatggatatcctgctacgtggtgaa

SEQ ID NO: 31011 - DNA, 25 bp, Saccharomyces pastorianus
atgagcgcggtagtgaccaacgaaa

SEQ ID NO: 31012 - DNA, 25 bp, Saccharomyces pastorianus
gggcgttcatatcagacctttcaac

SEQ ID NO: 31013 - DNA, 25 bp, Saccharomyces pastorianus
cgaaaaggtcgcttccagaattgcc

SEQ ID NO: 31014 - DNA, 25 bp, Saccharomyces pastorianus
gggaacccttgtcaaacgtgtgtcg

SEQ ID NO: 31015 - DNA, 25 bp, Saccharomyces pastorianus
gacagacccgaagtggttccaaaag

SEQ ID NO: 31016 - DNA, 25 bp, Saccharomyces pastorianus
atgtgttcgatccaactatcccata

SEQ ID NO: 31017 - DNA, 25 bp, Saccharomyces pastorianus
gacatggccatggatgccgtagaaa

SEQ ID NO: 31018 - DNA, 25 bp, Saccharomyces pastorianus
gaagttaacaagtctccctggtcac

SEQ ID NO: 31019 - DNA, 25 bp, Saccharomyces pastorianus
tgatagcgcccagatgtgttcgatc

SEQ ID NO: 31020 - DNA, 25 bp, Saccharomyces pastorianus
ggatttgagcacacctgatagcgcc

SEQ ID NO: 31021 - DNA, 25 bp, Saccharomyces pastorianus
aaagcactatcgatcacccgtgaaa

SEQ ID NO: 31022 - DNA, 25 bp, Saccharomyces pastorianus
caagaatacttctacggcgacaaag

SEQ ID NO: 31023 - DNA, 25 bp, Saccharomyces pastorianus
tagaggcctcaaacgtgggagcatt

SEQ ID NO: 31024 - DNA, 25 bp, Saccharomyces pastorianus
ctgcagttctcacccattcaagaat

SEQ ID NO: 31025 - DNA, 25 bp, Saccharomyces pastorianus
tcacttttcatccagtagaggcctc

SEQ ID NO: 31026 - DNA, 25 bp, Saccharomyces pastorianus
atggctaaatggtggtctatctgtt

SEQ ID NO: 31027 - DNA, 25 bp, Saccharomyces pastorianus
aatcaagcactgtttgacccagtcg

SEQ ID NO: 31028 - DNA, 25 bp, Saccharomyces pastorianus
gattcggactttgattcagccacat

SEQ ID NO: 31029 - DNA, 25 bp, Saccharomyces pastorianus
aatgggcattcttgggcagctggac

SEQ ID NO: 31030 - DNA, 25 bp, Saccharomyces pastorianus
aatatcgccaattatcgcatcgcta

SEQ ID NO: 31031 - DNA, 25 bp, Saccharomyces pastorianus
gacccagtcgattcttatacatttt

SEQ ID NO: 31032 - DNA, 25 bp, Saccharomyces pastorianus
gcggctgggcaggtatactaagatt

SEQ ID NO: 31033 - DNA, 25 bp, Saccharomyces pastorianus
gaccaatactttgcacagtcgagaa

SEQ ID NO: 31034 - DNA, 25 bp, Saccharomyces pastorianus
tatacatttttcagcgattcggact

SEQ ID NO: 31035 - DNA, 25 bp, Saccharomyces pastorianus
atccatatgttaccaatcacaccag

SEQ ID NO: 31036 - DNA, 25 bp, Saccharomyces pastorianus
gaacgattacttctattaccaagat

SEQ ID NO: 31037 - DNA, 25 bp, Saccharomyces pastorianus
attcgttcagaatcctttgtcagtg

SEQ ID NO: 31038 - DNA, 25 bp, Saccharomyces pastorianus
gacttctccgattttgtcttcgtaa

SEQ ID NO: 31039 - DNA, 25 bp, Saccharomyces pastorianus
gaaacatggtcacgatgtcaatgag

SEQ ID NO: 31040 - DNA, 25 bp, Saccharomyces pastorianus
gaaaaagacttctccgattttgtct

SEQ ID NO: 31041 - DNA, 25 bp, Saccharomyces pastorianus
cttctccgattttgtcttcgtaaag

SEQ ID NO: 31042 - DNA, 25 bp, Saccharomyces pastorianus
taagaaacatggtcacgatgtcaat

SEQ ID NO: 31043 - DNA, 25 bp, Saccharomyces pastorianus
agacttctccgattttgtcttcgta

SEQ ID NO: 31044 - DNA, 25 bp, Saccharomyces pastorianus
gaacactagaaaacaagagattgct

SEQ ID NO: 31045 - DNA, 25 bp, Saccharomyces pastorianus
gaatttaagaaacatggtcacgatg

SEQ ID NO: 31046 - DNA, 25 bp, Saccharomyces pastorianus
tctccgattttgtcttcgtaaagtt

SEQ ID NO: 31047 - DNA, 25 bp, Saccharomyces pastorianus
aaagacttctccgattttgtcttcg

SEQ ID NO: 31048 - DNA, 25 bp, Saccharomyces pastorianus
gtgaaaaagacttctccgattttgt

SEQ ID NO: 31049 - DNA, 25 bp, Saccharomyces pastorianus
tcaatgagcttgttggcgacggtat

SEQ ID NO: 31050 - DNA, 25 bp, Saccharomyces pastorianus
gaaacatggtcacgatgtcaatgag

SEQ ID NO: 31051 - DNA, 25 bp, Saccharomyces pastorianus
gacttctccgattttgtcttcgtaa

SEQ ID NO: 31052 - DNA, 25 bp, Saccharomyces pastorianus
cttctccgattttgtcttcgtaaag

SEQ ID NO: 31053 - DNA, 25 bp, Saccharomyces pastorianus
agacttctccgattttgtcttcgta

SEQ ID NO: 31054 - DNA, 25 bp, Saccharomyces pastorianus
tgcgaactcgatttatcagggcagt

SEQ ID NO: 31055 - DNA, 25 bp, Saccharomyces pastorianus
gaacactagaaaacaagagattgct

SEQ ID NO: 31056 - DNA, 25 bp, Saccharomyces pastorianus
gaatttaagaaacatggtcacgatg

SEQ ID NO: 31057 - DNA, 25 bp, Saccharomyces pastorianus
tctccgattttgtcttcgtaaagtt

SEQ ID NO: 31058 - DNA, 25 bp, Saccharomyces pastorianus
aaagacttctccgattttgtcttcg

SEQ ID NO: 31059 - DNA, 25 bp, Saccharomyces pastorianus
gtgaaaaagacttctccgattttgt

SEQ ID NO: 31060 - DNA, 25 bp, Saccharomyces pastorianus
ttttgcgtggcttcaccgtaaacaa

SEQ ID NO: 31061 - DNA, 25 bp, Saccharomyces pastorianus
gtgggtgcttctattgccggtgcaa

SEQ ID NO: 31062 - DNA, 25 bp, Saccharomyces pastorianus
gttcgtgctcagatggtggaatcct

SEQ ID NO: 31063 - DNA, 25 bp, Saccharomyces pastorianus
cggtgcaatatggactcagcgcctg

SEQ ID NO: 31064 - DNA, 25 bp, Saccharomyces pastorianus
accctattggatctgaagttcgtgc

SEQ ID NO: 31065 - DNA, 25 bp, Saccharomyces pastorianus
gggtattatactgcatttctatcct

SEQ ID NO: 31066 - DNA, 25 bp, Saccharomyces pastorianus
tatcctcatcctaaactatttgtgg

SEQ ID NO: 31067 - DNA, 25 bp, Saccharomyces pastorianus
gatcgcttctcggtgttcttggaat

SEQ ID NO: 31068 - DNA, 25 bp, Saccharomyces pastorianus
gtgtcaatttcatttgcagctttca

SEQ ID NO: 31069 - DNA, 25 bp, Saccharomyces pastorianus
ctatttgtggttgctggatcgcttc

SEQ ID NO: 31070 - DNA, 25 bp, Saccharomyces pastorianus
agcgactcggctacaacttaggtat

SEQ ID NO: 31071 - DNA, 25 bp, Saccharomyces pastorianus
acttgtattaccttgctgacgttta

SEQ ID NO: 31072 - DNA, 25 bp, Saccharomyces pastorianus
agccgctttcaactatctgctttga

SEQ ID NO: 31073 - DNA, 25 bp, Saccharomyces pastorianus
ggcccaaaacattacgccggtattg

SEQ ID NO: 31074 - DNA, 25 bp, Saccharomyces pastorianus
tggtagcattttcactgtcatgggt

SEQ ID NO: 31075 - DNA, 25 bp, Saccharomyces pastorianus
ggagtcatgcaacatttccagccat

SEQ ID NO: 31076 - DNA, 25 bp, Saccharomyces pastorianus
ggatactgctgaagttactgcttat

SEQ ID NO: 31077 - DNA, 25 bp, Saccharomyces pastorianus
ctacttgcaccttctaaccatgaat

SEQ ID NO: 31078 - DNA, 25 bp, Saccharomyces pastorianus
gcggatggtttgtgcgcagctaatc

SEQ ID NO: 31079 - DNA, 25 bp, Saccharomyces pastorianus
ggactattgttgatgttggcccaaa

SEQ ID NO: 31080 - DNA, 25 bp, Saccharomyces pastorianus
gatatgctacatcgctacttgcacc

SEQ ID NO: 31081 - DNA, 25 bp, Saccharomyces pastorianus
atccaaattattacgccggtcacca

SEQ ID NO: 31082 - DNA, 25 bp, Saccharomyces pastorianus
gagccattggacgttgttatcccta

SEQ ID NO: 31083 - DNA, 25 bp, Saccharomyces pastorianus
tcagattctacgactcatgcattaa

SEQ ID NO: 31084 - DNA, 25 bp, Saccharomyces pastorianus
acgcccggtggaacagtgtcattat

SEQ ID NO: 31085 - DNA, 25 bp, Saccharomyces pastorianus
ttagagttgggatcatccacgcccg

SEQ ID NO: 31086 - DNA, 25 bp, Saccharomyces pastorianus
gacaagccaagctaggtgagccatt

SEQ ID NO: 31087 - DNA, 25 bp, Saccharomyces pastorianus
tatgaccgaagaacaagctctggcc

SEQ ID NO: 31088 - DNA, 25 bp, Saccharomyces pastorianus
tatccctatcggtgtgcttattaaa

SEQ ID NO: 31089 - DNA, 25 bp, Saccharomyces pastorianus
cattgaaagaatggcctccctgggt

SEQ ID NO: 31090 - DNA, 25 bp, Saccharomyces pastorianus
tagtggagacagttcccgggtccta

SEQ ID NO: 31091 - DNA, 25 bp, Saccharomyces pastorianus
ttttcggccttttgacttgtatgac

SEQ ID NO: 31092 - DNA, 25 bp, Saccharomyces pastorianus
tggcctccctgggtgtcaatgagaa

SEQ ID NO: 31093 - DNA, 25 bp, Saccharomyces pastorianus
tccagcaaaagatacgttccctcgg

SEQ ID NO: 31094 - DNA, 25 bp, Saccharomyces pastorianus
ttgctacaaaacttctcctctagtg

SEQ ID NO: 31095 - DNA, 25 bp, Saccharomyces pastorianus
tggcacgttctcagacagttataaa

SEQ ID NO: 31096 - DNA, 25 bp, Saccharomyces pastorianus
acaggtatcttgcatgtttctacga

SEQ ID NO: 31097 - DNA, 25 bp, Saccharomyces pastorianus
aatgcgtggattcagctaccggtcg

SEQ ID NO: 31098 - DNA, 25 bp, Saccharomyces pastorianus
taatcggcacgatcactggcacgtt

SEQ ID NO: 31099 - DNA, 25 bp, Saccharomyces pastorianus
tcgcgatgctgggttcgggttatta

SEQ ID NO: 31100 - DNA, 25 bp, Saccharomyces pastorianus
ctcctctagtgtctcgttatcatat

SEQ ID NO: 31101 - DNA, 25 bp, Saccharomyces pastorianus
tggctttccctaatgcctcgaagaa

SEQ ID NO: 31102 - DNA, 25 bp, Saccharomyces pastorianus
agccgctcacaccaagttcgaaatt

SEQ ID NO: 31103 - DNA, 25 bp, Saccharomyces pastorianus
gtgcgcaggctgtatatgtagacta

SEQ ID NO: 31104 - DNA, 25 bp, Saccharomyces pastorianus
ggaggctcatccagatatcttcaca

SEQ ID NO: 31105 - DNA, 25 bp, Saccharomyces pastorianus
aatgggtttccgattgctgctacta

SEQ ID NO: 31106 - DNA, 25 bp, Saccharomyces pastorianus
ggtcttttgattatcaccgctggta

SEQ ID NO: 31107 - DNA, 25 bp, Saccharomyces pastorianus
gttcctgctctaaccattgaagatg

SEQ ID NO: 31108 - DNA, 25 bp, Saccharomyces pastorianus
aacccgttggcttgctctgtaagta

SEQ ID NO: 31109 - DNA, 25 bp, Saccharomyces pastorianus
atccagtgtggattgggccgttcag

SEQ ID NO: 31110 - DNA, 25 bp, Saccharomyces pastorianus
agaatttgttgagccacctaccgag

SEQ ID NO: 31111 - DNA, 25 bp, Saccharomyces pastorianus
tgggctcatgcctatttaccaaagg

SEQ ID NO: 31112 - DNA, 25 bp, Saccharomyces pastorianus
tatcttcacatctgccaaagctttg

SEQ ID NO: 31113 - DNA, 25 bp, Saccharomyces pastorianus
tgagggcggtgttttcccagtagaa

SEQ ID NO: 31114 - DNA, 25 bp, Saccharomyces pastorianus
agtacggttagattcgttcctgctc

SEQ ID NO: 31115 - DNA, 25 bp, Saccharomyces pastorianus
aaagccagctgttgataaatccgaa

SEQ ID NO: 31116 - DNA, 25 bp, Saccharomyces pastorianus
gacgaattatggctcagaaccttac

SEQ ID NO: 31117 - DNA, 25 bp, Saccharomyces pastorianus
ctgtgacttcattccaaaccgttga

SEQ ID NO: 31118 - DNA, 25 bp, Saccharomyces pastorianus
aaccgtttcagtagatgatgccaca

SEQ ID NO: 31119 - DNA, 25 bp, Saccharomyces pastorianus
gatctattgcgtcctgtgacttcat

SEQ ID NO: 31120 - DNA, 25 bp, Saccharomyces pastorianus
taccaaatggacgttgtggtacaca

SEQ ID NO: 31121 - DNA, 25 bp, Saccharomyces pastorianus
gataaatccgaatcctggtctgatc

SEQ ID NO: 31122 - DNA, 25 bp, Saccharomyces pastorianus
cgttgaagaattctgggctatcatc

SEQ ID NO: 31123 - DNA, 25 bp, Saccharomyces pastorianus
ggctatcatccaaaatattcccgaa

SEQ ID NO: 31124 - DNA, 25 bp, Saccharomyces pastorianus
gaatcctggtctgatctattgcgtc

SEQ ID NO: 31125 - DNA, 25 bp, Saccharomyces pastorianus
gaattcttcccacattctagtgcta

SEQ ID NO: 31126 - DNA, 25 bp, Saccharomyces pastorianus
gggcctttgtttcccaatgcaagta

SEQ ID NO: 31127 - DNA, 25 bp, Saccharomyces pastorianus
cgttatttgtgcttgtcgggttaat

SEQ ID NO: 31128 - DNA, 25 bp, Saccharomyces pastorianus
agtatttgccactgctatgctggat

SEQ ID NO: 31129 - DNA, 25 bp, Saccharomyces pastorianus
tattgttgctttgcaggtgctaccc

SEQ ID NO: 31130 - DNA, 25 bp, Saccharomyces pastorianus
ggttcgtggttcttcacttatttgc

SEQ ID NO: 31131 - DNA, 25 bp, Saccharomyces pastorianus
aattgattccaactccgtgttctat

SEQ ID NO: 31132 - DNA, 25 bp, Saccharomyces pastorianus
tacggttgtctaactctcttttcat

SEQ ID NO: 31133 - DNA, 25 bp, Saccharomyces pastorianus
tagttgttttctcctgtggtacgtt

SEQ ID NO: 31134 - DNA, 25 bp, Saccharomyces pastorianus
ttgtggtggtgcagctttcccatac

SEQ ID NO: 31135 - DNA, 25 bp, Saccharomyces pastorianus
ggtgctacccaagagatcacatgta

SEQ ID NO: 31136 - DNA, 25 bp, Saccharomyces pastorianus
aattgttgcgttgttcacactagaa

SEQ ID NO: 31137 - DNA, 25 bp, Saccharomyces pastorianus
cgagagatgcatgcccgttggacaa

SEQ ID NO: 31138 - DNA, 25 bp, Saccharomyces pastorianus
gaatgagcaacaaaatacaccggta

SEQ ID NO: 31139 - DNA, 25 bp, Saccharomyces pastorianus
aaaaaatggacagcggtggcgttct

SEQ ID NO: 31140 - DNA, 25 bp, Saccharomyces pastorianus
aatcgcaagtttccacgcagaatga

SEQ ID NO: 31141 - DNA, 25 bp, Saccharomyces pastorianus
caactgtgccatttgcagaaaccac

SEQ ID NO: 31142 - DNA, 25 bp, Saccharomyces pastorianus
cattatggaaccatgcatcgaatgc

SEQ ID NO: 31143 - DNA, 25 bp, Saccharomyces pastorianus
acagataacgaatgtgtggcagcat

SEQ ID NO: 31144 - DNA, 25 bp, Saccharomyces pastorianus
ccgaaggctatgaccgacacagata

SEQ ID NO: 31145 - DNA, 25 bp, Saccharomyces pastorianus
cgttctggtcgtgggatatagccgt

SEQ ID NO: 31146 - DNA, 25 bp, Saccharomyces pastorianus
gctttccacttgcactgcatcaata

SEQ ID NO: 31147 - DNA, 25 bp, Saccharomyces pastorianus
gcatcgaatgccagccgaaggctat

SEQ ID NO: 31148 - DNA, 25 bp, Saccharomyces pastorianus
aatcttggacagcaaggcacccgac

SEQ ID NO: 31149 - DNA, 25 bp, Saccharomyces pastorianus
aaagtcatcaaacggatccctccgg

SEQ ID NO: 31150 - DNA, 25 bp, Saccharomyces pastorianus
gaaaacttgccgttgattcgagagt

SEQ ID NO: 31151 - DNA, 25 bp, Saccharomyces pastorianus
agggtcttgcaacgagctgaacttg

SEQ ID NO: 31152 - DNA, 25 bp, Saccharomyces pastorianus
ttttccatccggattatctgtctga

SEQ ID NO: 31153 - DNA, 25 bp, Saccharomyces pastorianus
agtttaagtgcttggattctcctcc

SEQ ID NO: 31154 - DNA, 25 bp, Saccharomyces pastorianus
tggaacttgagatttaacctgggca

SEQ ID NO: 31155 - DNA, 25 bp, Saccharomyces pastorianus
gatgttcaatacagggtcttgcaac

SEQ ID NO: 31156 - DNA, 25 bp, Saccharomyces pastorianus
gggaccgttttccatgaaagacgag

SEQ ID NO: 31157 - DNA, 25 bp, Saccharomyces pastorianus
gttccgccaagctcatcacaagaag

SEQ ID NO: 31158 - DNA, 25 bp, Saccharomyces pastorianus
gctgaacttgcacattcgatttgga

SEQ ID NO: 31159 - DNA, 25 bp, Saccharomyces pastorianus
gataatgttaatcgctccaatgata

SEQ ID NO: 31160 - DNA, 25 bp, Saccharomyces pastorianus
gggatattgggtgttctactttcat

SEQ ID NO: 31161 - DNA, 25 bp, Saccharomyces pastorianus
gttctactttcattggctgttgcag

SEQ ID NO: 31162 - DNA, 25 bp, Saccharomyces pastorianus
atactaaaactattgcgtggtggtt

SEQ ID NO: 31163 - DNA, 25 bp, Saccharomyces pastorianus
aaacagctacgtgcctacaacttca

SEQ ID NO: 31164 - DNA, 25 bp, Saccharomyces pastorianus
gatcacatacaaactacttgtccca

SEQ ID NO: 31165 - DNA, 25 bp, Saccharomyces pastorianus
aatagatcctccgtccacactaaat

SEQ ID NO: 31166 - DNA, 25 bp, Saccharomyces pastorianus
ctgttgcaggttggttcttagcgaa

SEQ ID NO: 31167 - DNA, 25 bp, Saccharomyces pastorianus
gggctaagtcagtcatatccagctt

SEQ ID NO: 31168 - DNA, 25 bp, Saccharomyces pastorianus
aactttaccaaacagctacgtgcct

SEQ ID NO: 31169 - DNA, 25 bp, Saccharomyces pastorianus
gaaaagttacgatgctgggtacaat

SEQ ID NO: 31170 - DNA, 25 bp, Saccharomyces pastorianus
atgcttcggacgttcatgtgacatt

SEQ ID NO: 31171 - DNA, 25 bp, Saccharomyces pastorianus
gatcatgccggattgtttcggttcc

SEQ ID NO: 31172 - DNA, 25 bp, Saccharomyces pastorianus
ggctttgccttattagctggtggat

SEQ ID NO: 31173 - DNA, 25 bp, Saccharomyces pastorianus
tatcaggtgccctttatgctctagg

SEQ ID NO: 31174 - DNA, 25 bp, Saccharomyces pastorianus
gattccatttctttgcagtacgcta

SEQ ID NO: 31175 - DNA, 25 bp, Saccharomyces pastorianus
tttctaggttctccaatgcttcgga

SEQ ID NO: 31176 - DNA, 25 bp, Saccharomyces pastorianus
ggtgatttggactcgagcatggcat

SEQ ID NO: 31177 - DNA, 25 bp, Saccharomyces pastorianus
gatgcggtacttttttctaggttct

SEQ ID NO: 31178 - DNA, 25 bp, Saccharomyces pastorianus
ggcatggcaagctcgtactatttta

SEQ ID NO: 31179 - DNA, 25 bp, Saccharomyces pastorianus
tatgctctagggttttgggtctttt

SEQ ID NO: 31180 - DNA, 25 bp, Saccharomyces pastorianus
gttgtgtcgttctatggattgctca

SEQ ID NO: 31181 - DNA, 25 bp, Saccharomyces pastorianus
gtttgtgattttggctcagcccaac

SEQ ID NO: 31182 - DNA, 25 bp, Saccharomyces pastorianus
tatgcattggttcccgtatatcgag

SEQ ID NO: 31183 - DNA, 25 bp, Saccharomyces pastorianus
atacttcttcaagcgtatctcaaga

SEQ ID NO: 31184 - DNA, 25 bp, Saccharomyces pastorianus
tagcaattctattaggccggctccc

SEQ ID NO: 31185 - DNA, 25 bp, Saccharomyces pastorianus
gacatacttctgttcgaggttttat

SEQ ID NO: 31186 - DNA, 25 bp, Saccharomyces pastorianus
atatgccatggtgatctcaagccga

SEQ ID NO: 31187 - DNA, 25 bp, Saccharomyces pastorianus
tcgagtttttcgacgttgacttctt

SEQ ID NO: 31188 - DNA, 25 bp, Saccharomyces pastorianus
catactgattatacccagcagcggt

SEQ ID NO: 31189 - DNA, 25 bp, Saccharomyces pastorianus
tatgccagtgcatctaccagaatta

SEQ ID NO: 31190 - DNA, 25 bp, Saccharomyces pastorianus
ggctccctgaacctaatacttcttc

SEQ ID NO: 31191 - DNA, 25 bp, Saccharomyces pastorianus
tctcaagccgagcaacatactgatt

SEQ ID NO: 31192 - DNA, 25 bp, Saccharomyces pastorianus
gcgtcgctacggacctaactttgag

SEQ ID NO: 31193 - DNA, 25 bp, Saccharomyces pastorianus
aaatctgtacttgggctacttgcgg

SEQ ID NO: 31194 - DNA, 25 bp, Saccharomyces pastorianus
ggttatatcacgtcacttcttgaaa

SEQ ID NO: 31195 - DNA, 25 bp, Saccharomyces pastorianus
agggctaagatcgacatccgggatt

SEQ ID NO: 31196 - DNA, 25 bp, Saccharomyces pastorianus
atacgtagcctctgatgtatccctt

SEQ ID NO: 31197 - DNA, 25 bp, Saccharomyces pastorianus
aaaggctattaagtgtccgagtatc

SEQ ID NO: 31198 - DNA, 25 bp, Saccharomyces pastorianus
gggcgatttgcattgccatgtgctg

SEQ ID NO: 31199 - DNA, 25 bp, Saccharomyces pastorianus
aagctttttctgcatgctgaccaaa

SEQ ID NO: 31200 - DNA, 25 bp, Saccharomyces pastorianus
agagccgatacgtctgcgtttctaa

SEQ ID NO: 31201 - DNA, 25 bp, Saccharomyces pastorianus
tctaagcacctttgtggcgtcgcta

SEQ ID NO: 31202 - DNA, 25 bp, Saccharomyces pastorianus
tcaattttaacttcaacgccaacgg

SEQ ID NO: 31203 - DNA, 25 bp, Saccharomyces pastorianus
gctaaccatggacttcacgcataat

SEQ ID NO: 31204 - DNA, 25 bp, Saccharomyces pastorianus
tgatgaaagctctcaattcctcgac

SEQ ID NO: 31205 - DNA, 25 bp, Saccharomyces pastorianus
aagccttatgctcttgattcattgt

SEQ ID NO: 31206 - DNA, 25 bp, Saccharomyces pastorianus
gtgaccctccttacggtattagaga

SEQ ID NO: 31207 - DNA, 25 bp, Saccharomyces pastorianus
cgccgcgattacattccaacaaaaa

SEQ ID NO: 31208 - DNA, 25 bp, Saccharomyces pastorianus
tactcttcggaaagattgcccattg

SEQ ID NO: 31209 - DNA, 25 bp, Saccharomyces pastorianus
ttgacgggagattggccttctggat

SEQ ID NO: 31210 - DNA, 25 bp, Saccharomyces pastorianus
tacgatattgtgtgaccctccttac

SEQ ID NO: 31211 - DNA, 25 bp, Saccharomyces pastorianus
aaaggcatttttgcgccgcgattac

SEQ ID NO: 31212 - DNA, 25 bp, Saccharomyces pastorianus
cgctttagtcgttggctcggatatt

SEQ ID NO: 31213 - DNA, 25 bp, Saccharomyces pastorianus
gcaggtggacacttcggcgctttag

SEQ ID NO: 31214 - DNA, 25 bp, Saccharomyces pastorianus
accgtggtgaccgtgattacaatca

SEQ ID NO: 31215 - DNA, 25 bp, Saccharomyces pastorianus
tctccacctttgaatctacctaacg

SEQ ID NO: 31216 - DNA, 25 bp, Saccharomyces pastorianus
agcggcaacatgaaccgtcgtggcg

SEQ ID NO: 31217 - DNA, 25 bp, Saccharomyces pastorianus
aacagcggcaacagcggcaacatga

SEQ ID NO: 31218 - DNA, 25 bp, Saccharomyces pastorianus
gatgatcacaacaacggctatggct

SEQ ID NO: 31219 - DNA, 25 bp, Saccharomyces pastorianus
caaactggtatggactactctcaaa

SEQ ID NO: 31220 - DNA, 25 bp, Saccharomyces pastorianus
agattcaggcaacgctcaaggttcc

SEQ ID NO: 31221 - DNA, 25 bp, Saccharomyces pastorianus
cccaacgccttcagattctgacaat

SEQ ID NO: 31222 - DNA, 25 bp, Saccharomyces pastorianus
agggcccatcctcacaatataatga

SEQ ID NO: 31223 - DNA, 25 bp, Saccharomyces pastorianus
ggctatggctacaaccgcgatcgcg

SEQ ID NO: 31224 - DNA, 25 bp, Saccharomyces pastorianus
atcaaatacagactcaggctctcca

SEQ ID NO: 31225 - DNA, 25 bp, Saccharomyces pastorianus
gatgcatttctatagtcccatgttt

SEQ ID NO: 31226 - DNA, 25 bp, Saccharomyces pastorianus
ggtacgattttcatgttggcactat

SEQ ID NO: 31227 - DNA, 25 bp, Saccharomyces pastorianus
ggatctttttatcgttcctgaacat

SEQ ID NO: 31228 - DNA, 25 bp, Saccharomyces pastorianus
gtcagtctgcaggtgtggtttgtac

SEQ ID NO: 31229 - DNA, 25 bp, Saccharomyces pastorianus
gctgatggcgcagacttattcacca

SEQ ID NO: 31230 - DNA, 25 bp, Saccharomyces pastorianus
tttggcaccagcagcaggtacgatt

SEQ ID NO: 31231 - DNA, 25 bp, Saccharomyces pastorianus
ttgccatttttggtcgcacctttaa

SEQ ID NO: 31232 - DNA, 25 bp, Saccharomyces pastorianus
ttatcacagtgatcgccgttatcgt

SEQ ID NO: 31233 - DNA, 25 bp, Saccharomyces pastorianus
agaaatcactgtcgaccatgccgaa

SEQ ID NO: 31234 - DNA, 25 bp, Saccharomyces pastorianus
ggtattatctatcgtgttgccattt

SEQ ID NO: 31235 - DNA, 25 bp, Saccharomyces pastorianus
gcacctttaattttcttcacctgta

SEQ ID NO: 31236 - DNA, 25 bp, Saccharomyces pastorianus
tgcttcaaatgctgtcggtatcctt

SEQ ID NO: 31237 - DNA, 25 bp, Saccharomyces pastorianus
ttaccattcctgttttacccattgg

SEQ ID NO: 31238 - DNA, 25 bp, Saccharomyces pastorianus
atatccaaaaccaccgatttcggca

SEQ ID NO: 31239 - DNA, 25 bp, Saccharomyces pastorianus
tatatcccagggtatttcgcagaca

SEQ ID NO: 31240 - DNA, 25 bp, Saccharomyces pastorianus
atattcaactcagcgctaatggcag

SEQ ID NO: 31241 - DNA, 25 bp, Saccharomyces pastorianus
aataggtgcctcctttgcagagagc

SEQ ID NO: 31242 - DNA, 25 bp, Saccharomyces pastorianus
gcaggcgccgcatgctatataatat

SEQ ID NO: 31243 - DNA, 25 bp, Saccharomyces pastorianus
caggttctatcctatcattgacgcc

SEQ ID NO: 31244 - DNA, 25 bp, Saccharomyces pastorianus
cattgacgcctgtgtgcattggaca

SEQ ID NO: 31245 - DNA, 25 bp, Saccharomyces pastorianus
acagtgtacctgttgcaatccttgg

SEQ ID NO: 31246 - DNA, 25 bp, Saccharomyces pastorianus
tttagcatcttactctatggccaga

SEQ ID NO: 31247 - DNA, 25 bp, Saccharomyces pastorianus
tacataagcagtacgtcttcccagt

SEQ ID NO: 31248 - DNA, 25 bp, Saccharomyces pastorianus
aattcatcaagtcaccacattcagt

SEQ ID NO: 31249 - DNA, 25 bp, Saccharomyces pastorianus
atggaagccctgtaccaaacggcat

SEQ ID NO: 31250 - DNA, 25 bp, Saccharomyces pastorianus
ttggaaagccattcagacaggtctt

SEQ ID NO: 31251 - DNA, 25 bp, Saccharomyces pastorianus
gacaggtcttaaccgtgggtattct

SEQ ID NO: 31252 - DNA, 25 bp, Saccharomyces pastorianus
agacgggatcctgcagtgaataaaa

SEQ ID NO: 31253 - DNA, 25 bp, Saccharomyces pastorianus
atatctcccgaacatgaaagtgcag

SEQ ID NO: 31254 - DNA, 25 bp, Saccharomyces pastorianus
ggagggcgtaccgacatttgaagaa

SEQ ID NO: 31255 - DNA, 25 bp, Saccharomyces pastorianus
tccttcagtggatggtcggtttaac

SEQ ID NO: 31256 - DNA, 25 bp, Saccharomyces pastorianus
gtttgcacaagaccattcgaattca

SEQ ID NO: 31257 - DNA, 25 bp, Saccharomyces pastorianus
ggaagattatacaacgaacccgcct

SEQ ID NO: 31258 - DNA, 25 bp, Saccharomyces pastorianus
ggctactgccagcaccacagaagac

SEQ ID NO: 31259 - DNA, 25 bp, Saccharomyces pastorianus
tattaccatttcaagtggcgatgat

SEQ ID NO: 31260 - DNA, 25 bp, Saccharomyces pastorianus
tggtgcttttgatctattaacgaat

SEQ ID NO: 31261 - DNA, 25 bp, Saccharomyces pastorianus
tatccggtatacttcccaaaatcta

SEQ ID NO: 31262 - DNA, 25 bp, Saccharomyces pastorianus
gggtcatcagatggttatccggtat

SEQ ID NO: 31263 - DNA, 25 bp, Saccharomyces pastorianus
agatacagtaacttccacggctact

SEQ ID NO: 31264 - DNA, 25 bp, Saccharomyces pastorianus
gcttggtgctgaacaaggctatcat

SEQ ID NO: 31265 - DNA, 25 bp, Saccharomyces pastorianus
ttatgacataatagaaccgcccact

SEQ ID NO: 31266 - DNA, 25 bp, Saccharomyces pastorianus
gttaagacacaaccatccgaatcag

SEQ ID NO: 31267 - DNA, 25 bp, Saccharomyces pastorianus
gaggcaaacaacatcagtcgaggaa

SEQ ID NO: 31268 - DNA, 25 bp, Saccharomyces pastorianus
aaaatccatttgcactagccattca

SEQ ID NO: 31269 - DNA, 25 bp, Saccharomyces pastorianus
ctacgtttgcactcatacgcacggg

SEQ ID NO: 31270 - DNA, 25 bp, Saccharomyces pastorianus
gtcaaatttttcttggattcctcag

SEQ ID NO: 31271 - DNA, 25 bp, Saccharomyces pastorianus
gcacgttaacacttcatggcttgtc

SEQ ID NO: 31272 - DNA, 25 bp, Saccharomyces pastorianus
aacaaacctgtcagttccctaatga

SEQ ID NO: 31273 - DNA, 25 bp, Saccharomyces pastorianus
atgacattcctatcgagactgcaga

SEQ ID NO: 31274 - DNA, 25 bp, Saccharomyces pastorianus
ggagctcgatgtttctcgtgcaaaa

SEQ ID NO: 31275 - DNA, 25 bp, Saccharomyces pastorianus
tagcggcaggtttcggtactatacc

SEQ ID NO: 31276 - DNA, 25 bp, Saccharomyces pastorianus
atagacttgttaggtgctcctctac

SEQ ID NO: 31277 - DNA, 25 bp, Saccharomyces pastorianus
acaatttgtcttgcgctacgatcga

SEQ ID NO: 31278 - DNA, 25 bp, Saccharomyces pastorianus
gcactgtagggagccactatgcatt

SEQ ID NO: 31279 - DNA, 25 bp, Saccharomyces pastorianus
atcgagccagtggtccaggaggaca

SEQ ID NO: 31280 - DNA, 25 bp, Saccharomyces pastorianus
gctagtaacaaatcgtcgccgctaa

SEQ ID NO: 31281 - DNA, 25 bp, Saccharomyces pastorianus
taacggacatattggatcccaccgc

SEQ ID NO: 31282 - DNA, 25 bp, Saccharomyces pastorianus
tcccaccgcggatatcaatgctagt

SEQ ID NO: 31283 - DNA, 25 bp, Saccharomyces pastorianus
agaagcaaacgtgccaccatggtgg

SEQ ID NO: 31284 - DNA, 25 bp, Saccharomyces pastorianus
gccaaggtctgaagtttttacacga

SEQ ID NO: 31285 - DNA, 25 bp, Saccharomyces pastorianus
gctaataatgggtcgcccgtattgc

SEQ ID NO: 31286 - DNA, 25 bp, Saccharomyces pastorianus
attgcgtcgtgctgaattggtgtct

SEQ ID NO: 31287 - DNA, 25 bp, Saccharomyces pastorianus
attcttcttaattcccagggcttag

SEQ ID NO: 31288 - DNA, 25 bp, Saccharomyces pastorianus
agacaatttttggatgcgtgcttac

SEQ ID NO: 31289 - DNA, 25 bp, Saccharomyces pastorianus
gatggcacccgaaatcgtgaatcag

SEQ ID NO: 31290 - DNA, 25 bp, Saccharomyces pastorianus
tagacggcgagcctccatatctaaa

SEQ ID NO: 31291 - DNA, 25 bp, Saccharomyces pastorianus
gataagcctgtgtctgcaccttctt

SEQ ID NO: 31292 - DNA, 25 bp, Saccharomyces pastorianus
ttgccaatttgggtgttccgttgcc

SEQ ID NO: 31293 - DNA, 25 bp, Saccharomyces pastorianus
aaaagcctcccacgtaagcgagatt

SEQ ID NO: 31294 - DNA, 25 bp, Saccharomyces pastorianus
agaacgataaacctgcggccaaaca

SEQ ID NO: 31295 - DNA, 25 bp, Saccharomyces pastorianus
cttgggacgccattgaggctttact

SEQ ID NO: 31296 - DNA, 25 bp, Saccharomyces pastorianus
cgaacttgaaactcgactcggccaa

SEQ ID NO: 31297 - DNA, 25 bp, Saccharomyces pastorianus
gaaaacgagaccgtccgctggacat

SEQ ID NO: 31298 - DNA, 25 bp, Saccharomyces pastorianus
attgagcatgatttcggcccatccg

SEQ ID NO: 31299 - DNA, 25 bp, Saccharomyces pastorianus
gttccgttgcccacgttgaaataca

SEQ ID NO: 31300 - DNA, 25 bp, Saccharomyces pastorianus
agtccttcacgaaaacctgttcttg

SEQ ID NO: 31301 - DNA, 25 bp, Saccharomyces pastorianus
tatccgacccgaagctgccaaaaag

SEQ ID NO: 31302 - DNA, 25 bp, Saccharomyces pastorianus
ttgaagaaggaagccaccccagagg

SEQ ID NO: 31303 - DNA, 25 bp, Saccharomyces pastorianus
gtcaccaccaaggtcgatgatacca

SEQ ID NO: 31304 - DNA, 25 bp, Saccharomyces pastorianus
agaagaccgaagtcaccaccaaggt

SEQ ID NO: 31305 - DNA, 25 bp, Saccharomyces pastorianus
aaggaacaagcccaaacgtccatcg

SEQ ID NO: 31306 - DNA, 25 bp, Saccharomyces pastorianus
gatgataccaagaaacaagccactg

SEQ ID NO: 31307 - DNA, 25 bp, Saccharomyces pastorianus
cactgctgctgtcaccgagaagaag

SEQ ID NO: 31308 - DNA, 25 bp, Saccharomyces pastorianus
acgtccatcgacaacttgaagaagg

SEQ ID NO: 31309 - DNA, 25 bp, Saccharomyces pastorianus
aaagctgaagctgccgctcaagacg

SEQ ID NO: 31310 - DNA, 25 bp, Saccharomyces pastorianus
cgctcaagacgtccaacaaaagctg

SEQ ID NO: 31311 - DNA, 25 bp, Saccharomyces pastorianus
gaacaagtcatcgtcgacggtgccg

SEQ ID NO: 31312 - DNA, 25 bp, Saccharomyces pastorianus
tcatcgtcgacggtgccgagcaaaa

SEQ ID NO: 31313 - DNA, 25 bp, Saccharomyces pastorianus
gtggtaccggacttgcaaccgcaag

SEQ ID NO: 31314 - DNA, 25 bp, Saccharomyces pastorianus
gtataaatcacgtatcctcagagaa

SEQ ID NO: 31315 - DNA, 25 bp, Saccharomyces pastorianus
aaccgcaagagagccgatcagaact

SEQ ID NO: 31316 - DNA, 25 bp, Saccharomyces pastorianus
caaagaggtcaagagcgaactggct

SEQ ID NO: 31317 - DNA, 25 bp, Saccharomyces pastorianus
gagtctaagctatttgagctggcta

SEQ ID NO: 31318 - DNA, 25 bp, Saccharomyces pastorianus
gagacatgtccaatgtggtaccgaa

SEQ ID NO: 31319 - DNA, 25 bp, Saccharomyces pastorianus
ttgacgagctagtggccgtggtacc

SEQ ID NO: 31320 - DNA, 25 bp, Saccharomyces pastorianus
tgcccggtggcagtaacagcataga

SEQ ID NO: 31321 - DNA, 25 bp, Saccharomyces pastorianus
aagcacggagcaatgcccggtggca

SEQ ID NO: 31322 - DNA, 25 bp, Saccharomyces pastorianus
ggaaacaaatcatagcgaagcacgg

SEQ ID NO: 31323 - DNA, 25 bp, Saccharomyces pastorianus
acgaaaatatcgactttgaaggtgg

SEQ ID NO: 31324 - DNA, 25 bp, Saccharomyces pastorianus
aaactactgcccatttttgttatgt

SEQ ID NO: 31325 - DNA, 25 bp, Saccharomyces pastorianus
atggtttcatcatttcgctcaactt

SEQ ID NO: 31326 - DNA, 25 bp, Saccharomyces pastorianus
tgatctgatcaagccacttctaagg

SEQ ID NO: 31327 - DNA, 25 bp, Saccharomyces pastorianus
cgctcaacttttttccatctggatt

SEQ ID NO: 31328 - DNA, 25 bp, Saccharomyces pastorianus
gatcgtcacgttaaccttgttgata

SEQ ID NO: 31329 - DNA, 25 bp, Saccharomyces pastorianus
aacctcaagactcctcattttttgg

SEQ ID NO: 31330 - DNA, 25 bp, Saccharomyces pastorianus
gattcttccaaaagcttgtgccatt

SEQ ID NO: 31331 - DNA, 25 bp, Saccharomyces pastorianus
ttgggttccccatcatttataggca

SEQ ID NO: 31332 - DNA, 25 bp, Saccharomyces pastorianus
gcttgtgccattgaattgtccatct

SEQ ID NO: 31333 - DNA, 25 bp, Saccharomyces pastorianus
tgatgcatccgataccttccaattg

SEQ ID NO: 31334 - DNA, 25 bp, Saccharomyces pastorianus
aggccgatcttcgattctatttacg

SEQ ID NO: 31335 - DNA, 25 bp, Saccharomyces pastorianus
aaccgctttgaaactgttctgacaa

SEQ ID NO: 31336 - DNA, 25 bp, Saccharomyces pastorianus
gctccttcgacaagcgcaattctaa

SEQ ID NO: 31337 - DNA, 25 bp, Saccharomyces pastorianus
gttaggccagcacacgttttagtac

SEQ ID NO: 31338 - DNA, 25 bp, Saccharomyces pastorianus
attcaccgagttagttttccgcgat

SEQ ID NO: 31339 - DNA, 25 bp, Saccharomyces pastorianus
ggttcaactgaacatcccatttctg

SEQ ID NO: 31340 - DNA, 25 bp, Saccharomyces pastorianus
tgttctgacaaaatttcgaccccaa

SEQ ID NO: 31341 - DNA, 25 bp, Saccharomyces pastorianus
gtcttggaatatttgaaccgctttg

SEQ ID NO: 31342 - DNA, 25 bp, Saccharomyces pastorianus
taatggcatcgttcgtatgtcagat

SEQ ID NO: 31343 - DNA, 25 bp, Saccharomyces pastorianus
tataagtctcttagaccttccccaa

SEQ ID NO: 31344 - DNA, 25 bp, Saccharomyces pastorianus
ggcagaagcactttaccttccagag

SEQ ID NO: 31345 - DNA, 25 bp, Saccharomyces pastorianus
aaatttgtaacgcagctttggcaga

SEQ ID NO: 31346 - DNA, 25 bp, Saccharomyces pastorianus
cgcacagccaatcatcatctatatc

SEQ ID NO: 31347 - DNA, 25 bp, Saccharomyces pastorianus
gagtgttacctatagactcgccgtc

SEQ ID NO: 31348 - DNA, 25 bp, Saccharomyces pastorianus
ttggacgttgtctggtatttgcaaa

SEQ ID NO: 31349 - DNA, 25 bp, Saccharomyces pastorianus
acaccttacaaatcgtttctactga

SEQ ID NO: 31350 - DNA, 25 bp, Saccharomyces pastorianus
attcaaagaaacacgccactatccc

SEQ ID NO: 31351 - DNA, 25 bp, Saccharomyces pastorianus
taaagaactagtcatccccttagaa

SEQ ID NO: 31352 - DNA, 25 bp, Saccharomyces pastorianus
ttgccttgggattgggtcttaacac

SEQ ID NO: 31353 - DNA, 25 bp, Saccharomyces pastorianus
ggttgcccaaaacgcatgttgcctt

SEQ ID NO: 31354 - DNA, 25 bp, Saccharomyces pastorianus
gaaagcaacctagccctgttaccaa

SEQ ID NO: 31355 - DNA, 25 bp, Saccharomyces pastorianus
atcaacttacgtcagcagggaacca

SEQ ID NO: 31356 - DNA, 25 bp, Saccharomyces pastorianus
gaagaacgtcatcatctgggagagt

SEQ ID NO: 31357 - DNA, 25 bp, Saccharomyces pastorianus
acgccatggtttctttagcttctga

SEQ ID NO: 31358 - DNA, 25 bp, Saccharomyces pastorianus
tgatcctgaatacgccatggtttct

SEQ ID NO: 31359 - DNA, 25 bp, Saccharomyces pastorianus
ttggaatccgttcaagagttccttg

SEQ ID NO: 31360 - DNA, 25 bp, Saccharomyces pastorianus
gctgggttagcttatggcgccaata

SEQ ID NO: 31361 - DNA, 25 bp, Saccharomyces pastorianus
ttgtccaagattatgcttccggcgc

SEQ ID NO: 31362 - DNA, 25 bp, Saccharomyces pastorianus
tgaacagctgattcaaggagccatt

SEQ ID NO: 31363 - DNA, 25 bp, Saccharomyces pastorianus
acttacagtgcgttgaaggtccatt

SEQ ID NO: 31364 - DNA, 25 bp, Saccharomyces pastorianus
tgcttccggcgccttggaatttgat

SEQ ID NO: 31365 - DNA, 25 bp, Saccharomyces pastorianus
ttgcatttgtaagctgtcatccagg

SEQ ID NO: 31366 - DNA, 25 bp, Saccharomyces pastorianus
gattcaacatctatcgtggtgctga

SEQ ID NO: 31367 - DNA, 25 bp, Saccharomyces pastorianus
gtttgaccccaaaaagagtgttgca

SEQ ID NO: 31368 - DNA, 25 bp, Saccharomyces pastorianus
gagtttcccatagtgtttctgacga

SEQ ID NO: 31369 - DNA, 25 bp, Saccharomyces pastorianus
ggacacgaattctctttacgtcggt

SEQ ID NO: 31370 - DNA, 25 bp, Saccharomyces pastorianus
accccactttactctagatctataa

SEQ ID NO: 31371 - DNA, 25 bp, Saccharomyces pastorianus
gagcgactaccaatcatcactagag

SEQ ID NO: 31372 - DNA, 25 bp, Saccharomyces pastorianus
tcaggaacttccttcgtcaaatggt

SEQ ID NO: 31373 - DNA, 25 bp, Saccharomyces pastorianus
gtgtcacaatccaacaaaccttcag

SEQ ID NO: 31374 - DNA, 25 bp, Saccharomyces pastorianus
acagatctctgcatggcgttacgat

SEQ ID NO: 31375 - DNA, 25 bp, Saccharomyces pastorianus
aatggttttccatcaggccaaacag

SEQ ID NO: 31376 - DNA, 25 bp, Saccharomyces pastorianus
ctacttccaatctgtgagcgactac

SEQ ID NO: 31377 - DNA, 25 bp, Saccharomyces pastorianus
aaaactgtctacgattcattccgcc

SEQ ID NO: 31378 - DNA, 25 bp, Saccharomyces pastorianus
ttacgatggcgcatgactacaacat

SEQ ID NO: 31379 - DNA, 25 bp, Saccharomyces pastorianus
gaacaattccctgtcgaatcacgta

SEQ ID NO: 31380 - DNA, 25 bp, Saccharomyces pastorianus
ggttcttactaccaagcgaaactat

SEQ ID NO: 31381 - DNA, 25 bp, Saccharomyces pastorianus
gcaggcaaaacgaaccgaaacccag

SEQ ID NO: 31382 - DNA, 25 bp, Saccharomyces pastorianus
ctgttaatcgaatgccacggctcat

SEQ ID NO: 31383 - DNA, 25 bp, Saccharomyces pastorianus
acggctcatactccttacttttagt

SEQ ID NO: 31384 - DNA, 25 bp, Saccharomyces pastorianus
aactgagttgaacacctccacaaag

SEQ ID NO: 31385 - DNA, 25 bp, Saccharomyces pastorianus
aaaactctaccacgccgtacaagca

SEQ ID NO: 31386 - DNA, 25 bp, Saccharomyces pastorianus
ttgctgaacatgaacaattccctgt

SEQ ID NO: 31387 - DNA, 25 bp, Saccharomyces pastorianus
catcttaacatcttaccggttctta

SEQ ID NO: 31388 - DNA, 25 bp, Saccharomyces pastorianus
agtctcctgccgagttctcaaaaag

SEQ ID NO: 31389 - DNA, 25 bp, Saccharomyces pastorianus
tgtcgaatcacgtatgctcctccga

SEQ ID NO: 31390 - DNA, 25 bp, Saccharomyces pastorianus
atttggattagcttgggccattgcc

SEQ ID NO: 31391 - DNA, 25 bp, Saccharomyces pastorianus
gatgttttgcattgtttgcgaccca

SEQ ID NO: 31392 - DNA, 25 bp, Saccharomyces pastorianus
gaactgggacgtggtacaagtacct

SEQ ID NO: 31393 - DNA, 25 bp, Saccharomyces pastorianus
gtaacatacgcttgaagaccctact

SEQ ID NO: 31394 - DNA, 25 bp, Saccharomyces pastorianus
gtgctatagccagtgaaccggaata

SEQ ID NO: 31395 - DNA, 25 bp, Saccharomyces pastorianus
aagtacctacgatggatttggatta

SEQ ID NO: 31396 - DNA, 25 bp, Saccharomyces pastorianus
atgcgagccaaaattccttgattat

SEQ ID NO: 31397 - DNA, 25 bp, Saccharomyces pastorianus
gagctctctgaaaaattgcctaatg

SEQ ID NO: 31398 - DNA, 25 bp, Saccharomyces pastorianus
gttggatgatccaggcaaaatctct

SEQ ID NO: 31399 - DNA, 25 bp, Saccharomyces pastorianus
ggccattgccgaacatatcgcaggt

SEQ ID NO: 31400 - DNA, 25 bp, Saccharomyces pastorianus
gtttgcgacccattttcatgaatta

SEQ ID NO: 31401 - DNA, 25 bp, Saccharomyces pastorianus
attgcagatttatcgcctcttatga

SEQ ID NO: 31402 - DNA, 25 bp, Saccharomyces pastorianus
atgagattggcgtctccatagccga

SEQ ID NO: 31403 - DNA, 25 bp, Saccharomyces pastorianus
gaaatcacattctccaatctcacat

SEQ ID NO: 31404 - DNA, 25 bp, Saccharomyces pastorianus
caatccatagctccgatgtatctga

SEQ ID NO: 31405 - DNA, 25 bp, Saccharomyces pastorianus
aggattagcggatgactcttccctc

SEQ ID NO: 31406 - DNA, 25 bp, Saccharomyces pastorianus
tccatagccgagtttgatcccaaac

SEQ ID NO: 31407 - DNA, 25 bp, Saccharomyces pastorianus
ggaccaagcctctggtaacgatgat

SEQ ID NO: 31408 - DNA, 25 bp, Saccharomyces pastorianus
atatgttctgcagcgctatcatgag

SEQ ID NO: 31409 - DNA, 25 bp, Saccharomyces pastorianus
gatccgactcaaacagtcctgttta

SEQ ID NO: 31410 - DNA, 25 bp, Saccharomyces pastorianus
gggatacattttctacagacgcaga

SEQ ID NO: 31411 - DNA, 25 bp, Saccharomyces pastorianus
gtatggatccttgcattctttacaa

SEQ ID NO: 31412 - DNA, 25 bp, Saccharomyces pastorianus
aatactattcggcaaccctatctga

SEQ ID NO: 31413 - DNA, 25 bp, Saccharomyces pastorianus
gatgacccaggcgaagacaccaaag

SEQ ID NO: 31414 - DNA, 25 bp, Saccharomyces pastorianus
ttgggccaacattatgcactgactt

SEQ ID NO: 31415 - DNA, 25 bp, Saccharomyces pastorianus
gaagtggttccacgatcccaaatgg

SEQ ID NO: 31416 - DNA, 25 bp, Saccharomyces pastorianus
aagctaaaaaccatccgcctgcaat

SEQ ID NO: 31417 - DNA, 25 bp, Saccharomyces pastorianus
tacgttctcaacagtcactatgcaa

SEQ ID NO: 31418 - DNA, 25 bp, Saccharomyces pastorianus
cttgcctggattccctatcattgaa

SEQ ID NO: 31419 - DNA, 25 bp, Saccharomyces pastorianus
taaaccttcctcagattgaccagtc

SEQ ID NO: 31420 - DNA, 25 bp, Saccharomyces pastorianus
aattgaacctcttgtcacacacaga

SEQ ID NO: 31421 - DNA, 25 bp, Saccharomyces pastorianus
attgcggcgatgaattacgttctca

SEQ ID NO: 31422 - DNA, 25 bp, Saccharomyces pastorianus
actggatccatctagggttgttcga

SEQ ID NO: 31423 - DNA, 25 bp, Saccharomyces pastorianus
atgacatgacgctaagcaccgttag

SEQ ID NO: 31424 - DNA, 25 bp, Saccharomyces pastorianus
tatacgttgctgataggttcgagac

SEQ ID NO: 31425 - DNA, 25 bp, Saccharomyces pastorianus
aaaagtacatagttcgccattggta

SEQ ID NO: 31426 - DNA, 25 bp, Saccharomyces pastorianus
ggttcgagacgaagacccctgaaat

SEQ ID NO: 31427 - DNA, 25 bp, Saccharomyces pastorianus
actggttgcgcctgggatgatcaga

SEQ ID NO: 31428 - DNA, 25 bp, Saccharomyces pastorianus
atggtctgccgttggtgcaagcgaa

SEQ ID NO: 31429 - DNA, 25 bp, Saccharomyces pastorianus
gttagatctattatgcaagggccaa

SEQ ID NO: 31430 - DNA, 25 bp, Saccharomyces pastorianus
tttctccttcaacacagcaacaatt

SEQ ID NO: 31431 - DNA, 25 bp, Saccharomyces pastorianus
ttaccttactggttcgcgaaggctt

SEQ ID NO: 31432 - DNA, 25 bp, Saccharomyces pastorianus
gagcaagaactaaatcccacggatt

SEQ ID NO: 31433 - DNA, 25 bp, Saccharomyces pastorianus
agaatcttccaccaatgacagcagc

SEQ ID NO: 31434 - DNA, 25 bp, Saccharomyces pastorianus
gacccattaggtgtttccaagcaac

SEQ ID NO: 31435 - DNA, 25 bp, Saccharomyces pastorianus
aggatcctattgtgtggtgttgcaa

SEQ ID NO: 31436 - DNA, 25 bp, Saccharomyces pastorianus
ggctctaagaaacaaccgtccatat

SEQ ID NO: 31437 - DNA, 25 bp, Saccharomyces pastorianus
aagtcgtatccgtttgacgaggtca

SEQ ID NO: 31438 - DNA, 25 bp, Saccharomyces pastorianus
cgcatacaccgatccttgtgttaga

SEQ ID NO: 31439 - DNA, 25 bp, Saccharomyces pastorianus
gggctgtgccagtcaatgcagatgc

SEQ ID NO: 31440 - DNA, 25 bp, Saccharomyces pastorianus
atgagtcgacttttgttccagaaga

SEQ ID NO: 31441 - DNA, 25 bp, Saccharomyces pastorianus
agtcaaacactatttcttcttccac

SEQ ID NO: 31442 - DNA, 25 bp, Saccharomyces pastorianus
gaacgagactcccacatgttttcaa

SEQ ID NO: 31443 - DNA, 25 bp, Saccharomyces pastorianus
gcgggtgttatttacggcaacgcag

SEQ ID NO: 31444 - DNA, 25 bp, Saccharomyces pastorianus
aggcattcccaccagatgtcttgga

SEQ ID NO: 31445 - DNA, 25 bp, Saccharomyces pastorianus
ggagcactcttctgttgaggatgca

SEQ ID NO: 31446 - DNA, 25 bp, Saccharomyces pastorianus
acacctcccattcagacaagtctat

SEQ ID NO: 31447 - DNA, 25 bp, Saccharomyces pastorianus
ggatgcaagggccaccatgctatta

SEQ ID NO: 31448 - DNA, 25 bp, Saccharomyces pastorianus
atcctagtaggacacgctttgaagc

SEQ ID NO: 31449 - DNA, 25 bp, Saccharomyces pastorianus
tatttgaattcaacccttccaagga

SEQ ID NO: 31450 - DNA, 25 bp, Saccharomyces pastorianus
agcactcgtgctggtaacaacaaga

SEQ ID NO: 31451 - DNA, 25 bp, Saccharomyces pastorianus
ttcggacatgttgttctcgatgagt

SEQ ID NO: 31452 - DNA, 25 bp, Saccharomyces pastorianus
gaagctttgatgctatcccatccaa

SEQ ID NO: 31453 - DNA, 25 bp, Saccharomyces pastorianus
gcaagaccccaagcctgaaaaaatt

SEQ ID NO: 31454 - DNA, 25 bp, Saccharomyces pastorianus
tggtgtctcagaaagcactcgtgct

SEQ ID NO: 31455 - DNA, 25 bp, Saccharomyces pastorianus
ggcccgaaggtgaagaatctgcttt

SEQ ID NO: 31456 - DNA, 25 bp, Saccharomyces pastorianus
aaggctatccctccacatcaattag

SEQ ID NO: 31457 - DNA, 25 bp, Saccharomyces pastorianus
aggcctgctaagtttattggttgtc

SEQ ID NO: 31458 - DNA, 25 bp, Saccharomyces pastorianus
cctgctaagtttattggttgtccca

SEQ ID NO: 31459 - DNA, 25 bp, Saccharomyces pastorianus
atgggtgctgcttatcatgtcatgg

SEQ ID NO: 31460 - DNA, 25 bp, Saccharomyces pastorianus
gggtgctgcttatcatgtcatggga

SEQ ID NO: 31461 - DNA, 25 bp, Saccharomyces pastorianus
tgtcatgggaaaggctatccctcca

SEQ ID NO: 31462 - DNA, 25 bp, Saccharomyces pastorianus
gttgtcccaaatcctttcaaaagtg

SEQ ID NO: 31463 - DNA, 25 bp, Saccharomyces pastorianus
tccctccacatcaattagccattgg

SEQ ID NO: 31464 - DNA, 25 bp, Saccharomyces pastorianus
aacagtcgacattaaaactggcaac

SEQ ID NO: 31465 - DNA, 25 bp, Saccharomyces pastorianus
gccattggaacattaggcctgctaa

SEQ ID NO: 31466 - DNA, 25 bp, Saccharomyces pastorianus
gtgcaaaaccgaaaacagtcgacat

SEQ ID NO: 31467 - DNA, 25 bp, Saccharomyces pastorianus
gtgtgccaccaactgccagaaagtg

SEQ ID NO: 31468 - DNA, 25 bp, Saccharomyces pastorianus
tttgatcaccgtttcgaatcttctc

SEQ ID NO: 31469 - DNA, 25 bp, Saccharomyces pastorianus
cggtcccaccattaaattctacatt

SEQ ID NO: 31470 - DNA, 25 bp, Saccharomyces pastorianus
aagagagaacgtccttgcagcagat

SEQ ID NO: 31471 - DNA, 25 bp, Saccharomyces pastorianus
acaacgttctattcttcgaggctag

SEQ ID NO: 31472 - DNA, 25 bp, Saccharomyces pastorianus
aatgcataactttggtgtgccacca

SEQ ID NO: 31473 - DNA, 25 bp, Saccharomyces pastorianus
gaatcttctccacactatcaattga

SEQ ID NO: 31474 - DNA, 25 bp, Saccharomyces pastorianus
atacgtctcaccaaacttcgttaga

SEQ ID NO: 31475 - DNA, 25 bp, Saccharomyces pastorianus
cgtaatgtctttcagtatcgtggat

SEQ ID NO: 31476 - DNA, 25 bp, Saccharomyces pastorianus
gttctcgcccagtattatcttttga

SEQ ID NO: 31477 - DNA, 25 bp, Saccharomyces pastorianus
cagaaagtgcaagcccttcatcgac

SEQ ID NO: 31478 - DNA, 25 bp, Saccharomyces pastorianus
agagctgcatactttgatttcgaag

SEQ ID NO: 31479 - DNA, 25 bp, Saccharomyces pastorianus
gaagtcgaatcggtatcattccaaa

SEQ ID NO: 31480 - DNA, 25 bp, Saccharomyces pastorianus
gaaaaccttaatgagctgttggcta

SEQ ID NO: 31481 - DNA, 25 bp, Saccharomyces pastorianus
gaagctctgccaagcggtgagaaaa

SEQ ID NO: 31482 - DNA, 25 bp, Saccharomyces pastorianus
gaagattcctctaaatgcaaaacaa

SEQ ID NO: 31483 - DNA, 25 bp, Saccharomyces pastorianus
ggatgctgtgatactctttttaagg

SEQ ID NO: 31484 - DNA, 25 bp, Saccharomyces pastorianus
tagagatttgtccatactagataaa

SEQ ID NO: 31485 - DNA, 25 bp, Saccharomyces pastorianus
gaacttatcatcgaagctctgccaa

SEQ ID NO: 31486 - DNA, 25 bp, Saccharomyces pastorianus
gcaataagcctagcattcgaagaac

SEQ ID NO: 31487 - DNA, 25 bp, Saccharomyces pastorianus
gatatctcatatttacctcaccaaa

SEQ ID NO: 31488 - DNA, 25 bp, Saccharomyces pastorianus
agctgttggctaataatttcaccga

SEQ ID NO: 31489 - DNA, 25 bp, Saccharomyces pastorianus
ctaccactatccttattagcttcgg

SEQ ID NO: 31490 - DNA, 25 bp, Saccharomyces pastorianus
cacttgcggtgaagctttgggtata

SEQ ID NO: 31491 - DNA, 25 bp, Saccharomyces pastorianus
tacttgtgaatttggtaccgggcat

SEQ ID NO: 31492 - DNA, 25 bp, Saccharomyces pastorianus
ttcttttgttgttaccacttgcggt

SEQ ID NO: 31493 - DNA, 25 bp, Saccharomyces pastorianus
tataccgtcttattgcgtttttcat

SEQ ID NO: 31494 - DNA, 25 bp, Saccharomyces pastorianus
ccgggcatgatgtattggtttctta

SEQ ID NO: 31495 - DNA, 25 bp, Saccharomyces pastorianus
cagtgctagcatgtggattaccaag

SEQ ID NO: 31496 - DNA, 25 bp, Saccharomyces pastorianus
ttagcttcggttttatatgcagtgt

SEQ ID NO: 31497 - DNA, 25 bp, Saccharomyces pastorianus
aaaccctgtaggatatacctctatg

SEQ ID NO: 31498 - DNA, 25 bp, Saccharomyces pastorianus
gaggaacttgaagctaacttgcgaa

SEQ ID NO: 31499 - DNA, 25 bp, Saccharomyces pastorianus
ataaactatgcatttccgaggaact

SEQ ID NO: 31500 - DNA, 25 bp, Saccharomyces pastorianus
taagactactgggtcctcgtggagg

SEQ ID NO: 31501 - DNA, 25 bp, Saccharomyces pastorianus
aacacaaatggcactggtcctgtaa

SEQ ID NO: 31502 - DNA, 25 bp, Saccharomyces pastorianus
ttgcccatcgtattgagcctagtgc

SEQ ID NO: 31503 - DNA, 25 bp, Saccharomyces pastorianus
gacttgtccttttgctactactgaa

SEQ ID NO: 31504 - DNA, 25 bp, Saccharomyces pastorianus
cacggatacttccaacgctggtgat

SEQ ID NO: 31505 - DNA, 25 bp, Saccharomyces pastorianus
atggctgccaatgcggctacgagta

SEQ ID NO: 31506 - DNA, 25 bp, Saccharomyces pastorianus
gatgctgccattgccatcgcaggaa

SEQ ID NO: 31507 - DNA, 25 bp, Saccharomyces pastorianus
ggtcctgtaagtatgccactacgtg

SEQ ID NO: 31508 - DNA, 25 bp, Saccharomyces pastorianus
ggattgcttccaggactagaccatt

SEQ ID NO: 31509 - DNA, 25 bp, Saccharomyces pastorianus
gccactacgtggttcaagcgcaact

SEQ ID NO: 31510 - DNA, 25 bp, Saccharomyces pastorianus
gagtaccgtttgtatcccactggat

SEQ ID NO: 31511 - DNA, 25 bp, Saccharomyces pastorianus
gagtattctttgttatctggtcata

SEQ ID NO: 31512 - DNA, 25 bp, Saccharomyces pastorianus
gatttccaatacagacaccaaagag

SEQ ID NO: 31513 - DNA, 25 bp, Saccharomyces pastorianus
agaccttgaacgatttgactgtgca

SEQ ID NO: 31514 - DNA, 25 bp, Saccharomyces pastorianus
agcgagctttatgacgtgctgagaa

SEQ ID NO: 31515 - DNA, 25 bp, Saccharomyces pastorianus
agagcttgcaggacacagtggcgac

SEQ ID NO: 31516 - DNA, 25 bp, Saccharomyces pastorianus
caagagcaactggatttacaactaa

SEQ ID NO: 31517 - DNA, 25 bp, Saccharomyces pastorianus
gaacgtgttggagactgggatctta

SEQ ID NO: 31518 - DNA, 25 bp, Saccharomyces pastorianus
tcgcgattgaacgattccaagttaa

SEQ ID NO: 31519 - DNA, 25 bp, Saccharomyces pastorianus
ggacacagtggcgacgttcgaaacc

SEQ ID NO: 31520 - DNA, 25 bp, Saccharomyces pastorianus
ttcgaaaccataatcagcgagcttt

SEQ ID NO: 31521 - DNA, 25 bp, Saccharomyces pastorianus
aggatactgaagacgaatcgcgatt

SEQ ID NO: 31522 - DNA, 25 bp, Saccharomyces pastorianus
ggaaactccggcagcaacgatacgc

SEQ ID NO: 31523 - DNA, 25 bp, Saccharomyces pastorianus
ttactaagcatcataccgagggact

SEQ ID NO: 31524 - DNA, 25 bp, Saccharomyces pastorianus
agatcctcacacagacggtggagta

SEQ ID NO: 31525 - DNA, 25 bp, Saccharomyces pastorianus
atgaaggtttcgcagctggccaagc

SEQ ID NO: 31526 - DNA, 25 bp, Saccharomyces pastorianus
gggctcttggactatccagtaagac

SEQ ID NO: 31527 - DNA, 25 bp, Saccharomyces pastorianus
tggagtacatctcgcacctgcagag

SEQ ID NO: 31528 - DNA, 25 bp, Saccharomyces pastorianus
gatcaacgaccgcatccaagagtta

SEQ ID NO: 31529 - DNA, 25 bp, Saccharomyces pastorianus
ggatcgtgcggtgccaatttcaaga

SEQ ID NO: 31530 - DNA, 25 bp, Saccharomyces pastorianus
gagggacttcttcagggactactac

SEQ ID NO: 31531 - DNA, 25 bp, Saccharomyces pastorianus
ttcgaacgacgactcagcaaagccc

SEQ ID NO: 31532 - DNA, 25 bp, Saccharomyces pastorianus
atcgtcaacgacattaacctggaga

SEQ ID NO: 31533 - DNA, 25 bp, Saccharomyces pastorianus
tgcgacaacattgaggcgcctattg

SEQ ID NO: 31534 - DNA, 25 bp, Saccharomyces pastorianus
agaatcccatcatggtgcgaccgaa

SEQ ID NO: 31535 - DNA, 25 bp, Saccharomyces pastorianus
aaacgtatgcgacacctaggttaga

SEQ ID NO: 31536 - DNA, 25 bp, Saccharomyces pastorianus
ttctgtaccaagatccaatgctctg

SEQ ID NO: 31537 - DNA, 25 bp, Saccharomyces pastorianus
gataaagttcccaccgactttcaag

SEQ ID NO: 31538 - DNA, 25 bp, Saccharomyces pastorianus
atcagcctgtcaatcttacggtgaa

SEQ ID NO: 31539 - DNA, 25 bp, Saccharomyces pastorianus
gtgcgattccgcaattgttaagagt

SEQ ID NO: 31540 - DNA, 25 bp, Saccharomyces pastorianus
aagagtgaccacttcttcttcttag

SEQ ID NO: 31541 - DNA, 25 bp, Saccharomyces pastorianus
actgattactcttctgcgacaacat

SEQ ID NO: 31542 - DNA, 25 bp, Saccharomyces pastorianus
gatattcagcgatcatcagcctgtc

SEQ ID NO: 31543 - DNA, 25 bp, Saccharomyces pastorianus
agaaccttcattgttacccatcgaa

SEQ ID NO: 31544 - DNA, 25 bp, Saccharomyces pastorianus
agtactgtttattagccttgggctt

SEQ ID NO: 31545 - DNA, 25 bp, Saccharomyces pastorianus
aaatctgggaccatgctgcaggcaa

SEQ ID NO: 31546 - DNA, 25 bp, Saccharomyces pastorianus
agaggtttaggtgccttctactctc

SEQ ID NO: 31547 - DNA, 25 bp, Saccharomyces pastorianus
gagtcatttggttacatcttccgtg

SEQ ID NO: 31548 - DNA, 25 bp, Saccharomyces pastorianus
acggtgttgttcagcttggttgtat

SEQ ID NO: 31549 - DNA, 25 bp, Saccharomyces pastorianus
ttcccctggacttcggtaatggtag

SEQ ID NO: 31550 - DNA, 25 bp, Saccharomyces pastorianus
gttgcacgacttggttgtatctaca

SEQ ID NO: 31551 - DNA, 25 bp, Saccharomyces pastorianus
ttgggcttggctgacgtatacttgc

SEQ ID NO: 31552 - DNA, 25 bp, Saccharomyces pastorianus
gtttgcccatcaagctttcttatca

SEQ ID NO: 31553 - DNA, 25 bp, Saccharomyces pastorianus
ggattcgcaagccaagtactgttta

SEQ ID NO: 31554 - DNA, 25 bp, Saccharomyces pastorianus
aaacatttcccagtctttgcatttg

SEQ ID NO: 31555 - DNA, 25 bp, Saccharomyces pastorianus
gagcctgcaacaatggacgagacct

SEQ ID NO: 31556 - DNA, 25 bp, Saccharomyces pastorianus
gagtgcggttactgtatctacaagt

SEQ ID NO: 31557 - DNA, 25 bp, Saccharomyces pastorianus
taaccttgaaatcactattcccggg

SEQ ID NO: 31558 - DNA, 25 bp, Saccharomyces pastorianus
gattacacccattgtagcgcattct

SEQ ID NO: 31559 - DNA, 25 bp, Saccharomyces pastorianus
tgccaccaagcaccgtagattgtaa

SEQ ID NO: 31560 - DNA, 25 bp, Saccharomyces pastorianus
acgctattttactatctcttccaga

SEQ ID NO: 31561 - DNA, 25 bp, Saccharomyces pastorianus
ggaaactctccgctaaggatgtgat

SEQ ID NO: 31562 - DNA, 25 bp, Saccharomyces pastorianus
aattgttttcctaaggctgctgcag

SEQ ID NO: 31563 - DNA, 25 bp, Saccharomyces pastorianus
aattcagggctggtcgtacgctatt

SEQ ID NO: 31564 - DNA, 25 bp, Saccharomyces pastorianus
tgatattacatatccctgtgccacc

SEQ ID NO: 31565 - DNA, 25 bp, Saccharomyces pastorianus
gacgagacctccaatgtctttggat

SEQ ID NO: 31566 - DNA, 25 bp, Saccharomyces pastorianus
acctgccgttcaaggttacacctat

SEQ ID NO: 31567 - DNA, 25 bp, Saccharomyces pastorianus
gtttcacgaatgtgtctcacttgac

SEQ ID NO: 31568 - DNA, 25 bp, Saccharomyces pastorianus
taattctggcttagtcgtacgatac

SEQ ID NO: 31569 - DNA, 25 bp, Saccharomyces pastorianus
gtggtactacatatacccgttccac

SEQ ID NO: 31570 - DNA, 25 bp, Saccharomyces pastorianus
tcatatcattgaattcgtcccacca

SEQ ID NO: 31571 - DNA, 25 bp, Saccharomyces pastorianus
aagctgctgccggtagtgttttgtt

SEQ ID NO: 31572 - DNA, 25 bp, Saccharomyces pastorianus
aagaacttcattcccaaagctgctg

SEQ ID NO: 31573 - DNA, 25 bp, Saccharomyces pastorianus
gtacgatactttaccatttctggaa

SEQ ID NO: 31574 - DNA, 25 bp, Saccharomyces pastorianus
aagacctccaatatccctggaattc

SEQ ID NO: 31575 - DNA, 25 bp, Saccharomyces pastorianus
gtctctaatggccactgtaagtttg

SEQ ID NO: 31576 - DNA, 25 bp, Saccharomyces pastorianus
aagtgcagttactgtgtccacaagt

SEQ ID NO: 31577 - DNA, 25 bp, Saccharomyces pastorianus
gttaccagtatctccaaggccatta

SEQ ID NO: 31578 - DNA, 25 bp, Saccharomyces pastorianus
agatgcgacgttaacctctggtggt

SEQ ID NO: 31579 - DNA, 25 bp, Saccharomyces pastorianus
ttgtccttcgccctaattcataaag

SEQ ID NO: 31580 - DNA, 25 bp, Saccharomyces pastorianus
tctcagttattgaagggccctccag

SEQ ID NO: 31581 - DNA, 25 bp, Saccharomyces pastorianus
gttcgttcaaactaccatgcttgtt

SEQ ID NO: 31582 - DNA, 25 bp, Saccharomyces pastorianus
acggctattgcagacgccttggaat

SEQ ID NO: 31583 - DNA, 25 bp, Saccharomyces pastorianus
gtcgacgacttggtggatacttcat

SEQ ID NO: 31584 - DNA, 25 bp, Saccharomyces pastorianus
gtcgcaatcttctaattcgtccaag

SEQ ID NO: 31585 - DNA, 25 bp, Saccharomyces pastorianus
tgatgtctcctgcataatcggtgaa

SEQ ID NO: 31586 - DNA, 25 bp, Saccharomyces pastorianus
gatcatttctaacacggttcctcaa

SEQ ID NO: 31587 - DNA, 25 bp, Saccharomyces pastorianus
tgttttttccggtgatgcgctagaa

SEQ ID NO: 31588 - DNA, 25 bp, Saccharomyces pastorianus
gaattcgggtgcagaccatctcaac

SEQ ID NO: 31589 - DNA, 25 bp, Saccharomyces pastorianus
gataagtcactctccaccgaagaaa

SEQ ID NO: 31590 - DNA, 25 bp, Saccharomyces pastorianus
gtcccgatagcataacaattccgaa

SEQ ID NO: 31591 - DNA, 25 bp, Saccharomyces pastorianus
taacgatctcgtcctcttaccaaaa

SEQ ID NO: 31592 - DNA, 25 bp, Saccharomyces pastorianus
aagctatcctccatactcaaaagtc

SEQ ID NO: 31593 - DNA, 25 bp, Saccharomyces pastorianus
agccttccaatgttccgaccattat

SEQ ID NO: 31594 - DNA, 25 bp, Saccharomyces pastorianus
gaagacaatcattggtcccgctaag

SEQ ID NO: 31595 - DNA, 25 bp, Saccharomyces pastorianus
aagtcaggcgaaccaaccagagtca

SEQ ID NO: 31596 - DNA, 25 bp, Saccharomyces pastorianus
tatcaataaatccttcgtcaccatc

SEQ ID NO: 31597 - DNA, 25 bp, Saccharomyces pastorianus
caacgaccgttccaattacgtgagt

SEQ ID NO: 31598 - DNA, 25 bp, Saccharomyces pastorianus
gaacatgccgaactatctcgtcaag

SEQ ID NO: 31599 - DNA, 25 bp, Saccharomyces pastorianus
gggtctgggcgagatcatcaagttc

SEQ ID NO: 31600 - DNA, 25 bp, Saccharomyces pastorianus
gagtccgctggtgtggctgatctaa

SEQ ID NO: 31601 - DNA, 25 bp, Saccharomyces pastorianus
ggagaatgttcttcccggaatccaa

SEQ ID NO: 31602 - DNA, 25 bp, Saccharomyces pastorianus
agttgacccaagaatacccactgtt

SEQ ID NO: 31603 - DNA, 25 bp, Saccharomyces pastorianus
gcaagtccgccctggaagcagaaaa

SEQ ID NO: 31604 - DNA, 25 bp, Saccharomyces pastorianus
ggtatctccattgcaggtgctttga

SEQ ID NO: 31605 - DNA, 25 bp, Saccharomyces pastorianus
aaggtcgctacgtacatggccaaga

SEQ ID NO: 31606 - DNA, 25 bp, Saccharomyces pastorianus
atcaccacatgttcaggcggcagaa

SEQ ID NO: 31607 - DNA, 25 bp, Saccharomyces pastorianus
aaggtcgagacctactaccaggagt

SEQ ID NO: 31608 - DNA, 25 bp, Saccharomyces pastorianus
atacccactgttcgaggcggtgtac

SEQ ID NO: 31609 - DNA, 25 bp, Saccharomyces pastorianus
gaaaaacgtcgtagcactggcctgc

SEQ ID NO: 31610 - DNA, 25 bp, Saccharomyces pastorianus
gaaacctctgtgaccaagcctttgg

SEQ ID NO: 31611 - DNA, 25 bp, Saccharomyces pastorianus
aattgaccgggttcttgcctactga

SEQ ID NO: 31612 - DNA, 25 bp, Saccharomyces pastorianus
gaggttgttacgaacaggccccatt

SEQ ID NO: 31613 - DNA, 25 bp, Saccharomyces pastorianus
tgatccaaccttcccaaaatagtgt

SEQ ID NO: 31614 - DNA, 25 bp, Saccharomyces pastorianus
ggtagcgtcagcatcttgggtagat

SEQ ID NO: 31615 - DNA, 25 bp, Saccharomyces pastorianus
aagcctttggacgtcttcttggcag

SEQ ID NO: 31616 - DNA, 25 bp, Saccharomyces pastorianus
aggccccattgaccgttttgagaag

SEQ ID NO: 31617 - DNA, 25 bp, Saccharomyces pastorianus
gatatacaacggttcctacttcacc

SEQ ID NO: 31618 - DNA, 25 bp, Saccharomyces pastorianus
ttcatcgccattcaagccatcagaa

SEQ ID NO: 31619 - DNA, 25 bp, Saccharomyces pastorianus
attgagagactccttcgttacacca

SEQ ID NO: 31620 - DNA, 25 bp, Saccharomyces pastorianus
gactatcgacttcgagcgtggtcta

SEQ ID NO: 31621 - DNA, 25 bp, Saccharomyces pastorianus
agtgtcgtgctgaagtaatcgccat

SEQ ID NO: 31622 - DNA, 25 bp, Saccharomyces pastorianus
gaatacgaagaaactccgcgaggca

SEQ ID NO: 31623 - DNA, 25 bp, Saccharomyces pastorianus
aaaactctcatcaagactgccgggc

SEQ ID NO: 31624 - DNA, 25 bp, Saccharomyces pastorianus
agactgccgggcttgagtgtgtaaa

SEQ ID NO: 31625 - DNA, 25 bp, Saccharomyces pastorianus
atgtttacaaatgctcaggtgacgt

SEQ ID NO: 31626 - DNA, 25 bp, Saccharomyces pastorianus
acaaatggcccgtgcaggtctattg

SEQ ID NO: 31627 - DNA, 25 bp, Saccharomyces pastorianus
gacaccagatttggcctctttgaga

SEQ ID NO: 31628 - DNA, 25 bp, Saccharomyces pastorianus
aaggactacttacaacgtttacatg

SEQ ID NO: 31629 - DNA, 25 bp, Saccharomyces pastorianus
attggcgctagaatattggaaccct

SEQ ID NO: 31630 - DNA, 25 bp, Saccharomyces pastorianus
ggatgacttcaccatcaagttggat

SEQ ID NO: 31631 - DNA, 25 bp, Saccharomyces pastorianus
ttagcgggtccctttgaagagtgtc

SEQ ID NO: 31632 - DNA, 25 bp, Saccharomyces pastorianus
taccctccagaggaccttgatattt

SEQ ID NO: 31633 - DNA, 25 bp, Saccharomyces pastorianus
gttgactacgctagagttcactgta

SEQ ID NO: 31634 - DNA, 25 bp, Saccharomyces pastorianus
gaaacttacagttctccatggtact

SEQ ID NO: 31635 - DNA, 25 bp, Saccharomyces pastorianus
gcctactctcgttacttcaatgatg

SEQ ID NO: 31636 - DNA, 25 bp, Saccharomyces pastorianus
gaactacttctaaatcacatcttgg

SEQ ID NO: 31637 - DNA, 25 bp, Saccharomyces pastorianus
ttggtgtcccagaccaagcatactt

SEQ ID NO: 31638 - DNA, 25 bp, Saccharomyces pastorianus
gaccagcattaaaggcctactctcg

SEQ ID NO: 31639 - DNA, 25 bp, Saccharomyces pastorianus
cgccttgactccttgtttaatgggt

SEQ ID NO: 31640 - DNA, 25 bp, Saccharomyces pastorianus
taaagtcactgcagctgagggttct

SEQ ID NO: 31641 - DNA, 25 bp, Saccharomyces pastorianus
gcaagagttagttgccgccttgact

SEQ ID NO: 31642 - DNA, 25 bp, Saccharomyces pastorianus
gctgagggttctgcttactacaagt

SEQ ID NO: 31643 - DNA, 25 bp, Saccharomyces pastorianus
gcgatgagcctatgcgggaacacat

SEQ ID NO: 31644 - DNA, 25 bp, Saccharomyces pastorianus
agagaactggtattgtccgcgctca

SEQ ID NO: 31645 - DNA, 25 bp, Saccharomyces pastorianus
atctacagatccctttgccaatgga

SEQ ID NO: 31646 - DNA, 25 bp, Saccharomyces pastorianus
gatgaacgcgacaccgaagaactgg

SEQ ID NO: 31647 - DNA, 25 bp, Saccharomyces pastorianus
aggccgctgggctaggtcacacaat

SEQ ID NO: 31648 - DNA, 25 bp, Saccharomyces pastorianus
gcgacagtcttgatgaaggccagaa

SEQ ID NO: 31649 - DNA, 25 bp, Saccharomyces pastorianus
tgaagatcgttccatttcttaccct

SEQ ID NO: 31650 - DNA, 25 bp, Saccharomyces pastorianus
gaagatgcccaagagcaagctcctg

SEQ ID NO: 31651 - DNA, 25 bp, Saccharomyces pastorianus
acacaatcgtagcatcgcggtggat

SEQ ID NO: 31652 - DNA, 25 bp, Saccharomyces pastorianus
aaagccgcagacatggattcgaatt

SEQ ID NO: 31653 - DNA, 25 bp, Saccharomyces pastorianus
gtccgcgctcaataacaggcaagtg

SEQ ID NO: 31654 - DNA, 25 bp, Saccharomyces pastorianus
gagtaacgctgctcctgctttgcac

SEQ ID NO: 31655 - DNA, 25 bp, Saccharomyces pastorianus
tagcgtaaatgctcaaaacgcatcc

SEQ ID NO: 31656 - DNA, 25 bp, Saccharomyces pastorianus
tgctttgcacgctcaaaatggtcaa

SEQ ID NO: 31657 - DNA, 25 bp, Saccharomyces pastorianus
aacaccacgagtaacgctgctcctg

SEQ ID NO: 31658 - DNA, 25 bp, Saccharomyces pastorianus
aatggtcaactactaaacgccggag

SEQ ID NO: 31659 - DNA, 25 bp, Saccharomyces pastorianus
tcctgctttgcacgctcaaaatggt

SEQ ID NO: 31660 - DNA, 25 bp, Saccharomyces pastorianus
tgcacgctcaaaatggtcaactact

SEQ ID NO: 31661 - DNA, 25 bp, Saccharomyces pastorianus
ggtcaactactaaacgccggagtcg

SEQ ID NO: 31662 - DNA, 25 bp, Saccharomyces pastorianus
tactaaacgccggagtcgtcggtgc

SEQ ID NO: 31663 - DNA, 25 bp, Saccharomyces pastorianus
gcatccaacaccacgagtaacgctg

SEQ ID NO: 31664 - DNA, 25 bp, Saccharomyces pastorianus
aaaacgcatccaacaccacgagtaa

SEQ ID NO: 31665 - DNA, 25 bp, Saccharomyces pastorianus
aggacgctattctcaactcgattga

SEQ ID NO: 31666 - DNA, 25 bp, Saccharomyces pastorianus
ttaccaaacctatctgcaaccttaa

SEQ ID NO: 31667 - DNA, 25 bp, Saccharomyces pastorianus
aagagcccttgctacacgatgatgc

SEQ ID NO: 31668 - DNA, 25 bp, Saccharomyces pastorianus
aaatacaccatttccaagagccctt

SEQ ID NO: 31669 - DNA, 25 bp, Saccharomyces pastorianus
atggcatcaccattctagttggctc

SEQ ID NO: 31670 - DNA, 25 bp, Saccharomyces pastorianus
ggcttgttgtttttgctatgcgtca

SEQ ID NO: 31671 - DNA, 25 bp, Saccharomyces pastorianus
aaacgggcttttgcttggaggcttg

SEQ ID NO: 31672 - DNA, 25 bp, Saccharomyces pastorianus
cataagaaactctccccgaatttgt

SEQ ID NO: 31673 - DNA, 25 bp, Saccharomyces pastorianus
atgaaacaattcctcgtaagcccca

SEQ ID NO: 31674 - DNA, 25 bp, Saccharomyces pastorianus
gcaatctttagacacgttccgacgg

SEQ ID NO: 31675 - DNA, 25 bp, Saccharomyces pastorianus
gtactgggccctttgtaagacatta

SEQ ID NO: 31676 - DNA, 25 bp, Saccharomyces pastorianus
atgcgttgatgtgcacgttcataga

SEQ ID NO: 31677 - DNA, 25 bp, Saccharomyces pastorianus
ttatgtctggcgaacgacgtttgta

SEQ ID NO: 31678 - DNA, 25 bp, Saccharomyces pastorianus
ggaactacaggcttggttacctcat

SEQ ID NO: 31679 - DNA, 25 bp, Saccharomyces pastorianus
attgggtggatcctatcaagtgcaa

SEQ ID NO: 31680 - DNA, 25 bp, Saccharomyces pastorianus
atcacggagtactgcttggacactt

SEQ ID NO: 31681 - DNA, 25 bp, Saccharomyces pastorianus
atcgtgtattcgcactggttggata

SEQ ID NO: 31682 - DNA, 25 bp, Saccharomyces pastorianus
ttttggctctgatataccgttcgat

SEQ ID NO: 31683 - DNA, 25 bp, Saccharomyces pastorianus
caagatgggctatttgacactgcaa

SEQ ID NO: 31684 - DNA, 25 bp, Saccharomyces pastorianus
ggttacctcattcgctatggtacga

SEQ ID NO: 31685 - DNA, 25 bp, Saccharomyces pastorianus
ggaattctatcattacctggcgttg

SEQ ID NO: 31686 - DNA, 25 bp, Saccharomyces pastorianus
gaaggtcttactctagatgggttac

SEQ ID NO: 31687 - DNA, 25 bp, Saccharomyces pastorianus
aacaacttcttccaggtgatgcaga

SEQ ID NO: 31688 - DNA, 25 bp, Saccharomyces pastorianus
ggtatcacgactcagacttcttatt

SEQ ID NO: 31689 - DNA, 25 bp, Saccharomyces pastorianus
gttgttaattttttgcagggccaga

SEQ ID NO: 31690 - DNA, 25 bp, Saccharomyces pastorianus
gcatcaagtcaattaggtctaccca

SEQ ID NO: 31691 - DNA, 25 bp, Saccharomyces pastorianus
gactatttcgtgcatacgtgctatt

SEQ ID NO: 31692 - DNA, 25 bp, Saccharomyces pastorianus
ggtatgcttattcgtgtccttgaaa

SEQ ID NO: 31693 - DNA, 25 bp, Saccharomyces pastorianus
gagaccgtatttggaccgttgtgtt

SEQ ID NO: 31694 - DNA, 25 bp, Saccharomyces pastorianus
aggtgactttaacagacggcgcttc

SEQ ID NO: 31695 - DNA, 25 bp, Saccharomyces pastorianus
agacggcgcttctaatgttattggc

SEQ ID NO: 31696 - DNA, 25 bp, Saccharomyces pastorianus
gaccgttgtgtttatgacgacatac

SEQ ID NO: 31697 - DNA, 25 bp, Saccharomyces pastorianus
tgacgacataccaagtgactatttc

SEQ ID NO: 31698 - DNA, 25 bp, Saccharomyces pastorianus
attgagagctgctaagttggctgct

SEQ ID NO: 31699 - DNA, 25 bp, Saccharomyces pastorianus
accccagttagaactcacatgagaa

SEQ ID NO: 31700 - DNA, 25 bp, Saccharomyces pastorianus
taagttggctgctccagaaagtgaa

SEQ ID NO: 31701 - DNA, 25 bp, Saccharomyces pastorianus
cagaaagtgaaaagccaaccccagt

SEQ ID NO: 31702 - DNA, 25 bp, Saccharomyces pastorianus
tcaagctgctaacgtcaagaagaga

SEQ ID NO: 31703 - DNA, 25 bp, Saccharomyces pastorianus
atgtctcaagctgctaacgtcaaga

SEQ ID NO: 31704 - DNA, 25 bp, Saccharomyces pastorianus
ctgctaagttggctgctccagaaag

SEQ ID NO: 31705 - DNA, 25 bp, Saccharomyces pastorianus
gctgctaacgtcaagaagagagttt

SEQ ID NO: 31706 - DNA, 25 bp, Saccharomyces pastorianus
gtctcaagctgctaacgtcaagaag

SEQ ID NO: 31707 - DNA, 25 bp, Saccharomyces pastorianus
cgtcaagaagagagttttcaagacc

SEQ ID NO: 31708 - DNA, 25 bp, Saccharomyces pastorianus
agccaaccccagttagaactcacat

SEQ ID NO: 31709 - DNA, 25 bp, Saccharomyces pastorianus
agctgctggcccagcctctgctggt

SEQ ID NO: 31710 - DNA, 25 bp, Saccharomyces pastorianus
agacgaaaaggtctcctccgtcttg

SEQ ID NO: 31711 - DNA, 25 bp, Saccharomyces pastorianus
gccaccaagatcaaggccgttttgg

SEQ ID NO: 31712 - DNA, 25 bp, Saccharomyces pastorianus
gatcaaggccgttttggaatccgtc

SEQ ID NO: 31713 - DNA, 25 bp, Saccharomyces pastorianus
gaaaaggtctcctccgtcttgtccg

SEQ ID NO: 31714 - DNA, 25 bp, Saccharomyces pastorianus
agcctctgctggtggcgctgctgct

SEQ ID NO: 31715 - DNA, 25 bp, Saccharomyces pastorianus
caccaagatcaaggccgttttggaa

SEQ ID NO: 31716 - DNA, 25 bp, Saccharomyces pastorianus
aggtctcctccgtcttgtccgcttt

SEQ ID NO: 31717 - DNA, 25 bp, Saccharomyces pastorianus
gaagacgaaaaggtctcctccgtct

SEQ ID NO: 31718 - DNA, 25 bp, Saccharomyces pastorianus
atcaaggccgttttggaatccgtcg

SEQ ID NO: 31719 - DNA, 25 bp, Saccharomyces pastorianus
gacgaaaaggtctcctccgtcttgt

SEQ ID NO: 31720 - DNA, 25 bp, Saccharomyces pastorianus
agctgctggcccagcctctgctggt

SEQ ID NO: 31721 - DNA, 25 bp, Saccharomyces pastorianus
gatcaaggccgttttggaatccgtc

SEQ ID NO: 31722 - DNA, 25 bp, Saccharomyces pastorianus
gccaccaagatcaaggccgttttgg

SEQ ID NO: 31723 - DNA, 25 bp, Saccharomyces pastorianus
gaaaaggtctcctccgtcttgtccg

SEQ ID NO: 31724 - DNA, 25 bp, Saccharomyces pastorianus
agcctctgctggtggcgctgctgct

SEQ ID NO: 31725 - DNA, 25 bp, Saccharomyces pastorianus
tacctattattgaacgctgctggca

SEQ ID NO: 31726 - DNA, 25 bp, Saccharomyces pastorianus
aggtctcctccgtcttgtccgcttt

SEQ ID NO: 31727 - DNA, 25 bp, Saccharomyces pastorianus
aaaagttggctgctgttccagctgc

SEQ ID NO: 31728 - DNA, 25 bp, Saccharomyces pastorianus
gaagacgaaaaggtctcctccgtct

SEQ ID NO: 31729 - DNA, 25 bp, Saccharomyces pastorianus
atcaaggccgttttggaatccgtcg

SEQ ID NO: 31730 - DNA, 25 bp, Saccharomyces pastorianus
gacgaaaaggtctcctccgtcttgt

SEQ ID NO: 31731 - DNA, 25 bp, Saccharomyces pastorianus
gtggaggcccagagtcatagactta

SEQ ID NO: 31732 - DNA, 25 bp, Saccharomyces pastorianus
gagtacgtcacccagatcgagcaag

SEQ ID NO: 31733 - DNA, 25 bp, Saccharomyces pastorianus
gaccagactcagaaatcgttgcctt

SEQ ID NO: 31734 - DNA, 25 bp, Saccharomyces pastorianus
tgtcgttttcgggtctaaatgcaga

SEQ ID NO: 31735 - DNA, 25 bp, Saccharomyces pastorianus
taatcgccggtttcgactcaagaga

SEQ ID NO: 31736 - DNA, 25 bp, Saccharomyces pastorianus
aagatcgactcgcatgtggttttgt

SEQ ID NO: 31737 - DNA, 25 bp, Saccharomyces pastorianus
gaagtcgtccagacaggtgccaaga

SEQ ID NO: 31738 - DNA, 25 bp, Saccharomyces pastorianus
agagtgtgtcaagcttaccgtaaga

SEQ ID NO: 31739 - DNA, 25 bp, Saccharomyces pastorianus
tatatactcctcgtggtctgcgcag

SEQ ID NO: 31740 - DNA, 25 bp, Saccharomyces pastorianus
agaccattcggtgtgtccacgctaa

SEQ ID NO: 31741 - DNA, 25 bp, Saccharomyces pastorianus
gcagcagagatacacgcagtccggt

SEQ ID NO: 31742 - DNA, 25 bp, Saccharomyces pastorianus
agcagatattattcccacactacac

SEQ ID NO: 31743 - DNA, 25 bp, Saccharomyces pastorianus
aaagaagttcgcgtcttgtgcgtgg

SEQ ID NO: 31744 - DNA, 25 bp, Saccharomyces pastorianus
ttgtcccctatatccactgtaagaa

SEQ ID NO: 31745 - DNA, 25 bp, Saccharomyces pastorianus
tctttacaaacgcagtccactatca

SEQ ID NO: 31746 - DNA, 25 bp, Saccharomyces pastorianus
tagtcccggtgttttctgtcacaga

SEQ ID NO: 31747 - DNA, 25 bp, Saccharomyces pastorianus
atcctacccaaggtcatcagcagat

SEQ ID NO: 31748 - DNA, 25 bp, Saccharomyces pastorianus
aggaggaaccacagcatcttctttg

SEQ ID NO: 31749 - DNA, 25 bp, Saccharomyces pastorianus
tggtcaaccgaacatcaacatccta

SEQ ID NO: 31750 - DNA, 25 bp, Saccharomyces pastorianus
tacgtggacatcttgagtcagcaac

SEQ ID NO: 31751 - DNA, 25 bp, Saccharomyces pastorianus
gaagtagtccgataacgccaagccc

SEQ ID NO: 31752 - DNA, 25 bp, Saccharomyces pastorianus
cacatcaaccgttcgtctttacaaa

SEQ ID NO: 31753 - DNA, 25 bp, Saccharomyces pastorianus
gaactcgtcgatgggatcatgcctt

SEQ ID NO: 31754 - DNA, 25 bp, Saccharomyces pastorianus
acggtgttacaaaattcctcagcaa

SEQ ID NO: 31755 - DNA, 25 bp, Saccharomyces pastorianus
aaacgatacgatttgctcttgcagg

SEQ ID NO: 31756 - DNA, 25 bp, Saccharomyces pastorianus
gatcatgccttcgttagagtccaaa

SEQ ID NO: 31757 - DNA, 25 bp, Saccharomyces pastorianus
gcacgagtgcttttcgatggattat

SEQ ID NO: 31758 - DNA, 25 bp, Saccharomyces pastorianus
gaatgaaactcaccatgttgttgaa

SEQ ID NO: 31759 - DNA, 25 bp, Saccharomyces pastorianus
taatgcatctacgttaaatcgcgag

SEQ ID NO: 31760 - DNA, 25 bp, Saccharomyces pastorianus
ggatcaacgacttttgtgacgagtt

SEQ ID NO: 31761 - DNA, 25 bp, Saccharomyces pastorianus
gtgaacacggcttctctaaaaacgt

SEQ ID NO: 31762 - DNA, 25 bp, Saccharomyces pastorianus
tgcaggatgccattccggcgccaaa

SEQ ID NO: 31763 - DNA, 25 bp, Saccharomyces pastorianus
atctatgatcgacacgatgtgccgt

SEQ ID NO: 31764 - DNA, 25 bp, Saccharomyces pastorianus
aaagtgcaaataccgagctccaaga

SEQ ID NO: 31765 - DNA, 25 bp, Saccharomyces pastorianus
cgggcttccttgatagtcagggcaa

SEQ ID NO: 31766 - DNA, 25 bp, Saccharomyces pastorianus
gaattggccgcgaagattgtacaac

SEQ ID NO: 31767 - DNA, 25 bp, Saccharomyces pastorianus
acaggattttgtagccacggtttat

SEQ ID NO: 31768 - DNA, 25 bp, Saccharomyces pastorianus
atacttcctaatgtgacctttccac

SEQ ID NO: 31769 - DNA, 25 bp, Saccharomyces pastorianus
gaaatattaccacagcgggacaatt

SEQ ID NO: 31770 - DNA, 25 bp, Saccharomyces pastorianus
gtgtacccctctttgacacaagaat

SEQ ID NO: 31771 - DNA, 25 bp, Saccharomyces pastorianus
tgcatataactatctctcgggcttc

SEQ ID NO: 31772 - DNA, 25 bp, Saccharomyces pastorianus
aacaattcattggttctgtcgagac

SEQ ID NO: 31773 - DNA, 25 bp, Saccharomyces pastorianus
tggttcgggagctaatgacatgtca

SEQ ID NO: 31774 - DNA, 25 bp, Saccharomyces pastorianus
ggacaattagcacaggtgtacccct

SEQ ID NO: 31775 - DNA, 25 bp, Saccharomyces pastorianus
gatttcctgaattggttagcacaac

SEQ ID NO: 31776 - DNA, 25 bp, Saccharomyces pastorianus
gagctacccataacgtcccgggatt

SEQ ID NO: 31777 - DNA, 25 bp, Saccharomyces pastorianus
ggcacttgctttttggaaatcctat

SEQ ID NO: 31778 - DNA, 25 bp, Saccharomyces pastorianus
gacgaagtcacgaatctagcattgt

SEQ ID NO: 31779 - DNA, 25 bp, Saccharomyces pastorianus
ggattttcccctatattctacaaca

SEQ ID NO: 31780 - DNA, 25 bp, Saccharomyces pastorianus
gagctgcacacgagaactttctttg

SEQ ID NO: 31781 - DNA, 25 bp, Saccharomyces pastorianus
acaaggacatagacgagctgcacac

SEQ ID NO: 31782 - DNA, 25 bp, Saccharomyces pastorianus
gacgttgaacaagactcattcgata

SEQ ID NO: 31783 - DNA, 25 bp, Saccharomyces pastorianus
aagccaaataatggccactttgtca

SEQ ID NO: 31784 - DNA, 25 bp, Saccharomyces pastorianus
atccattttaaacgagctacccata

SEQ ID NO: 31785 - DNA, 25 bp, Saccharomyces pastorianus
aaactcatcgacagcaggcacttgc

SEQ ID NO: 31786 - DNA, 25 bp, Saccharomyces pastorianus
aagacagtgacgatagctcctcttc

SEQ ID NO: 31787 - DNA, 25 bp, Saccharomyces pastorianus
gtacttctaacaactactctggctg

SEQ ID NO: 31788 - DNA, 25 bp, Saccharomyces pastorianus
gggaagctaacaataccttgcccgc

SEQ ID NO: 31789 - DNA, 25 bp, Saccharomyces pastorianus
ggcctccactagtgatgcaagcgtg

SEQ ID NO: 31790 - DNA, 25 bp, Saccharomyces pastorianus
gagtcatcgtcgtctacttcagaag

SEQ ID NO: 31791 - DNA, 25 bp, Saccharomyces pastorianus
atcctctagccaatcttctacaaaa

SEQ ID NO: 31792 - DNA, 25 bp, Saccharomyces pastorianus
ttctgtgttctctggtgggttagta

SEQ ID NO: 31793 - DNA, 25 bp, Saccharomyces pastorianus
actctggctgtcctgactacgaaaa

SEQ ID NO: 31794 - DNA, 25 bp, Saccharomyces pastorianus
tgagattccattaattttccgtgct

SEQ ID NO: 31795 - DNA, 25 bp, Saccharomyces pastorianus
aagtgctgcttctgcctatttcaag

SEQ ID NO: 31796 - DNA, 25 bp, Saccharomyces pastorianus
aaagtctctgatccccaaggtgatg

SEQ ID NO: 31797 - DNA, 25 bp, Saccharomyces pastorianus
aaggacgctacattagtcaccacca

SEQ ID NO: 31798 - DNA, 25 bp, Saccharomyces pastorianus
gagagaacacgtccctgatgatatc

SEQ ID NO: 31799 - DNA, 25 bp, Saccharomyces pastorianus
gaaacaactatgactgaggcccaag

SEQ ID NO: 31800 - DNA, 25 bp, Saccharomyces pastorianus
gtactacgacggtatcttgcaggta

SEQ ID NO: 31801 - DNA, 25 bp, Saccharomyces pastorianus
agtcttcctccgctgaaactgaagc

SEQ ID NO: 31802 - DNA, 25 bp, Saccharomyces pastorianus
gcagtcgctcctaagctagtcaaaa

SEQ ID NO: 31803 - DNA, 25 bp, Saccharomyces pastorianus
gattccgctgaaaccgccgagacga

SEQ ID NO: 31804 - DNA, 25 bp, Saccharomyces pastorianus
cccagatcccgtttataatgttgcc

SEQ ID NO: 31805 - DNA, 25 bp, Saccharomyces pastorianus
ttgcaggtactaagctccatcccag

SEQ ID NO: 31806 - DNA, 25 bp, Saccharomyces pastorianus
agaagacctctgacgacaatgaatt

SEQ ID NO: 31807 - DNA, 25 bp, Saccharomyces pastorianus
acgtatctgaatccaagtcttcctc

SEQ ID NO: 31808 - DNA, 25 bp, Saccharomyces pastorianus
gatacagagaatgccggactccgac

SEQ ID NO: 31809 - DNA, 25 bp, Saccharomyces pastorianus
ttttatgggctcttgctctatcaac

SEQ ID NO: 31810 - DNA, 25 bp, Saccharomyces pastorianus
atgatgctcgggttcggcgaactgt

SEQ ID NO: 31811 - DNA, 25 bp, Saccharomyces pastorianus
gaactgtttgcccatgagctgtgct

SEQ ID NO: 31812 - DNA, 25 bp, Saccharomyces pastorianus
acaaagcctggtgtcttttatgggc

SEQ ID NO: 31813 - DNA, 25 bp, Saccharomyces pastorianus
aaggtgtacccggaatcgcgcaagg

SEQ ID NO: 31814 - DNA, 25 bp, Saccharomyces pastorianus
gtaactgcacttgacgagccttcaa

SEQ ID NO: 31815 - DNA, 25 bp, Saccharomyces pastorianus
acgagggccggctggtacaaagcct

SEQ ID NO: 31816 - DNA, 25 bp, Saccharomyces pastorianus
ggttcaactggttcaatcgcagaaa

SEQ ID NO: 31817 - DNA, 25 bp, Saccharomyces pastorianus
agctgtgctggaggttcaactggtt

SEQ ID NO: 31818 - DNA, 25 bp, Saccharomyces pastorianus
aagcttctgggaaagcagctcggat

SEQ ID NO: 31819 - DNA, 25 bp, Saccharomyces pastorianus
ctgggtctgctgaggcagtctcaga

SEQ ID NO: 31820 - DNA, 25 bp, Saccharomyces pastorianus
acccggtgataaaattctggcttat

SEQ ID NO: 31821 - DNA, 25 bp, Saccharomyces pastorianus
gtatacctgctgaaagcgacttgaa

SEQ ID NO: 31822 - DNA, 25 bp, Saccharomyces pastorianus
cacatttgagaacgcttttgaaggt

SEQ ID NO: 31823 - DNA, 25 bp, Saccharomyces pastorianus
gtaatcaacaatagggctggcatca

SEQ ID NO: 31824 - DNA, 25 bp, Saccharomyces pastorianus
gtcattttcgatggaacgctctcaa

SEQ ID NO: 31825 - DNA, 25 bp, Saccharomyces pastorianus
ggaacgctctcaactctaaaacata

SEQ ID NO: 31826 - DNA, 25 bp, Saccharomyces pastorianus
acaatcctgtgcttcaatttgggta

SEQ ID NO: 31827 - DNA, 25 bp, Saccharomyces pastorianus
aacgtcatatcttcttctgtcggta

SEQ ID NO: 31828 - DNA, 25 bp, Saccharomyces pastorianus
ttcttctgtcggtatacctgctgaa

SEQ ID NO: 31829 - DNA, 25 bp, Saccharomyces pastorianus
tcaagtgtgatgtctctgggtctgc

SEQ ID NO: 31830 - DNA, 25 bp, Saccharomyces pastorianus
gtgggagaccattactatatgctga

SEQ ID NO: 31831 - DNA, 25 bp, Saccharomyces pastorianus
tgcaagtttcttgacgatgacgtat

SEQ ID NO: 31832 - DNA, 25 bp, Saccharomyces pastorianus
aaaggcttctgcaaaggctgccaga

SEQ ID NO: 31833 - DNA, 25 bp, Saccharomyces pastorianus
tcaagaggtggtcggttacaaccca

SEQ ID NO: 31834 - DNA, 25 bp, Saccharomyces pastorianus
aagacccgatcaagttggacccaag

SEQ ID NO: 31835 - DNA, 25 bp, Saccharomyces pastorianus
aagacctggttacaacccatcaagc

SEQ ID NO: 31836 - DNA, 25 bp, Saccharomyces pastorianus
tgaacacggtgttggctatgtagaa

SEQ ID NO: 31837 - DNA, 25 bp, Saccharomyces pastorianus
ggctgccagaaaactgcacgattca

SEQ ID NO: 31838 - DNA, 25 bp, Saccharomyces pastorianus
ttttatcaacgctgccaagacctgg

SEQ ID NO: 31839 - DNA, 25 bp, Saccharomyces pastorianus
gccagcacatttgcaactacctaag

SEQ ID NO: 31840 - DNA, 25 bp, Saccharomyces pastorianus
gcaccatccttgtttttaccgatgt

SEQ ID NO: 31841 - DNA, 25 bp, Saccharomyces pastorianus
ttcgggttactagcctttctggtca

SEQ ID NO: 31842 - DNA, 25 bp, Saccharomyces pastorianus
attgctggtctagccacgtgtatag

SEQ ID NO: 31843 - DNA, 25 bp, Saccharomyces pastorianus
atggcaaactcgctgttcgggttac

SEQ ID NO: 31844 - DNA, 25 bp, Saccharomyces pastorianus
cggcagaccgctagttggcattatg

SEQ ID NO: 31845 - DNA, 25 bp, Saccharomyces pastorianus
ctacctctgcgctttaatcatgtta

SEQ ID NO: 31846 - DNA, 25 bp, Saccharomyces pastorianus
gttttactgttctttatggcccatt

SEQ ID NO: 31847 - DNA, 25 bp, Saccharomyces pastorianus
gatattcttccaaaactacctctgc

SEQ ID NO: 31848 - DNA, 25 bp, Saccharomyces pastorianus
caggttccatggcagacatcttcaa

SEQ ID NO: 31849 - DNA, 25 bp, Saccharomyces pastorianus
gttattcatattcgtcacccacaag

SEQ ID NO: 31850 - DNA, 25 bp, Saccharomyces pastorianus
gacatcttcaattggctcatggcca

SEQ ID NO: 31851 - DNA, 25 bp, Saccharomyces pastorianus
gtactccgcattaatcaactgcctg

SEQ ID NO: 31852 - DNA, 25 bp, Saccharomyces pastorianus
gacacttccgcagaggcgtatttga

SEQ ID NO: 31853 - DNA, 25 bp, Saccharomyces pastorianus
atcctactgttaacattatgcgtga

SEQ ID NO: 31854 - DNA, 25 bp, Saccharomyces pastorianus
aaaagcgggagggtcttgatattga

SEQ ID NO: 31855 - DNA, 25 bp, Saccharomyces pastorianus
acaatctagagaacacagtcgtgga

SEQ ID NO: 31856 - DNA, 25 bp, Saccharomyces pastorianus
attgccaagcacaattgaggtgaca

SEQ ID NO: 31857 - DNA, 25 bp, Saccharomyces pastorianus
gcgtgattacattgtttttcttcgt

SEQ ID NO: 31858 - DNA, 25 bp, Saccharomyces pastorianus
gaactgaataaagctacacattacc

SEQ ID NO: 31859 - DNA, 25 bp, Saccharomyces pastorianus
atgttgaaaccacatagtagcggtg

SEQ ID NO: 31860 - DNA, 25 bp, Saccharomyces pastorianus
aacagcaactgcatgacacttccgc

SEQ ID NO: 31861 - DNA, 25 bp, Saccharomyces pastorianus
ggacgttacaaaggcaacagcaact

SEQ ID NO: 31862 - DNA, 25 bp, Saccharomyces pastorianus
cattgtttttcttcgttatgttgaa

SEQ ID NO: 31863 - DNA, 25 bp, Saccharomyces pastorianus
gggcaaactggatcagctccaatcc

SEQ ID NO: 31864 - DNA, 25 bp, Saccharomyces pastorianus
tcttgctatcataacttggacgctg

SEQ ID NO: 31865 - DNA, 25 bp, Saccharomyces pastorianus
agcataacatttccctgagtacttg

SEQ ID NO: 31866 - DNA, 25 bp, Saccharomyces pastorianus
ttgccccagttttaaagacgtctcg

SEQ ID NO: 31867 - DNA, 25 bp, Saccharomyces pastorianus
tagcgccttccaaacgtattaaatc

SEQ ID NO: 31868 - DNA, 25 bp, Saccharomyces pastorianus
tgatctccctctttcagtaatcgaa

SEQ ID NO: 31869 - DNA, 25 bp, Saccharomyces pastorianus
agcttctccaaattatacgcctgat

SEQ ID NO: 31870 - DNA, 25 bp, Saccharomyces pastorianus
taatcgaaccgctaaatccttctgc

SEQ ID NO: 31871 - DNA, 25 bp, Saccharomyces pastorianus
aagacgtctcggaaatagcgccttc

SEQ ID NO: 31872 - DNA, 25 bp, Saccharomyces pastorianus
tcctgacccctacagaaaagcttca

SEQ ID NO: 31873 - DNA, 25 bp, Saccharomyces pastorianus
tgagtacttgtggacgctttcgaaa

SEQ ID NO: 31874 - DNA, 25 bp, Saccharomyces pastorianus
ggcgaatcaaaatgttccacctatg

SEQ ID NO: 31875 - DNA, 25 bp, Saccharomyces pastorianus
gttcccactgcaacaaaccgataat

SEQ ID NO: 31876 - DNA, 25 bp, Saccharomyces pastorianus
aaccgataatacttccggcgaatca

SEQ ID NO: 31877 - DNA, 25 bp, Saccharomyces pastorianus
atgaactaattcattccccgaacca

SEQ ID NO: 31878 - DNA, 25 bp, Saccharomyces pastorianus
acgttctcaaacctgtcctatatgt

SEQ ID NO: 31879 - DNA, 25 bp, Saccharomyces pastorianus
gagacagagttaattcctaccagga

SEQ ID NO: 31880 - DNA, 25 bp, Saccharomyces pastorianus
cagcgtcatccaacacgtggtatac

SEQ ID NO: 31881 - DNA, 25 bp, Saccharomyces pastorianus
atatactccacttgtcatgcttaaa

SEQ ID NO: 31882 - DNA, 25 bp, Saccharomyces pastorianus
gaaagccacgaaccaaactctgagc

SEQ ID NO: 31883 - DNA, 25 bp, Saccharomyces pastorianus
atgtcagcatcaatgccagcgtcat

SEQ ID NO: 31884 - DNA, 25 bp, Saccharomyces pastorianus
tcctaccaggacaatttctcatgat

SEQ ID NO: 31885 - DNA, 25 bp, Saccharomyces pastorianus
ttgattagagccactatcgcttccg

SEQ ID NO: 31886 - DNA, 25 bp, Saccharomyces pastorianus
cggccagagctggtttgcagttccc

SEQ ID NO: 31887 - DNA, 25 bp, Saccharomyces pastorianus
tatcgcttccggtggtgttttgcct

SEQ ID NO: 31888 - DNA, 25 bp, Saccharomyces pastorianus
gctggtaatgctgccaaggatttga

SEQ ID NO: 31889 - DNA, 25 bp, Saccharomyces pastorianus
gttacctgaagagacacgccacggg

SEQ ID NO: 31890 - DNA, 25 bp, Saccharomyces pastorianus
tggcgctaaagatggcggttcgtta

SEQ ID NO: 31891 - DNA, 25 bp, Saccharomyces pastorianus
ggcggttcgttaagatcccaatctt

SEQ ID NO: 31892 - DNA, 25 bp, Saccharomyces pastorianus
gaggtaaaggtaagtctggcgctaa

SEQ ID NO: 31893 - DNA, 25 bp, Saccharomyces pastorianus
cacgccacgggcaaaacaagggtag

SEQ ID NO: 31894 - DNA, 25 bp, Saccharomyces pastorianus
aactgcggaagtgctggaactggct

SEQ ID NO: 31895 - DNA, 25 bp, Saccharomyces pastorianus
tgcagttccccgttggtagaattaa

SEQ ID NO: 31896 - DNA, 25 bp, Saccharomyces pastorianus
ggcctgaagcttctaaatcatcctc

SEQ ID NO: 31897 - DNA, 25 bp, Saccharomyces pastorianus
gaaataactttaccgacgatcctga

SEQ ID NO: 31898 - DNA, 25 bp, Saccharomyces pastorianus
agcgttaaatatcactctgcctcca

SEQ ID NO: 31899 - DNA, 25 bp, Saccharomyces pastorianus
ggcaactgcaaattctggatcacat

SEQ ID NO: 31900 - DNA, 25 bp, Saccharomyces pastorianus
gtcagctacggcaacccttgagaaa

SEQ ID NO: 31901 - DNA, 25 bp, Saccharomyces pastorianus
tgatcttcaatacatcccacctttg

SEQ ID NO: 31902 - DNA, 25 bp, Saccharomyces pastorianus
accttttttggctgcgacgctaata

SEQ ID NO: 31903 - DNA, 25 bp, Saccharomyces pastorianus
atgtgaaacctgcttctcgaactac

SEQ ID NO: 31904 - DNA, 25 bp, Saccharomyces pastorianus
gaagatcatctcattgggcctgaag

SEQ ID NO: 31905 - DNA, 25 bp, Saccharomyces pastorianus
tggtcgtctatctacctaatgcaga

SEQ ID NO: 31906 - DNA, 25 bp, Saccharomyces pastorianus
actgctggaatggtactctggacac

SEQ ID NO: 31907 - DNA, 25 bp, Saccharomyces pastorianus
tggtgatgcaggctctatacccgaa

SEQ ID NO: 31908 - DNA, 25 bp, Saccharomyces pastorianus
gggtataactttggtggctgaatcc

SEQ ID NO: 31909 - DNA, 25 bp, Saccharomyces pastorianus
gtaagtccgtcactcgtaaatagaa

SEQ ID NO: 31910 - DNA, 25 bp, Saccharomyces pastorianus
ctggttgttgactctttgattgctc

SEQ ID NO: 31911 - DNA, 25 bp, Saccharomyces pastorianus
aaagcgctgctgtcggtagaagtca

SEQ ID NO: 31912 - DNA, 25 bp, Saccharomyces pastorianus
aaagttggagctatttcgccgaaga

SEQ ID NO: 31913 - DNA, 25 bp, Saccharomyces pastorianus
ttgctcaaccaatcacgatgcatga

SEQ ID NO: 31914 - DNA, 25 bp, Saccharomyces pastorianus
atcaccggagtagcgtactctacaa

SEQ ID NO: 31915 - DNA, 25 bp, Saccharomyces pastorianus
gacccataatttcttcaatcaccgg

SEQ ID NO: 31916 - DNA, 25 bp, Saccharomyces pastorianus
gaagtcaacttccactagcaatcgt

SEQ ID NO: 31917 - DNA, 25 bp, Saccharomyces pastorianus
agcaatcgtatacatggtcatcgga

SEQ ID NO: 31918 - DNA, 25 bp, Saccharomyces pastorianus
gaaacctcttctcattctggtgaga

SEQ ID NO: 31919 - DNA, 25 bp, Saccharomyces pastorianus
aggtgctattctattgtcgctaaca

SEQ ID NO: 31920 - DNA, 25 bp, Saccharomyces pastorianus
taaggaacgtactgctgcccagata

SEQ ID NO: 31921 - DNA, 25 bp, Saccharomyces pastorianus
aggatcctcatctgttctgaaccta

SEQ ID NO: 31922 - DNA, 25 bp, Saccharomyces pastorianus
tctggagacaactctacgccgaagt

SEQ ID NO: 31923 - DNA, 25 bp, Saccharomyces pastorianus
acgccgaagtccaacgctagtcaag

SEQ ID NO: 31924 - DNA, 25 bp, Saccharomyces pastorianus
tgagattctgcagcgcgatgccaat

SEQ ID NO: 31925 - DNA, 25 bp, Saccharomyces pastorianus
ggacaagtcgtctcgtatgagtcta

SEQ ID NO: 31926 - DNA, 25 bp, Saccharomyces pastorianus
gatgtttgagtccttatccagcact

SEQ ID NO: 31927 - DNA, 25 bp, Saccharomyces pastorianus
aatttaggccctgattctggagaca

SEQ ID NO: 31928 - DNA, 25 bp, Saccharomyces pastorianus
aggtcttctatgtttatctctccaa

SEQ ID NO: 31929 - DNA, 25 bp, Saccharomyces pastorianus
gctgacgcaacataggatccgtttt

SEQ ID NO: 31930 - DNA, 25 bp, Saccharomyces pastorianus
gacgttcaatgaaggtggcgagcaa

SEQ ID NO: 31931 - DNA, 25 bp, Saccharomyces pastorianus
ggctagaatcgctattcgactctca

SEQ ID NO: 31932 - DNA, 25 bp, Saccharomyces pastorianus
tgaggcgaaatcaccccaacttgaa

SEQ ID NO: 31933 - DNA, 25 bp, Saccharomyces pastorianus
aactcctatgaatttctttgttctt

SEQ ID NO: 31934 - DNA, 25 bp, Saccharomyces pastorianus
gaagatattatgctctcgcttccct

SEQ ID NO: 31935 - DNA, 25 bp, Saccharomyces pastorianus
atctcaaattgaatcctgggacatg

SEQ ID NO: 31936 - DNA, 25 bp, Saccharomyces pastorianus
tgcccaaagtggtagatctgctatt

SEQ ID NO: 31937 - DNA, 25 bp, Saccharomyces pastorianus
atggccatttggtgctcctacagga

SEQ ID NO: 31938 - DNA, 25 bp, Saccharomyces pastorianus
aataatatatcttggtcccctccat

SEQ ID NO: 31939 - DNA, 25 bp, Saccharomyces pastorianus
ttggaagatccatcctgaggcgaaa

SEQ ID NO: 31940 - DNA, 25 bp, Saccharomyces pastorianus
ttacactaaattctttgaccgccca

SEQ ID NO: 31941 - DNA, 25 bp, Saccharomyces pastorianus
cacctgagtctcactattcacaaaa

SEQ ID NO: 31942 - DNA, 25 bp, Saccharomyces pastorianus
gatttactacagaccgcgtatccag

SEQ ID NO: 31943 - DNA, 25 bp, Saccharomyces pastorianus
tatgttctcccgtccaattttaatg

SEQ ID NO: 31944 - DNA, 25 bp, Saccharomyces pastorianus
gaccgcgtatccagattttacacta

SEQ ID NO: 31945 - DNA, 25 bp, Saccharomyces pastorianus
aggttcttttaatgcttcaccagat

SEQ ID NO: 31946 - DNA, 25 bp, Saccharomyces pastorianus
aaaggcttgtgcgattcattctcta

SEQ ID NO: 31947 - DNA, 25 bp, Saccharomyces pastorianus
aaagtggtactcgacttcagcaacc

SEQ ID NO: 31948 - DNA, 25 bp, Saccharomyces pastorianus
gactgactaaattctcttctctgga

SEQ ID NO: 31949 - DNA, 25 bp, Saccharomyces pastorianus
ggtttttattgacagctactacggt

SEQ ID NO: 31950 - DNA, 25 bp, Saccharomyces pastorianus
agcaacccaaagcatcacctgagtc

SEQ ID NO: 31951 - DNA, 25 bp, Saccharomyces pastorianus
aagcatcttcttccatatgtactaa

SEQ ID NO: 31952 - DNA, 25 bp, Saccharomyces pastorianus
tacgttgtgtcttttctactaacca

SEQ ID NO: 31953 - DNA, 25 bp, Saccharomyces pastorianus
gtatatcgccatgggcttatatcat

SEQ ID NO: 31954 - DNA, 25 bp, Saccharomyces pastorianus
taactcctggtccatccattagtag

SEQ ID NO: 31955 - DNA, 25 bp, Saccharomyces pastorianus
atgttctatgtcgttctttctcttc

SEQ ID NO: 31956 - DNA, 25 bp, Saccharomyces pastorianus
tagatctatttgtagcgcctccaac

SEQ ID NO: 31957 - DNA, 25 bp, Saccharomyces pastorianus
gttgctttgttcactttatggcctt

SEQ ID NO: 31958 - DNA, 25 bp, Saccharomyces pastorianus
ctttctcttcagttttcaggttcac

SEQ ID NO: 31959 - DNA, 25 bp, Saccharomyces pastorianus
gaagaagtctgttgccctataatgt

SEQ ID NO: 31960 - DNA, 25 bp, Saccharomyces pastorianus
tatccggacttgtgggtgctgttaa

SEQ ID NO: 31961 - DNA, 25 bp, Saccharomyces pastorianus
tagttgccacagttctcggtttttt

SEQ ID NO: 31962 - DNA, 25 bp, Saccharomyces pastorianus
atggctgcacctcacgttgctggta

SEQ ID NO: 31963 - DNA, 25 bp, Saccharomyces pastorianus
tttatctacctatattggctcgaga

SEQ ID NO: 31964 - DNA, 25 bp, Saccharomyces pastorianus
aagtggtgttcatttcgctatcgca

SEQ ID NO: 31965 - DNA, 25 bp, Saccharomyces pastorianus
ctttctttcattacaacctagctca

SEQ ID NO: 31966 - DNA, 25 bp, Saccharomyces pastorianus
tctactgctaacctatccttgggaa

SEQ ID NO: 31967 - DNA, 25 bp, Saccharomyces pastorianus
tttatcaggcacctcaatggctgca

SEQ ID NO: 31968 - DNA, 25 bp, Saccharomyces pastorianus
aggaggccccaagttcaaaggatct

SEQ ID NO: 31969 - DNA, 25 bp, Saccharomyces pastorianus
gttcaggaccacatagattcatcaa

SEQ ID NO: 31970 - DNA, 25 bp, Saccharomyces pastorianus
gattttttcgatggcactgtttcac

SEQ ID NO: 31971 - DNA, 25 bp, Saccharomyces pastorianus
ggcactgtttcacctcaacaattga

SEQ ID NO: 31972 - DNA, 25 bp, Saccharomyces pastorianus
gaagatgcctgtttgagctcaccag

SEQ ID NO: 31973 - DNA, 25 bp, Saccharomyces pastorianus
aagaaccctgcccttagaaacatgg

SEQ ID NO: 31974 - DNA, 25 bp, Saccharomyces pastorianus
aacatggcgggcagtctatttggtg

SEQ ID NO: 31975 - DNA, 25 bp, Saccharomyces pastorianus
aggctctttactaggtggtggtctt

SEQ ID NO: 31976 - DNA, 25 bp, Saccharomyces pastorianus
ctatttggtggagcggatgccccat

SEQ ID NO: 31977 - DNA, 25 bp, Saccharomyces pastorianus
gctttacttctggtggaggaactcc

SEQ ID NO: 31978 - DNA, 25 bp, Saccharomyces pastorianus
gcagcagcccattcatctttgaaag

SEQ ID NO: 31979 - DNA, 25 bp, Saccharomyces pastorianus
acaaccaagggatgctggcgccaat

SEQ ID NO: 31980 - DNA, 25 bp, Saccharomyces pastorianus
gcggattaccagatctaggctcttt

SEQ ID NO: 31981 - DNA, 25 bp, Saccharomyces pastorianus
atctattacgccaacagagcagcag

SEQ ID NO: 31982 - DNA, 25 bp, Saccharomyces pastorianus
caatgctggccaaggtgctggtgca

SEQ ID NO: 31983 - DNA, 25 bp, Saccharomyces pastorianus
gatgagcaatcctggtgctatgcaa

SEQ ID NO: 31984 - DNA, 25 bp, Saccharomyces pastorianus
gtctcctctttgttgaccatgttgc

SEQ ID NO: 31985 - DNA, 25 bp, Saccharomyces pastorianus
aaggcgtctactactgcttccggtt

SEQ ID NO: 31986 - DNA, 25 bp, Saccharomyces pastorianus
tctactcaagctaagacctcttctg

SEQ ID NO: 31987 - DNA, 25 bp, Saccharomyces pastorianus
ggtttctctttgtccagtttgccat

SEQ ID NO: 31988 - DNA, 25 bp, Saccharomyces pastorianus
tctgctgttgcttcttcgtctgctg

SEQ ID NO: 31989 - DNA, 25 bp, Saccharomyces pastorianus
tatttcccaaatctctgacggtcaa

SEQ ID NO: 31990 - DNA, 25 bp, Saccharomyces pastorianus
ttaggaacttctacctctgctgctg

SEQ ID NO: 31991 - DNA, 25 bp, Saccharomyces pastorianus
tggacgttggtatggctctggcttc

SEQ ID NO: 31992 - DNA, 25 bp, Saccharomyces pastorianus
tctgaaattgacttcggtgccgtct

SEQ ID NO: 31993 - DNA, 25 bp, Saccharomyces pastorianus
ggaaccagctttggaatccttgtta

SEQ ID NO: 31994 - DNA, 25 bp, Saccharomyces pastorianus
aagctactaataccgtttctcaaca

SEQ ID NO: 31995 - DNA, 25 bp, Saccharomyces pastorianus
taaaggttgaagtcccactgtttgt

SEQ ID NO: 31996 - DNA, 25 bp, Saccharomyces pastorianus
atgcaatggcattcaaagctctaaa

SEQ ID NO: 31997 - DNA, 25 bp, Saccharomyces pastorianus
gtcccactgtttgttcaattggcta

SEQ ID NO: 31998 - DNA, 25 bp, Saccharomyces pastorianus
gaaaaggaccagtatgcagccaatg

SEQ ID NO: 31999 - DNA, 25 bp, Saccharomyces pastorianus
tgaagtaatcgaaccattggaattt

SEQ ID NO: 32000 - DNA, 25 bp, Saccharomyces pastorianus
gtgcgaaagaaactcaacaacgtaa

SEQ ID NO: 32001 - DNA, 25 bp, Saccharomyces pastorianus
gcagccaatgagagaatgaatccag

SEQ ID NO: 32002 - DNA, 25 bp, Saccharomyces pastorianus
agatccttatatgcttgttgaacag

SEQ ID NO: 32003 - DNA, 25 bp, Saccharomyces pastorianus
caggctattaattcaggctcgtgga

SEQ ID NO: 32004 - DNA, 25 bp, Saccharomyces pastorianus
tctgcccataatatttcctgcatta

SEQ ID NO: 32005 - DNA, 25 bp, Saccharomyces pastorianus
aaatgccgaagttattctgcccata

SEQ ID NO: 32006 - DNA, 25 bp, Saccharomyces pastorianus
tgaaaccaaggaagtccctcacctg

SEQ ID NO: 32007 - DNA, 25 bp, Saccharomyces pastorianus
ggctgctgtgacatcttactttaca

SEQ ID NO: 32008 - DNA, 25 bp, Saccharomyces pastorianus
acattcgttgctacggctgctgtga

SEQ ID NO: 32009 - DNA, 25 bp, Saccharomyces pastorianus
gacatcttactttacaatgaagcca

SEQ ID NO: 32010 - DNA, 25 bp, Saccharomyces pastorianus
tggccatatctacattcgttgctac

SEQ ID NO: 32011 - DNA, 25 bp, Saccharomyces pastorianus
gagaaaccgtcaacagcgaatgctg

SEQ ID NO: 32012 - DNA, 25 bp, Saccharomyces pastorianus
ggcagaactgttcaacctcatgtat

SEQ ID NO: 32013 - DNA, 25 bp, Saccharomyces pastorianus
tgttcaacctcatgtattggccata

SEQ ID NO: 32014 - DNA, 25 bp, Saccharomyces pastorianus
gaatggtgagaaaccgtcaacagcg

SEQ ID NO: 32015 - DNA, 25 bp, Saccharomyces pastorianus
tccctcacctgaaccaacagaatgg

SEQ ID NO: 32016 - DNA, 25 bp, Saccharomyces pastorianus
cagcgaatgctgatgggaaagatga

SEQ ID NO: 32017 - DNA, 25 bp, Saccharomyces pastorianus
gtagaccaatcctaccagagggtat

SEQ ID NO: 32018 - DNA, 25 bp, Saccharomyces pastorianus
gtcgttaccaaagaacaccactgaa

SEQ ID NO: 32019 - DNA, 25 bp, Saccharomyces pastorianus
acatatcctaatctgctggtgggta

SEQ ID NO: 32020 - DNA, 25 bp, Saccharomyces pastorianus
gtatattaggtgaccatcctccaag

SEQ ID NO: 32021 - DNA, 25 bp, Saccharomyces pastorianus
ggagatgccgtttagatatgttctt

SEQ ID NO: 32022 - DNA, 25 bp, Saccharomyces pastorianus
aagacgctgcagaattcgattattt

SEQ ID NO: 32023 - DNA, 25 bp, Saccharomyces pastorianus
tatcgcttggtttgagatggacaac

SEQ ID NO: 32024 - DNA, 25 bp, Saccharomyces pastorianus
ttgatttacaacctgaagacgctgc

SEQ ID NO: 32025 - DNA, 25 bp, Saccharomyces pastorianus
gacatacctgaaaagctattatcgc

SEQ ID NO: 32026 - DNA, 25 bp, Saccharomyces pastorianus
ggcgacaagcaaatgaccacagata

SEQ ID NO: 32027 - DNA, 25 bp, Saccharomyces pastorianus
ttattggacccaagagctgcgattg

SEQ ID NO: 32028 - DNA, 25 bp, Saccharomyces pastorianus
taacgaagcttcgtacgtgccatcg

SEQ ID NO: 32029 - DNA, 25 bp, Saccharomyces pastorianus
gagatcgccataccgaaaccgcaat

SEQ ID NO: 32030 - DNA, 25 bp, Saccharomyces pastorianus
gaggatgactcttctagaactgata

SEQ ID NO: 32031 - DNA, 25 bp, Saccharomyces pastorianus
gacatcccgcacctggaaaaactat

SEQ ID NO: 32032 - DNA, 25 bp, Saccharomyces pastorianus
atcctgtccagcttcaaggagttgg

SEQ ID NO: 32033 - DNA, 25 bp, Saccharomyces pastorianus
gaaaggccactcttttgatgaacaa

SEQ ID NO: 32034 - DNA, 25 bp, Saccharomyces pastorianus
gagaccaagccccaccgataagaag

SEQ ID NO: 32035 - DNA, 25 bp, Saccharomyces pastorianus
ctagcagtgcgggaaggccttcgtc

SEQ ID NO: 32036 - DNA, 25 bp, Saccharomyces pastorianus
ggtattgtcctcttcgttgcaaaga

SEQ ID NO: 32037 - DNA, 25 bp, Saccharomyces pastorianus
ggatactgccactactactggagat

SEQ ID NO: 32038 - DNA, 25 bp, Saccharomyces pastorianus
gcggacccacaagtctgtcaaggac

SEQ ID NO: 32039 - DNA, 25 bp, Saccharomyces pastorianus
aagatcttcgccatggatgccaact

SEQ ID NO: 32040 - DNA, 25 bp, Saccharomyces pastorianus
gcgtaccctgtaaattccatcgagt

SEQ ID NO: 32041 - DNA, 25 bp, Saccharomyces pastorianus
gagataacatcctatgtctggccac

SEQ ID NO: 32042 - DNA, 25 bp, Saccharomyces pastorianus
tgaaccccatcggtgcggaggtaaa

SEQ ID NO: 32043 - DNA, 25 bp, Saccharomyces pastorianus
ggctctgatggtattgtttcgtgct

SEQ ID NO: 32044 - DNA, 25 bp, Saccharomyces pastorianus
gaccaagacggttatgcatgcagca

SEQ ID NO: 32045 - DNA, 25 bp, Saccharomyces pastorianus
taccttcaagactaacgcagccatt

SEQ ID NO: 32046 - DNA, 25 bp, Saccharomyces pastorianus
cttcccgtttgatccttggtatgaa

SEQ ID NO: 32047 - DNA, 25 bp, Saccharomyces pastorianus
aggttcttatacacagctggctctg

SEQ ID NO: 32048 - DNA, 25 bp, Saccharomyces pastorianus
gagatatcgctctcttacctcaaga

SEQ ID NO: 32049 - DNA, 25 bp, Saccharomyces pastorianus
gcagccattgatcatgccatcgaac

SEQ ID NO: 32050 - DNA, 25 bp, Saccharomyces pastorianus
attcgctggcgccttggaaacgtta

SEQ ID NO: 32051 - DNA, 25 bp, Saccharomyces pastorianus
ccccgaggctattgctgactgtaat

SEQ ID NO: 32052 - DNA, 25 bp, Saccharomyces pastorianus
gatcgctgttcaagaattcgctggc

SEQ ID NO: 32053 - DNA, 25 bp, Saccharomyces pastorianus
caaagagtgactggcccaatgctgt

SEQ ID NO: 32054 - DNA, 25 bp, Saccharomyces pastorianus
gaagccgaagcatacattaatcctg

SEQ ID NO: 32055 - DNA, 25 bp, Saccharomyces pastorianus
aaaggctaccgcacagatcgctgtt

SEQ ID NO: 32056 - DNA, 25 bp, Saccharomyces pastorianus
taatagagccgctgccttagctaag

SEQ ID NO: 32057 - DNA, 25 bp, Saccharomyces pastorianus
acaaaaccctgctgctttacaagaa

SEQ ID NO: 32058 - DNA, 25 bp, Saccharomyces pastorianus
caaagattccagtccaacaccggta

SEQ ID NO: 32059 - DNA, 25 bp, Saccharomyces pastorianus
taagctaatgtcattccccgaggct

SEQ ID NO: 32060 - DNA, 25 bp, Saccharomyces pastorianus
gggaaatcgaccaactatactacaa

SEQ ID NO: 32061 - DNA, 25 bp, Saccharomyces pastorianus
gctaagacgagaagtgctgcccatt

SEQ ID NO: 32062 - DNA, 25 bp, Saccharomyces pastorianus
accatgctacgtgccttagtgatga

SEQ ID NO: 32063 - DNA, 25 bp, Saccharomyces pastorianus
agcaacgctctctaaataccgaaag

SEQ ID NO: 32064 - DNA, 25 bp, Saccharomyces pastorianus
ggttcatcgagcttagtggtttccc

SEQ ID NO: 32065 - DNA, 25 bp, Saccharomyces pastorianus
gttccatgacattagaccgggacct

SEQ ID NO: 32066 - DNA, 25 bp, Saccharomyces pastorianus
gaggttcaattcaccatgctacgtg

SEQ ID NO: 32067 - DNA, 25 bp, Saccharomyces pastorianus
gtgctgcccattctagaggttcaat

SEQ ID NO: 32068 - DNA, 25 bp, Saccharomyces pastorianus
aagatacctcacacggttcatcgag

SEQ ID NO: 32069 - DNA, 25 bp, Saccharomyces pastorianus
taggcaagcgcataagttccatgac

SEQ ID NO: 32070 - DNA, 25 bp, Saccharomyces pastorianus
gttttttgctaatccaacggtcaat

SEQ ID NO: 32071 - DNA, 25 bp, Saccharomyces pastorianus
agtaaacccagtttcagtgctgcca

SEQ ID NO: 32072 - DNA, 25 bp, Saccharomyces pastorianus
attatgaggctttgttggctttaac

SEQ ID NO: 32073 - DNA, 25 bp, Saccharomyces pastorianus
agcatattgtgtctacaccggccta

SEQ ID NO: 32074 - DNA, 25 bp, Saccharomyces pastorianus
accggcctattggtcgacaatcgag

SEQ ID NO: 32075 - DNA, 25 bp, Saccharomyces pastorianus
aatctagcctcgtcagagacttctg

SEQ ID NO: 32076 - DNA, 25 bp, Saccharomyces pastorianus
gtcgttgctatctttgccaatatcg

SEQ ID NO: 32077 - DNA, 25 bp, Saccharomyces pastorianus
atatcgcaactactatcccgctgat

SEQ ID NO: 32078 - DNA, 25 bp, Saccharomyces pastorianus
gagcaagtcggcgatatcgagctaa

SEQ ID NO: 32079 - DNA, 25 bp, Saccharomyces pastorianus
aaatgattccggacaccagctctaa

SEQ ID NO: 32080 - DNA, 25 bp, Saccharomyces pastorianus
gttccattgcaacggtcaacactgg

SEQ ID NO: 32081 - DNA, 25 bp, Saccharomyces pastorianus
aactgtctgacatcgagtcccaacg

SEQ ID NO: 32082 - DNA, 25 bp, Saccharomyces pastorianus
aaacgccgttgaagtcttcgcggag

SEQ ID NO: 32083 - DNA, 25 bp, Saccharomyces pastorianus
attcgcctaccagcaaaatcttatc

SEQ ID NO: 32084 - DNA, 25 bp, Saccharomyces pastorianus
gtatatctgttggttgttcttctcg

SEQ ID NO: 32085 - DNA, 25 bp, Saccharomyces pastorianus
aaggaaggctatgcgataccagaaa

SEQ ID NO: 32086 - DNA, 25 bp, Saccharomyces pastorianus
gatctgggaagcgtcatccaacagc

SEQ ID NO: 32087 - DNA, 25 bp, Saccharomyces pastorianus
taacgaggaattcgcctaccagcaa

SEQ ID NO: 32088 - DNA, 25 bp, Saccharomyces pastorianus
gagagagtctcttgaagcaaccgaa

SEQ ID NO: 32089 - DNA, 25 bp, Saccharomyces pastorianus
aggcgagctaatcaagaaggtcaac

SEQ ID NO: 32090 - DNA, 25 bp, Saccharomyces pastorianus
caagggcagaaccaccaaatgagta

SEQ ID NO: 32091 - DNA, 25 bp, Saccharomyces pastorianus
ggcaaacaacacagctctaatggat

SEQ ID NO: 32092 - DNA, 25 bp, Saccharomyces pastorianus
acatctgataacacccaaatggctt

SEQ ID NO: 32093 - DNA, 25 bp, Saccharomyces pastorianus
caagcaaccaaatagtcatcgagag

SEQ ID NO: 32094 - DNA, 25 bp, Saccharomyces pastorianus
taaattatattgtccatcctgtgag

SEQ ID NO: 32095 - DNA, 25 bp, Saccharomyces pastorianus
ctactgcaacctacagccgttattg

SEQ ID NO: 32096 - DNA, 25 bp, Saccharomyces pastorianus
tacttctgcgacgtagatcctgaat

SEQ ID NO: 32097 - DNA, 25 bp, Saccharomyces pastorianus
tatggcctcattcatgcacgttaca

SEQ ID NO: 32098 - DNA, 25 bp, Saccharomyces pastorianus
gttattgcccgttggtttgcatgat

SEQ ID NO: 32099 - DNA, 25 bp, Saccharomyces pastorianus
taccaaagtcttcgaggcatagctc

SEQ ID NO: 32100 - DNA, 25 bp, Saccharomyces pastorianus
acatgactcatgtccgtttagagca

SEQ ID NO: 32101 - DNA, 25 bp, Saccharomyces pastorianus
gtaggtgtcctcgtgtctactgcaa

SEQ ID NO: 32102 - DNA, 25 bp, Saccharomyces pastorianus
cgaggtggcaggaactacagcgact

SEQ ID NO: 32103 - DNA, 25 bp, Saccharomyces pastorianus
tttccagacatggtgcccaaacatc

SEQ ID NO: 32104 - DNA, 25 bp, Saccharomyces pastorianus
gattctcgtaagctgtatggcctca

SEQ ID NO: 32105 - DNA, 25 bp, Saccharomyces pastorianus
gataacgttcgttctcattcctcat

SEQ ID NO: 32106 - DNA, 25 bp, Saccharomyces pastorianus
taacagtaccctttccacggctaga

SEQ ID NO: 32107 - DNA, 25 bp, Saccharomyces pastorianus
cgctaagctgctactcttttggaga

SEQ ID NO: 32108 - DNA, 25 bp, Saccharomyces pastorianus
tggtattgccaacgaacgcggaccc

SEQ ID NO: 32109 - DNA, 25 bp, Saccharomyces pastorianus
attgcccaaattgtacgacctcgta

SEQ ID NO: 32110 - DNA, 25 bp, Saccharomyces pastorianus
gggaagccgagcataaaccctttca

SEQ ID NO: 32111 - DNA, 25 bp, Saccharomyces pastorianus
ttaccttctgctggacgcgataaga

SEQ ID NO: 32112 - DNA, 25 bp, Saccharomyces pastorianus
tactaccagtggaggttccttacct

SEQ ID NO: 32113 - DNA, 25 bp, Saccharomyces pastorianus
aaataagatcactgtacccgtccga

SEQ ID NO: 32114 - DNA, 25 bp, Saccharomyces pastorianus
gttcattatctctttgccggttggc

SEQ ID NO: 32115 - DNA, 25 bp, Saccharomyces pastorianus
caatcaaacgtctcagtcaactctt

SEQ ID NO: 32116 - DNA, 25 bp, Saccharomyces pastorianus
aaatcgttctgctactcgttataca

SEQ ID NO: 32117 - DNA, 25 bp, Saccharomyces pastorianus
tacagtcccttcagtacatttgtcg

SEQ ID NO: 32118 - DNA, 25 bp, Saccharomyces pastorianus
atcggacagcgctatatctatcaca

SEQ ID NO: 32119 - DNA, 25 bp, Saccharomyces pastorianus
attgataccatttttgggcctgtat

SEQ ID NO: 32120 - DNA, 25 bp, Saccharomyces pastorianus
gaaatcgaccatcaattccagcttt

SEQ ID NO: 32121 - DNA, 25 bp, Saccharomyces pastorianus
agagatttttctccgcaaggtttca

SEQ ID NO: 32122 - DNA, 25 bp, Saccharomyces pastorianus
atttcttcttatacctctatcggac

SEQ ID NO: 32123 - DNA, 25 bp, Saccharomyces pastorianus
ggcctgtatacgtttgatttcttct

SEQ ID NO: 32124 - DNA, 25 bp, Saccharomyces pastorianus
gttgtccgtaattcacagcaatgca

SEQ ID NO: 32125 - DNA, 25 bp, Saccharomyces pastorianus
acaacatcagacacatccggtttca

SEQ ID NO: 32126 - DNA, 25 bp, Saccharomyces pastorianus
atccggtttcacaaatctgcattta

SEQ ID NO: 32127 - DNA, 25 bp, Saccharomyces pastorianus
ttccaagctttcaaagaatcgccat

SEQ ID NO: 32128 - DNA, 25 bp, Saccharomyces pastorianus
accttcttcattgctggagtggcat

SEQ ID NO: 32129 - DNA, 25 bp, Saccharomyces pastorianus
tgctggagtggcattcattcagtct

SEQ ID NO: 32130 - DNA, 25 bp, Saccharomyces pastorianus
ggcaccttcttcattgctggagtgg

SEQ ID NO: 32131 - DNA, 25 bp, Saccharomyces pastorianus
aaacggcaccttcttcattgctgga

SEQ ID NO: 32132 - DNA, 25 bp, Saccharomyces pastorianus
tcgccattatatacaattgcactaa

SEQ ID NO: 32133 - DNA, 25 bp, Saccharomyces pastorianus
tcttcattgctggagtggcattcat

SEQ ID NO: 32134 - DNA, 25 bp, Saccharomyces pastorianus
tatgccaggtgcaggtgccggtcca

SEQ ID NO: 32135 - DNA, 25 bp, Saccharomyces pastorianus
gtttgctatgccaggtgcaggtgcc

SEQ ID NO: 32136 - DNA, 25 bp, Saccharomyces pastorianus
gaatcgccattatatacaattgcac

SEQ ID NO: 32137 - DNA, 25 bp, Saccharomyces pastorianus
gcactaaacggcaccttcttcattg

SEQ ID NO: 32138 - DNA, 25 bp, Saccharomyces pastorianus
ccgtggtattgatatccctacagtt

SEQ ID NO: 32139 - DNA, 25 bp, Saccharomyces pastorianus
taatcactaccaatgttcttgcccg

SEQ ID NO: 32140 - DNA, 25 bp, Saccharomyces pastorianus
gcatggtgacttgcaaactcaagaa

SEQ ID NO: 32141 - DNA, 25 bp, Saccharomyces pastorianus
acgctattaagcaactgtacatgga

SEQ ID NO: 32142 - DNA, 25 bp, Saccharomyces pastorianus
ttcgctgatgcggttaggcaatatg

SEQ ID NO: 32143 - DNA, 25 bp, Saccharomyces pastorianus
gatatccctacagtttcaatggttg

SEQ ID NO: 32144 - DNA, 25 bp, Saccharomyces pastorianus
gatccggccacttatattcacagaa

SEQ ID NO: 32145 - DNA, 25 bp, Saccharomyces pastorianus
aaaacggcaaatgtcctatatggta

SEQ ID NO: 32146 - DNA, 25 bp, Saccharomyces pastorianus
agttctgactgagctttatggttta

SEQ ID NO: 32147 - DNA, 25 bp, Saccharomyces pastorianus
ttttgttgctaccaagaaaacggca

SEQ ID NO: 32148 - DNA, 25 bp, Saccharomyces pastorianus
tgacacgtgtcccaacagatgattg

SEQ ID NO: 32149 - DNA, 25 bp, Saccharomyces pastorianus
ttgaaaaggcccgatatgccgcctc

SEQ ID NO: 32150 - DNA, 25 bp, Saccharomyces pastorianus
ctctgctccagcgacgagtttataa

SEQ ID NO: 32151 - DNA, 25 bp, Saccharomyces pastorianus
gttgccgttgaagcgcaatgcagat

SEQ ID NO: 32152 - DNA, 25 bp, Saccharomyces pastorianus
gaggcgaacttggatcgcgatttca

SEQ ID NO: 32153 - DNA, 25 bp, Saccharomyces pastorianus
gacattggttaactcggacttgtat

SEQ ID NO: 32154 - DNA, 25 bp, Saccharomyces pastorianus
cccggtttccatgctcatgaacata

SEQ ID NO: 32155 - DNA, 25 bp, Saccharomyces pastorianus
aatcatgcacttgtctaagcccgaa

SEQ ID NO: 32156 - DNA, 25 bp, Saccharomyces pastorianus
cgcgatttcaagttaacgagtgcaa

SEQ ID NO: 32157 - DNA, 25 bp, Saccharomyces pastorianus
attcaggttacagttgcttcctctc

SEQ ID NO: 32158 - DNA, 25 bp, Saccharomyces pastorianus
gaacatatttcctcaggtagtcttt

SEQ ID NO: 32159 - DNA, 25 bp, Saccharomyces pastorianus
actacttactgaacgttgccgttga

SEQ ID NO: 32160 - DNA, 25 bp, Saccharomyces pastorianus
ctgggtggcataccgttgcattcaa

SEQ ID NO: 32161 - DNA, 25 bp, Saccharomyces pastorianus
gataagagcatctaccacgcaaaga

SEQ ID NO: 32162 - DNA, 25 bp, Saccharomyces pastorianus
gaaaaccacgcttgtgacggcttaa

SEQ ID NO: 32163 - DNA, 25 bp, Saccharomyces pastorianus
gaaacgctgacaagctagaggcaga

SEQ ID NO: 32164 - DNA, 25 bp, Saccharomyces pastorianus
ttcgataagtgttcaagtgcagcat

SEQ ID NO: 32165 - DNA, 25 bp, Saccharomyces pastorianus
aaggtcttctagtaattccagcata

SEQ ID NO: 32166 - DNA, 25 bp, Saccharomyces pastorianus
gcaaaggccatttttgttcgaaaca

SEQ ID NO: 32167 - DNA, 25 bp, Saccharomyces pastorianus
aagaacgcttgctatttcgataagt

SEQ ID NO: 32168 - DNA, 25 bp, Saccharomyces pastorianus
aagctgcaaggaacaactacatcaa

SEQ ID NO: 32169 - DNA, 25 bp, Saccharomyces pastorianus
gacaagtcactccaaaggatccagt

SEQ ID NO: 32170 - DNA, 25 bp, Saccharomyces pastorianus
cataacatctacaggccaaagcagt

SEQ ID NO: 32171 - DNA, 25 bp, Saccharomyces pastorianus
ttaccggcctgaagcaacataacgt

SEQ ID NO: 32172 - DNA, 25 bp, Saccharomyces pastorianus
tgtttcaagatgttccccttaccaa

SEQ ID NO: 32173 - DNA, 25 bp, Saccharomyces pastorianus
accgcacttgaaggccaatttccaa

SEQ ID NO: 32174 - DNA, 25 bp, Saccharomyces pastorianus
gaggatcgccatgttgctttgaacc

SEQ ID NO: 32175 - DNA, 25 bp, Saccharomyces pastorianus
aaaccgaagcatttctgtgcctcgt

SEQ ID NO: 32176 - DNA, 25 bp, Saccharomyces pastorianus
gtggcggctctgcagacaactacat

SEQ ID NO: 32177 - DNA, 25 bp, Saccharomyces pastorianus
ggtaacagatactccgtagccagcc

SEQ ID NO: 32178 - DNA, 25 bp, Saccharomyces pastorianus
tagccaccggtgattttgctgttca

SEQ ID NO: 32179 - DNA, 25 bp, Saccharomyces pastorianus
aaataactggatcggtggcggctct

SEQ ID NO: 32180 - DNA, 25 bp, Saccharomyces pastorianus
acaggcatgattacaccgcacttga

SEQ ID NO: 32181 - DNA, 25 bp, Saccharomyces pastorianus
aagatgtgcggtttctgtggactcg

SEQ ID NO: 32182 - DNA, 25 bp, Saccharomyces pastorianus
ggtagatttacaaccactctcatta

SEQ ID NO: 32183 - DNA, 25 bp, Saccharomyces pastorianus
gccaaccttcccgagtctaaagata

SEQ ID NO: 32184 - DNA, 25 bp, Saccharomyces pastorianus
gcaacggcacttcattaagcacaga

SEQ ID NO: 32185 - DNA, 25 bp, Saccharomyces pastorianus
gagtttggactcttcagcattgact

SEQ ID NO: 32186 - DNA, 25 bp, Saccharomyces pastorianus
tactatatccttattcactgccaac

SEQ ID NO: 32187 - DNA, 25 bp, Saccharomyces pastorianus
gaattttcaagagctcccaagataa

SEQ ID NO: 32188 - DNA, 25 bp, Saccharomyces pastorianus
atactttcttatccatcgtcttcta

SEQ ID NO: 32189 - DNA, 25 bp, Saccharomyces pastorianus
gactggtctaaactcgatatcgatg

SEQ ID NO: 32190 - DNA, 25 bp, Saccharomyces pastorianus
atctcctgatgcctttttccaaaag

SEQ ID NO: 32191 - DNA, 25 bp, Saccharomyces pastorianus
actgcatcggcagaaacactctcga

SEQ ID NO: 32192 - DNA, 25 bp, Saccharomyces pastorianus
tttacgccggagctgatccagacac

SEQ ID NO: 32193 - DNA, 25 bp, Saccharomyces pastorianus
gaaagctgccattgtggatccgctc

SEQ ID NO: 32194 - DNA, 25 bp, Saccharomyces pastorianus
gaactaagttgctttcgggtggact

SEQ ID NO: 32195 - DNA, 25 bp, Saccharomyces pastorianus
agcttatattaggtggcctccggct

SEQ ID NO: 32196 - DNA, 25 bp, Saccharomyces pastorianus
taccgctgagttcgcgcacagagat

SEQ ID NO: 32197 - DNA, 25 bp, Saccharomyces pastorianus
gtgtaccgcaacgtccaaattaatg

SEQ ID NO: 32198 - DNA, 25 bp, Saccharomyces pastorianus
aagacaactttcgataccgctgagt

SEQ ID NO: 32199 - DNA, 25 bp, Saccharomyces pastorianus
aaacaagggcttctgtctcgaaaga

SEQ ID NO: 32200 - DNA, 25 bp, Saccharomyces pastorianus
aaacgcatctctatgggatctggcg

SEQ ID NO: 32201 - DNA, 25 bp, Saccharomyces pastorianus
gataagcgcctccagttcaatgaaa

SEQ ID NO: 32202 - DNA, 25 bp, Saccharomyces pastorianus
aaacgcgagtcgaggcattgtcata

SEQ ID NO: 32203 - DNA, 25 bp, Saccharomyces pastorianus
gatgttacagcactagcgcaaccac

SEQ ID NO: 32204 - DNA, 25 bp, Saccharomyces pastorianus
acggcttacatctaccatctgaata

SEQ ID NO: 32205 - DNA, 25 bp, Saccharomyces pastorianus
gctagcggagttttaccacccaggt

SEQ ID NO: 32206 - DNA, 25 bp, Saccharomyces pastorianus
acttgggcaagtacggcttacatct

SEQ ID NO: 32207 - DNA, 25 bp, Saccharomyces pastorianus
atggactcatttcatcactcctgaa

SEQ ID NO: 32208 - DNA, 25 bp, Saccharomyces pastorianus
ttccaatcccgaccaactggtaaag

SEQ ID NO: 32209 - DNA, 25 bp, Saccharomyces pastorianus
attgattgcgttagattactgccat

SEQ ID NO: 32210 - DNA, 25 bp, Saccharomyces pastorianus
actactccttggacttgtggtcagt

SEQ ID NO: 32211 - DNA, 25 bp, Saccharomyces pastorianus
agtaggctgtatgttggctgcgatt

SEQ ID NO: 32212 - DNA, 25 bp, Saccharomyces pastorianus
acttgaaccagtacgactactcctt

SEQ ID NO: 32213 - DNA, 25 bp, Saccharomyces pastorianus
gactacaatgttcgtgtcgcttcac

SEQ ID NO: 32214 - DNA, 25 bp, Saccharomyces pastorianus
gagccatttttcaaagggtcttcca

SEQ ID NO: 32215 - DNA, 25 bp, Saccharomyces pastorianus
aagattactctattgtttgggacga

SEQ ID NO: 32216 - DNA, 25 bp, Saccharomyces pastorianus
tacggcccggacttggctgaagtaa

SEQ ID NO: 32217 - DNA, 25 bp, Saccharomyces pastorianus
gataatgaaattccccggaacgcgt

SEQ ID NO: 32218 - DNA, 25 bp, Saccharomyces pastorianus
ggagacgttggtccatacaccagtt

SEQ ID NO: 32219 - DNA, 25 bp, Saccharomyces pastorianus
tcagcggacaatatcgttcgacgac

SEQ ID NO: 32220 - DNA, 25 bp, Saccharomyces pastorianus
gagaacaagcttcttcaccaagtgt

SEQ ID NO: 32221 - DNA, 25 bp, Saccharomyces pastorianus
gctcgtcctcatcatttcaaacaaa

SEQ ID NO: 32222 - DNA, 25 bp, Saccharomyces pastorianus
tatatggctaggctgcatcattgca

SEQ ID NO: 32223 - DNA, 25 bp, Saccharomyces pastorianus
attacaatcatatccgttccaccga

SEQ ID NO: 32224 - DNA, 25 bp, Saccharomyces pastorianus
tacccagttgttcctctgaaaacga

SEQ ID NO: 32225 - DNA, 25 bp, Saccharomyces pastorianus
ggaacgcgtctttcgataacacaat

SEQ ID NO: 32226 - DNA, 25 bp, Saccharomyces pastorianus
caacgatttcgtcatggttaagggt

SEQ ID NO: 32227 - DNA, 25 bp, Saccharomyces pastorianus
tcgtcatggttaagggttgtatccc

SEQ ID NO: 32228 - DNA, 25 bp, Saccharomyces pastorianus
gatggggtaccaagaaacttccaag

SEQ ID NO: 32229 - DNA, 25 bp, Saccharomyces pastorianus
ccactacggtgaaatcaacaacgat

SEQ ID NO: 32230 - DNA, 25 bp, Saccharomyces pastorianus
aaatcaacaacgatttcgtcatggt

SEQ ID NO: 32231 - DNA, 25 bp, Saccharomyces pastorianus
gatttcgtcatggttaagggttgta

SEQ ID NO: 32232 - DNA, 25 bp, Saccharomyces pastorianus
cagaacttctattaaccacaaggtt

SEQ ID NO: 32233 - DNA, 25 bp, Saccharomyces pastorianus
cttctattaaccacaaggtttacag

SEQ ID NO: 32234 - DNA, 25 bp, Saccharomyces pastorianus
agaggttaccactccagaacttcta

SEQ ID NO: 32235 - DNA, 25 bp, Saccharomyces pastorianus
ggttaccactccagaacttctatta

SEQ ID NO: 32236 - DNA, 25 bp, Saccharomyces pastorianus
ggccttggaagaagtcaacttgaaa

SEQ ID NO: 32237 - DNA, 25 bp, Saccharomyces pastorianus
gatcatctgccgtgcgagcttataa

SEQ ID NO: 32238 - DNA, 25 bp, Saccharomyces pastorianus
agcttcctgagcactttggatcatc

SEQ ID NO: 32239 - DNA, 25 bp, Saccharomyces pastorianus
gtagaaacgcatcgtacgggcccat

SEQ ID NO: 32240 - DNA, 25 bp, Saccharomyces pastorianus
gatccgcttcttgacacagcatagg

SEQ ID NO: 32241 - DNA, 25 bp, Saccharomyces pastorianus
ttctgactgcccctttgagtggttc

SEQ ID NO: 32242 - DNA, 25 bp, Saccharomyces pastorianus
gagtggttccactacggttgcgtaa

SEQ ID NO: 32243 - DNA, 25 bp, Saccharomyces pastorianus
gggctgcagctaataccactgatca

SEQ ID NO: 32244 - DNA, 25 bp, Saccharomyces pastorianus
gattaccccgagaagggctgcagct

SEQ ID NO: 32245 - DNA, 25 bp, Saccharomyces pastorianus
ttagttgatgaccagatccgcttct

SEQ ID NO: 32246 - DNA, 25 bp, Saccharomyces pastorianus
gatgcagaccatcgatctgtctaaa

SEQ ID NO: 32247 - DNA, 25 bp, Saccharomyces pastorianus
atggtggcatgcgatcgttctgact

SEQ ID NO: 32248 - DNA, 25 bp, Saccharomyces pastorianus
gacatggtgcttgcgattacatctt

SEQ ID NO: 32249 - DNA, 25 bp, Saccharomyces pastorianus
tatcccgggtccatatccaaacgaa

SEQ ID NO: 32250 - DNA, 25 bp, Saccharomyces pastorianus
atttcccaggtggttctattgccat

SEQ ID NO: 32251 - DNA, 25 bp, Saccharomyces pastorianus
taaactatctgactatatcccgggt

SEQ ID NO: 32252 - DNA, 25 bp, Saccharomyces pastorianus
ataatcttatcctctttgtacttcc

SEQ ID NO: 32253 - DNA, 25 bp, Saccharomyces pastorianus
gtcattccctagacagagtggcctg

SEQ ID NO: 32254 - DNA, 25 bp, Saccharomyces pastorianus
aggatgttaccactttcttgaattg

SEQ ID NO: 32255 - DNA, 25 bp, Saccharomyces pastorianus
attacatcttctctctgttgactgg

SEQ ID NO: 32256 - DNA, 25 bp, Saccharomyces pastorianus
tgttgactggttatcctgacgatcc

SEQ ID NO: 32257 - DNA, 25 bp, Saccharomyces pastorianus
gtacttcctatctatctgggttaag

SEQ ID NO: 32258 - DNA, 25 bp, Saccharomyces pastorianus
gaagatggtactcctgcaacaacct

SEQ ID NO: 32259 - DNA, 25 bp, Saccharomyces pastorianus
atgaaaactctacttcgcgacgttc

SEQ ID NO: 32260 - DNA, 25 bp, Saccharomyces pastorianus
tacgttgccttcattaagggccaag

SEQ ID NO: 32261 - DNA, 25 bp, Saccharomyces pastorianus
aagcatcgcccttacttgatattac

SEQ ID NO: 32262 - DNA, 25 bp, Saccharomyces pastorianus
gagatcatcccgcttactaatatta

SEQ ID NO: 32263 - DNA, 25 bp, Saccharomyces pastorianus
aattgtcaacaatctatccgatgaa

SEQ ID NO: 32264 - DNA, 25 bp, Saccharomyces pastorianus
ttgcgatcctaatgccaatagtgct

SEQ ID NO: 32265 - DNA, 25 bp, Saccharomyces pastorianus
cgcgacgttcgaagttgccaaatgg

SEQ ID NO: 32266 - DNA, 25 bp, Saccharomyces pastorianus
tgatattaccaacagatccgagaat

SEQ ID NO: 32267 - DNA, 25 bp, Saccharomyces pastorianus
gctgtagattatacgttgccttcat

SEQ ID NO: 32268 - DNA, 25 bp, Saccharomyces pastorianus
agatgccactactatgattgatata

SEQ ID NO: 32269 - DNA, 25 bp, Saccharomyces pastorianus
taacaggaagagtctctctcccaat

SEQ ID NO: 32270 - DNA, 25 bp, Saccharomyces pastorianus
gaatcatcatgagcgcttggaaccc

SEQ ID NO: 32271 - DNA, 25 bp, Saccharomyces pastorianus
ttgctgtaccaacgttcctgtgata

SEQ ID NO: 32272 - DNA, 25 bp, Saccharomyces pastorianus
gacctgcgacgatgactataccgga

SEQ ID NO: 32273 - DNA, 25 bp, Saccharomyces pastorianus
ggtgtgccatttaatatcgcctcat

SEQ ID NO: 32274 - DNA, 25 bp, Saccharomyces pastorianus
gcttggaaccctgcagattttgaca

SEQ ID NO: 32275 - DNA, 25 bp, Saccharomyces pastorianus
gaagtggtaaacctcgcctttcgtg

SEQ ID NO: 32276 - DNA, 25 bp, Saccharomyces pastorianus
gcctcatatgcgctactgactagaa

SEQ ID NO: 32277 - DNA, 25 bp, Saccharomyces pastorianus
gtgccaaatacaagacctgcgacga

SEQ ID NO: 32278 - DNA, 25 bp, Saccharomyces pastorianus
accggacaaggtatcgatcagctga

SEQ ID NO: 32279 - DNA, 25 bp, Saccharomyces pastorianus
atctgggtcctgtttatgggttcca

SEQ ID NO: 32280 - DNA, 25 bp, Saccharomyces pastorianus
tgacaagatggccttaccgccatgc

SEQ ID NO: 32281 - DNA, 25 bp, Saccharomyces pastorianus
agacatcaccttagagccggtgcga

SEQ ID NO: 32282 - DNA, 25 bp, Saccharomyces pastorianus
ttgctcatcagggtgcattcatcct

SEQ ID NO: 32283 - DNA, 25 bp, Saccharomyces pastorianus
gtcacctgggtcgagctggaaaagt

SEQ ID NO: 32284 - DNA, 25 bp, Saccharomyces pastorianus
atcacataataaatcgccctcacac

SEQ ID NO: 32285 - DNA, 25 bp, Saccharomyces pastorianus
tctgagaatgttgaaggccccttgc

SEQ ID NO: 32286 - DNA, 25 bp, Saccharomyces pastorianus
gacaggttgatcgtgccaagcgaca

SEQ ID NO: 32287 - DNA, 25 bp, Saccharomyces pastorianus
atgagtatgtccaggaccgcgacca

SEQ ID NO: 32288 - DNA, 25 bp, Saccharomyces pastorianus
caagaaacggtagccgccgagcttt

SEQ ID NO: 32289 - DNA, 25 bp, Saccharomyces pastorianus
ctctctattgccaccttcagaggaa

SEQ ID NO: 32290 - DNA, 25 bp, Saccharomyces pastorianus
tttgacgcagtttgttcgtcacctg

SEQ ID NO: 32291 - DNA, 25 bp, Saccharomyces pastorianus
agaagggttttctgcagttgctgaa

SEQ ID NO: 32292 - DNA, 25 bp, Saccharomyces pastorianus
gtttgcatcatccacaccaattgga

SEQ ID NO: 32293 - DNA, 25 bp, Saccharomyces pastorianus
atcgtgattcataaggtccctgcag

SEQ ID NO: 32294 - DNA, 25 bp, Saccharomyces pastorianus
gacggaattgcgctcggtaccacaa

SEQ ID NO: 32295 - DNA, 25 bp, Saccharomyces pastorianus
gtccctgcagttctttcgttaacta

SEQ ID NO: 32296 - DNA, 25 bp, Saccharomyces pastorianus
attcattcatggattgaccgacgga

SEQ ID NO: 32297 - DNA, 25 bp, Saccharomyces pastorianus
gtggttttgattgccatcgtgattc

SEQ ID NO: 32298 - DNA, 25 bp, Saccharomyces pastorianus
tgtggtattcgcattattcattcat

SEQ ID NO: 32299 - DNA, 25 bp, Saccharomyces pastorianus
gattcgttacttattgtggttttga

SEQ ID NO: 32300 - DNA, 25 bp, Saccharomyces pastorianus
gagtcaatcctcaacaatggatcgg

SEQ ID NO: 32301 - DNA, 25 bp, Saccharomyces pastorianus
atgttttcttgtttgcatcatccac

SEQ ID NO: 32302 - DNA, 25 bp, Saccharomyces pastorianus
attatcgacaggttggtgacgttat

SEQ ID NO: 32303 - DNA, 25 bp, Saccharomyces pastorianus
acatcattatcgctttggtcggtaa

SEQ ID NO: 32304 - DNA, 25 bp, Saccharomyces pastorianus
ggtgctgcattccttactcaaagag

SEQ ID NO: 32305 - DNA, 25 bp, Saccharomyces pastorianus
aatcttttatcaaggcacgccattg

SEQ ID NO: 32306 - DNA, 25 bp, Saccharomyces pastorianus
gaacaagcatcgaaggacatcatta

SEQ ID NO: 32307 - DNA, 25 bp, Saccharomyces pastorianus
gctcttgtagtatacgacgtgacga

SEQ ID NO: 32308 - DNA, 25 bp, Saccharomyces pastorianus
acgccattgggttaaggaactgcat

SEQ ID NO: 32309 - DNA, 25 bp, Saccharomyces pastorianus
gatttcgctgaaaacaaggagccca

SEQ ID NO: 32310 - DNA, 25 bp, Saccharomyces pastorianus
gagatttgcatcgttagcacccatg

SEQ ID NO: 32311 - DNA, 25 bp, Saccharomyces pastorianus
gacgtgacgaaaccacaatctttta

SEQ ID NO: 32312 - DNA, 25 bp, Saccharomyces pastorianus
aaggagcccactatcggtgctgcat

SEQ ID NO: 32313 - DNA, 25 bp, Saccharomyces pastorianus
gaaatgcacaggctgctcttgtagt

SEQ ID NO: 32314 - DNA, 25 bp, Saccharomyces pastorianus
gatgggaaacccttatcggatttgc

SEQ ID NO: 32315 - DNA, 25 bp, Saccharomyces pastorianus
tcgagttcaaacacggagtatcttt

SEQ ID NO: 32316 - DNA, 25 bp, Saccharomyces pastorianus
atgagtttgccaacaccgtttaagg

SEQ ID NO: 32317 - DNA, 25 bp, Saccharomyces pastorianus
gggattctggaacaccttctaacgt

SEQ ID NO: 32318 - DNA, 25 bp, Saccharomyces pastorianus
aaacgttgctactcatttaatcagg

SEQ ID NO: 32319 - DNA, 25 bp, Saccharomyces pastorianus
gttagcattccatcaccaatgagta

SEQ ID NO: 32320 - DNA, 25 bp, Saccharomyces pastorianus
cgaacgccacttccattgtgatgaa

SEQ ID NO: 32321 - DNA, 25 bp, Saccharomyces pastorianus
atacgtctcggcactagttagcatt

SEQ ID NO: 32322 - DNA, 25 bp, Saccharomyces pastorianus
gacgcctccatacgtgactgcagaa

SEQ ID NO: 32323 - DNA, 25 bp, Saccharomyces pastorianus
ggatttgcccgaagtcgctaaactt

SEQ ID NO: 32324 - DNA, 25 bp, Saccharomyces pastorianus
gacttgacggttacagtggcgtttt

SEQ ID NO: 32325 - DNA, 25 bp, Saccharomyces pastorianus
aaggccggtaagacgacgatactgt

SEQ ID NO: 32326 - DNA, 25 bp, Saccharomyces pastorianus
gcaatgaagccccaagaggtttcta

SEQ ID NO: 32327 - DNA, 25 bp, Saccharomyces pastorianus
gtggtactacttgtatgggcaaaca

SEQ ID NO: 32328 - DNA, 25 bp, Saccharomyces pastorianus
atcggtagtaatgctttgtccggac

SEQ ID NO: 32329 - DNA, 25 bp, Saccharomyces pastorianus
tggactctagcactgaaggccgtat

SEQ ID NO: 32330 - DNA, 25 bp, Saccharomyces pastorianus
gctctaggcaaattattcggctcaa

SEQ ID NO: 32331 - DNA, 25 bp, Saccharomyces pastorianus
ggattcaatgtcgaaaccgttactt

SEQ ID NO: 32332 - DNA, 25 bp, Saccharomyces pastorianus
ttccctgccactactgcattgatat

SEQ ID NO: 32333 - DNA, 25 bp, Saccharomyces pastorianus
taggcgggcaacaacgactaagacc

SEQ ID NO: 32334 - DNA, 25 bp, Saccharomyces pastorianus
aatcaaccctggtgcgtaatcggta

SEQ ID NO: 32335 - DNA, 25 bp, Saccharomyces pastorianus
taagacccctctggagacactattt

SEQ ID NO: 32336 - DNA, 25 bp, Saccharomyces pastorianus
acaaggtgtacccatcgaaatcgta

SEQ ID NO: 32337 - DNA, 25 bp, Saccharomyces pastorianus
gaatattccgaactggtgtctaaat

SEQ ID NO: 32338 - DNA, 25 bp, Saccharomyces pastorianus
gtggcggagcctgtttattccaaga

SEQ ID NO: 32339 - DNA, 25 bp, Saccharomyces pastorianus
gcaccagtgccaaaacgttcattat

SEQ ID NO: 32340 - DNA, 25 bp, Saccharomyces pastorianus
tgacatagcttttgacggtgccgat

SEQ ID NO: 32341 - DNA, 25 bp, Saccharomyces pastorianus
ggcagtatttgcacgattctgaata

SEQ ID NO: 32342 - DNA, 25 bp, Saccharomyces pastorianus
aaacgggtttgttcatcgacaatgc

SEQ ID NO: 32343 - DNA, 25 bp, Saccharomyces pastorianus
tatcgatgcggactttggcgaaatc

SEQ ID NO: 32344 - DNA, 25 bp, Saccharomyces pastorianus
gtggtctacgttgccgagagaatcg

SEQ ID NO: 32345 - DNA, 25 bp, Saccharomyces pastorianus
tattccaacaggcttccaatcaagg

SEQ ID NO: 32346 - DNA, 25 bp, Saccharomyces pastorianus
gaaatcgtaccttctgcgtatgtta

SEQ ID NO: 32347 - DNA, 25 bp, Saccharomyces pastorianus
accttcattgtcgttgctgattcaa

SEQ ID NO: 32348 - DNA, 25 bp, Saccharomyces pastorianus
ggtttattcatcgacaacgcttcaa

SEQ ID NO: 32349 - DNA, 25 bp, Saccharomyces pastorianus
ggctccattgaacagtatcctcgca

SEQ ID NO: 32350 - DNA, 25 bp, Saccharomyces pastorianus
gtagcgtctaaattcatttgcattc

SEQ ID NO: 32351 - DNA, 25 bp, Saccharomyces pastorianus
aaattgtaccttcctcatacgtgag

SEQ ID NO: 32352 - DNA, 25 bp, Saccharomyces pastorianus
taacttcattatcgatgcggatttc

SEQ ID NO: 32353 - DNA, 25 bp, Saccharomyces pastorianus
gcttcaaaagcctacttcggtaatt

SEQ ID NO: 32354 - DNA, 25 bp, Saccharomyces pastorianus
gtactagtgctaaaaccttcattgt

SEQ ID NO: 32355 - DNA, 25 bp, Saccharomyces pastorianus
aaggtggtggtgcttgtctatttca

SEQ ID NO: 32356 - DNA, 25 bp, Saccharomyces pastorianus
gtatcctcgcattgatatagcgttt

SEQ ID NO: 32357 - DNA, 25 bp, Saccharomyces pastorianus
ggaggcaaggtgttcccattgaaat

SEQ ID NO: 32358 - DNA, 25 bp, Saccharomyces pastorianus
attgacggtggtacaagggctctta

SEQ ID NO: 32359 - DNA, 25 bp, Saccharomyces pastorianus
aaaaccctcctaaggatgcatcgag

SEQ ID NO: 32360 - DNA, 25 bp, Saccharomyces pastorianus
ggcattgtacttgattttccatcgt

SEQ ID NO: 32361 - DNA, 25 bp, Saccharomyces pastorianus
gattccttatattggcagtggtaca

SEQ ID NO: 32362 - DNA, 25 bp, Saccharomyces pastorianus
ggtatccgtaatcaaatttctcctt

SEQ ID NO: 32363 - DNA, 25 bp, Saccharomyces pastorianus
gcattgtctttattactggtgtggt

SEQ ID NO: 32364 - DNA, 25 bp, Saccharomyces pastorianus
tccatcgtttttagtgggttgcatg

SEQ ID NO: 32365 - DNA, 25 bp, Saccharomyces pastorianus
gagagcagctttatctaactcgaat

SEQ ID NO: 32366 - DNA, 25 bp, Saccharomyces pastorianus
ataggtgggccaaacggcattgtac

SEQ ID NO: 32367 - DNA, 25 bp, Saccharomyces pastorianus
ggatcctttaacaacgattccttat

SEQ ID NO: 32368 - DNA, 25 bp, Saccharomyces pastorianus
ttgggccacttttacaaaaactcat

SEQ ID NO: 32369 - DNA, 25 bp, Saccharomyces pastorianus
taacttcagatcagccctcttttaa

SEQ ID NO: 32370 - DNA, 25 bp, Saccharomyces pastorianus
agtgccacgggtgctttgaagccaa

SEQ ID NO: 32371 - DNA, 25 bp, Saccharomyces pastorianus
taacccatcatctgttttcggaggc

SEQ ID NO: 32372 - DNA, 25 bp, Saccharomyces pastorianus
agatggagcaccttcctttggacag

SEQ ID NO: 32373 - DNA, 25 bp, Saccharomyces pastorianus
gatgggcatgaaccttgctggcaat

SEQ ID NO: 32374 - DNA, 25 bp, Saccharomyces pastorianus
ggtgctactaccatgtttggcggat

SEQ ID NO: 32375 - DNA, 25 bp, Saccharomyces pastorianus
aattcattcacaccgtcaacagttc

SEQ ID NO: 32376 - DNA, 25 bp, Saccharomyces pastorianus
tgggaattctgcatctggttctaat

SEQ ID NO: 32377 - DNA, 25 bp, Saccharomyces pastorianus
aataatcccgcgtcaggttctgtat

SEQ ID NO: 32378 - DNA, 25 bp, Saccharomyces pastorianus
taatgcgccttccagtttcaacttt

SEQ ID NO: 32379 - DNA, 25 bp, Saccharomyces pastorianus
gtagcaatagtacggcaggccctaa

SEQ ID NO: 32380 - DNA, 25 bp, Saccharomyces pastorianus
gatcggtctgaaatccaccattttg

SEQ ID NO: 32381 - DNA, 25 bp, Saccharomyces pastorianus
gtcagcgacgatgagggtctttctt

SEQ ID NO: 32382 - DNA, 25 bp, Saccharomyces pastorianus
gagatcgcctcattggatttatgga

SEQ ID NO: 32383 - DNA, 25 bp, Saccharomyces pastorianus
gaggtcaccagaatattccgcatac

SEQ ID NO: 32384 - DNA, 25 bp, Saccharomyces pastorianus
gacaccggtatcaggttggccaaca

SEQ ID NO: 32385 - DNA, 25 bp, Saccharomyces pastorianus
aaatccagggcttctacatgaaaac

SEQ ID NO: 32386 - DNA, 25 bp, Saccharomyces pastorianus
ggtgcttcattgttcttagatcggt

SEQ ID NO: 32387 - DNA, 25 bp, Saccharomyces pastorianus
tgccattctactcttgtccaattga

SEQ ID NO: 32388 - DNA, 25 bp, Saccharomyces pastorianus
cagtgcattctatcggtgcttcatt

SEQ ID NO: 32389 - DNA, 25 bp, Saccharomyces pastorianus
caagaagtacgcctttgccatttcc

SEQ ID NO: 32390 - DNA, 25 bp, Saccharomyces pastorianus
gttattaccatgtgccattctactc

SEQ ID NO: 32391 - DNA, 25 bp, Saccharomyces pastorianus
ggtttaggccctgcattattgagat

SEQ ID NO: 32392 - DNA, 25 bp, Saccharomyces pastorianus
gaaattgcaggcctcttccacgaag

SEQ ID NO: 32393 - DNA, 25 bp, Saccharomyces pastorianus
taatgcggctacgtttttgggtgta

SEQ ID NO: 32394 - DNA, 25 bp, Saccharomyces pastorianus
agggcggcatttcttctttgttcaa

SEQ ID NO: 32395 - DNA, 25 bp, Saccharomyces pastorianus
tattgagatctttccctgctaatgc

SEQ ID NO: 32396 - DNA, 25 bp, Saccharomyces pastorianus
gctcggcactatactttgcatctta

SEQ ID NO: 32397 - DNA, 25 bp, Saccharomyces pastorianus
aaagttgtcttgcaaacctcttcca

SEQ ID NO: 32398 - DNA, 25 bp, Saccharomyces pastorianus
aaagggtctttcattcaagctgcaa

SEQ ID NO: 32399 - DNA, 25 bp, Saccharomyces pastorianus
gttggctgttttcccgatagatacc

SEQ ID NO: 32400 - DNA, 25 bp, Saccharomyces pastorianus
gtacgggcaccggtgagttgaccat

SEQ ID NO: 32401 - DNA, 25 bp, Saccharomyces pastorianus
aaggttcattggctaccctagcaag

SEQ ID NO: 32402 - DNA, 25 bp, Saccharomyces pastorianus
atgaccaaccggatagttctgctaa

SEQ ID NO: 32403 - DNA, 25 bp, Saccharomyces pastorianus
gatgggttacgcttggctaaacaat

SEQ ID NO: 32404 - DNA, 25 bp, Saccharomyces pastorianus
ttctacggtctcattcgtttggtga

SEQ ID NO: 32405 - DNA, 25 bp, Saccharomyces pastorianus
aacaattgaacgcacctttccttga

SEQ ID NO: 32406 - DNA, 25 bp, Saccharomyces pastorianus
cacctttccttgaaacttctgctaa

SEQ ID NO: 32407 - DNA, 25 bp, Saccharomyces pastorianus
atggccctggtagtgtattgacaaa

SEQ ID NO: 32408 - DNA, 25 bp, Saccharomyces pastorianus
agacgaggcattctacggtctcatt

SEQ ID NO: 32409 - DNA, 25 bp, Saccharomyces pastorianus
gcgagaaaccctaatgctacttcat

SEQ ID NO: 32410 - DNA, 25 bp, Saccharomyces pastorianus
tcccgtggtcgtggttggtaacaag

SEQ ID NO: 32411 - DNA, 25 bp, Saccharomyces pastorianus
gctacttcatctcaaacccagaatg

SEQ ID NO: 32412 - DNA, 25 bp, Saccharomyces pastorianus
ggtgacaccaactctagtcctaatt

SEQ ID NO: 32413 - DNA, 25 bp, Saccharomyces pastorianus
gatgcgaaacccgacacattttatg

SEQ ID NO: 32414 - DNA, 25 bp, Saccharomyces pastorianus
tacagttatctaccaacccattcaa

SEQ ID NO: 32415 - DNA, 25 bp, Saccharomyces pastorianus
gtggcgcctctagtttacgatgaag

SEQ ID NO: 32416 - DNA, 25 bp, Saccharomyces pastorianus
aaagtcaccaaccataccaaggcta

SEQ ID NO: 32417 - DNA, 25 bp, Saccharomyces pastorianus
atgcacacatcccagatcacaggag

SEQ ID NO: 32418 - DNA, 25 bp, Saccharomyces pastorianus
acaggagtccgtacccgactgaaag

SEQ ID NO: 32419 - DNA, 25 bp, Saccharomyces pastorianus
atgatattcctcagcctcaatacga

SEQ ID NO: 32420 - DNA, 25 bp, Saccharomyces pastorianus
aatatgggtgcggtacctccttcta

SEQ ID NO: 32421 - DNA, 25 bp, Saccharomyces pastorianus
aaagccctagtagagtggcgcctct

SEQ ID NO: 32422 - DNA, 25 bp, Saccharomyces pastorianus
gtgctgtcattgttctggtaaccaa

SEQ ID NO: 32423 - DNA, 25 bp, Saccharomyces pastorianus
ccagttcgtttgttggtgctgtcat

SEQ ID NO: 32424 - DNA, 25 bp, Saccharomyces pastorianus
gtagaaactacgcatccgacgcaag

SEQ ID NO: 32425 - DNA, 25 bp, Saccharomyces pastorianus
gaagcctctttactggatattgacc

SEQ ID NO: 32426 - DNA, 25 bp, Saccharomyces pastorianus
agccccaatatcatctccaggaaat

SEQ ID NO: 32427 - DNA, 25 bp, Saccharomyces pastorianus
ggaaaagcaataccaccacaggcct

SEQ ID NO: 32428 - DNA, 25 bp, Saccharomyces pastorianus
cctcacctgcgtcatctaaaattga

SEQ ID NO: 32429 - DNA, 25 bp, Saccharomyces pastorianus
gcgaataatcagtccaagggcttac

SEQ ID NO: 32430 - DNA, 25 bp, Saccharomyces pastorianus
gtacgagtaatttggcctcacctgc

SEQ ID NO: 32431 - DNA, 25 bp, Saccharomyces pastorianus
accacctgcttctgcaacagtagag

SEQ ID NO: 32432 - DNA, 25 bp, Saccharomyces pastorianus
aactgactcctacatcatcattttc

SEQ ID NO: 32433 - DNA, 25 bp, Saccharomyces pastorianus
ccgcctcctggatttagccaaaata

SEQ ID NO: 32434 - DNA, 25 bp, Saccharomyces pastorianus
gtttctttaacatcagcttcgctac

SEQ ID NO: 32435 - DNA, 25 bp, Saccharomyces pastorianus
gatgctacagtaccgaattcaacta

SEQ ID NO: 32436 - DNA, 25 bp, Saccharomyces pastorianus
agcttactggcatctactgaaggca

SEQ ID NO: 32437 - DNA, 25 bp, Saccharomyces pastorianus
ttgtcgtacattccgtttagtgata

SEQ ID NO: 32438 - DNA, 25 bp, Saccharomyces pastorianus
agaggctggatctgatgctgatatc

SEQ ID NO: 32439 - DNA, 25 bp, Saccharomyces pastorianus
tgatgctccactgttcaggattgga

SEQ ID NO: 32440 - DNA, 25 bp, Saccharomyces pastorianus
acgagttcaccggtaccagaaatgg

SEQ ID NO: 32441 - DNA, 25 bp, Saccharomyces pastorianus
gactggttggcactgaacttgcgtt

SEQ ID NO: 32442 - DNA, 25 bp, Saccharomyces pastorianus
gcgttgatatacctagcgacagcta

SEQ ID NO: 32443 - DNA, 25 bp, Saccharomyces pastorianus
tccggtttagacactgatgctccac

SEQ ID NO: 32444 - DNA, 25 bp, Saccharomyces pastorianus
ggaaactgtctacatcagcgttgat

SEQ ID NO: 32445 - DNA, 25 bp, Saccharomyces pastorianus
tgaacttgcgttcccaaatgctgca

SEQ ID NO: 32446 - DNA, 25 bp, Saccharomyces pastorianus
gataccagctggtgcaaagcgcaaa

SEQ ID NO: 32447 - DNA, 25 bp, Saccharomyces pastorianus
gtcttaacgttggtggcggattcaa

SEQ ID NO: 32448 - DNA, 25 bp, Saccharomyces pastorianus
gtcacagctgtgaccttgataaaat

SEQ ID NO: 32449 - DNA, 25 bp, Saccharomyces pastorianus
gacgaacctgttaacgttgtcacag

SEQ ID NO: 32450 - DNA, 25 bp, Saccharomyces pastorianus
atactctatagacccaattggatat

SEQ ID NO: 32451 - DNA, 25 bp, Saccharomyces pastorianus
aattttgactgactacgagaacgag

SEQ ID NO: 32452 - DNA, 25 bp, Saccharomyces pastorianus
atgggcaaacccaagctcattgtat

SEQ ID NO: 32453 - DNA, 25 bp, Saccharomyces pastorianus
atatgttcgggataccagctggtgc

SEQ ID NO: 32454 - DNA, 25 bp, Saccharomyces pastorianus
ttgggctgccccttaacaagacatt

SEQ ID NO: 32455 - DNA, 25 bp, Saccharomyces pastorianus
gctagctcttctccccgaagatatg

SEQ ID NO: 32456 - DNA, 25 bp, Saccharomyces pastorianus
attataacgtagttgggctgcccct

SEQ ID NO: 32457 - DNA, 25 bp, Saccharomyces pastorianus
gacgctcagaagcatctttatgact

SEQ ID NO: 32458 - DNA, 25 bp, Saccharomyces pastorianus
aatggtcagtctcatgacgctcaga

SEQ ID NO: 32459 - DNA, 25 bp, Saccharomyces pastorianus
gtcggatcctgatacaaatgcatta

SEQ ID NO: 32460 - DNA, 25 bp, Saccharomyces pastorianus
gaagccgcaccatcacatctatgaa

SEQ ID NO: 32461 - DNA, 25 bp, Saccharomyces pastorianus
tagagattcctataccagcgatgag

SEQ ID NO: 32462 - DNA, 25 bp, Saccharomyces pastorianus
acctcggaaacggttggtcgcgatg

SEQ ID NO: 32463 - DNA, 25 bp, Saccharomyces pastorianus
gaagtttgactctcactggagcgct

SEQ ID NO: 32464 - DNA, 25 bp, Saccharomyces pastorianus
agcatacttcttaacgtcggatcct

SEQ ID NO: 32465 - DNA, 25 bp, Saccharomyces pastorianus
atgcatcattttgccagtctatgaa

SEQ ID NO: 32466 - DNA, 25 bp, Saccharomyces pastorianus
cactggagcgctttgaaacctaata

SEQ ID NO: 32467 - DNA, 25 bp, Saccharomyces pastorianus
aagggtcactcgaaaccatctaccg

SEQ ID NO: 32468 - DNA, 25 bp, Saccharomyces pastorianus
atctccttgactatgactatcgacc

SEQ ID NO: 32469 - DNA, 25 bp, Saccharomyces pastorianus
gcatcttttatcgataggcctacag

SEQ ID NO: 32470 - DNA, 25 bp, Saccharomyces pastorianus
gaactttctatctccttgactatga

SEQ ID NO: 32471 - DNA, 25 bp, Saccharomyces pastorianus
gcaatgtggcttcggaaaacggtaa

SEQ ID NO: 32472 - DNA, 25 bp, Saccharomyces pastorianus
gacatcatgtcttcacacaatttga

SEQ ID NO: 32473 - DNA, 25 bp, Saccharomyces pastorianus
cgacctatccaatcattctctttaa

SEQ ID NO: 32474 - DNA, 25 bp, Saccharomyces pastorianus
ggcctacagagcgacctaaaacaac

SEQ ID NO: 32475 - DNA, 25 bp, Saccharomyces pastorianus
tcattgggttattcctctgaagagg

SEQ ID NO: 32476 - DNA, 25 bp, Saccharomyces pastorianus
gaggtcatctgtttggcatctttta

SEQ ID NO: 32477 - DNA, 25 bp, Saccharomyces pastorianus
gatgatcgaaccctttttagaaata

SEQ ID NO: 32478 - DNA, 25 bp, Saccharomyces pastorianus
gaggcgtgttatcttcattgggtta

SEQ ID NO: 32479 - DNA, 25 bp, Saccharomyces pastorianus
cgtgctctacctgatgttgttgtga

SEQ ID NO: 32480 - DNA, 25 bp, Saccharomyces pastorianus
aagacttgatgccaaagccatgttt

SEQ ID NO: 32481 - DNA, 25 bp, Saccharomyces pastorianus
gacccacgtcacattcaattgctgg

SEQ ID NO: 32482 - DNA, 25 bp, Saccharomyces pastorianus
aacagatcatttattcgacgccgcc

SEQ ID NO: 32483 - DNA, 25 bp, Saccharomyces pastorianus
gactgcgagatgtcatgtgcacaga

SEQ ID NO: 32484 - DNA, 25 bp, Saccharomyces pastorianus
ttttccgtccttggtattgaagctg

SEQ ID NO: 32485 - DNA, 25 bp, Saccharomyces pastorianus
atcggtaccggttcattcaaagtca

SEQ ID NO: 32486 - DNA, 25 bp, Saccharomyces pastorianus
ctgttttacagttagcctcctttga

SEQ ID NO: 32487 - DNA, 25 bp, Saccharomyces pastorianus
gcacagacggtgttattggttctaa

SEQ ID NO: 32488 - DNA, 25 bp, Saccharomyces pastorianus
aggtttagctgacatatcccgtgcg

SEQ ID NO: 32489 - DNA, 25 bp, Saccharomyces pastorianus
aatgcaacagctacgtcgtgctcta

SEQ ID NO: 32490 - DNA, 25 bp, Saccharomyces pastorianus
ggacggtttcagttctgacgatcgt

SEQ ID NO: 32491 - DNA, 25 bp, Saccharomyces pastorianus
gtgcagcacaaaccaatgccacatt

SEQ ID NO: 32492 - DNA, 25 bp, Saccharomyces pastorianus
atagagtcgatgttctagaccccgc

SEQ ID NO: 32493 - DNA, 25 bp, Saccharomyces pastorianus
tggctgccaccaatagagtcgatgt

SEQ ID NO: 32494 - DNA, 25 bp, Saccharomyces pastorianus
gatgcattcgcattagccaaggaaa

SEQ ID NO: 32495 - DNA, 25 bp, Saccharomyces pastorianus
gcaagaactcgctagatcgactgat

SEQ ID NO: 32496 - DNA, 25 bp, Saccharomyces pastorianus
cagcccctcaactagtgcaaatgta

SEQ ID NO: 32497 - DNA, 25 bp, Saccharomyces pastorianus
gaaaaatcgagttcccattgccatc

SEQ ID NO: 32498 - DNA, 25 bp, Saccharomyces pastorianus
catttctaaaattggcagcccctca

SEQ ID NO: 32499 - DNA, 25 bp, Saccharomyces pastorianus
gtaaaactttattggcgcgtgcgtg

SEQ ID NO: 32500 - DNA, 25 bp, Saccharomyces pastorianus
tagaccccgctctgttgagatcggg

SEQ ID NO: 32501 - DNA, 25 bp, Saccharomyces pastorianus
gaagaccacttttgccgtatatata

SEQ ID NO: 32502 - DNA, 25 bp, Saccharomyces pastorianus
ggcacactggctacggaggatcatt

SEQ ID NO: 32503 - DNA, 25 bp, Saccharomyces pastorianus
gcaccttagagttcgctgtttttag

SEQ ID NO: 32504 - DNA, 25 bp, Saccharomyces pastorianus
gttcgctgtttttaggcacactggc

SEQ ID NO: 32505 - DNA, 25 bp, Saccharomyces pastorianus
aaatccaaggtatcgtcattttctt

SEQ ID NO: 32506 - DNA, 25 bp, Saccharomyces pastorianus
attaactttcgatagcaccttagag

SEQ ID NO: 32507 - DNA, 25 bp, Saccharomyces pastorianus
gcaaccattaataaagcccgcatct

SEQ ID NO: 32508 - DNA, 25 bp, Saccharomyces pastorianus
gatttgtaccaggaaacgtgtcatt

SEQ ID NO: 32509 - DNA, 25 bp, Saccharomyces pastorianus
ataatccaaatatcgccagtgcaag

SEQ ID NO: 32510 - DNA, 25 bp, Saccharomyces pastorianus
gagcctggatctttatcggtagaaa

SEQ ID NO: 32511 - DNA, 25 bp, Saccharomyces pastorianus
agaggactcattttttgaattacac

SEQ ID NO: 32512 - DNA, 25 bp, Saccharomyces pastorianus
gtgacagtgatgatcgcgagtatta

SEQ ID NO: 32513 - DNA, 25 bp, Saccharomyces pastorianus
atgacgacgatgagccaaaaatact

SEQ ID NO: 32514 - DNA, 25 bp, Saccharomyces pastorianus
ttcgctgcctctgaacagtttgatt

SEQ ID NO: 32515 - DNA, 25 bp, Saccharomyces pastorianus
acaatgatcacggaagtacttcaga

SEQ ID NO: 32516 - DNA, 25 bp, Saccharomyces pastorianus
gtttaattgcccatgacaatgaacg

SEQ ID NO: 32517 - DNA, 25 bp, Saccharomyces pastorianus
cagacggtaagttcgatttgttgaa

SEQ ID NO: 32518 - DNA, 25 bp, Saccharomyces pastorianus
cttggttaggtcattaggtggctta

SEQ ID NO: 32519 - DNA, 25 bp, Saccharomyces pastorianus
aggtccctgcacttggttaggtcat

SEQ ID NO: 32520 - DNA, 25 bp, Saccharomyces pastorianus
aagatgagatattcaggtccctgca

SEQ ID NO: 32521 - DNA, 25 bp, Saccharomyces pastorianus
atgaacgaaatttcgctgcctctga

SEQ ID NO: 32522 - DNA, 25 bp, Saccharomyces pastorianus
tgggtcttaatatttttcctgaaag

SEQ ID NO: 32523 - DNA, 25 bp, Saccharomyces pastorianus
gtaacgtcttgagtgtaccaactaa

SEQ ID NO: 32524 - DNA, 25 bp, Saccharomyces pastorianus
gttgaagcttattccccattgggta

SEQ ID NO: 32525 - DNA, 25 bp, Saccharomyces pastorianus
agtggagctacacccattattgcct

SEQ ID NO: 32526 - DNA, 25 bp, Saccharomyces pastorianus
ctgacgaggactttgaggccataaa

SEQ ID NO: 32527 - DNA, 25 bp, Saccharomyces pastorianus
taaagcagatggctctcgtccagta

SEQ ID NO: 32528 - DNA, 25 bp, Saccharomyces pastorianus
tgaaggcggttggtgtctctaactt

SEQ ID NO: 32529 - DNA, 25 bp, Saccharomyces pastorianus
aagtgttcactttatctgacgagga

SEQ ID NO: 32530 - DNA, 25 bp, Saccharomyces pastorianus
ccacgtggtcattagctggcatgca

SEQ ID NO: 32531 - DNA, 25 bp, Saccharomyces pastorianus
tgatgcattggcctgtccgcttaga

SEQ ID NO: 32532 - DNA, 25 bp, Saccharomyces pastorianus
gggtagcactaatgctccactattg

SEQ ID NO: 32533 - DNA, 25 bp, Saccharomyces pastorianus
gttgtattgcccaaatccgtcaatc

SEQ ID NO: 32534 - DNA, 25 bp, Saccharomyces pastorianus
acagctctcggatatgtgcgtacca

SEQ ID NO: 32535 - DNA, 25 bp, Saccharomyces pastorianus
atgaaagctcatcacgttcttccta

SEQ ID NO: 32536 - DNA, 25 bp, Saccharomyces pastorianus
gatgcatgcttagctggccctcaat

SEQ ID NO: 32537 - DNA, 25 bp, Saccharomyces pastorianus
ctcaatgtgtgcctctcttagaatt

SEQ ID NO: 32538 - DNA, 25 bp, Saccharomyces pastorianus
taacggatggactacacttctctgg

SEQ ID NO: 32539 - DNA, 25 bp, Saccharomyces pastorianus
aatgagcccaacattgccatggcca

SEQ ID NO: 32540 - DNA, 25 bp, Saccharomyces pastorianus
ggtgatgcctggaagagcctactaa

SEQ ID NO: 32541 - DNA, 25 bp, Saccharomyces pastorianus
caagtgggcactgaaggttcttcct

SEQ ID NO: 32542 - DNA, 25 bp, Saccharomyces pastorianus
acagtctattctgatgcgttagcaa

SEQ ID NO: 32543 - DNA, 25 bp, Saccharomyces pastorianus
gttagcaaagctggccgacgacgaa

SEQ ID NO: 32544 - DNA, 25 bp, Saccharomyces pastorianus
atctttttcggtgccaacgatgcat

SEQ ID NO: 32545 - DNA, 25 bp, Saccharomyces pastorianus
aaagggttcctgtctagacggtgtg

SEQ ID NO: 32546 - DNA, 25 bp, Saccharomyces pastorianus
tgaagtcactatagtctctgcccat

SEQ ID NO: 32547 - DNA, 25 bp, Saccharomyces pastorianus
gaaagactttgacgttccatttgaa

SEQ ID NO: 32548 - DNA, 25 bp, Saccharomyces pastorianus
gacggtgtggattcgttacattcaa

SEQ ID NO: 32549 - DNA, 25 bp, Saccharomyces pastorianus
ttaccagtaatgtctgctgcctgtg

SEQ ID NO: 32550 - DNA, 25 bp, Saccharomyces pastorianus
gtggtgcagctcatttgccaggtat

SEQ ID NO: 32551 - DNA, 25 bp, Saccharomyces pastorianus
tatgccatctctgctagtaagcgtg

SEQ ID NO: 32552 - DNA, 25 bp, Saccharomyces pastorianus
gctgcctgtgcggttttgaaagact

SEQ ID NO: 32553 - DNA, 25 bp, Saccharomyces pastorianus
caagacaataatcgccggtgccggt

SEQ ID NO: 32554 - DNA, 25 bp, Saccharomyces pastorianus
gccatcagactgcttggtgcttatg

SEQ ID NO: 32555 - DNA, 25 bp, Saccharomyces pastorianus
acaaatgccgcattgttggccatca

SEQ ID NO: 32556 - DNA, 25 bp, Saccharomyces pastorianus
gcctggtttgcgacctatgaactaa

SEQ ID NO: 32557 - DNA, 25 bp, Saccharomyces pastorianus
gaagcacacaaacgtttctccgtta

SEQ ID NO: 32558 - DNA, 25 bp, Saccharomyces pastorianus
gacaggcatactcttgatgacccga

SEQ ID NO: 32559 - DNA, 25 bp, Saccharomyces pastorianus
gttgccaacttacagagtacctcta

SEQ ID NO: 32560 - DNA, 25 bp, Saccharomyces pastorianus
ttccctgcagatacggtgaagtcaa

SEQ ID NO: 32561 - DNA, 25 bp, Saccharomyces pastorianus
gcaagcctggtactgacacctgtag

SEQ ID NO: 32562 - DNA, 25 bp, Saccharomyces pastorianus
gtgctggtttggcattcaacgctag

SEQ ID NO: 32563 - DNA, 25 bp, Saccharomyces pastorianus
ggacaatcagggacttttattcgag

SEQ ID NO: 32564 - DNA, 25 bp, Saccharomyces pastorianus
agagtcttggaggtatcgcctggtt

SEQ ID NO: 32565 - DNA, 25 bp, Saccharomyces pastorianus
acactctttagagctgtgccagcca

SEQ ID NO: 32566 - DNA, 25 bp, Saccharomyces pastorianus
tcaacgctagtattttccctgcaga

SEQ ID NO: 32567 - DNA, 25 bp, Saccharomyces pastorianus
taacgttactggaacgagtccgctc

SEQ ID NO: 32568 - DNA, 25 bp, Saccharomyces pastorianus
tgggacgccaggctgtttctgccaa

SEQ ID NO: 32569 - DNA, 25 bp, Saccharomyces pastorianus
gagtccgctccgatatcaggaaggc

SEQ ID NO: 32570 - DNA, 25 bp, Saccharomyces pastorianus
gaagcactacgccagttgaaaacag

SEQ ID NO: 32571 - DNA, 25 bp, Saccharomyces pastorianus
aagactctgacactacatcgctgaa

SEQ ID NO: 32572 - DNA, 25 bp, Saccharomyces pastorianus
gtggtttatcacgtctgggacgcca

SEQ ID NO: 32573 - DNA, 25 bp, Saccharomyces pastorianus
caagctcgcagattcaggtccagaa

SEQ ID NO: 32574 - DNA, 25 bp, Saccharomyces pastorianus
aagacgatggatgtgcctcccaaga

SEQ ID NO: 32575 - DNA, 25 bp, Saccharomyces pastorianus
gcggattacatccaacatgcttatt

SEQ ID NO: 32576 - DNA, 25 bp, Saccharomyces pastorianus
caccgatacttctcagactgtcaag

SEQ ID NO: 32577 - DNA, 25 bp, Saccharomyces pastorianus
ggaagcaatggctcgcctggtacga

SEQ ID NO: 32578 - DNA, 25 bp, Saccharomyces pastorianus
gatatcctatctgacttgaactctg

SEQ ID NO: 32579 - DNA, 25 bp, Saccharomyces pastorianus
gaatgcagttttgtctaccatcgca

SEQ ID NO: 32580 - DNA, 25 bp, Saccharomyces pastorianus
tgaagctgttcatggttctgctcca

SEQ ID NO: 32581 - DNA, 25 bp, Saccharomyces pastorianus
gcgctacttttgtcctcagttatga

SEQ ID NO: 32582 - DNA, 25 bp, Saccharomyces pastorianus
gaaccggcgatttggctggtactgc

SEQ ID NO: 32583 - DNA, 25 bp, Saccharomyces pastorianus
tttgccccggtgttgttcaatccat

SEQ ID NO: 32584 - DNA, 25 bp, Saccharomyces pastorianus
tgggtttaactccttctgcgaatat

SEQ ID NO: 32585 - DNA, 25 bp, Saccharomyces pastorianus
tgtctctgtctgtccaaatctttac

SEQ ID NO: 32586 - DNA, 25 bp, Saccharomyces pastorianus
gaggcctccgagagagtcatcagat

SEQ ID NO: 32587 - DNA, 25 bp, Saccharomyces pastorianus
tggtcttttcgttagtgttgccaaa

SEQ ID NO: 32588 - DNA, 25 bp, Saccharomyces pastorianus
gttctgctccagatattgccggaaa

SEQ ID NO: 32589 - DNA, 25 bp, Saccharomyces pastorianus
gaagggtccggtactgatgcagaat

SEQ ID NO: 32590 - DNA, 25 bp, Saccharomyces pastorianus
attgccggagctgttgctggtcaaa

SEQ ID NO: 32591 - DNA, 25 bp, Saccharomyces pastorianus
gagttgctgttgtcgaatctccagg

SEQ ID NO: 32592 - DNA, 25 bp, Saccharomyces pastorianus
atgggtggtgatgcattccctggta

SEQ ID NO: 32593 - DNA, 25 bp, Saccharomyces pastorianus
gaatcggtattcagcctccaaaaat

SEQ ID NO: 32594 - DNA, 25 bp, Saccharomyces pastorianus
ttggccaatctctagtcatcggtat

SEQ ID NO: 32595 - DNA, 25 bp, Saccharomyces pastorianus
gggtcattctggtgccattgtggaa

SEQ ID NO: 32596 - DNA, 25 bp, Saccharomyces pastorianus
cattccctggtactgatttcatcga

SEQ ID NO: 32597 - DNA, 25 bp, Saccharomyces pastorianus
atagaagccgctcaattcctgaaag

SEQ ID NO: 32598 - DNA, 25 bp, Saccharomyces pastorianus
tatgaggctgtccaacaaaccacaa

SEQ ID NO: 32599 - DNA, 25 bp, Saccharomyces pastorianus
agagtaagccaatgcccgtggcatc

SEQ ID NO: 32600 - DNA, 25 bp, Saccharomyces pastorianus
gggaatttataacgtcgatactcta

SEQ ID NO: 32601 - DNA, 25 bp, Saccharomyces pastorianus
tcgccaaaagtgatgccaacgccaa

SEQ ID NO: 32602 - DNA, 25 bp, Saccharomyces pastorianus
cacaaggacttgatctaccagctat

SEQ ID NO: 32603 - DNA, 25 bp, Saccharomyces pastorianus
aatcaggagttgtcaccaaagcttg

SEQ ID NO: 32604 - DNA, 25 bp, Saccharomyces pastorianus
ttctagcctctagggtaccgaaata

SEQ ID NO: 32605 - DNA, 25 bp, Saccharomyces pastorianus
gtgtcatagcggcaacgtatcagaa

SEQ ID NO: 32606 - DNA, 25 bp, Saccharomyces pastorianus
gagcagaaatcaatccctacgtttt

SEQ ID NO: 32607 - DNA, 25 bp, Saccharomyces pastorianus
atttctgacatcctagaccaattca

SEQ ID NO: 32608 - DNA, 25 bp, Saccharomyces pastorianus
gtttcatatgttaagcagcactacc

SEQ ID NO: 32609 - DNA, 25 bp, Saccharomyces pastorianus
gcttgacgacgagttgcttattaat

SEQ ID NO: 32610 - DNA, 25 bp, Saccharomyces pastorianus
ggaagcccactttcattacaatcag

SEQ ID NO: 32611 - DNA, 25 bp, Saccharomyces pastorianus
ggaagcctcgtttcacttcagctac

SEQ ID NO: 32612 - DNA, 25 bp, Saccharomyces pastorianus
ctttgctttagggtttgatctcgat

SEQ ID NO: 32613 - DNA, 25 bp, Saccharomyces pastorianus
gaccccggtgccttgcaaaaaggtg

SEQ ID NO: 32614 - DNA, 25 bp, Saccharomyces pastorianus
tcctccattggtagaacacttgaag

SEQ ID NO: 32615 - DNA, 25 bp, Saccharomyces pastorianus
cgatttcatcaaggcctttgcttta

SEQ ID NO: 32616 - DNA, 25 bp, Saccharomyces pastorianus
gatgattccattgcgctactaagac

SEQ ID NO: 32617 - DNA, 25 bp, Saccharomyces pastorianus
tggaccaagatttatcctccattgg

SEQ ID NO: 32618 - DNA, 25 bp, Saccharomyces pastorianus
aagaattgtcttggccgactccaaa

SEQ ID NO: 32619 - DNA, 25 bp, Saccharomyces pastorianus
aaattatggtcccaccacacagact

SEQ ID NO: 32620 - DNA, 25 bp, Saccharomyces pastorianus
aggagaccatctgtcgagggccatt

SEQ ID NO: 32621 - DNA, 25 bp, Saccharomyces pastorianus
gtcgagggccattggtcgtattgct

SEQ ID NO: 32622 - DNA, 25 bp, Saccharomyces pastorianus
ttcatatctgtggtatctgcgggtt

SEQ ID NO: 32623 - DNA, 25 bp, Saccharomyces pastorianus
tgattgtatgatcgctcacggtgct

SEQ ID NO: 32624 - DNA, 25 bp, Saccharomyces pastorianus
atgactgtggcgcatttaatcgaat

SEQ ID NO: 32625 - DNA, 25 bp, Saccharomyces pastorianus
tgcgggttgatgacagttattgcca

SEQ ID NO: 32626 - DNA, 25 bp, Saccharomyces pastorianus
ctcacggtgctgcttcatttttaaa

SEQ ID NO: 32627 - DNA, 25 bp, Saccharomyces pastorianus
gacatctaccaaatccatattccat

SEQ ID NO: 32628 - DNA, 25 bp, Saccharomyces pastorianus
tgaaggtgacgcttctccattcaca

SEQ ID NO: 32629 - DNA, 25 bp, Saccharomyces pastorianus
gtcctacatattaccaacgtttaag

SEQ ID NO: 32630 - DNA, 25 bp, Saccharomyces pastorianus
taaggtggctgcattatctggtaat

SEQ ID NO: 32631 - DNA, 25 bp, Saccharomyces pastorianus
atccgacgccttcagagttcatatc

SEQ ID NO: 32632 - DNA, 25 bp, Saccharomyces pastorianus
gatgacaagatccacgccagagccc

SEQ ID NO: 32633 - DNA, 25 bp, Saccharomyces pastorianus
ttcactagtaccgaatttcccaatg

SEQ ID NO: 32634 - DNA, 25 bp, Saccharomyces pastorianus
tttccaagaacctactacctgtcaa

SEQ ID NO: 32635 - DNA, 25 bp, Saccharomyces pastorianus
gaggctgaggccctttgttacagaa

SEQ ID NO: 32636 - DNA, 25 bp, Saccharomyces pastorianus
ggctattttcctcggtttacaatat

SEQ ID NO: 32637 - DNA, 25 bp, Saccharomyces pastorianus
aacggtaaccgtgattcttcagata

SEQ ID NO: 32638 - DNA, 25 bp, Saccharomyces pastorianus
ttcacaacaatcatcctcttcttat

SEQ ID NO: 32639 - DNA, 25 bp, Saccharomyces pastorianus
tactccgatcgatgcctttttgaat

SEQ ID NO: 32640 - DNA, 25 bp, Saccharomyces pastorianus
gaatctcaaggcaagctcaccgggt

SEQ ID NO: 32641 - DNA, 25 bp, Saccharomyces pastorianus
ggtttgcagaagacgccaacgacaa

SEQ ID NO: 32642 - DNA, 25 bp, Saccharomyces pastorianus
gattcttcagatagtggtacccagt

SEQ ID NO: 32643 - DNA, 25 bp, Saccharomyces pastorianus
tgtcaaaggcttccgatttccttca

SEQ ID NO: 32644 - DNA, 25 bp, Saccharomyces pastorianus
gaaagcgctactgacacttgtaagt

SEQ ID NO: 32645 - DNA, 25 bp, Saccharomyces pastorianus
atcgcaggtgtctttttgtattggc

SEQ ID NO: 32646 - DNA, 25 bp, Saccharomyces pastorianus
aagcccttttgtctgttggtgtcgc

SEQ ID NO: 32647 - DNA, 25 bp, Saccharomyces pastorianus
aatgggtttgctcgttatatctttc

SEQ ID NO: 32648 - DNA, 25 bp, Saccharomyces pastorianus
gctgaaagtgctgctaacctcggtt

SEQ ID NO: 32649 - DNA, 25 bp, Saccharomyces pastorianus
acctcggttctctgttgtttactat

SEQ ID NO: 32650 - DNA, 25 bp, Saccharomyces pastorianus
tacccaatcggcttttacgcaaatg

SEQ ID NO: 32651 - DNA, 25 bp, Saccharomyces pastorianus
acttagccagcgtcaattcatatta

SEQ ID NO: 32652 - DNA, 25 bp, Saccharomyces pastorianus
tgacttacttcattcaagccctttt

SEQ ID NO: 32653 - DNA, 25 bp, Saccharomyces pastorianus
gtgctttgttttggctattctccat

SEQ ID NO: 32654 - DNA, 25 bp, Saccharomyces pastorianus
aggccggcactggttatttgactga

SEQ ID NO: 32655 - DNA, 25 bp, Saccharomyces pastorianus
tctttgctttcgttgggctaatatc

SEQ ID NO: 32656 - DNA, 25 bp, Saccharomyces pastorianus
agctggtttattatcgtgcacttcc

SEQ ID NO: 32657 - DNA, 25 bp, Saccharomyces pastorianus
aatcgccatgtgttgcatctggaaa

SEQ ID NO: 32658 - DNA, 25 bp, Saccharomyces pastorianus
aaatggtatcgtcctcatcttctgt

SEQ ID NO: 32659 - DNA, 25 bp, Saccharomyces pastorianus
gtgatcccagaagagtccattttta

SEQ ID NO: 32660 - DNA, 25 bp, Saccharomyces pastorianus
aattcggtcatcttgtcacagtctt

SEQ ID NO: 32661 - DNA, 25 bp, Saccharomyces pastorianus
accatgacgcgcaacttagatctac

SEQ ID NO: 32662 - DNA, 25 bp, Saccharomyces pastorianus
agagcaaattgctatctcggtcatt

SEQ ID NO: 32663 - DNA, 25 bp, Saccharomyces pastorianus
aattgtgtacgcttcattctttgct

SEQ ID NO: 32664 - DNA, 25 bp, Saccharomyces pastorianus
agcttgcccctttgaaattcgatga

SEQ ID NO: 32665 - DNA, 25 bp, Saccharomyces pastorianus
atcttctgtagttcctgtgatccca

SEQ ID NO: 32666 - DNA, 25 bp, Saccharomyces pastorianus
ggaagccccaattaaaccctctgag

SEQ ID NO: 32667 - DNA, 25 bp, Saccharomyces pastorianus
atgttggtgaccagtttgccccagt

SEQ ID NO: 32668 - DNA, 25 bp, Saccharomyces pastorianus
gcctctaaaaggcaggtcccagtta

SEQ ID NO: 32669 - DNA, 25 bp, Saccharomyces pastorianus
gccggatgtacactttggatagctt

SEQ ID NO: 32670 - DNA, 25 bp, Saccharomyces pastorianus
gatagcttcccctcaagaaactgta

SEQ ID NO: 32671 - DNA, 25 bp, Saccharomyces pastorianus
tgccccagtcggatcagcaaatgat

SEQ ID NO: 32672 - DNA, 25 bp, Saccharomyces pastorianus
cattggactttgctgagagaacttt

SEQ ID NO: 32673 - DNA, 25 bp, Saccharomyces pastorianus
gccgtaggcatcgttccaggtgaaa

SEQ ID NO: 32674 - DNA, 25 bp, Saccharomyces pastorianus
aaaccctctgagaccttgcatgttg

SEQ ID NO: 32675 - DNA, 25 bp, Saccharomyces pastorianus
aggttggtctcttgatgatgtggaa

SEQ ID NO: 32676 - DNA, 25 bp, Saccharomyces pastorianus
aatactttagagtcctttgcgcctt

SEQ ID NO: 32677 - DNA, 25 bp, Saccharomyces pastorianus
tgactctaacgcaacaacccaagat

SEQ ID NO: 32678 - DNA, 25 bp, Saccharomyces pastorianus
agcactaccggccatggtgatgatg

SEQ ID NO: 32679 - DNA, 25 bp, Saccharomyces pastorianus
aattcctttgttacagctacgaacg

SEQ ID NO: 32680 - DNA, 25 bp, Saccharomyces pastorianus
caatttgttgggtatatccggcggt

SEQ ID NO: 32681 - DNA, 25 bp, Saccharomyces pastorianus
gaatgtcaagatcctttccaaatga

SEQ ID NO: 32682 - DNA, 25 bp, Saccharomyces pastorianus
gaaaggttcccctactgtagatcaa

SEQ ID NO: 32683 - DNA, 25 bp, Saccharomyces pastorianus
gagaccgcaagcaaatcgcaccgta

SEQ ID NO: 32684 - DNA, 25 bp, Saccharomyces pastorianus
cattcatacctgtgagcactaccgg

SEQ ID NO: 32685 - DNA, 25 bp, Saccharomyces pastorianus
gtatgccaccctaatgaagcggaga

SEQ ID NO: 32686 - DNA, 25 bp, Saccharomyces pastorianus
ggagtagcgccaagagccacatcag

SEQ ID NO: 32687 - DNA, 25 bp, Saccharomyces pastorianus
aaggaatctccataaccccaattat

SEQ ID NO: 32688 - DNA, 25 bp, Saccharomyces pastorianus
gatcgggtccaacattgaactgcat

SEQ ID NO: 32689 - DNA, 25 bp, Saccharomyces pastorianus
cacgggagctcacttgttttcaatt

SEQ ID NO: 32690 - DNA, 25 bp, Saccharomyces pastorianus
tggtgtccgctttgcagatgcttaa

SEQ ID NO: 32691 - DNA, 25 bp, Saccharomyces pastorianus
gctatggccgtgttggaatctcact

SEQ ID NO: 32692 - DNA, 25 bp, Saccharomyces pastorianus
tgttttcaattcacgcacacggatc

SEQ ID NO: 32693 - DNA, 25 bp, Saccharomyces pastorianus
ttgattgtcgctggtgtagacccca

SEQ ID NO: 32694 - DNA, 25 bp, Saccharomyces pastorianus
atctgttcaagtaccagggccacat

SEQ ID NO: 32695 - DNA, 25 bp, Saccharomyces pastorianus
agggccacattggtgcctatttgat

SEQ ID NO: 32696 - DNA, 25 bp, Saccharomyces pastorianus
ataaattccctagaggcaccactgc

SEQ ID NO: 32697 - DNA, 25 bp, Saccharomyces pastorianus
aaattggcctccgatgcgatccagg

SEQ ID NO: 32698 - DNA, 25 bp, Saccharomyces pastorianus
tatacacttcgagagagccacgggt

SEQ ID NO: 32699 - DNA, 25 bp, Saccharomyces pastorianus
caacaacagacattagtaacgatat

SEQ ID NO: 32700 - DNA, 25 bp, Saccharomyces pastorianus
acgatatggttatttgagcaagttg

SEQ ID NO: 32701 - DNA, 25 bp, Saccharomyces pastorianus
gagatacctgttaatagtgcaaacg

SEQ ID NO: 32702 - DNA, 25 bp, Saccharomyces pastorianus
aatcagaggcaaaatagcagggttt

SEQ ID NO: 32703 - DNA, 25 bp, Saccharomyces pastorianus
tattcaactatttacaacaacagac

SEQ ID NO: 32704 - DNA, 25 bp, Saccharomyces pastorianus
tcgatgacgctatagagatacctgt

SEQ ID NO: 32705 - DNA, 25 bp, Saccharomyces pastorianus
agatgtagaaaagggcacgccgctc

SEQ ID NO: 32706 - DNA, 25 bp, Saccharomyces pastorianus
tggtgccaccaatcaactgtatatt

SEQ ID NO: 32707 - DNA, 25 bp, Saccharomyces pastorianus
cacgccgctcgggaaaatactgtta

SEQ ID NO: 32708 - DNA, 25 bp, Saccharomyces pastorianus
gaagcaaggcgatggtgccaccaat

SEQ ID NO: 32709 - DNA, 25 bp, Saccharomyces pastorianus
gagcaagttggcataagaatcagag

SEQ ID NO: 32710 - DNA, 25 bp, Saccharomyces pastorianus
ccttgatggctttctcgtttatgat

SEQ ID NO: 32711 - DNA, 25 bp, Saccharomyces pastorianus
atgcctactcatttgtctcacttta

SEQ ID NO: 32712 - DNA, 25 bp, Saccharomyces pastorianus
ttactggccgccttaatggatcttt

SEQ ID NO: 32713 - DNA, 25 bp, Saccharomyces pastorianus
gtggccgagtactttaaccgttatg

SEQ ID NO: 32714 - DNA, 25 bp, Saccharomyces pastorianus
aacgatccagaggtcttccaacagt

SEQ ID NO: 32715 - DNA, 25 bp, Saccharomyces pastorianus
agttacaccacctgtttgtttgctt

SEQ ID NO: 32716 - DNA, 25 bp, Saccharomyces pastorianus
attgtgttctcggtgctggactgga

SEQ ID NO: 32717 - DNA, 25 bp, Saccharomyces pastorianus
atgactcgctcgtttggttccattt

SEQ ID NO: 32718 - DNA, 25 bp, Saccharomyces pastorianus
gttccatttgcttcgggtctttact

SEQ ID NO: 32719 - DNA, 25 bp, Saccharomyces pastorianus
gtagtagcaggtttgttctccagat

SEQ ID NO: 32720 - DNA, 25 bp, Saccharomyces pastorianus
gccttattttccatgttcaccagtt

SEQ ID NO: 32721 - DNA, 25 bp, Saccharomyces pastorianus
accggtatgaataactggtctatca

SEQ ID NO: 32722 - DNA, 25 bp, Saccharomyces pastorianus
atcactatttggatttctctcaagt

SEQ ID NO: 32723 - DNA, 25 bp, Saccharomyces pastorianus
ttggagacccatacttacataatgt

SEQ ID NO: 32724 - DNA, 25 bp, Saccharomyces pastorianus
aaggtggcttcgtttatgaggctga

SEQ ID NO: 32725 - DNA, 25 bp, Saccharomyces pastorianus
gttattgctaattacatgtcagacc

SEQ ID NO: 32726 - DNA, 25 bp, Saccharomyces pastorianus
gttgggcacacacgattcaatggtt

SEQ ID NO: 32727 - DNA, 25 bp, Saccharomyces pastorianus
gagttagatcctagcgaacctaatt

SEQ ID NO: 32728 - DNA, 25 bp, Saccharomyces pastorianus
gcacagtggcagaatacttcagcag

SEQ ID NO: 32729 - DNA, 25 bp, Saccharomyces pastorianus
gaaagatactttatgttgggcacac

SEQ ID NO: 32730 - DNA, 25 bp, Saccharomyces pastorianus
atttgagagatgtcattaccggtat

SEQ ID NO: 32731 - DNA, 25 bp, Saccharomyces pastorianus
aatattgttgctcccaagcagtcca

SEQ ID NO: 32732 - DNA, 25 bp, Saccharomyces pastorianus
agcaatcgcttcacattacattcat

SEQ ID NO: 32733 - DNA, 25 bp, Saccharomyces pastorianus
atcagttgagattcggtagttcacc

SEQ ID NO: 32734 - DNA, 25 bp, Saccharomyces pastorianus
atggatgcgaatctaattgcttcaa

SEQ ID NO: 32735 - DNA, 25 bp, Saccharomyces pastorianus
ggacacaattttcttcgccattgac

SEQ ID NO: 32736 - DNA, 25 bp, Saccharomyces pastorianus
tcgctgttacacaccacgatataat

SEQ ID NO: 32737 - DNA, 25 bp, Saccharomyces pastorianus
tcgccattgaccacgctttgagaaa

SEQ ID NO: 32738 - DNA, 25 bp, Saccharomyces pastorianus
acgttttgggtatctgtcttttcag

SEQ ID NO: 32739 - DNA, 25 bp, Saccharomyces pastorianus
gaaactacctctttgccattagatg

SEQ ID NO: 32740 - DNA, 25 bp, Saccharomyces pastorianus
cgaaaccaacgaacctgaatgactt

SEQ ID NO: 32741 - DNA, 25 bp, Saccharomyces pastorianus
ttacattctcatacgcctaatccag

SEQ ID NO: 32742 - DNA, 25 bp, Saccharomyces pastorianus
agttcacctattcctatcgctgtta

SEQ ID NO: 32743 - DNA, 25 bp, Saccharomyces pastorianus
caaaaccccagtcactttagccaag

SEQ ID NO: 32744 - DNA, 25 bp, Saccharomyces pastorianus
cccagtcactttagccaaggtcatc

SEQ ID NO: 32745 - DNA, 25 bp, Saccharomyces pastorianus
tggtgtcacccaagtccgtgtcgaa

SEQ ID NO: 32746 - DNA, 25 bp, Saccharomyces pastorianus
ccccagtcactttagccaaggtcat

SEQ ID NO: 32747 - DNA, 25 bp, Saccharomyces pastorianus
gtggtgtcacccaagtccgtgtcga

SEQ ID NO: 32748 - DNA, 25 bp, Saccharomyces pastorianus
ggtgtcacccaagtccgtgtcgaat

SEQ ID NO: 32749 - DNA, 25 bp, Saccharomyces pastorianus
gataacaaaaccccagtcactttag

SEQ ID NO: 32750 - DNA, 25 bp, Saccharomyces pastorianus
accccagtcactttagccaaggtca

SEQ ID NO: 32751 - DNA, 25 bp, Saccharomyces pastorianus
gtgtcacccaagtccgtgtcgaatt

SEQ ID NO: 32752 - DNA, 25 bp, Saccharomyces pastorianus
gaaagatcagacttctcagaaaatg

SEQ ID NO: 32753 - DNA, 25 bp, Saccharomyces pastorianus
aatgggttccagtctcttctaagta

SEQ ID NO: 32754 - DNA, 25 bp, Saccharomyces pastorianus
attcggcgagagaactgtaccattt

SEQ ID NO: 32755 - DNA, 25 bp, Saccharomyces pastorianus
aagagtccacgttaactatgataat

SEQ ID NO: 32756 - DNA, 25 bp, Saccharomyces pastorianus
tctcacacagtttccttcaaaagct

SEQ ID NO: 32757 - DNA, 25 bp, Saccharomyces pastorianus
ggtttgatcaaagtttctcacacag

SEQ ID NO: 32758 - DNA, 25 bp, Saccharomyces pastorianus
tatggaacacaactttggccacgtt

SEQ ID NO: 32759 - DNA, 25 bp, Saccharomyces pastorianus
atcgtctcatcctcaaggtttctta

SEQ ID NO: 32760 - DNA, 25 bp, Saccharomyces pastorianus
gtacagctgataaggtcgttttgaa

SEQ ID NO: 32761 - DNA, 25 bp, Saccharomyces pastorianus
ggccacgttgtcaaaaacagtccat

SEQ ID NO: 32762 - DNA, 25 bp, Saccharomyces pastorianus
ctcttctaagtacaactctccgtta

SEQ ID NO: 32763 - DNA, 25 bp, Saccharomyces pastorianus
gactcttcactcgattctttatcta

SEQ ID NO: 32764 - DNA, 25 bp, Saccharomyces pastorianus
agtggattctgagctaaccgataat

SEQ ID NO: 32765 - DNA, 25 bp, Saccharomyces pastorianus
tgactgaaccagtgcccgatgattg

SEQ ID NO: 32766 - DNA, 25 bp, Saccharomyces pastorianus
gaaatgatgagctctcaccgacttt

SEQ ID NO: 32767 - DNA, 25 bp, Saccharomyces pastorianus
tttacaggtcgaaattatgcccatg

SEQ ID NO: 32768 - DNA, 25 bp, Saccharomyces pastorianus
tcagtcgatggcgaacggtttccgt

SEQ ID NO: 32769 - DNA, 25 bp, Saccharomyces pastorianus
gataccaaattttttcctgcagctt

SEQ ID NO: 32770 - DNA, 25 bp, Saccharomyces pastorianus
ggtactatcgacttaatcatgacag

SEQ ID NO: 32771 - DNA, 25 bp, Saccharomyces pastorianus
caagtctggtttgttttcagtcgat

SEQ ID NO: 32772 - DNA, 25 bp, Saccharomyces pastorianus
cttcgaaccaaacactgatccagac

SEQ ID NO: 32773 - DNA, 25 bp, Saccharomyces pastorianus
taagggctctcacgtgttggaacca

SEQ ID NO: 32774 - DNA, 25 bp, Saccharomyces pastorianus
tatggcctgcagaagacgcactacg

SEQ ID NO: 32775 - DNA, 25 bp, Saccharomyces pastorianus
cactctctctcaaaatggacgccag

SEQ ID NO: 32776 - DNA, 25 bp, Saccharomyces pastorianus
atttaccggtgaaggactcatttat

SEQ ID NO: 32777 - DNA, 25 bp, Saccharomyces pastorianus
agaagtgccgaatgacactctctct

SEQ ID NO: 32778 - DNA, 25 bp, Saccharomyces pastorianus
taacaatgaagatgccctagacctt

SEQ ID NO: 32779 - DNA, 25 bp, Saccharomyces pastorianus
cggtgggtcccaataattttatatg

SEQ ID NO: 32780 - DNA, 25 bp, Saccharomyces pastorianus
cactacggagaggtatgcttgctat

SEQ ID NO: 32781 - DNA, 25 bp, Saccharomyces pastorianus
tactgcactattggattacgctaca

SEQ ID NO: 32782 - DNA, 25 bp, Saccharomyces pastorianus
caaactgctcgctgactatgataag

SEQ ID NO: 32783 - DNA, 25 bp, Saccharomyces pastorianus
gaattgagtgcactaccgatgctag

SEQ ID NO: 32784 - DNA, 25 bp, Saccharomyces pastorianus
gatccaaaatcaactctactgcact

SEQ ID NO: 32785 - DNA, 25 bp, Saccharomyces pastorianus
gatctcatcggcatatacgcgatca

SEQ ID NO: 32786 - DNA, 25 bp, Saccharomyces pastorianus
tcattctttttgttcaagggacctt

SEQ ID NO: 32787 - DNA, 25 bp, Saccharomyces pastorianus
atatcgtcgttgctttttcattctt

SEQ ID NO: 32788 - DNA, 25 bp, Saccharomyces pastorianus
gttctcctaacttgggcgatatatt

SEQ ID NO: 32789 - DNA, 25 bp, Saccharomyces pastorianus
gatatcagcgcaagttctcctaact

SEQ ID NO: 32790 - DNA, 25 bp, Saccharomyces pastorianus
ggaagatggtgttacgcctctaccc

SEQ ID NO: 32791 - DNA, 25 bp, Saccharomyces pastorianus
ggtacaaccattcatcatacttgat

SEQ ID NO: 32792 - DNA, 25 bp, Saccharomyces pastorianus
gcctctaccctccaaaataatttat

SEQ ID NO: 32793 - DNA, 25 bp, Saccharomyces pastorianus
aggtcactgcattttgtagatccaa

SEQ ID NO: 32794 - DNA, 25 bp, Saccharomyces pastorianus
ggtattccgcctatagaattgggca

SEQ ID NO: 32795 - DNA, 25 bp, Saccharomyces pastorianus
gactgggacgatttctgtaatgatt

SEQ ID NO: 32796 - DNA, 25 bp, Saccharomyces pastorianus
acttggtaagtctagcgatcctgta

SEQ ID NO: 32797 - DNA, 25 bp, Saccharomyces pastorianus
gacctaaaccatggctgggtgctca

SEQ ID NO: 32798 - DNA, 25 bp, Saccharomyces pastorianus
gatcaaggcgttctccgaaaacatt

SEQ ID NO: 32799 - DNA, 25 bp, Saccharomyces pastorianus
gacattgctgaatttctgggcccaa

SEQ ID NO: 32800 - DNA, 25 bp, Saccharomyces pastorianus
tacaggttagtctggcagtcccaag

SEQ ID NO: 32801 - DNA, 25 bp, Saccharomyces pastorianus
aagtggcagccactgtctacagcat

SEQ ID NO: 32802 - DNA, 25 bp, Saccharomyces pastorianus
ttatcgatcgctggcctacgaatga

SEQ ID NO: 32803 - DNA, 25 bp, Saccharomyces pastorianus
gagatctatttcttggtccattatc

SEQ ID NO: 32804 - DNA, 25 bp, Saccharomyces pastorianus
ttgacggactggttttcatccctat

SEQ ID NO: 32805 - DNA, 25 bp, Saccharomyces pastorianus
ttaacactggtgatgcataccccgc

SEQ ID NO: 32806 - DNA, 25 bp, Saccharomyces pastorianus
ttctgggcccaaaggttgacggact

SEQ ID NO: 32807 - DNA, 25 bp, Saccharomyces pastorianus
tttcagctcaccgattctattcaag

SEQ ID NO: 32808 - DNA, 25 bp, Saccharomyces pastorianus
attcagtaatctcggctttgttgca

SEQ ID NO: 32809 - DNA, 25 bp, Saccharomyces pastorianus
atatgctgcttaaacggacctgccg

SEQ ID NO: 32810 - DNA, 25 bp, Saccharomyces pastorianus
ggaacttcagttacgttgactcaga

SEQ ID NO: 32811 - DNA, 25 bp, Saccharomyces pastorianus
aattgaccgacactgatgccttcaa

SEQ ID NO: 32812 - DNA, 25 bp, Saccharomyces pastorianus
gttggccttagtgcttctctggtgg

SEQ ID NO: 32813 - DNA, 25 bp, Saccharomyces pastorianus
ctgccatttgttcccctaatatatt

SEQ ID NO: 32814 - DNA, 25 bp, Saccharomyces pastorianus
aaagtttctaagctggtgtctgcca

SEQ ID NO: 32815 - DNA, 25 bp, Saccharomyces pastorianus
agcatctgattttcagctcaccgat

SEQ ID NO: 32816 - DNA, 25 bp, Saccharomyces pastorianus
ctggtggccctttgtgatattgtat

SEQ ID NO: 32817 - DNA, 25 bp, Saccharomyces pastorianus
tattccttcttttcccattcagtaa

SEQ ID NO: 32818 - DNA, 25 bp, Saccharomyces pastorianus
agctgcaagtaatggcggctcgtcc

SEQ ID NO: 32819 - DNA, 25 bp, Saccharomyces pastorianus
gcattcctcggacaatcacagacat

SEQ ID NO: 32820 - DNA, 25 bp, Saccharomyces pastorianus
gtccggaggcggatcattcactgaa

SEQ ID NO: 32821 - DNA, 25 bp, Saccharomyces pastorianus
agcgttccttggacagtcgcagacg

SEQ ID NO: 32822 - DNA, 25 bp, Saccharomyces pastorianus
cgcaacttgataaaccttcggtctt

SEQ ID NO: 32823 - DNA, 25 bp, Saccharomyces pastorianus
gggaccacaggcatctttagccgat

SEQ ID NO: 32824 - DNA, 25 bp, Saccharomyces pastorianus
aatgccagcagcaggaacgtccgga

SEQ ID NO: 32825 - DNA, 25 bp, Saccharomyces pastorianus
attggcttcaatcagaggcgcaggt

SEQ ID NO: 32826 - DNA, 25 bp, Saccharomyces pastorianus
ggacgcgatgctttattggcttcaa

SEQ ID NO: 32827 - DNA, 25 bp, Saccharomyces pastorianus
aatcgatgacgaatgctgcaccacc

SEQ ID NO: 32828 - DNA, 25 bp, Saccharomyces pastorianus
agaagtacgcggagaacctgccaca

SEQ ID NO: 32829 - DNA, 25 bp, Saccharomyces pastorianus
aatcgttgctgatttatccagtgat

SEQ ID NO: 32830 - DNA, 25 bp, Saccharomyces pastorianus
gcagcagctcggaaattgacaggtt

SEQ ID NO: 32831 - DNA, 25 bp, Saccharomyces pastorianus
gcgggcttaactctatacatcatca

SEQ ID NO: 32832 - DNA, 25 bp, Saccharomyces pastorianus
ggcgcttccgaagaaaccttacatg

SEQ ID NO: 32833 - DNA, 25 bp, Saccharomyces pastorianus
tggagtaccaatcacaccaattgca

SEQ ID NO: 32834 - DNA, 25 bp, Saccharomyces pastorianus
gattcaaacccaagcttttacaatg

SEQ ID NO: 32835 - DNA, 25 bp, Saccharomyces pastorianus
agagcttccatctataacgccttat

SEQ ID NO: 32836 - DNA, 25 bp, Saccharomyces pastorianus
aacgccttatcagtacaagccgtgc

SEQ ID NO: 32837 - DNA, 25 bp, Saccharomyces pastorianus
tatggtgttattatggcaggtgccc

SEQ ID NO: 32838 - DNA, 25 bp, Saccharomyces pastorianus
tcatcgttcggttggtgggtttaga

SEQ ID NO: 32839 - DNA, 25 bp, Saccharomyces pastorianus
aactccgcttataacacaattccaa

SEQ ID NO: 32840 - DNA, 25 bp, Saccharomyces pastorianus
gtgccattatcatgttcgatgtgac

SEQ ID NO: 32841 - DNA, 25 bp, Saccharomyces pastorianus
gaaatacatcgccactatcggtgtt

SEQ ID NO: 32842 - DNA, 25 bp, Saccharomyces pastorianus
gtccgtgtgtgcgaaaatatcccga

SEQ ID NO: 32843 - DNA, 25 bp, Saccharomyces pastorianus
attggagtttgttgcctcgcctgct

SEQ ID NO: 32844 - DNA, 25 bp, Saccharomyces pastorianus
tggctccaccggaagtccaagtcga

SEQ ID NO: 32845 - DNA, 25 bp, Saccharomyces pastorianus
tcgatgtgacttctaggattaccta

SEQ ID NO: 32846 - DNA, 25 bp, Saccharomyces pastorianus
gaatgttcccaactggcatagagac

SEQ ID NO: 32847 - DNA, 25 bp, Saccharomyces pastorianus
atcggtgttgaggtccatcctttat

SEQ ID NO: 32848 - DNA, 25 bp, Saccharomyces pastorianus
ggctggctagaaaactggctggtaa

SEQ ID NO: 32849 - DNA, 25 bp, Saccharomyces pastorianus
gaaaccgttcttatggctggctaga

SEQ ID NO: 32850 - DNA, 25 bp, Saccharomyces pastorianus
aatatcccgatagtgttatgtggta

SEQ ID NO: 32851 - DNA, 25 bp, Saccharomyces pastorianus
ttgtgatgagattccccaacgaagt

SEQ ID NO: 32852 - DNA, 25 bp, Saccharomyces pastorianus
atgtgatttgattcacccaacccca

SEQ ID NO: 32853 - DNA, 25 bp, Saccharomyces pastorianus
aacaccactcccttgaaggctattg

SEQ ID NO: 32854 - DNA, 25 bp, Saccharomyces pastorianus
agtgatgccaggtgacaacgtcgaa

SEQ ID NO: 32855 - DNA, 25 bp, Saccharomyces pastorianus
gaaggctattgttaccggtattgaa

SEQ ID NO: 32856 - DNA, 25 bp, Saccharomyces pastorianus
tatggtcttggccaaaccgggtact

SEQ ID NO: 32857 - DNA, 25 bp, Saccharomyces pastorianus
actacaggccgcaaatgtttatcag

SEQ ID NO: 32858 - DNA, 25 bp, Saccharomyces pastorianus
aagcttttggatgccgtggacgagt

SEQ ID NO: 32859 - DNA, 25 bp, Saccharomyces pastorianus
ggaattagactctgccatggcgggt

SEQ ID NO: 32860 - DNA, 25 bp, Saccharomyces pastorianus
tgttaaggcccataccaagattcta

SEQ ID NO: 32861 - DNA, 25 bp, Saccharomyces pastorianus
aagaccattcgatgcaagtgatgcc

SEQ ID NO: 32862 - DNA, 25 bp, Saccharomyces pastorianus
atagtaaacctgtgcttccttggga

SEQ ID NO: 32863 - DNA, 25 bp, Saccharomyces pastorianus
atgtcgcaagaaagcagcgctttat

SEQ ID NO: 32864 - DNA, 25 bp, Saccharomyces pastorianus
ggaacgtcaaaagcaaccagtatca

SEQ ID NO: 32865 - DNA, 25 bp, Saccharomyces pastorianus
gaatctcaggaacagcttgacaaca

SEQ ID NO: 32866 - DNA, 25 bp, Saccharomyces pastorianus
acctgtgcttccttgggatcatgaa

SEQ ID NO: 32867 - DNA, 25 bp, Saccharomyces pastorianus
ggaacagcttgacaacaactctaaa

SEQ ID NO: 32868 - DNA, 25 bp, Saccharomyces pastorianus
tccaatagccccagagacaatagta

SEQ ID NO: 32869 - DNA, 25 bp, Saccharomyces pastorianus
tagagaacggagaggcagcctccaa

SEQ ID NO: 32870 - DNA, 25 bp, Saccharomyces pastorianus
taaagtagagttgaccggctggata

SEQ ID NO: 32871 - DNA, 25 bp, Saccharomyces pastorianus
gcagcgctttatctgaatctcagga

SEQ ID NO: 32872 - DNA, 25 bp, Saccharomyces pastorianus
aagcaaccagtatcagagtcagaat

SEQ ID NO: 32873 - DNA, 25 bp, Saccharomyces pastorianus
cgattctgccatggatccaggtaaa

SEQ ID NO: 32874 - DNA, 25 bp, Saccharomyces pastorianus
tgttgacccattttggaatccctac

SEQ ID NO: 32875 - DNA, 25 bp, Saccharomyces pastorianus
gaatccctacgtcgaagagcaggct

SEQ ID NO: 32876 - DNA, 25 bp, Saccharomyces pastorianus
ggaggatttacatgccgagtactta

SEQ ID NO: 32877 - DNA, 25 bp, Saccharomyces pastorianus
gttcaggttcataagcttttcatca

SEQ ID NO: 32878 - DNA, 25 bp, Saccharomyces pastorianus
gagcaggctcaagatcgttgttata

SEQ ID NO: 32879 - DNA, 25 bp, Saccharomyces pastorianus
gagttttcgatgagtcgccaactga

SEQ ID NO: 32880 - DNA, 25 bp, Saccharomyces pastorianus
gaacgtatatgtgccagatttcgag

SEQ ID NO: 32881 - DNA, 25 bp, Saccharomyces pastorianus
agggctcacgttgacatgcgcgaac

SEQ ID NO: 32882 - DNA, 25 bp, Saccharomyces pastorianus
aagagggtacttctcatttcaatga

SEQ ID NO: 32883 - DNA, 25 bp, Saccharomyces pastorianus
aaagctggtaattcagggctcacgt

SEQ ID NO: 32884 - DNA, 25 bp, Saccharomyces pastorianus
ttgattctacccaatgccaatgcca

SEQ ID NO: 32885 - DNA, 25 bp, Saccharomyces pastorianus
gacgactatctaatttctgagggcg

SEQ ID NO: 32886 - DNA, 25 bp, Saccharomyces pastorianus
gatacaactacagctagcgggccga

SEQ ID NO: 32887 - DNA, 25 bp, Saccharomyces pastorianus
atacggatgaggtgggttctgaatt

SEQ ID NO: 32888 - DNA, 25 bp, Saccharomyces pastorianus
aataaccatcgaaaacgcccatata

SEQ ID NO: 32889 - DNA, 25 bp, Saccharomyces pastorianus
gcaagtaacgacacaggtgcccgta

SEQ ID NO: 32890 - DNA, 25 bp, Saccharomyces pastorianus
cactggagggactaatactggtaat

SEQ ID NO: 32891 - DNA, 25 bp, Saccharomyces pastorianus
ctagcgggccgaacattgaagtaaa

SEQ ID NO: 32892 - DNA, 25 bp, Saccharomyces pastorianus
gaacttaatgctctgtttatacgat

SEQ ID NO: 32893 - DNA, 25 bp, Saccharomyces pastorianus
aacagcatgtctcacactggaggga

SEQ ID NO: 32894 - DNA, 25 bp, Saccharomyces pastorianus
acaggtgcccgtacagacatgagta

SEQ ID NO: 32895 - DNA, 25 bp, Saccharomyces pastorianus
gatgatttagtcttggtcaccccaa

SEQ ID NO: 32896 - DNA, 25 bp, Saccharomyces pastorianus
gttcactttggaaccaaccttgatt

SEQ ID NO: 32897 - DNA, 25 bp, Saccharomyces pastorianus
aaaattgactcacgccaagatcgct

SEQ ID NO: 32898 - DNA, 25 bp, Saccharomyces pastorianus
agctgaattggatgttactgtccca

SEQ ID NO: 32899 - DNA, 25 bp, Saccharomyces pastorianus
aaatattttggctgacttgaacgaa

SEQ ID NO: 32900 - DNA, 25 bp, Saccharomyces pastorianus
atcgctgctttcacctacgaaattg

SEQ ID NO: 32901 - DNA, 25 bp, Saccharomyces pastorianus
actgttttggaaaccaagcctgcca

SEQ ID NO: 32902 - DNA, 25 bp, Saccharomyces pastorianus
cttggacccaacctatgtgaaacct

SEQ ID NO: 32903 - DNA, 25 bp, Saccharomyces pastorianus
aaccttgattgctactctagctgaa

SEQ ID NO: 32904 - DNA, 25 bp, Saccharomyces pastorianus
gaattccttacttgtcttggaccca

SEQ ID NO: 32905 - DNA, 25 bp, Saccharomyces pastorianus
gagctatcgagaattccttacttgt

SEQ ID NO: 32906 - DNA, 25 bp, Saccharomyces pastorianus
tgcccattttctacgttgacaagcc

SEQ ID NO: 32907 - DNA, 25 bp, Saccharomyces pastorianus
gtacacgacagggaaggcgctcagc

SEQ ID NO: 32908 - DNA, 25 bp, Saccharomyces pastorianus
gatctaaccatccacgagtcgggct

SEQ ID NO: 32909 - DNA, 25 bp, Saccharomyces pastorianus
acttggctgacgctaccgcagaaaa

SEQ ID NO: 32910 - DNA, 25 bp, Saccharomyces pastorianus
aggcgctcagcgtacatgacctgaa

SEQ ID NO: 32911 - DNA, 25 bp, Saccharomyces pastorianus
gtttgccctacagcacacgggagga

SEQ ID NO: 32912 - DNA, 25 bp, Saccharomyces pastorianus
cgcattgtagactcgctcaacgtga

SEQ ID NO: 32913 - DNA, 25 bp, Saccharomyces pastorianus
ttgacaagccgctggagttcttcac

SEQ ID NO: 32914 - DNA, 25 bp, Saccharomyces pastorianus
aagaagtcgtgcacagtttgcccta

SEQ ID NO: 32915 - DNA, 25 bp, Saccharomyces pastorianus
tgacctgaacggcatgtgcaccaag

SEQ ID NO: 32916 - DNA, 25 bp, Saccharomyces pastorianus
aaatgggaggctggacgttcgtcac

SEQ ID NO: 32917 - DNA, 25 bp, Saccharomyces pastorianus
agaatcaccctgcacgtggactgtc

SEQ ID NO: 32918 - DNA, 25 bp, Saccharomyces pastorianus
ggtgacctctcctgcgagatgatct

SEQ ID NO: 32919 - DNA, 25 bp, Saccharomyces pastorianus
agatgatctcgcactttctcgaaag

SEQ ID NO: 32920 - DNA, 25 bp, Saccharomyces pastorianus
agaacgatcaccaccgcagcgagag

SEQ ID NO: 32921 - DNA, 25 bp, Saccharomyces pastorianus
tcaacgtccagacaggcatcgggtt

SEQ ID NO: 32922 - DNA, 25 bp, Saccharomyces pastorianus
aaaatccagattgcgatcgccctga

SEQ ID NO: 32923 - DNA, 25 bp, Saccharomyces pastorianus
aagcttcgcagaggccagcagaatc

SEQ ID NO: 32924 - DNA, 25 bp, Saccharomyces pastorianus
agttgcagagcaggccacgcagtcg

SEQ ID NO: 32925 - DNA, 25 bp, Saccharomyces pastorianus
gatcgcgttgggacaagccttcaaa

SEQ ID NO: 32926 - DNA, 25 bp, Saccharomyces pastorianus
tggtcgctgatcgtcgagtgcatcg

SEQ ID NO: 32927 - DNA, 25 bp, Saccharomyces pastorianus
gcagtcgcaggtgatcaacgtccag

SEQ ID NO: 32928 - DNA, 25 bp, Saccharomyces pastorianus
aaacttcagagctactgccattcac

SEQ ID NO: 32929 - DNA, 25 bp, Saccharomyces pastorianus
gcgaaaacgccaaccttgtcaaagg

SEQ ID NO: 32930 - DNA, 25 bp, Saccharomyces pastorianus
ggtgaccgtactcaatccgaaagag

SEQ ID NO: 32931 - DNA, 25 bp, Saccharomyces pastorianus
tggccgaccaattgacagatttctt

SEQ ID NO: 32932 - DNA, 25 bp, Saccharomyces pastorianus
ctccttcagaggtggcagcggcagt

SEQ ID NO: 32933 - DNA, 25 bp, Saccharomyces pastorianus
gtgccgccagtctattggttgccac

SEQ ID NO: 32934 - DNA, 25 bp, Saccharomyces pastorianus
ggtttcggtcgcagcagtggtaaca

SEQ ID NO: 32935 - DNA, 25 bp, Saccharomyces pastorianus
gttatcaactacgacttgccaagcg

SEQ ID NO: 32936 - DNA, 25 bp, Saccharomyces pastorianus
gaaattcctccatttttgaaagacg

SEQ ID NO: 32937 - DNA, 25 bp, Saccharomyces pastorianus
ttgccaccgctgttgctgctagagg

SEQ ID NO: 32938 - DNA, 25 bp, Saccharomyces pastorianus
gggtagcgacaacaaatcatctggc

SEQ ID NO: 32939 - DNA, 25 bp, Saccharomyces pastorianus
gagacaggccgatcattagttccct

SEQ ID NO: 32940 - DNA, 25 bp, Saccharomyces pastorianus
agtttttagctcgtgtgtttcgtcg

SEQ ID NO: 32941 - DNA, 25 bp, Saccharomyces pastorianus
catgttataccgtcggaggcctttt

SEQ ID NO: 32942 - DNA, 25 bp, Saccharomyces pastorianus
tccaggcccatcgactaaattcaaa

SEQ ID NO: 32943 - DNA, 25 bp, Saccharomyces pastorianus
ttagttccctgtacgaggtggccaa

SEQ ID NO: 32944 - DNA, 25 bp, Saccharomyces pastorianus
gtatattttactgcgaaccacggga

SEQ ID NO: 32945 - DNA, 25 bp, Saccharomyces pastorianus
ttcgtcgtcgggaacgcatgcatta

SEQ ID NO: 32946 - DNA, 25 bp, Saccharomyces pastorianus
atgcgcgatatgcaattccaccttt

SEQ ID NO: 32947 - DNA, 25 bp, Saccharomyces pastorianus
atcgtgaagtacattccaggcccat

SEQ ID NO: 32948 - DNA, 25 bp, Saccharomyces pastorianus
aagaatcgagttgccctagagacag

SEQ ID NO: 32949 - DNA, 25 bp, Saccharomyces pastorianus
ttatctgccaggagatttgctgacg

SEQ ID NO: 32950 - DNA, 25 bp, Saccharomyces pastorianus
cagttagatgtttctcctgtggtaa

SEQ ID NO: 32951 - DNA, 25 bp, Saccharomyces pastorianus
atgattgtcccagttagatgtttct

SEQ ID NO: 32952 - DNA, 25 bp, Saccharomyces pastorianus
gattgtcccagttagatgtttctcc

SEQ ID NO: 32953 - DNA, 25 bp, Saccharomyces pastorianus
gataagtgggaaagttacttgaact

SEQ ID NO: 32954 - DNA, 25 bp, Saccharomyces pastorianus
ccgcattgtcaagattgggcttgaa

SEQ ID NO: 32955 - DNA, 25 bp, Saccharomyces pastorianus
gtcccagttagatgtttctcctgtg

SEQ ID NO: 32956 - DNA, 25 bp, Saccharomyces pastorianus
tagatgtttctcctgtggtaaagtt

SEQ ID NO: 32957 - DNA, 25 bp, Saccharomyces pastorianus
gtaccgcattgtcaagattgggctt

SEQ ID NO: 32958 - DNA, 25 bp, Saccharomyces pastorianus
gggcttgaaaagatactgttgcaga

SEQ ID NO: 32959 - DNA, 25 bp, Saccharomyces pastorianus
aggtaccgcattgtcaagattgggc

SEQ ID NO: 32960 - DNA, 25 bp, Saccharomyces pastorianus
tgcagaagaatgattttgacccacg

SEQ ID NO: 32961 - DNA, 25 bp, Saccharomyces pastorianus
atcaattagaccactagcttcaact

SEQ ID NO: 32962 - DNA, 25 bp, Saccharomyces pastorianus
ttaagacgtcgccaactaccataaa

SEQ ID NO: 32963 - DNA, 25 bp, Saccharomyces pastorianus
actagaataacctttgttcgctaca

SEQ ID NO: 32964 - DNA, 25 bp, Saccharomyces pastorianus
gtgaagaacctgttagacgccctta

SEQ ID NO: 32965 - DNA, 25 bp, Saccharomyces pastorianus
actggaaatctctgccaacggaatt

SEQ ID NO: 32966 - DNA, 25 bp, Saccharomyces pastorianus
gagcagcgacgagtactctttatac

SEQ ID NO: 32967 - DNA, 25 bp, Saccharomyces pastorianus
tttgttcgctacaacagctctccag

SEQ ID NO: 32968 - DNA, 25 bp, Saccharomyces pastorianus
gcaatcagaagcatgctatcggcta

SEQ ID NO: 32969 - DNA, 25 bp, Saccharomyces pastorianus
gtttcatctgaacttgataccgatc

SEQ ID NO: 32970 - DNA, 25 bp, Saccharomyces pastorianus
tatgtactccaagttgatttctcaa

SEQ ID NO: 32971 - DNA, 25 bp, Saccharomyces pastorianus
gcatgctatcggctatcaagaacaa

SEQ ID NO: 32972 - DNA, 25 bp, Saccharomyces pastorianus
ctcggtgaacgatctggaactaaaa

SEQ ID NO: 32973 - DNA, 25 bp, Saccharomyces pastorianus
gtgcaagcgccgtatcacgaacaga

SEQ ID NO: 32974 - DNA, 25 bp, Saccharomyces pastorianus
acagcaggccggtttaatttcgaat

SEQ ID NO: 32975 - DNA, 25 bp, Saccharomyces pastorianus
ttgttgtccaatttcttgaactggg

SEQ ID NO: 32976 - DNA, 25 bp, Saccharomyces pastorianus
gctgcgccatgaagctatcatacta

SEQ ID NO: 32977 - DNA, 25 bp, Saccharomyces pastorianus
gtcaagcgactcagaatccgtggat

SEQ ID NO: 32978 - DNA, 25 bp, Saccharomyces pastorianus
ttgttgatctcttttgtggccatac

SEQ ID NO: 32979 - DNA, 25 bp, Saccharomyces pastorianus
tttacagatcggcaagctgcgccat

SEQ ID NO: 32980 - DNA, 25 bp, Saccharomyces pastorianus
agaaagttttgtatcgctatggacc

SEQ ID NO: 32981 - DNA, 25 bp, Saccharomyces pastorianus
aacagcattgcaaaactcggtgaac

SEQ ID NO: 32982 - DNA, 25 bp, Saccharomyces pastorianus
accaatccagaagtgcaagcgccgt

SEQ ID NO: 32983 - DNA, 25 bp, Saccharomyces pastorianus
gagacagcagttccgagccacttat

SEQ ID NO: 32984 - DNA, 25 bp, Saccharomyces pastorianus
gaactggcgcattattttggtgctg

SEQ ID NO: 32985 - DNA, 25 bp, Saccharomyces pastorianus
aggacctgttactgggcatatgtgt

SEQ ID NO: 32986 - DNA, 25 bp, Saccharomyces pastorianus
gtataattggcacggaggatctcac

SEQ ID NO: 32987 - DNA, 25 bp, Saccharomyces pastorianus
aacgaggacaggttcaactccgtgc

SEQ ID NO: 32988 - DNA, 25 bp, Saccharomyces pastorianus
ggaagcagcaactccgacactggca

SEQ ID NO: 32989 - DNA, 25 bp, Saccharomyces pastorianus
taatgagtccatgaccacacaggcc

SEQ ID NO: 32990 - DNA, 25 bp, Saccharomyces pastorianus
gctcgctaccgaggacctgaaggat

SEQ ID NO: 32991 - DNA, 25 bp, Saccharomyces pastorianus
ggagagactcgtccaaagtagtaac

SEQ ID NO: 32992 - DNA, 25 bp, Saccharomyces pastorianus
tgtgtagggtttttctttggtgtct

SEQ ID NO: 32993 - DNA, 25 bp, Saccharomyces pastorianus
gaaggatgatgcgaccccgtctaat

SEQ ID NO: 32994 - DNA, 25 bp, Saccharomyces pastorianus
cgttcggcggtctgctgatgagatt

SEQ ID NO: 32995 - DNA, 25 bp, Saccharomyces pastorianus
gcacggtaccgcttacaaattcgag

SEQ ID NO: 32996 - DNA, 25 bp, Saccharomyces pastorianus
gacctaattgcggtttactactcgt

SEQ ID NO: 32997 - DNA, 25 bp, Saccharomyces pastorianus
gatataaacgttgaactgttccccg

SEQ ID NO: 32998 - DNA, 25 bp, Saccharomyces pastorianus
aagtcgatcctggtcgttacaacaa

SEQ ID NO: 32999 - DNA, 25 bp, Saccharomyces pastorianus
tacgactatgtcatgcacggtaccg

SEQ ID NO: 33000 - DNA, 25 bp, Saccharomyces pastorianus
tgaaccttgaagacaccccagcgaa

SEQ ID NO: 33001 - DNA, 25 bp, Saccharomyces pastorianus
tcgcgccacaagattcgttgactgt

SEQ ID NO: 33002 - DNA, 25 bp, Saccharomyces pastorianus
gtgacagatcattggccgacgacta

SEQ ID NO: 33003 - DNA, 25 bp, Saccharomyces pastorianus
agcaccctatttgacgatatcttcc

SEQ ID NO: 33004 - DNA, 25 bp, Saccharomyces pastorianus
gttgactgtcactattgcatcctct

SEQ ID NO: 33005 - DNA, 25 bp, Saccharomyces pastorianus
ctcttcctacatgaccgaactgata

SEQ ID NO: 33006 - DNA, 25 bp, Saccharomyces pastorianus
agaaacgtcggatccatggacaagt

SEQ ID NO: 33007 - DNA, 25 bp, Saccharomyces pastorianus
atggacaagtcccaggccaacgtcg

SEQ ID NO: 33008 - DNA, 25 bp, Saccharomyces pastorianus
gctgcaaagagactataccatccca

SEQ ID NO: 33009 - DNA, 25 bp, Saccharomyces pastorianus
gacgaggccgtcaagatcaagaaca

SEQ ID NO: 33010 - DNA, 25 bp, Saccharomyces pastorianus
aagacctttggctgtgggtcggcca

SEQ ID NO: 33011 - DNA, 25 bp, Saccharomyces pastorianus
gatcgccaaggaattgagcctgccc

SEQ ID NO: 33012 - DNA, 25 bp, Saccharomyces pastorianus
ggtgaagctgcattgctccatgctc

SEQ ID NO: 33013 - DNA, 25 bp, Saccharomyces pastorianus
cctcatgggctccagcataacaaaa

SEQ ID NO: 33014 - DNA, 25 bp, Saccharomyces pastorianus
aagtcgggcatcattgagaacgtca

SEQ ID NO: 33015 - DNA, 25 bp, Saccharomyces pastorianus
actgatacgtggtatgtcgctggac

SEQ ID NO: 33016 - DNA, 25 bp, Saccharomyces pastorianus
aaacgattcatcgatcagaccgcat

SEQ ID NO: 33017 - DNA, 25 bp, Saccharomyces pastorianus
gctgaagtatcgagttctaggccaa

SEQ ID NO: 33018 - DNA, 25 bp, Saccharomyces pastorianus
gatggccactgattcaggacgtatt

SEQ ID NO: 33019 - DNA, 25 bp, Saccharomyces pastorianus
gatcagaccgcatttgatggccact

SEQ ID NO: 33020 - DNA, 25 bp, Saccharomyces pastorianus
agctcctcgcgaattagcggtacat

SEQ ID NO: 33021 - DNA, 25 bp, Saccharomyces pastorianus
gacgcgattatcaaagccaagggta

SEQ ID NO: 33022 - DNA, 25 bp, Saccharomyces pastorianus
taatgatgcttctgttcccgaaaac

SEQ ID NO: 33023 - DNA, 25 bp, Saccharomyces pastorianus
gctcatcgaacacttcattggctgg

SEQ ID NO: 33024 - DNA, 25 bp, Saccharomyces pastorianus
gtaaccaccggtaaagctcttctat

SEQ ID NO: 33025 - DNA, 25 bp, Saccharomyces pastorianus
agtgcatttgcaaaggccacccatt

SEQ ID NO: 33026 - DNA, 25 bp, Saccharomyces pastorianus
ggacgtattatcgatgtaaccaccg

SEQ ID NO: 33027 - DNA, 25 bp, Saccharomyces pastorianus
gactcagatagtctcgttacagctt

SEQ ID NO: 33028 - DNA, 25 bp, Saccharomyces pastorianus
gtggacatcttgttctctcaaactt

SEQ ID NO: 33029 - DNA, 25 bp, Saccharomyces pastorianus
agatgacgtgcaagtggctgcccca

SEQ ID NO: 33030 - DNA, 25 bp, Saccharomyces pastorianus
agggccaatgtctgaagtttttcca

SEQ ID NO: 33031 - DNA, 25 bp, Saccharomyces pastorianus
gagaacttgttcgtcacaggcttca

SEQ ID NO: 33032 - DNA, 25 bp, Saccharomyces pastorianus
agacaagccgctttggattctgagc

SEQ ID NO: 33033 - DNA, 25 bp, Saccharomyces pastorianus
ggacatggagtattccttctcgaga

SEQ ID NO: 33034 - DNA, 25 bp, Saccharomyces pastorianus
gagatagccaagctgttccattccg

SEQ ID NO: 33035 - DNA, 25 bp, Saccharomyces pastorianus
ttgcacccggtaattaacgatttcg

SEQ ID NO: 33036 - DNA, 25 bp, Saccharomyces pastorianus
atttcgtcggtaccgtggactcaga

SEQ ID NO: 33037 - DNA, 25 bp, Saccharomyces pastorianus
gttacagcttacaaaccattcctcg

SEQ ID NO: 33038 - DNA, 25 bp, Saccharomyces pastorianus
atcctaacattcactcccgaattga

SEQ ID NO: 33039 - DNA, 25 bp, Saccharomyces pastorianus
ggaagtttccttgctcttcagagaa

SEQ ID NO: 33040 - DNA, 25 bp, Saccharomyces pastorianus
gaagctttgtgatttcggagtcagc

SEQ ID NO: 33041 - DNA, 25 bp, Saccharomyces pastorianus
gacgattccgaatccggtattatat

SEQ ID NO: 33042 - DNA, 25 bp, Saccharomyces pastorianus
aatggcagcgaatatagctccgttt

SEQ ID NO: 33043 - DNA, 25 bp, Saccharomyces pastorianus
ggttcttgggaaaatcgccgaagca

SEQ ID NO: 33044 - DNA, 25 bp, Saccharomyces pastorianus
atacatgggcggcagatcattggat

SEQ ID NO: 33045 - DNA, 25 bp, Saccharomyces pastorianus
gattcaaggccaaccatatagtgtt

SEQ ID NO: 33046 - DNA, 25 bp, Saccharomyces pastorianus
agatgataagtcacccctggataaa

SEQ ID NO: 33047 - DNA, 25 bp, Saccharomyces pastorianus
gaagccgtaaactcactagctacaa

SEQ ID NO: 33048 - DNA, 25 bp, Saccharomyces pastorianus
gggacttccttttatatggctccag

SEQ ID NO: 33049 - DNA, 25 bp, Saccharomyces pastorianus
tccgtagataactttggccatgctt

SEQ ID NO: 33050 - DNA, 25 bp, Saccharomyces pastorianus
tagtgacttgtacactggtgtcaga

SEQ ID NO: 33051 - DNA, 25 bp, Saccharomyces pastorianus
gagagcgactccacttacaacgatg

SEQ ID NO: 33052 - DNA, 25 bp, Saccharomyces pastorianus
tggccatgctttaaatgctttcaaa

SEQ ID NO: 33053 - DNA, 25 bp, Saccharomyces pastorianus
gatccgtcgctgacttcagaaactt

SEQ ID NO: 33054 - DNA, 25 bp, Saccharomyces pastorianus
gaacttccttgatgacttctacgtt

SEQ ID NO: 33055 - DNA, 25 bp, Saccharomyces pastorianus
aacgatgagatactattccgaggaa

SEQ ID NO: 33056 - DNA, 25 bp, Saccharomyces pastorianus
aattggagagtcagctgggtgtcaa

SEQ ID NO: 33057 - DNA, 25 bp, Saccharomyces pastorianus
agattgttgagatccgtcgctgact

SEQ ID NO: 33058 - DNA, 25 bp, Saccharomyces pastorianus
gaagcgacatttgagctgccacaac

SEQ ID NO: 33059 - DNA, 25 bp, Saccharomyces pastorianus
caggtactgtttttcacgtacaaca

SEQ ID NO: 33060 - DNA, 25 bp, Saccharomyces pastorianus
aatagagaacgttgcgccgcttgaa

SEQ ID NO: 33061 - DNA, 25 bp, Saccharomyces pastorianus
agggcacaacgttgaggctcagact

SEQ ID NO: 33062 - DNA, 25 bp, Saccharomyces pastorianus
atcctagtaggcctatgcgagcttc

SEQ ID NO: 33063 - DNA, 25 bp, Saccharomyces pastorianus
aaattcggccaggtaatgttgtcaa

SEQ ID NO: 33064 - DNA, 25 bp, Saccharomyces pastorianus
taacggtgtgccgactataccaacg

SEQ ID NO: 33065 - DNA, 25 bp, Saccharomyces pastorianus
atccactgtggaatctcgtcaatca

SEQ ID NO: 33066 - DNA, 25 bp, Saccharomyces pastorianus
aaccgcgtactcttgtcgataacgg

SEQ ID NO: 33067 - DNA, 25 bp, Saccharomyces pastorianus
atatgcctcctgtgtcgtctagaaa

SEQ ID NO: 33068 - DNA, 25 bp, Saccharomyces pastorianus
atgcgagcttctgttatgatttcaa

SEQ ID NO: 33069 - DNA, 25 bp, Saccharomyces pastorianus
tataccaacgcctgctaacaacatt

SEQ ID NO: 33070 - DNA, 25 bp, Saccharomyces pastorianus
gaatcggtggtctcaactgctaaag

SEQ ID NO: 33071 - DNA, 25 bp, Saccharomyces pastorianus
aaacgcgttgaaccatctagaggac

SEQ ID NO: 33072 - DNA, 25 bp, Saccharomyces pastorianus
agaccactggctcatcacaaagata

SEQ ID NO: 33073 - DNA, 25 bp, Saccharomyces pastorianus
taccttccatggatacgttcctgga

SEQ ID NO: 33074 - DNA, 25 bp, Saccharomyces pastorianus
gtcacttcgtcgaccaaggattcaa

SEQ ID NO: 33075 - DNA, 25 bp, Saccharomyces pastorianus
attgaaagaatttctccccactgcg

SEQ ID NO: 33076 - DNA, 25 bp, Saccharomyces pastorianus
agattcctattgtcggcatcgtggc

SEQ ID NO: 33077 - DNA, 25 bp, Saccharomyces pastorianus
tggcttcgcccacgatacggaggaa

SEQ ID NO: 33078 - DNA, 25 bp, Saccharomyces pastorianus
ggcggtggcgaagtctacaatcaaa

SEQ ID NO: 33079 - DNA, 25 bp, Saccharomyces pastorianus
atcaaatgttcccacttacagacca

SEQ ID NO: 33080 - DNA, 25 bp, Saccharomyces pastorianus
gggaatccataccacctaaatttcg

SEQ ID NO: 33081 - DNA, 25 bp, Saccharomyces pastorianus
ccactgcggtcgaattgcccaaaaa

SEQ ID NO: 33082 - DNA, 25 bp, Saccharomyces pastorianus
atcgacacttcagctctctgagaaa

SEQ ID NO: 33083 - DNA, 25 bp, Saccharomyces pastorianus
ggcagaagcaattagatcgggcaat

SEQ ID NO: 33084 - DNA, 25 bp, Saccharomyces pastorianus
aaaaagactcgcaggttccacacca

SEQ ID NO: 33085 - DNA, 25 bp, Saccharomyces pastorianus
gacacccgccgagcatttaatagtt

SEQ ID NO: 33086 - DNA, 25 bp, Saccharomyces pastorianus
gttccacaccagttctatgattcgt

SEQ ID NO: 33087 - DNA, 25 bp, Saccharomyces pastorianus
caagtggaacgttaatcggcgctaa

SEQ ID NO: 33088 - DNA, 25 bp, Saccharomyces pastorianus
agaggatgctctgtacttgatttca

SEQ ID NO: 33089 - DNA, 25 bp, Saccharomyces pastorianus
tatgattcgtcaaagacacccgccg

SEQ ID NO: 33090 - DNA, 25 bp, Saccharomyces pastorianus
gaaagttggcatcgacacttcagct

SEQ ID NO: 33091 - DNA, 25 bp, Saccharomyces pastorianus
aaaggacgtctcaaccgcattgcat

SEQ ID NO: 33092 - DNA, 25 bp, Saccharomyces pastorianus
atcgagcagcagaatcctttggaga

SEQ ID NO: 33093 - DNA, 25 bp, Saccharomyces pastorianus
tagttaccaaaccaagtcaagacaa

SEQ ID NO: 33094 - DNA, 25 bp, Saccharomyces pastorianus
gttgacctatttttcctaaactatg

SEQ ID NO: 33095 - DNA, 25 bp, Saccharomyces pastorianus
ggattttccttgaaagcacatttga

SEQ ID NO: 33096 - DNA, 25 bp, Saccharomyces pastorianus
caggaattggtagcgttttgtctca

SEQ ID NO: 33097 - DNA, 25 bp, Saccharomyces pastorianus
gggctcagtcatttatgaagtatgc

SEQ ID NO: 33098 - DNA, 25 bp, Saccharomyces pastorianus
taagaccggagtggattttccttga

SEQ ID NO: 33099 - DNA, 25 bp, Saccharomyces pastorianus
aaacgatattccacgtggcacagga

SEQ ID NO: 33100 - DNA, 25 bp, Saccharomyces pastorianus
ttttgtctcaagtgcgtggcggatc

SEQ ID NO: 33101 - DNA, 25 bp, Saccharomyces pastorianus
gaagtatgcgacgacgaatattttt

SEQ ID NO: 33102 - DNA, 25 bp, Saccharomyces pastorianus
gtcaacgggactcatttaagaccgg

SEQ ID NO: 33103 - DNA, 25 bp, Saccharomyces pastorianus
caggtatgatactccggaacgctct

SEQ ID NO: 33104 - DNA, 25 bp, Saccharomyces pastorianus
gtgatttttcactagctggctctta

SEQ ID NO: 33105 - DNA, 25 bp, Saccharomyces pastorianus
aactggttgtcggtgaccttgtcat

SEQ ID NO: 33106 - DNA, 25 bp, Saccharomyces pastorianus
ctaccatggcactgcgtgagctaat

SEQ ID NO: 33107 - DNA, 25 bp, Saccharomyces pastorianus
gttgtattaccatcaccagggtttg

SEQ ID NO: 33108 - DNA, 25 bp, Saccharomyces pastorianus
agggacatcttcttatgctaccatg

SEQ ID NO: 33109 - DNA, 25 bp, Saccharomyces pastorianus
gaagctcgagacttctcgccgcggt

SEQ ID NO: 33110 - DNA, 25 bp, Saccharomyces pastorianus
aacatggacccatttgatatgagga

SEQ ID NO: 33111 - DNA, 25 bp, Saccharomyces pastorianus
gttcgtgcaaaagctgtgactcaag

SEQ ID NO: 33112 - DNA, 25 bp, Saccharomyces pastorianus
actgaaaaacctgtgtctgagacca

SEQ ID NO: 33113 - DNA, 25 bp, Saccharomyces pastorianus
ggtttgacgtgctttatccttctaa

SEQ ID NO: 33114 - DNA, 25 bp, Saccharomyces pastorianus
cgtgaagctcggtttgttcgtgcaa

SEQ ID NO: 33115 - DNA, 25 bp, Saccharomyces pastorianus
ggacgtggtgtcgtaatctctgttt

SEQ ID NO: 33116 - DNA, 25 bp, Saccharomyces pastorianus
ggaatccgcagatgcttacaatgtg

SEQ ID NO: 33117 - DNA, 25 bp, Saccharomyces pastorianus
ttcgccggaaaaacccttatctgat

SEQ ID NO: 33118 - DNA, 25 bp, Saccharomyces pastorianus
ggacaggctcatttggaaaccaccg

SEQ ID NO: 33119 - DNA, 25 bp, Saccharomyces pastorianus
actgttcttggatcacaaaacgttg

SEQ ID NO: 33120 - DNA, 25 bp, Saccharomyces pastorianus
atgaacttggccatcacctggtggg

SEQ ID NO: 33121 - DNA, 25 bp, Saccharomyces pastorianus
acagagcctattggtcagacacttt

SEQ ID NO: 33122 - DNA, 25 bp, Saccharomyces pastorianus
ggtcagacactttgataactctact

SEQ ID NO: 33123 - DNA, 25 bp, Saccharomyces pastorianus
agttcgatgacctcaatgactacaa

SEQ ID NO: 33124 - DNA, 25 bp, Saccharomyces pastorianus
gggacagcatatcattttcttaaat

SEQ ID NO: 33125 - DNA, 25 bp, Saccharomyces pastorianus
gactacaacggacatactgcacact

SEQ ID NO: 33126 - DNA, 25 bp, Saccharomyces pastorianus
tagtccccgtgtttgcattcggaga

SEQ ID NO: 33127 - DNA, 25 bp, Saccharomyces pastorianus
gggagacccatttatgttgaacaac

SEQ ID NO: 33128 - DNA, 25 bp, Saccharomyces pastorianus
gaatggtacacagctgatcttgaac

SEQ ID NO: 33129 - DNA, 25 bp, Saccharomyces pastorianus
agagcaccaatcaatgttgtcgtag

SEQ ID NO: 33130 - DNA, 25 bp, Saccharomyces pastorianus
ggttactcaatttcatatccctttt

SEQ ID NO: 33131 - DNA, 25 bp, Saccharomyces pastorianus
gttgatcatttccacgacttgtata

SEQ ID NO: 33132 - DNA, 25 bp, Saccharomyces pastorianus
tcaaggaaaacttcggctttaccat

SEQ ID NO: 33133 - DNA, 25 bp, Saccharomyces pastorianus
aatcctccagatgacgtcgttgatc

SEQ ID NO: 33134 - DNA, 25 bp, Saccharomyces pastorianus
aggtattcctatttccttaatgaca

SEQ ID NO: 33135 - DNA, 25 bp, Saccharomyces pastorianus
ggcattaggtatatcttctgtgtca

SEQ ID NO: 33136 - DNA, 25 bp, Saccharomyces pastorianus
gaagcggactcgacattgggtaaga

SEQ ID NO: 33137 - DNA, 25 bp, Saccharomyces pastorianus
gacgcagcttcgacctggatctgga

SEQ ID NO: 33138 - DNA, 25 bp, Saccharomyces pastorianus
tgttggccattaagtacccggacgt

SEQ ID NO: 33139 - DNA, 25 bp, Saccharomyces pastorianus
gctactggacaagactgcccattgt

SEQ ID NO: 33140 - DNA, 25 bp, Saccharomyces pastorianus
ttcgtcactgtcacggtagagtcat

SEQ ID NO: 33141 - DNA, 25 bp, Saccharomyces pastorianus
gctggccactctaaaatgcgcattg

SEQ ID NO: 33142 - DNA, 25 bp, Saccharomyces pastorianus
tggctcctgtttcaagtcgtcgggt

SEQ ID NO: 33143 - DNA, 25 bp, Saccharomyces pastorianus
attgtgggcattttcttctggctcc

SEQ ID NO: 33144 - DNA, 25 bp, Saccharomyces pastorianus
gtgatgtactggactctatgcaaga

SEQ ID NO: 33145 - DNA, 25 bp, Saccharomyces pastorianus
ctaagtcgagctacgtttccaacaa

SEQ ID NO: 33146 - DNA, 25 bp, Saccharomyces pastorianus
gacggcgctgatccaatgcacgaag

SEQ ID NO: 33147 - DNA, 25 bp, Saccharomyces pastorianus
taacatgctttttacctggtttcgg

SEQ ID NO: 33148 - DNA, 25 bp, Saccharomyces pastorianus
ggcctattagaattcccacttgtga

SEQ ID NO: 33149 - DNA, 25 bp, Saccharomyces pastorianus
gtatgcaatcgatcaaccagtacat

SEQ ID NO: 33150 - DNA, 25 bp, Saccharomyces pastorianus
ataggaaatcctttacggtgcatga

SEQ ID NO: 33151 - DNA, 25 bp, Saccharomyces pastorianus
gactgtaacttgttcggcctattag

SEQ ID NO: 33152 - DNA, 25 bp, Saccharomyces pastorianus
gctatggctccatatcggatgtgta

SEQ ID NO: 33153 - DNA, 25 bp, Saccharomyces pastorianus
tgtgagattctcatccaagtaggga

SEQ ID NO: 33154 - DNA, 25 bp, Saccharomyces pastorianus
ggtgattacgaccaaagtatgcaat

SEQ ID NO: 33155 - DNA, 25 bp, Saccharomyces pastorianus
ccaaatctttggtcgactgtaactt

SEQ ID NO: 33156 - DNA, 25 bp, Saccharomyces pastorianus
ttcttcttcatctttgaggaatcat

SEQ ID NO: 33157 - DNA, 25 bp, Saccharomyces pastorianus
aagtgtcgaagttttgcttttgaat

SEQ ID NO: 33158 - DNA, 25 bp, Saccharomyces pastorianus
aaagaactgggctatggctccatat

SEQ ID NO: 33159 - DNA, 25 bp, Saccharomyces pastorianus
agctgtgatcaagtcgcctgtttta

SEQ ID NO: 33160 - DNA, 25 bp, Saccharomyces pastorianus
aaggtgcagctgttccctgtaacaa

SEQ ID NO: 33161 - DNA, 25 bp, Saccharomyces pastorianus
gtgtctcttccgttgatgatgtata

SEQ ID NO: 33162 - DNA, 25 bp, Saccharomyces pastorianus
gaatacagctctaagcccttatgca

SEQ ID NO: 33163 - DNA, 25 bp, Saccharomyces pastorianus
gaagacgtcacgatctggaaaccta

SEQ ID NO: 33164 - DNA, 25 bp, Saccharomyces pastorianus
agtcgtagctataacattcgcggaa

SEQ ID NO: 33165 - DNA, 25 bp, Saccharomyces pastorianus
ataacatctttttcattcccagctt

SEQ ID NO: 33166 - DNA, 25 bp, Saccharomyces pastorianus
acattttggtagcactatgcccgga

SEQ ID NO: 33167 - DNA, 25 bp, Saccharomyces pastorianus
aagcaatctacagcacgcagtcgta

SEQ ID NO: 33168 - DNA, 25 bp, Saccharomyces pastorianus
ggaaaccgatcctctatgggagaaa

SEQ ID NO: 33169 - DNA, 25 bp, Saccharomyces pastorianus
gtacttttacggctcgctgaataca

SEQ ID NO: 33170 - DNA, 25 bp, Saccharomyces pastorianus
aattgcagtgtactctggacccaac

SEQ ID NO: 33171 - DNA, 25 bp, Saccharomyces pastorianus
ttcgatgcgagatccttaggcagat

SEQ ID NO: 33172 - DNA, 25 bp, Saccharomyces pastorianus
atttcagtgctccaagatgtgcttg

SEQ ID NO: 33173 - DNA, 25 bp, Saccharomyces pastorianus
tagactctactaaggttaccgcgtt

SEQ ID NO: 33174 - DNA, 25 bp, Saccharomyces pastorianus
gcagattcgaaggtacggcaccgga

SEQ ID NO: 33175 - DNA, 25 bp, Saccharomyces pastorianus
atttgctcttgtgggaccggtgtga

SEQ ID NO: 33176 - DNA, 25 bp, Saccharomyces pastorianus
ggacatattccaggtgctcagccat

SEQ ID NO: 33177 - DNA, 25 bp, Saccharomyces pastorianus
gccattaccttatactgaactgcta

SEQ ID NO: 33178 - DNA, 25 bp, Saccharomyces pastorianus
tgggacatcctcaagtgtacttgtt

SEQ ID NO: 33179 - DNA, 25 bp, Saccharomyces pastorianus
tccttacccaaagagccgctatgaa

SEQ ID NO: 33180 - DNA, 25 bp, Saccharomyces pastorianus
tgaactgctagacccggagaccaaa

SEQ ID NO: 33181 - DNA, 25 bp, Saccharomyces pastorianus
cgaggatgcatttttcactgagtta

SEQ ID NO: 33182 - DNA, 25 bp, Saccharomyces pastorianus
gtgctcggaatgtcatcaacacaat

SEQ ID NO: 33183 - DNA, 25 bp, Saccharomyces pastorianus
aaaacgtgtaaatggcggcgagcaa

SEQ ID NO: 33184 - DNA, 25 bp, Saccharomyces pastorianus
aagacgtacgtttcacacagctggc

SEQ ID NO: 33185 - DNA, 25 bp, Saccharomyces pastorianus
atggcccgtgatatatgtaccttgg

SEQ ID NO: 33186 - DNA, 25 bp, Saccharomyces pastorianus
gtgttcgtttatataccggcactaa

SEQ ID NO: 33187 - DNA, 25 bp, Saccharomyces pastorianus
acagtgaaatcccagttggtggtct

SEQ ID NO: 33188 - DNA, 25 bp, Saccharomyces pastorianus
gattcgaacaacatggcgacgtttt

SEQ ID NO: 33189 - DNA, 25 bp, Saccharomyces pastorianus
ggtctggtggctaagctagttccta

SEQ ID NO: 33190 - DNA, 25 bp, Saccharomyces pastorianus
gccaaggaatggttcatagctcatg

SEQ ID NO: 33191 - DNA, 25 bp, Saccharomyces pastorianus
atgccaacaatctgggtatgctgat

SEQ ID NO: 33192 - DNA, 25 bp, Saccharomyces pastorianus
ttgctccaaacaccaatcattgtcg

SEQ ID NO: 33193 - DNA, 25 bp, Saccharomyces pastorianus
ggttcgtgatttaccagctgtggaa

SEQ ID NO: 33194 - DNA, 25 bp, Saccharomyces pastorianus
taagattccattaggtcaacccgca

SEQ ID NO: 33195 - DNA, 25 bp, Saccharomyces pastorianus
gaagacgatgactactctagtgatg

SEQ ID NO: 33196 - DNA, 25 bp, Saccharomyces pastorianus
gagtcattgttaagtctacggatta

SEQ ID NO: 33197 - DNA, 25 bp, Saccharomyces pastorianus
agtactagttcgttctgcaaagcaa

SEQ ID NO: 33198 - DNA, 25 bp, Saccharomyces pastorianus
atcccaaagagatccgtttgctatt

SEQ ID NO: 33199 - DNA, 25 bp, Saccharomyces pastorianus
tggttccattttcatttgcgcctct

SEQ ID NO: 33200 - DNA, 25 bp, Saccharomyces pastorianus
aagtgctgctagtgattataccgat

SEQ ID NO: 33201 - DNA, 25 bp, Saccharomyces pastorianus
tacggattattttaccacggatttg

SEQ ID NO: 33202 - DNA, 25 bp, Saccharomyces pastorianus
tcttttccccacaaagagacgttgt

SEQ ID NO: 33203 - DNA, 25 bp, Saccharomyces pastorianus
attgaagagagatcccctggatgaa

SEQ ID NO: 33204 - DNA, 25 bp, Saccharomyces pastorianus
gttccaattattcgacgacgaccat

SEQ ID NO: 33205 - DNA, 25 bp, Saccharomyces pastorianus
cagtccgggccattgaacagtgagt

SEQ ID NO: 33206 - DNA, 25 bp, Saccharomyces pastorianus
atcaaaaatttgaggcgcgtggcta

SEQ ID NO: 33207 - DNA, 25 bp, Saccharomyces pastorianus
tttgaggcgcgtggctaaagaactg

SEQ ID NO: 33208 - DNA, 25 bp, Saccharomyces pastorianus
agcgaaggacgccatctgatgaaat

SEQ ID NO: 33209 - DNA, 25 bp, Saccharomyces pastorianus
ggctttcttgactatcatgagttga

SEQ ID NO: 33210 - DNA, 25 bp, Saccharomyces pastorianus
taaagagggcgttccaattattcga

SEQ ID NO: 33211 - DNA, 25 bp, Saccharomyces pastorianus
agttcgatctcgatggcgatggcga

SEQ ID NO: 33212 - DNA, 25 bp, Saccharomyces pastorianus
aatagatcgtcactacagtccgggc

SEQ ID NO: 33213 - DNA, 25 bp, Saccharomyces pastorianus
gaataatgatggctttcttgactat

SEQ ID NO: 33214 - DNA, 25 bp, Saccharomyces pastorianus
ccccaccaatataatcgactctaag

SEQ ID NO: 33215 - DNA, 25 bp, Saccharomyces pastorianus
gcttacgttaccaatcctgaaacag

SEQ ID NO: 33216 - DNA, 25 bp, Saccharomyces pastorianus
gttaagtagaggtcaccccaccaat

SEQ ID NO: 33217 - DNA, 25 bp, Saccharomyces pastorianus
gccctcgatggccaatttacacata

SEQ ID NO: 33218 - DNA, 25 bp, Saccharomyces pastorianus
gtttgagccatacatagattctgca

SEQ ID NO: 33219 - DNA, 25 bp, Saccharomyces pastorianus
tggtgcgatgatttactttgatgac

SEQ ID NO: 33220 - DNA, 25 bp, Saccharomyces pastorianus
catgatctggtttgttgctactgtc

SEQ ID NO: 33221 - DNA, 25 bp, Saccharomyces pastorianus
atatccagggatttcaattcgttaa

SEQ ID NO: 33222 - DNA, 25 bp, Saccharomyces pastorianus
tcatttgctaaatcggagtgccatt

SEQ ID NO: 33223 - DNA, 25 bp, Saccharomyces pastorianus
gtattaccacgatctacacagttaa

SEQ ID NO: 33224 - DNA, 25 bp, Saccharomyces pastorianus
tacagatagggatacactccgtgcc

SEQ ID NO: 33225 - DNA, 25 bp, Saccharomyces pastorianus
tgaagccgggttctttgccataaga

SEQ ID NO: 33226 - DNA, 25 bp, Saccharomyces pastorianus
gctattgactcagatggacgggttt

SEQ ID NO: 33227 - DNA, 25 bp, Saccharomyces pastorianus
tgccattggtggtcgtagattcagc

SEQ ID NO: 33228 - DNA, 25 bp, Saccharomyces pastorianus
atactttggatcctgctcttttgag

SEQ ID NO: 33229 - DNA, 25 bp, Saccharomyces pastorianus
ggctacgaacagaccggatactttg

SEQ ID NO: 33230 - DNA, 25 bp, Saccharomyces pastorianus
taacctgggccaaactaagatcatc

SEQ ID NO: 33231 - DNA, 25 bp, Saccharomyces pastorianus
tagattcagcgaaggtacctccgcc

SEQ ID NO: 33232 - DNA, 25 bp, Saccharomyces pastorianus
tccgccgatcgtgaaatccaacgta

SEQ ID NO: 33233 - DNA, 25 bp, Saccharomyces pastorianus
accattggcgctaacttcatctttt

SEQ ID NO: 33234 - DNA, 25 bp, Saccharomyces pastorianus
gtaactgtgccactgaagccgggtt

SEQ ID NO: 33235 - DNA, 25 bp, Saccharomyces pastorianus
gagtttgatttcgaggctgctgtga

SEQ ID NO: 33236 - DNA, 25 bp, Saccharomyces pastorianus
atatttggtgcatctgaagtgggcg

SEQ ID NO: 33237 - DNA, 25 bp, Saccharomyces pastorianus
ctggtttcctttgaagttttggctg

SEQ ID NO: 33238 - DNA, 25 bp, Saccharomyces pastorianus
acatgcctcatatcaacgtcttttc

SEQ ID NO: 33239 - DNA, 25 bp, Saccharomyces pastorianus
gtttctgatttcaacctggtttcct

SEQ ID NO: 33240 - DNA, 25 bp, Saccharomyces pastorianus
ctatgctaatgatggacatgcctca

SEQ ID NO: 33241 - DNA, 25 bp, Saccharomyces pastorianus
gaaaaagaaggttccggtgctctgg

SEQ ID NO: 33242 - DNA, 25 bp, Saccharomyces pastorianus
agagaaggtgcattgctcgcaagct

SEQ ID NO: 33243 - DNA, 25 bp, Saccharomyces pastorianus
gctcgcaagctatgacattcaagat

SEQ ID NO: 33244 - DNA, 25 bp, Saccharomyces pastorianus
catctccttcacaatatgtctctat

SEQ ID NO: 33245 - DNA, 25 bp, Saccharomyces pastorianus
cagtgagctggtttctgatttcaac

SEQ ID NO: 33246 - DNA, 25 bp, Saccharomyces pastorianus
tatgtctctattttgctactagcat

SEQ ID NO: 33247 - DNA, 25 bp, Saccharomyces pastorianus
ggaagaagttcttgatgataccaaa

SEQ ID NO: 33248 - DNA, 25 bp, Saccharomyces pastorianus
tgttagtgaagcaaagactgtcatt

SEQ ID NO: 33249 - DNA, 25 bp, Saccharomyces pastorianus
aagaagctcatgtggcgaaactcaa

SEQ ID NO: 33250 - DNA, 25 bp, Saccharomyces pastorianus
tcaaagaagagggttactaccaaca

SEQ ID NO: 33251 - DNA, 25 bp, Saccharomyces pastorianus
attcctagaatcgtaccaaggtact

SEQ ID NO: 33252 - DNA, 25 bp, Saccharomyces pastorianus
caaagtcaaggctttaaagaggcta

SEQ ID NO: 33253 - DNA, 25 bp, Saccharomyces pastorianus
aagcgttgattcatacgatttgaaa

SEQ ID NO: 33254 - DNA, 25 bp, Saccharomyces pastorianus
gataccaaaagactactgcccactt

SEQ ID NO: 33255 - DNA, 25 bp, Saccharomyces pastorianus
tcatgtggcgaaactcaaagaggat

SEQ ID NO: 33256 - DNA, 25 bp, Saccharomyces pastorianus
gactactgcccactttgtatgagaa

SEQ ID NO: 33257 - DNA, 25 bp, Saccharomyces pastorianus
gaagatttggcacaattcctagaat

SEQ ID NO: 33258 - DNA, 25 bp, Saccharomyces pastorianus
gatgattggtttgcctctattgccg

SEQ ID NO: 33259 - DNA, 25 bp, Saccharomyces pastorianus
gtctcgtattctgcaagtggatcca

SEQ ID NO: 33260 - DNA, 25 bp, Saccharomyces pastorianus
ggaaagtacgccagctaacgacaaa

SEQ ID NO: 33261 - DNA, 25 bp, Saccharomyces pastorianus
tggtacacaagctccagtagacgcc

SEQ ID NO: 33262 - DNA, 25 bp, Saccharomyces pastorianus
ctattagagcacttggtcaccatca

SEQ ID NO: 33263 - DNA, 25 bp, Saccharomyces pastorianus
gacgccatagtaattctccggacaa

SEQ ID NO: 33264 - DNA, 25 bp, Saccharomyces pastorianus
gacgccgacgttaacgccaatgtga

SEQ ID NO: 33265 - DNA, 25 bp, Saccharomyces pastorianus
attgccgcttgtacgacggattcta

SEQ ID NO: 33266 - DNA, 25 bp, Saccharomyces pastorianus
atgcagataaagctcctcatggaca

SEQ ID NO: 33267 - DNA, 25 bp, Saccharomyces pastorianus
gtttgttacgtctattgccacatgc

SEQ ID NO: 33268 - DNA, 25 bp, Saccharomyces pastorianus
gaatcggattcaaagccggctcaaa

SEQ ID NO: 33269 - DNA, 25 bp, Saccharomyces pastorianus
aactggagcccgaattacatgacaa

SEQ ID NO: 33270 - DNA, 25 bp, Saccharomyces pastorianus
tggttagactgcaacgcggtgtttt

SEQ ID NO: 33271 - DNA, 25 bp, Saccharomyces pastorianus
aaactttggctaacctggcgttgat

SEQ ID NO: 33272 - DNA, 25 bp, Saccharomyces pastorianus
gaacgttgccgttaattctgcgaac

SEQ ID NO: 33273 - DNA, 25 bp, Saccharomyces pastorianus
tgggcgaaccagtcgttgaacgttg

SEQ ID NO: 33274 - DNA, 25 bp, Saccharomyces pastorianus
aaagggtatctctgtgttcgacgca

SEQ ID NO: 33275 - DNA, 25 bp, Saccharomyces pastorianus
aagttgaaaaacatctccccacatt

SEQ ID NO: 33276 - DNA, 25 bp, Saccharomyces pastorianus
ggttgaacaacctggtgcccaagtt

SEQ ID NO: 33277 - DNA, 25 bp, Saccharomyces pastorianus
ttgatctcagtcaccatgttttccg

SEQ ID NO: 33278 - DNA, 25 bp, Saccharomyces pastorianus
aatggtcattccacctttgttgttg

SEQ ID NO: 33279 - DNA, 25 bp, Saccharomyces pastorianus
attcgagattgatcatgggccgtct

SEQ ID NO: 33280 - DNA, 25 bp, Saccharomyces pastorianus
gacgtgctccactatctctattaga

SEQ ID NO: 33281 - DNA, 25 bp, Saccharomyces pastorianus
atgtcagatccacttctccaatgta

SEQ ID NO: 33282 - DNA, 25 bp, Saccharomyces pastorianus
tcacattgcatgatcctcgtttagg

SEQ ID NO: 33283 - DNA, 25 bp, Saccharomyces pastorianus
acaattgccctccttgaacttgttg

SEQ ID NO: 33284 - DNA, 25 bp, Saccharomyces pastorianus
gtcccgagaacgagtacatcctgtg

SEQ ID NO: 33285 - DNA, 25 bp, Saccharomyces pastorianus
actttgtctcttcattggacacctg

SEQ ID NO: 33286 - DNA, 25 bp, Saccharomyces pastorianus
taacaccgtcggttattccgtatca

SEQ ID NO: 33287 - DNA, 25 bp, Saccharomyces pastorianus
aagagccacatcgtactcgttactt

SEQ ID NO: 33288 - DNA, 25 bp, Saccharomyces pastorianus
ggtaccatcagaagacgtgctccac

SEQ ID NO: 33289 - DNA, 25 bp, Saccharomyces pastorianus
ctgtgctcaggttcccatgatggga

SEQ ID NO: 33290 - DNA, 25 bp, Saccharomyces pastorianus
atcttccaaggtcacgcagcaacaa

SEQ ID NO: 33291 - DNA, 25 bp, Saccharomyces pastorianus
ggcgccctacaagaaatcgagcaat

SEQ ID NO: 33292 - DNA, 25 bp, Saccharomyces pastorianus
taatgcttgaaagaggcgccctaca

SEQ ID NO: 33293 - DNA, 25 bp, Saccharomyces pastorianus
aatttcactccggaacagtgcgaaa

SEQ ID NO: 33294 - DNA, 25 bp, Saccharomyces pastorianus
tggacccatttcacttgcaacatat

SEQ ID NO: 33295 - DNA, 25 bp, Saccharomyces pastorianus
tggaatatacatttgcgcagcagaa

SEQ ID NO: 33296 - DNA, 25 bp, Saccharomyces pastorianus
gagaacctaatgataccactgtgaa

SEQ ID NO: 33297 - DNA, 25 bp, Saccharomyces pastorianus
tgatatttacctgctggatgccacc

SEQ ID NO: 33298 - DNA, 25 bp, Saccharomyces pastorianus
aagaggcgcacgtaacgccgacttt

SEQ ID NO: 33299 - DNA, 25 bp, Saccharomyces pastorianus
aaaacttggtagctatcggtgagaa

SEQ ID NO: 33300 - DNA, 25 bp, Saccharomyces pastorianus
gaagttggacgattggacccatttc

SEQ ID NO: 33301 - DNA, 25 bp, Saccharomyces pastorianus
aagggcaatcgccatttccgatgac

SEQ ID NO: 33302 - DNA, 25 bp, Saccharomyces pastorianus
tgccgggaccaccttttatgaaaat

SEQ ID NO: 33303 - DNA, 25 bp, Saccharomyces pastorianus
gaacccattttcatagaacatttga

SEQ ID NO: 33304 - DNA, 25 bp, Saccharomyces pastorianus
caaagctttgataacatcggagatc

SEQ ID NO: 33305 - DNA, 25 bp, Saccharomyces pastorianus
aaacgaatgtgctgtttcagaccat

SEQ ID NO: 33306 - DNA, 25 bp, Saccharomyces pastorianus
gataatctaaatgccgggaccacct

SEQ ID NO: 33307 - DNA, 25 bp, Saccharomyces pastorianus
gacgaagcgtaggtcttctgaatat

SEQ ID NO: 33308 - DNA, 25 bp, Saccharomyces pastorianus
gaaatattctctacggttgctcgaa

SEQ ID NO: 33309 - DNA, 25 bp, Saccharomyces pastorianus
gtttcagaccattgacaaagctttg

SEQ ID NO: 33310 - DNA, 25 bp, Saccharomyces pastorianus
ggcacaacagactttgaacccattt

SEQ ID NO: 33311 - DNA, 25 bp, Saccharomyces pastorianus
gtcatacaggagagaagcgagcata

SEQ ID NO: 33312 - DNA, 25 bp, Saccharomyces pastorianus
gagatcaaattaccggtatccaacg

SEQ ID NO: 33313 - DNA, 25 bp, Saccharomyces pastorianus
gacctctacgaaagtctggtaccta

SEQ ID NO: 33314 - DNA, 25 bp, Saccharomyces pastorianus
agtgtatcaataccattgccctcga

SEQ ID NO: 33315 - DNA, 25 bp, Saccharomyces pastorianus
atctaggttcgaaggtggcgtcgca

SEQ ID NO: 33316 - DNA, 25 bp, Saccharomyces pastorianus
tacggctgacaataatcccagtggt

SEQ ID NO: 33317 - DNA, 25 bp, Saccharomyces pastorianus
ggtacctaaaattctggagccacgt

SEQ ID NO: 33318 - DNA, 25 bp, Saccharomyces pastorianus
aaaggcgttctgagtctaggcccga

SEQ ID NO: 33319 - DNA, 25 bp, Saccharomyces pastorianus
gtctaggcccgattcagacgtagat

SEQ ID NO: 33320 - DNA, 25 bp, Saccharomyces pastorianus
tagcgaattgccatttcctgttcca

SEQ ID NO: 33321 - DNA, 25 bp, Saccharomyces pastorianus
gtgaaaacacttctgctacggctga

SEQ ID NO: 33322 - DNA, 25 bp, Saccharomyces pastorianus
attgccctcgatacgtgaagccagg

SEQ ID NO: 33323 - DNA, 25 bp, Saccharomyces pastorianus
acgcaccaggtcacaagttacacaa

SEQ ID NO: 33324 - DNA, 25 bp, Saccharomyces pastorianus
aatcagcagcatccaaattcaaaga

SEQ ID NO: 33325 - DNA, 25 bp, Saccharomyces pastorianus
ggttacattggctagtcagggaaaa

SEQ ID NO: 33326 - DNA, 25 bp, Saccharomyces pastorianus
gaaatacctgccaacagagcaatcg

SEQ ID NO: 33327 - DNA, 25 bp, Saccharomyces pastorianus
tacccagaatccaattgtccgactt

SEQ ID NO: 33328 - DNA, 25 bp, Saccharomyces pastorianus
gtccgactttgattgtgtattaccg

SEQ ID NO: 33329 - DNA, 25 bp, Saccharomyces pastorianus
agagcaatcgaaaactacccagaat

SEQ ID NO: 33330 - DNA, 25 bp, Saccharomyces pastorianus
gtgttcgttcatctatcattgcaaa

SEQ ID NO: 33331 - DNA, 25 bp, Saccharomyces pastorianus
tttcccaccttttacaatcagcagc

SEQ ID NO: 33332 - DNA, 25 bp, Saccharomyces pastorianus
aatagcggtgtctacgtgttcgttc

SEQ ID NO: 33333 - DNA, 25 bp, Saccharomyces pastorianus
tacagagtagaatcctttcccacct

SEQ ID NO: 33334 - DNA, 25 bp, Saccharomyces pastorianus
ttatggtaaaggtcggtgccgtatc

SEQ ID NO: 33335 - DNA, 25 bp, Saccharomyces pastorianus
agatacctcgattaacccgactggg

SEQ ID NO: 33336 - DNA, 25 bp, Saccharomyces pastorianus
gaacaagccactaaactaggacatt

SEQ ID NO: 33337 - DNA, 25 bp, Saccharomyces pastorianus
gatgatgtgcctacatcctacactt

SEQ ID NO: 33338 - DNA, 25 bp, Saccharomyces pastorianus
gcaggttgccaaagcgtcggatgaa

SEQ ID NO: 33339 - DNA, 25 bp, Saccharomyces pastorianus
gcctacatcctacacttcaggttta

SEQ ID NO: 33340 - DNA, 25 bp, Saccharomyces pastorianus
aagaacctagcgttagtgagtcatg

SEQ ID NO: 33341 - DNA, 25 bp, Saccharomyces pastorianus
tgagtcatggtggtgctattaggat

SEQ ID NO: 33342 - DNA, 25 bp, Saccharomyces pastorianus
gataagcatggtgagggttccttta

SEQ ID NO: 33343 - DNA, 25 bp, Saccharomyces pastorianus
tcgtcatcagacgtgttggtaacac

SEQ ID NO: 33344 - DNA, 25 bp, Saccharomyces pastorianus
gtaggcaaacgacatctttagtttt

SEQ ID NO: 33345 - DNA, 25 bp, Saccharomyces pastorianus
aacacctccgtcactatagttgact

SEQ ID NO: 33346 - DNA, 25 bp, Saccharomyces pastorianus
aatggactgtgtttctgtatgacgt

SEQ ID NO: 33347 - DNA, 25 bp, Saccharomyces pastorianus
ggatccgcatcagattgaaccaagt

SEQ ID NO: 33348 - DNA, 25 bp, Saccharomyces pastorianus
gaagtccagatgcaacaccttttag

SEQ ID NO: 33349 - DNA, 25 bp, Saccharomyces pastorianus
atgtaccattgcctcaacgggccaa

SEQ ID NO: 33350 - DNA, 25 bp, Saccharomyces pastorianus
caacgcgcttacaccaggtattgaa

SEQ ID NO: 33351 - DNA, 25 bp, Saccharomyces pastorianus
agctctgctggcacataagccggat

SEQ ID NO: 33352 - DNA, 25 bp, Saccharomyces pastorianus
gagcaatgggcaattcttcgatgaa

SEQ ID NO: 33353 - DNA, 25 bp, Saccharomyces pastorianus
tactgctactcgcaatgtaccattg

SEQ ID NO: 33354 - DNA, 25 bp, Saccharomyces pastorianus
aattatgctcatcagcccagacaag

SEQ ID NO: 33355 - DNA, 25 bp, Saccharomyces pastorianus
ggatgtgccgaacctggaaaccagt

SEQ ID NO: 33356 - DNA, 25 bp, Saccharomyces pastorianus
gaaccaagtcttattgctttgcaga

SEQ ID NO: 33357 - DNA, 25 bp, Saccharomyces pastorianus
tgagtactctgtggttcgtattcct

SEQ ID NO: 33358 - DNA, 25 bp, Saccharomyces pastorianus
aaagttgcccacaccaatggttatt

SEQ ID NO: 33359 - DNA, 25 bp, Saccharomyces pastorianus
tgtattgaatgcttggaacggaacc

SEQ ID NO: 33360 - DNA, 25 bp, Saccharomyces pastorianus
ttattcgaacacttcactttaccct

SEQ ID NO: 33361 - DNA, 25 bp, Saccharomyces pastorianus
aatcaaagtgatgtcgtttcgggca

SEQ ID NO: 33362 - DNA, 25 bp, Saccharomyces pastorianus
cgtattcctggctctattaacgtgc

SEQ ID NO: 33363 - DNA, 25 bp, Saccharomyces pastorianus
gtttcgggcattacctcttataaat

SEQ ID NO: 33364 - DNA, 25 bp, Saccharomyces pastorianus
tgatgcgtttgccttggactcgctc

SEQ ID NO: 33365 - DNA, 25 bp, Saccharomyces pastorianus
gaacaaaccggcattccaaaacctg

SEQ ID NO: 33366 - DNA, 25 bp, Saccharomyces pastorianus
ggactcgctcgaattcaaggaacaa

SEQ ID NO: 33367 - DNA, 25 bp, Saccharomyces pastorianus
gattttctattgtgcatctggtaaa

SEQ ID NO: 33368 - DNA, 25 bp, Saccharomyces pastorianus
ttaagaatctggtggaacatcctaa

SEQ ID NO: 33369 - DNA, 25 bp, Saccharomyces pastorianus
aaacagtgcccctggtgctcttgga

SEQ ID NO: 33370 - DNA, 25 bp, Saccharomyces pastorianus
gacacagtacaggtatactctcgag

SEQ ID NO: 33371 - DNA, 25 bp, Saccharomyces pastorianus
aaggactttcacaagatctttcaat

SEQ ID NO: 33372 - DNA, 25 bp, Saccharomyces pastorianus
ggttccatcactgactggttagcta

SEQ ID NO: 33373 - DNA, 25 bp, Saccharomyces pastorianus
gatacaaagctactcgttgacgtga

SEQ ID NO: 33374 - DNA, 25 bp, Saccharomyces pastorianus
aactcgccttcgctaatcttgagga

SEQ ID NO: 33375 - DNA, 25 bp, Saccharomyces pastorianus
tactcgttgacgtgagggaacccaa

SEQ ID NO: 33376 - DNA, 25 bp, Saccharomyces pastorianus
aaatattccagtaaacagtgcccct

SEQ ID NO: 33377 - DNA, 25 bp, Saccharomyces pastorianus
accggtatttatcctggttccatca

SEQ ID NO: 33378 - DNA, 25 bp, Saccharomyces pastorianus
aattggctaggtcttatgggtacga

SEQ ID NO: 33379 - DNA, 25 bp, Saccharomyces pastorianus
gaaaaacttggatctctgctcgaaa

SEQ ID NO: 33380 - DNA, 25 bp, Saccharomyces pastorianus
atatttcgccaaacgaaggcccgct

SEQ ID NO: 33381 - DNA, 25 bp, Saccharomyces pastorianus
aatttttccacgacacttttgatat

SEQ ID NO: 33382 - DNA, 25 bp, Saccharomyces pastorianus
tatcgtcgacttttctctttcaaga

SEQ ID NO: 33383 - DNA, 25 bp, Saccharomyces pastorianus
gcccgctcagtaaacgcttcgaata

SEQ ID NO: 33384 - DNA, 25 bp, Saccharomyces pastorianus
aagtattgctcttgattggttgggc

SEQ ID NO: 33385 - DNA, 25 bp, Saccharomyces pastorianus
aagtagctggtgtgagtccacctta

SEQ ID NO: 33386 - DNA, 25 bp, Saccharomyces pastorianus
tggtcgttttcgatgctgccaaaga

SEQ ID NO: 33387 - DNA, 25 bp, Saccharomyces pastorianus
atatacaggcgcaaggaccatcgcg

SEQ ID NO: 33388 - DNA, 25 bp, Saccharomyces pastorianus
ctgctcgaaaaatctcccaaacttt

SEQ ID NO: 33389 - DNA, 25 bp, Saccharomyces pastorianus
ggatctatccaagccaatgactgat

SEQ ID NO: 33390 - DNA, 25 bp, Saccharomyces pastorianus
atgacgactctttggaactggaaaa

SEQ ID NO: 33391 - DNA, 25 bp, Saccharomyces pastorianus
cgatattttcttggctaaaccctct

SEQ ID NO: 33392 - DNA, 25 bp, Saccharomyces pastorianus
agttgccaaacaagcccaagcgttg

SEQ ID NO: 33393 - DNA, 25 bp, Saccharomyces pastorianus
agggctcagtggtatatgacgactc

SEQ ID NO: 33394 - DNA, 25 bp, Saccharomyces pastorianus
atggccttgattatgttcgcacacc

SEQ ID NO: 33395 - DNA, 25 bp, Saccharomyces pastorianus
gggtgatgacacaccaatcagtttt

SEQ ID NO: 33396 - DNA, 25 bp, Saccharomyces pastorianus
agagacccttcaagattttcatttg

SEQ ID NO: 33397 - DNA, 25 bp, Saccharomyces pastorianus
tcaagtaccctattgcctttgataa

SEQ ID NO: 33398 - DNA, 25 bp, Saccharomyces pastorianus
agcgttgtacgactttgctcttaac

SEQ ID NO: 33399 - DNA, 25 bp, Saccharomyces pastorianus
tggtgccactactcctattgatata

SEQ ID NO: 33400 - DNA, 25 bp, Saccharomyces pastorianus
taagtctgccagaacctcagcgagg

SEQ ID NO: 33401 - DNA, 25 bp, Saccharomyces pastorianus
ctggtacattaagcccgttgtcgga

SEQ ID NO: 33402 - DNA, 25 bp, Saccharomyces pastorianus
taatttctccgaagatcctcgttcc

SEQ ID NO: 33403 - DNA, 25 bp, Saccharomyces pastorianus
gggtgatttccagtttttgtacatt

SEQ ID NO: 33404 - DNA, 25 bp, Saccharomyces pastorianus
aacactgttttgttctttgtctcaa

SEQ ID NO: 33405 - DNA, 25 bp, Saccharomyces pastorianus
gaatccggaatcgtactttggtaag

SEQ ID NO: 33406 - DNA, 25 bp, Saccharomyces pastorianus
attttgaccgctgtcatcttatccg

SEQ ID NO: 33407 - DNA, 25 bp, Saccharomyces pastorianus
gaccctcagctaacttaatttctcc

SEQ ID NO: 33408 - DNA, 25 bp, Saccharomyces pastorianus
atcttatccgttggtccaccatata

SEQ ID NO: 33409 - DNA, 25 bp, Saccharomyces pastorianus
gatattgtagcctctatttgcgtga

SEQ ID NO: 33410 - DNA, 25 bp, Saccharomyces pastorianus
cctcgttcctcttttgatcagtata

SEQ ID NO: 33411 - DNA, 25 bp, Saccharomyces pastorianus
gacgatgctgtagagtcctcagata

SEQ ID NO: 33412 - DNA, 25 bp, Saccharomyces pastorianus
gtttagctcctctgttggtgtagta

SEQ ID NO: 33413 - DNA, 25 bp, Saccharomyces pastorianus
aaagagttctttccgaccagctgct

SEQ ID NO: 33414 - DNA, 25 bp, Saccharomyces pastorianus
cctggtatggccgttggtacaattt

SEQ ID NO: 33415 - DNA, 25 bp, Saccharomyces pastorianus
gactatcctgaagttgctacatcgc

SEQ ID NO: 33416 - DNA, 25 bp, Saccharomyces pastorianus
gtaccgtgtagatcctataccgcag

SEQ ID NO: 33417 - DNA, 25 bp, Saccharomyces pastorianus
tatagcttgcttttactcgtaccgt

SEQ ID NO: 33418 - DNA, 25 bp, Saccharomyces pastorianus
tgctttattcgccagtatctcttta

SEQ ID NO: 33419 - DNA, 25 bp, Saccharomyces pastorianus
gtacatttcgacacttggttgcaat

SEQ ID NO: 33420 - DNA, 25 bp, Saccharomyces pastorianus
tccatcttcaacgattttacctctg

SEQ ID NO: 33421 - DNA, 25 bp, Saccharomyces pastorianus
aatgacacctttctccatgttcaag

SEQ ID NO: 33422 - DNA, 25 bp, Saccharomyces pastorianus
ggtcatgcccagagactttcaagct

SEQ ID NO: 33423 - DNA, 25 bp, Saccharomyces pastorianus
aaagcctatcccagttgtgtacgac

SEQ ID NO: 33424 - DNA, 25 bp, Saccharomyces pastorianus
aagacaacgaccgaatctgcaggcg

SEQ ID NO: 33425 - DNA, 25 bp, Saccharomyces pastorianus
gggtaacttggcagctttcgacagc

SEQ ID NO: 33426 - DNA, 25 bp, Saccharomyces pastorianus
taagaacttgccagttaccgttgaa

SEQ ID NO: 33427 - DNA, 25 bp, Saccharomyces pastorianus
ttgccaccactgagctaccaagaga

SEQ ID NO: 33428 - DNA, 25 bp, Saccharomyces pastorianus
gaagcttctggtgaatgggctccaa

SEQ ID NO: 33429 - DNA, 25 bp, Saccharomyces pastorianus
gtgatgactttactacaacttcctg

SEQ ID NO: 33430 - DNA, 25 bp, Saccharomyces pastorianus
atcaaccagctattatctctgccta

SEQ ID NO: 33431 - DNA, 25 bp, Saccharomyces pastorianus
tcacccgtgacaatgttcagctact

SEQ ID NO: 33432 - DNA, 25 bp, Saccharomyces pastorianus
gctttcgacagcaacgttttggata

SEQ ID NO: 33433 - DNA, 25 bp, Saccharomyces pastorianus
gtaccagcggccaaagttctgtgat

SEQ ID NO: 33434 - DNA, 25 bp, Saccharomyces pastorianus
gaagagtctcattcgacgcagatgt

SEQ ID NO: 33435 - DNA, 25 bp, Saccharomyces pastorianus
gtacccgctattggatgcatcctta

SEQ ID NO: 33436 - DNA, 25 bp, Saccharomyces pastorianus
tgcatccttatcatctgttttcttg

SEQ ID NO: 33437 - DNA, 25 bp, Saccharomyces pastorianus
tgctaatctgtcgtggttggaaacc

SEQ ID NO: 33438 - DNA, 25 bp, Saccharomyces pastorianus
tgtacctttttatgcatccttgacc

SEQ ID NO: 33439 - DNA, 25 bp, Saccharomyces pastorianus
atacgagctgttcttccaggagcaa

SEQ ID NO: 33440 - DNA, 25 bp, Saccharomyces pastorianus
gaccggtggagttatgtacccgcta

SEQ ID NO: 33441 - DNA, 25 bp, Saccharomyces pastorianus
gacgcagatgttcaaacctccggag

SEQ ID NO: 33442 - DNA, 25 bp, Saccharomyces pastorianus
actactcaacgcttcttctattata

SEQ ID NO: 33443 - DNA, 25 bp, Saccharomyces pastorianus
gacctctcagtatgaaggctcttac

SEQ ID NO: 33444 - DNA, 25 bp, Saccharomyces pastorianus
ttcagtacggtttcacgagctgtat

SEQ ID NO: 33445 - DNA, 25 bp, Saccharomyces pastorianus
ttagagcaaatctccccgacaattt

SEQ ID NO: 33446 - DNA, 25 bp, Saccharomyces pastorianus
caccaaattcaacaactactcgcat

SEQ ID NO: 33447 - DNA, 25 bp, Saccharomyces pastorianus
gcaagccaagggaaacctaagccgg

SEQ ID NO: 33448 - DNA, 25 bp, Saccharomyces pastorianus
cctaagccggtactgatcaatccat

SEQ ID NO: 33449 - DNA, 25 bp, Saccharomyces pastorianus
gaggcaaggcttttgtttcatagag

SEQ ID NO: 33450 - DNA, 25 bp, Saccharomyces pastorianus
tactcgcatacaacgatgtgagctt

SEQ ID NO: 33451 - DNA, 25 bp, Saccharomyces pastorianus
aataatgccgcccatgatcgttgac

SEQ ID NO: 33452 - DNA, 25 bp, Saccharomyces pastorianus
aatgagtgcattttcgtcaattaaa

SEQ ID NO: 33453 - DNA, 25 bp, Saccharomyces pastorianus
tacactgacagtggacatgatcata

SEQ ID NO: 33454 - DNA, 25 bp, Saccharomyces pastorianus
ctccccgacaattttcgagatgatt

SEQ ID NO: 33455 - DNA, 25 bp, Saccharomyces pastorianus
gatcgttgaccactcttatttattc

SEQ ID NO: 33456 - DNA, 25 bp, Saccharomyces pastorianus
tggcttatcgcagaggttttcatca

SEQ ID NO: 33457 - DNA, 25 bp, Saccharomyces pastorianus
acagcatcattgacctttgcgtgaa

SEQ ID NO: 33458 - DNA, 25 bp, Saccharomyces pastorianus
gaagccgccaaagcattccagaatg

SEQ ID NO: 33459 - DNA, 25 bp, Saccharomyces pastorianus
tggtacaccgagttctccataagtc

SEQ ID NO: 33460 - DNA, 25 bp, Saccharomyces pastorianus
ggagaccgttttcaagctggctcaa

SEQ ID NO: 33461 - DNA, 25 bp, Saccharomyces pastorianus
aaactcacacgacatggctccggag

SEQ ID NO: 33462 - DNA, 25 bp, Saccharomyces pastorianus
tccggaggtgattagctcgcgcata

SEQ ID NO: 33463 - DNA, 25 bp, Saccharomyces pastorianus
gtctactggactcgttaagcgtggt

SEQ ID NO: 33464 - DNA, 25 bp, Saccharomyces pastorianus
aattttatcaactcgccaaactcac

SEQ ID NO: 33465 - DNA, 25 bp, Saccharomyces pastorianus
atgttgctggaaccaccgctggtac

SEQ ID NO: 33466 - DNA, 25 bp, Saccharomyces pastorianus
gatgtacaccttgtggcaaaccgaa

SEQ ID NO: 33467 - DNA, 25 bp, Saccharomyces pastorianus
tctcaatacacctgccaagactaca

SEQ ID NO: 33468 - DNA, 25 bp, Saccharomyces pastorianus
tcaatacacctgccaagactacata

SEQ ID NO: 33469 - DNA, 25 bp, Saccharomyces pastorianus
aactctcaatacacctgccaagact

SEQ ID NO: 33470 - DNA, 25 bp, Saccharomyces pastorianus
aatacacctgccaagactacatatc

SEQ ID NO: 33471 - DNA, 25 bp, Saccharomyces pastorianus
atacacctgccaagactacatatct

SEQ ID NO: 33472 - DNA, 25 bp, Saccharomyces pastorianus
ctcaatacacctgccaagactacat

SEQ ID NO: 33473 - DNA, 25 bp, Saccharomyces pastorianus
actctcaatacacctgccaagacta

SEQ ID NO: 33474 - DNA, 25 bp, Saccharomyces pastorianus
caatacacctgccaagactacatat

SEQ ID NO: 33475 - DNA, 25 bp, Saccharomyces pastorianus
gttgtcactgtatttgacctcgcaa

SEQ ID NO: 33476 - DNA, 25 bp, Saccharomyces pastorianus
actgtatttgacctcgcaagtgaaa

SEQ ID NO: 33477 - DNA, 25 bp, Saccharomyces pastorianus
aatcattgaaggacgtacaaaggca

SEQ ID NO: 33478 - DNA, 25 bp, Saccharomyces pastorianus
cgagttttcacgaagtatacaggca

SEQ ID NO: 33479 - DNA, 25 bp, Saccharomyces pastorianus
ggccaatacttctgagactaattta

SEQ ID NO: 33480 - DNA, 25 bp, Saccharomyces pastorianus
ggaagactccgagaatgttgtcact

SEQ ID NO: 33481 - DNA, 25 bp, Saccharomyces pastorianus
agctcctttggccaatacttctgag

SEQ ID NO: 33482 - DNA, 25 bp, Saccharomyces pastorianus
aactggaaacttctgaagagccaca

SEQ ID NO: 33483 - DNA, 25 bp, Saccharomyces pastorianus
aagagccacaagctcctttggccaa

SEQ ID NO: 33484 - DNA, 25 bp, Saccharomyces pastorianus
atttgacctcgcaagtgaaatagaa

SEQ ID NO: 33485 - DNA, 25 bp, Saccharomyces pastorianus
actccgagaatgttgtcactgtatt

SEQ ID NO: 33486 - DNA, 25 bp, Saccharomyces pastorianus
taacgtcgccattgcaactttgctt

SEQ ID NO: 33487 - DNA, 25 bp, Saccharomyces pastorianus
ataaacgtgtgtggtatccctggga

SEQ ID NO: 33488 - DNA, 25 bp, Saccharomyces pastorianus
tcgctttcggtacactggttggtat

SEQ ID NO: 33489 - DNA, 25 bp, Saccharomyces pastorianus
gcaaatgatgcctacacgttgatta

SEQ ID NO: 33490 - DNA, 25 bp, Saccharomyces pastorianus
acatgtacgttatcagtgccttata

SEQ ID NO: 33491 - DNA, 25 bp, Saccharomyces pastorianus
ttacttcctgtctgctgtggacaaa

SEQ ID NO: 33492 - DNA, 25 bp, Saccharomyces pastorianus
gatgcgaaagccttccttgacatga

SEQ ID NO: 33493 - DNA, 25 bp, Saccharomyces pastorianus
gttggtattccaatcacaggcgcta

SEQ ID NO: 33494 - DNA, 25 bp, Saccharomyces pastorianus
tacgctaccagccatgggatttcag

SEQ ID NO: 33495 - DNA, 25 bp, Saccharomyces pastorianus
ggtttagcaacctttgtcagcgctg

SEQ ID NO: 33496 - DNA, 25 bp, Saccharomyces pastorianus
caggcgctatcatctctaacaaaac

SEQ ID NO: 33497 - DNA, 25 bp, Saccharomyces pastorianus
gttttcggcgtcatgataacttgct

SEQ ID NO: 33498 - DNA, 25 bp, Saccharomyces pastorianus
gtcgtcatatccgtcgcaatatttt

SEQ ID NO: 33499 - DNA, 25 bp, Saccharomyces pastorianus
gctagcacctttcttgacgaacgaa

SEQ ID NO: 33500 - DNA, 25 bp, Saccharomyces pastorianus
gataacttgctggtcgacacacgga

SEQ ID NO: 33501 - DNA, 25 bp, Saccharomyces pastorianus
gttcatggtggttctgtcatcaacg

SEQ ID NO: 33502 - DNA, 25 bp, Saccharomyces pastorianus
atccatggcgatatttgtgtcacag

SEQ ID NO: 33503 - DNA, 25 bp, Saccharomyces pastorianus
attttactgctcatgcacagggttt

SEQ ID NO: 33504 - DNA, 25 bp, Saccharomyces pastorianus
acagggtttttgttgacgctagcac

SEQ ID NO: 33505 - DNA, 25 bp, Saccharomyces pastorianus
ggtcactttcttccgtcaattattc

SEQ ID NO: 33506 - DNA, 25 bp, Saccharomyces pastorianus
gtgatccatggtatagcgcattttt

SEQ ID NO: 33507 - DNA, 25 bp, Saccharomyces pastorianus
atcttcttcgactgatgatctcaca

SEQ ID NO: 33508 - DNA, 25 bp, Saccharomyces pastorianus
gaagatgctcagtacgtgatacaaa

SEQ ID NO: 33509 - DNA, 25 bp, Saccharomyces pastorianus
ggccaatagcaggatcacggttgat

SEQ ID NO: 33510 - DNA, 25 bp, Saccharomyces pastorianus
gttcgtaaagaacctcgcagattcg

SEQ ID NO: 33511 - DNA, 25 bp, Saccharomyces pastorianus
gagaccaactttatgaactttttat

SEQ ID NO: 33512 - DNA, 25 bp, Saccharomyces pastorianus
gtaaccagctctttaggtgctgcta

SEQ ID NO: 33513 - DNA, 25 bp, Saccharomyces pastorianus
aaggctacgcttttattgaatttca

SEQ ID NO: 33514 - DNA, 25 bp, Saccharomyces pastorianus
gttttgcaaacgtaccaaggctacg

SEQ ID NO: 33515 - DNA, 25 bp, Saccharomyces pastorianus
gtgctgctaattcttcctcgaataa

SEQ ID NO: 33516 - DNA, 25 bp, Saccharomyces pastorianus
agggcatatctttacctattgctaa

SEQ ID NO: 33517 - DNA, 25 bp, Saccharomyces pastorianus
gtatgaccggctgataaaagttcgt

SEQ ID NO: 33518 - DNA, 25 bp, Saccharomyces pastorianus
gaagtttttcatctatcaactggaa

SEQ ID NO: 33519 - DNA, 25 bp, Saccharomyces pastorianus
tagaaccccaggcttgtagtgtttg

SEQ ID NO: 33520 - DNA, 25 bp, Saccharomyces pastorianus
gagaggccttgaattagaaccccag

SEQ ID NO: 33521 - DNA, 25 bp, Saccharomyces pastorianus
gaaatttgcttctaacttgatggtc

SEQ ID NO: 33522 - DNA, 25 bp, Saccharomyces pastorianus
tgacgctgtcacatactccaagtat

SEQ ID NO: 33523 - DNA, 25 bp, Saccharomyces pastorianus
tcttcatcaccattgttctatttcc

SEQ ID NO: 33524 - DNA, 25 bp, Saccharomyces pastorianus
atatacatttttcggactatccaat

SEQ ID NO: 33525 - DNA, 25 bp, Saccharomyces pastorianus
aagcactattctatgatttccaatg

SEQ ID NO: 33526 - DNA, 25 bp, Saccharomyces pastorianus
gtaagccctgggtttatcaatcagt

SEQ ID NO: 33527 - DNA, 25 bp, Saccharomyces pastorianus
aagacattataagctccacctcatc

SEQ ID NO: 33528 - DNA, 25 bp, Saccharomyces pastorianus
gaaattgtagaggacacgctgccta

SEQ ID NO: 33529 - DNA, 25 bp, Saccharomyces pastorianus
agatatggcctattgacgggttcac

SEQ ID NO: 33530 - DNA, 25 bp, Saccharomyces pastorianus
atattcaacaatgagcaccccgatc

SEQ ID NO: 33531 - DNA, 25 bp, Saccharomyces pastorianus
tcgagggacagagaccggttctaat

SEQ ID NO: 33532 - DNA, 25 bp, Saccharomyces pastorianus
taacacgagggatgtccggctccaa

SEQ ID NO: 33533 - DNA, 25 bp, Saccharomyces pastorianus
ggcaacaggcggttctaactctaat

SEQ ID NO: 33534 - DNA, 25 bp, Saccharomyces pastorianus
gatcccgaaggtataactcctgtaa

SEQ ID NO: 33535 - DNA, 25 bp, Saccharomyces pastorianus
gatctcttactgcagtacagtcgcc

SEQ ID NO: 33536 - DNA, 25 bp, Saccharomyces pastorianus
tacagtcgccgcctttggaaagtgt

SEQ ID NO: 33537 - DNA, 25 bp, Saccharomyces pastorianus
ggacgaagaagttccgcctatctac

SEQ ID NO: 33538 - DNA, 25 bp, Saccharomyces pastorianus
aaggtacgatccgttgatcccgaag

SEQ ID NO: 33539 - DNA, 25 bp, Saccharomyces pastorianus
gcgggcaagtgttaacaccccataa

SEQ ID NO: 33540 - DNA, 25 bp, Saccharomyces pastorianus
catgctacgagcgttctgcgaacaa

SEQ ID NO: 33541 - DNA, 25 bp, Saccharomyces pastorianus
gtgttccacgctgtagtgacaactt

SEQ ID NO: 33542 - DNA, 25 bp, Saccharomyces pastorianus
gtggacgccatatgtttcaacgaat

SEQ ID NO: 33543 - DNA, 25 bp, Saccharomyces pastorianus
gggtggtaccgagtgcttgcaacat

SEQ ID NO: 33544 - DNA, 25 bp, Saccharomyces pastorianus
tgcaacatctaatccaaaccgctaa

SEQ ID NO: 33545 - DNA, 25 bp, Saccharomyces pastorianus
actttgttgaactacgtggacgcca

SEQ ID NO: 33546 - DNA, 25 bp, Saccharomyces pastorianus
ttgacgcctgcgcagttacagaaat

SEQ ID NO: 33547 - DNA, 25 bp, Saccharomyces pastorianus
gactacgagtctccaataccacaag

SEQ ID NO: 33548 - DNA, 25 bp, Saccharomyces pastorianus
gaaatcctgaaatacgtggctgaca

SEQ ID NO: 33549 - DNA, 25 bp, Saccharomyces pastorianus
ataccagcatggttatcactgcccg

SEQ ID NO: 33550 - DNA, 25 bp, Saccharomyces pastorianus
gaggaatctgctactctttgacgcc

SEQ ID NO: 33551 - DNA, 25 bp, Saccharomyces pastorianus
gaaatcgttccacatcgaaactgaa

SEQ ID NO: 33552 - DNA, 25 bp, Saccharomyces pastorianus
aaagccgacaacttggctgtctctg

SEQ ID NO: 33553 - DNA, 25 bp, Saccharomyces pastorianus
ggctgtctctgcacaaggtttcaag

SEQ ID NO: 33554 - DNA, 25 bp, Saccharomyces pastorianus
ggtcgttgtcattttgttggtggtc

SEQ ID NO: 33555 - DNA, 25 bp, Saccharomyces pastorianus
atgtgtttatttttggtcgttgtca

SEQ ID NO: 33556 - DNA, 25 bp, Saccharomyces pastorianus
gctcgcacccgaactctcagaataa

SEQ ID NO: 33557 - DNA, 25 bp, Saccharomyces pastorianus
aaacggccgctctgagacaggagat

SEQ ID NO: 33558 - DNA, 25 bp, Saccharomyces pastorianus
gaggagactaactcgagctcgcacc

SEQ ID NO: 33559 - DNA, 25 bp, Saccharomyces pastorianus
gagatcgacgacacggtgggcataa

SEQ ID NO: 33560 - DNA, 25 bp, Saccharomyces pastorianus
gaacggttgacctccatcgaggata

SEQ ID NO: 33561 - DNA, 25 bp, Saccharomyces pastorianus
gacaacatcaacaaggtggccgaac

SEQ ID NO: 33562 - DNA, 25 bp, Saccharomyces pastorianus
atccatatgtaccttcagaggagac

SEQ ID NO: 33563 - DNA, 25 bp, Saccharomyces pastorianus
acaacagcatcaagggcaatcccag

SEQ ID NO: 33564 - DNA, 25 bp, Saccharomyces pastorianus
ttatttctccccaacattcatacct

SEQ ID NO: 33565 - DNA, 25 bp, Saccharomyces pastorianus
ggtaatttacaatctttgcagcagc

SEQ ID NO: 33566 - DNA, 25 bp, Saccharomyces pastorianus
tcctcactcacaacaaccaatatat

SEQ ID NO: 33567 - DNA, 25 bp, Saccharomyces pastorianus
gccaaataacatgttgtccactcaa

SEQ ID NO: 33568 - DNA, 25 bp, Saccharomyces pastorianus
aattacttccagtctttgctttcca

SEQ ID NO: 33569 - DNA, 25 bp, Saccharomyces pastorianus
attcataccttgacatgccgaagcc

SEQ ID NO: 33570 - DNA, 25 bp, Saccharomyces pastorianus
gtacattctccaaacttcttgtcac

SEQ ID NO: 33571 - DNA, 25 bp, Saccharomyces pastorianus
taacttgagttctttccagcctaat

SEQ ID NO: 33572 - DNA, 25 bp, Saccharomyces pastorianus
cactaactgcctccaatcttaatgg

SEQ ID NO: 33573 - DNA, 25 bp, Saccharomyces pastorianus
gtcaccccagaatgctgccaataat

SEQ ID NO: 33574 - DNA, 25 bp, Saccharomyces pastorianus
gaagttgttggagcccaaggccatt

SEQ ID NO: 33575 - DNA, 25 bp, Saccharomyces pastorianus
aagatgcgtttgaaggtcctttccg

SEQ ID NO: 33576 - DNA, 25 bp, Saccharomyces pastorianus
ggaaattgtcttgtccacggactat

SEQ ID NO: 33577 - DNA, 25 bp, Saccharomyces pastorianus
gtccacggactatttgaacccagaa

SEQ ID NO: 33578 - DNA, 25 bp, Saccharomyces pastorianus
aaggccattgtcaggtctcttgaga

SEQ ID NO: 33579 - DNA, 25 bp, Saccharomyces pastorianus
ggacgacatcatgcgcgagtatggt

SEQ ID NO: 33580 - DNA, 25 bp, Saccharomyces pastorianus
tgaagaaggccacgctatcgcagca

SEQ ID NO: 33581 - DNA, 25 bp, Saccharomyces pastorianus
aacgtgccccattgcaggaaattgt

SEQ ID NO: 33582 - DNA, 25 bp, Saccharomyces pastorianus
tttccgcccgtgaacaatcactgga

SEQ ID NO: 33583 - DNA, 25 bp, Saccharomyces pastorianus
gtatccaacgcctctgacaagattg

SEQ ID NO: 33584 - DNA, 25 bp, Saccharomyces pastorianus
ccgtttctggtggtgtcattgtatc

SEQ ID NO: 33585 - DNA, 25 bp, Saccharomyces pastorianus
gctgctatcaagaatgccgtcgacg

SEQ ID NO: 33586 - DNA, 25 bp, Saccharomyces pastorianus
ctgatttggacgcagcagacaagct

SEQ ID NO: 33587 - DNA, 25 bp, Saccharomyces pastorianus
ttatttgccggtaatgatccagaag

SEQ ID NO: 33588 - DNA, 25 bp, Saccharomyces pastorianus
attaccgaagccatcaactacatga

SEQ ID NO: 33589 - DNA, 25 bp, Saccharomyces pastorianus
gacatctctccaaatgccaaagcta

SEQ ID NO: 33590 - DNA, 25 bp, Saccharomyces pastorianus
ggttgttatatctccaatgccgcat

SEQ ID NO: 33591 - DNA, 25 bp, Saccharomyces pastorianus
tatgggtgataagccagctgctatc

SEQ ID NO: 33592 - DNA, 25 bp, Saccharomyces pastorianus
ggttaaattcatcgacatctctcca

SEQ ID NO: 33593 - DNA, 25 bp, Saccharomyces pastorianus
ttgctgttaccggtactgaagcctt

SEQ ID NO: 33594 - DNA, 25 bp, Saccharomyces pastorianus
aacttggtcaactgtcgatttccgt

SEQ ID NO: 33595 - DNA, 25 bp, Saccharomyces pastorianus
tgccgttctctccagtcaaggaaaa

SEQ ID NO: 33596 - DNA, 25 bp, Saccharomyces pastorianus
gctcaagcgggcaccattaggatta

SEQ ID NO: 33597 - DNA, 25 bp, Saccharomyces pastorianus
gatctgttccaatttcaagggctca

SEQ ID NO: 33598 - DNA, 25 bp, Saccharomyces pastorianus
tgaaaccccgtttgatccatttgat

SEQ ID NO: 33599 - DNA, 25 bp, Saccharomyces pastorianus
caacgtgtatcgtctgatgccagat

SEQ ID NO: 33600 - DNA, 25 bp, Saccharomyces pastorianus
ttaggtttctcaaggcgtcctataa

SEQ ID NO: 33601 - DNA, 25 bp, Saccharomyces pastorianus
gaattttactctactgagccaggct

SEQ ID NO: 33602 - DNA, 25 bp, Saccharomyces pastorianus
tttagatgtcattttccctcagaac

SEQ ID NO: 33603 - DNA, 25 bp, Saccharomyces pastorianus
tgagccaggctttcttgtaaacttg

SEQ ID NO: 33604 - DNA, 25 bp, Saccharomyces pastorianus
atgccttcgtatcttcttctagtga

SEQ ID NO: 33605 - DNA, 25 bp, Saccharomyces pastorianus
ttccctcagaacatttcccaagtat

SEQ ID NO: 33606 - DNA, 25 bp, Saccharomyces pastorianus
ggttgaggccgcaaagattctcttc

SEQ ID NO: 33607 - DNA, 25 bp, Saccharomyces pastorianus
tcgctctcccatgagatcgatgatc

SEQ ID NO: 33608 - DNA, 25 bp, Saccharomyces pastorianus
atacgaactgccgaagcgactacaa

SEQ ID NO: 33609 - DNA, 25 bp, Saccharomyces pastorianus
tgaccctactatatcgtacttctgg

SEQ ID NO: 33610 - DNA, 25 bp, Saccharomyces pastorianus
accagacgttgaaccaagtcggcaa

SEQ ID NO: 33611 - DNA, 25 bp, Saccharomyces pastorianus
ggagacaatccctaccagagttttt

SEQ ID NO: 33612 - DNA, 25 bp, Saccharomyces pastorianus
agactctgttagacaatttcgggaa

SEQ ID NO: 33613 - DNA, 25 bp, Saccharomyces pastorianus
atcttttatacacaactgtccccgt

SEQ ID NO: 33614 - DNA, 25 bp, Saccharomyces pastorianus
aagccgtttatagaagactcccatg

SEQ ID NO: 33615 - DNA, 25 bp, Saccharomyces pastorianus
gaagctgaaggaaacgcgctccagt

SEQ ID NO: 33616 - DNA, 25 bp, Saccharomyces pastorianus
cgtggaatgcacaactagacttttt

SEQ ID NO: 33617 - DNA, 25 bp, Saccharomyces pastorianus
taacctctaccaaatatacgcctgc

SEQ ID NO: 33618 - DNA, 25 bp, Saccharomyces pastorianus
aacggcggaaacaatagtctgggca

SEQ ID NO: 33619 - DNA, 25 bp, Saccharomyces pastorianus
atatcggtcttttgattcacgacgc

SEQ ID NO: 33620 - DNA, 25 bp, Saccharomyces pastorianus
cagattggacttttgttcataacga

SEQ ID NO: 33621 - DNA, 25 bp, Saccharomyces pastorianus
attcaatccgcttcacatatcggtc

SEQ ID NO: 33622 - DNA, 25 bp, Saccharomyces pastorianus
caacagttctcgttcccaagctgaa

SEQ ID NO: 33623 - DNA, 25 bp, Saccharomyces pastorianus
agtctgggcaagttttcttttgcta

SEQ ID NO: 33624 - DNA, 25 bp, Saccharomyces pastorianus
ctaacaggtctttaggccactgggt

SEQ ID NO: 33625 - DNA, 25 bp, Saccharomyces pastorianus
gattcacgacgcattcaacgctagt

SEQ ID NO: 33626 - DNA, 25 bp, Saccharomyces pastorianus
cgacgacgaagtttctatcgagaat

SEQ ID NO: 33627 - DNA, 25 bp, Saccharomyces pastorianus
gaaggcaacggctacaacagttctc

SEQ ID NO: 33628 - DNA, 25 bp, Saccharomyces pastorianus
gagaaacgtttacactacaggtaga

SEQ ID NO: 33629 - DNA, 25 bp, Saccharomyces pastorianus
gaagcagccagaaataccgttgtga

SEQ ID NO: 33630 - DNA, 25 bp, Saccharomyces pastorianus
aattcctgaccaaggccgtcttaga

SEQ ID NO: 33631 - DNA, 25 bp, Saccharomyces pastorianus
aatgtcctacgaaaccacatgtcaa

SEQ ID NO: 33632 - DNA, 25 bp, Saccharomyces pastorianus
gcattgatcgttgcgttcatccaga

SEQ ID NO: 33633 - DNA, 25 bp, Saccharomyces pastorianus
ggaaacatctacctcatcgttaatg

SEQ ID NO: 33634 - DNA, 25 bp, Saccharomyces pastorianus
acggaaagcgtgttcttgttactga

SEQ ID NO: 33635 - DNA, 25 bp, Saccharomyces pastorianus
agacagtccttctgctagaatcgtc

SEQ ID NO: 33636 - DNA, 25 bp, Saccharomyces pastorianus
gtgggaccaagaagcgtttatcgat

SEQ ID NO: 33637 - DNA, 25 bp, Saccharomyces pastorianus
tccgtcatttggatctaattgctga

SEQ ID NO: 33638 - DNA, 25 bp, Saccharomyces pastorianus
ttcacgttatgctatctctgtttct

SEQ ID NO: 33639 - DNA, 25 bp, Saccharomyces pastorianus
taatgtcggtacaggttcattcgat

SEQ ID NO: 33640 - DNA, 25 bp, Saccharomyces pastorianus
ttaaatccaccactgtaatccctga

SEQ ID NO: 33641 - DNA, 25 bp, Saccharomyces pastorianus
gaagacgcgacgactcaagtattgt

SEQ ID NO: 33642 - DNA, 25 bp, Saccharomyces pastorianus
ggctctaatgattccgtatcggcac

SEQ ID NO: 33643 - DNA, 25 bp, Saccharomyces pastorianus
cagaagggtctcaaacctacgtcct

SEQ ID NO: 33644 - DNA, 25 bp, Saccharomyces pastorianus
aatgctcaatcgctcaaaacgggaa

SEQ ID NO: 33645 - DNA, 25 bp, Saccharomyces pastorianus
tgatgtctaccgtcttgaaggcaaa

SEQ ID NO: 33646 - DNA, 25 bp, Saccharomyces pastorianus
aacgtctaccaagctttacaattcg

SEQ ID NO: 33647 - DNA, 25 bp, Saccharomyces pastorianus
gacgaaaagattctatgggccccgg

SEQ ID NO: 33648 - DNA, 25 bp, Saccharomyces pastorianus
atattttccgagtagccaacgaagc

SEQ ID NO: 33649 - DNA, 25 bp, Saccharomyces pastorianus
cactggataatttgctgtacggtaa

SEQ ID NO: 33650 - DNA, 25 bp, Saccharomyces pastorianus
tacgttcaattcgatcatggctcta

SEQ ID NO: 33651 - DNA, 25 bp, Saccharomyces pastorianus
gaattctcccgacgctaacaacagc

SEQ ID NO: 33652 - DNA, 25 bp, Saccharomyces pastorianus
cgccgctaccagtacgaaactaaat

SEQ ID NO: 33653 - DNA, 25 bp, Saccharomyces pastorianus
gacaacggcgatgataactcactta

SEQ ID NO: 33654 - DNA, 25 bp, Saccharomyces pastorianus
tattagcggactttgaaccggcctc

SEQ ID NO: 33655 - DNA, 25 bp, Saccharomyces pastorianus
atgcctaacatgatggacggtgaca

SEQ ID NO: 33656 - DNA, 25 bp, Saccharomyces pastorianus
gacgagtttttcagtaatacttcct

SEQ ID NO: 33657 - DNA, 25 bp, Saccharomyces pastorianus
aatacttcctcttactcgaattctc

SEQ ID NO: 33658 - DNA, 25 bp, Saccharomyces pastorianus
gacggtaacgaaactgccgccgcta

SEQ ID NO: 33659 - DNA, 25 bp, Saccharomyces pastorianus
tatcttcagaacaacgagcgactat

SEQ ID NO: 33660 - DNA, 25 bp, Saccharomyces pastorianus
gaagacgctcttttattagcggact

SEQ ID NO: 33661 - DNA, 25 bp, Saccharomyces pastorianus
tgaaccggcctctttacaatatatg

SEQ ID NO: 33662 - DNA, 25 bp, Saccharomyces pastorianus
gtacctaagattccgcaaggccatc

SEQ ID NO: 33663 - DNA, 25 bp, Saccharomyces pastorianus
aacgcctttatgtttgcaagcacta

SEQ ID NO: 33664 - DNA, 25 bp, Saccharomyces pastorianus
ggacgtgttcaactggttctccaac

SEQ ID NO: 33665 - DNA, 25 bp, Saccharomyces pastorianus
taccacgggcctggtcgaaatcgaa

SEQ ID NO: 33666 - DNA, 25 bp, Saccharomyces pastorianus
ggtgtccgagatcgacgttaccacg

SEQ ID NO: 33667 - DNA, 25 bp, Saccharomyces pastorianus
gaaagactgcccttcaagacctggg

SEQ ID NO: 33668 - DNA, 25 bp, Saccharomyces pastorianus
ggaaagtggccgactttatcgccgc

SEQ ID NO: 33669 - DNA, 25 bp, Saccharomyces pastorianus
gcaaggccatcttctacaacaacat

SEQ ID NO: 33670 - DNA, 25 bp, Saccharomyces pastorianus
gtatttgaacgtgtcttcgtccact

SEQ ID NO: 33671 - DNA, 25 bp, Saccharomyces pastorianus
catcttcatccccaagtactggaaa

SEQ ID NO: 33672 - DNA, 25 bp, Saccharomyces pastorianus
cgcccaagtgcctcggtaaaatcaa

SEQ ID NO: 33673 - DNA, 25 bp, Saccharomyces pastorianus
tttggcgatctcttatcaccacaca

SEQ ID NO: 33674 - DNA, 25 bp, Saccharomyces pastorianus
aacgggcggcatgcgatttgatacc

SEQ ID NO: 33675 - DNA, 25 bp, Saccharomyces pastorianus
tagattcttcccctttttggcgatc

SEQ ID NO: 33676 - DNA, 25 bp, Saccharomyces pastorianus
ttaggtctttaaccgcttctcaaca

SEQ ID NO: 33677 - DNA, 25 bp, Saccharomyces pastorianus
aggcgtcttcgctaaattatataat

SEQ ID NO: 33678 - DNA, 25 bp, Saccharomyces pastorianus
aattttgccgactctcagttgactt

SEQ ID NO: 33679 - DNA, 25 bp, Saccharomyces pastorianus
ataccgtaaagttcgccatcaattg

SEQ ID NO: 33680 - DNA, 25 bp, Saccharomyces pastorianus
aaggctcttggttattgtgaagcgt

SEQ ID NO: 33681 - DNA, 25 bp, Saccharomyces pastorianus
ggatttcaattttcaaggcgtcttc

SEQ ID NO: 33682 - DNA, 25 bp, Saccharomyces pastorianus
actgctaaacaagtgggcgagtcca

SEQ ID NO: 33683 - DNA, 25 bp, Saccharomyces pastorianus
gttgacttcatctatcgattcattt

SEQ ID NO: 33684 - DNA, 25 bp, Saccharomyces pastorianus
ataacaccaactcgatggtctccaa

SEQ ID NO: 33685 - DNA, 25 bp, Saccharomyces pastorianus
gatggtctccaattccaatctaaca

SEQ ID NO: 33686 - DNA, 25 bp, Saccharomyces pastorianus
gtgacggactcgttggcacctaaaa

SEQ ID NO: 33687 - DNA, 25 bp, Saccharomyces pastorianus
tagacctaacttggccaatttggca

SEQ ID NO: 33688 - DNA, 25 bp, Saccharomyces pastorianus
agtaatgaactcctccatcatcaac

SEQ ID NO: 33689 - DNA, 25 bp, Saccharomyces pastorianus
gacgtccctaatttgaatgaactta

SEQ ID NO: 33690 - DNA, 25 bp, Saccharomyces pastorianus
aagtcgtgatgagcgacgtccctaa

SEQ ID NO: 33691 - DNA, 25 bp, Saccharomyces pastorianus
gattacacacgaacctaaaccgcat

SEQ ID NO: 33692 - DNA, 25 bp, Saccharomyces pastorianus
gacatccaactataccagacacttt

SEQ ID NO: 33693 - DNA, 25 bp, Saccharomyces pastorianus
aacgctgccggcaacagtagcacta

SEQ ID NO: 33694 - DNA, 25 bp, Saccharomyces pastorianus
gaaaagcatttgacccctctagaga

SEQ ID NO: 33695 - DNA, 25 bp, Saccharomyces pastorianus
gtgacccacaatgcatcatcaagta

SEQ ID NO: 33696 - DNA, 25 bp, Saccharomyces pastorianus
aggttcttccactgaatcgttgtca

SEQ ID NO: 33697 - DNA, 25 bp, Saccharomyces pastorianus
gaaaaactcgcgcagttccttagaa

SEQ ID NO: 33698 - DNA, 25 bp, Saccharomyces pastorianus
aatctcagtcatcgtcagctttatc

SEQ ID NO: 33699 - DNA, 25 bp, Saccharomyces pastorianus
ttagtattaccaccgcaggttcttc

SEQ ID NO: 33700 - DNA, 25 bp, Saccharomyces pastorianus
aaaggtatcatcctctacatcactg

SEQ ID NO: 33701 - DNA, 25 bp, Saccharomyces pastorianus
agtagtagcaactcaccgcttagta

SEQ ID NO: 33702 - DNA, 25 bp, Saccharomyces pastorianus
aagtacttatgtcactgctgctgct

SEQ ID NO: 33703 - DNA, 25 bp, Saccharomyces pastorianus
aatcgttgtcagacttcagctccag

SEQ ID NO: 33704 - DNA, 25 bp, Saccharomyces pastorianus
tctacatcactgtctgcttttgcag

SEQ ID NO: 33705 - DNA, 25 bp, Saccharomyces pastorianus
ttgcagctgccaagaacatttcgcc

SEQ ID NO: 33706 - DNA, 25 bp, Saccharomyces pastorianus
ggatgaaaagtctcccgtgggtacg

SEQ ID NO: 33707 - DNA, 25 bp, Saccharomyces pastorianus
gagagattctggaacctgccgccaa

SEQ ID NO: 33708 - DNA, 25 bp, Saccharomyces pastorianus
agtgcgtaatatcaggccatccttc

SEQ ID NO: 33709 - DNA, 25 bp, Saccharomyces pastorianus
gcagaaatgttcaccaaagagccaa

SEQ ID NO: 33710 - DNA, 25 bp, Saccharomyces pastorianus
attgtatccattgtaagacttgcga

SEQ ID NO: 33711 - DNA, 25 bp, Saccharomyces pastorianus
tgccccgcaggagtttacgagtttg

SEQ ID NO: 33712 - DNA, 25 bp, Saccharomyces pastorianus
gtacgaggctccaaattaactccca

SEQ ID NO: 33713 - DNA, 25 bp, Saccharomyces pastorianus
aggccatccttcagtggtcgatttg

SEQ ID NO: 33714 - DNA, 25 bp, Saccharomyces pastorianus
aagcccatcgaatatcctaaaccag

SEQ ID NO: 33715 - DNA, 25 bp, Saccharomyces pastorianus
gtcgaatcaagattttgccccgcag

SEQ ID NO: 33716 - DNA, 25 bp, Saccharomyces pastorianus
tgatattctgacatctgtctccaga

SEQ ID NO: 33717 - DNA, 25 bp, Saccharomyces pastorianus
gattagtgcggaggcccctatcatc

SEQ ID NO: 33718 - DNA, 25 bp, Saccharomyces pastorianus
ggccatccaagcaggtcatgaccaa

SEQ ID NO: 33719 - DNA, 25 bp, Saccharomyces pastorianus
ggtacaggaactgcaggccatccaa

SEQ ID NO: 33720 - DNA, 25 bp, Saccharomyces pastorianus
gctgcccgtttctgaggaggaattc

SEQ ID NO: 33721 - DNA, 25 bp, Saccharomyces pastorianus
aaaaggcagacatcgcagaggcgct

SEQ ID NO: 33722 - DNA, 25 bp, Saccharomyces pastorianus
gctgccctttgcaaggattcggaaa

SEQ ID NO: 33723 - DNA, 25 bp, Saccharomyces pastorianus
cggtcgagggcctcttgagagcaat

SEQ ID NO: 33724 - DNA, 25 bp, Saccharomyces pastorianus
aagacgacttcaaatcgcactcgct

SEQ ID NO: 33725 - DNA, 25 bp, Saccharomyces pastorianus
tgtttcgaaacgttggccaagggct

SEQ ID NO: 33726 - DNA, 25 bp, Saccharomyces pastorianus
gaaatcgagtccaccaacgagcctg

SEQ ID NO: 33727 - DNA, 25 bp, Saccharomyces pastorianus
catctttgccaaagcgtgcgagata

SEQ ID NO: 33728 - DNA, 25 bp, Saccharomyces pastorianus
ggataactccgcttacgttgcacac

SEQ ID NO: 33729 - DNA, 25 bp, Saccharomyces pastorianus
aacgaccacctcaatgttggtactg

SEQ ID NO: 33730 - DNA, 25 bp, Saccharomyces pastorianus
tgtgtttaacactaccaacgaccac

SEQ ID NO: 33731 - DNA, 25 bp, Saccharomyces pastorianus
gggaccccatggagtgaactgattt

SEQ ID NO: 33732 - DNA, 25 bp, Saccharomyces pastorianus
ttcaacttcccattcttactttcaa

SEQ ID NO: 33733 - DNA, 25 bp, Saccharomyces pastorianus
tggcgaatgagtacaactcccacca

SEQ ID NO: 33734 - DNA, 25 bp, Saccharomyces pastorianus
tcagatgccttaagtgggaccccat

SEQ ID NO: 33735 - DNA, 25 bp, Saccharomyces pastorianus
aacttcatacttttctagcagtcca

SEQ ID NO: 33736 - DNA, 25 bp, Saccharomyces pastorianus
aacggaaacacaccactatcgagta

SEQ ID NO: 33737 - DNA, 25 bp, Saccharomyces pastorianus
tggttgaaatcgttgaggctacaca

SEQ ID NO: 33738 - DNA, 25 bp, Saccharomyces pastorianus
tccaaatctcattccacttcaaaag

SEQ ID NO: 33739 - DNA, 25 bp, Saccharomyces pastorianus
gaatcatttatttggcacacgaaga

SEQ ID NO: 33740 - DNA, 25 bp, Saccharomyces pastorianus
aagtaagttggtgttcgctatcgga

SEQ ID NO: 33741 - DNA, 25 bp, Saccharomyces pastorianus
tgcctttgctgatcgtttgggtcaa

SEQ ID NO: 33742 - DNA, 25 bp, Saccharomyces pastorianus
atgaaaacgcgccagcagctacgag

SEQ ID NO: 33743 - DNA, 25 bp, Saccharomyces pastorianus
gtgcaagcgcacactttatacaata

SEQ ID NO: 33744 - DNA, 25 bp, Saccharomyces pastorianus
gtagataaagatggcgcccaccttt

SEQ ID NO: 33745 - DNA, 25 bp, Saccharomyces pastorianus
gttagtcgatcaacacaccgaggcc

SEQ ID NO: 33746 - DNA, 25 bp, Saccharomyces pastorianus
aacggtctccacaagtttgtcaagg

SEQ ID NO: 33747 - DNA, 25 bp, Saccharomyces pastorianus
cccacctttacatgttggagccaag

SEQ ID NO: 33748 - DNA, 25 bp, Saccharomyces pastorianus
gaagctgtacaaaacgcccattcca

SEQ ID NO: 33749 - DNA, 25 bp, Saccharomyces pastorianus
tttgggtcaatacgtgcaagcgcac

SEQ ID NO: 33750 - DNA, 25 bp, Saccharomyces pastorianus
atgataccgccgttagtgacaacac

SEQ ID NO: 33751 - DNA, 25 bp, Saccharomyces pastorianus
gtgacaacaccaagtcttctagcaa

SEQ ID NO: 33752 - DNA, 25 bp, Saccharomyces pastorianus
cctatgccttctttggatggattaa

SEQ ID NO: 33753 - DNA, 25 bp, Saccharomyces pastorianus
ctactgatccacacaattctcttaa

SEQ ID NO: 33754 - DNA, 25 bp, Saccharomyces pastorianus
tagcaatttcaagaggcgcaacgac

SEQ ID NO: 33755 - DNA, 25 bp, Saccharomyces pastorianus
gactataattccaacgatgccaatg

SEQ ID NO: 33756 - DNA, 25 bp, Saccharomyces pastorianus
aatgcaccatcttcaagttactcaa

SEQ ID NO: 33757 - DNA, 25 bp, Saccharomyces pastorianus
gtgtgccggcgcataatagcggtaa

SEQ ID NO: 33758 - DNA, 25 bp, Saccharomyces pastorianus
gctgtgatgcacctaacctaaattt

SEQ ID NO: 33759 - DNA, 25 bp, Saccharomyces pastorianus
gttactcaaaagaagccgctaccct

SEQ ID NO: 33760 - DNA, 25 bp, Saccharomyces pastorianus
atgtcccagacatctttggcagtct

SEQ ID NO: 33761 - DNA, 25 bp, Saccharomyces pastorianus
tatactacaagcaccctgacacgag

SEQ ID NO: 33762 - DNA, 25 bp, Saccharomyces pastorianus
tactcttcggcaactctgaatttct

SEQ ID NO: 33763 - DNA, 25 bp, Saccharomyces pastorianus
ttcagtaatttgttccagcagctta

SEQ ID NO: 33764 - DNA, 25 bp, Saccharomyces pastorianus
aaactcacggaaagtcccagtctgc

SEQ ID NO: 33765 - DNA, 25 bp, Saccharomyces pastorianus
gtctgcgggtatcttcttaactgaa

SEQ ID NO: 33766 - DNA, 25 bp, Saccharomyces pastorianus
caagtttggcttcctttattctcaa

SEQ ID NO: 33767 - DNA, 25 bp, Saccharomyces pastorianus
gatgaccaaagacgatccttcctaa

SEQ ID NO: 33768 - DNA, 25 bp, Saccharomyces pastorianus
ttgtttgccatctatctttccgttt

SEQ ID NO: 33769 - DNA, 25 bp, Saccharomyces pastorianus
gttgggcgcgaccttatatggacaa

SEQ ID NO: 33770 - DNA, 25 bp, Saccharomyces pastorianus
ctttccgttttcattctggtgggat

SEQ ID NO: 33771 - DNA, 25 bp, Saccharomyces pastorianus
ggctgtttcctcctttatgggaata

SEQ ID NO: 33772 - DNA, 25 bp, Saccharomyces pastorianus
gggttctttgattttacttcatttg

SEQ ID NO: 33773 - DNA, 25 bp, Saccharomyces pastorianus
cgtattagacgggtccgctgtaatt

SEQ ID NO: 33774 - DNA, 25 bp, Saccharomyces pastorianus
gaccgtcaaacagtcgattggttac

SEQ ID NO: 33775 - DNA, 25 bp, Saccharomyces pastorianus
gattggttactggtgtcggccaact

SEQ ID NO: 33776 - DNA, 25 bp, Saccharomyces pastorianus
atggcgattccacaaccgtattaga

SEQ ID NO: 33777 - DNA, 25 bp, Saccharomyces pastorianus
atatccaaatcacagctaggctttt

SEQ ID NO: 33778 - DNA, 25 bp, Saccharomyces pastorianus
ggctccgatgagaacttactgcaac

SEQ ID NO: 33779 - DNA, 25 bp, Saccharomyces pastorianus
tagcgcagacggaaatagagcttct

SEQ ID NO: 33780 - DNA, 25 bp, Saccharomyces pastorianus
attatcacagataccgcaagaccgt

SEQ ID NO: 33781 - DNA, 25 bp, Saccharomyces pastorianus
gtcggccaactgcaattgccaaagg

SEQ ID NO: 33782 - DNA, 25 bp, Saccharomyces pastorianus
ccaaataagaggtatgctgctgcat

SEQ ID NO: 33783 - DNA, 25 bp, Saccharomyces pastorianus
gaaaccgttgttgaacaaaccgctg

SEQ ID NO: 33784 - DNA, 25 bp, Saccharomyces pastorianus
ttcacgatggtttggccagaggttt

SEQ ID NO: 33785 - DNA, 25 bp, Saccharomyces pastorianus
gccggtttaggtaagattgaccgtg

SEQ ID NO: 33786 - DNA, 25 bp, Saccharomyces pastorianus
ctgaagttaccattgaagatgcttt

SEQ ID NO: 33787 - DNA, 25 bp, Saccharomyces pastorianus
cttggttcacgatggtttggccaga

SEQ ID NO: 33788 - DNA, 25 bp, Saccharomyces pastorianus
tgaatgggccggtttaggtaagatt

SEQ ID NO: 33789 - DNA, 25 bp, Saccharomyces pastorianus
aggaccgccttggttcacgatggtt

SEQ ID NO: 33790 - DNA, 25 bp, Saccharomyces pastorianus
accgctgaagttaccattgaagatg

SEQ ID NO: 33791 - DNA, 25 bp, Saccharomyces pastorianus
gaacaaaccgctgaagttaccattg

SEQ ID NO: 33792 - DNA, 25 bp, Saccharomyces pastorianus
accgccttggttcacgatggtttgg

SEQ ID NO: 33793 - DNA, 25 bp, Saccharomyces pastorianus
gattgaccgtgaaggtaatgctaga

SEQ ID NO: 33794 - DNA, 25 bp, Saccharomyces pastorianus
gtgtcatatacactaccatgccttc

SEQ ID NO: 33795 - DNA, 25 bp, Saccharomyces pastorianus
aatacatccccggtgcaagtgataa

SEQ ID NO: 33796 - DNA, 25 bp, Saccharomyces pastorianus
gttgtaactgcagccaaagtcctat

SEQ ID NO: 33797 - DNA, 25 bp, Saccharomyces pastorianus
aaactgggccaatctttcaaagaat

SEQ ID NO: 33798 - DNA, 25 bp, Saccharomyces pastorianus
aacagaacaaggtccacgtgcagaa

SEQ ID NO: 33799 - DNA, 25 bp, Saccharomyces pastorianus
gacgaaattgttcaactgacgggca

SEQ ID NO: 33800 - DNA, 25 bp, Saccharomyces pastorianus
gtccctagggagagattacagtttt

SEQ ID NO: 33801 - DNA, 25 bp, Saccharomyces pastorianus
ttatactcagtacacatccacacca

SEQ ID NO: 33802 - DNA, 25 bp, Saccharomyces pastorianus
aatggacattgattccgccttggaa

SEQ ID NO: 33803 - DNA, 25 bp, Saccharomyces pastorianus
aaagcgccattgacgacgacgacga

SEQ ID NO: 33804 - DNA, 25 bp, Saccharomyces pastorianus
ttcattcttggtgccggtagtgaga

SEQ ID NO: 33805 - DNA, 25 bp, Saccharomyces pastorianus
taaggtggtgcttatcggcggtcta

SEQ ID NO: 33806 - DNA, 25 bp, Saccharomyces pastorianus
aagtatcaggtattccgctcggtag

SEQ ID NO: 33807 - DNA, 25 bp, Saccharomyces pastorianus
gggcgaagatagacctctttgctaa

SEQ ID NO: 33808 - DNA, 25 bp, Saccharomyces pastorianus
tggtagccggtcgtcaaaacatctc

SEQ ID NO: 33809 - DNA, 25 bp, Saccharomyces pastorianus
gaaccccatcaagtattggccgtag

SEQ ID NO: 33810 - DNA, 25 bp, Saccharomyces pastorianus
gccaccactgaacatgccgaagaga

SEQ ID NO: 33811 - DNA, 25 bp, Saccharomyces pastorianus
gccgtagcaggctcagtagcacaat

SEQ ID NO: 33812 - DNA, 25 bp, Saccharomyces pastorianus
gtttggtacccataagcctctgtat

SEQ ID NO: 33813 - DNA, 25 bp, Saccharomyces pastorianus
ggatacacaatgtcttcagggctgt

SEQ ID NO: 33814 - DNA, 25 bp, Saccharomyces pastorianus
tatggttgggcactctatgacgaca

SEQ ID NO: 33815 - DNA, 25 bp, Saccharomyces pastorianus
attatggactttcacctcggcgaac

SEQ ID NO: 33816 - DNA, 25 bp, Saccharomyces pastorianus
ggtcctttaggagcgatactgtcac

SEQ ID NO: 33817 - DNA, 25 bp, Saccharomyces pastorianus
ttgactagactacccttatctccaa

SEQ ID NO: 33818 - DNA, 25 bp, Saccharomyces pastorianus
tttacataattcaaccgcaagggcc

SEQ ID NO: 33819 - DNA, 25 bp, Saccharomyces pastorianus
ttagcctccagatcggataccatat

SEQ ID NO: 33820 - DNA, 25 bp, Saccharomyces pastorianus
ccaatcctagcccaagttcaaatac

SEQ ID NO: 33821 - DNA, 25 bp, Saccharomyces pastorianus
tcggactccaaatctaaatcgcaag

SEQ ID NO: 33822 - DNA, 25 bp, Saccharomyces pastorianus
tcttcgcctacaactattcaactaa

SEQ ID NO: 33823 - DNA, 25 bp, Saccharomyces pastorianus
ttggataaccccagaattcccctat

SEQ ID NO: 33824 - DNA, 25 bp, Saccharomyces pastorianus
aaccagatttgtatggctcttcgcc

SEQ ID NO: 33825 - DNA, 25 bp, Saccharomyces pastorianus
ggccaccgcattacaaattcctgaa

SEQ ID NO: 33826 - DNA, 25 bp, Saccharomyces pastorianus
atcacaatctttactttcggactcc

SEQ ID NO: 33827 - DNA, 25 bp, Saccharomyces pastorianus
tttgctgcgcaggttcaagagtgta

SEQ ID NO: 33828 - DNA, 25 bp, Saccharomyces pastorianus
cagaatatgggttggccgcaggtat

SEQ ID NO: 33829 - DNA, 25 bp, Saccharomyces pastorianus
gatgaagccacattccaaggtgctc

SEQ ID NO: 33830 - DNA, 25 bp, Saccharomyces pastorianus
gtgggtgacccattcgatgaagcca

SEQ ID NO: 33831 - DNA, 25 bp, Saccharomyces pastorianus
aataccgctttgaaagtggccgata

SEQ ID NO: 33832 - DNA, 25 bp, Saccharomyces pastorianus
aagaccgcctccgaatctattaagg

SEQ ID NO: 33833 - DNA, 25 bp, Saccharomyces pastorianus
ggtatctactacaactccggtgaag

SEQ ID NO: 33834 - DNA, 25 bp, Saccharomyces pastorianus
tcaagccaactgtcttcggtgatgt

SEQ ID NO: 33835 - DNA, 25 bp, Saccharomyces pastorianus
gttgtcaccgtcaccaaattcaagt

SEQ ID NO: 33836 - DNA, 25 bp, Saccharomyces pastorianus
agggtgcaaccctgattaccggtgg

SEQ ID NO: 33837 - DNA, 25 bp, Saccharomyces pastorianus
gttcaacgcatctggtttgggtaga

SEQ ID NO: 33838 - DNA, 25 bp, Saccharomyces pastorianus
cttgccatgtgccactcaaaacgaa

SEQ ID NO: 33839 - DNA, 25 bp, Saccharomyces pastorianus
tttttgaaactgctcgtgccacagc

SEQ ID NO: 33840 - DNA, 25 bp, Saccharomyces pastorianus
tgattccgccaaaaagtacactaag

SEQ ID NO: 33841 - DNA, 25 bp, Saccharomyces pastorianus
ggtatcacttccgagcaaattgctg

SEQ ID NO: 33842 - DNA, 25 bp, Saccharomyces pastorianus
taacgctttgccatccttagtcaag

SEQ ID NO: 33843 - DNA, 25 bp, Saccharomyces pastorianus
aaggaatctgtctggtacggtccac

SEQ ID NO: 33844 - DNA, 25 bp, Saccharomyces pastorianus
atcatctctgagaccggtatcactt

SEQ ID NO: 33845 - DNA, 25 bp, Saccharomyces pastorianus
caaagtccaatacatttccggtgcc

SEQ ID NO: 33846 - DNA, 25 bp, Saccharomyces pastorianus
aatcatggtcaactgtttcaacgaa

SEQ ID NO: 33847 - DNA, 25 bp, Saccharomyces pastorianus
tgctgatatctctagtgccaaggtc

SEQ ID NO: 33848 - DNA, 25 bp, Saccharomyces pastorianus
gtcgcccaaggcgtcaagtttgttg

SEQ ID NO: 33849 - DNA, 25 bp, Saccharomyces pastorianus
aaggccttgcagcatctttggtcaa

SEQ ID NO: 33850 - DNA, 25 bp, Saccharomyces pastorianus
gaatcatattgatctccacagctcc

SEQ ID NO: 33851 - DNA, 25 bp, Saccharomyces pastorianus
gcaggatggtctagtttcggcattt

SEQ ID NO: 33852 - DNA, 25 bp, Saccharomyces pastorianus
cgggcttgggatttatgtcgctgca

SEQ ID NO: 33853 - DNA, 25 bp, Saccharomyces pastorianus
gcagccatcacgacaggatttcttt

SEQ ID NO: 33854 - DNA, 25 bp, Saccharomyces pastorianus
gtcaaccagacttattgggcccaga

SEQ ID NO: 33855 - DNA, 25 bp, Saccharomyces pastorianus
cagacctttgtctcaatcatcgtta

SEQ ID NO: 33856 - DNA, 25 bp, Saccharomyces pastorianus
gctgccttcgtgcttggatgtatag

SEQ ID NO: 33857 - DNA, 25 bp, Saccharomyces pastorianus
atcagcggattttgcgcagccatca

SEQ ID NO: 33858 - DNA, 25 bp, Saccharomyces pastorianus
ggatttcttttaagccacacgcctg

SEQ ID NO: 33859 - DNA, 25 bp, Saccharomyces pastorianus
ggaatggatatgtctttccccgctg

SEQ ID NO: 33860 - DNA, 25 bp, Saccharomyces pastorianus
tttcccacgttgctgctgcgatgag

SEQ ID NO: 33861 - DNA, 25 bp, Saccharomyces pastorianus
gactcatcagagatcagctcccgaa

SEQ ID NO: 33862 - DNA, 25 bp, Saccharomyces pastorianus
aaaagcgtcgtttcacaaatcatcg

SEQ ID NO: 33863 - DNA, 25 bp, Saccharomyces pastorianus
gaaactacccatttgcttgatattg

SEQ ID NO: 33864 - DNA, 25 bp, Saccharomyces pastorianus
gtggcacaattacttcaagccttgg

SEQ ID NO: 33865 - DNA, 25 bp, Saccharomyces pastorianus
tgcttctcgcgatagacactccaga

SEQ ID NO: 33866 - DNA, 25 bp, Saccharomyces pastorianus
caagccttggcagcagttcacgaat

SEQ ID NO: 33867 - DNA, 25 bp, Saccharomyces pastorianus
gctctatttggtggcgttggcgcaa

SEQ ID NO: 33868 - DNA, 25 bp, Saccharomyces pastorianus
agttcacgaatcaccggatgcgcac

SEQ ID NO: 33869 - DNA, 25 bp, Saccharomyces pastorianus
cacccatttctatctttgaccaagg

SEQ ID NO: 33870 - DNA, 25 bp, Saccharomyces pastorianus
tagcggcagcatttgcccttgtaaa

SEQ ID NO: 33871 - DNA, 25 bp, Saccharomyces pastorianus
aggtccagacaccacttctgaaaag

SEQ ID NO: 33872 - DNA, 25 bp, Saccharomyces pastorianus
ttcaggatcatcaaccaatctttat

SEQ ID NO: 33873 - DNA, 25 bp, Saccharomyces pastorianus
agcaatagtgctggtgtttacacca

SEQ ID NO: 33874 - DNA, 25 bp, Saccharomyces pastorianus
cgtcttggcggctgatgtgtcaagt

SEQ ID NO: 33875 - DNA, 25 bp, Saccharomyces pastorianus
tttcggagctgctacaattgcgact

SEQ ID NO: 33876 - DNA, 25 bp, Saccharomyces pastorianus
gaccaccaagactattactgtcact

SEQ ID NO: 33877 - DNA, 25 bp, Saccharomyces pastorianus
agctgctttccagggtgcaagcgtt

SEQ ID NO: 33878 - DNA, 25 bp, Saccharomyces pastorianus
gttgttaccgaaggtccagacacca

SEQ ID NO: 33879 - DNA, 25 bp, Saccharomyces pastorianus
gaaccgtcgttgtcagcaatagtgc

SEQ ID NO: 33880 - DNA, 25 bp, Saccharomyces pastorianus
tacaattgcgactgccgtcttggcg

SEQ ID NO: 33881 - DNA, 25 bp, Saccharomyces pastorianus
tactaagactgttacccaaggaatt

SEQ ID NO: 33882 - DNA, 25 bp, Saccharomyces pastorianus
aagacttcagctaccactgttgcaa

SEQ ID NO: 33883 - DNA, 25 bp, Saccharomyces pastorianus
ggaggtgaaggttctgctgccactt

SEQ ID NO: 33884 - DNA, 25 bp, Saccharomyces pastorianus
gaaggcagcaacacttgggcaccaa

SEQ ID NO: 33885 - DNA, 25 bp, Saccharomyces pastorianus
taaatcatccactactgctcaaatc

SEQ ID NO: 33886 - DNA, 25 bp, Saccharomyces pastorianus
gttgctgtcacttctgctgttgcaa

SEQ ID NO: 33887 - DNA, 25 bp, Saccharomyces pastorianus
tattactactgtcatcactgctacc

SEQ ID NO: 33888 - DNA, 25 bp, Saccharomyces pastorianus
cgatgctatcactgctggtactggt

SEQ ID NO: 33889 - DNA, 25 bp, Saccharomyces pastorianus
gaagctacatcttctgcctcaaaga

SEQ ID NO: 33890 - DNA, 25 bp, Saccharomyces pastorianus
tgctgctgcaacttctgctgacgaa

SEQ ID NO: 33891 - DNA, 25 bp, Saccharomyces pastorianus
tgttgcaacttcagcttccgctaaa

SEQ ID NO: 33892 - DNA, 25 bp, Saccharomyces pastorianus
agtatcactactgtcatcactgcta

SEQ ID NO: 33893 - DNA, 25 bp, Saccharomyces pastorianus
gggccatacggacagagcactcgaa

SEQ ID NO: 33894 - DNA, 25 bp, Saccharomyces pastorianus
aatgctgagcttttggaagtgtaca

SEQ ID NO: 33895 - DNA, 25 bp, Saccharomyces pastorianus
atctttgttagttgtttgctgcggc

SEQ ID NO: 33896 - DNA, 25 bp, Saccharomyces pastorianus
gaacgcacttatttgaaagcctatt

SEQ ID NO: 33897 - DNA, 25 bp, Saccharomyces pastorianus
gacagagcactcgaacgcacttatt

SEQ ID NO: 33898 - DNA, 25 bp, Saccharomyces pastorianus
aggacctctgtctatggcgataaag

SEQ ID NO: 33899 - DNA, 25 bp, Saccharomyces pastorianus
gtggaagatgataccgccgccaata

SEQ ID NO: 33900 - DNA, 25 bp, Saccharomyces pastorianus
ggagtatgctgaaatgcgagttcta

SEQ ID NO: 33901 - DNA, 25 bp, Saccharomyces pastorianus
tcgaaggtagactgttgacgggttc

SEQ ID NO: 33902 - DNA, 25 bp, Saccharomyces pastorianus
ctgcggctcagaagggtttgtagac

SEQ ID NO: 33903 - DNA, 25 bp, Saccharomyces pastorianus
ttagttgtttgctgcggctcagaag

SEQ ID NO: 33904 - DNA, 25 bp, Saccharomyces pastorianus
tccagtacgggaattgatgctcagc

SEQ ID NO: 33905 - DNA, 25 bp, Saccharomyces pastorianus
gtgtatcggcaatacgggcatccct

SEQ ID NO: 33906 - DNA, 25 bp, Saccharomyces pastorianus
gaacgttggttcaggaagcacttga

SEQ ID NO: 33907 - DNA, 25 bp, Saccharomyces pastorianus
aatcaagcttcccaagtgtccaatg

SEQ ID NO: 33908 - DNA, 25 bp, Saccharomyces pastorianus
aagattacccagatccgttagtgga

SEQ ID NO: 33909 - DNA, 25 bp, Saccharomyces pastorianus
gtgcaattggccatacacatctatg

SEQ ID NO: 33910 - DNA, 25 bp, Saccharomyces pastorianus
aattgtccaattctgaaggtcatca

SEQ ID NO: 33911 - DNA, 25 bp, Saccharomyces pastorianus
aaggacaactcttctatccagaatt

SEQ ID NO: 33912 - DNA, 25 bp, Saccharomyces pastorianus
ttatcatcaaatatcggcggctggg

SEQ ID NO: 33913 - DNA, 25 bp, Saccharomyces pastorianus
gatgctcagccatactttcgagtat

SEQ ID NO: 33914 - DNA, 25 bp, Saccharomyces pastorianus
ggaaatcccatatcgacttgatact

SEQ ID NO: 33915 - DNA, 25 bp, Saccharomyces pastorianus
tagcgccagcatccaacaagaggtc

SEQ ID NO: 33916 - DNA, 25 bp, Saccharomyces pastorianus
tgtcacttcaatcaaaaccggtttc

SEQ ID NO: 33917 - DNA, 25 bp, Saccharomyces pastorianus
aaagaagccactccagctgctagcg

SEQ ID NO: 33918 - DNA, 25 bp, Saccharomyces pastorianus
actaaggacagtagcgtagacgcgt

SEQ ID NO: 33919 - DNA, 25 bp, Saccharomyces pastorianus
tatttgcagaattaggtacatccgg

SEQ ID NO: 33920 - DNA, 25 bp, Saccharomyces pastorianus
gacaacgtcgatactgaaagcaaag

SEQ ID NO: 33921 - DNA, 25 bp, Saccharomyces pastorianus
gacgcgttcgaaaaggaattagcca

SEQ ID NO: 33922 - DNA, 25 bp, Saccharomyces pastorianus
ggtcggtctaccttatccagaatta

SEQ ID NO: 33923 - DNA, 25 bp, Saccharomyces pastorianus
aagagccaataacccagaacttgct

SEQ ID NO: 33924 - DNA, 25 bp, Saccharomyces pastorianus
tagccaaggctggtctagacaacgt

SEQ ID NO: 33925 - DNA, 25 bp, Saccharomyces pastorianus
ggttctaccagatctgtcacttcaa

SEQ ID NO: 33926 - DNA, 25 bp, Saccharomyces pastorianus
ggatatgctttcttctagtttaggt

SEQ ID NO: 33927 - DNA, 25 bp, Saccharomyces pastorianus
aaatgcattcaagtggaccccgtac

SEQ ID NO: 33928 - DNA, 25 bp, Saccharomyces pastorianus
gcttcaattgcatacgcacatcgcg

SEQ ID NO: 33929 - DNA, 25 bp, Saccharomyces pastorianus
atggcgcttctataacctatgctat

SEQ ID NO: 33930 - DNA, 25 bp, Saccharomyces pastorianus
cgatatcacaccttccaatattcta

SEQ ID NO: 33931 - DNA, 25 bp, Saccharomyces pastorianus
tgctttgtttacacgatccggcatc

SEQ ID NO: 33932 - DNA, 25 bp, Saccharomyces pastorianus
atggtctctgggttgtacgttttat

SEQ ID NO: 33933 - DNA, 25 bp, Saccharomyces pastorianus
tacacggcaccggaacttttggatt

SEQ ID NO: 33934 - DNA, 25 bp, Saccharomyces pastorianus
aatgtttggcatttctccttttgag

SEQ ID NO: 33935 - DNA, 25 bp, Saccharomyces pastorianus
gacaactgcacattaccatacacgg

SEQ ID NO: 33936 - DNA, 25 bp, Saccharomyces pastorianus
tttcgtcagacggattgccggtcat

SEQ ID NO: 33937 - DNA, 25 bp, Saccharomyces pastorianus
gacggatgccttggatctgttgacc

SEQ ID NO: 33938 - DNA, 25 bp, Saccharomyces pastorianus
gccccaattgtcatgatggctacga

SEQ ID NO: 33939 - DNA, 25 bp, Saccharomyces pastorianus
ggcaaggttcaaatctcgagtgtta

SEQ ID NO: 33940 - DNA, 25 bp, Saccharomyces pastorianus
aacgatcttatccataagggctcaa

SEQ ID NO: 33941 - DNA, 25 bp, Saccharomyces pastorianus
ggttaccgcttgatcttttggacag

SEQ ID NO: 33942 - DNA, 25 bp, Saccharomyces pastorianus
acatcgacgatcaaggcaaggttca

SEQ ID NO: 33943 - DNA, 25 bp, Saccharomyces pastorianus
tcagttgctcaacaaattgccatga

SEQ ID NO: 33944 - DNA, 25 bp, Saccharomyces pastorianus
gtgctagatccgtcaagtatgttca

SEQ ID NO: 33945 - DNA, 25 bp, Saccharomyces pastorianus
ttgtcccaggtgtattattcatcga

SEQ ID NO: 33946 - DNA, 25 bp, Saccharomyces pastorianus
ggacagatcgattatcatcacaact

SEQ ID NO: 33947 - DNA, 25 bp, Saccharomyces pastorianus
ggacattgagtgtttttcgttcata

SEQ ID NO: 33948 - DNA, 25 bp, Saccharomyces pastorianus
taacatatacgctccattctacgct

SEQ ID NO: 33949 - DNA, 25 bp, Saccharomyces pastorianus
atcggcacagccaagtcaggtattg

SEQ ID NO: 33950 - DNA, 25 bp, Saccharomyces pastorianus
caaccaaggcttttcgtcggtattg

SEQ ID NO: 33951 - DNA, 25 bp, Saccharomyces pastorianus
ggtattgctggtatcggtactttca

SEQ ID NO: 33952 - DNA, 25 bp, Saccharomyces pastorianus
ttcaacgggttcatgcacttaagct

SEQ ID NO: 33953 - DNA, 25 bp, Saccharomyces pastorianus
cggtactttcaagcccgaattgatc

SEQ ID NO: 33954 - DNA, 25 bp, Saccharomyces pastorianus
ttcctgtttaggtgctgccatcggc

SEQ ID NO: 33955 - DNA, 25 bp, Saccharomyces pastorianus
gatccccgtggtcatgagtggtatt

SEQ ID NO: 33956 - DNA, 25 bp, Saccharomyces pastorianus
gatcatgaagtctctgatccccgtg

SEQ ID NO: 33957 - DNA, 25 bp, Saccharomyces pastorianus
ctttgtgtagggtttgcctgcttga

SEQ ID NO: 33958 - DNA, 25 bp, Saccharomyces pastorianus
ctttttcgggtttgcaggttgtgct

SEQ ID NO: 33959 - DNA, 25 bp, Saccharomyces pastorianus
tggtaaacgccgacactcagggcaa

SEQ ID NO: 33960 - DNA, 25 bp, Saccharomyces pastorianus
gaaacagtcaaggtggcccagttaa

SEQ ID NO: 33961 - DNA, 25 bp, Saccharomyces pastorianus
aagaatcggcgttctggaagccaga

SEQ ID NO: 33962 - DNA, 25 bp, Saccharomyces pastorianus
gacgatggcctccaaatctttagaa

SEQ ID NO: 33963 - DNA, 25 bp, Saccharomyces pastorianus
gagaaaactgacctgcatttgccaa

SEQ ID NO: 33964 - DNA, 25 bp, Saccharomyces pastorianus
gcgatgatcaagctgccgagactaa

SEQ ID NO: 33965 - DNA, 25 bp, Saccharomyces pastorianus
gaatgacagaccagcaagccgcgga

SEQ ID NO: 33966 - DNA, 25 bp, Saccharomyces pastorianus
gagcccttcgatctggagctgaatg

SEQ ID NO: 33967 - DNA, 25 bp, Saccharomyces pastorianus
caccagttccatgatatcctcgagg

SEQ ID NO: 33968 - DNA, 25 bp, Saccharomyces pastorianus
tgcctcaggtgcgatacaacgtgga

SEQ ID NO: 33969 - DNA, 25 bp, Saccharomyces pastorianus
gggcccgccaagatcaacgaggtat

SEQ ID NO: 33970 - DNA, 25 bp, Saccharomyces pastorianus
attcttgaagctgatccaggactat

SEQ ID NO: 33971 - DNA, 25 bp, Saccharomyces pastorianus
tcgccatcatcattgttgtcgtcat

SEQ ID NO: 33972 - DNA, 25 bp, Saccharomyces pastorianus
aagactgctcttgcagaggtccagg

SEQ ID NO: 33973 - DNA, 25 bp, Saccharomyces pastorianus
aggtccaggcaagacaccaggagtt

SEQ ID NO: 33974 - DNA, 25 bp, Saccharomyces pastorianus
gactatagaatcgtggactccaact

SEQ ID NO: 33975 - DNA, 25 bp, Saccharomyces pastorianus
acatgatcattcagccagaggccac

SEQ ID NO: 33976 - DNA, 25 bp, Saccharomyces pastorianus
gggaggccagcagatattttcacaa

SEQ ID NO: 33977 - DNA, 25 bp, Saccharomyces pastorianus
gctggttgattgttttcgccatcat

SEQ ID NO: 33978 - DNA, 25 bp, Saccharomyces pastorianus
agagcaaggtgtcggccacacagac

SEQ ID NO: 33979 - DNA, 25 bp, Saccharomyces pastorianus
cgcccaactggacgtagagcaaggt

SEQ ID NO: 33980 - DNA, 25 bp, Saccharomyces pastorianus
aagacgaagtcgaagccgctataag

SEQ ID NO: 33981 - DNA, 25 bp, Saccharomyces pastorianus
tcaagtactgtaccgcgcaaccaag

SEQ ID NO: 33982 - DNA, 25 bp, Saccharomyces pastorianus
attagcccgtgtctccaaggacaag

SEQ ID NO: 33983 - DNA, 25 bp, Saccharomyces pastorianus
aaggacagctacatgaccaccagtg

SEQ ID NO: 33984 - DNA, 25 bp, Saccharomyces pastorianus
taaggaagccgtcttcaagtccctg

SEQ ID NO: 33985 - DNA, 25 bp, Saccharomyces pastorianus
aaacgacactttcatcgagcgcaac

SEQ ID NO: 33986 - DNA, 25 bp, Saccharomyces pastorianus
aggagcacgctccttacactgatga

SEQ ID NO: 33987 - DNA, 25 bp, Saccharomyces pastorianus
gtttgactttcaacgccaagggcat

SEQ ID NO: 33988 - DNA, 25 bp, Saccharomyces pastorianus
acatcgagatcgttcgtgtcaacaa

SEQ ID NO: 33989 - DNA, 25 bp, Saccharomyces pastorianus
gtgtcaacaagaacgggcctgccgt

SEQ ID NO: 33990 - DNA, 25 bp, Saccharomyces pastorianus
agtacttccacaacggtatgatcca

SEQ ID NO: 33991 - DNA, 25 bp, Saccharomyces pastorianus
ggagaatgtctacttggacccatta

SEQ ID NO: 33992 - DNA, 25 bp, Saccharomyces pastorianus
tttgtttcttgcaggcgccaacgca

SEQ ID NO: 33993 - DNA, 25 bp, Saccharomyces pastorianus
ggacatagatcactcctccataata

SEQ ID NO: 33994 - DNA, 25 bp, Saccharomyces pastorianus
atttcgcgagcagcaatactttcaa

SEQ ID NO: 33995 - DNA, 25 bp, Saccharomyces pastorianus
cgcaagctcgaatcccaacaagaat

SEQ ID NO: 33996 - DNA, 25 bp, Saccharomyces pastorianus
agatacgatcagtttcccgaatttc

SEQ ID NO: 33997 - DNA, 25 bp, Saccharomyces pastorianus
aacttctgcgtcgtctatattcaac

SEQ ID NO: 33998 - DNA, 25 bp, Saccharomyces pastorianus
actttagcgggtcatcccagcatta

SEQ ID NO: 33999 - DNA, 25 bp, Saccharomyces pastorianus
gcattacgctgtcccggacatagat

SEQ ID NO: 34000 - DNA, 25 bp, Saccharomyces pastorianus
gaatgtcagcactaataacgtccct

SEQ ID NO: 34001 - DNA, 25 bp, Saccharomyces pastorianus
caaagacgatttgtttttctgccca

SEQ ID NO: 34002 - DNA, 25 bp, Saccharomyces pastorianus
gcccaagatcactgctgtctgtaga

SEQ ID NO: 34003 - DNA, 25 bp, Saccharomyces pastorianus
ggtatatagagtcggattatccaca

SEQ ID NO: 34004 - DNA, 25 bp, Saccharomyces pastorianus
aagtatatccgtggtatcagtgaag

SEQ ID NO: 34005 - DNA, 25 bp, Saccharomyces pastorianus
gcccgcattgttgaacgcttttgac

SEQ ID NO: 34006 - DNA, 25 bp, Saccharomyces pastorianus
gaattggaaatcaacacgcccgcat

SEQ ID NO: 34007 - DNA, 25 bp, Saccharomyces pastorianus
ggcccaactgttattatattcccca

SEQ ID NO: 34008 - DNA, 25 bp, Saccharomyces pastorianus
tacctgtacctgaaaatgacccacc

SEQ ID NO: 34009 - DNA, 25 bp, Saccharomyces pastorianus
gcatctctcatcaggacgtttctaa

SEQ ID NO: 34010 - DNA, 25 bp, Saccharomyces pastorianus
gagaaacgacatgtggcccaactgt

SEQ ID NO: 34011 - DNA, 25 bp, Saccharomyces pastorianus
gacagtcggaaactactcacgaagt

SEQ ID NO: 34012 - DNA, 25 bp, Saccharomyces pastorianus
gaccgtataagttacatccacaatg

SEQ ID NO: 34013 - DNA, 25 bp, Saccharomyces pastorianus
tgaacttagaactacctgtacctga

SEQ ID NO: 34014 - DNA, 25 bp, Saccharomyces pastorianus
aacttatgaaacttccggcacaaat

SEQ ID NO: 34015 - DNA, 25 bp, Saccharomyces pastorianus
ttcgcagatgctgacggtgctagta

SEQ ID NO: 34016 - DNA, 25 bp, Saccharomyces pastorianus
tggttccagggcacatatggttaac

SEQ ID NO: 34017 - DNA, 25 bp, Saccharomyces pastorianus
gatgtatggtttccacactctggta

SEQ ID NO: 34018 - DNA, 25 bp, Saccharomyces pastorianus
tggctctaaaatggctttggctgtc

SEQ ID NO: 34019 - DNA, 25 bp, Saccharomyces pastorianus
ggctttggctgtcgatagcatcaaa

SEQ ID NO: 34020 - DNA, 25 bp, Saccharomyces pastorianus
tgctgtgagacagggtttcctacat

SEQ ID NO: 34021 - DNA, 25 bp, Saccharomyces pastorianus
gtaaatacggtctcttcgcagatgc

SEQ ID NO: 34022 - DNA, 25 bp, Saccharomyces pastorianus
aaactgtttaataggcctgccatat

SEQ ID NO: 34023 - DNA, 25 bp, Saccharomyces pastorianus
gattttcccatatttgcataccgag

SEQ ID NO: 34024 - DNA, 25 bp, Saccharomyces pastorianus
aagcctgttgtagccattggttcca

SEQ ID NO: 34025 - DNA, 25 bp, Saccharomyces pastorianus
gactctcccgctaatatcaaggtta

SEQ ID NO: 34026 - DNA, 25 bp, Saccharomyces pastorianus
aggctccttatctggtggtcaacta

SEQ ID NO: 34027 - DNA, 25 bp, Saccharomyces pastorianus
gccaacctaaaaccatctgtcgatg

SEQ ID NO: 34028 - DNA, 25 bp, Saccharomyces pastorianus
aatgccgatgccgttggcgtgaaag

SEQ ID NO: 34029 - DNA, 25 bp, Saccharomyces pastorianus
tgaaattgctaaccacacaccacta

SEQ ID NO: 34030 - DNA, 25 bp, Saccharomyces pastorianus
ggtaccggacaaatcgatcaatcta

SEQ ID NO: 34031 - DNA, 25 bp, Saccharomyces pastorianus
gttggtgccttgtgtccagaacaat

SEQ ID NO: 34032 - DNA, 25 bp, Saccharomyces pastorianus
ccgtcaattgattccttcggttatt

SEQ ID NO: 34033 - DNA, 25 bp, Saccharomyces pastorianus
gaatggttgtcgtctccaaagggaa

SEQ ID NO: 34034 - DNA, 25 bp, Saccharomyces pastorianus
cgtcgtcgtttacgttacatcgaat

SEQ ID NO: 34035 - DNA, 25 bp, Saccharomyces pastorianus
atctgtcgatgacgatgactctccc

SEQ ID NO: 34036 - DNA, 25 bp, Saccharomyces pastorianus
attgagaacagactcctcagccgag

SEQ ID NO: 34037 - DNA, 25 bp, Saccharomyces pastorianus
aaaagcaattcgctgttgtcgccgt

SEQ ID NO: 34038 - DNA, 25 bp, Saccharomyces pastorianus
gtacggtcaatatacgacctgtttt

SEQ ID NO: 34039 - DNA, 25 bp, Saccharomyces pastorianus
gactcctcagccgagtacggtcaat

SEQ ID NO: 34040 - DNA, 25 bp, Saccharomyces pastorianus
aagcgttccaggttccaaattgcgt

SEQ ID NO: 34041 - DNA, 25 bp, Saccharomyces pastorianus
aattttacgcctttgaaatcgcaag

SEQ ID NO: 34042 - DNA, 25 bp, Saccharomyces pastorianus
gctgagaccgctgataacttagaag

SEQ ID NO: 34043 - DNA, 25 bp, Saccharomyces pastorianus
tcaagttttaatgctgagaccgctg

SEQ ID NO: 34044 - DNA, 25 bp, Saccharomyces pastorianus
attgcgtttgaccaagttcgatgac

SEQ ID NO: 34045 - DNA, 25 bp, Saccharomyces pastorianus
cgacctgttttgttgtgaggctaca

SEQ ID NO: 34046 - DNA, 25 bp, Saccharomyces pastorianus
aacttcatcgaaagattcccggaat

SEQ ID NO: 34047 - DNA, 25 bp, Saccharomyces pastorianus
tctttactcttggatcactacgaat

SEQ ID NO: 34048 - DNA, 25 bp, Saccharomyces pastorianus
ggcggccctatcaagctaaaggcta

SEQ ID NO: 34049 - DNA, 25 bp, Saccharomyces pastorianus
gaaattaccagatctatcggacgat

SEQ ID NO: 34050 - DNA, 25 bp, Saccharomyces pastorianus
gaagctttatcgagattccgtgaga

SEQ ID NO: 34051 - DNA, 25 bp, Saccharomyces pastorianus
atgtttggcgccatagtctacctcg

SEQ ID NO: 34052 - DNA, 25 bp, Saccharomyces pastorianus
aacgcaaacactttagccatttcct

SEQ ID NO: 34053 - DNA, 25 bp, Saccharomyces pastorianus
cggtgccacctatttacttcaatta

SEQ ID NO: 34054 - DNA, 25 bp, Saccharomyces pastorianus
aaaacccaccttcattatcattcaa

SEQ ID NO: 34055 - DNA, 25 bp, Saccharomyces pastorianus
taggatcatcatagccacaatacgt

SEQ ID NO: 34056 - DNA, 25 bp, Saccharomyces pastorianus
tgactagagacgacctaggcggccc

SEQ ID NO: 34057 - DNA, 25 bp, Saccharomyces pastorianus
gatttaattttgcagctgtccaaga

SEQ ID NO: 34058 - DNA, 25 bp, Saccharomyces pastorianus
gatcttggtaccctgttcatgttaa

SEQ ID NO: 34059 - DNA, 25 bp, Saccharomyces pastorianus
aggtgttgacgatctcaagagccaa

SEQ ID NO: 34060 - DNA, 25 bp, Saccharomyces pastorianus
gtctaaaggttccaagggctgttca

SEQ ID NO: 34061 - DNA, 25 bp, Saccharomyces pastorianus
aacccagttacttctctgttattga

SEQ ID NO: 34062 - DNA, 25 bp, Saccharomyces pastorianus
ggccactttagagcctcctttgaag

SEQ ID NO: 34063 - DNA, 25 bp, Saccharomyces pastorianus
gtgcataccaaaagatccaacgtgt

SEQ ID NO: 34064 - DNA, 25 bp, Saccharomyces pastorianus
agagccgctatgagtttggaaacac

SEQ ID NO: 34065 - DNA, 25 bp, Saccharomyces pastorianus
gggctgttcaaaaggacttaccatt

SEQ ID NO: 34066 - DNA, 25 bp, Saccharomyces pastorianus
gagctttgtcaaaacccgaaggcca

SEQ ID NO: 34067 - DNA, 25 bp, Saccharomyces pastorianus
taagcgattctataacccagttact

SEQ ID NO: 34068 - DNA, 25 bp, Saccharomyces pastorianus
tatatggccaaaagagctgtcgttt

SEQ ID NO: 34069 - DNA, 25 bp, Saccharomyces pastorianus
tacacacattgctgttggctcggaa

SEQ ID NO: 34070 - DNA, 25 bp, Saccharomyces pastorianus
gagcgcccaagacactgaaaacttt

SEQ ID NO: 34071 - DNA, 25 bp, Saccharomyces pastorianus
agaatccatgccatctagcctgaaa

SEQ ID NO: 34072 - DNA, 25 bp, Saccharomyces pastorianus
aacttcagtttttacgcagagcgcc

SEQ ID NO: 34073 - DNA, 25 bp, Saccharomyces pastorianus
ggcagaagccacctcgttggaagaa

SEQ ID NO: 34074 - DNA, 25 bp, Saccharomyces pastorianus
aagccaacacacatcctggatttga

SEQ ID NO: 34075 - DNA, 25 bp, Saccharomyces pastorianus
gatggtcgactgttgccaatgaact

SEQ ID NO: 34076 - DNA, 25 bp, Saccharomyces pastorianus
actccgattagtaccgcatctagaa

SEQ ID NO: 34077 - DNA, 25 bp, Saccharomyces pastorianus
gaacttgcaaaacctcacgttgtca

SEQ ID NO: 34078 - DNA, 25 bp, Saccharomyces pastorianus
gaacttctcacaattccggatctat

SEQ ID NO: 34079 - DNA, 25 bp, Saccharomyces pastorianus
gaaaccaagtttgccatttggccaa

SEQ ID NO: 34080 - DNA, 25 bp, Saccharomyces pastorianus
ccggtgttatcgtttttggcatgaa

SEQ ID NO: 34081 - DNA, 25 bp, Saccharomyces pastorianus
gttgttttcgaaaagctggctggct

SEQ ID NO: 34082 - DNA, 25 bp, Saccharomyces pastorianus
agatccaacttgatgtctctaggta

SEQ ID NO: 34083 - DNA, 25 bp, Saccharomyces pastorianus
gacagtactagccaagcatgccaag

SEQ ID NO: 34084 - DNA, 25 bp, Saccharomyces pastorianus
agctggctggctatatcggtagaaa

SEQ ID NO: 34085 - DNA, 25 bp, Saccharomyces pastorianus
agattgcacattacttccttgacag

SEQ ID NO: 34086 - DNA, 25 bp, Saccharomyces pastorianus
gggaaatgccattcctatacggcaa

SEQ ID NO: 34087 - DNA, 25 bp, Saccharomyces pastorianus
ggttcggtgtcagttcaaagagtac

SEQ ID NO: 34088 - DNA, 25 bp, Saccharomyces pastorianus
gctgccattgttgctttcagacaag

SEQ ID NO: 34089 - DNA, 25 bp, Saccharomyces pastorianus
gtgcccgaccatgtttccaaattgg

SEQ ID NO: 34090 - DNA, 25 bp, Saccharomyces pastorianus
agaaacatgcaacctgctgccattg

SEQ ID NO: 34091 - DNA, 25 bp, Saccharomyces pastorianus
gaagaacgaccctgcttttacagaa

SEQ ID NO: 34092 - DNA, 25 bp, Saccharomyces pastorianus
tcggatgactccaaggctttccatg

SEQ ID NO: 34093 - DNA, 25 bp, Saccharomyces pastorianus
gaaggctaggtgtcagtcattccct

SEQ ID NO: 34094 - DNA, 25 bp, Saccharomyces pastorianus
tgagctcccttcactgtttagtaat

SEQ ID NO: 34095 - DNA, 25 bp, Saccharomyces pastorianus
ggagctacaccaattgattcatcaa

SEQ ID NO: 34096 - DNA, 25 bp, Saccharomyces pastorianus
gttctgggaacaccgcatatatctc

SEQ ID NO: 34097 - DNA, 25 bp, Saccharomyces pastorianus
aattcgtaggtgctaactccttcac

SEQ ID NO: 34098 - DNA, 25 bp, Saccharomyces pastorianus
gtggaccacgcaatccaattcgtag

SEQ ID NO: 34099 - DNA, 25 bp, Saccharomyces pastorianus
gagcccgtttcgaaggtatacaaat

SEQ ID NO: 34100 - DNA, 25 bp, Saccharomyces pastorianus
aaccttgcatgatctgagagcccgt

SEQ ID NO: 34101 - DNA, 25 bp, Saccharomyces pastorianus
atccacctacgatttgttggtcctg

SEQ ID NO: 34102 - DNA, 25 bp, Saccharomyces pastorianus
ttggtccattgcttacgtgattttc

SEQ ID NO: 34103 - DNA, 25 bp, Saccharomyces pastorianus
tgctatcactgatgacccggtcaag

SEQ ID NO: 34104 - DNA, 25 bp, Saccharomyces pastorianus
atgatcaagacgttcgctgccatgc

SEQ ID NO: 34105 - DNA, 25 bp, Saccharomyces pastorianus
ttgtgaagcgttccctgtcgttgaa

SEQ ID NO: 34106 - DNA, 25 bp, Saccharomyces pastorianus
gtcaacaaacccgtcgatttcaagt

SEQ ID NO: 34107 - DNA, 25 bp, Saccharomyces pastorianus
agctgctaccgaccctgatggaaaa

SEQ ID NO: 34108 - DNA, 25 bp, Saccharomyces pastorianus
ggtctacaccattctttgtacactt

SEQ ID NO: 34109 - DNA, 25 bp, Saccharomyces pastorianus
gacaaagccgtcctgtactgggaag

SEQ ID NO: 34110 - DNA, 25 bp, Saccharomyces pastorianus
gattccatgtctttgtcaaggtcta

SEQ ID NO: 34111 - DNA, 25 bp, Saccharomyces pastorianus
ttcggcatcagcgttcattttgtct

SEQ ID NO: 34112 - DNA, 25 bp, Saccharomyces pastorianus
gatcctcattacaagcttttcggca

SEQ ID NO: 34113 - DNA, 25 bp, Saccharomyces pastorianus
tcctgaaccattactgcagcagcag

SEQ ID NO: 34114 - DNA, 25 bp, Saccharomyces pastorianus
aataataacgcagcttcctctttac

SEQ ID NO: 34115 - DNA, 25 bp, Saccharomyces pastorianus
tcaagcatctgcacaacctcaaatg

SEQ ID NO: 34116 - DNA, 25 bp, Saccharomyces pastorianus
atggctgccaccagggtcactcagt

SEQ ID NO: 34117 - DNA, 25 bp, Saccharomyces pastorianus
tgaagaagttccctactcatttcca

SEQ ID NO: 34118 - DNA, 25 bp, Saccharomyces pastorianus
agggcgactcagacgtaaataacaa

SEQ ID NO: 34119 - DNA, 25 bp, Saccharomyces pastorianus
gacttgctcatcgaaaagggcgact

SEQ ID NO: 34120 - DNA, 25 bp, Saccharomyces pastorianus
aagcagcgccgacaacaagtctgaa

SEQ ID NO: 34121 - DNA, 25 bp, Saccharomyces pastorianus
agggccaaagttcacaaccacagca

SEQ ID NO: 34122 - DNA, 25 bp, Saccharomyces pastorianus
gtatcctccgcaagtaagcgccaat

SEQ ID NO: 34123 - DNA, 25 bp, Saccharomyces pastorianus
atgagatctaattcgcagcaaccac

SEQ ID NO: 34124 - DNA, 25 bp, Saccharomyces pastorianus
gccatatttccatcctgatgtcgtg

SEQ ID NO: 34125 - DNA, 25 bp, Saccharomyces pastorianus
tttgcaaagcggttccaaggacatt

SEQ ID NO: 34126 - DNA, 25 bp, Saccharomyces pastorianus
gcagaagtcatattggcactggaat

SEQ ID NO: 34127 - DNA, 25 bp, Saccharomyces pastorianus
acaccgttttatgatactacgccaa

SEQ ID NO: 34128 - DNA, 25 bp, Saccharomyces pastorianus
aaggacattaaagcccacccatggt

SEQ ID NO: 34129 - DNA, 25 bp, Saccharomyces pastorianus
gactctttgtgggactccggattat

SEQ ID NO: 34130 - DNA, 25 bp, Saccharomyces pastorianus
gcactggaatacttgcatggccata

SEQ ID NO: 34131 - DNA, 25 bp, Saccharomyces pastorianus
ttggccaaggacatcgaaactccat

SEQ ID NO: 34132 - DNA, 25 bp, Saccharomyces pastorianus
ggtgacacctctttgtttgatcagt

SEQ ID NO: 34133 - DNA, 25 bp, Saccharomyces pastorianus
ggtgcaaacggtcacatggactctt

SEQ ID NO: 34134 - DNA, 25 bp, Saccharomyces pastorianus
ggaaaagtcatatatccgccatatt

SEQ ID NO: 34135 - DNA, 25 bp, Saccharomyces pastorianus
actgtgataatgtcttggagcctac

SEQ ID NO: 34136 - DNA, 25 bp, Saccharomyces pastorianus
taccgacgatcctagctctattgaa

SEQ ID NO: 34137 - DNA, 25 bp, Saccharomyces pastorianus
gaaatttgtccgatcttctacaaga

SEQ ID NO: 34138 - DNA, 25 bp, Saccharomyces pastorianus
ggacggcgctctcggtatacaaata

SEQ ID NO: 34139 - DNA, 25 bp, Saccharomyces pastorianus
aggtaattgcccctccataaatagc

SEQ ID NO: 34140 - DNA, 25 bp, Saccharomyces pastorianus
aatagcccaattgtggccatcctta

SEQ ID NO: 34141 - DNA, 25 bp, Saccharomyces pastorianus
gagcagcatctttacgggacggcgc

SEQ ID NO: 34142 - DNA, 25 bp, Saccharomyces pastorianus
gacatctttcgaacggtggttgttt

SEQ ID NO: 34143 - DNA, 25 bp, Saccharomyces pastorianus
gagatatctctcgattccagtacca

SEQ ID NO: 34144 - DNA, 25 bp, Saccharomyces pastorianus
tggagcctactggttctgcaaacaa

SEQ ID NO: 34145 - DNA, 25 bp, Saccharomyces pastorianus
gaccatgtcctggttgaatcgaact

SEQ ID NO: 34146 - DNA, 25 bp, Saccharomyces pastorianus
aaacagcagttgtggttgctgcata

SEQ ID NO: 34147 - DNA, 25 bp, Saccharomyces pastorianus
aaatgatcggttttttggagagcca

SEQ ID NO: 34148 - DNA, 25 bp, Saccharomyces pastorianus
gtagctacctggtgacttgcaaaag

SEQ ID NO: 34149 - DNA, 25 bp, Saccharomyces pastorianus
ggtggcgccaagcttatacatggtt

SEQ ID NO: 34150 - DNA, 25 bp, Saccharomyces pastorianus
tccattccccgtatatctttacgat

SEQ ID NO: 34151 - DNA, 25 bp, Saccharomyces pastorianus
tatattcacgtaccaaactcgccat

SEQ ID NO: 34152 - DNA, 25 bp, Saccharomyces pastorianus
gccatcgcggagttggactcgttga

SEQ ID NO: 34153 - DNA, 25 bp, Saccharomyces pastorianus
ttctgaagaatagaccgcgggtttc

SEQ ID NO: 34154 - DNA, 25 bp, Saccharomyces pastorianus
atacatggttcgtagctacctggtg

SEQ ID NO: 34155 - DNA, 25 bp, Saccharomyces pastorianus
cgggcaaaacttccagcgtctgata

SEQ ID NO: 34156 - DNA, 25 bp, Saccharomyces pastorianus
ggagagccagttgtcatgcataaaa

SEQ ID NO: 34157 - DNA, 25 bp, Saccharomyces pastorianus
agtcttgagcaacacgggtcttcac

SEQ ID NO: 34158 - DNA, 25 bp, Saccharomyces pastorianus
gtcttcactgcactctctatatagt

SEQ ID NO: 34159 - DNA, 25 bp, Saccharomyces pastorianus
aaacaagctccttactcctgaaatg

SEQ ID NO: 34160 - DNA, 25 bp, Saccharomyces pastorianus
gaacgggatctttggagcttatagc

SEQ ID NO: 34161 - DNA, 25 bp, Saccharomyces pastorianus
tgcaccttaccatcagtgacgctga

SEQ ID NO: 34162 - DNA, 25 bp, Saccharomyces pastorianus
tgaagcatttcatcccaacgaacac

SEQ ID NO: 34163 - DNA, 25 bp, Saccharomyces pastorianus
acgctgaatggctattttccctcaa

SEQ ID NO: 34164 - DNA, 25 bp, Saccharomyces pastorianus
atgggctcctccacggtgtatcgaa

SEQ ID NO: 34165 - DNA, 25 bp, Saccharomyces pastorianus
gccattatggccttttgtgcgatga

SEQ ID NO: 34166 - DNA, 25 bp, Saccharomyces pastorianus
gtatcgaacccttgtctaacgtatg

SEQ ID NO: 34167 - DNA, 25 bp, Saccharomyces pastorianus
gagattttcgggttatccgttcacg

SEQ ID NO: 34168 - DNA, 25 bp, Saccharomyces pastorianus
ggtttcgtccaacgaggtcaacaag

SEQ ID NO: 34169 - DNA, 25 bp, Saccharomyces pastorianus
ttcccaagagtcaaccgtcgcaaaa

SEQ ID NO: 34170 - DNA, 25 bp, Saccharomyces pastorianus
ctgttcgagcaggacattttggtta

SEQ ID NO: 34171 - DNA, 25 bp, Saccharomyces pastorianus
agagctgataccacagtgacttggg

SEQ ID NO: 34172 - DNA, 25 bp, Saccharomyces pastorianus
aaaaacatcatctcttgtcccaggt

SEQ ID NO: 34173 - DNA, 25 bp, Saccharomyces pastorianus
aacattaccaacttcggatgacggg

SEQ ID NO: 34174 - DNA, 25 bp, Saccharomyces pastorianus
actagcactcggaagagtcctctaa

SEQ ID NO: 34175 - DNA, 25 bp, Saccharomyces pastorianus
tacagggactgatgcattctagaaa

SEQ ID NO: 34176 - DNA, 25 bp, Saccharomyces pastorianus
atggagccgaagatgcttcccaaga

SEQ ID NO: 34177 - DNA, 25 bp, Saccharomyces pastorianus
tagagaaacccagtcaacttccgtc

SEQ ID NO: 34178 - DNA, 25 bp, Saccharomyces pastorianus
gaagcttaccagtctaatgcgttga

SEQ ID NO: 34179 - DNA, 25 bp, Saccharomyces pastorianus
gaaatcttggacgatgctatgcata

SEQ ID NO: 34180 - DNA, 25 bp, Saccharomyces pastorianus
aacgaccatttctctacattgtaca

SEQ ID NO: 34181 - DNA, 25 bp, Saccharomyces pastorianus
gtcctgcaaaggtgaaccggtccga

SEQ ID NO: 34182 - DNA, 25 bp, Saccharomyces pastorianus
aggtgatgccttttttgctggtgat

SEQ ID NO: 34183 - DNA, 25 bp, Saccharomyces pastorianus
gcaattaacagacatcgggctacga

SEQ ID NO: 34184 - DNA, 25 bp, Saccharomyces pastorianus
agcgaaggaactgccactctagaaa

SEQ ID NO: 34185 - DNA, 25 bp, Saccharomyces pastorianus
aatcggtcaatcaaagaggctcatc

SEQ ID NO: 34186 - DNA, 25 bp, Saccharomyces pastorianus
aattggctagacgtttacagcagca

SEQ ID NO: 34187 - DNA, 25 bp, Saccharomyces pastorianus
ttgtacaggcatcgtgtggcagtct

SEQ ID NO: 34188 - DNA, 25 bp, Saccharomyces pastorianus
ggtgatttcagtagcgcaaagtcaa

SEQ ID NO: 34189 - DNA, 25 bp, Saccharomyces pastorianus
gtggcagtctctaggttctgtagat

SEQ ID NO: 34190 - DNA, 25 bp, Saccharomyces pastorianus
atccgtggccatcggttctatactg

SEQ ID NO: 34191 - DNA, 25 bp, Saccharomyces pastorianus
agctgactcacgagcaggaggttaa

SEQ ID NO: 34192 - DNA, 25 bp, Saccharomyces pastorianus
tgattcgccggctgtggaacaacac

SEQ ID NO: 34193 - DNA, 25 bp, Saccharomyces pastorianus
ccagcgcattccgttgaatctgatt

SEQ ID NO: 34194 - DNA, 25 bp, Saccharomyces pastorianus
ggctgtggaacaacacaagcttcag

SEQ ID NO: 34195 - DNA, 25 bp, Saccharomyces pastorianus
aagcttcagctgactcacgagcagg

SEQ ID NO: 34196 - DNA, 25 bp, Saccharomyces pastorianus
ttgaatctgattcgccggctgtgga

SEQ ID NO: 34197 - DNA, 25 bp, Saccharomyces pastorianus
ttccttattgcattcgcatccgtgg

SEQ ID NO: 34198 - DNA, 25 bp, Saccharomyces pastorianus
ttttccacgttccttattgcattcg

SEQ ID NO: 34199 - DNA, 25 bp, Saccharomyces pastorianus
ctgtacttttccacgttccttattg

SEQ ID NO: 34200 - DNA, 25 bp, Saccharomyces pastorianus
atcggttctatactgccgtgcccag

SEQ ID NO: 34201 - DNA, 25 bp, Saccharomyces pastorianus
caagcttattcattgccgtccaaat

SEQ ID NO: 34202 - DNA, 25 bp, Saccharomyces pastorianus
ggaggctctttagactatgggctat

SEQ ID NO: 34203 - DNA, 25 bp, Saccharomyces pastorianus
atatatgtcccgtttggtggttcca

SEQ ID NO: 34204 - DNA, 25 bp, Saccharomyces pastorianus
actgtctttttgttgctggctgaga

SEQ ID NO: 34205 - DNA, 25 bp, Saccharomyces pastorianus
attgatggtattgacgcgccggaaa

SEQ ID NO: 34206 - DNA, 25 bp, Saccharomyces pastorianus
gacacacctttacaactagccatga

SEQ ID NO: 34207 - DNA, 25 bp, Saccharomyces pastorianus
gagttctctcttatgggtgcagcaa

SEQ ID NO: 34208 - DNA, 25 bp, Saccharomyces pastorianus
ttttttgtggtgctggtgccgtaat

SEQ ID NO: 34209 - DNA, 25 bp, Saccharomyces pastorianus
aagctttgccgtgttttcattcgta

SEQ ID NO: 34210 - DNA, 25 bp, Saccharomyces pastorianus
gccatgatcggactgtttaacttga

SEQ ID NO: 34211 - DNA, 25 bp, Saccharomyces pastorianus
ggcgcagatggtacgaaactcctat

SEQ ID NO: 34212 - DNA, 25 bp, Saccharomyces pastorianus
tgttttgtttacagcttcttccgtt

SEQ ID NO: 34213 - DNA, 25 bp, Saccharomyces pastorianus
agctcaaattcctgccgaagctatc

SEQ ID NO: 34214 - DNA, 25 bp, Saccharomyces pastorianus
ccagttaataccactaccgaaaatg

SEQ ID NO: 34215 - DNA, 25 bp, Saccharomyces pastorianus
ttgtttacagcttcttccgttttag

SEQ ID NO: 34216 - DNA, 25 bp, Saccharomyces pastorianus
acagctcaaattcctgccgaagcta

SEQ ID NO: 34217 - DNA, 25 bp, Saccharomyces pastorianus
gaaacagctcaaattcctgccgaag

SEQ ID NO: 34218 - DNA, 25 bp, Saccharomyces pastorianus
caattgttacagctgttttgtttac

SEQ ID NO: 34219 - DNA, 25 bp, Saccharomyces pastorianus
gaaactctcaacaattgttacagct

SEQ ID NO: 34220 - DNA, 25 bp, Saccharomyces pastorianus
ttacagcttcttccgttttagccgc

SEQ ID NO: 34221 - DNA, 25 bp, Saccharomyces pastorianus
tttagccgccccagttaataccact

SEQ ID NO: 34222 - DNA, 25 bp, Saccharomyces pastorianus
accactaccgaaaatgaaacagctc

SEQ ID NO: 34223 - DNA, 25 bp, Saccharomyces pastorianus
atttcaaaccttgctgccaaggaag

SEQ ID NO: 34224 - DNA, 25 bp, Saccharomyces pastorianus
attctgacgttgctgttttgccatt

SEQ ID NO: 34225 - DNA, 25 bp, Saccharomyces pastorianus
ctgccgaagctatcattggctactt

SEQ ID NO: 34226 - DNA, 25 bp, Saccharomyces pastorianus
gaagctatcattggctacttggatt

SEQ ID NO: 34227 - DNA, 25 bp, Saccharomyces pastorianus
aagcaagagagaagccgatgctgaa

SEQ ID NO: 34228 - DNA, 25 bp, Saccharomyces pastorianus
agaaggtgtttcattaagcaagaga

SEQ ID NO: 34229 - DNA, 25 bp, Saccharomyces pastorianus
tgacgttgctgttttgccatttgca

SEQ ID NO: 34230 - DNA, 25 bp, Saccharomyces pastorianus
actactatttcaaaccttgctgcca

SEQ ID NO: 34231 - DNA, 25 bp, Saccharomyces pastorianus
gagggtgattctgacgttgctgttt

SEQ ID NO: 34232 - DNA, 25 bp, Saccharomyces pastorianus
ggtttactgttcataaatactacta

SEQ ID NO: 34233 - DNA, 25 bp, Saccharomyces pastorianus
gcaccaacactggtttactgttcat

SEQ ID NO: 34234 - DNA, 25 bp, Saccharomyces pastorianus
aacagccggcacttacagcagctaa

SEQ ID NO: 34235 - DNA, 25 bp, Saccharomyces pastorianus
ttgtcggcaggtcctcaacagccgg

SEQ ID NO: 34236 - DNA, 25 bp, Saccharomyces pastorianus
gaaaaggacgagtgtacatctactg

SEQ ID NO: 34237 - DNA, 25 bp, Saccharomyces pastorianus
aatatgccaagggtgctatcgcact

SEQ ID NO: 34238 - DNA, 25 bp, Saccharomyces pastorianus
ggtgctatcgcacttgaaactgtct

SEQ ID NO: 34239 - DNA, 25 bp, Saccharomyces pastorianus
agacgctccgccttaatatgccaag

SEQ ID NO: 34240 - DNA, 25 bp, Saccharomyces pastorianus
gtagcgactgctacctggtaagaag

SEQ ID NO: 34241 - DNA, 25 bp, Saccharomyces pastorianus
gggctttaaagtcagaacctctatc

SEQ ID NO: 34242 - DNA, 25 bp, Saccharomyces pastorianus
gcagctaacaggtcgttggtgttca

SEQ ID NO: 34243 - DNA, 25 bp, Saccharomyces pastorianus
ttgaaactgtctcccgcaacggtaa

SEQ ID NO: 34244 - DNA, 25 bp, Saccharomyces pastorianus
caacggtaacgagggcgtacactct

SEQ ID NO: 34245 - DNA, 25 bp, Saccharomyces pastorianus
gttacttctggtgatttggcggaca

SEQ ID NO: 34246 - DNA, 25 bp, Saccharomyces pastorianus
gaatacgtaccgtttaccattgatg

SEQ ID NO: 34247 - DNA, 25 bp, Saccharomyces pastorianus
gtgctgcatattcaacgtcgcgttg

SEQ ID NO: 34248 - DNA, 25 bp, Saccharomyces pastorianus
acgtcgcgttggttgcactgaagaa

SEQ ID NO: 34249 - DNA, 25 bp, Saccharomyces pastorianus
gaagaagctatcaccacgtctgttg

SEQ ID NO: 34250 - DNA, 25 bp, Saccharomyces pastorianus
tctgttgaccaaatcgtacgcgctt

SEQ ID NO: 34251 - DNA, 25 bp, Saccharomyces pastorianus
atcagcttttcgttgtcatttcacc

SEQ ID NO: 34252 - DNA, 25 bp, Saccharomyces pastorianus
gatactgttgtttcgggtcttccca

SEQ ID NO: 34253 - DNA, 25 bp, Saccharomyces pastorianus
tcgattcagctgcatcttcaacaat

SEQ ID NO: 34254 - DNA, 25 bp, Saccharomyces pastorianus
gttgcaagtgcatcagtcgggtatc

SEQ ID NO: 34255 - DNA, 25 bp, Saccharomyces pastorianus
ggcggacacaggttcattggacatc

SEQ ID NO: 34256 - DNA, 25 bp, Saccharomyces pastorianus
taccccatcaagatatctgctgcgt

SEQ ID NO: 34257 - DNA, 25 bp, Saccharomyces pastorianus
ttgtcccgatgaagcactgaatgcg

SEQ ID NO: 34258 - DNA, 25 bp, Saccharomyces pastorianus
gtcggtgtacccaattctagattcg

SEQ ID NO: 34259 - DNA, 25 bp, Saccharomyces pastorianus
aacaaaacgtcttgataccccatca

SEQ ID NO: 34260 - DNA, 25 bp, Saccharomyces pastorianus
gagtcgatgaaatcttccaccattt

SEQ ID NO: 34261 - DNA, 25 bp, Saccharomyces pastorianus
tagcaattctcaatcaaccaccaat

SEQ ID NO: 34262 - DNA, 25 bp, Saccharomyces pastorianus
aaggtttgattttgatgcctccaga

SEQ ID NO: 34263 - DNA, 25 bp, Saccharomyces pastorianus
gatcgtttcaagttcacaccatgcg

SEQ ID NO: 34264 - DNA, 25 bp, Saccharomyces pastorianus
tgcagagcgtgtcggtgtacccaat

SEQ ID NO: 34265 - DNA, 25 bp, Saccharomyces pastorianus
gggtttgccattccgtttgcagagc

SEQ ID NO: 34266 - DNA, 25 bp, Saccharomyces pastorianus
atgcctccagaggtgggtttgccat

SEQ ID NO: 34267 - DNA, 25 bp, Saccharomyces pastorianus
atcacaacacattgtctgctgccaa

SEQ ID NO: 34268 - DNA, 25 bp, Saccharomyces pastorianus
gataacgcgaacaataccccaatgg

SEQ ID NO: 34269 - DNA, 25 bp, Saccharomyces pastorianus
aactcaattcccagtgataacgcga

SEQ ID NO: 34270 - DNA, 25 bp, Saccharomyces pastorianus
gcgcaaaacgcctcgatatatcaca

SEQ ID NO: 34271 - DNA, 25 bp, Saccharomyces pastorianus
ttgtccaagagattcgctcatgccc

SEQ ID NO: 34272 - DNA, 25 bp, Saccharomyces pastorianus
gggctcaccaaaattcaactgtcca

SEQ ID NO: 34273 - DNA, 25 bp, Saccharomyces pastorianus
ggagcccgaacacgtcttggagaat

SEQ ID NO: 34274 - DNA, 25 bp, Saccharomyces pastorianus
cgaactgctctaccgattatgaatt

SEQ ID NO: 34275 - DNA, 25 bp, Saccharomyces pastorianus
tacctcgcaattcctacctgagagt

SEQ ID NO: 34276 - DNA, 25 bp, Saccharomyces pastorianus
aagccttgctataagtcagctccaa

SEQ ID NO: 34277 - DNA, 25 bp, Saccharomyces pastorianus
gacaaagaggccgattccagagttt

SEQ ID NO: 34278 - DNA, 25 bp, Saccharomyces pastorianus
aaagagtgtcccgataccgtgaact

SEQ ID NO: 34279 - DNA, 25 bp, Saccharomyces pastorianus
tacaagaacgttatcctcggtccca

SEQ ID NO: 34280 - DNA, 25 bp, Saccharomyces pastorianus
gccatcaaagactgggtttccgtac

SEQ ID NO: 34281 - DNA, 25 bp, Saccharomyces pastorianus
gaactacttactgtcccggattggt

SEQ ID NO: 34282 - DNA, 25 bp, Saccharomyces pastorianus
cttcgctcatggacttttcctgaaa

SEQ ID NO: 34283 - DNA, 25 bp, Saccharomyces pastorianus
gtattttcaggtacggcgctatgga

SEQ ID NO: 34284 - DNA, 25 bp, Saccharomyces pastorianus
gtagcagcacttctatagagcccac

SEQ ID NO: 34285 - DNA, 25 bp, Saccharomyces pastorianus
acacagctcgttatttccttgggaa

SEQ ID NO: 34286 - DNA, 25 bp, Saccharomyces pastorianus
attggtatcacccagtgcttggaga

SEQ ID NO: 34287 - DNA, 25 bp, Saccharomyces pastorianus
tagagcccaccatcatagccattaa

SEQ ID NO: 34288 - DNA, 25 bp, Saccharomyces pastorianus
aacgccttaggcacgatgttgcaga

SEQ ID NO: 34289 - DNA, 25 bp, Saccharomyces pastorianus
cagatttggttattccatggcctaa

SEQ ID NO: 34290 - DNA, 25 bp, Saccharomyces pastorianus
ccgttcccaagcagttttggctaga

SEQ ID NO: 34291 - DNA, 25 bp, Saccharomyces pastorianus
aagggtgccattctgagtattcgta

SEQ ID NO: 34292 - DNA, 25 bp, Saccharomyces pastorianus
tggaccaaccaagacagttcccgtt

SEQ ID NO: 34293 - DNA, 25 bp, Saccharomyces pastorianus
gattagttgctgatttcgacgatga

SEQ ID NO: 34294 - DNA, 25 bp, Saccharomyces pastorianus
taaaccggatccactcgatgtgaaa

SEQ ID NO: 34295 - DNA, 25 bp, Saccharomyces pastorianus
gtgaaaacggatctggccaccgatc

SEQ ID NO: 34296 - DNA, 25 bp, Saccharomyces pastorianus
aaaccttctgggtagattccatagt

SEQ ID NO: 34297 - DNA, 25 bp, Saccharomyces pastorianus
atatagctaaactggtggcacctca

SEQ ID NO: 34298 - DNA, 25 bp, Saccharomyces pastorianus
gtattcgtaatcctcactccaaata

SEQ ID NO: 34299 - DNA, 25 bp, Saccharomyces pastorianus
tcccacatgattacagtcccagtat

SEQ ID NO: 34300 - DNA, 25 bp, Saccharomyces pastorianus
ttcttcccaaggacgttgtccaagt

SEQ ID NO: 34301 - DNA, 25 bp, Saccharomyces pastorianus
aaacgattccagcaaacccagcgag

SEQ ID NO: 34302 - DNA, 25 bp, Saccharomyces pastorianus
tgaaaacgagcgaggacccaacggg

SEQ ID NO: 34303 - DNA, 25 bp, Saccharomyces pastorianus
atattatcaacgactgggaccagcc

SEQ ID NO: 34304 - DNA, 25 bp, Saccharomyces pastorianus
tggtggccggtaacttcttcccaag

SEQ ID NO: 34305 - DNA, 25 bp, Saccharomyces pastorianus
cagcggaccatacacgaactttgca

SEQ ID NO: 34306 - DNA, 25 bp, Saccharomyces pastorianus
gttgtccaagttcaatggtcacgat

SEQ ID NO: 34307 - DNA, 25 bp, Saccharomyces pastorianus
gggtccgcagggtctaacacaaacg

SEQ ID NO: 34308 - DNA, 25 bp, Saccharomyces pastorianus
cgtggaaggcagttctacgggccca

SEQ ID NO: 34309 - DNA, 25 bp, Saccharomyces pastorianus
tgacggacctgaccacggagcagat

SEQ ID NO: 34310 - DNA, 25 bp, Saccharomyces pastorianus
gagtggcaggagcatttcgaaaaca

SEQ ID NO: 34311 - DNA, 25 bp, Saccharomyces pastorianus
tgggaacgcattcggcatatggcaa

SEQ ID NO: 34312 - DNA, 25 bp, Saccharomyces pastorianus
gtgtttcaaacactctacattctgt

SEQ ID NO: 34313 - DNA, 25 bp, Saccharomyces pastorianus
cattcttgcaatcccaatgtgacta

SEQ ID NO: 34314 - DNA, 25 bp, Saccharomyces pastorianus
tttgaaacacatggaccctcagtct

SEQ ID NO: 34315 - DNA, 25 bp, Saccharomyces pastorianus
atactgggtattcccagaggcctct

SEQ ID NO: 34316 - DNA, 25 bp, Saccharomyces pastorianus
gatttcctgtcttgttacatttcca

SEQ ID NO: 34317 - DNA, 25 bp, Saccharomyces pastorianus
cgaactttcaatatgctgcaatcca

SEQ ID NO: 34318 - DNA, 25 bp, Saccharomyces pastorianus
tattccggagtgttggccgtaccaa

SEQ ID NO: 34319 - DNA, 25 bp, Saccharomyces pastorianus
gaccctcagtctataacgcaacgaa

SEQ ID NO: 34320 - DNA, 25 bp, Saccharomyces pastorianus
gcgtcggaagtttttggctgaaagc

SEQ ID NO: 34321 - DNA, 25 bp, Saccharomyces pastorianus
aggcctcttacttcaatcattcttg

SEQ ID NO: 34322 - DNA, 25 bp, Saccharomyces pastorianus
aatgcagccactcagtatgttacaa

SEQ ID NO: 34323 - DNA, 25 bp, Saccharomyces pastorianus
tacatctgaatataccaccacctat

SEQ ID NO: 34324 - DNA, 25 bp, Saccharomyces pastorianus
ttttaccattactctgtcctcggag

SEQ ID NO: 34325 - DNA, 25 bp, Saccharomyces pastorianus
cagcctctgatatcggtgctttaga

SEQ ID NO: 34326 - DNA, 25 bp, Saccharomyces pastorianus
atacagcgatgagacgaccaccttc

SEQ ID NO: 34327 - DNA, 25 bp, Saccharomyces pastorianus
actaactcgggtagcacgtacactt

SEQ ID NO: 34328 - DNA, 25 bp, Saccharomyces pastorianus
gaatccgttttcactagcgtcacag

SEQ ID NO: 34329 - DNA, 25 bp, Saccharomyces pastorianus
tatttcgacacagacaccacttaca

SEQ ID NO: 34330 - DNA, 25 bp, Saccharomyces pastorianus
gaaattgcgtctaccatcactaact

SEQ ID NO: 34331 - DNA, 25 bp, Saccharomyces pastorianus
tagtcactactactgcagaacctgt

SEQ ID NO: 34332 - DNA, 25 bp, Saccharomyces pastorianus
tacacatctactataacttccgctt

SEQ ID NO: 34333 - DNA, 25 bp, Saccharomyces pastorianus
aacagctggtcattttcattctcgg

SEQ ID NO: 34334 - DNA, 25 bp, Saccharomyces pastorianus
cgcgatgacgaatttcccgatctat

SEQ ID NO: 34335 - DNA, 25 bp, Saccharomyces pastorianus
gaacgcctttattttctgcatttgt

SEQ ID NO: 34336 - DNA, 25 bp, Saccharomyces pastorianus
ccaatgcgactggtatttcctgaat

SEQ ID NO: 34337 - DNA, 25 bp, Saccharomyces pastorianus
ggcctattggtttgcggatctgatc

SEQ ID NO: 34338 - DNA, 25 bp, Saccharomyces pastorianus
atttttactggccaccggtagtgat

SEQ ID NO: 34339 - DNA, 25 bp, Saccharomyces pastorianus
ttttggtgatgtttgtcttccccat

SEQ ID NO: 34340 - DNA, 25 bp, Saccharomyces pastorianus
atttgctcttagataccactctcgg

SEQ ID NO: 34341 - DNA, 25 bp, Saccharomyces pastorianus
gatccccattctttggttatcctta

SEQ ID NO: 34342 - DNA, 25 bp, Saccharomyces pastorianus
aagaatcaccctagaacgcctttat

SEQ ID NO: 34343 - DNA, 25 bp, Saccharomyces pastorianus
ttccccattttgctgaattgctttc

SEQ ID NO: 34344 - DNA, 25 bp, Saccharomyces pastorianus
atagataagggagttctggcctctt

SEQ ID NO: 34345 - DNA, 25 bp, Saccharomyces pastorianus
gttgaaaaggctgctcaagctttga

SEQ ID NO: 34346 - DNA, 25 bp, Saccharomyces pastorianus
attgacaccgttaaagctgctgcta

SEQ ID NO: 34347 - DNA, 25 bp, Saccharomyces pastorianus
gagctatgccatttatttctttgtt

SEQ ID NO: 34348 - DNA, 25 bp, Saccharomyces pastorianus
aagatcagagagtacgtcgaaccca

SEQ ID NO: 34349 - DNA, 25 bp, Saccharomyces pastorianus
catatggcgctaagaccggtaagga

SEQ ID NO: 34350 - DNA, 25 bp, Saccharomyces pastorianus
gaaagcccagaacatgtctttgaaa

SEQ ID NO: 34351 - DNA, 25 bp, Saccharomyces pastorianus
gcaacgtttagttagtgaaagccca

SEQ ID NO: 34352 - DNA, 25 bp, Saccharomyces pastorianus
aaatttccacgtgcttccaagccaa

SEQ ID NO: 34353 - DNA, 25 bp, Saccharomyces pastorianus
gaatctttcccagaatggcaatcac

SEQ ID NO: 34354 - DNA, 25 bp, Saccharomyces pastorianus
gaagttgatgcatccaggccagtta

SEQ ID NO: 34355 - DNA, 25 bp, Saccharomyces pastorianus
gtttgccatgaagctagacgattta

SEQ ID NO: 34356 - DNA, 25 bp, Saccharomyces pastorianus
ttctggatacagacccatatttatt

SEQ ID NO: 34357 - DNA, 25 bp, Saccharomyces pastorianus
aatgaacctctgtccccatggatat

SEQ ID NO: 34358 - DNA, 25 bp, Saccharomyces pastorianus
aagtacattgtacgagtttgccatg

SEQ ID NO: 34359 - DNA, 25 bp, Saccharomyces pastorianus
atccacctcacacctaaagcatagt

SEQ ID NO: 34360 - DNA, 25 bp, Saccharomyces pastorianus
gaacatacctagtgagctgctgaaa

SEQ ID NO: 34361 - DNA, 25 bp, Saccharomyces pastorianus
gaactaacgagtgtagctgctaaag

SEQ ID NO: 34362 - DNA, 25 bp, Saccharomyces pastorianus
gagcacgaatgcaatacaccactta

SEQ ID NO: 34363 - DNA, 25 bp, Saccharomyces pastorianus
aaaaggcggcgtatcatcgccaatc

SEQ ID NO: 34364 - DNA, 25 bp, Saccharomyces pastorianus
agattctaccaatataagggcttca

SEQ ID NO: 34365 - DNA, 25 bp, Saccharomyces pastorianus
aatttgaaacctttccatccacctg

SEQ ID NO: 34366 - DNA, 25 bp, Saccharomyces pastorianus
tttgccaagcaattcccttatgttt

SEQ ID NO: 34367 - DNA, 25 bp, Saccharomyces pastorianus
gattgtgtatttggatcgccgccct

SEQ ID NO: 34368 - DNA, 25 bp, Saccharomyces pastorianus
gtttttgccaaggaattcagactta

SEQ ID NO: 34369 - DNA, 25 bp, Saccharomyces pastorianus
aaatcctgggcccatttgccaagtg

SEQ ID NO: 34370 - DNA, 25 bp, Saccharomyces pastorianus
gggaggcccagagtacttaagaagt

SEQ ID NO: 34371 - DNA, 25 bp, Saccharomyces pastorianus
ggagtgcttctttaattacgaacct

SEQ ID NO: 34372 - DNA, 25 bp, Saccharomyces pastorianus
catcgaacacatatattgcactgcg

SEQ ID NO: 34373 - DNA, 25 bp, Saccharomyces pastorianus
tagagcttcatttgaaacccatggg

SEQ ID NO: 34374 - DNA, 25 bp, Saccharomyces pastorianus
gacttaggacagctttctcgagcca

SEQ ID NO: 34375 - DNA, 25 bp, Saccharomyces pastorianus
agtgacgtttatgatctagagcttc

SEQ ID NO: 34376 - DNA, 25 bp, Saccharomyces pastorianus
caacggagtagagctgtgttctgaa

SEQ ID NO: 34377 - DNA, 25 bp, Saccharomyces pastorianus
atttcacctgaattggctattgtcg

SEQ ID NO: 34378 - DNA, 25 bp, Saccharomyces pastorianus
cactcgccctacttgtttttgaatg

SEQ ID NO: 34379 - DNA, 25 bp, Saccharomyces pastorianus
gaaattcgaccccaaagtgagcttt

SEQ ID NO: 34380 - DNA, 25 bp, Saccharomyces pastorianus
tcagttttaaagtccgaagcccgcg

SEQ ID NO: 34381 - DNA, 25 bp, Saccharomyces pastorianus
catagaccccagtacttccttggaa

SEQ ID NO: 34382 - DNA, 25 bp, Saccharomyces pastorianus
tgacatcataaatacctcgccagct

SEQ ID NO: 34383 - DNA, 25 bp, Saccharomyces pastorianus
gccagctgtgctatttattatgtca

SEQ ID NO: 34384 - DNA, 25 bp, Saccharomyces pastorianus
gaagtcgaggtcgatatcccggcat

SEQ ID NO: 34385 - DNA, 25 bp, Saccharomyces pastorianus
tacaacatcgtctttatccacagca

SEQ ID NO: 34386 - DNA, 25 bp, Saccharomyces pastorianus
catcctcatcctctattatcttgaa

SEQ ID NO: 34387 - DNA, 25 bp, Saccharomyces pastorianus
ggcatccgcatttgagtctacaaca

SEQ ID NO: 34388 - DNA, 25 bp, Saccharomyces pastorianus
atctccgtcgataaagttgttccac

SEQ ID NO: 34389 - DNA, 25 bp, Saccharomyces pastorianus
aggtttaggctacgacactatctcc

SEQ ID NO: 34390 - DNA, 25 bp, Saccharomyces pastorianus
atggtgctgccattgacactggtac

SEQ ID NO: 34391 - DNA, 25 bp, Saccharomyces pastorianus
gatttcccagaaccagtcggtccat

SEQ ID NO: 34392 - DNA, 25 bp, Saccharomyces pastorianus
aagggcgacgtcacttggttgccag

SEQ ID NO: 34393 - DNA, 25 bp, Saccharomyces pastorianus
ttgccagttcgtcgtaaggcctact

SEQ ID NO: 34394 - DNA, 25 bp, Saccharomyces pastorianus
cggtccattggccatcattggtgat

SEQ ID NO: 34395 - DNA, 25 bp, Saccharomyces pastorianus
tggccaatacgctcttgactgtaac

SEQ ID NO: 34396 - DNA, 25 bp, Saccharomyces pastorianus
cttcttgcgcaaatactactccatt

SEQ ID NO: 34397 - DNA, 25 bp, Saccharomyces pastorianus
gacggcttacctgatttgactttca

SEQ ID NO: 34398 - DNA, 25 bp, Saccharomyces pastorianus
gttcgctttttacttgggtgacact

SEQ ID NO: 34399 - DNA, 25 bp, Saccharomyces pastorianus
gaggctaacccaaatgatggctgct

SEQ ID NO: 34400 - DNA, 25 bp, Saccharomyces pastorianus
aaagtatgcatgaatctccggccca

SEQ ID NO: 34401 - DNA, 25 bp, Saccharomyces pastorianus
tccggcccaaggtttggacgacatt

SEQ ID NO: 34402 - DNA, 25 bp, Saccharomyces pastorianus
gacatttggtactgtcacacgggta

SEQ ID NO: 34403 - DNA, 25 bp, Saccharomyces pastorianus
acactcggtaagtttgtcgcagtca

SEQ ID NO: 34404 - DNA, 25 bp, Saccharomyces pastorianus
gatactacaggtctattcaacgatg

SEQ ID NO: 34405 - DNA, 25 bp, Saccharomyces pastorianus
taagtcacaaattggcgtcgtagcc

SEQ ID NO: 34406 - DNA, 25 bp, Saccharomyces pastorianus
gcttcttcaccaatggcggctaata

SEQ ID NO: 34407 - DNA, 25 bp, Saccharomyces pastorianus
gatggctgctcaacgtgcaaatcaa

SEQ ID NO: 34408 - DNA, 25 bp, Saccharomyces pastorianus
gcaacaactcagtcttaagcgattt

SEQ ID NO: 34409 - DNA, 25 bp, Saccharomyces pastorianus
gacaacaggctatctcgtgtgcatt

SEQ ID NO: 34410 - DNA, 25 bp, Saccharomyces pastorianus
ttattcggcgccttccaattgacca

SEQ ID NO: 34411 - DNA, 25 bp, Saccharomyces pastorianus
gtacgaagccgaagtcctcagcaaa

SEQ ID NO: 34412 - DNA, 25 bp, Saccharomyces pastorianus
attgaccacccataagcacctaaaa

SEQ ID NO: 34413 - DNA, 25 bp, Saccharomyces pastorianus
tttttaccctgtcctgaaggcgtat

SEQ ID NO: 34414 - DNA, 25 bp, Saccharomyces pastorianus
aagtcaagtcatctgcctctttgag

SEQ ID NO: 34415 - DNA, 25 bp, Saccharomyces pastorianus
aagtactggttggaacccgcaggct

SEQ ID NO: 34416 - DNA, 25 bp, Saccharomyces pastorianus
aggcgtatctctaccaagaggccat

SEQ ID NO: 34417 - DNA, 25 bp, Saccharomyces pastorianus
gatgattatcacttcttaccgtttt

SEQ ID NO: 34418 - DNA, 25 bp, Saccharomyces pastorianus
attgaaggtcatgcccatagtactt

SEQ ID NO: 34419 - DNA, 25 bp, Saccharomyces pastorianus
gtatctgtattttggttgcatcgca

SEQ ID NO: 34420 - DNA, 25 bp, Saccharomyces pastorianus
atcatgcagcatttctatttcagta

SEQ ID NO: 34421 - DNA, 25 bp, Saccharomyces pastorianus
agggtacctgtcataacgctcgtgg

SEQ ID NO: 34422 - DNA, 25 bp, Saccharomyces pastorianus
agttttcaatggcatcggcgtgcac

SEQ ID NO: 34423 - DNA, 25 bp, Saccharomyces pastorianus
ggtggaatgtgctccagtggaccct

SEQ ID NO: 34424 - DNA, 25 bp, Saccharomyces pastorianus
agacgatgtcttatttgctggtgga

SEQ ID NO: 34425 - DNA, 25 bp, Saccharomyces pastorianus
gtggaccctcaaatagtaagctcat

SEQ ID NO: 34426 - DNA, 25 bp, Saccharomyces pastorianus
tcatcaactgatgctacggtgagat

SEQ ID NO: 34427 - DNA, 25 bp, Saccharomyces pastorianus
gttttatgactacaaatctgggcac

SEQ ID NO: 34428 - DNA, 25 bp, Saccharomyces pastorianus
aggcgttctgtgcagtactttcgat

SEQ ID NO: 34429 - DNA, 25 bp, Saccharomyces pastorianus
cggcgtgcaccgatgatattaggtc

SEQ ID NO: 34430 - DNA, 25 bp, Saccharomyces pastorianus
tgggcacaagtaccaatctttggct

SEQ ID NO: 34431 - DNA, 25 bp, Saccharomyces pastorianus
gagagctatcgcgttacatccaaag

SEQ ID NO: 34432 - DNA, 25 bp, Saccharomyces pastorianus
gacgaattcttcgatagagggttca

SEQ ID NO: 34433 - DNA, 25 bp, Saccharomyces pastorianus
tgttccacaagccattatacgtagt

SEQ ID NO: 34434 - DNA, 25 bp, Saccharomyces pastorianus
aataacatattctgcattcctcaaa

SEQ ID NO: 34435 - DNA, 25 bp, Saccharomyces pastorianus
ttatctatccaatgtcttcggacga

SEQ ID NO: 34436 - DNA, 25 bp, Saccharomyces pastorianus
cagaggccgacgttgatcaaatatc

SEQ ID NO: 34437 - DNA, 25 bp, Saccharomyces pastorianus
ggcacagacgaagcaattctatcaa

SEQ ID NO: 34438 - DNA, 25 bp, Saccharomyces pastorianus
tttatttccatctcacagaggccga

SEQ ID NO: 34439 - DNA, 25 bp, Saccharomyces pastorianus
gactatttgtttaaccttctgaaga

SEQ ID NO: 34440 - DNA, 25 bp, Saccharomyces pastorianus
gcagaggtgagactagactatcttt

SEQ ID NO: 34441 - DNA, 25 bp, Saccharomyces pastorianus
gggcggcaccttgagggaccaaatt

SEQ ID NO: 34442 - DNA, 25 bp, Saccharomyces pastorianus
tctactatccatcccttcagaaaat

SEQ ID NO: 34443 - DNA, 25 bp, Saccharomyces pastorianus
ggaaacttgctatacgataccgtta

SEQ ID NO: 34444 - DNA, 25 bp, Saccharomyces pastorianus
gattgaatcaagagtaccggttaag

SEQ ID NO: 34445 - DNA, 25 bp, Saccharomyces pastorianus
aactgttattgattctgaggagacc

SEQ ID NO: 34446 - DNA, 25 bp, Saccharomyces pastorianus
aattctctgatgaactatctgattc

SEQ ID NO: 34447 - DNA, 25 bp, Saccharomyces pastorianus
ggaaaacttctgtcgtagagcctaa

SEQ ID NO: 34448 - DNA, 25 bp, Saccharomyces pastorianus
agaggaggaatcttcctctgacgaa

SEQ ID NO: 34449 - DNA, 25 bp, Saccharomyces pastorianus
gagcctaaaaatgccaacaaggtta

SEQ ID NO: 34450 - DNA, 25 bp, Saccharomyces pastorianus
cgagcaaagcggtagttctgatgat

SEQ ID NO: 34451 - DNA, 25 bp, Saccharomyces pastorianus
gagacctgaaggaaacttgctatac

SEQ ID NO: 34452 - DNA, 25 bp, Saccharomyces pastorianus
aattaggcaccaagtattctgttat

SEQ ID NO: 34453 - DNA, 25 bp, Saccharomyces pastorianus
gacagagtcgccttagaattgtata

SEQ ID NO: 34454 - DNA, 25 bp, Saccharomyces pastorianus
gtacgatgtggctggtgctatcaaa

SEQ ID NO: 34455 - DNA, 25 bp, Saccharomyces pastorianus
gcttgcttctgctttgaatttatca

SEQ ID NO: 34456 - DNA, 25 bp, Saccharomyces pastorianus
ggaagatatctcgtccattcattgg

SEQ ID NO: 34457 - DNA, 25 bp, Saccharomyces pastorianus
gaggaaggtgcattcgtacctgaaa

SEQ ID NO: 34458 - DNA, 25 bp, Saccharomyces pastorianus
gatgctgctagaattcctgctgaac

SEQ ID NO: 34459 - DNA, 25 bp, Saccharomyces pastorianus
tgaagaccagcatcctctagaaagt

SEQ ID NO: 34460 - DNA, 25 bp, Saccharomyces pastorianus
gtctggctcttcgaagatcaccaag

SEQ ID NO: 34461 - DNA, 25 bp, Saccharomyces pastorianus
caagtggtactttagttggcgacaa

SEQ ID NO: 34462 - DNA, 25 bp, Saccharomyces pastorianus
atgacactttctctaagcttgcttc

SEQ ID NO: 34463 - DNA, 25 bp, Saccharomyces pastorianus
ggcgttgtacacgatatctgggcaa

SEQ ID NO: 34464 - DNA, 25 bp, Saccharomyces pastorianus
gatttcgactactctgtaacacctg

SEQ ID NO: 34465 - DNA, 25 bp, Saccharomyces pastorianus
attcggtcaagctgattttatcaac

SEQ ID NO: 34466 - DNA, 25 bp, Saccharomyces pastorianus
gaatatttgtggctattactctaca

SEQ ID NO: 34467 - DNA, 25 bp, Saccharomyces pastorianus
ggacgaggaaagcactacaatccgt

SEQ ID NO: 34468 - DNA, 25 bp, Saccharomyces pastorianus
agagaaaacgctcccattattcaaa

SEQ ID NO: 34469 - DNA, 25 bp, Saccharomyces pastorianus
gacaccttgcgctgtagaagaattt

SEQ ID NO: 34470 - DNA, 25 bp, Saccharomyces pastorianus
acaggcattcagactgggtgtctac

SEQ ID NO: 34471 - DNA, 25 bp, Saccharomyces pastorianus
ggttacagcatctcatacaggcaag

SEQ ID NO: 34472 - DNA, 25 bp, Saccharomyces pastorianus
agacgatgacatcgcggccaatatg

SEQ ID NO: 34473 - DNA, 25 bp, Saccharomyces pastorianus
caacgtgtacactgaaattcgcaag

SEQ ID NO: 34474 - DNA, 25 bp, Saccharomyces pastorianus
tacatatgaacagacaccttgcgct

SEQ ID NO: 34475 - DNA, 25 bp, Saccharomyces pastorianus
aacgatcttcgggaacttcaagaga

SEQ ID NO: 34476 - DNA, 25 bp, Saccharomyces pastorianus
ggatgaccctggacgacgctgcgaa

SEQ ID NO: 34477 - DNA, 25 bp, Saccharomyces pastorianus
aagacatttggttgtggctccgcca

SEQ ID NO: 34478 - DNA, 25 bp, Saccharomyces pastorianus
gtcctcttcttacatgactgagctc

SEQ ID NO: 34479 - DNA, 25 bp, Saccharomyces pastorianus
cgtgatggctgcgagacccgtgaac

SEQ ID NO: 34480 - DNA, 25 bp, Saccharomyces pastorianus
aattgcccaatgtcggcacaggctt

SEQ ID NO: 34481 - DNA, 25 bp, Saccharomyces pastorianus
ccgggttgttaagggcgtccagcat

SEQ ID NO: 34482 - DNA, 25 bp, Saccharomyces pastorianus
aagtgaacgactccacgggtgttat

SEQ ID NO: 34483 - DNA, 25 bp, Saccharomyces pastorianus
ctgagctcgttcaagggatgaccct

SEQ ID NO: 34484 - DNA, 25 bp, Saccharomyces pastorianus
taaccagactagcaaggcctgccgt

SEQ ID NO: 34485 - DNA, 25 bp, Saccharomyces pastorianus
aagactgtaccatcccaaggtcatt

SEQ ID NO: 34486 - DNA, 25 bp, Saccharomyces pastorianus
gttgcactgctccatgttggcggaa

SEQ ID NO: 34487 - DNA, 25 bp, Saccharomyces pastorianus
tttgatctgcagtctcatcacgtcg

SEQ ID NO: 34488 - DNA, 25 bp, Saccharomyces pastorianus
ataacacccgtggagtcgttcactt

SEQ ID NO: 34489 - DNA, 25 bp, Saccharomyces pastorianus
agtcgttcactttgatctgcagtct

SEQ ID NO: 34490 - DNA, 25 bp, Saccharomyces pastorianus
tgtgccgacattgggcaatttcttg

SEQ ID NO: 34491 - DNA, 25 bp, Saccharomyces pastorianus
tcttgaacttgacgtcctcaataac

SEQ ID NO: 34492 - DNA, 25 bp, Saccharomyces pastorianus
gcggagccacaaccaaatgtcttga

SEQ ID NO: 34493 - DNA, 25 bp, Saccharomyces pastorianus
acccactaagcctgtgccgacattg

SEQ ID NO: 34494 - DNA, 25 bp, Saccharomyces pastorianus
tgacgtcctcaataacacccgtgga

SEQ ID NO: 34495 - DNA, 25 bp, Saccharomyces pastorianus
gccacaaccaaatgtcttgaacttg

SEQ ID NO: 34496 - DNA, 25 bp, Saccharomyces pastorianus
taagcctgtgccgacattgggcaat

SEQ ID NO: 34497 - DNA, 25 bp, Saccharomyces pastorianus
gttcactttgatctgcagtctcatc

SEQ ID NO: 34498 - DNA, 25 bp, Saccharomyces pastorianus
ttaacagccgcagatccatctacag

SEQ ID NO: 34499 - DNA, 25 bp, Saccharomyces pastorianus
gagtatgcccgcttgtctgtgcaga

SEQ ID NO: 34500 - DNA, 25 bp, Saccharomyces pastorianus
ggatccgtaaacgaccatgctgttt

SEQ ID NO: 34501 - DNA, 25 bp, Saccharomyces pastorianus
ggaccattgcgcgttcgttaaagga

SEQ ID NO: 34502 - DNA, 25 bp, Saccharomyces pastorianus
ggccgtcctgacaagttgtagtcta

SEQ ID NO: 34503 - DNA, 25 bp, Saccharomyces pastorianus
atcagaccagcgttcaggaccattg

SEQ ID NO: 34504 - DNA, 25 bp, Saccharomyces pastorianus
aaagagtttgcctccttggtcgatt

SEQ ID NO: 34505 - DNA, 25 bp, Saccharomyces pastorianus
tgctgtttcagcttcaccatcagaa

SEQ ID NO: 34506 - DNA, 25 bp, Saccharomyces pastorianus
ttgtacggtggacgatctacgcgat

SEQ ID NO: 34507 - DNA, 25 bp, Saccharomyces pastorianus
aagcaacggattctgaaacccctgt

SEQ ID NO: 34508 - DNA, 25 bp, Saccharomyces pastorianus
atatgggtccattgcgttcgataag

SEQ ID NO: 34509 - DNA, 25 bp, Saccharomyces pastorianus
tagaatctttggtgctctaaagggt

SEQ ID NO: 34510 - DNA, 25 bp, Saccharomyces pastorianus
caaaccaagttgtccagagaagaaa

SEQ ID NO: 34511 - DNA, 25 bp, Saccharomyces pastorianus
ggaacaatacgctgccgaatctaag

SEQ ID NO: 34512 - DNA, 25 bp, Saccharomyces pastorianus
agaagaaagagttgctcgtgttgct

SEQ ID NO: 34513 - DNA, 25 bp, Saccharomyces pastorianus
ctcatggtttgactaactgggctgc

SEQ ID NO: 34514 - DNA, 25 bp, Saccharomyces pastorianus
ggctgacgacattgatgccgactct

SEQ ID NO: 34515 - DNA, 25 bp, Saccharomyces pastorianus
atacgctgccgaatctaagaagtac

SEQ ID NO: 34516 - DNA, 25 bp, Saccharomyces pastorianus
attcaccaaggaacaatacgctgcc

SEQ ID NO: 34517 - DNA, 25 bp, Saccharomyces pastorianus
caagggttacttggctgacgacatt

SEQ ID NO: 34518 - DNA, 25 bp, Saccharomyces pastorianus
aaagaaccaccaccggtgctagaat

SEQ ID NO: 34519 - DNA, 25 bp, Saccharomyces pastorianus
ccggtgctagaatctttggtgctct

SEQ ID NO: 34520 - DNA, 25 bp, Saccharomyces pastorianus
gtcatctactactattggtcctttt

SEQ ID NO: 34521 - DNA, 25 bp, Saccharomyces pastorianus
tacgataacgggagctccttcttga

SEQ ID NO: 34522 - DNA, 25 bp, Saccharomyces pastorianus
gggtggtgactcagttgtgtacttt

SEQ ID NO: 34523 - DNA, 25 bp, Saccharomyces pastorianus
gcttctattactccgcattcgaatg

SEQ ID NO: 34524 - DNA, 25 bp, Saccharomyces pastorianus
aaccacggtggagtcatctactact

SEQ ID NO: 34525 - DNA, 25 bp, Saccharomyces pastorianus
tggtccttttaaaacgtctcactct

SEQ ID NO: 34526 - DNA, 25 bp, Saccharomyces pastorianus
aacaggctttggaacagttggcaac

SEQ ID NO: 34527 - DNA, 25 bp, Saccharomyces pastorianus
tactgatttgcctgaaacccttgag

SEQ ID NO: 34528 - DNA, 25 bp, Saccharomyces pastorianus
tgaaggcgaaatccgacatgctatt

SEQ ID NO: 34529 - DNA, 25 bp, Saccharomyces pastorianus
atattacgaactcaaccacggtgga

SEQ ID NO: 34530 - DNA, 25 bp, Saccharomyces pastorianus
gtactttgatgaggacccggttgtg

SEQ ID NO: 34531 - DNA, 25 bp, Saccharomyces pastorianus
actcaatgacggcaagggctccagc

SEQ ID NO: 34532 - DNA, 25 bp, Saccharomyces pastorianus
agagcatgcctcaactcaatgacgg

SEQ ID NO: 34533 - DNA, 25 bp, Saccharomyces pastorianus
ttccccttcttcattgagctacaaa

SEQ ID NO: 34534 - DNA, 25 bp, Saccharomyces pastorianus
tccagccgtatcgtcctgaagaagt

SEQ ID NO: 34535 - DNA, 25 bp, Saccharomyces pastorianus
taaagaagaagtcgtcgcctaccgc

SEQ ID NO: 34536 - DNA, 25 bp, Saccharomyces pastorianus
gaaaccagtccaaagcccaaacaat

SEQ ID NO: 34537 - DNA, 25 bp, Saccharomyces pastorianus
gttgggtccacgagcaattttgact

SEQ ID NO: 34538 - DNA, 25 bp, Saccharomyces pastorianus
gagaactacccgatcgttgggtcca

SEQ ID NO: 34539 - DNA, 25 bp, Saccharomyces pastorianus
ggccccgccggagctttgaaattgg

SEQ ID NO: 34540 - DNA, 25 bp, Saccharomyces pastorianus
gaaaccggtgactttgagcagccca

SEQ ID NO: 34541 - DNA, 25 bp, Saccharomyces pastorianus
tgactacctcttcaatagcgctatc

SEQ ID NO: 34542 - DNA, 25 bp, Saccharomyces pastorianus
tcgtcggaaccactgttaacactca

SEQ ID NO: 34543 - DNA, 25 bp, Saccharomyces pastorianus
aatctgcattaggtgtcgtcggaac

SEQ ID NO: 34544 - DNA, 25 bp, Saccharomyces pastorianus
gttaacactcagttatccgatgaag

SEQ ID NO: 34545 - DNA, 25 bp, Saccharomyces pastorianus
aatagctttgacctgtatccatttg

SEQ ID NO: 34546 - DNA, 25 bp, Saccharomyces pastorianus
gtgaacaatactaccgcgactttag

SEQ ID NO: 34547 - DNA, 25 bp, Saccharomyces pastorianus
taacctcgaaggtgtaccaaccaca

SEQ ID NO: 34548 - DNA, 25 bp, Saccharomyces pastorianus
gggtaattttacacaccacgaatat

SEQ ID NO: 34549 - DNA, 25 bp, Saccharomyces pastorianus
gtatccatttgttaacggcgtttat

SEQ ID NO: 34550 - DNA, 25 bp, Saccharomyces pastorianus
gcgactttagcttccaacaatgatg

SEQ ID NO: 34551 - DNA, 25 bp, Saccharomyces pastorianus
gaatcaattgtcatccagaggtaaa

SEQ ID NO: 34552 - DNA, 25 bp, Saccharomyces pastorianus
tagcttcacaagcatgtttgacaat

SEQ ID NO: 34553 - DNA, 25 bp, Saccharomyces pastorianus
tcctccatcgttctccagttatgga

SEQ ID NO: 34554 - DNA, 25 bp, Saccharomyces pastorianus
atctggagcgtattgtacatgatca

SEQ ID NO: 34555 - DNA, 25 bp, Saccharomyces pastorianus
gaagaagaaccagctcacccgtgag

SEQ ID NO: 34556 - DNA, 25 bp, Saccharomyces pastorianus
gtagactgtctcctgtgaataaccc

SEQ ID NO: 34557 - DNA, 25 bp, Saccharomyces pastorianus
agaatgagcccacctttacgtagac

SEQ ID NO: 34558 - DNA, 25 bp, Saccharomyces pastorianus
gagttaatcgatcttcaccaatcca

SEQ ID NO: 34559 - DNA, 25 bp, Saccharomyces pastorianus
atggagcgccttcaaacaacggttc

SEQ ID NO: 34560 - DNA, 25 bp, Saccharomyces pastorianus
aatccgttatgttgaattctgcttc

SEQ ID NO: 34561 - DNA, 25 bp, Saccharomyces pastorianus
gaggagcgagcggttcacagcacaa

SEQ ID NO: 34562 - DNA, 25 bp, Saccharomyces pastorianus
gaacattctaactcattttccgggt

SEQ ID NO: 34563 - DNA, 25 bp, Saccharomyces pastorianus
tgatcaaggctcagtcatcgatgac

SEQ ID NO: 34564 - DNA, 25 bp, Saccharomyces pastorianus
ggctctttgtactccgattttgaaa

SEQ ID NO: 34565 - DNA, 25 bp, Saccharomyces pastorianus
ttctccgttacaaattgccgttttg

SEQ ID NO: 34566 - DNA, 25 bp, Saccharomyces pastorianus
aaactagagctagacgccaactgta

SEQ ID NO: 34567 - DNA, 25 bp, Saccharomyces pastorianus
aagagccattacaaatcctacctcc

SEQ ID NO: 34568 - DNA, 25 bp, Saccharomyces pastorianus
gcaacaatggtaagcctacaggaga

SEQ ID NO: 34569 - DNA, 25 bp, Saccharomyces pastorianus
tagacgccaactgtaaagagccatt

SEQ ID NO: 34570 - DNA, 25 bp, Saccharomyces pastorianus
acctccaacggtagtagatcaaatc

SEQ ID NO: 34571 - DNA, 25 bp, Saccharomyces pastorianus
gacatacgatggctctttgtactcc

SEQ ID NO: 34572 - DNA, 25 bp, Saccharomyces pastorianus
tagaaacacatgctcatcctcaaat

SEQ ID NO: 34573 - DNA, 25 bp, Saccharomyces pastorianus
ttagaagagcactgaccaacggtat

SEQ ID NO: 34574 - DNA, 25 bp, Saccharomyces pastorianus
accaacggtatcactgcggaacaaa

SEQ ID NO: 34575 - DNA, 25 bp, Saccharomyces pastorianus
taacgtggccaatatattagtcgca

SEQ ID NO: 34576 - DNA, 25 bp, Saccharomyces pastorianus
ccggtgttgctacttcattctttaa

SEQ ID NO: 34577 - DNA, 25 bp, Saccharomyces pastorianus
agttgaacgtgagcgcgcattatct

SEQ ID NO: 34578 - DNA, 25 bp, Saccharomyces pastorianus
tattcacggtgatcgtacacaagtt

SEQ ID NO: 34579 - DNA, 25 bp, Saccharomyces pastorianus
tttaacgttgatttttgtcgagaca

SEQ ID NO: 34580 - DNA, 25 bp, Saccharomyces pastorianus
cgcattatctgccttcaaatctaac

SEQ ID NO: 34581 - DNA, 25 bp, Saccharomyces pastorianus
agatattccgaatgtcacccacgtc

SEQ ID NO: 34582 - DNA, 25 bp, Saccharomyces pastorianus
tatgacttgccttctgatattgatg

SEQ ID NO: 34583 - DNA, 25 bp, Saccharomyces pastorianus
gaggcggcggaggtttcttcaataa

SEQ ID NO: 34584 - DNA, 25 bp, Saccharomyces pastorianus
attagtcgcaactgccgtagcggca

SEQ ID NO: 34585 - DNA, 25 bp, Saccharomyces pastorianus
ttcagagccacagctattcacggtg

SEQ ID NO: 34586 - DNA, 25 bp, Saccharomyces pastorianus
taactccgagattataggtacaggc

SEQ ID NO: 34587 - DNA, 25 bp, Saccharomyces pastorianus
tcgcccgcagccatggaaaagcgtt

SEQ ID NO: 34588 - DNA, 25 bp, Saccharomyces pastorianus
ggttctgtttctatgcatgctagac

SEQ ID NO: 34589 - DNA, 25 bp, Saccharomyces pastorianus
tagactactagagccacagaatgac

SEQ ID NO: 34590 - DNA, 25 bp, Saccharomyces pastorianus
gaactgtagtacctggcagagtctt

SEQ ID NO: 34591 - DNA, 25 bp, Saccharomyces pastorianus
aattccttcaattcaatgggcgact

SEQ ID NO: 34592 - DNA, 25 bp, Saccharomyces pastorianus
gaagactttcttgttcgagattttg

SEQ ID NO: 34593 - DNA, 25 bp, Saccharomyces pastorianus
ccattggtgggttcgttgctgatgt

SEQ ID NO: 34594 - DNA, 25 bp, Saccharomyces pastorianus
gtacaggcggtttgtcatacagttt

SEQ ID NO: 34595 - DNA, 25 bp, Saccharomyces pastorianus
tcgccaaatggcgtcattcaaagaa

SEQ ID NO: 34596 - DNA, 25 bp, Saccharomyces pastorianus
gatgtagtctttttccaatctccac

SEQ ID NO: 34597 - DNA, 25 bp, Saccharomyces pastorianus
taatgctatcggtgccggtactaaa

SEQ ID NO: 34598 - DNA, 25 bp, Saccharomyces pastorianus
attagatgatctttctgaagtcgag

SEQ ID NO: 34599 - DNA, 25 bp, Saccharomyces pastorianus
aagggtctattacatcgcgcatttt

SEQ ID NO: 34600 - DNA, 25 bp, Saccharomyces pastorianus
ttgggtatcccagaagacgaaacta

SEQ ID NO: 34601 - DNA, 25 bp, Saccharomyces pastorianus
gttcaatgacccaagttccaaattt

SEQ ID NO: 34602 - DNA, 25 bp, Saccharomyces pastorianus
aaatcacctttcctgatctttggac

SEQ ID NO: 34603 - DNA, 25 bp, Saccharomyces pastorianus
aagagccactgagaaaatcaccttt

SEQ ID NO: 34604 - DNA, 25 bp, Saccharomyces pastorianus
gcgcattttctgttttcattttcaa

SEQ ID NO: 34605 - DNA, 25 bp, Saccharomyces pastorianus
gccggtactaaaaaggtgtgccatt

SEQ ID NO: 34606 - DNA, 25 bp, Saccharomyces pastorianus
gaaatccatgttcaatgacccaagt

SEQ ID NO: 34607 - DNA, 25 bp, Saccharomyces pastorianus
aaaggtgcaatcactgcagcagtaa

SEQ ID NO: 34608 - DNA, 25 bp, Saccharomyces pastorianus
agaagcagcgcttctccagagaaag

SEQ ID NO: 34609 - DNA, 25 bp, Saccharomyces pastorianus
gagctgctgaaactaaagttccgtt

SEQ ID NO: 34610 - DNA, 25 bp, Saccharomyces pastorianus
tcatcgcatgagacaaacccaaaat

SEQ ID NO: 34611 - DNA, 25 bp, Saccharomyces pastorianus
ggtcaaagttggtcaaccttcatca

SEQ ID NO: 34612 - DNA, 25 bp, Saccharomyces pastorianus
gaaaagctcccatcaacgtcgttta

SEQ ID NO: 34613 - DNA, 25 bp, Saccharomyces pastorianus
gtagagccagtaatgacgtcaacaa

SEQ ID NO: 34614 - DNA, 25 bp, Saccharomyces pastorianus
tctaataccaaacctcatcgcatga

SEQ ID NO: 34615 - DNA, 25 bp, Saccharomyces pastorianus
aaacgttcaatcgtacagtggaaga

SEQ ID NO: 34616 - DNA, 25 bp, Saccharomyces pastorianus
tgacgtcaacaattgcccaaagaat

SEQ ID NO: 34617 - DNA, 25 bp, Saccharomyces pastorianus
aaacagcttcacctgattctttacc

SEQ ID NO: 34618 - DNA, 25 bp, Saccharomyces pastorianus
gattctttacccactaacattgtag

SEQ ID NO: 34619 - DNA, 25 bp, Saccharomyces pastorianus
gctccaaccttttattactgatttt

SEQ ID NO: 34620 - DNA, 25 bp, Saccharomyces pastorianus
tatgcattgtattctctccaacctt

SEQ ID NO: 34621 - DNA, 25 bp, Saccharomyces pastorianus
tattccaattactatgctccaacct

SEQ ID NO: 34622 - DNA, 25 bp, Saccharomyces pastorianus
aatttgcctcatttattgtttggtg

SEQ ID NO: 34623 - DNA, 25 bp, Saccharomyces pastorianus
gaacgtctccaagtttatacatcag

SEQ ID NO: 34624 - DNA, 25 bp, Saccharomyces pastorianus
gccaagtgttgtttatcgttgctta

SEQ ID NO: 34625 - DNA, 25 bp, Saccharomyces pastorianus
tgatgtatgcccttttcgaactatt

SEQ ID NO: 34626 - DNA, 25 bp, Saccharomyces pastorianus
gtcaggtgtagtaccacacgctaat

SEQ ID NO: 34627 - DNA, 25 bp, Saccharomyces pastorianus
catgatgtcgatttatgccgttaca

SEQ ID NO: 34628 - DNA, 25 bp, Saccharomyces pastorianus
gtggactactgaaactttacctgag

SEQ ID NO: 34629 - DNA, 25 bp, Saccharomyces pastorianus
taagcggatcgagcactgtcatcaa

SEQ ID NO: 34630 - DNA, 25 bp, Saccharomyces pastorianus
atgtaccactctgatctcgatgatc

SEQ ID NO: 34631 - DNA, 25 bp, Saccharomyces pastorianus
agatgggatgtcacggcactaccac

SEQ ID NO: 34632 - DNA, 25 bp, Saccharomyces pastorianus
ctaggctttggctctattggtcaaa

SEQ ID NO: 34633 - DNA, 25 bp, Saccharomyces pastorianus
agttgtgggctggacgtcttcaaaa

SEQ ID NO: 34634 - DNA, 25 bp, Saccharomyces pastorianus
agacaactttgatcctaggctttgg

SEQ ID NO: 34635 - DNA, 25 bp, Saccharomyces pastorianus
gcacggtagccgacatgatcttgaa

SEQ ID NO: 34636 - DNA, 25 bp, Saccharomyces pastorianus
tgattgttttgtccctaccaggaac

SEQ ID NO: 34637 - DNA, 25 bp, Saccharomyces pastorianus
gatctacttctttacgatgccatgt

SEQ ID NO: 34638 - DNA, 25 bp, Saccharomyces pastorianus
ggacccgtccagaaagatctacttc

SEQ ID NO: 34639 - DNA, 25 bp, Saccharomyces pastorianus
aaccggcgtcaagcaggaattacta

SEQ ID NO: 34640 - DNA, 25 bp, Saccharomyces pastorianus
gatgaagattccctcttagacgctc

SEQ ID NO: 34641 - DNA, 25 bp, Saccharomyces pastorianus
aattatgcacaaggcccgtgacgat

SEQ ID NO: 34642 - DNA, 25 bp, Saccharomyces pastorianus
gggacgtacgcagttttgtctctag

SEQ ID NO: 34643 - DNA, 25 bp, Saccharomyces pastorianus
tgatgaactagacctcctgtacaag

SEQ ID NO: 34644 - DNA, 25 bp, Saccharomyces pastorianus
aagactctctttcgactgtatggcc

SEQ ID NO: 34645 - DNA, 25 bp, Saccharomyces pastorianus
atgcctcccaatcgccaattagaaa

SEQ ID NO: 34646 - DNA, 25 bp, Saccharomyces pastorianus
gtatggccaatacgtctgacattct

SEQ ID NO: 34647 - DNA, 25 bp, Saccharomyces pastorianus
ttgtctctagggtccggcttaactg

SEQ ID NO: 34648 - DNA, 25 bp, Saccharomyces pastorianus
aagagtcgctctcatggcagtacga

SEQ ID NO: 34649 - DNA, 25 bp, Saccharomyces pastorianus
agtacgatatcctgctcagcttgaa

SEQ ID NO: 34650 - DNA, 25 bp, Saccharomyces pastorianus
gaaatgcaacttccaagtcgaccaa

SEQ ID NO: 34651 - DNA, 25 bp, Saccharomyces pastorianus
aagcaactgttgagcgacctaaacg

SEQ ID NO: 34652 - DNA, 25 bp, Saccharomyces pastorianus
caggctgtcccgagtcattgaaatg

SEQ ID NO: 34653 - DNA, 25 bp, Saccharomyces pastorianus
atggatcgacgcacacgcggatatt

SEQ ID NO: 34654 - DNA, 25 bp, Saccharomyces pastorianus
acagactcgggtaacttgcacggtt

SEQ ID NO: 34655 - DNA, 25 bp, Saccharomyces pastorianus
tggccatacacgatatccatgtctc

SEQ ID NO: 34656 - DNA, 25 bp, Saccharomyces pastorianus
acttggttgctctagacgttgtcga

SEQ ID NO: 34657 - DNA, 25 bp, Saccharomyces pastorianus
ggttgtcccgtttcattcttaatgg

SEQ ID NO: 34658 - DNA, 25 bp, Saccharomyces pastorianus
ggtactgtatcagccgtcttggaca

SEQ ID NO: 34659 - DNA, 25 bp, Saccharomyces pastorianus
tgaagccggcgtgctatggatcgac

SEQ ID NO: 34660 - DNA, 25 bp, Saccharomyces pastorianus
cgaaggccccataatgtgctcttat

SEQ ID NO: 34661 - DNA, 25 bp, Saccharomyces pastorianus
tgaaccaagatatcccaggctgtcc

SEQ ID NO: 34662 - DNA, 25 bp, Saccharomyces pastorianus
aacgctgtcgttgagatggccatga

SEQ ID NO: 34663 - DNA, 25 bp, Saccharomyces pastorianus
gtatgcgttacctacggtgttgaca

SEQ ID NO: 34664 - DNA, 25 bp, Saccharomyces pastorianus
caatattgttcttaaccgagggcgg

SEQ ID NO: 34665 - DNA, 25 bp, Saccharomyces pastorianus
tgaaccactgggtagacaccgtgct

SEQ ID NO: 34666 - DNA, 25 bp, Saccharomyces pastorianus
aacgtcggcttcaacatcgaatgca

SEQ ID NO: 34667 - DNA, 25 bp, Saccharomyces pastorianus
atgcaaattccccatgcttgacgaa

SEQ ID NO: 34668 - DNA, 25 bp, Saccharomyces pastorianus
gatagcgtcatcttttgttaccttg

SEQ ID NO: 34669 - DNA, 25 bp, Saccharomyces pastorianus
caatgatcccgagaacgcaagtatt

SEQ ID NO: 34670 - DNA, 25 bp, Saccharomyces pastorianus
ccagatatctgcgtcatgttgtcat

SEQ ID NO: 34671 - DNA, 25 bp, Saccharomyces pastorianus
gacataatcttttcgtcattccacc

SEQ ID NO: 34672 - DNA, 25 bp, Saccharomyces pastorianus
ggatttgagagcgtcatcgttgcaa

SEQ ID NO: 34673 - DNA, 25 bp, Saccharomyces pastorianus
ggttatcgttgacagcgtgctagca

SEQ ID NO: 34674 - DNA, 25 bp, Saccharomyces pastorianus
gctatcagagatatgttccccaaga

SEQ ID NO: 34675 - DNA, 25 bp, Saccharomyces pastorianus
gattggaatccacctttaggcttgt

SEQ ID NO: 34676 - DNA, 25 bp, Saccharomyces pastorianus
gacaaccaacaaacagcccagctag

SEQ ID NO: 34677 - DNA, 25 bp, Saccharomyces pastorianus
cactgtctttggaggtcgtctgaaa

SEQ ID NO: 34678 - DNA, 25 bp, Saccharomyces pastorianus
gaagaaaggatgtccactgtctttg

SEQ ID NO: 34679 - DNA, 25 bp, Saccharomyces pastorianus
gaaaatagctggtgtccctgtacct

SEQ ID NO: 34680 - DNA, 25 bp, Saccharomyces pastorianus
gaaaggcgagccaccaagatctaca

SEQ ID NO: 34681 - DNA, 25 bp, Saccharomyces pastorianus
ggatattcctgtttacgttaaagca

SEQ ID NO: 34682 - DNA, 25 bp, Saccharomyces pastorianus
gatcaacctcctgatttatcggcta

SEQ ID NO: 34683 - DNA, 25 bp, Saccharomyces pastorianus
gggcctctgcctaagagtgtcttag

SEQ ID NO: 34684 - DNA, 25 bp, Saccharomyces pastorianus
cgcaggaacctgataactgttgcat

SEQ ID NO: 34685 - DNA, 25 bp, Saccharomyces pastorianus
tttggtcacctattggatgcttttg

SEQ ID NO: 34686 - DNA, 25 bp, Saccharomyces pastorianus
ttgttgatttcccattgttttcgcc

SEQ ID NO: 34687 - DNA, 25 bp, Saccharomyces pastorianus
ggataagctatgctctacgcaccat

SEQ ID NO: 34688 - DNA, 25 bp, Saccharomyces pastorianus
gagaatcccactcctttgggaaggt

SEQ ID NO: 34689 - DNA, 25 bp, Saccharomyces pastorianus
gatatgggaacaccacctcatgctg

SEQ ID NO: 34690 - DNA, 25 bp, Saccharomyces pastorianus
aaagtttgcttatccggaatacgag

SEQ ID NO: 34691 - DNA, 25 bp, Saccharomyces pastorianus
gtgtgatacccgaaagcgtcttaaa

SEQ ID NO: 34692 - DNA, 25 bp, Saccharomyces pastorianus
gctggtttcgcaattggctttgata

SEQ ID NO: 34693 - DNA, 25 bp, Saccharomyces pastorianus
agaattgggcggtggctctacaaga

SEQ ID NO: 34694 - DNA, 25 bp, Saccharomyces pastorianus
gaatgtgcgccatgatctgtggtac

SEQ ID NO: 34695 - DNA, 25 bp, Saccharomyces pastorianus
gttttcgccggttaccatcgaagag

SEQ ID NO: 34696 - DNA, 25 bp, Saccharomyces pastorianus
gtgctccttcttattgacccataat

SEQ ID NO: 34697 - DNA, 25 bp, Saccharomyces pastorianus
gacccataatggcactcctatactt

SEQ ID NO: 34698 - DNA, 25 bp, Saccharomyces pastorianus
gcattggtctggaagatcactccta

SEQ ID NO: 34699 - DNA, 25 bp, Saccharomyces pastorianus
atataccacatatcagctacgccag

SEQ ID NO: 34700 - DNA, 25 bp, Saccharomyces pastorianus
agctacgccagctatgcattggtct

SEQ ID NO: 34701 - DNA, 25 bp, Saccharomyces pastorianus
gattctcctttatgggtggtaccca

SEQ ID NO: 34702 - DNA, 25 bp, Saccharomyces pastorianus
aaataaatcgctgtggtgctccttc

SEQ ID NO: 34703 - DNA, 25 bp, Saccharomyces pastorianus
gcatcaaaggcctcgacacattaac

SEQ ID NO: 34704 - DNA, 25 bp, Saccharomyces pastorianus
gctcaaaacgtcctgggagtccatt

SEQ ID NO: 34705 - DNA, 25 bp, Saccharomyces pastorianus
gtctcccataatcatcctgatcata

SEQ ID NO: 34706 - DNA, 25 bp, Saccharomyces pastorianus
ctcctatacttttccatgctggtga

SEQ ID NO: 34707 - DNA, 25 bp, Saccharomyces pastorianus
tgataagaattgtcatcccctcctt

SEQ ID NO: 34708 - DNA, 25 bp, Saccharomyces pastorianus
gaaggttcttcaaatccagaccaac

SEQ ID NO: 34709 - DNA, 25 bp, Saccharomyces pastorianus
tagaacgtgtctacaagtcccaacc

SEQ ID NO: 34710 - DNA, 25 bp, Saccharomyces pastorianus
gttgtactatttgcctcgatatcca

SEQ ID NO: 34711 - DNA, 25 bp, Saccharomyces pastorianus
gattctgttattgacttggagccct

SEQ ID NO: 34712 - DNA, 25 bp, Saccharomyces pastorianus
ggtatacctgtggacgacgctgaag

SEQ ID NO: 34713 - DNA, 25 bp, Saccharomyces pastorianus
acagatatcattacgcctccattat

SEQ ID NO: 34714 - DNA, 25 bp, Saccharomyces pastorianus
ttgaaattgcccgtcttcacagatc

SEQ ID NO: 34715 - DNA, 25 bp, Saccharomyces pastorianus
gcctaaaatgtttgcgtcatccgaa

SEQ ID NO: 34716 - DNA, 25 bp, Saccharomyces pastorianus
tatctccaccatcctgggtcaaatg

SEQ ID NO: 34717 - DNA, 25 bp, Saccharomyces pastorianus
gattcagcatggtcttgtccacatt

SEQ ID NO: 34718 - DNA, 25 bp, Saccharomyces pastorianus
tttgccgttacctactaccacaaga

SEQ ID NO: 34719 - DNA, 25 bp, Saccharomyces pastorianus
gatgagctcctctgtatacttatta

SEQ ID NO: 34720 - DNA, 25 bp, Saccharomyces pastorianus
gagagctactacaacaccgcaaaat

SEQ ID NO: 34721 - DNA, 25 bp, Saccharomyces pastorianus
gatggcgttgatcctgaactaatac

SEQ ID NO: 34722 - DNA, 25 bp, Saccharomyces pastorianus
gaagtagaagccttggagtcccaac

SEQ ID NO: 34723 - DNA, 25 bp, Saccharomyces pastorianus
agaaattcgtcaggcctctttggat

SEQ ID NO: 34724 - DNA, 25 bp, Saccharomyces pastorianus
aaattatcatctaggtttgccgtta

SEQ ID NO: 34725 - DNA, 25 bp, Saccharomyces pastorianus
ttattacttcatctcacgtggtgga

SEQ ID NO: 34726 - DNA, 25 bp, Saccharomyces pastorianus
gaaaacagtccacgaaagcccaatg

SEQ ID NO: 34727 - DNA, 25 bp, Saccharomyces pastorianus
agaagttcccggatgcttactgctg

SEQ ID NO: 34728 - DNA, 25 bp, Saccharomyces pastorianus
aagactcccttaagccaacaacaga

SEQ ID NO: 34729 - DNA, 25 bp, Saccharomyces pastorianus
gcacaacagcaaccttcaaattggg

SEQ ID NO: 34730 - DNA, 25 bp, Saccharomyces pastorianus
gtaaatacatcgctggctcagccgg

SEQ ID NO: 34731 - DNA, 25 bp, Saccharomyces pastorianus
gcccagatggtgttgttagaacgct

SEQ ID NO: 34732 - DNA, 25 bp, Saccharomyces pastorianus
atgatgggtaccaccgtcggcgttt

SEQ ID NO: 34733 - DNA, 25 bp, Saccharomyces pastorianus
gtactgggattctatttggtggatt

SEQ ID NO: 34734 - DNA, 25 bp, Saccharomyces pastorianus
agcgcccaatcctaacttgaatcta

SEQ ID NO: 34735 - DNA, 25 bp, Saccharomyces pastorianus
acctatgccacaaagttatgcacaa

SEQ ID NO: 34736 - DNA, 25 bp, Saccharomyces pastorianus
tactcaaggtgcaggcccagatggt

SEQ ID NO: 34737 - DNA, 25 bp, Saccharomyces pastorianus
tttgccatcgctactcaaggtgcag

SEQ ID NO: 34738 - DNA, 25 bp, Saccharomyces pastorianus
cgtcggcgtttgtactgggattcta

SEQ ID NO: 34739 - DNA, 25 bp, Saccharomyces pastorianus
tgatggtgacttaagctcagcgccc

SEQ ID NO: 34740 - DNA, 25 bp, Saccharomyces pastorianus
gtgtattgtcgctatgccctgcaac

SEQ ID NO: 34741 - DNA, 25 bp, Saccharomyces pastorianus
ggttgcgcaataatgaatcgttact

SEQ ID NO: 34742 - DNA, 25 bp, Saccharomyces pastorianus
ctattggtgtgtattgtcgctatgc

SEQ ID NO: 34743 - DNA, 25 bp, Saccharomyces pastorianus
ttttgggccttacttactccgtgct

SEQ ID NO: 34744 - DNA, 25 bp, Saccharomyces pastorianus
tggctatgggcacttatatcctggt

SEQ ID NO: 34745 - DNA, 25 bp, Saccharomyces pastorianus
tatgccctgcaacgctctggctatg

SEQ ID NO: 34746 - DNA, 25 bp, Saccharomyces pastorianus
gtgcttctcaccagtttttctatat

SEQ ID NO: 34747 - DNA, 25 bp, Saccharomyces pastorianus
ttttctatattttattggttgcgca

SEQ ID NO: 34748 - DNA, 25 bp, Saccharomyces pastorianus
tgaatcgttactacactattggtgt

SEQ ID NO: 34749 - DNA, 25 bp, Saccharomyces pastorianus
tgggcacttatatcctggtgcgata

SEQ ID NO: 34750 - DNA, 25 bp, Saccharomyces pastorianus
aacgctctggctatgggcacttata

SEQ ID NO: 34751 - DNA, 25 bp, Saccharomyces pastorianus
gagatagaaacagacacgccaaaca

SEQ ID NO: 34752 - DNA, 25 bp, Saccharomyces pastorianus
ttgacagcttccaccgacaatggta

SEQ ID NO: 34753 - DNA, 25 bp, Saccharomyces pastorianus
ctggacggtgttgctgatggttcca

SEQ ID NO: 34754 - DNA, 25 bp, Saccharomyces pastorianus
gggttctacaactcggacgatgaag

SEQ ID NO: 34755 - DNA, 25 bp, Saccharomyces pastorianus
aatcctgtttccttatcgaagcatc

SEQ ID NO: 34756 - DNA, 25 bp, Saccharomyces pastorianus
tgccacgttccaaactaaccaaatc

SEQ ID NO: 34757 - DNA, 25 bp, Saccharomyces pastorianus
agaggttccgatgttgtctttggtg

SEQ ID NO: 34758 - DNA, 25 bp, Saccharomyces pastorianus
aacaaggccattatgccacgttcca

SEQ ID NO: 34759 - DNA, 25 bp, Saccharomyces pastorianus
gaacgtttacgatttcttggatcct

SEQ ID NO: 34760 - DNA, 25 bp, Saccharomyces pastorianus
ggatcctgaaatcgctgccaaattg

SEQ ID NO: 34761 - DNA, 25 bp, Saccharomyces pastorianus
cttatcgaagcatctgttcagtggt

SEQ ID NO: 34762 - DNA, 25 bp, Saccharomyces pastorianus
aaaggtggtcggtttgcatattgtt

SEQ ID NO: 34763 - DNA, 25 bp, Saccharomyces pastorianus
gtatcaagctgaattctcatgacca

SEQ ID NO: 34764 - DNA, 25 bp, Saccharomyces pastorianus
taagattgtctgtgctggaccagat

SEQ ID NO: 34765 - DNA, 25 bp, Saccharomyces pastorianus
taatcttctcccatccggaagcagg

SEQ ID NO: 34766 - DNA, 25 bp, Saccharomyces pastorianus
ttcactgctatgtactatgccatgt

SEQ ID NO: 34767 - DNA, 25 bp, Saccharomyces pastorianus
attctttaggtgatgttgtcggcaa

SEQ ID NO: 34768 - DNA, 25 bp, Saccharomyces pastorianus
attggacgtaaatcccatctgggta

SEQ ID NO: 34769 - DNA, 25 bp, Saccharomyces pastorianus
tatcgcagcaggcagaacgctatct

SEQ ID NO: 34770 - DNA, 25 bp, Saccharomyces pastorianus
gaaaacgtccctagcgtaatcttct

SEQ ID NO: 34771 - DNA, 25 bp, Saccharomyces pastorianus
gaattgacgccagttgctatcgcag

SEQ ID NO: 34772 - DNA, 25 bp, Saccharomyces pastorianus
aagctgacttcgacaattgcattgc

SEQ ID NO: 34773 - DNA, 25 bp, Saccharomyces pastorianus
gtaatcatcccaactcaaacacata

SEQ ID NO: 34774 - DNA, 25 bp, Saccharomyces pastorianus
gcccataaattctgtacccggtaat

SEQ ID NO: 34775 - DNA, 25 bp, Saccharomyces pastorianus
aacaatatcaacaactccctttcaa

SEQ ID NO: 34776 - DNA, 25 bp, Saccharomyces pastorianus
tttcaacaaaacacgtcctctttct

SEQ ID NO: 34777 - DNA, 25 bp, Saccharomyces pastorianus
gaggcccctgtaaatggacctgctg

SEQ ID NO: 34778 - DNA, 25 bp, Saccharomyces pastorianus
gaaataccgggctaactccatatat

SEQ ID NO: 34779 - DNA, 25 bp, Saccharomyces pastorianus
acacatatgatgttgctgcctcctc

SEQ ID NO: 34780 - DNA, 25 bp, Saccharomyces pastorianus
gtcctctttcttggctcaaagacaa

SEQ ID NO: 34781 - DNA, 25 bp, Saccharomyces pastorianus
gagcaattctccaaacgtttcatca

SEQ ID NO: 34782 - DNA, 25 bp, Saccharomyces pastorianus
tacgaatagcgctggttcattccct

SEQ ID NO: 34783 - DNA, 25 bp, Saccharomyces pastorianus
tgctgcgcctgatcattctagtgac

SEQ ID NO: 34784 - DNA, 25 bp, Saccharomyces pastorianus
gaaagggtttgccaatcggcacctc

SEQ ID NO: 34785 - DNA, 25 bp, Saccharomyces pastorianus
ttttggaactacatgcctggtggca

SEQ ID NO: 34786 - DNA, 25 bp, Saccharomyces pastorianus
attgactttcaaccacgtccatgac

SEQ ID NO: 34787 - DNA, 25 bp, Saccharomyces pastorianus
actcgaccgagtatatgggaccaat

SEQ ID NO: 34788 - DNA, 25 bp, Saccharomyces pastorianus
gaccgttttggtggtgattctttct

SEQ ID NO: 34789 - DNA, 25 bp, Saccharomyces pastorianus
acctgcgattttccaagttctttat

SEQ ID NO: 34790 - DNA, 25 bp, Saccharomyces pastorianus
gaagaacgtatttggccttgccact

SEQ ID NO: 34791 - DNA, 25 bp, Saccharomyces pastorianus
gacttggctgtacgttgtcgttcaa

SEQ ID NO: 34792 - DNA, 25 bp, Saccharomyces pastorianus
tatgggtatggtgccgtttgtcatt

SEQ ID NO: 34793 - DNA, 25 bp, Saccharomyces pastorianus
gaccggtacaggtgtctacatcttt

SEQ ID NO: 34794 - DNA, 25 bp, Saccharomyces pastorianus
cttgccactgggtgtctttttggaa

SEQ ID NO: 34795 - DNA, 25 bp, Saccharomyces pastorianus
cccttagtcacctctggtgttgata

SEQ ID NO: 34796 - DNA, 25 bp, Saccharomyces pastorianus
aagagatatcccaatgcccttagtc

SEQ ID NO: 34797 - DNA, 25 bp, Saccharomyces pastorianus
cagcgccaacgctttggtagatttg

SEQ ID NO: 34798 - DNA, 25 bp, Saccharomyces pastorianus
ggttccactacattcaagggatccg

SEQ ID NO: 34799 - DNA, 25 bp, Saccharomyces pastorianus
aagggatccgcgtaagttccagcat

SEQ ID NO: 34800 - DNA, 25 bp, Saccharomyces pastorianus
aagagactactacgcgaatggtggt

SEQ ID NO: 34801 - DNA, 25 bp, Saccharomyces pastorianus
gggtaccacctgtagagacgttcgt

SEQ ID NO: 34802 - DNA, 25 bp, Saccharomyces pastorianus
aatttacctcgcaaagaacttctat

SEQ ID NO: 34803 - DNA, 25 bp, Saccharomyces pastorianus
taaagttcagccagaccaagtagag

SEQ ID NO: 34804 - DNA, 25 bp, Saccharomyces pastorianus
gcgtaagttccagcatcaaggtttt

SEQ ID NO: 34805 - DNA, 25 bp, Saccharomyces pastorianus
ttgctagaattctggcattagtgcc

SEQ ID NO: 34806 - DNA, 25 bp, Saccharomyces pastorianus
ttcagggcacctgttgtaggagatc

SEQ ID NO: 34807 - DNA, 25 bp, Saccharomyces pastorianus
aatagcgcagcgtctcaatctcaac

SEQ ID NO: 34808 - DNA, 25 bp, Saccharomyces pastorianus
gaagcacgttttcgaaatctcaaag

SEQ ID NO: 34809 - DNA, 25 bp, Saccharomyces pastorianus
tatgcagcaattcctaacacgacag

SEQ ID NO: 34810 - DNA, 25 bp, Saccharomyces pastorianus
ggtgtttttgcgtctgatttgccaa

SEQ ID NO: 34811 - DNA, 25 bp, Saccharomyces pastorianus
aaacagcatgagacccttacgacaa

SEQ ID NO: 34812 - DNA, 25 bp, Saccharomyces pastorianus
acatctttttacaacaggccttctg

SEQ ID NO: 34813 - DNA, 25 bp, Saccharomyces pastorianus
aggagatcgtccattattgccccaa

SEQ ID NO: 34814 - DNA, 25 bp, Saccharomyces pastorianus
tgaatcttcaccatatgcagcaatt

SEQ ID NO: 34815 - DNA, 25 bp, Saccharomyces pastorianus
gttccagcaatgacttactccaagg

SEQ ID NO: 34816 - DNA, 25 bp, Saccharomyces pastorianus
ttattgccccaaaatagcgcagcgt

SEQ ID NO: 34817 - DNA, 25 bp, Saccharomyces pastorianus
ggctcacgaagcaaaatccgtcttg

SEQ ID NO: 34818 - DNA, 25 bp, Saccharomyces pastorianus
atccgtcttggattcatgggttaga

SEQ ID NO: 34819 - DNA, 25 bp, Saccharomyces pastorianus
gtttggttgcaaagtatctggcccc

SEQ ID NO: 34820 - DNA, 25 bp, Saccharomyces pastorianus
ggttttagggacttcggctgctgcc

SEQ ID NO: 34821 - DNA, 25 bp, Saccharomyces pastorianus
gtattcttttgctaactttcttggg

SEQ ID NO: 34822 - DNA, 25 bp, Saccharomyces pastorianus
atctggccccagcatacaaggattt

SEQ ID NO: 34823 - DNA, 25 bp, Saccharomyces pastorianus
gaattggatctgtctctgaattaca

SEQ ID NO: 34824 - DNA, 25 bp, Saccharomyces pastorianus
gacaaaggccaattctatcattaat

SEQ ID NO: 34825 - DNA, 25 bp, Saccharomyces pastorianus
atacgaatcttccttacgccaattg

SEQ ID NO: 34826 - DNA, 25 bp, Saccharomyces pastorianus
gtcattgctaaagtcgagtccgaac

SEQ ID NO: 34827 - DNA, 25 bp, Saccharomyces pastorianus
tgccgtcatttatgccatctccaat

SEQ ID NO: 34828 - DNA, 25 bp, Saccharomyces pastorianus
gccgttggcggcaatactgttcata

SEQ ID NO: 34829 - DNA, 25 bp, Saccharomyces pastorianus
caacggcaacggcagtggtaacatg

SEQ ID NO: 34830 - DNA, 25 bp, Saccharomyces pastorianus
agaccggatgtcactagatcaaatt

SEQ ID NO: 34831 - DNA, 25 bp, Saccharomyces pastorianus
aattagatcgtatacgccaccacac

SEQ ID NO: 34832 - DNA, 25 bp, Saccharomyces pastorianus
tgtaacccctactattcaaagaccg

SEQ ID NO: 34833 - DNA, 25 bp, Saccharomyces pastorianus
gcaatcttcggcgtctttagaacgt

SEQ ID NO: 34834 - DNA, 25 bp, Saccharomyces pastorianus
taacggcgtgatgcataaaaccaac

SEQ ID NO: 34835 - DNA, 25 bp, Saccharomyces pastorianus
agaaatttccagagacgtgtcaacg

SEQ ID NO: 34836 - DNA, 25 bp, Saccharomyces pastorianus
ggttcagaactgtctttgactcatc

SEQ ID NO: 34837 - DNA, 25 bp, Saccharomyces pastorianus
taagtagtaaagtcgcattgccatc

SEQ ID NO: 34838 - DNA, 25 bp, Saccharomyces pastorianus
aagttcgtcccagttgtccatagaa

SEQ ID NO: 34839 - DNA, 25 bp, Saccharomyces pastorianus
aagtacttgcccgatttgacccagc

SEQ ID NO: 34840 - DNA, 25 bp, Saccharomyces pastorianus
tcgctggttccgttcataaatcttt

SEQ ID NO: 34841 - DNA, 25 bp, Saccharomyces pastorianus
ggcttcgccgaagacattactgagg

SEQ ID NO: 34842 - DNA, 25 bp, Saccharomyces pastorianus
gagatcatacccacccaagaaatgt

SEQ ID NO: 34843 - DNA, 25 bp, Saccharomyces pastorianus
ccagcattctgatacttctaccaat

SEQ ID NO: 34844 - DNA, 25 bp, Saccharomyces pastorianus
ggagagatttcctgcctgagatcat

SEQ ID NO: 34845 - DNA, 25 bp, Saccharomyces pastorianus
catcatccatgctctaaatttcacc

SEQ ID NO: 34846 - DNA, 25 bp, Saccharomyces pastorianus
aacgtcagactgagcaacacgatga

SEQ ID NO: 34847 - DNA, 25 bp, Saccharomyces pastorianus
aacgggtggtcttttcagattgact

SEQ ID NO: 34848 - DNA, 25 bp, Saccharomyces pastorianus
aatctgcatagaggccaaggtttgg

SEQ ID NO: 34849 - DNA, 25 bp, Saccharomyces pastorianus
ttgaggctcatggaaaccctgtctc

SEQ ID NO: 34850 - DNA, 25 bp, Saccharomyces pastorianus
tactggttcgaaggcattctctcaa

SEQ ID NO: 34851 - DNA, 25 bp, Saccharomyces pastorianus
gaaatgtacaacagcaccagccacg

SEQ ID NO: 34852 - DNA, 25 bp, Saccharomyces pastorianus
atagacctgctgaacctggaaatgt

SEQ ID NO: 34853 - DNA, 25 bp, Saccharomyces pastorianus
gaaatagcgaacctgcattccataa

SEQ ID NO: 34854 - DNA, 25 bp, Saccharomyces pastorianus
aaacatcgtaaacctgctgcagtcg

SEQ ID NO: 34855 - DNA, 25 bp, Saccharomyces pastorianus
actacagcgaattccatgacggtta

SEQ ID NO: 34856 - DNA, 25 bp, Saccharomyces pastorianus
aaagagcagcaacccgaagccaagg

SEQ ID NO: 34857 - DNA, 25 bp, Saccharomyces pastorianus
ttccataaacctcatagacctgctg

SEQ ID NO: 34858 - DNA, 25 bp, Saccharomyces pastorianus
gaggctacctaacgacttgcaactt

SEQ ID NO: 34859 - DNA, 25 bp, Saccharomyces pastorianus
tctcaagcgcactcgaataacctga

SEQ ID NO: 34860 - DNA, 25 bp, Saccharomyces pastorianus
aacaacggtttgatgtggcctcaca

SEQ ID NO: 34861 - DNA, 25 bp, Saccharomyces pastorianus
aactcgcccgcctgaaacgaagtag

SEQ ID NO: 34862 - DNA, 25 bp, Saccharomyces pastorianus
agaggttgaccagcggcttggacat

SEQ ID NO: 34863 - DNA, 25 bp, Saccharomyces pastorianus
gtgcaccttgttctgtggtccaaga

SEQ ID NO: 34864 - DNA, 25 bp, Saccharomyces pastorianus
acgccgttgagagggccttcagtga

SEQ ID NO: 34865 - DNA, 25 bp, Saccharomyces pastorianus
gatggtcatcagacaagccgcagtc

SEQ ID NO: 34866 - DNA, 25 bp, Saccharomyces pastorianus
aggagcgcatcactgtcgacgagat

SEQ ID NO: 34867 - DNA, 25 bp, Saccharomyces pastorianus
gaaccagtacatgttgcagcaatta

SEQ ID NO: 34868 - DNA, 25 bp, Saccharomyces pastorianus
gagacgaccgagaagtaccacgaac

SEQ ID NO: 34869 - DNA, 25 bp, Saccharomyces pastorianus
gtttgtcaattacccggctctgcag

SEQ ID NO: 34870 - DNA, 25 bp, Saccharomyces pastorianus
gatcaagggcatcatcgagtccgga

SEQ ID NO: 34871 - DNA, 25 bp, Saccharomyces pastorianus
tgagcgggcgctgtatgttctacgc

SEQ ID NO: 34872 - DNA, 25 bp, Saccharomyces pastorianus
taatttactatttcaacgacgccga

SEQ ID NO: 34873 - DNA, 25 bp, Saccharomyces pastorianus
gcgaactgtttagaatacccctctt

SEQ ID NO: 34874 - DNA, 25 bp, Saccharomyces pastorianus
aattcgatgcatttccagttcaaca

SEQ ID NO: 34875 - DNA, 25 bp, Saccharomyces pastorianus
aaaaggacattagccgcatagaccc

SEQ ID NO: 34876 - DNA, 25 bp, Saccharomyces pastorianus
caaggtttcgaatctcctgactcaa

SEQ ID NO: 34877 - DNA, 25 bp, Saccharomyces pastorianus
aatgtttctcactctctgtcaataa

SEQ ID NO: 34878 - DNA, 25 bp, Saccharomyces pastorianus
aaaaccaatccgaattctcatccac

SEQ ID NO: 34879 - DNA, 25 bp, Saccharomyces pastorianus
ataagcacaataggccagcatttca

SEQ ID NO: 34880 - DNA, 25 bp, Saccharomyces pastorianus
tcatccacccaaacttcaaacgttt

SEQ ID NO: 34881 - DNA, 25 bp, Saccharomyces pastorianus
atatcgcaggaaaggcaaaccgcca

SEQ ID NO: 34882 - DNA, 25 bp, Saccharomyces pastorianus
ctcctgactcaagttgtcctgaaac

SEQ ID NO: 34883 - DNA, 25 bp, Saccharomyces pastorianus
attggcgataccctgaacgaaactc

SEQ ID NO: 34884 - DNA, 25 bp, Saccharomyces pastorianus
gatccatcgaatcgttctcagacaa

SEQ ID NO: 34885 - DNA, 25 bp, Saccharomyces pastorianus
atcactgctgcgtctggcggtaatg

SEQ ID NO: 34886 - DNA, 25 bp, Saccharomyces pastorianus
ttgcaccccttattagcagaactat

SEQ ID NO: 34887 - DNA, 25 bp, Saccharomyces pastorianus
cgtaatggatgccttgaaactcaac

SEQ ID NO: 34888 - DNA, 25 bp, Saccharomyces pastorianus
aatgagcaggcttcttctagcgata

SEQ ID NO: 34889 - DNA, 25 bp, Saccharomyces pastorianus
ttaatcagcataaaccgtgtcacca

SEQ ID NO: 34890 - DNA, 25 bp, Saccharomyces pastorianus
atgccaaggatcaattgcacccctt

SEQ ID NO: 34891 - DNA, 25 bp, Saccharomyces pastorianus
aacagcagaacatgccatctctacc

SEQ ID NO: 34892 - DNA, 25 bp, Saccharomyces pastorianus
accggtaacttcatcaccgtaatgg

SEQ ID NO: 34893 - DNA, 25 bp, Saccharomyces pastorianus
atacgtcgctgaagccaccggtaac

SEQ ID NO: 34894 - DNA, 25 bp, Saccharomyces pastorianus
agagctgcatgatcaagccgaccca

SEQ ID NO: 34895 - DNA, 25 bp, Saccharomyces pastorianus
gaatggttcttcctgcatggatcaa

SEQ ID NO: 34896 - DNA, 25 bp, Saccharomyces pastorianus
aagcgttcaacctaagcccgacgtg

SEQ ID NO: 34897 - DNA, 25 bp, Saccharomyces pastorianus
gacccaccaactaaagacccagagg

SEQ ID NO: 34898 - DNA, 25 bp, Saccharomyces pastorianus
gacactgaaccggtagagctgcatg

SEQ ID NO: 34899 - DNA, 25 bp, Saccharomyces pastorianus
gtcggtaaatctatctacgctttca

SEQ ID NO: 34900 - DNA, 25 bp, Saccharomyces pastorianus
gacgtctttgagaataagccaacca

SEQ ID NO: 34901 - DNA, 25 bp, Saccharomyces pastorianus
ggtgagatcgaaaccaccactcaaa

SEQ ID NO: 34902 - DNA, 25 bp, Saccharomyces pastorianus
gacgtgtccgtagatcagccacaac

SEQ ID NO: 34903 - DNA, 25 bp, Saccharomyces pastorianus
gtacaggcagattccaaacatgtct

SEQ ID NO: 34904 - DNA, 25 bp, Saccharomyces pastorianus
aagcaatttatgtaccctgcagttt

SEQ ID NO: 34905 - DNA, 25 bp, Saccharomyces pastorianus
ggtgtcaccaacgacatgggcggca

SEQ ID NO: 34906 - DNA, 25 bp, Saccharomyces pastorianus
gaatatctagccacgcagcaaacca

SEQ ID NO: 34907 - DNA, 25 bp, Saccharomyces pastorianus
tgccctcacccgaagagcaaatgaa

SEQ ID NO: 34908 - DNA, 25 bp, Saccharomyces pastorianus
gttagaccgatcttggacagtttcc

SEQ ID NO: 34909 - DNA, 25 bp, Saccharomyces pastorianus
ggtgtgcacatcaaggatctttcga

SEQ ID NO: 34910 - DNA, 25 bp, Saccharomyces pastorianus
tgggccttaaaagcgcttggtgtca

SEQ ID NO: 34911 - DNA, 25 bp, Saccharomyces pastorianus
gaagaaccttgctaccgaatttgac

SEQ ID NO: 34912 - DNA, 25 bp, Saccharomyces pastorianus
gcggccagacgttcaccttaaagga

SEQ ID NO: 34913 - DNA, 25 bp, Saccharomyces pastorianus
cacggagacggctctaatggcaatt

SEQ ID NO: 34914 - DNA, 25 bp, Saccharomyces pastorianus
gctcgacctaatccacgaagagggt

SEQ ID NO: 34915 - DNA, 25 bp, Saccharomyces pastorianus
tacgtggaaggtaacctgccctcac

SEQ ID NO: 34916 - DNA, 25 bp, Saccharomyces pastorianus
agaccaactgtcttctacgacgttg

SEQ ID NO: 34917 - DNA, 25 bp, Saccharomyces pastorianus
ggctccggtatcgaaactgaatctc

SEQ ID NO: 34918 - DNA, 25 bp, Saccharomyces pastorianus
tggcaatggcaaacagctccgaatt

SEQ ID NO: 34919 - DNA, 25 bp, Saccharomyces pastorianus
acgatgaacttttggccgctttcaa

SEQ ID NO: 34920 - DNA, 25 bp, Saccharomyces pastorianus
taaaggctggtaccgtgtggatcaa

SEQ ID NO: 34921 - DNA, 25 bp, Saccharomyces pastorianus
ttgttcctccggttcaagaatctac

SEQ ID NO: 34922 - DNA, 25 bp, Saccharomyces pastorianus
gtatcttcaagaacgccggtcaaat

SEQ ID NO: 34923 - DNA, 25 bp, Saccharomyces pastorianus
gacaaggctaacttccaaggtgcta

SEQ ID NO: 34924 - DNA, 25 bp, Saccharomyces pastorianus
gtgctatcactaaccgtcaacaatt

SEQ ID NO: 34925 - DNA, 25 bp, Saccharomyces pastorianus
ctgtcgttaccgtggcaaagttcaa

SEQ ID NO: 34926 - DNA, 25 bp, Saccharomyces pastorianus
actgaatctctaagcactggtttga

SEQ ID NO: 34927 - DNA, 25 bp, Saccharomyces pastorianus
gcattgaacatacagctgacccagg

SEQ ID NO: 34928 - DNA, 25 bp, Saccharomyces pastorianus
acatggaagactcgccgttcctgta

SEQ ID NO: 34929 - DNA, 25 bp, Saccharomyces pastorianus
aacgagctggagttgcggcttctaa

SEQ ID NO: 34930 - DNA, 25 bp, Saccharomyces pastorianus
ttcctgtacctgacggatttcgaca

SEQ ID NO: 34931 - DNA, 25 bp, Saccharomyces pastorianus
tcggtatcctccgtgggaaacagta

SEQ ID NO: 34932 - DNA, 25 bp, Saccharomyces pastorianus
ttcagcagcctgtaagcagcagcag

SEQ ID NO: 34933 - DNA, 25 bp, Saccharomyces pastorianus
gaggcagattatccgcttcagcagc

SEQ ID NO: 34934 - DNA, 25 bp, Saccharomyces pastorianus
tagaagcaatagctcctccggaggc

SEQ ID NO: 34935 - DNA, 25 bp, Saccharomyces pastorianus
gtgacgtaatcgataccactctaca

SEQ ID NO: 34936 - DNA, 25 bp, Saccharomyces pastorianus
gcggcttctaaacaaccagtgcaac

SEQ ID NO: 34937 - DNA, 25 bp, Saccharomyces pastorianus
tatagcaactaccaccatcgcgaga

SEQ ID NO: 34938 - DNA, 25 bp, Saccharomyces pastorianus
gttcaacgactctacagtcaattgt

SEQ ID NO: 34939 - DNA, 25 bp, Saccharomyces pastorianus
acgaagaggttgaaggtgtgcccat

SEQ ID NO: 34940 - DNA, 25 bp, Saccharomyces pastorianus
gtgtgcccatattgatgctggctaa

SEQ ID NO: 34941 - DNA, 25 bp, Saccharomyces pastorianus
aatgtggccacgatacccgttgata

SEQ ID NO: 34942 - DNA, 25 bp, Saccharomyces pastorianus
ggacagttcagatagagagcgactc

SEQ ID NO: 34943 - DNA, 25 bp, Saccharomyces pastorianus
gggttttaccaatcagtgcgttgac

SEQ ID NO: 34944 - DNA, 25 bp, Saccharomyces pastorianus
tgaatggatgattgtcaggctggac

SEQ ID NO: 34945 - DNA, 25 bp, Saccharomyces pastorianus
gtaagacgacgttcctggagacatt

SEQ ID NO: 34946 - DNA, 25 bp, Saccharomyces pastorianus
gagcgactcgacgaatgttcaacga

SEQ ID NO: 34947 - DNA, 25 bp, Saccharomyces pastorianus
atacagcctacagtgggacagaatg

SEQ ID NO: 34948 - DNA, 25 bp, Saccharomyces pastorianus
gaaggtgtcaaagatgctcttgaat

SEQ ID NO: 34949 - DNA, 25 bp, Saccharomyces pastorianus
gactcaacacaacaaagccgtcttg

SEQ ID NO: 34950 - DNA, 25 bp, Saccharomyces pastorianus
ggagagacgtgcagctatggcttta

SEQ ID NO: 34951 - DNA, 25 bp, Saccharomyces pastorianus
acacttcgtgggttttatggctaga

SEQ ID NO: 34952 - DNA, 25 bp, Saccharomyces pastorianus
tattttccactataggccctcacac

SEQ ID NO: 34953 - DNA, 25 bp, Saccharomyces pastorianus
gtcttggctgccaatatctaccaaa

SEQ ID NO: 34954 - DNA, 25 bp, Saccharomyces pastorianus
gaaacaagcatcgattagaccatac

SEQ ID NO: 34955 - DNA, 25 bp, Saccharomyces pastorianus
acgatgtattcggtttgccaaatta

SEQ ID NO: 34956 - DNA, 25 bp, Saccharomyces pastorianus
tagagacggtgctatgttccccaat

SEQ ID NO: 34957 - DNA, 25 bp, Saccharomyces pastorianus
ctatggctttagctcgtaacgaatt

SEQ ID NO: 34958 - DNA, 25 bp, Saccharomyces pastorianus
cttacagaccactaatggcccattt

SEQ ID NO: 34959 - DNA, 25 bp, Saccharomyces pastorianus
tgacgccaacgggttacaaaatgaa

SEQ ID NO: 34960 - DNA, 25 bp, Saccharomyces pastorianus
ccaccttcgccttggatgaatggaa

SEQ ID NO: 34961 - DNA, 25 bp, Saccharomyces pastorianus
gggacaagccagtctctgtcaatgg

SEQ ID NO: 34962 - DNA, 25 bp, Saccharomyces pastorianus
gattgggagtcctacgatttcgcca

SEQ ID NO: 34963 - DNA, 25 bp, Saccharomyces pastorianus
ccaagtatttgttcggctgtctcat

SEQ ID NO: 34964 - DNA, 25 bp, Saccharomyces pastorianus
acaccctttggagctgttgggcaag

SEQ ID NO: 34965 - DNA, 25 bp, Saccharomyces pastorianus
gctgtctcatcatctacggcgaaaa

SEQ ID NO: 34966 - DNA, 25 bp, Saccharomyces pastorianus
gttctggcagaactacaacccggag

SEQ ID NO: 34967 - DNA, 25 bp, Saccharomyces pastorianus
gagtactccctctggaaggttacct

SEQ ID NO: 34968 - DNA, 25 bp, Saccharomyces pastorianus
aagaactgaccttgaccttcatgtc

SEQ ID NO: 34969 - DNA, 25 bp, Saccharomyces pastorianus
ttcttgaacaggttggtcggctcca

SEQ ID NO: 34970 - DNA, 25 bp, Saccharomyces pastorianus
tttccttcaccgataaaccattgtc

SEQ ID NO: 34971 - DNA, 25 bp, Saccharomyces pastorianus
acagctgctgaagacgaggtatcca

SEQ ID NO: 34972 - DNA, 25 bp, Saccharomyces pastorianus
gcaaacaacaagagtcgtcccaata

SEQ ID NO: 34973 - DNA, 25 bp, Saccharomyces pastorianus
atcggcaaatagactggcggctcat

SEQ ID NO: 34974 - DNA, 25 bp, Saccharomyces pastorianus
gaggtatccagaccttcgcagctac

SEQ ID NO: 34975 - DNA, 25 bp, Saccharomyces pastorianus
tgggatacttaataacctgttgact

SEQ ID NO: 34976 - DNA, 25 bp, Saccharomyces pastorianus
atctcttgatattaacggactacgc

SEQ ID NO: 34977 - DNA, 25 bp, Saccharomyces pastorianus
tgttgactacgctcatccaggacat

SEQ ID NO: 34978 - DNA, 25 bp, Saccharomyces pastorianus
gtcgtcccaatatattcactgtgaa

SEQ ID NO: 34979 - DNA, 25 bp, Saccharomyces pastorianus
acgacccaaacggatctcttgatat

SEQ ID NO: 34980 - DNA, 25 bp, Saccharomyces pastorianus
tcgtggcgcaggaaaccactcaaca

SEQ ID NO: 34981 - DNA, 25 bp, Saccharomyces pastorianus
tcatccaggacatcgtggcgcagga

SEQ ID NO: 34982 - DNA, 25 bp, Saccharomyces pastorianus
cgatctgcagccatggtttcaccaa

SEQ ID NO: 34983 - DNA, 25 bp, Saccharomyces pastorianus
aaaggcaggatagaactcaaggagt

SEQ ID NO: 34984 - DNA, 25 bp, Saccharomyces pastorianus
caaggagtttgattcgcacattcta

SEQ ID NO: 34985 - DNA, 25 bp, Saccharomyces pastorianus
tggtttcaccaaccttaaaggctat

SEQ ID NO: 34986 - DNA, 25 bp, Saccharomyces pastorianus
gctattattgagggctccttcaagg

SEQ ID NO: 34987 - DNA, 25 bp, Saccharomyces pastorianus
gattcgcacattctagaaaaagttg

SEQ ID NO: 34988 - DNA, 25 bp, Saccharomyces pastorianus
gttatccttgcctcaaacgataata

SEQ ID NO: 34989 - DNA, 25 bp, Saccharomyces pastorianus
gtacgaaataccacgatctgcagcc

SEQ ID NO: 34990 - DNA, 25 bp, Saccharomyces pastorianus
caaatacagcggtgttgagggagat

SEQ ID NO: 34991 - DNA, 25 bp, Saccharomyces pastorianus
atgtctcaagatccagttatccttg

SEQ ID NO: 34992 - DNA, 25 bp, Saccharomyces pastorianus
aagatccagttatccttgcctcaaa

SEQ ID NO: 34993 - DNA, 25 bp, Saccharomyces pastorianus
aattggctacatgcccttttataga

SEQ ID NO: 34994 - DNA, 25 bp, Saccharomyces pastorianus
ttcgaccaactgatgcaatttgctc

SEQ ID NO: 34995 - DNA, 25 bp, Saccharomyces pastorianus
acaatgtaattcaactggcgggcaa

SEQ ID NO: 34996 - DNA, 25 bp, Saccharomyces pastorianus
gatacctggtctttcttaccaagaa

SEQ ID NO: 34997 - DNA, 25 bp, Saccharomyces pastorianus
aaatggctagcgatgtcaccgggct

SEQ ID NO: 34998 - DNA, 25 bp, Saccharomyces pastorianus
tcaccgggctgcttctaagacaaga

SEQ ID NO: 34999 - DNA, 25 bp, Saccharomyces pastorianus
atgacattggatcaaacgctttcaa

SEQ ID NO: 35000 - DNA, 25 bp, Saccharomyces pastorianus
gggtgtaccaggagtctctaggcaa

SEQ ID NO: 35001 - DNA, 25 bp, Saccharomyces pastorianus
tcggtatttcattcgctgatatgac

SEQ ID NO: 35002 - DNA, 25 bp, Saccharomyces pastorianus
attataccggccaatgaaccagaac

SEQ ID NO: 35003 - DNA, 25 bp, Saccharomyces pastorianus
gaagcggcttcttatgtcaatatga

SEQ ID NO: 35004 - DNA, 25 bp, Saccharomyces pastorianus
aagtataagttcatgggcccagacg

SEQ ID NO: 35005 - DNA, 25 bp, Saccharomyces pastorianus
ggtatcgtaaagcaagccaaggtta

SEQ ID NO: 35006 - DNA, 25 bp, Saccharomyces pastorianus
gaattgtcatgctgttactaccgaa

SEQ ID NO: 35007 - DNA, 25 bp, Saccharomyces pastorianus
aagaacgctttaatgggtctaagat

SEQ ID NO: 35008 - DNA, 25 bp, Saccharomyces pastorianus
gagatgtttatgtgttgaatttgcc

SEQ ID NO: 35009 - DNA, 25 bp, Saccharomyces pastorianus
aagatgccagcgagtccaacaagaa

SEQ ID NO: 35010 - DNA, 25 bp, Saccharomyces pastorianus
agcattggctcgtaaagctgtggta

SEQ ID NO: 35011 - DNA, 25 bp, Saccharomyces pastorianus
aacagttgaaacaggcaaggaccaa

SEQ ID NO: 35012 - DNA, 25 bp, Saccharomyces pastorianus
atgggcccagacgagattgaatctc

SEQ ID NO: 35013 - DNA, 25 bp, Saccharomyces pastorianus
ggtaggatttgccacagaagtaaag

SEQ ID NO: 35014 - DNA, 25 bp, Saccharomyces pastorianus
agatgatgaagctgccgaagatgcc

SEQ ID NO: 35015 - DNA, 25 bp, Saccharomyces pastorianus
atctatggtctgtcggttgtatctt

SEQ ID NO: 35016 - DNA, 25 bp, Saccharomyces pastorianus
gaaagtgatatacccgtcagtgaga

SEQ ID NO: 35017 - DNA, 25 bp, Saccharomyces pastorianus
aatcttcagggatcactgcaggcgc

SEQ ID NO: 35018 - DNA, 25 bp, Saccharomyces pastorianus
tgcaggcgccgcagcaaatgcttta

SEQ ID NO: 35019 - DNA, 25 bp, Saccharomyces pastorianus
cggccgctgcggtttcaggaaataa

SEQ ID NO: 35020 - DNA, 25 bp, Saccharomyces pastorianus
gattgatgcctttaacgctttagaa

SEQ ID NO: 35021 - DNA, 25 bp, Saccharomyces pastorianus
gataggcttacaacccatattcaaa

SEQ ID NO: 35022 - DNA, 25 bp, Saccharomyces pastorianus
gcattgagtcttctttaccacttgt

SEQ ID NO: 35023 - DNA, 25 bp, Saccharomyces pastorianus
aacgacatcatgaatctcggatcaa

SEQ ID NO: 35024 - DNA, 25 bp, Saccharomyces pastorianus
tgaagttcttggtaccccggatcaa

SEQ ID NO: 35025 - DNA, 25 bp, Saccharomyces pastorianus
ttggctacctggtatcattctgcag

SEQ ID NO: 35026 - DNA, 25 bp, Saccharomyces pastorianus
ttttaggcccactcaattacacatg

SEQ ID NO: 35027 - DNA, 25 bp, Saccharomyces pastorianus
ggtacggtcccaacaataacgtcat

SEQ ID NO: 35028 - DNA, 25 bp, Saccharomyces pastorianus
aacaatgacgctttttaggcccact

SEQ ID NO: 35029 - DNA, 25 bp, Saccharomyces pastorianus
aacaaactgatcttgtctggcacaa

SEQ ID NO: 35030 - DNA, 25 bp, Saccharomyces pastorianus
ttcaatagacctttcgaactcgtat

SEQ ID NO: 35031 - DNA, 25 bp, Saccharomyces pastorianus
aattctctcattactttgaccggat

SEQ ID NO: 35032 - DNA, 25 bp, Saccharomyces pastorianus
gtctggcacaatagcttacgttaca

SEQ ID NO: 35033 - DNA, 25 bp, Saccharomyces pastorianus
tatccggtgcgcatttgttttagta

SEQ ID NO: 35034 - DNA, 25 bp, Saccharomyces pastorianus
caagctgcccaacttcttaaacggg

SEQ ID NO: 35035 - DNA, 25 bp, Saccharomyces pastorianus
tatctctgatgatctcaagctgccc

SEQ ID NO: 35036 - DNA, 25 bp, Saccharomyces pastorianus
aatactaccgctttttctactatgg

SEQ ID NO: 35037 - DNA, 25 bp, Saccharomyces pastorianus
gaattcctatttttccagaggcact

SEQ ID NO: 35038 - DNA, 25 bp, Saccharomyces pastorianus
ggcatactacgttcatagcagctat

SEQ ID NO: 35039 - DNA, 25 bp, Saccharomyces pastorianus
aattgccgttctatcgtgagacctg

SEQ ID NO: 35040 - DNA, 25 bp, Saccharomyces pastorianus
gacaccggaacgtatcggcatacta

SEQ ID NO: 35041 - DNA, 25 bp, Saccharomyces pastorianus
atcgtgagacctgtgcttattcggc

SEQ ID NO: 35042 - DNA, 25 bp, Saccharomyces pastorianus
gctgcctttatattgagcgtgccaa

SEQ ID NO: 35043 - DNA, 25 bp, Saccharomyces pastorianus
gactcgcagtgatcagaattcctat

SEQ ID NO: 35044 - DNA, 25 bp, Saccharomyces pastorianus
aggacagccaatgacgcgcttttac

SEQ ID NO: 35045 - DNA, 25 bp, Saccharomyces pastorianus
ggcacttttatgaaccctcattctc

SEQ ID NO: 35046 - DNA, 25 bp, Saccharomyces pastorianus
ggaatgcgatattgagcccacacag

SEQ ID NO: 35047 - DNA, 25 bp, Saccharomyces pastorianus
attcacttcaagaccattccgatgg

SEQ ID NO: 35048 - DNA, 25 bp, Saccharomyces pastorianus
tattacagaggatccgacggtccag

SEQ ID NO: 35049 - DNA, 25 bp, Saccharomyces pastorianus
taagagacccagaagcgcagacaaa

SEQ ID NO: 35050 - DNA, 25 bp, Saccharomyces pastorianus
tactgccgcatatctgctcaaattg

SEQ ID NO: 35051 - DNA, 25 bp, Saccharomyces pastorianus
gggttcgccagaaaagatgctctaa

SEQ ID NO: 35052 - DNA, 25 bp, Saccharomyces pastorianus
gaaggctcagatgtcgatgtcgatg

SEQ ID NO: 35053 - DNA, 25 bp, Saccharomyces pastorianus
atagtggtaacctcatcgagctcca

SEQ ID NO: 35054 - DNA, 25 bp, Saccharomyces pastorianus
ggcattccaatacattgacctgtca

SEQ ID NO: 35055 - DNA, 25 bp, Saccharomyces pastorianus
tgaagtgttcctcaaacaagcggca

SEQ ID NO: 35056 - DNA, 25 bp, Saccharomyces pastorianus
cagttcggaccccataatacaggaa

SEQ ID NO: 35057 - DNA, 25 bp, Saccharomyces pastorianus
aaagtgcattcgctggtactgccgc

SEQ ID NO: 35058 - DNA, 25 bp, Saccharomyces pastorianus
agcccactgaattctgtcatacaag

SEQ ID NO: 35059 - DNA, 25 bp, Saccharomyces pastorianus
agacttgttcccaggcattatctcc

SEQ ID NO: 35060 - DNA, 25 bp, Saccharomyces pastorianus
gaagactaactcttctgctggtgcc

SEQ ID NO: 35061 - DNA, 25 bp, Saccharomyces pastorianus
ggccaagttgcacgccgtcactatt

SEQ ID NO: 35062 - DNA, 25 bp, Saccharomyces pastorianus
gatcaagaaaaactagccaagctac

SEQ ID NO: 35063 - DNA, 25 bp, Saccharomyces pastorianus
gttgtccgctaacaataaagtcggt

SEQ ID NO: 35064 - DNA, 25 bp, Saccharomyces pastorianus
aagttgcaaagtcaactggccaagt

SEQ ID NO: 35065 - DNA, 25 bp, Saccharomyces pastorianus
aagtcaactggccaagttgcacgcc

SEQ ID NO: 35066 - DNA, 25 bp, Saccharomyces pastorianus
atccaggccttgtcccaattggcag

SEQ ID NO: 35067 - DNA, 25 bp, Saccharomyces pastorianus
aagaaaagaacttgcaagacttgtt

SEQ ID NO: 35068 - DNA, 25 bp, Saccharomyces pastorianus
ggacgaagctattcctgaattagtc

SEQ ID NO: 35069 - DNA, 25 bp, Saccharomyces pastorianus
ggccttgtcccaattggcagcccaa

SEQ ID NO: 35070 - DNA, 25 bp, Saccharomyces pastorianus
gctcattgccaacccatagtattgt

SEQ ID NO: 35071 - DNA, 25 bp, Saccharomyces pastorianus
aagacaattcagttcgagcaccatg

SEQ ID NO: 35072 - DNA, 25 bp, Saccharomyces pastorianus
atttaaacaaccacgtcactactca

SEQ ID NO: 35073 - DNA, 25 bp, Saccharomyces pastorianus
agtactccaactttatcttcatcaa

SEQ ID NO: 35074 - DNA, 25 bp, Saccharomyces pastorianus
catgggtaattttggcaggccacca

SEQ ID NO: 35075 - DNA, 25 bp, Saccharomyces pastorianus
aaactcgtttgagctcattgccaac

SEQ ID NO: 35076 - DNA, 25 bp, Saccharomyces pastorianus
tagcaatatagtggctcctcctaca

SEQ ID NO: 35077 - DNA, 25 bp, Saccharomyces pastorianus
attggtaatccctcctgtatagtaa

SEQ ID NO: 35078 - DNA, 25 bp, Saccharomyces pastorianus
gtgtttaatcaacctcctgtttcta

SEQ ID NO: 35079 - DNA, 25 bp, Saccharomyces pastorianus
gctgatgtaagctctcctagtactg

SEQ ID NO: 35080 - DNA, 25 bp, Saccharomyces pastorianus
acgctgccaagccaaacaatgtgtt

SEQ ID NO: 35081 - DNA, 25 bp, Saccharomyces pastorianus
ataccctctattcttttgagacctc

SEQ ID NO: 35082 - DNA, 25 bp, Saccharomyces pastorianus
ttgctggattccattactgggccat

SEQ ID NO: 35083 - DNA, 25 bp, Saccharomyces pastorianus
gttgaatatatctcctctcgcgtag

SEQ ID NO: 35084 - DNA, 25 bp, Saccharomyces pastorianus
ttctcaggtcaaagggtgcgtttca

SEQ ID NO: 35085 - DNA, 25 bp, Saccharomyces pastorianus
gggccatccgtatatggtcatacct

SEQ ID NO: 35086 - DNA, 25 bp, Saccharomyces pastorianus
ggtcataccttgttgttctcacaat

SEQ ID NO: 35087 - DNA, 25 bp, Saccharomyces pastorianus
ggtaaccactctgacgaattgactt

SEQ ID NO: 35088 - DNA, 25 bp, Saccharomyces pastorianus
atttttcccggtcaaagtcacacat

SEQ ID NO: 35089 - DNA, 25 bp, Saccharomyces pastorianus
acaggtcaacactgctgagttccca

SEQ ID NO: 35090 - DNA, 25 bp, Saccharomyces pastorianus
tgagttcccatcagacacttttatt

SEQ ID NO: 35091 - DNA, 25 bp, Saccharomyces pastorianus
tgaagaacttcccaacgcaagcggt

SEQ ID NO: 35092 - DNA, 25 bp, Saccharomyces pastorianus
ggtcgttactctactatctattcta

SEQ ID NO: 35093 - DNA, 25 bp, Saccharomyces pastorianus
aaaatggtaccgtcactgctgccaa

SEQ ID NO: 35094 - DNA, 25 bp, Saccharomyces pastorianus
tgaattcaacgaggctttctccgtc

SEQ ID NO: 35095 - DNA, 25 bp, Saccharomyces pastorianus
ggtgctgcagctatcattttagtct

SEQ ID NO: 35096 - DNA, 25 bp, Saccharomyces pastorianus
agcagatttcacatgggccccatct

SEQ ID NO: 35097 - DNA, 25 bp, Saccharomyces pastorianus
atctcttgcagttccaaaggctttg

SEQ ID NO: 35098 - DNA, 25 bp, Saccharomyces pastorianus
atgtatacggtggtgcagtcgcttt

SEQ ID NO: 35099 - DNA, 25 bp, Saccharomyces pastorianus
taaaacccttggctatcgtcaaagg

SEQ ID NO: 35100 - DNA, 25 bp, Saccharomyces pastorianus
atccattgggatgttcgggtgccag

SEQ ID NO: 35101 - DNA, 25 bp, Saccharomyces pastorianus
aggctttgaaacatgctggtatcga

SEQ ID NO: 35102 - DNA, 25 bp, Saccharomyces pastorianus
gaagcagcccatttaccagcagatt

SEQ ID NO: 35103 - DNA, 25 bp, Saccharomyces pastorianus
aagttccagccctatcggacgaagt

SEQ ID NO: 35104 - DNA, 25 bp, Saccharomyces pastorianus
atatcggacgatttgttttcagtgt

SEQ ID NO: 35105 - DNA, 25 bp, Saccharomyces pastorianus
aacccatggttgaaggctcaccaaa

SEQ ID NO: 35106 - DNA, 25 bp, Saccharomyces pastorianus
aagttcgtcgatggacagtacacct

SEQ ID NO: 35107 - DNA, 25 bp, Saccharomyces pastorianus
gaaataccacatcttgccgttgacc

SEQ ID NO: 35108 - DNA, 25 bp, Saccharomyces pastorianus
ttttgcgaacaataaccacgtctta

SEQ ID NO: 35109 - DNA, 25 bp, Saccharomyces pastorianus
caaagagggccctttgtctcaagtt

SEQ ID NO: 35110 - DNA, 25 bp, Saccharomyces pastorianus
gaaaattcttcctatatcggacgat

SEQ ID NO: 35111 - DNA, 25 bp, Saccharomyces pastorianus
tttcttctttgacttcgttcaccaa

SEQ ID NO: 35112 - DNA, 25 bp, Saccharomyces pastorianus
gttttgcaactgaacccatatacaa

SEQ ID NO: 35113 - DNA, 25 bp, Saccharomyces pastorianus
gaacaagaccaacaacagccgcaag

SEQ ID NO: 35114 - DNA, 25 bp, Saccharomyces pastorianus
atctgttttcaagttgacgctgcaa

SEQ ID NO: 35115 - DNA, 25 bp, Saccharomyces pastorianus
ggaactcctgtatgttgggctcgaa

SEQ ID NO: 35116 - DNA, 25 bp, Saccharomyces pastorianus
gcaagtgcacgacgccaagaagtac

SEQ ID NO: 35117 - DNA, 25 bp, Saccharomyces pastorianus
ggcgttttcgtaatgaaggactctc

SEQ ID NO: 35118 - DNA, 25 bp, Saccharomyces pastorianus
caacgacggcgccaactacaaaaat

SEQ ID NO: 35119 - DNA, 25 bp, Saccharomyces pastorianus
ggaacttttgttccaggtgctgatg

SEQ ID NO: 35120 - DNA, 25 bp, Saccharomyces pastorianus
atagcccagaatcttatcttggacg

SEQ ID NO: 35121 - DNA, 25 bp, Saccharomyces pastorianus
aaatcgtcatattgccaggaactgt

SEQ ID NO: 35122 - DNA, 25 bp, Saccharomyces pastorianus
gagaacatctccaagtcgaagctaa

SEQ ID NO: 35123 - DNA, 25 bp, Saccharomyces pastorianus
tagacagactacgatcgggcgcgca

SEQ ID NO: 35124 - DNA, 25 bp, Saccharomyces pastorianus
aagtcgggtgacatcttcttcgcag

SEQ ID NO: 35125 - DNA, 25 bp, Saccharomyces pastorianus
attcttcctaatggtcagccgaaag

SEQ ID NO: 35126 - DNA, 25 bp, Saccharomyces pastorianus
aagaatgtgccacgtgcggtgacac

SEQ ID NO: 35127 - DNA, 25 bp, Saccharomyces pastorianus
agatggtcctattcattgcagcctc

SEQ ID NO: 35128 - DNA, 25 bp, Saccharomyces pastorianus
ggatactgctgtcaggccaaactta

SEQ ID NO: 35129 - DNA, 25 bp, Saccharomyces pastorianus
ggaaaggacctttctgcagcacaga

SEQ ID NO: 35130 - DNA, 25 bp, Saccharomyces pastorianus
agatcctcttggtgagcctgtacat

SEQ ID NO: 35131 - DNA, 25 bp, Saccharomyces pastorianus
gaatcgccgtacgaagcaccatttc

SEQ ID NO: 35132 - DNA, 25 bp, Saccharomyces pastorianus
ttgcagcctctcctgaatattgcag

SEQ ID NO: 35133 - DNA, 25 bp, Saccharomyces pastorianus
ggaccggatgggaacgttgaactat

SEQ ID NO: 35134 - DNA, 25 bp, Saccharomyces pastorianus
ctaaatatcgctctgggcccaaaat

SEQ ID NO: 35135 - DNA, 25 bp, Saccharomyces pastorianus
gcaccatttcgaccggtttgtacag

SEQ ID NO: 35136 - DNA, 25 bp, Saccharomyces pastorianus
tgcggacgctccattagactttaat

SEQ ID NO: 35137 - DNA, 25 bp, Saccharomyces pastorianus
gaaaaatcgaatgctgacacagtag

SEQ ID NO: 35138 - DNA, 25 bp, Saccharomyces pastorianus
aagaggataccaaggcgttcgcagg

SEQ ID NO: 35139 - DNA, 25 bp, Saccharomyces pastorianus
taccttatatgggagtgcggacgct

SEQ ID NO: 35140 - DNA, 25 bp, Saccharomyces pastorianus
gattgtccacaacaaccaaatggtt

SEQ ID NO: 35141 - DNA, 25 bp, Saccharomyces pastorianus
gtcgattcattatcaaatgggccca

SEQ ID NO: 35142 - DNA, 25 bp, Saccharomyces pastorianus
atgcgatgagttttgctatcttaac

SEQ ID NO: 35143 - DNA, 25 bp, Saccharomyces pastorianus
aaaccagtcacattgggcattaggg

SEQ ID NO: 35144 - DNA, 25 bp, Saccharomyces pastorianus
aaatgggcccaatgcgatgagtttt

SEQ ID NO: 35145 - DNA, 25 bp, Saccharomyces pastorianus
gtgattttaagactttagcgcccaa

SEQ ID NO: 35146 - DNA, 25 bp, Saccharomyces pastorianus
aaaaccataggctacgtcgattcat

SEQ ID NO: 35147 - DNA, 25 bp, Saccharomyces pastorianus
tgcagttgtactgatcgtcactctg

SEQ ID NO: 35148 - DNA, 25 bp, Saccharomyces pastorianus
gatgatacggatactgcttctgcct

SEQ ID NO: 35149 - DNA, 25 bp, Saccharomyces pastorianus
aagattggccctcattaaagataga

SEQ ID NO: 35150 - DNA, 25 bp, Saccharomyces pastorianus
aattcaactgatccttactctgatg

SEQ ID NO: 35151 - DNA, 25 bp, Saccharomyces pastorianus
aacgctggtcccgtcaaagtggaag

SEQ ID NO: 35152 - DNA, 25 bp, Saccharomyces pastorianus
gaattcccgcgattggctgatttgt

SEQ ID NO: 35153 - DNA, 25 bp, Saccharomyces pastorianus
gatggttaagcgttaccactttgtt

SEQ ID NO: 35154 - DNA, 25 bp, Saccharomyces pastorianus
gtgtgttgacattctccattcataa

SEQ ID NO: 35155 - DNA, 25 bp, Saccharomyces pastorianus
gatcgtcactctggttgttaacttt

SEQ ID NO: 35156 - DNA, 25 bp, Saccharomyces pastorianus
gcagcctttttgaaaattcttgccg

SEQ ID NO: 35157 - DNA, 25 bp, Saccharomyces pastorianus
atgtttcttcacaatctccattgcc

SEQ ID NO: 35158 - DNA, 25 bp, Saccharomyces pastorianus
ttggagactccaccttgcagaaatg

SEQ ID NO: 35159 - DNA, 25 bp, Saccharomyces pastorianus
gcatcttcaggtctctgtcaaatct

SEQ ID NO: 35160 - DNA, 25 bp, Saccharomyces pastorianus
aacttggatgagatctgtcacggat

SEQ ID NO: 35161 - DNA, 25 bp, Saccharomyces pastorianus
attgttggcaacacgcaacttccag

SEQ ID NO: 35162 - DNA, 25 bp, Saccharomyces pastorianus
aatttcatcatcgtcatgcccagtg

SEQ ID NO: 35163 - DNA, 25 bp, Saccharomyces pastorianus
gcgcatctccacaaacatcaagttg

SEQ ID NO: 35164 - DNA, 25 bp, Saccharomyces pastorianus
gaactgcctactaagtctttacgaa

SEQ ID NO: 35165 - DNA, 25 bp, Saccharomyces pastorianus
gggcaaacctccgaattgtttcctg

SEQ ID NO: 35166 - DNA, 25 bp, Saccharomyces pastorianus
aatgggaaatcttgcgcatctccac

SEQ ID NO: 35167 - DNA, 25 bp, Saccharomyces pastorianus
gttatctagcgaacaacggagactc

SEQ ID NO: 35168 - DNA, 25 bp, Saccharomyces pastorianus
gaattgtttcctgcccatgagtaaa

SEQ ID NO: 35169 - DNA, 25 bp, Saccharomyces pastorianus
gttttcggttataccattccagcaa

SEQ ID NO: 35170 - DNA, 25 bp, Saccharomyces pastorianus
gtgttacttctatccaacgaagcat

SEQ ID NO: 35171 - DNA, 25 bp, Saccharomyces pastorianus
gtcgattaacatatcctgcattcag

SEQ ID NO: 35172 - DNA, 25 bp, Saccharomyces pastorianus
gttaatcgatcaactttccccagta

SEQ ID NO: 35173 - DNA, 25 bp, Saccharomyces pastorianus
aactaccgttttagtcatagtgcaa

SEQ ID NO: 35174 - DNA, 25 bp, Saccharomyces pastorianus
accattccagcaattgttatcacaa

SEQ ID NO: 35175 - DNA, 25 bp, Saccharomyces pastorianus
acaatagtagtaatgccaccgtcaa

SEQ ID NO: 35176 - DNA, 25 bp, Saccharomyces pastorianus
gtaatgccaccgtcaaaaattcttt

SEQ ID NO: 35177 - DNA, 25 bp, Saccharomyces pastorianus
aaagatgcttctgccgtcgattaac

SEQ ID NO: 35178 - DNA, 25 bp, Saccharomyces pastorianus
aacattgggtctgggttattgaaat

SEQ ID NO: 35179 - DNA, 25 bp, Saccharomyces pastorianus
gttatcacaaccatcagacgcaaat

SEQ ID NO: 35180 - DNA, 25 bp, Saccharomyces pastorianus
ggctcatcccagtacatatcagaac

SEQ ID NO: 35181 - DNA, 25 bp, Saccharomyces pastorianus
tgaaatgctaagagtaccctcccca

SEQ ID NO: 35182 - DNA, 25 bp, Saccharomyces pastorianus
aaccgttattggctcgcacaaactc

SEQ ID NO: 35183 - DNA, 25 bp, Saccharomyces pastorianus
acgcagatatcgctgatcctattcc

SEQ ID NO: 35184 - DNA, 25 bp, Saccharomyces pastorianus
atatcagaacttcagccgcaaccgt

SEQ ID NO: 35185 - DNA, 25 bp, Saccharomyces pastorianus
ctatattgcctaccgattcactaag

SEQ ID NO: 35186 - DNA, 25 bp, Saccharomyces pastorianus
gttaaactggtattcctcgcaaagg

SEQ ID NO: 35187 - DNA, 25 bp, Saccharomyces pastorianus
tacagcagtctgaggtccagcaatt

SEQ ID NO: 35188 - DNA, 25 bp, Saccharomyces pastorianus
gatcctattccgctatcgaacataa

SEQ ID NO: 35189 - DNA, 25 bp, Saccharomyces pastorianus
cgaccacagattctccattcaattt

SEQ ID NO: 35190 - DNA, 25 bp, Saccharomyces pastorianus
gtaatattatatcgtctcccttggc

SEQ ID NO: 35191 - DNA, 25 bp, Saccharomyces pastorianus
aagccggtatattagatagcgcctg

SEQ ID NO: 35192 - DNA, 25 bp, Saccharomyces pastorianus
ggcaagagatgctaaaccgatcgaa

SEQ ID NO: 35193 - DNA, 25 bp, Saccharomyces pastorianus
gatagcgcctggattaatggcaaga

SEQ ID NO: 35194 - DNA, 25 bp, Saccharomyces pastorianus
ggctaattcacgtaaggcaagagat

SEQ ID NO: 35195 - DNA, 25 bp, Saccharomyces pastorianus
taaggctagctagattcgggaggaa

SEQ ID NO: 35196 - DNA, 25 bp, Saccharomyces pastorianus
taaaccgatcgaaatactgggaact

SEQ ID NO: 35197 - DNA, 25 bp, Saccharomyces pastorianus
ggtgcgcaacctagtgagacagtaa

SEQ ID NO: 35198 - DNA, 25 bp, Saccharomyces pastorianus
cgggaggaagaatagtccggtctat

SEQ ID NO: 35199 - DNA, 25 bp, Saccharomyces pastorianus
tgtacctatacctaatccattgacc

SEQ ID NO: 35200 - DNA, 25 bp, Saccharomyces pastorianus
ggagttgtacccgtgaaagacatca

SEQ ID NO: 35201 - DNA, 25 bp, Saccharomyces pastorianus
actgggaacttatgtacctatacct

SEQ ID NO: 35202 - DNA, 25 bp, Saccharomyces pastorianus
gcgcagtcacaagcggtatcaatgc

SEQ ID NO: 35203 - DNA, 25 bp, Saccharomyces pastorianus
gacgaagctgtttatggatctgaca

SEQ ID NO: 35204 - DNA, 25 bp, Saccharomyces pastorianus
gaagagattctgacgagttcggtga

SEQ ID NO: 35205 - DNA, 25 bp, Saccharomyces pastorianus
gtatcaatgcgtacctagaagccgt

SEQ ID NO: 35206 - DNA, 25 bp, Saccharomyces pastorianus
agcacatatttcatctactagacca

SEQ ID NO: 35207 - DNA, 25 bp, Saccharomyces pastorianus
gctaaaccctctacgaatgctgatg

SEQ ID NO: 35208 - DNA, 25 bp, Saccharomyces pastorianus
gatgacaccttcaatttcgactcag

SEQ ID NO: 35209 - DNA, 25 bp, Saccharomyces pastorianus
aagatgaggaggttgctcccgcaac

SEQ ID NO: 35210 - DNA, 25 bp, Saccharomyces pastorianus
aagagcggtccagtaagaggtcaaa

SEQ ID NO: 35211 - DNA, 25 bp, Saccharomyces pastorianus
gctgatgatccactaagcgcagtca

SEQ ID NO: 35212 - DNA, 25 bp, Saccharomyces pastorianus
gaagctaacgctggaaacaccacaa

SEQ ID NO: 35213 - DNA, 25 bp, Saccharomyces pastorianus
gaagaccgtctggtcctttacaaag

SEQ ID NO: 35214 - DNA, 25 bp, Saccharomyces pastorianus
agactcaaacaccattgcatccaga

SEQ ID NO: 35215 - DNA, 25 bp, Saccharomyces pastorianus
acatcaattgctctttcattccgta

SEQ ID NO: 35216 - DNA, 25 bp, Saccharomyces pastorianus
aacccacaagcaggattcggaaatt

SEQ ID NO: 35217 - DNA, 25 bp, Saccharomyces pastorianus
gataacggcgttatcctggaaacag

SEQ ID NO: 35218 - DNA, 25 bp, Saccharomyces pastorianus
aactacgacatggttttactagcca

SEQ ID NO: 35219 - DNA, 25 bp, Saccharomyces pastorianus
ttactagccattgacgaaaccattg

SEQ ID NO: 35220 - DNA, 25 bp, Saccharomyces pastorianus
tgcagcaagggttttcagcgatcaa

SEQ ID NO: 35221 - DNA, 25 bp, Saccharomyces pastorianus
ttttgatcttcgaagaccgtctggt

SEQ ID NO: 35222 - DNA, 25 bp, Saccharomyces pastorianus
taaaccacccacaaatgaacctcaa

SEQ ID NO: 35223 - DNA, 25 bp, Saccharomyces pastorianus
ttgacgtcacgatctatttagttgc

SEQ ID NO: 35224 - DNA, 25 bp, Saccharomyces pastorianus
gattcgttctgcgtacaacttattg

SEQ ID NO: 35225 - DNA, 25 bp, Saccharomyces pastorianus
tacgccccacaagtatggtgcagtg

SEQ ID NO: 35226 - DNA, 25 bp, Saccharomyces pastorianus
tcttccccaggtggattttcatgga

SEQ ID NO: 35227 - DNA, 25 bp, Saccharomyces pastorianus
tttaggttgtatccccacaactcta

SEQ ID NO: 35228 - DNA, 25 bp, Saccharomyces pastorianus
aaattgctgggcagtctagtctctt

SEQ ID NO: 35229 - DNA, 25 bp, Saccharomyces pastorianus
aaggctgctgaaggattcgttctgc

SEQ ID NO: 35230 - DNA, 25 bp, Saccharomyces pastorianus
tgacttggcgtttctctgttataat

SEQ ID NO: 35231 - DNA, 25 bp, Saccharomyces pastorianus
ttatgcgcatattcgccaataaggg

SEQ ID NO: 35232 - DNA, 25 bp, Saccharomyces pastorianus
tcaagattagtagcgctacgcctcc

SEQ ID NO: 35233 - DNA, 25 bp, Saccharomyces pastorianus
gcctccgtcagaaagttcactcgaa

SEQ ID NO: 35234 - DNA, 25 bp, Saccharomyces pastorianus
gtgccacaataagcccttgggttta

SEQ ID NO: 35235 - DNA, 25 bp, Saccharomyces pastorianus
gaagcatctcgtcaaatcatcatgg

SEQ ID NO: 35236 - DNA, 25 bp, Saccharomyces pastorianus
tgctggatacgggaaggctctacta

SEQ ID NO: 35237 - DNA, 25 bp, Saccharomyces pastorianus
taagccaactctatcgttccatcaa

SEQ ID NO: 35238 - DNA, 25 bp, Saccharomyces pastorianus
acaaggatcctcagtcaaccaaaat

SEQ ID NO: 35239 - DNA, 25 bp, Saccharomyces pastorianus
gaccactgaagtccctgccgaaaat

SEQ ID NO: 35240 - DNA, 25 bp, Saccharomyces pastorianus
gactctttgagagaactgtctgaaa

SEQ ID NO: 35241 - DNA, 25 bp, Saccharomyces pastorianus
gattctccggtcacaccaggtgaag

SEQ ID NO: 35242 - DNA, 25 bp, Saccharomyces pastorianus
agcagctttagaatcttggacccta

SEQ ID NO: 35243 - DNA, 25 bp, Saccharomyces pastorianus
aaaatggtgctcttcctgggcaagt

SEQ ID NO: 35244 - DNA, 25 bp, Saccharomyces pastorianus
tagaccagcttatgacggctacgaa

SEQ ID NO: 35245 - DNA, 25 bp, Saccharomyces pastorianus
gaattgctagacgattctccggtca

SEQ ID NO: 35246 - DNA, 25 bp, Saccharomyces pastorianus
tacttcgcattctcttttaagcgca

SEQ ID NO: 35247 - DNA, 25 bp, Saccharomyces pastorianus
accactacgttcctactgatgattt

SEQ ID NO: 35248 - DNA, 25 bp, Saccharomyces pastorianus
agacgacttgctccgaactgtggaa

SEQ ID NO: 35249 - DNA, 25 bp, Saccharomyces pastorianus
gctctcaagacggttctccaaagga

SEQ ID NO: 35250 - DNA, 25 bp, Saccharomyces pastorianus
aagcgcattattgacggtacagttc

SEQ ID NO: 35251 - DNA, 25 bp, Saccharomyces pastorianus
agcgctctcccggatatggaatcta

SEQ ID NO: 35252 - DNA, 25 bp, Saccharomyces pastorianus
gatcaagatagtactaccgccgaaa

SEQ ID NO: 35253 - DNA, 25 bp, Saccharomyces pastorianus
ttaagctcataacacaccactacgt

SEQ ID NO: 35254 - DNA, 25 bp, Saccharomyces pastorianus
gaaagatgtcctaaacgcgttttgc

SEQ ID NO: 35255 - DNA, 25 bp, Saccharomyces pastorianus
ggtgcagtagcccaagaagccatta

SEQ ID NO: 35256 - DNA, 25 bp, Saccharomyces pastorianus
gacaagtcccgcatacagcaaagtt

SEQ ID NO: 35257 - DNA, 25 bp, Saccharomyces pastorianus
ggagatctgctctattttaggttac

SEQ ID NO: 35258 - DNA, 25 bp, Saccharomyces pastorianus
agatggtcgccaacggtttactgtg

SEQ ID NO: 35259 - DNA, 25 bp, Saccharomyces pastorianus
ggagaagtctatcgatatgctgaaa

SEQ ID NO: 35260 - DNA, 25 bp, Saccharomyces pastorianus
ggttactcgagtatttccttgttga

SEQ ID NO: 35261 - DNA, 25 bp, Saccharomyces pastorianus
acgtcttccaagaacggctcgtaga

SEQ ID NO: 35262 - DNA, 25 bp, Saccharomyces pastorianus
gaaatttttgcgtagcgttccaaat

SEQ ID NO: 35263 - DNA, 25 bp, Saccharomyces pastorianus
ggaattgacccattatctttgtttg

SEQ ID NO: 35264 - DNA, 25 bp, Saccharomyces pastorianus
gtctccagaatttcgctcaaagttt

SEQ ID NO: 35265 - DNA, 25 bp, Saccharomyces pastorianus
gttccaaatgagcttacgtctgatc

SEQ ID NO: 35266 - DNA, 25 bp, Saccharomyces pastorianus
taatgagctccaagcgtctccagaa

SEQ ID NO: 35267 - DNA, 25 bp, Saccharomyces pastorianus
gaatggaggcgtcatttcctatgaa

SEQ ID NO: 35268 - DNA, 25 bp, Saccharomyces pastorianus
agagtcatattctccttacttcgac

SEQ ID NO: 35269 - DNA, 25 bp, Saccharomyces pastorianus
gagcctttgacttttaccaacagcg

SEQ ID NO: 35270 - DNA, 25 bp, Saccharomyces pastorianus
tatgttatttttgacctaggcggaa

SEQ ID NO: 35271 - DNA, 25 bp, Saccharomyces pastorianus
aatgacttcaatagactcctcagcc

SEQ ID NO: 35272 - DNA, 25 bp, Saccharomyces pastorianus
ggttcatctaaaatacaccctggaa

SEQ ID NO: 35273 - DNA, 25 bp, Saccharomyces pastorianus
tcagccgcccaggtactagatgaaa

SEQ ID NO: 35274 - DNA, 25 bp, Saccharomyces pastorianus
gtgacgttttcatttaccttgctaa

SEQ ID NO: 35275 - DNA, 25 bp, Saccharomyces pastorianus
gattgttagaattccagagcctttg

SEQ ID NO: 35276 - DNA, 25 bp, Saccharomyces pastorianus
aatcatttcctgttacaagaggcgt

SEQ ID NO: 35277 - DNA, 25 bp, Saccharomyces pastorianus
gatacggacgcgattgttgaaagca

SEQ ID NO: 35278 - DNA, 25 bp, Saccharomyces pastorianus
gtcatttcgatcgaaggactccata

SEQ ID NO: 35279 - DNA, 25 bp, Saccharomyces pastorianus
gatctagtggtttcaacgacgacat

SEQ ID NO: 35280 - DNA, 25 bp, Saccharomyces pastorianus
gaacaacacattcgaatccaccatt

SEQ ID NO: 35281 - DNA, 25 bp, Saccharomyces pastorianus
tgaacttacctccttcgagttttgg

SEQ ID NO: 35282 - DNA, 25 bp, Saccharomyces pastorianus
gacatagttggtgcacttaggcgaa

SEQ ID NO: 35283 - DNA, 25 bp, Saccharomyces pastorianus
gacagcactcagcagaatccacatc

SEQ ID NO: 35284 - DNA, 25 bp, Saccharomyces pastorianus
ctatccttgctgaacctagctacaa

SEQ ID NO: 35285 - DNA, 25 bp, Saccharomyces pastorianus
tccggcttcggaaacggctgttgaa

SEQ ID NO: 35286 - DNA, 25 bp, Saccharomyces pastorianus
aggtcggttgccatcggtagaacaa

SEQ ID NO: 35287 - DNA, 25 bp, Saccharomyces pastorianus
gcgaagaattgtaccctctgagcag

SEQ ID NO: 35288 - DNA, 25 bp, Saccharomyces pastorianus
agcgacaaatatcactccgacagca

SEQ ID NO: 35289 - DNA, 25 bp, Saccharomyces pastorianus
aacccggatccaactctgataattc

SEQ ID NO: 35290 - DNA, 25 bp, Saccharomyces pastorianus
atagcattatttctacgccttctgc

SEQ ID NO: 35291 - DNA, 25 bp, Saccharomyces pastorianus
aacagagttccgttcattcaatccc

SEQ ID NO: 35292 - DNA, 25 bp, Saccharomyces pastorianus
tagcaacctctcctagtgcgttaaa

SEQ ID NO: 35293 - DNA, 25 bp, Saccharomyces pastorianus
atgtaaaccataggtacccacccat

SEQ ID NO: 35294 - DNA, 25 bp, Saccharomyces pastorianus
tgatagatccttcaaacctggtcga

SEQ ID NO: 35295 - DNA, 25 bp, Saccharomyces pastorianus
acctaggtcgtccagcattgatgta

SEQ ID NO: 35296 - DNA, 25 bp, Saccharomyces pastorianus
gggacctgtgaacatagcaacctct

SEQ ID NO: 35297 - DNA, 25 bp, Saccharomyces pastorianus
agtctaacctctcttaattcgcagc

SEQ ID NO: 35298 - DNA, 25 bp, Saccharomyces pastorianus
ttccggatacttccccaatgagtag

SEQ ID NO: 35299 - DNA, 25 bp, Saccharomyces pastorianus
tatcactgatatgccttttactcga

SEQ ID NO: 35300 - DNA, 25 bp, Saccharomyces pastorianus
gaatcaaatgttttctcctccactg

SEQ ID NO: 35301 - DNA, 25 bp, Saccharomyces pastorianus
agccctgtacttcttgcagcaggaa

SEQ ID NO: 35302 - DNA, 25 bp, Saccharomyces pastorianus
gaccttatatcatcaatctcttcaa

SEQ ID NO: 35303 - DNA, 25 bp, Saccharomyces pastorianus
caagcttcccaaacttggttgctta

SEQ ID NO: 35304 - DNA, 25 bp, Saccharomyces pastorianus
gaaacgaccgattcagctgctattt

SEQ ID NO: 35305 - DNA, 25 bp, Saccharomyces pastorianus
tgtacaaaactatttcttccggtga

SEQ ID NO: 35306 - DNA, 25 bp, Saccharomyces pastorianus
ttcaagcttgcattacactctttcc

SEQ ID NO: 35307 - DNA, 25 bp, Saccharomyces pastorianus
gacggtccaagttgcgattcatgta

SEQ ID NO: 35308 - DNA, 25 bp, Saccharomyces pastorianus
gatagtgcttttcaagccctgtact

SEQ ID NO: 35309 - DNA, 25 bp, Saccharomyces pastorianus
cggttcaatacttcgatcacagttt

SEQ ID NO: 35310 - DNA, 25 bp, Saccharomyces pastorianus
caaagttcggttccagtttcatcgg

SEQ ID NO: 35311 - DNA, 25 bp, Saccharomyces pastorianus
atatctttgagatgactgtcgctga

SEQ ID NO: 35312 - DNA, 25 bp, Saccharomyces pastorianus
gtagccacttatccgttggacttga

SEQ ID NO: 35313 - DNA, 25 bp, Saccharomyces pastorianus
ggagttgttccatatgtggccttaa

SEQ ID NO: 35314 - DNA, 25 bp, Saccharomyces pastorianus
gacttacccttttgatctgctgaga

SEQ ID NO: 35315 - DNA, 25 bp, Saccharomyces pastorianus
tcttttcaaagttgtcccttccact

SEQ ID NO: 35316 - DNA, 25 bp, Saccharomyces pastorianus
ttaagtactctgaaccggtcgaagg

SEQ ID NO: 35317 - DNA, 25 bp, Saccharomyces pastorianus
tcagtggttactacaagggtcttac

SEQ ID NO: 35318 - DNA, 25 bp, Saccharomyces pastorianus
gaacatagcaaagcctccagggatt

SEQ ID NO: 35319 - DNA, 25 bp, Saccharomyces pastorianus
gggtgtctggccaacaagtcttgga

SEQ ID NO: 35320 - DNA, 25 bp, Saccharomyces pastorianus
cttccactgctgtaagttggctagt

SEQ ID NO: 35321 - DNA, 25 bp, Saccharomyces pastorianus
gtaagtggcggtgttgcgcaaacaa

SEQ ID NO: 35322 - DNA, 25 bp, Saccharomyces pastorianus
agggtcttactgcaaatcttttcaa

SEQ ID NO: 35323 - DNA, 25 bp, Saccharomyces pastorianus
ataaccaaccggctcatataacgtc

SEQ ID NO: 35324 - DNA, 25 bp, Saccharomyces pastorianus
aaattcttcagcagcattctccgat

SEQ ID NO: 35325 - DNA, 25 bp, Saccharomyces pastorianus
ctcgaggccctcaacgttaaagaca

SEQ ID NO: 35326 - DNA, 25 bp, Saccharomyces pastorianus
agcgaacctggtacttcttcaaatt

SEQ ID NO: 35327 - DNA, 25 bp, Saccharomyces pastorianus
acgaggtttacacgccgatttctat

SEQ ID NO: 35328 - DNA, 25 bp, Saccharomyces pastorianus
gcattatcaatggttgctccctcga

SEQ ID NO: 35329 - DNA, 25 bp, Saccharomyces pastorianus
gctccctcgaataccactatagatg

SEQ ID NO: 35330 - DNA, 25 bp, Saccharomyces pastorianus
tctctataagccgatgggaccatat

SEQ ID NO: 35331 - DNA, 25 bp, Saccharomyces pastorianus
atcagtcccgcctaaatacagcata

SEQ ID NO: 35332 - DNA, 25 bp, Saccharomyces pastorianus
ggatacccctttcaagtgcacttgg

SEQ ID NO: 35333 - DNA, 25 bp, Saccharomyces pastorianus
agtcatcgtaccaactctctataag

SEQ ID NO: 35334 - DNA, 25 bp, Saccharomyces pastorianus
attttctcgccagttgtagcatcac

SEQ ID NO: 35335 - DNA, 25 bp, Saccharomyces pastorianus
tttattcaacagcaacacctccata

SEQ ID NO: 35336 - DNA, 25 bp, Saccharomyces pastorianus
gcaaaatcctgggacactgctatcc

SEQ ID NO: 35337 - DNA, 25 bp, Saccharomyces pastorianus
aattacgtgccgtggtgaagctacg

SEQ ID NO: 35338 - DNA, 25 bp, Saccharomyces pastorianus
attgaacgccaatcttactgctctg

SEQ ID NO: 35339 - DNA, 25 bp, Saccharomyces pastorianus
gagatacacccttcaaatgcacttg

SEQ ID NO: 35340 - DNA, 25 bp, Saccharomyces pastorianus
aaagaggatgtgcatcttcctccct

SEQ ID NO: 35341 - DNA, 25 bp, Saccharomyces pastorianus
atgcgcgcctcaattacttctgaag

SEQ ID NO: 35342 - DNA, 25 bp, Saccharomyces pastorianus
gatggacaatactctctcacgaatg

SEQ ID NO: 35343 - DNA, 25 bp, Saccharomyces pastorianus
agatcgggttccaactctgttattt

SEQ ID NO: 35344 - DNA, 25 bp, Saccharomyces pastorianus
tttgttcaaggccttcgacgttaag

SEQ ID NO: 35345 - DNA, 25 bp, Saccharomyces pastorianus
ggagacgctattcctatcgttcaca

SEQ ID NO: 35346 - DNA, 25 bp, Saccharomyces pastorianus
cggtgccggtatggtcgtcaacgac

SEQ ID NO: 35347 - DNA, 25 bp, Saccharomyces pastorianus
gttgccttagtacatccagacatcg

SEQ ID NO: 35348 - DNA, 25 bp, Saccharomyces pastorianus
gtcgtcaacgactatttggccgtca

SEQ ID NO: 35349 - DNA, 25 bp, Saccharomyces pastorianus
tagaggtttgctggttcccacacaa

SEQ ID NO: 35350 - DNA, 25 bp, Saccharomyces pastorianus
tatttggccgtcacaggtctagata

SEQ ID NO: 35351 - DNA, 25 bp, Saccharomyces pastorianus
gtcctctttactacaagtgcctttg

SEQ ID NO: 35352 - DNA, 25 bp, Saccharomyces pastorianus
ggtaacattctagtcgggtcatatt

SEQ ID NO: 35353 - DNA, 25 bp, Saccharomyces pastorianus
gttaaccgcggtagtgctgttgtcg

SEQ ID NO: 35354 - DNA, 25 bp, Saccharomyces pastorianus
gttgcaatgactacgttgccttagt

SEQ ID NO: 35355 - DNA, 25 bp, Saccharomyces pastorianus
agtatcttccgtttgcaagatgctc

SEQ ID NO: 35356 - DNA, 25 bp, Saccharomyces pastorianus
gcgcagactgtgacaagggccctat

SEQ ID NO: 35357 - DNA, 25 bp, Saccharomyces pastorianus
ggcgtatctagagacattccctctt

SEQ ID NO: 35358 - DNA, 25 bp, Saccharomyces pastorianus
caattttttggttgtccctgatgta

SEQ ID NO: 35359 - DNA, 25 bp, Saccharomyces pastorianus
tgggacttcgacaacattggcgtat

SEQ ID NO: 35360 - DNA, 25 bp, Saccharomyces pastorianus
gggcgtatagtcaatttaagctgct

SEQ ID NO: 35361 - DNA, 25 bp, Saccharomyces pastorianus
tcacagcgccgtcatcgtgattgat

SEQ ID NO: 35362 - DNA, 25 bp, Saccharomyces pastorianus
ggacgagttcacctttgattacgga

SEQ ID NO: 35363 - DNA, 25 bp, Saccharomyces pastorianus
tttgtttgacggctgtcacagcgcc

SEQ ID NO: 35364 - DNA, 25 bp, Saccharomyces pastorianus
gagcagggccacgtgtttgtttgac

SEQ ID NO: 35365 - DNA, 25 bp, Saccharomyces pastorianus
gggccctattggtcttatatgccag

SEQ ID NO: 35366 - DNA, 25 bp, Saccharomyces pastorianus
gcgcccactagcgacaacaattttt

SEQ ID NO: 35367 - DNA, 25 bp, Saccharomyces pastorianus
agggttgactcttctgatatccaag

SEQ ID NO: 35368 - DNA, 25 bp, Saccharomyces pastorianus
ggagcacataaacccagtgatcacc

SEQ ID NO: 35369 - DNA, 25 bp, Saccharomyces pastorianus
gagcactcgcaagatagggttgact

SEQ ID NO: 35370 - DNA, 25 bp, Saccharomyces pastorianus
gataaacccgaacatgtgtctcaag

SEQ ID NO: 35371 - DNA, 25 bp, Saccharomyces pastorianus
gccaaaacagagcttgttcgagcat

SEQ ID NO: 35372 - DNA, 25 bp, Saccharomyces pastorianus
agaggccttgtcgaggttgcaacaa

SEQ ID NO: 35373 - DNA, 25 bp, Saccharomyces pastorianus
agtgatcaccgaagccgccaaaaca

SEQ ID NO: 35374 - DNA, 25 bp, Saccharomyces pastorianus
aatgggtgatgactcgagatctgat

SEQ ID NO: 35375 - DNA, 25 bp, Saccharomyces pastorianus
gtatgattcgtttagctgaagcaca

SEQ ID NO: 35376 - DNA, 25 bp, Saccharomyces pastorianus
gtctcaagatgatgtcctaccagtt

SEQ ID NO: 35377 - DNA, 25 bp, Saccharomyces pastorianus
gataaggttattgttcttggcgaag

SEQ ID NO: 35378 - DNA, 25 bp, Saccharomyces pastorianus
ccaactgcggcccaattcaaatcag

SEQ ID NO: 35379 - DNA, 25 bp, Saccharomyces pastorianus
gcggcccaattcaaatcagtatatc

SEQ ID NO: 35380 - DNA, 25 bp, Saccharomyces pastorianus
gtgcatacggtgttcaaatagtggg

SEQ ID NO: 35381 - DNA, 25 bp, Saccharomyces pastorianus
aatatggtgcatacggtgttcaaat

SEQ ID NO: 35382 - DNA, 25 bp, Saccharomyces pastorianus
tgtaaaggaaggtctccaaccacca

SEQ ID NO: 35383 - DNA, 25 bp, Saccharomyces pastorianus
gagccttaactttgtgttgaagcct

SEQ ID NO: 35384 - DNA, 25 bp, Saccharomyces pastorianus
aatcttttatcaacaaaggctttgt

SEQ ID NO: 35385 - DNA, 25 bp, Saccharomyces pastorianus
tgttgaagcctacggaagttttatc

SEQ ID NO: 35386 - DNA, 25 bp, Saccharomyces pastorianus
tacacaagtggattagtttctaaag

SEQ ID NO: 35387 - DNA, 25 bp, Saccharomyces pastorianus
gaaggtctccaaccaccaactgcgg

SEQ ID NO: 35388 - DNA, 25 bp, Saccharomyces pastorianus
aaatctctacaaacagagccttaac

SEQ ID NO: 35389 - DNA, 25 bp, Saccharomyces pastorianus
gaatgtatccgattctgtacgtaga

SEQ ID NO: 35390 - DNA, 25 bp, Saccharomyces pastorianus
tctaatactcatcatttgtgcggga

SEQ ID NO: 35391 - DNA, 25 bp, Saccharomyces pastorianus
acttgacttagttagcttccagaat

SEQ ID NO: 35392 - DNA, 25 bp, Saccharomyces pastorianus
ataatggtggtgtagccgtcgttta

SEQ ID NO: 35393 - DNA, 25 bp, Saccharomyces pastorianus
atggaataatgttgacgcctcgaaa

SEQ ID NO: 35394 - DNA, 25 bp, Saccharomyces pastorianus
cgtcgcttttgatctggtcttgtaa

SEQ ID NO: 35395 - DNA, 25 bp, Saccharomyces pastorianus
atgctattgcattgacgtcgctttt

SEQ ID NO: 35396 - DNA, 25 bp, Saccharomyces pastorianus
gtgaatgtactactagccccgaggg

SEQ ID NO: 35397 - DNA, 25 bp, Saccharomyces pastorianus
gtacgtagatggttcacttgactta

SEQ ID NO: 35398 - DNA, 25 bp, Saccharomyces pastorianus
gactacgcggtgaattctgatccta

SEQ ID NO: 35399 - DNA, 25 bp, Saccharomyces pastorianus
aataatcgtctaaccgttgtggaag

SEQ ID NO: 35400 - DNA, 25 bp, Saccharomyces pastorianus
accacgaggctggtcatgcgattat

SEQ ID NO: 35401 - DNA, 25 bp, Saccharomyces pastorianus
gcgcaaccggtacagcaagagctat

SEQ ID NO: 35402 - DNA, 25 bp, Saccharomyces pastorianus
gaatgttgagctccacagacttgct

SEQ ID NO: 35403 - DNA, 25 bp, Saccharomyces pastorianus
agagctatggtgacgcagtatggta

SEQ ID NO: 35404 - DNA, 25 bp, Saccharomyces pastorianus
ggcagagcattaggtattacttttc

SEQ ID NO: 35405 - DNA, 25 bp, Saccharomyces pastorianus
cgatatcgccgacaatgaggtgatt

SEQ ID NO: 35406 - DNA, 25 bp, Saccharomyces pastorianus
aagagagtgtcatgcccggttggat

SEQ ID NO: 35407 - DNA, 25 bp, Saccharomyces pastorianus
gtacgagacacttgatgcgcatgaa

SEQ ID NO: 35408 - DNA, 25 bp, Saccharomyces pastorianus
gatgtgggccctgtaaatttgtcag

SEQ ID NO: 35409 - DNA, 25 bp, Saccharomyces pastorianus
tctgatctacagagcgcaaccggta

SEQ ID NO: 35410 - DNA, 25 bp, Saccharomyces pastorianus
tacaaggctactattttacccaggg

SEQ ID NO: 35411 - DNA, 25 bp, Saccharomyces pastorianus
ttaccagtgactgccgattcaaacg

SEQ ID NO: 35412 - DNA, 25 bp, Saccharomyces pastorianus
gctatctgatctgcaaactttctgt

SEQ ID NO: 35413 - DNA, 25 bp, Saccharomyces pastorianus
gaacccgctgatttactatctgatt

SEQ ID NO: 35414 - DNA, 25 bp, Saccharomyces pastorianus
gattcaaacgtcacactaccttcaa

SEQ ID NO: 35415 - DNA, 25 bp, Saccharomyces pastorianus
gtatacgctactttactctcagcaa

SEQ ID NO: 35416 - DNA, 25 bp, Saccharomyces pastorianus
gtcaattgaccaaccgttaccagtg

SEQ ID NO: 35417 - DNA, 25 bp, Saccharomyces pastorianus
aatcttgtatctaacgaacccgctg

SEQ ID NO: 35418 - DNA, 25 bp, Saccharomyces pastorianus
ggttttcatttagatggttccccat

SEQ ID NO: 35419 - DNA, 25 bp, Saccharomyces pastorianus
taggtcaattacatccgtcttcaac

SEQ ID NO: 35420 - DNA, 25 bp, Saccharomyces pastorianus
aaaacggatgccatagctgccacag

SEQ ID NO: 35421 - DNA, 25 bp, Saccharomyces pastorianus
taagggccaaccaaatctgcaaaca

SEQ ID NO: 35422 - DNA, 25 bp, Saccharomyces pastorianus
tgagaaatgtttcccgtgttgttga

SEQ ID NO: 35423 - DNA, 25 bp, Saccharomyces pastorianus
acggccatgtcaaagttttttcagt

SEQ ID NO: 35424 - DNA, 25 bp, Saccharomyces pastorianus
gttcgaatcccgtataggccacaag

SEQ ID NO: 35425 - DNA, 25 bp, Saccharomyces pastorianus
gaggtaccgtgtattgcacacctgc

SEQ ID NO: 35426 - DNA, 25 bp, Saccharomyces pastorianus
ggaacagagtacagcaccaccagca

SEQ ID NO: 35427 - DNA, 25 bp, Saccharomyces pastorianus
tgctcaaggaactttttcggaacgt

SEQ ID NO: 35428 - DNA, 25 bp, Saccharomyces pastorianus
agcatcgttattttctaccgtcaag

SEQ ID NO: 35429 - DNA, 25 bp, Saccharomyces pastorianus
gcacacctgcccaattgaatgagtt

SEQ ID NO: 35430 - DNA, 25 bp, Saccharomyces pastorianus
ataacagaatcttccgtcctaagga

SEQ ID NO: 35431 - DNA, 25 bp, Saccharomyces pastorianus
cgattatgctactgccgtgggcgaa

SEQ ID NO: 35432 - DNA, 25 bp, Saccharomyces pastorianus
gcacaagtttccgacgtactgtata

SEQ ID NO: 35433 - DNA, 25 bp, Saccharomyces pastorianus
agccggtggccgttatgataactta

SEQ ID NO: 35434 - DNA, 25 bp, Saccharomyces pastorianus
gactggactggttacttgcctgaaa

SEQ ID NO: 35435 - DNA, 25 bp, Saccharomyces pastorianus
atgttggtgttggttctattgcagc

SEQ ID NO: 35436 - DNA, 25 bp, Saccharomyces pastorianus
tgggacgccggtattgaagcagaat

SEQ ID NO: 35437 - DNA, 25 bp, Saccharomyces pastorianus
gatatcgtcgccattgtccaagaaa

SEQ ID NO: 35438 - DNA, 25 bp, Saccharomyces pastorianus
gttaatgcagccgatatcgtcgcca

SEQ ID NO: 35439 - DNA, 25 bp, Saccharomyces pastorianus
gctggttgtcatatcgctgtgattc

SEQ ID NO: 35440 - DNA, 25 bp, Saccharomyces pastorianus
acaagtctttgtcatggcctttggt

SEQ ID NO: 35441 - DNA, 25 bp, Saccharomyces pastorianus
tccgctccaccaaaaaatgcttcag

SEQ ID NO: 35442 - DNA, 25 bp, Saccharomyces pastorianus
acatgtttgctgaagcctctggtaa

SEQ ID NO: 35443 - DNA, 25 bp, Saccharomyces pastorianus
aaatcccatgcgttggtatttcctt

SEQ ID NO: 35444 - DNA, 25 bp, Saccharomyces pastorianus
ttaagatttccttccatccaaagcc

SEQ ID NO: 35445 - DNA, 25 bp, Saccharomyces pastorianus
gaccggtagacatgaaactgcttcc

SEQ ID NO: 35446 - DNA, 25 bp, Saccharomyces pastorianus
aaccgtttgcggtgccattgacagc

SEQ ID NO: 35447 - DNA, 25 bp, Saccharomyces pastorianus
gggaattccaagttggcccatgcac

SEQ ID NO: 35448 - DNA, 25 bp, Saccharomyces pastorianus
ttggcccatgcaccggtattgaatt

SEQ ID NO: 35449 - DNA, 25 bp, Saccharomyces pastorianus
gacccatacttagtcaccggtatca

SEQ ID NO: 35450 - DNA, 25 bp, Saccharomyces pastorianus
gatggcgagatacctcttgcacaga

SEQ ID NO: 35451 - DNA, 25 bp, Saccharomyces pastorianus
gaactttccggtatcaacgccgaag

SEQ ID NO: 35452 - DNA, 25 bp, Saccharomyces pastorianus
gaggtagttccatcagaattccaag

SEQ ID NO: 35453 - DNA, 25 bp, Saccharomyces pastorianus
gagatcttatcgaagcccactacag

SEQ ID NO: 35454 - DNA, 25 bp, Saccharomyces pastorianus
agcctgtctgtatgccggtttggaa

SEQ ID NO: 35455 - DNA, 25 bp, Saccharomyces pastorianus
gtaaataccacgacgtactggccaa

SEQ ID NO: 35456 - DNA, 25 bp, Saccharomyces pastorianus
ggacaatgaccaaacgctaccactt

SEQ ID NO: 35457 - DNA, 25 bp, Saccharomyces pastorianus
gtgagcgcagattcccttaacatta

SEQ ID NO: 35458 - DNA, 25 bp, Saccharomyces pastorianus
aaggccgccctgagagatagcaact

SEQ ID NO: 35459 - DNA, 25 bp, Saccharomyces pastorianus
gacgagctcgcagacaacggtatat

SEQ ID NO: 35460 - DNA, 25 bp, Saccharomyces pastorianus
agcataggctgtcccaatcgcatga

SEQ ID NO: 35461 - DNA, 25 bp, Saccharomyces pastorianus
gcgcagcggttttccaacgatgtga

SEQ ID NO: 35462 - DNA, 25 bp, Saccharomyces pastorianus
agggtcatgaacgaacgcctgctgc

SEQ ID NO: 35463 - DNA, 25 bp, Saccharomyces pastorianus
gattctcttcgaagacgagctcgca

SEQ ID NO: 35464 - DNA, 25 bp, Saccharomyces pastorianus
tgcgggtctacgacacgaggctata

SEQ ID NO: 35465 - DNA, 25 bp, Saccharomyces pastorianus
agccgtgcacgacaaaatcctattc

SEQ ID NO: 35466 - DNA, 25 bp, Saccharomyces pastorianus
gttccattctcctaggcgtgcaaga

SEQ ID NO: 35467 - DNA, 25 bp, Saccharomyces pastorianus
gtctttaccgataatcaacctacca

SEQ ID NO: 35468 - DNA, 25 bp, Saccharomyces pastorianus
aagcaatcctccaaaagtcaccgta

SEQ ID NO: 35469 - DNA, 25 bp, Saccharomyces pastorianus
gaatcctttaagtcgctcagtgagc

SEQ ID NO: 35470 - DNA, 25 bp, Saccharomyces pastorianus
gactcactcgcaatcgctaatggaa

SEQ ID NO: 35471 - DNA, 25 bp, Saccharomyces pastorianus
tgctagtccagctccaattttgaac

SEQ ID NO: 35472 - DNA, 25 bp, Saccharomyces pastorianus
ggacttaacaccacactttgactca

SEQ ID NO: 35473 - DNA, 25 bp, Saccharomyces pastorianus
taacccggttccgatgagtgaaata

SEQ ID NO: 35474 - DNA, 25 bp, Saccharomyces pastorianus
acaacattctcaagggttccattct

SEQ ID NO: 35475 - DNA, 25 bp, Saccharomyces pastorianus
ataccaatcaatgctgctagtccag

SEQ ID NO: 35476 - DNA, 25 bp, Saccharomyces pastorianus
agaggagtctcggtttccagcgtga

SEQ ID NO: 35477 - DNA, 25 bp, Saccharomyces pastorianus
gaatcatggcgttgtttgaaaactc

SEQ ID NO: 35478 - DNA, 25 bp, Saccharomyces pastorianus
gaacggagaccttggcgaattcaac

SEQ ID NO: 35479 - DNA, 25 bp, Saccharomyces pastorianus
aatttttgaccgtgatttgcaagag

SEQ ID NO: 35480 - DNA, 25 bp, Saccharomyces pastorianus
gattatccagcgatttctcagttga

SEQ ID NO: 35481 - DNA, 25 bp, Saccharomyces pastorianus
gaattgccctggagaacggagacct

SEQ ID NO: 35482 - DNA, 25 bp, Saccharomyces pastorianus
gaaaagttatacgaagctgcacaaa

SEQ ID NO: 35483 - DNA, 25 bp, Saccharomyces pastorianus
acgataacgcgtcggaaatcttggg

SEQ ID NO: 35484 - DNA, 25 bp, Saccharomyces pastorianus
gagtttagtttcaccagtatagatg

SEQ ID NO: 35485 - DNA, 25 bp, Saccharomyces pastorianus
gtttaccaaacgcacgcacgaattg

SEQ ID NO: 35486 - DNA, 25 bp, Saccharomyces pastorianus
ggcgaattcaaccaatgccagaata

SEQ ID NO: 35487 - DNA, 25 bp, Saccharomyces pastorianus
gagcaaaacttgatcgacttcatag

SEQ ID NO: 35488 - DNA, 25 bp, Saccharomyces pastorianus
gagcaatggcaaaggatccagcatt

SEQ ID NO: 35489 - DNA, 25 bp, Saccharomyces pastorianus
tctggacaacgagctcttgcaatca

SEQ ID NO: 35490 - DNA, 25 bp, Saccharomyces pastorianus
gggtacccaatcttcattcaacaaa

SEQ ID NO: 35491 - DNA, 25 bp, Saccharomyces pastorianus
aactccagccagaaacgtctcttgg

SEQ ID NO: 35492 - DNA, 25 bp, Saccharomyces pastorianus
agaggtatcctcgaggtttccaaat

SEQ ID NO: 35493 - DNA, 25 bp, Saccharomyces pastorianus
atcttgaaaaaaccggccttctcat

SEQ ID NO: 35494 - DNA, 25 bp, Saccharomyces pastorianus
caaatgaaactttacgtgcagacga

SEQ ID NO: 35495 - DNA, 25 bp, Saccharomyces pastorianus
gcagtagtattgaactccagccaga

SEQ ID NO: 35496 - DNA, 25 bp, Saccharomyces pastorianus
gctcttgcaatcattgggtacccaa

SEQ ID NO: 35497 - DNA, 25 bp, Saccharomyces pastorianus
gaaattgccgaaaaccaggttgagt

SEQ ID NO: 35498 - DNA, 25 bp, Saccharomyces pastorianus
actgcgttagataaactgtacctga

SEQ ID NO: 35499 - DNA, 25 bp, Saccharomyces pastorianus
aattattcttgttggaccaggtgtt

SEQ ID NO: 35500 - DNA, 25 bp, Saccharomyces pastorianus
ctcaccaggtgtcaagtatgttcag

SEQ ID NO: 35501 - DNA, 25 bp, Saccharomyces pastorianus
gagactatttttcggctgtaggtat

SEQ ID NO: 35502 - DNA, 25 bp, Saccharomyces pastorianus
accaggtgttggtttagccccattg

SEQ ID NO: 35503 - DNA, 25 bp, Saccharomyces pastorianus
gtactaattacattgcgctcttgca

SEQ ID NO: 35504 - DNA, 25 bp, Saccharomyces pastorianus
gatttctttgtctacatccttttct

SEQ ID NO: 35505 - DNA, 25 bp, Saccharomyces pastorianus
gccccattgctatccgtgattaaag

SEQ ID NO: 35506 - DNA, 25 bp, Saccharomyces pastorianus
gctattttctttttatgtggctcat

SEQ ID NO: 35507 - DNA, 25 bp, Saccharomyces pastorianus
gtatccgacaacatgagactatttt

SEQ ID NO: 35508 - DNA, 25 bp, Saccharomyces pastorianus
gatacattggaagattggtcccgta

SEQ ID NO: 35509 - DNA, 25 bp, Saccharomyces pastorianus
gtggtcctagagatccaaacatcga

SEQ ID NO: 35510 - DNA, 25 bp, Saccharomyces pastorianus
tacacagcaatattgtctcccaagg

SEQ ID NO: 35511 - DNA, 25 bp, Saccharomyces pastorianus
gctccgattacccaagggtgccgtt

SEQ ID NO: 35512 - DNA, 25 bp, Saccharomyces pastorianus
agatgccatgtctatacaatcctcc

SEQ ID NO: 35513 - DNA, 25 bp, Saccharomyces pastorianus
agctcatcattttcgtccgttgact

SEQ ID NO: 35514 - DNA, 25 bp, Saccharomyces pastorianus
aacaccgccacctttagatgccatg

SEQ ID NO: 35515 - DNA, 25 bp, Saccharomyces pastorianus
gtctcccaaggaaatactgctagca

SEQ ID NO: 35516 - DNA, 25 bp, Saccharomyces pastorianus
ttttgtagcggatagctcctctaat

SEQ ID NO: 35517 - DNA, 25 bp, Saccharomyces pastorianus
gttaactccgttgggtctatgtcat

SEQ ID NO: 35518 - DNA, 25 bp, Saccharomyces pastorianus
gtctatgtcatcgtcgacttcatcg

SEQ ID NO: 35519 - DNA, 25 bp, Saccharomyces pastorianus
gacttcatcgctcagctcatcattt

SEQ ID NO: 35520 - DNA, 25 bp, Saccharomyces pastorianus
aagcaaatgagaccttgggctgcat

SEQ ID NO: 35521 - DNA, 25 bp, Saccharomyces pastorianus
ttgaccccagaggaaaagcaacctt

SEQ ID NO: 35522 - DNA, 25 bp, Saccharomyces pastorianus
tggaaggccttgaccccagaggaaa

SEQ ID NO: 35523 - DNA, 25 bp, Saccharomyces pastorianus
ttatgaggccaaggcgcaggccgac

SEQ ID NO: 35524 - DNA, 25 bp, Saccharomyces pastorianus
gaccccagaggaaaagcaaccttat

SEQ ID NO: 35525 - DNA, 25 bp, Saccharomyces pastorianus
ggccttgaccccagaggaaaagcaa

SEQ ID NO: 35526 - DNA, 25 bp, Saccharomyces pastorianus
gcaaccttatgaggccaaggcgcag

SEQ ID NO: 35527 - DNA, 25 bp, Saccharomyces pastorianus
gtggaaggccttgaccccagaggaa

SEQ ID NO: 35528 - DNA, 25 bp, Saccharomyces pastorianus
aggccttgaccccagaggaaaagca

SEQ ID NO: 35529 - DNA, 25 bp, Saccharomyces pastorianus
aaagcaaccttatgaggccaaggcg

SEQ ID NO: 35530 - DNA, 25 bp, Saccharomyces pastorianus
ggcgcaggccgacaagaagagatac

SEQ ID NO: 35531 - DNA, 25 bp, Saccharomyces pastorianus
agtggaaggccttgaccccagagga

SEQ ID NO: 35532 - DNA, 25 bp, Saccharomyces pastorianus
ctgtcaatcataccgcctgggaata

SEQ ID NO: 35533 - DNA, 25 bp, Saccharomyces pastorianus
gactctgaattcgacgagcacgtaa

SEQ ID NO: 35534 - DNA, 25 bp, Saccharomyces pastorianus
ggaagagtcgttgccattgggttta

SEQ ID NO: 35535 - DNA, 25 bp, Saccharomyces pastorianus
ggatttcagaacttcgtgctactta

SEQ ID NO: 35536 - DNA, 25 bp, Saccharomyces pastorianus
gggtttatctgttcggtatgcttat

SEQ ID NO: 35537 - DNA, 25 bp, Saccharomyces pastorianus
gagcacattagctggtgccatgtca

SEQ ID NO: 35538 - DNA, 25 bp, Saccharomyces pastorianus
aaattctacgcagggcttgattcaa

SEQ ID NO: 35539 - DNA, 25 bp, Saccharomyces pastorianus
gctaatggtccttacatgcggtagt

SEQ ID NO: 35540 - DNA, 25 bp, Saccharomyces pastorianus
tgaactgtatcttctctgcaacgaa

SEQ ID NO: 35541 - DNA, 25 bp, Saccharomyces pastorianus
gtatgcttatgtgttctgtcaatca

SEQ ID NO: 35542 - DNA, 25 bp, Saccharomyces pastorianus
aaatgtcctgcatgcgactctgaat

SEQ ID NO: 35543 - DNA, 25 bp, Saccharomyces pastorianus
ttttggtgcattatccggtaccgcc

SEQ ID NO: 35544 - DNA, 25 bp, Saccharomyces pastorianus
gaagctcacggatgtggtacatatt

SEQ ID NO: 35545 - DNA, 25 bp, Saccharomyces pastorianus
taagcaataatcatggcctggaaag

SEQ ID NO: 35546 - DNA, 25 bp, Saccharomyces pastorianus
atccggtaccgccttatggttgatg

SEQ ID NO: 35547 - DNA, 25 bp, Saccharomyces pastorianus
gttgatgcgtggtttgtcacctaca

SEQ ID NO: 35548 - DNA, 25 bp, Saccharomyces pastorianus
gcttctcccattgagcatgtcagaa

SEQ ID NO: 35549 - DNA, 25 bp, Saccharomyces pastorianus
tgccccagcgaatggtgccactttt

SEQ ID NO: 35550 - DNA, 25 bp, Saccharomyces pastorianus
taccatgttaagagctgccccagcg

SEQ ID NO: 35551 - DNA, 25 bp, Saccharomyces pastorianus
gtgaactcatttttggcttctccca

SEQ ID NO: 35552 - DNA, 25 bp, Saccharomyces pastorianus
acaggtggcctagtgaactcatttt

SEQ ID NO: 35553 - DNA, 25 bp, Saccharomyces pastorianus
aactggttcaggcagcaacgtagaa

SEQ ID NO: 35554 - DNA, 25 bp, Saccharomyces pastorianus
gaaatcgttattcccattacaaaag

SEQ ID NO: 35555 - DNA, 25 bp, Saccharomyces pastorianus
gaattgggtccttttgaatcttgaa

SEQ ID NO: 35556 - DNA, 25 bp, Saccharomyces pastorianus
tagcgacatcgagtgccttcaaagt

SEQ ID NO: 35557 - DNA, 25 bp, Saccharomyces pastorianus
gaaggctccttcttgaattgggtcc

SEQ ID NO: 35558 - DNA, 25 bp, Saccharomyces pastorianus
taccaagcgttaattacccacaaat

SEQ ID NO: 35559 - DNA, 25 bp, Saccharomyces pastorianus
ggacattcccctatacacgaaatta

SEQ ID NO: 35560 - DNA, 25 bp, Saccharomyces pastorianus
atttgttgccgaagccaagtttcaa

SEQ ID NO: 35561 - DNA, 25 bp, Saccharomyces pastorianus
agccaagtttcaatcggacattccc

SEQ ID NO: 35562 - DNA, 25 bp, Saccharomyces pastorianus
taataattttggttccgtcgccact

SEQ ID NO: 35563 - DNA, 25 bp, Saccharomyces pastorianus
ggcaccttatgctccagaagtcaat

SEQ ID NO: 35564 - DNA, 25 bp, Saccharomyces pastorianus
tgaagtttacggtgtggaccccact

SEQ ID NO: 35565 - DNA, 25 bp, Saccharomyces pastorianus
acaaggctggagcaccccattttcg

SEQ ID NO: 35566 - DNA, 25 bp, Saccharomyces pastorianus
cattttcgtcatctaccaacgtcaa

SEQ ID NO: 35567 - DNA, 25 bp, Saccharomyces pastorianus
tatgtatcgaaggtaccgcgctgtt

SEQ ID NO: 35568 - DNA, 25 bp, Saccharomyces pastorianus
ctgcggcctggctatatgtatcgaa

SEQ ID NO: 35569 - DNA, 25 bp, Saccharomyces pastorianus
ggagtccctaagcaaggctgagttt

SEQ ID NO: 35570 - DNA, 25 bp, Saccharomyces pastorianus
taccgcgctgttgaccaaaatccag

SEQ ID NO: 35571 - DNA, 25 bp, Saccharomyces pastorianus
ctatgcaggctcttatgggtaccac

SEQ ID NO: 35572 - DNA, 25 bp, Saccharomyces pastorianus
ataaagtttccgattgtagcagcaa

SEQ ID NO: 35573 - DNA, 25 bp, Saccharomyces pastorianus
gtatgatatccttcgcgacccgaag

SEQ ID NO: 35574 - DNA, 25 bp, Saccharomyces pastorianus
tggaccctaattgccatagtctgcg

SEQ ID NO: 35575 - DNA, 25 bp, Saccharomyces pastorianus
taaagtgatctctcaggcgtatgat

SEQ ID NO: 35576 - DNA, 25 bp, Saccharomyces pastorianus
agaaacaatctactgtccacggccg

SEQ ID NO: 35577 - DNA, 25 bp, Saccharomyces pastorianus
atccacgtacgactctactacgaga

SEQ ID NO: 35578 - DNA, 25 bp, Saccharomyces pastorianus
gactcctcaactgcctttgatatca

SEQ ID NO: 35579 - DNA, 25 bp, Saccharomyces pastorianus
aaatatcctcacaactgcatcctat

SEQ ID NO: 35580 - DNA, 25 bp, Saccharomyces pastorianus
aactcccctgctggtaactacatgg

SEQ ID NO: 35581 - DNA, 25 bp, Saccharomyces pastorianus
ttgtcaagccattatctcataccag

SEQ ID NO: 35582 - DNA, 25 bp, Saccharomyces pastorianus
tctcctaactcttctgtttccgaaa

SEQ ID NO: 35583 - DNA, 25 bp, Saccharomyces pastorianus
gctgccctctttacaggactttcaa

SEQ ID NO: 35584 - DNA, 25 bp, Saccharomyces pastorianus
gcgacatcttcacctggtaagttca

SEQ ID NO: 35585 - DNA, 25 bp, Saccharomyces pastorianus
gagaaaccacttcctcaacattgct

SEQ ID NO: 35586 - DNA, 25 bp, Saccharomyces pastorianus
aactacatggtttccaggccttcaa

SEQ ID NO: 35587 - DNA, 25 bp, Saccharomyces pastorianus
agttatttgaacttggtcgcatcca

SEQ ID NO: 35588 - DNA, 25 bp, Saccharomyces pastorianus
taacgatacgaggtctttctcagac

SEQ ID NO: 35589 - DNA, 25 bp, Saccharomyces pastorianus
agcgcacatgtttctacttggagga

SEQ ID NO: 35590 - DNA, 25 bp, Saccharomyces pastorianus
gtaggttctacacgtacttgacttg

SEQ ID NO: 35591 - DNA, 25 bp, Saccharomyces pastorianus
atgaaatcgtatccgcaagcgcaca

SEQ ID NO: 35592 - DNA, 25 bp, Saccharomyces pastorianus
ggtcgcatccaaaatcatacatcct

SEQ ID NO: 35593 - DNA, 25 bp, Saccharomyces pastorianus
ttttcctggaactggctctttgaat

SEQ ID NO: 35594 - DNA, 25 bp, Saccharomyces pastorianus
ttctgtacatctttacgagcctgga

SEQ ID NO: 35595 - DNA, 25 bp, Saccharomyces pastorianus
gataatccattcactactcgttatg

SEQ ID NO: 35596 - DNA, 25 bp, Saccharomyces pastorianus
agcatggttgcgatgacagttattt

SEQ ID NO: 35597 - DNA, 25 bp, Saccharomyces pastorianus
ggtgcgttaccaaggaattttccat

SEQ ID NO: 35598 - DNA, 25 bp, Saccharomyces pastorianus
caactggtactattggcttcatggt

SEQ ID NO: 35599 - DNA, 25 bp, Saccharomyces pastorianus
gagaattcatgaagcttccttcgtt

SEQ ID NO: 35600 - DNA, 25 bp, Saccharomyces pastorianus
ggtgtgattaccactcaagctgaga

SEQ ID NO: 35601 - DNA, 25 bp, Saccharomyces pastorianus
gatgtaatcatcaccgattcctctg

SEQ ID NO: 35602 - DNA, 25 bp, Saccharomyces pastorianus
gattcctctgatccagaaggtccag

SEQ ID NO: 35603 - DNA, 25 bp, Saccharomyces pastorianus
ggcttcatggtttgttccaaggaca

SEQ ID NO: 35604 - DNA, 25 bp, Saccharomyces pastorianus
gaagttgtcaagcacgaatctgtcg

SEQ ID NO: 35605 - DNA, 25 bp, Saccharomyces pastorianus
gaatctgtcgaggaagcttggttgt

SEQ ID NO: 35606 - DNA, 25 bp, Saccharomyces pastorianus
gcttcttactctcacccaaaagtta

SEQ ID NO: 35607 - DNA, 25 bp, Saccharomyces pastorianus
atgtggatccacctgccaattatta

SEQ ID NO: 35608 - DNA, 25 bp, Saccharomyces pastorianus
aggtccagctgaaagtttgttccaa

SEQ ID NO: 35609 - DNA, 25 bp, Saccharomyces pastorianus
aggacgttagcgataatgccaatga

SEQ ID NO: 35610 - DNA, 25 bp, Saccharomyces pastorianus
ggaaagccaaagtgtaccaccagat

SEQ ID NO: 35611 - DNA, 25 bp, Saccharomyces pastorianus
gaaattttatctgagcccgttattg

SEQ ID NO: 35612 - DNA, 25 bp, Saccharomyces pastorianus
tttgaaccggaccaaacagcttcat

SEQ ID NO: 35613 - DNA, 25 bp, Saccharomyces pastorianus
aatcgcaccatttctaatcaagcaa

SEQ ID NO: 35614 - DNA, 25 bp, Saccharomyces pastorianus
gggcaagcgtcctagcataaccgag

SEQ ID NO: 35615 - DNA, 25 bp, Saccharomyces pastorianus
taaattccttgacgagtaacgccga

SEQ ID NO: 35616 - DNA, 25 bp, Saccharomyces pastorianus
gacctcggatttaatcgcaccattt

SEQ ID NO: 35617 - DNA, 25 bp, Saccharomyces pastorianus
agaaggaggcgttcttcggcgaaca

SEQ ID NO: 35618 - DNA, 25 bp, Saccharomyces pastorianus
aggtaattctggacactatttctga

SEQ ID NO: 35619 - DNA, 25 bp, Saccharomyces pastorianus
aacagcttcattccccaaattaact

SEQ ID NO: 35620 - DNA, 25 bp, Saccharomyces pastorianus
atttttccccagtgagccaatccga

SEQ ID NO: 35621 - DNA, 25 bp, Saccharomyces pastorianus
tatccctatgatgtgcccttaaatt

SEQ ID NO: 35622 - DNA, 25 bp, Saccharomyces pastorianus
cagagtcgaccgttgttggtactat

SEQ ID NO: 35623 - DNA, 25 bp, Saccharomyces pastorianus
tggtatcacaactagaatcctctct

SEQ ID NO: 35624 - DNA, 25 bp, Saccharomyces pastorianus
tgctgattcgccatgtctttataca

SEQ ID NO: 35625 - DNA, 25 bp, Saccharomyces pastorianus
gaaattcgaccttgatactttgttt

SEQ ID NO: 35626 - DNA, 25 bp, Saccharomyces pastorianus
aaagtacctgatgcaacctcttcaa

SEQ ID NO: 35627 - DNA, 25 bp, Saccharomyces pastorianus
tatgaacaatttttagccgctagag

SEQ ID NO: 35628 - DNA, 25 bp, Saccharomyces pastorianus
caatccgatttgtctatccctatga

SEQ ID NO: 35629 - DNA, 25 bp, Saccharomyces pastorianus
ttatctttacctcatccaacgtcaa

SEQ ID NO: 35630 - DNA, 25 bp, Saccharomyces pastorianus
gaatcctctcttttaaattgtcctg

SEQ ID NO: 35631 - DNA, 25 bp, Saccharomyces pastorianus
gggacattcaagatttcgaacacaa

SEQ ID NO: 35632 - DNA, 25 bp, Saccharomyces pastorianus
caggagaaacccctgatcatcgtac

SEQ ID NO: 35633 - DNA, 25 bp, Saccharomyces pastorianus
gataagatcgattccttcggcactt

SEQ ID NO: 35634 - DNA, 25 bp, Saccharomyces pastorianus
aacactaatgatggtaccgttcaaa

SEQ ID NO: 35635 - DNA, 25 bp, Saccharomyces pastorianus
ttcagttgcgttcatatgtttgggt

SEQ ID NO: 35636 - DNA, 25 bp, Saccharomyces pastorianus
ggcacttctaattaccacgcaggag

SEQ ID NO: 35637 - DNA, 25 bp, Saccharomyces pastorianus
gtctcttcggtgactggaacactaa

SEQ ID NO: 35638 - DNA, 25 bp, Saccharomyces pastorianus
aagctaaaatatgtctcttcggtga

SEQ ID NO: 35639 - DNA, 25 bp, Saccharomyces pastorianus
gccaatggctgaagctattttcaaa

SEQ ID NO: 35640 - DNA, 25 bp, Saccharomyces pastorianus
aacttttgtagatcgccaatggctg

SEQ ID NO: 35641 - DNA, 25 bp, Saccharomyces pastorianus
gatggtaccgttcaaactattatag

SEQ ID NO: 35642 - DNA, 25 bp, Saccharomyces pastorianus
tagtaacgtcaaggcccgtgttgtc

SEQ ID NO: 35643 - DNA, 25 bp, Saccharomyces pastorianus
aactttggccgctagtaacgtcaag

SEQ ID NO: 35644 - DNA, 25 bp, Saccharomyces pastorianus
tgaagtcctagctaccacatgttgg

SEQ ID NO: 35645 - DNA, 25 bp, Saccharomyces pastorianus
gacttcttcactttcgacaaacaat

SEQ ID NO: 35646 - DNA, 25 bp, Saccharomyces pastorianus
agatattattttggtcgccaccggt

SEQ ID NO: 35647 - DNA, 25 bp, Saccharomyces pastorianus
gtagttccatcgaaaaggccgccaa

SEQ ID NO: 35648 - DNA, 25 bp, Saccharomyces pastorianus
cggtattgatagattcggtgcttcc

SEQ ID NO: 35649 - DNA, 25 bp, Saccharomyces pastorianus
accggttccgaagtctcattgagtg

SEQ ID NO: 35650 - DNA, 25 bp, Saccharomyces pastorianus
aatcatgtccgttgaagtcctagct

SEQ ID NO: 35651 - DNA, 25 bp, Saccharomyces pastorianus
tagattcggtgcttccggtaaggca

SEQ ID NO: 35652 - DNA, 25 bp, Saccharomyces pastorianus
cgctcaccaatctttcggtattgat

SEQ ID NO: 35653 - DNA, 25 bp, Saccharomyces pastorianus
gtcaagtccgttgaaatgcatcacg

SEQ ID NO: 35654 - DNA, 25 bp, Saccharomyces pastorianus
ttaccactgaagtcaagtccgttga

SEQ ID NO: 35655 - DNA, 25 bp, Saccharomyces pastorianus
tccaggtgacaacgttggtttcaac

SEQ ID NO: 35656 - DNA, 25 bp, Saccharomyces pastorianus
gcatcacgaacaattggaacaaggt

SEQ ID NO: 35657 - DNA, 25 bp, Saccharomyces pastorianus
aatcagaagaggtaacgtctgtggt

SEQ ID NO: 35658 - DNA, 25 bp, Saccharomyces pastorianus
ctgtgccagtcggtagagttgaaac

SEQ ID NO: 35659 - DNA, 25 bp, Saccharomyces pastorianus
gtccgttgaaatgcatcacgaacaa

SEQ ID NO: 35660 - DNA, 25 bp, Saccharomyces pastorianus
tcaagccaggtatggttgttacttt

SEQ ID NO: 35661 - DNA, 25 bp, Saccharomyces pastorianus
gacaacgttggtttcaacgtcaaga

SEQ ID NO: 35662 - DNA, 25 bp, Saccharomyces pastorianus
ggtgttaccactgaagtcaagtccg

SEQ ID NO: 35663 - DNA, 25 bp, Saccharomyces pastorianus
aggtgttccaggtgacaacgttggt

SEQ ID NO: 35664 - DNA, 25 bp, Saccharomyces pastorianus
gtgacattgacaaagtcccggactt

SEQ ID NO: 35665 - DNA, 25 bp, Saccharomyces pastorianus
tcgtggtcatccgttttggtaggaa

SEQ ID NO: 35666 - DNA, 25 bp, Saccharomyces pastorianus
agaatgaacggctcgtggtcatccg

SEQ ID NO: 35667 - DNA, 25 bp, Saccharomyces pastorianus
gtagaccaggctattgtcacggaga

SEQ ID NO: 35668 - DNA, 25 bp, Saccharomyces pastorianus
tactgccccaattgcgtacaggatg

SEQ ID NO: 35669 - DNA, 25 bp, Saccharomyces pastorianus
gagtgaggaacttcgcagccatcta

SEQ ID NO: 35670 - DNA, 25 bp, Saccharomyces pastorianus
agatgtacgatctcacagaccccat

SEQ ID NO: 35671 - DNA, 25 bp, Saccharomyces pastorianus
agaccccatgactgtaatgtttttt

SEQ ID NO: 35672 - DNA, 25 bp, Saccharomyces pastorianus
gaactattatcttcgatcgctgaaa

SEQ ID NO: 35673 - DNA, 25 bp, Saccharomyces pastorianus
gcagccatctacttatgtgacattg

SEQ ID NO: 35674 - DNA, 25 bp, Saccharomyces pastorianus
atggcttctgtgttactgccccaat

SEQ ID NO: 35675 - DNA, 25 bp, Saccharomyces pastorianus
agaagactatcttcgtctacctcag

SEQ ID NO: 35676 - DNA, 25 bp, Saccharomyces pastorianus
aatggcgcaaaacctatcccgacaa

SEQ ID NO: 35677 - DNA, 25 bp, Saccharomyces pastorianus
gttaacgcatgatctgacaccaatt

SEQ ID NO: 35678 - DNA, 25 bp, Saccharomyces pastorianus
tacagaaacaacttcccaccttatt

SEQ ID NO: 35679 - DNA, 25 bp, Saccharomyces pastorianus
gcggccccacaacaagagcttataa

SEQ ID NO: 35680 - DNA, 25 bp, Saccharomyces pastorianus
aatggctaaaccaaccgcgatctgg

SEQ ID NO: 35681 - DNA, 25 bp, Saccharomyces pastorianus
gtggtatgtcttcgagtatctcctc

SEQ ID NO: 35682 - DNA, 25 bp, Saccharomyces pastorianus
ttaaatacgctttacggcatcggcg

SEQ ID NO: 35683 - DNA, 25 bp, Saccharomyces pastorianus
cggagtactcgatcgtctggatgaa

SEQ ID NO: 35684 - DNA, 25 bp, Saccharomyces pastorianus
gacaaaccatatcggattccacagt

SEQ ID NO: 35685 - DNA, 25 bp, Saccharomyces pastorianus
gatgacctatctaacggagtactcg

SEQ ID NO: 35686 - DNA, 25 bp, Saccharomyces pastorianus
tttaaattcaacctacaaccctcat

SEQ ID NO: 35687 - DNA, 25 bp, Saccharomyces pastorianus
aatccattgaactagacccttcgtc

SEQ ID NO: 35688 - DNA, 25 bp, Saccharomyces pastorianus
ttgatgtggccattagtctgctcat

SEQ ID NO: 35689 - DNA, 25 bp, Saccharomyces pastorianus
gtctgctcatcaaggaactatcgga

SEQ ID NO: 35690 - DNA, 25 bp, Saccharomyces pastorianus
gagacagctggcaccgaaatggaag

SEQ ID NO: 35691 - DNA, 25 bp, Saccharomyces pastorianus
gaaactactaatcgcaaaccctgct

SEQ ID NO: 35692 - DNA, 25 bp, Saccharomyces pastorianus
gttaatcatgagttggcgagtccaa

SEQ ID NO: 35693 - DNA, 25 bp, Saccharomyces pastorianus
agacgacatatattcattggtttac

SEQ ID NO: 35694 - DNA, 25 bp, Saccharomyces pastorianus
aaaccctgctggaagtggcagctgt

SEQ ID NO: 35695 - DNA, 25 bp, Saccharomyces pastorianus
attcaccgccaccatgtataattgt

SEQ ID NO: 35696 - DNA, 25 bp, Saccharomyces pastorianus
attgtttgctctcatgttaatcatg

SEQ ID NO: 35697 - DNA, 25 bp, Saccharomyces pastorianus
aggatccctatcactgcagcaaaag

SEQ ID NO: 35698 - DNA, 25 bp, Saccharomyces pastorianus
ggtttaccaatgcaagtcaccacct

SEQ ID NO: 35699 - DNA, 25 bp, Saccharomyces pastorianus
tatcgccaacggtgttgtgtccttg

SEQ ID NO: 35700 - DNA, 25 bp, Saccharomyces pastorianus
ttgtggacccacaacttatcgccaa

SEQ ID NO: 35701 - DNA, 25 bp, Saccharomyces pastorianus
gtgcgcaaaatcttacttacatccc

SEQ ID NO: 35702 - DNA, 25 bp, Saccharomyces pastorianus
agagtgttatggctgcgtccatatt

SEQ ID NO: 35703 - DNA, 25 bp, Saccharomyces pastorianus
aaatctcccattactattgctgttg

SEQ ID NO: 35704 - DNA, 25 bp, Saccharomyces pastorianus
acatccctagattttgttcccattt

SEQ ID NO: 35705 - DNA, 25 bp, Saccharomyces pastorianus
aaagttggccagaccttgcaggtta

SEQ ID NO: 35706 - DNA, 25 bp, Saccharomyces pastorianus
ccacctctgctgaatacactgcaaa

SEQ ID NO: 35707 - DNA, 25 bp, Saccharomyces pastorianus
aacgtcctgctatttaggatcccta

SEQ ID NO: 35708 - DNA, 25 bp, Saccharomyces pastorianus
aatgtttatcgaagagcctaccaga

SEQ ID NO: 35709 - DNA, 25 bp, Saccharomyces pastorianus
gccaaatatgccaggtatgccaggt

SEQ ID NO: 35710 - DNA, 25 bp, Saccharomyces pastorianus
gggtccattatcaaacatagcacaa

SEQ ID NO: 35711 - DNA, 25 bp, Saccharomyces pastorianus
ccaggatgcctggaatgccaaatat

SEQ ID NO: 35712 - DNA, 25 bp, Saccharomyces pastorianus
tgcacccggagccaatgccaggatg

SEQ ID NO: 35713 - DNA, 25 bp, Saccharomyces pastorianus
ctaccagaatggttcgtgtggccaa

SEQ ID NO: 35714 - DNA, 25 bp, Saccharomyces pastorianus
actgaaacaaaatcccggtctaatg

SEQ ID NO: 35715 - DNA, 25 bp, Saccharomyces pastorianus
ggccaaaggttcaggtacatccgta

SEQ ID NO: 35716 - DNA, 25 bp, Saccharomyces pastorianus
tggtttacgttttggattccatgac

SEQ ID NO: 35717 - DNA, 25 bp, Saccharomyces pastorianus
agagtccgacggtagaatgtttatc

SEQ ID NO: 35718 - DNA, 25 bp, Saccharomyces pastorianus
aggtatgccaaaagtatcgccacaa

SEQ ID NO: 35719 - DNA, 25 bp, Saccharomyces pastorianus
tttcatctggaaatgtgccaacaag

SEQ ID NO: 35720 - DNA, 25 bp, Saccharomyces pastorianus
ggaaaatcactgtttcacaacgatt

SEQ ID NO: 35721 - DNA, 25 bp, Saccharomyces pastorianus
gtggctctggcgaggatgacttttc

SEQ ID NO: 35722 - DNA, 25 bp, Saccharomyces pastorianus
ttatatctacacacatgtcatcgaa

SEQ ID NO: 35723 - DNA, 25 bp, Saccharomyces pastorianus
gagacaactggattgattccattaa

SEQ ID NO: 35724 - DNA, 25 bp, Saccharomyces pastorianus
ggatgacttttcgattcttcaggat

SEQ ID NO: 35725 - DNA, 25 bp, Saccharomyces pastorianus
aatgttataaggcagctggctgtca

SEQ ID NO: 35726 - DNA, 25 bp, Saccharomyces pastorianus
gatggcgattgcctattatatctac

SEQ ID NO: 35727 - DNA, 25 bp, Saccharomyces pastorianus
gacaaaagctttctgttcaacgaag

SEQ ID NO: 35728 - DNA, 25 bp, Saccharomyces pastorianus
agcctacgacggatgctacgtggaa

SEQ ID NO: 35729 - DNA, 25 bp, Saccharomyces pastorianus
taatttgttttcagcctacgacgga

SEQ ID NO: 35730 - DNA, 25 bp, Saccharomyces pastorianus
gacacacacgattatgattttctgc

SEQ ID NO: 35731 - DNA, 25 bp, Saccharomyces pastorianus
aagttctggatcatttggactcggg

SEQ ID NO: 35732 - DNA, 25 bp, Saccharomyces pastorianus
ttgggacgatattaactcattagta

SEQ ID NO: 35733 - DNA, 25 bp, Saccharomyces pastorianus
tgagatcacaagttttcgcacaaaa

SEQ ID NO: 35734 - DNA, 25 bp, Saccharomyces pastorianus
gatgtgtatttaaacgattcggaag

SEQ ID NO: 35735 - DNA, 25 bp, Saccharomyces pastorianus
gaaggaatccataacttagtgacta

SEQ ID NO: 35736 - DNA, 25 bp, Saccharomyces pastorianus
ggcagcctggtgaaagaatcgatct

SEQ ID NO: 35737 - DNA, 25 bp, Saccharomyces pastorianus
ggttgacttggatcttgacacacac

SEQ ID NO: 35738 - DNA, 25 bp, Saccharomyces pastorianus
aaagagcaaatttgggcagcctggt

SEQ ID NO: 35739 - DNA, 25 bp, Saccharomyces pastorianus
gtaatgccatcaagttctggatcat

SEQ ID NO: 35740 - DNA, 25 bp, Saccharomyces pastorianus
gtgactaaacatcaagacgcctttt

SEQ ID NO: 35741 - DNA, 25 bp, Saccharomyces pastorianus
aaacgtgtgcggcatgcttgcatac

SEQ ID NO: 35742 - DNA, 25 bp, Saccharomyces pastorianus
attgctctaactgctgcgccattaa

SEQ ID NO: 35743 - DNA, 25 bp, Saccharomyces pastorianus
tctgtactacgcaaagaattcggca

SEQ ID NO: 35744 - DNA, 25 bp, Saccharomyces pastorianus
ttaaccttttaaacgtgtgcggcat

SEQ ID NO: 35745 - DNA, 25 bp, Saccharomyces pastorianus
gaagcaaaggactctgtactacgca

SEQ ID NO: 35746 - DNA, 25 bp, Saccharomyces pastorianus
gcgccattaacctctttggtggtgg

SEQ ID NO: 35747 - DNA, 25 bp, Saccharomyces pastorianus
gaattcggcaaatctcacgggttga

SEQ ID NO: 35748 - DNA, 25 bp, Saccharomyces pastorianus
gtggtggcttctgttagtggattaa

SEQ ID NO: 35749 - DNA, 25 bp, Saccharomyces pastorianus
ttaccctggacccatagagtcaagg

SEQ ID NO: 35750 - DNA, 25 bp, Saccharomyces pastorianus
catgcttgcatacggtgtctgtttg

SEQ ID NO: 35751 - DNA, 25 bp, Saccharomyces pastorianus
aatctattctggctattaccctgga

SEQ ID NO: 35752 - DNA, 25 bp, Saccharomyces pastorianus
gacacccgctactgagggcggagta

SEQ ID NO: 35753 - DNA, 25 bp, Saccharomyces pastorianus
aaagtctggacacccgctactgagg

SEQ ID NO: 35754 - DNA, 25 bp, Saccharomyces pastorianus
tgctcgaaattccataggacgtaac

SEQ ID NO: 35755 - DNA, 25 bp, Saccharomyces pastorianus
aaaggttactttgcagtactgcaac

SEQ ID NO: 35756 - DNA, 25 bp, Saccharomyces pastorianus
tagtgtaagaggtatatggtcccct

SEQ ID NO: 35757 - DNA, 25 bp, Saccharomyces pastorianus
tgacttcaaagaggctagacaaatg

SEQ ID NO: 35758 - DNA, 25 bp, Saccharomyces pastorianus
cagtggagacattctgcgtagaaga

SEQ ID NO: 35759 - DNA, 25 bp, Saccharomyces pastorianus
tgtgtttccatgcaaaaaggttact

SEQ ID NO: 35760 - DNA, 25 bp, Saccharomyces pastorianus
gttgagaaagtctggacacccgcta

SEQ ID NO: 35761 - DNA, 25 bp, Saccharomyces pastorianus
gtgaggaacttgaacattgataatc

SEQ ID NO: 35762 - DNA, 25 bp, Saccharomyces pastorianus
actattgaaagattccagtggagac

SEQ ID NO: 35763 - DNA, 25 bp, Saccharomyces pastorianus
atggacttctatgttgtcatcaaca

SEQ ID NO: 35764 - DNA, 25 bp, Saccharomyces pastorianus
gtattaagtacgatccatccattgg

SEQ ID NO: 35765 - DNA, 25 bp, Saccharomyces pastorianus
cggtattgacgaacatatcgatttg

SEQ ID NO: 35766 - DNA, 25 bp, Saccharomyces pastorianus
cggtatggacttctatgttgtcatc

SEQ ID NO: 35767 - DNA, 25 bp, Saccharomyces pastorianus
gggtattaagtacgatccatccatt

SEQ ID NO: 35768 - DNA, 25 bp, Saccharomyces pastorianus
ggacttctatgttgtcatcaacaga

SEQ ID NO: 35769 - DNA, 25 bp, Saccharomyces pastorianus
gtatggacttctatgttgtcatcaa

SEQ ID NO: 35770 - DNA, 25 bp, Saccharomyces pastorianus
cttctatgttgtcatcaacagacca

SEQ ID NO: 35771 - DNA, 25 bp, Saccharomyces pastorianus
acgaacatatcgatttgggtattaa

SEQ ID NO: 35772 - DNA, 25 bp, Saccharomyces pastorianus
aagtacgatccatccattggtattt

SEQ ID NO: 35773 - DNA, 25 bp, Saccharomyces pastorianus
ttaagtacgatccatccattggtat

SEQ ID NO: 35774 - DNA, 25 bp, Saccharomyces pastorianus
acttctatgttgtcatcaacagacc

SEQ ID NO: 35775 - DNA, 25 bp, Saccharomyces pastorianus
atggacttctatgttgtcatcaaca

SEQ ID NO: 35776 - DNA, 25 bp, Saccharomyces pastorianus
cggtattgacgaacatatcgatttg

SEQ ID NO: 35777 - DNA, 25 bp, Saccharomyces pastorianus
gtctgctaaagctcaaaacactatg

SEQ ID NO: 35778 - DNA, 25 bp, Saccharomyces pastorianus
aaaccactaaggaagacactgtctc

SEQ ID NO: 35779 - DNA, 25 bp, Saccharomyces pastorianus
gaaaagatcgccgttcacgtcaccg

SEQ ID NO: 35780 - DNA, 25 bp, Saccharomyces pastorianus
tcaacagaccaggtgccagagtcgc

SEQ ID NO: 35781 - DNA, 25 bp, Saccharomyces pastorianus
cggtatggacttctatgttgtcatc

SEQ ID NO: 35782 - DNA, 25 bp, Saccharomyces pastorianus
gggtattaagtacgatccatccatt

SEQ ID NO: 35783 - DNA, 25 bp, Saccharomyces pastorianus
acgaacatatcgatttgggtattaa

SEQ ID NO: 35784 - DNA, 25 bp, Saccharomyces pastorianus
aagtacgatccatccattggtattt

SEQ ID NO: 35785 - DNA, 25 bp, Saccharomyces pastorianus
tagattctcgtgctaccgctgggaa

SEQ ID NO: 35786 - DNA, 25 bp, Saccharomyces pastorianus
aaggcgctggtttatccatgggtac

SEQ ID NO: 35787 - DNA, 25 bp, Saccharomyces pastorianus
acattcgcatatggtgtcctggact

SEQ ID NO: 35788 - DNA, 25 bp, Saccharomyces pastorianus
tagctgctgctcatagagatgcctt

SEQ ID NO: 35789 - DNA, 25 bp, Saccharomyces pastorianus
ctagcattcagatttcaagccggta

SEQ ID NO: 35790 - DNA, 25 bp, Saccharomyces pastorianus
gtatatccgttgctgctgcatccaa

SEQ ID NO: 35791 - DNA, 25 bp, Saccharomyces pastorianus
tattgagattaacccattcctattg

SEQ ID NO: 35792 - DNA, 25 bp, Saccharomyces pastorianus
gtcggttcaggtcagacattcgcat

SEQ ID NO: 35793 - DNA, 25 bp, Saccharomyces pastorianus
gtacgatggtttgcggttacactaa

SEQ ID NO: 35794 - DNA, 25 bp, Saccharomyces pastorianus
gttaggttctcaatgtaggctacac

SEQ ID NO: 35795 - DNA, 25 bp, Saccharomyces pastorianus
agagatgccttttctggtggttcca

SEQ ID NO: 35796 - DNA, 25 bp, Saccharomyces pastorianus
acaagctcagcaaatgggccgtcaa

SEQ ID NO: 35797 - DNA, 25 bp, Saccharomyces pastorianus
gaaccaattaattactccttacaga

SEQ ID NO: 35798 - DNA, 25 bp, Saccharomyces pastorianus
ttaatccatccaattcttcgacatc

SEQ ID NO: 35799 - DNA, 25 bp, Saccharomyces pastorianus
gatttcgatggtacttttgattggg

SEQ ID NO: 35800 - DNA, 25 bp, Saccharomyces pastorianus
ttagccgcagtttttgttaacatta

SEQ ID NO: 35801 - DNA, 25 bp, Saccharomyces pastorianus
tgggccgtcaaatacctgtttcaaa

SEQ ID NO: 35802 - DNA, 25 bp, Saccharomyces pastorianus
gagaactaagcctgtttattggtaa

SEQ ID NO: 35803 - DNA, 25 bp, Saccharomyces pastorianus
ctgtggtctccactacaatctaaga

SEQ ID NO: 35804 - DNA, 25 bp, Saccharomyces pastorianus
aaggtccgaaatttattagccgcag

SEQ ID NO: 35805 - DNA, 25 bp, Saccharomyces pastorianus
atgtctcgtgataactctgcaggcg

SEQ ID NO: 35806 - DNA, 25 bp, Saccharomyces pastorianus
gcagattgtgttacttctcggctta

SEQ ID NO: 35807 - DNA, 25 bp, Saccharomyces pastorianus
cttattgatagctctttcgaccacg

SEQ ID NO: 35808 - DNA, 25 bp, Saccharomyces pastorianus
gacggacttgtatgctgtgggactt

SEQ ID NO: 35809 - DNA, 25 bp, Saccharomyces pastorianus
ttgtcttctgtcattcatctcccaa

SEQ ID NO: 35810 - DNA, 25 bp, Saccharomyces pastorianus
ttcgaccacgtttcaacttttgaga

SEQ ID NO: 35811 - DNA, 25 bp, Saccharomyces pastorianus
aatcattagtgtcgcacggatcctc

SEQ ID NO: 35812 - DNA, 25 bp, Saccharomyces pastorianus
tggtattggcagctcatccatacag

SEQ ID NO: 35813 - DNA, 25 bp, Saccharomyces pastorianus
gtgtcagacaaactatctcccatag

SEQ ID NO: 35814 - DNA, 25 bp, Saccharomyces pastorianus
gtagagtactgtgctccagagctta

SEQ ID NO: 35815 - DNA, 25 bp, Saccharomyces pastorianus
gagttagcactcctgtccaaaattt

SEQ ID NO: 35816 - DNA, 25 bp, Saccharomyces pastorianus
ttggcagatttcacttcagcattcc

SEQ ID NO: 35817 - DNA, 25 bp, Saccharomyces pastorianus
gatttcaattcaacggtgtcagaca

SEQ ID NO: 35818 - DNA, 25 bp, Saccharomyces pastorianus
taacaatctcactttatgcttccga

SEQ ID NO: 35819 - DNA, 25 bp, Saccharomyces pastorianus
gagctacttcccatatcttttggag

SEQ ID NO: 35820 - DNA, 25 bp, Saccharomyces pastorianus
gacttacgcgaatgttttgatccca

SEQ ID NO: 35821 - DNA, 25 bp, Saccharomyces pastorianus
gtgcatttggtgtttctgttggatt

SEQ ID NO: 35822 - DNA, 25 bp, Saccharomyces pastorianus
atgcttccgattatgcgagctactt

SEQ ID NO: 35823 - DNA, 25 bp, Saccharomyces pastorianus
gtcgattctttagccacttttacat

SEQ ID NO: 35824 - DNA, 25 bp, Saccharomyces pastorianus
gctcttcaatctatctcgtcattaa

SEQ ID NO: 35825 - DNA, 25 bp, Saccharomyces pastorianus
atgcgtccgtcactggtttgtttac

SEQ ID NO: 35826 - DNA, 25 bp, Saccharomyces pastorianus
tttagtgtctacaactgctgctctt

SEQ ID NO: 35827 - DNA, 25 bp, Saccharomyces pastorianus
gatctcggtaagttcattcccaaca

SEQ ID NO: 35828 - DNA, 25 bp, Saccharomyces pastorianus
agagcattgctacgtatgcgtccgt

SEQ ID NO: 35829 - DNA, 25 bp, Saccharomyces pastorianus
agaaggcctcgtactgaagatggac

SEQ ID NO: 35830 - DNA, 25 bp, Saccharomyces pastorianus
aagaagaagctcaccaccatttatt

SEQ ID NO: 35831 - DNA, 25 bp, Saccharomyces pastorianus
tgctaattcgatggttggttcgcct

SEQ ID NO: 35832 - DNA, 25 bp, Saccharomyces pastorianus
ttggtcgctaggatgcatgcttttt

SEQ ID NO: 35833 - DNA, 25 bp, Saccharomyces pastorianus
gatggacgggcagcattctctgata

SEQ ID NO: 35834 - DNA, 25 bp, Saccharomyces pastorianus
gcaaaatgccgtacttcactgagat

SEQ ID NO: 35835 - DNA, 25 bp, Saccharomyces pastorianus
acttcacagtggactattggtcgct

SEQ ID NO: 35836 - DNA, 25 bp, Saccharomyces pastorianus
gaacttggaacttggtcacgagact

SEQ ID NO: 35837 - DNA, 25 bp, Saccharomyces pastorianus
ttccatgatcgataactcttctgtg

SEQ ID NO: 35838 - DNA, 25 bp, Saccharomyces pastorianus
acggatgcaggctattttgacgatt

SEQ ID NO: 35839 - DNA, 25 bp, Saccharomyces pastorianus
acaccatttagtggttcttccacca

SEQ ID NO: 35840 - DNA, 25 bp, Saccharomyces pastorianus
ggcgagggcgagtccaaactgctac

SEQ ID NO: 35841 - DNA, 25 bp, Saccharomyces pastorianus
aaaagggccgctttgattctagccg

SEQ ID NO: 35842 - DNA, 25 bp, Saccharomyces pastorianus
agcccttgcttttttcgtcatgaag

SEQ ID NO: 35843 - DNA, 25 bp, Saccharomyces pastorianus
tttcctatgtgtgcaataccctcaa

SEQ ID NO: 35844 - DNA, 25 bp, Saccharomyces pastorianus
agagcatgttctgtggtacatcccc

SEQ ID NO: 35845 - DNA, 25 bp, Saccharomyces pastorianus
actgctggtctgatgtgtttcctat

SEQ ID NO: 35846 - DNA, 25 bp, Saccharomyces pastorianus
ttacatggctgtacactacgtcgtg

SEQ ID NO: 35847 - DNA, 25 bp, Saccharomyces pastorianus
aagtgctggtaaggcttcccacaaa

SEQ ID NO: 35848 - DNA, 25 bp, Saccharomyces pastorianus
gatcggctatgttcgcattatcact

SEQ ID NO: 35849 - DNA, 25 bp, Saccharomyces pastorianus
tgggcttggacatcaccagtcatta

SEQ ID NO: 35850 - DNA, 25 bp, Saccharomyces pastorianus
tctaataagtttccccggctatgtt

SEQ ID NO: 35851 - DNA, 25 bp, Saccharomyces pastorianus
gaacccggatttgctgtcttcgaca

SEQ ID NO: 35852 - DNA, 25 bp, Saccharomyces pastorianus
gctcctgtgtttttgatgttcgaat

SEQ ID NO: 35853 - DNA, 25 bp, Saccharomyces pastorianus
ttgggacatttacatctccaccatg

SEQ ID NO: 35854 - DNA, 25 bp, Saccharomyces pastorianus
ggtctctgtagctgcaaaggtcttt

SEQ ID NO: 35855 - DNA, 25 bp, Saccharomyces pastorianus
taaattctgctccttaatgctgctg

SEQ ID NO: 35856 - DNA, 25 bp, Saccharomyces pastorianus
gtacatccagtactatgctcctgtg

SEQ ID NO: 35857 - DNA, 25 bp, Saccharomyces pastorianus
cattggttacttcgtttgggacatt

SEQ ID NO: 35858 - DNA, 25 bp, Saccharomyces pastorianus
gctgctgaacaatatggccctcatg

SEQ ID NO: 35859 - DNA, 25 bp, Saccharomyces pastorianus
gaatcatctccacagtcgtgttctg

SEQ ID NO: 35860 - DNA, 25 bp, Saccharomyces pastorianus
atggtcatcttcttcgtggccagaa

SEQ ID NO: 35861 - DNA, 25 bp, Saccharomyces pastorianus
gtaatctggttctctaccatggtct

SEQ ID NO: 35862 - DNA, 25 bp, Saccharomyces pastorianus
gatagttcacgacgaattccataga

SEQ ID NO: 35863 - DNA, 25 bp, Saccharomyces pastorianus
gccgctgctgcaatgtttatgtcaa

SEQ ID NO: 35864 - DNA, 25 bp, Saccharomyces pastorianus
ttgccccagtatgccacatgataat

SEQ ID NO: 35865 - DNA, 25 bp, Saccharomyces pastorianus
ataccaaagaggaacttgccccagt

SEQ ID NO: 35866 - DNA, 25 bp, Saccharomyces pastorianus
tacttggtcagtccgatagttcacg

SEQ ID NO: 35867 - DNA, 25 bp, Saccharomyces pastorianus
aacgctcgccaagttcttactagag

SEQ ID NO: 35868 - DNA, 25 bp, Saccharomyces pastorianus
tctgatacattatagcggcggatat

SEQ ID NO: 35869 - DNA, 25 bp, Saccharomyces pastorianus
gatatacagtctcgaacgctcgcca

SEQ ID NO: 35870 - DNA, 25 bp, Saccharomyces pastorianus
atgtctgttcatcgcctcgaaatac

SEQ ID NO: 35871 - DNA, 25 bp, Saccharomyces pastorianus
caactggtgggtacgtcatgtctgt

SEQ ID NO: 35872 - DNA, 25 bp, Saccharomyces pastorianus
aatattaccttcattatgcgccgct

SEQ ID NO: 35873 - DNA, 25 bp, Saccharomyces pastorianus
aaaggtagtcctgttcttcttctca

SEQ ID NO: 35874 - DNA, 25 bp, Saccharomyces pastorianus
agacgtacggctctgtactaggctt

SEQ ID NO: 35875 - DNA, 25 bp, Saccharomyces pastorianus
ggccaatgttcaaaacggcgacaat

SEQ ID NO: 35876 - DNA, 25 bp, Saccharomyces pastorianus
agatgtagaaccgattgttcctctt

SEQ ID NO: 35877 - DNA, 25 bp, Saccharomyces pastorianus
catcgccattaatttcaagcagacg

SEQ ID NO: 35878 - DNA, 25 bp, Saccharomyces pastorianus
ttcttctcaagaacctcttcacttt

SEQ ID NO: 35879 - DNA, 25 bp, Saccharomyces pastorianus
gtactaggcttttcttctcaagaca

SEQ ID NO: 35880 - DNA, 25 bp, Saccharomyces pastorianus
gaaacgactccatttccaagaggat

SEQ ID NO: 35881 - DNA, 25 bp, Saccharomyces pastorianus
ggagatatcgaagatcatcgccatt

SEQ ID NO: 35882 - DNA, 25 bp, Saccharomyces pastorianus
ataatgattacgagcccaatggcag

SEQ ID NO: 35883 - DNA, 25 bp, Saccharomyces pastorianus
aatggttgacatcctattcttgcaa

SEQ ID NO: 35884 - DNA, 25 bp, Saccharomyces pastorianus
cgatgtcctcatcggtattccagat

SEQ ID NO: 35885 - DNA, 25 bp, Saccharomyces pastorianus
attgctgatcatggctactgcttac

SEQ ID NO: 35886 - DNA, 25 bp, Saccharomyces pastorianus
ggagtccttgtacgattcattatgc

SEQ ID NO: 35887 - DNA, 25 bp, Saccharomyces pastorianus
aagatgcggaacaactttccctgcc

SEQ ID NO: 35888 - DNA, 25 bp, Saccharomyces pastorianus
acgagctgagcttagacgaccaaga

SEQ ID NO: 35889 - DNA, 25 bp, Saccharomyces pastorianus
gtcacaaggccttacctaattgcat

SEQ ID NO: 35890 - DNA, 25 bp, Saccharomyces pastorianus
gcccgaattgaaaaccgcatgcgct

SEQ ID NO: 35891 - DNA, 25 bp, Saccharomyces pastorianus
gaagcgtccgccaagcagaaattga

SEQ ID NO: 35892 - DNA, 25 bp, Saccharomyces pastorianus
tccagatgagctataccacgaagtt

SEQ ID NO: 35893 - DNA, 25 bp, Saccharomyces pastorianus
aggacaagatcccagcaacattgct

SEQ ID NO: 35894 - DNA, 25 bp, Saccharomyces pastorianus
atgaacttgcaaccgtttggcacag

SEQ ID NO: 35895 - DNA, 25 bp, Saccharomyces pastorianus
atgttgacacattcgggcaagcttc

SEQ ID NO: 35896 - DNA, 25 bp, Saccharomyces pastorianus
ggacgaatccgatgaggcgttctat

SEQ ID NO: 35897 - DNA, 25 bp, Saccharomyces pastorianus
cagaggtggctatcaaaactatcaa

SEQ ID NO: 35898 - DNA, 25 bp, Saccharomyces pastorianus
tgtttatacaccatcttccacagag

SEQ ID NO: 35899 - DNA, 25 bp, Saccharomyces pastorianus
tcaactcaagaggtcgtggtcgtgg

SEQ ID NO: 35900 - DNA, 25 bp, Saccharomyces pastorianus
tgattctcaagataggtcctccaac

SEQ ID NO: 35901 - DNA, 25 bp, Saccharomyces pastorianus
aatcgaaccgcagccacaaggtcga

SEQ ID NO: 35902 - DNA, 25 bp, Saccharomyces pastorianus
gccgtggcggcaattacagaggtaa

SEQ ID NO: 35903 - DNA, 25 bp, Saccharomyces pastorianus
tgccagaccaagattcaactcaaga

SEQ ID NO: 35904 - DNA, 25 bp, Saccharomyces pastorianus
cacagaggccactactgccaggaaa

SEQ ID NO: 35905 - DNA, 25 bp, Saccharomyces pastorianus
ttttgacactatttcaacctccacg

SEQ ID NO: 35906 - DNA, 25 bp, Saccharomyces pastorianus
atgacggatgttatgccccacgaag

SEQ ID NO: 35907 - DNA, 25 bp, Saccharomyces pastorianus
gatgggtatccagacacattgaaaa

SEQ ID NO: 35908 - DNA, 25 bp, Saccharomyces pastorianus
gtaagacaacggaatggcacactca

SEQ ID NO: 35909 - DNA, 25 bp, Saccharomyces pastorianus
agccttttgagcctgttgacttgtt

SEQ ID NO: 35910 - DNA, 25 bp, Saccharomyces pastorianus
aaattatgcaccactctagagacca

SEQ ID NO: 35911 - DNA, 25 bp, Saccharomyces pastorianus
ataaccgcagtgacggtcgctccaa

SEQ ID NO: 35912 - DNA, 25 bp, Saccharomyces pastorianus
gtcgctccaaggttccgtcgaatat

SEQ ID NO: 35913 - DNA, 25 bp, Saccharomyces pastorianus
tactatggccagatctctttttcaa

SEQ ID NO: 35914 - DNA, 25 bp, Saccharomyces pastorianus
acaaggacgcctttgatatgagaaa

SEQ ID NO: 35915 - DNA, 25 bp, Saccharomyces pastorianus
gtcgaatatcgctggcttcaaaatt

SEQ ID NO: 35916 - DNA, 25 bp, Saccharomyces pastorianus
aggctaataatgtcaacctcgatat

SEQ ID NO: 35917 - DNA, 25 bp, Saccharomyces pastorianus
aggctgcttacgtggctgtgttcct

SEQ ID NO: 35918 - DNA, 25 bp, Saccharomyces pastorianus
tgttcctctgggtttccccaatggt

SEQ ID NO: 35919 - DNA, 25 bp, Saccharomyces pastorianus
tgcttacgtggctgtgttcctctgg

SEQ ID NO: 35920 - DNA, 25 bp, Saccharomyces pastorianus
acctcagcaagaagtctccgaagaa

SEQ ID NO: 35921 - DNA, 25 bp, Saccharomyces pastorianus
acgtggctgtgttcctctgggtttc

SEQ ID NO: 35922 - DNA, 25 bp, Saccharomyces pastorianus
gtggctgtgttcctctgggtttccc

SEQ ID NO: 35923 - DNA, 25 bp, Saccharomyces pastorianus
aagcaggctgcttacgtggctgtgt

SEQ ID NO: 35924 - DNA, 25 bp, Saccharomyces pastorianus
ctcagcaagaagtctccgaagaaga

SEQ ID NO: 35925 - DNA, 25 bp, Saccharomyces pastorianus
aaccgagaaaacattgaagcaggct

SEQ ID NO: 35926 - DNA, 25 bp, Saccharomyces pastorianus
gagaaaacattgaagcaggctgctt

SEQ ID NO: 35927 - DNA, 25 bp, Saccharomyces pastorianus
ttacgtggctgtgttcctctgggtt

SEQ ID NO: 35928 - DNA, 25 bp, Saccharomyces pastorianus
ttcgaacgtatttgtctcagggtct

SEQ ID NO: 35929 - DNA, 25 bp, Saccharomyces pastorianus
gaagcacctttgttcttctgtgaag

SEQ ID NO: 35930 - DNA, 25 bp, Saccharomyces pastorianus
gaagttgctgcaaccattttgggtt

SEQ ID NO: 35931 - DNA, 25 bp, Saccharomyces pastorianus
taacaggctctgacaacggtagtat

SEQ ID NO: 35932 - DNA, 25 bp, Saccharomyces pastorianus
gaaccctctctaaatgacatctctg

SEQ ID NO: 35933 - DNA, 25 bp, Saccharomyces pastorianus
gttactgggtgacctatctggttgt

SEQ ID NO: 35934 - DNA, 25 bp, Saccharomyces pastorianus
tctcagggtcttggaacggaacttt

SEQ ID NO: 35935 - DNA, 25 bp, Saccharomyces pastorianus
gttacatctctgtacgctataccat

SEQ ID NO: 35936 - DNA, 25 bp, Saccharomyces pastorianus
gacatctctggtgaaactgacgaag

SEQ ID NO: 35937 - DNA, 25 bp, Saccharomyces pastorianus
acggtagtatatgcctatggtctct

SEQ ID NO: 35938 - DNA, 25 bp, Saccharomyces pastorianus
gatgactctcattttttaacaggct

SEQ ID NO: 35939 - DNA, 25 bp, Saccharomyces pastorianus
gacgattccctggatttactggcag

SEQ ID NO: 35940 - DNA, 25 bp, Saccharomyces pastorianus
agctgaagctttgggtttggacgaa

SEQ ID NO: 35941 - DNA, 25 bp, Saccharomyces pastorianus
tgctgtggccggatattgtactgtt

SEQ ID NO: 35942 - DNA, 25 bp, Saccharomyces pastorianus
gcgtttatctgctttgtgttaggta

SEQ ID NO: 35943 - DNA, 25 bp, Saccharomyces pastorianus
gtgggtctgattttcaatgcgctat

SEQ ID NO: 35944 - DNA, 25 bp, Saccharomyces pastorianus
tcaaggtatagtggccggcgttgtc

SEQ ID NO: 35945 - DNA, 25 bp, Saccharomyces pastorianus
gacagccaaaactcttcactatctt

SEQ ID NO: 35946 - DNA, 25 bp, Saccharomyces pastorianus
gcgttgtctgtaatttcgccacgaa

SEQ ID NO: 35947 - DNA, 25 bp, Saccharomyces pastorianus
tgtatcactctctatggctccttaa

SEQ ID NO: 35948 - DNA, 25 bp, Saccharomyces pastorianus
aaagctgcgcctgagacaaattcta

SEQ ID NO: 35949 - DNA, 25 bp, Saccharomyces pastorianus
aaatcgcatacatcgctgctgtggc

SEQ ID NO: 35950 - DNA, 25 bp, Saccharomyces pastorianus
tacccagaaggatttgttttgcaat

SEQ ID NO: 35951 - DNA, 25 bp, Saccharomyces pastorianus
agaagcaacgaaaccacccattgtg

SEQ ID NO: 35952 - DNA, 25 bp, Saccharomyces pastorianus
gaatttcggaactgaactgaacgta

SEQ ID NO: 35953 - DNA, 25 bp, Saccharomyces pastorianus
ggtcgaaaagcattacgatcccaaa

SEQ ID NO: 35954 - DNA, 25 bp, Saccharomyces pastorianus
acccattgtggtacctatattcgca

SEQ ID NO: 35955 - DNA, 25 bp, Saccharomyces pastorianus
gatgacgatttgattgaccgatata

SEQ ID NO: 35956 - DNA, 25 bp, Saccharomyces pastorianus
gtaatcggtgaaaactgggccataa

SEQ ID NO: 35957 - DNA, 25 bp, Saccharomyces pastorianus
aatgctaaagcaaatcctgccgagg

SEQ ID NO: 35958 - DNA, 25 bp, Saccharomyces pastorianus
agccgctgagctaagatgccatgtt

SEQ ID NO: 35959 - DNA, 25 bp, Saccharomyces pastorianus
tcgcaaattgccacgtgaagaccca

SEQ ID NO: 35960 - DNA, 25 bp, Saccharomyces pastorianus
aagattcaaatctccttcatggtgg

SEQ ID NO: 35961 - DNA, 25 bp, Saccharomyces pastorianus
aatgccattctagccactcaagtaa

SEQ ID NO: 35962 - DNA, 25 bp, Saccharomyces pastorianus
actgccgtcaatgctattctgtcat

SEQ ID NO: 35963 - DNA, 25 bp, Saccharomyces pastorianus
attctgtcatcgcacttgaaggcat

SEQ ID NO: 35964 - DNA, 25 bp, Saccharomyces pastorianus
agatgacaatgaggacggcgctgaa

SEQ ID NO: 35965 - DNA, 25 bp, Saccharomyces pastorianus
gatattattcccattacggcgggag

SEQ ID NO: 35966 - DNA, 25 bp, Saccharomyces pastorianus
tgcccagaagggtgccgtgaaatta

SEQ ID NO: 35967 - DNA, 25 bp, Saccharomyces pastorianus
tgctgacttctctactgccgtcaat

SEQ ID NO: 35968 - DNA, 25 bp, Saccharomyces pastorianus
aaggaccctatcatggccagaaata

SEQ ID NO: 35969 - DNA, 25 bp, Saccharomyces pastorianus
atgacgatggttctgctgacttctc

SEQ ID NO: 35970 - DNA, 25 bp, Saccharomyces pastorianus
ggcatatgacagaaaggaccctatc

SEQ ID NO: 35971 - DNA, 25 bp, Saccharomyces pastorianus
acaacgcttagaaagattgcccaga

SEQ ID NO: 35972 - DNA, 25 bp, Saccharomyces pastorianus
gtgcatgaacatcgacccaagtgag

SEQ ID NO: 35973 - DNA, 25 bp, Saccharomyces pastorianus
gaagtttgacggcttgtttcctcaa

SEQ ID NO: 35974 - DNA, 25 bp, Saccharomyces pastorianus
aaaagactgtcgctgacaccgtcat

SEQ ID NO: 35975 - DNA, 25 bp, Saccharomyces pastorianus
acacttggctgattgtttgagagct

SEQ ID NO: 35976 - DNA, 25 bp, Saccharomyces pastorianus
gttcgccaatcctaaggctgaatgg

SEQ ID NO: 35977 - DNA, 25 bp, Saccharomyces pastorianus
ggttactcctggattgacagtctaa

SEQ ID NO: 35978 - DNA, 25 bp, Saccharomyces pastorianus
tgccgcggaattccataccgaatct

SEQ ID NO: 35979 - DNA, 25 bp, Saccharomyces pastorianus
gaaactaagccatacttgccagaag

SEQ ID NO: 35980 - DNA, 25 bp, Saccharomyces pastorianus
ccgtgttccattcttggacagagaa

SEQ ID NO: 35981 - DNA, 25 bp, Saccharomyces pastorianus
ataccgaatctgtgcagcgtgttaa

SEQ ID NO: 35982 - DNA, 25 bp, Saccharomyces pastorianus
atttccgatgaaatgttcgccaatc

SEQ ID NO: 35983 - DNA, 25 bp, Saccharomyces pastorianus
gtcggtttaattactccaactgtga

SEQ ID NO: 35984 - DNA, 25 bp, Saccharomyces pastorianus
cgagctgtactgtccacgagattat

SEQ ID NO: 35985 - DNA, 25 bp, Saccharomyces pastorianus
ctcggactggcctctcaggaaatga

SEQ ID NO: 35986 - DNA, 25 bp, Saccharomyces pastorianus
gccttggctcatgttttatcactta

SEQ ID NO: 35987 - DNA, 25 bp, Saccharomyces pastorianus
tattcttgactcacaggcagttcgt

SEQ ID NO: 35988 - DNA, 25 bp, Saccharomyces pastorianus
gatacctcattctttcgtggtgaaa

SEQ ID NO: 35989 - DNA, 25 bp, Saccharomyces pastorianus
aaagtttgtctctctaacgagttgg

SEQ ID NO: 35990 - DNA, 25 bp, Saccharomyces pastorianus
gatggatattcatgcctcagagatg

SEQ ID NO: 35991 - DNA, 25 bp, Saccharomyces pastorianus
gttcagcactaaagaccattgggtt

SEQ ID NO: 35992 - DNA, 25 bp, Saccharomyces pastorianus
taacgagttggtcggttctgtaaca

SEQ ID NO: 35993 - DNA, 25 bp, Saccharomyces pastorianus
ggttgtggaaccaccgattcccgag

SEQ ID NO: 35994 - DNA, 25 bp, Saccharomyces pastorianus
agtatcactcaaggttctgctaaca

SEQ ID NO: 35995 - DNA, 25 bp, Saccharomyces pastorianus
gccccagtcgataacattctgcgta

SEQ ID NO: 35996 - DNA, 25 bp, Saccharomyces pastorianus
tgtagagagtctcaagccgctgttg

SEQ ID NO: 35997 - DNA, 25 bp, Saccharomyces pastorianus
gaaaccagtcgtacctattaagcaa

SEQ ID NO: 35998 - DNA, 25 bp, Saccharomyces pastorianus
gatcagttcgttgctgaacaccgag

SEQ ID NO: 35999 - DNA, 25 bp, Saccharomyces pastorianus
gttgcatatgctatagtcaccgatt

SEQ ID NO: 36000 - DNA, 25 bp, Saccharomyces pastorianus
tcgtgtgccatcttcttggccaaga

SEQ ID NO: 36001 - DNA, 25 bp, Saccharomyces pastorianus
ggcatggccgctaattttgttttca

SEQ ID NO: 36002 - DNA, 25 bp, Saccharomyces pastorianus
gagctcactcctgtagaaaccagtc

SEQ ID NO: 36003 - DNA, 25 bp, Saccharomyces pastorianus
tggtcatttccattgctctgatcag

SEQ ID NO: 36004 - DNA, 25 bp, Saccharomyces pastorianus
aactattgtatgtttgccgttgcat

SEQ ID NO: 36005 - DNA, 25 bp, Saccharomyces pastorianus
gtcaatcgttctctaaccaacatca

SEQ ID NO: 36006 - DNA, 25 bp, Saccharomyces pastorianus
gcaagttgggtaacgctgccatctt

SEQ ID NO: 36007 - DNA, 25 bp, Saccharomyces pastorianus
tgtaatggtcgcaccggtatttttc

SEQ ID NO: 36008 - DNA, 25 bp, Saccharomyces pastorianus
ttttctctgattccgatgcgcaaca

SEQ ID NO: 36009 - DNA, 25 bp, Saccharomyces pastorianus
actacgtcaagccagttttctctga

SEQ ID NO: 36010 - DNA, 25 bp, Saccharomyces pastorianus
tagaagccctttaccagtttgatcc

SEQ ID NO: 36011 - DNA, 25 bp, Saccharomyces pastorianus
attgaaatgggatccctccagtgcc

SEQ ID NO: 36012 - DNA, 25 bp, Saccharomyces pastorianus
gtggttctaattcggcttctctgga

SEQ ID NO: 36013 - DNA, 25 bp, Saccharomyces pastorianus
gtcatcctatcaacaacaaccattc

SEQ ID NO: 36014 - DNA, 25 bp, Saccharomyces pastorianus
ggtgacaaggtccagctcttggaaa

SEQ ID NO: 36015 - DNA, 25 bp, Saccharomyces pastorianus
attacaacaaatcccaacccagaat

SEQ ID NO: 36016 - DNA, 25 bp, Saccharomyces pastorianus
tatgaatcacaattgcaccatccaa

SEQ ID NO: 36017 - DNA, 25 bp, Saccharomyces pastorianus
attatccccagctctagtaatactg

SEQ ID NO: 36018 - DNA, 25 bp, Saccharomyces pastorianus
tcccgatcaaaccatagaccctatt

SEQ ID NO: 36019 - DNA, 25 bp, Saccharomyces pastorianus
agccacaggtggtctagtaagatca

SEQ ID NO: 36020 - DNA, 25 bp, Saccharomyces pastorianus
ggattttgaattactctgaccaagg

SEQ ID NO: 36021 - DNA, 25 bp, Saccharomyces pastorianus
gataatagtaactcggctcccgatc

SEQ ID NO: 36022 - DNA, 25 bp, Saccharomyces pastorianus
ggatactgaccttgactccaaagct

SEQ ID NO: 36023 - DNA, 25 bp, Saccharomyces pastorianus
aagctcaccttaatgtcgttgacag

SEQ ID NO: 36024 - DNA, 25 bp, Saccharomyces pastorianus
tagaccctattctgttaagcagcaa

SEQ ID NO: 36025 - DNA, 25 bp, Saccharomyces pastorianus
gaagttacttaattccacattcaag

SEQ ID NO: 36026 - DNA, 25 bp, Saccharomyces pastorianus
ttggagtcgtagcattatccccagc

SEQ ID NO: 36027 - DNA, 25 bp, Saccharomyces pastorianus
aagatcttgtggtggtgctgccttc

SEQ ID NO: 36028 - DNA, 25 bp, Saccharomyces pastorianus
tatatcattgattgttacgtccaat

SEQ ID NO: 36029 - DNA, 25 bp, Saccharomyces pastorianus
aatatgcatccagtgctttggccac

SEQ ID NO: 36030 - DNA, 25 bp, Saccharomyces pastorianus
cattgattgttacgtccaatatgca

SEQ ID NO: 36031 - DNA, 25 bp, Saccharomyces pastorianus
gtgctttggccacaaaggtcttctt

SEQ ID NO: 36032 - DNA, 25 bp, Saccharomyces pastorianus
ttggccacaaaggtcttcttaagat

SEQ ID NO: 36033 - DNA, 25 bp, Saccharomyces pastorianus
tcttaagatcttgtggtggtgctgc

SEQ ID NO: 36034 - DNA, 25 bp, Saccharomyces pastorianus
tatgcatccagtgctttggccacaa

SEQ ID NO: 36035 - DNA, 25 bp, Saccharomyces pastorianus
tgcatccagtgctttggccacaaag

SEQ ID NO: 36036 - DNA, 25 bp, Saccharomyces pastorianus
ggtcttcttaagatcttgtggtggt

SEQ ID NO: 36037 - DNA, 25 bp, Saccharomyces pastorianus
atccagtgctttggccacaaaggtc

SEQ ID NO: 36038 - DNA, 25 bp, Saccharomyces pastorianus
ctgagggcttagacgctgaaacgac

SEQ ID NO: 36039 - DNA, 25 bp, Saccharomyces pastorianus
gtaataagcaactaccctcgaagga

SEQ ID NO: 36040 - DNA, 25 bp, Saccharomyces pastorianus
cgggtgccctgctaggagattgatt

SEQ ID NO: 36041 - DNA, 25 bp, Saccharomyces pastorianus
gccattgtgggatccgtctttgaac

SEQ ID NO: 36042 - DNA, 25 bp, Saccharomyces pastorianus
gaccgcggtggctaagaggcattct

SEQ ID NO: 36043 - DNA, 25 bp, Saccharomyces pastorianus
agaggcactcatgccaattacgctt

SEQ ID NO: 36044 - DNA, 25 bp, Saccharomyces pastorianus
gacaattttgacgaggacaccatac

SEQ ID NO: 36045 - DNA, 25 bp, Saccharomyces pastorianus
tcatgcccttgagcgattttaccga

SEQ ID NO: 36046 - DNA, 25 bp, Saccharomyces pastorianus
gattttaccgatcgcgggccattgt

SEQ ID NO: 36047 - DNA, 25 bp, Saccharomyces pastorianus
accatactccaaagaccgctgattt

SEQ ID NO: 36048 - DNA, 25 bp, Saccharomyces pastorianus
aattacgcttccgtcggacagcatg

SEQ ID NO: 36049 - DNA, 25 bp, Saccharomyces pastorianus
gaatatgccggttatttccaaaagt

SEQ ID NO: 36050 - DNA, 25 bp, Saccharomyces pastorianus
gttggtgtagcctctcaatctttac

SEQ ID NO: 36051 - DNA, 25 bp, Saccharomyces pastorianus
ctgccttacaccctactggtaatat

SEQ ID NO: 36052 - DNA, 25 bp, Saccharomyces pastorianus
gtctgctgtttccaccttaaatgta

SEQ ID NO: 36053 - DNA, 25 bp, Saccharomyces pastorianus
gtgataacccaaccttcaccattta

SEQ ID NO: 36054 - DNA, 25 bp, Saccharomyces pastorianus
ttccaacaagctgtgtctgctgttt

SEQ ID NO: 36055 - DNA, 25 bp, Saccharomyces pastorianus
gtgtgatccagatgatttcccaaca

SEQ ID NO: 36056 - DNA, 25 bp, Saccharomyces pastorianus
atgggaagctgctggctacacgttc

SEQ ID NO: 36057 - DNA, 25 bp, Saccharomyces pastorianus
aatgaatacgtatgctggtggtccc

SEQ ID NO: 36058 - DNA, 25 bp, Saccharomyces pastorianus
cagtggtgctgaacttgggtatctc

SEQ ID NO: 36059 - DNA, 25 bp, Saccharomyces pastorianus
gatgccaagtccatcacgtgtgatc

SEQ ID NO: 36060 - DNA, 25 bp, Saccharomyces pastorianus
ttggccacccaagagttagtcgacc

SEQ ID NO: 36061 - DNA, 25 bp, Saccharomyces pastorianus
gagtgtcctgagtgttgcaaacgtt

SEQ ID NO: 36062 - DNA, 25 bp, Saccharomyces pastorianus
tggtcaactctgtcgctgaaattgt

SEQ ID NO: 36063 - DNA, 25 bp, Saccharomyces pastorianus
gagttagtcgaccaggagttccaca

SEQ ID NO: 36064 - DNA, 25 bp, Saccharomyces pastorianus
atttgccatcgagcttggaatccgt

SEQ ID NO: 36065 - DNA, 25 bp, Saccharomyces pastorianus
ggaatccgtcctatcttacattgag

SEQ ID NO: 36066 - DNA, 25 bp, Saccharomyces pastorianus
agataacgtcttcctatttggtaat

SEQ ID NO: 36067 - DNA, 25 bp, Saccharomyces pastorianus
accgtcgacggtgccaatgtggaaa

SEQ ID NO: 36068 - DNA, 25 bp, Saccharomyces pastorianus
agtgacgactttgaatcctacttgg

SEQ ID NO: 36069 - DNA, 25 bp, Saccharomyces pastorianus
agagtggtcaattctccccagagaa

SEQ ID NO: 36070 - DNA, 25 bp, Saccharomyces pastorianus
gtttcttcagtagtgaccgttgcat

SEQ ID NO: 36071 - DNA, 25 bp, Saccharomyces pastorianus
cagacacagtttccagtatcatcct

SEQ ID NO: 36072 - DNA, 25 bp, Saccharomyces pastorianus
agataccagggcacctcaacagatt

SEQ ID NO: 36073 - DNA, 25 bp, Saccharomyces pastorianus
actgccactgggaccacaatcaaga

SEQ ID NO: 36074 - DNA, 25 bp, Saccharomyces pastorianus
gatattcgaaaaccgtggcaccacc

SEQ ID NO: 36075 - DNA, 25 bp, Saccharomyces pastorianus
agtcgccaagaaccccatgtaataa

SEQ ID NO: 36076 - DNA, 25 bp, Saccharomyces pastorianus
atcagcatcaaaatcctaggtcgta

SEQ ID NO: 36077 - DNA, 25 bp, Saccharomyces pastorianus
gagaaacaatcgcttcgacggcagc

SEQ ID NO: 36078 - DNA, 25 bp, Saccharomyces pastorianus
aaagctcggcaaacgactctagata

SEQ ID NO: 36079 - DNA, 25 bp, Saccharomyces pastorianus
gtatcatcctcgcagaaccaaaatc

SEQ ID NO: 36080 - DNA, 25 bp, Saccharomyces pastorianus
aacgccggtttcaatcatcatcaag

SEQ ID NO: 36081 - DNA, 25 bp, Saccharomyces pastorianus
gacggcagccatgcaggtccaaata

SEQ ID NO: 36082 - DNA, 25 bp, Saccharomyces pastorianus
gtactatgatcccatttgacctgag

SEQ ID NO: 36083 - DNA, 25 bp, Saccharomyces pastorianus
ggatcctttaatttcaacttggcgt

SEQ ID NO: 36084 - DNA, 25 bp, Saccharomyces pastorianus
gaattaagaagagccatccccagat

SEQ ID NO: 36085 - DNA, 25 bp, Saccharomyces pastorianus
gaaactttggtgcaactggactttt

SEQ ID NO: 36086 - DNA, 25 bp, Saccharomyces pastorianus
tatcaattccaggatcccgactgtg

SEQ ID NO: 36087 - DNA, 25 bp, Saccharomyces pastorianus
aactttcagggcatttccagtctta

SEQ ID NO: 36088 - DNA, 25 bp, Saccharomyces pastorianus
catgcgcctttcttgaactttacaa

SEQ ID NO: 36089 - DNA, 25 bp, Saccharomyces pastorianus
tcccaaaacttcgattcactctgta

SEQ ID NO: 36090 - DNA, 25 bp, Saccharomyces pastorianus
atttcagctgctagggttgccttac

SEQ ID NO: 36091 - DNA, 25 bp, Saccharomyces pastorianus
gttgccttacgagccaaagacggat

SEQ ID NO: 36092 - DNA, 25 bp, Saccharomyces pastorianus
gtagtgccataaagtcatgcgcctt

SEQ ID NO: 36093 - DNA, 25 bp, Saccharomyces pastorianus
atgaagatgaagacgttgccgaaaa

SEQ ID NO: 36094 - DNA, 25 bp, Saccharomyces pastorianus
gcaagactcagcaggccaagagctc

SEQ ID NO: 36095 - DNA, 25 bp, Saccharomyces pastorianus
ttcaaggcctccaagaagagagaga

SEQ ID NO: 36096 - DNA, 25 bp, Saccharomyces pastorianus
gcatccaacaagaagcctaccgaag

SEQ ID NO: 36097 - DNA, 25 bp, Saccharomyces pastorianus
agagaagaaccttctttggactggg

SEQ ID NO: 36098 - DNA, 25 bp, Saccharomyces pastorianus
accagatatcgactggagtgctgct

SEQ ID NO: 36099 - DNA, 25 bp, Saccharomyces pastorianus
accgatgctggagttgaagatttac

SEQ ID NO: 36100 - DNA, 25 bp, Saccharomyces pastorianus
gaggttctcagtttggcaagactca

SEQ ID NO: 36101 - DNA, 25 bp, Saccharomyces pastorianus
agacatcgactggagtgctgctaga

SEQ ID NO: 36102 - DNA, 25 bp, Saccharomyces pastorianus
aggccaagagctcccacaaggataa

SEQ ID NO: 36103 - DNA, 25 bp, Saccharomyces pastorianus
aaaatctgcctatgatgttttacgt

SEQ ID NO: 36104 - DNA, 25 bp, Saccharomyces pastorianus
gtggaactcgggttatttcgtctca

SEQ ID NO: 36105 - DNA, 25 bp, Saccharomyces pastorianus
gatagccctagataagcccattcaa

SEQ ID NO: 36106 - DNA, 25 bp, Saccharomyces pastorianus
gttttggcgtaaacatcgcgcaaca

SEQ ID NO: 36107 - DNA, 25 bp, Saccharomyces pastorianus
tttcgtctcaaaaaggtcgctaatc

SEQ ID NO: 36108 - DNA, 25 bp, Saccharomyces pastorianus
atgaaacaggcgctctaccagatga

SEQ ID NO: 36109 - DNA, 25 bp, Saccharomyces pastorianus
ttatacgtgttgatggcggaccaaa

SEQ ID NO: 36110 - DNA, 25 bp, Saccharomyces pastorianus
ctatcggctcagactttatacgtgt

SEQ ID NO: 36111 - DNA, 25 bp, Saccharomyces pastorianus
tcaagcccgacctcatctgtgaagt

SEQ ID NO: 36112 - DNA, 25 bp, Saccharomyces pastorianus
aattccgatagtgtcatagggccag

SEQ ID NO: 36113 - DNA, 25 bp, Saccharomyces pastorianus
gatatgagttacgacctatcggctc

SEQ ID NO: 36114 - DNA, 25 bp, Saccharomyces pastorianus
gcaaggataggctgccccatcaaga

SEQ ID NO: 36115 - DNA, 25 bp, Saccharomyces pastorianus
gggtcaacaaccagttacatcgcaa

SEQ ID NO: 36116 - DNA, 25 bp, Saccharomyces pastorianus
ttggtgctaccggatactatgaatg

SEQ ID NO: 36117 - DNA, 25 bp, Saccharomyces pastorianus
aacagtcttcgagaattacgtagca

SEQ ID NO: 36118 - DNA, 25 bp, Saccharomyces pastorianus
gttacatcgcaagaaggccaatctg

SEQ ID NO: 36119 - DNA, 25 bp, Saccharomyces pastorianus
tatcgatctaccagactccttggag

SEQ ID NO: 36120 - DNA, 25 bp, Saccharomyces pastorianus
gaatgttccgctaagactggctacg

SEQ ID NO: 36121 - DNA, 25 bp, Saccharomyces pastorianus
ctaagactggctacggtgtgagaga

SEQ ID NO: 36122 - DNA, 25 bp, Saccharomyces pastorianus
aatcattcttgtcggttgtaaagtc

SEQ ID NO: 36123 - DNA, 25 bp, Saccharomyces pastorianus
agtttacgtaccaacagtcttcgag

SEQ ID NO: 36124 - DNA, 25 bp, Saccharomyces pastorianus
atctgtagcagaccaaattggtgct

SEQ ID NO: 36125 - DNA, 25 bp, Saccharomyces pastorianus
ttacgtagcagatgtcgaagtcgac

SEQ ID NO: 36126 - DNA, 25 bp, Saccharomyces pastorianus
caaggtttgtgctgagtgattttag

SEQ ID NO: 36127 - DNA, 25 bp, Saccharomyces pastorianus
tcgactcgggtcatgcaaggtttgt

SEQ ID NO: 36128 - DNA, 25 bp, Saccharomyces pastorianus
gcccgtgtactaagggacaacttca

SEQ ID NO: 36129 - DNA, 25 bp, Saccharomyces pastorianus
gattatgcagataccagtttagaga

SEQ ID NO: 36130 - DNA, 25 bp, Saccharomyces pastorianus
agttgaagctaaacacgctgcccaa

SEQ ID NO: 36131 - DNA, 25 bp, Saccharomyces pastorianus
ttcagatttcccataaagaccaaac

SEQ ID NO: 36132 - DNA, 25 bp, Saccharomyces pastorianus
gagatcctgattaaatccttgaagt

SEQ ID NO: 36133 - DNA, 25 bp, Saccharomyces pastorianus
ttgagactagaagcccagttgaagc

SEQ ID NO: 36134 - DNA, 25 bp, Saccharomyces pastorianus
gggttcattaatgcccgtgtactaa

SEQ ID NO: 36135 - DNA, 25 bp, Saccharomyces pastorianus
aacacgctgcccaactacatgagat

SEQ ID NO: 36136 - DNA, 25 bp, Saccharomyces pastorianus
aaaatagatgcgtcgactcgggtca

SEQ ID NO: 36137 - DNA, 25 bp, Saccharomyces pastorianus
ggctaaagtagaacctgcgcaccgt

SEQ ID NO: 36138 - DNA, 25 bp, Saccharomyces pastorianus
ggtttggtcaccatcgacatgctgt

SEQ ID NO: 36139 - DNA, 25 bp, Saccharomyces pastorianus
gtaagtgccgtcttcacaggcagaa

SEQ ID NO: 36140 - DNA, 25 bp, Saccharomyces pastorianus
tgcgcaccgtgcttacaaagaactg

SEQ ID NO: 36141 - DNA, 25 bp, Saccharomyces pastorianus
taagccagatggatgcgtctcagag

SEQ ID NO: 36142 - DNA, 25 bp, Saccharomyces pastorianus
attgacgagcttaacgggatcttga

SEQ ID NO: 36143 - DNA, 25 bp, Saccharomyces pastorianus
gaatttgcctcgaagtacggtgatt

SEQ ID NO: 36144 - DNA, 25 bp, Saccharomyces pastorianus
gacatgctgtcgaaactatccggga

SEQ ID NO: 36145 - DNA, 25 bp, Saccharomyces pastorianus
aaagaactgcgcgtaagtgccgtct

SEQ ID NO: 36146 - DNA, 25 bp, Saccharomyces pastorianus
gcaaaagtattatcagccccagaag

SEQ ID NO: 36147 - DNA, 25 bp, Saccharomyces pastorianus
tcgctctcagttgtcgcttattgaa

SEQ ID NO: 36148 - DNA, 25 bp, Saccharomyces pastorianus
accactgctaagacttctgacgaca

SEQ ID NO: 36149 - DNA, 25 bp, Saccharomyces pastorianus
gaacattccatcgatttacctaaat

SEQ ID NO: 36150 - DNA, 25 bp, Saccharomyces pastorianus
cgacatcaatgtatcctcacgggac

SEQ ID NO: 36151 - DNA, 25 bp, Saccharomyces pastorianus
agccggaagctctctcgttaagaaa

SEQ ID NO: 36152 - DNA, 25 bp, Saccharomyces pastorianus
tgacttgcgtcctgtagagacttct

SEQ ID NO: 36153 - DNA, 25 bp, Saccharomyces pastorianus
gaaaacattcctggccaatggctta

SEQ ID NO: 36154 - DNA, 25 bp, Saccharomyces pastorianus
aaaccgacggtgatgtgagcaagct

SEQ ID NO: 36155 - DNA, 25 bp, Saccharomyces pastorianus
tgaggtcctccaatactgtaccgga

SEQ ID NO: 36156 - DNA, 25 bp, Saccharomyces pastorianus
gcgtccaagaatttgaggtcctcca

SEQ ID NO: 36157 - DNA, 25 bp, Saccharomyces pastorianus
aaaaatccaaaactgagcccgcgct

SEQ ID NO: 36158 - DNA, 25 bp, Saccharomyces pastorianus
aaaagagccctccaaaagcaccaga

SEQ ID NO: 36159 - DNA, 25 bp, Saccharomyces pastorianus
aagtatgttcacgtagctacctgct

SEQ ID NO: 36160 - DNA, 25 bp, Saccharomyces pastorianus
ccaacaccagtttctcaagacgaac

SEQ ID NO: 36161 - DNA, 25 bp, Saccharomyces pastorianus
gcttggactagcacattaccggtac

SEQ ID NO: 36162 - DNA, 25 bp, Saccharomyces pastorianus
agcatatcagagactccaaccccaa

SEQ ID NO: 36163 - DNA, 25 bp, Saccharomyces pastorianus
gaaccagatgagtgcgtctatcggg

SEQ ID NO: 36164 - DNA, 25 bp, Saccharomyces pastorianus
atatttgttactcccgagaatacgc

SEQ ID NO: 36165 - DNA, 25 bp, Saccharomyces pastorianus
aatactaaaggccaaccctgacgct

SEQ ID NO: 36166 - DNA, 25 bp, Saccharomyces pastorianus
gaacaacgccaaagtaagcttctga

SEQ ID NO: 36167 - DNA, 25 bp, Saccharomyces pastorianus
ggctttactatttcatgactggatc

SEQ ID NO: 36168 - DNA, 25 bp, Saccharomyces pastorianus
aaccctgacgctagagcctttatat

SEQ ID NO: 36169 - DNA, 25 bp, Saccharomyces pastorianus
tgctctaaagagtgcatcccctcag

SEQ ID NO: 36170 - DNA, 25 bp, Saccharomyces pastorianus
ctcccggtgatgatgacgccattga

SEQ ID NO: 36171 - DNA, 25 bp, Saccharomyces pastorianus
attggtcctcggtgccacgaacatt

SEQ ID NO: 36172 - DNA, 25 bp, Saccharomyces pastorianus
ggatgcgcttacaggaaccagaggt

SEQ ID NO: 36173 - DNA, 25 bp, Saccharomyces pastorianus
aaaagaacctgaccttgccataaag

SEQ ID NO: 36174 - DNA, 25 bp, Saccharomyces pastorianus
tgactcccagggtgtattggtcctc

SEQ ID NO: 36175 - DNA, 25 bp, Saccharomyces pastorianus
gatttagcggccagaaccactatgt

SEQ ID NO: 36176 - DNA, 25 bp, Saccharomyces pastorianus
aacattccatggcaactagacagtg

SEQ ID NO: 36177 - DNA, 25 bp, Saccharomyces pastorianus
aaggaagattcagggcgccactcat

SEQ ID NO: 36178 - DNA, 25 bp, Saccharomyces pastorianus
aagtcgacaagacctactgttaacg

SEQ ID NO: 36179 - DNA, 25 bp, Saccharomyces pastorianus
agggcgccactcatttcaaggatgt

SEQ ID NO: 36180 - DNA, 25 bp, Saccharomyces pastorianus
aaagatgctctgatgcagccaataa

SEQ ID NO: 36181 - DNA, 25 bp, Saccharomyces pastorianus
catgcgtttgggttcagcgtttcaa

SEQ ID NO: 36182 - DNA, 25 bp, Saccharomyces pastorianus
gaacgggacaatctcaagcctactg

SEQ ID NO: 36183 - DNA, 25 bp, Saccharomyces pastorianus
aatggcaagccaaattcgcgcaact

SEQ ID NO: 36184 - DNA, 25 bp, Saccharomyces pastorianus
aactaccccagacgaatatcctaag

SEQ ID NO: 36185 - DNA, 25 bp, Saccharomyces pastorianus
aagcctactgaaattttgccgccct

SEQ ID NO: 36186 - DNA, 25 bp, Saccharomyces pastorianus
aagttagcgtccgtatctcgtgaaa

SEQ ID NO: 36187 - DNA, 25 bp, Saccharomyces pastorianus
gcttcgcagaggacacgttccaaga

SEQ ID NO: 36188 - DNA, 25 bp, Saccharomyces pastorianus
aagaaagcgtaacctcttcgtctgc

SEQ ID NO: 36189 - DNA, 25 bp, Saccharomyces pastorianus
ttacgactgtgtgcctctgcaatgg

SEQ ID NO: 36190 - DNA, 25 bp, Saccharomyces pastorianus
aaaagggcccaacagcatgcgtttg

SEQ ID NO: 36191 - DNA, 25 bp, Saccharomyces pastorianus
cagagaccactttcggcattgcagc

SEQ ID NO: 36192 - DNA, 25 bp, Saccharomyces pastorianus
ccttggtgctttggctattgcgaac

SEQ ID NO: 36193 - DNA, 25 bp, Saccharomyces pastorianus
gaggatggctcatttcaaggtgaca

SEQ ID NO: 36194 - DNA, 25 bp, Saccharomyces pastorianus
tatacggcgttgagtgcgctgtcga

SEQ ID NO: 36195 - DNA, 25 bp, Saccharomyces pastorianus
gcaagcttttacgtgccttggtgct

SEQ ID NO: 36196 - DNA, 25 bp, Saccharomyces pastorianus
gaatcacacgcagcgcaagctttta

SEQ ID NO: 36197 - DNA, 25 bp, Saccharomyces pastorianus
atattgtatgccaagctccatcaca

SEQ ID NO: 36198 - DNA, 25 bp, Saccharomyces pastorianus
gttgatgttttccatactgtctttg

SEQ ID NO: 36199 - DNA, 25 bp, Saccharomyces pastorianus
gggtacggtgatctagttccaatag

SEQ ID NO: 36200 - DNA, 25 bp, Saccharomyces pastorianus
ggattgtgccctagtgctgaatcac

SEQ ID NO: 36201 - DNA, 25 bp, Saccharomyces pastorianus
gtgcgctgtcgattttgggcgaatt

SEQ ID NO: 36202 - DNA, 25 bp, Saccharomyces pastorianus
gacgccggaagtggttgatcctgca

SEQ ID NO: 36203 - DNA, 25 bp, Saccharomyces pastorianus
caatgtgatggatcgcttgtttgca

SEQ ID NO: 36204 - DNA, 25 bp, Saccharomyces pastorianus
ggatatttcaaacgactcccagtat

SEQ ID NO: 36205 - DNA, 25 bp, Saccharomyces pastorianus
ggaggctctgggatgcttccacgta

SEQ ID NO: 36206 - DNA, 25 bp, Saccharomyces pastorianus
aattttggcacaccgaaacatcgtt

SEQ ID NO: 36207 - DNA, 25 bp, Saccharomyces pastorianus
aggcagtgcctctcacgatatgacg

SEQ ID NO: 36208 - DNA, 25 bp, Saccharomyces pastorianus
gacgtgtctctgatttgaaatacca

SEQ ID NO: 36209 - DNA, 25 bp, Saccharomyces pastorianus
ggaatggactcccttgcaatgatat

SEQ ID NO: 36210 - DNA, 25 bp, Saccharomyces pastorianus
ggacattcaaaacccatctacactg

SEQ ID NO: 36211 - DNA, 25 bp, Saccharomyces pastorianus
gggtattctgtttgtctttccaatg

SEQ ID NO: 36212 - DNA, 25 bp, Saccharomyces pastorianus
tccacgtaccaagagcttctattgc

SEQ ID NO: 36213 - DNA, 25 bp, Saccharomyces pastorianus
atcccagtggtcagtttataggcag

SEQ ID NO: 36214 - DNA, 25 bp, Saccharomyces pastorianus
gacgatccacaatatgccgatttca

SEQ ID NO: 36215 - DNA, 25 bp, Saccharomyces pastorianus
aactatcaagatatggcccgcggtg

SEQ ID NO: 36216 - DNA, 25 bp, Saccharomyces pastorianus
tttaatcatgatccaacccactttg

SEQ ID NO: 36217 - DNA, 25 bp, Saccharomyces pastorianus
tcaacctgtcttgctagattccatc

SEQ ID NO: 36218 - DNA, 25 bp, Saccharomyces pastorianus
gactggctccaaatttttcgttata

SEQ ID NO: 36219 - DNA, 25 bp, Saccharomyces pastorianus
gatggaagatgaccctcaacctgtc

SEQ ID NO: 36220 - DNA, 25 bp, Saccharomyces pastorianus
cgcggtgggtctacaattgtcctga

SEQ ID NO: 36221 - DNA, 25 bp, Saccharomyces pastorianus
gatagatttccgctaccaaggttca

SEQ ID NO: 36222 - DNA, 25 bp, Saccharomyces pastorianus
aaggttcattgacaccgaagccggt

SEQ ID NO: 36223 - DNA, 25 bp, Saccharomyces pastorianus
aacccactttgacatctttctcgat

SEQ ID NO: 36224 - DNA, 25 bp, Saccharomyces pastorianus
tagattccatctccgtcaaaccaaa

SEQ ID NO: 36225 - DNA, 25 bp, Saccharomyces pastorianus
aagccctttctcaagggcctggtca

SEQ ID NO: 36226 - DNA, 25 bp, Saccharomyces pastorianus
gtgatgcaacccgtaaacccgaagc

SEQ ID NO: 36227 - DNA, 25 bp, Saccharomyces pastorianus
cgtgggcgtcaagctcaagttcaac

SEQ ID NO: 36228 - DNA, 25 bp, Saccharomyces pastorianus
aagggcctggtcaaccaccgcgtgg

SEQ ID NO: 36229 - DNA, 25 bp, Saccharomyces pastorianus
aagttcaacaacaccgagtacaggg

SEQ ID NO: 36230 - DNA, 25 bp, Saccharomyces pastorianus
gacagcaacgtgatgcaacccgtaa

SEQ ID NO: 36231 - DNA, 25 bp, Saccharomyces pastorianus
gttgcaggcgtctcgcacggtgtcc

SEQ ID NO: 36232 - DNA, 25 bp, Saccharomyces pastorianus
ggtgtcctgggcgagatcttcatcc

SEQ ID NO: 36233 - DNA, 25 bp, Saccharomyces pastorianus
tgagcgaggccagtgacagcaacgt

SEQ ID NO: 36234 - DNA, 25 bp, Saccharomyces pastorianus
gacaactacttcaacctacaactgg

SEQ ID NO: 36235 - DNA, 25 bp, Saccharomyces pastorianus
ataccgaggagttcgttgcaggcgt

SEQ ID NO: 36236 - DNA, 25 bp, Saccharomyces pastorianus
acaagggctacaacgtgcgcatcat

SEQ ID NO: 36237 - DNA, 25 bp, Saccharomyces pastorianus
gggtgaatccaagctctcgggcaaa

SEQ ID NO: 36238 - DNA, 25 bp, Saccharomyces pastorianus
ggtgcccttcactttcggtgtgaga

SEQ ID NO: 36239 - DNA, 25 bp, Saccharomyces pastorianus
agagagcgttcctgacctgttccgg

SEQ ID NO: 36240 - DNA, 25 bp, Saccharomyces pastorianus
atgagtgggttctttggcctgcaga

SEQ ID NO: 36241 - DNA, 25 bp, Saccharomyces pastorianus
aactcggagggcttcaagatcgcgc

SEQ ID NO: 36242 - DNA, 25 bp, Saccharomyces pastorianus
gcatcgacaaggactggccgctgta

SEQ ID NO: 36243 - DNA, 25 bp, Saccharomyces pastorianus
agggccagtacctcgtgtgcatgga

SEQ ID NO: 36244 - DNA, 25 bp, Saccharomyces pastorianus
agtacctggagaactgcaacccacg

SEQ ID NO: 36245 - DNA, 25 bp, Saccharomyces pastorianus
aggatgatggccagacccttgaccg

SEQ ID NO: 36246 - DNA, 25 bp, Saccharomyces pastorianus
taatcgtccagtacttgcaacagct

SEQ ID NO: 36247 - DNA, 25 bp, Saccharomyces pastorianus
tatgcaatgattctagccccacaca

SEQ ID NO: 36248 - DNA, 25 bp, Saccharomyces pastorianus
gattccgaggatttcgctacttcaa

SEQ ID NO: 36249 - DNA, 25 bp, Saccharomyces pastorianus
ggcaccagaattatttgtccccgaa

SEQ ID NO: 36250 - DNA, 25 bp, Saccharomyces pastorianus
gtgggtctggctctacggttacttc

SEQ ID NO: 36251 - DNA, 25 bp, Saccharomyces pastorianus
gttccatcactttcacttcaaaact

SEQ ID NO: 36252 - DNA, 25 bp, Saccharomyces pastorianus
ttaccgcccgtactataacaatgga

SEQ ID NO: 36253 - DNA, 25 bp, Saccharomyces pastorianus
ggttacttcctaagagcgttccatc

SEQ ID NO: 36254 - DNA, 25 bp, Saccharomyces pastorianus
gaaattaccatcaaggccctgagtg

SEQ ID NO: 36255 - DNA, 25 bp, Saccharomyces pastorianus
gggtatgcgcactttggatccaagc

SEQ ID NO: 36256 - DNA, 25 bp, Saccharomyces pastorianus
cggctgcttgttggatctattctac

SEQ ID NO: 36257 - DNA, 25 bp, Saccharomyces pastorianus
gtcctcgtacttgtaccaacaactg

SEQ ID NO: 36258 - DNA, 25 bp, Saccharomyces pastorianus
aacctgtcacaatttcccgaacgtg

SEQ ID NO: 36259 - DNA, 25 bp, Saccharomyces pastorianus
ttattagtcggaaggatcttgccaa

SEQ ID NO: 36260 - DNA, 25 bp, Saccharomyces pastorianus
gttcaatcaactcacgcaagactat

SEQ ID NO: 36261 - DNA, 25 bp, Saccharomyces pastorianus
aagagggtgcgagcttccccatttt

SEQ ID NO: 36262 - DNA, 25 bp, Saccharomyces pastorianus
gagaaaagcttcaagtcacttagtg

SEQ ID NO: 36263 - DNA, 25 bp, Saccharomyces pastorianus
ggaggcgggctttgaaaatcctgaa

SEQ ID NO: 36264 - DNA, 25 bp, Saccharomyces pastorianus
caaggatgcgtttcaaatgctagat

SEQ ID NO: 36265 - DNA, 25 bp, Saccharomyces pastorianus
atgctaccttgggaaagacattgac

SEQ ID NO: 36266 - DNA, 25 bp, Saccharomyces pastorianus
atcttgccaaaatgtatgctacctt

SEQ ID NO: 36267 - DNA, 25 bp, Saccharomyces pastorianus
agatgacttaaacattcctctcaat

SEQ ID NO: 36268 - DNA, 25 bp, Saccharomyces pastorianus
aagaatggtccaacatggtacccag

SEQ ID NO: 36269 - DNA, 25 bp, Saccharomyces pastorianus
gatatcgaatcatatttctctagga

SEQ ID NO: 36270 - DNA, 25 bp, Saccharomyces pastorianus
aaagaagtgtgttcctgtgtccttg

SEQ ID NO: 36271 - DNA, 25 bp, Saccharomyces pastorianus
aagaagcgcatattttttccccaat

SEQ ID NO: 36272 - DNA, 25 bp, Saccharomyces pastorianus
ttttccccaataatctcgaggtttg

SEQ ID NO: 36273 - DNA, 25 bp, Saccharomyces pastorianus
ccattgtccagcctgatagcggata

SEQ ID NO: 36274 - DNA, 25 bp, Saccharomyces pastorianus
aattgaaggccttaccattgtccag

SEQ ID NO: 36275 - DNA, 25 bp, Saccharomyces pastorianus
ggattgagttattttttcctgaatg

SEQ ID NO: 36276 - DNA, 25 bp, Saccharomyces pastorianus
gatcgctaaggtactttatgatgta

SEQ ID NO: 36277 - DNA, 25 bp, Saccharomyces pastorianus
gcgtaaaatagcttctaacggtcag

SEQ ID NO: 36278 - DNA, 25 bp, Saccharomyces pastorianus
gactttataatgatgacacctgtaa

SEQ ID NO: 36279 - DNA, 25 bp, Saccharomyces pastorianus
ggaaattgccctacaagaactaaca

SEQ ID NO: 36280 - DNA, 25 bp, Saccharomyces pastorianus
gaactgtcgacagatctgcttcaag

SEQ ID NO: 36281 - DNA, 25 bp, Saccharomyces pastorianus
aagatcgacattagcgtctttgatt

SEQ ID NO: 36282 - DNA, 25 bp, Saccharomyces pastorianus
accaggtgtttatcacgttccgtat

SEQ ID NO: 36283 - DNA, 25 bp, Saccharomyces pastorianus
attattgcttccacactaggtccat

SEQ ID NO: 36284 - DNA, 25 bp, Saccharomyces pastorianus
tcgtgataacaagctagtctctgaa

SEQ ID NO: 36285 - DNA, 25 bp, Saccharomyces pastorianus
aacacattcctgcaatttcatgaag

SEQ ID NO: 36286 - DNA, 25 bp, Saccharomyces pastorianus
aatccacactcagcttcgttaataa

SEQ ID NO: 36287 - DNA, 25 bp, Saccharomyces pastorianus
gcttcaagggcagttttcttattca

SEQ ID NO: 36288 - DNA, 25 bp, Saccharomyces pastorianus
gagcttttactaccaagcgaactga

SEQ ID NO: 36289 - DNA, 25 bp, Saccharomyces pastorianus
taggtccatccgctatgcgtttgag

SEQ ID NO: 36290 - DNA, 25 bp, Saccharomyces pastorianus
aaatgtttttgcacgtttgtcgaga

SEQ ID NO: 36291 - DNA, 25 bp, Saccharomyces pastorianus
ttttggctgggctatggcacccgtt

SEQ ID NO: 36292 - DNA, 25 bp, Saccharomyces pastorianus
aatttcattcccgttggtttgcaat

SEQ ID NO: 36293 - DNA, 25 bp, Saccharomyces pastorianus
gcgcatacttgctttggttgaaatc

SEQ ID NO: 36294 - DNA, 25 bp, Saccharomyces pastorianus
caaatggtttgggttcatgctacaa

SEQ ID NO: 36295 - DNA, 25 bp, Saccharomyces pastorianus
gatgcccaaactagagctatcacat

SEQ ID NO: 36296 - DNA, 25 bp, Saccharomyces pastorianus
ggctcaaacatctactgcatggatc

SEQ ID NO: 36297 - DNA, 25 bp, Saccharomyces pastorianus
gtctatttaatgctaaccggtgtta

SEQ ID NO: 36298 - DNA, 25 bp, Saccharomyces pastorianus
gtaatgtgtcgtcaggcgcatactt

SEQ ID NO: 36299 - DNA, 25 bp, Saccharomyces pastorianus
gctttctgtctttctgtttggactt

SEQ ID NO: 36300 - DNA, 25 bp, Saccharomyces pastorianus
gcacccgttttatactcgtggcaaa

SEQ ID NO: 36301 - DNA, 25 bp, Saccharomyces pastorianus
gatatctgtcgtaaggatgcccaaa

SEQ ID NO: 36302 - DNA, 25 bp, Saccharomyces pastorianus
agaagatgcgattttcccagccaat

SEQ ID NO: 36303 - DNA, 25 bp, Saccharomyces pastorianus
atatcgccaagcctgctgtgaaata

SEQ ID NO: 36304 - DNA, 25 bp, Saccharomyces pastorianus
attcggtgattctattccgctggac

SEQ ID NO: 36305 - DNA, 25 bp, Saccharomyces pastorianus
agagaaggccttgcttgatcaaatc

SEQ ID NO: 36306 - DNA, 25 bp, Saccharomyces pastorianus
ataacatattgctgactgcggatca

SEQ ID NO: 36307 - DNA, 25 bp, Saccharomyces pastorianus
attgcacatccttcgtttgttagca

SEQ ID NO: 36308 - DNA, 25 bp, Saccharomyces pastorianus
gaaggatacgtatgacccgaagttt

SEQ ID NO: 36309 - DNA, 25 bp, Saccharomyces pastorianus
atacaaggtctttatccccgatatt

SEQ ID NO: 36310 - DNA, 25 bp, Saccharomyces pastorianus
gcggatcagtttgctaacgctggat

SEQ ID NO: 36311 - DNA, 25 bp, Saccharomyces pastorianus
tagacctctttagtggtgtttccca

SEQ ID NO: 36312 - DNA, 25 bp, Saccharomyces pastorianus
gtttcccacggatttgctgcaagag

SEQ ID NO: 36313 - DNA, 25 bp, Saccharomyces pastorianus
gataattggtcatcttgcctacaac

SEQ ID NO: 36314 - DNA, 25 bp, Saccharomyces pastorianus
atagtcgtcatacccatgatagcat

SEQ ID NO: 36315 - DNA, 25 bp, Saccharomyces pastorianus
taatagttctgctttgcccatcaat

SEQ ID NO: 36316 - DNA, 25 bp, Saccharomyces pastorianus
gagggtctctgatgttttacctaaa

SEQ ID NO: 36317 - DNA, 25 bp, Saccharomyces pastorianus
agttcaaggcaagacaccactctac

SEQ ID NO: 36318 - DNA, 25 bp, Saccharomyces pastorianus
aatcatctttgcttatgtcacccac

SEQ ID NO: 36319 - DNA, 25 bp, Saccharomyces pastorianus
gatggagactttgttatacttggca

SEQ ID NO: 36320 - DNA, 25 bp, Saccharomyces pastorianus
gtttcgatgatttgatagccgctat

SEQ ID NO: 36321 - DNA, 25 bp, Saccharomyces pastorianus
atagcatggcgtcttactctagttc

SEQ ID NO: 36322 - DNA, 25 bp, Saccharomyces pastorianus
acagggaccatgactacgccaaatc

SEQ ID NO: 36323 - DNA, 25 bp, Saccharomyces pastorianus
catccacatcatctacagctaaatc

SEQ ID NO: 36324 - DNA, 25 bp, Saccharomyces pastorianus
gtgcagcccaaactactcaagttca

SEQ ID NO: 36325 - DNA, 25 bp, Saccharomyces pastorianus
agatacgtcctcgacttctacggag

SEQ ID NO: 36326 - DNA, 25 bp, Saccharomyces pastorianus
tctccgcagcagatgtacaacgcaa

SEQ ID NO: 36327 - DNA, 25 bp, Saccharomyces pastorianus
tttcgtcgaccgaatcaagccggat

SEQ ID NO: 36328 - DNA, 25 bp, Saccharomyces pastorianus
actttctcaacgaagggtgctggca

SEQ ID NO: 36329 - DNA, 25 bp, Saccharomyces pastorianus
aacagcagccgaccttcaaagaagt

SEQ ID NO: 36330 - DNA, 25 bp, Saccharomyces pastorianus
aagagcccggacagcaacgagttct

SEQ ID NO: 36331 - DNA, 25 bp, Saccharomyces pastorianus
aagaattgcccttcgacaggcacga

SEQ ID NO: 36332 - DNA, 25 bp, Saccharomyces pastorianus
aggaggtcctcgactgggagcaacc

SEQ ID NO: 36333 - DNA, 25 bp, Saccharomyces pastorianus
gccctggacagcctggacaatgcga

SEQ ID NO: 36334 - DNA, 25 bp, Saccharomyces pastorianus
agttcatgggcaaaccgggtgttct

SEQ ID NO: 36335 - DNA, 25 bp, Saccharomyces pastorianus
tgttggtgggctgatcgtgaacccc

SEQ ID NO: 36336 - DNA, 25 bp, Saccharomyces pastorianus
atcagtgtcgaagaatccttgtcca

SEQ ID NO: 36337 - DNA, 25 bp, Saccharomyces pastorianus
acatcctattcgaaatcctgtaccc

SEQ ID NO: 36338 - DNA, 25 bp, Saccharomyces pastorianus
tctcttgcagttgaagtacttctct

SEQ ID NO: 36339 - DNA, 25 bp, Saccharomyces pastorianus
atcgcccgctgaagtatccataaag

SEQ ID NO: 36340 - DNA, 25 bp, Saccharomyces pastorianus
gactatgggtctgccaagtgcagct

SEQ ID NO: 36341 - DNA, 25 bp, Saccharomyces pastorianus
tatggcgttgatgctgatgtcgaaa

SEQ ID NO: 36342 - DNA, 25 bp, Saccharomyces pastorianus
tgtaccctcctacagacatcagtgt

SEQ ID NO: 36343 - DNA, 25 bp, Saccharomyces pastorianus
gacattctgttgtcgcaccacaggg

SEQ ID NO: 36344 - DNA, 25 bp, Saccharomyces pastorianus
atccttgtccaagggcgacattctg

SEQ ID NO: 36345 - DNA, 25 bp, Saccharomyces pastorianus
gtacttctctaataggacgtctacg

SEQ ID NO: 36346 - DNA, 25 bp, Saccharomyces pastorianus
tgtttgctcaacaggacatcgacag

SEQ ID NO: 36347 - DNA, 25 bp, Saccharomyces pastorianus
gataaagtgattctgggcgctgcta

SEQ ID NO: 36348 - DNA, 25 bp, Saccharomyces pastorianus
ccccaatggatatactgtggccttg

SEQ ID NO: 36349 - DNA, 25 bp, Saccharomyces pastorianus
aaaagcgaaggtgccagcgggtctc

SEQ ID NO: 36350 - DNA, 25 bp, Saccharomyces pastorianus
cacgagcagctggaccaagcggtca

SEQ ID NO: 36351 - DNA, 25 bp, Saccharomyces pastorianus
atatacaagaccaaccacgagcagc

SEQ ID NO: 36352 - DNA, 25 bp, Saccharomyces pastorianus
tgtacgacaacccactgtttgctca

SEQ ID NO: 36353 - DNA, 25 bp, Saccharomyces pastorianus
agagttgagccagcgagccagacaa

SEQ ID NO: 36354 - DNA, 25 bp, Saccharomyces pastorianus
ttcgaggtttttcaccagaggtgcc

SEQ ID NO: 36355 - DNA, 25 bp, Saccharomyces pastorianus
agcccgacctgcagtacgattcgag

SEQ ID NO: 36356 - DNA, 25 bp, Saccharomyces pastorianus
ggtttatgaaactatccgaggcgtt

SEQ ID NO: 36357 - DNA, 25 bp, Saccharomyces pastorianus
ggacacgttgtcttctcatatacag

SEQ ID NO: 36358 - DNA, 25 bp, Saccharomyces pastorianus
ggtgttttgcccaaacttttcgcag

SEQ ID NO: 36359 - DNA, 25 bp, Saccharomyces pastorianus
aacttttcgcaggagcttgcacgga

SEQ ID NO: 36360 - DNA, 25 bp, Saccharomyces pastorianus
ccacaggtgcctactttatcagaag

SEQ ID NO: 36361 - DNA, 25 bp, Saccharomyces pastorianus
gcaggtcccaaaaccctattgacta

SEQ ID NO: 36362 - DNA, 25 bp, Saccharomyces pastorianus
agattgttacatcggtgctaagcaa

SEQ ID NO: 36363 - DNA, 25 bp, Saccharomyces pastorianus
gggcataccatagatttccaaacgg

SEQ ID NO: 36364 - DNA, 25 bp, Saccharomyces pastorianus
aacgggttttcactcaatgcaggtc

SEQ ID NO: 36365 - DNA, 25 bp, Saccharomyces pastorianus
tttacgaactagcatctcctgagat

SEQ ID NO: 36366 - DNA, 25 bp, Saccharomyces pastorianus
catcaggcattacttgacgtttcaa

SEQ ID NO: 36367 - DNA, 25 bp, Saccharomyces pastorianus
atcgatatccacgtgttgcagagac

SEQ ID NO: 36368 - DNA, 25 bp, Saccharomyces pastorianus
tgcagggcccgcaagtatacggctg

SEQ ID NO: 36369 - DNA, 25 bp, Saccharomyces pastorianus
aggacttcctggtcgtggtggacaa

SEQ ID NO: 36370 - DNA, 25 bp, Saccharomyces pastorianus
tggtcactgccagccaagaagagcc

SEQ ID NO: 36371 - DNA, 25 bp, Saccharomyces pastorianus
ggacctcgatccacgtctgggacag

SEQ ID NO: 36372 - DNA, 25 bp, Saccharomyces pastorianus
tagagcccacgctggtgtgcgattt

SEQ ID NO: 36373 - DNA, 25 bp, Saccharomyces pastorianus
agttgttcccgcaagacgccgtggc

SEQ ID NO: 36374 - DNA, 25 bp, Saccharomyces pastorianus
agggttccagctcgagcagcaagaa

SEQ ID NO: 36375 - DNA, 25 bp, Saccharomyces pastorianus
aagaacggccgcatggcgcacgcat

SEQ ID NO: 36376 - DNA, 25 bp, Saccharomyces pastorianus
aacaccaagtgtcagctgcaggcgc

SEQ ID NO: 36377 - DNA, 25 bp, Saccharomyces pastorianus
ggcagtgagcatggcatcctggtca

SEQ ID NO: 36378 - DNA, 25 bp, Saccharomyces pastorianus
tatacgggtgcttccagaacttcgt

SEQ ID NO: 36379 - DNA, 25 bp, Saccharomyces pastorianus
aaggcaggtgggttcggtatcaact

SEQ ID NO: 36380 - DNA, 25 bp, Saccharomyces pastorianus
atgctttccggtaagatcgatgcgt

SEQ ID NO: 36381 - DNA, 25 bp, Saccharomyces pastorianus
ggtatcaacttagtgtgcgccaata

SEQ ID NO: 36382 - DNA, 25 bp, Saccharomyces pastorianus
gattccgattttcatcttatctaca

SEQ ID NO: 36383 - DNA, 25 bp, Saccharomyces pastorianus
gattttctcgttattcactcaagtg

SEQ ID NO: 36384 - DNA, 25 bp, Saccharomyces pastorianus
tttgagactagatgggtccacccaa

SEQ ID NO: 36385 - DNA, 25 bp, Saccharomyces pastorianus
gaacaaactagctctggattcttat

SEQ ID NO: 36386 - DNA, 25 bp, Saccharomyces pastorianus
gcaagctgctgatagagcccatcgt

SEQ ID NO: 36387 - DNA, 25 bp, Saccharomyces pastorianus
gtaactttcccaagacactgtcgaa

SEQ ID NO: 36388 - DNA, 25 bp, Saccharomyces pastorianus
gtttcaatccgcatgacgataggca

SEQ ID NO: 36389 - DNA, 25 bp, Saccharomyces pastorianus
gagcccatcgtgtgggtcagaccaa

SEQ ID NO: 36390 - DNA, 25 bp, Saccharomyces pastorianus
aacatttatcttcatgcaggccaat

SEQ ID NO: 36391 - DNA, 25 bp, Saccharomyces pastorianus
ttatccgtatcatttttcccactgg

SEQ ID NO: 36392 - DNA, 25 bp, Saccharomyces pastorianus
tgatttctcctttcattgcccaaat

SEQ ID NO: 36393 - DNA, 25 bp, Saccharomyces pastorianus
gcaggccaatatgcctcgtttggat

SEQ ID NO: 36394 - DNA, 25 bp, Saccharomyces pastorianus
gcaggatttgccatctccacaaata

SEQ ID NO: 36395 - DNA, 25 bp, Saccharomyces pastorianus
gcccgtgcttttccatgttttgatt

SEQ ID NO: 36396 - DNA, 25 bp, Saccharomyces pastorianus
attcggtgtatttctgggcttatta

SEQ ID NO: 36397 - DNA, 25 bp, Saccharomyces pastorianus
gagtctgttccagttttggcaggat

SEQ ID NO: 36398 - DNA, 25 bp, Saccharomyces pastorianus
tagtggttcttctggctctcttatc

SEQ ID NO: 36399 - DNA, 25 bp, Saccharomyces pastorianus
attggtctcttcattgccattttgc

SEQ ID NO: 36400 - DNA, 25 bp, Saccharomyces pastorianus
atgagactgagccacttcaacaacc

SEQ ID NO: 36401 - DNA, 25 bp, Saccharomyces pastorianus
aataatttacttgtggagcggttca

SEQ ID NO: 36402 - DNA, 25 bp, Saccharomyces pastorianus
acaaaacctccaccgtagagctaat

SEQ ID NO: 36403 - DNA, 25 bp, Saccharomyces pastorianus
gatatcacttgggacttctatagca

SEQ ID NO: 36404 - DNA, 25 bp, Saccharomyces pastorianus
tcagccgaatacttagttgcttcta

SEQ ID NO: 36405 - DNA, 25 bp, Saccharomyces pastorianus
gtatcctcttcagtaataactcagc

SEQ ID NO: 36406 - DNA, 25 bp, Saccharomyces pastorianus
ggtccgttgttgtacctccaaaatg

SEQ ID NO: 36407 - DNA, 25 bp, Saccharomyces pastorianus
acgaagtcgatgaagctgagcagca

SEQ ID NO: 36408 - DNA, 25 bp, Saccharomyces pastorianus
gaatgtgtatatgtggtccgttgtt

SEQ ID NO: 36409 - DNA, 25 bp, Saccharomyces pastorianus
gttcacaattcccaccgattatata

SEQ ID NO: 36410 - DNA, 25 bp, Saccharomyces pastorianus
ggagattggctattaactcttcaga

SEQ ID NO: 36411 - DNA, 25 bp, Saccharomyces pastorianus
gcgctttagcgccagactttgaaga

SEQ ID NO: 36412 - DNA, 25 bp, Saccharomyces pastorianus
gaccatcatgcaaacactagaccaa

SEQ ID NO: 36413 - DNA, 25 bp, Saccharomyces pastorianus
ttccgccctctctattgaattatga

SEQ ID NO: 36414 - DNA, 25 bp, Saccharomyces pastorianus
tccttttgccaatgaccatcatgca

SEQ ID NO: 36415 - DNA, 25 bp, Saccharomyces pastorianus
ggaagcacagccacacgcaaatatt

SEQ ID NO: 36416 - DNA, 25 bp, Saccharomyces pastorianus
aagagcttggtcagttggttccgcc

SEQ ID NO: 36417 - DNA, 25 bp, Saccharomyces pastorianus
gccggattaacctcagacgaaaagt

SEQ ID NO: 36418 - DNA, 25 bp, Saccharomyces pastorianus
tatagatatcagatccgttccggac

SEQ ID NO: 36419 - DNA, 25 bp, Saccharomyces pastorianus
gatcgaggccgaggataacgcaaaa

SEQ ID NO: 36420 - DNA, 25 bp, Saccharomyces pastorianus
aaaaatttcagtcgccactgcatct

SEQ ID NO: 36421 - DNA, 25 bp, Saccharomyces pastorianus
cgttccggactcatcttcaaatgaa

SEQ ID NO: 36422 - DNA, 25 bp, Saccharomyces pastorianus
gtttggagatgacaattctaaccct

SEQ ID NO: 36423 - DNA, 25 bp, Saccharomyces pastorianus
tctaatcacgatgaacttctaactg

SEQ ID NO: 36424 - DNA, 25 bp, Saccharomyces pastorianus
aatactctccattggctaccgaaga

SEQ ID NO: 36425 - DNA, 25 bp, Saccharomyces pastorianus
ctcaaggtggtgatgtttcggctta

SEQ ID NO: 36426 - DNA, 25 bp, Saccharomyces pastorianus
gtcaaaagaactgttggcttcctta

SEQ ID NO: 36427 - DNA, 25 bp, Saccharomyces pastorianus
gatctatgctggtgttaacggtcat

SEQ ID NO: 36428 - DNA, 25 bp, Saccharomyces pastorianus
tttgaccgccttgcctgttattgaa

SEQ ID NO: 36429 - DNA, 25 bp, Saccharomyces pastorianus
gaacaagttccattgatctatgctg

SEQ ID NO: 36430 - DNA, 25 bp, Saccharomyces pastorianus
gaatcttctttcttatcttacctaa

SEQ ID NO: 36431 - DNA, 25 bp, Saccharomyces pastorianus
cattaacgtcggtttgtccgtctct

SEQ ID NO: 36432 - DNA, 25 bp, Saccharomyces pastorianus
aacggtcatttggacaacattgaac

SEQ ID NO: 36433 - DNA, 25 bp, Saccharomyces pastorianus
gaaagagctgctaagttgtccgaaa

SEQ ID NO: 36434 - DNA, 25 bp, Saccharomyces pastorianus
tgcccgccagggatgatgatagact

SEQ ID NO: 36435 - DNA, 25 bp, Saccharomyces pastorianus
aaaaggcagattgttcaggctggat

SEQ ID NO: 36436 - DNA, 25 bp, Saccharomyces pastorianus
agtattgcttcaaattggtcccgcc

SEQ ID NO: 36437 - DNA, 25 bp, Saccharomyces pastorianus
ccacgccgacgatatctttgagcaa

SEQ ID NO: 36438 - DNA, 25 bp, Saccharomyces pastorianus
tgcacatagagttttgcccgccagg

SEQ ID NO: 36439 - DNA, 25 bp, Saccharomyces pastorianus
ttataagttcatatgccacgccgac

SEQ ID NO: 36440 - DNA, 25 bp, Saccharomyces pastorianus
agactaatttccttatatgctgcaa

SEQ ID NO: 36441 - DNA, 25 bp, Saccharomyces pastorianus
gtcccgccacaaccaggatctaaaa

SEQ ID NO: 36442 - DNA, 25 bp, Saccharomyces pastorianus
aagcgcaaacgctactggaagaggc

SEQ ID NO: 36443 - DNA, 25 bp, Saccharomyces pastorianus
gatattgatactagtgtccctgtta

SEQ ID NO: 36444 - DNA, 25 bp, Saccharomyces pastorianus
ggtttgatagacattactgcacata

SEQ ID NO: 36445 - DNA, 25 bp, Saccharomyces pastorianus
tctacgttcaaatctgagtacccgt

SEQ ID NO: 36446 - DNA, 25 bp, Saccharomyces pastorianus
cactgcggcgctgatgtctgctata

SEQ ID NO: 36447 - DNA, 25 bp, Saccharomyces pastorianus
taaggatgggtttctgtacgtgact

SEQ ID NO: 36448 - DNA, 25 bp, Saccharomyces pastorianus
aagagaataatgcttccccctgaaa

SEQ ID NO: 36449 - DNA, 25 bp, Saccharomyces pastorianus
aggccgaatccgaaagaatcgccga

SEQ ID NO: 36450 - DNA, 25 bp, Saccharomyces pastorianus
tcaaatctgagtacccgttcgaaaa

SEQ ID NO: 36451 - DNA, 25 bp, Saccharomyces pastorianus
ggccatctttatttttgttaatgac

SEQ ID NO: 36452 - DNA, 25 bp, Saccharomyces pastorianus
atccgaaagaatcgccgagagattt

SEQ ID NO: 36453 - DNA, 25 bp, Saccharomyces pastorianus
gcgtaagtacctagttcctgctgat

SEQ ID NO: 36454 - DNA, 25 bp, Saccharomyces pastorianus
ttccccctgaaaaggccatctttat

SEQ ID NO: 36455 - DNA, 25 bp, Saccharomyces pastorianus
agtacctagttcctgctgatcttac

SEQ ID NO: 36456 - DNA, 25 bp, Saccharomyces pastorianus
ccgttatgacgacccggcaaatagt

SEQ ID NO: 36457 - DNA, 25 bp, Saccharomyces pastorianus
aaagactaggatcgcctattccagg

SEQ ID NO: 36458 - DNA, 25 bp, Saccharomyces pastorianus
ggcggcttttcaggccaaggtcaaa

SEQ ID NO: 36459 - DNA, 25 bp, Saccharomyces pastorianus
atggcccgctttaccgttatgacga

SEQ ID NO: 36460 - DNA, 25 bp, Saccharomyces pastorianus
gagcgccattgaagctactggacgt

SEQ ID NO: 36461 - DNA, 25 bp, Saccharomyces pastorianus
ggtagaaactagtgctccacaacca

SEQ ID NO: 36462 - DNA, 25 bp, Saccharomyces pastorianus
aggcgagtcattgtcaccggtggaa

SEQ ID NO: 36463 - DNA, 25 bp, Saccharomyces pastorianus
aaatcatgcgttccctgttaaacca

SEQ ID NO: 36464 - DNA, 25 bp, Saccharomyces pastorianus
aaatgcaaacactgacgcgtcgaga

SEQ ID NO: 36465 - DNA, 25 bp, Saccharomyces pastorianus
gggatacctccgttcaaatcagata

SEQ ID NO: 36466 - DNA, 25 bp, Saccharomyces pastorianus
gaagtcttgcgttgtaactccacag

SEQ ID NO: 36467 - DNA, 25 bp, Saccharomyces pastorianus
atcaccaacgtgctcatcgagatca

SEQ ID NO: 36468 - DNA, 25 bp, Saccharomyces pastorianus
gctggctgagtcgatgcttttgaaa

SEQ ID NO: 36469 - DNA, 25 bp, Saccharomyces pastorianus
agaactgtacgtgggtgccatcatt

SEQ ID NO: 36470 - DNA, 25 bp, Saccharomyces pastorianus
tgaacattctgacttcatgtcctcc

SEQ ID NO: 36471 - DNA, 25 bp, Saccharomyces pastorianus
gttcctgatcaacaagcacggcgtc

SEQ ID NO: 36472 - DNA, 25 bp, Saccharomyces pastorianus
attccccaagaacgtcaagctggct

SEQ ID NO: 36473 - DNA, 25 bp, Saccharomyces pastorianus
tcacttgaaaaaatcgcccggcgag

SEQ ID NO: 36474 - DNA, 25 bp, Saccharomyces pastorianus
ttcatgtcctcctccgaagaagaag

SEQ ID NO: 36475 - DNA, 25 bp, Saccharomyces pastorianus
gaggtcctatttccctcacttgaaa

SEQ ID NO: 36476 - DNA, 25 bp, Saccharomyces pastorianus
gtcaggttcaacaccgagaggtcct

SEQ ID NO: 36477 - DNA, 25 bp, Saccharomyces pastorianus
gatcatcgagattcagggcttcccc

SEQ ID NO: 36478 - DNA, 25 bp, Saccharomyces pastorianus
aatactctgtaaggaccggcacttt

SEQ ID NO: 36479 - DNA, 25 bp, Saccharomyces pastorianus
gactcacgaccagttcttggatgaa

SEQ ID NO: 36480 - DNA, 25 bp, Saccharomyces pastorianus
ggatgaagatgctgcgacgcccgaa

SEQ ID NO: 36481 - DNA, 25 bp, Saccharomyces pastorianus
gaacattgggtctgttgtccaacac

SEQ ID NO: 36482 - DNA, 25 bp, Saccharomyces pastorianus
ggcactttcgcatttgttttcattg

SEQ ID NO: 36483 - DNA, 25 bp, Saccharomyces pastorianus
gttttcattgctattcttctcgtca

SEQ ID NO: 36484 - DNA, 25 bp, Saccharomyces pastorianus
gacgctagcgacttgtctattttca

SEQ ID NO: 36485 - DNA, 25 bp, Saccharomyces pastorianus
taccgcgagcgatattcctgatgca

SEQ ID NO: 36486 - DNA, 25 bp, Saccharomyces pastorianus
agagtgggtccaagctattcgtcgc

SEQ ID NO: 36487 - DNA, 25 bp, Saccharomyces pastorianus
aatcagggttttacatcttctcgaa

SEQ ID NO: 36488 - DNA, 25 bp, Saccharomyces pastorianus
agacgacttgcttgccgggcatgat

SEQ ID NO: 36489 - DNA, 25 bp, Saccharomyces pastorianus
gaagagcctacagcgcgataccttt

SEQ ID NO: 36490 - DNA, 25 bp, Saccharomyces pastorianus
gccaattcttaatggtcaacctatt

SEQ ID NO: 36491 - DNA, 25 bp, Saccharomyces pastorianus
aatccgatgttgtaccagacactga

SEQ ID NO: 36492 - DNA, 25 bp, Saccharomyces pastorianus
gcaattttttggttgttctgactga

SEQ ID NO: 36493 - DNA, 25 bp, Saccharomyces pastorianus
tcggccaatggctctatttatatac

SEQ ID NO: 36494 - DNA, 25 bp, Saccharomyces pastorianus
tatactctcgtacaatggccagcag

SEQ ID NO: 36495 - DNA, 25 bp, Saccharomyces pastorianus
gcgatacctttcacaatccgatgtt

SEQ ID NO: 36496 - DNA, 25 bp, Saccharomyces pastorianus
gaaagatccattcaattcgattctg

SEQ ID NO: 36497 - DNA, 25 bp, Saccharomyces pastorianus
aagtgttggtgtttagcttcggcca

SEQ ID NO: 36498 - DNA, 25 bp, Saccharomyces pastorianus
ggaatgtacccattttgccaattct

SEQ ID NO: 36499 - DNA, 25 bp, Saccharomyces pastorianus
aagcacttctagacaatccaaccag

SEQ ID NO: 36500 - DNA, 25 bp, Saccharomyces pastorianus
acgagcgaggcgagtttcaccctaa

SEQ ID NO: 36501 - DNA, 25 bp, Saccharomyces pastorianus
gggccgatgccaatgacaccagtaa

SEQ ID NO: 36502 - DNA, 25 bp, Saccharomyces pastorianus
atgaccttgggtactacgacgagcg

SEQ ID NO: 36503 - DNA, 25 bp, Saccharomyces pastorianus
gcaacccgctgatgattatgttcct

SEQ ID NO: 36504 - DNA, 25 bp, Saccharomyces pastorianus
ttcctttggatcttcatcatggcag

SEQ ID NO: 36505 - DNA, 25 bp, Saccharomyces pastorianus
gtggtccatcaaactaactcttcag

SEQ ID NO: 36506 - DNA, 25 bp, Saccharomyces pastorianus
ggcaagtcccggttgcaagtgacat

SEQ ID NO: 36507 - DNA, 25 bp, Saccharomyces pastorianus
tacaggcagtctcagcagcaacaaa

SEQ ID NO: 36508 - DNA, 25 bp, Saccharomyces pastorianus
gggctactatggctattcctttgga

SEQ ID NO: 36509 - DNA, 25 bp, Saccharomyces pastorianus
gcaagagctttcgtcagagtctgtt

SEQ ID NO: 36510 - DNA, 25 bp, Saccharomyces pastorianus
gtctgttaactctttggaacggcct

SEQ ID NO: 36511 - DNA, 25 bp, Saccharomyces pastorianus
aggcgtggcttatatgggcttttgc

SEQ ID NO: 36512 - DNA, 25 bp, Saccharomyces pastorianus
gcattgctggcatttgatctctata

SEQ ID NO: 36513 - DNA, 25 bp, Saccharomyces pastorianus
aatgtctgtgtgttggtgtctaccg

SEQ ID NO: 36514 - DNA, 25 bp, Saccharomyces pastorianus
gttggcttacattttattcgctatt

SEQ ID NO: 36515 - DNA, 25 bp, Saccharomyces pastorianus
gctggcaatagtttctgtcggagtt

SEQ ID NO: 36516 - DNA, 25 bp, Saccharomyces pastorianus
gggttcttcactttggctctagctg

SEQ ID NO: 36517 - DNA, 25 bp, Saccharomyces pastorianus
gtcgcatctgtatttgctggcaata

SEQ ID NO: 36518 - DNA, 25 bp, Saccharomyces pastorianus
ctgctatcccattcgtactttataa

SEQ ID NO: 36519 - DNA, 25 bp, Saccharomyces pastorianus
gagaatcattataccccgtttcaaa

SEQ ID NO: 36520 - DNA, 25 bp, Saccharomyces pastorianus
gagtttgtttgcttgtgctttccca

SEQ ID NO: 36521 - DNA, 25 bp, Saccharomyces pastorianus
cgcagttgcttacggttgtttctat

SEQ ID NO: 36522 - DNA, 25 bp, Saccharomyces pastorianus
gagagtcctggtgataactaatcta

SEQ ID NO: 36523 - DNA, 25 bp, Saccharomyces pastorianus
ttacgtcgtggagttagatcagcat

SEQ ID NO: 36524 - DNA, 25 bp, Saccharomyces pastorianus
taaagtaccatcctggttcactggt

SEQ ID NO: 36525 - DNA, 25 bp, Saccharomyces pastorianus
gaacagttccaaacgttatcatcaa

SEQ ID NO: 36526 - DNA, 25 bp, Saccharomyces pastorianus
tgccgctgcagaatatgacaccata

SEQ ID NO: 36527 - DNA, 25 bp, Saccharomyces pastorianus
agagtggagtgatggcgcctttacc

SEQ ID NO: 36528 - DNA, 25 bp, Saccharomyces pastorianus
gggaatgctccaggtactcccgaat

SEQ ID NO: 36529 - DNA, 25 bp, Saccharomyces pastorianus
aatcacacatggtcgttttcagtaa

SEQ ID NO: 36530 - DNA, 25 bp, Saccharomyces pastorianus
cttttctccaacttattacgtcgtg

SEQ ID NO: 36531 - DNA, 25 bp, Saccharomyces pastorianus
ggtactcccgaatctgtccataatt

SEQ ID NO: 36532 - DNA, 25 bp, Saccharomyces pastorianus
tggttctagtgtttttggtcgtaag

SEQ ID NO: 36533 - DNA, 25 bp, Saccharomyces pastorianus
agttcgatcctaagactctatccga

SEQ ID NO: 36534 - DNA, 25 bp, Saccharomyces pastorianus
ggcctaccattctaccaggtcaaaa

SEQ ID NO: 36535 - DNA, 25 bp, Saccharomyces pastorianus
aagaaacgttcattgccgcagctaa

SEQ ID NO: 36536 - DNA, 25 bp, Saccharomyces pastorianus
gagctctgcatgaatacgtttgtgt

SEQ ID NO: 36537 - DNA, 25 bp, Saccharomyces pastorianus
gcagctaacttctatggcctaccat

SEQ ID NO: 36538 - DNA, 25 bp, Saccharomyces pastorianus
tggacgtcatgtttattcactcgaa

SEQ ID NO: 36539 - DNA, 25 bp, Saccharomyces pastorianus
attacctggccgcttctaagagcat

SEQ ID NO: 36540 - DNA, 25 bp, Saccharomyces pastorianus
tacatcgccgagagactggagtttt

SEQ ID NO: 36541 - DNA, 25 bp, Saccharomyces pastorianus
atggataacaaacctgcccgttcgt

SEQ ID NO: 36542 - DNA, 25 bp, Saccharomyces pastorianus
tcatcaaatcatccgcgccaataaa

SEQ ID NO: 36543 - DNA, 25 bp, Saccharomyces pastorianus
gttcgttcacttccttagagaaaat

SEQ ID NO: 36544 - DNA, 25 bp, Saccharomyces pastorianus
aggaactacgatgaccaatccggtc

SEQ ID NO: 36545 - DNA, 25 bp, Saccharomyces pastorianus
gtgatgccaagcctgaccaagacta

SEQ ID NO: 36546 - DNA, 25 bp, Saccharomyces pastorianus
tatatttttctactcctcgtgatgc

SEQ ID NO: 36547 - DNA, 25 bp, Saccharomyces pastorianus
agcttacggctcagtagcgctcgga

SEQ ID NO: 36548 - DNA, 25 bp, Saccharomyces pastorianus
ggcaagagatactcccgaagtctta

SEQ ID NO: 36549 - DNA, 25 bp, Saccharomyces pastorianus
taatggtcaacccttcactgagaag

SEQ ID NO: 36550 - DNA, 25 bp, Saccharomyces pastorianus
gagtgatttccatcctgctattatt

SEQ ID NO: 36551 - DNA, 25 bp, Saccharomyces pastorianus
tgatcccgagggtcagttcattgat

SEQ ID NO: 36552 - DNA, 25 bp, Saccharomyces pastorianus
aatacagccattgttcatctcgtgc

SEQ ID NO: 36553 - DNA, 25 bp, Saccharomyces pastorianus
ctcggagggcctttcagtttaatag

SEQ ID NO: 36554 - DNA, 25 bp, Saccharomyces pastorianus
ttcatctcgtgcgatccggcaagag

SEQ ID NO: 36555 - DNA, 25 bp, Saccharomyces pastorianus
atccggaacaagctcacattctaag

SEQ ID NO: 36556 - DNA, 25 bp, Saccharomyces pastorianus
gaaaatctctaatgggtaacggcaa

SEQ ID NO: 36557 - DNA, 25 bp, Saccharomyces pastorianus
gataatatgtgctccatccggaaca

SEQ ID NO: 36558 - DNA, 25 bp, Saccharomyces pastorianus
tgctgcttcctcgtctttggaagaa

SEQ ID NO: 36559 - DNA, 25 bp, Saccharomyces pastorianus
gattctcaggtggactgggacgaat

SEQ ID NO: 36560 - DNA, 25 bp, Saccharomyces pastorianus
gattcactgggcattcaactggatg

SEQ ID NO: 36561 - DNA, 25 bp, Saccharomyces pastorianus
gataagccacatgattcactgggca

SEQ ID NO: 36562 - DNA, 25 bp, Saccharomyces pastorianus
gtcgcgtatccaatgccgttataaa

SEQ ID NO: 36563 - DNA, 25 bp, Saccharomyces pastorianus
ttagcagctttgaaacctggcatga

SEQ ID NO: 36564 - DNA, 25 bp, Saccharomyces pastorianus
atgacgatgacgctattgctgccgc

SEQ ID NO: 36565 - DNA, 25 bp, Saccharomyces pastorianus
gggcggtacaaggtcgcgtatccaa

SEQ ID NO: 36566 - DNA, 25 bp, Saccharomyces pastorianus
caacgtgttatgctgtctctgttta

SEQ ID NO: 36567 - DNA, 25 bp, Saccharomyces pastorianus
tactaccaagcgcaaccaatgtatt

SEQ ID NO: 36568 - DNA, 25 bp, Saccharomyces pastorianus
aattgcggtgactgttgttcggcca

SEQ ID NO: 36569 - DNA, 25 bp, Saccharomyces pastorianus
gcaaccacaacccatatacatacaa

SEQ ID NO: 36570 - DNA, 25 bp, Saccharomyces pastorianus
gagacgtcagtactaccaagcgcaa

SEQ ID NO: 36571 - DNA, 25 bp, Saccharomyces pastorianus
ggccattgccaacgtgttatgctgt

SEQ ID NO: 36572 - DNA, 25 bp, Saccharomyces pastorianus
ctgctgttgctgttgtaattgcggt

SEQ ID NO: 36573 - DNA, 25 bp, Saccharomyces pastorianus
tccacctagaaacgattgctgctgt

SEQ ID NO: 36574 - DNA, 25 bp, Saccharomyces pastorianus
gtgactgttgttcggccattgccaa

SEQ ID NO: 36575 - DNA, 25 bp, Saccharomyces pastorianus
atatacatacaacagggcccacctc

SEQ ID NO: 36576 - DNA, 25 bp, Saccharomyces pastorianus
ccaatgtattatcaaccgcaaccac

SEQ ID NO: 36577 - DNA, 25 bp, Saccharomyces pastorianus
catatttgctttgtttgcgtgggca

SEQ ID NO: 36578 - DNA, 25 bp, Saccharomyces pastorianus
atttccttcttcattgaaagcgtct

SEQ ID NO: 36579 - DNA, 25 bp, Saccharomyces pastorianus
tgcgggtaggtttcccgttcagaat

SEQ ID NO: 36580 - DNA, 25 bp, Saccharomyces pastorianus
gaaatcccctcacaaaaccaagtat

SEQ ID NO: 36581 - DNA, 25 bp, Saccharomyces pastorianus
atgatagtgtcaggcttcgtcacct

SEQ ID NO: 36582 - DNA, 25 bp, Saccharomyces pastorianus
tcaggcttcgtcacctcaaagagga

SEQ ID NO: 36583 - DNA, 25 bp, Saccharomyces pastorianus
gaaagcgtctcattcagggaaagtg

SEQ ID NO: 36584 - DNA, 25 bp, Saccharomyces pastorianus
gatcaaaaccgaagtctggctataa

SEQ ID NO: 36585 - DNA, 25 bp, Saccharomyces pastorianus
ggctataatttaccatttgcctaag

SEQ ID NO: 36586 - DNA, 25 bp, Saccharomyces pastorianus
ggcatggaccggttgggcatttaat

SEQ ID NO: 36587 - DNA, 25 bp, Saccharomyces pastorianus
gtcaggtctttgaagcagagcccaa

SEQ ID NO: 36588 - DNA, 25 bp, Saccharomyces pastorianus
ggtacagcgaatcggagctcacgaa

SEQ ID NO: 36589 - DNA, 25 bp, Saccharomyces pastorianus
ggaccagggaaccagctacgacact

SEQ ID NO: 36590 - DNA, 25 bp, Saccharomyces pastorianus
agatgtgctgtatcgaccggtgtgt

SEQ ID NO: 36591 - DNA, 25 bp, Saccharomyces pastorianus
acgtgtctcgagaagtgcattccgc

SEQ ID NO: 36592 - DNA, 25 bp, Saccharomyces pastorianus
acaattcgacgcgatgtgctccact

SEQ ID NO: 36593 - DNA, 25 bp, Saccharomyces pastorianus
cctcatcggagggtttgtacagaca

SEQ ID NO: 36594 - DNA, 25 bp, Saccharomyces pastorianus
agacgtggcgggagtacaattcgac

SEQ ID NO: 36595 - DNA, 25 bp, Saccharomyces pastorianus
atgtcgttatttctaaacagcctga

SEQ ID NO: 36596 - DNA, 25 bp, Saccharomyces pastorianus
gtacagacacgagggttcggaccag

SEQ ID NO: 36597 - DNA, 25 bp, Saccharomyces pastorianus
gaaaatgcactacagcaaccgcctc

SEQ ID NO: 36598 - DNA, 25 bp, Saccharomyces pastorianus
acaatatcatgaggacgtgtctcga

SEQ ID NO: 36599 - DNA, 25 bp, Saccharomyces pastorianus
gattgtttgtccagcgagactgact

SEQ ID NO: 36600 - DNA, 25 bp, Saccharomyces pastorianus
ggcgttttatgccttgtcaaatcta

SEQ ID NO: 36601 - DNA, 25 bp, Saccharomyces pastorianus
ggttagattgtatagcgcctgtgtt

SEQ ID NO: 36602 - DNA, 25 bp, Saccharomyces pastorianus
aatgagagccattgcactgttaact

SEQ ID NO: 36603 - DNA, 25 bp, Saccharomyces pastorianus
ggcacagccgtgcagaacaatttga

SEQ ID NO: 36604 - DNA, 25 bp, Saccharomyces pastorianus
gccttattgcgttggcgagcgacaa

SEQ ID NO: 36605 - DNA, 25 bp, Saccharomyces pastorianus
gggccattgttggaatttctcgatc

SEQ ID NO: 36606 - DNA, 25 bp, Saccharomyces pastorianus
gttttatctttcctttctcagttga

SEQ ID NO: 36607 - DNA, 25 bp, Saccharomyces pastorianus
atatgacacaggtctgcgaagcctt

SEQ ID NO: 36608 - DNA, 25 bp, Saccharomyces pastorianus
gcgctgctgctttatcaatcatagg

SEQ ID NO: 36609 - DNA, 25 bp, Saccharomyces pastorianus
gcctgtgttaagtgacgccaccgtc

SEQ ID NO: 36610 - DNA, 25 bp, Saccharomyces pastorianus
gaaagccgagcacaggtaacagcaa

SEQ ID NO: 36611 - DNA, 25 bp, Saccharomyces pastorianus
gaatcagacatacttcctatcaaga

SEQ ID NO: 36612 - DNA, 25 bp, Saccharomyces pastorianus
aggttctgcgccaaaatcgtcatcc

SEQ ID NO: 36613 - DNA, 25 bp, Saccharomyces pastorianus
gccattactgtcgtcaggttctgcg

SEQ ID NO: 36614 - DNA, 25 bp, Saccharomyces pastorianus
agtacaacccctacaatatcagcac

SEQ ID NO: 36615 - DNA, 25 bp, Saccharomyces pastorianus
gaagcttttatactgcatcgccatt

SEQ ID NO: 36616 - DNA, 25 bp, Saccharomyces pastorianus
gacaaacttcatccgctcataaaaa

SEQ ID NO: 36617 - DNA, 25 bp, Saccharomyces pastorianus
gatacggtcctccaaaatctgaaga

SEQ ID NO: 36618 - DNA, 25 bp, Saccharomyces pastorianus
gagtctgatatcatcttttgctgaa

SEQ ID NO: 36619 - DNA, 25 bp, Saccharomyces pastorianus
gagaaagacgccaaacccaaacgat

SEQ ID NO: 36620 - DNA, 25 bp, Saccharomyces pastorianus
aaacgatccgtcttcgaatagcagt

SEQ ID NO: 36621 - DNA, 25 bp, Saccharomyces pastorianus
gggatttacagattgacgtcctaca

SEQ ID NO: 36622 - DNA, 25 bp, Saccharomyces pastorianus
gacaacgccactaaccaaattgact

SEQ ID NO: 36623 - DNA, 25 bp, Saccharomyces pastorianus
atttcatctttacagttagccatca

SEQ ID NO: 36624 - DNA, 25 bp, Saccharomyces pastorianus
gaagtgcgacaccatggaatctttc

SEQ ID NO: 36625 - DNA, 25 bp, Saccharomyces pastorianus
gacaactctaattcgctatcactaa

SEQ ID NO: 36626 - DNA, 25 bp, Saccharomyces pastorianus
ttcggatcacccagaatgactttaa

SEQ ID NO: 36627 - DNA, 25 bp, Saccharomyces pastorianus
aaggatccggaatactttcaagaag

SEQ ID NO: 36628 - DNA, 25 bp, Saccharomyces pastorianus
cttgtttcaaagcttaggtccagat

SEQ ID NO: 36629 - DNA, 25 bp, Saccharomyces pastorianus
aaattgactcatctgttccattcgg

SEQ ID NO: 36630 - DNA, 25 bp, Saccharomyces pastorianus
tggaatctttcggttacgtagtcaa

SEQ ID NO: 36631 - DNA, 25 bp, Saccharomyces pastorianus
gaacttcctgagtcttatgaacaca

SEQ ID NO: 36632 - DNA, 25 bp, Saccharomyces pastorianus
agatagcttctctagagagcttata

SEQ ID NO: 36633 - DNA, 25 bp, Saccharomyces pastorianus
cagcagaatctttccatttatcaat

SEQ ID NO: 36634 - DNA, 25 bp, Saccharomyces pastorianus
taacggtacgtttagtgatctcgat

SEQ ID NO: 36635 - DNA, 25 bp, Saccharomyces pastorianus
aagcttttaaactcagggcactaca

SEQ ID NO: 36636 - DNA, 25 bp, Saccharomyces pastorianus
gctaccacatttcttgggtaaccaa

SEQ ID NO: 36637 - DNA, 25 bp, Saccharomyces pastorianus
tagtgatctcgataattcagcagaa

SEQ ID NO: 36638 - DNA, 25 bp, Saccharomyces pastorianus
aactgcgagtttgaatcttctactg

SEQ ID NO: 36639 - DNA, 25 bp, Saccharomyces pastorianus
ttcccagctcagaaaatgtgtgatt

SEQ ID NO: 36640 - DNA, 25 bp, Saccharomyces pastorianus
gaattagatgtccattcccagctca

SEQ ID NO: 36641 - DNA, 25 bp, Saccharomyces pastorianus
aacggttacaattgcagttgctcga

SEQ ID NO: 36642 - DNA, 25 bp, Saccharomyces pastorianus
gaataaacggcttgctaccacattt

SEQ ID NO: 36643 - DNA, 25 bp, Saccharomyces pastorianus
gaacttattgatctggttatggata

SEQ ID NO: 36644 - DNA, 25 bp, Saccharomyces pastorianus
ggatgtgccattattcgataacgct

SEQ ID NO: 36645 - DNA, 25 bp, Saccharomyces pastorianus
gtatcccacgctggatgagtttgat

SEQ ID NO: 36646 - DNA, 25 bp, Saccharomyces pastorianus
aacacagtctccagtagaactattg

SEQ ID NO: 36647 - DNA, 25 bp, Saccharomyces pastorianus
ggaaacaaaggctggtggcttaatt

SEQ ID NO: 36648 - DNA, 25 bp, Saccharomyces pastorianus
gaagtaagtgagctgaccaccgtac

SEQ ID NO: 36649 - DNA, 25 bp, Saccharomyces pastorianus
tcagctgcattatttgctaaggaaa

SEQ ID NO: 36650 - DNA, 25 bp, Saccharomyces pastorianus
gctgaccaccgtacaagaacttatt

SEQ ID NO: 36651 - DNA, 25 bp, Saccharomyces pastorianus
aaagttacaccggatgtgccattat

SEQ ID NO: 36652 - DNA, 25 bp, Saccharomyces pastorianus
gcattaatcatgtatcccacgctgg

SEQ ID NO: 36653 - DNA, 25 bp, Saccharomyces pastorianus
gaaaatagcattccatgatatctta

SEQ ID NO: 36654 - DNA, 25 bp, Saccharomyces pastorianus
gattctttgcccgatataaatacag

SEQ ID NO: 36655 - DNA, 25 bp, Saccharomyces pastorianus
ggcagcatgggctaaatcaccatat

SEQ ID NO: 36656 - DNA, 25 bp, Saccharomyces pastorianus
actggcctccggcaatgattctttg

SEQ ID NO: 36657 - DNA, 25 bp, Saccharomyces pastorianus
ggaaccattagcatcgtccagtaat

SEQ ID NO: 36658 - DNA, 25 bp, Saccharomyces pastorianus
gatgtttccaaacctgagtcacgta

SEQ ID NO: 36659 - DNA, 25 bp, Saccharomyces pastorianus
aaatctgcaattgcttcctcctata

SEQ ID NO: 36660 - DNA, 25 bp, Saccharomyces pastorianus
acaatcaatacagtcgaccatcgcg

SEQ ID NO: 36661 - DNA, 25 bp, Saccharomyces pastorianus
gataccgcctttacacacggatgag

SEQ ID NO: 36662 - DNA, 25 bp, Saccharomyces pastorianus
aaatactggctttaacaccgataat

SEQ ID NO: 36663 - DNA, 25 bp, Saccharomyces pastorianus
gagaccagcgtaactttggcagcat

SEQ ID NO: 36664 - DNA, 25 bp, Saccharomyces pastorianus
agctattttcggaccgataccgcct

SEQ ID NO: 36665 - DNA, 25 bp, Saccharomyces pastorianus
gtgccttgagcgtttcgtacatatc

SEQ ID NO: 36666 - DNA, 25 bp, Saccharomyces pastorianus
gcagcgttactggtctttgctaaca

SEQ ID NO: 36667 - DNA, 25 bp, Saccharomyces pastorianus
tgtttgggatcttggcggccagaca

SEQ ID NO: 36668 - DNA, 25 bp, Saccharomyces pastorianus
ttgcatgtcatgctccaggaggaag

SEQ ID NO: 36669 - DNA, 25 bp, Saccharomyces pastorianus
acaatgaggctgcttccgtgatatt

SEQ ID NO: 36670 - DNA, 25 bp, Saccharomyces pastorianus
gaacgcatatcattggcagccaagg

SEQ ID NO: 36671 - DNA, 25 bp, Saccharomyces pastorianus
ttccgtgatatttgtcgtcgactct

SEQ ID NO: 36672 - DNA, 25 bp, Saccharomyces pastorianus
tgccgatgcagctgaggatcttgat

SEQ ID NO: 36673 - DNA, 25 bp, Saccharomyces pastorianus
aagctggtcaattgtggcgtcgagt

SEQ ID NO: 36674 - DNA, 25 bp, Saccharomyces pastorianus
gttgtttctacaaagcccacgattg

SEQ ID NO: 36675 - DNA, 25 bp, Saccharomyces pastorianus
gccgtactggcgttgctattacaat

SEQ ID NO: 36676 - DNA, 25 bp, Saccharomyces pastorianus
ggcccctcagattaatctcttatac

SEQ ID NO: 36677 - DNA, 25 bp, Saccharomyces pastorianus
tatgtcttcattctggtagtgtacc

SEQ ID NO: 36678 - DNA, 25 bp, Saccharomyces pastorianus
gaaggtcttgaaagccgccttgtta

SEQ ID NO: 36679 - DNA, 25 bp, Saccharomyces pastorianus
gaaatttgctttaaccaggccctat

SEQ ID NO: 36680 - DNA, 25 bp, Saccharomyces pastorianus
aatcagcgaacagccatccatattt

SEQ ID NO: 36681 - DNA, 25 bp, Saccharomyces pastorianus
gctcacgacctgtttttccaaataa

SEQ ID NO: 36682 - DNA, 25 bp, Saccharomyces pastorianus
ctaggcgttaccgatcaattttgaa

SEQ ID NO: 36683 - DNA, 25 bp, Saccharomyces pastorianus
gaagctgagagactacaaccgggtt

SEQ ID NO: 36684 - DNA, 25 bp, Saccharomyces pastorianus
gatgaaaacgatgctcacgacctgt

SEQ ID NO: 36685 - DNA, 25 bp, Saccharomyces pastorianus
ccgggttgggctcaattgtttgtca

SEQ ID NO: 36686 - DNA, 25 bp, Saccharomyces pastorianus
agtgtaccttgttatgttcgcttca

SEQ ID NO: 36687 - DNA, 25 bp, Saccharomyces pastorianus
aaagggcaacttgctgttcacgtcc

SEQ ID NO: 36688 - DNA, 25 bp, Saccharomyces pastorianus
ggaaaacggtgtggtgcccatctcc

SEQ ID NO: 36689 - DNA, 25 bp, Saccharomyces pastorianus
atctcccaggtcaagttctctgaaa

SEQ ID NO: 36690 - DNA, 25 bp, Saccharomyces pastorianus
gggatacgctaaatggctcgctgat

SEQ ID NO: 36691 - DNA, 25 bp, Saccharomyces pastorianus
tagatgtgcccgcaaatgactcgtc

SEQ ID NO: 36692 - DNA, 25 bp, Saccharomyces pastorianus
ttgttcaattgctcgatggttcctc

SEQ ID NO: 36693 - DNA, 25 bp, Saccharomyces pastorianus
caatataatgtgctcgctcgcgttg

SEQ ID NO: 36694 - DNA, 25 bp, Saccharomyces pastorianus
tgtggtacgcactttccaggtccaa

SEQ ID NO: 36695 - DNA, 25 bp, Saccharomyces pastorianus
gctgcatcattcgtgcggtatggat

SEQ ID NO: 36696 - DNA, 25 bp, Saccharomyces pastorianus
tttttgaaccctgaagacggctcca

SEQ ID NO: 36697 - DNA, 25 bp, Saccharomyces pastorianus
atggttcctcccatcatcggaatag

SEQ ID NO: 36698 - DNA, 25 bp, Saccharomyces pastorianus
ggaagctctcagaaaagcccgcttt

SEQ ID NO: 36699 - DNA, 25 bp, Saccharomyces pastorianus
ttgtaatatatcctacccctgtacc

SEQ ID NO: 36700 - DNA, 25 bp, Saccharomyces pastorianus
aaacattttttctcaagccaccgat

SEQ ID NO: 36701 - DNA, 25 bp, Saccharomyces pastorianus
taatgaacaatattccgcccgtcca

SEQ ID NO: 36702 - DNA, 25 bp, Saccharomyces pastorianus
ttgtggtagcactttttcgccattc

SEQ ID NO: 36703 - DNA, 25 bp, Saccharomyces pastorianus
gtcgagagtctccaacaatatgtcc

SEQ ID NO: 36704 - DNA, 25 bp, Saccharomyces pastorianus
aatggccgtccaaactaatttcaag

SEQ ID NO: 36705 - DNA, 25 bp, Saccharomyces pastorianus
gagttcgaatcatagtggccaatcc

SEQ ID NO: 36706 - DNA, 25 bp, Saccharomyces pastorianus
acccgcgttaccttcaaatctaatg

SEQ ID NO: 36707 - DNA, 25 bp, Saccharomyces pastorianus
aaagcccgtctacttctattgtaat

SEQ ID NO: 36708 - DNA, 25 bp, Saccharomyces pastorianus
aagcatcccgaaggctacagctgat

SEQ ID NO: 36709 - DNA, 25 bp, Saccharomyces pastorianus
taacaacagtctttttgcctctctg

SEQ ID NO: 36710 - DNA, 25 bp, Saccharomyces pastorianus
aagctcgagcagacacgtgctgaga

SEQ ID NO: 36711 - DNA, 25 bp, Saccharomyces pastorianus
ccgcaagccatactgttcgattcaa

SEQ ID NO: 36712 - DNA, 25 bp, Saccharomyces pastorianus
tattcgactcggttccaaagcgttt

SEQ ID NO: 36713 - DNA, 25 bp, Saccharomyces pastorianus
ttatcaaaccaccacagactacttc

SEQ ID NO: 36714 - DNA, 25 bp, Saccharomyces pastorianus
ggaactgtagcacgcactcgaggtt

SEQ ID NO: 36715 - DNA, 25 bp, Saccharomyces pastorianus
gtttgccgcgatatgccattacgaa

SEQ ID NO: 36716 - DNA, 25 bp, Saccharomyces pastorianus
tgagatcggtctatcccttatcaaa

SEQ ID NO: 36717 - DNA, 25 bp, Saccharomyces pastorianus
agtagtgctgatcctttgaatagta

SEQ ID NO: 36718 - DNA, 25 bp, Saccharomyces pastorianus
ttttccacagcctatgctctaaagg

SEQ ID NO: 36719 - DNA, 25 bp, Saccharomyces pastorianus
acgtcttggcaaaactcagccttta

SEQ ID NO: 36720 - DNA, 25 bp, Saccharomyces pastorianus
atgtccctgttttggcatataatgc

SEQ ID NO: 36721 - DNA, 25 bp, Saccharomyces pastorianus
aattagggttctacctcttcatctt

SEQ ID NO: 36722 - DNA, 25 bp, Saccharomyces pastorianus
cttcatcttcctcttttatttctac

SEQ ID NO: 36723 - DNA, 25 bp, Saccharomyces pastorianus
ggcaattttgcaggcgtttgtttct

SEQ ID NO: 36724 - DNA, 25 bp, Saccharomyces pastorianus
ggctctcgttatttgtgacgggact

SEQ ID NO: 36725 - DNA, 25 bp, Saccharomyces pastorianus
ggacgccactgatattttcaggacg

SEQ ID NO: 36726 - DNA, 25 bp, Saccharomyces pastorianus
atggcaggaactgggctctcgttat

SEQ ID NO: 36727 - DNA, 25 bp, Saccharomyces pastorianus
gatggagcacaccagaggcaatttt

SEQ ID NO: 36728 - DNA, 25 bp, Saccharomyces pastorianus
ttgtttttctcttaaatgtccctgt

SEQ ID NO: 36729 - DNA, 25 bp, Saccharomyces pastorianus
aagaacatacctactggacgccact

SEQ ID NO: 36730 - DNA, 25 bp, Saccharomyces pastorianus
ttttcaggacgctgggtcaacgcaa

SEQ ID NO: 36731 - DNA, 25 bp, Saccharomyces pastorianus
tcatcagcctcttctattgacaatt

SEQ ID NO: 36732 - DNA, 25 bp, Saccharomyces pastorianus
atcccatggagcagttgactcacca

SEQ ID NO: 36733 - DNA, 25 bp, Saccharomyces pastorianus
tcaaagaccaaacatcccgtacgta

SEQ ID NO: 36734 - DNA, 25 bp, Saccharomyces pastorianus
aggcgacctggacaattctcaaaga

SEQ ID NO: 36735 - DNA, 25 bp, Saccharomyces pastorianus
gtgtctgggatgatgaaccctcctt

SEQ ID NO: 36736 - DNA, 25 bp, Saccharomyces pastorianus
agtggaagagctccttcatcagcct

SEQ ID NO: 36737 - DNA, 25 bp, Saccharomyces pastorianus
aatatgcaaactcttcatacccgct

SEQ ID NO: 36738 - DNA, 25 bp, Saccharomyces pastorianus
aatgcgttgacaatgtctctacccc

SEQ ID NO: 36739 - DNA, 25 bp, Saccharomyces pastorianus
atggctaatcaactctctaatgctg

SEQ ID NO: 36740 - DNA, 25 bp, Saccharomyces pastorianus
tgacaacatgccacaattcgggaat

SEQ ID NO: 36741 - DNA, 25 bp, Saccharomyces pastorianus
aacagcacgctaactatcccatgga

SEQ ID NO: 36742 - DNA, 25 bp, Saccharomyces pastorianus
gggagagttcctatcataactgcat

SEQ ID NO: 36743 - DNA, 25 bp, Saccharomyces pastorianus
gtgctttagatttgactacaccatc

SEQ ID NO: 36744 - DNA, 25 bp, Saccharomyces pastorianus
aatgccctgctagaccaatatgagt

SEQ ID NO: 36745 - DNA, 25 bp, Saccharomyces pastorianus
ataactgcattgcaaccccttcaaa

SEQ ID NO: 36746 - DNA, 25 bp, Saccharomyces pastorianus
agacgatttggttcacgatgtttat

SEQ ID NO: 36747 - DNA, 25 bp, Saccharomyces pastorianus
gaagctcaggttcagtaatacactt

SEQ ID NO: 36748 - DNA, 25 bp, Saccharomyces pastorianus
ttggcttcccacgtggatgtgaagt

SEQ ID NO: 36749 - DNA, 25 bp, Saccharomyces pastorianus
gtgaacgaagctacagttgactcat

SEQ ID NO: 36750 - DNA, 25 bp, Saccharomyces pastorianus
atttggtgtcaagctgtgcatcaca

SEQ ID NO: 36751 - DNA, 25 bp, Saccharomyces pastorianus
gcccaattcgccctcaaagaaggaa

SEQ ID NO: 36752 - DNA, 25 bp, Saccharomyces pastorianus
gggtccgatattgcttatgttttag

SEQ ID NO: 36753 - DNA, 25 bp, Saccharomyces pastorianus
atggttatgagttcacgtctcctta

SEQ ID NO: 36754 - DNA, 25 bp, Saccharomyces pastorianus
tgttgccctagaacctttcccggat

SEQ ID NO: 36755 - DNA, 25 bp, Saccharomyces pastorianus
gattcccatgtgatatcgtttcaac

SEQ ID NO: 36756 - DNA, 25 bp, Saccharomyces pastorianus
ggtttgcaaagatctgacggtaggt

SEQ ID NO: 36757 - DNA, 25 bp, Saccharomyces pastorianus
cacgtctccttatggccaaatgtac

SEQ ID NO: 36758 - DNA, 25 bp, Saccharomyces pastorianus
ttgtgccttttgaaacccttagaag

SEQ ID NO: 36759 - DNA, 25 bp, Saccharomyces pastorianus
gaagggctttactgaatgttgctaa

SEQ ID NO: 36760 - DNA, 25 bp, Saccharomyces pastorianus
taatgttcccgagtacgttgtgcct

SEQ ID NO: 36761 - DNA, 25 bp, Saccharomyces pastorianus
gcttacattacgctttcgagaccga

SEQ ID NO: 36762 - DNA, 25 bp, Saccharomyces pastorianus
tttcccggattgcagattcccatgt

SEQ ID NO: 36763 - DNA, 25 bp, Saccharomyces pastorianus
ggaggctgcttcatatttttacacc

SEQ ID NO: 36764 - DNA, 25 bp, Saccharomyces pastorianus
ggataccgatgactccgcattgaga

SEQ ID NO: 36765 - DNA, 25 bp, Saccharomyces pastorianus
aacggtgcactattacgtgtcacaa

SEQ ID NO: 36766 - DNA, 25 bp, Saccharomyces pastorianus
ggaaaaggatcacccagcgatatat

SEQ ID NO: 36767 - DNA, 25 bp, Saccharomyces pastorianus
catcctgatcgttaagggccatcta

SEQ ID NO: 36768 - DNA, 25 bp, Saccharomyces pastorianus
gggcattgtgatttgggactctcaa

SEQ ID NO: 36769 - DNA, 25 bp, Saccharomyces pastorianus
ggaagtttaaaagtcgtcgctgcga

SEQ ID NO: 36770 - DNA, 25 bp, Saccharomyces pastorianus
aaatctctcaagctacctggaaaag

SEQ ID NO: 36771 - DNA, 25 bp, Saccharomyces pastorianus
aacggatcatcagcgctactaaaat

SEQ ID NO: 36772 - DNA, 25 bp, Saccharomyces pastorianus
tatgaagcacttccgcagtacgatg

SEQ ID NO: 36773 - DNA, 25 bp, Saccharomyces pastorianus
ggagaactaccaacgtgtcaacaaa

SEQ ID NO: 36774 - DNA, 25 bp, Saccharomyces pastorianus
tgaaattccactctcggataccgat

SEQ ID NO: 36775 - DNA, 25 bp, Saccharomyces pastorianus
cttgccaagagagctgtacccagtg

SEQ ID NO: 36776 - DNA, 25 bp, Saccharomyces pastorianus
ggatcgaaccatttccttcgtaaat

SEQ ID NO: 36777 - DNA, 25 bp, Saccharomyces pastorianus
atgctccctcaacaagacagcgtaa

SEQ ID NO: 36778 - DNA, 25 bp, Saccharomyces pastorianus
gcctgaagcttattgcctgcgaaag

SEQ ID NO: 36779 - DNA, 25 bp, Saccharomyces pastorianus
aattgaagtctcgaatgctccctca

SEQ ID NO: 36780 - DNA, 25 bp, Saccharomyces pastorianus
caagcatgccgccaagattgatctt

SEQ ID NO: 36781 - DNA, 25 bp, Saccharomyces pastorianus
gaaacagactcttcagtgactagat

SEQ ID NO: 36782 - DNA, 25 bp, Saccharomyces pastorianus
aaatacgccgtggacatcggtgcag

SEQ ID NO: 36783 - DNA, 25 bp, Saccharomyces pastorianus
gatgcattgttggtctacaacccaa

SEQ ID NO: 36784 - DNA, 25 bp, Saccharomyces pastorianus
ggatcggccgtgtgactaagaacat

SEQ ID NO: 36785 - DNA, 25 bp, Saccharomyces pastorianus
ggaatgcaagactggacccctgaag

SEQ ID NO: 36786 - DNA, 25 bp, Saccharomyces pastorianus
ttttctatctctaccggttcagcaa

SEQ ID NO: 36787 - DNA, 25 bp, Saccharomyces pastorianus
aatcgtaatggatgacggtgtcgca

SEQ ID NO: 36788 - DNA, 25 bp, Saccharomyces pastorianus
ggttcagcaacaagggttatttcta

SEQ ID NO: 36789 - DNA, 25 bp, Saccharomyces pastorianus
gacggtgtcgcatggactaggacca

SEQ ID NO: 36790 - DNA, 25 bp, Saccharomyces pastorianus
gaagcaagaccatcaggcacaagac

SEQ ID NO: 36791 - DNA, 25 bp, Saccharomyces pastorianus
gatgctacgtggttgaagcaagacc

SEQ ID NO: 36792 - DNA, 25 bp, Saccharomyces pastorianus
gttatttctacgaccacgatgctac

SEQ ID NO: 36793 - DNA, 25 bp, Saccharomyces pastorianus
gggtcataggctctgttttctatct

SEQ ID NO: 36794 - DNA, 25 bp, Saccharomyces pastorianus
gccaggtctgtcaagtggactcttt

SEQ ID NO: 36795 - DNA, 25 bp, Saccharomyces pastorianus
ctgtcaagtggactctttccgcggg

SEQ ID NO: 36796 - DNA, 25 bp, Saccharomyces pastorianus
attgggttcattagccaggtctgtc

SEQ ID NO: 36797 - DNA, 25 bp, Saccharomyces pastorianus
gggtctgttcccaagttatttcgtg

SEQ ID NO: 36798 - DNA, 25 bp, Saccharomyces pastorianus
tggccagaggccaagacgatgtctt

SEQ ID NO: 36799 - DNA, 25 bp, Saccharomyces pastorianus
tatcatcttttccagtgtcacagcc

SEQ ID NO: 36800 - DNA, 25 bp, Saccharomyces pastorianus
aactttgaacgtggctcatcagctc

SEQ ID NO: 36801 - DNA, 25 bp, Saccharomyces pastorianus
ggtaggctgctcctggtatattaga

SEQ ID NO: 36802 - DNA, 25 bp, Saccharomyces pastorianus
aatattgttgttgtgcccttctacc

SEQ ID NO: 36803 - DNA, 25 bp, Saccharomyces pastorianus
agaagtcgctttgtcgcgttgcaat

SEQ ID NO: 36804 - DNA, 25 bp, Saccharomyces pastorianus
gttggttattcgcaatatgcccctg

SEQ ID NO: 36805 - DNA, 25 bp, Saccharomyces pastorianus
ctagggaacaccatcttatcatctt

SEQ ID NO: 36806 - DNA, 25 bp, Saccharomyces pastorianus
aaacttccgcgtcagctgtgtttac

SEQ ID NO: 36807 - DNA, 25 bp, Saccharomyces pastorianus
attgttgctacttcattggccagag

SEQ ID NO: 36808 - DNA, 25 bp, Saccharomyces pastorianus
gagactgtgaataccgctctgaaaa

SEQ ID NO: 36809 - DNA, 25 bp, Saccharomyces pastorianus
agcaggtttactttgatatcacggc

SEQ ID NO: 36810 - DNA, 25 bp, Saccharomyces pastorianus
tatcatcctcccgtattacgagagc

SEQ ID NO: 36811 - DNA, 25 bp, Saccharomyces pastorianus
gccgccgttacacatttcaagttta

SEQ ID NO: 36812 - DNA, 25 bp, Saccharomyces pastorianus
atgctgcaatgctttggaatcctga

SEQ ID NO: 36813 - DNA, 25 bp, Saccharomyces pastorianus
ggcagtgctgttgccctttgagaaa

SEQ ID NO: 36814 - DNA, 25 bp, Saccharomyces pastorianus
agagccttcaaggtatactccctcg

SEQ ID NO: 36815 - DNA, 25 bp, Saccharomyces pastorianus
atgtttcagggactctatcatcctc

SEQ ID NO: 36816 - DNA, 25 bp, Saccharomyces pastorianus
gaagaattcatcactacgtcactgt

SEQ ID NO: 36817 - DNA, 25 bp, Saccharomyces pastorianus
gagagctttctccatacaaatgatg

SEQ ID NO: 36818 - DNA, 25 bp, Saccharomyces pastorianus
gtctactggacttttacatcacatt

SEQ ID NO: 36819 - DNA, 25 bp, Saccharomyces pastorianus
acaacatcaacgtcttcattcagga

SEQ ID NO: 36820 - DNA, 25 bp, Saccharomyces pastorianus
ggaattgactcccagatcagccttg

SEQ ID NO: 36821 - DNA, 25 bp, Saccharomyces pastorianus
ggagcattcctagagtgacattcaa

SEQ ID NO: 36822 - DNA, 25 bp, Saccharomyces pastorianus
tactccgtaagtacatcgcagcatg

SEQ ID NO: 36823 - DNA, 25 bp, Saccharomyces pastorianus
gaaaacttccgggagcctgtccaat

SEQ ID NO: 36824 - DNA, 25 bp, Saccharomyces pastorianus
aaacggtccgtattcattccatagg

SEQ ID NO: 36825 - DNA, 25 bp, Saccharomyces pastorianus
gaacctaactacatctcgatctgtt

SEQ ID NO: 36826 - DNA, 25 bp, Saccharomyces pastorianus
ggattccgatgagctcaagacacta

SEQ ID NO: 36827 - DNA, 25 bp, Saccharomyces pastorianus
gggatcatctggtctcaaacattct

SEQ ID NO: 36828 - DNA, 25 bp, Saccharomyces pastorianus
gatctatgcatctcctctgttaacg

SEQ ID NO: 36829 - DNA, 25 bp, Saccharomyces pastorianus
ggacaccccacattctaagctaaag

SEQ ID NO: 36830 - DNA, 25 bp, Saccharomyces pastorianus
agtctacgactaagtttggcttcta

SEQ ID NO: 36831 - DNA, 25 bp, Saccharomyces pastorianus
tgctgtccaggttccagtaccaatc

SEQ ID NO: 36832 - DNA, 25 bp, Saccharomyces pastorianus
tgccttcccgatatccaaagtcaag

SEQ ID NO: 36833 - DNA, 25 bp, Saccharomyces pastorianus
taatgcagcagtatcggcgaccgcg

SEQ ID NO: 36834 - DNA, 25 bp, Saccharomyces pastorianus
ttgccaaatgcgatccggagtatgt

SEQ ID NO: 36835 - DNA, 25 bp, Saccharomyces pastorianus
gcgaccgcgtttgctgcagagttat

SEQ ID NO: 36836 - DNA, 25 bp, Saccharomyces pastorianus
gaaggcaacctgacttggatgacca

SEQ ID NO: 36837 - DNA, 25 bp, Saccharomyces pastorianus
gcattcgggttcctctgatgtggaa

SEQ ID NO: 36838 - DNA, 25 bp, Saccharomyces pastorianus
gaatcactggtattagcgcagctga

SEQ ID NO: 36839 - DNA, 25 bp, Saccharomyces pastorianus
gagctacaaccgcaccaagatgatg

SEQ ID NO: 36840 - DNA, 25 bp, Saccharomyces pastorianus
aagacgacaagcctacgcgtagtgt

SEQ ID NO: 36841 - DNA, 25 bp, Saccharomyces pastorianus
ctaccgtggacgaagaaggcgatga

SEQ ID NO: 36842 - DNA, 25 bp, Saccharomyces pastorianus
gatggcgtagcttattacaaacctt

SEQ ID NO: 36843 - DNA, 25 bp, Saccharomyces pastorianus
tatcactctaagaaaccctagcact

SEQ ID NO: 36844 - DNA, 25 bp, Saccharomyces pastorianus
gatcctataaatttcgctaccgtgg

SEQ ID NO: 36845 - DNA, 25 bp, Saccharomyces pastorianus
aagccaatgactgagctagccatac

SEQ ID NO: 36846 - DNA, 25 bp, Saccharomyces pastorianus
atgccactgatcataaagattccgc

SEQ ID NO: 36847 - DNA, 25 bp, Saccharomyces pastorianus
gggtgaatcagctgaagacctcaaa

SEQ ID NO: 36848 - DNA, 25 bp, Saccharomyces pastorianus
aagattccgctattctagaaactga

SEQ ID NO: 36849 - DNA, 25 bp, Saccharomyces pastorianus
atgccggtacaaaacaaacgccaga

SEQ ID NO: 36850 - DNA, 25 bp, Saccharomyces pastorianus
atggacgatgacactcatgaaggca

SEQ ID NO: 36851 - DNA, 25 bp, Saccharomyces pastorianus
gagctagccatacgtctgaacgaca

SEQ ID NO: 36852 - DNA, 25 bp, Saccharomyces pastorianus
gacaggctgccaatcaagccgttag

SEQ ID NO: 36853 - DNA, 25 bp, Saccharomyces pastorianus
gcagtgacacccttcgaagcaatta

SEQ ID NO: 36854 - DNA, 25 bp, Saccharomyces pastorianus
tggtttaaccttcctagtgggtgca

SEQ ID NO: 36855 - DNA, 25 bp, Saccharomyces pastorianus
gaaggcttttcaggtctttaccgcg

SEQ ID NO: 36856 - DNA, 25 bp, Saccharomyces pastorianus
aagacctgctgagagatcgtgaaac

SEQ ID NO: 36857 - DNA, 25 bp, Saccharomyces pastorianus
gaaagtgtgcttgcagtgacaccct

SEQ ID NO: 36858 - DNA, 25 bp, Saccharomyces pastorianus
ggattccacgaaatattcttctaca

SEQ ID NO: 36859 - DNA, 25 bp, Saccharomyces pastorianus
aattaaaactgccttgatcgatgac

SEQ ID NO: 36860 - DNA, 25 bp, Saccharomyces pastorianus
attattcagcactggttcgtgacga

SEQ ID NO: 36861 - DNA, 25 bp, Saccharomyces pastorianus
ctgtctactctactatgcctattga

SEQ ID NO: 36862 - DNA, 25 bp, Saccharomyces pastorianus
gcggtgttttacctgtttccatgag

SEQ ID NO: 36863 - DNA, 25 bp, Saccharomyces pastorianus
acctcaaaggcgttgttgtcatcat

SEQ ID NO: 36864 - DNA, 25 bp, Saccharomyces pastorianus
atagcctcatggatatgggtgtctc

SEQ ID NO: 36865 - DNA, 25 bp, Saccharomyces pastorianus
aaatatgaaccacacagcgccggaa

SEQ ID NO: 36866 - DNA, 25 bp, Saccharomyces pastorianus
ggtgactgcgtcaatgattcccaaa

SEQ ID NO: 36867 - DNA, 25 bp, Saccharomyces pastorianus
actatgtctctctcactaggaagtt

SEQ ID NO: 36868 - DNA, 25 bp, Saccharomyces pastorianus
gacacaatcattctacccaacataa

SEQ ID NO: 36869 - DNA, 25 bp, Saccharomyces pastorianus
tgtgcaagtcaactactgtccaagg

SEQ ID NO: 36870 - DNA, 25 bp, Saccharomyces pastorianus
gactctccttgacttttttcgatga

SEQ ID NO: 36871 - DNA, 25 bp, Saccharomyces pastorianus
ggaacttcggtatccaatgtgcaag

SEQ ID NO: 36872 - DNA, 25 bp, Saccharomyces pastorianus
gaaatccaccaatctcaaacatact

SEQ ID NO: 36873 - DNA, 25 bp, Saccharomyces pastorianus
tgtctaataaaccagctcccactat

SEQ ID NO: 36874 - DNA, 25 bp, Saccharomyces pastorianus
gactttgattccgactatgattctg

SEQ ID NO: 36875 - DNA, 25 bp, Saccharomyces pastorianus
tgcgttctgtggctcgtttagaaaa

SEQ ID NO: 36876 - DNA, 25 bp, Saccharomyces pastorianus
gaaggcaggtttaatcaatgatgac

SEQ ID NO: 36877 - DNA, 25 bp, Saccharomyces pastorianus
aagcaatgaatgcacgtcctatcaa

SEQ ID NO: 36878 - DNA, 25 bp, Saccharomyces pastorianus
gtgataccgaacacttaccagaatg

SEQ ID NO: 36879 - DNA, 25 bp, Saccharomyces pastorianus
gcacgtcctatcaagaaagtcgctg

SEQ ID NO: 36880 - DNA, 25 bp, Saccharomyces pastorianus
taaggttaccaagaaaccacaggct

SEQ ID NO: 36881 - DNA, 25 bp, Saccharomyces pastorianus
aaaacggatgcgttctgtggctcgt

SEQ ID NO: 36882 - DNA, 25 bp, Saccharomyces pastorianus
atagatatactttccgtgataccga

SEQ ID NO: 36883 - DNA, 25 bp, Saccharomyces pastorianus
aagaagctgctatggcaatcaaaga

SEQ ID NO: 36884 - DNA, 25 bp, Saccharomyces pastorianus
tttggcacaccagttggcattgggc

SEQ ID NO: 36885 - DNA, 25 bp, Saccharomyces pastorianus
aggttccttcaaagatgtcatgttt

SEQ ID NO: 36886 - DNA, 25 bp, Saccharomyces pastorianus
gaaggctcatctcaaaactcacgaa

SEQ ID NO: 36887 - DNA, 25 bp, Saccharomyces pastorianus
aatcggcggtgcaattttctttgaa

SEQ ID NO: 36888 - DNA, 25 bp, Saccharomyces pastorianus
acacatctttggtctatttgcccca

SEQ ID NO: 36889 - DNA, 25 bp, Saccharomyces pastorianus
caaatccgttgaatggcaggtcaat

SEQ ID NO: 36890 - DNA, 25 bp, Saccharomyces pastorianus
atttgccccaactgactaatgtgaa

SEQ ID NO: 36891 - DNA, 25 bp, Saccharomyces pastorianus
gagaacattaccattagagacacat

SEQ ID NO: 36892 - DNA, 25 bp, Saccharomyces pastorianus
gtagcgcatttatcaagagttcgtc

SEQ ID NO: 36893 - DNA, 25 bp, Saccharomyces pastorianus
aaactcacgaactcaacggctccaa

SEQ ID NO: 36894 - DNA, 25 bp, Saccharomyces pastorianus
cggctccaaccatgcaattaaactt

SEQ ID NO: 36895 - DNA, 25 bp, Saccharomyces pastorianus
gatggaacagtcctcgaaaagggtt

SEQ ID NO: 36896 - DNA, 25 bp, Saccharomyces pastorianus
gacactgacgaaggtacgtttctta

SEQ ID NO: 36897 - DNA, 25 bp, Saccharomyces pastorianus
cgggatagcgtcttgcttgaaagtt

SEQ ID NO: 36898 - DNA, 25 bp, Saccharomyces pastorianus
ggcttcaagttaacacaacacgggt

SEQ ID NO: 36899 - DNA, 25 bp, Saccharomyces pastorianus
gcagggaggatacactatacaggat

SEQ ID NO: 36900 - DNA, 25 bp, Saccharomyces pastorianus
tactagcagcacagaagggcttcaa

SEQ ID NO: 36901 - DNA, 25 bp, Saccharomyces pastorianus
gatgacaccgccgaattggcaggta

SEQ ID NO: 36902 - DNA, 25 bp, Saccharomyces pastorianus
aaccattttgtgatgacaccgccga

SEQ ID NO: 36903 - DNA, 25 bp, Saccharomyces pastorianus
caacacgggttatttcgggatagcg

SEQ ID NO: 36904 - DNA, 25 bp, Saccharomyces pastorianus
ttggcaggtatcatggaatcacttt

SEQ ID NO: 36905 - DNA, 25 bp, Saccharomyces pastorianus
gacggttatattcactgtttcttac

SEQ ID NO: 36906 - DNA, 25 bp, Saccharomyces pastorianus
ggaatcactttgtatcaagctttac

SEQ ID NO: 36907 - DNA, 25 bp, Saccharomyces pastorianus
gacccgaccagctatcttattaagt

SEQ ID NO: 36908 - DNA, 25 bp, Saccharomyces pastorianus
atggctgaactgatgggcaactcga

SEQ ID NO: 36909 - DNA, 25 bp, Saccharomyces pastorianus
atgctacgcatcatctattgccttc

SEQ ID NO: 36910 - DNA, 25 bp, Saccharomyces pastorianus
gcatgacattgaccctactgacgat

SEQ ID NO: 36911 - DNA, 25 bp, Saccharomyces pastorianus
aatttcctgtcattaatgctacgca

SEQ ID NO: 36912 - DNA, 25 bp, Saccharomyces pastorianus
tgaaacctctggcatgcatgacatt

SEQ ID NO: 36913 - DNA, 25 bp, Saccharomyces pastorianus
gaggcacgatcacggatactgaact

SEQ ID NO: 36914 - DNA, 25 bp, Saccharomyces pastorianus
gtgttcttctttccaaatttcctgt

SEQ ID NO: 36915 - DNA, 25 bp, Saccharomyces pastorianus
attgccttcccctgtgggagagcta

SEQ ID NO: 36916 - DNA, 25 bp, Saccharomyces pastorianus
tgaactgcaggtcggtaaattccaa

SEQ ID NO: 36917 - DNA, 25 bp, Saccharomyces pastorianus
agccgaacgctcagattccatttat

SEQ ID NO: 36918 - DNA, 25 bp, Saccharomyces pastorianus
aaattcattccttggtgggtttgca

SEQ ID NO: 36919 - DNA, 25 bp, Saccharomyces pastorianus
ggtctcactctcctagataggctga

SEQ ID NO: 36920 - DNA, 25 bp, Saccharomyces pastorianus
gcggctcccttggaagcatatcgat

SEQ ID NO: 36921 - DNA, 25 bp, Saccharomyces pastorianus
gtgcattttaagatgcggctccctt

SEQ ID NO: 36922 - DNA, 25 bp, Saccharomyces pastorianus
tttcccagacctttgtgactttgag

SEQ ID NO: 36923 - DNA, 25 bp, Saccharomyces pastorianus
gaagaatgcttcgagctggcacatc

SEQ ID NO: 36924 - DNA, 25 bp, Saccharomyces pastorianus
atgatcactacccagcgtatcactt

SEQ ID NO: 36925 - DNA, 25 bp, Saccharomyces pastorianus
gacgttacagtgatattgtcgccaa

SEQ ID NO: 36926 - DNA, 25 bp, Saccharomyces pastorianus
gagctggcacatcgtttcaatgaat

SEQ ID NO: 36927 - DNA, 25 bp, Saccharomyces pastorianus
gagcgcagaacgagcctatgatcac

SEQ ID NO: 36928 - DNA, 25 bp, Saccharomyces pastorianus
gagtcaagccgtttatttggtttgc

SEQ ID NO: 36929 - DNA, 25 bp, Saccharomyces pastorianus
tcaactggctttgtaaatgctgaaa

SEQ ID NO: 36930 - DNA, 25 bp, Saccharomyces pastorianus
tgcgaactattcgacctagtagagg

SEQ ID NO: 36931 - DNA, 25 bp, Saccharomyces pastorianus
gacatagcatcatcgttgatcctga

SEQ ID NO: 36932 - DNA, 25 bp, Saccharomyces pastorianus
gaaaggtcttacaacaacataacgt

SEQ ID NO: 36933 - DNA, 25 bp, Saccharomyces pastorianus
gagggcacaaaaagacatagcatca

SEQ ID NO: 36934 - DNA, 25 bp, Saccharomyces pastorianus
caaaacaattcaactggctttgtaa

SEQ ID NO: 36935 - DNA, 25 bp, Saccharomyces pastorianus
aactattcgacctagtagagggcac

SEQ ID NO: 36936 - DNA, 25 bp, Saccharomyces pastorianus
aatgctgaaaggtcttacaacaaca

SEQ ID NO: 36937 - DNA, 25 bp, Saccharomyces pastorianus
attcgacctagtagagggcacaaaa

SEQ ID NO: 36938 - DNA, 25 bp, Saccharomyces pastorianus
aatatatgcgaactattcgacctag

SEQ ID NO: 36939 - DNA, 25 bp, Saccharomyces pastorianus
atagcatcatcgttgatcctgaaag

SEQ ID NO: 36940 - DNA, 25 bp, Saccharomyces pastorianus
aagacattttgtggcgccttgacat

SEQ ID NO: 36941 - DNA, 25 bp, Saccharomyces pastorianus
gctggtgtactgtcgcttatttgta

SEQ ID NO: 36942 - DNA, 25 bp, Saccharomyces pastorianus
atggtgccactatcagtatttctgc

SEQ ID NO: 36943 - DNA, 25 bp, Saccharomyces pastorianus
gtatttctgcatccgctagattcat

SEQ ID NO: 36944 - DNA, 25 bp, Saccharomyces pastorianus
tactcttttgtccacaaccggtata

SEQ ID NO: 36945 - DNA, 25 bp, Saccharomyces pastorianus
ggttacattatgtcttggtcccaag

SEQ ID NO: 36946 - DNA, 25 bp, Saccharomyces pastorianus
taagtcttttctgtatggtggccct

SEQ ID NO: 36947 - DNA, 25 bp, Saccharomyces pastorianus
tatttttcccgtcgtagatcgtaat

SEQ ID NO: 36948 - DNA, 25 bp, Saccharomyces pastorianus
gagccagaacagacgggtactcttt

SEQ ID NO: 36949 - DNA, 25 bp, Saccharomyces pastorianus
gtatatttggttgctttgtcgtcat

SEQ ID NO: 36950 - DNA, 25 bp, Saccharomyces pastorianus
gtcagttggtggtcgctaagtcttt

SEQ ID NO: 36951 - DNA, 25 bp, Saccharomyces pastorianus
aaaattatcttttctgcccagtatc

SEQ ID NO: 36952 - DNA, 25 bp, Saccharomyces pastorianus
gttgttatccgctcgctacaaataa

SEQ ID NO: 36953 - DNA, 25 bp, Saccharomyces pastorianus
gcaagtttccaaaagctcggcattg

SEQ ID NO: 36954 - DNA, 25 bp, Saccharomyces pastorianus
gttcttctctgcagatatggtacct

SEQ ID NO: 36955 - DNA, 25 bp, Saccharomyces pastorianus
aaatacgtctgtcgaatttggcgat

SEQ ID NO: 36956 - DNA, 25 bp, Saccharomyces pastorianus
aacgtgccattgttcttgcctcaat

SEQ ID NO: 36957 - DNA, 25 bp, Saccharomyces pastorianus
tatccctcaggcatatttgctgtgg

SEQ ID NO: 36958 - DNA, 25 bp, Saccharomyces pastorianus
gcatgtttccgcttttatatcctta

SEQ ID NO: 36959 - DNA, 25 bp, Saccharomyces pastorianus
aaaggttgttgtgctcttttggcaa

SEQ ID NO: 36960 - DNA, 25 bp, Saccharomyces pastorianus
gatacgtacgcgtccattggatcca

SEQ ID NO: 36961 - DNA, 25 bp, Saccharomyces pastorianus
gatcatcgtcgcaattttgatacgt

SEQ ID NO: 36962 - DNA, 25 bp, Saccharomyces pastorianus
tagacttagaccctgaatcacaatt

SEQ ID NO: 36963 - DNA, 25 bp, Saccharomyces pastorianus
aatctctgtgattgctaatgctaaa

SEQ ID NO: 36964 - DNA, 25 bp, Saccharomyces pastorianus
aagtattcattctacaatctctgtg

SEQ ID NO: 36965 - DNA, 25 bp, Saccharomyces pastorianus
aagatcctgataacgctgaagaaga

SEQ ID NO: 36966 - DNA, 25 bp, Saccharomyces pastorianus
ggcaactatacccaattgacattag

SEQ ID NO: 36967 - DNA, 25 bp, Saccharomyces pastorianus
atagatgaacgtgcgtccgacttga

SEQ ID NO: 36968 - DNA, 25 bp, Saccharomyces pastorianus
aagccagatctgtactaatagccga

SEQ ID NO: 36969 - DNA, 25 bp, Saccharomyces pastorianus
gtgcgtccgacttgaggatgactat

SEQ ID NO: 36970 - DNA, 25 bp, Saccharomyces pastorianus
atttgatttgtgctggaattcctta

SEQ ID NO: 36971 - DNA, 25 bp, Saccharomyces pastorianus
gtacattatctgttttatatccgga

SEQ ID NO: 36972 - DNA, 25 bp, Saccharomyces pastorianus
agttttgagtcgtactggtccagta

SEQ ID NO: 36973 - DNA, 25 bp, Saccharomyces pastorianus
gagtgaatttttccctaaagacaat

SEQ ID NO: 36974 - DNA, 25 bp, Saccharomyces pastorianus
gtgctttggtcacccaattgtacca

SEQ ID NO: 36975 - DNA, 25 bp, Saccharomyces pastorianus
aatcgtatacaatccttcaccattc

SEQ ID NO: 36976 - DNA, 25 bp, Saccharomyces pastorianus
tttgatgatcatttcgtcgagcaag

SEQ ID NO: 36977 - DNA, 25 bp, Saccharomyces pastorianus
gatgtttctgtaattgacaccactg

SEQ ID NO: 36978 - DNA, 25 bp, Saccharomyces pastorianus
tttgggctctaaaggtgtgttgttt

SEQ ID NO: 36979 - DNA, 25 bp, Saccharomyces pastorianus
ggaattccttccagccgttaaagat

SEQ ID NO: 36980 - DNA, 25 bp, Saccharomyces pastorianus
ggcaagttcgttgactattcagaaa

SEQ ID NO: 36981 - DNA, 25 bp, Saccharomyces pastorianus
acaggccaagtttccaaatcgtata

SEQ ID NO: 36982 - DNA, 25 bp, Saccharomyces pastorianus
tgaaattccagaccctatatcgata

SEQ ID NO: 36983 - DNA, 25 bp, Saccharomyces pastorianus
acaccactggagctggagacacctt

SEQ ID NO: 36984 - DNA, 25 bp, Saccharomyces pastorianus
aagcagtttcttcatcgggtttatt

SEQ ID NO: 36985 - DNA, 25 bp, Saccharomyces pastorianus
tccctggtcgattgttgttttggca

SEQ ID NO: 36986 - DNA, 25 bp, Saccharomyces pastorianus
ccaatcgtcttgtttttcggtacag

SEQ ID NO: 36987 - DNA, 25 bp, Saccharomyces pastorianus
aactgtgggcgcttttatttcaaga

SEQ ID NO: 36988 - DNA, 25 bp, Saccharomyces pastorianus
gaaagtgcctttggatcgtctggtt

SEQ ID NO: 36989 - DNA, 25 bp, Saccharomyces pastorianus
gttcctgcctcattattagcgttta

SEQ ID NO: 36990 - DNA, 25 bp, Saccharomyces pastorianus
tcgctgtgacaattgctaccattct

SEQ ID NO: 36991 - DNA, 25 bp, Saccharomyces pastorianus
aatgacggtgtctttgctatcttat

SEQ ID NO: 36992 - DNA, 25 bp, Saccharomyces pastorianus
tgggttccctaacgttactgctatt

SEQ ID NO: 36993 - DNA, 25 bp, Saccharomyces pastorianus
gtcgttggtacttttgtctcgcaca

SEQ ID NO: 36994 - DNA, 25 bp, Saccharomyces pastorianus
tagcgtttatttgcgtcatcaccat

SEQ ID NO: 36995 - DNA, 25 bp, Saccharomyces pastorianus
ctttgttccacattcgctcgaaaat

SEQ ID NO: 36996 - DNA, 25 bp, Saccharomyces pastorianus
atttgtggtcttgttggtgttctta

SEQ ID NO: 36997 - DNA, 25 bp, Saccharomyces pastorianus
taattacctagtatccaatggctgg

SEQ ID NO: 36998 - DNA, 25 bp, Saccharomyces pastorianus
attattggtttctctggatacatca

SEQ ID NO: 36999 - DNA, 25 bp, Saccharomyces pastorianus
atttttcagatcgtatcggtcgtaa

SEQ ID NO: 37000 - DNA, 25 bp, Saccharomyces pastorianus
gaatgtttccaaccaatcagagaca

SEQ ID NO: 37001 - DNA, 25 bp, Saccharomyces pastorianus
ctatggtatatctgcggtaactggt

SEQ ID NO: 37002 - DNA, 25 bp, Saccharomyces pastorianus
tcatcatcttctatgcgctcatgaa

SEQ ID NO: 37003 - DNA, 25 bp, Saccharomyces pastorianus
gttctagctgtattaggtgttccaa

SEQ ID NO: 37004 - DNA, 25 bp, Saccharomyces pastorianus
attagcagcgaatcatcagcaaccg

SEQ ID NO: 37005 - DNA, 25 bp, Saccharomyces pastorianus
gttccaattggtgcttatttttcag

SEQ ID NO: 37006 - DNA, 25 bp, Saccharomyces pastorianus
gcgatcgatacttgtactccagggt

SEQ ID NO: 37007 - DNA, 25 bp, Saccharomyces pastorianus
aaaaccgtattagcgcactgtgttc

SEQ ID NO: 37008 - DNA, 25 bp, Saccharomyces pastorianus
gcagacaggcctttgccgtttcaag

SEQ ID NO: 37009 - DNA, 25 bp, Saccharomyces pastorianus
agcatactagctaccggcagacagg

SEQ ID NO: 37010 - DNA, 25 bp, Saccharomyces pastorianus
tggtaccgacgtttcagcaggtcat

SEQ ID NO: 37011 - DNA, 25 bp, Saccharomyces pastorianus
gtttcagagtgcctgtatctagcaa

SEQ ID NO: 37012 - DNA, 25 bp, Saccharomyces pastorianus
ctaactcttctttgacttcaggaga

SEQ ID NO: 37013 - DNA, 25 bp, Saccharomyces pastorianus
tggtgagacaacgacgctgcggcat

SEQ ID NO: 37014 - DNA, 25 bp, Saccharomyces pastorianus
gtcgacacattccattggcagctac

SEQ ID NO: 37015 - DNA, 25 bp, Saccharomyces pastorianus
agcaggtcattcttgcagcatacta

SEQ ID NO: 37016 - DNA, 25 bp, Saccharomyces pastorianus
ctgtgttcacttgacagacgctgaa

SEQ ID NO: 37017 - DNA, 25 bp, Saccharomyces pastorianus
aagacttactactacctgtccaggg

SEQ ID NO: 37018 - DNA, 25 bp, Saccharomyces pastorianus
ggtggcgacggcaagtttttccaga

SEQ ID NO: 37019 - DNA, 25 bp, Saccharomyces pastorianus
ttggctggctcttttcttcattgtc

SEQ ID NO: 37020 - DNA, 25 bp, Saccharomyces pastorianus
agagcccatccattgacactggtaa

SEQ ID NO: 37021 - DNA, 25 bp, Saccharomyces pastorianus
acttttcttccattcaaggctgtgc

SEQ ID NO: 37022 - DNA, 25 bp, Saccharomyces pastorianus
ttgctaacgctatctggtctaccat

SEQ ID NO: 37023 - DNA, 25 bp, Saccharomyces pastorianus
aagaacttcgcgttcatctggacat

SEQ ID NO: 37024 - DNA, 25 bp, Saccharomyces pastorianus
gtctgtacaccggatgctacgtgaa

SEQ ID NO: 37025 - DNA, 25 bp, Saccharomyces pastorianus
gaaaagtctacctacaccagcggta

SEQ ID NO: 37026 - DNA, 25 bp, Saccharomyces pastorianus
atccgtcttcttgatgcttgctaac

SEQ ID NO: 37027 - DNA, 25 bp, Saccharomyces pastorianus
gtgctttactgtgtgctgtcttggc

SEQ ID NO: 37028 - DNA, 25 bp, Saccharomyces pastorianus
ttgggtttgaccattttcacgtggg

SEQ ID NO: 37029 - DNA, 25 bp, Saccharomyces pastorianus
ggttgcttatattaccggcgctaat

SEQ ID NO: 37030 - DNA, 25 bp, Saccharomyces pastorianus
gcttctgacgttgtatgtcgttact

SEQ ID NO: 37031 - DNA, 25 bp, Saccharomyces pastorianus
aatcggtgcatgctttgggagtcca

SEQ ID NO: 37032 - DNA, 25 bp, Saccharomyces pastorianus
gttcatttagttgttgccactctta

SEQ ID NO: 37033 - DNA, 25 bp, Saccharomyces pastorianus
gaagatttttcctattggttgctta

SEQ ID NO: 37034 - DNA, 25 bp, Saccharomyces pastorianus
aattccgttggtgatttagtgtcga

SEQ ID NO: 37035 - DNA, 25 bp, Saccharomyces pastorianus
gtccactattgtatttcctattcgg

SEQ ID NO: 37036 - DNA, 25 bp, Saccharomyces pastorianus
aagatcagtcttttgcttctgacgt

SEQ ID NO: 37037 - DNA, 25 bp, Saccharomyces pastorianus
ttagcgtgtatttcgaagactgttc

SEQ ID NO: 37038 - DNA, 25 bp, Saccharomyces pastorianus
gggtcggaatctcgattgcattttt

SEQ ID NO: 37039 - DNA, 25 bp, Saccharomyces pastorianus
atgctggtatttcaaggctgctgct

SEQ ID NO: 37040 - DNA, 25 bp, Saccharomyces pastorianus
gtgtgccaaagactgcgagtaccct

SEQ ID NO: 37041 - DNA, 25 bp, Saccharomyces pastorianus
gctgctgcttctcaaccaagaggga

SEQ ID NO: 37042 - DNA, 25 bp, Saccharomyces pastorianus
aagagaccctcaactggccgtaaag

SEQ ID NO: 37043 - DNA, 25 bp, Saccharomyces pastorianus
ggagcggcaaacgtcttgaaaccaa

SEQ ID NO: 37044 - DNA, 25 bp, Saccharomyces pastorianus
gcgattctccgcaaacgttgtatga

SEQ ID NO: 37045 - DNA, 25 bp, Saccharomyces pastorianus
tttgccctgggcttttactatgaaa

SEQ ID NO: 37046 - DNA, 25 bp, Saccharomyces pastorianus
gttatcgttgagtggctggtatcta

SEQ ID NO: 37047 - DNA, 25 bp, Saccharomyces pastorianus
gagtaccctctagcgcaatggaagt

SEQ ID NO: 37048 - DNA, 25 bp, Saccharomyces pastorianus
ggatgagccacttatacggacttaa

SEQ ID NO: 37049 - DNA, 25 bp, Saccharomyces pastorianus
agagtagcaagtgttcggacggcaa

SEQ ID NO: 37050 - DNA, 25 bp, Saccharomyces pastorianus
aatagaaatctcttcgtccgtgccg

SEQ ID NO: 37051 - DNA, 25 bp, Saccharomyces pastorianus
gtacggtgatgttcctgacgagttt

SEQ ID NO: 37052 - DNA, 25 bp, Saccharomyces pastorianus
gcgactctactgacccatttaatag

SEQ ID NO: 37053 - DNA, 25 bp, Saccharomyces pastorianus
cagcagcatttgtcacaccggaaat

SEQ ID NO: 37054 - DNA, 25 bp, Saccharomyces pastorianus
gtttacatcaatctttcggagcaaa

SEQ ID NO: 37055 - DNA, 25 bp, Saccharomyces pastorianus
aatgaaggaccctgtcactttgcca

SEQ ID NO: 37056 - DNA, 25 bp, Saccharomyces pastorianus
gaaagatatcccagcagcatttgtc

SEQ ID NO: 37057 - DNA, 25 bp, Saccharomyces pastorianus
agttcattggcgctgttgctaaaga

SEQ ID NO: 37058 - DNA, 25 bp, Saccharomyces pastorianus
ccgtgccgttgacattcttggtaga

SEQ ID NO: 37059 - DNA, 25 bp, Saccharomyces pastorianus
cagattggccagtatgctgaactat

SEQ ID NO: 37060 - DNA, 25 bp, Saccharomyces pastorianus
aaagcgcatctcctaagcgactcta

SEQ ID NO: 37061 - DNA, 25 bp, Saccharomyces pastorianus
atctctaatccaggcgagtgcttga

SEQ ID NO: 37062 - DNA, 25 bp, Saccharomyces pastorianus
acaccttggtcggagaatagtctgc

SEQ ID NO: 37063 - DNA, 25 bp, Saccharomyces pastorianus
agtctgcttactatcccaagtgaaa

SEQ ID NO: 37064 - DNA, 25 bp, Saccharomyces pastorianus
gacactcagcccttacatatttatt

SEQ ID NO: 37065 - DNA, 25 bp, Saccharomyces pastorianus
ccctgaccattcctttaatcttaat

SEQ ID NO: 37066 - DNA, 25 bp, Saccharomyces pastorianus
tttattaccccgcagaaatctctaa

SEQ ID NO: 37067 - DNA, 25 bp, Saccharomyces pastorianus
gaggtaacagtagccatccgcaggg

SEQ ID NO: 37068 - DNA, 25 bp, Saccharomyces pastorianus
attgataccaaatgtgcccggattt

SEQ ID NO: 37069 - DNA, 25 bp, Saccharomyces pastorianus
aaagattcaccaaagctactgctca

SEQ ID NO: 37070 - DNA, 25 bp, Saccharomyces pastorianus
gtgcccggattttatctatcttaca

SEQ ID NO: 37071 - DNA, 25 bp, Saccharomyces pastorianus
ttgtattctaggtttgcccctgacc

SEQ ID NO: 37072 - DNA, 25 bp, Saccharomyces pastorianus
agttgcaaccgtctttaccattgat

SEQ ID NO: 37073 - DNA, 25 bp, Saccharomyces pastorianus
gaatatcgctgtcttgtctcaacaa

SEQ ID NO: 37074 - DNA, 25 bp, Saccharomyces pastorianus
gaggatctccgcatttgcacagttg

SEQ ID NO: 37075 - DNA, 25 bp, Saccharomyces pastorianus
ggaaaaccatggacctttcagcggt

SEQ ID NO: 37076 - DNA, 25 bp, Saccharomyces pastorianus
ttcttggtcccgattcaggagcaat

SEQ ID NO: 37077 - DNA, 25 bp, Saccharomyces pastorianus
gaataaccacgtctgatctgattaa

SEQ ID NO: 37078 - DNA, 25 bp, Saccharomyces pastorianus
actattgttcaatgccccaagtctt

SEQ ID NO: 37079 - DNA, 25 bp, Saccharomyces pastorianus
aagactttgaacgattcctctccct

SEQ ID NO: 37080 - DNA, 25 bp, Saccharomyces pastorianus
agttccatcgctggcatctataatg

SEQ ID NO: 37081 - DNA, 25 bp, Saccharomyces pastorianus
taattctctagcgttcttcttggtc

SEQ ID NO: 37082 - DNA, 25 bp, Saccharomyces pastorianus
gaggtccaccaaaggcttcatttca

SEQ ID NO: 37083 - DNA, 25 bp, Saccharomyces pastorianus
agcacgccggaaaaattcgccatcg

SEQ ID NO: 37084 - DNA, 25 bp, Saccharomyces pastorianus
gacgactatatatctccaatcactt

SEQ ID NO: 37085 - DNA, 25 bp, Saccharomyces pastorianus
aataacctgttcgtggtgacttcga

SEQ ID NO: 37086 - DNA, 25 bp, Saccharomyces pastorianus
gaggagtcatcagtccatgcattct

SEQ ID NO: 37087 - DNA, 25 bp, Saccharomyces pastorianus
acgacggcgggctgaataacaccaa

SEQ ID NO: 37088 - DNA, 25 bp, Saccharomyces pastorianus
atggcaatgctgtgtctgctatcaa

SEQ ID NO: 37089 - DNA, 25 bp, Saccharomyces pastorianus
tgctatcaagtcctcgtccaagaaa

SEQ ID NO: 37090 - DNA, 25 bp, Saccharomyces pastorianus
aaggcagcgcccattgttgttggta

SEQ ID NO: 37091 - DNA, 25 bp, Saccharomyces pastorianus
taatgacggcggcaacgctcaggat

SEQ ID NO: 37092 - DNA, 25 bp, Saccharomyces pastorianus
tataatctcacccaagtcgagcagg

SEQ ID NO: 37093 - DNA, 25 bp, Saccharomyces pastorianus
taacaccaagtctcatctcagcggg

SEQ ID NO: 37094 - DNA, 25 bp, Saccharomyces pastorianus
gatagaccacgcaggaagtccgaga

SEQ ID NO: 37095 - DNA, 25 bp, Saccharomyces pastorianus
caaatgccagttcggcgtttgcgta

SEQ ID NO: 37096 - DNA, 25 bp, Saccharomyces pastorianus
ttcttgtaggccacgagtttcccag

SEQ ID NO: 37097 - DNA, 25 bp, Saccharomyces pastorianus
aacctgtgtggagtcaggaccctca

SEQ ID NO: 37098 - DNA, 25 bp, Saccharomyces pastorianus
agggaagccgccgtacttgaagata

SEQ ID NO: 37099 - DNA, 25 bp, Saccharomyces pastorianus
ggaagtctctataaacctgtgtgga

SEQ ID NO: 37100 - DNA, 25 bp, Saccharomyces pastorianus
gatatcggtgtctcaaggccaaggt

SEQ ID NO: 37101 - DNA, 25 bp, Saccharomyces pastorianus
gggactataggtaccacataggcca

SEQ ID NO: 37102 - DNA, 25 bp, Saccharomyces pastorianus
ggaaccaagatctgtttgctacgca

SEQ ID NO: 37103 - DNA, 25 bp, Saccharomyces pastorianus
gtttttggcggcatgtcgtattcaa

SEQ ID NO: 37104 - DNA, 25 bp, Saccharomyces pastorianus
gtatcagcaagcgtacaaagtcgtt

SEQ ID NO: 37105 - DNA, 25 bp, Saccharomyces pastorianus
ggcggtttagatttcacattcgatt

SEQ ID NO: 37106 - DNA, 25 bp, Saccharomyces pastorianus
actgttttgattttggtgctaccga

SEQ ID NO: 37107 - DNA, 25 bp, Saccharomyces pastorianus
agaacgataccgtcgctgtgtttgg

SEQ ID NO: 37108 - DNA, 25 bp, Saccharomyces pastorianus
gggctgctgtcaagactgctaatgt

SEQ ID NO: 37109 - DNA, 25 bp, Saccharomyces pastorianus
taccgatttcatcaaccccaaggaa

SEQ ID NO: 37110 - DNA, 25 bp, Saccharomyces pastorianus
ctttccgtcattcaaggcgctaagg

SEQ ID NO: 37111 - DNA, 25 bp, Saccharomyces pastorianus
cattccaattggtcaccggtagagt

SEQ ID NO: 37112 - DNA, 25 bp, Saccharomyces pastorianus
ccgctgctggcgaagagatctcaac

SEQ ID NO: 37113 - DNA, 25 bp, Saccharomyces pastorianus
agatctcaaccagaccattccaatt

SEQ ID NO: 37114 - DNA, 25 bp, Saccharomyces pastorianus
agatttgcatcacggtgactgctta

SEQ ID NO: 37115 - DNA, 25 bp, Saccharomyces pastorianus
attatcattggtgtcgccgctgctg

SEQ ID NO: 37116 - DNA, 25 bp, Saccharomyces pastorianus
agaccatggactgtgttccctgtca

SEQ ID NO: 37117 - DNA, 25 bp, Saccharomyces pastorianus
ccaccacaaagggagctagaaaagg

SEQ ID NO: 37118 - DNA, 25 bp, Saccharomyces pastorianus
aaggaagagaccatggactgtgttc

SEQ ID NO: 37119 - DNA, 25 bp, Saccharomyces pastorianus
agagaccatggactgtgttccctgt

SEQ ID NO: 37120 - DNA, 25 bp, Saccharomyces pastorianus
atttcgttggcggagtttgagaaga

SEQ ID NO: 37121 - DNA, 25 bp, Saccharomyces pastorianus
gaccatggactgtgttccctgtcag

SEQ ID NO: 37122 - DNA, 25 bp, Saccharomyces pastorianus
aagatgccaagaagggcatttcgtt

SEQ ID NO: 37123 - DNA, 25 bp, Saccharomyces pastorianus
aatcctccaccacaaagggagctag

SEQ ID NO: 37124 - DNA, 25 bp, Saccharomyces pastorianus
gcggagtttgagaagagaaacccac

SEQ ID NO: 37125 - DNA, 25 bp, Saccharomyces pastorianus
gaagagaccatggactgtgttccct

SEQ ID NO: 37126 - DNA, 25 bp, Saccharomyces pastorianus
ccaagaagggcatttcgttggcgga

SEQ ID NO: 37127 - DNA, 25 bp, Saccharomyces pastorianus
gctgaagagttttctgacatgatca

SEQ ID NO: 37128 - DNA, 25 bp, Saccharomyces pastorianus
taaaccataattacaacctctcgag

SEQ ID NO: 37129 - DNA, 25 bp, Saccharomyces pastorianus
tcactattcggctcaatcatggtaa

SEQ ID NO: 37130 - DNA, 25 bp, Saccharomyces pastorianus
attctctcagaacacatacctggta

SEQ ID NO: 37131 - DNA, 25 bp, Saccharomyces pastorianus
aacctctcgagtacgaagccagtta

SEQ ID NO: 37132 - DNA, 25 bp, Saccharomyces pastorianus
tacaagacccaaagctcttttgcat

SEQ ID NO: 37133 - DNA, 25 bp, Saccharomyces pastorianus
gctcttttgcattagattcccagca

SEQ ID NO: 37134 - DNA, 25 bp, Saccharomyces pastorianus
ggcactgatattttagacggtcctt

SEQ ID NO: 37135 - DNA, 25 bp, Saccharomyces pastorianus
aaatcattgagtttagccactgaga

SEQ ID NO: 37136 - DNA, 25 bp, Saccharomyces pastorianus
ttttagacggtccttcactattcgg

SEQ ID NO: 37137 - DNA, 25 bp, Saccharomyces pastorianus
aaatgtccacgcattcttgcatgta

SEQ ID NO: 37138 - DNA, 25 bp, Saccharomyces pastorianus
tggaggtgatcctgggcaaccccat

SEQ ID NO: 37139 - DNA, 25 bp, Saccharomyces pastorianus
aatcgccaagagaaacggtgtccca

SEQ ID NO: 37140 - DNA, 25 bp, Saccharomyces pastorianus
agatcgggaccggtcatatcagcca

SEQ ID NO: 37141 - DNA, 25 bp, Saccharomyces pastorianus
ttgctgcgagtgagggcatcgtcat

SEQ ID NO: 37142 - DNA, 25 bp, Saccharomyces pastorianus
actcccggtggaagaagctcgtcta

SEQ ID NO: 37143 - DNA, 25 bp, Saccharomyces pastorianus
atatcagccaggtcagccaggacta

SEQ ID NO: 37144 - DNA, 25 bp, Saccharomyces pastorianus
agagcactgcgactgaggtgttcca

SEQ ID NO: 37145 - DNA, 25 bp, Saccharomyces pastorianus
aggtgttccagcctgccatgagaga

SEQ ID NO: 37146 - DNA, 25 bp, Saccharomyces pastorianus
ttacaacctgctcgtgctagtgcaa

SEQ ID NO: 37147 - DNA, 25 bp, Saccharomyces pastorianus
aaacaaggtgttcaagccctccatg

SEQ ID NO: 37148 - DNA, 25 bp, Saccharomyces pastorianus
aacttcgtggaattcgagcccaggg

SEQ ID NO: 37149 - DNA, 25 bp, Saccharomyces pastorianus
gacccgatcgcggataaactactca

SEQ ID NO: 37150 - DNA, 25 bp, Saccharomyces pastorianus
atctcgaatagcttgtacacccttt

SEQ ID NO: 37151 - DNA, 25 bp, Saccharomyces pastorianus
aataccctggtcgtgtgaaatggaa

SEQ ID NO: 37152 - DNA, 25 bp, Saccharomyces pastorianus
aacgaacaatttaaccccagcactg

SEQ ID NO: 37153 - DNA, 25 bp, Saccharomyces pastorianus
gataagcgccttatttgtacgatat

SEQ ID NO: 37154 - DNA, 25 bp, Saccharomyces pastorianus
agatacggcctcaaaactgttgcag

SEQ ID NO: 37155 - DNA, 25 bp, Saccharomyces pastorianus
tgggcctttttgcattttccagcat

SEQ ID NO: 37156 - DNA, 25 bp, Saccharomyces pastorianus
gtacaccctttattggacttttcat

SEQ ID NO: 37157 - DNA, 25 bp, Saccharomyces pastorianus
actactcatgattaccacaaccttg

SEQ ID NO: 37158 - DNA, 25 bp, Saccharomyces pastorianus
gacaatattggacccgatcgcggat

SEQ ID NO: 37159 - DNA, 25 bp, Saccharomyces pastorianus
tcgggccctcagatcataccagtat

SEQ ID NO: 37160 - DNA, 25 bp, Saccharomyces pastorianus
cacccttgacatccatggagcttaa

SEQ ID NO: 37161 - DNA, 25 bp, Saccharomyces pastorianus
gctagaacgtcttccaactgggcaa

SEQ ID NO: 37162 - DNA, 25 bp, Saccharomyces pastorianus
aagcaatgacacatcgttttctccc

SEQ ID NO: 37163 - DNA, 25 bp, Saccharomyces pastorianus
gaaacggtctaggtctgaacacata

SEQ ID NO: 37164 - DNA, 25 bp, Saccharomyces pastorianus
agaggaccaccgtcgatcatttctg

SEQ ID NO: 37165 - DNA, 25 bp, Saccharomyces pastorianus
aaaccaatggaatgcccgtcggtga

SEQ ID NO: 37166 - DNA, 25 bp, Saccharomyces pastorianus
gtgcatgacatttcctatctcacaa

SEQ ID NO: 37167 - DNA, 25 bp, Saccharomyces pastorianus
gaagtcgtcaataatccagttcctg

SEQ ID NO: 37168 - DNA, 25 bp, Saccharomyces pastorianus
ttaacagtccatctaccacaagcaa

SEQ ID NO: 37169 - DNA, 25 bp, Saccharomyces pastorianus
tagcggacgctatcaatgcggcacc

SEQ ID NO: 37170 - DNA, 25 bp, Saccharomyces pastorianus
aagatctgctactgtcaaacgaccg

SEQ ID NO: 37171 - DNA, 25 bp, Saccharomyces pastorianus
ttaaatggtcgtgtaaaggcgctcg

SEQ ID NO: 37172 - DNA, 25 bp, Saccharomyces pastorianus
gcagcagagctgttgaagatcccaa

SEQ ID NO: 37173 - DNA, 25 bp, Saccharomyces pastorianus
aatcgctctatcgagaaggttctta

SEQ ID NO: 37174 - DNA, 25 bp, Saccharomyces pastorianus
agaagctttggcatttacctcgttg

SEQ ID NO: 37175 - DNA, 25 bp, Saccharomyces pastorianus
agagctctgtatacaccatttttaa

SEQ ID NO: 37176 - DNA, 25 bp, Saccharomyces pastorianus
ttctgtccactcaataatcgctcta

SEQ ID NO: 37177 - DNA, 25 bp, Saccharomyces pastorianus
atttacctcgttggtcgccaatgaa

SEQ ID NO: 37178 - DNA, 25 bp, Saccharomyces pastorianus
ggacctgaccaattcgacagatcat

SEQ ID NO: 37179 - DNA, 25 bp, Saccharomyces pastorianus
aactgtatgtagattctgtccactc

SEQ ID NO: 37180 - DNA, 25 bp, Saccharomyces pastorianus
aaggcgctcgaacaattcatggata

SEQ ID NO: 37181 - DNA, 25 bp, Saccharomyces pastorianus
gtggatttgacttcatcggacctga

SEQ ID NO: 37182 - DNA, 25 bp, Saccharomyces pastorianus
tacggagatctcttcaatagacttg

SEQ ID NO: 37183 - DNA, 25 bp, Saccharomyces pastorianus
gcagatagatttagctctcgatgaa

SEQ ID NO: 37184 - DNA, 25 bp, Saccharomyces pastorianus
gatgtcgataatccattggcacagc

SEQ ID NO: 37185 - DNA, 25 bp, Saccharomyces pastorianus
taaaagccggttctcgtcatggaat

SEQ ID NO: 37186 - DNA, 25 bp, Saccharomyces pastorianus
ttggcacagcacagggatagaattt

SEQ ID NO: 37187 - DNA, 25 bp, Saccharomyces pastorianus
agatctattcttcttggtagcgagg

SEQ ID NO: 37188 - DNA, 25 bp, Saccharomyces pastorianus
ggaacagtgaccttttgaaaaccat

SEQ ID NO: 37189 - DNA, 25 bp, Saccharomyces pastorianus
gggaagccgcagctatatctgaaga

SEQ ID NO: 37190 - DNA, 25 bp, Saccharomyces pastorianus
gaattagcgtcactttccagtctag

SEQ ID NO: 37191 - DNA, 25 bp, Saccharomyces pastorianus
gaattcttcccaacggatgtcgata

SEQ ID NO: 37192 - DNA, 25 bp, Saccharomyces pastorianus
gaaagcgaccctaatgaggcccgat

SEQ ID NO: 37193 - DNA, 25 bp, Saccharomyces pastorianus
acattagggtttcttgagctaaact

SEQ ID NO: 37194 - DNA, 25 bp, Saccharomyces pastorianus
agtaataatcgacgctttcttggaa

SEQ ID NO: 37195 - DNA, 25 bp, Saccharomyces pastorianus
ggtacttccttctggcaaagctata

SEQ ID NO: 37196 - DNA, 25 bp, Saccharomyces pastorianus
gccgttaagggctaaaccactgttg

SEQ ID NO: 37197 - DNA, 25 bp, Saccharomyces pastorianus
gctatactcaagttcagagccgtta

SEQ ID NO: 37198 - DNA, 25 bp, Saccharomyces pastorianus
ggagttatatgcacgcaatcatcat

SEQ ID NO: 37199 - DNA, 25 bp, Saccharomyces pastorianus
ctagctggcgaagtttatgggaatc

SEQ ID NO: 37200 - DNA, 25 bp, Saccharomyces pastorianus
gagctaaactattttcagaactacg

SEQ ID NO: 37201 - DNA, 25 bp, Saccharomyces pastorianus
ccactgttggaaagttgtgcctcaa

SEQ ID NO: 37202 - DNA, 25 bp, Saccharomyces pastorianus
gcttccttggatttttcgattgttc

SEQ ID NO: 37203 - DNA, 25 bp, Saccharomyces pastorianus
aacggatttggaatgcttccttgga

SEQ ID NO: 37204 - DNA, 25 bp, Saccharomyces pastorianus
atacgttgaccacttgaaccataag

SEQ ID NO: 37205 - DNA, 25 bp, Saccharomyces pastorianus
gcgggtatgatgaccaatccttgaa

SEQ ID NO: 37206 - DNA, 25 bp, Saccharomyces pastorianus
tgacgttcaaggacacactacaata

SEQ ID NO: 37207 - DNA, 25 bp, Saccharomyces pastorianus
gaaagtggacaaggcgcctttgctc

SEQ ID NO: 37208 - DNA, 25 bp, Saccharomyces pastorianus
gcgatatctgtaatttgacgttcaa

SEQ ID NO: 37209 - DNA, 25 bp, Saccharomyces pastorianus
gagaacctatttgacgagccgttag

SEQ ID NO: 37210 - DNA, 25 bp, Saccharomyces pastorianus
aaatatacgagctacgaccgactaa

SEQ ID NO: 37211 - DNA, 25 bp, Saccharomyces pastorianus
gatataccgcaggaggagttcgaaa

SEQ ID NO: 37212 - DNA, 25 bp, Saccharomyces pastorianus
gaccgactaatcaaagcttcactga

SEQ ID NO: 37213 - DNA, 25 bp, Saccharomyces pastorianus
gaagaatacgctaacacccgttgaa

SEQ ID NO: 37214 - DNA, 25 bp, Saccharomyces pastorianus
gaaagtctgtcgtcttctaagaaag

SEQ ID NO: 37215 - DNA, 25 bp, Saccharomyces pastorianus
ctggatgcccggataggtcttatgg

SEQ ID NO: 37216 - DNA, 25 bp, Saccharomyces pastorianus
gaacttggagcacactgccgaggaa

SEQ ID NO: 37217 - DNA, 25 bp, Saccharomyces pastorianus
aagcagggcaagactttccccgagt

SEQ ID NO: 37218 - DNA, 25 bp, Saccharomyces pastorianus
gagtaaccaggctgctaacgcctat

SEQ ID NO: 37219 - DNA, 25 bp, Saccharomyces pastorianus
ctatgggcgtgctgcaatcggtcaa

SEQ ID NO: 37220 - DNA, 25 bp, Saccharomyces pastorianus
aatggtcagatctcacttgcgttac

SEQ ID NO: 37221 - DNA, 25 bp, Saccharomyces pastorianus
aagaattggacgtcctggatgcccg

SEQ ID NO: 37222 - DNA, 25 bp, Saccharomyces pastorianus
taatccgtgcagacgaggtcactat

SEQ ID NO: 37223 - DNA, 25 bp, Saccharomyces pastorianus
aaatgtcggtcaaagtgcccaacaa

SEQ ID NO: 37224 - DNA, 25 bp, Saccharomyces pastorianus
gactaccaccggctcttgaagagta

SEQ ID NO: 37225 - DNA, 25 bp, Saccharomyces pastorianus
gagggagtatctcaccattctggcc

SEQ ID NO: 37226 - DNA, 25 bp, Saccharomyces pastorianus
gactaaagtcactgtatccaccacg

SEQ ID NO: 37227 - DNA, 25 bp, Saccharomyces pastorianus
aagactactttgtccacttcaaatt

SEQ ID NO: 37228 - DNA, 25 bp, Saccharomyces pastorianus
atgacaacaacttcgaccactaatg

SEQ ID NO: 37229 - DNA, 25 bp, Saccharomyces pastorianus
gaagaaatgattcctcgtcaccaca

SEQ ID NO: 37230 - DNA, 25 bp, Saccharomyces pastorianus
gtttcaagactacaccacaggcgaa

SEQ ID NO: 37231 - DNA, 25 bp, Saccharomyces pastorianus
gttccagcgttaatggatcgtccac

SEQ ID NO: 37232 - DNA, 25 bp, Saccharomyces pastorianus
gtactgtctgaaactgcaagcggga

SEQ ID NO: 37233 - DNA, 25 bp, Saccharomyces pastorianus
gctaccccagctttaaagactactt

SEQ ID NO: 37234 - DNA, 25 bp, Saccharomyces pastorianus
cacgccgtcgactaacactaaggga

SEQ ID NO: 37235 - DNA, 25 bp, Saccharomyces pastorianus
gaagtcaggtcttacatgcacaaac

SEQ ID NO: 37236 - DNA, 25 bp, Saccharomyces pastorianus
aattgacaggctgggcgcaagctgc

SEQ ID NO: 37237 - DNA, 25 bp, Saccharomyces pastorianus
ggaaaacttgcccaaattctccaag

SEQ ID NO: 37238 - DNA, 25 bp, Saccharomyces pastorianus
gatcttggaggtttctgctgacgga

SEQ ID NO: 37239 - DNA, 25 bp, Saccharomyces pastorianus
tttgaaatcatactccaacgacgat

SEQ ID NO: 37240 - DNA, 25 bp, Saccharomyces pastorianus
cattggatttgactgctgctaggaa

SEQ ID NO: 37241 - DNA, 25 bp, Saccharomyces pastorianus
gttgaagcttcacagattcctgagt

SEQ ID NO: 37242 - DNA, 25 bp, Saccharomyces pastorianus
taaagaggcgtgttccattggattt

SEQ ID NO: 37243 - DNA, 25 bp, Saccharomyces pastorianus
aggacgacaaggacgactcttccgc

SEQ ID NO: 37244 - DNA, 25 bp, Saccharomyces pastorianus
gtttgacctgcaaagagaagcttcc

SEQ ID NO: 37245 - DNA, 25 bp, Saccharomyces pastorianus
gatcaagatcgttcaacagtcatag

SEQ ID NO: 37246 - DNA, 25 bp, Saccharomyces pastorianus
gatgaatttgccacatgaagacgtt

SEQ ID NO: 37247 - DNA, 25 bp, Saccharomyces pastorianus
gtactacgcagttccgagatcttgg

SEQ ID NO: 37248 - DNA, 25 bp, Saccharomyces pastorianus
gtgactccagggtggtcctacgtac

SEQ ID NO: 37249 - DNA, 25 bp, Saccharomyces pastorianus
atggctacgttgcaaacgctcacgg

SEQ ID NO: 37250 - DNA, 25 bp, Saccharomyces pastorianus
tactgacggccgatagcaactatgc

SEQ ID NO: 37251 - DNA, 25 bp, Saccharomyces pastorianus
gccaccatcgactccaaaagtttta

SEQ ID NO: 37252 - DNA, 25 bp, Saccharomyces pastorianus
gtataatccccgtaagcgactttcg

SEQ ID NO: 37253 - DNA, 25 bp, Saccharomyces pastorianus
tcaggtcttctcacaaacggcaatt

SEQ ID NO: 37254 - DNA, 25 bp, Saccharomyces pastorianus
tgtcgtgaaatacgcgcccatgcaa

SEQ ID NO: 37255 - DNA, 25 bp, Saccharomyces pastorianus
atacgttcactctatgttcaggcac

SEQ ID NO: 37256 - DNA, 25 bp, Saccharomyces pastorianus
gttcaggcaccaatgcgttgatcga

SEQ ID NO: 37257 - DNA, 25 bp, Saccharomyces pastorianus
tattgatcagcataccaccgtgact

SEQ ID NO: 37258 - DNA, 25 bp, Saccharomyces pastorianus
actgtcgggactgacggtgtctatt

SEQ ID NO: 37259 - DNA, 25 bp, Saccharomyces pastorianus
gaaccattccggtaagttggtctgt

SEQ ID NO: 37260 - DNA, 25 bp, Saccharomyces pastorianus
tgaaccctttgaaaacatcgccatc

SEQ ID NO: 37261 - DNA, 25 bp, Saccharomyces pastorianus
aaaattgcagctgtgaaggacccaa

SEQ ID NO: 37262 - DNA, 25 bp, Saccharomyces pastorianus
tgaaggacccaaagaccggattagt

SEQ ID NO: 37263 - DNA, 25 bp, Saccharomyces pastorianus
ccggattagtgggtttggctattca

SEQ ID NO: 37264 - DNA, 25 bp, Saccharomyces pastorianus
taccacctctcatcaggatagtatc

SEQ ID NO: 37265 - DNA, 25 bp, Saccharomyces pastorianus
aatgcatatgtcgtggtccagtgtc

SEQ ID NO: 37266 - DNA, 25 bp, Saccharomyces pastorianus
aagcagcccaagattttcagcacca

SEQ ID NO: 37267 - DNA, 25 bp, Saccharomyces pastorianus
gccatcgaactaccgccaaatgaga

SEQ ID NO: 37268 - DNA, 25 bp, Saccharomyces pastorianus
gataaactcggaataccacctctca

SEQ ID NO: 37269 - DNA, 25 bp, Saccharomyces pastorianus
ggcgtagtccctgcgtctaaaattg

SEQ ID NO: 37270 - DNA, 25 bp, Saccharomyces pastorianus
tctgatttgtacactgatcccggtc

SEQ ID NO: 37271 - DNA, 25 bp, Saccharomyces pastorianus
tgcactctttgcgaatctgatttgt

SEQ ID NO: 37272 - DNA, 25 bp, Saccharomyces pastorianus
ggacatccgattgctaacgatccga

SEQ ID NO: 37273 - DNA, 25 bp, Saccharomyces pastorianus
tggacgatcacaccaaatcagggtt

SEQ ID NO: 37274 - DNA, 25 bp, Saccharomyces pastorianus
aaggtgcaaacctctcactggacga

SEQ ID NO: 37275 - DNA, 25 bp, Saccharomyces pastorianus
tcccggtcctaatgatcttgatctt

SEQ ID NO: 37276 - DNA, 25 bp, Saccharomyces pastorianus
tcttgatctttggttacatgcatac

SEQ ID NO: 37277 - DNA, 25 bp, Saccharomyces pastorianus
gccaagcacgcgaagaccgttttta

SEQ ID NO: 37278 - DNA, 25 bp, Saccharomyces pastorianus
gacttgctcttaatgcggtatgcca

SEQ ID NO: 37279 - DNA, 25 bp, Saccharomyces pastorianus
agggttcatctgcaatacttaggac

SEQ ID NO: 37280 - DNA, 25 bp, Saccharomyces pastorianus
gtatcataagaattccgctaacggt

SEQ ID NO: 37281 - DNA, 25 bp, Saccharomyces pastorianus
ggacgaagccgacaccaaggacgaa

SEQ ID NO: 37282 - DNA, 25 bp, Saccharomyces pastorianus
tatatgcttgcacagccgatattgc

SEQ ID NO: 37283 - DNA, 25 bp, Saccharomyces pastorianus
tgcagaaggtgaggctgaagctttc

SEQ ID NO: 37284 - DNA, 25 bp, Saccharomyces pastorianus
tgaagctttcacttttgccatcaga

SEQ ID NO: 37285 - DNA, 25 bp, Saccharomyces pastorianus
tctccagatgtccatttcgaaccag

SEQ ID NO: 37286 - DNA, 25 bp, Saccharomyces pastorianus
ttcgaaccagttgttcacttggaaa

SEQ ID NO: 37287 - DNA, 25 bp, Saccharomyces pastorianus
ctaacgttggttccgacagatcctg

SEQ ID NO: 37288 - DNA, 25 bp, Saccharomyces pastorianus
aggatgccccagaatctccagatgt

SEQ ID NO: 37289 - DNA, 25 bp, Saccharomyces pastorianus
cagatcctgggtatatgcttgcaca

SEQ ID NO: 37290 - DNA, 25 bp, Saccharomyces pastorianus
ggaaggcgaggatgccccagaatct

SEQ ID NO: 37291 - DNA, 25 bp, Saccharomyces pastorianus
gactttgaagatttgtgccaaccac

SEQ ID NO: 37292 - DNA, 25 bp, Saccharomyces pastorianus
aaaacgttagtgatgcggtccagct

SEQ ID NO: 37293 - DNA, 25 bp, Saccharomyces pastorianus
gcttgtgttccctagagactgtgac

SEQ ID NO: 37294 - DNA, 25 bp, Saccharomyces pastorianus
atctggttggtgttttccgtaatca

SEQ ID NO: 37295 - DNA, 25 bp, Saccharomyces pastorianus
agagaaatcccatctgtttactccc

SEQ ID NO: 37296 - DNA, 25 bp, Saccharomyces pastorianus
tgtttactcccctatttgattcgga

SEQ ID NO: 37297 - DNA, 25 bp, Saccharomyces pastorianus
gaataccaagatttcctcgggttgc

SEQ ID NO: 37298 - DNA, 25 bp, Saccharomyces pastorianus
gcggtccagctaaacggtgtcattg

SEQ ID NO: 37299 - DNA, 25 bp, Saccharomyces pastorianus
gacgcagacttactgggcatcatat

SEQ ID NO: 37300 - DNA, 25 bp, Saccharomyces pastorianus
aacggtcgatccgattgtagccaaa

SEQ ID NO: 37301 - DNA, 25 bp, Saccharomyces pastorianus
gtgccctgtattcagacgcagactt

SEQ ID NO: 37302 - DNA, 25 bp, Saccharomyces pastorianus
tagacatcgttcaacttcacggcga

SEQ ID NO: 37303 - DNA, 25 bp, Saccharomyces pastorianus
gagactacttgatgattttccccgt

SEQ ID NO: 37304 - DNA, 25 bp, Saccharomyces pastorianus
tgctgaagcgttgaactgttcccgt

SEQ ID NO: 37305 - DNA, 25 bp, Saccharomyces pastorianus
gccaaacacgtttactctgagtcgc

SEQ ID NO: 37306 - DNA, 25 bp, Saccharomyces pastorianus
gtccctggtggtgctaacggtaata

SEQ ID NO: 37307 - DNA, 25 bp, Saccharomyces pastorianus
ggaagagtcgctctccgacaaacaa

SEQ ID NO: 37308 - DNA, 25 bp, Saccharomyces pastorianus
ttttacgcagtttggccgattgatg

SEQ ID NO: 37309 - DNA, 25 bp, Saccharomyces pastorianus
ttatggttctcgtctgattggtgct

SEQ ID NO: 37310 - DNA, 25 bp, Saccharomyces pastorianus
aagacgccatcattttttccaagcc

SEQ ID NO: 37311 - DNA, 25 bp, Saccharomyces pastorianus
aaatttgctctattgcccttaccaa

SEQ ID NO: 37312 - DNA, 25 bp, Saccharomyces pastorianus
gacaagcgccaggtttcaaacggac

SEQ ID NO: 37313 - DNA, 25 bp, Saccharomyces pastorianus
aagctctacgaatgctcgtgcacgg

SEQ ID NO: 37314 - DNA, 25 bp, Saccharomyces pastorianus
gtgtcaagttctacatttggcctca

SEQ ID NO: 37315 - DNA, 25 bp, Saccharomyces pastorianus
gactgacccaaggtttgttttatct

SEQ ID NO: 37316 - DNA, 25 bp, Saccharomyces pastorianus
gattccctgattaaggtcttgattt

SEQ ID NO: 37317 - DNA, 25 bp, Saccharomyces pastorianus
gatccttgatgattctgaggttgaa

SEQ ID NO: 37318 - DNA, 25 bp, Saccharomyces pastorianus
agccgcattgcattacttaaagtcg

SEQ ID NO: 37319 - DNA, 25 bp, Saccharomyces pastorianus
aaagtcgacatcattctgttacatt

SEQ ID NO: 37320 - DNA, 25 bp, Saccharomyces pastorianus
acctgatatgttagatggcgtagtt

SEQ ID NO: 37321 - DNA, 25 bp, Saccharomyces pastorianus
acatttggcctcatattcataaagc

SEQ ID NO: 37322 - DNA, 25 bp, Saccharomyces pastorianus
tggatgcgatataccaagactcgat

SEQ ID NO: 37323 - DNA, 25 bp, Saccharomyces pastorianus
tatggtcgataatgattccctgatt

SEQ ID NO: 37324 - DNA, 25 bp, Saccharomyces pastorianus
gaacggcatttacccattaatcgat

SEQ ID NO: 37325 - DNA, 25 bp, Saccharomyces pastorianus
gaagtcggtcttgtcacatcaggga

SEQ ID NO: 37326 - DNA, 25 bp, Saccharomyces pastorianus
gatggtactttggtccagattgcta

SEQ ID NO: 37327 - DNA, 25 bp, Saccharomyces pastorianus
taaagaagggccctgctgccagaaa

SEQ ID NO: 37328 - DNA, 25 bp, Saccharomyces pastorianus
ccggcatgtgcttatacggccatga

SEQ ID NO: 37329 - DNA, 25 bp, Saccharomyces pastorianus
tgctgccagaaacggtgtcaagatt

SEQ ID NO: 37330 - DNA, 25 bp, Saccharomyces pastorianus
gttttacccaatcgaacttgcgaag

SEQ ID NO: 37331 - DNA, 25 bp, Saccharomyces pastorianus
gatttgaaatcagtgtgcccgatga

SEQ ID NO: 37332 - DNA, 25 bp, Saccharomyces pastorianus
caagattttcttgcccgatgctcaa

SEQ ID NO: 37333 - DNA, 25 bp, Saccharomyces pastorianus
gctagccgctagagacagtttgaga

SEQ ID NO: 37334 - DNA, 25 bp, Saccharomyces pastorianus
agcttctagcgaaccccgtaatgaa

SEQ ID NO: 37335 - DNA, 25 bp, Saccharomyces pastorianus
gagaaggctgttgagtttgctgaac

SEQ ID NO: 37336 - DNA, 25 bp, Saccharomyces pastorianus
aagtattcgacgtcaaattcccagc

SEQ ID NO: 37337 - DNA, 25 bp, Saccharomyces pastorianus
gcataccgctgaaactggtgaattt

SEQ ID NO: 37338 - DNA, 25 bp, Saccharomyces pastorianus
ggtgatcaattgcataccgctgaaa

SEQ ID NO: 37339 - DNA, 25 bp, Saccharomyces pastorianus
attcccagccggtgatcaattgcat

SEQ ID NO: 37340 - DNA, 25 bp, Saccharomyces pastorianus
tgcacgtatgttggacaagcttgtt

SEQ ID NO: 37341 - DNA, 25 bp, Saccharomyces pastorianus
tggacaagcttgttggtgaattaga

SEQ ID NO: 37342 - DNA, 25 bp, Saccharomyces pastorianus
tcctttccgacaataaattggactg

SEQ ID NO: 37343 - DNA, 25 bp, Saccharomyces pastorianus
tccactaaccaatgcacgtatgttg

SEQ ID NO: 37344 - DNA, 25 bp, Saccharomyces pastorianus
gtcaaattcccagccggtgatcaat

SEQ ID NO: 37345 - DNA, 25 bp, Saccharomyces pastorianus
aataaattggactgcgcacctccac

SEQ ID NO: 37346 - DNA, 25 bp, Saccharomyces pastorianus
gatccagctaaagaactcgaactaa

SEQ ID NO: 37347 - DNA, 25 bp, Saccharomyces pastorianus
ccagcagctgctttataacccaatt

SEQ ID NO: 37348 - DNA, 25 bp, Saccharomyces pastorianus
gactcgattcatctgcgtttttcaa

SEQ ID NO: 37349 - DNA, 25 bp, Saccharomyces pastorianus
atttcacacgaaagtcccagttgcg

SEQ ID NO: 37350 - DNA, 25 bp, Saccharomyces pastorianus
gtcttaaccaggactccctaaatgc

SEQ ID NO: 37351 - DNA, 25 bp, Saccharomyces pastorianus
ttggcctggcatctaacagatcttt

SEQ ID NO: 37352 - DNA, 25 bp, Saccharomyces pastorianus
gcgattggagtgaaccctcgagtta

SEQ ID NO: 37353 - DNA, 25 bp, Saccharomyces pastorianus
taaaagcccctacgatttctgtgtt

SEQ ID NO: 37354 - DNA, 25 bp, Saccharomyces pastorianus
atagtactctttaccctgttcagaa

SEQ ID NO: 37355 - DNA, 25 bp, Saccharomyces pastorianus
gattctttggattttcgccgtttca

SEQ ID NO: 37356 - DNA, 25 bp, Saccharomyces pastorianus
cctgttcagaatggcctcgtatatt

SEQ ID NO: 37357 - DNA, 25 bp, Saccharomyces pastorianus
tcaagactgccggttgtgcgattct

SEQ ID NO: 37358 - DNA, 25 bp, Saccharomyces pastorianus
aagcggcgacaaagacgccttcgat

SEQ ID NO: 37359 - DNA, 25 bp, Saccharomyces pastorianus
gatgaaatctggagtgctttggtca

SEQ ID NO: 37360 - DNA, 25 bp, Saccharomyces pastorianus
gacaagaaacgtacctttgctgaaa

SEQ ID NO: 37361 - DNA, 25 bp, Saccharomyces pastorianus
gatatattctacagtttcgatggtg

SEQ ID NO: 37362 - DNA, 25 bp, Saccharomyces pastorianus
gacagtgaagtcgactttggcgaag

SEQ ID NO: 37363 - DNA, 25 bp, Saccharomyces pastorianus
gaaggtgaactaaacgcaatcgaag

SEQ ID NO: 37364 - DNA, 25 bp, Saccharomyces pastorianus
tgatgtgacgcttgaccagaaccct

SEQ ID NO: 37365 - DNA, 25 bp, Saccharomyces pastorianus
gaatctaacttcgatagtgacgatg

SEQ ID NO: 37366 - DNA, 25 bp, Saccharomyces pastorianus
gaccagaaccctgtaaacactgaaa

SEQ ID NO: 37367 - DNA, 25 bp, Saccharomyces pastorianus
gtcaaatcgagacctgatgtagaag

SEQ ID NO: 37368 - DNA, 25 bp, Saccharomyces pastorianus
tttcacaaccaagaagaccgctgac

SEQ ID NO: 37369 - DNA, 25 bp, Saccharomyces pastorianus
gggatgcgtcctcaaacaatttctt

SEQ ID NO: 37370 - DNA, 25 bp, Saccharomyces pastorianus
acagtggccagggacagttcttgta

SEQ ID NO: 37371 - DNA, 25 bp, Saccharomyces pastorianus
cgatgaggccttttccggaatggaa

SEQ ID NO: 37372 - DNA, 25 bp, Saccharomyces pastorianus
aaatcgaccttgttatctctactca

SEQ ID NO: 37373 - DNA, 25 bp, Saccharomyces pastorianus
ggagacgccacaatgtgaccatttt

SEQ ID NO: 37374 - DNA, 25 bp, Saccharomyces pastorianus
tgaacccatgatgcgttgtcacgaa

SEQ ID NO: 37375 - DNA, 25 bp, Saccharomyces pastorianus
acacgttgctgaggagacgccacaa

SEQ ID NO: 37376 - DNA, 25 bp, Saccharomyces pastorianus
tgtcatcacctgaattacatgctat

SEQ ID NO: 37377 - DNA, 25 bp, Saccharomyces pastorianus
aattgctgataatgttcccttcgaa

SEQ ID NO: 37378 - DNA, 25 bp, Saccharomyces pastorianus
catggcagaacatcctcaatcgtgg

SEQ ID NO: 37379 - DNA, 25 bp, Saccharomyces pastorianus
ttgcaactggctatcgggatgcgtc

SEQ ID NO: 37380 - DNA, 25 bp, Saccharomyces pastorianus
gatgaaaccaataagttcgccaatg

SEQ ID NO: 37381 - DNA, 25 bp, Saccharomyces pastorianus
gatatcatcaggcatattgtccaag

SEQ ID NO: 37382 - DNA, 25 bp, Saccharomyces pastorianus
gatacagacgactcctttataataa

SEQ ID NO: 37383 - DNA, 25 bp, Saccharomyces pastorianus
gagtctcttgccctttttacaaaag

SEQ ID NO: 37384 - DNA, 25 bp, Saccharomyces pastorianus
aatccttacgaaaatcagcttattg

SEQ ID NO: 37385 - DNA, 25 bp, Saccharomyces pastorianus
gatgagcttcaaaacccacaattag

SEQ ID NO: 37386 - DNA, 25 bp, Saccharomyces pastorianus
aacctggtctgtacaacgaattgat

SEQ ID NO: 37387 - DNA, 25 bp, Saccharomyces pastorianus
gagactgccatcgaagtttgttcct

SEQ ID NO: 37388 - DNA, 25 bp, Saccharomyces pastorianus
attgacaatctgcaggatatcatca

SEQ ID NO: 37389 - DNA, 25 bp, Saccharomyces pastorianus
tttgttcctccaaacctggtctgta

SEQ ID NO: 37390 - DNA, 25 bp, Saccharomyces pastorianus
gaatacgatccacagagtctcttgc

SEQ ID NO: 37391 - DNA, 25 bp, Saccharomyces pastorianus
gatttctagcttcgatctttaccag

SEQ ID NO: 37392 - DNA, 25 bp, Saccharomyces pastorianus
taccggtactatcgagctgtatcat

SEQ ID NO: 37393 - DNA, 25 bp, Saccharomyces pastorianus
gaaaacttttcgattacgctcagaa

SEQ ID NO: 37394 - DNA, 25 bp, Saccharomyces pastorianus
gccttgtttcaatttcagcagcaaa

SEQ ID NO: 37395 - DNA, 25 bp, Saccharomyces pastorianus
gtactagacttgctacccttgagaa

SEQ ID NO: 37396 - DNA, 25 bp, Saccharomyces pastorianus
aagtggtatcatcgatgtcttcaaa

SEQ ID NO: 37397 - DNA, 25 bp, Saccharomyces pastorianus
accttgtcaagctgggtttggtcaa

SEQ ID NO: 37398 - DNA, 25 bp, Saccharomyces pastorianus
gaaaagctacatctgccggatataa

SEQ ID NO: 37399 - DNA, 25 bp, Saccharomyces pastorianus
agcatgaatcctccagtgacggtat

SEQ ID NO: 37400 - DNA, 25 bp, Saccharomyces pastorianus
gaagctacaatgctataccggtact

SEQ ID NO: 37401 - DNA, 25 bp, Saccharomyces pastorianus
gagtggtcgctagtttagccttgtt

SEQ ID NO: 37402 - DNA, 25 bp, Saccharomyces pastorianus
gcgcactcgcatgcatggactttaa

SEQ ID NO: 37403 - DNA, 25 bp, Saccharomyces pastorianus
ggttctctttgtcggcatactgttc

SEQ ID NO: 37404 - DNA, 25 bp, Saccharomyces pastorianus
gagaggacatgctggccaatcgcca

SEQ ID NO: 37405 - DNA, 25 bp, Saccharomyces pastorianus
gttggacacacgctactcagtagaa

SEQ ID NO: 37406 - DNA, 25 bp, Saccharomyces pastorianus
atgagcatcctcgagggccaacagg

SEQ ID NO: 37407 - DNA, 25 bp, Saccharomyces pastorianus
agtagaacgtgcacgtgcctcgcta

SEQ ID NO: 37408 - DNA, 25 bp, Saccharomyces pastorianus
taaaaagtctatctcgctaggcgcc

SEQ ID NO: 37409 - DNA, 25 bp, Saccharomyces pastorianus
catactgttctgtctattgccaagg

SEQ ID NO: 37410 - DNA, 25 bp, Saccharomyces pastorianus
tgatttcgatcgctacccagaggga

SEQ ID NO: 37411 - DNA, 25 bp, Saccharomyces pastorianus
aggcttagaacgtcgctggaccgta

SEQ ID NO: 37412 - DNA, 25 bp, Saccharomyces pastorianus
agggcacactcaagggataccgcgt

SEQ ID NO: 37413 - DNA, 25 bp, Saccharomyces pastorianus
ttatgtgtctttcatccccagagtc

SEQ ID NO: 37414 - DNA, 25 bp, Saccharomyces pastorianus
atctgatgattactggcgtggcgct

SEQ ID NO: 37415 - DNA, 25 bp, Saccharomyces pastorianus
aaataatcttcgtattgctccggat

SEQ ID NO: 37416 - DNA, 25 bp, Saccharomyces pastorianus
attctactacatgtgtgcccatctt

SEQ ID NO: 37417 - DNA, 25 bp, Saccharomyces pastorianus
ttgaccttcgacctctgcaaaagta

SEQ ID NO: 37418 - DNA, 25 bp, Saccharomyces pastorianus
aggcgacatttactggctgatactc

SEQ ID NO: 37419 - DNA, 25 bp, Saccharomyces pastorianus
tgcatcgtaaattcacttcctattg

SEQ ID NO: 37420 - DNA, 25 bp, Saccharomyces pastorianus
cagagtcctcatgtattgtctatca

SEQ ID NO: 37421 - DNA, 25 bp, Saccharomyces pastorianus
tacgcaacagcgttctttacaaaag

SEQ ID NO: 37422 - DNA, 25 bp, Saccharomyces pastorianus
gcgtggcgcttctatatacgcgcaa

SEQ ID NO: 37423 - DNA, 25 bp, Saccharomyces pastorianus
gctaggatgcgcttatgtgtctttc

SEQ ID NO: 37424 - DNA, 25 bp, Saccharomyces pastorianus
gtgacaatgcttccataaggtctga

SEQ ID NO: 37425 - DNA, 25 bp, Saccharomyces pastorianus
gctcggctaaaatcgcataatacat

SEQ ID NO: 37426 - DNA, 25 bp, Saccharomyces pastorianus
gtactcctggaagtgtctctaccaa

SEQ ID NO: 37427 - DNA, 25 bp, Saccharomyces pastorianus
ttaaggtcgagctcttacatgacga

SEQ ID NO: 37428 - DNA, 25 bp, Saccharomyces pastorianus
attggcgacgaatgtccatctggat

SEQ ID NO: 37429 - DNA, 25 bp, Saccharomyces pastorianus
gtccggcgcctttcgcaataaaatg

SEQ ID NO: 37430 - DNA, 25 bp, Saccharomyces pastorianus
atgttttacattccgcgtgtgcgag

SEQ ID NO: 37431 - DNA, 25 bp, Saccharomyces pastorianus
gaggatttcttgcacttggagccat

SEQ ID NO: 37432 - DNA, 25 bp, Saccharomyces pastorianus
gaaacaaaatactcgtgcaaccccg

SEQ ID NO: 37433 - DNA, 25 bp, Saccharomyces pastorianus
gtctgatgattaccatgctcggcta

SEQ ID NO: 37434 - DNA, 25 bp, Saccharomyces pastorianus
gtagcaacagattttccgagccagc

SEQ ID NO: 37435 - DNA, 25 bp, Saccharomyces pastorianus
agctcaagcaagttccaggctcgta

SEQ ID NO: 37436 - DNA, 25 bp, Saccharomyces pastorianus
gatgccattcggttgtatcacttat

SEQ ID NO: 37437 - DNA, 25 bp, Saccharomyces pastorianus
gaactgaatcaccaactctttttcc

SEQ ID NO: 37438 - DNA, 25 bp, Saccharomyces pastorianus
agatgtattcaacgtcttcgagcaa

SEQ ID NO: 37439 - DNA, 25 bp, Saccharomyces pastorianus
ggctcgtaacttcctatatcatatg

SEQ ID NO: 37440 - DNA, 25 bp, Saccharomyces pastorianus
gcgcggtacctctattctataatga

SEQ ID NO: 37441 - DNA, 25 bp, Saccharomyces pastorianus
acaacttctgtccttgttcgaggtg

SEQ ID NO: 37442 - DNA, 25 bp, Saccharomyces pastorianus
agtctgcccgacttagaatacttaa

SEQ ID NO: 37443 - DNA, 25 bp, Saccharomyces pastorianus
ttattgacgaaactcctgcgatggg

SEQ ID NO: 37444 - DNA, 25 bp, Saccharomyces pastorianus
gagttacaaagctgcgcggtacctc

SEQ ID NO: 37445 - DNA, 25 bp, Saccharomyces pastorianus
gataatccactaatgcgtttgaact

SEQ ID NO: 37446 - DNA, 25 bp, Saccharomyces pastorianus
ggaaaacatctcacgcttaactggg

SEQ ID NO: 37447 - DNA, 25 bp, Saccharomyces pastorianus
ttatttcaattccacagcccaaacc

SEQ ID NO: 37448 - DNA, 25 bp, Saccharomyces pastorianus
ggaaccaacggcacaacatcttctg

SEQ ID NO: 37449 - DNA, 25 bp, Saccharomyces pastorianus
gatcatcagactcttcagacacagc

SEQ ID NO: 37450 - DNA, 25 bp, Saccharomyces pastorianus
aatgctaccgctcttaataacaacc

SEQ ID NO: 37451 - DNA, 25 bp, Saccharomyces pastorianus
ttccgcggacgcaaacgatacaggt

SEQ ID NO: 37452 - DNA, 25 bp, Saccharomyces pastorianus
gatgccaccagttctcagcataata

SEQ ID NO: 37453 - DNA, 25 bp, Saccharomyces pastorianus
aacctgttttcctctggtgttgcaa

SEQ ID NO: 37454 - DNA, 25 bp, Saccharomyces pastorianus
gcctcacggaagttctttcttggaa

SEQ ID NO: 37455 - DNA, 25 bp, Saccharomyces pastorianus
ggccaagaagaacatgccgctactt

SEQ ID NO: 37456 - DNA, 25 bp, Saccharomyces pastorianus
aaacggaaatccatctcaagaccaa

SEQ ID NO: 37457 - DNA, 25 bp, Saccharomyces pastorianus
ttaagaccctctataacctcatcat

SEQ ID NO: 37458 - DNA, 25 bp, Saccharomyces pastorianus
gcaaagcggtaagctttcccctcaa

SEQ ID NO: 37459 - DNA, 25 bp, Saccharomyces pastorianus
gtggagaccttgtgcacaactattt

SEQ ID NO: 37460 - DNA, 25 bp, Saccharomyces pastorianus
gattgccaagatgactcgtttaact

SEQ ID NO: 37461 - DNA, 25 bp, Saccharomyces pastorianus
aagtaccgtaccgtgaatcttgtat

SEQ ID NO: 37462 - DNA, 25 bp, Saccharomyces pastorianus
gacggtagttacgatgattgccaag

SEQ ID NO: 37463 - DNA, 25 bp, Saccharomyces pastorianus
ggtgacaaggtctcgatgaatgatc

SEQ ID NO: 37464 - DNA, 25 bp, Saccharomyces pastorianus
tagattttgagtacgcaagcgctaa

SEQ ID NO: 37465 - DNA, 25 bp, Saccharomyces pastorianus
tttgggctctcttgcaaagcggtaa

SEQ ID NO: 37466 - DNA, 25 bp, Saccharomyces pastorianus
aactattttggtgtctttgggctct

SEQ ID NO: 37467 - DNA, 25 bp, Saccharomyces pastorianus
atgatattttagttttcgcccagaa

SEQ ID NO: 37468 - DNA, 25 bp, Saccharomyces pastorianus
gcaatagaccttgacgggcacaatc

SEQ ID NO: 37469 - DNA, 25 bp, Saccharomyces pastorianus
gatatcgtatctgcaaccaagcctg

SEQ ID NO: 37470 - DNA, 25 bp, Saccharomyces pastorianus
atccgataccaatgagtctcactta

SEQ ID NO: 37471 - DNA, 25 bp, Saccharomyces pastorianus
gatagcctggttgcaatagaccttg

SEQ ID NO: 37472 - DNA, 25 bp, Saccharomyces pastorianus
actctagcactgtcttgaatattca

SEQ ID NO: 37473 - DNA, 25 bp, Saccharomyces pastorianus
gttacgccagatcttgtattcagct

SEQ ID NO: 37474 - DNA, 25 bp, Saccharomyces pastorianus
catagggcacatttattagtcgaaa

SEQ ID NO: 37475 - DNA, 25 bp, Saccharomyces pastorianus
aaaactccttacacaaagctgatag

SEQ ID NO: 37476 - DNA, 25 bp, Saccharomyces pastorianus
tcaccttctttagcttcatccgata

SEQ ID NO: 37477 - DNA, 25 bp, Saccharomyces pastorianus
accaagcctgccaaacttacaaatg

SEQ ID NO: 37478 - DNA, 25 bp, Saccharomyces pastorianus
tattgacaagtcatcgttacacgaa

SEQ ID NO: 37479 - DNA, 25 bp, Saccharomyces pastorianus
tcatcgtcattaaccacaacgggag

SEQ ID NO: 37480 - DNA, 25 bp, Saccharomyces pastorianus
tcaaacccgatcattgcaaaggcat

SEQ ID NO: 37481 - DNA, 25 bp, Saccharomyces pastorianus
gaccgccaagagagccaatagattt

SEQ ID NO: 37482 - DNA, 25 bp, Saccharomyces pastorianus
aacagtcagtacaagaccccaatat

SEQ ID NO: 37483 - DNA, 25 bp, Saccharomyces pastorianus
tgatgacctaccgaatcacgggcta

SEQ ID NO: 37484 - DNA, 25 bp, Saccharomyces pastorianus
gggctacaagtttcgccagtacaac

SEQ ID NO: 37485 - DNA, 25 bp, Saccharomyces pastorianus
caacgggaggatatcctgtttcttc

SEQ ID NO: 37486 - DNA, 25 bp, Saccharomyces pastorianus
aggtggaccaattcactgtgaaacc

SEQ ID NO: 37487 - DNA, 25 bp, Saccharomyces pastorianus
gatatgtcaatcaagctacagcctt

SEQ ID NO: 37488 - DNA, 25 bp, Saccharomyces pastorianus
aatttttggatgaccctcgactaat

SEQ ID NO: 37489 - DNA, 25 bp, Saccharomyces pastorianus
ctgtgaaaccagaactccattaatc

SEQ ID NO: 37490 - DNA, 25 bp, Saccharomyces pastorianus
gggagattggatactactacctgaa

SEQ ID NO: 37491 - DNA, 25 bp, Saccharomyces pastorianus
gtcgagccaggccaaaacgcatatg

SEQ ID NO: 37492 - DNA, 25 bp, Saccharomyces pastorianus
atgtgcgtgttagacgtaccgctcc

SEQ ID NO: 37493 - DNA, 25 bp, Saccharomyces pastorianus
ccacctttcggtattgcaagtgcta

SEQ ID NO: 37494 - DNA, 25 bp, Saccharomyces pastorianus
gtcttcagccatgaggaggacttga

SEQ ID NO: 37495 - DNA, 25 bp, Saccharomyces pastorianus
aggatgggcatttgaatcgcgcagc

SEQ ID NO: 37496 - DNA, 25 bp, Saccharomyces pastorianus
accgctcctattcgaaggtaacctg

SEQ ID NO: 37497 - DNA, 25 bp, Saccharomyces pastorianus
acctggattctatgtgtggagttac

SEQ ID NO: 37498 - DNA, 25 bp, Saccharomyces pastorianus
agtgctagtagtatcattatgtcca

SEQ ID NO: 37499 - DNA, 25 bp, Saccharomyces pastorianus
gaaagccttgaacggtgtaacacat

SEQ ID NO: 37500 - DNA, 25 bp, Saccharomyces pastorianus
gtaacacatccagctataaggcatg

SEQ ID NO: 37501 - DNA, 25 bp, Saccharomyces pastorianus
gattttctcaatcacacttgcgagg

SEQ ID NO: 37502 - DNA, 25 bp, Saccharomyces pastorianus
gaaggctatatatcagaggactact

SEQ ID NO: 37503 - DNA, 25 bp, Saccharomyces pastorianus
aacttctttagttgcgacttataca

SEQ ID NO: 37504 - DNA, 25 bp, Saccharomyces pastorianus
atttgcattgctatcctcagttgga

SEQ ID NO: 37505 - DNA, 25 bp, Saccharomyces pastorianus
attatggtgcacattctaacgactt

SEQ ID NO: 37506 - DNA, 25 bp, Saccharomyces pastorianus
atgcggcgagcgtctgtacaacaat

SEQ ID NO: 37507 - DNA, 25 bp, Saccharomyces pastorianus
gggcgactatacaatcaacaagaat

SEQ ID NO: 37508 - DNA, 25 bp, Saccharomyces pastorianus
ggaactacctagacatctcgaacga

SEQ ID NO: 37509 - DNA, 25 bp, Saccharomyces pastorianus
aattactccagttttgcaaatgtta

SEQ ID NO: 37510 - DNA, 25 bp, Saccharomyces pastorianus
gtggcattaagctattacgtaacta

SEQ ID NO: 37511 - DNA, 25 bp, Saccharomyces pastorianus
ggcattgggcaatttagcattagat

SEQ ID NO: 37512 - DNA, 25 bp, Saccharomyces pastorianus
tcctagttctagttgcatcgatgag

SEQ ID NO: 37513 - DNA, 25 bp, Saccharomyces pastorianus
gaagcaccccaagtaagacactcgg

SEQ ID NO: 37514 - DNA, 25 bp, Saccharomyces pastorianus
gggagaaacgctgactctttatgat

SEQ ID NO: 37515 - DNA, 25 bp, Saccharomyces pastorianus
gttagggtcacaccttcaagaatta

SEQ ID NO: 37516 - DNA, 25 bp, Saccharomyces pastorianus
ttactctcctaccaccaaaattaag

SEQ ID NO: 37517 - DNA, 25 bp, Saccharomyces pastorianus
gtttccactagaagaagcaccccaa

SEQ ID NO: 37518 - DNA, 25 bp, Saccharomyces pastorianus
aagacactcgggaacttgggtatga

SEQ ID NO: 37519 - DNA, 25 bp, Saccharomyces pastorianus
tgaggaccaaaatacctccgatttt

SEQ ID NO: 37520 - DNA, 25 bp, Saccharomyces pastorianus
tccgattttatatacctgaaggcaa

SEQ ID NO: 37521 - DNA, 25 bp, Saccharomyces pastorianus
ggacatttcaccgttttcaattgtt

SEQ ID NO: 37522 - DNA, 25 bp, Saccharomyces pastorianus
atgaacgttacagggccgatgtgtt

SEQ ID NO: 37523 - DNA, 25 bp, Saccharomyces pastorianus
cgtgtctccaagtcgatattctgat

SEQ ID NO: 37524 - DNA, 25 bp, Saccharomyces pastorianus
cgtcgttaacggaattctgccagtc

SEQ ID NO: 37525 - DNA, 25 bp, Saccharomyces pastorianus
ggtcctgctattgccgcttaattta

SEQ ID NO: 37526 - DNA, 25 bp, Saccharomyces pastorianus
aagtttggaagcgtttgagtctcaa

SEQ ID NO: 37527 - DNA, 25 bp, Saccharomyces pastorianus
attagcccagaatgtcttaccgtcg

SEQ ID NO: 37528 - DNA, 25 bp, Saccharomyces pastorianus
tttaccaaaattccgtgtctccaag

SEQ ID NO: 37529 - DNA, 25 bp, Saccharomyces pastorianus
tgccagtcctactttccagaagaac

SEQ ID NO: 37530 - DNA, 25 bp, Saccharomyces pastorianus
aaacctgctgtattcagtcctctgt

SEQ ID NO: 37531 - DNA, 25 bp, Saccharomyces pastorianus
ttgtcaagacaatctggccccagat

SEQ ID NO: 37532 - DNA, 25 bp, Saccharomyces pastorianus
acggtattttttggtcctgctattg

SEQ ID NO: 37533 - DNA, 25 bp, Saccharomyces pastorianus
gattacgagcttttgcgaacccttt

SEQ ID NO: 37534 - DNA, 25 bp, Saccharomyces pastorianus
tctgatgcccttttcttactactgt

SEQ ID NO: 37535 - DNA, 25 bp, Saccharomyces pastorianus
aatggcgggcctctgtcaaaagtac

SEQ ID NO: 37536 - DNA, 25 bp, Saccharomyces pastorianus
aaatattgcctctttctgatgccct

SEQ ID NO: 37537 - DNA, 25 bp, Saccharomyces pastorianus
atttcaccaaggacgtcactgtctt

SEQ ID NO: 37538 - DNA, 25 bp, Saccharomyces pastorianus
aaaactgcccttcatgtaacggtga

SEQ ID NO: 37539 - DNA, 25 bp, Saccharomyces pastorianus
ggtcgttaggcatcatcctcattaa

SEQ ID NO: 37540 - DNA, 25 bp, Saccharomyces pastorianus
tacagatactgggttccactcttca

SEQ ID NO: 37541 - DNA, 25 bp, Saccharomyces pastorianus
gaaaaattcactgaccctgtcgata

SEQ ID NO: 37542 - DNA, 25 bp, Saccharomyces pastorianus
attacgagctttaccaatggcgggc

SEQ ID NO: 37543 - DNA, 25 bp, Saccharomyces pastorianus
gagaaaccattctattcctcgtcaa

SEQ ID NO: 37544 - DNA, 25 bp, Saccharomyces pastorianus
tctccctaggtccatctacgaaaaa

SEQ ID NO: 37545 - DNA, 25 bp, Saccharomyces pastorianus
agccaagagcttgattatctaacag

SEQ ID NO: 37546 - DNA, 25 bp, Saccharomyces pastorianus
atctaacagatctagctcacaagct

SEQ ID NO: 37547 - DNA, 25 bp, Saccharomyces pastorianus
gaaatacacaaactacatccgttga

SEQ ID NO: 37548 - DNA, 25 bp, Saccharomyces pastorianus
ttacattttagcaataccgttgttg

SEQ ID NO: 37549 - DNA, 25 bp, Saccharomyces pastorianus
aataccgttgttgaaattgcgcctc

SEQ ID NO: 37550 - DNA, 25 bp, Saccharomyces pastorianus
actacatccgttgactattgaaaat

SEQ ID NO: 37551 - DNA, 25 bp, Saccharomyces pastorianus
atagcctctcagttaggtagccaag

SEQ ID NO: 37552 - DNA, 25 bp, Saccharomyces pastorianus
attgcgcctcaatgtaatgttacaa

SEQ ID NO: 37553 - DNA, 25 bp, Saccharomyces pastorianus
atgttgccgaagcaaacttcttcag

SEQ ID NO: 37554 - DNA, 25 bp, Saccharomyces pastorianus
tgggttgtaccctagtatagcctct

SEQ ID NO: 37555 - DNA, 25 bp, Saccharomyces pastorianus
gcagacaaatctcgaccaattagtt

SEQ ID NO: 37556 - DNA, 25 bp, Saccharomyces pastorianus
taccgccggcaggtagttcaggaaa

SEQ ID NO: 37557 - DNA, 25 bp, Saccharomyces pastorianus
gaaaacagtgctgctagcgctacta

SEQ ID NO: 37558 - DNA, 25 bp, Saccharomyces pastorianus
gatattcgatgatctgctagcagaa

SEQ ID NO: 37559 - DNA, 25 bp, Saccharomyces pastorianus
actagtattacatctgtaccccttc

SEQ ID NO: 37560 - DNA, 25 bp, Saccharomyces pastorianus
tagtactagcgtaagcgaacccctt

SEQ ID NO: 37561 - DNA, 25 bp, Saccharomyces pastorianus
aatatcccaacacgaagctataagg

SEQ ID NO: 37562 - DNA, 25 bp, Saccharomyces pastorianus
gggtgaatatgacgccttgtttaat

SEQ ID NO: 37563 - DNA, 25 bp, Saccharomyces pastorianus
agcgctactaacctagctgctagta

SEQ ID NO: 37564 - DNA, 25 bp, Saccharomyces pastorianus
gtaagcgaaccccttgtagataaag

SEQ ID NO: 37565 - DNA, 25 bp, Saccharomyces pastorianus
acatctgtaccccttcattttgaaa

SEQ ID NO: 37566 - DNA, 25 bp, Saccharomyces pastorianus
tagataaagaagtaccgccggcagg

SEQ ID NO: 37567 - DNA, 25 bp, Saccharomyces pastorianus
aaaaatctgggagcgcgcgactctt

SEQ ID NO: 37568 - DNA, 25 bp, Saccharomyces pastorianus
attatgtggcatctacgcgagacaa

SEQ ID NO: 37569 - DNA, 25 bp, Saccharomyces pastorianus
agcttacttcgaaaccatggcaatt

SEQ ID NO: 37570 - DNA, 25 bp, Saccharomyces pastorianus
caagaactttcacgttgtcgagaat

SEQ ID NO: 37571 - DNA, 25 bp, Saccharomyces pastorianus
gttaggtcacatatcatcgcataca

SEQ ID NO: 37572 - DNA, 25 bp, Saccharomyces pastorianus
gagcgcgcgactcttcaagattatc

SEQ ID NO: 37573 - DNA, 25 bp, Saccharomyces pastorianus
agctgacttatttcctttatccttg

SEQ ID NO: 37574 - DNA, 25 bp, Saccharomyces pastorianus
aatatctccaagtttgttaggtcac

SEQ ID NO: 37575 - DNA, 25 bp, Saccharomyces pastorianus
ataaggctgtttcccagcttacttc

SEQ ID NO: 37576 - DNA, 25 bp, Saccharomyces pastorianus
ataagtccaggttgtacgctattgc

SEQ ID NO: 37577 - DNA, 25 bp, Saccharomyces pastorianus
gtacgctattgcagagtatcgactt

SEQ ID NO: 37578 - DNA, 25 bp, Saccharomyces pastorianus
gtaccgtttggtcttcagattttga

SEQ ID NO: 37579 - DNA, 25 bp, Saccharomyces pastorianus
agcccatggtgtctacgaagtcaac

SEQ ID NO: 37580 - DNA, 25 bp, Saccharomyces pastorianus
aatggcctaattgccagcgcaggcg

SEQ ID NO: 37581 - DNA, 25 bp, Saccharomyces pastorianus
gtagcggaagtgacgattccactgt

SEQ ID NO: 37582 - DNA, 25 bp, Saccharomyces pastorianus
tgtgaagctattctcccggatgtac

SEQ ID NO: 37583 - DNA, 25 bp, Saccharomyces pastorianus
gactatacttgcaacgggtggcgat

SEQ ID NO: 37584 - DNA, 25 bp, Saccharomyces pastorianus
catatggcatccctctgaagcacta

SEQ ID NO: 37585 - DNA, 25 bp, Saccharomyces pastorianus
gaatgcgctgctgttttgaatggtc

SEQ ID NO: 37586 - DNA, 25 bp, Saccharomyces pastorianus
aagcactactggcttctagttcata

SEQ ID NO: 37587 - DNA, 25 bp, Saccharomyces pastorianus
tggagagtccttgctaggcacgaat

SEQ ID NO: 37588 - DNA, 25 bp, Saccharomyces pastorianus
ggacggagtactagccatctacgaa

SEQ ID NO: 37589 - DNA, 25 bp, Saccharomyces pastorianus
tactgcgagacggtgttttaactgt

SEQ ID NO: 37590 - DNA, 25 bp, Saccharomyces pastorianus
gcatactgcatatccctatttgtgt

SEQ ID NO: 37591 - DNA, 25 bp, Saccharomyces pastorianus
tttctaaggctggtggtttaccgat

SEQ ID NO: 37592 - DNA, 25 bp, Saccharomyces pastorianus
tttaccgatggatgcgttgatgtta

SEQ ID NO: 37593 - DNA, 25 bp, Saccharomyces pastorianus
taacggtccatggtgaacagattat

SEQ ID NO: 37594 - DNA, 25 bp, Saccharomyces pastorianus
gagaaccagttccactgggcatact

SEQ ID NO: 37595 - DNA, 25 bp, Saccharomyces pastorianus
aacagattatcgttcatcccgttaa

SEQ ID NO: 37596 - DNA, 25 bp, Saccharomyces pastorianus
gatggtgggttcattgatgcttcat

SEQ ID NO: 37597 - DNA, 25 bp, Saccharomyces pastorianus
gatgtacactttctggattgcgatg

SEQ ID NO: 37598 - DNA, 25 bp, Saccharomyces pastorianus
gactgtgtattgtggccggtagcaa

SEQ ID NO: 37599 - DNA, 25 bp, Saccharomyces pastorianus
tatttgtgtcactttttcgttcttt

SEQ ID NO: 37600 - DNA, 25 bp, Saccharomyces pastorianus
caggagaaagaaactctaccagtaa

SEQ ID NO: 37601 - DNA, 25 bp, Saccharomyces pastorianus
tggatacatcgaaaagctctgaagt

SEQ ID NO: 37602 - DNA, 25 bp, Saccharomyces pastorianus
ggtcttctaccgcacgaagttagtg

SEQ ID NO: 37603 - DNA, 25 bp, Saccharomyces pastorianus
gaactcgtcatcattgttgttatcg

SEQ ID NO: 37604 - DNA, 25 bp, Saccharomyces pastorianus
gttgttatcgtattactgctgtatt

SEQ ID NO: 37605 - DNA, 25 bp, Saccharomyces pastorianus
ttactgctgtattttttgaccatga

SEQ ID NO: 37606 - DNA, 25 bp, Saccharomyces pastorianus
tagaagcaggtcttctaccgcacga

SEQ ID NO: 37607 - DNA, 25 bp, Saccharomyces pastorianus
gagaaggtcaagtctggtgattata

SEQ ID NO: 37608 - DNA, 25 bp, Saccharomyces pastorianus
ggatttattgaggaactcgtcatca

SEQ ID NO: 37609 - DNA, 25 bp, Saccharomyces pastorianus
gagaagggtagcactttcaagcaat

SEQ ID NO: 37610 - DNA, 25 bp, Saccharomyces pastorianus
gcaatatcgtgatgcctttgtagga

SEQ ID NO: 37611 - DNA, 25 bp, Saccharomyces pastorianus
agacaccatttcgttgacgtccttt

SEQ ID NO: 37612 - DNA, 25 bp, Saccharomyces pastorianus
tgtgaacctcaagaagacctaccgt

SEQ ID NO: 37613 - DNA, 25 bp, Saccharomyces pastorianus
tagaagaacctttccggccattgat

SEQ ID NO: 37614 - DNA, 25 bp, Saccharomyces pastorianus
tgaatccccagtagtacccatatgg

SEQ ID NO: 37615 - DNA, 25 bp, Saccharomyces pastorianus
tgacgtccttttgggatccatactg

SEQ ID NO: 37616 - DNA, 25 bp, Saccharomyces pastorianus
gttcgacaccttatttaccgcaata

SEQ ID NO: 37617 - DNA, 25 bp, Saccharomyces pastorianus
attctatacacgtctcttttgggtt

SEQ ID NO: 37618 - DNA, 25 bp, Saccharomyces pastorianus
tggtttagcaccagtttcctcacaa

SEQ ID NO: 37619 - DNA, 25 bp, Saccharomyces pastorianus
gaccagattttctagctcgttgtga

SEQ ID NO: 37620 - DNA, 25 bp, Saccharomyces pastorianus
gggttcagaacaactccgtcaggac

SEQ ID NO: 37621 - DNA, 25 bp, Saccharomyces pastorianus
gcttatcgctctttctagaactcag

SEQ ID NO: 37622 - DNA, 25 bp, Saccharomyces pastorianus
cgttctatgcacacctctaggatac

SEQ ID NO: 37623 - DNA, 25 bp, Saccharomyces pastorianus
catttttctcaaaacccagttgtgg

SEQ ID NO: 37624 - DNA, 25 bp, Saccharomyces pastorianus
gaaggaatactgctttgatatacca

SEQ ID NO: 37625 - DNA, 25 bp, Saccharomyces pastorianus
gaagattttacactttctggaagaa

SEQ ID NO: 37626 - DNA, 25 bp, Saccharomyces pastorianus
acccagttgtgggttgtgcgagcaa

SEQ ID NO: 37627 - DNA, 25 bp, Saccharomyces pastorianus
catattgaaaaactgggcgacccta

SEQ ID NO: 37628 - DNA, 25 bp, Saccharomyces pastorianus
acacctctaggatactattgcaaga

SEQ ID NO: 37629 - DNA, 25 bp, Saccharomyces pastorianus
gaaagagcttttccgttctatgcac

SEQ ID NO: 37630 - DNA, 25 bp, Saccharomyces pastorianus
ctgctttgatataccagtacttcat

SEQ ID NO: 37631 - DNA, 25 bp, Saccharomyces pastorianus
tgggcgaccctagatcgtgtacgaa

SEQ ID NO: 37632 - DNA, 25 bp, Saccharomyces pastorianus
ataagggaattcagttcgaggtaat

SEQ ID NO: 37633 - DNA, 25 bp, Saccharomyces pastorianus
gaaacagttgttcctgtgtcagaac

SEQ ID NO: 37634 - DNA, 25 bp, Saccharomyces pastorianus
ggtccggaaccaaatatgccagaaa

SEQ ID NO: 37635 - DNA, 25 bp, Saccharomyces pastorianus
gtaagtacggttctggtttgtctat

SEQ ID NO: 37636 - DNA, 25 bp, Saccharomyces pastorianus
gggtatgctcccacgatttatagta

SEQ ID NO: 37637 - DNA, 25 bp, Saccharomyces pastorianus
gaggatatcagaatgtccctgtagt

SEQ ID NO: 37638 - DNA, 25 bp, Saccharomyces pastorianus
gaagacggcctgctagattagtatt

SEQ ID NO: 37639 - DNA, 25 bp, Saccharomyces pastorianus
ggtgttatcaaagccaggtgcccaa

SEQ ID NO: 37640 - DNA, 25 bp, Saccharomyces pastorianus
aaacgagtactagacatttgccaaa

SEQ ID NO: 37641 - DNA, 25 bp, Saccharomyces pastorianus
gttttacattgtatcctgggacata

SEQ ID NO: 37642 - DNA, 25 bp, Saccharomyces pastorianus
gtccctgtagtgacggatgtcctga

SEQ ID NO: 37643 - DNA, 25 bp, Saccharomyces pastorianus
gccaggtgcccaagttgttttacat

SEQ ID NO: 37644 - DNA, 25 bp, Saccharomyces pastorianus
tgttgacccatctgactcatagaga

SEQ ID NO: 37645 - DNA, 25 bp, Saccharomyces pastorianus
gatgatcactgtgggtacgctctgc

SEQ ID NO: 37646 - DNA, 25 bp, Saccharomyces pastorianus
acgcatacggcgctctttttaacaa

SEQ ID NO: 37647 - DNA, 25 bp, Saccharomyces pastorianus
gttcgtcgacacatggcagtatttc

SEQ ID NO: 37648 - DNA, 25 bp, Saccharomyces pastorianus
aggtatcgccatgatgttgacccat

SEQ ID NO: 37649 - DNA, 25 bp, Saccharomyces pastorianus
aagaccaattttgctcaaccgttct

SEQ ID NO: 37650 - DNA, 25 bp, Saccharomyces pastorianus
ttttgccaccatgaaaaccgtcgat

SEQ ID NO: 37651 - DNA, 25 bp, Saccharomyces pastorianus
gggacaacttgttcgagaccaactt

SEQ ID NO: 37652 - DNA, 25 bp, Saccharomyces pastorianus
aggttttctgctggacactttagga

SEQ ID NO: 37653 - DNA, 25 bp, Saccharomyces pastorianus
ttttgctggctttttgttcgtcgac

SEQ ID NO: 37654 - DNA, 25 bp, Saccharomyces pastorianus
attcatcatcagcagttcggtatca

SEQ ID NO: 37655 - DNA, 25 bp, Saccharomyces pastorianus
aaattacaagcccttggcgtcccat

SEQ ID NO: 37656 - DNA, 25 bp, Saccharomyces pastorianus
attttgcacggccttgtttctaaag

SEQ ID NO: 37657 - DNA, 25 bp, Saccharomyces pastorianus
ctgtcggcaaggcaagatgtaacta

SEQ ID NO: 37658 - DNA, 25 bp, Saccharomyces pastorianus
gtctgcacagcgacctaatcgagga

SEQ ID NO: 37659 - DNA, 25 bp, Saccharomyces pastorianus
ggcatgtgctgccttgacaagaaag

SEQ ID NO: 37660 - DNA, 25 bp, Saccharomyces pastorianus
ttggcgtcccattgcatacaaagtt

SEQ ID NO: 37661 - DNA, 25 bp, Saccharomyces pastorianus
atgcgggtgttcatacactgatcat

SEQ ID NO: 37662 - DNA, 25 bp, Saccharomyces pastorianus
aaaggtgctattgttattgaccaag

SEQ ID NO: 37663 - DNA, 25 bp, Saccharomyces pastorianus
agaatttcctttgcaaactgtcggc

SEQ ID NO: 37664 - DNA, 25 bp, Saccharomyces pastorianus
gaatacatgcaaactctagatcttg

SEQ ID NO: 37665 - DNA, 25 bp, Saccharomyces pastorianus
tgaaaagtgatacccctgcaaacat

SEQ ID NO: 37666 - DNA, 25 bp, Saccharomyces pastorianus
aaaagacatcatccaggttctccgt

SEQ ID NO: 37667 - DNA, 25 bp, Saccharomyces pastorianus
gaccaattttggatttcctgcctcg

SEQ ID NO: 37668 - DNA, 25 bp, Saccharomyces pastorianus
aactcaattcgaggtcgcacgacac

SEQ ID NO: 37669 - DNA, 25 bp, Saccharomyces pastorianus
gagcatttgcttccccagaacatag

SEQ ID NO: 37670 - DNA, 25 bp, Saccharomyces pastorianus
ataccgattccacggattccagtga

SEQ ID NO: 37671 - DNA, 25 bp, Saccharomyces pastorianus
atcaacggcagggtcgtgtccactt

SEQ ID NO: 37672 - DNA, 25 bp, Saccharomyces pastorianus
ggtcacttcgtccaattactctaaa

SEQ ID NO: 37673 - DNA, 25 bp, Saccharomyces pastorianus
gggcaacaaccattcaatcaacggc

SEQ ID NO: 37674 - DNA, 25 bp, Saccharomyces pastorianus
aagaaactcgatagcgacgccatct

SEQ ID NO: 37675 - DNA, 25 bp, Saccharomyces pastorianus
acatccctctttgaggattctccaa

SEQ ID NO: 37676 - DNA, 25 bp, Saccharomyces pastorianus
cgtagccttcttttggagactccaa

SEQ ID NO: 37677 - DNA, 25 bp, Saccharomyces pastorianus
gttccataactacaccatcttgcat

SEQ ID NO: 37678 - DNA, 25 bp, Saccharomyces pastorianus
aggattttcatcaatcgctccgttt

SEQ ID NO: 37679 - DNA, 25 bp, Saccharomyces pastorianus
tagtcgggttaggtctcaagctcag

SEQ ID NO: 37680 - DNA, 25 bp, Saccharomyces pastorianus
atcctctatgatctctgtgacaacg

SEQ ID NO: 37681 - DNA, 25 bp, Saccharomyces pastorianus
acgcccattttttcaagcccgatat

SEQ ID NO: 37682 - DNA, 25 bp, Saccharomyces pastorianus
agaatggatgttccctcacagcgag

SEQ ID NO: 37683 - DNA, 25 bp, Saccharomyces pastorianus
atttccttgacgacggctcggagaa

SEQ ID NO: 37684 - DNA, 25 bp, Saccharomyces pastorianus
gaggcactgccaaccttaggtcaag

SEQ ID NO: 37685 - DNA, 25 bp, Saccharomyces pastorianus
gaaaggcactgtttgcccttttcga

SEQ ID NO: 37686 - DNA, 25 bp, Saccharomyces pastorianus
ggagactgaacttgcctttgagatc

SEQ ID NO: 37687 - DNA, 25 bp, Saccharomyces pastorianus
ggttttacaaccatatcacgctgtt

SEQ ID NO: 37688 - DNA, 25 bp, Saccharomyces pastorianus
aataatgtcgactcggcactcggcg

SEQ ID NO: 37689 - DNA, 25 bp, Saccharomyces pastorianus
atgcacagcctatttgaagccaatt

SEQ ID NO: 37690 - DNA, 25 bp, Saccharomyces pastorianus
gcctccaccgtcaagaagctttata

SEQ ID NO: 37691 - DNA, 25 bp, Saccharomyces pastorianus
gcactcggcgcttttgtaggcacca

SEQ ID NO: 37692 - DNA, 25 bp, Saccharomyces pastorianus
atatccatttccaaagcggtgagca

SEQ ID NO: 37693 - DNA, 25 bp, Saccharomyces pastorianus
gtgacctcccagtagacttgttaga

SEQ ID NO: 37694 - DNA, 25 bp, Saccharomyces pastorianus
gacggcgagcctatgtcgaatacat

SEQ ID NO: 37695 - DNA, 25 bp, Saccharomyces pastorianus
aagatgttctcaatggtgacggcga

SEQ ID NO: 37696 - DNA, 25 bp, Saccharomyces pastorianus
gacttaacgcaagtggttcccaata

SEQ ID NO: 37697 - DNA, 25 bp, Saccharomyces pastorianus
taaactctatcactcttgccacaga

SEQ ID NO: 37698 - DNA, 25 bp, Saccharomyces pastorianus
acaccacgtgctgtgaattcttgaa

SEQ ID NO: 37699 - DNA, 25 bp, Saccharomyces pastorianus
ggctgaccaggactattctacttta

SEQ ID NO: 37700 - DNA, 25 bp, Saccharomyces pastorianus
gggaaccaccaaagcgcctgaaaat

SEQ ID NO: 37701 - DNA, 25 bp, Saccharomyces pastorianus
gaatgtgagttttatcttacccgaa

SEQ ID NO: 37702 - DNA, 25 bp, Saccharomyces pastorianus
actttcattcaaaacacttcagctg

SEQ ID NO: 37703 - DNA, 25 bp, Saccharomyces pastorianus
gaatgataccttagacagtgtcagc

SEQ ID NO: 37704 - DNA, 25 bp, Saccharomyces pastorianus
aacagtatcgatacaactgccgaaa

SEQ ID NO: 37705 - DNA, 25 bp, Saccharomyces pastorianus
gatactacatccactaatccagaaa

SEQ ID NO: 37706 - DNA, 25 bp, Saccharomyces pastorianus
tgaccaatactcatccatcttaggg

SEQ ID NO: 37707 - DNA, 25 bp, Saccharomyces pastorianus
tgctatatttttctcggctgaccag

SEQ ID NO: 37708 - DNA, 25 bp, Saccharomyces pastorianus
gtgcaactcacattcttgattgatg

SEQ ID NO: 37709 - DNA, 25 bp, Saccharomyces pastorianus
agcagacgcaatgtcggtagacgaa

SEQ ID NO: 37710 - DNA, 25 bp, Saccharomyces pastorianus
aagaattcctgctttcgcaaacgct

SEQ ID NO: 37711 - DNA, 25 bp, Saccharomyces pastorianus
tagaagagttcagttcgcacctcac

SEQ ID NO: 37712 - DNA, 25 bp, Saccharomyces pastorianus
gcaccgcaacgtccatagtgttgga

SEQ ID NO: 37713 - DNA, 25 bp, Saccharomyces pastorianus
gtcaacgagttcttggccacactag

SEQ ID NO: 37714 - DNA, 25 bp, Saccharomyces pastorianus
gttgagcggcattaacccaagggat

SEQ ID NO: 37715 - DNA, 25 bp, Saccharomyces pastorianus
ggactgctgccaggaaatgctccaa

SEQ ID NO: 37716 - DNA, 25 bp, Saccharomyces pastorianus
agaggaccagcagcactaccaaatg

SEQ ID NO: 37717 - DNA, 25 bp, Saccharomyces pastorianus
tgatttcaactttcctacccagaag

SEQ ID NO: 37718 - DNA, 25 bp, Saccharomyces pastorianus
aaatggccgttttcaccatgtccat

SEQ ID NO: 37719 - DNA, 25 bp, Saccharomyces pastorianus
aaacgagtcgttccactacataatg

SEQ ID NO: 37720 - DNA, 25 bp, Saccharomyces pastorianus
gaaatgctccaaacggcggcagcgt

SEQ ID NO: 37721 - DNA, 25 bp, Saccharomyces pastorianus
gtagaggccaaatcgcatcccgaac

SEQ ID NO: 37722 - DNA, 25 bp, Saccharomyces pastorianus
ggtctaggctagtccgcagatttaa

SEQ ID NO: 37723 - DNA, 25 bp, Saccharomyces pastorianus
ggatgatttaccacacatcgccata

SEQ ID NO: 37724 - DNA, 25 bp, Saccharomyces pastorianus
gacttcattttcactggacccgagg

SEQ ID NO: 37725 - DNA, 25 bp, Saccharomyces pastorianus
gagggtttccaatccaacggtcaat

SEQ ID NO: 37726 - DNA, 25 bp, Saccharomyces pastorianus
tttaacgctctggaagacaccgtgc

SEQ ID NO: 37727 - DNA, 25 bp, Saccharomyces pastorianus
gatccattcgataccgtagaggcca

SEQ ID NO: 37728 - DNA, 25 bp, Saccharomyces pastorianus
gacaccgtgcgtactatttatgaag

SEQ ID NO: 37729 - DNA, 25 bp, Saccharomyces pastorianus
ttggacatgaccatagccgacgctg

SEQ ID NO: 37730 - DNA, 25 bp, Saccharomyces pastorianus
aatggaataggaccgtccctgctgc

SEQ ID NO: 37731 - DNA, 25 bp, Saccharomyces pastorianus
cggtcaatgagcctttacctaaatt

SEQ ID NO: 37732 - DNA, 25 bp, Saccharomyces pastorianus
ttgcaagcagcttagcacctgtcta

SEQ ID NO: 37733 - DNA, 25 bp, Saccharomyces pastorianus
gggcctctccttacaaggcaaaaat

SEQ ID NO: 37734 - DNA, 25 bp, Saccharomyces pastorianus
atatccatgggtgaagtttgcttcc

SEQ ID NO: 37735 - DNA, 25 bp, Saccharomyces pastorianus
gggagatgcctcgaatttgatattt

SEQ ID NO: 37736 - DNA, 25 bp, Saccharomyces pastorianus
gaaatggagatctgcagctcccacg

SEQ ID NO: 37737 - DNA, 25 bp, Saccharomyces pastorianus
agctcccacgccgaagcaaaggaat

SEQ ID NO: 37738 - DNA, 25 bp, Saccharomyces pastorianus
tgtctacccgttgaagtcactatta

SEQ ID NO: 37739 - DNA, 25 bp, Saccharomyces pastorianus
ataattcactcccagccggtaaaga

SEQ ID NO: 37740 - DNA, 25 bp, Saccharomyces pastorianus
gagctatacgagtcttctgaagcaa

SEQ ID NO: 37741 - DNA, 25 bp, Saccharomyces pastorianus
cggcaattgccatctttcataacca

SEQ ID NO: 37742 - DNA, 25 bp, Saccharomyces pastorianus
atacgccgagtatgtccctaaaaca

SEQ ID NO: 37743 - DNA, 25 bp, Saccharomyces pastorianus
tttgatgtattacctccaacgccta

SEQ ID NO: 37744 - DNA, 25 bp, Saccharomyces pastorianus
aagcttatatggctcgtttctcttc

SEQ ID NO: 37745 - DNA, 25 bp, Saccharomyces pastorianus
gagtcctcagtaatggcttctattc

SEQ ID NO: 37746 - DNA, 25 bp, Saccharomyces pastorianus
gaaggcatcccaatcaacctattaa

SEQ ID NO: 37747 - DNA, 25 bp, Saccharomyces pastorianus
tcgtttctcttcactttggaccaaa

SEQ ID NO: 37748 - DNA, 25 bp, Saccharomyces pastorianus
ggcgataatgccgatgaacctcaat

SEQ ID NO: 37749 - DNA, 25 bp, Saccharomyces pastorianus
ggcttctattccatcaactatctgg

SEQ ID NO: 37750 - DNA, 25 bp, Saccharomyces pastorianus
gcttttaggagatcacgccttgact

SEQ ID NO: 37751 - DNA, 25 bp, Saccharomyces pastorianus
catcatcccttgcaattgtcagaac

SEQ ID NO: 37752 - DNA, 25 bp, Saccharomyces pastorianus
ggaatcagcacgcagtgcacttcta

SEQ ID NO: 37753 - DNA, 25 bp, Saccharomyces pastorianus
aacgcctacgtctaaggagtccatt

SEQ ID NO: 37754 - DNA, 25 bp, Saccharomyces pastorianus
caatggttcttgctggatccgctga

SEQ ID NO: 37755 - DNA, 25 bp, Saccharomyces pastorianus
atctattcggatggtgctagttcgt

SEQ ID NO: 37756 - DNA, 25 bp, Saccharomyces pastorianus
tgctagttcgttaagggctgtccca

SEQ ID NO: 37757 - DNA, 25 bp, Saccharomyces pastorianus
ggataccgttatcagtacagtttct

SEQ ID NO: 37758 - DNA, 25 bp, Saccharomyces pastorianus
tataacgaatgcagctaggcgcctt

SEQ ID NO: 37759 - DNA, 25 bp, Saccharomyces pastorianus
accgagagctgcctttgctgttcat

SEQ ID NO: 37760 - DNA, 25 bp, Saccharomyces pastorianus
tatccatctcggtagctttttctga

SEQ ID NO: 37761 - DNA, 25 bp, Saccharomyces pastorianus
taacggccatcggagtttcaagatt

SEQ ID NO: 37762 - DNA, 25 bp, Saccharomyces pastorianus
ttttacgcttttgctaatagtgctg

SEQ ID NO: 37763 - DNA, 25 bp, Saccharomyces pastorianus
gctgttcatcctttagtatcacggg

SEQ ID NO: 37764 - DNA, 25 bp, Saccharomyces pastorianus
cagttcgtccactcaaaagtcattg

SEQ ID NO: 37765 - DNA, 25 bp, Saccharomyces pastorianus
atgttttggcccattatcaatgcaa

SEQ ID NO: 37766 - DNA, 25 bp, Saccharomyces pastorianus
ttgagggacagttacagcggccaac

SEQ ID NO: 37767 - DNA, 25 bp, Saccharomyces pastorianus
gcaaacggcactatcattattacta

SEQ ID NO: 37768 - DNA, 25 bp, Saccharomyces pastorianus
gaggcaaatatttcccattacaact

SEQ ID NO: 37769 - DNA, 25 bp, Saccharomyces pastorianus
gagggcatttattcaggcgatccaa

SEQ ID NO: 37770 - DNA, 25 bp, Saccharomyces pastorianus
tgagatggatgcattcaaccctgtt

SEQ ID NO: 37771 - DNA, 25 bp, Saccharomyces pastorianus
gtgataaaccggaatctttcgagat

SEQ ID NO: 37772 - DNA, 25 bp, Saccharomyces pastorianus
agaactctcgttctaacgcttcaaa

SEQ ID NO: 37773 - DNA, 25 bp, Saccharomyces pastorianus
agcggccaactactggacattcaat

SEQ ID NO: 37774 - DNA, 25 bp, Saccharomyces pastorianus
aaatcaatcatccaggtttaccttt

SEQ ID NO: 37775 - DNA, 25 bp, Saccharomyces pastorianus
aaatgtcctgtcttttctattgtgg

SEQ ID NO: 37776 - DNA, 25 bp, Saccharomyces pastorianus
aaggcagactacgtgatgcatacta

SEQ ID NO: 37777 - DNA, 25 bp, Saccharomyces pastorianus
cgtgttatcgaaaccgtccatgttc

SEQ ID NO: 37778 - DNA, 25 bp, Saccharomyces pastorianus
ggcactacagaacaatatgacccta

SEQ ID NO: 37779 - DNA, 25 bp, Saccharomyces pastorianus
gaagcccttcactttaacgtgttat

SEQ ID NO: 37780 - DNA, 25 bp, Saccharomyces pastorianus
aaccggatatcacagcaatttattt

SEQ ID NO: 37781 - DNA, 25 bp, Saccharomyces pastorianus
ggtaaatttggtgtcaatcccagaa

SEQ ID NO: 37782 - DNA, 25 bp, Saccharomyces pastorianus
gaaaccgtccatgttccaagacaaa

SEQ ID NO: 37783 - DNA, 25 bp, Saccharomyces pastorianus
tatgaccctaaatacgtttcagcat

SEQ ID NO: 37784 - DNA, 25 bp, Saccharomyces pastorianus
aatggcagcttatggtaggagtttc

SEQ ID NO: 37785 - DNA, 25 bp, Saccharomyces pastorianus
aacgcgttcaatgaagcccttcact

SEQ ID NO: 37786 - DNA, 25 bp, Saccharomyces pastorianus
gcaaggtcgttaaccaacgcgttca

SEQ ID NO: 37787 - DNA, 25 bp, Saccharomyces pastorianus
gcaacatcatttaccaattccgcag

SEQ ID NO: 37788 - DNA, 25 bp, Saccharomyces pastorianus
aaatcatgcttctccactaactgaa

SEQ ID NO: 37789 - DNA, 25 bp, Saccharomyces pastorianus
aaacccggtatcctgagtgacactg

SEQ ID NO: 37790 - DNA, 25 bp, Saccharomyces pastorianus
atccatacagtcaatctccatcaag

SEQ ID NO: 37791 - DNA, 25 bp, Saccharomyces pastorianus
tcgtcgtcattcaacactaggccaa

SEQ ID NO: 37792 - DNA, 25 bp, Saccharomyces pastorianus
atggcgatttgaccggtactgaagc

SEQ ID NO: 37793 - DNA, 25 bp, Saccharomyces pastorianus
gcagtcgggctctttaccaaagcaa

SEQ ID NO: 37794 - DNA, 25 bp, Saccharomyces pastorianus
aagtcttttggttctactcctgtgc

SEQ ID NO: 37795 - DNA, 25 bp, Saccharomyces pastorianus
ggacaagcctattcccatggttaca

SEQ ID NO: 37796 - DNA, 25 bp, Saccharomyces pastorianus
ctgtgcctccagatgtgattgctag

SEQ ID NO: 37797 - DNA, 25 bp, Saccharomyces pastorianus
agtgggaacagtacctcgtcgtcat

SEQ ID NO: 37798 - DNA, 25 bp, Saccharomyces pastorianus
ggatttgatcatcgcaatcggcggt

SEQ ID NO: 37799 - DNA, 25 bp, Saccharomyces pastorianus
gcagccaagaccgttccagacaaat

SEQ ID NO: 37800 - DNA, 25 bp, Saccharomyces pastorianus
agtttcggaatctttgttctacacg

SEQ ID NO: 37801 - DNA, 25 bp, Saccharomyces pastorianus
agaacccaatggatcgattacgaac

SEQ ID NO: 37802 - DNA, 25 bp, Saccharomyces pastorianus
tggtggtttcatccctgcaagaatt

SEQ ID NO: 37803 - DNA, 25 bp, Saccharomyces pastorianus
agacctacctgctgacatgttgaat

SEQ ID NO: 37804 - DNA, 25 bp, Saccharomyces pastorianus
atggtatgcctacccatgggaagcc

SEQ ID NO: 37805 - DNA, 25 bp, Saccharomyces pastorianus
gtatcgatgttgaaaagtccccaga

SEQ ID NO: 37806 - DNA, 25 bp, Saccharomyces pastorianus
aagccactgatatcgttttccatac

SEQ ID NO: 37807 - DNA, 25 bp, Saccharomyces pastorianus
ggtgtaccaaccatcagaatctttg

SEQ ID NO: 37808 - DNA, 25 bp, Saccharomyces pastorianus
gagaaccgttacttcgcagccaaga

SEQ ID NO: 37809 - DNA, 25 bp, Saccharomyces pastorianus
acacttcgttgtatcttttggctaa

SEQ ID NO: 37810 - DNA, 25 bp, Saccharomyces pastorianus
tgctaggagccgacattgtgatacc

SEQ ID NO: 37811 - DNA, 25 bp, Saccharomyces pastorianus
agtcaggctatatcctcctttgagc

SEQ ID NO: 37812 - DNA, 25 bp, Saccharomyces pastorianus
atttctttttgaggcagtcaggcta

SEQ ID NO: 37813 - DNA, 25 bp, Saccharomyces pastorianus
aacatcgtcattatcctcgttgctg

SEQ ID NO: 37814 - DNA, 25 bp, Saccharomyces pastorianus
agccttagcggacttacctttattg

SEQ ID NO: 37815 - DNA, 25 bp, Saccharomyces pastorianus
aaaactaactcctgcaggaccgctg

SEQ ID NO: 37816 - DNA, 25 bp, Saccharomyces pastorianus
gtgtcactgattcgaaagccttagc

SEQ ID NO: 37817 - DNA, 25 bp, Saccharomyces pastorianus
ataggtgcactgtgaccggatttca

SEQ ID NO: 37818 - DNA, 25 bp, Saccharomyces pastorianus
gaccgctgtgtcctttcaatttaaa

SEQ ID NO: 37819 - DNA, 25 bp, Saccharomyces pastorianus
ttcacggtggtcgaagggcatgttt

SEQ ID NO: 37820 - DNA, 25 bp, Saccharomyces pastorianus
gttattctcgaattaccaaagcctg

SEQ ID NO: 37821 - DNA, 25 bp, Saccharomyces pastorianus
aactggcatatattcctggtcgaga

SEQ ID NO: 37822 - DNA, 25 bp, Saccharomyces pastorianus
gtgggccatcgggactcagttactt

SEQ ID NO: 37823 - DNA, 25 bp, Saccharomyces pastorianus
tagaaccgttgccatgcatactgcg

SEQ ID NO: 37824 - DNA, 25 bp, Saccharomyces pastorianus
gaaagtgttctttgccctaacgtga

SEQ ID NO: 37825 - DNA, 25 bp, Saccharomyces pastorianus
atcccatatccctgcttatttttat

SEQ ID NO: 37826 - DNA, 25 bp, Saccharomyces pastorianus
attgccctatctctatttcattttc

SEQ ID NO: 37827 - DNA, 25 bp, Saccharomyces pastorianus
ttttggattcttttggtgggccatc

SEQ ID NO: 37828 - DNA, 25 bp, Saccharomyces pastorianus
gttacttcttctaaatcccatatcc

SEQ ID NO: 37829 - DNA, 25 bp, Saccharomyces pastorianus
gggacggtcgttttcacacatagtg

SEQ ID NO: 37830 - DNA, 25 bp, Saccharomyces pastorianus
attctttcgccattctagagtgtct

SEQ ID NO: 37831 - DNA, 25 bp, Saccharomyces pastorianus
gacgtgccggtaactccaagagaaa

SEQ ID NO: 37832 - DNA, 25 bp, Saccharomyces pastorianus
aggcttggccagaacttcaggtact

SEQ ID NO: 37833 - DNA, 25 bp, Saccharomyces pastorianus
cttgatcggtttcgccacaggatac

SEQ ID NO: 37834 - DNA, 25 bp, Saccharomyces pastorianus
tctggtttcatttcgtgcatcacat

SEQ ID NO: 37835 - DNA, 25 bp, Saccharomyces pastorianus
aagtatttccctctgatccaattgt

SEQ ID NO: 37836 - DNA, 25 bp, Saccharomyces pastorianus
aacaacaactttgccgacgtgccgg

SEQ ID NO: 37837 - DNA, 25 bp, Saccharomyces pastorianus
acaggatacctctacacatgtctag

SEQ ID NO: 37838 - DNA, 25 bp, Saccharomyces pastorianus
atgtctagacacacgtacactgggt

SEQ ID NO: 37839 - DNA, 25 bp, Saccharomyces pastorianus
atgacggctacgatcctgtatggat

SEQ ID NO: 37840 - DNA, 25 bp, Saccharomyces pastorianus
aggtaacttcgtgatctccttgatc

SEQ ID NO: 37841 - DNA, 25 bp, Saccharomyces pastorianus
aaattacggtgtcttgcccaatggg

SEQ ID NO: 37842 - DNA, 25 bp, Saccharomyces pastorianus
gtacaagtacttaacttcatttgga

SEQ ID NO: 37843 - DNA, 25 bp, Saccharomyces pastorianus
ttgatacctttgaattccttggtgg

SEQ ID NO: 37844 - DNA, 25 bp, Saccharomyces pastorianus
aactttggaggcatattgactattg

SEQ ID NO: 37845 - DNA, 25 bp, Saccharomyces pastorianus
cttggtggccttggcgatatcttca

SEQ ID NO: 37846 - DNA, 25 bp, Saccharomyces pastorianus
tacaagtacttaacttcatttggat

SEQ ID NO: 37847 - DNA, 25 bp, Saccharomyces pastorianus
aaactttggaggcatattgactatt

SEQ ID NO: 37848 - DNA, 25 bp, Saccharomyces pastorianus
gatacctttgaattccttggtggcc

SEQ ID NO: 37849 - DNA, 25 bp, Saccharomyces pastorianus
tacctttgaattccttggtggcctt

SEQ ID NO: 37850 - DNA, 25 bp, Saccharomyces pastorianus
tccttggtggccttggcgatatctt

SEQ ID NO: 37851 - DNA, 25 bp, Saccharomyces pastorianus
atacctttgaattccttggtggcct

SEQ ID NO: 37852 - DNA, 25 bp, Saccharomyces pastorianus
ctttggaggcatattgactattgat

SEQ ID NO: 37853 - DNA, 25 bp, Saccharomyces pastorianus
gaaagattccgggtctagagatgtt

SEQ ID NO: 37854 - DNA, 25 bp, Saccharomyces pastorianus
ggcaaccaagccaatacctttcaaa

SEQ ID NO: 37855 - DNA, 25 bp, Saccharomyces pastorianus
attgtccgaaggtctgaacggtgct

SEQ ID NO: 37856 - DNA, 25 bp, Saccharomyces pastorianus
aagcatgacagttaccaattttgat

SEQ ID NO: 37857 - DNA, 25 bp, Saccharomyces pastorianus
gaacttgcctccagaatccaggatc

SEQ ID NO: 37858 - DNA, 25 bp, Saccharomyces pastorianus
gtggcccaagatttgaatgttcgaa

SEQ ID NO: 37859 - DNA, 25 bp, Saccharomyces pastorianus
acaaaactctgatacccctcgaaag

SEQ ID NO: 37860 - DNA, 25 bp, Saccharomyces pastorianus
agagactaccatctagccttaagat

SEQ ID NO: 37861 - DNA, 25 bp, Saccharomyces pastorianus
aatctggtccaattacttacaagag

SEQ ID NO: 37862 - DNA, 25 bp, Saccharomyces pastorianus
gaacagtatctgtctctctgaaaac

SEQ ID NO: 37863 - DNA, 25 bp, Saccharomyces pastorianus
ttgtcactgagcttgacgctaaagg

SEQ ID NO: 37864 - DNA, 25 bp, Saccharomyces pastorianus
ggtccaacagaattttttcccacag

SEQ ID NO: 37865 - DNA, 25 bp, Saccharomyces pastorianus
gattgccgtatatttgccattatta

SEQ ID NO: 37866 - DNA, 25 bp, Saccharomyces pastorianus
tcagcagtattgttctttggtttct

SEQ ID NO: 37867 - DNA, 25 bp, Saccharomyces pastorianus
attgaaacattatggtccctagtga

SEQ ID NO: 37868 - DNA, 25 bp, Saccharomyces pastorianus
gtccgataatgtggtagaagctcta

SEQ ID NO: 37869 - DNA, 25 bp, Saccharomyces pastorianus
aatttcaaggcatgtccattcctcg

SEQ ID NO: 37870 - DNA, 25 bp, Saccharomyces pastorianus
cattcctcgcgaagtgtccgataat

SEQ ID NO: 37871 - DNA, 25 bp, Saccharomyces pastorianus
gatgtaccgcttttcaactgatatt

SEQ ID NO: 37872 - DNA, 25 bp, Saccharomyces pastorianus
ctccaaccaaactctgtcatcagtg

SEQ ID NO: 37873 - DNA, 25 bp, Saccharomyces pastorianus
caatgagctggtcaaactttgcgaa

SEQ ID NO: 37874 - DNA, 25 bp, Saccharomyces pastorianus
ggaacaatgccctacgtttgagcaa

SEQ ID NO: 37875 - DNA, 25 bp, Saccharomyces pastorianus
agggtaactacttgaccactctacg

SEQ ID NO: 37876 - DNA, 25 bp, Saccharomyces pastorianus
aatacgagtacgttggccgcgactg

SEQ ID NO: 37877 - DNA, 25 bp, Saccharomyces pastorianus
gcgactgtcttttacatgggtcaaa

SEQ ID NO: 37878 - DNA, 25 bp, Saccharomyces pastorianus
ctaggcaagccatacacgtttcatt

SEQ ID NO: 37879 - DNA, 25 bp, Saccharomyces pastorianus
ggagtttcacgccttttggagtaag

SEQ ID NO: 37880 - DNA, 25 bp, Saccharomyces pastorianus
ggttgccaatctgcgtgtacataag

SEQ ID NO: 37881 - DNA, 25 bp, Saccharomyces pastorianus
gccatggtcctcctttaaacgtgaa

SEQ ID NO: 37882 - DNA, 25 bp, Saccharomyces pastorianus
aagggacattactcaacggcatcgc

SEQ ID NO: 37883 - DNA, 25 bp, Saccharomyces pastorianus
tattactcctgatgtggttgccaat

SEQ ID NO: 37884 - DNA, 25 bp, Saccharomyces pastorianus
atcctgggcccatatgaagagcgtt

SEQ ID NO: 37885 - DNA, 25 bp, Saccharomyces pastorianus
gtcatcttaacgttggctttggcca

SEQ ID NO: 37886 - DNA, 25 bp, Saccharomyces pastorianus
tccgccgcttcaaaagacaagacca

SEQ ID NO: 37887 - DNA, 25 bp, Saccharomyces pastorianus
aaaagacaagaccagcaacgaaaag

SEQ ID NO: 37888 - DNA, 25 bp, Saccharomyces pastorianus
tcaaaagacaagaccagcaacgaaa

SEQ ID NO: 37889 - DNA, 25 bp, Saccharomyces pastorianus
ccgcttcaaaagacaagaccagcaa

SEQ ID NO: 37890 - DNA, 25 bp, Saccharomyces pastorianus
agacaagaccagcaacgaaaagaag

SEQ ID NO: 37891 - DNA, 25 bp, Saccharomyces pastorianus
aagacaagaccagcaacgaaaagaa

SEQ ID NO: 37892 - DNA, 25 bp, Saccharomyces pastorianus
agaaggacaactacatcgtcaaggg

SEQ ID NO: 37893 - DNA, 25 bp, Saccharomyces pastorianus
gtctccgccgcttcaaaagacaaga

SEQ ID NO: 37894 - DNA, 25 bp, Saccharomyces pastorianus
tctccgccgcttcaaaagacaagac

SEQ ID NO: 37895 - DNA, 25 bp, Saccharomyces pastorianus
gaaggacaactacatcgtcaagggt

SEQ ID NO: 37896 - DNA, 25 bp, Saccharomyces pastorianus
acaagaccagcaacgaaaagaagga

SEQ ID NO: 37897 - DNA, 25 bp, Saccharomyces pastorianus
aagctaagcgcattcgtcgtatcaa

SEQ ID NO: 37898 - DNA, 25 bp, Saccharomyces pastorianus
cgtatcaagaaaccctctcctgacg

SEQ ID NO: 37899 - DNA, 25 bp, Saccharomyces pastorianus
tttcgacatcccttctccagaagaa

SEQ ID NO: 37900 - DNA, 25 bp, Saccharomyces pastorianus
gacgctaccgtttcgcaggaaacta

SEQ ID NO: 37901 - DNA, 25 bp, Saccharomyces pastorianus
aaccattacttacactttcgacatc

SEQ ID NO: 37902 - DNA, 25 bp, Saccharomyces pastorianus
aacgtgcgagtggattttttggaga

SEQ ID NO: 37903 - DNA, 25 bp, Saccharomyces pastorianus
aagagtcgccttgaaacaactgaaa

SEQ ID NO: 37904 - DNA, 25 bp, Saccharomyces pastorianus
tagcgtggtgctaaagtatgccaag

SEQ ID NO: 37905 - DNA, 25 bp, Saccharomyces pastorianus
acggcacgttgcattgaaaaggaca

SEQ ID NO: 37906 - DNA, 25 bp, Saccharomyces pastorianus
atgaatagtctcaacacggcacgtt

SEQ ID NO: 37907 - DNA, 25 bp, Saccharomyces pastorianus
gaggaatctgaagcgaagtccaatt

SEQ ID NO: 37908 - DNA, 25 bp, Saccharomyces pastorianus
gccttcgtgttagtttcctgcgaaa

SEQ ID NO: 37909 - DNA, 25 bp, Saccharomyces pastorianus
tagtccgtctagatttaaaacctgt

SEQ ID NO: 37910 - DNA, 25 bp, Saccharomyces pastorianus
tagcgtcaggagagggtttcttgat

SEQ ID NO: 37911 - DNA, 25 bp, Saccharomyces pastorianus
gtttcctgcgaaacggtagcgtcag

SEQ ID NO: 37912 - DNA, 25 bp, Saccharomyces pastorianus
gtttcattacttgccttcgtgttag

SEQ ID NO: 37913 - DNA, 25 bp, Saccharomyces pastorianus
gacgaatgcgcttagctttagtaat

SEQ ID NO: 37914 - DNA, 25 bp, Saccharomyces pastorianus
gatacgacgaatgcgcttagcttta

SEQ ID NO: 37915 - DNA, 25 bp, Saccharomyces pastorianus
gtctagatttaaaacctgtcttggt

SEQ ID NO: 37916 - DNA, 25 bp, Saccharomyces pastorianus
gctttagtaatgcatctacctgatg

SEQ ID NO: 37917 - DNA, 25 bp, Saccharomyces pastorianus
gtttcttgatacgacgaatgcgctt

SEQ ID NO: 37918 - DNA, 25 bp, Saccharomyces pastorianus
tacttgccttcgtgttagtttcctg

SEQ ID NO: 37919 - DNA, 25 bp, Saccharomyces pastorianus
taaggccactggatccgccacaatt

SEQ ID NO: 37920 - DNA, 25 bp, Saccharomyces pastorianus
caggtcgttatgttatgatgtgtac

SEQ ID NO: 37921 - DNA, 25 bp, Saccharomyces pastorianus
ggaaattgcctccaagactctattc

SEQ ID NO: 37922 - DNA, 25 bp, Saccharomyces pastorianus
agctcaaaaaccttaccgtcattat

SEQ ID NO: 37923 - DNA, 25 bp, Saccharomyces pastorianus
tatatgaacagctaccagattggaa

SEQ ID NO: 37924 - DNA, 25 bp, Saccharomyces pastorianus
tcaaaccagagggtgttttctcttt

SEQ ID NO: 37925 - DNA, 25 bp, Saccharomyces pastorianus
tatatttgtgaagcccatccagacg

SEQ ID NO: 37926 - DNA, 25 bp, Saccharomyces pastorianus
gtcatagtaggcttaatcaaaccag

SEQ ID NO: 37927 - DNA, 25 bp, Saccharomyces pastorianus
cccatccagacgtccttgagaaaat

SEQ ID NO: 37928 - DNA, 25 bp, Saccharomyces pastorianus
acattggcttcggaatgggtatcat

SEQ ID NO: 37929 - DNA, 25 bp, Saccharomyces pastorianus
ttaacggattaggtgctgacaggtc

SEQ ID NO: 37930 - DNA, 25 bp, Saccharomyces pastorianus
gtaacgccacacctattagcgggta

SEQ ID NO: 37931 - DNA, 25 bp, Saccharomyces pastorianus
gaatctagtggttcgaacttgacga

SEQ ID NO: 37932 - DNA, 25 bp, Saccharomyces pastorianus
aatctcgcttccacagtaggcggtt

SEQ ID NO: 37933 - DNA, 25 bp, Saccharomyces pastorianus
gagtcatctgattctaaaacttcca

SEQ ID NO: 37934 - DNA, 25 bp, Saccharomyces pastorianus
gtaggcggttctcaaactaggaagt

SEQ ID NO: 37935 - DNA, 25 bp, Saccharomyces pastorianus
gaaaatgtgaatctcgcttccacag

SEQ ID NO: 37936 - DNA, 25 bp, Saccharomyces pastorianus
atgaagttgcgacccctatagcggg

SEQ ID NO: 37937 - DNA, 25 bp, Saccharomyces pastorianus
gctacaatgaagttgcgacccctat

SEQ ID NO: 37938 - DNA, 25 bp, Saccharomyces pastorianus
gggaagtataccatcctttccaaca

SEQ ID NO: 37939 - DNA, 25 bp, Saccharomyces pastorianus
ccggatgatccgttacgtatgttag

SEQ ID NO: 37940 - DNA, 25 bp, Saccharomyces pastorianus
acctattagcgggtatgaggctcat

SEQ ID NO: 37941 - DNA, 25 bp, Saccharomyces pastorianus
aatttgacccaattcattccaggtg

SEQ ID NO: 37942 - DNA, 25 bp, Saccharomyces pastorianus
gtcagcgcaccgtttatttgattca

SEQ ID NO: 37943 - DNA, 25 bp, Saccharomyces pastorianus
acgctggcttcccatgtggtgtaac

SEQ ID NO: 37944 - DNA, 25 bp, Saccharomyces pastorianus
gacaacttccctaatttgacccaat

SEQ ID NO: 37945 - DNA, 25 bp, Saccharomyces pastorianus
aacttcatcgtctgccaatgaccga

SEQ ID NO: 37946 - DNA, 25 bp, Saccharomyces pastorianus
tgctaaatttcagggcatccgtctc

SEQ ID NO: 37947 - DNA, 25 bp, Saccharomyces pastorianus
gggatccgtctcttggaattgctaa

SEQ ID NO: 37948 - DNA, 25 bp, Saccharomyces pastorianus
gaacgtgcaactctacaagtgactt

SEQ ID NO: 37949 - DNA, 25 bp, Saccharomyces pastorianus
tcacgaagatgagacgccgcgattt

SEQ ID NO: 37950 - DNA, 25 bp, Saccharomyces pastorianus
gacgccgcgatttgaagatcctcga

SEQ ID NO: 37951 - DNA, 25 bp, Saccharomyces pastorianus
aagggatttcttttcaacgctggct

SEQ ID NO: 37952 - DNA, 25 bp, Saccharomyces pastorianus
aattccgacactgaaaccgttctgg

SEQ ID NO: 37953 - DNA, 25 bp, Saccharomyces pastorianus
gcaaatcactgctagttatccggaa

SEQ ID NO: 37954 - DNA, 25 bp, Saccharomyces pastorianus
tttgggtatcttcgactacaccgac

SEQ ID NO: 37955 - DNA, 25 bp, Saccharomyces pastorianus
tcgcgacaccaaacactcattgaat

SEQ ID NO: 37956 - DNA, 25 bp, Saccharomyces pastorianus
agtggactttgttcacgacctaggc

SEQ ID NO: 37957 - DNA, 25 bp, Saccharomyces pastorianus
tttttggcagactacttggagctaa

SEQ ID NO: 37958 - DNA, 25 bp, Saccharomyces pastorianus
gtggattagtcacctcgaggcaaat

SEQ ID NO: 37959 - DNA, 25 bp, Saccharomyces pastorianus
acggccacagtgcagtcgatgttaa

SEQ ID NO: 37960 - DNA, 25 bp, Saccharomyces pastorianus
tctggtatccacctcggatcatgaa

SEQ ID NO: 37961 - DNA, 25 bp, Saccharomyces pastorianus
gaacgacatggtttctttcagagca

SEQ ID NO: 37962 - DNA, 25 bp, Saccharomyces pastorianus
ggtatccacaagtactggccaacgc

SEQ ID NO: 37963 - DNA, 25 bp, Saccharomyces pastorianus
tcctgtgtctaatgtgcagcagttg

SEQ ID NO: 37964 - DNA, 25 bp, Saccharomyces pastorianus
gtgtctaatgtgcagcagttgtttc

SEQ ID NO: 37965 - DNA, 25 bp, Saccharomyces pastorianus
gttcctgtgtctaatgtgcagcagt

SEQ ID NO: 37966 - DNA, 25 bp, Saccharomyces pastorianus
gcgttcctgtgtctaatgtgcagca

SEQ ID NO: 37967 - DNA, 25 bp, Saccharomyces pastorianus
gggtgcgttcctgtgtctaatgtgc

SEQ ID NO: 37968 - DNA, 25 bp, Saccharomyces pastorianus
ttaatgggtgcgttcctgtgtctaa

SEQ ID NO: 37969 - DNA, 25 bp, Saccharomyces pastorianus
gattacaccgtgatcaatatttttt

SEQ ID NO: 37970 - DNA, 25 bp, Saccharomyces pastorianus
gtgcgttcctgtgtctaatgtgcag

SEQ ID NO: 37971 - DNA, 25 bp, Saccharomyces pastorianus
aatgggtgcgttcctgtgtctaatg

SEQ ID NO: 37972 - DNA, 25 bp, Saccharomyces pastorianus
tccgattacaccgtgatcaatattt

SEQ ID NO: 37973 - DNA, 25 bp, Saccharomyces pastorianus
tttttaatgggtgcgttcctgtgtc

SEQ ID NO: 37974 - DNA, 25 bp, Saccharomyces pastorianus
gcaccatctgtgtcctacatgagaa

SEQ ID NO: 37975 - DNA, 25 bp, Saccharomyces pastorianus
agtttgactttttcggtagctctca

SEQ ID NO: 37976 - DNA, 25 bp, Saccharomyces pastorianus
tttggcgccaggaaagtttgacttt

SEQ ID NO: 37977 - DNA, 25 bp, Saccharomyces pastorianus
gggctctcatctacgggttcaggat

SEQ ID NO: 37978 - DNA, 25 bp, Saccharomyces pastorianus
caggattccggaaactttggcgcca

SEQ ID NO: 37979 - DNA, 25 bp, Saccharomyces pastorianus
ggttccgtttgccatctaaaggtca

SEQ ID NO: 37980 - DNA, 25 bp, Saccharomyces pastorianus
gactacttgggaatcatcagcttga

SEQ ID NO: 37981 - DNA, 25 bp, Saccharomyces pastorianus
acattatggtcgttctcggttccgt

SEQ ID NO: 37982 - DNA, 25 bp, Saccharomyces pastorianus
atcagcttgatctcatgctcgatga

SEQ ID NO: 37983 - DNA, 25 bp, Saccharomyces pastorianus
gtatcttacttcagtctcttcacgg

SEQ ID NO: 37984 - DNA, 25 bp, Saccharomyces pastorianus
tattattcgggttcagtgggctcct

SEQ ID NO: 37985 - DNA, 25 bp, Saccharomyces pastorianus
tgacaatgagactatcgcggacccc

SEQ ID NO: 37986 - DNA, 25 bp, Saccharomyces pastorianus
ggtcagggatggtgtctccgcccaa

SEQ ID NO: 37987 - DNA, 25 bp, Saccharomyces pastorianus
agatgtggctattttcttgagacga

SEQ ID NO: 37988 - DNA, 25 bp, Saccharomyces pastorianus
gagacgaaacttggttcagggtcaa

SEQ ID NO: 37989 - DNA, 25 bp, Saccharomyces pastorianus
ggagcccaggtatcatctgaacatt

SEQ ID NO: 37990 - DNA, 25 bp, Saccharomyces pastorianus
agacacggcctgagagctactcgaa

SEQ ID NO: 37991 - DNA, 25 bp, Saccharomyces pastorianus
agctgctagagccaaaatgcggtca

SEQ ID NO: 37992 - DNA, 25 bp, Saccharomyces pastorianus
cgcggaccccacagcaagagtgaaa

SEQ ID NO: 37993 - DNA, 25 bp, Saccharomyces pastorianus
aaggctttggatgcatacagacacg

SEQ ID NO: 37994 - DNA, 25 bp, Saccharomyces pastorianus
gatgacaccgatatgaaggagccca

SEQ ID NO: 37995 - DNA, 25 bp, Saccharomyces pastorianus
gagctactcgaatagcattccagaa

SEQ ID NO: 37996 - DNA, 25 bp, Saccharomyces pastorianus
gactttcctatgcaatcaatatccg

SEQ ID NO: 37997 - DNA, 25 bp, Saccharomyces pastorianus
ggagtacaaggacgatttggcctat

SEQ ID NO: 37998 - DNA, 25 bp, Saccharomyces pastorianus
gatttggcctatgacaagacggata

SEQ ID NO: 37999 - DNA, 25 bp, Saccharomyces pastorianus
atgcctgctattcttttccaatgat

SEQ ID NO: 38000 - DNA, 25 bp, Saccharomyces pastorianus
aagccggatctgattgcagtcatga

SEQ ID NO: 38001 - DNA, 25 bp, Saccharomyces pastorianus
agagatcacatattatgcctgctat

SEQ ID NO: 38002 - DNA, 25 bp, Saccharomyces pastorianus
atggtgcttgaaactataccttctg

SEQ ID NO: 38003 - DNA, 25 bp, Saccharomyces pastorianus
tataccttctgactttcctatgcaa

SEQ ID NO: 38004 - DNA, 25 bp, Saccharomyces pastorianus
tggatttcgcctaaagagttattga

SEQ ID NO: 38005 - DNA, 25 bp, Saccharomyces pastorianus
gtatacctatcgttcaatgacttta

SEQ ID NO: 38006 - DNA, 25 bp, Saccharomyces pastorianus
gaaattttagcctcttagatgacat

SEQ ID NO: 38007 - DNA, 25 bp, Saccharomyces pastorianus
gcttgtggaaccatcagcgtctgaa

SEQ ID NO: 38008 - DNA, 25 bp, Saccharomyces pastorianus
gtcgtattttcaagctgcccgtgaa

SEQ ID NO: 38009 - DNA, 25 bp, Saccharomyces pastorianus
aattactgaccaacaacctcgtgag

SEQ ID NO: 38010 - DNA, 25 bp, Saccharomyces pastorianus
aaacctggacgagctgagagcccaa

SEQ ID NO: 38011 - DNA, 25 bp, Saccharomyces pastorianus
agtcgacgacaagtacacccagttt

SEQ ID NO: 38012 - DNA, 25 bp, Saccharomyces pastorianus
aagtcggcctatggctgctgttcaa

SEQ ID NO: 38013 - DNA, 25 bp, Saccharomyces pastorianus
gaagcgtcgtcgttgacaactccag

SEQ ID NO: 38014 - DNA, 25 bp, Saccharomyces pastorianus
gggtatactgatgaccttaggccta

SEQ ID NO: 38015 - DNA, 25 bp, Saccharomyces pastorianus
aaacgcactcactgatgcaagtcga

SEQ ID NO: 38016 - DNA, 25 bp, Saccharomyces pastorianus
ggcaatcaaattctacagtcgggta

SEQ ID NO: 38017 - DNA, 25 bp, Saccharomyces pastorianus
gaagcgagacgtatacctgtcactc

SEQ ID NO: 38018 - DNA, 25 bp, Saccharomyces pastorianus
ggttcctggcttcgtggcaagacta

SEQ ID NO: 38019 - DNA, 25 bp, Saccharomyces pastorianus
gctacccaccgtccagaaagaaatg

SEQ ID NO: 38020 - DNA, 25 bp, Saccharomyces pastorianus
tcaacaaactgatgtaccgctccgt

SEQ ID NO: 38021 - DNA, 25 bp, Saccharomyces pastorianus
ggcaagactacctacacatgatttc

SEQ ID NO: 38022 - DNA, 25 bp, Saccharomyces pastorianus
gagactctggagaaactgtcccctg

SEQ ID NO: 38023 - DNA, 25 bp, Saccharomyces pastorianus
agatatcgacaacccattgcacgtg

SEQ ID NO: 38024 - DNA, 25 bp, Saccharomyces pastorianus
tacctcccttggttctatacagaag

SEQ ID NO: 38025 - DNA, 25 bp, Saccharomyces pastorianus
gaaactgtcccctgagcagactgtt

SEQ ID NO: 38026 - DNA, 25 bp, Saccharomyces pastorianus
cattgcacgtggtcgggttcctggc

SEQ ID NO: 38027 - DNA, 25 bp, Saccharomyces pastorianus
gatgcgactttatcttcggagactc

SEQ ID NO: 38028 - DNA, 25 bp, Saccharomyces pastorianus
aatgggcgaccagtacgtgcggaac

SEQ ID NO: 38029 - DNA, 25 bp, Saccharomyces pastorianus
atatcactggtgtcgctggattctt

SEQ ID NO: 38030 - DNA, 25 bp, Saccharomyces pastorianus
taccgtggcatttctcgtgatgaat

SEQ ID NO: 38031 - DNA, 25 bp, Saccharomyces pastorianus
ctggattcttcgcttggttatttat

SEQ ID NO: 38032 - DNA, 25 bp, Saccharomyces pastorianus
ttaaccaccatcatttctgcagcaa

SEQ ID NO: 38033 - DNA, 25 bp, Saccharomyces pastorianus
gtggtgtcccatatattgcggtttt

SEQ ID NO: 38034 - DNA, 25 bp, Saccharomyces pastorianus
tatcatcatccaaggtttcaccgct

SEQ ID NO: 38035 - DNA, 25 bp, Saccharomyces pastorianus
gttttcgccacttccatatttggtg

SEQ ID NO: 38036 - DNA, 25 bp, Saccharomyces pastorianus
cggtattaatttccttgccgcgtat

SEQ ID NO: 38037 - DNA, 25 bp, Saccharomyces pastorianus
ttggttctcgtgtcttatttggttt

SEQ ID NO: 38038 - DNA, 25 bp, Saccharomyces pastorianus
tctctgttttccttttcttggcaat

SEQ ID NO: 38039 - DNA, 25 bp, Saccharomyces pastorianus
ttacatggaaacttcgaccggtggt

SEQ ID NO: 38040 - DNA, 25 bp, Saccharomyces pastorianus
gcattatcgagtatatctaccggaa

SEQ ID NO: 38041 - DNA, 25 bp, Saccharomyces pastorianus
ggacaaaactattgggcttctagat

SEQ ID NO: 38042 - DNA, 25 bp, Saccharomyces pastorianus
aataggaggtccattgagcaatctg

SEQ ID NO: 38043 - DNA, 25 bp, Saccharomyces pastorianus
cactgcgaaaaattggccattgcta

SEQ ID NO: 38044 - DNA, 25 bp, Saccharomyces pastorianus
aaaattcggcgtcaatgttctcatt

SEQ ID NO: 38045 - DNA, 25 bp, Saccharomyces pastorianus
tttccgcatgttcgacaagttcatt

SEQ ID NO: 38046 - DNA, 25 bp, Saccharomyces pastorianus
ttgatcgacttgtatgctagcacta

SEQ ID NO: 38047 - DNA, 25 bp, Saccharomyces pastorianus
tgatttactttatcatccccatgat

SEQ ID NO: 38048 - DNA, 25 bp, Saccharomyces pastorianus
gatattaacttccaagccaggccaa

SEQ ID NO: 38049 - DNA, 25 bp, Saccharomyces pastorianus
tgctaatgtgttcttttccgcatgt

SEQ ID NO: 38050 - DNA, 25 bp, Saccharomyces pastorianus
aagccaggccaacatgctaatgtgt

SEQ ID NO: 38051 - DNA, 25 bp, Saccharomyces pastorianus
cataccgatgactccacagattttc

SEQ ID NO: 38052 - DNA, 25 bp, Saccharomyces pastorianus
gaatttgaattacgcccagcaatta

SEQ ID NO: 38053 - DNA, 25 bp, Saccharomyces pastorianus
gcagcagatttcacttcattgtttg

SEQ ID NO: 38054 - DNA, 25 bp, Saccharomyces pastorianus
taaatgtacgcctcctcgagtagca

SEQ ID NO: 38055 - DNA, 25 bp, Saccharomyces pastorianus
atggtacgactacttttctcaggct

SEQ ID NO: 38056 - DNA, 25 bp, Saccharomyces pastorianus
gaaccgttggctgcaggagattatt

SEQ ID NO: 38057 - DNA, 25 bp, Saccharomyces pastorianus
tcaagcaactgtgtggtgaaccgtt

SEQ ID NO: 38058 - DNA, 25 bp, Saccharomyces pastorianus
gagtagcacagtttaccttcaagca

SEQ ID NO: 38059 - DNA, 25 bp, Saccharomyces pastorianus
gaagaaaggtttgccttcgctcgtg

SEQ ID NO: 38060 - DNA, 25 bp, Saccharomyces pastorianus
ttcgctcgtgccttaagtagactgt

SEQ ID NO: 38061 - DNA, 25 bp, Saccharomyces pastorianus
atttatctatctatgtccgcgatga

SEQ ID NO: 38062 - DNA, 25 bp, Saccharomyces pastorianus
gaatggacttctctgtttgacaacg

SEQ ID NO: 38063 - DNA, 25 bp, Saccharomyces pastorianus
aagacgttcccgtgcaagaaagctg

SEQ ID NO: 38064 - DNA, 25 bp, Saccharomyces pastorianus
ttgccaacccctatactagaagatg

SEQ ID NO: 38065 - DNA, 25 bp, Saccharomyces pastorianus
acgccgctgtggtagaatctttctt

SEQ ID NO: 38066 - DNA, 25 bp, Saccharomyces pastorianus
tcaacaacttcatttttgccaaccc

SEQ ID NO: 38067 - DNA, 25 bp, Saccharomyces pastorianus
gtctccaattgtgcctgaatctagc

SEQ ID NO: 38068 - DNA, 25 bp, Saccharomyces pastorianus
gaagatgcctctttggtaccatcta

SEQ ID NO: 38069 - DNA, 25 bp, Saccharomyces pastorianus
tgaatctagcgatcctgctgctcta

SEQ ID NO: 38070 - DNA, 25 bp, Saccharomyces pastorianus
gtaaacaacgctcgattccactgtc

SEQ ID NO: 38071 - DNA, 25 bp, Saccharomyces pastorianus
aatttcagaactagacgccgctgtg

SEQ ID NO: 38072 - DNA, 25 bp, Saccharomyces pastorianus
atgacgttttatcggctgacaaggc

SEQ ID NO: 38073 - DNA, 25 bp, Saccharomyces pastorianus
gcacagtccatttctctcaaatgct

SEQ ID NO: 38074 - DNA, 25 bp, Saccharomyces pastorianus
tcatctgctcccgttgattagaatt

SEQ ID NO: 38075 - DNA, 25 bp, Saccharomyces pastorianus
tcaaatgcttcctctgctattacag

SEQ ID NO: 38076 - DNA, 25 bp, Saccharomyces pastorianus
gaaaatggtagcctctactgtgact

SEQ ID NO: 38077 - DNA, 25 bp, Saccharomyces pastorianus
gtcagatcttccagatgctgttcaa

SEQ ID NO: 38078 - DNA, 25 bp, Saccharomyces pastorianus
agtcccttctgctgtggtaacattg

SEQ ID NO: 38079 - DNA, 25 bp, Saccharomyces pastorianus
attacagcaggtgccatctcaactg

SEQ ID NO: 38080 - DNA, 25 bp, Saccharomyces pastorianus
ttatgctggtttagtacctgccctt

SEQ ID NO: 38081 - DNA, 25 bp, Saccharomyces pastorianus
aatgtggccatacaatttcctttat

SEQ ID NO: 38082 - DNA, 25 bp, Saccharomyces pastorianus
tattccgggtttgctactaatttag

SEQ ID NO: 38083 - DNA, 25 bp, Saccharomyces pastorianus
ggagaatactcaacccactataagg

SEQ ID NO: 38084 - DNA, 25 bp, Saccharomyces pastorianus
atcgaaatcgatgccgaccagcagg

SEQ ID NO: 38085 - DNA, 25 bp, Saccharomyces pastorianus
atacgtgatcttacctgatccgaaa

SEQ ID NO: 38086 - DNA, 25 bp, Saccharomyces pastorianus
gaacgactcacggtcgactaatcga

SEQ ID NO: 38087 - DNA, 25 bp, Saccharomyces pastorianus
gcgcgattggcgattacgtcaagaa

SEQ ID NO: 38088 - DNA, 25 bp, Saccharomyces pastorianus
tggagggaccttttgtaagcacgaa

SEQ ID NO: 38089 - DNA, 25 bp, Saccharomyces pastorianus
acagaaagtgtattccggcgcgatt

SEQ ID NO: 38090 - DNA, 25 bp, Saccharomyces pastorianus
gccatccttacgcactacagaaagt

SEQ ID NO: 38091 - DNA, 25 bp, Saccharomyces pastorianus
aaatagcccatatgtccactgatga

SEQ ID NO: 38092 - DNA, 25 bp, Saccharomyces pastorianus
ggttaggattcttagcttcaggcca

SEQ ID NO: 38093 - DNA, 25 bp, Saccharomyces pastorianus
gatatgttccggacaaatagcccat

SEQ ID NO: 38094 - DNA, 25 bp, Saccharomyces pastorianus
cacgtataaacgctgtcaacactgt

SEQ ID NO: 38095 - DNA, 25 bp, Saccharomyces pastorianus
ggttcttgagcgataagacccctaa

SEQ ID NO: 38096 - DNA, 25 bp, Saccharomyces pastorianus
aacggcgacagaccaaacttcggca

SEQ ID NO: 38097 - DNA, 25 bp, Saccharomyces pastorianus
aacactccgcaaaggccaagatctt

SEQ ID NO: 38098 - DNA, 25 bp, Saccharomyces pastorianus
caaggaacacatccggcccaggaag

SEQ ID NO: 38099 - DNA, 25 bp, Saccharomyces pastorianus
gatgctgcggtgacaatagattcca

SEQ ID NO: 38100 - DNA, 25 bp, Saccharomyces pastorianus
aaagcacgggaagctacccataccg

SEQ ID NO: 38101 - DNA, 25 bp, Saccharomyces pastorianus
tactgtcaacatcgacgggttcttg

SEQ ID NO: 38102 - DNA, 25 bp, Saccharomyces pastorianus
aggaagcctcaggtagccgttccgc

SEQ ID NO: 38103 - DNA, 25 bp, Saccharomyces pastorianus
gccgaggcgacgatggttactgtca

SEQ ID NO: 38104 - DNA, 25 bp, Saccharomyces pastorianus
gaaaagctcgccttcgaccaaggaa

SEQ ID NO: 38105 - DNA, 25 bp, Saccharomyces pastorianus
aaacttcggcaacgctatcaagcag

SEQ ID NO: 38106 - DNA, 25 bp, Saccharomyces pastorianus
gttagccataccaaaccaatctgtt

SEQ ID NO: 38107 - DNA, 25 bp, Saccharomyces pastorianus
gaattgctgcgtccaaatgcaggca

SEQ ID NO: 38108 - DNA, 25 bp, Saccharomyces pastorianus
gactactgctagctctcagtttgta

SEQ ID NO: 38109 - DNA, 25 bp, Saccharomyces pastorianus
gaattcctgcggtcggtgataacac

SEQ ID NO: 38110 - DNA, 25 bp, Saccharomyces pastorianus
aaacgacggtacaagcggtgcagct

SEQ ID NO: 38111 - DNA, 25 bp, Saccharomyces pastorianus
ggccttagcgtctgtgactactgct

SEQ ID NO: 38112 - DNA, 25 bp, Saccharomyces pastorianus
tgtacatgagccttttctgcggaaa

SEQ ID NO: 38113 - DNA, 25 bp, Saccharomyces pastorianus
tgtgcgctacccattaataccaaag

SEQ ID NO: 38114 - DNA, 25 bp, Saccharomyces pastorianus
ggtgacgttgaaactactgccaaag

SEQ ID NO: 38115 - DNA, 25 bp, Saccharomyces pastorianus
caatctgtttcatcaccggccttag

SEQ ID NO: 38116 - DNA, 25 bp, Saccharomyces pastorianus
actagcgatggttgtgtgtctttga

SEQ ID NO: 38117 - DNA, 25 bp, Saccharomyces pastorianus
ggtcgttgatttgatctctacttca

SEQ ID NO: 38118 - DNA, 25 bp, Saccharomyces pastorianus
taggtgggcggacatctactccaag

SEQ ID NO: 38119 - DNA, 25 bp, Saccharomyces pastorianus
gaaatgatctcccaaggtgccaatg

SEQ ID NO: 38120 - DNA, 25 bp, Saccharomyces pastorianus
gaacttatcttcatccttctacgaa

SEQ ID NO: 38121 - DNA, 25 bp, Saccharomyces pastorianus
tcatgtttccatggctttacccatc

SEQ ID NO: 38122 - DNA, 25 bp, Saccharomyces pastorianus
catgttcaccactctggcagaagaa

SEQ ID NO: 38123 - DNA, 25 bp, Saccharomyces pastorianus
gaaattatccattgtctcattagtt

SEQ ID NO: 38124 - DNA, 25 bp, Saccharomyces pastorianus
gacgcagactcactaaagtccttga

SEQ ID NO: 38125 - DNA, 25 bp, Saccharomyces pastorianus
aagccaattcgaacacgccgttgat

SEQ ID NO: 38126 - DNA, 25 bp, Saccharomyces pastorianus
atcttcgtcattaacatccactcta

SEQ ID NO: 38127 - DNA, 25 bp, Saccharomyces pastorianus
ttatctcatgggttcttagctcaaa

SEQ ID NO: 38128 - DNA, 25 bp, Saccharomyces pastorianus
tttccatttcattatcgacgacgcc

SEQ ID NO: 38129 - DNA, 25 bp, Saccharomyces pastorianus
taagaatttccccattttgagcaac

SEQ ID NO: 38130 - DNA, 25 bp, Saccharomyces pastorianus
gacgccagcaaacttgatcctcggg

SEQ ID NO: 38131 - DNA, 25 bp, Saccharomyces pastorianus
gagacagcaactttctttttagtac

SEQ ID NO: 38132 - DNA, 25 bp, Saccharomyces pastorianus
attttgtatccactattccacacgc

SEQ ID NO: 38133 - DNA, 25 bp, Saccharomyces pastorianus
tgccgggcaccgatatggacatttt

SEQ ID NO: 38134 - DNA, 25 bp, Saccharomyces pastorianus
gagatggaatcttgccgggcaccga

SEQ ID NO: 38135 - DNA, 25 bp, Saccharomyces pastorianus
tagcattgacgaattccagaaccgg

SEQ ID NO: 38136 - DNA, 25 bp, Saccharomyces pastorianus
agggtaataacaccggctgtacaag

SEQ ID NO: 38137 - DNA, 25 bp, Saccharomyces pastorianus
actaccacgttgtcgggctctatag

SEQ ID NO: 38138 - DNA, 25 bp, Saccharomyces pastorianus
gggattcgactaactaccacgttgt

SEQ ID NO: 38139 - DNA, 25 bp, Saccharomyces pastorianus
ggcactgcaccaatagatcctacaa

SEQ ID NO: 38140 - DNA, 25 bp, Saccharomyces pastorianus
aataacggcagtgacagtggtcgga

SEQ ID NO: 38141 - DNA, 25 bp, Saccharomyces pastorianus
ggccatgcaaccgttaagtggagaa

SEQ ID NO: 38142 - DNA, 25 bp, Saccharomyces pastorianus
gtcggagtgcattatgttcaagaaa

SEQ ID NO: 38143 - DNA, 25 bp, Saccharomyces pastorianus
gagaaacctaaatggcactgcacca

SEQ ID NO: 38144 - DNA, 25 bp, Saccharomyces pastorianus
cagtggtcggagtgcattatgttca

SEQ ID NO: 38145 - DNA, 25 bp, Saccharomyces pastorianus
gcaaaataacctttacagtatcctg

SEQ ID NO: 38146 - DNA, 25 bp, Saccharomyces pastorianus
agtagagccagcaaaataaccttta

SEQ ID NO: 38147 - DNA, 25 bp, Saccharomyces pastorianus
tacagtatcctgtctaataacggca

SEQ ID NO: 38148 - DNA, 25 bp, Saccharomyces pastorianus
gagctgcggaaaaaatatgaggcca

SEQ ID NO: 38149 - DNA, 25 bp, Saccharomyces pastorianus
atatgaggccatgcaaccgttaagt

SEQ ID NO: 38150 - DNA, 25 bp, Saccharomyces pastorianus
atggccctcaaaatggctcacctaa

SEQ ID NO: 38151 - DNA, 25 bp, Saccharomyces pastorianus
ggagtccttagaacatgcccaaaga

SEQ ID NO: 38152 - DNA, 25 bp, Saccharomyces pastorianus
gtttacaatttgttccctgagggat

SEQ ID NO: 38153 - DNA, 25 bp, Saccharomyces pastorianus
agaccatttgacacagaacgctctg

SEQ ID NO: 38154 - DNA, 25 bp, Saccharomyces pastorianus
tagtgatgcctgtcatatcacctcc

SEQ ID NO: 38155 - DNA, 25 bp, Saccharomyces pastorianus
aagcagaatgcctggccattacgtc

SEQ ID NO: 38156 - DNA, 25 bp, Saccharomyces pastorianus
aacgctctgggttcgtgcttggtga

SEQ ID NO: 38157 - DNA, 25 bp, Saccharomyces pastorianus
gttgattacgtcaatgctcacgcca

SEQ ID NO: 38158 - DNA, 25 bp, Saccharomyces pastorianus
aaggatgcggcatgctcgtcatgga

SEQ ID NO: 38159 - DNA, 25 bp, Saccharomyces pastorianus
attacgtctgcacttttgccaggaa

SEQ ID NO: 38160 - DNA, 25 bp, Saccharomyces pastorianus
gctcacgccacatcaactttattag

SEQ ID NO: 38161 - DNA, 25 bp, Saccharomyces pastorianus
gcgtggctcgctaaaggatcgtgct

SEQ ID NO: 38162 - DNA, 25 bp, Saccharomyces pastorianus
ggctaatcatagtaccattgttcaa

SEQ ID NO: 38163 - DNA, 25 bp, Saccharomyces pastorianus
gcacccaatcgctggtactgttaag

SEQ ID NO: 38164 - DNA, 25 bp, Saccharomyces pastorianus
gatgatgctttagccgaccagttgc

SEQ ID NO: 38165 - DNA, 25 bp, Saccharomyces pastorianus
tgtgtatgcaggtgccgtcggccac

SEQ ID NO: 38166 - DNA, 25 bp, Saccharomyces pastorianus
ggtggtattgtttatgactccgatg

SEQ ID NO: 38167 - DNA, 25 bp, Saccharomyces pastorianus
gtcggccactggtcatatgacggta

SEQ ID NO: 38168 - DNA, 25 bp, Saccharomyces pastorianus
aagtgagcggtactttgcgccccga

SEQ ID NO: 38169 - DNA, 25 bp, Saccharomyces pastorianus
gtactgttaagcgtggtgctaccac

SEQ ID NO: 38170 - DNA, 25 bp, Saccharomyces pastorianus
aaggatggcattgcctacctgcaag

SEQ ID NO: 38171 - DNA, 25 bp, Saccharomyces pastorianus
gacaactgtattgctctacggacca

SEQ ID NO: 38172 - DNA, 25 bp, Saccharomyces pastorianus
gctaatctcttagaaactgccggtt

SEQ ID NO: 38173 - DNA, 25 bp, Saccharomyces pastorianus
aagagttgcctctattgcggataaa

SEQ ID NO: 38174 - DNA, 25 bp, Saccharomyces pastorianus
gtccgacgatcgcagaagccattag

SEQ ID NO: 38175 - DNA, 25 bp, Saccharomyces pastorianus
tgtttgtaccaacacagtgcctgtt

SEQ ID NO: 38176 - DNA, 25 bp, Saccharomyces pastorianus
gcacccattactgcaaagctgattg

SEQ ID NO: 38177 - DNA, 25 bp, Saccharomyces pastorianus
accaagttgatatcagtccgacgat

SEQ ID NO: 38178 - DNA, 25 bp, Saccharomyces pastorianus
aaactgccggttgcgatcatcttat

SEQ ID NO: 38179 - DNA, 25 bp, Saccharomyces pastorianus
aagaatgccatactggtttcgccag

SEQ ID NO: 38180 - DNA, 25 bp, Saccharomyces pastorianus
acacggtatattttctggttcagca

SEQ ID NO: 38181 - DNA, 25 bp, Saccharomyces pastorianus
atcatcttatcactatggacctcca

SEQ ID NO: 38182 - DNA, 25 bp, Saccharomyces pastorianus
atgttgccggaaaatcgtgtttact

SEQ ID NO: 38183 - DNA, 25 bp, Saccharomyces pastorianus
atacgtgtattctgcaattgatgaa

SEQ ID NO: 38184 - DNA, 25 bp, Saccharomyces pastorianus
caccatggcctttgcagtaccaaaa

SEQ ID NO: 38185 - DNA, 25 bp, Saccharomyces pastorianus
aaagaaaaccttcggctcagctgtt

SEQ ID NO: 38186 - DNA, 25 bp, Saccharomyces pastorianus
atgaggttgcgtttaatgacttcca

SEQ ID NO: 38187 - DNA, 25 bp, Saccharomyces pastorianus
ggctcatttaactcttccccaagta

SEQ ID NO: 38188 - DNA, 25 bp, Saccharomyces pastorianus
tctgaaaaccccttcggctcattta

SEQ ID NO: 38189 - DNA, 25 bp, Saccharomyces pastorianus
acagcaattacttatacccgctatt

SEQ ID NO: 38190 - DNA, 25 bp, Saccharomyces pastorianus
gaactcaataacattgcctgccacc

SEQ ID NO: 38191 - DNA, 25 bp, Saccharomyces pastorianus
atattcacgactctggtttctgttc

SEQ ID NO: 38192 - DNA, 25 bp, Saccharomyces pastorianus
tacccgctatttctgaatcttccaa

SEQ ID NO: 38193 - DNA, 25 bp, Saccharomyces pastorianus
aatgacttccaattggacgccaaaa

SEQ ID NO: 38194 - DNA, 25 bp, Saccharomyces pastorianus
gatcggccatttgagggacggttta

SEQ ID NO: 38195 - DNA, 25 bp, Saccharomyces pastorianus
atggtcccttcaagccggtgaaaag

SEQ ID NO: 38196 - DNA, 25 bp, Saccharomyces pastorianus
gacgtggctgcatttgacttagatt

SEQ ID NO: 38197 - DNA, 25 bp, Saccharomyces pastorianus
cttccgttggccgatttatttgacg

SEQ ID NO: 38198 - DNA, 25 bp, Saccharomyces pastorianus
tctggccttgctattgtgacactca

SEQ ID NO: 38199 - DNA, 25 bp, Saccharomyces pastorianus
ggacattccacgtatactgagcgat

SEQ ID NO: 38200 - DNA, 25 bp, Saccharomyces pastorianus
gtgacactcatttacatggtccctt

SEQ ID NO: 38201 - DNA, 25 bp, Saccharomyces pastorianus
gatctttatggcactgacgatttaa

SEQ ID NO: 38202 - DNA, 25 bp, Saccharomyces pastorianus
aacatgggcccctgaaattgcgcag

SEQ ID NO: 38203 - DNA, 25 bp, Saccharomyces pastorianus
gacttagattataccgtctggcctt

SEQ ID NO: 38204 - DNA, 25 bp, Saccharomyces pastorianus
aagtacaatggctccttacttccgt

SEQ ID NO: 38205 - DNA, 25 bp, Saccharomyces pastorianus
actgctgccacctataaaaccggaa

SEQ ID NO: 38206 - DNA, 25 bp, Saccharomyces pastorianus
gcaagccacaccagtaatagcgggt

SEQ ID NO: 38207 - DNA, 25 bp, Saccharomyces pastorianus
ataccaataacaacactgctgccac

SEQ ID NO: 38208 - DNA, 25 bp, Saccharomyces pastorianus
gttaagggacgtgttcgacagaata

SEQ ID NO: 38209 - DNA, 25 bp, Saccharomyces pastorianus
tgcagcaaatcatccggccagtagc

SEQ ID NO: 38210 - DNA, 25 bp, Saccharomyces pastorianus
gagttcttcatagcgctgttggtga

SEQ ID NO: 38211 - DNA, 25 bp, Saccharomyces pastorianus
tggacgccggagaagctgcagcaaa

SEQ ID NO: 38212 - DNA, 25 bp, Saccharomyces pastorianus
ataggcaaggtgtcgcaagccacac

SEQ ID NO: 38213 - DNA, 25 bp, Saccharomyces pastorianus
acatgaggtgtcactggacgccgga

SEQ ID NO: 38214 - DNA, 25 bp, Saccharomyces pastorianus
gaataaccgccgacatattgaagaa

SEQ ID NO: 38215 - DNA, 25 bp, Saccharomyces pastorianus
cgggtaggtcgctagagttcttcat

SEQ ID NO: 38216 - DNA, 25 bp, Saccharomyces pastorianus
attaccgcgtttcacttatgacagt

SEQ ID NO: 38217 - DNA, 25 bp, Saccharomyces pastorianus
aatttcagcagacccaggcgttcga

SEQ ID NO: 38218 - DNA, 25 bp, Saccharomyces pastorianus
gcgtcgtgacagaagagatcccaat

SEQ ID NO: 38219 - DNA, 25 bp, Saccharomyces pastorianus
aaggctgctgcacatatctacggaa

SEQ ID NO: 38220 - DNA, 25 bp, Saccharomyces pastorianus
gtgttgttttgcttattaccgcgtt

SEQ ID NO: 38221 - DNA, 25 bp, Saccharomyces pastorianus
gatcccaatgacgttcatgcacgaa

SEQ ID NO: 38222 - DNA, 25 bp, Saccharomyces pastorianus
aagaagcctggatatcctcgccaag

SEQ ID NO: 38223 - DNA, 25 bp, Saccharomyces pastorianus
aaacgagaccccaagcggatatcag

SEQ ID NO: 38224 - DNA, 25 bp, Saccharomyces pastorianus
gaactccatctttctgggctgtttt

SEQ ID NO: 38225 - DNA, 25 bp, Saccharomyces pastorianus
atttcgaccactatccggttggcta

SEQ ID NO: 38226 - DNA, 25 bp, Saccharomyces pastorianus
aagttaggtcgtcgctagaccgcac

SEQ ID NO: 38227 - DNA, 25 bp, Saccharomyces pastorianus
taagggcccttgattacgatactat

SEQ ID NO: 38228 - DNA, 25 bp, Saccharomyces pastorianus
aattgcttccactcacgctaaaagt

SEQ ID NO: 38229 - DNA, 25 bp, Saccharomyces pastorianus
taaaggagcctgaatcccacttcga

SEQ ID NO: 38230 - DNA, 25 bp, Saccharomyces pastorianus
gactgcgcctattcctttggagaaa

SEQ ID NO: 38231 - DNA, 25 bp, Saccharomyces pastorianus
acttctagttgggttatgccttgta

SEQ ID NO: 38232 - DNA, 25 bp, Saccharomyces pastorianus
gaaacatgatttccctatggactgt

SEQ ID NO: 38233 - DNA, 25 bp, Saccharomyces pastorianus
gatggccataaaccacttctagttg

SEQ ID NO: 38234 - DNA, 25 bp, Saccharomyces pastorianus
aagatgcacacatacttccgaatcc

SEQ ID NO: 38235 - DNA, 25 bp, Saccharomyces pastorianus
ccacggtgctgggtactatgatgat

SEQ ID NO: 38236 - DNA, 25 bp, Saccharomyces pastorianus
gaagccaccgatttggatcttgttt

SEQ ID NO: 38237 - DNA, 25 bp, Saccharomyces pastorianus
gtacggtcattaattgcttccactc

SEQ ID NO: 38238 - DNA, 25 bp, Saccharomyces pastorianus
gagctttatcccaaactgtactgat

SEQ ID NO: 38239 - DNA, 25 bp, Saccharomyces pastorianus
gatgcaatgcacttgtcatacctgg

SEQ ID NO: 38240 - DNA, 25 bp, Saccharomyces pastorianus
acaacatccttgtcacatcatttca

SEQ ID NO: 38241 - DNA, 25 bp, Saccharomyces pastorianus
gcgcgggtttgatttttctttcaca

SEQ ID NO: 38242 - DNA, 25 bp, Saccharomyces pastorianus
ggtccaagtcctctgtaagctagaa

SEQ ID NO: 38243 - DNA, 25 bp, Saccharomyces pastorianus
gaaaccgatatacgttttcacgatt

SEQ ID NO: 38244 - DNA, 25 bp, Saccharomyces pastorianus
gtcatacctggtggagaatctacta

SEQ ID NO: 38245 - DNA, 25 bp, Saccharomyces pastorianus
aatgatctctacaacttcgtacatg

SEQ ID NO: 38246 - DNA, 25 bp, Saccharomyces pastorianus
tactacgatgtctcttattgctcag

SEQ ID NO: 38247 - DNA, 25 bp, Saccharomyces pastorianus
acgtatgacttctcgagctttatcc

SEQ ID NO: 38248 - DNA, 25 bp, Saccharomyces pastorianus
aactatctgtgattaccgtgaggga

SEQ ID NO: 38249 - DNA, 25 bp, Saccharomyces pastorianus
gagctttatcccaaactgtactgat

SEQ ID NO: 38250 - DNA, 25 bp, Saccharomyces pastorianus
gatgcaatgcacttgtcatacctgg

SEQ ID NO: 38251 - DNA, 25 bp, Saccharomyces pastorianus
acaacatccttgtcacatcatttca

SEQ ID NO: 38252 - DNA, 25 bp, Saccharomyces pastorianus
gcgcgggtttgatttttctttcaca

SEQ ID NO: 38253 - DNA, 25 bp, Saccharomyces pastorianus
ggtccaagtcctctgtaagctagaa

SEQ ID NO: 38254 - DNA, 25 bp, Saccharomyces pastorianus
gaaaccgatatacgttttcacgatt

SEQ ID NO: 38255 - DNA, 25 bp, Saccharomyces pastorianus
gtcatacctggtggagaatctacta

SEQ ID NO: 38256 - DNA, 25 bp, Saccharomyces pastorianus
aatgatctctacaacttcgtacatg

SEQ ID NO: 38257 - DNA, 25 bp, Saccharomyces pastorianus
tactacgatgtctcttattgctcag

SEQ ID NO: 38258 - DNA, 25 bp, Saccharomyces pastorianus
acgtatgacttctcgagctttatcc

SEQ ID NO: 38259 - DNA, 25 bp, Saccharomyces pastorianus
aactatctgtgattaccgtgaggga

SEQ ID NO: 38260 - DNA, 25 bp, Saccharomyces pastorianus
gtggaccggttccagctggattaaa

SEQ ID NO: 38261 - DNA, 25 bp, Saccharomyces pastorianus
cggaaacgtggctgttcttatactt

SEQ ID NO: 38262 - DNA, 25 bp, Saccharomyces pastorianus
gattgcgatcattctgctactgttg

SEQ ID NO: 38263 - DNA, 25 bp, Saccharomyces pastorianus
ggacagacccagagacgtattacga

SEQ ID NO: 38264 - DNA, 25 bp, Saccharomyces pastorianus
gaatctgttttacttgcgctcaatt

SEQ ID NO: 38265 - DNA, 25 bp, Saccharomyces pastorianus
ataacctgtttgctacgggtgtcct

SEQ ID NO: 38266 - DNA, 25 bp, Saccharomyces pastorianus
tttcctgcgggacctaaatcaacga

SEQ ID NO: 38267 - DNA, 25 bp, Saccharomyces pastorianus
agtggcggcagtttctcgaccaaga

SEQ ID NO: 38268 - DNA, 25 bp, Saccharomyces pastorianus
gccagtggaggcagacgtcgaacaa

SEQ ID NO: 38269 - DNA, 25 bp, Saccharomyces pastorianus
tagctgtcgcagagcctcaaggtat

SEQ ID NO: 38270 - DNA, 25 bp, Saccharomyces pastorianus
aaccaagaggagttatcgccgccac

SEQ ID NO: 38271 - DNA, 25 bp, Saccharomyces pastorianus
ccaccagcggtgtaagttttgattt

SEQ ID NO: 38272 - DNA, 25 bp, Saccharomyces pastorianus
gttaattcgacgacaccaattgtgt

SEQ ID NO: 38273 - DNA, 25 bp, Saccharomyces pastorianus
tttcaaggcagcgagttctatcaaa

SEQ ID NO: 38274 - DNA, 25 bp, Saccharomyces pastorianus
tattccgatccataggtaccgtgtt

SEQ ID NO: 38275 - DNA, 25 bp, Saccharomyces pastorianus
gtggccgtaaaagctccagtacttc

SEQ ID NO: 38276 - DNA, 25 bp, Saccharomyces pastorianus
agcttggtgcaatcgacattgttca

SEQ ID NO: 38277 - DNA, 25 bp, Saccharomyces pastorianus
aaatctgggttgtactgtcgttagc

SEQ ID NO: 38278 - DNA, 25 bp, Saccharomyces pastorianus
ttgtctgtgaacctattccgatcca

SEQ ID NO: 38279 - DNA, 25 bp, Saccharomyces pastorianus
gtaccgtgttgctaaagacctagaa

SEQ ID NO: 38280 - DNA, 25 bp, Saccharomyces pastorianus
attatctcccgctaacactacaata

SEQ ID NO: 38281 - DNA, 25 bp, Saccharomyces pastorianus
gacagccttaaaactcccaaagctt

SEQ ID NO: 38282 - DNA, 25 bp, Saccharomyces pastorianus
atgtataccctacacggtcatacgg

SEQ ID NO: 38283 - DNA, 25 bp, Saccharomyces pastorianus
ggaaacgatgtatctctgcgagtat

SEQ ID NO: 38284 - DNA, 25 bp, Saccharomyces pastorianus
cttggagtccatttctacttctcta

SEQ ID NO: 38285 - DNA, 25 bp, Saccharomyces pastorianus
tctcctatcatcacaccaatttaag

SEQ ID NO: 38286 - DNA, 25 bp, Saccharomyces pastorianus
atctctgcgagtatggattccacca

SEQ ID NO: 38287 - DNA, 25 bp, Saccharomyces pastorianus
gttagcaatccagcaaactcctctt

SEQ ID NO: 38288 - DNA, 25 bp, Saccharomyces pastorianus
aacggagaatgctcgtacgcgacaa

SEQ ID NO: 38289 - DNA, 25 bp, Saccharomyces pastorianus
taagcgcgattacaacgttctacgt

SEQ ID NO: 38290 - DNA, 25 bp, Saccharomyces pastorianus
gggaaactggttcattcaaacatct

SEQ ID NO: 38291 - DNA, 25 bp, Saccharomyces pastorianus
tcttcatcatccttggagtccattt

SEQ ID NO: 38292 - DNA, 25 bp, Saccharomyces pastorianus
catgcgccaagattctgggtgccat

SEQ ID NO: 38293 - DNA, 25 bp, Saccharomyces pastorianus
gctttaacactattctgcgctttat

SEQ ID NO: 38294 - DNA, 25 bp, Saccharomyces pastorianus
ctgggcctgtcaacgtggaagcaaa

SEQ ID NO: 38295 - DNA, 25 bp, Saccharomyces pastorianus
ggctgaatacccgaatttggctaat

SEQ ID NO: 38296 - DNA, 25 bp, Saccharomyces pastorianus
atttattgaagaacgctgggcctgt

SEQ ID NO: 38297 - DNA, 25 bp, Saccharomyces pastorianus
aatgcagcaaggtctcgcgaagaat

SEQ ID NO: 38298 - DNA, 25 bp, Saccharomyces pastorianus
gcgctttatggtcatattctgtcta

SEQ ID NO: 38299 - DNA, 25 bp, Saccharomyces pastorianus
gaagaccaaaggctaccttcctaag

SEQ ID NO: 38300 - DNA, 25 bp, Saccharomyces pastorianus
ggcatacgtttattttgctttaaca

SEQ ID NO: 38301 - DNA, 25 bp, Saccharomyces pastorianus
gtgggcaacatttggatgcacccct

SEQ ID NO: 38302 - DNA, 25 bp, Saccharomyces pastorianus
ggaaattgaattgccacctggtgtg

SEQ ID NO: 38303 - DNA, 25 bp, Saccharomyces pastorianus
tccagtcttggttgcgatcgtttta

SEQ ID NO: 38304 - DNA, 25 bp, Saccharomyces pastorianus
gacatcatcgaattttggctttgaa

SEQ ID NO: 38305 - DNA, 25 bp, Saccharomyces pastorianus
aaaccggcagtttctcatcttcata

SEQ ID NO: 38306 - DNA, 25 bp, Saccharomyces pastorianus
aattttagacgagcttggacgaggc

SEQ ID NO: 38307 - DNA, 25 bp, Saccharomyces pastorianus
ctgagcatttgcttcgaacgggagc

SEQ ID NO: 38308 - DNA, 25 bp, Saccharomyces pastorianus
gttgccgatggattttgtgtgtctt

SEQ ID NO: 38309 - DNA, 25 bp, Saccharomyces pastorianus
gtgtgtctttagctgttactgagca

SEQ ID NO: 38310 - DNA, 25 bp, Saccharomyces pastorianus
atcatctgacccagaagtctgtcca

SEQ ID NO: 38311 - DNA, 25 bp, Saccharomyces pastorianus
tcctttctactcacttccaagatat

SEQ ID NO: 38312 - DNA, 25 bp, Saccharomyces pastorianus
gggagcaacggtattcctttctact

SEQ ID NO: 38313 - DNA, 25 bp, Saccharomyces pastorianus
tggacgaggctcaagtgttgccgat

SEQ ID NO: 38314 - DNA, 25 bp, Saccharomyces pastorianus
ggaaatggcttacttcttagacgac

SEQ ID NO: 38315 - DNA, 25 bp, Saccharomyces pastorianus
ctctcgctagactttacggtgctaa

SEQ ID NO: 38316 - DNA, 25 bp, Saccharomyces pastorianus
agaagaaatcttccgttgcacgggt

SEQ ID NO: 38317 - DNA, 25 bp, Saccharomyces pastorianus
gaaaagaacaatctctcgctagact

SEQ ID NO: 38318 - DNA, 25 bp, Saccharomyces pastorianus
ttagctaatgttcctcagcttaccg

SEQ ID NO: 38319 - DNA, 25 bp, Saccharomyces pastorianus
gttgaaaagcgaagctggccccagt

SEQ ID NO: 38320 - DNA, 25 bp, Saccharomyces pastorianus
gtgtttcaagactcacaagccagaa

SEQ ID NO: 38321 - DNA, 25 bp, Saccharomyces pastorianus
gctggccccagtgaagataaaccta

SEQ ID NO: 38322 - DNA, 25 bp, Saccharomyces pastorianus
gaaaaatctgctcagcgcaagccta

SEQ ID NO: 38323 - DNA, 25 bp, Saccharomyces pastorianus
ttgccgatgatgacagtttgacttt

SEQ ID NO: 38324 - DNA, 25 bp, Saccharomyces pastorianus
taaacagagctatcgttccaggtgt

SEQ ID NO: 38325 - DNA, 25 bp, Saccharomyces pastorianus
agaggttgcccctgaagtgtttcaa

SEQ ID NO: 38326 - DNA, 25 bp, Saccharomyces pastorianus
aagacgatggacctgctacgaccaa

SEQ ID NO: 38327 - DNA, 25 bp, Saccharomyces pastorianus
aattcagcgatatcagagacccttc

SEQ ID NO: 38328 - DNA, 25 bp, Saccharomyces pastorianus
taagttgccatctacagacgggaac

SEQ ID NO: 38329 - DNA, 25 bp, Saccharomyces pastorianus
gaattttcgccctttaaggatggca

SEQ ID NO: 38330 - DNA, 25 bp, Saccharomyces pastorianus
gagacccttccgctaacaacatttt

SEQ ID NO: 38331 - DNA, 25 bp, Saccharomyces pastorianus
gatccatacggttattaagttgcca

SEQ ID NO: 38332 - DNA, 25 bp, Saccharomyces pastorianus
gctgaactactgtttctaggcgaaa

SEQ ID NO: 38333 - DNA, 25 bp, Saccharomyces pastorianus
tcgaccatagtagtgaacatcctgt

SEQ ID NO: 38334 - DNA, 25 bp, Saccharomyces pastorianus
ttccacaaataaacatctcccaact

SEQ ID NO: 38335 - DNA, 25 bp, Saccharomyces pastorianus
cgggaacacgtctgatggcgatgaa

SEQ ID NO: 38336 - DNA, 25 bp, Saccharomyces pastorianus
gttttgaccttgaccttaccagaat

SEQ ID NO: 38337 - DNA, 25 bp, Saccharomyces pastorianus
gacgttgccgatatgcttacaccag

SEQ ID NO: 38338 - DNA, 25 bp, Saccharomyces pastorianus
ccaagattcttaaccgtccaatacg

SEQ ID NO: 38339 - DNA, 25 bp, Saccharomyces pastorianus
gagacgcaagtagctcttagcgaaa

SEQ ID NO: 38340 - DNA, 25 bp, Saccharomyces pastorianus
atccaagattttgcgtaaggttgtt

SEQ ID NO: 38341 - DNA, 25 bp, Saccharomyces pastorianus
gggtgagaacccatcgtgtgtttat

SEQ ID NO: 38342 - DNA, 25 bp, Saccharomyces pastorianus
tgacccatcatcgtccagcgaaaat

SEQ ID NO: 38343 - DNA, 25 bp, Saccharomyces pastorianus
aattgaatcactagctggtggtggt

SEQ ID NO: 38344 - DNA, 25 bp, Saccharomyces pastorianus
ctggcgccaattccacttatagtgt

SEQ ID NO: 38345 - DNA, 25 bp, Saccharomyces pastorianus
atgcttacaccagaatatgcgcaag

SEQ ID NO: 38346 - DNA, 25 bp, Saccharomyces pastorianus
ttcccatttcaattggacgttgccg

SEQ ID NO: 38347 - DNA, 25 bp, Saccharomyces pastorianus
gacgataaagttaccactgttgaaa

SEQ ID NO: 38348 - DNA, 25 bp, Saccharomyces pastorianus
aacgcataatttattgcctggcctg

SEQ ID NO: 38349 - DNA, 25 bp, Saccharomyces pastorianus
gttccacgccttcattacattcaat

SEQ ID NO: 38350 - DNA, 25 bp, Saccharomyces pastorianus
agaggccaaccgctgcagaactgtt

SEQ ID NO: 38351 - DNA, 25 bp, Saccharomyces pastorianus
gaaagcgattctgatttcgacgaga

SEQ ID NO: 38352 - DNA, 25 bp, Saccharomyces pastorianus
catggatttccttgacgagtgtaca

SEQ ID NO: 38353 - DNA, 25 bp, Saccharomyces pastorianus
gaaagctcttgatttagatcccaca

SEQ ID NO: 38354 - DNA, 25 bp, Saccharomyces pastorianus
gtggctattctgcattcaaagctga

SEQ ID NO: 38355 - DNA, 25 bp, Saccharomyces pastorianus
aagacccatggattgtttgtacaga

SEQ ID NO: 38356 - DNA, 25 bp, Saccharomyces pastorianus
gaagcttttgcacaactagtcaata

SEQ ID NO: 38357 - DNA, 25 bp, Saccharomyces pastorianus
agtgacatttcatcggccttattgg

SEQ ID NO: 38358 - DNA, 25 bp, Saccharomyces pastorianus
gctcgccaaaaattccgtaactctg

SEQ ID NO: 38359 - DNA, 25 bp, Saccharomyces pastorianus
ggactaccgctacctagcgctcgga

SEQ ID NO: 38360 - DNA, 25 bp, Saccharomyces pastorianus
gaagatcgtgttctttgacggtgaa

SEQ ID NO: 38361 - DNA, 25 bp, Saccharomyces pastorianus
tgggccccgtagtgacgggctctac

SEQ ID NO: 38362 - DNA, 25 bp, Saccharomyces pastorianus
gttcccgagcacatggcacaccgtg

SEQ ID NO: 38363 - DNA, 25 bp, Saccharomyces pastorianus
aggacgacctgctgttccggcgcag

SEQ ID NO: 38364 - DNA, 25 bp, Saccharomyces pastorianus
aggagtaccagctgctcaaccggat

SEQ ID NO: 38365 - DNA, 25 bp, Saccharomyces pastorianus
gcctgctgctgctgatggacctgct

SEQ ID NO: 38366 - DNA, 25 bp, Saccharomyces pastorianus
tacgagcgcgccacagagcaggcga

SEQ ID NO: 38367 - DNA, 25 bp, Saccharomyces pastorianus
aaccggatcgaggacgacctgctgt

SEQ ID NO: 38368 - DNA, 25 bp, Saccharomyces pastorianus
tacgctgggcgtgaagatcgtgttc

SEQ ID NO: 38369 - DNA, 25 bp, Saccharomyces pastorianus
tcctgacgcatgtggcgcgctacga

SEQ ID NO: 38370 - DNA, 25 bp, Saccharomyces pastorianus
aattgtacgtccaaattcgatcccg

SEQ ID NO: 38371 - DNA, 25 bp, Saccharomyces pastorianus
agaagtctgcacttggagaaccagt

SEQ ID NO: 38372 - DNA, 25 bp, Saccharomyces pastorianus
gagaaccagtacgatcctgagtata

SEQ ID NO: 38373 - DNA, 25 bp, Saccharomyces pastorianus
gcattagattcctttctttctgaaa

SEQ ID NO: 38374 - DNA, 25 bp, Saccharomyces pastorianus
gaacacagcggatgctttattcaag

SEQ ID NO: 38375 - DNA, 25 bp, Saccharomyces pastorianus
gtattttgacagatcgggtcggttt

SEQ ID NO: 38376 - DNA, 25 bp, Saccharomyces pastorianus
ttcaaaaccgatttccagagcataa

SEQ ID NO: 38377 - DNA, 25 bp, Saccharomyces pastorianus
aattgcatctgtccaatgttgagga

SEQ ID NO: 38378 - DNA, 25 bp, Saccharomyces pastorianus
gaacaactggtattcctggattcaa

SEQ ID NO: 38379 - DNA, 25 bp, Saccharomyces pastorianus
gaggaatcgctctttcatgcattag

SEQ ID NO: 38380 - DNA, 25 bp, Saccharomyces pastorianus
ggagagaaaccacttgatcgaacat

SEQ ID NO: 38381 - DNA, 25 bp, Saccharomyces pastorianus
atctgtgttgactccgtcgcagaaa

SEQ ID NO: 38382 - DNA, 25 bp, Saccharomyces pastorianus
gaagctacccaagaggctggcacta

SEQ ID NO: 38383 - DNA, 25 bp, Saccharomyces pastorianus
tcggagttatattttcgctagcaga

SEQ ID NO: 38384 - DNA, 25 bp, Saccharomyces pastorianus
aatccaggatttcgccaattctaat

SEQ ID NO: 38385 - DNA, 25 bp, Saccharomyces pastorianus
aacttgatgattcggccattagacg

SEQ ID NO: 38386 - DNA, 25 bp, Saccharomyces pastorianus
gagaggccgcgaatctttaacgata

SEQ ID NO: 38387 - DNA, 25 bp, Saccharomyces pastorianus
gggaccatatcatcgaattgacact

SEQ ID NO: 38388 - DNA, 25 bp, Saccharomyces pastorianus
ggcactatacggtactctcggatta

SEQ ID NO: 38389 - DNA, 25 bp, Saccharomyces pastorianus
gctagcagagatcttcgttcgctat

SEQ ID NO: 38390 - DNA, 25 bp, Saccharomyces pastorianus
gccattgcacaatcctccaaattat

SEQ ID NO: 38391 - DNA, 25 bp, Saccharomyces pastorianus
ccactatattggatacgcccgaatt

SEQ ID NO: 38392 - DNA, 25 bp, Saccharomyces pastorianus
ttggccttacaattctctccaattg

SEQ ID NO: 38393 - DNA, 25 bp, Saccharomyces pastorianus
aatatgttctgtacagctgtcccac

SEQ ID NO: 38394 - DNA, 25 bp, Saccharomyces pastorianus
accactggcgaattttaccaaatat

SEQ ID NO: 38395 - DNA, 25 bp, Saccharomyces pastorianus
ggctcggtgcgttattgtcaaacaa

SEQ ID NO: 38396 - DNA, 25 bp, Saccharomyces pastorianus
gggaacgtcatctcaaaggaaacca

SEQ ID NO: 38397 - DNA, 25 bp, Saccharomyces pastorianus
gtataagcatcatctggaaagcggc

SEQ ID NO: 38398 - DNA, 25 bp, Saccharomyces pastorianus
tatgcttacttctttggccttacaa

SEQ ID NO: 38399 - DNA, 25 bp, Saccharomyces pastorianus
aaagattggttttggctcggtgcgt

SEQ ID NO: 38400 - DNA, 25 bp, Saccharomyces pastorianus
aaggtaggcacctcttcagtatgct

SEQ ID NO: 38401 - DNA, 25 bp, Saccharomyces pastorianus
atgcgtcaaatatcggtcagctggg

SEQ ID NO: 38402 - DNA, 25 bp, Saccharomyces pastorianus
caacccttttacattttatcctgtg

SEQ ID NO: 38403 - DNA, 25 bp, Saccharomyces pastorianus
gaaaggcttcaccagagccgacata

SEQ ID NO: 38404 - DNA, 25 bp, Saccharomyces pastorianus
agctacgttacattttgactcccaa

SEQ ID NO: 38405 - DNA, 25 bp, Saccharomyces pastorianus
gataccattgatctcggacaagcta

SEQ ID NO: 38406 - DNA, 25 bp, Saccharomyces pastorianus
aattgcatttcctctttcgaatacc

SEQ ID NO: 38407 - DNA, 25 bp, Saccharomyces pastorianus
gcatccactggctcgaattcaaaaa

SEQ ID NO: 38408 - DNA, 25 bp, Saccharomyces pastorianus
attgataagctggttctgctcacgc

SEQ ID NO: 38409 - DNA, 25 bp, Saccharomyces pastorianus
tcgtctcttcctcgcaaaattgcat

SEQ ID NO: 38410 - DNA, 25 bp, Saccharomyces pastorianus
ttgctccaagacgactccatgatac

SEQ ID NO: 38411 - DNA, 25 bp, Saccharomyces pastorianus
gaataccaaaaccatgctcttgcct

SEQ ID NO: 38412 - DNA, 25 bp, Saccharomyces pastorianus
tcacgccttgtttgccatgtaccaa

SEQ ID NO: 38413 - DNA, 25 bp, Saccharomyces pastorianus
gactcccaacgatattcaactgcat

SEQ ID NO: 38414 - DNA, 25 bp, Saccharomyces pastorianus
gttcactccaaggtaggtagccagt

SEQ ID NO: 38415 - DNA, 25 bp, Saccharomyces pastorianus
gaactgtattgttgacaccgcatct

SEQ ID NO: 38416 - DNA, 25 bp, Saccharomyces pastorianus
gctcttgcaagcttgacaactctaa

SEQ ID NO: 38417 - DNA, 25 bp, Saccharomyces pastorianus
aacaagctgcttgggacttcctcaa

SEQ ID NO: 38418 - DNA, 25 bp, Saccharomyces pastorianus
tctgctctcaggatatactcgacac

SEQ ID NO: 38419 - DNA, 25 bp, Saccharomyces pastorianus
aagattgccgttggcgaacctggca

SEQ ID NO: 38420 - DNA, 25 bp, Saccharomyces pastorianus
attgttgccgagttagttcactcca

SEQ ID NO: 38421 - DNA, 25 bp, Saccharomyces pastorianus
agctcacctagctgcatttgaaaaa

SEQ ID NO: 38422 - DNA, 25 bp, Saccharomyces pastorianus
tttggccctcaaatgttcgccgatt

SEQ ID NO: 38423 - DNA, 25 bp, Saccharomyces pastorianus
aataccagcacagttcttaccgaaa

SEQ ID NO: 38424 - DNA, 25 bp, Saccharomyces pastorianus
tagctaatgctgttgccgcctattg

SEQ ID NO: 38425 - DNA, 25 bp, Saccharomyces pastorianus
aatggtaggcgacaccgagctcttg

SEQ ID NO: 38426 - DNA, 25 bp, Saccharomyces pastorianus
catgctgtcgcatttggccaagcaa

SEQ ID NO: 38427 - DNA, 25 bp, Saccharomyces pastorianus
aatgtcggtcatcgaggtcaaccct

SEQ ID NO: 38428 - DNA, 25 bp, Saccharomyces pastorianus
tttacgacggatcatggagcgcgat

SEQ ID NO: 38429 - DNA, 25 bp, Saccharomyces pastorianus
atcgctggactttggcatctttaac

SEQ ID NO: 38430 - DNA, 25 bp, Saccharomyces pastorianus
gatgaactcaatccagacatgctgt

SEQ ID NO: 38431 - DNA, 25 bp, Saccharomyces pastorianus
gttcgatgaggccatggaccacatg

SEQ ID NO: 38432 - DNA, 25 bp, Saccharomyces pastorianus
gtctccgacggtatattcacaatgg

SEQ ID NO: 38433 - DNA, 25 bp, Saccharomyces pastorianus
gcgaaacctgaacgaagccacttac

SEQ ID NO: 38434 - DNA, 25 bp, Saccharomyces pastorianus
gttcgtgtcgcttatcgtggcagag

SEQ ID NO: 38435 - DNA, 25 bp, Saccharomyces pastorianus
ggccaagcaaatgactccgcaagtt

SEQ ID NO: 38436 - DNA, 25 bp, Saccharomyces pastorianus
gccttttagtttgcttgtccgatag

SEQ ID NO: 38437 - DNA, 25 bp, Saccharomyces pastorianus
gcaagttagaagtcagccttttagt

SEQ ID NO: 38438 - DNA, 25 bp, Saccharomyces pastorianus
aatacctagcgatacagaattgccg

SEQ ID NO: 38439 - DNA, 25 bp, Saccharomyces pastorianus
ctttggcaaactttagcggcacgat

SEQ ID NO: 38440 - DNA, 25 bp, Saccharomyces pastorianus
agagcaaaccctctttgtcatcagt

SEQ ID NO: 38441 - DNA, 25 bp, Saccharomyces pastorianus
gtcatcagtggactttcttaagagg

SEQ ID NO: 38442 - DNA, 25 bp, Saccharomyces pastorianus
gtggcgtatctaaacgacttcttag

SEQ ID NO: 38443 - DNA, 25 bp, Saccharomyces pastorianus
agaattgccgcatatgtcagttgaa

SEQ ID NO: 38444 - DNA, 25 bp, Saccharomyces pastorianus
agaagacttcgttcattcacatgag

SEQ ID NO: 38445 - DNA, 25 bp, Saccharomyces pastorianus
ggtagtgacgttttgcaattgaagc

SEQ ID NO: 38446 - DNA, 25 bp, Saccharomyces pastorianus
caacggtttaccttgtagcgacata

SEQ ID NO: 38447 - DNA, 25 bp, Saccharomyces pastorianus
aaacttctaacatttgcggctttga

SEQ ID NO: 38448 - DNA, 25 bp, Saccharomyces pastorianus
tttggtgcatctaggccatttgcta

SEQ ID NO: 38449 - DNA, 25 bp, Saccharomyces pastorianus
agtggtattttcctcttatgtgcaa

SEQ ID NO: 38450 - DNA, 25 bp, Saccharomyces pastorianus
gagagattatgtccaccaccggagg

SEQ ID NO: 38451 - DNA, 25 bp, Saccharomyces pastorianus
caagccatgaaggacgcacacgtag

SEQ ID NO: 38452 - DNA, 25 bp, Saccharomyces pastorianus
atgtcagtgcaattaggctacctaa

SEQ ID NO: 38453 - DNA, 25 bp, Saccharomyces pastorianus
gggcctacgaaatgtcagtgcaatt

SEQ ID NO: 38454 - DNA, 25 bp, Saccharomyces pastorianus
tcctaactgggctaatttcctttat

SEQ ID NO: 38455 - DNA, 25 bp, Saccharomyces pastorianus
agctttccaaagcatcccaagacac

SEQ ID NO: 38456 - DNA, 25 bp, Saccharomyces pastorianus
gaatacatgcaaaccgatcctaact

SEQ ID NO: 38457 - DNA, 25 bp, Saccharomyces pastorianus
gacttcaaggaccaaaccgtctcag

SEQ ID NO: 38458 - DNA, 25 bp, Saccharomyces pastorianus
aacctgatacactccacgaaggtgt

SEQ ID NO: 38459 - DNA, 25 bp, Saccharomyces pastorianus
gagcacagctgcaaagcatcgttga

SEQ ID NO: 38460 - DNA, 25 bp, Saccharomyces pastorianus
aagtcaagaattcctagcccgtcaa

SEQ ID NO: 38461 - DNA, 25 bp, Saccharomyces pastorianus
gacaaccttttcacgcacagttaat

SEQ ID NO: 38462 - DNA, 25 bp, Saccharomyces pastorianus
tcagaggaaaatctcgcccttggcc

SEQ ID NO: 38463 - DNA, 25 bp, Saccharomyces pastorianus
gaggcgtccttctcaattaggaaga

SEQ ID NO: 38464 - DNA, 25 bp, Saccharomyces pastorianus
tgaatcaccactaaatcccaaacct

SEQ ID NO: 38465 - DNA, 25 bp, Saccharomyces pastorianus
ataacgactccgattccagaacttt

SEQ ID NO: 38466 - DNA, 25 bp, Saccharomyces pastorianus
caactattccactcaagacaacctt

SEQ ID NO: 38467 - DNA, 25 bp, Saccharomyces pastorianus
gctactctcactaaaacttcgtcgg

SEQ ID NO: 38468 - DNA, 25 bp, Saccharomyces pastorianus
gagactaggagcttgaggcgtcctt

SEQ ID NO: 38469 - DNA, 25 bp, Saccharomyces pastorianus
gatgcagacgatctttggaccaaat

SEQ ID NO: 38470 - DNA, 25 bp, Saccharomyces pastorianus
gtgacccactatcccagatggaagt

SEQ ID NO: 38471 - DNA, 25 bp, Saccharomyces pastorianus
actggtacatccacttacgttcatg

SEQ ID NO: 38472 - DNA, 25 bp, Saccharomyces pastorianus
aagtgcaagcgctaaagctgccaaa

SEQ ID NO: 38473 - DNA, 25 bp, Saccharomyces pastorianus
atcagttttccgctatatcacgctg

SEQ ID NO: 38474 - DNA, 25 bp, Saccharomyces pastorianus
acatggcaggaagccttttgcccaa

SEQ ID NO: 38475 - DNA, 25 bp, Saccharomyces pastorianus
taaaggcttaccttgggtctcgtat

SEQ ID NO: 38476 - DNA, 25 bp, Saccharomyces pastorianus
gggtctcgtataaatgccattatca

SEQ ID NO: 38477 - DNA, 25 bp, Saccharomyces pastorianus
atatcacgctggtcccatttaatta

SEQ ID NO: 38478 - DNA, 25 bp, Saccharomyces pastorianus
atagatatgttcgtgtcttcgatat

SEQ ID NO: 38479 - DNA, 25 bp, Saccharomyces pastorianus
tacagtccggaagttttgacgagtt

SEQ ID NO: 38480 - DNA, 25 bp, Saccharomyces pastorianus
tgaagtacgctcttgcagtgacacc

SEQ ID NO: 38481 - DNA, 25 bp, Saccharomyces pastorianus
actatttgctgtttggatgtcactt

SEQ ID NO: 38482 - DNA, 25 bp, Saccharomyces pastorianus
tttggtatcccaattgccgccatat

SEQ ID NO: 38483 - DNA, 25 bp, Saccharomyces pastorianus
gctgcaacacgctcatttattcaga

SEQ ID NO: 38484 - DNA, 25 bp, Saccharomyces pastorianus
ttgaaatacgtcttcaccacacact

SEQ ID NO: 38485 - DNA, 25 bp, Saccharomyces pastorianus
tcaacctattcaacgtgctgcaaca

SEQ ID NO: 38486 - DNA, 25 bp, Saccharomyces pastorianus
acatatttcacaactgacgaggaga

SEQ ID NO: 38487 - DNA, 25 bp, Saccharomyces pastorianus
ggtccaatgaccttcgctttaatta

SEQ ID NO: 38488 - DNA, 25 bp, Saccharomyces pastorianus
gggccagtatccaattttggtatcc

SEQ ID NO: 38489 - DNA, 25 bp, Saccharomyces pastorianus
attgccgccatatatgacttgaaga

SEQ ID NO: 38490 - DNA, 25 bp, Saccharomyces pastorianus
atccaacgcgaatctcaggtccaat

SEQ ID NO: 38491 - DNA, 25 bp, Saccharomyces pastorianus
gtttccaggtacatcttcgattcac

SEQ ID NO: 38492 - DNA, 25 bp, Saccharomyces pastorianus
gactctacagacttttcggaatctt

SEQ ID NO: 38493 - DNA, 25 bp, Saccharomyces pastorianus
ttttcggcggttcattctctaacac

SEQ ID NO: 38494 - DNA, 25 bp, Saccharomyces pastorianus
agtatcaactctcaaacgtatgcga

SEQ ID NO: 38495 - DNA, 25 bp, Saccharomyces pastorianus
gagatggacaaccactctattgtag

SEQ ID NO: 38496 - DNA, 25 bp, Saccharomyces pastorianus
agatgctcaagatcctggcccgata

SEQ ID NO: 38497 - DNA, 25 bp, Saccharomyces pastorianus
acatcgactacttaaactctgcttt

SEQ ID NO: 38498 - DNA, 25 bp, Saccharomyces pastorianus
gaccaagacttctgctatcataaat

SEQ ID NO: 38499 - DNA, 25 bp, Saccharomyces pastorianus
gcccgatattcgacgtttccaggta

SEQ ID NO: 38500 - DNA, 25 bp, Saccharomyces pastorianus
tcggaatctttatccctacagacca

SEQ ID NO: 38501 - DNA, 25 bp, Saccharomyces pastorianus
aagaatcgatttccccattgaattt

SEQ ID NO: 38502 - DNA, 25 bp, Saccharomyces pastorianus
agagaccatctctaccttgaaagat

SEQ ID NO: 38503 - DNA, 25 bp, Saccharomyces pastorianus
gtaaacctcaaactgcggatgctga

SEQ ID NO: 38504 - DNA, 25 bp, Saccharomyces pastorianus
gtttcgcagacacgttttcacttaa

SEQ ID NO: 38505 - DNA, 25 bp, Saccharomyces pastorianus
aacacgcatctaagagtttcgcaga

SEQ ID NO: 38506 - DNA, 25 bp, Saccharomyces pastorianus
gaacgataatttgcctcactttaat

SEQ ID NO: 38507 - DNA, 25 bp, Saccharomyces pastorianus
aacgcaagccttcaacttctaaaca

SEQ ID NO: 38508 - DNA, 25 bp, Saccharomyces pastorianus
atatagctctgatgcgccaacacaa

SEQ ID NO: 38509 - DNA, 25 bp, Saccharomyces pastorianus
tcgtgtggttttttcaagatcagac

SEQ ID NO: 38510 - DNA, 25 bp, Saccharomyces pastorianus
gattgagtactcttcaaatgccgaa

SEQ ID NO: 38511 - DNA, 25 bp, Saccharomyces pastorianus
aattggtgtcttgtcatacgttatg

SEQ ID NO: 38512 - DNA, 25 bp, Saccharomyces pastorianus
acatgtggctgtcggaattgatcaa

SEQ ID NO: 38513 - DNA, 25 bp, Saccharomyces pastorianus
ggtctgacaccacaagagatccaat

SEQ ID NO: 38514 - DNA, 25 bp, Saccharomyces pastorianus
gctgcctcatatctggccaatgcta

SEQ ID NO: 38515 - DNA, 25 bp, Saccharomyces pastorianus
aaaagtttgaagcagctgcctcata

SEQ ID NO: 38516 - DNA, 25 bp, Saccharomyces pastorianus
gcagtctccttctggtatgaacaat

SEQ ID NO: 38517 - DNA, 25 bp, Saccharomyces pastorianus
aaacatccatgggttctcctagaac

SEQ ID NO: 38518 - DNA, 25 bp, Saccharomyces pastorianus
gccaatgctaccaagctaatgcaag

SEQ ID NO: 38519 - DNA, 25 bp, Saccharomyces pastorianus
gagtcaagatagctacttacccaat

SEQ ID NO: 38520 - DNA, 25 bp, Saccharomyces pastorianus
gggcaaggcgtctccactggtatca

SEQ ID NO: 38521 - DNA, 25 bp, Saccharomyces pastorianus
accagaagcttcaggatacaggtct

SEQ ID NO: 38522 - DNA, 25 bp, Saccharomyces pastorianus
tccactggtatcaacggctctaata

SEQ ID NO: 38523 - DNA, 25 bp, Saccharomyces pastorianus
gcgtaaacggtatgcagtctccttc

SEQ ID NO: 38524 - DNA, 25 bp, Saccharomyces pastorianus
tgatcttgaatatcaccgccacaac

SEQ ID NO: 38525 - DNA, 25 bp, Saccharomyces pastorianus
gaaccagatgggtgctcaatcaagt

SEQ ID NO: 38526 - DNA, 25 bp, Saccharomyces pastorianus
aagacggagcttctgtgtcaacaag

SEQ ID NO: 38527 - DNA, 25 bp, Saccharomyces pastorianus
aacgatatcctactggtcaacccga

SEQ ID NO: 38528 - DNA, 25 bp, Saccharomyces pastorianus
agccaggccacccaatattaagaga

SEQ ID NO: 38529 - DNA, 25 bp, Saccharomyces pastorianus
ggcctccctgtcaaatttgttttag

SEQ ID NO: 38530 - DNA, 25 bp, Saccharomyces pastorianus
ttaccaattacaagtttctccccag

SEQ ID NO: 38531 - DNA, 25 bp, Saccharomyces pastorianus
aatgcgcttcaacacaacaacgata

SEQ ID NO: 38532 - DNA, 25 bp, Saccharomyces pastorianus
gtttctccccagatgtgaaccagat

SEQ ID NO: 38533 - DNA, 25 bp, Saccharomyces pastorianus
taatgccgtgggaattcttctcctt

SEQ ID NO: 38534 - DNA, 25 bp, Saccharomyces pastorianus
atgagtgtgcaagatccaggcctcc

SEQ ID NO: 38535 - DNA, 25 bp, Saccharomyces pastorianus
ccgttggcgaactgcggattttgaa

SEQ ID NO: 38536 - DNA, 25 bp, Saccharomyces pastorianus
atcatttgaggatgagggaacattt

SEQ ID NO: 38537 - DNA, 25 bp, Saccharomyces pastorianus
aataaggcataaagcccatcccacc

SEQ ID NO: 38538 - DNA, 25 bp, Saccharomyces pastorianus
tgaggaacttgcatcatttgagaat

SEQ ID NO: 38539 - DNA, 25 bp, Saccharomyces pastorianus
gaggaacttgcatcatttgagaata

SEQ ID NO: 38540 - DNA, 25 bp, Saccharomyces pastorianus
ctgcggattttgaaggctttcattt

SEQ ID NO: 38541 - DNA, 25 bp, Saccharomyces pastorianus
tttgaaggctttcatttggaaaagt

SEQ ID NO: 38542 - DNA, 25 bp, Saccharomyces pastorianus
aactgcggattttgaaggctttcat

SEQ ID NO: 38543 - DNA, 25 bp, Saccharomyces pastorianus
acatttgagagggagggccgttggc

SEQ ID NO: 38544 - DNA, 25 bp, Saccharomyces pastorianus
ggcgaactgcggattttgaaggctt

SEQ ID NO: 38545 - DNA, 25 bp, Saccharomyces pastorianus
ggattttgaaggctttcatttggaa

SEQ ID NO: 38546 - DNA, 25 bp, Saccharomyces pastorianus
gtgtcaatgacactcaagctatcag

SEQ ID NO: 38547 - DNA, 25 bp, Saccharomyces pastorianus
atgcgtttattgctggctgtggtac

SEQ ID NO: 38548 - DNA, 25 bp, Saccharomyces pastorianus
gcagatccacaaggttcaggctttt

SEQ ID NO: 38549 - DNA, 25 bp, Saccharomyces pastorianus
tgcgacagcggatcaagacatttaa

SEQ ID NO: 38550 - DNA, 25 bp, Saccharomyces pastorianus
gtaaaggcagtttttgctgaccaat

SEQ ID NO: 38551 - DNA, 25 bp, Saccharomyces pastorianus
gagtacactatcaaaccacgggtcc

SEQ ID NO: 38552 - DNA, 25 bp, Saccharomyces pastorianus
aaatcgcgaaaagactccctcctgg

SEQ ID NO: 38553 - DNA, 25 bp, Saccharomyces pastorianus
gctgtggtaccggtggaacgataac

SEQ ID NO: 38554 - DNA, 25 bp, Saccharomyces pastorianus
cagtagctgctgttcaaatcgcgaa

SEQ ID NO: 38555 - DNA, 25 bp, Saccharomyces pastorianus
ttactcaaaatttccacatgggcga

SEQ ID NO: 38556 - DNA, 25 bp, Saccharomyces pastorianus
aaaattccgtgccatgtcgttcttg

SEQ ID NO: 38557 - DNA, 25 bp, Saccharomyces pastorianus
gaccaaactacctactgtgtgggtt

SEQ ID NO: 38558 - DNA, 25 bp, Saccharomyces pastorianus
atccacagtaatttctatcaccacc

SEQ ID NO: 38559 - DNA, 25 bp, Saccharomyces pastorianus
aagccgcatgtccattctcaaaaat

SEQ ID NO: 38560 - DNA, 25 bp, Saccharomyces pastorianus
gtattgccccactatctgcggtata

SEQ ID NO: 38561 - DNA, 25 bp, Saccharomyces pastorianus
gtatacctgtaccttgtatcactgt

SEQ ID NO: 38562 - DNA, 25 bp, Saccharomyces pastorianus
gttacctcaaaatcacccacaagtt

SEQ ID NO: 38563 - DNA, 25 bp, Saccharomyces pastorianus
gcctttggcctcagctattatttat

SEQ ID NO: 38564 - DNA, 25 bp, Saccharomyces pastorianus
tatcaccacccctataaacgttttg

SEQ ID NO: 38565 - DNA, 25 bp, Saccharomyces pastorianus
ttgaaaggcgttctttgcaccctag

SEQ ID NO: 38566 - DNA, 25 bp, Saccharomyces pastorianus
gcacatgtgcattgttaccggttta

SEQ ID NO: 38567 - DNA, 25 bp, Saccharomyces pastorianus
gcaccctaggttgttggagcactgt

SEQ ID NO: 38568 - DNA, 25 bp, Saccharomyces pastorianus
gaatttgagtccctcttcgaataac

SEQ ID NO: 38569 - DNA, 25 bp, Saccharomyces pastorianus
tacaatggcaaacggcgaggacgat

SEQ ID NO: 38570 - DNA, 25 bp, Saccharomyces pastorianus
ggaaacgatctagtacgagtacctt

SEQ ID NO: 38571 - DNA, 25 bp, Saccharomyces pastorianus
tcccggtgcatttgtagttcctata

SEQ ID NO: 38572 - DNA, 25 bp, Saccharomyces pastorianus
attgatgataccaatgcgcctggtg

SEQ ID NO: 38573 - DNA, 25 bp, Saccharomyces pastorianus
aaagcctcggtactactgtcattga

SEQ ID NO: 38574 - DNA, 25 bp, Saccharomyces pastorianus
tatggaagacgtcccaacaacctca

SEQ ID NO: 38575 - DNA, 25 bp, Saccharomyces pastorianus
atattgttatcgaagctcccggtgc

SEQ ID NO: 38576 - DNA, 25 bp, Saccharomyces pastorianus
atagcccatattttcaatcctcctt

SEQ ID NO: 38577 - DNA, 25 bp, Saccharomyces pastorianus
aacacgccagcagaacaagaccaaa

SEQ ID NO: 38578 - DNA, 25 bp, Saccharomyces pastorianus
aacaacctcagcttttggcttaaat

SEQ ID NO: 38579 - DNA, 25 bp, Saccharomyces pastorianus
tcttactgtgagtcatgtcttttac

SEQ ID NO: 38580 - DNA, 25 bp, Saccharomyces pastorianus
gtttattggttcgtatttgcgtgcg

SEQ ID NO: 38581 - DNA, 25 bp, Saccharomyces pastorianus
cccaatactcttctatacggtacca

SEQ ID NO: 38582 - DNA, 25 bp, Saccharomyces pastorianus
ggcgggttcgataaaatgatcactt

SEQ ID NO: 38583 - DNA, 25 bp, Saccharomyces pastorianus
tacagttccctgaagaatcaacgag

SEQ ID NO: 38584 - DNA, 25 bp, Saccharomyces pastorianus
tgcttcattgaagatgtcccattta

SEQ ID NO: 38585 - DNA, 25 bp, Saccharomyces pastorianus
gacttattagtacctgattatccaa

SEQ ID NO: 38586 - DNA, 25 bp, Saccharomyces pastorianus
gcttcattttgacagtggattccag

SEQ ID NO: 38587 - DNA, 25 bp, Saccharomyces pastorianus
gattatccaacagactcttactgtg

SEQ ID NO: 38588 - DNA, 25 bp, Saccharomyces pastorianus
caacgaggtcgatgagatgcttcat

SEQ ID NO: 38589 - DNA, 25 bp, Saccharomyces pastorianus
aaagagctttttccgaagagacaat

SEQ ID NO: 38590 - DNA, 25 bp, Saccharomyces pastorianus
aagtttaggctatcccatgttagac

SEQ ID NO: 38591 - DNA, 25 bp, Saccharomyces pastorianus
gtttgcaggcaaccaggctaagcta

SEQ ID NO: 38592 - DNA, 25 bp, Saccharomyces pastorianus
aactgttcttgatacttttggcgag

SEQ ID NO: 38593 - DNA, 25 bp, Saccharomyces pastorianus
tttccgaggccaatcaacagactga

SEQ ID NO: 38594 - DNA, 25 bp, Saccharomyces pastorianus
gatacaaatgcacttctaggccaga

SEQ ID NO: 38595 - DNA, 25 bp, Saccharomyces pastorianus
gttaggccatgacgcagagcacatc

SEQ ID NO: 38596 - DNA, 25 bp, Saccharomyces pastorianus
gaatacctgatctcgttaggccatg

SEQ ID NO: 38597 - DNA, 25 bp, Saccharomyces pastorianus
cacgtccgacgctagaaggtttgca

SEQ ID NO: 38598 - DNA, 25 bp, Saccharomyces pastorianus
agagcacatcgaccagtcacagtgg

SEQ ID NO: 38599 - DNA, 25 bp, Saccharomyces pastorianus
gaagttatcagaggctcccagcatt

SEQ ID NO: 38600 - DNA, 25 bp, Saccharomyces pastorianus
agattttccaattgccatccataaa

SEQ ID NO: 38601 - DNA, 25 bp, Saccharomyces pastorianus
agacatctggaagctggagggcctc

SEQ ID NO: 38602 - DNA, 25 bp, Saccharomyces pastorianus
gaggttttcgaagcattccgatgta

SEQ ID NO: 38603 - DNA, 25 bp, Saccharomyces pastorianus
gttcatgaactcgaagcacctggag

SEQ ID NO: 38604 - DNA, 25 bp, Saccharomyces pastorianus
gcccggttacacagccttgttgttg

SEQ ID NO: 38605 - DNA, 25 bp, Saccharomyces pastorianus
ttccgatgtatacggctcctacaga

SEQ ID NO: 38606 - DNA, 25 bp, Saccharomyces pastorianus
aaatggaagctgtccgctctgaacc

SEQ ID NO: 38607 - DNA, 25 bp, Saccharomyces pastorianus
gaaaacacggcaacggcaggtacca

SEQ ID NO: 38608 - DNA, 25 bp, Saccharomyces pastorianus
tcacggtgaccgcatcgataacatt

SEQ ID NO: 38609 - DNA, 25 bp, Saccharomyces pastorianus
agagggtccggcttcgcaagaatcg

SEQ ID NO: 38610 - DNA, 25 bp, Saccharomyces pastorianus
gggtaacctcgctctacagaggcat

SEQ ID NO: 38611 - DNA, 25 bp, Saccharomyces pastorianus
acaaccagatgcagtccatgaccat

SEQ ID NO: 38612 - DNA, 25 bp, Saccharomyces pastorianus
acttatttgctaggtggttgcccca

SEQ ID NO: 38613 - DNA, 25 bp, Saccharomyces pastorianus
agagacgtttgccatctacgctact

SEQ ID NO: 38614 - DNA, 25 bp, Saccharomyces pastorianus
aaagccttcctctcagttagtcatg

SEQ ID NO: 38615 - DNA, 25 bp, Saccharomyces pastorianus
aatcgctcctagtttcttgctgggt

SEQ ID NO: 38616 - DNA, 25 bp, Saccharomyces pastorianus
gctacttgaatggtgcagctcctgt

SEQ ID NO: 38617 - DNA, 25 bp, Saccharomyces pastorianus
attacccatttctgtatgcatcaag

SEQ ID NO: 38618 - DNA, 25 bp, Saccharomyces pastorianus
atctgtctcacatgctatctcaaaa

SEQ ID NO: 38619 - DNA, 25 bp, Saccharomyces pastorianus
aatgctgcaaacctccaatttattt

SEQ ID NO: 38620 - DNA, 25 bp, Saccharomyces pastorianus
caaatggcgatctgtctaggactga

SEQ ID NO: 38621 - DNA, 25 bp, Saccharomyces pastorianus
tgaactcttattgcgtttccattat

SEQ ID NO: 38622 - DNA, 25 bp, Saccharomyces pastorianus
ggatttaccgacaacgttgacgatt

SEQ ID NO: 38623 - DNA, 25 bp, Saccharomyces pastorianus
agatcgtttgccttgggacagccaa

SEQ ID NO: 38624 - DNA, 25 bp, Saccharomyces pastorianus
gtatcatatattcttgcgccgatcc

SEQ ID NO: 38625 - DNA, 25 bp, Saccharomyces pastorianus
gtaagcgtactagtcgttcttccag

SEQ ID NO: 38626 - DNA, 25 bp, Saccharomyces pastorianus
gaatttgttcttctacccattggca

SEQ ID NO: 38627 - DNA, 25 bp, Saccharomyces pastorianus
atctgcgttaggtctttctgcaagg

SEQ ID NO: 38628 - DNA, 25 bp, Saccharomyces pastorianus
gtgggtacatacaaccagcttttca

SEQ ID NO: 38629 - DNA, 25 bp, Saccharomyces pastorianus
ttggcacacggttggctcaatggta

SEQ ID NO: 38630 - DNA, 25 bp, Saccharomyces pastorianus
gatccagtccatgactttgacgcta

SEQ ID NO: 38631 - DNA, 25 bp, Saccharomyces pastorianus
taagaggtcttgacgatccaaccgt

SEQ ID NO: 38632 - DNA, 25 bp, Saccharomyces pastorianus
gggaattttgtcaagcctaacgtgc

SEQ ID NO: 38633 - DNA, 25 bp, Saccharomyces pastorianus
gatccaaccgtcatcaaacctaaat

SEQ ID NO: 38634 - DNA, 25 bp, Saccharomyces pastorianus
caagacccttttgaagtctaacagt

SEQ ID NO: 38635 - DNA, 25 bp, Saccharomyces pastorianus
ggaagacaagccgaagattacctaa

SEQ ID NO: 38636 - DNA, 25 bp, Saccharomyces pastorianus
aacgtggtgagtttgttatcaggca

SEQ ID NO: 38637 - DNA, 25 bp, Saccharomyces pastorianus
cctggttggttttatttgatgttca

SEQ ID NO: 38638 - DNA, 25 bp, Saccharomyces pastorianus
tttgttatcaggcaatcaagccggg

SEQ ID NO: 38639 - DNA, 25 bp, Saccharomyces pastorianus
actctgtaatggtttcaagaccctt

SEQ ID NO: 38640 - DNA, 25 bp, Saccharomyces pastorianus
gacgaccatctagttatcacttgga

SEQ ID NO: 38641 - DNA, 25 bp, Saccharomyces pastorianus
tagccctaggtaaggttcttgttgt

SEQ ID NO: 38642 - DNA, 25 bp, Saccharomyces pastorianus
gacaaagacctattccaacacattg

SEQ ID NO: 38643 - DNA, 25 bp, Saccharomyces pastorianus
ggagaatcctttagccctaggtaag

SEQ ID NO: 38644 - DNA, 25 bp, Saccharomyces pastorianus
actatccaagtgttattcaactctg

SEQ ID NO: 38645 - DNA, 25 bp, Saccharomyces pastorianus
gagagtagtcgctggaacatctgat

SEQ ID NO: 38646 - DNA, 25 bp, Saccharomyces pastorianus
agccaagatgatttctcgttaccga

SEQ ID NO: 38647 - DNA, 25 bp, Saccharomyces pastorianus
ctcgttaccgattctccaaagtttg

SEQ ID NO: 38648 - DNA, 25 bp, Saccharomyces pastorianus
gtcgacggtatcagaggcaactcca

SEQ ID NO: 38649 - DNA, 25 bp, Saccharomyces pastorianus
gatggtcgtactaagttctcagtgt

SEQ ID NO: 38650 - DNA, 25 bp, Saccharomyces pastorianus
tggtgcattcatacaacatcgcttt

SEQ ID NO: 38651 - DNA, 25 bp, Saccharomyces pastorianus
gttccatgttagtagtggccacctc

SEQ ID NO: 38652 - DNA, 25 bp, Saccharomyces pastorianus
gaacggtgactccagactattgaat

SEQ ID NO: 38653 - DNA, 25 bp, Saccharomyces pastorianus
acgccgaatttagcacatacgcatt

SEQ ID NO: 38654 - DNA, 25 bp, Saccharomyces pastorianus
tatagcatgttacgcgatttcagat

SEQ ID NO: 38655 - DNA, 25 bp, Saccharomyces pastorianus
aagtcttgagaaatttcgccacgga

SEQ ID NO: 38656 - DNA, 25 bp, Saccharomyces pastorianus
gcagattgcttatattgccgcatca

SEQ ID NO: 38657 - DNA, 25 bp, Saccharomyces pastorianus
ataggatacactgccgttgtcacgg

SEQ ID NO: 38658 - DNA, 25 bp, Saccharomyces pastorianus
ggatgtataactctctacggctcgc

SEQ ID NO: 38659 - DNA, 25 bp, Saccharomyces pastorianus
agtactgacactcgctcaactgttg

SEQ ID NO: 38660 - DNA, 25 bp, Saccharomyces pastorianus
gacgccatggatattcttgctgagc

SEQ ID NO: 38661 - DNA, 25 bp, Saccharomyces pastorianus
gggatcgtctgtaattttgccacta

SEQ ID NO: 38662 - DNA, 25 bp, Saccharomyces pastorianus
aatcatttgctttgtgctcgggtac

SEQ ID NO: 38663 - DNA, 25 bp, Saccharomyces pastorianus
gtagcagccacaccaagttcaggat

SEQ ID NO: 38664 - DNA, 25 bp, Saccharomyces pastorianus
tcaatgctcttttcgcggcagattg

SEQ ID NO: 38665 - DNA, 25 bp, Saccharomyces pastorianus
ttgctgagcacggagtcgcaggcat

SEQ ID NO: 38666 - DNA, 25 bp, Saccharomyces pastorianus
tacggctcgctaatccaaggcattg

SEQ ID NO: 38667 - DNA, 25 bp, Saccharomyces pastorianus
gggcgtattctatggtcaggaactt

SEQ ID NO: 38668 - DNA, 25 bp, Saccharomyces pastorianus
taagttcaggacgactacgccgttt

SEQ ID NO: 38669 - DNA, 25 bp, Saccharomyces pastorianus
ccatttccacaaacgaggtcgagat

SEQ ID NO: 38670 - DNA, 25 bp, Saccharomyces pastorianus
ggttaacagtcttcacttttcaaca

SEQ ID NO: 38671 - DNA, 25 bp, Saccharomyces pastorianus
ggaccagaaatttgcacacttgatg

SEQ ID NO: 38672 - DNA, 25 bp, Saccharomyces pastorianus
atggtacatcacctgtctgaaatat

SEQ ID NO: 38673 - DNA, 25 bp, Saccharomyces pastorianus
attctgatgcaatggctatcgttct

SEQ ID NO: 38674 - DNA, 25 bp, Saccharomyces pastorianus
aatcgtttcaattgggcgtattcta

SEQ ID NO: 38675 - DNA, 25 bp, Saccharomyces pastorianus
aggaacttgcacaaggccctggaag

SEQ ID NO: 38676 - DNA, 25 bp, Saccharomyces pastorianus
ggctatcgttctatcttccaaaaat

SEQ ID NO: 38677 - DNA, 25 bp, Saccharomyces pastorianus
tgtaacattctcttgactgatcata

SEQ ID NO: 38678 - DNA, 25 bp, Saccharomyces pastorianus
atttgatttgtacaaggcgcctgtt

SEQ ID NO: 38679 - DNA, 25 bp, Saccharomyces pastorianus
gcgttagttgcaatcataagaccca

SEQ ID NO: 38680 - DNA, 25 bp, Saccharomyces pastorianus
atgggcaaacgcaagggctagtcaa

SEQ ID NO: 38681 - DNA, 25 bp, Saccharomyces pastorianus
ggtgttcaagtttcattttacctga

SEQ ID NO: 38682 - DNA, 25 bp, Saccharomyces pastorianus
atgtacgaagtatgctccgaattta

SEQ ID NO: 38683 - DNA, 25 bp, Saccharomyces pastorianus
ataccggaattgtccttcctggaga

SEQ ID NO: 38684 - DNA, 25 bp, Saccharomyces pastorianus
ctggctaatggcgtaatcatctatt

SEQ ID NO: 38685 - DNA, 25 bp, Saccharomyces pastorianus
gcagaacgttgcacaactggctaat

SEQ ID NO: 38686 - DNA, 25 bp, Saccharomyces pastorianus
ggcgcctgttctgcgaaacagtcaa

SEQ ID NO: 38687 - DNA, 25 bp, Saccharomyces pastorianus
aagacccaacgggacagacatggaa

SEQ ID NO: 38688 - DNA, 25 bp, Saccharomyces pastorianus
gctccgaatttatagacgttacgat

SEQ ID NO: 38689 - DNA, 25 bp, Saccharomyces pastorianus
agcactgttcaaaccgctaacggtg

SEQ ID NO: 38690 - DNA, 25 bp, Saccharomyces pastorianus
gctaacggtgctaattttgctcaaa

SEQ ID NO: 38691 - DNA, 25 bp, Saccharomyces pastorianus
tcaagttccgttagttcttccaaca

SEQ ID NO: 38692 - DNA, 25 bp, Saccharomyces pastorianus
taacggcggtagtgtttccagctct

SEQ ID NO: 38693 - DNA, 25 bp, Saccharomyces pastorianus
gcaatcctcaacttcaaccaaaaaa

SEQ ID NO: 38694 - DNA, 25 bp, Saccharomyces pastorianus
gttgaatcatcatccgctacatcat

SEQ ID NO: 38695 - DNA, 25 bp, Saccharomyces pastorianus
tcaaccagttcagctacccaaagat

SEQ ID NO: 38696 - DNA, 25 bp, Saccharomyces pastorianus
aaaaatcagttactccctcgactgc

SEQ ID NO: 38697 - DNA, 25 bp, Saccharomyces pastorianus
aacttccagtagatccacagtcgct

SEQ ID NO: 38698 - DNA, 25 bp, Saccharomyces pastorianus
atcttcagccaaatcatcatccgtt

SEQ ID NO: 38699 - DNA, 25 bp, Saccharomyces pastorianus
aatcatccgcagttgaaacctctac

SEQ ID NO: 38700 - DNA, 25 bp, Saccharomyces pastorianus
gacttccagtcgatattttcatctt

SEQ ID NO: 38701 - DNA, 25 bp, Saccharomyces pastorianus
tgggctgcctggtactcatgatatg

SEQ ID NO: 38702 - DNA, 25 bp, Saccharomyces pastorianus
gtcaacgccaagctgttcatgtaca

SEQ ID NO: 38703 - DNA, 25 bp, Saccharomyces pastorianus
aaactactacaagggcgtgggctgc

SEQ ID NO: 38704 - DNA, 25 bp, Saccharomyces pastorianus
ggtttctaggtttcaatcctgttct

SEQ ID NO: 38705 - DNA, 25 bp, Saccharomyces pastorianus
gtagacaggtatatgccttcctata

SEQ ID NO: 38706 - DNA, 25 bp, Saccharomyces pastorianus
gaaagtctaggctctttagctacat

SEQ ID NO: 38707 - DNA, 25 bp, Saccharomyces pastorianus
gtacagtgatttgttgtggcgcaac

SEQ ID NO: 38708 - DNA, 25 bp, Saccharomyces pastorianus
atcgttgccctgctggtcaagaaat

SEQ ID NO: 38709 - DNA, 25 bp, Saccharomyces pastorianus
acaacactgatcttctcactggaga

SEQ ID NO: 38710 - DNA, 25 bp, Saccharomyces pastorianus
gacgaacaggtacacgcctttgtag

SEQ ID NO: 38711 - DNA, 25 bp, Saccharomyces pastorianus
ttgcctcgcatgaatggtttcttta

SEQ ID NO: 38712 - DNA, 25 bp, Saccharomyces pastorianus
aacgctgtacgctgctactttttat

SEQ ID NO: 38713 - DNA, 25 bp, Saccharomyces pastorianus
aatagcttttgctgcagtcttccca

SEQ ID NO: 38714 - DNA, 25 bp, Saccharomyces pastorianus
gatgtctagtgcatcaaccgctagt

SEQ ID NO: 38715 - DNA, 25 bp, Saccharomyces pastorianus
aagcttaaacatcaccctattggta

SEQ ID NO: 38716 - DNA, 25 bp, Saccharomyces pastorianus
tgcccgctaaattcaacactacgat

SEQ ID NO: 38717 - DNA, 25 bp, Saccharomyces pastorianus
atggccaccttattgttcgcagaaa

SEQ ID NO: 38718 - DNA, 25 bp, Saccharomyces pastorianus
ttacgatggcgtaattgcctcgcat

SEQ ID NO: 38719 - DNA, 25 bp, Saccharomyces pastorianus
gacgcattacctatgtttttactcg

SEQ ID NO: 38720 - DNA, 25 bp, Saccharomyces pastorianus
gctagttctggttctcatatcgtta

SEQ ID NO: 38721 - DNA, 25 bp, Saccharomyces pastorianus
tacaagcggctggtggtgccatgat

SEQ ID NO: 38722 - DNA, 25 bp, Saccharomyces pastorianus
gacaggtttatccagccgtttgaat

SEQ ID NO: 38723 - DNA, 25 bp, Saccharomyces pastorianus
ccagaaggctattgacttgtcacga

SEQ ID NO: 38724 - DNA, 25 bp, Saccharomyces pastorianus
acttcccagtcgcatgacaggttta

SEQ ID NO: 38725 - DNA, 25 bp, Saccharomyces pastorianus
tagtactgtcgcctatagcaattca

SEQ ID NO: 38726 - DNA, 25 bp, Saccharomyces pastorianus
aatgcaccgatgatttgcagcaaca

SEQ ID NO: 38727 - DNA, 25 bp, Saccharomyces pastorianus
gacttgtcacgatcagagcttgaaa

SEQ ID NO: 38728 - DNA, 25 bp, Saccharomyces pastorianus
tggacaacaggaacgacatagtact

SEQ ID NO: 38729 - DNA, 25 bp, Saccharomyces pastorianus
ctgctttacaagctgattttctggc

SEQ ID NO: 38730 - DNA, 25 bp, Saccharomyces pastorianus
aacgctgcaacaccttcgaacgaaa

SEQ ID NO: 38731 - DNA, 25 bp, Saccharomyces pastorianus
tcaatgttattgacccagaaggcta

SEQ ID NO: 38732 - DNA, 25 bp, Saccharomyces pastorianus
ggaatgccaaacttcccagtcgcat

SEQ ID NO: 38733 - DNA, 25 bp, Saccharomyces pastorianus
ggaggagatccagccaactttttgg

SEQ ID NO: 38734 - DNA, 25 bp, Saccharomyces pastorianus
aacggtgccggtttggctatggcaa

SEQ ID NO: 38735 - DNA, 25 bp, Saccharomyces pastorianus
gttagatgcgattacgttgccttgg

SEQ ID NO: 38736 - DNA, 25 bp, Saccharomyces pastorianus
acatcggatgtctagtcaacggtgc

SEQ ID NO: 38737 - DNA, 25 bp, Saccharomyces pastorianus
gaacgtcgacgcgattttcgtcaat

SEQ ID NO: 38738 - DNA, 25 bp, Saccharomyces pastorianus
gattgagcatgacccaaaccacaag

SEQ ID NO: 38739 - DNA, 25 bp, Saccharomyces pastorianus
atttgatgaactggaccctgccgct

SEQ ID NO: 38740 - DNA, 25 bp, Saccharomyces pastorianus
gtgcacagacgccaaattcgggttc

SEQ ID NO: 38741 - DNA, 25 bp, Saccharomyces pastorianus
gttccaattgttgctcgtttacaag

SEQ ID NO: 38742 - DNA, 25 bp, Saccharomyces pastorianus
gggttcgatgataacgcctcgttca

SEQ ID NO: 38743 - DNA, 25 bp, Saccharomyces pastorianus
ggtttcgaactgatcttgtctaaca

SEQ ID NO: 38744 - DNA, 25 bp, Saccharomyces pastorianus
aagggtgccgcagaagtctacgaaa

SEQ ID NO: 38745 - DNA, 25 bp, Saccharomyces pastorianus
gacgatactaaagctatggttgcat

SEQ ID NO: 38746 - DNA, 25 bp, Saccharomyces pastorianus
aacttccacggctctagtgacgaag

SEQ ID NO: 38747 - DNA, 25 bp, Saccharomyces pastorianus
tagcaagaaggccttttttcaactc

SEQ ID NO: 38748 - DNA, 25 bp, Saccharomyces pastorianus
atcagggattacaacgaaacgacat

SEQ ID NO: 38749 - DNA, 25 bp, Saccharomyces pastorianus
aagccaaacttcaatcaactttcag

SEQ ID NO: 38750 - DNA, 25 bp, Saccharomyces pastorianus
gacggaagacgacctatctgccaaa

SEQ ID NO: 38751 - DNA, 25 bp, Saccharomyces pastorianus
gtaaagagtactcccaacttccacg

SEQ ID NO: 38752 - DNA, 25 bp, Saccharomyces pastorianus
agggaaagttcacactgatccagaa

SEQ ID NO: 38753 - DNA, 25 bp, Saccharomyces pastorianus
aatacagctacggtcttagactggt

SEQ ID NO: 38754 - DNA, 25 bp, Saccharomyces pastorianus
caactccctgttgttcaaattggat

SEQ ID NO: 38755 - DNA, 25 bp, Saccharomyces pastorianus
atgccatttgcaccattttgatacg

SEQ ID NO: 38756 - DNA, 25 bp, Saccharomyces pastorianus
cgtattgaacaaccctcgattgagc

SEQ ID NO: 38757 - DNA, 25 bp, Saccharomyces pastorianus
tgagttatggtcttcctattccgga

SEQ ID NO: 38758 - DNA, 25 bp, Saccharomyces pastorianus
tgatgcaatggccaccttactacaa

SEQ ID NO: 38759 - DNA, 25 bp, Saccharomyces pastorianus
gttggcaccctcaaagagtgaccag

SEQ ID NO: 38760 - DNA, 25 bp, Saccharomyces pastorianus
ggcacgtgaccgtaacgattcatgt

SEQ ID NO: 38761 - DNA, 25 bp, Saccharomyces pastorianus
tctgtttgccactgttcgtgtggaa

SEQ ID NO: 38762 - DNA, 25 bp, Saccharomyces pastorianus
tatcgtaaatacaccaccgcctgat

SEQ ID NO: 38763 - DNA, 25 bp, Saccharomyces pastorianus
gagatatcgtcattccgggcgtcat

SEQ ID NO: 38764 - DNA, 25 bp, Saccharomyces pastorianus
gaccagttcaactcttatccggtga

SEQ ID NO: 38765 - DNA, 25 bp, Saccharomyces pastorianus
catcattgccagtgctatcgtaaat

SEQ ID NO: 38766 - DNA, 25 bp, Saccharomyces pastorianus
ggattcatggaaacactaacccaaa

SEQ ID NO: 38767 - DNA, 25 bp, Saccharomyces pastorianus
tgttttgataaatgacgcgctagga

SEQ ID NO: 38768 - DNA, 25 bp, Saccharomyces pastorianus
ggacgacttggttataagagactga

SEQ ID NO: 38769 - DNA, 25 bp, Saccharomyces pastorianus
aagagtttgctgactttggaggaaa

SEQ ID NO: 38770 - DNA, 25 bp, Saccharomyces pastorianus
gatgatcctgtaagtgtattacctg

SEQ ID NO: 38771 - DNA, 25 bp, Saccharomyces pastorianus
gttatttccgtactgtattgaccat

SEQ ID NO: 38772 - DNA, 25 bp, Saccharomyces pastorianus
gtattacctggtctacaactgaaaa

SEQ ID NO: 38773 - DNA, 25 bp, Saccharomyces pastorianus
aacgtttgccaaagattgccagtat

SEQ ID NO: 38774 - DNA, 25 bp, Saccharomyces pastorianus
ggtgtttttaatcagttaacctcag

SEQ ID NO: 38775 - DNA, 25 bp, Saccharomyces pastorianus
gcaagttcagtgagcagggattcat

SEQ ID NO: 38776 - DNA, 25 bp, Saccharomyces pastorianus
acattgtgatttggtcattcctgaa

SEQ ID NO: 38777 - DNA, 25 bp, Saccharomyces pastorianus
gttccagatgattcttccaacagag

SEQ ID NO: 38778 - DNA, 25 bp, Saccharomyces pastorianus
gtaactccgccaaggaagccgacta

SEQ ID NO: 38779 - DNA, 25 bp, Saccharomyces pastorianus
aaggccactgccattgacgaacaag

SEQ ID NO: 38780 - DNA, 25 bp, Saccharomyces pastorianus
atcaaggccaatggtgccggtgcaa

SEQ ID NO: 38781 - DNA, 25 bp, Saccharomyces pastorianus
atcctcgtatcaagctgttcaaaga

SEQ ID NO: 38782 - DNA, 25 bp, Saccharomyces pastorianus
tagattcgattcctggagaaccttt

SEQ ID NO: 38783 - DNA, 25 bp, Saccharomyces pastorianus
agaatccgccaaggccatcattgaa

SEQ ID NO: 38784 - DNA, 25 bp, Saccharomyces pastorianus
aagccaaagctagcgcttctgctaa

SEQ ID NO: 38785 - DNA, 25 bp, Saccharomyces pastorianus
ataagagagctgtccgtaactccgc

SEQ ID NO: 38786 - DNA, 25 bp, Saccharomyces pastorianus
aagaccgctgacaatgctagattag

SEQ ID NO: 38787 - DNA, 25 bp, Saccharomyces pastorianus
agagttgatctctgttgccgacaag

SEQ ID NO: 38788 - DNA, 25 bp, Saccharomyces pastorianus
aaacgcctcatataattgtccgatg

SEQ ID NO: 38789 - DNA, 25 bp, Saccharomyces pastorianus
gggttccctgatttcttgacaaggc

SEQ ID NO: 38790 - DNA, 25 bp, Saccharomyces pastorianus
ggagcaaattcgtccaactattaag

SEQ ID NO: 38791 - DNA, 25 bp, Saccharomyces pastorianus
ggaggctgtgttcaccaaactggta

SEQ ID NO: 38792 - DNA, 25 bp, Saccharomyces pastorianus
atcagcgcgattattcgttagccaa

SEQ ID NO: 38793 - DNA, 25 bp, Saccharomyces pastorianus
aagccctgcttgattccattttttc

SEQ ID NO: 38794 - DNA, 25 bp, Saccharomyces pastorianus
gtttacattacacagatcttggcac

SEQ ID NO: 38795 - DNA, 25 bp, Saccharomyces pastorianus
ggattgctccaatttgatctcgaac

SEQ ID NO: 38796 - DNA, 25 bp, Saccharomyces pastorianus
agggcattatatcatcgccatttaa

SEQ ID NO: 38797 - DNA, 25 bp, Saccharomyces pastorianus
ctcgaactgttctatattcaccgat

SEQ ID NO: 38798 - DNA, 25 bp, Saccharomyces pastorianus
attcaccgatgctgatccttatggg

SEQ ID NO: 38799 - DNA, 25 bp, Saccharomyces pastorianus
acaccagctacacctgggtaaagct

SEQ ID NO: 38800 - DNA, 25 bp, Saccharomyces pastorianus
gatcctcacaggactaagtgtctag

SEQ ID NO: 38801 - DNA, 25 bp, Saccharomyces pastorianus
aaggactacgagaccacctgggcat

SEQ ID NO: 38802 - DNA, 25 bp, Saccharomyces pastorianus
tatagacgcccgaatggccaggaga

SEQ ID NO: 38803 - DNA, 25 bp, Saccharomyces pastorianus
gacccgcgtgtccatgagatctcat

SEQ ID NO: 38804 - DNA, 25 bp, Saccharomyces pastorianus
gtacgcatgacgcagatccgctgga

SEQ ID NO: 38805 - DNA, 25 bp, Saccharomyces pastorianus
aaaccttgacccactgggaagcaca

SEQ ID NO: 38806 - DNA, 25 bp, Saccharomyces pastorianus
gggaagcacagtgggatcctcacag

SEQ ID NO: 38807 - DNA, 25 bp, Saccharomyces pastorianus
tagggttgcatccagtgcgctgaca

SEQ ID NO: 38808 - DNA, 25 bp, Saccharomyces pastorianus
aaagcttgagcttcgtacgcatgac

SEQ ID NO: 38809 - DNA, 25 bp, Saccharomyces pastorianus
tgcgctgacaggaggcaagctactc

SEQ ID NO: 38810 - DNA, 25 bp, Saccharomyces pastorianus
gattttgttaaacgtatcacctcaa

SEQ ID NO: 38811 - DNA, 25 bp, Saccharomyces pastorianus
aggaccattggaacctggacgaggt

SEQ ID NO: 38812 - DNA, 25 bp, Saccharomyces pastorianus
gcatctctgatgaacaactagtgtc

SEQ ID NO: 38813 - DNA, 25 bp, Saccharomyces pastorianus
agttttttcacatgtggcccacaag

SEQ ID NO: 38814 - DNA, 25 bp, Saccharomyces pastorianus
tcgaaaggcttggtcaaacgtgcgg

SEQ ID NO: 38815 - DNA, 25 bp, Saccharomyces pastorianus
tggagccatcattaaacgaatcttt

SEQ ID NO: 38816 - DNA, 25 bp, Saccharomyces pastorianus
aactagtgtctgcaataccacgaat

SEQ ID NO: 38817 - DNA, 25 bp, Saccharomyces pastorianus
gaggcagcaggcgttatccacagtg

SEQ ID NO: 38818 - DNA, 25 bp, Saccharomyces pastorianus
caaactggttcttttcagtgcagaa

SEQ ID NO: 38819 - DNA, 25 bp, Saccharomyces pastorianus
atccacagtgatttgcgtgatacgt

SEQ ID NO: 38820 - DNA, 25 bp, Saccharomyces pastorianus
ttttcgcctggtgacaaactggttc

SEQ ID NO: 38821 - DNA, 25 bp, Saccharomyces pastorianus
aggtcttccacgcaatcttacgtat

SEQ ID NO: 38822 - DNA, 25 bp, Saccharomyces pastorianus
cgggcactttgactaactctacaga

SEQ ID NO: 38823 - DNA, 25 bp, Saccharomyces pastorianus
aaacccatggctattatgtctccac

SEQ ID NO: 38824 - DNA, 25 bp, Saccharomyces pastorianus
gaaacaggtcaagcccgacttgcta

SEQ ID NO: 38825 - DNA, 25 bp, Saccharomyces pastorianus
gaacttgttatctgctggtgtccac

SEQ ID NO: 38826 - DNA, 25 bp, Saccharomyces pastorianus
gttgcaatcatcgatacggactccg

SEQ ID NO: 38827 - DNA, 25 bp, Saccharomyces pastorianus
gaatctggcgggatcatcttgttcc

SEQ ID NO: 38828 - DNA, 25 bp, Saccharomyces pastorianus
tagtcgtgctcaaccctacagaaaa

SEQ ID NO: 38829 - DNA, 25 bp, Saccharomyces pastorianus
gaaacgctctgctggaggccatcaa

SEQ ID NO: 38830 - DNA, 25 bp, Saccharomyces pastorianus
tggtcacttatcctatcccaggtaa

SEQ ID NO: 38831 - DNA, 25 bp, Saccharomyces pastorianus
ttgaggtccgtcaaccttttactag

SEQ ID NO: 38832 - DNA, 25 bp, Saccharomyces pastorianus
caacattctcctcagggtccaaaag

SEQ ID NO: 38833 - DNA, 25 bp, Saccharomyces pastorianus
agccgttcgtaatcatgaggtagcc

SEQ ID NO: 38834 - DNA, 25 bp, Saccharomyces pastorianus
aaagttactgatgcgctagccgttc

SEQ ID NO: 38835 - DNA, 25 bp, Saccharomyces pastorianus
ttaccaggacaagcattcacggaaa

SEQ ID NO: 38836 - DNA, 25 bp, Saccharomyces pastorianus
tttccggtacttatgacgcgatcga

SEQ ID NO: 38837 - DNA, 25 bp, Saccharomyces pastorianus
gaggacggtgtagagttccatccga

SEQ ID NO: 38838 - DNA, 25 bp, Saccharomyces pastorianus
acatttacaaacacattcctgaggg

SEQ ID NO: 38839 - DNA, 25 bp, Saccharomyces pastorianus
gttccatccgaaactctttagaaga

SEQ ID NO: 38840 - DNA, 25 bp, Saccharomyces pastorianus
agactgtgctttttgacactcacca

SEQ ID NO: 38841 - DNA, 25 bp, Saccharomyces pastorianus
tcagggtccaaaagtacgtccgttg

SEQ ID NO: 38842 - DNA, 25 bp, Saccharomyces pastorianus
gatcatatggttattacaggtccta

SEQ ID NO: 38843 - DNA, 25 bp, Saccharomyces pastorianus
gagatgctactggtggcacagctaa

SEQ ID NO: 38844 - DNA, 25 bp, Saccharomyces pastorianus
acctctgtttgattgtttgaccact

SEQ ID NO: 38845 - DNA, 25 bp, Saccharomyces pastorianus
tggaagccgccctaacaatggatat

SEQ ID NO: 38846 - DNA, 25 bp, Saccharomyces pastorianus
gttggctactgacttggctgattac

SEQ ID NO: 38847 - DNA, 25 bp, Saccharomyces pastorianus
aacgccgactccttagaattattga

SEQ ID NO: 38848 - DNA, 25 bp, Saccharomyces pastorianus
atactgcacggctgaattcggtttc

SEQ ID NO: 38849 - DNA, 25 bp, Saccharomyces pastorianus
tccgggagagtctttggtgacctaa

SEQ ID NO: 38850 - DNA, 25 bp, Saccharomyces pastorianus
ggtgaatgtgttgctgccgctgaaa

SEQ ID NO: 38851 - DNA, 25 bp, Saccharomyces pastorianus
gagacccatcacatctctggtgaat

SEQ ID NO: 38852 - DNA, 25 bp, Saccharomyces pastorianus
taagcgatgcttactcaacaggttc

SEQ ID NO: 38853 - DNA, 25 bp, Saccharomyces pastorianus
gtgttatttctacattgaccgtcaa

SEQ ID NO: 38854 - DNA, 25 bp, Saccharomyces pastorianus
gctgattctgcattgtttgtcaaga

SEQ ID NO: 38855 - DNA, 25 bp, Saccharomyces pastorianus
taccgcggaaaccatgtactcgaaa

SEQ ID NO: 38856 - DNA, 25 bp, Saccharomyces pastorianus
catcactggttcctccatgattggg

SEQ ID NO: 38857 - DNA, 25 bp, Saccharomyces pastorianus
tgggctgattattgctattgtcttt

SEQ ID NO: 38858 - DNA, 25 bp, Saccharomyces pastorianus
atcgctgttggtatcactggtgcca

SEQ ID NO: 38859 - DNA, 25 bp, Saccharomyces pastorianus
ggcctaagtgtcgttggtgcagcat

SEQ ID NO: 38860 - DNA, 25 bp, Saccharomyces pastorianus
gaacttgtacactggttactccctt

SEQ ID NO: 38861 - DNA, 25 bp, Saccharomyces pastorianus
gaaattgaccgtggctaccgcggaa

SEQ ID NO: 38862 - DNA, 25 bp, Saccharomyces pastorianus
gggccggtgttcgtgctccaagaat

SEQ ID NO: 38863 - DNA, 25 bp, Saccharomyces pastorianus
gctccaagaatcaccacgaagaatt

SEQ ID NO: 38864 - DNA, 25 bp, Saccharomyces pastorianus
tggtgccactgctgccatttctgat

SEQ ID NO: 38865 - DNA, 25 bp, Saccharomyces pastorianus
agacggattttttggtccagggcat

SEQ ID NO: 38866 - DNA, 25 bp, Saccharomyces pastorianus
gtagaattgccgatccacgagaaat

SEQ ID NO: 38867 - DNA, 25 bp, Saccharomyces pastorianus
ccgaagacgacttgccagagggcta

SEQ ID NO: 38868 - DNA, 25 bp, Saccharomyces pastorianus
gtgaattctaccactttgctggaat

SEQ ID NO: 38869 - DNA, 25 bp, Saccharomyces pastorianus
agccggcagaggaacccgtgcaaaa

SEQ ID NO: 38870 - DNA, 25 bp, Saccharomyces pastorianus
tttgtgtcccatgcaagcgcaggag

SEQ ID NO: 38871 - DNA, 25 bp, Saccharomyces pastorianus
cacgatattcattgccatggccgaa

SEQ ID NO: 38872 - DNA, 25 bp, Saccharomyces pastorianus
gcgggttttcaagcatatcagccat

SEQ ID NO: 38873 - DNA, 25 bp, Saccharomyces pastorianus
gaaatggttcccttacaacactacg

SEQ ID NO: 38874 - DNA, 25 bp, Saccharomyces pastorianus
aacatgacggtgatcgagttcccca

SEQ ID NO: 38875 - DNA, 25 bp, Saccharomyces pastorianus
gaggacactgcaaaggacgcccagc

SEQ ID NO: 38876 - DNA, 25 bp, Saccharomyces pastorianus
tgccgaaaatctgctgctgtcttta

SEQ ID NO: 38877 - DNA, 25 bp, Saccharomyces pastorianus
gtttccgatttgactcaggtttccg

SEQ ID NO: 38878 - DNA, 25 bp, Saccharomyces pastorianus
atgggcgccatcacggtgggaataa

SEQ ID NO: 38879 - DNA, 25 bp, Saccharomyces pastorianus
gttcgattcaggtgcggattacgta

SEQ ID NO: 38880 - DNA, 25 bp, Saccharomyces pastorianus
tatcgttacttctggttctccgaat

SEQ ID NO: 38881 - DNA, 25 bp, Saccharomyces pastorianus
ggttctccgaatctggcatattcat

SEQ ID NO: 38882 - DNA, 25 bp, Saccharomyces pastorianus
gcccgcgatctgttgtgccaagatt

SEQ ID NO: 38883 - DNA, 25 bp, Saccharomyces pastorianus
ctttgaagacgcacctgtaggcatt

SEQ ID NO: 38884 - DNA, 25 bp, Saccharomyces pastorianus
aagcctgaccctgaaggttatgcca

SEQ ID NO: 38885 - DNA, 25 bp, Saccharomyces pastorianus
gtgagtcttattcctggtgccgaaa

SEQ ID NO: 38886 - DNA, 25 bp, Saccharomyces pastorianus
agttatttggacaccgtgagtctta

SEQ ID NO: 38887 - DNA, 25 bp, Saccharomyces pastorianus
gtgcaactgtccaactggctgtgac

SEQ ID NO: 38888 - DNA, 25 bp, Saccharomyces pastorianus
agtgatgacaaatgcccctgtggca

SEQ ID NO: 38889 - DNA, 25 bp, Saccharomyces pastorianus
ccaactggctgtgacagtgatgaca

SEQ ID NO: 38890 - DNA, 25 bp, Saccharomyces pastorianus
aaatcgtgcaactgtccaactggct

SEQ ID NO: 38891 - DNA, 25 bp, Saccharomyces pastorianus
tgcaaaaccaatgaacagtgtcaaa

SEQ ID NO: 38892 - DNA, 25 bp, Saccharomyces pastorianus
gaaggccaccaatgtcaatgcaaat

SEQ ID NO: 38893 - DNA, 25 bp, Saccharomyces pastorianus
atttccaaaacgaaggccaccaatg

SEQ ID NO: 38894 - DNA, 25 bp, Saccharomyces pastorianus
ttcagcgaactaatcaatttccaaa

SEQ ID NO: 38895 - DNA, 25 bp, Saccharomyces pastorianus
gcaaatgtggtagttgcaaaaccaa

SEQ ID NO: 38896 - DNA, 25 bp, Saccharomyces pastorianus
tgacaaatgcccctgtggcaacaag

SEQ ID NO: 38897 - DNA, 25 bp, Saccharomyces pastorianus
tgtcaaaaatcgtgcaactgtccaa

SEQ ID NO: 38898 - DNA, 25 bp, Saccharomyces pastorianus
tggcgtagagcctttgttcaatttc

SEQ ID NO: 38899 - DNA, 25 bp, Saccharomyces pastorianus
aatgcgatacatacccctgagttga

SEQ ID NO: 38900 - DNA, 25 bp, Saccharomyces pastorianus
gtctcttctagatattccaacgttg

SEQ ID NO: 38901 - DNA, 25 bp, Saccharomyces pastorianus
gacgaatcgctgaattcacctggta

SEQ ID NO: 38902 - DNA, 25 bp, Saccharomyces pastorianus
taacaaaaccagcagtacccctaat

SEQ ID NO: 38903 - DNA, 25 bp, Saccharomyces pastorianus
tttggctttcatcatatctcgcacg

SEQ ID NO: 38904 - DNA, 25 bp, Saccharomyces pastorianus
aagcaaatggactggcctacggaaa

SEQ ID NO: 38905 - DNA, 25 bp, Saccharomyces pastorianus
aggatagtctcttcttccacaatag

SEQ ID NO: 38906 - DNA, 25 bp, Saccharomyces pastorianus
gttcaatttcacgtcgttggcacca

SEQ ID NO: 38907 - DNA, 25 bp, Saccharomyces pastorianus
atagctactacaatggattcgcacc

SEQ ID NO: 38908 - DNA, 25 bp, Saccharomyces pastorianus
aatccagtatatctgccccatttgg

SEQ ID NO: 38909 - DNA, 25 bp, Saccharomyces pastorianus
gtaagaatctctccactagcagtaa

SEQ ID NO: 38910 - DNA, 25 bp, Saccharomyces pastorianus
tataagcgggctgcacgccaaggat

SEQ ID NO: 38911 - DNA, 25 bp, Saccharomyces pastorianus
aaggatctctccctcatggaaagat

SEQ ID NO: 38912 - DNA, 25 bp, Saccharomyces pastorianus
aaattagtcggcctctctcaaacaa

SEQ ID NO: 38913 - DNA, 25 bp, Saccharomyces pastorianus
aggatattcctctcttgtcttattc

SEQ ID NO: 38914 - DNA, 25 bp, Saccharomyces pastorianus
agcgatctcttgctgtgggaaacaa

SEQ ID NO: 38915 - DNA, 25 bp, Saccharomyces pastorianus
attctgtcccacaagtttctgaacg

SEQ ID NO: 38916 - DNA, 25 bp, Saccharomyces pastorianus
attctcgcgctgctccaagaggata

SEQ ID NO: 38917 - DNA, 25 bp, Saccharomyces pastorianus
ggccaccttttatttccagaagatc

SEQ ID NO: 38918 - DNA, 25 bp, Saccharomyces pastorianus
gtttctgaacgacaacacctactcg

SEQ ID NO: 38919 - DNA, 25 bp, Saccharomyces pastorianus
tggattaccagctagccgttccata

SEQ ID NO: 38920 - DNA, 25 bp, Saccharomyces pastorianus
ggtatccattattttaatcggccat

SEQ ID NO: 38921 - DNA, 25 bp, Saccharomyces pastorianus
ggcatattcaacgtgcactgtcgaa

SEQ ID NO: 38922 - DNA, 25 bp, Saccharomyces pastorianus
atgtactttcgcataccctaaattg

SEQ ID NO: 38923 - DNA, 25 bp, Saccharomyces pastorianus
gaagaggcagctattttggccttaa

SEQ ID NO: 38924 - DNA, 25 bp, Saccharomyces pastorianus
aagacggcagtcactttgattgatt

SEQ ID NO: 38925 - DNA, 25 bp, Saccharomyces pastorianus
gagccgcttcaaaaggtatccatta

SEQ ID NO: 38926 - DNA, 25 bp, Saccharomyces pastorianus
gaatacgcctaatgtgttcgaatca

SEQ ID NO: 38927 - DNA, 25 bp, Saccharomyces pastorianus
atcccagctttatttactccagtta

SEQ ID NO: 38928 - DNA, 25 bp, Saccharomyces pastorianus
gagtgcggaaatcgctatcccagct

SEQ ID NO: 38929 - DNA, 25 bp, Saccharomyces pastorianus
acactcttttgtggatctaccagta

SEQ ID NO: 38930 - DNA, 25 bp, Saccharomyces pastorianus
aatcggccattctcttggtggaagt

SEQ ID NO: 38931 - DNA, 25 bp, Saccharomyces pastorianus
gaaaactaccattctctcatcgaag

SEQ ID NO: 38932 - DNA, 25 bp, Saccharomyces pastorianus
gatgcattgcttagttaatcctgag

SEQ ID NO: 38933 - DNA, 25 bp, Saccharomyces pastorianus
aagacggcactgagcgcagaaccta

SEQ ID NO: 38934 - DNA, 25 bp, Saccharomyces pastorianus
gattcaccgacttctttcaagacga

SEQ ID NO: 38935 - DNA, 25 bp, Saccharomyces pastorianus
aaagcgagaattgccatgccttcca

SEQ ID NO: 38936 - DNA, 25 bp, Saccharomyces pastorianus
actagtgccctatttcaaggaccct

SEQ ID NO: 38937 - DNA, 25 bp, Saccharomyces pastorianus
ccgctagcatggtcgttgcactata

SEQ ID NO: 38938 - DNA, 25 bp, Saccharomyces pastorianus
gattttattgatttaccgccgctag

SEQ ID NO: 38939 - DNA, 25 bp, Saccharomyces pastorianus
tctgcctgtcatttgacgttcacta

SEQ ID NO: 38940 - DNA, 25 bp, Saccharomyces pastorianus
acccttcttcttataatcccgatag

SEQ ID NO: 38941 - DNA, 25 bp, Saccharomyces pastorianus
tgccatgccttccagtaattcaagt

SEQ ID NO: 38942 - DNA, 25 bp, Saccharomyces pastorianus
gaacttcctttagcagacgaaccaa

SEQ ID NO: 38943 - DNA, 25 bp, Saccharomyces pastorianus
taagaccgtccaacccgaattggtg

SEQ ID NO: 38944 - DNA, 25 bp, Saccharomyces pastorianus
aaaagcgtgaacctaccggtgctgc

SEQ ID NO: 38945 - DNA, 25 bp, Saccharomyces pastorianus
aggaatctatcgctgaaccatcaaa

SEQ ID NO: 38946 - DNA, 25 bp, Saccharomyces pastorianus
aaactcatactctagacccaactgt

SEQ ID NO: 38947 - DNA, 25 bp, Saccharomyces pastorianus
taacgtccacatctgaagactcgaa

SEQ ID NO: 38948 - DNA, 25 bp, Saccharomyces pastorianus
ccggtgctgcgttagacacttctaa

SEQ ID NO: 38949 - DNA, 25 bp, Saccharomyces pastorianus
ggagatcaccagcagcttctgaaga

SEQ ID NO: 38950 - DNA, 25 bp, Saccharomyces pastorianus
aagcaaacagcttctcctctaacgt

SEQ ID NO: 38951 - DNA, 25 bp, Saccharomyces pastorianus
gaacctgaagtccaacttgttccag

SEQ ID NO: 38952 - DNA, 25 bp, Saccharomyces pastorianus
aagtggacgagcctgcttctgaatt

SEQ ID NO: 38953 - DNA, 25 bp, Saccharomyces pastorianus
ggtgcgttgaatcgattttccatct

SEQ ID NO: 38954 - DNA, 25 bp, Saccharomyces pastorianus
gatttgcactgagacctgaatttat

SEQ ID NO: 38955 - DNA, 25 bp, Saccharomyces pastorianus
gatttgttaaagctagttcatacca

SEQ ID NO: 38956 - DNA, 25 bp, Saccharomyces pastorianus
gttctgcaggcccacggaatcaaaa

SEQ ID NO: 38957 - DNA, 25 bp, Saccharomyces pastorianus
tgagcactattggttcagttctgca

SEQ ID NO: 38958 - DNA, 25 bp, Saccharomyces pastorianus
cgatcatgacaaggccagtacggtt

SEQ ID NO: 38959 - DNA, 25 bp, Saccharomyces pastorianus
tcgaagactaaactacctaccaagg

SEQ ID NO: 38960 - DNA, 25 bp, Saccharomyces pastorianus
gtttcgaacccttgagatttgcact

SEQ ID NO: 38961 - DNA, 25 bp, Saccharomyces pastorianus
tattgtcaccaaggcttcacaagtg

SEQ ID NO: 38962 - DNA, 25 bp, Saccharomyces pastorianus
atatacctggtggagtgagcactat

SEQ ID NO: 38963 - DNA, 25 bp, Saccharomyces pastorianus
tgcgcaaatgaatctgaacctgttt

SEQ ID NO: 38964 - DNA, 25 bp, Saccharomyces pastorianus
tccgcactaattaatctggtcttcg

SEQ ID NO: 38965 - DNA, 25 bp, Saccharomyces pastorianus
ggtcttcgttggtaagtccattcat

SEQ ID NO: 38966 - DNA, 25 bp, Saccharomyces pastorianus
ggaggagaactcataccagtacaag

SEQ ID NO: 38967 - DNA, 25 bp, Saccharomyces pastorianus
tcggtctttaacagttcctgattta

SEQ ID NO: 38968 - DNA, 25 bp, Saccharomyces pastorianus
gatcaagcgggtgtagtgttcagac

SEQ ID NO: 38969 - DNA, 25 bp, Saccharomyces pastorianus
gccaatggtggacaagcagagcttc

SEQ ID NO: 38970 - DNA, 25 bp, Saccharomyces pastorianus
aacaaatccttgtactatggtcttt

SEQ ID NO: 38971 - DNA, 25 bp, Saccharomyces pastorianus
tatggtcttttaatgtccgcactaa

SEQ ID NO: 38972 - DNA, 25 bp, Saccharomyces pastorianus
ggacgacaaggatcctgatagcgat

SEQ ID NO: 38973 - DNA, 25 bp, Saccharomyces pastorianus
atggatgaacgacccgaaactacag

SEQ ID NO: 38974 - DNA, 25 bp, Saccharomyces pastorianus
gtccattcattcttatttctcagtg

SEQ ID NO: 38975 - DNA, 25 bp, Saccharomyces pastorianus
agtactgtgcaccagaaaccgacat

SEQ ID NO: 38976 - DNA, 25 bp, Saccharomyces pastorianus
tagaggtgtctgatccgttagtgac

SEQ ID NO: 38977 - DNA, 25 bp, Saccharomyces pastorianus
acatacgtggtgtcgatgctcaaat

SEQ ID NO: 38978 - DNA, 25 bp, Saccharomyces pastorianus
tcaagagttccattcgtctgcgata

SEQ ID NO: 38979 - DNA, 25 bp, Saccharomyces pastorianus
aagactgtccgttgatttggccaaa

SEQ ID NO: 38980 - DNA, 25 bp, Saccharomyces pastorianus
aaaaacctacctgctttacatgaag

SEQ ID NO: 38981 - DNA, 25 bp, Saccharomyces pastorianus
agaatattcgtctggaagcaaccct

SEQ ID NO: 38982 - DNA, 25 bp, Saccharomyces pastorianus
gatggcgcgtgcaaagtttggctta

SEQ ID NO: 38983 - DNA, 25 bp, Saccharomyces pastorianus
aaggtatccttgagcagtactgtgc

SEQ ID NO: 38984 - DNA, 25 bp, Saccharomyces pastorianus
ttggcgatgatgcacactccatgaa

SEQ ID NO: 38985 - DNA, 25 bp, Saccharomyces pastorianus
gcacagctcttggaggatgcggaat

SEQ ID NO: 38986 - DNA, 25 bp, Saccharomyces pastorianus
ttgtccagcatgcagccctaaagtc

SEQ ID NO: 38987 - DNA, 25 bp, Saccharomyces pastorianus
aagcacgacgttatattcctattag

SEQ ID NO: 38988 - DNA, 25 bp, Saccharomyces pastorianus
aatgatggcatcttctttggccgtt

SEQ ID NO: 38989 - DNA, 25 bp, Saccharomyces pastorianus
acagtttgactgatcggacgttgga

SEQ ID NO: 38990 - DNA, 25 bp, Saccharomyces pastorianus
taggctgctacttctgtcatgatgt

SEQ ID NO: 38991 - DNA, 25 bp, Saccharomyces pastorianus
gctgcaaatcaaaaactcgggttca

SEQ ID NO: 38992 - DNA, 25 bp, Saccharomyces pastorianus
gcgttaaatgatccgttataccttg

SEQ ID NO: 38993 - DNA, 25 bp, Saccharomyces pastorianus
gtacagtaactaggccaggcgttgc

SEQ ID NO: 38994 - DNA, 25 bp, Saccharomyces pastorianus
aactccggcgtatgagcattgtcca

SEQ ID NO: 38995 - DNA, 25 bp, Saccharomyces pastorianus
agatggttgccttcgttattgggta

SEQ ID NO: 38996 - DNA, 25 bp, Saccharomyces pastorianus
catgatgttgtagcgccgactgaca

SEQ ID NO: 38997 - DNA, 25 bp, Saccharomyces pastorianus
gatactttctaccagatgtctgctc

SEQ ID NO: 38998 - DNA, 25 bp, Saccharomyces pastorianus
ttatattgactaccccacctatgaa

SEQ ID NO: 38999 - DNA, 25 bp, Saccharomyces pastorianus
agttggtttgagattgtccccatac

SEQ ID NO: 39000 - DNA, 25 bp, Saccharomyces pastorianus
gatgctcttgtcgaagccattggtc

SEQ ID NO: 39001 - DNA, 25 bp, Saccharomyces pastorianus
tcgtgtaactaacccattcttgact

SEQ ID NO: 39002 - DNA, 25 bp, Saccharomyces pastorianus
gtccccatacggtgttttcaacagt

SEQ ID NO: 39003 - DNA, 25 bp, Saccharomyces pastorianus
gagaccggcattgttgcccaatatg

SEQ ID NO: 39004 - DNA, 25 bp, Saccharomyces pastorianus
aacgattttgtttactccatctgga

SEQ ID NO: 39005 - DNA, 25 bp, Saccharomyces pastorianus
tgctctccacccagaagtcgttaga

SEQ ID NO: 39006 - DNA, 25 bp, Saccharomyces pastorianus
gattcttcatttctaacccggattt

SEQ ID NO: 39007 - DNA, 25 bp, Saccharomyces pastorianus
tgcccaatatgcttacgttgctggt

SEQ ID NO: 39008 - DNA, 25 bp, Saccharomyces pastorianus
gttccctgagttcaatccggtatta

SEQ ID NO: 39009 - DNA, 25 bp, Saccharomyces pastorianus
gacacaaaatactacgttccctgag

SEQ ID NO: 39010 - DNA, 25 bp, Saccharomyces pastorianus
gagtcgcagacagtatgtctccaca

SEQ ID NO: 39011 - DNA, 25 bp, Saccharomyces pastorianus
aacatatttcagtccccgaacagca

SEQ ID NO: 39012 - DNA, 25 bp, Saccharomyces pastorianus
gaatagtggtttggccattccaaca

SEQ ID NO: 39013 - DNA, 25 bp, Saccharomyces pastorianus
gcgacaatacgaacaacggcctatg

SEQ ID NO: 39014 - DNA, 25 bp, Saccharomyces pastorianus
tcactgccattaccaaatccttatt

SEQ ID NO: 39015 - DNA, 25 bp, Saccharomyces pastorianus
actctcctcaatgaactgtttgcca

SEQ ID NO: 39016 - DNA, 25 bp, Saccharomyces pastorianus
aaatatgccttgttccgagaaagta

SEQ ID NO: 39017 - DNA, 25 bp, Saccharomyces pastorianus
aacttgtattccaacggttcactgc

SEQ ID NO: 39018 - DNA, 25 bp, Saccharomyces pastorianus
gaacaagataccacctgactgcggt

SEQ ID NO: 39019 - DNA, 25 bp, Saccharomyces pastorianus
gagcctgaacggacagtttctggac

SEQ ID NO: 39020 - DNA, 25 bp, Saccharomyces pastorianus
gttttgttagccttctacgttgtga

SEQ ID NO: 39021 - DNA, 25 bp, Saccharomyces pastorianus
gttactggatcatattcgcatgcga

SEQ ID NO: 39022 - DNA, 25 bp, Saccharomyces pastorianus
ttctggaccagttgatgatgccgct

SEQ ID NO: 39023 - DNA, 25 bp, Saccharomyces pastorianus
tttgcccattgctatatcattattg

SEQ ID NO: 39024 - DNA, 25 bp, Saccharomyces pastorianus
aactactgtgtcatccaaaggtccc

SEQ ID NO: 39025 - DNA, 25 bp, Saccharomyces pastorianus
gcgattgtagacacgaaggccttta

SEQ ID NO: 39026 - DNA, 25 bp, Saccharomyces pastorianus
caaaggtccctgttggtatggtcta

SEQ ID NO: 39027 - DNA, 25 bp, Saccharomyces pastorianus
tgaacgtgtatccattttgcccatt

SEQ ID NO: 39028 - DNA, 25 bp, Saccharomyces pastorianus
gttgtgaagttctccatccaggtaa

SEQ ID NO: 39029 - DNA, 25 bp, Saccharomyces pastorianus
aatgtagttattcctgagcctgaac

SEQ ID NO: 39030 - DNA, 25 bp, Saccharomyces pastorianus
gaactagtcatcatgggtgatccca

SEQ ID NO: 39031 - DNA, 25 bp, Saccharomyces pastorianus
gtgatgaatattgctccctttttga

SEQ ID NO: 39032 - DNA, 25 bp, Saccharomyces pastorianus
caaggcgtggcgatgttcaggcaat

SEQ ID NO: 39033 - DNA, 25 bp, Saccharomyces pastorianus
aggccatcaatcgtgcggccgatga

SEQ ID NO: 39034 - DNA, 25 bp, Saccharomyces pastorianus
gaaattggtctttcatccattgtga

SEQ ID NO: 39035 - DNA, 25 bp, Saccharomyces pastorianus
aaagccggcgtttcacacagagaac

SEQ ID NO: 39036 - DNA, 25 bp, Saccharomyces pastorianus
aaggcttgcaagacaccagcgtgtt

SEQ ID NO: 39037 - DNA, 25 bp, Saccharomyces pastorianus
atcccaagatggtacgtgcgctcgt

SEQ ID NO: 39038 - DNA, 25 bp, Saccharomyces pastorianus
atgggcgccatcctgatagatacct

SEQ ID NO: 39039 - DNA, 25 bp, Saccharomyces pastorianus
gaatgtcatggctgttcggcgaaca

SEQ ID NO: 39040 - DNA, 25 bp, Saccharomyces pastorianus
attgaacgtcgaagccaccaggaag

SEQ ID NO: 39041 - DNA, 25 bp, Saccharomyces pastorianus
gaggctaactcttacagtgtcgact

SEQ ID NO: 39042 - DNA, 25 bp, Saccharomyces pastorianus
taaggctgtcttctctgacttatct

SEQ ID NO: 39043 - DNA, 25 bp, Saccharomyces pastorianus
tagtaacgcaggtccatggtctcgt

SEQ ID NO: 39044 - DNA, 25 bp, Saccharomyces pastorianus
gagctactacaaggtctacggttta

SEQ ID NO: 39045 - DNA, 25 bp, Saccharomyces pastorianus
tgaacaccgaataccaagctaaccc

SEQ ID NO: 39046 - DNA, 25 bp, Saccharomyces pastorianus
accactggtgtcgatgacttgtttc

SEQ ID NO: 39047 - DNA, 25 bp, Saccharomyces pastorianus
atcatccatgtctttagttcgtaag

SEQ ID NO: 39048 - DNA, 25 bp, Saccharomyces pastorianus
aataactctagtggctctttggaat

SEQ ID NO: 39049 - DNA, 25 bp, Saccharomyces pastorianus
gaccactggtaatgctttaggctct

SEQ ID NO: 39050 - DNA, 25 bp, Saccharomyces pastorianus
cactcaaactgtctctaaggctgtc

SEQ ID NO: 39051 - DNA, 25 bp, Saccharomyces pastorianus
tgaattgattttcgccgtcaacacc

SEQ ID NO: 39052 - DNA, 25 bp, Saccharomyces pastorianus
tcatctctaactcgctgtaccatat

SEQ ID NO: 39053 - DNA, 25 bp, Saccharomyces pastorianus
ataagaaggtctccggcaaccagag

SEQ ID NO: 39054 - DNA, 25 bp, Saccharomyces pastorianus
gaacaggcccttgagagtggacaga

SEQ ID NO: 39055 - DNA, 25 bp, Saccharomyces pastorianus
actggtcgccgataggaatactcat

SEQ ID NO: 39056 - DNA, 25 bp, Saccharomyces pastorianus
agaattcgacggcatcattccctgg

SEQ ID NO: 39057 - DNA, 25 bp, Saccharomyces pastorianus
gtcaccgccggtggccataagattg

SEQ ID NO: 39058 - DNA, 25 bp, Saccharomyces pastorianus
ggtctgcgctatcgttgatcttcaa

SEQ ID NO: 39059 - DNA, 25 bp, Saccharomyces pastorianus
gaacgtttctgggaccgttagactg

SEQ ID NO: 39060 - DNA, 25 bp, Saccharomyces pastorianus
attccctgggtctacggtgaactga

SEQ ID NO: 39061 - DNA, 25 bp, Saccharomyces pastorianus
taccgagattgacacgttcttctgc

SEQ ID NO: 39062 - DNA, 25 bp, Saccharomyces pastorianus
gcaatcgttcttcactagtgcgcga

SEQ ID NO: 39063 - DNA, 25 bp, Saccharomyces pastorianus
gggttacaaatctccaattgttgct

SEQ ID NO: 39064 - DNA, 25 bp, Saccharomyces pastorianus
tattgagaacattgaactggcttgc

SEQ ID NO: 39065 - DNA, 25 bp, Saccharomyces pastorianus
tatctttttcaagtgctgacagcaa

SEQ ID NO: 39066 - DNA, 25 bp, Saccharomyces pastorianus
tggtacagctacatccagtagaact

SEQ ID NO: 39067 - DNA, 25 bp, Saccharomyces pastorianus
gaactatacccacagtttcaaacag

SEQ ID NO: 39068 - DNA, 25 bp, Saccharomyces pastorianus
gccttccacacatcattctagagaa

SEQ ID NO: 39069 - DNA, 25 bp, Saccharomyces pastorianus
gctttaactgcattcgccgatgata

SEQ ID NO: 39070 - DNA, 25 bp, Saccharomyces pastorianus
ttgcgatggccaagatgcgtttgat

SEQ ID NO: 39071 - DNA, 25 bp, Saccharomyces pastorianus
gaaacacaccaacaactccaagaga

SEQ ID NO: 39072 - DNA, 25 bp, Saccharomyces pastorianus
ggccaaaattgaaaaccatccttat

SEQ ID NO: 39073 - DNA, 25 bp, Saccharomyces pastorianus
gtgcaaaagagtacgccttccacac

SEQ ID NO: 39074 - DNA, 25 bp, Saccharomyces pastorianus
aattattctctttaatcgggtgtga

SEQ ID NO: 39075 - DNA, 25 bp, Saccharomyces pastorianus
tcccaattaatagacatcccgcgtt

SEQ ID NO: 39076 - DNA, 25 bp, Saccharomyces pastorianus
gatatcagtgattttcaacatccca

SEQ ID NO: 39077 - DNA, 25 bp, Saccharomyces pastorianus
ggaggacgcaaacttacctgatgaa

SEQ ID NO: 39078 - DNA, 25 bp, Saccharomyces pastorianus
gtgggacccttaatcattcatcagt

SEQ ID NO: 39079 - DNA, 25 bp, Saccharomyces pastorianus
aacttgccacagtacgtcccaatta

SEQ ID NO: 39080 - DNA, 25 bp, Saccharomyces pastorianus
tcgaagagcttatactggataccct

SEQ ID NO: 39081 - DNA, 25 bp, Saccharomyces pastorianus
ttaggtcttccttaaacagtctgat

SEQ ID NO: 39082 - DNA, 25 bp, Saccharomyces pastorianus
tggataccctctctaaactgacgca

SEQ ID NO: 39083 - DNA, 25 bp, Saccharomyces pastorianus
atcccgcgttgatcgattacatcga

SEQ ID NO: 39084 - DNA, 25 bp, Saccharomyces pastorianus
actgacgcacatatataggttttct

SEQ ID NO: 39085 - DNA, 25 bp, Saccharomyces pastorianus
gttaccagcatcgacgcatagcaag

SEQ ID NO: 39086 - DNA, 25 bp, Saccharomyces pastorianus
acaagagctgacctttgccgattca

SEQ ID NO: 39087 - DNA, 25 bp, Saccharomyces pastorianus
ctagtaccgccagatctttcagaaa

SEQ ID NO: 39088 - DNA, 25 bp, Saccharomyces pastorianus
gctgctgctgatccgctaaagatta

SEQ ID NO: 39089 - DNA, 25 bp, Saccharomyces pastorianus
tttaaacctgattgccatttggcca

SEQ ID NO: 39090 - DNA, 25 bp, Saccharomyces pastorianus
aaaactagtgccctgttaccagcat

SEQ ID NO: 39091 - DNA, 25 bp, Saccharomyces pastorianus
tatcgatgctacaaactcattcccg

SEQ ID NO: 39092 - DNA, 25 bp, Saccharomyces pastorianus
tcgcctcaacgctcacatgaattaa

SEQ ID NO: 39093 - DNA, 25 bp, Saccharomyces pastorianus
agagcttagcgccataacagtcaaa

SEQ ID NO: 39094 - DNA, 25 bp, Saccharomyces pastorianus
atttggccatcaccgacaagagctg

SEQ ID NO: 39095 - DNA, 25 bp, Saccharomyces pastorianus
gaattaacacctgtcttgatctaga

SEQ ID NO: 39096 - DNA, 25 bp, Saccharomyces pastorianus
gaatcttcacttacagctacaaggg

SEQ ID NO: 39097 - DNA, 25 bp, Saccharomyces pastorianus
aatgccgtccaagatgtcgatgaac

SEQ ID NO: 39098 - DNA, 25 bp, Saccharomyces pastorianus
atgcctcatatagacaacccttcag

SEQ ID NO: 39099 - DNA, 25 bp, Saccharomyces pastorianus
acagtcatatgcctcgatgatcacc

SEQ ID NO: 39100 - DNA, 25 bp, Saccharomyces pastorianus
atcagacgtggtgcatcagtaacaa

SEQ ID NO: 39101 - DNA, 25 bp, Saccharomyces pastorianus
aggtacccaagagagctggccaaca

SEQ ID NO: 39102 - DNA, 25 bp, Saccharomyces pastorianus
agagactaccccacaattgcaagaa

SEQ ID NO: 39103 - DNA, 25 bp, Saccharomyces pastorianus
caacccttcagacttgtcactagat

SEQ ID NO: 39104 - DNA, 25 bp, Saccharomyces pastorianus
tgaagcgaccttcccaaaacacaag

SEQ ID NO: 39105 - DNA, 25 bp, Saccharomyces pastorianus
attctttccacaccagatggcagca

SEQ ID NO: 39106 - DNA, 25 bp, Saccharomyces pastorianus
gatacgttaaacctccacagtcata

SEQ ID NO: 39107 - DNA, 25 bp, Saccharomyces pastorianus
aaaacttccatcaagacgcgactat

SEQ ID NO: 39108 - DNA, 25 bp, Saccharomyces pastorianus
gacgccgacaagctgaatgagttta

SEQ ID NO: 39109 - DNA, 25 bp, Saccharomyces pastorianus
acccttggccatcgacattatattg

SEQ ID NO: 39110 - DNA, 25 bp, Saccharomyces pastorianus
gaaagctaaacccaagcctcttgga

SEQ ID NO: 39111 - DNA, 25 bp, Saccharomyces pastorianus
atcctgggtttacattgacgccgac

SEQ ID NO: 39112 - DNA, 25 bp, Saccharomyces pastorianus
tcttggactgttccctttggtggaa

SEQ ID NO: 39113 - DNA, 25 bp, Saccharomyces pastorianus
gacgaagtagattcccacccaagaa

SEQ ID NO: 39114 - DNA, 25 bp, Saccharomyces pastorianus
aggtcatcgagaaacccttggccat

SEQ ID NO: 39115 - DNA, 25 bp, Saccharomyces pastorianus
gacgcctgcgatggacaataatgat

SEQ ID NO: 39116 - DNA, 25 bp, Saccharomyces pastorianus
gacgcgactatccagattacttcaa

SEQ ID NO: 39117 - DNA, 25 bp, Saccharomyces pastorianus
gaagaagactatcgtccccaagaaa

SEQ ID NO: 39118 - DNA, 25 bp, Saccharomyces pastorianus
aatgttctcaccacagaatactcaa

SEQ ID NO: 39119 - DNA, 25 bp, Saccharomyces pastorianus
ccctctttatttcgccaacaggtga

SEQ ID NO: 39120 - DNA, 25 bp, Saccharomyces pastorianus
tcaggaaagccctcgattgattcaa

SEQ ID NO: 39121 - DNA, 25 bp, Saccharomyces pastorianus
tcgtctgtttcgtcatctgataata

SEQ ID NO: 39122 - DNA, 25 bp, Saccharomyces pastorianus
ggtaacatcaccgatcgatttcgaa

SEQ ID NO: 39123 - DNA, 25 bp, Saccharomyces pastorianus
attcgaacagaaactccctctttat

SEQ ID NO: 39124 - DNA, 25 bp, Saccharomyces pastorianus
tttggtttctacagtctcttcatcg

SEQ ID NO: 39125 - DNA, 25 bp, Saccharomyces pastorianus
aagactctgccaacgatcattacca

SEQ ID NO: 39126 - DNA, 25 bp, Saccharomyces pastorianus
cagcgaatcctcaaattctttggtt

SEQ ID NO: 39127 - DNA, 25 bp, Saccharomyces pastorianus
gatctttgtccggattagtttcaaa

SEQ ID NO: 39128 - DNA, 25 bp, Saccharomyces pastorianus
aatactcaatactacggcgactctc

SEQ ID NO: 39129 - DNA, 25 bp, Saccharomyces pastorianus
ggaagacaccgccagatcgattaac

SEQ ID NO: 39130 - DNA, 25 bp, Saccharomyces pastorianus
actcagtcgggcgttgttgttagat

SEQ ID NO: 39131 - DNA, 25 bp, Saccharomyces pastorianus
atatctcttctctggcttctgaata

SEQ ID NO: 39132 - DNA, 25 bp, Saccharomyces pastorianus
gaattgggctgtactggatgtctaa

SEQ ID NO: 39133 - DNA, 25 bp, Saccharomyces pastorianus
gatgcgtctcttaaaagcgttaact

SEQ ID NO: 39134 - DNA, 25 bp, Saccharomyces pastorianus
aaagccgttcaggaccataatctaa

SEQ ID NO: 39135 - DNA, 25 bp, Saccharomyces pastorianus
aatcaccgttggtacccatgatgaa

SEQ ID NO: 39136 - DNA, 25 bp, Saccharomyces pastorianus
aaggcaccttacaatatctcttctc

SEQ ID NO: 39137 - DNA, 25 bp, Saccharomyces pastorianus
aaatcgtttggtctagccggcatta

SEQ ID NO: 39138 - DNA, 25 bp, Saccharomyces pastorianus
atactatcaattggccactcagtcg

SEQ ID NO: 39139 - DNA, 25 bp, Saccharomyces pastorianus
agatttctgcggtgggtctactgca

SEQ ID NO: 39140 - DNA, 25 bp, Saccharomyces pastorianus
gagcagttcttgtttttatctcatt

SEQ ID NO: 39141 - DNA, 25 bp, Saccharomyces pastorianus
tgcaaacagcactacgtcagaaatt

SEQ ID NO: 39142 - DNA, 25 bp, Saccharomyces pastorianus
aattatccaaggtttctgccgaaat

SEQ ID NO: 39143 - DNA, 25 bp, Saccharomyces pastorianus
gtttctgccgaaatcaatcatgttg

SEQ ID NO: 39144 - DNA, 25 bp, Saccharomyces pastorianus
ggcagaactgttgtcgaacatcctt

SEQ ID NO: 39145 - DNA, 25 bp, Saccharomyces pastorianus
aaatccattagtggcgaagctcgct

SEQ ID NO: 39146 - DNA, 25 bp, Saccharomyces pastorianus
cacacgtggtggattattgcaggaa

SEQ ID NO: 39147 - DNA, 25 bp, Saccharomyces pastorianus
atgaggcctcgagtgaattcgttaa

SEQ ID NO: 39148 - DNA, 25 bp, Saccharomyces pastorianus
gaagctcgctaaggaatctttcaca

SEQ ID NO: 39149 - DNA, 25 bp, Saccharomyces pastorianus
atcattggagtcatcttcttctttg

SEQ ID NO: 39150 - DNA, 25 bp, Saccharomyces pastorianus
gatctcagtacgcaccaatttaaga

SEQ ID NO: 39151 - DNA, 25 bp, Saccharomyces pastorianus
ggcgaaagcgaagacatcccagtaa

SEQ ID NO: 39152 - DNA, 25 bp, Saccharomyces pastorianus
tgttaaccgccttttatgacgacgt

SEQ ID NO: 39153 - DNA, 25 bp, Saccharomyces pastorianus
tcagctcttctacgagatgacacat

SEQ ID NO: 39154 - DNA, 25 bp, Saccharomyces pastorianus
gaatttctgttcaaatcagctcttc

SEQ ID NO: 39155 - DNA, 25 bp, Saccharomyces pastorianus
cacagctcaccacaaactgaagttc

SEQ ID NO: 39156 - DNA, 25 bp, Saccharomyces pastorianus
tatcaacctgataatctgcctgtta

SEQ ID NO: 39157 - DNA, 25 bp, Saccharomyces pastorianus
acaatactcgacatacacagctcac

SEQ ID NO: 39158 - DNA, 25 bp, Saccharomyces pastorianus
ttgtccgattataacgctagtgtat

SEQ ID NO: 39159 - DNA, 25 bp, Saccharomyces pastorianus
gaaacttaccaatccggtctgaaag

SEQ ID NO: 39160 - DNA, 25 bp, Saccharomyces pastorianus
accattgttcttatatcgggatcgt

SEQ ID NO: 39161 - DNA, 25 bp, Saccharomyces pastorianus
gcgaagaattgctcctgtcatccaa

SEQ ID NO: 39162 - DNA, 25 bp, Saccharomyces pastorianus
gtggagcttggatcgatgccattca

SEQ ID NO: 39163 - DNA, 25 bp, Saccharomyces pastorianus
gatgctactttagagcctggtgaaa

SEQ ID NO: 39164 - DNA, 25 bp, Saccharomyces pastorianus
aaatcaccattgtacggttgcagtg

SEQ ID NO: 39165 - DNA, 25 bp, Saccharomyces pastorianus
atccaaggaatctcccgttgctaaa

SEQ ID NO: 39166 - DNA, 25 bp, Saccharomyces pastorianus
ttgctaaaccatctgtaccaccaag

SEQ ID NO: 39167 - DNA, 25 bp, Saccharomyces pastorianus
gcgccgatgctggagttatagcctt

SEQ ID NO: 39168 - DNA, 25 bp, Saccharomyces pastorianus
tacgggtttgccaagaacgttcaag

SEQ ID NO: 39169 - DNA, 25 bp, Saccharomyces pastorianus
tctgttaacgcaccggagattgagt

SEQ ID NO: 39170 - DNA, 25 bp, Saccharomyces pastorianus
tagctgaattgcaaccaccgaatgg

SEQ ID NO: 39171 - DNA, 25 bp, Saccharomyces pastorianus
atataccacggttacgcactagatg

SEQ ID NO: 39172 - DNA, 25 bp, Saccharomyces pastorianus
ggtgaacattcagccattggacatg

SEQ ID NO: 39173 - DNA, 25 bp, Saccharomyces pastorianus
gttttcattggtgacggtagattcc

SEQ ID NO: 39174 - DNA, 25 bp, Saccharomyces pastorianus
gttgcatgtcctagattatccatcg

SEQ ID NO: 39175 - DNA, 25 bp, Saccharomyces pastorianus
gaagtgttgggttgtacctcagaaa

SEQ ID NO: 39176 - DNA, 25 bp, Saccharomyces pastorianus
atcccagcgtttaagtacgacccat

SEQ ID NO: 39177 - DNA, 25 bp, Saccharomyces pastorianus
gtagattccatttagagtcttcaat

SEQ ID NO: 39178 - DNA, 25 bp, Saccharomyces pastorianus
gatgctatcaatactgcccagaagg

SEQ ID NO: 39179 - DNA, 25 bp, Saccharomyces pastorianus
atactgtacattattcctcctcaaa

SEQ ID NO: 39180 - DNA, 25 bp, Saccharomyces pastorianus
tcataatccagaaatcccagcgttt

SEQ ID NO: 39181 - DNA, 25 bp, Saccharomyces pastorianus
gtattcggcctaattcttggtgcat

SEQ ID NO: 39182 - DNA, 25 bp, Saccharomyces pastorianus
tatccttagcgaagtttttccacaa

SEQ ID NO: 39183 - DNA, 25 bp, Saccharomyces pastorianus
aaccgtggtgaagattatccttagc

SEQ ID NO: 39184 - DNA, 25 bp, Saccharomyces pastorianus
gctggaagaaactagaccctgtgaa

SEQ ID NO: 39185 - DNA, 25 bp, Saccharomyces pastorianus
gggactcataagagcgatcctcaaa

SEQ ID NO: 39186 - DNA, 25 bp, Saccharomyces pastorianus
atctcacacgaggataccgacaagc

SEQ ID NO: 39187 - DNA, 25 bp, Saccharomyces pastorianus
gttgacgagatgttcgagcacactt

SEQ ID NO: 39188 - DNA, 25 bp, Saccharomyces pastorianus
atcgcccagggccagaatgttgacg

SEQ ID NO: 39189 - DNA, 25 bp, Saccharomyces pastorianus
tttgaacttgtatgtatccgactct

SEQ ID NO: 39190 - DNA, 25 bp, Saccharomyces pastorianus
aacagctgcgttctatactacaaaa

SEQ ID NO: 39191 - DNA, 25 bp, Saccharomyces pastorianus
gagcacactttcgacattatcagat

SEQ ID NO: 39192 - DNA, 25 bp, Saccharomyces pastorianus
tggtggataggtacaaccccggcaa

SEQ ID NO: 39193 - DNA, 25 bp, Saccharomyces pastorianus
gtatccgactctaaacagctgcgtt

SEQ ID NO: 39194 - DNA, 25 bp, Saccharomyces pastorianus
gagcaagagcactgcacggttacag

SEQ ID NO: 39195 - DNA, 25 bp, Saccharomyces pastorianus
tagtgtcgggacagctaaatttcga

SEQ ID NO: 39196 - DNA, 25 bp, Saccharomyces pastorianus
gcaccataatcaacaaggccatagg

SEQ ID NO: 39197 - DNA, 25 bp, Saccharomyces pastorianus
ccattccgttggacaattatgacga

SEQ ID NO: 39198 - DNA, 25 bp, Saccharomyces pastorianus
acagtttagttatttatcatccaca

SEQ ID NO: 39199 - DNA, 25 bp, Saccharomyces pastorianus
gatagctcaatcctgcaaagtatta

SEQ ID NO: 39200 - DNA, 25 bp, Saccharomyces pastorianus
ggtcatcttccgctgctattataat

SEQ ID NO: 39201 - DNA, 25 bp, Saccharomyces pastorianus
gatataaagccgttcttccaaatga

SEQ ID NO: 39202 - DNA, 25 bp, Saccharomyces pastorianus
gttcttccaaatgacaccagtccta

SEQ ID NO: 39203 - DNA, 25 bp, Saccharomyces pastorianus
accagtcctaatcaaatgtctcgaa

SEQ ID NO: 39204 - DNA, 25 bp, Saccharomyces pastorianus
tctagaacctagctggtcatcttcc

SEQ ID NO: 39205 - DNA, 25 bp, Saccharomyces pastorianus
tcagtttttccaagtatggcatggt

SEQ ID NO: 39206 - DNA, 25 bp, Saccharomyces pastorianus
cagatagcagacacactcgatgagt

SEQ ID NO: 39207 - DNA, 25 bp, Saccharomyces pastorianus
gaaatgttacaagaataccgtcgca

SEQ ID NO: 39208 - DNA, 25 bp, Saccharomyces pastorianus
gttctttaggcttgatcacattaat

SEQ ID NO: 39209 - DNA, 25 bp, Saccharomyces pastorianus
gagctctgtgttatttgtcaatttc

SEQ ID NO: 39210 - DNA, 25 bp, Saccharomyces pastorianus
gggattcacgtatagatttgcttgt

SEQ ID NO: 39211 - DNA, 25 bp, Saccharomyces pastorianus
actgtgatggagtttttcatggatc

SEQ ID NO: 39212 - DNA, 25 bp, Saccharomyces pastorianus
aagtcaatggtgtggatcgggaacc

SEQ ID NO: 39213 - DNA, 25 bp, Saccharomyces pastorianus
gaataccgtcgcaatatggaagtca

SEQ ID NO: 39214 - DNA, 25 bp, Saccharomyces pastorianus
gggagccaagcacaacagatagcag

SEQ ID NO: 39215 - DNA, 25 bp, Saccharomyces pastorianus
tcatggatctaagctgtgaaccagt

SEQ ID NO: 39216 - DNA, 25 bp, Saccharomyces pastorianus
gcgttatcatttgagcattctttca

SEQ ID NO: 39217 - DNA, 25 bp, Saccharomyces pastorianus
gtccgacttgacattcgaatccttg

SEQ ID NO: 39218 - DNA, 25 bp, Saccharomyces pastorianus
ggcgggtctcggtcatcgataaata

SEQ ID NO: 39219 - DNA, 25 bp, Saccharomyces pastorianus
gatcgtcgggttccacgataaggaa

SEQ ID NO: 39220 - DNA, 25 bp, Saccharomyces pastorianus
aattgtgcacaacgcgatcgtcggg

SEQ ID NO: 39221 - DNA, 25 bp, Saccharomyces pastorianus
aatacttcagggtcagcgcaattgt

SEQ ID NO: 39222 - DNA, 25 bp, Saccharomyces pastorianus
ggcaatttctgcaacaacagcggaa

SEQ ID NO: 39223 - DNA, 25 bp, Saccharomyces pastorianus
ggtacatacgcgaatggcgggtctc

SEQ ID NO: 39224 - DNA, 25 bp, Saccharomyces pastorianus
gaacgacgtttctttgctcaatgag

SEQ ID NO: 39225 - DNA, 25 bp, Saccharomyces pastorianus
gtgcagaatatctcaacgctgggtg

SEQ ID NO: 39226 - DNA, 25 bp, Saccharomyces pastorianus
aaatgcccgaagctactgcagttgc

SEQ ID NO: 39227 - DNA, 25 bp, Saccharomyces pastorianus
gattcatgtaatggaactgccgcca

SEQ ID NO: 39228 - DNA, 25 bp, Saccharomyces pastorianus
atctgattgtcggtttgttgccaac

SEQ ID NO: 39229 - DNA, 25 bp, Saccharomyces pastorianus
atgacagcaataatcgatccccgaa

SEQ ID NO: 39230 - DNA, 25 bp, Saccharomyces pastorianus
atcgatccccgaatagtgttcagga

SEQ ID NO: 39231 - DNA, 25 bp, Saccharomyces pastorianus
taaggaccggtcaagctcagtcatc

SEQ ID NO: 39232 - DNA, 25 bp, Saccharomyces pastorianus
gcggatcgtccttctgaaatttaca

SEQ ID NO: 39233 - DNA, 25 bp, Saccharomyces pastorianus
tatattcaaaccctctccgcagatt

SEQ ID NO: 39234 - DNA, 25 bp, Saccharomyces pastorianus
aaaccccaacattgtcaccgtatat

SEQ ID NO: 39235 - DNA, 25 bp, Saccharomyces pastorianus
gaaccaagtccacaacttcttctgg

SEQ ID NO: 39236 - DNA, 25 bp, Saccharomyces pastorianus
gatgtaactataccatcgcctcgac

SEQ ID NO: 39237 - DNA, 25 bp, Saccharomyces pastorianus
gctcagtcatccatccacgatgtaa

SEQ ID NO: 39238 - DNA, 25 bp, Saccharomyces pastorianus
gtttgttgccaactacttcagagaa

SEQ ID NO: 39239 - DNA, 25 bp, Saccharomyces pastorianus
gggccccaacaatgacaacgctgca

SEQ ID NO: 39240 - DNA, 25 bp, Saccharomyces pastorianus
gaggcccttcaggaatcaccactat

SEQ ID NO: 39241 - DNA, 25 bp, Saccharomyces pastorianus
gttcaagggtgccatgtaattaagc

SEQ ID NO: 39242 - DNA, 25 bp, Saccharomyces pastorianus
tgcttggaatggttacagtgggcta

SEQ ID NO: 39243 - DNA, 25 bp, Saccharomyces pastorianus
gggattaacgatacaaactgcttgg

SEQ ID NO: 39244 - DNA, 25 bp, Saccharomyces pastorianus
tcaccagttggctctttaccaaaga

SEQ ID NO: 39245 - DNA, 25 bp, Saccharomyces pastorianus
aattgtcaccagttggctctttacc

SEQ ID NO: 39246 - DNA, 25 bp, Saccharomyces pastorianus
gaatcaccactatttttacaagtag

SEQ ID NO: 39247 - DNA, 25 bp, Saccharomyces pastorianus
gggctagtaaagtaattgtcaccag

SEQ ID NO: 39248 - DNA, 25 bp, Saccharomyces pastorianus
catgtaattaagctgggccccaaca

SEQ ID NO: 39249 - DNA, 25 bp, Saccharomyces pastorianus
accaaagagggcagtttccaattga

SEQ ID NO: 39250 - DNA, 25 bp, Saccharomyces pastorianus
cttcttcccaaaaatccgtcattat

SEQ ID NO: 39251 - DNA, 25 bp, Saccharomyces pastorianus
gaagagctcttccaagattgtggta

SEQ ID NO: 39252 - DNA, 25 bp, Saccharomyces pastorianus
aacttgaagctgattcccgttccat

SEQ ID NO: 39253 - DNA, 25 bp, Saccharomyces pastorianus
aagattagcagaccttcttcccaaa

SEQ ID NO: 39254 - DNA, 25 bp, Saccharomyces pastorianus
cattacgctagatgttaccccggaa

SEQ ID NO: 39255 - DNA, 25 bp, Saccharomyces pastorianus
attcccttattatccacagtatcct

SEQ ID NO: 39256 - DNA, 25 bp, Saccharomyces pastorianus
atggaactatcctttaatggcctat

SEQ ID NO: 39257 - DNA, 25 bp, Saccharomyces pastorianus
ttaatggcctatccgaatcccgaca

SEQ ID NO: 39258 - DNA, 25 bp, Saccharomyces pastorianus
aaaaggataacactactctacgata

SEQ ID NO: 39259 - DNA, 25 bp, Saccharomyces pastorianus
cgttccatcttcgtaggcaacatta

SEQ ID NO: 39260 - DNA, 25 bp, Saccharomyces pastorianus
attgagttcgaaagtccagcatatc

SEQ ID NO: 39261 - DNA, 25 bp, Saccharomyces pastorianus
gtaaagtctaccagttcaacgcaag

SEQ ID NO: 39262 - DNA, 25 bp, Saccharomyces pastorianus
tatagtattacatcctgctgccgac

SEQ ID NO: 39263 - DNA, 25 bp, Saccharomyces pastorianus
aattcgcctgtgtgggacatggtat

SEQ ID NO: 39264 - DNA, 25 bp, Saccharomyces pastorianus
aagggctgaatgctccatggatttc

SEQ ID NO: 39265 - DNA, 25 bp, Saccharomyces pastorianus
catggatttccttatcattggcccc

SEQ ID NO: 39266 - DNA, 25 bp, Saccharomyces pastorianus
ggcgttgtagcatgtgggtccaata

SEQ ID NO: 39267 - DNA, 25 bp, Saccharomyces pastorianus
ggtcttttggcggtgatcaactgta

SEQ ID NO: 39268 - DNA, 25 bp, Saccharomyces pastorianus
aaaattctcgctaatggccattggt

SEQ ID NO: 39269 - DNA, 25 bp, Saccharomyces pastorianus
attagacgcctctatcgaatccatt

SEQ ID NO: 39270 - DNA, 25 bp, Saccharomyces pastorianus
ttatcctggatgactctgttacaaa

SEQ ID NO: 39271 - DNA, 25 bp, Saccharomyces pastorianus
gcatggaactgtttcactggacaac

SEQ ID NO: 39272 - DNA, 25 bp, Saccharomyces pastorianus
ccaagcggctggagatcacgcgcga

SEQ ID NO: 39273 - DNA, 25 bp, Saccharomyces pastorianus
gagaaccattgcgaaccaggatcat

SEQ ID NO: 39274 - DNA, 25 bp, Saccharomyces pastorianus
tatccgcgtaccagacaaagccgag

SEQ ID NO: 39275 - DNA, 25 bp, Saccharomyces pastorianus
cttggcgcgcaactacatcaagtcg

SEQ ID NO: 39276 - DNA, 25 bp, Saccharomyces pastorianus
aaaaagaccaagacctcgctgctgc

SEQ ID NO: 39277 - DNA, 25 bp, Saccharomyces pastorianus
ggatcatttccacagactcaactac

SEQ ID NO: 39278 - DNA, 25 bp, Saccharomyces pastorianus
gcgttttgatagtgccaccaccgag

SEQ ID NO: 39279 - DNA, 25 bp, Saccharomyces pastorianus
gatgccatcggctgttatgggcgcc

SEQ ID NO: 39280 - DNA, 25 bp, Saccharomyces pastorianus
ggtgcggcgccgtgaaacgctacaa

SEQ ID NO: 39281 - DNA, 25 bp, Saccharomyces pastorianus
tcgctgctgcccacactaaaaagaa

SEQ ID NO: 39282 - DNA, 25 bp, Saccharomyces pastorianus
acaaagccgagagcgggcgccgtaa

SEQ ID NO: 39283 - DNA, 25 bp, Saccharomyces pastorianus
aaagtagatcaatttcccctgcagt

SEQ ID NO: 39284 - DNA, 25 bp, Saccharomyces pastorianus
aagcaaactgttcgcatttcttcat

SEQ ID NO: 39285 - DNA, 25 bp, Saccharomyces pastorianus
attgcgcacgatccgccgagtaagg

SEQ ID NO: 39286 - DNA, 25 bp, Saccharomyces pastorianus
agagcagccaattctcaccgtatta

SEQ ID NO: 39287 - DNA, 25 bp, Saccharomyces pastorianus
gtaaatgggtcattcctgctatcca

SEQ ID NO: 39288 - DNA, 25 bp, Saccharomyces pastorianus
tcctgctatccacttgcaaactagt

SEQ ID NO: 39289 - DNA, 25 bp, Saccharomyces pastorianus
gttgatttcgacaatcctgcctata

SEQ ID NO: 39290 - DNA, 25 bp, Saccharomyces pastorianus
agtctatcaagttggacccatccgg

SEQ ID NO: 39291 - DNA, 25 bp, Saccharomyces pastorianus
attggcactatccacatctttcatt

SEQ ID NO: 39292 - DNA, 25 bp, Saccharomyces pastorianus
ggtatccaacgctgatatgttcaaa

SEQ ID NO: 39293 - DNA, 25 bp, Saccharomyces pastorianus
gtaaattttcgtgtccaggctgttc

SEQ ID NO: 39294 - DNA, 25 bp, Saccharomyces pastorianus
tacttccccatcacagattgacggt

SEQ ID NO: 39295 - DNA, 25 bp, Saccharomyces pastorianus
atccgatactccgattgttggtttg

SEQ ID NO: 39296 - DNA, 25 bp, Saccharomyces pastorianus
ttcctctcctggttggcgacaaagg

SEQ ID NO: 39297 - DNA, 25 bp, Saccharomyces pastorianus
gaaaagcttggttccgagattgtaa

SEQ ID NO: 39298 - DNA, 25 bp, Saccharomyces pastorianus
gttgcgcagggttttcaggattaca

SEQ ID NO: 39299 - DNA, 25 bp, Saccharomyces pastorianus
atgcagagtatggaggcctgtcttc

SEQ ID NO: 39300 - DNA, 25 bp, Saccharomyces pastorianus
gggacggtgtcaactgatttacaag

SEQ ID NO: 39301 - DNA, 25 bp, Saccharomyces pastorianus
gtttctctgatcatcctttggtaac

SEQ ID NO: 39302 - DNA, 25 bp, Saccharomyces pastorianus
gcatagtccggagaatttccagcaa

SEQ ID NO: 39303 - DNA, 25 bp, Saccharomyces pastorianus
aagtgctcgatctgcatagtccgga

SEQ ID NO: 39304 - DNA, 25 bp, Saccharomyces pastorianus
gtcagctattttacagggccggata

SEQ ID NO: 39305 - DNA, 25 bp, Saccharomyces pastorianus
atgtgaacttcttcagcgtcgtggc

SEQ ID NO: 39306 - DNA, 25 bp, Saccharomyces pastorianus
gtgaaggccgttacgcagtccagca

SEQ ID NO: 39307 - DNA, 25 bp, Saccharomyces pastorianus
caacatcgtctttgttggctctgga

SEQ ID NO: 39308 - DNA, 25 bp, Saccharomyces pastorianus
ttaccatggacatcgccagcgagga

SEQ ID NO: 39309 - DNA, 25 bp, Saccharomyces pastorianus
aagcacggccggttagacagcgtca

SEQ ID NO: 39310 - DNA, 25 bp, Saccharomyces pastorianus
ttgtgcctgccgctgttgaagacct

SEQ ID NO: 39311 - DNA, 25 bp, Saccharomyces pastorianus
acagacaggtctcaagtgcaggctc

SEQ ID NO: 39312 - DNA, 25 bp, Saccharomyces pastorianus
agcgtcatcgcgaatgccggaatac

SEQ ID NO: 39313 - DNA, 25 bp, Saccharomyces pastorianus
aaggctgcactgaaccactttacca

SEQ ID NO: 39314 - DNA, 25 bp, Saccharomyces pastorianus
gaatttccgatgctctgaacggcca

SEQ ID NO: 39315 - DNA, 25 bp, Saccharomyces pastorianus
tggagaggttcacccggttgtacaa

SEQ ID NO: 39316 - DNA, 25 bp, Saccharomyces pastorianus
tgcagccacctttgatgatcgagtt

SEQ ID NO: 39317 - DNA, 25 bp, Saccharomyces pastorianus
tacggtgaaggttcgttgcagccac

SEQ ID NO: 39318 - DNA, 25 bp, Saccharomyces pastorianus
agagatgcaaactttcgtgctcctc

SEQ ID NO: 39319 - DNA, 25 bp, Saccharomyces pastorianus
agcggagattctgatattgccgatc

SEQ ID NO: 39320 - DNA, 25 bp, Saccharomyces pastorianus
gcagacaagattagccaggcctatt

SEQ ID NO: 39321 - DNA, 25 bp, Saccharomyces pastorianus
gaggactatcccgttattgcaaagt

SEQ ID NO: 39322 - DNA, 25 bp, Saccharomyces pastorianus
gagtccggtttcattttccagtacg

SEQ ID NO: 39323 - DNA, 25 bp, Saccharomyces pastorianus
cctttccctatttcatacttggcag

SEQ ID NO: 39324 - DNA, 25 bp, Saccharomyces pastorianus
gatcgagttcgttctgtcaaaggtc

SEQ ID NO: 39325 - DNA, 25 bp, Saccharomyces pastorianus
gaacaacggctacttggccgacgga

SEQ ID NO: 39326 - DNA, 25 bp, Saccharomyces pastorianus
gaaaaaggtgcttgccgagtccggt

SEQ ID NO: 39327 - DNA, 25 bp, Saccharomyces pastorianus
aaattaattgttgccgagtcaccaa

SEQ ID NO: 39328 - DNA, 25 bp, Saccharomyces pastorianus
caatagggactactgggcgcatttg

SEQ ID NO: 39329 - DNA, 25 bp, Saccharomyces pastorianus
gagacttttcgaacgctgcgatcaa

SEQ ID NO: 39330 - DNA, 25 bp, Saccharomyces pastorianus
gtcagggtacgatcgtggccatcaa

SEQ ID NO: 39331 - DNA, 25 bp, Saccharomyces pastorianus
gcaaaattttctcagcaagctatgg

SEQ ID NO: 39332 - DNA, 25 bp, Saccharomyces pastorianus
attttgaagttcctctagacgcgct

SEQ ID NO: 39333 - DNA, 25 bp, Saccharomyces pastorianus
ggagctggcttcaatagggactact

SEQ ID NO: 39334 - DNA, 25 bp, Saccharomyces pastorianus
gctgtcgctgcgtttgtattaccaa

SEQ ID NO: 39335 - DNA, 25 bp, Saccharomyces pastorianus
agagacgatattgctgtcgctgcgt

SEQ ID NO: 39336 - DNA, 25 bp, Saccharomyces pastorianus
tgaagtgattggcaacccacccagc

SEQ ID NO: 39337 - DNA, 25 bp, Saccharomyces pastorianus
tacgggcccgttatatctgccaaaa

SEQ ID NO: 39338 - DNA, 25 bp, Saccharomyces pastorianus
gtcagggttattgtctactattgca

SEQ ID NO: 39339 - DNA, 25 bp, Saccharomyces pastorianus
aggcgcgtttggatcttcaggtcaa

SEQ ID NO: 39340 - DNA, 25 bp, Saccharomyces pastorianus
taacgttaccgccatttctaaagtg

SEQ ID NO: 39341 - DNA, 25 bp, Saccharomyces pastorianus
tatcctggtctttggctgtgcatta

SEQ ID NO: 39342 - DNA, 25 bp, Saccharomyces pastorianus
gaatgctttcccatggtcaattgtc

SEQ ID NO: 39343 - DNA, 25 bp, Saccharomyces pastorianus
tagtcgtgggtacctttgtttcaca

SEQ ID NO: 39344 - DNA, 25 bp, Saccharomyces pastorianus
caattttggccttcctgtgtattat

SEQ ID NO: 39345 - DNA, 25 bp, Saccharomyces pastorianus
gaaagccgtctcatcgtcagggtta

SEQ ID NO: 39346 - DNA, 25 bp, Saccharomyces pastorianus
ttgtttcacatacagtctccgctat

SEQ ID NO: 39347 - DNA, 25 bp, Saccharomyces pastorianus
aattgccatcatcccgattgttttg

SEQ ID NO: 39348 - DNA, 25 bp, Saccharomyces pastorianus
gaggtgtcccagcttcaattttggc

SEQ ID NO: 39349 - DNA, 25 bp, Saccharomyces pastorianus
ttaacgccaacgacatcaccagtaa

SEQ ID NO: 39350 - DNA, 25 bp, Saccharomyces pastorianus
ttgtactatcatccaatcgcttagg

SEQ ID NO: 39351 - DNA, 25 bp, Saccharomyces pastorianus
agaaacatgcggtctagtctccatc

SEQ ID NO: 39352 - DNA, 25 bp, Saccharomyces pastorianus
agttggaaaaccgattgctgctctc

SEQ ID NO: 39353 - DNA, 25 bp, Saccharomyces pastorianus
gtaaagcaaccatcgtctcaatcac

SEQ ID NO: 39354 - DNA, 25 bp, Saccharomyces pastorianus
actctagccccgttgcaaagaaatg

SEQ ID NO: 39355 - DNA, 25 bp, Saccharomyces pastorianus
agcatcatcttccaaccaatggcaa

SEQ ID NO: 39356 - DNA, 25 bp, Saccharomyces pastorianus
gtaacactggcgacctgaggaagct

SEQ ID NO: 39357 - DNA, 25 bp, Saccharomyces pastorianus
aattaagcagtctacccagcatcat

SEQ ID NO: 39358 - DNA, 25 bp, Saccharomyces pastorianus
tcgatgagcaagtccatgaggtcta

SEQ ID NO: 39359 - DNA, 25 bp, Saccharomyces pastorianus
gtctaagcaggtaccgttaacgcca

SEQ ID NO: 39360 - DNA, 25 bp, Saccharomyces pastorianus
gttggtagcatcttgaattcacgtt

SEQ ID NO: 39361 - DNA, 25 bp, Saccharomyces pastorianus
gaatgtcagtatcttttccacaggt

SEQ ID NO: 39362 - DNA, 25 bp, Saccharomyces pastorianus
gtagacccttacattcaagtggaaa

SEQ ID NO: 39363 - DNA, 25 bp, Saccharomyces pastorianus
cagatcggtaatttctcaacggaat

SEQ ID NO: 39364 - DNA, 25 bp, Saccharomyces pastorianus
ttatgttatgtatccagcatccatg

SEQ ID NO: 39365 - DNA, 25 bp, Saccharomyces pastorianus
aacggaatacccttacacagctact

SEQ ID NO: 39366 - DNA, 25 bp, Saccharomyces pastorianus
ggaaattggcaggtgtcattacatt

SEQ ID NO: 39367 - DNA, 25 bp, Saccharomyces pastorianus
ggcacattgcaattgaacgcattca

SEQ ID NO: 39368 - DNA, 25 bp, Saccharomyces pastorianus
cacagctactactacctttcaagat

SEQ ID NO: 39369 - DNA, 25 bp, Saccharomyces pastorianus
tggacccagaaactgcacgagccat

SEQ ID NO: 39370 - DNA, 25 bp, Saccharomyces pastorianus
gtcattacattaatcgcccttgtca

SEQ ID NO: 39371 - DNA, 25 bp, Saccharomyces pastorianus
acaggccccagtgaccatgtactga

SEQ ID NO: 39372 - DNA, 25 bp, Saccharomyces pastorianus
cttgaccacagagggcagaaccaca

SEQ ID NO: 39373 - DNA, 25 bp, Saccharomyces pastorianus
gacgggtctacaggacgacatcaat

SEQ ID NO: 39374 - DNA, 25 bp, Saccharomyces pastorianus
gacgacccgaggtacttgaccacag

SEQ ID NO: 39375 - DNA, 25 bp, Saccharomyces pastorianus
ggaagagatcaaccagctgctggac

SEQ ID NO: 39376 - DNA, 25 bp, Saccharomyces pastorianus
tgacgtacttgggtcagctgcgtac

SEQ ID NO: 39377 - DNA, 25 bp, Saccharomyces pastorianus
agagttttgtgccaatacccgacga

SEQ ID NO: 39378 - DNA, 25 bp, Saccharomyces pastorianus
caagagggtacagggcggaacacaa

SEQ ID NO: 39379 - DNA, 25 bp, Saccharomyces pastorianus
cagagtatagtgcaccagacggtgt

SEQ ID NO: 39380 - DNA, 25 bp, Saccharomyces pastorianus
gagacaagccctcagaacccaagag

SEQ ID NO: 39381 - DNA, 25 bp, Saccharomyces pastorianus
gaccatgtactgaacgctggacaaa

SEQ ID NO: 39382 - DNA, 25 bp, Saccharomyces pastorianus
cgatctcggcatcggcatcaattag

SEQ ID NO: 39383 - DNA, 25 bp, Saccharomyces pastorianus
taaatttttcgcgtctttcgtgcca

SEQ ID NO: 39384 - DNA, 25 bp, Saccharomyces pastorianus
aaaaggcatcgatctcggcatcggc

SEQ ID NO: 39385 - DNA, 25 bp, Saccharomyces pastorianus
ggaaaacggtctcgcaatctcaacg

SEQ ID NO: 39386 - DNA, 25 bp, Saccharomyces pastorianus
gagcaccacccgatgatttaagcaa

SEQ ID NO: 39387 - DNA, 25 bp, Saccharomyces pastorianus
aaaccattaatgcttcagatatcaa

SEQ ID NO: 39388 - DNA, 25 bp, Saccharomyces pastorianus
aagatttatcgagagcaccacccga

SEQ ID NO: 39389 - DNA, 25 bp, Saccharomyces pastorianus
gaaacaatccgcaaagtaagcagtt

SEQ ID NO: 39390 - DNA, 25 bp, Saccharomyces pastorianus
cgcgtctttcgtgccaaatctaata

SEQ ID NO: 39391 - DNA, 25 bp, Saccharomyces pastorianus
agctaaagaggccaagcgtttgaaa

SEQ ID NO: 39392 - DNA, 25 bp, Saccharomyces pastorianus
aatctcaacgattggagcacagctg

SEQ ID NO: 39393 - DNA, 25 bp, Saccharomyces pastorianus
tgctgatggtgctggccgtgttcat

SEQ ID NO: 39394 - DNA, 25 bp, Saccharomyces pastorianus
tggatagagaccaccgcgacggaga

SEQ ID NO: 39395 - DNA, 25 bp, Saccharomyces pastorianus
tcaagcccaggctcaaggccagatt

SEQ ID NO: 39396 - DNA, 25 bp, Saccharomyces pastorianus
acgcctgctacgtggtgtatgagac

SEQ ID NO: 39397 - DNA, 25 bp, Saccharomyces pastorianus
ggcgtattcgatagggacacgttac

SEQ ID NO: 39398 - DNA, 25 bp, Saccharomyces pastorianus
tatgagaccagtgacgagcgcacct

SEQ ID NO: 39399 - DNA, 25 bp, Saccharomyces pastorianus
tagaggcgcaccctcaggaggaact

SEQ ID NO: 39400 - DNA, 25 bp, Saccharomyces pastorianus
ggagaccgaatgagatattccatca

SEQ ID NO: 39401 - DNA, 25 bp, Saccharomyces pastorianus
aggaactccccgaagaagctcaagc

SEQ ID NO: 39402 - DNA, 25 bp, Saccharomyces pastorianus
acgtggccgcgatctagaggcgcac

SEQ ID NO: 39403 - DNA, 25 bp, Saccharomyces pastorianus
gacacgttactgaacctgctgctgt

SEQ ID NO: 39404 - DNA, 25 bp, Saccharomyces pastorianus
gtttggctgggtgtatgacctcatc

SEQ ID NO: 39405 - DNA, 25 bp, Saccharomyces pastorianus
gaaagccgtgacttggaacttgtac

SEQ ID NO: 39406 - DNA, 25 bp, Saccharomyces pastorianus
atttgtgcgttacagaatcggcctc

SEQ ID NO: 39407 - DNA, 25 bp, Saccharomyces pastorianus
gttcaatccattgagttgcgcctac

SEQ ID NO: 39408 - DNA, 25 bp, Saccharomyces pastorianus
agaccgtcattgctattttccagaa

SEQ ID NO: 39409 - DNA, 25 bp, Saccharomyces pastorianus
acaattcttatatgacccaggtcca

SEQ ID NO: 39410 - DNA, 25 bp, Saccharomyces pastorianus
gaagttcacaacacagagctgcaaa

SEQ ID NO: 39411 - DNA, 25 bp, Saccharomyces pastorianus
gtattttgtcaacgttcccaccgtg

SEQ ID NO: 39412 - DNA, 25 bp, Saccharomyces pastorianus
aaagcgttggcgttttgacattcga

SEQ ID NO: 39413 - DNA, 25 bp, Saccharomyces pastorianus
aggtccatgactataagggcgtttc

SEQ ID NO: 39414 - DNA, 25 bp, Saccharomyces pastorianus
atactatccggaactgctgtacgca

SEQ ID NO: 39415 - DNA, 25 bp, Saccharomyces pastorianus
ttgcacaaaatatctccgcttatgg

SEQ ID NO: 39416 - DNA, 25 bp, Saccharomyces pastorianus
gggatctacacaacgaacaccactt

SEQ ID NO: 39417 - DNA, 25 bp, Saccharomyces pastorianus
actgctgatactcaaagtgccttca

SEQ ID NO: 39418 - DNA, 25 bp, Saccharomyces pastorianus
gagtaattatttcacacgcttgcaa

SEQ ID NO: 39419 - DNA, 25 bp, Saccharomyces pastorianus
gcgatgagctttttccagcagcata

SEQ ID NO: 39420 - DNA, 25 bp, Saccharomyces pastorianus
atcaacctagttcatttcatcggaa

SEQ ID NO: 39421 - DNA, 25 bp, Saccharomyces pastorianus
tttcaatcaatttttcaaccccgca

SEQ ID NO: 39422 - DNA, 25 bp, Saccharomyces pastorianus
ggaacgttcaaaccgtggtcacata

SEQ ID NO: 39423 - DNA, 25 bp, Saccharomyces pastorianus
aaacagatttccatcacgaggctcc

SEQ ID NO: 39424 - DNA, 25 bp, Saccharomyces pastorianus
aggtaggtcctaatgctgcacaaaa

SEQ ID NO: 39425 - DNA, 25 bp, Saccharomyces pastorianus
agtggatacgacttccgttcatcta

SEQ ID NO: 39426 - DNA, 25 bp, Saccharomyces pastorianus
gtcgatttgggcgtgattccttcaa

SEQ ID NO: 39427 - DNA, 25 bp, Saccharomyces pastorianus
ttacaggattcgtcaaccccaaaat

SEQ ID NO: 39428 - DNA, 25 bp, Saccharomyces pastorianus
aagtaccttgtgctcataaaccctg

SEQ ID NO: 39429 - DNA, 25 bp, Saccharomyces pastorianus
gttggtacccactcaggaactattc

SEQ ID NO: 39430 - DNA, 25 bp, Saccharomyces pastorianus
cttggcattttggtggctacgattt

SEQ ID NO: 39431 - DNA, 25 bp, Saccharomyces pastorianus
gagcatggcatgttcggttcagcga

SEQ ID NO: 39432 - DNA, 25 bp, Saccharomyces pastorianus
acctatgttcgatgccgtctttata

SEQ ID NO: 39433 - DNA, 25 bp, Saccharomyces pastorianus
gttcagcgatacattcttggcattt

SEQ ID NO: 39434 - DNA, 25 bp, Saccharomyces pastorianus
tgtagccatttctcaacctatgttc

SEQ ID NO: 39435 - DNA, 25 bp, Saccharomyces pastorianus
agaccatcttgtagtaggcatccct

SEQ ID NO: 39436 - DNA, 25 bp, Saccharomyces pastorianus
caatgggtttggtacttccttgttg

SEQ ID NO: 39437 - DNA, 25 bp, Saccharomyces pastorianus
actagttgaaagtcgtgtggcttta

SEQ ID NO: 39438 - DNA, 25 bp, Saccharomyces pastorianus
gatgtgaagccatatgacaacgata

SEQ ID NO: 39439 - DNA, 25 bp, Saccharomyces pastorianus
aatagtaggcagcatcgctacaaaa

SEQ ID NO: 39440 - DNA, 25 bp, Saccharomyces pastorianus
gttttgaagagctggaccgcgttca

SEQ ID NO: 39441 - DNA, 25 bp, Saccharomyces pastorianus
gaatatgccaatgagcctataatag

SEQ ID NO: 39442 - DNA, 25 bp, Saccharomyces pastorianus
gtcggcttaagtgtcgtcaacgttg

SEQ ID NO: 39443 - DNA, 25 bp, Saccharomyces pastorianus
taggctaccaaaatctgtattgcaa

SEQ ID NO: 39444 - DNA, 25 bp, Saccharomyces pastorianus
gagtgacgatttacgaaggcagaaa

SEQ ID NO: 39445 - DNA, 25 bp, Saccharomyces pastorianus
gaccgcgttcaggaagatggcacaa

SEQ ID NO: 39446 - DNA, 25 bp, Saccharomyces pastorianus
aaagggctgatgttttggagacatt

SEQ ID NO: 39447 - DNA, 25 bp, Saccharomyces pastorianus
gtaaggtaacgctatatcttgatga

SEQ ID NO: 39448 - DNA, 25 bp, Saccharomyces pastorianus
gaacatatcgaccacattgaggact

SEQ ID NO: 39449 - DNA, 25 bp, Saccharomyces pastorianus
ggctatccgaacactaatcaatcat

SEQ ID NO: 39450 - DNA, 25 bp, Saccharomyces pastorianus
tccagaggcccaacttcaatgtatt

SEQ ID NO: 39451 - DNA, 25 bp, Saccharomyces pastorianus
gaggtctgccatattctttggatcg

SEQ ID NO: 39452 - DNA, 25 bp, Saccharomyces pastorianus
tttctcggcctatttatcatctgta

SEQ ID NO: 39453 - DNA, 25 bp, Saccharomyces pastorianus
gaagcaggccagaaccgatacggat

SEQ ID NO: 39454 - DNA, 25 bp, Saccharomyces pastorianus
caaggcagctaaccacattatccaa

SEQ ID NO: 39455 - DNA, 25 bp, Saccharomyces pastorianus
agcgcatatggtacagtcggactat

SEQ ID NO: 39456 - DNA, 25 bp, Saccharomyces pastorianus
attcttttcgagatcgttagcgcat

SEQ ID NO: 39457 - DNA, 25 bp, Saccharomyces pastorianus
ttatggtttttgtttctcggcctat

SEQ ID NO: 39458 - DNA, 25 bp, Saccharomyces pastorianus
aagtccttcattggtgcgcatttaa

SEQ ID NO: 39459 - DNA, 25 bp, Saccharomyces pastorianus
taatgctttaaatagtgccacagaa

SEQ ID NO: 39460 - DNA, 25 bp, Saccharomyces pastorianus
aatgcaaattgggtctgaacgttat

SEQ ID NO: 39461 - DNA, 25 bp, Saccharomyces pastorianus
atttgggtacctgtgagttgttcga

SEQ ID NO: 39462 - DNA, 25 bp, Saccharomyces pastorianus
atcatgattgtcaagagagctctac

SEQ ID NO: 39463 - DNA, 25 bp, Saccharomyces pastorianus
gagagctctacaaaacaaactggtt

SEQ ID NO: 39464 - DNA, 25 bp, Saccharomyces pastorianus
tggaaagatctttacatgacgcaat

SEQ ID NO: 39465 - DNA, 25 bp, Saccharomyces pastorianus
agacaactttgtgaaaacgctgggt

SEQ ID NO: 39466 - DNA, 25 bp, Saccharomyces pastorianus
gtttgtatgggaacctgctctagta

SEQ ID NO: 39467 - DNA, 25 bp, Saccharomyces pastorianus
atgcattcgccaaggccttagaagt

SEQ ID NO: 39468 - DNA, 25 bp, Saccharomyces pastorianus
ttgcaggtggtggtgctctagaaat

SEQ ID NO: 39469 - DNA, 25 bp, Saccharomyces pastorianus
aaaacgctgggttcgatgcgataga

SEQ ID NO: 39470 - DNA, 25 bp, Saccharomyces pastorianus
gcattctgacattttctgacgacat

SEQ ID NO: 39471 - DNA, 25 bp, Saccharomyces pastorianus
gaaaatatgaagacggcccaccaca

SEQ ID NO: 39472 - DNA, 25 bp, Saccharomyces pastorianus
aattacgatttgctttccacgtgtg

SEQ ID NO: 39473 - DNA, 25 bp, Saccharomyces pastorianus
tttgatcgtcgatagcattctgaca

SEQ ID NO: 39474 - DNA, 25 bp, Saccharomyces pastorianus
gagttcagaccttttgaagtccaac

SEQ ID NO: 39475 - DNA, 25 bp, Saccharomyces pastorianus
ttcagagaacggtattttccctcaa

SEQ ID NO: 39476 - DNA, 25 bp, Saccharomyces pastorianus
tggattttgaaaacgccgcatactc

SEQ ID NO: 39477 - DNA, 25 bp, Saccharomyces pastorianus
attttccctcaattcattacaccaa

SEQ ID NO: 39478 - DNA, 25 bp, Saccharomyces pastorianus
gggatgctgtcctgaatgaaaattt

SEQ ID NO: 39479 - DNA, 25 bp, Saccharomyces pastorianus
gaattgaaacactcttcccaacata

SEQ ID NO: 39480 - DNA, 25 bp, Saccharomyces pastorianus
acgccgcatactccatgtttatata

SEQ ID NO: 39481 - DNA, 25 bp, Saccharomyces pastorianus
gattggtcagccatcattcttctac

SEQ ID NO: 39482 - DNA, 25 bp, Saccharomyces pastorianus
gtcttgtaccctacaggagttgcta

SEQ ID NO: 39483 - DNA, 25 bp, Saccharomyces pastorianus
tattgggaattgtgcgctctccatt

SEQ ID NO: 39484 - DNA, 25 bp, Saccharomyces pastorianus
ggcttcccagtgttattcttacata

SEQ ID NO: 39485 - DNA, 25 bp, Saccharomyces pastorianus
tatttactgtgctctgaacgctgcc

SEQ ID NO: 39486 - DNA, 25 bp, Saccharomyces pastorianus
ggtcgtttctctctatccaaagatt

SEQ ID NO: 39487 - DNA, 25 bp, Saccharomyces pastorianus
actgttgctcaagtgtcttctagat

SEQ ID NO: 39488 - DNA, 25 bp, Saccharomyces pastorianus
ggtcgtatttgctttactcggtcgt

SEQ ID NO: 39489 - DNA, 25 bp, Saccharomyces pastorianus
atgatagcttatatccctggcttcc

SEQ ID NO: 39490 - DNA, 25 bp, Saccharomyces pastorianus
aatactagcggcgttcaatcgattg

SEQ ID NO: 39491 - DNA, 25 bp, Saccharomyces pastorianus
gtacatctcgttattgctggcatgg

SEQ ID NO: 39492 - DNA, 25 bp, Saccharomyces pastorianus
gacatgatagtccatttttcaccga

SEQ ID NO: 39493 - DNA, 25 bp, Saccharomyces pastorianus
caattctctcccctcttaagaagta

SEQ ID NO: 39494 - DNA, 25 bp, Saccharomyces pastorianus
gatatcacagctccgtatgcaagaa

SEQ ID NO: 39495 - DNA, 25 bp, Saccharomyces pastorianus
atgatgttactacgcagggctccgg

SEQ ID NO: 39496 - DNA, 25 bp, Saccharomyces pastorianus
agtgtgcaagacaacctgccatcca

SEQ ID NO: 39497 - DNA, 25 bp, Saccharomyces pastorianus
tgcatggcatccttcacagtatgac

SEQ ID NO: 39498 - DNA, 25 bp, Saccharomyces pastorianus
tcaacttgcttgaaccctcggtaga

SEQ ID NO: 39499 - DNA, 25 bp, Saccharomyces pastorianus
gcatcggccagatcttcttttgatt

SEQ ID NO: 39500 - DNA, 25 bp, Saccharomyces pastorianus
gacaccacggttgatatcacagctc

SEQ ID NO: 39501 - DNA, 25 bp, Saccharomyces pastorianus
gggcctaatgattcctttgtcaact

SEQ ID NO: 39502 - DNA, 25 bp, Saccharomyces pastorianus
gaatgacgactcctttttagggcct

SEQ ID NO: 39503 - DNA, 25 bp, Saccharomyces pastorianus
aagacaatggcctttccgagtcaac

SEQ ID NO: 39504 - DNA, 25 bp, Saccharomyces pastorianus
agattcttggagtagcacctggtgc

SEQ ID NO: 39505 - DNA, 25 bp, Saccharomyces pastorianus
ggagttagccataaccctcaaaagg

SEQ ID NO: 39506 - DNA, 25 bp, Saccharomyces pastorianus
atgtcccaaatcaatgaggcctacg

SEQ ID NO: 39507 - DNA, 25 bp, Saccharomyces pastorianus
gaggcctacgaaacgcttagtgatg

SEQ ID NO: 39508 - DNA, 25 bp, Saccharomyces pastorianus
tatgatttctccagatccaatcctc

SEQ ID NO: 39509 - DNA, 25 bp, Saccharomyces pastorianus
aagcatcggaatttcaaccagcaat

SEQ ID NO: 39510 - DNA, 25 bp, Saccharomyces pastorianus
taagtctaaaccacattctcagcct

SEQ ID NO: 39511 - DNA, 25 bp, Saccharomyces pastorianus
gaaaagcgtacctgaatctgaccaa

SEQ ID NO: 39512 - DNA, 25 bp, Saccharomyces pastorianus
acattcgcccaaggacctagacaga

SEQ ID NO: 39513 - DNA, 25 bp, Saccharomyces pastorianus
gatccaatcctcgtcgaaacacatt

SEQ ID NO: 39514 - DNA, 25 bp, Saccharomyces pastorianus
agtcagacaagtcgcattcccgtgg

SEQ ID NO: 39515 - DNA, 25 bp, Saccharomyces pastorianus
aaatcgtcggtagggcacagtccat

SEQ ID NO: 39516 - DNA, 25 bp, Saccharomyces pastorianus
ttgagctgggacgacttgcatttga

SEQ ID NO: 39517 - DNA, 25 bp, Saccharomyces pastorianus
caagggttccaagcctcaggtgaat

SEQ ID NO: 39518 - DNA, 25 bp, Saccharomyces pastorianus
gcacagtccatcaacactactaggg

SEQ ID NO: 39519 - DNA, 25 bp, Saccharomyces pastorianus
aatttactacgacgacggcaccgtg

SEQ ID NO: 39520 - DNA, 25 bp, Saccharomyces pastorianus
gggactccagtgattcaaaacctaa

SEQ ID NO: 39521 - DNA, 25 bp, Saccharomyces pastorianus
taaagggccagtccgcgtggacaac

SEQ ID NO: 39522 - DNA, 25 bp, Saccharomyces pastorianus
tcaggaattccgaccgtgaagcagt

SEQ ID NO: 39523 - DNA, 25 bp, Saccharomyces pastorianus
gcatttggaagtgcctagtccccgg

SEQ ID NO: 39524 - DNA, 25 bp, Saccharomyces pastorianus
gtgggctgttcttcaacgacttcaa

SEQ ID NO: 39525 - DNA, 25 bp, Saccharomyces pastorianus
ggctcacggtgctgctgggcatcac

SEQ ID NO: 39526 - DNA, 25 bp, Saccharomyces pastorianus
gctcgcaaacccttctttaagggca

SEQ ID NO: 39527 - DNA, 25 bp, Saccharomyces pastorianus
actactatacatacagcttcctgca

SEQ ID NO: 39528 - DNA, 25 bp, Saccharomyces pastorianus
gatgacgcccgccatgatccgggct

SEQ ID NO: 39529 - DNA, 25 bp, Saccharomyces pastorianus
tttaagggcaatctgctcgggctca

SEQ ID NO: 39530 - DNA, 25 bp, Saccharomyces pastorianus
gggttccgtctactactatacatac

SEQ ID NO: 39531 - DNA, 25 bp, Saccharomyces pastorianus
atacagcttcctgcacaaggacaac

SEQ ID NO: 39532 - DNA, 25 bp, Saccharomyces pastorianus
tgggcatcacgggttccgtctacta

SEQ ID NO: 39533 - DNA, 25 bp, Saccharomyces pastorianus
atcgacgcgaaggagctcgaggctc

SEQ ID NO: 39534 - DNA, 25 bp, Saccharomyces pastorianus
atgatccgggctcgcaaacccttct

SEQ ID NO: 39535 - DNA, 25 bp, Saccharomyces pastorianus
agggcaatctgctcgggctcacggt

SEQ ID NO: 39536 - DNA, 25 bp, Saccharomyces pastorianus
gaggtaccaccggtttgatgggcaa

SEQ ID NO: 39537 - DNA, 25 bp, Saccharomyces pastorianus
tgggcgcccttttctataagcttgg

SEQ ID NO: 39538 - DNA, 25 bp, Saccharomyces pastorianus
acgggttttatgaccaactgctgca

SEQ ID NO: 39539 - DNA, 25 bp, Saccharomyces pastorianus
aagccgatcatcttgttcaacattg

SEQ ID NO: 39540 - DNA, 25 bp, Saccharomyces pastorianus
acgtggtcgcagttgggcattcaca

SEQ ID NO: 39541 - DNA, 25 bp, Saccharomyces pastorianus
gatgcgctcgtgtccaaggagagaa

SEQ ID NO: 39542 - DNA, 25 bp, Saccharomyces pastorianus
ttgagcgacgcgtttgtggccatgc

SEQ ID NO: 39543 - DNA, 25 bp, Saccharomyces pastorianus
gaacgggcaagtacacggcatcatc

SEQ ID NO: 39544 - DNA, 25 bp, Saccharomyces pastorianus
ggaaatcgtgcaggtcgcatcgacc

SEQ ID NO: 39545 - DNA, 25 bp, Saccharomyces pastorianus
aaagatatgtcgtccctgaaggccg

SEQ ID NO: 39546 - DNA, 25 bp, Saccharomyces pastorianus
gggagaccacgattgtgccagacat

SEQ ID NO: 39547 - DNA, 25 bp, Saccharomyces pastorianus
gaatttaccggttctaccagaagcg

SEQ ID NO: 39548 - DNA, 25 bp, Saccharomyces pastorianus
cgacacaaatatccctcttttcata

SEQ ID NO: 39549 - DNA, 25 bp, Saccharomyces pastorianus
aacgctacagaggagtcgcaacttt

SEQ ID NO: 39550 - DNA, 25 bp, Saccharomyces pastorianus
aggactggcctcaaaactggatcaa

SEQ ID NO: 39551 - DNA, 25 bp, Saccharomyces pastorianus
gaacgatgctgatcctgcagagacg

SEQ ID NO: 39552 - DNA, 25 bp, Saccharomyces pastorianus
gcgatcctagagtcacagagcacat

SEQ ID NO: 39553 - DNA, 25 bp, Saccharomyces pastorianus
gttgaggctacggaacccaggataa

SEQ ID NO: 39554 - DNA, 25 bp, Saccharomyces pastorianus
ggattcactacgattcccacaagaa

SEQ ID NO: 39555 - DNA, 25 bp, Saccharomyces pastorianus
ttttaaagcctttcatcaccccaga

SEQ ID NO: 39556 - DNA, 25 bp, Saccharomyces pastorianus
gtcatccccatacccaatttaatag

SEQ ID NO: 39557 - DNA, 25 bp, Saccharomyces pastorianus
agttgcaaatcgctccggaattaca

SEQ ID NO: 39558 - DNA, 25 bp, Saccharomyces pastorianus
atcaaagagggacacgatcgtacag

SEQ ID NO: 39559 - DNA, 25 bp, Saccharomyces pastorianus
gatactagtcttaccaacgcaatgt

SEQ ID NO: 39560 - DNA, 25 bp, Saccharomyces pastorianus
caaactctgagcgaatccaatgaag

SEQ ID NO: 39561 - DNA, 25 bp, Saccharomyces pastorianus
cccgagttcaacgatctacctaata

SEQ ID NO: 39562 - DNA, 25 bp, Saccharomyces pastorianus
aacgcaatgttatttcaaactctga

SEQ ID NO: 39563 - DNA, 25 bp, Saccharomyces pastorianus
agctaggctgaatgatcccgagttc

SEQ ID NO: 39564 - DNA, 25 bp, Saccharomyces pastorianus
caacgggtacattggatcaactgaa

SEQ ID NO: 39565 - DNA, 25 bp, Saccharomyces pastorianus
aatcaaatcgatcaacgggtacatt

SEQ ID NO: 39566 - DNA, 25 bp, Saccharomyces pastorianus
acgaagacttgttggatagactgaa

SEQ ID NO: 39567 - DNA, 25 bp, Saccharomyces pastorianus
gaaaacgactcaaaccggaatgcgg

SEQ ID NO: 39568 - DNA, 25 bp, Saccharomyces pastorianus
gattgataaatctggagctaggctg

SEQ ID NO: 39569 - DNA, 25 bp, Saccharomyces pastorianus
gacggaaacgattcgatggcccctt

SEQ ID NO: 39570 - DNA, 25 bp, Saccharomyces pastorianus
ggaacgtgccaagagtgacccttac

SEQ ID NO: 39571 - DNA, 25 bp, Saccharomyces pastorianus
ggagccgctggaagcccataataat

SEQ ID NO: 39572 - DNA, 25 bp, Saccharomyces pastorianus
gtacccttctggtggaactactcaa

SEQ ID NO: 39573 - DNA, 25 bp, Saccharomyces pastorianus
gtgacccttacgcaagacgacgagt

SEQ ID NO: 39574 - DNA, 25 bp, Saccharomyces pastorianus
gttggactacaattgctacgacgat

SEQ ID NO: 39575 - DNA, 25 bp, Saccharomyces pastorianus
tcagcgtataccactccaagaatgt

SEQ ID NO: 39576 - DNA, 25 bp, Saccharomyces pastorianus
ttcaagaactagacctactgcccag

SEQ ID NO: 39577 - DNA, 25 bp, Saccharomyces pastorianus
tggctacaccatttcaaacaccttt

SEQ ID NO: 39578 - DNA, 25 bp, Saccharomyces pastorianus
aagtccgtacattaggctattctag

SEQ ID NO: 39579 - DNA, 25 bp, Saccharomyces pastorianus
gatcgacccttattttggagccgct

SEQ ID NO: 39580 - DNA, 25 bp, Saccharomyces pastorianus
aaaccatgcggatatgcggctgatc

SEQ ID NO: 39581 - DNA, 25 bp, Saccharomyces pastorianus
aatccggtggacgaggttgctattc

SEQ ID NO: 39582 - DNA, 25 bp, Saccharomyces pastorianus
gcggctgatctgtgatacctttatc

SEQ ID NO: 39583 - DNA, 25 bp, Saccharomyces pastorianus
ctattcttgagagagctgcccttaa

SEQ ID NO: 39584 - DNA, 25 bp, Saccharomyces pastorianus
agtgctgattgtctgggaccacgtc

SEQ ID NO: 39585 - DNA, 25 bp, Saccharomyces pastorianus
ggtgcaaactacttggttcattcga

SEQ ID NO: 39586 - DNA, 25 bp, Saccharomyces pastorianus
aaattttcatcgcatgcttcgtcat

SEQ ID NO: 39587 - DNA, 25 bp, Saccharomyces pastorianus
actctcttcttatccatatacgacg

SEQ ID NO: 39588 - DNA, 25 bp, Saccharomyces pastorianus
aacttaatctggctaatccggtgga

SEQ ID NO: 39589 - DNA, 25 bp, Saccharomyces pastorianus
aaaactggcgatatcctgagcatgg

SEQ ID NO: 39590 - DNA, 25 bp, Saccharomyces pastorianus
aagatcttctaccagccggcaaaat

SEQ ID NO: 39591 - DNA, 25 bp, Saccharomyces pastorianus
agcaaaccttccattacagttaaat

SEQ ID NO: 39592 - DNA, 25 bp, Saccharomyces pastorianus
ggatatttcctgatgtagacactct

SEQ ID NO: 39593 - DNA, 25 bp, Saccharomyces pastorianus
attccttcagaatttgcatacttga

SEQ ID NO: 39594 - DNA, 25 bp, Saccharomyces pastorianus
ggctattcgagaacgtgatcggtct

SEQ ID NO: 39595 - DNA, 25 bp, Saccharomyces pastorianus
tgatcggtctgagtctaggaatgcc

SEQ ID NO: 39596 - DNA, 25 bp, Saccharomyces pastorianus
gaccacaatggcacgattggcatct

SEQ ID NO: 39597 - DNA, 25 bp, Saccharomyces pastorianus
caagattagtaagttcccttttgag

SEQ ID NO: 39598 - DNA, 25 bp, Saccharomyces pastorianus
gaaaacgccgtttatcgaagaatgg

SEQ ID NO: 39599 - DNA, 25 bp, Saccharomyces pastorianus
gggtggaagcattcaacgacagtat

SEQ ID NO: 39600 - DNA, 25 bp, Saccharomyces pastorianus
gtagaagtactgttggcacagcaaa

SEQ ID NO: 39601 - DNA, 25 bp, Saccharomyces pastorianus
aaagcgtccagaaggttgcagattt

SEQ ID NO: 39602 - DNA, 25 bp, Saccharomyces pastorianus
gactattatcccaattaagagccaa

SEQ ID NO: 39603 - DNA, 25 bp, Saccharomyces pastorianus
ggtggtgatcctatcagactattat

SEQ ID NO: 39604 - DNA, 25 bp, Saccharomyces pastorianus
aagagccaaacatgcgcaaggtaat

SEQ ID NO: 39605 - DNA, 25 bp, Saccharomyces pastorianus
ggcggtgctaccgaaatggcagttt

SEQ ID NO: 39606 - DNA, 25 bp, Saccharomyces pastorianus
cagaatcgcgcgtgtaactggtgca

SEQ ID NO: 39607 - DNA, 25 bp, Saccharomyces pastorianus
gcaaccattgttaaccgtgtagaag

SEQ ID NO: 39608 - DNA, 25 bp, Saccharomyces pastorianus
atgttatgttgagcccttcattgtc

SEQ ID NO: 39609 - DNA, 25 bp, Saccharomyces pastorianus
ggaatgtattccacgcacactaata

SEQ ID NO: 39610 - DNA, 25 bp, Saccharomyces pastorianus
tcattgtccccaggtggcggtgcta

SEQ ID NO: 39611 - DNA, 25 bp, Saccharomyces pastorianus
ctataatgctgcgtggtggttccaa

SEQ ID NO: 39612 - DNA, 25 bp, Saccharomyces pastorianus
acgtgggtactagttgcggattatt

SEQ ID NO: 39613 - DNA, 25 bp, Saccharomyces pastorianus
gccggaattcggtttacagcaagtt

SEQ ID NO: 39614 - DNA, 25 bp, Saccharomyces pastorianus
ttttttgatctctgcgacctacaac

SEQ ID NO: 39615 - DNA, 25 bp, Saccharomyces pastorianus
ggcgtaccgcccgtaagtattgata

SEQ ID NO: 39616 - DNA, 25 bp, Saccharomyces pastorianus
taagctagcctggttgattgcctat

SEQ ID NO: 39617 - DNA, 25 bp, Saccharomyces pastorianus
atcacgagttagatgcggatcctta

SEQ ID NO: 39618 - DNA, 25 bp, Saccharomyces pastorianus
gcgacctacaacatcatttacctga

SEQ ID NO: 39619 - DNA, 25 bp, Saccharomyces pastorianus
ctagaaacagtcttggtcatacccc

SEQ ID NO: 39620 - DNA, 25 bp, Saccharomyces pastorianus
gaagatacgtgctttccatggactt

SEQ ID NO: 39621 - DNA, 25 bp, Saccharomyces pastorianus
ccttatatcactatctctcgggaga

SEQ ID NO: 39622 - DNA, 25 bp, Saccharomyces pastorianus
gattgcctatgatgccttaaagcta

SEQ ID NO: 39623 - DNA, 25 bp, Saccharomyces pastorianus
aattggcagagaactatcctttgat

SEQ ID NO: 39624 - DNA, 25 bp, Saccharomyces pastorianus
gaattgaatccagcgtggcactact

SEQ ID NO: 39625 - DNA, 25 bp, Saccharomyces pastorianus
tggcactactgcatctacggcaaca

SEQ ID NO: 39626 - DNA, 25 bp, Saccharomyces pastorianus
cgaatcgatgttgtttcgtctaaga

SEQ ID NO: 39627 - DNA, 25 bp, Saccharomyces pastorianus
aaagcatcggctgggagtttttcga

SEQ ID NO: 39628 - DNA, 25 bp, Saccharomyces pastorianus
aactagagtctgtgatttcggcttt

SEQ ID NO: 39629 - DNA, 25 bp, Saccharomyces pastorianus
atttcggctttgagtggtggcttca

SEQ ID NO: 39630 - DNA, 25 bp, Saccharomyces pastorianus
gaacttgttacgatcgcatatccta

SEQ ID NO: 39631 - DNA, 25 bp, Saccharomyces pastorianus
ggcttcattgaattagactctcgaa

SEQ ID NO: 39632 - DNA, 25 bp, Saccharomyces pastorianus
agtagtgatttctattccgaattca

SEQ ID NO: 39633 - DNA, 25 bp, Saccharomyces pastorianus
tacggcaacagagatcttcaggatt

SEQ ID NO: 39634 - DNA, 25 bp, Saccharomyces pastorianus
ctaagattcttacctccaggcatga

SEQ ID NO: 39635 - DNA, 25 bp, Saccharomyces pastorianus
ggtaaagcttctgcgtttttctcaa

SEQ ID NO: 39636 - DNA, 25 bp, Saccharomyces pastorianus
cataccccggttgttagcactaaat

SEQ ID NO: 39637 - DNA, 25 bp, Saccharomyces pastorianus
atatcgtccatggtacactactctt

SEQ ID NO: 39638 - DNA, 25 bp, Saccharomyces pastorianus
tagagcttgctccagttgtttagat

SEQ ID NO: 39639 - DNA, 25 bp, Saccharomyces pastorianus
atagcacgtcgtcagtctttttatc

SEQ ID NO: 39640 - DNA, 25 bp, Saccharomyces pastorianus
aagatctagtctcgtgcatacttcc

SEQ ID NO: 39641 - DNA, 25 bp, Saccharomyces pastorianus
tacttcccattctttttcaatctac

SEQ ID NO: 39642 - DNA, 25 bp, Saccharomyces pastorianus
ggtactcctgtttcctctgaaaagt

SEQ ID NO: 39643 - DNA, 25 bp, Saccharomyces pastorianus
gtatgagtcatctgtgcacctaagc

SEQ ID NO: 39644 - DNA, 25 bp, Saccharomyces pastorianus
aaaagtctactacgaccaccgatag

SEQ ID NO: 39645 - DNA, 25 bp, Saccharomyces pastorianus
gagcaagtccctagttcatctatta

SEQ ID NO: 39646 - DNA, 25 bp, Saccharomyces pastorianus
tatccaagattgaaggtgccagagc

SEQ ID NO: 39647 - DNA, 25 bp, Saccharomyces pastorianus
ggccgcaggttccagtacactggat

SEQ ID NO: 39648 - DNA, 25 bp, Saccharomyces pastorianus
gatggtttcacataatagcaccgat

SEQ ID NO: 39649 - DNA, 25 bp, Saccharomyces pastorianus
gtctattggcgaaatcctgtttgaa

SEQ ID NO: 39650 - DNA, 25 bp, Saccharomyces pastorianus
atgcagttcccaatgttggtagaaa

SEQ ID NO: 39651 - DNA, 25 bp, Saccharomyces pastorianus
gagtgaaaccccaaattctgaacgg

SEQ ID NO: 39652 - DNA, 25 bp, Saccharomyces pastorianus
acagtacttggaaatcacgggaaat

SEQ ID NO: 39653 - DNA, 25 bp, Saccharomyces pastorianus
gacatggctgagcattccttagaaa

SEQ ID NO: 39654 - DNA, 25 bp, Saccharomyces pastorianus
ggtgccagagctacaaatattaaat

SEQ ID NO: 39655 - DNA, 25 bp, Saccharomyces pastorianus
tctgaacggtatgatgcttggaaac

SEQ ID NO: 39656 - DNA, 25 bp, Saccharomyces pastorianus
aaactttcacatcaccaagtgccta

SEQ ID NO: 39657 - DNA, 25 bp, Saccharomyces pastorianus
caattttttctctccaagtgttagc

SEQ ID NO: 39658 - DNA, 25 bp, Saccharomyces pastorianus
tgggtcagctgccattttgggtaac

SEQ ID NO: 39659 - DNA, 25 bp, Saccharomyces pastorianus
tcatgattcggttgtgaactcccac

SEQ ID NO: 39660 - DNA, 25 bp, Saccharomyces pastorianus
gaagcatctagagtagcaaccactg

SEQ ID NO: 39661 - DNA, 25 bp, Saccharomyces pastorianus
gttgtgaactcccacgctaacagtt

SEQ ID NO: 39662 - DNA, 25 bp, Saccharomyces pastorianus
taaatcggctgggtcagctgccatt

SEQ ID NO: 39663 - DNA, 25 bp, Saccharomyces pastorianus
gcaaccactgcggtaaatgcgctaa

SEQ ID NO: 39664 - DNA, 25 bp, Saccharomyces pastorianus
ctccaagtgttagcatcatcgataa

SEQ ID NO: 39665 - DNA, 25 bp, Saccharomyces pastorianus
tccgaagagtttgatcctaatacca

SEQ ID NO: 39666 - DNA, 25 bp, Saccharomyces pastorianus
gagcgttattacgaaccatagcgca

SEQ ID NO: 39667 - DNA, 25 bp, Saccharomyces pastorianus
cgctaacagttcttcttccaatatg

SEQ ID NO: 39668 - DNA, 25 bp, Saccharomyces pastorianus
gtcgtacctaaatttagactctccg

SEQ ID NO: 39669 - DNA, 25 bp, Saccharomyces pastorianus
gatgccaatgtaaacgtcgtaccta

SEQ ID NO: 39670 - DNA, 25 bp, Saccharomyces pastorianus
atgaattccaatgacgtaacagcgt

SEQ ID NO: 39671 - DNA, 25 bp, Saccharomyces pastorianus
ttgagtgttgagcacccaccgagaa

SEQ ID NO: 39672 - DNA, 25 bp, Saccharomyces pastorianus
attcgaatctcgcagatgccaatgt

SEQ ID NO: 39673 - DNA, 25 bp, Saccharomyces pastorianus
gctggactcaaatatgacgactgat

SEQ ID NO: 39674 - DNA, 25 bp, Saccharomyces pastorianus
gggtacctgacctgtttagatgata

SEQ ID NO: 39675 - DNA, 25 bp, Saccharomyces pastorianus
gatatgctgtatgcgctggactcaa

SEQ ID NO: 39676 - DNA, 25 bp, Saccharomyces pastorianus
tgataacctcaacctagaactctct

SEQ ID NO: 39677 - DNA, 25 bp, Saccharomyces pastorianus
aaaccgaaactatcctctgatttgg

SEQ ID NO: 39678 - DNA, 25 bp, Saccharomyces pastorianus
gagcgaaaaccagcaacgtgaatct

SEQ ID NO: 39679 - DNA, 25 bp, Saccharomyces pastorianus
tactccggagtagcatattccgctg

SEQ ID NO: 39680 - DNA, 25 bp, Saccharomyces pastorianus
gtttccggttatcagaccaagccat

SEQ ID NO: 39681 - DNA, 25 bp, Saccharomyces pastorianus
ttcaccttcttttttcggcaaacag

SEQ ID NO: 39682 - DNA, 25 bp, Saccharomyces pastorianus
taaagtttcccgaaagatcgactcg

SEQ ID NO: 39683 - DNA, 25 bp, Saccharomyces pastorianus
atattccgctgccaagggtacgaac

SEQ ID NO: 39684 - DNA, 25 bp, Saccharomyces pastorianus
gtttacagccggacataggactact

SEQ ID NO: 39685 - DNA, 25 bp, Saccharomyces pastorianus
tagagcccacgttgactacagaaat

SEQ ID NO: 39686 - DNA, 25 bp, Saccharomyces pastorianus
tcaagattatcgacgtcagcggtaa

SEQ ID NO: 39687 - DNA, 25 bp, Saccharomyces pastorianus
acagacgttcgtaacactattggaa

SEQ ID NO: 39688 - DNA, 25 bp, Saccharomyces pastorianus
gatcgactcgaattggaggactcat

SEQ ID NO: 39689 - DNA, 25 bp, Saccharomyces pastorianus
ggactactcaaaccagatctgacat

SEQ ID NO: 39690 - DNA, 25 bp, Saccharomyces pastorianus
ttctctcaatagcactgtctaccga

SEQ ID NO: 39691 - DNA, 25 bp, Saccharomyces pastorianus
actgagatactggtttttgtttcca

SEQ ID NO: 39692 - DNA, 25 bp, Saccharomyces pastorianus
gtcgaagaacatgaagtctcctgag

SEQ ID NO: 39693 - DNA, 25 bp, Saccharomyces pastorianus
gcactgtctaccgacttaaagagct

SEQ ID NO: 39694 - DNA, 25 bp, Saccharomyces pastorianus
gagttcaatattctcgatagtgaca

SEQ ID NO: 39695 - DNA, 25 bp, Saccharomyces pastorianus
ctccgtatttgccagtctgttcaat

SEQ ID NO: 39696 - DNA, 25 bp, Saccharomyces pastorianus
gccagtctgttcaattctctcaata

SEQ ID NO: 39697 - DNA, 25 bp, Saccharomyces pastorianus
caatatgatcctgacttgagtgaag

SEQ ID NO: 39698 - DNA, 25 bp, Saccharomyces pastorianus
tttataatattgcttcccaggttga

SEQ ID NO: 39699 - DNA, 25 bp, Saccharomyces pastorianus
agggaaagtgtatctacctgaactg

SEQ ID NO: 39700 - DNA, 25 bp, Saccharomyces pastorianus
gacttgaattccaaaggcttgaacc

SEQ ID NO: 39701 - DNA, 25 bp, Saccharomyces pastorianus
agacaatctgcaacaaggtttcgat

SEQ ID NO: 39702 - DNA, 25 bp, Saccharomyces pastorianus
ctgaggttgagcagtcgccggattt

SEQ ID NO: 39703 - DNA, 25 bp, Saccharomyces pastorianus
atgtcaaacgcttgggaggatgtat

SEQ ID NO: 39704 - DNA, 25 bp, Saccharomyces pastorianus
gaaaaacatccagtcataatcaagt

SEQ ID NO: 39705 - DNA, 25 bp, Saccharomyces pastorianus
atttgatccgaattttgatttgcat

SEQ ID NO: 39706 - DNA, 25 bp, Saccharomyces pastorianus
acttggcttgcaggcgcgctttggt

SEQ ID NO: 39707 - DNA, 25 bp, Saccharomyces pastorianus
aggtttcgatgacggctttcccact

SEQ ID NO: 39708 - DNA, 25 bp, Saccharomyces pastorianus
tcaggaaggcttacatcaacgctca

SEQ ID NO: 39709 - DNA, 25 bp, Saccharomyces pastorianus
gcagtcgccggatttgctaaaatta

SEQ ID NO: 39710 - DNA, 25 bp, Saccharomyces pastorianus
tagggatcttacttggcttgcaggc

SEQ ID NO: 39711 - DNA, 25 bp, Saccharomyces pastorianus
gttggcacaattatagggatcttac

SEQ ID NO: 39712 - DNA, 25 bp, Saccharomyces pastorianus
ggacccacggtggtgccaaggacaa

SEQ ID NO: 39713 - DNA, 25 bp, Saccharomyces pastorianus
gagacctgtgaattggccatcaaca

SEQ ID NO: 39714 - DNA, 25 bp, Saccharomyces pastorianus
ggaagacccacatgttgctgtaaga

SEQ ID NO: 39715 - DNA, 25 bp, Saccharomyces pastorianus
cattgcatccccagaagtcgttgat

SEQ ID NO: 39716 - DNA, 25 bp, Saccharomyces pastorianus
agggctctttggatgacttgaacag

SEQ ID NO: 39717 - DNA, 25 bp, Saccharomyces pastorianus
tatggttagacacgaagccgccgaa

SEQ ID NO: 39718 - DNA, 25 bp, Saccharomyces pastorianus
gaaatcgcttatgtctttggccaaa

SEQ ID NO: 39719 - DNA, 25 bp, Saccharomyces pastorianus
atcttgtatcgttgccttggatatg

SEQ ID NO: 39720 - DNA, 25 bp, Saccharomyces pastorianus
ggacaaggatgctaccgttccagaa

SEQ ID NO: 39721 - DNA, 25 bp, Saccharomyces pastorianus
ggctactggtttcagcgcagaatca

SEQ ID NO: 39722 - DNA, 25 bp, Saccharomyces pastorianus
gccaaataggtagcccagctgctgt

SEQ ID NO: 39723 - DNA, 25 bp, Saccharomyces pastorianus
ttatcacacatttggctgcgcagtt

SEQ ID NO: 39724 - DNA, 25 bp, Saccharomyces pastorianus
ggacagacacgatcttcacatattt

SEQ ID NO: 39725 - DNA, 25 bp, Saccharomyces pastorianus
ggattcctgaggagttgtcaccttc

SEQ ID NO: 39726 - DNA, 25 bp, Saccharomyces pastorianus
gctaaacctggtcatccgatattga

SEQ ID NO: 39727 - DNA, 25 bp, Saccharomyces pastorianus
atacctgatcttgttggtccatggt

SEQ ID NO: 39728 - DNA, 25 bp, Saccharomyces pastorianus
atgcagatattgacactttccccgt

SEQ ID NO: 39729 - DNA, 25 bp, Saccharomyces pastorianus
cccaagttctcgttcaattgtccaa

SEQ ID NO: 39730 - DNA, 25 bp, Saccharomyces pastorianus
agtgatgttttagtcttccccaagt

SEQ ID NO: 39731 - DNA, 25 bp, Saccharomyces pastorianus
ttgccctccaccattttgaagattg

SEQ ID NO: 39732 - DNA, 25 bp, Saccharomyces pastorianus
ggaccagctgaatgttaacctaaga

SEQ ID NO: 39733 - DNA, 25 bp, Saccharomyces pastorianus
aaatcatagagaccacccttcaaag

SEQ ID NO: 39734 - DNA, 25 bp, Saccharomyces pastorianus
aattgaattcccttgagtgccgctt

SEQ ID NO: 39735 - DNA, 25 bp, Saccharomyces pastorianus
aggcaagtttgtcttacagcaccaa

SEQ ID NO: 39736 - DNA, 25 bp, Saccharomyces pastorianus
tgccgcttagcgagtgccatatcaa

SEQ ID NO: 39737 - DNA, 25 bp, Saccharomyces pastorianus
gcggattcttccacctaaatgaggc

SEQ ID NO: 39738 - DNA, 25 bp, Saccharomyces pastorianus
tatccgaccttagtgcgcagtgtga

SEQ ID NO: 39739 - DNA, 25 bp, Saccharomyces pastorianus
agataatggcactggtggtcccgct

SEQ ID NO: 39740 - DNA, 25 bp, Saccharomyces pastorianus
aaaggctgtatcctcgttgggacca

SEQ ID NO: 39741 - DNA, 25 bp, Saccharomyces pastorianus
aggcctgcacgtcacaatggcatta

SEQ ID NO: 39742 - DNA, 25 bp, Saccharomyces pastorianus
gaaacttgccactttttgatgccac

SEQ ID NO: 39743 - DNA, 25 bp, Saccharomyces pastorianus
gaaaagcgtcatgcccttacatatc

SEQ ID NO: 39744 - DNA, 25 bp, Saccharomyces pastorianus
caaacgggctagtacgtgcttacct

SEQ ID NO: 39745 - DNA, 25 bp, Saccharomyces pastorianus
gagaattattaatcgcgcatcaaag

SEQ ID NO: 39746 - DNA, 25 bp, Saccharomyces pastorianus
aggactcttgatatggcgactttta

SEQ ID NO: 39747 - DNA, 25 bp, Saccharomyces pastorianus
aagctatccaccgtagttttgagat

SEQ ID NO: 39748 - DNA, 25 bp, Saccharomyces pastorianus
cgcgcatcaaaggtccgcatggaat

SEQ ID NO: 39749 - DNA, 25 bp, Saccharomyces pastorianus
atcacccgaccaaatgaggaatcta

SEQ ID NO: 39750 - DNA, 25 bp, Saccharomyces pastorianus
acttttggagccagtttggaaacag

SEQ ID NO: 39751 - DNA, 25 bp, Saccharomyces pastorianus
ggagtcaatgcctgatactgccata

SEQ ID NO: 39752 - DNA, 25 bp, Saccharomyces pastorianus
ataacgctaacatggaggagtcaat

SEQ ID NO: 39753 - DNA, 25 bp, Saccharomyces pastorianus
gtaataccgtaggaaatatcgtgtt

SEQ ID NO: 39754 - DNA, 25 bp, Saccharomyces pastorianus
aaatgggacttcgaaatcagggtat

SEQ ID NO: 39755 - DNA, 25 bp, Saccharomyces pastorianus
ttagatactgacaccaacaatgatg

SEQ ID NO: 39756 - DNA, 25 bp, Saccharomyces pastorianus
ctggtacatgtcagccgatggcact

SEQ ID NO: 39757 - DNA, 25 bp, Saccharomyces pastorianus
aaacttggacaactgggcttcattg

SEQ ID NO: 39758 - DNA, 25 bp, Saccharomyces pastorianus
gatggcactgtgatcgatgacgaca

SEQ ID NO: 39759 - DNA, 25 bp, Saccharomyces pastorianus
gttgggaattccacggtatgccgga

SEQ ID NO: 39760 - DNA, 25 bp, Saccharomyces pastorianus
cacggtatgccggaaaacttgttat

SEQ ID NO: 39761 - DNA, 25 bp, Saccharomyces pastorianus
ggcttcattgatattgcagtggttc

SEQ ID NO: 39762 - DNA, 25 bp, Saccharomyces pastorianus
acggcagcccaattctttaacgaga

SEQ ID NO: 39763 - DNA, 25 bp, Saccharomyces pastorianus
acagggctacgatgcttaaggatga

SEQ ID NO: 39764 - DNA, 25 bp, Saccharomyces pastorianus
aggcaagtgtttacctattgaccaa

SEQ ID NO: 39765 - DNA, 25 bp, Saccharomyces pastorianus
aagactccgggaagctgaaccaagt

SEQ ID NO: 39766 - DNA, 25 bp, Saccharomyces pastorianus
atggcttcattacctccagtgtatt

SEQ ID NO: 39767 - DNA, 25 bp, Saccharomyces pastorianus
actccatgggcggtataggtttcag

SEQ ID NO: 39768 - DNA, 25 bp, Saccharomyces pastorianus
aattcgtcgtttcttgcattttcat

SEQ ID NO: 39769 - DNA, 25 bp, Saccharomyces pastorianus
cagtgggctagttgcaatgcttttt

SEQ ID NO: 39770 - DNA, 25 bp, Saccharomyces pastorianus
gaaagactcaatacctgcatccagg

SEQ ID NO: 39771 - DNA, 25 bp, Saccharomyces pastorianus
atatcccttttagccaactgtctta

SEQ ID NO: 39772 - DNA, 25 bp, Saccharomyces pastorianus
gatctccaatatttccatgtgcagg

SEQ ID NO: 39773 - DNA, 25 bp, Saccharomyces pastorianus
caggtgattttcttggccgtcggga

SEQ ID NO: 39774 - DNA, 25 bp, Saccharomyces pastorianus
atactgggcctaactatttttgcat

SEQ ID NO: 39775 - DNA, 25 bp, Saccharomyces pastorianus
atcatgtgcatcttgtttgggtggt

SEQ ID NO: 39776 - DNA, 25 bp, Saccharomyces pastorianus
gagccgagccaacttgacgatggat

SEQ ID NO: 39777 - DNA, 25 bp, Saccharomyces pastorianus
ttgcttctattctttggcggaccga

SEQ ID NO: 39778 - DNA, 25 bp, Saccharomyces pastorianus
attcctttattcaacgaacctcgca

SEQ ID NO: 39779 - DNA, 25 bp, Saccharomyces pastorianus
taccccaattctcctttacaagatt

SEQ ID NO: 39780 - DNA, 25 bp, Saccharomyces pastorianus
gaaaattgcgtgagctattccagaa

SEQ ID NO: 39781 - DNA, 25 bp, Saccharomyces pastorianus
aaagttactggacggctattcaaag

SEQ ID NO: 39782 - DNA, 25 bp, Saccharomyces pastorianus
tattgttccatcagaagttcgttca

SEQ ID NO: 39783 - DNA, 25 bp, Saccharomyces pastorianus
ggaagttgcctcttttggtaaagat

SEQ ID NO: 39784 - DNA, 25 bp, Saccharomyces pastorianus
tatgaactttcacgttcctttgcct

SEQ ID NO: 39785 - DNA, 25 bp, Saccharomyces pastorianus
gttcctttgcctccaagtggaatat

SEQ ID NO: 39786 - DNA, 25 bp, Saccharomyces pastorianus
aacctcgcactgctttactatttgt

SEQ ID NO: 39787 - DNA, 25 bp, Saccharomyces pastorianus
aaggccgttttcaatctggcttcca

SEQ ID NO: 39788 - DNA, 25 bp, Saccharomyces pastorianus
atgttgccactaaagtaccccaatt

SEQ ID NO: 39789 - DNA, 25 bp, Saccharomyces pastorianus
agcctgagacattactgcctttaga

SEQ ID NO: 39790 - DNA, 25 bp, Saccharomyces pastorianus
aagatcttgctcatcttgactcagc

SEQ ID NO: 39791 - DNA, 25 bp, Saccharomyces pastorianus
tacggaaacgtctagtgcctgttaa

SEQ ID NO: 39792 - DNA, 25 bp, Saccharomyces pastorianus
aggacgtatgctaccggtattctac

SEQ ID NO: 39793 - DNA, 25 bp, Saccharomyces pastorianus
actgaatttcgatttcctacccaat

SEQ ID NO: 39794 - DNA, 25 bp, Saccharomyces pastorianus
acagccttttgaatacggatccaga

SEQ ID NO: 39795 - DNA, 25 bp, Saccharomyces pastorianus
tgacgtttttgagttctccttccaa

SEQ ID NO: 39796 - DNA, 25 bp, Saccharomyces pastorianus
agcggctgttaatccgttctctaat

SEQ ID NO: 39797 - DNA, 25 bp, Saccharomyces pastorianus
gaggattgaacatttctccgcagcc

SEQ ID NO: 39798 - DNA, 25 bp, Saccharomyces pastorianus
gaccagccggttcgttgattgctaa

SEQ ID NO: 39799 - DNA, 25 bp, Saccharomyces pastorianus
tctcatctgatgaccctgtagagtt

SEQ ID NO: 39800 - DNA, 25 bp, Saccharomyces pastorianus
gcaatttctaatgggatcgctggca

SEQ ID NO: 39801 - DNA, 25 bp, Saccharomyces pastorianus
attgccaggtatttcggcccagtaa

SEQ ID NO: 39802 - DNA, 25 bp, Saccharomyces pastorianus
ggttatggcttcttctaccattcca

SEQ ID NO: 39803 - DNA, 25 bp, Saccharomyces pastorianus
atcgctggcattgggtaccttgttt

SEQ ID NO: 39804 - DNA, 25 bp, Saccharomyces pastorianus
tattctcgattcttatccctatggc

SEQ ID NO: 39805 - DNA, 25 bp, Saccharomyces pastorianus
ttactggtccagattccgtcaggga

SEQ ID NO: 39806 - DNA, 25 bp, Saccharomyces pastorianus
cattccatcatctatcattgccagg

SEQ ID NO: 39807 - DNA, 25 bp, Saccharomyces pastorianus
cagatttgatcctagcatgcatgtt

SEQ ID NO: 39808 - DNA, 25 bp, Saccharomyces pastorianus
tttgcacgttgcattggcccaatct

SEQ ID NO: 39809 - DNA, 25 bp, Saccharomyces pastorianus
atggcccaagactatttacccttat

SEQ ID NO: 39810 - DNA, 25 bp, Saccharomyces pastorianus
caatcttcacaggactacttgccaa

SEQ ID NO: 39811 - DNA, 25 bp, Saccharomyces pastorianus
gtaacgtccaaactagtgaccaggg

SEQ ID NO: 39812 - DNA, 25 bp, Saccharomyces pastorianus
gcacgcccactaatactttgaacgg

SEQ ID NO: 39813 - DNA, 25 bp, Saccharomyces pastorianus
gaaggagctggttcaacctttggaa

SEQ ID NO: 39814 - DNA, 25 bp, Saccharomyces pastorianus
gaaattgactggtacacttcgtggt

SEQ ID NO: 39815 - DNA, 25 bp, Saccharomyces pastorianus
gtgaccagggagtacgggcttattt

SEQ ID NO: 39816 - DNA, 25 bp, Saccharomyces pastorianus
acacttcgtggtatgggctaggtat

SEQ ID NO: 39817 - DNA, 25 bp, Saccharomyces pastorianus
tcttaacaccagactcgagggcaca

SEQ ID NO: 39818 - DNA, 25 bp, Saccharomyces pastorianus
gacgggttgatttacctgcctgaga

SEQ ID NO: 39819 - DNA, 25 bp, Saccharomyces pastorianus
gtatgaagccattcgaatcgcaagt

SEQ ID NO: 39820 - DNA, 25 bp, Saccharomyces pastorianus
ccgagttatgggatcctgttttcat

SEQ ID NO: 39821 - DNA, 25 bp, Saccharomyces pastorianus
ggcttatttgccacggccaattgat

SEQ ID NO: 39822 - DNA, 25 bp, Saccharomyces pastorianus
tcagcttcaggttccgtcgttaatc

SEQ ID NO: 39823 - DNA, 25 bp, Saccharomyces pastorianus
aacttccgctgaaactactgcctct

SEQ ID NO: 39824 - DNA, 25 bp, Saccharomyces pastorianus
gcgctttcggacgacggtatttaca

SEQ ID NO: 39825 - DNA, 25 bp, Saccharomyces pastorianus
ttacactgctttaccaacatctacc

SEQ ID NO: 39826 - DNA, 25 bp, Saccharomyces pastorianus
tactgcctcttctgctgaaactact

SEQ ID NO: 39827 - DNA, 25 bp, Saccharomyces pastorianus
tactgcctcttctgttgaagtcact

SEQ ID NO: 39828 - DNA, 25 bp, Saccharomyces pastorianus
acttcatcagcttctcatgcaattg

SEQ ID NO: 39829 - DNA, 25 bp, Saccharomyces pastorianus
ttcatccaatgacgctgttacctca

SEQ ID NO: 39830 - DNA, 25 bp, Saccharomyces pastorianus
aacggtgctcataagttcgggaatg

SEQ ID NO: 39831 - DNA, 25 bp, Saccharomyces pastorianus
taaaggctgccattgctcaagcgct

SEQ ID NO: 39832 - DNA, 25 bp, Saccharomyces pastorianus
ttctgtggcttcttctaccttgatc

SEQ ID NO: 39833 - DNA, 25 bp, Saccharomyces pastorianus
atcaattgggtaacctggcctctgc

SEQ ID NO: 39834 - DNA, 25 bp, Saccharomyces pastorianus
gttgtttcacgtatcctgcatttat

SEQ ID NO: 39835 - DNA, 25 bp, Saccharomyces pastorianus
aattccatcgtgatctatcttctcc

SEQ ID NO: 39836 - DNA, 25 bp, Saccharomyces pastorianus
gaagtggattcctctggtattgtta

SEQ ID NO: 39837 - DNA, 25 bp, Saccharomyces pastorianus
tgcagcagcctctacaattgagacg

SEQ ID NO: 39838 - DNA, 25 bp, Saccharomyces pastorianus
taggcctgttgattgcgtgtgtaat

SEQ ID NO: 39839 - DNA, 25 bp, Saccharomyces pastorianus
gctggattcatgctatacttttgtg

SEQ ID NO: 39840 - DNA, 25 bp, Saccharomyces pastorianus
gccgttttcatcttcacttttgggt

SEQ ID NO: 39841 - DNA, 25 bp, Saccharomyces pastorianus
tgaattggctcctgccgacgcaagg

SEQ ID NO: 39842 - DNA, 25 bp, Saccharomyces pastorianus
acgcaagggctttagtcgctggttt

SEQ ID NO: 39843 - DNA, 25 bp, Saccharomyces pastorianus
gtcgttactaacatcggtgctatct

SEQ ID NO: 39844 - DNA, 25 bp, Saccharomyces pastorianus
aaccttcttttttcgatggctccat

SEQ ID NO: 39845 - DNA, 25 bp, Saccharomyces pastorianus
tctacactctctcttttactaacaa

SEQ ID NO: 39846 - DNA, 25 bp, Saccharomyces pastorianus
gatttcgtagcttcattacctcacg

SEQ ID NO: 39847 - DNA, 25 bp, Saccharomyces pastorianus
gggtcagggaaatctacactctctc

SEQ ID NO: 39848 - DNA, 25 bp, Saccharomyces pastorianus
tggcctgctgactttggtcataaca

SEQ ID NO: 39849 - DNA, 25 bp, Saccharomyces pastorianus
cagagactttgtatagccagagcat

SEQ ID NO: 39850 - DNA, 25 bp, Saccharomyces pastorianus
cttaacttacggctgtctgggtgaa

SEQ ID NO: 39851 - DNA, 25 bp, Saccharomyces pastorianus
ggtgttgtaattctatcgctgtttt

SEQ ID NO: 39852 - DNA, 25 bp, Saccharomyces pastorianus
ttacctcacgagctggatacacgta

SEQ ID NO: 39853 - DNA, 25 bp, Saccharomyces pastorianus
gacgaatgtacctcagctttggatt

SEQ ID NO: 39854 - DNA, 25 bp, Saccharomyces pastorianus
gctttggattctgtcagttctcata

SEQ ID NO: 39855 - DNA, 25 bp, Saccharomyces pastorianus
attgaggaactctgccatgggtcgc

SEQ ID NO: 39856 - DNA, 25 bp, Saccharomyces pastorianus
aagaatcctctcagatgtaccgcag

SEQ ID NO: 39857 - DNA, 25 bp, Saccharomyces pastorianus
ggatatcacgtacctgtcgcaattg

SEQ ID NO: 39858 - DNA, 25 bp, Saccharomyces pastorianus
ggttgaaagtgcacaccatcggcat

SEQ ID NO: 39859 - DNA, 25 bp, Saccharomyces pastorianus
aagcttttactggaccaactggcca

SEQ ID NO: 39860 - DNA, 25 bp, Saccharomyces pastorianus
aggcttccgacggtcttcatgaaga

SEQ ID NO: 39861 - DNA, 25 bp, Saccharomyces pastorianus
tgtaccgcagcctgaactactggaa

SEQ ID NO: 39862 - DNA, 25 bp, Saccharomyces pastorianus
tgccggcgacgattcttcttacaat

SEQ ID NO: 39863 - DNA, 25 bp, Saccharomyces pastorianus
ttcttacaatatgccctacctgtgg

SEQ ID NO: 39864 - DNA, 25 bp, Saccharomyces pastorianus
aaacgttccgtggtgggcaatgcca

SEQ ID NO: 39865 - DNA, 25 bp, Saccharomyces pastorianus
gcataaatatcaactctggccccaa

SEQ ID NO: 39866 - DNA, 25 bp, Saccharomyces pastorianus
ggacgacccagaccctaacaagatg

SEQ ID NO: 39867 - DNA, 25 bp, Saccharomyces pastorianus
gatattggcacatctggacgaccca

SEQ ID NO: 39868 - DNA, 25 bp, Saccharomyces pastorianus
aacaagatggcccaattcgcacagc

SEQ ID NO: 39869 - DNA, 25 bp, Saccharomyces pastorianus
tagcgtccacgttcaccaagaagat

SEQ ID NO: 39870 - DNA, 25 bp, Saccharomyces pastorianus
atagactaccacgttatcccgggct

SEQ ID NO: 39871 - DNA, 25 bp, Saccharomyces pastorianus
ggtggttcaaacacagcacgcgcta

SEQ ID NO: 39872 - DNA, 25 bp, Saccharomyces pastorianus
aagccgcggttttcctacaaatgtg

SEQ ID NO: 39873 - DNA, 25 bp, Saccharomyces pastorianus
gctaaccggcatagactaccacgtt

SEQ ID NO: 39874 - DNA, 25 bp, Saccharomyces pastorianus
cgggctccgggacgttaatatgcaa

SEQ ID NO: 39875 - DNA, 25 bp, Saccharomyces pastorianus
gaataatactcaatgcgacgccctt

SEQ ID NO: 39876 - DNA, 25 bp, Saccharomyces pastorianus
accaagcacagatagcgtccacgtt

SEQ ID NO: 39877 - DNA, 25 bp, Saccharomyces pastorianus
gacgaggtccacaatttggccttca

SEQ ID NO: 39878 - DNA, 25 bp, Saccharomyces pastorianus
gacgggcttcgactagagattttgc

SEQ ID NO: 39879 - DNA, 25 bp, Saccharomyces pastorianus
gaacgatggcctagcagacgatcta

SEQ ID NO: 39880 - DNA, 25 bp, Saccharomyces pastorianus
atgtaccgccagtgttccagaacga

SEQ ID NO: 39881 - DNA, 25 bp, Saccharomyces pastorianus
atcagcgttctgtaccatgcatcga

SEQ ID NO: 39882 - DNA, 25 bp, Saccharomyces pastorianus
cggtccagaagccagcatgtctatg

SEQ ID NO: 39883 - DNA, 25 bp, Saccharomyces pastorianus
tggagctgaccatcaggcccgaata

SEQ ID NO: 39884 - DNA, 25 bp, Saccharomyces pastorianus
acaactgtaatgaagcgctagccgt

SEQ ID NO: 39885 - DNA, 25 bp, Saccharomyces pastorianus
gaccgacgcgggagaccaagatcaa

SEQ ID NO: 39886 - DNA, 25 bp, Saccharomyces pastorianus
gaacaagatcaagacctcggcctgg

SEQ ID NO: 39887 - DNA, 25 bp, Saccharomyces pastorianus
tggccttcaccatgcagagcgtgga

SEQ ID NO: 39888 - DNA, 25 bp, Saccharomyces pastorianus
tgtcctgtttggtgtttctaatctt

SEQ ID NO: 39889 - DNA, 25 bp, Saccharomyces pastorianus
aattgggcttcgtactggatctatg

SEQ ID NO: 39890 - DNA, 25 bp, Saccharomyces pastorianus
aatctttggattaggctctgatgcc

SEQ ID NO: 39891 - DNA, 25 bp, Saccharomyces pastorianus
gatgtattctaagttcctgcgttca

SEQ ID NO: 39892 - DNA, 25 bp, Saccharomyces pastorianus
aaaaagcgccataatcctttctcca

SEQ ID NO: 39893 - DNA, 25 bp, Saccharomyces pastorianus
tttggctttacgtttcgatgtcctg

SEQ ID NO: 39894 - DNA, 25 bp, Saccharomyces pastorianus
gttactcgccgacttctaagcaaga

SEQ ID NO: 39895 - DNA, 25 bp, Saccharomyces pastorianus
ggaatctcactcgacggtttttcaa

SEQ ID NO: 39896 - DNA, 25 bp, Saccharomyces pastorianus
tacagaagggtactcccctggtgca

SEQ ID NO: 39897 - DNA, 25 bp, Saccharomyces pastorianus
gagagcaggcacataccttacctta

SEQ ID NO: 39898 - DNA, 25 bp, Saccharomyces pastorianus
acgccgatatctcaagcacatttct

SEQ ID NO: 39899 - DNA, 25 bp, Saccharomyces pastorianus
gttctcgcctgggattcaaggctaa

SEQ ID NO: 39900 - DNA, 25 bp, Saccharomyces pastorianus
cgatgccgacggattatatctgata

SEQ ID NO: 39901 - DNA, 25 bp, Saccharomyces pastorianus
aatcacacgtgaatgttctcgcctg

SEQ ID NO: 39902 - DNA, 25 bp, Saccharomyces pastorianus
gataagatcttctcacctaatggtg

SEQ ID NO: 39903 - DNA, 25 bp, Saccharomyces pastorianus
gttcagccgtgccatgtatgatttc

SEQ ID NO: 39904 - DNA, 25 bp, Saccharomyces pastorianus
actcgcatgcagagatgggcagctt

SEQ ID NO: 39905 - DNA, 25 bp, Saccharomyces pastorianus
agattccattggtcatcgatgccga

SEQ ID NO: 39906 - DNA, 25 bp, Saccharomyces pastorianus
tgttacgtgggcagcacaatcacac

SEQ ID NO: 39907 - DNA, 25 bp, Saccharomyces pastorianus
atagactacgcgatgctgagctgtt

SEQ ID NO: 39908 - DNA, 25 bp, Saccharomyces pastorianus
atcatgtatgctagcgttcagccgt

SEQ ID NO: 39909 - DNA, 25 bp, Saccharomyces pastorianus
cagcttgatcgctcaggagttgaac

SEQ ID NO: 39910 - DNA, 25 bp, Saccharomyces pastorianus
acactacttccgatagagcttttga

SEQ ID NO: 39911 - DNA, 25 bp, Saccharomyces pastorianus
aagagcctgctttgagatcgggttc

SEQ ID NO: 39912 - DNA, 25 bp, Saccharomyces pastorianus
aatgcttcaacgatcatcactgtaa

SEQ ID NO: 39913 - DNA, 25 bp, Saccharomyces pastorianus
tttgagatcgggttccgctgcaaat

SEQ ID NO: 39914 - DNA, 25 bp, Saccharomyces pastorianus
agggcatgttgacgccacagaaaat

SEQ ID NO: 39915 - DNA, 25 bp, Saccharomyces pastorianus
gaggaacctgcacacgtttctttat

SEQ ID NO: 39916 - DNA, 25 bp, Saccharomyces pastorianus
aagaggaacccactaacctcgctag

SEQ ID NO: 39917 - DNA, 25 bp, Saccharomyces pastorianus
agcagttgaagaagcgcccgctaat

SEQ ID NO: 39918 - DNA, 25 bp, Saccharomyces pastorianus
atcaaaatcagcactctgcccaatg

SEQ ID NO: 39919 - DNA, 25 bp, Saccharomyces pastorianus
gacgatgcgcacatactgacattga

SEQ ID NO: 39920 - DNA, 25 bp, Saccharomyces pastorianus
aacccttgcctactaaatctgctaa

SEQ ID NO: 39921 - DNA, 25 bp, Saccharomyces pastorianus
gagctcccaatagagatgtacctaa

SEQ ID NO: 39922 - DNA, 25 bp, Saccharomyces pastorianus
aaacgataccttcgtcttcaagctc

SEQ ID NO: 39923 - DNA, 25 bp, Saccharomyces pastorianus
ataacgtgaaccctaattcgacatt

SEQ ID NO: 39924 - DNA, 25 bp, Saccharomyces pastorianus
gtgatgctatcgtacttaaattgct

SEQ ID NO: 39925 - DNA, 25 bp, Saccharomyces pastorianus
gaacagattatcatcacgcgggaca

SEQ ID NO: 39926 - DNA, 25 bp, Saccharomyces pastorianus
ccttccatggatcggtcttctataa

SEQ ID NO: 39927 - DNA, 25 bp, Saccharomyces pastorianus
aattgctaagcaatccttccatgga

SEQ ID NO: 39928 - DNA, 25 bp, Saccharomyces pastorianus
aattcgacattcacgacacaggagg

SEQ ID NO: 39929 - DNA, 25 bp, Saccharomyces pastorianus
atcacgcgggacatcattgaatggc

SEQ ID NO: 39930 - DNA, 25 bp, Saccharomyces pastorianus
taggttttctcccacaaagttatcg

SEQ ID NO: 39931 - DNA, 25 bp, Saccharomyces pastorianus
cgaatgtgcttcgagtagtctgttc

SEQ ID NO: 39932 - DNA, 25 bp, Saccharomyces pastorianus
tgtgctctcttacatcaaggacgtt

SEQ ID NO: 39933 - DNA, 25 bp, Saccharomyces pastorianus
acctgattgaaacctcgtgtaccgt

SEQ ID NO: 39934 - DNA, 25 bp, Saccharomyces pastorianus
tatcgaatgcgtaccatgtgctctc

SEQ ID NO: 39935 - DNA, 25 bp, Saccharomyces pastorianus
ctcgtgtaccgtgctggacttgaag

SEQ ID NO: 39936 - DNA, 25 bp, Saccharomyces pastorianus
atatcatacatagtcccttcggttt

SEQ ID NO: 39937 - DNA, 25 bp, Saccharomyces pastorianus
gagtacgaactttttgccaggcaca

SEQ ID NO: 39938 - DNA, 25 bp, Saccharomyces pastorianus
aaatattcatcctgggttcctctta

SEQ ID NO: 39939 - DNA, 25 bp, Saccharomyces pastorianus
tcccttcggtttctctacaatgttt

SEQ ID NO: 39940 - DNA, 25 bp, Saccharomyces pastorianus
ttttagatcccgtcactgtgtcgaa

SEQ ID NO: 39941 - DNA, 25 bp, Saccharomyces pastorianus
aaggccgttgtattttgaagagctc

SEQ ID NO: 39942 - DNA, 25 bp, Saccharomyces pastorianus
attggctaagatgtaccctcagtac

SEQ ID NO: 39943 - DNA, 25 bp, Saccharomyces pastorianus
gtactcctgcttccctattgataag

SEQ ID NO: 39944 - DNA, 25 bp, Saccharomyces pastorianus
agccctacgcatctaaatacagcag

SEQ ID NO: 39945 - DNA, 25 bp, Saccharomyces pastorianus
agcaatgacgtcacttttttccaaa

SEQ ID NO: 39946 - DNA, 25 bp, Saccharomyces pastorianus
gctatgatcccgtaacaggcactta

SEQ ID NO: 39947 - DNA, 25 bp, Saccharomyces pastorianus
atatcaaatggtcctgtctccgttc

SEQ ID NO: 39948 - DNA, 25 bp, Saccharomyces pastorianus
gtctccgttccaactactgagagtg

SEQ ID NO: 39949 - DNA, 25 bp, Saccharomyces pastorianus
gtcgaattcctagaaccggttgatt

SEQ ID NO: 39950 - DNA, 25 bp, Saccharomyces pastorianus
ggttgatttgtctaatacaccctta

SEQ ID NO: 39951 - DNA, 25 bp, Saccharomyces pastorianus
atcgatatcaaagtgccaggtctac

SEQ ID NO: 39952 - DNA, 25 bp, Saccharomyces pastorianus
gacaaaactgattcttcccatacca

SEQ ID NO: 39953 - DNA, 25 bp, Saccharomyces pastorianus
agagttactttgtactcctgcttcc

SEQ ID NO: 39954 - DNA, 25 bp, Saccharomyces pastorianus
gcattcccattcgatgtttactcta

SEQ ID NO: 39955 - DNA, 25 bp, Saccharomyces pastorianus
cgtaaccatggtgtcatcgctaaat

SEQ ID NO: 39956 - DNA, 25 bp, Saccharomyces pastorianus
gcagtgatgaagatgcattcccatt

SEQ ID NO: 39957 - DNA, 25 bp, Saccharomyces pastorianus
gaaaacgtcatattctagtgctaaa

SEQ ID NO: 39958 - DNA, 25 bp, Saccharomyces pastorianus
aacttttgagtagatcgcattcgaa

SEQ ID NO: 39959 - DNA, 25 bp, Saccharomyces pastorianus
gaatgttatcgtgcctgggcaatat

SEQ ID NO: 39960 - DNA, 25 bp, Saccharomyces pastorianus
atgggcattgtacttttcatgtgta

SEQ ID NO: 39961 - DNA, 25 bp, Saccharomyces pastorianus
aatcaagcgcgagttcaagaagtac

SEQ ID NO: 39962 - DNA, 25 bp, Saccharomyces pastorianus
gtgtatgttagcatgctctgcattt

SEQ ID NO: 39963 - DNA, 25 bp, Saccharomyces pastorianus
agctcatctgagacatcgttcaatg

SEQ ID NO: 39964 - DNA, 25 bp, Saccharomyces pastorianus
atactaagactactgggttccaaag

SEQ ID NO: 39965 - DNA, 25 bp, Saccharomyces pastorianus
aacctactgatcaattgcgctggcc

SEQ ID NO: 39966 - DNA, 25 bp, Saccharomyces pastorianus
ccctaacgagtgctattggcccaaa

SEQ ID NO: 39967 - DNA, 25 bp, Saccharomyces pastorianus
aacggtggcatccaaagaggcccta

SEQ ID NO: 39968 - DNA, 25 bp, Saccharomyces pastorianus
ggacgacttcttcccaaattcaaga

SEQ ID NO: 39969 - DNA, 25 bp, Saccharomyces pastorianus
atttcatcgatcttacagtccggga

SEQ ID NO: 39970 - DNA, 25 bp, Saccharomyces pastorianus
gcattgtcccgatacacagaggtct

SEQ ID NO: 39971 - DNA, 25 bp, Saccharomyces pastorianus
gcctcaatgggttgccagtgaacct

SEQ ID NO: 39972 - DNA, 25 bp, Saccharomyces pastorianus
aaggaatatccgctgccacacgata

SEQ ID NO: 39973 - DNA, 25 bp, Saccharomyces pastorianus
tacgcctgttgaggtagcacaccaa

SEQ ID NO: 39974 - DNA, 25 bp, Saccharomyces pastorianus
gaaccatgcgacaactggtcaggtt

SEQ ID NO: 39975 - DNA, 25 bp, Saccharomyces pastorianus
tgcgctggcctaactcaagaatcat

SEQ ID NO: 39976 - DNA, 25 bp, Saccharomyces pastorianus
aacggctccagtatatattgatgca

SEQ ID NO: 39977 - DNA, 25 bp, Saccharomyces pastorianus
attcgtcttctcactcttcatttaa

SEQ ID NO: 39978 - DNA, 25 bp, Saccharomyces pastorianus
agtacagttctcaggtcttcgccta

SEQ ID NO: 39979 - DNA, 25 bp, Saccharomyces pastorianus
gaagcattctccagtacagttctca

SEQ ID NO: 39980 - DNA, 25 bp, Saccharomyces pastorianus
agacaattctttcggatctgcaaat

SEQ ID NO: 39981 - DNA, 25 bp, Saccharomyces pastorianus
gtcttcgcctaactcgagtgactat

SEQ ID NO: 39982 - DNA, 25 bp, Saccharomyces pastorianus
gggccctgtcagaagatttttcggt

SEQ ID NO: 39983 - DNA, 25 bp, Saccharomyces pastorianus
gataaccgtttctcagatggactaa

SEQ ID NO: 39984 - DNA, 25 bp, Saccharomyces pastorianus
gaccccgatcaaggccttaataaga

SEQ ID NO: 39985 - DNA, 25 bp, Saccharomyces pastorianus
taagactgaagaactctcccgttga

SEQ ID NO: 39986 - DNA, 25 bp, Saccharomyces pastorianus
gagtgactattgctcttcgttggag

SEQ ID NO: 39987 - DNA, 25 bp, Saccharomyces pastorianus
gataaacctttggaacctatcgagg

SEQ ID NO: 39988 - DNA, 25 bp, Saccharomyces pastorianus
taaattattgcctttgcctgatgaa

SEQ ID NO: 39989 - DNA, 25 bp, Saccharomyces pastorianus
aaaagttgacgagctcagcgctttg

SEQ ID NO: 39990 - DNA, 25 bp, Saccharomyces pastorianus
acggataccgttagctttgaaggat

SEQ ID NO: 39991 - DNA, 25 bp, Saccharomyces pastorianus
tcagtcattgactggccagatgagc

SEQ ID NO: 39992 - DNA, 25 bp, Saccharomyces pastorianus
gcggatgttctggaactggtttcac

SEQ ID NO: 39993 - DNA, 25 bp, Saccharomyces pastorianus
atccctgtggtgtttagtgccgaaa

SEQ ID NO: 39994 - DNA, 25 bp, Saccharomyces pastorianus
atgggattcctccaaacctatttcg

SEQ ID NO: 39995 - DNA, 25 bp, Saccharomyces pastorianus
gagtcggtagaccaacccaacggat

SEQ ID NO: 39996 - DNA, 25 bp, Saccharomyces pastorianus
tagtgccgaaaagccggatcccaaa

SEQ ID NO: 39997 - DNA, 25 bp, Saccharomyces pastorianus
agaggtatcctttctggtatccctg

SEQ ID NO: 39998 - DNA, 25 bp, Saccharomyces pastorianus
gcaaatcagccttcaatttcttcac

SEQ ID NO: 39999 - DNA, 25 bp, Saccharomyces pastorianus
cctaatcttcccctttgcaaagaat

SEQ ID NO: 40000 - DNA, 25 bp, Saccharomyces pastorianus
gaccattatcgcaaatcagccttca

SEQ ID NO: 40001 - DNA, 25 bp, Saccharomyces pastorianus
gtcttcaaaacgacacttttatctc

SEQ ID NO: 40002 - DNA, 25 bp, Saccharomyces pastorianus
gaactaatcgtcttcaaaacgacac

SEQ ID NO: 40003 - DNA, 25 bp, Saccharomyces pastorianus
aactctcgttttatagaactaatcg

SEQ ID NO: 40004 - DNA, 25 bp, Saccharomyces pastorianus
gatgactttagattgaccattatcg

SEQ ID NO: 40005 - DNA, 25 bp, Saccharomyces pastorianus
ctctttttcaagaagcgcataccta

SEQ ID NO: 40006 - DNA, 25 bp, Saccharomyces pastorianus
tcaatttcttcacaatactacgtag

SEQ ID NO: 40007 - DNA, 25 bp, Saccharomyces pastorianus
aaccacagatttgaatcatgatgac

SEQ ID NO: 40008 - DNA, 25 bp, Saccharomyces pastorianus
tactacgtagataaaaactctcgtt

SEQ ID NO: 40009 - DNA, 25 bp, Saccharomyces pastorianus
gaatcccataatcgttctaatgcaa

SEQ ID NO: 40010 - DNA, 25 bp, Saccharomyces pastorianus
ggtcttggaccatctaaggaatcga

SEQ ID NO: 40011 - DNA, 25 bp, Saccharomyces pastorianus
aaaggatatctttgctaatgcggga

SEQ ID NO: 40012 - DNA, 25 bp, Saccharomyces pastorianus
aaacgtttcacgagccaattcgaga

SEQ ID NO: 40013 - DNA, 25 bp, Saccharomyces pastorianus
gtattccaaaaacatcttcctccaa

SEQ ID NO: 40014 - DNA, 25 bp, Saccharomyces pastorianus
ggctcttcagcagatgaatcccata

SEQ ID NO: 40015 - DNA, 25 bp, Saccharomyces pastorianus
aaattcggatatggcgtcaggtctt

SEQ ID NO: 40016 - DNA, 25 bp, Saccharomyces pastorianus
aaggtcgaatagttcttcttcttca

SEQ ID NO: 40017 - DNA, 25 bp, Saccharomyces pastorianus
cgagattcttctgaccaacgtatgt

SEQ ID NO: 40018 - DNA, 25 bp, Saccharomyces pastorianus
gagacggttctcaatagtggactac

SEQ ID NO: 40019 - DNA, 25 bp, Saccharomyces pastorianus
atcttcttcagatggctcttcagca

SEQ ID NO: 40020 - DNA, 25 bp, Saccharomyces pastorianus
agaaaccttgttgtgatgacggaaa

SEQ ID NO: 40021 - DNA, 25 bp, Saccharomyces pastorianus
gacgacttcaaaactgcctctttat

SEQ ID NO: 40022 - DNA, 25 bp, Saccharomyces pastorianus
agcgcaaaagtcttctctcttttct

SEQ ID NO: 40023 - DNA, 25 bp, Saccharomyces pastorianus
aagtaccatgcaagtgtcagccaaa

SEQ ID NO: 40024 - DNA, 25 bp, Saccharomyces pastorianus
agttgtttccttgaagggctggcct

SEQ ID NO: 40025 - DNA, 25 bp, Saccharomyces pastorianus
tggaacttgctagcggacgacttca

SEQ ID NO: 40026 - DNA, 25 bp, Saccharomyces pastorianus
gatgctactgattttgattctgttt

SEQ ID NO: 40027 - DNA, 25 bp, Saccharomyces pastorianus
aactggaagttcaacgcctggtaga

SEQ ID NO: 40028 - DNA, 25 bp, Saccharomyces pastorianus
aagacaggtaactcatcagatgcta

SEQ ID NO: 40029 - DNA, 25 bp, Saccharomyces pastorianus
ttatccaacttgaagctcctttctg

SEQ ID NO: 40030 - DNA, 25 bp, Saccharomyces pastorianus
aaagaaaacctctccatcactgcta

SEQ ID NO: 40031 - DNA, 25 bp, Saccharomyces pastorianus
tcacagcattttacgatccagggat

SEQ ID NO: 40032 - DNA, 25 bp, Saccharomyces pastorianus
tggcgcttccctgaaatggcaatca

SEQ ID NO: 40033 - DNA, 25 bp, Saccharomyces pastorianus
gcaccgtcagtgttaccaagtacca

SEQ ID NO: 40034 - DNA, 25 bp, Saccharomyces pastorianus
agacccgacgagctattccgtaaat

SEQ ID NO: 40035 - DNA, 25 bp, Saccharomyces pastorianus
gtagtgatgatgatggcgcttccct

SEQ ID NO: 40036 - DNA, 25 bp, Saccharomyces pastorianus
tagcgaagaatcacgtagacccgac

SEQ ID NO: 40037 - DNA, 25 bp, Saccharomyces pastorianus
aaatcgcaccaatctacatgcaccg

SEQ ID NO: 40038 - DNA, 25 bp, Saccharomyces pastorianus
gaaaatgtaagttcacacactccta

SEQ ID NO: 40039 - DNA, 25 bp, Saccharomyces pastorianus
gacatcgttgattcttcagtggaca

SEQ ID NO: 40040 - DNA, 25 bp, Saccharomyces pastorianus
gacggcgatatagcatccgggttta

SEQ ID NO: 40041 - DNA, 25 bp, Saccharomyces pastorianus
aaacttgaggatcccgaagacatcg

SEQ ID NO: 40042 - DNA, 25 bp, Saccharomyces pastorianus
aactgttaagtgatcctctcgagaa

SEQ ID NO: 40043 - DNA, 25 bp, Saccharomyces pastorianus
ggccctcacagaaaaccagattgca

SEQ ID NO: 40044 - DNA, 25 bp, Saccharomyces pastorianus
tcaggatgaaagactggccctcaca

SEQ ID NO: 40045 - DNA, 25 bp, Saccharomyces pastorianus
aatgggaagcgcagcttctaagcaa

SEQ ID NO: 40046 - DNA, 25 bp, Saccharomyces pastorianus
aggtgtcacggcatatagagtaaat

SEQ ID NO: 40047 - DNA, 25 bp, Saccharomyces pastorianus
gcactcaataataccaactcgcgaa

SEQ ID NO: 40048 - DNA, 25 bp, Saccharomyces pastorianus
gggaatgtactcaaacctaatgaag

SEQ ID NO: 40049 - DNA, 25 bp, Saccharomyces pastorianus
gaattgcaaggctttcaggatgaaa

SEQ ID NO: 40050 - DNA, 25 bp, Saccharomyces pastorianus
ttaccaatactttttcctgaagatg

SEQ ID NO: 40051 - DNA, 25 bp, Saccharomyces pastorianus
tgaagcggttattacaccgttacca

SEQ ID NO: 40052 - DNA, 25 bp, Saccharomyces pastorianus
gaagaggctttaggtgtcacggcat

SEQ ID NO: 40053 - DNA, 25 bp, Saccharomyces pastorianus
gggtggtcctcactatcacagtcgt

SEQ ID NO: 40054 - DNA, 25 bp, Saccharomyces pastorianus
ggcattgttgtttagttttttcctg

SEQ ID NO: 40055 - DNA, 25 bp, Saccharomyces pastorianus
ttttttcctgttcctggacttgata

SEQ ID NO: 40056 - DNA, 25 bp, Saccharomyces pastorianus
ggccgcaagcgttacacagaacagt

SEQ ID NO: 40057 - DNA, 25 bp, Saccharomyces pastorianus
caccagttgtgagcagccgtttttt

SEQ ID NO: 40058 - DNA, 25 bp, Saccharomyces pastorianus
gacccgctaaccatgaatttttcca

SEQ ID NO: 40059 - DNA, 25 bp, Saccharomyces pastorianus
gttttaacggtgaagcagttctggc

SEQ ID NO: 40060 - DNA, 25 bp, Saccharomyces pastorianus
tacctttgggttattactgggcagc

SEQ ID NO: 40061 - DNA, 25 bp, Saccharomyces pastorianus
tttcaaactaatgggccttggctcg

SEQ ID NO: 40062 - DNA, 25 bp, Saccharomyces pastorianus
ttggctcgccatgcaatttcaggaa

SEQ ID NO: 40063 - DNA, 25 bp, Saccharomyces pastorianus
aacagtaccgtgttcatctcttctc

SEQ ID NO: 40064 - DNA, 25 bp, Saccharomyces pastorianus
aagggccttgagtcgctgaccaacg

SEQ ID NO: 40065 - DNA, 25 bp, Saccharomyces pastorianus
gagagaggttcgtgtccggaccaac

SEQ ID NO: 40066 - DNA, 25 bp, Saccharomyces pastorianus
gagattggttcaagacctcctggcg

SEQ ID NO: 40067 - DNA, 25 bp, Saccharomyces pastorianus
tgttcccgctgcaatcgttgagaga

SEQ ID NO: 40068 - DNA, 25 bp, Saccharomyces pastorianus
ctcctggcgtcttggttgtaggtaa

SEQ ID NO: 40069 - DNA, 25 bp, Saccharomyces pastorianus
gtgacgtcgcagatcaagtgctcat

SEQ ID NO: 40070 - DNA, 25 bp, Saccharomyces pastorianus
gtgctctgccaaaaatccctgagtt

SEQ ID NO: 40071 - DNA, 25 bp, Saccharomyces pastorianus
atcgggccaacgttctaatcacaga

SEQ ID NO: 40072 - DNA, 25 bp, Saccharomyces pastorianus
tgctcatatgcactgggaccggtag

SEQ ID NO: 40073 - DNA, 25 bp, Saccharomyces pastorianus
catacatctttggtcgtggtggcga

SEQ ID NO: 40074 - DNA, 25 bp, Saccharomyces pastorianus
cacagtgttcttgatggcgttgcat

SEQ ID NO: 40075 - DNA, 25 bp, Saccharomyces pastorianus
gtgtcccctgttatattttgcgtga

SEQ ID NO: 40076 - DNA, 25 bp, Saccharomyces pastorianus
atgatatcgatgctcttctaaaaga

SEQ ID NO: 40077 - DNA, 25 bp, Saccharomyces pastorianus
aacgaattatctggccaatggcacc

SEQ ID NO: 40078 - DNA, 25 bp, Saccharomyces pastorianus
aattgtttcctatgcaagaccgcga

SEQ ID NO: 40079 - DNA, 25 bp, Saccharomyces pastorianus
gcgaaatcccgttgtgcggtaaaca

SEQ ID NO: 40080 - DNA, 25 bp, Saccharomyces pastorianus
gccaatggcaccgtgaatgtttcaa

SEQ ID NO: 40081 - DNA, 25 bp, Saccharomyces pastorianus
ggacgccgataattctagaccgact

SEQ ID NO: 40082 - DNA, 25 bp, Saccharomyces pastorianus
aattcaataagcgtgtcccctgtta

SEQ ID NO: 40083 - DNA, 25 bp, Saccharomyces pastorianus
cccaccaacgggactgtagaatata

SEQ ID NO: 40084 - DNA, 25 bp, Saccharomyces pastorianus
aagaccgcgattaccaacgattatt

SEQ ID NO: 40085 - DNA, 25 bp, Saccharomyces pastorianus
tgcgtgatacgccatactgtcaaaa

SEQ ID NO: 40086 - DNA, 25 bp, Saccharomyces pastorianus
ctggaggtagtcgttgtgcattaaa

SEQ ID NO: 40087 - DNA, 25 bp, Saccharomyces pastorianus
atgctagccaccaagatgtctcaac

SEQ ID NO: 40088 - DNA, 25 bp, Saccharomyces pastorianus
atcatttcatttctggttacacctc

SEQ ID NO: 40089 - DNA, 25 bp, Saccharomyces pastorianus
tattaacttgtgacgcttctggtgt

SEQ ID NO: 40090 - DNA, 25 bp, Saccharomyces pastorianus
ggtgtcactgaacctgaaccaacat

SEQ ID NO: 40091 - DNA, 25 bp, Saccharomyces pastorianus
gaaccaacattttcttcctgtttcg

SEQ ID NO: 40092 - DNA, 25 bp, Saccharomyces pastorianus
taatctccaagttcctaccaaggtc

SEQ ID NO: 40093 - DNA, 25 bp, Saccharomyces pastorianus
tcccgtttctaaactgactcctgaa

SEQ ID NO: 40094 - DNA, 25 bp, Saccharomyces pastorianus
tataaaggcgccgttaccaacttgg

SEQ ID NO: 40095 - DNA, 25 bp, Saccharomyces pastorianus
gttccggctgaacttttgaatccag

SEQ ID NO: 40096 - DNA, 25 bp, Saccharomyces pastorianus
gattccatgtttggccgattcccat

SEQ ID NO: 40097 - DNA, 25 bp, Saccharomyces pastorianus
gaaaacttcaagagcccacgtgcac

SEQ ID NO: 40098 - DNA, 25 bp, Saccharomyces pastorianus
gtttaccacggtgttgccgaacaag

SEQ ID NO: 40099 - DNA, 25 bp, Saccharomyces pastorianus
gtccctgcagtttctattccagtga

SEQ ID NO: 40100 - DNA, 25 bp, Saccharomyces pastorianus
aggcaccaacagaccattcatatat

SEQ ID NO: 40101 - DNA, 25 bp, Saccharomyces pastorianus
agatgcagcccatttgttcagactc

SEQ ID NO: 40102 - DNA, 25 bp, Saccharomyces pastorianus
ccacgtgcacttaccgaggaaactg

SEQ ID NO: 40103 - DNA, 25 bp, Saccharomyces pastorianus
gcattatggttctttttatcgcaag

SEQ ID NO: 40104 - DNA, 25 bp, Saccharomyces pastorianus
gagaggttttggatgtccctgcagt

SEQ ID NO: 40105 - DNA, 25 bp, Saccharomyces pastorianus
tgaggtgtgtcaagttggcgccctc

SEQ ID NO: 40106 - DNA, 25 bp, Saccharomyces pastorianus
tatactagtggcacgttcgggctac

SEQ ID NO: 40107 - DNA, 25 bp, Saccharomyces pastorianus
gaagcggtcgagtttaccacggtgt

SEQ ID NO: 40108 - DNA, 25 bp, Saccharomyces pastorianus
gagaagttttgaacgtccctgcagt

SEQ ID NO: 40109 - DNA, 25 bp, Saccharomyces pastorianus
agatgtggctcgtttgttcagactc

SEQ ID NO: 40110 - DNA, 25 bp, Saccharomyces pastorianus
tgagatgtgtcaggttggcgccttc

SEQ ID NO: 40111 - DNA, 25 bp, Saccharomyces pastorianus
agggaccaacagaccatttctatat

SEQ ID NO: 40112 - DNA, 25 bp, Saccharomyces pastorianus
accacggtatcgctgaacaaggaat

SEQ ID NO: 40113 - DNA, 25 bp, Saccharomyces pastorianus
ggtcctttttatcgcaacggatggt

SEQ ID NO: 40114 - DNA, 25 bp, Saccharomyces pastorianus
aaggccaaaacgtctggtccgctgt

SEQ ID NO: 40115 - DNA, 25 bp, Saccharomyces pastorianus
ggagacaaagcgttcgttcgagtgt

SEQ ID NO: 40116 - DNA, 25 bp, Saccharomyces pastorianus
aatgatacgtttgggctacgctcag

SEQ ID NO: 40117 - DNA, 25 bp, Saccharomyces pastorianus
taagcggccgagtttaccacggtat

SEQ ID NO: 40118 - DNA, 25 bp, Saccharomyces pastorianus
tccctgcagtctctatttctgtgaa

SEQ ID NO: 40119 - DNA, 25 bp, Saccharomyces pastorianus
gccgtaaacaggatctcagggaatt

SEQ ID NO: 40120 - DNA, 25 bp, Saccharomyces pastorianus
cagatttgacagcttggcctcggaa

SEQ ID NO: 40121 - DNA, 25 bp, Saccharomyces pastorianus
gcaaaaactgttccaggctccaaac

SEQ ID NO: 40122 - DNA, 25 bp, Saccharomyces pastorianus
aaacctttgtccgtacatactctgt

SEQ ID NO: 40123 - DNA, 25 bp, Saccharomyces pastorianus
gcttggcctcggaatgtgacattgg

SEQ ID NO: 40124 - DNA, 25 bp, Saccharomyces pastorianus
gctgaaatttttggtgttgccccta

SEQ ID NO: 40125 - DNA, 25 bp, Saccharomyces pastorianus
aacaagacagtcacaacgaacgcaa

SEQ ID NO: 40126 - DNA, 25 bp, Saccharomyces pastorianus
aggcgaagcctttatcagatttgac

SEQ ID NO: 40127 - DNA, 25 bp, Saccharomyces pastorianus
cgaatttcacacaggcgaagccttt

SEQ ID NO: 40128 - DNA, 25 bp, Saccharomyces pastorianus
tggtaaaggtagcttccgccaagaa

SEQ ID NO: 40129 - DNA, 25 bp, Saccharomyces pastorianus
gaaaccgttgagaatctttgcattt

SEQ ID NO: 40130 - DNA, 25 bp, Saccharomyces pastorianus
ggcactacacaaggactcgctgtta

SEQ ID NO: 40131 - DNA, 25 bp, Saccharomyces pastorianus
gacgtgggaactctggcgtatccaa

SEQ ID NO: 40132 - DNA, 25 bp, Saccharomyces pastorianus
gacaggtccttgtccgtatacaaat

SEQ ID NO: 40133 - DNA, 25 bp, Saccharomyces pastorianus
ttactagcgctttactcgctggatg

SEQ ID NO: 40134 - DNA, 25 bp, Saccharomyces pastorianus
ggacgtgtacagtttatcatcgcct

SEQ ID NO: 40135 - DNA, 25 bp, Saccharomyces pastorianus
aagctccagattccctacgggagaa

SEQ ID NO: 40136 - DNA, 25 bp, Saccharomyces pastorianus
ggcagcgttgcggttgttttaaaga

SEQ ID NO: 40137 - DNA, 25 bp, Saccharomyces pastorianus
tatccaacttacactcttccagaga

SEQ ID NO: 40138 - DNA, 25 bp, Saccharomyces pastorianus
aggccactacgctacatttgcagag

SEQ ID NO: 40139 - DNA, 25 bp, Saccharomyces pastorianus
atttcaatcttacacggacgactcc

SEQ ID NO: 40140 - DNA, 25 bp, Saccharomyces pastorianus
agtggcctgctttgacctgaggaaa

SEQ ID NO: 40141 - DNA, 25 bp, Saccharomyces pastorianus
tagtcagggaaagttcggtcttagc

SEQ ID NO: 40142 - DNA, 25 bp, Saccharomyces pastorianus
gacgcgctggtaccaagaagagaca

SEQ ID NO: 40143 - DNA, 25 bp, Saccharomyces pastorianus
aacaccgttaagtgacgatgtcgat

SEQ ID NO: 40144 - DNA, 25 bp, Saccharomyces pastorianus
gagacacctcattatctgaatcttc

SEQ ID NO: 40145 - DNA, 25 bp, Saccharomyces pastorianus
gaagtgtaacaactactcaggtgct

SEQ ID NO: 40146 - DNA, 25 bp, Saccharomyces pastorianus
gagttgtcaataccttattaaccga

SEQ ID NO: 40147 - DNA, 25 bp, Saccharomyces pastorianus
gggtatttttgtgatcggtgcaaca

SEQ ID NO: 40148 - DNA, 25 bp, Saccharomyces pastorianus
actcaggtgctgatttggctgcttt

SEQ ID NO: 40149 - DNA, 25 bp, Saccharomyces pastorianus
gacctggtagattagacaagacttt

SEQ ID NO: 40150 - DNA, 25 bp, Saccharomyces pastorianus
ctttgatgaattggacgcgctggta

SEQ ID NO: 40151 - DNA, 25 bp, Saccharomyces pastorianus
gaaattcaatccgtccttgataacg

SEQ ID NO: 40152 - DNA, 25 bp, Saccharomyces pastorianus
ggcccaacaggtccttaacgatgaa

SEQ ID NO: 40153 - DNA, 25 bp, Saccharomyces pastorianus
ttggcccaacaggtccttaacgatg

SEQ ID NO: 40154 - DNA, 25 bp, Saccharomyces pastorianus
tgccgaaagtgccttggcccaacag

SEQ ID NO: 40155 - DNA, 25 bp, Saccharomyces pastorianus
gcatttgagcaccttgccgaaagtg

SEQ ID NO: 40156 - DNA, 25 bp, Saccharomyces pastorianus
ccttgccgaaagtgccttggcccaa

SEQ ID NO: 40157 - DNA, 25 bp, Saccharomyces pastorianus
agcaccttgccgaaagtgccttggc

SEQ ID NO: 40158 - DNA, 25 bp, Saccharomyces pastorianus
cgaaagtgccttggcccaacaggtc

SEQ ID NO: 40159 - DNA, 25 bp, Saccharomyces pastorianus
atgcatttgagcaccttgccgaaag

SEQ ID NO: 40160 - DNA, 25 bp, Saccharomyces pastorianus
gagcaccttgccgaaagtgccttgg

SEQ ID NO: 40161 - DNA, 25 bp, Saccharomyces pastorianus
caacaggtccttaacgatgaagcga

SEQ ID NO: 40162 - DNA, 25 bp, Saccharomyces pastorianus
tttgagcaccttgccgaaagtgcct

SEQ ID NO: 40163 - DNA, 25 bp, Saccharomyces pastorianus
gactcaccttcgaaattactatctg

SEQ ID NO: 40164 - DNA, 25 bp, Saccharomyces pastorianus
tacggtacggaccaatttagatcct

SEQ ID NO: 40165 - DNA, 25 bp, Saccharomyces pastorianus
gcacacttaaagtctcatttggaga

SEQ ID NO: 40166 - DNA, 25 bp, Saccharomyces pastorianus
agatcctttcaatcgttactcagag

SEQ ID NO: 40167 - DNA, 25 bp, Saccharomyces pastorianus
cgacaccgtgttggacagtgataaa

SEQ ID NO: 40168 - DNA, 25 bp, Saccharomyces pastorianus
gagcaatttggccattattcctcag

SEQ ID NO: 40169 - DNA, 25 bp, Saccharomyces pastorianus
cgaggctacggcttcagtggacatg

SEQ ID NO: 40170 - DNA, 25 bp, Saccharomyces pastorianus
gattttggttcttgacgaggctacg

SEQ ID NO: 40171 - DNA, 25 bp, Saccharomyces pastorianus
ttggcaagagcgttattgagtcact

SEQ ID NO: 40172 - DNA, 25 bp, Saccharomyces pastorianus
tatatccgagttaggcttatttgac

SEQ ID NO: 40173 - DNA, 25 bp, Saccharomyces pastorianus
aggccattgaactagcacacttaaa

SEQ ID NO: 40174 - DNA, 25 bp, Saccharomyces pastorianus
gataatgtccaagatcttaccaaag

SEQ ID NO: 40175 - DNA, 25 bp, Saccharomyces pastorianus
ggatttcataccttacctgattcaa

SEQ ID NO: 40176 - DNA, 25 bp, Saccharomyces pastorianus
gaaactaccctttgtcttagattct

SEQ ID NO: 40177 - DNA, 25 bp, Saccharomyces pastorianus
aatcgtcgttgccattagagcctat

SEQ ID NO: 40178 - DNA, 25 bp, Saccharomyces pastorianus
ggataaaaaccatgccttgaacctg

SEQ ID NO: 40179 - DNA, 25 bp, Saccharomyces pastorianus
ggatcaatttgccaattacgttatt

SEQ ID NO: 40180 - DNA, 25 bp, Saccharomyces pastorianus
cattcctatgggtgtagagtgatcc

SEQ ID NO: 40181 - DNA, 25 bp, Saccharomyces pastorianus
gaagtccattctttatggctccaaa

SEQ ID NO: 40182 - DNA, 25 bp, Saccharomyces pastorianus
gcataaattcgcctccaacgtagtg

SEQ ID NO: 40183 - DNA, 25 bp, Saccharomyces pastorianus
tgccttgaacctggaagacgattcc

SEQ ID NO: 40184 - DNA, 25 bp, Saccharomyces pastorianus
cttagattctttgacgggccacatt

SEQ ID NO: 40185 - DNA, 25 bp, Saccharomyces pastorianus
aattgtcactggttcatacgataag

SEQ ID NO: 40186 - DNA, 25 bp, Saccharomyces pastorianus
gaaacaaatcgtgggcacagtgcac

SEQ ID NO: 40187 - DNA, 25 bp, Saccharomyces pastorianus
gatttctccccaactggtgacgaaa

SEQ ID NO: 40188 - DNA, 25 bp, Saccharomyces pastorianus
gaaacttatcgcgttcgttgactgt

SEQ ID NO: 40189 - DNA, 25 bp, Saccharomyces pastorianus
gaatgcagcatgtcttccaagtcaa

SEQ ID NO: 40190 - DNA, 25 bp, Saccharomyces pastorianus
aaggacatgccgtttatctctgaaa

SEQ ID NO: 40191 - DNA, 25 bp, Saccharomyces pastorianus
ataacgcttactactacgacatgag

SEQ ID NO: 40192 - DNA, 25 bp, Saccharomyces pastorianus
acacagacacgtgccagaagtcatt

SEQ ID NO: 40193 - DNA, 25 bp, Saccharomyces pastorianus
aggagaggttcagacatatgccaga

SEQ ID NO: 40194 - DNA, 25 bp, Saccharomyces pastorianus
gtgatggatgtcgatttctccccaa

SEQ ID NO: 40195 - DNA, 25 bp, Saccharomyces pastorianus
taacaccaaccatggacattccaga

SEQ ID NO: 40196 - DNA, 25 bp, Saccharomyces pastorianus
aaactaccaagcatatggcctcgta

SEQ ID NO: 40197 - DNA, 25 bp, Saccharomyces pastorianus
cgattgtgaggtttcaagcatgctt

SEQ ID NO: 40198 - DNA, 25 bp, Saccharomyces pastorianus
atgcggatggtgattctggttactt

SEQ ID NO: 40199 - DNA, 25 bp, Saccharomyces pastorianus
agacaacatccttcattcctttaat

SEQ ID NO: 40200 - DNA, 25 bp, Saccharomyces pastorianus
aagcatgcttgacggtctctttaac

SEQ ID NO: 40201 - DNA, 25 bp, Saccharomyces pastorianus
aggtgcgttgaaccgagattccaat

SEQ ID NO: 40202 - DNA, 25 bp, Saccharomyces pastorianus
acaggcgatgatttcccaatttttt

SEQ ID NO: 40203 - DNA, 25 bp, Saccharomyces pastorianus
tgccgcccttcctataaatttggta

SEQ ID NO: 40204 - DNA, 25 bp, Saccharomyces pastorianus
tgttactcaattatccaaagcctgg

SEQ ID NO: 40205 - DNA, 25 bp, Saccharomyces pastorianus
aaaattggcagcgttattgaatacc

SEQ ID NO: 40206 - DNA, 25 bp, Saccharomyces pastorianus
ggagatctcctgatttaccagatta

SEQ ID NO: 40207 - DNA, 25 bp, Saccharomyces pastorianus
tacctaccctagaatacttatcgag

SEQ ID NO: 40208 - DNA, 25 bp, Saccharomyces pastorianus
gttgcatttcattttccatggttta

SEQ ID NO: 40209 - DNA, 25 bp, Saccharomyces pastorianus
ttacttctccttcaactatctgttt

SEQ ID NO: 40210 - DNA, 25 bp, Saccharomyces pastorianus
gattgttgtctttatccttactgtt

SEQ ID NO: 40211 - DNA, 25 bp, Saccharomyces pastorianus
atccttactgttatggcacattcca

SEQ ID NO: 40212 - DNA, 25 bp, Saccharomyces pastorianus
gtcataccgtttgaagttcgatctt

SEQ ID NO: 40213 - DNA, 25 bp, Saccharomyces pastorianus
gatcgaaacctcaacatttacctac

SEQ ID NO: 40214 - DNA, 25 bp, Saccharomyces pastorianus
actgggactcttcactctttttgat

SEQ ID NO: 40215 - DNA, 25 bp, Saccharomyces pastorianus
tatgcaggcatttacttcatggaat

SEQ ID NO: 40216 - DNA, 25 bp, Saccharomyces pastorianus
cagttttgggttgtattggcatcat

SEQ ID NO: 40217 - DNA, 25 bp, Saccharomyces pastorianus
tggaattttgcctactgggactctt

SEQ ID NO: 40218 - DNA, 25 bp, Saccharomyces pastorianus
atactcccctagacgtgctaataga

SEQ ID NO: 40219 - DNA, 25 bp, Saccharomyces pastorianus
cggcaaaatacctgctgtacctttt

SEQ ID NO: 40220 - DNA, 25 bp, Saccharomyces pastorianus
aaacagtccaagtctttcgtcatcg

SEQ ID NO: 40221 - DNA, 25 bp, Saccharomyces pastorianus
taccaagtcccgtaaaatcctcaag

SEQ ID NO: 40222 - DNA, 25 bp, Saccharomyces pastorianus
agatgggtctccaacacgagcgaaa

SEQ ID NO: 40223 - DNA, 25 bp, Saccharomyces pastorianus
gaggccatgaaatcgcattacagca

SEQ ID NO: 40224 - DNA, 25 bp, Saccharomyces pastorianus
agtggaccacattgacttcggcaaa

SEQ ID NO: 40225 - DNA, 25 bp, Saccharomyces pastorianus
ttcgtcatcgctgggatagggctac

SEQ ID NO: 40226 - DNA, 25 bp, Saccharomyces pastorianus
agcgcggattcttctaaagccgatc

SEQ ID NO: 40227 - DNA, 25 bp, Saccharomyces pastorianus
aaaacttccacgataccgggctcag

SEQ ID NO: 40228 - DNA, 25 bp, Saccharomyces pastorianus
agcgaaacccataagatactcccct

SEQ ID NO: 40229 - DNA, 25 bp, Saccharomyces pastorianus
atgaaatacccgctgtggcaagtgg

SEQ ID NO: 40230 - DNA, 25 bp, Saccharomyces pastorianus
caattggctgaggaagaccgtcttc

SEQ ID NO: 40231 - DNA, 25 bp, Saccharomyces pastorianus
ggtaagttcatcaaccttctggatt

SEQ ID NO: 40232 - DNA, 25 bp, Saccharomyces pastorianus
gacttcctcatgcttagactggcaa

SEQ ID NO: 40233 - DNA, 25 bp, Saccharomyces pastorianus
cagatgtcatcgtgccaaggtcaaa

SEQ ID NO: 40234 - DNA, 25 bp, Saccharomyces pastorianus
gaggcgtttctcaatattcgtgact

SEQ ID NO: 40235 - DNA, 25 bp, Saccharomyces pastorianus
ggtgaggaccctgctcgagtaaaat

SEQ ID NO: 40236 - DNA, 25 bp, Saccharomyces pastorianus
aaccctattaccgtctagtgcagat

SEQ ID NO: 40237 - DNA, 25 bp, Saccharomyces pastorianus
atctcttgcggtgtatagcatacca

SEQ ID NO: 40238 - DNA, 25 bp, Saccharomyces pastorianus
gaccgtcttctcaaggtaagttcat

SEQ ID NO: 40239 - DNA, 25 bp, Saccharomyces pastorianus
gcgtatcaggatacacccttgcaac

SEQ ID NO: 40240 - DNA, 25 bp, Saccharomyces pastorianus
ccaaccattcttcatattcagcaac

SEQ ID NO: 40241 - DNA, 25 bp, Saccharomyces pastorianus
gaaataccacttgcatttgccagga

SEQ ID NO: 40242 - DNA, 25 bp, Saccharomyces pastorianus
agggttgcacttctggttctaaaag

SEQ ID NO: 40243 - DNA, 25 bp, Saccharomyces pastorianus
taacgccgccattactactaaattg

SEQ ID NO: 40244 - DNA, 25 bp, Saccharomyces pastorianus
taatgaagtcaccacgcctctaatg

SEQ ID NO: 40245 - DNA, 25 bp, Saccharomyces pastorianus
aatgtcatcttcctctagaaccaac

SEQ ID NO: 40246 - DNA, 25 bp, Saccharomyces pastorianus
aaagctcctgtgtattcctaataga

SEQ ID NO: 40247 - DNA, 25 bp, Saccharomyces pastorianus
aacttcacttgattcctgctaacga

SEQ ID NO: 40248 - DNA, 25 bp, Saccharomyces pastorianus
atcggagttaccttagctgtttcat

SEQ ID NO: 40249 - DNA, 25 bp, Saccharomyces pastorianus
gaaacgctatacaaaggcccaggga

SEQ ID NO: 40250 - DNA, 25 bp, Saccharomyces pastorianus
aatttgctagactgtaacgccgcca

SEQ ID NO: 40251 - DNA, 25 bp, Saccharomyces pastorianus
aaggcggtttgcatttaattttcat

SEQ ID NO: 40252 - DNA, 25 bp, Saccharomyces pastorianus
aagctctcgtttctggttgcaacga

SEQ ID NO: 40253 - DNA, 25 bp, Saccharomyces pastorianus
ggatttacaattacctgtcctatct

SEQ ID NO: 40254 - DNA, 25 bp, Saccharomyces pastorianus
aaaccggtgaacttacattggctga

SEQ ID NO: 40255 - DNA, 25 bp, Saccharomyces pastorianus
gaaaccaaccacacattccaataat

SEQ ID NO: 40256 - DNA, 25 bp, Saccharomyces pastorianus
gcactgattgattttgatggctgga

SEQ ID NO: 40257 - DNA, 25 bp, Saccharomyces pastorianus
ttctcaggctccagtgatcatcgta

SEQ ID NO: 40258 - DNA, 25 bp, Saccharomyces pastorianus
tgaccgcatccaattcccaaatgga

SEQ ID NO: 40259 - DNA, 25 bp, Saccharomyces pastorianus
tgcaacgactacctgacgaaaccgg

SEQ ID NO: 40260 - DNA, 25 bp, Saccharomyces pastorianus
ttgcggcaagttttctcaggctcca

SEQ ID NO: 40261 - DNA, 25 bp, Saccharomyces pastorianus
gtgatcatcgtagcactgaccgcat

SEQ ID NO: 40262 - DNA, 25 bp, Saccharomyces pastorianus
attcctggtcaagtcaatggttccg

SEQ ID NO: 40263 - DNA, 25 bp, Saccharomyces pastorianus
gggaagtctgctacttctttcttaa

SEQ ID NO: 40264 - DNA, 25 bp, Saccharomyces pastorianus
ggatctttattttgaccaggctatg

SEQ ID NO: 40265 - DNA, 25 bp, Saccharomyces pastorianus
ggaaataccgctaactctatcgaag

SEQ ID NO: 40266 - DNA, 25 bp, Saccharomyces pastorianus
gtggttcgccatttgtggctaccaa

SEQ ID NO: 40267 - DNA, 25 bp, Saccharomyces pastorianus
tttttaaccctatacttcacagccg

SEQ ID NO: 40268 - DNA, 25 bp, Saccharomyces pastorianus
atgttagccaaccatccagataagg

SEQ ID NO: 40269 - DNA, 25 bp, Saccharomyces pastorianus
tatcgaagcaccacaactacctatt

SEQ ID NO: 40270 - DNA, 25 bp, Saccharomyces pastorianus
atggttccgcaaatgtcgatcttgg

SEQ ID NO: 40271 - DNA, 25 bp, Saccharomyces pastorianus
tcacagccggtgcatacaaatcgat

SEQ ID NO: 40272 - DNA, 25 bp, Saccharomyces pastorianus
gatcttggtgggtctggcttgaaca

SEQ ID NO: 40273 - DNA, 25 bp, Saccharomyces pastorianus
gagtctctatgagtatcccagtagg

SEQ ID NO: 40274 - DNA, 25 bp, Saccharomyces pastorianus
gaaatcgcagcctacgtgaaacgta

SEQ ID NO: 40275 - DNA, 25 bp, Saccharomyces pastorianus
aggacccgcttgtggagccgtacag

SEQ ID NO: 40276 - DNA, 25 bp, Saccharomyces pastorianus
gatttgaaccaggttgcgctacctt

SEQ ID NO: 40277 - DNA, 25 bp, Saccharomyces pastorianus
tgaacgtcgtaggtggagtctctat

SEQ ID NO: 40278 - DNA, 25 bp, Saccharomyces pastorianus
gtacagttagctcattggacgtctt

SEQ ID NO: 40279 - DNA, 25 bp, Saccharomyces pastorianus
cagtaggtgttataccgttgccaga

SEQ ID NO: 40280 - DNA, 25 bp, Saccharomyces pastorianus
gtccccgggtttagtgtatacaatg

SEQ ID NO: 40281 - DNA, 25 bp, Saccharomyces pastorianus
tggacgtctttatcttcgttacacc

SEQ ID NO: 40282 - DNA, 25 bp, Saccharomyces pastorianus
gacgatgacgacttgattccggctc

SEQ ID NO: 40283 - DNA, 25 bp, Saccharomyces pastorianus
atagaccgtgtttaccatgagtggc

SEQ ID NO: 40284 - DNA, 25 bp, Saccharomyces pastorianus
ggtcccaatggagaggtcacgttat

SEQ ID NO: 40285 - DNA, 25 bp, Saccharomyces pastorianus
gcaaagcgctacttcgatgagataa

SEQ ID NO: 40286 - DNA, 25 bp, Saccharomyces pastorianus
gaaaatgtccccagtgcgatatagt

SEQ ID NO: 40287 - DNA, 25 bp, Saccharomyces pastorianus
tccactctcatgttatatccggtaa

SEQ ID NO: 40288 - DNA, 25 bp, Saccharomyces pastorianus
aatcattgctaaacccgcttgagga

SEQ ID NO: 40289 - DNA, 25 bp, Saccharomyces pastorianus
ctgggtcctcacatacacatacaaa

SEQ ID NO: 40290 - DNA, 25 bp, Saccharomyces pastorianus
tgcctgcggtctcttctatagaaaa

SEQ ID NO: 40291 - DNA, 25 bp, Saccharomyces pastorianus
ggtcacgttatgcaatgcctgcggt

SEQ ID NO: 40292 - DNA, 25 bp, Saccharomyces pastorianus
aaatgggcctgcagctcaacaggat

SEQ ID NO: 40293 - DNA, 25 bp, Saccharomyces pastorianus
atccggtaataaagccactcctggg

SEQ ID NO: 40294 - DNA, 25 bp, Saccharomyces pastorianus
gcagtaaccggtgagagtctccact

SEQ ID NO: 40295 - DNA, 25 bp, Saccharomyces pastorianus
gacaagaaaacatggttccccgttg

SEQ ID NO: 40296 - DNA, 25 bp, Saccharomyces pastorianus
ctcgccagttcatatttcagtcaaa

SEQ ID NO: 40297 - DNA, 25 bp, Saccharomyces pastorianus
atgagagatttgatggttggcacca

SEQ ID NO: 40298 - DNA, 25 bp, Saccharomyces pastorianus
gttcattccaaagcaagatcgacta

SEQ ID NO: 40299 - DNA, 25 bp, Saccharomyces pastorianus
tgattccccatggttctttggtaga

SEQ ID NO: 40300 - DNA, 25 bp, Saccharomyces pastorianus
aaaatcctttgtacgactaatggca

SEQ ID NO: 40301 - DNA, 25 bp, Saccharomyces pastorianus
gtggctgtcgcctgaccaaaacaaa

SEQ ID NO: 40302 - DNA, 25 bp, Saccharomyces pastorianus
tggttccccgttgccaagaatgatg

SEQ ID NO: 40303 - DNA, 25 bp, Saccharomyces pastorianus
tttttcgtttctttcatatgtcatg

SEQ ID NO: 40304 - DNA, 25 bp, Saccharomyces pastorianus
gatcggaattttttattctcgccag

SEQ ID NO: 40305 - DNA, 25 bp, Saccharomyces pastorianus
gcgacaacctacatctaaatccgaa

SEQ ID NO: 40306 - DNA, 25 bp, Saccharomyces pastorianus
cggtgtgtttatgaactggtcccct

SEQ ID NO: 40307 - DNA, 25 bp, Saccharomyces pastorianus
gcaaccatgggtgtcttatcttttc

SEQ ID NO: 40308 - DNA, 25 bp, Saccharomyces pastorianus
cgactatgtgggttgttcgcacact

SEQ ID NO: 40309 - DNA, 25 bp, Saccharomyces pastorianus
aaatcattcaagtccctatggtggg

SEQ ID NO: 40310 - DNA, 25 bp, Saccharomyces pastorianus
gtggtcttctatggttcattcatcc

SEQ ID NO: 40311 - DNA, 25 bp, Saccharomyces pastorianus
tgatcacagcctcgattttaaccac

SEQ ID NO: 40312 - DNA, 25 bp, Saccharomyces pastorianus
gagcatttctttagcgctgggtgta

SEQ ID NO: 40313 - DNA, 25 bp, Saccharomyces pastorianus
actttctggcatttctttgtggttt

SEQ ID NO: 40314 - DNA, 25 bp, Saccharomyces pastorianus
gtgatcggtcactacagagctattt

SEQ ID NO: 40315 - DNA, 25 bp, Saccharomyces pastorianus
tatatggttgtttagccccgtcaca

SEQ ID NO: 40316 - DNA, 25 bp, Saccharomyces pastorianus
cattccaagtgcaagtcctgtccat

SEQ ID NO: 40317 - DNA, 25 bp, Saccharomyces pastorianus
gttgactggtgtcgccgcagaccaa

SEQ ID NO: 40318 - DNA, 25 bp, Saccharomyces pastorianus
atgttgactggtgtcgccgcagacc

SEQ ID NO: 40319 - DNA, 25 bp, Saccharomyces pastorianus
ctggtgtcgccgcagaccaagtcac

SEQ ID NO: 40320 - DNA, 25 bp, Saccharomyces pastorianus
ccatgttgactggtgtcgccgcaga

SEQ ID NO: 40321 - DNA, 25 bp, Saccharomyces pastorianus
ttatctccatccgatgaaagagtca

SEQ ID NO: 40322 - DNA, 25 bp, Saccharomyces pastorianus
actaccatgttgactggtgtcgccg

SEQ ID NO: 40323 - DNA, 25 bp, Saccharomyces pastorianus
taccatgttgactggtgtcgccgca

SEQ ID NO: 40324 - DNA, 25 bp, Saccharomyces pastorianus
catgttgactggtgtcgccgcagac

SEQ ID NO: 40325 - DNA, 25 bp, Saccharomyces pastorianus
ctaccatgttgactggtgtcgccgc

SEQ ID NO: 40326 - DNA, 25 bp, Saccharomyces pastorianus
tggtgtcgccgcagaccaagtcacc

SEQ ID NO: 40327 - DNA, 25 bp, Saccharomyces pastorianus
cactaccatgttgactggtgtcgcc

SEQ ID NO: 40328 - DNA, 25 bp, Saccharomyces pastorianus
gcacagttcattgtcatatcgttaa

SEQ ID NO: 40329 - DNA, 25 bp, Saccharomyces pastorianus
gaccctttttcggagggtgtcacat

SEQ ID NO: 40330 - DNA, 25 bp, Saccharomyces pastorianus
gactggcttcaatatcatttcaatg

SEQ ID NO: 40331 - DNA, 25 bp, Saccharomyces pastorianus
gaaacgtctcgattgtggctaacta

SEQ ID NO: 40332 - DNA, 25 bp, Saccharomyces pastorianus
attcagtgtcatgccgcctaaaaag

SEQ ID NO: 40333 - DNA, 25 bp, Saccharomyces pastorianus
gaattagcacagcagttggttggta

SEQ ID NO: 40334 - DNA, 25 bp, Saccharomyces pastorianus
cgctaggcgtttggccgagttcaaa

SEQ ID NO: 40335 - DNA, 25 bp, Saccharomyces pastorianus
ggtgtcacattcagtgtcatgccgc

SEQ ID NO: 40336 - DNA, 25 bp, Saccharomyces pastorianus
taacctgttatcttgatgccactaa

SEQ ID NO: 40337 - DNA, 25 bp, Saccharomyces pastorianus
cctactcccctttacgtaatggatg

SEQ ID NO: 40338 - DNA, 25 bp, Saccharomyces pastorianus
aaactttgagttccttggctctggt

SEQ ID NO: 40339 - DNA, 25 bp, Saccharomyces pastorianus
cgtcgtcactggtcaagctttggta

SEQ ID NO: 40340 - DNA, 25 bp, Saccharomyces pastorianus
gacatttacaaagagaccacccagg

SEQ ID NO: 40341 - DNA, 25 bp, Saccharomyces pastorianus
ggaactcactggctttagtcatgaa

SEQ ID NO: 40342 - DNA, 25 bp, Saccharomyces pastorianus
atttgtacagttcctggttccggat

SEQ ID NO: 40343 - DNA, 25 bp, Saccharomyces pastorianus
taatgtccagctggcttctttgcac

SEQ ID NO: 40344 - DNA, 25 bp, Saccharomyces pastorianus
agccccaaggtgctatgtacttatt

SEQ ID NO: 40345 - DNA, 25 bp, Saccharomyces pastorianus
atttgatggttcgtccaccagtgga

SEQ ID NO: 40346 - DNA, 25 bp, Saccharomyces pastorianus
aattagcctcaatctcattatgccc

SEQ ID NO: 40347 - DNA, 25 bp, Saccharomyces pastorianus
gcaattcaggaagcccatcatttgg

SEQ ID NO: 40348 - DNA, 25 bp, Saccharomyces pastorianus
aacattcttggcacctggtgttgaa

SEQ ID NO: 40349 - DNA, 25 bp, Saccharomyces pastorianus
tttgcactccacttcaaaaggtgtt

SEQ ID NO: 40350 - DNA, 25 bp, Saccharomyces pastorianus
gactggaccacgctgtttcaagtga

SEQ ID NO: 40351 - DNA, 25 bp, Saccharomyces pastorianus
gaacttgcgttgatgaccgtctttc

SEQ ID NO: 40352 - DNA, 25 bp, Saccharomyces pastorianus
acaggtctctggttgattccattcc

SEQ ID NO: 40353 - DNA, 25 bp, Saccharomyces pastorianus
tgcaagggcatacacgatttcgaac

SEQ ID NO: 40354 - DNA, 25 bp, Saccharomyces pastorianus
attggctcacatttacaccagtctg

SEQ ID NO: 40355 - DNA, 25 bp, Saccharomyces pastorianus
gattctacatgcgtgcttgtgcaag

SEQ ID NO: 40356 - DNA, 25 bp, Saccharomyces pastorianus
ttcgagcgacgccatacaagattct

SEQ ID NO: 40357 - DNA, 25 bp, Saccharomyces pastorianus
gggaaactggtatccatggcctcaa

SEQ ID NO: 40358 - DNA, 25 bp, Saccharomyces pastorianus
agtctgtttgtggagaacccgccgt

SEQ ID NO: 40359 - DNA, 25 bp, Saccharomyces pastorianus
agaagcactaccatttcctgctgag

SEQ ID NO: 40360 - DNA, 25 bp, Saccharomyces pastorianus
gagccattggccctttgaaaaccac

SEQ ID NO: 40361 - DNA, 25 bp, Saccharomyces pastorianus
aaagggaactgacccagtccatgtc

SEQ ID NO: 40362 - DNA, 25 bp, Saccharomyces pastorianus
atgctgctcgccctgtaatcgcata

SEQ ID NO: 40363 - DNA, 25 bp, Saccharomyces pastorianus
acatggcaacagaaggtcctcgcgc

SEQ ID NO: 40364 - DNA, 25 bp, Saccharomyces pastorianus
tcggcaccattccaggactgaacac

SEQ ID NO: 40365 - DNA, 25 bp, Saccharomyces pastorianus
gctgcgtaacattttcgtgcctgag

SEQ ID NO: 40366 - DNA, 25 bp, Saccharomyces pastorianus
ctttcatctgcggttggtgcatgaa

SEQ ID NO: 40367 - DNA, 25 bp, Saccharomyces pastorianus
accgataagcgcaaacctctgggag

SEQ ID NO: 40368 - DNA, 25 bp, Saccharomyces pastorianus
ctgggagaatgctccactttcatct

SEQ ID NO: 40369 - DNA, 25 bp, Saccharomyces pastorianus
cgagctgatatccttgaccacgaag

SEQ ID NO: 40370 - DNA, 25 bp, Saccharomyces pastorianus
ataatgggcaactcacatggcaaca

SEQ ID NO: 40371 - DNA, 25 bp, Saccharomyces pastorianus
gaacccagttccaagtccacgagac

SEQ ID NO: 40372 - DNA, 25 bp, Saccharomyces pastorianus
aatagtccatgcgacgggtacttgt

SEQ ID NO: 40373 - DNA, 25 bp, Saccharomyces pastorianus
gcagcagccgcaatcatatgaagac

SEQ ID NO: 40374 - DNA, 25 bp, Saccharomyces pastorianus
gatactttggcttgcgtggcacaac

SEQ ID NO: 40375 - DNA, 25 bp, Saccharomyces pastorianus
gctaattgctatatacgatgatcct

SEQ ID NO: 40376 - DNA, 25 bp, Saccharomyces pastorianus
tttcctgggcgcatctgaagtggac

SEQ ID NO: 40377 - DNA, 25 bp, Saccharomyces pastorianus
gggtacttgtgtcccgatactttgg

SEQ ID NO: 40378 - DNA, 25 bp, Saccharomyces pastorianus
gcatatcgaaaccagccacacatga

SEQ ID NO: 40379 - DNA, 25 bp, Saccharomyces pastorianus
gtgtgctctccccagtaataaatac

SEQ ID NO: 40380 - DNA, 25 bp, Saccharomyces pastorianus
ggagtacttctcacagtgcttttcc

SEQ ID NO: 40381 - DNA, 25 bp, Saccharomyces pastorianus
tgaagtggacgccttcttcaatttc

SEQ ID NO: 40382 - DNA, 25 bp, Saccharomyces pastorianus
aaatctcagctgaagtgtgctctcc

SEQ ID NO: 40383 - DNA, 25 bp, Saccharomyces pastorianus
aaacagtatactcatcggccacgga

SEQ ID NO: 40384 - DNA, 25 bp, Saccharomyces pastorianus
gacacggcagttctatattcaaaaa

SEQ ID NO: 40385 - DNA, 25 bp, Saccharomyces pastorianus
tggctttcacatccctaggttacga

SEQ ID NO: 40386 - DNA, 25 bp, Saccharomyces pastorianus
gtagcgcacacatcgatggagttga

SEQ ID NO: 40387 - DNA, 25 bp, Saccharomyces pastorianus
gttgacctaaattccgacttcagtg

SEQ ID NO: 40388 - DNA, 25 bp, Saccharomyces pastorianus
aaaatgttctctctctcgattgtga

SEQ ID NO: 40389 - DNA, 25 bp, Saccharomyces pastorianus
atttccgagttttctagtagcgcac

SEQ ID NO: 40390 - DNA, 25 bp, Saccharomyces pastorianus
accaccaactctgtgtcttttttga

SEQ ID NO: 40391 - DNA, 25 bp, Saccharomyces pastorianus
gactaggatgtaagacgtcccacca

SEQ ID NO: 40392 - DNA, 25 bp, Saccharomyces pastorianus
gtcccaccaccatgtgtacagagga

SEQ ID NO: 40393 - DNA, 25 bp, Saccharomyces pastorianus
gatcaaactaaatgtcccacgtata

SEQ ID NO: 40394 - DNA, 25 bp, Saccharomyces pastorianus
gaaagtcgccggtatagtcgcacta

SEQ ID NO: 40395 - DNA, 25 bp, Saccharomyces pastorianus
acaaactttgtattccccaatgctc

SEQ ID NO: 40396 - DNA, 25 bp, Saccharomyces pastorianus
caatacttacaacagcgggacccta

SEQ ID NO: 40397 - DNA, 25 bp, Saccharomyces pastorianus
aagacacccatttttcacggacatg

SEQ ID NO: 40398 - DNA, 25 bp, Saccharomyces pastorianus
atggatccagttgtacctatagcac

SEQ ID NO: 40399 - DNA, 25 bp, Saccharomyces pastorianus
atggcacattctacagttcctgagg

SEQ ID NO: 40400 - DNA, 25 bp, Saccharomyces pastorianus
cctatagcacttggcttgagcgcaa

SEQ ID NO: 40401 - DNA, 25 bp, Saccharomyces pastorianus
tcgcactatcgggttttggttacat

SEQ ID NO: 40402 - DNA, 25 bp, Saccharomyces pastorianus
ggttctctcaaggtgctgcattggc

SEQ ID NO: 40403 - DNA, 25 bp, Saccharomyces pastorianus
gcatcatctgtcactttaccatgga

SEQ ID NO: 40404 - DNA, 25 bp, Saccharomyces pastorianus
aaaattctaccaagacacctgcggg

SEQ ID NO: 40405 - DNA, 25 bp, Saccharomyces pastorianus
tccgggaaatacgacacggtttgca

SEQ ID NO: 40406 - DNA, 25 bp, Saccharomyces pastorianus
gaggttcgtcgagaactccagcaaa

SEQ ID NO: 40407 - DNA, 25 bp, Saccharomyces pastorianus
gagcgctcgagtaggacacgtcttt

SEQ ID NO: 40408 - DNA, 25 bp, Saccharomyces pastorianus
agggccaacgccttgtatctgggac

SEQ ID NO: 40409 - DNA, 25 bp, Saccharomyces pastorianus
agcttccacatctcaattgccatag

SEQ ID NO: 40410 - DNA, 25 bp, Saccharomyces pastorianus
acaacgacacatattcatccgggaa

SEQ ID NO: 40411 - DNA, 25 bp, Saccharomyces pastorianus
atttgcgccatttaaactcgaggtc

SEQ ID NO: 40412 - DNA, 25 bp, Saccharomyces pastorianus
tagcggaacttagtcctctgtttct

SEQ ID NO: 40413 - DNA, 25 bp, Saccharomyces pastorianus
tccagtgatccataccaactagcgg

SEQ ID NO: 40414 - DNA, 25 bp, Saccharomyces pastorianus
aacgcggtcactgctgttcgaatca

SEQ ID NO: 40415 - DNA, 25 bp, Saccharomyces pastorianus
aaccaactgtcctgatcaactcgat

SEQ ID NO: 40416 - DNA, 25 bp, Saccharomyces pastorianus
ctttcccgactttctggagaggata

SEQ ID NO: 40417 - DNA, 25 bp, Saccharomyces pastorianus
aaattactaagcgtcgagccgttca

SEQ ID NO: 40418 - DNA, 25 bp, Saccharomyces pastorianus
aaatacggtacccactccaggacat

SEQ ID NO: 40419 - DNA, 25 bp, Saccharomyces pastorianus
acggcgttactacgacaagcgttgc

SEQ ID NO: 40420 - DNA, 25 bp, Saccharomyces pastorianus
tacacatttgaacccattccactaa

SEQ ID NO: 40421 - DNA, 25 bp, Saccharomyces pastorianus
gtcgagccgttcatttcacaaatag

SEQ ID NO: 40422 - DNA, 25 bp, Saccharomyces pastorianus
taacggaactgatccagtcctttcc

SEQ ID NO: 40423 - DNA, 25 bp, Saccharomyces pastorianus
caagcgttgctgattcacctgaaaa

SEQ ID NO: 40424 - DNA, 25 bp, Saccharomyces pastorianus
aacagtcggactaaaacccatgagg

SEQ ID NO: 40425 - DNA, 25 bp, Saccharomyces pastorianus
ggacatagcgacgagcagcataatt

SEQ ID NO: 40426 - DNA, 25 bp, Saccharomyces pastorianus
taaaggtcttgttcaggcacctcca

SEQ ID NO: 40427 - DNA, 25 bp, Saccharomyces pastorianus
gtcaactgttaggtatggccgacaa

SEQ ID NO: 40428 - DNA, 25 bp, Saccharomyces pastorianus
tactatggtcacttggtcgtagcct

SEQ ID NO: 40429 - DNA, 25 bp, Saccharomyces pastorianus
tcaaacatcgtcttgggtcaactgt

SEQ ID NO: 40430 - DNA, 25 bp, Saccharomyces pastorianus
aagggactccggtgatcatctattg

SEQ ID NO: 40431 - DNA, 25 bp, Saccharomyces pastorianus
aactacgaccgtattatcactcaag

SEQ ID NO: 40432 - DNA, 25 bp, Saccharomyces pastorianus
aacggcgaggattcttactatggtc

SEQ ID NO: 40433 - DNA, 25 bp, Saccharomyces pastorianus
agactagtctcatgcatcggtacgt

SEQ ID NO: 40434 - DNA, 25 bp, Saccharomyces pastorianus
gtcgtagcctctcacaactatcaat

SEQ ID NO: 40435 - DNA, 25 bp, Saccharomyces pastorianus
gaaattcaaccctgtttcatccaga

SEQ ID NO: 40436 - DNA, 25 bp, Saccharomyces pastorianus
tgatcactaaccatggcgccaagaa

SEQ ID NO: 40437 - DNA, 25 bp, Saccharomyces pastorianus
acgtggcaactgtacctaagggact

SEQ ID NO: 40438 - DNA, 25 bp, Saccharomyces pastorianus
ggtcagatcgccaacttttgtcaaa

SEQ ID NO: 40439 - DNA, 25 bp, Saccharomyces pastorianus
gactttttcagtcagccaaatttta

SEQ ID NO: 40440 - DNA, 25 bp, Saccharomyces pastorianus
gatatagctaacctacaacttggta

SEQ ID NO: 40441 - DNA, 25 bp, Saccharomyces pastorianus
ggttcaatggtcattcatgggctaa

SEQ ID NO: 40442 - DNA, 25 bp, Saccharomyces pastorianus
gatcctaagttctcgtatgactttt

SEQ ID NO: 40443 - DNA, 25 bp, Saccharomyces pastorianus
aaagttgaccatgccacatattttg

SEQ ID NO: 40444 - DNA, 25 bp, Saccharomyces pastorianus
gattcatgctattcctataacatct

SEQ ID NO: 40445 - DNA, 25 bp, Saccharomyces pastorianus
gaatatggctcttcttgatcctaag

SEQ ID NO: 40446 - DNA, 25 bp, Saccharomyces pastorianus
atgatccatactttcctcaattcag

SEQ ID NO: 40447 - DNA, 25 bp, Saccharomyces pastorianus
gtttttcagagttacttcctgtacg

SEQ ID NO: 40448 - DNA, 25 bp, Saccharomyces pastorianus
tctggtgccgacagcaatgatccat

SEQ ID NO: 40449 - DNA, 25 bp, Saccharomyces pastorianus
atcaggtattcgtacgcgggtctca

SEQ ID NO: 40450 - DNA, 25 bp, Saccharomyces pastorianus
tgaagcacagggacatgtcgtctcc

SEQ ID NO: 40451 - DNA, 25 bp, Saccharomyces pastorianus
tcgtctccctcgagctgacaacggg

SEQ ID NO: 40452 - DNA, 25 bp, Saccharomyces pastorianus
aagaatgcgccgttattcaaaaaga

SEQ ID NO: 40453 - DNA, 25 bp, Saccharomyces pastorianus
gcgggtctcagatcaaattcatagt

SEQ ID NO: 40454 - DNA, 25 bp, Saccharomyces pastorianus
gggccacttaccgtggtaagctagt

SEQ ID NO: 40455 - DNA, 25 bp, Saccharomyces pastorianus
gaaccacagggagctgtaacgcaca

SEQ ID NO: 40456 - DNA, 25 bp, Saccharomyces pastorianus
gacgtaacagctactgaaccacagg

SEQ ID NO: 40457 - DNA, 25 bp, Saccharomyces pastorianus
attcatagttgttccagacctttta

SEQ ID NO: 40458 - DNA, 25 bp, Saccharomyces pastorianus
gtaacgcacatggatcaggtattcg

SEQ ID NO: 40459 - DNA, 25 bp, Saccharomyces pastorianus
gatagtatgaacgtccagctgagag

SEQ ID NO: 40460 - DNA, 25 bp, Saccharomyces pastorianus
ttaccaagagcattccacaaccaga

SEQ ID NO: 40461 - DNA, 25 bp, Saccharomyces pastorianus
gcaaatcctaaatcaacccatcgta

SEQ ID NO: 40462 - DNA, 25 bp, Saccharomyces pastorianus
cgatgatcggtgtattgttctgcaa

SEQ ID NO: 40463 - DNA, 25 bp, Saccharomyces pastorianus
gccagcatgatgttttctcgatttt

SEQ ID NO: 40464 - DNA, 25 bp, Saccharomyces pastorianus
aaccagattgcgttgcattcagcat

SEQ ID NO: 40465 - DNA, 25 bp, Saccharomyces pastorianus
attgttgagcactcgagtcactcga

SEQ ID NO: 40466 - DNA, 25 bp, Saccharomyces pastorianus
aatggtgagctttggccgaggaaat

SEQ ID NO: 40467 - DNA, 25 bp, Saccharomyces pastorianus
ggaccattgtgttactggcggcacg

SEQ ID NO: 40468 - DNA, 25 bp, Saccharomyces pastorianus
agatccggtaccatgtttcgcaaat

SEQ ID NO: 40469 - DNA, 25 bp, Saccharomyces pastorianus
gtcactcgaaagaaccggtcagcaa

SEQ ID NO: 40470 - DNA, 25 bp, Saccharomyces pastorianus
agaggtgcacttgattccgatggag

SEQ ID NO: 40471 - DNA, 25 bp, Saccharomyces pastorianus
aagaaggctctctatcatgctagta

SEQ ID NO: 40472 - DNA, 25 bp, Saccharomyces pastorianus
ttcttcaccatgatatcagtagcag

SEQ ID NO: 40473 - DNA, 25 bp, Saccharomyces pastorianus
ggtagtattggttacattccctata

SEQ ID NO: 40474 - DNA, 25 bp, Saccharomyces pastorianus
aagggtgacttgatggctattctaa

SEQ ID NO: 40475 - DNA, 25 bp, Saccharomyces pastorianus
gtggtgagcctattgatccttctaa

SEQ ID NO: 40476 - DNA, 25 bp, Saccharomyces pastorianus
atggccgtatttggtttcccatact

SEQ ID NO: 40477 - DNA, 25 bp, Saccharomyces pastorianus
aatcaggctcagcaagtcctcatgg

SEQ ID NO: 40478 - DNA, 25 bp, Saccharomyces pastorianus
aagtcctcatggcaaagctgcaaga

SEQ ID NO: 40479 - DNA, 25 bp, Saccharomyces pastorianus
aactctggagccatacaggcgtcac

SEQ ID NO: 40480 - DNA, 25 bp, Saccharomyces pastorianus
gatcccttcggtaaggattccgact

SEQ ID NO: 40481 - DNA, 25 bp, Saccharomyces pastorianus
gaacaccacctaaagaagccacaag

SEQ ID NO: 40482 - DNA, 25 bp, Saccharomyces pastorianus
gatcggcacctgattttacgaataa

SEQ ID NO: 40483 - DNA, 25 bp, Saccharomyces pastorianus
agcaaactttcagaaccctcaagat

SEQ ID NO: 40484 - DNA, 25 bp, Saccharomyces pastorianus
agactcatcgtcattttctgaaaat

SEQ ID NO: 40485 - DNA, 25 bp, Saccharomyces pastorianus
gaaactgctaaggaggccatcactg

SEQ ID NO: 40486 - DNA, 25 bp, Saccharomyces pastorianus
aagacagtttcttgaatgcatcgaa

SEQ ID NO: 40487 - DNA, 25 bp, Saccharomyces pastorianus
atcaatcgtcttagatcggcacctg

SEQ ID NO: 40488 - DNA, 25 bp, Saccharomyces pastorianus
ccaccagggtctttctaacagtata

SEQ ID NO: 40489 - DNA, 25 bp, Saccharomyces pastorianus
atggaagtttctgatgtcgagctat

SEQ ID NO: 40490 - DNA, 25 bp, Saccharomyces pastorianus
taaatcgctatccatcttggcggat

SEQ ID NO: 40491 - DNA, 25 bp, Saccharomyces pastorianus
agattcatcatcagactcatcgtca

SEQ ID NO: 40492 - DNA, 25 bp, Saccharomyces pastorianus
tgaagatagtaatacccaccagggt

SEQ ID NO: 40493 - DNA, 25 bp, Saccharomyces pastorianus
ttggcaaatgcctcgagtagttcac

SEQ ID NO: 40494 - DNA, 25 bp, Saccharomyces pastorianus
taagctgctaagaggttataccaca

SEQ ID NO: 40495 - DNA, 25 bp, Saccharomyces pastorianus
gttaagagtcttttcattccctgct

SEQ ID NO: 40496 - DNA, 25 bp, Saccharomyces pastorianus
ggtatggttcttggacagcgtatca

SEQ ID NO: 40497 - DNA, 25 bp, Saccharomyces pastorianus
atcggaactggtgtgcttcgacgaa

SEQ ID NO: 40498 - DNA, 25 bp, Saccharomyces pastorianus
tgacaggagatctaggcgccatgag

SEQ ID NO: 40499 - DNA, 25 bp, Saccharomyces pastorianus
tttcattccctgctcttttagatag

SEQ ID NO: 40500 - DNA, 25 bp, Saccharomyces pastorianus
gtatggcccctatcagaaacttcaa

SEQ ID NO: 40501 - DNA, 25 bp, Saccharomyces pastorianus
agtagttcacccactgcatggattt

SEQ ID NO: 40502 - DNA, 25 bp, Saccharomyces pastorianus
gtgctgtgactatcctaacggcagt

SEQ ID NO: 40503 - DNA, 25 bp, Saccharomyces pastorianus
ggagaagccgtagtcaatcaaagta

SEQ ID NO: 40504 - DNA, 25 bp, Saccharomyces pastorianus
agagcacctcaacgacttcagtcaa

SEQ ID NO: 40505 - DNA, 25 bp, Saccharomyces pastorianus
gacgttctataacatcgcatggagt

SEQ ID NO: 40506 - DNA, 25 bp, Saccharomyces pastorianus
gtttcatgtatcgaacaggcgacta

SEQ ID NO: 40507 - DNA, 25 bp, Saccharomyces pastorianus
acgtcaatactgatctatcgtacat

SEQ ID NO: 40508 - DNA, 25 bp, Saccharomyces pastorianus
ttcagtcaaggagcaacaacccgat

SEQ ID NO: 40509 - DNA, 25 bp, Saccharomyces pastorianus
gccagcattggagtacacgtcagac

SEQ ID NO: 40510 - DNA, 25 bp, Saccharomyces pastorianus
tttccctgcgaaatgcttggtttca

SEQ ID NO: 40511 - DNA, 25 bp, Saccharomyces pastorianus
acccgatgcccatgtcgatgtacaa

SEQ ID NO: 40512 - DNA, 25 bp, Saccharomyces pastorianus
taaagacattccacaatttccctgc

SEQ ID NO: 40513 - DNA, 25 bp, Saccharomyces pastorianus
gggccaggccaaattgttatttaca

SEQ ID NO: 40514 - DNA, 25 bp, Saccharomyces pastorianus
aggtaacattccatgggccaggcca

SEQ ID NO: 40515 - DNA, 25 bp, Saccharomyces pastorianus
gtgatatgcggtgactctgaagaca

SEQ ID NO: 40516 - DNA, 25 bp, Saccharomyces pastorianus
gcatatgcgcagaacgggttgccat

SEQ ID NO: 40517 - DNA, 25 bp, Saccharomyces pastorianus
gccctgcggtgtgtgtagacagttt

SEQ ID NO: 40518 - DNA, 25 bp, Saccharomyces pastorianus
tcaaggcgcgtgaactctcttacag

SEQ ID NO: 40519 - DNA, 25 bp, Saccharomyces pastorianus
aagacaagtgtgtgtcgccctgcgg

SEQ ID NO: 40520 - DNA, 25 bp, Saccharomyces pastorianus
aagatttccccattatcatgctcaa

SEQ ID NO: 40521 - DNA, 25 bp, Saccharomyces pastorianus
acgatgtcattttcactggtgccaa

SEQ ID NO: 40522 - DNA, 25 bp, Saccharomyces pastorianus
gtcggttgctccatattgacgaaca

SEQ ID NO: 40523 - DNA, 25 bp, Saccharomyces pastorianus
accggcgcctgttgtgtaaccaaga

SEQ ID NO: 40524 - DNA, 25 bp, Saccharomyces pastorianus
gggttgccatggtacaagttctgat

SEQ ID NO: 40525 - DNA, 25 bp, Saccharomyces pastorianus
ctgatgtcaggataccgcacaggct

SEQ ID NO: 40526 - DNA, 25 bp, Saccharomyces pastorianus
ggtcttctcattgctcgacatgtaa

SEQ ID NO: 40527 - DNA, 25 bp, Saccharomyces pastorianus
agccgagaggcccaagttttgttag

SEQ ID NO: 40528 - DNA, 25 bp, Saccharomyces pastorianus
aatctggtgggcctcggaattatcc

SEQ ID NO: 40529 - DNA, 25 bp, Saccharomyces pastorianus
aagtattgcccatcgtgccggatat

SEQ ID NO: 40530 - DNA, 25 bp, Saccharomyces pastorianus
tgccgtgttttcgttaatcttcttg

SEQ ID NO: 40531 - DNA, 25 bp, Saccharomyces pastorianus
ccagcaatactgttcacctatcatg

SEQ ID NO: 40532 - DNA, 25 bp, Saccharomyces pastorianus
gatatttctgtcaagtgccgtgttt

SEQ ID NO: 40533 - DNA, 25 bp, Saccharomyces pastorianus
acacactcgtcggttcatggtgata

SEQ ID NO: 40534 - DNA, 25 bp, Saccharomyces pastorianus
gggctaaccgtgtggtatccagcaa

SEQ ID NO: 40535 - DNA, 25 bp, Saccharomyces pastorianus
aattgcgccattcatattgcacgag

SEQ ID NO: 40536 - DNA, 25 bp, Saccharomyces pastorianus
aatcttcttgttggttaattgcgcc

SEQ ID NO: 40537 - DNA, 25 bp, Saccharomyces pastorianus
tcacgttgagtatttggcatgtcta

SEQ ID NO: 40538 - DNA, 25 bp, Saccharomyces pastorianus
gccacaagtcattttgtactcacaa

SEQ ID NO: 40539 - DNA, 25 bp, Saccharomyces pastorianus
cgatttcaaacgtcagccttctatt

SEQ ID NO: 40540 - DNA, 25 bp, Saccharomyces pastorianus
tttcctactagatcctattctcaat

SEQ ID NO: 40541 - DNA, 25 bp, Saccharomyces pastorianus
ataagcgtaggcgaccaagaggtca

SEQ ID NO: 40542 - DNA, 25 bp, Saccharomyces pastorianus
gaaagtgctgaaccgccacaagtca

SEQ ID NO: 40543 - DNA, 25 bp, Saccharomyces pastorianus
aacgcaaagcatattttcctactag

SEQ ID NO: 40544 - DNA, 25 bp, Saccharomyces pastorianus
ggttctaaaactttatcacgttgag

SEQ ID NO: 40545 - DNA, 25 bp, Saccharomyces pastorianus
atactgccagtgtcggtgaaactat

SEQ ID NO: 40546 - DNA, 25 bp, Saccharomyces pastorianus
atgtctatccaatactgccagtgtc

SEQ ID NO: 40547 - DNA, 25 bp, Saccharomyces pastorianus
gtcagccttctattacttgcttact

SEQ ID NO: 40548 - DNA, 25 bp, Saccharomyces pastorianus
attgcgtgcttccaagtcaacttca

SEQ ID NO: 40549 - DNA, 25 bp, Saccharomyces pastorianus
ggcaacgaagagtaccccagggatt

SEQ ID NO: 40550 - DNA, 25 bp, Saccharomyces pastorianus
ggcacaccggttaatattacaagta

SEQ ID NO: 40551 - DNA, 25 bp, Saccharomyces pastorianus
ggtcaataagtcgtgatcctatcaa

SEQ ID NO: 40552 - DNA, 25 bp, Saccharomyces pastorianus
aggatgtacagcaccagcaactact

SEQ ID NO: 40553 - DNA, 25 bp, Saccharomyces pastorianus
aatattcattatcaggcacaccggt

SEQ ID NO: 40554 - DNA, 25 bp, Saccharomyces pastorianus
aagtccatcgtctcagacagtttct

SEQ ID NO: 40555 - DNA, 25 bp, Saccharomyces pastorianus
gaatcgtatcaatccgcacaacatg

SEQ ID NO: 40556 - DNA, 25 bp, Saccharomyces pastorianus
gactgatccagttgaagaccacatc

SEQ ID NO: 40557 - DNA, 25 bp, Saccharomyces pastorianus
tcaacttcactaatcacatcgactg

SEQ ID NO: 40558 - DNA, 25 bp, Saccharomyces pastorianus
gaaacagaccatttagcgccggaga

SEQ ID NO: 40559 - DNA, 25 bp, Saccharomyces pastorianus
tagaaaatcgcaccccagaaagtaa

SEQ ID NO: 40560 - DNA, 25 bp, Saccharomyces pastorianus
ctgcctgcgagcacagaagacggta

SEQ ID NO: 40561 - DNA, 25 bp, Saccharomyces pastorianus
atgaatcatctgcttctggccagaa

SEQ ID NO: 40562 - DNA, 25 bp, Saccharomyces pastorianus
aaaggcatgattaatctccccgaag

SEQ ID NO: 40563 - DNA, 25 bp, Saccharomyces pastorianus
gaatctaccactgttgtcgacttat

SEQ ID NO: 40564 - DNA, 25 bp, Saccharomyces pastorianus
gtcaattaatcacttttcgaacgaa

SEQ ID NO: 40565 - DNA, 25 bp, Saccharomyces pastorianus
gacaccgaaactggcaaacttgata

SEQ ID NO: 40566 - DNA, 25 bp, Saccharomyces pastorianus
ttaatctccccgaagaactgctaat

SEQ ID NO: 40567 - DNA, 25 bp, Saccharomyces pastorianus
gatagcgccattaacgaggagcatg

SEQ ID NO: 40568 - DNA, 25 bp, Saccharomyces pastorianus
aaacttgataagctgcctgcgagca

SEQ ID NO: 40569 - DNA, 25 bp, Saccharomyces pastorianus
gtcgacttattctcgcctcatgaat

SEQ ID NO: 40570 - DNA, 25 bp, Saccharomyces pastorianus
tagccaatgggcacctgaaacctct

SEQ ID NO: 40571 - DNA, 25 bp, Saccharomyces pastorianus
aactggcaagtgtttccacccaata

SEQ ID NO: 40572 - DNA, 25 bp, Saccharomyces pastorianus
cacaagtttcttcagccagttacag

SEQ ID NO: 40573 - DNA, 25 bp, Saccharomyces pastorianus
taaagggaacgtgcactctcaaacc

SEQ ID NO: 40574 - DNA, 25 bp, Saccharomyces pastorianus
tagacatcgaccaaatagccactcc

SEQ ID NO: 40575 - DNA, 25 bp, Saccharomyces pastorianus
aacaaggtcggagtcagctacgcct

SEQ ID NO: 40576 - DNA, 25 bp, Saccharomyces pastorianus
gacgatgatttcgaaccgcagtcaa

SEQ ID NO: 40577 - DNA, 25 bp, Saccharomyces pastorianus
agtttcctcttcagctgacacttac

SEQ ID NO: 40578 - DNA, 25 bp, Saccharomyces pastorianus
taggcttgagtctacatctccagaa

SEQ ID NO: 40579 - DNA, 25 bp, Saccharomyces pastorianus
gagtgccactttgttgccttttaca

SEQ ID NO: 40580 - DNA, 25 bp, Saccharomyces pastorianus
aaagcaccctttaaattctctccag

SEQ ID NO: 40581 - DNA, 25 bp, Saccharomyces pastorianus
gccaaagaaatttagcgctcaagag

SEQ ID NO: 40582 - DNA, 25 bp, Saccharomyces pastorianus
agaggagccggatttttcagcgacc

SEQ ID NO: 40583 - DNA, 25 bp, Saccharomyces pastorianus
gtatcaaaggacttcaagcccaaga

SEQ ID NO: 40584 - DNA, 25 bp, Saccharomyces pastorianus
gtatctaccgtgcaatttgagccaa

SEQ ID NO: 40585 - DNA, 25 bp, Saccharomyces pastorianus
aactgttccaaaatcgggccctgcg

SEQ ID NO: 40586 - DNA, 25 bp, Saccharomyces pastorianus
aactttagacaatttgcactcatca

SEQ ID NO: 40587 - DNA, 25 bp, Saccharomyces pastorianus
tcaatgcgtgcgatttcctttccaa

SEQ ID NO: 40588 - DNA, 25 bp, Saccharomyces pastorianus
actcttgtccaaatgaacaggctct

SEQ ID NO: 40589 - DNA, 25 bp, Saccharomyces pastorianus
acaggctctatgaaggtgatgccaa

SEQ ID NO: 40590 - DNA, 25 bp, Saccharomyces pastorianus
ttcagcgacctcgaacgatatgttt

SEQ ID NO: 40591 - DNA, 25 bp, Saccharomyces pastorianus
aagcacagctgcttctggatgaagt

SEQ ID NO: 40592 - DNA, 25 bp, Saccharomyces pastorianus
gttcccgatcatacccagtggttat

SEQ ID NO: 40593 - DNA, 25 bp, Saccharomyces pastorianus
gactgcacgagtattttagacctat

SEQ ID NO: 40594 - DNA, 25 bp, Saccharomyces pastorianus
aggtaagccattccatcttgacaaa

SEQ ID NO: 40595 - DNA, 25 bp, Saccharomyces pastorianus
gtgcaggaccaaatcctttacgaaa

SEQ ID NO: 40596 - DNA, 25 bp, Saccharomyces pastorianus
tcttgagctcctttactgtggtaac

SEQ ID NO: 40597 - DNA, 25 bp, Saccharomyces pastorianus
tagacctatcattatgaggcctggt

SEQ ID NO: 40598 - DNA, 25 bp, Saccharomyces pastorianus
gatgccgcaaacgtggttcatagtt

SEQ ID NO: 40599 - DNA, 25 bp, Saccharomyces pastorianus
ggccaacggtatctactcaacaggt

SEQ ID NO: 40600 - DNA, 25 bp, Saccharomyces pastorianus
aaatcgagtcttttctctcttggtg

SEQ ID NO: 40601 - DNA, 25 bp, Saccharomyces pastorianus
tggaccgagatctttcattcacagc

SEQ ID NO: 40602 - DNA, 25 bp, Saccharomyces pastorianus
tgaggcctggtttcatgtttgatga

SEQ ID NO: 40603 - DNA, 25 bp, Saccharomyces pastorianus
tagttcccgattcagcagtttttgc

SEQ ID NO: 40604 - DNA, 25 bp, Saccharomyces pastorianus
aaatcgctatcgacctgattcacga

SEQ ID NO: 40605 - DNA, 25 bp, Saccharomyces pastorianus
atcattggtactaaagccgtctttg

SEQ ID NO: 40606 - DNA, 25 bp, Saccharomyces pastorianus
gtcttcgctgttgctggtctatata

SEQ ID NO: 40607 - DNA, 25 bp, Saccharomyces pastorianus
ttgcgctaatgtctcgtgttggtaa

SEQ ID NO: 40608 - DNA, 25 bp, Saccharomyces pastorianus
gtttttaatcactgctcgcgaacgt

SEQ ID NO: 40609 - DNA, 25 bp, Saccharomyces pastorianus
acggtggtaccatctcatcaaattc

SEQ ID NO: 40610 - DNA, 25 bp, Saccharomyces pastorianus
aattcggtgggtctcagcgtatatt

SEQ ID NO: 40611 - DNA, 25 bp, Saccharomyces pastorianus
gtgctcgtgaattcagaactcctgt

SEQ ID NO: 40612 - DNA, 25 bp, Saccharomyces pastorianus
tataaactatctcccttatacccat

SEQ ID NO: 40613 - DNA, 25 bp, Saccharomyces pastorianus
gtgctagtcacggaaggctttccta

SEQ ID NO: 40614 - DNA, 25 bp, Saccharomyces pastorianus
aagacttcaacttctggctggacac

SEQ ID NO: 40615 - DNA, 25 bp, Saccharomyces pastorianus
gacagtgaatcagcttttccatttg

SEQ ID NO: 40616 - DNA, 25 bp, Saccharomyces pastorianus
tgggactccggctgtgttgaagaaa

SEQ ID NO: 40617 - DNA, 25 bp, Saccharomyces pastorianus
gaagatttagtgattgtctctccta

SEQ ID NO: 40618 - DNA, 25 bp, Saccharomyces pastorianus
gagacattttcatcgaatgccaaat

SEQ ID NO: 40619 - DNA, 25 bp, Saccharomyces pastorianus
gacggtgttgttacccaagacttca

SEQ ID NO: 40620 - DNA, 25 bp, Saccharomyces pastorianus
taaagaagggctccactatcacctc

SEQ ID NO: 40621 - DNA, 25 bp, Saccharomyces pastorianus
gaatgttccaaacactcatcgtggt

SEQ ID NO: 40622 - DNA, 25 bp, Saccharomyces pastorianus
ctgtttatccattcggtgcggacaa

SEQ ID NO: 40623 - DNA, 25 bp, Saccharomyces pastorianus
gaagaaaccggctctgtttatccat

SEQ ID NO: 40624 - DNA, 25 bp, Saccharomyces pastorianus
aatgccaaatcaatcgttctcaagg

SEQ ID NO: 40625 - DNA, 25 bp, Saccharomyces pastorianus
tttaggtttagctcacttggctcca

SEQ ID NO: 40626 - DNA, 25 bp, Saccharomyces pastorianus
cttggctccaggtaaatctttaatc

SEQ ID NO: 40627 - DNA, 25 bp, Saccharomyces pastorianus
accaccgatcatatctctatggctg

SEQ ID NO: 40628 - DNA, 25 bp, Saccharomyces pastorianus
gaatggtttaagtatggttccgctt

SEQ ID NO: 40629 - DNA, 25 bp, Saccharomyces pastorianus
aaaccacaaggctaattgcgtcaaa

SEQ ID NO: 40630 - DNA, 25 bp, Saccharomyces pastorianus
gagggtaagaccaccaccgatcata

SEQ ID NO: 40631 - DNA, 25 bp, Saccharomyces pastorianus
gaaaaccatgggactctgaattgac

SEQ ID NO: 40632 - DNA, 25 bp, Saccharomyces pastorianus
tgaattgacccacactttcaacgac

SEQ ID NO: 40633 - DNA, 25 bp, Saccharomyces pastorianus
tcttctcgtgaacatgctgcattgg

SEQ ID NO: 40634 - DNA, 25 bp, Saccharomyces pastorianus
tcatcacaaaatcctttgcccgtat

SEQ ID NO: 40635 - DNA, 25 bp, Saccharomyces pastorianus
aaggttcttgggtggctttgctatc

SEQ ID NO: 40636 - DNA, 25 bp, Saccharomyces pastorianus
cacatgctcaaaactctctcaaaca

SEQ ID NO: 40637 - DNA, 25 bp, Saccharomyces pastorianus
ttggtctcatgcatatttgccgagt

SEQ ID NO: 40638 - DNA, 25 bp, Saccharomyces pastorianus
aaacatttgatgacggaccttctcc

SEQ ID NO: 40639 - DNA, 25 bp, Saccharomyces pastorianus
aaatggttcagaccaccttatggtg

SEQ ID NO: 40640 - DNA, 25 bp, Saccharomyces pastorianus
ttcgattgccatcattgtgttgagc

SEQ ID NO: 40641 - DNA, 25 bp, Saccharomyces pastorianus
gattggctcacatacttggtctcat

SEQ ID NO: 40642 - DNA, 25 bp, Saccharomyces pastorianus
gattggagcctcctccttaacagta

SEQ ID NO: 40643 - DNA, 25 bp, Saccharomyces pastorianus
cacgacgatatctacacatgctcaa

SEQ ID NO: 40644 - DNA, 25 bp, Saccharomyces pastorianus
atcagtcatcagtttctcaatgcgt

SEQ ID NO: 40645 - DNA, 25 bp, Saccharomyces pastorianus
acaagctgttttatgggatcacgac

SEQ ID NO: 40646 - DNA, 25 bp, Saccharomyces pastorianus
aaaactgtagaccttgccatcaaaa

SEQ ID NO: 40647 - DNA, 25 bp, Saccharomyces pastorianus
aaaatggtccggtcatcagcagcta

SEQ ID NO: 40648 - DNA, 25 bp, Saccharomyces pastorianus
gcgccattccgggtttactacaaat

SEQ ID NO: 40649 - DNA, 25 bp, Saccharomyces pastorianus
tggacggcgccattcacgagaaagc

SEQ ID NO: 40650 - DNA, 25 bp, Saccharomyces pastorianus
acgagaaagctctggcgctggcgca

SEQ ID NO: 40651 - DNA, 25 bp, Saccharomyces pastorianus
tgcagcacctacaaggcctggacgg

SEQ ID NO: 40652 - DNA, 25 bp, Saccharomyces pastorianus
gatcaacgacgtgttgctgcagcac

SEQ ID NO: 40653 - DNA, 25 bp, Saccharomyces pastorianus
gtcagcctcgagatgcttatcgata

SEQ ID NO: 40654 - DNA, 25 bp, Saccharomyces pastorianus
tcagcagctaaggacagcgccattc

SEQ ID NO: 40655 - DNA, 25 bp, Saccharomyces pastorianus
gctcaagactgctgcgggtcctgga

SEQ ID NO: 40656 - DNA, 25 bp, Saccharomyces pastorianus
ggatcaagcagttcttcgtgggctt

SEQ ID NO: 40657 - DNA, 25 bp, Saccharomyces pastorianus
tagtcccattccacgagtttaagca

SEQ ID NO: 40658 - DNA, 25 bp, Saccharomyces pastorianus
gcaaggctacaagagtttatcgata

SEQ ID NO: 40659 - DNA, 25 bp, Saccharomyces pastorianus
agatctagataacgctcaaactgat

SEQ ID NO: 40660 - DNA, 25 bp, Saccharomyces pastorianus
ctggtaccttcagccaggttagaga

SEQ ID NO: 40661 - DNA, 25 bp, Saccharomyces pastorianus
agcgttggaaacttttgatcttatc

SEQ ID NO: 40662 - DNA, 25 bp, Saccharomyces pastorianus
ggaagctgagctagacaaggtttgt

SEQ ID NO: 40663 - DNA, 25 bp, Saccharomyces pastorianus
aatctttaaatcctgatcatgacgg

SEQ ID NO: 40664 - DNA, 25 bp, Saccharomyces pastorianus
acaagtcatggtggccgttcaatct

SEQ ID NO: 40665 - DNA, 25 bp, Saccharomyces pastorianus
agaacaatcctatcttgccgattat

SEQ ID NO: 40666 - DNA, 25 bp, Saccharomyces pastorianus
atcatgacggtagggttgaggctat

SEQ ID NO: 40667 - DNA, 25 bp, Saccharomyces pastorianus
gtgaagagcagcaatttcttacatt

SEQ ID NO: 40668 - DNA, 25 bp, Saccharomyces pastorianus
tgccgattatgagacctggtacctt

SEQ ID NO: 40669 - DNA, 25 bp, Saccharomyces pastorianus
gagcctttagctccagaaaatgaaa

SEQ ID NO: 40670 - DNA, 25 bp, Saccharomyces pastorianus
accagctgatccaaaaggtcccagt

SEQ ID NO: 40671 - DNA, 25 bp, Saccharomyces pastorianus
atgcaaccgttgtcgagtcattcaa

SEQ ID NO: 40672 - DNA, 25 bp, Saccharomyces pastorianus
ggatgacccctcaaaagttcgtcta

SEQ ID NO: 40673 - DNA, 25 bp, Saccharomyces pastorianus
aaggcagaaggccattcattcacaa

SEQ ID NO: 40674 - DNA, 25 bp, Saccharomyces pastorianus
tgctataccatcgaccggctttaaa

SEQ ID NO: 40675 - DNA, 25 bp, Saccharomyces pastorianus
ggaggccagaccttctcagataata

SEQ ID NO: 40676 - DNA, 25 bp, Saccharomyces pastorianus
agtaatgtcgacacagcctcagaag

SEQ ID NO: 40677 - DNA, 25 bp, Saccharomyces pastorianus
ggtactgcttcatcaaatggcgctc

SEQ ID NO: 40678 - DNA, 25 bp, Saccharomyces pastorianus
ggcgctccttcattttcatttggaa

SEQ ID NO: 40679 - DNA, 25 bp, Saccharomyces pastorianus
gagatagctttattttcacaacgag

SEQ ID NO: 40680 - DNA, 25 bp, Saccharomyces pastorianus
tatggagatattactgtttcagcta

SEQ ID NO: 40681 - DNA, 25 bp, Saccharomyces pastorianus
tgctcgctaatgatattctaaaact

SEQ ID NO: 40682 - DNA, 25 bp, Saccharomyces pastorianus
aactggatgttttcaagcacgtttc

SEQ ID NO: 40683 - DNA, 25 bp, Saccharomyces pastorianus
ggcttgggcttcaaagacagccaaa

SEQ ID NO: 40684 - DNA, 25 bp, Saccharomyces pastorianus
gatttttcggatcattgctcgctaa

SEQ ID NO: 40685 - DNA, 25 bp, Saccharomyces pastorianus
gatcatttgcgtgatgttttaacaa

SEQ ID NO: 40686 - DNA, 25 bp, Saccharomyces pastorianus
agacgcacaacctattccaatgatc

SEQ ID NO: 40687 - DNA, 25 bp, Saccharomyces pastorianus
gagaagtcaggatccgattctgaaa

SEQ ID NO: 40688 - DNA, 25 bp, Saccharomyces pastorianus
gtatcataatttcctctcgggcaaa

SEQ ID NO: 40689 - DNA, 25 bp, Saccharomyces pastorianus
tcattattacgcactggtcgcaaat

SEQ ID NO: 40690 - DNA, 25 bp, Saccharomyces pastorianus
agcacgtttcattcatgggtgggtt

SEQ ID NO: 40691 - DNA, 25 bp, Saccharomyces pastorianus
attacctgcaacaccggatagatct

SEQ ID NO: 40692 - DNA, 25 bp, Saccharomyces pastorianus
aacagtacgtgttccaatggcgatt

SEQ ID NO: 40693 - DNA, 25 bp, Saccharomyces pastorianus
gaaagcttggaacatctctcaaatg

SEQ ID NO: 40694 - DNA, 25 bp, Saccharomyces pastorianus
tactgaatgcccaagtatcaccggg

SEQ ID NO: 40695 - DNA, 25 bp, Saccharomyces pastorianus
gtatgttctctgattgttccgtaga

SEQ ID NO: 40696 - DNA, 25 bp, Saccharomyces pastorianus
gattgttcaatctcaaaccaagcac

SEQ ID NO: 40697 - DNA, 25 bp, Saccharomyces pastorianus
gtaccgttgcatttaaaacctcagg

SEQ ID NO: 40698 - DNA, 25 bp, Saccharomyces pastorianus
aaacggttttgccatgtgccgtggt

SEQ ID NO: 40699 - DNA, 25 bp, Saccharomyces pastorianus
ggatagatctaagtgcgcctgtttg

SEQ ID NO: 40700 - DNA, 25 bp, Saccharomyces pastorianus
gttccttttggttctgagtctgaaa

SEQ ID NO: 40701 - DNA, 25 bp, Saccharomyces pastorianus
aggcaccacagaggaacagtattca

SEQ ID NO: 40702 - DNA, 25 bp, Saccharomyces pastorianus
agaagacgctcctccagtgtgatat

SEQ ID NO: 40703 - DNA, 25 bp, Saccharomyces pastorianus
gggcgtacgataacctgactatgtg

SEQ ID NO: 40704 - DNA, 25 bp, Saccharomyces pastorianus
agcagtaaaatgtccactcccgtga

SEQ ID NO: 40705 - DNA, 25 bp, Saccharomyces pastorianus
attcatatcgtcgttattgtgctgt

SEQ ID NO: 40706 - DNA, 25 bp, Saccharomyces pastorianus
gtgcccatcgtactgttcttgatca

SEQ ID NO: 40707 - DNA, 25 bp, Saccharomyces pastorianus
gtacacgcccaccaggaagtttttg

SEQ ID NO: 40708 - DNA, 25 bp, Saccharomyces pastorianus
ggacgtggacgttcaccaacatgac

SEQ ID NO: 40709 - DNA, 25 bp, Saccharomyces pastorianus
atcattgggttctacgtcatgttcc

SEQ ID NO: 40710 - DNA, 25 bp, Saccharomyces pastorianus
gttgagactcttttactccttgttc

SEQ ID NO: 40711 - DNA, 25 bp, Saccharomyces pastorianus
atcgcatgtggagccggagacgttt

SEQ ID NO: 40712 - DNA, 25 bp, Saccharomyces pastorianus
gaagtttttgttgatcgtgcccatc

SEQ ID NO: 40713 - DNA, 25 bp, Saccharomyces pastorianus
gttccagtgaaaaagaccgagatct

SEQ ID NO: 40714 - DNA, 25 bp, Saccharomyces pastorianus
aaactctggactaagcgagcaggaa

SEQ ID NO: 40715 - DNA, 25 bp, Saccharomyces pastorianus
gatttgaaactcaccgggattacgc

SEQ ID NO: 40716 - DNA, 25 bp, Saccharomyces pastorianus
gattacgcctttacccaagggtatg

SEQ ID NO: 40717 - DNA, 25 bp, Saccharomyces pastorianus
agggtatgccccagatatatgttac

SEQ ID NO: 40718 - DNA, 25 bp, Saccharomyces pastorianus
tatcactgtgataccaaactctgga

SEQ ID NO: 40719 - DNA, 25 bp, Saccharomyces pastorianus
gaagccaacgccaataggactcaag

SEQ ID NO: 40720 - DNA, 25 bp, Saccharomyces pastorianus
aaagctacggatgcattacaaggga

SEQ ID NO: 40721 - DNA, 25 bp, Saccharomyces pastorianus
gtattatcaacgtttctgctgccga

SEQ ID NO: 40722 - DNA, 25 bp, Saccharomyces pastorianus
ggctagaactgatatccaaggctga

SEQ ID NO: 40723 - DNA, 25 bp, Saccharomyces pastorianus
gatacgagcaactgatctccaacga

SEQ ID NO: 40724 - DNA, 25 bp, Saccharomyces pastorianus
ttcaagccctcgagcatactgcaga

SEQ ID NO: 40725 - DNA, 25 bp, Saccharomyces pastorianus
agtggacgatttcaacttccagctc

SEQ ID NO: 40726 - DNA, 25 bp, Saccharomyces pastorianus
gtcttgtataaacatcaccggcttg

SEQ ID NO: 40727 - DNA, 25 bp, Saccharomyces pastorianus
accggcttgatcacgtttctggaac

SEQ ID NO: 40728 - DNA, 25 bp, Saccharomyces pastorianus
tctggaactgttgtatgacgcgccc

SEQ ID NO: 40729 - DNA, 25 bp, Saccharomyces pastorianus
agacattgtatcgttgtggtcccaa

SEQ ID NO: 40730 - DNA, 25 bp, Saccharomyces pastorianus
aatacccgacaaaactgcctgaatc

SEQ ID NO: 40731 - DNA, 25 bp, Saccharomyces pastorianus
cacggaattctacaacggcatcgag

SEQ ID NO: 40732 - DNA, 25 bp, Saccharomyces pastorianus
gacgcgcccatggacgcattgagaa

SEQ ID NO: 40733 - DNA, 25 bp, Saccharomyces pastorianus
aaaggcggcgttgcgcaatacccga

SEQ ID NO: 40734 - DNA, 25 bp, Saccharomyces pastorianus
tgcagaagctggtcggcgataccgc

SEQ ID NO: 40735 - DNA, 25 bp, Saccharomyces pastorianus
gaaagccgtcaacgatcgcggtgaa

SEQ ID NO: 40736 - DNA, 25 bp, Saccharomyces pastorianus
tcaacgggtttactctggacacaaa

SEQ ID NO: 40737 - DNA, 25 bp, Saccharomyces pastorianus
aaatcttccatctggttgggttcct

SEQ ID NO: 40738 - DNA, 25 bp, Saccharomyces pastorianus
gtaaggaaatggtcgccgcctgcta

SEQ ID NO: 40739 - DNA, 25 bp, Saccharomyces pastorianus
agaatcctggacttggtgccaaagc

SEQ ID NO: 40740 - DNA, 25 bp, Saccharomyces pastorianus
agcagccattttcggccaggtatgt

SEQ ID NO: 40741 - DNA, 25 bp, Saccharomyces pastorianus
gtggctgacgtgcataggaccttcc

SEQ ID NO: 40742 - DNA, 25 bp, Saccharomyces pastorianus
tctaggtgagttcatcttgacccat

SEQ ID NO: 40743 - DNA, 25 bp, Saccharomyces pastorianus
atattcaagctgctaccggactctt

SEQ ID NO: 40744 - DNA, 25 bp, Saccharomyces pastorianus
gtctttttgcgtatccatgcgacaa

SEQ ID NO: 40745 - DNA, 25 bp, Saccharomyces pastorianus
ttgggttcctctggcgaaatcgata

SEQ ID NO: 40746 - DNA, 25 bp, Saccharomyces pastorianus
actggtatcccagcatatgcgtata

SEQ ID NO: 40747 - DNA, 25 bp, Saccharomyces pastorianus
gcgtatacttgtgtcattattctca

SEQ ID NO: 40748 - DNA, 25 bp, Saccharomyces pastorianus
gagcaattcagactacgcgattcaa

SEQ ID NO: 40749 - DNA, 25 bp, Saccharomyces pastorianus
gagacgttcaaggatttcgttcgaa

SEQ ID NO: 40750 - DNA, 25 bp, Saccharomyces pastorianus
aaaatcttcacctctgatgaccctt

SEQ ID NO: 40751 - DNA, 25 bp, Saccharomyces pastorianus
gaccctttacttttatcaaccgcat

SEQ ID NO: 40752 - DNA, 25 bp, Saccharomyces pastorianus
gtttatgttccaaccgtggatttca

SEQ ID NO: 40753 - DNA, 25 bp, Saccharomyces pastorianus
acagcgagttcacccagcaaggttg

SEQ ID NO: 40754 - DNA, 25 bp, Saccharomyces pastorianus
tattgggtccggacatcatgaacaa

SEQ ID NO: 40755 - DNA, 25 bp, Saccharomyces pastorianus
aaagtgttctcatccaaaagtctat

SEQ ID NO: 40756 - DNA, 25 bp, Saccharomyces pastorianus
gcggaattgccgtattcttatttac

SEQ ID NO: 40757 - DNA, 25 bp, Saccharomyces pastorianus
ggaaacagcacaaccatcagataca

SEQ ID NO: 40758 - DNA, 25 bp, Saccharomyces pastorianus
agcaagcgctcagtcatcgggataa

SEQ ID NO: 40759 - DNA, 25 bp, Saccharomyces pastorianus
aataactgtggtctcgctagccaac

SEQ ID NO: 40760 - DNA, 25 bp, Saccharomyces pastorianus
acaagctggtccaattgtacggccc

SEQ ID NO: 40761 - DNA, 25 bp, Saccharomyces pastorianus
gcaaatcattttacagcgccagcaa

SEQ ID NO: 40762 - DNA, 25 bp, Saccharomyces pastorianus
gccaaccactactatgcgcaaagga

SEQ ID NO: 40763 - DNA, 25 bp, Saccharomyces pastorianus
atcgggataagtcactcaacttgga

SEQ ID NO: 40764 - DNA, 25 bp, Saccharomyces pastorianus
aacatcgtactattgctactgcaaa

SEQ ID NO: 40765 - DNA, 25 bp, Saccharomyces pastorianus
atggattgtcctttaaacatcgtac

SEQ ID NO: 40766 - DNA, 25 bp, Saccharomyces pastorianus
tacagggaagagaactgcctcaact

SEQ ID NO: 40767 - DNA, 25 bp, Saccharomyces pastorianus
tactaccgcgacatatccctaagag

SEQ ID NO: 40768 - DNA, 25 bp, Saccharomyces pastorianus
attgctggtgctcttaaaaactggg

SEQ ID NO: 40769 - DNA, 25 bp, Saccharomyces pastorianus
attgatgctttgacacaaggcttga

SEQ ID NO: 40770 - DNA, 25 bp, Saccharomyces pastorianus
ttagccacactaatagacctctcac

SEQ ID NO: 40771 - DNA, 25 bp, Saccharomyces pastorianus
agttggtgatgatgcgtctgccaga

SEQ ID NO: 40772 - DNA, 25 bp, Saccharomyces pastorianus
ggactattcatcattattagccaca

SEQ ID NO: 40773 - DNA, 25 bp, Saccharomyces pastorianus
taaactcttttgatccctttgacga

SEQ ID NO: 40774 - DNA, 25 bp, Saccharomyces pastorianus
gcttccatttttcttacagttatct

SEQ ID NO: 40775 - DNA, 25 bp, Saccharomyces pastorianus
atgtcatcagacaacgttccaagcc

SEQ ID NO: 40776 - DNA, 25 bp, Saccharomyces pastorianus
cagattggacgatcttgtcaagttc

SEQ ID NO: 40777 - DNA, 25 bp, Saccharomyces pastorianus
gttgttcaaggcacatggtgacgtt

SEQ ID NO: 40778 - DNA, 25 bp, Saccharomyces pastorianus
ggatttgagtcccatttcacgaagc

SEQ ID NO: 40779 - DNA, 25 bp, Saccharomyces pastorianus
gatttaccgtcaacgccaaatgggt

SEQ ID NO: 40780 - DNA, 25 bp, Saccharomyces pastorianus
atacaaggatgttcaccaagccgga

SEQ ID NO: 40781 - DNA, 25 bp, Saccharomyces pastorianus
attttgctggtgactctgtgccaca

SEQ ID NO: 40782 - DNA, 25 bp, Saccharomyces pastorianus
cataaaggtgctcacggtcgtgtct

SEQ ID NO: 40783 - DNA, 25 bp, Saccharomyces pastorianus
aagacaaatggttcgtccagcggcc

SEQ ID NO: 40784 - DNA, 25 bp, Saccharomyces pastorianus
taagggatctttgcgtggctctaaa

SEQ ID NO: 40785 - DNA, 25 bp, Saccharomyces pastorianus
aaaggttactatttccattttgctg

SEQ ID NO: 40786 - DNA, 25 bp, Saccharomyces pastorianus
ctgtgccacaacacgttcagcagtg

SEQ ID NO: 40787 - DNA, 25 bp, Saccharomyces pastorianus
taattccttcagctgcatcgtcaat

SEQ ID NO: 40788 - DNA, 25 bp, Saccharomyces pastorianus
gacgtggaagtggtccgttatttct

SEQ ID NO: 40789 - DNA, 25 bp, Saccharomyces pastorianus
atgaatcctcgcgatttaccgtcaa

SEQ ID NO: 40790 - DNA, 25 bp, Saccharomyces pastorianus
ggaagtaagcgttatcccattcaaa

SEQ ID NO: 40791 - DNA, 25 bp, Saccharomyces pastorianus
gatagtaaattagcctctgccgaca

SEQ ID NO: 40792 - DNA, 25 bp, Saccharomyces pastorianus
tcacagtcctttgcgattccatata

SEQ ID NO: 40793 - DNA, 25 bp, Saccharomyces pastorianus
agctttagtcaaggctgctgtatca

SEQ ID NO: 40794 - DNA, 25 bp, Saccharomyces pastorianus
tctgccgacaaagtggtgctattca

SEQ ID NO: 40795 - DNA, 25 bp, Saccharomyces pastorianus
ttgaccgctcatcacttgttcttga

SEQ ID NO: 40796 - DNA, 25 bp, Saccharomyces pastorianus
aaaagtcgcagctacgttgaccgct

SEQ ID NO: 40797 - DNA, 25 bp, Saccharomyces pastorianus
tatttcttttttggttccgactcag

SEQ ID NO: 40798 - DNA, 25 bp, Saccharomyces pastorianus
gcgaacagacagttcctcagtctat

SEQ ID NO: 40799 - DNA, 25 bp, Saccharomyces pastorianus
gagcattgcaccagtgaggctgcca

SEQ ID NO: 40800 - DNA, 25 bp, Saccharomyces pastorianus
tgagaaagctgcataccgacttccc

SEQ ID NO: 40801 - DNA, 25 bp, Saccharomyces pastorianus
ttgctttggtcttctcttctaatga

SEQ ID NO: 40802 - DNA, 25 bp, Saccharomyces pastorianus
taaattcagagctggtgtcagtgaa

SEQ ID NO: 40803 - DNA, 25 bp, Saccharomyces pastorianus
acgataagatgatcactgtgctcaa

SEQ ID NO: 40804 - DNA, 25 bp, Saccharomyces pastorianus
tgaaagatacttcttctggctgcaa

SEQ ID NO: 40805 - DNA, 25 bp, Saccharomyces pastorianus
tccaggaaacctgcctttaaatgaa

SEQ ID NO: 40806 - DNA, 25 bp, Saccharomyces pastorianus
gaagggaactggatgctatttcttt

SEQ ID NO: 40807 - DNA, 25 bp, Saccharomyces pastorianus
ggttctgggactttgaatggcgtcc

SEQ ID NO: 40808 - DNA, 25 bp, Saccharomyces pastorianus
gagttcgactgtcattaaattcaga

SEQ ID NO: 40809 - DNA, 25 bp, Saccharomyces pastorianus
accaattccggttcagggtgagatc

SEQ ID NO: 40810 - DNA, 25 bp, Saccharomyces pastorianus
aatggcgtcccactgaaaagccgat

SEQ ID NO: 40811 - DNA, 25 bp, Saccharomyces pastorianus
aactcgtctatgtacaccaattccg

SEQ ID NO: 40812 - DNA, 25 bp, Saccharomyces pastorianus
tggccatcgctaaagtttcaaggat

SEQ ID NO: 40813 - DNA, 25 bp, Saccharomyces pastorianus
gagccacaggctgcggaaactaatg

SEQ ID NO: 40814 - DNA, 25 bp, Saccharomyces pastorianus
gacaccactaaggatgcttgcactg

SEQ ID NO: 40815 - DNA, 25 bp, Saccharomyces pastorianus
agacccagaatcagagccacaggct

SEQ ID NO: 40816 - DNA, 25 bp, Saccharomyces pastorianus
gaaaaactaccaccttctttatcag

SEQ ID NO: 40817 - DNA, 25 bp, Saccharomyces pastorianus
gacaactatcacaacaaagccgctg

SEQ ID NO: 40818 - DNA, 25 bp, Saccharomyces pastorianus
gagaaacaagatcttggccatcgct

SEQ ID NO: 40819 - DNA, 25 bp, Saccharomyces pastorianus
cggtgctttagctcgtgggtctgaa

SEQ ID NO: 40820 - DNA, 25 bp, Saccharomyces pastorianus
gtcactaccatttgtcggcgagaaa

SEQ ID NO: 40821 - DNA, 25 bp, Saccharomyces pastorianus
gatgaatgctggtgttctaccccgc

SEQ ID NO: 40822 - DNA, 25 bp, Saccharomyces pastorianus
tgctccgaactatttggacaactat

SEQ ID NO: 40823 - DNA, 25 bp, Saccharomyces pastorianus
ttaaagctccctcatctagaaataa

SEQ ID NO: 40824 - DNA, 25 bp, Saccharomyces pastorianus
gggagccccagataaccatagagaa

SEQ ID NO: 40825 - DNA, 25 bp, Saccharomyces pastorianus
gaaactcaagcaattctcctggata

SEQ ID NO: 40826 - DNA, 25 bp, Saccharomyces pastorianus
atacacttgggctggatttcctctt

SEQ ID NO: 40827 - DNA, 25 bp, Saccharomyces pastorianus
gacatggctgtggaaatctctaaaa

SEQ ID NO: 40828 - DNA, 25 bp, Saccharomyces pastorianus
gctggatttcctcttgaccaagatg

SEQ ID NO: 40829 - DNA, 25 bp, Saccharomyces pastorianus
aaagctagttgcgttgctaccgaaa

SEQ ID NO: 40830 - DNA, 25 bp, Saccharomyces pastorianus
gggatgtccctattggcgaggatat

SEQ ID NO: 40831 - DNA, 25 bp, Saccharomyces pastorianus
accacgttatttttcagaggctatt

SEQ ID NO: 40832 - DNA, 25 bp, Saccharomyces pastorianus
agggcaccagtagccatacacttgg

SEQ ID NO: 40833 - DNA, 25 bp, Saccharomyces pastorianus
tgatttgcggtgtctgggagcccca

SEQ ID NO: 40834 - DNA, 25 bp, Saccharomyces pastorianus
atagcgataccatgccaacgataag

SEQ ID NO: 40835 - DNA, 25 bp, Saccharomyces pastorianus
gagtcacatggtttgctctcctgtg

SEQ ID NO: 40836 - DNA, 25 bp, Saccharomyces pastorianus
ccaagccggagtattcaccaatgcg

SEQ ID NO: 40837 - DNA, 25 bp, Saccharomyces pastorianus
gggttttcctaccatctgggagtca

SEQ ID NO: 40838 - DNA, 25 bp, Saccharomyces pastorianus
ggtgcttcgcaggtttaatttccgt

SEQ ID NO: 40839 - DNA, 25 bp, Saccharomyces pastorianus
aagattccgttccagtagcgatagt

SEQ ID NO: 40840 - DNA, 25 bp, Saccharomyces pastorianus
gaagacttagcttacggtcaacgta

SEQ ID NO: 40841 - DNA, 25 bp, Saccharomyces pastorianus
gtcggacgaccttaactgcaattca

SEQ ID NO: 40842 - DNA, 25 bp, Saccharomyces pastorianus
taattccttgctttcactggtcgtt

SEQ ID NO: 40843 - DNA, 25 bp, Saccharomyces pastorianus
taatttccgtatcatgcttagcatg

SEQ ID NO: 40844 - DNA, 25 bp, Saccharomyces pastorianus
gggcactggttcatcttaattcctt

SEQ ID NO: 40845 - DNA, 25 bp, Saccharomyces pastorianus
aacttcattcacgtaggctatgtcg

SEQ ID NO: 40846 - DNA, 25 bp, Saccharomyces pastorianus
aaatcgcgcgccttttggtcaaaag

SEQ ID NO: 40847 - DNA, 25 bp, Saccharomyces pastorianus
tatgtcggatcgttccttcagcatt

SEQ ID NO: 40848 - DNA, 25 bp, Saccharomyces pastorianus
ttaccgccttgtaagagagactctt

SEQ ID NO: 40849 - DNA, 25 bp, Saccharomyces pastorianus
aaccagcattatcctttgatttgtc

SEQ ID NO: 40850 - DNA, 25 bp, Saccharomyces pastorianus
ggcaagtggcttccattatcgttga

SEQ ID NO: 40851 - DNA, 25 bp, Saccharomyces pastorianus
attgcaatcgttcgacattcacggg

SEQ ID NO: 40852 - DNA, 25 bp, Saccharomyces pastorianus
agggctgcattttacattgctgcta

SEQ ID NO: 40853 - DNA, 25 bp, Saccharomyces pastorianus
taatctactaggagctgccattgcc

SEQ ID NO: 40854 - DNA, 25 bp, Saccharomyces pastorianus
gcgatctcgtatgaaatgcctttag

SEQ ID NO: 40855 - DNA, 25 bp, Saccharomyces pastorianus
tctttaagagaaacgctgccaccaa

SEQ ID NO: 40856 - DNA, 25 bp, Saccharomyces pastorianus
ttcccgcatccttttacttatttat

SEQ ID NO: 40857 - DNA, 25 bp, Saccharomyces pastorianus
gacacttttgaccttatgatgatac

SEQ ID NO: 40858 - DNA, 25 bp, Saccharomyces pastorianus
ctctcttgtctactgctctcaaaaa

SEQ ID NO: 40859 - DNA, 25 bp, Saccharomyces pastorianus
gtacaatttattcatcataggccaa

SEQ ID NO: 40860 - DNA, 25 bp, Saccharomyces pastorianus
ataacagcagcgtttcatctctctt

SEQ ID NO: 40861 - DNA, 25 bp, Saccharomyces pastorianus
gtgttttcaccgaaatcctggtaca

SEQ ID NO: 40862 - DNA, 25 bp, Saccharomyces pastorianus
acgataattccttcgaagcttatgg

SEQ ID NO: 40863 - DNA, 25 bp, Saccharomyces pastorianus
cgagttacagcagtcgtacaattta

SEQ ID NO: 40864 - DNA, 25 bp, Saccharomyces pastorianus
aggccacattgtttacttcagattt

SEQ ID NO: 40865 - DNA, 25 bp, Saccharomyces pastorianus
gaaattacccacatcgttcttataa

SEQ ID NO: 40866 - DNA, 25 bp, Saccharomyces pastorianus
catatttcaatgtcccgttttaact

SEQ ID NO: 40867 - DNA, 25 bp, Saccharomyces pastorianus
gatacaagtcctgattttaacgaaa

SEQ ID NO: 40868 - DNA, 25 bp, Saccharomyces pastorianus
gatttcccaaccttaagattagcca

SEQ ID NO: 40869 - DNA, 25 bp, Saccharomyces pastorianus
aaaggatgacgtgccattggtacaa

SEQ ID NO: 40870 - DNA, 25 bp, Saccharomyces pastorianus
ttgagactacattgtcgggcttgac

SEQ ID NO: 40871 - DNA, 25 bp, Saccharomyces pastorianus
ggttgacgatactgctccactaaaa

SEQ ID NO: 40872 - DNA, 25 bp, Saccharomyces pastorianus
gtacaagtaagctgggacatcgata

SEQ ID NO: 40873 - DNA, 25 bp, Saccharomyces pastorianus
aaactattggaatggctgtcactaa

SEQ ID NO: 40874 - DNA, 25 bp, Saccharomyces pastorianus
cccgtaggtggtatcaaggttatca

SEQ ID NO: 40875 - DNA, 25 bp, Saccharomyces pastorianus
ttgaggcttgcagatctattacttg

SEQ ID NO: 40876 - DNA, 25 bp, Saccharomyces pastorianus
actaaaacagctcaccacttacaag

SEQ ID NO: 40877 - DNA, 25 bp, Saccharomyces pastorianus
gacaaactttgtcttcgatttccca

SEQ ID NO: 40878 - DNA, 25 bp, Saccharomyces pastorianus
cggtgcctccgcaactaccactcta

SEQ ID NO: 40879 - DNA, 25 bp, Saccharomyces pastorianus
ggtgcctccgcaactaccactctag

SEQ ID NO: 40880 - DNA, 25 bp, Saccharomyces pastorianus
gccgccggtgcctccgcaactacca

SEQ ID NO: 40881 - DNA, 25 bp, Saccharomyces pastorianus
ccgccggtgcctccgcaactaccac

SEQ ID NO: 40882 - DNA, 25 bp, Saccharomyces pastorianus
cgccgccggtgcctccgcaactacc

SEQ ID NO: 40883 - DNA, 25 bp, Saccharomyces pastorianus
gccggtgcctccgcaactaccactc

SEQ ID NO: 40884 - DNA, 25 bp, Saccharomyces pastorianus
cgccggtgcctccgcaactaccact

SEQ ID NO: 40885 - DNA, 25 bp, Saccharomyces pastorianus
ccggtgcctccgcaactaccactct

SEQ ID NO: 40886 - DNA, 25 bp, Saccharomyces pastorianus
atcgccgccggtgcctccgcaacta

SEQ ID NO: 40887 - DNA, 25 bp, Saccharomyces pastorianus
tcgccgccggtgcctccgcaactac

SEQ ID NO: 40888 - DNA, 25 bp, Saccharomyces pastorianus
gtgcctccgcaactaccactctagc

SEQ ID NO: 40889 - DNA, 25 bp, Saccharomyces pastorianus
taactgttggttgcctcatgtcatg

SEQ ID NO: 40890 - DNA, 25 bp, Saccharomyces pastorianus
tttctgctgcatccggtaaaattgg

SEQ ID NO: 40891 - DNA, 25 bp, Saccharomyces pastorianus
ttgattttgatctgtgctggttcct

SEQ ID NO: 40892 - DNA, 25 bp, Saccharomyces pastorianus
gtcatggagatctttgccttgttta

SEQ ID NO: 40893 - DNA, 25 bp, Saccharomyces pastorianus
aactgctttgggtactttgatcaac

SEQ ID NO: 40894 - DNA, 25 bp, Saccharomyces pastorianus
gttctgtgtcattgggtttgcatac

SEQ ID NO: 40895 - DNA, 25 bp, Saccharomyces pastorianus
aaattgtacgactccgctgttggta

SEQ ID NO: 40896 - DNA, 25 bp, Saccharomyces pastorianus
actactacctttatcgttcctggtg

SEQ ID NO: 40897 - DNA, 25 bp, Saccharomyces pastorianus
ggatgagtgttttcactgtcgacat

SEQ ID NO: 40898 - DNA, 25 bp, Saccharomyces pastorianus
gttgatcctggtactcttaactaca

SEQ ID NO: 40899 - DNA, 25 bp, Saccharomyces pastorianus
attggccggtttcatcattttgact

SEQ ID NO: 40900 - DNA, 25 bp, Saccharomyces pastorianus
ggagaatacgctagcgaccacgttt

SEQ ID NO: 40901 - DNA, 25 bp, Saccharomyces pastorianus
aagccagtgacgctcagaggtccag

SEQ ID NO: 40902 - DNA, 25 bp, Saccharomyces pastorianus
gaagagaaccccttggacgactttg

SEQ ID NO: 40903 - DNA, 25 bp, Saccharomyces pastorianus
tattgagcccagtgacgaacagagt

SEQ ID NO: 40904 - DNA, 25 bp, Saccharomyces pastorianus
gggtacctaaaaatgcctcgcgcaa

SEQ ID NO: 40905 - DNA, 25 bp, Saccharomyces pastorianus
gtaaatcaactagtcgcgctacaca

SEQ ID NO: 40906 - DNA, 25 bp, Saccharomyces pastorianus
gctacacaactccttgcacgtgaaa

SEQ ID NO: 40907 - DNA, 25 bp, Saccharomyces pastorianus
aactgggccaactcgtggtgtggat

SEQ ID NO: 40908 - DNA, 25 bp, Saccharomyces pastorianus
tgccaaaacattctcaacctttcga

SEQ ID NO: 40909 - DNA, 25 bp, Saccharomyces pastorianus
cctaatgtgccagctacgttttctt

SEQ ID NO: 40910 - DNA, 25 bp, Saccharomyces pastorianus
gggagaaggccgctttaaccagcca

SEQ ID NO: 40911 - DNA, 25 bp, Saccharomyces pastorianus
gttccccgcattcacctttgaaaat

SEQ ID NO: 40912 - DNA, 25 bp, Saccharomyces pastorianus
gggtgtttcaatcctagcgaaggct

SEQ ID NO: 40913 - DNA, 25 bp, Saccharomyces pastorianus
gattatgatgtcattgtccccaatg

SEQ ID NO: 40914 - DNA, 25 bp, Saccharomyces pastorianus
gtgagcaaccatacgatttaaattc

SEQ ID NO: 40915 - DNA, 25 bp, Saccharomyces pastorianus
agaaatggtgtacagttccccgcat

SEQ ID NO: 40916 - DNA, 25 bp, Saccharomyces pastorianus
tatgccctgggtctgttattcaaga

SEQ ID NO: 40917 - DNA, 25 bp, Saccharomyces pastorianus
ggagagttcatttggcttacatcag

SEQ ID NO: 40918 - DNA, 25 bp, Saccharomyces pastorianus
caatgtttggagaccgctacctaca

SEQ ID NO: 40919 - DNA, 25 bp, Saccharomyces pastorianus
gaaactggttgactgctaatgcttt

SEQ ID NO: 40920 - DNA, 25 bp, Saccharomyces pastorianus
gagtcggtggcttaccgcattatac

SEQ ID NO: 40921 - DNA, 25 bp, Saccharomyces pastorianus
gctttgaaaccataccattcttggg

SEQ ID NO: 40922 - DNA, 25 bp, Saccharomyces pastorianus
gagacactacaaataccacgccagt

SEQ ID NO: 40923 - DNA, 25 bp, Saccharomyces pastorianus
tgcaactacgcaagtcggtgacatt

SEQ ID NO: 40924 - DNA, 25 bp, Saccharomyces pastorianus
gaatctatttggtatactgggcagt

SEQ ID NO: 40925 - DNA, 25 bp, Saccharomyces pastorianus
gcattaaacgcttccaccatagaca

SEQ ID NO: 40926 - DNA, 25 bp, Saccharomyces pastorianus
ttcagaatctctctactctttcaag

SEQ ID NO: 40927 - DNA, 25 bp, Saccharomyces pastorianus
tgtttatgcataacctacccaaaat

SEQ ID NO: 40928 - DNA, 25 bp, Saccharomyces pastorianus
tataaaaatgcaccaacgtcccctc

SEQ ID NO: 40929 - DNA, 25 bp, Saccharomyces pastorianus
aggtccatagatttgcaactacgca

SEQ ID NO: 40930 - DNA, 25 bp, Saccharomyces pastorianus
ggccacgatctagaactcctgttga

SEQ ID NO: 40931 - DNA, 25 bp, Saccharomyces pastorianus
cccgcaccagtctcataaagttgta

SEQ ID NO: 40932 - DNA, 25 bp, Saccharomyces pastorianus
acaagaagggcttatttcgcaacga

SEQ ID NO: 40933 - DNA, 25 bp, Saccharomyces pastorianus
aaaaattcatcaaaggtaagccagg

SEQ ID NO: 40934 - DNA, 25 bp, Saccharomyces pastorianus
tatgtaccgtatgctcgtcttacta

SEQ ID NO: 40935 - DNA, 25 bp, Saccharomyces pastorianus
gacgctgaaatttgtataccgaacg

SEQ ID NO: 40936 - DNA, 25 bp, Saccharomyces pastorianus
aaacaatatgtaccgtatgctcgtc

SEQ ID NO: 40937 - DNA, 25 bp, Saccharomyces pastorianus
tgaactagacgaactaaacgtttgg

SEQ ID NO: 40938 - DNA, 25 bp, Saccharomyces pastorianus
aagaaattgaggatgttgtcgaaaa

SEQ ID NO: 40939 - DNA, 25 bp, Saccharomyces pastorianus
tggtttgataaatttgacgctgaaa

SEQ ID NO: 40940 - DNA, 25 bp, Saccharomyces pastorianus
atttgtcgatgagttaatgttacca

SEQ ID NO: 40941 - DNA, 25 bp, Saccharomyces pastorianus
aatgttaccatttcaggttgatgaa

SEQ ID NO: 40942 - DNA, 25 bp, Saccharomyces pastorianus
tcaggttgatgaactagacgaacta

SEQ ID NO: 40943 - DNA, 25 bp, Saccharomyces pastorianus
gtcttactagaggacgataccaaaa

SEQ ID NO: 40944 - DNA, 25 bp, Saccharomyces pastorianus
gtggtgggcaacatacactactcgc

SEQ ID NO: 40945 - DNA, 25 bp, Saccharomyces pastorianus
ggttctgctcgtacgtgtcgatcga

SEQ ID NO: 40946 - DNA, 25 bp, Saccharomyces pastorianus
gtgttctatgcgacgcgtcagcaga

SEQ ID NO: 40947 - DNA, 25 bp, Saccharomyces pastorianus
aagcccgcgctgatggtggagttct

SEQ ID NO: 40948 - DNA, 25 bp, Saccharomyces pastorianus
acaagttggtgtttgccatcgcgac

SEQ ID NO: 40949 - DNA, 25 bp, Saccharomyces pastorianus
ggtcgtgaacatgttgcccgtgaga

SEQ ID NO: 40950 - DNA, 25 bp, Saccharomyces pastorianus
atcgcgacgaccaacgaggttctgg

SEQ ID NO: 40951 - DNA, 25 bp, Saccharomyces pastorianus
gctgaggatcccgttcttgaagaag

SEQ ID NO: 40952 - DNA, 25 bp, Saccharomyces pastorianus
aggcggccaattgcgtctacgtgta

SEQ ID NO: 40953 - DNA, 25 bp, Saccharomyces pastorianus
agagcgtgttgcgactgccttacaa

SEQ ID NO: 40954 - DNA, 25 bp, Saccharomyces pastorianus
aaaggcagacaacgcggccggcaac

SEQ ID NO: 40955 - DNA, 25 bp, Saccharomyces pastorianus
tcaaccactgcattccacggtacag

SEQ ID NO: 40956 - DNA, 25 bp, Saccharomyces pastorianus
gcaacactcagaatcaaagccagca

SEQ ID NO: 40957 - DNA, 25 bp, Saccharomyces pastorianus
tgagctccttactgtacgcttacgg

SEQ ID NO: 40958 - DNA, 25 bp, Saccharomyces pastorianus
ttgttcaacaaggacgtgagctcct

SEQ ID NO: 40959 - DNA, 25 bp, Saccharomyces pastorianus
ttacggcgatgtgcctcaaccactg

SEQ ID NO: 40960 - DNA, 25 bp, Saccharomyces pastorianus
aatgcattccatacagctcaaaact

SEQ ID NO: 40961 - DNA, 25 bp, Saccharomyces pastorianus
tccacggtacagtgcttagatgaac

SEQ ID NO: 40962 - DNA, 25 bp, Saccharomyces pastorianus
gcggaacgactctgttaaacttgga

SEQ ID NO: 40963 - DNA, 25 bp, Saccharomyces pastorianus
agccgaccgcaccagtagtaagcaa

SEQ ID NO: 40964 - DNA, 25 bp, Saccharomyces pastorianus
gacgatgacgaagtagccgaccgca

SEQ ID NO: 40965 - DNA, 25 bp, Saccharomyces pastorianus
tttcaagtttgctctgcggaacgac

SEQ ID NO: 40966 - DNA, 25 bp, Saccharomyces pastorianus
gaattctgtggctgaaggcatttaa

SEQ ID NO: 40967 - DNA, 25 bp, Saccharomyces pastorianus
aggattgaatcgcacttatctgaaa

SEQ ID NO: 40968 - DNA, 25 bp, Saccharomyces pastorianus
agggcgataccatgatcggtggttt

SEQ ID NO: 40969 - DNA, 25 bp, Saccharomyces pastorianus
cctgctgtttgctcatgctttacaa

SEQ ID NO: 40970 - DNA, 25 bp, Saccharomyces pastorianus
gaatcattacgcgaagccacggaat

SEQ ID NO: 40971 - DNA, 25 bp, Saccharomyces pastorianus
tgctttacaatccagggctatttat

SEQ ID NO: 40972 - DNA, 25 bp, Saccharomyces pastorianus
gaatacgctgtttctgttgtcacat

SEQ ID NO: 40973 - DNA, 25 bp, Saccharomyces pastorianus
gtttcaatcttggtcatagccgggt

SEQ ID NO: 40974 - DNA, 25 bp, Saccharomyces pastorianus
tggtgctagaatcctcggcgataca

SEQ ID NO: 40975 - DNA, 25 bp, Saccharomyces pastorianus
aactccgattttcaccattacttgt

SEQ ID NO: 40976 - DNA, 25 bp, Saccharomyces pastorianus
ggaagatcaacgcaaactccgattt

SEQ ID NO: 40977 - DNA, 25 bp, Saccharomyces pastorianus
gatttattacttgctgactcccgac

SEQ ID NO: 40978 - DNA, 25 bp, Saccharomyces pastorianus
tggtacctgggtttgatttcgaaga

SEQ ID NO: 40979 - DNA, 25 bp, Saccharomyces pastorianus
gcttgagcctccaactagtttgcaa

SEQ ID NO: 40980 - DNA, 25 bp, Saccharomyces pastorianus
gttgaagagccttgttggtcctgaa

SEQ ID NO: 40981 - DNA, 25 bp, Saccharomyces pastorianus
gctgatgcagccattgagcctgtaa

SEQ ID NO: 40982 - DNA, 25 bp, Saccharomyces pastorianus
gagactctaccgatagtgttacagt

SEQ ID NO: 40983 - DNA, 25 bp, Saccharomyces pastorianus
gtctcccttgaccatgggcttagaa

SEQ ID NO: 40984 - DNA, 25 bp, Saccharomyces pastorianus
gatttcgaagatcacacctttatga

SEQ ID NO: 40985 - DNA, 25 bp, Saccharomyces pastorianus
gctttgttaaagtccctgcgcttga

SEQ ID NO: 40986 - DNA, 25 bp, Saccharomyces pastorianus
gacaaggaaccagtctacgctgatt

SEQ ID NO: 40987 - DNA, 25 bp, Saccharomyces pastorianus
tactagtgtaccctgatggccaagt

SEQ ID NO: 40988 - DNA, 25 bp, Saccharomyces pastorianus
aatataaagccatcacccagttcgt

SEQ ID NO: 40989 - DNA, 25 bp, Saccharomyces pastorianus
agttatcaatgtcgctgatcgctac

SEQ ID NO: 40990 - DNA, 25 bp, Saccharomyces pastorianus
aagtgtatccactgttccagatgag

SEQ ID NO: 40991 - DNA, 25 bp, Saccharomyces pastorianus
gcacttcctactttaatgggtcctt

SEQ ID NO: 40992 - DNA, 25 bp, Saccharomyces pastorianus
tgacaaggacgtgcgaccaacagat

SEQ ID NO: 40993 - DNA, 25 bp, Saccharomyces pastorianus
gctgccgtgagcctgagtatcaata

SEQ ID NO: 40994 - DNA, 25 bp, Saccharomyces pastorianus
tacccgttcaacaattctctttaca

SEQ ID NO: 40995 - DNA, 25 bp, Saccharomyces pastorianus
ttacgccaacctcaagagagcctgg

SEQ ID NO: 40996 - DNA, 25 bp, Saccharomyces pastorianus
agagcctggcaggatcaacgctatt

SEQ ID NO: 40997 - DNA, 25 bp, Saccharomyces pastorianus
gacatccgaattatacccgttcaac

SEQ ID NO: 40998 - DNA, 25 bp, Saccharomyces pastorianus
ttcgtgacgatactgctgccgtgag

SEQ ID NO: 40999 - DNA, 25 bp, Saccharomyces pastorianus
gatgccatacattccaggttctcaa

SEQ ID NO: 41000 - DNA, 25 bp, Saccharomyces pastorianus
atacattagagcttcgatgtcgctt

SEQ ID NO: 41001 - DNA, 25 bp, Saccharomyces pastorianus
aatacgccaggtgtcgtttacgtca

SEQ ID NO: 41002 - DNA, 25 bp, Saccharomyces pastorianus
aactgctttgaagtctcaagttcct

SEQ ID NO: 41003 - DNA, 25 bp, Saccharomyces pastorianus
gattacggtcgcgtgtttttacagg

SEQ ID NO: 41004 - DNA, 25 bp, Saccharomyces pastorianus
tttacagggtttaatcgacgacgat

SEQ ID NO: 41005 - DNA, 25 bp, Saccharomyces pastorianus
attcgccgttgatgttggttctgta

SEQ ID NO: 41006 - DNA, 25 bp, Saccharomyces pastorianus
ctggccttttacctccattagaaga

SEQ ID NO: 41007 - DNA, 25 bp, Saccharomyces pastorianus
ttacgtcaggccacctattgaagat

SEQ ID NO: 41008 - DNA, 25 bp, Saccharomyces pastorianus
ggatgccaaactatattcgccgttg

SEQ ID NO: 41009 - DNA, 25 bp, Saccharomyces pastorianus
agaacggttcaatgctgctcgacgg

SEQ ID NO: 41010 - DNA, 25 bp, Saccharomyces pastorianus
tatcttctacccaagggccacgttc

SEQ ID NO: 41011 - DNA, 25 bp, Saccharomyces pastorianus
aagacaccctatgctcgatgagcaa

SEQ ID NO: 41012 - DNA, 25 bp, Saccharomyces pastorianus
gtgtcaacaccagcgtcaagaccgg

SEQ ID NO: 41013 - DNA, 25 bp, Saccharomyces pastorianus
tacaagacaccctatgctcgatgag

SEQ ID NO: 41014 - DNA, 25 bp, Saccharomyces pastorianus
aacaccagcgtcaagaccggctatc

SEQ ID NO: 41015 - DNA, 25 bp, Saccharomyces pastorianus
atcattgctgtcgagcgtcgcggtg

SEQ ID NO: 41016 - DNA, 25 bp, Saccharomyces pastorianus
agcgtcgcggtgggctttccgacat

SEQ ID NO: 41017 - DNA, 25 bp, Saccharomyces pastorianus
tcgacgacgtcatcctacaagacac

SEQ ID NO: 41018 - DNA, 25 bp, Saccharomyces pastorianus
aaccgtgtcaacaccagcgtcaaga

SEQ ID NO: 41019 - DNA, 25 bp, Saccharomyces pastorianus
aagcaattcttcctcgacgacgtca

SEQ ID NO: 41020 - DNA, 25 bp, Saccharomyces pastorianus
agaccggctatcttctacccaaggg

SEQ ID NO: 41021 - DNA, 25 bp, Saccharomyces pastorianus
ccagaagcttttggtgggcgcatat

SEQ ID NO: 41022 - DNA, 25 bp, Saccharomyces pastorianus
gatcatacgctttgctcgataccaa

SEQ ID NO: 41023 - DNA, 25 bp, Saccharomyces pastorianus
gggcgcatatgttgtcttatcgttg

SEQ ID NO: 41024 - DNA, 25 bp, Saccharomyces pastorianus
accttgttgggctcatccagaagaa

SEQ ID NO: 41025 - DNA, 25 bp, Saccharomyces pastorianus
tggtacttcactcgtttcgttgaaa

SEQ ID NO: 41026 - DNA, 25 bp, Saccharomyces pastorianus
agggtattccattgctgttgtagca

SEQ ID NO: 41027 - DNA, 25 bp, Saccharomyces pastorianus
cttatcgttgatgttctggtacttc

SEQ ID NO: 41028 - DNA, 25 bp, Saccharomyces pastorianus
attaacgtgtattccatcccagagc

SEQ ID NO: 41029 - DNA, 25 bp, Saccharomyces pastorianus
gaggtgctcttcaaatggttttctg

SEQ ID NO: 41030 - DNA, 25 bp, Saccharomyces pastorianus
aagaacgaacctctgtaccttgttg

SEQ ID NO: 41031 - DNA, 25 bp, Saccharomyces pastorianus
aggctttaccttctattttcgcgag

SEQ ID NO: 41032 - DNA, 25 bp, Saccharomyces pastorianus
gaaatcagtggatgcttgaagctag

SEQ ID NO: 41033 - DNA, 25 bp, Saccharomyces pastorianus
gagtaatttagacaacctgaatggt

SEQ ID NO: 41034 - DNA, 25 bp, Saccharomyces pastorianus
gattttgtctttcatgctattttcc

SEQ ID NO: 41035 - DNA, 25 bp, Saccharomyces pastorianus
cgattacgacagcaccgattatggt

SEQ ID NO: 41036 - DNA, 25 bp, Saccharomyces pastorianus
tacaataccgagttattactgttac

SEQ ID NO: 41037 - DNA, 25 bp, Saccharomyces pastorianus
atgtgtccaaggtcatcgatgagaa

SEQ ID NO: 41038 - DNA, 25 bp, Saccharomyces pastorianus
gctagtatttggtgattctccgaga

SEQ ID NO: 41039 - DNA, 25 bp, Saccharomyces pastorianus
gctattttcctttatcatatgggtg

SEQ ID NO: 41040 - DNA, 25 bp, Saccharomyces pastorianus
tgttcgaaagagtgtatacgcctac

SEQ ID NO: 41041 - DNA, 25 bp, Saccharomyces pastorianus
atacatccaagattcttacctaacg

SEQ ID NO: 41042 - DNA, 25 bp, Saccharomyces pastorianus
tactaacggcacacaaagtttgagt

SEQ ID NO: 41043 - DNA, 25 bp, Saccharomyces pastorianus
gatgctagctccaacaatgtatgta

SEQ ID NO: 41044 - DNA, 25 bp, Saccharomyces pastorianus
gtttcagtcgaaaacacccacagcg

SEQ ID NO: 41045 - DNA, 25 bp, Saccharomyces pastorianus
ggatcctctccagaaatttgttgtc

SEQ ID NO: 41046 - DNA, 25 bp, Saccharomyces pastorianus
gccaacgatcttctttctagcgagc

SEQ ID NO: 41047 - DNA, 25 bp, Saccharomyces pastorianus
gcccgccactggatgaagatgctag

SEQ ID NO: 41048 - DNA, 25 bp, Saccharomyces pastorianus
acaagcaactgtacacgccaacgat

SEQ ID NO: 41049 - DNA, 25 bp, Saccharomyces pastorianus
ttctagcgagcccagtatagccaac

SEQ ID NO: 41050 - DNA, 25 bp, Saccharomyces pastorianus
agccaacaagttgagcccgtagaaa

SEQ ID NO: 41051 - DNA, 25 bp, Saccharomyces pastorianus
tccatgggctagttccagcttcaaa

SEQ ID NO: 41052 - DNA, 25 bp, Saccharomyces pastorianus
ccacagcgaccatggtgagttcgaa

SEQ ID NO: 41053 - DNA, 25 bp, Saccharomyces pastorianus
gggccattctagttccaaatcgagc

SEQ ID NO: 41054 - DNA, 25 bp, Saccharomyces pastorianus
ggtattgcaatgtcaccattatcta

SEQ ID NO: 41055 - DNA, 25 bp, Saccharomyces pastorianus
aacgtttctttatctactgatgatc

SEQ ID NO: 41056 - DNA, 25 bp, Saccharomyces pastorianus
gtttcggcatacttattggctcacg

SEQ ID NO: 41057 - DNA, 25 bp, Saccharomyces pastorianus
gaaactctgtcttgcaaagtggatg

SEQ ID NO: 41058 - DNA, 25 bp, Saccharomyces pastorianus
gttttcctacaccagagaaccatta

SEQ ID NO: 41059 - DNA, 25 bp, Saccharomyces pastorianus
gatacactatcaaccgaactggaac

SEQ ID NO: 41060 - DNA, 25 bp, Saccharomyces pastorianus
ttggctcacggtatttcccatggta

SEQ ID NO: 41061 - DNA, 25 bp, Saccharomyces pastorianus
gttgcggcgcaaatctataaactgt

SEQ ID NO: 41062 - DNA, 25 bp, Saccharomyces pastorianus
gatgatcctttacagttttcctaca

SEQ ID NO: 41063 - DNA, 25 bp, Saccharomyces pastorianus
gaagaatattcagttgcggcgcaaa

SEQ ID NO: 41064 - DNA, 25 bp, Saccharomyces pastorianus
gatcctgaacatctggtttcggcat

SEQ ID NO: 41065 - DNA, 25 bp, Saccharomyces pastorianus
aaaagctgattccactacccatatg

SEQ ID NO: 41066 - DNA, 25 bp, Saccharomyces pastorianus
gtacaacgctgctatccaggcacaa

SEQ ID NO: 41067 - DNA, 25 bp, Saccharomyces pastorianus
tgagttcgccgattgggacccagaa

SEQ ID NO: 41068 - DNA, 25 bp, Saccharomyces pastorianus
gggacccagaatccatggcgtacaa

SEQ ID NO: 41069 - DNA, 25 bp, Saccharomyces pastorianus
aactgtccacgagcgcgtttatgga

SEQ ID NO: 41070 - DNA, 25 bp, Saccharomyces pastorianus
ttgttttcccctcatacgcagaaag

SEQ ID NO: 41071 - DNA, 25 bp, Saccharomyces pastorianus
ttgcatctgtcggtgatatcctcaa

SEQ ID NO: 41072 - DNA, 25 bp, Saccharomyces pastorianus
gacccgaagggtggcatcattgcat

SEQ ID NO: 41073 - DNA, 25 bp, Saccharomyces pastorianus
atgactgctgtacgtcttatatgca

SEQ ID NO: 41074 - DNA, 25 bp, Saccharomyces pastorianus
tgataagcgttctctaccaactgtc

SEQ ID NO: 41075 - DNA, 25 bp, Saccharomyces pastorianus
tagtgctcgagtacaacgtcgcatt

SEQ ID NO: 41076 - DNA, 25 bp, Saccharomyces pastorianus
gtaccctcaggactctttgaacgaa

SEQ ID NO: 41077 - DNA, 25 bp, Saccharomyces pastorianus
aagaactttgtgctcttctgggtca

SEQ ID NO: 41078 - DNA, 25 bp, Saccharomyces pastorianus
attgcagagcacagcgtcttggact

SEQ ID NO: 41079 - DNA, 25 bp, Saccharomyces pastorianus
gacagggtgctaaccgccgtggtaa

SEQ ID NO: 41080 - DNA, 25 bp, Saccharomyces pastorianus
gggatcgtgagcaacctgtttcatc

SEQ ID NO: 41081 - DNA, 25 bp, Saccharomyces pastorianus
tgtttcatccgtccaagaccaagac

SEQ ID NO: 41082 - DNA, 25 bp, Saccharomyces pastorianus
gaaagacatcaacacgctgcccaaa

SEQ ID NO: 41083 - DNA, 25 bp, Saccharomyces pastorianus
gaaggtggttccaaaccgtgtgctt

SEQ ID NO: 41084 - DNA, 25 bp, Saccharomyces pastorianus
gaagcggtagtgatccctgaccaag

SEQ ID NO: 41085 - DNA, 25 bp, Saccharomyces pastorianus
gtgttgtcgggcgaaatctccaaga

SEQ ID NO: 41086 - DNA, 25 bp, Saccharomyces pastorianus
ttggacttcatgctcggccacataa

SEQ ID NO: 41087 - DNA, 25 bp, Saccharomyces pastorianus
gagttgtccaactgttgctccggga

SEQ ID NO: 41088 - DNA, 25 bp, Saccharomyces pastorianus
aggcacatggtttggcgtttagcgt

SEQ ID NO: 41089 - DNA, 25 bp, Saccharomyces pastorianus
gtagttcctggaacgtctctaaagg

SEQ ID NO: 41090 - DNA, 25 bp, Saccharomyces pastorianus
taaagtcgtggttatcggccaggac

SEQ ID NO: 41091 - DNA, 25 bp, Saccharomyces pastorianus
tgttgaagtcggtacatccatctcc

SEQ ID NO: 41092 - DNA, 25 bp, Saccharomyces pastorianus
gggcgcacaatgcaaactcacattc

SEQ ID NO: 41093 - DNA, 25 bp, Saccharomyces pastorianus
gttctattgcttaacacgtcattga

SEQ ID NO: 41094 - DNA, 25 bp, Saccharomyces pastorianus
ggttccacttccgtgggagctagta

SEQ ID NO: 41095 - DNA, 25 bp, Saccharomyces pastorianus
gccaggacccatatcataaccataa

SEQ ID NO: 41096 - DNA, 25 bp, Saccharomyces pastorianus
gtagagtctttgttgggttccactt

SEQ ID NO: 41097 - DNA, 25 bp, Saccharomyces pastorianus
tacatccatctccactaagtgcaag

SEQ ID NO: 41098 - DNA, 25 bp, Saccharomyces pastorianus
agtttgtagagctcacatggttgta

SEQ ID NO: 41099 - DNA, 25 bp, Saccharomyces pastorianus
gtttggtcacagtattttctgcacc

SEQ ID NO: 41100 - DNA, 25 bp, Saccharomyces pastorianus
ccgctagatagtaccgccttgaaac

SEQ ID NO: 41101 - DNA, 25 bp, Saccharomyces pastorianus
tcgacacttttaatacgttgccgtt

SEQ ID NO: 41102 - DNA, 25 bp, Saccharomyces pastorianus
attagacatgtcgttaggcccactg

SEQ ID NO: 41103 - DNA, 25 bp, Saccharomyces pastorianus
aggcccactgacgtacccgattttg

SEQ ID NO: 41104 - DNA, 25 bp, Saccharomyces pastorianus
gttgccgttagctgccattgttgca

SEQ ID NO: 41105 - DNA, 25 bp, Saccharomyces pastorianus
ttggaaaactttcatcgacactttt

SEQ ID NO: 41106 - DNA, 25 bp, Saccharomyces pastorianus
ttatcgcctgttttaaactcaatgg

SEQ ID NO: 41107 - DNA, 25 bp, Saccharomyces pastorianus
tcttttgaattgttggacccgctag

SEQ ID NO: 41108 - DNA, 25 bp, Saccharomyces pastorianus
gtcagatccaacagattcacccaat

SEQ ID NO: 41109 - DNA, 25 bp, Saccharomyces pastorianus
gtcttggctccattatagggtcgct

SEQ ID NO: 41110 - DNA, 25 bp, Saccharomyces pastorianus
taagacatatccaccatcccaataa

SEQ ID NO: 41111 - DNA, 25 bp, Saccharomyces pastorianus
ttgctagtagaatctcttctccctc

SEQ ID NO: 41112 - DNA, 25 bp, Saccharomyces pastorianus
tatagggtcgctgggtttgctagta

SEQ ID NO: 41113 - DNA, 25 bp, Saccharomyces pastorianus
aaactgggactcattggatcaaggt

SEQ ID NO: 41114 - DNA, 25 bp, Saccharomyces pastorianus
ataacagcaatccaccatcagatga

SEQ ID NO: 41115 - DNA, 25 bp, Saccharomyces pastorianus
attcgttgtttttgcgttattccag

SEQ ID NO: 41116 - DNA, 25 bp, Saccharomyces pastorianus
gcgttattccagatgtcgttagatt

SEQ ID NO: 41117 - DNA, 25 bp, Saccharomyces pastorianus
gttagatttttacatcggcggtcaa

SEQ ID NO: 41118 - DNA, 25 bp, Saccharomyces pastorianus
gtttttggcgctatttgcaacctta

SEQ ID NO: 41119 - DNA, 25 bp, Saccharomyces pastorianus
actagtcacattttgtatctcgaac

SEQ ID NO: 41120 - DNA, 25 bp, Saccharomyces pastorianus
aaagagtcacggtcgagccaactgc

SEQ ID NO: 41121 - DNA, 25 bp, Saccharomyces pastorianus
aatcgcaagctggtaaccccgaagg

SEQ ID NO: 41122 - DNA, 25 bp, Saccharomyces pastorianus
gaataccgtgataagtcccgtgagt

SEQ ID NO: 41123 - DNA, 25 bp, Saccharomyces pastorianus
acatctagtgcttcaagggtcttca

SEQ ID NO: 41124 - DNA, 25 bp, Saccharomyces pastorianus
attatcataccctcggaataccgtg

SEQ ID NO: 41125 - DNA, 25 bp, Saccharomyces pastorianus
tgccgatctctgcattgacatcaac

SEQ ID NO: 41126 - DNA, 25 bp, Saccharomyces pastorianus
gtaactgcaattgcggcgggtcaac

SEQ ID NO: 41127 - DNA, 25 bp, Saccharomyces pastorianus
gagtcagtatccaattcccaatatg

SEQ ID NO: 41128 - DNA, 25 bp, Saccharomyces pastorianus
actgacgtcttcacaatggccaatg

SEQ ID NO: 41129 - DNA, 25 bp, Saccharomyces pastorianus
tagccaagacatcgcgcattcaaat

SEQ ID NO: 41130 - DNA, 25 bp, Saccharomyces pastorianus
gatctgagtcggaatcgcgttcgga

SEQ ID NO: 41131 - DNA, 25 bp, Saccharomyces pastorianus
gtttgtttgcattgacatcacccaa

SEQ ID NO: 41132 - DNA, 25 bp, Saccharomyces pastorianus
tggacggcgccttacaagccaaaag

SEQ ID NO: 41133 - DNA, 25 bp, Saccharomyces pastorianus
aatggctcaagcatttggcagggag

SEQ ID NO: 41134 - DNA, 25 bp, Saccharomyces pastorianus
aacgtacaacaggtggacggcgcct

SEQ ID NO: 41135 - DNA, 25 bp, Saccharomyces pastorianus
ctgggagaaacttagccgtacgcct

SEQ ID NO: 41136 - DNA, 25 bp, Saccharomyces pastorianus
ggttctccagcagttaagttgccaa

SEQ ID NO: 41137 - DNA, 25 bp, Saccharomyces pastorianus
gacatcacccaacccgtttaggaag

SEQ ID NO: 41138 - DNA, 25 bp, Saccharomyces pastorianus
gcaaaagctacagaggcccaactaa

SEQ ID NO: 41139 - DNA, 25 bp, Saccharomyces pastorianus
aaaagcagcgagtggcaacttgaaa

SEQ ID NO: 41140 - DNA, 25 bp, Saccharomyces pastorianus
ccgtacgcctaacttctaactatga

SEQ ID NO: 41141 - DNA, 25 bp, Saccharomyces pastorianus
gaaacagtatcatctacagcaggaa

SEQ ID NO: 41142 - DNA, 25 bp, Saccharomyces pastorianus
gtcgtatcactctgcaataaacgca

SEQ ID NO: 41143 - DNA, 25 bp, Saccharomyces pastorianus
ctaagctactcagacccaattttac

SEQ ID NO: 41144 - DNA, 25 bp, Saccharomyces pastorianus
aaatgctctgattgctttgaagaag

SEQ ID NO: 41145 - DNA, 25 bp, Saccharomyces pastorianus
aagggcccgctacaatttggctatt

SEQ ID NO: 41146 - DNA, 25 bp, Saccharomyces pastorianus
gctttcttgagcaatggtgactaca

SEQ ID NO: 41147 - DNA, 25 bp, Saccharomyces pastorianus
gaaaattcgacaatctctggagagc

SEQ ID NO: 41148 - DNA, 25 bp, Saccharomyces pastorianus
atatttataccccactgtaggacaa

SEQ ID NO: 41149 - DNA, 25 bp, Saccharomyces pastorianus
gtctttgctgaagatgcgtgtaaca

SEQ ID NO: 41150 - DNA, 25 bp, Saccharomyces pastorianus
gaccaacgtaagattcattccgtat

SEQ ID NO: 41151 - DNA, 25 bp, Saccharomyces pastorianus
gatgtctattttggagtctttgctg

SEQ ID NO: 41152 - DNA, 25 bp, Saccharomyces pastorianus
gctatattagccaataccaagtcgt

SEQ ID NO: 41153 - DNA, 25 bp, Saccharomyces pastorianus
cacactgttatggatggtgccgggt

SEQ ID NO: 41154 - DNA, 25 bp, Saccharomyces pastorianus
tcagtaattggacacgcgagcctta

SEQ ID NO: 41155 - DNA, 25 bp, Saccharomyces pastorianus
atttgcaggcgaacacactgttatg

SEQ ID NO: 41156 - DNA, 25 bp, Saccharomyces pastorianus
gctgttgggatcaacctttgctttt

SEQ ID NO: 41157 - DNA, 25 bp, Saccharomyces pastorianus
tatgatgctgatgcaagcgccgcta

SEQ ID NO: 41158 - DNA, 25 bp, Saccharomyces pastorianus
actttggccaactcatctgatgact

SEQ ID NO: 41159 - DNA, 25 bp, Saccharomyces pastorianus
cctgttgatatggtcgttgctatgt

SEQ ID NO: 41160 - DNA, 25 bp, Saccharomyces pastorianus
gcaagcgccgctatctaattatata

SEQ ID NO: 41161 - DNA, 25 bp, Saccharomyces pastorianus
aaaattgcgactttggccaactcat

SEQ ID NO: 41162 - DNA, 25 bp, Saccharomyces pastorianus
caaacaagttcgtgatgccaaagat

SEQ ID NO: 41163 - DNA, 25 bp, Saccharomyces pastorianus
ttactcccgtggtgcttattcagcc

SEQ ID NO: 41164 - DNA, 25 bp, Saccharomyces pastorianus
gacattcatgataactccttctcca

SEQ ID NO: 41165 - DNA, 25 bp, Saccharomyces pastorianus
accgcgacgaaatcctcatatcaga

SEQ ID NO: 41166 - DNA, 25 bp, Saccharomyces pastorianus
gaaaaccagatccaagtaggcatga

SEQ ID NO: 41167 - DNA, 25 bp, Saccharomyces pastorianus
attgactcccctatcactgatgtat

SEQ ID NO: 41168 - DNA, 25 bp, Saccharomyces pastorianus
ataacaacatgggtctgcatcgcga

SEQ ID NO: 41169 - DNA, 25 bp, Saccharomyces pastorianus
tatcctcctgcatcatccgaagaat

SEQ ID NO: 41170 - DNA, 25 bp, Saccharomyces pastorianus
gtggtcgagatgttatactccgaaa

SEQ ID NO: 41171 - DNA, 25 bp, Saccharomyces pastorianus
aagacgtggatttgcaccgcgacga

SEQ ID NO: 41172 - DNA, 25 bp, Saccharomyces pastorianus
taatcaggtacaacgcgtcatatcc

SEQ ID NO: 41173 - DNA, 25 bp, Saccharomyces pastorianus
ataactccttctccagtggtcgaga

SEQ ID NO: 41174 - DNA, 25 bp, Saccharomyces pastorianus
gcatcgcgacgaatttaagctgatt

SEQ ID NO: 41175 - DNA, 25 bp, Saccharomyces pastorianus
gcaaggctcaagtaatccgatcgaa

SEQ ID NO: 41176 - DNA, 25 bp, Saccharomyces pastorianus
gacgccagtgcaagtacgattcttt

SEQ ID NO: 41177 - DNA, 25 bp, Saccharomyces pastorianus
caaagtagctctaagccgggcggga

SEQ ID NO: 41178 - DNA, 25 bp, Saccharomyces pastorianus
aaacgaggcaccagggctggccaat

SEQ ID NO: 41179 - DNA, 25 bp, Saccharomyces pastorianus
atcactgttacattgcctatcgtta

SEQ ID NO: 41180 - DNA, 25 bp, Saccharomyces pastorianus
gagccatttgcaagtgcccacatac

SEQ ID NO: 41181 - DNA, 25 bp, Saccharomyces pastorianus
cacatacacttcgaggtccgacagt

SEQ ID NO: 41182 - DNA, 25 bp, Saccharomyces pastorianus
aggtttgccaagtcctggaactcaa

SEQ ID NO: 41183 - DNA, 25 bp, Saccharomyces pastorianus
aaggccatgtatccgttagttggaa

SEQ ID NO: 41184 - DNA, 25 bp, Saccharomyces pastorianus
ctggccaatttccacaaaggcgatt

SEQ ID NO: 41185 - DNA, 25 bp, Saccharomyces pastorianus
tatcgttactagtgaaggcttccca

SEQ ID NO: 41186 - DNA, 25 bp, Saccharomyces pastorianus
atgggtgtttatttaggcgcgctct

SEQ ID NO: 41187 - DNA, 25 bp, Saccharomyces pastorianus
atactgtttgttttggtgctgccac

SEQ ID NO: 41188 - DNA, 25 bp, Saccharomyces pastorianus
gtaacaaatagtgtcaccccggtga

SEQ ID NO: 41189 - DNA, 25 bp, Saccharomyces pastorianus
gatgtcatcttaaaggcccagctga

SEQ ID NO: 41190 - DNA, 25 bp, Saccharomyces pastorianus
tacatttcagggttcatcatttatt

SEQ ID NO: 41191 - DNA, 25 bp, Saccharomyces pastorianus
gcgctcttttcgttattggtcattg

SEQ ID NO: 41192 - DNA, 25 bp, Saccharomyces pastorianus
taccataatccgagaaacccttacg

SEQ ID NO: 41193 - DNA, 25 bp, Saccharomyces pastorianus
aatgcactggctgcaagggcataca

SEQ ID NO: 41194 - DNA, 25 bp, Saccharomyces pastorianus
acgctatcatgctgtaatttccaat

SEQ ID NO: 41195 - DNA, 25 bp, Saccharomyces pastorianus
agtggttatacctacgctatcatgc

SEQ ID NO: 41196 - DNA, 25 bp, Saccharomyces pastorianus
aagtttctacgtaccataatccgag

SEQ ID NO: 41197 - DNA, 25 bp, Saccharomyces pastorianus
gaccttactgaagtgcctctaactt

SEQ ID NO: 41198 - DNA, 25 bp, Saccharomyces pastorianus
ttcctcttactctttgctacaatta

SEQ ID NO: 41199 - DNA, 25 bp, Saccharomyces pastorianus
gccactagtggtacatacgtattca

SEQ ID NO: 41200 - DNA, 25 bp, Saccharomyces pastorianus
tatcactttcgagcctaaatcctgt

SEQ ID NO: 41201 - DNA, 25 bp, Saccharomyces pastorianus
ctgcttcaattgttatcctgtagat

SEQ ID NO: 41202 - DNA, 25 bp, Saccharomyces pastorianus
gcgaactcatcaagcagaccgaaga

SEQ ID NO: 41203 - DNA, 25 bp, Saccharomyces pastorianus
ggtcccacatttagtagtaggccat

SEQ ID NO: 41204 - DNA, 25 bp, Saccharomyces pastorianus
attattatatctccccatccataga

SEQ ID NO: 41205 - DNA, 25 bp, Saccharomyces pastorianus
tcaactctgccttcaaaatccatag

SEQ ID NO: 41206 - DNA, 25 bp, Saccharomyces pastorianus
gctacaattacgcaaggtcccacat

SEQ ID NO: 41207 - DNA, 25 bp, Saccharomyces pastorianus
tgaacctgttgaccttactgaagtg

SEQ ID NO: 41208 - DNA, 25 bp, Saccharomyces pastorianus
actattttgtcactgtccaacctga

SEQ ID NO: 41209 - DNA, 25 bp, Saccharomyces pastorianus
ggtaatacttccgttttgattcatc

SEQ ID NO: 41210 - DNA, 25 bp, Saccharomyces pastorianus
tatgatctatctcaacaggtgttgg

SEQ ID NO: 41211 - DNA, 25 bp, Saccharomyces pastorianus
aaaaactgcctctattcagttccgc

SEQ ID NO: 41212 - DNA, 25 bp, Saccharomyces pastorianus
gataccatgataaggccgtcagaag

SEQ ID NO: 41213 - DNA, 25 bp, Saccharomyces pastorianus
gattcatcaagtctccaagcatttg

SEQ ID NO: 41214 - DNA, 25 bp, Saccharomyces pastorianus
acttaattgcgtcatccttcgataa

SEQ ID NO: 41215 - DNA, 25 bp, Saccharomyces pastorianus
ttccgccgctgacgatggtactata

SEQ ID NO: 41216 - DNA, 25 bp, Saccharomyces pastorianus
cagtcttggtgttcttgatgctatc

SEQ ID NO: 41217 - DNA, 25 bp, Saccharomyces pastorianus
atttgactcaatcgcccttcagaaa

SEQ ID NO: 41218 - DNA, 25 bp, Saccharomyces pastorianus
aagcttggttgttctctgctggtgc

SEQ ID NO: 41219 - DNA, 25 bp, Saccharomyces pastorianus
tgaagtacggatgcgcttcgcttaa

SEQ ID NO: 41220 - DNA, 25 bp, Saccharomyces pastorianus
gaagattttgccctttggaatgaag

SEQ ID NO: 41221 - DNA, 25 bp, Saccharomyces pastorianus
gggcggcatgtcgagagatctttct

SEQ ID NO: 41222 - DNA, 25 bp, Saccharomyces pastorianus
tgctgtgccgtttggagttggtcaa

SEQ ID NO: 41223 - DNA, 25 bp, Saccharomyces pastorianus
gaacgaaatagtacccgagatgata

SEQ ID NO: 41224 - DNA, 25 bp, Saccharomyces pastorianus
cattgttaccttccatgacgaacga

SEQ ID NO: 41225 - DNA, 25 bp, Saccharomyces pastorianus
agagatcttcggcactttcaatgaa

SEQ ID NO: 41226 - DNA, 25 bp, Saccharomyces pastorianus
gatgtcaggatctcgcatattcata

SEQ ID NO: 41227 - DNA, 25 bp, Saccharomyces pastorianus
ataacgtctacgctgaacgaagatt

SEQ ID NO: 41228 - DNA, 25 bp, Saccharomyces pastorianus
aggatttaactccatccttcatgat

SEQ ID NO: 41229 - DNA, 25 bp, Saccharomyces pastorianus
gttggtcaagatattccgtatcatg

SEQ ID NO: 41230 - DNA, 25 bp, Saccharomyces pastorianus
gagacttctcaactggacttgatga

SEQ ID NO: 41231 - DNA, 25 bp, Saccharomyces pastorianus
tctacaaagcctctcttcaacttga

SEQ ID NO: 41232 - DNA, 25 bp, Saccharomyces pastorianus
taacgacgtccgtactgaagtcctt

SEQ ID NO: 41233 - DNA, 25 bp, Saccharomyces pastorianus
gaagtccttagccaacaccctgaga

SEQ ID NO: 41234 - DNA, 25 bp, Saccharomyces pastorianus
tgcgccctgccgaactaagcaagat

SEQ ID NO: 41235 - DNA, 25 bp, Saccharomyces pastorianus
aggtccttccaccaatctacaaagc

SEQ ID NO: 41236 - DNA, 25 bp, Saccharomyces pastorianus
caaagaaacctgctggtcccttcat

SEQ ID NO: 41237 - DNA, 25 bp, Saccharomyces pastorianus
ggtcccttcatcaaatacgctaacg

SEQ ID NO: 41238 - DNA, 25 bp, Saccharomyces pastorianus
gcctacctctgcttatttcttgtat

SEQ ID NO: 41239 - DNA, 25 bp, Saccharomyces pastorianus
ttacagtctactgaccaggtccttc

SEQ ID NO: 41240 - DNA, 25 bp, Saccharomyces pastorianus
ttgaccagcaccttgttgaaagcct

SEQ ID NO: 41241 - DNA, 25 bp, Saccharomyces pastorianus
gacaatgatagttattcgccttcta

SEQ ID NO: 41242 - DNA, 25 bp, Saccharomyces pastorianus
gctaccgttcaggatgcacaattat

SEQ ID NO: 41243 - DNA, 25 bp, Saccharomyces pastorianus
gttcaccatgtgagaccaaagcatc

SEQ ID NO: 41244 - DNA, 25 bp, Saccharomyces pastorianus
aggctattagcccatgagaacaatg

SEQ ID NO: 41245 - DNA, 25 bp, Saccharomyces pastorianus
ttaccatccgatttattcaaacctt

SEQ ID NO: 41246 - DNA, 25 bp, Saccharomyces pastorianus
taagagccaaaataggacgcatcct

SEQ ID NO: 41247 - DNA, 25 bp, Saccharomyces pastorianus
agcaccaaacaagggcgaatctcgt

SEQ ID NO: 41248 - DNA, 25 bp, Saccharomyces pastorianus
attcaaaccttttgctaccgttcag

SEQ ID NO: 41249 - DNA, 25 bp, Saccharomyces pastorianus
cagcgtatcctggtaaattaaactt

SEQ ID NO: 41250 - DNA, 25 bp, Saccharomyces pastorianus
aattggcaacattcagcgtatcctg

SEQ ID NO: 41251 - DNA, 25 bp, Saccharomyces pastorianus
ggacgcatccttcatacatcacaaa

SEQ ID NO: 41252 - DNA, 25 bp, Saccharomyces pastorianus
tatcttatcatgtgtccgtgccaat

SEQ ID NO: 41253 - DNA, 25 bp, Saccharomyces pastorianus
taaacgtcggactaactcgtgccaa

SEQ ID NO: 41254 - DNA, 25 bp, Saccharomyces pastorianus
atgtactgtgcaactagttcgccct

SEQ ID NO: 41255 - DNA, 25 bp, Saccharomyces pastorianus
aattccaagatttcgacactcagag

SEQ ID NO: 41256 - DNA, 25 bp, Saccharomyces pastorianus
gtaatttcagtagtgcatttgtcaa

SEQ ID NO: 41257 - DNA, 25 bp, Saccharomyces pastorianus
gcgatcctcgccgtttaaacgtcgg

SEQ ID NO: 41258 - DNA, 25 bp, Saccharomyces pastorianus
gaacgatggaaatctctaccaggag

SEQ ID NO: 41259 - DNA, 25 bp, Saccharomyces pastorianus
acaacaggctatcggtttcttacgc

SEQ ID NO: 41260 - DNA, 25 bp, Saccharomyces pastorianus
aattctgagctttcatcttacatta

SEQ ID NO: 41261 - DNA, 25 bp, Saccharomyces pastorianus
ggaaacccaagatccctagcaagga

SEQ ID NO: 41262 - DNA, 25 bp, Saccharomyces pastorianus
ctagttcgccctcaaccaagaaaga

SEQ ID NO: 41263 - DNA, 25 bp, Saccharomyces pastorianus
ccagatcatttttggcggcatggtt

SEQ ID NO: 41264 - DNA, 25 bp, Saccharomyces pastorianus
gcatttttgatttcctatctcccaa

SEQ ID NO: 41265 - DNA, 25 bp, Saccharomyces pastorianus
gctatgcatgtttattggtggccac

SEQ ID NO: 41266 - DNA, 25 bp, Saccharomyces pastorianus
agcagtactactctctcattaatga

SEQ ID NO: 41267 - DNA, 25 bp, Saccharomyces pastorianus
gtgcgtccttgactttagtgtccta

SEQ ID NO: 41268 - DNA, 25 bp, Saccharomyces pastorianus
gacgacggataccatttcactaaaa

SEQ ID NO: 41269 - DNA, 25 bp, Saccharomyces pastorianus
aatgaacctagctcactgtgcatac

SEQ ID NO: 41270 - DNA, 25 bp, Saccharomyces pastorianus
attggtaacgtccttggtgcgtcct

SEQ ID NO: 41271 - DNA, 25 bp, Saccharomyces pastorianus
gatctacgtgtttgcgtcagtgtta

SEQ ID NO: 41272 - DNA, 25 bp, Saccharomyces pastorianus
gaaagcccaatttcccaacggatgt

SEQ ID NO: 41273 - DNA, 25 bp, Saccharomyces pastorianus
gttatttgttgctgggacacctgta

SEQ ID NO: 41274 - DNA, 25 bp, Saccharomyces pastorianus
ttatgcccaatacctgccaggtgat

SEQ ID NO: 41275 - DNA, 25 bp, Saccharomyces pastorianus
tagtggcgcctctgatgatttcaaa

SEQ ID NO: 41276 - DNA, 25 bp, Saccharomyces pastorianus
gaagaattacacttcccctcagtaa

SEQ ID NO: 41277 - DNA, 25 bp, Saccharomyces pastorianus
gaaatatgcagaccctctcttgaaa

SEQ ID NO: 41278 - DNA, 25 bp, Saccharomyces pastorianus
tcagggtgctctgggttatgcccaa

SEQ ID NO: 41279 - DNA, 25 bp, Saccharomyces pastorianus
agaaacgatgcctttgacaaatact

SEQ ID NO: 41280 - DNA, 25 bp, Saccharomyces pastorianus
gccaggtgatattttcttgttgacg

SEQ ID NO: 41281 - DNA, 25 bp, Saccharomyces pastorianus
ggtgatattattgactccgaagtgt

SEQ ID NO: 41282 - DNA, 25 bp, Saccharomyces pastorianus
atggccactgcaatggtcacggagt

SEQ ID NO: 41283 - DNA, 25 bp, Saccharomyces pastorianus
aagattgcccaacttctgctgaaga

SEQ ID NO: 41284 - DNA, 25 bp, Saccharomyces pastorianus
attattccacgtggtcagggtgctc

SEQ ID NO: 41285 - DNA, 25 bp, Saccharomyces pastorianus
gtttggtgccaaaattattcgcgga

SEQ ID NO: 41286 - DNA, 25 bp, Saccharomyces pastorianus
accgatgattactatgcttccgaat

SEQ ID NO: 41287 - DNA, 25 bp, Saccharomyces pastorianus
tggcgacaccagcattacatatgaa

SEQ ID NO: 41288 - DNA, 25 bp, Saccharomyces pastorianus
gcttgttggcgatcccgttgaaaaa

SEQ ID NO: 41289 - DNA, 25 bp, Saccharomyces pastorianus
aatcgactactattctagggtggaa

SEQ ID NO: 41290 - DNA, 25 bp, Saccharomyces pastorianus
gttatatcagcattctgcagcctgt

SEQ ID NO: 41291 - DNA, 25 bp, Saccharomyces pastorianus
agaacgttaacgctggcgacaccag

SEQ ID NO: 41292 - DNA, 25 bp, Saccharomyces pastorianus
agacgtactgaaggctatcggtgaa

SEQ ID NO: 41293 - DNA, 25 bp, Saccharomyces pastorianus
agagactatattgtatccggtttta

SEQ ID NO: 41294 - DNA, 25 bp, Saccharomyces pastorianus
ttttgaacacagacctcatggacat

SEQ ID NO: 41295 - DNA, 25 bp, Saccharomyces pastorianus
aataggcccaagaccggactatcgg

SEQ ID NO: 41296 - DNA, 25 bp, Saccharomyces pastorianus
aaaccaagcattcgaatcactcata

SEQ ID NO: 41297 - DNA, 25 bp, Saccharomyces pastorianus
taggaacgatcttattgccctttta

SEQ ID NO: 41298 - DNA, 25 bp, Saccharomyces pastorianus
gtttctcttcttttggatactatgg

SEQ ID NO: 41299 - DNA, 25 bp, Saccharomyces pastorianus
gtggcgacagtcatgttatatcaaa

SEQ ID NO: 41300 - DNA, 25 bp, Saccharomyces pastorianus
taatgagtgggttggccttatttaa

SEQ ID NO: 41301 - DNA, 25 bp, Saccharomyces pastorianus
ggcgatagatcacatttgtcagact

SEQ ID NO: 41302 - DNA, 25 bp, Saccharomyces pastorianus
gactgctggattggagaattcttcg

SEQ ID NO: 41303 - DNA, 25 bp, Saccharomyces pastorianus
actgtggataagacgcctcaaggtt

SEQ ID NO: 41304 - DNA, 25 bp, Saccharomyces pastorianus
gaaataactccggaattgcgtaatt

SEQ ID NO: 41305 - DNA, 25 bp, Saccharomyces pastorianus
gtttcaatattacaggcgctagcta

SEQ ID NO: 41306 - DNA, 25 bp, Saccharomyces pastorianus
gaggctaagatacccgttgccgtga

SEQ ID NO: 41307 - DNA, 25 bp, Saccharomyces pastorianus
taactctaaaccaagctcggtgcct

SEQ ID NO: 41308 - DNA, 25 bp, Saccharomyces pastorianus
cagaatcttctttgccttataactc

SEQ ID NO: 41309 - DNA, 25 bp, Saccharomyces pastorianus
acaggccgtagctactctaatgtac

SEQ ID NO: 41310 - DNA, 25 bp, Saccharomyces pastorianus
ggttcaatagctccgattcgctaca

SEQ ID NO: 41311 - DNA, 25 bp, Saccharomyces pastorianus
gtcatctgttttctccaatggacac

SEQ ID NO: 41312 - DNA, 25 bp, Saccharomyces pastorianus
tcttcgacagccacttacaacattg

SEQ ID NO: 41313 - DNA, 25 bp, Saccharomyces pastorianus
tagcgcaatccctaacgtggttgat

SEQ ID NO: 41314 - DNA, 25 bp, Saccharomyces pastorianus
aaagcgtgtgttgctcaaactacaa

SEQ ID NO: 41315 - DNA, 25 bp, Saccharomyces pastorianus
caaatctaacttaccgggccaatct

SEQ ID NO: 41316 - DNA, 25 bp, Saccharomyces pastorianus
gggaaagtctgtccaacaggccgta

SEQ ID NO: 41317 - DNA, 25 bp, Saccharomyces pastorianus
ataattcggtggctagcgcaatccc

SEQ ID NO: 41318 - DNA, 25 bp, Saccharomyces pastorianus
taccagtgagaacccgatcgacagt

SEQ ID NO: 41319 - DNA, 25 bp, Saccharomyces pastorianus
gtgaaattcgcaatcaccctttctt

SEQ ID NO: 41320 - DNA, 25 bp, Saccharomyces pastorianus
gattcgaccccgtagctaaagatct

SEQ ID NO: 41321 - DNA, 25 bp, Saccharomyces pastorianus
aatagacacggcaaatttcgaccaa

SEQ ID NO: 41322 - DNA, 25 bp, Saccharomyces pastorianus
cggtctcttgagcagggatcctaac

SEQ ID NO: 41323 - DNA, 25 bp, Saccharomyces pastorianus
attaccagggtcatatcgcattgtg

SEQ ID NO: 41324 - DNA, 25 bp, Saccharomyces pastorianus
ggacgaatacttgagcgctagcatt

SEQ ID NO: 41325 - DNA, 25 bp, Saccharomyces pastorianus
cattacttttccctgacggattcga

SEQ ID NO: 41326 - DNA, 25 bp, Saccharomyces pastorianus
gacgggattaccaccatactatgac

SEQ ID NO: 41327 - DNA, 25 bp, Saccharomyces pastorianus
gtgtgacttcggactttgtaaactg

SEQ ID NO: 41328 - DNA, 25 bp, Saccharomyces pastorianus
gattaggcgtcaacggcaccagtga

SEQ ID NO: 41329 - DNA, 25 bp, Saccharomyces pastorianus
tctctgtcagccctagtagtgctaa

SEQ ID NO: 41330 - DNA, 25 bp, Saccharomyces pastorianus
aaagcatgacactccattagttcaa

SEQ ID NO: 41331 - DNA, 25 bp, Saccharomyces pastorianus
tggaatgactttactctctctatga

SEQ ID NO: 41332 - DNA, 25 bp, Saccharomyces pastorianus
tatcttgacacgcttgaggtctggt

SEQ ID NO: 41333 - DNA, 25 bp, Saccharomyces pastorianus
gagaaattacttcgttttgccttgg

SEQ ID NO: 41334 - DNA, 25 bp, Saccharomyces pastorianus
aaattttgcacctgttctacctatt

SEQ ID NO: 41335 - DNA, 25 bp, Saccharomyces pastorianus
agttctattggctcagatgccgcaa

SEQ ID NO: 41336 - DNA, 25 bp, Saccharomyces pastorianus
ggtgataccgtagttcatgtagcta

SEQ ID NO: 41337 - DNA, 25 bp, Saccharomyces pastorianus
attactgacgctccgtttggtggaa

SEQ ID NO: 41338 - DNA, 25 bp, Saccharomyces pastorianus
gatgccgcaagcttacatgttgtac

SEQ ID NO: 41339 - DNA, 25 bp, Saccharomyces pastorianus
catgttgtaccacctactgtagttt

SEQ ID NO: 41340 - DNA, 25 bp, Saccharomyces pastorianus
cgtgaatatttcgaaggcttgcctg

SEQ ID NO: 41341 - DNA, 25 bp, Saccharomyces pastorianus
acaaccatcagtactttcccttgaa

SEQ ID NO: 41342 - DNA, 25 bp, Saccharomyces pastorianus
ttgaaagaaggtacggttccacttg

SEQ ID NO: 41343 - DNA, 25 bp, Saccharomyces pastorianus
gttccacttggagacgatcagccaa

SEQ ID NO: 41344 - DNA, 25 bp, Saccharomyces pastorianus
tcaaaatgtcacagatgcagctcgt

SEQ ID NO: 41345 - DNA, 25 bp, Saccharomyces pastorianus
aagggtcaccattgtcgattatcga

SEQ ID NO: 41346 - DNA, 25 bp, Saccharomyces pastorianus
aaggcttgcctggacaaccatcagt

SEQ ID NO: 41347 - DNA, 25 bp, Saccharomyces pastorianus
gcgttgctctcaataacccgagtat

SEQ ID NO: 41348 - DNA, 25 bp, Saccharomyces pastorianus
gaaacgtcggaacgtcttatagact

SEQ ID NO: 41349 - DNA, 25 bp, Saccharomyces pastorianus
atggtttgtcattgcctggtaataa

SEQ ID NO: 41350 - DNA, 25 bp, Saccharomyces pastorianus
gaagctagactatcgctacaacaac

SEQ ID NO: 41351 - DNA, 25 bp, Saccharomyces pastorianus
taatggatggcgctcataacggctc

SEQ ID NO: 41352 - DNA, 25 bp, Saccharomyces pastorianus
tacggagaccaagctttgacctttg

SEQ ID NO: 41353 - DNA, 25 bp, Saccharomyces pastorianus
gccagcctttgttgcgaccaataga

SEQ ID NO: 41354 - DNA, 25 bp, Saccharomyces pastorianus
gactggccaggtaggttacatcgta

SEQ ID NO: 41355 - DNA, 25 bp, Saccharomyces pastorianus
tgacctttgtcatggctgtaaccgc

SEQ ID NO: 41356 - DNA, 25 bp, Saccharomyces pastorianus
gagaataccagatcttcaaccttag

SEQ ID NO: 41357 - DNA, 25 bp, Saccharomyces pastorianus
taccttctctggctcttacaacaga

SEQ ID NO: 41358 - DNA, 25 bp, Saccharomyces pastorianus
aaaacttagagccactgtgccagcc

SEQ ID NO: 41359 - DNA, 25 bp, Saccharomyces pastorianus
tctgagctgcccctaaacggagaat

SEQ ID NO: 41360 - DNA, 25 bp, Saccharomyces pastorianus
gatcgacttatccttacacagttta

SEQ ID NO: 41361 - DNA, 25 bp, Saccharomyces pastorianus
atgccaccgaacctgacgagattaa

SEQ ID NO: 41362 - DNA, 25 bp, Saccharomyces pastorianus
atctacctacggaatgggcgttttg

SEQ ID NO: 41363 - DNA, 25 bp, Saccharomyces pastorianus
gggtcactattctatcttcaggcag

SEQ ID NO: 41364 - DNA, 25 bp, Saccharomyces pastorianus
tcaaggaccaactcgatccgtcggt

SEQ ID NO: 41365 - DNA, 25 bp, Saccharomyces pastorianus
aatcaattgctttatctacctacgg

SEQ ID NO: 41366 - DNA, 25 bp, Saccharomyces pastorianus
cacagcttactgtttgtcatcaaag

SEQ ID NO: 41367 - DNA, 25 bp, Saccharomyces pastorianus
ggaacatacatcaaagccttgcgat

SEQ ID NO: 41368 - DNA, 25 bp, Saccharomyces pastorianus
gaagaatttttcaccgctagagatt

SEQ ID NO: 41369 - DNA, 25 bp, Saccharomyces pastorianus
atatgccgccaggacaaatattact

SEQ ID NO: 41370 - DNA, 25 bp, Saccharomyces pastorianus
gattagattccacgtcaaggaccaa

SEQ ID NO: 41371 - DNA, 25 bp, Saccharomyces pastorianus
gttacgatagcgtcattagctttgc

SEQ ID NO: 41372 - DNA, 25 bp, Saccharomyces pastorianus
gtcggtcgcgcaatcaattgcttta

SEQ ID NO: 41373 - DNA, 25 bp, Saccharomyces pastorianus
gaaattacgtgcagccctgaggcga

SEQ ID NO: 41374 - DNA, 25 bp, Saccharomyces pastorianus
agttgggctggttcaggattctcat

SEQ ID NO: 41375 - DNA, 25 bp, Saccharomyces pastorianus
gaagtgccaattcctattagaacat

SEQ ID NO: 41376 - DNA, 25 bp, Saccharomyces pastorianus
tcagtcacaaccacgccacaagaaa

SEQ ID NO: 41377 - DNA, 25 bp, Saccharomyces pastorianus
aaacgattttacaactagcagcagg

SEQ ID NO: 41378 - DNA, 25 bp, Saccharomyces pastorianus
aagactcttcgattgcctaagatga

SEQ ID NO: 41379 - DNA, 25 bp, Saccharomyces pastorianus
gctaaggtcctcaatcaacatgcta

SEQ ID NO: 41380 - DNA, 25 bp, Saccharomyces pastorianus
aactatcgtacacaatcggccaagt

SEQ ID NO: 41381 - DNA, 25 bp, Saccharomyces pastorianus
gctcgataaagaaaacgccctcagt

SEQ ID NO: 41382 - DNA, 25 bp, Saccharomyces pastorianus
tgctatatcagacacatcgcaaata

SEQ ID NO: 41383 - DNA, 25 bp, Saccharomyces pastorianus
aaacactttaggaatattggccaca

SEQ ID NO: 41384 - DNA, 25 bp, Saccharomyces pastorianus
aaggtcaaaggctctggtaacaaat

SEQ ID NO: 41385 - DNA, 25 bp, Saccharomyces pastorianus
caaggtggtgtcgttgcggtcccaa

SEQ ID NO: 41386 - DNA, 25 bp, Saccharomyces pastorianus
gccttcgatttggatcatacgatca

SEQ ID NO: 41387 - DNA, 25 bp, Saccharomyces pastorianus
aaccctggactatctttttgacatt

SEQ ID NO: 41388 - DNA, 25 bp, Saccharomyces pastorianus
ggagtttcagaatcaccgccaatta

SEQ ID NO: 41389 - DNA, 25 bp, Saccharomyces pastorianus
tgcggtcccaagaacctccaaaagt

SEQ ID NO: 41390 - DNA, 25 bp, Saccharomyces pastorianus
gactgtggttatatgcggcacccaa

SEQ ID NO: 41391 - DNA, 25 bp, Saccharomyces pastorianus
tatactactgtggtgatgccgccgg

SEQ ID NO: 41392 - DNA, 25 bp, Saccharomyces pastorianus
aatcgccaaattcaaagttcagcag

SEQ ID NO: 41393 - DNA, 25 bp, Saccharomyces pastorianus
agaatcaccgccaattactactagg

SEQ ID NO: 41394 - DNA, 25 bp, Saccharomyces pastorianus
agtcgtattctcaaaccaaggtggt

SEQ ID NO: 41395 - DNA, 25 bp, Saccharomyces pastorianus
aaatgccatcttctagaggcgccgc

SEQ ID NO: 41396 - DNA, 25 bp, Saccharomyces pastorianus
aagaatcctcatcctaaggcgagtg

SEQ ID NO: 41397 - DNA, 25 bp, Saccharomyces pastorianus
ctgcttctactttttcatttggtgg

SEQ ID NO: 41398 - DNA, 25 bp, Saccharomyces pastorianus
gaatctgcttgttctttttattatc

SEQ ID NO: 41399 - DNA, 25 bp, Saccharomyces pastorianus
aatgcggctaattcacagctgaaga

SEQ ID NO: 41400 - DNA, 25 bp, Saccharomyces pastorianus
gctggcccaccggaagacatatttg

SEQ ID NO: 41401 - DNA, 25 bp, Saccharomyces pastorianus
ttgttcaacggaggtggcagtccct

SEQ ID NO: 41402 - DNA, 25 bp, Saccharomyces pastorianus
ttcggtggttctccatttgggcctt

SEQ ID NO: 41403 - DNA, 25 bp, Saccharomyces pastorianus
acaacctcgctcaagacaacgtcaa

SEQ ID NO: 41404 - DNA, 25 bp, Saccharomyces pastorianus
aggcgccgcttcaggatttcaggga

SEQ ID NO: 41405 - DNA, 25 bp, Saccharomyces pastorianus
aaacgctggtggttctccaatgggt

SEQ ID NO: 41406 - DNA, 25 bp, Saccharomyces pastorianus
ttagtcaaagacacgctgggcaaac

SEQ ID NO: 41407 - DNA, 25 bp, Saccharomyces pastorianus
gctgggcaaactgatctctaacaat

SEQ ID NO: 41408 - DNA, 25 bp, Saccharomyces pastorianus
gggcccaatctacgtggtcatttaa

SEQ ID NO: 41409 - DNA, 25 bp, Saccharomyces pastorianus
tcaaacgtacttatggcaaatgcct

SEQ ID NO: 41410 - DNA, 25 bp, Saccharomyces pastorianus
aattgtatctcatcatttacgcgat

SEQ ID NO: 41411 - DNA, 25 bp, Saccharomyces pastorianus
gagccacaaggaaaattgccatcga

SEQ ID NO: 41412 - DNA, 25 bp, Saccharomyces pastorianus
taattccaagaagccctacgggatg

SEQ ID NO: 41413 - DNA, 25 bp, Saccharomyces pastorianus
gctctggtggcaatcagcactggat

SEQ ID NO: 41414 - DNA, 25 bp, Saccharomyces pastorianus
aatctcccatgatgatccacgttat

SEQ ID NO: 41415 - DNA, 25 bp, Saccharomyces pastorianus
attggtggtttgattgtctcaggtt

SEQ ID NO: 41416 - DNA, 25 bp, Saccharomyces pastorianus
aagaactgacattattatcctcggg

SEQ ID NO: 41417 - DNA, 25 bp, Saccharomyces pastorianus
gcctggtatcccacaattgttttca

SEQ ID NO: 41418 - DNA, 25 bp, Saccharomyces pastorianus
gaagtttcaatctgccttgtgagtt

SEQ ID NO: 41419 - DNA, 25 bp, Saccharomyces pastorianus
gggcccaacgttcgaaactattatg

SEQ ID NO: 41420 - DNA, 25 bp, Saccharomyces pastorianus
agtttacatactgcctggtatccca

SEQ ID NO: 41421 - DNA, 25 bp, Saccharomyces pastorianus
ttttggcatgggtttcaacacagtt

SEQ ID NO: 41422 - DNA, 25 bp, Saccharomyces pastorianus
gaatgaggcgaaagtccgaccccga

SEQ ID NO: 41423 - DNA, 25 bp, Saccharomyces pastorianus
gtccgaccccgaagcaagattagat

SEQ ID NO: 41424 - DNA, 25 bp, Saccharomyces pastorianus
tcaacggaagtctcggatgcaatca

SEQ ID NO: 41425 - DNA, 25 bp, Saccharomyces pastorianus
gtatgtgatgatttatgggtcccca

SEQ ID NO: 41426 - DNA, 25 bp, Saccharomyces pastorianus
aaatcggttcatacccgcattttgg

SEQ ID NO: 41427 - DNA, 25 bp, Saccharomyces pastorianus
ggaattggccctactcatgatgata

SEQ ID NO: 41428 - DNA, 25 bp, Saccharomyces pastorianus
acagaataccattgccctttacact

SEQ ID NO: 41429 - DNA, 25 bp, Saccharomyces pastorianus
tgagtttcaacagagccgagcatct

SEQ ID NO: 41430 - DNA, 25 bp, Saccharomyces pastorianus
attgacctgatgtccctacgtagac

SEQ ID NO: 41431 - DNA, 25 bp, Saccharomyces pastorianus
gagcatctggctaggcacatcagaa

SEQ ID NO: 41432 - DNA, 25 bp, Saccharomyces pastorianus
tgggataccccgattgcaacatgag

SEQ ID NO: 41433 - DNA, 25 bp, Saccharomyces pastorianus
acatctccgtcgagggtgcgaggtt

SEQ ID NO: 41434 - DNA, 25 bp, Saccharomyces pastorianus
gttacatccaaccactgttcctgaa

SEQ ID NO: 41435 - DNA, 25 bp, Saccharomyces pastorianus
gtagactgcagcaatcggcaatcaa

SEQ ID NO: 41436 - DNA, 25 bp, Saccharomyces pastorianus
atcttctgttcattcggacattgac

SEQ ID NO: 41437 - DNA, 25 bp, Saccharomyces pastorianus
gaaccgcaatatcgttgagctaccc

SEQ ID NO: 41438 - DNA, 25 bp, Saccharomyces pastorianus
gaatgaacaaaactccacggcaaga

SEQ ID NO: 41439 - DNA, 25 bp, Saccharomyces pastorianus
ttcaagatgcgttatccaagggatc

SEQ ID NO: 41440 - DNA, 25 bp, Saccharomyces pastorianus
ggtcaacagtttgcgctatatgaat

SEQ ID NO: 41441 - DNA, 25 bp, Saccharomyces pastorianus
ggatgagaaaaccactctattacaa

SEQ ID NO: 41442 - DNA, 25 bp, Saccharomyces pastorianus
gattctattcaatctcaaacgtctg

SEQ ID NO: 41443 - DNA, 25 bp, Saccharomyces pastorianus
ggtgttgacgatcctttatcactaa

SEQ ID NO: 41444 - DNA, 25 bp, Saccharomyces pastorianus
gaaaccgtaagagagctcctaaagc

SEQ ID NO: 41445 - DNA, 25 bp, Saccharomyces pastorianus
gaagcgaccagaccactttcaaaga

SEQ ID NO: 41446 - DNA, 25 bp, Saccharomyces pastorianus
tatccaagggatctacgccgaaaga

SEQ ID NO: 41447 - DNA, 25 bp, Saccharomyces pastorianus
aggaagttctttgccattgctgaga

SEQ ID NO: 41448 - DNA, 25 bp, Saccharomyces pastorianus
agagactacttggttcacgatgagg

SEQ ID NO: 41449 - DNA, 25 bp, Saccharomyces pastorianus
gtctgagctattatcggatgatctg

SEQ ID NO: 41450 - DNA, 25 bp, Saccharomyces pastorianus
gaacaacgagttgtgcgagcgcctc

SEQ ID NO: 41451 - DNA, 25 bp, Saccharomyces pastorianus
acgcatgcagcaggtacctctggta

SEQ ID NO: 41452 - DNA, 25 bp, Saccharomyces pastorianus
gagtccatcgaacaactacagcgca

SEQ ID NO: 41453 - DNA, 25 bp, Saccharomyces pastorianus
gaatttaagagcacgccgcactcag

SEQ ID NO: 41454 - DNA, 25 bp, Saccharomyces pastorianus
ataatttgctggtggcgaacgccat

SEQ ID NO: 41455 - DNA, 25 bp, Saccharomyces pastorianus
gactactacgtctaccagcaggaac

SEQ ID NO: 41456 - DNA, 25 bp, Saccharomyces pastorianus
tgacgatgcctccaggtgagaccgt

SEQ ID NO: 41457 - DNA, 25 bp, Saccharomyces pastorianus
ggcgctgcccataccagaatttaag

SEQ ID NO: 41458 - DNA, 25 bp, Saccharomyces pastorianus
aggttagatcgtgtgcagcccctag

SEQ ID NO: 41459 - DNA, 25 bp, Saccharomyces pastorianus
tacagccgatttcctgaaccaggtg

SEQ ID NO: 41460 - DNA, 25 bp, Saccharomyces pastorianus
agaggagcacatacagcccgtgtca

SEQ ID NO: 41461 - DNA, 25 bp, Saccharomyces pastorianus
aaggcttgtaccaatcatgctcgga

SEQ ID NO: 41462 - DNA, 25 bp, Saccharomyces pastorianus
aaacgaattccctccagcagatgtt

SEQ ID NO: 41463 - DNA, 25 bp, Saccharomyces pastorianus
ccctagagttcttcatggctttcag

SEQ ID NO: 41464 - DNA, 25 bp, Saccharomyces pastorianus
gcgaagtgattgctgatgcgcccac

SEQ ID NO: 41465 - DNA, 25 bp, Saccharomyces pastorianus
taatgcattctggaggccacttcgt

SEQ ID NO: 41466 - DNA, 25 bp, Saccharomyces pastorianus
gactatctgcatgactacgtgttgg

SEQ ID NO: 41467 - DNA, 25 bp, Saccharomyces pastorianus
gaaaggacccttcgcaggcattgtg

SEQ ID NO: 41468 - DNA, 25 bp, Saccharomyces pastorianus
tcggaggactctcggactttactaa

SEQ ID NO: 41469 - DNA, 25 bp, Saccharomyces pastorianus
atggctttcagtggcttcagattcc

SEQ ID NO: 41470 - DNA, 25 bp, Saccharomyces pastorianus
gtgcctaacacgagaggtttcctga

SEQ ID NO: 41471 - DNA, 25 bp, Saccharomyces pastorianus
gagcagtacgacaggcatccaatat

SEQ ID NO: 41472 - DNA, 25 bp, Saccharomyces pastorianus
gaacgatcttttggactttgccttg

SEQ ID NO: 41473 - DNA, 25 bp, Saccharomyces pastorianus
aaatgtggacacacctaccatcaac

SEQ ID NO: 41474 - DNA, 25 bp, Saccharomyces pastorianus
tcaactcagatcaacctatccacgt

SEQ ID NO: 41475 - DNA, 25 bp, Saccharomyces pastorianus
cacctaccatcaacattgtctcaat

SEQ ID NO: 41476 - DNA, 25 bp, Saccharomyces pastorianus
agtgtggctcacttcgggctgatac

SEQ ID NO: 41477 - DNA, 25 bp, Saccharomyces pastorianus
gaaagctgttcaaatgtcctaaatg

SEQ ID NO: 41478 - DNA, 25 bp, Saccharomyces pastorianus
gtactttctcgtacaagtgtggctc

SEQ ID NO: 41479 - DNA, 25 bp, Saccharomyces pastorianus
ttagatattcctgttgtctttttca

SEQ ID NO: 41480 - DNA, 25 bp, Saccharomyces pastorianus
tggaaacgtccaacaaactttatga

SEQ ID NO: 41481 - DNA, 25 bp, Saccharomyces pastorianus
aagaccgcttcaaagttgtaacaga

SEQ ID NO: 41482 - DNA, 25 bp, Saccharomyces pastorianus
ggactttgccttgaacagtgaagaa

SEQ ID NO: 41483 - DNA, 25 bp, Saccharomyces pastorianus
tgtggaggacatacggctggccatt

SEQ ID NO: 41484 - DNA, 25 bp, Saccharomyces pastorianus
gttaggctgcctccagagaagtact

SEQ ID NO: 41485 - DNA, 25 bp, Saccharomyces pastorianus
ataggtacacacagggcgtgctcaa

SEQ ID NO: 41486 - DNA, 25 bp, Saccharomyces pastorianus
tgccaggacccagtaccagttcaag

SEQ ID NO: 41487 - DNA, 25 bp, Saccharomyces pastorianus
caaggagctcatgctgcagttggca

SEQ ID NO: 41488 - DNA, 25 bp, Saccharomyces pastorianus
ggtgccgctgcaactgatggacttt

SEQ ID NO: 41489 - DNA, 25 bp, Saccharomyces pastorianus
ggaagacacccctagagacgtgcgt

SEQ ID NO: 41490 - DNA, 25 bp, Saccharomyces pastorianus
ggtctacaatgattacgccggcagc

SEQ ID NO: 41491 - DNA, 25 bp, Saccharomyces pastorianus
aagaaagccctaccgcaggtcatgg

SEQ ID NO: 41492 - DNA, 25 bp, Saccharomyces pastorianus
aactcggcaggctcggtatctgaaa

SEQ ID NO: 41493 - DNA, 25 bp, Saccharomyces pastorianus
agacgtgcgtcttctgcatttactg

SEQ ID NO: 41494 - DNA, 25 bp, Saccharomyces pastorianus
gtcgtgccccttcaaggacgtgaag

SEQ ID NO: 41495 - DNA, 25 bp, Saccharomyces pastorianus
gagacgtggcgttttgccagaccgt

SEQ ID NO: 41496 - DNA, 25 bp, Saccharomyces pastorianus
aacggcgtcaacgaggtgtcgagct

SEQ ID NO: 41497 - DNA, 25 bp, Saccharomyces pastorianus
acacgttcgtcaagatcgggtggaa

SEQ ID NO: 41498 - DNA, 25 bp, Saccharomyces pastorianus
acgtgaagccgtcgttcggaatcaa

SEQ ID NO: 41499 - DNA, 25 bp, Saccharomyces pastorianus
tgcccggcaacgaagccatgctgat

SEQ ID NO: 41500 - DNA, 25 bp, Saccharomyces pastorianus
atcgaagtgttcgacagcggctcgt

SEQ ID NO: 41501 - DNA, 25 bp, Saccharomyces pastorianus
tggaacccggtgtacctggagtcgt

SEQ ID NO: 41502 - DNA, 25 bp, Saccharomyces pastorianus
gattgacccgagctctaacggcgtc

SEQ ID NO: 41503 - DNA, 25 bp, Saccharomyces pastorianus
ggctcgtcgtcgtccaagaagaaga

SEQ ID NO: 41504 - DNA, 25 bp, Saccharomyces pastorianus
gtaacttctgtgtcgtgacggccaa

SEQ ID NO: 41505 - DNA, 25 bp, Saccharomyces pastorianus
acaagatcctggctcggtatttcgt

SEQ ID NO: 41506 - DNA, 25 bp, Saccharomyces pastorianus
tggaaaccctgcttcgcgagaaata

SEQ ID NO: 41507 - DNA, 25 bp, Saccharomyces pastorianus
gggacctgaaaacacgcacgatcgt

SEQ ID NO: 41508 - DNA, 25 bp, Saccharomyces pastorianus
tacggattaacccactaggcatcac

SEQ ID NO: 41509 - DNA, 25 bp, Saccharomyces pastorianus
ggacgtgcggttgtacccaacgata

SEQ ID NO: 41510 - DNA, 25 bp, Saccharomyces pastorianus
aaagctcggatatacccggtcgcag

SEQ ID NO: 41511 - DNA, 25 bp, Saccharomyces pastorianus
ggatcctgaactcgtctgcgtttga

SEQ ID NO: 41512 - DNA, 25 bp, Saccharomyces pastorianus
gtaagattcgacgtggtctaccacc

SEQ ID NO: 41513 - DNA, 25 bp, Saccharomyces pastorianus
gcgggtatccccatatccataagtg

SEQ ID NO: 41514 - DNA, 25 bp, Saccharomyces pastorianus
gtccctacagccacagatcgaagag

SEQ ID NO: 41515 - DNA, 25 bp, Saccharomyces pastorianus
agaaacatgtactggcgccacactg

SEQ ID NO: 41516 - DNA, 25 bp, Saccharomyces pastorianus
acttacaccccgagcaaattagata

SEQ ID NO: 41517 - DNA, 25 bp, Saccharomyces pastorianus
gatctgtgctgagaatctactggac

SEQ ID NO: 41518 - DNA, 25 bp, Saccharomyces pastorianus
ggcggcgaattcaacgacccaagaa

SEQ ID NO: 41519 - DNA, 25 bp, Saccharomyces pastorianus
gggcgctgccggtggtaataacaat

SEQ ID NO: 41520 - DNA, 25 bp, Saccharomyces pastorianus
ggacaaattccatgtggaccccaat

SEQ ID NO: 41521 - DNA, 25 bp, Saccharomyces pastorianus
gcaacgtttatcctctacgggagta

SEQ ID NO: 41522 - DNA, 25 bp, Saccharomyces pastorianus
gtaaacgcacatgggcgcactcaag

SEQ ID NO: 41523 - DNA, 25 bp, Saccharomyces pastorianus
gggtttgagccttctagggcgccaa

SEQ ID NO: 41524 - DNA, 25 bp, Saccharomyces pastorianus
ggaggactaatggtggccaccccgt

SEQ ID NO: 41525 - DNA, 25 bp, Saccharomyces pastorianus
ataacggtactggtggcggcgaatt

SEQ ID NO: 41526 - DNA, 25 bp, Saccharomyces pastorianus
aagtacctgcatggcgacgagttca

SEQ ID NO: 41527 - DNA, 25 bp, Saccharomyces pastorianus
gaatttgacgtaaggcaggacatgc

SEQ ID NO: 41528 - DNA, 25 bp, Saccharomyces pastorianus
gagaaaactacatacctgtggaaaa

SEQ ID NO: 41529 - DNA, 25 bp, Saccharomyces pastorianus
gtataaccagcccaagaagactaat

SEQ ID NO: 41530 - DNA, 25 bp, Saccharomyces pastorianus
tttttccaagtcaaaggctattcaa

SEQ ID NO: 41531 - DNA, 25 bp, Saccharomyces pastorianus
gaacataccgaacgaaatatcccga

SEQ ID NO: 41532 - DNA, 25 bp, Saccharomyces pastorianus
ggcaggacatgcaatctaacaatat

SEQ ID NO: 41533 - DNA, 25 bp, Saccharomyces pastorianus
gtctattcgagggactgcatgataa

SEQ ID NO: 41534 - DNA, 25 bp, Saccharomyces pastorianus
ctctctgattacgacttggatgact

SEQ ID NO: 41535 - DNA, 25 bp, Saccharomyces pastorianus
gaatcaaattcacataccacgacat

SEQ ID NO: 41536 - DNA, 25 bp, Saccharomyces pastorianus
ggatgagctctctgattacgacttg

SEQ ID NO: 41537 - DNA, 25 bp, Saccharomyces pastorianus
gatgctttaaacaagaggacctttt

SEQ ID NO: 41538 - DNA, 25 bp, Saccharomyces pastorianus
gcaactcgtccacttctttgaaatt

SEQ ID NO: 41539 - DNA, 25 bp, Saccharomyces pastorianus
ggtgggtcaaaattgctcctttgca

SEQ ID NO: 41540 - DNA, 25 bp, Saccharomyces pastorianus
gagctgcttatgctgtaggttctat

SEQ ID NO: 41541 - DNA, 25 bp, Saccharomyces pastorianus
gagtagtttattcttgccaagcggc

SEQ ID NO: 41542 - DNA, 25 bp, Saccharomyces pastorianus
gattttgttacgtcacagctgctta

SEQ ID NO: 41543 - DNA, 25 bp, Saccharomyces pastorianus
actccggtaacgtcttcatctaaga

SEQ ID NO: 41544 - DNA, 25 bp, Saccharomyces pastorianus
gaaacgcgtatcatctgaggactca

SEQ ID NO: 41545 - DNA, 25 bp, Saccharomyces pastorianus
aattcagcatctttaactccggtaa

SEQ ID NO: 41546 - DNA, 25 bp, Saccharomyces pastorianus
taacggtaattcgtcgtcacccaat

SEQ ID NO: 41547 - DNA, 25 bp, Saccharomyces pastorianus
caaagcgctgtatgacgatttccat

SEQ ID NO: 41548 - DNA, 25 bp, Saccharomyces pastorianus
tttgaagcaacatccgaaacgcgta

SEQ ID NO: 41549 - DNA, 25 bp, Saccharomyces pastorianus
gcgacttccacctctgatttaaatt

SEQ ID NO: 41550 - DNA, 25 bp, Saccharomyces pastorianus
aaagccttacaccttaatcgtggat

SEQ ID NO: 41551 - DNA, 25 bp, Saccharomyces pastorianus
tggatagccccatttctgacgaaga

SEQ ID NO: 41552 - DNA, 25 bp, Saccharomyces pastorianus
ttgatcactaagaatcccggtactt

SEQ ID NO: 41553 - DNA, 25 bp, Saccharomyces pastorianus
agatattccggatacagccagcgat

SEQ ID NO: 41554 - DNA, 25 bp, Saccharomyces pastorianus
gtacttacaaggcacgtctggcgaa

SEQ ID NO: 41555 - DNA, 25 bp, Saccharomyces pastorianus
atggacaagcacgtttggcgcgact

SEQ ID NO: 41556 - DNA, 25 bp, Saccharomyces pastorianus
gaagacggtcctgcacaacatgaag

SEQ ID NO: 41557 - DNA, 25 bp, Saccharomyces pastorianus
acggtcttgatgaagcaccacagaa

SEQ ID NO: 41558 - DNA, 25 bp, Saccharomyces pastorianus
gatatcaaagttgtccatccagatt

SEQ ID NO: 41559 - DNA, 25 bp, Saccharomyces pastorianus
atttattcgctaccggtacatcgtg

SEQ ID NO: 41560 - DNA, 25 bp, Saccharomyces pastorianus
cgtaggtcccagtgcggataatcta

SEQ ID NO: 41561 - DNA, 25 bp, Saccharomyces pastorianus
gcatcgttacggtacagatcaatca

SEQ ID NO: 41562 - DNA, 25 bp, Saccharomyces pastorianus
tagtagacgcatcacttgggctggc

SEQ ID NO: 41563 - DNA, 25 bp, Saccharomyces pastorianus
aaagaacgtcgtcaagctcttccac

SEQ ID NO: 41564 - DNA, 25 bp, Saccharomyces pastorianus
aaagtcccagtgacgtaggtcccag

SEQ ID NO: 41565 - DNA, 25 bp, Saccharomyces pastorianus
acaccttccacgcttttcaaaatga

SEQ ID NO: 41566 - DNA, 25 bp, Saccharomyces pastorianus
ctttactagtggatacgccggatat

SEQ ID NO: 41567 - DNA, 25 bp, Saccharomyces pastorianus
agagatccctatcatctggtaatta

SEQ ID NO: 41568 - DNA, 25 bp, Saccharomyces pastorianus
atgtcttcaataagccccagaacca

SEQ ID NO: 41569 - DNA, 25 bp, Saccharomyces pastorianus
atgacccggatcgattgcgttcaaa

SEQ ID NO: 41570 - DNA, 25 bp, Saccharomyces pastorianus
gggaagtattgaaccccacagattc

SEQ ID NO: 41571 - DNA, 25 bp, Saccharomyces pastorianus
gattacgttcggtccaaggctaagg

SEQ ID NO: 41572 - DNA, 25 bp, Saccharomyces pastorianus
acagcacagtttccccatttggtaa

SEQ ID NO: 41573 - DNA, 25 bp, Saccharomyces pastorianus
gaatgcccataaatctcaggttgtt

SEQ ID NO: 41574 - DNA, 25 bp, Saccharomyces pastorianus
gtatgcagccatgttgaatgcccat

SEQ ID NO: 41575 - DNA, 25 bp, Saccharomyces pastorianus
catatcgcagcgctatacttgagaa

SEQ ID NO: 41576 - DNA, 25 bp, Saccharomyces pastorianus
aagttgccatatcgcggttgagaca

SEQ ID NO: 41577 - DNA, 25 bp, Saccharomyces pastorianus
gattcggccgttttgttgctacgaa

SEQ ID NO: 41578 - DNA, 25 bp, Saccharomyces pastorianus
ggagctgtaccaaattatcgtgact

SEQ ID NO: 41579 - DNA, 25 bp, Saccharomyces pastorianus
atcgattctataacctctactcttt

SEQ ID NO: 41580 - DNA, 25 bp, Saccharomyces pastorianus
gaaagacctgtctcggtacaagtca

SEQ ID NO: 41581 - DNA, 25 bp, Saccharomyces pastorianus
tttggtaaatccattcagccgctcc

SEQ ID NO: 41582 - DNA, 25 bp, Saccharomyces pastorianus
gtgaacccagccatagcgggatcat

SEQ ID NO: 41583 - DNA, 25 bp, Saccharomyces pastorianus
taaaacagtgaacccagccatagcg

SEQ ID NO: 41584 - DNA, 25 bp, Saccharomyces pastorianus
gagcgttgtcaaaagtttaggtctg

SEQ ID NO: 41585 - DNA, 25 bp, Saccharomyces pastorianus
agccatagcgggatcattagctaaa

SEQ ID NO: 41586 - DNA, 25 bp, Saccharomyces pastorianus
aagcaggtcactcattggcatgccg

SEQ ID NO: 41587 - DNA, 25 bp, Saccharomyces pastorianus
tggcatgccgcatacgacaaagagc

SEQ ID NO: 41588 - DNA, 25 bp, Saccharomyces pastorianus
agagcataaactaacaccacatcaa

SEQ ID NO: 41589 - DNA, 25 bp, Saccharomyces pastorianus
aatcacattaagcaggtcactcatt

SEQ ID NO: 41590 - DNA, 25 bp, Saccharomyces pastorianus
gtcacagtagaggttacagagcata

SEQ ID NO: 41591 - DNA, 25 bp, Saccharomyces pastorianus
aagagttggtcacagtagaggttac

SEQ ID NO: 41592 - DNA, 25 bp, Saccharomyces pastorianus
taacaccacatcaacaacgagagtt

SEQ ID NO: 41593 - DNA, 25 bp, Saccharomyces pastorianus
atcctcatcaaagtctgggctcgtg

SEQ ID NO: 41594 - DNA, 25 bp, Saccharomyces pastorianus
ccatgaatttctccacgctaacaag

SEQ ID NO: 41595 - DNA, 25 bp, Saccharomyces pastorianus
gacaaggctcatcaaccagtgtgaa

SEQ ID NO: 41596 - DNA, 25 bp, Saccharomyces pastorianus
ggcgtccatgcacactttaagatcg

SEQ ID NO: 41597 - DNA, 25 bp, Saccharomyces pastorianus
gaattctacgtttgttctggaccct

SEQ ID NO: 41598 - DNA, 25 bp, Saccharomyces pastorianus
aagagtggcacttcatcctcatcaa

SEQ ID NO: 41599 - DNA, 25 bp, Saccharomyces pastorianus
atgacttctttgaagcccgctgcga

SEQ ID NO: 41600 - DNA, 25 bp, Saccharomyces pastorianus
gaaccatcaattcccgtgaacgatc

SEQ ID NO: 41601 - DNA, 25 bp, Saccharomyces pastorianus
gaaatggatctgcttttgaccccac

SEQ ID NO: 41602 - DNA, 25 bp, Saccharomyces pastorianus
ggctgttttagtaccacaccggaat

SEQ ID NO: 41603 - DNA, 25 bp, Saccharomyces pastorianus
ctcagaaacttccactgcttttaac

SEQ ID NO: 41604 - DNA, 25 bp, Saccharomyces pastorianus
ggacattgggctacattggcctgta

SEQ ID NO: 41605 - DNA, 25 bp, Saccharomyces pastorianus
aggccaggtgcgtttcataagatca

SEQ ID NO: 41606 - DNA, 25 bp, Saccharomyces pastorianus
gttccccttgcagcttatcaatgta

SEQ ID NO: 41607 - DNA, 25 bp, Saccharomyces pastorianus
tatccgtgtggactgatcgcgaact

SEQ ID NO: 41608 - DNA, 25 bp, Saccharomyces pastorianus
agaacgagagtcttccagcgggcca

SEQ ID NO: 41609 - DNA, 25 bp, Saccharomyces pastorianus
gacgatgcctcgaagaattactcac

SEQ ID NO: 41610 - DNA, 25 bp, Saccharomyces pastorianus
gccatggcgctcatattgctaacat

SEQ ID NO: 41611 - DNA, 25 bp, Saccharomyces pastorianus
gatgttcaatgatacgttccccttg

SEQ ID NO: 41612 - DNA, 25 bp, Saccharomyces pastorianus
gtaagccgctatccaagagtcctga

SEQ ID NO: 41613 - DNA, 25 bp, Saccharomyces pastorianus
ttggcctgtactggagttcaacggt

SEQ ID NO: 41614 - DNA, 25 bp, Saccharomyces pastorianus
ctatttgatcggtggctgtgtttgc

SEQ ID NO: 41615 - DNA, 25 bp, Saccharomyces pastorianus
tctcctgaaagttttggtctaacca

SEQ ID NO: 41616 - DNA, 25 bp, Saccharomyces pastorianus
gatacctgtagagaaggaccacaag

SEQ ID NO: 41617 - DNA, 25 bp, Saccharomyces pastorianus
agaagtttgctccttaccgtgctaa

SEQ ID NO: 41618 - DNA, 25 bp, Saccharomyces pastorianus
tttgccgcagatgacacagatctaa

SEQ ID NO: 41619 - DNA, 25 bp, Saccharomyces pastorianus
caagatttaaaattccgctaccgtg

SEQ ID NO: 41620 - DNA, 25 bp, Saccharomyces pastorianus
agacgacgctattttgatacctgta

SEQ ID NO: 41621 - DNA, 25 bp, Saccharomyces pastorianus
tattggcctgaagaagtttgctcct

SEQ ID NO: 41622 - DNA, 25 bp, Saccharomyces pastorianus
gatggcgatgccaaggaccaagtag

SEQ ID NO: 41623 - DNA, 25 bp, Saccharomyces pastorianus
atggtggacaagacgccaatggaaa

SEQ ID NO: 41624 - DNA, 25 bp, Saccharomyces pastorianus
accacgagagaaatctttgccgcag

SEQ ID NO: 41625 - DNA, 25 bp, Saccharomyces pastorianus
ggttagccccagttaatggtggaca

SEQ ID NO: 41626 - DNA, 25 bp, Saccharomyces pastorianus
gaagcagcatgctacgttgcattta

SEQ ID NO: 41627 - DNA, 25 bp, Saccharomyces pastorianus
gattctattttcttgagtgctggtg

SEQ ID NO: 41628 - DNA, 25 bp, Saccharomyces pastorianus
aaacagtagctgcttgccagtggaa

SEQ ID NO: 41629 - DNA, 25 bp, Saccharomyces pastorianus
gagtgctttaactggctccaaagtg

SEQ ID NO: 41630 - DNA, 25 bp, Saccharomyces pastorianus
taagagctcgaaaggccttgctttg

SEQ ID NO: 41631 - DNA, 25 bp, Saccharomyces pastorianus
aagtactcaatttgctccaagcgac

SEQ ID NO: 41632 - DNA, 25 bp, Saccharomyces pastorianus
gacaggctactaccatccgaagaag

SEQ ID NO: 41633 - DNA, 25 bp, Saccharomyces pastorianus
tattgccctggataatgttgctgtg

SEQ ID NO: 41634 - DNA, 25 bp, Saccharomyces pastorianus
ttgctgtggtttgctctccagaaaa

SEQ ID NO: 41635 - DNA, 25 bp, Saccharomyces pastorianus
aagcgactcaaattcccatgtctta

SEQ ID NO: 41636 - DNA, 25 bp, Saccharomyces pastorianus
acaggtaatttctctgctacatttg

SEQ ID NO: 41637 - DNA, 25 bp, Saccharomyces pastorianus
aatcaaggctggaacaaccgccctt

SEQ ID NO: 41638 - DNA, 25 bp, Saccharomyces pastorianus
atatgggctctcctagcggatacaa

SEQ ID NO: 41639 - DNA, 25 bp, Saccharomyces pastorianus
gagagtaccagcaggtccacacaat

SEQ ID NO: 41640 - DNA, 25 bp, Saccharomyces pastorianus
ttcaaatccttatcagcatccttcc

SEQ ID NO: 41641 - DNA, 25 bp, Saccharomyces pastorianus
ggatacaatggagcagcgccactat

SEQ ID NO: 41642 - DNA, 25 bp, Saccharomyces pastorianus
aacatatgcatctacctattcttcc

SEQ ID NO: 41643 - DNA, 25 bp, Saccharomyces pastorianus
aacggcaatgctggtccttattatc

SEQ ID NO: 41644 - DNA, 25 bp, Saccharomyces pastorianus
aaatatgcccatgcaatatcctcct

SEQ ID NO: 41645 - DNA, 25 bp, Saccharomyces pastorianus
tcgagcccgcccacaagaaaaggag

SEQ ID NO: 41646 - DNA, 25 bp, Saccharomyces pastorianus
gcaacaatagatctcagccgccatg

SEQ ID NO: 41647 - DNA, 25 bp, Saccharomyces pastorianus
tcaaccgatggtttcgcctaggaac

SEQ ID NO: 41648 - DNA, 25 bp, Saccharomyces pastorianus
gacactgttagtccatggttcaaac

SEQ ID NO: 41649 - DNA, 25 bp, Saccharomyces pastorianus
aatagcggccattggtttcccactg

SEQ ID NO: 41650 - DNA, 25 bp, Saccharomyces pastorianus
aatgactcgcccttagtgaacgtat

SEQ ID NO: 41651 - DNA, 25 bp, Saccharomyces pastorianus
agcgtactagtgtgtttctcgttca

SEQ ID NO: 41652 - DNA, 25 bp, Saccharomyces pastorianus
tacgtcgactgattttcctattctc

SEQ ID NO: 41653 - DNA, 25 bp, Saccharomyces pastorianus
gatcaaccgcgatatttctttgctt

SEQ ID NO: 41654 - DNA, 25 bp, Saccharomyces pastorianus
ggttcacaaatactatccagggtct

SEQ ID NO: 41655 - DNA, 25 bp, Saccharomyces pastorianus
tcatatcttccccagtgacgaatta

SEQ ID NO: 41656 - DNA, 25 bp, Saccharomyces pastorianus
ttcccactggtgttacttctaagcg

SEQ ID NO: 41657 - DNA, 25 bp, Saccharomyces pastorianus
gcaccattgcataccgagacactgt

SEQ ID NO: 41658 - DNA, 25 bp, Saccharomyces pastorianus
ggattactacttgcatcagtggagt

SEQ ID NO: 41659 - DNA, 25 bp, Saccharomyces pastorianus
aatggccaatggaggtgttacgacg

SEQ ID NO: 41660 - DNA, 25 bp, Saccharomyces pastorianus
tggcaagccatgttgcatctgaaat

SEQ ID NO: 41661 - DNA, 25 bp, Saccharomyces pastorianus
gaacttgttcggtggatctgtacca

SEQ ID NO: 41662 - DNA, 25 bp, Saccharomyces pastorianus
gaaaccagttcttttgcaccagata

SEQ ID NO: 41663 - DNA, 25 bp, Saccharomyces pastorianus
gaaatgtatgctgctgatgctgaaa

SEQ ID NO: 41664 - DNA, 25 bp, Saccharomyces pastorianus
aaagtcttatttccttggcaagcca

SEQ ID NO: 41665 - DNA, 25 bp, Saccharomyces pastorianus
aaaggacactttgggctcaccacaa

SEQ ID NO: 41666 - DNA, 25 bp, Saccharomyces pastorianus
tgaagacgaagaggctttccttttt

SEQ ID NO: 41667 - DNA, 25 bp, Saccharomyces pastorianus
gatgaaccctatcttctttgagaat

SEQ ID NO: 41668 - DNA, 25 bp, Saccharomyces pastorianus
ggctcaccacaattatccgattcaa

SEQ ID NO: 41669 - DNA, 25 bp, Saccharomyces pastorianus
gacgggagactatacgaacttgttc

SEQ ID NO: 41670 - DNA, 25 bp, Saccharomyces pastorianus
ttcgataatgccaagagaccgctat

SEQ ID NO: 41671 - DNA, 25 bp, Saccharomyces pastorianus
tagagccttctcaattggatgcact

SEQ ID NO: 41672 - DNA, 25 bp, Saccharomyces pastorianus
gatggaatcggcagtcaccgtagct

SEQ ID NO: 41673 - DNA, 25 bp, Saccharomyces pastorianus
gttatgcaagaccactatcctgaga

SEQ ID NO: 41674 - DNA, 25 bp, Saccharomyces pastorianus
aaacatgaggtttattggcccgaca

SEQ ID NO: 41675 - DNA, 25 bp, Saccharomyces pastorianus
ggatgcactctacaatggtctatta

SEQ ID NO: 41676 - DNA, 25 bp, Saccharomyces pastorianus
gttcggcggcgttattggactaagt

SEQ ID NO: 41677 - DNA, 25 bp, Saccharomyces pastorianus
atgatgtatccatttctggaccctg

SEQ ID NO: 41678 - DNA, 25 bp, Saccharomyces pastorianus
atattccgtggtttgcatgggcttt

SEQ ID NO: 41679 - DNA, 25 bp, Saccharomyces pastorianus
accgtagctcctcaaggcgtagaga

SEQ ID NO: 41680 - DNA, 25 bp, Saccharomyces pastorianus
ctggaccctgccactaaatcgaagg

SEQ ID NO: 41681 - DNA, 25 bp, Saccharomyces pastorianus
gtgatgctgctatcgcacagtacaa

SEQ ID NO: 41682 - DNA, 25 bp, Saccharomyces pastorianus
tatacttcctgggtctcatttgaat

SEQ ID NO: 41683 - DNA, 25 bp, Saccharomyces pastorianus
taagcaagtggccaagttctacgac

SEQ ID NO: 41684 - DNA, 25 bp, Saccharomyces pastorianus
gatcctgattctattttctcttgtg

SEQ ID NO: 41685 - DNA, 25 bp, Saccharomyces pastorianus
gagactacgctatacctatacttcc

SEQ ID NO: 41686 - DNA, 25 bp, Saccharomyces pastorianus
agctgcgttccgatattgaatctta

SEQ ID NO: 41687 - DNA, 25 bp, Saccharomyces pastorianus
gaaccgtacctagggactctattgt

SEQ ID NO: 41688 - DNA, 25 bp, Saccharomyces pastorianus
gaacactgtttctttatctctgaca

SEQ ID NO: 41689 - DNA, 25 bp, Saccharomyces pastorianus
agaatcctcttttagaactcgtcaa

SEQ ID NO: 41690 - DNA, 25 bp, Saccharomyces pastorianus
tagtggctccagattttctctgtga

SEQ ID NO: 41691 - DNA, 25 bp, Saccharomyces pastorianus
attttctcttgtgccaggtgtcata

SEQ ID NO: 41692 - DNA, 25 bp, Saccharomyces pastorianus
gagaataattgggttcccatcccgt

SEQ ID NO: 41693 - DNA, 25 bp, Saccharomyces pastorianus
attggaggacactgtgatgccatat

SEQ ID NO: 41694 - DNA, 25 bp, Saccharomyces pastorianus
gcaatcatctggttcattggaggac

SEQ ID NO: 41695 - DNA, 25 bp, Saccharomyces pastorianus
gatgaagtacgttctttagctatca

SEQ ID NO: 41696 - DNA, 25 bp, Saccharomyces pastorianus
aattacgtcacgaggatcttgagaa

SEQ ID NO: 41697 - DNA, 25 bp, Saccharomyces pastorianus
atgttggtttgtacagtgcctggga

SEQ ID NO: 41698 - DNA, 25 bp, Saccharomyces pastorianus
gatgccatatgtcaagtgtctgtcc

SEQ ID NO: 41699 - DNA, 25 bp, Saccharomyces pastorianus
gtgtctgtccacctttagagatgaa

SEQ ID NO: 41700 - DNA, 25 bp, Saccharomyces pastorianus
ggattgcacaatcagactctaatga

SEQ ID NO: 41701 - DNA, 25 bp, Saccharomyces pastorianus
ccatcccgttctgataatttaggtt

SEQ ID NO: 41702 - DNA, 25 bp, Saccharomyces pastorianus
ctgggatgaacaaggccttccaaca

SEQ ID NO: 41703 - DNA, 25 bp, Saccharomyces pastorianus
atggtgacgatgatgctgctgctgt

SEQ ID NO: 41704 - DNA, 25 bp, Saccharomyces pastorianus
atgcacattgcttacgacgcggtgt

SEQ ID NO: 41705 - DNA, 25 bp, Saccharomyces pastorianus
tgtggcgataattcggcccttgatt

SEQ ID NO: 41706 - DNA, 25 bp, Saccharomyces pastorianus
gtgagtctatatgcggaccagccgt

SEQ ID NO: 41707 - DNA, 25 bp, Saccharomyces pastorianus
ctgctgtattagatttggacgcgat

SEQ ID NO: 41708 - DNA, 25 bp, Saccharomyces pastorianus
ccgaggctgtttccaagactttgca

SEQ ID NO: 41709 - DNA, 25 bp, Saccharomyces pastorianus
gaacccacagtggtagtcatcgacg

SEQ ID NO: 41710 - DNA, 25 bp, Saccharomyces pastorianus
agtgccgcagcggtttatgttgcga

SEQ ID NO: 41711 - DNA, 25 bp, Saccharomyces pastorianus
gtcatcgacgtgtcttcgtcgggaa

SEQ ID NO: 41712 - DNA, 25 bp, Saccharomyces pastorianus
ttggacgtgcccacgggcttgaaag

SEQ ID NO: 41713 - DNA, 25 bp, Saccharomyces pastorianus
ttaacgtcgggcactcaagcaattt

SEQ ID NO: 41714 - DNA, 25 bp, Saccharomyces pastorianus
gggagatttccttttgcagtacgca

SEQ ID NO: 41715 - DNA, 25 bp, Saccharomyces pastorianus
taatgcagtcatttctcacgccaat

SEQ ID NO: 41716 - DNA, 25 bp, Saccharomyces pastorianus
gtatgacgacgtaacctgcgaccaa

SEQ ID NO: 41717 - DNA, 25 bp, Saccharomyces pastorianus
aacaaatttattgccctgtctgaac

SEQ ID NO: 41718 - DNA, 25 bp, Saccharomyces pastorianus
aatattccatcttttgcaacccttg

SEQ ID NO: 41719 - DNA, 25 bp, Saccharomyces pastorianus
acgccaatgcggctgcagtgtattt

SEQ ID NO: 41720 - DNA, 25 bp, Saccharomyces pastorianus
gtaacctgcgaccaattgagtacgt

SEQ ID NO: 41721 - DNA, 25 bp, Saccharomyces pastorianus
gaagctctagatctttcagcaaact

SEQ ID NO: 41722 - DNA, 25 bp, Saccharomyces pastorianus
ttgttttatcagagtcaccggtgga

SEQ ID NO: 41723 - DNA, 25 bp, Saccharomyces pastorianus
gacaattgtcccaaccagcatacag

SEQ ID NO: 41724 - DNA, 25 bp, Saccharomyces pastorianus
tgtctgaacagcaaccatcacagga

SEQ ID NO: 41725 - DNA, 25 bp, Saccharomyces pastorianus
agcatattctgctgggacaacaccc

SEQ ID NO: 41726 - DNA, 25 bp, Saccharomyces pastorianus
gggttccagccttgatcgatcacaa

SEQ ID NO: 41727 - DNA, 25 bp, Saccharomyces pastorianus
gggcgcaatcttgctacatctagta

SEQ ID NO: 41728 - DNA, 25 bp, Saccharomyces pastorianus
agggctcctgaatttgtctctgtaa

SEQ ID NO: 41729 - DNA, 25 bp, Saccharomyces pastorianus
ttagatacttccactcccaaaaaat

SEQ ID NO: 41730 - DNA, 25 bp, Saccharomyces pastorianus
aaatccaaatgccagggttccagcc

SEQ ID NO: 41731 - DNA, 25 bp, Saccharomyces pastorianus
tatccatttgggagtcgggcgcaat

SEQ ID NO: 41732 - DNA, 25 bp, Saccharomyces pastorianus
gagaccggtaatccactactttggt

SEQ ID NO: 41733 - DNA, 25 bp, Saccharomyces pastorianus
ttcagacttctggtcatgcaccaat

SEQ ID NO: 41734 - DNA, 25 bp, Saccharomyces pastorianus
gaacagtctcaaatcaacgcatggc

SEQ ID NO: 41735 - DNA, 25 bp, Saccharomyces pastorianus
aacgcatggctgttctttcagactt

SEQ ID NO: 41736 - DNA, 25 bp, Saccharomyces pastorianus
aaactccaaatctgcgcgaagcacc

SEQ ID NO: 41737 - DNA, 25 bp, Saccharomyces pastorianus
cgatcttctagcgtcgttgaatggc

SEQ ID NO: 41738 - DNA, 25 bp, Saccharomyces pastorianus
acgtcagttctgatgaagatgtgca

SEQ ID NO: 41739 - DNA, 25 bp, Saccharomyces pastorianus
gaggcgacgaattgaacgatcttct

SEQ ID NO: 41740 - DNA, 25 bp, Saccharomyces pastorianus
cagattcatctgacgacgatatgga

SEQ ID NO: 41741 - DNA, 25 bp, Saccharomyces pastorianus
ggcatgcctcggtgaaaagccaggc

SEQ ID NO: 41742 - DNA, 25 bp, Saccharomyces pastorianus
gcatctccatttgccgtgatcgaaa

SEQ ID NO: 41743 - DNA, 25 bp, Saccharomyces pastorianus
gcggtacctgtggagaatcatttga

SEQ ID NO: 41744 - DNA, 25 bp, Saccharomyces pastorianus
taactactccattaccttcagcatc

SEQ ID NO: 41745 - DNA, 25 bp, Saccharomyces pastorianus
atggcaacggcttccaaagcgacga

SEQ ID NO: 41746 - DNA, 25 bp, Saccharomyces pastorianus
agtcgaaacaagctatttacgcatg

SEQ ID NO: 41747 - DNA, 25 bp, Saccharomyces pastorianus
tggtttacctgaagcagaccttgct

SEQ ID NO: 41748 - DNA, 25 bp, Saccharomyces pastorianus
gaccttgctctagcacagtgttgtg

SEQ ID NO: 41749 - DNA, 25 bp, Saccharomyces pastorianus
gaagatccattgtatattgccagaa

SEQ ID NO: 41750 - DNA, 25 bp, Saccharomyces pastorianus
cagtggaactctacagggcttggaa

SEQ ID NO: 41751 - DNA, 25 bp, Saccharomyces pastorianus
ctatgatacgatctcggcgtttcat

SEQ ID NO: 41752 - DNA, 25 bp, Saccharomyces pastorianus
tacaatcccgattacatcagtggca

SEQ ID NO: 41753 - DNA, 25 bp, Saccharomyces pastorianus
gaatactttcctgacgaagtccttg

SEQ ID NO: 41754 - DNA, 25 bp, Saccharomyces pastorianus
attattgcctttggctgtcgcagcg

SEQ ID NO: 41755 - DNA, 25 bp, Saccharomyces pastorianus
tcggaccacgggataactcattatt

SEQ ID NO: 41756 - DNA, 25 bp, Saccharomyces pastorianus
ggccagagcacccaagtcagtggaa

SEQ ID NO: 41757 - DNA, 25 bp, Saccharomyces pastorianus
aagggcgataaccactatgatacga

SEQ ID NO: 41758 - DNA, 25 bp, Saccharomyces pastorianus
tgggcacattgattggccttccaat

SEQ ID NO: 41759 - DNA, 25 bp, Saccharomyces pastorianus
atctttatcgactttattgcatttg

SEQ ID NO: 41760 - DNA, 25 bp, Saccharomyces pastorianus
gctaacgaagactccggtatctgcg

SEQ ID NO: 41761 - DNA, 25 bp, Saccharomyces pastorianus
gaagataaacccgactttgaagact

SEQ ID NO: 41762 - DNA, 25 bp, Saccharomyces pastorianus
acaggaggataatagccattggcca

SEQ ID NO: 41763 - DNA, 25 bp, Saccharomyces pastorianus
tactctgttgtcgtcatgttcgtcg

SEQ ID NO: 41764 - DNA, 25 bp, Saccharomyces pastorianus
gaggagatgcatcgcacaactacaa

SEQ ID NO: 41765 - DNA, 25 bp, Saccharomyces pastorianus
atgttcgtcgaaccgatactgcaaa

SEQ ID NO: 41766 - DNA, 25 bp, Saccharomyces pastorianus
gaggtccacgcagacgtcagatgat

SEQ ID NO: 41767 - DNA, 25 bp, Saccharomyces pastorianus
atctgcgctagggtacaatgaacat

SEQ ID NO: 41768 - DNA, 25 bp, Saccharomyces pastorianus
atttatgcgttcttgtactctgttg

SEQ ID NO: 41769 - DNA, 25 bp, Saccharomyces pastorianus
acaagccgacacaaacacagaaatt

SEQ ID NO: 41770 - DNA, 25 bp, Saccharomyces pastorianus
aacacagaaatttaaagctcttcgt

SEQ ID NO: 41771 - DNA, 25 bp, Saccharomyces pastorianus
taaggaagatcccttcaccgatcag

SEQ ID NO: 41772 - DNA, 25 bp, Saccharomyces pastorianus
gaagatcccttcaccgatcagccaa

SEQ ID NO: 41773 - DNA, 25 bp, Saccharomyces pastorianus
atatctttacaagccgacacaaaca

SEQ ID NO: 41774 - DNA, 25 bp, Saccharomyces pastorianus
tataaactgttgagtagtccaggtt

SEQ ID NO: 41775 - DNA, 25 bp, Saccharomyces pastorianus
ttccacaggtttgtacgaaaggtat

SEQ ID NO: 41776 - DNA, 25 bp, Saccharomyces pastorianus
aagctcttcgtcttctattttggga

SEQ ID NO: 41777 - DNA, 25 bp, Saccharomyces pastorianus
caaccgcttctcaatatctttacaa

SEQ ID NO: 41778 - DNA, 25 bp, Saccharomyces pastorianus
tgaaatgagatctaccttcggattc

SEQ ID NO: 41779 - DNA, 25 bp, Saccharomyces pastorianus
cttcgtcttctattttgggatgaaa

SEQ ID NO: 41780 - DNA, 25 bp, Saccharomyces pastorianus
ctggcaattttgtctgcgatttcgc

SEQ ID NO: 41781 - DNA, 25 bp, Saccharomyces pastorianus
gggagtttcaacacggcaaaggcat

SEQ ID NO: 41782 - DNA, 25 bp, Saccharomyces pastorianus
aggttctattcttttcgtctctgct

SEQ ID NO: 41783 - DNA, 25 bp, Saccharomyces pastorianus
gaggatgccgttttgaagaccgtaa

SEQ ID NO: 41784 - DNA, 25 bp, Saccharomyces pastorianus
taggaatacgctccaattgcattgc

SEQ ID NO: 41785 - DNA, 25 bp, Saccharomyces pastorianus
aaccgtctatattttttcgcctgct

SEQ ID NO: 41786 - DNA, 25 bp, Saccharomyces pastorianus
tagcggttgaattaggccctctagg

SEQ ID NO: 41787 - DNA, 25 bp, Saccharomyces pastorianus
tacggtgtacctttccaaggacatg

SEQ ID NO: 41788 - DNA, 25 bp, Saccharomyces pastorianus
atagattttgttattgccggcgctg

SEQ ID NO: 41789 - DNA, 25 bp, Saccharomyces pastorianus
cttacgtcactggtactgtcttgat

SEQ ID NO: 41790 - DNA, 25 bp, Saccharomyces pastorianus
agacatagccgaatcaaccgtctat

SEQ ID NO: 41791 - DNA, 25 bp, Saccharomyces pastorianus
aactctgcgatgtcttggtgaattc

SEQ ID NO: 41792 - DNA, 25 bp, Saccharomyces pastorianus
agagagactgcttttcctacaacac

SEQ ID NO: 41793 - DNA, 25 bp, Saccharomyces pastorianus
tctcatcgaaaccttgtggcttaca

SEQ ID NO: 41794 - DNA, 25 bp, Saccharomyces pastorianus
tagtgaatcgcagcaaactcccgac

SEQ ID NO: 41795 - DNA, 25 bp, Saccharomyces pastorianus
cggcctgttggataaagcccttaca

SEQ ID NO: 41796 - DNA, 25 bp, Saccharomyces pastorianus
tcccttaccgacttgctagatgaca

SEQ ID NO: 41797 - DNA, 25 bp, Saccharomyces pastorianus
gactggttggaaactttccggcctg

SEQ ID NO: 41798 - DNA, 25 bp, Saccharomyces pastorianus
gaatttgccatttcgtgtctaaagg

SEQ ID NO: 41799 - DNA, 25 bp, Saccharomyces pastorianus
aacgagcaactcagccatgtggtct

SEQ ID NO: 41800 - DNA, 25 bp, Saccharomyces pastorianus
gcaatgcggttgctatctcatcgaa

SEQ ID NO: 41801 - DNA, 25 bp, Saccharomyces pastorianus
gatagcgctgttatgtcatcgtcct

SEQ ID NO: 41802 - DNA, 25 bp, Saccharomyces pastorianus
aacgtggaggcactaactcacgcct

SEQ ID NO: 41803 - DNA, 25 bp, Saccharomyces pastorianus
aagtcccaagaatccatgttcgcac

SEQ ID NO: 41804 - DNA, 25 bp, Saccharomyces pastorianus
aaagcctctcgcacgatatttggta

SEQ ID NO: 41805 - DNA, 25 bp, Saccharomyces pastorianus
aagtggcgaccaactgtttgaaggg

SEQ ID NO: 41806 - DNA, 25 bp, Saccharomyces pastorianus
cagaaaccgaggcagatcctagttt

SEQ ID NO: 41807 - DNA, 25 bp, Saccharomyces pastorianus
tctaacgtgtcgtgtctcgaaatat

SEQ ID NO: 41808 - DNA, 25 bp, Saccharomyces pastorianus
ggtacagaaacggacgctgtctcat

SEQ ID NO: 41809 - DNA, 25 bp, Saccharomyces pastorianus
gatcctagtttagcgttaccattga

SEQ ID NO: 41810 - DNA, 25 bp, Saccharomyces pastorianus
attcaaaccttgaccacgtcacagg

SEQ ID NO: 41811 - DNA, 25 bp, Saccharomyces pastorianus
gtacgttacttatgatcggtgacac

SEQ ID NO: 41812 - DNA, 25 bp, Saccharomyces pastorianus
gctgtctcatcttttgacgatcaaa

SEQ ID NO: 41813 - DNA, 25 bp, Saccharomyces pastorianus
gtgctttcgaggataggacttcata

SEQ ID NO: 41814 - DNA, 25 bp, Saccharomyces pastorianus
agagcctcgttgtcttgttatcaag

SEQ ID NO: 41815 - DNA, 25 bp, Saccharomyces pastorianus
gaagcatttctggagcatggctgta

SEQ ID NO: 41816 - DNA, 25 bp, Saccharomyces pastorianus
aatctaggtttgctttgttcggata

SEQ ID NO: 41817 - DNA, 25 bp, Saccharomyces pastorianus
gcgatccggtgaataacgttcctat

SEQ ID NO: 41818 - DNA, 25 bp, Saccharomyces pastorianus
ttccttttcctcacaactcatagaa

SEQ ID NO: 41819 - DNA, 25 bp, Saccharomyces pastorianus
ctacttcccgacttttctaagatca

SEQ ID NO: 41820 - DNA, 25 bp, Saccharomyces pastorianus
ggagatgtcaacaccatgcctactt

SEQ ID NO: 41821 - DNA, 25 bp, Saccharomyces pastorianus
gatatttctactggcgatccggtga

SEQ ID NO: 41822 - DNA, 25 bp, Saccharomyces pastorianus
aggacattcatgttgcgctcaagaa

SEQ ID NO: 41823 - DNA, 25 bp, Saccharomyces pastorianus
acgttcctattcagttggtggttga

SEQ ID NO: 41824 - DNA, 25 bp, Saccharomyces pastorianus
tatctatcctatcctggtcgttata

SEQ ID NO: 41825 - DNA, 25 bp, Saccharomyces pastorianus
gaacccagcttggacaatggctttt

SEQ ID NO: 41826 - DNA, 25 bp, Saccharomyces pastorianus
catggtcccaattcaagtctcgttg

SEQ ID NO: 41827 - DNA, 25 bp, Saccharomyces pastorianus
gttaataccaccaatgcgcagctag

SEQ ID NO: 41828 - DNA, 25 bp, Saccharomyces pastorianus
acaccgttccttttatatctctatt

SEQ ID NO: 41829 - DNA, 25 bp, Saccharomyces pastorianus
gagacaggtttgtttccagcagcga

SEQ ID NO: 41830 - DNA, 25 bp, Saccharomyces pastorianus
ggcgtttcagatgatgtccgactca

SEQ ID NO: 41831 - DNA, 25 bp, Saccharomyces pastorianus
ggtcggctatacatccagtatccat

SEQ ID NO: 41832 - DNA, 25 bp, Saccharomyces pastorianus
gcccaggtcaccgtcaaggttaata

SEQ ID NO: 41833 - DNA, 25 bp, Saccharomyces pastorianus
gaatcaatcctgtttcaagtcccgc

SEQ ID NO: 41834 - DNA, 25 bp, Saccharomyces pastorianus
agactatcataataccgcgttccac

SEQ ID NO: 41835 - DNA, 25 bp, Saccharomyces pastorianus
attcttcaagtcatagggtttcgca

SEQ ID NO: 41836 - DNA, 25 bp, Saccharomyces pastorianus
gagacgatacatctacttattcgag

SEQ ID NO: 41837 - DNA, 25 bp, Saccharomyces pastorianus
tcgcatattccttcttcagttttga

SEQ ID NO: 41838 - DNA, 25 bp, Saccharomyces pastorianus
aaaggccattggtgtaacctccttg

SEQ ID NO: 41839 - DNA, 25 bp, Saccharomyces pastorianus
aagttccattttgccaatctgagaa

SEQ ID NO: 41840 - DNA, 25 bp, Saccharomyces pastorianus
gttttgccaccaacttttgcatctt

SEQ ID NO: 41841 - DNA, 25 bp, Saccharomyces pastorianus
gggacaacgtctaccctagagacta

SEQ ID NO: 41842 - DNA, 25 bp, Saccharomyces pastorianus
aatcggttcctttcaactcgcatat

SEQ ID NO: 41843 - DNA, 25 bp, Saccharomyces pastorianus
agagaggctcgccagcaatcggttc

SEQ ID NO: 41844 - DNA, 25 bp, Saccharomyces pastorianus
taacctccttgtcttacgatgatga

SEQ ID NO: 41845 - DNA, 25 bp, Saccharomyces pastorianus
tcttagctaacgataccgatccgac

SEQ ID NO: 41846 - DNA, 25 bp, Saccharomyces pastorianus
gacagccggcatcaagttcatcaaa

SEQ ID NO: 41847 - DNA, 25 bp, Saccharomyces pastorianus
gtcaatgacggcgaaatccaccaca

SEQ ID NO: 41848 - DNA, 25 bp, Saccharomyces pastorianus
gtggactgtgtctctgatctaggca

SEQ ID NO: 41849 - DNA, 25 bp, Saccharomyces pastorianus
ttgtacctgatagccggcaacgacg

SEQ ID NO: 41850 - DNA, 25 bp, Saccharomyces pastorianus
gtgggtcaaccactgatccagttgg

SEQ ID NO: 41851 - DNA, 25 bp, Saccharomyces pastorianus
gttttaccaagatcatcgtcgtcgc

SEQ ID NO: 41852 - DNA, 25 bp, Saccharomyces pastorianus
gatctaggcacgctgcaacaggtgt

SEQ ID NO: 41853 - DNA, 25 bp, Saccharomyces pastorianus
cgacgggaccatgttgtacctgata

SEQ ID NO: 41854 - DNA, 25 bp, Saccharomyces pastorianus
acaactccttgacgacatcaggcgg

SEQ ID NO: 41855 - DNA, 25 bp, Saccharomyces pastorianus
tgtgccgctgatgaactggatgcca

SEQ ID NO: 41856 - DNA, 25 bp, Saccharomyces pastorianus
gaacttttcgattaccatgatgctg

SEQ ID NO: 41857 - DNA, 25 bp, Saccharomyces pastorianus
gagagaccgcgaaagctttaccagg

SEQ ID NO: 41858 - DNA, 25 bp, Saccharomyces pastorianus
gctttaccaggctgagcaaagacga

SEQ ID NO: 41859 - DNA, 25 bp, Saccharomyces pastorianus
gaaaaaagctttgctcaagggcact

SEQ ID NO: 41860 - DNA, 25 bp, Saccharomyces pastorianus
aactgaatgagtacttgaatgccaa

SEQ ID NO: 41861 - DNA, 25 bp, Saccharomyces pastorianus
taggaaatccctgcgagaccagctg

SEQ ID NO: 41862 - DNA, 25 bp, Saccharomyces pastorianus
gtcatctgcggccaataatacgagt

SEQ ID NO: 41863 - DNA, 25 bp, Saccharomyces pastorianus
tcaagggcactaacgctacggctaa

SEQ ID NO: 41864 - DNA, 25 bp, Saccharomyces pastorianus
taacgctacggctaatccagaaggg

SEQ ID NO: 41865 - DNA, 25 bp, Saccharomyces pastorianus
aacaagcctggatagcaacatacaa

SEQ ID NO: 41866 - DNA, 25 bp, Saccharomyces pastorianus
gaatgccaaggcaactagctttgaa

SEQ ID NO: 41867 - DNA, 25 bp, Saccharomyces pastorianus
gacgaattagcattctaccagaaca

SEQ ID NO: 41868 - DNA, 25 bp, Saccharomyces pastorianus
gaggatcaattgactcccatcggga

SEQ ID NO: 41869 - DNA, 25 bp, Saccharomyces pastorianus
ggcccattgttgtaccatttcgaaa

SEQ ID NO: 41870 - DNA, 25 bp, Saccharomyces pastorianus
gggcctatgtccatatgtgctggct

SEQ ID NO: 41871 - DNA, 25 bp, Saccharomyces pastorianus
aaatgcctggacttcgagctaatgc

SEQ ID NO: 41872 - DNA, 25 bp, Saccharomyces pastorianus
aaggtcaatgattccacacccttga

SEQ ID NO: 41873 - DNA, 25 bp, Saccharomyces pastorianus
atgcccgggtacatgtgtcatttct

SEQ ID NO: 41874 - DNA, 25 bp, Saccharomyces pastorianus
ttagagttgtctggcgacgctatca

SEQ ID NO: 41875 - DNA, 25 bp, Saccharomyces pastorianus
tactccgggttccaggacaaggtca

SEQ ID NO: 41876 - DNA, 25 bp, Saccharomyces pastorianus
attcttgcattctttttcccattgg

SEQ ID NO: 41877 - DNA, 25 bp, Saccharomyces pastorianus
atatgggcgccacgtaggtctagaa

SEQ ID NO: 41878 - DNA, 25 bp, Saccharomyces pastorianus
aaagcccggtggaatctggtgcaat

SEQ ID NO: 41879 - DNA, 25 bp, Saccharomyces pastorianus
atgaactacgggagtcgcaagcgtt

SEQ ID NO: 41880 - DNA, 25 bp, Saccharomyces pastorianus
agtgccgtccatccagtcgaactgt

SEQ ID NO: 41881 - DNA, 25 bp, Saccharomyces pastorianus
ataaattggccaacctgacgactcg

SEQ ID NO: 41882 - DNA, 25 bp, Saccharomyces pastorianus
tactcagtactttctgctgacctag

SEQ ID NO: 41883 - DNA, 25 bp, Saccharomyces pastorianus
gtcgaactgtcggtatactcagtac

SEQ ID NO: 41884 - DNA, 25 bp, Saccharomyces pastorianus
tcattcttatgctacggagggttcg

SEQ ID NO: 41885 - DNA, 25 bp, Saccharomyces pastorianus
ttctgctgacctagacggcttgtac

SEQ ID NO: 41886 - DNA, 25 bp, Saccharomyces pastorianus
ggaacctttcaagcccacgatggat

SEQ ID NO: 41887 - DNA, 25 bp, Saccharomyces pastorianus
cggcttgtaccagtccatcaatgaa

SEQ ID NO: 41888 - DNA, 25 bp, Saccharomyces pastorianus
gtcgcaagcgttactcattcttatg

SEQ ID NO: 41889 - DNA, 25 bp, Saccharomyces pastorianus
gacgactcgcgtgaacacgcttaca

SEQ ID NO: 41890 - DNA, 25 bp, Saccharomyces pastorianus
gtcgtcgtcaatactgctacaaaga

SEQ ID NO: 41891 - DNA, 25 bp, Saccharomyces pastorianus
atgtcagccaaattcatgccctttt

SEQ ID NO: 41892 - DNA, 25 bp, Saccharomyces pastorianus
agtactgaatttccatccggttctc

SEQ ID NO: 41893 - DNA, 25 bp, Saccharomyces pastorianus
gatccttcattcgtatcgtcatcta

SEQ ID NO: 41894 - DNA, 25 bp, Saccharomyces pastorianus
cgtcatcgtcgtcatttgcaacaat

SEQ ID NO: 41895 - DNA, 25 bp, Saccharomyces pastorianus
aatgcctaaatctacgtccttatcg

SEQ ID NO: 41896 - DNA, 25 bp, Saccharomyces pastorianus
atgcccttttattctcaaacagcct

SEQ ID NO: 41897 - DNA, 25 bp, Saccharomyces pastorianus
aaatcaggtgtctttgtcgtcatcg

SEQ ID NO: 41898 - DNA, 25 bp, Saccharomyces pastorianus
agcttcatccttacgttcaagtgca

SEQ ID NO: 41899 - DNA, 25 bp, Saccharomyces pastorianus
aaccttctttttcatcatcagcaac

SEQ ID NO: 41900 - DNA, 25 bp, Saccharomyces pastorianus
ttacgtgtctccacagcagaatgca

SEQ ID NO: 41901 - DNA, 25 bp, Saccharomyces pastorianus
aagggacaccattagcagtttcatt

SEQ ID NO: 41902 - DNA, 25 bp, Saccharomyces pastorianus
aaggccatagtcgtcatcaatcaag

SEQ ID NO: 41903 - DNA, 25 bp, Saccharomyces pastorianus
aatcctcattgggtcttataccggt

SEQ ID NO: 41904 - DNA, 25 bp, Saccharomyces pastorianus
gttatactccagctatttggcccgt

SEQ ID NO: 41905 - DNA, 25 bp, Saccharomyces pastorianus
gtcgttccgcgataaatgtttccta

SEQ ID NO: 41906 - DNA, 25 bp, Saccharomyces pastorianus
ggaacttattcatatcgcctacttt

SEQ ID NO: 41907 - DNA, 25 bp, Saccharomyces pastorianus
gaggcaggcgccatcaatgtttttg

SEQ ID NO: 41908 - DNA, 25 bp, Saccharomyces pastorianus
gaaaatgtttctccattcaacccaa

SEQ ID NO: 41909 - DNA, 25 bp, Saccharomyces pastorianus
ttataccggtagcttctgccacttc

SEQ ID NO: 41910 - DNA, 25 bp, Saccharomyces pastorianus
gggacatcataaacacacttcttct

SEQ ID NO: 41911 - DNA, 25 bp, Saccharomyces pastorianus
aattcaagacccattcgcggataat

SEQ ID NO: 41912 - DNA, 25 bp, Saccharomyces pastorianus
ggtgggttctaccagatccaagcaa

SEQ ID NO: 41913 - DNA, 25 bp, Saccharomyces pastorianus
ttggacgacgactgcgtaagcgcaa

SEQ ID NO: 41914 - DNA, 25 bp, Saccharomyces pastorianus
aatgccatggagctctaactcgaat

SEQ ID NO: 41915 - DNA, 25 bp, Saccharomyces pastorianus
gaccgctcacaatgggaacttcaaa

SEQ ID NO: 41916 - DNA, 25 bp, Saccharomyces pastorianus
aagactggtccgaaaatgacttgaa

SEQ ID NO: 41917 - DNA, 25 bp, Saccharomyces pastorianus
acatttggtatcaacgccatgtgga

SEQ ID NO: 41918 - DNA, 25 bp, Saccharomyces pastorianus
gggttaatccccatagtccatgcat

SEQ ID NO: 41919 - DNA, 25 bp, Saccharomyces pastorianus
cagcaggccccttattggatatagt

SEQ ID NO: 41920 - DNA, 25 bp, Saccharomyces pastorianus
gaaagtgatccggatttcaacccaa

SEQ ID NO: 41921 - DNA, 25 bp, Saccharomyces pastorianus
gtgagacgactggatttttcttcaa

SEQ ID NO: 41922 - DNA, 25 bp, Saccharomyces pastorianus
gacttgaagattcccaaaggtttga

SEQ ID NO: 41923 - DNA, 25 bp, Saccharomyces pastorianus
gctcttcggtctaaattacctccaa

SEQ ID NO: 41924 - DNA, 25 bp, Saccharomyces pastorianus
aaaaagggacattgacacggtagca

SEQ ID NO: 41925 - DNA, 25 bp, Saccharomyces pastorianus
tccggtggtattatgacgaatgact

SEQ ID NO: 41926 - DNA, 25 bp, Saccharomyces pastorianus
atcgcaattatatccttataggtca

SEQ ID NO: 41927 - DNA, 25 bp, Saccharomyces pastorianus
cagacccttggactgtggaagagat

SEQ ID NO: 41928 - DNA, 25 bp, Saccharomyces pastorianus
gctaaacgacgccaatttgaacaag

SEQ ID NO: 41929 - DNA, 25 bp, Saccharomyces pastorianus
tgatgagaatccattcgccaacctt

SEQ ID NO: 41930 - DNA, 25 bp, Saccharomyces pastorianus
ttacctccaaatttcgacgagtatt

SEQ ID NO: 41931 - DNA, 25 bp, Saccharomyces pastorianus
ctgattgaattagctcttcggtcta

SEQ ID NO: 41932 - DNA, 25 bp, Saccharomyces pastorianus
gaatccattcgccaacctttataat

SEQ ID NO: 41933 - DNA, 25 bp, Saccharomyces pastorianus
ggaattcttatacagacccttggac

SEQ ID NO: 41934 - DNA, 25 bp, Saccharomyces pastorianus
gggtaccaggcactagtcgatatct

SEQ ID NO: 41935 - DNA, 25 bp, Saccharomyces pastorianus
gtcggagctcaataaggccttctgg

SEQ ID NO: 41936 - DNA, 25 bp, Saccharomyces pastorianus
tgccgcctagttcttgttcgtgaat

SEQ ID NO: 41937 - DNA, 25 bp, Saccharomyces pastorianus
aatagagccgtactccattttctgt

SEQ ID NO: 41938 - DNA, 25 bp, Saccharomyces pastorianus
atattagaatcgagccttaccggcc

SEQ ID NO: 41939 - DNA, 25 bp, Saccharomyces pastorianus
aatagacctggtgcttgaccacatc

SEQ ID NO: 41940 - DNA, 25 bp, Saccharomyces pastorianus
acatccatttctccttcaatgttgg

SEQ ID NO: 41941 - DNA, 25 bp, Saccharomyces pastorianus
gaaacatcacgctcgatacgctgga

SEQ ID NO: 41942 - DNA, 25 bp, Saccharomyces pastorianus
gaaaatcttgtgtacgagggcctca

SEQ ID NO: 41943 - DNA, 25 bp, Saccharomyces pastorianus
gaacagtctttcgttgctgggagcc

SEQ ID NO: 41944 - DNA, 25 bp, Saccharomyces pastorianus
gatatctgtagggagtctcgcccac

SEQ ID NO: 41945 - DNA, 25 bp, Saccharomyces pastorianus
gaacgtgttgtgatagaccttctac

SEQ ID NO: 41946 - DNA, 25 bp, Saccharomyces pastorianus
gagctcgtttcagttccagatggtg

SEQ ID NO: 41947 - DNA, 25 bp, Saccharomyces pastorianus
tatagatccaagttgctctggtagt

SEQ ID NO: 41948 - DNA, 25 bp, Saccharomyces pastorianus
acgcaatgagtttcccaagtgctaa

SEQ ID NO: 41949 - DNA, 25 bp, Saccharomyces pastorianus
aaggctgcattagagctctaccgaa

SEQ ID NO: 41950 - DNA, 25 bp, Saccharomyces pastorianus
aacatcgatgtcaacgtgggtgatt

SEQ ID NO: 41951 - DNA, 25 bp, Saccharomyces pastorianus
ctctggtagtggtatctttggtcgt

SEQ ID NO: 41952 - DNA, 25 bp, Saccharomyces pastorianus
aggtcttcagggacggaagcgccca

SEQ ID NO: 41953 - DNA, 25 bp, Saccharomyces pastorianus
agctggctgttcttctaacatcgat

SEQ ID NO: 41954 - DNA, 25 bp, Saccharomyces pastorianus
gcaacaactcgctgaaggctgcatt

SEQ ID NO: 41955 - DNA, 25 bp, Saccharomyces pastorianus
aactgaagttgttccttcttggcct

SEQ ID NO: 41956 - DNA, 25 bp, Saccharomyces pastorianus
atatgacacccacgaacaagctgct

SEQ ID NO: 41957 - DNA, 25 bp, Saccharomyces pastorianus
aaccagttatgcctgaccaacaaca

SEQ ID NO: 41958 - DNA, 25 bp, Saccharomyces pastorianus
taacattccacactttgccactgag

SEQ ID NO: 41959 - DNA, 25 bp, Saccharomyces pastorianus
gagtcaccactgcttatatcggtaa

SEQ ID NO: 41960 - DNA, 25 bp, Saccharomyces pastorianus
gccaacttcccattccaaggtagaa

SEQ ID NO: 41961 - DNA, 25 bp, Saccharomyces pastorianus
gtaaatccacaagcggtcgaccata

SEQ ID NO: 41962 - DNA, 25 bp, Saccharomyces pastorianus
gcaacagaggtatgccaccaagttc

SEQ ID NO: 41963 - DNA, 25 bp, Saccharomyces pastorianus
caataacaaccgtggtggcttccgt

SEQ ID NO: 41964 - DNA, 25 bp, Saccharomyces pastorianus
aatgggcgctatgccattgccatct

SEQ ID NO: 41965 - DNA, 25 bp, Saccharomyces pastorianus
ttcaatgggcatgccaatgggcgct

SEQ ID NO: 41966 - DNA, 25 bp, Saccharomyces pastorianus
catatcatcagaagtgctccaccaa

SEQ ID NO: 41967 - DNA, 25 bp, Saccharomyces pastorianus
tgccatgttaggtttggatgccgaa

SEQ ID NO: 41968 - DNA, 25 bp, Saccharomyces pastorianus
gtaagatgacgccatctggccataa

SEQ ID NO: 41969 - DNA, 25 bp, Saccharomyces pastorianus
tatgagggaagcacttgcctccggt

SEQ ID NO: 41970 - DNA, 25 bp, Saccharomyces pastorianus
ggatgccgaattagtttcacattca

SEQ ID NO: 41971 - DNA, 25 bp, Saccharomyces pastorianus
aacggcttttgaaggcggtgtcatt

SEQ ID NO: 41972 - DNA, 25 bp, Saccharomyces pastorianus
cttggctaccaagaggcgaactaat

SEQ ID NO: 41973 - DNA, 25 bp, Saccharomyces pastorianus
ttgcctccggtcaatttagagcctt

SEQ ID NO: 41974 - DNA, 25 bp, Saccharomyces pastorianus
aaaaggttaagctggtcctcgctgc

SEQ ID NO: 41975 - DNA, 25 bp, Saccharomyces pastorianus
gaatcgcacactaaactcgttgcag

SEQ ID NO: 41976 - DNA, 25 bp, Saccharomyces pastorianus
gtcattatcatcacacattcggcag

SEQ ID NO: 41977 - DNA, 25 bp, Saccharomyces pastorianus
gattgagtctcattgtgccatgtta

SEQ ID NO: 41978 - DNA, 25 bp, Saccharomyces pastorianus
gttcgtgtcccagcggaagttgtca

SEQ ID NO: 41979 - DNA, 25 bp, Saccharomyces pastorianus
aaattcactccacaaattcttcctg

SEQ ID NO: 41980 - DNA, 25 bp, Saccharomyces pastorianus
gggaaataccgtttacctgcataca

SEQ ID NO: 41981 - DNA, 25 bp, Saccharomyces pastorianus
gatcaagcccaagcggagccatgga

SEQ ID NO: 41982 - DNA, 25 bp, Saccharomyces pastorianus
acctgcatacaatttcccttatacg

SEQ ID NO: 41983 - DNA, 25 bp, Saccharomyces pastorianus
gagaactacctcacttgggaacgta

SEQ ID NO: 41984 - DNA, 25 bp, Saccharomyces pastorianus
ctggtggtgccattttcctaggaat

SEQ ID NO: 41985 - DNA, 25 bp, Saccharomyces pastorianus
aatctgtgcatgtcttgttcgtgtc

SEQ ID NO: 41986 - DNA, 25 bp, Saccharomyces pastorianus
gttgatacaaccacacacatgcttt

SEQ ID NO: 41987 - DNA, 25 bp, Saccharomyces pastorianus
ttcctcctctatcggtgaaatctgt

SEQ ID NO: 41988 - DNA, 25 bp, Saccharomyces pastorianus
gaaaccgttcattctttgctatcga

SEQ ID NO: 41989 - DNA, 25 bp, Saccharomyces pastorianus
aggaaatcacgaaagctgcagagta

SEQ ID NO: 41990 - DNA, 25 bp, Saccharomyces pastorianus
gttttttattgctcattcctctacg

SEQ ID NO: 41991 - DNA, 25 bp, Saccharomyces pastorianus
gttttgcactcagatgatattgctc

SEQ ID NO: 41992 - DNA, 25 bp, Saccharomyces pastorianus
ctaaagctaatggactctgttgaaa

SEQ ID NO: 41993 - DNA, 25 bp, Saccharomyces pastorianus
gctcgcccggtttttatgccaaaat

SEQ ID NO: 41994 - DNA, 25 bp, Saccharomyces pastorianus
aggtattgcctgtatcctcaagtac

SEQ ID NO: 41995 - DNA, 25 bp, Saccharomyces pastorianus
tggatgaatttctactgcacctaaa

SEQ ID NO: 41996 - DNA, 25 bp, Saccharomyces pastorianus
tcctctacgggctatttgcagggta

SEQ ID NO: 41997 - DNA, 25 bp, Saccharomyces pastorianus
aaaaaccataattctctgctcgccc

SEQ ID NO: 41998 - DNA, 25 bp, Saccharomyces pastorianus
aaaccctttgtatgcttcgaagctg

SEQ ID NO: 41999 - DNA, 25 bp, Saccharomyces pastorianus
gagcttgaccaactaacaggtattg

SEQ ID NO: 42000 - DNA, 25 bp, Saccharomyces pastorianus
attgacgctgacatcgaaggagttt

SEQ ID NO: 42001 - DNA, 25 bp, Saccharomyces pastorianus
ttctaggagttggtgccaggatcac

SEQ ID NO: 42002 - DNA, 25 bp, Saccharomyces pastorianus
acatcgtcactatttattggtcaga

SEQ ID NO: 42003 - DNA, 25 bp, Saccharomyces pastorianus
gagactgtctggttattcctaagga

SEQ ID NO: 42004 - DNA, 25 bp, Saccharomyces pastorianus
gttgcttcataagtggattcccaat

SEQ ID NO: 42005 - DNA, 25 bp, Saccharomyces pastorianus
gagatggttccgcaagtttttaaag

SEQ ID NO: 42006 - DNA, 25 bp, Saccharomyces pastorianus
caacggtttacttgaatggcaggat

SEQ ID NO: 42007 - DNA, 25 bp, Saccharomyces pastorianus
aacgttaatattcatccctccagta

SEQ ID NO: 42008 - DNA, 25 bp, Saccharomyces pastorianus
atggcaggataacgcgttgcttcat

SEQ ID NO: 42009 - DNA, 25 bp, Saccharomyces pastorianus
cctccagtatccttttcgctaatta

SEQ ID NO: 42010 - DNA, 25 bp, Saccharomyces pastorianus
ccaccggataccacacgatgggtaa

SEQ ID NO: 42011 - DNA, 25 bp, Saccharomyces pastorianus
aagccggctacggacaggagcagca

SEQ ID NO: 42012 - DNA, 25 bp, Saccharomyces pastorianus
gggcgacttccaccagtgtgcgcat

SEQ ID NO: 42013 - DNA, 25 bp, Saccharomyces pastorianus
gtttcccatcagagacttgccggag

SEQ ID NO: 42014 - DNA, 25 bp, Saccharomyces pastorianus
aacgccgccctcgttgttcaagagt

SEQ ID NO: 42015 - DNA, 25 bp, Saccharomyces pastorianus
ggactcgtcttgtccgtgcaacaga

SEQ ID NO: 42016 - DNA, 25 bp, Saccharomyces pastorianus
aggaggaactccgtcgccgtcaagt

SEQ ID NO: 42017 - DNA, 25 bp, Saccharomyces pastorianus
atcacgttccactataagccggcta

SEQ ID NO: 42018 - DNA, 25 bp, Saccharomyces pastorianus
aacaacgtgctgtttcccatcagag

SEQ ID NO: 42019 - DNA, 25 bp, Saccharomyces pastorianus
aattccaccgatatcaagccttgcg

SEQ ID NO: 42020 - DNA, 25 bp, Saccharomyces pastorianus
gagatcatcgagaccgtgctgaacg

SEQ ID NO: 42021 - DNA, 25 bp, Saccharomyces pastorianus
atatcaagccttgcgctatcaacac

SEQ ID NO: 42022 - DNA, 25 bp, Saccharomyces pastorianus
tgcggccaatactatccacgtaata

SEQ ID NO: 42023 - DNA, 25 bp, Saccharomyces pastorianus
ttcttcgccctacgttatcaatgaa

SEQ ID NO: 42024 - DNA, 25 bp, Saccharomyces pastorianus
gataactcggtagctcttgtgaaac

SEQ ID NO: 42025 - DNA, 25 bp, Saccharomyces pastorianus
gcatgatatgcacgcgacgaatagt

SEQ ID NO: 42026 - DNA, 25 bp, Saccharomyces pastorianus
ggtacaaagacctctgtgtccatca

SEQ ID NO: 42027 - DNA, 25 bp, Saccharomyces pastorianus
gaagtagcaatttccccagattcca

SEQ ID NO: 42028 - DNA, 25 bp, Saccharomyces pastorianus
agaaggataccatttcttcgcccta

SEQ ID NO: 42029 - DNA, 25 bp, Saccharomyces pastorianus
atatgtggcaagtgtctctgcggcc

SEQ ID NO: 42030 - DNA, 25 bp, Saccharomyces pastorianus
aattgaggtcggagccactgaggta

SEQ ID NO: 42031 - DNA, 25 bp, Saccharomyces pastorianus
acaatttgcattccacgctctttaa

SEQ ID NO: 42032 - DNA, 25 bp, Saccharomyces pastorianus
acttcatccttatcgtattgttttc

SEQ ID NO: 42033 - DNA, 25 bp, Saccharomyces pastorianus
gataagatcgagcactcgcccaata

SEQ ID NO: 42034 - DNA, 25 bp, Saccharomyces pastorianus
aacttcgatcgacaagctgttggat

SEQ ID NO: 42035 - DNA, 25 bp, Saccharomyces pastorianus
cacatatgatgtctttccaggccga

SEQ ID NO: 42036 - DNA, 25 bp, Saccharomyces pastorianus
gacatgatgatgatggctcccataa

SEQ ID NO: 42037 - DNA, 25 bp, Saccharomyces pastorianus
acaaacctgctgtgcgtgtgattca

SEQ ID NO: 42038 - DNA, 25 bp, Saccharomyces pastorianus
gctagccatggcagatcgcatcata

SEQ ID NO: 42039 - DNA, 25 bp, Saccharomyces pastorianus
atttttgcagcccttactatggaaa

SEQ ID NO: 42040 - DNA, 25 bp, Saccharomyces pastorianus
aatctgactattgcacacttccagc

SEQ ID NO: 42041 - DNA, 25 bp, Saccharomyces pastorianus
gaatgggcacggtcatgcttacttt

SEQ ID NO: 42042 - DNA, 25 bp, Saccharomyces pastorianus
gctgttggatattcacgcatacgac

SEQ ID NO: 42043 - DNA, 25 bp, Saccharomyces pastorianus
gattcagggcgtccgtgacacatat

SEQ ID NO: 42044 - DNA, 25 bp, Saccharomyces pastorianus
ggaggccagtcaccattctcagaga

SEQ ID NO: 42045 - DNA, 25 bp, Saccharomyces pastorianus
agagatgaaatgtctaccgcccgcc

SEQ ID NO: 42046 - DNA, 25 bp, Saccharomyces pastorianus
atagtcctggcctgcggtacgaagc

SEQ ID NO: 42047 - DNA, 25 bp, Saccharomyces pastorianus
atcttctcgagatctggcagcgtag

SEQ ID NO: 42048 - DNA, 25 bp, Saccharomyces pastorianus
gcacgtaacatcgaggctagtcaca

SEQ ID NO: 42049 - DNA, 25 bp, Saccharomyces pastorianus
ccctagctgtggtgttcgtgacgta

SEQ ID NO: 42050 - DNA, 25 bp, Saccharomyces pastorianus
tgccaagactcaatttcactccaat

SEQ ID NO: 42051 - DNA, 25 bp, Saccharomyces pastorianus
ttggattgcttcttcaacgatgcct

SEQ ID NO: 42052 - DNA, 25 bp, Saccharomyces pastorianus
aacgacgctaggatcttggattgct

SEQ ID NO: 42053 - DNA, 25 bp, Saccharomyces pastorianus
acgatgcctcagtcaacaagctact

SEQ ID NO: 42054 - DNA, 25 bp, Saccharomyces pastorianus
aggcgacgtttgtgttcttcataga

SEQ ID NO: 42055 - DNA, 25 bp, Saccharomyces pastorianus
tgtgcagtaccaaacttcttcagtg

SEQ ID NO: 42056 - DNA, 25 bp, Saccharomyces pastorianus
tccattttatccatcttcatcgaca

SEQ ID NO: 42057 - DNA, 25 bp, Saccharomyces pastorianus
gactccatcaactagcactgaactg

SEQ ID NO: 42058 - DNA, 25 bp, Saccharomyces pastorianus
gttactacagcgtcggaattttcca

SEQ ID NO: 42059 - DNA, 25 bp, Saccharomyces pastorianus
aaaacactatcctcgaccagttcat

SEQ ID NO: 42060 - DNA, 25 bp, Saccharomyces pastorianus
gaacaattgacgtcttcatcatcga

SEQ ID NO: 42061 - DNA, 25 bp, Saccharomyces pastorianus
attatcgccatatagttcttcgcca

SEQ ID NO: 42062 - DNA, 25 bp, Saccharomyces pastorianus
tgctaaaccagccatttcttcatca

SEQ ID NO: 42063 - DNA, 25 bp, Saccharomyces pastorianus
tgaactgacatcgactgctaaacca

SEQ ID NO: 42064 - DNA, 25 bp, Saccharomyces pastorianus
atctacatcgacgtctccattttat

SEQ ID NO: 42065 - DNA, 25 bp, Saccharomyces pastorianus
ctatttcaatgtcgtctgcttctac

SEQ ID NO: 42066 - DNA, 25 bp, Saccharomyces pastorianus
agaagggctgtatcgcgaccctcta

SEQ ID NO: 42067 - DNA, 25 bp, Saccharomyces pastorianus
gtgtcacaatcccaggaaggctccg

SEQ ID NO: 42068 - DNA, 25 bp, Saccharomyces pastorianus
aacacagcaagttcttctggctcag

SEQ ID NO: 42069 - DNA, 25 bp, Saccharomyces pastorianus
aaattctcatactttctcatcgtcc

SEQ ID NO: 42070 - DNA, 25 bp, Saccharomyces pastorianus
ttctggctcagcaccgagaagggct

SEQ ID NO: 42071 - DNA, 25 bp, Saccharomyces pastorianus
attctatcaaaatcagcaccccttc

SEQ ID NO: 42072 - DNA, 25 bp, Saccharomyces pastorianus
atggatcctcctgcgtcgagtggga

SEQ ID NO: 42073 - DNA, 25 bp, Saccharomyces pastorianus
ctctaaaccttctgcaggccaagaa

SEQ ID NO: 42074 - DNA, 25 bp, Saccharomyces pastorianus
ttttaacacttccaatactccaacg

SEQ ID NO: 42075 - DNA, 25 bp, Saccharomyces pastorianus
acagcaaattcaaccctggtccata

SEQ ID NO: 42076 - DNA, 25 bp, Saccharomyces pastorianus
gagcgtgccggaatatacacctgca

SEQ ID NO: 42077 - DNA, 25 bp, Saccharomyces pastorianus
aacggtttgagaggccacttgttcg

SEQ ID NO: 42078 - DNA, 25 bp, Saccharomyces pastorianus
acctatgtgctgcagaagcctctgt

SEQ ID NO: 42079 - DNA, 25 bp, Saccharomyces pastorianus
aagttcggtgtggacgtgatcgcac

SEQ ID NO: 42080 - DNA, 25 bp, Saccharomyces pastorianus
tgctacggcgcagaacttggaaatg

SEQ ID NO: 42081 - DNA, 25 bp, Saccharomyces pastorianus
tgacacgcagcggattgggaactct

SEQ ID NO: 42082 - DNA, 25 bp, Saccharomyces pastorianus
tacgttgcttacatggaatcacctc

SEQ ID NO: 42083 - DNA, 25 bp, Saccharomyces pastorianus
agactagtagccatcctgtgtacgt

SEQ ID NO: 42084 - DNA, 25 bp, Saccharomyces pastorianus
gtctccgctacaggccatggaatat

SEQ ID NO: 42085 - DNA, 25 bp, Saccharomyces pastorianus
ggaatcacctctgcgataacggttt

SEQ ID NO: 42086 - DNA, 25 bp, Saccharomyces pastorianus
gggaactctgaatcatacgttgctt

SEQ ID NO: 42087 - DNA, 25 bp, Saccharomyces pastorianus
aaatggcgctgcatgggctgccaac

SEQ ID NO: 42088 - DNA, 25 bp, Saccharomyces pastorianus
gaaggtccatatggatccaggccct

SEQ ID NO: 42089 - DNA, 25 bp, Saccharomyces pastorianus
catcctggttcacttgcagtggtgt

SEQ ID NO: 42090 - DNA, 25 bp, Saccharomyces pastorianus
gcccatcacttcaacaatgtcttac

SEQ ID NO: 42091 - DNA, 25 bp, Saccharomyces pastorianus
acgtccagcgccgattttgaatttg

SEQ ID NO: 42092 - DNA, 25 bp, Saccharomyces pastorianus
aaggaagcggtcagccatcctggtt

SEQ ID NO: 42093 - DNA, 25 bp, Saccharomyces pastorianus
gtccgattgcccatgctattgagtt

SEQ ID NO: 42094 - DNA, 25 bp, Saccharomyces pastorianus
ttgccactttccatgcgggaagacc

SEQ ID NO: 42095 - DNA, 25 bp, Saccharomyces pastorianus
cgcccgtttttgttgacactgctag

SEQ ID NO: 42096 - DNA, 25 bp, Saccharomyces pastorianus
aaaacactccttctgttgccagtaa

SEQ ID NO: 42097 - DNA, 25 bp, Saccharomyces pastorianus
gcgggaagacctaacgttgcagaat

SEQ ID NO: 42098 - DNA, 25 bp, Saccharomyces pastorianus
atgtcttacttttggcaggcggaac

SEQ ID NO: 42099 - DNA, 25 bp, Saccharomyces pastorianus
atttgtcaaagctctctcttcatac

SEQ ID NO: 42100 - DNA, 25 bp, Saccharomyces pastorianus
gataccggccattttgctcttgaga

SEQ ID NO: 42101 - DNA, 25 bp, Saccharomyces pastorianus
aatgtcatctctcagtaccatggcg

SEQ ID NO: 42102 - DNA, 25 bp, Saccharomyces pastorianus
ggcgctgaagcctaccggaaagatg

SEQ ID NO: 42103 - DNA, 25 bp, Saccharomyces pastorianus
gatcctgctgcttatacgctggaca

SEQ ID NO: 42104 - DNA, 25 bp, Saccharomyces pastorianus
tgattatggttctccggtaggcttc

SEQ ID NO: 42105 - DNA, 25 bp, Saccharomyces pastorianus
catctttagtgtttccggcgctgaa

SEQ ID NO: 42106 - DNA, 25 bp, Saccharomyces pastorianus
atactgagtctgttgatcctgctgc

SEQ ID NO: 42107 - DNA, 25 bp, Saccharomyces pastorianus
tacgctggacattgcgctcattcag

SEQ ID NO: 42108 - DNA, 25 bp, Saccharomyces pastorianus
gctcattcagcgtgtaggtcaaact

SEQ ID NO: 42109 - DNA, 25 bp, Saccharomyces pastorianus
aacattcccgttctagttgcttggg

SEQ ID NO: 42110 - DNA, 25 bp, Saccharomyces pastorianus
gaatcacgcctcacactagaagttg

SEQ ID NO: 42111 - DNA, 25 bp, Saccharomyces pastorianus
gaagtcaccgactctttgagcgtaa

SEQ ID NO: 42112 - DNA, 25 bp, Saccharomyces pastorianus
gaaggagcattgattccgaccggta

SEQ ID NO: 42113 - DNA, 25 bp, Saccharomyces pastorianus
tacaaaacctaccactttgggcgat

SEQ ID NO: 42114 - DNA, 25 bp, Saccharomyces pastorianus
gaaccaactgttcacttttataccg

SEQ ID NO: 42115 - DNA, 25 bp, Saccharomyces pastorianus
gggcgataatgctccagtttatgat

SEQ ID NO: 42116 - DNA, 25 bp, Saccharomyces pastorianus
ggaataccgtgcacaactagttcgt

SEQ ID NO: 42117 - DNA, 25 bp, Saccharomyces pastorianus
gacaagtctatcagtggtaccgaag

SEQ ID NO: 42118 - DNA, 25 bp, Saccharomyces pastorianus
tgaggcttatcatccagaatcacgc

SEQ ID NO: 42119 - DNA, 25 bp, Saccharomyces pastorianus
gtggcaaatttactcctagatcagg

SEQ ID NO: 42120 - DNA, 25 bp, Saccharomyces pastorianus
gaggctactcctatcaatatgacca

SEQ ID NO: 42121 - DNA, 25 bp, Saccharomyces pastorianus
gtgtcgtcgccatcgcttccggtgc

SEQ ID NO: 42122 - DNA, 25 bp, Saccharomyces pastorianus
ggtgtcgtcgccatcgcttccggtg

SEQ ID NO: 42123 - DNA, 25 bp, Saccharomyces pastorianus
accagccatctccagcgccttgtcc

SEQ ID NO: 42124 - DNA, 25 bp, Saccharomyces pastorianus
cctagctcaatcggacgaaagagtt

SEQ ID NO: 42125 - DNA, 25 bp, Saccharomyces pastorianus
ccaccaccaccctagctcaatcgga

SEQ ID NO: 42126 - DNA, 25 bp, Saccharomyces pastorianus
aattcgcttctatcgccgctggtgt

SEQ ID NO: 42127 - DNA, 25 bp, Saccharomyces pastorianus
aaattcgcttctatcgccgctggtg

SEQ ID NO: 42128 - DNA, 25 bp, Saccharomyces pastorianus
tggtgtcgtcgccatcgcttccggt

SEQ ID NO: 42129 - DNA, 25 bp, Saccharomyces pastorianus
gtcgccatcgcttccggtgccgccg

SEQ ID NO: 42130 - DNA, 25 bp, Saccharomyces pastorianus
attcgcttctatcgccgctggtgtc

SEQ ID NO: 42131 - DNA, 25 bp, Saccharomyces pastorianus
atcgcttccggtgccgccgccgcca

SEQ ID NO: 42132 - DNA, 25 bp, Saccharomyces pastorianus
cggtgcctccgcaactaccactcta

SEQ ID NO: 42133 - DNA, 25 bp, Saccharomyces pastorianus
ggtgcctccgcaactaccactctag

SEQ ID NO: 42134 - DNA, 25 bp, Saccharomyces pastorianus
gccgccggtgcctccgcaactacca

SEQ ID NO: 42135 - DNA, 25 bp, Saccharomyces pastorianus
ccgccggtgcctccgcaactaccac

SEQ ID NO: 42136 - DNA, 25 bp, Saccharomyces pastorianus
cgccgccggtgcctccgcaactacc

SEQ ID NO: 42137 - DNA, 25 bp, Saccharomyces pastorianus
cgccggtgcctccgcaactaccact

SEQ ID NO: 42138 - DNA, 25 bp, Saccharomyces pastorianus
gccggtgcctccgcaactaccactc

SEQ ID NO: 42139 - DNA, 25 bp, Saccharomyces pastorianus
ccggtgcctccgcaactaccactct

SEQ ID NO: 42140 - DNA, 25 bp, Saccharomyces pastorianus
atcgccgccggtgcctccgcaacta

SEQ ID NO: 42141 - DNA, 25 bp, Saccharomyces pastorianus
tcgccgccggtgcctccgcaactac

SEQ ID NO: 42142 - DNA, 25 bp, Saccharomyces pastorianus
gtgcctccgcaactaccactctagc

SEQ ID NO: 42143 - DNA, 25 bp, Saccharomyces pastorianus
ggaatttgattccaccatggcccaa

SEQ ID NO: 42144 - DNA, 25 bp, Saccharomyces pastorianus
agaggtaactggacgcgtgacatga

SEQ ID NO: 42145 - DNA, 25 bp, Saccharomyces pastorianus
gcaaggaagttggtcaaggcacaat

SEQ ID NO: 42146 - DNA, 25 bp, Saccharomyces pastorianus
gaattcattccaactttcagcaagg

SEQ ID NO: 42147 - DNA, 25 bp, Saccharomyces pastorianus
accatggcccaaacatccaaggata

SEQ ID NO: 42148 - DNA, 25 bp, Saccharomyces pastorianus
atttacaatcgccatttttggtggg

SEQ ID NO: 42149 - DNA, 25 bp, Saccharomyces pastorianus
cgaggcagaaccagtgtcaggattt

SEQ ID NO: 42150 - DNA, 25 bp, Saccharomyces pastorianus
gcaagaaactcacacgctttggaat

SEQ ID NO: 42151 - DNA, 25 bp, Saccharomyces pastorianus
aaagattctgtcgacctgggacgaa

SEQ ID NO: 42152 - DNA, 25 bp, Saccharomyces pastorianus
aggatattgatgtccagcaacaaga

SEQ ID NO: 42153 - DNA, 25 bp, Saccharomyces pastorianus
ggacgaagagttttgggccaacaga

SEQ ID NO: 42154 - DNA, 25 bp, Saccharomyces pastorianus
ctgcgcaaactgttgaagtcgctcc

SEQ ID NO: 42155 - DNA, 25 bp, Saccharomyces pastorianus
gagatccgcgagatcgaccaggtct

SEQ ID NO: 42156 - DNA, 25 bp, Saccharomyces pastorianus
gaacacagagcaagctgcgccggga

SEQ ID NO: 42157 - DNA, 25 bp, Saccharomyces pastorianus
gggctcacccaactgtacaaaaagt

SEQ ID NO: 42158 - DNA, 25 bp, Saccharomyces pastorianus
agtcgctcctgctgaactatttaga

SEQ ID NO: 42159 - DNA, 25 bp, Saccharomyces pastorianus
gtactaagcatcaacccggacgtgt

SEQ ID NO: 42160 - DNA, 25 bp, Saccharomyces pastorianus
agagtccctcatcatgctgctggag

SEQ ID NO: 42161 - DNA, 25 bp, Saccharomyces pastorianus
catacaggacaccttgagagccggc

SEQ ID NO: 42162 - DNA, 25 bp, Saccharomyces pastorianus
agaggagattacttgcgccctggac

SEQ ID NO: 42163 - DNA, 25 bp, Saccharomyces pastorianus
gtacaaggtccaagagctgcgcaaa

SEQ ID NO: 42164 - DNA, 25 bp, Saccharomyces pastorianus
tcaacccggacgtgtatgagcgcaa

SEQ ID NO: 42165 - DNA, 25 bp, Saccharomyces pastorianus
ataattatggccttgtcgaatatca

SEQ ID NO: 42166 - DNA, 25 bp, Saccharomyces pastorianus
tgttgaaatgcaggacgccccatcg

SEQ ID NO: 42167 - DNA, 25 bp, Saccharomyces pastorianus
tttgcccaggcaattccaagaaata

SEQ ID NO: 42168 - DNA, 25 bp, Saccharomyces pastorianus
agtttaacatcctcagaccagcaag

SEQ ID NO: 42169 - DNA, 25 bp, Saccharomyces pastorianus
gaaatagactcattgttctctgatg

SEQ ID NO: 42170 - DNA, 25 bp, Saccharomyces pastorianus
atgtattcagtgttcagtggaggtt

SEQ ID NO: 42171 - DNA, 25 bp, Saccharomyces pastorianus
aaattctggctctatgatcggccct

SEQ ID NO: 42172 - DNA, 25 bp, Saccharomyces pastorianus
aaatgttgagtttccctctatgaaa

SEQ ID NO: 42173 - DNA, 25 bp, Saccharomyces pastorianus
tgaacagctcaaaatgcattaccaa

SEQ ID NO: 42174 - DNA, 25 bp, Saccharomyces pastorianus
cgccccatcgtgcatcgaagattat

SEQ ID NO: 42175 - DNA, 25 bp, Saccharomyces pastorianus
aagaatcagttatcccctaatgtta

SEQ ID NO: 42176 - DNA, 25 bp, Saccharomyces pastorianus
aaataccacagttcagcacgcagtt

SEQ ID NO: 42177 - DNA, 25 bp, Saccharomyces pastorianus
gagtcccgggacagcctggaaatac

SEQ ID NO: 42178 - DNA, 25 bp, Saccharomyces pastorianus
tggtgcgccgggtaaacgagtacct

SEQ ID NO: 42179 - DNA, 25 bp, Saccharomyces pastorianus
gggctccgccgagtttcagatgacc

SEQ ID NO: 42180 - DNA, 25 bp, Saccharomyces pastorianus
agtcgcgcgccctagaacagtacgt

SEQ ID NO: 42181 - DNA, 25 bp, Saccharomyces pastorianus
agccggcggctatcgtcggagacaa

SEQ ID NO: 42182 - DNA, 25 bp, Saccharomyces pastorianus
gttccgaagacgctatacccaagga

SEQ ID NO: 42183 - DNA, 25 bp, Saccharomyces pastorianus
tatacccaaggagcacgacgaagac

SEQ ID NO: 42184 - DNA, 25 bp, Saccharomyces pastorianus
cttctcgctttgtgtgggcctatgt

SEQ ID NO: 42185 - DNA, 25 bp, Saccharomyces pastorianus
ggcctatgtttcaagagtcgcgcgc

SEQ ID NO: 42186 - DNA, 25 bp, Saccharomyces pastorianus
ataacgcactttccaaacgtctacg

SEQ ID NO: 42187 - DNA, 25 bp, Saccharomyces pastorianus
aggtggctcaaggtgctgttcatca

SEQ ID NO: 42188 - DNA, 25 bp, Saccharomyces pastorianus
aatagcgttcttctgcatcgataaa

SEQ ID NO: 42189 - DNA, 25 bp, Saccharomyces pastorianus
catcgccttccatttcttaggtatt

SEQ ID NO: 42190 - DNA, 25 bp, Saccharomyces pastorianus
gtggcatctacagggttttcatcct

SEQ ID NO: 42191 - DNA, 25 bp, Saccharomyces pastorianus
gtaccgtaccatggcaacaatccga

SEQ ID NO: 42192 - DNA, 25 bp, Saccharomyces pastorianus
aacatcacacctacgggtacgtttg

SEQ ID NO: 42193 - DNA, 25 bp, Saccharomyces pastorianus
atcttgttgattggtctgccgggca

SEQ ID NO: 42194 - DNA, 25 bp, Saccharomyces pastorianus
agcattggtcgtatgtgccatcgcc

SEQ ID NO: 42195 - DNA, 25 bp, Saccharomyces pastorianus
acaatcttctgttacttctgctatc

SEQ ID NO: 42196 - DNA, 25 bp, Saccharomyces pastorianus
ggttctttggtcattgcatctactt

SEQ ID NO: 42197 - DNA, 25 bp, Saccharomyces pastorianus
gccgctgtggcatgcttatcaacaa

SEQ ID NO: 42198 - DNA, 25 bp, Saccharomyces pastorianus
gaatgcggtcttcaagtactgtcta

SEQ ID NO: 42199 - DNA, 25 bp, Saccharomyces pastorianus
gacacgaatggttatactccagtga

SEQ ID NO: 42200 - DNA, 25 bp, Saccharomyces pastorianus
aaatcatgtccatttgtcgccggga

SEQ ID NO: 42201 - DNA, 25 bp, Saccharomyces pastorianus
gagtactagcattcctgttcaatat

SEQ ID NO: 42202 - DNA, 25 bp, Saccharomyces pastorianus
atcaggcacgatatcaccgatgagc

SEQ ID NO: 42203 - DNA, 25 bp, Saccharomyces pastorianus
ccattctctctcatttcttcaaaat

SEQ ID NO: 42204 - DNA, 25 bp, Saccharomyces pastorianus
gacaaatctccaatccgctataaat

SEQ ID NO: 42205 - DNA, 25 bp, Saccharomyces pastorianus
gacgttcttgaaccgatcactgaag

SEQ ID NO: 42206 - DNA, 25 bp, Saccharomyces pastorianus
cagcggagctgatacatgggacaaa

SEQ ID NO: 42207 - DNA, 25 bp, Saccharomyces pastorianus
agtggatttgcgctacccaagggca

SEQ ID NO: 42208 - DNA, 25 bp, Saccharomyces pastorianus
gaagtatcgcagctaccagcggagc

SEQ ID NO: 42209 - DNA, 25 bp, Saccharomyces pastorianus
atctatccaaattgccactgcgttt

SEQ ID NO: 42210 - DNA, 25 bp, Saccharomyces pastorianus
tgcgtttccaagttcattccccgat

SEQ ID NO: 42211 - DNA, 25 bp, Saccharomyces pastorianus
ggcattccaagaacgtagggctcaa

SEQ ID NO: 42212 - DNA, 25 bp, Saccharomyces pastorianus
attccccgatgttttaggcttgcct

SEQ ID NO: 42213 - DNA, 25 bp, Saccharomyces pastorianus
aagtacgcattcagtggaggccaag

SEQ ID NO: 42214 - DNA, 25 bp, Saccharomyces pastorianus
caggtttttcccagctttgcaaggt

SEQ ID NO: 42215 - DNA, 25 bp, Saccharomyces pastorianus
ggaggccaagtctctgctgatatgc

SEQ ID NO: 42216 - DNA, 25 bp, Saccharomyces pastorianus
gtattcaaagcctgcattgctgcat

SEQ ID NO: 42217 - DNA, 25 bp, Saccharomyces pastorianus
attgctgcattccaggtttttccca

SEQ ID NO: 42218 - DNA, 25 bp, Saccharomyces pastorianus
gattccatgtgccatcgatcaagat

SEQ ID NO: 42219 - DNA, 25 bp, Saccharomyces pastorianus
atgctaccacataagctggtctggg

SEQ ID NO: 42220 - DNA, 25 bp, Saccharomyces pastorianus
ccaatttcgcttgctggatctaaaa

SEQ ID NO: 42221 - DNA, 25 bp, Saccharomyces pastorianus
ttcaatgaccactacgacggccaat

SEQ ID NO: 42222 - DNA, 25 bp, Saccharomyces pastorianus
tagacgttcccagcgaaatcctaag

SEQ ID NO: 42223 - DNA, 25 bp, Saccharomyces pastorianus
aggatgggtcgagcacaactgttca

SEQ ID NO: 42224 - DNA, 25 bp, Saccharomyces pastorianus
agatctcatctcgtggttcactacg

SEQ ID NO: 42225 - DNA, 25 bp, Saccharomyces pastorianus
aaatcctaaggcactgctggtccag

SEQ ID NO: 42226 - DNA, 25 bp, Saccharomyces pastorianus
gagatcctagcctggttcaatgacc

SEQ ID NO: 42227 - DNA, 25 bp, Saccharomyces pastorianus
ggaaccatgtaccttccaatgcaag

SEQ ID NO: 42228 - DNA, 25 bp, Saccharomyces pastorianus
gtgtaaggccttggaagacgtcaca

SEQ ID NO: 42229 - DNA, 25 bp, Saccharomyces pastorianus
aaatgctcgagcacgtagacgttcc

SEQ ID NO: 42230 - DNA, 25 bp, Saccharomyces pastorianus
agtatagaggctggcttgtccggaa

SEQ ID NO: 42231 - DNA, 25 bp, Saccharomyces pastorianus
tcgattccccacatccattaatagt

SEQ ID NO: 42232 - DNA, 25 bp, Saccharomyces pastorianus
gtcgggacttacttacaattggcta

SEQ ID NO: 42233 - DNA, 25 bp, Saccharomyces pastorianus
aatgttttcaggatcgtcgattccc

SEQ ID NO: 42234 - DNA, 25 bp, Saccharomyces pastorianus
gaagcggactccatgacagctggtg

SEQ ID NO: 42235 - DNA, 25 bp, Saccharomyces pastorianus
attcaaccagattcgcatttgcttg

SEQ ID NO: 42236 - DNA, 25 bp, Saccharomyces pastorianus
tagccaccaacctagacgattccat

SEQ ID NO: 42237 - DNA, 25 bp, Saccharomyces pastorianus
aaggtactctaagctatcggatgaa

SEQ ID NO: 42238 - DNA, 25 bp, Saccharomyces pastorianus
ggaaattggcctaactcatatgaga

SEQ ID NO: 42239 - DNA, 25 bp, Saccharomyces pastorianus
gttctaaaacgtctcttggaggtca

SEQ ID NO: 42240 - DNA, 25 bp, Saccharomyces pastorianus
gatatcgtaacaacatccttccgtg

SEQ ID NO: 42241 - DNA, 25 bp, Saccharomyces pastorianus
ggacatggcttagtcaacgctgata

SEQ ID NO: 42242 - DNA, 25 bp, Saccharomyces pastorianus
cactctaccaaggtgcggtgttatt

SEQ ID NO: 42243 - DNA, 25 bp, Saccharomyces pastorianus
ttcaggttctacaacgttattcgta

SEQ ID NO: 42244 - DNA, 25 bp, Saccharomyces pastorianus
gtatttacttctgagctctactcaa

SEQ ID NO: 42245 - DNA, 25 bp, Saccharomyces pastorianus
aacatcggattgtgttcctttggcg

SEQ ID NO: 42246 - DNA, 25 bp, Saccharomyces pastorianus
aagccgatttgtgcattcaggttct

SEQ ID NO: 42247 - DNA, 25 bp, Saccharomyces pastorianus
ttcgaaggcgaaacaatctccattg

SEQ ID NO: 42248 - DNA, 25 bp, Saccharomyces pastorianus
ggattccaatatttcactctaccaa

SEQ ID NO: 42249 - DNA, 25 bp, Saccharomyces pastorianus
agaaccccatattctttatgaacgt

SEQ ID NO: 42250 - DNA, 25 bp, Saccharomyces pastorianus
aagaggtctcctgataacaactaag

SEQ ID NO: 42251 - DNA, 25 bp, Saccharomyces pastorianus
gaacctctgatcattatttgtgcta

SEQ ID NO: 42252 - DNA, 25 bp, Saccharomyces pastorianus
gttcctttggcgtttgacattttga

SEQ ID NO: 42253 - DNA, 25 bp, Saccharomyces pastorianus
gcccaggatttcaccatttataacg

SEQ ID NO: 42254 - DNA, 25 bp, Saccharomyces pastorianus
tacaagaaattgtcccgccagtcac

SEQ ID NO: 42255 - DNA, 25 bp, Saccharomyces pastorianus
gccagtcactgagcggatcaccaag

SEQ ID NO: 42256 - DNA, 25 bp, Saccharomyces pastorianus
tacgaagacaacacagcccaggatt

SEQ ID NO: 42257 - DNA, 25 bp, Saccharomyces pastorianus
gaaattacccatgattgcgtaccga

SEQ ID NO: 42258 - DNA, 25 bp, Saccharomyces pastorianus
gaaaacgtacttgtgaccttgatca

SEQ ID NO: 42259 - DNA, 25 bp, Saccharomyces pastorianus
tttataacggcattcactcctcaaa

SEQ ID NO: 42260 - DNA, 25 bp, Saccharomyces pastorianus
ctaaaactatccattggcccagcat

SEQ ID NO: 42261 - DNA, 25 bp, Saccharomyces pastorianus
acaacgaacgccacttgtgtgcgag

SEQ ID NO: 42262 - DNA, 25 bp, Saccharomyces pastorianus
ttacgtgcgaactgtttcccacaac

SEQ ID NO: 42263 - DNA, 25 bp, Saccharomyces pastorianus
aatactaaactacatgatccccacg

SEQ ID NO: 42264 - DNA, 25 bp, Saccharomyces pastorianus
aagacattgtcgctgcagcgctaca

SEQ ID NO: 42265 - DNA, 25 bp, Saccharomyces pastorianus
ttgggtccacttcgttgttgcgcag

SEQ ID NO: 42266 - DNA, 25 bp, Saccharomyces pastorianus
gattagtcccttgcctgagaagtgg

SEQ ID NO: 42267 - DNA, 25 bp, Saccharomyces pastorianus
gagaaccaatgagccactggacaaa

SEQ ID NO: 42268 - DNA, 25 bp, Saccharomyces pastorianus
ggaggagtacgattcgctactgaat

SEQ ID NO: 42269 - DNA, 25 bp, Saccharomyces pastorianus
acggttgatataccagtctcgcaaa

SEQ ID NO: 42270 - DNA, 25 bp, Saccharomyces pastorianus
actgggatatctattattgggcgac

SEQ ID NO: 42271 - DNA, 25 bp, Saccharomyces pastorianus
gcagccttaggtggtacagcagcga

SEQ ID NO: 42272 - DNA, 25 bp, Saccharomyces pastorianus
ttttgtctgggtttgccgctaaata

SEQ ID NO: 42273 - DNA, 25 bp, Saccharomyces pastorianus
gaatcactagccctctggttgggtc

SEQ ID NO: 42274 - DNA, 25 bp, Saccharomyces pastorianus
gaactacgagattagtcccttgcct

SEQ ID NO: 42275 - DNA, 25 bp, Saccharomyces pastorianus
aagggatatgccacactctacgtag

SEQ ID NO: 42276 - DNA, 25 bp, Saccharomyces pastorianus
gaagattcgccgcttggataccaac

SEQ ID NO: 42277 - DNA, 25 bp, Saccharomyces pastorianus
atctgtttaacgcacccatatacgg

SEQ ID NO: 42278 - DNA, 25 bp, Saccharomyces pastorianus
gactacacttacacagctggcgatg

SEQ ID NO: 42279 - DNA, 25 bp, Saccharomyces pastorianus
gtattaatgaaagcgcatcccctca

SEQ ID NO: 42280 - DNA, 25 bp, Saccharomyces pastorianus
cctcgaaatcgttactgcaggcatt

SEQ ID NO: 42281 - DNA, 25 bp, Saccharomyces pastorianus
atagcctcacaattgggtctcgttt

SEQ ID NO: 42282 - DNA, 25 bp, Saccharomyces pastorianus
gacgaattcttccttgtcactacag

SEQ ID NO: 42283 - DNA, 25 bp, Saccharomyces pastorianus
acagcatgacattttccctctagat

SEQ ID NO: 42284 - DNA, 25 bp, Saccharomyces pastorianus
gagtttgtgatgcatacttccctat

SEQ ID NO: 42285 - DNA, 25 bp, Saccharomyces pastorianus
gaccccactaatcctagcgtagagt

SEQ ID NO: 42286 - DNA, 25 bp, Saccharomyces pastorianus
atactgcggcgtgtgcgacgtctat

SEQ ID NO: 42287 - DNA, 25 bp, Saccharomyces pastorianus
atggtgttgtgacgtgtgcttccaa

SEQ ID NO: 42288 - DNA, 25 bp, Saccharomyces pastorianus
ggcttcacaattgggtctcatttca

SEQ ID NO: 42289 - DNA, 25 bp, Saccharomyces pastorianus
agattcgcctcttgggtatcaacta

SEQ ID NO: 42290 - DNA, 25 bp, Saccharomyces pastorianus
agtaccgggctcagaagattcgcct

SEQ ID NO: 42291 - DNA, 25 bp, Saccharomyces pastorianus
ccccatgggtgatatttgcggacta

SEQ ID NO: 42292 - DNA, 25 bp, Saccharomyces pastorianus
gaaatgcacgacgagttcttcttcc

SEQ ID NO: 42293 - DNA, 25 bp, Saccharomyces pastorianus
acaggaacttgtttgacgcaccaat

SEQ ID NO: 42294 - DNA, 25 bp, Saccharomyces pastorianus
agagagctcggacacatactgcggc

SEQ ID NO: 42295 - DNA, 25 bp, Saccharomyces pastorianus
aactaaattgcatagccgtggcttc

SEQ ID NO: 42296 - DNA, 25 bp, Saccharomyces pastorianus
caagaggctccttgagggcattcaa

SEQ ID NO: 42297 - DNA, 25 bp, Saccharomyces pastorianus
atccaagtttgttcagaccaccatg

SEQ ID NO: 42298 - DNA, 25 bp, Saccharomyces pastorianus
atctcaatcctctaattcatccaag

SEQ ID NO: 42299 - DNA, 25 bp, Saccharomyces pastorianus
ggtcctccggatgctacattgactt

SEQ ID NO: 42300 - DNA, 25 bp, Saccharomyces pastorianus
gtttacgctctgattacacacggta

SEQ ID NO: 42301 - DNA, 25 bp, Saccharomyces pastorianus
tctcagttactaaagggtcctccgg

SEQ ID NO: 42302 - DNA, 25 bp, Saccharomyces pastorianus
attgacttcaggtggttcgttgcct

SEQ ID NO: 42303 - DNA, 25 bp, Saccharomyces pastorianus
ttgcctgtatctccaagaccgttgg

SEQ ID NO: 42304 - DNA, 25 bp, Saccharomyces pastorianus
gccacaggtgttgcagctctagaaa

SEQ ID NO: 42305 - DNA, 25 bp, Saccharomyces pastorianus
gatacttcatacaccatcacgaggg

SEQ ID NO: 42306 - DNA, 25 bp, Saccharomyces pastorianus
ttatttccaatactgtccctcaaga

SEQ ID NO: 42307 - DNA, 25 bp, Saccharomyces pastorianus
ggtgacgacacttgtatcttctcaa

SEQ ID NO: 42308 - DNA, 25 bp, Saccharomyces pastorianus
gacgctattttatctattgctagaa

SEQ ID NO: 42309 - DNA, 25 bp, Saccharomyces pastorianus
tccctaacggtattccgctagttat

SEQ ID NO: 42310 - DNA, 25 bp, Saccharomyces pastorianus
agaatgatcaaggttcctccaccgg

SEQ ID NO: 42311 - DNA, 25 bp, Saccharomyces pastorianus
gaaaatcttggagggcgtctctgac

SEQ ID NO: 42312 - DNA, 25 bp, Saccharomyces pastorianus
gcgaggagagatacctgtgttccaa

SEQ ID NO: 42313 - DNA, 25 bp, Saccharomyces pastorianus
gggaagccgcctaaagtcgacttga

SEQ ID NO: 42314 - DNA, 25 bp, Saccharomyces pastorianus
gagacccttcttaaatgacgctatt

SEQ ID NO: 42315 - DNA, 25 bp, Saccharomyces pastorianus
ttctatttggatccggaatcagcta

SEQ ID NO: 42316 - DNA, 25 bp, Saccharomyces pastorianus
ggtagttctgttagatcgctgttga

SEQ ID NO: 42317 - DNA, 25 bp, Saccharomyces pastorianus
ggatgtcgacatccctaacggtatt

SEQ ID NO: 42318 - DNA, 25 bp, Saccharomyces pastorianus
gtcactagattgagacccttcttaa

SEQ ID NO: 42319 - DNA, 25 bp, Saccharomyces pastorianus
tgattgccctacaagagttcacctc

SEQ ID NO: 42320 - DNA, 25 bp, Saccharomyces pastorianus
ccacaagatttgctcgtttatttaa

SEQ ID NO: 42321 - DNA, 25 bp, Saccharomyces pastorianus
attttagatcaagtcgtcactgagt

SEQ ID NO: 42322 - DNA, 25 bp, Saccharomyces pastorianus
gatcactccaaagttgttaaccgat

SEQ ID NO: 42323 - DNA, 25 bp, Saccharomyces pastorianus
gtgccggtgctgttcatctggaaaa

SEQ ID NO: 42324 - DNA, 25 bp, Saccharomyces pastorianus
tacggtcctttacatgattgcccta

SEQ ID NO: 42325 - DNA, 25 bp, Saccharomyces pastorianus
gttaaccgatttgtattaccacgag

SEQ ID NO: 42326 - DNA, 25 bp, Saccharomyces pastorianus
gaacaaacagttcctcagcaaacta

SEQ ID NO: 42327 - DNA, 25 bp, Saccharomyces pastorianus
ctgctccattcagagtcgtagacga

SEQ ID NO: 42328 - DNA, 25 bp, Saccharomyces pastorianus
agtacactgtgttatggccggttct

SEQ ID NO: 42329 - DNA, 25 bp, Saccharomyces pastorianus
ggtcatgccattttggaacctaagc

SEQ ID NO: 42330 - DNA, 25 bp, Saccharomyces pastorianus
gtagctttcctacttttgccaagat

SEQ ID NO: 42331 - DNA, 25 bp, Saccharomyces pastorianus
agagccgccggagcccaaggaatta

SEQ ID NO: 42332 - DNA, 25 bp, Saccharomyces pastorianus
atagtgaggccttgtgtcattccag

SEQ ID NO: 42333 - DNA, 25 bp, Saccharomyces pastorianus
gattttttaacgagccaactgtact

SEQ ID NO: 42334 - DNA, 25 bp, Saccharomyces pastorianus
agacttccaagcactttccattgca

SEQ ID NO: 42335 - DNA, 25 bp, Saccharomyces pastorianus
aggcagagttatcctgtcacactgt

SEQ ID NO: 42336 - DNA, 25 bp, Saccharomyces pastorianus
gaacagcattcgaaggatcccatgt

SEQ ID NO: 42337 - DNA, 25 bp, Saccharomyces pastorianus
gaggcacaatatgtccacggttccg

SEQ ID NO: 42338 - DNA, 25 bp, Saccharomyces pastorianus
atgggcgatcacgtttcaccggaat

SEQ ID NO: 42339 - DNA, 25 bp, Saccharomyces pastorianus
aatatactcccagctaggcgatttt

SEQ ID NO: 42340 - DNA, 25 bp, Saccharomyces pastorianus
accggaatccctgcgtttgaaatca

SEQ ID NO: 42341 - DNA, 25 bp, Saccharomyces pastorianus
gaaagtactggtgccgatacgaaaa

SEQ ID NO: 42342 - DNA, 25 bp, Saccharomyces pastorianus
gacctagagtctttaattggcttta

SEQ ID NO: 42343 - DNA, 25 bp, Saccharomyces pastorianus
tagcgaaggcgtctcattggtttga

SEQ ID NO: 42344 - DNA, 25 bp, Saccharomyces pastorianus
acgtgttcacgatctactttctagt

SEQ ID NO: 42345 - DNA, 25 bp, Saccharomyces pastorianus
gtcatctgcgaacgaaatctcggca

SEQ ID NO: 42346 - DNA, 25 bp, Saccharomyces pastorianus
acagatacgactacacagagcattg

SEQ ID NO: 42347 - DNA, 25 bp, Saccharomyces pastorianus
tagtgactgctttgaggaaaccgaa

SEQ ID NO: 42348 - DNA, 25 bp, Saccharomyces pastorianus
agctagaacgcattactcggcggat

SEQ ID NO: 42349 - DNA, 25 bp, Saccharomyces pastorianus
atgacacttcggtacgtgttcacga

SEQ ID NO: 42350 - DNA, 25 bp, Saccharomyces pastorianus
tcagaacctgtgaggcaaatgccta

SEQ ID NO: 42351 - DNA, 25 bp, Saccharomyces pastorianus
gagcattgtaggacgtcatctgcga

SEQ ID NO: 42352 - DNA, 25 bp, Saccharomyces pastorianus
gatactctccgttcattgctgaaag

SEQ ID NO: 42353 - DNA, 25 bp, Saccharomyces pastorianus
tagatacccggtaactttccacatg

SEQ ID NO: 42354 - DNA, 25 bp, Saccharomyces pastorianus
accgggagttgcttggatggcatca

SEQ ID NO: 42355 - DNA, 25 bp, Saccharomyces pastorianus
gaagagaactctcctaccgggagtt

SEQ ID NO: 42356 - DNA, 25 bp, Saccharomyces pastorianus
gaaactagcaacattttaccacacg

SEQ ID NO: 42357 - DNA, 25 bp, Saccharomyces pastorianus
aaagctttgatactggacccgactg

SEQ ID NO: 42358 - DNA, 25 bp, Saccharomyces pastorianus
gcatgatttgcgttttcaacctcaa

SEQ ID NO: 42359 - DNA, 25 bp, Saccharomyces pastorianus
aagagtgtacggcttctagataccc

SEQ ID NO: 42360 - DNA, 25 bp, Saccharomyces pastorianus
aactttccacatgccatactgggat

SEQ ID NO: 42361 - DNA, 25 bp, Saccharomyces pastorianus
gcatcacacgctcattgcatgattt

SEQ ID NO: 42362 - DNA, 25 bp, Saccharomyces pastorianus
gactgataggccaaccgctacagaa

SEQ ID NO: 42363 - DNA, 25 bp, Saccharomyces pastorianus
agggctacattctctttgcattgca

SEQ ID NO: 42364 - DNA, 25 bp, Saccharomyces pastorianus
taattatgccgtccccgaatgacgt

SEQ ID NO: 42365 - DNA, 25 bp, Saccharomyces pastorianus
tgcattgcagcgtatctatcaaagc

SEQ ID NO: 42366 - DNA, 25 bp, Saccharomyces pastorianus
tgaagattccgagccactcgtaatt

SEQ ID NO: 42367 - DNA, 25 bp, Saccharomyces pastorianus
gacgtacagtttttattagaggccg

SEQ ID NO: 42368 - DNA, 25 bp, Saccharomyces pastorianus
caataggtgccgatcttgtactaaa

SEQ ID NO: 42369 - DNA, 25 bp, Saccharomyces pastorianus
ctgtgtgatgttagcgatcccgcat

SEQ ID NO: 42370 - DNA, 25 bp, Saccharomyces pastorianus
aagggtgacctacttgttacaatag

SEQ ID NO: 42371 - DNA, 25 bp, Saccharomyces pastorianus
agcagtatcagggacagggttctat

SEQ ID NO: 42372 - DNA, 25 bp, Saccharomyces pastorianus
gcaactattcttcagttttctgtgt

SEQ ID NO: 42373 - DNA, 25 bp, Saccharomyces pastorianus
ggcagctactaagccgttagaacga

SEQ ID NO: 42374 - DNA, 25 bp, Saccharomyces pastorianus
taggcaccagtaatcatgctattag

SEQ ID NO: 42375 - DNA, 25 bp, Saccharomyces pastorianus
agaccgttaacacgcatcctagtac

SEQ ID NO: 42376 - DNA, 25 bp, Saccharomyces pastorianus
gaacaacggtatgtcttacgcaaga

SEQ ID NO: 42377 - DNA, 25 bp, Saccharomyces pastorianus
gcagacttcagtactcttcaggaga

SEQ ID NO: 42378 - DNA, 25 bp, Saccharomyces pastorianus
gcgaccatggtagaacttttgttgc

SEQ ID NO: 42379 - DNA, 25 bp, Saccharomyces pastorianus
ataccatttggtaaggctggccatg

SEQ ID NO: 42380 - DNA, 25 bp, Saccharomyces pastorianus
aatcccgtagataacaagcctgtaa

SEQ ID NO: 42381 - DNA, 25 bp, Saccharomyces pastorianus
agtgatgaacgccttcgctaaaaga

SEQ ID NO: 42382 - DNA, 25 bp, Saccharomyces pastorianus
atagtgtttctctgatatttgcaaa

SEQ ID NO: 42383 - DNA, 25 bp, Saccharomyces pastorianus
caagccagttctaaggtgtccattt

SEQ ID NO: 42384 - DNA, 25 bp, Saccharomyces pastorianus
gagagcatctctcaagccagttcta

SEQ ID NO: 42385 - DNA, 25 bp, Saccharomyces pastorianus
ctttgcccggttcaagctgagaatt

SEQ ID NO: 42386 - DNA, 25 bp, Saccharomyces pastorianus
acttcgagaccgagtggaatctgca

SEQ ID NO: 42387 - DNA, 25 bp, Saccharomyces pastorianus
tgggcaacctgattcgcgcagagct

SEQ ID NO: 42388 - DNA, 25 bp, Saccharomyces pastorianus
gctgggcgcgctgaagacgaacttc

SEQ ID NO: 42389 - DNA, 25 bp, Saccharomyces pastorianus
gtttgccgcctacaaggtcgagcac

SEQ ID NO: 42390 - DNA, 25 bp, Saccharomyces pastorianus
aacgccgtggtgatcacgttcgaga

SEQ ID NO: 42391 - DNA, 25 bp, Saccharomyces pastorianus
agcattatcaataagctgggcgcgc

SEQ ID NO: 42392 - DNA, 25 bp, Saccharomyces pastorianus
gcgcagagctgcttaacgacaggaa

SEQ ID NO: 42393 - DNA, 25 bp, Saccharomyces pastorianus
gctaaagatcgagcccgacaccaag

SEQ ID NO: 42394 - DNA, 25 bp, Saccharomyces pastorianus
gatttgaactattcctgctgggtga

SEQ ID NO: 42395 - DNA, 25 bp, Saccharomyces pastorianus
acaggaaggtgctgtttgccgccta

SEQ ID NO: 42396 - DNA, 25 bp, Saccharomyces pastorianus
ggcagctaacaaatatccgaccatt

SEQ ID NO: 42397 - DNA, 25 bp, Saccharomyces pastorianus
acacatatattaccttcttccatcg

SEQ ID NO: 42398 - DNA, 25 bp, Saccharomyces pastorianus
gcctgtgacttataagctgcatatt

SEQ ID NO: 42399 - DNA, 25 bp, Saccharomyces pastorianus
gcctaaaaggctccacggcaaaggt

SEQ ID NO: 42400 - DNA, 25 bp, Saccharomyces pastorianus
ccaacggaaggtatctctcacgaga

SEQ ID NO: 42401 - DNA, 25 bp, Saccharomyces pastorianus
atgctttaccacatccaacggaagg

SEQ ID NO: 42402 - DNA, 25 bp, Saccharomyces pastorianus
gaaaatcaagattcagcctgtgact

SEQ ID NO: 42403 - DNA, 25 bp, Saccharomyces pastorianus
gaaggtatctctgtatcgacgctga

SEQ ID NO: 42404 - DNA, 25 bp, Saccharomyces pastorianus
tttccaactcccgatacacatatat

SEQ ID NO: 42405 - DNA, 25 bp, Saccharomyces pastorianus
ttcttccatcgcaaatgtgccacaa

SEQ ID NO: 42406 - DNA, 25 bp, Saccharomyces pastorianus
gacgtttttactcgtaaggcagcta

SEQ ID NO: 42407 - DNA, 25 bp, Saccharomyces pastorianus
gttttgagctccagattattccgtt

SEQ ID NO: 42408 - DNA, 25 bp, Saccharomyces pastorianus
gaacctagttattgctttagcgtct

SEQ ID NO: 42409 - DNA, 25 bp, Saccharomyces pastorianus
taaaggcttcggactcggtgagtgt

SEQ ID NO: 42410 - DNA, 25 bp, Saccharomyces pastorianus
atcataccatatgccgatcctgttt

SEQ ID NO: 42411 - DNA, 25 bp, Saccharomyces pastorianus
acagtctctttgcaacctaatcatc

SEQ ID NO: 42412 - DNA, 25 bp, Saccharomyces pastorianus
tagaatagcatacatcccacgcagc

SEQ ID NO: 42413 - DNA, 25 bp, Saccharomyces pastorianus
gaatacccagaattgttgcccctga

SEQ ID NO: 42414 - DNA, 25 bp, Saccharomyces pastorianus
ggactgtgtcggtgatagctttgaa

SEQ ID NO: 42415 - DNA, 25 bp, Saccharomyces pastorianus
cggagagtaagttgtcttcgctaca

SEQ ID NO: 42416 - DNA, 25 bp, Saccharomyces pastorianus
gaaacttcttccgatcgaacctagt

SEQ ID NO: 42417 - DNA, 25 bp, Saccharomyces pastorianus
tgatatattacaccctcgttggata

SEQ ID NO: 42418 - DNA, 25 bp, Saccharomyces pastorianus
aaaaatgctctctgaagggtcggaa

SEQ ID NO: 42419 - DNA, 25 bp, Saccharomyces pastorianus
aaggtgcctcagtggttgaatgttc

SEQ ID NO: 42420 - DNA, 25 bp, Saccharomyces pastorianus
tatcagcaatgcaccgattccaact

SEQ ID NO: 42421 - DNA, 25 bp, Saccharomyces pastorianus
gattccaactctgtcaagaaggctg

SEQ ID NO: 42422 - DNA, 25 bp, Saccharomyces pastorianus
atgactctcttggtaacgccattgg

SEQ ID NO: 42423 - DNA, 25 bp, Saccharomyces pastorianus
ttgttaccttatttagtggccgcta

SEQ ID NO: 42424 - DNA, 25 bp, Saccharomyces pastorianus
tacgggagaccgtggaggcttaact

SEQ ID NO: 42425 - DNA, 25 bp, Saccharomyces pastorianus
ttaactgtgtcgaggcattagccgc

SEQ ID NO: 42426 - DNA, 25 bp, Saccharomyces pastorianus
agtggccgctaatcaagtgaattac

SEQ ID NO: 42427 - DNA, 25 bp, Saccharomyces pastorianus
gcaagtgaactgctgtcccatttct

SEQ ID NO: 42428 - DNA, 25 bp, Saccharomyces pastorianus
ttgaatgttcttgggcccgtttaga

SEQ ID NO: 42429 - DNA, 25 bp, Saccharomyces pastorianus
aatgcggaaccacctgtgttccaaa

SEQ ID NO: 42430 - DNA, 25 bp, Saccharomyces pastorianus
aagtgcgcctgtgaatgcgaatgct

SEQ ID NO: 42431 - DNA, 25 bp, Saccharomyces pastorianus
aaagttgcaaatgcggtgccacctg

SEQ ID NO: 42432 - DNA, 25 bp, Saccharomyces pastorianus
atgcgaatgctgcaaagactcttgc

SEQ ID NO: 42433 - DNA, 25 bp, Saccharomyces pastorianus
gtgttccaaactgctctggtggtga

SEQ ID NO: 42434 - DNA, 25 bp, Saccharomyces pastorianus
gactcttgcaaatgcggaaccacct

SEQ ID NO: 42435 - DNA, 25 bp, Saccharomyces pastorianus
aagtacccaatgtaacagttgcggt

SEQ ID NO: 42436 - DNA, 25 bp, Saccharomyces pastorianus
gctgaaaagaagtgcgcctgtgaat

SEQ ID NO: 42437 - DNA, 25 bp, Saccharomyces pastorianus
aagtgcggccacaagtctgaaagta

SEQ ID NO: 42438 - DNA, 25 bp, Saccharomyces pastorianus
gtgaaaagtgtaagtgcggccacaa

SEQ ID NO: 42439 - DNA, 25 bp, Saccharomyces pastorianus
ggccacaagtctgaaagtacccaat

SEQ ID NO: 42440 - DNA, 25 bp, Saccharomyces pastorianus
ggctgggcgttctttgcaggacaca

SEQ ID NO: 42441 - DNA, 25 bp, Saccharomyces pastorianus
ttcggtgcccaagtcggtgaggatt

SEQ ID NO: 42442 - DNA, 25 bp, Saccharomyces pastorianus
gtagacaaggacctgcctgaactca

SEQ ID NO: 42443 - DNA, 25 bp, Saccharomyces pastorianus
ggaggattcgtggtctcaatttgta

SEQ ID NO: 42444 - DNA, 25 bp, Saccharomyces pastorianus
gatacacctgatacggaaaccaaga

SEQ ID NO: 42445 - DNA, 25 bp, Saccharomyces pastorianus
gaggattcgctagaaagccacggaa

SEQ ID NO: 42446 - DNA, 25 bp, Saccharomyces pastorianus
agaaatcgtggacttctcggcccag

SEQ ID NO: 42447 - DNA, 25 bp, Saccharomyces pastorianus
ggagacagcctatatcgatacacct

SEQ ID NO: 42448 - DNA, 25 bp, Saccharomyces pastorianus
gaagatgaggacgtcccaccccaat

SEQ ID NO: 42449 - DNA, 25 bp, Saccharomyces pastorianus
gtgaacgccttttccagggacaaga

SEQ ID NO: 42450 - DNA, 25 bp, Saccharomyces pastorianus
agaggttcaattcgttcggtgccca

SEQ ID NO: 42451 - DNA, 25 bp, Saccharomyces pastorianus
gaagatgatccggacacctgggttc

SEQ ID NO: 42452 - DNA, 25 bp, Saccharomyces pastorianus
aaacttcggccgtgagcaatctatt

SEQ ID NO: 42453 - DNA, 25 bp, Saccharomyces pastorianus
gacacctgggttcaagtcgctgaag

SEQ ID NO: 42454 - DNA, 25 bp, Saccharomyces pastorianus
cagcaagttgctcgacaccatgaat

SEQ ID NO: 42455 - DNA, 25 bp, Saccharomyces pastorianus
agaacatcctgtatacccactacaa

SEQ ID NO: 42456 - DNA, 25 bp, Saccharomyces pastorianus
gaagtatatccatccgttgccaata

SEQ ID NO: 42457 - DNA, 25 bp, Saccharomyces pastorianus
gatcttcttgagcttacagtatgac

SEQ ID NO: 42458 - DNA, 25 bp, Saccharomyces pastorianus
aaagcatacgagaccgccgaagaaa

SEQ ID NO: 42459 - DNA, 25 bp, Saccharomyces pastorianus
gtaaggccaacaaggcatcccatgg

SEQ ID NO: 42460 - DNA, 25 bp, Saccharomyces pastorianus
gtcgctgaagcttacattgatctgg

SEQ ID NO: 42461 - DNA, 25 bp, Saccharomyces pastorianus
aaggccgcccaaaagacagcgttag

SEQ ID NO: 42462 - DNA, 25 bp, Saccharomyces pastorianus
gattaggtgttcttcgatgcttgaa

SEQ ID NO: 42463 - DNA, 25 bp, Saccharomyces pastorianus
agtgtcacaaactgctccagtcgaa

SEQ ID NO: 42464 - DNA, 25 bp, Saccharomyces pastorianus
tgctccagtcgaaacagtacaagat

SEQ ID NO: 42465 - DNA, 25 bp, Saccharomyces pastorianus
gaattttaattccacacctgtgccc

SEQ ID NO: 42466 - DNA, 25 bp, Saccharomyces pastorianus
gagagccgccgggagaactgctaaa

SEQ ID NO: 42467 - DNA, 25 bp, Saccharomyces pastorianus
gaaacgatctccaagctatctcagc

SEQ ID NO: 42468 - DNA, 25 bp, Saccharomyces pastorianus
tagaggatttccctgcagatgcagt

SEQ ID NO: 42469 - DNA, 25 bp, Saccharomyces pastorianus
gtatcttccaaattcacctcaattc

SEQ ID NO: 42470 - DNA, 25 bp, Saccharomyces pastorianus
ctgtgcccacttcatctaagaatgt

SEQ ID NO: 42471 - DNA, 25 bp, Saccharomyces pastorianus
gcagtagatatctcagtgtcacaaa

SEQ ID NO: 42472 - DNA, 25 bp, Saccharomyces pastorianus
tatctcagcagcaattacaagtatt

SEQ ID NO: 42473 - DNA, 25 bp, Saccharomyces pastorianus
gattgggcagtatcacaaaccacaa

SEQ ID NO: 42474 - DNA, 25 bp, Saccharomyces pastorianus
gtccgatttgaatggttactccgat

SEQ ID NO: 42475 - DNA, 25 bp, Saccharomyces pastorianus
ttgcgagccggtacttcggtgatag

SEQ ID NO: 42476 - DNA, 25 bp, Saccharomyces pastorianus
taaggccgaaggtaccactgaatta

SEQ ID NO: 42477 - DNA, 25 bp, Saccharomyces pastorianus
ggaagatcacgtttacaagaccaag

SEQ ID NO: 42478 - DNA, 25 bp, Saccharomyces pastorianus
tacgaattctggtgatttgacgatt

SEQ ID NO: 42479 - DNA, 25 bp, Saccharomyces pastorianus
tcaaaccaaggtacacgatcagcgt

SEQ ID NO: 42480 - DNA, 25 bp, Saccharomyces pastorianus
aaagatcgttgaatcccaagtggaa

SEQ ID NO: 42481 - DNA, 25 bp, Saccharomyces pastorianus
tattgacaccaaacaactgccagaa

SEQ ID NO: 42482 - DNA, 25 bp, Saccharomyces pastorianus
ggatgccacatctgcagacgatact

SEQ ID NO: 42483 - DNA, 25 bp, Saccharomyces pastorianus
gacgattatatccaagagtgccgaa

SEQ ID NO: 42484 - DNA, 25 bp, Saccharomyces pastorianus
actggagatgcttctgtcagagccg

SEQ ID NO: 42485 - DNA, 25 bp, Saccharomyces pastorianus
tagggccttagttggtcaagtcgaa

SEQ ID NO: 42486 - DNA, 25 bp, Saccharomyces pastorianus
gcaagttgatttctctaacactctt

SEQ ID NO: 42487 - DNA, 25 bp, Saccharomyces pastorianus
aggtccctaggattggatgttccaa

SEQ ID NO: 42488 - DNA, 25 bp, Saccharomyces pastorianus
cagagccgtctttgctacggtgaat

SEQ ID NO: 42489 - DNA, 25 bp, Saccharomyces pastorianus
actcaagccgcatcgttcataaacc

SEQ ID NO: 42490 - DNA, 25 bp, Saccharomyces pastorianus
atgatcatgctaccactaacatgtg

SEQ ID NO: 42491 - DNA, 25 bp, Saccharomyces pastorianus
gatctcttccctgatggatgcatta

SEQ ID NO: 42492 - DNA, 25 bp, Saccharomyces pastorianus
ttaaactctgaacgtagggccttag

SEQ ID NO: 42493 - DNA, 25 bp, Saccharomyces pastorianus
ttgaaaactactccgaacactccct

SEQ ID NO: 42494 - DNA, 25 bp, Saccharomyces pastorianus
ctgcctgggttattatgaggtccct

SEQ ID NO: 42495 - DNA, 25 bp, Saccharomyces pastorianus
caaaataccgatgttactatctgtc

SEQ ID NO: 42496 - DNA, 25 bp, Saccharomyces pastorianus
tgaaaggcaattctccctgtggcag

SEQ ID NO: 42497 - DNA, 25 bp, Saccharomyces pastorianus
tccctgtggcaggtacaacatgata

SEQ ID NO: 42498 - DNA, 25 bp, Saccharomyces pastorianus
taacttagccttggtttttgcgcct

SEQ ID NO: 42499 - DNA, 25 bp, Saccharomyces pastorianus
gaaagctatctctagattccagaaa

SEQ ID NO: 42500 - DNA, 25 bp, Saccharomyces pastorianus
aaatcagggtcacagctagtcattg

SEQ ID NO: 42501 - DNA, 25 bp, Saccharomyces pastorianus
atactaccagtgtaagtgccttaaa

SEQ ID NO: 42502 - DNA, 25 bp, Saccharomyces pastorianus
agaaagcttcctaatccgatcttca

SEQ ID NO: 42503 - DNA, 25 bp, Saccharomyces pastorianus
atctgaatgctgtcactggtgtatt

SEQ ID NO: 42504 - DNA, 25 bp, Saccharomyces pastorianus
taccatttacgggaggaaagctatc

SEQ ID NO: 42505 - DNA, 25 bp, Saccharomyces pastorianus
atccgatcttcacgttccaagttta

SEQ ID NO: 42506 - DNA, 25 bp, Saccharomyces pastorianus
aaccatggatgttccctgcgatgag

SEQ ID NO: 42507 - DNA, 25 bp, Saccharomyces pastorianus
gttgcaaggttcatcccacaggagt

SEQ ID NO: 42508 - DNA, 25 bp, Saccharomyces pastorianus
gctccagtggagactttcgttgcaa

SEQ ID NO: 42509 - DNA, 25 bp, Saccharomyces pastorianus
gtactagaaacgtcggtgctccagt

SEQ ID NO: 42510 - DNA, 25 bp, Saccharomyces pastorianus
agatctgctggttgcctgacagtat

SEQ ID NO: 42511 - DNA, 25 bp, Saccharomyces pastorianus
ctgaacctaagtccctctgaaatga

SEQ ID NO: 42512 - DNA, 25 bp, Saccharomyces pastorianus
ggagttttccaagttcgaccatatt

SEQ ID NO: 42513 - DNA, 25 bp, Saccharomyces pastorianus
ggatggtacgttgtgtctgcctcaa

SEQ ID NO: 42514 - DNA, 25 bp, Saccharomyces pastorianus
tattgcctccaagctgaacctaagt

SEQ ID NO: 42515 - DNA, 25 bp, Saccharomyces pastorianus
gaatggccatctagtgctcgagaac

SEQ ID NO: 42516 - DNA, 25 bp, Saccharomyces pastorianus
agcccgatccattacagcatattgc

SEQ ID NO: 42517 - DNA, 25 bp, Saccharomyces pastorianus
tctaggtctaaaggcgaggtttcga

SEQ ID NO: 42518 - DNA, 25 bp, Saccharomyces pastorianus
atatagaccgcatggactgtttcct

SEQ ID NO: 42519 - DNA, 25 bp, Saccharomyces pastorianus
gaaccaagtccatcagaagctttat

SEQ ID NO: 42520 - DNA, 25 bp, Saccharomyces pastorianus
ggactgtttcctatcatcggacaat

SEQ ID NO: 42521 - DNA, 25 bp, Saccharomyces pastorianus
atttttgattccttcaatcctgtga

SEQ ID NO: 42522 - DNA, 25 bp, Saccharomyces pastorianus
gatgatcggcggtaaacactataat

SEQ ID NO: 42523 - DNA, 25 bp, Saccharomyces pastorianus
gggcatatggctatacaagtttcat

SEQ ID NO: 42524 - DNA, 25 bp, Saccharomyces pastorianus
gagggtctctatccaaatgtcaggt

SEQ ID NO: 42525 - DNA, 25 bp, Saccharomyces pastorianus
aattgctgaagcatgctctctttga

SEQ ID NO: 42526 - DNA, 25 bp, Saccharomyces pastorianus
ttaaccgtggatacgtctaggtcta

SEQ ID NO: 42527 - DNA, 25 bp, Saccharomyces pastorianus
tggtttgacattccagtacttcccc

SEQ ID NO: 42528 - DNA, 25 bp, Saccharomyces pastorianus
aaagatgctgataacgagacctcga

SEQ ID NO: 42529 - DNA, 25 bp, Saccharomyces pastorianus
gggaatggaacctctcacacccaga

SEQ ID NO: 42530 - DNA, 25 bp, Saccharomyces pastorianus
tatcgccttattcctatttcactag

SEQ ID NO: 42531 - DNA, 25 bp, Saccharomyces pastorianus
gatacatatcatcaacaccgccaaa

SEQ ID NO: 42532 - DNA, 25 bp, Saccharomyces pastorianus
ggacttggcatctaagctgcacggg

SEQ ID NO: 42533 - DNA, 25 bp, Saccharomyces pastorianus
ataaacaaatgctcgccttctgcgg

SEQ ID NO: 42534 - DNA, 25 bp, Saccharomyces pastorianus
cattgaacactttgcgtgcgcagtt

SEQ ID NO: 42535 - DNA, 25 bp, Saccharomyces pastorianus
taaactcttccagggccgctaaaat

SEQ ID NO: 42536 - DNA, 25 bp, Saccharomyces pastorianus
gagacctcgaagcaaatcgcgtcat

SEQ ID NO: 42537 - DNA, 25 bp, Saccharomyces pastorianus
atacattctctcgatggcagcacta

SEQ ID NO: 42538 - DNA, 25 bp, Saccharomyces pastorianus
agattctacgctagcatatttgcaa

SEQ ID NO: 42539 - DNA, 25 bp, Saccharomyces pastorianus
ctgacggattaggaattggtgcaaa

SEQ ID NO: 42540 - DNA, 25 bp, Saccharomyces pastorianus
aagatttatttatgcctgtcgtgaa

SEQ ID NO: 42541 - DNA, 25 bp, Saccharomyces pastorianus
actagaggaaactgccaatgatcaa

SEQ ID NO: 42542 - DNA, 25 bp, Saccharomyces pastorianus
gttttgcaaacacaccctgacggat

SEQ ID NO: 42543 - DNA, 25 bp, Saccharomyces pastorianus
ggactgctctccaaaaagaaactag

SEQ ID NO: 42544 - DNA, 25 bp, Saccharomyces pastorianus
gaaaatcgacaaagtgacgggcatt

SEQ ID NO: 42545 - DNA, 25 bp, Saccharomyces pastorianus
cgaaagcattgacaagtttgacctt

SEQ ID NO: 42546 - DNA, 25 bp, Saccharomyces pastorianus
taacaaatcttccacgcaagtctca

SEQ ID NO: 42547 - DNA, 25 bp, Saccharomyces pastorianus
ttgaccttgatggaggactgctctc

SEQ ID NO: 42548 - DNA, 25 bp, Saccharomyces pastorianus
ggtacctattgaagagtttggagat

SEQ ID NO: 42549 - DNA, 25 bp, Saccharomyces pastorianus
tttggagatgcattgcttcgaggca

SEQ ID NO: 42550 - DNA, 25 bp, Saccharomyces pastorianus
accactagtcccattgttcataaca

SEQ ID NO: 42551 - DNA, 25 bp, Saccharomyces pastorianus
gagattactccagatttcatagcga

SEQ ID NO: 42552 - DNA, 25 bp, Saccharomyces pastorianus
catagcgaaccgatgggtgtccata

SEQ ID NO: 42553 - DNA, 25 bp, Saccharomyces pastorianus
gattcttaataccactagtcccatt

SEQ ID NO: 42554 - DNA, 25 bp, Saccharomyces pastorianus
ggaagacatattcaccgccaacatg

SEQ ID NO: 42555 - DNA, 25 bp, Saccharomyces pastorianus
gggatccagaatccactgactttag

SEQ ID NO: 42556 - DNA, 25 bp, Saccharomyces pastorianus
ctgtctcttccgttgttaatttaca

SEQ ID NO: 42557 - DNA, 25 bp, Saccharomyces pastorianus
aaacgtcattacctgtctcatttag

SEQ ID NO: 42558 - DNA, 25 bp, Saccharomyces pastorianus
agctggacacgctcgagttcgaaat

SEQ ID NO: 42559 - DNA, 25 bp, Saccharomyces pastorianus
atggataactcgctaactgtctctt

SEQ ID NO: 42560 - DNA, 25 bp, Saccharomyces pastorianus
ggctgtgaccttcaacttttaaaag

SEQ ID NO: 42561 - DNA, 25 bp, Saccharomyces pastorianus
aaactgccagaaaatgcgtgtcaca

SEQ ID NO: 42562 - DNA, 25 bp, Saccharomyces pastorianus
ttgcacgcctttggcatcacgtgga

SEQ ID NO: 42563 - DNA, 25 bp, Saccharomyces pastorianus
tagtgggttggcatttgcacgcctt

SEQ ID NO: 42564 - DNA, 25 bp, Saccharomyces pastorianus
atcacgtggatgttgcccgcgataa

SEQ ID NO: 42565 - DNA, 25 bp, Saccharomyces pastorianus
acagaagacgtactggtcccattca

SEQ ID NO: 42566 - DNA, 25 bp, Saccharomyces pastorianus
taagccggtttatcatccatcgcaa

SEQ ID NO: 42567 - DNA, 25 bp, Saccharomyces pastorianus
gaatattaccgcctttgctcatgaa

SEQ ID NO: 42568 - DNA, 25 bp, Saccharomyces pastorianus
tgctcatgaacaaccatcgttgccg

SEQ ID NO: 42569 - DNA, 25 bp, Saccharomyces pastorianus
acgttgggtagattggcctcagcta

SEQ ID NO: 42570 - DNA, 25 bp, Saccharomyces pastorianus
tcaggtagacctggccagcttaaac

SEQ ID NO: 42571 - DNA, 25 bp, Saccharomyces pastorianus
gctattgcaatcaccttgatcggta

SEQ ID NO: 42572 - DNA, 25 bp, Saccharomyces pastorianus
atttcagggcggatcgattccaaat

SEQ ID NO: 42573 - DNA, 25 bp, Saccharomyces pastorianus
ctattaaacctgtatcatgtcgcta

SEQ ID NO: 42574 - DNA, 25 bp, Saccharomyces pastorianus
gatcaccagaagagacccagttgtt

SEQ ID NO: 42575 - DNA, 25 bp, Saccharomyces pastorianus
aatcctccgatttgactataatgac

SEQ ID NO: 42576 - DNA, 25 bp, Saccharomyces pastorianus
ttatcgatgctttccgcaaggagga

SEQ ID NO: 42577 - DNA, 25 bp, Saccharomyces pastorianus
ggagttttccgatgcttacgatgta

SEQ ID NO: 42578 - DNA, 25 bp, Saccharomyces pastorianus
acgcaattatgggttctttgactaa

SEQ ID NO: 42579 - DNA, 25 bp, Saccharomyces pastorianus
gtggattcattcctgaacaacgact

SEQ ID NO: 42580 - DNA, 25 bp, Saccharomyces pastorianus
gtaattccactttccaaaccaagat

SEQ ID NO: 42581 - DNA, 25 bp, Saccharomyces pastorianus
aatgatgtctgaacctcttttgaga

SEQ ID NO: 42582 - DNA, 25 bp, Saccharomyces pastorianus
aaatcgctgctttcgggtaattcca

SEQ ID NO: 42583 - DNA, 25 bp, Saccharomyces pastorianus
gaaacatcatgtgccgttcttgtac

SEQ ID NO: 42584 - DNA, 25 bp, Saccharomyces pastorianus
gttcttgtacattcgttgccattat

SEQ ID NO: 42585 - DNA, 25 bp, Saccharomyces pastorianus
taacgaggctgggttggctcaaatt

SEQ ID NO: 42586 - DNA, 25 bp, Saccharomyces pastorianus
tgctcctttctttatcacaacttaa

SEQ ID NO: 42587 - DNA, 25 bp, Saccharomyces pastorianus
aataacactgtcaacggcgggagca

SEQ ID NO: 42588 - DNA, 25 bp, Saccharomyces pastorianus
atactcccatcgatcctagtttaaa

SEQ ID NO: 42589 - DNA, 25 bp, Saccharomyces pastorianus
aatatactctctgcgtttcagacct

SEQ ID NO: 42590 - DNA, 25 bp, Saccharomyces pastorianus
agggcatcctctgtattttgctcct

SEQ ID NO: 42591 - DNA, 25 bp, Saccharomyces pastorianus
gaaagcatttgcaggaccgttttga

SEQ ID NO: 42592 - DNA, 25 bp, Saccharomyces pastorianus
aaagggacactatctatcctccgat

SEQ ID NO: 42593 - DNA, 25 bp, Saccharomyces pastorianus
ttttgggcggcttacaatactggtt

SEQ ID NO: 42594 - DNA, 25 bp, Saccharomyces pastorianus
gtattttcgcctattgaactagcaa

SEQ ID NO: 42595 - DNA, 25 bp, Saccharomyces pastorianus
cgagatacgatggaacttgggccaa

SEQ ID NO: 42596 - DNA, 25 bp, Saccharomyces pastorianus
agccttacaattactgggatgattt

SEQ ID NO: 42597 - DNA, 25 bp, Saccharomyces pastorianus
gaaaccagcttatgactacctaaga

SEQ ID NO: 42598 - DNA, 25 bp, Saccharomyces pastorianus
aatttgtcgaggctcaattggatgc

SEQ ID NO: 42599 - DNA, 25 bp, Saccharomyces pastorianus
gaattctcggcagctttgacagact

SEQ ID NO: 42600 - DNA, 25 bp, Saccharomyces pastorianus
gagaagtcctatcacatcggttcgt

SEQ ID NO: 42601 - DNA, 25 bp, Saccharomyces pastorianus
gaagaacctctttttgaaaccagct

SEQ ID NO: 42602 - DNA, 25 bp, Saccharomyces pastorianus
atacatgacgcttttcagccttaca

SEQ ID NO: 42603 - DNA, 25 bp, Saccharomyces pastorianus
actgtacaaagtggctgaacggcgt

SEQ ID NO: 42604 - DNA, 25 bp, Saccharomyces pastorianus
ttggtctgtagcaggcgaattctcg

SEQ ID NO: 42605 - DNA, 25 bp, Saccharomyces pastorianus
gatgcatccaaaagcattcttcaat

SEQ ID NO: 42606 - DNA, 25 bp, Saccharomyces pastorianus
actttcagtaagttccggtatcact

SEQ ID NO: 42607 - DNA, 25 bp, Saccharomyces pastorianus
tagtgttagcaaacctacgctcttt

SEQ ID NO: 42608 - DNA, 25 bp, Saccharomyces pastorianus
ggcaggcctaacttatgaaatactt

SEQ ID NO: 42609 - DNA, 25 bp, Saccharomyces pastorianus
gaagtcctaaacatactcgatgcat

SEQ ID NO: 42610 - DNA, 25 bp, Saccharomyces pastorianus
gttccggtatcactgatttcatcag

SEQ ID NO: 42611 - DNA, 25 bp, Saccharomyces pastorianus
ttcatcaggctatggaatcaggcta

SEQ ID NO: 42612 - DNA, 25 bp, Saccharomyces pastorianus
tacgctctttattaaacggcaacac

SEQ ID NO: 42613 - DNA, 25 bp, Saccharomyces pastorianus
gatttatcaagacatttcgcgaatt

SEQ ID NO: 42614 - DNA, 25 bp, Saccharomyces pastorianus
gactgatgagctaatattgttcgaa

SEQ ID NO: 42615 - DNA, 25 bp, Saccharomyces pastorianus
aagggttcaagtttcgtgatgttat

SEQ ID NO: 42616 - DNA, 25 bp, Saccharomyces pastorianus
gcggacttgatgtctatgcacacaa

SEQ ID NO: 42617 - DNA, 25 bp, Saccharomyces pastorianus
tgcgcttctggacccttagtgaggt

SEQ ID NO: 42618 - DNA, 25 bp, Saccharomyces pastorianus
tcatttagccgaaaccgtccgtaga

SEQ ID NO: 42619 - DNA, 25 bp, Saccharomyces pastorianus
ggtggtgccaatcatttagccgaaa

SEQ ID NO: 42620 - DNA, 25 bp, Saccharomyces pastorianus
gttcccacactgcttactaaaactt

SEQ ID NO: 42621 - DNA, 25 bp, Saccharomyces pastorianus
cctggtagaaactctttccggtgat

SEQ ID NO: 42622 - DNA, 25 bp, Saccharomyces pastorianus
gacgacttgattgatggtggtgcca

SEQ ID NO: 42623 - DNA, 25 bp, Saccharomyces pastorianus
gaaggctccaaagaccctggtagaa

SEQ ID NO: 42624 - DNA, 25 bp, Saccharomyces pastorianus
gtgacgtagttacttttggccaata

SEQ ID NO: 42625 - DNA, 25 bp, Saccharomyces pastorianus
gagacctgcgtgacattggatgtga

SEQ ID NO: 42626 - DNA, 25 bp, Saccharomyces pastorianus
atgggattcttgtactgcgcttctg

SEQ ID NO: 42627 - DNA, 25 bp, Saccharomyces pastorianus
aatctcttattctcatgcagccaaa

SEQ ID NO: 42628 - DNA, 25 bp, Saccharomyces pastorianus
atgggagatccagctactgtgagaa

SEQ ID NO: 42629 - DNA, 25 bp, Saccharomyces pastorianus
gatacttttggcacagatgatttct

SEQ ID NO: 42630 - DNA, 25 bp, Saccharomyces pastorianus
gaagtcaacggtaatcgtgctatta

SEQ ID NO: 42631 - DNA, 25 bp, Saccharomyces pastorianus
tgggatgctagctacatttggtatt

SEQ ID NO: 42632 - DNA, 25 bp, Saccharomyces pastorianus
aaggcattctatccaccatattcag

SEQ ID NO: 42633 - DNA, 25 bp, Saccharomyces pastorianus
attcagatgcctacgttggtgttag

SEQ ID NO: 42634 - DNA, 25 bp, Saccharomyces pastorianus
gggttgcctccattagtgaagatta

SEQ ID NO: 42635 - DNA, 25 bp, Saccharomyces pastorianus
aaagattgcccatcattaccacgac

SEQ ID NO: 42636 - DNA, 25 bp, Saccharomyces pastorianus
aattgtttgcttttccgattcatta

SEQ ID NO: 42637 - DNA, 25 bp, Saccharomyces pastorianus
gatgcgcaggtcaaaagtgagccat

SEQ ID NO: 42638 - DNA, 25 bp, Saccharomyces pastorianus
tggtgttagcggacatgccagataa

SEQ ID NO: 42639 - DNA, 25 bp, Saccharomyces pastorianus
gacaagtattgctatgcccacgggc

SEQ ID NO: 42640 - DNA, 25 bp, Saccharomyces pastorianus
gatgccatcgatcagggtgttatcc

SEQ ID NO: 42641 - DNA, 25 bp, Saccharomyces pastorianus
taaatctcgcgttttacattcgcag

SEQ ID NO: 42642 - DNA, 25 bp, Saccharomyces pastorianus
aattcctccccatttttgatgccat

SEQ ID NO: 42643 - DNA, 25 bp, Saccharomyces pastorianus
aaaactcactaccatcagcactgat

SEQ ID NO: 42644 - DNA, 25 bp, Saccharomyces pastorianus
aaatccaacaactaccgtgaccttg

SEQ ID NO: 42645 - DNA, 25 bp, Saccharomyces pastorianus
gtgttggaatattgccgactacggc

SEQ ID NO: 42646 - DNA, 25 bp, Saccharomyces pastorianus
cttggtcagcacaatcccgaattta

SEQ ID NO: 42647 - DNA, 25 bp, Saccharomyces pastorianus
gagtttagtccctatttggtgttag

SEQ ID NO: 42648 - DNA, 25 bp, Saccharomyces pastorianus
gattttctcctggaagatccactgg

SEQ ID NO: 42649 - DNA, 25 bp, Saccharomyces pastorianus
gttatatccttactccggtactgat

SEQ ID NO: 42650 - DNA, 25 bp, Saccharomyces pastorianus
attctgccgctatctcggtatcaaa

SEQ ID NO: 42651 - DNA, 25 bp, Saccharomyces pastorianus
gttagtgctctaacactccatgttt

SEQ ID NO: 42652 - DNA, 25 bp, Saccharomyces pastorianus
aaagcagctgctatctcgcaagaat

SEQ ID NO: 42653 - DNA, 25 bp, Saccharomyces pastorianus
aatggattccatgttctctttccac

SEQ ID NO: 42654 - DNA, 25 bp, Saccharomyces pastorianus
ctagctgggttcatttccgtgataa

SEQ ID NO: 42655 - DNA, 25 bp, Saccharomyces pastorianus
attccattggccgttcttattgagt

SEQ ID NO: 42656 - DNA, 25 bp, Saccharomyces pastorianus
atcaacctactgtcgctagctgggt

SEQ ID NO: 42657 - DNA, 25 bp, Saccharomyces pastorianus
agaatttccgaatatcaccgcaagt

SEQ ID NO: 42658 - DNA, 25 bp, Saccharomyces pastorianus
taatttcgcctccataaagcagctg

SEQ ID NO: 42659 - DNA, 25 bp, Saccharomyces pastorianus
gctggtgtcttactccgtattgtaa

SEQ ID NO: 42660 - DNA, 25 bp, Saccharomyces pastorianus
gaactgcgccttttgctacaagata

SEQ ID NO: 42661 - DNA, 25 bp, Saccharomyces pastorianus
tgcgccatatactcattcggatcta

SEQ ID NO: 42662 - DNA, 25 bp, Saccharomyces pastorianus
gatcactatcattggttttgcgttc

SEQ ID NO: 42663 - DNA, 25 bp, Saccharomyces pastorianus
ggttaccaacagatttcctcagaag

SEQ ID NO: 42664 - DNA, 25 bp, Saccharomyces pastorianus
tcaatccctggtttcgatgacgaac

SEQ ID NO: 42665 - DNA, 25 bp, Saccharomyces pastorianus
agttctcactagactcgcttgataa

SEQ ID NO: 42666 - DNA, 25 bp, Saccharomyces pastorianus
gaaaggtttgttaactgccatgcaa

SEQ ID NO: 42667 - DNA, 25 bp, Saccharomyces pastorianus
ggcgatctggtcaaactggagcatt

SEQ ID NO: 42668 - DNA, 25 bp, Saccharomyces pastorianus
gaaatcgcgtaatccgttcaacagg

SEQ ID NO: 42669 - DNA, 25 bp, Saccharomyces pastorianus
gcaatggctatcgactatccacgat

SEQ ID NO: 42670 - DNA, 25 bp, Saccharomyces pastorianus
tggagcattctaacgcactgaactt

SEQ ID NO: 42671 - DNA, 25 bp, Saccharomyces pastorianus
agcagcaactgcatcgacccatgaa

SEQ ID NO: 42672 - DNA, 25 bp, Saccharomyces pastorianus
gactgtgtcatactctgacgagact

SEQ ID NO: 42673 - DNA, 25 bp, Saccharomyces pastorianus
actcaaacagcacggtttcagccac

SEQ ID NO: 42674 - DNA, 25 bp, Saccharomyces pastorianus
aatacgtaactgtcaccggtgcttt

SEQ ID NO: 42675 - DNA, 25 bp, Saccharomyces pastorianus
gaggcccacgaaacgactgtgtcat

SEQ ID NO: 42676 - DNA, 25 bp, Saccharomyces pastorianus
aagctactccttggaggcccacgaa

SEQ ID NO: 42677 - DNA, 25 bp, Saccharomyces pastorianus
ggcagcaactgcatcgactcaggaa

SEQ ID NO: 42678 - DNA, 25 bp, Saccharomyces pastorianus
ttctccgcttctggatcagcagcaa

SEQ ID NO: 42679 - DNA, 25 bp, Saccharomyces pastorianus
acgcactggttcaccttaaacacgg

SEQ ID NO: 42680 - DNA, 25 bp, Saccharomyces pastorianus
gttgataactctgcatgacaccacc

SEQ ID NO: 42681 - DNA, 25 bp, Saccharomyces pastorianus
aaccattacttccactttgttgata

SEQ ID NO: 42682 - DNA, 25 bp, Saccharomyces pastorianus
agcaaggttcccaaagggctgtcag

SEQ ID NO: 42683 - DNA, 25 bp, Saccharomyces pastorianus
gaaagccacagcaaagcatgcggat

SEQ ID NO: 42684 - DNA, 25 bp, Saccharomyces pastorianus
atcgcagcgccgtaacaacgctgta

SEQ ID NO: 42685 - DNA, 25 bp, Saccharomyces pastorianus
gagtcaaagactaccactccttaca

SEQ ID NO: 42686 - DNA, 25 bp, Saccharomyces pastorianus
gattcggtgatgaccattcactaag

SEQ ID NO: 42687 - DNA, 25 bp, Saccharomyces pastorianus
actaattgtccacgatgtccttgaa

SEQ ID NO: 42688 - DNA, 25 bp, Saccharomyces pastorianus
agcactctcagaagattccatcgca

SEQ ID NO: 42689 - DNA, 25 bp, Saccharomyces pastorianus
gaagactcttcctcattgtatatca

SEQ ID NO: 42690 - DNA, 25 bp, Saccharomyces pastorianus
ggaggaaagcccaagttgctggaaa

SEQ ID NO: 42691 - DNA, 25 bp, Saccharomyces pastorianus
atgagagccatcaacactgtgcaga

SEQ ID NO: 42692 - DNA, 25 bp, Saccharomyces pastorianus
gggctgtcaggaatcaccaagggta

SEQ ID NO: 42693 - DNA, 25 bp, Saccharomyces pastorianus
agagactctcttttcatcagcaaca

SEQ ID NO: 42694 - DNA, 25 bp, Saccharomyces pastorianus
gttgccctcaacgatatcggtggaa

SEQ ID NO: 42695 - DNA, 25 bp, Saccharomyces pastorianus
aagcatagcatggaacacccgcaaa

SEQ ID NO: 42696 - DNA, 25 bp, Saccharomyces pastorianus
aaagagtgactctcgattctcccaa

SEQ ID NO: 42697 - DNA, 25 bp, Saccharomyces pastorianus
attatactgccgctgaaacgttgcc

SEQ ID NO: 42698 - DNA, 25 bp, Saccharomyces pastorianus
gatatgattttacgcgctttacaag

SEQ ID NO: 42699 - DNA, 25 bp, Saccharomyces pastorianus
gcggcagcacctattctgaacattg

SEQ ID NO: 42700 - DNA, 25 bp, Saccharomyces pastorianus
gcagattgcgtgtccgtatgataca

SEQ ID NO: 42701 - DNA, 25 bp, Saccharomyces pastorianus
gaacgacatgatttctagcccggaa

SEQ ID NO: 42702 - DNA, 25 bp, Saccharomyces pastorianus
tcttctagaccgacttccaatgaga

SEQ ID NO: 42703 - DNA, 25 bp, Saccharomyces pastorianus
gagatcatccatagcgtcagagagt

SEQ ID NO: 42704 - DNA, 25 bp, Saccharomyces pastorianus
tctcatggtgaggaattcggcgata

SEQ ID NO: 42705 - DNA, 25 bp, Saccharomyces pastorianus
ctatttacgtctatgggctttgtca

SEQ ID NO: 42706 - DNA, 25 bp, Saccharomyces pastorianus
tttcgccatgtggtttgcactaact

SEQ ID NO: 42707 - DNA, 25 bp, Saccharomyces pastorianus
ttatgacagtcgcacttttcgccat

SEQ ID NO: 42708 - DNA, 25 bp, Saccharomyces pastorianus
tttgcactaacttgcgcggttctag

SEQ ID NO: 42709 - DNA, 25 bp, Saccharomyces pastorianus
gcatgagccattagcatcaaccgat

SEQ ID NO: 42710 - DNA, 25 bp, Saccharomyces pastorianus
aaccgatgcaggtgctagttcagaa

SEQ ID NO: 42711 - DNA, 25 bp, Saccharomyces pastorianus
ttaccacaatggacgctgatgatgc

SEQ ID NO: 42712 - DNA, 25 bp, Saccharomyces pastorianus
acacacagcatcctatttacgtcta

SEQ ID NO: 42713 - DNA, 25 bp, Saccharomyces pastorianus
gctaatggccttgatttgtattcct

SEQ ID NO: 42714 - DNA, 25 bp, Saccharomyces pastorianus
ggctttgtcattagcacatgcgcaa

SEQ ID NO: 42715 - DNA, 25 bp, Saccharomyces pastorianus
gaacatctcttccaatagacctgct

SEQ ID NO: 42716 - DNA, 25 bp, Saccharomyces pastorianus
caccgattctgatggctggtgcaca

SEQ ID NO: 42717 - DNA, 25 bp, Saccharomyces pastorianus
agaaggtgagactactccaaccgcc

SEQ ID NO: 42718 - DNA, 25 bp, Saccharomyces pastorianus
agtatactattgacgaactattcca

SEQ ID NO: 42719 - DNA, 25 bp, Saccharomyces pastorianus
gccaacgtaccagctgtcactattg

SEQ ID NO: 42720 - DNA, 25 bp, Saccharomyces pastorianus
aagcctaaggtgaccaccgattctg

SEQ ID NO: 42721 - DNA, 25 bp, Saccharomyces pastorianus
gaagagtttggcactcaccatgctg

SEQ ID NO: 42722 - DNA, 25 bp, Saccharomyces pastorianus
agccaagtgttgctttagaggttaa

SEQ ID NO: 42723 - DNA, 25 bp, Saccharomyces pastorianus
gaactattccaattgaagccaagtg

SEQ ID NO: 42724 - DNA, 25 bp, Saccharomyces pastorianus
atgctggccacttcagccgtagaag

SEQ ID NO: 42725 - DNA, 25 bp, Saccharomyces pastorianus
gctgtcactattgctcaagagactt

SEQ ID NO: 42726 - DNA, 25 bp, Saccharomyces pastorianus
atagcttccgacgtagttagcccaa

SEQ ID NO: 42727 - DNA, 25 bp, Saccharomyces pastorianus
ggtttatactgtgggcccggctact

SEQ ID NO: 42728 - DNA, 25 bp, Saccharomyces pastorianus
atacgaattgcatccatcggaccca

SEQ ID NO: 42729 - DNA, 25 bp, Saccharomyces pastorianus
gcccggctactgctgatttcattaa

SEQ ID NO: 42730 - DNA, 25 bp, Saccharomyces pastorianus
ttgtcttcagtcctcagggtactaa

SEQ ID NO: 42731 - DNA, 25 bp, Saccharomyces pastorianus
gatcatccctactttaacaagccaa

SEQ ID NO: 42732 - DNA, 25 bp, Saccharomyces pastorianus
taactacagataccgtggctcagcc

SEQ ID NO: 42733 - DNA, 25 bp, Saccharomyces pastorianus
gtaacggttctgttctcgcagatat

SEQ ID NO: 42734 - DNA, 25 bp, Saccharomyces pastorianus
gtggctcagccacctaatgaactat

SEQ ID NO: 42735 - DNA, 25 bp, Saccharomyces pastorianus
aggaccgtagaatccctcaatgaat

SEQ ID NO: 42736 - DNA, 25 bp, Saccharomyces pastorianus
tgaactgggtggttgtcttcagtcc

SEQ ID NO: 42737 - DNA, 25 bp, Saccharomyces pastorianus
gagtgacctatttacttttgactgg

SEQ ID NO: 42738 - DNA, 25 bp, Saccharomyces pastorianus
aatgaaagtaccagagcctctacgg

SEQ ID NO: 42739 - DNA, 25 bp, Saccharomyces pastorianus
gagtgcatacgcttctaactttaat

SEQ ID NO: 42740 - DNA, 25 bp, Saccharomyces pastorianus
gagcctctacggtaccaaatattcc

SEQ ID NO: 42741 - DNA, 25 bp, Saccharomyces pastorianus
aatattccattagcgattgtaccga

SEQ ID NO: 42742 - DNA, 25 bp, Saccharomyces pastorianus
gagggtacgaacaaccagacgcaaa

SEQ ID NO: 42743 - DNA, 25 bp, Saccharomyces pastorianus
gaagatactcctctatctcaaaatg

SEQ ID NO: 42744 - DNA, 25 bp, Saccharomyces pastorianus
tatgggctgcgtgctgataaactat

SEQ ID NO: 42745 - DNA, 25 bp, Saccharomyces pastorianus
atttacataacgtcgaacttggcga

SEQ ID NO: 42746 - DNA, 25 bp, Saccharomyces pastorianus
caaacatccgttgcatgagctagta

SEQ ID NO: 42747 - DNA, 25 bp, Saccharomyces pastorianus
gaagtagaaccaccgcaactagaga

SEQ ID NO: 42748 - DNA, 25 bp, Saccharomyces pastorianus
ataatattttcatctgcgcttccct

SEQ ID NO: 42749 - DNA, 25 bp, Saccharomyces pastorianus
atatcacaccggaccagtttactgg

SEQ ID NO: 42750 - DNA, 25 bp, Saccharomyces pastorianus
gacccacttgtctcattgttaatca

SEQ ID NO: 42751 - DNA, 25 bp, Saccharomyces pastorianus
tgatctccgcacttttcatttggaa

SEQ ID NO: 42752 - DNA, 25 bp, Saccharomyces pastorianus
acactatccaactgtcttatcgacg

SEQ ID NO: 42753 - DNA, 25 bp, Saccharomyces pastorianus
aagcttcatcactatggcgtgcact

SEQ ID NO: 42754 - DNA, 25 bp, Saccharomyces pastorianus
aaaattctgctgcaagccatgcctt

SEQ ID NO: 42755 - DNA, 25 bp, Saccharomyces pastorianus
gacagagtccatttacatcgcatct

SEQ ID NO: 42756 - DNA, 25 bp, Saccharomyces pastorianus
aatcattgctatccatgacttccac

SEQ ID NO: 42757 - DNA, 25 bp, Saccharomyces pastorianus
gaaccacgcatacagggtctgctgg

SEQ ID NO: 42758 - DNA, 25 bp, Saccharomyces pastorianus
aaagaactcacctcggctgcaagaa

SEQ ID NO: 42759 - DNA, 25 bp, Saccharomyces pastorianus
agagcgtgggccagctacaagagct

SEQ ID NO: 42760 - DNA, 25 bp, Saccharomyces pastorianus
gagaattgaccactctactggacga

SEQ ID NO: 42761 - DNA, 25 bp, Saccharomyces pastorianus
gactctagcccaaactcaatttcta

SEQ ID NO: 42762 - DNA, 25 bp, Saccharomyces pastorianus
tgcagtgactttggactctagccca

SEQ ID NO: 42763 - DNA, 25 bp, Saccharomyces pastorianus
gatgggtggcttcatcatttatctc

SEQ ID NO: 42764 - DNA, 25 bp, Saccharomyces pastorianus
tttccacgctcctagtaaaaattga

SEQ ID NO: 42765 - DNA, 25 bp, Saccharomyces pastorianus
gaaatgaccactttacgaaccacag

SEQ ID NO: 42766 - DNA, 25 bp, Saccharomyces pastorianus
gaacctggacgacaacatcgatgag

SEQ ID NO: 42767 - DNA, 25 bp, Saccharomyces pastorianus
attatcaaaaccacatttccacgct

SEQ ID NO: 42768 - DNA, 25 bp, Saccharomyces pastorianus
gcattggtcttgatgggtggcttca

SEQ ID NO: 42769 - DNA, 25 bp, Saccharomyces pastorianus
gcatgagttactctgcagtgacttt

SEQ ID NO: 42770 - DNA, 25 bp, Saccharomyces pastorianus
agtcaggatccgctcaagcaacatt

SEQ ID NO: 42771 - DNA, 25 bp, Saccharomyces pastorianus
catcgaggctatatgctgcttttga

SEQ ID NO: 42772 - DNA, 25 bp, Saccharomyces pastorianus
atccggcagagttggtgctggcaca

SEQ ID NO: 42773 - DNA, 25 bp, Saccharomyces pastorianus
gatcagtgacccctatacgtcaaat

SEQ ID NO: 42774 - DNA, 25 bp, Saccharomyces pastorianus
aagtagccctattcgtgaggttcct

SEQ ID NO: 42775 - DNA, 25 bp, Saccharomyces pastorianus
aggttacctgattactctcctaatt

SEQ ID NO: 42776 - DNA, 25 bp, Saccharomyces pastorianus
aaggttctccaatggatctgagtca

SEQ ID NO: 42777 - DNA, 25 bp, Saccharomyces pastorianus
aagcaacatttgcatccggcagagt

SEQ ID NO: 42778 - DNA, 25 bp, Saccharomyces pastorianus
cagtgttcccaagtatgttccgagt

SEQ ID NO: 42779 - DNA, 25 bp, Saccharomyces pastorianus
cccattggcatctcaaggcgtgatt

SEQ ID NO: 42780 - DNA, 25 bp, Saccharomyces pastorianus
gtgaggttcctgtcagatcagtgac

SEQ ID NO: 42781 - DNA, 25 bp, Saccharomyces pastorianus
tgatttgacatactggaccggatat

SEQ ID NO: 42782 - DNA, 25 bp, Saccharomyces pastorianus
tcaagttcgtaagtccaatgtggca

SEQ ID NO: 42783 - DNA, 25 bp, Saccharomyces pastorianus
gcgcgttccctgaagatgacaatga

SEQ ID NO: 42784 - DNA, 25 bp, Saccharomyces pastorianus
atctccattaaatgcggtggccgca

SEQ ID NO: 42785 - DNA, 25 bp, Saccharomyces pastorianus
caaggaacaccatacagcgatctca

SEQ ID NO: 42786 - DNA, 25 bp, Saccharomyces pastorianus
tacacgaagtatcagcgcgttccct

SEQ ID NO: 42787 - DNA, 25 bp, Saccharomyces pastorianus
gggcgcttgcgtaacgaaacgtcta

SEQ ID NO: 42788 - DNA, 25 bp, Saccharomyces pastorianus
gttgctacaactactatgttctact

SEQ ID NO: 42789 - DNA, 25 bp, Saccharomyces pastorianus
tccacccaccaaaagtcaagttcgt

SEQ ID NO: 42790 - DNA, 25 bp, Saccharomyces pastorianus
tatgagtggcaatatctgtctagat

SEQ ID NO: 42791 - DNA, 25 bp, Saccharomyces pastorianus
gaaatggtccgcagtttataacgtg

SEQ ID NO: 42792 - DNA, 25 bp, Saccharomyces pastorianus
aaagccttgcaaacgctattctgat

SEQ ID NO: 42793 - DNA, 25 bp, Saccharomyces pastorianus
tatggagactgccaaaccagattgt

SEQ ID NO: 42794 - DNA, 25 bp, Saccharomyces pastorianus
gggagcaagagacatttttcgatat

SEQ ID NO: 42795 - DNA, 25 bp, Saccharomyces pastorianus
gcgatttctggatggctttctaatt

SEQ ID NO: 42796 - DNA, 25 bp, Saccharomyces pastorianus
ttatctctttcacgctatgtctcga

SEQ ID NO: 42797 - DNA, 25 bp, Saccharomyces pastorianus
cacaaattcctttacttcgacaagt

SEQ ID NO: 42798 - DNA, 25 bp, Saccharomyces pastorianus
ctgctgacactgttcaaccgattga

SEQ ID NO: 42799 - DNA, 25 bp, Saccharomyces pastorianus
ttccaccaagatttctctgctgaca

SEQ ID NO: 42800 - DNA, 25 bp, Saccharomyces pastorianus
gaggtaagaccgcaacattcattta

SEQ ID NO: 42801 - DNA, 25 bp, Saccharomyces pastorianus
aatttgttgtctatacacagtcaca

SEQ ID NO: 42802 - DNA, 25 bp, Saccharomyces pastorianus
ttagcatacatgattttctttcgat

SEQ ID NO: 42803 - DNA, 25 bp, Saccharomyces pastorianus
gcacatgttcccaattcggactatt

SEQ ID NO: 42804 - DNA, 25 bp, Saccharomyces pastorianus
tttggtattccatcgcacatgttcc

SEQ ID NO: 42805 - DNA, 25 bp, Saccharomyces pastorianus
aaaagagacactgcccttgtgcccg

SEQ ID NO: 42806 - DNA, 25 bp, Saccharomyces pastorianus
atcgatgtcccaacaatccaagttt

SEQ ID NO: 42807 - DNA, 25 bp, Saccharomyces pastorianus
atctcaacttattcacggctaccat

SEQ ID NO: 42808 - DNA, 25 bp, Saccharomyces pastorianus
gaaacggcagcggtggcttcaaaaa

SEQ ID NO: 42809 - DNA, 25 bp, Saccharomyces pastorianus
atgctagtcttactcccttattgaa

SEQ ID NO: 42810 - DNA, 25 bp, Saccharomyces pastorianus
ttatatcctatgttgatgaccagct

SEQ ID NO: 42811 - DNA, 25 bp, Saccharomyces pastorianus
ccagttatttcggacagggatctta

SEQ ID NO: 42812 - DNA, 25 bp, Saccharomyces pastorianus
aagcaccacatctgaacattccagt

SEQ ID NO: 42813 - DNA, 25 bp, Saccharomyces pastorianus
atgaccagcttttacaaatccagag

SEQ ID NO: 42814 - DNA, 25 bp, Saccharomyces pastorianus
ggcatatacaacgacttcacagcat

SEQ ID NO: 42815 - DNA, 25 bp, Saccharomyces pastorianus
gcgacatacgctttgttaaccaatt

SEQ ID NO: 42816 - DNA, 25 bp, Saccharomyces pastorianus
aatacgccactgaatgccttgttgt

SEQ ID NO: 42817 - DNA, 25 bp, Saccharomyces pastorianus
caaaggttttcatttctgcgtgccc

SEQ ID NO: 42818 - DNA, 25 bp, Saccharomyces pastorianus
attccgtccgaaccctaaagatgtg

SEQ ID NO: 42819 - DNA, 25 bp, Saccharomyces pastorianus
tgcgtgccctactattgagccaatt

SEQ ID NO: 42820 - DNA, 25 bp, Saccharomyces pastorianus
ggcaacctttgcacgtgattctgag

SEQ ID NO: 42821 - DNA, 25 bp, Saccharomyces pastorianus
ggctcgcttgaacgctagaaactat

SEQ ID NO: 42822 - DNA, 25 bp, Saccharomyces pastorianus
agtactacgctctggctaaggattc

SEQ ID NO: 42823 - DNA, 25 bp, Saccharomyces pastorianus
ggatgtgcgtccagagtttaaactc

SEQ ID NO: 42824 - DNA, 25 bp, Saccharomyces pastorianus
ttctgagcagctggcggatagcgac

SEQ ID NO: 42825 - DNA, 25 bp, Saccharomyces pastorianus
gtcatggagaacctagcttcagcga

SEQ ID NO: 42826 - DNA, 25 bp, Saccharomyces pastorianus
tgcataaccctaagactcacatacc

SEQ ID NO: 42827 - DNA, 25 bp, Saccharomyces pastorianus
ctgcctggaaagattctcttgagta

SEQ ID NO: 42828 - DNA, 25 bp, Saccharomyces pastorianus
gggcatcccctattgcagtctggct

SEQ ID NO: 42829 - DNA, 25 bp, Saccharomyces pastorianus
caagttttcataagagggtgtccaa

SEQ ID NO: 42830 - DNA, 25 bp, Saccharomyces pastorianus
tcatccaaaggtgatggtgccccat

SEQ ID NO: 42831 - DNA, 25 bp, Saccharomyces pastorianus
gggtcaacggaacagtctttattat

SEQ ID NO: 42832 - DNA, 25 bp, Saccharomyces pastorianus
acttcttggagattgaggtgcataa

SEQ ID NO: 42833 - DNA, 25 bp, Saccharomyces pastorianus
tacgctgagccagagaacttcttgg

SEQ ID NO: 42834 - DNA, 25 bp, Saccharomyces pastorianus
gcagtctggctctaaggccctagtg

SEQ ID NO: 42835 - DNA, 25 bp, Saccharomyces pastorianus
tggtgccccatctgcctggaaagat

SEQ ID NO: 42836 - DNA, 25 bp, Saccharomyces pastorianus
taattccttttcgaacgcgtctacg

SEQ ID NO: 42837 - DNA, 25 bp, Saccharomyces pastorianus
gtatcgacgttgtctagaccagcct

SEQ ID NO: 42838 - DNA, 25 bp, Saccharomyces pastorianus
tagcagctggagtggcttctttgct

SEQ ID NO: 42839 - DNA, 25 bp, Saccharomyces pastorianus
tatgtcgtcggtaggctccgtttca

SEQ ID NO: 42840 - DNA, 25 bp, Saccharomyces pastorianus
ttcttcaaggacaactcacccaagg

SEQ ID NO: 42841 - DNA, 25 bp, Saccharomyces pastorianus
tactgtccttagtcttcttcttttt

SEQ ID NO: 42842 - DNA, 25 bp, Saccharomyces pastorianus
gcttctttgctttcagtatcgacgt

SEQ ID NO: 42843 - DNA, 25 bp, Saccharomyces pastorianus
tagaccagccttggctaattccttt

SEQ ID NO: 42844 - DNA, 25 bp, Saccharomyces pastorianus
ggaattaccttcttggtcttcttct

SEQ ID NO: 42845 - DNA, 25 bp, Saccharomyces pastorianus
ttcaggctcggcgtcagcggaagca

SEQ ID NO: 42846 - DNA, 25 bp, Saccharomyces pastorianus
agcggaagcactcttggacttcttc

SEQ ID NO: 42847 - DNA, 25 bp, Saccharomyces pastorianus
gcgaagttcgcctgctggacgagaa

SEQ ID NO: 42848 - DNA, 25 bp, Saccharomyces pastorianus
agccattgctggacgtcttgaagat

SEQ ID NO: 42849 - DNA, 25 bp, Saccharomyces pastorianus
ctatacctgatgagcgtgaacccgt

SEQ ID NO: 42850 - DNA, 25 bp, Saccharomyces pastorianus
aagaccgaggcaacaacactcttcg

SEQ ID NO: 42851 - DNA, 25 bp, Saccharomyces pastorianus
caagaaatccaacccgctgttcgta

SEQ ID NO: 42852 - DNA, 25 bp, Saccharomyces pastorianus
tcttcgcagcgttcgaccaagaata

SEQ ID NO: 42853 - DNA, 25 bp, Saccharomyces pastorianus
actacaacaacttcttcatccattt

SEQ ID NO: 42854 - DNA, 25 bp, Saccharomyces pastorianus
gcaagaacctctctcgccaagaaat

SEQ ID NO: 42855 - DNA, 25 bp, Saccharomyces pastorianus
gggcccttcttcgtcaaggataaga

SEQ ID NO: 42856 - DNA, 25 bp, Saccharomyces pastorianus
ggtagacgacctgatgtacaaccaa

SEQ ID NO: 42857 - DNA, 25 bp, Saccharomyces pastorianus
agaaatgggccgacttgtcgcacca

SEQ ID NO: 42858 - DNA, 25 bp, Saccharomyces pastorianus
gaatgcaagctttcttcaggtacag

SEQ ID NO: 42859 - DNA, 25 bp, Saccharomyces pastorianus
gcgcgactcaaatcgtggcattcaa

SEQ ID NO: 42860 - DNA, 25 bp, Saccharomyces pastorianus
taaactagcttctactcgttgccaa

SEQ ID NO: 42861 - DNA, 25 bp, Saccharomyces pastorianus
gatgatgcattactcgcacgcgcga

SEQ ID NO: 42862 - DNA, 25 bp, Saccharomyces pastorianus
agtcgtcggtgctgttctattgtac

SEQ ID NO: 42863 - DNA, 25 bp, Saccharomyces pastorianus
ttggttctaccattgcttctttcgt

SEQ ID NO: 42864 - DNA, 25 bp, Saccharomyces pastorianus
gactattgctgtctgcactggtgaa

SEQ ID NO: 42865 - DNA, 25 bp, Saccharomyces pastorianus
gacctataacctttgatccagttgg

SEQ ID NO: 42866 - DNA, 25 bp, Saccharomyces pastorianus
gttcgttccacgttcagttgattga

SEQ ID NO: 42867 - DNA, 25 bp, Saccharomyces pastorianus
aacaatctgcttacttatggccagt

SEQ ID NO: 42868 - DNA, 25 bp, Saccharomyces pastorianus
actgctgaaggtctcccatgtgtaa

SEQ ID NO: 42869 - DNA, 25 bp, Saccharomyces pastorianus
gtcccgttaccgctgagattaaaga

SEQ ID NO: 42870 - DNA, 25 bp, Saccharomyces pastorianus
taatcacccgttgcggttgtcccgt

SEQ ID NO: 42871 - DNA, 25 bp, Saccharomyces pastorianus
ttgtcccgtcgagcgtattagtcaa

SEQ ID NO: 42872 - DNA, 25 bp, Saccharomyces pastorianus
atcaatgtgcctaaggcgcctgctt

SEQ ID NO: 42873 - DNA, 25 bp, Saccharomyces pastorianus
tgcagcaagtcctattgccactgag

SEQ ID NO: 42874 - DNA, 25 bp, Saccharomyces pastorianus
gaaaaatctggagtcgccgtacaaa

SEQ ID NO: 42875 - DNA, 25 bp, Saccharomyces pastorianus
gaagttgcagcaagtcccgttaccg

SEQ ID NO: 42876 - DNA, 25 bp, Saccharomyces pastorianus
gctactgttggaagctcctgttttt

SEQ ID NO: 42877 - DNA, 25 bp, Saccharomyces pastorianus
caggtcttgttgatgcacccgaaag

SEQ ID NO: 42878 - DNA, 25 bp, Saccharomyces pastorianus
aaatgatctcaatggccacgctaat

SEQ ID NO: 42879 - DNA, 25 bp, Saccharomyces pastorianus
actgctagaggtatcccaggtcttg

SEQ ID NO: 42880 - DNA, 25 bp, Saccharomyces pastorianus
acgatcacaccgttgacgtttgggc

SEQ ID NO: 42881 - DNA, 25 bp, Saccharomyces pastorianus
aaactattgaggtcgcacgggcctt

SEQ ID NO: 42882 - DNA, 25 bp, Saccharomyces pastorianus
ttgtggcacaattgactacctctcg

SEQ ID NO: 42883 - DNA, 25 bp, Saccharomyces pastorianus
tacctctcgcccgaaatggtcgaat

SEQ ID NO: 42884 - DNA, 25 bp, Saccharomyces pastorianus
gtcgcacgggccttttaacgatatt

SEQ ID NO: 42885 - DNA, 25 bp, Saccharomyces pastorianus
aagacctaatactcaagctgcttaa

SEQ ID NO: 42886 - DNA, 25 bp, Saccharomyces pastorianus
attgccaatgcgctagactacatgc

SEQ ID NO: 42887 - DNA, 25 bp, Saccharomyces pastorianus
tacttttgaactactaaccggcgct

SEQ ID NO: 42888 - DNA, 25 bp, Saccharomyces pastorianus
ggcgctccgccgtttgaagaagaaa

SEQ ID NO: 42889 - DNA, 25 bp, Saccharomyces pastorianus
aactatacggttatttccacgatga

SEQ ID NO: 42890 - DNA, 25 bp, Saccharomyces pastorianus
atttcccaggatgcacaagacctaa

SEQ ID NO: 42891 - DNA, 25 bp, Saccharomyces pastorianus
tgaaggctccttacgaggacgagat

SEQ ID NO: 42892 - DNA, 25 bp, Saccharomyces pastorianus
caaagcgcttttgtatcgacaggaa

SEQ ID NO: 42893 - DNA, 25 bp, Saccharomyces pastorianus
gattcaaccctagatgcaactggat

SEQ ID NO: 42894 - DNA, 25 bp, Saccharomyces pastorianus
gcccatagagcctttttcacaaaac

SEQ ID NO: 42895 - DNA, 25 bp, Saccharomyces pastorianus
taaaagcaatgcaccaacctctgac

SEQ ID NO: 42896 - DNA, 25 bp, Saccharomyces pastorianus
aagcggtagtcttggcatgctaaac

SEQ ID NO: 42897 - DNA, 25 bp, Saccharomyces pastorianus
atagcatcttcttctccaaatttca

SEQ ID NO: 42898 - DNA, 25 bp, Saccharomyces pastorianus
aacgagatcgacttcactaatatgt

SEQ ID NO: 42899 - DNA, 25 bp, Saccharomyces pastorianus
agtggatcccattacaggaccttct

SEQ ID NO: 42900 - DNA, 25 bp, Saccharomyces pastorianus
aagaattccgtctctaaggcaaaat

SEQ ID NO: 42901 - DNA, 25 bp, Saccharomyces pastorianus
agtgctatcccaaattccaatcaag

SEQ ID NO: 42902 - DNA, 25 bp, Saccharomyces pastorianus
gaatcgcaaactgcttaccaacagg

SEQ ID NO: 42903 - DNA, 25 bp, Saccharomyces pastorianus
tgtggaaaacaacgccgactcttct

SEQ ID NO: 42904 - DNA, 25 bp, Saccharomyces pastorianus
ggaggtcaaccccaaggtcaagcca

SEQ ID NO: 42905 - DNA, 25 bp, Saccharomyces pastorianus
gaaagctagctgacgacgcatataa

SEQ ID NO: 42906 - DNA, 25 bp, Saccharomyces pastorianus
gggatcgctaagctcaagccgtcga

SEQ ID NO: 42907 - DNA, 25 bp, Saccharomyces pastorianus
gctgcacccgccaataattataatg

SEQ ID NO: 42908 - DNA, 25 bp, Saccharomyces pastorianus
gcaaggtgtgcaaatcccgggaagt

SEQ ID NO: 42909 - DNA, 25 bp, Saccharomyces pastorianus
gttgcattcgcaaaacgggatcgct

SEQ ID NO: 42910 - DNA, 25 bp, Saccharomyces pastorianus
ttcgctaccgatcacaatgaaccac

SEQ ID NO: 42911 - DNA, 25 bp, Saccharomyces pastorianus
aagtagtaccggaatggctgcaccc

SEQ ID NO: 42912 - DNA, 25 bp, Saccharomyces pastorianus
gccgactcttctagcaacgagattg

SEQ ID NO: 42913 - DNA, 25 bp, Saccharomyces pastorianus
gctagttcttcaaggagctctagaa

SEQ ID NO: 42914 - DNA, 25 bp, Saccharomyces pastorianus
agaagaacctatcccaccattgaat

SEQ ID NO: 42915 - DNA, 25 bp, Saccharomyces pastorianus
gggtgtcgcacctacagaagacgat

SEQ ID NO: 42916 - DNA, 25 bp, Saccharomyces pastorianus
aattccatatcttcatccgaggatg

SEQ ID NO: 42917 - DNA, 25 bp, Saccharomyces pastorianus
gatacacccaagttgtcccaagaag

SEQ ID NO: 42918 - DNA, 25 bp, Saccharomyces pastorianus
gccatcctggaattcatttctagaa

SEQ ID NO: 42919 - DNA, 25 bp, Saccharomyces pastorianus
gaataccaccgcaaagaacttcttt

SEQ ID NO: 42920 - DNA, 25 bp, Saccharomyces pastorianus
gagcgaagaccaatctgaccgggaa

SEQ ID NO: 42921 - DNA, 25 bp, Saccharomyces pastorianus
aaagacgagtatctgccatcctgga

SEQ ID NO: 42922 - DNA, 25 bp, Saccharomyces pastorianus
gacttgaccagggaactgctactgt

SEQ ID NO: 42923 - DNA, 25 bp, Saccharomyces pastorianus
gaatcttccatgagttccacgcaag

SEQ ID NO: 42924 - DNA, 25 bp, Saccharomyces pastorianus
aacctggaacggattatcactggat

SEQ ID NO: 42925 - DNA, 25 bp, Saccharomyces pastorianus
gaaaggtgatattcatcgcggatta

SEQ ID NO: 42926 - DNA, 25 bp, Saccharomyces pastorianus
gattgctcttatattgcttatttga

SEQ ID NO: 42927 - DNA, 25 bp, Saccharomyces pastorianus
gaacttggtttctgagatcatggga

SEQ ID NO: 42928 - DNA, 25 bp, Saccharomyces pastorianus
gaggagaatcgttgccattctgaaa

SEQ ID NO: 42929 - DNA, 25 bp, Saccharomyces pastorianus
ggttggaagagtccccaagtctcaa

SEQ ID NO: 42930 - DNA, 25 bp, Saccharomyces pastorianus
aacccgcaactattgatctaagctg

SEQ ID NO: 42931 - DNA, 25 bp, Saccharomyces pastorianus
gattctgttaataactcgcgggtct

SEQ ID NO: 42932 - DNA, 25 bp, Saccharomyces pastorianus
taaactctggtcattctttgaaagg

SEQ ID NO: 42933 - DNA, 25 bp, Saccharomyces pastorianus
ctcgcgggtcttggatttaaactct

SEQ ID NO: 42934 - DNA, 25 bp, Saccharomyces pastorianus
agtcatttctggacgggattcggaa

SEQ ID NO: 42935 - DNA, 25 bp, Saccharomyces pastorianus
acatggctcggtgccctagtcggaa

SEQ ID NO: 42936 - DNA, 25 bp, Saccharomyces pastorianus
atggctaacgttttgggctttcaag

SEQ ID NO: 42937 - DNA, 25 bp, Saccharomyces pastorianus
tagtcggaaccattcctccattaat

SEQ ID NO: 42938 - DNA, 25 bp, Saccharomyces pastorianus
aatgcccgggtttcgttgagatatt

SEQ ID NO: 42939 - DNA, 25 bp, Saccharomyces pastorianus
tcggtgcttcgaacattgcgttata

SEQ ID NO: 42940 - DNA, 25 bp, Saccharomyces pastorianus
gcaattcccacatttcaacacatta

SEQ ID NO: 42941 - DNA, 25 bp, Saccharomyces pastorianus
gaaaaatcccttattgaatgcccgg

SEQ ID NO: 42942 - DNA, 25 bp, Saccharomyces pastorianus
aatactaatgttccctctttgcttt

SEQ ID NO: 42943 - DNA, 25 bp, Saccharomyces pastorianus
gggctttcaagttctactggcaaca

SEQ ID NO: 42944 - DNA, 25 bp, Saccharomyces pastorianus
agctgggctattgtttgcctggcaa

SEQ ID NO: 42945 - DNA, 25 bp, Saccharomyces pastorianus
gagtgttttacacttaccggcgatt

SEQ ID NO: 42946 - DNA, 25 bp, Saccharomyces pastorianus
gatttgtcttcgagcttaagcgtca

SEQ ID NO: 42947 - DNA, 25 bp, Saccharomyces pastorianus
gcttgaagcaccagggtttttccta

SEQ ID NO: 42948 - DNA, 25 bp, Saccharomyces pastorianus
gcttaagcgtcagcaagtccgcatt

SEQ ID NO: 42949 - DNA, 25 bp, Saccharomyces pastorianus
aacgaggtacttctgacgatgattt

SEQ ID NO: 42950 - DNA, 25 bp, Saccharomyces pastorianus
tgtagatcctccaaaattcgagtgg

SEQ ID NO: 42951 - DNA, 25 bp, Saccharomyces pastorianus
gaagttacaaccgaggcattacaac

SEQ ID NO: 42952 - DNA, 25 bp, Saccharomyces pastorianus
ttgaccgtaacacgcctaacgatgg

SEQ ID NO: 42953 - DNA, 25 bp, Saccharomyces pastorianus
agattggcaagctctatccgaagtg

SEQ ID NO: 42954 - DNA, 25 bp, Saccharomyces pastorianus
ttattgactgtaccgacaagcccat

SEQ ID NO: 42955 - DNA, 25 bp, Saccharomyces pastorianus
gagcgccaactttgggcaatggtat

SEQ ID NO: 42956 - DNA, 25 bp, Saccharomyces pastorianus
acgccagatgggtttgtagatcctc

SEQ ID NO: 42957 - DNA, 25 bp, Saccharomyces pastorianus
gaggtcggcactctactagaaacga

SEQ ID NO: 42958 - DNA, 25 bp, Saccharomyces pastorianus
atgtggtcgacctgcaagattctga

SEQ ID NO: 42959 - DNA, 25 bp, Saccharomyces pastorianus
aacgccggccgatatctgatttgaa

SEQ ID NO: 42960 - DNA, 25 bp, Saccharomyces pastorianus
tgagggctcaagtcacttctcgagt

SEQ ID NO: 42961 - DNA, 25 bp, Saccharomyces pastorianus
accggttgcggcgacactgaagtca

SEQ ID NO: 42962 - DNA, 25 bp, Saccharomyces pastorianus
atgacgctggagaaacccgggcaca

SEQ ID NO: 42963 - DNA, 25 bp, Saccharomyces pastorianus
ttgaaaccgctcactaatgcacacc

SEQ ID NO: 42964 - DNA, 25 bp, Saccharomyces pastorianus
acttctcgagtgacggcaacatcaa

SEQ ID NO: 42965 - DNA, 25 bp, Saccharomyces pastorianus
ggccgtcgatccaaatttggcgcta

SEQ ID NO: 42966 - DNA, 25 bp, Saccharomyces pastorianus
gatgttaccattcgaggtcggcact

SEQ ID NO: 42967 - DNA, 25 bp, Saccharomyces pastorianus
aacgattacgggacagagccttgaa

SEQ ID NO: 42968 - DNA, 25 bp, Saccharomyces pastorianus
ggcaaccgtatagcgtaacatgtga

SEQ ID NO: 42969 - DNA, 25 bp, Saccharomyces pastorianus
cggaacatcgttttatatggcccca

SEQ ID NO: 42970 - DNA, 25 bp, Saccharomyces pastorianus
aattcccctttgaatccgacaagat

SEQ ID NO: 42971 - DNA, 25 bp, Saccharomyces pastorianus
ttggcgataacattcaccggaacat

SEQ ID NO: 42972 - DNA, 25 bp, Saccharomyces pastorianus
attttctccccgcttgaaggacgag

SEQ ID NO: 42973 - DNA, 25 bp, Saccharomyces pastorianus
tggtctttaggcttaaccctactag

SEQ ID NO: 42974 - DNA, 25 bp, Saccharomyces pastorianus
agcatccatggattgtcggacaaat

SEQ ID NO: 42975 - DNA, 25 bp, Saccharomyces pastorianus
gaccatgattctgacattttctccc

SEQ ID NO: 42976 - DNA, 25 bp, Saccharomyces pastorianus
aagaccatctccacggcaaatgtta

SEQ ID NO: 42977 - DNA, 25 bp, Saccharomyces pastorianus
gaggctgtcaactccttggcgataa

SEQ ID NO: 42978 - DNA, 25 bp, Saccharomyces pastorianus
aaaccgcaaaatatccttctcaatg

SEQ ID NO: 42979 - DNA, 25 bp, Saccharomyces pastorianus
gattctctaaaagcatcgccttcaa

SEQ ID NO: 42980 - DNA, 25 bp, Saccharomyces pastorianus
aaacccgactactgacaactgtgag

SEQ ID NO: 42981 - DNA, 25 bp, Saccharomyces pastorianus
ttctgctcctgtttctggcaaagat

SEQ ID NO: 42982 - DNA, 25 bp, Saccharomyces pastorianus
ggcttgctttccaatgtttctgctc

SEQ ID NO: 42983 - DNA, 25 bp, Saccharomyces pastorianus
gataattcggcttcatcatcttcag

SEQ ID NO: 42984 - DNA, 25 bp, Saccharomyces pastorianus
tcaggtgcagccttgagatcagcaa

SEQ ID NO: 42985 - DNA, 25 bp, Saccharomyces pastorianus
aaaatagtgcttcgatgccctcatc

SEQ ID NO: 42986 - DNA, 25 bp, Saccharomyces pastorianus
tatccactccagtaactccgaaaat

SEQ ID NO: 42987 - DNA, 25 bp, Saccharomyces pastorianus
tcatgccaaagatcccatcaggtgc

SEQ ID NO: 42988 - DNA, 25 bp, Saccharomyces pastorianus
gaaacagctgccacgagtttatcca

SEQ ID NO: 42989 - DNA, 25 bp, Saccharomyces pastorianus
atgcgtcatcaagcacttctgtagg

SEQ ID NO: 42990 - DNA, 25 bp, Saccharomyces pastorianus
gcttcggtggtactcccataacaga

SEQ ID NO: 42991 - DNA, 25 bp, Saccharomyces pastorianus
gaatccgtatttcgttcaccagtga

SEQ ID NO: 42992 - DNA, 25 bp, Saccharomyces pastorianus
actcttcttaggtttggcatacgca

SEQ ID NO: 42993 - DNA, 25 bp, Saccharomyces pastorianus
accaggcgaaacagctctagcattt

SEQ ID NO: 42994 - DNA, 25 bp, Saccharomyces pastorianus
agcagcatagcgatactcttcttag

SEQ ID NO: 42995 - DNA, 25 bp, Saccharomyces pastorianus
tatcggtatggccacctatagtata

SEQ ID NO: 42996 - DNA, 25 bp, Saccharomyces pastorianus
atcgatatgcctgtctttttcttta

SEQ ID NO: 42997 - DNA, 25 bp, Saccharomyces pastorianus
ggaagtttgttcctcagcaacgtga

SEQ ID NO: 42998 - DNA, 25 bp, Saccharomyces pastorianus
gaggcggcccagtacttcaataaaa

SEQ ID NO: 42999 - DNA, 25 bp, Saccharomyces pastorianus
gaagtatcacaaattctgccctgga

SEQ ID NO: 43000 - DNA, 25 bp, Saccharomyces pastorianus
gacggatctgctgtaagtgactcga

SEQ ID NO: 43001 - DNA, 25 bp, Saccharomyces pastorianus
gcaaaagcaatgatcccgtacacaa

SEQ ID NO: 43002 - DNA, 25 bp, Saccharomyces pastorianus
gaatatctggaatcacatctgggag

SEQ ID NO: 43003 - DNA, 25 bp, Saccharomyces pastorianus
ggatctcctacgtaaatccagatgc

SEQ ID NO: 43004 - DNA, 25 bp, Saccharomyces pastorianus
cgcacacttgccagaatccatgaga

SEQ ID NO: 43005 - DNA, 25 bp, Saccharomyces pastorianus
tgtatccaaggaccaaccgtatgat

SEQ ID NO: 43006 - DNA, 25 bp, Saccharomyces pastorianus
ttccatcctttaactaccgagcaac

SEQ ID NO: 43007 - DNA, 25 bp, Saccharomyces pastorianus
catattttaggcgtctcgagcttat

SEQ ID NO: 43008 - DNA, 25 bp, Saccharomyces pastorianus
tgaaaactatcaaccccagcttgtt

SEQ ID NO: 43009 - DNA, 25 bp, Saccharomyces pastorianus
attgtcacagaacagtcgcttgcct

SEQ ID NO: 43010 - DNA, 25 bp, Saccharomyces pastorianus
aattcaagttgtcgccaggatctcc

SEQ ID NO: 43011 - DNA, 25 bp, Saccharomyces pastorianus
cggcttggttcctattttaacagag

SEQ ID NO: 43012 - DNA, 25 bp, Saccharomyces pastorianus
tggagctttcattcatcctgaactc

SEQ ID NO: 43013 - DNA, 25 bp, Saccharomyces pastorianus
aaaatacccatttacagcaggcctg

SEQ ID NO: 43014 - DNA, 25 bp, Saccharomyces pastorianus
ggaccgtttgcgagatggagctttc

SEQ ID NO: 43015 - DNA, 25 bp, Saccharomyces pastorianus
atggaagaccagctctatgaagtaa

SEQ ID NO: 43016 - DNA, 25 bp, Saccharomyces pastorianus
gaaggcgccaacgatgaatctcaca

SEQ ID NO: 43017 - DNA, 25 bp, Saccharomyces pastorianus
catcctgaactccaccttaattaag

SEQ ID NO: 43018 - DNA, 25 bp, Saccharomyces pastorianus
aggcctgtaagatcctcggcgagga

SEQ ID NO: 43019 - DNA, 25 bp, Saccharomyces pastorianus
agcgaagactttaagcagctttctg

SEQ ID NO: 43020 - DNA, 25 bp, Saccharomyces pastorianus
gaatcgacgaagcaactcaccattt

SEQ ID NO: 43021 - DNA, 25 bp, Saccharomyces pastorianus
agcagctttctgaagttgagcaaga

SEQ ID NO: 43022 - DNA, 25 bp, Saccharomyces pastorianus
gatggtaatcgggtctgcaagaaga

SEQ ID NO: 43023 - DNA, 25 bp, Saccharomyces pastorianus
aattcccaaccaaaatctgagccgt

SEQ ID NO: 43024 - DNA, 25 bp, Saccharomyces pastorianus
cttgccaccgcctcagataaaggaa

SEQ ID NO: 43025 - DNA, 25 bp, Saccharomyces pastorianus
ttaggcgtggcaccaggctatgcaa

SEQ ID NO: 43026 - DNA, 25 bp, Saccharomyces pastorianus
agattatgcatcttccaggtcgttg

SEQ ID NO: 43027 - DNA, 25 bp, Saccharomyces pastorianus
atagcattccatcaagacctggtga

SEQ ID NO: 43028 - DNA, 25 bp, Saccharomyces pastorianus
atgatggtagactacttgccaccgc

SEQ ID NO: 43029 - DNA, 25 bp, Saccharomyces pastorianus
atcaagtttatgtcgcctcggatga

SEQ ID NO: 43030 - DNA, 25 bp, Saccharomyces pastorianus
tgagccgtaatttcgcacacatatc

SEQ ID NO: 43031 - DNA, 25 bp, Saccharomyces pastorianus
atgttgcatgtctagctgtgagtca

SEQ ID NO: 43032 - DNA, 25 bp, Saccharomyces pastorianus
ccttcccggagatgctattggcagt

SEQ ID NO: 43033 - DNA, 25 bp, Saccharomyces pastorianus
tgatgaagttgctagccttcccgga

SEQ ID NO: 43034 - DNA, 25 bp, Saccharomyces pastorianus
gactcagagacgctttctaacgtta

SEQ ID NO: 43035 - DNA, 25 bp, Saccharomyces pastorianus
ggacgctgatgtgtccaagttcttg

SEQ ID NO: 43036 - DNA, 25 bp, Saccharomyces pastorianus
aaagggcgtgccatttggtgttaca

SEQ ID NO: 43037 - DNA, 25 bp, Saccharomyces pastorianus
ggcactttatctgctgccagattga

SEQ ID NO: 43038 - DNA, 25 bp, Saccharomyces pastorianus
aatcacctaatctacgtcatggcca

SEQ ID NO: 43039 - DNA, 25 bp, Saccharomyces pastorianus
gaaaatcttcactttctcaagttca

SEQ ID NO: 43040 - DNA, 25 bp, Saccharomyces pastorianus
gttacagtgcccttattgacaacgg

SEQ ID NO: 43041 - DNA, 25 bp, Saccharomyces pastorianus
gttggatccggtacagactcagaga

SEQ ID NO: 43042 - DNA, 25 bp, Saccharomyces pastorianus
aacgctgttttcattgacccttcaa

SEQ ID NO: 43043 - DNA, 25 bp, Saccharomyces pastorianus
ggccaagatcctacaacatgcagat

SEQ ID NO: 43044 - DNA, 25 bp, Saccharomyces pastorianus
ttgggcattatgacggcactttatc

SEQ ID NO: 43045 - DNA, 25 bp, Saccharomyces pastorianus
aaacgaggagctgtatctgcaatac

SEQ ID NO: 43046 - DNA, 25 bp, Saccharomyces pastorianus
taaccattatggttccgtggtgttt

SEQ ID NO: 43047 - DNA, 25 bp, Saccharomyces pastorianus
gcaatacaaccagtatgttccctta

SEQ ID NO: 43048 - DNA, 25 bp, Saccharomyces pastorianus
gaagactgtcaattctcctttcaac

SEQ ID NO: 43049 - DNA, 25 bp, Saccharomyces pastorianus
tgaaaacgattctccatgctgcccg

SEQ ID NO: 43050 - DNA, 25 bp, Saccharomyces pastorianus
tctcgtgcacgttgtatggttacct

SEQ ID NO: 43051 - DNA, 25 bp, Saccharomyces pastorianus
ctgggcatgacatttgctttggcat

SEQ ID NO: 43052 - DNA, 25 bp, Saccharomyces pastorianus
gcattcagagtcatagctaccatat

SEQ ID NO: 43053 - DNA, 25 bp, Saccharomyces pastorianus
tgtttgctggtcaatcttatgcctc

SEQ ID NO: 43054 - DNA, 25 bp, Saccharomyces pastorianus
atcgctatgggttacttctttacgg

SEQ ID NO: 43055 - DNA, 25 bp, Saccharomyces pastorianus
cgtggtgtttcaaggttctgggcat

SEQ ID NO: 43056 - DNA, 25 bp, Saccharomyces pastorianus
tcggtttaatcccatggtcgcctaa

SEQ ID NO: 43057 - DNA, 25 bp, Saccharomyces pastorianus
gagttgatcccgtttgctaagagac

SEQ ID NO: 43058 - DNA, 25 bp, Saccharomyces pastorianus
atgtcaggtacatcggagcctcgag

SEQ ID NO: 43059 - DNA, 25 bp, Saccharomyces pastorianus
ttactacaatctgctcaaccgtgag

SEQ ID NO: 43060 - DNA, 25 bp, Saccharomyces pastorianus
attgtcggcttgaactccacatcaa

SEQ ID NO: 43061 - DNA, 25 bp, Saccharomyces pastorianus
gtgaccctaccatcaaagcgttgaa

SEQ ID NO: 43062 - DNA, 25 bp, Saccharomyces pastorianus
gaatgtctccatggcaatgatctcc

SEQ ID NO: 43063 - DNA, 25 bp, Saccharomyces pastorianus
aattggacgctctcgaagacgacca

SEQ ID NO: 43064 - DNA, 25 bp, Saccharomyces pastorianus
gactgggcacgtacatagatctttt

SEQ ID NO: 43065 - DNA, 25 bp, Saccharomyces pastorianus
gagcatgctcgcaaccgaatttgca

SEQ ID NO: 43066 - DNA, 25 bp, Saccharomyces pastorianus
aatgatctccatagcctgggtgctg

SEQ ID NO: 43067 - DNA, 25 bp, Saccharomyces pastorianus
aaccctctaatctctctactaatat

SEQ ID NO: 43068 - DNA, 25 bp, Saccharomyces pastorianus
atcacgttcgcaatgttgacgctct

SEQ ID NO: 43069 - DNA, 25 bp, Saccharomyces pastorianus
agttgaccctttattatcctcattc

SEQ ID NO: 43070 - DNA, 25 bp, Saccharomyces pastorianus
gccctagttgcggttttatcatcaa

SEQ ID NO: 43071 - DNA, 25 bp, Saccharomyces pastorianus
aatatacttgttgccctagttgcgg

SEQ ID NO: 43072 - DNA, 25 bp, Saccharomyces pastorianus
atcattgtttactccttccttaacg

SEQ ID NO: 43073 - DNA, 25 bp, Saccharomyces pastorianus
attatcctttctttcctaacattgg

SEQ ID NO: 43074 - DNA, 25 bp, Saccharomyces pastorianus
acgttactctcggttggatctatat

SEQ ID NO: 43075 - DNA, 25 bp, Saccharomyces pastorianus
gtcgttttggctatccgtatggtac

SEQ ID NO: 43076 - DNA, 25 bp, Saccharomyces pastorianus
ttttacccagttatctatcagtgac

SEQ ID NO: 43077 - DNA, 25 bp, Saccharomyces pastorianus
aatcgctttctaagaccactgcatc

SEQ ID NO: 43078 - DNA, 25 bp, Saccharomyces pastorianus
gcacgcacagacgatagtaaccttg

SEQ ID NO: 43079 - DNA, 25 bp, Saccharomyces pastorianus
ggtttcataatcagtttgccccaaa

SEQ ID NO: 43080 - DNA, 25 bp, Saccharomyces pastorianus
gaggctgacaccgatgttgatatgt

SEQ ID NO: 43081 - DNA, 25 bp, Saccharomyces pastorianus
aggcaataatcatcacagtgggtcg

SEQ ID NO: 43082 - DNA, 25 bp, Saccharomyces pastorianus
gaaaccattctccagatccgatagg

SEQ ID NO: 43083 - DNA, 25 bp, Saccharomyces pastorianus
agcatagcattctctgatgccatcc

SEQ ID NO: 43084 - DNA, 25 bp, Saccharomyces pastorianus
gtaaccttgttcataacagcatagc

SEQ ID NO: 43085 - DNA, 25 bp, Saccharomyces pastorianus
tctctagatgagacaggccccaaaa

SEQ ID NO: 43086 - DNA, 25 bp, Saccharomyces pastorianus
atgccatccacgacaaggctctgaa

SEQ ID NO: 43087 - DNA, 25 bp, Saccharomyces pastorianus
tgggctgactacaaggaagttgctt

SEQ ID NO: 43088 - DNA, 25 bp, Saccharomyces pastorianus
cccaaagcccacctatgatggagag

SEQ ID NO: 43089 - DNA, 25 bp, Saccharomyces pastorianus
atgtcgttcaagcattggtcactcc

SEQ ID NO: 43090 - DNA, 25 bp, Saccharomyces pastorianus
gaatattgtccatactctgttcaag

SEQ ID NO: 43091 - DNA, 25 bp, Saccharomyces pastorianus
gaaggttgtttgcaatcctcatgaa

SEQ ID NO: 43092 - DNA, 25 bp, Saccharomyces pastorianus
tggtcactcccctagttcataataa

SEQ ID NO: 43093 - DNA, 25 bp, Saccharomyces pastorianus
atgtgccatctgcttctatgatcaa

SEQ ID NO: 43094 - DNA, 25 bp, Saccharomyces pastorianus
atcatggatccaccaagcggtcaaa

SEQ ID NO: 43095 - DNA, 25 bp, Saccharomyces pastorianus
aatgttgctgctatgttattctgct

SEQ ID NO: 43096 - DNA, 25 bp, Saccharomyces pastorianus
atcgccattcacttatgtcgttcaa

SEQ ID NO: 43097 - DNA, 25 bp, Saccharomyces pastorianus
aagacaaaagatgcctgccttctgg

SEQ ID NO: 43098 - DNA, 25 bp, Saccharomyces pastorianus
ctggtaaacccatctgctactgaaa

SEQ ID NO: 43099 - DNA, 25 bp, Saccharomyces pastorianus
gatgtacaacgtatcgccattcact

SEQ ID NO: 43100 - DNA, 25 bp, Saccharomyces pastorianus
gagtggatcctggtatcaagttgta

SEQ ID NO: 43101 - DNA, 25 bp, Saccharomyces pastorianus
gtgatatcgggtatgacttattcag

SEQ ID NO: 43102 - DNA, 25 bp, Saccharomyces pastorianus
gacatcccattttggacgagtttga

SEQ ID NO: 43103 - DNA, 25 bp, Saccharomyces pastorianus
taatttcaaagccttcattaccgaa

SEQ ID NO: 43104 - DNA, 25 bp, Saccharomyces pastorianus
ctaaggaagccaacgacaagatctg

SEQ ID NO: 43105 - DNA, 25 bp, Saccharomyces pastorianus
gtggtggacactactttgatatttt

SEQ ID NO: 43106 - DNA, 25 bp, Saccharomyces pastorianus
aaagggctctgacaatttcaacaat

SEQ ID NO: 43107 - DNA, 25 bp, Saccharomyces pastorianus
aaagtattcgggttcacattgagca

SEQ ID NO: 43108 - DNA, 25 bp, Saccharomyces pastorianus
attgccccatgaacgatgacatttg

SEQ ID NO: 43109 - DNA, 25 bp, Saccharomyces pastorianus
ggaaagtatgacaattgccccatga

SEQ ID NO: 43110 - DNA, 25 bp, Saccharomyces pastorianus
aagatttccccaagtttatatcaga

SEQ ID NO: 43111 - DNA, 25 bp, Saccharomyces pastorianus
caaactgtcacattgggtccgggat

SEQ ID NO: 43112 - DNA, 25 bp, Saccharomyces pastorianus
attgggtccgggattcgatcaaatc

SEQ ID NO: 43113 - DNA, 25 bp, Saccharomyces pastorianus
gatatggtaggtccaactttcggga

SEQ ID NO: 43114 - DNA, 25 bp, Saccharomyces pastorianus
taagtagagcagttccccaaaaggg

SEQ ID NO: 43115 - DNA, 25 bp, Saccharomyces pastorianus
gaggcaagttttttacgagtcaaag

SEQ ID NO: 43116 - DNA, 25 bp, Saccharomyces pastorianus
accagtatttggcacatgtcataga

SEQ ID NO: 43117 - DNA, 25 bp, Saccharomyces pastorianus
aatatctatctacttgacgtacgat

SEQ ID NO: 43118 - DNA, 25 bp, Saccharomyces pastorianus
atactagctgggtattctgactcag

SEQ ID NO: 43119 - DNA, 25 bp, Saccharomyces pastorianus
atccgaacacttaactcgccaagtt

SEQ ID NO: 43120 - DNA, 25 bp, Saccharomyces pastorianus
ccaagttatcccatccacaaaggca

SEQ ID NO: 43121 - DNA, 25 bp, Saccharomyces pastorianus
aatcagagcgttggccgtgctatac

SEQ ID NO: 43122 - DNA, 25 bp, Saccharomyces pastorianus
ggcaatgcgctactcatagaactaa

SEQ ID NO: 43123 - DNA, 25 bp, Saccharomyces pastorianus
atgactgcaattccgttaataaccg

SEQ ID NO: 43124 - DNA, 25 bp, Saccharomyces pastorianus
agcgtataacatccttagcgaacaa

SEQ ID NO: 43125 - DNA, 25 bp, Saccharomyces pastorianus
gatatcgtttccagcagaatttcat

SEQ ID NO: 43126 - DNA, 25 bp, Saccharomyces pastorianus
accgcttctcctgaaaaggttgaca

SEQ ID NO: 43127 - DNA, 25 bp, Saccharomyces pastorianus
ttgcgtgaacattttaccgcttctc

SEQ ID NO: 43128 - DNA, 25 bp, Saccharomyces pastorianus
atcaggcccgttatataattatgcg

SEQ ID NO: 43129 - DNA, 25 bp, Saccharomyces pastorianus
gcgttgaggatatccaattttccca

SEQ ID NO: 43130 - DNA, 25 bp, Saccharomyces pastorianus
aaactgctgttgaggctgctgtgaa

SEQ ID NO: 43131 - DNA, 25 bp, Saccharomyces pastorianus
taataaccggcaatctcacagctac

SEQ ID NO: 43132 - DNA, 25 bp, Saccharomyces pastorianus
taccctgttggccataaatttagaa

SEQ ID NO: 43133 - DNA, 25 bp, Saccharomyces pastorianus
tgctacaagagcttccgttgataac

SEQ ID NO: 43134 - DNA, 25 bp, Saccharomyces pastorianus
atagtcgccatcaacaatgatcctg

SEQ ID NO: 43135 - DNA, 25 bp, Saccharomyces pastorianus
tgataaattactctccccattagct

SEQ ID NO: 43136 - DNA, 25 bp, Saccharomyces pastorianus
attcaacccgtttgtgatgtcactg

SEQ ID NO: 43137 - DNA, 25 bp, Saccharomyces pastorianus
gctcctatctttaacgtggctgact

SEQ ID NO: 43138 - DNA, 25 bp, Saccharomyces pastorianus
gaacttacttctgcgttgaatgtgg

SEQ ID NO: 43139 - DNA, 25 bp, Saccharomyces pastorianus
gaagtacggactctgttgcgatcga

SEQ ID NO: 43140 - DNA, 25 bp, Saccharomyces pastorianus
aattctctacaaatcggccagaccg

SEQ ID NO: 43141 - DNA, 25 bp, Saccharomyces pastorianus
agctgacgttttgcatgctgctata

SEQ ID NO: 43142 - DNA, 25 bp, Saccharomyces pastorianus
ttgtatatagccgttggtgtctccg

SEQ ID NO: 43143 - DNA, 25 bp, Saccharomyces pastorianus
tgatttggacgtcacctgggttaaa

SEQ ID NO: 43144 - DNA, 25 bp, Saccharomyces pastorianus
aacccggacgctcgaagcattaaag

SEQ ID NO: 43145 - DNA, 25 bp, Saccharomyces pastorianus
gaaaatatcacgtacccgagtaagg

SEQ ID NO: 43146 - DNA, 25 bp, Saccharomyces pastorianus
atccttccctacaaatatatcactc

SEQ ID NO: 43147 - DNA, 25 bp, Saccharomyces pastorianus
ggattgccatctatactgtcaaaag

SEQ ID NO: 43148 - DNA, 25 bp, Saccharomyces pastorianus
ctcctcccataaacagatcgtcaaa

SEQ ID NO: 43149 - DNA, 25 bp, Saccharomyces pastorianus
aaatgctattctccaagacctctaa

SEQ ID NO: 43150 - DNA, 25 bp, Saccharomyces pastorianus
agacgcaactactgaccatttgggt

SEQ ID NO: 43151 - DNA, 25 bp, Saccharomyces pastorianus
attagtatcgtgaatccttccctac

SEQ ID NO: 43152 - DNA, 25 bp, Saccharomyces pastorianus
tcgtcaaaacgcctgtccctaagag

SEQ ID NO: 43153 - DNA, 25 bp, Saccharomyces pastorianus
gagtggccgttctccggtagaaaag

SEQ ID NO: 43154 - DNA, 25 bp, Saccharomyces pastorianus
aactatgcgctaggattgccatcta

SEQ ID NO: 43155 - DNA, 25 bp, Saccharomyces pastorianus
agctcgtgtcttgagaagttctcct

SEQ ID NO: 43156 - DNA, 25 bp, Saccharomyces pastorianus
gatacaacggtattctccacgctat

SEQ ID NO: 43157 - DNA, 25 bp, Saccharomyces pastorianus
attggccgcttatgaactgttcaag

SEQ ID NO: 43158 - DNA, 25 bp, Saccharomyces pastorianus
gctttattccttcccctgatgataa

SEQ ID NO: 43159 - DNA, 25 bp, Saccharomyces pastorianus
gactacgccctttgatgtcataaaa

SEQ ID NO: 43160 - DNA, 25 bp, Saccharomyces pastorianus
cacgctattcgtatcatcctgaagg

SEQ ID NO: 43161 - DNA, 25 bp, Saccharomyces pastorianus
gtgggaacttttaactgctggtgcc

SEQ ID NO: 43162 - DNA, 25 bp, Saccharomyces pastorianus
tagatttgacccttcagtttacaag

SEQ ID NO: 43163 - DNA, 25 bp, Saccharomyces pastorianus
atgataatgagctcccactgcagaa

SEQ ID NO: 43164 - DNA, 25 bp, Saccharomyces pastorianus
agaagctctattcccgtgacaggaa

SEQ ID NO: 43165 - DNA, 25 bp, Saccharomyces pastorianus
aatttgggttcacattggccgctta

SEQ ID NO: 43166 - DNA, 25 bp, Saccharomyces pastorianus
gattcggcaaaactgctagcggtca

SEQ ID NO: 43167 - DNA, 25 bp, Saccharomyces pastorianus
ccgctgcatggcttttttctagata

SEQ ID NO: 43168 - DNA, 25 bp, Saccharomyces pastorianus
acttatcgaggaaacagcgcctttg

SEQ ID NO: 43169 - DNA, 25 bp, Saccharomyces pastorianus
tgtatttatatacccctccccaaat

SEQ ID NO: 43170 - DNA, 25 bp, Saccharomyces pastorianus
gctagcggtcataatggcgtgcaag

SEQ ID NO: 43171 - DNA, 25 bp, Saccharomyces pastorianus
gcgcctttgagtactgaagacgcca

SEQ ID NO: 43172 - DNA, 25 bp, Saccharomyces pastorianus
taactggcgcattgttaaccgacgc

SEQ ID NO: 43173 - DNA, 25 bp, Saccharomyces pastorianus
attactgccaaaatccatcaagcct

SEQ ID NO: 43174 - DNA, 25 bp, Saccharomyces pastorianus
aagccttggtgacgaggtacctcga

SEQ ID NO: 43175 - DNA, 25 bp, Saccharomyces pastorianus
aagaggctcaaaacgacggcagcaa

SEQ ID NO: 43176 - DNA, 25 bp, Saccharomyces pastorianus
gaagacgccaagagaatcgcagcaa

SEQ ID NO: 43177 - DNA, 25 bp, Saccharomyces pastorianus
tttcgatttctatcttgcctcattc

SEQ ID NO: 43178 - DNA, 25 bp, Saccharomyces pastorianus
gaatcaagtcgtaaccaatcgctga

SEQ ID NO: 43179 - DNA, 25 bp, Saccharomyces pastorianus
aacggcccgcaagaaatatttcgat

SEQ ID NO: 43180 - DNA, 25 bp, Saccharomyces pastorianus
aacgcgctaagctattgatcgattt

SEQ ID NO: 43181 - DNA, 25 bp, Saccharomyces pastorianus
gctgattgagatattgcccagtaat

SEQ ID NO: 43182 - DNA, 25 bp, Saccharomyces pastorianus
aattcttgataacatgcctgtgaac

SEQ ID NO: 43183 - DNA, 25 bp, Saccharomyces pastorianus
gcctgtgaacccaagtgagccatat

SEQ ID NO: 43184 - DNA, 25 bp, Saccharomyces pastorianus
attggccaacttctagatgatgctg

SEQ ID NO: 43185 - DNA, 25 bp, Saccharomyces pastorianus
atgatgctggagtaccggtcgagaa

SEQ ID NO: 43186 - DNA, 25 bp, Saccharomyces pastorianus
aatcgagcagatacctagactaaac

SEQ ID NO: 43187 - DNA, 25 bp, Saccharomyces pastorianus
tttgagcgacattgaaccggaggat

SEQ ID NO: 43188 - DNA, 25 bp, Saccharomyces pastorianus
gggatggttctgctattggctttaa

SEQ ID NO: 43189 - DNA, 25 bp, Saccharomyces pastorianus
actgtctgattctcaaactcggcgg

SEQ ID NO: 43190 - DNA, 25 bp, Saccharomyces pastorianus
gggtgagaacccagctaatatgatt

SEQ ID NO: 43191 - DNA, 25 bp, Saccharomyces pastorianus
ggagtaaactccaacacattagcag

SEQ ID NO: 43192 - DNA, 25 bp, Saccharomyces pastorianus
ggcgttgcaaaagagttcacagact

SEQ ID NO: 43193 - DNA, 25 bp, Saccharomyces pastorianus
gaatcagttttaccattccctggct

SEQ ID NO: 43194 - DNA, 25 bp, Saccharomyces pastorianus
aaactatggtgtcgtgtttctccgt

SEQ ID NO: 43195 - DNA, 25 bp, Saccharomyces pastorianus
cattccctggcttggctcaaaaaat

SEQ ID NO: 43196 - DNA, 25 bp, Saccharomyces pastorianus
aagtctcaactttattacatctcgg

SEQ ID NO: 43197 - DNA, 25 bp, Saccharomyces pastorianus
gggatctccaatgacgttttccaaa

SEQ ID NO: 43198 - DNA, 25 bp, Saccharomyces pastorianus
gttcacaattatcatcgagctcatc

SEQ ID NO: 43199 - DNA, 25 bp, Saccharomyces pastorianus
tggattttgccgatgatcaactcaa

SEQ ID NO: 43200 - DNA, 25 bp, Saccharomyces pastorianus
agaacttagtgcaggtgagcgtcgc

SEQ ID NO: 43201 - DNA, 25 bp, Saccharomyces pastorianus
gctatgataccgtccaacactttaa

SEQ ID NO: 43202 - DNA, 25 bp, Saccharomyces pastorianus
gaaagacttgtcactgagcctaaat

SEQ ID NO: 43203 - DNA, 25 bp, Saccharomyces pastorianus
gaatctccgcaaaaatatcttctga

SEQ ID NO: 43204 - DNA, 25 bp, Saccharomyces pastorianus
aaacaatccgtttggctcactgact

SEQ ID NO: 43205 - DNA, 25 bp, Saccharomyces pastorianus
tttgtgacataattgaatctccgca

SEQ ID NO: 43206 - DNA, 25 bp, Saccharomyces pastorianus
acgggcacaaacctcgacaactatg

SEQ ID NO: 43207 - DNA, 25 bp, Saccharomyces pastorianus
tcactgactgaggagcaactacaaa

SEQ ID NO: 43208 - DNA, 25 bp, Saccharomyces pastorianus
aaatttgactgagcccatagagcat

SEQ ID NO: 43209 - DNA, 25 bp, Saccharomyces pastorianus
tagaaaaccttcctaacacaccaag

SEQ ID NO: 43210 - DNA, 25 bp, Saccharomyces pastorianus
aggaaaaccttccatctgacgtgga

SEQ ID NO: 43211 - DNA, 25 bp, Saccharomyces pastorianus
ggccgctgcttccactttagaaaat

SEQ ID NO: 43212 - DNA, 25 bp, Saccharomyces pastorianus
gaaggccgctgaactagatattttg

SEQ ID NO: 43213 - DNA, 25 bp, Saccharomyces pastorianus
agttttggtctctccggaatacgag

SEQ ID NO: 43214 - DNA, 25 bp, Saccharomyces pastorianus
cgaatgggccgttgatatgtctgaa

SEQ ID NO: 43215 - DNA, 25 bp, Saccharomyces pastorianus
gtcgcgtcaaattaaggccgctgct

SEQ ID NO: 43216 - DNA, 25 bp, Saccharomyces pastorianus
aagaagccatcagagctcgtgccaa

SEQ ID NO: 43217 - DNA, 25 bp, Saccharomyces pastorianus
gaagctaactctgaactcagccaat

SEQ ID NO: 43218 - DNA, 25 bp, Saccharomyces pastorianus
tgtcttggcccaatgtctttttgat

SEQ ID NO: 43219 - DNA, 25 bp, Saccharomyces pastorianus
gagctgcgaaaccattcattacatg

SEQ ID NO: 43220 - DNA, 25 bp, Saccharomyces pastorianus
ttcactaaagttttggtctctccgg

SEQ ID NO: 43221 - DNA, 25 bp, Saccharomyces pastorianus
gttgatcctgcccttaactgagagg

SEQ ID NO: 43222 - DNA, 25 bp, Saccharomyces pastorianus
ggagacgccttcaagttgatcctgc

SEQ ID NO: 43223 - DNA, 25 bp, Saccharomyces pastorianus
acatagggatgcttgccgtggaatc

SEQ ID NO: 43224 - DNA, 25 bp, Saccharomyces pastorianus
acgtaccgtggtcatggcatagcga

SEQ ID NO: 43225 - DNA, 25 bp, Saccharomyces pastorianus
tggacgtcaagagtagcacacctag

SEQ ID NO: 43226 - DNA, 25 bp, Saccharomyces pastorianus
gacgcggacttatcagagccgtatt

SEQ ID NO: 43227 - DNA, 25 bp, Saccharomyces pastorianus
cagagagctcactgcgacgagatta

SEQ ID NO: 43228 - DNA, 25 bp, Saccharomyces pastorianus
ggatgttccggtactacctgaacga

SEQ ID NO: 43229 - DNA, 25 bp, Saccharomyces pastorianus
tggcctgaattgacgtacattgctg

SEQ ID NO: 43230 - DNA, 25 bp, Saccharomyces pastorianus
tgtggcggcgctgaacctgtatgaa

SEQ ID NO: 43231 - DNA, 25 bp, Saccharomyces pastorianus
taactgagaggagctgcacccggtc

SEQ ID NO: 43232 - DNA, 25 bp, Saccharomyces pastorianus
gcccgttcaggctcacaatgatgat

SEQ ID NO: 43233 - DNA, 25 bp, Saccharomyces pastorianus
acacctgaaaggcttacggcggagt

SEQ ID NO: 43234 - DNA, 25 bp, Saccharomyces pastorianus
taacggtaccacctgcgttggagaa

SEQ ID NO: 43235 - DNA, 25 bp, Saccharomyces pastorianus
gataaaatcactcttccgatggaga

SEQ ID NO: 43236 - DNA, 25 bp, Saccharomyces pastorianus
ggcgatacgcatacacttagcgggt

SEQ ID NO: 43237 - DNA, 25 bp, Saccharomyces pastorianus
ttatctactgatacacacacctgaa

SEQ ID NO: 43238 - DNA, 25 bp, Saccharomyces pastorianus
aaatgagcatacctttccagaaaat

SEQ ID NO: 43239 - DNA, 25 bp, Saccharomyces pastorianus
cacgagcacgttgagagacctgggt

SEQ ID NO: 43240 - DNA, 25 bp, Saccharomyces pastorianus
atgacccacgacacactatgttttg

SEQ ID NO: 43241 - DNA, 25 bp, Saccharomyces pastorianus
cttagcgggtacaaccaatggttca

SEQ ID NO: 43242 - DNA, 25 bp, Saccharomyces pastorianus
accgccgtttccaagattggctatt

SEQ ID NO: 43243 - DNA, 25 bp, Saccharomyces pastorianus
gacttcatcaagtcccacatttgga

SEQ ID NO: 43244 - DNA, 25 bp, Saccharomyces pastorianus
aatagcagtgtgtttcgcatcttcc

SEQ ID NO: 43245 - DNA, 25 bp, Saccharomyces pastorianus
gaacctagtcaagcatgtcccaatt

SEQ ID NO: 43246 - DNA, 25 bp, Saccharomyces pastorianus
agcaactgtgtaaccatccctttat

SEQ ID NO: 43247 - DNA, 25 bp, Saccharomyces pastorianus
tagaacatctcttagcgccataggt

SEQ ID NO: 43248 - DNA, 25 bp, Saccharomyces pastorianus
atccctttatcactatccgaatcgg

SEQ ID NO: 43249 - DNA, 25 bp, Saccharomyces pastorianus
atcttccacaaaagctcaggcctta

SEQ ID NO: 43250 - DNA, 25 bp, Saccharomyces pastorianus
taaccccggatgatctcgacgataa

SEQ ID NO: 43251 - DNA, 25 bp, Saccharomyces pastorianus
atcatatcaccattaaccccggatg

SEQ ID NO: 43252 - DNA, 25 bp, Saccharomyces pastorianus
ggaatctggattctgttccatgctt

SEQ ID NO: 43253 - DNA, 25 bp, Saccharomyces pastorianus
gttagtgaacctcccttgcaagaaa

SEQ ID NO: 43254 - DNA, 25 bp, Saccharomyces pastorianus
gaaattccctagtgtgatgtcgcaa

SEQ ID NO: 43255 - DNA, 25 bp, Saccharomyces pastorianus
gagccctcatttggtttgggtcgta

SEQ ID NO: 43256 - DNA, 25 bp, Saccharomyces pastorianus
gagtacatccccaacgtcattgagc

SEQ ID NO: 43257 - DNA, 25 bp, Saccharomyces pastorianus
gggtcgtattatttactgcatattt

SEQ ID NO: 43258 - DNA, 25 bp, Saccharomyces pastorianus
gaacttatttctcattcccgttatc

SEQ ID NO: 43259 - DNA, 25 bp, Saccharomyces pastorianus
gtaacgatgagttgggtacgccctt

SEQ ID NO: 43260 - DNA, 25 bp, Saccharomyces pastorianus
tgaccattgctttcggacaaggctg

SEQ ID NO: 43261 - DNA, 25 bp, Saccharomyces pastorianus
tccgctctattaagtttatcacaag

SEQ ID NO: 43262 - DNA, 25 bp, Saccharomyces pastorianus
gatggttcatgaccctataaacgaa

SEQ ID NO: 43263 - DNA, 25 bp, Saccharomyces pastorianus
gccctttggcatcaccatagatttt

SEQ ID NO: 43264 - DNA, 25 bp, Saccharomyces pastorianus
tcccgttatcggtagcaccaatcaa

SEQ ID NO: 43265 - DNA, 25 bp, Saccharomyces pastorianus
agcaggcgttgaacttaccatcttc

SEQ ID NO: 43266 - DNA, 25 bp, Saccharomyces pastorianus
caacagtcactgcaccaacgaatga

SEQ ID NO: 43267 - DNA, 25 bp, Saccharomyces pastorianus
aaagacttccccaaatcgcttcaat

SEQ ID NO: 43268 - DNA, 25 bp, Saccharomyces pastorianus
tagaaggcctgtacctaggagacct

SEQ ID NO: 43269 - DNA, 25 bp, Saccharomyces pastorianus
gaaggatgatgactctgctgatgaa

SEQ ID NO: 43270 - DNA, 25 bp, Saccharomyces pastorianus
gaataggcaattttctgtatcctca

SEQ ID NO: 43271 - DNA, 25 bp, Saccharomyces pastorianus
cttactaacttccagccctaaaatg

SEQ ID NO: 43272 - DNA, 25 bp, Saccharomyces pastorianus
ttccgccttcgtcatcaaatacaaa

SEQ ID NO: 43273 - DNA, 25 bp, Saccharomyces pastorianus
atagcggcgaaaacaaccacccaga

SEQ ID NO: 43274 - DNA, 25 bp, Saccharomyces pastorianus
taggagaccttcacagcaggcgttg

SEQ ID NO: 43275 - DNA, 25 bp, Saccharomyces pastorianus
gacagtacatctgcgatagcggcga

SEQ ID NO: 43276 - DNA, 25 bp, Saccharomyces pastorianus
aggcacgtcgatcaggattcctgga

SEQ ID NO: 43277 - DNA, 25 bp, Saccharomyces pastorianus
gatgggtctgtagtagttgctcgaa

SEQ ID NO: 43278 - DNA, 25 bp, Saccharomyces pastorianus
acgtgtgttgtactagccgatttaa

SEQ ID NO: 43279 - DNA, 25 bp, Saccharomyces pastorianus
gacaatgcctctgttatatccataa

SEQ ID NO: 43280 - DNA, 25 bp, Saccharomyces pastorianus
gaatgttcaccacggaagcgcttga

SEQ ID NO: 43281 - DNA, 25 bp, Saccharomyces pastorianus
attccatggttgcttatcgctgaac

SEQ ID NO: 43282 - DNA, 25 bp, Saccharomyces pastorianus
tctctggaaacttcggcctgttaat

SEQ ID NO: 43283 - DNA, 25 bp, Saccharomyces pastorianus
agtatgttccggtagatagtctcaa

SEQ ID NO: 43284 - DNA, 25 bp, Saccharomyces pastorianus
attcccgatcgattttctggagcca

SEQ ID NO: 43285 - DNA, 25 bp, Saccharomyces pastorianus
tttggacactgttttgtacgacggt

SEQ ID NO: 43286 - DNA, 25 bp, Saccharomyces pastorianus
gggatcgcaactcttccaggaggca

SEQ ID NO: 43287 - DNA, 25 bp, Saccharomyces pastorianus
tggaccacgtattcccattagaaac

SEQ ID NO: 43288 - DNA, 25 bp, Saccharomyces pastorianus
attactccgcacgagtttattgacg

SEQ ID NO: 43289 - DNA, 25 bp, Saccharomyces pastorianus
aaatcggtaccttgcaactttctgt

SEQ ID NO: 43290 - DNA, 25 bp, Saccharomyces pastorianus
ggaaagttggtattgctcctcctga

SEQ ID NO: 43291 - DNA, 25 bp, Saccharomyces pastorianus
gattaactgcatacgaactggttca

SEQ ID NO: 43292 - DNA, 25 bp, Saccharomyces pastorianus
gaatcctgcctttgatattactccg

SEQ ID NO: 43293 - DNA, 25 bp, Saccharomyces pastorianus
tgacattgacgtctggaatcctgcc

SEQ ID NO: 43294 - DNA, 25 bp, Saccharomyces pastorianus
gtcgttgatcctgaagatggctctt

SEQ ID NO: 43295 - DNA, 25 bp, Saccharomyces pastorianus
taactggcacagtcgttgatcctga

SEQ ID NO: 43296 - DNA, 25 bp, Saccharomyces pastorianus
gatggctctttgattctgaatgaat

SEQ ID NO: 43297 - DNA, 25 bp, Saccharomyces pastorianus
gttcaactccgattaaggcagcgtt

SEQ ID NO: 43298 - DNA, 25 bp, Saccharomyces pastorianus
ttaatatcggttggcctaacccgct

SEQ ID NO: 43299 - DNA, 25 bp, Saccharomyces pastorianus
gcggcattgatcctctacacgataa

SEQ ID NO: 43300 - DNA, 25 bp, Saccharomyces pastorianus
gtaacctcgcttttcatagcggcaa

SEQ ID NO: 43301 - DNA, 25 bp, Saccharomyces pastorianus
gggcagcctccaaaaacgacataaa

SEQ ID NO: 43302 - DNA, 25 bp, Saccharomyces pastorianus
gatcggtctatttccaaacttctaa

SEQ ID NO: 43303 - DNA, 25 bp, Saccharomyces pastorianus
ttctagagtatgcttgctgctgcca

SEQ ID NO: 43304 - DNA, 25 bp, Saccharomyces pastorianus
tggaacactacagcggcggcattga

SEQ ID NO: 43305 - DNA, 25 bp, Saccharomyces pastorianus
cgagtactcttacatcaccgatggg

SEQ ID NO: 43306 - DNA, 25 bp, Saccharomyces pastorianus
ttgcccaaattagccgagtactctt

SEQ ID NO: 43307 - DNA, 25 bp, Saccharomyces pastorianus
ggcctaacccgctcaattttttgag

SEQ ID NO: 43308 - DNA, 25 bp, Saccharomyces pastorianus
taatggacagatttttggcccaaaa

SEQ ID NO: 43309 - DNA, 25 bp, Saccharomyces pastorianus
tattcccaatcaccagccgagataa

SEQ ID NO: 43310 - DNA, 25 bp, Saccharomyces pastorianus
aacgatgtgtcaacacggttccggt

SEQ ID NO: 43311 - DNA, 25 bp, Saccharomyces pastorianus
gttgtaccacagttattcttcatta

SEQ ID NO: 43312 - DNA, 25 bp, Saccharomyces pastorianus
agagatttctttagactccacgaag

SEQ ID NO: 43313 - DNA, 25 bp, Saccharomyces pastorianus
agttggacttgatactggctacccc

SEQ ID NO: 43314 - DNA, 25 bp, Saccharomyces pastorianus
gctccaacctgataccaacttatta

SEQ ID NO: 43315 - DNA, 25 bp, Saccharomyces pastorianus
ggatatccacaaactagctacggtt

SEQ ID NO: 43316 - DNA, 25 bp, Saccharomyces pastorianus
cggttccggtgtgccaagtaacgag

SEQ ID NO: 43317 - DNA, 25 bp, Saccharomyces pastorianus
atgaggatgatcgtgctgctgacta

SEQ ID NO: 43318 - DNA, 25 bp, Saccharomyces pastorianus
gtacgggcccaatatgattcacctt

SEQ ID NO: 43319 - DNA, 25 bp, Saccharomyces pastorianus
tcaccttgaacctttgttgtaccac

SEQ ID NO: 43320 - DNA, 25 bp, Saccharomyces pastorianus
ctacgtttgtttgcatctgcatgct

SEQ ID NO: 43321 - DNA, 25 bp, Saccharomyces pastorianus
gatagagcactcaatgcagctgcaa

SEQ ID NO: 43322 - DNA, 25 bp, Saccharomyces pastorianus
gaaataccgattcccattccaatgg

SEQ ID NO: 43323 - DNA, 25 bp, Saccharomyces pastorianus
gaaaaagccctatcgctggcacatg

SEQ ID NO: 43324 - DNA, 25 bp, Saccharomyces pastorianus
gagagagctgaactaacttccctag

SEQ ID NO: 43325 - DNA, 25 bp, Saccharomyces pastorianus
gattagaatgccagtcctcgtaaaa

SEQ ID NO: 43326 - DNA, 25 bp, Saccharomyces pastorianus
gcattgttgacagacacgcttgaaa

SEQ ID NO: 43327 - DNA, 25 bp, Saccharomyces pastorianus
atttgcgttctaaagttttgtcagc

SEQ ID NO: 43328 - DNA, 25 bp, Saccharomyces pastorianus
acacgtatggcctttgagcttgaca

SEQ ID NO: 43329 - DNA, 25 bp, Saccharomyces pastorianus
tatatggccggaatttccccttcct

SEQ ID NO: 43330 - DNA, 25 bp, Saccharomyces pastorianus
cgataaggctttgctacgtttgttt

SEQ ID NO: 43331 - DNA, 25 bp, Saccharomyces pastorianus
tcgccaagttcttcgcacattaatg

SEQ ID NO: 43332 - DNA, 25 bp, Saccharomyces pastorianus
aaacgggagcgcaatcttatggtac

SEQ ID NO: 43333 - DNA, 25 bp, Saccharomyces pastorianus
aggtctacagcgagtactgcatcga

SEQ ID NO: 43334 - DNA, 25 bp, Saccharomyces pastorianus
acctcgttgatttggctggttcgga

SEQ ID NO: 43335 - DNA, 25 bp, Saccharomyces pastorianus
actgcatcgaacgagcattcttctc

SEQ ID NO: 43336 - DNA, 25 bp, Saccharomyces pastorianus
tagtgctaagagacatatacccttt

SEQ ID NO: 43337 - DNA, 25 bp, Saccharomyces pastorianus
attcttctcgttcgcacagtatttt

SEQ ID NO: 43338 - DNA, 25 bp, Saccharomyces pastorianus
gtttgttaacatctcgccaagttct

SEQ ID NO: 43339 - DNA, 25 bp, Saccharomyces pastorianus
gttattcatgcgctaggtcaacctg

SEQ ID NO: 43340 - DNA, 25 bp, Saccharomyces pastorianus
aaaattgacgtacctactacagtat

SEQ ID NO: 43341 - DNA, 25 bp, Saccharomyces pastorianus
cttatggtacattgaacctcgttga

SEQ ID NO: 43342 - DNA, 25 bp, Saccharomyces pastorianus
aaggaggccgacaacaatgacaaca

SEQ ID NO: 43343 - DNA, 25 bp, Saccharomyces pastorianus
tggaaaacgaggtcgccactgccga

SEQ ID NO: 43344 - DNA, 25 bp, Saccharomyces pastorianus
atttccaattggtgtatttcagaca

SEQ ID NO: 43345 - DNA, 25 bp, Saccharomyces pastorianus
accctaaacccttagaggatgctct

SEQ ID NO: 43346 - DNA, 25 bp, Saccharomyces pastorianus
atgacaacactgcaaaccctaaacc

SEQ ID NO: 43347 - DNA, 25 bp, Saccharomyces pastorianus
aagaaggttcatgacttacgcagaa

SEQ ID NO: 43348 - DNA, 25 bp, Saccharomyces pastorianus
gaggatgctctcactactgaaaata

SEQ ID NO: 43349 - DNA, 25 bp, Saccharomyces pastorianus
gtcgccactgccgatgatagtgtta

SEQ ID NO: 43350 - DNA, 25 bp, Saccharomyces pastorianus
ggaagacgagtttgtctccaatact

SEQ ID NO: 43351 - DNA, 25 bp, Saccharomyces pastorianus
gaaaatccaaaaccagctaatcagc

SEQ ID NO: 43352 - DNA, 25 bp, Saccharomyces pastorianus
atcagccatcaattgaagattccga

SEQ ID NO: 43353 - DNA, 25 bp, Saccharomyces pastorianus
gcagcatcagcagatctccaagcaa

SEQ ID NO: 43354 - DNA, 25 bp, Saccharomyces pastorianus
ggaactccaagctcttcaaaaacgt

SEQ ID NO: 43355 - DNA, 25 bp, Saccharomyces pastorianus
gttgaaaccctttgatagagcacta

SEQ ID NO: 43356 - DNA, 25 bp, Saccharomyces pastorianus
ggagcaccatgatattcgctagcgt

SEQ ID NO: 43357 - DNA, 25 bp, Saccharomyces pastorianus
atttctacgatttcaggtcgctgcc

SEQ ID NO: 43358 - DNA, 25 bp, Saccharomyces pastorianus
gtgcccaccactcaatatctggagg

SEQ ID NO: 43359 - DNA, 25 bp, Saccharomyces pastorianus
gaaagacgtcccttcatacatgatg

SEQ ID NO: 43360 - DNA, 25 bp, Saccharomyces pastorianus
tgccctacaactggtggtctacgtc

SEQ ID NO: 43361 - DNA, 25 bp, Saccharomyces pastorianus
gaagaagtctctgcagatgctccta

SEQ ID NO: 43362 - DNA, 25 bp, Saccharomyces pastorianus
ggtgaatcccataagacagcagcat

SEQ ID NO: 43363 - DNA, 25 bp, Saccharomyces pastorianus
atgtccggtggcgtaaacggcacgt

SEQ ID NO: 43364 - DNA, 25 bp, Saccharomyces pastorianus
gatgccattcctagtgtgtttacca

SEQ ID NO: 43365 - DNA, 25 bp, Saccharomyces pastorianus
gatcatactttaacactctgtccca

SEQ ID NO: 43366 - DNA, 25 bp, Saccharomyces pastorianus
gtgacacatcgtctgcacaatttga

SEQ ID NO: 43367 - DNA, 25 bp, Saccharomyces pastorianus
ctctgtcccataccatcaacaatga

SEQ ID NO: 43368 - DNA, 25 bp, Saccharomyces pastorianus
ggcgaatggcatattaccacaggat

SEQ ID NO: 43369 - DNA, 25 bp, Saccharomyces pastorianus
aaactatattagaccagggccattt

SEQ ID NO: 43370 - DNA, 25 bp, Saccharomyces pastorianus
gttgattctatacgcccaatttcat

SEQ ID NO: 43371 - DNA, 25 bp, Saccharomyces pastorianus
ggccatttatcaccctttgttgatt

SEQ ID NO: 43372 - DNA, 25 bp, Saccharomyces pastorianus
aaggatagcgtacttatctcaagaa

SEQ ID NO: 43373 - DNA, 25 bp, Saccharomyces pastorianus
attccgggccctaatgatctgtggg

SEQ ID NO: 43374 - DNA, 25 bp, Saccharomyces pastorianus
gatactgataccgttccaattgatg

SEQ ID NO: 43375 - DNA, 25 bp, Saccharomyces pastorianus
aaattcctctactagtgccttcaat

SEQ ID NO: 43376 - DNA, 25 bp, Saccharomyces pastorianus
aagaatgtctcaaggtgccactgcc

SEQ ID NO: 43377 - DNA, 25 bp, Saccharomyces pastorianus
gaggtaggtcagactctcattcccc

SEQ ID NO: 43378 - DNA, 25 bp, Saccharomyces pastorianus
gataccgatcagacaaccatactac

SEQ ID NO: 43379 - DNA, 25 bp, Saccharomyces pastorianus
gccactgccaaccatttagttgcga

SEQ ID NO: 43380 - DNA, 25 bp, Saccharomyces pastorianus
gacgaggacgaccatttgctaaatc

SEQ ID NO: 43381 - DNA, 25 bp, Saccharomyces pastorianus
aaggaatgtcggagctacctcctat

SEQ ID NO: 43382 - DNA, 25 bp, Saccharomyces pastorianus
aagcgaaatttcacaagcctgcgaa

SEQ ID NO: 43383 - DNA, 25 bp, Saccharomyces pastorianus
acagtatttcgagttctttcatcaa

SEQ ID NO: 43384 - DNA, 25 bp, Saccharomyces pastorianus
tacctcctatctttggcggtgagag

SEQ ID NO: 43385 - DNA, 25 bp, Saccharomyces pastorianus
ggatccaaaccatacataccataga

SEQ ID NO: 43386 - DNA, 25 bp, Saccharomyces pastorianus
gaggcagtttcggagcagacaccag

SEQ ID NO: 43387 - DNA, 25 bp, Saccharomyces pastorianus
caggacaccacgtagtgtattccgt

SEQ ID NO: 43388 - DNA, 25 bp, Saccharomyces pastorianus
agatagcagaagtggcagtctcaga

SEQ ID NO: 43389 - DNA, 25 bp, Saccharomyces pastorianus
tagcaacgccactgacagtggtcgt

SEQ ID NO: 43390 - DNA, 25 bp, Saccharomyces pastorianus
gaacagacgccagactcacagaaag

SEQ ID NO: 43391 - DNA, 25 bp, Saccharomyces pastorianus
agcagacaccagactcacaagaagt

SEQ ID NO: 43392 - DNA, 25 bp, Saccharomyces pastorianus
gttttttcgcctgttgtgacagcag

SEQ ID NO: 43393 - DNA, 25 bp, Saccharomyces pastorianus
ggcagtctcagaacagacgccagac

SEQ ID NO: 43394 - DNA, 25 bp, Saccharomyces pastorianus
atcaaagaagttttttcgcctgttg

SEQ ID NO: 43395 - DNA, 25 bp, Saccharomyces pastorianus
gtgtattccgtagcaacgccactga

SEQ ID NO: 43396 - DNA, 25 bp, Saccharomyces pastorianus
ttgctttgttggtttattagtggaa

SEQ ID NO: 43397 - DNA, 25 bp, Saccharomyces pastorianus
ggcagctgttctaatcaagatattg

SEQ ID NO: 43398 - DNA, 25 bp, Saccharomyces pastorianus
ggacaagttagtcttttctggtctt

SEQ ID NO: 43399 - DNA, 25 bp, Saccharomyces pastorianus
ggctaacttatcttctagaaccttt

SEQ ID NO: 43400 - DNA, 25 bp, Saccharomyces pastorianus
gacttggcaatcttaccatccaaac

SEQ ID NO: 43401 - DNA, 25 bp, Saccharomyces pastorianus
aaacggtccttgtccatcaatgaga

SEQ ID NO: 43402 - DNA, 25 bp, Saccharomyces pastorianus
gtaatgcttcattcttggcagctgt

SEQ ID NO: 43403 - DNA, 25 bp, Saccharomyces pastorianus
gttagtcttttctggtcttggtagt

SEQ ID NO: 43404 - DNA, 25 bp, Saccharomyces pastorianus
tcaaagccttcactaaacggtcctt

SEQ ID NO: 43405 - DNA, 25 bp, Saccharomyces pastorianus
ctcttgcttctatttgctttcttag

SEQ ID NO: 43406 - DNA, 25 bp, Saccharomyces pastorianus
tatttatctttttacccctcttgct

SEQ ID NO: 43407 - DNA, 25 bp, Saccharomyces pastorianus
gaaatctttgcttccagtaatgctt

SEQ ID NO: 43408 - DNA, 25 bp, Saccharomyces pastorianus
gacgtgtttgagtcttcaactgaga

SEQ ID NO: 43409 - DNA, 25 bp, Saccharomyces pastorianus
gactaacttgtccaatatcttgatt

SEQ ID NO: 43410 - DNA, 25 bp, Saccharomyces pastorianus
gagttggctcttttaagcggaggtt

SEQ ID NO: 43411 - DNA, 25 bp, Saccharomyces pastorianus
tggtaagattgccaagtccatttct

SEQ ID NO: 43412 - DNA, 25 bp, Saccharomyces pastorianus
gttagccaattctatctcattgatg

SEQ ID NO: 43413 - DNA, 25 bp, Saccharomyces pastorianus
ggctttgaatttcaccaatcgtttg

SEQ ID NO: 43414 - DNA, 25 bp, Saccharomyces pastorianus
ataccgatgaagacgacctgaacaa

SEQ ID NO: 43415 - DNA, 25 bp, Saccharomyces pastorianus
gacaaggaccgtttagtgaaggctt

SEQ ID NO: 43416 - DNA, 25 bp, Saccharomyces pastorianus
gatttaaccgaactaccaagaccag

SEQ ID NO: 43417 - DNA, 25 bp, Saccharomyces pastorianus
aggttattccgcgaaggccaagaat

SEQ ID NO: 43418 - DNA, 25 bp, Saccharomyces pastorianus
tctcgtgccaagtacgtccagaaca

SEQ ID NO: 43419 - DNA, 25 bp, Saccharomyces pastorianus
tagatactgtcaacgtgggactcgt

SEQ ID NO: 43420 - DNA, 25 bp, Saccharomyces pastorianus
atatttgcacggtacgatcctgaaa

SEQ ID NO: 43421 - DNA, 25 bp, Saccharomyces pastorianus
aggatgtgaacgcactttattcggg

SEQ ID NO: 43422 - DNA, 25 bp, Saccharomyces pastorianus
gagactttcacgagagcggaaccaa

SEQ ID NO: 43423 - DNA, 25 bp, Saccharomyces pastorianus
tcaaatgtagtggtcggtatcggcg

SEQ ID NO: 43424 - DNA, 25 bp, Saccharomyces pastorianus
tccaacggtctcaatgtcctagatg

SEQ ID NO: 43425 - DNA, 25 bp, Saccharomyces pastorianus
gggaagaccaccagattatcttatc

SEQ ID NO: 43426 - DNA, 25 bp, Saccharomyces pastorianus
gatatgtggctgatggacctggaat

SEQ ID NO: 43427 - DNA, 25 bp, Saccharomyces pastorianus
gcgggacttctttgcagtgtgacaa

SEQ ID NO: 43428 - DNA, 25 bp, Saccharomyces pastorianus
gacatggacacctatagagactttc

SEQ ID NO: 43429 - DNA, 25 bp, Saccharomyces pastorianus
tactacatggaggttccaacggtct

SEQ ID NO: 43430 - DNA, 25 bp, Saccharomyces pastorianus
gaacaaacgccgctgaccgggatga

SEQ ID NO: 43431 - DNA, 25 bp, Saccharomyces pastorianus
ttgaaaaaactgctccttccgttgc

SEQ ID NO: 43432 - DNA, 25 bp, Saccharomyces pastorianus
atggctgacaattcatctggatcac

SEQ ID NO: 43433 - DNA, 25 bp, Saccharomyces pastorianus
caaacatggagttcgtccttggata

SEQ ID NO: 43434 - DNA, 25 bp, Saccharomyces pastorianus
ctcaggcttgaaacctccggtaaat

SEQ ID NO: 43435 - DNA, 25 bp, Saccharomyces pastorianus
aataacacacctttcccaggatatt

SEQ ID NO: 43436 - DNA, 25 bp, Saccharomyces pastorianus
gaaaagctgtcatcggcagccgcag

SEQ ID NO: 43437 - DNA, 25 bp, Saccharomyces pastorianus
gatgaatgctacaccaatggctgac

SEQ ID NO: 43438 - DNA, 25 bp, Saccharomyces pastorianus
gcagccgcagttagccaaaatttgg

SEQ ID NO: 43439 - DNA, 25 bp, Saccharomyces pastorianus
gaaatccagatttcctcaggcttga

SEQ ID NO: 43440 - DNA, 25 bp, Saccharomyces pastorianus
ttggactaccataccgttttacagc

SEQ ID NO: 43441 - DNA, 25 bp, Saccharomyces pastorianus
gggcattttccttaggcttgcataa

SEQ ID NO: 43442 - DNA, 25 bp, Saccharomyces pastorianus
gtcaacctgtatagaagccatccaa

SEQ ID NO: 43443 - DNA, 25 bp, Saccharomyces pastorianus
gaatctcttttgtctgtcaggcttg

SEQ ID NO: 43444 - DNA, 25 bp, Saccharomyces pastorianus
gtacgcttcagactccagataacgg

SEQ ID NO: 43445 - DNA, 25 bp, Saccharomyces pastorianus
gaaaccggaatgtggccgatgcatc

SEQ ID NO: 43446 - DNA, 25 bp, Saccharomyces pastorianus
aagatcggcaagtcctaccaataca

SEQ ID NO: 43447 - DNA, 25 bp, Saccharomyces pastorianus
ggcacccagaattcccagtaaagat

SEQ ID NO: 43448 - DNA, 25 bp, Saccharomyces pastorianus
gcttgcataaaaccacgcctggatt

SEQ ID NO: 43449 - DNA, 25 bp, Saccharomyces pastorianus
tggaaaacttgtaccagcaggattt

SEQ ID NO: 43450 - DNA, 25 bp, Saccharomyces pastorianus
agctatgaaactgctcaccgagaga

SEQ ID NO: 43451 - DNA, 25 bp, Saccharomyces pastorianus
tacgacgtatcgaagcaaccggcac

SEQ ID NO: 43452 - DNA, 25 bp, Saccharomyces pastorianus
taatagccacgggttcttcagaaca

SEQ ID NO: 43453 - DNA, 25 bp, Saccharomyces pastorianus
acatctcctcattaatagccacggg

SEQ ID NO: 43454 - DNA, 25 bp, Saccharomyces pastorianus
gtacacattcatagagaccgcctta

SEQ ID NO: 43455 - DNA, 25 bp, Saccharomyces pastorianus
gatcttcaaatcgacaagtctgagg

SEQ ID NO: 43456 - DNA, 25 bp, Saccharomyces pastorianus
acactcacaatctgtaatgatggag

SEQ ID NO: 43457 - DNA, 25 bp, Saccharomyces pastorianus
atcagaatcttttattacaccttaa

SEQ ID NO: 43458 - DNA, 25 bp, Saccharomyces pastorianus
ctctggatggtcaaaatctggtgct

SEQ ID NO: 43459 - DNA, 25 bp, Saccharomyces pastorianus
atagattcctacatctcctcattaa

SEQ ID NO: 43460 - DNA, 25 bp, Saccharomyces pastorianus
accgccttagagtccataatagatt

SEQ ID NO: 43461 - DNA, 25 bp, Saccharomyces pastorianus
aaaaccggataaatactctggatgg

SEQ ID NO: 43462 - DNA, 25 bp, Saccharomyces pastorianus
aataacgttttccatattctacaga

SEQ ID NO: 43463 - DNA, 25 bp, Saccharomyces pastorianus
gttcaccatcaatgtcactagtaag

SEQ ID NO: 43464 - DNA, 25 bp, Saccharomyces pastorianus
gaagacatctctaggtggcatggcc

SEQ ID NO: 43465 - DNA, 25 bp, Saccharomyces pastorianus
aggtggcatggcctgcaattgacca

SEQ ID NO: 43466 - DNA, 25 bp, Saccharomyces pastorianus
acgtatccggtggttgcgggtccat

SEQ ID NO: 43467 - DNA, 25 bp, Saccharomyces pastorianus
gcaccagctggtaaataggatcctg

SEQ ID NO: 43468 - DNA, 25 bp, Saccharomyces pastorianus
gttgcgggtccatgttcaccatcaa

SEQ ID NO: 43469 - DNA, 25 bp, Saccharomyces pastorianus
caacaggagctgcagccggaagctt

SEQ ID NO: 43470 - DNA, 25 bp, Saccharomyces pastorianus
gtaagaagtttaacgggctgactct

SEQ ID NO: 43471 - DNA, 25 bp, Saccharomyces pastorianus
ggtactctacgcaggtggccatgac

SEQ ID NO: 43472 - DNA, 25 bp, Saccharomyces pastorianus
gggccaaagctgtggtactctacgc

SEQ ID NO: 43473 - DNA, 25 bp, Saccharomyces pastorianus
agcttgctggccaaggatcctaacg

SEQ ID NO: 43474 - DNA, 25 bp, Saccharomyces pastorianus
agggccttacctctgcagagacaca

SEQ ID NO: 43475 - DNA, 25 bp, Saccharomyces pastorianus
atccatgcgttgcagctgtcattga

SEQ ID NO: 43476 - DNA, 25 bp, Saccharomyces pastorianus
gggtgtgaaactaccacagcgccac

SEQ ID NO: 43477 - DNA, 25 bp, Saccharomyces pastorianus
gactcgtacaagcacaagggccatg

SEQ ID NO: 43478 - DNA, 25 bp, Saccharomyces pastorianus
ttttgcaagacgagctggcccagac

SEQ ID NO: 43479 - DNA, 25 bp, Saccharomyces pastorianus
tagtttcccagactacaggtccttt

SEQ ID NO: 43480 - DNA, 25 bp, Saccharomyces pastorianus
aagcaatgagcaccgagggtcccat

SEQ ID NO: 43481 - DNA, 25 bp, Saccharomyces pastorianus
aggtcctttgcgtttggactgtaca

SEQ ID NO: 43482 - DNA, 25 bp, Saccharomyces pastorianus
cagagacacacttccggatcgagat

SEQ ID NO: 43483 - DNA, 25 bp, Saccharomyces pastorianus
tggcgcaggccatcttaaaacaact

SEQ ID NO: 43484 - DNA, 25 bp, Saccharomyces pastorianus
gtatggtgtactcccttttgcaaga

SEQ ID NO: 43485 - DNA, 25 bp, Saccharomyces pastorianus
gaacaagctgcccttcttgtactca

SEQ ID NO: 43486 - DNA, 25 bp, Saccharomyces pastorianus
agactatggactactcgcatgcctg

SEQ ID NO: 43487 - DNA, 25 bp, Saccharomyces pastorianus
gacctatgtcgagctgccagacgtg

SEQ ID NO: 43488 - DNA, 25 bp, Saccharomyces pastorianus
gagtctgtcaaatcagcctcggaga

SEQ ID NO: 43489 - DNA, 25 bp, Saccharomyces pastorianus
ggccgtgagatacacagctcagcat

SEQ ID NO: 43490 - DNA, 25 bp, Saccharomyces pastorianus
gacaaaatcgccttcgtcgggatca

SEQ ID NO: 43491 - DNA, 25 bp, Saccharomyces pastorianus
gatcacgaagtatgctaccgacgcc

SEQ ID NO: 43492 - DNA, 25 bp, Saccharomyces pastorianus
atcccagggaccacaggccgtgaga

SEQ ID NO: 43493 - DNA, 25 bp, Saccharomyces pastorianus
gagatcaacacccacctggaggaga

SEQ ID NO: 43494 - DNA, 25 bp, Saccharomyces pastorianus
gaaacaactccagcaacgctctgaa

SEQ ID NO: 43495 - DNA, 25 bp, Saccharomyces pastorianus
ccgtgggcaggctgtttctaagaaa

SEQ ID NO: 43496 - DNA, 25 bp, Saccharomyces pastorianus
tacaacaagtggtccctgcaggtgc

SEQ ID NO: 43497 - DNA, 25 bp, Saccharomyces pastorianus
aacgaggaatggttcttccagacct

SEQ ID NO: 43498 - DNA, 25 bp, Saccharomyces pastorianus
agctaaactaccttaccaggctgac

SEQ ID NO: 43499 - DNA, 25 bp, Saccharomyces pastorianus
taccaggctgaccacgaagttgttt

SEQ ID NO: 43500 - DNA, 25 bp, Saccharomyces pastorianus
gggttccagacgctcaagttccttg

SEQ ID NO: 43501 - DNA, 25 bp, Saccharomyces pastorianus
tggctccacgtccttataagactgg

SEQ ID NO: 43502 - DNA, 25 bp, Saccharomyces pastorianus
aagttgtttgagctgtccaaccgcc

SEQ ID NO: 43503 - DNA, 25 bp, Saccharomyces pastorianus
aagttccttgtcatgttcagacccc

SEQ ID NO: 43504 - DNA, 25 bp, Saccharomyces pastorianus
gaattgcagcccaggaggccagcga

SEQ ID NO: 43505 - DNA, 25 bp, Saccharomyces pastorianus
gcctgatcatcgagtggctcaacga

SEQ ID NO: 43506 - DNA, 25 bp, Saccharomyces pastorianus
ttcatccaggacttcgagcagcgcg

SEQ ID NO: 43507 - DNA, 25 bp, Saccharomyces pastorianus
ggacctcttcatggtgtttgtgtat

SEQ ID NO: 43508 - DNA, 25 bp, Saccharomyces pastorianus
tatctcgatgtgtcgtgctctgctg

SEQ ID NO: 43509 - DNA, 25 bp, Saccharomyces pastorianus
gaactctctttcgatctgctttatt

SEQ ID NO: 43510 - DNA, 25 bp, Saccharomyces pastorianus
gtgctgggaactctctttcgatctg

SEQ ID NO: 43511 - DNA, 25 bp, Saccharomyces pastorianus
cttcatggtgtttgtgtatctcgat

SEQ ID NO: 43512 - DNA, 25 bp, Saccharomyces pastorianus
tgctgtgctgggaactctctttcga

SEQ ID NO: 43513 - DNA, 25 bp, Saccharomyces pastorianus
cgatctgctttattataacgtggtt

SEQ ID NO: 43514 - DNA, 25 bp, Saccharomyces pastorianus
gcaacgtggacctcttcatggtgtt

SEQ ID NO: 43515 - DNA, 25 bp, Saccharomyces pastorianus
gtttgtgtatctcgatgtgtcgtgc

SEQ ID NO: 43516 - DNA, 25 bp, Saccharomyces pastorianus
gtcgtgctctgctgtgctgggaact

SEQ ID NO: 43517 - DNA, 25 bp, Saccharomyces pastorianus
ctctctttcgatctgctttattata

SEQ ID NO: 43518 - DNA, 25 bp, Saccharomyces pastorianus
tccagttgcagctccccagagtcgt

SEQ ID NO: 43519 - DNA, 25 bp, Saccharomyces pastorianus
gagtcgtccatgatgtcgaggttca

SEQ ID NO: 43520 - DNA, 25 bp, Saccharomyces pastorianus
ccagagtcgtccatgatgtcgaggt

SEQ ID NO: 43521 - DNA, 25 bp, Saccharomyces pastorianus
tccccagagtcgtccatgatgtcga

SEQ ID NO: 43522 - DNA, 25 bp, Saccharomyces pastorianus
agctccccagagtcgtccatgatgt

SEQ ID NO: 43523 - DNA, 25 bp, Saccharomyces pastorianus
accaggtcgcatggcatcgacggga

SEQ ID NO: 43524 - DNA, 25 bp, Saccharomyces pastorianus
gtcgcatggcatcgacgggaacgtc

SEQ ID NO: 43525 - DNA, 25 bp, Saccharomyces pastorianus
cgtccatgatgtcgaggttcaccag

SEQ ID NO: 43526 - DNA, 25 bp, Saccharomyces pastorianus
tgatgtcgaggttcaccaggtcgca

SEQ ID NO: 43527 - DNA, 25 bp, Saccharomyces pastorianus
tccatgatgtcgaggttcaccaggt

SEQ ID NO: 43528 - DNA, 25 bp, Saccharomyces pastorianus
atgtcgaggttcaccaggtcgcatg

SEQ ID NO: 43529 - DNA, 25 bp, Saccharomyces pastorianus
cgtaagtgtcgttgtccttcaagat

SEQ ID NO: 43530 - DNA, 25 bp, Saccharomyces pastorianus
aagtgtcgttgtccttcaagatacc

SEQ ID NO: 43531 - DNA, 25 bp, Saccharomyces pastorianus
agacgtaagtgtcgttgtccttcaa

SEQ ID NO: 43532 - DNA, 25 bp, Saccharomyces pastorianus
tgtcgttgtccttcaagataccgaa

SEQ ID NO: 43533 - DNA, 25 bp, Saccharomyces pastorianus
gtgtcgttgtccttcaagataccga

SEQ ID NO: 43534 - DNA, 25 bp, Saccharomyces pastorianus
gacgtaagtgtcgttgtccttcaag

SEQ ID NO: 43535 - DNA, 25 bp, Saccharomyces pastorianus
ccttggatggagacgtaagtgtcgt

SEQ ID NO: 43536 - DNA, 25 bp, Saccharomyces pastorianus
gtaagtgtcgttgtccttcaagata

SEQ ID NO: 43537 - DNA, 25 bp, Saccharomyces pastorianus
ggagacgtaagtgtcgttgtccttc

SEQ ID NO: 43538 - DNA, 25 bp, Saccharomyces pastorianus
acgtaagtgtcgttgtccttcaaga

SEQ ID NO: 43539 - DNA, 25 bp, Saccharomyces pastorianus
agtgtcgttgtccttcaagataccg

SEQ ID NO: 43540 - DNA, 25 bp, Saccharomyces pastorianus
caagataccgaattccttagccttt

SEQ ID NO: 43541 - DNA, 25 bp, Saccharomyces pastorianus
agcaccggccttgaaaccttggatg

SEQ ID NO: 43542 - DNA, 25 bp, Saccharomyces pastorianus
gaggttggctttggagtacagtttc

SEQ ID NO: 43543 - DNA, 25 bp, Saccharomyces pastorianus
ataccgaagttgatacgggcttcaa

SEQ ID NO: 43544 - DNA, 25 bp, Saccharomyces pastorianus
gacaatgatagccttggccttttgt

SEQ ID NO: 43545 - DNA, 25 bp, Saccharomyces pastorianus
gacagtttggtctgtacttggaaac

SEQ ID NO: 43546 - DNA, 25 bp, Saccharomyces pastorianus
gagtacagtttctcatgtcatcgta

SEQ ID NO: 43547 - DNA, 25 bp, Saccharomyces pastorianus
agtgttggagtgaccagcaccggcc

SEQ ID NO: 43548 - DNA, 25 bp, Saccharomyces pastorianus
catgtcatcgtagtttggcaagtaa

SEQ ID NO: 43549 - DNA, 25 bp, Saccharomyces pastorianus
gccttggccttttgttcgaaaacag

SEQ ID NO: 43550 - DNA, 25 bp, Saccharomyces pastorianus
gaatgggaagacacctctgtacaag

SEQ ID NO: 43551 - DNA, 25 bp, Saccharomyces pastorianus
gaaacaggtcctttacaacagcaat

SEQ ID NO: 43552 - DNA, 25 bp, Saccharomyces pastorianus
aagaagttttcaccctcagcatccg

SEQ ID NO: 43553 - DNA, 25 bp, Saccharomyces pastorianus
aaaaaactgcctgatttctctccac

SEQ ID NO: 43554 - DNA, 25 bp, Saccharomyces pastorianus
aatattgcatccatggaggccatcc

SEQ ID NO: 43555 - DNA, 25 bp, Saccharomyces pastorianus
gtgctggctcaaacgctaaggctac

SEQ ID NO: 43556 - DNA, 25 bp, Saccharomyces pastorianus
gttgccgtttagaagaaccgatgct

SEQ ID NO: 43557 - DNA, 25 bp, Saccharomyces pastorianus
agtccacaccgtgccaagaagtttt

SEQ ID NO: 43558 - DNA, 25 bp, Saccharomyces pastorianus
ctaaggctaccttgcgatttgtatt

SEQ ID NO: 43559 - DNA, 25 bp, Saccharomyces pastorianus
ctagcatccccgaatttgaacagac

SEQ ID NO: 43560 - DNA, 25 bp, Saccharomyces pastorianus
ggaacgcaaagtgtactcaccgcaa

SEQ ID NO: 43561 - DNA, 25 bp, Saccharomyces pastorianus
tccgcgcctcatactaatattgcat

SEQ ID NO: 43562 - DNA, 25 bp, Saccharomyces pastorianus
agttgcaccgttttccaactctaat

SEQ ID NO: 43563 - DNA, 25 bp, Saccharomyces pastorianus
acgtgctatacttggacttatgttg

SEQ ID NO: 43564 - DNA, 25 bp, Saccharomyces pastorianus
ccttcttcttgtcttaacgtgctat

SEQ ID NO: 43565 - DNA, 25 bp, Saccharomyces pastorianus
atgccctgcagattctttgatgtcg

SEQ ID NO: 43566 - DNA, 25 bp, Saccharomyces pastorianus
ttgtttctgatcttagtggctattc

SEQ ID NO: 43567 - DNA, 25 bp, Saccharomyces pastorianus
aatggcatcatattagtctctgcat

SEQ ID NO: 43568 - DNA, 25 bp, Saccharomyces pastorianus
ctcgaagactttttctgaaggtgaa

SEQ ID NO: 43569 - DNA, 25 bp, Saccharomyces pastorianus
tagtctctgcattagttgcaccgtt

SEQ ID NO: 43570 - DNA, 25 bp, Saccharomyces pastorianus
tctgaaggtgaacccttcttcttgt

SEQ ID NO: 43571 - DNA, 25 bp, Saccharomyces pastorianus
tagtggctattcgatgccctgcaga

SEQ ID NO: 43572 - DNA, 25 bp, Saccharomyces pastorianus
gatgtcgatcccaaatggcatcata

SEQ ID NO: 43573 - DNA, 25 bp, Saccharomyces pastorianus
gttaacgtctattgaggataaagcc

SEQ ID NO: 43574 - DNA, 25 bp, Saccharomyces pastorianus
gccaacaaggtgaggaaggccatgt

SEQ ID NO: 43575 - DNA, 25 bp, Saccharomyces pastorianus
atgaaaatgtgtttggccctcgtga

SEQ ID NO: 43576 - DNA, 25 bp, Saccharomyces pastorianus
ttggccctcgtgatcatcattttgc

SEQ ID NO: 43577 - DNA, 25 bp, Saccharomyces pastorianus
taaagccgataacctggctgtctcc

SEQ ID NO: 43578 - DNA, 25 bp, Saccharomyces pastorianus
aaggccatgtggtataaggatttga

SEQ ID NO: 43579 - DNA, 25 bp, Saccharomyces pastorianus
gagaggtgaaaggttaacgtctatt

SEQ ID NO: 43580 - DNA, 25 bp, Saccharomyces pastorianus
gctgtctccgcgcaaggttttaaga

SEQ ID NO: 43581 - DNA, 25 bp, Saccharomyces pastorianus
atgtgtttggccctcgtgatcatca

SEQ ID NO: 43582 - DNA, 25 bp, Saccharomyces pastorianus
gatcatcattttgcttgtcgtcgtc

SEQ ID NO: 43583 - DNA, 25 bp, Saccharomyces pastorianus
gtctccgcgcaaggttttaagaggg

SEQ ID NO: 43584 - DNA, 25 bp, Saccharomyces pastorianus
atgtcgtcgtctactccctttgacc

SEQ ID NO: 43585 - DNA, 25 bp, Saccharomyces pastorianus
ctatgcccgagcaggatgaagagcg

SEQ ID NO: 43586 - DNA, 25 bp, Saccharomyces pastorianus
tgaagagcggcctcaaaatgttcag

SEQ ID NO: 43587 - DNA, 25 bp, Saccharomyces pastorianus
gcaggatgaagagcggcctcaaaat

SEQ ID NO: 43588 - DNA, 25 bp, Saccharomyces pastorianus
gacccttatgctatgcccgagcagg

SEQ ID NO: 43589 - DNA, 25 bp, Saccharomyces pastorianus
tactccctttgacccttatgctatg

SEQ ID NO: 43590 - DNA, 25 bp, Saccharomyces pastorianus
ctttgacccttatgctatgcccgag

SEQ ID NO: 43591 - DNA, 25 bp, Saccharomyces pastorianus
cgagcaggatgaagagcggcctcaa

SEQ ID NO: 43592 - DNA, 25 bp, Saccharomyces pastorianus
tatgctatgcccgagcaggatgaag

SEQ ID NO: 43593 - DNA, 25 bp, Saccharomyces pastorianus
ttgacccttatgctatgcccgagca

SEQ ID NO: 43594 - DNA, 25 bp, Saccharomyces pastorianus
cccttatgctatgcccgagcaggat

SEQ ID NO: 43595 - DNA, 25 bp, Saccharomyces pastorianus
gaagtatctggtgctttccatattc

SEQ ID NO: 43596 - DNA, 25 bp, Saccharomyces pastorianus
ggttctgttcgccaagctgaagtat

SEQ ID NO: 43597 - DNA, 25 bp, Saccharomyces pastorianus
gagcttcatgaaggtcccggaacag

SEQ ID NO: 43598 - DNA, 25 bp, Saccharomyces pastorianus
tgacgatgacgaccacgaccatgac

SEQ ID NO: 43599 - DNA, 25 bp, Saccharomyces pastorianus
tgttcctggtgttcacggccattac

SEQ ID NO: 43600 - DNA, 25 bp, Saccharomyces pastorianus
aaggaggcagctggtggcttcacca

SEQ ID NO: 43601 - DNA, 25 bp, Saccharomyces pastorianus
gaagagctccaactaaaggtcccct

SEQ ID NO: 43602 - DNA, 25 bp, Saccharomyces pastorianus
gacctgtgctacatgcttctgcagt

SEQ ID NO: 43603 - DNA, 25 bp, Saccharomyces pastorianus
tggaacctgggagacctgtacggca

SEQ ID NO: 43604 - DNA, 25 bp, Saccharomyces pastorianus
agtggcaacgaggaccgcaacggct

SEQ ID NO: 43605 - DNA, 25 bp, Saccharomyces pastorianus
tcatcttcacgctgtggaacctggg

SEQ ID NO: 43606 - DNA, 25 bp, Saccharomyces pastorianus
gcgactacaagctgcaccgggcgta

SEQ ID NO: 43607 - DNA, 25 bp, Saccharomyces pastorianus
atcgtcgaccgcatgaggctgaaca

SEQ ID NO: 43608 - DNA, 25 bp, Saccharomyces pastorianus
aggagcgccgcgacatggacatcgt

SEQ ID NO: 43609 - DNA, 25 bp, Saccharomyces pastorianus
agatgtgtctggagggctcgcatcc

SEQ ID NO: 43610 - DNA, 25 bp, Saccharomyces pastorianus
gtactactcgaagatcgccgcaatc

SEQ ID NO: 43611 - DNA, 25 bp, Saccharomyces pastorianus
tggacatcgtgatcccggacgtcaa

SEQ ID NO: 43612 - DNA, 25 bp, Saccharomyces pastorianus
gagggcgtgcgcaagtacttccact

SEQ ID NO: 43613 - DNA, 25 bp, Saccharomyces pastorianus
gagctggcatgcatcaacaccgaga

SEQ ID NO: 43614 - DNA, 25 bp, Saccharomyces pastorianus
ggtcgacaagctcgaggtcatcgtc

SEQ ID NO: 43615 - DNA, 25 bp, Saccharomyces pastorianus
gcatccggagttgcaggcgtactac

SEQ ID NO: 43616 - DNA, 25 bp, Saccharomyces pastorianus
acctggcctgcgagggcatcgagta

SEQ ID NO: 43617 - DNA, 25 bp, Saccharomyces pastorianus
actggcgaggttctaatatcttgga

SEQ ID NO: 43618 - DNA, 25 bp, Saccharomyces pastorianus
aagcctgcgctatgaactaaacgaa

SEQ ID NO: 43619 - DNA, 25 bp, Saccharomyces pastorianus
gcgctgagatcgtcttggagttttt

SEQ ID NO: 43620 - DNA, 25 bp, Saccharomyces pastorianus
aaaatagcgtttcacccatggacca

SEQ ID NO: 43621 - DNA, 25 bp, Saccharomyces pastorianus
gagtttaaccctcttttcgaagatg

SEQ ID NO: 43622 - DNA, 25 bp, Saccharomyces pastorianus
gaagctctaagtgaaagcctgcgct

SEQ ID NO: 43623 - DNA, 25 bp, Saccharomyces pastorianus
gcagttaaccgcatttcaacagaag

SEQ ID NO: 43624 - DNA, 25 bp, Saccharomyces pastorianus
ggattgtcatccataaccttaaaga

SEQ ID NO: 43625 - DNA, 25 bp, Saccharomyces pastorianus
gaagtacgttcatggcgctgagatc

SEQ ID NO: 43626 - DNA, 25 bp, Saccharomyces pastorianus
gaagatgattgtccgatcccacttt

SEQ ID NO: 43627 - DNA, 25 bp, Saccharomyces pastorianus
atactaagcaagagcctggactcga

SEQ ID NO: 43628 - DNA, 25 bp, Saccharomyces pastorianus
accgatcagtctttcagtgtctgtg

SEQ ID NO: 43629 - DNA, 25 bp, Saccharomyces pastorianus
agtctttcagtgtctgtgaacgcaa

SEQ ID NO: 43630 - DNA, 25 bp, Saccharomyces pastorianus
atcaccgatcagtctttcagtgtct

SEQ ID NO: 43631 - DNA, 25 bp, Saccharomyces pastorianus
acacagtgttcgaagggttcatagc

SEQ ID NO: 43632 - DNA, 25 bp, Saccharomyces pastorianus
gatcaaacgcttggcatcgaacaca

SEQ ID NO: 43633 - DNA, 25 bp, Saccharomyces pastorianus
acgcttggcatcgaacacagtgttc

SEQ ID NO: 43634 - DNA, 25 bp, Saccharomyces pastorianus
tcagtgtctgtgaacgcaacaaaag

SEQ ID NO: 43635 - DNA, 25 bp, Saccharomyces pastorianus
ggcggcatcaccgatcagtctttca

SEQ ID NO: 43636 - DNA, 25 bp, Saccharomyces pastorianus
ggcatcaccgatcagtctttcagtg

SEQ ID NO: 43637 - DNA, 25 bp, Saccharomyces pastorianus
gatcagtctttcagtgtctgtgaac

SEQ ID NO: 43638 - DNA, 25 bp, Saccharomyces pastorianus
gtctgtgaacgcaacaaaagatggg

SEQ ID NO: 43639 - DNA, 25 bp, Saccharomyces pastorianus
tgagtgtcaccagcggtggccttaa

SEQ ID NO: 43640 - DNA, 25 bp, Saccharomyces pastorianus
agcggtggccttaacttcgaagata

SEQ ID NO: 43641 - DNA, 25 bp, Saccharomyces pastorianus
ggccttaacttcgaagataccgtct

SEQ ID NO: 43642 - DNA, 25 bp, Saccharomyces pastorianus
atgagtgtcaccagcggtggcctta

SEQ ID NO: 43643 - DNA, 25 bp, Saccharomyces pastorianus
gccttaacttcgaagataccgtctt

SEQ ID NO: 43644 - DNA, 25 bp, Saccharomyces pastorianus
gtcaccagcggtggccttaacttcg

SEQ ID NO: 43645 - DNA, 25 bp, Saccharomyces pastorianus
gcggtggccttaacttcgaagatac

SEQ ID NO: 43646 - DNA, 25 bp, Saccharomyces pastorianus
gtggccttaacttcgaagataccgt

SEQ ID NO: 43647 - DNA, 25 bp, Saccharomyces pastorianus
acttcgaagataccgtcttcaatgg

SEQ ID NO: 43648 - DNA, 25 bp, Saccharomyces pastorianus
cagcggtggccttaacttcgaagat

SEQ ID NO: 43649 - DNA, 25 bp, Saccharomyces pastorianus
accagcggtggccttaacttcgaag

SEQ ID NO: 43650 - DNA, 25 bp, Saccharomyces pastorianus
cttgcaaactaacatcgaagaagat

SEQ ID NO: 43651 - DNA, 25 bp, Saccharomyces pastorianus
aaggctatcaccatggaaggtttga

SEQ ID NO: 43652 - DNA, 25 bp, Saccharomyces pastorianus
gacttgcaaactaacatcgaagaag

SEQ ID NO: 43653 - DNA, 25 bp, Saccharomyces pastorianus
caccgtcaaggctatcaccatggaa

SEQ ID NO: 43654 - DNA, 25 bp, Saccharomyces pastorianus
ggaagacttgcaaactaacatcgaa

SEQ ID NO: 43655 - DNA, 25 bp, Saccharomyces pastorianus
tcaaggctatcaccatggaaggttt

SEQ ID NO: 43656 - DNA, 25 bp, Saccharomyces pastorianus
accgtcaaggctatcaccatggaag

SEQ ID NO: 43657 - DNA, 25 bp, Saccharomyces pastorianus
ggctatcaccatggaaggtttgacc

SEQ ID NO: 43658 - DNA, 25 bp, Saccharomyces pastorianus
cgtcaaggctatcaccatggaaggt

SEQ ID NO: 43659 - DNA, 25 bp, Saccharomyces pastorianus
atggtcgccaccgtcaaggctatca

SEQ ID NO: 43660 - DNA, 25 bp, Saccharomyces pastorianus
ttctttggaagacttgcaaactaac

SEQ ID NO: 43661 - DNA, 25 bp, Saccharomyces pastorianus
gggtgctcaccaattcatcccaatt

SEQ ID NO: 43662 - DNA, 25 bp, Saccharomyces pastorianus
catcccaattggtttcggtatcaag

SEQ ID NO: 43663 - DNA, 25 bp, Saccharomyces pastorianus
gacttgcaaactaacatcgaagaag

SEQ ID NO: 43664 - DNA, 25 bp, Saccharomyces pastorianus
caccgtcaaggctatcaccatggaa

SEQ ID NO: 43665 - DNA, 25 bp, Saccharomyces pastorianus
ggaagacttgcaaactaacatcgaa

SEQ ID NO: 43666 - DNA, 25 bp, Saccharomyces pastorianus
tcaaggctatcaccatggaaggttt

SEQ ID NO: 43667 - DNA, 25 bp, Saccharomyces pastorianus
accgtcaaggctatcaccatggaag

SEQ ID NO: 43668 - DNA, 25 bp, Saccharomyces pastorianus
ggctatcaccatggaaggtttgacc

SEQ ID NO: 43669 - DNA, 25 bp, Saccharomyces pastorianus
cgtcaaggctatcaccatggaaggt

SEQ ID NO: 43670 - DNA, 25 bp, Saccharomyces pastorianus
atggtcgccaccgtcaaggctatca

SEQ ID NO: 43671 - DNA, 25 bp, Saccharomyces pastorianus
ttctttggaagacttgcaaactaac

SEQ ID NO: 43672 - DNA, 25 bp, Saccharomyces pastorianus
accgatttctctaagattgaaactt

SEQ ID NO: 43673 - DNA, 25 bp, Saccharomyces pastorianus
ttcaccgatttctctaagattgaaa

SEQ ID NO: 43674 - DNA, 25 bp, Saccharomyces pastorianus
ccgatttctctaagattgaaacttt

SEQ ID NO: 43675 - DNA, 25 bp, Saccharomyces pastorianus
tggcattcaccgatttctctaagat

SEQ ID NO: 43676 - DNA, 25 bp, Saccharomyces pastorianus
ggcattcaccgatttctctaagatt

SEQ ID NO: 43677 - DNA, 25 bp, Saccharomyces pastorianus
cgatttctctaagattgaaactttg

SEQ ID NO: 43678 - DNA, 25 bp, Saccharomyces pastorianus
attcaccgatttctctaagattgaa

SEQ ID NO: 43679 - DNA, 25 bp, Saccharomyces pastorianus
caccgatttctctaagattgaaact

SEQ ID NO: 43680 - DNA, 25 bp, Saccharomyces pastorianus
tcaccgatttctctaagattgaaac

SEQ ID NO: 43681 - DNA, 25 bp, Saccharomyces pastorianus
atggcattcaccgatttctctaaga

SEQ ID NO: 43682 - DNA, 25 bp, Saccharomyces pastorianus
tgaaactttgaaacaattaaacgct

SEQ ID NO: 43683 - DNA, 25 bp, Saccharomyces pastorianus
ataatgtctttcgttcttgaacacc

SEQ ID NO: 43684 - DNA, 25 bp, Saccharomyces pastorianus
gatgattgtaattccgctgctactg

SEQ ID NO: 43685 - DNA, 25 bp, Saccharomyces pastorianus
taaatgtcatcacggttttcaccag

SEQ ID NO: 43686 - DNA, 25 bp, Saccharomyces pastorianus
agacttgtctcgaaaacctagccca

SEQ ID NO: 43687 - DNA, 25 bp, Saccharomyces pastorianus
agtttagatctcgaaacgccgcttg

SEQ ID NO: 43688 - DNA, 25 bp, Saccharomyces pastorianus
agtcctgttggatattcttgattac

SEQ ID NO: 43689 - DNA, 25 bp, Saccharomyces pastorianus
aagactcttcgcaggatcttgttca

SEQ ID NO: 43690 - DNA, 25 bp, Saccharomyces pastorianus
ggttagatccaaaagttcctctcaa

SEQ ID NO: 43691 - DNA, 25 bp, Saccharomyces pastorianus
agatcgctctctgagttactccaaa

SEQ ID NO: 43692 - DNA, 25 bp, Saccharomyces pastorianus
gaaacgccgcttgtcatatttaaat

SEQ ID NO: 43693 - DNA, 25 bp, Saccharomyces pastorianus
aggtgcagcgccatcgggatatgat

SEQ ID NO: 43694 - DNA, 25 bp, Saccharomyces pastorianus
tcgtcatcgatcaagaaccgtctga

SEQ ID NO: 43695 - DNA, 25 bp, Saccharomyces pastorianus
gattgatctaatttctaacgaccta

SEQ ID NO: 43696 - DNA, 25 bp, Saccharomyces pastorianus
gattgtcaagattccactcggcaaa

SEQ ID NO: 43697 - DNA, 25 bp, Saccharomyces pastorianus
aagcaggttgttactatcgtcgtca

SEQ ID NO: 43698 - DNA, 25 bp, Saccharomyces pastorianus
ggttacaagttaaatgccgtgacgt

SEQ ID NO: 43699 - DNA, 25 bp, Saccharomyces pastorianus
gacggttctggtgccattaggccaa

SEQ ID NO: 43700 - DNA, 25 bp, Saccharomyces pastorianus
tgttcggccattaacttatacttcg

SEQ ID NO: 43701 - DNA, 25 bp, Saccharomyces pastorianus
ctatctccatggttctagacttgaa

SEQ ID NO: 43702 - DNA, 25 bp, Saccharomyces pastorianus
cgtgacgtactttcgctcgatgaaa

SEQ ID NO: 43703 - DNA, 25 bp, Saccharomyces pastorianus
aaccgtctgacatatcttcctggat

SEQ ID NO: 43704 - DNA, 25 bp, Saccharomyces pastorianus
aagctggaaatggtatcgtcatcga

SEQ ID NO: 43705 - DNA, 25 bp, Saccharomyces pastorianus
ttgactatccaagaggcgatcgatt

SEQ ID NO: 43706 - DNA, 25 bp, Saccharomyces pastorianus
gggtgccaaactagccaaactggtg

SEQ ID NO: 43707 - DNA, 25 bp, Saccharomyces pastorianus
aaggatacgtcttgtctccaggtgg

SEQ ID NO: 43708 - DNA, 25 bp, Saccharomyces pastorianus
aattcatagcatatcctggtgatcc

SEQ ID NO: 43709 - DNA, 25 bp, Saccharomyces pastorianus
gaactacagcggttggacaaatcta

SEQ ID NO: 43710 - DNA, 25 bp, Saccharomyces pastorianus
gaccagctgatcgaatcttctttat

SEQ ID NO: 43711 - DNA, 25 bp, Saccharomyces pastorianus
gcgagccgatcgacttgatatctat

SEQ ID NO: 43712 - DNA, 25 bp, Saccharomyces pastorianus
gaccgcttaactaagtcgttcgatt

SEQ ID NO: 43713 - DNA, 25 bp, Saccharomyces pastorianus
tatcaacgacgagacttccgcagag

SEQ ID NO: 43714 - DNA, 25 bp, Saccharomyces pastorianus
attgccgacaattcttctatcctaa

SEQ ID NO: 43715 - DNA, 25 bp, Saccharomyces pastorianus
gtttccattcgcatttgactatcca

SEQ ID NO: 43716 - DNA, 25 bp, Saccharomyces pastorianus
gattcccaaaactctctttcaacaa

SEQ ID NO: 43717 - DNA, 25 bp, Saccharomyces pastorianus
ttaagggtaccttctaacaccaatg

SEQ ID NO: 43718 - DNA, 25 bp, Saccharomyces pastorianus
aagacgcaagataagcccaccccgg

SEQ ID NO: 43719 - DNA, 25 bp, Saccharomyces pastorianus
gcgtaaatagttcattttccggatt

SEQ ID NO: 43720 - DNA, 25 bp, Saccharomyces pastorianus
aatgtatccgatccaacttctaagc

SEQ ID NO: 43721 - DNA, 25 bp, Saccharomyces pastorianus
gaaatcagtggtattccatcatcta

SEQ ID NO: 43722 - DNA, 25 bp, Saccharomyces pastorianus
gcgtatcgctacattcatcatcaga

SEQ ID NO: 43723 - DNA, 25 bp, Saccharomyces pastorianus
aagcccctcgtatgccatttacaaa

SEQ ID NO: 43724 - DNA, 25 bp, Saccharomyces pastorianus
gaatggcgaaatccgattcccaaaa

SEQ ID NO: 43725 - DNA, 25 bp, Saccharomyces pastorianus
tgagttttcaccttcgtcatcggaa

SEQ ID NO: 43726 - DNA, 25 bp, Saccharomyces pastorianus
gaatggacgaacgattcaccttccg

SEQ ID NO: 43727 - DNA, 25 bp, Saccharomyces pastorianus
acagcaatggttcaaactcgcaagc

SEQ ID NO: 43728 - DNA, 25 bp, Saccharomyces pastorianus
attatattaaagcagcggaagtcca

SEQ ID NO: 43729 - DNA, 25 bp, Saccharomyces pastorianus
gcggaagtccaaaaacaggctctac

SEQ ID NO: 43730 - DNA, 25 bp, Saccharomyces pastorianus
acacattcagattcaccaaacagca

SEQ ID NO: 43731 - DNA, 25 bp, Saccharomyces pastorianus
atggtgcgtctgaatcatttagatt

SEQ ID NO: 43732 - DNA, 25 bp, Saccharomyces pastorianus
cacttctaatggtgcgtctgaatca

SEQ ID NO: 43733 - DNA, 25 bp, Saccharomyces pastorianus
atggttcaaactcgcaagccaccgg

SEQ ID NO: 43734 - DNA, 25 bp, Saccharomyces pastorianus
gatttggtatggacccaactgtgga

SEQ ID NO: 43735 - DNA, 25 bp, Saccharomyces pastorianus
aagccaccggcacttctaatggtgc

SEQ ID NO: 43736 - DNA, 25 bp, Saccharomyces pastorianus
aaaacaggctctacgggagtactgg

SEQ ID NO: 43737 - DNA, 25 bp, Saccharomyces pastorianus
gggaatgtctcctatacacattcag

SEQ ID NO: 43738 - DNA, 25 bp, Saccharomyces pastorianus
gtggcactcgtgttcgtgatttttt

SEQ ID NO: 43739 - DNA, 25 bp, Saccharomyces pastorianus
atcagcctgatgcacctttaatttc

SEQ ID NO: 43740 - DNA, 25 bp, Saccharomyces pastorianus
acagaggtatccctgatcagcctga

SEQ ID NO: 43741 - DNA, 25 bp, Saccharomyces pastorianus
cattcttctcgcatcgatggttgta

SEQ ID NO: 43742 - DNA, 25 bp, Saccharomyces pastorianus
gggactccatacttttttcattgtg

SEQ ID NO: 43743 - DNA, 25 bp, Saccharomyces pastorianus
caaggtttgcgatatcattcttctc

SEQ ID NO: 43744 - DNA, 25 bp, Saccharomyces pastorianus
aagtcattgttcttcccgtggacgt

SEQ ID NO: 43745 - DNA, 25 bp, Saccharomyces pastorianus
tagtgtttactttcgtggcactcgt

SEQ ID NO: 43746 - DNA, 25 bp, Saccharomyces pastorianus
tatatgccactctgttcaaatgcga

SEQ ID NO: 43747 - DNA, 25 bp, Saccharomyces pastorianus
gtaatagcgcataaaccaccagtag

SEQ ID NO: 43748 - DNA, 25 bp, Saccharomyces pastorianus
aagtcgtacttcacctatttattat

SEQ ID NO: 43749 - DNA, 25 bp, Saccharomyces pastorianus
gtgctgtgtttctttggtttcatca

SEQ ID NO: 43750 - DNA, 25 bp, Saccharomyces pastorianus
tacagaggatacaccaccagccgag

SEQ ID NO: 43751 - DNA, 25 bp, Saccharomyces pastorianus
ttccatgcgccaatctctgataaag

SEQ ID NO: 43752 - DNA, 25 bp, Saccharomyces pastorianus
agtttcatgatacctatggttccca

SEQ ID NO: 43753 - DNA, 25 bp, Saccharomyces pastorianus
gtgtactaggaaccttcttccatgc

SEQ ID NO: 43754 - DNA, 25 bp, Saccharomyces pastorianus
gacctttcactacgttgccgtttat

SEQ ID NO: 43755 - DNA, 25 bp, Saccharomyces pastorianus
gttctgacccgattctggaagcgta

SEQ ID NO: 43756 - DNA, 25 bp, Saccharomyces pastorianus
ggagggtccttcaaccaacgataat

SEQ ID NO: 43757 - DNA, 25 bp, Saccharomyces pastorianus
acaatacactgtcggatccttcaac

SEQ ID NO: 43758 - DNA, 25 bp, Saccharomyces pastorianus
gagtgccatagttttttccaagacc

SEQ ID NO: 43759 - DNA, 25 bp, Saccharomyces pastorianus
atggttcccattttattggctttga

SEQ ID NO: 43760 - DNA, 25 bp, Saccharomyces pastorianus
aagagcttcggctttgggcccgtca

SEQ ID NO: 43761 - DNA, 25 bp, Saccharomyces pastorianus
ggcacacgccaaatccgaggacatg

SEQ ID NO: 43762 - DNA, 25 bp, Saccharomyces pastorianus
aggacacctcggaccagaccaagat

SEQ ID NO: 43763 - DNA, 25 bp, Saccharomyces pastorianus
agaacgaacagtacctcacgggcat

SEQ ID NO: 43764 - DNA, 25 bp, Saccharomyces pastorianus
gggccgcgatgcagaacaacgtgtt

SEQ ID NO: 43765 - DNA, 25 bp, Saccharomyces pastorianus
ttcgcctcgctcatggagaagtcgc

SEQ ID NO: 43766 - DNA, 25 bp, Saccharomyces pastorianus
atctctgtagtcatgtcctcgaggc

SEQ ID NO: 43767 - DNA, 25 bp, Saccharomyces pastorianus
gtgacgttgcagtccaaacagtttg

SEQ ID NO: 43768 - DNA, 25 bp, Saccharomyces pastorianus
gcggcaacccgtgtctcaagagctt

SEQ ID NO: 43769 - DNA, 25 bp, Saccharomyces pastorianus
gttaagtcgctgctggaccaggaca

SEQ ID NO: 43770 - DNA, 25 bp, Saccharomyces pastorianus
atacgcgctctactgtatctggaac

SEQ ID NO: 43771 - DNA, 25 bp, Saccharomyces pastorianus
gggcatcaacttcgagcacacgggc

SEQ ID NO: 43772 - DNA, 25 bp, Saccharomyces pastorianus
cacggacatctacacggactcgatt

SEQ ID NO: 43773 - DNA, 25 bp, Saccharomyces pastorianus
acggactcgattctgagcttcgcgc

SEQ ID NO: 43774 - DNA, 25 bp, Saccharomyces pastorianus
caagctgcagctgatcgtgaccaag

SEQ ID NO: 43775 - DNA, 25 bp, Saccharomyces pastorianus
ttgtactccgtcatcatggacgcgg

SEQ ID NO: 43776 - DNA, 25 bp, Saccharomyces pastorianus
atcttcggcggcaacgattctgcgg

SEQ ID NO: 43777 - DNA, 25 bp, Saccharomyces pastorianus
aagaacgtcctggacatcttcggcg

SEQ ID NO: 43778 - DNA, 25 bp, Saccharomyces pastorianus
atgctgtgcggcacgtcgcatatca

SEQ ID NO: 43779 - DNA, 25 bp, Saccharomyces pastorianus
atctgcctggacgacgtggcctttg

SEQ ID NO: 43780 - DNA, 25 bp, Saccharomyces pastorianus
tcgcgcgcggcgtcactaagaacgt

SEQ ID NO: 43781 - DNA, 25 bp, Saccharomyces pastorianus
tcaacgtgcagacaggtacctgcct

SEQ ID NO: 43782 - DNA, 25 bp, Saccharomyces pastorianus
tattcaagaggaacacccggttacg

SEQ ID NO: 43783 - DNA, 25 bp, Saccharomyces pastorianus
ggctcacctgttgccatatttggcg

SEQ ID NO: 43784 - DNA, 25 bp, Saccharomyces pastorianus
atggtgactacgataaagctgctga

SEQ ID NO: 43785 - DNA, 25 bp, Saccharomyces pastorianus
atttggcgccaacagatagtcgttt

SEQ ID NO: 43786 - DNA, 25 bp, Saccharomyces pastorianus
aggccctcagtaccattcaatttaa

SEQ ID NO: 43787 - DNA, 25 bp, Saccharomyces pastorianus
ggacctcagccggtgcatatgaagt

SEQ ID NO: 43788 - DNA, 25 bp, Saccharomyces pastorianus
aagacaacaaactccactactggtg

SEQ ID NO: 43789 - DNA, 25 bp, Saccharomyces pastorianus
accactggtgactattgtatgttgc

SEQ ID NO: 43790 - DNA, 25 bp, Saccharomyces pastorianus
aaaactatgggttcttggtggacat

SEQ ID NO: 43791 - DNA, 25 bp, Saccharomyces pastorianus
gactttgaatgctttaccggctcac

SEQ ID NO: 43792 - DNA, 25 bp, Saccharomyces pastorianus
ataaggcacatggttggacctcagc

SEQ ID NO: 43793 - DNA, 25 bp, Saccharomyces pastorianus
tgctgtgactagctctgctgccaag

SEQ ID NO: 43794 - DNA, 25 bp, Saccharomyces pastorianus
ttctgctaccacatcgtctgatgta

SEQ ID NO: 43795 - DNA, 25 bp, Saccharomyces pastorianus
acttcttccacatcttctgctgtga

SEQ ID NO: 43796 - DNA, 25 bp, Saccharomyces pastorianus
gctctgctgccaagtcaggaatcat

SEQ ID NO: 43797 - DNA, 25 bp, Saccharomyces pastorianus
acatcttctgctgtgactagctctg

SEQ ID NO: 43798 - DNA, 25 bp, Saccharomyces pastorianus
tgtaaccagttcaacttcttccaca

SEQ ID NO: 43799 - DNA, 25 bp, Saccharomyces pastorianus
accagttcaacttcttccacatctt

SEQ ID NO: 43800 - DNA, 25 bp, Saccharomyces pastorianus
gctaccacatcgtctgatgtaacca

SEQ ID NO: 43801 - DNA, 25 bp, Saccharomyces pastorianus
actagctctgctgccaagtcaggaa

SEQ ID NO: 43802 - DNA, 25 bp, Saccharomyces pastorianus
ttccacatcttctgctgtgactagc

SEQ ID NO: 43803 - DNA, 25 bp, Saccharomyces pastorianus
tgctgccaagtcaggaatcatcact

SEQ ID NO: 43804 - DNA, 25 bp, Saccharomyces pastorianus
ctactgttacaggtcccaatggttt

SEQ ID NO: 43805 - DNA, 25 bp, Saccharomyces pastorianus
gatgcaaccagttctgctaccacat

SEQ ID NO: 43806 - DNA, 25 bp, Saccharomyces pastorianus
agacactcagacctctactgttaca

SEQ ID NO: 43807 - DNA, 25 bp, Saccharomyces pastorianus
tcttcaattgccacatcgtctgatg

SEQ ID NO: 43808 - DNA, 25 bp, Saccharomyces pastorianus
aagtgtcagctcttcaattgccaca

SEQ ID NO: 43809 - DNA, 25 bp, Saccharomyces pastorianus
ggaataatcaccaccacaacagaac

SEQ ID NO: 43810 - DNA, 25 bp, Saccharomyces pastorianus
tgttacaggtcccaatggtttacca

SEQ ID NO: 43811 - DNA, 25 bp, Saccharomyces pastorianus
ttgccacatcgtctgatgcaaccag

SEQ ID NO: 43812 - DNA, 25 bp, Saccharomyces pastorianus
tctgctaccacatcctctgacgtga

SEQ ID NO: 43813 - DNA, 25 bp, Saccharomyces pastorianus
cccaaactataccactacaggaata

SEQ ID NO: 43814 - DNA, 25 bp, Saccharomyces pastorianus
caccaacaagtgtcagctcttcaat

SEQ ID NO: 43815 - DNA, 25 bp, Saccharomyces pastorianus
atatatggcttacggttacgcctcc

SEQ ID NO: 43816 - DNA, 25 bp, Saccharomyces pastorianus
acgggatggatgttaacttctacaa

SEQ ID NO: 43817 - DNA, 25 bp, Saccharomyces pastorianus
gtatacattgaaggactccaccaca

SEQ ID NO: 43818 - DNA, 25 bp, Saccharomyces pastorianus
gcttcaggaagcacaacggcatgtt

SEQ ID NO: 43819 - DNA, 25 bp, Saccharomyces pastorianus
atactcctacccaggatatatggct

SEQ ID NO: 43820 - DNA, 25 bp, Saccharomyces pastorianus
tggtggtcagacaaaaacttcgatt

SEQ ID NO: 43821 - DNA, 25 bp, Saccharomyces pastorianus
aacggcatgtttgccagcaggcgta

SEQ ID NO: 43822 - DNA, 25 bp, Saccharomyces pastorianus
ctactactacgagaagaggctggtc

SEQ ID NO: 43823 - DNA, 25 bp, Saccharomyces pastorianus
gccctcaaggagatgctactactac

SEQ ID NO: 43824 - DNA, 25 bp, Saccharomyces pastorianus
tatgtctcaccgttatatgtttttg

SEQ ID NO: 43825 - DNA, 25 bp, Saccharomyces pastorianus
tgtttttggcggtatttgccttcct

SEQ ID NO: 43826 - DNA, 25 bp, Saccharomyces pastorianus
acaccggtatcatcgttcaatctga

SEQ ID NO: 43827 - DNA, 25 bp, Saccharomyces pastorianus
cggtatcatcgttcaatctgaaggt

SEQ ID NO: 43828 - DNA, 25 bp, Saccharomyces pastorianus
ggtattgctgcaggcttgagaacca

SEQ ID NO: 43829 - DNA, 25 bp, Saccharomyces pastorianus
gctgcaggcttgagaaccaatgctt

SEQ ID NO: 43830 - DNA, 25 bp, Saccharomyces pastorianus
accggtatcatcgttcaatctgaag

SEQ ID NO: 43831 - DNA, 25 bp, Saccharomyces pastorianus
gaaggtattgctgcaggcttgagaa

SEQ ID NO: 43832 - DNA, 25 bp, Saccharomyces pastorianus
tattgctgcaggcttgagaaccaat

SEQ ID NO: 43833 - DNA, 25 bp, Saccharomyces pastorianus
aatctgaaggtattgctgcaggctt

SEQ ID NO: 43834 - DNA, 25 bp, Saccharomyces pastorianus
cacaccggtatcatcgttcaatctg

SEQ ID NO: 43835 - DNA, 25 bp, Saccharomyces pastorianus
aacccacaccggtatcatcgttcaa

SEQ ID NO: 43836 - DNA, 25 bp, Saccharomyces pastorianus
tacaacttctcaaacccacaccggt

SEQ ID NO: 43837 - DNA, 25 bp, Saccharomyces pastorianus
gaacgactaggtgtggctctaagat

SEQ ID NO: 43838 - DNA, 25 bp, Saccharomyces pastorianus
acggtatttccgtgatcagcgggtg

SEQ ID NO: 43839 - DNA, 25 bp, Saccharomyces pastorianus
atcgatttttggctctccacggtat

SEQ ID NO: 43840 - DNA, 25 bp, Saccharomyces pastorianus
ggacgatccttatttgagggtcatt

SEQ ID NO: 43841 - DNA, 25 bp, Saccharomyces pastorianus
gagcgctgcactaatatcgattttt

SEQ ID NO: 43842 - DNA, 25 bp, Saccharomyces pastorianus
atgcgcgccaggtttgatgttttga

SEQ ID NO: 43843 - DNA, 25 bp, Saccharomyces pastorianus
gaaagaacgtcatccacggtgatca

SEQ ID NO: 43844 - DNA, 25 bp, Saccharomyces pastorianus
gaacctgctatatctctgagggaac

SEQ ID NO: 43845 - DNA, 25 bp, Saccharomyces pastorianus
aaacggtatcgatctgcttcagtct

SEQ ID NO: 43846 - DNA, 25 bp, Saccharomyces pastorianus
tgggaattcttctctatgcgcgcca

SEQ ID NO: 43847 - DNA, 25 bp, Saccharomyces pastorianus
aacaagtgacgtccagagcgctgca

SEQ ID NO: 43848 - DNA, 25 bp, Saccharomyces pastorianus
gcccttgattctttcctctaaaatg

SEQ ID NO: 43849 - DNA, 25 bp, Saccharomyces pastorianus
atcggacacgcccttgattctttcc

SEQ ID NO: 43850 - DNA, 25 bp, Saccharomyces pastorianus
gaggccaaagcagcaacaccagcgg

SEQ ID NO: 43851 - DNA, 25 bp, Saccharomyces pastorianus
tctggcggagtgcagtaaagttctc

SEQ ID NO: 43852 - DNA, 25 bp, Saccharomyces pastorianus
gcagcaacaccagcggcaggtcttg

SEQ ID NO: 43853 - DNA, 25 bp, Saccharomyces pastorianus
gttcaagttggcctcatcggacacg

SEQ ID NO: 43854 - DNA, 25 bp, Saccharomyces pastorianus
atcaccgacggcaagaaccctaccg

SEQ ID NO: 43855 - DNA, 25 bp, Saccharomyces pastorianus
agtgcagtaaagttctcgacagaga

SEQ ID NO: 43856 - DNA, 25 bp, Saccharomyces pastorianus
tggcggaggccaaagcagcaacacc

SEQ ID NO: 43857 - DNA, 25 bp, Saccharomyces pastorianus
ccggtttcgttcaagttggcctcat

SEQ ID NO: 43858 - DNA, 25 bp, Saccharomyces pastorianus
tcttgcagctctggcggagtgcagt

SEQ ID NO: 43859 - DNA, 25 bp, Saccharomyces pastorianus
acaatggtatccttcaggtccgata

SEQ ID NO: 43860 - DNA, 25 bp, Saccharomyces pastorianus
ttacttcgacattctttgggcctaa

SEQ ID NO: 43861 - DNA, 25 bp, Saccharomyces pastorianus
aacagcgacggctcgtttacttcga

SEQ ID NO: 43862 - DNA, 25 bp, Saccharomyces pastorianus
tgtaaaccatacgacgttcccggtg

SEQ ID NO: 43863 - DNA, 25 bp, Saccharomyces pastorianus
gtgggaaagccatcctactaggtga

SEQ ID NO: 43864 - DNA, 25 bp, Saccharomyces pastorianus
agaccttgtttctattaccgaactg

SEQ ID NO: 43865 - DNA, 25 bp, Saccharomyces pastorianus
gatatttcgtactccaaagcgttag

SEQ ID NO: 43866 - DNA, 25 bp, Saccharomyces pastorianus
aagctcgatgctctattcagtgtca

SEQ ID NO: 43867 - DNA, 25 bp, Saccharomyces pastorianus
gtcacatgatgttacgtcgaagcgt

SEQ ID NO: 43868 - DNA, 25 bp, Saccharomyces pastorianus
attatggatctggacgacgctgtaa

SEQ ID NO: 43869 - DNA, 25 bp, Saccharomyces pastorianus
gagagtcttgtttgcgtgaattgta

SEQ ID NO: 43870 - DNA, 25 bp, Saccharomyces pastorianus
aagaagatgagcgtcccacagtgga

SEQ ID NO: 43871 - DNA, 25 bp, Saccharomyces pastorianus
gtggtgcactggataacccattcga

SEQ ID NO: 43872 - DNA, 25 bp, Saccharomyces pastorianus
gtatcgattttaaccaagcttttga

SEQ ID NO: 43873 - DNA, 25 bp, Saccharomyces pastorianus
caagcttttgaaggcgctgacaaca

SEQ ID NO: 43874 - DNA, 25 bp, Saccharomyces pastorianus
acaatgatgcacctgctattgcaga

SEQ ID NO: 43875 - DNA, 25 bp, Saccharomyces pastorianus
gaagtcgaaccacccaaaacagacg

SEQ ID NO: 43876 - DNA, 25 bp, Saccharomyces pastorianus
aaggtcacatattcaagggtctcaa

SEQ ID NO: 43877 - DNA, 25 bp, Saccharomyces pastorianus
catctctacgagtttttgtttcata

SEQ ID NO: 43878 - DNA, 25 bp, Saccharomyces pastorianus
gacagacgaacctcttgaagaagat

SEQ ID NO: 43879 - DNA, 25 bp, Saccharomyces pastorianus
ggacgagcctcgcaaggaacttaaa

SEQ ID NO: 43880 - DNA, 25 bp, Saccharomyces pastorianus
ccacagtggacgagccttccaaaga

SEQ ID NO: 43881 - DNA, 25 bp, Saccharomyces pastorianus
aagggcctactttcattgctattag

SEQ ID NO: 43882 - DNA, 25 bp, Saccharomyces pastorianus
taaaggcgcctttaaagctggccag

SEQ ID NO: 43883 - DNA, 25 bp, Saccharomyces pastorianus
aaatcgatccgttagttttccatga

SEQ ID NO: 43884 - DNA, 25 bp, Saccharomyces pastorianus
cagcaaggctgtcactagagtttct

SEQ ID NO: 43885 - DNA, 25 bp, Saccharomyces pastorianus
gaagcactgtgttactgcggtttcc

SEQ ID NO: 43886 - DNA, 25 bp, Saccharomyces pastorianus
gagcagtaatcttacccacggtggg

SEQ ID NO: 43887 - DNA, 25 bp, Saccharomyces pastorianus
gagaacggacatccttgcacaagtt

SEQ ID NO: 43888 - DNA, 25 bp, Saccharomyces pastorianus
caaagagtcgacaacctatggtgct

SEQ ID NO: 43889 - DNA, 25 bp, Saccharomyces pastorianus
gtttcttgaagacatacccgtggac

SEQ ID NO: 43890 - DNA, 25 bp, Saccharomyces pastorianus
accatgtcggacaaggccttttgtt

SEQ ID NO: 43891 - DNA, 25 bp, Saccharomyces pastorianus
gcgcgtttgtgaaagcatggccaga

SEQ ID NO: 43892 - DNA, 25 bp, Saccharomyces pastorianus
gaaactctagtgacagccttgctgt

SEQ ID NO: 43893 - DNA, 25 bp, Saccharomyces pastorianus
agaaactctagtgacagccttgctg

SEQ ID NO: 43894 - DNA, 25 bp, Saccharomyces pastorianus
gtccacgggtatgtcttcaagaaac

SEQ ID NO: 43895 - DNA, 25 bp, Saccharomyces pastorianus
ataatggttgtgtccacgggtatgt

SEQ ID NO: 43896 - DNA, 25 bp, Saccharomyces pastorianus
tgtgtccacgggtatgtcttcaaga

SEQ ID NO: 43897 - DNA, 25 bp, Saccharomyces pastorianus
tgtccacgggtatgtcttcaagaaa

SEQ ID NO: 43898 - DNA, 25 bp, Saccharomyces pastorianus
gtcttcaagaaactctagtgacagc

SEQ ID NO: 43899 - DNA, 25 bp, Saccharomyces pastorianus
ttgtgtccacgggtatgtcttcaag

SEQ ID NO: 43900 - DNA, 25 bp, Saccharomyces pastorianus
atggttgtgtccacgggtatgtctt

SEQ ID NO: 43901 - DNA, 25 bp, Saccharomyces pastorianus
gtgtccacgggtatgtcttcaagaa

SEQ ID NO: 43902 - DNA, 25 bp, Saccharomyces pastorianus
aatggttgtgtccacgggtatgtct

SEQ ID NO: 43903 - DNA, 25 bp, Saccharomyces pastorianus
tgcaaatcttttttgctcgtttttt

SEQ ID NO: 43904 - DNA, 25 bp, Saccharomyces pastorianus
acgtttcttgaatctgttatactaa

SEQ ID NO: 43905 - DNA, 25 bp, Saccharomyces pastorianus
gagattctcatattcaatcattctt

SEQ ID NO: 43906 - DNA, 25 bp, Saccharomyces pastorianus
taatcagatggcctccttacctcac

SEQ ID NO: 43907 - DNA, 25 bp, Saccharomyces pastorianus
tgttatactaacaaaatgtttccgt

SEQ ID NO: 43908 - DNA, 25 bp, Saccharomyces pastorianus
ttttaatcagatggcctccttacct

SEQ ID NO: 43909 - DNA, 25 bp, Saccharomyces pastorianus
atctggtcacaagattttcttggtt

SEQ ID NO: 43910 - DNA, 25 bp, Saccharomyces pastorianus
tgtttccgtttgcaaatcttttttg

SEQ ID NO: 43911 - DNA, 25 bp, Saccharomyces pastorianus
gattttcttggttgctaacgtcaag

SEQ ID NO: 43912 - DNA, 25 bp, Saccharomyces pastorianus
caggttaacgtttcttgaatctgtt

SEQ ID NO: 43913 - DNA, 25 bp, Saccharomyces pastorianus
atcattcttcaggttaacgtttctt

SEQ ID NO: 43914 - DNA, 25 bp, Saccharomyces pastorianus
gagccagaaggcatccgataggcaa

SEQ ID NO: 43915 - DNA, 25 bp, Saccharomyces pastorianus
gataggcaaggttcgacatcaacat

SEQ ID NO: 43916 - DNA, 25 bp, Saccharomyces pastorianus
atcacctgctagagagcaaggtcta

SEQ ID NO: 43917 - DNA, 25 bp, Saccharomyces pastorianus
gacatcaacatcacctgctagagag

SEQ ID NO: 43918 - DNA, 25 bp, Saccharomyces pastorianus
gcaaggtctaaatccaaccacgtta

SEQ ID NO: 43919 - DNA, 25 bp, Saccharomyces pastorianus
ataaaagtgtcttactccgcgatgc

SEQ ID NO: 43920 - DNA, 25 bp, Saccharomyces pastorianus
gtccaactgggctaagctcgaagaa

SEQ ID NO: 43921 - DNA, 25 bp, Saccharomyces pastorianus
ttactccgcgatgccgagccagaag

SEQ ID NO: 43922 - DNA, 25 bp, Saccharomyces pastorianus
tgatacgaagctattgtccaactgg

SEQ ID NO: 43923 - DNA, 25 bp, Saccharomyces pastorianus
aaccacgttacttgtaatgaccctg

SEQ ID NO: 43924 - DNA, 25 bp, Saccharomyces pastorianus
caaggacgtcatggtctttcagaaa

SEQ ID NO: 43925 - DNA, 25 bp, Saccharomyces pastorianus
ttacctggtctttttggctacaaat

SEQ ID NO: 43926 - DNA, 25 bp, Saccharomyces pastorianus
gttacgttagcattcccgctacaat

SEQ ID NO: 43927 - DNA, 25 bp, Saccharomyces pastorianus
aagtcctagccattgttggagctac

SEQ ID NO: 43928 - DNA, 25 bp, Saccharomyces pastorianus
ggctatgctactactcgttacgtta

SEQ ID NO: 43929 - DNA, 25 bp, Saccharomyces pastorianus
aatgtcatccctgtagatcgtccat

SEQ ID NO: 43930 - DNA, 25 bp, Saccharomyces pastorianus
gggatccacatctatctcttttatt

SEQ ID NO: 43931 - DNA, 25 bp, Saccharomyces pastorianus
accatcggaaggctggctatgctac

SEQ ID NO: 43932 - DNA, 25 bp, Saccharomyces pastorianus
gttggccatttcaattacttccctg

SEQ ID NO: 43933 - DNA, 25 bp, Saccharomyces pastorianus
gggaatattatcacactatacccga

SEQ ID NO: 43934 - DNA, 25 bp, Saccharomyces pastorianus
gactggctttattcctctagacaat

SEQ ID NO: 43935 - DNA, 25 bp, Saccharomyces pastorianus
aagggcacgacgcatgataccacga

SEQ ID NO: 43936 - DNA, 25 bp, Saccharomyces pastorianus
gtgatatggttatggccaccgtcaa

SEQ ID NO: 43937 - DNA, 25 bp, Saccharomyces pastorianus
ttcgtcaagccaagtcctggagaag

SEQ ID NO: 43938 - DNA, 25 bp, Saccharomyces pastorianus
tattgttgttcgtcaagccaagtcc

SEQ ID NO: 43939 - DNA, 25 bp, Saccharomyces pastorianus
gtgtcatcgccaacccaaagggtga

SEQ ID NO: 43940 - DNA, 25 bp, Saccharomyces pastorianus
tgttgttcgtcaagccaagtcctgg

SEQ ID NO: 43941 - DNA, 25 bp, Saccharomyces pastorianus
attgttgttcgtcaagccaagtcct

SEQ ID NO: 43942 - DNA, 25 bp, Saccharomyces pastorianus
gttgttcgtcaagccaagtcctgga

SEQ ID NO: 43943 - DNA, 25 bp, Saccharomyces pastorianus
tgttcgtcaagccaagtcctggaga

SEQ ID NO: 43944 - DNA, 25 bp, Saccharomyces pastorianus
tcgtcaagccaagtcctggagaaga

SEQ ID NO: 43945 - DNA, 25 bp, Saccharomyces pastorianus
gttcgtcaagccaagtcctggagaa

SEQ ID NO: 43946 - DNA, 25 bp, Saccharomyces pastorianus
ttgttgttcgtcaagccaagtcctg

SEQ ID NO: 43947 - DNA, 25 bp, Saccharomyces pastorianus
attacggcaaaagcgcagcgagcaa

SEQ ID NO: 43948 - DNA, 25 bp, Saccharomyces pastorianus
aactggagtcacatgtcacgtgcac

SEQ ID NO: 43949 - DNA, 25 bp, Saccharomyces pastorianus
aaccccacagactttttgacagaca

SEQ ID NO: 43950 - DNA, 25 bp, Saccharomyces pastorianus
gagagcttataccagaagacgttca

SEQ ID NO: 43951 - DNA, 25 bp, Saccharomyces pastorianus
gcacaacgtgcgaagctgagaactc

SEQ ID NO: 43952 - DNA, 25 bp, Saccharomyces pastorianus
gaggaagactattacaacccgaatt

SEQ ID NO: 43953 - DNA, 25 bp, Saccharomyces pastorianus
aagaccaggcgagtttacaccaaga

SEQ ID NO: 43954 - DNA, 25 bp, Saccharomyces pastorianus
gcaaagcaagcaattggcctccaaa

SEQ ID NO: 43955 - DNA, 25 bp, Saccharomyces pastorianus
gacgttcaagttaccttgggatcca

SEQ ID NO: 43956 - DNA, 25 bp, Saccharomyces pastorianus
atgaccccgttgattgagagcttat

SEQ ID NO: 43957 - DNA, 25 bp, Saccharomyces pastorianus
aatctaatcgatctgcaggcattga

SEQ ID NO: 43958 - DNA, 25 bp, Saccharomyces pastorianus
atcgcatggcagatcgcagtcgcag

SEQ ID NO: 43959 - DNA, 25 bp, Saccharomyces pastorianus
aagaccgtcccattcatactgatca

SEQ ID NO: 43960 - DNA, 25 bp, Saccharomyces pastorianus
aacgccgtgctactgcttgtaatgg

SEQ ID NO: 43961 - DNA, 25 bp, Saccharomyces pastorianus
ttgtttgtcacaaggtaccctcgtg

SEQ ID NO: 43962 - DNA, 25 bp, Saccharomyces pastorianus
tatcattggacgctgcctgtgctga

SEQ ID NO: 43963 - DNA, 25 bp, Saccharomyces pastorianus
actgatcacgtccaactttatcggt

SEQ ID NO: 43964 - DNA, 25 bp, Saccharomyces pastorianus
aagcacactcttggtggcactgaac

SEQ ID NO: 43965 - DNA, 25 bp, Saccharomyces pastorianus
aagtacttccagtgtgctttcgatt

SEQ ID NO: 43966 - DNA, 25 bp, Saccharomyces pastorianus
gtaatggtcctgacgcagctatcag

SEQ ID NO: 43967 - DNA, 25 bp, Saccharomyces pastorianus
ctgtgctgatcttctggtcgggaat

SEQ ID NO: 43968 - DNA, 25 bp, Saccharomyces pastorianus
tttatcggtgtgctcttcgcaagat

SEQ ID NO: 43969 - DNA, 25 bp, Saccharomyces pastorianus
ttaatcaacgacttgcccacgggac

SEQ ID NO: 43970 - DNA, 25 bp, Saccharomyces pastorianus
ggcgtccaccaacttaatcaacgac

SEQ ID NO: 43971 - DNA, 25 bp, Saccharomyces pastorianus
aaccaaacactgctaatgtcctcca

SEQ ID NO: 43972 - DNA, 25 bp, Saccharomyces pastorianus
acaaacctatcatcgtcgtcttcaa

SEQ ID NO: 43973 - DNA, 25 bp, Saccharomyces pastorianus
atgctcccatctaattcagcggctc

SEQ ID NO: 43974 - DNA, 25 bp, Saccharomyces pastorianus
aattcagcggctccgacaaacctat

SEQ ID NO: 43975 - DNA, 25 bp, Saccharomyces pastorianus
tcgtcttcaaacaattccacgctga

SEQ ID NO: 43976 - DNA, 25 bp, Saccharomyces pastorianus
taattccagatttgcattccacacc

SEQ ID NO: 43977 - DNA, 25 bp, Saccharomyces pastorianus
agatttgcattccacaccaaccata

SEQ ID NO: 43978 - DNA, 25 bp, Saccharomyces pastorianus
gggacctactgccaattcgctaatt

SEQ ID NO: 43979 - DNA, 25 bp, Saccharomyces pastorianus
tccgtgccagtgaacatgtcctcaa

SEQ ID NO: 43980 - DNA, 25 bp, Saccharomyces pastorianus
tatgaacaggcctattccgtcgtct

SEQ ID NO: 43981 - DNA, 25 bp, Saccharomyces pastorianus
tcagcgttccatttttgtcacagac

SEQ ID NO: 43982 - DNA, 25 bp, Saccharomyces pastorianus
tggagtaccgcagcctaaagctgat

SEQ ID NO: 43983 - DNA, 25 bp, Saccharomyces pastorianus
taaccaggcaagtctacagcctatg

SEQ ID NO: 43984 - DNA, 25 bp, Saccharomyces pastorianus
gacatggacaagtacctgctggagt

SEQ ID NO: 43985 - DNA, 25 bp, Saccharomyces pastorianus
gtcgaactaccactcgcattataac

SEQ ID NO: 43986 - DNA, 25 bp, Saccharomyces pastorianus
atgccaggccagatcatcagcgttc

SEQ ID NO: 43987 - DNA, 25 bp, Saccharomyces pastorianus
ctattccgtcgtcttcttatggaac

SEQ ID NO: 43988 - DNA, 25 bp, Saccharomyces pastorianus
taacggcaacactcataaccaggca

SEQ ID NO: 43989 - DNA, 25 bp, Saccharomyces pastorianus
aggtagctactactataacggcaac

SEQ ID NO: 43990 - DNA, 25 bp, Saccharomyces pastorianus
atagccataacaggcccaatgacgt

SEQ ID NO: 43991 - DNA, 25 bp, Saccharomyces pastorianus
gcgacgatcttcattacagctggcg

SEQ ID NO: 43992 - DNA, 25 bp, Saccharomyces pastorianus
taccgggttcaatagcgacgatctt

SEQ ID NO: 43993 - DNA, 25 bp, Saccharomyces pastorianus
aaagagcacatcgtaccgggttcaa

SEQ ID NO: 43994 - DNA, 25 bp, Saccharomyces pastorianus
aatggaactcaatgctaccggaaag

SEQ ID NO: 43995 - DNA, 25 bp, Saccharomyces pastorianus
agctggcgtttctttcaacaagatg

SEQ ID NO: 43996 - DNA, 25 bp, Saccharomyces pastorianus
ttcatcaacctactgtctaacgtat

SEQ ID NO: 43997 - DNA, 25 bp, Saccharomyces pastorianus
ttttccctattttcgagctattgcc

SEQ ID NO: 43998 - DNA, 25 bp, Saccharomyces pastorianus
cagactccgataatgccgtattcaa

SEQ ID NO: 43999 - DNA, 25 bp, Saccharomyces pastorianus
tgctgtgcccttgagttatcatgaa

SEQ ID NO: 44000 - DNA, 25 bp, Saccharomyces pastorianus
tcgagctattgcctattgtttctaa

SEQ ID NO: 44001 - DNA, 25 bp, Saccharomyces pastorianus
gctgttcaatgattttgctgtgccc

SEQ ID NO: 44002 - DNA, 25 bp, Saccharomyces pastorianus
gaatttacgagtggcagtcttgaca

SEQ ID NO: 44003 - DNA, 25 bp, Saccharomyces pastorianus
gtatacccggcgttgtagacatcaa

SEQ ID NO: 44004 - DNA, 25 bp, Saccharomyces pastorianus
ttcaacaaaccttccactacaaata

SEQ ID NO: 44005 - DNA, 25 bp, Saccharomyces pastorianus
agggctttgccaacgaatttgctac

SEQ ID NO: 44006 - DNA, 25 bp, Saccharomyces pastorianus
tcaggactattcaacgcaactacaa

SEQ ID NO: 44007 - DNA, 25 bp, Saccharomyces pastorianus
cactgtatcctctttgttatccaag

SEQ ID NO: 44008 - DNA, 25 bp, Saccharomyces pastorianus
gattctacggtattgcgctattaat

SEQ ID NO: 44009 - DNA, 25 bp, Saccharomyces pastorianus
aaccgttattccgtgtccactgtat

SEQ ID NO: 44010 - DNA, 25 bp, Saccharomyces pastorianus
taattgataatccactgccatttgt

SEQ ID NO: 44011 - DNA, 25 bp, Saccharomyces pastorianus
aagtctccaacagtcattaaccagt

SEQ ID NO: 44012 - DNA, 25 bp, Saccharomyces pastorianus
gcagaagcttgttccacagcgttat

SEQ ID NO: 44013 - DNA, 25 bp, Saccharomyces pastorianus
gtcaatggtgtctttaactagttca

SEQ ID NO: 44014 - DNA, 25 bp, Saccharomyces pastorianus
ttcatattccactagaacgtcgtca

SEQ ID NO: 44015 - DNA, 25 bp, Saccharomyces pastorianus
acaagtcttgcttagcatatcgaaa

SEQ ID NO: 44016 - DNA, 25 bp, Saccharomyces pastorianus
tagaacgtcgtcagtggcttccaac

SEQ ID NO: 44017 - DNA, 25 bp, Saccharomyces pastorianus
ttgggtccgtcttggatccgtcgta

SEQ ID NO: 44018 - DNA, 25 bp, Saccharomyces pastorianus
agcaatatcggatctacaagtcttg

SEQ ID NO: 44019 - DNA, 25 bp, Saccharomyces pastorianus
cataatttgaacaccttcagcttga

SEQ ID NO: 44020 - DNA, 25 bp, Saccharomyces pastorianus
ggatccgtcgtatttagcaatatcg

SEQ ID NO: 44021 - DNA, 25 bp, Saccharomyces pastorianus
cttcagcttgaaaatggtgtcgtta

SEQ ID NO: 44022 - DNA, 25 bp, Saccharomyces pastorianus
gatggcctcaaagtcaatggtgtct

SEQ ID NO: 44023 - DNA, 25 bp, Saccharomyces pastorianus
gaaatgctccttgacgatggcctca

SEQ ID NO: 44024 - DNA, 25 bp, Saccharomyces pastorianus
gagtgctggctaaaaatcagctcga

SEQ ID NO: 44025 - DNA, 25 bp, Saccharomyces pastorianus
ttggacgcttcgcaagcagccgcaa

SEQ ID NO: 44026 - DNA, 25 bp, Saccharomyces pastorianus
gctagaggcagcttcacaggaaact

SEQ ID NO: 44027 - DNA, 25 bp, Saccharomyces pastorianus
gagtcatacgcattcactttaaaga

SEQ ID NO: 44028 - DNA, 25 bp, Saccharomyces pastorianus
gaaaaggttagcgaagatgactcaa

SEQ ID NO: 44029 - DNA, 25 bp, Saccharomyces pastorianus
gaacaccattagtgaaccaggtttc

SEQ ID NO: 44030 - DNA, 25 bp, Saccharomyces pastorianus
gccgaatccgggtgctacagatggt

SEQ ID NO: 44031 - DNA, 25 bp, Saccharomyces pastorianus
gaaactatcgactggttggacgctt

SEQ ID NO: 44032 - DNA, 25 bp, Saccharomyces pastorianus
aatcagctcgagtcatacgcattca

SEQ ID NO: 44033 - DNA, 25 bp, Saccharomyces pastorianus
ggtttccctggatccatgccgaatc

SEQ ID NO: 44034 - DNA, 25 bp, Saccharomyces pastorianus
gcagccgcaaccgacgagtacaagg

SEQ ID NO: 44035 - DNA, 25 bp, Saccharomyces pastorianus
agtgctgactgattccaaattggac

SEQ ID NO: 44036 - DNA, 25 bp, Saccharomyces pastorianus
gcagacaaccaacctggcgttttga

SEQ ID NO: 44037 - DNA, 25 bp, Saccharomyces pastorianus
gaagctgttgcctacggtgcagcag

SEQ ID NO: 44038 - DNA, 25 bp, Saccharomyces pastorianus
ttcctcctctcagacatctattgaa

SEQ ID NO: 44039 - DNA, 25 bp, Saccharomyces pastorianus
ggtgcagcagttcaggcagctatcc

SEQ ID NO: 44040 - DNA, 25 bp, Saccharomyces pastorianus
gattcgaagaactgtgcgctgattt

SEQ ID NO: 44041 - DNA, 25 bp, Saccharomyces pastorianus
gttgatttctacacctcactaacaa

SEQ ID NO: 44042 - DNA, 25 bp, Saccharomyces pastorianus
gcagctatccttactggcgatcaat

SEQ ID NO: 44043 - DNA, 25 bp, Saccharomyces pastorianus
agctggtttccggtttcttcaatgg

SEQ ID NO: 44044 - DNA, 25 bp, Saccharomyces pastorianus
gaaactttttcgacctacgcagaca

SEQ ID NO: 44045 - DNA, 25 bp, Saccharomyces pastorianus
atcttcttcttctagatgttgcgcc

SEQ ID NO: 44046 - DNA, 25 bp, Saccharomyces pastorianus
atttcaatgccgtggtactcgaagg

SEQ ID NO: 44047 - DNA, 25 bp, Saccharomyces pastorianus
ttacgggtcaagtctacaatggcat

SEQ ID NO: 44048 - DNA, 25 bp, Saccharomyces pastorianus
gaccttgccagagcagtattcagat

SEQ ID NO: 44049 - DNA, 25 bp, Saccharomyces pastorianus
gaactcatttccaacgattctgaag

SEQ ID NO: 44050 - DNA, 25 bp, Saccharomyces pastorianus
gaatatgaatcttcccgttgctttg

SEQ ID NO: 44051 - DNA, 25 bp, Saccharomyces pastorianus
gttgctttgattacacggtggctaa

SEQ ID NO: 44052 - DNA, 25 bp, Saccharomyces pastorianus
ctagaccatctcttgtatttccaga

SEQ ID NO: 44053 - DNA, 25 bp, Saccharomyces pastorianus
atatgttcaagctcatcagtgccca

SEQ ID NO: 44054 - DNA, 25 bp, Saccharomyces pastorianus
acttgtctatattcctctttccaaa

SEQ ID NO: 44055 - DNA, 25 bp, Saccharomyces pastorianus
gcttgcagagagctggttccacaat

SEQ ID NO: 44056 - DNA, 25 bp, Saccharomyces pastorianus
gaacgcgtgtggaatacttgtctat

SEQ ID NO: 44057 - DNA, 25 bp, Saccharomyces pastorianus
gtcattcatttccaacatgcggatg

SEQ ID NO: 44058 - DNA, 25 bp, Saccharomyces pastorianus
ccggtatgaggtatggttactggtt

SEQ ID NO: 44059 - DNA, 25 bp, Saccharomyces pastorianus
attgaccacgtccacgtcattcatt

SEQ ID NO: 44060 - DNA, 25 bp, Saccharomyces pastorianus
aatcaaccattccagggaattaagg

SEQ ID NO: 44061 - DNA, 25 bp, Saccharomyces pastorianus
tacgatttcaatgatgtatttacaa

SEQ ID NO: 44062 - DNA, 25 bp, Saccharomyces pastorianus
tccaacatgcggatgattccggtat

SEQ ID NO: 44063 - DNA, 25 bp, Saccharomyces pastorianus
gattccggtatgaggtatggttact

SEQ ID NO: 44064 - DNA, 25 bp, Saccharomyces pastorianus
aaggatattcccattgaccacgtcc

SEQ ID NO: 44065 - DNA, 25 bp, Saccharomyces pastorianus
actactacattcaatacgatttcaa

SEQ ID NO: 44066 - DNA, 25 bp, Saccharomyces pastorianus
gggaaactactacattcaatacgat

SEQ ID NO: 44067 - DNA, 25 bp, Saccharomyces pastorianus
gtccacgtcattcatttccaacatg

SEQ ID NO: 44068 - DNA, 25 bp, Saccharomyces pastorianus
ggataggagttttgatcttcttttc

SEQ ID NO: 44069 - DNA, 25 bp, Saccharomyces pastorianus
aactccataggacctgttttggaat

SEQ ID NO: 44070 - DNA, 25 bp, Saccharomyces pastorianus
aggacctgttttggaatggaaagca

SEQ ID NO: 44071 - DNA, 25 bp, Saccharomyces pastorianus
tctacagggttcaagcccacgttac

SEQ ID NO: 44072 - DNA, 25 bp, Saccharomyces pastorianus
ctgactcgaactacaattttgtttt

SEQ ID NO: 44073 - DNA, 25 bp, Saccharomyces pastorianus
gttttgatcttcttttcatatgaaa

SEQ ID NO: 44074 - DNA, 25 bp, Saccharomyces pastorianus
gttactgactcgaactacaattttg

SEQ ID NO: 44075 - DNA, 25 bp, Saccharomyces pastorianus
atatgaaaactccataggacctgtt

SEQ ID NO: 44076 - DNA, 25 bp, Saccharomyces pastorianus
ggagttttgatcttcttttcatatg

SEQ ID NO: 44077 - DNA, 25 bp, Saccharomyces pastorianus
agggttcaagcccacgttactgact

SEQ ID NO: 44078 - DNA, 25 bp, Saccharomyces pastorianus
aagcccacgttactgactcgaacta

SEQ ID NO: 44079 - DNA, 25 bp, Saccharomyces pastorianus
gtacgaataccgttccagtggattt

SEQ ID NO: 44080 - DNA, 25 bp, Saccharomyces pastorianus
tcacgttatcaccatggaccttcat

SEQ ID NO: 44081 - DNA, 25 bp, Saccharomyces pastorianus
gtgcttgtcggtgacgtcaccaata

SEQ ID NO: 44082 - DNA, 25 bp, Saccharomyces pastorianus
atatggctgacacttgcggtacgtt

SEQ ID NO: 44083 - DNA, 25 bp, Saccharomyces pastorianus
gctatccaggattgtttgtacgaat

SEQ ID NO: 44084 - DNA, 25 bp, Saccharomyces pastorianus
gacactttgttggaacatggcgcca

SEQ ID NO: 44085 - DNA, 25 bp, Saccharomyces pastorianus
gatatcagtccaactttcgctgaag

SEQ ID NO: 44086 - DNA, 25 bp, Saccharomyces pastorianus
gaagtcatagccattgttacgcatg

SEQ ID NO: 44087 - DNA, 25 bp, Saccharomyces pastorianus
catggtatattctctggttctgcaa

SEQ ID NO: 44088 - DNA, 25 bp, Saccharomyces pastorianus
taatgccattttggtgtcacctgat

SEQ ID NO: 44089 - DNA, 25 bp, Saccharomyces pastorianus
aatctgttgcaaactgctggctccg

SEQ ID NO: 44090 - DNA, 25 bp, Saccharomyces pastorianus
gaagttcggttggttgctattcgat

SEQ ID NO: 44091 - DNA, 25 bp, Saccharomyces pastorianus
aattggccggaatcgttgttcacat

SEQ ID NO: 44092 - DNA, 25 bp, Saccharomyces pastorianus
ttcacatgggcggtggacctcagca

SEQ ID NO: 44093 - DNA, 25 bp, Saccharomyces pastorianus
gcttgaaacaactgccggatacttt

SEQ ID NO: 44094 - DNA, 25 bp, Saccharomyces pastorianus
aacatccagagacgaaccttttttg

SEQ ID NO: 44095 - DNA, 25 bp, Saccharomyces pastorianus
gaacgtttgctcttcgatagactct

SEQ ID NO: 44096 - DNA, 25 bp, Saccharomyces pastorianus
aaactcttcaacaacattcgctatc

SEQ ID NO: 44097 - DNA, 25 bp, Saccharomyces pastorianus
tttccccatagaagtccagggcgac

SEQ ID NO: 44098 - DNA, 25 bp, Saccharomyces pastorianus
ggacctcagcatgggcattatgttt

SEQ ID NO: 44099 - DNA, 25 bp, Saccharomyces pastorianus
aacattcgctatcctctaacattga

SEQ ID NO: 44100 - DNA, 25 bp, Saccharomyces pastorianus
gccggatactttagcgttgcatttg

SEQ ID NO: 44101 - DNA, 25 bp, Saccharomyces pastorianus
gattgcgggcttatcaaatactgtt

SEQ ID NO: 44102 - DNA, 25 bp, Saccharomyces pastorianus
gtgacaaagaccactccgagcggaa

SEQ ID NO: 44103 - DNA, 25 bp, Saccharomyces pastorianus
gcaattcctgataacctttctatga

SEQ ID NO: 44104 - DNA, 25 bp, Saccharomyces pastorianus
ggctatggaccaccagggccaaaga

SEQ ID NO: 44105 - DNA, 25 bp, Saccharomyces pastorianus
agtgatccttcatctacaggtggga

SEQ ID NO: 44106 - DNA, 25 bp, Saccharomyces pastorianus
ggataccgctttctatgcttggaga

SEQ ID NO: 44107 - DNA, 25 bp, Saccharomyces pastorianus
agcagaaccgttttagacgcgtcta

SEQ ID NO: 44108 - DNA, 25 bp, Saccharomyces pastorianus
ttcaggctatccattaatctctaac

SEQ ID NO: 44109 - DNA, 25 bp, Saccharomyces pastorianus
accggtgccctttaattcaggctat

SEQ ID NO: 44110 - DNA, 25 bp, Saccharomyces pastorianus
agacgcgtctaccattataccggtg

SEQ ID NO: 44111 - DNA, 25 bp, Saccharomyces pastorianus
gtaagcactcccgtgagtcatctac

SEQ ID NO: 44112 - DNA, 25 bp, Saccharomyces pastorianus
atggttgatttggtggctgtcatca

SEQ ID NO: 44113 - DNA, 25 bp, Saccharomyces pastorianus
tttgttcggagattgctgctgttgt

SEQ ID NO: 44114 - DNA, 25 bp, Saccharomyces pastorianus
ttgcaactgctgctgctccaactgt

SEQ ID NO: 44115 - DNA, 25 bp, Saccharomyces pastorianus
gttttttgttcggagattgctgctg

SEQ ID NO: 44116 - DNA, 25 bp, Saccharomyces pastorianus
tgatgaggcattcgttgttttttgt

SEQ ID NO: 44117 - DNA, 25 bp, Saccharomyces pastorianus
gttgttgcaactgctgctgctccaa

SEQ ID NO: 44118 - DNA, 25 bp, Saccharomyces pastorianus
gctgttgttgcaactgctgctgctc

SEQ ID NO: 44119 - DNA, 25 bp, Saccharomyces pastorianus
gatttggtggctgtcatcatgatga

SEQ ID NO: 44120 - DNA, 25 bp, Saccharomyces pastorianus
tgttcggagattgctgctgttgttg

SEQ ID NO: 44121 - DNA, 25 bp, Saccharomyces pastorianus
ctgctccaactgtcttttcatgtga

SEQ ID NO: 44122 - DNA, 25 bp, Saccharomyces pastorianus
gtcatcatgatgaggcattcgttgt

SEQ ID NO: 44123 - DNA, 25 bp, Saccharomyces pastorianus
gtgtcagcactttaaacttattctc

SEQ ID NO: 44124 - DNA, 25 bp, Saccharomyces pastorianus
gagattctgagccacagggtttgca

SEQ ID NO: 44125 - DNA, 25 bp, Saccharomyces pastorianus
aagaaaggtccttcgcctatcagaa

SEQ ID NO: 44126 - DNA, 25 bp, Saccharomyces pastorianus
gcttgccaaaagctcaatttaccct

SEQ ID NO: 44127 - DNA, 25 bp, Saccharomyces pastorianus
tccaatgggccttacgcgcagctaa

SEQ ID NO: 44128 - DNA, 25 bp, Saccharomyces pastorianus
gcgcagctaatgcaggcttgccaaa

SEQ ID NO: 44129 - DNA, 25 bp, Saccharomyces pastorianus
caagctcaaccgtttcttcaaagtc

SEQ ID NO: 44130 - DNA, 25 bp, Saccharomyces pastorianus
gggtcgtttgcgaagccaagctcaa

SEQ ID NO: 44131 - DNA, 25 bp, Saccharomyces pastorianus
gtccgagacattttttactggaaat

SEQ ID NO: 44132 - DNA, 25 bp, Saccharomyces pastorianus
gaaggtggaattgccgctgccagta

SEQ ID NO: 44133 - DNA, 25 bp, Saccharomyces pastorianus
agtccatccggaaccaatcttgaac

SEQ ID NO: 44134 - DNA, 25 bp, Saccharomyces pastorianus
ggacaggatacgtcactttccgtac

SEQ ID NO: 44135 - DNA, 25 bp, Saccharomyces pastorianus
cggcggcaccatatgagctagctaa

SEQ ID NO: 44136 - DNA, 25 bp, Saccharomyces pastorianus
ttaggcacaacaagagactcccgta

SEQ ID NO: 44137 - DNA, 25 bp, Saccharomyces pastorianus
atagggcatcccattgtttagaaga

SEQ ID NO: 44138 - DNA, 25 bp, Saccharomyces pastorianus
ttcagacgcgcaatacttactaggt

SEQ ID NO: 44139 - DNA, 25 bp, Saccharomyces pastorianus
aaggattcctggacgttgtcattcc

SEQ ID NO: 44140 - DNA, 25 bp, Saccharomyces pastorianus
tttccgtacactattacactcaggc

SEQ ID NO: 44141 - DNA, 25 bp, Saccharomyces pastorianus
gtgacggttatgcatcaggagcctt

SEQ ID NO: 44142 - DNA, 25 bp, Saccharomyces pastorianus
agcttagggcatatcccttcagcaa

SEQ ID NO: 44143 - DNA, 25 bp, Saccharomyces pastorianus
ctaatgaattgacggcggcggcacc

SEQ ID NO: 44144 - DNA, 25 bp, Saccharomyces pastorianus
gtaggatgggccttccaaccgatgt

SEQ ID NO: 44145 - DNA, 25 bp, Saccharomyces pastorianus
ttcggcatgggcatcacaggaacat

SEQ ID NO: 44146 - DNA, 25 bp, Saccharomyces pastorianus
atgcctctcgataagagcagtcagc

SEQ ID NO: 44147 - DNA, 25 bp, Saccharomyces pastorianus
gggaacattcggcatgggcatcaca

SEQ ID NO: 44148 - DNA, 25 bp, Saccharomyces pastorianus
atgacgttgggaacattcggcatgg

SEQ ID NO: 44149 - DNA, 25 bp, Saccharomyces pastorianus
gttggagctgggacgtctcatcgtt

SEQ ID NO: 44150 - DNA, 25 bp, Saccharomyces pastorianus
gtggtgacaaatatgcctctcgata

SEQ ID NO: 44151 - DNA, 25 bp, Saccharomyces pastorianus
aactgcgcttagaaagacgtgccaa

SEQ ID NO: 44152 - DNA, 25 bp, Saccharomyces pastorianus
gaaagacgtgccaacaacgaaactg

SEQ ID NO: 44153 - DNA, 25 bp, Saccharomyces pastorianus
gttccaggagctgaaactgcgctta

SEQ ID NO: 44154 - DNA, 25 bp, Saccharomyces pastorianus
acgtctcatcgttccaggagctgaa

SEQ ID NO: 44155 - DNA, 25 bp, Saccharomyces pastorianus
gcagtcagcaggtagtggacgccct

SEQ ID NO: 44156 - DNA, 25 bp, Saccharomyces pastorianus
ggaagactcagatggctcgattttt

SEQ ID NO: 44157 - DNA, 25 bp, Saccharomyces pastorianus
gactcagatggctcgatttttcggg

SEQ ID NO: 44158 - DNA, 25 bp, Saccharomyces pastorianus
ggaaacgacaaagctacggtgagga

SEQ ID NO: 44159 - DNA, 25 bp, Saccharomyces pastorianus
caaagctacggtgaggagcgaagat

SEQ ID NO: 44160 - DNA, 25 bp, Saccharomyces pastorianus
gccagtgagtggaaacgacaaagct

SEQ ID NO: 44161 - DNA, 25 bp, Saccharomyces pastorianus
gtcaccatgtttacacttctaactt

SEQ ID NO: 44162 - DNA, 25 bp, Saccharomyces pastorianus
gcacacttcatggacgaatataaga

SEQ ID NO: 44163 - DNA, 25 bp, Saccharomyces pastorianus
gggtcaccatgtttacacttctaac

SEQ ID NO: 44164 - DNA, 25 bp, Saccharomyces pastorianus
gttgcacacttcatggacgaatata

SEQ ID NO: 44165 - DNA, 25 bp, Saccharomyces pastorianus
agatgttgcacacttcatggacgaa

SEQ ID NO: 44166 - DNA, 25 bp, Saccharomyces pastorianus
tgaggagcgaagatgttgcacactt

SEQ ID NO: 44167 - DNA, 25 bp, Saccharomyces pastorianus
aagcgctaccgtattgggcctaggg

SEQ ID NO: 44168 - DNA, 25 bp, Saccharomyces pastorianus
aaatcgctgcacaatgttgccatgc

SEQ ID NO: 44169 - DNA, 25 bp, Saccharomyces pastorianus
ccacgtttcttcattgccagggaag

SEQ ID NO: 44170 - DNA, 25 bp, Saccharomyces pastorianus
gtgtttcgtacaacccgatcatgac

SEQ ID NO: 44171 - DNA, 25 bp, Saccharomyces pastorianus
atagcgctatgtgcgactttcaccg

SEQ ID NO: 44172 - DNA, 25 bp, Saccharomyces pastorianus
tattgaaatcgtccccaaccaagac

SEQ ID NO: 44173 - DNA, 25 bp, Saccharomyces pastorianus
ttcaccgctatttctttcgcgatag

SEQ ID NO: 44174 - DNA, 25 bp, Saccharomyces pastorianus
gtttcagacacattgcgacagaccc

SEQ ID NO: 44175 - DNA, 25 bp, Saccharomyces pastorianus
aaatgtcctgacaagttcacgatgg

SEQ ID NO: 44176 - DNA, 25 bp, Saccharomyces pastorianus
gaacgctgcagttattcacgatgct

SEQ ID NO: 44177 - DNA, 25 bp, Saccharomyces pastorianus
gtatgcgaaggctatttctcttgga

SEQ ID NO: 44178 - DNA, 25 bp, Saccharomyces pastorianus
gtatcctgcatttaagtccgtcaag

SEQ ID NO: 44179 - DNA, 25 bp, Saccharomyces pastorianus
ttttggaaacagacgccccatggtg

SEQ ID NO: 44180 - DNA, 25 bp, Saccharomyces pastorianus
aaaaaacgcatgcatccttccagta

SEQ ID NO: 44181 - DNA, 25 bp, Saccharomyces pastorianus
gcgaggagaacctgcctgttgtaaa

SEQ ID NO: 44182 - DNA, 25 bp, Saccharomyces pastorianus
ggcagctacccattgtttctacata

SEQ ID NO: 44183 - DNA, 25 bp, Saccharomyces pastorianus
ttacagggactggatgcgtcgtcat

SEQ ID NO: 44184 - DNA, 25 bp, Saccharomyces pastorianus
aatacccttagaacgcctgcttttg

SEQ ID NO: 44185 - DNA, 25 bp, Saccharomyces pastorianus
ggtcaacacctttgagtatcctgca

SEQ ID NO: 44186 - DNA, 25 bp, Saccharomyces pastorianus
gaccggaagctggtggttcattcat

SEQ ID NO: 44187 - DNA, 25 bp, Saccharomyces pastorianus
gggtctgagtcggatctgcaaaaac

SEQ ID NO: 44188 - DNA, 25 bp, Saccharomyces pastorianus
acgacaggttccattacagctctaa

SEQ ID NO: 44189 - DNA, 25 bp, Saccharomyces pastorianus
aaaagcctgatcgatgcggttaacg

SEQ ID NO: 44190 - DNA, 25 bp, Saccharomyces pastorianus
tatccaaaggctatcgactgttacg

SEQ ID NO: 44191 - DNA, 25 bp, Saccharomyces pastorianus
gcaagtgacatctattccaaactga

SEQ ID NO: 44192 - DNA, 25 bp, Saccharomyces pastorianus
aacgatcttcatgactatccaaagg

SEQ ID NO: 44193 - DNA, 25 bp, Saccharomyces pastorianus
gtcaacgccgtaaattcactagaga

SEQ ID NO: 44194 - DNA, 25 bp, Saccharomyces pastorianus
cgactgttacgagttggctggtgaa

SEQ ID NO: 44195 - DNA, 25 bp, Saccharomyces pastorianus
gtgaagacccaaatttcgcagattc

SEQ ID NO: 44196 - DNA, 25 bp, Saccharomyces pastorianus
gtgtgcagacttgaaggctcttgat

SEQ ID NO: 44197 - DNA, 25 bp, Saccharomyces pastorianus
gtcgctgccacgaggactttacaag

SEQ ID NO: 44198 - DNA, 25 bp, Saccharomyces pastorianus
agctggctgctactgattctgtcgc

SEQ ID NO: 44199 - DNA, 25 bp, Saccharomyces pastorianus
agtggtgggaactctgtcaacgccg

SEQ ID NO: 44200 - DNA, 25 bp, Saccharomyces pastorianus
aattaaccgaggtgttgctaccaca

SEQ ID NO: 44201 - DNA, 25 bp, Saccharomyces pastorianus
gctccaggactattctttttcacat

SEQ ID NO: 44202 - DNA, 25 bp, Saccharomyces pastorianus
agggaccttaactagctcttccaat

SEQ ID NO: 44203 - DNA, 25 bp, Saccharomyces pastorianus
taccactgatcctgctcaagtaagc

SEQ ID NO: 44204 - DNA, 25 bp, Saccharomyces pastorianus
aaggccgattctactattgattccg

SEQ ID NO: 44205 - DNA, 25 bp, Saccharomyces pastorianus
gtgatttcaccctccaaagacgaat

SEQ ID NO: 44206 - DNA, 25 bp, Saccharomyces pastorianus
ggcaaatgcattcacagggacctta

SEQ ID NO: 44207 - DNA, 25 bp, Saccharomyces pastorianus
gaaacagtcgtcataccagaatcca

SEQ ID NO: 44208 - DNA, 25 bp, Saccharomyces pastorianus
acaccaaagtccctagccgttgaag

SEQ ID NO: 44209 - DNA, 25 bp, Saccharomyces pastorianus
tccggtaagcaaacgaatcccataa

SEQ ID NO: 44210 - DNA, 25 bp, Saccharomyces pastorianus
acatccagtcccattaaaggccgat

SEQ ID NO: 44211 - DNA, 25 bp, Saccharomyces pastorianus
aggtgtctcaaaccaagaacgcgga

SEQ ID NO: 44212 - DNA, 25 bp, Saccharomyces pastorianus
gaagcaacaactagccgtttcagaa

SEQ ID NO: 44213 - DNA, 25 bp, Saccharomyces pastorianus
gtcgaagcaagcaagcatcaccaat

SEQ ID NO: 44214 - DNA, 25 bp, Saccharomyces pastorianus
tcaagttaactctttgtcgaagcaa

SEQ ID NO: 44215 - DNA, 25 bp, Saccharomyces pastorianus
tgccgctgagtccaagttgaatgaa

SEQ ID NO: 44216 - DNA, 25 bp, Saccharomyces pastorianus
atgactgcatctttacaatcccaac

SEQ ID NO: 44217 - DNA, 25 bp, Saccharomyces pastorianus
aagactgtcgaagagcagcatgctc

SEQ ID NO: 44218 - DNA, 25 bp, Saccharomyces pastorianus
agaagccaattaccatgccgctgag

SEQ ID NO: 44219 - DNA, 25 bp, Saccharomyces pastorianus
atttacgttccaaccatgagcagaa

SEQ ID NO: 44220 - DNA, 25 bp, Saccharomyces pastorianus
gaatgtcacgcaaaccgaacagctt

SEQ ID NO: 44221 - DNA, 25 bp, Saccharomyces pastorianus
aatgaattaaccaccgacttgcagg

SEQ ID NO: 44222 - DNA, 25 bp, Saccharomyces pastorianus
ctgcctcaattgtacatgttgtcca

SEQ ID NO: 44223 - DNA, 25 bp, Saccharomyces pastorianus
attgtggtcctactacaagggtcta

SEQ ID NO: 44224 - DNA, 25 bp, Saccharomyces pastorianus
tgggaataccagaagtttgaccatt

SEQ ID NO: 44225 - DNA, 25 bp, Saccharomyces pastorianus
ttaacgttccattgggtatccctat

SEQ ID NO: 44226 - DNA, 25 bp, Saccharomyces pastorianus
catcgtttctaccatctacattgtg

SEQ ID NO: 44227 - DNA, 25 bp, Saccharomyces pastorianus
tagacaagattgctctcttcgcggg

SEQ ID NO: 44228 - DNA, 25 bp, Saccharomyces pastorianus
gatattcttcatcgtttctaccatc

SEQ ID NO: 44229 - DNA, 25 bp, Saccharomyces pastorianus
gagatacattcaagattcagcattt

SEQ ID NO: 44230 - DNA, 25 bp, Saccharomyces pastorianus
gtatccctatacaacgctttcatga

SEQ ID NO: 44231 - DNA, 25 bp, Saccharomyces pastorianus
aaagggctaacactatcgcgtacaa

SEQ ID NO: 44232 - DNA, 25 bp, Saccharomyces pastorianus
cataacacgttacttggatctttta

SEQ ID NO: 44233 - DNA, 25 bp, Saccharomyces pastorianus
gattgtctgccgaaggatgtcttta

SEQ ID NO: 44234 - DNA, 25 bp, Saccharomyces pastorianus
gagacatttacaatccgtgctggat

SEQ ID NO: 44235 - DNA, 25 bp, Saccharomyces pastorianus
agatgttgttatctcccactattcg

SEQ ID NO: 44236 - DNA, 25 bp, Saccharomyces pastorianus
gggaaccccgacgatgatggagttt

SEQ ID NO: 44237 - DNA, 25 bp, Saccharomyces pastorianus
agctatttcatcactgggagcgata

SEQ ID NO: 44238 - DNA, 25 bp, Saccharomyces pastorianus
ggagcgataacacctcgtggaactt

SEQ ID NO: 44239 - DNA, 25 bp, Saccharomyces pastorianus
tacagatgacaagccctcgatacca

SEQ ID NO: 44240 - DNA, 25 bp, Saccharomyces pastorianus
ggttacagagatacagcccgagact

SEQ ID NO: 44241 - DNA, 25 bp, Saccharomyces pastorianus
gtttctaatcgagacgctatccaag

SEQ ID NO: 44242 - DNA, 25 bp, Saccharomyces pastorianus
attctcgtccataatctcttagtct

SEQ ID NO: 44243 - DNA, 25 bp, Saccharomyces pastorianus
catggtcttagcacactctttgaga

SEQ ID NO: 44244 - DNA, 25 bp, Saccharomyces pastorianus
tgtactcccgattcaaaattgtatt

SEQ ID NO: 44245 - DNA, 25 bp, Saccharomyces pastorianus
tatcttctcgaactatactctatta

SEQ ID NO: 44246 - DNA, 25 bp, Saccharomyces pastorianus
ttactggctccacaacattcatcgt

SEQ ID NO: 44247 - DNA, 25 bp, Saccharomyces pastorianus
tatgattaagtcaccacacgattta

SEQ ID NO: 44248 - DNA, 25 bp, Saccharomyces pastorianus
caattttggttgtgcggagatacta

SEQ ID NO: 44249 - DNA, 25 bp, Saccharomyces pastorianus
gcttttccgcggtttgaacaacaca

SEQ ID NO: 44250 - DNA, 25 bp, Saccharomyces pastorianus
ttcatcgtcaccaccgtggactaaa

SEQ ID NO: 44251 - DNA, 25 bp, Saccharomyces pastorianus
attccaataattgtactcccgattc

SEQ ID NO: 44252 - DNA, 25 bp, Saccharomyces pastorianus
actttattacttgagcttttccgcg

SEQ ID NO: 44253 - DNA, 25 bp, Saccharomyces pastorianus
gcccttctcagacagctaatttgat

SEQ ID NO: 44254 - DNA, 25 bp, Saccharomyces pastorianus
gaaaccgattctgaaagcccttctc

SEQ ID NO: 44255 - DNA, 25 bp, Saccharomyces pastorianus
caagtcgattgaaccaacagttgca

SEQ ID NO: 44256 - DNA, 25 bp, Saccharomyces pastorianus
aaaggaaggtctggagcctctggct

SEQ ID NO: 44257 - DNA, 25 bp, Saccharomyces pastorianus
ttaagagaaaaagccgtggcggcca

SEQ ID NO: 44258 - DNA, 25 bp, Saccharomyces pastorianus
gagatccggtgctaagaccatcatt

SEQ ID NO: 44259 - DNA, 25 bp, Saccharomyces pastorianus
ttcttatccctagctttaaacaagt

SEQ ID NO: 44260 - DNA, 25 bp, Saccharomyces pastorianus
aacagttgcaatgaccggagaatta

SEQ ID NO: 44261 - DNA, 25 bp, Saccharomyces pastorianus
ggagaattaacactcacgggtaaag

SEQ ID NO: 44262 - DNA, 25 bp, Saccharomyces pastorianus
aagaccatcattttccctaaggaca

SEQ ID NO: 44263 - DNA, 25 bp, Saccharomyces pastorianus
ctggctgcggactggtataatgata

SEQ ID NO: 44264 - DNA, 25 bp, Saccharomyces pastorianus
tggcggccaagagatccggtgctaa

SEQ ID NO: 44265 - DNA, 25 bp, Saccharomyces pastorianus
gagcctctggctgcggactggtata

SEQ ID NO: 44266 - DNA, 25 bp, Saccharomyces pastorianus
gactatatgaaacaaccccaccggg

SEQ ID NO: 44267 - DNA, 25 bp, Saccharomyces pastorianus
actatacgttgaatctgtccttgaa

SEQ ID NO: 44268 - DNA, 25 bp, Saccharomyces pastorianus
tgtaagcacccgacctttgaaagaa

SEQ ID NO: 44269 - DNA, 25 bp, Saccharomyces pastorianus
agtattgaggactccccaacatctt

SEQ ID NO: 44270 - DNA, 25 bp, Saccharomyces pastorianus
gcattgtccggaaggtgccacccaa

SEQ ID NO: 44271 - DNA, 25 bp, Saccharomyces pastorianus
aagactggcttattcattttccaaa

SEQ ID NO: 44272 - DNA, 25 bp, Saccharomyces pastorianus
agacaccgccaaatccaaggaaact

SEQ ID NO: 44273 - DNA, 25 bp, Saccharomyces pastorianus
taaagcagccttacaagttgtcaaa

SEQ ID NO: 44274 - DNA, 25 bp, Saccharomyces pastorianus
gacaaacatgggtggttgttcacta

SEQ ID NO: 44275 - DNA, 25 bp, Saccharomyces pastorianus
aatgtttccatatctcaggacaact

SEQ ID NO: 44276 - DNA, 25 bp, Saccharomyces pastorianus
cgagaaagcttctatccacttgcat

SEQ ID NO: 44277 - DNA, 25 bp, Saccharomyces pastorianus
gaaattaccgacgatgaccgtatat

SEQ ID NO: 44278 - DNA, 25 bp, Saccharomyces pastorianus
ctatcctacaagagtcacccaattt

SEQ ID NO: 44279 - DNA, 25 bp, Saccharomyces pastorianus
gcgcattgaagcgtagttatggcat

SEQ ID NO: 44280 - DNA, 25 bp, Saccharomyces pastorianus
tacatacatatctaccgaagagctt

SEQ ID NO: 44281 - DNA, 25 bp, Saccharomyces pastorianus
gagtcacccaatttggaacggttag

SEQ ID NO: 44282 - DNA, 25 bp, Saccharomyces pastorianus
gatacactcacatcatccattagta

SEQ ID NO: 44283 - DNA, 25 bp, Saccharomyces pastorianus
acctttggcagtgactatcctacaa

SEQ ID NO: 44284 - DNA, 25 bp, Saccharomyces pastorianus
cgaagagcttatcggcgcacctttg

SEQ ID NO: 44285 - DNA, 25 bp, Saccharomyces pastorianus
gcatgttgacaataaggtagcctat

SEQ ID NO: 44286 - DNA, 25 bp, Saccharomyces pastorianus
aaggtgttgaatactcgttcctgca

SEQ ID NO: 44287 - DNA, 25 bp, Saccharomyces pastorianus
aatactcgttcctgcatgttgacaa

SEQ ID NO: 44288 - DNA, 25 bp, Saccharomyces pastorianus
tcgagcacccgtacttgcagacata

SEQ ID NO: 44289 - DNA, 25 bp, Saccharomyces pastorianus
tacagggcccctgaagttatgctga

SEQ ID NO: 44290 - DNA, 25 bp, Saccharomyces pastorianus
acgtatggtcatgcggctgtatttt

SEQ ID NO: 44291 - DNA, 25 bp, Saccharomyces pastorianus
ggagctgttcttgagacgcccgatc

SEQ ID NO: 44292 - DNA, 25 bp, Saccharomyces pastorianus
tactcccgggcaatggacgtatggt

SEQ ID NO: 44293 - DNA, 25 bp, Saccharomyces pastorianus
ggactagccaggatcatcgacgagg

SEQ ID NO: 44294 - DNA, 25 bp, Saccharomyces pastorianus
aattgcgatgcatcgagtcggcgcg

SEQ ID NO: 44295 - DNA, 25 bp, Saccharomyces pastorianus
aggaggcattgaccaccaaggatct

SEQ ID NO: 44296 - DNA, 25 bp, Saccharomyces pastorianus
aagttatgctgacctctgctcgtta

SEQ ID NO: 44297 - DNA, 25 bp, Saccharomyces pastorianus
agggcgttgacctgttgcagcgcat

SEQ ID NO: 44298 - DNA, 25 bp, Saccharomyces pastorianus
cagctgttgctgatcttcggtgtga

SEQ ID NO: 44299 - DNA, 25 bp, Saccharomyces pastorianus
ggcctctcatgttgaccaaaccgaa

SEQ ID NO: 44300 - DNA, 25 bp, Saccharomyces pastorianus
tggtatttccacaatcgtgcccatg

SEQ ID NO: 44301 - DNA, 25 bp, Saccharomyces pastorianus
gaagtcgatatctatgctcatgcca

SEQ ID NO: 44302 - DNA, 25 bp, Saccharomyces pastorianus
gccacctccgtgagactgactgaaa

SEQ ID NO: 44303 - DNA, 25 bp, Saccharomyces pastorianus
aatgccaagctgtcgatcatgcacg

SEQ ID NO: 44304 - DNA, 25 bp, Saccharomyces pastorianus
acgatttggacatcctggtcaccga

SEQ ID NO: 44305 - DNA, 25 bp, Saccharomyces pastorianus
agcacaactgtttgcacgaaccaca

SEQ ID NO: 44306 - DNA, 25 bp, Saccharomyces pastorianus
attgccatgaacaccccagtggaag

SEQ ID NO: 44307 - DNA, 25 bp, Saccharomyces pastorianus
gtgtctgagatctcaagtcgtctcc

SEQ ID NO: 44308 - DNA, 25 bp, Saccharomyces pastorianus
atgccaactccacgaacgttaacgg

SEQ ID NO: 44309 - DNA, 25 bp, Saccharomyces pastorianus
gggtccgctgacttcttgagaaatg

SEQ ID NO: 44310 - DNA, 25 bp, Saccharomyces pastorianus
aactgctacgctttttcttacatga

SEQ ID NO: 44311 - DNA, 25 bp, Saccharomyces pastorianus
ttttgcaatgctgggttctggtatc

SEQ ID NO: 44312 - DNA, 25 bp, Saccharomyces pastorianus
atttgagcattttgccggactccat

SEQ ID NO: 44313 - DNA, 25 bp, Saccharomyces pastorianus
atgagttcgcaatctcagattccaa

SEQ ID NO: 44314 - DNA, 25 bp, Saccharomyces pastorianus
aaccgtcgctgttcgaattgataga

SEQ ID NO: 44315 - DNA, 25 bp, Saccharomyces pastorianus
gtatccccgcaagctgaactctata

SEQ ID NO: 44316 - DNA, 25 bp, Saccharomyces pastorianus
aaagagtactccattgtcacaatca

SEQ ID NO: 44317 - DNA, 25 bp, Saccharomyces pastorianus
gttaggcttgaaaaaccgtcgctgt

SEQ ID NO: 44318 - DNA, 25 bp, Saccharomyces pastorianus
tccatgactcctgcgtttacattaa

SEQ ID NO: 44319 - DNA, 25 bp, Saccharomyces pastorianus
tttacattaatgcaacctccctctt

SEQ ID NO: 44320 - DNA, 25 bp, Saccharomyces pastorianus
agatttcaatcaactgctacgcttt

SEQ ID NO: 44321 - DNA, 25 bp, Saccharomyces pastorianus
agttgtacctgccacagaaccgcgt

SEQ ID NO: 44322 - DNA, 25 bp, Saccharomyces pastorianus
ttcgagtacgaccagcagcaagact

SEQ ID NO: 44323 - DNA, 25 bp, Saccharomyces pastorianus
aaacgagtgttgctacacgcgtgca

SEQ ID NO: 44324 - DNA, 25 bp, Saccharomyces pastorianus
agacgctgtgcgagcagttgtacct

SEQ ID NO: 44325 - DNA, 25 bp, Saccharomyces pastorianus
cagttcgagggattcgccgttgagc

SEQ ID NO: 44326 - DNA, 25 bp, Saccharomyces pastorianus
gagaactgccatcctgctggaacag

SEQ ID NO: 44327 - DNA, 25 bp, Saccharomyces pastorianus
tcgtcgctcgcctgcagaaaagatg

SEQ ID NO: 44328 - DNA, 25 bp, Saccharomyces pastorianus
gcataacgaccgaggacaggcgcat

SEQ ID NO: 44329 - DNA, 25 bp, Saccharomyces pastorianus
atcgtggcacagacgaagccgctgg

SEQ ID NO: 44330 - DNA, 25 bp, Saccharomyces pastorianus
gtggcgaaggactccaagctacaca

SEQ ID NO: 44331 - DNA, 25 bp, Saccharomyces pastorianus
catcccgtcgtgcttaaacgagtgt

SEQ ID NO: 44332 - DNA, 25 bp, Saccharomyces pastorianus
tgcaacagctcacacagcggtccag

SEQ ID NO: 44333 - DNA, 25 bp, Saccharomyces pastorianus
tggaatatgaggtgggccactcgct

SEQ ID NO: 44334 - DNA, 25 bp, Saccharomyces pastorianus
ggcagggctcgcagcactcgaaaag

SEQ ID NO: 44335 - DNA, 25 bp, Saccharomyces pastorianus
gctgacgacgatagcgccaagaaga

SEQ ID NO: 44336 - DNA, 25 bp, Saccharomyces pastorianus
agcactcgaaaagtcgccgcaggtg

SEQ ID NO: 44337 - DNA, 25 bp, Saccharomyces pastorianus
gctacgtgccgaagcagcagctgga

SEQ ID NO: 44338 - DNA, 25 bp, Saccharomyces pastorianus
gttcactgcggctgagctgcaacag

SEQ ID NO: 44339 - DNA, 25 bp, Saccharomyces pastorianus
gcggtccagcgctgacgacgatagc

SEQ ID NO: 44340 - DNA, 25 bp, Saccharomyces pastorianus
ctcgccgatgcagcgcaggtggaat

SEQ ID NO: 44341 - DNA, 25 bp, Saccharomyces pastorianus
aaagtcgccgcaggtggtgttcact

SEQ ID NO: 44342 - DNA, 25 bp, Saccharomyces pastorianus
gtattacgacgtactggcagggctc

SEQ ID NO: 44343 - DNA, 25 bp, Saccharomyces pastorianus
aacattcccagtcagattccaagtc

SEQ ID NO: 44344 - DNA, 25 bp, Saccharomyces pastorianus
tgatgccgcccaagctttaaactgt

SEQ ID NO: 44345 - DNA, 25 bp, Saccharomyces pastorianus
atatcccaacattactgacgctgag

SEQ ID NO: 44346 - DNA, 25 bp, Saccharomyces pastorianus
taatgactaccgcaaagttcgccac

SEQ ID NO: 44347 - DNA, 25 bp, Saccharomyces pastorianus
gagtctcaagcttcctgtgacaaac

SEQ ID NO: 44348 - DNA, 25 bp, Saccharomyces pastorianus
acaacgtctctgcaccatggaatgg

SEQ ID NO: 44349 - DNA, 25 bp, Saccharomyces pastorianus
tcacttggttccaggtgggccaaac

SEQ ID NO: 44350 - DNA, 25 bp, Saccharomyces pastorianus
gaatgttcctgctcagagactgaca

SEQ ID NO: 44351 - DNA, 25 bp, Saccharomyces pastorianus
agcgaatgggtcttacggttctcgt

SEQ ID NO: 44352 - DNA, 25 bp, Saccharomyces pastorianus
ttgaaaccggcatcgaacgtttgac

SEQ ID NO: 44353 - DNA, 25 bp, Saccharomyces pastorianus
gacacaatttgttccatcgctttag

SEQ ID NO: 44354 - DNA, 25 bp, Saccharomyces pastorianus
ggtctacatgttgctcactcatttt

SEQ ID NO: 44355 - DNA, 25 bp, Saccharomyces pastorianus
atatcgactactgtgacttctccgt

SEQ ID NO: 44356 - DNA, 25 bp, Saccharomyces pastorianus
gatttgcctttggacggttcatacg

SEQ ID NO: 44357 - DNA, 25 bp, Saccharomyces pastorianus
gtttctttagccgttgttagagcca

SEQ ID NO: 44358 - DNA, 25 bp, Saccharomyces pastorianus
gaccaatgctgatcccaagtttgct

SEQ ID NO: 44359 - DNA, 25 bp, Saccharomyces pastorianus
gatttcattgccagatctccaggta

SEQ ID NO: 44360 - DNA, 25 bp, Saccharomyces pastorianus
tagtagtgcctacggtgctaaacca

SEQ ID NO: 44361 - DNA, 25 bp, Saccharomyces pastorianus
atgggccctgattatcacatgtcta

SEQ ID NO: 44362 - DNA, 25 bp, Saccharomyces pastorianus
ggttcatacgttacgatcgaccctt

SEQ ID NO: 44363 - DNA, 25 bp, Saccharomyces pastorianus
gaaaatgtgccagtcgccgaattca

SEQ ID NO: 44364 - DNA, 25 bp, Saccharomyces pastorianus
tgaaggcgatgttccaactggcagt

SEQ ID NO: 44365 - DNA, 25 bp, Saccharomyces pastorianus
gctaggttccaagaaggtcgaaaag

SEQ ID NO: 44366 - DNA, 25 bp, Saccharomyces pastorianus
cttacgccaaggtttttgctgctga

SEQ ID NO: 44367 - DNA, 25 bp, Saccharomyces pastorianus
tacgccaaggtttttgctgctgaaa

SEQ ID NO: 44368 - DNA, 25 bp, Saccharomyces pastorianus
tgaaaagctaggttccaagaaggtc

SEQ ID NO: 44369 - DNA, 25 bp, Saccharomyces pastorianus
cgaaaagaccggtaccaagccagct

SEQ ID NO: 44370 - DNA, 25 bp, Saccharomyces pastorianus
caaggtttttgctgctgaaaagcta

SEQ ID NO: 44371 - DNA, 25 bp, Saccharomyces pastorianus
gccaaggtttttgctgctgaaaagc

SEQ ID NO: 44372 - DNA, 25 bp, Saccharomyces pastorianus
ttacgccaaggtttttgctgctgaa

SEQ ID NO: 44373 - DNA, 25 bp, Saccharomyces pastorianus
ttttgctgctgaaaagctaggttcc

SEQ ID NO: 44374 - DNA, 25 bp, Saccharomyces pastorianus
tcgaaaagaccggtaccaagccagc

SEQ ID NO: 44375 - DNA, 25 bp, Saccharomyces pastorianus
acgccaaggtttttgctgctgaaaa

SEQ ID NO: 44376 - DNA, 25 bp, Saccharomyces pastorianus
aaaacgctatacacgttgtgccgcc

SEQ ID NO: 44377 - DNA, 25 bp, Saccharomyces pastorianus
atatcgttcacttagttggatccat

SEQ ID NO: 44378 - DNA, 25 bp, Saccharomyces pastorianus
gtccaatattcattctctttgtaat

SEQ ID NO: 44379 - DNA, 25 bp, Saccharomyces pastorianus
tacaccatccattcatgacgcagag

SEQ ID NO: 44380 - DNA, 25 bp, Saccharomyces pastorianus
ttggatccataccttctacactaat

SEQ ID NO: 44381 - DNA, 25 bp, Saccharomyces pastorianus
ttgtgccgccggaggacgaaagtac

SEQ ID NO: 44382 - DNA, 25 bp, Saccharomyces pastorianus
caaatatacattcggctctgggcaa

SEQ ID NO: 44383 - DNA, 25 bp, Saccharomyces pastorianus
aagcttggaccacctgagcgaaaga

SEQ ID NO: 44384 - DNA, 25 bp, Saccharomyces pastorianus
atcagttttcattttgccaatagtg

SEQ ID NO: 44385 - DNA, 25 bp, Saccharomyces pastorianus
cgggaatatggccactgagacgaat

SEQ ID NO: 44386 - DNA, 25 bp, Saccharomyces pastorianus
gctgtctacagccttgagcgaatta

SEQ ID NO: 44387 - DNA, 25 bp, Saccharomyces pastorianus
aatattttttgacgcttcctgcctt

SEQ ID NO: 44388 - DNA, 25 bp, Saccharomyces pastorianus
ttgccttttgcaatacgcacgatgt

SEQ ID NO: 44389 - DNA, 25 bp, Saccharomyces pastorianus
gatagcggatcttgggaagtttcca

SEQ ID NO: 44390 - DNA, 25 bp, Saccharomyces pastorianus
atccctcatgtacctggatccatgg

SEQ ID NO: 44391 - DNA, 25 bp, Saccharomyces pastorianus
ctaaaggttctacacaggagtctaa

SEQ ID NO: 44392 - DNA, 25 bp, Saccharomyces pastorianus
tatggtctttactttttctcatccc

SEQ ID NO: 44393 - DNA, 25 bp, Saccharomyces pastorianus
ttcacaccacaggatacagacaatg

SEQ ID NO: 44394 - DNA, 25 bp, Saccharomyces pastorianus
agtcggttctatgggcttcttgttc

SEQ ID NO: 44395 - DNA, 25 bp, Saccharomyces pastorianus
ttttcattttatggtcggtcgctgc

SEQ ID NO: 44396 - DNA, 25 bp, Saccharomyces pastorianus
tagctgcctttagagtagtcggttc

SEQ ID NO: 44397 - DNA, 25 bp, Saccharomyces pastorianus
taaggccattgtggtgcaaggtcca

SEQ ID NO: 44398 - DNA, 25 bp, Saccharomyces pastorianus
aaagagaaatacctcacttccacca

SEQ ID NO: 44399 - DNA, 25 bp, Saccharomyces pastorianus
agcaacctttatcctcgcgagaaca

SEQ ID NO: 44400 - DNA, 25 bp, Saccharomyces pastorianus
acagcccagcaacaacctatttggt

SEQ ID NO: 44401 - DNA, 25 bp, Saccharomyces pastorianus
cggcttgtaccgttgaaccagatga

SEQ ID NO: 44402 - DNA, 25 bp, Saccharomyces pastorianus
agaggattgctagacactttgcccc

SEQ ID NO: 44403 - DNA, 25 bp, Saccharomyces pastorianus
tagacaacccaattccaagaggatt

SEQ ID NO: 44404 - DNA, 25 bp, Saccharomyces pastorianus
gccttccctgggagacgacgagaaa

SEQ ID NO: 44405 - DNA, 25 bp, Saccharomyces pastorianus
gaagatcagtactccttggcaagaa

SEQ ID NO: 44406 - DNA, 25 bp, Saccharomyces pastorianus
gggaatgccaaatcgccatctgtat

SEQ ID NO: 44407 - DNA, 25 bp, Saccharomyces pastorianus
gcgagaacacagacttaccggtaga

SEQ ID NO: 44408 - DNA, 25 bp, Saccharomyces pastorianus
aggttacactttgcggtttgcggag

SEQ ID NO: 44409 - DNA, 25 bp, Saccharomyces pastorianus
cgatgcctggtatagatgcggtgat

SEQ ID NO: 44410 - DNA, 25 bp, Saccharomyces pastorianus
gaaacctcattccaagggtatcttg

SEQ ID NO: 44411 - DNA, 25 bp, Saccharomyces pastorianus
gatgcggtgatctgctgaaagctga

SEQ ID NO: 44412 - DNA, 25 bp, Saccharomyces pastorianus
tccctcgaaagccagaaacctcatt

SEQ ID NO: 44413 - DNA, 25 bp, Saccharomyces pastorianus
gcaggttttgccgtgattaagttag

SEQ ID NO: 44414 - DNA, 25 bp, Saccharomyces pastorianus
atgttttcaaacacggcgatgcctg

SEQ ID NO: 44415 - DNA, 25 bp, Saccharomyces pastorianus
agtctaccgtcttatgcaatgccat

SEQ ID NO: 44416 - DNA, 25 bp, Saccharomyces pastorianus
attaagccgattaagtctaccgtct

SEQ ID NO: 44417 - DNA, 25 bp, Saccharomyces pastorianus
gatattgccacaaagattcggcttt

SEQ ID NO: 44418 - DNA, 25 bp, Saccharomyces pastorianus
gcaatacgcgcaagttgttgtggtt

SEQ ID NO: 44419 - DNA, 25 bp, Saccharomyces pastorianus
tccgaaaatgtttctaccaccgagg

SEQ ID NO: 44420 - DNA, 25 bp, Saccharomyces pastorianus
aacgttttattaccgcattctacag

SEQ ID NO: 44421 - DNA, 25 bp, Saccharomyces pastorianus
gccgtataatttagtcctctttcct

SEQ ID NO: 44422 - DNA, 25 bp, Saccharomyces pastorianus
ttagtcctctttcctgaaggtacaa

SEQ ID NO: 44423 - DNA, 25 bp, Saccharomyces pastorianus
ggaagtctcctgaacgtataactga

SEQ ID NO: 44424 - DNA, 25 bp, Saccharomyces pastorianus
gaacagatcctttggccgtataatt

SEQ ID NO: 44425 - DNA, 25 bp, Saccharomyces pastorianus
tctcagtgctgatacccgacaaaag

SEQ ID NO: 44426 - DNA, 25 bp, Saccharomyces pastorianus
gaaaagtactattcgacaggttcgt

SEQ ID NO: 44427 - DNA, 25 bp, Saccharomyces pastorianus
caggttcgtttataactgatgccga

SEQ ID NO: 44428 - DNA, 25 bp, Saccharomyces pastorianus
ttattgacccagaacagatcctttg

SEQ ID NO: 44429 - DNA, 25 bp, Saccharomyces pastorianus
aaccattcggttactgatagcttca

SEQ ID NO: 44430 - DNA, 25 bp, Saccharomyces pastorianus
gatactaccagctttgacgacactt

SEQ ID NO: 44431 - DNA, 25 bp, Saccharomyces pastorianus
gaattctctcccatctaaaaagcaa

SEQ ID NO: 44432 - DNA, 25 bp, Saccharomyces pastorianus
tcttttgttccttcaagtaacttat

SEQ ID NO: 44433 - DNA, 25 bp, Saccharomyces pastorianus
gtttattgtcttattatcatccatt

SEQ ID NO: 44434 - DNA, 25 bp, Saccharomyces pastorianus
ggaaaatagaattctctcccatcta

SEQ ID NO: 44435 - DNA, 25 bp, Saccharomyces pastorianus
gaaggcaaagtggtcttaatgaaac

SEQ ID NO: 44436 - DNA, 25 bp, Saccharomyces pastorianus
aaaaagcaattcagtggccatttgt

SEQ ID NO: 44437 - DNA, 25 bp, Saccharomyces pastorianus
atgttgtcgcgccatctgctgtgaa

SEQ ID NO: 44438 - DNA, 25 bp, Saccharomyces pastorianus
taggaaagttgtcgtcccaggtatt

SEQ ID NO: 44439 - DNA, 25 bp, Saccharomyces pastorianus
aaattactacggagaatgccactat

SEQ ID NO: 44440 - DNA, 25 bp, Saccharomyces pastorianus
gcgccatctgctgtgaaaattacta

SEQ ID NO: 44441 - DNA, 25 bp, Saccharomyces pastorianus
gaatgccactattcccaaagggacg

SEQ ID NO: 44442 - DNA, 25 bp, Saccharomyces pastorianus
gagctactctttcttatctggttga

SEQ ID NO: 44443 - DNA, 25 bp, Saccharomyces pastorianus
ggtctcctgtatattccaaactcaa

SEQ ID NO: 44444 - DNA, 25 bp, Saccharomyces pastorianus
aactgctctttttggatatgccgct

SEQ ID NO: 44445 - DNA, 25 bp, Saccharomyces pastorianus
acttacctttttgcctctatttatg

SEQ ID NO: 44446 - DNA, 25 bp, Saccharomyces pastorianus
tagcctttatcgtcctaggtgcaag

SEQ ID NO: 44447 - DNA, 25 bp, Saccharomyces pastorianus
gtatttgtcaccacgccgatgataa

SEQ ID NO: 44448 - DNA, 25 bp, Saccharomyces pastorianus
taatctttggctggtgcttggacaa

SEQ ID NO: 44449 - DNA, 25 bp, Saccharomyces pastorianus
tgcgatttccttttcaaccgtatac

SEQ ID NO: 44450 - DNA, 25 bp, Saccharomyces pastorianus
gggtaacaccgctcattggaactgc

SEQ ID NO: 44451 - DNA, 25 bp, Saccharomyces pastorianus
attggccgcaacagctgtatttgtc

SEQ ID NO: 44452 - DNA, 25 bp, Saccharomyces pastorianus
gggccttcacgatgttagcctttat

SEQ ID NO: 44453 - DNA, 25 bp, Saccharomyces pastorianus
gactcggacacttcattatctgata

SEQ ID NO: 44454 - DNA, 25 bp, Saccharomyces pastorianus
aacttgccatcatacccgaattcaa

SEQ ID NO: 44455 - DNA, 25 bp, Saccharomyces pastorianus
gatgcaagggactatccgccaatga

SEQ ID NO: 44456 - DNA, 25 bp, Saccharomyces pastorianus
gggccccatgggtacatcgattatt

SEQ ID NO: 44457 - DNA, 25 bp, Saccharomyces pastorianus
attttcttcaatgatgggccccatg

SEQ ID NO: 44458 - DNA, 25 bp, Saccharomyces pastorianus
gggtacatcgattatttttccagcg

SEQ ID NO: 44459 - DNA, 25 bp, Saccharomyces pastorianus
aggccaatttggataccgcgacatc

SEQ ID NO: 44460 - DNA, 25 bp, Saccharomyces pastorianus
attatggtggtcgtccctgtccgag

SEQ ID NO: 44461 - DNA, 25 bp, Saccharomyces pastorianus
gaacgggaaccagctagatagactc

SEQ ID NO: 44462 - DNA, 25 bp, Saccharomyces pastorianus
ccgcgacatcgaacggtcatggtca

SEQ ID NO: 44463 - DNA, 25 bp, Saccharomyces pastorianus
gaacggtcatggtcagaacgggaac

SEQ ID NO: 44464 - DNA, 25 bp, Saccharomyces pastorianus
ggcaaccacaggtgaggcgttttta

SEQ ID NO: 44465 - DNA, 25 bp, Saccharomyces pastorianus
tttcctgcagcagacagttacctta

SEQ ID NO: 44466 - DNA, 25 bp, Saccharomyces pastorianus
ttttcttctacttcaaacctggtgg

SEQ ID NO: 44467 - DNA, 25 bp, Saccharomyces pastorianus
cgaacccgattttatgaccaagctg

SEQ ID NO: 44468 - DNA, 25 bp, Saccharomyces pastorianus
gaataacagcttatgccatgggcta

SEQ ID NO: 44469 - DNA, 25 bp, Saccharomyces pastorianus
ctcccatccgaggttgcgtttaaga

SEQ ID NO: 44470 - DNA, 25 bp, Saccharomyces pastorianus
aaagggttcattcccagccatggta

SEQ ID NO: 44471 - DNA, 25 bp, Saccharomyces pastorianus
aatggactcatgtttggccagcata

SEQ ID NO: 44472 - DNA, 25 bp, Saccharomyces pastorianus
gtagatgctgtattatccgccgttg

SEQ ID NO: 44473 - DNA, 25 bp, Saccharomyces pastorianus
aaacgaagcttcacagtctttcctg

SEQ ID NO: 44474 - DNA, 25 bp, Saccharomyces pastorianus
ggccagcatagcaacgttcatcaaa

SEQ ID NO: 44475 - DNA, 25 bp, Saccharomyces pastorianus
aaaattctacgatgccttcaatccg

SEQ ID NO: 44476 - DNA, 25 bp, Saccharomyces pastorianus
ttcaatccgtatcttgacagccaag

SEQ ID NO: 44477 - DNA, 25 bp, Saccharomyces pastorianus
atcccaacttttcgaggccttagca

SEQ ID NO: 44478 - DNA, 25 bp, Saccharomyces pastorianus
gccaacggaggtaagctcagtctta

SEQ ID NO: 44479 - DNA, 25 bp, Saccharomyces pastorianus
ggtttgatcataactcgtatctgtt

SEQ ID NO: 44480 - DNA, 25 bp, Saccharomyces pastorianus
gggacaacccctgaagtgattgatt

SEQ ID NO: 44481 - DNA, 25 bp, Saccharomyces pastorianus
agacgctgcgagtagtagctattca

SEQ ID NO: 44482 - DNA, 25 bp, Saccharomyces pastorianus
gaaatttctgacttatccggaacga

SEQ ID NO: 44483 - DNA, 25 bp, Saccharomyces pastorianus
gtagcaaagtttacaccatcccaac

SEQ ID NO: 44484 - DNA, 25 bp, Saccharomyces pastorianus
gatagcagtacttccagtgtaaggt

SEQ ID NO: 44485 - DNA, 25 bp, Saccharomyces pastorianus
ggtagttatgtgaccgctggaacaa

SEQ ID NO: 44486 - DNA, 25 bp, Saccharomyces pastorianus
gcaccgtaccatcgtcatcagaaga

SEQ ID NO: 44487 - DNA, 25 bp, Saccharomyces pastorianus
taagactgtcagattcaacgtcgtc

SEQ ID NO: 44488 - DNA, 25 bp, Saccharomyces pastorianus
gacacaagaacgtcccagttcacgt

SEQ ID NO: 44489 - DNA, 25 bp, Saccharomyces pastorianus
tttccgtgttcaagttggtgacatc

SEQ ID NO: 44490 - DNA, 25 bp, Saccharomyces pastorianus
cgttaccgtcggtcaatgtagacca

SEQ ID NO: 44491 - DNA, 25 bp, Saccharomyces pastorianus
aagagcttacttgcattacattcca

SEQ ID NO: 44492 - DNA, 25 bp, Saccharomyces pastorianus
gttcaagttggtgacatcgttaccg

SEQ ID NO: 44493 - DNA, 25 bp, Saccharomyces pastorianus
atgcaccgtaccatcgtcatcagaa

SEQ ID NO: 44494 - DNA, 25 bp, Saccharomyces pastorianus
tccgtgttcaagttggtgacatcgt

SEQ ID NO: 44495 - DNA, 25 bp, Saccharomyces pastorianus
gtgttcaagttggtgacatcgttac

SEQ ID NO: 44496 - DNA, 25 bp, Saccharomyces pastorianus
tcaagttggtgacatcgttaccgtc

SEQ ID NO: 44497 - DNA, 25 bp, Saccharomyces pastorianus
gctcacaattcaggcattacaacat

SEQ ID NO: 44498 - DNA, 25 bp, Saccharomyces pastorianus
gatcaggcagagttgctcacaattc

SEQ ID NO: 44499 - DNA, 25 bp, Saccharomyces pastorianus
ataagggcaaggtccattttagata

SEQ ID NO: 44500 - DNA, 25 bp, Saccharomyces pastorianus
gtcctttgttatgggtatcgttatc

SEQ ID NO: 44501 - DNA, 25 bp, Saccharomyces pastorianus
gaaatccccaactgtcctttgttat

SEQ ID NO: 44502 - DNA, 25 bp, Saccharomyces pastorianus
ggactcatgggtttggttattcaga

SEQ ID NO: 44503 - DNA, 25 bp, Saccharomyces pastorianus
gcattattttacatcgcgaaagttc

SEQ ID NO: 44504 - DNA, 25 bp, Saccharomyces pastorianus
aacgatgcactagtttgggttgaac

SEQ ID NO: 44505 - DNA, 25 bp, Saccharomyces pastorianus
aaagatcccgctgagctttataagt

SEQ ID NO: 44506 - DNA, 25 bp, Saccharomyces pastorianus
gggcccgaatggatagctgttgcta

SEQ ID NO: 44507 - DNA, 25 bp, Saccharomyces pastorianus
aaagaccatttttcaagacgcattg

SEQ ID NO: 44508 - DNA, 25 bp, Saccharomyces pastorianus
ggatctcggatattcgactactagt

SEQ ID NO: 44509 - DNA, 25 bp, Saccharomyces pastorianus
aatggcgatgtcaaccgtagtgtag

SEQ ID NO: 44510 - DNA, 25 bp, Saccharomyces pastorianus
tctagtgcacgtgctctattcaaca

SEQ ID NO: 44511 - DNA, 25 bp, Saccharomyces pastorianus
gcttcaatgctttctatgggactaa

SEQ ID NO: 44512 - DNA, 25 bp, Saccharomyces pastorianus
tccaacatatggacgatcccgactt

SEQ ID NO: 44513 - DNA, 25 bp, Saccharomyces pastorianus
gactactagtccttacgctttaact

SEQ ID NO: 44514 - DNA, 25 bp, Saccharomyces pastorianus
atcaggacgctgagacggctatgaa

SEQ ID NO: 44515 - DNA, 25 bp, Saccharomyces pastorianus
aatgtggcatctctcaattaattga

SEQ ID NO: 44516 - DNA, 25 bp, Saccharomyces pastorianus
aaatgggtcctttacaacgatgaga

SEQ ID NO: 44517 - DNA, 25 bp, Saccharomyces pastorianus
aattctgtacactccggtcattatg

SEQ ID NO: 44518 - DNA, 25 bp, Saccharomyces pastorianus
taatggagagttgcctggttctgaa

SEQ ID NO: 44519 - DNA, 25 bp, Saccharomyces pastorianus
gaaccaattccaagccaagacacga

SEQ ID NO: 44520 - DNA, 25 bp, Saccharomyces pastorianus
ggtcatgaatcaacccgatcaagcg

SEQ ID NO: 44521 - DNA, 25 bp, Saccharomyces pastorianus
aagcgccacagcacaggtcatgaat

SEQ ID NO: 44522 - DNA, 25 bp, Saccharomyces pastorianus
gcaatcacatcactcgcacagagtt

SEQ ID NO: 44523 - DNA, 25 bp, Saccharomyces pastorianus
cgtctgaaagaaggccgctgcataa

SEQ ID NO: 44524 - DNA, 25 bp, Saccharomyces pastorianus
gatcagtacatcgactccatcggaa

SEQ ID NO: 44525 - DNA, 25 bp, Saccharomyces pastorianus
gggacagcaatagcagcatcacgat

SEQ ID NO: 44526 - DNA, 25 bp, Saccharomyces pastorianus
ggatcacagtgcatctacgaggcag

SEQ ID NO: 44527 - DNA, 25 bp, Saccharomyces pastorianus
aaataaatctgactcaccagctccg

SEQ ID NO: 44528 - DNA, 25 bp, Saccharomyces pastorianus
gccaatcactggacctcgagagaat

SEQ ID NO: 44529 - DNA, 25 bp, Saccharomyces pastorianus
tgaggaagtcctttgctagagcccg

SEQ ID NO: 44530 - DNA, 25 bp, Saccharomyces pastorianus
gataatacagcgagtctgcccttaa

SEQ ID NO: 44531 - DNA, 25 bp, Saccharomyces pastorianus
ggcacttctaggagcgtttcagcaa

SEQ ID NO: 44532 - DNA, 25 bp, Saccharomyces pastorianus
gcgagtctgcccttaaagattggag

SEQ ID NO: 44533 - DNA, 25 bp, Saccharomyces pastorianus
atccggcagttgagaggtatactcc

SEQ ID NO: 44534 - DNA, 25 bp, Saccharomyces pastorianus
agattggagatgtcgcatgcctaaa

SEQ ID NO: 44535 - DNA, 25 bp, Saccharomyces pastorianus
tttcagcaatgggaaatccggcagt

SEQ ID NO: 44536 - DNA, 25 bp, Saccharomyces pastorianus
actacgaatggcacttctaggagcg

SEQ ID NO: 44537 - DNA, 25 bp, Saccharomyces pastorianus
gatgtcgcatgcctaaaaagagtgt

SEQ ID NO: 44538 - DNA, 25 bp, Saccharomyces pastorianus
actccgggaaaaattgtctgcgtgg

SEQ ID NO: 44539 - DNA, 25 bp, Saccharomyces pastorianus
aaaagagtgttggttcatgatgaga

SEQ ID NO: 44540 - DNA, 25 bp, Saccharomyces pastorianus
gggacgcataaagtcgagattgtaa

SEQ ID NO: 44541 - DNA, 25 bp, Saccharomyces pastorianus
tagaatcaggctttccatgtgcggc

SEQ ID NO: 44542 - DNA, 25 bp, Saccharomyces pastorianus
agactagtgacgatcctgccttttt

SEQ ID NO: 44543 - DNA, 25 bp, Saccharomyces pastorianus
aagaccttttgctagaccaatcgat

SEQ ID NO: 44544 - DNA, 25 bp, Saccharomyces pastorianus
atcataggcacgttggttcagtctc

SEQ ID NO: 44545 - DNA, 25 bp, Saccharomyces pastorianus
tgctgcatcatcaccttttggttga

SEQ ID NO: 44546 - DNA, 25 bp, Saccharomyces pastorianus
tacttttcttggattcttcccacat

SEQ ID NO: 44547 - DNA, 25 bp, Saccharomyces pastorianus
ggttcagtctcttgtgcatgtgatt

SEQ ID NO: 44548 - DNA, 25 bp, Saccharomyces pastorianus
tatacgtaggctactctgaccaggc

SEQ ID NO: 44549 - DNA, 25 bp, Saccharomyces pastorianus
gcgaaatgcttcgtcttttacagaa

SEQ ID NO: 44550 - DNA, 25 bp, Saccharomyces pastorianus
aattttgcagccttgcgcagaattt

SEQ ID NO: 44551 - DNA, 25 bp, Saccharomyces pastorianus
gaattttccccgctgtcaagtgaaa

SEQ ID NO: 44552 - DNA, 25 bp, Saccharomyces pastorianus
attacagaatcttttgcagcattga

SEQ ID NO: 44553 - DNA, 25 bp, Saccharomyces pastorianus
gggtcctctaatgacgatcttttca

SEQ ID NO: 44554 - DNA, 25 bp, Saccharomyces pastorianus
tggaacccctcggtagatctacaag

SEQ ID NO: 44555 - DNA, 25 bp, Saccharomyces pastorianus
caacatggactagcgccttggagtt

SEQ ID NO: 44556 - DNA, 25 bp, Saccharomyces pastorianus
gtgcttcccggcttatattatttga

SEQ ID NO: 44557 - DNA, 25 bp, Saccharomyces pastorianus
aagtcacagtccatacggcagtgtc

SEQ ID NO: 44558 - DNA, 25 bp, Saccharomyces pastorianus
aaatccatgcttcatataccggttg

SEQ ID NO: 44559 - DNA, 25 bp, Saccharomyces pastorianus
gaaagacgatatcacatttgcattc

SEQ ID NO: 44560 - DNA, 25 bp, Saccharomyces pastorianus
gaaaagcgtagtcccacaacatgga

SEQ ID NO: 44561 - DNA, 25 bp, Saccharomyces pastorianus
gttggtcacaactggatgcatcgat

SEQ ID NO: 44562 - DNA, 25 bp, Saccharomyces pastorianus
gataatgattggaacccctcggtag

SEQ ID NO: 44563 - DNA, 25 bp, Saccharomyces pastorianus
gctgaagatccatattctacacgat

SEQ ID NO: 44564 - DNA, 25 bp, Saccharomyces pastorianus
atggagctttgcacgtatgacggaa

SEQ ID NO: 44565 - DNA, 25 bp, Saccharomyces pastorianus
gacgagctatccgtatcgattagtt

SEQ ID NO: 44566 - DNA, 25 bp, Saccharomyces pastorianus
agaagttctactttgcagggctcaa

SEQ ID NO: 44567 - DNA, 25 bp, Saccharomyces pastorianus
ggtaagtcccatgaaaaatcgcctg

SEQ ID NO: 44568 - DNA, 25 bp, Saccharomyces pastorianus
aattcaactaacagatccccttacg

SEQ ID NO: 44569 - DNA, 25 bp, Saccharomyces pastorianus
gaaccaatagttgcggagctgcttc

SEQ ID NO: 44570 - DNA, 25 bp, Saccharomyces pastorianus
gaatagagcatgcacgttatcgttt

SEQ ID NO: 44571 - DNA, 25 bp, Saccharomyces pastorianus
attatgcaccaccagctttttcatt

SEQ ID NO: 44572 - DNA, 25 bp, Saccharomyces pastorianus
ggaaagtcccagcatttgacgaatt

SEQ ID NO: 44573 - DNA, 25 bp, Saccharomyces pastorianus
gaagttacagtttaccaaggcagaa

SEQ ID NO: 44574 - DNA, 25 bp, Saccharomyces pastorianus
ataacgggctgtttactcccagtga

SEQ ID NO: 44575 - DNA, 25 bp, Saccharomyces pastorianus
gaaaactatttcacccactatatcc

SEQ ID NO: 44576 - DNA, 25 bp, Saccharomyces pastorianus
ggatttcgtctgaattcaagccaca

SEQ ID NO: 44577 - DNA, 25 bp, Saccharomyces pastorianus
ctctcccttggcatattatacacag

SEQ ID NO: 44578 - DNA, 25 bp, Saccharomyces pastorianus
gaatacacgtgaaatgcccctgctg

SEQ ID NO: 44579 - DNA, 25 bp, Saccharomyces pastorianus
atgcccctgctgtgaaagttggatt

SEQ ID NO: 44580 - DNA, 25 bp, Saccharomyces pastorianus
gatgtcgtatatccaaacccgcaat

SEQ ID NO: 44581 - DNA, 25 bp, Saccharomyces pastorianus
agcatctattttttgcgcacgggat

SEQ ID NO: 44582 - DNA, 25 bp, Saccharomyces pastorianus
ttcctaccaggatttcgagtcgctt

SEQ ID NO: 44583 - DNA, 25 bp, Saccharomyces pastorianus
gccacacacactgtaccaatttgag

SEQ ID NO: 44584 - DNA, 25 bp, Saccharomyces pastorianus
aaaaatcctgagctcactcgtcgta

SEQ ID NO: 44585 - DNA, 25 bp, Saccharomyces pastorianus
gatctgcacgcgtgtgttggccaga

SEQ ID NO: 44586 - DNA, 25 bp, Saccharomyces pastorianus
gtgtgttggccagatacccaatagc

SEQ ID NO: 44587 - DNA, 25 bp, Saccharomyces pastorianus
ctacgggttgttggtggtcaagata

SEQ ID NO: 44588 - DNA, 25 bp, Saccharomyces pastorianus
ccaatagcgacctcctgctgctgtt

SEQ ID NO: 44589 - DNA, 25 bp, Saccharomyces pastorianus
ttggtggtcaagatagaaaaggcct

SEQ ID NO: 44590 - DNA, 25 bp, Saccharomyces pastorianus
gcgtgtgttggccagatacccaata

SEQ ID NO: 44591 - DNA, 25 bp, Saccharomyces pastorianus
tgcacgcgtgtgttggccagatacc

SEQ ID NO: 44592 - DNA, 25 bp, Saccharomyces pastorianus
ctgctgctgttccttgcggatagta

SEQ ID NO: 44593 - DNA, 25 bp, Saccharomyces pastorianus
tgcggatagtacgtttccctacggg

SEQ ID NO: 44594 - DNA, 25 bp, Saccharomyces pastorianus
tccctacgggttgttggtggtcaag

SEQ ID NO: 44595 - DNA, 25 bp, Saccharomyces pastorianus
tgttccttgcggatagtacgtttcc

SEQ ID NO: 44596 - DNA, 25 bp, Saccharomyces pastorianus
tatgcgacctcggacagtagcgtgc

SEQ ID NO: 44597 - DNA, 25 bp, Saccharomyces pastorianus
ccacaaatggtggtatactttccta

SEQ ID NO: 44598 - DNA, 25 bp, Saccharomyces pastorianus
ttgaagccatacgatctcagctcgg

SEQ ID NO: 44599 - DNA, 25 bp, Saccharomyces pastorianus
gatctcagctcggtggatttcaaga

SEQ ID NO: 44600 - DNA, 25 bp, Saccharomyces pastorianus
aacgtcaaagtgttcctggagaaca

SEQ ID NO: 44601 - DNA, 25 bp, Saccharomyces pastorianus
cacttacagtcctcgatactgctaa

SEQ ID NO: 44602 - DNA, 25 bp, Saccharomyces pastorianus
gatttcaagacttcccacttacagt

SEQ ID NO: 44603 - DNA, 25 bp, Saccharomyces pastorianus
ttcctggagaacactttgaagccat

SEQ ID NO: 44604 - DNA, 25 bp, Saccharomyces pastorianus
cgatactgctaaccgccacaaatgg

SEQ ID NO: 44605 - DNA, 25 bp, Saccharomyces pastorianus
gtggtatactttcctatgcgacctc

SEQ ID NO: 44606 - DNA, 25 bp, Saccharomyces pastorianus
agtagcgtgccgaaaaactcgataa

SEQ ID NO: 44607 - DNA, 25 bp, Saccharomyces pastorianus
gtttgtctattgtttccaacgacga

SEQ ID NO: 44608 - DNA, 25 bp, Saccharomyces pastorianus
actcaattggccaaggtcggtcaaa

SEQ ID NO: 44609 - DNA, 25 bp, Saccharomyces pastorianus
gacgaattatccaaggttgccttca

SEQ ID NO: 44610 - DNA, 25 bp, Saccharomyces pastorianus
gtcaccggtaacttcaccagtttga

SEQ ID NO: 44611 - DNA, 25 bp, Saccharomyces pastorianus
accagtttgaacttgtcttctttga

SEQ ID NO: 44612 - DNA, 25 bp, Saccharomyces pastorianus
agcaacttctcttgtgacgcattga

SEQ ID NO: 44613 - DNA, 25 bp, Saccharomyces pastorianus
tacttcttccggatcttccaagagc

SEQ ID NO: 44614 - DNA, 25 bp, Saccharomyces pastorianus
caaggtgactccttcgtttgtaaga

SEQ ID NO: 44615 - DNA, 25 bp, Saccharomyces pastorianus
tctgatgattcctctaacgctcaag

SEQ ID NO: 44616 - DNA, 25 bp, Saccharomyces pastorianus
aaaccgtcggcggtgccattgaagt

SEQ ID NO: 44617 - DNA, 25 bp, Saccharomyces pastorianus
gtggtgctaatttcgattcttccgc

SEQ ID NO: 44618 - DNA, 25 bp, Saccharomyces pastorianus
cgccgattctccatatgccggtggt

SEQ ID NO: 44619 - DNA, 25 bp, Saccharomyces pastorianus
atatcacccaaatatcaacgccaac

SEQ ID NO: 44620 - DNA, 25 bp, Saccharomyces pastorianus
gacatcctaaaagaccaatggtccc

SEQ ID NO: 44621 - DNA, 25 bp, Saccharomyces pastorianus
aatcgctcacatttacaagactgat

SEQ ID NO: 44622 - DNA, 25 bp, Saccharomyces pastorianus
ttgacggatgccaacccagacgatc

SEQ ID NO: 44623 - DNA, 25 bp, Saccharomyces pastorianus
ccagacgatcctttggtgccagaaa

SEQ ID NO: 44624 - DNA, 25 bp, Saccharomyces pastorianus
ttacaagactgatagatccaagtac

SEQ ID NO: 44625 - DNA, 25 bp, Saccharomyces pastorianus
agttctattatccatctgctctttg

SEQ ID NO: 44626 - DNA, 25 bp, Saccharomyces pastorianus
caacgccaacggtaacatttgtctg

SEQ ID NO: 44627 - DNA, 25 bp, Saccharomyces pastorianus
ggtgccagaaatcgctcacatttac

SEQ ID NO: 44628 - DNA, 25 bp, Saccharomyces pastorianus
atctgctctttgttgacggatgcca

SEQ ID NO: 44629 - DNA, 25 bp, Saccharomyces pastorianus
gcaccgaatgtcaaatctacgggtt

SEQ ID NO: 44630 - DNA, 25 bp, Saccharomyces pastorianus
gtccatttccaatttgatgcttgtt

SEQ ID NO: 44631 - DNA, 25 bp, Saccharomyces pastorianus
taagtacttagcaccgaatgtcaaa

SEQ ID NO: 44632 - DNA, 25 bp, Saccharomyces pastorianus
caatttgatgcttgtttcaggatgt

SEQ ID NO: 44633 - DNA, 25 bp, Saccharomyces pastorianus
tggtccatttccaatttgatgcttg

SEQ ID NO: 44634 - DNA, 25 bp, Saccharomyces pastorianus
tttccaatttgatgcttgtttcagg

SEQ ID NO: 44635 - DNA, 25 bp, Saccharomyces pastorianus
gtacttagcaccgaatgtcaaatct

SEQ ID NO: 44636 - DNA, 25 bp, Saccharomyces pastorianus
aggatgttccatgtcaacaaatggt

SEQ ID NO: 44637 - DNA, 25 bp, Saccharomyces pastorianus
taataagtacttagcaccgaatgtc

SEQ ID NO: 44638 - DNA, 25 bp, Saccharomyces pastorianus
cttagcaccgaatgtcaaatctacg

SEQ ID NO: 44639 - DNA, 25 bp, Saccharomyces pastorianus
ttcaggatgttccatgtcaacaaat

SEQ ID NO: 44640 - DNA, 25 bp, Saccharomyces pastorianus
tcaactgtactttatttgtttgctg

SEQ ID NO: 44641 - DNA, 25 bp, Saccharomyces pastorianus
aactgtactttatttgtttgctggt

SEQ ID NO: 44642 - DNA, 25 bp, Saccharomyces pastorianus
tactgacgttgacaaaaagaaggat

SEQ ID NO: 44643 - DNA, 25 bp, Saccharomyces pastorianus
tgtttgctggttactgacgttgaca

SEQ ID NO: 44644 - DNA, 25 bp, Saccharomyces pastorianus
gtttgctggttactgacgttgacaa

SEQ ID NO: 44645 - DNA, 25 bp, Saccharomyces pastorianus
tgctggttactgacgttgacaaaaa

SEQ ID NO: 44646 - DNA, 25 bp, Saccharomyces pastorianus
ttgtttgctggttactgacgttgac

SEQ ID NO: 44647 - DNA, 25 bp, Saccharomyces pastorianus
ctgtactttatttgtttgctggtta

SEQ ID NO: 44648 - DNA, 25 bp, Saccharomyces pastorianus
aacgagaatggcgagaagaggaatg

SEQ ID NO: 44649 - DNA, 25 bp, Saccharomyces pastorianus
ctggttactgacgttgacaaaaaga

SEQ ID NO: 44650 - DNA, 25 bp, Saccharomyces pastorianus
ttgctggttactgacgttgacaaaa

SEQ ID NO: 44651 - DNA, 25 bp, Saccharomyces pastorianus
taccgcaacgtagaatcttacttag

SEQ ID NO: 44652 - DNA, 25 bp, Saccharomyces pastorianus
accgcaacgtagaatcttacttagc

SEQ ID NO: 44653 - DNA, 25 bp, Saccharomyces pastorianus
gcaattaacgttaaagtgtcggtgt

SEQ ID NO: 44654 - DNA, 25 bp, Saccharomyces pastorianus
ttgttaccgcaacgtagaatcttac

SEQ ID NO: 44655 - DNA, 25 bp, Saccharomyces pastorianus
gttaccgcaacgtagaatcttactt

SEQ ID NO: 44656 - DNA, 25 bp, Saccharomyces pastorianus
aagtgtcggtgttgttaccgcaacg

SEQ ID NO: 44657 - DNA, 25 bp, Saccharomyces pastorianus
gtgttgttaccgcaacgtagaatct

SEQ ID NO: 44658 - DNA, 25 bp, Saccharomyces pastorianus
gcaacgtagaatcttacttagcgag

SEQ ID NO: 44659 - DNA, 25 bp, Saccharomyces pastorianus
tgttgtcagcaattaacgttaaagt

SEQ ID NO: 44660 - DNA, 25 bp, Saccharomyces pastorianus
agtgtcggtgttgttaccgcaacgt

SEQ ID NO: 44661 - DNA, 25 bp, Saccharomyces pastorianus
taaagtgtcggtgttgttaccgcaa

SEQ ID NO: 44662 - DNA, 25 bp, Saccharomyces pastorianus
taccgcaacgtagaatcttacttag

SEQ ID NO: 44663 - DNA, 25 bp, Saccharomyces pastorianus
gcaattaacgttaaagtgtcggtgt

SEQ ID NO: 44664 - DNA, 25 bp, Saccharomyces pastorianus
ttgttaccgcaacgtagaatcttac

SEQ ID NO: 44665 - DNA, 25 bp, Saccharomyces pastorianus
tgttgtcagcaattaacgttaaagt

SEQ ID NO: 44666 - DNA, 25 bp, Saccharomyces pastorianus
gttaccgcaacgtagaatcttactt

SEQ ID NO: 44667 - DNA, 25 bp, Saccharomyces pastorianus
atggagtccggtgtgttgtcagcaa

SEQ ID NO: 44668 - DNA, 25 bp, Saccharomyces pastorianus
aagtgtcggtgttgttaccgcaacg

SEQ ID NO: 44669 - DNA, 25 bp, Saccharomyces pastorianus
gtgttgttaccgcaacgtagaatct

SEQ ID NO: 44670 - DNA, 25 bp, Saccharomyces pastorianus
gcaacgtagaatcttacttagcgag

SEQ ID NO: 44671 - DNA, 25 bp, Saccharomyces pastorianus
agtgtcggtgttgttaccgcaacgt

SEQ ID NO: 44672 - DNA, 25 bp, Saccharomyces pastorianus
taaagtgtcggtgttgttaccgcaa

SEQ ID NO: 44673 - DNA, 25 bp, Saccharomyces pastorianus
gctagacagctatcacagatcgcat

SEQ ID NO: 44674 - DNA, 25 bp, Saccharomyces pastorianus
attactattccagtagcgctgcgtg

SEQ ID NO: 44675 - DNA, 25 bp, Saccharomyces pastorianus
gaaactaatgtcaacaccaccatga

SEQ ID NO: 44676 - DNA, 25 bp, Saccharomyces pastorianus
gaggactgtaaagcaaccggattaa

SEQ ID NO: 44677 - DNA, 25 bp, Saccharomyces pastorianus
agtagcgctgcgtgttgtcaagaga

SEQ ID NO: 44678 - DNA, 25 bp, Saccharomyces pastorianus
gaaccgatctatgaatccaacttat

SEQ ID NO: 44679 - DNA, 25 bp, Saccharomyces pastorianus
tatacctaccgccttacaatcataa

SEQ ID NO: 44680 - DNA, 25 bp, Saccharomyces pastorianus
ccgagagttcttgggcatttcagac

SEQ ID NO: 44681 - DNA, 25 bp, Saccharomyces pastorianus
taacttaactttacctgaggactgt

SEQ ID NO: 44682 - DNA, 25 bp, Saccharomyces pastorianus
ggatccgtctctatttcgacgttaa

SEQ ID NO: 44683 - DNA, 25 bp, Saccharomyces pastorianus
acttctatcattgctaccatcatca

SEQ ID NO: 44684 - DNA, 25 bp, Saccharomyces pastorianus
cccacccaggtgacgattcattata

SEQ ID NO: 44685 - DNA, 25 bp, Saccharomyces pastorianus
ggaacacttcttgccgcttgaaaaa

SEQ ID NO: 44686 - DNA, 25 bp, Saccharomyces pastorianus
tcacacgcccattactcatatagag

SEQ ID NO: 44687 - DNA, 25 bp, Saccharomyces pastorianus
tgacgatgtctttattccaacacaa

SEQ ID NO: 44688 - DNA, 25 bp, Saccharomyces pastorianus
gacatatgggacatccgcttcaatg

SEQ ID NO: 44689 - DNA, 25 bp, Saccharomyces pastorianus
ggcagtggtcagtccatcaagattt

SEQ ID NO: 44690 - DNA, 25 bp, Saccharomyces pastorianus
cgttggctacaattcaggtcgatca

SEQ ID NO: 44691 - DNA, 25 bp, Saccharomyces pastorianus
gggacattgtcaaaccgcgttcata

SEQ ID NO: 44692 - DNA, 25 bp, Saccharomyces pastorianus
attatcgctctctaaggcagtggtc

SEQ ID NO: 44693 - DNA, 25 bp, Saccharomyces pastorianus
gatccattatcatgtttgacctgaa

SEQ ID NO: 44694 - DNA, 25 bp, Saccharomyces pastorianus
aaaattccataatcgtcgtaggcgg

SEQ ID NO: 44695 - DNA, 25 bp, Saccharomyces pastorianus
gatcaggatgtgcaagccctatctt

SEQ ID NO: 44696 - DNA, 25 bp, Saccharomyces pastorianus
gccttatctcgtgtgctgttttgaa

SEQ ID NO: 44697 - DNA, 25 bp, Saccharomyces pastorianus
gagcgacttagctgttatcatcaac

SEQ ID NO: 44698 - DNA, 25 bp, Saccharomyces pastorianus
aaatcgatcgggttgtgccttatct

SEQ ID NO: 44699 - DNA, 25 bp, Saccharomyces pastorianus
gaatcgtattcgctaattgtttgag

SEQ ID NO: 44700 - DNA, 25 bp, Saccharomyces pastorianus
atctgtgcgaacactggaccagttg

SEQ ID NO: 44701 - DNA, 25 bp, Saccharomyces pastorianus
aatgacaaagatcgcgcgttacggg

SEQ ID NO: 44702 - DNA, 25 bp, Saccharomyces pastorianus
gcagtatttgcgcagtttgtttcag

SEQ ID NO: 44703 - DNA, 25 bp, Saccharomyces pastorianus
ggaaagcgccactaaatattcagca

SEQ ID NO: 44704 - DNA, 25 bp, Saccharomyces pastorianus
tacccaagtactatcatctgtgcga

SEQ ID NO: 44705 - DNA, 25 bp, Saccharomyces pastorianus
ggcacttttgcataacatcttacca

SEQ ID NO: 44706 - DNA, 25 bp, Saccharomyces pastorianus
taatacaagtatcacatgttttcca

SEQ ID NO: 44707 - DNA, 25 bp, Saccharomyces pastorianus
cctatacaattccttcttctgtgat

SEQ ID NO: 44708 - DNA, 25 bp, Saccharomyces pastorianus
aaacgtatcttcctatacaattcct

SEQ ID NO: 44709 - DNA, 25 bp, Saccharomyces pastorianus
ggccctcttgagtttattcaaatca

SEQ ID NO: 44710 - DNA, 25 bp, Saccharomyces pastorianus
tatcttcctatacaattccttcttc

SEQ ID NO: 44711 - DNA, 25 bp, Saccharomyces pastorianus
atggccctcttgagtttattcaaat

SEQ ID NO: 44712 - DNA, 25 bp, Saccharomyces pastorianus
ttcctatacaattccttcttctgtg

SEQ ID NO: 44713 - DNA, 25 bp, Saccharomyces pastorianus
gccctcttgagtttattcaaatcac

SEQ ID NO: 44714 - DNA, 25 bp, Saccharomyces pastorianus
atcttcctatacaattccttcttct

SEQ ID NO: 44715 - DNA, 25 bp, Saccharomyces pastorianus
tcttcctatacaattccttcttctg

SEQ ID NO: 44716 - DNA, 25 bp, Saccharomyces pastorianus
gagtttattcaaatcacttaataca

SEQ ID NO: 44717 - DNA, 25 bp, Saccharomyces pastorianus
gatgggcaagtgaacgtctacgacc

SEQ ID NO: 44718 - DNA, 25 bp, Saccharomyces pastorianus
ggatggtatccccatttttgttgga

SEQ ID NO: 44719 - DNA, 25 bp, Saccharomyces pastorianus
gtctttgacctgtcgtggaaccata

SEQ ID NO: 44720 - DNA, 25 bp, Saccharomyces pastorianus
actggcgctttcaatcatggatggt

SEQ ID NO: 44721 - DNA, 25 bp, Saccharomyces pastorianus
ggcatcatggttccatcagtgtctt

SEQ ID NO: 44722 - DNA, 25 bp, Saccharomyces pastorianus
aacaaacttctgctaagtgcgtcag

SEQ ID NO: 44723 - DNA, 25 bp, Saccharomyces pastorianus
ggcagcagcattacaattccacaac

SEQ ID NO: 44724 - DNA, 25 bp, Saccharomyces pastorianus
gaggagaatacactactggcgcttt

SEQ ID NO: 44725 - DNA, 25 bp, Saccharomyces pastorianus
gcaatagttgcactaccacgggcag

SEQ ID NO: 44726 - DNA, 25 bp, Saccharomyces pastorianus
aaagcatcgtatctgcgtcatgggt

SEQ ID NO: 44727 - DNA, 25 bp, Saccharomyces pastorianus
aaaggtgccattttcgtatatcaaa

SEQ ID NO: 44728 - DNA, 25 bp, Saccharomyces pastorianus
aaggcgatatcagctctttagatga

SEQ ID NO: 44729 - DNA, 25 bp, Saccharomyces pastorianus
tggcaagaatgactcaggcacgact

SEQ ID NO: 44730 - DNA, 25 bp, Saccharomyces pastorianus
gagcatattcccataggtacactag

SEQ ID NO: 44731 - DNA, 25 bp, Saccharomyces pastorianus
gcgcattggcgctacaagatgaaac

SEQ ID NO: 44732 - DNA, 25 bp, Saccharomyces pastorianus
gaacagcatctttctgaggacttta

SEQ ID NO: 44733 - DNA, 25 bp, Saccharomyces pastorianus
agcctaggctctgatgtggcatcta

SEQ ID NO: 44734 - DNA, 25 bp, Saccharomyces pastorianus
aaatttccagaaatctctactgagg

SEQ ID NO: 44735 - DNA, 25 bp, Saccharomyces pastorianus
atgtggcatctagcggtactggtga

SEQ ID NO: 44736 - DNA, 25 bp, Saccharomyces pastorianus
gcatccattcttgcatacggtgaaa

SEQ ID NO: 44737 - DNA, 25 bp, Saccharomyces pastorianus
aggattcagttgcaagattgaccca

SEQ ID NO: 44738 - DNA, 25 bp, Saccharomyces pastorianus
gactgatggactaagcctaggctct

SEQ ID NO: 44739 - DNA, 25 bp, Saccharomyces pastorianus
ccccgtatggttccacgacaggtca

SEQ ID NO: 44740 - DNA, 25 bp, Saccharomyces pastorianus
cttccccaagcgaatatgctacaga

SEQ ID NO: 44741 - DNA, 25 bp, Saccharomyces pastorianus
aatatgctacagaaattttgtcccc

SEQ ID NO: 44742 - DNA, 25 bp, Saccharomyces pastorianus
gaaccttccccaagcgaatatgcta

SEQ ID NO: 44743 - DNA, 25 bp, Saccharomyces pastorianus
tccccaagcgaatatgctacagaaa

SEQ ID NO: 44744 - DNA, 25 bp, Saccharomyces pastorianus
ggcttatatggctacaactgaacct

SEQ ID NO: 44745 - DNA, 25 bp, Saccharomyces pastorianus
atatggctacaactgaaccttcccc

SEQ ID NO: 44746 - DNA, 25 bp, Saccharomyces pastorianus
ttccccaagcgaatatgctacagaa

SEQ ID NO: 44747 - DNA, 25 bp, Saccharomyces pastorianus
tgaaccttccccaagcgaatatgct

SEQ ID NO: 44748 - DNA, 25 bp, Saccharomyces pastorianus
tacagaaattttgtcccccgtatgg

SEQ ID NO: 44749 - DNA, 25 bp, Saccharomyces pastorianus
cccaagcgaatatgctacagaaatt

SEQ ID NO: 44750 - DNA, 25 bp, Saccharomyces pastorianus
aagacctcctatgcaagcgtcagaa

SEQ ID NO: 44751 - DNA, 25 bp, Saccharomyces pastorianus
gtattctcagaatacgtccgctgga

SEQ ID NO: 44752 - DNA, 25 bp, Saccharomyces pastorianus
gatgcacatgatgctcatgctagat

SEQ ID NO: 44753 - DNA, 25 bp, Saccharomyces pastorianus
gaaaaaaggtctcagcacctccacc

SEQ ID NO: 44754 - DNA, 25 bp, Saccharomyces pastorianus
gtgaggcagctgtagcaacggaaat

SEQ ID NO: 44755 - DNA, 25 bp, Saccharomyces pastorianus
atgacagcgccaatagagttgacga

SEQ ID NO: 44756 - DNA, 25 bp, Saccharomyces pastorianus
gcatgatggcgctcatgatgcacat

SEQ ID NO: 44757 - DNA, 25 bp, Saccharomyces pastorianus
tgcggtcagcttgccttcaagacct

SEQ ID NO: 44758 - DNA, 25 bp, Saccharomyces pastorianus
gaaacccaaacctaagactctctct

SEQ ID NO: 44759 - DNA, 25 bp, Saccharomyces pastorianus
gtggtcgtggtcgtatagtaaagca

SEQ ID NO: 44760 - DNA, 25 bp, Saccharomyces pastorianus
tattaagaaagcacctccacctgtt

SEQ ID NO: 44761 - DNA, 25 bp, Saccharomyces pastorianus
caatgactccgaacaagaactctta

SEQ ID NO: 44762 - DNA, 25 bp, Saccharomyces pastorianus
gttgaagcacgttttgacatccatt

SEQ ID NO: 44763 - DNA, 25 bp, Saccharomyces pastorianus
taatgtctcgtcagctcaaatccaa

SEQ ID NO: 44764 - DNA, 25 bp, Saccharomyces pastorianus
aatctctgctgctgagttgaagcac

SEQ ID NO: 44765 - DNA, 25 bp, Saccharomyces pastorianus
cagctcaaatccaatgactccgaac

SEQ ID NO: 44766 - DNA, 25 bp, Saccharomyces pastorianus
gaacggtgacggcttaatctctgct

SEQ ID NO: 44767 - DNA, 25 bp, Saccharomyces pastorianus
gcacgttttgacatccattggtgaa

SEQ ID NO: 44768 - DNA, 25 bp, Saccharomyces pastorianus
tcgcccagtgaagccgaagtcaacg

SEQ ID NO: 44769 - DNA, 25 bp, Saccharomyces pastorianus
atttttggccctaatgtctcgtcag

SEQ ID NO: 44770 - DNA, 25 bp, Saccharomyces pastorianus
aaattgacgttgatggtaaccacca

SEQ ID NO: 44771 - DNA, 25 bp, Saccharomyces pastorianus
aactgactgatgcagaagtagacga

SEQ ID NO: 44772 - DNA, 25 bp, Saccharomyces pastorianus
aaaatagttgaagcccgtcacgtca

SEQ ID NO: 44773 - DNA, 25 bp, Saccharomyces pastorianus
attggatgcgcgtgttcagaatgta

SEQ ID NO: 44774 - DNA, 25 bp, Saccharomyces pastorianus
gtcgacaccgctgcactaagagagt

SEQ ID NO: 44775 - DNA, 25 bp, Saccharomyces pastorianus
gaatgcttcactgtcgaattgcaca

SEQ ID NO: 44776 - DNA, 25 bp, Saccharomyces pastorianus
agagtgggatagtgctgttcgtacc

SEQ ID NO: 44777 - DNA, 25 bp, Saccharomyces pastorianus
gttcgtaccactagaaactccggtg

SEQ ID NO: 44778 - DNA, 25 bp, Saccharomyces pastorianus
gatggcaaacccgacgaaattttat

SEQ ID NO: 44779 - DNA, 25 bp, Saccharomyces pastorianus
gtattcaatgatcctggtttcacca

SEQ ID NO: 44780 - DNA, 25 bp, Saccharomyces pastorianus
tattacagaagcagttccgtcctcc

SEQ ID NO: 44781 - DNA, 25 bp, Saccharomyces pastorianus
gaattgcacaagttcccagacgaaa

SEQ ID NO: 44782 - DNA, 25 bp, Saccharomyces pastorianus
gtcctcctgttgaaggtgtgtgcat

SEQ ID NO: 44783 - DNA, 25 bp, Saccharomyces pastorianus
aacattcaatgtgaggttttcctcg

SEQ ID NO: 44784 - DNA, 25 bp, Saccharomyces pastorianus
caattaaccaagatgaagccgcaat

SEQ ID NO: 44785 - DNA, 25 bp, Saccharomyces pastorianus
gctggtttccagacagtaaagcttc

SEQ ID NO: 44786 - DNA, 25 bp, Saccharomyces pastorianus
agtaccgacctgttaagatcaccag

SEQ ID NO: 44787 - DNA, 25 bp, Saccharomyces pastorianus
gttttcctcgtaagtttgaaagctg

SEQ ID NO: 44788 - DNA, 25 bp, Saccharomyces pastorianus
aaggtagcatgtctccgacgcaaag

SEQ ID NO: 44789 - DNA, 25 bp, Saccharomyces pastorianus
gcggcaagtggcagtcgtcgacaaa

SEQ ID NO: 44790 - DNA, 25 bp, Saccharomyces pastorianus
agccgcaatcggtagattgacccca

SEQ ID NO: 44791 - DNA, 25 bp, Saccharomyces pastorianus
aaagctggtggcgtggccctgaatc

SEQ ID NO: 44792 - DNA, 25 bp, Saccharomyces pastorianus
tctcaacctgctttagaagtagaca

SEQ ID NO: 44793 - DNA, 25 bp, Saccharomyces pastorianus
ggcgtggccctgaatctttgtgaag

SEQ ID NO: 44794 - DNA, 25 bp, Saccharomyces pastorianus
gtcatcatgcaacacaccaattttt

SEQ ID NO: 44795 - DNA, 25 bp, Saccharomyces pastorianus
cgtcactgtcaggagagatttcttt

SEQ ID NO: 44796 - DNA, 25 bp, Saccharomyces pastorianus
caaatgtgactgtgcctcgaaggac

SEQ ID NO: 44797 - DNA, 25 bp, Saccharomyces pastorianus
tgcattgtgaccactgtaaccatgt

SEQ ID NO: 44798 - DNA, 25 bp, Saccharomyces pastorianus
aatgaggcagctggcagaccatccc

SEQ ID NO: 44799 - DNA, 25 bp, Saccharomyces pastorianus
ggtgaaatgtactctctgatcagat

SEQ ID NO: 44800 - DNA, 25 bp, Saccharomyces pastorianus
gatttttgaacatcaaccccttcac

SEQ ID NO: 44801 - DNA, 25 bp, Saccharomyces pastorianus
tcattctggatgaggcgcacaatat

SEQ ID NO: 44802 - DNA, 25 bp, Saccharomyces pastorianus
tcagaagttcggtgtagagggcccc

SEQ ID NO: 44803 - DNA, 25 bp, Saccharomyces pastorianus
atgcgaacattttcacccttgatca

SEQ ID NO: 44804 - DNA, 25 bp, Saccharomyces pastorianus
ataccgccagagcagtgaacaattt

SEQ ID NO: 44805 - DNA, 25 bp, Saccharomyces pastorianus
attcgctgtcagagacatgagacaa

SEQ ID NO: 44806 - DNA, 25 bp, Saccharomyces pastorianus
gctttcagtgaatacccaccattag

SEQ ID NO: 44807 - DNA, 25 bp, Saccharomyces pastorianus
cagtgaatacccaccattaggtaga

SEQ ID NO: 44808 - DNA, 25 bp, Saccharomyces pastorianus
gctgtcggtgttatcaagtctgttg

SEQ ID NO: 44809 - DNA, 25 bp, Saccharomyces pastorianus
aggtagattcgctgtcagagacatg

SEQ ID NO: 44810 - DNA, 25 bp, Saccharomyces pastorianus
atgtgtgttgaagctttcagtgaat

SEQ ID NO: 44811 - DNA, 25 bp, Saccharomyces pastorianus
gaagctttcagtgaatacccaccat

SEQ ID NO: 44812 - DNA, 25 bp, Saccharomyces pastorianus
attaggtagattcgctgtcagagac

SEQ ID NO: 44813 - DNA, 25 bp, Saccharomyces pastorianus
ccaccattaggtagattcgctgtca

SEQ ID NO: 44814 - DNA, 25 bp, Saccharomyces pastorianus
ggtgttatcaagtctgttgacaaga

SEQ ID NO: 44815 - DNA, 25 bp, Saccharomyces pastorianus
gtcggtgttatcaagtctgttgaca

SEQ ID NO: 44816 - DNA, 25 bp, Saccharomyces pastorianus
ggcggcccgtacgaattcgttattg

SEQ ID NO: 44817 - DNA, 25 bp, Saccharomyces pastorianus
aagtacaccacgacagcactgaaga

SEQ ID NO: 44818 - DNA, 25 bp, Saccharomyces pastorianus
agtttgaagcccgtagactacagga

SEQ ID NO: 44819 - DNA, 25 bp, Saccharomyces pastorianus
caccgaacaaagtcttgcttgtaca

SEQ ID NO: 44820 - DNA, 25 bp, Saccharomyces pastorianus
tacaagactgtttcggatgctacaa

SEQ ID NO: 44821 - DNA, 25 bp, Saccharomyces pastorianus
ttaccaagcggcactacagatgcgt

SEQ ID NO: 44822 - DNA, 25 bp, Saccharomyces pastorianus
gtaaagtcaaaatagcggcggcccg

SEQ ID NO: 44823 - DNA, 25 bp, Saccharomyces pastorianus
gatgcgtcattatcacagatacttg

SEQ ID NO: 44824 - DNA, 25 bp, Saccharomyces pastorianus
gatacttggaaacgaagctctagtc

SEQ ID NO: 44825 - DNA, 25 bp, Saccharomyces pastorianus
gattagtcagcgtccgaaacctagc

SEQ ID NO: 44826 - DNA, 25 bp, Saccharomyces pastorianus
gtccgaaacctagctttcatcgaat

SEQ ID NO: 44827 - DNA, 25 bp, Saccharomyces pastorianus
aacccattatggaaccctagtagag

SEQ ID NO: 44828 - DNA, 25 bp, Saccharomyces pastorianus
gatcgtggatgctaattctggtggt

SEQ ID NO: 44829 - DNA, 25 bp, Saccharomyces pastorianus
gagagcctaccgttcccgaagggag

SEQ ID NO: 44830 - DNA, 25 bp, Saccharomyces pastorianus
gggaaatctcgaccggccatttatc

SEQ ID NO: 44831 - DNA, 25 bp, Saccharomyces pastorianus
ttcatattcgggaagcggtttgctt

SEQ ID NO: 44832 - DNA, 25 bp, Saccharomyces pastorianus
agaggtacagttctatgttttccgt

SEQ ID NO: 44833 - DNA, 25 bp, Saccharomyces pastorianus
atgggtgactacctatcgctactag

SEQ ID NO: 44834 - DNA, 25 bp, Saccharomyces pastorianus
gttttccgtaaatacagcatctgct

SEQ ID NO: 44835 - DNA, 25 bp, Saccharomyces pastorianus
gttgttcgcaggtcacagtatccaa

SEQ ID NO: 44836 - DNA, 25 bp, Saccharomyces pastorianus
ggccatttatcaccaattcgatgtt

SEQ ID NO: 44837 - DNA, 25 bp, Saccharomyces pastorianus
agcatctgctggttctggttctgga

SEQ ID NO: 44838 - DNA, 25 bp, Saccharomyces pastorianus
aggcttgatcctaaaacggccgcca

SEQ ID NO: 44839 - DNA, 25 bp, Saccharomyces pastorianus
tatggatgtcggtactcaagggtca

SEQ ID NO: 44840 - DNA, 25 bp, Saccharomyces pastorianus
gaacgtcgatattgctgttggcgat

SEQ ID NO: 44841 - DNA, 25 bp, Saccharomyces pastorianus
gtgagccgaatatcgcagaggtttt

SEQ ID NO: 44842 - DNA, 25 bp, Saccharomyces pastorianus
taacgacaatttagacgcagacggg

SEQ ID NO: 44843 - DNA, 25 bp, Saccharomyces pastorianus
cgcggtttcaatcacgaacgtcgat

SEQ ID NO: 44844 - DNA, 25 bp, Saccharomyces pastorianus
gaaggtaccggcaaatgcagacgat

SEQ ID NO: 44845 - DNA, 25 bp, Saccharomyces pastorianus
ggccgccactatgaaaagggatctt

SEQ ID NO: 44846 - DNA, 25 bp, Saccharomyces pastorianus
tgacgctataactgaggagccagat

SEQ ID NO: 44847 - DNA, 25 bp, Saccharomyces pastorianus
actcaagggtcatccgcggtttcaa

SEQ ID NO: 44848 - DNA, 25 bp, Saccharomyces pastorianus
gagccagatgatgccgccttagaaa

SEQ ID NO: 44849 - DNA, 25 bp, Saccharomyces pastorianus
taccaccaccacctaaattatcaat

SEQ ID NO: 44850 - DNA, 25 bp, Saccharomyces pastorianus
tggtcttggaccgtagcgttagaat

SEQ ID NO: 44851 - DNA, 25 bp, Saccharomyces pastorianus
aacatggccctatcgaatctcaaaa

SEQ ID NO: 44852 - DNA, 25 bp, Saccharomyces pastorianus
gaagccttcaaggaacatggcccta

SEQ ID NO: 44853 - DNA, 25 bp, Saccharomyces pastorianus
tcaatggttgggtttcctttactgt

SEQ ID NO: 44854 - DNA, 25 bp, Saccharomyces pastorianus
gttccttggagtgggataacttcaa

SEQ ID NO: 44855 - DNA, 25 bp, Saccharomyces pastorianus
ttaacgaacaccctataattggcaa

SEQ ID NO: 44856 - DNA, 25 bp, Saccharomyces pastorianus
gagttccctttagagatgaatctgt

SEQ ID NO: 44857 - DNA, 25 bp, Saccharomyces pastorianus
taaaagtcacaatgcccaagggaac

SEQ ID NO: 44858 - DNA, 25 bp, Saccharomyces pastorianus
gaataccaagtacggacttccaatt

SEQ ID NO: 44859 - DNA, 25 bp, Saccharomyces pastorianus
taaattagacaatgtcccctccgca

SEQ ID NO: 44860 - DNA, 25 bp, Saccharomyces pastorianus
gaggcaccgtttcccttggcagagt

SEQ ID NO: 44861 - DNA, 25 bp, Saccharomyces pastorianus
gggttcgacaacatgactgccatta

SEQ ID NO: 44862 - DNA, 25 bp, Saccharomyces pastorianus
taacgaaattgcttgatcacggaat

SEQ ID NO: 44863 - DNA, 25 bp, Saccharomyces pastorianus
gtcactgccgaaccagatgtactga

SEQ ID NO: 44864 - DNA, 25 bp, Saccharomyces pastorianus
aatgttactcaacacctaaccggcg

SEQ ID NO: 44865 - DNA, 25 bp, Saccharomyces pastorianus
agcaatactggtgttgggttcgaca

SEQ ID NO: 44866 - DNA, 25 bp, Saccharomyces pastorianus
aagtaccacctagtgtcaggaacga

SEQ ID NO: 44867 - DNA, 25 bp, Saccharomyces pastorianus
aagaggtgtcacatatccacacaga

SEQ ID NO: 44868 - DNA, 25 bp, Saccharomyces pastorianus
ggcgaatcgctacaagattggttca

SEQ ID NO: 44869 - DNA, 25 bp, Saccharomyces pastorianus
gcaagaagcgcaagtcactgccgaa

SEQ ID NO: 44870 - DNA, 25 bp, Saccharomyces pastorianus
gcagagcatttagcgatttccaatt

SEQ ID NO: 44871 - DNA, 25 bp, Saccharomyces pastorianus
gagaaatttttatcgagtccaagtg

SEQ ID NO: 44872 - DNA, 25 bp, Saccharomyces pastorianus
gattgtttacacaccatccaaggat

SEQ ID NO: 44873 - DNA, 25 bp, Saccharomyces pastorianus
atctcatttagcctatactccttta

SEQ ID NO: 44874 - DNA, 25 bp, Saccharomyces pastorianus
aagtctgttctggaattctgtatac

SEQ ID NO: 44875 - DNA, 25 bp, Saccharomyces pastorianus
gaaagcgttactacaggcagtgatt

SEQ ID NO: 44876 - DNA, 25 bp, Saccharomyces pastorianus
gatgtttgatcccaggaatccagag

SEQ ID NO: 44877 - DNA, 25 bp, Saccharomyces pastorianus
gattagcgagcttgacggaatattg

SEQ ID NO: 44878 - DNA, 25 bp, Saccharomyces pastorianus
gaatccagagcaccaagtctgttct

SEQ ID NO: 44879 - DNA, 25 bp, Saccharomyces pastorianus
cacgactggaaaattgcgcttgaga

SEQ ID NO: 44880 - DNA, 25 bp, Saccharomyces pastorianus
taatgttcaagtttccaccagggca

SEQ ID NO: 44881 - DNA, 25 bp, Saccharomyces pastorianus
gacaaagaactaatgcacgactgga

SEQ ID NO: 44882 - DNA, 25 bp, Saccharomyces pastorianus
gttccggaaattgtcccatttagat

SEQ ID NO: 44883 - DNA, 25 bp, Saccharomyces pastorianus
gaagagattacctgttccggaaatt

SEQ ID NO: 44884 - DNA, 25 bp, Saccharomyces pastorianus
caatggttccttgaaaacttccctg

SEQ ID NO: 44885 - DNA, 25 bp, Saccharomyces pastorianus
tagatggcaacacactgcggccgat

SEQ ID NO: 44886 - DNA, 25 bp, Saccharomyces pastorianus
taacgctagaaatacctacgccagg

SEQ ID NO: 44887 - DNA, 25 bp, Saccharomyces pastorianus
ctgcggccgatgagaaattgaactt

SEQ ID NO: 44888 - DNA, 25 bp, Saccharomyces pastorianus
ggaccactcgatacaaaatgcacta

SEQ ID NO: 44889 - DNA, 25 bp, Saccharomyces pastorianus
gccgttatggcaatggtaggacaca

SEQ ID NO: 44890 - DNA, 25 bp, Saccharomyces pastorianus
tacgccaggtcatacgccgttatgg

SEQ ID NO: 44891 - DNA, 25 bp, Saccharomyces pastorianus
ttgacaccgaatctactggatgcat

SEQ ID NO: 44892 - DNA, 25 bp, Saccharomyces pastorianus
agcgaagtcactttggccttaatga

SEQ ID NO: 44893 - DNA, 25 bp, Saccharomyces pastorianus
atattttagttcctgcattttggca

SEQ ID NO: 44894 - DNA, 25 bp, Saccharomyces pastorianus
acgtccgatataacattggtactgg

SEQ ID NO: 44895 - DNA, 25 bp, Saccharomyces pastorianus
gaatatgtaccactgaactacccct

SEQ ID NO: 44896 - DNA, 25 bp, Saccharomyces pastorianus
agaagtgcgcgaagtgcatcagtat

SEQ ID NO: 44897 - DNA, 25 bp, Saccharomyces pastorianus
cagttatttgttgcccttgttattc

SEQ ID NO: 44898 - DNA, 25 bp, Saccharomyces pastorianus
attgtatctcgcacagtcttggaaa

SEQ ID NO: 44899 - DNA, 25 bp, Saccharomyces pastorianus
tccgcttttatcttcattgtatctc

SEQ ID NO: 44900 - DNA, 25 bp, Saccharomyces pastorianus
gtgagaatcctagcaagcagttatt

SEQ ID NO: 44901 - DNA, 25 bp, Saccharomyces pastorianus
ctgggtgctttattggatacatctc

SEQ ID NO: 44902 - DNA, 25 bp, Saccharomyces pastorianus
attggtgtattggacgtcacaaagc

SEQ ID NO: 44903 - DNA, 25 bp, Saccharomyces pastorianus
gaatcctgggatatcaatcgcaaag

SEQ ID NO: 44904 - DNA, 25 bp, Saccharomyces pastorianus
ttgatgcaggccacatggtgcccta

SEQ ID NO: 44905 - DNA, 25 bp, Saccharomyces pastorianus
accggtcttcggtatgtcgatcagt

SEQ ID NO: 44906 - DNA, 25 bp, Saccharomyces pastorianus
ctgcccttttggaaccttatgcgaa

SEQ ID NO: 44907 - DNA, 25 bp, Saccharomyces pastorianus
gcttctaaatcgagtatcccatgca

SEQ ID NO: 44908 - DNA, 25 bp, Saccharomyces pastorianus
cttatgcgaagactggcctcaatgt

SEQ ID NO: 44909 - DNA, 25 bp, Saccharomyces pastorianus
aatggttaacagctggatttccggt

SEQ ID NO: 44910 - DNA, 25 bp, Saccharomyces pastorianus
ccatgcatacttgccacaacttatt

SEQ ID NO: 44911 - DNA, 25 bp, Saccharomyces pastorianus
gatccgacgtacacagctattctgg

SEQ ID NO: 44912 - DNA, 25 bp, Saccharomyces pastorianus
gagggccgtgccaagacaatagtac

SEQ ID NO: 44913 - DNA, 25 bp, Saccharomyces pastorianus
acaacttattgtgactctgcccttt

SEQ ID NO: 44914 - DNA, 25 bp, Saccharomyces pastorianus
ttggttgggaaatcacgcgtggact

SEQ ID NO: 44915 - DNA, 25 bp, Saccharomyces pastorianus
gtaacgatagcaactctacctctaa

SEQ ID NO: 44916 - DNA, 25 bp, Saccharomyces pastorianus
tcggcagttttgttacggaagacca

SEQ ID NO: 44917 - DNA, 25 bp, Saccharomyces pastorianus
gtgtattcttttatgaccgggattt

SEQ ID NO: 44918 - DNA, 25 bp, Saccharomyces pastorianus
ccaacaggtttcactacatccatag

SEQ ID NO: 44919 - DNA, 25 bp, Saccharomyces pastorianus
ttggccaagcatgcaagggaatcaa

SEQ ID NO: 44920 - DNA, 25 bp, Saccharomyces pastorianus
gttgacgattacgacagatccctat

SEQ ID NO: 44921 - DNA, 25 bp, Saccharomyces pastorianus
gaaagtgtcaagcattccgaaatta

SEQ ID NO: 44922 - DNA, 25 bp, Saccharomyces pastorianus
agagctcttaaaaacttccttcata

SEQ ID NO: 44923 - DNA, 25 bp, Saccharomyces pastorianus
gacgagacatattctgagcagggaa

SEQ ID NO: 44924 - DNA, 25 bp, Saccharomyces pastorianus
agatgactacattcggcagttttgt

SEQ ID NO: 44925 - DNA, 25 bp, Saccharomyces pastorianus
ggatacagtactgcgagtgcgagta

SEQ ID NO: 44926 - DNA, 25 bp, Saccharomyces pastorianus
ttccgtctactactaccataaactg

SEQ ID NO: 44927 - DNA, 25 bp, Saccharomyces pastorianus
aaccagtgtttgagacttgccgaca

SEQ ID NO: 44928 - DNA, 25 bp, Saccharomyces pastorianus
attggagctactgtgacgaacttca

SEQ ID NO: 44929 - DNA, 25 bp, Saccharomyces pastorianus
gaatatcttgtatccgttaccttct

SEQ ID NO: 44930 - DNA, 25 bp, Saccharomyces pastorianus
gggaatcttacttcgtcacaagctt

SEQ ID NO: 44931 - DNA, 25 bp, Saccharomyces pastorianus
agcttctcttctccacataattgat

SEQ ID NO: 44932 - DNA, 25 bp, Saccharomyces pastorianus
ataagatgcccgtcattagcttctc

SEQ ID NO: 44933 - DNA, 25 bp, Saccharomyces pastorianus
ggatttgcgactcaatttgcactct

SEQ ID NO: 44934 - DNA, 25 bp, Saccharomyces pastorianus
gttaaggtactttctgtggcaatca

SEQ ID NO: 44935 - DNA, 25 bp, Saccharomyces pastorianus
ggatttttcttttcgatctgcctca

SEQ ID NO: 44936 - DNA, 25 bp, Saccharomyces pastorianus
cgttaccttctttggcgattgcgaa

SEQ ID NO: 44937 - DNA, 25 bp, Saccharomyces pastorianus
gtcaatccagtacttctatcaaatc

SEQ ID NO: 44938 - DNA, 25 bp, Saccharomyces pastorianus
ctatcaaatcacttggtagcccact

SEQ ID NO: 44939 - DNA, 25 bp, Saccharomyces pastorianus
tccaaacacaggaagtcaatccagt

SEQ ID NO: 44940 - DNA, 25 bp, Saccharomyces pastorianus
gctcgctttcttcaaacgaatctca

SEQ ID NO: 44941 - DNA, 25 bp, Saccharomyces pastorianus
gaaagccaaaggttgagcactttta

SEQ ID NO: 44942 - DNA, 25 bp, Saccharomyces pastorianus
ttggtagcccactccatggaagatt

SEQ ID NO: 44943 - DNA, 25 bp, Saccharomyces pastorianus
ccatggaagatttagctcgctttct

SEQ ID NO: 44944 - DNA, 25 bp, Saccharomyces pastorianus
tgagcacttttagttttccaaacac

SEQ ID NO: 44945 - DNA, 25 bp, Saccharomyces pastorianus
tctcagtttgatagtggcaagcaac

SEQ ID NO: 44946 - DNA, 25 bp, Saccharomyces pastorianus
ggcaagcaaccacaagagtatgaaa

SEQ ID NO: 44947 - DNA, 25 bp, Saccharomyces pastorianus
gaggaatctcaaggtgaagccatat

SEQ ID NO: 44948 - DNA, 25 bp, Saccharomyces pastorianus
gctccgattttgatcgaagcatgtg

SEQ ID NO: 44949 - DNA, 25 bp, Saccharomyces pastorianus
gagcgctccgattttgatcgaagca

SEQ ID NO: 44950 - DNA, 25 bp, Saccharomyces pastorianus
agcgctccgattttgatcgaagcat

SEQ ID NO: 44951 - DNA, 25 bp, Saccharomyces pastorianus
aaagaatcaactcctttattgcctt

SEQ ID NO: 44952 - DNA, 25 bp, Saccharomyces pastorianus
gaaagatatgacagcctgggctaat

SEQ ID NO: 44953 - DNA, 25 bp, Saccharomyces pastorianus
ggatcaaaagaatcaactcctttat

SEQ ID NO: 44954 - DNA, 25 bp, Saccharomyces pastorianus
gaacgtattacaaagttgattgatg

SEQ ID NO: 44955 - DNA, 25 bp, Saccharomyces pastorianus
tcaactcctttattgccttgaaaga

SEQ ID NO: 44956 - DNA, 25 bp, Saccharomyces pastorianus
atgagcgctccgattttgatcgaag

SEQ ID NO: 44957 - DNA, 25 bp, Saccharomyces pastorianus
gcgctccgattttgatcgaagcatg

SEQ ID NO: 44958 - DNA, 25 bp, Saccharomyces pastorianus
tccgattttgatcgaagcatgtgaa

SEQ ID NO: 44959 - DNA, 25 bp, Saccharomyces pastorianus
agaattgtttctgccaccagtcttt

SEQ ID NO: 44960 - DNA, 25 bp, Saccharomyces pastorianus
agtggtttctttggagtctgctaac

SEQ ID NO: 44961 - DNA, 25 bp, Saccharomyces pastorianus
aaatgcatgggcttcctctagaatt

SEQ ID NO: 44962 - DNA, 25 bp, Saccharomyces pastorianus
gatatcaccgagtgcatctttcaca

SEQ ID NO: 44963 - DNA, 25 bp, Saccharomyces pastorianus
gccatgcctacgaagaagcccaaat

SEQ ID NO: 44964 - DNA, 25 bp, Saccharomyces pastorianus
aatgattgtatttccagctctagca

SEQ ID NO: 44965 - DNA, 25 bp, Saccharomyces pastorianus
caatcgtgacgccaactgactttaa

SEQ ID NO: 44966 - DNA, 25 bp, Saccharomyces pastorianus
ggcaacaaggcctgatttgtctcta

SEQ ID NO: 44967 - DNA, 25 bp, Saccharomyces pastorianus
aattgaggttggtgcagccctcgat

SEQ ID NO: 44968 - DNA, 25 bp, Saccharomyces pastorianus
gattgttcagcatcgaccaacacat

SEQ ID NO: 44969 - DNA, 25 bp, Saccharomyces pastorianus
gaatacatcttaacaccggaagcca

SEQ ID NO: 44970 - DNA, 25 bp, Saccharomyces pastorianus
gacgaaaaaccctgctggtacagct

SEQ ID NO: 44971 - DNA, 25 bp, Saccharomyces pastorianus
ataacaagcagcaccgtcgctactt

SEQ ID NO: 44972 - DNA, 25 bp, Saccharomyces pastorianus
taagcagccaaagaccactacttct

SEQ ID NO: 44973 - DNA, 25 bp, Saccharomyces pastorianus
aagaaacgccatcgccaaaagattt

SEQ ID NO: 44974 - DNA, 25 bp, Saccharomyces pastorianus
gtacagctgtacctttagtgtcaaa

SEQ ID NO: 44975 - DNA, 25 bp, Saccharomyces pastorianus
cgttggctctttccggtaatgatga

SEQ ID NO: 44976 - DNA, 25 bp, Saccharomyces pastorianus
agttcaaaactcttctaagcagcca

SEQ ID NO: 44977 - DNA, 25 bp, Saccharomyces pastorianus
tctgcaactactacgacaacatctt

SEQ ID NO: 44978 - DNA, 25 bp, Saccharomyces pastorianus
cgctacttcaacgactactacattt

SEQ ID NO: 44979 - DNA, 25 bp, Saccharomyces pastorianus
gaaaggcaaggcagtgacccattaa

SEQ ID NO: 44980 - DNA, 25 bp, Saccharomyces pastorianus
gtatctctcctcgtcaagaattcat

SEQ ID NO: 44981 - DNA, 25 bp, Saccharomyces pastorianus
agaatggccttgcatgcgacgtgac

SEQ ID NO: 44982 - DNA, 25 bp, Saccharomyces pastorianus
cagcgtctgtgatatggcatttttg

SEQ ID NO: 44983 - DNA, 25 bp, Saccharomyces pastorianus
aagtagccatcaagccatcctccgt

SEQ ID NO: 44984 - DNA, 25 bp, Saccharomyces pastorianus
ggaccagcacagttctgagaatggc

SEQ ID NO: 44985 - DNA, 25 bp, Saccharomyces pastorianus
gcgacgtgaccagcgtctgtgatat

SEQ ID NO: 44986 - DNA, 25 bp, Saccharomyces pastorianus
atattagaatactaggtccctgcgt

SEQ ID NO: 44987 - DNA, 25 bp, Saccharomyces pastorianus
tatggccagaaaccggccatcgggt

SEQ ID NO: 44988 - DNA, 25 bp, Saccharomyces pastorianus
taggtccctgcgttatggccagaaa

SEQ ID NO: 44989 - DNA, 25 bp, Saccharomyces pastorianus
ccggccatcgggtgatattttcgca

SEQ ID NO: 44990 - DNA, 25 bp, Saccharomyces pastorianus
gatattttcgcagaagtagccatca

SEQ ID NO: 44991 - DNA, 25 bp, Saccharomyces pastorianus
ggcatttttggagacattgtatatt

SEQ ID NO: 44992 - DNA, 25 bp, Saccharomyces pastorianus
tgaccatacacctacgactcaaaat

SEQ ID NO: 44993 - DNA, 25 bp, Saccharomyces pastorianus
ggtggtcaaaaaccttgttctctag

SEQ ID NO: 44994 - DNA, 25 bp, Saccharomyces pastorianus
cccgaccaaccttattcatttgtgg

SEQ ID NO: 44995 - DNA, 25 bp, Saccharomyces pastorianus
gagatgatcctgttgtaggccccga

SEQ ID NO: 44996 - DNA, 25 bp, Saccharomyces pastorianus
gatcttcttctttcggcacttagaa

SEQ ID NO: 44997 - DNA, 25 bp, Saccharomyces pastorianus
ttatacaccgtaggatgctctttcg

SEQ ID NO: 44998 - DNA, 25 bp, Saccharomyces pastorianus
actgcaccagctttgggattcccaa

SEQ ID NO: 44999 - DNA, 25 bp, Saccharomyces pastorianus
taatccatgggatcttcttctttcg

SEQ ID NO: 45000 - DNA, 25 bp, Saccharomyces pastorianus
gtgttccaaacggttctagccctga

SEQ ID NO: 45001 - DNA, 25 bp, Saccharomyces pastorianus
attcgatgagctgtacactgcacca

SEQ ID NO: 45002 - DNA, 25 bp, Saccharomyces pastorianus
aaatcgcctttatctgctgctgtta

SEQ ID NO: 45003 - DNA, 25 bp, Saccharomyces pastorianus
gggttccctgctaggaatcacatat

SEQ ID NO: 45004 - DNA, 25 bp, Saccharomyces pastorianus
gaaattgtcggttcccatcatagta

SEQ ID NO: 45005 - DNA, 25 bp, Saccharomyces pastorianus
aagttggcagaaacctagcacggca

SEQ ID NO: 45006 - DNA, 25 bp, Saccharomyces pastorianus
gaagggatttctgtcttatctaagt

SEQ ID NO: 45007 - DNA, 25 bp, Saccharomyces pastorianus
ccatcatagtagtgggttccctgct

SEQ ID NO: 45008 - DNA, 25 bp, Saccharomyces pastorianus
tagcacggcaccaatctatgatata

SEQ ID NO: 45009 - DNA, 25 bp, Saccharomyces pastorianus
cctcgtgctctaccaatgaatcttt

SEQ ID NO: 45010 - DNA, 25 bp, Saccharomyces pastorianus
tacgcgatgttttacgtgtacccac

SEQ ID NO: 45011 - DNA, 25 bp, Saccharomyces pastorianus
aaattcccacactgactttatactt

SEQ ID NO: 45012 - DNA, 25 bp, Saccharomyces pastorianus
tgtacccacccgtgaaatcctaagg

SEQ ID NO: 45013 - DNA, 25 bp, Saccharomyces pastorianus
atctaattcatgacttgcctcgtgc

SEQ ID NO: 45014 - DNA, 25 bp, Saccharomyces pastorianus
gttggctaagagattgtctgaaaga

SEQ ID NO: 45015 - DNA, 25 bp, Saccharomyces pastorianus
actcctcaaagattgcaaagaaaga

SEQ ID NO: 45016 - DNA, 25 bp, Saccharomyces pastorianus
ctcaaagagaagctgctgccgaata

SEQ ID NO: 45017 - DNA, 25 bp, Saccharomyces pastorianus
acgctcaattgttggctaagagatt

SEQ ID NO: 45018 - DNA, 25 bp, Saccharomyces pastorianus
gaatacgctcaattgttggctaaga

SEQ ID NO: 45019 - DNA, 25 bp, Saccharomyces pastorianus
agacttacaccaaggctccaaagat

SEQ ID NO: 45020 - DNA, 25 bp, Saccharomyces pastorianus
ccaaggctccaaagatccaaagatt

SEQ ID NO: 45021 - DNA, 25 bp, Saccharomyces pastorianus
gaaagagacaccaaagagctttgaa

SEQ ID NO: 45022 - DNA, 25 bp, Saccharomyces pastorianus
gaagctgctgccgaatacgctcaat

SEQ ID NO: 45023 - DNA, 25 bp, Saccharomyces pastorianus
gaaaagacttacaccaaggctccaa

SEQ ID NO: 45024 - DNA, 25 bp, Saccharomyces pastorianus
tgctgccgaatacgctcaattgttg

SEQ ID NO: 45025 - DNA, 25 bp, Saccharomyces pastorianus
atcttcctagcgtatttactcatcc

SEQ ID NO: 45026 - DNA, 25 bp, Saccharomyces pastorianus
gtggactatgttgcctttttatgtg

SEQ ID NO: 45027 - DNA, 25 bp, Saccharomyces pastorianus
tattgttgcgaatgccttagtcaga

SEQ ID NO: 45028 - DNA, 25 bp, Saccharomyces pastorianus
aaaggatctgtctcattatgggttc

SEQ ID NO: 45029 - DNA, 25 bp, Saccharomyces pastorianus
atcgggcattaaaccatctttctta

SEQ ID NO: 45030 - DNA, 25 bp, Saccharomyces pastorianus
ggtatccatacaacccatcatggtc

SEQ ID NO: 45031 - DNA, 25 bp, Saccharomyces pastorianus
ggaatgcccctagaacacttacaat

SEQ ID NO: 45032 - DNA, 25 bp, Saccharomyces pastorianus
agatcccgtcaactgccaagcaatg

SEQ ID NO: 45033 - DNA, 25 bp, Saccharomyces pastorianus
ttactcatccccttattgttgcgaa

SEQ ID NO: 45034 - DNA, 25 bp, Saccharomyces pastorianus
gttatttcgtttccaatcgggcatt

SEQ ID NO: 45035 - DNA, 25 bp, Saccharomyces pastorianus
gatcaagttcaatgctgttccgaaa

SEQ ID NO: 45036 - DNA, 25 bp, Saccharomyces pastorianus
ccggacatttcctgttgaacataat

SEQ ID NO: 45037 - DNA, 25 bp, Saccharomyces pastorianus
aatgcatactcaaatcagtcccttg

SEQ ID NO: 45038 - DNA, 25 bp, Saccharomyces pastorianus
aattaccattgatgtgtctttccga

SEQ ID NO: 45039 - DNA, 25 bp, Saccharomyces pastorianus
aaatcagtcccttgacatcagcggc

SEQ ID NO: 45040 - DNA, 25 bp, Saccharomyces pastorianus
gcatactcaaatcagtcccttgaca

SEQ ID NO: 45041 - DNA, 25 bp, Saccharomyces pastorianus
tcagcggcagaactacaagaaaatt

SEQ ID NO: 45042 - DNA, 25 bp, Saccharomyces pastorianus
accattgatgtgtctttccgaatac

SEQ ID NO: 45043 - DNA, 25 bp, Saccharomyces pastorianus
cagtcccttgacatcagcggcagaa

SEQ ID NO: 45044 - DNA, 25 bp, Saccharomyces pastorianus
tgacatcagcggcagaactacaaga

SEQ ID NO: 45045 - DNA, 25 bp, Saccharomyces pastorianus
tgatgtgtctttccgaatacttccg

SEQ ID NO: 45046 - DNA, 25 bp, Saccharomyces pastorianus
tcccttgacatcagcggcagaacta

SEQ ID NO: 45047 - DNA, 25 bp, Saccharomyces pastorianus
aattatcttgttcacgcatcttctc

SEQ ID NO: 45048 - DNA, 25 bp, Saccharomyces pastorianus
acagcggagggaatcttgcatattt

SEQ ID NO: 45049 - DNA, 25 bp, Saccharomyces pastorianus
attggacgatgcctttgttgaccgg

SEQ ID NO: 45050 - DNA, 25 bp, Saccharomyces pastorianus
gaagcttccaataccatcgatacaa

SEQ ID NO: 45051 - DNA, 25 bp, Saccharomyces pastorianus
gagcgcgggattttcgtatgtctct

SEQ ID NO: 45052 - DNA, 25 bp, Saccharomyces pastorianus
ttgaccgggcagacgggatcttttt

SEQ ID NO: 45053 - DNA, 25 bp, Saccharomyces pastorianus
caacggacggtattcgtgtcgtgaa

SEQ ID NO: 45054 - DNA, 25 bp, Saccharomyces pastorianus
attggctacgtctaatctgctggat

SEQ ID NO: 45055 - DNA, 25 bp, Saccharomyces pastorianus
aatttcgtttcactctggatcttcc

SEQ ID NO: 45056 - DNA, 25 bp, Saccharomyces pastorianus
aaatgctcggtatgtccttttaatt

SEQ ID NO: 45057 - DNA, 25 bp, Saccharomyces pastorianus
gagagaattctctgaagcttccaat

SEQ ID NO: 45058 - DNA, 25 bp, Saccharomyces pastorianus
atggtgccgtccatctttctactta

SEQ ID NO: 45059 - DNA, 25 bp, Saccharomyces pastorianus
cgtccatctttctacttacttgaag

SEQ ID NO: 45060 - DNA, 25 bp, Saccharomyces pastorianus
ggtgccgtccatctttctacttact

SEQ ID NO: 45061 - DNA, 25 bp, Saccharomyces pastorianus
tggtgccgtccatctttctacttac

SEQ ID NO: 45062 - DNA, 25 bp, Saccharomyces pastorianus
agcatggtgccgtccatctttctac

SEQ ID NO: 45063 - DNA, 25 bp, Saccharomyces pastorianus
gcatggtgccgtccatctttctact

SEQ ID NO: 45064 - DNA, 25 bp, Saccharomyces pastorianus
ccgtccatctttctacttacttgaa

SEQ ID NO: 45065 - DNA, 25 bp, Saccharomyces pastorianus
gccgtccatctttctacttacttga

SEQ ID NO: 45066 - DNA, 25 bp, Saccharomyces pastorianus
aagcatggtgccgtccatctttcta

SEQ ID NO: 45067 - DNA, 25 bp, Saccharomyces pastorianus
tgccgtccatctttctacttacttg

SEQ ID NO: 45068 - DNA, 25 bp, Saccharomyces pastorianus
gtgccgtccatctttctacttactt

SEQ ID NO: 45069 - DNA, 25 bp, Saccharomyces pastorianus
ggcgaaccgaagttaaagtcagact

SEQ ID NO: 45070 - DNA, 25 bp, Saccharomyces pastorianus
acgcctactggctaagttgagagat

SEQ ID NO: 45071 - DNA, 25 bp, Saccharomyces pastorianus
gatgatttacaagcttctgacgaac

SEQ ID NO: 45072 - DNA, 25 bp, Saccharomyces pastorianus
gagtgaccaagcttcaacacctaga

SEQ ID NO: 45073 - DNA, 25 bp, Saccharomyces pastorianus
aagggagctgcaccatcaaattaca

SEQ ID NO: 45074 - DNA, 25 bp, Saccharomyces pastorianus
gaaatattccgtacaatcctggaac

SEQ ID NO: 45075 - DNA, 25 bp, Saccharomyces pastorianus
gagatcaaattgaattgctcactaa

SEQ ID NO: 45076 - DNA, 25 bp, Saccharomyces pastorianus
caagaggaaacacgcctactggcta

SEQ ID NO: 45077 - DNA, 25 bp, Saccharomyces pastorianus
gaatggaccgcaagaacacccaaag

SEQ ID NO: 45078 - DNA, 25 bp, Saccharomyces pastorianus
attggaatccgaagggagctgcacc

SEQ ID NO: 45079 - DNA, 25 bp, Saccharomyces pastorianus
caatcctggaactttcgaaaggcga

SEQ ID NO: 45080 - DNA, 25 bp, Saccharomyces pastorianus
aagcttgtcgatctaaggaccacag

SEQ ID NO: 45081 - DNA, 25 bp, Saccharomyces pastorianus
gaaagcccaatcactaccatggaac

SEQ ID NO: 45082 - DNA, 25 bp, Saccharomyces pastorianus
ggaactctctagtattagcatctgc

SEQ ID NO: 45083 - DNA, 25 bp, Saccharomyces pastorianus
tacggtgttgactacagctggccaa

SEQ ID NO: 45084 - DNA, 25 bp, Saccharomyces pastorianus
gatgtctcgtgggatgtgcatgatc

SEQ ID NO: 45085 - DNA, 25 bp, Saccharomyces pastorianus
taaggagcactgtcaaaaccacaca

SEQ ID NO: 45086 - DNA, 25 bp, Saccharomyces pastorianus
atggtgcttccatttccactttgga

SEQ ID NO: 45087 - DNA, 25 bp, Saccharomyces pastorianus
gagactatatttacacacggtggcc

SEQ ID NO: 45088 - DNA, 25 bp, Saccharomyces pastorianus
gatactgcccgcgaagagactatat

SEQ ID NO: 45089 - DNA, 25 bp, Saccharomyces pastorianus
gcatgatccgtggttaatgtgcagt

SEQ ID NO: 45090 - DNA, 25 bp, Saccharomyces pastorianus
cacggtggccacatgcttggagtaa

SEQ ID NO: 45091 - DNA, 25 bp, Saccharomyces pastorianus
gatgatatcagcattttcttcccaa

SEQ ID NO: 45092 - DNA, 25 bp, Saccharomyces pastorianus
gcagtccaaaaattcgcatccgttt

SEQ ID NO: 45093 - DNA, 25 bp, Saccharomyces pastorianus
atacttcctcggcagacgcaaatga

SEQ ID NO: 45094 - DNA, 25 bp, Saccharomyces pastorianus
aagctattcggctcgcatggagtca

SEQ ID NO: 45095 - DNA, 25 bp, Saccharomyces pastorianus
gacgtggaggccatcgatacttcct

SEQ ID NO: 45096 - DNA, 25 bp, Saccharomyces pastorianus
ttcccattccaacggtcaagttcag

SEQ ID NO: 45097 - DNA, 25 bp, Saccharomyces pastorianus
atcattggcctggaacctacagcag

SEQ ID NO: 45098 - DNA, 25 bp, Saccharomyces pastorianus
acatgattcactatttgctgcttgc

SEQ ID NO: 45099 - DNA, 25 bp, Saccharomyces pastorianus
gatatcatagcaggcgcatcttcag

SEQ ID NO: 45100 - DNA, 25 bp, Saccharomyces pastorianus
gcatcttcagatggtgcgatctata

SEQ ID NO: 45101 - DNA, 25 bp, Saccharomyces pastorianus
gcatccgtttgaggccaagctattc

SEQ ID NO: 45102 - DNA, 25 bp, Saccharomyces pastorianus
gcatcttcaagctgccatggttatt

SEQ ID NO: 45103 - DNA, 25 bp, Saccharomyces pastorianus
gaagtttgttctattgacgcctcca

SEQ ID NO: 45104 - DNA, 25 bp, Saccharomyces pastorianus
aatggccgcaaaatcatcctcgtag

SEQ ID NO: 45105 - DNA, 25 bp, Saccharomyces pastorianus
ttggtgcggcaaaagatcctgtagc

SEQ ID NO: 45106 - DNA, 25 bp, Saccharomyces pastorianus
tgaacagcacttggcaattctcagt

SEQ ID NO: 45107 - DNA, 25 bp, Saccharomyces pastorianus
tgacgcctccaaaagctcatattga

SEQ ID NO: 45108 - DNA, 25 bp, Saccharomyces pastorianus
gtgataattttaccagactgttcgc

SEQ ID NO: 45109 - DNA, 25 bp, Saccharomyces pastorianus
atagacgtcttttccaatgggcgct

SEQ ID NO: 45110 - DNA, 25 bp, Saccharomyces pastorianus
cctcgtaggtcattccatgggatgt

SEQ ID NO: 45111 - DNA, 25 bp, Saccharomyces pastorianus
aatttatgcttggatcgcccagaat

SEQ ID NO: 45112 - DNA, 25 bp, Saccharomyces pastorianus
aatgggcgctttatggcatcttcaa

SEQ ID NO: 45113 - DNA, 25 bp, Saccharomyces pastorianus
tattccgggcgtttctggaagtcca

SEQ ID NO: 45114 - DNA, 25 bp, Saccharomyces pastorianus
gaatcctaaagatttgccacgggaa

SEQ ID NO: 45115 - DNA, 25 bp, Saccharomyces pastorianus
acaaactatgtttggccgcttcgtc

SEQ ID NO: 45116 - DNA, 25 bp, Saccharomyces pastorianus
gaacagtaccctgaaggtgcagaaa

SEQ ID NO: 45117 - DNA, 25 bp, Saccharomyces pastorianus
cgaggcaggccaaggtttacttatt

SEQ ID NO: 45118 - DNA, 25 bp, Saccharomyces pastorianus
gatcaaatcgaattctacccagttt

SEQ ID NO: 45119 - DNA, 25 bp, Saccharomyces pastorianus
gaacgattcctatctgggacaaact

SEQ ID NO: 45120 - DNA, 25 bp, Saccharomyces pastorianus
gcttcgtctgaagttccatggttga

SEQ ID NO: 45121 - DNA, 25 bp, Saccharomyces pastorianus
atattcagagtattccgggcgtttc

SEQ ID NO: 45122 - DNA, 25 bp, Saccharomyces pastorianus
gaaatgataatctctgctcccaaat

SEQ ID NO: 45123 - DNA, 25 bp, Saccharomyces pastorianus
gaagtccatcgcatctgtcggagat

SEQ ID NO: 45124 - DNA, 25 bp, Saccharomyces pastorianus
gtcatttgcgtacgagccggtgaaa

SEQ ID NO: 45125 - DNA, 25 bp, Saccharomyces pastorianus
ggtgtgcccattgctgtcaaagaca

SEQ ID NO: 45126 - DNA, 25 bp, Saccharomyces pastorianus
tgtggttcctgcctgtaaatcttta

SEQ ID NO: 45127 - DNA, 25 bp, Saccharomyces pastorianus
aatctagaccagtttgccacaggct

SEQ ID NO: 45128 - DNA, 25 bp, Saccharomyces pastorianus
aactgacacagctggttccggtaga

SEQ ID NO: 45129 - DNA, 25 bp, Saccharomyces pastorianus
gactgtgtttccatttttgcgttga

SEQ ID NO: 45130 - DNA, 25 bp, Saccharomyces pastorianus
aatgcatggatatcgctggcctcac

SEQ ID NO: 45131 - DNA, 25 bp, Saccharomyces pastorianus
gagcgttgcttcgagatcatgtgtc

SEQ ID NO: 45132 - DNA, 25 bp, Saccharomyces pastorianus
cacaaagggtgtcttttcctgccaa

SEQ ID NO: 45133 - DNA, 25 bp, Saccharomyces pastorianus
gttgaaccttagtgacgctgagcgt

SEQ ID NO: 45134 - DNA, 25 bp, Saccharomyces pastorianus
aacgagcatgtgtctggcggttcct

SEQ ID NO: 45135 - DNA, 25 bp, Saccharomyces pastorianus
atgactcaaacatcttggatattgc

SEQ ID NO: 45136 - DNA, 25 bp, Saccharomyces pastorianus
ttcggtaacctaatggatccatata

SEQ ID NO: 45137 - DNA, 25 bp, Saccharomyces pastorianus
ctcaaacatcttggatattgcacgt

SEQ ID NO: 45138 - DNA, 25 bp, Saccharomyces pastorianus
gtttcggtaacctaatggatccata

SEQ ID NO: 45139 - DNA, 25 bp, Saccharomyces pastorianus
gatccatataatggacttcttgaaa

SEQ ID NO: 45140 - DNA, 25 bp, Saccharomyces pastorianus
gccaaagtaatgaagacgagtcgat

SEQ ID NO: 45141 - DNA, 25 bp, Saccharomyces pastorianus
gcacgtttcggtaacctaatggatc

SEQ ID NO: 45142 - DNA, 25 bp, Saccharomyces pastorianus
gaagacgagtcgatacaagatgact

SEQ ID NO: 45143 - DNA, 25 bp, Saccharomyces pastorianus
aatggacttcttgaaaagatcaata

SEQ ID NO: 45144 - DNA, 25 bp, Saccharomyces pastorianus
tattgcacgtttcggtaacctaatg

SEQ ID NO: 45145 - DNA, 25 bp, Saccharomyces pastorianus
gatattgcacgtttcggtaacctaa

SEQ ID NO: 45146 - DNA, 25 bp, Saccharomyces pastorianus
gtgaccacaatcgatgttctatcat

SEQ ID NO: 45147 - DNA, 25 bp, Saccharomyces pastorianus
gcggctctttcaaactatatcagat

SEQ ID NO: 45148 - DNA, 25 bp, Saccharomyces pastorianus
aagcgagcgcgctgataacgaaccg

SEQ ID NO: 45149 - DNA, 25 bp, Saccharomyces pastorianus
gaatttcccaccgatgctggtgata

SEQ ID NO: 45150 - DNA, 25 bp, Saccharomyces pastorianus
gaagactatcctatggctaaccctg

SEQ ID NO: 45151 - DNA, 25 bp, Saccharomyces pastorianus
aaaggcacaggaccgctctgaacat

SEQ ID NO: 45152 - DNA, 25 bp, Saccharomyces pastorianus
gttatcgtcatctatcacttcagtg

SEQ ID NO: 45153 - DNA, 25 bp, Saccharomyces pastorianus
tcaccgcatgttgtcttcgccaaga

SEQ ID NO: 45154 - DNA, 25 bp, Saccharomyces pastorianus
gaacgctgaatgtgctatatcggga

SEQ ID NO: 45155 - DNA, 25 bp, Saccharomyces pastorianus
cgccaagacttgcaaacccttttga

SEQ ID NO: 45156 - DNA, 25 bp, Saccharomyces pastorianus
gaagcaggtgcttactcgaagagaa

SEQ ID NO: 45157 - DNA, 25 bp, Saccharomyces pastorianus
aagggacactatgcaagcttagaac

SEQ ID NO: 45158 - DNA, 25 bp, Saccharomyces pastorianus
gatgattcagaattattatgggagg

SEQ ID NO: 45159 - DNA, 25 bp, Saccharomyces pastorianus
tgctgccacaaaagatgggtttttt

SEQ ID NO: 45160 - DNA, 25 bp, Saccharomyces pastorianus
tattttggtccattaattgaaaagg

SEQ ID NO: 45161 - DNA, 25 bp, Saccharomyces pastorianus
ttgaaaagggacactatgcaagctt

SEQ ID NO: 45162 - DNA, 25 bp, Saccharomyces pastorianus
ggaggaacaacgtgctgccacaaaa

SEQ ID NO: 45163 - DNA, 25 bp, Saccharomyces pastorianus
ggaacaacgtgctgccacaaaagat

SEQ ID NO: 45164 - DNA, 25 bp, Saccharomyces pastorianus
ggacactatgcaagcttagaacgtg

SEQ ID NO: 45165 - DNA, 25 bp, Saccharomyces pastorianus
tgcaagcttagaacgtgcaaacggt

SEQ ID NO: 45166 - DNA, 25 bp, Saccharomyces pastorianus
atgggaggaacaacgtgctgccaca

SEQ ID NO: 45167 - DNA, 25 bp, Saccharomyces pastorianus
cgtgctgccacaaaagatgggtttt

SEQ ID NO: 45168 - DNA, 25 bp, Saccharomyces pastorianus
cggatactagagttcaaatcttgaa

SEQ ID NO: 45169 - DNA, 25 bp, Saccharomyces pastorianus
gttagccaagaacagaaaccacgcc

SEQ ID NO: 45170 - DNA, 25 bp, Saccharomyces pastorianus
agaaaccacgccaaaggtgcctctc

SEQ ID NO: 45171 - DNA, 25 bp, Saccharomyces pastorianus
atcgcccatcctagtctcgacattt

SEQ ID NO: 45172 - DNA, 25 bp, Saccharomyces pastorianus
tttcttcttcagctccttcttcggg

SEQ ID NO: 45173 - DNA, 25 bp, Saccharomyces pastorianus
aaatattgctgaagagttagccaag

SEQ ID NO: 45174 - DNA, 25 bp, Saccharomyces pastorianus
ctgacaacgaagactctttgagtaa

SEQ ID NO: 45175 - DNA, 25 bp, Saccharomyces pastorianus
gaaagaacctgaaactgacaacgaa

SEQ ID NO: 45176 - DNA, 25 bp, Saccharomyces pastorianus
atgcaaccggatactagagttcaaa

SEQ ID NO: 45177 - DNA, 25 bp, Saccharomyces pastorianus
tcctagtctcgacattttcttcttc

SEQ ID NO: 45178 - DNA, 25 bp, Saccharomyces pastorianus
gaaactgacaacgaagactctttga

SEQ ID NO: 45179 - DNA, 25 bp, Saccharomyces pastorianus
acgtatggtgacttatcagtactac

SEQ ID NO: 45180 - DNA, 25 bp, Saccharomyces pastorianus
aagaaaggtgaatcagttgccgttc

SEQ ID NO: 45181 - DNA, 25 bp, Saccharomyces pastorianus
tccagagtttacgaggatttccaaa

SEQ ID NO: 45182 - DNA, 25 bp, Saccharomyces pastorianus
caagaatttcttagccccatcagag

SEQ ID NO: 45183 - DNA, 25 bp, Saccharomyces pastorianus
ttagccccatcagagccagatgaag

SEQ ID NO: 45184 - DNA, 25 bp, Saccharomyces pastorianus
gtacatgatacccaccaaatcggcg

SEQ ID NO: 45185 - DNA, 25 bp, Saccharomyces pastorianus
aaaccaaaggccgatgtacatgata

SEQ ID NO: 45186 - DNA, 25 bp, Saccharomyces pastorianus
gaattaagaaagatccgtgttgcgg

SEQ ID NO: 45187 - DNA, 25 bp, Saccharomyces pastorianus
tggcaggtgtcatcatagaggttaa

SEQ ID NO: 45188 - DNA, 25 bp, Saccharomyces pastorianus
agttgccgttctgagtgccatgaaa

SEQ ID NO: 45189 - DNA, 25 bp, Saccharomyces pastorianus
tccgtgttgcggataagactcaaaa

SEQ ID NO: 45190 - DNA, 25 bp, Saccharomyces pastorianus
gaacatgctcgtgaattagatgcct

SEQ ID NO: 45191 - DNA, 25 bp, Saccharomyces pastorianus
ggctaattctttagatttccctgac

SEQ ID NO: 45192 - DNA, 25 bp, Saccharomyces pastorianus
gatttggcgcaatttatggtctcaa

SEQ ID NO: 45193 - DNA, 25 bp, Saccharomyces pastorianus
ggtactgcagtagcatccatgtctg

SEQ ID NO: 45194 - DNA, 25 bp, Saccharomyces pastorianus
gagactgttatattcttgctttgaa

SEQ ID NO: 45195 - DNA, 25 bp, Saccharomyces pastorianus
atgtctgcatgtgctttatctggcg

SEQ ID NO: 45196 - DNA, 25 bp, Saccharomyces pastorianus
tatctggcgccgatgttgttgatgt

SEQ ID NO: 45197 - DNA, 25 bp, Saccharomyces pastorianus
taacgctttactagcttccttagaa

SEQ ID NO: 45198 - DNA, 25 bp, Saccharomyces pastorianus
catagtcatgactctgctggtactg

SEQ ID NO: 45199 - DNA, 25 bp, Saccharomyces pastorianus
gatgtctggtttgacttctcaagca

SEQ ID NO: 45200 - DNA, 25 bp, Saccharomyces pastorianus
ggcagttgactaacttgctattcca

SEQ ID NO: 45201 - DNA, 25 bp, Saccharomyces pastorianus
agccgtatattgtctttcccactga

SEQ ID NO: 45202 - DNA, 25 bp, Saccharomyces pastorianus
acgggcatcatacctgcgctagtag

SEQ ID NO: 45203 - DNA, 25 bp, Saccharomyces pastorianus
gacggaatccttattgaccgcctat

SEQ ID NO: 45204 - DNA, 25 bp, Saccharomyces pastorianus
aaattctacatgcattccaccacga

SEQ ID NO: 45205 - DNA, 25 bp, Saccharomyces pastorianus
aagtcacgtggcagtaccttttaca

SEQ ID NO: 45206 - DNA, 25 bp, Saccharomyces pastorianus
gatgcatcgcgagtgttccacgagc

SEQ ID NO: 45207 - DNA, 25 bp, Saccharomyces pastorianus
aaaccgattccgagtcttctacaag

SEQ ID NO: 45208 - DNA, 25 bp, Saccharomyces pastorianus
gtggttccatttccagtatctgcaa

SEQ ID NO: 45209 - DNA, 25 bp, Saccharomyces pastorianus
gaaagtgcacgtaccggcgacggaa

SEQ ID NO: 45210 - DNA, 25 bp, Saccharomyces pastorianus
gaacaagagttcaccacgagtccat

SEQ ID NO: 45211 - DNA, 25 bp, Saccharomyces pastorianus
acgagctggactggtgcctctatac

SEQ ID NO: 45212 - DNA, 25 bp, Saccharomyces pastorianus
atgcggatgtattagtcatttgaaa

SEQ ID NO: 45213 - DNA, 25 bp, Saccharomyces pastorianus
agaaactctggcaatggacgacatt

SEQ ID NO: 45214 - DNA, 25 bp, Saccharomyces pastorianus
ttaaaaccgttcgttgcactttgcg

SEQ ID NO: 45215 - DNA, 25 bp, Saccharomyces pastorianus
aatgccccaactgcgagaaactctg

SEQ ID NO: 45216 - DNA, 25 bp, Saccharomyces pastorianus
aaaggaggtaaatgccccaactgcg

SEQ ID NO: 45217 - DNA, 25 bp, Saccharomyces pastorianus
gttcgttgcactttgcgataatgaa

SEQ ID NO: 45218 - DNA, 25 bp, Saccharomyces pastorianus
catttgaaatgcctgtatagatact

SEQ ID NO: 45219 - DNA, 25 bp, Saccharomyces pastorianus
aaccgttcgttgcactttgcgataa

SEQ ID NO: 45220 - DNA, 25 bp, Saccharomyces pastorianus
tagatactttttagatgatgaacag

SEQ ID NO: 45221 - DNA, 25 bp, Saccharomyces pastorianus
tgcgagaaagagattgactacacat

SEQ ID NO: 45222 - DNA, 25 bp, Saccharomyces pastorianus
tctggcaatggacgacattggtcaa

SEQ ID NO: 45223 - DNA, 25 bp, Saccharomyces pastorianus
aacaacacagcatcagtttcctcag

SEQ ID NO: 45224 - DNA, 25 bp, Saccharomyces pastorianus
ggcatacagaactaaacgtgacggt

SEQ ID NO: 45225 - DNA, 25 bp, Saccharomyces pastorianus
gtttcctcagttttattgctgctat

SEQ ID NO: 45226 - DNA, 25 bp, Saccharomyces pastorianus
gtgagaatgctcttaatgaaccaaa

SEQ ID NO: 45227 - DNA, 25 bp, Saccharomyces pastorianus
gatgaagttactactacggcatgag

SEQ ID NO: 45228 - DNA, 25 bp, Saccharomyces pastorianus
atgcgtggcaacatggatatcaaac

SEQ ID NO: 45229 - DNA, 25 bp, Saccharomyces pastorianus
agggaaacaccatagacgatctcat

SEQ ID NO: 45230 - DNA, 25 bp, Saccharomyces pastorianus
ttgctgctatctgctacaatcgatc

SEQ ID NO: 45231 - DNA, 25 bp, Saccharomyces pastorianus
gattgtacgaggcttcccaagtaaa

SEQ ID NO: 45232 - DNA, 25 bp, Saccharomyces pastorianus
tacggcatgagttcttccaacggat

SEQ ID NO: 45233 - DNA, 25 bp, Saccharomyces pastorianus
ggacgaactctgcaccataaaattg

SEQ ID NO: 45234 - DNA, 25 bp, Saccharomyces pastorianus
agagagccttacctgtttgatgacc

SEQ ID NO: 45235 - DNA, 25 bp, Saccharomyces pastorianus
aaacctgttacggatcctggtcaat

SEQ ID NO: 45236 - DNA, 25 bp, Saccharomyces pastorianus
aaatctatcgttcgtgacaccattc

SEQ ID NO: 45237 - DNA, 25 bp, Saccharomyces pastorianus
ttattgagcacccagaatttcccga

SEQ ID NO: 45238 - DNA, 25 bp, Saccharomyces pastorianus
taacgttgctacttgggactaccta

SEQ ID NO: 45239 - DNA, 25 bp, Saccharomyces pastorianus
gaaatgatttttccacccggtgtct

SEQ ID NO: 45240 - DNA, 25 bp, Saccharomyces pastorianus
aatggcctctttcgtaaacactgga

SEQ ID NO: 45241 - DNA, 25 bp, Saccharomyces pastorianus
gacacctgaactaattgcccgttgg

SEQ ID NO: 45242 - DNA, 25 bp, Saccharomyces pastorianus
ttgtggtacccattctttagagccc

SEQ ID NO: 45243 - DNA, 25 bp, Saccharomyces pastorianus
gagatatttcttattgcccacctta

SEQ ID NO: 45244 - DNA, 25 bp, Saccharomyces pastorianus
aacaacgtcgctgggatgccattta

SEQ ID NO: 45245 - DNA, 25 bp, Saccharomyces pastorianus
acgagaagttccacgacgaggcgaa

SEQ ID NO: 45246 - DNA, 25 bp, Saccharomyces pastorianus
gacgatttcatgtactccaagcacg

SEQ ID NO: 45247 - DNA, 25 bp, Saccharomyces pastorianus
tttgctcacgtgctcccagaggaaa

SEQ ID NO: 45248 - DNA, 25 bp, Saccharomyces pastorianus
ttcgaactctactacggacactatc

SEQ ID NO: 45249 - DNA, 25 bp, Saccharomyces pastorianus
gaatcggttgcgttggatttcacct

SEQ ID NO: 45250 - DNA, 25 bp, Saccharomyces pastorianus
gaggcgaacaagaccaacttcccag

SEQ ID NO: 45251 - DNA, 25 bp, Saccharomyces pastorianus
agaccactccgtaagattcactatc

SEQ ID NO: 45252 - DNA, 25 bp, Saccharomyces pastorianus
tgaaacctggatgtacgccttcgac

SEQ ID NO: 45253 - DNA, 25 bp, Saccharomyces pastorianus
gagcccttccagctgaaaatctact

SEQ ID NO: 45254 - DNA, 25 bp, Saccharomyces pastorianus
agagctacgctttgccaagcaagaa

SEQ ID NO: 45255 - DNA, 25 bp, Saccharomyces pastorianus
atatcgctggaaatcctcaccgagc

SEQ ID NO: 45256 - DNA, 25 bp, Saccharomyces pastorianus
atcgagcacttgaaggcgcgtctca

SEQ ID NO: 45257 - DNA, 25 bp, Saccharomyces pastorianus
gtcctggtcaacctggtgctgcact

SEQ ID NO: 45258 - DNA, 25 bp, Saccharomyces pastorianus
aacacgacaacgctagtccaaacgc

SEQ ID NO: 45259 - DNA, 25 bp, Saccharomyces pastorianus
tatctgcacgccttcgtcctcaagg

SEQ ID NO: 45260 - DNA, 25 bp, Saccharomyces pastorianus
caaacgcccaccctgaagacaaggg

SEQ ID NO: 45261 - DNA, 25 bp, Saccharomyces pastorianus
aacaagaaggactgcgccatcgagc

SEQ ID NO: 45262 - DNA, 25 bp, Saccharomyces pastorianus
acaagggccatcatcacaacaacaa

SEQ ID NO: 45263 - DNA, 25 bp, Saccharomyces pastorianus
tgcttttccccagtgctaaacacga

SEQ ID NO: 45264 - DNA, 25 bp, Saccharomyces pastorianus
ttctagaactgcaaaacccggtcgt

SEQ ID NO: 45265 - DNA, 25 bp, Saccharomyces pastorianus
tcaaggcccaggacgtggccagagt

SEQ ID NO: 45266 - DNA, 25 bp, Saccharomyces pastorianus
tggccagagtgtgccttctagaact

SEQ ID NO: 45267 - DNA, 25 bp, Saccharomyces pastorianus
gaagttcaagcagacagcgccgacg

SEQ ID NO: 45268 - DNA, 25 bp, Saccharomyces pastorianus
acaaggacgggttcctggcacggca

SEQ ID NO: 45269 - DNA, 25 bp, Saccharomyces pastorianus
tgcggcccaagctgacgacgctgga

SEQ ID NO: 45270 - DNA, 25 bp, Saccharomyces pastorianus
gaagctacaagtttgccggcgagac

SEQ ID NO: 45271 - DNA, 25 bp, Saccharomyces pastorianus
gacaagattctgatcgagcgaagct

SEQ ID NO: 45272 - DNA, 25 bp, Saccharomyces pastorianus
cagcaacaacagtttcggcgcccag

SEQ ID NO: 45273 - DNA, 25 bp, Saccharomyces pastorianus
aggagcacctgaacagtctgaagtt

SEQ ID NO: 45274 - DNA, 25 bp, Saccharomyces pastorianus
gcacagagtcgcagtcgcagtggca

SEQ ID NO: 45275 - DNA, 25 bp, Saccharomyces pastorianus
acaagagggccgtcctcagtgccag

SEQ ID NO: 45276 - DNA, 25 bp, Saccharomyces pastorianus
ctggagcagatcatctcaggcgggc

SEQ ID NO: 45277 - DNA, 25 bp, Saccharomyces pastorianus
agaagtcgcagctcgactgggccag

SEQ ID NO: 45278 - DNA, 25 bp, Saccharomyces pastorianus
gccgtgattctaggcaattagccag

SEQ ID NO: 45279 - DNA, 25 bp, Saccharomyces pastorianus
gaaccaatttcaagccttagttgtc

SEQ ID NO: 45280 - DNA, 25 bp, Saccharomyces pastorianus
ggctacatcttcacatatgccagtt

SEQ ID NO: 45281 - DNA, 25 bp, Saccharomyces pastorianus
cacatatgccagttgacggtagaat

SEQ ID NO: 45282 - DNA, 25 bp, Saccharomyces pastorianus
agttgtcaatgatattcctattcct

SEQ ID NO: 45283 - DNA, 25 bp, Saccharomyces pastorianus
gacgacgggtactgctgtcaaatat

SEQ ID NO: 45284 - DNA, 25 bp, Saccharomyces pastorianus
gaatttgctgctgaggctacatctt

SEQ ID NO: 45285 - DNA, 25 bp, Saccharomyces pastorianus
aattagccagattgacgacgggtac

SEQ ID NO: 45286 - DNA, 25 bp, Saccharomyces pastorianus
aacggcttccggtgcatttgatgaa

SEQ ID NO: 45287 - DNA, 25 bp, Saccharomyces pastorianus
tttactctcatccagcattacaagc

SEQ ID NO: 45288 - DNA, 25 bp, Saccharomyces pastorianus
attacaagctgcaacggcttccggt

SEQ ID NO: 45289 - DNA, 25 bp, Saccharomyces pastorianus
aagattcatcgccaatgccgatggg

SEQ ID NO: 45290 - DNA, 25 bp, Saccharomyces pastorianus
gccaaagattcatcgccaatgccga

SEQ ID NO: 45291 - DNA, 25 bp, Saccharomyces pastorianus
gatgcctccaattcagaaattttac

SEQ ID NO: 45292 - DNA, 25 bp, Saccharomyces pastorianus
tgaaattggccaaagattcatcgcc

SEQ ID NO: 45293 - DNA, 25 bp, Saccharomyces pastorianus
gcctccaattcagaaattttacaga

SEQ ID NO: 45294 - DNA, 25 bp, Saccharomyces pastorianus
gagatggatggatttgatccgtaaa

SEQ ID NO: 45295 - DNA, 25 bp, Saccharomyces pastorianus
gccaatgccgatggggctgctttaa

SEQ ID NO: 45296 - DNA, 25 bp, Saccharomyces pastorianus
gacgatgcctccaattcagaaattt

SEQ ID NO: 45297 - DNA, 25 bp, Saccharomyces pastorianus
gttgacgatgcctccaattcagaaa

SEQ ID NO: 45298 - DNA, 25 bp, Saccharomyces pastorianus
aattttacagagatggatggatttg

SEQ ID NO: 45299 - DNA, 25 bp, Saccharomyces pastorianus
tccgttgacgatgcctccaattcag

SEQ ID NO: 45300 - DNA, 25 bp, Saccharomyces pastorianus
gttaaccatggtatctcttcatctt

SEQ ID NO: 45301 - DNA, 25 bp, Saccharomyces pastorianus
gttggcatgattagagcctctctat

SEQ ID NO: 45302 - DNA, 25 bp, Saccharomyces pastorianus
gaaacatctggagccaaactcgcga

SEQ ID NO: 45303 - DNA, 25 bp, Saccharomyces pastorianus
ttttttgacaaagccctaaacgatg

SEQ ID NO: 45304 - DNA, 25 bp, Saccharomyces pastorianus
aaatcctctttgcattatggtagaa

SEQ ID NO: 45305 - DNA, 25 bp, Saccharomyces pastorianus
taagagctacgaggcctatcacatc

SEQ ID NO: 45306 - DNA, 25 bp, Saccharomyces pastorianus
caagtctcttatgtgaagtcctttt

SEQ ID NO: 45307 - DNA, 25 bp, Saccharomyces pastorianus
caaatgtactgtctggcatgatcgc

SEQ ID NO: 45308 - DNA, 25 bp, Saccharomyces pastorianus
accattcttcaacatcatcttagcc

SEQ ID NO: 45309 - DNA, 25 bp, Saccharomyces pastorianus
gccaaactcgcgatttcaaccatat

SEQ ID NO: 45310 - DNA, 25 bp, Saccharomyces pastorianus
tactttcatccaaatttatccgttg

SEQ ID NO: 45311 - DNA, 25 bp, Saccharomyces pastorianus
gagtcgtcggtgttatactaccaat

SEQ ID NO: 45312 - DNA, 25 bp, Saccharomyces pastorianus
tccaatgctaatccgctattctggg

SEQ ID NO: 45313 - DNA, 25 bp, Saccharomyces pastorianus
catgcatttgatcactgcgttcaag

SEQ ID NO: 45314 - DNA, 25 bp, Saccharomyces pastorianus
agaattgaactctgatcgtgtctcc

SEQ ID NO: 45315 - DNA, 25 bp, Saccharomyces pastorianus
gccaaaatgcctacacgtctaacat

SEQ ID NO: 45316 - DNA, 25 bp, Saccharomyces pastorianus
gtatcacagacgctttacatgtccc

SEQ ID NO: 45317 - DNA, 25 bp, Saccharomyces pastorianus
gggctgtatcatgacttgctcacta

SEQ ID NO: 45318 - DNA, 25 bp, Saccharomyces pastorianus
atgtcccaaactccaagacgtcaga

SEQ ID NO: 45319 - DNA, 25 bp, Saccharomyces pastorianus
gattccccatggtttcacaaagttt

SEQ ID NO: 45320 - DNA, 25 bp, Saccharomyces pastorianus
aattcgattagtccagattccccat

SEQ ID NO: 45321 - DNA, 25 bp, Saccharomyces pastorianus
gacttgctcactactccagaattga

SEQ ID NO: 45322 - DNA, 25 bp, Saccharomyces pastorianus
gatttctttagagctgtaaccagtg

SEQ ID NO: 45323 - DNA, 25 bp, Saccharomyces pastorianus
gagagtatctcggaccatatgtaca

SEQ ID NO: 45324 - DNA, 25 bp, Saccharomyces pastorianus
aaatccccgagtttgtgagaaatga

SEQ ID NO: 45325 - DNA, 25 bp, Saccharomyces pastorianus
ttagtaggcgatatcaccccagtcg

SEQ ID NO: 45326 - DNA, 25 bp, Saccharomyces pastorianus
gttttctcgactttggcatcgttga

SEQ ID NO: 45327 - DNA, 25 bp, Saccharomyces pastorianus
atcactatgctcatcaaggacccga

SEQ ID NO: 45328 - DNA, 25 bp, Saccharomyces pastorianus
aatgtgtccgaatcgcactagtaca

SEQ ID NO: 45329 - DNA, 25 bp, Saccharomyces pastorianus
gtacacgatattgccgaatccttag

SEQ ID NO: 45330 - DNA, 25 bp, Saccharomyces pastorianus
gatgaccttgtcatacagcgccaag

SEQ ID NO: 45331 - DNA, 25 bp, Saccharomyces pastorianus
gagaaatgagctttccaaaccccac

SEQ ID NO: 45332 - DNA, 25 bp, Saccharomyces pastorianus
aacaccgtcgtgaatgggaaactat

SEQ ID NO: 45333 - DNA, 25 bp, Saccharomyces pastorianus
gggcgtatctctagcgctgtggaaa

SEQ ID NO: 45334 - DNA, 25 bp, Saccharomyces pastorianus
gaagagccaccgaaagcttttttca

SEQ ID NO: 45335 - DNA, 25 bp, Saccharomyces pastorianus
gacacgtactgttacttcgctggta

SEQ ID NO: 45336 - DNA, 25 bp, Saccharomyces pastorianus
tctgctgttttgatcattccattct

SEQ ID NO: 45337 - DNA, 25 bp, Saccharomyces pastorianus
gaagacatgccataggcgctattat

SEQ ID NO: 45338 - DNA, 25 bp, Saccharomyces pastorianus
taacgctggtatggtttggccccat

SEQ ID NO: 45339 - DNA, 25 bp, Saccharomyces pastorianus
gaaatggaaccgctggcctgctaca

SEQ ID NO: 45340 - DNA, 25 bp, Saccharomyces pastorianus
aaatttcatttattcctgtccacag

SEQ ID NO: 45341 - DNA, 25 bp, Saccharomyces pastorianus
agttattcaagttggtgccctgtcc

SEQ ID NO: 45342 - DNA, 25 bp, Saccharomyces pastorianus
ttctgcatgggtattctagcgctca

SEQ ID NO: 45343 - DNA, 25 bp, Saccharomyces pastorianus
atgctcttgttattcattcctcaga

SEQ ID NO: 45344 - DNA, 25 bp, Saccharomyces pastorianus
atttggtatagcagggtactttgct

SEQ ID NO: 45345 - DNA, 25 bp, Saccharomyces pastorianus
atgttgcggcttctatcattggtac

SEQ ID NO: 45346 - DNA, 25 bp, Saccharomyces pastorianus
ttacaaaaaccagggtccttctgcg

SEQ ID NO: 45347 - DNA, 25 bp, Saccharomyces pastorianus
cacatgcttaatctatttttacaaa

SEQ ID NO: 45348 - DNA, 25 bp, Saccharomyces pastorianus
gggtactttgctacagatatgctaa

SEQ ID NO: 45349 - DNA, 25 bp, Saccharomyces pastorianus
ttggtactggtcacatgcttaatct

SEQ ID NO: 45350 - DNA, 25 bp, Saccharomyces pastorianus
tgtcgctgccatgggatttggtata

SEQ ID NO: 45351 - DNA, 25 bp, Saccharomyces pastorianus
gcttctatcattggtactggtcaca

SEQ ID NO: 45352 - DNA, 25 bp, Saccharomyces pastorianus
gcggcttctatcattggtactggtc

SEQ ID NO: 45353 - DNA, 25 bp, Saccharomyces pastorianus
tgcgcttgtcgctgccatgggattt

SEQ ID NO: 45354 - DNA, 25 bp, Saccharomyces pastorianus
aaaaccagggtccttctgcgcttgt

SEQ ID NO: 45355 - DNA, 25 bp, Saccharomyces pastorianus
ggtgctgataagatctcaatcggta

SEQ ID NO: 45356 - DNA, 25 bp, Saccharomyces pastorianus
agtcatcgcttcaagtggtgctggt

SEQ ID NO: 45357 - DNA, 25 bp, Saccharomyces pastorianus
agactggtgcagacgcttgtttagg

SEQ ID NO: 45358 - DNA, 25 bp, Saccharomyces pastorianus
gcagtcgttatttcggtggatccca

SEQ ID NO: 45359 - DNA, 25 bp, Saccharomyces pastorianus
gcgcattttgaggaggcttttctga

SEQ ID NO: 45360 - DNA, 25 bp, Saccharomyces pastorianus
tttaggtgcgggtatgttccataga

SEQ ID NO: 45361 - DNA, 25 bp, Saccharomyces pastorianus
aagtggtgctggtgttcctgcgcat

SEQ ID NO: 45362 - DNA, 25 bp, Saccharomyces pastorianus
cttgcgaagccctaggtgctggtga

SEQ ID NO: 45363 - DNA, 25 bp, Saccharomyces pastorianus
gcagtcagaattccagtcatcgctt

SEQ ID NO: 45364 - DNA, 25 bp, Saccharomyces pastorianus
aatcggtacagatgcagtttacgct

SEQ ID NO: 45365 - DNA, 25 bp, Saccharomyces pastorianus
aggatccctgctttagaagtggcaa

SEQ ID NO: 45366 - DNA, 25 bp, Saccharomyces pastorianus
tgaccaccaccagtgaccaaatatt

SEQ ID NO: 45367 - DNA, 25 bp, Saccharomyces pastorianus
gattgcgccaagatcaggcctagca

SEQ ID NO: 45368 - DNA, 25 bp, Saccharomyces pastorianus
gaagatccaattacgctcagcatat

SEQ ID NO: 45369 - DNA, 25 bp, Saccharomyces pastorianus
aggatatttccattcccgccatggg

SEQ ID NO: 45370 - DNA, 25 bp, Saccharomyces pastorianus
ccactgctgcgggatacgatatcta

SEQ ID NO: 45371 - DNA, 25 bp, Saccharomyces pastorianus
gatatatcatttaccgtaccaaccg

SEQ ID NO: 45372 - DNA, 25 bp, Saccharomyces pastorianus
gatttcatataacacaccaagccaa

SEQ ID NO: 45373 - DNA, 25 bp, Saccharomyces pastorianus
atacgatatctacgcatcccaggat

SEQ ID NO: 45374 - DNA, 25 bp, Saccharomyces pastorianus
acctacggtaggattgcgccaagat

SEQ ID NO: 45375 - DNA, 25 bp, Saccharomyces pastorianus
gcatggtccccactgatatatcatt

SEQ ID NO: 45376 - DNA, 25 bp, Saccharomyces pastorianus
agcatatgcaactgtgcccaccaag

SEQ ID NO: 45377 - DNA, 25 bp, Saccharomyces pastorianus
gttcaagatttgttgagcctgacta

SEQ ID NO: 45378 - DNA, 25 bp, Saccharomyces pastorianus
actggcagtgtcatgatggtgaaca

SEQ ID NO: 45379 - DNA, 25 bp, Saccharomyces pastorianus
agatggtttgtattcgcagtcgtat

SEQ ID NO: 45380 - DNA, 25 bp, Saccharomyces pastorianus
ataatgattgtaattggcccgtatt

SEQ ID NO: 45381 - DNA, 25 bp, Saccharomyces pastorianus
gcacaagagaactcggaactcgcga

SEQ ID NO: 45382 - DNA, 25 bp, Saccharomyces pastorianus
gaatgagcaatcaagcactttatga

SEQ ID NO: 45383 - DNA, 25 bp, Saccharomyces pastorianus
agaccatgcagctgatcaaaaacgt

SEQ ID NO: 45384 - DNA, 25 bp, Saccharomyces pastorianus
ggaactcgcgatagccactggcagt

SEQ ID NO: 45385 - DNA, 25 bp, Saccharomyces pastorianus
gatgacgatgactcgtttgcacaag

SEQ ID NO: 45386 - DNA, 25 bp, Saccharomyces pastorianus
gatactgtccgtgaagcttgcagaa

SEQ ID NO: 45387 - DNA, 25 bp, Saccharomyces pastorianus
ggtgaacaaccagaccatgcagctg

SEQ ID NO: 45388 - DNA, 25 bp, Saccharomyces pastorianus
ttttcagagctgataaacagctggt

SEQ ID NO: 45389 - DNA, 25 bp, Saccharomyces pastorianus
gctgataaacagctggttaaatttc

SEQ ID NO: 45390 - DNA, 25 bp, Saccharomyces pastorianus
acgaggctgccgacagaggtttgtt

SEQ ID NO: 45391 - DNA, 25 bp, Saccharomyces pastorianus
ggctgccgacagaggtttgtttttg

SEQ ID NO: 45392 - DNA, 25 bp, Saccharomyces pastorianus
agattttagacgaggctgccgacag

SEQ ID NO: 45393 - DNA, 25 bp, Saccharomyces pastorianus
caaacgaattattatcgagaggaac

SEQ ID NO: 45394 - DNA, 25 bp, Saccharomyces pastorianus
gaggctgccgacagaggtttgtttt

SEQ ID NO: 45395 - DNA, 25 bp, Saccharomyces pastorianus
ttagacgaggctgccgacagaggtt

SEQ ID NO: 45396 - DNA, 25 bp, Saccharomyces pastorianus
gccgacagaggtttgtttttggaag

SEQ ID NO: 45397 - DNA, 25 bp, Saccharomyces pastorianus
gaaaagattttagacgaggctgccg

SEQ ID NO: 45398 - DNA, 25 bp, Saccharomyces pastorianus
cagctggttaaatttcaaacgaatt

SEQ ID NO: 45399 - DNA, 25 bp, Saccharomyces pastorianus
tcaagtgtcattcttttgccacaaa

SEQ ID NO: 45400 - DNA, 25 bp, Saccharomyces pastorianus
gatccctctttggtccatacgataa

SEQ ID NO: 45401 - DNA, 25 bp, Saccharomyces pastorianus
gcacgatacgtttgcattccatatt

SEQ ID NO: 45402 - DNA, 25 bp, Saccharomyces pastorianus
ttcatatgcgaatagctggcccgat

SEQ ID NO: 45403 - DNA, 25 bp, Saccharomyces pastorianus
gttccctaacctgtatcttatgaag

SEQ ID NO: 45404 - DNA, 25 bp, Saccharomyces pastorianus
atctcttacgatgttggatccctct

SEQ ID NO: 45405 - DNA, 25 bp, Saccharomyces pastorianus
gtaccgccagcatattattcctata

SEQ ID NO: 45406 - DNA, 25 bp, Saccharomyces pastorianus
gtttctaacatgtgtaccgccagca

SEQ ID NO: 45407 - DNA, 25 bp, Saccharomyces pastorianus
ctggcccgatttagcaaacaagcat

SEQ ID NO: 45408 - DNA, 25 bp, Saccharomyces pastorianus
ggattacctaccgtttgcaaccatc

SEQ ID NO: 45409 - DNA, 25 bp, Saccharomyces pastorianus
gaatactcacttaaagctcgtttct

SEQ ID NO: 45410 - DNA, 25 bp, Saccharomyces pastorianus
attgccccagaaaacccggatgata

SEQ ID NO: 45411 - DNA, 25 bp, Saccharomyces pastorianus
taccaaaggcgctagcttcagagat

SEQ ID NO: 45412 - DNA, 25 bp, Saccharomyces pastorianus
atagtgcgccagtgtatttacgtca

SEQ ID NO: 45413 - DNA, 25 bp, Saccharomyces pastorianus
atgccacccggtgtcctgaaaaatt

SEQ ID NO: 45414 - DNA, 25 bp, Saccharomyces pastorianus
ttgaaggctctctgtataatctggg

SEQ ID NO: 45415 - DNA, 25 bp, Saccharomyces pastorianus
aatctacccgatgcacaatattgga

SEQ ID NO: 45416 - DNA, 25 bp, Saccharomyces pastorianus
aaagacgtttttcgcatcactaccg

SEQ ID NO: 45417 - DNA, 25 bp, Saccharomyces pastorianus
actttaagggctctcgtgtttcatt

SEQ ID NO: 45418 - DNA, 25 bp, Saccharomyces pastorianus
cgttcggtgttccattagagtcatt

SEQ ID NO: 45419 - DNA, 25 bp, Saccharomyces pastorianus
aaggatccttctaatgtttctataa

SEQ ID NO: 45420 - DNA, 25 bp, Saccharomyces pastorianus
agatacggttcctgcgatagtgcgc

SEQ ID NO: 45421 - DNA, 25 bp, Saccharomyces pastorianus
acgccagaaatcaacaaggtcctaa

SEQ ID NO: 45422 - DNA, 25 bp, Saccharomyces pastorianus
acaagcatttcttcaacgttgatgg

SEQ ID NO: 45423 - DNA, 25 bp, Saccharomyces pastorianus
gacctgcgaagagtttatgaagtac

SEQ ID NO: 45424 - DNA, 25 bp, Saccharomyces pastorianus
aatggtgctgttgattcggtgcgcc

SEQ ID NO: 45425 - DNA, 25 bp, Saccharomyces pastorianus
cacttccggaagtgcgaaagtttcg

SEQ ID NO: 45426 - DNA, 25 bp, Saccharomyces pastorianus
gtgcgcctgttcgatacgccagaaa

SEQ ID NO: 45427 - DNA, 25 bp, Saccharomyces pastorianus
aagtttcgcaagacaatggtgctgt

SEQ ID NO: 45428 - DNA, 25 bp, Saccharomyces pastorianus
gaagcaatcgttgttgacctgcgaa

SEQ ID NO: 45429 - DNA, 25 bp, Saccharomyces pastorianus
gaacacgtccaggagctatccaaac

SEQ ID NO: 45430 - DNA, 25 bp, Saccharomyces pastorianus
gtacgtcttcgaagaagaacacgtc

SEQ ID NO: 45431 - DNA, 25 bp, Saccharomyces pastorianus
aggagatcagtcgacacttccggaa

SEQ ID NO: 45432 - DNA, 25 bp, Saccharomyces pastorianus
attgaagcaggccatgtccccagaa

SEQ ID NO: 45433 - DNA, 25 bp, Saccharomyces pastorianus
atctaccgaagtggctgatttgtcc

SEQ ID NO: 45434 - DNA, 25 bp, Saccharomyces pastorianus
ggtgcccgtgtggaaactattttga

SEQ ID NO: 45435 - DNA, 25 bp, Saccharomyces pastorianus
aagagttctctcaagtggccaagta

SEQ ID NO: 45436 - DNA, 25 bp, Saccharomyces pastorianus
accacttgatcgttattgacctgtc

SEQ ID NO: 45437 - DNA, 25 bp, Saccharomyces pastorianus
agtactccagtcgatggtgcccgtg

SEQ ID NO: 45438 - DNA, 25 bp, Saccharomyces pastorianus
agtggccaagtacatcgattccgcg

SEQ ID NO: 45439 - DNA, 25 bp, Saccharomyces pastorianus
gattccgcggttaaactagctgaaa

SEQ ID NO: 45440 - DNA, 25 bp, Saccharomyces pastorianus
accattggtgcgatggctgtggcat

SEQ ID NO: 45441 - DNA, 25 bp, Saccharomyces pastorianus
tggtcctcataaccacaccattggt

SEQ ID NO: 45442 - DNA, 25 bp, Saccharomyces pastorianus
tattgacctgtctagtactccagtc

SEQ ID NO: 45443 - DNA, 25 bp, Saccharomyces pastorianus
aggtgcagcgttcgtcaccaagacg

SEQ ID NO: 45444 - DNA, 25 bp, Saccharomyces pastorianus
tcagcgctaagaccggatacaattt

SEQ ID NO: 45445 - DNA, 25 bp, Saccharomyces pastorianus
cgctataaatcactcgtaccgatgt

SEQ ID NO: 45446 - DNA, 25 bp, Saccharomyces pastorianus
aaacgcaggttattctggtgggcaa

SEQ ID NO: 45447 - DNA, 25 bp, Saccharomyces pastorianus
agtttcctgaaaagcatgcggccac

SEQ ID NO: 45448 - DNA, 25 bp, Saccharomyces pastorianus
aaggtgtaccgtatgtttccgtcag

SEQ ID NO: 45449 - DNA, 25 bp, Saccharomyces pastorianus
gtgtgcactgacatggttccaagat

SEQ ID NO: 45450 - DNA, 25 bp, Saccharomyces pastorianus
tattaccgggatgccaatattgccc

SEQ ID NO: 45451 - DNA, 25 bp, Saccharomyces pastorianus
gtttctactagcgacacatcaatgg

SEQ ID NO: 45452 - DNA, 25 bp, Saccharomyces pastorianus
attgccctgcatgtttttgaattaa

SEQ ID NO: 45453 - DNA, 25 bp, Saccharomyces pastorianus
aaacaatgcggccagtcttcagtgt

SEQ ID NO: 45454 - DNA, 25 bp, Saccharomyces pastorianus
gttttcttttcaagcaacgcctgcc

SEQ ID NO: 45455 - DNA, 25 bp, Saccharomyces pastorianus
ggcaatctccagtagtttcgttttc

SEQ ID NO: 45456 - DNA, 25 bp, Saccharomyces pastorianus
agttccttcttggtaacaggcttct

SEQ ID NO: 45457 - DNA, 25 bp, Saccharomyces pastorianus
atgttctccaacatattagccctgg

SEQ ID NO: 45458 - DNA, 25 bp, Saccharomyces pastorianus
ttggtaacaggcttctctttcccag

SEQ ID NO: 45459 - DNA, 25 bp, Saccharomyces pastorianus
caatctccagtagtttcgttttctt

SEQ ID NO: 45460 - DNA, 25 bp, Saccharomyces pastorianus
gcctgcctctctcttcttttcagtt

SEQ ID NO: 45461 - DNA, 25 bp, Saccharomyces pastorianus
ttcattgctattagcagctgcagca

SEQ ID NO: 45462 - DNA, 25 bp, Saccharomyces pastorianus
attagccctggcaatctccagtagt

SEQ ID NO: 45463 - DNA, 25 bp, Saccharomyces pastorianus
tcttcttttcagttccttcttggta

SEQ ID NO: 45464 - DNA, 25 bp, Saccharomyces pastorianus
tttcccagcgacttcattgctatta

SEQ ID NO: 45465 - DNA, 25 bp, Saccharomyces pastorianus
ggtcaattcttcaggctcctcatct

SEQ ID NO: 45466 - DNA, 25 bp, Saccharomyces pastorianus
tcatcttccttgacttccttctttt

SEQ ID NO: 45467 - DNA, 25 bp, Saccharomyces pastorianus
tattacgcagtttctgttccatcaa

SEQ ID NO: 45468 - DNA, 25 bp, Saccharomyces pastorianus
tgttccatcaatctttccgccattt

SEQ ID NO: 45469 - DNA, 25 bp, Saccharomyces pastorianus
tccttcttttccttagtctcttctt

SEQ ID NO: 45470 - DNA, 25 bp, Saccharomyces pastorianus
gtccactttattacgcagtttctgt

SEQ ID NO: 45471 - DNA, 25 bp, Saccharomyces pastorianus
acgcagtttctgttccatcaatctt

SEQ ID NO: 45472 - DNA, 25 bp, Saccharomyces pastorianus
atgtccactttattacgcagtttct

SEQ ID NO: 45473 - DNA, 25 bp, Saccharomyces pastorianus
aattcttcaggctcctcatcttcct

SEQ ID NO: 45474 - DNA, 25 bp, Saccharomyces pastorianus
gcagtttctgttccatcaatctttc

SEQ ID NO: 45475 - DNA, 25 bp, Saccharomyces pastorianus
agtttctgttccatcaatctttccg

SEQ ID NO: 45476 - DNA, 25 bp, Saccharomyces pastorianus
aatagccggcgatcacacgaaggaa

SEQ ID NO: 45477 - DNA, 25 bp, Saccharomyces pastorianus
agtcctccaaagctaccacgagaag

SEQ ID NO: 45478 - DNA, 25 bp, Saccharomyces pastorianus
atacctgagttcgaaggcgacgtta

SEQ ID NO: 45479 - DNA, 25 bp, Saccharomyces pastorianus
tgacattgggtcattctcacctgag

SEQ ID NO: 45480 - DNA, 25 bp, Saccharomyces pastorianus
taaactcgccacttttgaccaagaa

SEQ ID NO: 45481 - DNA, 25 bp, Saccharomyces pastorianus
aagcaggatcccttgaggcatggag

SEQ ID NO: 45482 - DNA, 25 bp, Saccharomyces pastorianus
ggcgacgttaatcccaagaccggtg

SEQ ID NO: 45483 - DNA, 25 bp, Saccharomyces pastorianus
gcgttgttccgtggaaagacaccct

SEQ ID NO: 45484 - DNA, 25 bp, Saccharomyces pastorianus
aagacaccctgcatggcggttagaa

SEQ ID NO: 45485 - DNA, 25 bp, Saccharomyces pastorianus
gaggccatagaccagtacaacgaac

SEQ ID NO: 45486 - DNA, 25 bp, Saccharomyces pastorianus
gagaaactgcagaggatcgcctcct

SEQ ID NO: 45487 - DNA, 25 bp, Saccharomyces pastorianus
gatctggttgtaaaccgattccgta

SEQ ID NO: 45488 - DNA, 25 bp, Saccharomyces pastorianus
aagcgttgacgagatttgcatatac

SEQ ID NO: 45489 - DNA, 25 bp, Saccharomyces pastorianus
gagcattctctaagaaccgcttgtt

SEQ ID NO: 45490 - DNA, 25 bp, Saccharomyces pastorianus
gatgagtttgctttcttcaagacta

SEQ ID NO: 45491 - DNA, 25 bp, Saccharomyces pastorianus
gattccgtatcagcggttacagtat

SEQ ID NO: 45492 - DNA, 25 bp, Saccharomyces pastorianus
ggaagaatactccacggcgattaat

SEQ ID NO: 45493 - DNA, 25 bp, Saccharomyces pastorianus
agaaccgcttgttgcagttatttgc

SEQ ID NO: 45494 - DNA, 25 bp, Saccharomyces pastorianus
ggttacaattgatcaatccgcagta

SEQ ID NO: 45495 - DNA, 25 bp, Saccharomyces pastorianus
cgatgggagcgctaatactattgta

SEQ ID NO: 45496 - DNA, 25 bp, Saccharomyces pastorianus
ttatccagacgtcagagcattctct

SEQ ID NO: 45497 - DNA, 25 bp, Saccharomyces pastorianus
atttgcagagatttcccggattgac

SEQ ID NO: 45498 - DNA, 25 bp, Saccharomyces pastorianus
ttagggctcggtccttctgaaagaa

SEQ ID NO: 45499 - DNA, 25 bp, Saccharomyces pastorianus
aggaatatcaaggtggtcaagccca

SEQ ID NO: 45500 - DNA, 25 bp, Saccharomyces pastorianus
aagtggtgactaccataccgtcgcg

SEQ ID NO: 45501 - DNA, 25 bp, Saccharomyces pastorianus
gaagtatcaccatgggttgagccaa

SEQ ID NO: 45502 - DNA, 25 bp, Saccharomyces pastorianus
ttgccgccttgatagtatttactga

SEQ ID NO: 45503 - DNA, 25 bp, Saccharomyces pastorianus
agattaacgtctgttttgccgcctt

SEQ ID NO: 45504 - DNA, 25 bp, Saccharomyces pastorianus
tgagccaagtggtagatctgaacat

SEQ ID NO: 45505 - DNA, 25 bp, Saccharomyces pastorianus
actgatacccattgttatactttga

SEQ ID NO: 45506 - DNA, 25 bp, Saccharomyces pastorianus
tatatccgtggcaagtggtgactac

SEQ ID NO: 45507 - DNA, 25 bp, Saccharomyces pastorianus
aagcccaccaaaatagagttacctg

SEQ ID NO: 45508 - DNA, 25 bp, Saccharomyces pastorianus
gtcgcgctaactgaatctggtcatt

SEQ ID NO: 45509 - DNA, 25 bp, Saccharomyces pastorianus
aacggcatccctgcaggcggtattg

SEQ ID NO: 45510 - DNA, 25 bp, Saccharomyces pastorianus
atgtgacgacgtttccaacctatct

SEQ ID NO: 45511 - DNA, 25 bp, Saccharomyces pastorianus
acctatcttgggaagctttcgtcac

SEQ ID NO: 45512 - DNA, 25 bp, Saccharomyces pastorianus
agaaggtctgctaggctccaacttt

SEQ ID NO: 45513 - DNA, 25 bp, Saccharomyces pastorianus
acaccttggttccatttgacggcag

SEQ ID NO: 45514 - DNA, 25 bp, Saccharomyces pastorianus
atcacgacttgaactacaccttggt

SEQ ID NO: 45515 - DNA, 25 bp, Saccharomyces pastorianus
aacactaagttgatcgcccattccg

SEQ ID NO: 45516 - DNA, 25 bp, Saccharomyces pastorianus
gctccaacttttacgcttacaactt

SEQ ID NO: 45517 - DNA, 25 bp, Saccharomyces pastorianus
tccggtacaatctcactactgaacg

SEQ ID NO: 45518 - DNA, 25 bp, Saccharomyces pastorianus
gtcggctttatcaacaacggcatcc

SEQ ID NO: 45519 - DNA, 25 bp, Saccharomyces pastorianus
gaagctttcgtcaccaacactaagt

SEQ ID NO: 45520 - DNA, 25 bp, Saccharomyces pastorianus
gggagattttgctgccggatatcgc

SEQ ID NO: 45521 - DNA, 25 bp, Saccharomyces pastorianus
gacgtgggaccttcagtggaatcat

SEQ ID NO: 45522 - DNA, 25 bp, Saccharomyces pastorianus
agtagctccccatggtagtgaccgg

SEQ ID NO: 45523 - DNA, 25 bp, Saccharomyces pastorianus
atattcgcgctggtgtaactattcc

SEQ ID NO: 45524 - DNA, 25 bp, Saccharomyces pastorianus
gggaacgcttcattgttaccatcag

SEQ ID NO: 45525 - DNA, 25 bp, Saccharomyces pastorianus
tggctccctgaagtccagattgaat

SEQ ID NO: 45526 - DNA, 25 bp, Saccharomyces pastorianus
ggtcattcgctattactttctatca

SEQ ID NO: 45527 - DNA, 25 bp, Saccharomyces pastorianus
gaaagacagttcctgtacctactcc

SEQ ID NO: 45528 - DNA, 25 bp, Saccharomyces pastorianus
agtaccaagtactctaatgcccggc

SEQ ID NO: 45529 - DNA, 25 bp, Saccharomyces pastorianus
taactattccgacaggtgcgaaccc

SEQ ID NO: 45530 - DNA, 25 bp, Saccharomyces pastorianus
cagtatgtccatgaacggtgctcat

SEQ ID NO: 45531 - DNA, 25 bp, Saccharomyces pastorianus
gcagactgcccaaactcaactagaa

SEQ ID NO: 45532 - DNA, 25 bp, Saccharomyces pastorianus
aggcaacttttggttcagcagcaac

SEQ ID NO: 45533 - DNA, 25 bp, Saccharomyces pastorianus
tagtggatgctatcaccgtggcaca

SEQ ID NO: 45534 - DNA, 25 bp, Saccharomyces pastorianus
gcaacaatcacagtccatggctagt

SEQ ID NO: 45535 - DNA, 25 bp, Saccharomyces pastorianus
aattaatttgcctccccagattgct

SEQ ID NO: 45536 - DNA, 25 bp, Saccharomyces pastorianus
gattgaggcaacaggccatcgcaaa

SEQ ID NO: 45537 - DNA, 25 bp, Saccharomyces pastorianus
taatgagccgcctacaacaacaaca

SEQ ID NO: 45538 - DNA, 25 bp, Saccharomyces pastorianus
agattgctcagctacccttggctac

SEQ ID NO: 45539 - DNA, 25 bp, Saccharomyces pastorianus
atggctagtcaatctgcaacatcta

SEQ ID NO: 45540 - DNA, 25 bp, Saccharomyces pastorianus
cggcagcaacaatttaggcatcaag

SEQ ID NO: 45541 - DNA, 25 bp, Saccharomyces pastorianus
gtggcacaacaacaagttcaacgtc

SEQ ID NO: 45542 - DNA, 25 bp, Saccharomyces pastorianus
ggactagcccacctgtattaatggt

SEQ ID NO: 45543 - DNA, 25 bp, Saccharomyces pastorianus
tactgcgacatcgaccttgtatcta

SEQ ID NO: 45544 - DNA, 25 bp, Saccharomyces pastorianus
gttaactcctctttcagtttcgtag

SEQ ID NO: 45545 - DNA, 25 bp, Saccharomyces pastorianus
aattgtgcttggagattccaccgca

SEQ ID NO: 45546 - DNA, 25 bp, Saccharomyces pastorianus
tataactgcctacaatcactactct

SEQ ID NO: 45547 - DNA, 25 bp, Saccharomyces pastorianus
tcaccctaccattgttctttcaaat

SEQ ID NO: 45548 - DNA, 25 bp, Saccharomyces pastorianus
ggttttgccagctatgcatatctct

SEQ ID NO: 45549 - DNA, 25 bp, Saccharomyces pastorianus
accccaatcggtagccttataactg

SEQ ID NO: 45550 - DNA, 25 bp, Saccharomyces pastorianus
attgcgtcttacaatcccgtcattg

SEQ ID NO: 45551 - DNA, 25 bp, Saccharomyces pastorianus
ttgggtgctagcttttcctggacta

SEQ ID NO: 45552 - DNA, 25 bp, Saccharomyces pastorianus
ggacagggaatcacctttcctacaa

SEQ ID NO: 45553 - DNA, 25 bp, Saccharomyces pastorianus
acggctattcaaagtcttgtcgatt

SEQ ID NO: 45554 - DNA, 25 bp, Saccharomyces pastorianus
aaaatgccaccttcattgagtaccc

SEQ ID NO: 45555 - DNA, 25 bp, Saccharomyces pastorianus
tatggaaccctgtgtgctgcaactg

SEQ ID NO: 45556 - DNA, 25 bp, Saccharomyces pastorianus
ggatcgcatgagaagccgttactga

SEQ ID NO: 45557 - DNA, 25 bp, Saccharomyces pastorianus
aattgctggtcattctagttttcac

SEQ ID NO: 45558 - DNA, 25 bp, Saccharomyces pastorianus
cagacaggtcgagtttcattttgct

SEQ ID NO: 45559 - DNA, 25 bp, Saccharomyces pastorianus
caagttgcccaagtagactctacgg

SEQ ID NO: 45560 - DNA, 25 bp, Saccharomyces pastorianus
gaactgttcaagacactacgacatt

SEQ ID NO: 45561 - DNA, 25 bp, Saccharomyces pastorianus
gaccatggaacgatcctggcgagtg

SEQ ID NO: 45562 - DNA, 25 bp, Saccharomyces pastorianus
gcctagatttttctcaagttgccca

SEQ ID NO: 45563 - DNA, 25 bp, Saccharomyces pastorianus
taatgaggatccaccggtatcgaat

SEQ ID NO: 45564 - DNA, 25 bp, Saccharomyces pastorianus
tgtggacttgttactactggcctag

SEQ ID NO: 45565 - DNA, 25 bp, Saccharomyces pastorianus
tgtccctcaatccatgtcttatgca

SEQ ID NO: 45566 - DNA, 25 bp, Saccharomyces pastorianus
gatttctcttaatgctgttgctggt

SEQ ID NO: 45567 - DNA, 25 bp, Saccharomyces pastorianus
actgccctctgtttgctgtgtggac

SEQ ID NO: 45568 - DNA, 25 bp, Saccharomyces pastorianus
agtcggatgtgtgcttgtccctcaa

SEQ ID NO: 45569 - DNA, 25 bp, Saccharomyces pastorianus
aagttcctgctcttatgggctacaa

SEQ ID NO: 45570 - DNA, 25 bp, Saccharomyces pastorianus
tagtcgcaggagtcacagtcggatg

SEQ ID NO: 45571 - DNA, 25 bp, Saccharomyces pastorianus
actggcctaggtgtactgcgcttag

SEQ ID NO: 45572 - DNA, 25 bp, Saccharomyces pastorianus
ggtgcctttatctactctttatttg

SEQ ID NO: 45573 - DNA, 25 bp, Saccharomyces pastorianus
gtccagtcgctgttatgtcattgca

SEQ ID NO: 45574 - DNA, 25 bp, Saccharomyces pastorianus
ttacgggtcctattattgccactgc

SEQ ID NO: 45575 - DNA, 25 bp, Saccharomyces pastorianus
aagaagatcaggtccactctggaag

SEQ ID NO: 45576 - DNA, 25 bp, Saccharomyces pastorianus
gggactccaaagtacgagaacagat

SEQ ID NO: 45577 - DNA, 25 bp, Saccharomyces pastorianus
gtggtgttggcaagaagcagcaaaa

SEQ ID NO: 45578 - DNA, 25 bp, Saccharomyces pastorianus
tcaaggaccagatgagggactccaa

SEQ ID NO: 45579 - DNA, 25 bp, Saccharomyces pastorianus
gactaacgacaacatgctgaagcag

SEQ ID NO: 45580 - DNA, 25 bp, Saccharomyces pastorianus
ggcaagcaaacaagacctggacaac

SEQ ID NO: 45581 - DNA, 25 bp, Saccharomyces pastorianus
aagccgagggactggtcaaggacca

SEQ ID NO: 45582 - DNA, 25 bp, Saccharomyces pastorianus
caggtccactctggaagccgaggga

SEQ ID NO: 45583 - DNA, 25 bp, Saccharomyces pastorianus
aaaagaggccaatcagcactgctga

SEQ ID NO: 45584 - DNA, 25 bp, Saccharomyces pastorianus
aacaatgataccgacactgctaaat

SEQ ID NO: 45585 - DNA, 25 bp, Saccharomyces pastorianus
agcatgagaaagacgagccagggca

SEQ ID NO: 45586 - DNA, 25 bp, Saccharomyces pastorianus
gaaggacgtccttgtcatgtactac

SEQ ID NO: 45587 - DNA, 25 bp, Saccharomyces pastorianus
gaacttcttgaacggtgacgccact

SEQ ID NO: 45588 - DNA, 25 bp, Saccharomyces pastorianus
gacatggcccaggacttcaagtacg

SEQ ID NO: 45589 - DNA, 25 bp, Saccharomyces pastorianus
cgaaatcgacggtcaggccttgtac

SEQ ID NO: 45590 - DNA, 25 bp, Saccharomyces pastorianus
acctccgatgtcttgatcgctaaga

SEQ ID NO: 45591 - DNA, 25 bp, Saccharomyces pastorianus
atcgtcaagtcccaagatgtcttcg

SEQ ID NO: 45592 - DNA, 25 bp, Saccharomyces pastorianus
gattggccccaacctatttagaatt

SEQ ID NO: 45593 - DNA, 25 bp, Saccharomyces pastorianus
caaatccatcgaggccttggtcaag

SEQ ID NO: 45594 - DNA, 25 bp, Saccharomyces pastorianus
ggcgtcaccatcgaaggttacccaa

SEQ ID NO: 45595 - DNA, 25 bp, Saccharomyces pastorianus
gatgtcttcgaaacccaggaatcct

SEQ ID NO: 45596 - DNA, 25 bp, Saccharomyces pastorianus
agaactttggactccttgttcgact

SEQ ID NO: 45597 - DNA, 25 bp, Saccharomyces pastorianus
gttgccgaaggttctttggtcacca

SEQ ID NO: 45598 - DNA, 25 bp, Saccharomyces pastorianus
gagttgtcaatatgtccttcggcgg

SEQ ID NO: 45599 - DNA, 25 bp, Saccharomyces pastorianus
tgctccgttgtctttgatctctaaa

SEQ ID NO: 45600 - DNA, 25 bp, Saccharomyces pastorianus
ggaagaaccatctcctttagacaaa

SEQ ID NO: 45601 - DNA, 25 bp, Saccharomyces pastorianus
gacgagttcatgatatctttgccaa

SEQ ID NO: 45602 - DNA, 25 bp, Saccharomyces pastorianus
agtcggcgacgctttagacgagttc

SEQ ID NO: 45603 - DNA, 25 bp, Saccharomyces pastorianus
ggcggtgacgctaacttggtcttag

SEQ ID NO: 45604 - DNA, 25 bp, Saccharomyces pastorianus
ttatccagtccaaccggttctaatg

SEQ ID NO: 45605 - DNA, 25 bp, Saccharomyces pastorianus
ctgacactgtcgctgaaactgagga

SEQ ID NO: 45606 - DNA, 25 bp, Saccharomyces pastorianus
gacaaatatttcgttcgctccaaga

SEQ ID NO: 45607 - DNA, 25 bp, Saccharomyces pastorianus
atcactgaatccgttcctcaagaac

SEQ ID NO: 45608 - DNA, 25 bp, Saccharomyces pastorianus
gtccagttcatccagtcgttaatca

SEQ ID NO: 45609 - DNA, 25 bp, Saccharomyces pastorianus
gttctcaaggtgatggcccaggtca

SEQ ID NO: 45610 - DNA, 25 bp, Saccharomyces pastorianus
tcgttaatcaactactacctggtcc

SEQ ID NO: 45611 - DNA, 25 bp, Saccharomyces pastorianus
tagaccacacgctatttctggccga

SEQ ID NO: 45612 - DNA, 25 bp, Saccharomyces pastorianus
aacgatgcgtactacaccctgtatt

SEQ ID NO: 45613 - DNA, 25 bp, Saccharomyces pastorianus
acatggacgtgttcgtcttggacac

SEQ ID NO: 45614 - DNA, 25 bp, Saccharomyces pastorianus
tcagcgggatggacgatgttctcaa

SEQ ID NO: 45615 - DNA, 25 bp, Saccharomyces pastorianus
caaagttgtgcccatgtcttatgcc

SEQ ID NO: 45616 - DNA, 25 bp, Saccharomyces pastorianus
cgaaagagacctgcgggagcccaaa

SEQ ID NO: 45617 - DNA, 25 bp, Saccharomyces pastorianus
gagaccattggtgtcaagtttcctg

SEQ ID NO: 45618 - DNA, 25 bp, Saccharomyces pastorianus
ggttgacctacttcgggacaggcaa

SEQ ID NO: 45619 - DNA, 25 bp, Saccharomyces pastorianus
aagagttgcgtgaaaccggcgaatt

SEQ ID NO: 45620 - DNA, 25 bp, Saccharomyces pastorianus
actatcgatcacgtcaaggaactta

SEQ ID NO: 45621 - DNA, 25 bp, Saccharomyces pastorianus
gaaggaaattttcgttgcgtccaag

SEQ ID NO: 45622 - DNA, 25 bp, Saccharomyces pastorianus
tgcgtccaagacgtactgtccatac

SEQ ID NO: 45623 - DNA, 25 bp, Saccharomyces pastorianus
aaagtcctggtcctgcagctgaacg

SEQ ID NO: 45624 - DNA, 25 bp, Saccharomyces pastorianus
gcgtggatatccaggcagccttgta

SEQ ID NO: 45625 - DNA, 25 bp, Saccharomyces pastorianus
gcagcgttaaacactctgttccaga

SEQ ID NO: 45626 - DNA, 25 bp, Saccharomyces pastorianus
tgtccatactgccacgcagcgttaa

SEQ ID NO: 45627 - DNA, 25 bp, Saccharomyces pastorianus
gaacgtgccaaagtccaaagtcctg

SEQ ID NO: 45628 - DNA, 25 bp, Saccharomyces pastorianus
gggaacgacgacttgcaagagttgc

SEQ ID NO: 45629 - DNA, 25 bp, Saccharomyces pastorianus
gtgccaaacatctacatcaacggta

SEQ ID NO: 45630 - DNA, 25 bp, Saccharomyces pastorianus
tttctatgaagaggtctcccctggg

SEQ ID NO: 45631 - DNA, 25 bp, Saccharomyces pastorianus
gaatgatgggctgacacccttacag

SEQ ID NO: 45632 - DNA, 25 bp, Saccharomyces pastorianus
gtacctgcacaccaaggacactggg

SEQ ID NO: 45633 - DNA, 25 bp, Saccharomyces pastorianus
gtgacgagtccctgatgcctgcaag

SEQ ID NO: 45634 - DNA, 25 bp, Saccharomyces pastorianus
acaagttgatcaggtttcacgcccc

SEQ ID NO: 45635 - DNA, 25 bp, Saccharomyces pastorianus
ttcgacgctcgttgtggttggccag

SEQ ID NO: 45636 - DNA, 25 bp, Saccharomyces pastorianus
gtgctcaaggacaaggccaccgaaa

SEQ ID NO: 45637 - DNA, 25 bp, Saccharomyces pastorianus
acccttacagctgatggtgctcaag

SEQ ID NO: 45638 - DNA, 25 bp, Saccharomyces pastorianus
gtggttggccagctttctatgaaga

SEQ ID NO: 45639 - DNA, 25 bp, Saccharomyces pastorianus
tacgcaggactttcccagacagaag

SEQ ID NO: 45640 - DNA, 25 bp, Saccharomyces pastorianus
gacacgccgctatactcgagtaacg

SEQ ID NO: 45641 - DNA, 25 bp, Saccharomyces pastorianus
agtaagatgtacctgtcacgctcca

SEQ ID NO: 45642 - DNA, 25 bp, Saccharomyces pastorianus
aaaattctagccacccatactgatg

SEQ ID NO: 45643 - DNA, 25 bp, Saccharomyces pastorianus
atcgcccatcctggagtatcataat

SEQ ID NO: 45644 - DNA, 25 bp, Saccharomyces pastorianus
gggtaataccacaccggattcgcaa

SEQ ID NO: 45645 - DNA, 25 bp, Saccharomyces pastorianus
gaagtgcactccacgtaatggtcgt

SEQ ID NO: 45646 - DNA, 25 bp, Saccharomyces pastorianus
gtgatatacgggaccattggccaac

SEQ ID NO: 45647 - DNA, 25 bp, Saccharomyces pastorianus
aaggcacatcttatcgcatcagcaa

SEQ ID NO: 45648 - DNA, 25 bp, Saccharomyces pastorianus
gtaatggtcgtgtccacgtcagtat

SEQ ID NO: 45649 - DNA, 25 bp, Saccharomyces pastorianus
gtcaacgaccgtatcaatggcaata

SEQ ID NO: 45650 - DNA, 25 bp, Saccharomyces pastorianus
ataatactgccttacatccaacctg

SEQ ID NO: 45651 - DNA, 25 bp, Saccharomyces pastorianus
tcttgcaggatgagcgatcgcccat

SEQ ID NO: 45652 - DNA, 25 bp, Saccharomyces pastorianus
ggtctatcccaacttttcacatgga

SEQ ID NO: 45653 - DNA, 25 bp, Saccharomyces pastorianus
gtttgttcctaactttgtccgagca

SEQ ID NO: 45654 - DNA, 25 bp, Saccharomyces pastorianus
aaggtcttttcctacattgacagag

SEQ ID NO: 45655 - DNA, 25 bp, Saccharomyces pastorianus
gctccatttacgcttgtgtcatgat

SEQ ID NO: 45656 - DNA, 25 bp, Saccharomyces pastorianus
ggttgttagccatttccggtctatc

SEQ ID NO: 45657 - DNA, 25 bp, Saccharomyces pastorianus
tgccatttgtctatctcacgtcaga

SEQ ID NO: 45658 - DNA, 25 bp, Saccharomyces pastorianus
acaggtgttcacttggttgttagcc

SEQ ID NO: 45659 - DNA, 25 bp, Saccharomyces pastorianus
gccgatcctgattgcactatacgta

SEQ ID NO: 45660 - DNA, 25 bp, Saccharomyces pastorianus
ctttttcgagaactacctggccatg

SEQ ID NO: 45661 - DNA, 25 bp, Saccharomyces pastorianus
ttgattgctatgtgtgtctccgcat

SEQ ID NO: 45662 - DNA, 25 bp, Saccharomyces pastorianus
ttattggccaattctgggtcgccat

SEQ ID NO: 45663 - DNA, 25 bp, Saccharomyces pastorianus
tgtgaaacttccatccttaaactct

SEQ ID NO: 45664 - DNA, 25 bp, Saccharomyces pastorianus
gagccttccaataagtctttgccag

SEQ ID NO: 45665 - DNA, 25 bp, Saccharomyces pastorianus
gccagaagttgctactaacgtcgaa

SEQ ID NO: 45666 - DNA, 25 bp, Saccharomyces pastorianus
gagggcctgcataaattactggaag

SEQ ID NO: 45667 - DNA, 25 bp, Saccharomyces pastorianus
aatcctctaacgtttcattcctgaa

SEQ ID NO: 45668 - DNA, 25 bp, Saccharomyces pastorianus
atccttaagatccacgctttttgag

SEQ ID NO: 45669 - DNA, 25 bp, Saccharomyces pastorianus
gagagactctttgagggcctgcata

SEQ ID NO: 45670 - DNA, 25 bp, Saccharomyces pastorianus
atacacgtcaaaataccggccgaga

SEQ ID NO: 45671 - DNA, 25 bp, Saccharomyces pastorianus
aacaggctcaaccaaaactctaaag

SEQ ID NO: 45672 - DNA, 25 bp, Saccharomyces pastorianus
acgccagtggattgggtatttacca

SEQ ID NO: 45673 - DNA, 25 bp, Saccharomyces pastorianus
atttaccagagagagccttccaata

SEQ ID NO: 45674 - DNA, 25 bp, Saccharomyces pastorianus
atgattctgctaacttactttgcga

SEQ ID NO: 45675 - DNA, 25 bp, Saccharomyces pastorianus
atccaactactcgaatgattctgct

SEQ ID NO: 45676 - DNA, 25 bp, Saccharomyces pastorianus
aatagcttcatctgatttgacgaat

SEQ ID NO: 45677 - DNA, 25 bp, Saccharomyces pastorianus
gatacgtcaggataacctttatttt

SEQ ID NO: 45678 - DNA, 25 bp, Saccharomyces pastorianus
gtgctctatacgtacctttgacatt

SEQ ID NO: 45679 - DNA, 25 bp, Saccharomyces pastorianus
aatatgcttgtaaactgcctatgaa

SEQ ID NO: 45680 - DNA, 25 bp, Saccharomyces pastorianus
agctgcatgccaaatagatacgtca

SEQ ID NO: 45681 - DNA, 25 bp, Saccharomyces pastorianus
gagcaatgcgattcaatagcttcat

SEQ ID NO: 45682 - DNA, 25 bp, Saccharomyces pastorianus
tcaaagaacgcttttcctcattcac

SEQ ID NO: 45683 - DNA, 25 bp, Saccharomyces pastorianus
aagttcaggctcacttctatgaatc

SEQ ID NO: 45684 - DNA, 25 bp, Saccharomyces pastorianus
tgggccaaggttccaagctgcatgc

SEQ ID NO: 45685 - DNA, 25 bp, Saccharomyces pastorianus
gaaagggccaccgtccaggagttct

SEQ ID NO: 45686 - DNA, 25 bp, Saccharomyces pastorianus
tgctcaacgagctgtaccgcgaaga

SEQ ID NO: 45687 - DNA, 25 bp, Saccharomyces pastorianus
ggttccacgaaatggtcgcggtcga

SEQ ID NO: 45688 - DNA, 25 bp, Saccharomyces pastorianus
aaaccgacgggctcaaccagctgta

SEQ ID NO: 45689 - DNA, 25 bp, Saccharomyces pastorianus
agaatctgcagtccgtgctcaacga

SEQ ID NO: 45690 - DNA, 25 bp, Saccharomyces pastorianus
ggaacagaccatcgagcagaccatg

SEQ ID NO: 45691 - DNA, 25 bp, Saccharomyces pastorianus
gaggacgtcgacaccatagccgtgg

SEQ ID NO: 45692 - DNA, 25 bp, Saccharomyces pastorianus
aagacgtgcactacgtggcggacaa

SEQ ID NO: 45693 - DNA, 25 bp, Saccharomyces pastorianus
tgtaccagctggtcgccaaggacta

SEQ ID NO: 45694 - DNA, 25 bp, Saccharomyces pastorianus
tggacatggacaatacggatctctc

SEQ ID NO: 45695 - DNA, 25 bp, Saccharomyces pastorianus
atcatgcaagactcggtcgccaggt

SEQ ID NO: 45696 - DNA, 25 bp, Saccharomyces pastorianus
gtaggttatttgtaccgaccagtgc

SEQ ID NO: 45697 - DNA, 25 bp, Saccharomyces pastorianus
gtaccgaccagtgctttgttttata

SEQ ID NO: 45698 - DNA, 25 bp, Saccharomyces pastorianus
taacttacccttgaaggattcaggt

SEQ ID NO: 45699 - DNA, 25 bp, Saccharomyces pastorianus
gttcgtcttgatatcagttttggca

SEQ ID NO: 45700 - DNA, 25 bp, Saccharomyces pastorianus
gttcaactcaacacctttttgggtg

SEQ ID NO: 45701 - DNA, 25 bp, Saccharomyces pastorianus
ggtattttttacttagagcacataa

SEQ ID NO: 45702 - DNA, 25 bp, Saccharomyces pastorianus
gggctatcatcaaagttcgtcttga

SEQ ID NO: 45703 - DNA, 25 bp, Saccharomyces pastorianus
gtgttccatatctaacttacccttg

SEQ ID NO: 45704 - DNA, 25 bp, Saccharomyces pastorianus
taagattccgttcaactcaacacct

SEQ ID NO: 45705 - DNA, 25 bp, Saccharomyces pastorianus
attactctactggtcatactttgtc

SEQ ID NO: 45706 - DNA, 25 bp, Saccharomyces pastorianus
taaaagtttcaagtacattccgcaa

SEQ ID NO: 45707 - DNA, 25 bp, Saccharomyces pastorianus
ggtttatggactactccgtactatt

SEQ ID NO: 45708 - DNA, 25 bp, Saccharomyces pastorianus
agtgctcgcgatttccattttatct

SEQ ID NO: 45709 - DNA, 25 bp, Saccharomyces pastorianus
tttacctcaaaatttccccatctat

SEQ ID NO: 45710 - DNA, 25 bp, Saccharomyces pastorianus
attttatctgtcgtgtattgccata

SEQ ID NO: 45711 - DNA, 25 bp, Saccharomyces pastorianus
gtcctgacccaattttcgaagcgta

SEQ ID NO: 45712 - DNA, 25 bp, Saccharomyces pastorianus
gtgtggttatttctagtgctcgcga

SEQ ID NO: 45713 - DNA, 25 bp, Saccharomyces pastorianus
gcagatgctccggatgatgcagcta

SEQ ID NO: 45714 - DNA, 25 bp, Saccharomyces pastorianus
gcagctaggtctcatattttcagtc

SEQ ID NO: 45715 - DNA, 25 bp, Saccharomyces pastorianus
ggctcactttaaacctttcgtgtgg

SEQ ID NO: 45716 - DNA, 25 bp, Saccharomyces pastorianus
agactatatcactcttcctagcaac

SEQ ID NO: 45717 - DNA, 25 bp, Saccharomyces pastorianus
gtggttgttccttatttcatgtgtt

SEQ ID NO: 45718 - DNA, 25 bp, Saccharomyces pastorianus
gacgacttcgtccaacaaggacttg

SEQ ID NO: 45719 - DNA, 25 bp, Saccharomyces pastorianus
accagaagtggaactcttgacgact

SEQ ID NO: 45720 - DNA, 25 bp, Saccharomyces pastorianus
acaaggacttggtaccagcggcgaa

SEQ ID NO: 45721 - DNA, 25 bp, Saccharomyces pastorianus
ggcagcgaataattttctagattct

SEQ ID NO: 45722 - DNA, 25 bp, Saccharomyces pastorianus
tgatgacagtgttaccagaagtgga

SEQ ID NO: 45723 - DNA, 25 bp, Saccharomyces pastorianus
gcctttgcgacagtggcagcgaata

SEQ ID NO: 45724 - DNA, 25 bp, Saccharomyces pastorianus
gacttggtaccagcggcgaactttt

SEQ ID NO: 45725 - DNA, 25 bp, Saccharomyces pastorianus
ttagcctttgcgacagtggcagcga

SEQ ID NO: 45726 - DNA, 25 bp, Saccharomyces pastorianus
gacagtggcagcgaataattttcta

SEQ ID NO: 45727 - DNA, 25 bp, Saccharomyces pastorianus
agtggaactcttgacgacttcgtcc

SEQ ID NO: 45728 - DNA, 25 bp, Saccharomyces pastorianus
gacgaaatcgactggtaagacgact

SEQ ID NO: 45729 - DNA, 25 bp, Saccharomyces pastorianus
caaaattcccacactctgttttaga

SEQ ID NO: 45730 - DNA, 25 bp, Saccharomyces pastorianus
gtgtacaatgatcttttgctattat

SEQ ID NO: 45731 - DNA, 25 bp, Saccharomyces pastorianus
ggctcatcaagcatctttttaattt

SEQ ID NO: 45732 - DNA, 25 bp, Saccharomyces pastorianus
aataaggttatatcagcagaatctg

SEQ ID NO: 45733 - DNA, 25 bp, Saccharomyces pastorianus
gatgaaattccgtctgtgtacaatg

SEQ ID NO: 45734 - DNA, 25 bp, Saccharomyces pastorianus
attcttaaagaccagctacgttact

SEQ ID NO: 45735 - DNA, 25 bp, Saccharomyces pastorianus
gaaacgtgtgtccaaaccaggttcg

SEQ ID NO: 45736 - DNA, 25 bp, Saccharomyces pastorianus
gaccagctacgttacttaatagagt

SEQ ID NO: 45737 - DNA, 25 bp, Saccharomyces pastorianus
gaaggaaaactatggcgattcttta

SEQ ID NO: 45738 - DNA, 25 bp, Saccharomyces pastorianus
aaagttgaggtacaaatgcccaata

SEQ ID NO: 45739 - DNA, 25 bp, Saccharomyces pastorianus
gcaaaattggctcatcaagcatctt

SEQ ID NO: 45740 - DNA, 25 bp, Saccharomyces pastorianus
gtactcaaacacgtttctttcacgc

SEQ ID NO: 45741 - DNA, 25 bp, Saccharomyces pastorianus
cggtcgtattggctctgaatttgct

SEQ ID NO: 45742 - DNA, 25 bp, Saccharomyces pastorianus
atgtttctacgtactcaaacacgtt

SEQ ID NO: 45743 - DNA, 25 bp, Saccharomyces pastorianus
tccgccaacaacaaccgttacttga

SEQ ID NO: 45744 - DNA, 25 bp, Saccharomyces pastorianus
attggtacaatatcaccgtgttcaa

SEQ ID NO: 45745 - DNA, 25 bp, Saccharomyces pastorianus
tgaagtacagtattgcctctcagcc

SEQ ID NO: 45746 - DNA, 25 bp, Saccharomyces pastorianus
gagacggccaaaccaattggtacaa

SEQ ID NO: 45747 - DNA, 25 bp, Saccharomyces pastorianus
tgaatttgctgaacatacctccgcc

SEQ ID NO: 45748 - DNA, 25 bp, Saccharomyces pastorianus
tttctttcacgctaccgctaagaag

SEQ ID NO: 45749 - DNA, 25 bp, Saccharomyces pastorianus
aagatgtccatcgtcggtcgtattg

SEQ ID NO: 45750 - DNA, 25 bp, Saccharomyces pastorianus
cagtattgcctctcagccaagaaga

SEQ ID NO: 45751 - DNA, 25 bp, Saccharomyces pastorianus
cccaagatgtcgctgttaagtgtaa

SEQ ID NO: 45752 - DNA, 25 bp, Saccharomyces pastorianus
tgccgtccacgtcaaaatcagagct

SEQ ID NO: 45753 - DNA, 25 bp, Saccharomyces pastorianus
tagaaccaagactcctggtccaggt

SEQ ID NO: 45754 - DNA, 25 bp, Saccharomyces pastorianus
gtccacgtcaaaatcagagctactg

SEQ ID NO: 45755 - DNA, 25 bp, Saccharomyces pastorianus
ctgcccaagatgtcgctgttaagtg

SEQ ID NO: 45756 - DNA, 25 bp, Saccharomyces pastorianus
ggctgcccaagatgtcgctgttaag

SEQ ID NO: 45757 - DNA, 25 bp, Saccharomyces pastorianus
tgtcgctgttaagtgtaaggaagtt

SEQ ID NO: 45758 - DNA, 25 bp, Saccharomyces pastorianus
agttggtatcactgccgtccacgtc

SEQ ID NO: 45759 - DNA, 25 bp, Saccharomyces pastorianus
agagatgaatcttccccatacgctg

SEQ ID NO: 45760 - DNA, 25 bp, Saccharomyces pastorianus
gtatcactgccgtccacgtcaaaat

SEQ ID NO: 45761 - DNA, 25 bp, Saccharomyces pastorianus
tggtccaggtggtcaagctgctttg

SEQ ID NO: 45762 - DNA, 25 bp, Saccharomyces pastorianus
agctccatttgaactctcgtaacga

SEQ ID NO: 45763 - DNA, 25 bp, Saccharomyces pastorianus
aagaatgtcatatccgttttcaatt

SEQ ID NO: 45764 - DNA, 25 bp, Saccharomyces pastorianus
gatagcaatatctcaacacaccggg

SEQ ID NO: 45765 - DNA, 25 bp, Saccharomyces pastorianus
acatacctatcccagaaaacacaca

SEQ ID NO: 45766 - DNA, 25 bp, Saccharomyces pastorianus
attgcaagctctatcgaatttctag

SEQ ID NO: 45767 - DNA, 25 bp, Saccharomyces pastorianus
gaagtactgttagtcggtttcgaag

SEQ ID NO: 45768 - DNA, 25 bp, Saccharomyces pastorianus
tagcggcttagtctatgtctgggat

SEQ ID NO: 45769 - DNA, 25 bp, Saccharomyces pastorianus
atggcgccttaggacaccttgaaaa

SEQ ID NO: 45770 - DNA, 25 bp, Saccharomyces pastorianus
aacgaatgggcgatgaaattgctca

SEQ ID NO: 45771 - DNA, 25 bp, Saccharomyces pastorianus
ttgctcaaagagctttctacaggga

SEQ ID NO: 45772 - DNA, 25 bp, Saccharomyces pastorianus
actagacaccggttacagacagcat

SEQ ID NO: 45773 - DNA, 25 bp, Saccharomyces pastorianus
gaacacccgttacagcacgaattaa

SEQ ID NO: 45774 - DNA, 25 bp, Saccharomyces pastorianus
actaagtaaccatgtctgccttgca

SEQ ID NO: 45775 - DNA, 25 bp, Saccharomyces pastorianus
gaagacaacactcattttggaagat

SEQ ID NO: 45776 - DNA, 25 bp, Saccharomyces pastorianus
ccggctttgccgtggttattcaaat

SEQ ID NO: 45777 - DNA, 25 bp, Saccharomyces pastorianus
ttgaagcaaatttagaacacccgtt

SEQ ID NO: 45778 - DNA, 25 bp, Saccharomyces pastorianus
gatatactcatactacaaccaattg

SEQ ID NO: 45779 - DNA, 25 bp, Saccharomyces pastorianus
gtctgccttgcactctcaagaaagt

SEQ ID NO: 45780 - DNA, 25 bp, Saccharomyces pastorianus
tacagggttattcactacaggacaa

SEQ ID NO: 45781 - DNA, 25 bp, Saccharomyces pastorianus
gctcaacccaaacgatggatgcaat

SEQ ID NO: 45782 - DNA, 25 bp, Saccharomyces pastorianus
aaaacttcaacatagctcaacccaa

SEQ ID NO: 45783 - DNA, 25 bp, Saccharomyces pastorianus
acattaactgacacaaccggctttg

SEQ ID NO: 45784 - DNA, 25 bp, Saccharomyces pastorianus
tatcttttccactagacgtcaagtt

SEQ ID NO: 45785 - DNA, 25 bp, Saccharomyces pastorianus
catattggttacatgtcgcgttatc

SEQ ID NO: 45786 - DNA, 25 bp, Saccharomyces pastorianus
tcgcgttatcttgcctttatctaag

SEQ ID NO: 45787 - DNA, 25 bp, Saccharomyces pastorianus
taaagaccatagtacaccccaacaa

SEQ ID NO: 45788 - DNA, 25 bp, Saccharomyces pastorianus
gttagacagcctttttgagacctta

SEQ ID NO: 45789 - DNA, 25 bp, Saccharomyces pastorianus
atctaaggaacctgaactctctcgc

SEQ ID NO: 45790 - DNA, 25 bp, Saccharomyces pastorianus
aaaccttttggtagctatgactgac

SEQ ID NO: 45791 - DNA, 25 bp, Saccharomyces pastorianus
ttctattatcaccacgctgcagaac

SEQ ID NO: 45792 - DNA, 25 bp, Saccharomyces pastorianus
ccgtttacttccctgttcataagag

SEQ ID NO: 45793 - DNA, 25 bp, Saccharomyces pastorianus
aaactttgacttgtgcggatcttaa

SEQ ID NO: 45794 - DNA, 25 bp, Saccharomyces pastorianus
aagattatagccttcgcccaacatt

SEQ ID NO: 45795 - DNA, 25 bp, Saccharomyces pastorianus
aagctttctctatagatactggcga

SEQ ID NO: 45796 - DNA, 25 bp, Saccharomyces pastorianus
gcagcctaacttacccattcttaaa

SEQ ID NO: 45797 - DNA, 25 bp, Saccharomyces pastorianus
ggacacaggaaatctagcgacatca

SEQ ID NO: 45798 - DNA, 25 bp, Saccharomyces pastorianus
attctgaatgttttgtatctctgtc

SEQ ID NO: 45799 - DNA, 25 bp, Saccharomyces pastorianus
gaactctcaagcgttaagcagccta

SEQ ID NO: 45800 - DNA, 25 bp, Saccharomyces pastorianus
tggtaacaattttgacctggcctta

SEQ ID NO: 45801 - DNA, 25 bp, Saccharomyces pastorianus
aagatatcgacgctccttcggaagc

SEQ ID NO: 45802 - DNA, 25 bp, Saccharomyces pastorianus
acatcgcatatctattggacacagg

SEQ ID NO: 45803 - DNA, 25 bp, Saccharomyces pastorianus
gagagctccgtagatccagacaaca

SEQ ID NO: 45804 - DNA, 25 bp, Saccharomyces pastorianus
ggcgaacagctttcaatgcgtcaaa

SEQ ID NO: 45805 - DNA, 25 bp, Saccharomyces pastorianus
gacctggccttacaaaagtctttga

SEQ ID NO: 45806 - DNA, 25 bp, Saccharomyces pastorianus
gatattctgatggaccttacttatg

SEQ ID NO: 45807 - DNA, 25 bp, Saccharomyces pastorianus
ttatatggtgatgcttccaccgaac

SEQ ID NO: 45808 - DNA, 25 bp, Saccharomyces pastorianus
gggtaaatcgtttccacatattacg

SEQ ID NO: 45809 - DNA, 25 bp, Saccharomyces pastorianus
ggctccagagtcaatcttcagttat

SEQ ID NO: 45810 - DNA, 25 bp, Saccharomyces pastorianus
tgcgcttcttacgagatttgctaat

SEQ ID NO: 45811 - DNA, 25 bp, Saccharomyces pastorianus
ttagatgtgagcttgcgcttcttac

SEQ ID NO: 45812 - DNA, 25 bp, Saccharomyces pastorianus
cgaagtaaagcatcccctcaattat

SEQ ID NO: 45813 - DNA, 25 bp, Saccharomyces pastorianus
gaattatcggtaggctccagagtca

SEQ ID NO: 45814 - DNA, 25 bp, Saccharomyces pastorianus
ggaccttacttatgtgcaatcccaa

SEQ ID NO: 45815 - DNA, 25 bp, Saccharomyces pastorianus
aaatatgattctttgggtcttgata

SEQ ID NO: 45816 - DNA, 25 bp, Saccharomyces pastorianus
aatcgtattagatatcccactgaaa

SEQ ID NO: 45817 - DNA, 25 bp, Saccharomyces pastorianus
gttgcctgaattgagcgaacacctt

SEQ ID NO: 45818 - DNA, 25 bp, Saccharomyces pastorianus
tttgtcaccaatttacgttatcatg

SEQ ID NO: 45819 - DNA, 25 bp, Saccharomyces pastorianus
cgatctgatggttagagctgagcta

SEQ ID NO: 45820 - DNA, 25 bp, Saccharomyces pastorianus
cggtgtattgccctgtcaaagtgaa

SEQ ID NO: 45821 - DNA, 25 bp, Saccharomyces pastorianus
ggtgtttcacccatttcatggatgt

SEQ ID NO: 45822 - DNA, 25 bp, Saccharomyces pastorianus
ttcgtcgtccacttccggtgtattg

SEQ ID NO: 45823 - DNA, 25 bp, Saccharomyces pastorianus
ttttatgttggcgatcttgcagaaa

SEQ ID NO: 45824 - DNA, 25 bp, Saccharomyces pastorianus
gattgaacctgcttctgtccaaaaa

SEQ ID NO: 45825 - DNA, 25 bp, Saccharomyces pastorianus
aatgttgacccttgtggaattagct

SEQ ID NO: 45826 - DNA, 25 bp, Saccharomyces pastorianus
ggacctttttctatagttcacaatt

SEQ ID NO: 45827 - DNA, 25 bp, Saccharomyces pastorianus
gaattagctcaactgatgttgcctg

SEQ ID NO: 45828 - DNA, 25 bp, Saccharomyces pastorianus
aaatatttgtccaacctggcgattt

SEQ ID NO: 45829 - DNA, 25 bp, Saccharomyces pastorianus
tactattttcttcaattgtccccgc

SEQ ID NO: 45830 - DNA, 25 bp, Saccharomyces pastorianus
gtttgttatccctgtgttcgtcata

SEQ ID NO: 45831 - DNA, 25 bp, Saccharomyces pastorianus
tggttcctatatcacgcatttcgca

SEQ ID NO: 45832 - DNA, 25 bp, Saccharomyces pastorianus
gggaccattccagtgtatacaccgc

SEQ ID NO: 45833 - DNA, 25 bp, Saccharomyces pastorianus
accgatgttacgagtgccataccac

SEQ ID NO: 45834 - DNA, 25 bp, Saccharomyces pastorianus
ggtgcgtttgaccttgacttgaaaa

SEQ ID NO: 45835 - DNA, 25 bp, Saccharomyces pastorianus
gacggacctggtatcgagagttttc

SEQ ID NO: 45836 - DNA, 25 bp, Saccharomyces pastorianus
gagagttttcactcctgatgcagtg

SEQ ID NO: 45837 - DNA, 25 bp, Saccharomyces pastorianus
ataagcttgctttcgttttggacgg

SEQ ID NO: 45838 - DNA, 25 bp, Saccharomyces pastorianus
gttcgtcataatttgctctacacta

SEQ ID NO: 45839 - DNA, 25 bp, Saccharomyces pastorianus
gagggacagtgtctcatctgtgatt

SEQ ID NO: 45840 - DNA, 25 bp, Saccharomyces pastorianus
caagattccgcgctatttaccaaac

SEQ ID NO: 45841 - DNA, 25 bp, Saccharomyces pastorianus
tcacggcattgcattctcgagagcg

SEQ ID NO: 45842 - DNA, 25 bp, Saccharomyces pastorianus
tacctctgccttcggttgctaacag

SEQ ID NO: 45843 - DNA, 25 bp, Saccharomyces pastorianus
atgggaccaggatttcgatatcgaa

SEQ ID NO: 45844 - DNA, 25 bp, Saccharomyces pastorianus
aggcgcgtcatgaaccaattcttat

SEQ ID NO: 45845 - DNA, 25 bp, Saccharomyces pastorianus
gattcatgccaatttttgttgtcca

SEQ ID NO: 45846 - DNA, 25 bp, Saccharomyces pastorianus
atgcaggaccaatcacactcgaata

SEQ ID NO: 45847 - DNA, 25 bp, Saccharomyces pastorianus
ctagaatctcaggtgcatttttcga

SEQ ID NO: 45848 - DNA, 25 bp, Saccharomyces pastorianus
ggaattgtaccaggcagcgagctgc

SEQ ID NO: 45849 - DNA, 25 bp, Saccharomyces pastorianus
agacgctatatcacttcatcaagaa

SEQ ID NO: 45850 - DNA, 25 bp, Saccharomyces pastorianus
aaaccaacttcagcctttctcaatt

SEQ ID NO: 45851 - DNA, 25 bp, Saccharomyces pastorianus
acatggccttggtgacaactctctt

SEQ ID NO: 45852 - DNA, 25 bp, Saccharomyces pastorianus
aacttcagcctttctcaattcatca

SEQ ID NO: 45853 - DNA, 25 bp, Saccharomyces pastorianus
atggccttggtgacaactctcttca

SEQ ID NO: 45854 - DNA, 25 bp, Saccharomyces pastorianus
gtgacaactctcttcaaaccaactt

SEQ ID NO: 45855 - DNA, 25 bp, Saccharomyces pastorianus
acaactctcttcaaaccaacttcag

SEQ ID NO: 45856 - DNA, 25 bp, Saccharomyces pastorianus
gaagacatggccttggtgacaactc

SEQ ID NO: 45857 - DNA, 25 bp, Saccharomyces pastorianus
tctcttcaaaccaacttcagccttt

SEQ ID NO: 45858 - DNA, 25 bp, Saccharomyces pastorianus
aacgagaagacatggccttggtgac

SEQ ID NO: 45859 - DNA, 25 bp, Saccharomyces pastorianus
acttcagcctttctcaattcatcag

SEQ ID NO: 45860 - DNA, 25 bp, Saccharomyces pastorianus
agacatggccttggtgacaactctc

SEQ ID NO: 45861 - DNA, 25 bp, Saccharomyces pastorianus
aactcctcagaacaagctccaagac

SEQ ID NO: 45862 - DNA, 25 bp, Saccharomyces pastorianus
tgaggaacgcactggcaagcaaaat

SEQ ID NO: 45863 - DNA, 25 bp, Saccharomyces pastorianus
ggtaaatcaaagcagcatcatcatc

SEQ ID NO: 45864 - DNA, 25 bp, Saccharomyces pastorianus
ggctcggtaggctctggtaaatcaa

SEQ ID NO: 45865 - DNA, 25 bp, Saccharomyces pastorianus
gcaagcaaaatttcatgggcagagt

SEQ ID NO: 45866 - DNA, 25 bp, Saccharomyces pastorianus
tacgattattcttcaaccaactcct

SEQ ID NO: 45867 - DNA, 25 bp, Saccharomyces pastorianus
gacaccatactcatggcactgatga

SEQ ID NO: 45868 - DNA, 25 bp, Saccharomyces pastorianus
gcagcatcatcatcacagtatgaag

SEQ ID NO: 45869 - DNA, 25 bp, Saccharomyces pastorianus
agaactcttccaaatcacctgatta

SEQ ID NO: 45870 - DNA, 25 bp, Saccharomyces pastorianus
ttattcttcaaccaactcctcagaa

SEQ ID NO: 45871 - DNA, 25 bp, Saccharomyces pastorianus
aagctccaagacaccatactcatgg

SEQ ID NO: 45872 - DNA, 25 bp, Saccharomyces pastorianus
aagtttgatcgatcctcaagtccca

SEQ ID NO: 45873 - DNA, 25 bp, Saccharomyces pastorianus
gatgataatactccggatccacaaa

SEQ ID NO: 45874 - DNA, 25 bp, Saccharomyces pastorianus
gatgcatctgactacaagcgtgaag

SEQ ID NO: 45875 - DNA, 25 bp, Saccharomyces pastorianus
aaatcagcgcagaaccaacattggc

SEQ ID NO: 45876 - DNA, 25 bp, Saccharomyces pastorianus
ggttactgctgcttacgacaacatt

SEQ ID NO: 45877 - DNA, 25 bp, Saccharomyces pastorianus
ggccgcaaatgcgtatgctgctgaa

SEQ ID NO: 45878 - DNA, 25 bp, Saccharomyces pastorianus
aaaaaggcatcattatcctccccga

SEQ ID NO: 45879 - DNA, 25 bp, Saccharomyces pastorianus
tatgggtccggtagtgacgccacaa

SEQ ID NO: 45880 - DNA, 25 bp, Saccharomyces pastorianus
gagatgctgatactgcttatgctca

SEQ ID NO: 45881 - DNA, 25 bp, Saccharomyces pastorianus
acagcagactgcttatgggtccggt

SEQ ID NO: 45882 - DNA, 25 bp, Saccharomyces pastorianus
acgccacaagtcacgaatcttctag

SEQ ID NO: 45883 - DNA, 25 bp, Saccharomyces pastorianus
attcacattgatggcaaggaccaag

SEQ ID NO: 45884 - DNA, 25 bp, Saccharomyces pastorianus
tatccaagaaggttctcaatttgag

SEQ ID NO: 45885 - DNA, 25 bp, Saccharomyces pastorianus
gaatctttgaggatgactccaagaa

SEQ ID NO: 45886 - DNA, 25 bp, Saccharomyces pastorianus
atctgtgtcccaattcacattgatg

SEQ ID NO: 45887 - DNA, 25 bp, Saccharomyces pastorianus
ggtcacattgctaaagagctttacg

SEQ ID NO: 45888 - DNA, 25 bp, Saccharomyces pastorianus
gaagattctatagccgaggtggaaa

SEQ ID NO: 45889 - DNA, 25 bp, Saccharomyces pastorianus
gtatttccactgaagattctatagc

SEQ ID NO: 45890 - DNA, 25 bp, Saccharomyces pastorianus
tgacttccacctagctcaaaagggt

SEQ ID NO: 45891 - DNA, 25 bp, Saccharomyces pastorianus
cggtgaaattctatctgtgtcccaa

SEQ ID NO: 45892 - DNA, 25 bp, Saccharomyces pastorianus
gggccatgatgagctgttcgttaac

SEQ ID NO: 45893 - DNA, 25 bp, Saccharomyces pastorianus
gagctgttcgttaaccaatgagggc

SEQ ID NO: 45894 - DNA, 25 bp, Saccharomyces pastorianus
caagccttcatgcaaaccgtacaga

SEQ ID NO: 45895 - DNA, 25 bp, Saccharomyces pastorianus
gtatggaaccaagccttcatgcaaa

SEQ ID NO: 45896 - DNA, 25 bp, Saccharomyces pastorianus
ctactaatgacaacgttcacgacga

SEQ ID NO: 45897 - DNA, 25 bp, Saccharomyces pastorianus
gtaccggtacgaactcttttgtcag

SEQ ID NO: 45898 - DNA, 25 bp, Saccharomyces pastorianus
aagtctgtacacgagtatggaacca

SEQ ID NO: 45899 - DNA, 25 bp, Saccharomyces pastorianus
tttaacaaagtcacagttctactgt

SEQ ID NO: 45900 - DNA, 25 bp, Saccharomyces pastorianus
gtcagtatgctttcaggagacaata

SEQ ID NO: 45901 - DNA, 25 bp, Saccharomyces pastorianus
aactttaccgaatttgatagcacag

SEQ ID NO: 45902 - DNA, 25 bp, Saccharomyces pastorianus
gaaacgattgtcttcgattcagaat

SEQ ID NO: 45903 - DNA, 25 bp, Saccharomyces pastorianus
caggtctaacgaaaacttccacaat

SEQ ID NO: 45904 - DNA, 25 bp, Saccharomyces pastorianus
agcgaagaaccgcatacttgcttca

SEQ ID NO: 45905 - DNA, 25 bp, Saccharomyces pastorianus
agtattggcttcgttagctcttaac

SEQ ID NO: 45906 - DNA, 25 bp, Saccharomyces pastorianus
ggaattcggccaactatggaaccta

SEQ ID NO: 45907 - DNA, 25 bp, Saccharomyces pastorianus
gtcttgttcaaggatgcttctgcta

SEQ ID NO: 45908 - DNA, 25 bp, Saccharomyces pastorianus
tacccaacctgctaaaaacgccttg

SEQ ID NO: 45909 - DNA, 25 bp, Saccharomyces pastorianus
gccaatttgtttattacccaacctg

SEQ ID NO: 45910 - DNA, 25 bp, Saccharomyces pastorianus
atttattggcgatactactggtgaa

SEQ ID NO: 45911 - DNA, 25 bp, Saccharomyces pastorianus
aggagcatggctgtgtcttgttcaa

SEQ ID NO: 45912 - DNA, 25 bp, Saccharomyces pastorianus
gaacgatgatctagttgcttctgaa

SEQ ID NO: 45913 - DNA, 25 bp, Saccharomyces pastorianus
aaatcaactgtcattcaccatcaac

SEQ ID NO: 45914 - DNA, 25 bp, Saccharomyces pastorianus
aagatctgcgctgtacaaggcctat

SEQ ID NO: 45915 - DNA, 25 bp, Saccharomyces pastorianus
cgatgttgctggatctgattctgta

SEQ ID NO: 45916 - DNA, 25 bp, Saccharomyces pastorianus
gcgtaatgatactacccttctagaa

SEQ ID NO: 45917 - DNA, 25 bp, Saccharomyces pastorianus
gctcagactcattattatcacgata

SEQ ID NO: 45918 - DNA, 25 bp, Saccharomyces pastorianus
ggtgctatctttattaaccactttg

SEQ ID NO: 45919 - DNA, 25 bp, Saccharomyces pastorianus
aaccgcttaggttcagactatcaaa

SEQ ID NO: 45920 - DNA, 25 bp, Saccharomyces pastorianus
actgtctcaaattaccatcaagcgt

SEQ ID NO: 45921 - DNA, 25 bp, Saccharomyces pastorianus
gagaagcttctttgttgtacgctat

SEQ ID NO: 45922 - DNA, 25 bp, Saccharomyces pastorianus
gactatcaaaacctactgtctcaaa

SEQ ID NO: 45923 - DNA, 25 bp, Saccharomyces pastorianus
acgtcaattttcacccaaagaggca

SEQ ID NO: 45924 - DNA, 25 bp, Saccharomyces pastorianus
gacattatcatcttttccgtatact

SEQ ID NO: 45925 - DNA, 25 bp, Saccharomyces pastorianus
gttgtacgctattccaaataactca

SEQ ID NO: 45926 - DNA, 25 bp, Saccharomyces pastorianus
gcattacactataatctccaagcta

SEQ ID NO: 45927 - DNA, 25 bp, Saccharomyces pastorianus
acacatgtgttattggtccaggtat

SEQ ID NO: 45928 - DNA, 25 bp, Saccharomyces pastorianus
attgttatggttatgttccccgctc

SEQ ID NO: 45929 - DNA, 25 bp, Saccharomyces pastorianus
gatcaggctgctacaaatgcactgt

SEQ ID NO: 45930 - DNA, 25 bp, Saccharomyces pastorianus
tatcatggcccagcaacgaatttat

SEQ ID NO: 45931 - DNA, 25 bp, Saccharomyces pastorianus
tctaggtaagctttggtctcccata

SEQ ID NO: 45932 - DNA, 25 bp, Saccharomyces pastorianus
gcactgtttagtttagccgtggcag

SEQ ID NO: 45933 - DNA, 25 bp, Saccharomyces pastorianus
ggtttgccgctatcaaagtacatca

SEQ ID NO: 45934 - DNA, 25 bp, Saccharomyces pastorianus
gacctggtccattctatctaggtaa

SEQ ID NO: 45935 - DNA, 25 bp, Saccharomyces pastorianus
ggagcatccatcacaacagcagttt

SEQ ID NO: 45936 - DNA, 25 bp, Saccharomyces pastorianus
gtaaagatttgttcagacctggtcc

SEQ ID NO: 45937 - DNA, 25 bp, Saccharomyces pastorianus
accgtcttgcgtttgacatcaggta

SEQ ID NO: 45938 - DNA, 25 bp, Saccharomyces pastorianus
aaatgggctaatgaggatcctgacc

SEQ ID NO: 45939 - DNA, 25 bp, Saccharomyces pastorianus
gatatcgattggtttacctccagga

SEQ ID NO: 45940 - DNA, 25 bp, Saccharomyces pastorianus
aatttaaacatcaagccagtgccga

SEQ ID NO: 45941 - DNA, 25 bp, Saccharomyces pastorianus
gccagtgccgaatttgccaaagagg

SEQ ID NO: 45942 - DNA, 25 bp, Saccharomyces pastorianus
tttccaacaaagtcatctgctagct

SEQ ID NO: 45943 - DNA, 25 bp, Saccharomyces pastorianus
ttcccggttgggtgacatcgatagg

SEQ ID NO: 45944 - DNA, 25 bp, Saccharomyces pastorianus
gatcctgaccctgccgcgaaaaaga

SEQ ID NO: 45945 - DNA, 25 bp, Saccharomyces pastorianus
acgttggtggtattgatggcgcatt

SEQ ID NO: 45946 - DNA, 25 bp, Saccharomyces pastorianus
taaccagacgttgctactacacagt

SEQ ID NO: 45947 - DNA, 25 bp, Saccharomyces pastorianus
atctgctagcttgtcaaatggcccc

SEQ ID NO: 45948 - DNA, 25 bp, Saccharomyces pastorianus
gtccctgaatatgatggtacgtcta

SEQ ID NO: 45949 - DNA, 25 bp, Saccharomyces pastorianus
atttgggtgctgctggtgccacaaa

SEQ ID NO: 45950 - DNA, 25 bp, Saccharomyces pastorianus
gtttggttgtcattgccggtgacat

SEQ ID NO: 45951 - DNA, 25 bp, Saccharomyces pastorianus
acatcccagtcttgtgtgaggacca

SEQ ID NO: 45952 - DNA, 25 bp, Saccharomyces pastorianus
gtgtgaggaccattctgttccatat

SEQ ID NO: 45953 - DNA, 25 bp, Saccharomyces pastorianus
gaagaccgtcaagaaggcctctaaa

SEQ ID NO: 45954 - DNA, 25 bp, Saccharomyces pastorianus
gttccatatatcttcataccatcca

SEQ ID NO: 45955 - DNA, 25 bp, Saccharomyces pastorianus
gtgacatttccccagccgacgttat

SEQ ID NO: 45956 - DNA, 25 bp, Saccharomyces pastorianus
aaagagacctacctctgttgtcttc

SEQ ID NO: 45957 - DNA, 25 bp, Saccharomyces pastorianus
ctgttgtcttcattgtcccaggtag

SEQ ID NO: 45958 - DNA, 25 bp, Saccharomyces pastorianus
gccatattgtcgtttgccaagccat

SEQ ID NO: 45959 - DNA, 25 bp, Saccharomyces pastorianus
tatgaggctagaatgcccgccatat

SEQ ID NO: 45960 - DNA, 25 bp, Saccharomyces pastorianus
gaaaccatcggctgcgagatctatt

SEQ ID NO: 45961 - DNA, 25 bp, Saccharomyces pastorianus
agagaccgaggtcactggtgcactt

SEQ ID NO: 45962 - DNA, 25 bp, Saccharomyces pastorianus
gtggcgcaaacaatttggcacttgt

SEQ ID NO: 45963 - DNA, 25 bp, Saccharomyces pastorianus
cactggtgcacttttggtgttcaaa

SEQ ID NO: 45964 - DNA, 25 bp, Saccharomyces pastorianus
gaacaactttgctatacctatatag

SEQ ID NO: 45965 - DNA, 25 bp, Saccharomyces pastorianus
cacttgtggtgccatgccatagaat

SEQ ID NO: 45966 - DNA, 25 bp, Saccharomyces pastorianus
gaacatggccatgttgctacatatg

SEQ ID NO: 45967 - DNA, 25 bp, Saccharomyces pastorianus
aaataagatgccgttaccgccagat

SEQ ID NO: 45968 - DNA, 25 bp, Saccharomyces pastorianus
aagtctagtttttgcttcattaggc

SEQ ID NO: 45969 - DNA, 25 bp, Saccharomyces pastorianus
aagcaggatgtaaagcacgagttat

SEQ ID NO: 45970 - DNA, 25 bp, Saccharomyces pastorianus
atctattggaagagcatgtggcgca

SEQ ID NO: 45971 - DNA, 25 bp, Saccharomyces pastorianus
gagtcagccggacggatctgcacaa

SEQ ID NO: 45972 - DNA, 25 bp, Saccharomyces pastorianus
ggccaacccagctatatccaaggat

SEQ ID NO: 45973 - DNA, 25 bp, Saccharomyces pastorianus
agaattttcctatcgagactcatga

SEQ ID NO: 45974 - DNA, 25 bp, Saccharomyces pastorianus
gatagtgccaaccatgacgatgttt

SEQ ID NO: 45975 - DNA, 25 bp, Saccharomyces pastorianus
tatcacaggccccagtaatactgct

SEQ ID NO: 45976 - DNA, 25 bp, Saccharomyces pastorianus
atccgattctggaccatcaaggacg

SEQ ID NO: 45977 - DNA, 25 bp, Saccharomyces pastorianus
agtggttctgaactttcatcctcgc

SEQ ID NO: 45978 - DNA, 25 bp, Saccharomyces pastorianus
aagcatactcatcgactgaggccaa

SEQ ID NO: 45979 - DNA, 25 bp, Saccharomyces pastorianus
ggtttgccagcctaataacacctat

SEQ ID NO: 45980 - DNA, 25 bp, Saccharomyces pastorianus
aatctgctgatgattctgctggcaa

SEQ ID NO: 45981 - DNA, 25 bp, Saccharomyces pastorianus
gccttctttttctgcgtaccagata

SEQ ID NO: 45982 - DNA, 25 bp, Saccharomyces pastorianus
gaacgcttatttccattcagtgtgt

SEQ ID NO: 45983 - DNA, 25 bp, Saccharomyces pastorianus
ttcagtgtgtttccaatgttgttgc

SEQ ID NO: 45984 - DNA, 25 bp, Saccharomyces pastorianus
gttttagaatcacccacttggctat

SEQ ID NO: 45985 - DNA, 25 bp, Saccharomyces pastorianus
tgatgtcgttatacctagttttaga

SEQ ID NO: 45986 - DNA, 25 bp, Saccharomyces pastorianus
gggatttggattaactgtgctttta

SEQ ID NO: 45987 - DNA, 25 bp, Saccharomyces pastorianus
gtttattctggtgtcttggaggttt

SEQ ID NO: 45988 - DNA, 25 bp, Saccharomyces pastorianus
gggtagcgctaaacttgatgtcgtt

SEQ ID NO: 45989 - DNA, 25 bp, Saccharomyces pastorianus
gatatactctttgggcgcttttatc

SEQ ID NO: 45990 - DNA, 25 bp, Saccharomyces pastorianus
aaataccccttatcgacacatgtgt

SEQ ID NO: 45991 - DNA, 25 bp, Saccharomyces pastorianus
tgctctgaatcaatggtacctacta

SEQ ID NO: 45992 - DNA, 25 bp, Saccharomyces pastorianus
ttatggcgtctttgtttgtttattc

SEQ ID NO: 45993 - DNA, 25 bp, Saccharomyces pastorianus
gaaggtctgttcaacttgtatagag

SEQ ID NO: 45994 - DNA, 25 bp, Saccharomyces pastorianus
aaattggtcttctcattcgcattgg

SEQ ID NO: 45995 - DNA, 25 bp, Saccharomyces pastorianus
ttttgccgctggatgtgctaaagat

SEQ ID NO: 45996 - DNA, 25 bp, Saccharomyces pastorianus
caaacaaatcccgagtccttcaaag

SEQ ID NO: 45997 - DNA, 25 bp, Saccharomyces pastorianus
gggctggaccgctgctagaaatgcc

SEQ ID NO: 45998 - DNA, 25 bp, Saccharomyces pastorianus
tctgccccactggatgtcatcaaga

SEQ ID NO: 45999 - DNA, 25 bp, Saccharomyces pastorianus
cttgggcttggaagactactctcaa

SEQ ID NO: 46000 - DNA, 25 bp, Saccharomyces pastorianus
tcgtttgcccttttcggtggtaatg

SEQ ID NO: 46001 - DNA, 25 bp, Saccharomyces pastorianus
tgcctgcgcttctttaatcgtttct

SEQ ID NO: 46002 - DNA, 25 bp, Saccharomyces pastorianus
tttcgacaaccctgaaagtgggctg

SEQ ID NO: 46003 - DNA, 25 bp, Saccharomyces pastorianus
ggtttgacgcctaaactactgacaa

SEQ ID NO: 46004 - DNA, 25 bp, Saccharomyces pastorianus
gtcattgatccagggacggcagcca

SEQ ID NO: 46005 - DNA, 25 bp, Saccharomyces pastorianus
ggttgaatctaccacaccgaacaca

SEQ ID NO: 46006 - DNA, 25 bp, Saccharomyces pastorianus
atcggcttcaatttcaaccagttcc

SEQ ID NO: 46007 - DNA, 25 bp, Saccharomyces pastorianus
gcatttctatccgttcccggtggaa

SEQ ID NO: 46008 - DNA, 25 bp, Saccharomyces pastorianus
aaagggtagcggtgcccaactgctc

SEQ ID NO: 46009 - DNA, 25 bp, Saccharomyces pastorianus
aaagctcccaagctgattcgcggta

SEQ ID NO: 46010 - DNA, 25 bp, Saccharomyces pastorianus
acaccgcaccgatcagttgcatata

SEQ ID NO: 46011 - DNA, 25 bp, Saccharomyces pastorianus
cagcggcttctgatactaccaaggt

SEQ ID NO: 46012 - DNA, 25 bp, Saccharomyces pastorianus
gaataacgccattaagctgctgaag

SEQ ID NO: 46013 - DNA, 25 bp, Saccharomyces pastorianus
aattctccgagattatcgttgccaa

SEQ ID NO: 46014 - DNA, 25 bp, Saccharomyces pastorianus
gttgccaacaactccaaacgacgaa

SEQ ID NO: 46015 - DNA, 25 bp, Saccharomyces pastorianus
tataaagaagctatggccgtccacg

SEQ ID NO: 46016 - DNA, 25 bp, Saccharomyces pastorianus
tgcccaagaaggtggtaactggcta

SEQ ID NO: 46017 - DNA, 25 bp, Saccharomyces pastorianus
taaagaagctatggccgtccacgcg

SEQ ID NO: 46018 - DNA, 25 bp, Saccharomyces pastorianus
ccaagaaggtggtaactggctaaca

SEQ ID NO: 46019 - DNA, 25 bp, Saccharomyces pastorianus
aaggtggtaactggctaacaggtgt

SEQ ID NO: 46020 - DNA, 25 bp, Saccharomyces pastorianus
tatggccgtccacgcggatatcgct

SEQ ID NO: 46021 - DNA, 25 bp, Saccharomyces pastorianus
ccgtccacgcggatatcgctacaaa

SEQ ID NO: 46022 - DNA, 25 bp, Saccharomyces pastorianus
gtggtaactggctaacaggtgtaaa

SEQ ID NO: 46023 - DNA, 25 bp, Saccharomyces pastorianus
actggctaacaggtgtaaagagatt

SEQ ID NO: 46024 - DNA, 25 bp, Saccharomyces pastorianus
aagctatggccgtccacgcggatat

SEQ ID NO: 46025 - DNA, 25 bp, Saccharomyces pastorianus
gtccacgcggatatcgctacaaacc

SEQ ID NO: 46026 - DNA, 25 bp, Saccharomyces pastorianus
aagaccgtcccgtgctaaagctgta

SEQ ID NO: 46027 - DNA, 25 bp, Saccharomyces pastorianus
atttcaacgctcagtctagttccat

SEQ ID NO: 46028 - DNA, 25 bp, Saccharomyces pastorianus
tatcagctgcaacttcatcgaacgg

SEQ ID NO: 46029 - DNA, 25 bp, Saccharomyces pastorianus
agagtagccacaccattgacttcag

SEQ ID NO: 46030 - DNA, 25 bp, Saccharomyces pastorianus
tgtatccgttgcacctccaaatatt

SEQ ID NO: 46031 - DNA, 25 bp, Saccharomyces pastorianus
ttaccaaaggcttccagtccatatg

SEQ ID NO: 46032 - DNA, 25 bp, Saccharomyces pastorianus
atatgctactaataccatgcctcca

SEQ ID NO: 46033 - DNA, 25 bp, Saccharomyces pastorianus
tctgtttcaaatccatatgctccct

SEQ ID NO: 46034 - DNA, 25 bp, Saccharomyces pastorianus
atcttctgtgtcaatggtatctcca

SEQ ID NO: 46035 - DNA, 25 bp, Saccharomyces pastorianus
agtcgtctagagttccatcgttggt

SEQ ID NO: 46036 - DNA, 25 bp, Saccharomyces pastorianus
gaacggtgttcctacatatgctact

SEQ ID NO: 46037 - DNA, 25 bp, Saccharomyces pastorianus
atctcgttccgatagcaccgatgaa

SEQ ID NO: 46038 - DNA, 25 bp, Saccharomyces pastorianus
tgatgccgattacgaaactcctcct

SEQ ID NO: 46039 - DNA, 25 bp, Saccharomyces pastorianus
tacgcaagagcgcatggcacagttt

SEQ ID NO: 46040 - DNA, 25 bp, Saccharomyces pastorianus
ggtacctgaaactccatcttttgtt

SEQ ID NO: 46041 - DNA, 25 bp, Saccharomyces pastorianus
atcaatgactacatggcgcgcttaa

SEQ ID NO: 46042 - DNA, 25 bp, Saccharomyces pastorianus
ttttgttttgcacagttctttccct

SEQ ID NO: 46043 - DNA, 25 bp, Saccharomyces pastorianus
gattcgaaaccgtctgatgccgatt

SEQ ID NO: 46044 - DNA, 25 bp, Saccharomyces pastorianus
tacaattcgttaccacacagcttca

SEQ ID NO: 46045 - DNA, 25 bp, Saccharomyces pastorianus
ctgtgctggctcgtagtgattcgaa

SEQ ID NO: 46046 - DNA, 25 bp, Saccharomyces pastorianus
gaaatggccttgctctgaatgcgta

SEQ ID NO: 46047 - DNA, 25 bp, Saccharomyces pastorianus
gcacagtttgcccagagctatacta

SEQ ID NO: 46048 - DNA, 25 bp, Saccharomyces pastorianus
aggaaacaacgctctaccaacctat

SEQ ID NO: 46049 - DNA, 25 bp, Saccharomyces pastorianus
gaaacgcggtgttcatgaaccctta

SEQ ID NO: 46050 - DNA, 25 bp, Saccharomyces pastorianus
aaggatcatgttcttttggtgcccc

SEQ ID NO: 46051 - DNA, 25 bp, Saccharomyces pastorianus
tagcaaggacacaccgtcatcgaaa

SEQ ID NO: 46052 - DNA, 25 bp, Saccharomyces pastorianus
gatacacatcgagggctaaaccgcc

SEQ ID NO: 46053 - DNA, 25 bp, Saccharomyces pastorianus
ttatatggtatatccacccacccag

SEQ ID NO: 46054 - DNA, 25 bp, Saccharomyces pastorianus
aatccttcgcctgtggttatgggcg

SEQ ID NO: 46055 - DNA, 25 bp, Saccharomyces pastorianus
gtgcccgtgtatcaatcataccagt

SEQ ID NO: 46056 - DNA, 25 bp, Saccharomyces pastorianus
gagggccctgaccacaacaaatata

SEQ ID NO: 46057 - DNA, 25 bp, Saccharomyces pastorianus
gacacaacgtcaaatgagggccctg

SEQ ID NO: 46058 - DNA, 25 bp, Saccharomyces pastorianus
atccaatcgtgtataacccagcttc

SEQ ID NO: 46059 - DNA, 25 bp, Saccharomyces pastorianus
ggcacggccacgaattacagctgtt

SEQ ID NO: 46060 - DNA, 25 bp, Saccharomyces pastorianus
agtcgagaagatcggaccccttcgg

SEQ ID NO: 46061 - DNA, 25 bp, Saccharomyces pastorianus
gattgtggaatccttcaccgactgg

SEQ ID NO: 46062 - DNA, 25 bp, Saccharomyces pastorianus
gggagatctactcaaatccgattcc

SEQ ID NO: 46063 - DNA, 25 bp, Saccharomyces pastorianus
agcgcaattccaaggtgttcttcca

SEQ ID NO: 46064 - DNA, 25 bp, Saccharomyces pastorianus
atcgaggtgccatcgaggccataaa

SEQ ID NO: 46065 - DNA, 25 bp, Saccharomyces pastorianus
gaagagctgaccatctatcgggaga

SEQ ID NO: 46066 - DNA, 25 bp, Saccharomyces pastorianus
atccgattcctgttagctatctaga

SEQ ID NO: 46067 - DNA, 25 bp, Saccharomyces pastorianus
agacgaatccgtgcgttcgattgtg

SEQ ID NO: 46068 - DNA, 25 bp, Saccharomyces pastorianus
gaaacgacaagccatcgacctcggg

SEQ ID NO: 46069 - DNA, 25 bp, Saccharomyces pastorianus
acacgcctcagtttcagtcgagaag

SEQ ID NO: 46070 - DNA, 25 bp, Saccharomyces pastorianus
gattccgattatcctgaattccctg

SEQ ID NO: 46071 - DNA, 25 bp, Saccharomyces pastorianus
gaattccctgtcttgagagatcgta

SEQ ID NO: 46072 - DNA, 25 bp, Saccharomyces pastorianus
aacacatctgtctcttactctaagt

SEQ ID NO: 46073 - DNA, 25 bp, Saccharomyces pastorianus
tacagctactttgggtatcactcaa

SEQ ID NO: 46074 - DNA, 25 bp, Saccharomyces pastorianus
gtaagtctgctttatccgatagtga

SEQ ID NO: 46075 - DNA, 25 bp, Saccharomyces pastorianus
ggaacaagtcgtccaattggttggt

SEQ ID NO: 46076 - DNA, 25 bp, Saccharomyces pastorianus
aaatggttactctacctacgacgct

SEQ ID NO: 46077 - DNA, 25 bp, Saccharomyces pastorianus
tactctaagtacaccactgttttga

SEQ ID NO: 46078 - DNA, 25 bp, Saccharomyces pastorianus
gatgttaaacattccgtttcttcat

SEQ ID NO: 46079 - DNA, 25 bp, Saccharomyces pastorianus
gattaccttggatgttgctgctttg

SEQ ID NO: 46080 - DNA, 25 bp, Saccharomyces pastorianus
ggttctgtttccattgttgctgctg

SEQ ID NO: 46081 - DNA, 25 bp, Saccharomyces pastorianus
tgaacatcgacgacgtcgactccat

SEQ ID NO: 46082 - DNA, 25 bp, Saccharomyces pastorianus
accccgcaactacagtctgcaagaa

SEQ ID NO: 46083 - DNA, 25 bp, Saccharomyces pastorianus
gcaaagatcaagaagctgggcgacg

SEQ ID NO: 46084 - DNA, 25 bp, Saccharomyces pastorianus
gccatcaaggccagagtagaccagc

SEQ ID NO: 46085 - DNA, 25 bp, Saccharomyces pastorianus
gaatctgacagactcccaggtcaag

SEQ ID NO: 46086 - DNA, 25 bp, Saccharomyces pastorianus
tcccaggtcaaggagatcaccgcaa

SEQ ID NO: 46087 - DNA, 25 bp, Saccharomyces pastorianus
aagaagacagcgacgttccagcact

SEQ ID NO: 46088 - DNA, 25 bp, Saccharomyces pastorianus
gcgacgttccagcactcaactctgt

SEQ ID NO: 46089 - DNA, 25 bp, Saccharomyces pastorianus
gtgagggccttgaacatcgacgacg

SEQ ID NO: 46090 - DNA, 25 bp, Saccharomyces pastorianus
ttcgccaacagattgacgggctgga

SEQ ID NO: 46091 - DNA, 25 bp, Saccharomyces pastorianus
gtagaccagctgaacctgaatctga

SEQ ID NO: 46092 - DNA, 25 bp, Saccharomyces pastorianus
cactcggtgggctaatggcaagaat

SEQ ID NO: 46093 - DNA, 25 bp, Saccharomyces pastorianus
tggtgctaggttgatcgatgtcagt

SEQ ID NO: 46094 - DNA, 25 bp, Saccharomyces pastorianus
gcccctgaatacgtcaagtccaaat

SEQ ID NO: 46095 - DNA, 25 bp, Saccharomyces pastorianus
tcacacacaaggctggtatccacgc

SEQ ID NO: 46096 - DNA, 25 bp, Saccharomyces pastorianus
tacactgccttggagggtggtgcta

SEQ ID NO: 46097 - DNA, 25 bp, Saccharomyces pastorianus
gatcgatgtcagtgtgctgggtatt

SEQ ID NO: 46098 - DNA, 25 bp, Saccharomyces pastorianus
ggtatcactccactcggtgggctaa

SEQ ID NO: 46099 - DNA, 25 bp, Saccharomyces pastorianus
gtatccacgccaaggccattctagc

SEQ ID NO: 46100 - DNA, 25 bp, Saccharomyces pastorianus
aagaatgatcgtagccgcccctgaa

SEQ ID NO: 46101 - DNA, 25 bp, Saccharomyces pastorianus
aaggccattctagcgaatccttcca

SEQ ID NO: 46102 - DNA, 25 bp, Saccharomyces pastorianus
aaacctggtagcagatgctgtggag

SEQ ID NO: 46103 - DNA, 25 bp, Saccharomyces pastorianus
tccccttagaagacgagcatccatt

SEQ ID NO: 46104 - DNA, 25 bp, Saccharomyces pastorianus
tacgatgtttctctacctttaaagg

SEQ ID NO: 46105 - DNA, 25 bp, Saccharomyces pastorianus
tgaaagatgccgctttccccttaga

SEQ ID NO: 46106 - DNA, 25 bp, Saccharomyces pastorianus
gctgagcatggtttaggtttccaga

SEQ ID NO: 46107 - DNA, 25 bp, Saccharomyces pastorianus
tggagattcacccaaacctgtcgta

SEQ ID NO: 46108 - DNA, 25 bp, Saccharomyces pastorianus
gttgacgccaccaatgccaggctat

SEQ ID NO: 46109 - DNA, 25 bp, Saccharomyces pastorianus
aaatgattccagaggcaagccaagc

SEQ ID NO: 46110 - DNA, 25 bp, Saccharomyces pastorianus
aacctgtcgtaggtgccattgggta

SEQ ID NO: 46111 - DNA, 25 bp, Saccharomyces pastorianus
gcatggttccgtgagtgctgagcat

SEQ ID NO: 46112 - DNA, 25 bp, Saccharomyces pastorianus
gaattcgtttcctcaaagcatggtt

SEQ ID NO: 46113 - DNA, 25 bp, Saccharomyces pastorianus
gatctatactctttggttgacgcca

SEQ ID NO: 46114 - DNA, 25 bp, Saccharomyces pastorianus
taagacatttcgaccctgtgtcagg

SEQ ID NO: 46115 - DNA, 25 bp, Saccharomyces pastorianus
gaaatcatcagctctcttagggcgt

SEQ ID NO: 46116 - DNA, 25 bp, Saccharomyces pastorianus
ttcaagtccattttgtcagagcagg

SEQ ID NO: 46117 - DNA, 25 bp, Saccharomyces pastorianus
gactaaccagcgagaactacccaga

SEQ ID NO: 46118 - DNA, 25 bp, Saccharomyces pastorianus
gaaactgacttctgatgatctgaac

SEQ ID NO: 46119 - DNA, 25 bp, Saccharomyces pastorianus
gagttggaggacctgtcattctata

SEQ ID NO: 46120 - DNA, 25 bp, Saccharomyces pastorianus
ccctgtgtcaggcatcttaaagtgt

SEQ ID NO: 46121 - DNA, 25 bp, Saccharomyces pastorianus
gtgatgccggtgttatcttggagaa

SEQ ID NO: 46122 - DNA, 25 bp, Saccharomyces pastorianus
gctgattctgtcattagccaacttg

SEQ ID NO: 46123 - DNA, 25 bp, Saccharomyces pastorianus
agtacccatttttgacgagctgatt

SEQ ID NO: 46124 - DNA, 25 bp, Saccharomyces pastorianus
gaagcgctggcaaccatctgaaata

SEQ ID NO: 46125 - DNA, 25 bp, Saccharomyces pastorianus
aacaatgggcgctgccttgctgcta

SEQ ID NO: 46126 - DNA, 25 bp, Saccharomyces pastorianus
aatgggcgctgccttgctgctaccg

SEQ ID NO: 46127 - DNA, 25 bp, Saccharomyces pastorianus
acaatgggcgctgccttgctgctac

SEQ ID NO: 46128 - DNA, 25 bp, Saccharomyces pastorianus
tctaccaacaacaatgggcgctgcc

SEQ ID NO: 46129 - DNA, 25 bp, Saccharomyces pastorianus
atgggcgctgccttgctgctaccgt

SEQ ID NO: 46130 - DNA, 25 bp, Saccharomyces pastorianus
gggcgctgccttgctgctaccgttg

SEQ ID NO: 46131 - DNA, 25 bp, Saccharomyces pastorianus
caacaatgggcgctgccttgctgct

SEQ ID NO: 46132 - DNA, 25 bp, Saccharomyces pastorianus
taccaacaacaatgggcgctgcctt

SEQ ID NO: 46133 - DNA, 25 bp, Saccharomyces pastorianus
gcctctaccaacaacaatgggcgct

SEQ ID NO: 46134 - DNA, 25 bp, Saccharomyces pastorianus
cctctaccaacaacaatgggcgctg

SEQ ID NO: 46135 - DNA, 25 bp, Saccharomyces pastorianus
accaacaacaatgggcgctgccttg

SEQ ID NO: 46136 - DNA, 25 bp, Saccharomyces pastorianus
ggcgtgcttttgatcttatgcttgc

SEQ ID NO: 46137 - DNA, 25 bp, Saccharomyces pastorianus
attatcgttcgcgttgatcgtgtcc

SEQ ID NO: 46138 - DNA, 25 bp, Saccharomyces pastorianus
gtctttgctcttgttattcttcgta

SEQ ID NO: 46139 - DNA, 25 bp, Saccharomyces pastorianus
attcctgctcgacttgggtgagatt

SEQ ID NO: 46140 - DNA, 25 bp, Saccharomyces pastorianus
gcagacacagcattgccattcgaag

SEQ ID NO: 46141 - DNA, 25 bp, Saccharomyces pastorianus
gcttgcttttgagtttcttggacga

SEQ ID NO: 46142 - DNA, 25 bp, Saccharomyces pastorianus
gtggtgtatggtattcctgctcgac

SEQ ID NO: 46143 - DNA, 25 bp, Saccharomyces pastorianus
ttattcttcgtatcaccatcatcct

SEQ ID NO: 46144 - DNA, 25 bp, Saccharomyces pastorianus
ggtgagattatattccctgcgccgc

SEQ ID NO: 46145 - DNA, 25 bp, Saccharomyces pastorianus
ggacgaggacttgatagcagacaca

SEQ ID NO: 46146 - DNA, 25 bp, Saccharomyces pastorianus
gatggcgaatttttccggcgtgctt

SEQ ID NO: 46147 - DNA, 25 bp, Saccharomyces pastorianus
aagacatttgcgtgcggtgactgta

SEQ ID NO: 46148 - DNA, 25 bp, Saccharomyces pastorianus
gtcactaattgtttgggccatccag

SEQ ID NO: 46149 - DNA, 25 bp, Saccharomyces pastorianus
gaagtgaccgccatcagaacagtac

SEQ ID NO: 46150 - DNA, 25 bp, Saccharomyces pastorianus
agcattacggcagagatcctcgtga

SEQ ID NO: 46151 - DNA, 25 bp, Saccharomyces pastorianus
ggccgacatcatcctgttatcaatg

SEQ ID NO: 46152 - DNA, 25 bp, Saccharomyces pastorianus
agaagaccagacgtggcaccattgc

SEQ ID NO: 46153 - DNA, 25 bp, Saccharomyces pastorianus
acatcagtgagacacggtgcggcct

SEQ ID NO: 46154 - DNA, 25 bp, Saccharomyces pastorianus
tagaaagtgtgctgcctccgtcgac

SEQ ID NO: 46155 - DNA, 25 bp, Saccharomyces pastorianus
cgaagagatctttgaggccgacatc

SEQ ID NO: 46156 - DNA, 25 bp, Saccharomyces pastorianus
agttcctgatggacggtaccacgta

SEQ ID NO: 46157 - DNA, 25 bp, Saccharomyces pastorianus
tgcggcctccgttctaaatttcgaa

SEQ ID NO: 46158 - DNA, 25 bp, Saccharomyces pastorianus
catagctgaaatcgatattactttt

SEQ ID NO: 46159 - DNA, 25 bp, Saccharomyces pastorianus
agccgcttatccatcttggtccata

SEQ ID NO: 46160 - DNA, 25 bp, Saccharomyces pastorianus
cttggtccatagctgaaatcgatat

SEQ ID NO: 46161 - DNA, 25 bp, Saccharomyces pastorianus
tatccatcttggtccatagctgaaa

SEQ ID NO: 46162 - DNA, 25 bp, Saccharomyces pastorianus
ggtccatagctgaaatcgatattac

SEQ ID NO: 46163 - DNA, 25 bp, Saccharomyces pastorianus
gggcctgttaggatacacaaataca

SEQ ID NO: 46164 - DNA, 25 bp, Saccharomyces pastorianus
catcttggtccatagctgaaatcga

SEQ ID NO: 46165 - DNA, 25 bp, Saccharomyces pastorianus
acattgaagccgcttatccatcttg

SEQ ID NO: 46166 - DNA, 25 bp, Saccharomyces pastorianus
cgagggcctgttaggatacacaaat

SEQ ID NO: 46167 - DNA, 25 bp, Saccharomyces pastorianus
cttttgataaaagcgagggcctgtt

SEQ ID NO: 46168 - DNA, 25 bp, Saccharomyces pastorianus
gcttatccatcttggtccatagctg

SEQ ID NO: 46169 - DNA, 25 bp, Saccharomyces pastorianus
ggtattcatccatacctggcaatgg

SEQ ID NO: 46170 - DNA, 25 bp, Saccharomyces pastorianus
tagaagaatgggtcctaaccgtgtt

SEQ ID NO: 46171 - DNA, 25 bp, Saccharomyces pastorianus
cacgctgttgatgcgggtatcctga

SEQ ID NO: 46172 - DNA, 25 bp, Saccharomyces pastorianus
cagtttcttccattcatcatcattt

SEQ ID NO: 46173 - DNA, 25 bp, Saccharomyces pastorianus
gttacggttgtgacggtattcatcc

SEQ ID NO: 46174 - DNA, 25 bp, Saccharomyces pastorianus
agaaggcttgctccgtaatgtcaac

SEQ ID NO: 46175 - DNA, 25 bp, Saccharomyces pastorianus
taaccgtgtttccatttcatctttg

SEQ ID NO: 46176 - DNA, 25 bp, Saccharomyces pastorianus
tcatctttgattgcagtttcttcca

SEQ ID NO: 46177 - DNA, 25 bp, Saccharomyces pastorianus
gatgtccaagatgggtatttccact

SEQ ID NO: 46178 - DNA, 25 bp, Saccharomyces pastorianus
cgttcccaagttgctcttattttag

SEQ ID NO: 46179 - DNA, 25 bp, Saccharomyces pastorianus
actggaaaactacaagcacgctgtt

SEQ ID NO: 46180 - DNA, 25 bp, Saccharomyces pastorianus
cattagaatgttacgtaggtcctca

SEQ ID NO: 46181 - DNA, 25 bp, Saccharomyces pastorianus
tacgtaggtcctcaaggtaatcttt

SEQ ID NO: 46182 - DNA, 25 bp, Saccharomyces pastorianus
gtcctcaaggtaatcttttagaaat

SEQ ID NO: 46183 - DNA, 25 bp, Saccharomyces pastorianus
ctcaatgtgaccgtttattgttaaa

SEQ ID NO: 46184 - DNA, 25 bp, Saccharomyces pastorianus
gttacgtaggtcctcaaggtaatct

SEQ ID NO: 46185 - DNA, 25 bp, Saccharomyces pastorianus
gaatgttacgtaggtcctcaaggta

SEQ ID NO: 46186 - DNA, 25 bp, Saccharomyces pastorianus
tagaatgttacgtaggtcctcaagg

SEQ ID NO: 46187 - DNA, 25 bp, Saccharomyces pastorianus
aatcttttagaaatgcatgcatctc

SEQ ID NO: 46188 - DNA, 25 bp, Saccharomyces pastorianus
caatgtgaccgtttattgttaaagt

SEQ ID NO: 46189 - DNA, 25 bp, Saccharomyces pastorianus
gtcattagaatgttacgtaggtcct

SEQ ID NO: 46190 - DNA, 25 bp, Saccharomyces pastorianus
gtaggtcctcaaggtaatcttttag

SEQ ID NO: 46191 - DNA, 25 bp, Saccharomyces pastorianus
acaccgttatctatggcagcaaagt

SEQ ID NO: 46192 - DNA, 25 bp, Saccharomyces pastorianus
gggagtgtgaactcgttcaacgagt

SEQ ID NO: 46193 - DNA, 25 bp, Saccharomyces pastorianus
agatgggagtgtgaactcgttcaac

SEQ ID NO: 46194 - DNA, 25 bp, Saccharomyces pastorianus
gtatcaacaccgttatctatggcag

SEQ ID NO: 46195 - DNA, 25 bp, Saccharomyces pastorianus
ggcaaatgttaatttttctaatgtt

SEQ ID NO: 46196 - DNA, 25 bp, Saccharomyces pastorianus
tggcgtcgacgggaaagataacaaa

SEQ ID NO: 46197 - DNA, 25 bp, Saccharomyces pastorianus
tcaacaccgttatctatggcagcaa

SEQ ID NO: 46198 - DNA, 25 bp, Saccharomyces pastorianus
gatggagtttgtatcaacaccgtta

SEQ ID NO: 46199 - DNA, 25 bp, Saccharomyces pastorianus
taatgttaataatagtactgctttc

SEQ ID NO: 46200 - DNA, 25 bp, Saccharomyces pastorianus
aatggtaataatggcgtcgacggga

SEQ ID NO: 46201 - DNA, 25 bp, Saccharomyces pastorianus
gagtttgtatcaacaccgttatcta

SEQ ID NO: 46202 - DNA, 25 bp, Saccharomyces pastorianus
tgggtagtacaacaccaacagcact

SEQ ID NO: 46203 - DNA, 25 bp, Saccharomyces pastorianus
aacagcttaaacaaccgcaccaatt

SEQ ID NO: 46204 - DNA, 25 bp, Saccharomyces pastorianus
gtgggtcacccataaatacgccgaa

SEQ ID NO: 46205 - DNA, 25 bp, Saccharomyces pastorianus
caatgctgtgccaaattatcgttat

SEQ ID NO: 46206 - DNA, 25 bp, Saccharomyces pastorianus
taacataaccgggaaccattcttat

SEQ ID NO: 46207 - DNA, 25 bp, Saccharomyces pastorianus
acgctgtggtggtcctaaatctgta

SEQ ID NO: 46208 - DNA, 25 bp, Saccharomyces pastorianus
tcaatgacaccgttgtctcgacaaa

SEQ ID NO: 46209 - DNA, 25 bp, Saccharomyces pastorianus
agaactcaattctcctcaatgacac

SEQ ID NO: 46210 - DNA, 25 bp, Saccharomyces pastorianus
ggaaatgttccacgtgtacctatca

SEQ ID NO: 46211 - DNA, 25 bp, Saccharomyces pastorianus
ccattcttatggtactcccgagtta

SEQ ID NO: 46212 - DNA, 25 bp, Saccharomyces pastorianus
aatacgccgaatagctttgtagcaa

SEQ ID NO: 46213 - DNA, 25 bp, Saccharomyces pastorianus
tttggtggccttctcaggagacgaa

SEQ ID NO: 46214 - DNA, 25 bp, Saccharomyces pastorianus
ctgttttggtttcttaccggcagag

SEQ ID NO: 46215 - DNA, 25 bp, Saccharomyces pastorianus
ccgctttcaagcttgtgtttggtgg

SEQ ID NO: 46216 - DNA, 25 bp, Saccharomyces pastorianus
gaacctagccaaagtagcctgtttt

SEQ ID NO: 46217 - DNA, 25 bp, Saccharomyces pastorianus
ggatgacatgaatagcagcgatctt

SEQ ID NO: 46218 - DNA, 25 bp, Saccharomyces pastorianus
gcgatcttggactcgagagacgtaa

SEQ ID NO: 46219 - DNA, 25 bp, Saccharomyces pastorianus
agacgaagagcctcctggcggctta

SEQ ID NO: 46220 - DNA, 25 bp, Saccharomyces pastorianus
gaatagcagcgatcttggactcgag

SEQ ID NO: 46221 - DNA, 25 bp, Saccharomyces pastorianus
aagcttgtgtttggtggccttctca

SEQ ID NO: 46222 - DNA, 25 bp, Saccharomyces pastorianus
ggcggcttattcttcatggacgtga

SEQ ID NO: 46223 - DNA, 25 bp, Saccharomyces pastorianus
ggacgtgaagaacctagccaaagta

SEQ ID NO: 46224 - DNA, 25 bp, Saccharomyces pastorianus
atgatgttatccaaagaggcaataa

SEQ ID NO: 46225 - DNA, 25 bp, Saccharomyces pastorianus
aaatcgctgatgaagtgatactgat

SEQ ID NO: 46226 - DNA, 25 bp, Saccharomyces pastorianus
aagattctcctgaagcccacgatga

SEQ ID NO: 46227 - DNA, 25 bp, Saccharomyces pastorianus
aagaggcggcgttgcgatcactgca

SEQ ID NO: 46228 - DNA, 25 bp, Saccharomyces pastorianus
gcgatcactgcaatcccacaaagat

SEQ ID NO: 46229 - DNA, 25 bp, Saccharomyces pastorianus
attttcattgaagaggcggcgttgc

SEQ ID NO: 46230 - DNA, 25 bp, Saccharomyces pastorianus
gaaatcttaagccagaacaatggta

SEQ ID NO: 46231 - DNA, 25 bp, Saccharomyces pastorianus
cgaattatcgcatttggatctagag

SEQ ID NO: 46232 - DNA, 25 bp, Saccharomyces pastorianus
tctcctgaagcccacgatgacggtg

SEQ ID NO: 46233 - DNA, 25 bp, Saccharomyces pastorianus
atgacggtgggcctttcgaattatc

SEQ ID NO: 46234 - DNA, 25 bp, Saccharomyces pastorianus
gtgggcctttcgaattatcgcattt

SEQ ID NO: 46235 - DNA, 25 bp, Saccharomyces pastorianus
gcaacagcatccaaagacgataaat

SEQ ID NO: 46236 - DNA, 25 bp, Saccharomyces pastorianus
gaccttatactaaaatatgcaacag

SEQ ID NO: 46237 - DNA, 25 bp, Saccharomyces pastorianus
aagagaagccttagaacgtgctaaa

SEQ ID NO: 46238 - DNA, 25 bp, Saccharomyces pastorianus
gccttagaacgtgctaaactggaaa

SEQ ID NO: 46239 - DNA, 25 bp, Saccharomyces pastorianus
cgataaattcagacactggtgtaaa

SEQ ID NO: 46240 - DNA, 25 bp, Saccharomyces pastorianus
tatgcaacagcatccaaagacgata

SEQ ID NO: 46241 - DNA, 25 bp, Saccharomyces pastorianus
gacactggtgtaaaaagattaaatc

SEQ ID NO: 46242 - DNA, 25 bp, Saccharomyces pastorianus
ttacaccacgaccttatactaaaat

SEQ ID NO: 46243 - DNA, 25 bp, Saccharomyces pastorianus
aagacgataaattcagacactggtg

SEQ ID NO: 46244 - DNA, 25 bp, Saccharomyces pastorianus
agaacgtgctaaactggaaaagaga

SEQ ID NO: 46245 - DNA, 25 bp, Saccharomyces pastorianus
gaagccttagaacgtgctaaactgg

SEQ ID NO: 46246 - DNA, 25 bp, Saccharomyces pastorianus
acacccgatggtatactagatctac

SEQ ID NO: 46247 - DNA, 25 bp, Saccharomyces pastorianus
ccatcaagggagacgtctggtcgtt

SEQ ID NO: 46248 - DNA, 25 bp, Saccharomyces pastorianus
cgggttggaccatctgtatcgacag

SEQ ID NO: 46249 - DNA, 25 bp, Saccharomyces pastorianus
ttcaccgaggttacccaaggatcgc

SEQ ID NO: 46250 - DNA, 25 bp, Saccharomyces pastorianus
tccacttacatgtcgcccgagagga

SEQ ID NO: 46251 - DNA, 25 bp, Saccharomyces pastorianus
tgggcataacgacacacccgatggt

SEQ ID NO: 46252 - DNA, 25 bp, Saccharomyces pastorianus
ccaaggatcgcgttttctccaaaga

SEQ ID NO: 46253 - DNA, 25 bp, Saccharomyces pastorianus
gattgttaatgagccttcaccgagg

SEQ ID NO: 46254 - DNA, 25 bp, Saccharomyces pastorianus
acatttgttgggacatccacttaca

SEQ ID NO: 46255 - DNA, 25 bp, Saccharomyces pastorianus
gatgatcatcgagttggtaaccggg

SEQ ID NO: 46256 - DNA, 25 bp, Saccharomyces pastorianus
aagggaatgtttactccatcaaggg

SEQ ID NO: 46257 - DNA, 25 bp, Saccharomyces pastorianus
gtcagcaatggcgaaatgcaggaaa

SEQ ID NO: 46258 - DNA, 25 bp, Saccharomyces pastorianus
aacaacagtaatttgtacttgcgaa

SEQ ID NO: 46259 - DNA, 25 bp, Saccharomyces pastorianus
gatgtccaatatcaacgcggtacaa

SEQ ID NO: 46260 - DNA, 25 bp, Saccharomyces pastorianus
tatcaacgcggtacaaaacaacagt

SEQ ID NO: 46261 - DNA, 25 bp, Saccharomyces pastorianus
gggcttaatctgaacctacaggcag

SEQ ID NO: 46262 - DNA, 25 bp, Saccharomyces pastorianus
cctacaggcagatttggtcagcaat

SEQ ID NO: 46263 - DNA, 25 bp, Saccharomyces pastorianus
gcagatttggtcagcaatggcgaaa

SEQ ID NO: 46264 - DNA, 25 bp, Saccharomyces pastorianus
accaacgaccctctcgaatagaagg

SEQ ID NO: 46265 - DNA, 25 bp, Saccharomyces pastorianus
taatttgtacttgcgaagaggcata

SEQ ID NO: 46266 - DNA, 25 bp, Saccharomyces pastorianus
aaaagacagaggctcaccaacgacc

SEQ ID NO: 46267 - DNA, 25 bp, Saccharomyces pastorianus
atagaaggccagttgatgtccaata

SEQ ID NO: 46268 - DNA, 25 bp, Saccharomyces pastorianus
gcaacagcatccaaagacgataaat

SEQ ID NO: 46269 - DNA, 25 bp, Saccharomyces pastorianus
gaccttatactaaaatatgcaacag

SEQ ID NO: 46270 - DNA, 25 bp, Saccharomyces pastorianus
aagagaagccttagaacgtgctaaa

SEQ ID NO: 46271 - DNA, 25 bp, Saccharomyces pastorianus
gccttagaacgtgctaaactggaaa

SEQ ID NO: 46272 - DNA, 25 bp, Saccharomyces pastorianus
cgataaattcagacactggtgtaaa

SEQ ID NO: 46273 - DNA, 25 bp, Saccharomyces pastorianus
tatgcaacagcatccaaagacgata

SEQ ID NO: 46274 - DNA, 25 bp, Saccharomyces pastorianus
gacactggtgtaaaaagattaaatc

SEQ ID NO: 46275 - DNA, 25 bp, Saccharomyces pastorianus
ttacaccacgaccttatactaaaat

SEQ ID NO: 46276 - DNA, 25 bp, Saccharomyces pastorianus
aagacgataaattcagacactggtg

SEQ ID NO: 46277 - DNA, 25 bp, Saccharomyces pastorianus
agaacgtgctaaactggaaaagaga

SEQ ID NO: 46278 - DNA, 25 bp, Saccharomyces pastorianus
gaagccttagaacgtgctaaactgg

SEQ ID NO: 46279 - DNA, 25 bp, Saccharomyces pastorianus
ggtactattgttctgttccacagga

SEQ ID NO: 46280 - DNA, 25 bp, Saccharomyces pastorianus
acaggaatggtcttcttggccacga

SEQ ID NO: 46281 - DNA, 25 bp, Saccharomyces pastorianus
ttccacaggaatggtcttcttggcc

SEQ ID NO: 46282 - DNA, 25 bp, Saccharomyces pastorianus
atggataactccctgactaattggt

SEQ ID NO: 46283 - DNA, 25 bp, Saccharomyces pastorianus
ggtcttcttggccacgattttagaa

SEQ ID NO: 46284 - DNA, 25 bp, Saccharomyces pastorianus
actccctgactaattggttgataat

SEQ ID NO: 46285 - DNA, 25 bp, Saccharomyces pastorianus
gaacgtgtaatgctttcactacagt

SEQ ID NO: 46286 - DNA, 25 bp, Saccharomyces pastorianus
gataatggtactattgttctgttcc

SEQ ID NO: 46287 - DNA, 25 bp, Saccharomyces pastorianus
gaatcaggaacgtgtaatgctttca

SEQ ID NO: 46288 - DNA, 25 bp, Saccharomyces pastorianus
aatggtcttcttggccacgatttta

SEQ ID NO: 46289 - DNA, 25 bp, Saccharomyces pastorianus
cttggccacgattttagaatcagga

SEQ ID NO: 46290 - DNA, 25 bp, Saccharomyces pastorianus
ggtaacctcggtgaaggctcattaa

SEQ ID NO: 46291 - DNA, 25 bp, Saccharomyces pastorianus
ccggttaccaactcgatgatcatca

SEQ ID NO: 46292 - DNA, 25 bp, Saccharomyces pastorianus
aacgaaatctgtcagttctttggag

SEQ ID NO: 46293 - DNA, 25 bp, Saccharomyces pastorianus
gttctttggagaaaacgcgatcctt

SEQ ID NO: 46294 - DNA, 25 bp, Saccharomyces pastorianus
gcgatccttgggtaacctcggtgaa

SEQ ID NO: 46295 - DNA, 25 bp, Saccharomyces pastorianus
ggctcattaacaatcctctgtagta

SEQ ID NO: 46296 - DNA, 25 bp, Saccharomyces pastorianus
tctccctttcgttcttgatacaaca

SEQ ID NO: 46297 - DNA, 25 bp, Saccharomyces pastorianus
ttcattaatcgacgatctctccctt

SEQ ID NO: 46298 - DNA, 25 bp, Saccharomyces pastorianus
gtagatctagtataccatcgggtgt

SEQ ID NO: 46299 - DNA, 25 bp, Saccharomyces pastorianus
ataccatcgggtgtgtcgttatgcc

SEQ ID NO: 46300 - DNA, 25 bp, Saccharomyces pastorianus
aaggtcgtggtgtaacaattcatta

SEQ ID NO: 46301 - DNA, 25 bp, Saccharomyces pastorianus
tcacattgtctcttttccagtttag

SEQ ID NO: 46302 - DNA, 25 bp, Saccharomyces pastorianus
ttccagtttagcacgttctaaggct

SEQ ID NO: 46303 - DNA, 25 bp, Saccharomyces pastorianus
atgtgcttgtatttggagtgttcaa

SEQ ID NO: 46304 - DNA, 25 bp, Saccharomyces pastorianus
cttttccagtttagcacgttctaag

SEQ ID NO: 46305 - DNA, 25 bp, Saccharomyces pastorianus
tttcacattgtctcttttccagttt

SEQ ID NO: 46306 - DNA, 25 bp, Saccharomyces pastorianus
gtttagcacgttctaaggcttctct

SEQ ID NO: 46307 - DNA, 25 bp, Saccharomyces pastorianus
agcacgttctaaggcttctcttttt

SEQ ID NO: 46308 - DNA, 25 bp, Saccharomyces pastorianus
aacctgatatgtttctatgtgcttg

SEQ ID NO: 46309 - DNA, 25 bp, Saccharomyces pastorianus
gatttttcacattgtctcttttcca

SEQ ID NO: 46310 - DNA, 25 bp, Saccharomyces pastorianus
gttcaaatttgttgatttttcacat

SEQ ID NO: 46311 - DNA, 25 bp, Saccharomyces pastorianus
atgtttctatgtgcttgtatttgga

SEQ ID NO: 46312 - DNA, 25 bp, Saccharomyces pastorianus
gcctttgggctcgtccgaggtaccg

SEQ ID NO: 46313 - DNA, 25 bp, Saccharomyces pastorianus
ttgatagcctttgggctcgtccgag

SEQ ID NO: 46314 - DNA, 25 bp, Saccharomyces pastorianus
gttattgatagcctttgggctcgtc

SEQ ID NO: 46315 - DNA, 25 bp, Saccharomyces pastorianus
tgggttattgatagcctttgggctc

SEQ ID NO: 46316 - DNA, 25 bp, Saccharomyces pastorianus
attgatagcctttgggctcgtccga

SEQ ID NO: 46317 - DNA, 25 bp, Saccharomyces pastorianus
tagcctttgggctcgtccgaggtac

SEQ ID NO: 46318 - DNA, 25 bp, Saccharomyces pastorianus
ctttggtgggttattgatagccttt

SEQ ID NO: 46319 - DNA, 25 bp, Saccharomyces pastorianus
gctcgtccgaggtaccgaaggttgg

SEQ ID NO: 46320 - DNA, 25 bp, Saccharomyces pastorianus
gtgggttattgatagcctttgggct

SEQ ID NO: 46321 - DNA, 25 bp, Saccharomyces pastorianus
acgtagctttggtgggttattgata

SEQ ID NO: 46322 - DNA, 25 bp, Saccharomyces pastorianus
ttattgatagcctttgggctcgtcc

SEQ ID NO: 46323 - DNA, 25 bp, Saccharomyces pastorianus
tgcagaactggatcgccggtgggaa

SEQ ID NO: 46324 - DNA, 25 bp, Saccharomyces pastorianus
tgggaactccagtggcaagatcttc

SEQ ID NO: 46325 - DNA, 25 bp, Saccharomyces pastorianus
tccagtggcaagatcttcctcttct

SEQ ID NO: 46326 - DNA, 25 bp, Saccharomyces pastorianus
ggtgggaactccagtggcaagatct

SEQ ID NO: 46327 - DNA, 25 bp, Saccharomyces pastorianus
tcgccggtgggaactccagtggcaa

SEQ ID NO: 46328 - DNA, 25 bp, Saccharomyces pastorianus
actggatcgccggtgggaactccag

SEQ ID NO: 46329 - DNA, 25 bp, Saccharomyces pastorianus
cagtggcaagatcttcctcttctcc

SEQ ID NO: 46330 - DNA, 25 bp, Saccharomyces pastorianus
actccagtggcaagatcttcctctt

SEQ ID NO: 46331 - DNA, 25 bp, Saccharomyces pastorianus
atcgccggtgggaactccagtggca

SEQ ID NO: 46332 - DNA, 25 bp, Saccharomyces pastorianus
gaactccagtggcaagatcttcctc

SEQ ID NO: 46333 - DNA, 25 bp, Saccharomyces pastorianus
acaccactgtcctgcgtggtcagtt

SEQ ID NO: 46334 - DNA, 25 bp, Saccharomyces pastorianus
agagcagtgatagcctcgtcacaga

SEQ ID NO: 46335 - DNA, 25 bp, Saccharomyces pastorianus
acgatgacactgtccgtctgttcga

SEQ ID NO: 46336 - DNA, 25 bp, Saccharomyces pastorianus
cgacatttacaacagcgacggccaa

SEQ ID NO: 46337 - DNA, 25 bp, Saccharomyces pastorianus
gtttagttacgagaacccgcatgtt

SEQ ID NO: 46338 - DNA, 25 bp, Saccharomyces pastorianus
gtctatggccataaacccgctaagg

SEQ ID NO: 46339 - DNA, 25 bp, Saccharomyces pastorianus
gttaagcgtctctgcggtgtcgtac

SEQ ID NO: 46340 - DNA, 25 bp, Saccharomyces pastorianus
gaatttaccacttttgacacgagag

SEQ ID NO: 46341 - DNA, 25 bp, Saccharomyces pastorianus
acaagaatgtgttcgccatcgccaa

SEQ ID NO: 46342 - DNA, 25 bp, Saccharomyces pastorianus
gaccctggtatgcaacggctacgat

SEQ ID NO: 46343 - DNA, 25 bp, Saccharomyces pastorianus
tgttttgttccttactacactgggt

SEQ ID NO: 46344 - DNA, 25 bp, Saccharomyces pastorianus
gggtctctcgacagaacactcaaga

SEQ ID NO: 46345 - DNA, 25 bp, Saccharomyces pastorianus
aggccagaagccagagctgttcaga

SEQ ID NO: 46346 - DNA, 25 bp, Saccharomyces pastorianus
atgtcaatggaggtcgtacgtcaaa

SEQ ID NO: 46347 - DNA, 25 bp, Saccharomyces pastorianus
ggaagcagtttcaaccaggccagaa

SEQ ID NO: 46348 - DNA, 25 bp, Saccharomyces pastorianus
gccccaaccagaatatatctctcaa

SEQ ID NO: 46349 - DNA, 25 bp, Saccharomyces pastorianus
ggacacattccctcgttatgatgga

SEQ ID NO: 46350 - DNA, 25 bp, Saccharomyces pastorianus
gtttaatgtgaaagacctcgccagc

SEQ ID NO: 46351 - DNA, 25 bp, Saccharomyces pastorianus
taggtaagcatgcactaggccccaa

SEQ ID NO: 46352 - DNA, 25 bp, Saccharomyces pastorianus
atttgccacggaagatcacggcgat

SEQ ID NO: 46353 - DNA, 25 bp, Saccharomyces pastorianus
ggtgattctgcccttaacaataagt

SEQ ID NO: 46354 - DNA, 25 bp, Saccharomyces pastorianus
tcttttctagattcggacacattcc

SEQ ID NO: 46355 - DNA, 25 bp, Saccharomyces pastorianus
aaagacctcgccagcaaagatgcag

SEQ ID NO: 46356 - DNA, 25 bp, Saccharomyces pastorianus
gattattctgaattgcctacaagtc

SEQ ID NO: 46357 - DNA, 25 bp, Saccharomyces pastorianus
atttgatcgctctttacaacagtga

SEQ ID NO: 46358 - DNA, 25 bp, Saccharomyces pastorianus
gtgctattccaccaacataacaggg

SEQ ID NO: 46359 - DNA, 25 bp, Saccharomyces pastorianus
gatattttggacctttctttgccga

SEQ ID NO: 46360 - DNA, 25 bp, Saccharomyces pastorianus
gctatgaccgcaaacgttgttgaag

SEQ ID NO: 46361 - DNA, 25 bp, Saccharomyces pastorianus
ataggcactttactctttgtcgttt

SEQ ID NO: 46362 - DNA, 25 bp, Saccharomyces pastorianus
tttgccgataccactatttaggacc

SEQ ID NO: 46363 - DNA, 25 bp, Saccharomyces pastorianus
gttttcatttccacatacatgggac

SEQ ID NO: 46364 - DNA, 25 bp, Saccharomyces pastorianus
acgatgaacttcaaactctgccctg

SEQ ID NO: 46365 - DNA, 25 bp, Saccharomyces pastorianus
gtaccttttaaatatatccgacgat

SEQ ID NO: 46366 - DNA, 25 bp, Saccharomyces pastorianus
gaattgacgcgcatgatgtggctaa

SEQ ID NO: 46367 - DNA, 25 bp, Saccharomyces pastorianus
tcaacggcctttgtttttcagacac

SEQ ID NO: 46368 - DNA, 25 bp, Saccharomyces pastorianus
ctaaaaagagcaatactgtggagga

SEQ ID NO: 46369 - DNA, 25 bp, Saccharomyces pastorianus
aagagcaatactgtggaggaagatc

SEQ ID NO: 46370 - DNA, 25 bp, Saccharomyces pastorianus
tactgtggaggaagatcaacggcct

SEQ ID NO: 46371 - DNA, 25 bp, Saccharomyces pastorianus
agatcaacggcctttgtttttcaga

SEQ ID NO: 46372 - DNA, 25 bp, Saccharomyces pastorianus
aatactgtggaggaagatcaacggc

SEQ ID NO: 46373 - DNA, 25 bp, Saccharomyces pastorianus
agcaatactgtggaggaagatcaac

SEQ ID NO: 46374 - DNA, 25 bp, Saccharomyces pastorianus
ggaggaagatcaacggcctttgttt

SEQ ID NO: 46375 - DNA, 25 bp, Saccharomyces pastorianus
ctgtggaggaagatcaacggccttt

SEQ ID NO: 46376 - DNA, 25 bp, Saccharomyces pastorianus
gaggaagatcaacggcctttgtttt

SEQ ID NO: 46377 - DNA, 25 bp, Saccharomyces pastorianus
tggaggaagatcaacggcctttgtt

SEQ ID NO: 46378 - DNA, 25 bp, Saccharomyces pastorianus
aaacgatttgcgtgttcctgaatca

SEQ ID NO: 46379 - DNA, 25 bp, Saccharomyces pastorianus
gcaatttccctatacctgacttaga

SEQ ID NO: 46380 - DNA, 25 bp, Saccharomyces pastorianus
aacacttttctatcgcgaatatttg

SEQ ID NO: 46381 - DNA, 25 bp, Saccharomyces pastorianus
gagagataaataccagcagcccaac

SEQ ID NO: 46382 - DNA, 25 bp, Saccharomyces pastorianus
ttttgcattcatctggtagtagtca

SEQ ID NO: 46383 - DNA, 25 bp, Saccharomyces pastorianus
tttggtttacaatcagacgaagtca

SEQ ID NO: 46384 - DNA, 25 bp, Saccharomyces pastorianus
gagaggttcttctcttttgcattca

SEQ ID NO: 46385 - DNA, 25 bp, Saccharomyces pastorianus
gtcaagagatgagcaatttccctat

SEQ ID NO: 46386 - DNA, 25 bp, Saccharomyces pastorianus
tcaatccttctctcggcagtcaaga

SEQ ID NO: 46387 - DNA, 25 bp, Saccharomyces pastorianus
caactctcatgggaaaaacactttt

SEQ ID NO: 46388 - DNA, 25 bp, Saccharomyces pastorianus
tgaatcagatcaaggctccagcaca

SEQ ID NO: 46389 - DNA, 25 bp, Saccharomyces pastorianus
tagctttacaaaaccacaggcccat

SEQ ID NO: 46390 - DNA, 25 bp, Saccharomyces pastorianus
gatgtaacaatctctactatgtgga

SEQ ID NO: 46391 - DNA, 25 bp, Saccharomyces pastorianus
tatgctttgagatatcctggttttg

SEQ ID NO: 46392 - DNA, 25 bp, Saccharomyces pastorianus
gtaaacctgaaaacctgcttattat

SEQ ID NO: 46393 - DNA, 25 bp, Saccharomyces pastorianus
tacctacacacgcacctaaatatga

SEQ ID NO: 46394 - DNA, 25 bp, Saccharomyces pastorianus
aagatggctcatatcgtcaatacga

SEQ ID NO: 46395 - DNA, 25 bp, Saccharomyces pastorianus
gatctagtgtagttccattgcatag

SEQ ID NO: 46396 - DNA, 25 bp, Saccharomyces pastorianus
aagaattgcccgcttttcaagaaat

SEQ ID NO: 46397 - DNA, 25 bp, Saccharomyces pastorianus
aacatatcccactagctttacaaaa

SEQ ID NO: 46398 - DNA, 25 bp, Saccharomyces pastorianus
gaaatcttatgaccctgatagaacg

SEQ ID NO: 46399 - DNA, 25 bp, Saccharomyces pastorianus
gaaaagctgcaatcagtaaacctga

SEQ ID NO: 46400 - DNA, 25 bp, Saccharomyces pastorianus
gaaactgggacaattcactgccgtt

SEQ ID NO: 46401 - DNA, 25 bp, Saccharomyces pastorianus
cactgccgttttactgagacatatt

SEQ ID NO: 46402 - DNA, 25 bp, Saccharomyces pastorianus
aaaaaacatctccatttcttgccct

SEQ ID NO: 46403 - DNA, 25 bp, Saccharomyces pastorianus
tgaaacacatgatgcactgctggaa

SEQ ID NO: 46404 - DNA, 25 bp, Saccharomyces pastorianus
gctgaccaccctaagatcatcaaaa

SEQ ID NO: 46405 - DNA, 25 bp, Saccharomyces pastorianus
agttgaatttggctgaccaccctaa

SEQ ID NO: 46406 - DNA, 25 bp, Saccharomyces pastorianus
gaattgatgactacacagcccaaga

SEQ ID NO: 46407 - DNA, 25 bp, Saccharomyces pastorianus
aatggaacccaagactgatctagac

SEQ ID NO: 46408 - DNA, 25 bp, Saccharomyces pastorianus
gaaattgccaactccgacgatgata

SEQ ID NO: 46409 - DNA, 25 bp, Saccharomyces pastorianus
ggaccaagatgatgactttacccaa

SEQ ID NO: 46410 - DNA, 25 bp, Saccharomyces pastorianus
tgcaactggataggagagccgcccc

SEQ ID NO: 46411 - DNA, 25 bp, Saccharomyces pastorianus
actggctgcatatttcacaaaggct

SEQ ID NO: 46412 - DNA, 25 bp, Saccharomyces pastorianus
gtactgtgcgcatgcttgaactggc

SEQ ID NO: 46413 - DNA, 25 bp, Saccharomyces pastorianus
tgaagacacaccttccgtttcagat

SEQ ID NO: 46414 - DNA, 25 bp, Saccharomyces pastorianus
aaaggctaagttgtccccaatccat

SEQ ID NO: 46415 - DNA, 25 bp, Saccharomyces pastorianus
gtaccaacgcactgcaagtggcgat

SEQ ID NO: 46416 - DNA, 25 bp, Saccharomyces pastorianus
tagagaagcaatttaccgtatcacg

SEQ ID NO: 46417 - DNA, 25 bp, Saccharomyces pastorianus
gaaaaactggctcgcaaggtgctag

SEQ ID NO: 46418 - DNA, 25 bp, Saccharomyces pastorianus
gccaagttcgatatctgtgcagcta

SEQ ID NO: 46419 - DNA, 25 bp, Saccharomyces pastorianus
acaagcctcgtattttgcgggtgaa

SEQ ID NO: 46420 - DNA, 25 bp, Saccharomyces pastorianus
ccatcgagttggagcgtcgttcatt

SEQ ID NO: 46421 - DNA, 25 bp, Saccharomyces pastorianus
tgactttgatccttacgccaagttc

SEQ ID NO: 46422 - DNA, 25 bp, Saccharomyces pastorianus
gaaattcatcttggaaggtcacaca

SEQ ID NO: 46423 - DNA, 25 bp, Saccharomyces pastorianus
catcccactgatgatctgatcgttt

SEQ ID NO: 46424 - DNA, 25 bp, Saccharomyces pastorianus
tctcttggcgactgtgtggtgaaat

SEQ ID NO: 46425 - DNA, 25 bp, Saccharomyces pastorianus
gaatttgggatatctcaggcttaag

SEQ ID NO: 46426 - DNA, 25 bp, Saccharomyces pastorianus
ctgctcctagcaacaattctttcga

SEQ ID NO: 46427 - DNA, 25 bp, Saccharomyces pastorianus
tttttcacccacaccaaaatctgat

SEQ ID NO: 46428 - DNA, 25 bp, Saccharomyces pastorianus
ggaaatcgcttgtttgactggtcac

SEQ ID NO: 46429 - DNA, 25 bp, Saccharomyces pastorianus
taggttttggttaatcgcagcccac

SEQ ID NO: 46430 - DNA, 25 bp, Saccharomyces pastorianus
aaggcttgggaagtcgacacttgca

SEQ ID NO: 46431 - DNA, 25 bp, Saccharomyces pastorianus
cttttggacggttctcttggcgact

SEQ ID NO: 46432 - DNA, 25 bp, Saccharomyces pastorianus
gaaagagacattctgctcctagcaa

SEQ ID NO: 46433 - DNA, 25 bp, Saccharomyces pastorianus
agaagttgggtgacgtaagaccgct

SEQ ID NO: 46434 - DNA, 25 bp, Saccharomyces pastorianus
gactctattatcaaggatttccacg

SEQ ID NO: 46435 - DNA, 25 bp, Saccharomyces pastorianus
gagttaggcactccaattttgaaac

SEQ ID NO: 46436 - DNA, 25 bp, Saccharomyces pastorianus
gacactcaagttaaggaggtcactg

SEQ ID NO: 46437 - DNA, 25 bp, Saccharomyces pastorianus
ggcactccaattttgaaaccaataa

SEQ ID NO: 46438 - DNA, 25 bp, Saccharomyces pastorianus
aggaggtcactgttaagatcaagaa

SEQ ID NO: 46439 - DNA, 25 bp, Saccharomyces pastorianus
cacttcgccaacaggttgactggtt

SEQ ID NO: 46440 - DNA, 25 bp, Saccharomyces pastorianus
ggttgactggttggaatgctattaa

SEQ ID NO: 46441 - DNA, 25 bp, Saccharomyces pastorianus
cgtaagaccgctaaatatcgatgat

SEQ ID NO: 46442 - DNA, 25 bp, Saccharomyces pastorianus
agatttaggaaattccaatgggcat

SEQ ID NO: 46443 - DNA, 25 bp, Saccharomyces pastorianus
ggatttccacgctgagttaggcact

SEQ ID NO: 46444 - DNA, 25 bp, Saccharomyces pastorianus
atttcctttgctgctttcatcctag

SEQ ID NO: 46445 - DNA, 25 bp, Saccharomyces pastorianus
ctgactctattatttcctttgctgc

SEQ ID NO: 46446 - DNA, 25 bp, Saccharomyces pastorianus
ctttcatcctagctgatgctggttt

SEQ ID NO: 46447 - DNA, 25 bp, Saccharomyces pastorianus
attatttcctttgctgctttcatcc

SEQ ID NO: 46448 - DNA, 25 bp, Saccharomyces pastorianus
tctattatttcctttgctgctttca

SEQ ID NO: 46449 - DNA, 25 bp, Saccharomyces pastorianus
gatgctggtttggaaatcacctctg

SEQ ID NO: 46450 - DNA, 25 bp, Saccharomyces pastorianus
tggtttggaaatcacctctgacaac

SEQ ID NO: 46451 - DNA, 25 bp, Saccharomyces pastorianus
ctttgctgctttcatcctagctgat

SEQ ID NO: 46452 - DNA, 25 bp, Saccharomyces pastorianus
gactctattatttcctttgctgctt

SEQ ID NO: 46453 - DNA, 25 bp, Saccharomyces pastorianus
gctgctttcatcctagctgatgctg

SEQ ID NO: 46454 - DNA, 25 bp, Saccharomyces pastorianus
atcctagctgatgctggtttggaaa

SEQ ID NO: 46455 - DNA, 25 bp, Saccharomyces pastorianus
ttgcgatggccttcttttattatcc

SEQ ID NO: 46456 - DNA, 25 bp, Saccharomyces pastorianus
attttgattgcgatggccttctttt

SEQ ID NO: 46457 - DNA, 25 bp, Saccharomyces pastorianus
atggccttcttttattatccagatg

SEQ ID NO: 46458 - DNA, 25 bp, Saccharomyces pastorianus
ttttgattgcgatggccttctttta

SEQ ID NO: 46459 - DNA, 25 bp, Saccharomyces pastorianus
gccttcttttattatccagatgaaa

SEQ ID NO: 46460 - DNA, 25 bp, Saccharomyces pastorianus
tatattttgattgcgatggccttct

SEQ ID NO: 46461 - DNA, 25 bp, Saccharomyces pastorianus
tattttgattgcgatggccttcttt

SEQ ID NO: 46462 - DNA, 25 bp, Saccharomyces pastorianus
gattgcgatggccttcttttattat

SEQ ID NO: 46463 - DNA, 25 bp, Saccharomyces pastorianus
ggccttcttttattatccagatgaa

SEQ ID NO: 46464 - DNA, 25 bp, Saccharomyces pastorianus
gtatattttgattgcgatggccttc

SEQ ID NO: 46465 - DNA, 25 bp, Saccharomyces pastorianus
ccttcttttattatccagatgaaaa

SEQ ID NO: 46466 - DNA, 25 bp, Saccharomyces pastorianus
gcactgggtgttgccattggttcct

SEQ ID NO: 46467 - DNA, 25 bp, Saccharomyces pastorianus
gggtgttgccattggttcctctcta

SEQ ID NO: 46468 - DNA, 25 bp, Saccharomyces pastorianus
cattggttcctctctacaaattgct

SEQ ID NO: 46469 - DNA, 25 bp, Saccharomyces pastorianus
ttgtcggctggatgattgacgttcc

SEQ ID NO: 46470 - DNA, 25 bp, Saccharomyces pastorianus
cgttacaccatttatggttcttgtc

SEQ ID NO: 46471 - DNA, 25 bp, Saccharomyces pastorianus
gctctattcgttacaccatttatgg

SEQ ID NO: 46472 - DNA, 25 bp, Saccharomyces pastorianus
acaaattgctctattcgttacacca

SEQ ID NO: 46473 - DNA, 25 bp, Saccharomyces pastorianus
gacgttccaatgacgctgaattttt

SEQ ID NO: 46474 - DNA, 25 bp, Saccharomyces pastorianus
tatggttcttgtcggctggatgatt

SEQ ID NO: 46475 - DNA, 25 bp, Saccharomyces pastorianus
gatgattgacgttccaatgacgctg

SEQ ID NO: 46476 - DNA, 25 bp, Saccharomyces pastorianus
caagatggatttggcactgggtgtt

SEQ ID NO: 46477 - DNA, 25 bp, Saccharomyces pastorianus
ggtctccttctacttcgagaggtta

SEQ ID NO: 46478 - DNA, 25 bp, Saccharomyces pastorianus
ataataacaaattctctccgcgacc

SEQ ID NO: 46479 - DNA, 25 bp, Saccharomyces pastorianus
ggccacttcagtgtacttggtcaaa

SEQ ID NO: 46480 - DNA, 25 bp, Saccharomyces pastorianus
agagatcttctcttactcattcgcg

SEQ ID NO: 46481 - DNA, 25 bp, Saccharomyces pastorianus
tacatgtctttcaccgttcttacaa

SEQ ID NO: 46482 - DNA, 25 bp, Saccharomyces pastorianus
acaacgcttatccaattccttttct

SEQ ID NO: 46483 - DNA, 25 bp, Saccharomyces pastorianus
gtcggattcatccaactacagtaat

SEQ ID NO: 46484 - DNA, 25 bp, Saccharomyces pastorianus
gcgacctttcgatgcagacttcaag

SEQ ID NO: 46485 - DNA, 25 bp, Saccharomyces pastorianus
ttgggctgaatataccgacggtctc

SEQ ID NO: 46486 - DNA, 25 bp, Saccharomyces pastorianus
atgattcatcccctcttaataagca

SEQ ID NO: 46487 - DNA, 25 bp, Saccharomyces pastorianus
tttgccggagtttaacgagcccaat

SEQ ID NO: 46488 - DNA, 25 bp, Saccharomyces pastorianus
gcgactttgagaagttgggtaaact

SEQ ID NO: 46489 - DNA, 25 bp, Saccharomyces pastorianus
aaacaacggtaagatcgcgcatcag

SEQ ID NO: 46490 - DNA, 25 bp, Saccharomyces pastorianus
gtgcatttccacttgattcctaaga

SEQ ID NO: 46491 - DNA, 25 bp, Saccharomyces pastorianus
ggccatgaagttggacacctataac

SEQ ID NO: 46492 - DNA, 25 bp, Saccharomyces pastorianus
ggaccatgtgcatttccacttgatt

SEQ ID NO: 46493 - DNA, 25 bp, Saccharomyces pastorianus
gttgatcgtcggctggccagctcaa

SEQ ID NO: 46494 - DNA, 25 bp, Saccharomyces pastorianus
ctaagagagacgagaagaccgggtt

SEQ ID NO: 46495 - DNA, 25 bp, Saccharomyces pastorianus
tcgcgcatcaggaagtggaccatgt

SEQ ID NO: 46496 - DNA, 25 bp, Saccharomyces pastorianus
ggccagctcaagaaagcgactttga

SEQ ID NO: 46497 - DNA, 25 bp, Saccharomyces pastorianus
tggacacctataacatcttgcaaaa

SEQ ID NO: 46498 - DNA, 25 bp, Saccharomyces pastorianus
tcggctggccagctcaagaaagcga

SEQ ID NO: 46499 - DNA, 25 bp, Saccharomyces pastorianus
aatgtaacagcagatgtaagcccac

SEQ ID NO: 46500 - DNA, 25 bp, Saccharomyces pastorianus
agagtacccctccatagttgtaaag

SEQ ID NO: 46501 - DNA, 25 bp, Saccharomyces pastorianus
gggttatctatgtcttttaaagtct

SEQ ID NO: 46502 - DNA, 25 bp, Saccharomyces pastorianus
cttccatagcgttgactttttgtct

SEQ ID NO: 46503 - DNA, 25 bp, Saccharomyces pastorianus
gactttttgtcttgttggattctag

SEQ ID NO: 46504 - DNA, 25 bp, Saccharomyces pastorianus
aagatctaatggctgtaatgtaaca

SEQ ID NO: 46505 - DNA, 25 bp, Saccharomyces pastorianus
gtcttttaaagtcttccatagcgtt

SEQ ID NO: 46506 - DNA, 25 bp, Saccharomyces pastorianus
taagcccaccaaaaaagcctccaat

SEQ ID NO: 46507 - DNA, 25 bp, Saccharomyces pastorianus
ataacgcactacctattgatgttcg

SEQ ID NO: 46508 - DNA, 25 bp, Saccharomyces pastorianus
tgctgaaggtagagtacccctccat

SEQ ID NO: 46509 - DNA, 25 bp, Saccharomyces pastorianus
gtcttgttggattctagtctttaaa

SEQ ID NO: 46510 - DNA, 25 bp, Saccharomyces pastorianus
tttaagctggccttacaaacgcctc

SEQ ID NO: 46511 - DNA, 25 bp, Saccharomyces pastorianus
ggaactaacacctgcaaggctgaca

SEQ ID NO: 46512 - DNA, 25 bp, Saccharomyces pastorianus
gacattgtaccttcagagctggcgt

SEQ ID NO: 46513 - DNA, 25 bp, Saccharomyces pastorianus
aattgatattgcttctgttctaggg

SEQ ID NO: 46514 - DNA, 25 bp, Saccharomyces pastorianus
acgctccttattatgttaacctggt

SEQ ID NO: 46515 - DNA, 25 bp, Saccharomyces pastorianus
gctggcgttcgcaattatttctgca

SEQ ID NO: 46516 - DNA, 25 bp, Saccharomyces pastorianus
aataggcgcttatagagtcattcat

SEQ ID NO: 46517 - DNA, 25 bp, Saccharomyces pastorianus
aaggcgcgatgattggtttgcataa

SEQ ID NO: 46518 - DNA, 25 bp, Saccharomyces pastorianus
atcatggcaacgtggatattctcat

SEQ ID NO: 46519 - DNA, 25 bp, Saccharomyces pastorianus
taagcggaatggaccacgtaacgtc

SEQ ID NO: 46520 - DNA, 25 bp, Saccharomyces pastorianus
agtcattcatacatttgctccagat

SEQ ID NO: 46521 - DNA, 25 bp, Saccharomyces pastorianus
ggacaagactagtaaaggcaccgac

SEQ ID NO: 46522 - DNA, 25 bp, Saccharomyces pastorianus
gtctcgatgcggacgacagcgacga

SEQ ID NO: 46523 - DNA, 25 bp, Saccharomyces pastorianus
gacgacttagagaacatcgactcgg

SEQ ID NO: 46524 - DNA, 25 bp, Saccharomyces pastorianus
gtacattgccaagctggagggcgat

SEQ ID NO: 46525 - DNA, 25 bp, Saccharomyces pastorianus
gtatcaatcacttgcagaggtccag

SEQ ID NO: 46526 - DNA, 25 bp, Saccharomyces pastorianus
ggcgctatacaaggactccgtcaga

SEQ ID NO: 46527 - DNA, 25 bp, Saccharomyces pastorianus
aaggcaccgacgtcgacatggacaa

SEQ ID NO: 46528 - DNA, 25 bp, Saccharomyces pastorianus
caaaacggcgataagcggtatgtcc

SEQ ID NO: 46529 - DNA, 25 bp, Saccharomyces pastorianus
acgcgttggagcaagaaaccgtgta

SEQ ID NO: 46530 - DNA, 25 bp, Saccharomyces pastorianus
gtccagtgctcgcttgggtaagtac

SEQ ID NO: 46531 - DNA, 25 bp, Saccharomyces pastorianus
aacgacatcgtgcttaacaactaca

SEQ ID NO: 46532 - DNA, 25 bp, Saccharomyces pastorianus
gcagcagcagagtttcccgaaggaa

SEQ ID NO: 46533 - DNA, 25 bp, Saccharomyces pastorianus
acttccaaggagacggtgcagacat

SEQ ID NO: 46534 - DNA, 25 bp, Saccharomyces pastorianus
taagcttttctcgtggctgaccggg

SEQ ID NO: 46535 - DNA, 25 bp, Saccharomyces pastorianus
ggaacctcagctcagggcaatgaaa

SEQ ID NO: 46536 - DNA, 25 bp, Saccharomyces pastorianus
gtgtcactaaaaccggatgcccata

SEQ ID NO: 46537 - DNA, 25 bp, Saccharomyces pastorianus
atccatgaagtctgcagtactgcca

SEQ ID NO: 46538 - DNA, 25 bp, Saccharomyces pastorianus
gacaccgagtatcttttgaaccctg

SEQ ID NO: 46539 - DNA, 25 bp, Saccharomyces pastorianus
gtgcagacatcttgtcagcgccaga

SEQ ID NO: 46540 - DNA, 25 bp, Saccharomyces pastorianus
gaacacttccgtcattaaatccatg

SEQ ID NO: 46541 - DNA, 25 bp, Saccharomyces pastorianus
acggaaaaggatctaccagcccctg

SEQ ID NO: 46542 - DNA, 25 bp, Saccharomyces pastorianus
caacgcctacggatggtcggtggta

SEQ ID NO: 46543 - DNA, 25 bp, Saccharomyces pastorianus
catctccaagataattggcctggat

SEQ ID NO: 46544 - DNA, 25 bp, Saccharomyces pastorianus
gaaactgtcccagatgatactggat

SEQ ID NO: 46545 - DNA, 25 bp, Saccharomyces pastorianus
tggctttacgtttacgagactccaa

SEQ ID NO: 46546 - DNA, 25 bp, Saccharomyces pastorianus
ttggcctggatactcaacaggttga

SEQ ID NO: 46547 - DNA, 25 bp, Saccharomyces pastorianus
atgactccgcattagaattagtagg

SEQ ID NO: 46548 - DNA, 25 bp, Saccharomyces pastorianus
tgcattatacgacactttactggaa

SEQ ID NO: 46549 - DNA, 25 bp, Saccharomyces pastorianus
gagactccaaatcaagacgctactt

SEQ ID NO: 46550 - DNA, 25 bp, Saccharomyces pastorianus
ctggatcaaggcaatggatggcttt

SEQ ID NO: 46551 - DNA, 25 bp, Saccharomyces pastorianus
gcaatggatggctttacgtttacga

SEQ ID NO: 46552 - DNA, 25 bp, Saccharomyces pastorianus
tacgacactttactggaatccaatt

SEQ ID NO: 46553 - DNA, 25 bp, Saccharomyces pastorianus
aagacgctacttatgactccgcatt

SEQ ID NO: 46554 - DNA, 25 bp, Saccharomyces pastorianus
ctccctggacgatcaaatctttgtt

SEQ ID NO: 46555 - DNA, 25 bp, Saccharomyces pastorianus
taaagcactctctatccgtcaaatt

SEQ ID NO: 46556 - DNA, 25 bp, Saccharomyces pastorianus
attgacgccatgaaagctgttgccg

SEQ ID NO: 46557 - DNA, 25 bp, Saccharomyces pastorianus
aggagacttaccagtcccgaggtat

SEQ ID NO: 46558 - DNA, 25 bp, Saccharomyces pastorianus
tggccaagtccaaggcttctttgac

SEQ ID NO: 46559 - DNA, 25 bp, Saccharomyces pastorianus
tactgtcccactcaaactgtagcgg

SEQ ID NO: 46560 - DNA, 25 bp, Saccharomyces pastorianus
aaaccctccttggtggatgtgcatc

SEQ ID NO: 46561 - DNA, 25 bp, Saccharomyces pastorianus
gaaactggacgacaaaccctccttg

SEQ ID NO: 46562 - DNA, 25 bp, Saccharomyces pastorianus
atttgactacccacaattcttatga

SEQ ID NO: 46563 - DNA, 25 bp, Saccharomyces pastorianus
caaggcttctttgactgcagcaaga

SEQ ID NO: 46564 - DNA, 25 bp, Saccharomyces pastorianus
aagaaccgcagctaactctatctac

SEQ ID NO: 46565 - DNA, 25 bp, Saccharomyces pastorianus
gtattgcgaggcaaaaccgccaaaa

SEQ ID NO: 46566 - DNA, 25 bp, Saccharomyces pastorianus
aatcgctgtaaagatggccagacac

SEQ ID NO: 46567 - DNA, 25 bp, Saccharomyces pastorianus
aagccagaccatgcagcctgacaat

SEQ ID NO: 46568 - DNA, 25 bp, Saccharomyces pastorianus
aatttctccttcacggtaaccatgg

SEQ ID NO: 46569 - DNA, 25 bp, Saccharomyces pastorianus
accgccaaaatgcacttcatcaaac

SEQ ID NO: 46570 - DNA, 25 bp, Saccharomyces pastorianus
ccatgcagcctgacaatcgctgtaa

SEQ ID NO: 46571 - DNA, 25 bp, Saccharomyces pastorianus
acactgtctggccaagccagaccat

SEQ ID NO: 46572 - DNA, 25 bp, Saccharomyces pastorianus
gatggccagacacgccacgatcaat

SEQ ID NO: 46573 - DNA, 25 bp, Saccharomyces pastorianus
cacggtaaccatggaccgcaacgag

SEQ ID NO: 46574 - DNA, 25 bp, Saccharomyces pastorianus
acgatcaatttctccttcacggtaa

SEQ ID NO: 46575 - DNA, 25 bp, Saccharomyces pastorianus
atcaaacaccacactgtctggccaa

SEQ ID NO: 46576 - DNA, 25 bp, Saccharomyces pastorianus
atggctagaggcaatcagagagact

SEQ ID NO: 46577 - DNA, 25 bp, Saccharomyces pastorianus
aaaacggcgatccaaagaagagaat

SEQ ID NO: 46578 - DNA, 25 bp, Saccharomyces pastorianus
acgccagaagagaggcagagctgtt

SEQ ID NO: 46579 - DNA, 25 bp, Saccharomyces pastorianus
gcaatcagagagacttggcaagaca

SEQ ID NO: 46580 - DNA, 25 bp, Saccharomyces pastorianus
gaatggagtcggacgctgatatttt

SEQ ID NO: 46581 - DNA, 25 bp, Saccharomyces pastorianus
gacgctgatattttgaggcagaagc

SEQ ID NO: 46582 - DNA, 25 bp, Saccharomyces pastorianus
gaaggacctggctaagagccagaaa

SEQ ID NO: 46583 - DNA, 25 bp, Saccharomyces pastorianus
aagcaggctgctgcggacgccagaa

SEQ ID NO: 46584 - DNA, 25 bp, Saccharomyces pastorianus
agcagaaggacctggctaagagcca

SEQ ID NO: 46585 - DNA, 25 bp, Saccharomyces pastorianus
agtcggacgctgatattttgaggca

SEQ ID NO: 46586 - DNA, 25 bp, Saccharomyces pastorianus
aaagaagagaatggagtcggacgct

SEQ ID NO: 46587 - DNA, 25 bp, Saccharomyces pastorianus
agatgttccacaagctctgcttgat

SEQ ID NO: 46588 - DNA, 25 bp, Saccharomyces pastorianus
agtggataccccaacgccagaattc

SEQ ID NO: 46589 - DNA, 25 bp, Saccharomyces pastorianus
gctgccaccaagagatgttccacaa

SEQ ID NO: 46590 - DNA, 25 bp, Saccharomyces pastorianus
tggataccccaacgccagaattcca

SEQ ID NO: 46591 - DNA, 25 bp, Saccharomyces pastorianus
aactccagtgcagtggataccccaa

SEQ ID NO: 46592 - DNA, 25 bp, Saccharomyces pastorianus
gaaaacgaaaactccagtgcagtgg

SEQ ID NO: 46593 - DNA, 25 bp, Saccharomyces pastorianus
ctgcttgatagatgggtagtagaga

SEQ ID NO: 46594 - DNA, 25 bp, Saccharomyces pastorianus
agtgcagtggataccccaacgccag

SEQ ID NO: 46595 - DNA, 25 bp, Saccharomyces pastorianus
gccaccaagagatgttccacaagct

SEQ ID NO: 46596 - DNA, 25 bp, Saccharomyces pastorianus
gattaatgacgctaattttgctgtt

SEQ ID NO: 46597 - DNA, 25 bp, Saccharomyces pastorianus
caagctctgcttgatagatgggtag

SEQ ID NO: 46598 - DNA, 25 bp, Saccharomyces pastorianus
atagagataagttccccgcaaccaa

SEQ ID NO: 46599 - DNA, 25 bp, Saccharomyces pastorianus
acactgggcatatcacaggcacttt

SEQ ID NO: 46600 - DNA, 25 bp, Saccharomyces pastorianus
aaactctcgtacaggccagatgaac

SEQ ID NO: 46601 - DNA, 25 bp, Saccharomyces pastorianus
tatcccgttggtttcaaccaggcga

SEQ ID NO: 46602 - DNA, 25 bp, Saccharomyces pastorianus
actattggcaaccttggacgagtcc

SEQ ID NO: 46603 - DNA, 25 bp, Saccharomyces pastorianus
aacagaaactggtgcctccgcgttt

SEQ ID NO: 46604 - DNA, 25 bp, Saccharomyces pastorianus
atggtgcttttcaattaacggttca

SEQ ID NO: 46605 - DNA, 25 bp, Saccharomyces pastorianus
gaagaatgctacatatcccgaccta

SEQ ID NO: 46606 - DNA, 25 bp, Saccharomyces pastorianus
gtgcactactatattcgacgtctgt

SEQ ID NO: 46607 - DNA, 25 bp, Saccharomyces pastorianus
caagaccttatccagctggcaatgt

SEQ ID NO: 46608 - DNA, 25 bp, Saccharomyces pastorianus
gataggttgtatgctttccgaattc

SEQ ID NO: 46609 - DNA, 25 bp, Saccharomyces pastorianus
ttcagccttggagctacttaggatt

SEQ ID NO: 46610 - DNA, 25 bp, Saccharomyces pastorianus
atgatattcagccttggagctactt

SEQ ID NO: 46611 - DNA, 25 bp, Saccharomyces pastorianus
gatattcagccttggagctacttag

SEQ ID NO: 46612 - DNA, 25 bp, Saccharomyces pastorianus
atgcgagttattatgatattcagcc

SEQ ID NO: 46613 - DNA, 25 bp, Saccharomyces pastorianus
tattcagccttggagctacttagga

SEQ ID NO: 46614 - DNA, 25 bp, Saccharomyces pastorianus
cagccttggagctacttaggattac

SEQ ID NO: 46615 - DNA, 25 bp, Saccharomyces pastorianus
agtcggatgcgagttattatgatat

SEQ ID NO: 46616 - DNA, 25 bp, Saccharomyces pastorianus
ttatgatattcagccttggagctac

SEQ ID NO: 46617 - DNA, 25 bp, Saccharomyces pastorianus
gagttattatgatattcagccttgg

SEQ ID NO: 46618 - DNA, 25 bp, Saccharomyces pastorianus
tattatgatattcagccttggagct

SEQ ID NO: 46619 - DNA, 25 bp, Saccharomyces pastorianus
gccttggagctacttaggattactc

SEQ ID NO: 46620 - DNA, 25 bp, Saccharomyces pastorianus
gtggaccccaaaacattctcattga

SEQ ID NO: 46621 - DNA, 25 bp, Saccharomyces pastorianus
ttattccccggcgaaagtggcatag

SEQ ID NO: 46622 - DNA, 25 bp, Saccharomyces pastorianus
aagattacctcctctacagtgtcta

SEQ ID NO: 46623 - DNA, 25 bp, Saccharomyces pastorianus
gtgccaccgattactcaaaccaaat

SEQ ID NO: 46624 - DNA, 25 bp, Saccharomyces pastorianus
aagcgcttgtgtcatcgccgaattg

SEQ ID NO: 46625 - DNA, 25 bp, Saccharomyces pastorianus
ttaagcccgtaactttggctcgact

SEQ ID NO: 46626 - DNA, 25 bp, Saccharomyces pastorianus
gaattgctatcaaaggccctcaggt

SEQ ID NO: 46627 - DNA, 25 bp, Saccharomyces pastorianus
gaattgctcctaggtaagcccttat

SEQ ID NO: 46628 - DNA, 25 bp, Saccharomyces pastorianus
agactccgatgctcttgaattgcta

SEQ ID NO: 46629 - DNA, 25 bp, Saccharomyces pastorianus
atgtgccacctgctgaattgtctac

SEQ ID NO: 46630 - DNA, 25 bp, Saccharomyces pastorianus
aggtatgaccctcgcgcaagattac

SEQ ID NO: 46631 - DNA, 25 bp, Saccharomyces pastorianus
gaaaacatcagtaccaagcttgaca

SEQ ID NO: 46632 - DNA, 25 bp, Saccharomyces pastorianus
gcggaaaatttcctttggcaattca

SEQ ID NO: 46633 - DNA, 25 bp, Saccharomyces pastorianus
gacacgagcaacaccgggctagaaa

SEQ ID NO: 46634 - DNA, 25 bp, Saccharomyces pastorianus
ggcgtcactgttgaccatattgaat

SEQ ID NO: 46635 - DNA, 25 bp, Saccharomyces pastorianus
atcgaagttactagacaccggtaga

SEQ ID NO: 46636 - DNA, 25 bp, Saccharomyces pastorianus
aagagcccaacaagatcacagtgca

SEQ ID NO: 46637 - DNA, 25 bp, Saccharomyces pastorianus
gaatacgtcgatgttccggatatca

SEQ ID NO: 46638 - DNA, 25 bp, Saccharomyces pastorianus
aagacttctatacagagcgacacga

SEQ ID NO: 46639 - DNA, 25 bp, Saccharomyces pastorianus
tcacagtgcaccataggatatctaa

SEQ ID NO: 46640 - DNA, 25 bp, Saccharomyces pastorianus
actgcaataacagcgccgagtatat

SEQ ID NO: 46641 - DNA, 25 bp, Saccharomyces pastorianus
caccggtagaaaaggcgtcactgtt

SEQ ID NO: 46642 - DNA, 25 bp, Saccharomyces pastorianus
cgaacctgtcttagttgcctctgct

SEQ ID NO: 46643 - DNA, 25 bp, Saccharomyces pastorianus
gtctagccccagaattgaaccaagc

SEQ ID NO: 46644 - DNA, 25 bp, Saccharomyces pastorianus
ggtactgaagatgtccgtctagccc

SEQ ID NO: 46645 - DNA, 25 bp, Saccharomyces pastorianus
ccattgttctcttacgtcgaacctg

SEQ ID NO: 46646 - DNA, 25 bp, Saccharomyces pastorianus
acctgtcttagttgcctctgctaag

SEQ ID NO: 46647 - DNA, 25 bp, Saccharomyces pastorianus
gtcttagttgcctctgctaagggtc

SEQ ID NO: 46648 - DNA, 25 bp, Saccharomyces pastorianus
attgttctcttacgtcgaacctgtc

SEQ ID NO: 46649 - DNA, 25 bp, Saccharomyces pastorianus
cttagttgcctctgctaagggtcta

SEQ ID NO: 46650 - DNA, 25 bp, Saccharomyces pastorianus
aacctgtcttagttgcctctgctaa

SEQ ID NO: 46651 - DNA, 25 bp, Saccharomyces pastorianus
agctatctggaagagaggtgtcaag

SEQ ID NO: 46652 - DNA, 25 bp, Saccharomyces pastorianus
gaacctgtcttagttgcctctgcta

SEQ ID NO: 46653 - DNA, 25 bp, Saccharomyces pastorianus
gactttagtatatttggtgagcgta

SEQ ID NO: 46654 - DNA, 25 bp, Saccharomyces pastorianus
gaatatttcgatttttctaacagat

SEQ ID NO: 46655 - DNA, 25 bp, Saccharomyces pastorianus
catgatagttgttaattccggtaaa

SEQ ID NO: 46656 - DNA, 25 bp, Saccharomyces pastorianus
ttaccggtacctgactttagtatat

SEQ ID NO: 46657 - DNA, 25 bp, Saccharomyces pastorianus
cagtgaaaagtgctccaaatttgga

SEQ ID NO: 46658 - DNA, 25 bp, Saccharomyces pastorianus
gaatgacctcattttagctgatggc

SEQ ID NO: 46659 - DNA, 25 bp, Saccharomyces pastorianus
aggaacatgagcacgaaacaccagt

SEQ ID NO: 46660 - DNA, 25 bp, Saccharomyces pastorianus
agctgatggcaaggatctggatatt

SEQ ID NO: 46661 - DNA, 25 bp, Saccharomyces pastorianus
ctggatattgaattaccggtacctg

SEQ ID NO: 46662 - DNA, 25 bp, Saccharomyces pastorianus
tctccccgttccgaaggacatgata

SEQ ID NO: 46663 - DNA, 25 bp, Saccharomyces pastorianus
atttgtgttgtcattgagacgttca

SEQ ID NO: 46664 - DNA, 25 bp, Saccharomyces pastorianus
attatcgtttgtcggttatctgaaa

SEQ ID NO: 46665 - DNA, 25 bp, Saccharomyces pastorianus
ggcgagcaattaatcaacctggaaa

SEQ ID NO: 46666 - DNA, 25 bp, Saccharomyces pastorianus
caaaccgggatttgcaggtccaagt

SEQ ID NO: 46667 - DNA, 25 bp, Saccharomyces pastorianus
ggaaagatacgcttgccgactaaag

SEQ ID NO: 46668 - DNA, 25 bp, Saccharomyces pastorianus
gttaaccaaactgctgtacactaca

SEQ ID NO: 46669 - DNA, 25 bp, Saccharomyces pastorianus
aatgattttcgaaccagcaatgaga

SEQ ID NO: 46670 - DNA, 25 bp, Saccharomyces pastorianus
atcaactggcccatttgcgaatacc

SEQ ID NO: 46671 - DNA, 25 bp, Saccharomyces pastorianus
ttcacaatttggaacgacgtcgaat

SEQ ID NO: 46672 - DNA, 25 bp, Saccharomyces pastorianus
tgcgaatacccgttaagctacccaa

SEQ ID NO: 46673 - DNA, 25 bp, Saccharomyces pastorianus
gtgaattcaagctccataagttggc

SEQ ID NO: 46674 - DNA, 25 bp, Saccharomyces pastorianus
tatgccatgtttttcaagtcgatca

SEQ ID NO: 46675 - DNA, 25 bp, Saccharomyces pastorianus
gatacttgatcaaatgacgtcgaag

SEQ ID NO: 46676 - DNA, 25 bp, Saccharomyces pastorianus
ccaaatggttgcatccggaggaaat

SEQ ID NO: 46677 - DNA, 25 bp, Saccharomyces pastorianus
caaacgcagtggtcaaaacagtaat

SEQ ID NO: 46678 - DNA, 25 bp, Saccharomyces pastorianus
aaagcatcatctcaaatacactgga

SEQ ID NO: 46679 - DNA, 25 bp, Saccharomyces pastorianus
gggtgataaccctattagaagtgga

SEQ ID NO: 46680 - DNA, 25 bp, Saccharomyces pastorianus
cagtccagggttcaaaagcatcatc

SEQ ID NO: 46681 - DNA, 25 bp, Saccharomyces pastorianus
gaagtcgatggcaatgatcctaatt

SEQ ID NO: 46682 - DNA, 25 bp, Saccharomyces pastorianus
aaggaagtgctgtatgaacccatga

SEQ ID NO: 46683 - DNA, 25 bp, Saccharomyces pastorianus
gatcgtgttaccgaattgctagacg

SEQ ID NO: 46684 - DNA, 25 bp, Saccharomyces pastorianus
gaacccatgaaggagatgcgtagtg

SEQ ID NO: 46685 - DNA, 25 bp, Saccharomyces pastorianus
aaagtagacacatcactagcagaag

SEQ ID NO: 46686 - DNA, 25 bp, Saccharomyces pastorianus
acctgcatggagatcgttttcgaga

SEQ ID NO: 46687 - DNA, 25 bp, Saccharomyces pastorianus
ggaggcctgctattacactgaaaca

SEQ ID NO: 46688 - DNA, 25 bp, Saccharomyces pastorianus
gtagaatatccaaacgaatatccgt

SEQ ID NO: 46689 - DNA, 25 bp, Saccharomyces pastorianus
ggcaggtggtgtatacccgattaca

SEQ ID NO: 46690 - DNA, 25 bp, Saccharomyces pastorianus
gaagatcaggactggaggcctgcta

SEQ ID NO: 46691 - DNA, 25 bp, Saccharomyces pastorianus
ggcacgatttgtttaagtatcctaa

SEQ ID NO: 46692 - DNA, 25 bp, Saccharomyces pastorianus
ctggtattccgggtagagaagctac

SEQ ID NO: 46693 - DNA, 25 bp, Saccharomyces pastorianus
aaatgtgtacccaagtggcacgatt

SEQ ID NO: 46694 - DNA, 25 bp, Saccharomyces pastorianus
tacaaaaatgggaggctggtattcc

SEQ ID NO: 46695 - DNA, 25 bp, Saccharomyces pastorianus
agaagctacaaattgggcaggtggt

SEQ ID NO: 46696 - DNA, 25 bp, Saccharomyces pastorianus
aagtttccggctggattttatcatc

SEQ ID NO: 46697 - DNA, 25 bp, Saccharomyces pastorianus
ttaacccaatcaaacgtccaacctg

SEQ ID NO: 46698 - DNA, 25 bp, Saccharomyces pastorianus
tgctcgcctcactatggagttatgt

SEQ ID NO: 46699 - DNA, 25 bp, Saccharomyces pastorianus
gggcggcgaatttttatcgatctta

SEQ ID NO: 46700 - DNA, 25 bp, Saccharomyces pastorianus
atgaaccaatattcgtgggcggcga

SEQ ID NO: 46701 - DNA, 25 bp, Saccharomyces pastorianus
gatctggctgtatgttacactatca

SEQ ID NO: 46702 - DNA, 25 bp, Saccharomyces pastorianus
gtgtcatgattgtttcatcacgcta

SEQ ID NO: 46703 - DNA, 25 bp, Saccharomyces pastorianus
tgttttgaagctcatctcctctaac

SEQ ID NO: 46704 - DNA, 25 bp, Saccharomyces pastorianus
agaatgggctgtatctgggctgttt

SEQ ID NO: 46705 - DNA, 25 bp, Saccharomyces pastorianus
gaaatcggtcaattcttcatacaga

SEQ ID NO: 46706 - DNA, 25 bp, Saccharomyces pastorianus
acagaactctcagaggacctgctcg

SEQ ID NO: 46707 - DNA, 25 bp, Saccharomyces pastorianus
atttacggcgatgcatcttacgatt

SEQ ID NO: 46708 - DNA, 25 bp, Saccharomyces pastorianus
ctaaagaaggccttgttgagctttg

SEQ ID NO: 46709 - DNA, 25 bp, Saccharomyces pastorianus
acaaacaactactatgtcgatggtt

SEQ ID NO: 46710 - DNA, 25 bp, Saccharomyces pastorianus
actatgtcgatggtttatatggttc

SEQ ID NO: 46711 - DNA, 25 bp, Saccharomyces pastorianus
acaacagttttaacttgagaccgat

SEQ ID NO: 46712 - DNA, 25 bp, Saccharomyces pastorianus
taagcaatagcaagccggctctgat

SEQ ID NO: 46713 - DNA, 25 bp, Saccharomyces pastorianus
aacttgagaccgataagcaatagca

SEQ ID NO: 46714 - DNA, 25 bp, Saccharomyces pastorianus
aaggaagccgttggcgatgcgctaa

SEQ ID NO: 46715 - DNA, 25 bp, Saccharomyces pastorianus
gcgatgcgctaaagaaggccttgtt

SEQ ID NO: 46716 - DNA, 25 bp, Saccharomyces pastorianus
taataggtcgaagaaggaagccgtt

SEQ ID NO: 46717 - DNA, 25 bp, Saccharomyces pastorianus
tagcaagccggctctgatcaagttg

SEQ ID NO: 46718 - DNA, 25 bp, Saccharomyces pastorianus
gattacgagaccaagattacaaaca

SEQ ID NO: 46719 - DNA, 25 bp, Saccharomyces pastorianus
gaccttcgggtatgatggctggcaa

SEQ ID NO: 46720 - DNA, 25 bp, Saccharomyces pastorianus
aatgccagccctttactgcagtaaa

SEQ ID NO: 46721 - DNA, 25 bp, Saccharomyces pastorianus
aagattactcttaaggatggcacaa

SEQ ID NO: 46722 - DNA, 25 bp, Saccharomyces pastorianus
aaggatttccagaccgtcgaggatt

SEQ ID NO: 46723 - DNA, 25 bp, Saccharomyces pastorianus
acggtgcacgcgaagtctagttcaa

SEQ ID NO: 46724 - DNA, 25 bp, Saccharomyces pastorianus
ggtacacttacaacatttatcacag

SEQ ID NO: 46725 - DNA, 25 bp, Saccharomyces pastorianus
gttatagacgtcgaggcccgtgaat

SEQ ID NO: 46726 - DNA, 25 bp, Saccharomyces pastorianus
aatagcgggtcacgttctcatacag

SEQ ID NO: 46727 - DNA, 25 bp, Saccharomyces pastorianus
atacagttcgccaacgagaccttcg

SEQ ID NO: 46728 - DNA, 25 bp, Saccharomyces pastorianus
attggaatggcaggcccgctagtgc

SEQ ID NO: 46729 - DNA, 25 bp, Saccharomyces pastorianus
tcatatgattcgactgtgtacggca

SEQ ID NO: 46730 - DNA, 25 bp, Saccharomyces pastorianus
ttgccactgccacatgtgttacttg

SEQ ID NO: 46731 - DNA, 25 bp, Saccharomyces pastorianus
gaagcccgatatcacgttttttgga

SEQ ID NO: 46732 - DNA, 25 bp, Saccharomyces pastorianus
gatataacagtacctccgattccaa

SEQ ID NO: 46733 - DNA, 25 bp, Saccharomyces pastorianus
ggaacgcaagattctgccctagcaa

SEQ ID NO: 46734 - DNA, 25 bp, Saccharomyces pastorianus
ttgtcattggaatctacctggcgag

SEQ ID NO: 46735 - DNA, 25 bp, Saccharomyces pastorianus
gtggcgccagtatccgaaattgtta

SEQ ID NO: 46736 - DNA, 25 bp, Saccharomyces pastorianus
tcatatggtgtcctgaagcccgata

SEQ ID NO: 46737 - DNA, 25 bp, Saccharomyces pastorianus
tcgagcttccattatgcccgtattg

SEQ ID NO: 46738 - DNA, 25 bp, Saccharomyces pastorianus
agcaaggccctcgtatatactaaac

SEQ ID NO: 46739 - DNA, 25 bp, Saccharomyces pastorianus
tggtccaatgtcatggttcttttgc

SEQ ID NO: 46740 - DNA, 25 bp, Saccharomyces pastorianus
tgttaatatgatcccagcgcacgtg

SEQ ID NO: 46741 - DNA, 25 bp, Saccharomyces pastorianus
ggatcaacactttcaacttctctta

SEQ ID NO: 46742 - DNA, 25 bp, Saccharomyces pastorianus
aagcatttctactatctctagcgga

SEQ ID NO: 46743 - DNA, 25 bp, Saccharomyces pastorianus
gatcagctgctcattctacaacatt

SEQ ID NO: 46744 - DNA, 25 bp, Saccharomyces pastorianus
tccgcggcagtttctctagagagtg

SEQ ID NO: 46745 - DNA, 25 bp, Saccharomyces pastorianus
gttttggttggttgctcttcctcaa

SEQ ID NO: 46746 - DNA, 25 bp, Saccharomyces pastorianus
gaccatctatcactgtctcatcaat

SEQ ID NO: 46747 - DNA, 25 bp, Saccharomyces pastorianus
tacgaccactacttctaacgcattt

SEQ ID NO: 46748 - DNA, 25 bp, Saccharomyces pastorianus
agtcattctggcactactgttgtag

SEQ ID NO: 46749 - DNA, 25 bp, Saccharomyces pastorianus
tgaccgtacctcgattaaaccaagc

SEQ ID NO: 46750 - DNA, 25 bp, Saccharomyces pastorianus
tctcttacatcgacagctactacta

SEQ ID NO: 46751 - DNA, 25 bp, Saccharomyces pastorianus
agagagtgcttctggcgattcaacc

SEQ ID NO: 46752 - DNA, 25 bp, Saccharomyces pastorianus
agtcggtccaaatgtttcgtccagt

SEQ ID NO: 46753 - DNA, 25 bp, Saccharomyces pastorianus
ttactactagctccacttcaagcag

SEQ ID NO: 46754 - DNA, 25 bp, Saccharomyces pastorianus
agctcagtcgttccaaccagttcaa

SEQ ID NO: 46755 - DNA, 25 bp, Saccharomyces pastorianus
cgcgttgactagttctgttgactca

SEQ ID NO: 46756 - DNA, 25 bp, Saccharomyces pastorianus
tgaagcaatcactccctttactcaa

SEQ ID NO: 46757 - DNA, 25 bp, Saccharomyces pastorianus
gttcagtttctcaaaccagctcagt

SEQ ID NO: 46758 - DNA, 25 bp, Saccharomyces pastorianus
ttcaagcagccattcttctagcgaa

SEQ ID NO: 46759 - DNA, 25 bp, Saccharomyces pastorianus
cagttggtccaaatgcttcgtctag

SEQ ID NO: 46760 - DNA, 25 bp, Saccharomyces pastorianus
gtatcgtactactacctcgagtgac

SEQ ID NO: 46761 - DNA, 25 bp, Saccharomyces pastorianus
gttgactcaaccacttcagttggtc

SEQ ID NO: 46762 - DNA, 25 bp, Saccharomyces pastorianus
ttcgtccagtttagccgctatgtat

SEQ ID NO: 46763 - DNA, 25 bp, Saccharomyces pastorianus
ttagaaaagatagagctgccgcaga

SEQ ID NO: 46764 - DNA, 25 bp, Saccharomyces pastorianus
gagacaattactacacccaaaagaa

SEQ ID NO: 46765 - DNA, 25 bp, Saccharomyces pastorianus
aaggctcttcaaagtggtgttaacg

SEQ ID NO: 46766 - DNA, 25 bp, Saccharomyces pastorianus
gtgaattgaaatccactgatcaaat

SEQ ID NO: 46767 - DNA, 25 bp, Saccharomyces pastorianus
gggctataacaatgctccaggttta

SEQ ID NO: 46768 - DNA, 25 bp, Saccharomyces pastorianus
gctcttcaaagtggtgttaacgtaa

SEQ ID NO: 46769 - DNA, 25 bp, Saccharomyces pastorianus
gcccgataaacatagagacaattac

SEQ ID NO: 46770 - DNA, 25 bp, Saccharomyces pastorianus
gaaatccactgatcaaattagaaaa

SEQ ID NO: 46771 - DNA, 25 bp, Saccharomyces pastorianus
ggcacctaaaatgcccgataaacat

SEQ ID NO: 46772 - DNA, 25 bp, Saccharomyces pastorianus
tagagctgccgcagagaaaaaacgt

SEQ ID NO: 46773 - DNA, 25 bp, Saccharomyces pastorianus
aatgctccaggtttaagaagtgaat

SEQ ID NO: 46774 - DNA, 25 bp, Saccharomyces pastorianus
ttcgaagacgcagaccaattattgg

SEQ ID NO: 46775 - DNA, 25 bp, Saccharomyces pastorianus
cagcgacgataaggtgcaagttcac

SEQ ID NO: 46776 - DNA, 25 bp, Saccharomyces pastorianus
tcttgagtcattatgcgccagctgg

SEQ ID NO: 46777 - DNA, 25 bp, Saccharomyces pastorianus
tgcttacgatctgaacagcgacgat

SEQ ID NO: 46778 - DNA, 25 bp, Saccharomyces pastorianus
agtggtcaaaagatcgcggcaagtt

SEQ ID NO: 46779 - DNA, 25 bp, Saccharomyces pastorianus
atgatgctgcacatgctgcttacga

SEQ ID NO: 46780 - DNA, 25 bp, Saccharomyces pastorianus
gatccatctttcttcttgagtcatt

SEQ ID NO: 46781 - DNA, 25 bp, Saccharomyces pastorianus
aactggtgggtttgcaaatgatgct

SEQ ID NO: 46782 - DNA, 25 bp, Saccharomyces pastorianus
gagactggttacacgatatccgaag

SEQ ID NO: 46783 - DNA, 25 bp, Saccharomyces pastorianus
caactggccccaattcaacgaaagt

SEQ ID NO: 46784 - DNA, 25 bp, Saccharomyces pastorianus
gatcgcggcaagtttcagatctggt

SEQ ID NO: 46785 - DNA, 25 bp, Saccharomyces pastorianus
gcatatgttcggtaaatcctttgat

SEQ ID NO: 46786 - DNA, 25 bp, Saccharomyces pastorianus
aatcctttgatatgccactaggccc

SEQ ID NO: 46787 - DNA, 25 bp, Saccharomyces pastorianus
agagacacatctttaccacttgcga

SEQ ID NO: 46788 - DNA, 25 bp, Saccharomyces pastorianus
aaccctcctcaatcttcaaaggcat

SEQ ID NO: 46789 - DNA, 25 bp, Saccharomyces pastorianus
ggatgaactgttccatacgaaaagt

SEQ ID NO: 46790 - DNA, 25 bp, Saccharomyces pastorianus
gacagcagccgtaccagcagataaa

SEQ ID NO: 46791 - DNA, 25 bp, Saccharomyces pastorianus
ggaacaatacaccaaggcagccaca

SEQ ID NO: 46792 - DNA, 25 bp, Saccharomyces pastorianus
gaagcacccgcatacgatgtaactg

SEQ ID NO: 46793 - DNA, 25 bp, Saccharomyces pastorianus
taaaacctataatgggcggcggact

SEQ ID NO: 46794 - DNA, 25 bp, Saccharomyces pastorianus
agctttcgcagacaaaacttcccgt

SEQ ID NO: 46795 - DNA, 25 bp, Saccharomyces pastorianus
aggcagccacaattcgtaacctcga

SEQ ID NO: 46796 - DNA, 25 bp, Saccharomyces pastorianus
gatgttaaacaacccaggtcttcgt

SEQ ID NO: 46797 - DNA, 25 bp, Saccharomyces pastorianus
ccgcaagacgttcaggaggatgaca

SEQ ID NO: 46798 - DNA, 25 bp, Saccharomyces pastorianus
gaagcaggcaagctgtttcccgatg

SEQ ID NO: 46799 - DNA, 25 bp, Saccharomyces pastorianus
gttagccaatgaaataaagatccgc

SEQ ID NO: 46800 - DNA, 25 bp, Saccharomyces pastorianus
cggaatccggagttgtattaccatt

SEQ ID NO: 46801 - DNA, 25 bp, Saccharomyces pastorianus
gcatgagatagatctttttcttcga

SEQ ID NO: 46802 - DNA, 25 bp, Saccharomyces pastorianus
aggtaattttacaacagcatgagat

SEQ ID NO: 46803 - DNA, 25 bp, Saccharomyces pastorianus
agatctttgttggaagacttggaaa

SEQ ID NO: 46804 - DNA, 25 bp, Saccharomyces pastorianus
aggtcttcgttggtttctgagaaca

SEQ ID NO: 46805 - DNA, 25 bp, Saccharomyces pastorianus
aggcaagctgtttcccgatgttaaa

SEQ ID NO: 46806 - DNA, 25 bp, Saccharomyces pastorianus
ggatgacaaagatttgcgtggtttt

SEQ ID NO: 46807 - DNA, 25 bp, Saccharomyces pastorianus
gagacgtcactagacacctaattga

SEQ ID NO: 46808 - DNA, 25 bp, Saccharomyces pastorianus
tgcggtcttggctagtatcatggct

SEQ ID NO: 46809 - DNA, 25 bp, Saccharomyces pastorianus
accgctgattttgagactgttcgtc

SEQ ID NO: 46810 - DNA, 25 bp, Saccharomyces pastorianus
tcgtcgtggttacgccttcaacaga

SEQ ID NO: 46811 - DNA, 25 bp, Saccharomyces pastorianus
taattgatctactctctcgtcgtgg

SEQ ID NO: 46812 - DNA, 25 bp, Saccharomyces pastorianus
tagccagggagacaaccactcttgt

SEQ ID NO: 46813 - DNA, 25 bp, Saccharomyces pastorianus
gtgcaatcagccgacgttgacatta

SEQ ID NO: 46814 - DNA, 25 bp, Saccharomyces pastorianus
gttcaagcatgtatccaggtcttcc

SEQ ID NO: 46815 - DNA, 25 bp, Saccharomyces pastorianus
agagtcttgcacaatgatccttcaa

SEQ ID NO: 46816 - DNA, 25 bp, Saccharomyces pastorianus
gctattgtcctttcgggtggttcaa

SEQ ID NO: 46817 - DNA, 25 bp, Saccharomyces pastorianus
gtcgacgtcgaacaaccaggtgtag

SEQ ID NO: 46818 - DNA, 25 bp, Saccharomyces pastorianus
gatcacctgtaaggaagtccacgaa

SEQ ID NO: 46819 - DNA, 25 bp, Saccharomyces pastorianus
taaggaagtccacgaatggttagaa

SEQ ID NO: 46820 - DNA, 25 bp, Saccharomyces pastorianus
agatttcccattgttcgaagccgtc

SEQ ID NO: 46821 - DNA, 25 bp, Saccharomyces pastorianus
tggttagaaacctgtgggtccgttg

SEQ ID NO: 46822 - DNA, 25 bp, Saccharomyces pastorianus
atccgctcaaggtttgatcacctgt

SEQ ID NO: 46823 - DNA, 25 bp, Saccharomyces pastorianus
tctagagaagaaacctactatcaag

SEQ ID NO: 46824 - DNA, 25 bp, Saccharomyces pastorianus
ggtccgttgaagatttcccattgtt

SEQ ID NO: 46825 - DNA, 25 bp, Saccharomyces pastorianus
tgttcgaagccgtctaccaaatcgt

SEQ ID NO: 46826 - DNA, 25 bp, Saccharomyces pastorianus
tgacttgatcaccacctgtgccggt

SEQ ID NO: 46827 - DNA, 25 bp, Saccharomyces pastorianus
atccgctggtgttgctgacttgatc

SEQ ID NO: 46828 - DNA, 25 bp, Saccharomyces pastorianus
atgcctgggagtgtgaaaaagagtt

SEQ ID NO: 46829 - DNA, 25 bp, Saccharomyces pastorianus
aattgaagggtcacgtcagctctca

SEQ ID NO: 46830 - DNA, 25 bp, Saccharomyces pastorianus
gggtaccaccattgcaaaggtcgtt

SEQ ID NO: 46831 - DNA, 25 bp, Saccharomyces pastorianus
aacctaggcatccaatgtggtgctt

SEQ ID NO: 46832 - DNA, 25 bp, Saccharomyces pastorianus
aagcctttcaaggtcaccgtcattg

SEQ ID NO: 46833 - DNA, 25 bp, Saccharomyces pastorianus
gacgtcgacattctagtgttcaaca

SEQ ID NO: 46834 - DNA, 25 bp, Saccharomyces pastorianus
aaatatcactcttccagacaacctg

SEQ ID NO: 46835 - DNA, 25 bp, Saccharomyces pastorianus
tgttgtcctcttacatcaccgaaaa

SEQ ID NO: 46836 - DNA, 25 bp, Saccharomyces pastorianus
ttctgtttctttgaaggccgctgaa

SEQ ID NO: 46837 - DNA, 25 bp, Saccharomyces pastorianus
gaggttttcgctccagaagttcaaa

SEQ ID NO: 46838 - DNA, 25 bp, Saccharomyces pastorianus
aagggtgtccaattgttgtcctctt

SEQ ID NO: 46839 - DNA, 25 bp, Saccharomyces pastorianus
ggtcgccaacccagatttgattgac

SEQ ID NO: 46840 - DNA, 25 bp, Saccharomyces pastorianus
ggacttcgatgaaccgatacggcaa

SEQ ID NO: 46841 - DNA, 25 bp, Saccharomyces pastorianus
ggtttagcaatcaacgatgcgcata

SEQ ID NO: 46842 - DNA, 25 bp, Saccharomyces pastorianus
acagatagcgcaatagacagagaac

SEQ ID NO: 46843 - DNA, 25 bp, Saccharomyces pastorianus
cgtggcggaagattttgtggacttc

SEQ ID NO: 46844 - DNA, 25 bp, Saccharomyces pastorianus
gaaaattcgttgaggtagtttcaag

SEQ ID NO: 46845 - DNA, 25 bp, Saccharomyces pastorianus
gattttgtggacttcgatgaaccga

SEQ ID NO: 46846 - DNA, 25 bp, Saccharomyces pastorianus
gtgttccagctgcaaaaaggtttag

SEQ ID NO: 46847 - DNA, 25 bp, Saccharomyces pastorianus
gtagacaagtgttccagctgcaaaa

SEQ ID NO: 46848 - DNA, 25 bp, Saccharomyces pastorianus
gaaccgatacggcaaaatacagata

SEQ ID NO: 46849 - DNA, 25 bp, Saccharomyces pastorianus
gcaatcaacgatgcgcatatcagaa

SEQ ID NO: 46850 - DNA, 25 bp, Saccharomyces pastorianus
tgcgcatatcagaaaattcgttgag

SEQ ID NO: 46851 - DNA, 25 bp, Saccharomyces pastorianus
tgaaggaacaactgggccactccca

SEQ ID NO: 46852 - DNA, 25 bp, Saccharomyces pastorianus
gaggagtaccttgaattcattgtta

SEQ ID NO: 46853 - DNA, 25 bp, Saccharomyces pastorianus
gaagtgctgatatcggtgataaata

SEQ ID NO: 46854 - DNA, 25 bp, Saccharomyces pastorianus
tcccatgaggagtaccttgaattca

SEQ ID NO: 46855 - DNA, 25 bp, Saccharomyces pastorianus
gaacaactgggccactcccatgagg

SEQ ID NO: 46856 - DNA, 25 bp, Saccharomyces pastorianus
aactgggccactcccatgaggagta

SEQ ID NO: 46857 - DNA, 25 bp, Saccharomyces pastorianus
gccactcccatgaggagtaccttga

SEQ ID NO: 46858 - DNA, 25 bp, Saccharomyces pastorianus
cattgttatattactggtcggtgtg

SEQ ID NO: 46859 - DNA, 25 bp, Saccharomyces pastorianus
tattactggtcggtgtggaagtgct

SEQ ID NO: 46860 - DNA, 25 bp, Saccharomyces pastorianus
gtggaagtgctgatatcggtgataa

SEQ ID NO: 46861 - DNA, 25 bp, Saccharomyces pastorianus
aattcattgttatattactggtcgg

SEQ ID NO: 46862 - DNA, 25 bp, Saccharomyces pastorianus
atacaacgactggagaggtgacaaa

SEQ ID NO: 46863 - DNA, 25 bp, Saccharomyces pastorianus
gattctcgaaagatacatcacaccc

SEQ ID NO: 46864 - DNA, 25 bp, Saccharomyces pastorianus
aaccaaggatctacaatgacttcat

SEQ ID NO: 46865 - DNA, 25 bp, Saccharomyces pastorianus
ggtgagctatttatcctaagaatta

SEQ ID NO: 46866 - DNA, 25 bp, Saccharomyces pastorianus
ggtcaagctctcaatatctcatgca

SEQ ID NO: 46867 - DNA, 25 bp, Saccharomyces pastorianus
aatgacttcattactctgagagacg

SEQ ID NO: 46868 - DNA, 25 bp, Saccharomyces pastorianus
gatgaatgtttgtacaccccgttta

SEQ ID NO: 46869 - DNA, 25 bp, Saccharomyces pastorianus
gagacggctcgaactatatggtcaa

SEQ ID NO: 46870 - DNA, 25 bp, Saccharomyces pastorianus
catcacacccatccaaaattattcg

SEQ ID NO: 46871 - DNA, 25 bp, Saccharomyces pastorianus
acatgaagacgttattcggttagac

SEQ ID NO: 46872 - DNA, 25 bp, Saccharomyces pastorianus
aagcacccagatttgttcatttttg

SEQ ID NO: 46873 - DNA, 25 bp, Saccharomyces pastorianus
agcgctgtgttgaagactacgtccc

SEQ ID NO: 46874 - DNA, 25 bp, Saccharomyces pastorianus
tcgtaattgctatccttatactgtt

SEQ ID NO: 46875 - DNA, 25 bp, Saccharomyces pastorianus
aagagcagatcgaccttctcataca

SEQ ID NO: 46876 - DNA, 25 bp, Saccharomyces pastorianus
gcgtcgggcagaattctccaataat

SEQ ID NO: 46877 - DNA, 25 bp, Saccharomyces pastorianus
agatgatccattcagttcttcctcg

SEQ ID NO: 46878 - DNA, 25 bp, Saccharomyces pastorianus
aggctcccattagaggaactgcttg

SEQ ID NO: 46879 - DNA, 25 bp, Saccharomyces pastorianus
gagaccgagctgattcgacagacaa

SEQ ID NO: 46880 - DNA, 25 bp, Saccharomyces pastorianus
gacgaatcatgggtcaggctcccat

SEQ ID NO: 46881 - DNA, 25 bp, Saccharomyces pastorianus
gtaatggaaatagtcgcgtcgggca

SEQ ID NO: 46882 - DNA, 25 bp, Saccharomyces pastorianus
gacaaagatttacagcgcccaaaag

SEQ ID NO: 46883 - DNA, 25 bp, Saccharomyces pastorianus
aaagctgctgtagtacgagtgtcca

SEQ ID NO: 46884 - DNA, 25 bp, Saccharomyces pastorianus
aggcgaagctcacctttatacggga

SEQ ID NO: 46885 - DNA, 25 bp, Saccharomyces pastorianus
aatagtctggtaccgcataaggcgt

SEQ ID NO: 46886 - DNA, 25 bp, Saccharomyces pastorianus
gttcgactatcgtgttcctaattta

SEQ ID NO: 46887 - DNA, 25 bp, Saccharomyces pastorianus
gaaagtggtatattcgacgttcgtt

SEQ ID NO: 46888 - DNA, 25 bp, Saccharomyces pastorianus
aaactctactattctttaccggcag

SEQ ID NO: 46889 - DNA, 25 bp, Saccharomyces pastorianus
gacgttcgttaaacctgggcaaatg

SEQ ID NO: 46890 - DNA, 25 bp, Saccharomyces pastorianus
gaaatgacccagcaaatttttggca

SEQ ID NO: 46891 - DNA, 25 bp, Saccharomyces pastorianus
gatgaccgagctcataaatcttcct

SEQ ID NO: 46892 - DNA, 25 bp, Saccharomyces pastorianus
actgactatgactaccagctaggtt

SEQ ID NO: 46893 - DNA, 25 bp, Saccharomyces pastorianus
gaacaactcccacagggctttatta

SEQ ID NO: 46894 - DNA, 25 bp, Saccharomyces pastorianus
aaagctgcaaactttggcccatgat

SEQ ID NO: 46895 - DNA, 25 bp, Saccharomyces pastorianus
tttgggtccattcggtcctataaat

SEQ ID NO: 46896 - DNA, 25 bp, Saccharomyces pastorianus
gttcttttccaatattcgccttcaa

SEQ ID NO: 46897 - DNA, 25 bp, Saccharomyces pastorianus
gcttatctctacttaatttgctccc

SEQ ID NO: 46898 - DNA, 25 bp, Saccharomyces pastorianus
gatgcttccgtcaaagaacttcagg

SEQ ID NO: 46899 - DNA, 25 bp, Saccharomyces pastorianus
aaacactttgtactctcttggcagg

SEQ ID NO: 46900 - DNA, 25 bp, Saccharomyces pastorianus
cgcttacttgatcgccattctgaat

SEQ ID NO: 46901 - DNA, 25 bp, Saccharomyces pastorianus
atttgctcccgtttgaattcgaata

SEQ ID NO: 46902 - DNA, 25 bp, Saccharomyces pastorianus
ataactccaacaatgccggttcaac

SEQ ID NO: 46903 - DNA, 25 bp, Saccharomyces pastorianus
atgaccctttcagattgcgttcttt

SEQ ID NO: 46904 - DNA, 25 bp, Saccharomyces pastorianus
ctcctatcccgatcatgatttttca

SEQ ID NO: 46905 - DNA, 25 bp, Saccharomyces pastorianus
gaaccgggatatctttggaacctga

SEQ ID NO: 46906 - DNA, 25 bp, Saccharomyces pastorianus
acctctaacgttgcctctttgaact

SEQ ID NO: 46907 - DNA, 25 bp, Saccharomyces pastorianus
cggtattgtcaaggctttgagaaac

SEQ ID NO: 46908 - DNA, 25 bp, Saccharomyces pastorianus
ggtgtcgaaacctctaacgttgcct

SEQ ID NO: 46909 - DNA, 25 bp, Saccharomyces pastorianus
ggctttgagaaacgtcccaggtgtc

SEQ ID NO: 46910 - DNA, 25 bp, Saccharomyces pastorianus
caaggctttgagaaacgtcccaggt

SEQ ID NO: 46911 - DNA, 25 bp, Saccharomyces pastorianus
gtcccaggtgtcgaaacctctaacg

SEQ ID NO: 46912 - DNA, 25 bp, Saccharomyces pastorianus
gaaacctctaacgttgcctctttga

SEQ ID NO: 46913 - DNA, 25 bp, Saccharomyces pastorianus
ctttgagaaacgtcccaggtgtcga

SEQ ID NO: 46914 - DNA, 25 bp, Saccharomyces pastorianus
tccaggtgctcacttgggtagattc

SEQ ID NO: 46915 - DNA, 25 bp, Saccharomyces pastorianus
tgagaaacgtcccaggtgtcgaaac

SEQ ID NO: 46916 - DNA, 25 bp, Saccharomyces pastorianus
gagctggtcaaggtaagtacagaaa

SEQ ID NO: 46917 - DNA, 25 bp, Saccharomyces pastorianus
aatctgctgttagaccagctggtca

SEQ ID NO: 46918 - DNA, 25 bp, Saccharomyces pastorianus
cacttgggtagattcgtcatctgga

SEQ ID NO: 46919 - DNA, 25 bp, Saccharomyces pastorianus
tagaccagctggtcaagctacccaa

SEQ ID NO: 46920 - DNA, 25 bp, Saccharomyces pastorianus
ttcgtcatctggactgaagctgcct

SEQ ID NO: 46921 - DNA, 25 bp, Saccharomyces pastorianus
ctgccttctccaagttggaccaagt

SEQ ID NO: 46922 - DNA, 25 bp, Saccharomyces pastorianus
gtcaagctacccaaaagcgtaccca

SEQ ID NO: 46923 - DNA, 25 bp, Saccharomyces pastorianus
tcggttacactttgccatcccacat

SEQ ID NO: 46924 - DNA, 25 bp, Saccharomyces pastorianus
gttgcctcttccaaggtcggttaca

SEQ ID NO: 46925 - DNA, 25 bp, Saccharomyces pastorianus
ccacctccgatgttaccagaatcat

SEQ ID NO: 46926 - DNA, 25 bp, Saccharomyces pastorianus
ttccgaaaccgttgcctcttccaag

SEQ ID NO: 46927 - DNA, 25 bp, Saccharomyces pastorianus
tgaagctgccttctccaagttggac

SEQ ID NO: 46928 - DNA, 25 bp, Saccharomyces pastorianus
actgcttctgctattgctgctactg

SEQ ID NO: 46929 - DNA, 25 bp, Saccharomyces pastorianus
actgctgttgcctctttggtcttgg

SEQ ID NO: 46930 - DNA, 25 bp, Saccharomyces pastorianus
gttgcctctttggtcttggccagag

SEQ ID NO: 46931 - DNA, 25 bp, Saccharomyces pastorianus
tgctactgctgttgcctctttggtc

SEQ ID NO: 46932 - DNA, 25 bp, Saccharomyces pastorianus
gccactgcttctgctattgctgcta

SEQ ID NO: 46933 - DNA, 25 bp, Saccharomyces pastorianus
gctattgctgctactgctgttgcct

SEQ ID NO: 46934 - DNA, 25 bp, Saccharomyces pastorianus
tctgctattgctgctactgctgttg

SEQ ID NO: 46935 - DNA, 25 bp, Saccharomyces pastorianus
aacgaaaagcgttacgccactgctt

SEQ ID NO: 46936 - DNA, 25 bp, Saccharomyces pastorianus
attgctgctactgctgttgcctctt

SEQ ID NO: 46937 - DNA, 25 bp, Saccharomyces pastorianus
gcttctgctattgctgctactgctg

SEQ ID NO: 46938 - DNA, 25 bp, Saccharomyces pastorianus
cgaaaagcgttacgccactgcttct

SEQ ID NO: 46939 - DNA, 25 bp, Saccharomyces pastorianus
ttccttggaaagttcaatcgctgtg

SEQ ID NO: 46940 - DNA, 25 bp, Saccharomyces pastorianus
gtccgtttcggatttatggaagaca

SEQ ID NO: 46941 - DNA, 25 bp, Saccharomyces pastorianus
gaccactgacgaatttttcatagaa

SEQ ID NO: 46942 - DNA, 25 bp, Saccharomyces pastorianus
tgaagtgcccattgacgagcaatct

SEQ ID NO: 46943 - DNA, 25 bp, Saccharomyces pastorianus
tgacgggctggaaagtatatctgat

SEQ ID NO: 46944 - DNA, 25 bp, Saccharomyces pastorianus
aaatggtctgaatatttccttggaa

SEQ ID NO: 46945 - DNA, 25 bp, Saccharomyces pastorianus
gagagaatttcagtccgtttcggat

SEQ ID NO: 46946 - DNA, 25 bp, Saccharomyces pastorianus
aaaacaatgtcgaccactgacgaat

SEQ ID NO: 46947 - DNA, 25 bp, Saccharomyces pastorianus
gaagacattttatgacgggctggaa

SEQ ID NO: 46948 - DNA, 25 bp, Saccharomyces pastorianus
cgatgagttcaatcctaaacggttt

SEQ ID NO: 46949 - DNA, 25 bp, Saccharomyces pastorianus
atatctgatgaagtgcccattgacg

SEQ ID NO: 46950 - DNA, 25 bp, Saccharomyces pastorianus
gacggattccaacacgatgcgctag

SEQ ID NO: 46951 - DNA, 25 bp, Saccharomyces pastorianus
aaataagaactcgtccgctgtcgtt

SEQ ID NO: 46952 - DNA, 25 bp, Saccharomyces pastorianus
tgaagactgaatacgctggcaccaa

SEQ ID NO: 46953 - DNA, 25 bp, Saccharomyces pastorianus
ataaggcttgctactccgagacaaa

SEQ ID NO: 46954 - DNA, 25 bp, Saccharomyces pastorianus
gaagcataccgtcaaagagcccgct

SEQ ID NO: 46955 - DNA, 25 bp, Saccharomyces pastorianus
ttgcaccacgttcacttgagacatg

SEQ ID NO: 46956 - DNA, 25 bp, Saccharomyces pastorianus
cattggttattttccggtcctgaag

SEQ ID NO: 46957 - DNA, 25 bp, Saccharomyces pastorianus
gatcctttcctactacggtatgctg

SEQ ID NO: 46958 - DNA, 25 bp, Saccharomyces pastorianus
aacgagatccccttgcaagatgacg

SEQ ID NO: 46959 - DNA, 25 bp, Saccharomyces pastorianus
tatgctggctttccttgtgttccta

SEQ ID NO: 46960 - DNA, 25 bp, Saccharomyces pastorianus
tgttttgctaccacatgctaaaggg

SEQ ID NO: 46961 - DNA, 25 bp, Saccharomyces pastorianus
gatacgaaaagagacacaagaacgt

SEQ ID NO: 46962 - DNA, 25 bp, Saccharomyces pastorianus
tccaaagtacaacagatacgaaaag

SEQ ID NO: 46963 - DNA, 25 bp, Saccharomyces pastorianus
acaacagatacgaaaagagacacaa

SEQ ID NO: 46964 - DNA, 25 bp, Saccharomyces pastorianus
tacattccaaagtacaacagatacg

SEQ ID NO: 46965 - DNA, 25 bp, Saccharomyces pastorianus
aacagatacgaaaagagacacaaga

SEQ ID NO: 46966 - DNA, 25 bp, Saccharomyces pastorianus
caacagatacgaaaagagacacaag

SEQ ID NO: 46967 - DNA, 25 bp, Saccharomyces pastorianus
cagatacgaaaagagacacaagaac

SEQ ID NO: 46968 - DNA, 25 bp, Saccharomyces pastorianus
acattccaaagtacaacagatacga

SEQ ID NO: 46969 - DNA, 25 bp, Saccharomyces pastorianus
attccaaagtacaacagatacgaaa

SEQ ID NO: 46970 - DNA, 25 bp, Saccharomyces pastorianus
tacaacagatacgaaaagagacaca

SEQ ID NO: 46971 - DNA, 25 bp, Saccharomyces pastorianus
cattccaaagtacaacagatacgaa

SEQ ID NO: 46972 - DNA, 25 bp, Saccharomyces pastorianus
tgtgtcgacagagtgtttatttttt

SEQ ID NO: 46973 - DNA, 25 bp, Saccharomyces pastorianus
gggtgtgtcgacagagtgtttattt

SEQ ID NO: 46974 - DNA, 25 bp, Saccharomyces pastorianus
tacctcgtgttcttctgtctttgtc

SEQ ID NO: 46975 - DNA, 25 bp, Saccharomyces pastorianus
ttttcgttgccctatttacctcgtg

SEQ ID NO: 46976 - DNA, 25 bp, Saccharomyces pastorianus
gttgccctatttacctcgtgttctt

SEQ ID NO: 46977 - DNA, 25 bp, Saccharomyces pastorianus
gtctttgtcttgcaaaaggttgttg

SEQ ID NO: 46978 - DNA, 25 bp, Saccharomyces pastorianus
ttgcaaaaggttgttgcacaatctc

SEQ ID NO: 46979 - DNA, 25 bp, Saccharomyces pastorianus
ctatttacctcgtgttcttctgtct

SEQ ID NO: 46980 - DNA, 25 bp, Saccharomyces pastorianus
tcttctgtctttgtcttgcaaaagg

SEQ ID NO: 46981 - DNA, 25 bp, Saccharomyces pastorianus
tgttcttctgtctttgtcttgcaaa

SEQ ID NO: 46982 - DNA, 25 bp, Saccharomyces pastorianus
atttacctcgtgttcttctgtcttt

SEQ ID NO: 46983 - DNA, 25 bp, Saccharomyces pastorianus
atgccaagatggaagattgacgcta

SEQ ID NO: 46984 - DNA, 25 bp, Saccharomyces pastorianus
gaagattgacgctatcgacgtgtat

SEQ ID NO: 46985 - DNA, 25 bp, Saccharomyces pastorianus
tacgaccagtgtattcgcgataata

SEQ ID NO: 46986 - DNA, 25 bp, Saccharomyces pastorianus
cgctatcgacgtgtatcagagagaa

SEQ ID NO: 46987 - DNA, 25 bp, Saccharomyces pastorianus
atgtctgacgttttagacgagattg

SEQ ID NO: 46988 - DNA, 25 bp, Saccharomyces pastorianus
gccaatgaagaaatacgaccagtgt

SEQ ID NO: 46989 - DNA, 25 bp, Saccharomyces pastorianus
ggataatcctgggaaatgccaagat

SEQ ID NO: 46990 - DNA, 25 bp, Saccharomyces pastorianus
aattgcccacaggagtttttgcagt

SEQ ID NO: 46991 - DNA, 25 bp, Saccharomyces pastorianus
gaattgcttaggtttcttacaagat

SEQ ID NO: 46992 - DNA, 25 bp, Saccharomyces pastorianus
gagtttttgcagtatcacaagtgta

SEQ ID NO: 46993 - DNA, 25 bp, Saccharomyces pastorianus
gtatcagagagaaagtgcccagtgt

SEQ ID NO: 46994 - DNA, 25 bp, Saccharomyces pastorianus
gacatggtgtgccttaattctcgcc

SEQ ID NO: 46995 - DNA, 25 bp, Saccharomyces pastorianus
aatggcgggcgcttgtatggcatca

SEQ ID NO: 46996 - DNA, 25 bp, Saccharomyces pastorianus
tttggatttgtttcaaccttccctg

SEQ ID NO: 46997 - DNA, 25 bp, Saccharomyces pastorianus
tagctttctgggtaggcgctgaact

SEQ ID NO: 46998 - DNA, 25 bp, Saccharomyces pastorianus
cattcactgcatccctttatggtat

SEQ ID NO: 46999 - DNA, 25 bp, Saccharomyces pastorianus
attgcattcacgctagctttctggg

SEQ ID NO: 47000 - DNA, 25 bp, Saccharomyces pastorianus
ttccctgtcgtctatattccagtca

SEQ ID NO: 47001 - DNA, 25 bp, Saccharomyces pastorianus
agcagcattcgcaaccatgacatgg

SEQ ID NO: 47002 - DNA, 25 bp, Saccharomyces pastorianus
attcgaagcatacagcacgtccact

SEQ ID NO: 47003 - DNA, 25 bp, Saccharomyces pastorianus
attctcgcctgggaagtggtcgata

SEQ ID NO: 47004 - DNA, 25 bp, Saccharomyces pastorianus
ttatagatcacgttcagcagcattc

SEQ ID NO: 47005 - DNA, 25 bp, Saccharomyces pastorianus
tgcaacgcaatgattatggttctgt

SEQ ID NO: 47006 - DNA, 25 bp, Saccharomyces pastorianus
aaagcgatggttatccaccaacttt

SEQ ID NO: 47007 - DNA, 25 bp, Saccharomyces pastorianus
taccacacactcactgcagaagaag

SEQ ID NO: 47008 - DNA, 25 bp, Saccharomyces pastorianus
tccaccaactttgcaacgcaatgat

SEQ ID NO: 47009 - DNA, 25 bp, Saccharomyces pastorianus
agtgctgagttcagtgcctaccaca

SEQ ID NO: 47010 - DNA, 25 bp, Saccharomyces pastorianus
atggtctcaccgaggatgagtttga

SEQ ID NO: 47011 - DNA, 25 bp, Saccharomyces pastorianus
aatatctatggtcatctcctttgcc

SEQ ID NO: 47012 - DNA, 25 bp, Saccharomyces pastorianus
catctcctttgccatgcacgactgg

SEQ ID NO: 47013 - DNA, 25 bp, Saccharomyces pastorianus
tacgctgggcgatgatagcaagatc

SEQ ID NO: 47014 - DNA, 25 bp, Saccharomyces pastorianus
cttaaccaatggtctcaccgaggat

SEQ ID NO: 47015 - DNA, 25 bp, Saccharomyces pastorianus
atggttctgttaatatctatggtca

SEQ ID NO: 47016 - DNA, 25 bp, Saccharomyces pastorianus
gactagtataccatcagttcaccaa

SEQ ID NO: 47017 - DNA, 25 bp, Saccharomyces pastorianus
gcgagtccttcaccaattgggacga

SEQ ID NO: 47018 - DNA, 25 bp, Saccharomyces pastorianus
cattacgcatcgcaacagggcatga

SEQ ID NO: 47019 - DNA, 25 bp, Saccharomyces pastorianus
tgaaaccaagtactccttaactccg

SEQ ID NO: 47020 - DNA, 25 bp, Saccharomyces pastorianus
gaactccctgggatttgaccaagga

SEQ ID NO: 47021 - DNA, 25 bp, Saccharomyces pastorianus
acgaatctcatatcggcgaaccact

SEQ ID NO: 47022 - DNA, 25 bp, Saccharomyces pastorianus
gatggcgtaagacacgctttccaaa

SEQ ID NO: 47023 - DNA, 25 bp, Saccharomyces pastorianus
gggagattccagctcaagcctgaaa

SEQ ID NO: 47024 - DNA, 25 bp, Saccharomyces pastorianus
acgctttccaaatcgcaagacacac

SEQ ID NO: 47025 - DNA, 25 bp, Saccharomyces pastorianus
aactccgacgatgttgcattacgca

SEQ ID NO: 47026 - DNA, 25 bp, Saccharomyces pastorianus
aagacacactttgggcgagtccttc

SEQ ID NO: 47027 - DNA, 25 bp, Saccharomyces pastorianus
ttcgtcgctgaaaagaccaagttcg

SEQ ID NO: 47028 - DNA, 25 bp, Saccharomyces pastorianus
tctgggctatcggttccggtttggc

SEQ ID NO: 47029 - DNA, 25 bp, Saccharomyces pastorianus
accagtctgggctatcggttccggt

SEQ ID NO: 47030 - DNA, 25 bp, Saccharomyces pastorianus
cagtctgggctatcggttccggttt

SEQ ID NO: 47031 - DNA, 25 bp, Saccharomyces pastorianus
acaagttcgtcgctgaaaagaccaa

SEQ ID NO: 47032 - DNA, 25 bp, Saccharomyces pastorianus
gttcgtcgctgaaaagaccaagttc

SEQ ID NO: 47033 - DNA, 25 bp, Saccharomyces pastorianus
caagttcgtcgctgaaaagaccaag

SEQ ID NO: 47034 - DNA, 25 bp, Saccharomyces pastorianus
aagttcgtcgctgaaaagaccaagt

SEQ ID NO: 47035 - DNA, 25 bp, Saccharomyces pastorianus
agttcgtcgctgaaaagaccaagtt

SEQ ID NO: 47036 - DNA, 25 bp, Saccharomyces pastorianus
cgtcgctgaaaagaccaagttcgct

SEQ ID NO: 47037 - DNA, 25 bp, Saccharomyces pastorianus
ccagtctgggctatcggttccggtt

SEQ ID NO: 47038 - DNA, 25 bp, Saccharomyces pastorianus
tatacggtggttccgctaacggtag

SEQ ID NO: 47039 - DNA, 25 bp, Saccharomyces pastorianus
cggtttggctgctactccagaagat

SEQ ID NO: 47040 - DNA, 25 bp, Saccharomyces pastorianus
aaggtgtcggtgtcatcttgtgtat

SEQ ID NO: 47041 - DNA, 25 bp, Saccharomyces pastorianus
gccgttaccttcaaggacaaggctg

SEQ ID NO: 47042 - DNA, 25 bp, Saccharomyces pastorianus
tgagaatcttatacggtggttccgc

SEQ ID NO: 47043 - DNA, 25 bp, Saccharomyces pastorianus
gatcttacttccacgaagatgacaa

SEQ ID NO: 47044 - DNA, 25 bp, Saccharomyces pastorianus
catcagaaagttcttggcttccaag

SEQ ID NO: 47045 - DNA, 25 bp, Saccharomyces pastorianus
tcttggcttccaagttgggtgacaa

SEQ ID NO: 47046 - DNA, 25 bp, Saccharomyces pastorianus
gttgtcgcttacgaaccagtctggg

SEQ ID NO: 47047 - DNA, 25 bp, Saccharomyces pastorianus
catcttgtgtatcggtgaaactttg

SEQ ID NO: 47048 - DNA, 25 bp, Saccharomyces pastorianus
attcacgcttccatcagaaagttct

SEQ ID NO: 47049 - DNA, 25 bp, Saccharomyces pastorianus
gaaacatttgtcttttgctgaaaat

SEQ ID NO: 47050 - DNA, 25 bp, Saccharomyces pastorianus
aactacggaatctacaacagcatcg

SEQ ID NO: 47051 - DNA, 25 bp, Saccharomyces pastorianus
gatgagatccgttcgcaaacgatga

SEQ ID NO: 47052 - DNA, 25 bp, Saccharomyces pastorianus
aacacaacaacacagccagcgaaga

SEQ ID NO: 47053 - DNA, 25 bp, Saccharomyces pastorianus
aacttgtaaagtctgcatccacggg

SEQ ID NO: 47054 - DNA, 25 bp, Saccharomyces pastorianus
taactataacacttacactaccgcc

SEQ ID NO: 47055 - DNA, 25 bp, Saccharomyces pastorianus
cacgttaaatcccagcctaaacaca

SEQ ID NO: 47056 - DNA, 25 bp, Saccharomyces pastorianus
aacagcatcgaagaagaccacaact

SEQ ID NO: 47057 - DNA, 25 bp, Saccharomyces pastorianus
aacttccacacacaccacgttaaat

SEQ ID NO: 47058 - DNA, 25 bp, Saccharomyces pastorianus
gcatccacgggtctaaagttcagta

SEQ ID NO: 47059 - DNA, 25 bp, Saccharomyces pastorianus
atcaaaggtaattccacacatacgg

SEQ ID NO: 47060 - DNA, 25 bp, Saccharomyces pastorianus
tgaagacgggaagcattcgctggaa

SEQ ID NO: 47061 - DNA, 25 bp, Saccharomyces pastorianus
ttgaagacgggaagcattcgctgga

SEQ ID NO: 47062 - DNA, 25 bp, Saccharomyces pastorianus
cattcgctggaagaggaagaagtaa

SEQ ID NO: 47063 - DNA, 25 bp, Saccharomyces pastorianus
gaagcattcgctggaagaggaagaa

SEQ ID NO: 47064 - DNA, 25 bp, Saccharomyces pastorianus
gcattcgctggaagaggaagaagta

SEQ ID NO: 47065 - DNA, 25 bp, Saccharomyces pastorianus
aagacgggaagcattcgctggaaga

SEQ ID NO: 47066 - DNA, 25 bp, Saccharomyces pastorianus
agcattcgctggaagaggaagaagt

SEQ ID NO: 47067 - DNA, 25 bp, Saccharomyces pastorianus
agaagtaaatagacacttcattgag

SEQ ID NO: 47068 - DNA, 25 bp, Saccharomyces pastorianus
aagcattcgctggaagaggaagaag

SEQ ID NO: 47069 - DNA, 25 bp, Saccharomyces pastorianus
attgaagacgggaagcattcgctgg

SEQ ID NO: 47070 - DNA, 25 bp, Saccharomyces pastorianus
aattgaagacgggaagcattcgctg

SEQ ID NO: 47071 - DNA, 25 bp, Saccharomyces pastorianus
tttcttcgggaaggattcattagtg

SEQ ID NO: 47072 - DNA, 25 bp, Saccharomyces pastorianus
tggctcgacgttttttaagcctgta

SEQ ID NO: 47073 - DNA, 25 bp, Saccharomyces pastorianus
tttcttttcgtgtaagtgttgttgt

SEQ ID NO: 47074 - DNA, 25 bp, Saccharomyces pastorianus
ttccagttggtttgccattccagta

SEQ ID NO: 47075 - DNA, 25 bp, Saccharomyces pastorianus
tgtacccttactcacctggacagcg

SEQ ID NO: 47076 - DNA, 25 bp, Saccharomyces pastorianus
ttaggtgtgacccttggctcgacgt

SEQ ID NO: 47077 - DNA, 25 bp, Saccharomyces pastorianus
cattccagtaattccttaggtgtga

SEQ ID NO: 47078 - DNA, 25 bp, Saccharomyces pastorianus
gttgttgttgccattgttatcgtta

SEQ ID NO: 47079 - DNA, 25 bp, Saccharomyces pastorianus
tggccctttctagcttagccttttt

SEQ ID NO: 47080 - DNA, 25 bp, Saccharomyces pastorianus
gttatcgttagggagcgcgttcaaa

SEQ ID NO: 47081 - DNA, 25 bp, Saccharomyces pastorianus
gattcattagtgttgttgttgccat

SEQ ID NO: 47082 - DNA, 25 bp, Saccharomyces pastorianus
atctataacttcgttgcgggttcct

SEQ ID NO: 47083 - DNA, 25 bp, Saccharomyces pastorianus
cggccggatcgtactgcttaaatgc

SEQ ID NO: 47084 - DNA, 25 bp, Saccharomyces pastorianus
aatcaggtctctctttcatacaatg

SEQ ID NO: 47085 - DNA, 25 bp, Saccharomyces pastorianus
ggaacctttgaaatcgacagcacag

SEQ ID NO: 47086 - DNA, 25 bp, Saccharomyces pastorianus
aatgatgcggtcaatcaggtctctc

SEQ ID NO: 47087 - DNA, 25 bp, Saccharomyces pastorianus
gggcaagtgcaccagtggctaaatt

SEQ ID NO: 47088 - DNA, 25 bp, Saccharomyces pastorianus
actagatatgccatgtttcagctac

SEQ ID NO: 47089 - DNA, 25 bp, Saccharomyces pastorianus
tcttcggcgctgatgttttgcaatt

SEQ ID NO: 47090 - DNA, 25 bp, Saccharomyces pastorianus
taaggaggtttcttggttccagaag

SEQ ID NO: 47091 - DNA, 25 bp, Saccharomyces pastorianus
tgatttgcgagacgtccaagcggcc

SEQ ID NO: 47092 - DNA, 25 bp, Saccharomyces pastorianus
tgttgcgagttatctcattggccgg

SEQ ID NO: 47093 - DNA, 25 bp, Saccharomyces pastorianus
ggactcaccttacgcaggtggcgtt

SEQ ID NO: 47094 - DNA, 25 bp, Saccharomyces pastorianus
ttttcccactgattatccctttaag

SEQ ID NO: 47095 - DNA, 25 bp, Saccharomyces pastorianus
ttgtctatccattttcccactgatt

SEQ ID NO: 47096 - DNA, 25 bp, Saccharomyces pastorianus
gattatccctttaagccaccaaaag

SEQ ID NO: 47097 - DNA, 25 bp, Saccharomyces pastorianus
caaaggttcttttgtctatttgctc

SEQ ID NO: 47098 - DNA, 25 bp, Saccharomyces pastorianus
tcttttgtctatttgctccctttta

SEQ ID NO: 47099 - DNA, 25 bp, Saccharomyces pastorianus
agatgctaaccctgatgatcccttg

SEQ ID NO: 47100 - DNA, 25 bp, Saccharomyces pastorianus
tgatgatcccttggttcctgagatt

SEQ ID NO: 47101 - DNA, 25 bp, Saccharomyces pastorianus
tcccttggttcctgagattgctcaa

SEQ ID NO: 47102 - DNA, 25 bp, Saccharomyces pastorianus
taattcgagtggtaacatttgtctg

SEQ ID NO: 47103 - DNA, 25 bp, Saccharomyces pastorianus
ccttacgcaggtggcgttttcttct

SEQ ID NO: 47104 - DNA, 25 bp, Saccharomyces pastorianus
attacagaaccgtctctgttctacc

SEQ ID NO: 47105 - DNA, 25 bp, Saccharomyces pastorianus
tacagaaccgtctctgttctaccac

SEQ ID NO: 47106 - DNA, 25 bp, Saccharomyces pastorianus
ggctagatattacagaaccgtctct

SEQ ID NO: 47107 - DNA, 25 bp, Saccharomyces pastorianus
gacaaggatgctaaattcagattga

SEQ ID NO: 47108 - DNA, 25 bp, Saccharomyces pastorianus
ttggctagatattacagaaccgtct

SEQ ID NO: 47109 - DNA, 25 bp, Saccharomyces pastorianus
aaggacaaggatgctaaattcagat

SEQ ID NO: 47110 - DNA, 25 bp, Saccharomyces pastorianus
ggatgctaaattcagattgattttg

SEQ ID NO: 47111 - DNA, 25 bp, Saccharomyces pastorianus
gatattacagaaccgtctctgttct

SEQ ID NO: 47112 - DNA, 25 bp, Saccharomyces pastorianus
gaaccgtctctgttctaccaccaaa

SEQ ID NO: 47113 - DNA, 25 bp, Saccharomyces pastorianus
aacagaaaggacaaggatgctaaat

SEQ ID NO: 47114 - DNA, 25 bp, Saccharomyces pastorianus
ttacagaaccgtctctgttctacca

SEQ ID NO: 47115 - DNA, 25 bp, Saccharomyces pastorianus
gaagtctaacggtttggctccagaa

SEQ ID NO: 47116 - DNA, 25 bp, Saccharomyces pastorianus
attacagaaccgtctctgttctacc

SEQ ID NO: 47117 - DNA, 25 bp, Saccharomyces pastorianus
tacagaaccgtctctgttctaccac

SEQ ID NO: 47118 - DNA, 25 bp, Saccharomyces pastorianus
aggacaaggatgctaaattcagatt

SEQ ID NO: 47119 - DNA, 25 bp, Saccharomyces pastorianus
ggctagatattacagaaccgtctct

SEQ ID NO: 47120 - DNA, 25 bp, Saccharomyces pastorianus
ttggctagatattacagaaccgtct

SEQ ID NO: 47121 - DNA, 25 bp, Saccharomyces pastorianus
ggatgctaaattcagattgattttg

SEQ ID NO: 47122 - DNA, 25 bp, Saccharomyces pastorianus
gatattacagaaccgtctctgttct

SEQ ID NO: 47123 - DNA, 25 bp, Saccharomyces pastorianus
gaaccgtctctgttctaccaccaaa

SEQ ID NO: 47124 - DNA, 25 bp, Saccharomyces pastorianus
aagaaggctgtctctgtcagaaagc

SEQ ID NO: 47125 - DNA, 25 bp, Saccharomyces pastorianus
aacagaaaggacaaggatgctaaat

SEQ ID NO: 47126 - DNA, 25 bp, Saccharomyces pastorianus
tgtggatacccgttatgtcatgaaa

SEQ ID NO: 47127 - DNA, 25 bp, Saccharomyces pastorianus
gactgcagatttcgagtgtcttgaa

SEQ ID NO: 47128 - DNA, 25 bp, Saccharomyces pastorianus
ggtgcactcaactagctactacaat

SEQ ID NO: 47129 - DNA, 25 bp, Saccharomyces pastorianus
catagtttctatgctcagtgagtca

SEQ ID NO: 47130 - DNA, 25 bp, Saccharomyces pastorianus
gaaaacctctctgatggtctcctta

SEQ ID NO: 47131 - DNA, 25 bp, Saccharomyces pastorianus
aggatatctacagctacggttacat

SEQ ID NO: 47132 - DNA, 25 bp, Saccharomyces pastorianus
tacggttacatcactgactgcagat

SEQ ID NO: 47133 - DNA, 25 bp, Saccharomyces pastorianus
aaatgctcgttgtacttgataagac

SEQ ID NO: 47134 - DNA, 25 bp, Saccharomyces pastorianus
gtctccttacctactcgatatattg

SEQ ID NO: 47135 - DNA, 25 bp, Saccharomyces pastorianus
tattatcaatgctaggtccgggaat

SEQ ID NO: 47136 - DNA, 25 bp, Saccharomyces pastorianus
ggcacggttactttcaccaatgtca

SEQ ID NO: 47137 - DNA, 25 bp, Saccharomyces pastorianus
aaatcactccagttcgtccaattat

SEQ ID NO: 47138 - DNA, 25 bp, Saccharomyces pastorianus
atggtgggccaccatgtatctcgac

SEQ ID NO: 47139 - DNA, 25 bp, Saccharomyces pastorianus
gataacaacgcagcgggcatgttcc

SEQ ID NO: 47140 - DNA, 25 bp, Saccharomyces pastorianus
atcgattcttctaccctcaagttaa

SEQ ID NO: 47141 - DNA, 25 bp, Saccharomyces pastorianus
gttccagcgccgttatcagtaatga

SEQ ID NO: 47142 - DNA, 25 bp, Saccharomyces pastorianus
gaagccctagtaacagttccagcgc

SEQ ID NO: 47143 - DNA, 25 bp, Saccharomyces pastorianus
atctcgaccaccattatcgattcga

SEQ ID NO: 47144 - DNA, 25 bp, Saccharomyces pastorianus
gaaacgaagctcgtactttcggtat

SEQ ID NO: 47145 - DNA, 25 bp, Saccharomyces pastorianus
tgttccgtcccggtgacttggagat

SEQ ID NO: 47146 - DNA, 25 bp, Saccharomyces pastorianus
ggaaccattgagtaccattgagtct

SEQ ID NO: 47147 - DNA, 25 bp, Saccharomyces pastorianus
gtatctagcagtgaacgaagcccta

SEQ ID NO: 47148 - DNA, 25 bp, Saccharomyces pastorianus
taagctggttttctggtccttcgta

SEQ ID NO: 47149 - DNA, 25 bp, Saccharomyces pastorianus
gtatcgtcttctgcattttttctaa

SEQ ID NO: 47150 - DNA, 25 bp, Saccharomyces pastorianus
atattcaagcatgccggcctaatac

SEQ ID NO: 47151 - DNA, 25 bp, Saccharomyces pastorianus
gatcaggcccgaaattcacagcaag

SEQ ID NO: 47152 - DNA, 25 bp, Saccharomyces pastorianus
aggtttgaatcagcggagcctcatc

SEQ ID NO: 47153 - DNA, 25 bp, Saccharomyces pastorianus
aagttcgcattctttgccgaccaat

SEQ ID NO: 47154 - DNA, 25 bp, Saccharomyces pastorianus
atacgttctggcgactttcgtcaag

SEQ ID NO: 47155 - DNA, 25 bp, Saccharomyces pastorianus
ggctgtccagttacccaagaacggt

SEQ ID NO: 47156 - DNA, 25 bp, Saccharomyces pastorianus
gcacccgttttcatttggttatcca

SEQ ID NO: 47157 - DNA, 25 bp, Saccharomyces pastorianus
gagtggttctcaaacgtcttccatt

SEQ ID NO: 47158 - DNA, 25 bp, Saccharomyces pastorianus
cctccctatcgctatttggtactat

SEQ ID NO: 47159 - DNA, 25 bp, Saccharomyces pastorianus
ggaaccaatttcctagatttcatta

SEQ ID NO: 47160 - DNA, 25 bp, Saccharomyces pastorianus
ttaaaccacccgcagaaatcattga

SEQ ID NO: 47161 - DNA, 25 bp, Saccharomyces pastorianus
gaataactgtggctgacattaggaa

SEQ ID NO: 47162 - DNA, 25 bp, Saccharomyces pastorianus
aaagctgttaatgcgccaggtggat

SEQ ID NO: 47163 - DNA, 25 bp, Saccharomyces pastorianus
gaggcgtcacaaagttcatagtttt

SEQ ID NO: 47164 - DNA, 25 bp, Saccharomyces pastorianus
aatcatgtactatcgtggtcttctg

SEQ ID NO: 47165 - DNA, 25 bp, Saccharomyces pastorianus
agctcaattagcgttagagatcaat

SEQ ID NO: 47166 - DNA, 25 bp, Saccharomyces pastorianus
agtgccattaccagatgaatcatgt

SEQ ID NO: 47167 - DNA, 25 bp, Saccharomyces pastorianus
gcgccaggtggattgccaggcctaa

SEQ ID NO: 47168 - DNA, 25 bp, Saccharomyces pastorianus
gaatcttagctccaagaggtgagtt

SEQ ID NO: 47169 - DNA, 25 bp, Saccharomyces pastorianus
ggtcttctgcctagcgttaatggga

SEQ ID NO: 47170 - DNA, 25 bp, Saccharomyces pastorianus
aaaggcgtccggtttgctgaagaag

SEQ ID NO: 47171 - DNA, 25 bp, Saccharomyces pastorianus
aaatcctcgtcaagcaacgtcgaag

SEQ ID NO: 47172 - DNA, 25 bp, Saccharomyces pastorianus
gtatacgagagagccaatccagaat

SEQ ID NO: 47173 - DNA, 25 bp, Saccharomyces pastorianus
gaagtgtgcctagcaagtacttggt

SEQ ID NO: 47174 - DNA, 25 bp, Saccharomyces pastorianus
ttcgatgattgtggaaattcgcccc

SEQ ID NO: 47175 - DNA, 25 bp, Saccharomyces pastorianus
acagattcacgacagcccttgtttg

SEQ ID NO: 47176 - DNA, 25 bp, Saccharomyces pastorianus
tacttggtcaccgaatgtatacgag

SEQ ID NO: 47177 - DNA, 25 bp, Saccharomyces pastorianus
tccagaatttatcatgaatcgccat

SEQ ID NO: 47178 - DNA, 25 bp, Saccharomyces pastorianus
gtacgataagctcaccaatggatat

SEQ ID NO: 47179 - DNA, 25 bp, Saccharomyces pastorianus
gtcgaagctgtatcaaaaccatcca

SEQ ID NO: 47180 - DNA, 25 bp, Saccharomyces pastorianus
gacagcccttgtttggtacgataag

SEQ ID NO: 47181 - DNA, 25 bp, Saccharomyces pastorianus
atagcgtcatcttctccaatatcca

SEQ ID NO: 47182 - DNA, 25 bp, Saccharomyces pastorianus
taaaaccgtcaccatatcttacagc

SEQ ID NO: 47183 - DNA, 25 bp, Saccharomyces pastorianus
aagttggaccctgacgatgatatcg

SEQ ID NO: 47184 - DNA, 25 bp, Saccharomyces pastorianus
gttcagttccctcgacgacgaaaag

SEQ ID NO: 47185 - DNA, 25 bp, Saccharomyces pastorianus
gcttcgttagaaaatcttcccgcca

SEQ ID NO: 47186 - DNA, 25 bp, Saccharomyces pastorianus
aatgccgtcactgaaactcacaact

SEQ ID NO: 47187 - DNA, 25 bp, Saccharomyces pastorianus
gaagccaagctacctacaaagccag

SEQ ID NO: 47188 - DNA, 25 bp, Saccharomyces pastorianus
attttcctttcgctttggccagaag

SEQ ID NO: 47189 - DNA, 25 bp, Saccharomyces pastorianus
agtttcctctgctccgaacatggaa

SEQ ID NO: 47190 - DNA, 25 bp, Saccharomyces pastorianus
ttacagcttccaaaatgccgtcact

SEQ ID NO: 47191 - DNA, 25 bp, Saccharomyces pastorianus
tgaccattttgttgagcttcccgac

SEQ ID NO: 47192 - DNA, 25 bp, Saccharomyces pastorianus
acaccattgatcaaggtcaccggga

SEQ ID NO: 47193 - DNA, 25 bp, Saccharomyces pastorianus
gaaagacgctgacagcgaatctgaa

SEQ ID NO: 47194 - DNA, 25 bp, Saccharomyces pastorianus
agcgacgccagacttactgcctggg

SEQ ID NO: 47195 - DNA, 25 bp, Saccharomyces pastorianus
atgccaagttactaaaggttgcctt

SEQ ID NO: 47196 - DNA, 25 bp, Saccharomyces pastorianus
ttctccatgaggaagtggccgggaa

SEQ ID NO: 47197 - DNA, 25 bp, Saccharomyces pastorianus
gaacaactgcgcaaactggctgaaa

SEQ ID NO: 47198 - DNA, 25 bp, Saccharomyces pastorianus
gtcaccgggatattccaagaccttg

SEQ ID NO: 47199 - DNA, 25 bp, Saccharomyces pastorianus
gattacaacaccagcaaagtcttga

SEQ ID NO: 47200 - DNA, 25 bp, Saccharomyces pastorianus
gcaaactggctgaaagcgcaaaaga

SEQ ID NO: 47201 - DNA, 25 bp, Saccharomyces pastorianus
ttccaagaccttgttgctgattaca

SEQ ID NO: 47202 - DNA, 25 bp, Saccharomyces pastorianus
agaagacctattcagcgacgccaga

SEQ ID NO: 47203 - DNA, 25 bp, Saccharomyces pastorianus
gaaaggtctgtactactccatgtgg

SEQ ID NO: 47204 - DNA, 25 bp, Saccharomyces pastorianus
aaatcagccattgatccagggtcac

SEQ ID NO: 47205 - DNA, 25 bp, Saccharomyces pastorianus
gaccacagcaacgtttggccagtga

SEQ ID NO: 47206 - DNA, 25 bp, Saccharomyces pastorianus
actccatgtggtttagtgatcgtcc

SEQ ID NO: 47207 - DNA, 25 bp, Saccharomyces pastorianus
tagtgatcgtcctagaccacagcaa

SEQ ID NO: 47208 - DNA, 25 bp, Saccharomyces pastorianus
ggaagaacaagactggcgccaaact

SEQ ID NO: 47209 - DNA, 25 bp, Saccharomyces pastorianus
agacgacgaggatggcgatgatcac

SEQ ID NO: 47210 - DNA, 25 bp, Saccharomyces pastorianus
gccaaactgggctgcaaagcgcaca

SEQ ID NO: 47211 - DNA, 25 bp, Saccharomyces pastorianus
aggttatgtgtttcgagtggttcaa

SEQ ID NO: 47212 - DNA, 25 bp, Saccharomyces pastorianus
gaagagtgttgttcaaccaactgaa

SEQ ID NO: 47213 - DNA, 25 bp, Saccharomyces pastorianus
gacaaagcgttcctcaagttcagta

SEQ ID NO: 47214 - DNA, 25 bp, Saccharomyces pastorianus
ttggcacaaactggtacgattactg

SEQ ID NO: 47215 - DNA, 25 bp, Saccharomyces pastorianus
aagagttgtccggtgcagacccaaa

SEQ ID NO: 47216 - DNA, 25 bp, Saccharomyces pastorianus
tttccctcagctgtacatgaacggg

SEQ ID NO: 47217 - DNA, 25 bp, Saccharomyces pastorianus
ggttaatgctgctccagtaatgcta

SEQ ID NO: 47218 - DNA, 25 bp, Saccharomyces pastorianus
gggaagcccctcagaaccaaaatgt

SEQ ID NO: 47219 - DNA, 25 bp, Saccharomyces pastorianus
gtaagattcggtttcttcgatatat

SEQ ID NO: 47220 - DNA, 25 bp, Saccharomyces pastorianus
tggcgtctcctttttatctattgat

SEQ ID NO: 47221 - DNA, 25 bp, Saccharomyces pastorianus
gtaatgaaccttccaacactggcgt

SEQ ID NO: 47222 - DNA, 25 bp, Saccharomyces pastorianus
ggttttcaagacagctcgtgggcat

SEQ ID NO: 47223 - DNA, 25 bp, Saccharomyces pastorianus
agagctcttcgaaatctcagctgtt

SEQ ID NO: 47224 - DNA, 25 bp, Saccharomyces pastorianus
ttcagggtggtctagatatcatcaa

SEQ ID NO: 47225 - DNA, 25 bp, Saccharomyces pastorianus
gttttcgatggctcatgtcagtcaa

SEQ ID NO: 47226 - DNA, 25 bp, Saccharomyces pastorianus
tagcagattgcactggtctaccgat

SEQ ID NO: 47227 - DNA, 25 bp, Saccharomyces pastorianus
gaggcctttgatctggctaatgaaa

SEQ ID NO: 47228 - DNA, 25 bp, Saccharomyces pastorianus
taaatagccatatctccccaatagt

SEQ ID NO: 47229 - DNA, 25 bp, Saccharomyces pastorianus
gttgaacgaccattacatgccgtgt

SEQ ID NO: 47230 - DNA, 25 bp, Saccharomyces pastorianus
gtctgctatacttggagctgctgca

SEQ ID NO: 47231 - DNA, 25 bp, Saccharomyces pastorianus
aacacatcccgatagaatccttctt

SEQ ID NO: 47232 - DNA, 25 bp, Saccharomyces pastorianus
atgatgtttcacctctttatccaac

SEQ ID NO: 47233 - DNA, 25 bp, Saccharomyces pastorianus
aggcgcaatcgtacagatcttctat

SEQ ID NO: 47234 - DNA, 25 bp, Saccharomyces pastorianus
ggatacttcagcttccacagaaaca

SEQ ID NO: 47235 - DNA, 25 bp, Saccharomyces pastorianus
acatgccgtgtcctctgttaaaaat

SEQ ID NO: 47236 - DNA, 25 bp, Saccharomyces pastorianus
caaactgaagaaccgccttcaacaa

SEQ ID NO: 47237 - DNA, 25 bp, Saccharomyces pastorianus
acagcgagaaagcaggtgcagcact

SEQ ID NO: 47238 - DNA, 25 bp, Saccharomyces pastorianus
tgagacgactgatcttgatgggaat

SEQ ID NO: 47239 - DNA, 25 bp, Saccharomyces pastorianus
aagcccagaaacatcttattatcaa

SEQ ID NO: 47240 - DNA, 25 bp, Saccharomyces pastorianus
gtgcagcactgcagacagaatcaca

SEQ ID NO: 47241 - DNA, 25 bp, Saccharomyces pastorianus
tatgaacctagcacgttgactccag

SEQ ID NO: 47242 - DNA, 25 bp, Saccharomyces pastorianus
gttgactccagtagtaaataccaca

SEQ ID NO: 47243 - DNA, 25 bp, Saccharomyces pastorianus
ttgcgcatggattcttcagaaggcg

SEQ ID NO: 47244 - DNA, 25 bp, Saccharomyces pastorianus
gaagcgtagaaatcacaagcccaga

SEQ ID NO: 47245 - DNA, 25 bp, Saccharomyces pastorianus
taggcaatcagggtcatggtgacat

SEQ ID NO: 47246 - DNA, 25 bp, Saccharomyces pastorianus
aatagaatcaaccagtgagacgact

SEQ ID NO: 47247 - DNA, 25 bp, Saccharomyces pastorianus
acgtggattcatatttgaacttgga

SEQ ID NO: 47248 - DNA, 25 bp, Saccharomyces pastorianus
aaaggaaatcatctccgcagaggag

SEQ ID NO: 47249 - DNA, 25 bp, Saccharomyces pastorianus
gcagagactctgcaacaaataagtg

SEQ ID NO: 47250 - DNA, 25 bp, Saccharomyces pastorianus
gatcgtttgctgatactaccattaa

SEQ ID NO: 47251 - DNA, 25 bp, Saccharomyces pastorianus
gacgacgaaggtcactcattaccat

SEQ ID NO: 47252 - DNA, 25 bp, Saccharomyces pastorianus
atcaccaagggaatcgagagaatct

SEQ ID NO: 47253 - DNA, 25 bp, Saccharomyces pastorianus
aagttgcgttataaaggcaccttgt

SEQ ID NO: 47254 - DNA, 25 bp, Saccharomyces pastorianus
taaaggcaccttgtttgacgacgaa

SEQ ID NO: 47255 - DNA, 25 bp, Saccharomyces pastorianus
cccatttttctcgaatctctgacaa

SEQ ID NO: 47256 - DNA, 25 bp, Saccharomyces pastorianus
tcattaccatccgaatcagccaaaa

SEQ ID NO: 47257 - DNA, 25 bp, Saccharomyces pastorianus
gaaacacccatttttctcgaatctc

SEQ ID NO: 47258 - DNA, 25 bp, Saccharomyces pastorianus
gctgcactcgtttttattttcgcat

SEQ ID NO: 47259 - DNA, 25 bp, Saccharomyces pastorianus
atttaatccctgttgttgcttctct

SEQ ID NO: 47260 - DNA, 25 bp, Saccharomyces pastorianus
ggtaatggcgacacatctgatgaat

SEQ ID NO: 47261 - DNA, 25 bp, Saccharomyces pastorianus
gttgcttctcttttcttatcatttg

SEQ ID NO: 47262 - DNA, 25 bp, Saccharomyces pastorianus
tttttgtcacctcaagcactcttga

SEQ ID NO: 47263 - DNA, 25 bp, Saccharomyces pastorianus
ttcgcatttcgctaatacaagtcat

SEQ ID NO: 47264 - DNA, 25 bp, Saccharomyces pastorianus
gtggttactgccattaaagagcact

SEQ ID NO: 47265 - DNA, 25 bp, Saccharomyces pastorianus
gagggtaaatatccctatgttttat

SEQ ID NO: 47266 - DNA, 25 bp, Saccharomyces pastorianus
agaatcccgatttttgtcacctcaa

SEQ ID NO: 47267 - DNA, 25 bp, Saccharomyces pastorianus
agagggaagacgctgcactcgtttt

SEQ ID NO: 47268 - DNA, 25 bp, Saccharomyces pastorianus
gtgtagagactatcgttcaagtttt

SEQ ID NO: 47269 - DNA, 25 bp, Saccharomyces pastorianus
taataacgaatatgtcaatgacgct

SEQ ID NO: 47270 - DNA, 25 bp, Saccharomyces pastorianus
gtacaaaaacagtttgatctaacgg

SEQ ID NO: 47271 - DNA, 25 bp, Saccharomyces pastorianus
tgtcaatgacgctaacataggaaat

SEQ ID NO: 47272 - DNA, 25 bp, Saccharomyces pastorianus
atatgtcaatgacgctaacatagga

SEQ ID NO: 47273 - DNA, 25 bp, Saccharomyces pastorianus
acgaatatgtcaatgacgctaacat

SEQ ID NO: 47274 - DNA, 25 bp, Saccharomyces pastorianus
gaatatgtcaatgacgctaacatag

SEQ ID NO: 47275 - DNA, 25 bp, Saccharomyces pastorianus
acagtttgatctaacggaacaaaat

SEQ ID NO: 47276 - DNA, 25 bp, Saccharomyces pastorianus
tgacgctaacataggaaatgataac

SEQ ID NO: 47277 - DNA, 25 bp, Saccharomyces pastorianus
caatgacgctaacataggaaatgat

SEQ ID NO: 47278 - DNA, 25 bp, Saccharomyces pastorianus
gtcaatgacgctaacataggaaatg

SEQ ID NO: 47279 - DNA, 25 bp, Saccharomyces pastorianus
taacgaatatgtcaatgacgctaac

SEQ ID NO: 47280 - DNA, 25 bp, Saccharomyces pastorianus
gcacagataaagttggcctgctttc

SEQ ID NO: 47281 - DNA, 25 bp, Saccharomyces pastorianus
catacgggcttgacctggaatgcga

SEQ ID NO: 47282 - DNA, 25 bp, Saccharomyces pastorianus
agaacgccgaggacgatgagaacgc

SEQ ID NO: 47283 - DNA, 25 bp, Saccharomyces pastorianus
tggcctgctttcattagtggaaatt

SEQ ID NO: 47284 - DNA, 25 bp, Saccharomyces pastorianus
aagacaacacggcacacacaattag

SEQ ID NO: 47285 - DNA, 25 bp, Saccharomyces pastorianus
caagagcctgctgcgctatcattag

SEQ ID NO: 47286 - DNA, 25 bp, Saccharomyces pastorianus
tatcattagcgctcgagaacgccga

SEQ ID NO: 47287 - DNA, 25 bp, Saccharomyces pastorianus
gcaattcccgttatagagtctctat

SEQ ID NO: 47288 - DNA, 25 bp, Saccharomyces pastorianus
ttagcgatcaacaagagcctgctgc

SEQ ID NO: 47289 - DNA, 25 bp, Saccharomyces pastorianus
gatgagaacgctgcaattcccgtta

SEQ ID NO: 47290 - DNA, 25 bp, Saccharomyces pastorianus
gagtaataacgctaacagcacagat

SEQ ID NO: 47291 - DNA, 25 bp, Saccharomyces pastorianus
aaagaggaccatgacgattacgata

SEQ ID NO: 47292 - DNA, 25 bp, Saccharomyces pastorianus
agggcggtctgcaacagctcataaa

SEQ ID NO: 47293 - DNA, 25 bp, Saccharomyces pastorianus
ttcttccgaggatgagcacgagttt

SEQ ID NO: 47294 - DNA, 25 bp, Saccharomyces pastorianus
gcaagaagctccagagcgccttttt

SEQ ID NO: 47295 - DNA, 25 bp, Saccharomyces pastorianus
gatcagctcagaaagctctcgcaga

SEQ ID NO: 47296 - DNA, 25 bp, Saccharomyces pastorianus
tcggctacaatgcattgcccaagat

SEQ ID NO: 47297 - DNA, 25 bp, Saccharomyces pastorianus
tttttccaacagcattcttccgagg

SEQ ID NO: 47298 - DNA, 25 bp, Saccharomyces pastorianus
aaaagctttgtgtttgctctcgaca

SEQ ID NO: 47299 - DNA, 25 bp, Saccharomyces pastorianus
tgctctcgacactgcaaaccagaat

SEQ ID NO: 47300 - DNA, 25 bp, Saccharomyces pastorianus
tcgcagatctctcgcaatcgtaata

SEQ ID NO: 47301 - DNA, 25 bp, Saccharomyces pastorianus
agaagtatggttctgtcctcggcta

SEQ ID NO: 47302 - DNA, 25 bp, Saccharomyces pastorianus
gaacaccgtgaccaggacgatacat

SEQ ID NO: 47303 - DNA, 25 bp, Saccharomyces pastorianus
tgctccttgggatgcaatttggtac

SEQ ID NO: 47304 - DNA, 25 bp, Saccharomyces pastorianus
cacatgctcaaccttcatctttaaa

SEQ ID NO: 47305 - DNA, 25 bp, Saccharomyces pastorianus
atcggattcaccattctactttagt

SEQ ID NO: 47306 - DNA, 25 bp, Saccharomyces pastorianus
acaagattttatcggccatgccaaa

SEQ ID NO: 47307 - DNA, 25 bp, Saccharomyces pastorianus
gaacataccatttagccggaccaat

SEQ ID NO: 47308 - DNA, 25 bp, Saccharomyces pastorianus
gggctacgagtgttcgttgacacat

SEQ ID NO: 47309 - DNA, 25 bp, Saccharomyces pastorianus
agtagtcgctggattaggctccttg

SEQ ID NO: 47310 - DNA, 25 bp, Saccharomyces pastorianus
gaaggtatgctgtccctagcgaaga

SEQ ID NO: 47311 - DNA, 25 bp, Saccharomyces pastorianus
agatgaatccaaacaccaccggcta

SEQ ID NO: 47312 - DNA, 25 bp, Saccharomyces pastorianus
gctcaaggcccaccagtagatacaa

SEQ ID NO: 47313 - DNA, 25 bp, Saccharomyces pastorianus
atgctgatgctgacgtggatatgac

SEQ ID NO: 47314 - DNA, 25 bp, Saccharomyces pastorianus
aatccaggacttactgttccccaga

SEQ ID NO: 47315 - DNA, 25 bp, Saccharomyces pastorianus
aaatttggcgcgtgaagtgccccag

SEQ ID NO: 47316 - DNA, 25 bp, Saccharomyces pastorianus
ggtgccactgtgtttgttaaccact

SEQ ID NO: 47317 - DNA, 25 bp, Saccharomyces pastorianus
cggcgacactgataccaatgctgat

SEQ ID NO: 47318 - DNA, 25 bp, Saccharomyces pastorianus
ttggaccacatagggcaatcagctt

SEQ ID NO: 47319 - DNA, 25 bp, Saccharomyces pastorianus
acgttttgagcgcattggaccacat

SEQ ID NO: 47320 - DNA, 25 bp, Saccharomyces pastorianus
gaagaataccaagctgccgttgaat

SEQ ID NO: 47321 - DNA, 25 bp, Saccharomyces pastorianus
atatgggaaccacacctgcagaaga

SEQ ID NO: 47322 - DNA, 25 bp, Saccharomyces pastorianus
aagacgcctcattagcgttgcagcg

SEQ ID NO: 47323 - DNA, 25 bp, Saccharomyces pastorianus
agacgctacgatacgaagccctgag

SEQ ID NO: 47324 - DNA, 25 bp, Saccharomyces pastorianus
tagacaagatactcacacgcctttg

SEQ ID NO: 47325 - DNA, 25 bp, Saccharomyces pastorianus
tttggctagcataatcacagatcct

SEQ ID NO: 47326 - DNA, 25 bp, Saccharomyces pastorianus
gtgtctaccacaaagtcagatcttg

SEQ ID NO: 47327 - DNA, 25 bp, Saccharomyces pastorianus
agatccaactagagcgtatcaccca

SEQ ID NO: 47328 - DNA, 25 bp, Saccharomyces pastorianus
gaaaagcttgccgagatacccgaaa

SEQ ID NO: 47329 - DNA, 25 bp, Saccharomyces pastorianus
ttgaaactgtagaaccaacaccggt

SEQ ID NO: 47330 - DNA, 25 bp, Saccharomyces pastorianus
gtaccgtttagaattcgtcgatgat

SEQ ID NO: 47331 - DNA, 25 bp, Saccharomyces pastorianus
cgtatcacccaatgctttctatata

SEQ ID NO: 47332 - DNA, 25 bp, Saccharomyces pastorianus
tcttctctctagacagtactgggca

SEQ ID NO: 47333 - DNA, 25 bp, Saccharomyces pastorianus
tcacacgcctttgtcttcaagaaat

SEQ ID NO: 47334 - DNA, 25 bp, Saccharomyces pastorianus
ggaaatacttgatacggacgtcttg

SEQ ID NO: 47335 - DNA, 25 bp, Saccharomyces pastorianus
tattcgggaagcgtctttaggccag

SEQ ID NO: 47336 - DNA, 25 bp, Saccharomyces pastorianus
ggatccatacgagagcaccaggcaa

SEQ ID NO: 47337 - DNA, 25 bp, Saccharomyces pastorianus
gactatatcattcagcatggatcca

SEQ ID NO: 47338 - DNA, 25 bp, Saccharomyces pastorianus
atacgtctcgggtggtcaactgcta

SEQ ID NO: 47339 - DNA, 25 bp, Saccharomyces pastorianus
gccagaggtattgcaagtgccttaa

SEQ ID NO: 47340 - DNA, 25 bp, Saccharomyces pastorianus
tttaggccagatcttgtaccatcca

SEQ ID NO: 47341 - DNA, 25 bp, Saccharomyces pastorianus
gtaggcttttcgaaatgtgcacact

SEQ ID NO: 47342 - DNA, 25 bp, Saccharomyces pastorianus
ttttgggctgtctaatctttacgat

SEQ ID NO: 47343 - DNA, 25 bp, Saccharomyces pastorianus
agggcatgcctaaacagttccatag

SEQ ID NO: 47344 - DNA, 25 bp, Saccharomyces pastorianus
agagctaccaaagccttcttgcata

SEQ ID NO: 47345 - DNA, 25 bp, Saccharomyces pastorianus
actagccaagcaccattataccaat

SEQ ID NO: 47346 - DNA, 25 bp, Saccharomyces pastorianus
gaaacatattctactgacttgcgta

SEQ ID NO: 47347 - DNA, 25 bp, Saccharomyces pastorianus
gagattccagctaacatcggagacg

SEQ ID NO: 47348 - DNA, 25 bp, Saccharomyces pastorianus
ggaacaccaacctactaacagcact

SEQ ID NO: 47349 - DNA, 25 bp, Saccharomyces pastorianus
gatatcaggtcaatttcgaacgcaa

SEQ ID NO: 47350 - DNA, 25 bp, Saccharomyces pastorianus
gagttgcctgcaaacatagcacaat

SEQ ID NO: 47351 - DNA, 25 bp, Saccharomyces pastorianus
catcggagacgaccctgtgaagata

SEQ ID NO: 47352 - DNA, 25 bp, Saccharomyces pastorianus
caagtgaattctctacagcagcgga

SEQ ID NO: 47353 - DNA, 25 bp, Saccharomyces pastorianus
aaacagctccgcgtaatcacgtaag

SEQ ID NO: 47354 - DNA, 25 bp, Saccharomyces pastorianus
aggaagcatttgaacgactgattaa

SEQ ID NO: 47355 - DNA, 25 bp, Saccharomyces pastorianus
atcccagattctgagattccagcta

SEQ ID NO: 47356 - DNA, 25 bp, Saccharomyces pastorianus
aatcacgtaagagagttgcctgcaa

SEQ ID NO: 47357 - DNA, 25 bp, Saccharomyces pastorianus
ggcatgattcccaacgtggcaactg

SEQ ID NO: 47358 - DNA, 25 bp, Saccharomyces pastorianus
caacgtggcaactgtgcagccttct

SEQ ID NO: 47359 - DNA, 25 bp, Saccharomyces pastorianus
agcaacttcgatgaccagctgccag

SEQ ID NO: 47360 - DNA, 25 bp, Saccharomyces pastorianus
gagactgcctatcagatgccgagca

SEQ ID NO: 47361 - DNA, 25 bp, Saccharomyces pastorianus
ttagcgcacgagctcggcatgattc

SEQ ID NO: 47362 - DNA, 25 bp, Saccharomyces pastorianus
acgaaagcacattcagcgctgcgtc

SEQ ID NO: 47363 - DNA, 25 bp, Saccharomyces pastorianus
acgacatagacttcgagactgccta

SEQ ID NO: 47364 - DNA, 25 bp, Saccharomyces pastorianus
agctgccagcacacgtgcacgaaag

SEQ ID NO: 47365 - DNA, 25 bp, Saccharomyces pastorianus
gattcccaacgtggcaactgtgcag

SEQ ID NO: 47366 - DNA, 25 bp, Saccharomyces pastorianus
gatgccgagcagcaacttcgatgac

SEQ ID NO: 47367 - DNA, 25 bp, Saccharomyces pastorianus
agatttggataacgacatagacttc

SEQ ID NO: 47368 - DNA, 25 bp, Saccharomyces pastorianus
gaagtattttggcacgagacccctt

SEQ ID NO: 47369 - DNA, 25 bp, Saccharomyces pastorianus
gcggcatatagcagagttccctcat

SEQ ID NO: 47370 - DNA, 25 bp, Saccharomyces pastorianus
cataacctgtttttggacaatccgg

SEQ ID NO: 47371 - DNA, 25 bp, Saccharomyces pastorianus
tggaagtaccttcttctggccataa

SEQ ID NO: 47372 - DNA, 25 bp, Saccharomyces pastorianus
ggccctttcggagccaaagtatgtt

SEQ ID NO: 47373 - DNA, 25 bp, Saccharomyces pastorianus
aatggtggcaggctcatggtcaaaa

SEQ ID NO: 47374 - DNA, 25 bp, Saccharomyces pastorianus
ggaatcattcaaccagtctatagtg

SEQ ID NO: 47375 - DNA, 25 bp, Saccharomyces pastorianus
cagagttccctcattagcatttaag

SEQ ID NO: 47376 - DNA, 25 bp, Saccharomyces pastorianus
atatctttgagctgttctacggtaa

SEQ ID NO: 47377 - DNA, 25 bp, Saccharomyces pastorianus
tactggattccttaaaccacttgaa

SEQ ID NO: 47378 - DNA, 25 bp, Saccharomyces pastorianus
gaggtcacaacagacatcttcaaag

SEQ ID NO: 47379 - DNA, 25 bp, Saccharomyces pastorianus
aggcaagtatacaaacatccacgtt

SEQ ID NO: 47380 - DNA, 25 bp, Saccharomyces pastorianus
atttagacctcaataccaacaacgg

SEQ ID NO: 47381 - DNA, 25 bp, Saccharomyces pastorianus
taccaacaacggctctggcattaca

SEQ ID NO: 47382 - DNA, 25 bp, Saccharomyces pastorianus
gccagctagtgcgttatcttcaata

SEQ ID NO: 47383 - DNA, 25 bp, Saccharomyces pastorianus
gttactgatacacggctatgccgct

SEQ ID NO: 47384 - DNA, 25 bp, Saccharomyces pastorianus
ggtctagccatttgaatggtccagc

SEQ ID NO: 47385 - DNA, 25 bp, Saccharomyces pastorianus
tccagcaaagacgtacgagcggtta

SEQ ID NO: 47386 - DNA, 25 bp, Saccharomyces pastorianus
ttccggaattattcgggactgtcca

SEQ ID NO: 47387 - DNA, 25 bp, Saccharomyces pastorianus
atattccatagacttgccagctagt

SEQ ID NO: 47388 - DNA, 25 bp, Saccharomyces pastorianus
gactgtccaaacacttccaaaactt

SEQ ID NO: 47389 - DNA, 25 bp, Saccharomyces pastorianus
ttcttcgatgtcttacttccggaat

SEQ ID NO: 47390 - DNA, 25 bp, Saccharomyces pastorianus
ggtattcgcaatgccttggtcagca

SEQ ID NO: 47391 - DNA, 25 bp, Saccharomyces pastorianus
tgtcagttgtgtacccgcagataaa

SEQ ID NO: 47392 - DNA, 25 bp, Saccharomyces pastorianus
aagcgtcactcctgtcatgacaata

SEQ ID NO: 47393 - DNA, 25 bp, Saccharomyces pastorianus
taaagggtgctcacgctgcattcgt

SEQ ID NO: 47394 - DNA, 25 bp, Saccharomyces pastorianus
gtgacaacactgactggctaggtat

SEQ ID NO: 47395 - DNA, 25 bp, Saccharomyces pastorianus
aatccctaccatctgagttcaacat

SEQ ID NO: 47396 - DNA, 25 bp, Saccharomyces pastorianus
tgcattcgtgccaaccttgttagaa

SEQ ID NO: 47397 - DNA, 25 bp, Saccharomyces pastorianus
gttgtccctggtgcacaaatgctag

SEQ ID NO: 47398 - DNA, 25 bp, Saccharomyces pastorianus
agagctgctctttacgctttacaca

SEQ ID NO: 47399 - DNA, 25 bp, Saccharomyces pastorianus
tggtcagcaatggtgttcccgaatc

SEQ ID NO: 47400 - DNA, 25 bp, Saccharomyces pastorianus
cgccgctaaagtcattggtgccgta

SEQ ID NO: 47401 - DNA, 25 bp, Saccharomyces pastorianus
agttgattccttacgtgctaacggt

SEQ ID NO: 47402 - DNA, 25 bp, Saccharomyces pastorianus
tgaaagtgacgcctctagtgctact

SEQ ID NO: 47403 - DNA, 25 bp, Saccharomyces pastorianus
actgattcagttttccaaggtggca

SEQ ID NO: 47404 - DNA, 25 bp, Saccharomyces pastorianus
gcagaatcgaattggccgctacagt

SEQ ID NO: 47405 - DNA, 25 bp, Saccharomyces pastorianus
tatccactagcctttgctgcaatga

SEQ ID NO: 47406 - DNA, 25 bp, Saccharomyces pastorianus
tctctcccaatcaaggtgtacactg

SEQ ID NO: 47407 - DNA, 25 bp, Saccharomyces pastorianus
tttcctctcaatatgtgtcctctat

SEQ ID NO: 47408 - DNA, 25 bp, Saccharomyces pastorianus
tgaatagcgaaggttctctcccaat

SEQ ID NO: 47409 - DNA, 25 bp, Saccharomyces pastorianus
gtcctctattttaatgtgcgctcca

SEQ ID NO: 47410 - DNA, 25 bp, Saccharomyces pastorianus
agggccattatgtgaatccgtcaga

SEQ ID NO: 47411 - DNA, 25 bp, Saccharomyces pastorianus
aagacctatcgctcctttagttgat

SEQ ID NO: 47412 - DNA, 25 bp, Saccharomyces pastorianus
gaggcgatggctccttaacaagaat

SEQ ID NO: 47413 - DNA, 25 bp, Saccharomyces pastorianus
gcaacagcaaaatctccctttacaa

SEQ ID NO: 47414 - DNA, 25 bp, Saccharomyces pastorianus
caaagtctggatcgacctcaattca

SEQ ID NO: 47415 - DNA, 25 bp, Saccharomyces pastorianus
tataatatttcctacatcgccgact

SEQ ID NO: 47416 - DNA, 25 bp, Saccharomyces pastorianus
taacaggatacagtcgccggaatgc

SEQ ID NO: 47417 - DNA, 25 bp, Saccharomyces pastorianus
aaaaccacctatgagactatcgcct

SEQ ID NO: 47418 - DNA, 25 bp, Saccharomyces pastorianus
gaagattcgaagctccaaccacata

SEQ ID NO: 47419 - DNA, 25 bp, Saccharomyces pastorianus
tggcacgaaacatagcacacagctc

SEQ ID NO: 47420 - DNA, 25 bp, Saccharomyces pastorianus
ggatgagctctctgctggtaaatta

SEQ ID NO: 47421 - DNA, 25 bp, Saccharomyces pastorianus
aagaacggtcttatgtcacctgaaa

SEQ ID NO: 47422 - DNA, 25 bp, Saccharomyces pastorianus
actgaattccatgcttgcaacggaa

SEQ ID NO: 47423 - DNA, 25 bp, Saccharomyces pastorianus
gaaaatcgctttggaagttggccgt

SEQ ID NO: 47424 - DNA, 25 bp, Saccharomyces pastorianus
ttaaaatgtgctccggtttgaaact

SEQ ID NO: 47425 - DNA, 25 bp, Saccharomyces pastorianus
ggccttaaaatgtgctccggtttga

SEQ ID NO: 47426 - DNA, 25 bp, Saccharomyces pastorianus
ggccgttaaagatggcaaaattatg

SEQ ID NO: 47427 - DNA, 25 bp, Saccharomyces pastorianus
atgacaagatcattgacgcctctaa

SEQ ID NO: 47428 - DNA, 25 bp, Saccharomyces pastorianus
atcattgacgcctctaatccatcag

SEQ ID NO: 47429 - DNA, 25 bp, Saccharomyces pastorianus
acaagatcattgacgcctctaatcc

SEQ ID NO: 47430 - DNA, 25 bp, Saccharomyces pastorianus
tcgctttggaagttggccgttaaag

SEQ ID NO: 47431 - DNA, 25 bp, Saccharomyces pastorianus
cctctaatccatcaggccttaaaat

SEQ ID NO: 47432 - DNA, 25 bp, Saccharomyces pastorianus
tcaggccttaaaatgtgctccggtt

SEQ ID NO: 47433 - DNA, 25 bp, Saccharomyces pastorianus
tgaaactttacctaagaaaatcgct

SEQ ID NO: 47434 - DNA, 25 bp, Saccharomyces pastorianus
gtgcagtattagctataacccgata

SEQ ID NO: 47435 - DNA, 25 bp, Saccharomyces pastorianus
gaccatttctggataactgcgcaag

SEQ ID NO: 47436 - DNA, 25 bp, Saccharomyces pastorianus
gtcttttactgacggatctgtccaa

SEQ ID NO: 47437 - DNA, 25 bp, Saccharomyces pastorianus
gccttttggcccgattgatttgagc

SEQ ID NO: 47438 - DNA, 25 bp, Saccharomyces pastorianus
acttcctgcgtgtatattgctttgt

SEQ ID NO: 47439 - DNA, 25 bp, Saccharomyces pastorianus
agcgtgttcagctttaccgttcgaa

SEQ ID NO: 47440 - DNA, 25 bp, Saccharomyces pastorianus
ttagataccacacaagccaaagcag

SEQ ID NO: 47441 - DNA, 25 bp, Saccharomyces pastorianus
aactgcgcaagagagctgatctttc

SEQ ID NO: 47442 - DNA, 25 bp, Saccharomyces pastorianus
catttgctaagtacgccttttggcc

SEQ ID NO: 47443 - DNA, 25 bp, Saccharomyces pastorianus
aaactcctgaacagccagtaccgaa

SEQ ID NO: 47444 - DNA, 25 bp, Saccharomyces pastorianus
gtttccctgatactatagcgtgttc

SEQ ID NO: 47445 - DNA, 25 bp, Saccharomyces pastorianus
aagtattttcttcacatagcgacat

SEQ ID NO: 47446 - DNA, 25 bp, Saccharomyces pastorianus
tttccgctgaggctcctagtgaaga

SEQ ID NO: 47447 - DNA, 25 bp, Saccharomyces pastorianus
aaaacggcagcatctgggcaagaac

SEQ ID NO: 47448 - DNA, 25 bp, Saccharomyces pastorianus
tcaataccccggtgagacgacggag

SEQ ID NO: 47449 - DNA, 25 bp, Saccharomyces pastorianus
aatgggagtccaaagtttccgctga

SEQ ID NO: 47450 - DNA, 25 bp, Saccharomyces pastorianus
gcatctggaaaatcgccactggtct

SEQ ID NO: 47451 - DNA, 25 bp, Saccharomyces pastorianus
caaaccttgcgttttttgagatcgc

SEQ ID NO: 47452 - DNA, 25 bp, Saccharomyces pastorianus
gatcgcagtacctatttgacttcaa

SEQ ID NO: 47453 - DNA, 25 bp, Saccharomyces pastorianus
aggtgtatacgaagcggcccattca

SEQ ID NO: 47454 - DNA, 25 bp, Saccharomyces pastorianus
agttgcagatatcccttctcaatac

SEQ ID NO: 47455 - DNA, 25 bp, Saccharomyces pastorianus
agatgacagttctctagcggatgga

SEQ ID NO: 47456 - DNA, 25 bp, Saccharomyces pastorianus
agaaaggtctattcacctggccgtt

SEQ ID NO: 47457 - DNA, 25 bp, Saccharomyces pastorianus
taaggtttacgagcctgctgaggat

SEQ ID NO: 47458 - DNA, 25 bp, Saccharomyces pastorianus
gaagcgaccctagatacggcaaagt

SEQ ID NO: 47459 - DNA, 25 bp, Saccharomyces pastorianus
gtccggtgtcgtcacaacgtttata

SEQ ID NO: 47460 - DNA, 25 bp, Saccharomyces pastorianus
ctagacttggcattactgggcggaa

SEQ ID NO: 47461 - DNA, 25 bp, Saccharomyces pastorianus
atcgtttagccgttgtttgcgaaat

SEQ ID NO: 47462 - DNA, 25 bp, Saccharomyces pastorianus
gcagaatgtgtaccggatttcccag

SEQ ID NO: 47463 - DNA, 25 bp, Saccharomyces pastorianus
ctttctgaggatggtgttgcttaca

SEQ ID NO: 47464 - DNA, 25 bp, Saccharomyces pastorianus
gatgtcttaatattcaaccctccat

SEQ ID NO: 47465 - DNA, 25 bp, Saccharomyces pastorianus
cgaaataggctctgggtccggtgtc

SEQ ID NO: 47466 - DNA, 25 bp, Saccharomyces pastorianus
tgatgtcaacccgtgggcactcgaa

SEQ ID NO: 47467 - DNA, 25 bp, Saccharomyces pastorianus
gcgtttgccaatacttggtgtccaa

SEQ ID NO: 47468 - DNA, 25 bp, Saccharomyces pastorianus
aaagggagttgctggattctactaa

SEQ ID NO: 47469 - DNA, 25 bp, Saccharomyces pastorianus
cgcatttcaacgattactggtctat

SEQ ID NO: 47470 - DNA, 25 bp, Saccharomyces pastorianus
gacttactgctcttactaaacatgg

SEQ ID NO: 47471 - DNA, 25 bp, Saccharomyces pastorianus
gatgatctggaattaccaacgactt

SEQ ID NO: 47472 - DNA, 25 bp, Saccharomyces pastorianus
gcatatttgttacagttctcctcct

SEQ ID NO: 47473 - DNA, 25 bp, Saccharomyces pastorianus
aaggtttcacttctacgaacgaatg

SEQ ID NO: 47474 - DNA, 25 bp, Saccharomyces pastorianus
gattcagtccgaagtcgattcccaa

SEQ ID NO: 47475 - DNA, 25 bp, Saccharomyces pastorianus
agttctcctccttgataagttgcgt

SEQ ID NO: 47476 - DNA, 25 bp, Saccharomyces pastorianus
acggattaggcactgtagatttaca

SEQ ID NO: 47477 - DNA, 25 bp, Saccharomyces pastorianus
taattcattcgttgcactagtagat

SEQ ID NO: 47478 - DNA, 25 bp, Saccharomyces pastorianus
gtccgtggtctcaaatgttttctca

SEQ ID NO: 47479 - DNA, 25 bp, Saccharomyces pastorianus
tctactactcggtggcctggaagaa

SEQ ID NO: 47480 - DNA, 25 bp, Saccharomyces pastorianus
aaggcgatttattcagtccgtggtc

SEQ ID NO: 47481 - DNA, 25 bp, Saccharomyces pastorianus
gccggagctaatagcggtttcctta

SEQ ID NO: 47482 - DNA, 25 bp, Saccharomyces pastorianus
gtctgcttctctcgtacaatgtgtt

SEQ ID NO: 47483 - DNA, 25 bp, Saccharomyces pastorianus
gaaggcggctattaccagccagtag

SEQ ID NO: 47484 - DNA, 25 bp, Saccharomyces pastorianus
gtaaccgcttatgtgaaacttctgt

SEQ ID NO: 47485 - DNA, 25 bp, Saccharomyces pastorianus
ggtactgtttccgagtctctaattt

SEQ ID NO: 47486 - DNA, 25 bp, Saccharomyces pastorianus
atttcgaatgattttgccgctgtct

SEQ ID NO: 47487 - DNA, 25 bp, Saccharomyces pastorianus
tgaagagtccccttattgtaaccgc

SEQ ID NO: 47488 - DNA, 25 bp, Saccharomyces pastorianus
cgattaccttgttaccagtgtctca

SEQ ID NO: 47489 - DNA, 25 bp, Saccharomyces pastorianus
actcctgtgataatcctggatgcga

SEQ ID NO: 47490 - DNA, 25 bp, Saccharomyces pastorianus
aagagagccttaaccgggatcacaa

SEQ ID NO: 47491 - DNA, 25 bp, Saccharomyces pastorianus
atacgcatgcccttgcggtaagaaa

SEQ ID NO: 47492 - DNA, 25 bp, Saccharomyces pastorianus
tcttccccgaggttctattgatagg

SEQ ID NO: 47493 - DNA, 25 bp, Saccharomyces pastorianus
ggacggatcatcgagtgtttctaat

SEQ ID NO: 47494 - DNA, 25 bp, Saccharomyces pastorianus
tagaggatcgaccttactcctgtga

SEQ ID NO: 47495 - DNA, 25 bp, Saccharomyces pastorianus
gtcatttgagtgtttgtatcctgga

SEQ ID NO: 47496 - DNA, 25 bp, Saccharomyces pastorianus
gaagatcccctcaatttggtgctca

SEQ ID NO: 47497 - DNA, 25 bp, Saccharomyces pastorianus
gaagatgccttggttgtacacagaa

SEQ ID NO: 47498 - DNA, 25 bp, Saccharomyces pastorianus
acgtatatcggtaatagcccttcaa

SEQ ID NO: 47499 - DNA, 25 bp, Saccharomyces pastorianus
cacaacgggcaattgatgttcaaac

SEQ ID NO: 47500 - DNA, 25 bp, Saccharomyces pastorianus
aaacagctcttgttctagaaacaat

SEQ ID NO: 47501 - DNA, 25 bp, Saccharomyces pastorianus
tttcgatctgcaaaacagctcttgt

SEQ ID NO: 47502 - DNA, 25 bp, Saccharomyces pastorianus
gtctaaatttcgatctgcaaaacag

SEQ ID NO: 47503 - DNA, 25 bp, Saccharomyces pastorianus
gagtctaaatttcgatctgcaaaac

SEQ ID NO: 47504 - DNA, 25 bp, Saccharomyces pastorianus
aagtccagagtctaaatttcgatct

SEQ ID NO: 47505 - DNA, 25 bp, Saccharomyces pastorianus
cttggtttgatgtctcgaaagtcca

SEQ ID NO: 47506 - DNA, 25 bp, Saccharomyces pastorianus
tggtttgatgtctcgaaagtccaga

SEQ ID NO: 47507 - DNA, 25 bp, Saccharomyces pastorianus
gatgtctcgaaagtccagagtctaa

SEQ ID NO: 47508 - DNA, 25 bp, Saccharomyces pastorianus
ctcttggtttgatgtctcgaaagtc

SEQ ID NO: 47509 - DNA, 25 bp, Saccharomyces pastorianus
gtctcgaaagtccagagtctaaatt

SEQ ID NO: 47510 - DNA, 25 bp, Saccharomyces pastorianus
ttgatgtctcgaaagtccagagtct

SEQ ID NO: 47511 - DNA, 25 bp, Saccharomyces pastorianus
gggcctttcggatttgaatcacgtc

SEQ ID NO: 47512 - DNA, 25 bp, Saccharomyces pastorianus
attggtcagcatctaatcctatttt

SEQ ID NO: 47513 - DNA, 25 bp, Saccharomyces pastorianus
ggatattgccgatgacccaacagac

SEQ ID NO: 47514 - DNA, 25 bp, Saccharomyces pastorianus
gaagagcgttacagacccaaaccca

SEQ ID NO: 47515 - DNA, 25 bp, Saccharomyces pastorianus
agcatcatacctgcattaacccaaa

SEQ ID NO: 47516 - DNA, 25 bp, Saccharomyces pastorianus
gaagattttcccattacctggtgag

SEQ ID NO: 47517 - DNA, 25 bp, Saccharomyces pastorianus
tattttagagaatcccgccagtaca

SEQ ID NO: 47518 - DNA, 25 bp, Saccharomyces pastorianus
aagtgcatcgagaagatccgtatct

SEQ ID NO: 47519 - DNA, 25 bp, Saccharomyces pastorianus
ggatccatccatacactttaacttt

SEQ ID NO: 47520 - DNA, 25 bp, Saccharomyces pastorianus
tgttcaaatattatccgcgtctggg

SEQ ID NO: 47521 - DNA, 25 bp, Saccharomyces pastorianus
atatcaaatttacctgccctacgag

SEQ ID NO: 47522 - DNA, 25 bp, Saccharomyces pastorianus
agatagactcaaccaaagacctcaa

SEQ ID NO: 47523 - DNA, 25 bp, Saccharomyces pastorianus
tgagtcactcaagcaaacgaatggc

SEQ ID NO: 47524 - DNA, 25 bp, Saccharomyces pastorianus
tagagaatgaccttaatgccaaaaa

SEQ ID NO: 47525 - DNA, 25 bp, Saccharomyces pastorianus
caaccaaagacctcaactgggattt

SEQ ID NO: 47526 - DNA, 25 bp, Saccharomyces pastorianus
ctgggatttggaagctaagttaact

SEQ ID NO: 47527 - DNA, 25 bp, Saccharomyces pastorianus
atacaaaagacgtgctcccggattt

SEQ ID NO: 47528 - DNA, 25 bp, Saccharomyces pastorianus
aagttgcagtcttccaatgaagcca

SEQ ID NO: 47529 - DNA, 25 bp, Saccharomyces pastorianus
atttcgcgggcagcagttctcataa

SEQ ID NO: 47530 - DNA, 25 bp, Saccharomyces pastorianus
aaaacttgctagtggagtgcaggaa

SEQ ID NO: 47531 - DNA, 25 bp, Saccharomyces pastorianus
gagtagtcaaaaccattcctttaag

SEQ ID NO: 47532 - DNA, 25 bp, Saccharomyces pastorianus
gggttctcacaacaaattcatcaaa

SEQ ID NO: 47533 - DNA, 25 bp, Saccharomyces pastorianus
ccgccgccaaggacgagactagtgt

SEQ ID NO: 47534 - DNA, 25 bp, Saccharomyces pastorianus
tacaacatgggacactaaatcctgt

SEQ ID NO: 47535 - DNA, 25 bp, Saccharomyces pastorianus
acgagactagtgtcggcgtcagtgc

SEQ ID NO: 47536 - DNA, 25 bp, Saccharomyces pastorianus
taaatcctgtcccagctccgtatca

SEQ ID NO: 47537 - DNA, 25 bp, Saccharomyces pastorianus
gggacactaaatcctgtcccagctc

SEQ ID NO: 47538 - DNA, 25 bp, Saccharomyces pastorianus
actagtgtcggcgtcagtgccagtg

SEQ ID NO: 47539 - DNA, 25 bp, Saccharomyces pastorianus
gggcttacaacatgggacactaaat

SEQ ID NO: 47540 - DNA, 25 bp, Saccharomyces pastorianus
agtgtcggcgtcagtgccagtgcca

SEQ ID NO: 47541 - DNA, 25 bp, Saccharomyces pastorianus
ccgggcttacaacatgggacactaa

SEQ ID NO: 47542 - DNA, 25 bp, Saccharomyces pastorianus
gagagattttaagggcctgcctccc

SEQ ID NO: 47543 - DNA, 25 bp, Saccharomyces pastorianus
acaattgaagagaatccagagagat

SEQ ID NO: 47544 - DNA, 25 bp, Saccharomyces pastorianus
atgaggtcctacagttcctggaggg

SEQ ID NO: 47545 - DNA, 25 bp, Saccharomyces pastorianus
ttgacagcaccacgatgaacaccat

SEQ ID NO: 47546 - DNA, 25 bp, Saccharomyces pastorianus
gaaaggttccagaagagcaggcaat

SEQ ID NO: 47547 - DNA, 25 bp, Saccharomyces pastorianus
gagagcatcattgacagcaccacga

SEQ ID NO: 47548 - DNA, 25 bp, Saccharomyces pastorianus
ccccgggctaaacatggacactaat

SEQ ID NO: 47549 - DNA, 25 bp, Saccharomyces pastorianus
agcacgtctccacggatgaggtcct

SEQ ID NO: 47550 - DNA, 25 bp, Saccharomyces pastorianus
ttcctggagggcttcatcaacgaga

SEQ ID NO: 47551 - DNA, 25 bp, Saccharomyces pastorianus
tcatcaacgagaaggagagcatcat

SEQ ID NO: 47552 - DNA, 25 bp, Saccharomyces pastorianus
agcaggcaataactcggtcaccaca

SEQ ID NO: 47553 - DNA, 25 bp, Saccharomyces pastorianus
atgaacaccatcaacgtcaacgccg

SEQ ID NO: 47554 - DNA, 25 bp, Saccharomyces pastorianus
tgtggtcatccacactacacagctg

SEQ ID NO: 47555 - DNA, 25 bp, Saccharomyces pastorianus
gaaattgttcgttccttccaagaag

SEQ ID NO: 47556 - DNA, 25 bp, Saccharomyces pastorianus
aacggaatttcagtggtcagctacc

SEQ ID NO: 47557 - DNA, 25 bp, Saccharomyces pastorianus
gatgattttgattgtggtccacagt

SEQ ID NO: 47558 - DNA, 25 bp, Saccharomyces pastorianus
gaatgttttagaattgggccccagt

SEQ ID NO: 47559 - DNA, 25 bp, Saccharomyces pastorianus
gagacttattatttgcattcgagaa

SEQ ID NO: 47560 - DNA, 25 bp, Saccharomyces pastorianus
gagagtgcacgtttccaaatgtatt

SEQ ID NO: 47561 - DNA, 25 bp, Saccharomyces pastorianus
ggtcagctacccgtcaaaacaatta

SEQ ID NO: 47562 - DNA, 25 bp, Saccharomyces pastorianus
gggccccagttgattcacaagattc

SEQ ID NO: 47563 - DNA, 25 bp, Saccharomyces pastorianus
tagaattgttcagcttattgtccaa

SEQ ID NO: 47564 - DNA, 25 bp, Saccharomyces pastorianus
ttatctcgctggaagctgttttgga

SEQ ID NO: 47565 - DNA, 25 bp, Saccharomyces pastorianus
gtcagtatcaagaccacgagagact

SEQ ID NO: 47566 - DNA, 25 bp, Saccharomyces pastorianus
ggttttataatcgactagctgccta

SEQ ID NO: 47567 - DNA, 25 bp, Saccharomyces pastorianus
aagaattggtggctcaacatcgtga

SEQ ID NO: 47568 - DNA, 25 bp, Saccharomyces pastorianus
ttacaggtacactaactacgtcggt

SEQ ID NO: 47569 - DNA, 25 bp, Saccharomyces pastorianus
atactattgccaagaacctgcgtaa

SEQ ID NO: 47570 - DNA, 25 bp, Saccharomyces pastorianus
agctgcctacgaattgccattattg

SEQ ID NO: 47571 - DNA, 25 bp, Saccharomyces pastorianus
gagtattggctaggtcacgttatga

SEQ ID NO: 47572 - DNA, 25 bp, Saccharomyces pastorianus
actacgtcggtgaggaacatccaaa

SEQ ID NO: 47573 - DNA, 25 bp, Saccharomyces pastorianus
agactcacccggtcacttacaggta

SEQ ID NO: 47574 - DNA, 25 bp, Saccharomyces pastorianus
agaaaccatctgcaaagactcaccc

SEQ ID NO: 47575 - DNA, 25 bp, Saccharomyces pastorianus
gaaacgtcctgaagatgcgccgaaa

SEQ ID NO: 47576 - DNA, 25 bp, Saccharomyces pastorianus
gaattaccttcccaagctcaagaat

SEQ ID NO: 47577 - DNA, 25 bp, Saccharomyces pastorianus
gaattcctgctgaaagcgtattcaa

SEQ ID NO: 47578 - DNA, 25 bp, Saccharomyces pastorianus
aatctagactatccaacctttgaag

SEQ ID NO: 47579 - DNA, 25 bp, Saccharomyces pastorianus
gattggtcctctatttgacaagcct

SEQ ID NO: 47580 - DNA, 25 bp, Saccharomyces pastorianus
gacaagcagattgaccaggcttatg

SEQ ID NO: 47581 - DNA, 25 bp, Saccharomyces pastorianus
aaggaaagccctgctgattccgtta

SEQ ID NO: 47582 - DNA, 25 bp, Saccharomyces pastorianus
atgtcaagcgcattcgtgtacctaa

SEQ ID NO: 47583 - DNA, 25 bp, Saccharomyces pastorianus
gctgctaactcgagcctaaagtcgt

SEQ ID NO: 47584 - DNA, 25 bp, Saccharomyces pastorianus
gatgaccctgattggattaccggta

SEQ ID NO: 47585 - DNA, 25 bp, Saccharomyces pastorianus
gattccgttagtcgagaggcaatta

SEQ ID NO: 47586 - DNA, 25 bp, Saccharomyces pastorianus
gacgacgagataagcgcggaattaa

SEQ ID NO: 47587 - DNA, 25 bp, Saccharomyces pastorianus
gtgaatacaggaaccacatctcaaa

SEQ ID NO: 47588 - DNA, 25 bp, Saccharomyces pastorianus
gttaccagacacagacttttcgcat

SEQ ID NO: 47589 - DNA, 25 bp, Saccharomyces pastorianus
attactaccaggtgagttaccagac

SEQ ID NO: 47590 - DNA, 25 bp, Saccharomyces pastorianus
aatgttgctagctaccctacaaatg

SEQ ID NO: 47591 - DNA, 25 bp, Saccharomyces pastorianus
aagcatcaaacaagccgcagatact

SEQ ID NO: 47592 - DNA, 25 bp, Saccharomyces pastorianus
taccggatagtttacaatttgacaa

SEQ ID NO: 47593 - DNA, 25 bp, Saccharomyces pastorianus
cttctttaaagacctcagtgatgac

SEQ ID NO: 47594 - DNA, 25 bp, Saccharomyces pastorianus
gttgtatcacagacactaccacttg

SEQ ID NO: 47595 - DNA, 25 bp, Saccharomyces pastorianus
gcagcagcggccttgggattattta

SEQ ID NO: 47596 - DNA, 25 bp, Saccharomyces pastorianus
atttgtcataccgaaattgggtcct

SEQ ID NO: 47597 - DNA, 25 bp, Saccharomyces pastorianus
gcatcccaagccaactaatcaaatc

SEQ ID NO: 47598 - DNA, 25 bp, Saccharomyces pastorianus
aataaagccatttgtcataccgaaa

SEQ ID NO: 47599 - DNA, 25 bp, Saccharomyces pastorianus
catgctagggttaggttctgctttc

SEQ ID NO: 47600 - DNA, 25 bp, Saccharomyces pastorianus
cgatggttttgttggcttggttaag

SEQ ID NO: 47601 - DNA, 25 bp, Saccharomyces pastorianus
gctttctctcttttcgggatttata

SEQ ID NO: 47602 - DNA, 25 bp, Saccharomyces pastorianus
ctgctttctctcttttcgggattta

SEQ ID NO: 47603 - DNA, 25 bp, Saccharomyces pastorianus
aattggagacagaaaacgatggttt

SEQ ID NO: 47604 - DNA, 25 bp, Saccharomyces pastorianus
gttaagagtctatgggactcttcta

SEQ ID NO: 47605 - DNA, 25 bp, Saccharomyces pastorianus
tttgttggcttggttaagagtctat

SEQ ID NO: 47606 - DNA, 25 bp, Saccharomyces pastorianus
ctagggttaggttctgctttctctc

SEQ ID NO: 47607 - DNA, 25 bp, Saccharomyces pastorianus
ggcttggttaagagtctatgggact

SEQ ID NO: 47608 - DNA, 25 bp, Saccharomyces pastorianus
gtacatgctagggttaggttctgct

SEQ ID NO: 47609 - DNA, 25 bp, Saccharomyces pastorianus
ttctgctttctctcttttcgggatt

SEQ ID NO: 47610 - DNA, 25 bp, Saccharomyces pastorianus
tgcttattatgctttcggaatgcga

SEQ ID NO: 47611 - DNA, 25 bp, Saccharomyces pastorianus
gacttccctggtgattattgcaatt

SEQ ID NO: 47612 - DNA, 25 bp, Saccharomyces pastorianus
gctttcttgccttcttgcttattat

SEQ ID NO: 47613 - DNA, 25 bp, Saccharomyces pastorianus
attgcaatttgcttttcttatgttg

SEQ ID NO: 47614 - DNA, 25 bp, Saccharomyces pastorianus
tatggtataggcagacttccctggt

SEQ ID NO: 47615 - DNA, 25 bp, Saccharomyces pastorianus
ggaactgaactactcatgtagcctt

SEQ ID NO: 47616 - DNA, 25 bp, Saccharomyces pastorianus
taagagcgttagaagagcctcacaa

SEQ ID NO: 47617 - DNA, 25 bp, Saccharomyces pastorianus
aaccttaacatcttcgatgcgatcg

SEQ ID NO: 47618 - DNA, 25 bp, Saccharomyces pastorianus
tttcttatgttgttgctttcttgcc

SEQ ID NO: 47619 - DNA, 25 bp, Saccharomyces pastorianus
gaagagcctcacaaataccattata

SEQ ID NO: 47620 - DNA, 25 bp, Saccharomyces pastorianus
ggatgttccggaagatacaacctta

SEQ ID NO: 47621 - DNA, 25 bp, Saccharomyces pastorianus
cttggcggtttgtttgtatcactac

SEQ ID NO: 47622 - DNA, 25 bp, Saccharomyces pastorianus
gacgatgctttcttggagtttaggg

SEQ ID NO: 47623 - DNA, 25 bp, Saccharomyces pastorianus
agccgtttttattctcaatgtgcag

SEQ ID NO: 47624 - DNA, 25 bp, Saccharomyces pastorianus
gtacatctttaccttcattcttgtt

SEQ ID NO: 47625 - DNA, 25 bp, Saccharomyces pastorianus
caaattgcccatgaggaagccgttt

SEQ ID NO: 47626 - DNA, 25 bp, Saccharomyces pastorianus
atcaccgatcctacaatacttggcg

SEQ ID NO: 47627 - DNA, 25 bp, Saccharomyces pastorianus
gaggaagttatccattctttgtcaa

SEQ ID NO: 47628 - DNA, 25 bp, Saccharomyces pastorianus
aagtaaagctggtgcctggtcgttt

SEQ ID NO: 47629 - DNA, 25 bp, Saccharomyces pastorianus
tacggcattcactgttccctaatga

SEQ ID NO: 47630 - DNA, 25 bp, Saccharomyces pastorianus
ggacagcaccggtattccagaaata

SEQ ID NO: 47631 - DNA, 25 bp, Saccharomyces pastorianus
atgtttgctaatactgcccaggcta

SEQ ID NO: 47632 - DNA, 25 bp, Saccharomyces pastorianus
cgacaccatttgactatacctttgc

SEQ ID NO: 47633 - DNA, 25 bp, Saccharomyces pastorianus
gacgaaagcgcctttgaacccaaag

SEQ ID NO: 47634 - DNA, 25 bp, Saccharomyces pastorianus
agctgagccgctacggaagccgtat

SEQ ID NO: 47635 - DNA, 25 bp, Saccharomyces pastorianus
atacctttgcgtcaactgcatctga

SEQ ID NO: 47636 - DNA, 25 bp, Saccharomyces pastorianus
aactgcatctgagactttaccgggc

SEQ ID NO: 47637 - DNA, 25 bp, Saccharomyces pastorianus
ttaccgggctcttccaaaaagatag

SEQ ID NO: 47638 - DNA, 25 bp, Saccharomyces pastorianus
gaaaactagctatccctttgactat

SEQ ID NO: 47639 - DNA, 25 bp, Saccharomyces pastorianus
gcaatgcggcggctctattataata

SEQ ID NO: 47640 - DNA, 25 bp, Saccharomyces pastorianus
taattctagggacactccggaacct

SEQ ID NO: 47641 - DNA, 25 bp, Saccharomyces pastorianus
gatagctacggtgggcacgaacata

SEQ ID NO: 47642 - DNA, 25 bp, Saccharomyces pastorianus
acaagtttcacaacagtgccttctg

SEQ ID NO: 47643 - DNA, 25 bp, Saccharomyces pastorianus
aatgtcggaacgtgtccttttctag

SEQ ID NO: 47644 - DNA, 25 bp, Saccharomyces pastorianus
gagtcattcgggaagtgccagtaca

SEQ ID NO: 47645 - DNA, 25 bp, Saccharomyces pastorianus
gactggaagagtctctgacgctttc

SEQ ID NO: 47646 - DNA, 25 bp, Saccharomyces pastorianus
tggtaatgcgaaatcttttacttcc

SEQ ID NO: 47647 - DNA, 25 bp, Saccharomyces pastorianus
taaatgttaaagtactgccgtttgt

SEQ ID NO: 47648 - DNA, 25 bp, Saccharomyces pastorianus
gaaactggaaatcttggctaggaaa

SEQ ID NO: 47649 - DNA, 25 bp, Saccharomyces pastorianus
tactgccgtttgtactaggttataa

SEQ ID NO: 47650 - DNA, 25 bp, Saccharomyces pastorianus
agtccgttatgttggctttagcaga

SEQ ID NO: 47651 - DNA, 25 bp, Saccharomyces pastorianus
gaacgtgtccttttctagtcaataa

SEQ ID NO: 47652 - DNA, 25 bp, Saccharomyces pastorianus
gattaggtaacgatccaaacggatt

SEQ ID NO: 47653 - DNA, 25 bp, Saccharomyces pastorianus
gagtctctgacgctttcaggagtta

SEQ ID NO: 47654 - DNA, 25 bp, Saccharomyces pastorianus
gtctgcccacacgatttcatgaaat

SEQ ID NO: 47655 - DNA, 25 bp, Saccharomyces pastorianus
gagtacagtacagttgcacggaagc

SEQ ID NO: 47656 - DNA, 25 bp, Saccharomyces pastorianus
ggcaacaaatgttcctttggcaaag

SEQ ID NO: 47657 - DNA, 25 bp, Saccharomyces pastorianus
cactggcgtgggtaaattacgtcca

SEQ ID NO: 47658 - DNA, 25 bp, Saccharomyces pastorianus
ttggcaaagccaataccgagtacag

SEQ ID NO: 47659 - DNA, 25 bp, Saccharomyces pastorianus
gctatatttgaacaccagtatgccc

SEQ ID NO: 47660 - DNA, 25 bp, Saccharomyces pastorianus
gattcatcctgagggcgatttcatt

SEQ ID NO: 47661 - DNA, 25 bp, Saccharomyces pastorianus
agacttttaaggttgtacactcaga

SEQ ID NO: 47662 - DNA, 25 bp, Saccharomyces pastorianus
aatgcgacgacggatatgattcacg

SEQ ID NO: 47663 - DNA, 25 bp, Saccharomyces pastorianus
ggtttggacactcaattatctcatt

SEQ ID NO: 47664 - DNA, 25 bp, Saccharomyces pastorianus
ttgcgggtttaagatccactggcgt

SEQ ID NO: 47665 - DNA, 25 bp, Saccharomyces pastorianus
gacgcccgacgtgaacggattaccg

SEQ ID NO: 47666 - DNA, 25 bp, Saccharomyces pastorianus
tatgttgttactcgcgttcaactcc

SEQ ID NO: 47667 - DNA, 25 bp, Saccharomyces pastorianus
acggattaccgaaacttgacattat

SEQ ID NO: 47668 - DNA, 25 bp, Saccharomyces pastorianus
ataccgttcgtattggagagattgg

SEQ ID NO: 47669 - DNA, 25 bp, Saccharomyces pastorianus
atagttatgttgttactcgcgttca

SEQ ID NO: 47670 - DNA, 25 bp, Saccharomyces pastorianus
ttgttattggtgacgttggcagtga

SEQ ID NO: 47671 - DNA, 25 bp, Saccharomyces pastorianus
agagattgggcttgacgcccgacgt

SEQ ID NO: 47672 - DNA, 25 bp, Saccharomyces pastorianus
cttgacgcccgacgtgaacggatta

SEQ ID NO: 47673 - DNA, 25 bp, Saccharomyces pastorianus
ggattcataccgttcgtattggaga

SEQ ID NO: 47674 - DNA, 25 bp, Saccharomyces pastorianus
actcgcgttcaactcctatgggaaa

SEQ ID NO: 47675 - DNA, 25 bp, Saccharomyces pastorianus
gttggcagtgaacggattcataccg

SEQ ID NO: 47676 - DNA, 25 bp, Saccharomyces pastorianus
gtatccacaagcgatccaactttga

SEQ ID NO: 47677 - DNA, 25 bp, Saccharomyces pastorianus
gatgacaaatcatcaagccaatttg

SEQ ID NO: 47678 - DNA, 25 bp, Saccharomyces pastorianus
aacagtcttagagctacgatgacaa

SEQ ID NO: 47679 - DNA, 25 bp, Saccharomyces pastorianus
ttgaacagtcttagagctacgatga

SEQ ID NO: 47680 - DNA, 25 bp, Saccharomyces pastorianus
aactttgatcagtataagtgccaaa

SEQ ID NO: 47681 - DNA, 25 bp, Saccharomyces pastorianus
aattgaacagtcttagagctacgat

SEQ ID NO: 47682 - DNA, 25 bp, Saccharomyces pastorianus
gagctacgatgacaaatcatcaagc

SEQ ID NO: 47683 - DNA, 25 bp, Saccharomyces pastorianus
aaattgaacagtcttagagctacga

SEQ ID NO: 47684 - DNA, 25 bp, Saccharomyces pastorianus
cagtcttagagctacgatgacaaat

SEQ ID NO: 47685 - DNA, 25 bp, Saccharomyces pastorianus
gaacagtcttagagctacgatgaca

SEQ ID NO: 47686 - DNA, 25 bp, Saccharomyces pastorianus
tcttagagctacgatgacaaatcat

SEQ ID NO: 47687 - DNA, 25 bp, Saccharomyces pastorianus
gggttgaatttcttacttgtccagt

SEQ ID NO: 47688 - DNA, 25 bp, Saccharomyces pastorianus
tattcaatctgcgaatccacggctc

SEQ ID NO: 47689 - DNA, 25 bp, Saccharomyces pastorianus
tgggactggaactaacgctttgtaa

SEQ ID NO: 47690 - DNA, 25 bp, Saccharomyces pastorianus
atgagctctgcattgaattgcggaa

SEQ ID NO: 47691 - DNA, 25 bp, Saccharomyces pastorianus
ctagcactcttacaaaatcctccaa

SEQ ID NO: 47692 - DNA, 25 bp, Saccharomyces pastorianus
cacggctcatatcctgggactggaa

SEQ ID NO: 47693 - DNA, 25 bp, Saccharomyces pastorianus
aagtccaggattccaccttactgaa

SEQ ID NO: 47694 - DNA, 25 bp, Saccharomyces pastorianus
ggtcaagggcgtcatcacgagacaa

SEQ ID NO: 47695 - DNA, 25 bp, Saccharomyces pastorianus
gtttgacgtggcgatggagctacta

SEQ ID NO: 47696 - DNA, 25 bp, Saccharomyces pastorianus
tacaactggccactgatgtcaacga

SEQ ID NO: 47697 - DNA, 25 bp, Saccharomyces pastorianus
tactaaatcattccctagcactctt

SEQ ID NO: 47698 - DNA, 25 bp, Saccharomyces pastorianus
taaactgacacactggccaatcttt

SEQ ID NO: 47699 - DNA, 25 bp, Saccharomyces pastorianus
tggtgtcgcgctacttcaatgaata

SEQ ID NO: 47700 - DNA, 25 bp, Saccharomyces pastorianus
taatcttactaagtgctctgccctt

SEQ ID NO: 47701 - DNA, 25 bp, Saccharomyces pastorianus
gaggttcagaactctacctgctggt

SEQ ID NO: 47702 - DNA, 25 bp, Saccharomyces pastorianus
gggcattctcattctcatggtcaca

SEQ ID NO: 47703 - DNA, 25 bp, Saccharomyces pastorianus
gaacaaggtcatgggcacgagcaac

SEQ ID NO: 47704 - DNA, 25 bp, Saccharomyces pastorianus
gtcacacgcactctcatgaacaagg

SEQ ID NO: 47705 - DNA, 25 bp, Saccharomyces pastorianus
agggcattttcttacacatattggc

SEQ ID NO: 47706 - DNA, 25 bp, Saccharomyces pastorianus
taaagccgactttggtagggtacat

SEQ ID NO: 47707 - DNA, 25 bp, Saccharomyces pastorianus
aatctttgacccaatcgcttcttta

SEQ ID NO: 47708 - DNA, 25 bp, Saccharomyces pastorianus
tgaatacagtttcgaccacgagccc

SEQ ID NO: 47709 - DNA, 25 bp, Saccharomyces pastorianus
ctggatttccagatgttgtactaat

SEQ ID NO: 47710 - DNA, 25 bp, Saccharomyces pastorianus
agatatgactcatccagcacacttt

SEQ ID NO: 47711 - DNA, 25 bp, Saccharomyces pastorianus
atattcattgccatatgctggacaa

SEQ ID NO: 47712 - DNA, 25 bp, Saccharomyces pastorianus
agaaaaccattttcgcggtcctgat

SEQ ID NO: 47713 - DNA, 25 bp, Saccharomyces pastorianus
aacgatacttccttcttgaatatgg

SEQ ID NO: 47714 - DNA, 25 bp, Saccharomyces pastorianus
tgctggacaagatggctggcgattt

SEQ ID NO: 47715 - DNA, 25 bp, Saccharomyces pastorianus
taaacgactctcaccaaacgatttc

SEQ ID NO: 47716 - DNA, 25 bp, Saccharomyces pastorianus
ggagaacatgattcgtccagccata

SEQ ID NO: 47717 - DNA, 25 bp, Saccharomyces pastorianus
ttatatccccgcgagttttctggat

SEQ ID NO: 47718 - DNA, 25 bp, Saccharomyces pastorianus
ttcgcggtcctgatttatctagaag

SEQ ID NO: 47719 - DNA, 25 bp, Saccharomyces pastorianus
gaaatcctggtgaattctttcaacg

SEQ ID NO: 47720 - DNA, 25 bp, Saccharomyces pastorianus
atatctggctgatgcagtctttgat

SEQ ID NO: 47721 - DNA, 25 bp, Saccharomyces pastorianus
agtctggatatttcttcgtataaca

SEQ ID NO: 47722 - DNA, 25 bp, Saccharomyces pastorianus
ccagagtttctagggtcgtcaatga

SEQ ID NO: 47723 - DNA, 25 bp, Saccharomyces pastorianus
agggcactaagtcgcatgtgttctt

SEQ ID NO: 47724 - DNA, 25 bp, Saccharomyces pastorianus
ttcatgtttgccttagtagctgact

SEQ ID NO: 47725 - DNA, 25 bp, Saccharomyces pastorianus
acgtttggttcttcacttcagtaca

SEQ ID NO: 47726 - DNA, 25 bp, Saccharomyces pastorianus
aaaggcaactgtcggcactttgttc

SEQ ID NO: 47727 - DNA, 25 bp, Saccharomyces pastorianus
gcactttgttccactatcaggtcaa

SEQ ID NO: 47728 - DNA, 25 bp, Saccharomyces pastorianus
atcaggtcaaactgtctgccgacga

SEQ ID NO: 47729 - DNA, 25 bp, Saccharomyces pastorianus
tgccgacgatttctgctaactctga

SEQ ID NO: 47730 - DNA, 25 bp, Saccharomyces pastorianus
ggacatctactttcaataccagagt

SEQ ID NO: 47731 - DNA, 25 bp, Saccharomyces pastorianus
gactacaaagagacaacccctacat

SEQ ID NO: 47732 - DNA, 25 bp, Saccharomyces pastorianus
aaagccagccgaagaagcgtctcga

SEQ ID NO: 47733 - DNA, 25 bp, Saccharomyces pastorianus
aagcgtctcgagaggctacttagaa

SEQ ID NO: 47734 - DNA, 25 bp, Saccharomyces pastorianus
tagaaccactaaaacctcaccaaag

SEQ ID NO: 47735 - DNA, 25 bp, Saccharomyces pastorianus
gataactcgaatgcaaatgaccatg

SEQ ID NO: 47736 - DNA, 25 bp, Saccharomyces pastorianus
aagtagcagactatgagcaactcat

SEQ ID NO: 47737 - DNA, 25 bp, Saccharomyces pastorianus
agaggagtcatacttccccagtaat

SEQ ID NO: 47738 - DNA, 25 bp, Saccharomyces pastorianus
gacgcagtcccgatcaaaccaatga

SEQ ID NO: 47739 - DNA, 25 bp, Saccharomyces pastorianus
agaaagatcataagccctccttctg

SEQ ID NO: 47740 - DNA, 25 bp, Saccharomyces pastorianus
tcataagccctccttctgaaatttt

SEQ ID NO: 47741 - DNA, 25 bp, Saccharomyces pastorianus
gcaaactcaaggcagttgtcacaac

SEQ ID NO: 47742 - DNA, 25 bp, Saccharomyces pastorianus
gatgtttttgatattttgaacttta

SEQ ID NO: 47743 - DNA, 25 bp, Saccharomyces pastorianus
gctcttattggttcaaacgggaaca

SEQ ID NO: 47744 - DNA, 25 bp, Saccharomyces pastorianus
tgaactttaacagaaaggcaatgtt

SEQ ID NO: 47745 - DNA, 25 bp, Saccharomyces pastorianus
aatgtccttgttgatgtttttgata

SEQ ID NO: 47746 - DNA, 25 bp, Saccharomyces pastorianus
ttcaaacgggaacatgtggtggacc

SEQ ID NO: 47747 - DNA, 25 bp, Saccharomyces pastorianus
atgctcttattggttcaaacgggaa

SEQ ID NO: 47748 - DNA, 25 bp, Saccharomyces pastorianus
gtccttgttgatgtttttgatattt

SEQ ID NO: 47749 - DNA, 25 bp, Saccharomyces pastorianus
aaatgctcttattggttcaaacggg

SEQ ID NO: 47750 - DNA, 25 bp, Saccharomyces pastorianus
gaccaaaaatgtccttgttgatgtt

SEQ ID NO: 47751 - DNA, 25 bp, Saccharomyces pastorianus
agaaatgctcttattggttcaaacg

SEQ ID NO: 47752 - DNA, 25 bp, Saccharomyces pastorianus
cagaaaggcaatgttaactttgaaa

SEQ ID NO: 47753 - DNA, 25 bp, Saccharomyces pastorianus
ggtcgtccatatggccgtaatacaa

SEQ ID NO: 47754 - DNA, 25 bp, Saccharomyces pastorianus
cagacgcattcagctgattcagatg

SEQ ID NO: 47755 - DNA, 25 bp, Saccharomyces pastorianus
taagcaagtgctccgagacaccaag

SEQ ID NO: 47756 - DNA, 25 bp, Saccharomyces pastorianus
ggctaaaaagccatgtttcacccca

SEQ ID NO: 47757 - DNA, 25 bp, Saccharomyces pastorianus
gttcgtctcctaaacttctagatga

SEQ ID NO: 47758 - DNA, 25 bp, Saccharomyces pastorianus
gaagctcaactaattctgtcttttc

SEQ ID NO: 47759 - DNA, 25 bp, Saccharomyces pastorianus
gagatacattcccttcatgagttgg

SEQ ID NO: 47760 - DNA, 25 bp, Saccharomyces pastorianus
acaatatatctgtggttggatcatt

SEQ ID NO: 47761 - DNA, 25 bp, Saccharomyces pastorianus
gacaccaagggaacaggtcgtccat

SEQ ID NO: 47762 - DNA, 25 bp, Saccharomyces pastorianus
tgtcttttcaagttcgtctcctaaa

SEQ ID NO: 47763 - DNA, 25 bp, Saccharomyces pastorianus
ataaagcattccagacgcattcagc

SEQ ID NO: 47764 - DNA, 25 bp, Saccharomyces pastorianus
ccaaagttatgtatgtggtccctaa

SEQ ID NO: 47765 - DNA, 25 bp, Saccharomyces pastorianus
aagttcgagctcaagtcccattaat

SEQ ID NO: 47766 - DNA, 25 bp, Saccharomyces pastorianus
gataccatgttaaccgatcttttaa

SEQ ID NO: 47767 - DNA, 25 bp, Saccharomyces pastorianus
gacggactatgtacaaaatcgctct

SEQ ID NO: 47768 - DNA, 25 bp, Saccharomyces pastorianus
cccttttgtgttattgacggactat

SEQ ID NO: 47769 - DNA, 25 bp, Saccharomyces pastorianus
ttattccgaatcactaccccaagag

SEQ ID NO: 47770 - DNA, 25 bp, Saccharomyces pastorianus
gacacaggcgtaccttacaagctga

SEQ ID NO: 47771 - DNA, 25 bp, Saccharomyces pastorianus
aagggccattatcgtcatttagaga

SEQ ID NO: 47772 - DNA, 25 bp, Saccharomyces pastorianus
agccgagaacctttctaactgcgaa

SEQ ID NO: 47773 - DNA, 25 bp, Saccharomyces pastorianus
aatcgctctgtccattagccgagaa

SEQ ID NO: 47774 - DNA, 25 bp, Saccharomyces pastorianus
aattcactagaatgggcacccgtta

SEQ ID NO: 47775 - DNA, 25 bp, Saccharomyces pastorianus
aaaaatctctcaaggatgccaaaag

SEQ ID NO: 47776 - DNA, 25 bp, Saccharomyces pastorianus
gaaatcatccagtctttgtcaagtg

SEQ ID NO: 47777 - DNA, 25 bp, Saccharomyces pastorianus
atccagtctttgtcaagtgtgatta

SEQ ID NO: 47778 - DNA, 25 bp, Saccharomyces pastorianus
gaaatcaaaataacgtcacttagag

SEQ ID NO: 47779 - DNA, 25 bp, Saccharomyces pastorianus
aaaaggaaaaacagctggtcgcagc

SEQ ID NO: 47780 - DNA, 25 bp, Saccharomyces pastorianus
ctggtcgcagcaaatgaaatcatcc

SEQ ID NO: 47781 - DNA, 25 bp, Saccharomyces pastorianus
cttttgtcgagaacagagttaattt

SEQ ID NO: 47782 - DNA, 25 bp, Saccharomyces pastorianus
taacgtcacttagaggagacctcaa

SEQ ID NO: 47783 - DNA, 25 bp, Saccharomyces pastorianus
ttctgagaaagatgctaggattcaa

SEQ ID NO: 47784 - DNA, 25 bp, Saccharomyces pastorianus
aggatgccaaaagtcagatttctga

SEQ ID NO: 47785 - DNA, 25 bp, Saccharomyces pastorianus
gtcacttagaggagacctcaacttt

SEQ ID NO: 47786 - DNA, 25 bp, Saccharomyces pastorianus
gaataccattatttacgtttgctaa

SEQ ID NO: 47787 - DNA, 25 bp, Saccharomyces pastorianus
ggacagatacgtgaccattctgatg

SEQ ID NO: 47788 - DNA, 25 bp, Saccharomyces pastorianus
tccttcttcgatccaagacgtcatt

SEQ ID NO: 47789 - DNA, 25 bp, Saccharomyces pastorianus
gacaaccccacgtaaaatgcatcaa

SEQ ID NO: 47790 - DNA, 25 bp, Saccharomyces pastorianus
ggcaaaagccattcaaggccgtcaa

SEQ ID NO: 47791 - DNA, 25 bp, Saccharomyces pastorianus
atagcaaattactcttccttcttcg

SEQ ID NO: 47792 - DNA, 25 bp, Saccharomyces pastorianus
aggccgtcaactccaactcataaga

SEQ ID NO: 47793 - DNA, 25 bp, Saccharomyces pastorianus
gagaaaaccacgatcgcaagcgcaa

SEQ ID NO: 47794 - DNA, 25 bp, Saccharomyces pastorianus
aagcaactattgaccaagcgccctt

SEQ ID NO: 47795 - DNA, 25 bp, Saccharomyces pastorianus
tcttcttctcactcaagtctaggga

SEQ ID NO: 47796 - DNA, 25 bp, Saccharomyces pastorianus
aggatgcaaacaactcttcttctca

SEQ ID NO: 47797 - DNA, 25 bp, Saccharomyces pastorianus
gctatcaggtaccaacgttgccata

SEQ ID NO: 47798 - DNA, 25 bp, Saccharomyces pastorianus
tagatctaagaaccgcccaacaaag

SEQ ID NO: 47799 - DNA, 25 bp, Saccharomyces pastorianus
tgattccaaatccttcccacattgt

SEQ ID NO: 47800 - DNA, 25 bp, Saccharomyces pastorianus
accttctgtcatggctggtgctaca

SEQ ID NO: 47801 - DNA, 25 bp, Saccharomyces pastorianus
ctggtgctacagctgctatcaggta

SEQ ID NO: 47802 - DNA, 25 bp, Saccharomyces pastorianus
tgaactacaattgccacgtgtcaga

SEQ ID NO: 47803 - DNA, 25 bp, Saccharomyces pastorianus
acctgggcatccctgtgattccaaa

SEQ ID NO: 47804 - DNA, 25 bp, Saccharomyces pastorianus
ggtggctacgtagctgcctctagaa

SEQ ID NO: 47805 - DNA, 25 bp, Saccharomyces pastorianus
gccacacgaacgacctatctgatat

SEQ ID NO: 47806 - DNA, 25 bp, Saccharomyces pastorianus
attagcgccgtagacgacgtgttca

SEQ ID NO: 47807 - DNA, 25 bp, Saccharomyces pastorianus
aaagaaggccttccatgacctgggc

SEQ ID NO: 47808 - DNA, 25 bp, Saccharomyces pastorianus
gattacctggcgttgtctaagcacc

SEQ ID NO: 47809 - DNA, 25 bp, Saccharomyces pastorianus
gactgaagccgacaaggtcaccgtt

SEQ ID NO: 47810 - DNA, 25 bp, Saccharomyces pastorianus
atccccactttgaacttggaggcgg

SEQ ID NO: 47811 - DNA, 25 bp, Saccharomyces pastorianus
cttctcgtcctgttacgtgtttcaa

SEQ ID NO: 47812 - DNA, 25 bp, Saccharomyces pastorianus
atgcaacgttccatcttcgcgaggt

SEQ ID NO: 47813 - DNA, 25 bp, Saccharomyces pastorianus
agcacccagaagtgttggacgccat

SEQ ID NO: 47814 - DNA, 25 bp, Saccharomyces pastorianus
caaggagtttcctttagctcaccgt

SEQ ID NO: 47815 - DNA, 25 bp, Saccharomyces pastorianus
acggtttccgctctcagtaggctgt

SEQ ID NO: 47816 - DNA, 25 bp, Saccharomyces pastorianus
ggacgccatgcataaaaccatcgac

SEQ ID NO: 47817 - DNA, 25 bp, Saccharomyces pastorianus
aacaacattaatcgtctggccaagg

SEQ ID NO: 47818 - DNA, 25 bp, Saccharomyces pastorianus
tcagcttcatctacgaacgcagcag

SEQ ID NO: 47819 - DNA, 25 bp, Saccharomyces pastorianus
atatcaaggtgctccaaaagaactt

SEQ ID NO: 47820 - DNA, 25 bp, Saccharomyces pastorianus
ttctgaccttggaaatcccagcatt

SEQ ID NO: 47821 - DNA, 25 bp, Saccharomyces pastorianus
agctgatgctaaagtggtcgttacc

SEQ ID NO: 47822 - DNA, 25 bp, Saccharomyces pastorianus
gttgtttcaggatcttttggtaata

SEQ ID NO: 47823 - DNA, 25 bp, Saccharomyces pastorianus
tcaattgcgtaaccggttcctccag

SEQ ID NO: 47824 - DNA, 25 bp, Saccharomyces pastorianus
attaacaatgctcttctgaccttgg

SEQ ID NO: 47825 - DNA, 25 bp, Saccharomyces pastorianus
agggctcagtgggttcaattgcgta

SEQ ID NO: 47826 - DNA, 25 bp, Saccharomyces pastorianus
gaaggttctttggacggccctgtga

SEQ ID NO: 47827 - DNA, 25 bp, Saccharomyces pastorianus
atcaacttagttgtttcaggatctt

SEQ ID NO: 47828 - DNA, 25 bp, Saccharomyces pastorianus
ggaacaagcggccaccgccttattg

SEQ ID NO: 47829 - DNA, 25 bp, Saccharomyces pastorianus
acggccctgtgatcttggagcaaaa

SEQ ID NO: 47830 - DNA, 25 bp, Saccharomyces pastorianus
gatcacgggaacaaacatgggtatt

SEQ ID NO: 47831 - DNA, 25 bp, Saccharomyces pastorianus
gtatgcaaaatcatctttcggagaa

SEQ ID NO: 47832 - DNA, 25 bp, Saccharomyces pastorianus
ctttcggagaagatgccctggccaa

SEQ ID NO: 47833 - DNA, 25 bp, Saccharomyces pastorianus
ggtctggctctgtcattaggtgata

SEQ ID NO: 47834 - DNA, 25 bp, Saccharomyces pastorianus
agggacaaggtctggctctgtcatt

SEQ ID NO: 47835 - DNA, 25 bp, Saccharomyces pastorianus
attaagccagccagtaccgatgatg

SEQ ID NO: 47836 - DNA, 25 bp, Saccharomyces pastorianus
acactgcatgcttatttgaaagaat

SEQ ID NO: 47837 - DNA, 25 bp, Saccharomyces pastorianus
ccgtactatgtggaatgcttttgaa

SEQ ID NO: 47838 - DNA, 25 bp, Saccharomyces pastorianus
attgaaaaggattccaagaccgatg

SEQ ID NO: 47839 - DNA, 25 bp, Saccharomyces pastorianus
agaagatgccctggccaacttatgt

SEQ ID NO: 47840 - DNA, 25 bp, Saccharomyces pastorianus
cagtaccgatgatgaacatttccgt

SEQ ID NO: 47841 - DNA, 25 bp, Saccharomyces pastorianus
gtatgccactgagaacgcctttgat

SEQ ID NO: 47842 - DNA, 25 bp, Saccharomyces pastorianus
gaagttgcattcttggacactacta

SEQ ID NO: 47843 - DNA, 25 bp, Saccharomyces pastorianus
acttcccacaaatcggttaccgatg

SEQ ID NO: 47844 - DNA, 25 bp, Saccharomyces pastorianus
gagtcatgacatctatctccattct

SEQ ID NO: 47845 - DNA, 25 bp, Saccharomyces pastorianus
aaccgtcaccaatgctttgaaggcg

SEQ ID NO: 47846 - DNA, 25 bp, Saccharomyces pastorianus
tggtgatttttacactgccgctatc

SEQ ID NO: 47847 - DNA, 25 bp, Saccharomyces pastorianus
gaagcacatccgtaatagcgttggt

SEQ ID NO: 47848 - DNA, 25 bp, Saccharomyces pastorianus
aaaacgaagacgacgctgccgctaa

SEQ ID NO: 47849 - DNA, 25 bp, Saccharomyces pastorianus
gccgctaagccaacaggtccagtta

SEQ ID NO: 47850 - DNA, 25 bp, Saccharomyces pastorianus
caatccgtcgtttcattctaagtgg

SEQ ID NO: 47851 - DNA, 25 bp, Saccharomyces pastorianus
cttcagtctgaagcccggaggttga

SEQ ID NO: 47852 - DNA, 25 bp, Saccharomyces pastorianus
attaccgcgactccaatgctaaaaa

SEQ ID NO: 47853 - DNA, 25 bp, Saccharomyces pastorianus
ggcagaaacttcctactcatatttg

SEQ ID NO: 47854 - DNA, 25 bp, Saccharomyces pastorianus
gatatcatggcaccgttgagagaaa

SEQ ID NO: 47855 - DNA, 25 bp, Saccharomyces pastorianus
gtcgaccatacaaaggagtttcata

SEQ ID NO: 47856 - DNA, 25 bp, Saccharomyces pastorianus
aagcggaacgctcgacaatgactac

SEQ ID NO: 47857 - DNA, 25 bp, Saccharomyces pastorianus
gattcagctgattcggtaacaagat

SEQ ID NO: 47858 - DNA, 25 bp, Saccharomyces pastorianus
atatttgtctgcaggattaccgcga

SEQ ID NO: 47859 - DNA, 25 bp, Saccharomyces pastorianus
aagggccaaacagattcagctgatt

SEQ ID NO: 47860 - DNA, 25 bp, Saccharomyces pastorianus
acagaaactattggcgctagagaca

SEQ ID NO: 47861 - DNA, 25 bp, Saccharomyces pastorianus
taatagcgacgatatcatggcaccg

SEQ ID NO: 47862 - DNA, 25 bp, Saccharomyces pastorianus
aggacatcgaacttcttacaagccc

SEQ ID NO: 47863 - DNA, 25 bp, Saccharomyces pastorianus
ggtgatcagacaagtgccgcttcat

SEQ ID NO: 47864 - DNA, 25 bp, Saccharomyces pastorianus
gacgtcatcttcgaatgtgatcccc

SEQ ID NO: 47865 - DNA, 25 bp, Saccharomyces pastorianus
aacaatcttcacgaatcgcagccgt

SEQ ID NO: 47866 - DNA, 25 bp, Saccharomyces pastorianus
atatcagactattccgcattttccc

SEQ ID NO: 47867 - DNA, 25 bp, Saccharomyces pastorianus
aacagaaaccttcgtcgacgtcatc

SEQ ID NO: 47868 - DNA, 25 bp, Saccharomyces pastorianus
gcagccgtggcttgattcgttgaat

SEQ ID NO: 47869 - DNA, 25 bp, Saccharomyces pastorianus
taaggcgggtttcatgacacaagat

SEQ ID NO: 47870 - DNA, 25 bp, Saccharomyces pastorianus
gcattgcactcctctagtcgttatt

SEQ ID NO: 47871 - DNA, 25 bp, Saccharomyces pastorianus
agtacgctgctaaccaatcatcaag

SEQ ID NO: 47872 - DNA, 25 bp, Saccharomyces pastorianus
ggtattctatcttcaccacaacaga

SEQ ID NO: 47873 - DNA, 25 bp, Saccharomyces pastorianus
ttattccgggcctaatagccagttg

SEQ ID NO: 47874 - DNA, 25 bp, Saccharomyces pastorianus
ctgtacgagagcgaaccgtggattc

SEQ ID NO: 47875 - DNA, 25 bp, Saccharomyces pastorianus
gggttcaaccttggttcatttctga

SEQ ID NO: 47876 - DNA, 25 bp, Saccharomyces pastorianus
actcttagacatgtggtgggaccct

SEQ ID NO: 47877 - DNA, 25 bp, Saccharomyces pastorianus
gatactttggccgatagagaactga

SEQ ID NO: 47878 - DNA, 25 bp, Saccharomyces pastorianus
aagatgcattggaagcgctgtacga

SEQ ID NO: 47879 - DNA, 25 bp, Saccharomyces pastorianus
ttagaccttacaaccgatataccct

SEQ ID NO: 47880 - DNA, 25 bp, Saccharomyces pastorianus
tataccctatgtcaattatgcggag

SEQ ID NO: 47881 - DNA, 25 bp, Saccharomyces pastorianus
gccggatgcaactttggtagagact

SEQ ID NO: 47882 - DNA, 25 bp, Saccharomyces pastorianus
gggagatgcaatactataccacctt

SEQ ID NO: 47883 - DNA, 25 bp, Saccharomyces pastorianus
ggaaccctccaagtcattagaagaa

SEQ ID NO: 47884 - DNA, 25 bp, Saccharomyces pastorianus
gcgaatggtccaaactactcttaga

SEQ ID NO: 47885 - DNA, 25 bp, Saccharomyces pastorianus
aggtggttccagttctgattccaaa

SEQ ID NO: 47886 - DNA, 25 bp, Saccharomyces pastorianus
gtgggccatcgagggcatatctata

SEQ ID NO: 47887 - DNA, 25 bp, Saccharomyces pastorianus
aagactagccgactctttagcgaga

SEQ ID NO: 47888 - DNA, 25 bp, Saccharomyces pastorianus
ggataaacgattctactgtcagcag

SEQ ID NO: 47889 - DNA, 25 bp, Saccharomyces pastorianus
tcgttttggaaccaagatcccaaga

SEQ ID NO: 47890 - DNA, 25 bp, Saccharomyces pastorianus
atctaccacaagcttccaagggcag

SEQ ID NO: 47891 - DNA, 25 bp, Saccharomyces pastorianus
tacggaggttcaaggaagattcttc

SEQ ID NO: 47892 - DNA, 25 bp, Saccharomyces pastorianus
gattccaaatggtatctgccaccgt

SEQ ID NO: 47893 - DNA, 25 bp, Saccharomyces pastorianus
gatcccaagattgtcatcatattag

SEQ ID NO: 47894 - DNA, 25 bp, Saccharomyces pastorianus
ctgccaccgtattccaagagatcaa

SEQ ID NO: 47895 - DNA, 25 bp, Saccharomyces pastorianus
tctactgtcagcaggaacccatcta

SEQ ID NO: 47896 - DNA, 25 bp, Saccharomyces pastorianus
tattgtgacgttgttcccctggatt

SEQ ID NO: 47897 - DNA, 25 bp, Saccharomyces pastorianus
aagctattgtgacgttgttcccctg

SEQ ID NO: 47898 - DNA, 25 bp, Saccharomyces pastorianus
gttgttcccctggatttcaaaacat

SEQ ID NO: 47899 - DNA, 25 bp, Saccharomyces pastorianus
tagaattgcctaaccttaacgaaga

SEQ ID NO: 47900 - DNA, 25 bp, Saccharomyces pastorianus
cagggacctagaattgcctaacctt

SEQ ID NO: 47901 - DNA, 25 bp, Saccharomyces pastorianus
aaagctattgtgacgttgttcccct

SEQ ID NO: 47902 - DNA, 25 bp, Saccharomyces pastorianus
ggatttcaaaacattctaccaaatt

SEQ ID NO: 47903 - DNA, 25 bp, Saccharomyces pastorianus
gctattgtgacgttgttcccctgga

SEQ ID NO: 47904 - DNA, 25 bp, Saccharomyces pastorianus
tgtgacgttgttcccctggatttca

SEQ ID NO: 47905 - DNA, 25 bp, Saccharomyces pastorianus
gcctaaccttaacgaagaaagctat

SEQ ID NO: 47906 - DNA, 25 bp, Saccharomyces pastorianus
attcagggacctagaattgcctaac

SEQ ID NO: 47907 - DNA, 25 bp, Saccharomyces pastorianus
agttcattgagggtgacgatttgca

SEQ ID NO: 47908 - DNA, 25 bp, Saccharomyces pastorianus
aatcccgttgaatgacgacgaccgc

SEQ ID NO: 47909 - DNA, 25 bp, Saccharomyces pastorianus
gctgcagcgagcaccaaagaaggtt

SEQ ID NO: 47910 - DNA, 25 bp, Saccharomyces pastorianus
acgtatccggatttgaagttcattg

SEQ ID NO: 47911 - DNA, 25 bp, Saccharomyces pastorianus
ttgcagccgaactgatacatgagtt

SEQ ID NO: 47912 - DNA, 25 bp, Saccharomyces pastorianus
gtttatcgattgttgcgtgttccag

SEQ ID NO: 47913 - DNA, 25 bp, Saccharomyces pastorianus
aacagcgggcactgggaagtcaacc

SEQ ID NO: 47914 - DNA, 25 bp, Saccharomyces pastorianus
gaagtcaaccattgcagccgaactg

SEQ ID NO: 47915 - DNA, 25 bp, Saccharomyces pastorianus
gtagaatccaccaaggctgcagcga

SEQ ID NO: 47916 - DNA, 25 bp, Saccharomyces pastorianus
gattgttgcgtgttccagcttgaaa

SEQ ID NO: 47917 - DNA, 25 bp, Saccharomyces pastorianus
gtcaaaatcattgtgctggcaggaa

SEQ ID NO: 47918 - DNA, 25 bp, Saccharomyces pastorianus
tgaaaagcaccagggacttacgggc

SEQ ID NO: 47919 - DNA, 25 bp, Saccharomyces pastorianus
aacatccctgggtggctagctggtg

SEQ ID NO: 47920 - DNA, 25 bp, Saccharomyces pastorianus
gctagctggtgaaaacggatccttt

SEQ ID NO: 47921 - DNA, 25 bp, Saccharomyces pastorianus
cccttggaaatgttatgctgatgct

SEQ ID NO: 47922 - DNA, 25 bp, Saccharomyces pastorianus
gatgctaatttcgaacactcgccat

SEQ ID NO: 47923 - DNA, 25 bp, Saccharomyces pastorianus
atatttccaggtacacttcattagt

SEQ ID NO: 47924 - DNA, 25 bp, Saccharomyces pastorianus
gaacactcgccattgcacgattatg

SEQ ID NO: 47925 - DNA, 25 bp, Saccharomyces pastorianus
tgcagagtctatgggcccttggaaa

SEQ ID NO: 47926 - DNA, 25 bp, Saccharomyces pastorianus
ggaacgatgtttttggcggattgca

SEQ ID NO: 47927 - DNA, 25 bp, Saccharomyces pastorianus
gaacccgagatcagacagctcaggt

SEQ ID NO: 47928 - DNA, 25 bp, Saccharomyces pastorianus
aatgggaccttcaagatttgcagag

SEQ ID NO: 47929 - DNA, 25 bp, Saccharomyces pastorianus
aagatgattatgtgccgaactcgga

SEQ ID NO: 47930 - DNA, 25 bp, Saccharomyces pastorianus
ttggcggatcattcgatggtgacat

SEQ ID NO: 47931 - DNA, 25 bp, Saccharomyces pastorianus
aactgagacgctagatctgctgatt

SEQ ID NO: 47932 - DNA, 25 bp, Saccharomyces pastorianus
ggcctcaatattttccagttagctg

SEQ ID NO: 47933 - DNA, 25 bp, Saccharomyces pastorianus
gatcttacgttgtcatggttcgcca

SEQ ID NO: 47934 - DNA, 25 bp, Saccharomyces pastorianus
ggcataaagcgcaaggtcatagtaa

SEQ ID NO: 47935 - DNA, 25 bp, Saccharomyces pastorianus
cagttagctgagatagattgccatc

SEQ ID NO: 47936 - DNA, 25 bp, Saccharomyces pastorianus
gttgtcatggttcgccaagtttggc

SEQ ID NO: 47937 - DNA, 25 bp, Saccharomyces pastorianus
atgtattggcctgatggcctcaata

SEQ ID NO: 47938 - DNA, 25 bp, Saccharomyces pastorianus
tgccgaactcggatacgtcaatagt

SEQ ID NO: 47939 - DNA, 25 bp, Saccharomyces pastorianus
ataaccacattatacgatcttacgt

SEQ ID NO: 47940 - DNA, 25 bp, Saccharomyces pastorianus
tgtcccataccaagaagccagtgct

SEQ ID NO: 47941 - DNA, 25 bp, Saccharomyces pastorianus
acagatacagactgggccccaattt

SEQ ID NO: 47942 - DNA, 25 bp, Saccharomyces pastorianus
gaacaagcagcgtttgcccctagta

SEQ ID NO: 47943 - DNA, 25 bp, Saccharomyces pastorianus
gccagtgctgatccggtgctacaag

SEQ ID NO: 47944 - DNA, 25 bp, Saccharomyces pastorianus
agctaggaatttgtaccgcgtctta

SEQ ID NO: 47945 - DNA, 25 bp, Saccharomyces pastorianus
aaatccactgaatttcttcgcacaa

SEQ ID NO: 47946 - DNA, 25 bp, Saccharomyces pastorianus
ggtatccatgtagagggcgcctgcc

SEQ ID NO: 47947 - DNA, 25 bp, Saccharomyces pastorianus
gaacctacctatttagccaacgaca

SEQ ID NO: 47948 - DNA, 25 bp, Saccharomyces pastorianus
caagttttttaaccctgccatcaga

SEQ ID NO: 47949 - DNA, 25 bp, Saccharomyces pastorianus
ctagctcacaacatcggtatccatg

SEQ ID NO: 47950 - DNA, 25 bp, Saccharomyces pastorianus
gggtttacgatatgtttgcccgcgt

SEQ ID NO: 47951 - DNA, 25 bp, Saccharomyces pastorianus
ggctggcaagaactacaagatcata

SEQ ID NO: 47952 - DNA, 25 bp, Saccharomyces pastorianus
gaactacaagatcatacctgaccaa

SEQ ID NO: 47953 - DNA, 25 bp, Saccharomyces pastorianus
ctgttagcaaacatcttgaagagca

SEQ ID NO: 47954 - DNA, 25 bp, Saccharomyces pastorianus
aactcggctggcaagaactacaaga

SEQ ID NO: 47955 - DNA, 25 bp, Saccharomyces pastorianus
gtgagaactcggctggcaagaacta

SEQ ID NO: 47956 - DNA, 25 bp, Saccharomyces pastorianus
atacctgaccaaaaactgttagcaa

SEQ ID NO: 47957 - DNA, 25 bp, Saccharomyces pastorianus
tgaagagcaaaccaacaacgagcga

SEQ ID NO: 47958 - DNA, 25 bp, Saccharomyces pastorianus
gtcactgcgggcgtgtgagaactcg

SEQ ID NO: 47959 - DNA, 25 bp, Saccharomyces pastorianus
aaagcgaagtagagtcactgcgggc

SEQ ID NO: 47960 - DNA, 25 bp, Saccharomyces pastorianus
gatcatacctgaccaaaaactgtta

SEQ ID NO: 47961 - DNA, 25 bp, Saccharomyces pastorianus
gagcaaaccaacaacgagcgaagaa

SEQ ID NO: 47962 - DNA, 25 bp, Saccharomyces pastorianus
ggagagcacccaaattctgagatat

SEQ ID NO: 47963 - DNA, 25 bp, Saccharomyces pastorianus
catacgactcgggttcattgaagat

SEQ ID NO: 47964 - DNA, 25 bp, Saccharomyces pastorianus
attttgatggtgaatcggtccctca

SEQ ID NO: 47965 - DNA, 25 bp, Saccharomyces pastorianus
gaagggagccgcgttacagaaaact

SEQ ID NO: 47966 - DNA, 25 bp, Saccharomyces pastorianus
aagctgcatagccattttacgtact

SEQ ID NO: 47967 - DNA, 25 bp, Saccharomyces pastorianus
gctgatacactgaatgcggatacca

SEQ ID NO: 47968 - DNA, 25 bp, Saccharomyces pastorianus
aaaccttgactattctctgccaaat

SEQ ID NO: 47969 - DNA, 25 bp, Saccharomyces pastorianus
tacgtactaacaccactattcaaga

SEQ ID NO: 47970 - DNA, 25 bp, Saccharomyces pastorianus
aatctatgattccactcgctgatac

SEQ ID NO: 47971 - DNA, 25 bp, Saccharomyces pastorianus
gaatcggtccctcaatcaatagttt

SEQ ID NO: 47972 - DNA, 25 bp, Saccharomyces pastorianus
gagacccttaatgcaagtccacaat

SEQ ID NO: 47973 - DNA, 25 bp, Saccharomyces pastorianus
gacccaaacactatcggcctgaaag

SEQ ID NO: 47974 - DNA, 25 bp, Saccharomyces pastorianus
aaggcttttctctcgtcaggttgtc

SEQ ID NO: 47975 - DNA, 25 bp, Saccharomyces pastorianus
tgatgggattaacgacgcacccgct

SEQ ID NO: 47976 - DNA, 25 bp, Saccharomyces pastorianus
gtcgtactcagctctcttagattga

SEQ ID NO: 47977 - DNA, 25 bp, Saccharomyces pastorianus
tacagcgatgtttcgcctacaggta

SEQ ID NO: 47978 - DNA, 25 bp, Saccharomyces pastorianus
ggcctgaaaggtctggtcaatgcca

SEQ ID NO: 47979 - DNA, 25 bp, Saccharomyces pastorianus
tagctcagttagtgtcgtactcagc

SEQ ID NO: 47980 - DNA, 25 bp, Saccharomyces pastorianus
acccgctttggcattaagtgacctt

SEQ ID NO: 47981 - DNA, 25 bp, Saccharomyces pastorianus
tgaagaaatggtccccaccggatat

SEQ ID NO: 47982 - DNA, 25 bp, Saccharomyces pastorianus
tttggccatggcatttagctcagtt

SEQ ID NO: 47983 - DNA, 25 bp, Saccharomyces pastorianus
gaagcggctgatattgtcatactat

SEQ ID NO: 47984 - DNA, 25 bp, Saccharomyces pastorianus
gttggtgaaaacaaagcgctggata

SEQ ID NO: 47985 - DNA, 25 bp, Saccharomyces pastorianus
gaagtggatttcaacccctttatga

SEQ ID NO: 47986 - DNA, 25 bp, Saccharomyces pastorianus
aagcacgaggtcactgcagggcatt

SEQ ID NO: 47987 - DNA, 25 bp, Saccharomyces pastorianus
gttcgtaagatttacccacaagttg

SEQ ID NO: 47988 - DNA, 25 bp, Saccharomyces pastorianus
gaggttagatgacccgacggttcaa

SEQ ID NO: 47989 - DNA, 25 bp, Saccharomyces pastorianus
gttgctctaaacaaatctatcctgg

SEQ ID NO: 47990 - DNA, 25 bp, Saccharomyces pastorianus
caagtgcttcgtgggacagaggtaa

SEQ ID NO: 47991 - DNA, 25 bp, Saccharomyces pastorianus
gagcaattttgttctaagcacgagg

SEQ ID NO: 47992 - DNA, 25 bp, Saccharomyces pastorianus
caaatctatcctggaaacggtaggt

SEQ ID NO: 47993 - DNA, 25 bp, Saccharomyces pastorianus
aagccgtcggagatgcaagtgcttc

SEQ ID NO: 47994 - DNA, 25 bp, Saccharomyces pastorianus
gcagggcatttcaccttgaaggacg

SEQ ID NO: 47995 - DNA, 25 bp, Saccharomyces pastorianus
ctccccgagttgacggataatgaaa

SEQ ID NO: 47996 - DNA, 25 bp, Saccharomyces pastorianus
ggttgattgacccagcagagcctcc

SEQ ID NO: 47997 - DNA, 25 bp, Saccharomyces pastorianus
aaaagcatccaagcggttgtaaaca

SEQ ID NO: 47998 - DNA, 25 bp, Saccharomyces pastorianus
ccaagcggttgtaaacacgcatcac

SEQ ID NO: 47999 - DNA, 25 bp, Saccharomyces pastorianus
gtggtgtcaattactgctatttgtt

SEQ ID NO: 48000 - DNA, 25 bp, Saccharomyces pastorianus
aattactgctatttgttgtccaaca

SEQ ID NO: 48001 - DNA, 25 bp, Saccharomyces pastorianus
aaatattggttgattgacccagcag

SEQ ID NO: 48002 - DNA, 25 bp, Saccharomyces pastorianus
ttactgctatttgttgtccaacaac

SEQ ID NO: 48003 - DNA, 25 bp, Saccharomyces pastorianus
agtcctccccgagttgacggataat

SEQ ID NO: 48004 - DNA, 25 bp, Saccharomyces pastorianus
tccagaagtcctccccgagttgacg

SEQ ID NO: 48005 - DNA, 25 bp, Saccharomyces pastorianus
aaagaaaagcatccaagcggttgta

SEQ ID NO: 48006 - DNA, 25 bp, Saccharomyces pastorianus
ggtaatacatagtttatccaatgca

SEQ ID NO: 48007 - DNA, 25 bp, Saccharomyces pastorianus
ggatgaaaccttggaaattatctca

SEQ ID NO: 48008 - DNA, 25 bp, Saccharomyces pastorianus
aaatgggtatacgaggacgcagcta

SEQ ID NO: 48009 - DNA, 25 bp, Saccharomyces pastorianus
tattactgttgatgcattgagggat

SEQ ID NO: 48010 - DNA, 25 bp, Saccharomyces pastorianus
acgaggacgcagctagaaattcttc

SEQ ID NO: 48011 - DNA, 25 bp, Saccharomyces pastorianus
aattacatccctggctcagaaggaa

SEQ ID NO: 48012 - DNA, 25 bp, Saccharomyces pastorianus
attatctcaattacatccctggctc

SEQ ID NO: 48013 - DNA, 25 bp, Saccharomyces pastorianus
aatgggccattttgtattgccacaa

SEQ ID NO: 48014 - DNA, 25 bp, Saccharomyces pastorianus
ggtcaggtaataattcaacccctag

SEQ ID NO: 48015 - DNA, 25 bp, Saccharomyces pastorianus
aattcaacccctaggagctttgcca

SEQ ID NO: 48016 - DNA, 25 bp, Saccharomyces pastorianus
taacaacctctccaaggaggcccat

SEQ ID NO: 48017 - DNA, 25 bp, Saccharomyces pastorianus
tttttgccaggccatcaggtagaaa

SEQ ID NO: 48018 - DNA, 25 bp, Saccharomyces pastorianus
gtaactataacagcgctttctacaa

SEQ ID NO: 48019 - DNA, 25 bp, Saccharomyces pastorianus
tttaacctggcttgggagacgattt

SEQ ID NO: 48020 - DNA, 25 bp, Saccharomyces pastorianus
gaactctttactggacactatcgga

SEQ ID NO: 48021 - DNA, 25 bp, Saccharomyces pastorianus
tttctgaagccccttgaggttacta

SEQ ID NO: 48022 - DNA, 25 bp, Saccharomyces pastorianus
gaactattttaaactggcctctgga

SEQ ID NO: 48023 - DNA, 25 bp, Saccharomyces pastorianus
tcgcgtaacatgatagctgccggag

SEQ ID NO: 48024 - DNA, 25 bp, Saccharomyces pastorianus
atgtcgttagcggtgcccagcaaga

SEQ ID NO: 48025 - DNA, 25 bp, Saccharomyces pastorianus
tgacgacgggtcatcgcgtaacatg

SEQ ID NO: 48026 - DNA, 25 bp, Saccharomyces pastorianus
atgttgtcatatcgccattgagtaa

SEQ ID NO: 48027 - DNA, 25 bp, Saccharomyces pastorianus
gacgatttttggtatagctcagaac

SEQ ID NO: 48028 - DNA, 25 bp, Saccharomyces pastorianus
tagcgacttgcatttaacggtacca

SEQ ID NO: 48029 - DNA, 25 bp, Saccharomyces pastorianus
gccttggacaagttcattgctacta

SEQ ID NO: 48030 - DNA, 25 bp, Saccharomyces pastorianus
taaggttaccatccgcggacaacaa

SEQ ID NO: 48031 - DNA, 25 bp, Saccharomyces pastorianus
gaatttgacggcaccaatcgtgttt

SEQ ID NO: 48032 - DNA, 25 bp, Saccharomyces pastorianus
gagttcacggtgatcaactgccttt

SEQ ID NO: 48033 - DNA, 25 bp, Saccharomyces pastorianus
acgagtcttcgtttgacgtctttat

SEQ ID NO: 48034 - DNA, 25 bp, Saccharomyces pastorianus
aaacaaattcagttccacggccgca

SEQ ID NO: 48035 - DNA, 25 bp, Saccharomyces pastorianus
actactggccagttgttgactgtgg

SEQ ID NO: 48036 - DNA, 25 bp, Saccharomyces pastorianus
cacggccgcagaaatcgctaatatt

SEQ ID NO: 48037 - DNA, 25 bp, Saccharomyces pastorianus
gactgtggccactgtgttgcaagtt

SEQ ID NO: 48038 - DNA, 25 bp, Saccharomyces pastorianus
gtagatagcgcaactttcatcccag

SEQ ID NO: 48039 - DNA, 25 bp, Saccharomyces pastorianus
tgttcatagtttcagctctcaaggc

SEQ ID NO: 48040 - DNA, 25 bp, Saccharomyces pastorianus
aggcgggcgtaaatccctatttgca

SEQ ID NO: 48041 - DNA, 25 bp, Saccharomyces pastorianus
gaggactcaatcacagcaatcgcaa

SEQ ID NO: 48042 - DNA, 25 bp, Saccharomyces pastorianus
caacagggtcataagcaccgtgctt

SEQ ID NO: 48043 - DNA, 25 bp, Saccharomyces pastorianus
accgtgcttctaattcatctgttca

SEQ ID NO: 48044 - DNA, 25 bp, Saccharomyces pastorianus
tattcgccaggtatcaattctaact

SEQ ID NO: 48045 - DNA, 25 bp, Saccharomyces pastorianus
gtcacagaggttccaactccaggga

SEQ ID NO: 48046 - DNA, 25 bp, Saccharomyces pastorianus
gacgacgaattcatagccacttctt

SEQ ID NO: 48047 - DNA, 25 bp, Saccharomyces pastorianus
tgcaacttcaaatctatcaccacct

SEQ ID NO: 48048 - DNA, 25 bp, Saccharomyces pastorianus
aggtcagatgcttgggtctctacag

SEQ ID NO: 48049 - DNA, 25 bp, Saccharomyces pastorianus
gacatttatatctgcggctccaaag

SEQ ID NO: 48050 - DNA, 25 bp, Saccharomyces pastorianus
ctacatatggccttcacgagactaa

SEQ ID NO: 48051 - DNA, 25 bp, Saccharomyces pastorianus
gcaccaaagggttcatcagtcataa

SEQ ID NO: 48052 - DNA, 25 bp, Saccharomyces pastorianus
gaaaggctggcacttcaatgcccta

SEQ ID NO: 48053 - DNA, 25 bp, Saccharomyces pastorianus
atggaaccagtgctctgtacggtgt

SEQ ID NO: 48054 - DNA, 25 bp, Saccharomyces pastorianus
gaactatccgataggctggccaaga

SEQ ID NO: 48055 - DNA, 25 bp, Saccharomyces pastorianus
gaagttctacgcactaccgtgcagg

SEQ ID NO: 48056 - DNA, 25 bp, Saccharomyces pastorianus
ggtttcgttttcatctaagagcctg

SEQ ID NO: 48057 - DNA, 25 bp, Saccharomyces pastorianus
ctcattgttggattcttggacgcat

SEQ ID NO: 48058 - DNA, 25 bp, Saccharomyces pastorianus
agggtctagaccaggcgccattgtt

SEQ ID NO: 48059 - DNA, 25 bp, Saccharomyces pastorianus
gccggcgttgcagacaaactcattg

SEQ ID NO: 48060 - DNA, 25 bp, Saccharomyces pastorianus
gggtgaccccaaatactcagtggtt

SEQ ID NO: 48061 - DNA, 25 bp, Saccharomyces pastorianus
aggacccaaggtgttgaagccagac

SEQ ID NO: 48062 - DNA, 25 bp, Saccharomyces pastorianus
ggcaatacaaggctgactcggtcaa

SEQ ID NO: 48063 - DNA, 25 bp, Saccharomyces pastorianus
actcggtcaacattgccattcagga

SEQ ID NO: 48064 - DNA, 25 bp, Saccharomyces pastorianus
ttcaaagcgccctggaaggattcgt

SEQ ID NO: 48065 - DNA, 25 bp, Saccharomyces pastorianus
gcagtagcactttggccaattggca

SEQ ID NO: 48066 - DNA, 25 bp, Saccharomyces pastorianus
gaccctgcaattaatccatcgattt

SEQ ID NO: 48067 - DNA, 25 bp, Saccharomyces pastorianus
gagagtgaatctccgcaaggaccca

SEQ ID NO: 48068 - DNA, 25 bp, Saccharomyces pastorianus
tgaagccagacagccaacgggaaga

SEQ ID NO: 48069 - DNA, 25 bp, Saccharomyces pastorianus
gaaagacaaggccacgcacaccagt

SEQ ID NO: 48070 - DNA, 25 bp, Saccharomyces pastorianus
gcatgtcatcccacggtacaaaatg

SEQ ID NO: 48071 - DNA, 25 bp, Saccharomyces pastorianus
atggacccgaagctggtcagtccgt

SEQ ID NO: 48072 - DNA, 25 bp, Saccharomyces pastorianus
agcgagttatgtcttctggaatcat

SEQ ID NO: 48073 - DNA, 25 bp, Saccharomyces pastorianus
tctccagtctggtttaagctcgctt

SEQ ID NO: 48074 - DNA, 25 bp, Saccharomyces pastorianus
agttgatttcccaattccgacgatg

SEQ ID NO: 48075 - DNA, 25 bp, Saccharomyces pastorianus
gtcttcactatgagtccacatttca

SEQ ID NO: 48076 - DNA, 25 bp, Saccharomyces pastorianus
taagctcgcttggtatggttctata

SEQ ID NO: 48077 - DNA, 25 bp, Saccharomyces pastorianus
gcgatgatcgttttcttgtgcgtgc

SEQ ID NO: 48078 - DNA, 25 bp, Saccharomyces pastorianus
gaaacagtcttttccatcaactggg

SEQ ID NO: 48079 - DNA, 25 bp, Saccharomyces pastorianus
gaaatggccgatcacgttggacgct

SEQ ID NO: 48080 - DNA, 25 bp, Saccharomyces pastorianus
gaagacagccgcactttgtccttga

SEQ ID NO: 48081 - DNA, 25 bp, Saccharomyces pastorianus
tccagttatgtccagaacctctttt

SEQ ID NO: 48082 - DNA, 25 bp, Saccharomyces pastorianus
gacacaatttgttggcctgctcaaa

SEQ ID NO: 48083 - DNA, 25 bp, Saccharomyces pastorianus
gaagagttcagcaataccatcgatg

SEQ ID NO: 48084 - DNA, 25 bp, Saccharomyces pastorianus
cctacgtaacgttgattctttgatt

SEQ ID NO: 48085 - DNA, 25 bp, Saccharomyces pastorianus
taccatcgatgagctatccacagat

SEQ ID NO: 48086 - DNA, 25 bp, Saccharomyces pastorianus
atcatagttttgaaccgttggctgc

SEQ ID NO: 48087 - DNA, 25 bp, Saccharomyces pastorianus
acagtagcacctcccgaagagttca

SEQ ID NO: 48088 - DNA, 25 bp, Saccharomyces pastorianus
aaccgttggctgcaaatgaacctca

SEQ ID NO: 48089 - DNA, 25 bp, Saccharomyces pastorianus
gtagacgtttcagctgaagagcaat

SEQ ID NO: 48090 - DNA, 25 bp, Saccharomyces pastorianus
ttcgctgcctggtgtagacgtttca

SEQ ID NO: 48091 - DNA, 25 bp, Saccharomyces pastorianus
agaaacactcctacgtaacgttgat

SEQ ID NO: 48092 - DNA, 25 bp, Saccharomyces pastorianus
taaacttatcgattcgctgcctggt

SEQ ID NO: 48093 - DNA, 25 bp, Saccharomyces pastorianus
aaatgtccgacaagcatgccacagt

SEQ ID NO: 48094 - DNA, 25 bp, Saccharomyces pastorianus
gagtacggatattttaaggcccatt

SEQ ID NO: 48095 - DNA, 25 bp, Saccharomyces pastorianus
agataccccgttgagttcaaagtca

SEQ ID NO: 48096 - DNA, 25 bp, Saccharomyces pastorianus
aaccgaatactgctacaaccaactg

SEQ ID NO: 48097 - DNA, 25 bp, Saccharomyces pastorianus
caaccaactgctaatgaactcactg

SEQ ID NO: 48098 - DNA, 25 bp, Saccharomyces pastorianus
gtaggaactgcacacataacgcatt

SEQ ID NO: 48099 - DNA, 25 bp, Saccharomyces pastorianus
gcaaggttgccactaatttaattca

SEQ ID NO: 48100 - DNA, 25 bp, Saccharomyces pastorianus
agacgagctcttactactcatgaca

SEQ ID NO: 48101 - DNA, 25 bp, Saccharomyces pastorianus
ggtttgctttgtcctatggaactaa

SEQ ID NO: 48102 - DNA, 25 bp, Saccharomyces pastorianus
agtaacgttttcagagtcctttatg

SEQ ID NO: 48103 - DNA, 25 bp, Saccharomyces pastorianus
gtcacgatactcgagtacttgcgca

SEQ ID NO: 48104 - DNA, 25 bp, Saccharomyces pastorianus
tgaactcactgcatttggaaacgat

SEQ ID NO: 48105 - DNA, 25 bp, Saccharomyces pastorianus
aagagtgtccaactttttcagaaag

SEQ ID NO: 48106 - DNA, 25 bp, Saccharomyces pastorianus
gcttataattttgcggccaggtcca

SEQ ID NO: 48107 - DNA, 25 bp, Saccharomyces pastorianus
actggtcgttataacttccttcaat

SEQ ID NO: 48108 - DNA, 25 bp, Saccharomyces pastorianus
tgctttgggctctactacagctaga

SEQ ID NO: 48109 - DNA, 25 bp, Saccharomyces pastorianus
taggatattccgttccagtctcaaa

SEQ ID NO: 48110 - DNA, 25 bp, Saccharomyces pastorianus
gaagcttaccttccttggatgatat

SEQ ID NO: 48111 - DNA, 25 bp, Saccharomyces pastorianus
acatgggaatcctgtacacgttcaa

SEQ ID NO: 48112 - DNA, 25 bp, Saccharomyces pastorianus
gaaaagccaggtgccaagttccttt

SEQ ID NO: 48113 - DNA, 25 bp, Saccharomyces pastorianus
aggcttttctattatcctcgctata

SEQ ID NO: 48114 - DNA, 25 bp, Saccharomyces pastorianus
gccaggtccaatgtgtgggcaacat

SEQ ID NO: 48115 - DNA, 25 bp, Saccharomyces pastorianus
caccatggtgagtgctttgggctct

SEQ ID NO: 48116 - DNA, 25 bp, Saccharomyces pastorianus
atattcaacgataccaatggaggac

SEQ ID NO: 48117 - DNA, 25 bp, Saccharomyces pastorianus
cccctcgtggatcctattgatttga

SEQ ID NO: 48118 - DNA, 25 bp, Saccharomyces pastorianus
aaagcttcaaggacttagaggccaa

SEQ ID NO: 48119 - DNA, 25 bp, Saccharomyces pastorianus
gatttacaatcttcgatggtttcat

SEQ ID NO: 48120 - DNA, 25 bp, Saccharomyces pastorianus
caaagagggttttcgtgcaattaat

SEQ ID NO: 48121 - DNA, 25 bp, Saccharomyces pastorianus
ttactattgggtccgttggatgact

SEQ ID NO: 48122 - DNA, 25 bp, Saccharomyces pastorianus
gacgtcaaagtagagttgttcctaa

SEQ ID NO: 48123 - DNA, 25 bp, Saccharomyces pastorianus
attccaagctttattgacgttcaag

SEQ ID NO: 48124 - DNA, 25 bp, Saccharomyces pastorianus
gttggtttctattcaagcacactat

SEQ ID NO: 48125 - DNA, 25 bp, Saccharomyces pastorianus
atacggctagaggtcttcagtgaac

SEQ ID NO: 48126 - DNA, 25 bp, Saccharomyces pastorianus
tatcctctgatgacgcatacttgtt

SEQ ID NO: 48127 - DNA, 25 bp, Saccharomyces pastorianus
ttttccctcgtctatagtcaagctg

SEQ ID NO: 48128 - DNA, 25 bp, Saccharomyces pastorianus
actagtgtttctgctgatgggccca

SEQ ID NO: 48129 - DNA, 25 bp, Saccharomyces pastorianus
gtgaagccccaaggttgccataaat

SEQ ID NO: 48130 - DNA, 25 bp, Saccharomyces pastorianus
gaaatccactattattatccgcctg

SEQ ID NO: 48131 - DNA, 25 bp, Saccharomyces pastorianus
gatttgcattgcttccaacccaaaa

SEQ ID NO: 48132 - DNA, 25 bp, Saccharomyces pastorianus
tgcatctggttatctgagccctgaa

SEQ ID NO: 48133 - DNA, 25 bp, Saccharomyces pastorianus
ggttcattgcccgacgaagttaatc

SEQ ID NO: 48134 - DNA, 25 bp, Saccharomyces pastorianus
gatcaaatctcttctggttactaca

SEQ ID NO: 48135 - DNA, 25 bp, Saccharomyces pastorianus
gtatggttcctgttgctaatttgcc

SEQ ID NO: 48136 - DNA, 25 bp, Saccharomyces pastorianus
gtttgcatcttgtatgctcaccagg

SEQ ID NO: 48137 - DNA, 25 bp, Saccharomyces pastorianus
tatgatggtattgttctcgccacca

SEQ ID NO: 48138 - DNA, 25 bp, Saccharomyces pastorianus
gaatttttgtcctccaatgtcacat

SEQ ID NO: 48139 - DNA, 25 bp, Saccharomyces pastorianus
cacatctatgtgtcctgtcttgaag

SEQ ID NO: 48140 - DNA, 25 bp, Saccharomyces pastorianus
atattcttgctgactatttgcctcc

SEQ ID NO: 48141 - DNA, 25 bp, Saccharomyces pastorianus
ggccctgtgctacggattggcaaat

SEQ ID NO: 48142 - DNA, 25 bp, Saccharomyces pastorianus
tactggttgtcaatcctgatgtccc

SEQ ID NO: 48143 - DNA, 25 bp, Saccharomyces pastorianus
tgaatgggatgtcaacgtcgccgtt

SEQ ID NO: 48144 - DNA, 25 bp, Saccharomyces pastorianus
attagaaactctagcagccattccc

SEQ ID NO: 48145 - DNA, 25 bp, Saccharomyces pastorianus
aagacggccagaattctctcgaggt

SEQ ID NO: 48146 - DNA, 25 bp, Saccharomyces pastorianus
atataatttggaccccatcggtgca

SEQ ID NO: 48147 - DNA, 25 bp, Saccharomyces pastorianus
aacgattcgttcaagacggccctgt

SEQ ID NO: 48148 - DNA, 25 bp, Saccharomyces pastorianus
aagatttgtcgcttgggtattccga

SEQ ID NO: 48149 - DNA, 25 bp, Saccharomyces pastorianus
gatacttggtatccgcagcatctga

SEQ ID NO: 48150 - DNA, 25 bp, Saccharomyces pastorianus
tgcaatatatgctccgaaccgttcg

SEQ ID NO: 48151 - DNA, 25 bp, Saccharomyces pastorianus
gcttgtctgaaattcctgtgtctgt

SEQ ID NO: 48152 - DNA, 25 bp, Saccharomyces pastorianus
gtgtctgtaagattatgctcgcatt

SEQ ID NO: 48153 - DNA, 25 bp, Saccharomyces pastorianus
atgagatgtccaagctagaacgtac

SEQ ID NO: 48154 - DNA, 25 bp, Saccharomyces pastorianus
aaagttattgacagcctcttgccca

SEQ ID NO: 48155 - DNA, 25 bp, Saccharomyces pastorianus
aacgggttggtcacactctataaga

SEQ ID NO: 48156 - DNA, 25 bp, Saccharomyces pastorianus
gcagcatctgacttaccatttgact

SEQ ID NO: 48157 - DNA, 25 bp, Saccharomyces pastorianus
gaaagcaccattgccgattatgtgg

SEQ ID NO: 48158 - DNA, 25 bp, Saccharomyces pastorianus
gagtacctgacccaaagaatctgaa

SEQ ID NO: 48159 - DNA, 25 bp, Saccharomyces pastorianus
aggacgtagaaatgcccctaagtgg

SEQ ID NO: 48160 - DNA, 25 bp, Saccharomyces pastorianus
ttctttaccgataaatacagacctt

SEQ ID NO: 48161 - DNA, 25 bp, Saccharomyces pastorianus
tgaggatgacgatatcgatatggaa

SEQ ID NO: 48162 - DNA, 25 bp, Saccharomyces pastorianus
attaagttctcattccaagcaaaag

SEQ ID NO: 48163 - DNA, 25 bp, Saccharomyces pastorianus
tatccagtgatgaattagccatcat

SEQ ID NO: 48164 - DNA, 25 bp, Saccharomyces pastorianus
tacagacctttattatttgttgact

SEQ ID NO: 48165 - DNA, 25 bp, Saccharomyces pastorianus
tttgttgacttaatatccagtgatg

SEQ ID NO: 48166 - DNA, 25 bp, Saccharomyces pastorianus
agccatcattgaaataaatccatta

SEQ ID NO: 48167 - DNA, 25 bp, Saccharomyces pastorianus
aaatccattaagttctcattccaag

SEQ ID NO: 48168 - DNA, 25 bp, Saccharomyces pastorianus
aagaccacagatgcacaccggaatg

SEQ ID NO: 48169 - DNA, 25 bp, Saccharomyces pastorianus
tacaaacgactatttctttaccgat

SEQ ID NO: 48170 - DNA, 25 bp, Saccharomyces pastorianus
gatgcacaccggaatgaagaaagta

SEQ ID NO: 48171 - DNA, 25 bp, Saccharomyces pastorianus
gaaaactgcctcaaaattggcccaa

SEQ ID NO: 48172 - DNA, 25 bp, Saccharomyces pastorianus
gacgaagtattcgttgtggacttag

SEQ ID NO: 48173 - DNA, 25 bp, Saccharomyces pastorianus
gaaagtctgttgttgtaattactgc

SEQ ID NO: 48174 - DNA, 25 bp, Saccharomyces pastorianus
gctagataacgaactattgctgaaa

SEQ ID NO: 48175 - DNA, 25 bp, Saccharomyces pastorianus
tatgctcctgcgaagacgaagtatt

SEQ ID NO: 48176 - DNA, 25 bp, Saccharomyces pastorianus
gaacttttagaaatcacttccacta

SEQ ID NO: 48177 - DNA, 25 bp, Saccharomyces pastorianus
aataactttatcaccgctgttcaca

SEQ ID NO: 48178 - DNA, 25 bp, Saccharomyces pastorianus
atgaaagtctattaacccaatggtc

SEQ ID NO: 48179 - DNA, 25 bp, Saccharomyces pastorianus
attggcccaatttatcgataattcc

SEQ ID NO: 48180 - DNA, 25 bp, Saccharomyces pastorianus
gaactgtgtgggtattttcacggat

SEQ ID NO: 48181 - DNA, 25 bp, Saccharomyces pastorianus
gctgttcacattaacttacccagaa

SEQ ID NO: 48182 - DNA, 25 bp, Saccharomyces pastorianus
tctatatcttccgtgctgcaacaaa

SEQ ID NO: 48183 - DNA, 25 bp, Saccharomyces pastorianus
agtagcccttccttttcttctatat

SEQ ID NO: 48184 - DNA, 25 bp, Saccharomyces pastorianus
atgacagttgtctctttgattatat

SEQ ID NO: 48185 - DNA, 25 bp, Saccharomyces pastorianus
attgatcgtgggaatgggaccattc

SEQ ID NO: 48186 - DNA, 25 bp, Saccharomyces pastorianus
ggtcaccgaaattcaactgcaagaa

SEQ ID NO: 48187 - DNA, 25 bp, Saccharomyces pastorianus
aatttgggactggttgattgatcgt

SEQ ID NO: 48188 - DNA, 25 bp, Saccharomyces pastorianus
gtcgaaaccacaaatagtagccctt

SEQ ID NO: 48189 - DNA, 25 bp, Saccharomyces pastorianus
ggttgaatccattaaggtcaccgaa

SEQ ID NO: 48190 - DNA, 25 bp, Saccharomyces pastorianus
atcgtcatcatccactaccaaagtt

SEQ ID NO: 48191 - DNA, 25 bp, Saccharomyces pastorianus
aaatgctcaccgtaagggctcgaat

SEQ ID NO: 48192 - DNA, 25 bp, Saccharomyces pastorianus
aatggtgtcttgtctgatcacatga

SEQ ID NO: 48193 - DNA, 25 bp, Saccharomyces pastorianus
gtccaggattctcataattgccatt

SEQ ID NO: 48194 - DNA, 25 bp, Saccharomyces pastorianus
ggatgaacctccacgcaataaaagg

SEQ ID NO: 48195 - DNA, 25 bp, Saccharomyces pastorianus
gccgctgcctttagaactaccagat

SEQ ID NO: 48196 - DNA, 25 bp, Saccharomyces pastorianus
caggaacgccattgccaagagaaga

SEQ ID NO: 48197 - DNA, 25 bp, Saccharomyces pastorianus
aattccgcaacgaagtcgtcgctat

SEQ ID NO: 48198 - DNA, 25 bp, Saccharomyces pastorianus
aaaagcatctgccaattccgcaacg

SEQ ID NO: 48199 - DNA, 25 bp, Saccharomyces pastorianus
attgccattctgatgattctatccc

SEQ ID NO: 48200 - DNA, 25 bp, Saccharomyces pastorianus
aaaaggtctttcagcgatggtcact

SEQ ID NO: 48201 - DNA, 25 bp, Saccharomyces pastorianus
aagtcgtcgctatcgctaaagagga

SEQ ID NO: 48202 - DNA, 25 bp, Saccharomyces pastorianus
ggtaactcagttacgaacccgtctg

SEQ ID NO: 48203 - DNA, 25 bp, Saccharomyces pastorianus
gttacgaacccgtctgtccaggatt

SEQ ID NO: 48204 - DNA, 25 bp, Saccharomyces pastorianus
ctattccttatgttgttgtttcaga

SEQ ID NO: 48205 - DNA, 25 bp, Saccharomyces pastorianus
gtaaaagtcagccatcatctaaggg

SEQ ID NO: 48206 - DNA, 25 bp, Saccharomyces pastorianus
cacttttgttggtatctacgttgtc

SEQ ID NO: 48207 - DNA, 25 bp, Saccharomyces pastorianus
ctgggctcctattccttatgttgtt

SEQ ID NO: 48208 - DNA, 25 bp, Saccharomyces pastorianus
ttttcttctttgtgccagaaactaa

SEQ ID NO: 48209 - DNA, 25 bp, Saccharomyces pastorianus
ttgtcgataaatatggtcgtcgtac

SEQ ID NO: 48210 - DNA, 25 bp, Saccharomyces pastorianus
tgtggcctaacggtaaaagtcagcc

SEQ ID NO: 48211 - DNA, 25 bp, Saccharomyces pastorianus
tttgggtattgtcaactttgcctcc

SEQ ID NO: 48212 - DNA, 25 bp, Saccharomyces pastorianus
taacggtaaaagtcagccatcatct

SEQ ID NO: 48213 - DNA, 25 bp, Saccharomyces pastorianus
ggtcgtcgtacttgtctattgtggg

SEQ ID NO: 48214 - DNA, 25 bp, Saccharomyces pastorianus
gttggtatctacgttgtcgataaat

SEQ ID NO: 48215 - DNA, 25 bp, Saccharomyces pastorianus
gacgaaaccttattggcgcagttga

SEQ ID NO: 48216 - DNA, 25 bp, Saccharomyces pastorianus
aactacattagatttcacgcgcgag

SEQ ID NO: 48217 - DNA, 25 bp, Saccharomyces pastorianus
ttctagacttttactcagagccctt

SEQ ID NO: 48218 - DNA, 25 bp, Saccharomyces pastorianus
gtgatgcacaaaaaccgagtacctt

SEQ ID NO: 48219 - DNA, 25 bp, Saccharomyces pastorianus
taaggaccaaggctggccgtttccg

SEQ ID NO: 48220 - DNA, 25 bp, Saccharomyces pastorianus
acctgcggataatgacctgtttacc

SEQ ID NO: 48221 - DNA, 25 bp, Saccharomyces pastorianus
tcacgcgcgagaaccaagactggct

SEQ ID NO: 48222 - DNA, 25 bp, Saccharomyces pastorianus
gatatgtcccttttcgatagtggca

SEQ ID NO: 48223 - DNA, 25 bp, Saccharomyces pastorianus
gactggcttatgatgttcttctaga

SEQ ID NO: 48224 - DNA, 25 bp, Saccharomyces pastorianus
tcaagttttgttctgcgatggtcat

SEQ ID NO: 48225 - DNA, 25 bp, Saccharomyces pastorianus
gggagcacgctcttggtacaataaa

SEQ ID NO: 48226 - DNA, 25 bp, Saccharomyces pastorianus
accagcacttttgtattccacttta

SEQ ID NO: 48227 - DNA, 25 bp, Saccharomyces pastorianus
aaatccatatcccagcaaggtttga

SEQ ID NO: 48228 - DNA, 25 bp, Saccharomyces pastorianus
cagaactttgcgaactatcccgtaa

SEQ ID NO: 48229 - DNA, 25 bp, Saccharomyces pastorianus
ggacgaattcaacggcgactgctta

SEQ ID NO: 48230 - DNA, 25 bp, Saccharomyces pastorianus
tatcggatttgaaggaccagcactt

SEQ ID NO: 48231 - DNA, 25 bp, Saccharomyces pastorianus
tcgttgcccatcttctacgtaagga

SEQ ID NO: 48232 - DNA, 25 bp, Saccharomyces pastorianus
tttgactgatgaatcctttggatcg

SEQ ID NO: 48233 - DNA, 25 bp, Saccharomyces pastorianus
caaggtttgattactggtgacgaat

SEQ ID NO: 48234 - DNA, 25 bp, Saccharomyces pastorianus
gattcaagaatactcaaccctaggg

SEQ ID NO: 48235 - DNA, 25 bp, Saccharomyces pastorianus
acttaacgatcttttgaccaagcgg

SEQ ID NO: 48236 - DNA, 25 bp, Saccharomyces pastorianus
aattgtcgtccataatagtcagaac

SEQ ID NO: 48237 - DNA, 25 bp, Saccharomyces pastorianus
gttttgattcaacaccaaccgatga

SEQ ID NO: 48238 - DNA, 25 bp, Saccharomyces pastorianus
gtcgttctaagtccgtacagtgttt

SEQ ID NO: 48239 - DNA, 25 bp, Saccharomyces pastorianus
aaaatattctctctggtcgttctaa

SEQ ID NO: 48240 - DNA, 25 bp, Saccharomyces pastorianus
acatgtattcctgggatctctccta

SEQ ID NO: 48241 - DNA, 25 bp, Saccharomyces pastorianus
gtcgcagcatcaaacttacggtact

SEQ ID NO: 48242 - DNA, 25 bp, Saccharomyces pastorianus
ctatctctgattcgcaatacgtcca

SEQ ID NO: 48243 - DNA, 25 bp, Saccharomyces pastorianus
ttccttatcaaccagctcttttttg

SEQ ID NO: 48244 - DNA, 25 bp, Saccharomyces pastorianus
atggctctttgatctggaacatccc

SEQ ID NO: 48245 - DNA, 25 bp, Saccharomyces pastorianus
aaggagcttcctccgacatgtattc

SEQ ID NO: 48246 - DNA, 25 bp, Saccharomyces pastorianus
tataagacaacccagctgactcctt

SEQ ID NO: 48247 - DNA, 25 bp, Saccharomyces pastorianus
tggaacatcccaatggcttccttat

SEQ ID NO: 48248 - DNA, 25 bp, Saccharomyces pastorianus
aaggaggaggttctatctggtaaat

SEQ ID NO: 48249 - DNA, 25 bp, Saccharomyces pastorianus
tcgggcctacggaaaacgcaagaat

SEQ ID NO: 48250 - DNA, 25 bp, Saccharomyces pastorianus
ctcggtgataataatgcggtctacg

SEQ ID NO: 48251 - DNA, 25 bp, Saccharomyces pastorianus
gtttaagtcaaggtcaccaggattg

SEQ ID NO: 48252 - DNA, 25 bp, Saccharomyces pastorianus
gcggtctacgactacattttgatga

SEQ ID NO: 48253 - DNA, 25 bp, Saccharomyces pastorianus
gaacactgccgtattatactgttta

SEQ ID NO: 48254 - DNA, 25 bp, Saccharomyces pastorianus
agcagaagaaagcatccagtctggt

SEQ ID NO: 48255 - DNA, 25 bp, Saccharomyces pastorianus
acattttgatgaacactgccgtatt

SEQ ID NO: 48256 - DNA, 25 bp, Saccharomyces pastorianus
acacgaattgtctgagtgcgcctct

SEQ ID NO: 48257 - DNA, 25 bp, Saccharomyces pastorianus
tctggtaaataccacctcggtgata

SEQ ID NO: 48258 - DNA, 25 bp, Saccharomyces pastorianus
agtgcgcctctttcgggcctacgga

SEQ ID NO: 48259 - DNA, 25 bp, Saccharomyces pastorianus
ctgggcattccaactattttcaacg

SEQ ID NO: 48260 - DNA, 25 bp, Saccharomyces pastorianus
aaggtacgtaaactgctgggcattc

SEQ ID NO: 48261 - DNA, 25 bp, Saccharomyces pastorianus
ggcttgtggcccgataatacatttt

SEQ ID NO: 48262 - DNA, 25 bp, Saccharomyces pastorianus
atgggtcacgcttccaaggtacgta

SEQ ID NO: 48263 - DNA, 25 bp, Saccharomyces pastorianus
tacatttttgtttcttctagccccg

SEQ ID NO: 48264 - DNA, 25 bp, Saccharomyces pastorianus
gttaaagcattctgacctcgtggat

SEQ ID NO: 48265 - DNA, 25 bp, Saccharomyces pastorianus
tgacggcattgagattcacccagct

SEQ ID NO: 48266 - DNA, 25 bp, Saccharomyces pastorianus
agctatagttgcctctggtattcca

SEQ ID NO: 48267 - DNA, 25 bp, Saccharomyces pastorianus
caacgtgttgggacctcttttacat

SEQ ID NO: 48268 - DNA, 25 bp, Saccharomyces pastorianus
aaagtttccagttttctgacggcat

SEQ ID NO: 48269 - DNA, 25 bp, Saccharomyces pastorianus
gaaaagcatattaagccctggcgca

SEQ ID NO: 48270 - DNA, 25 bp, Saccharomyces pastorianus
cttttggtgcttgcgtgcgtgagaa

SEQ ID NO: 48271 - DNA, 25 bp, Saccharomyces pastorianus
ttaaacattgcaatcccggaagacg

SEQ ID NO: 48272 - DNA, 25 bp, Saccharomyces pastorianus
gacgacgaattagaccgtgactact

SEQ ID NO: 48273 - DNA, 25 bp, Saccharomyces pastorianus
gtactcgccgtttaagatcagacac

SEQ ID NO: 48274 - DNA, 25 bp, Saccharomyces pastorianus
tcactgcaaatgaccggttacgaag

SEQ ID NO: 48275 - DNA, 25 bp, Saccharomyces pastorianus
gattacccactaagattccattcgc

SEQ ID NO: 48276 - DNA, 25 bp, Saccharomyces pastorianus
aggtgttagccttgagtactcgccg

SEQ ID NO: 48277 - DNA, 25 bp, Saccharomyces pastorianus
gaagaggtccgtactttgagcgccg

SEQ ID NO: 48278 - DNA, 25 bp, Saccharomyces pastorianus
ttccattcgcacagaagaggtccgt

SEQ ID NO: 48279 - DNA, 25 bp, Saccharomyces pastorianus
caagactgttgctcttttggtgctt

SEQ ID NO: 48280 - DNA, 25 bp, Saccharomyces pastorianus
ttgagcgccgcttgaatttcaagac

SEQ ID NO: 48281 - DNA, 25 bp, Saccharomyces pastorianus
taccaggttgtttagcgaagcttcg

SEQ ID NO: 48282 - DNA, 25 bp, Saccharomyces pastorianus
ggacgtaccaatgtcacagccttta

SEQ ID NO: 48283 - DNA, 25 bp, Saccharomyces pastorianus
gtatcgcccactaaggtgccaaact

SEQ ID NO: 48284 - DNA, 25 bp, Saccharomyces pastorianus
taacatacgctcaatccgatctttc

SEQ ID NO: 48285 - DNA, 25 bp, Saccharomyces pastorianus
atataccgccgagttcaaggtcagg

SEQ ID NO: 48286 - DNA, 25 bp, Saccharomyces pastorianus
agtttcccagaaatcaaggccaata

SEQ ID NO: 48287 - DNA, 25 bp, Saccharomyces pastorianus
tcgcaattcgatgtcagtttcccag

SEQ ID NO: 48288 - DNA, 25 bp, Saccharomyces pastorianus
gatgacgaaaacgaaggcccggcga

SEQ ID NO: 48289 - DNA, 25 bp, Saccharomyces pastorianus
atatggagtttacgcctgtaggatt

SEQ ID NO: 48290 - DNA, 25 bp, Saccharomyces pastorianus
gatgataccattgactctaccaggt

SEQ ID NO: 48291 - DNA, 25 bp, Saccharomyces pastorianus
aagaccggtttgagcgtgcgttaga

SEQ ID NO: 48292 - DNA, 25 bp, Saccharomyces pastorianus
ggtaacgcatcagcgaatttgccta

SEQ ID NO: 48293 - DNA, 25 bp, Saccharomyces pastorianus
acagtgccccaaactcagaacgcat

SEQ ID NO: 48294 - DNA, 25 bp, Saccharomyces pastorianus
agaaacctgaacttactcctgacac

SEQ ID NO: 48295 - DNA, 25 bp, Saccharomyces pastorianus
agtggtcaagcatcaactcctaggc

SEQ ID NO: 48296 - DNA, 25 bp, Saccharomyces pastorianus
ttcatctagagctcaaagcccagtt

SEQ ID NO: 48297 - DNA, 25 bp, Saccharomyces pastorianus
ggtcttttaaacatcaattctgcca

SEQ ID NO: 48298 - DNA, 25 bp, Saccharomyces pastorianus
tactcctgacacagctttgaaagct

SEQ ID NO: 48299 - DNA, 25 bp, Saccharomyces pastorianus
gtctgcaagctcgtaattcatctag

SEQ ID NO: 48300 - DNA, 25 bp, Saccharomyces pastorianus
agagtccaaccaagtacagccacag

SEQ ID NO: 48301 - DNA, 25 bp, Saccharomyces pastorianus
aatctcaatctcaaacagtgcccca

SEQ ID NO: 48302 - DNA, 25 bp, Saccharomyces pastorianus
agcccagttccttcaaatggtaacg

SEQ ID NO: 48303 - DNA, 25 bp, Saccharomyces pastorianus
tcctatcgatacatgggcaaatggt

SEQ ID NO: 48304 - DNA, 25 bp, Saccharomyces pastorianus
taccaatgaattaaaggccgaatta

SEQ ID NO: 48305 - DNA, 25 bp, Saccharomyces pastorianus
atgagtacggatactgctgctgcac

SEQ ID NO: 48306 - DNA, 25 bp, Saccharomyces pastorianus
ttttcctatcgatacatgggcaaat

SEQ ID NO: 48307 - DNA, 25 bp, Saccharomyces pastorianus
agattttcctatcgatacatgggca

SEQ ID NO: 48308 - DNA, 25 bp, Saccharomyces pastorianus
gtacggatactgctgctgcacaagc

SEQ ID NO: 48309 - DNA, 25 bp, Saccharomyces pastorianus
cacaagcccagaataaaatagattc

SEQ ID NO: 48310 - DNA, 25 bp, Saccharomyces pastorianus
attttcctatcgatacatgggcaaa

SEQ ID NO: 48311 - DNA, 25 bp, Saccharomyces pastorianus
tttcctatcgatacatgggcaaatg

SEQ ID NO: 48312 - DNA, 25 bp, Saccharomyces pastorianus
gattttcctatcgatacatgggcaa

SEQ ID NO: 48313 - DNA, 25 bp, Saccharomyces pastorianus
cctatcgatacatgggcaaatggtg

SEQ ID NO: 48314 - DNA, 25 bp, Saccharomyces pastorianus
taccaatgaattaaaggccgaatta

SEQ ID NO: 48315 - DNA, 25 bp, Saccharomyces pastorianus
gaagttgacgacgattttaccaatg

SEQ ID NO: 48316 - DNA, 25 bp, Saccharomyces pastorianus
atgagtacggatactgctgctgcac

SEQ ID NO: 48317 - DNA, 25 bp, Saccharomyces pastorianus
tacatgggcaaatggtgaaacgata

SEQ ID NO: 48318 - DNA, 25 bp, Saccharomyces pastorianus
gtacggatactgctgctgcacaagc

SEQ ID NO: 48319 - DNA, 25 bp, Saccharomyces pastorianus
cacaagcccagaataaaatagattc

SEQ ID NO: 48320 - DNA, 25 bp, Saccharomyces pastorianus
attttcctatcgatacatgggcaaa

SEQ ID NO: 48321 - DNA, 25 bp, Saccharomyces pastorianus
tttcctatcgatacatgggcaaatg

SEQ ID NO: 48322 - DNA, 25 bp, Saccharomyces pastorianus
gattttcctatcgatacatgggcaa

SEQ ID NO: 48323 - DNA, 25 bp, Saccharomyces pastorianus
gtaatacagttacacaaacaaacat

SEQ ID NO: 48324 - DNA, 25 bp, Saccharomyces pastorianus
cctatcgatacatgggcaaatggtg

SEQ ID NO: 48325 - DNA, 25 bp, Saccharomyces pastorianus
agagttgctgcatcaccctaaatat

SEQ ID NO: 48326 - DNA, 25 bp, Saccharomyces pastorianus
acaggccatcctttagattttatgc

SEQ ID NO: 48327 - DNA, 25 bp, Saccharomyces pastorianus
gtactgcatcccaagccaattacaa

SEQ ID NO: 48328 - DNA, 25 bp, Saccharomyces pastorianus
ggcatctttcgtccaagagttgctg

SEQ ID NO: 48329 - DNA, 25 bp, Saccharomyces pastorianus
ggttttctctcaaatatgcgtccta

SEQ ID NO: 48330 - DNA, 25 bp, Saccharomyces pastorianus
agccaaatttgctggttttctctca

SEQ ID NO: 48331 - DNA, 25 bp, Saccharomyces pastorianus
tttcaccctatggtttaccacacag

SEQ ID NO: 48332 - DNA, 25 bp, Saccharomyces pastorianus
ttgtacaagggctctatctgattca

SEQ ID NO: 48333 - DNA, 25 bp, Saccharomyces pastorianus
attgttctaggtatctccgttctga

SEQ ID NO: 48334 - DNA, 25 bp, Saccharomyces pastorianus
tatctgtacttgctttttcacccta

SEQ ID NO: 48335 - DNA, 25 bp, Saccharomyces pastorianus
atgcgtcctatataccgttgatact

SEQ ID NO: 48336 - DNA, 25 bp, Saccharomyces pastorianus
gggttccattcgagtgtcacattta

SEQ ID NO: 48337 - DNA, 25 bp, Saccharomyces pastorianus
gaggctatctactgtatggtccacc

SEQ ID NO: 48338 - DNA, 25 bp, Saccharomyces pastorianus
ggatatcactgtaagcaccgcacaa

SEQ ID NO: 48339 - DNA, 25 bp, Saccharomyces pastorianus
taccaaccacccagagaagctagat

SEQ ID NO: 48340 - DNA, 25 bp, Saccharomyces pastorianus
gacgagcttcatccaagctttagct

SEQ ID NO: 48341 - DNA, 25 bp, Saccharomyces pastorianus
ggtattccgatagaggcattccata

SEQ ID NO: 48342 - DNA, 25 bp, Saccharomyces pastorianus
gattacgttcatgactaccaaccac

SEQ ID NO: 48343 - DNA, 25 bp, Saccharomyces pastorianus
agccataatgagaccgggccgtatt

SEQ ID NO: 48344 - DNA, 25 bp, Saccharomyces pastorianus
aggcattccataccgcagaggctat

SEQ ID NO: 48345 - DNA, 25 bp, Saccharomyces pastorianus
gtaatgcaacaccttaccaagtgga

SEQ ID NO: 48346 - DNA, 25 bp, Saccharomyces pastorianus
atggtccacccggatcaggtaagac

SEQ ID NO: 48347 - DNA, 25 bp, Saccharomyces pastorianus
agcacaaaattttcgttggtcccag

SEQ ID NO: 48348 - DNA, 25 bp, Saccharomyces pastorianus
aactttcacagctagttggcgatgc

SEQ ID NO: 48349 - DNA, 25 bp, Saccharomyces pastorianus
ggatacgccggttgatataccaaat

SEQ ID NO: 48350 - DNA, 25 bp, Saccharomyces pastorianus
aatgattctcggtacgggattggct

SEQ ID NO: 48351 - DNA, 25 bp, Saccharomyces pastorianus
ggccaagcatcctcaaagggtgtct

SEQ ID NO: 48352 - DNA, 25 bp, Saccharomyces pastorianus
taagcaggctgtctcagagctgagc

SEQ ID NO: 48353 - DNA, 25 bp, Saccharomyces pastorianus
atatttcgctgcaggtggtgggcta

SEQ ID NO: 48354 - DNA, 25 bp, Saccharomyces pastorianus
tgccgttacttcctcagcgagtaaa

SEQ ID NO: 48355 - DNA, 25 bp, Saccharomyces pastorianus
atatgcctggttccttacttggatg

SEQ ID NO: 48356 - DNA, 25 bp, Saccharomyces pastorianus
ataagggtgcctttatcttgatcaa

SEQ ID NO: 48357 - DNA, 25 bp, Saccharomyces pastorianus
ttggtcccaggtccaggtaatcatt

SEQ ID NO: 48358 - DNA, 25 bp, Saccharomyces pastorianus
aggctcccacagaaggtagtgtcac

SEQ ID NO: 48359 - DNA, 25 bp, Saccharomyces pastorianus
gagtgccactgaacactacgaaagc

SEQ ID NO: 48360 - DNA, 25 bp, Saccharomyces pastorianus
gaacgtcaagcttgcttcgggtttg

SEQ ID NO: 48361 - DNA, 25 bp, Saccharomyces pastorianus
gttcatgaacgttgctctatcgagt

SEQ ID NO: 48362 - DNA, 25 bp, Saccharomyces pastorianus
tcaggcaaggctcccacagaaggta

SEQ ID NO: 48363 - DNA, 25 bp, Saccharomyces pastorianus
atccattgatgggttcatgaacgtt

SEQ ID NO: 48364 - DNA, 25 bp, Saccharomyces pastorianus
tgcttcgggtttgctttatagtgga

SEQ ID NO: 48365 - DNA, 25 bp, Saccharomyces pastorianus
agcaatgaaaacaaactcctgaaca

SEQ ID NO: 48366 - DNA, 25 bp, Saccharomyces pastorianus
aatgatgtctttttgagaggtacac

SEQ ID NO: 48367 - DNA, 25 bp, Saccharomyces pastorianus
acagagtttctttccgatatcatcg

SEQ ID NO: 48368 - DNA, 25 bp, Saccharomyces pastorianus
ggtagtgtcaccacagagtttcttt

SEQ ID NO: 48369 - DNA, 25 bp, Saccharomyces pastorianus
gctgacagaatcaaggctatgcccc

SEQ ID NO: 48370 - DNA, 25 bp, Saccharomyces pastorianus
gcgacttggccagaagagcagttga

SEQ ID NO: 48371 - DNA, 25 bp, Saccharomyces pastorianus
aaggctgctatggtcaaaactcaaa

SEQ ID NO: 48372 - DNA, 25 bp, Saccharomyces pastorianus
aagactaaacctaattgttgatcca

SEQ ID NO: 48373 - DNA, 25 bp, Saccharomyces pastorianus
ctccaattgatggtggtagatctag

SEQ ID NO: 48374 - DNA, 25 bp, Saccharomyces pastorianus
gaggtccaaacagaaaggctgctat

SEQ ID NO: 48375 - DNA, 25 bp, Saccharomyces pastorianus
tgatccaaaccaacgtccatccagg

SEQ ID NO: 48376 - DNA, 25 bp, Saccharomyces pastorianus
ggctatgccccaaaagagtggaaat

SEQ ID NO: 48377 - DNA, 25 bp, Saccharomyces pastorianus
tacattcaaaaatggcgacttggcc

SEQ ID NO: 48378 - DNA, 25 bp, Saccharomyces pastorianus
ggaaatgctccaagacctgttaaga

SEQ ID NO: 48379 - DNA, 25 bp, Saccharomyces pastorianus
gtccatccaggagtttagctgacag

SEQ ID NO: 48380 - DNA, 25 bp, Saccharomyces pastorianus
gcaacggcccaaaaagagtcggcaa

SEQ ID NO: 48381 - DNA, 25 bp, Saccharomyces pastorianus
gagtcggcaagcaagtcaacaccca

SEQ ID NO: 48382 - DNA, 25 bp, Saccharomyces pastorianus
ttagacgaaattattggctccagta

SEQ ID NO: 48383 - DNA, 25 bp, Saccharomyces pastorianus
aattattggctccagtagaccagga

SEQ ID NO: 48384 - DNA, 25 bp, Saccharomyces pastorianus
gaccaggaggcaacagagcccgtgt

SEQ ID NO: 48385 - DNA, 25 bp, Saccharomyces pastorianus
gtccgctaacttagataagtcctta

SEQ ID NO: 48386 - DNA, 25 bp, Saccharomyces pastorianus
gttgccaagcttttagatacctcta

SEQ ID NO: 48387 - DNA, 25 bp, Saccharomyces pastorianus
gaacattccaaacagaaatggtcct

SEQ ID NO: 48388 - DNA, 25 bp, Saccharomyces pastorianus
gaaagaatgtgaggcctcctccaaa

SEQ ID NO: 48389 - DNA, 25 bp, Saccharomyces pastorianus
gaaatggtcctatcagaaagaatgt

SEQ ID NO: 48390 - DNA, 25 bp, Saccharomyces pastorianus
agtcaacacccagcgcaggaacatt

SEQ ID NO: 48391 - DNA, 25 bp, Saccharomyces pastorianus
gactctttagtcaactctatcaagg

SEQ ID NO: 48392 - DNA, 25 bp, Saccharomyces pastorianus
ttcttgtccagtgatgactacctaa

SEQ ID NO: 48393 - DNA, 25 bp, Saccharomyces pastorianus
ccgaatgaggtaactaggctgctaa

SEQ ID NO: 48394 - DNA, 25 bp, Saccharomyces pastorianus
atgaaactactactggaggaggcca

SEQ ID NO: 48395 - DNA, 25 bp, Saccharomyces pastorianus
gtgacccaagtaagctcgatagact

SEQ ID NO: 48396 - DNA, 25 bp, Saccharomyces pastorianus
gcgatataccgaaatattcccttgg

SEQ ID NO: 48397 - DNA, 25 bp, Saccharomyces pastorianus
taagaagcagagtcggcagtgagcc

SEQ ID NO: 48398 - DNA, 25 bp, Saccharomyces pastorianus
tgattttgagatgccaagctatcca

SEQ ID NO: 48399 - DNA, 25 bp, Saccharomyces pastorianus
aataggcgaaagcacactgtccgaa

SEQ ID NO: 48400 - DNA, 25 bp, Saccharomyces pastorianus
acactgtccgaaatcgtgacccaag

SEQ ID NO: 48401 - DNA, 25 bp, Saccharomyces pastorianus
cagtgagccgcaaagcacgtcgatt

SEQ ID NO: 48402 - DNA, 25 bp, Saccharomyces pastorianus
cttcgactaacttcatattcacctt

SEQ ID NO: 48403 - DNA, 25 bp, Saccharomyces pastorianus
atttgctattggcttcggtcgtaat

SEQ ID NO: 48404 - DNA, 25 bp, Saccharomyces pastorianus
gctaatctttgcatttttcacggtt

SEQ ID NO: 48405 - DNA, 25 bp, Saccharomyces pastorianus
ttttggtgcctcttgtatagcgtgc

SEQ ID NO: 48406 - DNA, 25 bp, Saccharomyces pastorianus
gaaaaaccctctattacctgcaatt

SEQ ID NO: 48407 - DNA, 25 bp, Saccharomyces pastorianus
tgcagtattggcttcgatcacgata

SEQ ID NO: 48408 - DNA, 25 bp, Saccharomyces pastorianus
tgatgtttttccaacaggccactgg

SEQ ID NO: 48409 - DNA, 25 bp, Saccharomyces pastorianus
aggccactggtttcaacgctttcat

SEQ ID NO: 48410 - DNA, 25 bp, Saccharomyces pastorianus
atggacttgtgtggagttccttccc

SEQ ID NO: 48411 - DNA, 25 bp, Saccharomyces pastorianus
tgaccaacgcgctagtttcgatgac

SEQ ID NO: 48412 - DNA, 25 bp, Saccharomyces pastorianus
gtacactatggactccttgggcaga

SEQ ID NO: 48413 - DNA, 25 bp, Saccharomyces pastorianus
ggaggccagctgatatcttacataa

SEQ ID NO: 48414 - DNA, 25 bp, Saccharomyces pastorianus
tagcccgcccaatgtcaagagagtt

SEQ ID NO: 48415 - DNA, 25 bp, Saccharomyces pastorianus
aagagagtttcttcggctactgata

SEQ ID NO: 48416 - DNA, 25 bp, Saccharomyces pastorianus
gattttctctatgctagggactctt

SEQ ID NO: 48417 - DNA, 25 bp, Saccharomyces pastorianus
gactgcatctacacatcatcttaat

SEQ ID NO: 48418 - DNA, 25 bp, Saccharomyces pastorianus
gatatttgttcgcattttccgccat

SEQ ID NO: 48419 - DNA, 25 bp, Saccharomyces pastorianus
atttcttcctcatcagcgtttttaa

SEQ ID NO: 48420 - DNA, 25 bp, Saccharomyces pastorianus
aagcccaatcacttgttcggtacat

SEQ ID NO: 48421 - DNA, 25 bp, Saccharomyces pastorianus
tttattcctgaatcacctcggtggt

SEQ ID NO: 48422 - DNA, 25 bp, Saccharomyces pastorianus
tcggtggtccatctctaagggtgat

SEQ ID NO: 48423 - DNA, 25 bp, Saccharomyces pastorianus
tgcgcaatgtgtccctttattctta

SEQ ID NO: 48424 - DNA, 25 bp, Saccharomyces pastorianus
tcttatggtgctgtacaatcgccac

SEQ ID NO: 48425 - DNA, 25 bp, Saccharomyces pastorianus
tacggtgccggatatggtacagcca

SEQ ID NO: 48426 - DNA, 25 bp, Saccharomyces pastorianus
cgctaaccattacccatttcaagat

SEQ ID NO: 48427 - DNA, 25 bp, Saccharomyces pastorianus
ggatacggatatggcgctgcagcac

SEQ ID NO: 48428 - DNA, 25 bp, Saccharomyces pastorianus
ttcccggccggtgcagttatagaga

SEQ ID NO: 48429 - DNA, 25 bp, Saccharomyces pastorianus
agtaagcggcgcttccagtggaacc

SEQ ID NO: 48430 - DNA, 25 bp, Saccharomyces pastorianus
tgcagcaccaggttatggagcccaa

SEQ ID NO: 48431 - DNA, 25 bp, Saccharomyces pastorianus
tgtaggagccactgaggactcgcca

SEQ ID NO: 48432 - DNA, 25 bp, Saccharomyces pastorianus
atggagcccaaccagtcgcacagta

SEQ ID NO: 48433 - DNA, 25 bp, Saccharomyces pastorianus
tatacgattaccaagcgcaagccac

SEQ ID NO: 48434 - DNA, 25 bp, Saccharomyces pastorianus
ttagaaaccgtcaccgcgctatacg

SEQ ID NO: 48435 - DNA, 25 bp, Saccharomyces pastorianus
gtcgtttccaagaactggaacaaga

SEQ ID NO: 48436 - DNA, 25 bp, Saccharomyces pastorianus
gaagaggtattcgtctgcagtgaac

SEQ ID NO: 48437 - DNA, 25 bp, Saccharomyces pastorianus
ctgaggatcctgtgtatgaagatgc

SEQ ID NO: 48438 - DNA, 25 bp, Saccharomyces pastorianus
attcgtctgcagtgaacgggatgct

SEQ ID NO: 48439 - DNA, 25 bp, Saccharomyces pastorianus
ggagtcgaagaggtattcgtctgca

SEQ ID NO: 48440 - DNA, 25 bp, Saccharomyces pastorianus
gatcctgtgtatgaagatgcagaac

SEQ ID NO: 48441 - DNA, 25 bp, Saccharomyces pastorianus
tgagcagactgaggatcctgtgtat

SEQ ID NO: 48442 - DNA, 25 bp, Saccharomyces pastorianus
tgcagtgaacgggatgctaacgcat

SEQ ID NO: 48443 - DNA, 25 bp, Saccharomyces pastorianus
tttaccaaagccgtcactagggctc

SEQ ID NO: 48444 - DNA, 25 bp, Saccharomyces pastorianus
aaagccgtcactagggctcctcagt

SEQ ID NO: 48445 - DNA, 25 bp, Saccharomyces pastorianus
agtgaacgggatgctaacgcatcaa

SEQ ID NO: 48446 - DNA, 25 bp, Saccharomyces pastorianus
tcagtccttccgtcaaaagttcaag

SEQ ID NO: 48447 - DNA, 25 bp, Saccharomyces pastorianus
gtcgtttccaagaactggaacaaga

SEQ ID NO: 48448 - DNA, 25 bp, Saccharomyces pastorianus
gaagaggtattcgtctgcagtgaac

SEQ ID NO: 48449 - DNA, 25 bp, Saccharomyces pastorianus
gcagtgaacgggatgctaacgcatc

SEQ ID NO: 48450 - DNA, 25 bp, Saccharomyces pastorianus
ctgaggatcctgtgtatgaagatgc

SEQ ID NO: 48451 - DNA, 25 bp, Saccharomyces pastorianus
attcgtctgcagtgaacgggatgct

SEQ ID NO: 48452 - DNA, 25 bp, Saccharomyces pastorianus
ggagtcgaagaggtattcgtctgca

SEQ ID NO: 48453 - DNA, 25 bp, Saccharomyces pastorianus
tgagcagactgaggatcctgtgtat

SEQ ID NO: 48454 - DNA, 25 bp, Saccharomyces pastorianus
atgaagatgcagaacgtcgtttcca

SEQ ID NO: 48455 - DNA, 25 bp, Saccharomyces pastorianus
tttaccaaagccgtcactagggctc

SEQ ID NO: 48456 - DNA, 25 bp, Saccharomyces pastorianus
aaagccgtcactagggctcctcagt

SEQ ID NO: 48457 - DNA, 25 bp, Saccharomyces pastorianus
gatgcatttcctcatgatacgtgta

SEQ ID NO: 48458 - DNA, 25 bp, Saccharomyces pastorianus
taaattgtcacctgatcagctgaag

SEQ ID NO: 48459 - DNA, 25 bp, Saccharomyces pastorianus
cattgcgtgttctaaaccttctgaa

SEQ ID NO: 48460 - DNA, 25 bp, Saccharomyces pastorianus
ggatcccactagtcaaatcaagcga

SEQ ID NO: 48461 - DNA, 25 bp, Saccharomyces pastorianus
gactattggccgattatgactttga

SEQ ID NO: 48462 - DNA, 25 bp, Saccharomyces pastorianus
gttaccagatatacggatcccacta

SEQ ID NO: 48463 - DNA, 25 bp, Saccharomyces pastorianus
gaatatgacttttaccgccaaggca

SEQ ID NO: 48464 - DNA, 25 bp, Saccharomyces pastorianus
aactgtaattgtcctgtgtgttcca

SEQ ID NO: 48465 - DNA, 25 bp, Saccharomyces pastorianus
ttgaatggtcgcactttgtctgaag

SEQ ID NO: 48466 - DNA, 25 bp, Saccharomyces pastorianus
gccaaggcaagcaatttgtctcaaa

SEQ ID NO: 48467 - DNA, 25 bp, Saccharomyces pastorianus
ggaggatatctcactactggatgca

SEQ ID NO: 48468 - DNA, 25 bp, Saccharomyces pastorianus
ttctatcattgaagagcccctcgag

SEQ ID NO: 48469 - DNA, 25 bp, Saccharomyces pastorianus
attctacctatactcgatttcctta

SEQ ID NO: 48470 - DNA, 25 bp, Saccharomyces pastorianus
gtatgcaagactgacacacccgaga

SEQ ID NO: 48471 - DNA, 25 bp, Saccharomyces pastorianus
tttgacaaggtaccacgaggaacag

SEQ ID NO: 48472 - DNA, 25 bp, Saccharomyces pastorianus
ggaagaacaactaaacgacgacctg

SEQ ID NO: 48473 - DNA, 25 bp, Saccharomyces pastorianus
gtgctctcaacgactattctacaga

SEQ ID NO: 48474 - DNA, 25 bp, Saccharomyces pastorianus
ctcctcttgtcgtcaacacattaga

SEQ ID NO: 48475 - DNA, 25 bp, Saccharomyces pastorianus
gagcccctcgagcaagtcttggtat

SEQ ID NO: 48476 - DNA, 25 bp, Saccharomyces pastorianus
ttaaaagtctcgatgctcctcttgt

SEQ ID NO: 48477 - DNA, 25 bp, Saccharomyces pastorianus
gttgcaattgctactagaaccttgg

SEQ ID NO: 48478 - DNA, 25 bp, Saccharomyces pastorianus
aaagtcattctttagcacactaagg

SEQ ID NO: 48479 - DNA, 25 bp, Saccharomyces pastorianus
cttagtgttcagcatcaaccggatg

SEQ ID NO: 48480 - DNA, 25 bp, Saccharomyces pastorianus
ttgaggccgccgtttgttaggcttt

SEQ ID NO: 48481 - DNA, 25 bp, Saccharomyces pastorianus
gatccagtctggcagaaatccttat

SEQ ID NO: 48482 - DNA, 25 bp, Saccharomyces pastorianus
atatcgaggccaactgtcctatcag

SEQ ID NO: 48483 - DNA, 25 bp, Saccharomyces pastorianus
atgttgagatgccatgggacgacaa

SEQ ID NO: 48484 - DNA, 25 bp, Saccharomyces pastorianus
gaatgaattgtactccaggttcaaa

SEQ ID NO: 48485 - DNA, 25 bp, Saccharomyces pastorianus
aagaagtatgcccttagtgttcagc

SEQ ID NO: 48486 - DNA, 25 bp, Saccharomyces pastorianus
agttcacattacctgatccagtctg

SEQ ID NO: 48487 - DNA, 25 bp, Saccharomyces pastorianus
gttaggcttttccattacagttcac

SEQ ID NO: 48488 - DNA, 25 bp, Saccharomyces pastorianus
gaatatagaacctcagtggcagcac

SEQ ID NO: 48489 - DNA, 25 bp, Saccharomyces pastorianus
ctgtcctatcaggtcaataaggcca

SEQ ID NO: 48490 - DNA, 25 bp, Saccharomyces pastorianus
tatttctctcgcgtccttggtgaac

SEQ ID NO: 48491 - DNA, 25 bp, Saccharomyces pastorianus
atgattatttctctcgcgtccttgg

SEQ ID NO: 48492 - DNA, 25 bp, Saccharomyces pastorianus
tctcgcgtccttggtgaacatcaag

SEQ ID NO: 48493 - DNA, 25 bp, Saccharomyces pastorianus
tttctctcgcgtccttggtgaacat

SEQ ID NO: 48494 - DNA, 25 bp, Saccharomyces pastorianus
tcgcgtccttggtgaacatcaagtc

SEQ ID NO: 48495 - DNA, 25 bp, Saccharomyces pastorianus
gtccttggtgaacatcaagtcttgg

SEQ ID NO: 48496 - DNA, 25 bp, Saccharomyces pastorianus
gcgtccttggtgaacatcaagtctt

SEQ ID NO: 48497 - DNA, 25 bp, Saccharomyces pastorianus
tgaacatcaagtcttggtccagtat

SEQ ID NO: 48498 - DNA, 25 bp, Saccharomyces pastorianus
ggtgaacatcaagtcttggtccagt

SEQ ID NO: 48499 - DNA, 25 bp, Saccharomyces pastorianus
gattatttctctcgcgtccttggtg

SEQ ID NO: 48500 - DNA, 25 bp, Saccharomyces pastorianus
tctctcgcgtccttggtgaacatca

SEQ ID NO: 48501 - DNA, 25 bp, Saccharomyces pastorianus
tactggaccaagacttgatgttcac

SEQ ID NO: 48502 - DNA, 25 bp, Saccharomyces pastorianus
gagcacgtgatcaaggccctggaag

SEQ ID NO: 48503 - DNA, 25 bp, Saccharomyces pastorianus
caagaagtcgggtctttcggaagag

SEQ ID NO: 48504 - DNA, 25 bp, Saccharomyces pastorianus
ggccctggaagaactggaatatgat

SEQ ID NO: 48505 - DNA, 25 bp, Saccharomyces pastorianus
gagactacatcagaatagcgtgtcg

SEQ ID NO: 48506 - DNA, 25 bp, Saccharomyces pastorianus
tgctgaacttcaagggctcccaaaa

SEQ ID NO: 48507 - DNA, 25 bp, Saccharomyces pastorianus
agactagggactcgaaattcaagaa

SEQ ID NO: 48508 - DNA, 25 bp, Saccharomyces pastorianus
tagacaatcgaggtcgagactacat

SEQ ID NO: 48509 - DNA, 25 bp, Saccharomyces pastorianus
tattatgattctgtcctcgatggct

SEQ ID NO: 48510 - DNA, 25 bp, Saccharomyces pastorianus
tagaggagattctgctgaacttcaa

SEQ ID NO: 48511 - DNA, 25 bp, Saccharomyces pastorianus
tgatgttcaccaaggacgcgagaga

SEQ ID NO: 48512 - DNA, 25 bp, Saccharomyces pastorianus
tgtccatgatccagtggccttggtg

SEQ ID NO: 48513 - DNA, 25 bp, Saccharomyces pastorianus
tttcgctcacacttacaaggacacg

SEQ ID NO: 48514 - DNA, 25 bp, Saccharomyces pastorianus
gtgggatccatcatctttaatcaga

SEQ ID NO: 48515 - DNA, 25 bp, Saccharomyces pastorianus
aagccatcgctacccatgaggtcaa

SEQ ID NO: 48516 - DNA, 25 bp, Saccharomyces pastorianus
tggattgatcccgacgcagctaatg

SEQ ID NO: 48517 - DNA, 25 bp, Saccharomyces pastorianus
aactctttcaatttttcgctcacac

SEQ ID NO: 48518 - DNA, 25 bp, Saccharomyces pastorianus
taatgccatattccatgaccccgaa

SEQ ID NO: 48519 - DNA, 25 bp, Saccharomyces pastorianus
aaatttaacccacaaagccatcgct

SEQ ID NO: 48520 - DNA, 25 bp, Saccharomyces pastorianus
tttgggaccagattttcacggcatt

SEQ ID NO: 48521 - DNA, 25 bp, Saccharomyces pastorianus
tgaattaggcccacctgtccatgat

SEQ ID NO: 48522 - DNA, 25 bp, Saccharomyces pastorianus
ccttggtgccactcttggaatttta

SEQ ID NO: 48523 - DNA, 25 bp, Saccharomyces pastorianus
ttttgtgccgcggttctggaagaga

SEQ ID NO: 48524 - DNA, 25 bp, Saccharomyces pastorianus
taagggactacctgtaccacatcta

SEQ ID NO: 48525 - DNA, 25 bp, Saccharomyces pastorianus
aggagccgttcatctggcccgagga

SEQ ID NO: 48526 - DNA, 25 bp, Saccharomyces pastorianus
gaagtcgttcaacaagctggaccta

SEQ ID NO: 48527 - DNA, 25 bp, Saccharomyces pastorianus
gagagcccattctgggacagcacaa

SEQ ID NO: 48528 - DNA, 25 bp, Saccharomyces pastorianus
aataatcctgctaagacccaacgcg

SEQ ID NO: 48529 - DNA, 25 bp, Saccharomyces pastorianus
gggtctgacaccaacaagccgggca

SEQ ID NO: 48530 - DNA, 25 bp, Saccharomyces pastorianus
taaggtctacttacccaaggccaga

SEQ ID NO: 48531 - DNA, 25 bp, Saccharomyces pastorianus
tcggcgggatcatagggccctacaa

SEQ ID NO: 48532 - DNA, 25 bp, Saccharomyces pastorianus
aatgaacatcacaacgcagctgctg

SEQ ID NO: 48533 - DNA, 25 bp, Saccharomyces pastorianus
aggaaagactcaactgcctcgggtc

SEQ ID NO: 48534 - DNA, 25 bp, Saccharomyces pastorianus
attatgccgccgcaacatttttata

SEQ ID NO: 48535 - DNA, 25 bp, Saccharomyces pastorianus
gccgccgcaacatttttatactggt

SEQ ID NO: 48536 - DNA, 25 bp, Saccharomyces pastorianus
gcaacatttttatactggttagcaa

SEQ ID NO: 48537 - DNA, 25 bp, Saccharomyces pastorianus
tatgccgccgcaacatttttatact

SEQ ID NO: 48538 - DNA, 25 bp, Saccharomyces pastorianus
gttttcgattatgccgccgcaacat

SEQ ID NO: 48539 - DNA, 25 bp, Saccharomyces pastorianus
ctggttagcaagagtccctaagaat

SEQ ID NO: 48540 - DNA, 25 bp, Saccharomyces pastorianus
gttacattgttttcgattatgccgc

SEQ ID NO: 48541 - DNA, 25 bp, Saccharomyces pastorianus
attgttttcgattatgccgccgcaa

SEQ ID NO: 48542 - DNA, 25 bp, Saccharomyces pastorianus
acattgttttcgattatgccgccgc

SEQ ID NO: 48543 - DNA, 25 bp, Saccharomyces pastorianus
gttagcaagagtccctaagaatagc

SEQ ID NO: 48544 - DNA, 25 bp, Saccharomyces pastorianus
gccgcaacatttttatactggttag

SEQ ID NO: 48545 - DNA, 25 bp, Saccharomyces pastorianus
catccggaagcacctgtggcgaata

SEQ ID NO: 48546 - DNA, 25 bp, Saccharomyces pastorianus
tgttccgtatctaccactaacgttt

SEQ ID NO: 48547 - DNA, 25 bp, Saccharomyces pastorianus
tggaacaggttatttgggcgacccg

SEQ ID NO: 48548 - DNA, 25 bp, Saccharomyces pastorianus
gctggatatatcaaaatggctggaa

SEQ ID NO: 48549 - DNA, 25 bp, Saccharomyces pastorianus
cctgtggcgaatatatggctggata

SEQ ID NO: 48550 - DNA, 25 bp, Saccharomyces pastorianus
taacgttttcttagcttccgtcagc

SEQ ID NO: 48551 - DNA, 25 bp, Saccharomyces pastorianus
cttccgtcagctctcattattatag

SEQ ID NO: 48552 - DNA, 25 bp, Saccharomyces pastorianus
gtatctaccactaacgttttcttag

SEQ ID NO: 48553 - DNA, 25 bp, Saccharomyces pastorianus
gatcaatgtagtttctgttccgtat

SEQ ID NO: 48554 - DNA, 25 bp, Saccharomyces pastorianus
gtagtttctgttccgtatctaccac

SEQ ID NO: 48555 - DNA, 25 bp, Saccharomyces pastorianus
ttatttgggcgacccgtctgcaaca

SEQ ID NO: 48556 - DNA, 25 bp, Saccharomyces pastorianus
gtatggcttacgttattttcttctt

SEQ ID NO: 48557 - DNA, 25 bp, Saccharomyces pastorianus
ttcgatgttattgttggcccttgcc

SEQ ID NO: 48558 - DNA, 25 bp, Saccharomyces pastorianus
ggtactcaacacgtttgttctgctg

SEQ ID NO: 48559 - DNA, 25 bp, Saccharomyces pastorianus
gatcaatattctgtccacgttcact

SEQ ID NO: 48560 - DNA, 25 bp, Saccharomyces pastorianus
acgttcactttgtctcatctgttta

SEQ ID NO: 48561 - DNA, 25 bp, Saccharomyces pastorianus
taagttcccctgtgctcagtatatc

SEQ ID NO: 48562 - DNA, 25 bp, Saccharomyces pastorianus
tgcgtcagttttgtccgaaatgccc

SEQ ID NO: 48563 - DNA, 25 bp, Saccharomyces pastorianus
gcctacttgtttgagtccctgatga

SEQ ID NO: 48564 - DNA, 25 bp, Saccharomyces pastorianus
gtatataaacccgttggcctacttg

SEQ ID NO: 48565 - DNA, 25 bp, Saccharomyces pastorianus
tctgctgttggtgcttatccaggta

SEQ ID NO: 48566 - DNA, 25 bp, Saccharomyces pastorianus
aatttcatgaccgtaagttcccctg

SEQ ID NO: 48567 - DNA, 25 bp, Saccharomyces pastorianus
gccagtacgagttcggcgtttgcat

SEQ ID NO: 48568 - DNA, 25 bp, Saccharomyces pastorianus
ctaaggcttcagtggtcaatttgga

SEQ ID NO: 48569 - DNA, 25 bp, Saccharomyces pastorianus
ggcgtttgcatttctaagtccaaca

SEQ ID NO: 48570 - DNA, 25 bp, Saccharomyces pastorianus
gaatactatattccgctataaactt

SEQ ID NO: 48571 - DNA, 25 bp, Saccharomyces pastorianus
gaaagacatcaaagctattaccaag

SEQ ID NO: 48572 - DNA, 25 bp, Saccharomyces pastorianus
attccgatcgaaaaaggccagtacg

SEQ ID NO: 48573 - DNA, 25 bp, Saccharomyces pastorianus
ggtcaatcactacaactaaggcttc

SEQ ID NO: 48574 - DNA, 25 bp, Saccharomyces pastorianus
gtcaatttggaaatcattccgatcg

SEQ ID NO: 48575 - DNA, 25 bp, Saccharomyces pastorianus
gctataaacttttgggacgtcgtga

SEQ ID NO: 48576 - DNA, 25 bp, Saccharomyces pastorianus
ggttcgttaaccaggtcaatcacta

SEQ ID NO: 48577 - DNA, 25 bp, Saccharomyces pastorianus
gggacgtcgtgatttttgatagaaa

SEQ ID NO: 48578 - DNA, 25 bp, Saccharomyces pastorianus
tctgtaacaggctcggtagatttta

SEQ ID NO: 48579 - DNA, 25 bp, Saccharomyces pastorianus
gatggtgtccacgatatacactggg

SEQ ID NO: 48580 - DNA, 25 bp, Saccharomyces pastorianus
ggtgccgtgaacacattatttcaag

SEQ ID NO: 48581 - DNA, 25 bp, Saccharomyces pastorianus
gttcaattcgaggatttcaccagta

SEQ ID NO: 48582 - DNA, 25 bp, Saccharomyces pastorianus
gaagccaaccatacctcaagaatta

SEQ ID NO: 48583 - DNA, 25 bp, Saccharomyces pastorianus
gagtatcacgtagaagccaaccata

SEQ ID NO: 48584 - DNA, 25 bp, Saccharomyces pastorianus
ggaattcctggatagacggtattaa

SEQ ID NO: 48585 - DNA, 25 bp, Saccharomyces pastorianus
gaaactatgccaataccgaggatat

SEQ ID NO: 48586 - DNA, 25 bp, Saccharomyces pastorianus
gagacagaaattttggtgccgtgaa

SEQ ID NO: 48587 - DNA, 25 bp, Saccharomyces pastorianus
aaacacacaataacactgacctcca

SEQ ID NO: 48588 - DNA, 25 bp, Saccharomyces pastorianus
cactgacctccaacctagagatttt

SEQ ID NO: 48589 - DNA, 25 bp, Saccharomyces pastorianus
tctgactacaggtcgttactcgata

SEQ ID NO: 48590 - DNA, 25 bp, Saccharomyces pastorianus
agccgccctgaacaagaaacacttt

SEQ ID NO: 48591 - DNA, 25 bp, Saccharomyces pastorianus
tatacgcatttattaagccgccctg

SEQ ID NO: 48592 - DNA, 25 bp, Saccharomyces pastorianus
acaatggctgaagtctatcgtatct

SEQ ID NO: 48593 - DNA, 25 bp, Saccharomyces pastorianus
tgacgcatctcaattcacttggttg

SEQ ID NO: 48594 - DNA, 25 bp, Saccharomyces pastorianus
aaaatcgcttggcactctgactaca

SEQ ID NO: 48595 - DNA, 25 bp, Saccharomyces pastorianus
gacctcgtgctataaaagttctgaa

SEQ ID NO: 48596 - DNA, 25 bp, Saccharomyces pastorianus
tttacctccatactggttaccagat

SEQ ID NO: 48597 - DNA, 25 bp, Saccharomyces pastorianus
agtatgtcgccaaatttacctccat

SEQ ID NO: 48598 - DNA, 25 bp, Saccharomyces pastorianus
ggtggcccttttggcgactacgaat

SEQ ID NO: 48599 - DNA, 25 bp, Saccharomyces pastorianus
attgcggttgttaatggtggccctt

SEQ ID NO: 48600 - DNA, 25 bp, Saccharomyces pastorianus
gcaagtgcaccgctacagaggtcta

SEQ ID NO: 48601 - DNA, 25 bp, Saccharomyces pastorianus
agatatgcctcttcttcctgatata

SEQ ID NO: 48602 - DNA, 25 bp, Saccharomyces pastorianus
aacatttcaactcgagccaactcta

SEQ ID NO: 48603 - DNA, 25 bp, Saccharomyces pastorianus
gaatctttagtctactcgtcacgtg

SEQ ID NO: 48604 - DNA, 25 bp, Saccharomyces pastorianus
tgagtacaacatatcctgtcacctc

SEQ ID NO: 48605 - DNA, 25 bp, Saccharomyces pastorianus
gcgcctcccttaatagccaataata

SEQ ID NO: 48606 - DNA, 25 bp, Saccharomyces pastorianus
aatagcatcatttcacgttccagtc

SEQ ID NO: 48607 - DNA, 25 bp, Saccharomyces pastorianus
taaggatgagctctctggaccccgg

SEQ ID NO: 48608 - DNA, 25 bp, Saccharomyces pastorianus
taccgtctttccaaacagcatgctg

SEQ ID NO: 48609 - DNA, 25 bp, Saccharomyces pastorianus
ccagtttgccagttcatcggtatgt

SEQ ID NO: 48610 - DNA, 25 bp, Saccharomyces pastorianus
gtcacctctaccactaatcgattaa

SEQ ID NO: 48611 - DNA, 25 bp, Saccharomyces pastorianus
gcaatgccccgtatgtcaaatcgac

SEQ ID NO: 48612 - DNA, 25 bp, Saccharomyces pastorianus
gtttgcaatgcccaatctcatacac

SEQ ID NO: 48613 - DNA, 25 bp, Saccharomyces pastorianus
tggtttctccattctcaactacaaa

SEQ ID NO: 48614 - DNA, 25 bp, Saccharomyces pastorianus
gagtaagccaggtacggccaagccc

SEQ ID NO: 48615 - DNA, 25 bp, Saccharomyces pastorianus
tagagctaatttacgcctttaccac

SEQ ID NO: 48616 - DNA, 25 bp, Saccharomyces pastorianus
cgcagatttgactcctcatcttaag

SEQ ID NO: 48617 - DNA, 25 bp, Saccharomyces pastorianus
ggtggaactaacctccgatggcaaa

SEQ ID NO: 48618 - DNA, 25 bp, Saccharomyces pastorianus
atggacggccattctagaagatgac

SEQ ID NO: 48619 - DNA, 25 bp, Saccharomyces pastorianus
tgatcactccagaacaacttttaga

SEQ ID NO: 48620 - DNA, 25 bp, Saccharomyces pastorianus
gaggaaatgggccttacgaccacat

SEQ ID NO: 48621 - DNA, 25 bp, Saccharomyces pastorianus
aagccctacacccagcaaaataata

SEQ ID NO: 48622 - DNA, 25 bp, Saccharomyces pastorianus
tctgccttttccaacttgacattgt

SEQ ID NO: 48623 - DNA, 25 bp, Saccharomyces pastorianus
aaaatgggcttcacgtcgttgcctt

SEQ ID NO: 48624 - DNA, 25 bp, Saccharomyces pastorianus
tatctcggcctccaagttcaaactt

SEQ ID NO: 48625 - DNA, 25 bp, Saccharomyces pastorianus
ttgggtgagcactttttctgccttt

SEQ ID NO: 48626 - DNA, 25 bp, Saccharomyces pastorianus
tcaaagttatcgttgggctccaagg

SEQ ID NO: 48627 - DNA, 25 bp, Saccharomyces pastorianus
acatcacccttttttgcatcttcta

SEQ ID NO: 48628 - DNA, 25 bp, Saccharomyces pastorianus
aaacccgtgccaggaatcgtcagac

SEQ ID NO: 48629 - DNA, 25 bp, Saccharomyces pastorianus
aaggattccacttctactgtagttg

SEQ ID NO: 48630 - DNA, 25 bp, Saccharomyces pastorianus
gtatatttcagtaacggcgcccttc

SEQ ID NO: 48631 - DNA, 25 bp, Saccharomyces pastorianus
atcgacttcttcttcatcggaatca

SEQ ID NO: 48632 - DNA, 25 bp, Saccharomyces pastorianus
ggaatcgtcagactctaccttggca

SEQ ID NO: 48633 - DNA, 25 bp, Saccharomyces pastorianus
tgggtccatcagtagccagagactt

SEQ ID NO: 48634 - DNA, 25 bp, Saccharomyces pastorianus
ggtaacatcaacttcgtagcagctg

SEQ ID NO: 48635 - DNA, 25 bp, Saccharomyces pastorianus
agaccttgaggcctctttgggagaa

SEQ ID NO: 48636 - DNA, 25 bp, Saccharomyces pastorianus
gaaggccgtatctactatgggtcca

SEQ ID NO: 48637 - DNA, 25 bp, Saccharomyces pastorianus
gtagcagctgcaaccacacatggac

SEQ ID NO: 48638 - DNA, 25 bp, Saccharomyces pastorianus
gaaaatgtgtatctcgaaggccgta

SEQ ID NO: 48639 - DNA, 25 bp, Saccharomyces pastorianus
aaattcgcgcggtacagttgaacaa

SEQ ID NO: 48640 - DNA, 25 bp, Saccharomyces pastorianus
aagtgttgcatcgaggtgctgtctc

SEQ ID NO: 48641 - DNA, 25 bp, Saccharomyces pastorianus
ttatggtgcagagcttctacctcca

SEQ ID NO: 48642 - DNA, 25 bp, Saccharomyces pastorianus
gctgtctcggatgctgtcagtatga

SEQ ID NO: 48643 - DNA, 25 bp, Saccharomyces pastorianus
aaaagctactggattctggcatggt

SEQ ID NO: 48644 - DNA, 25 bp, Saccharomyces pastorianus
gggcaatccaaattcagagtcaggt

SEQ ID NO: 48645 - DNA, 25 bp, Saccharomyces pastorianus
ggaccttccaagttttacgcataag

SEQ ID NO: 48646 - DNA, 25 bp, Saccharomyces pastorianus
ggtctaagtaggtcgaactcggcaa

SEQ ID NO: 48647 - DNA, 25 bp, Saccharomyces pastorianus
catccctgacttgccaatatactta

SEQ ID NO: 48648 - DNA, 25 bp, Saccharomyces pastorianus
aactcggcaaatctgcgggattcgt

SEQ ID NO: 48649 - DNA, 25 bp, Saccharomyces pastorianus
taatggttccgcaaagcctctacaa

SEQ ID NO: 48650 - DNA, 25 bp, Saccharomyces pastorianus
gaaatcatcagtgtggcttgtacca

SEQ ID NO: 48651 - DNA, 25 bp, Saccharomyces pastorianus
taaaccatattatccctcacgtgaa

SEQ ID NO: 48652 - DNA, 25 bp, Saccharomyces pastorianus
tgttgaaaggccaagcacgccgttc

SEQ ID NO: 48653 - DNA, 25 bp, Saccharomyces pastorianus
tgtttgccactttacaacaaggcgg

SEQ ID NO: 48654 - DNA, 25 bp, Saccharomyces pastorianus
ggtaagccatctgaggaccttccaa

SEQ ID NO: 48655 - DNA, 25 bp, Saccharomyces pastorianus
agtcaagttcaaattcaagctccag

SEQ ID NO: 48656 - DNA, 25 bp, Saccharomyces pastorianus
aaggacgtaagatcgctatcgaagt

SEQ ID NO: 48657 - DNA, 25 bp, Saccharomyces pastorianus
agtttaacgcggtcgactatattga

SEQ ID NO: 48658 - DNA, 25 bp, Saccharomyces pastorianus
acaattcgtcatacaacagcttaat

SEQ ID NO: 48659 - DNA, 25 bp, Saccharomyces pastorianus
actaaactatgaaacgtctacgcca

SEQ ID NO: 48660 - DNA, 25 bp, Saccharomyces pastorianus
aacgaaattcatataggcgcaagta

SEQ ID NO: 48661 - DNA, 25 bp, Saccharomyces pastorianus
gaaacttttcgcagctagcttcaaa

SEQ ID NO: 48662 - DNA, 25 bp, Saccharomyces pastorianus
ggctgctgacctgacatttgttaaa

SEQ ID NO: 48663 - DNA, 25 bp, Saccharomyces pastorianus
aagctccagtggacaccaaaacgaa

SEQ ID NO: 48664 - DNA, 25 bp, Saccharomyces pastorianus
gtctacgccaacaatgaatctcaat

SEQ ID NO: 48665 - DNA, 25 bp, Saccharomyces pastorianus
gaaactttcgagtctcactgagatt

SEQ ID NO: 48666 - DNA, 25 bp, Saccharomyces pastorianus
ctctcttgttctgttagttgtttga

SEQ ID NO: 48667 - DNA, 25 bp, Saccharomyces pastorianus
tcaacttagttaaatcctgtgtcag

SEQ ID NO: 48668 - DNA, 25 bp, Saccharomyces pastorianus
atggacagacaatccttcaacttag

SEQ ID NO: 48669 - DNA, 25 bp, Saccharomyces pastorianus
gttctgttagttgtttgatttcaag

SEQ ID NO: 48670 - DNA, 25 bp, Saccharomyces pastorianus
atcctgtgtcagttgtttaatctgt

SEQ ID NO: 48671 - DNA, 25 bp, Saccharomyces pastorianus
gatctctcttgttctgttagttgtt

SEQ ID NO: 48672 - DNA, 25 bp, Saccharomyces pastorianus
tagatctctcttgttctgttagttg

SEQ ID NO: 48673 - DNA, 25 bp, Saccharomyces pastorianus
agttaaatcctgtgtcagttgttta

SEQ ID NO: 48674 - DNA, 25 bp, Saccharomyces pastorianus
gttgtttaatctgtttagatctctc

SEQ ID NO: 48675 - DNA, 25 bp, Saccharomyces pastorianus
gacagacaatccttcaacttagtta

SEQ ID NO: 48676 - DNA, 25 bp, Saccharomyces pastorianus
gtttagatctctcttgttctgttag

SEQ ID NO: 48677 - DNA, 25 bp, Saccharomyces pastorianus
aattctctagacattctctgatcca

SEQ ID NO: 48678 - DNA, 25 bp, Saccharomyces pastorianus
cattataatgattggtcgatttgcg

SEQ ID NO: 48679 - DNA, 25 bp, Saccharomyces pastorianus
ttatttatggtgcaacgccgggcgc

SEQ ID NO: 48680 - DNA, 25 bp, Saccharomyces pastorianus
gccgggcgctaatgctcattataat

SEQ ID NO: 48681 - DNA, 25 bp, Saccharomyces pastorianus
aacgccgggcgctaatgctcattat

SEQ ID NO: 48682 - DNA, 25 bp, Saccharomyces pastorianus
atttatggtgcaacgccgggcgcta

SEQ ID NO: 48683 - DNA, 25 bp, Saccharomyces pastorianus
gacttggctagtttccaattctcta

SEQ ID NO: 48684 - DNA, 25 bp, Saccharomyces pastorianus
tcgatttgcgacttggctagtttcc

SEQ ID NO: 48685 - DNA, 25 bp, Saccharomyces pastorianus
aatgtgttatttatggtgcaacgcc

SEQ ID NO: 48686 - DNA, 25 bp, Saccharomyces pastorianus
ctctagacattctctgatccatgct

SEQ ID NO: 48687 - DNA, 25 bp, Saccharomyces pastorianus
ggctagtttccaattctctagacat

SEQ ID NO: 48688 - DNA, 25 bp, Saccharomyces pastorianus
cctcttatagcgcattggcaggtat

SEQ ID NO: 48689 - DNA, 25 bp, Saccharomyces pastorianus
aagctctatcgggtgttgcatacac

SEQ ID NO: 48690 - DNA, 25 bp, Saccharomyces pastorianus
atttcagcaagttgacgcgcctaca

SEQ ID NO: 48691 - DNA, 25 bp, Saccharomyces pastorianus
agcttctattcctacagagatcctc

SEQ ID NO: 48692 - DNA, 25 bp, Saccharomyces pastorianus
ggtacattatacttcccaagctcta

SEQ ID NO: 48693 - DNA, 25 bp, Saccharomyces pastorianus
tgcgtatcctcttatcaagtccgaa

SEQ ID NO: 48694 - DNA, 25 bp, Saccharomyces pastorianus
gagatcctcagcctttgaatagcct

SEQ ID NO: 48695 - DNA, 25 bp, Saccharomyces pastorianus
gacaaatgcttgctcagtggaccaa

SEQ ID NO: 48696 - DNA, 25 bp, Saccharomyces pastorianus
gagcaacttttggacgtttctctcc

SEQ ID NO: 48697 - DNA, 25 bp, Saccharomyces pastorianus
gacgtttctctcctagatgttcata

SEQ ID NO: 48698 - DNA, 25 bp, Saccharomyces pastorianus
taagcactgtaatcgggcccggaat

SEQ ID NO: 48699 - DNA, 25 bp, Saccharomyces pastorianus
ggctgattttggtcttcagttacta

SEQ ID NO: 48700 - DNA, 25 bp, Saccharomyces pastorianus
gaacattttcaaacgcggtatacta

SEQ ID NO: 48701 - DNA, 25 bp, Saccharomyces pastorianus
gtgctacctggctggactaatggaa

SEQ ID NO: 48702 - DNA, 25 bp, Saccharomyces pastorianus
aagcagattgcccatttgaccgtaa

SEQ ID NO: 48703 - DNA, 25 bp, Saccharomyces pastorianus
tcaaggttctgaagacttttccaaa

SEQ ID NO: 48704 - DNA, 25 bp, Saccharomyces pastorianus
ggacggtcactcttctgtgatgtac

SEQ ID NO: 48705 - DNA, 25 bp, Saccharomyces pastorianus
agttactatattccgtgctacctgg

SEQ ID NO: 48706 - DNA, 25 bp, Saccharomyces pastorianus
aagccatgctttacgttttctattc

SEQ ID NO: 48707 - DNA, 25 bp, Saccharomyces pastorianus
gaccgtaaacgcatcgatgccataa

SEQ ID NO: 48708 - DNA, 25 bp, Saccharomyces pastorianus
aataccgtagatcgaattttccaag

SEQ ID NO: 48709 - DNA, 25 bp, Saccharomyces pastorianus
gggtgaacgacactcaactgttaaa

SEQ ID NO: 48710 - DNA, 25 bp, Saccharomyces pastorianus
gaaggtctcctgtgctcttttgagt

SEQ ID NO: 48711 - DNA, 25 bp, Saccharomyces pastorianus
accgttagtgaaggtctcctgtgct

SEQ ID NO: 48712 - DNA, 25 bp, Saccharomyces pastorianus
gaagcctagtcacagtgttttccgc

SEQ ID NO: 48713 - DNA, 25 bp, Saccharomyces pastorianus
gcaccgcgttgaaacaagtcatgaa

SEQ ID NO: 48714 - DNA, 25 bp, Saccharomyces pastorianus
tctcctgtgctcttttgagttgttg

SEQ ID NO: 48715 - DNA, 25 bp, Saccharomyces pastorianus
gatccattggatagcaccgcgttga

SEQ ID NO: 48716 - DNA, 25 bp, Saccharomyces pastorianus
ttttgagttgttggatccattggat

SEQ ID NO: 48717 - DNA, 25 bp, Saccharomyces pastorianus
gatagaagcctagtcacagtgtttt

SEQ ID NO: 48718 - DNA, 25 bp, Saccharomyces pastorianus
gatagcaccgcgttgaaacaagtca

SEQ ID NO: 48719 - DNA, 25 bp, Saccharomyces pastorianus
tcacagtgttttccgccccaaacta

SEQ ID NO: 48720 - DNA, 25 bp, Saccharomyces pastorianus
tagtcacagtgttttccgccccaaa

SEQ ID NO: 48721 - DNA, 25 bp, Saccharomyces pastorianus
tactggatgccggttatgctgcaaa

SEQ ID NO: 48722 - DNA, 25 bp, Saccharomyces pastorianus
ttgcgactcttcaccaagtgtggat

SEQ ID NO: 48723 - DNA, 25 bp, Saccharomyces pastorianus
tcttcatcgtcgtctgcatcaagaa

SEQ ID NO: 48724 - DNA, 25 bp, Saccharomyces pastorianus
caagtgtggattcccgccaatggca

SEQ ID NO: 48725 - DNA, 25 bp, Saccharomyces pastorianus
tgcttatccaacactcgtacacaga

SEQ ID NO: 48726 - DNA, 25 bp, Saccharomyces pastorianus
tcaacctgcgcttttagaactgtcc

SEQ ID NO: 48727 - DNA, 25 bp, Saccharomyces pastorianus
ggcaaactacttatttctgggcgat

SEQ ID NO: 48728 - DNA, 25 bp, Saccharomyces pastorianus
ggacgtcttcttcatctggatctag

SEQ ID NO: 48729 - DNA, 25 bp, Saccharomyces pastorianus
aaaccgattcgtcccattgatatag

SEQ ID NO: 48730 - DNA, 25 bp, Saccharomyces pastorianus
aatatgccgatcttttgcgactctt

SEQ ID NO: 48731 - DNA, 25 bp, Saccharomyces pastorianus
gaaatatttcttgctcaacctgcgc

SEQ ID NO: 48732 - DNA, 25 bp, Saccharomyces pastorianus
ggatctatcgcactgggaaactttt

SEQ ID NO: 48733 - DNA, 25 bp, Saccharomyces pastorianus
ggtttaactttcactattccattgg

SEQ ID NO: 48734 - DNA, 25 bp, Saccharomyces pastorianus
tcttgggttacgtcggtatcttcac

SEQ ID NO: 48735 - DNA, 25 bp, Saccharomyces pastorianus
gctatgcttgctgattacctttgga

SEQ ID NO: 48736 - DNA, 25 bp, Saccharomyces pastorianus
agcactacttggatcgttcggttat

SEQ ID NO: 48737 - DNA, 25 bp, Saccharomyces pastorianus
gtgtctttgtttggtatcatcctga

SEQ ID NO: 48738 - DNA, 25 bp, Saccharomyces pastorianus
gttattctgacatctcctttggtag

SEQ ID NO: 48739 - DNA, 25 bp, Saccharomyces pastorianus
gtgcgtcttcctttttcataggcaa

SEQ ID NO: 48740 - DNA, 25 bp, Saccharomyces pastorianus
ttggagaaacgcatcctttacctct

SEQ ID NO: 48741 - DNA, 25 bp, Saccharomyces pastorianus
agagattctgttagtgcgtcttcct

SEQ ID NO: 48742 - DNA, 25 bp, Saccharomyces pastorianus
gaggtatcatccaagggccttcaac

SEQ ID NO: 48743 - DNA, 25 bp, Saccharomyces pastorianus
gaagatgcgagcgatttgactctat

SEQ ID NO: 48744 - DNA, 25 bp, Saccharomyces pastorianus
ggccgacgttgatgaaagtttgttt

SEQ ID NO: 48745 - DNA, 25 bp, Saccharomyces pastorianus
gtgagataattcctctatgcgatgt

SEQ ID NO: 48746 - DNA, 25 bp, Saccharomyces pastorianus
ctatgcgatgttattctcgtgaata

SEQ ID NO: 48747 - DNA, 25 bp, Saccharomyces pastorianus
gtttgtttagccctaatgccagagg

SEQ ID NO: 48748 - DNA, 25 bp, Saccharomyces pastorianus
tgcgtagtacaagccgctttagaat

SEQ ID NO: 48749 - DNA, 25 bp, Saccharomyces pastorianus
gatgcgaattaagctttggttgtga

SEQ ID NO: 48750 - DNA, 25 bp, Saccharomyces pastorianus
tgaacttctgcccaatttcttatct

SEQ ID NO: 48751 - DNA, 25 bp, Saccharomyces pastorianus
aaggtgatactttcatggatctagg

SEQ ID NO: 48752 - DNA, 25 bp, Saccharomyces pastorianus
gaagtttggcttatcagatcgattt

SEQ ID NO: 48753 - DNA, 25 bp, Saccharomyces pastorianus
tatatctaccgtgatggccgacgtt

SEQ ID NO: 48754 - DNA, 25 bp, Saccharomyces pastorianus
acaagtctactttcggaacatgata

SEQ ID NO: 48755 - DNA, 25 bp, Saccharomyces pastorianus
caaggacactggattggtgcctctt

SEQ ID NO: 48756 - DNA, 25 bp, Saccharomyces pastorianus
tggaatggtccctatttacagttaa

SEQ ID NO: 48757 - DNA, 25 bp, Saccharomyces pastorianus
ctggattggtgcctcttgttgaaaa

SEQ ID NO: 48758 - DNA, 25 bp, Saccharomyces pastorianus
gataggaaccgcaaatccaaggaca

SEQ ID NO: 48759 - DNA, 25 bp, Saccharomyces pastorianus
gaggtcacacaatagttattccgga

SEQ ID NO: 48760 - DNA, 25 bp, Saccharomyces pastorianus
gatattcgttcagcaacaaccgtta

SEQ ID NO: 48761 - DNA, 25 bp, Saccharomyces pastorianus
aattctccacagtcaacaagtctac

SEQ ID NO: 48762 - DNA, 25 bp, Saccharomyces pastorianus
tacgggctctccttacctagagggt

SEQ ID NO: 48763 - DNA, 25 bp, Saccharomyces pastorianus
gtatgatccgaaatacgggctctcc

SEQ ID NO: 48764 - DNA, 25 bp, Saccharomyces pastorianus
ccataccatctgtcactctaaagac

SEQ ID NO: 48765 - DNA, 25 bp, Saccharomyces pastorianus
gaggttgaccgcgaacttgtcccaa

SEQ ID NO: 48766 - DNA, 25 bp, Saccharomyces pastorianus
ttgactagtgctccgctcctaatgg

SEQ ID NO: 48767 - DNA, 25 bp, Saccharomyces pastorianus
tcttgaacttgactagtgctccgct

SEQ ID NO: 48768 - DNA, 25 bp, Saccharomyces pastorianus
cagcaactgcgtgctgtcggagtgt

SEQ ID NO: 48769 - DNA, 25 bp, Saccharomyces pastorianus
ggtatcaccgtcacatttcttgaac

SEQ ID NO: 48770 - DNA, 25 bp, Saccharomyces pastorianus
gctcctaatggcacagcggtgctgt

SEQ ID NO: 48771 - DNA, 25 bp, Saccharomyces pastorianus
atggtttccagcaactgcgtgctgt

SEQ ID NO: 48772 - DNA, 25 bp, Saccharomyces pastorianus
tgaccgcgaacttgtcccaaacggt

SEQ ID NO: 48773 - DNA, 25 bp, Saccharomyces pastorianus
gaacggatgttggaaaatcacaccg

SEQ ID NO: 48774 - DNA, 25 bp, Saccharomyces pastorianus
ggcagttcaagaggttgaccgcgaa

SEQ ID NO: 48775 - DNA, 25 bp, Saccharomyces pastorianus
acagcggtgctgtgaatgcgccaga

SEQ ID NO: 48776 - DNA, 25 bp, Saccharomyces pastorianus
ggtgtgattttccaacatccgttcc

SEQ ID NO: 48777 - DNA, 25 bp, Saccharomyces pastorianus
gggttaagatcgctaacaccgccac

SEQ ID NO: 48778 - DNA, 25 bp, Saccharomyces pastorianus
ggacgtatggtacggcctctctgat

SEQ ID NO: 48779 - DNA, 25 bp, Saccharomyces pastorianus
ggctatccggcagaaacatacacct

SEQ ID NO: 48780 - DNA, 25 bp, Saccharomyces pastorianus
ggaatactcccagacgacgaactaa

SEQ ID NO: 48781 - DNA, 25 bp, Saccharomyces pastorianus
gcagttgctggaaaccatcctggaa

SEQ ID NO: 48782 - DNA, 25 bp, Saccharomyces pastorianus
ctctctgatggcacggatggtcata

SEQ ID NO: 48783 - DNA, 25 bp, Saccharomyces pastorianus
tgatgaacacgcttatccacaccag

SEQ ID NO: 48784 - DNA, 25 bp, Saccharomyces pastorianus
gacaattccaagatctcgttcatag

SEQ ID NO: 48785 - DNA, 25 bp, Saccharomyces pastorianus
tggaagagttccgtaacctggccgc

SEQ ID NO: 48786 - DNA, 25 bp, Saccharomyces pastorianus
ttgggacaagttcgcggtcaacctc

SEQ ID NO: 48787 - DNA, 25 bp, Saccharomyces pastorianus
ttggaagatcccctcaaaacgatat

SEQ ID NO: 48788 - DNA, 25 bp, Saccharomyces pastorianus
ggcagacctatccagctctgaagaa

SEQ ID NO: 48789 - DNA, 25 bp, Saccharomyces pastorianus
ggcgtagaagtgtttttgcaccatt

SEQ ID NO: 48790 - DNA, 25 bp, Saccharomyces pastorianus
tattcgtccattccaagtttgcaag

SEQ ID NO: 48791 - DNA, 25 bp, Saccharomyces pastorianus
aacttcgacgtttctatggcagacc

SEQ ID NO: 48792 - DNA, 25 bp, Saccharomyces pastorianus
gtaataatatccatgagccgcaata

SEQ ID NO: 48793 - DNA, 25 bp, Saccharomyces pastorianus
gagatgactctacctacaagtccat

SEQ ID NO: 48794 - DNA, 25 bp, Saccharomyces pastorianus
cttcccgtagaaacacctcgtgata

SEQ ID NO: 48795 - DNA, 25 bp, Saccharomyces pastorianus
ggacatgccatttttcacgtctgag

SEQ ID NO: 48796 - DNA, 25 bp, Saccharomyces pastorianus
gaaactttctgacaacgttagcact

SEQ ID NO: 48797 - DNA, 25 bp, Saccharomyces pastorianus
tatacatggatcctggtgcaccact

SEQ ID NO: 48798 - DNA, 25 bp, Saccharomyces pastorianus
gaaggcaaccttacaatggacccta

SEQ ID NO: 48799 - DNA, 25 bp, Saccharomyces pastorianus
gcgttatcggtactgacagcgtcta

SEQ ID NO: 48800 - DNA, 25 bp, Saccharomyces pastorianus
aattgcctcccttacattacgagaa

SEQ ID NO: 48801 - DNA, 25 bp, Saccharomyces pastorianus
gtagcgagcttgttgatgatccaaa

SEQ ID NO: 48802 - DNA, 25 bp, Saccharomyces pastorianus
tatcatccagaagaattgcctccct

SEQ ID NO: 48803 - DNA, 25 bp, Saccharomyces pastorianus
aataccttattatccgcgttatcgg

SEQ ID NO: 48804 - DNA, 25 bp, Saccharomyces pastorianus
aaaagatgaaccagaccagcctcga

SEQ ID NO: 48805 - DNA, 25 bp, Saccharomyces pastorianus
aatctgtatggttacgttgccgtcg

SEQ ID NO: 48806 - DNA, 25 bp, Saccharomyces pastorianus
gcaccatttcggtaccaaagtttgt

SEQ ID NO: 48807 - DNA, 25 bp, Saccharomyces pastorianus
acgttgccgtcgaacacatggttga

SEQ ID NO: 48808 - DNA, 25 bp, Saccharomyces pastorianus
aatgaggctgtctcggattcggata

SEQ ID NO: 48809 - DNA, 25 bp, Saccharomyces pastorianus
caagagactttgtgatgaaatcgcc

SEQ ID NO: 48810 - DNA, 25 bp, Saccharomyces pastorianus
aaccaacaagagactttgtgatgaa

SEQ ID NO: 48811 - DNA, 25 bp, Saccharomyces pastorianus
agagactttgtgatgaaatcgccac

SEQ ID NO: 48812 - DNA, 25 bp, Saccharomyces pastorianus
aaaccaacaagagactttgtgatga

SEQ ID NO: 48813 - DNA, 25 bp, Saccharomyces pastorianus
ccaaaccaacaagagactttgtgat

SEQ ID NO: 48814 - DNA, 25 bp, Saccharomyces pastorianus
gatttccaaaccaacaagagacttt

SEQ ID NO: 48815 - DNA, 25 bp, Saccharomyces pastorianus
atttccaaaccaacaagagactttg

SEQ ID NO: 48816 - DNA, 25 bp, Saccharomyces pastorianus
aagagactttgtgatgaaatcgcca

SEQ ID NO: 48817 - DNA, 25 bp, Saccharomyces pastorianus
tttccaaaccaacaagagactttgt

SEQ ID NO: 48818 - DNA, 25 bp, Saccharomyces pastorianus
cccatttgatgaagagaatccaaaa

SEQ ID NO: 48819 - DNA, 25 bp, Saccharomyces pastorianus
ttccaaaccaacaagagactttgtg

SEQ ID NO: 48820 - DNA, 25 bp, Saccharomyces pastorianus
taatcaaagaagtcgtgttcaggga

SEQ ID NO: 48821 - DNA, 25 bp, Saccharomyces pastorianus
gaagtcgtgttcagggagttactaa

SEQ ID NO: 48822 - DNA, 25 bp, Saccharomyces pastorianus
ttactaaagactggcggcaacctaa

SEQ ID NO: 48823 - DNA, 25 bp, Saccharomyces pastorianus
actggcggcaacctaagcaaaagcg

SEQ ID NO: 48824 - DNA, 25 bp, Saccharomyces pastorianus
gggagttactaaagactggcggcaa

SEQ ID NO: 48825 - DNA, 25 bp, Saccharomyces pastorianus
gagttactaaagactggcggcaacc

SEQ ID NO: 48826 - DNA, 25 bp, Saccharomyces pastorianus
gttactaaagactggcggcaaccta

SEQ ID NO: 48827 - DNA, 25 bp, Saccharomyces pastorianus
aaagactggcggcaacctaagcaaa

SEQ ID NO: 48828 - DNA, 25 bp, Saccharomyces pastorianus
caaagaagtcgtgttcagggagtta

SEQ ID NO: 48829 - DNA, 25 bp, Saccharomyces pastorianus
agactggcggcaacctaagcaaaag

SEQ ID NO: 48830 - DNA, 25 bp, Saccharomyces pastorianus
tggcggcaacctaagcaaaagcgca

SEQ ID NO: 48831 - DNA, 25 bp, Saccharomyces pastorianus
acccgatgatcagcctttggatatt

SEQ ID NO: 48832 - DNA, 25 bp, Saccharomyces pastorianus
tgatagccatttgatggattacaga

SEQ ID NO: 48833 - DNA, 25 bp, Saccharomyces pastorianus
tttgaacccgatgatcagcctttgg

SEQ ID NO: 48834 - DNA, 25 bp, Saccharomyces pastorianus
aacccgatgatcagcctttggatat

SEQ ID NO: 48835 - DNA, 25 bp, Saccharomyces pastorianus
ccgatgatcagcctttggatattga

SEQ ID NO: 48836 - DNA, 25 bp, Saccharomyces pastorianus
tttgatagccatttgatggattaca

SEQ ID NO: 48837 - DNA, 25 bp, Saccharomyces pastorianus
ttttgaacccgatgatcagcctttg

SEQ ID NO: 48838 - DNA, 25 bp, Saccharomyces pastorianus
gaacccgatgatcagcctttggata

SEQ ID NO: 48839 - DNA, 25 bp, Saccharomyces pastorianus
tgaacccgatgatcagcctttggat

SEQ ID NO: 48840 - DNA, 25 bp, Saccharomyces pastorianus
gtttttgaacccgatgatcagcctt

SEQ ID NO: 48841 - DNA, 25 bp, Saccharomyces pastorianus
ttgaacccgatgatcagcctttgga

SEQ ID NO: 48842 - DNA, 25 bp, Saccharomyces pastorianus
gtgatattcagcatgcatctgacta

SEQ ID NO: 48843 - DNA, 25 bp, Saccharomyces pastorianus
tggctcttctacgatggcatcatta

SEQ ID NO: 48844 - DNA, 25 bp, Saccharomyces pastorianus
atttgctcgcgttatggctgcacag

SEQ ID NO: 48845 - DNA, 25 bp, Saccharomyces pastorianus
gaatcaaaccatttgctcgcgttat

SEQ ID NO: 48846 - DNA, 25 bp, Saccharomyces pastorianus
gcagcaactgtgtatacagctcaaa

SEQ ID NO: 48847 - DNA, 25 bp, Saccharomyces pastorianus
atctgactatgcattgttgtccaat

SEQ ID NO: 48848 - DNA, 25 bp, Saccharomyces pastorianus
gttacagatcaaattccgcgcatag

SEQ ID NO: 48849 - DNA, 25 bp, Saccharomyces pastorianus
gcacgtacgagaaatttggctcttc

SEQ ID NO: 48850 - DNA, 25 bp, Saccharomyces pastorianus
atgagggcagtagtcgttacagatc

SEQ ID NO: 48851 - DNA, 25 bp, Saccharomyces pastorianus
tttaacgacgttagaagcaggcctt

SEQ ID NO: 48852 - DNA, 25 bp, Saccharomyces pastorianus
gcaggccttaaatacgatcgagata

SEQ ID NO: 48853 - DNA, 25 bp, Saccharomyces pastorianus
tgtccaaatcatgcaaaacccaact

SEQ ID NO: 48854 - DNA, 25 bp, Saccharomyces pastorianus
tcaagatcgtctacgccttgactac

SEQ ID NO: 48855 - DNA, 25 bp, Saccharomyces pastorianus
gatcgtctacgccttgactaccatc

SEQ ID NO: 48856 - DNA, 25 bp, Saccharomyces pastorianus
ggtaacatcaagatcgtctacgcct

SEQ ID NO: 48857 - DNA, 25 bp, Saccharomyces pastorianus
atctaagttgagagacgatttggaa

SEQ ID NO: 48858 - DNA, 25 bp, Saccharomyces pastorianus
gtcgaatctaagttgagagacgatt

SEQ ID NO: 48859 - DNA, 25 bp, Saccharomyces pastorianus
gtctacgccttgactaccatcaagg

SEQ ID NO: 48860 - DNA, 25 bp, Saccharomyces pastorianus
taacatcaagatcgtctacgccttg

SEQ ID NO: 48861 - DNA, 25 bp, Saccharomyces pastorianus
taccatcaagggtgttggccgtcgt

SEQ ID NO: 48862 - DNA, 25 bp, Saccharomyces pastorianus
gaattgtccaaatcatgcaaaaccc

SEQ ID NO: 48863 - DNA, 25 bp, Saccharomyces pastorianus
gactaccatcaagggtgttggccgt

SEQ ID NO: 48864 - DNA, 25 bp, Saccharomyces pastorianus
tgtccaaatcatgcaaaacccaact

SEQ ID NO: 48865 - DNA, 25 bp, Saccharomyces pastorianus
tcaagatcgtctacgccttgactac

SEQ ID NO: 48866 - DNA, 25 bp, Saccharomyces pastorianus
gaacactaacgttgacggtaacatc

SEQ ID NO: 48867 - DNA, 25 bp, Saccharomyces pastorianus
gtcgaatctaagttgagagacgatt

SEQ ID NO: 48868 - DNA, 25 bp, Saccharomyces pastorianus
caacttggtctgtaagaaggccgat

SEQ ID NO: 48869 - DNA, 25 bp, Saccharomyces pastorianus
ttggcttttttatacagtttgttga

SEQ ID NO: 48870 - DNA, 25 bp, Saccharomyces pastorianus
gtctacgccttgactaccatcaagg

SEQ ID NO: 48871 - DNA, 25 bp, Saccharomyces pastorianus
taccatcaagggtgttggccgtcgt

SEQ ID NO: 48872 - DNA, 25 bp, Saccharomyces pastorianus
gtaacatcaagatcgtctacgcctt

SEQ ID NO: 48873 - DNA, 25 bp, Saccharomyces pastorianus
agaaggccgatgttgatttacaaaa

SEQ ID NO: 48874 - DNA, 25 bp, Saccharomyces pastorianus
ttggccgtcgttactccaacttggt

SEQ ID NO: 48875 - DNA, 25 bp, Saccharomyces pastorianus
ccaaaactggcgctcatgaaaaaat

SEQ ID NO: 48876 - DNA, 25 bp, Saccharomyces pastorianus
cgatcgacgatttgagaaagagact

SEQ ID NO: 48877 - DNA, 25 bp, Saccharomyces pastorianus
tagaggatcccgctagatttttgtt

SEQ ID NO: 48878 - DNA, 25 bp, Saccharomyces pastorianus
tcgctccaccatcgatcgacgattt

SEQ ID NO: 48879 - DNA, 25 bp, Saccharomyces pastorianus
aaaccgaagaatccatctccaagag

SEQ ID NO: 48880 - DNA, 25 bp, Saccharomyces pastorianus
cgccgctgaagctgaattagcatac

SEQ ID NO: 48881 - DNA, 25 bp, Saccharomyces pastorianus
tggcgctcatgaaaaaatcatcgtt

SEQ ID NO: 48882 - DNA, 25 bp, Saccharomyces pastorianus
agatttttgtttgtcgctccaccat

SEQ ID NO: 48883 - DNA, 25 bp, Saccharomyces pastorianus
gctagatttttgtttgtcgctccac

SEQ ID NO: 48884 - DNA, 25 bp, Saccharomyces pastorianus
actggagggcagaggtactgaaacc

SEQ ID NO: 48885 - DNA, 25 bp, Saccharomyces pastorianus
tgaattagcatacgccaaaactggc

SEQ ID NO: 48886 - DNA, 25 bp, Saccharomyces pastorianus
acaggtaaatctaccttattgaaga

SEQ ID NO: 48887 - DNA, 25 bp, Saccharomyces pastorianus
tccttcggatttagtgtttcgtcca

SEQ ID NO: 48888 - DNA, 25 bp, Saccharomyces pastorianus
tttagtgtttcgtccactaccagag

SEQ ID NO: 48889 - DNA, 25 bp, Saccharomyces pastorianus
cctattgttatttccggtccaagcg

SEQ ID NO: 48890 - DNA, 25 bp, Saccharomyces pastorianus
ctgagtacccaaaatccttcggatt

SEQ ID NO: 48891 - DNA, 25 bp, Saccharomyces pastorianus
agagctccaagagccggtgaggtca

SEQ ID NO: 48892 - DNA, 25 bp, Saccharomyces pastorianus
ttgctgagtacccaaaatccttcgg

SEQ ID NO: 48893 - DNA, 25 bp, Saccharomyces pastorianus
aagaaactatttgctgagtacccaa

SEQ ID NO: 48894 - DNA, 25 bp, Saccharomyces pastorianus
cggtccaagcggtacaggtaaatct

SEQ ID NO: 48895 - DNA, 25 bp, Saccharomyces pastorianus
gttatttccggtccaagcggtacag

SEQ ID NO: 48896 - DNA, 25 bp, Saccharomyces pastorianus
tcgtccactaccagagctccaagag

SEQ ID NO: 48897 - DNA, 25 bp, Saccharomyces pastorianus
gggcttatatcaacatcgggatcac

SEQ ID NO: 48898 - DNA, 25 bp, Saccharomyces pastorianus
acatcgggatcacctgttatgggat

SEQ ID NO: 48899 - DNA, 25 bp, Saccharomyces pastorianus
ggatcatcgacatccggtagatcag

SEQ ID NO: 48900 - DNA, 25 bp, Saccharomyces pastorianus
ggtcagcagcaccttgaatgctata

SEQ ID NO: 48901 - DNA, 25 bp, Saccharomyces pastorianus
aatcaacggccctcttagcggtggt

SEQ ID NO: 48902 - DNA, 25 bp, Saccharomyces pastorianus
catcgtcatcagaatcaacggccct

SEQ ID NO: 48903 - DNA, 25 bp, Saccharomyces pastorianus
acatttcttcagtaacagggcttat

SEQ ID NO: 48904 - DNA, 25 bp, Saccharomyces pastorianus
atcacctgttatgggatcatcgaca

SEQ ID NO: 48905 - DNA, 25 bp, Saccharomyces pastorianus
gaatgctatatttagcaacacctta

SEQ ID NO: 48906 - DNA, 25 bp, Saccharomyces pastorianus
ttagcggtggtcagcagcaccttga

SEQ ID NO: 48907 - DNA, 25 bp, Saccharomyces pastorianus
taacagggcttatatcaacatcggg

SEQ ID NO: 48908 - DNA, 25 bp, Saccharomyces pastorianus
tacggtggttctgtattgatcgccc

SEQ ID NO: 48909 - DNA, 25 bp, Saccharomyces pastorianus
ttttctaattcaagaccgtcatggg

SEQ ID NO: 48910 - DNA, 25 bp, Saccharomyces pastorianus
ctatactattgagcggtgtacccaa

SEQ ID NO: 48911 - DNA, 25 bp, Saccharomyces pastorianus
atgctacttatgtttttcgttcaac

SEQ ID NO: 48912 - DNA, 25 bp, Saccharomyces pastorianus
gttgccgttggactttgaaatggac

SEQ ID NO: 48913 - DNA, 25 bp, Saccharomyces pastorianus
ggcgcgtcaaactgcaatgccattt

SEQ ID NO: 48914 - DNA, 25 bp, Saccharomyces pastorianus
aatgccatttgggagcggatattca

SEQ ID NO: 48915 - DNA, 25 bp, Saccharomyces pastorianus
gtattgatcgccctgagtgtttttt

SEQ ID NO: 48916 - DNA, 25 bp, Saccharomyces pastorianus
gaaattgtttggttgccgttggact

SEQ ID NO: 48917 - DNA, 25 bp, Saccharomyces pastorianus
ggtcgtctgcaatcgaaggatgcta

SEQ ID NO: 48918 - DNA, 25 bp, Saccharomyces pastorianus
gttcaacttccaaaaggcgcgtcaa

SEQ ID NO: 48919 - DNA, 25 bp, Saccharomyces pastorianus
gcctctttccaaacctaagctagaa

SEQ ID NO: 48920 - DNA, 25 bp, Saccharomyces pastorianus
aaagatgattcaaacccaccacggg

SEQ ID NO: 48921 - DNA, 25 bp, Saccharomyces pastorianus
gctgatctgtcatctattagagcgg

SEQ ID NO: 48922 - DNA, 25 bp, Saccharomyces pastorianus
gagttggcaagtgcgaccaccgaga

SEQ ID NO: 48923 - DNA, 25 bp, Saccharomyces pastorianus
gagcgtttggaatcttcttctggaa

SEQ ID NO: 48924 - DNA, 25 bp, Saccharomyces pastorianus
gaacccctctaggtgaaaatccagt

SEQ ID NO: 48925 - DNA, 25 bp, Saccharomyces pastorianus
gtcactaaaccgttagagcctcttt

SEQ ID NO: 48926 - DNA, 25 bp, Saccharomyces pastorianus
ttagtaactttatcctccgaaatgg

SEQ ID NO: 48927 - DNA, 25 bp, Saccharomyces pastorianus
gcaagaatcaagctctgatgcgagt

SEQ ID NO: 48928 - DNA, 25 bp, Saccharomyces pastorianus
gagagctatgaccactccataaaat

SEQ ID NO: 48929 - DNA, 25 bp, Saccharomyces pastorianus
aatccagtagccgagaagtttgcaa

SEQ ID NO: 48930 - DNA, 25 bp, Saccharomyces pastorianus
tcgagactcaaagacgccgtaccat

SEQ ID NO: 48931 - DNA, 25 bp, Saccharomyces pastorianus
catgaacgtgcagaactcgagactc

SEQ ID NO: 48932 - DNA, 25 bp, Saccharomyces pastorianus
gagacatacacccaaggttcaactt

SEQ ID NO: 48933 - DNA, 25 bp, Saccharomyces pastorianus
gagggcgtcaagaatacggtcaagt

SEQ ID NO: 48934 - DNA, 25 bp, Saccharomyces pastorianus
gttcatcaaggacctcgagcacagg

SEQ ID NO: 48935 - DNA, 25 bp, Saccharomyces pastorianus
gaactgaacagggtgctcaagaaca

SEQ ID NO: 48936 - DNA, 25 bp, Saccharomyces pastorianus
agtgtacaacgacccgttcatcaag

SEQ ID NO: 48937 - DNA, 25 bp, Saccharomyces pastorianus
gctcaagaacaacccgtacttcaat

SEQ ID NO: 48938 - DNA, 25 bp, Saccharomyces pastorianus
aacaggctgagtacgtccacacagg

SEQ ID NO: 48939 - DNA, 25 bp, Saccharomyces pastorianus
gttaacgaaacgatcgagggcgtca

SEQ ID NO: 48940 - DNA, 25 bp, Saccharomyces pastorianus
gagtttgttgcgtccgggttcaaca

SEQ ID NO: 48941 - DNA, 25 bp, Saccharomyces pastorianus
acctgtcgccagatgtgaagtttct

SEQ ID NO: 48942 - DNA, 25 bp, Saccharomyces pastorianus
gatctgtgagtcatgcgtggaccga

SEQ ID NO: 48943 - DNA, 25 bp, Saccharomyces pastorianus
gagaaagaggtcgacatcaggaaaa

SEQ ID NO: 48944 - DNA, 25 bp, Saccharomyces pastorianus
ggacgattttaatggagaccttgct

SEQ ID NO: 48945 - DNA, 25 bp, Saccharomyces pastorianus
tagtgaatcctgagtgctaccacag

SEQ ID NO: 48946 - DNA, 25 bp, Saccharomyces pastorianus
gaagtttctagtgaatcctgagtgc

SEQ ID NO: 48947 - DNA, 25 bp, Saccharomyces pastorianus
aaattcaagactcagatattcgatg

SEQ ID NO: 48948 - DNA, 25 bp, Saccharomyces pastorianus
cgtggaccgaatatttagtctgggt

SEQ ID NO: 48949 - DNA, 25 bp, Saccharomyces pastorianus
gtatttaacaaaaccatggacgatt

SEQ ID NO: 48950 - DNA, 25 bp, Saccharomyces pastorianus
aatggagaccttgctgaatttaaaa

SEQ ID NO: 48951 - DNA, 25 bp, Saccharomyces pastorianus
aacagatcgatacctgtcgccagat

SEQ ID NO: 48952 - DNA, 25 bp, Saccharomyces pastorianus
aagagcaatgtctctgggcccgcag

SEQ ID NO: 48953 - DNA, 25 bp, Saccharomyces pastorianus
gaccatttcgaaacctagcttgctt

SEQ ID NO: 48954 - DNA, 25 bp, Saccharomyces pastorianus
tcagcagatgcgagtatcccgacta

SEQ ID NO: 48955 - DNA, 25 bp, Saccharomyces pastorianus
ttcttcgtgtccagcactttgagat

SEQ ID NO: 48956 - DNA, 25 bp, Saccharomyces pastorianus
gacggataagctgtgcaccaacttc

SEQ ID NO: 48957 - DNA, 25 bp, Saccharomyces pastorianus
agatccaggtccatgtgcacacgaa

SEQ ID NO: 48958 - DNA, 25 bp, Saccharomyces pastorianus
gtttgactacattacactcgtgatt

SEQ ID NO: 48959 - DNA, 25 bp, Saccharomyces pastorianus
gagtctgccacgaggtctaggtcca

SEQ ID NO: 48960 - DNA, 25 bp, Saccharomyces pastorianus
tctaggtccaggtcgagatccaggt

SEQ ID NO: 48961 - DNA, 25 bp, Saccharomyces pastorianus
gattcccacttttattgttccggcg

SEQ ID NO: 48962 - DNA, 25 bp, Saccharomyces pastorianus
tcgtgattcctaaagaccgttccgt

SEQ ID NO: 48963 - DNA, 25 bp, Saccharomyces pastorianus
tttcgacagaatgttccgcatcgct

SEQ ID NO: 48964 - DNA, 25 bp, Saccharomyces pastorianus
gagtcggccgtattgtgatgctgct

SEQ ID NO: 48965 - DNA, 25 bp, Saccharomyces pastorianus
acgctgaggtttcttcacacggaga

SEQ ID NO: 48966 - DNA, 25 bp, Saccharomyces pastorianus
gcacgcaagcatgtgggattcctta

SEQ ID NO: 48967 - DNA, 25 bp, Saccharomyces pastorianus
gcgcttacgacaaagtgcacacctt

SEQ ID NO: 48968 - DNA, 25 bp, Saccharomyces pastorianus
cccggaatgctctgttcgtttataa

SEQ ID NO: 48969 - DNA, 25 bp, Saccharomyces pastorianus
agacgcacaaactgggcctgcagga

SEQ ID NO: 48970 - DNA, 25 bp, Saccharomyces pastorianus
agaccggccagcacatcgagaagat

SEQ ID NO: 48971 - DNA, 25 bp, Saccharomyces pastorianus
gtgtacttcatcgacaacgactcgg

SEQ ID NO: 48972 - DNA, 25 bp, Saccharomyces pastorianus
gcacacctttatttgcagggactat

SEQ ID NO: 48973 - DNA, 25 bp, Saccharomyces pastorianus
tgttcggatctcgagcatcacacaa

SEQ ID NO: 48974 - DNA, 25 bp, Saccharomyces pastorianus
tgggactcgaattctcactgggtgc

SEQ ID NO: 48975 - DNA, 25 bp, Saccharomyces pastorianus
tctaatatctcagcgagtctcggcg

SEQ ID NO: 48976 - DNA, 25 bp, Saccharomyces pastorianus
ccagaaatatctgcctgcctataaa

SEQ ID NO: 48977 - DNA, 25 bp, Saccharomyces pastorianus
ggagatcgtcaaccccttaagagaa

SEQ ID NO: 48978 - DNA, 25 bp, Saccharomyces pastorianus
gggagcaccgattggtaattgtttt

SEQ ID NO: 48979 - DNA, 25 bp, Saccharomyces pastorianus
agtggcgcccggttggattttctga

SEQ ID NO: 48980 - DNA, 25 bp, Saccharomyces pastorianus
gtgcttgatttggaccctaaggagt

SEQ ID NO: 48981 - DNA, 25 bp, Saccharomyces pastorianus
gactatgctcttttctctgatctaa

SEQ ID NO: 48982 - DNA, 25 bp, Saccharomyces pastorianus
tgcctataaagagtggcgcccggtt

SEQ ID NO: 48983 - DNA, 25 bp, Saccharomyces pastorianus
gattttctgatgacgactatgctct

SEQ ID NO: 48984 - DNA, 25 bp, Saccharomyces pastorianus
gaactcagtgaagtctcaagatcat

SEQ ID NO: 48985 - DNA, 25 bp, Saccharomyces pastorianus
aagccccgttgcgaaacaggtactg

SEQ ID NO: 48986 - DNA, 25 bp, Saccharomyces pastorianus
gtgtccatctccaataatagcgaat

SEQ ID NO: 48987 - DNA, 25 bp, Saccharomyces pastorianus
tagctgctgcaatccaggagtgtcc

SEQ ID NO: 48988 - DNA, 25 bp, Saccharomyces pastorianus
gcatccatatgctgggctgtcatcg

SEQ ID NO: 48989 - DNA, 25 bp, Saccharomyces pastorianus
gaaggttactatccttcactctacc

SEQ ID NO: 48990 - DNA, 25 bp, Saccharomyces pastorianus
tgtcatcggtaccttactatccata

SEQ ID NO: 48991 - DNA, 25 bp, Saccharomyces pastorianus
gtactgggcgaagacgtggcactta

SEQ ID NO: 48992 - DNA, 25 bp, Saccharomyces pastorianus
gcaccagcaaatcaaccctagagtt

SEQ ID NO: 48993 - DNA, 25 bp, Saccharomyces pastorianus
gacgatatgcaccattgtaacgcta

SEQ ID NO: 48994 - DNA, 25 bp, Saccharomyces pastorianus
atagcgaatccgtacgtggtggctc

SEQ ID NO: 48995 - DNA, 25 bp, Saccharomyces pastorianus
gataataccatgacatcctccaaca

SEQ ID NO: 48996 - DNA, 25 bp, Saccharomyces pastorianus
ccagggctggacgaagatagattga

SEQ ID NO: 48997 - DNA, 25 bp, Saccharomyces pastorianus
gctggtatctccagggctggacgaa

SEQ ID NO: 48998 - DNA, 25 bp, Saccharomyces pastorianus
aatccctgcaaggtaaagcaactag

SEQ ID NO: 48999 - DNA, 25 bp, Saccharomyces pastorianus
tattcaggcgccaagtgagagctct

SEQ ID NO: 49000 - DNA, 25 bp, Saccharomyces pastorianus
gagcgagagaatgatcttgaagatc

SEQ ID NO: 49001 - DNA, 25 bp, Saccharomyces pastorianus
tctgagccaaatccctgcaaggtaa

SEQ ID NO: 49002 - DNA, 25 bp, Saccharomyces pastorianus
aaaggacaactattcaggcgccaag

SEQ ID NO: 49003 - DNA, 25 bp, Saccharomyces pastorianus
gcgccaagtgagagctctgagccaa

SEQ ID NO: 49004 - DNA, 25 bp, Saccharomyces pastorianus
ggcccgcagcgagagcaaaggacaa

SEQ ID NO: 49005 - DNA, 25 bp, Saccharomyces pastorianus
agagctctgagccaaatccctgcaa

SEQ ID NO: 49006 - DNA, 25 bp, Saccharomyces pastorianus
caactaggaatgatgctggtatctc

SEQ ID NO: 49007 - DNA, 25 bp, Saccharomyces pastorianus
aatacgccaccgaacttgaaggatt

SEQ ID NO: 49008 - DNA, 25 bp, Saccharomyces pastorianus
gccgaagctgctgatcatgcaagat

SEQ ID NO: 49009 - DNA, 25 bp, Saccharomyces pastorianus
agcgctagccaattttccatctttt

SEQ ID NO: 49010 - DNA, 25 bp, Saccharomyces pastorianus
gattaagatcaaaacgcagcctcca

SEQ ID NO: 49011 - DNA, 25 bp, Saccharomyces pastorianus
gtcctcctctaatgtgggcatatcg

SEQ ID NO: 49012 - DNA, 25 bp, Saccharomyces pastorianus
attcaggatcccatccctaaggaag

SEQ ID NO: 49013 - DNA, 25 bp, Saccharomyces pastorianus
gcatgatttatcagcgctagccaat

SEQ ID NO: 49014 - DNA, 25 bp, Saccharomyces pastorianus
cttatttggttctcagtggtctcat

SEQ ID NO: 49015 - DNA, 25 bp, Saccharomyces pastorianus
tggtctcatatgaacgccacatcca

SEQ ID NO: 49016 - DNA, 25 bp, Saccharomyces pastorianus
tcaccatctcagttatcagtaccgt

SEQ ID NO: 49017 - DNA, 25 bp, Saccharomyces pastorianus
aatttatgatttccccaatacgcca

SEQ ID NO: 49018 - DNA, 25 bp, Saccharomyces pastorianus
ggattcgcaatcttggtccatgacg

SEQ ID NO: 49019 - DNA, 25 bp, Saccharomyces pastorianus
aacgcaccaccaaatttcatcgatg

SEQ ID NO: 49020 - DNA, 25 bp, Saccharomyces pastorianus
ggctctgaagatcctgaacaaacgt

SEQ ID NO: 49021 - DNA, 25 bp, Saccharomyces pastorianus
ggatgctctggctcaagaagacttc

SEQ ID NO: 49022 - DNA, 25 bp, Saccharomyces pastorianus
gatcacgataaacgctctcaagcaa

SEQ ID NO: 49023 - DNA, 25 bp, Saccharomyces pastorianus
gaagacttcactttgcaaaccaccg

SEQ ID NO: 49024 - DNA, 25 bp, Saccharomyces pastorianus
gacgcaggcccagatgaccaatgat

SEQ ID NO: 49025 - DNA, 25 bp, Saccharomyces pastorianus
gttagatactcaaattgcccagctg

SEQ ID NO: 49026 - DNA, 25 bp, Saccharomyces pastorianus
cttcgttgcggaaacaggctctgaa

SEQ ID NO: 49027 - DNA, 25 bp, Saccharomyces pastorianus
ctaactacttgctaggcgctaacgc

SEQ ID NO: 49028 - DNA, 25 bp, Saccharomyces pastorianus
acaacggcgagctcgatgacatcag

SEQ ID NO: 49029 - DNA, 25 bp, Saccharomyces pastorianus
atacgggaaccaaaagagccatgac

SEQ ID NO: 49030 - DNA, 25 bp, Saccharomyces pastorianus
gctcttgcaagagtccaatcaatcc

SEQ ID NO: 49031 - DNA, 25 bp, Saccharomyces pastorianus
cgggaaccaaaagagccatgaccag

SEQ ID NO: 49032 - DNA, 25 bp, Saccharomyces pastorianus
caatcaatccatgaatcaggctcag

SEQ ID NO: 49033 - DNA, 25 bp, Saccharomyces pastorianus
tgaccagctcttgcaagagtccaat

SEQ ID NO: 49034 - DNA, 25 bp, Saccharomyces pastorianus
tgcaagagtccaatcaatccatgaa

SEQ ID NO: 49035 - DNA, 25 bp, Saccharomyces pastorianus
gtccaatcaatccatgaatcaggct

SEQ ID NO: 49036 - DNA, 25 bp, Saccharomyces pastorianus
acagaatattcggatacgggaacca

SEQ ID NO: 49037 - DNA, 25 bp, Saccharomyces pastorianus
cagaatattcggatacgggaaccaa

SEQ ID NO: 49038 - DNA, 25 bp, Saccharomyces pastorianus
gaccagctcttgcaagagtccaatc

SEQ ID NO: 49039 - DNA, 25 bp, Saccharomyces pastorianus
catgaatcaggctcagcaatcgtta

SEQ ID NO: 49040 - DNA, 25 bp, Saccharomyces pastorianus
tatgtgtgtgctcccatgaccaatg

SEQ ID NO: 49041 - DNA, 25 bp, Saccharomyces pastorianus
gtgatctgatttgcgctgctgaaaa

SEQ ID NO: 49042 - DNA, 25 bp, Saccharomyces pastorianus
gggaccgcgtacacgataaccgtag

SEQ ID NO: 49043 - DNA, 25 bp, Saccharomyces pastorianus
gaccagggcaccatgatgagactaa

SEQ ID NO: 49044 - DNA, 25 bp, Saccharomyces pastorianus
ggtatctctgctcacgacagatcga

SEQ ID NO: 49045 - DNA, 25 bp, Saccharomyces pastorianus
gataaccgtagatgtcgcccaggac

SEQ ID NO: 49046 - DNA, 25 bp, Saccharomyces pastorianus
aggacaccactacaggtatctctgc

SEQ ID NO: 49047 - DNA, 25 bp, Saccharomyces pastorianus
aagtcattcttgaagccgggccaca

SEQ ID NO: 49048 - DNA, 25 bp, Saccharomyces pastorianus
ttgtacgtcactcttcgggctatgt

SEQ ID NO: 49049 - DNA, 25 bp, Saccharomyces pastorianus
gagcaaatggccttccttgtacgtc

SEQ ID NO: 49050 - DNA, 25 bp, Saccharomyces pastorianus
gaagttcgagtccaacgacgacgac

SEQ ID NO: 49051 - DNA, 25 bp, Saccharomyces pastorianus
atgatgagactaaacgattgtcaag

SEQ ID NO: 49052 - DNA, 25 bp, Saccharomyces pastorianus
atgagactaaacgattgtcaagaat

SEQ ID NO: 49053 - DNA, 25 bp, Saccharomyces pastorianus
tcggcaagaaacacggcattccttt

SEQ ID NO: 49054 - DNA, 25 bp, Saccharomyces pastorianus
gattgtcaagaattcggcaagaaac

SEQ ID NO: 49055 - DNA, 25 bp, Saccharomyces pastorianus
tgatgagactaaacgattgtcaaga

SEQ ID NO: 49056 - DNA, 25 bp, Saccharomyces pastorianus
attcggcaagaaacacggcattcct

SEQ ID NO: 49057 - DNA, 25 bp, Saccharomyces pastorianus
attgtcaagaattcggcaagaaaca

SEQ ID NO: 49058 - DNA, 25 bp, Saccharomyces pastorianus
gaaacacggcattcctttgatttct

SEQ ID NO: 49059 - DNA, 25 bp, Saccharomyces pastorianus
gatgagactaaacgattgtcaagaa

SEQ ID NO: 49060 - DNA, 25 bp, Saccharomyces pastorianus
ttcggcaagaaacacggcattcctt

SEQ ID NO: 49061 - DNA, 25 bp, Saccharomyces pastorianus
gctgtcatgttcaacggactggacc

SEQ ID NO: 49062 - DNA, 25 bp, Saccharomyces pastorianus
gtagtgcgtatttgcagcggctgaa

SEQ ID NO: 49063 - DNA, 25 bp, Saccharomyces pastorianus
tgtgcctggcgctggacaacaacgg

SEQ ID NO: 49064 - DNA, 25 bp, Saccharomyces pastorianus
ccaggacgatgctcggcggctaatg

SEQ ID NO: 49065 - DNA, 25 bp, Saccharomyces pastorianus
gatggcggcatctacaaggtcgtgt

SEQ ID NO: 49066 - DNA, 25 bp, Saccharomyces pastorianus
cggctaatgctgttgctgtcatgtt

SEQ ID NO: 49067 - DNA, 25 bp, Saccharomyces pastorianus
cgtacttcgtgtgcgctggcttggc

SEQ ID NO: 49068 - DNA, 25 bp, Saccharomyces pastorianus
ggagctgagctgtctggacctgtcc

SEQ ID NO: 49069 - DNA, 25 bp, Saccharomyces pastorianus
actctgcaagggtcactgggatggc

SEQ ID NO: 49070 - DNA, 25 bp, Saccharomyces pastorianus
gctgaagcggctggcaaagttcgac

SEQ ID NO: 49071 - DNA, 25 bp, Saccharomyces pastorianus
gctcgctacgattcacggtgtggtg

SEQ ID NO: 49072 - DNA, 25 bp, Saccharomyces pastorianus
aacatgccagcgtgctgagcagcga

SEQ ID NO: 49073 - DNA, 25 bp, Saccharomyces pastorianus
aattgaaggaattgcgtgaaaggcg

SEQ ID NO: 49074 - DNA, 25 bp, Saccharomyces pastorianus
aacgccaacgccaaccatggtgagc

SEQ ID NO: 49075 - DNA, 25 bp, Saccharomyces pastorianus
atgccagcgtgctgagcagcgagac

SEQ ID NO: 49076 - DNA, 25 bp, Saccharomyces pastorianus
aaaggcggaaacatgccagcgtgct

SEQ ID NO: 49077 - DNA, 25 bp, Saccharomyces pastorianus
agcgactgaaggaactagaggagaa

SEQ ID NO: 49078 - DNA, 25 bp, Saccharomyces pastorianus
gaattgcgtgaaaggcggaaacatg

SEQ ID NO: 49079 - DNA, 25 bp, Saccharomyces pastorianus
aggcggaaacatgccagcgtgctga

SEQ ID NO: 49080 - DNA, 25 bp, Saccharomyces pastorianus
gccaacgccaaccatggtgagcgtt

SEQ ID NO: 49081 - DNA, 25 bp, Saccharomyces pastorianus
agcagcgagacggtgttggcggcga

SEQ ID NO: 49082 - DNA, 25 bp, Saccharomyces pastorianus
cgagacggtgttggcggcgagcggc

SEQ ID NO: 49083 - DNA, 25 bp, Saccharomyces pastorianus
actggtagaagatcatgtcgatgct

SEQ ID NO: 49084 - DNA, 25 bp, Saccharomyces pastorianus
catgtcgatgctacgtggtgcttct

SEQ ID NO: 49085 - DNA, 25 bp, Saccharomyces pastorianus
tcgatgctacgtggtgcttcttccg

SEQ ID NO: 49086 - DNA, 25 bp, Saccharomyces pastorianus
gagctggttgactggtagaagatca

SEQ ID NO: 49087 - DNA, 25 bp, Saccharomyces pastorianus
gaagatcatgtcgatgctacgtggt

SEQ ID NO: 49088 - DNA, 25 bp, Saccharomyces pastorianus
tcggtggcgtcaaggtgagctggtt

SEQ ID NO: 49089 - DNA, 25 bp, Saccharomyces pastorianus
tagatcgtatcggtggcgtcaaggt

SEQ ID NO: 49090 - DNA, 25 bp, Saccharomyces pastorianus
tagaagatcatgtcgatgctacgtg

SEQ ID NO: 49091 - DNA, 25 bp, Saccharomyces pastorianus
atcatgtcgatgctacgtggtgctt

SEQ ID NO: 49092 - DNA, 25 bp, Saccharomyces pastorianus
gatcatgtcgatgctacgtggtgct

SEQ ID NO: 49093 - DNA, 25 bp, Saccharomyces pastorianus
tccgtagatcgtatcggtggcgtca

SEQ ID NO: 49094 - DNA, 25 bp, Saccharomyces pastorianus
actggtagaagatcatgtcgatgct

SEQ ID NO: 49095 - DNA, 25 bp, Saccharomyces pastorianus
attactccaagggtcgatcgttctg

SEQ ID NO: 49096 - DNA, 25 bp, Saccharomyces pastorianus
catgtcgatgctacgtggtgcttct

SEQ ID NO: 49097 - DNA, 25 bp, Saccharomyces pastorianus
tcgatgctacgtggtgcttcttccg

SEQ ID NO: 49098 - DNA, 25 bp, Saccharomyces pastorianus
gagctggttgactggtagaagatca

SEQ ID NO: 49099 - DNA, 25 bp, Saccharomyces pastorianus
ggtacagctactaaatctgatgatg

SEQ ID NO: 49100 - DNA, 25 bp, Saccharomyces pastorianus
tcggtggcgtcaaggtgagctggtt

SEQ ID NO: 49101 - DNA, 25 bp, Saccharomyces pastorianus
tagatcgtatcggtggcgtcaaggt

SEQ ID NO: 49102 - DNA, 25 bp, Saccharomyces pastorianus
tgtggacacctatggtacagctact

SEQ ID NO: 49103 - DNA, 25 bp, Saccharomyces pastorianus
gatcatgtcgatgctacgtggtgct

SEQ ID NO: 49104 - DNA, 25 bp, Saccharomyces pastorianus
tccgtagatcgtatcggtggcgtca

SEQ ID NO: 49105 - DNA, 25 bp, Saccharomyces pastorianus
tatggctatggctgacgctagaaga

SEQ ID NO: 49106 - DNA, 25 bp, Saccharomyces pastorianus
ggtcattcctaaagacatgttagac

SEQ ID NO: 49107 - DNA, 25 bp, Saccharomyces pastorianus
agaagagacggttccattccatggt

SEQ ID NO: 49108 - DNA, 25 bp, Saccharomyces pastorianus
ttgaatatggctatggctgacgcta

SEQ ID NO: 49109 - DNA, 25 bp, Saccharomyces pastorianus
cggttccattccatggttgagacca

SEQ ID NO: 49110 - DNA, 25 bp, Saccharomyces pastorianus
gctactgatgaaactccagaaggtt

SEQ ID NO: 49111 - DNA, 25 bp, Saccharomyces pastorianus
aagacccaggtcacagttgaatacg

SEQ ID NO: 49112 - DNA, 25 bp, Saccharomyces pastorianus
gaactcaactacaaacagacatcgt

SEQ ID NO: 49113 - DNA, 25 bp, Saccharomyces pastorianus
gacatcgtcgaaaaggtcattccta

SEQ ID NO: 49114 - DNA, 25 bp, Saccharomyces pastorianus
tggtagaaagatcattgtcgatgcc

SEQ ID NO: 49115 - DNA, 25 bp, Saccharomyces pastorianus
attctattggcccacaaattgaata

SEQ ID NO: 49116 - DNA, 25 bp, Saccharomyces pastorianus
atctgaggcccgattttgttgatag

SEQ ID NO: 49117 - DNA, 25 bp, Saccharomyces pastorianus
gaagttacatttggtgcccactact

SEQ ID NO: 49118 - DNA, 25 bp, Saccharomyces pastorianus
cagactcttctgtttttgggttgga

SEQ ID NO: 49119 - DNA, 25 bp, Saccharomyces pastorianus
tagatgtatgcctgaccttcaaaaa

SEQ ID NO: 49120 - DNA, 25 bp, Saccharomyces pastorianus
gagttgttgaccacagacatcactg

SEQ ID NO: 49121 - DNA, 25 bp, Saccharomyces pastorianus
actggtacgatgttgtgtctggcgc

SEQ ID NO: 49122 - DNA, 25 bp, Saccharomyces pastorianus
agtatctaccatgggctttacgtat

SEQ ID NO: 49123 - DNA, 25 bp, Saccharomyces pastorianus
gcacgccgagtggacattcaagttt

SEQ ID NO: 49124 - DNA, 25 bp, Saccharomyces pastorianus
actggcgctagtagttatggtctca

SEQ ID NO: 49125 - DNA, 25 bp, Saccharomyces pastorianus
tgtctggcgctgtactagcatttat

SEQ ID NO: 49126 - DNA, 25 bp, Saccharomyces pastorianus
aatgctgccgtaacgggtgccttaa

SEQ ID NO: 49127 - DNA, 25 bp, Saccharomyces pastorianus
gtgactaacgaactagtgggcccat

SEQ ID NO: 49128 - DNA, 25 bp, Saccharomyces pastorianus
gaggccaaaatatccaattcagtct

SEQ ID NO: 49129 - DNA, 25 bp, Saccharomyces pastorianus
ttgatgaccccactatctcaaagcg

SEQ ID NO: 49130 - DNA, 25 bp, Saccharomyces pastorianus
taacgggcctctgtacgatattatt

SEQ ID NO: 49131 - DNA, 25 bp, Saccharomyces pastorianus
atctcaaagcgctatgtgactaacg

SEQ ID NO: 49132 - DNA, 25 bp, Saccharomyces pastorianus
ggagctgtatgttcgacaaggatca

SEQ ID NO: 49133 - DNA, 25 bp, Saccharomyces pastorianus
agaataagtacgtggctcagggaga

SEQ ID NO: 49134 - DNA, 25 bp, Saccharomyces pastorianus
ggcccattgggctgcttgattttga

SEQ ID NO: 49135 - DNA, 25 bp, Saccharomyces pastorianus
agatatctttggttcctagaggcca

SEQ ID NO: 49136 - DNA, 25 bp, Saccharomyces pastorianus
gagtgtcgggcttagtaatttagtt

SEQ ID NO: 49137 - DNA, 25 bp, Saccharomyces pastorianus
ctgcttgattttgagtgtcgggctt

SEQ ID NO: 49138 - DNA, 25 bp, Saccharomyces pastorianus
gttgttcaacacatgccagatcacc

SEQ ID NO: 49139 - DNA, 25 bp, Saccharomyces pastorianus
atcatttccaagtaatttctctcgg

SEQ ID NO: 49140 - DNA, 25 bp, Saccharomyces pastorianus
ttccattgtcattcccaaccaagga

SEQ ID NO: 49141 - DNA, 25 bp, Saccharomyces pastorianus
aggtaattgccgtttatatcctaat

SEQ ID NO: 49142 - DNA, 25 bp, Saccharomyces pastorianus
acgggtgatggtgccaaactcgcaa

SEQ ID NO: 49143 - DNA, 25 bp, Saccharomyces pastorianus
ggaccagtaccagaacgacttgcgt

SEQ ID NO: 49144 - DNA, 25 bp, Saccharomyces pastorianus
aagggtctcggcattgtctttgaag

SEQ ID NO: 49145 - DNA, 25 bp, Saccharomyces pastorianus
atcgccggaaactcttacgcggtgt

SEQ ID NO: 49146 - DNA, 25 bp, Saccharomyces pastorianus
aacgacttgcgtcattgggcccaaa

SEQ ID NO: 49147 - DNA, 25 bp, Saccharomyces pastorianus
agagatagcatcaacatcgccggaa

SEQ ID NO: 49148 - DNA, 25 bp, Saccharomyces pastorianus
gggccgcttcacaaacaagtgcaag

SEQ ID NO: 49149 - DNA, 25 bp, Saccharomyces pastorianus
atactgtccttactgtaaagccaca

SEQ ID NO: 49150 - DNA, 25 bp, Saccharomyces pastorianus
ttgaacgttcctaaatccaaagccg

SEQ ID NO: 49151 - DNA, 25 bp, Saccharomyces pastorianus
tgtaaagccacattgtccaccttgt

SEQ ID NO: 49152 - DNA, 25 bp, Saccharomyces pastorianus
gctctcgaagaaatttccggccaaa

SEQ ID NO: 49153 - DNA, 25 bp, Saccharomyces pastorianus
ttgtccaccttgttccaggaattga

SEQ ID NO: 49154 - DNA, 25 bp, Saccharomyces pastorianus
gaaatccaggatgctctcgaagaaa

SEQ ID NO: 49155 - DNA, 25 bp, Saccharomyces pastorianus
catcaatggtaagcacatcggtgga

SEQ ID NO: 49156 - DNA, 25 bp, Saccharomyces pastorianus
gttgcggcgaagacatactgtcctt

SEQ ID NO: 49157 - DNA, 25 bp, Saccharomyces pastorianus
caaaaggaggtcttcgttgcggcga

SEQ ID NO: 49158 - DNA, 25 bp, Saccharomyces pastorianus
acacgtaaaggacttgattggccaa

SEQ ID NO: 49159 - DNA, 25 bp, Saccharomyces pastorianus
tccggccaaagaactgtaccaaacg

SEQ ID NO: 49160 - DNA, 25 bp, Saccharomyces pastorianus
acagaatcagaatccgctttcgtcc

SEQ ID NO: 49161 - DNA, 25 bp, Saccharomyces pastorianus
gacctggtcctgtacgtttacaaca

SEQ ID NO: 49162 - DNA, 25 bp, Saccharomyces pastorianus
gtacagccaatacagccagtgcagc

SEQ ID NO: 49163 - DNA, 25 bp, Saccharomyces pastorianus
tttcacctaccacatcttgaacgta

SEQ ID NO: 49164 - DNA, 25 bp, Saccharomyces pastorianus
gatgcggtcccttttccaacagaat

SEQ ID NO: 49165 - DNA, 25 bp, Saccharomyces pastorianus
agactacatcatcggctgtcaggac

SEQ ID NO: 49166 - DNA, 25 bp, Saccharomyces pastorianus
gaaggctactcagccattggtcatg

SEQ ID NO: 49167 - DNA, 25 bp, Saccharomyces pastorianus
ttggtcatggacgactacttcaatg

SEQ ID NO: 49168 - DNA, 25 bp, Saccharomyces pastorianus
aacaaggtctccgactgtgtgaggc

SEQ ID NO: 49169 - DNA, 25 bp, Saccharomyces pastorianus
ggtagagacaagtcatctgctccaa

SEQ ID NO: 49170 - DNA, 25 bp, Saccharomyces pastorianus
ttggttacgggttcctccacaggat

SEQ ID NO: 49171 - DNA, 25 bp, Saccharomyces pastorianus
acgtctcaaagattaatgtcgctaa

SEQ ID NO: 49172 - DNA, 25 bp, Saccharomyces pastorianus
cttgcatcagtcaacagttccctgg

SEQ ID NO: 49173 - DNA, 25 bp, Saccharomyces pastorianus
gatttcttccccaagcttagacaga

SEQ ID NO: 49174 - DNA, 25 bp, Saccharomyces pastorianus
gtaatatctgacacagcactgacgt

SEQ ID NO: 49175 - DNA, 25 bp, Saccharomyces pastorianus
tggaactcccacttttgaccaaggt

SEQ ID NO: 49176 - DNA, 25 bp, Saccharomyces pastorianus
gatgattgccaataacaccgagttg

SEQ ID NO: 49177 - DNA, 25 bp, Saccharomyces pastorianus
agcactgacgtctattgattacttc

SEQ ID NO: 49178 - DNA, 25 bp, Saccharomyces pastorianus
gtaaacttctcaaatgtcaccgaca

SEQ ID NO: 49179 - DNA, 25 bp, Saccharomyces pastorianus
attggtggcgctatctattttgaag

SEQ ID NO: 49180 - DNA, 25 bp, Saccharomyces pastorianus
atgtcgctaagcttgcatcagtcaa

SEQ ID NO: 49181 - DNA, 25 bp, Saccharomyces pastorianus
aactaactgttcactctaatgctag

SEQ ID NO: 49182 - DNA, 25 bp, Saccharomyces pastorianus
gattctccagtttcatccctgaata

SEQ ID NO: 49183 - DNA, 25 bp, Saccharomyces pastorianus
gataactgccatacaaacttctaag

SEQ ID NO: 49184 - DNA, 25 bp, Saccharomyces pastorianus
gaatgtacgatcgtgcgcgtgatga

SEQ ID NO: 49185 - DNA, 25 bp, Saccharomyces pastorianus
atatggagagcccttacttacatgg

SEQ ID NO: 49186 - DNA, 25 bp, Saccharomyces pastorianus
caaacccaaactcttcgtcatttag

SEQ ID NO: 49187 - DNA, 25 bp, Saccharomyces pastorianus
ttgaatccaccaggataactgccat

SEQ ID NO: 49188 - DNA, 25 bp, Saccharomyces pastorianus
gataacgccttctaatcataacaaa

SEQ ID NO: 49189 - DNA, 25 bp, Saccharomyces pastorianus
tagattcaggttgtccacatttaca

SEQ ID NO: 49190 - DNA, 25 bp, Saccharomyces pastorianus
aattccgaaataccctcttcagaat

SEQ ID NO: 49191 - DNA, 25 bp, Saccharomyces pastorianus
tgggcaaactgtgacacccatcaca

SEQ ID NO: 49192 - DNA, 25 bp, Saccharomyces pastorianus
ataaacctgtctttgagctggattc

SEQ ID NO: 49193 - DNA, 25 bp, Saccharomyces pastorianus
ttcgaatgtgactttcccagtacgg

SEQ ID NO: 49194 - DNA, 25 bp, Saccharomyces pastorianus
aaaactcaccgaagagccttccctg

SEQ ID NO: 49195 - DNA, 25 bp, Saccharomyces pastorianus
tccctggccgacagatcattattcg

SEQ ID NO: 49196 - DNA, 25 bp, Saccharomyces pastorianus
gacactagaaaaactcaccgaagag

SEQ ID NO: 49197 - DNA, 25 bp, Saccharomyces pastorianus
gaagagccttccctggccgacagat

SEQ ID NO: 49198 - DNA, 25 bp, Saccharomyces pastorianus
ttagtcaaggacaaagagacactag

SEQ ID NO: 49199 - DNA, 25 bp, Saccharomyces pastorianus
ctggccgacagatcattattcgaat

SEQ ID NO: 49200 - DNA, 25 bp, Saccharomyces pastorianus
tagaaaaactcaccgaagagccttc

SEQ ID NO: 49201 - DNA, 25 bp, Saccharomyces pastorianus
cgaatgtgactttcccagtacggcc

SEQ ID NO: 49202 - DNA, 25 bp, Saccharomyces pastorianus
gccgacagatcattattcgaatgtg

SEQ ID NO: 49203 - DNA, 25 bp, Saccharomyces pastorianus
cttccctggccgacagatcattatt

SEQ ID NO: 49204 - DNA, 25 bp, Saccharomyces pastorianus
atagcggtttctcccaaaatcacaa

SEQ ID NO: 49205 - DNA, 25 bp, Saccharomyces pastorianus
caaagtactctgttcgctcgatagc

SEQ ID NO: 49206 - DNA, 25 bp, Saccharomyces pastorianus
agtccctggacatattcttctagtg

SEQ ID NO: 49207 - DNA, 25 bp, Saccharomyces pastorianus
ataactgtgggcctcatagcggttt

SEQ ID NO: 49208 - DNA, 25 bp, Saccharomyces pastorianus
aagatcggctttcagctttgacacc

SEQ ID NO: 49209 - DNA, 25 bp, Saccharomyces pastorianus
gacgaggatcttttagccatgtgtt

SEQ ID NO: 49210 - DNA, 25 bp, Saccharomyces pastorianus
ttttgcccacttttaactcagagcc

SEQ ID NO: 49211 - DNA, 25 bp, Saccharomyces pastorianus
gcgcattttgttttgccaattccag

SEQ ID NO: 49212 - DNA, 25 bp, Saccharomyces pastorianus
gagaatcgataacccttttgccaat

SEQ ID NO: 49213 - DNA, 25 bp, Saccharomyces pastorianus
gcaagtgcccaagaggtttatccct

SEQ ID NO: 49214 - DNA, 25 bp, Saccharomyces pastorianus
ataagttctcggtagtccctggaca

SEQ ID NO: 49215 - DNA, 25 bp, Saccharomyces pastorianus
acgtttgctgcagccgaaaagaaca

SEQ ID NO: 49216 - DNA, 25 bp, Saccharomyces pastorianus
agaaagctcacgacacgtttgctgc

SEQ ID NO: 49217 - DNA, 25 bp, Saccharomyces pastorianus
gaacagacactggaaactaactaat

SEQ ID NO: 49218 - DNA, 25 bp, Saccharomyces pastorianus
aaagctcacgacacgtttgctgcag

SEQ ID NO: 49219 - DNA, 25 bp, Saccharomyces pastorianus
gaaactaactaatacagaaccaaag

SEQ ID NO: 49220 - DNA, 25 bp, Saccharomyces pastorianus
gggtgaggacttaaagcagaaagct

SEQ ID NO: 49221 - DNA, 25 bp, Saccharomyces pastorianus
gctgcagccgaaaagaacagacact

SEQ ID NO: 49222 - DNA, 25 bp, Saccharomyces pastorianus
aagcagaaagctcacgacacgtttg

SEQ ID NO: 49223 - DNA, 25 bp, Saccharomyces pastorianus
gacacgtttgctgcagccgaaaaga

SEQ ID NO: 49224 - DNA, 25 bp, Saccharomyces pastorianus
acgacacgtttgctgcagccgaaaa

SEQ ID NO: 49225 - DNA, 25 bp, Saccharomyces pastorianus
tcacgacacgtttgctgcagccgaa

SEQ ID NO: 49226 - DNA, 25 bp, Saccharomyces pastorianus
tcccaaggatcaaaacaggcgttct

SEQ ID NO: 49227 - DNA, 25 bp, Saccharomyces pastorianus
cctgggtgctatgggtgctttctta

SEQ ID NO: 49228 - DNA, 25 bp, Saccharomyces pastorianus
tatgggtgctttcttaagcacatct

SEQ ID NO: 49229 - DNA, 25 bp, Saccharomyces pastorianus
cacgaaggctacctgggtgctatgg

SEQ ID NO: 49230 - DNA, 25 bp, Saccharomyces pastorianus
tgggtgctatgggtgctttcttaag
